United States Patent Application Publication US 2009/0077685 A1 - sequence listing, part 2

SEQ ID NO: 7553 - DNA, 438 bp, Glycine max
  Clone ID: jC-gmle01810026d11d1
aggacaaaaggaaaaggcaccaaattcaatttaagtggacactttaactcaaaattatagaggaagacagtccaatatgaaaaatatagtaaaatcatctcaaacttggcaatcttctctttgcacctaagacattgagaattctaagaatgttacacgcaagtcccatcacaacttctagcacttggatcagcacaaccttcaggaacagaaatatttacttgccaagtttgctttgcctccaattcaagattggaagaaagttcccctgttaatagcatcctcgttagcatttccaagtgcagcctcgttcaagtacttgtcagccaattggactctcttgacattctcttggtcttggacaagcatgttaccatacgttaagagcttcttcagagtcatcttgggctgctcaaaggttggaggtccatcttttga

SEQ ID NO: 7554 - DNA, 463 bp, Glycine max
  Clone ID: jC-gmle01810026d12a1
ttggtgtgttgttttcgattatactagttcgctttcatctcccttctttctttccttttacttccactctctctctctctcctttgtgtttttaatttgcttcttcatattgtacgtaccgacatgactccaacctgatggggttaaacactgcttctgcgtaggattcgatgccgctactccttcttcagtttctacaactgagtttcatataaagctgcttactacaaaccaacaagattaactaagaaatcatcttttgggacgatgcaaactgtttatcttaaagagcacgaaggaaatgcgcacaattttgtgggcacgttgtcttctgcagcttcagcaccctggtggaatgcttttggatctcaatctgttcatcagggagagtcttgtggccaagtgaaaccctattcattggagctgccaaactgcatagaccaacttgctgccactaagccac

SEQ ID NO: 7555 - DNA, 502 bp, Glycine max
  Clone ID: jC-gmle01810026d12d1
aaacttaagttgattgagttattataaatagtatttgattttcactagataaaaaaaaattaggtcgacaggattttaaactattttagcttaaatcattaaaatttagataacaaataatcttgagagtaaatgcatgcatagtgtcgatggcggtatattagtggctcaacgaacttgatccctcaatttaagctttaaaatcagagttggatgatccaccttcttccatggcccgcctagcttgatgtgaaagcacctttgctttgctcctcattccaatggcttcttcccctgtcattatcctcttcactgccttctacactgcatcacatgaaatactatctccctgcattccaagccatgttttagcaccaacaggtaccccaattttaaggacctcaatcaccaacttctcattgaaaaattggccggcgaacataggccaagtgaccatgggaacccctgcagtcactgcttgcaacgttgaattcatccacat

SEQ ID NO: 7556 - DNA, 607 bp, Glycine max
  unsure at all n locations
  Clone ID: jC-gmle01810026e01a1
cttgtgatcttcttcaaccttcatagtgagaaaacacattcagaaaccacgtttctctcttcttcttcttcttcttctttttcttctctcgaggtcattattaagtattcaccatggaggcaccatctcccaccaaacccaacgacccaacaaaaccttccaacacttccaccacccttagtctggaggccggcccggcccaagcgagcccactccgaaaaatgtttgccgtggcgtccatcgccgccggcatacagttcgggtgggctctccagctctctcttctaaccccctacgttcagcttttaggagtcccccacgcggcggcctccttcatctggctctgcgggcccatctccgggctcgtggtacagcccattgtgggctactacagcgaccactgtacctnccgctttggtcgcaggcgcccctttattctcgggggcgccttagccgtcgtcgtcgccgtgttcctcattggttacgcagccgatataggatacgcggcgggcgacgacatatcgaaaacgacccgacctcgagcggtcggtgtcttcgtcataggaatttggatcctagacgtggccaacaacatgcttcaaggacc

SEQ ID NO: 7557 - DNA, 477 bp, Glycine max
  Clone ID: jC-gmle01810026e01d1
gcggcacccaccatgaaagccggcaagttgccaccaccaaacaaagcatcccaaggaccacttaatgtagacaccaccatctgtggcaccacaattgcaagattgaggactcccaaagataaaccttggcctgctcctgaagcgctgcagtatattgatgctagagcaaatggaacactgaaagtaatcgcaagaggaactccgagaaccccaaagaaaaccatggacccaaccaccaccccttcggaggggtgacccacggcggcgggattcatcttgcgctggtgctccgccaccttggtgatcaccaccgtcattccgaacccaattgccagaataaagttcacaatcgcccacagcctcttcactcccccaaccatcttccccaacggctccaccgccagcgacatgaagcccaaaacgacggcgtttaccatcagccctagcgacccaacgcgcactccattggcgtacgcg

SEQ ID NO: 7558 - DNA, 545 bp, Glycine max
  Clone ID: jC-gmle01810026e02a1
ggatattctggaaggggtggcttttctccggatctccaatgacattgaatttgaggagcagagtgtcatggctttgatgaatgagtgaaaggagagacgggcaaggcaaaacgctgatccttctgctgtcccaatggagattcgagctgcgaaggctcttgatgctatctatgcgtgttgctttggaaaggactccatagaggaagaagacaagagactgttgactgcaatgctaggcgctgttttcgcatcagttcaacgcgaagagatccggcgccttgtcaaagacaaggcatacaaagtagcagcaggagttgatgatgaatatgtctcagaactcaagcctatatcaaaagaagctgtggaactacaaatgaaagaccttcagttccttcaacagaatagtgagacttaactacgtgaagcctgtgatttccactacacagtgatgcattgaatgaaattatatgttgtgaactaagccgatttaacctttggaggctactcaaagaaaacagacagtcatcatagatcacactagtatt

SEQ ID NO: 7559 - DNA, 542 bp, Glycine max
  unsure at all n locations
  Clone ID: jC-gmle01810026e03a1
tgcaattgaagttaaaagccttagccttccctacaactccaaacacaaagacatcatcatccatggctgcctccgtctccactgtcggagctgtcaacagagctcttttgaacctgaatggttctggagctggagcttcagctcccagttcagccttctttgggaccagcttgaagaaggttattgcctcaagggtccccaacagcaaggtttccggtggaagcttcaagattgttgctgtagaagagaagaaagagattgaagagacccagcagaccgacaaggacagatggaagggtcttgcctatgatatctcagacgaccaacaagacatcacaagaggaaagggtttggttgactcccttttccaagctccacaggatgctggaactcactatgcagtcatgagctcctacgagtacctcagcactggacttcgccagtacttggacaacaaaatggatggattctacattgctccagcttttatggacaagctnngtgttcacatctccaagaacttcatgaccctgcccaacatc

SEQ ID NO: 7560 - DNA, 405 bp, Glycine max
  unsure at all n locations
  Clone ID: jC-gmle01810026e03d1
aggacaaaaggaaaaggcaccaaattcaatttaagtggacactgtaactcaaaattatagaggaagacggtccaatatgaaaaatatagtaagatcatctcaaacttagcatcttctctttgcacctaagacattgagaatgctaagaatgttacacgcaagttccatcacaacttctagcacttggattagtacaacaaccttcacgaacagaaatatttacttgccaagtttgctttgcctccaattcaagactggaagaaagttcccctctgaatagcatcctcgttagcatttccaagagcagcctcgttcaagtacttgtcagccaattggactctcttgacattctcttgttcttggacaagcatgttaccatacagcangagcttctccagagtcatc

SEQ ID NO: 7561 - DNA, 496 bp, Glycine max
  Clone ID: jC-gmle01810026e04a1
cttgagctatgtttcagggataatagggcagggatgtacaaagaacgagagcgaggtggtgtttccgtttccgcctctaaatccgaggatcggaagcgaatcaacgacgttctcgataagcacttggaacgatcctctccttccacttcccgccccatcaacaccgcttccaagaattccaacctccaagtggaggaatctgagacggagagtgaagagtctgatgttagtggctctgatggggatgacacctcttggatctcgtggttctgtaatctaagagggaatgagttcttttgtgaggtggatgatgattacatacaggatgactttaacctctgtggattgagcagtcaagtgccctactttgattatgcccttgatttgattctcgacgttgagtcatcccatggtgacatgttcacggaggaacagaatgagttgatggaatccgcggcggaaatgctttatggtatgattcatgctcgatatgtgt

SEQ ID NO: 7562 - DNA, 407 bp, Glycine max
  Clone ID: jC-gmle01810026e04d1
gtaattcgagacataaccatagacaatattaagttaattgcaagaatacaatttgtaaaaagccattaagaagtaccatcgagtacctaagcacttgctcattgaatcagaagctgaaactaagcacttgcttcacatgtctgcatatttctttacaacaagctcctataacaagtaaaacagatgcctagattgtactggtttggaaagcatatgattcgcctgttgttgcaaagagaaccataagaagagttaaatgagacacggggagatttttactttcatgaaagcttcaacttcggctttatggcttgtgaactttgaacccaaaaactctcggaacatagccttgtgctggtttctgtggcttcagttggccataagtcatcaagaaaggtgtggaaatg

SEQ ID NO: 7563 - DNA, 512 bp, Glycine max
  Clone ID: jC-gmle01810026e05a1
aaagattttatccaattgaaattttaaaaatgactgggataaacttaagaattcaattattgaaattgaataagtaaacaatttaattggattggtcgaatggtatcaaaaaaatggagtactaactcccatttcttatttatcattgaattaaccgatcaacttgctttgatatcgaacatttctttttgatttcaaaaattttccggaaaaaatttgaatctatttttatatgcgaatcaatcctactacttctggtcctgaggtttctgcgcttgaaaaaaaaaatctgggacgtatcgcccaaataattggtccggtactagatgtagcttttcccccaggtaagatgcctaatatttacaacgctctgatagttaaaggtcgagatactgttggtcaacaaattaatgtgacttgtgaagtacagcaattattaggaaataatcgaattagagcttgagctatgagtgcgacagaatgtctaatgagaggaatggaagtgattgaca

SEQ ID NO: 7564 - DNA, 308 bp, Glycine max
  Clone ID: jC-gmle01810026e05d1
aggtattccgatattcggacccctcaacttgttatgaaatcacattggtagcctttactcgggtcctaactcgtttaagagctaaatttgccccaattggttggcttttgccttccgccttattcaaattagcttctggtatttcaagaggttggtgggctttttggggatcaatggcactacccttttccgcatcatttactaaaacggggatctcattattggttattctagcaaaaccgcccatcaaagccattgttaaccattggtctttaagaaaacgtattctcaaaatacctatatctacc

SEQ ID NO: 7565 - DNA, 431 bp, Glycine max
  Clone ID: jC-gmle01810026e06a1
tgtaaatcaaatagaaatttatttaatctatgatcctagagtagtttcctagacaaaatagacgtaagttcacaaacaagattcaagaataagattctctgatgaagggagagaaatatgtctgacgatccgctgggtataaggagtgaaagatgggatcatctgtttcttgaacaggtcttttaaaaaaatgttatatcggattatcgagtcataggagatactatgattgatgacttggaggatctttaagaatagagaggagtacctacattgagttcatcgatttgctcctagatatcaatagactcataaattattgtgtatgtcgaaaccaattaaaattaaaaaagaagggaaagtgtacgagacaattatctctctctatatataaataaattagtaaaacagtgtgcaactatcactttttc

SEQ ID NO: 7566 - DNA, 429 bp, Glycine max
  Clone ID: jC-gmle01810026e06d1
gaaaaagtgatagttgcacactgatttatttatttatttatatatagagagagataatttgctcgaacactttcccttcttttttaattataattggcttcgaataaaaaataatttatgagtctattgatatctagggcaaatcgatgaactcaatgtagctattcctttctattcttaaaaatcctccaagtcataaatcataaaatctcctatgactcaaaaatccgatagaaaatttttttaaaagaactgttcaagaaacagatgatcccctctttcactccttatacccagcggatcctcagacatatttctctcctttcatcagagaatcttattcttgaatcttgggtgggaacttacttctattttgtctagggaactactctaggaacatagattttataaatatctatttgattgaca

SEQ ID NO: 7567 - DNA, 403 bp, Glycine max
  Clone ID: jC-gmle01810026e07a1
ggtacaactacaaaggttgttggatgagataacatattgaagtactgctaagtgcctaacacctgcactgaacactggcctctgcatcagcatctacactgacgtcaacactggtcaagagactacgtctgagagcgtgaagggacaaacagcttcgccaaccttctgctgcatcagttgagagatgcaacctcgccacgccatgaagcctcacaatcagagctgattcctatgctgatgatctcgttacgaccgtgaaaacagaggcttcaccagggatgggtattgaggacatggatgagtccaatgctacctgtgggaagcgtttggctctaattgggctagagaacactgaagctgaccgacaggcgtaccgtaccatccttgtgacacggtcaggact

SEQ ID NO: 7568 - DNA, 327 bp, Glycine max
  Clone ID: jC-gmle01810026e07d1
cattgattgccgagattcaaccatgttatattgagacaatcaatcaagtacacaactcacagcaaaaaggtttataagctgtaaaggtacatgtaaccataaacaaaaatagtctccaagactataaaaacattacattttagacaaattagtcttcttccacttcatcctccgtcaacacctactacaactgctggtgttgctgctgcctaacatgtatcatattcactacaaacatcttagtatgagtagcctatgacgaacaactcctttttggcttcctcagattcaccctcaccggtgtacttccaaagctgggcgagcgag

SEQ ID NO: 7569 - DNA, 471 bp, Glycine max
  Clone ID: jC-gmle01810026e08a1
cgcgtgtactttcttgcgaatttgaagggcgaaggggcaaacacaacttttttgtttttttgtagagcgagagagaaaaaaatgttggggatcttcagcagttccgtggtgtcgccgccggaggagctggtggctgccggcagcagaacgccgtcgccgaagacgacggcggggaagctgctgaaccggttcgtggagaacaaggcgtcggcggtgtcgctgcaggtgggagaacacgtgcagttggcttacacgcaccacaacgagtcaccgtggcatcccagatcatttgctgttaaggatgagatattctgcttgtttgagggggctctagacaatttgggcagcctgagacaacagtatggactggccaagtcagccaatgaagtggttttggtgattgaggcttacaaagctttacgtgatcgagcaccataccctgccaatcgtgttgaatgccatctcagtggg

SEQ ID NO: 7570 - DNA, 471 bp, Glycine max
  Clone ID: jC-gmle01810026e09a1
ctgaagaagtgtcatatggtttcagtggctctaaatatacgtggggtaaaatgtttgtgaatggagccgaaatatcaacttctggaagaagtgatactgtcctccaaagtaacaatggaagtgcttggatccctaaggacaatggaaaacataataagcatgtgcagcatgaaagtttcaacggcaaaggggagatgctactgcatggaaaccttgtcgcaaagatgattcaagttaacattccaagatataacgaagtcctgccatgtttataaagttggcaagcccagaaaattgcttcttggcacaatatggaagggcactccatccaatggttatctgtagtatgtatagaccgaaaaggcatgatggctgaaggcactacagcattggccactgcaggcatagccatatgttcgtgtgtggctgacattgatggatgaagtggaatggctgttatggtatttcacg

SEQ ID NO: 7571 - DNA, 560 bp, Glycine max
  Clone ID: jC-gmle01810026e09d1
caatcattaaacatgccatgactagaatccaatattataatctcttttctctcatcaagcccaacaaatctaaaactgtttacaaatacatttttttttccgattgaacagaattcgaacacatacgcactttcaattttctgcacaaaactgttcttcgccgaagccctacagcctaaaaatcaaacggtaaggccttgtggggcaccagctacaggtgccttgggcttaggtttctccaccacaatggcctgcgtggtcaacaccattccagcaactgaagcagcattctgcaaagcacacctagttaccttggcagggtcgataactccagcctccactaaattctcatacctgtctgccatggcattgtaaccgacctcccattcaccactctttattttctccacaacaacttcaccttctattccagcattttgagcaatcaatgctgcaggagctatcagtgccttttgcacaatgtcagctcctagcctctcatctgcatcctcaagcttgtccttgattgctgggacatgagtggagagatgaaccatgca

SEQ ID NO: 7572 - DNA, 582 bp, Glycine max
  Clone ID: jC-gmle01810026e10a1
cacaagatgagatgagggcatttatgagctactttcatgagacaatttggaaaggtgtaccacagtttctgcgtcgggtagatacagctctgaagaacattggaattaatgaacgtgtcccatataatgctcctgttattcagttctcttcttggatgggaggagaccgtgatggtaatcctagagtaacccctgaagttacaagggatgtgtgtttgctggctagaatgatggctgctaatatgtacttctctcagatagaggatctcatgtttgagttgtctatgtggcgttgcactgacgagctacgtgttcgtgctcatgaactccataggtcctcaaagagagatgcaaaacattatattgagttttggaaacagattcctccaaatgagccatatcgtgttattcttggtgatgtcagagacaaactatataacattcgggaacgtgctcgccatttattagccaatgggacatctgatatccctgaggagacaaccttcactaacgttgagcagtttctggaagccccttgactatgctacaggtcactctgtgcatgtggtgacagaccaatag

SEQ ID NO: 7573 - DNA, 427 bp, Glycine max
  Clone ID: jC-gmle01810026e10d1
caaggtaagaattttattgcacaatgagaaggcagagaaaattgatggttctgtttctcagtacaagtttaaaagaaaaatgaagcaacaagtgttgtagtggtagtagtagtaggtaagcatacaaaattacaatggcatggtacatacataataatttaattaccaatgagaatttgtttggctctcacttccatttgttggcaacaatgtcagccaaatccacaaccctttgggagtagccccattcattgtcataccaagcaatgaccttcaccatgtcatctcccatgaccatggtcaacgaggagtcaacggttgaagacacatcagtgcacctgaagtcaacggacacaagtggctcatcacacacagagaggattcccttgagctcattgtctgcactctctctgaatgctgcattcac

SEQ ID NO: 7574 - DNA, 533 bp, Glycine max
  Clone ID: jC-gmle01810026e11a1
ttttacattgctccagctttatttgacaaacttgttgtttacattaccaagaacttcatgaccctgcccaacatcaaggttcctctcattcttggtatctggggaggcaagggacaaggaaaatctttccaatgtgagcttgtctttgccaagatgggaatcaaccccatcatgatgagtgctggagagttggaaagtggaaatgcaggagagccagcaaaactgatcaggcagagataccgtgaagccgcagacttgatcaagaagggaaagatgtgtgctctcttcatcaacgatcttgatgcaagagctggtcgtcttggtggaaccacccaatacactgtcaacaaccagatggtgaatgccaccctcatgaacattgctgataaccccaccaatgtgcagcttcctggtatgtataacaaggaagagaatccccgtgtgcccatcatcgtcacccgtaacgatttcttcacactctatgcgcctctcatccgtgatgggcgtatggagaagttctactgggcaccaac

SEQ ID NO: 7575 - DNA, 247 bp, Glycine max
  Clone ID: jC-gmle01810026e11d1
aaagaatggttaaaaaataagggtttgtcaagaatcattcgttttaaaaaaatgaattccacccggaaaaggggcccaatttacattcatgggacgagcaagtccaatctcaatcctctccaaaagactggtcaatgacttccccctgaaccggatcccgaagtgcgccatgaatgggggctgggggctgaaacaatctgccaagactggtgggacctcctccttttccaacagtccctactttccc

SEQ ID NO: 7576 - DNA, 141 bp, Glycine max
  Clone ID: jC-gmle01810026e12a1
tttcatttttatgtgccaaatttagagtttctaacttacattacttccattgattcatagttttgtttggcccttttttccttaatttttttaaactttaatgtgacttgttggataatatatggagtagagtttggattt

SEQ ID NO: 7577 - DNA, 452 bp, Glycine max
  Clone ID: jC-gmle01810026e12d1
attcttaaaacactgcagattttctgaatttgttcaaaatacaagagccttgttactgtagaaccacacattcttgtgaaccagccaccaccaccacagtagggtgttcgcttgtgctgactgcatcaacttcttttttgacactttgaacattgacatcctccaattcaccacagccaatggcttcaaaaacaagatcattgacttcttgaaacctctcttgagaaagggacacctcagcaagaagcctccaagcattgccttcagacgcctcatcataatccttcctcctctttaaaaccatgtgtccactaatttcccacacagcaggattcacttgggtgtcaagaagctcagcattcacttctccaagagcttggttctctgcataacactgtggtaacagatacacttgctttccacagtcagagataagaacattgaaaggtatg

SEQ ID NO: 7578 - DNA, 438 bp, Glycine max
  Clone ID: jC-gmle01810026f01a1
ctggggagaagaatgttctcatttttgatctcggtggtgggacttttgatgtctctcttctcaccatcgaggagggtattttcgaggtgaaggccactgctggtgatactcacttgggaggtgaagattttgataacagaatggtgaaccattttgttcaggaattcaagaggaagaacaagaaggatattagtggaaatgccagagctctgaggaggttgagaacagcatgtgagctggcacataggactctctcttccactgctcaaaccaccatagagattgattccttgtacgagggtattgacttctacacaaccattatccgtgccacgtgtgaaaacctaagcctggatttatccaggaagtgcatggagcccgaggagaaatgtttgtaggatgccaagatggataatagtgcctgacatgatgctggtc

SEQ ID NO: 7579 - DNA, 476 bp, Glycine max
  Clone ID: jC-gmle01810026f01d1
gagcaaaaacttatatcattgttcaagtagaaacggggaaaagtgcattaaaaaaaaaaaagaaaaataaaatcgcaataaaaacataatgacacgctgttatctaaacttcaaaagggtctttgacaaaatcaagaacaacccatgagaatcttctgcttaatcgacttcctcaattttgggtccagcaccgcttccactgccagctgcaggaccatcctcatacatgggtacacccgcatcaccaccagcaccctggaacatctttgctatgatgggattacaaatgctctccaactccttcatcttatcctgaaattcgtcagcctcagcaagttggtttccatatagccattggatagcctgctgaatcgcatcttcaattttcttcttatcatcagaagacagtttggaagcaaacttgtcaaccttgattgtgctcctcatgatataggcataattttccaatgcatttt

SEQ ID NO: 7580 - DNA, 456 bp, Glycine max
  Clone ID: jC-gmle01810026f02a1
atatattctgtcaatggtcattttagtcttgacagtctatgtcgttgctttatctgtcctatgttaataagattttgatgatcgtaatcttggatacaactccttatgcttattcgctgagactaactgctagatatgatcctactaatcaaggaactctgtatatgcatatctatcagtgctgatattggatagacatgatctatgaatgaaagatgtcactgtaggatagacctcattacactatttacgaatatattcaacgtgaaaacttgcgtgtcctagtctaagacgggctctagaaaggaacagtctgtgtcgtgcattacaccatatgtggaactgaagcctattacgaatgtacgcctgagcttcaattgtacgtgcaggatcttctctcatgacctattagcaacttaactggggctggcctagactagtcactacacagtgatg

SEQ ID NO: 7581 - DNA, 355 bp, Glycine max
  Clone ID: jC-gmle01810026f02d1
aaataataaaatggcattggagacatgcattacttgtccatttataatgcaaacaaaaggtacatgaaatttctgcattctcagaaatgtcatgacccctcattttagcatgtatcagaaaaataatcgtgtgaacaatgatgactgtctgtcttctatgaggggcccccaaaggctaaatagggttagttgacaaaaaatagttttattcaatgcatctctgttaagtggaaatcacaggcttcacctagggaagggtcactattttgttgaaggaactgaagggatttcatttgcagttgcacaggttggtttgcttgaggcttgatttctgaaacatagtcatcatcaaaga

SEQ ID NO: 7582 - DNA, 578 bp, Glycine max
  Clone ID: jC-gmle01810026f03a1
atcgctctgttgttttcaaagaacctcgttttgttgaatatttcagatgtgcaactcctgagttggagtatggaagaatgaacattggcagtcgtccatcaaagcgaaagccaagtggaggaattgaatcactacgtgctattccttggatttttgcatggacacaaacgaggtttcatttgccagtgtggcttggttttgggtcagcatttaagcatgtagttgagaaagatccgaagaatctccaaatgcttcaggacatgtacaatcaatggcctttcttcagggtcaccctggacttggttgagatggtgtttgctaagggagacccggggattgcagccctatttgacaaactcctagtatcagaagagctgcgtccatttggagaaaatttaagagctaaatacgaagaaaccaagagctttctccttcaggttgctgggcacaaggatattcttgaaggagacccctacttgaagcaaagacttcgtcttcgtgactcatacatcacaaccctcaatgtgtgcaggcttacacattgaagcgattcgtgatcctgactaccatgtgaagtg

SEQ ID NO: 7583 - DNA, 410 bp, Glycine max
  Clone ID: jC-gmle01810026f03d1
gaccaaaaccttgttttattgtatgatgatactatattgataacaacagaggaacaattatttgatattggtggaaatctgtcgtagacataataggttataatgcttatatatccatgaaacaatcacaacacacatcatataacaagaaaaacaccacttctatggcaacttaaccggtattttgcattccagcagcaatacccttcattgtcaaaataagggtgtcctcaagaccaggagcatactctcttttggggttaagattaacaagctctgctgctggcttgcttgattccatgtagtcctttgacaagtgtggcctcaacttcacatggtagtcaggatcacgaattcgcttcaatgtgtaagcttgcaacacattgagggttgtgatgtatgagtcacga

SEQ ID NO: 7584 - DNA, 389 bp, Glycine max
  Clone ID: jC-gmle01810026f04a1
cttgagctgtgattcactgatattagggcacgtatttacatggaactacatcgatgctggagctttcgcttacgcctatcacttcggtgatcggaaccgaatcaacgacgtcaatccataagcacttgggacgaacctatagtttcacttgccgtcacatcagcaccgccttacgaattatcaacctacgggatgaagaatctggtactgagagtgtataccctgatgttgatggctctgagggtgatgacacctataggatctaatggttctgatatctatataggcgctgagcgcttgcgtgaagtggatgaagactccatacaggatgacagtaacctttgaggatagagcagtcaagtgctatacttggataatgcactggatct

SEQ ID NO: 7585 - DNA, 321 bp, Glycine max
  Clone ID: jC-gmle01810026f04d1
aaggaaatgaagacataaccgtggacaatatttagttaatcgcaaggaggcccttcgtaaaaagccattaagaagatccattgagggcctaatcacttgctcattgaataaggggctgtaactaagcccttgtttcaaatgtgtgcatatttctttacaacgggctcctataacatgtaaaacagatgcctatgttgtactggagtggaaggcatatgaaccgcctgtcgcagcagggagaaccatgggaggcgcttactgatacacggcgagaagtttactttcatgaaaggttgaactagcgatttgtggcttgtgaac

SEQ ID NO: 7586 - DNA, 488 bp, Glycine max
  Clone ID: jC-gmle01810026f05a1
ggctccttgtaaagattgtgatgcactatatatgatgctgtatggactagtgcagatcataatgtcattcataccagatctccacaacatggcatgggtttcaattgttgcggccataatgtcctttacatactcatctattggacttggacttggcatcacaacagtaatagaaaatggaagaatgatgggtagcttaacacgagttccggcttcaaatattgctgacaagttatggttagtcttccaaggaattggtgatattgcctttgcctatccatacacagtcatgctgcttgagatacaggacactctagagtctcctccaccagaaaacaagaccatgaaaaaggcctccatgattgctatcctcattacgacattcttctacctatgctgtggatgctttggatatgcggcttttggaaatcaaacaccaggataccttttgacagggtttggatgtaccagccttactggctcattga

SEQ ID NO: 7587 - DNA, 367 bp, Glycine max
  Clone ID: jC-gmle01810026f06a1
cttcgatttcgtcctctacagttttccaagtccatttctctttcccaagatctcccttaacacgtaacatcaataaacacaaagcttctatctctttcagctcatggtgggtgtcaattctgcattgagatgcctaatctgggtaccttccaaatttgaggcatcttacatcctgtgggcaaagtgtgcatctctgactgtgcctatcaagatggctgggagcgatagctcgaagggtgcgggcaggaggcgatacggtgagtgcatcaatgagatttctgggttgccagagaggcagaccttgtgcaagaaggtgtctgggaatttggctcgcatgatgaagcttgagagtgctcactttgaggaa

SEQ ID NO: 7588 - DNA, 394 bp, Glycine max; identical to SEQ ID NO: 7513
  unsure at all n locations
  Clone ID: jC-gmle01810026f06d1

SEQ ID NO: 7589 - DNA, 302 bp, Glycine max
  Clone ID: jC-gmle01810026f07a1
tagaggactacatctatgaaacgatcatcaaggctagagggtcatcagcaccccatctgagcttacatgtctgaggaagtatttctcatacttcggcctaggctggtggcatggtagctctattacgttcgcttattaagagaacatgcctgtgatacaaaaggagcttccacttactctaccaattaccaccgtcaccgttcagaagtagcctccaccgaccaccgcaggcgccacaaccatcctactttgaaccgactgcctgatacctaacaaagtattccactctgcatccattgcgc

SEQ ID NO: 7590 - DNA, 341 bp, Glycine max
  Clone ID: jC-gmle01810026f07d1
actcgtccgcggccgccctttttttttttttttttttttagaaattaaactgtacgtttatctaattaaccaagtatatatagctttatgtatggaattaagcattaattgtgtactatataataattttgtacgtagctagctaaaagtgaaaaaaaaaagagactaatcttaatttggtgttgattatactcaccattttaatctcaattcctcaaatcaagaattaatatatataatctatcctgccaagtcatgcagaagctgtgctcccatcaaattcctgtaaggcaggttatgtccttcaccgtccaaaagagagtactgatgaactggttgac

SEQ ID NO: 7591 - DNA, 221 bp, Glycine max
  Clone ID: jC-gmle01810026f08a1
accaggttcacgttttcacattttatcatggtcacggcaacagcagctgccacctcgtactttatggggacacgtatcctggaggctcactccggatcggggctagtgcacgacccgattcgagttttctgaaacaaaaaggctcgagtgccacataaatgcctccaggggatcgagccgagacactcgacagatcccgattggtatagcagctcgccaaa

SEQ ID NO: 7592 - DNA, 377 bp, Glycine max
  Clone ID: jC-gmle01810026f08d1
caaaacccagggagcaggaagggacccattaatatcgtacaaaatccctacttgacgcgacctttttgggtttgcgaaattggaaaccccctaggctttgaacgtggaagggtgaaaaccacgcccattttcttggccaaacgcacatgtgcggggcaccgggcattaaacctgccgccttggtaacaacaaaggcatttgcgtgaccaggggggcccagccccgaccgaaatccacactcgggccgatgcgaccacccggtggaagagggtcattcacgcgaccgggccgggactaaatggcgattctgtgttcagcttcaaacccaagggtgctaccagccaagttttcggcgactccagaagtcgggctggcga

SEQ ID NO: 7593 - DNA, 293 bp, Glycine max
  Clone ID: jC-gmle01810026f09a1
tagtcgatttcataatctataagtatgagcacatgtatattaccggctactacagaccgcagcctttgtggggatcctgactctaaaatctgttcgttgccacacagcaacagcacacaaccttaaccatccgaggcatcattccacagttgctaccaacttgatgtcacactctcagggatgggctacgctctactgacgtgccacttacgatgaagtagacactcacactgtggatgatgaactttgacaggagaataaggaggaagaaaacaccaacgatgactacacat

SEQ ID NO: 7594 - DNA, 523 bp, Glycine max
  unsure at all n locations
  Clone ID: jC-gmle01810026f09d1
aatgggaaacagaagccactcatccaagttattgaaaattcaatattttatccattcatgaagagcctagaaatgctcatctgttgagctaattattttccctcctttcaagggccaccaaaaaaaattgaacgaagtttggaactccgatcacttttctcaaaaatgaataaaaacctcaaggtttgagggcaatagccaatccaaacctgggctttttatccagggccttggtgtcaatctcaccagaaacagtaaacactgactttggtatgatctcatgctgcaggagggccccaagctttccatgattgttgagccttgctttgacctgtgtcagagggtcaacagcaaaagaccctcctactgtaaaaatgttctcatttgttgagaactttctagtgatctctgcaacagcggcactcttcttcaatagatccagatgatggaggtatgatgctntaatgctgtcacccttgtcaccaaggattactgaagcagaagaatcaggtctcgtgacact

SEQ ID NO: 7595 - DNA, 468 bp, Glycine max
  Clone ID: jC-gmle01810026f10a1
accgaagtccacatctgattgtaataagctcattttccatacaatagaatatttagaagtatggctcagctatcgccaccagtatgcatggaggctctgaaaatccacactccatcattgaatctcagatcaagaagctcatggcggatgctgttgaagggtgcaagtccttgaacctttctgacacacagtgggagttagcaaagagggttcggcaaagtacgagttactgctgaagacttagtttctccatctgagaccattgcagaggactattattaagaactcggactgctatcagatgcgacaccagagcatatcacgaaggcatactacatttgcatgagatcttgccaccctgattagaatggaaatgatcctgagaccacatatttctgcatgttcatccgtgcaagctacacggtgcttaatgatcccgtccaacgcatgatttatgatgaaattcat

SEQ ID NO: 7596 - DNA, 487 bp, Glycine max
  Clone ID: jC-gmle01810026f10d1
ccaagaataatgaactttctttcaaaaaaactaaataagggaagaaaaactaatataactgtattttgtcatcaaagccaaattaatacagttcgtgtgaatcatataataactcagccttcgtactttatttttgcaggaggcaaaaggcaatatcacaagctttgacattgacgtgaaatacaagaaacgaaactggcccatgaatgatccaattattaccacgccgtgaagagcaagggaaggactaaggaggggcatgggacccaaaaattgaccagaaccaaccactgatcgtgttagtctacaatttgaggtggggaagggctttgtttatcttcaacggatatttcagtctctaagtcatccatagcctttggtgttaatgccctttcaatcttcatgcctgtgccattgataaccatctctttttctaagtgaaaacagtagctctcaaatacccgagagcttaccataactctaaaat

SEQ ID NO: 7597 - DNA, 495 bp, Glycine max
  Clone ID: jC-gmle01810026f11d1
agaccgagcacactgcaaccataattatgattttataaacaagctttcttatattttccaaagtattactatggttcatctatttctaaaaatttaccttaataggagttgctgcatatacaatcatgggtgggagaatgagaaagaagatctcattggtttaacttaggaggctataaatgaactaattacacgggactaaatgatatagtagaaggtaaatgaagtactgatcacttgtccttgccaagggttgcctctggaagtttaaatgtgggaggcttatcaacacctctacttgagtattccctccatcttcgtgccggtgaagcagctctttttgctctttcttcaactgcctcatctgaactttgatagtctttctgtttgccccaaagattgtcccagtacgaatttttcttatcagaaccttgttccctcatcattctcaataatgcttttgccaagacttttgactgcctcttttcccatctg

SEQ ID NO: 7598 - DNA, 473 bp, Glycine max
  Clone ID: jC-gmle01810026f12a1
aaaaaaaaaaaaaccatcccttttctcttaaacgaccaaccaaaggcaaaacgcacaacaacgatgaagaagcagaagcgctcggaccctcaaaacgacaccactaaccccttcgaggttctcacggaggagctaatgttcgtgatcctggacttcctcgaaacggcggcgccgttggataaaaaatccttctcgctgacgtgtaagtggttttactcccttgaggcaaaacaccgtcgtttgcttcggccgttacgggcagagcacctgcccgcgctcgcagcccgctacccgagcgtaacggaactagatctctcgctgtgcccgcgcgtgggcgacgacgcgctcgcgctcgtcgccggcgcgtacgcggagacgctgcggcggctggacctgtcacagtcgcggcgggttacagggagcgggcttatgagcctcggcgcgcggtgccagtacttggtggaagtggactt

SEQ ID NO: 7599 - DNA, 498 bp, Glycine max
  Clone ID: jC-gmle01810026f12d1
agaccgagcacactgcaaccataattatgattttataaacaagctttcttatattttccaaagtattactatggttcatctatttctaaaaatttaccttaataggagttgctgcatatacaatcatgggtagtagaatgagaaagaagatctcattggtttaacttaggaggctataaatgaactaattacacgggactaaatgatatagtagaaggtaaatgaagtactgttcacttgtccttgccaaggcttgcctctggaagtttaaatgtgggaggcttatcaacacctctacttgagtattccctccatcttcgtgccgctgaagcagctctttttgctctttcttcaacttcctcatctgaactttgatagtctttctgtttgccccaaagattgtcccagtacgaatatttcttatcagaaccttcttccctcatcattctcaaatttgcttttgccaagacttttgactgcctcttttcccatctggaa

SEQ ID NO: 7600 - DNA, 508 bp, Glycine max
  Clone ID: jC-gmle01810026g01a1
atcatccgcagctgctgttattttcaccgcaaacaaacagtgagccatggccgtcggaaagaacaagcgcatctccaaagggaaaaagggtggcaagaagaaggcagctgatccctttgccaagaaggattggtatgacattaaggccccttctctttttcaagtgaaaaatgttggcaaaacccttgtctctcgaacgcatggtaccgagattgcttctgaaggacttactcctagagtgcttgaggtcttcttggctgatcttcaaggggatgacgatcatgcattcatgaagatcacgttgagagctgacgatgtgcaagggacgaatgtcctgacagatttctggggaatggatttcacaactgacaagctgaggtcattgatgcgaaaataggctactgtaattgaagcccatgtggatgtgaagacgactgattgctacacattgaggatggtcagcattggatttaccaggagaagagctcaccaagtgaagagaacctgc

SEQ ID NO: 7601 - DNA, 422 bp, Glycine max
  Clone ID: jC-gmle01810026g01d1
gaaaatacataataatataatgtgattatataagcaagcaaatctgattttgggttctgaacaaaacccatatatattacgcgccaaaaatgtcttctgattgtctaaacaaaactgtgtcactcggcttacacagaaacattggacacaagtttgtaacttcatttacaatgataacgtaggaaaaagaaaacctagaacaaactgaatgcatgatgaaatcaagctccaacaatgtcaggggggtcctctgccactatttcatcagcaggactgactaccttggcaccaacatcctgtgagtaagctcgatgaacctccatcagtttcccaagatcaaacttaggggctttcaggatcttgactttacgaacaaacacattctgcagagggtaaatactaaatgtcgccttctcaatctc

SEQ ID NO: 7602 - DNA, 530 bp, Glycine max
  Clone ID: jC-gmle01810026g02a1
gagtatgttaaagtcaattagcttggcatggcctgctttcaaagctttaaaccagaaggaccactagaggttttgctggatttgggtctaagcgtaagccaaccagaaaggatctagacaaatacgacattgttgtcgttggtggtaacctcagatccatcttctccagacatcttgatgacgatgctcacggaaagtactccatgatggttgtcttaaatgagccagttaaccagttatggcctttgagaactgtctatgaacagcagagatgttccaaaactgattatatgatgaacgctaagcatgggattaatatgtacaccgcttatgaaatcaccacagttgacaaattcctttctgaagagaacgctattgttcttaagaacggaagaaagattcaatatgagcaacttgtcgattctatgggtcttaatgaagacttcgacgccattcctggacttgaggatgcctttgcagatgttgaccacccagtcgtctgatctaaagatcactcttcatggagatct

SEQ ID NO: 7603 - DNA, 289 bp, Glycine max
  Clone ID: jC-gmle01810026g02d1
aaaaagggaatttaacttttagattggttccatcgaaaaagattgaatagtatattgggaattacgtcaaaattttgtgcgtaattcagcaaatgaatccacaatttatttaataggcatagctatagattacttacagttcggcttggattgcttgccttttggggcttggactctttcaggagcgacgttatggccgatttggtcaccagtgtttatgccaggttgaccactgctttgaccgagtttgcctctttgttctctggcaagaccaggtacgctgtccttg

SEQ ID NO: 7604 - DNA, 580 bp, Glycine max
  unsure at all n locations
  Clone ID: jC-gmle01810026g03a1
gtcatgatgcagaagctcgtgcttcgtagtgcacagcacggcatgcgcgcatctgcggtgctgggcgcttcttgtcgtgtcatgatgactaccgagtcctctgtttcctcctccatatcggaagtatctcctgtttttgccaaagtggcgcgcgacattccgctgaaagtggtgccgcgagccgagcgacgagcagcgcgcaaagccgctaaacactcggctgatgctgttgagaacaaggtggtgcgtacttcgtcacttcctgctcggttttcgtttgcattgctggccggtagcatctctggctccattttgtggcactttatgctcgatgatagcactaaatcgcgtgtcaaggagacactgggcgccacgttccttggagacgtctatgtatttgtggccaagaaggtgcaggagacagtcaagccctttactgatccgtcacgacagaagctgctaccagattggccgatccctcaagtgccagcagacacaccaccagtttccgtcttggtgctggatttggaagatacacttgtgcactcttgatggagtcngaagcatggcttgcgccatg

SEQ ID NO: 7605 - DNA, 376 bp, Glycine max
  Clone ID: jC-gmle01810026g03d1
atgcttatgacaacatcaaatttttggcgtcttgtatcacgaaccgttttctacgtgcgtttttaacgggcgatatacttactgcaagtgcagtacacttaatacatcttgtgttctatatcacaagcccaccaccactcacaggtgcgggctgctagaaaagccactagcagcaacacctccagtctgctgcgcaggatggtgcgacaaccgaacactaacaaagccggcaaagcccttcttcttctgttgttgattttgcatcttaagctggtgcacactagctccgtatttggcaggaagatctcgaaccacgccgccattgtcacggaattgaccgatgacctggtgaagattcgagacgcgctctgacgcc

SEQ ID NO: 7606 - DNA, 346 bp, Glycine max
  Clone ID: jC-gmle01810026g04a1
gatagctgtgtttcgcaccctaattgctttgtgtgtcattgcactgggacactttcccaccaaaataatggatgatgaatcactgttgaagcagggtgcttcaggttcaaccgagttagctattcagtacagaatccaaaagaaatctgtgattatagacgtaatgagaaatatctcaaggaggttaaagcttctatcatcaaaggaaacagcaaccgcagaaggctaagttatagttaacaattagtaattatttgcttgctgtcatgaatctccttccttcgacattctattctccatcttactggagagtataattttgattgaaattacctgtgttttcacc

SEQ ID NO: 7607 - DNA, 445 bp, Glycine max
  Clone ID: jC-gmle01810026g05a1
cttaagtagcagcaattgtgacttgcttgctttccagcatatagcgtttatgaattggagcactccagggactcataatgggaagcttgaggatactgcttcatacgtcaactgggactccaaagacaagtgcatatacgctattgctggtgacttaaaagcagaggacttgcaagttgggtgtcacgtaaagctgggtgctctgacatcttggtggggtttggatgcaaacaattattcctactctgccatgcacacggggctagtctatggatgtgagatctcatggatgcgcctcatatgtgaccagcactgtgcaagtggacacggatgctactactactaggtatgcattaacgactctgtcagacacgaggttcattattggaactgggaaacgtcatggagttggagtgagtgagacttaacagataaacgactttat

SEQ ID NO: 7608 - DNA, 201 bp, Glycine max
  Clone ID: jC-gmle01810026g05d1
aatatctagtgtttttttttatttgttttttttcgctgtgctgaaatggtatagtcagctcttggatgcacaaaagagaaagctgagcacacaacaacaaccagcagcaaaaaaggaagccagaccaccaacgcacctgacccccagctattgacacaaaaagaaagaggggggccccataaatcaaagggacggttcgac

SEQ ID NO: 7609 - DNA, 532 bp, Glycine max
  unsure at all n locations
  Clone ID: jC-gmle01810026g06a1
aatttattctttaatttctaggactcgtcagtgcaatagtataatggacaacttcgaagatgctacagagccagtgagttctagtggacgattgttcaacaccactgtgctatgtgcgtatgattttggcttcttatgaatcagaagttgcagttgaattctctcatgcctagtatattggtcgaagatgtctgtgtacccgtcaatacacacttttcttccatagtgggtgtcactctcattagctgctattagatctcttaaatcatatttgcttgcgatctgcatgcataatgtgctgtcttattgaacttgcacatatatatgctaggtgagagatgaggaatgagaaatgaaatggaaaagggtagacgtgatgttcgaacatcacgtgaagaattcgacgtgtcccgaatactagtcacttcagttgtntgaccaatattgtgatgactatgtcgactagagtttaatggataggactgcccatgataaaccagtttgggaaattcatgatgatctaataccctac

SEQ ID NO: 7610 - DNA, 377 bp, Glycine max
  Clone ID: jC-gmle01810026g06d1
atatatagaaactaagaatgaaaatgaatttttttattatactaaaatatagttatgatgtttctttttttactcctttttttctcattttacaataaatacatgtgtaaaataattaaatattaaaatataagtaagagtgtaattgataaaaaaaagtaatgaaattttaaactttacaaatgatagataaatgctaacaaaaatttgcgaaagaattcaacacctaatgcggagggggtgtacaaataaataaataacgaaatcctcttaagccgtatagactttagctagggtgaatttagtttaacttttgtaaaaaaattattattatttaaaaatatcaaatgcaatttttaaagatgcatgccttgttt

SEQ ID NO: 7611 - DNA, 143 bp, Glycine max
  Clone ID: jC-gmle01810026g07a1
acaccccttcatcaccaaaacatctaccctactctcaccactccctcacaatcaatactcactacttcttccacaccacacgctcctacacccaatcatacacaatagaaggggccgtgtttactctcttccacataacttca

SEQ ID NO: 7612 - DNA, 483 bp, Glycine max
  Clone ID: jC-gmle01810026g07d1
ctagtcggcgttcgtccttttttttttttttttgattttttataatgattttttaatgtactgattaaataaaggcacctttttcttaacgagattggtcttttctaaccacgaatgacttaagaccattttggagagcattcatgactgaattacaccttggttccatccttaaaatactcattataagccagggcaaccaaacccaacattgcaaatcttccattccacaattctgcatctgaggacatgaaccctttggacttaaactccacgctgatcccttggaagagtggaatcaaggaagcatgggtaaggaccacacttgttcccaagaaccatgggataccaccattggaatatttgtacaagcacaccttgccctttgggtacttacactggcattgcacccacaaacccaataatggccaaccttccatagatcctttcatgtgctgggccactgaacgcctacacatcaga

SEQ ID NO: 7613 - DNA, 416 bp, Glycine max
  Clone ID: jC-gmle01810026g08a1
cctaaccctaatcctccatcatttgaccttactcgattctctcgctgtctggtattcccttcaaagcaaaacaattccatcgatgaatcgggcgtcgcagctttcgtgataatgatcttggcgctgcgaatccattgcatgggtttggagaatgccggagcttcgtaatggaccgtgacgacgtcgcgctccggttgctcagaagagcttcgaaccaccgactacggcacgtagatacgtcaagactcgcgctgcactcgccagagaggcagcggctgcggagaggccaagaactcgtatggcggccaaaaaagaggacaatgcccttataataatatccgatcacactaagaaagacgacgctgccgccatggccgacgagagtggtggcttgagctgcaaacaagggcgttgct

SEQ ID NO: 7614 - DNA, 377 bp, Glycine max
  Clone ID: jC-gmle01810026g08d1
tttgtttttttttttgaatatagaactatgatggtatacgcacatctttatcgaatttatatcaaatgccacagagtaatatctgacattatttctcgagtctaactctaaaaacacgaactagaataatataacaaagagtacgcaaaattatatcggatatagctggtgtttcaggacatggatttcctgcactcgtggggagtactttagaccagactggttgtcatgtccataggtgtttgacttcaaaatccgagtgacgcttcaggcttgctgtcttactcgtctgattgagctggctacacctcatgtacgttgctgctaaacggaagcattccaaacgtactgcatcagactaagccgttcttgtttga

SEQ ID NO: 7615 - DNA, 403 bp, Glycine max
  Clone ID: jC-gmle01810026g09a1
cctttctcaacgctcagttgctttagcgcttttcgaggcacgaatgccgatcacgtacaattgtcgaaagatggcgtttcgtccacagtcacactgctcgatgcactacgtcgaccatccgaatctaactttgctgacaacctcatttctcgggaagcgaagaagctggctctgtcggtgaatcagtcgcgaagctatgggaaaggggagaccctggtcggcctcacagtcgccgtgtaaggctatcgcacctttctgcctgaagattacatatacaatttcgagatgccgattgacagtcgtctacccgagaccatcgatgtctaactgggatccggcaagaatgagctggaagccgacatcgagcgctttggggcgttccggtccaactggttggcacaag

SEQ ID NO: 7616 - DNA, 553 bp, Glycine max
  Clone ID: jC-gmle01810026g10a1
gtggccaagaatgctccccttttgttccaaaacacaaagctcatgacacgtttgacctacactctggatgagattgagggaccctttgaggtgtcttctgatggcactgtcaagtttgaggagaaagatggcattgactacgccgacgtgacagttcagctaccgggaggcgaacgtgtgccctttctcttcaccatcaagcagttggtggcatcagggaagccagatagctttagtggggagtttctagtcccatcctaccgtggaagctctttcttggaccccaagggaagaggtgcttccacaggttatgacaatgcagttgctttgcctgctggtggaagaggagatgaggaagaacttgccaaggaaaacaataaaagtgcctcatcatccaagggcaaaatcaccttgagtgtcaccaagaccaagcctgagacgggtgaggttatcggtgtgttcgagagtgttcaaccatctgacactgatttgggagcaaaggcttcaaaggatgtcaagatccagggcatctggtatgctcagcttgagtcat

SEQ ID NO: 7617 - DNA, 531 bp, Glycine max
  unsure at all n locations
  Clone ID: jC-gmle01810026g10d1
ctgttggaatctcggcaccagcttctgaggtggatcaccaccactgtataatgtcttcctgtaggataagagagagatggaacaaagtaaacaaaaattagatgtccattccataagttaataatggctgttcgtgtaaatcactataagattaaataattctgataatcatataagattgaatgtgttgaacacaccacttgctatgtaaagtttataagacaggaccattgacagttggtggggctgagaaaaagcaaaagctaacgttactgttgtgatccactcatatccaaacttaataatgttggataacaagttccaccttatagttagaaacaaataaaaggatgtataaaaaaaattgaatattaagatttttttgtaataaataagtcactgaaagttcaccagtatcatattcttagacacgaccagatcataaattttaaataaatagttattgactttgacaatcaggacttgatcagtccccacacanaattacatataagagaaatagacttcgac

SEQ ID NO: 7618 - DNA, 537 bp, Glycine max
  unsure at all n locations
  Clone ID: jC-gmle01810026g11a1
ctccctctggtgaaaccacctttatggcgtaaatgttaacagcaggtgagtacagcaaccacagctggccgctgcagccagaaacaagcctgaccgagctgaacttgcccagagtgctctgcattctctcttccatgttagagaagctggtggctcgcaatgaaaagctcgttgatatcctgagccagcagctagatggactgaactgtggctcagtaagacttgggaacagcttgaatacatttcatggcgtaagagcaccaagcataagcatacctaagtacttggagaggatatacaagtacactaattgtagcccctcgtgttttgtggttggctatgtgtatatagacaggttaacacataggcaccctgattctcttgtcacttccttgaatgtgcacagattgctagttaccagtgtcatggtggcttccaagatgcttgatgatgaacattacaacaacgccgtatatgctcgagtaggaggaagtagcaatactgaattgaacaagcttgagtagangtactctttct

SEQ ID NO: 7619 - DNA, 393 bp, Glycine max
  Clone ID: jC-gmle01810026g11d1
tttgtttttttttttgtttttttttttttttttttttttttttggttttttgttttttttttgttttttttttttatttttgtttcattttttttttttttgaggaaaaaaaatgcggtgcaaagcgtcccccgccccttaactggaagacggcggtgacgaacattttagtcgggggggcgtacaacgatcccccagggaggccgtttacaagatggagggaaaggggggccgggggggatggggacaagcccctggtggaggttgtaaaaaagactggggccaacgcgaaaagccagagccaaaaaatcttttggcgcacgggggggagtccgaatgccctggagcttggccagcttggggcgcttgaccgcccaaagagtggcaataggg

SEQ ID NO: 7620 - DNA, 404 bp, Glycine max
  Clone ID: jC-gmle01810026g12a1
gtaactcgttcttcttctatttttgttttttgtttgtgtttgtttcttctctcacctgaaaatgtcttgctgcggaggtaactgtggttgcggaagctcctgcaagtgcggcaacggctgctgaggctgcaagatgtacccagacttgagctacactgagtcaaccaccaccgagaccttggtcatgggagtggcacctgttaaggctcaatttgagggtgctgaaatgggtgtgcccgctgagaacgatggctgcaaatgtggaccaaactgcttctgcaacccctgcacttgcaagtgatgtgctgggagatcaagcttcaagcacagattgcccttaattaggaataaagataaactattaatgtgtatcttacaacttatgtattatgtctgtgatggtt

SEQ ID NO: 7621 - DNA, 570 bp, Glycine max
  Clone ID: jC-gmle01810026g12d1
gtaataagagacccctagcaatctccttggataaatgcttagtttctgcacaactactttacattgtatactcctttatcctatcactcttttctatatacagtgccttgagtttcgagtcttttgactcaataggttgctgccggattatttggttagaagttcgaacaaatatatgagaactataccataaacaaaatttagccacataaatgcctacgctgctgcggacaaaacttaattccctggtgttgggcaaactgtagtagacgccaagagccactgcaatcgaatcaactagcattcgagaacgccacggtcttccatcaagcttggccagctgcaaccggtagaccatcccaaaacacccaatatcagatctactttagagcaagcagtgaccaaattttccaaatttccttctacgtgaaataccataacagtcattccccttcctccatcaatctcagccacacaagaacatatggctatgcctgcagtggccaatgctgtagtgacctcagccatcatgccctttcagtctatacatactacagataaccattggat

SEQ ID NO: 7622 - DNA, 522 bp, Glycine max
  Clone ID: jC-gmle01810026h01a1
ggtgcgctagcttgggtgcacattatgcattgacactcaaataccttaacatcccaaaatagtcaaaccttccattcgtgaattcgaccggcaattccttgcttctttcatctcttctggactacgcacactgcagctctcatcaggtacctctacagatgcttgcacgacccttatactctacaccaccctcatcgagcatggcttcaactaccagagaagacgacagcgaagtagcctacgatctttccacggtcctcaaagtgctacaaaagcggtcgcataaagaggcttgctggcacagcggtgattcctgcgagcctcgacgcgcaaaccaacgtggaatcgatggagatcgtactcttcgaagagaacggaatatacgcgcggtttatggttgccaaaagaaccaccttttgcccgacgccgcagcgaaagctcgctatgcttgtttacacccacggtggcgccttctgcagtcggaccccgttttctccgaactaccacaacctactgaacaag

SEQ ID NO: 7623 - DNA, 432 bp, Glycine max
  Clone ID: jC-gmle01810026h01d1
gagaactaaaaaggacaatttaaacacaaacaaaattgatcgtgcacgcataataatgttcaatcctgtttgagaaaggacacaatctggtctatcaaaacctgagcattctcacatttcggtttgaacaaatgaaaaacatggtcctcattcttcgtgttcaccactttcgcaacaccagaccacccattcttctcaagcaacttcttatcttacaaacacatgtaactcaccaaattgttcttcgcaacacatagaagcgatctttcacagagctaacttaccccgctgttgatccttactaccggtaataatcgggtcatttgatccactctcactagggcacgcaaaccgccacaaagtgcgtatcatcttcacttgtttaggcctgtgtgtatacacccaaactgttactctccccagaaaaaggga

SEQ ID NO: 7624 - DNA, 586 bp, Glycine max
  Clone ID: jC-gmle01810026h02a1
gtgtttggctacaaggtgagtgtttacatttgttctgttcaggaataatttgaatatccttggttttggttcagctgctgttctatgcctcaaaatgtcctcaggtgcctttctctccctctcattttctcttgctttggtaggtgtttgataggcaaccagtattatagaacgtgtatgtaaagggcaaggggtgaaaaaatggatataagtacaaagctctaaacttttagaaagcaccgatatgacacaaacccaaggacacgacgtgtcttaaaaatcacaggacatgacacgactataatacagtatataaaatcaatattaaggattaatttggaattaaaagagagaagtgatactattttatagcttatctaattattgccataattccatctgtattggcacaaacgttcattaaatgattgtaaaaaaaattgtaaaatgcatataccagtattcatagcgtacgaagtgatttctgctaatctgtctgacataagctgaactgctgatactcgtttgatttacattttgaagaaatgcctgaattccattacatgtgactgctgttatttggata

SEQ ID NO: 7625 - DNA, 184 bp, Glycine max
  Clone ID: jC-gmle01810026h02d1
tttccttttttttttttttttttatataagaacccccagaaggtggcaaattttgttgttattggcaaccattctgttaaaagaaagtttttggtccactcacacaactaacggccctcacgattccaccatacagccctgcatatatatcgctacaattgttctcttagaacaaatcatatat

SEQ ID NO: 7626 - DNA, 380 bp, Glycine max
  Clone ID: jC-gmle01810026h03a1
gatagctgtgtttcgcaccctttttgctttgtgtgtcattgcactgggacactttcccaccaaaataatggatgatgaatcactgttgaagcagggtgcttcaggttcaaccgagttagctattcagtacagaatccaaaagaaatctgtgattatagacgtaatgagaaatatctcaaggaggttaaagcttctatcatcaaaggaaacagcaaccgcagaaggctaagttatagttaacaattagtaattatttgcttgctgtcatgaatctccttccttcgacattttattctccatcttactggagagtataattttgattgaaattacctgtgttttcaccaaataaaaaaagaaaagtaaatacatgaatgcgc

SEQ ID NO: 7627 - DNA, 289 bp, Glycine max
  Clone ID: jC-gmle01810026h03d1
gggggaaaaccctgggaacttcaatcacaaggatactcctcagccagaagggaaaaaaaatggccgagggaggggattcatggccgctcgcaacaagtttctatgtgcaaactatcccttaacccctcgcgcgctgcgattcctttgaggaaataaactttaacctccatggaaatttctaatgggggtataaagccaaactttttttggattctgcgctgaggctctaacccgggggaacctgaagccccctgcggcgacagagtttagtaattctttttttaggggg

SEQ ID NO: 7628 - DNA, 386 bp, Glycine max
  Clone ID: jC-gmle01810026h04a1
gatagctgtgtttcgcaccctaattgctttgtgtgtcattgcactgggacactttcccaccaaaataatggatgatgaatcactgttgaagcagggtgcttcaggttcaaccgagttagctattcagtacagaatccaaaagaaatctgtgattatagacgtaatgagaaatatctcaaggaggttaaagcttctatcatcaaaggaaacagcaaccgcagaaggctaagttatagttaacaattagtaattatttgcttgctgtcatgaatctccttccttcgacattttattctccatcttactggagagtataattttgattgaaattacctgtgttttcaccaaaaaaaaataaacaatgcttataattttaaagtatactt

SEQ ID NO: 7629 - DNA, 473 bp, Glycine max
  Clone ID: jC-gmle01810026h05a1
acttactctatcaagtttcaacacgccaccctcttcttcttattcagattgtcataactgaggaagcttgtttgcatatataatagagaaaatggtattgttgttagtttattacaggtttgagtggttggttagtacttcgtagaagttagctggtaacaacacattagtaaatcttgactctatggaagactacaatttttctgttggtcaatagtgccctgatgtgaaagcattccggaatgctattaaagaagctgccattgcacagtattttgagcttcgtactattaaaagtgacctgattcgctactttgctaagtgtgcctcatatgggtgtccatggcggattcgtgcaggcaagctgccttatgccccaacatttactattagacgtattgatgggactcatacttgtgggagatatgcttacaatgggcaccatcatgcttctgttgactggattgtgagtt

SEQ ID NO: 7630 - DNA, 390 bp, Glycine max
  Clone ID: jC-gmle01810026h05d1
acaaacctgccaatgttggaaacttcatttttattacccccgggggtttaatagggatatatatctaacttttacatgatctgcattatagggatgccctaaacatagggtctgtacatgtaaaaacaaaactagttttttggggaactaagtacaaaatttgacaactaaaactggtttttactattaaacatctctgctttacaaggtcttttgtaagggccagtttgattacccccactacaatgcactgtttgtttctagcgaataagggcattcacacacattcgtttataagggcgttctggggggcgccgaaattttggtgggcttaccacaggggtattatcatccctagaagaggtgcctgttttactccatttaagtttt

SEQ ID NO: 7631 - DNA, 487 bp, Glycine max
  Clone ID: jC-gmle01810026h06a1
accacattcacctgatgcttccaaagcaatggcttaccttgcagcatccactgctgctgcttcccttggcatgtcagaaatgcttggaaaccccatcaacttcagtggtgccacaaggccagctccatctgcttctagtcctgcctacttcaagactgaggctctttactccaaaaagaaggctacaccaacacctacaaaaaaagctgctgctgctgctcctgccaatgatgagcttgccaagtggtatggtcctgacagaatgatcttcttgcctgagggtctcttggaccgatccgaaatcccagagtacttgaccggacaagtccctgcagactatggttatgacccatttggtcttagcacgaagccagaagactttgtcaaatatcaggcatttgagttgattcatgccagatgggcaatgcttggtgctgctggattcatcattcccgaagccttcaacatatatggagcaaactgtggt

SEQ ID NO: 7632 - DNA, 430 bp, Glycine max
  Clone ID: jC-gmle01810026h07a1
aattcggctcgaggaaatttagtgcccttttcagagtgtcaagagcacagtttccttatctagatttgtctcctctcttttcccaagttgtctctcactttggtgctaaccgtgtaatgtggggcagcgattttccatttgttgttgctgaatgtggttacaaaggagccaaagaagcagtgcatcttattgccagtgagatctctttgcctttatcagatttagagtggatcatggggaggacagctacacaactcttccaaaaccaattgactccagtcaatagttgagagtggggatgctgtttgagttgtataaaaagtttttagctgttatagtggaaattagatgttgaatacttgaatatcaatttacaattctgacagcattgaaaaacaacaattccctatggctccggtagcagttctat

SEQ ID NO: 7633 - DNA, 471 bp, Glycine max
  Clone ID: jC-gmle01810026h07d1
tttgtttttttttttttttttttttttttgaggagcaaatgaacaacctacatagattatatgggaaaagaattttccaacaaaacaaaagggataaccctgttggtatacatgataaatattcaaggtatgcacaaactctgtactagtcactggggcttgcgttacatgttgacaagataccccaaaatgccctatttccttcctctgctcatggccaactaactttttttccctctagttaatgcacaaaacaacccaaatcttttctgattggtaactcctttggggcctttgataacctacctggaattcaacggtgtttagccaactctggcagcttaatttgcttgcttgagctccatacccgtgttcgactgaatccttgcaaaatcgctggctgctgcacgatgtgtgagccaaaaatgttgcgcaatccaacggatctgacataaatgggctactttgaat

SEQ ID NO: 7634 - DNA, 359 bp, Glycine max
  Clone ID: jC-gmle01810026h08a1
attcgagttgaaatataaccatttcacttattaaatgcggctttgccttactagcctaacaatcccaaacacatctggtcagggccgaggatcgactttgtgctgactgagtgagccacaggacagatgtgtcctagatttgtacaagctgtggaaacatgagaccggcaacactatgcttcgttttccacctcagagtgccatgccacacattgatgtcgctgagcatcacatagggaacaaagaggaagtagatactgaactcttggatgaagaacagcttgcgaagagtggtgatatcctagagacactaaacatgacatagaccttgctatggactagagcttctagatcctcag

SEQ ID NO: 7635 - DNA, 557 bp, Glycine max
  unsure at all n locations
  Clone ID: jC-gmle01810026h08d1
aaaataagatgccactagtttccattgagagatatatagcatatacatatttggaataagaaacagtgagtcttctgtatgtgacccacaatcacaccctcctacatcactccaactaattactttgccttactttttcaacaaaaatagaatcgagagatttgaccatgatgcttttatgtggtagataattaattctacacacacagtcattagtcagtctaattatagttctcctaactagttagggaacttcctagtttgtgttcttggtttggatcttggcaaattccagggtctttttaccttgtaacttgattgttacatagtgtttactgtactctccatgattgtatattttatacttgcatgggtggttttcatccacaaactcaggcattggaccaagctccacttcatagctaggagcaaaaaatgtcacaattgagagtctagctttctcctcatgagccacagctctatgctccacactcctggatttcccatttgtaagaacttctattgggtctncaatgttgatgacaagagcatttgga

SEQ ID NO: 7636 - DNA, 478 bp, Glycine max
  Clone ID: jC-gmle01810026h09a1
aaatgaagaagccgtgttgtgttgagttttagacaattgttggatcctgggaatgttggttcgacgatgcatgcatcgttgacatggattactttgtgaagaccctttcaagcatcaaacacaaaggtgtttgtgcagacttgattggtaccatcatcactcattatgcctccatatggatccctgacctctctttctctgctgaaaatggtgacaccactcacttacaatcccccgaaagcgtcacaaattcatggatgaagaagaggttctttgtggaaaccttggtgagtgttctgcctcctgagaaggattctgacccatgcaacttcctccttcgccttctcagaaccgtcaacatggctcgtgttgacgccacttatagaggtgagcttgagaaccggatttcgtggcagctatacccagtctttttttatagagctcatgattcccttcttcagccacacgtgtgggacac

SEQ ID NO: 7637 - DNA, 420 bp, Glycine max
  Clone ID: jC-gmle01810026h09d1
tttgttctttttttttttttttttgaaacaaagcaacacaacacaatagcttattcattagttctcatccattaattaccattgaagtccgaacacagaaaccaaaaatacaggatgatgaaatctcaaaaggccaaacctaagggggaatgtagtctaagtacaaacaaacaaagtggggtggcggctacaaatgctttgcaaatttttcacacttagaagcctgggggcttgtaagcgatgaagctgatgcactgcacttggcgaacgttgtcgaatccgatgatacggatgaagtcgccggggtatgcagtctgagactcttgaagctacttcaataactgagaagcgtccatgcatccaagcataggcaggatccacatggtccaggggcgtccatcggaagatcctggcgacctg

SEQ ID NO: 7638 - DNA, 534 bp, Glycine max
  unsure at all n locations
  Clone ID: jC-gmle01810026h10a1
gaataatcatattaaatattttttagaaaaaatggcccgatcatttatcaaaggccaatcttcggtagaagagaaggttcctttggaacacttatttctatttcagtataccgggtctctttctttcatttcaaaaaatttatagaatttcgattttgaaatgaaagaaaagtgtggggataaatataaatgacaaaaagatattggaacataatcttggaagagatgatggaagcaggagttcattttggccacggtactagaaaatggaatcctaaaatgtcaccttatatatctgcaaagcgtaagggtattcatattataaatcttattagaactgctcggtttttatcagaagcttgtgatttagtttttgatgcagcaagtgagggaaaacaattcttaattgttggtacaaaaaaaaaagcagcggatttagtagcacgggctgcaataagagctcggtgtcattatgttaataaaaagtggctcggcggtatgttaacgaattgtatactacangaacacgacttc

SEQ ID NO: 7639 - DNA, 202 bp, Glycine max
  Clone ID: jC-gmle01810026h10d1
cgtagtcaaagaaaaagcatttgtacattgaaatgtagtactgcatagcccctgaacaatggtctactttatatgaaatacggggcagacccttttttacaaaatggaacttgcacgctaaaagttctcaacccggtgaatgctgcataagctccatccactggctcaataagtttgcaagagtcctaggcagcgcttgaat

SEQ ID NO: 7640 - DNA, 488 bp, Glycine max
  Clone ID: jC-gmle01810026h11a1
gcagttcattcttttgtgcatttctgaaatatcacctgcatcatgattttccttcaggtcaggttgatgaaaggccggttagtaatttattacttcaagcagatgaacctaaatgcaacatggaagaaaatccttcaccaagtaaacattgcaatggagacatagatactggtattgtcaaccaggtggttgaaatagaagatggattatatactagggttgagcatacaatcgaatgtaaaggttctggtgctctaggaataaatttaatatcttctggcatcagtccttcacaaaaactggaatcaactgcagagaatgatttacaaactttcaactatgaggctacttgtgcagcaacaagcgcagttcttgtttcaaaattcagtgagaataataaaaaaaatccaggtcaatgaaaagatgctactatgcagtaagaaccatccagtcatgccttctccatctaataacaggattcaaatgac

SEQ ID NO: 7641 - DNA, 560 bp, Glycine max
  Clone ID: jC-gmle01810026h11d1
tttgtttttttttttgtctactttcattttttattttaaataccgcgactaatcacataaaatttgtgtttgttctttttatatttatattatttatatttttattttttgtacaatttattactagtatagtaatcgattccctaaaatctatgaacccctccaactaaatccaataatttttttattttattattaatcaagaatttcgtatatagctagaacggccctcacaaattgcaaatactaatttgttaagaattaatcgaattgaggctatagcatcatcattagctggaattgaaatatcggcgaggtccgggtcacaatttgtatcgattaaaaattgttggaatttccaaagttatacattctcgaagagccgtatattcttcttgttgatcgacgattattacaatatcaggtaaccccgtcatatatttaatgccgccaagatatgtttccaaatgagctaaatgtctcttcaatatagcggcatctctttttggaaaactattgagtctccccgtctttggtgcattctcagtccctgacttttg

SEQ ID NO: 7642 - DNA, 578 bp, Glycine max
  Clone ID: jC-gmle01810026h12a1
gtgctgttctgttgcgtgaacttattgttgtgtgcatgttcattattgggcaccgatggattcagtttctgtgcaaatagcgacgtcaaaatttgttctttgccccgcggcgacggccagttctaagaagaatgccatcatcaatttcagttccaatttcaaaggaactctcaccaaaatccatgccatttccccaaatggctctgcctctagctgcacttcgcgtgtgtctgtgtcaagtttaaagacagacaagaacaaaggcagaagtaatcttgaatccctgttttgttatgataaggctattccagaagaaataattgagaaacctgttgggttatctttggaagagaaagctattggtaacaattcccgatgcactgattgccaggccaaaagtgctgtgctttgtgccacttgtgctggttctggtctatatgatgactccataatggatagccagggcataattgtttaagttcgttgcttaggttgctggggaacaggaaatatattgtgtgcagaatgtggctgacgaggtcatctgggaaccaaatgatcagtcttactttttggag

SEQ ID NO: 7643 - DNA, 402 bp, Glycine max
  Clone ID: jC-gmle01810027a01a1
cctttttcaacgctcagttcgtgagcgtttttcgaggcacgaatgccgatcacgtacaattggcgaaagatggcgtatcgtccacagtcacacggctcgatgcactacgtcgatcatcccgaatctaactttgctgtccaccttaattctcgggaagcgaaaaagctggctctgacggtgaatcagtcgcgaagctttgggaaaggggagacctcgggcggtcccacagtcgccgcgaaaggctatcgcacctttctgcctggagattacatatacaatttcgagatgccgattgacagtcgtctacctcggaccatcgatgtctagctgggatccgtcaagtatgaactggaagccgtcattgagcgctctggggcgttccggaccaacttggttggcaac

SEQ ID NO: 7644 - DNA, 547 bp, Glycine max
  Clone ID: jC-gmle01810027a02a1
gctcagtgcatcaagatctctttctctgtaatcgaaaatgagcaagggaccgggtctctttaccgatatcggcaaaaaatccaaagatcttttgactaaggactacaactccgatcagaaactcaccatttcctcatacagcatctccggagtggccctcacttcaacatctgtcaagaaaggaggactctccactggggatgtggcagcactgtacaagtataagaacactattattgatgttaaactggacaccgcatcaactatctccacaaccctcacattcaatgacgttcttccatccaccaagactattgcttcatttaagctgcctgattataattctggcaagttagaggttcaatacttccatgaccatgctaccttaacaacagctgttgcactgaagcaatcccctgtcattgatgtttctgccactgttggtaccccaaccattgctttgggtgctgaagcaggctatgacacttcatctggtggttatacaaaatacactgctggaattagtgtcacgagacctgattcttct

SEQ ID NO: 7645 - DNA, 386 bp, Glycine max
  Clone ID: jC-gmle01810027a03a1
acccatttcgacatccgactgtaataagctcaatttcaatacaatagaatttctagaaccatagctcacctatcgacaccagtacgcttgggagctctcaaaacccacacaccatcattgactctcagatctacatgctcatgaagcttgctgttcacaggtgcaagcacgtgcacattcttggcacacagctggatataccgaagagcggctgactaagacttagtaacagctggagaccctgtcactgcctaagagcccctagcataggactaccattatgcttggagactgtatacagatgcaatacctgaacaccctcgcaaggcgtacttcggtttgatgatatctacccgttcacatataagcggactggatcccgtgac

SEQ ID NO: 7646 - DNA, 497 bp, Glycine max
  Clone ID: jC-gmle01810027a03d1
aaaataacacacacttcacacatcattacgacaattaaataaaataatttttattagttaattattaattaatttatagatattatttgattttttttaatagatcgattactactaacctggatgacggctttaatgttttcatcagtcaagggaaattccgacgattccttttgaaacttgagaagaacatcaactagatcttccactgcttcacactcctcgttgctgctgcttctggttctatttttgtgttcgtcgatgatgtcttgcaataccctatctgtcactttatgcactttttcaagtttccccgaagcccccatcatctgaagcactctactagaagggtagagatcagcaacagaaaaccctcccataagcttcaactgtttatcaatgtttgatatgaacacttgttggtatctgctcttcttaccaaaagccgctcgtgccgctatcccaaaagtcaccgagtaaatgttctcggtgagatt

SEQ ID NO: 7647 - DNA, 319 bp, Glycine max
  Clone ID: jC-gmle01810027a04a1
attgaatgaaccggggtgttgtaagacagagaaggtgcatggaaacacattcaagcaggagctaataaggtgctgatcactgctcctggtaaaggagatatccccacctacgtggcaggtgttaatgagtctgactacagacctgatgagctcatcatcggctaatgcctcttgcaccactaactgacacgcacgctgtgacaaggtccttgatcagaaattcggagtcattaggggtacacatgaccaccacttactcctacaccggagaccaatggcttcatgatgcgagccagcgtgacctgacgagagcaagggc

SEQ ID NO: 7648 - DNA, 493 bp, Glycine max
  Clone ID: jC-gmle01810027a04d1
gctcctgtcacatttcctaacactgatggcatcaacccaggccagtatttcataatcaacttcaaattcttcaaatatagaataatgtatagcaagccaagtttttgatacaatgtaaccaaagaataaagcttggtttgaatgctaatatttgctctacctatttttctttctttggattttttctcatcagattcttgcacaaatgtaagaattgaagattgctatatagtttctggtgatgactgtgtggctgtaaagagtggatgggatgagtacggcataaaatttgggtggcccaccaaacagctaatgataagaaggctaacatgcatttcaccatacagtgcaaccattgccttgggaagtgagatgtcaggtggaatccaagatgtgagagctgaggacattacagcaatccaaacagaatcaggtgtcagaatcaagaatgctgatagtcactatgaccctaatgccttgcctgagataaaaa

SEQ ID NO: 7649 - DNA, 435 bp, Glycine max
  Clone ID: jC-gmle01810027a05d1
aaacaatgaaatctaatgcacactgaaaacggtaacaacgctgacacattatagttgaggaggctgtgtataataccctgagtttcctcaaattacagactcctgtagggaattaagcccaaacacactttagactaaatgattagacacaggttgcccaagccaatggacatttggatccaaaagcaaatgacaattttggtcgggatttgtttttacccaacatctttatttggcttagacgttcttgctcctcctcctgtatctttattcgcatggcttcttccttctgtctttgcatactcttccagctctgtatatcgatcttactgccttctttgctgctctaaagcttcccttctctgagcttcttgaaccttcctacggttgtcctcaagcatcctttcaagatcttctttctatttacgggcttgc

SEQ ID NO: 7650 - DNA, 568 bp, Glycine max
  unsure at all n locations
  Clone ID: jC-gmle01810027a06d1
cacatccgtttcgtgatgccaaattgcaagatttatatattcaagcatcaccatgccgtggagacaatttcaaacttattgtaaatttagatagaaacatactgcataggtagaaactcttgatttgcttgataagtctgctaaaaacattttatcgatgtaaaacttaagctaggaccatggtttcaactgttgggggttgaatctttagctgttggttgccatcttcaatctcccaaatttcaggtagcgcttgtttgatattatgaatgctgttcagggcatgatcagctccagggaccaaatctgaatggcccactaaaacagtgttaagtccagttatttttgcactttcaacatttctaacactgtcatcaaagaaaattgttttctttggatccacattagcaatccgaatagcagcttcaaaggcttccacagatggtntacagaggatttgtgggtgggaatcgaaacatccattttctgttaaatctgtgagcacattgatatcatttggtacatccatgcaattgatttgtttggaggataagcgttcaaagctatg

SEQ ID NO: 7651 - DNA, 504 bp, Glycine max
  Clone ID: jC-gmle01810027a07d1
aagaaaaactattagtactatttattatttcaccattccatatatagacaatccacctatttgtaaagagtacattgccactgtcttgttccccaagccactatttacacccaccacccaaaacttacgtataatagctctagaaaccaaacctataatggtcctcatcttcttgcactttggttgaaaggaactttgctcatttacgctacaccattctttctctcaaactatttcacagatgactgatttttttgtactttctgaaccttttttcccacttctattggaattttcccatatagacaaacgctattaacaagtcaggaacagacatggaaacacttccagtgccggcctttttcagcaaaaagctcacgtctgtcggaacgggtgaaactgcacggataaagttgcatttggcggcacaatatatcacgggcattttagcatatgaccaagagctactaactgtctagggttctatgactagccctgccattg

SEQ ID NO: 7652 - DNA, 494 bp, Glycine max
  Clone ID: jC-gmle01810027a08d1
ctcatactatttttttattatgagttctctgtgtctttattattttacggttacacttttcctatacatatagaaacaagaatccctcaacagctagagaatatgacaacccatcttttttaattcaactaaacctgtacactgaaaccagcaattaaattgcctaattacctacataacctaattaccatacatatctctttattctattttgtcctaatcataattaccatcatactcatttaattctaatatcctctccctcctacctatatcatacatctttcgtaataaacaaatctccaacacatatctcttagattcactccctgttggatacatgcccgattttgcaacattaatttacatacccaaatgaactactaagaccatacttaataagttaatgacactcatgtggtctttgattccttcttttcaagcaacgctgatgatactatcccccccgccgtcgaacttcgctgcagacatag

SEQ ID NO: 7653 - DNA, 548 bp, Glycine max
  Clone ID: jC-gmle01810027a09d1
agtgttcaaatccatggatccttgagatccaaatggggatctcactctagctcaagaacatttaaatcctgtgatcgtatactacttacagacacgttgttaaagctaagcttgccctctacttgtgctgctcataacaaacaaaaatggaaccaagtggatggaactacctttattacatatagactaatttcagcaatcgcgtgcaaaggtatatgacccctattctttcagcatgcccatatttctgatccgagcatcactcctagagagcacattacctatcatacagcttagcgatcaaatattttgttcgctagagttcaacatctgcaatgctgtccaccaataaaaactcggtcttagtatcacttatgcagcagatagaagaacagactctgcaaatgaggcagagccattattaggtgctccctttatcttgagaatagaagtaatcaaattataaatctcaacattttcaaacgacggtatcttcctcctctagcaaatcgaggaccatgtccaatgaaaatagtcctcatggagaa

SEQ ID NO: 7654 - DNA, 498 bp, Glycine max
  Clone ID: jC-gmle01810027a10d1
cagaaaaccagactaagaaggctgttatagttgtcatttcatcattggcatggatatatagcaacatattttacacgtatattttcaatttggaatagcttaagccactaaatgagtcactaacagcaccacttgagagcctaaatctttaaatctagctgacataacctatggccaatgtgtgagaactgagaagtaaatctttgctagtactctagcattttacatcattgcagataaaaggtacaaataccggttatgggattgcatgaaattcaatcctttttcttacacatatatagttaattatcacttaattataaggagatcatgtccactaggaaaaacacaaagcaaaaatgaatgataaatatgataatgactattattgtcatacgttaagtttgttcatctccctccttatggcattggccctcactaagctcccaatggtgttaatggccaatttcagatcctccaatggatgccaggcaccac

SEQ ID NO: 7655 - DNA, 511 bp, Glycine max
  Clone ID: jC-gmle01810027a11d1
accaacagacgcagaatggcttattaattataggtatacattacataatattaagatacaccgctactctacccttacgctttcttacttacaagtggccagccactacgcaagggaccataagcgaagacttatagaagctaaaccaagaagctacctcgcgtgaactggcagaactggggcacctccttaagctcaaatcattccttacgtacatgtatgcatgctgacggagcgcacacgacaatgaatacagcataggccaaaagactacatcctcagctttcgggtacgagaaaatgcgactctgagggctcacgcatcgaacggagaagaagggcctgatctgctctgccctctgttctcgtacgcatctgatgccgaccttcttcgagaccgagacgaatctttcgctccggaaaacggagaaatcggagtagtagaaccggcggaagaaaccggaggcgagccactctgggacccgggcggtttcacgatcatgagactacgc

SEQ ID NO: 7656 - DNA, 560 bp, Glycine max
  Clone ID: jC-gmle01810027a12d1
ctactagtcggcggccgcccttttttttttttttttttttaccaacaaacgcagaatggcttattaattataaatatacattacataataataagatacaccgctactctacccttacactttcttacttacaatttgccagccactacgcagctcacctaagtaaagacttaaagaagctaaaccaaaaagctacctcgcgtgaactggcagaactgtggcacaaccttaacctcaactcattccttacatacattcatacatgcaaacggagatctaaacaaaaatgaatacagcataggccaaaagactacatcctcagctttcgggtacgagaaaatgcgactctcatttctcacacatcgaaaggagaagaagggcctgatctgttctgccctctcttctcgtacgcatctgatgccgaccttcttcgaaaccgaaacgaatcttttcctccggaaaacggagaaatcggagtagtagaaccggcgggagaaaccggaggcgatccactctggtacccgggcggtttcacgatcatgatactacgcgtcactctc

SEQ ID NO: 7657 - DNA, 514 bp, Glycine max
  Clone ID: jC-gmle01810027b01a1
aagatacaatagagatggcaattctatttttgaaacaggcaaagcaatacgcagatgcaagaccaagctatcctccacaactcttccaattcattgcttccaagactccctctcactacctcgcttgggacgtcggcactgggagcggccaagctgccaaatctttagctgcaatatacaagaatgtgatagccacagatgctagtgacaaacaacttgaatttgcagccaagctcccaaatgtgagataccaacacaccccttcaaccatgtcgacggccgagcttgaacaaatggtggcatctgagggaaccatagaccttgtgaccatagcacaagccctgcattggtttgaccgcccaaccttctacgaacaagtgaagtgggttctcaggaaacctcatggaatcattgctgcttggtggtactatttgccaagagttagtgatgcatttgacactgtctttgaccaattctattccactaatgtaagccccttattgggacccagctc

SEQ ID NO: 7658 - DNA, 535 bp, Glycine max
  Clone ID: jC-gmle01810027b01d1
gacttcttaacatgaacgcaattcaataaaattacattattcaatcaatggataaactcataaaagttggtactcgtcacatctcccacacagtaaaagcaaccatttgcatatatctttaggaatcccctgttcttccaattctcaaataaattggaaacttggcaacttttttagcatcttcaccccaagcaagcttgaatttttcaacaacatcctccgtgagaagctccactcctttctccttagccgtctgatatgctgaccatgatcttatgtaggtcaagaaatcatccaaatccatcattgtttccgtcacaaactcaaagggtcctgtgtgatcagctccatccacgggctcaaatggaaaatcaatgcttctataattgtcatcaacccatttacgagctgggtcccaataagggcttacattagtggaatagaattggtcaaagacagtgtcaaatgcatcactaactcttggcaaatagtaacaccaagcagcaatgattccatgaggttcctgagaacccac

SEQ ID NO: 7659 - DNA, 460 bp, Glycine max
  Clone ID: jC-gmle01810027b02a1
ccaagatctgtgcttgaacctttacttgtgtttccttgcttcatgcagacgagcttgaccttgcgccgaagggccacagatggttgaaaccgatatggatgccgaaactgatgcaaatgtggttccaccaaaggagactccaaacagtgttcccatctcttatcattcctcacactcacaccctcctcttaatgagaggattattacatccatgaccagaagatctgttgctgcacacccgtggcacgaccttgagatagggcctggtgctccaacgatcttcaattgtgtgattgacattgggaaagggagcaaggtgaaatatgaactggacaaaaaatctgggattatcaagatcgaccgtgtgctttactcatgaagtgtgtattctcacaattatggcgttattccacgtactatttgtgaggacagtgatcccctggatggcttgattattatg

SEQ ID NO: 7660 - DNA, 533 bp, Glycine max
  Clone ID: jC-gmle01810027b02d1
gacttcttaacatgaacgcaattcaataaaattacattattcaatcaatggataaactcataaaagttggtactcgtcacatctcccacacagtaaaagcaaccatttgcatatatctttaggaatcccctgttcttccaattctcaaataaattggaaacttggcaacttttttagcatcttcaccccaagcaagcttgaatttttcaacaacatcctccgtgagaagctccactcctttctccttagccgtctgatatgctgaccatgatcttatgtaggtcaagaaatcatccaaatccatcattgtttccgtcacaaactcaaagggtcctgtgtgatcagctccatccacgggctcaaatggaaaatcaatgcttctataattgtcatcaacccatttacgagctgggtcccaataagggcttacattagtggaatagaattggtcaaagacagtgtcaaatgcatcactaactcttggcaatagtaacaccaagcagcaatgattccatgagtttcctgagaaccca

SEQ ID NO: 7661 - DNA, 252 bp, Glycine max
  Clone ID: jC-gmle01810027b03a1
gtggcctataatgctcccctatatttccacaacacatagctcatgacacgtctgaccgacactctggatgagagtgagggaccctttgaggtgtcttctgatggcactgtcaagtctgcagggaaggatggcacttgactacgccagcgtgacagttgagacaccgggaggcgaacgtgcgccctgtcgtgtgaccatcaagcaggaggatggccttagggaagaccatacagctttagtggggaggtttct

SEQ ID NO: 7662 - DNA, 377 bp, Glycine max
  Clone ID: jC-gmle01810027b03d1
aaagggaaaaaaaaaaaaacaatgggaattagccaaaataacaaaaaaatttcaaaggttcccggaaaaaattttttaaaaactaaacaatttcaaaacatggccccggaagagcctaacagggccctaaaaaacaaaaaaaaaaaaaaaatcacccttttcacctaaagggggggccaaaaaaacttcttaaggggaaatgaatcttccaaaaaaaaaaaggggggaaaaaaaattccctaaaacctttattttggggatttttttttatgaaaagatgaggggaaaaaaaaaggggttaaaatttattgggggggccccagtaaaaaacgggaaggggccctttttggggctgaacaaccagaaccacggggggg

SEQ ID NO: 7663 - DNA, 417 bp, Glycine max
  Clone ID: jC-gmle01810027b04a1
ctggctttgaatgaaccactataatggcataacagaaaacagatgacacgtacgagctacactgtggatcagagtgacggaccataagacgggtcgaccgaaggcactgcaaagtgcgatgagaacgaatgtataggctacacaagctggacactccaaatgccgaggaggcgaacgtgtgcgatttatcatcaccatcgactgaacggtggcataatgggacccagatacctctagagtacatgttatagtgccagactaccgaggaagctcttacttgaaccctaagggaagatgtgcttgcacacgaaatgacaatgcacgtgctttgcctgctggtgtgagagtatatgcaggataacactgtcgggcaaacaatcaatgggccctatcatgcatgggcacaaatagcttgag

SEQ ID NO: 7664 - DNA, 543 bp, Glycine max
  unsure at all n locations
  Clone ID: jC-gmle01810027b04d1
gaaaaacaataaaaattcctttcttttccaactaaaaacaccacaagtacattgcttttcatttgaaagctaacatttcaccaaaacaatactacattgtaattgtaaaaaaatccaatcaaaagaataaaagcagagactaccttaatatagttaaatccatattttgaagaagatgcatgcacttaaagccagtgtagtagatttaatagtatgagagcttggcaatctgcccttgtccttccttaagaaaaggccttggtatattgggaaattgatgagaaccaaaaacccacacaatagaacttgcaatgccattttctcaccagtcaaagcaactttgcaaaggactaactcntttatagtggctagtaagcaaaacaaatggagtaatgcaagtgttgctagtacagtgaaaaatggagaagaggttccaaactccatgacctcgttcttgtaacgttgggaaacatcatcatcttctacaatcttagttgtgacagcanaggatgaatatgaacgtccaaagaatttccagacaat

SEQ ID NO: 7665 - DNA, 532 bp, Glycine max
  Clone ID: jC-gmle01810027b05d1
aacccataacataaaacatttattaatatacaaacatttattacaaagggaaaccagaaatacagcaagtgaagatttcatccttaagaactactacaagaacaaacagataactgaatttattatttctcagagtcaagtcaagcattatgatacatcataccccaaaacaccaacaacagtactcaggtgagcagttattacatcgtactttcacatgaacgcgtcataaaggcagataaaagcaaatacatacaacacaggaccttaaggctcaagcacagcacaatactatgtgacttaaacggtgacacaattcagcaattattcttaaagcactacggatttgctgaatttgttcataattttagagccttgttagtgtagaatcacacattcttgtgaaccagctaccaccacagtagggtgttcgcttgtgctgactgcatcaacttctttgacactttcaacgttgacatcctccaattcaccacagccaatggcttcaaaaataagatcattgacttcttga

SEQ ID NO: 7666 - DNA, 521 bp, Glycine max
  Clone ID: jC-gmle01810027b06d1
attaaagttacactgtattatagacgtaaagaaactacaaatttttacactaaaaacagtttctcttttatacatactctctgttgtcatttgtcaacactacaaaaaatgaaaaagtaaggtagaatctttaatcattcacaaatatggagcaggctgcagagggcattctgtattctaagataatacatatgaaagatgttacatatataggctattcaaacagtggctggtactggagttgaaggagcaacacggttttcagctggaatttcaacaaactcagacaatatagcacggaattcatctccgctcagagtctccttctccagaaggacttccacaatcttgtcaatggcctcacggttgttccttatatgctccagtgcaatttcatatgcttcatctgagatcctcttgatggcagcatcaatgtcttctgcaagcctctctgacattgagttccttgccatcattctcatgatgacatccccaccttgtgctgatggttccataagtga

SEQ ID NO: 7667 - DNA, 536 bp, Glycine max
  Clone ID: jC-gmle01810027b07d1
gaccccagtggcattacacagaccaatcgcttatcaagagtacccggtgccctatcatttcacggtcacactcccccatacatatagaaacaagaatccctcaacagctagagaatatgacaacccatcttttttaattcaactaaacctgtacactgaaaccagcaattaaattgcctaattacctacataacctaattaccatacatatctctttattttatttttttctaatcataattaccatcatactcatttaattctaatatcctctccctcctacctatatcatacatctttcgtaataaacaaatctccaacacatatctcttagattttttccctgttggatacatgcccgattttgtaacattaatttacatacccaaattaactactaagaccatacttaataagttaatgacactcatttgttctttgattccttcttttcaagcaacgctgatgatactatcccccccgccgacgaacttcgctgcagacatagcctgaaaagccgccgccgaagacgatga

SEQ ID NO: 7668 - DNA, 436 bp, Glycine max
  Clone ID: jC-gmle01810027b08d1
aaaacaatgcttaaatgcccaatgcaaaaaaagatcaatcagtggcaaaacccatgtaattaccgacccattttacagactggaacctaaaacctatgtaattaccgacccatattagttttcaaccaaaaaaacttttacccggggaaaacccaaaccaatcccactaaataattccaattttaaagttgtaagggggagtccaaatgtaaacccagaaaaaaacccctaaaaatgtttagccctaccctttagctttctccctacgggcctactttttttttgcctaagggataaacagattccaacaacccacagatgccaccctacagctaatccttggtgacacaatcggggttacagtcaacgtggatttaattctccaggaaacctaaagagaacaatggtcatgaatcaccaccagccttaccgaatg

SEQ ID NO: 7669 - DNA, 503 bp, Glycine max
  Clone ID: jC-gmle01810027b09d1
gatggaaatgcacaattttattatcataaataagtttcttataattttgcttgattatactagtacataaaacaagatcccgctgaagggacaaaaaatgagggacctatgtagttaaactataaagttatacatgggaaataattaccatattgctcaaccaactccttagtcggccaaactgtatgcttttgtccacacaatgggttatttcttaccaaatccaaaaagagatttgatggcattgatggcattctcattgatgaaagattcatcaaatcttttcaataaaggatcaaattcctctgatgcccttgcgttagccaggtcaggatcagttcttattctcttgaagtcttcaaaaccagtattcagagcttcttctagtgaagaaagtgcagcttgaatctggtttagcttagagtaacaacaagcaacattgtaacttgcaactgctgcttcctcaggtctggctttgatctaaaatagactaaatttctcta

SEQ ID NO: 7670 - DNA, 284 bp, Glycine max
  Clone ID: jC-gmle01810027b10d1
gagaaaaaccctggagtttggttttgaaattttttcttcatagcccatacatttttaaaagggacctcaaatacaaacttgctgggatttttttgcctaggctcaaaaacccccccgtaataccccctaaaaaaccatttcttgccaggggccagtacctaacttggggggattttaattcccctggttaataaacacatttgagctgaaaatatgccctatgatgaagaatgccacttgaatgaaaaggtgcccatactttccttgccatgcagaccgaaaat

SEQ ID NO: 7671 - DNA, 558 bp, Glycine max
  Clone ID: jC-gmle01810027b11d1
gaaagtaaagcttacaggtttttatttttgaaatacatgaaaaacattagtataagaaaagtgtgtgacaatacaagaaaacataaaaaagaactaagtagaactggagcatgtttatggtttagtatgttcagtctttcatctctgtgtgtgtctgtggtgacattgaagatgacctcgatgacattgcaagctccttggcaacctgttccatggtagggcgagatcgtgggctttcagtcaagcaagcaattgctatcttcacaattgatatcacctccttatcaatagggcttgttgggtgtggaagacgttcgtccaatttaaccatcaatgacatatgatcaagtgttgaggtcatagtggacgaagatgatagcaatagagaagatgtaacatcaccagggtgctctccaaacaatatttccaacgcaaagaccccaaaactatacacatcacatttctcatttgcttccattgtgtatgcaagttcaggagcagcatatccataggttcctgcaatgaggtccaattggatgaatctggattaagaaactt

SEQ ID NO: 7672 - DNA, 493 bp, Glycine max
  Clone ID: jC-gmle01810027c01a1
gtagtgtgcaaaagaaaactcttgctccttgattctgttccaatgcctcccgtaccaatttcccccatcaaagttgggcacattgatgatgtccaagagctaagaaaaaccaagccaaggacaattcctcaaagatttgtacgagacttgacagaaagaccaacactcactacacctcttcccccaccacatagtgacatgccagtcattgatttctctaagcttagcaaagggaacaaagaggaagtcctcactgaacttttcaatcttgcaactgcttgtgaagagtggggattttttcaggtaattaatcatgaaattgacctcaatctgctggagagcatcgagaacctgagcagggagttttttcatgctacctttggaagagaaacagaaataccctatggctccaggaacagtccaagggtatggacaagctattggtttcttagaggaccaaaaactggactggtgcaacatgtttgctcttgga

SEQ ID NO: 7673 - DNA, 425 bp, Glycine max
  Clone ID: jC-gmle01810027c01d1
ttttttttttttttttttttttttttttttttttttttttttttttttttttttttttttttttttttttttttttttttttttttttttttaaaaaggggggaaaaaagggaaaaaaaaaaaaaaggaaaaaaaaaaaaaatcccccataaacgggaaaaaaatttttaaaccccaaaaaaaggcccccccctttaaaaaaagggggggggaaaaaggggttggaaaaaaaggggggggcgccccccccaagaaccccctaaaaaaggaaaaggggaaaaaaaacccccggggaaaaaaaagccccggtttttggggcccttgaggaaaccaatttggcaaccaaaaaggggaaaaaggggccccaaaaaaaagggggggcccccaagggggaaaaacccggggaaaaagggggggcacaattt

SEQ ID NO: 7674 - DNA, 502 bp, Glycine max
  Clone ID: jC-gmle01810027c02a1
aagatacaatagagatggcaattctatttttgaaacaggcaaagcaatacgcagatgcaagaccaagctatcctccacaactcttccaattcattgctttcaagactccctctcactacctcgcttgggacgtcggcactgggagcggccaagctgccaaatctttagctgcaatatacaagaatgtgatagccacagatgctagtgacaaacaacttgaatttgcagccaagctcccaaatgtgagataccaacacaccccttcaaccatgtcgacggccgagcttgaacaaatggtggcatttgaaggaaccatagaccttgtgaccatagcacaagccctgcattggtttgaccgcccaaccttctacgaacaagtgaagtgggttctcacgaaacctcatggaatcattgctgcttggtgttactatatgccaagagttagtgatgcatttgacactgtctttgaccaattctatttcactaatgtaagcccttattg

SEQ ID NO: 7675 - DNA, 183 bp, Glycine max
  Clone ID: jC-gmle01810027c02d1
ccataaatgagtctgacagtcagctaacttgatttttatacctagaatcataaacttgtaagagtctaccatagcctcaagagtttgacaacaatggttcggtgagggtctaatttcaatggaagaattacgtgaaataaatccaatttacagacatgaactcacctttccaatttgaaaaac

SEQ ID NO: 7676 - DNA, 412 bp, Glycine max
  Clone ID: jC-gmle01810027c03a1
gaataatcatattaaatattattcagaaacaatggcccgatcatttatcaaaggccaatcttttgtagaagagaaggttcctttggaacacttatttctatttcagtataccgggtctctttgtttcatttcaaaatattcatagaattccgattttgaaatgaaagaaaagtgtggggataaatataaatgacaaaaagatattggaacataatcttggaagagatgatggaagcaggagttcattttggccacggtactagaaaatggaatcctaaaatgtcaccttatatatctgcaaagcgtaagggtattcatattataaatcttattagaactgctcggattttatcagaagcttgtgatttagcttttgatgcagcaagtgagggaaaacaattcttaattgttg

SEQ ID NO: 7677 - DNA, 422 bp, Glycine max
  Clone ID: jC-gmle01810027c04a1
gcataatattcttaagtgctatcttgaaatatcgcctgcatcatgaatctcctgccggtcatgttgataaaaggccggttctttgtatcacacattaatcttataaacctccatgcctcttggctgaatatccttaaccttatagactttgcaatggagactgatatactggtgtggtgatccatatggatgacatagagaatggattatatactatggtagaacatgcagtaaactggagaggatctggtgctctatgcttaaaaatggtatcctatggcgtcacctcatatctctgactggcgtcaagtgcttcatatgataaaccttattatcaactgttaggctactagcacaagctcgagctctagtcttggatgcaacttgagagggaatactattcttaattgatggcacagaaa

SEQ ID NO: 7678 - DNA, 539 bp, Glycine max
  Clone ID: jC-gmle01810027c04d1
aaacttgcaaaagtagatgtttcaagtttaataaaaagggccggattggtaccatgccaaaaaccagtacacagaaatattggtagagtcaagagtcgaattgtcacccagtatacataatgtaagtgtagcttctttttacaataagtggtagacaggaagaactagagcattttctctacacaattttccctttctttgactttacaacagagctcctgccagcgttagtaggaatgcagatgatgcttgcaacagatgcataggttcagccatgcatacaaccttgttctttgcctgctcatcaatattatagtctttctttcaatctccccaacatatttaaaaggtaaaaccgtaaaaaaacttcctaacacaaaatcgaacaaccaactgatgacatgtaaattctgacaaagttgggatcaccaaaccaacaaagagattcattctgtaacaaccaagcaattactgtgttaggcaaaatcatgcaagagatatcacgccatgctgcaagcagagcttttgggatccatact

SEQ ID NO: 7679 - DNA, 524 bp, Glycine max
  Clone ID: jC-gmle01810027c05d1
gagaaagaatcgatgtcatcatttgacactaaaaagaaaatatgaccaattcagtgactcttgttaatgaaacaaattttcattcatcctgagaatgtgagagtattgacatagcactgtatacctatgaagcaccaacaccgacacggacaccggacacgacacagatacggacacgtggatacctgtaatgtccaaaatatagaacgtaatacgggtgtcgtgtcggtgtcggacactgacacggacgcgtgtcggacaccagacacgacaagggactggagtgtccgtgcttcatagctgtatacagctaatgaaaatttctcttcatcgccataagatcactgatttccatcatcagaatgtcttccttcacccctctcatcactgggagacccccctcggcccttcctctgattccaccttgcccaaacccatgatgaaatcgcaatcgctcctattgcataaatctgccagagaataagaggattggttgtcttggcagcgggagagtggtcagcatc

SEQ ID NO: 7680 - DNA, 543 bp, Glycine max
  Clone ID: jC-gmle01810027c06d1
aagcattataatcgaagtcaatataatatacacacgtgataacgctctgagtgcttcgccaactgggggagttacaagaaagtagaaatacagcattaagaaaaagggtctatgagtcaagctgagcataccagatgccttggatcttaacatccttaggagctttagcccccaaatcagtatcagaaggctgaacactctcgaagaccccaataacctcaccagtctcaggcttggtcttggtgacactcaaggtgattttgcccttggaagaagaagcactcttgttgttctctttagcaagttcctcttcatctgctctgccaccagcaggcaaagcaacagcattgtcataaccagttgaggcaccccttcccttggggtccaagaaagaggaaccacggtaagaaggcactaggaactccccactgaagctgtctggcttcacagatgccaccaactgcttaatggtaaagaggaatggcacacgctctccctcggaagctgacagtgacagagcatagtcattccggcttctcctcg

SEQ ID NO: 7681 - DNA, 522 bp, Glycine max
  Clone ID: jC-gmle01810027c07d1
caagttcaatgaaaacattggctagattacagcacggggaacagcaacacaagaactgtatgttatgcataatcaaccatgtcatgtattatgcagcaaaaatatctaaaaagttcccaacaactctttgcattcctcatcttcatccatatattaaaaacccaccaaagtagcaacttaatagaaattgctacacattaaaggaaaaatcatgatccaaaaaatacacttcatgcatcaaccgaacctacggctctgcttacccttggcattatgtgcatatgctaccacattataaacgatactcaatgcaccagccaaccaaatacgtcaaatcaattaggatattagagcactcatgcagaatttgaccacatcatgtaaattttccaagctccatcttcctcttgatggttctctgaccataatatatcgatgaatctattattcccgcaacagtaaatacacctccaataattgcacaaatattggtcaggaaatgtaaaaatgggatatgttccc

SEQ ID NO: 7682 - DNA, 496 bp, Glycine max
  Clone ID: jC-gmle01810027c08d1
atctaaacttgcttttaatttccacaatgtaacaaattggcagatacagttacatagtggtctatatgctaatgctatactgttggaaggtaaaatccaactttcaagtaataaggtaaagcccctacactagaaataattaaggtaaggacctaccaatggactgaacatagttttacacttaagaatctcagcataagttctgataaataaaataaaatcatatgcatgcaacataaatatattacaacttacaagttacaacaaatattctttatctgaagtaatctcctgcgcttgcagtgatgttagaaaccattgtattctgctgtggcacattctcagacttcttgttgaggttatatggtgctgcattcatcaccctttccttgcgcttctccaaaaatcgagctaatgatgccttgcgagcctgtggcacagctgatgttagcatggtagttgtgttgactactttcggagtctccactttgttaac

SEQ ID NO: 7683 - DNA, 490 bp, Glycine max
  Clone ID: jC-gmle01810027c09d1
aagaaacaaagaaagatattttacaaaacgagaacagagtacatacattagaggatcagaatatcttctagcacagaagttaaaatttaacatgacattttacctgtttcagcaattcttaaagactacatagataaagtgcaacatacaacagcttaagggttaagacttaagactaaatattaaacaaagggatatgtagcttcttagtcatcagttcaccatcatctgtgctaactagtggagatatgtagcttggtactgatagccatttccaaagtagttgccaggattaggagagatgttataagttgcagaacccatgagaggagggcagtgattgtcagttggtgcagggtacatgtaaggtcggtcatacacgtattgaggatacctgtcagcaactctagcataagaagttatgtcagatagaatgttagtgacacgcgggccatatcccacaccattagcacggggtctcttgggttga

SEQ ID NO: 7684 - DNA, 428 bp, Glycine max
  Clone ID: jC-gmle01810027c10d1
aataaagctccaacaattttattaatgaaaatactttacaatttcagcacatatacactgccatgaatataattttgcacgctataattatctttcgccacaaacaatggagtagtgctcaacaaagcacaaaccaacaataataacagttttagttgcattaatttacacaagaaagtaaattaacgtaataggcaacacatgtgtgtcacgttcatgaggatcattttataatgatatgcaacattgaattaaatattctcatgcaatggagcattctggaggaaggccttgagggaaacgtctgatatcagtgcaataattgtaaatcatgtaattcttttgcacccaacggatctttgcctgccccgtggcgtccagtgattggccagtggaggaagaagtttgggaattgaagtttctgtatg

SEQ ID NO: 7685 - DNA, 411 bp, Glycine max
  Clone ID: jC-gmle01810027c11d1
ggcaagaaaaaacagggttctaaaaacctctatggaaaaggccctaaaagcttacaggcctaaaccataatcaggaaaaaaattggcctaaactttggcccggggaaatatgccaaaaaaaaacgggggccaaacatttttcccccaaaccaagggactttggggggggggaaacaaggggggaccctacccggaaaaaaaaggccccaattttgggaaacaaaccttttacaataacggggaacccacccaggaagccttatctcttaacaaaattcccaggcttttaaagggggcgccccaggcttttgtgctccaccatggccataactaaacattaacgggcaactacaaatggggacggggcatgccacgtcccctccctgggccattaaagccaaaccctccttt

SEQ ID NO: 7686 - DNA, 532 bp, Glycine max
  Clone ID: jC-gmle01810027c12d1
agtaaaggacaaatcttattgatcaatgtttacatgctttcatcatatattgctgcaaaggtagtagttgtggcaaatgacatggtactatcatggttgtctgaagaagaggttgtatacatagatgaattcttcatatcaatactactttcttcgttccttctaactttaaggtccataaaatcagaaattaaggcaggacctgttatcttactgtcattaacatccatttttccagtgagcatcttgaccacagaagacatcgatggccggagcttcggggattcttgagtgcaaagaaggctaatcttcagaaacttacaagcctgctcagcatcgaattccccgtttagtgatatatccaccagttcaaccaattcctttcgctcataaaggtcccatgtcctctccagaagaaattgttcttctattggtaatcgtgagtttatgttacatcttccactgataatttccgcatggaggacgccaaagctgtaaatgtctgctatccttgttagcttcccccctatcg

SEQ ID NO: 7687 - DNA, 547 bp, Glycine max
  Clone ID: jC-gmle01810027d01a1
cgcactcttctgattttttcatttaaaattaagtacgtggcggtgagcatggaaaatgcaagcacgtctagcttagcgagaacgaaatcggatcagctactggagacggtggccacaacagctgagaagtcgccaccttcggcggagggaggcggggtcctgtcaaggaaatcgagctggaggatgacggcgtcgtcgccgggtggcggcggtgggagaaacacatacataaggaaggcaaggagcgctcagttgaaggtagaggtggacgatgttggcagcggcgtggctcttagccgagctttcagcgccagcttgggcctctcattctccttcaccggcttcactctccctcccgatgaaatcgccgattccaaaccattcagcgacgatgatatcccggaggatattgaagctggaactcctaagccaaagtttcagacggaacctactctggcaatatatctaaggttcacagatgtgacatacaaagtaatgatgaaaggcatactaccactaaggaagacgatatctttaaggggatcac

SEQ ID NO: 7688 - DNA, 433 bp, Glycine max
  Clone ID: jC-gmle01810027d01d1
gcgaaaacatttttctgttcatattttattcgtaatattgctaggagaatttacattatcaaatacaacaaatgatgtgagttgaactacaatcgatacctatacaaatttactattaaggaggtgcaaatgaacagagaagacatcttcagaagaaaggaataccaaagactagcttccaccacatgaacaaactgcactgaatttacttccctgtcaagctagagttgccctcttgccttttgtatcccttgactgggcagcaaccgatctttttgaatccaggaactggtgatatatattggagagtcttctcttctcttcttctgaaacagatggtctagccttggatgctgtgaacttcagaagagcatcagtaataactgggtgttttttctggcctagaggcatccacactgtccagaacatcatg

SEQ ID NO: 7689 - DNA, 202 bp, Glycine max
  Clone ID: jC-gmle01810027d02a1
gtttttcaaattggaaaggtgttttcatgtctgtaaattggatttatttcacgtaattcttcattgaaattagaccctgaccgaaccattgttgtcaaactcttgaggctatggtagactcttacaagtttatgattctaggtataaaaatcaagttagctgactgtcagactcattgatggaaaacatattgaactaaaaa

SEQ ID NO: 7690 - DNA, 375 bp, Glycine max
  Clone ID: jC-gmle01810027d02d1
gattggaaccccattttaggggaaagggtaaaaaataatttgattaaaaaatttggtatttgaagcctttattcactttgcctctatacttttcagcattaggatcaaaatttttgggatttttacatataaagggttttgacattggttttaaaatatgggggcggcctttaccatgggtcaggaaaactgattttggtgaaatggttgccaataaaaccatgggaagacctaagggaaaatttttttttctaaattattgggcttaatggggggtttatcaaaaccaaggggtggaaattggtttggtacgcctcaacataaagggggagttttgctatttccgattgaaaggttgaaaatgactcaattggg

SEQ ID NO: 7691 - DNA, 445 bp, Glycine max
  Clone ID: jC-gmle01810027d03a1
ggtcaccgttgttcaggttgttttcaggcatattgactgtgctagtgcgtataagaatcaagcttatgtaataatattgttgacaacggttatataattatgggttttttttctcttttttaattacttttctttatactatttggcttttctcaactataagaattataagatgccaattgttgtttatttccccaatttattggtgttgctagtacgttatatgattttgtatcgcaaaatagctagaatacagtagtttttatgctagccaatcgacattatatatttttaattgtggtctttatagattggttctgctcttaagaagctttatgatgatggtgtggtgaagcgtgaggacttatggatcacttgcaaactctgggttgttgacttttagtcattgtgatctcttttagcatattgagatagattgactgtg

SEQ ID NO: 7692 - DNA, 490 bp, Glycine max
  Clone ID: jC-gmle01810027d03d1
ggacacaaggaatttaatcaatttatacacaactttagtacacaagttgtggttcaaactctgccaaatctacagaccctgactcaattggaggcattagatatgtagccaagagtttagaacaccaaggcagcaaccagtgggatcctctttaagttcttcaccaccgctatgtcatcgctctcaccaacagcaacaagcttctcatttatctccaccatccggtccaacttccgcttgaactctgggttttcaacatcaagaacggctgggaaaatccgagcagttgtgcggtttgtctcgataatgacatgcatgtcaaattcttttgtgttaagtccaatgccttcgtagaaagctgtacgttggcaatcattgagatacattgtgacataaaccgatagacagaagaatcgagaccacaactttgccttccagtcatttagaaattgtggctgtgccttcatcagggcagagaagaaatctccat

SEQ ID NO: 7693 - DNA, 507 bp, Glycine max
  Clone ID: jC-gmle01810027d04a1
ggtcactgacggtcaaggaggtttcaggcatattgactgtgctagtgcgtataagagtcaagctgaggtaataatattgttgacaacggttatataattatgggtatatattctcttttttaattactttttttataatactaggcttctctcaactatcagaattaaaagatgccaatcgttgtttatttccccaatttattggtgttgctagtacgttatatgattttgatttgcaaaatagctagaaaacagtaatttttttgctagccaattgacattttatttttttaattgtggtttttatagattggttctgctcttaagaagccttttgatgatggtgtggtgaagcgtgaagacttatggatcactttcaaactctggtttgctgtctttagtaattgtgatctcttattgaatattgagaaagattgtatgtgttttgaccagtttggatgctgaatgaatgatcctttgatttgttggctatatttttaggtgttc

SEQ ID NO: 7694 - DNA, 498 bp, Glycine max
  Clone ID: jC-gmle01810027d04d1
ggacacaaggaatttaatcaatttatacacaactttagtacacaagttgtggttcaaactctgccaaatctacagaccctgactcaattggaggcattagatatgtagccaagagttcaaacaccaaggcagcaaccagtgggatcctctttaagttcttcaccaccgctatgtcatcgctctcaccaacagcaacaagcttctcatttatctccaccatccggtccaacttccgcttgaactctgggttttcaacatcaagaacggctgggaaaatccgagcagttgtgcggtttgtctcgataatgacatgcatgtcaaattcttttgtgttaagtccaatgccttcgtagaaagctgtacgttggcaatcattgagatacattgtgacataaaccgatagacagaagaatcgagaccacaactttgccttccagtcatttagaaattgtggctgtgccttcatcagggcagagaagaaatctccatgtctgttct

SEQ ID NO: 7695 - DNA, 415 bp, Glycine max
  Clone ID: jC-gmle01810027d05d1
aaaacccccttttgggaaaaaaaaaggggctttatttaaggggaaaaaattttccaaactgtgccaaaaaggcaaaagggcccttttaaacccaatttttggaaattttaccggtttaaaaaaaccccgcaagaaaaggggtaggggggtaagaacccaaaaatttttttttaaccccaaaaaaaaaagcccgaaaaggcccgggaaaagggacaacttttggaaaaaaaaaaatttttttacctttcccaaggggggggggaaaccttttggggaaattcggggggccattgttaacgggaaaaataatccaagccgggggggggaaacccccccgttgaataccacggggagaatttacaaccacagcttttgaagggaattggcttaccgggaaaagacaattcccaaaaat

SEQ ID NO: 7696 - DNA, 365 bp, Glycine max
  Clone ID: jC-gmle01810027d06d1
aaaaaagggggaaaggccccccccctttaagaattacccccccgaaaaaaaaaaccgccggggaagtctttttcccacccaaaaggctttttacgggggtcttatttacccccctcttaagaaaaaagggcccccccaaaaatacgggtttttagcagccccccaattttttttttttgaaaaaaaaaaaaaaagaaaacccctgtataaactttgggggcactgaagggatcaccacagacctaaagggggtccccccgggggggggccaaaaggttaccccccccccaaaaatgggggggggtgaaaagaactaaaaactccctcccctcggggggggcaataaaaaaggccccccccttggg

SEQ ID NO: 7697 - DNA, 472 bp, Glycine max
  Clone ID: jC-gmle01810027d07d1
aaaatatcacacagtttacacattattccgactatcaaaagaggtgaggcaatttccaaatggactgtgcgttcttgacatgatggtcatgtgtaaaatcctttattgaagtaatcaggcgaacgccactacagataacacaaattccagatcagtgctaggattgcctagttccagaagatctgtcaataacctgaggaacagatctagctggcataagagtattaccagcaatgtcaaaatcttgagaacttcccaagagattatccaaaactgttgactgtgagggattgtcaatgaggaagctcagagtgccatgaacattgatttgcccacgtggaactccacattacaaaaccatgatgaggaccacatacgtatattgggaagatcaattgcgatgaatgaggattcgagcttgtgcagttacatgagtctgaatgctctgtacatgtgctgtgtgtaaaaacac

SEQ ID NO: 7698 - DNA, 541 bp, Glycine max
  Clone ID: jC-gmle01810027d08d1
atctaaacttgcttttaatttccacaatgtaacaaattgtcagatacagttacatagtggtctatatgctaatgctatactgttggaaggtaaaatccaactttcaagtaataaggtaaagcccctacactagaaataattaaggtaaggacctaccaatggactgaacatagttttacacttaagaatctcagcataagttctgataaataaaataaaatcatatgcatgcaacataaatatattacaacttacaagttacaacaaatattctttatctgaagtaatctcctgcgcttgcagtgatgttagaaaccattgtattctgctgtggcacattctcagacttcttgttgaggttatatggtgctgcattcatcaccctttccttgcgcttctccaaaaatcgagctaatgatgccttgcgagcctgtggcacagctgatgttagcatggtagttgtgttgactactttcggagtctccactttgttaacagaggaagtggtaccttcagatgttttagctgcgagaaactcatc

SEQ ID NO: 7699 - DNA, 452 bp, Glycine max
  Clone ID: jC-gmle01810027d09d1
gtacaataataaatccatattcttataattaaaagtagtagattacagcgatgcacttgagaaacatattaagtggactaattctccctggtcaagcatgaaaaaaaccagctatgacccaaggtagagagagattatacacagaatactagtaattaactaagactggctctgcaattgccaaaaactccattgcagtagcagccacctgagaagacactaagacctagactagaccatacatagtgaagattaatacccttacataacaacataggacactaagaaaacacggcttcacagagaatcccagtcgatctcataagaggggtacttctggagattaaaattatccgaatcaccttcccactgcggctcgctgacgtcagcgaaagtcagaaccgaaagcggcgaagaaccttcagatgaggatgaagcagcttcgaccttac

SEQ ID NO: 7700 - DNA, 539 bp, Glycine max
  unsure at all n locations
  Clone ID: jC-gmle01810027d10d1
aactgaatatacgctgaataacttaattatactgaataatcgcagcagaaatatcaaaataattgcagcacaagggaattaaaacaaacaaacatacatactgaataacttgataccaagaaaaaatatcattctatgcttgtgtaaagagccgaagttatcttcaccttaaagaattgtagaagcctaaccagattctttgtaaatccacgatatttcttcaaaaataccttgacaaccacaatgatattgtcatagcagaagtcatatagcgtcttcacattgatattccaatcatcgccagaagatttacaatgttaatgacctaattctgcattacaaatgttgtcgcccgaatctgaacttcttacaagtagataattgtacaattatacaaagcccccgcaatacaaatggcccatcttatttggatacaagtaaccggagtttaccaaatcaagtaagatgaaaaagggaacaanttacatgacaattacaacagtatagcttcacatttctatatgcagtaaatatgcata

SEQ ID NO: 7701 - DNA, 506 bp, Glycine max
  Clone ID: jC-gmle01810027d11d1
aacgaaataattttgatatgtagattaaataaacacacgaagtacaaataaacattggtctctctaatcacaaaggagattaagtccattgtggtgtgccttcatgactgaattataccaaagtactacccttaacatactcagtaaaagccagagcaatcaaacccaacatagcaaatctcccattccacagttctgcatctgaggacatgaaccctttggacttagactccacgctgacaccttggaagagtggaatcaaggaagcaagggtaaggaccacacttgtccccaagaaccatgggatgccaccattggatatttgttctaacacaccttgccctttggctacttccactgccattgcagccacaaacccaatcatggccaaccttccattgatcctctcaggtgctggcccactgaatgccaacacatcagaaaacttagtgctcacctttggtgaaagagcagagactggctgtggcttgggttctactgatggt

SEQ ID NO: 7702 - DNA, 504 bp, Glycine max
  Clone ID: jC-gmle01810027d12d1
aacgaaataattttgatatgtagattaaataaacacacgaagtacaaataaacattggtctctctaatcacaaaggagattaagtccattgtggtgtgccttcatgactgaattataccaaagtactacccttaacatactcagtaaaagccagagcaatcaaacccaacatagcaaatctcccattccacagttctgcatctgaggacatgaaccctttggacttagactccacgctgacaccttggaagagtggaatcaaggaagcaagggtaaggaccacacttgtccccaagaaccatgggatgccaccattggatatttgttctaacacaccttgccctttggctacttccactgccattgcagccacaaacccaatcatggccaaccttccattgatcctctcaggtgctggcccactgaatgccaacacatcagaaaacttagtgctcacctttggtgaaggagcagagactggctgtggcttgggttctactgatg

SEQ ID NO: 7703 - DNA, 523 bp, Glycine max
  Clone ID: jC-gmle01810027e01a1
aaatacttctgccttttcttgttatagttatagtaaattgttgcagcctcatttttcaacaccatcgattacatttcctgaagtaaacaacctcagttgggattctcatgaatcccataaattatctggaattacttctggaaattgtcagtatggtggctcaaatcagaacctggagaatatgatcggtacagtcatttgtcagtatggacaagttacaccaaaattatcaaacagtcaatgtggactcttacctgtttctggggttatctccaaccttaagtctgagggacatggtaatgttttcacttctttgttctatgcacaatctggtattcaccctatgtcgagtccaaaacctgtctggcagaatgagagttctccctttcccacaagtacctccacccagtcctatcctgaaagccacaactcagatcaactacatgactgctccaatgatgctacttgtcttaatcaaaatgtaaaggataatactgattcagatcacgctaggcatgattct

SEQ ID NO: 7704 - DNA, 542 bp, Glycine max
  Clone ID: jC-gmle01810027e02a1
ggaatgttataggaggagcatttcacgttagcaagaagtgagacttttgccattagagtgtcatacgcagcaaacatggctctttttgttgccaaagtttatgcatcaatcataagtggttccctagccatcattgcattcacgttagactcacttcttgacctcctttctggattcatcctctggttcactgcattttccatgcaaacaccaaacccatatcagtgccctataggaaagaaacggatgcaaccattgggaattcttgatgttgcctctgatatggcgacacttggactgcagataatcttggagtctacccgcacattaatatcttctgaaaatgcattcaacttgaccagggaacaagagcgctgggttgtgagcattatgctttcaatgactttggtgaaattcctgctgatgatgtattgtcgatcttttaccaatgagattattaaagcctatgcccaggatcactttcttgatgtgatcactaatgtcattggccttaatgctgcacttttggcaaacaatgttga

SEQ ID NO: 7705 - DNA, 475 bp, Glycine max
  unsure at all n locations
  Clone ID: jC-gmle01810027e02d1
aaaacaaaaacaaaataccatatacgaaggttttgccgaagagccagcactcagcacagctagccagttttagcgttgcatttacaggtaaaggacaatcaaagaattaaatactttttaattaaaagaaacatggagagaacttacaccataatccgtgacacattttaaaaccccaaacactaacatagagagcacataaaaccacacaacaaaattatgggaattcccacatcatgaactgaaatcagatgcaacaaactccagtcaaccaccagacccggcaaaacaccaatcaagtgacatcatcagcaagggagatgctatctgcttccctgtatatatgcatttgctccataatggaattgagacaatctttgactaagcagcaagaactatgatcacgatgagaagcacaatcccaaanatcaccaaaagcaagcatgtcaaagaggaatttgatctttgggttttt

SEQ ID NO: 7706 - DNA, 207 bp, Glycine max
  Clone ID: jC-gmle01810027e03a1
ggggagtcggatgtacagcttttcgagtgaacttgacgtcagacttgagccattagagtgcagagaccctgagacagggatgctgcagctgacggagttgatgcatcaggcagaagcggttaccttacctatcgtggcatccatcgtcagactcgagttcatgacctccgttatggatacatcctatggttcactgcatcttgcatg

SEQ ID NO: 7707 - DNA, 499 bp, Glycine max
  Clone ID: jC-gmle01810027e03d1
agaaaggaagggaccagtatattgaattgtgacagaagccaaatagcaaccaccacgtgaatcaactcaaatgtactacaacttggaaatcactaacttattggaaaagctttgattacgcactgcagcttcaataagacttctcgcatcaatccctttctcgtgaaaatatgttttaacaccaaaaataatgttgcaactaaactgaattttaaatttgagcagaagtaacccttcatttgtaagcagctttcactgctttctgagcagcatcatctaaatcttcagccgttatcaacgccataccactttccttcaaaattctttttccatgatctaacattggtgccttccagacgaactactacgggtactttcagtgcaacctcttttgcagcattcactattccacttgctataacatcacacttcattatacccccaaaaatgttaaccaaaattgccttcactttgtcatcagcagtcaatattttaaatg

SEQ ID NO: 7708 - DNA, 504 bp, Glycine max
  Clone ID: jC-gmle01810027e04d1
gatagtgcaaaagctttactctgagcgttaatcaaaattaagctcgaaatttatcccagaatttacatgaatctatctataaaatgacgcccggcacctgaaaaattaagatataaagaaaggaaaaagaacctttcttcgtgacaaaaaaaacaccgaattatgctttgacccttttgaccacataatagccagtgatcttcatggaactcatcaggagaacaatgactgcatcaaaaccaaaactactgaggctcttgatgttttcttccacacaggtattgcccccacgcaatgtcaagttctctcacttgagcttctgtcagtgaaaaatatcatgatttttgtgtcaacttgtttcatcattatttttcaaacttaaaccacttccagtttgcataaagtgcttcattttcaaaaggcaagcaactggttggtaggggttctaatctttgagtggtgacagaaggtggtagctcttgcttatagttctttgcatcatat

SEQ ID NO: 7709 - DNA, 551 bp, Glycine max
  Clone ID: jC-gmle01810027e05d1
acaagaagtcatcctactcaaactaggtaagactatttatatgtgaaaaagttttctctccaaatattcaacataattggatcatcctctacgagagaccatcctactcgaactaggtaagatcattacaattgacaaagttctcccttcaaatattcaacataactgcatactcgtgtcttcggctctattaagagacattaaaaggtcatcaaatttatttcaatttctgcaagttggatacaaaatttgaggcagccaagccagcagaacccccaattacactgaccaaggcaaccacaacctgcaaccccaccaatccaaggttgtcctcaggaacgaagtaaacaaataagggtccaaggatcagcaaccccaagctgagggtcaagagtgtccttggagttccaggatcagttgcagcagatagcacacccaactcttctgcctttgagaggagtccaagcctctctattggtgagagggagaatccaaacttctctgctgcagatagcaaccctgctttctctgctttgctcagcagcttcagc

SEQ ID NO: 7710 - DNA, 328 bp, Glycine max
  Clone ID: jC-gmle01810027e06d1
agattctgtttgtgtatttttgtgccttactaatttatttacctacttaatcatggggtgactcatgtgccaacttagtttgtggttatggcagaaagcgaaaccccgggccacatatcaatttccagagcgacaccacagacaagggcccaggtggccactggacttcaaaatagaggagcctaggcgtttgaacacaaaagtggcaaccaaaaatgttcaaacatgaaggactgccccgaggataaaaaaaggatggggacccactattgacagaaccggccaataggggcggctcaaaaaaaaaaatgaatgcacccccacatca

SEQ ID NO: 7711 - DNA, 518 bp, Glycine max
  unsure at all n locations
  Clone ID: jC-gmle01810027e07d1
cttattacttcatttttgttctctatcttctcttttcttttttcgggttggggctcggacagaattaggatctgacaatcactcttcctctagtcctcttgctcttgccatcacattttgtgcatcgtcttcatgtcatgtatgacacacatattcaaacattcacacagcaagaagtagaggttaggatcaaacatacgtactattttcataaaccaatctcaatatctcaagtaataaaataacaagtaatacattgattcacagatagcataacagctaaaaaatacaactaaccaacacctataacagacaatttgcgaagggttaaacaaacccggaccagacctagagtgcgtacagaaaaaaattatcaatatatagtataaatgtcacacatcactgatcgaatttagaaatgcaaaacacanagcactcaattctaacaattttgattgtctaaatccattggtctgtaattcctcagaaatcaatggtaacactccttaatacactac

SEQ ID NO: 7712 - DNA, 513 bp, Glycine max
  Clone ID: jC-gmle01810027e08d1
atagaaaatcttgttgttgccattatagtaatgtaattcaccaggtaaaacaattttcaatcatcactacaacaagctttggaattctccttgggatcaattccctaactacaaaacaaacagtccccactgctataacaaaaaaaataaattaattgctctttcagttgagcgttttcagaactgttcaccatgctatgcaattgatatctacaaaccactaaaatttcatctatgatctactttccttttgttgtacttcttttgatttggagattttgtgaatgagcagcttccttcttaacagatttaggaacagatttcttgtcttttctgacaatcctccgtgccaatgccttgagcggaactgtaacgtccaaaggaagaagcacctcttccaactcttgccaatcaagatcttctgagtcaccatcttcatagtgaaccctgtaccacccagaatctttgtcgaaatcagttaccatacctgagaaatatcttcccataaaccac

SEQ ID NO: 7713 - DNA, 459 bp, Glycine max
  Clone ID: jC-gmle01810027e09d1
actggttcattttccattttttagttattccgatattcggacgcatcaacttgttatgaaatcacattgatagcctctactcgtcctagctcgtctaagagctagatttgcctcaattgtttggctcttgccttccgccttattcaaattagcttctgctatttcaagagtttgctgggcttcttggggatcaatggcactacccttttccgcatcatttactaaaacagggatctcattattggttattctagcaaaaccgcccatcagagccatcgttaaccattggtctttaagaagacgtattctcaaaatacctatatctacggctgtggcaataggcgcatgatttggtaatactccaatttgcccgctattagtagataaaatgatttccttcacttccgaatcccaaacaattcgattgggggtcagtacacaaagatttaaaggcctttc

SEQ ID NO: 7714 - DNA, 324 bp, Glycine max
  Clone ID: jC-gmle01810027e10d1
aattgagttatgttttacaaattattcgcatttttggaacaaaaaccactagagactacaacgggcgcaactgcagggacatatgaaagctatgcatacactgtttacatacaactacgtcgtcactcacgtacgcataagtcgtctaagggatactgaccagatctatgcaaaatcatgaaagaaaccaacacaacatcgaaaactattgacacaaatgtacaccaatgaaaatgtatgagaaatgaagggcaatgactgcttttatgccaacgatctacagccggctattggatcctcgggggtcagattcatgctggatag

SEQ ID NO: 7715 - DNA, 494 bp, Glycine max
  Clone ID: jC-gmle01810027e11d1
gagttcaacatgccgcagcaccaaacacatgcttacaatatcagttcaaatgccaacattccttacaatcatcttaagtaggatagtgtcagtacgtattgtagcatgtactgtttaacaacataataaaaagcacttgagactgattgggatttgaatatcaaagaagagaaggaagaaagctgagcatttgttgctaccctaccaaaaaaacagacaaaatgctccacaaattttgtaccttattcctaaaaggttaaaagtaaggctatagaatacatagaaagttcaatctgaccaagttctcaaacctcaagttttctcatttggctttacacgtcttcatatattgcaagaatttctactgtcatcagtttataagttaaccactcccatcaagctgtccatgagaaaggaggtgtgccatatattgcgcatgatatgcatatggcgacttcccttgacgctcgaagtgcttcgccatgacgcataac

SEQ ID NO: 7716 - DNA, 554 bp, Glycine max
  Clone ID: jC-gmle01810027e12d1
aactcgagaagagtcactgattaaaggtgttataaaatcagtttttagataactatacatataaaatactatataactctaaaactgattcggattctatagtgatcttcaccctataaatagaatacagagagtaggtagattgtgacttactttattggtatattaacaaatacttatcaagaaaactccctgctttaaacatctagtcatattaatctaaccatagcatcgaattggatcattgcatcccttagaagcagattgcttggaaccaaatctccctcctttctcaaggtactgttgatggtattcttcagccctgtagaacttcttggcaggaaggatctcagtaacaatcttcctgttcagcttcttctgttgttgttctaaagactctatggctgccttctcttgttcaggtgtgtaatagtatattccagacctgtattgtgttcccacatcatttccctgccgattcagtgtggtaggatcatgtctagcccagaacacatcaagcaaactctcatagctacatacatggggatcatatt

SEQ ID NO: 7717 - DNA, 523 bp, Glycine max
  Clone ID: jC-gmle01810027f01a1
caacgactgcaagtacttcgtttgaaattaagggaactgtcaatcaaggggaaactgtattggatgttcctgacgttcagggtgaaccagagagcagcaagttgacagatgatgatgttccttctgctgaagatgatatttctgaaaatgtgggaaccagtgcaacaaatggctcctcaacagctattgtggatgatgaaagtaacctagtcagcaatgtttctagcccaacgacaggtatagatagtgccattgagaaggaagaagaggttgcttctggaagtttgattcctgaagaggatctatctactgtaaatccaataatagaagaagttactcagacagatgtcacaaacgatttgaaaactgacacacctgttgaaatagctaatgaaaatgtaatagaaactggagttgatcaaattgttacggaagatgagaaacaatcacgaactactgatgcaatagaagagtttgcagctgcagtactaacagacagtgatgtggctgaacctagccctga

SEQ ID NO: 7718 - DNA, 464 bp, Glycine max
  Clone ID: jC-gmle01810027f01d1
aagaaaaaagaaagttctaattattaataaattatatctatatatatatatatacagatagatattctatatcttttatcttaattaatatttgacccctccttataatgtgttatagttttctttattttttaggaacttatccattccttttttaatgtgcccgacaatccgaaagaattctgggggaggggtcatttcgtttttgatctagaataaatagagcttcaagaaatgagagaattaagaatacccacgagaaacactaatccaatccataatgatgtaccggaaaatacaacatttttgttattcgaccaaccttcaggagaagcaaatacaacaggtacactaatcaataaaataaatgaaatagcaattaatgcaaaaacagctaattggaaagcaatagtcatgtttctaatccttcaatttaccaacaaaagaactttaccatttgatcc

SEQ ID NO: 7719 - DNA, 407 bp, Glycine max
  Clone ID: jC-gmle01810027f02a1
agctgctgctggtgcagcactttccatgggctcccacttatacaaagggatgcagatgacctttatcattgcgagtcactgccaccctcaggccattgataggtgcaagacgagggctgatggaatgcatctgacagtaggtactgcagatcttaaggacatcgattacaagtctggggatgtatgtggtgagctcgtgcagaaccatgtcactgaacgagatgttaaccactatggggagtatgtgaagaaggctcatgctcatgaggtgatagttgttatggcaagagatttggtggcactgactgtgttgaagcctcctggtgagtgcggggcctaaatgtgaagctggatcagctcacagtttgtggtgccaatggggaatggatggccatatgcaaattgct

SEQ ID NO: 7720 - DNA, 497 bp, Glycine max
  unsure at all n locations
  Clone ID: jC-gmle01810027f02d1
gatcacaacaaaattttaattaaaaattcgaactaaaatgtaagacttttaaacataaacgcacaaccattgtataggggggaaaaaacaaaacgctttgatttgaagcggacaatttttcccatttacattggatcactatcgcctaaataaatgactccatgaagcacatttgcagcagcacaaaatgcacagccgctgccttttattaatccatagatgccatcatacacagcactgcattactaaccatgacgttcaaacttcaggggctgaccaacttaagagagtttgccttctcttgcagagaatccaggaggctgtcaaagctcttcttaaacgagtccactccttcaagttcaagctgggaaccaacaaagcttcagtcaatacccaatttctggagagcattgnatattccttcagcttcagatgcctttgagtctattggcctggatacggtcccatgatcaataaatgcttgaagggcttgggct

SEQ ID NO: 7721 - DNA, 356 bp, Glycine max
  Clone ID: jC-gmle01810027f03a1
aactgctgctgttgtcacactttccaagctcctcaacatctaaagggggaacaataggacctttataattgcgagtaactggcacccgtcaaccatggatatgatctgaacatgggctaatgcgattgaactgaacgacggaactgcagagcttactgacattgatgacaggcatggagatgttagaggtgagctagtgcagtaccctggcactgcaggagaggatgaggactatggggagcttgtgaagaaggctcatgctcatgacagtgaacgttgttatggcaagagattcgctggcactgactgacatggagcctggcggagagttctaggcagatattggtggaggatca

SEQ ID NO: 7722 - DNA, 255 bp, Glycine max
  Clone ID: jC-gmle01810027f03d1
aaaaacgcaatggttacttaattgaatattgattaagagcaagatggtgagtgtcagggggacgacttcactccaacaactgacaactgtcatacacaatctggatcttagagggatagcttccagtgtaccccagagttgatctaagacgaccttatatgcatgtcacacatctcactgtaagcgcctagagtgtggactgatcccattccctaaatcaaggcacataggactataccctagttaaccaacatt

SEQ ID NO: 7723 - DNA, 508 bp, Glycine max
  Clone ID: jC-gmle01810027f04d1
aagtggacactttaactcaaaattatagaggaagacagtccaatatgaaaaatatagtaaaatcatctcaaacttggcatcttctctttgcacctaagacattgagaattctaagaatgttacacgcaagtcccatcacaacttctagcacttggatcagcacaaccttcaggaacagaaatatttacttgccaagtttgctttgcctccaattcaagattggaagaaagttcccctgttaatagcatcctcgttagcatttccaagtgcagcctcgttcaagtacttgtcagccaattggactctcttgacattctcttgttcttggacaagcatgttaccatacgtcaagagcttctccagagtcatcttgggctgctcaaaggttggaggtccatcttttgagttcacaagcttcttcccaatgccgtcaacaccaacaccagaaatccacttcctcacttcgtcatcatatactctggccctcagtgcaccaaagaaatcaatg

SEQ ID NO: 7724 - DNA, 441 bp, Glycine max
  Clone ID: jC-gmle01810027f05d1
gaggctgattcagcttcagtgttattggaaggaacttttccctttgggcttgatgaatcatgtgcaggctcagttggatcaaaagtttgatcattcaattgagtagccttctcttgttgcttttgttcagccctccatgttcttaattcatgttctacagctaactttccttcattggccttttcggaattcccagttgcaattttcagagattctcttcttacagacaactcctcattcaggtcttctaacttctccaggcttcttaattcagacttccttgctatctgaatctgataagtagcagcttcgatcctcgcattggcttgctcctctgccttataggctctactgctgagctcatgatattcttctagtgtgagtgtcaccattgaggaatagtccttgtcatttttgttgcccttagctgattcactcttc

SEQ ID NO: 7725 - DNA, 184 bp, Glycine max
  Clone ID: jC-gmle01810027f06d1
atgaagcataaggacaaggataatttattccccaaaggcatagattctatgctatccagcaaaaaaaacacctcaagtacaatacttatcaactccacacaacttgtgaaaattgttgttcttagtgaagtatgaataattgaatatacaacatatcaacatgtctgaatggaatagttttttg

SEQ ID NO: 7726 - DNA, 520 bp, Glycine max
  Clone ID: jC-gmle01810027f07d1
agagcttcaaataatagcagttttatattgtcttccctaccaacaggttatacataaaaacggaaacaaaccagaatcagttttatagaacagtaatagaaactagatctagccggaacaaaaccatcccctcaaaagagacaatcatcaaccggcaacaggaagttgcagcttggtatccatcttcttgtctaaagccaccgtaatacaccacacccaagttcaaattcacatatcatgttgggcaaactcctcctcctcctcttcctcttcatactcatcctcatcagcagtggcatactggtactgctgatactccgacacgagatcgttcatgttgctctcagcctctgtgaactccatctcgtccatgccttccccggtataccaatgcaagaaagccttcctcctaaacatagcagtgaattgctcactcactctacggaacatttactgaatggaggtagagttaccaatgaatgttgaagccatcttcaagccagttgggggaatgtcacag

SEQ ID NO: 7727 - DNA, 482 bp, Glycine max
  Clone ID: jC-gmle01810027f08d1
agagcttcaaataatagcagttttatattgtcttccctaccaacaggttatacataaaaacggaaacaaaccagaatcagttttatagaacagtaatagaaactagatctagccggaacaaaaccatcccctcaaaagagacaatcatcaaccggcaacaggaagttgcagcttgttatccatcttcttgtctaaagccaccgcaatgcagcacacccaagctgaaattcacatatcatgttgggcaaactcctcctcctcctcttcctgttcatactcatcctcatcagcagtggcatcctggtactgctgatactccgacacgagatcgttcatgttgctctcagcctctgtgaactccatctcgtccatgccttccccggtataccaatgcaagaaagccttcctcctaaacatagcagtgaattgctcactcactctacggaacatttcctgaatggaggtagagttaccaatgaatg

SEQ ID NO: 7728 - DNA, 398 bp, Glycine max
  Clone ID: jC-gmle01810027f09d1
gggtcttaatttattatatttataaatggcagaaacggaggggacataaaagttatttacaagagaggatgttcctccatattaacatcacccgaatccaaaacaggaattctaatcatcatgtttggatcctaacaatttcagaaaaaaaattttaacattttcaaaaaaaattgtacccaatgattctaaataagaaatatctggaaagaaagcaaaattaaacccataaccataaccattgcatggggctttttccactttcaggaacatagcttttgccgaattcatgatctccaggaaccacacacacacgtgccccacaaaacaaccttgccgaagcgctttaaaataccacggggtttcaacgccctttgattcaagcattcagttgatcg

SEQ ID NO: 7729 - DNA, 454 bp, Glycine max
  Clone ID: jC-gmle01810027f10d1
gacagtgcaatgcaattgaagaatgaatcctcaacaattcatttccagagatttgaatttctttcaacagtgcctgaacttgtaaacattacaatgactctagctgaatacatatatttacagaaacaaaactggtggctctatttgccttattgtgttcgtacatatctaagcacaaccatcttaaaatatagtttgctcacctagctcctgaccagccatgccctccctgagaaccctcgcaaaaaactcttccaatgtatcattaccatagctaggtgtcttctcagcactgtactctccagtctcgggatccagaagcaacatactttccgctgcatagtatcttccaatcttcccaaactcagcagcatcttccagtgaaggaaagaccttaaccagaaagtcaagaaccccaatggcaaaatccattatttcgatcggaactttcaag

SEQ ID NO: 7730 - DNA, 542 bp, Glycine max
  Clone ID: jC-gmle01810027f11d1
gaattaaaaattctgatcgcatattaaattcccaagtcgtattcaaatccttatcaataaaaccatgaagccaaattaaaatatttctagtacacacccaaaaattcttcaaaagaaacttccgggaatctagcacgaccaaaatcataaattaatgaaattctaacccatcgataattaaatttgatgggaattatgatgtagcagtagcacacgtctcaccattaaaatcaaaataccaggtcaaagtttcaagtaacttaggacagaacgtaaaaaaaaactagataaaatgagtagatagctcggtacattaagtcacttagcacttgacctcctttaaggcatatgcaaagtacaggaatgttggatcagcagcgccgtccttgtagtaggcaaagaccaagcaagcatcatcacccatgctctcaccaacaaaaaattggaaatctttaatcttagagagcaggtatttagttgctccctcgatggtgctcttaaacaactcctggtgctctgcatcgagcttgggagtcaaattc

SEQ ID NO: 7731 - DNA, 515 bp, Glycine max
  Clone ID: jC-gmle01810027f12d1
aaggtagtgttaaggtgaatcagaagttattgtacaatcgaatgtaaccatgcccgagaaacgcctctgaaatcgtttgacgcctcgctgttaaagaatgcccctaacccatatgttataacaacacacccgctatgctcgtacaaatgttccgtcgtttttagttttccttctctcgtgagatgcaacaaaaacgcccttgcctccaatttttgatcgatcttccgtctatatctaacaaattttgcattccagaaatggcgcctgctttgaaaatgtacaaatgtgtgggatcggtccatgtgtaccggttcccatgttagtgtgatgagacttctctagtggaagaagtacttgctcaacttgagcctgctgacgtcgaagtcgcccttggccgggacgtcggggaacttcatcggcagccagacgtaaagtttcttctcgaacttcttcttgctcgccggttccttcttctccacggtgtgctcgtcggtggactcgtcgacgacgtcgtc

SEQ ID NO: 7732 - DNA, 554 bp, Glycine max
  Clone ID: jC-gmle01810027g01a1
aacaaatcttcatccaaatttttttttgttttggagaaatgtatgcagagactggtcttttcttcccatatttgcacaacgtctctcacggccttcatcagcttgaggagtactgcaaaacccagaagtccaatgcttcaatggatgaccttgttcagtcttctgccatgtcagagtatgatttggcagctgagggagatctgttcaaagctcctgaacctattattgaagagccaatcatggacatgtcagcggccatctcaatgatgtcttgtggggaagatgtctcgtcacagggactaaagtccactgatattgatattcttcaaaatgatcagtttctgagtgaggtgttctatgaatgtgaaaaggatctcttagaaaaggcagcaatagagtcaccattctctgagattctggaaatcaaagttcctattctgaacattgatgagaacacaattcaagaaaaccagccattaactgacctgcaattaccaaagagtgtcagctcaagaagttgagctcaatggactggatgccttgagctgcaatga

SEQ ID NO: 7733 - DNA, 395 bp, Glycine max
  Clone ID: jC-gmle01810027g02a1
ttgggaataagctcgtgaatatagaagatggacctccaacctttgagcagcccaagatgactcttgagaagctcttgaggtatggtaacatgcttgttcaggagcaacagagtgccaagagagtccaattggctgacaagtgcttgaacgaggctgcacttggaaatgctaacgaggatgctattaacaggggaacttggttccgatcttgaattggaggcacagcacacttggcaagtcaatatttctgttcctgaaggttgtgctgatccaagtgctagaagttgcgatgggacttgcgtgtcacattcttagaattctgaatgacttatgtgctaagatgaagaagccacgtatgagaagattctactatatgaaccatattggactgtctt

SEQ ID NO: 7734 - DNA, 492 bp, Glycine max
  Clone ID: jC-gmle01810027g02d1
aaaccaaaagcatatcttttattacattagaaagcgcaactgtacaagagaaacagagaaaatcctagctaatgaacaccatgataaactctactaccagtcacattcttctcatagttatcattaaaggtatttacatggccccgcatgcaagccttaccgtcacaagcacataaacacattactccattaatacatcacacggtactttatttgaaaatgaatcttttactctgtgcctgcaaggactgctgacccttccaccttgaagaatgcaccccagatttcctcttcctcagcaggtattgcagtaatcttattctttggattctcatagcatctcaatcctccaactgctgtagagtagaaacacccttgagggaaagaagcaagtgacttgccacaagaacctttaagcaaatctgcatcatcagcaaatgctacatatccatcagctgtgattccccaataaagaggaaccttaccagcttg

SEQ ID NO: 7735 - DNA, 485 bp, Glycine max
  Clone ID: jC-gmle01810027g03a1
gtgagattaagctagagaacataaaagatggacctacaacctttgagcagtccaagatgactctggagaagctcttgacgtatggtaacatgcttgtccaagaacaagagagtgacgagagagaccgcttggctgacaaggacttgaacgaggctgcacttgcaaatgctaacgacgatgctattcacaggggaacattcttacgctcgtgaattggcggcatcgcaaacttggcaaggaaatatgactgttcctgtagggggatctgatcctagtgctggaagtggagaggggacttgcgagtggcaatcttagacttcatggcgcttgaggtgcattgatgacaagcccagacagacaacagcttacgatattctctagagaggactgaattactctgaaattgcgagttaaagtgtccagtcaaattgaattgggcgactggctcttgtgagatattcagaaaatgcggaatcctctgaatg

SEQ ID NO: 7736 - DNA, 479 bp, Glycine max
  Clone ID: jC-gmle01810027g03d1
ttttttttttttttttttttttttttttttttttttttttttttttttttttttttttttttttttttttttttttttttttttttttttttattttttttttttttttttaaaaaaaagggggggaaaaaattgcaattatccctttagacccaagaccttttcaaaggttttaaagccacacgcaagagcgggattaaaaaaaaccaaaagctcagccccccctacaagaaaaaaaatttaaacgccccaaaaaaggtttgggccccccaaaaaagtgcacccagggggtcaaaaaaccagtattctcaaacccatttttttgggctggcgcaaaaaagtaattgggaggcaaaaggacccttcgggcaaaaaggggaaaacggacatttttggagccacccgctaaaaggttttttggggaaaaaatcccaagaaaaaaagggcccggggcatgtacccccacccgggggtgtccc

SEQ ID NO: 7737 - DNA, 501 bp, Glycine max
  unsure at all n locations
  Clone ID: jC-gmle01810027g04d1
aataataataaaaaattcttttaaaataaacattaaaattacaacactccacacatcacacaccacacactagggttgaagacttaagcttcatacaattctcaactcttttagccattgggaatgcaaagggcatgggtctggcttgccttgagccgtagccttctcagagagagaataaaaccaaccatttctccatttgaactccttaactgccgtgggaaagtgggctacggctcgggaatatgcacataagcgctcttccatggcctcttcaaatgttaaccccttttcacttgatgctgctgatgccagttctgttataaggctggacaattcagtgcggaattccttgtccacgacacctactgaaacccctccatgacgtgctccaacaagcataacggaacaaatccatataagcttctccaacatctgcttttgaaacacctncttgtcaagaaccttgcangagaggcctncagcatttaatctagcagc

SEQ ID NO: 7738 - DNA, 375 bp, Glycine max
  Clone ID: jC-gmle01810027g05d1
aataagaataacgagtgaagtagcctattgttcgttaacaacatcttggtaaaagtattgacagccatggcagcagtagctcagcatgtcttgcttcctcctatcgacagtagctttaatggtagccagacacctcctggaaatgaccaccaggattgaacttaagaagaaagttgggcgcctccttttccaactgggacggctcgacgtccaactcccgcagacccggcaagtccgacgtcttgacctcgttcatgctgagacgcgtggcccagtcacgcgtgaatttagggtcccgaaactgctcacagaagtagccaatggcctgagccacgggaagggcaagttgatcaacctcgagttacgcttagtcac

SEQ ID NO: 7739 - DNA, 293 bp, Glycine max
  Clone ID: jC-gmle01810027g06d1
aaaaaaaaaatggtgaggattttaaaatttgggaaaccagtaacgtgtaaaaggaccataaggaggaactcacacccctgaaagagggagacctgaaaaacaaaccgaacttaaagaaaaacccagggaggtggcaaacggaaacatgggaaggcgagaaaaacggctcttaggcaagcttgcaagcgaactcatagctcttgtatagggctacctaactccaaggcgcggcccgaatgtaaaaaacggggcgactggaaaaaccctgggggggggcaaaataatggccttgc

SEQ ID NO: 7740 - DNA, 549 bp, Glycine max
  Clone ID: jC-gmle01810027g07d1
atgtaacaagcataagcgcttatatactttgtgcaatggcaagtatatcatatacaaattacatgagtatgattatgatagacggtatttaaatgaccagtaatacaaatcatcagtatactatataactgggtaaggtgtttatatacattagtcgtttatacaacataacggcgaagataatccaatctagctgaatgcttgagcttcataagagccttgacttcgtgctttctaaccatttccctagatatattcaagttcccagcaatttctcccaatgttctgtgacccttgccatcaagtccaaatctctgtctgatcaccaagctctccttcggcttcagggaatcaagcacatcatcaagagcaagccttagtagagcaggtggtttcctattatcaccattaacaccatcatcatcaacgatcccattaatgaactcctcttgtgtggttgtatgtctcgagttcatagaaagaatggattttgatgccttaattacgtcatggtatctttcaggggatatatgaactctttctataatg

SEQ ID NO: 7741 - DNA, 494 bp, Glycine max
  Clone ID: jC-gmle01810027g08d1
aaatcactaaaccacattcttctcatccataaaacacattagacaatccactgaaacattgtaaatcccaagcgcaacgcgcacttgaaatcataaaattcattaatacaataatcccactatggcaagccacattggatccatattatcggtaatacatatccaatcaactaccacatcgcaactgccatcgcctattcgcctggttgttgcttagatgtttccttgatctcatctccagcatcgtccgtgatgtctgatgtccacaaagtcagattgtcacggagaagttgcatgatcaatgtactatctttgtatgactcttcacccaatgtgtcaagctcggaaattgcctcatcaaatgcctgcttggcaagattacaagcacgatctggcgagttaaggatttcataatagaacacagaaaagttgagagcaagtcccaacctaatggggtgagtgggggccaagtcagcaagagcaatatcctgagc

SEQ ID NO: 7742 - DNA, 443 bp, Glycine max
  Clone ID: jC-gmle01810027g09d1
gttcatattctttcagaagtaactgatactttcattgattagggatgaacacccttatacataaactactaaatcgcatatcatgttacaagacataacttgacaccaagaactcacatccaggacatgtaaacttataccaattcaagctagaattattcaaccgcatttaaagacacatttgcaaagaatattcctaaaggccacataattagcaaacccgtactatgatatttatgccatactatgcctacccgcttttgggaacaccgttatcccggcgccattagccacataagccgtgaccattcctgtgtggtgaaacgcctcactggcttcatcagcactggccgcttcattaacttggcataacttaaccatgtgctcaacgggcggtcaatgatcacgaacactcactggtacagctgcctacttaaccacga

SEQ ID NO: 7743 - DNA, 495 bp, Glycine max
  Clone ID: jC-gmle01810027g10d1
gaagtaactgtaaatctcattagtttgggttgaacaccctcgtcaagaaactccaaaatcgcttcgcaagttacaagacatcacttgacatcaaaaaataaaatacaagacatctcaacataaagtaattcaagcttgtattatacaaccgcatttaaagacagttttgtaaagaataataataaaaaagacaaaattagtaaagccgtactctgctatctatgccttactatacctacaagttttttgtcagtccgttatcccggcaccattatccacatcaacctcgcccattcctgtatcttcttcctcctcactgtcttcatcaccactgacctcttcattatcttggcgtagcttagccatgtgctcagcaagcaatttatcatcacgttcactcactgctctagctgcctccttaaccacaagtttacccttgtgttgttctattgcttcagtgcaagaagctatggcattgttgagaaccaatattcc

SEQ ID NO: 7744 - DNA, 362 bp, Glycine max
  Clone ID: jC-gmle01810027g11d1
caaaaaaaaacaaggtaaacaaaacccaaagacagcctgtttaattggggctttagctgccgagaaccctggacccctttgcgaaggcccacgaggaccttaaccgtttgttcccatgagatgcaggcattagacacgggctgccccaaagtaaggttggggaggcaaagggctttggatggaatcctttgcatgcgctacaccaggtgggatccgatcatgacgcccacgatcgaatcccggggggccgcgctaaaaagctgcccggaaacgttgcaaggaccaaaaaacttgcacagggtttgctcggacaaaatcccggcctaccggagctacttgaaggtcgcccccaaaccggtttt

SEQ ID NO: 7745 - DNA, 371 bp, Glycine max
  Clone ID: jC-gmle01810027g12d1
caaaaaaaccaaggtttccataacccatacacaacctttttcactggggctttccgtgccggcaaccctggacccctttgcccaggccgacggggaccttacccgttgggtcccaggaaatgcgggcttaagccacggccggcccgcaaggggggctggggaggccagcggtttgggccgggaccgctggctggccttcgacccggtgggattcgatcatcccccccacgatcaaatcccggggggccccccccgaaagctgcccggaaacggcgccagggacaacaatcgggcaaaggggttgcttggacaaatccccgtgcaagcagccgatcataaggttggcccccaaaccggcttttttgaccccc

SEQ ID NO: 7746 - DNA, 461 bp, Glycine max
  Clone ID: jC-gmle01810027h01a1
gtggagttgcagtcatcaatgttggtgttgctacagagactgagcttgaggatcggaagctccgaatagaggatgccaagaatgcaacttttgctgccattgaggaaggtattgtacctgggggtggcactgcactggttcatctctccactcatgtcccagcaatcaaggacaagcttgaggatgcagatgagaggctaggagctgacattgtgcaaaaggcactgatagctcctgcagcattgattgctcaaaatgctggaatagaaggtgaagttgttgtggagaaaataaagagtggtgaatgggaggtcggttacaatgccatggcagacaggtatgagaatttagtggaggctggagttatcgaccctgcccaggtaactaggtgtgctttgcagaatgctgcttcagttgctggaatggtggtgaccacgcaggccattgtggtggagaaacct

SEQ ID NO: 7747 - DNA, 506 bp, Glycine max
  Clone ID: jC-gmle01810027h01d1
aaaccaaaagcatatcttttattacattagaaagcgcaactgtacaagagaaacagagaaaatcctagctaatgaacaccatgataaactctactaccagtcacattcttctcatagttatcattaaaggtatttacatggccccgcatgcaagccttaccgtcacaagcacataaacacattactccattaatacatcacacggtactttatttgaaaatgaatcttttactctgtgcctgcaaggactgctgacccttccaccttgaagaatgcaccccagatttcctcttcctcagcaggtattgcagtaatcttattctttggattctcatagcatctcaatcctccaactgctgtagagtagaaacacccttgagggaaagaagcaagtgacttgccacaagaacctttaagcaaatctgcatcatcagcaaatgctacatatccatcagctgggattccccaataaagaggaaccttaccagcttgatcagaagccacaa

SEQ ID NO: 7748 - DNA, 435 bp, Glycine max
  Clone ID: jC-gmle01810027h02a1
cacaagatgacatgagggctgtaatgcgctacttgcatgagacaatatggaaaggtgtgccatagtaacgggctcaggtctatacaggtctgaagaacattgcaattaatgaacgtggccgatatagtgcttcagtaatgcagtgctgtacttggatggaacgataccgcgatggccattctatgacaacccctgaaggtcaagggatgggtgtaagctggcgtataatgatggctgctaatatgtacttttattacaacgaggatcacatgtgggagttgtgatatgaggcgttgtaatgacgagctacgtgtgccagctcatgatctccataggtcctcatagagaggtgcaaaacatgctattgagctttggaaacagattcctacaagtgagccatatcgcgttatacttggtgatgtcagatacaaacta

SEQ ID NO: 7749 - DNA, 486 bp, Glycine max
  Clone ID: jC-gmle01810027h02d1
aaaccaaaagcatatcttttattacattagaaagcgcaactgtacaagagaaacagagaaaatcctagctaatgaacaccatgataaactctactaccagtcacattcttctcatagttatcattaaaggtatttacatggccccgcatgcaagccttaccgtcacaagcacataaacacattactccattaatacatcacacggtactttatttgaaaatgaatcttttactctgtgcctgcaaggactgctgacccttccaccttgaagaatgcaccccagatttcctcttcctcagcaggtattgcagtaatcttattctttggattctcatagcatctcaatcctccaactgctgtagagtagaaacacccttgagggaaagaagcaagtgacttgccacaagaacctttaagcaaatctgcatcatcagcaaatgctacatatccatcagctgtgattccccataaagaggaaccttacca

SEQ ID NO: 7750 - DNA, 344 bp, Glycine max
  Clone ID: jC-gmle01810027h03a1
cacaacattgcaccagctctgtatggcacacctggtgtgaacattaccaagaacgtgatgaccatgcccagcatcaaggttactctaattctaggaatatggggaggcaagggacaaggaaatattatgcaacgtgatcttaggctctgtccatataggaaacgagaccgtgatgatgagtgctggataaccgctgagggtacaagggatagatgcacgctggctaaaatgatggctgaccgtaaaactgcatatcagaacaagatcgcaagattgagtgcgtctatgaggcgctgatctgacgaactacctggtcgtgctgatgaaatcaataggtcctctga

SEQ ID NO: 7751 - DNA, 445 bp, Glycine max
  Clone ID: jC-gmle01810027h03d1
acagcaagtgaaaactttcatccttaagaactacaactacaaggacaaacagttacctgaatttattatttctcgcagcatgaaagccacgatagacagtcaagtcaagcattatgatacatcagaccccaaaataccaacaacactactcagctgagcagttattatatcgtactttcacatgaaagtgtcataaaggcagataaaagcatatacattcaacacacacgaccataaggctcaagcacaaggcaatagtatgacttaaacggtgacacatttcagcaattattcttaaaacactgcagattttctgaatttgttcaaaatacaagagccttgttactggagaaccacacattcttgggaaccagccaccaccaccacagtaggggtgttcgcttgtgctgactgcatcaacttcttttttgacactttgaacatt

SEQ ID NO: 7752 - DNA, 511 bp, Glycine max
  Clone ID: jC-gmle01810027h04d1
caagaaattcttcatagactttcagcctcaagattaagtacagtttagtgcattccatccttctaaagctaatttacaaagatcaaaacgtgattacaaatgctgctgctatggcccaaaagaaataaacttaaattcctattaacaacaaaacatactagctaattaatgccatagtcctcatcagtgacactttgagctccaaccatgagtcatcgtttccttgtgttacataaaagcttcaaaataaccaccttactgtttagcctgtgaatagaggaaggtgccaagaattgcaatggcagcaccaagagcattgatgggctgaacaggcgtgtgaaagataaggatggaagaaacaatgaccgaaatcctcttcattgtgtttccaatgctaaatgttaagggagaaatctgatcaagagacatgtatgagacttgattgtacaagtggtaaaagacactctgtgcagctacccaccatacaaaattgggacccaattgagataca

SEQ ID NO: 7753 - DNA, 501 bp, Glycine max
  Clone ID: jC-gmle01810027h05d1
ctaaacttactattgggatgaaattatgtaatttatatctttaaaataaaatagaatgccatatgttcggactagacctaaaatgggatagatgtatctagggattagtcgtttcaaaaagaattctgcctagatacacaatacacatggcattctatctattgttatttcaaaatggaatcaattttataagtttaaaaaagacctaaagttagggattactcaataggtaatgttgctacaatgcctaaccaaagggcaactacagtaccaatcaaaaagatggtggttgctactggacggcaaaatgggttttggaatctattaacattctccaaaaagggtactgttaataatcctgaaggtaccgaaaccattaaaagaacgcccattaacttattgggcactgaacgaagtatttgaaatacgggaaagaaataccattcgggtaatacttccaaaggagttgcatatggatccgcgggttccccaatcatggat

SEQ ID NO: 7754 - DNA, 559 bp, Glycine max
  Clone ID: jC-gmle01810027h06d1
ctaaacttacgatagggatgaaaatatgtaatttagatctttaaaaaaaaatagaatgccatatgttcggaatagacctaaaatggaatagatgtatctagggattagtcgtttcaaaaagaattctccctagatacacaatacacatggcattctatttttttttatttcaaaatggaatcaattttataagtttaaaaaagacctaaagttagggatttctcaataggtaatgttgctccaatacctaaccaaagggcaactacagtaccaatcaaaaagatggtggttgctactggacggcgaaatgggttttggaatttattaacattctccaaaaagggtactgttaataatcctgtaggtaccgaaaccattaaaagaacgcccaataacttattgggcactgtacgaagtatttgaaatacgggaaagaaataccattcgggtaatatttccaaaggagttgcaaatggatccgcgggttccccaatcatggatggttctagaaccgctaagcctacgttacaggcaatagtacctagaatactactggaaa

SEQ ID NO: 7755 - DNA, 485 bp, Glycine max
  Clone ID: jC-gmle01810027h07d1
gttatcatcctggtatgtctcaaaggaaactccaggaactaagccactagcaattctgggaggaatggcatatagcctgcttggaaatggtttaagattcccgccagtaactttaggagtgggagtaatgcaggcctccattttcttataccagacatcatcggcatctgaggactcgcaaaattccacactagaatcatcttttctcctttgacatgattcagagtctacaaccttttgccaaatggccatttcagccttctctgacctcttctcccagcaaagttgcttagcagtctcttcaatctttctttgctcttcctcaagttcttccttaggtctcagccaggatttgtagttagccttccaattgattggaggacccgaaagcacccaataaccaccaggccttagaactcgatcaacttccatcatataaattccattatttgctccccaaggaatcaaacagcgagaacaatgag

SEQ ID NO: 7756 - DNA, 402 bp, Glycine max
  Clone ID: jC-gmle01810027h08d1
atatattcttactatgaataagaattaattaataataataatacatggtgtctctgatgtaacagaaggtagaataatagatatacattgaaacgttgaaatgcatgagttcagttatcataggtgcggcactcatcggtctccgggttgtccttgcagtaattctcgagcgggtcatattgcttctgcttctccctggcgtggctcgccgccgcgctcagctcctccacctcgttccacgccgtcgcgcactctgcgtcgtcgacagatcccgagcacgccttctccgtgctcttgatgctatcctacaacttctccgatatcttatgcggcgtggcccagacgggccgggcctttaccaaaccgggccacttttgaatgggcctgaacagagctgggaag

SEQ ID NO: 7757 - DNA, 448 bp, Glycine max
  Clone ID: jC-gmle01810027h09d1
cactaaaataagagggcattcaaacatacaggcaaaacaaaacaaaaatgtaacgggcatgactacccaagcctttcccaaaactacaaggaattccccaaaagtttttgcagggcaggtttccccaaataagggtaatggaaaatgtccaaagaaaaagaatcagagacttttatttatccacacgcccatttaattgaactttacctgatgagattattttccaacaaccctcattggataatttcaaaaacttacccttttttaatcaggtttcacagtcaaaagggaattttttactttcagggatattttagccttttccacaaaaagccttgccccaaacacaacccagtagccaggagtatcttggggccctcttggcatttcagttgggtcaacaaaccttaaaagtttgggtgactgattaggcacaggaggcccccca

SEQ ID NO: 7758 - DNA, 561 bp, Glycine max
  unsure at all n locations
  Clone ID: jC-gmle01810027h10d1
cgaaaggattgatatatcaatcaaattacagttaaataataataatcccttacatatgatttctttttgtttcctttttgcgaaatcccatgcatatatgatttaatgtaaaggataaatcactaacgaaaaagctaaaatacactgctgtaacttctattcattaataatcgatcatgtatgttttattttacgccacatgatgcatttccttatattagcttcccttccaaccaacggctgtaaaaatccaacgcctcccgcggcttatattccggcacggtgtgcccagctcccttgattgtgaggaaggtgaggttgttctcgtacgcttgcaagtacccagcaacttggttatttgagttccatggcctccattcatccacaatcttgtaacccaaagatcgtgtccaagcctcacttccagtaaacggtacacacatatcatggtcgccactgaaaataagtgccctatagccaagcctggttaggttcttgtggtaaggaatncatgcttcagcattgtgatggtactctatcctactcgaacataattcccac

SEQ ID NO: 7759 - DNA, 570 bp, Glycine max
  unsure at all n locations
  Clone ID: jC-gmle01810027h11d1
gcacacctaaaacgtattttatagtttttacaataaggcaatacgattacagaaaattacaaagagacttgactaaatccatcacctgtgaatgaatgatgtgtttccacagcaacacccgagtgcaattcaaattgatgatgagggttcaccgctccatccgaccccaattgacatcagttagagataagccagaaaaggcttgcaagattcaaatgtccctagtatatttcggcaaatccatctagctgcagtgctgccatatacatctcgcttagcatgacataacctaatatcaatcaaatgagacgtgtaatgaaaccacaataatctgatccaactatcttaaaaatcacatctgatttccccaaattatcagaagcccttcatcaactacttcgaagtcgttattctgtcgtttgtacaataagcaaacatgataaaaattacaaagagactaaatccaatgatccatagcctgagaaagacgtgtctccacagcaattcattcaaatggatgatgaatatgcaccactcaatgtaacagcaattggactnnctacaacatga

SEQ ID NO: 7760 - DNA, 166 bp, Glycine max
  Clone ID: jC-gmle01810027h12d1
tggcctatcgtgcatctcgaatcgagaatttatgtcggcatggacgagcggactcgtccgcggtcgcccttttttttttttgttgatcatgttttgtgaggatacacttgagactaccatcaactaggacattattgatcatattatatccgagaaagttacacac

SEQ ID NO: 7761 - DNA, 500 bp, Glycine max
  unsure at all n locations
  Clone ID: jC-gmle01810028a01d1
ataataatagtactatattcataataacaaaggaacagttatttgatattgttggaaatctctctagtagacataataggttataatgcttatacatccatgtcacaatcacaacacacatcgtataacaagaaaaacaccactgctatggcatcttaacctgtattttgcatgccagcagcaatacccttcattgtcaaaataagggtgtcctcaagaccaggagcatactcgcttttggggttaagtttaacaagctctgctgctggcttgcttgattccatgtagtcctttgacaagtgtggcctcaacttcacatggtagtcaggatcacggatccgcttcaatgtgtaagcttgcaacacattgagggttgtgatgtatgagtcacgaagacgaagtctttgcttcaagtaggggtctccttcaagaatatccttgtgcccagcaacctggaggagaaacctctnntgttcttcgaaattagatcttaaattctc

SEQ ID NO: 7762 - DNA, 453 bp, Glycine max
  Clone ID: jC-gmle01810028a02a1
caactccgcaaataaatataaatttttccttgcgtatagtccgagtttgacaagcaggccccagccggagtgtggtcttattggcatacggcacatggcacgtgagagagagaagcgtgtgaagagaaaagccgaagcggcgaaacacctcttctttatctgttcgctattatcaaatggaggggccctctcttgttcgtgctacaagagacagatcccaggatctggggccccttcctccttccccttgtcgagagttgcggggaccacatctctaatcagcgagagagagggggcgccataccagccattagctgctgtattattattgattacggatgagtgaggtgcttgaatgagaccaagcactccggcatcgctcttgtgtgtcaccattgactctggcgttcttaatctccacgacagctgcgatctctagcatatacacgatca

SEQ ID NO: 7763 - DNA, 326 bp, Glycine max
  Clone ID: jC-gmle01810028a02d1
cactcttagagccttgtttactccagtgacttgagtgaccacaagcgcaccgtcttgtcaccgcttgcgctggcaatcacgttggaatgaattggatggcgcactactacatttacaacacttgagtgtccatcaagcttgcccacttgcttaccgctgtcgcgctgccacaaatacactgcaccatcttcacttccagagagaacaagctcgctgtggtcacctccaaaacatggacgaagaatgtatcggtgctcgcgaaacccgcggtacttggctatcacaaaacccgtcacaatttttacacaccccatttgctcttgttt

SEQ ID NO: 7764 - DNA, 464 bp, Glycine max
  Clone ID: jC-gmle01810028a03a1
cttgcttctttctccacctaaccttaaaccttaaactcgcatatcacccaatcaaatttgcctttagattctcattccccgccaaactatctctctctgtctctctctaggagtgcaaaatattccaactaaacctatcttccttatcatggcagatcctacccgtgatctcattcaagggaatctcatacctgtgtgtgtatctctaatgcaatcagatgatgaacgagaagaggagttcatatcgtcaaaaaccactgcctttcaccatgcctgtgacagactgcaaatgatccgcagaagcttgatgagaacactcttttccctgtagaagagattgtacaatacccgtcgcccggatatgtgtggccaactccgatcatgtgtagtcccgacgatagtataattccttatttatataggcctgataactctttaaacagcacagtttatgcatttgatct

SEQ ID NO: 7765 - DNA, 538 bp, Glycine max
  unsure at all n locations
  Clone ID: jC-gmle01810028a03d1
gtctctcaaatttgtttcattgcattgtattctagttaatacggcaggagttcacataagacttgtttgttagaaatatgcctgacatagtattcctattctacagctgcaaactgtaaattatacaatttagcacatgcaaaatgaaagtatgtgtactccatcttgtcgactgtgatcgaaaggtatgcaatgttggtgtcttggatattagaaacttctttgattgcgtctagtagaaaaaccagtgtcgtcttcatctttgatgaagggtttaaatctagcgaggccaccacttccactgtatgcttggcttctgtttgcagcttgatgatcggatggatctggattgccacaaatctcaagtttgattataaatgtagctgtgcttcctttgtcaggaccctcactctcaatccatatgtggcctcccatgaggtttacaaatcttttacaaatggcaagcccaagacctgcaccactgctaggtcgagctggtccactccgagactgggcanacttggtaaagagatgcgga

SEQ ID NO: 7766 - DNA, 417 bp, Glycine max
  Clone ID: jC-gmle01810028a04a1
gagagagaaagagcggagttttcacacacgcgcgatggctcacatcgcgaggaggaagatgggactgccgcccaaggcggatctggctcgtcgctccggcgagactcaatccgatgcccggcggagcctaccgcgccggagcgtgaggtacaacatcatctgttgcgacggagattaccttgacaacgacgacgaggacgagaggaggcgcgagaagacaaagctcaagctcatggcgaaggtgaaccacgacggcggagaagaagaagaagaggaatagcgggaagaataacaaaacgacactgcaccgcaccacactcgtgccgagtcacgtgaggagcactcgccggttgaagaatacgacgacgacgaaaacgaacaggagggagagaacgataacgatcaagaggaacagaa

SEQ ID NO: 7767 - DNA, 434 bp, Glycine max
  Clone ID: jC-gmle01810028a04d1
gcagcttcagatattatatagattatacaactggataaacctgttaaactgtttcatacaagatatggaaacaaacagatatgctcctatatcgcaagtctcccagcacaggtcaaaactttgaaacatgtatgaatatgatgatgactatgaaactgatattgattccaataaagcatccacgtactctttaagtttcaattttggaattgcaccttcccttctgctttctggaacttcctgcccgttcttgaagagtattaatgtcggtagtccataaactttatactcttcaattagctgcgggttggcatcatgatcaatctttacaaccggtaatctggcttcatattccttagcgagggattccatggcggaagagatgagacggcaaggaccgtaccaagttgcgacgaactcaacaagaaccggac

SEQ ID NO: 7768 - DNA, 446 bp, Glycine max
  Clone ID: jC-gmle01810028a05a1
agaaaatgccagagtctttttattaaaaccaagactatgtgcccaggtcaaagccatcataggaagctggtggtggctgcaccatggacttggatctggacttagaaacttgatggactttggatcacataccctataggctgcacccgcatgtgacctttttaggattccacgtgctgtgaccgaccttactctgccctttgggctttttctgatggagaagacccgaagcttccagcttctgccttgtctgatggccacacgatctcgtcttgtgattcaaattcaagagcagcaaagccagtggagaatgatgacaacaaaaaacttttgccaccacttgttcctatttcaccagtggaaaatttggatggatcttgtgtaatcaaggaaaggatgacacaagcacttcactacttcaaagagtagactgacttgaatgttct

SEQ ID NO: 7769 - DNA, 506 bp, Glycine max
  Clone ID: jC-gmle01810028a05d1
tgccggcctttcgttttttttttttttgcaaaaatatgcatcaattcaacaataaacagggtttccggtctcatattcaggtcctatagaaccattggcactgactgctaaacagcaaatacgcaaaccacattaaactgagaagtaccgtttactacaatataccacatgctattctaacaactagaaagtaacagtgccactgaagccttccggcttaccctaaaacctgagatcacctatgttcttgaccttcgcaccggcgaacggatgcaatatctaccatattcaggactccagggtttcccataatcaggactcttgcgcctttcataatcaggactcctgcgcctgccataatcaggacttttgagcctgccataatcaggactcctacgcctggctggaccaccaccattgtacctatcatagacagggctgcgtggacgaccatagtcaggactctggcggctgtgatatggactgggtgatctctcataaccacc

SEQ ID NO: 7770 - DNA, 411 bp, Glycine max
  Clone ID: jC-gmle01810028a06a1
ctccatgcacaccaaccatcccattatattttcctaagttttcaactcatcatcaattagcacttttgctgcagaatgcttgaggagaacaagaaccatgaatcaactttgtggtgtcatcctttcggttcactcagtcttgtgtgtccatgctagagcacagactgctgcacctataggagatgctgtctccaatttccaaccaagccttgctgtagcataggaatccttggtgtcatgttcttactcacattctttcttattatgtatgccaaactctgtcaacgctgcgcttcttcgcccgttggagacacagaagaataactcccttttgtgcgatcaagatctacattctgaggagttgacaagaatgtcatataatcactccccttgttcagagtctcttcactc

SEQ ID NO: 7771 - DNA, 558 bp, Glycine max
  unsure at all n locations
  Clone ID: jC-gmle01810028a06d1
catgattaaccacatatactgacttgaaattaagtaatatacaaacgctatttttcgaggtgcatttccgtaagctacaattaaaaaaaagcacccaaaagaacttcagcacactttcttggtctctcactcgtcatttgtgaccatgttctacaacaacagatactttaagtaaaaacttttttatgacttcacctaagggaaaaaaggatcaaaaagctaaaagctctcagactcaataatcataatctgcttcacttgtttcagcgtgcttctgcagaagcaatctcaagttctgcccaccaaagaggagaaagttttggaactgctgattcaggtgttatttttgttatctctctgagtctctcactcacatctttcattggtggtctctgctgtggatcagggtggacacaagatgtaatcaatgcagcaacttgttccagctgatcctcttggtaagacactagaatnggatccaccatttctatgaggggctggtccccttctaaatagtgtgatgcccagttttcaagtgagtccctatgttccactgat

SEQ ID NO: 7772 - DNA, 485 bp, Glycine max
  Clone ID: jC-gmle01810028a07a1
ctcttgctcttcctcttcttctctttctattaaccttcccctctctccctcgccctcagatcggagccatctctcccctccccgatcttttgcaccagaacaccgccaccatgcctttcgcgaaggaaaacgctttcggtgggaacttgaccggtcttcccaaagatcccgcgaataagctcggcagcgattctgatgcgaccaattcttcgaggtacaaagcttctggactgaacaccaatgtgctggctggagctagatatgtctctagagattgggctgcacagggtcaaatgccattggaagtcaatactgcgatggctagaagttttgagagaaggatggaagctggcacattgggaatgattggccataaacgtatgatgagtgacatcccaagttaaaccagagagacaaacccatctggttttcgaccgttatctcctcatcttcctctttatcagccccaactttcttcgaccctc

SEQ ID NO: 7773 - DNA, 414 bp, Glycine max
  Clone ID: jC-gmle01810028a07d1
ggaaaggaaaaaggccttttattatttattcataggccaagccttattttcacgcaactacttcggtaaagggcccccatagaaaaaaggccggggattgacttggccatagcattggacaaaaaaggggttgaagggcaaagcttgccaaaaagggctcatccctacaaagggggaaattccgatttaggaattaaaaggggcaacgtccgtagtagggtaacggaacccctttattttaggagaaaggtaacattaacaggccttggggcatgggttaaaagggaccggtggcttgaacggggggggacttaccaaaaggggggttcttggaaacggggggcttgggcttgaaaacggggggcttgggcttgagaaaggggggcttgggcttgggcttggacaccggggggt

SEQ ID NO: 7774 - DNA, 451 bp, Glycine max
  Clone ID: jC-gmle01810028a08a1
ggaatccttgttcgtgttttgtgttgctgttgaaaaaagtgaactgacaaaacttaaaccttgttgcggttgatgataaggccagactgaagccaacgaaactaatgaagccccacactccggcttcttctttcgtcactcgtctcccgcacgtgccttacttgcgcggcgccactgccgcacgtgccgcgccatcggaccctcctcatgacgcccccggaggcctcgaattccgccgcgtctcgaccgccaaacgccgccgcgtcagcctttccgtctgccacgcgagtcgcgtcaccgccgcctcgaatcccggtggttccgacggcgacggcgatactcgagctcggagcagccggcgcggcgtgctgatggcgccgttcttagtcgccggcgcatcaatcctgctctcggcggcgacggcgagggcggaggagaaggcaacggaatc

SEQ ID NO: 7775 - DNA, 438 bp, Glycine max
  unsure at all n locations
  Clone ID: jC-gmle01810028a08d1
ctgtagcttccctttttctataaaaaaatatcttatgatgcttttaactatataccaagatgcctgaacttgcaaaaatatgcaattacacaagagcagcctcttgtgtgtgcttttcctgtgttgctttgatgtgcccaacataaagatcactcccatgggaatcagctgccggaagtctctctctccgaccaccctcagacatgcttcttacgaaatccactaggtgccgccagttgtcagcttcaaacaacctcttgttcattcttagatatgtgaatgcagccaatccactgccggattctgacttacttgttgataaaacttgagcatatgcatctgcatcatatctctccaatgcattttcccccgcaagctctgctctagctgntgntgttgccatcttcacctggtgaactaacccttcaggtgagcagt

SEQ ID NO: 7776 - DNA, 418 bp, Glycine max
  Clone ID: jC-gmle01810028a09a1
ggaatccttgttcgtgttttgtgttgcagttgaaaaaagtgaactgacaaaacttaaaccttgttgcggttgatgataaggccagactgaagccaacgaaactaatgaagccccacactccggctttttctttcgtcactcgtctcccgcacgtgccttacttccgcggcgccactgtcgcacgtgccgcgccatcggaccctcctcatgacgcccccggaggcctcgaattccgccgcgtctcgaccgccaaacgccgccgagtcagcctttccgtctgccacgcgagtcgcgtcaccgccgcctcgaatcccggtggttccgacggcgacggcgatactcgagctcggagcaaccggcgcggcgtgctgatggcgccgttcttagtcgccggcgcatcaatcctgctctctgcggc

SEQ ID NO: 7777 - DNA, 480 bp, Glycine max
  Clone ID: jC-gmle01810028a09d1
gaactaagaaacacaggataaataacattttattacaaagtcctccatagcatacaataacaaagttacatggaaattcattaactaccactaacaataccgttatagccgggtcaaaatgctgaatttaaacaaaactaaagagatgaagcacatgtacatttatttttatttttatgaaacttagattgaaacaatacaacttaactatatgttgatgctttgccaagtgattctgcaatcttactggcaatacagtaagatgtagactgaatggttaccatggggttgacaccaactgcactaggcaaaacactcccatcacacacatacaagccttctgcttcccaagtctcaccattctcatcgagtgcaccttcttcttcagaggcacccattctacaacttgacatctgatgtgcagtggtaaacactgtccacacttcattccttgaccttggacccccaactattgtcaca

SEQ ID NO: 7778 - DNA, 505 bp, Glycine max
  Clone ID: jC-gmle01810028a10a1
atcaagccgtgatatctgagcattctctcgaggttttctagaatcttacaaagacctacaagacttcaaaaactttcaaatacacaaccgccatcatgggtaaggaaaagacacatatcaacgtcgtcgtcatcggacacgtcgactccggcaagtctactactaccggtcacttgatctacaagtgcggtggtattgacaagcgaaccatcgagaagttcgagaaggaagccgctgaactcggaaagggttccttcaagtatgcctgggttttggacaagctcaaggccgagcgtgagcgtggtatcaccatcgatatcgccctctggaagttcgagacacccaagtacttcgtcactgtcattgatgccccaggtcatcgtgacttcatcaagaacatgattactggtacttcccaggctgattgcgccattctcatcattgccgccggtactggtgagttcgaggctggtatctccaaggatggtcagactcgtgagcacgc

SEQ ID NO: 7779 - DNA, 483 bp, Glycine max
  Clone ID: jC-gmle01810028a10d1
ggctgtcgcccttttttttttttttttaaaggttttggctcggagtgaatttcttggggattcagtaactaaaatcttgtatcccatctagctaaaattggcttcttgccattgtggagaaattttctcaactcatcttaatcgccaatagtcatcatgatcatgaatgagccttgaaagccttgttttgggagcaagggatcgtatggcttggaatcattagaagattgggaacatgtcctttggtgggcgaaagaagaaacaacgttgtaatggaccaaactaggattttttttgaggaaaccacaatgcattcatccacaccattatgaactcccgaaatattgtcgagggggcatgagtcaatgcatctatttcttgccagccttttgggcggtcttggtaaccttgccggtacccttgttagccttggcgacggacttgatgacaccgacggcgacggtcttgctcatgtcacggacg

SEQ ID NO: 7780 - DNA, 583 bp, Glycine max
  unsure at all n locations
  Clone ID: jC-gmle01810028a11a1
agaacacacagctcttactttcttccgccatattccacaagaactctccaaggatcctccttcccacgagattctttggtgggaaaaatccaagaggtttgaaatttgaaggcagggaagatggattatttcaatgcaccaggaagaaaccatctctttgttccagggccggttaacattccggaccagatcatccgggccatgaacagaaacaatgaggactaccgttctccagcaattccagctatgacaaaaactttgcttgaggatgtcaagaagattttcaagaccactactggaaccccatttctcatccctacaactggtactggtgcttgggagagtgctctcacaaacacactgtctcctggggatcgaattgtatcgttcctgattggccaattcagcttgctttggattgatcagcagcaacgcctgaagttcaatgttgatgttgctgagagtgaatggcgccatggtgctaagcttgatgttctggaatcaaagattgcttcagatacttcacacactataaagggcatttgcattgttcacaatgagactgcaactggngtcaccaatg

SEQ ID NO: 7781 - DNA, 537 bp, Glycine max
  Clone ID: jC-gmle01810028a11d1
acaggacaataaaagaagcaatgcattaaagctgaaagtagaaagtacgttcatcttcaaaggagtgtaaaagagggtaatatatattttacagaatttctgaaagagccgaaaaagggaagtaaagactagaatgatctgtgacctaaatactggaagggatcataggaatagtgtcctgtaagtatgcactggcagcagaaactccactttcaagctttacaggataacccacatctttgagtatcatctctacaccagctagacatcccaacagttgcaactcattcaagtggccaagatgtccaattctgaaaaccttcccagcaactttgttcagtccaagacctaagctcaaattggatctcttccatgccctcctaactatttcagtactatcaatgtaagcaggaacaagaacagcagtcacagtgtcactgtaccactcttccttttgggtgcaattcttcaaaccccatgcctctacagcaagtctggctgctttgcctaaacgactgtgccttgcgatcacatttc

SEQ ID NO: 7782 - DNA, 386 bp, Glycine max
  Clone ID: jC-gmle01810028a12a1
ctggattctcctctctcccgatttcaattttcacggtcttcaccgatcgccagatctctaagcaccgctcttgttttcatcgattaaataacaaacaaaaattggctcaattttattttaacatcctaaccaaaaacaaacttttcacccgattttaacattcgagagtaaatttagtttacttgttgatttttttttttgtttgttttgattaagtttctgtttctatttaaatcgataaacggcgaggtcgagcgttagaattcgaatttcggagaaaaaaagttacaggtattattaggggaatcgcgtggaagcgttgaggagagtgtttgatctgaggaaggaaaaaaatggtgggaggtggaaacaggagggaagaaggg

SEQ ID NO: 7783 - DNA, 358 bp, Glycine max
  Clone ID: jC-gmle01810028b01d1
ggccgcccttttttttttttttttttttttttttttttttttttttttttttttttttttttttttttttttttttcaccgcattcctccccgcgctcttcgcacccggccccgttctctttcgccgccctcgctctcccgcgaaagcgcccggacccgcgggcccgccaccgggccccccccccccaaacgaccaacgcccccgccgcgcccgccccccccccgccgaccggcggccccccaaaggaaaacccccggaaaaaaaaaaaaggggggcctcccccgggaacccaagaaaaaatttctttattggggcgctcccccccaggggccacccccattcccccggggaaaaccc

SEQ ID NO: 7784 - DNA, 491 bp, Glycine max
  Clone ID: jC-gmle01810028b02a1
aaggaaaaatgggtttcattgtttttgacttcaaatgcacttattataatacattgtaatcatgagtttcattaattttgcatctttgcatgatgtgcgaataaaggcacaggccatccagaagcaaaacattgcccctcacgtgttgtctcgcgggggttatgaatatttagaaaaacaaaagttgatggatgagaagagaatgaaacaactgggggaagctgctcaatctggaagcattgacacgcgcattgatcctccatctcccatcaaacgacacgtgaagtgggagctaacccgcaccaagaaaactggtcacatgacatctgaggcaacaaaggaaatgactaacactattgatgcgtttgacgagcaggcctcataaggttcctttgtcgcccatggacgtcatgaagtactgactgctgccattgggagaccacaacaccctagtcatgtgcatgctgtaagagccagtctaaccatcaagc

SEQ ID NO: 7785 - DNA, 538 bp, Glycine max
  Clone ID: jC-gmle01810028b02d1
atagcaagcaactatgaattaaaatttaatgagttaacttccccgacttgcaaatcacacataattggaatatctaataagttgatcggttgaagcctaatcaattctacttggaagtgatatggaggagtcaagccatggtccccccattgatttgcttctttgctctatactttcttctgagaatgcagaagagacatgagtttgactggcttgtgatagcatctcaaaggctttaaatcttacatcttctgcactgtcaccgcgtttaattattggcgcttgaattggagtttttccctcaagcatgctcactactgatgacatacatgggctaagagtgggagaagggttggtgcacaagagtgctaattagcagcattctcatggcctcttctgaggagtactttgaaccaagacttggatccaccagctccagaagggttccttgctcttggagaacatagacccaatctaaaagatatacaaactcctcctttggcctataatttggtcgctctttccactaacaatctct

SEQ ID NO: 7786 - DNA, 299 bp, Glycine max
  Clone ID: jC-gmle01810028b03a1
aggtcgaggtgacagataagaaagactagcttttctacagccatgaatgcctttgagctaatttccatgtccaaaggactgaacctttatatcttgtttgactcacatcagggatttctatggcacaccagattcacctcactatcctctgcgtatgagatactcaacaggagtgttgaatctgcaagaccttttggctttgatgtgcacatcaaaaattacaaccataatcttgcgtatgtgaaacctgcaccgaagggataccttaatgttgccacaaagatattccaagcggcacc

SEQ ID NO: 7787 - DNA, 525 bp, Glycine max
  Clone ID: jC-gmle01810028b03d1
gcactgaaaatgaattatttatatggctgggtaccatccgcccacgatggccaacacttgaccgaaaccgcacaaatctccccaacctgcaaaatcgaaaatacaactctgacaaaaacactaatgtcaaattctcaaaccaactactgagtactgcccctggaggaccataaaaccctcgacccaattgtaggaaaattactgcaagcccgaaatcccgccaccaaaaacacttccagaaaacttagtaaaccaccaattaatcaatgtcccactttttactcctcctccctctttccaacccccactttcttatgttcaagttctgtacggtgaaacaaaaagaaacattatattttttaccgtcaaaatatgcctctttaagatttagttctcccctcccaatttcaatctttatgcactctgtgcccttaagacgttaccagctccctcctgagctgaaacatcatgctggtaggagcaattggaaccatttcggcacccccttgggcttgtaaaatatat

SEQ ID NO: 7788 - DNA, 368 bp, Glycine max
  Clone ID: jC-gmle01810028b04a1
ctgttccgagaacaacaattttccttatccatttctctacttgcgaagtgtacggaaagacgattggagcctttctccctaaagatagtgctcttcgtaaggatccagcatactatgttcttaaagaagacgaggctccctgcatttttggggctattgaaaaacagaggtggtcttatgccagtgcgaaacagttgatcgagaggctgatttatgctgagggtgctgaaaatggcttggagttcacaattgtgaggccctttaactggattggacctccaatggatttcattcctggcattgaaggcccaagtgagggtgtgcctcggattctcgcatgcgataacaataatctttttagacgagag

SEQ ID NO: 7789 - DNA, 258 bp, Glycine max
  Clone ID: jC-gmle01810028b04d1
gaattgtgtttattataaataagaattaattaataatacatggtgtctgatgtacgtaacagaaggtaaaagtaatagatgcatgcatgtaactttggaatgactgagttcagtcatcaattatcataggtgcggcactcatcagtctctggattgtccttgcagtaattttcgagcgggtcagactgcttctgcttctccctggcgtggctcgccgccgcgctcagctcctccacctcgtcccaggccgccgcgcat

SEQ ID NO: 7790 - DNA, 158 bp, Glycine max
  Clone ID: jC-gmle01810028b05a1
tgcctgatgacaagatgttacatgccatgctcccttacctaagcttggagttcgggtggtgaagttgttcatgagaaattatctatttctaaaatattaagatgatgccattgccatgctggcgcagaaagctgatgcatcgaccaatgccatgtaag

SEQ ID NO: 7791 - DNA, 564 bp, Glycine max
  unsure at all n locations
  Clone ID: jC-gmle01810028b05d1
ggcaaaccttttgagctttctacaacatattgcacgaacagacatgaaggatttcttagccatgccatcgagactttcttgtgcaagttcatcgagaaaaaaatgaagtataaacatgagaacagactccaactggaaaagataattatttcaacgatagcttacattgcatatacaattatacatacttccatgattccatcattctgtatcacatttgaagaaaaatcatggcttgttgagcacaggcatacgaaaaggacatgcatcaattcctcaagtcaacagagaatgttacctatctttattttgacagagaagtcagaaccaactagttctgtagattgaaagggggatctctaagagggagctttcgccgacgttaactattttcctactcatcagaaccaatagcttacgtgaacgaagaggaaggttttttggagagcaaagctntaagtgacgaatggtcagtcacagaggggctacaagtgaagttttggcatacaagagctacaaccttggtgacttgaaagttattntttgccatgagagcaacattac

SEQ ID NO: 7792 - DNA, 395 bp, Glycine max
  Clone ID: jC-gmle01810028b06a1
gtgatgggtgggtgagtccgaattgtgattgtaagcaaagatggctttcacggaatgcggtctacttcttgcttcggcttcaggaaccaacaagaacaggaacaaggttccagaaaacaaatggcattgtaacctacattgagtgttgtaccctgtgtctgggatgccttctaccatgggacgctttcatcaacgacgttgattacttttgctttgtctaccctgacaccagcgttgaccgcatctatgccgcggtttacatgatagtcgggctggtggggagctgcctcataatcctctacagccactagtctgacgcctatgtgaggatcaacggtggattggccctatacgacagttcgcttcttgtcgttcccctccttgatgccttttac

SEQ ID NO: 7793 - DNA, 481 bp, Glycine max
  Clone ID: jC-gmle01810028b06d1
ggcaaaccttttgagctttctacaacatattgcacgaacagacatgaaggatttcttagccatgccatcgagactttcttgtgcaagttcatcgagaaaaaaatgaagtataaacatgagaacagactccaactggaaaagataattatttcaacgatagcttacattgcatatacaattatacatacttccatgattccatcattctgtatcacatttgaagaaaaatcatggcttgttgagcacaggcatacgaaaaggacatgcatcaattcctcaagtcaacagagaatgttacctatctttattttgacagagaagtcagaaccaactagttctgtagattgaaagggggatctctaagagggagctttcgccgacgttaactattttcctactcatcagaaccaatagcttacgtgaacgaagaggaaggttttttggagagcaaagctttaagtgacgaatggtcagtcacaga

SEQ ID NO: 7794 - DNA, 464 bp, Glycine max
  Clone ID: jC-gmle01810028b07a1
ctcatactcctctcactatacgttttcctttcgagatagagaacagatagagataacactatgctgcacatgataatggcgctgctgtgtggttcaacttgcgtgactccattcctttatcacaagaacgttggttgcacaacctgaggaacatcttctctttgttggctctcaattggcgttatcaaagctcacatatatcttcttccgttcgaacccttgtgccggcaacatcccgtgtccgttgccagcaagagtctactactgttacccctgtcgcataaaaagacccgcgcttcgcgtgcgtagaacccgaaccccgattcaaaggcccggacatttgtaacaagagctggtatccaagagctgcggatcatgtgaatacagaaaaaacatggtatgtgtgtgatgctacagacaaagttcctgtgagactagcatcgacgattgctattcacattcga

SEQ ID NO: 7795 - DNA, 544 bp, Glycine max
  unsure at all n locations
  Clone ID: jC-gmle01810028b07d1
gcatctaaaccttaaataggtatttgtacattgaatcttcaatctatgcatgacaatagaagtagccattttacaagctttcaccaacataaacactcccacctaaaaccatttaagcgttacaacttagttaaaaaggtttgccaatgtttctccaaggcttgcaatcatagagttgttccaacacttctcacttgggagtgaaagcagcaaaaatagtagcatggccaggatctgcaaggtgagcaaagaggttgtcaataggaccagtgccagtgtaaatgtgctggaaccatgcccccatcacagccaacatggccaacctcccattcttgatctcctttgttctcaactccttgatcttctcaggagaaccacttccccagccaagtgggtcaaaccaaagcccacctgggtacccaacatcagttcctgtgagctngttgttgggaaagatggngtcagtgttgacacagcctggcttgatgatgtcagcccaccttctaccctcggcccaaccgatgaaaaagagctcaactattga

SEQ ID NO: 7796 - DNA, 467 bp, Glycine max
  Clone ID: jC-gmle01810028b08a1
ggtgccccttgcaggttccaacgtctagtcatggtgccaaggtttggatggtctagcctctcgctcagctgcatactacgagcaaggtgcccgtttcgccaaatggcgtactgttgtgagcatccccaacagtgcctctgctctggcagataaggaagcaacctgtggtctggctcgctatgctgcaattgctcaagacaatgggttggtcccaattgtggagccagagatcttgcttgatggggagcatggtattgatagaacttctgaagtagcccaaaaggtctgggcagaggttctcttctaccttgctgagaacaatgttctttatgagggtattctccttaagcctagcatggctacacctggagccgagtccaatgacaaggccagtcctcagacagttgctgattacaccctcaagctccttcacaggagaattccccctgctgtccctggaattatgt

SEQ ID NO: 7797 - DNA, 505 bp, Glycine max
  Clone ID: jC-gmle01810028b08d1
aaatcaacagagataactctctgaatctttatattatagatctattattgattcattacatacataattcagaaggaaaaaaaaaaaacataacaaaaaaaaaagtgtccgcttcagatttgatcgcatttttcctattgcacaaagcctgcgcatttcattcaagtttcaacagaagcgtaaaaattgcacaagtgtcttagataaccacattagaaaatgaaaagggcaaccaccacccatcattataataagtaaacaatacctacaaattgcactattgcaaggcattggcaccagccacaatttccagaatttcaccagtgatcttagcctggcgctccctattgtacacaatggacaagttcttcttcaactcaatagcattatctgtggcattgctcatggcactcattctggcggcgagttcactcgccaaggactcctgcaatgccctcagaacctggctgttcaaatacagtggcagcagtgcatcaaggatctg

SEQ ID NO: 7798 - DNA, 494 bp, Glycine max
  Clone ID: jC-gmle01810028b09a1
tccttaaccaacttactcatattttaatgtcgcacagaaaattcagagcaccccgccgtggttcattggccttttcacccagaaagagagccaacagacttagaggaaagatcagatctttccccaaggatgaccagagccaagctcctcaccttaccgccttactcggatacaaggctggtatgacacacattgtgcgtgagctcgaccgtcttggatccaagctcaacaagaaggagatcgttgagcccgtcaccatcgtcgagacccccgctctcatcgttgtcggagttgtcggttacatcgagactccccggggactccgctctctgtccaccgtgtgggctaacttcctcggagaggagctcagacgtaagttctacaagagatggtaccaatccaagaagaaggccttcaccaagtacaccaagaaggttgctgagaacccccaatctgttgagaaggagttgaacagaatcgccaagtacgccact

SEQ ID NO: 7799 - DNA, 448 bp, Glycine max
  Clone ID: jC-gmle01810028b09d1
agtagtagtagtagtaactttgattagagattataagccattttcatgctcaaaagaaagcagttttcagtactaaatacaatatgtaagaagcaatgaaaatccctcctttagccaaaaatttaaaaaataaaatacaattcccttcctttcttttcacaatattctggccataaggaaaggatattgagctgtgaaccgccaaaaaccataaaatatcaattgccagttacagtgcttgacttcatctcttgaacacgcaacatattcaagttgtgttgggttcgagaattagggacctcgggttggggcaaaacaaaagcaacctgaactctgatcttcaggtatcataccaccacctttgctagtatcaagtgcttcaagcatcctcaccacctcttccatttctggacgcttggttggattcgcatcccagcatttccgcatg

SEQ ID NO: 7800 - DNA, 537 bp, Glycine max
  Clone ID: jC-gmle01810028b10a1
ggaaattgtacttggagaggcacgtggaattgggagttagagctaggtctgttgtgaagtttctggaagcttgttctcgttctgaatcacttgaggttggggactatctgaaagctgttgacaccttgattggtacgatgtttgggtttgaagacgtgcagaggttcttgatcaaccctcaaatgaatgtgctgattaacttggttggggtacactactgcctcacaacccttgggattacgggtgacaatcttgtagaagcccttcggattcatgagatctcagatcggcgtgtctgcgtcaggtggtggaaagttggtagatggtactatggcttccgcatgagggatgagtcacattctcggagggtgtctttggcagatttggcaacagaagatgatgagcatgttttgggagtgcttcgccgatgtgctgatcatgaggatttacgtgttcagatctctgtggctggtcgtgcatcaaaacctaggtcttgcaatagctatacggagattaactaaagtcttgatatctatc

SEQ ID NO: 7801 - DNA, 375 bp, Glycine max
  Clone ID: jC-gmle01810028b10d1
accaaaacctttaaggcttattttcattgaggtgctgccatatatcaagttaacaagtctcagctatatacaacgagatacggagttcaaattatataacaagcattatgaacttttattggttaatttgagggcaacttttcatggattattaccacagaactttacaaaccataactatacacagtaactcagatagatatcaatactttagtttatctccgtatagctattgcaagaccaaggttttgatggacgaccaaccacagagatctgaacacgtaaaacctcatgaacagcaccttggcgaagcactcccaaaacatgctcatcatttctgttgccaaattgcaagaaacccacggaatggactat

SEQ ID NO: 7802 - DNA, 566 bp, Glycine max
  Clone ID: jC-gmle01810028b11a1
gagccattggggttctggaagggttagctttagtaggaaattctgaatttgccattgctgatgaggcctatccttatattgcgcagaggctcctcacggatgaatctcctcggctaagggatgctctacgttacactatatatggtaaatctggagtttctgatgctgaaagatttattgatgtcatgcaagcctttgaaaattttattactgctgccaaaagtggtggtggagaggatatgaatggcaatatggcagagcttgggattcttactactagtcagtcagaatatttgttgtcaggattccaatctgttatgcctcaatcaccgcagccagtgcaaacaagagcagctttagcatttttgctgtccgatagggggaatattctccgagaatttcttttggatgagactgctaagggcattgatgcagtaacaagggaacaactggtaagaacaatgtccttactaggagttcagaatgcaacccctgttgtcagcatggtacctactgtgggaccctctaagcctgcgggtctatacccaccataactgaagaagatg

SEQ ID NO: 7803 - DNA, 352 bp, Glycine max
  Clone ID: jC-gmle01810028b11d1
ccatggaaaatcatttagacaaaaacccgtgcgtacgcacgggttaccgattagtttaaattttttattcacgggtaacaattgggtggcctaaggcagtaaagttggatgatttctcttacaaaaatgtgtcacgaattaatcgggcttaaacccgagaagataatttggtaacaaccttaggaagcactttaacagagatgcctggtaacactgggagaagcttttggataatttgaggaatattcagcgcctgatcagatgttcttgatagggaactttctggggtgaaaaacttcaccaccattcggacattggtcaatataacttcatttttttcagttatgggggg

SEQ ID NO: 7804 - DNA, 589 bp, Glycine max
  Clone ID: jC-gmle01810028b12a1
atttgcagacaatcctaggttatttaacattggctatttggattttggaggctgagtggagcggctgttaggtcctttatgtgctgacttcacagatctatgagtattccttttcaacagaaaatgctcgaaaaatggtgtcttttcaggtttcttaatatatattgaaacatcactttatccaaatctagctagaggcaataaagaccacacataatacagagagagaaattaatatttggatgttaggttgctgagtggtgttcatgttgcctatattattatagtaattgttttatttagatcatcagtatttagcttccagttattcagatccattgatcatatctatcaaatactataaccttaaacttttacctaatgttatactaaagaacttcagcctgcagttttgtggtgcctaattatagcatggtagataatatgaggatcttttaatattgttatcttgataacttgtattttttccatcaacaagtattagttgataattatgttaaaatattactaagaaagatttgtgtccgtagtatcttcttatctctttcatctttaaccatggaccaaa

SEQ ID NO: 7805 - DNA, 411 bp, Glycine max
  Clone ID: jC-gmle01810028b12d1
attccctatcatttttaaaaaaatcataaatttattttttttaaggcgggttattttttgtaaccttctcaacaccccatctgttcaaacccctttaatctgtttaaaaagattttgaaacctttaagggttttgtatcaaattttaccccagtaaaagggtccaggggtgaataaaggggtttaaaataagataaaccggggtctggtatcatggggaaaaaaaagggaaaagggttttttgatcagggagttttgattaaagggttcggaaaggccctacccccggggattttttcggatgcctcaaaggccgaccttttagatgtttatttcgcaggcctcaaaggcaaaacccttaaccttgttcacccccaataattaacttatttgcggccttatggaaaaattt

SEQ ID NO: 7806 - DNA, 342 bp, Glycine max
  unsure at all n locations
  Clone ID: jC-gmle01810028c01a1
cgtctacgtcactctcaagtctatagctatgacctctatactactatgncacatctgtctcgtctatataagatgactacttcgttcttgtatatactcttcaatattatcatctcttcctcttcttctagttccacccatactatactccctgccgggggtagcgagtaacactctctactcttcctcatcttcattattcttcaccctttctcatcatgtttcaacctcattctcattttttcatcgctcgattcttctcctcctaaagatgcagatcttcgtgaaaactttgaccggtaagaccatcacccttgaggtggagtcctccgacaccatcga

SEQ ID NO: 7807 - DNA, 459 bp, Glycine max
  Clone ID: jC-gmle01810028c01d1
aaaataaaaacataaacaacatactttcgctgaaacgagttcaatacatcattttaaaacataataaacagcagcacttaaaccagagatgcaaagcacaagttcaagggagacactgaacaaacagataagacatatgagaacacttcataaaagggattccccttagcaaccaccacgaaggcgaaggacaagatgcaaagtggattccttctgaatattgtaatctgccaaggtacgaccatcttccaattgcttcccagcaaaaatgagcctctgctgatctggagggataccttccttgtcctgaatcttagctttcacattgtcaatagtatcagagctttccacctccaaggtaatggtcttccctgtcagagtcttcacaaatatctgcatacctccacgaagcctcaacaccaaatgcagagtggactccttctggatattataatcagc

SEQ ID NO: 7808 - DNA, 116 bp, Glycine max
  Clone ID: jC-gmle01810028c02a1
ccggaaccctgccaacctttcttgtaaggacttggggatagacttggtgatcgaaggaaccggagtgtttggatacagagaaagtgcactgaaacacattaatgcaggggctcaga

SEQ ID NO: 7809 - DNA, 578 bp, Glycine max
  unsure at all n locations
  Clone ID: jC-gmle01810028c02d1
cagttaaatgcaaattccactaagaaaaatgatttctcaactagtgcagaaagctaggaagatatgtccttgcattgtttttccacaacacttattatggacaaatagaacaaggaaaacaaatagaacaagggaataaatttatggacactatctctaagagtttctaaactcatccttggagagatgaaaaacaagaaaatatctgtaagttaccatctctgcatccccttgcctacaaaaaagaaaacaaagaaaaaccacaccaggtgaacagatatctgaggttatcaaactttagtccgatattctgatctcaactcctaaaatgtccttcaccacctcatatgttacgaatgcaattgctattgatgggaccacctttacagagttgggcaccagacccttgtataatgcaccaaatccctcatgctgaacagtttttctgaatgcatcgaccattccagtgtattccagtggaactntgcctcttccatcgccagttagaacagaagcagcatggttccaaccgaccatctgcattcttcgacggataacgtcaagagggtaaagcacag

SEQ ID NO: 7810 - DNA, 425 bp, Glycine max
  Clone ID: jC-gmle01810028c03a1
gccgtatagttcagaccgtaccgtactctttatctctttctccgccgcaaactatccttgtacggcggggccaccgtacaacccatcgatttaagcaaaggagcaacatatggaggtgcttggttgcaaatggaggacaccgcaagcaacaactacagagtcgtcgccgccgacggtcccgtgatgagcgataaataacaagcggctccacgcccctcgcaagaagcagaaccgtatcctcgccatggaagaggccgagacccagggcaggcctctgaacaaggagcaggaagaggatgtccgctccaaaccctccgtccttggtctcattgacgagctagagaagcgacggctgcctgtggccaccgatctatgcgaagagctacaaaacaacggcacctactctcaaaaatctggggagaccg

SEQ ID NO: 7811 - DNA, 280 bp, Glycine max
  Clone ID: jC-gmle01810028c03d1
gaatgagtattgttgttcatttgataaggagataatgattgtgggatttggtgcttatatgaaagtttatacgatcactgaagcgggtgcgtgttgttttggtagtagttggaggatattgcaaaatgtgaatgcgatggtaactttctaatatttatattgcgattgagaatttgggtggatattacttccttttgtaggcaataatggagtctatatgttcgaacctttgggaggtgcacaaatttattgaaatacataggtattggccttgaggatg

SEQ ID NO: 7812 - DNA, 135 bp, Glycine max
  Clone ID: jC-gmle01810028c04a1
gtttcaaatttcaattcattactctccaatcccatagcgtcgccgttactacaccgtccgatttccattccccatttccaattacacttcccctctctatgccgacgctatctacgccgtaatgtcgtaacgggg

SEQ ID NO: 7813 - DNA, 470 bp, Glycine max
  unsure at all n locations
  Clone ID: jC-gmle01810028c04d1
aacatcataatttttcttatacataagaattaaacatggtatcaaaaggttttacaatatttatacattctgtttaatcaacagaactagaccctctttactttaagttaggtttaaagttcagtttgggcatcatcatttgctacatgcataaataaagcatgtatctaattagactaaaaaccaactgatgggatctcaagctgaatcacgagccttgcaaacaggtaaatcatcttcgaaattgggagggactccaaggattggatttctctcaaagaaattagcaggcttcaaatcaaaacttgatgatacagtaggcatgacaggatagtcctcttgacagggtatatgatggaaccctattgtgtaccacanaacaatgtctntattctcaattggacgatccctgttggaccagacttgaagagtatcatcccctttgctctggtaagcaaataaaccaccag

SEQ ID NO: 7814 - DNA, 410 bp, Glycine max
  Clone ID: jC-gmle01810028c05a1
gtttaggcgtgtatagctttaaactgaggcgggttagaagacgagcatacatgcgtgtggaccgagttggcgggatgagaatatcctgcagaacgagatgagagccgttttgcattctttgctgagatgagagtgagtgagcctctgcaaggcctgatgcaacgcacccggggctgttactggggctctgtcattccctgagctctttagtacttccttcagatgtacttgagaaccaagccatgccagcaccctcagactccaacttcccacacggcccccgaccccgagatcaccacctcacaccggtcgctgtcttcccaccgcatgcactccacttactccagctctgcttacgcgctccctatagccaattccctcactgcgaggcacactccttattatctacg

SEQ ID NO: 7815 - DNA, 536 bp, Glycine max
  unsure at all n locations
  Clone ID: jC-gmle01810028c05d1
ggaagatattgcagtagctaacaattataaatataaattattcagtcaaaagaaattcaaccataagcaatagccaatatagaatcattcaacaaaataattaaactaaggaaccaccaaaattattcaagctatctctcctgtccaaatgttaaatgccacggttctgaaaccacttacataatataagcaaatgcaggtagcttaatttcgatatggcaaaaccaaactttgaacataatcatgagagacaaatgcagagaaagacgataatccattgttgaaaccttccatgcggtctatactattatctctcttatcaaccagaacaaattctgcaccacctccatagtcttccagcaacaggacgtcgtcattttcagacttgcacaaaggtaccactggacaaggtggaaaatctagaacttgaagatgatgatagcttacattcagcaactgagtccaagactnttcagctccaaactctctcattagccaaacaacaagattggttcgcctgtgatcatgagaaagac

SEQ ID NO: 7816 - DNA, 455 bp, Glycine max
  Clone ID: jC-gmle01810028c06a1
gtgggcaaggaattaccgatgattaactttgcccaacttgtgtatcttccatattgggtatccacatagagagagttgctgcaggactgtggcatacagtctgtacatctgctgatggtgatgtgtatgcatctggtgagaatcaccttgggcaggtgggaactggcgctgatcaagctgaggtatgctgaaattagtgtcatcccatatattcactactcatttgtgccttggcgacttgttggtcatgggttcgaatactgaaacagcctctttgtatatgcaagggtaaggatgcgtacaatattcctgccccataccttctcatagcgaaaagcctccgggcaatggggtacgaagtttatatatcaatcaccactgtactgtgattgcgcattcatcataaatattgatgtcactgaaagaccgtgtaagcatgtggcattgacgattct

SEQ ID NO: 7817 - DNA, 538 bp, Glycine max
  unsure at all n locations
  Clone ID: jC-gmle01810028c06d1
aacttcaattattattaagcaaaggcaagaaaggagaagtgccaaaggagggggggaacaattccttgtaagcagtacgaggaattataaggttaacttgatggtgaaaaagaaagaaattataaggttgacttgatggtgaaaaagaaagaaagcaaaccgttcataaaaaaaaaaggctatgtggacaactcctccatatacaagatctagactatttgacttttaaaggcttattcagttatttgatacccagaagagtttcttgttagggtgtgtgaagtgggccaaaatagccatcaaagtagcttatcagctttaaggcaagaagaaacaaaaccaattcttttgggtaaaagaacttcagaaaccactttgcccattcaactaaacacaacaatgaaagatgaattaaaaagtcatgttacagattcctctgaatgaagtcccacatgcttccttncatgtagaactcgtcactatgacgccgaggcatgtgccgttcatctgggaaaactattagctcatatgattttca

SEQ ID NO: 7818 - DNA, 429 bp, Glycine max
  Clone ID: jC-gmle01810028c07a1
ggcgagagacccaaaagctaagcgttgcctctataattcaagggacaattgttccaattgatgccacgtttagagagtactacaccacattttatacgctgcattaagcccaataacctccaatcacctggatcatatgagcaaagccttgcactgcaacagatgagatgatgaggtgtcctggaagtgggtcagatatcaagatcaggcttttctactagagcgtctcaccaaaagtgcgccagatgatatggctgtcctctccttgaaaacgttgcctctcaggatccacttagagtttcaatggctattcttgatcacttgaacattttgactgagatgtatgaagctggctacacaaaactattctttcgaacagggcagattggagtgcttgaagataccagatatcgtaccctgcatggagtt

SEQ ID NO: 7819 - DNA, 454 bp, Glycine max
  Clone ID: jC-gmle01810028c07d1
tggtcggcggtcgccctttttttttaatcgatccatcttcactcccaagtttatgtaaaatgacctttgtttcacgtagtcttgcaccataatccttttttcattgtttttttttttttttttttttttttttaaaaaagaccccctttttttttttcccccccttgttcggatttacaaatttcaaaaattttttttaaaaaataaagggcttttttttcccaaaaaaggggtttccctctggggtaataacggcaaacccaggcacccccccttttttttaaaaacatggggttttttttttatttaacccaccccccggggtgtaaaacccttaaaaagggcccgttaaaaaaccccccaaccctctgggagaacttgtaaaacggtttttttctttcccccaaaaaaaaacatttttctttgcccccaaaaaattcccttttgggggggg

SEQ ID NO: 7820 - DNA, 498 bp, Glycine max
  Clone ID: jC-gmle01810028c08a1
ggctcgagcttgaatcacaacaacaatccatacttcaacacataccagcatggctgaccaatttatcctcggacgacccatcggcgaaggtgccccgggcgagcacggcgccggcaccggactctctggcggacacggcatcgcgtctgccgcgaacacccagtcgggcaagtacgccgaggaggagcgatcgggcttcaacgccggtctgggcggagagcacgcctcgggcggcatcccgcacggccactctggctcggcccaccccatcgccgacaagttcacctcgggctcgcactcgcacaccgacggctccggtctcactggcagctcgggcggaaagctcgacaacagcctcgacaactacggtggccaggccggatctggctcgcacggatcgcacagcggcgcccttggagccggcgcggctggtctcggtgctggtgcgctcggcgccggcgcggcgtctggtcaccgcggacaggaggccgtgagcgg

SEQ ID NO: 7821 - DNA, 316 bp, Glycine max
  Clone ID: jC-gmle01810028c08d1
gacagaactaagatgtttcccctcaaattttttgggttgagaaaactaaaatcttttcacattcaccgaacgaagacaacaagtcaacagcatgaccagaagaaaaccccacccgattatgaaaaccaaaagaaaatggggggcataacaatcgggaccctttgcttggggctatttaggatctggttggataccagattaaaagtccttttgatagctcttggaaaccttttttctggaaaaaaaaaacctttttttcaggggaggaacttttaaaaggccttataccctggatttaaacagggccttaaccctt

SEQ ID NO: 7822 - DNA, 490 bp, Glycine max
  Clone ID: jC-gmle01810028c09a1
attgaatcgtaagcagcggctactttaatcctctcctcttcctctctactaatttcagctatggccgacgaagctgtggttgttccagatcccacccagatcgatgtcaagctctttaaccgctggagcttcgacgatattgagattactgacatttctctggctgattatatcggagtggcgacatccaagcacgccacgtatgtgcctcacaccgccggcaggtactcggtgaagcggttcatgaaggcgcaatgccccattgttgagaggctgaccaactctctcatgatgcacggtagaaacaatggcaagaaactcttggctgttaggatcatcaaacatgctatggagattattcatttgttgactgaccagaaccccattcaggttattgttgaagctgttgtcaacagtggtccacgtgaagatgcaacacgaattggttcagctggagttgttaggagacaggctgtggatatctcacccc

SEQ ID NO: 7823 - DNA, 520 bp, Glycine max
  Clone ID: jC-gmle01810028c09d1
aataaaaacaggatctttaattatttaacatattaaacggtaaatcacatgtaaattattgatcaaagaaaatgacgagtcacatgtaattcttccttgcacaaagctggtttggtgtggatatttcttcatatatcctcgtagaagaattttttaaaaagatccataagtgctgtcaggaaattcatggaaataagaacaccatctccatcagggcttataataatatgtgccctaacttctcgaaatacttttgctaaaccaaagtgcacaggctttccccaaccaaaatctgcatcatacactggcaagctcatccagcttgtgatgagaatgttatgaggattcccagaatagggttcattaataaggtctccttgtcccgagaaaaaagcccttatgttatccaattgctcttgccctaaaacataacttatgtgtgaccttatatactcatatgtaaccgcataaaccgcatcccttatcttttgagccccatagcttaatgggtttaataaga

SEQ ID NO: 7824 - DNA, 375 bp, Glycine max
  Clone ID: jC-gmle01810028c10a1
gtaccatacccgctgctgcgttttagactcactactcgcacgaaggccagcaacaggagtgccattgtccaacgcgggctgtgagcgtaccatacgagacgtgcgcaacaccggagtgcacattgctgaccgcaatgcgcgctgttacgaagatgaccgtttgcttggcaccacttaactgtgccactaagaaaaggcgttacgttcgcgcagcacagatcaattgcacgttgccgctggctgcgtggagctggctatggtcgtgcgcgtgatgctatggtattgcataaagtgcaacgacaactacctaagacactgcttcgcagggagactcgcacactagatcgcggattcagcttcagagggcacgcagcg

SEQ ID NO: 7825 - DNA, 508 bp, Glycine max
  Clone ID: jC-gmle01810028c10d1
acaagttaattgaagaaattcaatttgtttaatcaaattccccaaccccctctctttttatttgttcactacgtattatatgcaataaaatattatatggcagaaatattctaagttggaaaaaatagaaactaagatataggatttttcaggaaggggttaaaaaagattattttattgatatttttagaatatttctatttcgacacaaacaagaaggaataggaatcggactctaggaaaagacaaaaaatcccccctagagtaccttttccatattttaattgattttgtttcaaattatctatctatatagatatctattttatgtttagtatcgaatccaattttattgtattttacaatcgaaatttctataatagaactctctattatagaaaaatgaaatctgaaaaaaacagtgtcataaccataatattcgaatttattggggggttgaaaaaacaaagtcaaatagtcttcctgacaatatccatactcgagttta

SEQ ID NO: 7826 - DNA, 562 bp, Glycine max
  unsure at all n locations
  Clone ID: jC-gmle01810028c11a1
ccgccatattccacaagaactctccaaggatcctccttcccacgagattctttggtgggaaaaatccaagaggtttgaaatttgaaggcagggaagatggattatttcaatgcaccaggaagaaaccatctctttgttccagggccggttaacattccggaccagatcatccgggccatgaacagaaacaatgaggactaccgttctccagcaattccagctatgacaaaaactttgcttgaggatgtcaagaagattttcaagaccactactggaaccccatttctcatccctacaactggtactggtgcttgggagagtgctctcacaaacacactgtctcctggggatcgaattgtatcgttcctgattggccaattcagcttgctttggattgatcagcagcaacgcctgaagttcaatgttgatgttgatgagagtgaatggngccatggtgctaagcttgatgttctggaatcaaagattgcttcagatacttcacacactataaaggcaatttgcattgttcacaatgagactgctactggngtcaccaatgact

SEQ ID NO: 7827 - DNA, 496 bp, Glycine max
  Clone ID: jC-gmle01810028c11d1
acaggacaataaaagaagcaatgcattaaagctgaaagtagaaagtacgttcatcttcaaaggagtgtaaaagagggtaatatatattttacagaatttctgaaagagcagaaaaaggaagtaaagacaagaatgatttgtgactcaaatcctggaagggatcataggaatagtgttctgtaagtatgcactggcagcagcaactccacttccaagctttacaggataacccacatctttgagtatcatctctacaccagctagacatcccaacagttgcaactcattcaagtggccaagatgtccaattctgaaaaccttcccagcaactttgttcagtccaagacctaagctcaaattgtatctcttccatgccctcctaactatttcagtactatcaatgtaagcaggaacaagaacagcagtcacagtgtcactgtaccactctttcttttgggtgcaattcttcaaaccccatgcctctacagcaagtctg

SEQ ID NO: 7828 - DNA, 509 bp, Glycine max
  Clone ID: jC-gmle01810028c12a1
ggttcctccctcagttgcttccttcctcttgtgtccacccagttccccctttcattttccattcaataattcaaacaccagttaatggctacccttctattccaccacaattcgcctcagatattctcttcctccttcttcttctcacagcattaaacgccgtcgttttcatgactccataattcaccggaagcagaacaacaacaagaagcagcagcagcagcgcgagttcacatgggattgggaacaaccgcgagaagcagaagaagaatcgtcatcgaagaaggttctagaacaagaacacacaacaacaccaacaacgccgatgccgatggagctggagcaggagctaggttcaacaacaatccagcgttccttcgacgcgcgctacacccgccacgcgcgcgactcgctcggcgaattgcctgacagcttcaccatcaccgacccctgcatccccggccaccccatcgtcttcgccagcccgggcttcctcaagctcacgggct

SEQ ID NO: 7829 - DNA, 556 bp, Glycine max
  unsure at all n locations
  Clone ID: jC-gmle01810028c12d1
aggaaatataatacattttatttatacacgtccaacagagaatgttttcttacaattgacagtatggactctcttttttttttcttcttcacaaattaattcttttacctttctatcatctcaacaatcaccaattgagattgattattttttcgaatggattaatatttctgggaagtaggcaaatattatttgttccaaactcacatgatccttttgctacgactcagaagatcccgcagtcattgataaactcctcactgcaaccttgactacaccaaccacactaagttgtctcttctcaggactcaaacaatggctatcatcgtttttattgttgtcttctatttgaactcccacaaagtatgcaaccttgccagaagcatcacgaacgggtgagatatgaagaaaattccaaaatgagcttttgtccttcctgtaattcaaaatacgtactgtgcatggttgttctgttttaatgctttcccttatctgaacgtaagcaataagagaaaggcataacanaatggtccattcccattagtctaagactcta

SEQ ID NO: 7830 - DNA, 127 bp, Glycine max
  Clone ID: jC-gmle01810028d01a1
ttgccaaaacgatacaacaacactgcttttataccacattcgcaacttctcatacctagaaaggagagaaccgtccacactacttcctcaatggcagcttccagccaccagcgtaccaaccccagca

SEQ ID NO: 7831 - DNA, 505 bp, Glycine max
  unsure at all n locations
  Clone ID: jC-gmle01810028d01d1
aaactatgcctcgctagtaatccactcttgtatagcaatatacaacctacaacattctacacaacccaccagctatatccaaacataaccattatatgtatagtcaatttagtatccaagctaacaaatgctccaactgtatgatggttattgttaagacattgcaaaatgtgaagaatcctttcagctgtatcctttcaccaagtgctgccaaaaaataataacgacctttcgaaatatcttgtaccaaaaatccacagctatatattgggatgctgctcagtcatttctttcctcattcagctttcaatctcaagatctccttagccgtcctacgccgaaagtaagacatgttttcctggttaaaacacaattccagacccctgctataaaagtctgcatatttgatcataaacaccccacaatcatacccatttttctgcacaggaaggtctttcacaaattctnttttccaggtatttacatcaatatgttttccagtctt

SEQ ID NO: 7832 - DNA, 307 bp, Glycine max
  Clone ID: jC-gmle01810028d02a1
tgcacagcgtaccgtaaagcttagagcatcggagattcaggtacgagtcccacctactcctaaatgctaatttttcttcatttcctaaaagcttaaagagtcgggcatgacggagaacttggactacttatatcatctctcaagaggtggtgtgcttgaacaccaagctataagcctacagctataatcgaggctaggaatgcactccacctgaccatcataaacgtataacatgtggcactgagccaacagatgggcgaatctttctgggctcggggacacagacagagttcactatacacatggc

SEQ ID NO: 7833 - DNA, 487 bp, Glycine max
  Clone ID: jC-gmle01810028d02d1
cggcttgccaaagttattgggttgtacgtacatggtgctgtaaacgtgatcgaatacgccatactcctccgagaactacgtttgctcgtacgccagtcataaacaccacttcactaccagcttagtgcagcgtcctgagcgactgctcaattgcaacaccaagtgcaccaatacctaccacggtccagagccacttgttcttgagctcgtccatgctcggccagaaggcgttcttgtcggcgcggaacttctgcagctctgcaaacttgtcgggatgagactcagagtagcggcgcacttgatgctgctccttctgcttgtcaccaccaaagaaacgcaggaagcagtagttagcgatggggccgagcagctctaccggtgctagcatgtcactgccatagagcatgacgatgaaagagatgtgaaccagggcgtctccgagatagttcgggttgcgcacaatactccagacaccttcacggaggat

SEQ ID NO: 7834 - DNA, 278 bp, Glycine max
  Clone ID: jC-gmle01810028d03a1
gccaggtgtcaagacatgacatgcactcgccccttacctaagcattgagttcgaggggagaaagagtcaagcctggtttttgttttaacaccatgggatattgctatgatgtcggagcactagatacagaaggggctactcctgaataatcctgccactctagacgatgcaccagatctcgtggctaatttgatatagaggccggaacgctctctttgtctcaccctatgccataggtctgattgggctggacaacttgctacccatgctgccaagga

SEQ ID NO: 7835 - DNA, 553 bp, Glycine max
  unsure at all n locations
  Clone ID: jC-gmle01810028d03d1
gcgaaccaaatcaaacagtatgatatataaagtcataataaaatgcttatgtgaaatgtacccacacgatacatctatttaggccaacaagctcacactttattaattaggaactacttccctgctcaagaaggttttgtgtgttggggttcttgccccaagctctctccctccatattacttccacttcatcaaaggtcaatcctttggtctctggaacataaacaagcacaaatacaaatgcaaccacagctatgacaccaataatcagaaaagttgaaccaatccctataccctccgcaattgaaagaaaggtctctgagacaatcaaatttgagacccaacacacagtagctgacatgcccccacagatacctcgatattcttccggatatatctctgaactcagagtccatggcacaggccccattcctggcgagaaaaaaccaatatacaaggctaagcctacaactgcaagccatccatacaactcatntgacgtggatgattgcttataaaatgcaaaggccaagatgaccaaagatacaattac

SEQ ID NO: 7836 - DNA, 439 bp, Glycine max
  Clone ID: jC-gmle01810028d04a1
gtgtttttagcgaagagattaaattgttaaaggaaaagtatgaaaagaagttgaaagatgctgctgccagacaacttatgcttgctgaggaggctgcactgctggatagggagcttaagatagagagagcgaaagcatcccttgctatcaattcacttcaagataagatggaagagaaactgaagacagaacttgaacaaaaggaaagtgaagcagaattgaagttgaaacaagctccagaattagcaaaggcagagataactgcacacatagcaaatgagaaggcagctcaaattgaaaaaatggctgaagcaaatgttaatataaatgccttgtgcatggcattatatgctctatctgaagacgctcgtcaaagtcatgctacacacaactttgcattgagagcacttgcattggaagatgcactatctaaaggact

SEQ ID NO: 7837 - DNA, 517 bp, Glycine max
  Clone ID: jC-gmle01810028d04d1
attctaaaatctaagtcacctgaaagtattcccttgatcaaaaagttcagaagaaagccctgctgccataaaacacacgggagttagtgctctttggtgtctgtagcttgtgttcagagctagagtttcctgaactagttggtccactttcaaagtccacaggaagcttcatttttgccaatgactcggtgaattgctgcatgcttttcatgtacatgtctacaaaatcctgctgcaccacattcggctccggctcgatgttaacagtcacaagaggtttagggaacgaggaatcagtctcaccatctttgacatccacatttttctctttggtttcctcattgggagacgagtctgagcttgcagccactgaaggagatgaaaccccatttgttgacacactgctaacactgcatgctgagaagctctccacaagctgaacacctgcttcagaactaagattttcagtatcagtagtggtcaagctatcagaacactggctctcctcacatggaat

SEQ ID NO: 7838 - DNA, 474 bp, Glycine max
  Clone ID: jC-gmle01810028d05a1
tgcctggtatcaagacattacatgcactcctcccttagctcagaattgaattcgggtcgagctttctgctttaattccttttgtttttgatgatgcaatcagccttattacatcactttgctcctgagatccctgcaagaggccaacggcttcagaggcacttcaacatcctttcttccaaagttgcttttacattactccatccctacgcaacagagaattaacgagaactcctacacccgctggaacaagaggagcactggatcagcaaggagtcaagagatattgcggtgctttacctacttcaaagctattcaataattattattccatgaaatcacatccttctttagcttcaggtgtgcgacggaagctgcatatggttaaccaggatggaattaacaacgacaaacccatgaggactactgaaccaaaatatctgttgccacgagaggacagcccaacttctattaa

SEQ ID NO: 7839 - DNA, 390 bp, Glycine max
  Clone ID: jC-gmle01810028d05d1
gcaaataaaggcatttgtttattccattactacccgtgtttacaagggaaatacaaaagattcctatgattcatttccaactttttttctcttttggctttccaaaaatgtcacgaggtacaatacaaacgatgattccagaaaacgttgaaaaagcatgataccatacgacggctctgtttctaatctttatctttttcttctttctttgccttttccccccaaaaagcaaatgaatgcctgttattacccatattttaccccacaaaactggcttttcttcttacaaagtgttgtctagggaagttgctatcaacattaaatttgatcaatcctcgtgaaggaggagcaccctgataaagggtcttcaggaattccttataaagagca

SEQ ID NO: 7840 - DNA, 137 bp, Glycine max
  Clone ID: jC-gmle01810028d06a1
gtcggtctggaaccattcaattgtgggatcttacgagcggattgggtgaaagacgctttcagcacccaaaaggagtggacacaaaaatgcagtgggtgccatgtgggaaatagatacgggagtggaagatgcacaca

SEQ ID NO: 7841 - DNA, 411 bp, Glycine max
  unsure at all n locations
  Clone ID: jC-gmle01810028d06d1
actagcaaaaaaggaagatagatatatacaacttttcttacaattttttgtttcatgaacataactggaactgttgatgagtaaaattcttacataaactctgcatgctttcaaaaaatagtagcatggtacgcaatatataagtaatatgtaattaaatgtccaaacaaacctacacgaaggaaccttaagaggaaataacgaatgaagaaattggaaaatagtagaacctcagacataaagaaaattacacaagataatgatgataacaatatcactttgnttctcgcatttgcatatcatcttctgttttccagacaacatcatccaggcttgttgaaagtttcttgtagaacttatggaactccaatgtatctccttttgccttccgtacctcaaccatgtgaagag

SEQ ID NO: 7842 - DNA, 226 bp, Glycine max
  Clone ID: jC-gmle01810028d07a1
gtccgcgagggatgggcttaacgttaatttcatgtcatgcctttcaacccactcacacactctctcttttttattcatgcccgcctccctattatctttctttgatccgctcatacagtggatagatgatggaatactgtgattgtatagacacacaggatcctacagatgaactattcaaaagaatcaatacatgtcggatgagctaaaaggccttgactatatg

SEQ ID NO: 7843 - DNA, 396 bp, Glycine max
  Clone ID: jC-gmle01810028d07d1
gacaaagcaagacaaagcatttattcaattgtcacaaagccaataagtactcattttattcagcctttagtctaactgtgtcaggtaaaatgtaagcttagttcactacaaactgaaaaaaaaggcagatataaattagttaaataaaataaagaaatatagaagccaataaggcaataacctccactcctacgagagtcctcaagttcgggagcttcaaacagatctaactgacttccagagcttgacccactcttccatggcttcagcagccgccgaaaacataggatcaaccttccccagttgctccttcactgtttgggcattttgaacacgccaatctttggtggaagtgctgaatggaggaaccctaatgactggaagaaagggaccaca

SEQ ID NO: 7844 - DNA, 547 bp, Glycine max
  Clone ID: jC-gmle01810028d08a1
caccgtgacactgtcactcctttttctccctccggttccggtccgtacagtgtccgcgtctgcatcaacctcgtcctctgtccctctcactcactcctactcctgctcggccaggcagaggctcttctctcacaaaacaagactcagtttccggaatcattcctctgcggttacaaaacttacggtgacatgcggtgcggctgtgacggagatcaacgagacccaattcaaagacacggtgctgaaggctaaccgtccggttcttgttgagtacgtcgctacttggtgcggtccttgccgtctcatctcttccgccatggaatccctcgctaaggaatatgaagacagattaacggttgtaaagattgatcatgatgccaacccgcagctaattgaagagtataaagtttatggactaccgacattaatactctttaagaacgggcaggaagttccagaaagcaaaagggaggtgcaattacataattgaaacttaaagagtacgtggatgcttaattgaatcaatatcagttcatatcatcatcat

SEQ ID NO: 7845 - DNA, 549 bp, Glycine max
  Clone ID: jC-gmle01810028d08d1
aacacaaccaaataagtttagatcttgatctgattacaaagatattaacaaacctgagatgagaggacacaatcacactatctgcgtattacaaatatcaactgcaaaaaggagaaaggggggatataaagcggctacctatacaaccacacagccactcaaagaaaagctgaaggttagctccaagttaattttcttcctttgcctggcttcttagccgatctctctctaagcaggaaatacaaagtctgtcaggcgcataccgattccttaaacgctcttctcaccatcaatccatggccaataacataaataatggttgtcggaatgccagttacaatcttataatcaattgggggggaaaagacaaaagaaaaaataaagtaaacaaagaagggcagaagaacgatgctatgaaaacccactccttagtgcctcttcaagagacgattgtcattgcgtgctgcgtgttaatccttcccgtgccacatttcttccagaaacaagctgatgctgaacactgttcacagggccctttacattactgaa

SEQ ID NO: 7846 - DNA, 484 bp, Glycine max
  Clone ID: jC-gmle01810028d09a1
tcaggtttgatttcgaaagcgagttggatggaagaagaagatgaggccgatttttgctgggaacttggagtacgatactcgtcaatcatagcttgagcgcttgttctcaaagtatggaaggattgaccgcgtggacatgaaatctggttttgcttttgtctattatgaggatgagcgtgatgcagaagaagcaattcgtgcacttgacaatgttccatttggtcatgaaaagcgatggctgtcagtggagtgggctatgggtgaacgtggacgtcttcgagatggatcgaaggcaaaccagaagccaacaaaaaccctttttgtgattaactttgacccaatccgtactagagttcgtgatataaaaaaacacttggaaccttatgggaatgtgcttcgtgttcgcattcggcggaactctgcatttgtgcagcttgagacacaggaagatgctaccaaagctatagagtggacaaatatgagt

SEQ ID NO: 7847 - DNA, 276 bp, Glycine max
  Clone ID: jC-gmle01810028d09d1
aaaaaaaaaaacccccggcaaccctttcccattagaaccggggaaacccaggggccaaaaaaaagggggggcccccccccccaattaaaaacccaagggggcccccaggggaccaaaattttggggcccccaaattaaaccaatgggggaccaatttccctccgggggttaaccaatattttggggaatttccccgccccccaaataaacaaacaacgggggaactttttttaaaaccccccccctggggtaaaaaaaaccgggggcaggggcccg

SEQ ID NO: 7848 - DNA, 289 bp, Glycine max
  Clone ID: jC-gmle01810028d10a1
gtaatgcatgaatgaatgcatttctcgagttatcggtttcatctggttaagcagcgggtagtgtgtccaggctttaggtgtttaagttggattcccatgttcctttattattaccatacaggcatgggattgcggttgtgttcatactccatatctacctttatagatatcatgtgtccaaattgaagtagcatgggatgcaccaatttaaccagtcggcaaggtggcattggcatgcctaagaataaattgtgttaacctaaaaataaataaacaaaaaaaaaagcaa

SEQ ID NO: 7849 - DNA, 241 bp, Glycine max
  Clone ID: jC-gmle01810028d10d1
atgttaacacattttatttttatgcttgccaatgccaccttgccgatctggtaaattgggcattccagctacttaattggacacagaatatataaggaggattggaactgacccacccaaggcatgctggcgcgcaaataaggaacagggacccaattaacccaaagcccgacacactacccccgctaaccagatgaaccgataactcgaaaagcatcatgatgcattacctaaaccgatt

SEQ ID NO: 7850 - DNA, 552 bp, Glycine max
  Clone ID: jC-gmle01810028d11a1
gaagagggaacaatttaggaaaataacaatgatgttgtgttggtagcgtaaggtggaaaaaagagggtctttccttccctaagctatggctcctgctgggaagctttctgggcttcgtcgagaaggcagtgactggttctgcaatgggggactgccaagtgatataactgtttccgtcgatggtgtcactttccatcttcacaagtttcctcttgtatcaaaatgtggaaaaattgctagagcacatgaagagtccaagaataccaatgagactctgaaaatggtgctggaagaatttcctggtggtcctgacactttcttaattgcagcaaaattctgttatgggtatcgagtggaactgacagccagaaatgtagtatcggtccactgcggtgcagaataccttgaaatgacagatgaatttggagaaggcaacttgttgtcaaaatcagagagttttttccataaaaacacactgcgtaactggaaagattggattctggctctccaagttctgagcctgttctacccagagcagaaaagcttcattag

SEQ ID NO: 7851 - DNA, 534 bp, Glycine max
  Clone ID: jC-gmle01810028d11d1
aatgacaaagaccataaaatattttgtcatttataaagaaattacactcgtgtcacaactatacaatattttgtcatctatgaaataagctatgctagaagcacaatattgtcagttacattcggttgtgagctctccaacctttgtgcatcagctttgcatctgcactaggtggaacttggatgattctttcttcgatggcaataatgttcttcacaaaggggtctaaaacaacatctttcactgtcaatatctccaaattaagaataaatctatacggatgataaatacaggagctattccccaacaaacaggacaatttgtgaaattgcctacataagtgtacaacaaactttacacgagggaaagaaatggaaaatgttccgatatgcaaactggtgaaataaaaaggcataatggattgcgaaacattttccttccctttccatcgtacaaaaaatttaaaaccacacaacactgctatatgtatacatgaataaaagaaagaggaactctggtttcttgatactcaag

SEQ ID NO: 7852 - DNA, 405 bp, Glycine max
  Clone ID: jC-gmle01810028d12d1
ccaaaaaaagagaaaaccccttttaagggggggggaaaaaaaaaaaaagggacttgaacccacaaagaatgaaacccctttttgggggaacccaaaaaacaagggggggggatcgggccgggtgaacacaaaattttggaaagggaaaacccccttctttattaaaaaagggggggggaaacaccatttttgaagaacaaaacctaaccctgcccttagaagggggggcccccccgagattggggccccaaaggaaaaattgtttcttgggggggggtaaacacccggaaaaaggtcccaaaacctgggggggaaccccttacgcaaaaggcgaaaaccctttgggccgtaaaaccctccccagggcggttaaaaaagaaaaccctcttgtggggcccccccttt

SEQ ID NO: 7853 - DNA, 127 bp, Glycine max
  Clone ID: jC-gmle01810028e01a1
cttaggcatgaccatacgcatactttagatatagatcccaaagggcaagccgacccacgggtgttagaggacctatatgacattcgtctacactaccctgagaactgaccgtattcagcaccacaaa

SEQ ID NO: 7854 - DNA, 454 bp, Glycine max
  Clone ID: jC-gmle01810028e01d1
tcctttttttttttttttggttcatattatttttttacatttttttatcatttatttttttaattcttgtcgaaattgtttatgatttttttacatttttctattgtttaaaaggggaacagcttaaatacatataagtgaaatactgggcttgggggggaaaagtttatacactaactagactctttccaagaattatggtcatccgttgagaaatcatcctattggcggtttttcctataccaaatgaaagttggccaaactgcaagaccctgtacaagcccaaatacagggtgccacccagcgctttataagggtctcaattgatgcggcgaaatgctggaaaccgaaagtgaaatgatttgtttttacccactgtaaaaggggcacccgcgtagtgaatgatctttggctatgggaacccaccagacttagcacatgctcttgctaatcc

SEQ ID NO: 7855 - DNA, 117 bp, Glycine max
  Clone ID: jC-gmle01810028e02a1
tggcttgacggcctagactatgacattcacgcggacccgtgcgtaaggcattgggctcgagaattgccaaaaccatacaactatcttgttttaagaaaacatacacaatctttaaaa

SEQ ID NO: 7856 - DNA, 492 bp, Glycine max
  Clone ID: jC-gmle01810028e02d1
gtgaaacgatattgatatttaaaataaaaacataaacaacatactttcgctgaaacgagttcaatacatcattttaaaacataataaacagcagcacttaaaccagagatgcaaagcacaagttcaagggagacactgaacaaacagataagacatatgagaacacttcataaaagggattccccttagcaaccaccacgaaggcgaaggacaagatgcaaagtggattccttctgaatattgtaatctgccaaggtacgaccatcttccaattgcttcccagcaaaaatgagcctctgctgatctggagggataccttccttgtcctgaatcttagctttcacattgtcaatagtatcagagctttccacctccaaggtaatggtcttccctgtcagagtcttcacaaatatctgcatacctccacgaagcctcaacaccaaatgcagagtggactccttctggatattataatcagcaagagtacgacca

SEQ ID NO: 7857 - DNA, 268 bp, Glycine max
  Clone ID: jC-gmle01810028e03a1
tgccatgatgacaagacgtgacatgcactcctcccttacctcggacattgggttcgagatcgaggtacctgcttctatagctgatgttctttacccaggcaatgtgagggaagacgtggcaccagctgcttgatgaaatgctataagggctgacccagtagtagataatcacggctcaaggaggttatctgtgtcactgactccacttcctctgaatgagctcggagaatctatcagacgagctgttgattgatggattaaaccatgg

SEQ ID NO: 7858 - DNA, 282 bp, Glycine max
  Clone ID: jC-gmle01810028e03d1
gattattacaaaataataaacatttctttaagattatcaagactaggttttgtacatatattctttctcaacccatgatttaatgcatcaatcataaaggacgctttttagttcttacacgaccaaataaccctactggattcagtgtcaataatatagaacttatacagtgatttaattaaactggggctgaacttagactaaatcctgaagcctgtggctaaaagcatctacacaagatgtctcgaaattgttacttagcaagaggctcctcactttgtt

SEQ ID NO: 7859 - DNA, 454 bp, Glycine max
  Clone ID: jC-gmle01810028e04a1
ggtaagattaaatgctaagtgcatgtcattttataaaacaggaagtggctattaatctatatgcatgacgagtaaatacaaaatgctaactagttgctcaaaggcgttagtctaggaattaaaagtagaaatgtgctatgagagagtgtgacatttaatgttacaatgtactatcccactatgatttccaataaagatcttttatttactgatgagtgatgtttattctccaaattttcttacacattcttctacttctttagtgaagaagcgaatgcatttagtgcattggatgcataggatacactgcaatacttgccatgctaagcaagaggactggttggagaatgttgcccgaagatttagacttggacagaacatatatgcggtgttataagtgctttgggtgctgttctacagatagaatgattcttaatctatgggttgtagacag

SEQ ID NO: 7860 - DNA, 364 bp, Glycine max
  Clone ID: jC-gmle01810028e04d1
ggaaaccgggataccaacttaataggaccccattaaaacaattcaattaacatttttccaatacggaaaaaataatatttacattaaattacaaatttcataaaaattccaaccaattgcataagcaatttaacatagtaaattactacaacttatttaatcattttgacgtaccacttttattgggacaaaataatgaaaaaatgccgactaaaagtatttaaaatacattgggcagcaattatttcaagggccgactttttttaaattatcatagggataattttgagttagccccacttgtaaaatgatgatcccattgagatcacaaccattaccacccttagagtttcttacattccca

SEQ ID NO: 7861 - DNA, 112 bp, Glycine max
  Clone ID: jC-gmle01810028e05a1
caacactgttggcaccattcaatttttattttcgtcactgtgctccctccaatgtcaacggctgttggacaaaatgctgttgctttatccataagagacagttcccgccggc

SEQ ID NO: 7862 - DNA, 533 bp, Glycine max
  Clone ID: jC-gmle01810028e05d1
aatagaaattctcgctataatattgaatcactgacctgttttttttaatctaatgtacataaaagcaacttcaaccatcgtcatgataataatgccactaaacattgcctcttctttcattgacctacaaacaaaccgtgaaagcaccattctatgggtctaacataagctgcataattagctacaacaacaatattcacatgacagcctacgggcaaaataccaaacgtggccaatacatttagtcgagtattatatatgaagcaactagattctactggaaattatacacaaattgtatatcactggcaaactcctgattgccctatggatgcctcgtaggtaaattttttttcctcacacttccattcatagaacaagagtaactagaaggatgcagccacaaattctttcttccctccgtaacttttttataggaaatatgataactgttgttgcttccttgaaccgccttccccatacaattcattccactgctttaactcattcattcctgccccctcaactgcgta

SEQ ID NO: 7863 - DNA, 461 bp, Glycine max
  Clone ID: jC-gmle01810028e06a1
agcaaagggcttagcttatcttcatgaggaatcaaggttgaaaatagtgcacagggatattaaggcaaccaatgtcttacttgataaacatctgcatgccaagatctctgactttggtttagccaaacttgatgaagaagagaatactcatatcaacacaagaatagctgggacaattggttacatggctcctgagtatgctatgaggggttacttgactgacaaagcagatgtctatagctttggaattgtagctttagagattgctagtggaaagaacaacacaaattataggccaaaggaggagtctgtatatcttttagattgggtctatgttcatcaagagcaaagaaaccttctggagctggtggatccaagtcttggttcaaagtactcctcaaaagaggccctgagaatgctgctgattagcactcttgtgcaccaacccttctcccactctt

SEQ ID NO: 7864 - DNA, 532 bp, Glycine max
  Clone ID: jC-gmle01810028e06d1
caattgcaattgcaatttttttctaacgagatactgcttttgcaattttgtgccttacgaaaatatctacctacctaaacaaggggcgacacaagtgccaactagtcggcggctatcgcagaaagcgaaaacaagggcaacattccaatctccagagtgagatttcggacaaaggcccacactagccactggactacaaaatagtggagtctagacgtttgaacattcaagtgtcaaacaaaattgttcaaaacatgttttcatgccaggaggataaaaaatggttcaccaccaactagtgacagtaataaccactataaacaactcataacttatcatgattgcacccccacatcacctgcgacatgattaacttgaccgcctgcaccatggttgttgtaatagccaccacctctgccgccccttcctctgttgttataatagttgttccttggataataatttccaggctgatcgtagtattgattgcgcccgttttggtagcctcctctgccaccacttcgacctccac

SEQ ID NO: 7865 - DNA, 475 bp, Glycine max
  Clone ID: jC-gmle01810028e07a1
gaagaatctacagatattctgcctgaattggcagtagcactgaagccttcccccaatgtgcagtggccgaactctcagcactatatatcagcgaagactcccattagggcagcctctagcgctgcacatgccgcttacttggatccttgtatgaggcccatggctggggtgtcgtctgggatggaagctgagttagcagcgggctcttcagttgttgcaaccattagctggagtaatgagcagggaacccggagggatatggatttgctgggtcaaatatatactgagccccaaatacttgagccgtggatgaaggaacatgggactgcagctaccacaggaagtgctttctcaaatactggggatatacccacttctgggatgaagcctgctgtaccatcagagatggtgtgcacacccacacctgatgtgacagctgcatggactacacccacgagtgcagtgggttcattac

SEQ ID NO: 7866 - DNA, 508 bp, Glycine max
  unsure at all n locations
  Clone ID: jC-gmle01810028e07d1
gacttacagaattcacaactgtataacagagatgttgagacattgaccatcgtgtgctatttcagatagatcttcatactttatgtacaagggaaaatcttcattaaacaggccaaacaaggtagcatcccacataacctataatagcttcagaaaaagctatggaatggtcaatgtcattagataggggatcatcgacctcatgatccggcctatctggaggttttgcaggtcccacatctccctattctgataaacgcttgacaagatgagtcagccaagcaaggaatgtattaagagcctgtcccatgaccttaacctctttagtgggtacaggaatgagagcatctgcatctttaacctccttaacaccaaccttgacttgatcatgcaacaaaggaatgttgtgaacggttgtggatctctcataaactcttcctaaggcaaccaagcggngaggatattcttcgatgtacaacccacatttgtctgagtcactttgatctgg

SEQ ID NO: 7867 - DNA, 477 bp, Glycine max
  Clone ID: jC-gmle01810028e08a1
aataaaaacactcaaaagaggagattaaatgaagaaaagaatggtaacaatagctggtggtgtgagtctttcaagccctagcagggtatttgctaatgctaagggaatagactcagcacaaaaggcccaggccgagaggtttccagctctgtcgaggcccattcaaaagtggcctggtttggtgaagacccggcccgttcggtcgacgccggagaagatatcggagaaggtagaggagagcataaagagcgcggaggaggcgtgctccggaggcggcggtgacgcagaatgcgcagcggcctgggacgaggtggaggagctgagcgcggcggcgagccacgccagggagaagcagaagcagtctgacccgctcgaaaattactgcgaggacaatccaaagactgatgagtgccgcacctatgataattgatgactgaactcagtcattccatagttacatgcatgcgtctattactt

SEQ ID NO: 7868 - DNA, 562 bp, Glycine max
  unsure at all n locations
  Clone ID: jC-gmle01810028e08d1
gagttcttgcaaggagttttttctttttatatttcctttcttttcatacacttttctcattgtaagcggcttaacttgatagcatcagtggtgccacctcttcttcaggtcattagtatttcactgtttttcaaatgattgcacctgaagccatttcagtactaatttgaagaaagtagaaatcatctaccaggttccgactacacattgaaaattttaagtcttgatgcgtaggttttaaaattaaaattcaccaccaatcattttgaagccactccattgcataacaccatgtccatgtcatccaactaccccttggtgattgattattcctcctaggatgatgctggcttctccaaaagaataaagaatcaataaaccaactaaatttgcataactaattgaccccacccacatcaaccatgtccatttgtggcatcaacagttctccgaatccgttccattactacagaaacatccttttcagtggatgtagcanagcataaacgaaaccattcaggttcaatacagtgacaagaggaacccgggggtacatgatctt

SEQ ID NO: 7869 - DNA, 481 bp, Glycine max
  Clone ID: jC-gmle01810028e09a1
ggatatttcaataatacaggagattatgcttccgttctcctccgtgtaaaggaagaccatgatggggcagaaccctcaggaaactcagtttctgctataaatcttataagattggcttccatggttgctggaagtaaggctgagcattataagcgaaatgcagaacatctattggcagtttttgagaaaaggttgaaagatatggctatggcagtgcctctaatgtgttgtgcagcagatatgttgcgtgtactttctcggaagcaagtggtcgcggttggtgaaaggacgtctgaggactttgaaagcatgcttgctgcagctcatgcagtatatgatcccaacagaacagttattcatatagatcccaacaacaaagacgagatggaattttgggaagtaaataacagtgatgttgctctcatggcaaaaaataactttgcagtcaacaaggttgtagctcttgtatgccaaaacttca

SEQ ID NO: 7870 - DNA, 499 bp, Glycine max
  Clone ID: jC-gmle01810028e09d1
agtaacaaaaaaaaatattcataaaataaattaatgacaataatttagaacacatggcttaaggtcaaacagaatgatagaatgatacaacttacagctgacctggaaagacaacaaagcaatgaatcgagagatccttaaaaacacagaaaaaagtcttccctaggtaatatataaagtgtctcaacatgtttagcagcgcatggtctctacattaaaattacatagagcacagattgcccttgtataaattcctacttctccatgtgggggctatattgcctacaggctaacgaaaccaataggaggaaaatttacgattttatataaaatcaaccagtataatatggcagaacacttgggcaagacaagaacacccttctcaaaggtagcacatcaccatcactgtaaaaagcttaacttgcaacgggttttgcaatgactttcttaacggcttcagcatatgtcctgtgctgatatgtcagagtggactcaagca

SEQ ID NO: 7871 - DNA, 646 bp, Glycine max
  unsure at all n locations
  Clone ID: jC-gmle01810028e10a1
ctgttccgagaacaacaagcgccttatccatttctctacttgcgaagtgtacggaaagacgattggagcctttctccctaaagatagtcctcttcgtaaggatccggcatactatgttcttaaagaagacgagtctccttgcatttatggttctattgaaaaacagaggtggtcttatgcctgtgcgaaacagtcgattgagaggctgatttatgctgatggtgctgaaaatggcttggagttcacaattgtgaggccttttaactggattggacctcgaatggatttcattcctggcattgatggtccaagtgagggtgttcctcgggttcttgcatgctttagcaataatcttctcagaggagagcccctcaagcttgtggacggtggccagtcccagagaacctttgtttacattaaagatgctattgaagctgtcttgctgatgattgaaaaccctgccagggccaatggccacatatttaatgtgggtaacccatacaatgaggttactgttaggcagcttgctgaaataatgattaanggttattcaaaggtaagtggcgaaacaactccttgaacatctaccgtgatgtgagctcaaaagaatttatggtgaggatatgatgtagtgacagagatcctg

SEQ ID NO: 7872 - DNA, 603 bp, Glycine max
  Clone ID: jC-gmle01810028e10d1
agtaacaaaaaaaaatattcataaaataaattaatgacaataatttagaacacatggcttaaggtcaaacagaatgatagaatgatacaacttacagctgacctggaaagacaacaaagcaatgaatcgagagatccttaaaaacacagaaaaaagtcttccctaggtaatatataaagtgtctcaacatgtttagcagcgcatggtctctacattaaaattacatagagcacagattgcccttgtataaattcctacttctccatgtgggggctatattgcctacaggctaacgaaaccaataggaggaaaatttacgattttatataaaatcaaccagtataatatggcagaacacttgggcaagacaagaacacccttctcaaaggtagcacatcaccatcactgtaaaaagcttaacttgcaacgggttttgcaatgactttcttaacggcttcagcatatgtcctgtgctgatatgtcagagtggactcaagcaggtcccagagtgaagtcttgggattccatccaagctgcctggttattatggtcatgtcagggattctcttgtcactatcatcatatccctcaccataaaattct

SEQ ID NO: 7873 - DNA, 588 bp, Glycine max
  Clone ID: jC-gmle01810028e11a1
tgaagatcttttggggggttgtgaatttgtgtcttcttggctcccaacccacacgcaacgcaaccatagaatggaatgaatgaaggcaaagcttatacttataaaagagagatagaaattggttgtgaaaaacagaagcactttgtttctaagtaaaaggaatcttcagctgccatgtttcatcgctggagcaattctcatcaacaggatcagggaagcagcgagctttatgctgaatccaagattaaagagctgaagggtgttatcggacccttatctggacgcagtttgacgtattgcactgatgcatgttttaagagatatttggaagctcgaaactggaacgtagacaagtccaagaagatgttggaggagacactcacgtggagatcaacctataagccagaggaaattcgctggcatgaggttgcaatggaaggagagactgggaaattgtatagagcatgttttcatgatagacaaggaaggactgttcttattctgagacctggaatgcagaacactacttcaatggagaatcagttgcggcatcttgtgcatcttttggaaaatgcattgctaatcttt

SEQ ID NO: 7874 - DNA, 539 bp, Glycine max
  Clone ID: jC-gmle01810028e11d1
gcagtatataaatgataactgtattataaatccctctttgcagtaattaattaaactggggatgcacccctagttctaatttgccaggagctaatggctttacaatgattagtatccataccatctccactaaaaccaagtgtatgtttggattaccgttccaatccttccaaagttattaactcaaaagtaacaaaagcatgcttctccctacgtactttcaatatagattcaccacctgcaaacggtaatccaaacattatgagagcttcattttagaactgatgcagaattcccgttgacaatgtggtttgagagcttcccatcagatccccaaaatgctgcacacttcaaatcatcctgaaccattaatctggagaactcctcatggttataactcattatgctttttccacctagttctttgggcagattttcctcatcaaaataggacttcatgacctgcacactatctttattattcgggtagacaaacttcaccttctgaaatgtcttgttgtccaagaagtacttgacta

SEQ ID NO: 7875 - DNA, 565 bp, Glycine max
  unsure at all n locations
  Clone ID: jC-gmle01810028e12a1
cggctcgagtttagacctaactatcattgctattattaataatggccactaattatttaaatgcttaaatatgattttattcttaataaatatttaatttttgtatttatttttaataattttttattttacattaaatatctaataaaataaaaattttactttgttcttgatacttatttttagtttatgataaattagtgaattttgtatttgttatttaatttttttttatttattaatagtcagatctaaaacaaaaatttgttaatttattagaaaataaatacaaatttttttagtttatcaaaaacaaataaaatatagaggacaaaacataagtattgttttataagagattcaacgtaaaacaaatatttattaaaaaataaacataaaaattaaatatttattaaagattaaaaatatatttaaaccttatttaaaaatgataatttcacatttatcacgagcatatgaaggtggagctccatggtgctgatggttatggtggccctttgantattggaacttgtgctttcatagaaaaacgcttatgtgggag

SEQ ID NO: 7876 - DNA, 466 bp, Glycine max
  Clone ID: jC-gmle01810028e12d1
agattggtgggaccgcaaaggatgaatttgaacgtccaaagaatttccagacaatggctattaaagcaaaaaggtaagaacttggtcttatgtacaaccacattcttaagtcattccaccaacccttgattgtgcctccagaaatcaaaccctcaatcaaagttgaagaactctccccgagttttacatatgccaaaggtatgaaccatgggctagacatttttggaaacaagggaatggctttaaggggataaagtgaagggatgaaggagtaatatagtattggcaaacaagtggttgcccaatagttaaagcgccaatatcccattagtaggcctaaattgatctttcctttaccataccatgtaggactgtactcagtgaacaaaatttggaagtcacctttaccccaccttttttgttgaactaatgtgtgaagcaagttatttggagcaattcccaaaaa

SEQ ID NO: 7877 - DNA, 469 bp, Glycine max
  Clone ID: jC-gmle01810028f01a1
tgcctgatgacaagctatgacatgcactgctcccatgcgtaagacattgagattcgagctcgaggactcacctcattaacattgctatttcctacttatccttgcttgtcttgatccttggagctctgctcctcacccctcaagggcttgctgacgaaactgattcttactataagccaccagtttacaagataccaccagtgttcaagcccaagcccaagccatccattcacaagcccaggccatgcgtttacaagcccaagccacccgtgtacaagaaacccccttatgggaagcacccaccagctcaagacaacgatcacttctaaaccatgcaacagggcatgttaatgttcactgtctgctaaaaacgagaggattagactacctactacgtgcgttgatccttttacatcctgaatggtaattcacaaccttgtagggatgacacattctaggctagctctgc

SEQ ID NO: 7878 - DNA, 364 bp, Glycine max
  Clone ID: jC-gmle01810028f01d1
aaaaaaggtttttagggaactttaaaacactaaaaaggtaggggggtgggaacaaaaaccggggccccggcccgcggttacttaaagaaaacccaataaaaagaaaacccccaaagaaacccccggggagggggcaaaaaggggtcggacccaaaaatggtcccccgaggaagggggggcggggtgcatatgcccaagcaagggggggggctgccccccaaaggggggaaacctttttttctgttgaacaacccgttgggcgggttttctggcagaggggaacccaaacggcctaaattgttcccctttaggggggattcgggggggaaaaaagacctgtgaacccccttttttggggccaaaa

SEQ ID NO: 7879 - DNA, 185 bp, Glycine max
  unsure at all n locations
  Clone ID: jC-gmle01810028f02a1
atgccagatgtcatagacgtgacattcnctgcacccgtgcctcagacttggagctcgagctgtggcgaaacgataggctgctgatggttagacgtccccttatcataacgcacagaagaggtggggagttacgttatcttcacctgggtgagggacagataagccactccctatttcacacacac

SEQ ID NO: 7880 - DNA, 258 bp, Glycine max
  Clone ID: jC-gmle01810028f02d1
aagagcccccaaaactcaaaggcctttattaaaagcaaccgttccttgcctgcacattgagggggctgcaaaaaagcctgagccaatggcaggggcaaaaacccccctaaggtgggccccaatgggaatttttaagccggtaatcccttacccccattgagccaaatcccatttctaaaagaagccccttaggacggcccaacatttggaaatatgcccccaagggccaattatgccaagttcccccccagggtcaaa

SEQ ID NO: 7881 - DNA, 311 bp, Glycine max
  Clone ID: jC-gmle01810028f03a1
agggaaggctggggcgggggaggtgttgctgttgaaaaagcagaaccggcacatcttaaaccttgccgcgggagaggataatgtcatactgcacacgactaatcttacgtagcccgaccctccgtgtatgttcttttgctactcgtgtggcgcacgtgccttacttgcggggagccactggcgcacgtgccgctccatcggaccctgctgatgacgcccccggaggccctgaattcctgcgagcctcgaccgccgaacgccggcgagggagcctttacgattgccacgcgagttgtgtcaccgccgactac

SEQ ID NO: 7882 - DNA, 261 bp, Glycine max
  Clone ID: jC-gmle01810028f03d1
gttccggtgggaaacccctttttttatcccccttcccttggaaaaaaaaaaattttccttcccccaaggggggaaaggggaaattccaaacctgttaaaagggccccggggggggatttgtaaaaacgttttgaaaaaacccaaaaccttttccttggggccgatttcacccgttttcaaaaaacggccccaagttccccaaaaaaaaaaggggggcccccgttttcccccccaatttttgtctcccttgaaaaagggggg

SEQ ID NO: 7883 - DNA, 339 bp, Glycine max
  Clone ID: jC-gmle01810028f04a1
cctttggtatcaatggtattagctcagcatttattggtcatattggttcaagggaacgtgctgcttatgctcttgggttcactgttctcatacgctctgccaatggaattctgttaggaatggcgagtgcgctgtcaacactctgcggacaagcatacggtgcaaaacaatatgtcatgatgggagtgcatcatcaaagatcatggatagatatgggcataacttcactctttgttcttgcggtgttcatcttcacgaggccgattttcctgccacacgtgatatattctaatcgtcggcctaagagcatgagaatccgacggagaaacaaacactatt

SEQ ID NO: 7884 - DNA, 366 bp, Glycine max
  Clone ID: jC-gmle01810028f04d1
tttttttttttttttttttttttttttttttttttttttttttttttttttttttttttttttttgtttttttttttttttttttgtttttcgttggggaacccctttttttttcccccttccctgggaaaaaaaaaaattttcctttccccaaagggggaaaggggaaatttaaaagcggtaaaaagggccccggggagggatttgaaaacagtttttggaaaaacccggacccttttttttggggccaatattcccggcttttaaaaaaaggcccaatgtccccaaaaaaaaaagggggccaccgggttttccccccaatttaattttccatcaaaaaaaggggggttttttgggagcgggggg

SEQ ID NO: 7885 - DNA, 319 bp, Glycine max
  Clone ID: jC-gmle01810028f05a1
attgtttaaacctaattctcattttttcatttttcgattcttctcctcctaaagatgcagatcttcgtgaaaactttgaccggtaagaccatcacccttgaggtggagtgctccgacaccatcgattacgtggaaacttaagattcaagacaaggaatggatcccacctgaccagcaaagacttatctttggggtaaacagcttgaggatggtcgaacccttgtcgactacaacatccaaaaagaatccactcttcacctcgtgcttatcctcaggggtggcatgcaaatcttcgtcaagactatgactggcaagacca

SEQ ID NO: 7886 - DNA, 534 bp, Glycine max
  Clone ID: jC-gmle01810028f05d1
gaagttaactggtattaataaattttatttatattatggagcagttacaaacaatttatatatgctatgtacttgaaaacaaaacaaaaagaatcttgataagttgcagaaggaaatagaagctctagtctacatctccatctttagattgccagcttcaaccagacctgataacagctgagaagggaaagatgtagcccgtgcttgatcaaaatcaaaattgcaaaggttttggaaatcaccttcccatgttgaggagggtagcatttgtgtgaaacaggacgattgaagatatgtttcaggcattgatacaggagcacttatggtccttctgagccccatatcggatgggtctaatccatcatatgaaaaaatttgttgtggggaattaaactgaagataggcagggttagaaatgtctgatgttgatgaaattcctatgtttggaaaatttgtagcacaagtagaaaaaacatctttgtcaaatagatcatcaatactcaagtcaagccttgggttcacagcagctaattt

SEQ ID NO: 7887 - DNA, 449 bp, Glycine max
  Clone ID: jC-gmle01810028f06a1
agtcgctcgtcgccggtggcgtttccggttgagtgtcacgtactgcagttgctcctctggaacgattgaaaattttgctgcaggtccagaatcctcataacattaaatacaatggaacagaacaaggcctaaaatatatatggaggactgaaggatttcgtggacttttcaaagggaatggtactaattgtgctagaattgtccctaattctgctgttaagatcttcagttatgaacaagcttgtaaaggtatactgcatctgtatcagcagcaaactggaaatgaggatgctcatctgactccttttttacgtcttggagctggagcatgtgctggaataattgctatgtctgcaacttatccaatggatatggttcgaggcaagattactgtgcagactgaggcatccccatatcaggacagatgaatgttccatgctttgtctact

SEQ ID NO: 7888 - DNA, 457 bp, Glycine max
  Clone ID: jC-gmle01810028f06d1
aattcagatgagaagatcaataatctaatttaacttatgttttaaaatcaaacattcaaattagaaattttcactttttacgaaccaaagtacggatgctttaactttattactcgggagccaagtgccgttcattagtcacggaagaaaaatctgcttgcccgaaccgaattgaagatctgctgaatatttctcccaaatggctccaagtgatccttcctctacatttctcccaattctttctggcagtactcaacatttaaaatctttctcctcgattgatgcataatttcaacataagactaagagatcttaaccatatgatgttcctacacacgctgggccagtctctcttacacacaaagcttaaaatgtacagcgtgctaactaattctattgtcagatctctcatctaaccagtaaatgtgattttcccataatgcactttagaagagtc

SEQ ID NO: 7889 - DNA, 475 bp, Glycine max
  Clone ID: jC-gmle01810028f07d1
caaggtaagaattttattgcacaatgagaaggcagagaaaattgatggttctgtttctcagtacaagtttaaaagaaaaatgaagcaacaagtgttgtagtggtagtagtagtagtaagcatacaaaattacaatggcatggtacatacataataatttaattaccaatgagaatttgtttggctctcacttccatttgttggcaacaatgtcagccaaatccacaaccctttgggagtagccccattcattgtcataccaagcaatgaccttcaccatgtcatctcccatgaccatggtcaacgaggagtcaacggttgaggacacatcagtgcacctgaagtcaacggacacaagtggctcatcacacacagagaggattcccttgagctcattgtctgcactctctctgaatgctgcattcacttcttctgaaaggtcttctttgagaccttgacgacgaggtccaccactg

SEQ ID NO: 7890 - DNA, 478 bp, Glycine max
  Clone ID: jC-gmle01810028f08a1
tctctgactagtgatatctatccatggaggccaagaacttgtggcgcttcctggttctttcaatcggtgtggtactagttttacttgtcacttggctgcccaacaaggaggctctagactgcaacctttacttctggatggtgcaccttacaagaaccggttctactcttcagcacatcctaataatccgattaagaaaccatcattttccacatatcatcatcacaagaaccaacaccatgaatccgagattcctcaacaccctcttgaccctctaaccatccaagagttcaacaaggtccgcaccatccttttgaactaccctctcttcaagtcctcatccagctacactctcaactccgttgtccttgaagagccagacaaaaaacttgtcctcaaatggaaaaagggtgatctacccttgcctaggaaggcttccgtggttgcatatgtgaagggagactcacatgtgctcacg

SEQ ID NO: 7891 - DNA, 453 bp, Glycine max
  Clone ID: jC-gmle01810028f08d1
gtctaaccatacatttatttttatttttatttgatattaggatacattcacaatcacatcattgagcattatagaatcatcatcactcacattttactcattcatacttgtcatcaggcaacttttcttgcaaaagttcttccagtcggaatctgctgtgcgggcccaaggatgaagtttccagattcagaaatccaattgcctccagccttcattggtggaggaggacgaggttgccccattgattgtcttcgactggaaacagacaaattgcccaacttttcagctgtttctgaaaccccacgtacagacctccctttgttcatagaagttgggctgtcctttcctggctgacgatattttggtttagtagtcctcattggttattcgttcttaattccatcctgatttaccatatccagcttccgttgcacacctgaagctaaaggagga

SEQ ID NO: 7892 - DNA, 283 bp, Glycine max
  Clone ID: jC-gmle01810028f09a1
cgcagctcttcactttgaagactgtagactgtggcgtttagggtttcggaagagcatgcaattgaacccaaatggcgacggctgaagatgctccagtgctccctgaggacctcatagtggaaattctgtcatggggtgaagtgaagaatctcatgcgattcaggtgcgtttccaagtcctggaattccctcatcttcaatcccacattcattaaattgcaccttcaaaggtcctcccaaaacatccacattcctgttaacatttgaccaagattcatcgaacc

SEQ ID NO: 7893 - DNA, 430 bp, Glycine max
  Clone ID: jC-gmle01810028f09d1
ccgaaaaataacaatgtactaatagtttttgatttggggacaaaattgcaagagacaaaataatttcaagttaaaatgtaacctttgactgtaaaaaaatatgcgcgttaccagtccaactatacatgtacatgactttggcaaaatggtcatggtattgcaagattcaactttactttaagatacactaatggaaaatcataagttacaatgcacaaaactggttacattggtcaactccgcattcgtttcctttgggaacccttttcatcggcacccttttcatccagcccaagatcttcagaggtggccatattagattctgatctgcatttagcatgaattatggggcctaactgtgacctatccatgcctgctgttattcctaaaggtgcattgaggtatacagctcctctatacatccattcct

SEQ ID NO: 7894 - DNA, 565 bp, Glycine max
  Clone ID: jC-gmle01810028f10a1
gcagaagaaataccggagaaaagtgagttgttgagcagaagagtgttgtgttgtgcattcgcggaagaagaaggagcagatgggtaatccacggaaaccgagtaccgccgacgagcttcacacggcggcaaggtccggtgatctcatcgccgttaactcaattttggcttcaaatcctttggccgttaattccagagataagcattccagaacacctctgcatttagctgcattttctgggcaagcagaggtagtcacttatctctgcaagcagaaggctgatgttggtgcttctgcaatggatgacatggctgcaatacactttgcttcacagaagggacatttagaagttgtccgcgctctactttcagctggggcctctctcaaagccaccacccgcaaaggcatgacttcattacactatgctgttcaaggctcccatatggaactcgtcaagtacttggccaagaaaggggcaaaccttggtgccaagacaaaggcaggaaagacccctttggatcttgctaccaatgaagaaatccgctcctttctggaggaatatgag

SEQ ID NO: 7895 - DNA, 482 bp, Glycine max
  Clone ID: jC-gmle01810028f10d1
gtcaagagaaaattgtattaatccagaatcggtcgttacttaacagtcaacagatagtccagccaactaacccaacaaagggattccaaatcagatacaattacatactacattacaattacgacatttttagatctactatgaaaataccaaactacaggttttcttcttcttgggtatcgtcggaactttggagatgacttaagttaactctagccttttttgggtgtgatgactcttcttctcttgtgccatcttcattacccttcttcctcttctctcccacattgtcttcttcatcaatagcagctgcagcaggttcagaactcaaatcaccttcagatcccaatgtggatgtctttggatcagattcttcagctatatctttgtctttctttcccaattctccattctttgctgacttctcatattcctgcagaaaggagcggatttcttcattggtagcaagatccaaaggggtc

SEQ ID NO: 7896 - DNA, 592 bp, Glycine max
  unsure at all n locations
  Clone ID: jC-gmle01810028f11a1
tggaatgcaacctataccaactcatgaattacagggaaaaactattttctgaagctgaagttagaaattggtgttttcaagtttttcaaggtcttgcttacatgcaccagcgtggatacttccatcgtgacctgaagcctgaaaacttgctggttaccaaggatttcatcaaaatcgctgattttggactagcccgagaaatcagttcacaaccaccctacactgagtatgtctccacacgatggtatcgtgctcctgaagtgctgcttcagtcttatatgtatacctctaaagttgatatgtgggcaatgggtgctataatggctgagcttttctctcttcgtcctcttttcccaggtgccagtgaagcggatgagatttacaaaatatgtggtgcgataggcaatccaacctttgaatcatgggcggatggactcaaacttgcaagggatattaactaccagtttccacagcttgccggtgtgcatctttctgctatgattccgtctgctagtgatgatgcnatcagccttattacatcactntgctactgggatccctgcaagagggcaacagcttcagaggctcttca

SEQ ID NO: 7897 - DNA, 524 bp, Glycine max
  Clone ID: jC-gmle01810028f11d1
agggaaacctttatttatatttatagtaaaaagcatcaactgagctctgtatgtcccacaagtacgaaacgattaccaacaagtaataacacacacaggcagtacaactagttttgtagtttagacgacttttgcaaagtcatcagaatatatgtctaaccacacatttatattttatattaggacacacattcacaacattgagcattatagaatcatctcccacatttactcattcggcaacttttcttgcgaaagttcttccagtcgaaatctgctgtgcgggcccaaggatgaagtttccagattcagaaatccaattcccttcagccttcattggtggaggaggacggggttgccctattcctattgatgattgtcttcgattggtaactgacaaattgcgcaacttttcagctgtctctgaaaccccacgttcagaccttcctttgctcatagaagttgggctgctgtcctttactggctgtcgatattttggtttagtagtcctcactggcttttcg

SEQ ID NO: 7898 - DNA, 535 bp, Glycine max
  unsure at all n locations
  Clone ID: jC-gmle01810028f12a1
ctcgagccgctcgagccgctctcctgaaggtaaggcagagaagagaagaagagaaggaaagaggcttgtccctggagaaaagaggaggcaaatacatggagaacgagggtgtaaacacggtggtggtggagcaacaacctgtggcatccacgtccaagtttccgttgagcttttgggaaaccacggtggcttcaacggtggcgctggttttcgcggtgggccttctcggcgtctacctcaccatgcccgattccgattacagcttcctcaaactccctcgtaccctccaagaccttcaactcctacgggataaccttgagagctatacaagtgactacactgcacaagtcttggtggggtactgcgtggtatatattttcatgcagactttcatgattccagggactgtgttcatgtcattgcttgctggagcactctttggagtctttaaaggtgtggctctggatggtntcactgacactgcaggagcttcatgatgctatttcctgtctaaacttattggacgacctattct

SEQ ID NO: 7899 - DNA, 104 bp, Glycine max
  Clone ID: jC-gmle01810028f12d1
accattgaattagttaatgctttacacaaattagggtataaacaatgtacataaccaaggaagccaaacggcgaaacaagaaaccggccgagaaccggggaaac

SEQ ID NO: 7900 - DNA, 488 bp, Glycine max
  Clone ID: jC-gmle01810028g01a1
aggtcgagcgacaattcactaagctttaattttttcatcatggcttcctcgtgtgcttcctctgccattgcaactgttgccatctccacaccacgttcccagaagaatggatcactcttgggaagcacaaacgcttcttttcttagcgggaggaaactgatcgtgatcaactctacagtgccacttggagcacgacccagcactacagtttgcgcagctgttgagcctgataagcctgtgtgggtcccaagcaggacccctcctccatggctagatggcggagagacaacacattatggttttgatcctctaggtctagcatatgatcctgacagcctgagatggaatgtacaagcagagcttgtgcactgcagatgggccatgtagggagctgatggcattttgatgccacaattccacacaaagattgacatcctcaacaccccttgatggttcactgctggagagcaggagtacttgccagacac

SEQ ID NO: 7901 - DNA, 540 bp, Glycine max
  Clone ID: jC-gmle01810028g01d1
gacaaataacattattatatcaacatataagcttacaaatttccacattttcaggaaacaaatgaaggaaattcatcccagttttgacttctgattgagtgaagccacaagacacgtatcgaagttcccaaattaacacaaattgcttggtcagatgacccaaaaccaagctataacagacccagcagctagaccaaaaactaagaataatacactcacaatccctgcagtctctgcatgctgcaacattacaattttaggaatcagaatcatcaatgcactggttaggtagccattagtaagccctaacaggcaagtcagtattgtcacgggaatctcagtccggaagaatttgggaccatgcaagcaacctaagaagagagggaaaaacaacaatcttgctatgcaaccacctatggcaacttttgcattctgtaggaggtaaactgcagtcagacacttgccaacaagatcaaacacattatagccagcaattaggagaattggataccaatccttaagaatttgagagtgaacatc

SEQ ID NO: 7902 - DNA, 319 bp, Glycine max
  Clone ID: jC-gmle01810028g02a1
agctgaggcttattgcctgcaacatttgcttttttcaagagctaactttggccctgatggttatgctgaggctgatggggaagcagagggcggaagccgagagctctcgacaggtggatcacccacacgataaaaatggcctttggttggcgaacaagacctcaagctgctacgggtatgggttattgtctgtaacatatgcaccaaatggacgctgctatgaccctaatcaagctggatatttcagccgtcaacctcaccaatgtcttctctgccaagctctgagaactctgtgcttcctatgccgtaacctacactg

SEQ ID NO: 7903 - DNA, 505 bp, Glycine max
  unsure at all n locations
  Clone ID: jC-gmle01810028g02d1
atgaagattccacaaaggaccttgacaaaaacaagtaacacaataatcagttacctctacagacaatataaacatttaatggaaacatcagcaaggtagcaaccaaagcaggaaactcgaagttctgtgaaatagatagacataaaattttcatatttcattccatgttctctgctacacctatgacctatttctgcaaatgtattctcttatcccttattggcaactcaacgggcttctgcgccgcatgtggatgatctgggcctttataaaccttaaggtgggtgaatagtctcctcccaagccttccttttggaagcatgccacgaacagcgtgttcaataattctttcaggaattctgttttgcagctgggcaaatgtctccacggtcataccaccaggtcgtccagagtgcctnctgtaaagctcttgggtcctctttttcccagatacagcaaccttttctgcatttaccacaattacaaacgcacncatgtccacact

SEQ ID NO: 7904 - DNA, 278 bp, Glycine max
  Clone ID: jC-gmle01810028g03a1
tctacattcaaagaagatttttcttctagacgctaaaacagagaatatgttactaagtgctagtcggaatctacaaatagctgatcctggagtcgctcgggttgaagctattaatccacctgatatgactggtgacactggcaccctaggatatattgccccagatgttctggttgggaaaccttacaacaggagatgtgatgtctatagctttggcacttgcttgtgggaaaattattgctgtgatatgccttatccagatctaagctctgctgatg

SEQ ID NO: 7905 - DNA, 257 bp, Glycine max
  Clone ID: jC-gmle01810028g03d1
attattgatttagtacaaacatgaaacataaagaagaaataacacaaaacaaaaaaaaaagggaccgatccagaaaagaacgcataaaaactaaagaacaaagactgcaaaaaaaaaaaaagctcaccagaagcggagaaattgcacaagtgaattagataaccacatcagaaaaagaagagggcaaccaccacccaacattataataaggaaacaaaaactacaaattggactattgcaaggcaaaggaaccagcc

SEQ ID NO: 7906 - DNA, 269 bp, Glycine max
  Clone ID: jC-gmle01810028g04a1
gtccagaaaccatggatctaacactttgtttttcaacttcttttattaatcacccggcgaccaacgtcctcctaacttctgacaatgcccctgcactagctagtaggtcagaacacaagccatcaccatgattgccccagctccggtcctcaccttacctgcatgatgctcatcacactcgtgataacagacatagggcgctggctccagcgtgtcgacatagcgctcatgatacaagagagagtcctgcgcatgtgatgttgccatac

SEQ ID NO: 7907 - DNA, 320 bp, Glycine max
  Clone ID: jC-gmle01810028g04d1
atcatatccttttttatcgcatagttcgcatcctttaagcgttggtgggggcggggctggtgggagcaacggccttggcacggggaccgaagaacttggtcttctcctcgcgagtctggaagcgaccgtgttcgaacttggaagaggtgtcgatgaacttgagcttgatctgctccaaagcggctatggaagtctgggggaccagggaatttttgagggggaaaaacctttttctggttccgacaatggttaccttgagcattaagttggcggtctgaaccgtaccctaggggctgaattcacccataggggggaacttc

SEQ ID NO: 7908 - DNA, 431 bp, Glycine max
  Clone ID: jC-gmle01810028g05a1
tttttgaagttagtgaagagaacattactttcataccaatttctgcgcattgattcaatggaaacaaacccacacactccactgcattctgtatggcagataaacaccaaacgcggcccaatttctgtagggactataattttctttgccctcgtagaaagtggcaacagatgagtcgaatccctaatttcccaaattctcgggttggacatgcttgaatcactgggcattaccaatacgatcaatcaatgggtgcgatgaccgcgaaccggaagcgctccgaagaatgcatgaacgtaaaccacacaaattgcgattatgcgagaaaacgcgccagaatctcgatcaaactcgttccgtgcgccaccagcgccgaagcgagactctatcggtgcccaaaggctcacgcgccgttggcgagggaggttcac

SEQ ID NO: 7909 - DNA, 553 bp, Glycine max
  Clone ID: jC-gmle01810028g05d1
gaaaaagtgatagttgcacactgttttatttatttatttatacatgcaaaagtagtcaaaataattgacatacttgtctacatcaaaagttgacgaggaaaagtaaacctgcgtagctagctagctgtcccatgtacacttttatttaaaaattgaaacataaaaaaatcttgaaacgaagcagctaatagaatccattatttatatataacaataaactactatatacacatacaatgtattctagtttagtcccctaaaacacgagcaagttattctgggtgtcgtagcccaacttctccaaattcggctggactgcaaattgaatcataggtggtggtccacaagtcaatgccaaggtatcaggagatgcatttggaatatgctccgtcaggatactttcagtgatgaatcccacactgtattcccacccttctcttatgctttcttgtatcacgtaccacaccttcaacctatcatacttcttagcccactcatcaagctcttccttcagcaatatatcatccctcgggtcggtcgcgtaaaccacatg

SEQ ID NO: 7910 - DNA, 455 bp, Glycine max
  Clone ID: jC-gmle01810028g06a1
ggcgtccggactgttcaatcggtctcagcttcccacaagcacaccagatgttcgagttcagctcggcgaagagcgtccacatgacatctacctgaacaggactcatccaactgctcaacacgcttacaagaatggtgacaccacgcactcaaagactcacgtgcacagtgcctcgctgttcgacgagggcattttgagggataccctggcgccctcactaactctccactcgggtcttgcagtcattgcatatggcatagcacgatacacgaaccgcgttgaggtcaaagattggctctggccgagtggccaggtcgtcaatgcctggtggtctgccggtggtcgccgtcttgcagcatgtctaacgctcacacaagctttccaccgtctgtcctggcatgaacgtgtactgctgacgggagtcacactatggtgtggccgactcttctaccgta

SEQ ID NO: 7911 - DNA, 508 bp, Glycine max
  Clone ID: jC-gmle01810028g06d1
gaaaaagtgatagttgcacactgttttatttatttatttatacatgcaaaagtagtcaaaataattgacatacttgtctacatcaaaagttgacgaggaaaagtaaacctgcgtagctagctagctgtcccatgtacacttttatttaaaaattgaaacataaaaaaatcttgaaacgaagcagctaatagaatccattatttatatataacaataaactactatatacacatacaatgtattctagtttagtcccctaaaacacgagcaagttattctgggtgtcgtagcccaacttctccaaattcggctggactgcaaattgaatcataggtggtggtccacaagtcaatgccaaggtatcaggagatgcatttggaatatgctccgtcaggatactttcagtgatgaatcccacactgtattcccacccttctgttatgctttcttgtatcacgtaccacaccttcaacctatcatacttcttagcccactcatcaagctcttc

SEQ ID NO: 7912 - DNA, 416 bp, Glycine max
  Clone ID: jC-gmle01810028g07a1
gggtaagtaaattgggaatggtgttggttttgccacgtgtctgtctgaggagaaaatagaatcaatagctatgaaattgtggcccatggtctgattgtggaatatgaagaagatgactggggggggtgtcactatgcaatcgacgccgggaagctcatgatacttggatctgtatccagagcgtgtagatgtggctttttcaaaaatccttacattctcggactggctgctgtcgccggcatcggtggtctcctgttccgctactacactggtgtgatatcaggggctctcttatacattaaggatgattttgaggaggttagaaacagcaatcttctccaggagacaataatctatatggctattgccggggcaatcgcgggagcagcatcgggtggctggattaatgatgccta

SEQ ID NO: 7913 - DNA, 411 bp, Glycine max
  Clone ID: jC-gmle01810028g07d1
aaaaaaataactataatttatggtcgagattatccctactaaccaattcgtagcttatgatgttctaaacatttaacaacggagagaaacttaggaaaatgatacaggtatataattaactaaacactctaatttagggcatattagtaacattccggtcccgagctagtgtagttctaagttccacgaagtgttttgattcctatatagtcactcaagcagttgaacatcttgattccccagtttgatgaataaatatattcaaaagggcgaatgggacaaatggggttaccaactgatacagatctttataggaaactttcgatgttaagttcaacaaaggagcatggatcgggaatgtcaaagttggttaatacctcaggatgaacaatgccataagtgccaatatgc

SEQ ID NO: 7914 - DNA, 477 bp, Glycine max
  Clone ID: jC-gmle01810028g08a1
caacactgcaggcacctttagatttttattttcttcactgttcacacacgatttcctcctttcctttcacattatcctttacctttttttaaacaagccagcccagcttgcttctgttccttctcttctaaccagtatcacctacacggtgtgtgtgtcccttcatcctggaaattagagccacaaacataacacattccgctttgactttggaggcaggtttttgtgctttgtctggctcccaatcaccgtgatatcatggaatccccacaatctgttgtgtcaccattcaagaggtctgtcttgggtgatgcagagaagtataggtctgatgttctgtctaaggacattgaagtcaatggaaaggaaggtgccgcgtgtaatgtggaggaattcattggtgttggtgatgtttacattcatcaggccagggacattcataacatctgcatataccacaagcaagatgtttatgct

SEQ ID NO: 7915 - DNA, 477 bp, Glycine max
  Clone ID: jC-gmle01810028g08d1
atgcccacgtatagctgtacacattgtagattgcccgagtcaattatatcaattgagtagaaaggatgaacgacatctacataaatcatatgctaaacctatcccctgaacttatgaaaggtcatttaacaggaatatagtcctaaagaacccaaaagtgtctgcatttgctccttataaacgtggggatgattgctgttattatatactctctacagggtggctacaagacatgctaagcatatttattagtgtgttaataactaaggatctccaatttggcagtcatcattcacgctaacaactgtacttgtaccacagcatcaactccgctgcattcttgacagacaaataacaatagctaaactgctcattgctctttacctgagcttgtcttccccgtcctatggctccatttgctcagaggcacatcatcagaaatctcagcaatcgtgtcgtcgtcatcatcatcaggac

SEQ ID NO: 7916 - DNA, 485 bp, Glycine max
  Clone ID: jC-gmle01810028g09a1
gaaattgataaataacacaaatttttctttacgaaaatcataaaagctatcaggtttttggtttcaaaataatgatattggaatgagatgagagcattattaatgataaaaccttgtatccaagatacattggaggaagagtaagagagcgatgagatgagagtgatagtgcctctacaaggagttgtccaaggcacagggggtcttttctggggttctgtcattccttgtgctctattctactttcttcagctctacttcaaaaccaagacacctgaccacccttcaccttcccaaaacaaccacaaggacgatgactccaccaccttccaccgctctctctcttccaatcacaggcactccactaccactgcctccgcttacgtgtctcctcgtgccaattccataaccgctgctaactccccttacttcctaggcttgcacaagcttgcagatgatccctatcacgagactcataatcctga

SEQ ID NO: 7917 - DNA, 378 bp, Glycine max
  Clone ID: jC-gmle01810028g09d1
ctgggaaggggaaaatttggggtttaggggaaaaaaaaaaacaaaaattttccaggcccgggaaccctttaggaaaaaaccccaaaccccgggggggggcaaaaaaaccccaaaattcccaaaaccccggggttaaaaaaaaaaaccggaaaatttttccccggggggaaaaaaatcccggggggaaaaagcgcccaaaaaaaagtatcagacccaccagctttgacaaccacagtttctgcaatgtccaaaaattgggaaaccagggggggcttggggaaacggcaagggatgaaaaaaccctcgctggcgcactgaaaacaccgcatgctgagaatgggacccccacccggaaaaatttcggaactgggggggccc

SEQ ID NO: 7918 - DNA, 569 bp, Glycine max
  Clone ID: jC-gmle01810028g10a1
ctttcgaaagattttatccaatttaaattttaaaaatgactgggataaacttaagaattcaattattgaaattgaataagtaaacaatttaattggattggtcgaatggtatcaaaaaaatggagtactaactcccatttcttatttattattgaattaaccgatcaacttgctttgttatcgaacatttctttttgatttcaaaaattttccggaaaaaatttgaatctatttttatatgcgaatcaatcctactacttctggtcctgaggtttctgcgcttgaaaaaaaaaatctgggacgtatcgcccaaataattggtccggtactagatgtagcttttcccccaggtaagatgcctaatatttacaacgctctgatagttaagggtcgagatactgttggtcaacaaattaatgtgacttgtgaagtacagcaattattaggaaataatcgaattagagctgtagctatgagtgcgacagacggtctaatgagaggaatggaagtgattgacacaggagctgccctaagtgtccagtcgtggagcactctaggacgaatttcac

SEQ ID NO: 7919 - DNA, 499 bp, Glycine max
  Clone ID: jC-gmle01810028g10d1
agttattccgatattcggacgcatcaacttgttatgaaatcacattgatagcctctactcgtgtcctagctcgtctaagagctagatttgcctcaattgtttgtctcttgccttccgccttattcaaattagcttctgctatttcaagagtttgctgtgcttcttgtggatcaatgtcactacccttttccgcatcatttactaaaacagtgatctcattattgtttattctagcaaaaccgcccatcagagccatcgttaaccattggtctttaagaagacgtattctcaaaatacctatatctacggctgtggcaataggcgcatgatttggtaatactccaatttgtccgctattagtagataaaatgatttccttcacttccgaatcccaaacaattcgattgggggtcagtacacaaagatttaaagtcatttcttcaaattgctctccatttctaagttcgtagctttcgcagtagcttcatcgatattacct

SEQ ID NO: 7920 - DNA, 566 bp, Glycine max
  Clone ID: jC-gmle01810028g11a1
gtgaaactccgctcaacttggaactgtctttctggacacatatatgattctggtccaatagatgttacaagtgattttggcttccgcttcacactacacccctccattgtaaaagtgcctggaccatcaaaacttgtttcttgggtagcaaaatctgttacctctggcttggatgctttgtacctaactagatttgaatcccaagctgctgagcattggcaggctttatattcttctgataattttggagctccatttctcattttatgttctgagaatgatgaccttgtgcgataccaaagtatctatgaatttgctcaacaactacgcaatctcagtggtgatgtcaaccttgtaaatttcagtagctcctctcaccttggtcattacaaacaccatccaattgaatatagagctgctgtgagccatttattagagaaggcttcttcaatatattcacacaagatgttgcttgaacgagaaagaactggtatggatggtacacaggatgagatatctgagttaatctgtgacctgcagaatgtggcaatcaattcaaataagag

SEQ ID NO: 7921 - DNA, 554 bp, Glycine max
  Clone ID: jC-gmle01810028g11d1
caaaaatatattatgtacatctatttacttttgctctaactacaaataagtgtcagtacagtttatcccatttcatgcaaatgcaattaccaaatgagtaattaccatagccaagcatcaacctgtttgaactatcagaagctcttttttctgatacaacagtcatggttttttttttctttttctgagggccattagaaggaatggaactcaagtaacctttatccacatcaccccatcactttctcaaaagtgccaaggaattaattgttgaaccattgcagccattacatgtcccctgccagacataacagccaatcattgcaccaaaatctatcataccttcctgtattgtctagggaaactgctgatgtttcaaacaggtttatcataaagtatctcctcaagtcagatatgggaacaacttcataatttggaccgaccgatgcgtttagtacccctgaatagtgaatgccttggagctgaagcacatgacctcccatttagattcccagaagatttcacatcccaacccttaacattctttggaacac

SEQ ID NO: 7922 - DNA, 565 bp, Glycine max
  unsure at all n locations
  Clone ID: jC-gmle01810028g12a1
ctttcttggaacctttttaattgtttcttctttaaaaatcaatttcctttaaggctttaactttaatattagagttctttctctttcattcatccttggtaatggcttgcgcattgcaagcaaccttagcagccaacacctatgccttttcttccaggagattctccttgaagcaccaaaagaacagtaagagaaggttttctttgttcactgttagagctgattctgatgactctgactgcaatgaggaagagtgtgccccggataaggaagtagggaaggtcagtgtggaatggttagctggggagaagacaaaagtagtgggcacattcccacctcgtcgtaagccgggttggactggctatgttgagaaggacactgctgggcagacaaacatatattcagttgagccagcagtttatgtggcagaaagtgctataagttcaggaactgctggctcttcttctgatggagctgagaacacagcagcatttgctgcatgccttgctctgatatcgattgcagcagcatcgtcgatactgctacangttggtaagaatgctcc

SEQ ID NO: 7923 - DNA, 522 bp, Glycine max
  Clone ID: jC-gmle01810028g12d1
aaagataaacacactttcagttggtagcagtggcataccaagaatgatgttcaacatttgcatccattaacctttagttgtgtatacacaaaataaacttctttggtatgttttggtagcaaaagtggtaaccacttgatacacctacgatttaatgttcacactagaggtctcagaagcttgagcttcaacctgaacctgggaaacttccggaggtgggctttcaggttgaacagatgaggatagttcagcctcacttggcacagacacttgagtaatttccggcggcgtgaatttgttgatgtagtaactaagtgatggtccagagtattgagccgtctggatctgaggaggagcattcttaccaacttgtagcagtatcgacgatgctgctgcaatcgatatcagagcaaggcctgcaacaattgctgctgtgttctcagctccatcagaagaagagccagcagttcctgaacttatagcactttctgccacataaactgctggctcaactgaatatat

SEQ ID NO: 7924 - DNA, 436 bp, Glycine max
  Clone ID: jC-gmle01810028h01a1
aggtcgagagaagatctaacgaaggttcctttttttattccattcaacgattccatggtggcgagaggcgtgccagagatggcggcggagtccgttgccgcccttgacttgacggaatcctccaactggtggcggtacatcaaccgctccccgctctggcaggatctgattctgcacctgctggccatcctctacagaatcgtcaccgccgacactctctactaattagtgcgaatacaactgagagtgcctgaatatggatggaccacccacaaggtctctcactttctcaatatgattgtgactggggtcagtgcgcatgcctttgtcttccgtcgggatgtgcagaagtggcacccagagattgatcaacatactccacttgatgtgcctatgcatgctttatatacaacttatgcactggaggaactgttct

SEQ ID NO: 7925 - DNA, 536 bp, Glycine max
  unsure at all n locations
  Clone ID: jC-gmle01810028h01d1
aataaaacatccaaacataaatcatattacttcaaaatcaattttaaccacaataaattttaccaaccctcatccaaacacacggtgaattgggtaaaatatggttgcagatactaatttaaaggattacatttatacctacccaactattacatgccagcatactaacttccggtgcatataactttactggacagtttatacaataaaataaaatatacataatggttaagaatgttacataggtggaaaatacttccttccacgccagatatcactcttctagtcttctgtggtgttaaatactggagctagtcacggttattcacacgccatgaaacaatgcaaacatgtatgaagcctatgttatgtataccactgccgtatgttcatatacattgcagaaccactatctaacaattgggtcaagagcctctgataaaccatgacatcaagtgggggactcggccagaagaagagtatgccaccaaccacaagcaacattnttaggggcacaaccttcaatgatgacttca

SEQ ID NO: 7926 - DNA, 353 bp, Glycine max
  Clone ID: jC-gmle01810028h02a1
ggatatttcaataatacatgagattatgcttccgttctcctccgtgtaaaggaagaccatgatggggcagaaccctcaggaaactcagcttctgctataaatcttataagatcggcttccatggatgctggaaggaaggctgagcctgtaagcgaaatgcataacatctattggcagtttttgagaaaaggttgatagatatggctatggcagcgcctctactgtgttgagcaccacatatgtggcgtgtactttctcggaagccaggggtcgaggttgctgataggacttttgaggactttgaaagcctgcttgctgcagctcatgcagtgtatgatcccaacagaacagtt

SEQ ID NO: 7927 - DNA, 520 bp, Glycine max
  Clone ID: jC-gmle01810028h02d1
caatcgatccatcttcactcccaagtttatgtaaaatgacctttgtttcacgtagtcttgcaccataatcctttttccaagcttcaaacatttgttttaaccttctaagctctctatctgggttcaaacttgcttcaacttgaccagattttacctctaccaagaatttagaatcatcaccaaacacttgactcctttgctcaaattcttcagccaaccgacttataacactcaaaccagcactcattgattttgccccattgctttcttggcgccggtgattggttcctacatcccagctgaaatccctgtcatcacttgcattaacagaagcatctgaatttctttcagaatcatccatagcaaggctcttctttgcaatagagaggctagattgtagggacctcatttgtttctgccatacttcttccatggatttcatctttaattcatattcagaccatctgttctcatactgttgaaggcgttggtgaagaatgtcattttcctcttctttctc

SEQ ID NO: 7928 - DNA, 334 bp, Glycine max
  Clone ID: jC-gmle01810028h03a1
gttgagaagccttcaagcacaaaatttatttccattgttgcttcttacaatgacactccaaatgagccaactcccagtgatcctatttggctataccatagtgatcaaattgggcacctacgtgatgtagacactatctatgtgtacaaatcaagacccaacagcaccatagatattgagaggaagaagaactctcttagcaagatgtgggtgccatactatccaatagctggcagattgaagctgacaaaaaacggtagaatggaagtggattgcaatgcacaatgagagacattgattgaagctcaaagcacagacacatttggtgattatg

SEQ ID NO: 7929 - DNA, 374 bp, Glycine max
  Clone ID: jC-gmle01810028h03d1
caaaagctacgtcgatacattgtttgcctcatcggagtacattataccaatcttaagagcaatccctccattgtgcttgctcgctgcaccctcccaccctactgcccgggccaacgcctagtgcttggtggcggatcccgggccctcaagctcgggcctgtggacgtacttgcccgggctctcctggaagacgagcgagtggggtcctcccgagtcgagggccttggggtccgagaccggcgcgccgcgctcgaagccctcctcgaccgtgccaaatcggccggccttgccgttcgagccaccgttggtgcccgacgcgctgtccgaggtcgagccttggtggcctgccgaagcgccggctccgagagctcccg

SEQ ID NO: 7930 - DNA, 368 bp, Glycine max
  Clone ID: jC-gmle01810028h04a1
ctgtcaagaaagttgcacttgttttggtcaccggcgaccgctgcctctgcggcggttggaccaccgcactcataaagaaagctgacgctcccatcacggaattgaacgatcttggctcggaatccactgccataagtggaggccagacgggtaactcttatttcatcagagagcgctatcttccggtcgccccgtttatatacggcgccccacttgcaactgctaaggaagctcatgccagagctgacgatgccccctcactcttagggagaccaaaggtctacagaggggagcttctatcacaccgcgttaaactctttggtgaaagaggatcccacgagctatacctagctttctctttctgccaa

SEQ ID NO: 7931 - DNA, 464 bp, Glycine max
  Clone ID: jC-gmle01810028h04d1
ggtcaaaactccccaacactatcatggaaattatcattgtataatttatgaaacaggctagtacttaaactcccgatcttagaacacaaattttcgtcccagcaacaaaatctttcataacttgcgaagccagcgagcaaaaagctaaaaagtaactaatgcaagcaaaagatcaaatttcattaaatgacaaacattgaccgaaacaaaatcttcccgatcgcaaatattgcttccacaactgctcaacgattggcctttgcaactctctcaatttcatcctttttcttgatagcatagctgttggatgacccttttgctgcattaataaggtcatcagccaagcattctgcaattggcttaatatttctgaaagcagcttcccgtgctccaggtgttaaaagatagatagcctgggtaacacgcctaaggggtgagatatccacagcctgtctcctaacaac

SEQ ID NO: 7932 - DNA, 484 bp, Glycine max
  Clone ID: jC-gmle01810028h05a1
cttctgcatgaccttccttatacataagactaaaattagcagagtgcatgcggccaggcgggtatttgagtacctatccgacaattctgtaaacttgcctgttattcaccatattcagatcccaaatgggactcacagagatgacttggtaattggcgctggttctgatgctggaccccttctgagggatgggcttggagatggacttcttttggaagcgccagacaaggattgtgaatatattagaaacacttctttcaatttggagcaaggctgcagaatgagagatacaaagacagagtgtgtctcatgtccatcctgtggcagaacattggttgatctataagaagttagtgcgcaaatattggagaagacatcacacctggccggtgtttcgactgcaatcatgggatgcattgcacatggaccaggggagatggctgatgcacactttgggtatgtgggaggcactcccgggaagatt

SEQ ID NO: 7933 - DNA, 566 bp, Glycine max
  Clone ID: jC-gmle01810028h05d1
ggtacatatcagcataagacaatttattatatatatattttaaaaatactgaacgaaaagctcatgaatatttcacaacttcctaatgtagaaaatccgaacagcttttctacatataagtgaaatactgaaaattgaaatagaaaagtttatacactaacaagactctttccaagaattatgtcatctgttgagaaatcagcctctttccggtatgttcctctaccaaagtccaggttgtacgagtctgcaagaccctctacaagcccaaattcaggttcccacccaagcactctctttgctttctcaattgatgcaaagaaatgctggtcacggaatggaaatgatttctttttcccaaagtcaaaatctttagggttgtagtgaatgatctctggctctgggaacccaccagccttagcacatgctcttgctaatccgtcaaacgtgacatacttctctcccgagatgttgaatacttccttgctggccttctcattaccaagaacttggataaaagctgtcgccaaatccttaacatgaccaagtggggtatctgagtcctg

SEQ ID NO: 7934 - DNA, 233 bp, Glycine max
  Clone ID: jC-gmle01810028h06a1
aattgtttaaacctaattctcattttttcttcgtacgactcttctcctcctaaagatgcagatcttcgtgaaaactttgaccgagaagaccatcacccttgaggtggagtcctccgacaccatcgataacgagaaagctatgattcaagacaaggaagggatcccacctgaccagcagagacttatgtttgcggataaacagcttgaggatggtcgaaccctaggcgactaca

SEQ ID NO: 7935 - DNA, 429 bp, Glycine max
  Clone ID: jC-gmle01810028h06d1
ggttcatattacttttaggcgtactatcccacatacaaaataaaaactctcttcacatagtttacgtttcccaaacgctgtacaatatgtagcaaatccgacatctcatataccaattagtgggacactgtccagccacagagaatacgagctacacttgctacactatatacaggaattatgaaatatctacctataaaaagcatatacaccgaagctcgctaaacgtggaaacattgttgcacccacatgatagacccagtacttgggaataaactcgattctaacgcctcctattatgggatcccttaatcgcagcttaggtaccctggaaaccggctgctaatgatctccttcagctaatacactcttcagcactgtcgatatgcatgccttaaagctagtggaaccatttggccatgcccatgc

SEQ ID NO: 7936 - DNA, 282 bp, Glycine max
  Clone ID: jC-gmle01810028h07a1
aacaaagtgaggagcctcttgcttagtaacaatttcgagacatcttgtgtagatgcttttagccacaggcttcaggatttagtctaaggtcagccccagtttaattaaatcactgcataaggtctatattagtgacactgaatccagtaggggtatttggtcgtgtaagaactaaaaagcgttctttatgattgatgcattaaaccatgggttgagaaagaatatatgtacaaaacctagtcttgataatcttaaagaaatgtttattattttgtcataatc

SEQ ID NO: 7937 - DNA, 372 bp, Glycine max
  unsure at all n locations
  Clone ID: jC-gmle01810028h07d1
gcatgaatgccatgatgcaaagtttcatcaaaccaggaataaaataaaatttgctcaagtcaacaaaggagtatactgattcacagtttcacagaactttcactcctcgatccattcacttatcaaatttacagatagatttctcagatttcaccatcccaaagttcctcaagggatctgtaggcaccataagtttcatgggcaaatgtggtacccctgagtaatcttgcctgttgaatctcagaaaatttggcgagcaggtcctcaggtatagaccagccaaaaacatcaaaattttcctttattctagnttcgtttgtactcttgggaagaacactatggcccatttgaagtccccagcgaagagctact

SEQ ID NO: 7938 - DNA, 500 bp, Glycine max
  Clone ID: jC-gmle01810028h08a1
ggataccatcaaatctccaccatctgaagtaaaaacaatgaagaaggctgcaaagttaagtattgcagtgaccacaacattttatatgctttgtggctgcgtaggctatgctgcttttggagattcaacaccttgggaacctgcttgctggatttggtttccataaactatattggcttgtggatattgctaatgctgctattgtaattcaccttgtgggggcataccaagtgtatgctcaacccctctttgcctttgtagagaaggagacagcaaaaagatggcccaaaattgacaaggaattccaaatttctattcccggtttgcaatcctacaatcagaacatatttagcctagtttgtaggacagtgtttgtgatcataaccactgttatatcaacgttgcttccattcttcaatgatattttgggagtgattggagcattgtggttttggcctttaactgtctactttcctgtggagatgtatatattgcaaaag

SEQ ID NO: 7939 - DNA, 543 bp, Glycine max
  Clone ID: jC-gmle01810028h08d1
aaagtgctactccatttaataaatgccagataatttgttctgaatacgggaaacaataagagcatcaaaactacagctaaaagacaattatccaaccacgagctgttaattttacatcccatcatcaatggagcatttataggataatctgatagagaaattcatatatccttaccattattaccatgcctgacaagacgtatgtacatttgctaactgtaattgctattaagatacacgatgtctgtctgagaaattatggtccagatatccacagccacaactacatcctctataaacttatatatagcgagggataggaaaacctaagaatcacggaaaattggttgcggcatccacttgagatgcaaattcaaaaaagccagatttggctccatctagcacaaaacgttctttggattccccttccagtattaccctggtaagcgtcaatgtgcatctgcccatatagtcctttccgaatgtgtcgtggtcccaaacttcaacaattagcatatcatgtaatccatcctcaacaacaaa

SEQ ID NO: 7940 - DNA, 526 bp, Glycine max
  unsure at all n locations
  Clone ID: jC-gmle01810028h09a1
gaaaatcctgcttctgatataaatgtcagaatcagatacatcatcaacttcagtgggaaaaactgatggtgaaaatgcagttcctgaatccaaagttgaagttccccccgacaatgagtttgagaagcgaataaggcctgaggtaataccagcaaacgagattggtgtgaaattctcagatgttggtgccttagatgagaccaaagagtcgcttcaagaactagttatgcttcctcttcgaaggccggaccttttccggggaggccttctaaagccttgtaaaggaatattgctatttgggcctcctggcaccgggaagacaatgctggcaaaggccattgcgagcgaatctggcgcaagtttcattaatgtatccatgtctaccgtcacctccaaatggtttggtgaagatgagaagaatgttcgtgctttattcacactgggccgccaaggtctccccaactattatatttgttgatgaggtggatagtatgctacgacagcggaccanagttggagagcatga

SEQ ID NO: 7941 - DNA, 423 bp, Glycine max
  Clone ID: jC-gmle01810028h09d1
aatcatgaactaaaatctcaatgaaattgaaaatctttcactaaagaaaataatttctgaactgttcaaactgatctcaagacaactgaaagaacatagttatcggcatacaatcgatttcatcatccgccgcataatcaattgggctaccacaacaagattgacagccacaaaggacccttattgaaagcttcaacaagtttaagctttaatcattggagtacactcacaaggttttgaatccaaaaatttcccaacaaagacataaccacttagttagctacctactcccacaagaagggaagtgtcagtgggtcctcattttcaaccaatccatccagccccatctgcagcattccgttgtaatgaaggttggttgtgtttgcatcaaaaaccaatacttgaccactgggcttatctttt

SEQ ID NO: 7942 - DNA, 576 bp, Glycine max
  Clone ID: jC-gmle01810028h10a1
cacaaaagcacttgcaaactagttttgttttgggaacatcatcacattacattagattggtggtaatggcagcgtcactacaagcagcagctactttcatgcaacccaccaagttgagcaggagcaacactttgcagcaaaagtctactcagtccatttccaaggcttttggtttggaacctgttggagctaaaaaggtcacatgctcccttcaggctgatcttaaggacttggctcacaagtgtgttgatgctaccaaaattgcaggattcgcccttgccacctctgccctcgttgtctctggggcaagtgctgaaggtgttccaaagaggctaaccttcgacgaaatccagagcaagacctacttggaagtgaaggggacaggaacagcaaaccagtgcccaacaattgatggtggattggactcatttgccttcaagccggggaaatacaatgccaagaagttgtgccttgagccaacttcattcacagtgaaggccgatggtgtggccaagaatgctccccttgagttccaaaacacagagctcatgacacgtttgacctacactcttgatg

SEQ ID NO: 7943 - DNA, 396 bp, Glycine max
  Clone ID: jC-gmle01810028h10d1
gggcccgaaaacttacaccccccataaatttaaaccctgaattttaaacattggcatcggggggcgatataataatcacccctgaaggtctttttaaacgggctaggaaagatggggcaagggattatgccgcgaccccatgcatgaagttactaacaaaatttgggccaacaaacaaaacagaaaacaaaacactttttgactaaagctgggcataccaaatgccccggattttgacatccttgggggcctttggtcccaaaaaagggccaaatgggtgaacaattttgaacacaccgataaccttacccgtttaaggcttgggcttggggaccctcaaggggatttcgcccttggaagaagagggccttttatgggctcccttgggaaggtctt

SEQ ID NO: 7944 - DNA, 500 bp, Glycine max
  Clone ID: jC-gmle01810028h11a1
attaggatatgggaacttctgcgatcctctaatgactatgatccagatcttttactacctatactacaggttcttcagcaacctgaagcacgcagacttggggagcgtgttatgggtgggatcactcaacgtcttgcagcacgctatctgcaacatgtacttcgagttccaatgccagcttcctcatagagtttgcgccactgtcaaggtcaacagatgtaatctagataaggttaccatgaacagggaatagaggagctatattcttaccaagcaagacaaaaatctattctttcacaattgtgctgattagcttgtttgtttggatcctctaattcgcagaagatctgtatatattatatactgctttattgatgctgcaagcatcataatcagcttcattatataacaatgatgcaatagcgttaattgaaaagggattgctcttggcttcttgcatacaatgaactgctcaagtagctgcaaagcataaaataaca

SEQ ID NO: 7945 - DNA, 389 bp, Glycine max
  unsure at all n locations
  Clone ID: jC-gmle01810028h11d1
gcaaaaagccaagagcaatcccttttgaatcaacactattacattattgttatataatgaagctgattatgatgcttgcagcatcaataaagctagatataaattgttccgattttgcgcaaattctaggatccaacaaacaagctaatcaaacaattttgaaagaatatattatgtccttgctttgaaagaataaccctcctttattccctgttcatggtgaccttatctagattacatctggcgaccttgacagtggcacaaaatctatgaggaagctggcattggaactcgaagtacctgttgcataaagcgtgcttgaagactcgagtgatcccacccataacacgctccccaaggnagcgtgcttcaggttgctgaaaaacctg

SEQ ID NO: 7946 - DNA, 582 bp, Glycine max
  Clone ID: jC-gmle01810028h12a1
gcctctcttccatctccccagcctaaacctctctcaggaaggccacattacgcccttccgtcttcgcaacccttaacactccttcttctccttcctcttcatcttccttcccctctctcattcaagacaggcctgtttttgctgcccctgcccccatcatcaccccaactgtgagagaggatatggcaaaggaatacgagaaagctattgaagaacttcagaaattgttgagggagaagagtgaactcaaagcgacagctgctgaaaaagtggagcagataacagcttctctagggacatcatcatctgatggcatcccatcatcagaagcctcagacaggatcaaagctggtttcattcacttcaagaaggagaaatacgacaagaatccagctttgtatggtgaacttgccaaaggccagagccccaagttcatggcgtttgcttgctcagactcaagggtgtgcccatctcatgtgctagatttccaaccaggagagggccttgtggtcagaaatgttgccaacattgtcccaccatatgaccagtcaaaatacgctggaactggtgctgcagtgagta

SEQ ID NO: 7947 - DNA, 551 bp, Glycine max
  Clone ID: jC-gmle01810028h12d1
gaaaaatgaaaattttataacaagaggatttccaactcttattaaaagaagattttccgacatgcataaacgcagttcatagtttcatatatatctttataaatatcatatggtgatgaaggtggctaggcctcttcattgcagatacacacgacctctaagcatggcccctatagcttccaatggagaatggtggccacatctttaacttagggaaccaagatgaggtcattgataatggttgatgttcatacggagaaagaggatgcaaggccaaactgaaggccccagagctcaaaagatcctttaacaaagtcatagtatcctcctttcagtgacaatgttttgttcaccaagccatctctaacaaatgggtaagttagcaggtttccaagggaaacattcacagattccttctcacagtgtgagcacaactcagcaaaaggggcatccccatgctgtgtcttcacctttgcctttgcaggcaagccaattttgacccactcctcaataaaatcagtagagtggttccatcatatgggaaaagacag

SEQ ID NO: 7948 - DNA, 521 bp, Glycine max
  Clone ID: jC-gmle01810029a01a1
catttttcttcctccatctttattttaaacataacttgaactctccattccttaaattttagctacgagctagttccgacacagacaaagcaatggcaaagaccgagttagaggtgactgttgagagcaagaacaaagacctcaagcacctggggtttgtgaggattgctgctattcaaacatttgtgattgtgtcaaatctgtatgagtacgcaaagcagaattctgggcctttgagatccgtcgtaggaacggttgagaacactgtaaccaccattctcggtcctgtctgcaacaaattcaaggacgtgcctgatgatgtccttgtttttgatgacaaaaaggtggatgaagcttcccacaagttcgatgagcacgctcctccttttgctaaacacattgcggatcaagccaagggtgtgattcagaaagtgacttgtgaggcagggaaagtagcaggtgaagcacaatctggggggccaagagcagctgttcattatgttgctacagaatcaaagcat

SEQ ID NO: 7949 - DNA, 534 bp, Glycine max
  unsure at all n locations
  Clone ID: jC-gmle01810029a01d1
aaaggaggaagcaacctttatgagcattatcatccgcaccattcatttacataaaccctattttctacatggattagttacacagtcttgccaagtctttactaacttaaaagtttttctagtcacaaccaccacatgccccacaatgtcacaacccataaaacaaggtcactcaaaagcaaattttttgaagaagtaaagctcaatttaatcagaatcagatgattctgatctctgttcctcagaggctgcattatctcctttcaagttagcctctccctgcttgaatgccttggctatctcttcaatgggaatcaaaggtagatacccaacgaaactgtaacccttttgagtcatggccttgatcacatgattgtacttctctgaccagtgagcaacagtgggaattgccatctctgacagtgcatggaatggtggatagtggttgagtccattccacaactttactgaatttatcaacacanaatgctttgattctgtagcaacataatgaacagctgctcttgggccccc

SEQ ID NO: 7950 - DNA, 591 bp, Glycine max
  Clone ID: jC-gmle01810029a02a1
atttgatttcgaaatccgattattatattcctaacccgaagtgctccttggtgtattcataaaaagtaataatttttcttcgaatcttagcaattgatatcctttcgaaacaccatttttttcttcatttgaattgacagtgaattctttcgatttcttattcgatttatgtattcttttttctaaattaaacaaggcaaggactaactcccgaactgcaagtaaaaaaaatgatagaatagaatatagatttatctataagctctatgacttgtaatagaacttatgcttgatagagaggttattatcatatagagctgacgaatgagatgaagttgagttcattaaataaagacgaaaaatgacaaataagaaaacattcattccccttctatatcttacatctatagtctttttgccctggtgtatctctttcacatttaagaaaagtctcgaatcttggtttattgattggtggaatactaggcaatccgaaattttcttgaatgatattaaagaaaagagtattctaaaaaaattcatagaatttgaagaactgttttctagatgacatgtaaaggatgtccggaa

SEQ ID NO: 7951 - DNA, 523 bp, Glycine max
  Clone ID: jC-gmle01810029a02d1
gtgggacgatagttttgaaaagacagattgcctatcttctctttaatctcaggcgaaatacgatcggggggtgccaattcaaaaccttccggtaaaataagaacagcccccacattcaaagctccctttttaccattagcaagaacttgtttcacttgcatatcataaggaattcgaacaactgcttcaaatacagtatcaggaagtaccgcttgtggaacctcaatatccacgggcttattagctaaatggcaattggcacagacaatacgaccggttgcttctcggggattttcataaccctgctgtgcaaaaattggatatgcgtttgaaatgggtgctcgaattattatatatatcatgatcgatatggaaatggatcgagtaatcccttcctttatacaagaaaaagcatttctagtttgcatggtctaatcattgatcctgaaaatctctacaattagattaagtaggtcactcgcatagttccctatccaagtcggggaacccctttttcatttaa

SEQ ID NO: 7952 - DNA, 550 bp, Glycine max
  Clone ID: jC-gmle01810029a03a1
aactttttgattcctaaattctttaaaattcgaaattctaatttcgttaggggaaagagattgtttgtgtgtgagtgagtatggctggaaaaggcgagggtcctgctatcggaatcgatttgggaacgacgtactcttgcgtcggcgtgtggcaacacgatcgtgttgaaatcatagccaacgatcagggtaacagaactaccccatcctacgtggctttcaccgacacagaacggttgatcggcgatgcggcgaagaaccaggtcgctatgaacccaaccaacaccgtttttgatgctaagcgtttgattggaaggcgtttttccgatgcatcagtacaaggtgacatgaaattgtggccgttcaaggtgattcctggccctgctgagaaacctatgattgtggtgaactacaagggggaagagaaacagttttccgcggaagagatatcctccatggttcttatgacgatgaatgagattgcggaggcgtatctaggttccaccataaagaatgctgctgtcactgtgcctgttacttcacgactcac

SEQ ID NO: 7953 - DNA, 504 bp, Glycine max
  Clone ID: jC-gmle01810029a03d1
gagcaaaaacttatatcattgttcaagtagaaacggggaaaagtacattaaaaaaaaaagagaaaaataaaatcgcaataaaaacataatgacacgctgttatctaaacttcaaaagggtctttgacaaaatcaagaacaacccatgagaatcttctgcttaatcgacttcctcaattttgggtccagcaccgcttccactgccagctgcaggaccatcctcatccatggctccacccgcatcaccaccagcaccctggtacatctttgctatgatgggattacaaatgctctccaactccttcatcttatcctcaaattcgtcagcctcagcaagttggtttccatctagccattggatagcctgctcaatcgcatcttcaattttcttcttatcatcagaagacagtttggaagcaatcttgtcatccttgattgtgttcctcatgttataggcataattttccaatgcatttttggcctccactttcttcttatgctcctc

SEQ ID NO: 7954 - DNA, 530 bp, Glycine max
  Clone ID: jC-gmle01810029a04a1
gttgagaactaagaagaaggaattggcttcctcaatgatctcctccccagctgttaccaccgtcaaccgtgccggtgccggcatggttgctccattcaccggcctcaaatccatggctggcttccccacgaggaagaccaacaatgacattacctccattgctagcaacggtggaagagtacaatgcatgcaggtgtggccaccaattggcaagaagaagttcgagactctttcctacttgccagacctcgatgatgcccaattggcaaaggaagtcgaataccttctaaggaaaggatggattccttgcttggaattcgagttggagcacggtttcgtgtaccgtgagcacaacaggtcacctggatactatgatggacgctactggaccatgtggaagctgcctatgtttggctgcactgatgcttctcaggtgttgaaggagcttcaagaggctaagactgcataccccaatggcttcatccgtatcattggatttgacaacgttcgccaagtgcagtgcatcagct

SEQ ID NO: 7955 - DNA, 557 bp, Glycine max
  Clone ID: jC-gmle01810029a04d1
agttctcatccattaatttccattgaagtccgaaaacagaaaccaaaaatacaggatgatgaaatctcataaagcaaaaacaaatgggaatgtagtttaagtacaacaaacaaagtggggtggctacagatgctttgcaaatttttcaatgacttagaagcctgggggcttgtaggcgatgaagctgatgcactgcacttggcgaacgttgtcaaatccaatgatacggatgaagccattggggtatgcagtcttagcctcttgaagctccttcaacacctgagaagcatcagtgcagccaaacataggcagcttccacatggtccagtagcgtccatcatagtatccaggtgacctgttgtgctcacggtacacgaaaccgtgctccaactcgaattccaagcaaggaatccatcctttccttagaaggtattcgacttcctttgccaattgggcatcatcgaggtctggcaagtaggaaagagtctcgaacttcttcttgccaattggtggccacacctgcatgcattggtactcttccaccggttgctagcaat

SEQ ID NO: 7956 - DNA, 531 bp, Glycine max
  Clone ID: jC-gmle01810029a05a1
cactcataacacaaagctcaaagcaaagctcatccttgagttaaaaaatggcagcagcttcttccatggctctctcatccccatccttggctggcaaggccgtgaagctgggcccatcagccccagaagtgggaagggtgagcatgaggaagaccgtcaccaagcaggtctcctcaggaagcccatggtacggcccagaccgagtcaagtacttgggcccattctctggcgagcccccgtcctacctaaccggcgagttcccaggcgactacggctgggacactgctgggctttccgcagacccagaaaccttcgccaagaaccgtgaactcgaagtgatccactccaggtgggccatgctcggagccttgggctgcgtcttcccggagttgctgtcccgcaacggggtgaagttcggagaagccgtgtggttcaaggccgggtcccagatcttcagcgagggtgggctcgactactagggcaacccaagcctgatccacgcccagagcatcctcgccatctgggccacac

SEQ ID NO: 7957 - DNA, 562 bp, Glycine max
  unsure at all n locations
  Clone ID: jC-gmle01810029a05d1
gtaaaaagcaagtaacattaagttggattcggatacacaagataattcacattatctgaagtacttcaccaaacacaaatctaaaaactctcaaaagtcatttcgttctttgacgctcactttccggggacgaagttggtggcataggcccaggcgttgttgttgacagggtcagcaaggtgatcggcgaggttctccaatggaccctttccggtgacaatggcctgaacaaagaagccaaacatagagaacatggccaatcgtccgttcttgagttccttcaccttaagctcagcaaaagcctctgggtcatcagcaaggcccaatgggtcgaagctgccacctgggtagattgggtcagtgacctcaccgagggggccaccagcaatacggtaaccttcaacggcacccattaggataacttgtgtggcccagatggcgaggatgctctgggcgtggatcaggcttgggttgcccaagtagtcgagcccaccctcgctgaagatctgggacccggccttgaaccacacggctttctncgaacttcaccccgttgcgggac

SEQ ID NO: 7958 - DNA, 425 bp, Glycine max
  Clone ID: jC-gmle01810029a06a1
cgaccataaagaatttcttaggccagattttccccttttcttctctggtgccacacctttagttggagcgttgccttatgctcagagctatggcgggcatcaatttggtatgtgggctgggcagctgggagacggcagggcaatgactctaggggagatactgaattctaactctgaaaggtgggaacttcaacttaaaggagctggcaagactccttacagtcgctttgccgatggccttgccgtcctccgcagcagcgtcagggagttcctttgcagagaggcaatgcaccaccttggtataccaacaactcgtgcactttctcttgttaccaccggcaacctcgtcacccgtgacatgttttatgacggcaatccaaaggaagaacctggcgcaattgtttgagagctgcccaatcttttct

SEQ ID NO: 7959 - DNA, 603 bp, Glycine max
  unsure at all n locations
  Clone ID: jC-gmle01810029a06d1
accaagaatcccgtaattttaatagatcaatttactgacccatcacaaacaaattttcacactacaataacaatcaacccgcaaacaaacccttcgaccaaatgttacattgtacgtgttaaataatactcggggacagtatattggaaacatatggaaaaataataaacaaagaaacacgctactatttttttgctcttaattaattcctagtttttatgttttcatttttgtaatcctttagacctaaatgggagcctcatgaagaacaagaaagcatgcatacacctggtcgatatgcccaagctgggggcaagcgagcatatttttccattcctggttgctcatcatacggatgctccactaatttgagcaggctgcgaacctctccaaaatcacctatttctgcagcatcaattgcagtctggcagagatagttcctcagtatatatttaggattcactgaatccatcgagatcttcctttcgtcatcaggtatcccactggtagagacctcatgtatataagctttcaaccaactggtccatgcttccttacgctctttaccaatatctaacagtacagnacttagtgggactaaca

SEQ ID NO: 7960 - DNA, 516 bp, Glycine max
  Clone ID: jC-gmle01810029a07d1
gtaacttatggtagaatatgtgtcaagagaagtgtgttagagagtgtgttggtagtacttctctaatttatatagagaccattcactgttaatccaccatcaacacaaatggtctgtcctgttatgtaagaggctgcaagtaaagcgaggaattcccacaattgaaaacccttcctttgcttctccaatccgaccagggggggttcgccaaatgaaagcattaagaagtttttcatttttaaaatgctgcaaggaaataatgataagataccctcactccacataaaggaattaaaacaaatgaaaaaaaaaaacaaaaaacattagcaccatactcttttaaacataattttgttattaactaaaatttattaaaaattataaaagttacttaacatcttatttaatgagttttgtccataagaaagagtatgatcgggttaaaattattactacatgatttgtgattccgaacaatcttcatatgggatatatgtcatgtaataacttttcatg

SEQ ID NO: 7961 - DNA, 392 bp, Glycine max
  Clone ID: jC-gmle01810029a08d1
ttttctttttttttttactatccacaaaaggtcatctacctgggctatatatctcattattggtacttgtgcacctgggtaatttttgcatatacaaaccatgaacgtacatgaatatggactagacagattaaatcgaattttacagacccgccagtatacaggatccctacttttaccttcatagatttaaaggggatttatgcctaaacttccgctattaacaaattcggggaaattcaaaatgtcagtagcttcctgtagacgattgattgtacaggtatcaagagtgtaaacgggatcccaagaagacacagataagtgccaccatacagacatattgaagtgggaagccgacttgaacttttcttggacctttattaataagaact

SEQ ID NO: 7962 - DNA, 496 bp, Glycine max
  Clone ID: jC-gmle01810029a09d1
agttattccgatattcggacgcatcaacttgttatgaaatcacattgatagcctctactcgtgtcctagctcgtctaagagctagatttgcctcaattggttgtctcttgccttccgccttattcaaaatagcttctgctatttcaggagttggctgtgcttcttgtggatcaatgtcactacccttttccgcatcatttactaaaacaatgatctcattattgtttattctagcaaaaccgcccatcagagccatcgttaaccattggtctttaagaagacgtattctcaaaatacctatatctacggctgtggcaataggcgcatgatttggtaatactccaatttgtccgctattagtagataaaatgatttccttcacttccgaatcccaaacaattcgattgggggtcagtacacaaagatttaaagtcatttcttcaaattgctctccatttctaagttcgtagctttcgcagtagcttcatcgatatta

SEQ ID NO: 7963 - DNA, 493 bp, Glycine max
  Clone ID: jC-gmle01810029a10d1
aaacataaaacatttacttcctttctgatatataatacaaaatagtttttccttctatgttgtctagttctactatggcagcaaaagcttaaaaccacagatttaagtgatgtttcacagatttacaagggcagtaacttttcacaagatccaattaaaacctgaccttaattccctaataaagtatcgaccctcgcatttactgctcttgacaagaacttcatacaaattggtggcttaactccagcaagagcaagtattgaagcaggaagagtccatattccatcgccacatatcaaaccagaagctacagctggtgcaaaagcatctgccttagccttgttaatcctctcccacacatacaatatcagacttccaacacacatatcaatggcaaagtatggccctatatagaaaggtattgccatggccattggaagtggtatgaacctccctctcttgccaaggaaatctttaatcaagtttattgcga

SEQ ID NO: 7964 - DNA, 475 bp, Glycine max
  Clone ID: jC-gmle01810029a11d1
tcttttttttttttttttttttttttttttttttttttttttttttttttttttttttttttttttttaaaaggaaaaggccccaaattcaatttaaggggcccctgtacctcaaaattttaggggaagacggcccaatttgaaaaattttggaagaactttttaaacttagcctttttttttttgcccctaaaacattggaaatgctaaaaatgttacccccaagttccatcacaacttttagcccttggattagtacaacaaccttcacaaacaaaaatttttacttgccaagtttgttttgcctccaattaaagactggaaaaaagttcccctttgaatagcatcctcgttggcatttccaagagccgccttgttcaagtacttgtcagccaattggacttttttgacatttttttgtttttggacaagcattttaccatacagcaagagcttttccagagtcattttgggc

SEQ ID NO: 7965 - DNA, 358 bp, Glycine max
  Clone ID: jC-gmle01810029a12d1
aggacaaaaggaaaaggcccccaattcaatttaagggggccctggaactaaaaattttagggggagaagggcccatatggaaaaatttgggaagatcccttccaccttggctttttttttttggccctaaaaacattgagaatgctaaaaatgtttcccccaagttccattccaacttttagcccttgggttagtacaacaacctttacgaacaaaaatatttacttgccaaagttgttttgcctccaattgaagacgggaagaaaggtcccctttgaatagcctccccggtaggatttccaaaagcaggctttttcaagtacttgtgagccaattggactcttttgacatttttttg

SEQ ID NO: 7966 - DNA, 528 bp, Glycine max
  Clone ID: jC-gmle01810029b01a1
agaaaaggcatgagcaattcgtttctcaagacagcaaaacagagaagaacagagccaacaaaacaaaacaactctcactggaactgtttcttctttcctctccaaagatcctcaattccgttactaatctctccgtcggtgatcgccatagtgtgctggaaatttttctcaggctgttccggtggaagattcggtgtcttcgagtttttggttctgggttcggttgccatggacaaattgcttttcaaagcttgtatgggaactcaaactatgtagaaatatttaaagaagcaggaaatttttagattgaaatgttgatattgttatatctcaacaacgtattgagaaagtagacaagaacattgagaaggcaggtgactgaaatggagtgcaataaggatgaggctacccgagctaaagaaattgctgagaggaagtttgctgcaaaggatacattgggtgcaaagaaatatgctttgaaggcccttaaattatttcccgatcttgagggtatctctcaaatggtag

SEQ ID NO: 7967 - DNA, 453 bp, Glycine max
  Clone ID: jC-gmle01810029b01d1
ggaatcaatttgtaatttattgtattgatctttaacggagctaaatatcttacaaatttatggacagcgactgaagcacctgccacactaaatctgctttacaaaacaaaattgagtaagaccctaaaatgtaaatagaaaagggcatgtagccttgacccataatgttagaacagaagggaaatccccccacaatttgtagctagcaaaaaaatagacaaaattaacccttcacaaaatatgatggttggataagagaaaatgattgaaatctctgatccatccaataaataatcacaatgtcaactcattatggatcctattttgtcaaattaattttgggtctctgtattcttcattccttgcacgagccagagattccaaaagttgatttcttgtagcatgctacatccctttgcaattacaagctactgcaaatcttctctctctttg

SEQ ID NO: 7968 - DNA, 467 bp, Glycine max
  Clone ID: jC-gmle01810029b02a1
agaaaaggcatgagcaattcgtttccaagacagcaaaacagagaagaacagagccaacataacaaaacaactctcactggaactgtttcttctttcctctccaaagatcctcaattccgttactaatctctccgtcggagatcgccatagtgtgctggaaattcttctcaggctgttccggtggaagattcggtgtcttcgagctaatggttctgggttcggttgccatggacaaattgctttacaaagcttgtatgggaactcaaactatgtagaaatatttaaagaagcaggaaatttttagattgaaatgttgatattgctatatctcaacaacgtattgagaaagtagacaagaacattgagaaggcaggtgactgaaatggagtgcaataaggatgaagctacccgagctaaagaaattgctgagaggaagtctgctgcaaaggatacattgggtgcaaaga

SEQ ID NO: 7969 - DNA, 208 bp, Glycine max
  Clone ID: jC-gmle01810029b02d1
ggaatcaatttgtaatttattgaattgatctttaacggagctaaatatcttacaaatttatggacagcgactgaagcacctgccacactaaatctgctttacaaaacaaaattgggtaagaaccctaaaatgtaaattgaaaagggcattgtagccttgacccataatgattagaacacgaagggaaatctcccaccacaaatttgta

SEQ ID NO: 7970 - DNA, 548 bp, Glycine max
  unsure at all n locations
  Clone ID: jC-gmle01810029b03a1
ctgagtcttgcaattgaagttgttgtcttgcccttctctcttcaactccaaacacaagacatcatcatccatggctgcctccgtctccactgtcggacctgtcaacagagctcttttgaacctgaatgggtctggacctggggtttcagctcccagttcatccttctttgggagcagcttgaagaaggttattggctcaagggtccccaacacaaagatttcctctggaagcttcaagattgttgctgtagaagagaagaaagagattgaagagacccagcagaccgacaaggacagatggaagggtcttgcctatgatatctcagacgaccaacaggacatcacaagaggaaagggtttggttgactcccttttccaagctccacaggatgctggaactcactatgctgtcatgagctcctacgagtaccttagcactggacttcgccagtacttggacaacaacatggatggattntacattgctccagcttttatggacaaacttgtctgtcacattaccagaacttcatgacccctgccaacat

SEQ ID NO: 7971 - DNA, 542 bp, Glycine max
  unsure at all n locations
  Clone ID: jC-gmle01810029b03d1
aggacaaaaggaaaaggcaccaaattcaatttaagtggacactttaactcaaaattatagaggaagacagtccaatatgaaaaatatagtaaaatcatctcaaacttggcatcttctctttgcacctaagacattgagaattctaagaatgttacacgcaagtcccatcacaacttctagcacttggatcagcacaaccttcaggaacagaaatatttacttgccaagtttgctttgcctccaattcaagattggaagaaagttcccctgttaatagcatcctcgttagcatttccaagtgcagcctcgttcaagtacttgtcagccaattggactctcttgacattctcttgttcttggacaagcatgttaccatacgtcaagagcttctccagagtcatcttgggctgctcaaaggttggaggtccatcttttgagttcacaagcttcttcccaatgccgtcaacaccaacaccagaaatccacttcctcacttcgtcatcatatactctggccctcagtgcaccanagaaatcaatgga

SEQ ID NO: 7972 - DNA, 545 bp, Glycine max
  Clone ID: jC-gmle01810029b04a1
gaaattaagaaaaaatggcagcttgcactgtctactcaacacaatctctgagcacaaattgctccatctcaaccccatcaaagacacagctgagtttcttccaccaaaagcaggtagttttctggaggaacagcaacaggggcaacagcagcagcagaagaagctatgtgataacatgtgcagcaggtgactcacagacagtggtgattggtcttgctgcagactcagggtgtgggaagagcaccttcatgaggaggctgacaagtgtgtttggaggagcagcagagccaccgaagggtggcaaccctgactcaaacacactcatcagtgacaccaccactgtcatatgcttggatgattaccactctttggatagaactggcagaaaggagaagggtgtcactgcccttgaccctagagccaatgattttgatctcatgtatgaacaagttaaagctcttaaggatggaattgctgatgaaaaaccaatctacaaccatgtcactggtctactggatcctcctgagctcattaaaccccccaaa

SEQ ID NO: 7973 - DNA, 608 bp, Glycine max
  unsure at all n locations
  Clone ID: jC-gmle01810029b04d1
attgtctcaatcttgtatcaacataactgaatctcagcctcacttttttttctcggataagtacatacatacatacatatgtgtttttttcattaattatgatgcagaacagcctaataacaatagacaaaataacatgaaacacagtgaaattgtggaaaacatgaaagaagaaagaaaatgatgattttgatgagaactaatgcaatttgactgcgtcgctcggtcgatatgtatatatattattatggcaggttcaattcaattcctaagcttttgcagccactggagtctcagccttggtggctattagctgctcatataaatctcttatcttcaaaccaactatggtttggaagagacctgttccattgttgctgccggggaaatcagcatgcttcaacatctgttgagtaacctctccatagaactttgtagagaggttgcttaggtggctctcaacgtatattagttcatctagtctgtcaaattgtccatccatttctacaagtgacacctcatttncgtagtaagtctctggtccatagaagaatntgatgccagtgtaggagcatgtaagcttccttccacatggtattcatgaaatg

SEQ ID NO: 7974 - DNA, 562 bp, Glycine max
  Clone ID: jC-gmle01810029b05a1
gatttattgttctgaagtcacttggccacgccttgatctttgcaagcttggttcacttacatttaaaactccagataatgtaaagtatccatccatgaatcttgtattttctgctggccgtgctggaggcacaatgacaggagttcttagtgcagcaaatgaaaaagctgtagagatgtttattgatgaaaagattagctatttggatatattcaaagttgtggagctaacatgtgagaagcatcaaaatgaattggtatcctctccttcccttgaggaaattattcactatgacctgtgggcgcgaaaatatgctgctagtctgcaagactcttccagcttcactcctattcttgcatgaggatgattaaactagggatgtggctgatgcttcccaattgcctgctttcaccataatttcttcgggcattgaacaatgtagaatggtgcattccacagatgttgaaaattaaataggttttctgcttatggaatgctggcgtttaacacctttcattgatcttatagttggcgaatttcatggaaacgatgtctttatagc

SEQ ID NO: 7975 - DNA, 669 bp, Glycine max
  unsure at all n locations
  Clone ID: jC-gmle01810029b05d1
ccaaataataccaatttcatataataatatcagccaacgaatgtgtgctgaggaaaaagaaaaggaatccttttatgaaagtgattggtgattggtcaacttttgtgtctatctctgctaatttttgtaagactccacctatttaattctattagaaaaagagaaatacataacttctagttgaccacatcatgtaaattttgaatatgagaaaatccattccccttcttgactttgacacattcataggcaaccaaccaacctcctatgctcctattgactattaaaaagacatcgttttccatgaaattacgacaaaactataagatcaattgaaaggtgttaaaacaccaacattccataaacaaaaaacctatttaattttcaacatctgtggaatgcaccattctacattgttcaatgcccgaagaaattatggtgaaagcaggcaattgggaagcatcagccacatccctagtttaatcatcctcatgcaagaataggagtgaagctggaagagtcttgccgactagcagcatattttcgcgcccacaggtcatagtgaataatttccttaagggaaggagaagataccaattcattntgatgctttttacatgtaagctccacaactttgaatatttccaaatagctaatcttttcatcaat

SEQ ID NO: 7976 - DNA, 591 bp, Glycine max
  Clone ID: jC-gmle01810029b06a1
cagaaacctgctgtagttcgcgttgtaattcaaaatttgtggtaaagcaaatggcgaaagttttctgtgattttcggttccttctcttggttgccgctggcgtcttcatctatatccagatgaggcttttcgcaactcaatcagaatatgctgatcgcctagctgcagctattgaagctgaaaaccattgtacaagtcaaacgcgatcactgattgatcagattagcttgcaacaaggacgaattgtggccctagaagaagagcggaaacgccgagaccaagaatgtggacaaatgaagtctcttgtacaagatcttgaaagaaaagacctacagaggctgattgataaaatgcaggttccggtggctgctgttgtgatcatggcatgtaatcgtgctgattacctagagaggactattaattctgtattaaaataccaaatccgaaactggagataaactgagggaccaaatttgcaattttgcctaaagaatattcaattgattcccgtatcacgtcattacaagtgggctctagatcaactgttctacaagcataacttcagccgtgtaatcatccttgaagatgaca

SEQ ID NO: 7977 - DNA, 486 bp, Glycine max
  unsure at all n locations
  Clone ID: jC-gmle01810029b06d1
accaaagcctttaaaagntaaagctttctatcacatgaatgaagaatagggatatatgagattcccattggcatcacaagacaaaatttcactctcggaatactcgggatggtggccataattttgttccagcgcattctcgtattcattttttagcccagatcatagcctcttttaggcagtggatttgaaaataagaaatatccctatcgtacgtcacttttaagttcaatatcaataactccgcaacacttccgttgatatctgaaaacaactactcttacattgtgaatatttttcttcctcatccagcattaagactcttcgatctgaagtagcttcaaagattctggaccaacaaggaatatacgtcgtgaggtttgatatctgaaaacgactactcctttatatgctgtcctgggcacaccatccttccactctngaaatataccaaattggtgagcaatgttnttcaaagtctgactg

SEQ ID NO: 7978 - DNA, 522 bp, Glycine max
  Clone ID: jC-gmle01810029b07d1
agtgaacttggattcatctatattgcatcatccctcaaaaatagtacttgtaaaactgacattgaagttgttcatgaacagtataaaaatcgtcaaagaaaaattacagggacgtcatatatctaccaccacgcaggagggttgatatacctggtgcaacacaaagtaggagatgatatttgtgcaagtgaacagaaattaatagacttcgacattccattgctctgatttcttcaattgcctcttgtactcaggccaatcaatgccatctttggcagccaatgacaccataatgtcatcaatacccttttccattccttttagtccacacatgtacacaaaagtgttatccttcttcagtaattcccacagctcttctgcatattgagccattcgggtttggatgtacatcttctctccgttctcgtttgtttgctctcggctcacagcgaagtcaagcctgaagttgtcaggatatttctcttgcatcttctcaaaatcctccttatatagcaatgagct

SEQ ID NO: 7979 - DNA, 348 bp, Glycine max
  Clone ID: jC-gmle01810029b08d1
aaaaaataaagggttattaaaggtacactgttttatagacgtaaagaaactacaaatttttaccctaaaaaccggttcttttttatacataccctttgggggcaattgggccccctacaaaaaagggaaaaggtggggggaaatttttaatctttcacaaatttggagccggctgcagagggcattctgttttctaagataatacatatgaaagatgttacatatatagggtattaaaacaggggctggtactggagttgaaggagcaacacggttttcagctggaatttaaaccaactcagacaatatagcgcggaattcatctgcgttcagaggctccttcttcag

SEQ ID NO: 7980 - DNA, 513 bp, Glycine max
  Clone ID: jC-gmle01810029b09d1
gggagaaagtgaaaattccattgaggtagtgtgatatgatcacattcacattgattcaaatgctatatacaagtatcttagcatcatctgaaagctaagaagccaactacataataaaagcttcaaataaattaaataataacatggggcaggctttgatttaaaatccactaatgccaacaacaaaaaaagaagaaattcagaaaccacgaaatatattacacaaatggcagaagagaacagagcaagacggagcataccaagcggaatcaaacaatggcacttccacctccaccggaactcgaagcagagttaaccactctctcttcctcatattccttatcatccgttggtagctcatacctgcaaacagggcaagaatttcgagaactcaaccaaggaacaatgcaatctccatgatacccatgcccgcacggcaacctcttcgccaagtctccaacaccgagcaaatccttacatatagcgcacgccacggcttcgctttcggacgca

SEQ ID NO: 7981 - DNA, 550 bp, Glycine max
  Clone ID: jC-gmle01810029b10d1
aagcaaacatgtgaaacaaggagttaccattcattgggaaccaacacttcatttcttttgttacaccaaattaagttactaaccccaaagataccccatggagaaagggacaagagaatatgactttggcagttttggctataagttcttttaaaaaaaaaaatacattatctgggtattggtactcaagtaatactatagggtaaaagtaacaacttcccattctgcaatgaagcaactggtggtctgccttcaagttcatggcttttcagatctttcatgtactctgttattaataaattagagtgcaagaaaatcatcaattagaccacgagaaccctttaaatttgaccatgcaaatagcgtgaattagaaatcatcctctagatacttcaacattaggacttgagtcccttgagctcttccctttgttacttcgaatgtgaaatttcagttcagatgatcaagattaggtgtagcacatgaaactcgggtattatcagagtttcatggcacaacacaaggctcttggtggccacatagattcaat

SEQ ID NO: 7982 - DNA, 365 bp, Glycine max
  Clone ID: jC-gmle01810029b11d1
aaaccaaaaaaccccagaattttttctggggaaagggaggaaaaaaccactgttgtttaaaaccaaaaggccctattcctcttttgcggggggggggggaaaggaggggttcccacaaaaaattctcaaaaaaggggcccgggcccccccgcaaaattgggggggggggggggggggccaaaaaaaaaaaagaaggggcgcccccatttttaaccatgccccccggtttgtcgcaaccccccccccggttaaaaaaccgggcccccgaaaaaccccccaaaaaaggggcgggggcccccaccccaaaagaggggggcccccactgtcaaccctggggctatcttcccccgggggcgccggggggg

SEQ ID NO: 7983 - DNA, 487 bp, Glycine max
  Clone ID: jC-gmle01810029b12d1
acattgtcgcaaaaaattcgggttaattgcaaataatactaaaaaatatgaaatcatgaaggattatgagtctgttagattacaaactgtcctacacaaccatttccatcacaaaatcctgtatactggtttagataatctacattagtatatattaatttctcaattcatgttacagttttcgcaataagggtgggatcaaaaggggaaacatttacagaaaatgagagcaacttagatgcctctaaaagtaggcatcccagatgcccctaacaggattttgttggacctgtgaccatattgacaacgcacaaaattgagttcttccttttcccatgaaagttcctgtatgccaagttaaaaaagcaagcatagaggcagccttcatgaatgaaaaaaactgaagaaggctcggtcggaatctacgtcctgtacaagagaaacaatcatatgtagttccgcacacatttaggttggaatgtaatgc

SEQ ID NO: 7984 - DNA, 560 bp, Glycine max
  Clone ID: jC-gmle01810029c01a1
cgaaaaatagctccaggcaacgtttgaaaccggatttgtcaaacccatccgacaaccatggagtaccgcaacaaacttgttctcgctcctatggtccgcgttatatcacttactgcgaggaaatcattgaccacaagatgctaaagtgcgagcgccgaattaacgaactcattggatccactgattttgtggagaaggggacaaacaatgttgtgtttagaacctgtgatgaagaaaaagatagggttgtgtttcaaataggaacatcagatgctgtgagggccctaactactgctcagctagtgtgtaatgatgctgctgcagcagatattaacatgggttgcccgaagtcattttctgtgagtggtggaatgggtgctgctctgttgtccaaaccagagcttattcatgatatcttaacaacattaaagaggaatttgaacacaccagtaacatgtaagattcgacttctaaaatcaccacatgataccgtggaattagccagacgaattgagacaactggtgtttctgctcttgcagtccatggaagaaaagtccca

SEQ ID NO: 7985 - DNA, 571 bp, Glycine max
  Clone ID: jC-gmle01810029c01d1
tagctggcggccgcccttttttttttttttttttttttaggatgcaatcccataatcaagtaatctccaaaggaactgggaagcattgattctgtaatttgtttacaaatgatgcatagtgtaaagtcactgaaaaataattggagtatacaaacatgtcacaattgattatattgttctatagtcaacacctagtatacattgcaagcacggaggcaagtgataaggaaaaattaacttacgctagatcagccatggactctgatttgatcacagccttcccttcaggcagttctagacaagaataatgtattatcatttcctttaatgtatgcttggtgctttttatatcattatcccacaagatgcacttcctaatatattctcttttcacagcttcataagaaactttgccctcgggcgaaaacattgaagcattccagagtgcccctctggcaaccatcactgacgaggcacctgtggcagatttaatgcgttcaacatcatcattctcaaaaacatcaccattttctataactggaatagataatgctgacacaacattagcgat

SEQ ID NO: 7986 - DNA, 527 bp, Glycine max
  Clone ID: jC-gmle01810029c02a1
ccgaggcgaagagaagagaaattttaagatggaggggaaggagcaggatgtgtcgctgggagcgaacaagttcccggagagacagccgattgggacggcggcgcagagccaagacgacggcaaggactaccaggagccggcgccggcgccactggttgacccgacggagtttacgtcatggtccttttacagagcagggatagcagagtttgtggccacttttctgtttctatacatcactgtcttaaccgtcatgggagtcgccggggctaagtctaagtgcagtaccgttgggattcaaggaatcgcttgggccttcggtggcatgatcttcgccctcgtttactgcaccgctggcatctcagggggacacataaacccggcggtgacatttgggctgtttttggcgaagaagttgtcgttgcccagggcgattttctacattgtaatgcaatgcttgggtgctatttgtggcgctggcgtggtgaagggtttcgaggggaaaacaaaatacggtacgttgaatg

SEQ ID NO: 7987 - DNA, 530 bp, Glycine max
  unsure at all n locations
  Clone ID: jC-gmle01810029c02d1
gccgccctttttttttttttttttgcatatatgactcgggggttatttttgattttgcaaattacacaatcacagccgtacatcacacgtgagctgggcctcttccaacttaaaagcagaggataacattggcccatgacgcaacacatgcaccacctaataatcataattntacatctttacatacaaaatacaaagactttaaattaaaattaaaaaaaaaaagataaacagatcatcttgatgaaatgaaaccgaaacccagaaacattgttttgattttttttgttgttcccaacttgattaagcatgaacggtttgattgaatcacttggacttgaagggaatggccctgattacgacctggtggtagagtgctgcaagtgcagcaccaatgaaaggtcccacccagaagatccagtgatcatcccaaccaaggtccttgttgaagatgatagcagcaccaagactacgagcagggttgataccagtgccggtgatagggatggttgccaagtgaaccaagaaca

SEQ ID NO: 7988 - DNA, 585 bp, Glycine max
  Clone ID: jC-gmle01810029c03a1
tgaaggcattcacagcgtaattttttgctgcattttaatcgatttatctaaccaggactgaatgacctaatggagtctaaaggtgggaaaaagaagtctagtagtagtagtagtaaatcaattttttacgaagctcccctcggatacagcattgaagacgttagaccaaacggtggaatcaagaaattcagatctgctgcttactctaactgttctcgcaaaccatcctgatacacatccggattgatagttcgttgcatgcaaccatagttttattaggattttttcttctttgttttcaattaggtttttttgttgctctccttcaaactccatctttccaaatcctctctttgcgattgtgttttgatctgcttcctactgcgatagtttctctactgttacatggccatggcggtttccgcaattggttttgaaggtttcgagacaaggttggaaatatcctttttccagccgggactttctgctgaccctgaaggaaggggtctaagggctcttacaaaatcccagtcgggtgagattctaacaccagctgcttgcaccattgattcttcgctcaaaaac

SEQ ID NO: 7989 - DNA, 418 bp, Glycine max
  Clone ID: jC-gmle01810029c03d1
gggccccaaccaaaggggaataataaccccttggggggtcaaaggggtaataaaacccaaaggggctaaaagccccaaggggttttaacaaaagcgaaaaaaggccccccaaaaaaaccaaaaccctttgggaaaacccaactttttttcaaaggggcaaaaaaaaaaaaccccctaggggaaccccctttcccaaattccccaattccagccctttaagggggctccgggggaaccccagggcctaaagtcccccaattttgggggaacaaaaaaaccccccctttaaaagccttgggggggccctcttttaagaagggttcccttaaaaaccaaaaagggggtttgttaaaacaactggggtggccccccccaatgaatgggaccaaaaaaccccgggggggggaaaaccgccaca

SEQ ID NO: 7990 - DNA, 534 bp, Glycine max
  Clone ID: jC-gmle01810029c04a1
caagaatggacctggcattctgtttagcagtacaagtgatgaagccaagaagcttgctgctgctgctcttgcagcagtgaaagatgatgctgccatggctgcctcaagcagggggaaacttgtgattactgaggttcgggactttgctggtcaagaaattgaagttaaaaagcttgtagattctgactcaaaggaggcaatggaaagagccaaagctcctccaccttctgcagtggatactgtccttgaacaaatcaagaagaaacagaagctcagtgtactggataagaccaaaaaggactggggtgaatttaaggaagaaaagagactggaagaagagcttgatgcttataagaagagttctaaccagtatttggacaaggtttctttcttacagcgagcagattaccgtgagtttgagcgtgagagagatgcgcgactggctttgcaatccaggatgcgaccagataatatgcatgaggatgactgaaggtagttgaagactggagttactacctttggagaattatgtat

SEQ ID NO: 7991 - DNA, 588 bp, Glycine max
  Clone ID: jC-gmle01810029c04d1
gtcttgaaactaagttcgaattgctttgcaagataatcgtgtcccgatatttactttagaggagaattcaatcagccaaataatggacagacacaaaatgagttctttgcaactaccttcagcgagtagtgaatgtcttctgaggctctcaaggaacgggaatgaactaatgtcagtctaaaatttatacttgtttctctctagcaccctatttttaccccccacatatagtaccatgtcattgaaaagcatttcaaatctcaaacctcaaaatccatcaataccccatttaatgtgatcaaaggtcttttacctcttttgagagaccaagaccttcccaggaactataactcactacaaaaccatacataattctccaaaggtagtaactccagtcttcaactaccttcagtcatcctcttgcatattatctggtcgcttcctggattgcaaagccagtcgcgcatctctctcacgctcaaactcacggtaatctgctcgctgtaagaaagaaaccttgtccaaatactggttagaactcttcttataagcatcaagctcttcttccagtctcttttctttcttaaa

SEQ ID NO: 7992 - DNA, 577 bp, Glycine max
  Clone ID: jC-gmle01810029c05a1
agtatatccaatggaatccgtgaatgttctcctgatgaggatcgtacactcccaatattgaagaaaatccttgacttgagtactaaaattcagaatttgaagaaacaacatgtagccctatctgatcaagtgaaactcacagctgagtcatttacaggcctagatgttttaaagtctgttcagcttcttggtactgaatatgaagtgttgaaaaggaagtacctagaggagtcctctgagcgtaggcggctttacaacaaagtgattgaactaaagggaaatatcagagttttctgtagatgcagaccactaaatgaaagtgaaattgcaaatggatcagcactatctgttgtcaattttgagtcaacttctgatgggcttcaagtcatttgctctgattcttcaaaaaagcactttaaatttgattatgtattcagacctgaagataaccaagagactgttttcgaacaaacaatacctatcgtcacatctgtattagatgggtataatgtttgcatttttgcatatggtccaactggaaccggcatgacctttactatggaagggacaccacagc

SEQ ID NO: 7993 - DNA, 555 bp, Glycine max
  unsure at all n locations
  Clone ID: jC-gmle01810029c05d1
aagtcacacgtaatttcaattgaagataatactgtcggggccgaattaatcgtgatcgtaatcattcatcagtggtgggtgtggacgacgcgttgggcccaaccttcctcagctgaatcccatgcttgtgcgactcatcatcctcatacacgtgcggcaaaattcagagaacaaagtgtctctgttaagtctgctgcacttggacttatctggacaaacattaaagttttgcaatcacctcctaaagagctctggagtatatgggtgagctttgagttcctgtaaggtatgtgggctgatttggatgcaagggcagaaataacatcaccaagtgctgatagagacttgtttatgaattgagattccttcagtctttctccttcagcttcagttttcaccacacgctcactgccagctaaatctactagccaaaggtgactcncttgtttctggccattgattaaattcttccctaaaacagtcactctcaacacacaatgagaacgactgctaagctcattagcactagtggatccaacagatctggcttggtta

SEQ ID NO: 7994 - DNA, 515 bp, Glycine max
  Clone ID: jC-gmle01810029c06a1
gagaattacagagcattttccaacacgattacacgaccgaatcaaacccctctttctctccgaagctgcttttaatatcgtactggccttcgattgttctcctctttaatacatactgttctctcttcgatttgagggaacagtacaagagtctgagcatcggttaacccaactgcacaggtaaggtgtctttatttcgtgtttctattttgtgtttctgcgttcgatttctccgcggctgtactgggttgttattggtcggacgacacgggttaattttattggatttttattcttcccctgtttttaaaatttgataaaaaatgatttttttatctttgcggggttctggattggatgagttatgggttgaagtggcatgattcggttggtgggggtgttgaaaggtgtgatttttcttggttcccttgtccggtttgagacttgtgttaattgctcatctggtcgatctttgttgctagacattggaagctgtaactgatctgtggaagttt

SEQ ID NO: 7995 - DNA, 514 bp, Glycine max
  Clone ID: jC-gmle01810029c06d1
gcagaccaagcaggaaatcaaattacaaaatgagccaaagtgtccatcaaagcagcacaaacacactggagctaacaagtggatctcccaaccaacaataaatgttttccctaatgatgcccttgccatcttgacttggatcattttaatcactaaaggacacctaataaaccaggaagacaacatatatgaaacttacatatagaagatgaagcttcaaggttcatacattaaccttcagtagtgcatgcctagattttgtcgagcttatctgccttaattatggggttggctttagctatggcattctgaccaacagtcctataatcaaaagggcaattatgtttatcagaatagcgatgcattgcacagaaaacgttgccacatttgctgttaaaaccagttaaaccaacacgtttccggcatgtagcacatgtactgggacctgtgttggttttcatttccaaactatcaccggaggacgaatccacagaactttgagcacagacaatct

SEQ ID NO: 7996 - DNA, 517 bp, Glycine max
  Clone ID: jC-gmle01810029c07d1
attactgatgatgcataattcaatataaaggcagtggagcaactgtgtaattgtacactgggcactgtgttatataaattaggacctaaaaaaggctatattttgtttggatactaaagctacttaagccagagggaattaaaaaaacccattcacagggtttgctcattcttcacttgtccaaacagcaattatgcaggatggtaattgcacctctctaaagtaaaatgcctttctcctttctcgtggcacttggaagatcaatcaaaacttaaaaggcttagcctaagtttggttttctgttattgtctgaatggctgagagagacacatgcatggaactttcttataggccactggaacggttggcatactcttgaactaatgccccaaagagagatggcctttggagcaagttggctggtgaatcaaattctttggcccgccctgcatctacaactagaactttatcacaggccattactgttggtattctatgagcaatgctgatgatggta

SEQ ID NO: 7997 - DNA, 563 bp, Glycine max
  unsure at all n locations
  Clone ID: jC-gmle01810029c08d1
aactaaaatactatttgttgtatttcctttttaattgctacttagtttatacaaccatgcacagcttgaaattccatagtcttgaccaacaactactatggtccaagaaaaaaaaatcgtcatctactaccttcaagcaacccggggttttctcatttcccttgggttaattgtggaattataacttatttggtccacaatagagcctctaaattttcaggtaataataacgtgactacaagggtaatgtggatcgtccaaaagaatggcatccaagacaatgctgtttccacctctatttttaactatcttttacctatattagcaaatcttctagcaacaccaaatagaagatactttgtcaccagtcccctatcaagactacaagcaagagcaacagcaccaccaatgactagcatctttggtatgttcatgccctgtggtttctcagaagcaaccaaactttcattctctgctgagttatcatcaccaccaatggattgcacgtactcaggacttatttntgtgttgacttgggccataaaggctgaatgagagagtgc

SEQ ID NO: 7998 - DNA, 527 bp, Glycine max
  Clone ID: jC-gmle01810029c09d1
gacaaaattactttacttcaaaagtatttttcacctgaaaagcaaacatgcactggggcagtaagctactatattgcaattgatctgaactaataaatagcattggcttaaaattgcattacatttaaatcctacctattagcctacttcctctatactgggggtatctctgcatacaccagaaacattgatcctatgactatgaatcattttcaaggttgaaaatactatttttctcctttgtttttacccatcgaattgaaactagcaagtagcaactgatgtccttaatcgtctcaatcagaagtcaggatcaaggatagtagacatcaaaagtccctgtacaaatttactgcgctgtgctttctctatttggtctttgtcagataaagacggttgaacatcttttactaacaccttatcatttgagtgtagttcttcaatgcttacttcacgtgaagaatctggctgcacatttttacgttcatcaacagcagatgcaccacataaaaatgacagccatggat

SEQ ID NO: 7999 - DNA, 504 bp, Glycine max
  Clone ID: jC-gmle01810029c10d1
acaagtgaaaaatttcctgggacatttattcattaaaagtcgaaactatatgaatattttgataactatgtatgtacatgggtggaaatgttagtggccagacctataagactcactctatagtaattctactaagtaactatgcccacccaaccaaaaatggctgatccctaaatagtaattgtttcatgaggtctgcacttcttaatcctgatattcatactgccattctttatgcttccaccacccaaaagttgacagcaatgcctacggggtacattcttccaatattctggatccagcttcaaggcagaaactctaattctttgcacttcctcattattagtgccttctctgttgcactttgcttccttgccttcatgtctcttgtagatagtgatacttccactttttcccacctttgtagcctgatccaggaaaaacctagctggctgctggcacgggtcagagctcataggtcgagtattgaatatgaagggacca

SEQ ID NO: 8000 - DNA, 515 bp, Glycine max
  unsure at all n locations
  Clone ID: jC-gmle01810029c11d1
aggacaaaaggaaaaggcaccaaattcaatttaagtggacactgtaactcaaaattatagaggaagacggtccaatatgaaaaatatagtaagatcatctcaaacttagcatcttctctttgcacctaagaacattgagaatgctaagaatgttacaccgcagttccatcacaacttctagcacttggattagtacaacaaccttcacgaacagaaatatttacttgccaagtttgctttgcctccaattcaagactggaagaaagttcccctctgaatagcatcctcgttagcatttccaagagcagcctcgttcaagtacttgtcagccaattggactctcttgacattctcttgttcttggacaagcatgttaccatacagcaagagcttctccagagtcatcttgggctgctcaaaggttggaggtccatcttttgagttcacaagcttcttcccaacactgtcaacaccaacaccagaaatccacttnctcacttcatcatcatatactc

SEQ ID NO: 8001 - DNA, 454 bp, Glycine max
  Clone ID: jC-gmle01810029c12d1
ggctcagaacaagaaacaaattatccattggtgaataaaatggcattcattttacaacaataggataagaagcgattcctcatacacgcaaaaaagtaactattaactagtaattctacagcttctaaatttccctaacctcagcaatgcatggattcaaaaaaacatgcctttgaggaatacacactatcatactatgtgagttaatctgcaatgatatcttcattctcacaagtatattatgtgaagatattacaccaaaccagatctacactgtacaagggatggggtcagaagatgggttttgcttacaaactgaccacatcatctccctgaagtggttaaggttctctttttagagacctcagaattgagaatcattgaaggtgaaggaagagattttgaaccaggagcaggagcaggttcggttcccaactcttcatctgcatgtgca

SEQ ID NO: 8002 - DNA, 349 bp, Glycine max
  Clone ID: jC-gmle01810029d01a1
ggaagtggggacagagaagttcattaagggaatgtacaaggaggcttgcaagatcttcactcgccaatgcacgtcaccaatgcttgatgattttctcactctggatgcttataattacattgtcgtgcatcacccgagggaaacatcaaagctttgaagtttgaactaaggaagtggttctttattatgcataataattgggtcctttagattctgtcttgtttgttctcctaagttgtctttgtctttttaccatcacttcatcgtttcatgaagggcctgggacgtcatataattgtgcgtggaagagaagaataaagttcgtcattgcagctatattttgaatgat

SEQ ID NO: 8003 - DNA, 349 bp, Glycine max
  Clone ID: jC-gmle01810029d01d1
atcattcaaaatatagctacaatgacgaactttattcttctcttccacgcacaattatatgacgtcccaggcccttcatgaaacgatgaagtgatggtaaaaagacaaagacaacttaggagaacaaacaagacagaatctaaaggacccaattattatgcataataaagaaccacttccttagttcaaacttcaaagctttgatgtttccctcgggtgatgcacgacaatgtaattataagcatccagagtgagaaaatcatcaagcattggtgacgtgcattggcgagtgaagatcttgcaagcctccttgtacattcccttcttgaacttctctgtccccacttcc

SEQ ID NO: 8004 - DNA, 527 bp, Glycine max
  unsure at all n locations
  Clone ID: jC-gmle01810029d02a1
tgcaattgaagttaaaagccttatccttccctacaactccaaacacaaagacatcatcatccatggctgcctccgtctccactgtcggagctgtcaacagagctcttttgaacctgaatggttctggagctggagcttcagctcccagttcagccttctttgggaccagcttgaagaaggttattgcctcaagggtccccaacagcaaggtttccggtggaagcttcaagattgttgctgtagaagagaagaaagagattgaagagacccagcagaccgacaaggacagatggaagggtcttgcctatgatatctcagacgaccaacaagacatcacaagaggaaagggtttggttgactcccttttccaagctccacaggatgctggaactcactatgcagtcatgagctcctacgagtacctcagcactggacttcgccagtacttggacaacaaaatggatggattctacattgctccagcttttatggacaagctngttgttcacatctccaagaacttcatg

SEQ ID NO: 8005 - DNA, 533 bp, Glycine max
  Clone ID: jC-gmle01810029d02d1
aaaggaaaaggcaccaaattcaatttaagtggacactgtaactcaaaattatagaggaagacggtccaatatgaaaaatatagtaagatcatctcaaacttagcatcttctctttgcacctaagacattgagaatgctaagaatgttacacgcaagttccatcacaacttctagcacttggattagtacaacaaccttcacgaacagaaatatttacttgccaagtttgctttgcctccaattcaagactggaagaaagttcccctctgaatagcatcctcgttagcatttccaagagcagcctcgttcaagtacttgtcagccaattggactctcttgacattctcttgttcttggacaagcatgttaccatacagcaagagcttctccagagtcatcttgggctgctcaaaggttggaggtccatcttttgagttcacaagcttcttcccaacactgtcaacaccaacaccagaaatccacttcctcacttcatcatcatatactctggccctcagtgcaccaaagaaatc

SEQ ID NO: 8006 - DNA, 632 bp, Glycine max
  Clone ID: jC-gmle01810029d03a1
attttatatttaggttacgaggatattatcatgaatccaattatttctgctgcttctgttattgctgctgggttggccgtagggcttgcttctattggacctggggttggtcaaggcactgctgcagggcaagctgtagaagggattgcacgacaaccggaggcagagggaaaaatacgaggtactttattgcttagtttggcttttatggaagctttaacaatttatggactggttgtagcattagcacttttatttgctaatccttttgtttaatcctaaaaaaatagaaatacatatccttttttccgtggacttgctttaccggtcttgctttttcgaattctatttatattaatatttcactcctataattctttatccgatcggacaagaacacaggggaaggactaattgaaaggtgaagaattcacatactgattcgccctctttcttctcttttttagtccaatgaccccccctttttttttatgaataattttctcaagtgttaatacttgagagattttgcaatggatataagaactggtatctaaatcgaataggtatcattctattagggaatcttccaattgattgaccaatccccaatatatatggatatatatata

SEQ ID NO: 8007 - DNA, 527 bp, Glycine max
  Clone ID: jC-gmle01810029d04a1
gataaaacattaactgttcactttcctgtcagtggaaaaacaaaacttgtcagagcttggcatctacgtccatcccgtttttggaaggatgggaaatggattgagtatcccaaggttggaaccggtgacagttctacccatgagggtgatacacctcatgaaaaacgacctaagttaggtagtcctgcagtagaggtaaaagggaaagacaggattccaaaaggtactaatgccgtggagtcggcaaatcctggcaagttgaggttacttgacttgactgaaaatgatagagtgctcaatattggtaagtacagcaagaatgaaaataaatctgatgcccacagaatggcgaggactggtcttcaaaaagaaggatcaagagtgatttttggtgttcctaaacctgggaagaaaagaaaatttatggaagtaagcaagcattatgttgcagatgggacaagcaagatcaatgatggaactgattcagtcaagctttcaaatttcttgatacctcaaggtactggatc

SEQ ID NO: 8008 - DNA, 569 bp, Glycine max
  Clone ID: jC-gmle01810029d04d1
atcaacaaacctttctataaacaagtcaacatggataaattccatatacagcctacaggattaaattaaatcatattgtaaacaacataaaatcaatattaacatctactggactagtctgcctaaaccgaaggaaacaagaatttccattcctatgttccctattataaaattataaataaatatacacatctatgccaagtgtgttggtctttcaactgaacagaaccgcgcacactgtaattcctcgttcaaccttggttttaccccctagaagttttccgattctggtttttgtgacccttttcatgtgaagcagaaggaatctttgagataattaaagagctctgcaatccttctaatagtcttgacgttggctgaatcctgcgaatggatctacgaggctcagtgttttcagatgttgatttcagtggatttccactgaaagctttttcttcatcaatcttacccagccttccaccaccagcaggcgcaagttttcctttacttgcccttgatgttgatggtcttttagcagggtgagaatcagtccaagcacaagtgatgaa

SEQ ID NO: 8009 - DNA, 539 bp, Glycine max
  Clone ID: jC-gmle01810029d05a1
ggataatattggccagttacagtatcctgagtgggctccaattaattgtcgagttcatcgacaaccaattcacatcactgaaggaaattatgtcagaaagcaagatgtcagcattgaatatgatgcatgtacaattccaaatgattgtggttcattggatgttgccaaagttggaaatcacaaacaaattgttggtttccatgttgctggaagcaaaggaagactgggatatgcttcattgataccatacgttgagccagttgtgcaagctcaaagtgctgaagtttactttgacttcttccctgtggaggttgatagtcaagagggagttgctcacattggtgaattgaaatctggtgtctatgttccactgcctacaaaaactaatttggtggaaactcccaaggaatggcaactggatctaccttgtgacaaaattcctagtgtcttgactacaactgatgagagattggtaggcacagaacatgagggatatgatccttatcttggggaattcaaaatatgccactcccatgatg

SEQ ID NO: 8010 - DNA, 607 bp, Glycine max
  unsure at all n locations
  Clone ID: jC-gmle01810029d05d1
tgctcggcggccgcccttttttttttttttttttatatttaaacacactcattgcacatagtaatgcgctttatttaagtgaataaaatattacatactagttcacaaatgcaaaaggacactcatcaaccagatatttgagactcttacagttctcaagaagtcgcgtcagcatagggttagtggcgttagaactcagaatttcattcttaacgccaaaaagaacagccagtaaagctactggaaaaggatcaactctagtaagaaaaacaattttcttacctctcccaagtgctgtgcgaatccttttgttgatatctgaggagcgattgttaactgcagaactaatccaagcagtggtgggtaaaccaccacgtccactaccacatgtaacatttacaacgacagcttctgaaggtaattgacttacaggataaagacaattcacaaaaattggtaaccaagaatccactggaaaatttccatcaaagaattcttgtgtgttagccaacacaagcttatcatcaaaaacaatcttgtttggaaaagctntacctgctccttgtaaacccaacaaatcaatgctcaacagtagatcaatattatc

SEQ ID NO: 8011 - DNA, 538 bp, Glycine max
  Clone ID: jC-gmle01810029d06a1
aggtattcgtgcgtggttggcggctcaagatcagcctcatgaaaaccttatattccctgaggaggttctaccacgtggaaacgctctttaatggaactttagctttaactggtcgtgaccaggaaactaccggtttcgcttggtgggccgggaatgcccgacttatcaatttatccggcaaactactaggagcccatgtagcccatgctggattaatagtattctgggccggagcaatgaacctttttgaagtggctcatttcgtacccgagaagcccatgtatgaacaaggtttaattttacttccccatctagctactctaggttggggggtaggtcctgtgggggaagttatagacacctttccatactttgtgtctggagtacttcacttaatttcctctgcagtattgggctatggcggtatttatcatgcacttttgggacctgagactctagaagaatcttttccattcttcggtatgtatggaaagatagaaataaaatgactacaatgttgggtattcacttaatcttg

SEQ ID NO: 8012 - DNA, 555 bp, Glycine max
  Clone ID: jC-gmle01810029d06d1
tggtcggcggccgccctttttttttttttttttttttttttaagaaaaaagaaagttctaattattaataaattatatctatatatatatatatacagatagatattctatatcttttatcttaattaatatttgacccctccttataatgtgttatagttttctttatttttaggaacttatccattccttttttaatgtgcccgacaatccgaaagaattctgggggaggggtcatttcgtttttgatctagaataaatagagcttcaagaaatgagagaattaagaatacccacgagaaacactaatccaatccataatgatgtaccggaaaatacaacatttttgttattcgaccaaccttcaggagaagcaaatacaacaggtacactaatcaataaaataaatgaaatagcaattaatgcaaaaacagctaattggaaagcaatagtcatgtttctaatcctccaatttaccaacaaaagaactttaccatttgatcccccaaccccttgatccctttattgacaaaataatttataataagaaaaacg

SEQ ID NO: 8013 - DNA, 514 bp, Glycine max
  Clone ID: jC-gmle01810029d07d1
ccgataaaatttaatgttattaagcaaacaaggggaaaaaagaaaaagagtacctgagttggttttccacgagacgagaagagacacgcgtcttgatagtgtgttccaaaagattcccgaacaaaaaggaacattctttttttaaacaatttcctttttgttgttgttgctgggggggttggtaaccaggataccccggataactgccatacatgttgggatcttgtgcggcagcgggagcatacccataattttcataaccttgtgcagaatacccatagtatccaccaccataaccagcaccagcattccagtggtttggatctgcctgagcctgtttgtttgaaggactgcggccccatgaaagactaacattttgaccacccaacagggtcccatgtaacacctgaagtggcttttctgtacagctcctgtatgggaattggacaaacccacatagcttgcctgctggaatctttgcatgcactaattctccatactggctgaaaacttg

SEQ ID NO: 8014 - DNA, 414 bp, Glycine max
  Clone ID: jC-gmle01810029d08d1
aaagactaaaatgttctatcttgctttccaatacaaaagtaacttgaaaagtaaataagtaaatgaagtttatcgtcggtattgagatgtaaaaatttgaccaagctattagtattatcttatagcccattctataatatccaaagcattggatctttgggggctccaggccttctttagaaacaggggaacttcctacactattgctatgatgccaaactttggcacttcttttcttggttacttcaagattctcgcttttgctaactccagggcttcttttcctcatagttacctcttctaataatcttttatcctcttgagaaagtttagatcccaaaggcttgttaatactgtctaaagatataaattgcaacatgtttgattgaaaatcaagtcgcctatggaaggtgc

SEQ ID NO: 8015 - DNA, 442 bp, Glycine max
  Clone ID: jC-gmle01810029d09d1
gggagcaaactgctattatcattgctttataaaatttgcaattctgaaatgcaaatcaaacaaggcttggtactattattttttatatttcaactttaccgtaaaaggacatgagcccccttatggggcttgaaaagaaaaatctgtaacaggagcatgaccataagctggagaaagttcaaatgaaaaatgttgtaaaatcgttgacaaagccatttttgcctccaacaaggaaaagttttgtccaatgcatattctaggaccccatccaaatggaaaaaatgaaactctgccatttgtggccttcaaaactccttcagaaaatctctcaggtttgaattcattcacatcatcaccccagagttcgcggtcatggtgaaccataattgttggtaaggaaacttgcactccaccaggtaatgataggtttccgagtttcata

SEQ ID NO: 8016 - DNA, 215 bp, Glycine max
  Clone ID: jC-gmle01810029d10d1
gatagatctttatgttttttttttgtttttttaaaaccaaaacgggacagcgggggcccccgggcaattaggcgccgggggccccgggacccaccccatagcaacgggggggccagggggcaaaaagcaaaaaacaccacccgccaggggggggccgggaccagcgcccacaattcaggcaacgcgggggggagacccccggcccgaaactcagg

SEQ ID NO: 8017 - DNA, 396 bp, Glycine max
  Clone ID: jC-gmle01810029d11d1
caattaaaggggaccctttaactcaaaattatagaggaagacagcccaatatgaaaaatatagtaaaatcatctcaaacttggcattttttttttgcccctaaaacatttgagaattctaagaatgttacccgcaagtcccatcacaacttttagcacttggatcagcacaaccttcaggaacagaaatatttacttgccaagtttgctttgcctccaattcaagattggaagaaagttcccctgttaatagcatcctcgttagcatttccaagtgcagcctcgttcaagtacttgtcagccaattggactctcttgacattctcttgttcttggacaagcatgttaccatacgtcaagagcttctccagagtcatcttgggctgctcaaaggttg

SEQ ID NO: 8018 - DNA, 402 bp, Glycine max
  Clone ID: jC-gmle01810029d12d1
aacccataacaaaaaacattttttaatttacaaactttttttacaaagggaaaccaaaaataccgcaggggaaaatttttttctttagaaacttctccaagaacaaacagataactggatttattatttttcagaggcaaggcaagctttttgatacattataccccaaaacaccaacaacagttcttaggggggcagtttttacattgtactttaacatgaacgcgttataagggcggataaaagcaaattccttcaaccccgggccttaggggttaagcccagcacaatactttttgacttaaacggggacacaattcaacaattttttttaaagccctacgggtttgctgaatttgttcataattttagagccttgttagggtaaaaacacacattttt

SEQ ID NO: 8019 - DNA, 337 bp, Glycine max
  Clone ID: jC-gmle01810029e01a1
agggaaactgcctttgcaatcattaagttgcccttggtcaaggctaaaaggtacttggaagatgttcttgcccacaagcaggcaattccattcagacgtttttgtcgaggtgttggaaggacagcccaggctaagaatagacactctaatggccaaggacggtggcctgtcaagtcagcaaaattcattcttgatctgctcaaaaatgctgagagcaatgctgaagtgaaaggtttggatgttgatgcactgtacatttcgcatatccaagtcaatcaagcacagatgcaaagacgccgaacataccgagcccatggaagaatcaatccttatatgt

SEQ ID NO: 8020 - DNA, 517 bp, Glycine max
  Clone ID: jC-gmle01810029e01d1
aacaatcgatttatcttctaatacttagtatttcttttgaaactacttttaaatatccatccaaaggaaacaccgaaagaaatccaaactaagtttttcgaataacttaaattaatttgaagcatagtataaaactcataccaaaccataacaaaaattaaacaaacaaaactctcctcttgacataatctaggaatattgtgcctcaaacaattaagttgtattctatgacgaagcgccacttcgaagagcttgggatttcttgcttgttgttaacttagtctcgggctccttcttcacaggttcttctttttcagataatattaactctatgtggcacggagatgacatataaggattgattcttccatgggctcggtatgttcggcgtctttgcttctgtgcttgattgacttggatatgcgaaatgtacagtgcatcaacatccaaacctttcacttcagcattgctctcagcatttttgagcaaatcaagaatgaattttgctgacttgaca

SEQ ID NO: 8021 - DNA, 515 bp, Glycine max
  Clone ID: jC-gmle01810029e02a1
aagtagttgagaactaataaggttaagcaaatggcttcctcaatgatctcttccccagctgttaccactgtcaaccgtgccggtgccggcatggttgctccattcactggcctcaagtccatggctggcttccccaccaggaagaccaacaatgacattacctccattgctagcaacggtggaagagtgcaatgcatgcaggtgtggccaccagttggcaagaagaagtttgagactctttcctacctgccagaccttgatgatgcacaattggcaaaggaagtagaataccttcttaggaagggatggattccttgcttggaattcgagttggagcacggtttcgtgtaccgtgagcacaacaggtcaccaggatactacgatggacgctactggaccatgtggaagctgcctatgtttggttgcactgatgcttctcaggtgttgaaggagcttcaagaggctaagactgcataccccaacggcttcatccgtatcatcggattccacaacgt

SEQ ID NO: 8022 - DNA, 388 bp, Glycine max
  Clone ID: jC-gmle01810029e02d1
agcttattcattagttctcatccattaatttccattgaagtccgaaaacagaaaccaaaaatacaggatgatgaaatctcaaaaagcaaaaacaaatgggaatgtagtttaagtacaaacaaacgaagtggggtggcggttactaatgctttgcaaatctttcacacttagaagcctgggggcttgatggcgatgaagctgatgcactgcacttggcgaacgttgtcgaatccgatgatacggatgaagccgttggggtatgcagtcttagcctcttgaagctccttcaacacctgagaagcatcagtgcaaccaaacataagcagcttccacatggtacagtagcgtccatcgtagtatcctggtgacctgttgtgcttacggtaca

SEQ ID NO: 8023 - DNA, 144 bp, Glycine max
  Clone ID: jC-gmle01810029e03a1
gactagttcgagatctctagcgttcgctctttttttttttttttggacaatttattactagtatagtaatccattccctaaatctataaacccctccctctttatccactaattactccactcctattatcctatttcagctct

SEQ ID NO: 8024 - DNA, 425 bp, Glycine max
  Clone ID: jC-gmle01810029e03d1
gtctactgtcattttttattttaaataccgcgactaatcacataaaatttgtgtttgttctttttatatttatattatttatatttttattttttgtacaatttattactagtatagtaatcgatcgcggataactatggccccctacgtctcacagcacggatcccacccatttcattactcagctcctcttctgctggcgctactccgggaagctacgtgggacatcgccagggagggctttcgcaggcaggcccgggacccctgggggaagagcttggaaaatttggggagttttcggccgccggtcacatgtccttggctgggcaccttctggtgccaaatctgccaaagaaacccaccgggaatgtgactcatccctgatgctgaagccataggtccatctacccacttcccaccacctg

SEQ ID NO: 8025 - DNA, 450 bp, Glycine max
  Clone ID: jC-gmle01810029e04a1
gtggtgatatagggaaattgtgatttgagtgttcattttgagcagggtgatggatcgtgtgacgatggcgtggctgctgctgctgctgttgagagtgatgttagggaggagattgtgaaggggttgagtgggcttagagttggtgaaagggttgtttctgagagtgaggcttcgagtggggattcttcttccctccttgatgctggtggtggttcgtgtgcaccgccgactcctgtgccgcctgccaagccttccgtgacagggaacctgtatccgaagaggagtgtgtccgggcgtatgatttccggcattgtggcatcctcgaggatgccttggccgatcgatgcggctctgtcttcgtctgctgggtctaagcgcgcttctcccgagctacatcctgcatgtgaggggttcatcagtgctgatgagcagaagccttgcctggtttca

SEQ ID NO: 8026 - DNA, 533 bp, Glycine max
  Clone ID: jC-gmle01810029e04d1
agccaaataaaattgtatcattgctcagttttttctttctatatccgtcataaatatgccagataccaaattaaactacagagtaagtagcttgatacagggttatttatttaactgatttggttgcaattcaaaaactatagatatggatatttatttaacttgatggcatgtcattcagtggccttgcctttacgtctgctgctactgccggtttctaacaggtaacaaaccattgaatcaacatcgtgcccaaatatgctgtaagcctcaatcgcttgcatgtaactgaatcccattgatagtaacatctgcataccgctactaagatcagaaccatgctctatcccatgttccgtcttgcgatcagtgcccgatgatcctgttgctccagaagatgatggttcagcatttgaggtagaggattctctattgccaagctgttgcttaaatgcactatctgcaaggtactcagcttgagaaactttgatcaccatgcgttgaatttccttttgtgtgagctcaagatcaga

SEQ ID NO: 8027 - DNA, 477 bp, Glycine max
  Clone ID: jC-gmle01810029e05a1
atctccaattgcaacattctaagtgggttggctggtttagatctgagcaacagcttttaattttctacttgcttgaattttattggaagccatggattgttcatcatggattaacacttccttggatctcaacattaatccccgcagagttcatgaagaagttcccaaggaggtagaaagcgagcttttctctttgggaatgaccaagtttaacgtggaagaagagtctactagtgacttggaggaggaactgaagcgggtgactgcagaaaacaagaagttggccgaaatgctctcagtggtgtgtgagaactacaacactttgagaaaccatttgatggaatgcatgaggaaaaatggtgaaaaggaggtcagcccaacatcaaagaaaagaaagtctgaaagcagcaacaacaatagtaatttgatgggaactaacaatggaaactcagagagcagttctactgatgaagaatc

SEQ ID NO: 8028 - DNA, 434 bp, Glycine max
  Clone ID: jC-gmle01810029e05d1
gaaattaaattgccgtagagatgcactttatgaaagatctttccgagaatgtgtgctacaacctactatgaaatttaatttgaggtatcctagatatattagccaaaaaagacttgctaaatctttaccatcatgatgaggcagaaggtggtgcagagcttgattttctgttgtttaatcagctcaacatgtcatccttagtggaactttatttccactttaaaggatcaaatatgtcccagccttccatgttgtatttacatagagagaccccttgctctaaagaatgatctctattttatggaatacttaaacaattgacactaaattagcaacacttcaccaaaattccatttaattattgtgcaacaatcttcctgagatggcagcaacaagtgctgctctaaaattaggatccgtggtcaaagaagtag

SEQ ID NO: 8029 - DNA, 466 bp, Glycine max
  Clone ID: jC-gmle01810029e06a1
ccgaagttaagtctgtgttaatgcaccatgaagctctcacagaggctcttcccggtgataatgttggattcaatgttaagaatgttgctgttaaggatctcaagcgtggttatgttgcctcgaactcaaaggatgatcctgccaaggaggctgctaacttcactgcccaggttatcatcatgaaccatcctggtcagattggaaatggctatgcccctgttcttgactgccacacttcccacattgctgtcaagtctgctgaactcatgaccaagattgacaggcgatctggcaaagagcttgagaaggaacccaagtttttgaagaatggtgatgctggttttgataagatgattccgaccaaacccatggtggatgaaactgtctctgagtaccccccacttggtcgctttgctgtcagggatatgcgtcaaactgttgctgtgggagtcatcaagaacgttga

SEQ ID NO: 8030 - DNA, 394 bp, Glycine max
  Clone ID: jC-gmle01810029e06d1
aacggggcttaattttttacaaatttttggtctgttatatattttttctgtttatttatattatggccccaaaacccgggggggtaaaaaaaatagttggcagaggggaaaaggaataccacccttgtccaaaaagggggaacaggggggtttgccccccacaattaaaacccccaattggggaaccaaaagttgccctatgggggggatgactgcaggatttgagaaaaagatgggaacctatgatccaacccctaggggggaaaaacgccactttttttggccccctaaaaaggcaatccctggtgggaccaaagccgcgaaattccttgtatctgggggaaattcctgaaaccggtgtcccggagcaagctccattccttcgccatttcag

SEQ ID NO: 8031 - DNA, 527 bp, Glycine max
  Clone ID: jC-gmle01810029e07d1
cctactccaatgaacatgacaatttcatatattattattatacttcacaatcagcatttttttgttcaagactgataataaccattaaattattgccattgtaacaatcggaaaacgagggaaagggatttgaaaaaaacaatggacaacccttggccagttagtggcaccacccaacaaggcaccaaccatagtaccaatcaaaaggtaaaaagagagagagaccaaatcctactaagaaaagcataactgttcctttccatccaaagggagaaaacatgcaggttttgctcatggcttccacagaatggttgtgtctgcaatcatggaagtaaccacgtatgggtccatgttggaagctggccttctgtcctcaaaatatcccttccctgctttctctgtgtctctcccaaccctaacagaagctccacggtttgcaactccccataagaaggtgttgatgtcagcggtttcgtggcgtcctgtcaaacgacgttcgttgccttctccataagcagaaatgtgct

SEQ ID NO: 8032 - DNA, 385 bp, Glycine max
  Clone ID: jC-gmle01810029e08d1
gtgataatatatttgttctaattggtgcatttccctctgatgtctaaatggcattagtaattaaaattagaacgaccctaaaccttggtttccaccccctcacagtcacttttgccttcatagcaatcagcccactgttaacttttgcacatttttgtaaggaatatcgaacgggcaacaaacacaaacaagaacaaattcaccgtggctatggctgccaatagccaatagaatttgtccaatcgactactattcaagtccttaccaaaccaacttttcccactcttcttagtgatgtgatcaacaactgttatcagcatactacttaggaaactcgctgcaccaattacactaaggtaaaatgctatgcctaggcttctcattg

SEQ ID NO: 8033 - DNA, 499 bp, Glycine max
  Clone ID: jC-gmle01810029e09d1
gcacagaaacatacaaatttattacatacataccatgataagacatgtatttgaatatacataatagactatagcccaaatcttataaaaattcaaatcttttgccaaagaacccaccaccggtgtgtgaaaaactctacccagtcctaaaaacaaaacctacctaagactcagaggcacatctacgtcattcattcccaaaggccaaatcaagaacaagcatatataagcattatcacatgatttcatggttgaccacaaaagagatcaccagcattatagtgtttgaggccttctatgttgtcaacatctttgtgtggtgaaatgctgcacaagtaacaactgatgatgatgctttttccaggtgggagaaacacacaatcaagaagatggatggccaccgataaagaacttcgatgcgtactgcatccaaccaattctggaccaagagtttgtacacatccttcatagccagatgaaaccaagatgctgtttcagc

SEQ ID NO: 8034 - DNA, 480 bp, Glycine max
  Clone ID: jC-gmle01810029e10d1
cattccaaaaccaaatttattactaaataagaataagattcgaatccatcccaagttactcactaacacgaccacattgtcataagacaaaaaaagatacagaaactacataattacaggagaaatctaataggtcatgttacttgaagttttcccgaatcaattaaaggcgaaaaaaccaaacaaaacagaaaccaacgatttttcagtaaccattctaacaaattccacatggctatgtagcgggatgctttgttcagtcctgaagaaattgctaggatcaaccttggtctttatttgaaccaaccttttgaagttatcatcgaaatattggactccatatgcactcccttcaaagtagccatagaaaccgtggtggttgatgcccaattctaagtccttgtaacatataaaagcttgtcttggattctgagacacaaagggtgtcatgtatttgtgaagttctcttaccaagtttat

SEQ ID NO: 8035 - DNA, 454 bp, Glycine max
  Clone ID: jC-gmle01810029e11d1
accaaagtcaattttcttttctgtttttttttttttctttttcatccataaaatttttgatgaaaagtttatattacaagagtactcagtacaagtggcagtctattctactctacgcgtatatgtatgtatggagctatacatatacgtagtatcatacaaactctaacgactaactaactagtgattaattacttatatgcaaagaaaggcgcttcaataaccgcgtcttctctcattcactcgagcgagtcgactcagtgactcactaccagcactgatccgtttcccagttccgacgcgtgtaaccggagaacaccgccgccgtcgacaacggccgttgtcgccggaataggctccgatcgtagttagcgcgcttgtcgggatcagaaagagtagagtacgcggcgtggatcttcatgaattcgtcagcggacgaatttttccggtcgat

SEQ ID NO: 8036 - DNA, 469 bp, Glycine max
  Clone ID: jC-gmle01810029e12d1
accaaagtcaattttcttttctgtttttttttttttctttttcatccataaaatttttgatgaaaagtttatattacaagagtactcagtacaagtggcagtctattctactctacgcgtatatgtatgtatggagctatacatatacgtagtatcatacaaactctaacgactaactaactagtgattaattacttatatgcaaagaaaggcgcttcaataaccgcgtcttctctcattcactcgagcgagtcgactcagtgactcactaccagcactgatccgtttcccagttccgacgcgtgtaaccggagaacaccgccgccgtcgacaacggccgttgtcgccggaataggctccgatcgtagttagcgcgcttgtcgggatcagaaagagtagagtacgcggcgtggatcttcatgaattcgtcagcggacgaatttttccggtcgatggccgccacgtcggg

SEQ ID NO: 8037 - DNA, 550 bp, Glycine max
  Clone ID: jC-gmle01810029f01a1
gtagatttcaaagatacttttgtttatgctgatcacttaaaagaaagttttgtggattatgaggtgtcttttgttaattctgatggctcagaaaatttgaatccaaggcctccttttaagatcaagcttccccgaacactcaaacctaacaatggtactcttactgggcatgcaatgtctacttccggtgcaacaaatgatatcaatgtggttgatgcaaattatcagaaagaagcactagttattgagacatatactcctccagatcctggcccctatcctcaagatcagcccaaacaaaatttagttagattcacacccacacaggttgaagcaatcatctctggcattcagcctggtctaactatggttgtggggccacctggtacaggaaagactgatacagctgtacaaattctaaatgttctttaccataattgtccttctcagagaaccttaataattactcattcaaatcaggctttgaatgacctgtttgagaagattatgcatagagatgttcctgcacgttatcttcttcgacttggtc

SEQ ID NO: 8038 - DNA, 399 bp, Glycine max
  Clone ID: jC-gmle01810029f01d1
gcgagtgaaagtggattagtgattaattgattcggtaaaatatactgactacaattggtacatacaaaacacgaattcctccacctgacctacatttaaaatctaatttgctatagctacatcttgtcaatttggcattgattaatctagtcatagaaacgccatgacccaccacaccagttatgtaactaactggaaaacaaaaacaaaaatcaaatgtgcaatgaatgcttgcttagcagcacctacaccagtctcctcatttgaagggcttctatggcgatgggttcccatttgcaacaccatcactattatcaaccatggtaacatcttccacgttgttatatccagttacattatcaacagttgtagcttccttgattttatgtggcatgtcgt

SEQ ID NO: 8039 - DNA, 537 bp, Glycine max
  Clone ID: jC-gmle01810029f02a1
gtacgatcatcctgaaccacaatttggtttacaagacacgcacgaagcccaagaacagcaagccatttttcaacgcgggatgtgagcgtttcattcgtgacgtgcgcaacaccgaagtgcacattgctgtccgcgatgcgcgcgttcacgaagatgaccctctgcttggcatcatttacttgccactcgaaaaggtgttccattcgcgcagccagatcaattccacgttcccgctggctggtggcgtaagctatggtcgtgcacgtgtgtctatggtattccgcagtgtgcaatgtcaacttcctaagacactgcttggctgggattgtggcacactcgacattcgtcccacaatcaaaggcattgatgttcctgaggatttgaagaatatgcgcttgaaggttcgcaaccgcacaacacgcggtaagatgaactctcgtggcaacaatgaatggtcgacaaagaataataagccaatttcgctacccgtgcgcatgcgctatgcagcacctcttatcgtcgaattccgacaggacg

SEQ ID NO: 8040 - DNA, 402 bp, Glycine max
  Clone ID: jC-gmle01810029f02d1
attcgatcactttgatagttactatgtaaattatgatcccaacacatgtcctctacgcctcggtctcaatcccgctccccgtcctctcatgatgcttaaatagtcctccgaccttattcttccccctttcgccgacatgcttcatccacgccatcgtcctcggtcccttccactgcatcatgccccgattcttgcggtgcaggtgcttcgcgttgtccttgtagtccttgacctggtctacaacgccacgtttgccatcttcattgagacgggtgtctgtcttattgtccttttgcaagaaatcagggaggaagttggacgagtccgagtctgagcccgagtcactgccgtcggatgagccttccatgtaggagctgttggcacgtggagacctcggcttct

SEQ ID NO: 8041 - DNA, 576 bp, Glycine max
  unsure at all n locations
  Clone ID: jC-gmle01810029f03a1
gtgaaaatgttcagaaaccagttttacacggacgtgacgacatggagcccggcggggaggctgttccaggtggagtacgcgatggaggcggtgaagcagggctcggcggcgatagggctccgatccaagacccacgtggtcctcgcatgcgtcaacaaggctaactccgaactctcatcgcaccagaagaagatcttcaaggtcgacaaccacatcggcgtcgccatcgccggcctcaccgccgacggccgcgtcctctcccgctacatgcgatccgagtgcatcaactataactacacctacgagtcaccgctccccgtagggagactcgtcgttcagctcgcggataaggctcaggtttgcacccagcggtcatggaaacgtccttatggagttggactcctggtagctggattagatgaatcaggagctcacctctattacaactgtcccagtggaaactattttgaatatcaggcttttgctattgggtctcgctctcaagctgcatagacatatttggaacgcangtttgagaaatttgtggctcttcacgagaagatctgatcaaagatg

SEQ ID NO: 8042 - DNA, 550 bp, Glycine max
  Clone ID: jC-gmle01810029f03d1
cagcctgaatttcaataatttttgtaaatcatgcattcaagttcatcaaacagctataaaatcgtttacaatgagcaggcatggatgaattgaaaaaacaaacaggaataaggggaaaaaaattccatcaaagaaatatcttgtcccatgacacatgaaacctactcgtctttaaatattggtattcaacacctctagtacttaattttaaattatcaaatgtccataggagaaccaccttggtctacagcagcagcaccaccaccaccttgatctgcagcaccagcagcagcacctggatctgtgggagcatcctgtccggctgctggctgagcttcttcttcagctggagcagcttcttcctccctcacaatctcaaaagtatcaatcaactgttgaacagtttcctgatccaaaatgtggaatggctcaccaacaccaaccacagcaattgtgcacacagaactcctgagtttttcaccttgcaaggactccctagttgcaataagtgcatctttgatcagatcttctcgtgaagagcccacaaaat

SEQ ID NO: 8043 - DNA, 481 bp, Glycine max
  Clone ID: jC-gmle01810029f04a1
tttgctttgttgaagattttttgtggttattcgcgttttcttcttttgcatgttcatttctccgtcgatcagtgaagtgtgaaacgacgccgtttcgttgctctcggctcgaactgatggagtgggtttctctgtgatctcgagggggagttcggcgatgtgtgagctaattcggtgcctggtgttagattctgctttcggatatgcgcatttttttgctcgaattatatgaaatgtttgattggaacgacgaagagctagcttacataatatggggtgaaggaggcgagagcgacgatcatattgcgccatatccagaggtgaatgaagatgttagcaacataaaagagtggaatcaagaagctgctgcgactaagctcaccaagctgaagaggccagaggctaaaactgattatcatgaaagaaagcttggaagcagttccaaccttgataatagtggagaactactaacctcaggata

SEQ ID NO: 8044 - DNA, 472 bp, Glycine max
  Clone ID: jC-gmle01810029f04d1
gaacgtgaccattccatatattattattatacttcacaatcagcctttcttttaatgttgggtagttccttcaccttttgatgaactgaatttgctaaggtcactttaatttttagatgcttcaggacccagggaaccctgagcaatgttagctgaaggggataaagacaagtcaggccatgcatttgttccatatcctgaggttagtagttctccactattatcaaggttggaactgcttcctagctttctttcatgaaaatcagttttagcctctggcctctttagcttggagagcttagtcgcatcagctttttgattccactcttttatgtggctaacatcttaatttacctctggatatggcacaatttgatcaacactcttagctccttcaccccatattatgtcagctagctcttgggcgttccaatcaaacagtttatattattcgagcgtaaaaatgcgcaaa

SEQ ID NO: 8045 - DNA, 571 bp, Glycine max
  Clone ID: jC-gmle01810029f05a1
atcgaaacatatcacatgctgcttcaacacctgtggtacagtatggccatcaaaagcagcaaaatttcaacttcttgtccttgtcagcaggaagtaatgggttaaagctcgaaaataattataataaaataggaagtatgttggaaccattatcaaaattgcaagtgccttatttacagtcactagcacctctgcatgggggcataccaattcctgctgttcagagacagtatgcctcaacttcttaccttgatcagctttctgttgcaggaccagaggttcggttgcagcaacctcattattttggtaacccgttatacggaactcattatggttcaacagtctcacataaacaacaagagcaccaaagcttctggggggtgcaacaagcagaacaaggtaggtctacagtaaatttcaatattttgaggactcaatatcctaattggcaaagtggaaggcatgactcttctgcattgagtccatgtgcccaagccatcctatcttgttcccctgcatcacatgaaatatttggattcaagatcacttcaatctctgggcaacagaagca

SEQ ID NO: 8046 - DNA, 538 bp, Glycine max
  unsure at all n locations
  Clone ID: jC-gmle01810029f05d1
tgcattgatggcatngnntncccctcgaggtcgacggtattaatcggcggccgcccttttttttttttttttaaagtataaaacttcctcttgtatattatttctttcctcgaaaacaaacataccctaaaagctggatgtgtagaagtataaaataactgaatcgttttcaggttgctcatcactttacaatcgcatatgcagtgactctaatttcttcacataatgaagggagatgacgaaggtctagtccatttgtcttggaagggggcaagtagctgcttctgttgcccagagattgaagtgatcttggatccaaatatttcttgtgatgcaggggaacaaggaaggatggcttgggcacatggactcaatgcagaagagtcatgccttccactttgccaattaggatattgagtcctcaaaatattgaaatttactgtagacctaccttgttctgcttggtgcaccccccagaagctttggtgctctggatgttatgtgagactgttgaaccataatgagttccgtataacgg

SEQ ID NO: 8047 - DNA, 551 bp, Glycine max
  Clone ID: jC-gmle01810029f06a1
cggggctaagtctaagtttagtaccgttgggattcaaggaatcgcttgggccttcggtggcatgatcttcgccctcgtttactgcaccgctggcatctcagggggacacataaacccggcggtgacatttgggctgtttttggcgaggaagttgtcgttgcccagggcgattttctacatcgtgatgcaatgcttgggtgctatttgtggcgctggcgtggtgaagggtttcgaggggaaaacaaaatacggtgcgtcgaatggtggtgccaactttgttgcccctggttacaccaagggtgatggtcttggtgctgagattgttggcactttcatccttgtttacaccgttttctccgccaccgatgccaaacgtagcgccagagactcccacgttcccattttggcacccttgccaattgggttcgctgtgatcttggatcactcggcaaccatccacatcaccggaactggtatcaaccctgctcgtagtctaggtgctgctatcatcttcaacaaggaccttggatgggatgaacactggatcttct

SEQ ID NO: 8048 - DNA, 496 bp, Glycine max
  Clone ID: jC-gmle01810029f06d1
actagtcggcggccgccctttttttttttttttttttttttttttttttttttttttttttttttttttatatgactctggggttatttttgattttgcaaattaaattacacaatcacagccgtacattacacatgagttgggccttttccaacttaaaagccgaggataacattggcccatgacgcgacacatgcaccacctaataatcataattttacatctttacatacaaaatccaaagactttaaattttaaaaagaagaaaagagattaacagatcatcttaatgaaatgaaaccaaaacccacaaacattggcttgatttttggtgttgttgttggtcccaacttgattaagcatgaaccgtttgattgaatcacttggacttgaagggaatggccctgattacgacctggtggtaaagtgctgcaagagctgcaccgatgaatggtcccacccagaagatccagtgttcattccaaccaaggtcctt

SEQ ID NO: 8049 - DNA, 426 bp, Glycine max
  Clone ID: jC-gmle01810029f07d1
tgtgtcgtccttttttttttttttttttttttttttttttttttttttttttttttttttttttgttttgggaagctttaaaagagggtttcctttttttttaaataagcaaggcgccaacggaaaaagaggaaaagcccgggggaaaccattccctaatagagaagggcagggggcgaaaaaaaagggcccaaccccaggggcccaccccccaaaaatggaaaaggcaaaaaagggggcggcccggggcggcccaaaaaaacccaaaccgaaaacccccccaacgggggggggcgggaaaaaaaaaaaaccaagtttgggtggaccccaaaaacaataccgggggggggggtccccaacgattggaccgggaaaaccccggccaaacccaaccttggggccttgcaaacaaacccctgggggcaa

SEQ ID NO: 8050 - DNA, 487 bp, Glycine max
  Clone ID: jC-gmle01810029f08d1
ccatacaaagtactagactatttatctgtaccatttaacttatttattaagattggtaaactgtttttctcagttaattaaatttacaaaacatcattcccaaatctaacccaaataacttaattaggggaaaaaaaaaaaaaaacccttattggggatggtccctcctctccttattttaccaagccattatacaacagtagccggttgtaggtttcaccaacacaccagcatttacataaatttacaaaaagtggaaaaaagaaaagttatctataggatagttttaccatatggatgccatcacccttcctccctttatacaaggaccacagcagatacagataacaaatctgcttctttttttttttccagccagctacctggtggtaaggtgctaggagcaaataatgaaaaagatcaaatcaaagaaagcataatgccaaaagcaaatgttgcagtcggcatgaagctgcttaaactagtg

SEQ ID NO: 8051 - DNA, 417 bp, Glycine max
  Clone ID: jC-gmle01810029f09d1
ggtggaaaccggaaaaaaaggggtttcctaccccccccccccaaataaattttccccaaaaggaaaggggggggggggaaattttaggggtttattaaagggggggggaatgggaaggggaaaaaaaacccggcgcctcttataagaaaaaaagtgggggggggggggggaagaccccaaggggggggggggggtttggggccccccgcccaaatttttttagggggggggggggacccgggggggggaaaaagggggttttttaccctctggggggggggagggggggggcccctttgggggggggggggggggggcccccccccccccgggggaggggcgggggccctaaaaaaattctttgggagggccggggggcgtccttttggcggggggggggagataaagggggggggg

SEQ ID NO: 8052 - DNA, 557 bp, Glycine max
  Clone ID: jC-gmle01810029f10d1
gccaaaaaggacaataaagtttctagccttattttatatattgctggattgatgtttttagctacattggtatgtgccagagataacatatataacaagtgtatgtattatagcataatccttagtttaggggcaaaaaatgttcctccaacatgaagggtttaaaaaacttgaccaagtcctttcccttgcacagaccataatatcactcatcaggatgaaagcactccatattgatcagtctgcttaggtagtgtagaagccaagaatttaccattggtacttagcagcaacaagaacctcctcatactgctgagcagcattgtcccaactaagatcctgcgtcatccctcgccgttgaagcccttcccagctctgcttatactgcctgaaggtcaacaagcagttccctatcgcgtttattaacttgttagtttctgcactgtcaaatgtccatccaaggcctgactctttaaacggattaaaagggcttacagtgtccctcagtccaccgacagcatgtacaactggaattgttccataattcatcgcataga

SEQ ID NO: 8053 - DNA, 547 bp, Glycine max
  unsure at all n locations
  Clone ID: jC-gmle01810029f11d1
acacatataaacttcttcattcactatatttaaaattaaattagccttacaataatacaacatttggacaaagaaatacagtagcatctaatgctccagtcaaggagcaaacctaaaaatgccgggaaaattcttgagggaaaaagaaagtaaaatttaacttacacacagcctaaaaataacaagagagaaatagtatgttgtcatcttctgtcattctcctggtaccttaattaatgcaaacattcattatctttttttggttttccacatgtttcattctttgaaaacaatagtgttgtagacacagtcaaatagtaaacatgggcacattttcctgttgaaattcgaactttggttcaccaagttgtgggatactagtctcttctgctagacccaactcttgatcatataagcattcattattatctgaatgtctgttaagggcagagtcagaaaatgttcgatgttgttgttggaattcagattgagtgtgtgtagattgatgacangaagaagaagaagaagcagaatcctccatccccaa

SEQ ID NO: 8054 - DNA, 372 bp, Glycine max
  Clone ID: jC-gmle01810029f12d1
cattcgaattcactttctctatccctaaatattatttccagatgagatagccagatgtcaaaagatactaattatgcgaatttggaagtggaattatcaagttattaaatgattgagccctctttgtttacctgatccctgtagtaaaagagggcccatctcttcttgagtagcaaccttaaacaggacttctgcttccccagtgaatgtcttgcgaaaagatatgatttctttgccttgcggtggattcgtgattaaggaggcacgtacctgaacatgaaactaccttacctgtgcaatttctagtgaatcaggaaccccatccgttcccgtataaataggtgttatctgcccttgcaccgcaagaggagc

SEQ ID NO: 8055 - DNA, 172 bp, Glycine max
  Clone ID: jC-gmle01810029g01a1
ttcttctaaagggcataacagatttagaaaaattcatgtatggggaaattcttaagtcttttacttctgtttttcccccctcttaggagaattagagagaaaaagattgtaattttacgggattatttcattgccctttctgggaaataaaaaagtgacaaggttttaggtt

SEQ ID NO: 8056 - DNA, 172 bp, Glycine max
  Clone ID: jC-gmle01810029g01d1
aacctaaaaccttgtcacttttttatttcccagaaagggcaatgaaataatcccgtaaaattacaatctttttctctctaattctcctaagaggggggaaaaacagaagtaaaagacttaagaattttcccatacatgaaattttctttttctgttatgccctttagaagaa

SEQ ID NO: 8057 - DNA, 567 bp, Glycine max
  unsure at all n locations
  Clone ID: jC-gmle01810029g02a1
gtttagagagggaataatggatttaagaggaggctgttgcatcgccaggtatgtacccggtgcatcccacgggtccaccgtcgacaaaataatgcttaggtttcgtccaatcgctcccaaacccgccgccgcggccaccgcttccgacggctcttcgtccgagagcagtgacgcttttctcaaaaacggaaccactaaaagaaagtacgtaagagataacaactacaccagcaaacgaagaatccgccggagaaagaacacttcctcgccggagaaaaagcagaagccggtggtgactcttccgttgcttccggaaactcccgatcggaaggattctcgggcaaaggatctaactccatcaccagctaaaccagtacgaaacaacaacaacaacaacaacaagagcaagaacttgaatattattaacaagaacgtgccggtgtgggtgagttttgagaatcgaagccttacgatgatgggagggtggtgttcgtgtgtgacggtggatggcgtgacggacacgtgctcggagagccagtggctggngagtacagacgaagaacggag

SEQ ID NO: 8058 - DNA, 517 bp, Glycine max
  Clone ID: jC-gmle01810029g02d1
gacgtaacaaaagtttcactaaccagaagaagtgttacataaccataacggtacgtagcgagttattcataattagctcacagctactgttccaagctcaaactcaaatcagaaaaaaccatctaagagaacaaatgacaagctacatgcatatatgaatttacagtgaaacaagctagcttagcgtcagtagttatatatatatatatatagatatatagatatatatattcacgattctaagctcttaaaagagaagaaatagtgttatagttctacgaccatggagcgacgccgttttgtatttcgagttcgtgataccttcgtgaactaataacccaatctcaagctaagcgcagttttaacgtctaatctccatgcaaacccaccacagtccattctccacacatcgcagggcaccgtgagcgagtttctttgcttcccacacgagtattgcaccacccttaccaagcacgtgaacgacgcgtgcggaaccaccgtattcaccttattcacc

SEQ ID NO: 8059 - DNA, 531 bp, Glycine max
  Clone ID: jC-gmle01810029g03a1
gagctcttctccattggttcttcatctgcatgcacacacttgcatagttttggaaaccaagaatttttgaagggtagcatcaacaagaagttctggaaatggagatcaccaatgtcagcgagtatgaagctattgcaaagcagaagttgccaaagatggtgtttgactactacgcatctggtgcagaggaccagtggactctgcaggagaacagaaatgccttttccagaattttgtttcggccacgtattcttattgatgtgagcaagatagacatcacaactactgtcctgggcttcaaaatatccatgccaatcatgcttgccccaacagccatgcagaaaatggctcatcctgagggagaatatgcaacagcaagagctgcatctgctgctggaacaatcatgactttgtcttcatgggctacttcaagtgttgaagaggtagcttcaacaggacctggcattcgctttttccagctatatgtgtacaaggacaggaatgtggctgctcagcttgtgagaagagctg

SEQ ID NO: 8060 - DNA, 521 bp, Glycine max
  Clone ID: jC-gmle01810029g03d1
agccacagaagtatcatcatattaatgcttagaaattaagcatagagttatccaaatacaagtttaaatgagttgtccaaaaaggaaaagaaaggatgagaagaacaggttcatgaaacatatatagaagtgtttcccccattggaaaaagtttttcataatcttggcaaggcgcgggggatagtgcgtggttggtcccaatcagtgacaatgtgatcacgagtgatatccttgagtgaggtgcaaccactcaaagccatggttagctcaaactcctcacgtagcatccgcagcacatttcttacaccagcctctccttcagcagccaaggagaacaccactgggcgtccaataaatatgccagaggcacctagtgccaatgccttgaagacatcagttccgcggcgaacaccaccatccaaaaatacaggaacacgaccttcagcagctttgacaacctcttctaaggctgatatagtggctggaacataatcaagttgtctagctccgtgattggacac

SEQ ID NO: 8061 - DNA, 74 bp, Glycine max
  Clone ID: jC-gmle01810029g04d1
gttaaaaatttttttgagtattcatgatttatcttattacattctaaggaaaattttaaaaagaatcacacaaa

SEQ ID NO: 8062 - DNA, 525 bp, Glycine max
  Clone ID: jC-gmle01810029g05a1
cggccccatgccccaatctaaagtacacatcctcttagccaagcaagtcggtgtccccaacatggtcgtcttcctcaacaagcaagaccaagtcgacgacgaagagcttctccaactagtcgaactcgaagttcgcgaccttcttacctgctacgaattccccggtgacgatacccccatcgtctccggctccgcactcttagccctagaagcccttatggcgaaccctgccatcaaacgcggcgacaacgagtgggtcgacaaaatctacaaactcatggacgaagtcgacgactacattcccatcccccagcgccagaccgacctcccattcctactcgccgtcgaagacgttttctccatcaccggccgtgggaccgtcgccaccggccgcgtagagcgtggcaccgtcaaagtaggggaaactgatgaccttgtaggatcgagagagacaagatacacaacggtcacaggtgtggaaatgttccagaagattctagacgaagccctcgccggggacaacgt

SEQ ID NO: 8063 - DNA, 502 bp, Glycine max
  Clone ID: jC-gmle01810029g06d1
gtctgaaaagttaataaatagcattcaaatttcatatggtacaacttcatactgataaggaaataaaaccaatacaatcggccaaaactgcaagaattgccccacagacaaccctatattctcacccaatatggtaagaaaaaacaattgagggaatccccggaaagcctcccacgccacaattccctaacctcctcttttggactcaatcgcactattaacactcataatatacacattctacagaaagttccctttccaatcacaattgactctgcaatctcaaaactgaagccatgttgctatagaacaccatgcaagaatgaatgatggaaaccaccgtatggtaaaaagaatgggtaacaaatatggagaccaccaaactggaaaaagcttgttcccaaaaagagcaagacaccaactgccaagccagatgctatgaagaaatgatggatatgcagcaaagcaatgaaaactatgaagaaaggatagattgcaatgc

SEQ ID NO: 8064 - DNA, 610 bp, Glycine max
  unsure at all n locations
  Clone ID: jC-gmle01810029g07d1
atgtcatatgatgcgtgcacgcgggtcngaccgacggcctcancctaaggncngcgacgtgcgccgcgcgctgtgtatcgtatctcttntatntnttntntgtattatatctctatgtagtcaatactgtctcagcgagtacactatacttctctgtgtgtttctcactgtctgcntnantctntntgtgtgcntganagagagagagtgttctgatttatntctgttgaancggactgtgagtagaagtcgtgcgtgtaggtatttatctatacacttcgcccgctcaccactatagctcagtgtgtgacaatacaacaacatatctcttgttctccccggtgtgggaaaaaaccacccattagggtctattaatttcttgattcatgttacagctttcgcaatgggggtgggatcaaacggggaaacatttactgaacatgagagcaacttatatgcctctaaacgtaggcgtcccagatgcccctaacaggattttgttggacctgtgaccatattgacaacgcacacaattgagtccttccttttaccatgaaaggtcctgtatgccaagataaaaaagctagcatagaggctgccttgatgaatg

SEQ ID NO: 8065 - DNA, 558 bp, Glycine max
  unsure at all n locations
  Clone ID: jC-gmle01810029g08d1
atatataatcacgattttaaaccacagaatatgaaaatataattgcattacatgttaccagcttggtgtggtaataccataatataaagccaaatggacataatgttttaagtgtagtatgagcaaccgttccaccttactaattgggagaaaatttttggtggcatgacattttccaggaaactcacttgcgcgcctcagccttcttctgctctttcgcagctttctcttcttctcgctttttagcagcatcttccctttgctgacgtataagagctaaacgttctaaatccttctttgcttgatctgtttttccttgctcttgcagcctcatatagcgctcatgggctctctgtttctctatctcctctctttcacgccttgaaagttctgttgttttttcaacatcaacatctctagctttcaagctctttggctttaccaagttaggatnttcaatctcaataactccttgtgttccttttttcttagaagtttcctcttctgattcttctccagattcatccccagatacttcctcaggctactttttatgct

SEQ ID NO: 8066 - DNA, 142 bp, Glycine max
  Clone ID: jC-gmle01810029g09d1
aaaaaaaaaaaatttaaggggccctttaggggttttttttttttttggggaaaaggccttttagggggaaaacccccaaggggccccccctggtttttaaaccccagggcccgctataaaagctggggcctttgccccaaaa

SEQ ID NO: 8067 - DNA, 557 bp, Glycine max
  Clone ID: jC-gmle01810029g11d1
aattggaagagaaggtagttcctcctgaataaattttattaaggttatacatgcaatgcaataatgaatcgtgaaggggcataaaggtagacttagttatatctcgccgaccccaacagctccacgttttttaaatacctttatttagcatttgcatgtggtaatgtaacacggagctatatatcagcatttaatttatgtattccacgctacaaagtacaaattaaaggttatcgatctattccacttttttactctcttgttttttcatgaagggagtgacataataattaataaaggtatagacttatctcccgctgaccccaacagctccacgttttttaatttctttcacaaatgcatcgagatttctggcagatgagccacctacagccaccgcggtctctgcatccttcttccacttgagcgcgttttgtttcaactcgtctgcttttggcccttctgtagcttccaataagcacttttttacctcttctctgctcaccactttcttttcagcctgcccataacccagtttaatccccactccaaacaca

SEQ ID NO: 8068 - DNA, 554 bp, Glycine max
  Clone ID: jC-gmle01810029g12d1
attcagaaaatgtggtgaaatgattcccttaatcagcatttcatccgacatgcacattaacttgaaaccattaagtaaactcatagaataggtgctacaagttgatcatgtttttcccggttcaaataataacccaatgatatgaaacaccgcaattattgcagtgatagtaagtagaggttttagacccacaaatcgttttctgatgaagaaaagtagctaattctgagacacagcagtagtatggccgtatctttgcatgactcttttagtggctagagctgcagcctcactagcacgcattgtcccacttgccataattgcagcaaactctttgagaatctcatcttgaaccttgttgcgtgcatctccaagagggtctgctgtgaccccatttagtgatggcttttgtggttgccctgttgtgtttgcagaaggtgctgccttagagttttcatctttgcccttcacttccttgttcacctctctgctcaccccattctcactggatgagttggaggtacttgagttcttttgggtgttagctgaaacat

SEQ ID NO: 8069 - DNA, 525 bp, Glycine max
  Clone ID: jC-gmle01810029h01a1
gatgaatggcctcaaaacgctttttcgtttgtggttattgagtcctgagtgatcttgtcatccgacctttgccatgacaggtgcgcttgcatggcaggtcaaaaaatgttaataaaaaaagttttattggtttggggagagatcgcacggcggttgcccggggtctcttactcttgtgtggagtggtgttcgctgtgctctccttttcgttatgccttttattattacctatctgtcgctccactccgtattacgactctggatcagaggatacatcagaggattcgctccaacccctatcgagtaaggtattatctgtcaatttacattcgaaagggttaggctattgaattttaaataattacagataaaataatcgatagctttgattttaaaaattaatcataatcatcggctaggttgcaacataatacttaattcgcttaattctttaactgcgcctcagagtattcataacatattctattaaattaataagctggtgatgtaattaatattaatatg

SEQ ID NO: 8070 - DNA, 603 bp, Glycine max
  Clone ID: jC-gmle01810029h01d1
gtcatagcataagtcatatagcgtcttcacattgatattccaatcatcgccagaagatttacaatgttaatgacctaattctgcattacaaatgttgtcgcccgaatctgaacttcttacaagtagattattggacaaatatacatagccccccgcaatacaatatggcccatcttatttggatacaagtaaccggagtttaccaaatcaagtaagatgaaaaagggaacaatttacatgacaattacaacagtatagcttcacaatttctataaacagtaaaattatgcataaggaagtcgcagcaggcagctaatatgaaatgaagacaattattaataaattccttggctcgatttattttcactatgaataacgttatattagattcatgaagatattatacctaccagaatattgatgaactccacctagcatcttctgccaataagattgccaaaactacatattaatattaattacatcaccagcttattaatttaatagaatatgttatgaatactctgagggcgcagttataaattaaagcgaattaagtattatgttgcaacctaaccgatgattatgattaatttttaaaat

SEQ ID NO: 8071 - DNA, 499 bp, Glycine max
  Clone ID: jC-gmle01810029h02a1
gcgtaagctgtcgctatagtgatacggttcctcacggttctgcttctcctctcttactctatcctcttccgtcttctgtttcttttggcatcaacaacaacaatttggggtttttatttatttcgtttcggtcaaaaaaggagaaaggagaatatatattatgggaaaaaactctcccttcgcctctccagcttcttcttcttctccgttttctgatgctttttctcgaaggtactaattgaagatcccctttccttttcgttttcggtctccccttttctgaccctcaattttttttttggagcatcgtgctgtgataatatatatactctcttcttttcttttcttttcttttttttttttccctttccagaattaatggaaacccttgggtaagggtaaaaattaaaattccggagccattttccaatgggtccaacttttttttttttaatcctttcccaaaggaggacctttttttctataagaagtgggggtt

SEQ ID NO: 8072 - DNA, 536 bp, Glycine max
  Clone ID: jC-gmle01810029h02d1
acataaggtcagatttaataatttcatataaatgattagggatggatgttaaaagataaagaatgattacaatcaaacgctaatagatttatggaccccaaaaaaaccatcgcaattaataagaaaaaatggagacaaatgtgagatgcacttttgtattgtagataacacaggcacaaagttagtaaaacaatgattttcggaccatgcttgcaaccccaacaattttaataagagcctaaaactcaagtcaacataagatcattccctccaagatgagggcgaaggcaaacacgaacttcatgctcttctgatcccacacgaagttttggcaccatgatctcaagcactgatcctggcccatcatagtatgcttctatattggcatcttcaggaattcgagttgaaagagggatttcacgaacaaactcaccaagtgggcagtgttcggatgacggatctgtaagtttgaatgtcctgtcatgtctcttgatatatggctttcccagatgtgctcacacaagaaaccctaatga

SEQ ID NO: 8073 - DNA, 403 bp, Glycine max
  Clone ID: jC-gmle01810029h03a1
ctggcatcaatgtcagagccccttaaaaccagagcagtcatctgcgtgggcgacatccacggcttcataacgaagctccaaagcctctggaagaacctcgcaggcagcctcgaccgatccgaattcgaaaccgcaaccctaatcttgctcggcgactactgcgaccgagggcccgccacccgccaaggcatcgactacctgatctccttaccctcgcgttacccgcggcagaagcacgtgtgacctctgcggcaaccacgacttggccttcgcggacttgctccgtctactcccggcgccggcggatggatgtgggttctcggaggggtggagggaatacgaggcgagcgaggagcgcgaaaggtggttcaagggggacgggtacgaggacatgcacctgcaa

SEQ ID NO: 8074 - DNA, 547 bp, Glycine max
  Clone ID: jC-gmle01810029h03d1
caaaggcgaatgactcagatccatagcgttgatgaaaggaatagttcagagcttcattaaaaatcagaacaagaggataagccatctaaatgtatctcgtgtttcagatcaacaacacgcaatatctcatctctatgagctcatgagatctaaaagctgaacagcttgactacgccgtataaaagcaaaaaatatcacaaatatgaaactattttgctaattcatctgtatcacgaataatcttcattgaaggaagaataattgcagccactggtctatctttatatccaccaccttcatcaatgatcagccttaagccttctacatggagtttcgcgtggtgaccactaacaacaatggctggacttgcagttagttcctctggaatatcccaaacactctttctcccacttagagcctccaccttaggcacccgagtatcccgagctttcaaaagttttaactgctctttcacatcttttcctttctccaaaccagcatgaacagcaatcaatttgcagcatttaactccatcatcagtgttcac

SEQ ID NO: 8075 - DNA, 442 bp, Glycine max
  Clone ID: jC-gmle01810029h04a1
tgaaattttgataaacctcgatcacaggttgccgcaccttaaaaccggaaacaaaagcaatcgttacttgatttcaagaatctctcaatttcttcctacttctttgtgtacggtttcttaagggaaagaaaatcactctctgtgctggccacagacttcgtgaatcattttcttttccactcttagtttatttgctgaacactctcctatttgatataggacttcgtgtcagatttaaacttcttctgtctctttctcagttctctgtttaatttcaagttcaagctggtgaaatcttggattagtgctcccactctcctatctggtataggacttcgtgggtagacttttctatttctctcctttctttcactctcttcttctcactgatccgcattgccgttcaaagtggtcttatttgaaaacacttgggcgttggtgc

SEQ ID NO: 8076 - DNA, 554 bp, Glycine max
  Clone ID: jC-gmle01810029h04d1
aaaataacacacacttcacacatcattacgacaattaaaagaggtgtggaaattttcaaatagacagagcatactcaacaagagggtcatgtctaatttcctttattgaattaaacaaacgaacaaacgaaagaaaacacaaattccagatcatgcagaggattccgcattttcagaagatctggcagtagcctgtggaacagaaaaagctggcataagagtattaccagcaatttcaaaatcttgagaaattcccaagagaatatcaaaaactgtagactgtttgggattgtcaataaggaaactcaagtgccatgaagtttgatttgcccagaactccacatttcaaaaccattattaggaccacatacctctattgggaagatcaattcccaggaatgtggttccgattttgtccacttacatgcatcgaaatgctctgtactgttgctgtttgttaaaaacacttgtaccaatgaggcccaatcactccttttgactgctgcattcccagacatcacaattttaaccattaaacagcctttcttccaagc

SEQ ID NO: 8077 - DNA, 404 bp, Glycine max
  Clone ID: jC-gmle01810029h05a1
tctctacctgacctcacttggatttagtgttggatctagtcatctagataaaaaaaattaaaatgaagatcattgagaaaattcgcgcagcttctgctgatccaaacagggtggtgttctcatttgagttctttccccccaagactgaagatggtgtggacaatctgtttgagaggatggaccccatgggggctcacaacccctctttttgcgacatcacttggggcgcttgaaggacaactgctgatcttacatcgggaattgcccacatgatgccgaacattgtctgtggtgagaccattatgcacctcatctgcagcaacatgcccggtgaaaagattgaccatgctcttcacaccatcaaattcaatggccttcaaaatgtgcttgcacttcgtggggat

SEQ ID NO: 8078 - DNA, 549 bp, Glycine max
  Clone ID: jC-gmle01810029h05d1
cacagttcactcattatatatattaagaaacatccaattcagaggaaggagtaacttgtccttatgtcaacgtacaggttacccatgcgactttgaagaatgaaaatataaagacgttagggacatagcccagaaaaataatttggcacttcaacttagaaccatgtgtaatatgaatcatcatactgagaagaaaacaaaagaaaggaaaagaacatgacaaccaacagaagtgacatagctaaagtactaataaataataagctcatgtcagaaatctgcaaagacggcaaaaagatcaccattgatgtaatcattgtcgaccaaactaaccaagaagtggctgcccccaacctcttcaaccaatttcctggatgcctcatcctcagggtacaagcttgcccatcctcttgaccaaatttcaaatgcctcatccttccatacattgaagctgacaggatctacaatggttggttgaattatctccttagctgggaagacaccccatgtcacagcattaacgtcagtttgacccacattagatttcca

SEQ ID NO: 8079 - DNA, 511 bp, Glycine max
  unsure at all n locations
  Clone ID: jC-gmle01810029h06d1
cacagttcactcattatatatattaagaaacatccaattcagaggaaggagtaacttgtccttatgtcaacgtacaggttacccatgcgactttgaagaatgaaaatataaagacgttagggacatagccccaaaaaaataaattggcacctcaacttaaaaaccatgtgtaatatgaatcatcatactgagaagaaaacaaaagaaaggaaaagaacatgacaaccaacagaagtgacatagctaaagtactaataaataataagctcatgtcagaaatctgcaaagacggcaaaaagatcaccattgatgtaatcattgtcgaccaaactaaccaagaagtggctgcccccaacctcttcaaccaatttcctggatgcctcatcctcagggtacaagcttgcccatcctcttgaccaaatttcaaatgcctcatccttccatacattgaagctgacaggatctacaatggttggttgaattatctncttagctgggaagacaccccatg

SEQ ID NO: 8080 - DNA, 505 bp, Glycine max
  Clone ID: jC-gmle01810029h07d1
ttgttttcctttttttttttttttttggacagtttaaaatttcaaaatatcttcataatctatcagagcaaaaaaatattcaggcactaaattagaaatttgttcaactcatccggatctaataattacttcaagggccctttccttttggatgaatatgaatataccccccaaccaaagaatccatataatgcttaccccccaggaaggatatactgcaaatacaccattaactcaatttcatcgacgcaaatttttctgccagatctatagcctcgtttacatgtgatgcctctgtaccctgacccgttgcaagaccaccttttcctttaccacatctcccttttagaggccccaaagcattacttagccaatctgccacattcagattacctttaccttctttctctggcaccccggcacacactacagccttgttcgtagattcgcccgtgctaaaaaccatcacagataagcccttctggtccatgacttttgaacagcc

SEQ ID NO: 8081 - DNA, 449 bp, Glycine max
  Clone ID: jC-gmle01810029h08d1
gcaactgaatcccactcaatatattcattttgtaatcaaaagcagaaaaacaggtataaccctacattcacaacaatgtagttttggggaaccgcacatttatagaacatctgatttgttgggttttgggcttgatctcatagattatcataatctttagggttcggatatgggtactttgcgtatgaacttctaatttttgaaggatcttcaggtacagaccaagggtactgcaaggaagggtcccgtgggaatttcctgaagtttaaaaatggtgcccaaagaataacccctgggaagaaaatgaagacacacatgaattgtaaatacatttccagcaagtttcttctgtaccatcttttccaaagccagtacatgattattggtggcacgacatggaaatatccaaagagaacaaccccccattgtgtcaaaacccagaggagttc

SEQ ID NO: 8082 - DNA, 568 bp, Glycine max
  Clone ID: jC-gmle01810029h09d1
gcaaaccagagatgcttgccgagatatatatatatatatataaaaggtatttgaatctttcaagacagacgcatactgcctatacaacgatagccctatattagtattcaatcaagaaaacaaatacttctaggtaaaaacaaaaacttaaaatcaatcctactaaataattacaatcctacattctaagagacagccaatataacaaaccagaagaaaatactaacaatgctaagaagaaacataatttcaccagacaaactagatcctacagttaatccttgtcaagagaggcaaatcagttttggaagtcagactgtaattcaatgatgatggtaacaaaacaatttcaggaaccaccacccacatctgctactggatgatcatcgtgtacttggcgaacaaattgccctttcacgcgagggcgctgctctgccaatctcttccggctttgatatcgcacctttttctcatagcatctgtctttccgcttcagtcgaaactttgttagagctgcttctcgttggctagtgcgatgagaatctgtccctatgaatccatcataact

SEQ ID NO: 8083 - DNA, 430 bp, Glycine max
  Clone ID: jC-gmle01810029h10d1
gatctcttgttcttgtaatatatttataaaaatttttcttattaacatgaattttttctgggtatttgtgataaatttttcgtttattcttttgaattaatgaaagacctatggtttgatacaataaaaaattgtttattgttttttctaaacagggcgaactggttcaataacaaatatttcttttttcataaatttgttatttttctttttccttaagcctagaagaattaaattcttctgattttgaatcatcataatatctagacctagttctcctctttgaatagaggctattgtaatttctcttaaattttttaatctaatcaggagacaatatacatttaaattggaataatttcttaggtcaaagaatatttaacaatgtcaaagtatattgtctcctgattaaattttttaatctaatcag

SEQ ID NO: 8084 - DNA, 474 bp, Glycine max
  Clone ID: jC-gmle01810029h11d1
aaataccgcgactaatcacataaaatttgtgtttgttctttttatatttatattatttatatttttattttttgtacaatttattactagtatagtaatcgattccctgagatctatgaacccctccaactaaatgcaataatttttttattttattattaatcaaggaatttcgtatatagctagaacggccctcacaaattgcaaatactaatttgttaagaattaatcgaattgaggctatagcatcatcattagctggaattgaaatatcggcgaggtccgggtcacaatttgtatcgattaaacaaattgttggaatttccaaagttatacattctcgaagagccgtatattcttcttgttgatcgacgattattacaatatcaggtaaccccgtcatatatttaatgccgccaagatatgtttccaaatgagctaaatgtctctttaatatagcggcatctctttttg

SEQ ID NO: 8085 - DNA, 521 bp, Glycine max
  Clone ID: jC-gmle01810029h12d1
gttcgggaataaactctttatttggacaatgcttcctgctctttcaaaaccttctttcggaggacctccttgtagcccacaatgtcacccttccacttgttgatacctccgtgctcacagatccaaaatttcatcagctatctgattgatcaatctgaaatcgtggcttaacaacaccactcctccctcaaattcgttgatggcgtcagcgagagcatcaatagtttcaatgtccaaatgattggtgggctcatccagcagcaacagatgaggagtctgccatgctaaccacgcaaacaccactcgtgtcttctgtccatctgaaagcagtcgaatcagagtagtttgggcttttccagtgattccaaacttgccaatgatctgtcgcattctctcgtactcgacttcacctggatagcacttcatcatataatccagtggtgacaggtccatgtccaacaagtctgtcaagtgctgatggtagtatccaatcttcaagtgctgatgtcttctcaccattc

SEQ ID NO: 8086 - DNA, 414 bp, Glycine max
  Clone ID: jC-gmle01810030a01a2
gcctggtcagtgggaatttcaagttggtccttctgttggtatatctgctggagatgaggtgtgggcagctcggtacattttggagaggattacagagatggccggagtaattgtttcatttgatcccaagcctattccgggagattggaatggagctggagctcactcaaactacagcaccaagtccatgagagatgagggtggttatgaggtgattaagaaggccattgaaaagcttggattgaggcacaaggagcacattgcagcatatggagaaggcaacgagagacgtctcactggaagacatgaaactgcagacatcaacaccttctcttggggtgtggcaaaccgtggaagctccattagagttggaagagacacagagaaaaatggcaaaggttactttgaggacag

SEQ ID NO: 8087 - DNA, 339 bp, Glycine max
  Clone ID: jC-gmle01810030a01d1
attgtacaactgctatttttctgtcacataaattccaaaaaataatttcccaaacgaaagccgtaaaatttaaatttgggggacaaagaaaaaaactctaacttggaagggggaaacttttccttaatataccaagccatggtgcggcggtatacgagagtcggtgacatgaacacacaacaatcatcatggatttacaaacagggggaaaaggaagggctatccaaaggattgttgcaccagatggaagccataacccttcctccttttatacaggggccacggggggggcccattgccaatcggggggggtgtttttttcccgccgccttccggggg

SEQ ID NO: 8088 - DNA, 434 bp, Glycine max
  Clone ID: jC-gmle01810030a02a2
gtcgcaaggacgccgcaaagatcatcacacagcaagatgaccgtctcctggtcatggttggaccttgctccatccacgaccctgagaccgccattgagtactgccagcgcctcaaggcgctcgccgagaagctccaggacaacatcctcatcatcatgcgcgcctacctcgagaagccccgcacaacagtcggctggaagggtctgatcaacgacccggatattgacgagagctaccagatcaacaagggtcttcgcgtctcgcgcaagctctacattgacctcacatctcaaggcatgcccattgcctccgagatgctcgacacaatctccccccagttccttgcggacctcatctccctcggcgccattggtgcgcgcacaacagagtcccaattgcaccgtgagcttgcttctggtctttcgttccccatt

SEQ ID NO: 8089 - DNA, 441 bp, Glycine max
  Clone ID: jC-gmle01810030a02d1
gggcaaaatatgcaaaaacatgttatttggttcataaatgatggaagccaagtaccccctttacccaaccattttccctacattttttatatacaaacaaagtcccaccccggcacgaaattaatgcaccccattagtctttttgctcgccttgctccgcctttcggggacagcagcagcaagatcctccaacacagtaacggggctatcccaatcgatacacccgtaagggatggacaccccctttgggagcccggctggacccttagcagggaccttttgattaccctcgttgatattcgattcaatcatgacggcgacaatggcggtttccccctcgcggatctggtcggggatgacctttgcgaccttgggttggttgcggggaactttgttcgagttgccatgcgaacagtcaaccatcaggacttcaggaagctt

SEQ ID NO: 8090 - DNA, 425 bp, Glycine max
  Clone ID: jC-gmle01810030a03a2
gaaaacttggatgcctttaatagcttctatggaaacatgccgtggcttgcaattccgttctccgatttggaaacaaagaaatccttgaccagaaagtacgacgtggaagccgttccgtgcttaattttgttgcaacctgatgatcgtaaagagcacgtaacagttcgtgacggggttgaacttatttaccgttacggaatccaagcttatccattcagtaacgagaggttggagcagctgcaaaaggaagacaaagtgaagcgtgataatcagactctcactaatttactagcaaaccaccatagagactatgttttgagtcacactcacacgggactcaaaaaggtacctgttgcttggctagtgggtaaaacaattggactctacttctcagcggaatggtgcgtcccatgcgccaagttcac

SEQ ID NO: 8091 - DNA, 427 bp, Glycine max
  Clone ID: jC-gmle01810030a04a2
gcccagggctatggatccttgggaatgatgacattcgagcttatgacccccgatggtctgactatggagtctgaggccgcacacggcactgtcactagacactacaggcaataccagaaaggccaggagacgtccaccaaccccgtcgcctccatctttgcttggacaagaggtcttgccttccgagccaaacttgacgacacgcccgctttggccgaattcgccaaggatctggaggccgcttgtgtcgaggtcattgacaaggacagcgtgatgacgaaggatctcgctttggccatgaagggaaagaacatgcagagaggggactgggtcaccaccgacgagtacatgaaggcggtcaacaacaaactcatcgagaagatcaaggcgaggacatctgcatagtgttggctcgacatatcccctc

SEQ ID NO: 8092 - DNA, 350 bp, Glycine max
  Clone ID: jC-gmle01810030a04d1
tttcgttctttttttttttttttttttttttcaaccaaaaacgatatgcatactcgcgcacttgcaccttttgcgcactatgcacaggcttagctaacccccggttcctaagggccagccggttagggcccaaaggggatatgttaagccaaccctatgcaaatgtcctagccttgatcttttagatgagcaagatgttgaccgccttcatgtactcatgggtggagacccattcccatatatgcacgtactgtcccttcagggccaaagcgagagccctggaataacgctgaccttgtgaatgaccatcggacaagacggactcataacctgggcgaattcgcccaaag

SEQ ID NO: 8093 - DNA, 361 bp, Glycine max
  Clone ID: jC-gmle01810030a05a2
gtctctattctcaaacatgtagcaccaaacccatgttggcatccaagttttataacactaatactgcatataatattattataatatacataacaacagttattgatattgttgtgattgtgtgtgattttggtgtcgtccctttttcttatgtttaaggttgtacggagtttatgtgtggattgaattctgggataagaaaccttagtttgatattttgactggttatgtggagagttttttttgatttggtgtctgtttttgttgtgagttaaactaagatgcctataattacggactgttatttataactctttggataaggtattactagatttggtcttcctggtaataataagaa

SEQ ID NO: 8094 - DNA, 351 bp, Glycine max
  Clone ID: jC-gmle01810030a05d1
aaagtactagcatgattgtacaattgcaaccttgggaacatgaaattgaaggggccactaccatagatttttcatggtaaggcaacaatggcctagaactaatttttgtataaactatgatcatacttagtccttttcccttctaaacttttagttgcataagggcatttactttgtggaaattccagggtagtcattccatgaaacattatggccataggacatattttgctttctgccattattgggtctacttttaactcctgctagaaatcccccctttttattctttatatcttggagttgggttaactgttccaaaacaaaaatttttggaacccggctttaaga

SEQ ID NO: 8095 - DNA, 417 bp, Glycine max
  Clone ID: jC-gmle01810030a06a2
atcatcaccacatgcaagctctcactgcttttgagtcttctctcagtttcacttttgctgggtgtgaggtctgatacccttcagaatgtaggcgcaattccccccacatgcaagcgcatagagtgtcccagctatgatgtcattcacgtaggcaacggctacgaaatccgtcgctataattcacccgtttggatttcaaacagccccattcaggacatttctctcgttgaagccacaagaaccggcttcaggaggttatttgactatattcaaggtaagaataactacaagcagaagattgagatgacagcacctgtgatcagtgaagtattacccagtgatggacccttctgtgagtcctcatttgttgtgagcttctatgtgccaaaagagaaccaagcaaacccgcctcctgcg

SEQ ID NO: 8096 - DNA, 275 bp, Glycine max
  Clone ID: jC-gmle01810030a06d1
tatgcaatgctaggtcacggaattaatcgccgggctcactagctgactgccgggctgtcgtcctttttttttttttttcaaactagtagccaccacactatattaatccattcgagaaggccttactcctcagtatggactatggatagtagcctccacgctgacagcttattatgccacacgggaaggaggatattattaatatcctactcgagccatcaattaatgaccatatcgctatatacgaaaggcgcataggcttgtgcaacaaccac

SEQ ID NO: 8097 - DNA, 424 bp, Glycine max
  Clone ID: jC-gmle01810030a07a2
gaaacttgaatctgggaagccagatattttaaaaggatctttctatgccaatcccatacttgatacacctacaacagaggcttctttgatacaacggtatccatcatattgcggctcaaatatatggcctagaaacgctttaccagaacttgaagtggctttcaaagcacttgggaagctgatatttgacattggattgatgttggcatatcactgcgatcaatatgtatccaaagggatgaaaattcacaaggatgaaggtctggaatcaatacttcgttgctcccgctgtcataaaggacgtttgctatattattttccttcacaacagggagtcccagatggcaactctttgtcttcttggtgtggatggcatactgaccacggttcactgacaggtctgacttgtggtatgtttacgaga

SEQ ID NO: 8098 - DNA, 497 bp, Glycine max
  Clone ID: jC-gmle01810030a07d1
tgcgcagtagctaggtcacggactggatcgccgggctcactagctgagctgccgggctgtcgtcctttttttttttgtacagaaactttcattccatcccataagttaatatccagttaaataaattaaatgttgctattacacggaatctataagactattatatctcttttgctattaccccaatggcgactacacatatacccgagaattacccgcgctaagattctacaaccagttaccctggaaaccttaccgagctattcttaaccactgagatcattcagtaacgactgcacattcacacgaattcatattagtctcgatgaatgtcacaggctacgacttttcaaccaggtatgcttgttggcagatacagctcaagttgatactgttcaaggtggtcattgccgctagcagcaatgagtgactactctccccagtaatggcggcattcgatggaatcagctctttatgaacgggaactatctcgggta

SEQ ID NO: 8099 - DNA, 423 bp, Glycine max
  Clone ID: jC-gmle01810030a08a2
gctttggcaactgtcttgagttccgtgctcatatataatttgcccgagacgatacgtgaggctgacatctctcgactctcttttgcggttgagcttgctgaagaattttatgggagagtgaagggtcaggatgttgcatttgaacctgctaagctcttatggctcatccaacgtgattttttgcaagggaaatcggtgcaagaaatggtgaatgaagctctgagacgagtccccaatactgatgggaacaaaaatattgatatggtcaatcaaatccgagattcattggctgttatgggtgacaacagtactgcctttagcttaccgcaaccacatatccagcggacaaagctttgtgatatggaggatgtggagcttgatcaattatatgtcaagagaagggagcaattgaaagagcttgtt

SEQ ID NO: 8100 - DNA, 432 bp, Glycine max
  Clone ID: jC-gmle01810030a08d1
agaaaagagaacaaagaatcaacatcttttccctttcttctttaactttaccattttacacgtccatacatgattgtggcacagcaaagtataacatttaatttactctaaaatcctatagtaagttattatgaaataatacacaagttacaagtaaaatcaaatatagtgcccattgtggcattaaagaacatttttgaggcgctaaatttgtagaagctaccgaagaggtcaatcaccctattttcaactttttaactctgcagaagaaccttttcaagatgaagggacaggccagtgagctatgtgtaaaaataaaaaaataaaaaataaataaagaagctcgccgtgtaggacgaattgccgagcaacatgccaaactcttgaaacatgccagcaactgccaccatcatcatagatttagtctgttcg

SEQ ID NO: 8101 - DNA, 428 bp, Glycine max
  Clone ID: jC-gmle01810030a09a2
gtcggagctgtcaacagagctcttttgaacctgaatggttctggagctggagcttcagctcccagttcagccttctttgggaccagcttgaagaaggttattgcctcaagggtccccaacagcaaggtttccggtggaagcttcaagattgttgctgtagaagagaagaaagagattgaagagacccagcagaccgacaaggacagatggaagggtcttgcctatgatatctcagacgaccaacaagacatcacaagaggaaagggtttggttgactcccttttccaagctccacaggatgctggaactcactatgcagtcatgagctcctacgagtacctcagcactggacttcgccagtacttggacaacaaaatggatggattctacattgctccagcttttatggacaagcttgttgttcacat

SEQ ID NO: 8102 - DNA, 291 bp, Glycine max
  Clone ID: jC-gmle01810030a09d1
aggacaaaaggaaaaggccccaaattcaatttaaggggaccctggaactcgaaattattgaggacaacgggccagattttaaaaaacttgctagaaccttttaaacttggcatattttatttgcgcctaaaagattggaaaagcttagaatgttaccccccagtttcatcataatttattgggctcggatttggtccacaaccttaaggaaccggaacatttacttgcccaagttgtttttgctgcaaatacaaactgggagaaagtatccctctgaataacgttcttctt

SEQ ID NO: 8103 - DNA, 551 bp, Glycine max
  unsure at all n locations
  Clone ID: jC-gmle01810030a10a2
ctcgtcgtcaccatgccgcaaggggattacatagagcgtcacagaagagactatggctaccgtgtcgatcacttcgagcggaagcgcaagaaagaggcgcgtcaagttcacaaacgctctgcaattgcccagaaggtttaaatcaaaaattttgtttttaattggtttttgtttaacctagttctattgtcttaattctaattattcgatttttgttaatttgaattgaacaggctctgggtattaagggcaaaatgattgccaagaaaaattatgctgaaaaggcacagatgaagaagactttggctatgcatgaagaatcaacttctaggcgcaagactgatgataatgttcaggatggagctgttcctgcttatctccttgatcgtgataacacgaccagagcaaaggttcttagcaacaccattaagcaaaagaggatggagaaggcgggaaaatgggatgttcctctacctaggtacgtccggtggctgaagatgaaatngtcaaagtggtccgtactggtaaaagaaagaccaagcatggaagag

SEQ ID NO: 8104 - DNA, 448 bp, Glycine max
  Clone ID: jC-gmle01810030a10d1
caattgtacatcatgttatttagataatagatttcgcagtacataatacccgaaccataaaaaaaatacagctactcaaaatgctgtgtcttgtaaataaattacataaatttatgagacttgtttgtcttaactcttgttgtacaatagttatcttaaatgttaagtgctagatcagataattgcattgactatccaaacaagaaaacaaaaatgcttcactattttctcagacaatcttctctctggtaccaacaaagtttgtaagattttcccttgaagattggggttgaagaccacaaaaatcataggagagggacttgaccactgcctttgaaatcaagctggaaccctgatggttgctatgaccttaaacaagcaaaacagcatttatacaaccatcattttctgggttatttgtgacctgagcgtatttaccccacacaac

SEQ ID NO: 8105 - DNA, 502 bp, Glycine max
  Clone ID: jC-gmle01810030a11a2
aaaacaaagaaaaaaaaaaacccttagccaacacaaccatcatggccacctctgctattcagcgatcagcattcactggtcaaactgctctgaagcagctcaatgagttcgtccgcaagaccggtggcgccggcaaaggtcgcactaacatgcgccgcaccgtcaagagtgctcctcagagcatttggtatggccctgaccgtcccaagtacttgggtccattctcggagcagattccatcatacctgaccggagaattccctggtgactacggatgggacactgctggattatcagctgacccggaaaccttcgccaggaaccgggagctggaggtgattcacagcagatgggcaatgcttggtgcccttggctgcaccttcccagagatccttgagaagaatggtgtcaaattcggcgaggccgtgtggttcaaggcccgtgcacagatcttcttagagggaggccttgactacttgggcaaccccaacctgatccatgc

SEQ ID NO: 8106 - DNA, 494 bp, Glycine max
  Clone ID: jC-gmle01810030a11d1
ctggggacccaaatttctaatatataaaaatataatggtgctcatacagatttttctgctacacaggtgtagttacattagtgaaaatggagttaaacacaagggaactgcaaaagggagcagaagattgcattgcatgtaggcatcctcattgtccagggacaaagttagtggcataagcccaagcattgttggcaacaggatcagcaacgtggtcgtaaaggttctgaatagggcccttgccagtgacaatagcctgaacaaagaaaccaaacatggagaacatagccaagcgaccgttcttgagttccttgaccttcaactcagcgaatgcatcagggtcatcagccagaccaagagggtcaaaagcaccaccagggtagattgggtcaagtccttcaccaagtggtcctccaccaactctggaaccttcaacaaaccccatgagcacaacctgaacagcccagaatagcaggatgctctgagcatggatc

SEQ ID NO: 8107 - DNA, 447 bp, Glycine max
  Clone ID: jC-gmle01810030a12a2
caagaatcttgactctgacccattttttcctatcatatgaaaaatacatcgatgaaaagttgtgcgattggcatcatggggattacttgattcaattctcaatatcatgaagcttctcatgaccaccacttgctaggatataggtatgatcttacgcctccacaaaaaaagtatatcaggtcaagggtgaatcaaacatttcatacatatgttcacgtgactatcgggctccagaactaatttttggcgcaacagaatacacagcttctattgatatctggacacctgggtgtgatcatgctgaacttcttctaggacagggtatcaattgctggaagtctatgcattaatgttggcgatgcttaagacccttttgctgtccttctgagatatgctatatagacttgacgtagaatctaatgattggatagccattatggcccggag

SEQ ID NO: 8108 - DNA, 425 bp, Glycine max
  Clone ID: jC-gmle01810030a12d1
agacaacgagaaaatttcttgtttagaatcatgagattgttataaccgtaatataagcgacatcctgaatttaacctcatagaaagcgggccaaactactataggggcccctaaattcacctgggcccgtctacctatgaagacatgatagctatcattgtatactcctagctttctgaaatctgaccagaacaatatacggatgcagggataagtatgctggaacttgaatgagatactacacagaatcaccaactgtccagctttaccgagcatccaacacatgtatacatgttcacaagggggaggaaaaactgcatattatgctgggactcatcggtccattatccctttacatcgatgtaccggccgaatgcgggaagctgagacccatctgccgcctaatatgctctgggatgagccta

SEQ ID NO: 8109 - DNA, 112 bp, Glycine max
  Clone ID: jC-gmle01810030b01a2
gggctacgggcctgaactatacaagctcacatcacgatgaccgagccctggtcatggcaggactttggtcactacactagactgataccgagatggcgtacgtgtcaaaaga

SEQ ID NO: 8110 - DNA, 507 bp, Glycine max
  Clone ID: jC-gmle01810030b01d1
aaattgtgaagtgaagctattactaatggaacataattgattatgataacacaatacactattctaggtccccagccctgaggagacaaaaagaacaacatagggacttttattcccataatgtatccccttaaggctgagaacaatcctctaggcttgcttaatgccccatgttccatatatatgtctggggactggtcggccttctaaactcttaaccacttgcaaccacggtttgtcaaccataaagatggaattttttgccgtatgacctaaaaataaaacatgattctcgaaaggtataacttcaaaaggcctcctattatgccccttcataacttcaatcctcttcttaacattaaaatggtgtgaatcccttgcccttgaatctttaggatttagcatatcactttcatcttgctccacgggcaatccaaagtcaatcaagcacatagccctggagctgtgaacaacaaccgattatgaattcgccgatggagaatatga

SEQ ID NO: 8111 - DNA, 410 bp, Glycine max
  Clone ID: jC-gmle01810030b02a2
gagggaattccaccttctaaagtgtttgattggattgacagagattccaaatgaattggtaagcggattccttcaggtatgtttccacttaattgattcatatcgagaaccaatatttttagagatgagaatactgaaaggtcaggtaaagagccagtgatttgattaaatgacaaaaccaaatcttgtaatgagtgtctaacacaaccactagacaaattatgaaggattgatggaaggtcttcagtcaaatggtttgctggcatgtataaagaatgtaaggtgcatatattcgccaaggatttcaaatcctcacccttgaatatattatatgagaggtcgaggtgctcaagagaattcattacacggccaaaatggtttgatgtggaaccctccaagaggttattact

SEQ ID NO: 8112 - DNA, 346 bp, Glycine max
  Clone ID: jC-gmle01810030b03a2
cgaagattaccgccgcggcggctaccacgccgtccgaatcggcgacgccttcagcgccggtcgctacgtcgttcagagtaaactcggctggggccatttctccactgtctggctcgcttgggacaccaaacattctagatacgtggctttgaaagttcagaagagtgctcagcactacactgaggcagctatggatgagataacaattttgcagcagattgcggagggagatcctgatgataagaagtgtgtggcgaagcttttggaccatttcaagcattctggtaccaatgcacagtatgattgcatggcgttcgagtaccttgtagacagagcttagactctt

SEQ ID NO: 8113 - DNA, 554 bp, Glycine max
  Clone ID: jC-gmle01810030b03d1
gaacaaaaatcgaatgacttgaaacatgtttataatgttttcatatcaagaatatcattcagcataagagtacatgataatgaacactgttcacaaacaagtcaacggtaccaattgacaaaggcatctttgacctatcgtaagcatgagaaacaaggcacagagtatatcataacggtattcttagtagtgagagctctcggagtatcccaacttctttttgaagatgcaatgtggaagacttgaaaggatttagcgagcacccggcttcaaacaagtcctacccaatccaaggctaaatgaacatgcccccaaaacaattcccatggacatcaatgaatgagggaaatgatgcaggggcacgctaagaacatggaaacagtcgcacgggaaagagcccttgccagatgaactacttctggcttctgccttggaagactttctttgatggagaatgcattagtggtttaaaatctgaattgataacaatattccccattcctgtctccatggcctccctctcatctttggcctttctctctgatccgaaaacg

SEQ ID NO: 8114 - DNA, 426 bp, Glycine max
  Clone ID: jC-gmle01810030b04a2
gagccgcgcgccagtgggttaaatgctcaatttcttctaattaagaaccacgatggtttaggaatccattgttctccatttagggtttctttttctcattcaaattcttctccagtcacatccagttggggtttctttctcggaagatggctcgtaacgaggagaaggcccagtctatgctcaaccgcttcatcacgatgaaggcggaggagaagaagaagccgaaggagcgccgccccttcctcgcctcagagtgccgcgacctgtcggaggccgacaagtggcggcagcagatcatgcgggagatcgggcggaaagttgccgagatccagaacgagggtctcggcgagcaccgtctacgcgatctcaacgaccagatcgacaagctcatgcgcgacaaatcccactgggaacgccgcatcgagg

SEQ ID NO: 8115 - DNA, 436 bp, Glycine max
  Clone ID: jC-gmle01810030b04d1
gcctgttagaaaaatgaacagtaactctgacactacccattactttaatcagtcaaattcgaccaacatgctagcatatagccagtccagaacaaacacaggagaataaacacatggagaaataaaacctcagacttcacaggaagtgcacccaatagtctaaaattcaaatacatgttgaaaattttcaagagcttcactatgggtacaacttaatagagtctctgcctaatgctccactatgagaaaaggtcatcattgatcatacgcaattgctcctcctcactttttcacgcggctctgtgcttctacagcctaacgctgaatgttgagcatgtgcttggcctcagtctgctcctccacgagcccgtcactcgcgtacctactcaagagatccttcttcttcttatgcagcacccttcgctcaatctccttc

SEQ ID NO: 8116 - DNA, 424 bp, Glycine max
  Clone ID: jC-gmle01810030b05a2
ctcgagccgcatcggatcaagcgaggcttaccaagaaccacatgatctagcacatcaaggacttggcctcatacaacaaggtggggaagtactacattgaaatggggccctacaacactcatgtcacaccagtgatcctgacgaacatcattgagaaccctgcttggcacactgagatcacaccttaccaggctgagatatttcaggggaggctagagacactgattgatcaccacaccatgaccactgacctcaccggattgcctatggacaatgctgcattggttgatgagggaactgttggtgctgacgcactgtccatgtgcaacaacattcagataggggagaggaacagcttcattattgccagtgactgccaccctacaaaccattgatatttgcgagacaagggctgatggtgctg

SEQ ID NO: 8117 - DNA, 453 bp, Glycine max
  Clone ID: jC-gmle01810030b05d1
cctgtgattggatgaaacttaagagcaggggattatcatcattgtcacatatgatgaagcaatattcaacaagtgcaagaactgtatgaataggaataagagtttatgtacaacgggaaatgaaaatagttgtcatttgaacacattatgctgtggcagctgcttgttcttcaacagcctgtgatgctgggagaagggtgcaaatgaggttgcggtcaccgtacacattatcaacacgtcctgtggtaggccaaaactttgcagtacggagccaaggagctgggaaggctgcatattccctggagaatggttttgtccatgcatcagccatgagcagtgatggtggatgaggggcgcccttaagtacattgtggttaatgtcaacctttcctttctcagtctcagcaatttcttgtctaatggaaataagagcatcacagaacctgtctaact

SEQ ID NO: 8118 - DNA, 425 bp, Glycine max
  Clone ID: jC-gmle01810030b06a2
ccgccacttctgaatctattgaatcaacaatcatgtcggacgaagagcaccatttcgagtccaaggccgacgccggagcctccaaaacctaccctcagcaagccggtaccatccgcaagaacggctacatcgtcatcaaaggccgcccctgcaaggttgtggaagtttcgacttccaaaactggaaagcacggtcacgctaagtgtcactttgttggaattgatattttcactgccaagaaacttgaggatattgtgccctcttctcacaactgtgatgttcctcatgtgaatcgtactgattaccagctcattgatattgctgaggatggatttttgagtctgcttactgaaaatggtaacactaaggatgacctcaagcttcccactgatgagagtctgctcactcagataaaggatggattt

SEQ ID NO: 8119 - DNA, 558 bp, Glycine max
  Clone ID: jC-gmle01810030b06d1
tctgatcgctaaggtacggactggatcgacgaggctcactagctgactgccgggctgtcgtcctttttttttttttttccacaatatacttcctcctttataataaaatcacaggacagcaaagaaaaccagaaaaatgtgataatagttgctgtcaccacatccataaaaaccattgttaagactagtctgactagaatctatacgccaggtcttgaacaaaccaatgtaaaaggcttacaaaaatgtctttgcttacatagaaaatagaaataacaagcaacaagcaccaaaagctagtgctttggcccaatatccttgagggcacaaatctggaacttacccatagcacacatgacagacacaacaggatccttgccctcagcaaatccatcctttatctgagtgagcaggactctcatcagtgggaagcttgaggtcatccttagagctaccattttcaggaagcagactcagaaatccatcctcagcaatatcaatgagctggtagtcagtacgattcacatgaggaacatcacagttgtgagaagagggcac

SEQ ID NO: 8120 - DNA, 421 bp, Glycine max
  Clone ID: jC-gmle01810030b07a2
gctgtgcctatgtaatattctcttctatgatatttcttgttgtaaaaataccggctagtagtaaacagtttttttcagactgttttatatgctctcatcaatgctttcatctaccttttctcccaaggtattagatatacatctctctctatgtctcttttgctctctctctctccaccgtctctactagaaacaatatttttttttttgttcttccagcaaatttcactataaattgtttaatattttttcccatcaaaaagttgtggagtgaaatatcctgtattttttagggggttcctaggatttactttttttttttgcttctttggtctttgtcttgattgattagagggcagagctaggagtattcccccctatgttctcaatgtgcatagttgattattattttcaagtgcag

SEQ ID NO: 8121 - DNA, 523 bp, Glycine max
  Clone ID: jC-gmle01810030b07d1
gctgctcgtccttttttttttttttttaaaatttttacttgtattgatttattattagggataggcgtgtaatgattgatcctcatgcataactgaagcatcaaccaatgctggctttgatgccggcgcataaggaaggttggccaataatatacttgaacggttacatactggcgataaattatgcaaatatgcaaccagccccatcaacaaaacgacctgccaaaatataaggcaaaaacctctagggggcaaaacatacagctaacgtaggaagcgacggtgaccttggaaaccccccggcgtttacacaacggctaactcagggcttcgcgggaaaagagccttttatagctggaccataagctttagctcccaaaacaggagaggcagcaacccatgcattgggtccagccaggaacaccttgtaagccgctgctggaacaactacggcatcaacgtcaattcatggatttactacctgggccgacacaaaggggacaaatccagatctgggtacacg

SEQ ID NO: 8122 - DNA, 423 bp, Glycine max
  Clone ID: jC-gmle01810030b08a2
gcccttgcaatctcaatcttctcttcttttttcaggatacccatttcgtttttcttctcaaatggccctttcttgttccaaagtttcaagcttttctctctcacccgttgtgggtggtggtgatgtttttaaaaatctcactttttcttccttttctttgagtttttctaataagcgtgttggtggaatcaagaacttgagggtgcgtgctgctgcttcaaacgcaccagctccactcgctggggtcatatttgaaccctttcaagagctaaagaaggattatcttgctgtcccaattgcacacaatgtttccttggctcgtcagaactatgctgatgagtccgaatctgcaatcaacgagcagatcaatgtggaatacaacgtttcctatgtgtaccattccttgtttgcgtacttcgacag

SEQ ID NO: 8123 - DNA, 435 bp, Glycine max
  Clone ID: jC-gmle01810030b08d1
aaccgaacgtcattttttatttctaataaaatgattacatggtacaaacatatatgagattgcacataataatactactactaccattctaccaacaactataatacaaggacaaagttccctacatttttatcacctaggagaggaacacttattcactattcactattgctacaaacagaacaacacacttattcactattactacaaacagaacaacacggtgataacttcacataggaccatatgtatagaaaacagaggctgttcaaagattatagatcttcatcatgaagaagcctttgatcaaagtgccacacaccatgaccctttccaactaatctcagctgagtcacatactctgcaatctttgtaattgacttaacctgctcatacaagaactcgctctcaatgaagtctgctagttgaggatca

SEQ ID NO: 8124 - DNA, 428 bp, Glycine max
  Clone ID: jC-gmle01810030b09a2
attgaagttaaaagccttagccttccctacaactccaaacacaaagacatcatcatccatggctgcctccgtctccactgtcggagctgtcaacagagctcttttgaacctgaatggttctggagctggagcttcagctcccagttcagccttctttgggaccagcttgaagaaggttattgcctcaagggtccccaacagcaaggtttccggtggaagcttcaagattgttgctgtagaagagaagaaagagattgaagagacccagcagaccgacaaggacagatggaagggtcttgcctatgatatctcagacgaccaacaagacatcacaagaggaaagggtttggttgactcccttttccaagctccacaggatgctggaactcactatgcagtcatgagctcctacgagtacctcagcactg

SEQ ID NO: 8125 - DNA, 294 bp, Glycine max
  Clone ID: jC-gmle01810030b09d1
aaaaaaggaaaaggccccaaaataaattaaaggggacactggatccaaaaattttaggggaaaacgggccaaataaaaaaaaaacggaaaaacattcaaaaattagctttttttttttgccccaaaaacattgaaaaggccaaaaaagttcccccccggttccaaaaaaattttcacccctggggaagaccaaaaacccttaacaaacaaaaaattttacctgccaatgtggcttgccccccaaataaaaaagggaaaaaaagcccccttggaaagaaccccccgagagcgttt

SEQ ID NO: 8126 - DNA, 503 bp, Glycine max
  Clone ID: jC-gmle01810030b10a2
attcatttaacacaccacaaaatcaggtccaatagaattcctcctctcaaatcacttatcctcagcctgtcgattgaataattaggaagttttaaaggagtcctgcagttgctgccaatatagtgaccaggaagacaagcaaccttagtgttcaacacatgcgctttcaaatgcagccttttttggcagtgttgagtgtattgctagcatagcatgcagtaatggaggatggtactgcacctgcactgtactaccttttctgatcttgaggaacctgattgagcccttctctaagaggcatatacagtggtggcggtggtgcttctacctccacattatggacctgaagtctctgatgttctgccatgaatacagtcaaaattagtgctcttgctatctcatcgtttgtgatggtcacaccttctgtgtttagttcaaatgagaataatgtaatgtcccttctccaagcactgcttctttatttgacttgtcaagtgtggaaa

SEQ ID NO: 8127 - DNA, 512 bp, Glycine max
  Clone ID: jC-gmle01810030b11a2
ggcgatggcaatggcgcttcgcaggctttcatcttctattgacaagcctctgcgccctctcttgaatgccggttccctctactacaagtcgtctttgcctgatgaagctgtttacgacaaggagcgacccggagttacatggcccaagcagttgaatgctccacttgaggtcgcggatcctgagattgctgatattattgagcttgagaaagctaggcaatggaaggggctagaatcgataccgccagagaatttcacctctgtgtctgtgatgcaagccgctggatcggttatgaccaacaaatacagcgaggggtaccctggtgcaagatattatggtggcaatgagtgtatcgacatggctgaaacactgtgccaaaagcgtgccctacatgctattagattggatcccgctaaatggggagtgaacgtgcaggctctgtcaaggtctcctgcaaaagtacgcgtttacactgcattgcttacacctcatgaaagaatcatggcgcttg

SEQ ID NO: 8128 - DNA, 339 bp, Glycine max
  Clone ID: jC-gmle01810030b11d1
aacaaatatcattgaggtaaaataatttacatcagcatccaccaggattctatgcacttgaggaggctagcagaatttatagcagatacaaccacttacgatcgattgtaaccccattataagggataggttcaacagtcatctgattaagaaatgtcgtatttgaagcctttattacatatgcatctatacatttgaacataacgatcaagattttctggattcttacatataaaggcttttgacattgtctgtaaaatatgtcgtcgtcctctaccatggatcaggaaaactgatcttgttgaattgctcgccagctagaccatggcatgacctaat

SEQ ID NO: 8129 - DNA, 502 bp, Glycine max
  Clone ID: jC-gmle01810030b12a2
gtcaaggaccaaggggcgtgtggttcgtgttggtctttcagtacgacgggagcgttggaaggagctcattatctggccactggtgagctcgtgagccttagcgagcaacagcttgtggattgcgatcacgtgtgtgatccagaagaatatggagcgtgtgactcaggctgtaatggtgggttgatgaacaacgcatttgagtacatacttcagtctgggggagtacagaaagaaaaggactatccatacaccgggagagatggcacctgcaaatttgacaaaaccaaagttgcggctactgtatctaattacagtgtggtttcccttgatgaagaacaaattgctgcaaacctagtaaagaatggccctcttgcagttgctatcaatgcagtttttatgcagacatatgttggtggcgtctcatgcccatacatctgtgggaagcatttggatcatggggttcttctagttggttatggtgaaggtgcatatgctcccattc

SEQ ID NO: 8130 - DNA, 480 bp, Glycine max
  Clone ID: jC-gmle01810030b12d1
aggaccacacatttccttggatttcccacttgtatatgtcaagcatacatacagaaattacatactacataaacaacatgggcttagcagattcctgatcctatacggagataattttaccagtaccaaatgataaaggtcacaacataaatatttatacaaactccccttagtccagtatcacatcacaaccacaatcaggcatatctttgtatttaatggctggatggatatatagcagctacagttgagaccatggaatctactccacacacatttcgacctctgcagatcttggaatatccattctctccccagctttcgccccatgaattcttaatgatccagtaagggttgttcttaaaacgaatgggagcatatgcaccttcaccataaccaactagaagaaccccatgatccaaatgcttcccacagatgtatgggcatgagacgccaccaacatatggctgcataaaaact

SEQ ID NO: 8131 - DNA, 424 bp, Glycine max
  Clone ID: jC-gmle01810030c01a2
gacaacagcagagttggcagcttcactaactttggcagctgctagaaggatagttgaggcagatgagttcatgagagcaggattatatgatggatggctacctcatctatttgttggaaacttgctcaaggggcaaacagctggtgtaattggagctggtcgaattggatctgcttatgcaagaatgatggttgaagggttcaagatgaacctaatttattatgatctctaccagtccacacgactagaaaagtttgtcacagcctatgccgcattcttgaaagcaaatggtgaaaccccaccgacttggaaaagggcagcaaccatggatgaggtcctccaggaggcagatataattagtcttgatcctgtcttggataaaaccacttatcatctagtcaacatggaaagactagctaagatg

SEQ ID NO: 8132 - DNA, 503 bp, Glycine max
  Clone ID: jC-gmle01810030c01d1
agggacataaggaataacttcatttatgtttaattaatgtttgaaatactacaaacacacgatgcttattaacatcacagtctttatatgcacagggccatcgacactttacatggttcttacacaaaaaagaacagacttgccccagagcctaacccaacacacaaaaattggccatttgtgcaatttgaggcccttgaaccatgtgtgtttatagctttgaagttggcaaacccagggcttttgcattaacaatgcttgggcatgcagctggtggtcgagcattctcattgaggaatggttccaccttattggcatcaaaccaaactgggtaccctttaaccttccccagcacgtttagagctgctagtgtagccattccctcacgagtccacttggaggcagatgcaatgtggggtaccacaatggcattcttcaactctgcaagcccaggtttcatgtagggctcttcctcaaacacattaaggcctactcgaaacatt

SEQ ID NO: 8133 - DNA, 198 bp, Glycine max
  Clone ID: jC-gmle01810030c02a2
cgttcatgtatgggtgaatcatgaaggaacagctgaataaattatttgtatttttcattattaccgttacatttgtttttgagttttatctgctacaattaagctactcaagttagttagaaatgaaatgaaatattgtaacaagtcatacgtacatgtttttatttcattagaaatgaaatggtacatttgtttttg

SEQ ID NO: 8134 - DNA, 199 bp, Glycine max
  unsure at all n locations
  Clone ID: jC-gmle01810030c02d1
caaaaacaaatgtaccatttcatttctaatgaaataaaaacatgtacgtatgacttgttacaatatttcatttcatttctaactaacttgagtagcttaattgtagcagataaaactcaaaaacaaatggtaacggtnataatgaaaaatacaaataatttattcagctgttccttcatgattcacccatacatgaacg

SEQ ID NO: 8135 - DNA, 426 bp, Glycine max
  Clone ID: jC-gmle01810030c03a2
cttcgttctgtctctctcttctttctctctcttccattctatctatccattcctgtccatcgccgacaaccgccaattccctccatttcaaagcaaacccctttctcttctcggctgttgctttgaacttgaaaggtgctgaactattttccattctcttttgcaaatttacatctgttctgcaaatactttcttcacggaccttgcatttgagaaatgttgctggagcttcttgatcctgattgcagaatacctttgattagtggatgtattacctggctttctggagttgaaatttgaatttccacctcagcaatattgcttgcatcacatagaaactttcaatatcaattgattttacttctcaaattggtttaagatgtcagaaattgacatggcagttattaaacctgagatgatgaagcc

SEQ ID NO: 8136 - DNA, 428 bp, Glycine max
  Clone ID: jC-gmle01810030c04a2
caaaagtgattccttgtagttttcttttttatattctttggtcgagatgaagctgtacaaactaaattttgtcttgcaagttgcaagcctgttctaagatcaaaattggaagaggtatatcaagaggggggagaagaaagttaggaaatggatcttcactcttcatagaatagcatgatatgcccaacaaagtagatgctcatgccaataccaagtgttcaagcattgattgaagaaaaacaataaacttctaagtacatacttgcaggcttcatgcaactggcaataccctgtattactgtatatttaagccctcatggctcaggaagttaaagtaagttcatccactgatttattgggttattatcattcacgttttgaagtagtgtgcaagttgatctgcattcgtgttatcacgcaaaacaaaa

SEQ ID NO: 8137 - DNA, 425 bp, Glycine max
  Clone ID: jC-gmle01810030c05a2
ttggagagttgaatgtggaatcccttcttgatttccgctcacagttatttgtaatagcatttttaatgagatgctcattagatagctatgaaaaattactgcgccaggctaaagctccaagtatgtttttacaatccttcaaaaattttgtttctttgtgtgtgtatggtgatgataacttaattagtgttcatgaatatgtcaagccttactttagtggttctaaattgaaaagctttctagctggtcataatatcaccattactgatggtattgacaaaactagtgcaactttgcaatttagaaagttagcagattgtgattttctcaagagaaactttaagcagatgtctaatgtgttgtgggtggctcctgaggataaggcgagtttatggtcacaacttcattatgtttcgtgtgataat

SEQ ID NO: 8138 - DNA, 265 bp, Glycine max
  Clone ID: jC-gmle01810030c05d1
agacatatgcgaggtcactgactgggtcgacgggctcactagctggctgccgccctgtcgtcctttttttttttttttgttaaatacatagtttatacttaaagacacgtggttgcagatagatatgcgctataattcagcgaactgactattccattcatgcaacaaaaagctaaaggatcactataagcctaatattgtgagaatcttaccgttgataagaagtatattcctcatactgatacaggcgttagaacttaaaatt

SEQ ID NO: 8139 - DNA, 429 bp, Glycine max
  Clone ID: jC-gmle01810030c06a2
ggatggtgttgcatttggtggctctggctaatctccacgggctaaggcccgcggtggtcgggctggcgtgcccgcttgtcctcaagttcttgatgggcttcaggatcttccgagacgacgcccttcaccactcaagactctttcttttccaattgggtcacatagccttcagcacccaagcccatatctcccgcctgcccagaatggaacgtgctcttaggttaatttggacaacactcactccttctccttctccttcttcaaccgccgataactcccaattcacacaacagagcttctacgacctttccatgctttccctttaatcaccaccactcactcactattagagaaaggggtaattctatttatactgatataagtaaagagaataattgtaatttactcggtttttcctctatctctttc

SEQ ID NO: 8140 - DNA, 425 bp, Glycine max
  Clone ID: jC-gmle01810030c07a2
gttaaagggctttgcatgcatgggaacttgaaccagagcttgcagcttttggataggttgacgaagaagggactcgtcccaaatgcattcacgtattcgttccttctcgaagcggcatataaggagaggggggtggatgaggccatggagcttttggatgatataatagccaagggtggggagcctaatttgagtagttacaatgtgttgataaccgggttgtgcaaggaagggagaactgaagaagctattaagcttttcagggaattgcctgcgaaagggttcagtcctagtggtgtgagtgataacattttgctgaggagattgtgctatgaacggcggtgggaggaagccaatgagcttctggcggatatggataaagaagatcagcctacctcgtgggtcactgacaacatattgattac

SEQ ID NO: 8141 - DNA, 439 bp, Glycine max
  Clone ID: jC-gmle01810030c07d1
tctatggtatgtctaggtcacggactggatcgaccgaggctgactagctggctgcccggctgtcgtccttttttttttttttttgtcttaatttttttttggagaaaattcacaccggtttaaggtatatgcttggacctttccattaatcatttttaaacattacgttcaaccaaaattcctggcattcgggaacatttcgacatacctgactaatgggagtctaaaggctgtcaacctgataaaacaccgtacatgactgaggggcttaatatacgctctacgtacttcctgttgggtactatgggagcgtcaggaatttcactaccgggttgattccaaatccttggaggcctgtggaattcaaagtctttcaacagatcattggctcaaaaccatttttagatctaacccttctatccggttggaccatatattt

SEQ ID NO: 8142 - DNA, 441 bp, Glycine max
  Clone ID: jC-gmle01810030c08a2
caattatggcaacaacaacaacagcagcatgaatgggggtagacagcaacagcaacagcctcagcctgaggtttacaacataagcgagaatgatttcagggatattgttcaacagcttacagggtctccctctcagtatcaggatcatcctaaatccaaacctcctcagaattagaacaattccccaaaacctcaaagtatgagggtgcagaaaattaggcctccccctttgccctatgtgaggccttcattgcacaccaccttgacagcagctagacctgctcactttagacaacaaccatcaccaaaccctaataatatagctgagtcaccaatctgtgtctacatgagataccttgaacatgtaatcacagatcccacttgaaggagtgcccaatttcaatcccatcatcatgcagcgtttttctgctttgcttccta

SEQ ID NO: 8143 - DNA, 404 bp, Glycine max
  Clone ID: jC-gmle01810030c08d1
cgaagtgctcattattcccggtcgacgagctgactagctcgctggccggcggccgcccttttttttttttttttcacttggaaactaactatgcattttaacatgggatccagtgtattacaaaagaacatcacctatcctacataacagatattgtctgaaacctacttcaggggaaggcatcatgagacactacatacatccatcttacagcacctgcctaaccatccaattgagctcctgaacttaaatataacgctagtgtataaaacttgggaaagtcaaaggagtgcattcattatggtcatcagcacatgggaaaaagaaagcttcaggacatgaagaaaccgaacagtaaaaaaacacagcttacagtcttacaacttgcttctacgttacaggcc

SEQ ID NO: 8144 - DNA, 247 bp, Glycine max
  Clone ID: jC-gmle01810030c09a2
gatgatgaagtgaggaagtggatttctggtgttggtgttgacagtgttgggaagaagcttgtgaactcaaaagatggacctccaacctttgagcagcccaagatgactctggagaagctcttgctgtatggtaacatgcttgtccaagaacaagagaatgtcaagagagtccaattggctgacaagtacttgaacgaggctgctcttggaaatgctaacgaggatgctattcagaggggaactttct

SEQ ID NO: 8145 - DNA, 612 bp, Glycine max
  unsure at all n locations
  Clone ID: jC-gmle01810030c10a2
gtctaattatcttcagctaaacttcgatggggttgtgaatattaaaatatctagccggtgggtatttcacatctcacttatattatagtccgagtttgaggtgtgtttttttaggctagatttgaagaactttccagttagttatctcttattttcaaggattattttattatataacatattgagtggtttgtggatattgttctttaattttatatatacttctttgcaaccttattattcttcagtcgcttttgtttgctcgattgaaaaatttcctctttttctttgtgattttaactggtggtctttaaattggtgagtgagacatgtggggatgggttctctttgagtaggatttaggttgatacctcacataaaagcaaagtggcatccaagttggacttcatgataagctacttgtttgttggtcgactttggtagcgatttgaggctcttatacccccatgctgctatagatatctttatattttccccaaaaatccagatccaatctttgcatctaatatctgggatatcaatcttcatatattttcttttgataaagatcttgattaggagagctcggngtttttttatattattattggg

SEQ ID NO: 8146 - DNA, 420 bp, Glycine max
  Clone ID: jC-gmle01810030c11a2
ctcgagccgaatcggctcgagggttaccttcctcatgtcctccgggatcgtgttgaacgactgggtgcgctgggttaccttccacagcggctacgatttcggctacctcctgaagctgttgacatgccggagcttgccggacacgcaggccgggttcttcgatctgatcaagatgtattttccgatggtatatgatatcaagcacctgatgaagttctgcaacagcctccatggagggttgaacaagctcgcggagttgttggaggtggagagggttggcgtctgccatcaggctgggtctgatagtttactcacttcttgtacatttagaaagttgagggatacgttcttcagtggctccacggagaaatatgctggtgtcttgtatggtttaggggttgagagtggacagactaattg

SEQ ID NO: 8147 - DNA, 420 bp, Glycine max
  Clone ID: jC-gmle01810030c11d1
caattagtctgtccactctcaacccctaaaccatacaagacaccagcatatttctccgtggagccactgaagaacgtatccctcaactttctaaatgtacaagaagtgagtaaactatcagacccagcctgatggcagacgccaaccctctccacctccaacaactccgcgagcttgttcaaccctccatggaggctgttgcagaacttcatcaggtgcttgatatcatataccatcggaaaatacatcttgatcagatcgaagaacccggcctgcgtgtccggcaagctccggcatgtcaacagcttcaggaggtagccgaaatcgtagccgctgtggaaggtaacccagcgcacggagtcgttcaacacgatcccggaggacatgaggaaggtaaccctcgagccgattcggctcgag

SEQ ID NO: 8148 - DNA, 569 bp, Glycine max
  unsure at all n locations
  Clone ID: jC-gmle01810030c12a2
aagcttccaactttgcgggattcgtatttgttgtttcagtgctgtgatggggaaggtcgcggtgggagctgcggttgtctgcgccgccgccgtctgcgctacggcggcactggtggtgcgccaccgcatgattagttcccggaagtggagtcgcgccatggcgatactgaaggagtttgaggacaagtgtgggaccccaattgtgaagcttagacaagtggctgatgccatggatgttgagatgcacgcaggtctcgcatctgaaggtggtagcaagctcaatatgttgatcagttttgtcgataatctcccaactggggatgaggaaggactctattatgcactggatcttggaggcacaaacttccgtgtccttcgtgtacatttaggcgggaaagacaaaggtgttatcggccaggagtttgaagaagtttcaattcctccaaatttgatgactggctcttcagaagcattgtttgattttatagcagcagctcttgcaaagtttgttggttcagaacctgaaggtttcattctncccctggcagaaaagagaactgggttttaca

SEQ ID NO: 8149 - DNA, 396 bp, Glycine max
  Clone ID: jC-gmle01810030c12d1
aaggttatatctttgacattattccttaacgaaggagaaacaaaccccgcaaccaaaataatgaatgccccggtcaccagctgcaagggaccattggttcaatgggttgatctattacctatgcaaaaaatgaaacttgttttacacgtttttcccttgtttggcaataaaatttaagactcctccactcccaaatattgggagtgagaagctgccaggagggctgcaccaatgccagagccatcattagcatgctcaatgacaatggtctcagcagcctcattttccaacaattcctttagggtaccctccaagcattctctaaatttggtgtggtgtgtaaacaatcccccatccaaagctatcactgacttttgcttctccccaaccttaacc

SEQ ID NO: 8150 - DNA, 422 bp, Glycine max
  Clone ID: jC-gmle01810030d01a2
cactcaacccctgaattctatagcatttgtttttgatggtgtcaactttggggcatctgattttgcatattcagccttctccatggttgtggttgcaattcttagcatcatttgtctgcttattttgtcatccgctggtggtttcattggaatttgggttgctttgaccatctatatgggtcttagggcatttgctggcttcttaagaattggaacgggatcaggaccttgggagttcctaaggagctcatgactgcacatggcagacaccgtagttatagcttcatattaggcctaggtttcagtggtgtttgctgattacatttaagtgaagagaagctttccctaggtttttaagtcgcttaaaaaattcttcggaaagaataggcacttttccctgcttgattgtgcttggggtattg

SEQ ID NO: 8151 - DNA, 540 bp, Glycine max
  Clone ID: jC-gmle01810030d01d1
aaaaacgaaaggagttctgcatcttttttcagcactagtgattgttccattccatgcaatctttcattttcacgttattcatgcaattaattatatttgcatggttacaaacagaagcttgattctatatttcaatttcatttcactatatatgagactatgagagtagagttagagatttttctgtacatacttatgatgcagaggtaaatttttcaaccaataccccaagcacaatcaagcagggaaaagtgcctattctttccgaagaattttttaagcgacttaaaaacctagggaaagcttctcttcacttaaatgtaatcagcaaacaccactgaaacctaggcctaatatgaagctataactacggtgtctgccatgtgcagtcatgagctccttaggaactcccaaggtcctgatcccgttccaattcttaagaagccagcaaatgccctaagacccatatagatggtcaaagcaacccaaattccaatgaaaccaccagcggatgacaaaataagcagacaaatgatgcta

SEQ ID NO: 8152 - DNA, 421 bp, Glycine max
  Clone ID: jC-gmle01810030d02a2
cactcaacccctgaattctatagcatttgtttttgatggtgtcaactttggggcatctgattttgcatattcagccttctccatggttgtggttgcaattcttagcatcatttgtctgcttattttgtcatccgctggtggtttcattggaatttgggttgctttgaccatctatatgggtcttagggcatttgctggcttcttaagaattggaacgggatcaggaccttgggagttcctaaggagctcatgactgcacatggcagacaccgtagttatagcttcatattaggcctaggtttcagtggtgtttgctgattacatttaagtgaagagaagctttccctaggtttttaagtcgcttaaaaaattcttcggaaagaataggcacttttccctgcttgattgtgcttggggtatt

SEQ ID NO: 8153 - DNA, 538 bp, Glycine max
  unsure at all n locations
  Clone ID: jC-gmle01810030d02d1
aaaaacgaaaggagttctgcatcttttttcagcactagtgattgttccattccatgcaatctttcattttcacgttattcatgcaattaattatatttgcatggttacaaacagaagcttgattctatatttcatttcatttcactatatatgagactatgagagtagagttagagattnttctgtacatacttatgatgcagaggtaaatttttcaaccaataccccaagcacaatcaagcagggaaaagtgcctattctttccgaagaattttttaagcgacttaaaaacctagggaaagcttctcttcacttaaatgtaatcagcaaacaccactgaaacctaggcctaatatgaagctataactacggtgtctgccatgtgcagtcatgagctccttaggaactcccaaggtcctgatcccgttccaattcttaagaagccagcaaatgccctaagacccatatagatggtcaaagcaacccaaattccaatgaaaccaccagcggatgacaaaataagcagacaaatgatgct

SEQ ID NO: 8154 - DNA, 425 bp, Glycine max
  Clone ID: jC-gmle01810030d03a2
gcttccacttctgattcagaaactcttaggcattccacattctcaaccccgaaccctaagagcagagcgaaaatgacaaccaccttcgcgaccgtcgcaggactcggtggcgcattactgtcatccacctcatctcgtctcacctcagggtttgtgaaatccccagtgattgctaggaatcccttgaggcaagctgtggcaatgggaaatgggaggattacatgctttgagaggaattggctgcgggcagattacagtgtgattgggtttgggttgattggttggctagcaccctcaagcataccggctatcaacggtaaaagtctgactggcctcttctttgagagcattggcgctgagcttgctcactttcccagccctgctgcccttacttcgtccttttggttatggctggttacgtggca

SEQ ID NO: 8155 - DNA, 468 bp, Glycine max
  Clone ID: jC-gmle01810030d03d1
gggggggcaagtccaacaataataatatacaacattatgaaggggatattacataaatttttcctaaaaagaaggaaaaagggtgcataaagtcattcataaattgcaaggcactggggcagtgggggcccacaaggaagagaaaaaaaaaaaagtaaaaaccgagaccattggtttagaattcaaaagtagtcttcagcccttcccttgaatccaatttgcccaaaagggaggacaatgaacaagccaaggggccacgtaacccgccataaccaaaaggaccaattaagggcaggagggctgggaaagtgaacaagcttaacaccaatgctttaaaaaaagaggccagtcaaacttttaccgttgatagccggtatgcttgagggtgctagccaaccaatcaacccaaacccaatcacactgtaatttgcccgcagccaattcctttcaaagcatgtaatcctccca

SEQ ID NO: 8156 - DNA, 325 bp, Glycine max
  Clone ID: jC-gmle01810030d04a2
acttttgcaacaagtgaggatgcatcttctgccattcagggcatggatggccaggatcttcatggtcggaggatacgggtgaattatgctacagaaaggtcacgtccagggtttggtggtgatggtggatatggcagtggtggtggtggtggctacaatgggggtggaaacttttgttgtggaggttgatcctcgggactcagtgtccttatgttggtttatgggcgatattggttcatgcttacgcttccactgaggggatgtgacactttgacgcctacaaatattggagggccatgtgtctattacaccaaatcttctgatt

SEQ ID NO: 8157 - DNA, 510 bp, Glycine max
  Clone ID: jC-gmle01810030d04d1
tttcgttcttttttttgaatggttgaaaactaaaatcattataaatggagttcaactcctagaaaaatcttattttacatcagtcgttgagcagacaaactatgaagttcaagccaatgaacatatgaaaatcaagagggtgggaaaagaaattggaaacacatttgattatcataaactccaggtggtacttgctctaggcaaggtgaaaattctcatcagcggttgtgagcgcagtggggaggtacatcattgtgctccctcacattgtgttcaagtggctcaaggaattcatcattgtctgcacctgctgagtcattatggatgctgatgaattcaccgctagctgagcgcaaaatctccaccagagcttgcattgagtcggcaattgctagcattaccagcaccagtgtcactagtttcagcattgacaccactatagctgctagtaacattataaccgccagttccataggttccacccctattatagccactaccaccggcata

SEQ ID NO: 8158 - DNA, 429 bp, Glycine max
  Clone ID: jC-gmle01810030d05a2
ggaaggatgtcttacgttgctcacaacgttaatcagccccaagagaaagatttgttggagggaaatttttcctttgatattaaatctcgctctagattggaaaaagtttcctctacaaaagcacaatttgttagtggaaaaaccttcaaatatgatatgattggtgctggttcacattcttcagaagattttcctgaaaaggaagatcaagaaaaacccaaaaagattgataccagattgagacaaagaatagatcctcaatacaatgaggttcaggctcagatggaaacaaatttgtttaaattgtctcttgatgatgttgaaactcctaaaggttccatgttggatcttaaaatttctcaatctaaaattgcacttcccaaaaacacagttggaggaaccattctgcgtagtgatctattggcaaat

SEQ ID NO: 8159 - DNA, 379 bp, Glycine max
  Clone ID: jC-gmle01810030d05d1
tttcgtttttttttttttttttttttttttttttttgtttttttttttctttttttttgttctggcattaactacttaattggtttgttttgttagtttagcacggtgcctaaaagaatatgcagggatatatttccatcctagaggcaaaagcaactacaactttaggaatcacttccttgactagaaagaaccaaccaaaattgctcccacattctaatatattcattgtatcaacaatgctgcctaacttactaatgcgtgcaagtttcttgtctcagtcaaaatgcattccctggcaaatagagcagaaacaacagcgaccccattgagatttggtgcaccaagtttcatgactgcacgtgcatttgacagacca

SEQ ID NO: 8160 - DNA, 208 bp, Glycine max
  Clone ID: jC-gmle01810030d06a2
acacaatataacacaagaactagagctgcgttggttttacatgcacaaaatactaaaaaactcgagcgtcaaccttgtgatcgtaggggagacctacaccataggatcggttgcattgcaatgcaagataacgggcctttgcctcccattgcttatatagtgtagaggtagacgtacgactgggtcttgtagagaacacttttttctg

SEQ ID NO: 8161 - DNA, 376 bp, Glycine max
  Clone ID: jC-gmle01810030d06d1
gctaaaacaaggcctttctgttaatttcactttacacccaaaaacactgtttacctattcagactcattaaaaaaaccgcatttatcacaatttaacccacggctttgcaattatgcgggaacctcaagtgctgcaagagctaaactctttggcacagaccttggtggtttacccactactggaggtgccacccaagactgtaacgactgagtgtactgaaaccaaattcgttgcctatgactaaaaggcggttgccttgaggagattcaacccttgttggcatctggatgcaatcctcttatagggaatgcttcccagaaccttttcatggatcaatggcatgcttacctacctttgaacacaacctccaatttt

SEQ ID NO: 8162 - DNA, 414 bp, Glycine max
  Clone ID: jC-gmle01810030d07a2
gtttccagaagttgctattcgctcactttctctctctctctagctacctccaaccttataatagtcaaacaccctttctttcttctcccccaaccttcttccttcgacacaaaaatttgccaaactccaacaaaacccaaatccaaataccctttttagtattcaatccaaaggattcacctttgtattctcctcacagtggggcatcatctctcagaagaaatttttttacaaagaaagaggaaaaagaaaagaaaaatgttgcaggtgttcttcactgtggctttctctgcggtttcctctgaccttttcggggccaccaatccgagccctaaacttgttgggggaacaaagggatttggtggccggagattcaggaccccacgggaccagagtttatcctcgcctacgcgt

SEQ ID NO: 8163 - DNA, 441 bp, Glycine max
  Clone ID: jC-gmle01810030d08a2
tgaaactctcctcttacaaaagaaccaacttctaaggagctttggtgacactattaagtctacacttctggcattcagaaatgctattgcatccaatcattcaaagaccccttttcctcaagggggtgttcatcatgttaccaagtatgtcatgaattacatcatggctctagttgaatatggtgacacccttaatctccttcttgctgatgacacctcaattgatcctgcaggcaacaaagatgacacaccatgtctctcattgtgtccagtggcttgccaatttcggtcaatcaccgcaactctagaatccaacttgagcaacaaagtccaagttttacaaagacgaggctttgcaacatattttcatgaagaacaacattcattacatggtgcaaaaggtcaagtgctctgatctaagccatttctttggggactgtt

SEQ ID NO: 8164 - DNA, 398 bp, Glycine max
  Clone ID: jC-gmle01810030d09a2
catcatctcataaccaataaacaacaaaaagaacatcagcagcagccatggccctgaagtttgcacctttctgacacacccaggttctcccaatttgggttgggcaccatggaaactggaataatccagggaccttggggatttcgctctctatccaaattcgttttatgcaccatttctggggcccttaccgtgtgttttgcccttgctggggccctgacaggagctatagctggtgctctagcagctaaggccactaagagtggtcttctccggggagtttcattgggtgccattgccggctctatactctctgtggaggtgtaggaagcttcccgtgcctattggtgtatggagcaaactggctcacggagtgcattatgtatggcagatttcat

SEQ ID NO: 8165 - DNA, 617 bp, Glycine max
  Clone ID: jC-gmle01810030d10a2
ggtgaggtaaacttgaattgaagtgaagaaggagatggctgcaacctcttccttgtgctcatggaccctgcaatcccagatcaatggattcttccttcacaaaacctctctttcccatactccttccctcactttctccaggaggaaaatttcaaccacagtgaaggctacatctcgagtcgacaagttttcaaaaagcgatatcattgtctctccgtccattctttctgcaaacttttcaaaattgggagagcaggtgaaagcagtggaattggctggttgtgattggattcacgttgatgtaatggatggtcgctttgttccaaatattacaattggacctcttgtggttgatgcattgcgccctgtgacagatcttcctttggatgtacacctgatgattgtagagcctgaacaaagggtaccagattttattaaggcaggagctgatatagtcagtgttcattgtgaacaatcttccaccatccattgcatcgtacagttaatcaagtgaaaagtctgggagctaaagctggagttgtcttaaaccccggtaccccctttagtgcaatagaatatatccttgatgtggttgatttgttcttaattatgtccgt

SEQ ID NO: 8166 - DNA, 509 bp, Glycine max
  Clone ID: jC-gmle01810030d10d1
ctactagtattgagtaattatcagtcagatacatgtgatgattgagccacaagcataacttaattatataatatagttgactttgaaactggcgcataagcaatgtctgccattattttacttgattggttctcatactggcagtcaattttgcttatattcaaccacccaatcagtaaaacgatatgccaaaatttaatggagaaacctctatggggcaaaaaatacagcttacattggagcgtacggtgaatatggaaccacacaggcatttcacacagcaactacttcaggtcttttgctggttatgattcctcttatagcttcggcataatctttagctccaaaaacagcagagccagcaaccagtgcattggcttcagcctcaatcaccttgtatgcatttgctggaccaactacaccatctacttcaatccatggattcactaccttctccgcacacaatcttctcaaatcagaaattctgtttacttgactctcaataaaac

SEQ ID NO: 8167 - DNA, 535 bp, Glycine max
  unsure at all n locations
  Clone ID: jC-gmle01810030d11a2
atggcttcaatctcaggcatatgctcatcctccccaactctcaaccactccaccccaaaacgaggccggaccccactcctcccttcctcctcattcccctctaaaccctccccgcctcgctccctcgcgcgtgagacccccgcgccgcaacaacaacaacaacaactctccgcagtaacaaaaccactccacgccgggctcgagaaggagccacgcgccctatggcggcgctacgtggagtggctctaccagcacaaggagctggggctctaccttgacgtgagccgggtcgggttctccgacgacttcgtccgcgaaatggagccccgcttccacgccgcgctccgcgccatggaggacctcgagaagggtgccatcgccaaccccgacgaagggagaatggtggggcactactggctcagggactctgctcgggcgcccacctcgttccttaaatcgcagattgataacacgctcgtcgccatttgcaccttcgccgacgacgtcgtcaccggtaagattaagccgncatcgt

SEQ ID NO: 8168 - DNA, 495 bp, Glycine max
  Clone ID: jC-gmle01810030d11d1
caaaaaagtccgtccaaataaatttaaatttaaagaagaaaaaaaaatcatcttcattgtagatggagagatccaacaaccaaaacaacttataataccattatggaatgaggatttcattaatctactactcaagcgtacaattcatcaagattacactccccaagaaaaaccttgatgctcctcggagaaccacagttaccttcagcaattagtgctctgtcattggcagccatatgagcaatgatcttgtaaatcatttcaatatcttctggggcatggcaacggtcagctacttcttcaagtgttaatggttcaacaggctccttgcagcttgcttcattgagtactgccaatacccgtttctgaagtgctaacacttctcctgctgctttcttaccagcttccacaccaggttggtgataagcatttatgttaacaagcgaagcatatattccaacggcccgttcataaagggctacaagggcaccaact

SEQ ID NO: 8169 - DNA, 576 bp, Glycine max
  Clone ID: jC-gmle01810030d12d1
gtatcttcagattcactcccagaatcacttttgtcttcactttcagatttctctggtgtttcatcctcagatttgttaggaacaccattttcattttcctcctcattttcttcatctctctcttcttcctctgactcatcttctgcgtcacttgtactctttctccgcactactgaagaatcttcatttttcttctgactcttcacagaacgtcttgaagttgttgcagatcttgatgaaccccgttttacaacacgcttgcgctttgttcccttactgggcttgtctttttccgcaagtaacacagttgtggttgcatgaggggcaactaaaaaatctataagctcagcaataatatcttccttccttgatgttgccttgttaattgttatgtcaagcacatcacagaattccagtaacttctctttattacacttgtcaagtttttctgttactttaatcctttgcttttcctcattgtcacgccacacgaaaccagaaaaccttgatatattactcttgatctcaactgcccttcctctccttcaaagagaattgattgagcaatttgaacgt

SEQ ID NO: 8170 - DNA, 289 bp, Glycine max
  Clone ID: jC-gmle01810030e01a2
tgtgggtgtgccacattgcttggtgttttaagctttccggtgggttgagatttttttattgttctttgcatttgtgtgtccaattccaactgccatgcttttcatttttgggttgtgccacgttgctctgtttgctcatggattctgagttgtgagttttaaaattcccgtagatgcctgtgttaccttccagggcgtttgtattattggtttttgttgcgccagggtgttcgatgcttaaagctttccaatggtttggtgttttgtctaatgctgttattgtggtttg

SEQ ID NO: 8171 - DNA, 497 bp, Glycine max
  Clone ID: jC-gmle01810030e01d1
atggggttatatttttatttttaaattttatattcctactatcttataaaaatatccttcaattatattaataattacaaatgaccaagctgtgggggaaacccccaaccccaacaacaaaaaaccgactttattaaaaaaccacaaaatatattacagagagggccgaaaaaaacacaccaccacagagcataccaagccgaaacaaacaaaggcactaacaaaaaaaacggaactcaaacaaaataaaccacaaactcttcctcaaaaaacaaaaaaaacgttggaggcgagacccgcgcacaaaaaaaaaaaaaccacaccccaacccaggaacaaagaaaattccaagaaacccatgcccgcaccgcaacctggaagccaagtcttcaacaaaaaacaaacccttacatattgcgcacgccacggcccccctatcggacacatcctcaccgaaaaaaaccccccaccgccacaaaagaaaaagaaaaactcct

SEQ ID NO: 8172 - DNA, 426 bp, Glycine max
  Clone ID: jC-gmle01810030e02a2
caatttataagaataatccaatgatttctgaaacaaccatttcaattcaatcgataaattcagtaaattgttcattgaaaaaaaaaaaaataaaggatcttaatgctaaaagaaaagcagttatcagaaaaattgaaaaaattaaaaaggggcttgtaatttcagagacaaatattcattcaaacaaaacaacttatgatagtaaaagggtagaattcgaaaaaaaaaaattgctgatattacaaagaagaagaaatgctcgattaactcgtaaatcacattcttttttaaaatttttcatgaaaaggatatacagagatatatttctatatatcagttgtattccgaggatcaatatacaactttttcttgaattaacaaaaaaatttttaaataaatccatttacgataatgaagcaaatgcag

SEQ ID NO: 8173 - DNA, 583 bp, Glycine max
  Clone ID: jC-gmle01810030e02d1
gatctcttgttcttgtaatatatttataaaaatttttcttattaacatgaattttttctgggtatttgtgataaatttttcgtttattcttttgaattaatgaaagacctatggtttgatacataaaaaattgtttattgttttttctagacaggccaactggttcgataacaaatatttcttttttcataaatttgttatttttctttttccttaagcctagaagaattaaattcttctgattttgaatcatcataatatctagacctagttctcctctttgaatagaggctattgtaatttctcttaaattttttaatctaatcaggagacaatatactttgacattgttaaatattctttgacctaagaaattattccaatttaaatgtaaaatcaaaaaatttcttagtaagaaattaagttctgcctccatcttgttcttgtctttctttttctttatacccttactattcttttcactgtctgatcctacataatcgttttcaatatctttttcttggtttgagatagatgattcaagatttcgtggacagggtattctgcttttgcccgatttcag

SEQ ID NO: 8174 - DNA, 424 bp, Glycine max
  Clone ID: jC-gmle01810030e03a2
aagaaactgatggaagagatcaaacaaagtgacgagataatacttttcatcgatgaagtgcacactttgattggagcaggagcagcagaaggggcaattgatgctgctaacatactaaagccagctcttgcaagaggtgaactacagtgtattggagccacaacattagacgagtacaggaagcacattgaaaaagatcctgctttggagagacgattccagccagttaaagtgccagagccaactgtagatgaaaccatacaaatactgaaaggacttagagagcggtatgaaattcaccacaagctccgctatactgatgaggctcttgtagctgctgcacagctgtcctaccagtatatcagtgatcgatttttgccagacaaagctatcgatttgattgatgaagctggttcacgagtcc

SEQ ID NO: 8175 - DNA, 421 bp, Glycine max
  Clone ID: jC-gmle01810030e04a2
aagaaactgatggaagagatcaaacaaattgacgagataatacttttcatcgatgaagtgcacactttgattggagcaggagcagcagaaggggcaattgatgctgctaacatactaaagccagctcttgcaagaggtgaactacagtgtattggagccacaacattagacgagtacaggaagcacattgaaaaagatcctgctttggagagacgattccagccagttaaagtgccagagccaactgtagatgaaaccatacaaatactgaaaggacttagagagcggtatgaaattcaccacaagctccgctatactgatgaggctcttgtagctgctgcacagctgtcctaccagtatatcagtgatcgattttcgccagacaaagctatcgatttgattgatgaagctggttcacgag

SEQ ID NO: 8176 - DNA, 405 bp, Glycine max
  Clone ID: jC-gmle01810030e04d1
tttcgttctttttttttttttttttttgtttttatttttttttttttttttttttgtttttttttttttttggggcctaccaagtattccaataaaaactttagggactttgccaagaaaaaattattttggaaatgggttaaacaaattaaggtcaatagtttagcaaattaaccgttttttaccggaagcgttttttgcaagggttcgggggctccccttctaccattgaacccaatcaccttaccattaaaaacaggattccttttaacaaagaccccctccttgatctctttggcaagaattttctcagccaagctggcccccaaaagtcaaattaggggttttcttaaaggggaagctccataaccaggggtataacctttttggcaaatttggccccga

SEQ ID NO: 8177 - DNA, 419 bp, Glycine max
  Clone ID: jC-gmle01810030e05a2
ctctctagacgttttctatcagaagacggtgatggtgatgttcctgcacctgctcctgcacctaataactcacagaagaagaaatccaatgcttctactcatgctgctgctgctgcacctggtcctgcacctaaccataccaataagcacacgcacagtaagagaaaactcttggggtggattctggggtttgtagcaggggcactggggggaaccttatcaggattcgtgttttctttgatgttcaagctcgctctcgcgttgatcaaaggaagaggaaggaaagcggggcctgatatctatagtccattgatcaagaaagcagaagatttggccttcttggaaaaagaagaaggaatcgcgtcgttggagatcatcaggcgctgtggctgtggagaggtctacaaggcatagttacc

SEQ ID NO: 8178 - DNA, 526 bp, Glycine max
  Clone ID: jC-gmle01810030e05d1
tttcgttctttttttgaaacaacgtaaaactattttattttcagggtgtatccataaacatgtaaagtggaaactagttgtgacagactagattatacatagatcatcgcagtgctgaatttttctttttccaaagaaattcagcgatccgtgataaaggaaacaagattacatcggttcattattgaccctatgaaccaacattgatcctctagttatcaactatattcttaaacaagcacactttggcacaaatatggtacacaatatttcacatacttaaacatacagcagattcagagtttgatctgtgacagcatgcacctaacatccttactgttaggcctctccttgggatcatccatagtgcaaaagcatgcaatcttcagaacaagaagcatctgctcctcatacccattccccagcagctgtgaattaatcgcctacttgggattctcggagcttaaagtcttcctcatccactggaccaaactcatctcttcagtgtgctgaaagaaatcatcag

SEQ ID NO: 8179 - DNA, 384 bp, Glycine max
  Clone ID: jC-gmle01810030e06a2
ctctctagacgttttctatcagaagacggtgatggtgatgttcctgcacctgctcctgcacctaataactcacagaagaagaaatccaatgcttctactcatgctgctgctgctgcacctggtcctgcacctaaccataccaataagcacaagcacagtaagagaaaactcttggggtggattctggggttcgtagcaggggcactggggggaaccttatcaggattcgagtattctttgatgttcaagctcgctctcgcgttgatcaaaggaagaggaaggaaagcggggcctgatatatatagtccattgatcaagagagcagaagatgtggccttcttggaaaaagaagaacgattcgggtgagctgagatcatccagcgc

SEQ ID NO: 8180 - DNA, 441 bp, Glycine max
  Clone ID: jC-gmle01810030e06d1
gaatcatcgaaacgctcatggatataacagggagtattcatgtacatgcaaacaggaaactagtagtgacggactacactgtccatagatcatcgccatgctaatgaagacttattccacacaaatattacaaatccggactatacgaacttgtaatcctacgaacatgattcaccctctggaccaacaatgctcccttaggatgaacgatcacctttaaccggtacgatatggcacagatgttgtgcgcaaactttgacatcctaaagcatacgcacctatgcaaagtctggtcactgccagctgcacgtaacattctaactgttatgccagtgcaagggatcatccatgagctcctaacatgctccaccttgtcctagaggcacttgctagtcatacccaatcgccagcagatttgcatccagaggctacgttggatgc

SEQ ID NO: 8181 - DNA, 413 bp, Glycine max
  Clone ID: jC-gmle01810030e07a2
aaatcatggcttttcttctatccaacctgaaaccctcactgctaccccaaaccaaatcaaaacccattcctcaaacgccttcaccatcatcagcaaaacccacttctcaaagtccttcattgttcttcttcacttcatctgctccactttccgcactccaaagttccactgcacaggttgctcaggggcacacaccaacaacaggtgccagagacgagcttcagcagcagaaggatgagttttacctcaatcttggccttgctgtcaggaccctccgtgaggacatgcccttcatcttcgacaaagacctcaattatgacatttacagggatgatataacattcaaagaccctttgaatacatttactggtattgagaagtacaaattgatcttctgggcattgaggtttcat

SEQ ID NO: 8182 - DNA, 541 bp, Glycine max
  Clone ID: jC-gmle01810030e07d1
tgtcgttcttttttttttttttttcattttgcaagagaaacaaaataattcttaattataaaattttgattatagcatatagatctatctcatctgtgtaaactcaccagacataaaaaccttcatttcctccaacatcagaatgggaaacttgcactcttctgcatccctgcctatctatatacactctgtcctttgagaaaaaccattgtatgctattgaccaaatttcatcatatctaaccaatctattacaacctatagtatatatcatctagggaacaatttactaagtggtcactatgaacatgtagccatacaatcttgtggtagcaacctctcttcttgatccacagtgtccttaacagcatgataaaactctaaccatgaagaagagttggaatccaaaggaccccatgaaaatgttagatttggacttgcagggcaggcagtaaccaaatccaaaactgaaactggtttgagggtctgtggaaagttgaatgctaaattatctacttgggttcataaattttcccatttcg

SEQ ID NO: 8183 - DNA, 420 bp, Glycine max
  Clone ID: jC-gmle01810030e08a2
aagaaagggaaagcaactaaacattctctctcagtccttaaattctcatcgcaacacaacactctcatccacactccaaaatggtgacctcgtcgcaaaagattctggttaccggcggtgccggtttcataggcacccacaccgtggtccagcttctcaaaggaggcttcagtgtttcaataatcgacaatttcgataactccgtcgtggaagcagtggaccgcgtccgccaagtggtgggccctcagctttctcagaacctggaattcacccagggcgatctcaggaatagggatgacttggagaaactcttctccagaacaacttttgatgccgtgatccactttgctggcctgaaagcggttgctgaaagcgtttccaagccccgtcgctattttgattttaattcggtcggcacca

SEQ ID NO: 8184 - DNA, 495 bp, Glycine max
  unsure at all n locations
  Clone ID: jC-gmle01810030e08d1
gttaaaatacatagtttttacttcttgaaatgcggccaaagttttattctcgagattatacaacgaactgcctaaacaaatcatccaacataaaagtattctataaagagatgcctatttgtgtggaaaacattcgtagatgagcagtatatttctcaagctaactcaaggcttccccgtgtaaccctggggattgttctttgcccaattccattggtccctgcacatctcatccacaccatattttgctttccatccaagttctttctcagctctctctgtagatgcataaacctcagtagcatctcccggtcttcttggacataattttactggaattttcttgccagacgccttttcaaatgctgtaaccatttcaagcacggatgttccacgaccagttcccaggttgtaagcagtacaacctatgttctctgttgtgaagagncttccaaggcagcaatatgaccatctgctaagtccatcacatggata

SEQ ID NO: 8185 - DNA, 417 bp, Glycine max
  Clone ID: jC-gmle01810030e09a2
gtcattgaagaaataaaagtgaagttctaattggtgttattgagcagatagcatggagccacagtgtagaatcaagaaggatgccactgaattgatagggaataccccaatggtatatctgaacaacattgtggatgggtgtgtagcccgtattgctgctaaattggagtacatgcaagcgtgctgtagtgtcaaagataggattgctttgagcatgattgaagatgctgagaaaaaaggccttattacacctggaaagactgttctggttgagtatacaaggggtgacaccggcttaggattggcattcatagcagcattgaggggtgataaactgcaggtgactatgccgtcttacgtgagtcttgagaggaagattctactgcgagcctttggagctgatgtatatcttacaga

SEQ ID NO: 8186 - DNA, 461 bp, Glycine max
  Clone ID: jC-gmle01810030e09d1
gagtgcaaaacaacttttgaaatcccatatgagtaatgttgggttattttcataagcaagaaattgaagcttgaagtgtcaatccagatgttattcaacttattttagaccacactataccgacaatagtgcttgcttaacgggtactcagtgagtactagcctaagctatttatgcaccttagtcaaatgtcatttggtcagcttctttgctaatggattcaaacagtggtgaagataagtaacgttctccaaaactggggaaaatcacaacaatgagctttcctgcattttctggtctcttccccacctttattgccactgctgcagcagctcctgatgaaattcccatcagcaaaccttttttcaaggcaagcagcttagcagtttctatagcctcttcacttgaaacctgaataacttgatctaggagatttacatccagaactttgggaatgatac

SEQ ID NO: 8187 - DNA, 529 bp, Glycine max
  Clone ID: jC-gmle01810030e10a2
gaaagaatggcagcttgcactgtctactcaacacaatctctgagcacaaattgctccatctcaaccccatcaaagacgcaactcagttttttccaccaaaagcaggtagttttctggaggaacagcaagaagggcagctgcagcagcagaagaagctatgtgataacatgtgcagcaggtgactcacagacagtggtgattggcctggctgcagactcagggtgtgggaagagcaccttcatgaggaggctgaccagtgtgtttggaggagcagcagagccaccaaagggtggcaaccctgactccaacactctcatcagtgacaccaccactgtcatatgcttggatgattaccactctttggacagaactggaagaaaggagaaggggtgtcactgcccttgaccctagagccaatgattttgatctcatgtatgaacaagttaaagctcttaaggatggaattgctgttgaaaaaccaatctacaaccatgttactggtctcttggatccccctgagctcattaaa

SEQ ID NO: 8188 - DNA, 546 bp, Glycine max
  unsure at all n locations
  Clone ID: jC-gmle01810030e10d1
gtctcaatcttgtatcaacataactgaatctcagcctcgctttttcttctcggataagtacatacatacatagtgtttttttcattaattatcatgcagaacagcctaataacaattgacaaaataacatgaaatagagtggaattgtggaaaacatgaaagaagaaagaaaatgatgattttgatgatgagagaactcaatttggctgcgttgctcgatcgatatatgtatatatattatggcaggttcaattcctaagcttttgcagctactggagtctcagccttgctggctattagctgctcatatagatctcttatcttcaaaccaactatggtttggaagagacctgttccattgttgctgccgggaaaatcagcatgcttcaacatctgttgagtaacctctccatagaactttgtagagaggttgcttaggtggctctcaacgtatattagttcatctagtctgtcaaattggccatccatttctacaactgacacctcattntcgtagtaagtctcaggtccatagaagaatttgat

SEQ ID NO: 8189 - DNA, 459 bp, Glycine max
  Clone ID: jC-gmle01810030e11a2
tggaccgaggacatgagggatgatgcccttgaacccgctgatctcaatgacaggaacatgatggtggtggatgttggtggcggcacgggtttcaccactcttggtattgtcaagcacgtggatgccaagaatgtcaccattcttgaccagtcaccccaccagctcgccaaggccaagcagaaggagccactcaaggaatgcaaaataatcgaaggggatgccgaggatctcccctttcgaactgattatgccgatagatatgtatccgcaggaagtattgagtactggccggatccacagcgtggcatcaaggaggcatacagggttttgaaacttggaggcaaagcgtgtctaattggtccggtctacccaacattttggttgtcacgtttctatgcagatgtttggatgcttttccccaaggaggaagagtatattgagtggtttcagaaggcaggg

SEQ ID NO: 8190 - DNA, 591 bp, Glycine max
  Clone ID: jC-gmle01810030e12a2
ctcgagccgaatcggctcgagctcccgggaaaaaaagtaggtaaaaaaatatgctaagtataaattgtctactgatgaaatacgaaagctgatgatattgaaaaaaaaagaattgtaaataaggttcaggttcgacttccatagagaatatagatgatattgtctataatgatagaaaaaaataaaaaactttcgaaagattttatccaattgaaattttaaaaatgactgggataaacttaagaattcaattattgaaattgaataagtaaacaatttaattggattggtcgaatggtatcaaaaaaatggagtactaactcccatttcttatttattattgaattaaccgatcaacttgctttgttatcgaacatttctttttgatttcaaaaattttccggaaaaaatttgaatctatttttatatgcgaatcaatcctactacttctggtcctgaggtttctgcgcttgaaaaaaaaaatctgggacgtatcgcccaaataattggtccggtactagatgtagcttttccccaggtaagatgcctaatatttacaacgctctgatagttaagggtcgagatactgtt

SEQ ID NO: 8191 - DNA, 424 bp, Glycine max
  Clone ID: jC-gmle01810030e12d1
attccgatattcggacccatcaacttgttatgaaatcacattgatagcctctactcgggtcctaactcggctaaaagctagatttgcctcaattgggtggctcttgccttccgccttattcaaattagcttctgctatttcaagagtttgctgggcttcttggggatcaatggcactacccttttccgcatcatttactaaaacagggatctcattattggttattctagcaaaaccgcccatcagagccatcgttaaccattggtctttaagaagacgtattctcaaaatacctatatctacgggtgtggcaataggcgcatgatttggtaatactccaatttggccgctattagtagataaaatgatttccttcacttccgaatcccaaacaatttgattgggggtcagtacacaaagattt

SEQ ID NO: 8192 - DNA, 424 bp, Glycine max
  Clone ID: jC-gmle01810030f01a2
cacacacacacacactcactttcttgcttgttctaactaccatgacaacccacattgataacctgtgggtgttggccttggtctcaaaatgcacacaagagaacattgcatggtcactcttgaccatcatggtcactatctggatcttcatgaccttcttctgctggactcatcccacaggtcctgcttggggcaagtactactcctttcattactggaaaaaaacatccacaaccacaaccgtaacctgaaacaacacaaacttcaacaaccttaaaatgattcccggtcccaaaggctatcctttcattgtaagcatgagcctcatgacatcccttgcacaccaccgtattgctgccgctgctcaagcatgcaaagccaacaggctcatggccttctacatgggtgacacgcgtgtcatcgt

SEQ ID NO: 8193 - DNA, 381 bp, Glycine max
  Clone ID: jC-gmle01810030f01d1
cgattccccaacaacttgggactgcactcttaataaaaacacggggggaaaaaaaaaaaaaacaaaaccccggtggccccatttatatgagactgggcccactcaaaatttcaaccttgtatggggggttacttaacattaagggggtccaaggggccatgccccgggtacttaacattataaaactgatgcttattattgttataagtactacgaagggcttaatccacccctggggcgaactttaacataaaggggggtagccatttcacaccaaagcctctgcacctccggaagaccaaccttcccctctagaaaggggagccattaaaacttgggcaaaagccttcccccccaaaaagacagggggctaaaaccaaa

SEQ ID NO: 8194 - DNA, 425 bp, Glycine max
  Clone ID: jC-gmle01810030f02a2
cacacacacacacactcactttcttgcttgttctaactaccatgacaacccacattgataacctgtgggtgttggccttggtctcaaaatgcacacaagagaacattgcatggtcactcttgaccatcatggtcactctctggctctccatgaccttcttctgctggtctcatcccggtggtcctgcttggggcaagtactactcctttcattactggaaaaaaacaaccacaaccacaacctcaacctcaaacaacacaaactccaacaaccttaaaatgattcccggtcccaaaggctatcctttcattggaagcatgagcctcatgacatcccttgcacaccaccgtattgctgccgctgctcaagcatgcaaagccaccaggctcatggccttctccatgggtgacacgcgtgtcatcgtc

SEQ ID NO: 8195 - DNA, 395 bp, Glycine max
  Clone ID: jC-gmle01810030f02d1
cgattacccaacaacttgggactggcaacttaataaaaacagggggggaaaaaaaaaaaaaccaaaaccccgttgtcccctttttttggagacagggccaactcaaactttttcccctggttaaggggattcactgaacatttaggggctacaaagggccatgcccctgctatttaacatgtttattattattattattatcattattattattataaaggccttaacccccccctggggggaactttaacaaaaggggggttagccttttcacacgaaagcctcagcacctccgttagatcaaccttcccctcattagaggggggccatttaaactggggcaaaagcctcgccacccaaaaagttccggtgctaaaacccaaagtttttccggg

SEQ ID NO: 8196 - DNA, 415 bp, Glycine max
  Clone ID: jC-gmle01810030f03a2
ctcgagccgaatcggctcgagtccgtgtcttgtttcttctctgcatcctttgggatctcttgcatagaccaaccccagaagaagaaggaaaaaaataaaaaaaaataaaaatcaaccctttttattttggggcttgttggtgattctgttgtacagaagtgttcgttagttatacatttgttcaagattgttgtatagattgattcattattttaacgtactttggagcattgcatgagtgattgccctctgattcttttgtgaagtcaactaaagtccctataattacaaactgagattcagaagcctccggtaggggtatagctagagcttattgccttgctctcatgagaagggctgcagatcttacatttgtgatacaagttatagacattcaaattgcctggaccgattt

SEQ ID NO: 8197 - DNA, 485 bp, Glycine max
  Clone ID: jC-gmle01810030f03d1
atgccatatatgctcggtccggaattaattcccagctcactaatctactgccgcccttttttttttttttttgaacaacatagacttacagtacaagttatacataataatacaaatattaactgtgcaataaccttccaaatcacccagatgtttaccgtgcccaaggctaaatgtctttacattaaagggttctttgaaaacatcctcctagcaattttccttggttcaattaaacttgtgtttaaggatttgaccatgatttattctgaacttgctgcttcagcatactctactgggtccaaagctggtacattaatgcatgtttccagtacaaaactttgaacaagttctgcatgctgttcagacaattcaggtaaaattatggcagtcatcaaggttgatcttcattggaccttgtccgggtcaaacaccgacgccttcttggcacaggagatgcatcttcacctgcattcctaaatata

SEQ ID NO: 8198 - DNA, 420 bp, Glycine max
  Clone ID: jC-gmle01810030f04a2
ctcgagccgaatcggctcgagtccgtgtcttgtttcttctctgcatcctttgggatctcttgcatagaccaaccccagaagaagaaggaaaaaaataaaaaaaaataaaaatcaaccctttttattttggggcttgttggtgattctgttgtacagaagtgttcgttagttatacatttgttcaagattgttgtatagattgattcattattttaacgtactttggagcattgcatgagtgattgccctctgattcttttgtgaagtcaactaaagtccctataattacaaactgagattcagaagcctccggtaggggtatagctagagcttattgccttgctctcatgagaagggctgcagatcttacatttgtgatacaagttatagacattcaaattgcctggaccgatttaaaaa

SEQ ID NO: 8199 - DNA, 518 bp, Glycine max
  Clone ID: jC-gmle01810030f04d1
tctactgccgggctttcgttcttttttttgaacaacatagacttacagtacaagttatacataataatacaaatattaactgtgcaataactcttccaaatcacccagatgtttagcgtgcccaaggctaaatgtctttacattaaagggttctttgaaaacatcctgctagcaattttccttggttcaattaaacttgcgtttaaggatttgaccatgatttattctgaacttgctgcttcagcatactctactgggtccaaagctggtacattaatgcatgtttccagtacaaaactttgaacaagttctgcatgctgatcagacaattcaggtaaaattatggcagtcatcagagttgatcttcattggaccttgtccgggtcaaacgccgacgccttcttggacaggagatgcatcttcacctgcatccctaaatatacgtagatcatcctcaatgtcattatcatgaagacccagtaaactctcaccccacagatagcggcgacgttcagatg

SEQ ID NO: 8200 - DNA, 251 bp, Glycine max
  Clone ID: jC-gmle01810030f05a2
ccgcaacagagagtagaaaagatggcgcggttgatcacagtggtgtggtgcgcggtggcggtgctactgtgcgccgcggcgggcgcgtcgtgggtggaggaggcggcgaacccgatacgaatggtggcgggggtggaggcggaggtggttcgtatgatagggcactgcctactcgcgctgaagggatctaagatcatgagctggatgagaaatagttaccgaaacccacaagatatgagttagagatgcta

SEQ ID NO: 8201 - DNA, 418 bp, Glycine max
  Clone ID: jC-gmle01810030f06a2
ctcgagccgaatcggctcgagattcttttttctaaattaaacaaggcaaggactaactcccgaactgcaagtaaaaaaaatgatagaatagaatatagatttatctataagctctatgacttgtaatagaacttatgcttgatagaaaggttattatcatatagagttgacgaatgagatgaagttgagttcattaaataaagacgaaaagataaaggtggatcttattgttattggatctgttgctgttgatccaaagacaggtgctcgattgggaaagggagagggatttgcagaacttgaatatggtatgctgaggtacatgggagccatcgatgattcaacacgagttgttacatctgtgcatgactgccaattggtggatgatattccagttgaaaagctgttaatccatgat

SEQ ID NO: 8202 - DNA, 390 bp, Glycine max
  Clone ID: jC-gmle01810030f06d1
cgtgatatgtccgtccggaattattcccagctcactagcctgctgccggcctgtcgtccttttttttttctataactgacaacatgaaattttctagttgatacacgtgtatggatccacatcacatttgacttatgcgatgagatcttcatagaaatccacgtcgtcgaatacgacacccaatgatattgcacagtcggattggattgcacaaatgaaccatttgctgtgcactgtctaccatgtacataatcaacccctgctacttcggtgatgcagtacggggtgattacttcgatggacctagaggaagctcttgtccagactattgaccaatcctcttctcgagctccctcagatacgaaccagtcccaacttgtgaggagacaa

SEQ ID NO: 8203 - DNA, 419 bp, Glycine max
  Clone ID: jC-gmle01810030f07a2
caggaagtagtttgcacaaggttcaaggttgaatttcctatctttgataaggttgaagtcaatgggaagaatgcagtgccactttacaagtttttaaaggagaagaaagggggaatatttggcgatggtatcaagtggaacttcacaaagttcttagtaaacaaagaagggaaggttgtggacagatatgcacctaccacctcacctctgaaaatcgagaaagacatcgagaagctcttgcaatcttgagtactaagattttattctacatatctaatgtgctgaggacataggcaatctgtccggtgtcttcgaaggacaagtagcaatatgtatcatcaattaatataatgccctgaaaagttcttaatatatctcgtgtatttggattttggattgctcaataagtgtaaattggt

SEQ ID NO: 8204 - DNA, 385 bp, Glycine max
  Clone ID: jC-gmle01810030f07d1
attaccagctcactagctgcactggtgggctgtcgtccttttttttacattttcatgcttccgatatccaaattatattattattttatggtgttggtaacagagtttgaacaccaatttacacttattgagctatccagaatccaaatacacgagatgtattaagaacttttcagggcattatattaattgatgatacatattgctacttggccttcgaagacaccggacagattggctatgtcctcagcacattagatatgttgaatataatcttactactcaggattgctagagcttatcgatgtctttctcgattttccgaggtgacgtggcatgtgcatatctgtacacaggcttgccttaactggttactaagaacttt

SEQ ID NO: 8205 - DNA, 421 bp, Glycine max
  Clone ID: jC-gmle01810030f08a2
cttctttgtttaaagaagaaattaccaatacacatgcaaaataaaataataaaatacctttggaatccggaaagggttttttgcagcattcacataatttggtaatcttcctttcacttggagactcatcctgagaagaataaattaaagcatgaaaactgggcctagggttctacttcatgtacaaatgagggtaaagtgaaaagatattgccatataatcaagcataaaaattttctttccattgagaacaaggaataactgaaaacaataaggacgaaacttagataccgttccttaagtgcttttggtgctattcttcaatcaaaattggaatttcaactcggtaatttatgctgatctttaatgcaaacctttattaagagattatcaaggtgaaacttcgattctaattgatgaa

SEQ ID NO: 8206 - DNA, 467 bp, Glycine max
  Clone ID: jC-gmle01810030f08d1
ctctctgctctagaattattgatgtctgtttctcacctttgattctggctgttaattgttatcactaggaaattttttggtgtggttggtttctttctttacagtgtgtgtgtgtggttgattctgctttgtttattcctttcttggtggtttggttttctcttgtttgtgtttttcattttgaaatttgaaaagctggacatgtttgtattgtagctgtttattgtatgaatgttttcggtttcaatgtgctttcattttggctttcggttgttactggctctttcttttttggttgagtaattattagggcttttgtttttttgctggttgattctgggttttttgtttggatattttagcttggtttgttctgaatttggccacattttgctctggttcttgtaattgcatgaaatgggtgtcatctctccgaagatcttcccagcatgtgggaacatgtgtgt

SEQ ID NO: 8207 - DNA, 421 bp, Glycine max
  Clone ID: jC-gmle01810030f09a2
agaggctataaaggctgcagttgatttgtcagcgagatacatagttgataggtatctacctgataaagctattgacctcatagatgaagcaggaagtagagcttgtattgaagcctttaagaagaaaaaggagcacgaaactggaatcctttctaagtgcccagctgattactggcaagaaattaaagatgttaagtccatgcatgaaatggagaacaagcttaaatactatggcgcttctagcattgacgataccaatgaactcatactggactcatatttatcttctacaaccaccgataatgaacctatagaagttgggccagaagatatagcagcagttgcttccctctggtcaggaattcctgtgcagaagctcacagctgatcaaagaattcttctgttagatcttgagaatcaa

SEQ ID NO: 8208 - DNA, 375 bp, Glycine max
  Clone ID: jC-gmle01810030f09d1
cataaatgaatttaatagtttgaaaaccaagtttggggacaaaagttttacattgaataacgtgttgccccatttaaaaaattcgacattttatgagccattaaaaaactcgttggttgatgggggaagctttctttttacataagaatcaactaacctatgctacccaagagacaaaacatttcccatcatggggataacccataatactacgggttatgtccaataattaattaccggcctgaccttgggtcagtcaaaaaagttaacaatttgagcaaactgattcgtaacaaagggggttccattagcctccaaatcaatggggacagggtctccttggttggactttccataaaggaatgcctcactcaa

SEQ ID NO: 8209 - DNA, 169 bp, Glycine max
  Clone ID: jC-gmle01810030f10a2
gttttgtttaaattcagcattttgacccggctataacggtattgttagtggtagttaatgaatttccatgtaactttgttattgtatgctatggaggactttgtaataaaatgttatttatcctgtgtttcttaacaaaaacatgcaccaaaccgtaaagagtgctcct

SEQ ID NO: 8210 - DNA, 459 bp, Glycine max
  Clone ID: jC-gmle01810030f11a2
cacacactcaatgaagggagttacagtgaaagttgaagaaacaatggcgtatgctaatgctgcttcaactagcccaacaacatcttcaaacctctccccgcaacccatggaagggttgcacgaggtgggtccccctccgtttctcaccaaaaccttcgacgtggtggaagacccatccaccaacgacatcgtttcgtggagcagatcccgcaacagtttcgtcgtttgggactctcacaagttctctaccaccatcctgcctcgctacttcaagcacaacaatttctccagcttcgtacgacaactcaacacctacggttttagaaaaattgatcctgacaagtgggagtttgcgaacgaagggtttttggcggggcagaggcaattgttgaagacgataaagaggaggaggcacgtgacagtgacacagacacagtcacacgaaggaggaagtggggc

SEQ ID NO: 8211 - DNA, 520 bp, Glycine max
  Clone ID: jC-gmle01810030f12a2
atgatgcaatgattacttctgcaatagagagattagagcaagcacttaaagatgaaggcatttcttataatgtcatttctgggcgacataagagcttgtatagcatttattgcaaaatgttaaagaagaaacttaccatagatgatatccatgacatttatgggctgcgcttgattgttgacaaggaagaagactgttacaaggccttgacagtagttcatcgattgtggtctgaggtgcctggaaagctgaaagattacatatgtcgtcccaagttcaatggatatcaatctctgcatactgtggtgatgggtgaaggcaaggttccccttgaagtacaaattcggaccaaagatatgcatttgcaagcagattttggatttgctgctcattggagatacaaggaagatgattgtcagcattcttcgtttgtgcttcagatggatgagtgggctcgatgggttgtcacctggcagtgtgaagcaatgagtagagattgctcaatctgtggatatgctga

SEQ ID NO: 8212 - DNA, 518 bp, Glycine max
  Clone ID: jC-gmle01810030f12d1
gaatcaagttagccaagttcaaagtagtaacacagttgttctgtacaaatatttctatatacataacagtcactaaataatttcatgttggaatggaagtgaaatccaaaagcacgggtcaacttcttgagccagccatggtgcttgcggcggttcccatgcttgacacagttagcccgcgatcatacatacgctggatttcttccctatattctgtaagagacttgtcaggtatggctggtgtaagttcaatcacatctcccatcttcaacttgctattgggatcactaacgggtttatgattcagccttggcctcaactcttccttcaatgggaacctatatgttgtcaacctagagcttgctctcccagatcttttcaacaaatccaatactgttgagtttgcactgaattcttggacagacatcttatcattctcaatcatgataacaaacacagggccattctgaccacaatcaggcttgtaagaatatgggcaatcctcagcatgtgaaggg

SEQ ID NO: 8213 - DNA, 413 bp, Glycine max
  Clone ID: jC-gmle01810030g01a2
gttcattgatgagctggatgctgttggaagggaacgtggcttgattaaaggttcaggtggacaggaacgtgatgctactcttaatcagctcctggtgtgcttagatgggtttgaagggaggggagaggtgatcactattgcatccacaaaccgaccagacattctggatccagcacttgtgaggcctggcaggttagatcggaaaatatatattcccaagcctggccttattggccgcatagaaattcttgaggtccatgctcgtaaaaagccaaaggctgaagacgtggattacatggctggtgctagtgtgactgatggaatggggggcgcacagctagccatcttaattgaggttgctgccatttgtatgaaacgtgatttcaggtctgagattactactgattacctat

SEQ ID NO: 8214 - DNA, 518 bp, Glycine max
  Clone ID: jC-gmle01810030g01d1
aaacaatagtttaggaatgtctacacttggctttaattcaggctttacaccgaaacgtaggaaaacaaggtttacatgtccccctcacgagctagcaaaggctacctagcttagacccgacacaattattgtccatactccgtagagttgtggtaaagaatataatacaggaacaaggtacatgaaatcagcatatagtataaatattctccaaaattgatggggcatttgcccctgcaatttgttatgcgtggctactcaaactcgtttcctttccactaccgatcaatttttggaattctctacacttagcaactcgtatgtcaagtatgctgggaggcattggttttagggagccgtgcaactctactagatggaagaactcttgtttggttaagcttttcttctcaacaagctcattcaccaaagcatccatcagcgttctattttgctccaggatctcttttgcacgttcataacacgagttgacaatctgcatggcttccgaataatttcat

SEQ ID NO: 8215 - DNA, 257 bp, Glycine max
  Clone ID: jC-gmle01810030g02a2
gaaataataggggggggggagagattttttatacgactgagtctagagggtgtgtgaatagacagagtgatgggtcgagagggctgctacaattcatctcctcatgtgacttcgaatttagacctccgcttgtggcttcattggcattcgtgtttctttttccctctatatgggtctctactcatttgctggcttattaagaattgggtcgggctccggaccttgggcgttcctaccgagctcatgactgctcatgg

SEQ ID NO: 8216 - DNA, 532 bp, Glycine max
  Clone ID: jC-gmle01810030g02d1
caacttatgtattaataggtcatacaaccatcaatggtacatatgagagaactagatgtatcaaataagtccctatataacatttattaagaaagtaaatgttatcccaatgtaaattatgttgcttgcgattatatgtatctcaatattcatagcaatgttgtaacatttaacaaaatcaaatttctccaaatgtcagattttggccgtaacctgctccttcatttcaagcaatgcatcttcaaaacacttggcaagaaactcaggatcaggaatgatgtctttggccacctgcacttgcatgtctgctcttccagcatagctcaccatattcaaaatgagagcatgaggcaaggcagaattatttgcccttaagaacgttataggattgcctccaatcataatctcctcttgcgggccaaccacatttgagatagtgaaggaagtgtggcagagtatccgataatttagaaggctagcaaactttggaccaagggtggacattacaaaatccccattttgtatgagaaac

SEQ ID NO: 8217 - DNA, 417 bp, Glycine max
  Clone ID: jC-gmle01810030g03a2
agaatccgagatcaaccccgacgaaggcaaggggtttttctcggcttcttcagatttctgaaatggcgcctgtttcagctttagccaagtacaagctcgtcttcctgggtgaccaatccgtgggcaaaaccagcatcatcactcgcttcatgtatgataaattcgataacacctatcaggctacaattggtattgattttctatcaaaaactatgtatcttgaagatcgaactgttcgactgcagttgtgggatacagctgggcaggaaagatttagaagtcttattccaagctacatcagggactcatctgtagctgttattgtatatgatgttgcaagccggcagactttcttaaatactgctaagtggattgaagaggtgcgaacagaaagaggcagtgatgtcattattgttc

SEQ ID NO: 8218 - DNA, 294 bp, Glycine max
  Clone ID: jC-gmle01810030g04a2
tttcaacaacatgcttctggtgacgcaatgcatattttcgtgcataacgatcttgatggagggaggattcggagtgaattatcctacagaaaggtcacattcagaggatggaggtgaagatgggtatgagaaaagttgtgaaatgtgactttcactgggaatagaaatattttgatatgtcgaacaaagtcgatgctcatagccaattctcatgtgtttatagcatttgactgtagaaaaacaattaacttttaagtacatacttgcatgctttatgcaaactgggaaataccc

SEQ ID NO: 8219 - DNA, 416 bp, Glycine max
  Clone ID: jC-gmle01810030g05a2
caattttgcgtttctctgcctaaaaggattgaaagatgggtcaagcattcggttgctaccaagtcgatcagtcaaatgtggctatcaaggagcattttggaaaatttgatgatgtcctagagcctggatgtcactgcctgccttggtgtcttgggtaccagattgctggtagtctgtcgctgcgagtgcagcaacttgatgttcgatgtgagacgaaaaccaaggacaatgtctttgtcaatgtggttgcatctgtgcaataccgagctgtgtctgagaaagcatctgatgcattctataggcttaccaacacaagggagcagatccaatcatatgtttttgatgtcatcagggccagtgtaccaaagttggagttggattctgtctttgagcagaaaaatgatatagcaaaggct

SEQ ID NO: 8220 - DNA, 478 bp, Glycine max
  Clone ID: jC-gmle01810030g05d1
aaaagaaaaacacatcttttgggaagtaattcttacatagcaaattccttaatgattcacaagcaacttgacattaagactaatccttaaacaagtgttcaaaactgcacatcagtacttacacataaaatagacactgctatgaatctatcaaatataagaagagtaaagatgcagactttataaggtcaaacaaaagaagcatttcctgaaaaaaacctgacacacatactataagatatttacaactccaagaaagcttaattctgtgaggcagcggcctgaaggagaccatcccgaatttgcacggcaatgtctttaactgtcccaagaccgtgaggtatgaacacagacgaggaccttgacgatgctcctatctctttcatggcgtcaaagtattgagtcaccagcaccatgtccatgacatctttagctgatgtaccgggcacgttctcagagaaagcaagcacgctgtccc

SEQ ID NO: 8221 - DNA, 355 bp, Glycine max
  Clone ID: jC-gmle01810030g06d1
gtgcacgcttttttttttgtcaggaccactgacttaggggcattcaccaattgtccaacgcacggatgcttaccgcaattgccttctaaaccaaccgcaaggaccaattgtgcgactgaaccgatactgtggtactacgaccaattcctaatgcaacactgacatcgtggggtaaaaccaaactgtctataatcggtaaacctagctaacgctacctagcgtagggtgagacaatacagcgctgggggaattctgccacacactgatgagaccatgcgatatactaggaacacattgcaacgtcggtaggaacgctaggatgccataagctccccaattcttggggccacaattc

SEQ ID NO: 8222 - DNA, 428 bp, Glycine max
  Clone ID: jC-gmle01810030g07a2
gtgaattttcattcaccaccttcctatttacttttattttggttttctgttttcacttctaattacaaatctagagaaaacaatttttttactgttcagtgtacgaatatttgaaaataaaaaacaaattaacaataaagttaacagccttgtaattaaaagaaacagcaaaaaaatattttttcagagtaatcgagtagcccttaagtttcttctgtttttttctcctaatgaacacacctttatgatcaagtagctaatgaaacgtgtgtgggcattttgcttttggtggttggatgaggatactaactaatgcctatggaaatgtattcaggtgtgacctgaagattgtgagtgacgcaaatattttctttattgagacaattctgaagcatcatggagtgtggaactgtttctcagatgtcatt

SEQ ID NO: 8223 - DNA, 405 bp, Glycine max
  Clone ID: jC-gmle01810030g07d1
tgagctacgtgccgccctttcgtcctttttttttttttttttttttttcttttttttttttcaccacaaattactttagcgtttagcacttttattcagcatcacatgttaaattctcgagaaggaccaaagctcggcataatgcatcggctgaaagtgacacagcattgaaaagcatgcaaaaattgtcaaggcccaatgatggccctaatggtttatttcgaggcctacaaaagactatgaccgctttagtaaacaattagggtttgacaaaggattaattccgtgacccgagattttactctaaacccattctcacatgacacatacttaagactcattatgagttacgtgacttatatacttgaacatgtgttataaagagatcactctgcactatggata

SEQ ID NO: 8224 - DNA, 431 bp, Glycine max
  Clone ID: jC-gmle01810030g08a2
gttctggaatcaaagattgcttcagatacttcacacactattaaggcaatttgcattgtccacaatgagactgcaactggggtcaccaatgacttggccaaagtgagacaaattctcgattcctaccggcatccagccctccttattgttgatggagtgtcttctatttgtgctcttgatttccgcatggatgaatggggagttgatgtggcaataactggctctcagaaggccctttcccttcccactgggataggtattgtggttgcaggacctatagctattgaggcctcaaaacatgctaaatcacttcgagttttctttgactggaaagactacctgaaattctaccagctaggaacgtattggccatacactccttccatacatttgctgtatggtctgagagctgctcttgatctgatttctga

SEQ ID NO: 8225 - DNA, 436 bp, Glycine max
  Clone ID: jC-gmle01810030g08d1
aaaagaagcaatgcattaaagctgaaagtagagtgtatgttcatcttcaaaggagtgtaaaagagggtaatatatattttacagaatttccgaaagagcagaaaaaaggaagtaaagacaagaatgacttgtgactcaaatcctggaagggatcataggaatagtgtcctgtaagtatgcactggcagcagcaactccacttccaagctttacaggatagcccacatctttcagtatcatctccataccagctagacatcccaacaggtgcaactcattcaagttgccaagatgtccaattctgaaaaccttcccagcaactttgttcaggccaagacctaagctcaaattggatctcttccatgcccttctaactatttcagcactatcaatgtaagcaggaacaagaacagcagtcacagtgtcactggaccac

SEQ ID NO: 8226 - DNA, 441 bp, Glycine max
  Clone ID: jC-gmle01810030g09a2
agcagaagcagcagatatgaatatgaattcaatcccacacgtgctgagtgttgctgggtctgattctgggggtggtgctggaatccaagctgatcttaagacttgtgcggctcgccgtgtctactgttccactgtcattactgctgttactgctcagaacactgctggggttcaaggactcaacattctacctgaggattttgtggcagaccagttgcactctgtgctctctgatatgcatgttcatgtcgtcaaaacaggcatgctgccctctcttaatatagtcaaggtcctttgtcagacccttaggaaatttcccatcaaagctcttgtggttgatcctgtcatgatatctaccagtggggatgtacttgttggtccttccgttcttgctggatttctggaggagctgctttccatgactgacattgtaaccccaaa

SEQ ID NO: 8227 - DNA, 490 bp, Glycine max
  Clone ID: jC-gmle01810030g09d1
agcctccaaatgttttgttctgccccagtatcgagcaatcataaactacttaattggtatgttttgtaagtttagcacggtgccgaaaagaatatgcagttatatatttccatcctagaggcaaaagcaactacaactttagtaatcacttccttgactagaaagaaccaagcaaaattgctcccacattctaatatattcattgtatcaacaatgctgcctaacttactaatgcgtgcaagtttcttgtctcagtcaaaatgcattccctgtcaaatagagcagaaacaacagcaaccccattgagatttggtgcaccaagtttcatgacttcacgtgcatttgacagaccaatgccaccaattgcaaccacaggaagtgtagaggccaggcatacttccttcaagccttctaagcctatagtacgattatttgcctttgtattagttggataaacaccaccacaaccaatgtaatcggcaccatcaat

SEQ ID NO: 8228 - DNA, 512 bp, Glycine max
  Clone ID: jC-gmle01810030g10a2
ttcaattcttcatttctcaaatcgcaattcgtaaaaccataacaacacaaagtgtgtcaaatgcacattaaattctccctccccgaaaaggatgtcgttcgaggtggaggaggaggaggaggcgttcgagcacacgctcttggtggtgcgcgaggtgtcggtgtacaagatcccgccgcgcagcacctccggcggctacaagtgcggcgagtggctccagtccgacaagatctggtcgggccggatccgcgtcgtgtcccgccgcgaccgctgcgagatccgcctcgaggatccgagctccggcgagctcttcgccgcgtgcttcgtctaccccggccagcgcgagaccgccgtcgagcccgtcctcgactcctcccgatacttcgtcctcaagatcgaggacggccagggcaagcacgccttcatcgggctagggttcaacgagcgcaacgaggccttcgatttcaatgtcgcgctctccgatcacgagaggtacgtccgccgcgagcacg

SEQ ID NO: 8229 - DNA, 270 bp, Glycine max
  Clone ID: jC-gmle01810030g10d1
gggggggaaacccttaaaccaggattacctaaaacctcttattgcaaaacaagaaatcctttgaatttccccggaatttataccctcaggcctttgaaaaaatcgcttgttggccctaacccaaatttccccacctttatcggaaaaattccaccccaggttttttctcaaaaagggaacccctaactaactgggaactatgaacaccccaccgaacaaaagcgcggtaacaacctctaaaggggccccacagggaacttggcggcaacc

SEQ ID NO: 8230 - DNA, 537 bp, Glycine max
  Clone ID: jC-gmle01810030g11a2
gtcttgcataagactgaggatgattcacctgcaaatcgatcatcaatgtctgaatttggggatgacaattttgctgttgggagttgggagcagaaagaagtaatgagccgtgatggtcacatgaaacttcagacacaggtcttctttgcctcaattgatcagcgcagtgaacgtgcagcaggtgagagtgcatgtactgctcttgttgcggtaattgctgattggttccaaaacaatcgtgatcttatgccaataaagtcccagtttgatagtcttattcgtgaaggctcattagaatggaggaacttatgtgaaaaccagacctacagggagcgattccctgacaaacattttgatcttgaaacagttgtccaagccaaaatacgccccctttctgtggttcctggcaagtccttcattggattttttcatccagaaggaatggatgaagggagatttgattttctgcacggcgccatgtcttttgataacatctgggatgagattagtcatgctggacgggagtgccctaaccat

SEQ ID NO: 8231 - DNA, 368 bp, Glycine max
  Clone ID: jC-gmle01810030g11d1
acatatactgtgaaaaagatgaaactaaaacaaggcctttttgttaatttcacttcacatacaaaaacactgttaacgtattaagactggttcaaagaaccggatgtataacaccttaattaacggctctgcaattatgcgggaacctcaagtgctgcaagagcaaaagtctgtggaacagacctggggggtttacccactactggaggtgccacccatgactgtaacgactgagtgtactgaaaccaaatttgtagcctatgactaaatggcggaagactggaggagtttcaacccttgttgacatctggatgcaattctctaatagggaaggctgccctgaagtttttcatggattattggcatgc

SEQ ID NO: 8232 - DNA, 590 bp, Glycine max
  unsure at all n locations
  Clone ID: jC-gmle01810030g12a2
aaagccttagccttccctacaactccaaacacaaagacatcatcatccatggctgcctccgtctccactgtcggagctgtcaacagagctcttttgaacctgaatggttctggagctggagcttcagctcccagttcagccttctttgggaccagcttgaagaaggttattgcctcaagggtccccaacagcaaggtttccggtggaagcttcaagattgttgctgtagaagagaagaaagagattgaagagacccagcagaccgacaaggacagatggaagggtcttgcctatgatatctcagacgaccaacaagacatcacaagaggaaagggtttggttgactcccttttccaagctccacaggatgctggaactcactatgcagtcatgagctcctacgagtacctcagcactggacttcgccagtacttggacaacaaaatggatggattctacattgctccagcttttatggacaagcttgttgttcacatctccaagaacttcatgaccctgcccaacatcaaggttcctctcattcttgtatctggggagggcagggacaaggaaatctntccaatgtgagc

SEQ ID NO: 8233 - DNA, 519 bp, Glycine max
  Clone ID: jC-gmle01810030g12d1
aaaggaaaaggcaccaaattcaatttaagtggacactgtaactcaaaattatagaggaagacggtccaatatgaaaaatatagtaagatcatctcaaacttagcatcttctctttgcacctaagacattgagaatgctaagaatgttacacgcaagttccatcacaacttctagcacttggattagtacaacaaccttcacgaacagaaatatttacttgccaagtttgctttgcctccaattcaagactggaagaaagttcccctctgaatagcatcctcgttagcatttccaagagcagcctcgttcaagtacttgtcagccaattggactctcttgacattctcttgttcttggacaagcatgttaccatacagcaagagcttctccagagtcatcttgggctgctcaaaggttggaggtccatcttttgagttcacaagcttcttcccaacactgtcaacaccaacaccagaaatccacttcctcacttcatcatcatatactctggccctcagt

SEQ ID NO: 8234 - DNA, 419 bp, Glycine max
  Clone ID: jC-gmle01810030h01a2
gcaaactcgaggccgcctccgaccagagccgtcaatggcggcgtctccacgagaattggagatgtttcgaaggagattaagagagtgagggcgcaaatggaagaggatgaacagttagcgacgctcatgaggggtcttcgaggccagaatttgagggactcgctcttcgctgaggacgatgttgaacttcgtcttgttgaggtagacgagagtagtgagtttttgccattggtgtatgatcctgccagcatttctgcatattggggaaaacgtccacgcgcggttgcaacgcgcattgtgcagttgctatcagttgcaggaggttttctttctcgcattgccggggatgtgattaacaagaaggttaaagagaatgaagttgctagggccattgagttacgtgaaattgtgacatcttt

SEQ ID NO: 8235 - DNA, 520 bp, Glycine max
  unsure at all n locations
  Clone ID: jC-gmle01810030h01d1
tttttttttttttttgaaaatatgtaaaatatgtaattaagaattttctgcaacatgaaaatatgtaaaataatggtcatatatacaatttttgaacaactgtcaaaatatacacaattgtgtgcagtaaggtagacagaattcttttaacaaaaatgtatcacgaattaatcgtgctaaaacccgagaagataatctgctaacaacctccggaagcactttaacagagatgcctggtaacactgggagaagctcttggataatctgaggaatattcagtgcctgaccagatgttcttgatagggaacttccagcagtcaagaactccaccaccatctggacattgttcaatataacttcatcctcttcagttatggtgggtataagagccgcaggcttaaagggtcccactgtaggtaccatgctgaaaacaggggttacattctgaactcctagcnaggacattactctcaccagttgttcccttgttactgcatcgatgcccttgacgatctcgtcc

SEQ ID NO: 8236 - DNA, 414 bp, Glycine max
  Clone ID: jC-gmle01810030h02a2
tgaagctgtttacgacaaggagcgacccgtagttacatggccgaagcagttgaatgctccacttgaggtcgtggatcctgagattgctgatattattgagcttgagaaagctaggcaatggaaggggctagaattgataccgtcagagaatttcacctctgtgtctgcgatgcaagcggttggatcggttatgaccaacaaatacagtgaggggtaccctggtgcaagatattatggtggaaatgagtatattgacatggctgaaacactgtgccaaaagcgggccctagaagcatttagattggatcccgctaaatggggagtgaacgtgcagcctctgtcaggggcttctgcaaatttccacgtttacactggattgcttatacctcatgaaagaatcatggcacttgatct

SEQ ID NO: 8237 - DNA, 506 bp, Glycine max
  Clone ID: jC-gmle01810030h02d1
gattaagaaatttggtatttgaagcctttattacatatgcatctatacatttcaacataacgatcaagattttctggattcttacatataaaggcttttgacattgtttttaaaatatgttgtcgtcctctaccatggatcaggaaaactgatcttgttgaattgcttgccagtaagaccatgggatgacctaatggaaaattttcttttctcaattcttgtgcttcatggttgctttatcaaaaccaatggttggaaattgttttgcatactcctcaacatcaaggcggagctttgctatctccgattgaaaggtagaagatgactcaattgtggccaagaagtccttcagctttgttcctttgctctctcccttaatcttcacagctatcttcactgctgcatcaaaaaactctgctaccttgacaaaatcctcctcaacaaatcctctagaagtaagagcaggggttcccatcctgatgccaccaggaaccatggcagacaca

SEQ ID NO: 8238 - DNA, 418 bp, Glycine max
  Clone ID: jC-gmle01810030h03a2
aaattaatgtgacttgtgaagtacagcaattattaggaaataatcgaattagagctgtagctatgagtgcgacagaaggtctaatgagaggaatggaagtgattgacacaggagctgccctaagtgttccagtaggtggagcaactctaggacgaattttcaacgtgcttggagagcccattgataatttaggtcctgtagatactcgcacaacatctcccattcatagatctgcgcctgcctttatacaattagatacaaaattagccatttttgaaacaggaataaaagtagtagatcttttagctccttatcgtcgtggaggaaaaataggacttttctgtggagctggagtgggtaaaacgggactgattatggaattgatcaataacattgccaaagctcatggaggtgtatc

SEQ ID NO: 8239 - DNA, 351 bp, Glycine max
  Clone ID: jC-gmle01810030h04a2
ccgcggtggcaagctggaaccatacaaataaactacactttcttccgggagccaagactggatgacactaaccaaagcgcgattgcaaaggcctggactatgagggccccagaggtgtgcatagagctgcaggagacgactttgaatgaaacagccaacattgagatgcttctcgagagatagaacctcggggatccgtgtcctattgatggtccaggggggatattgggtcatgcatacgctcccactgatgggaggtgacactttgtcgcctacaaatgtcggaggaggatgggcgatgaggccaaattgtcggatacacgagcagcggagctggaagtatgggcacat

SEQ ID NO: 8240 - DNA, 411 bp, Glycine max
  Clone ID: jC-gmle01810030h04d1
ttttgttttttttttttttacatttattcattatcatatatgcatcatctagtttcagctgggtgattcttaattaagagaaaactaaaagacaatatctaacatgctattttcgttgtacttgaattacaatgataacgcctcgattgctttcagaatcctttaatgcaaattaccgaactaggactctagcaactagggctaacaacacctagctataataattcggggttgataccatagagctttcgagtgccggctatatcatcgtgcgctagattcaccttcctagttcgcggagggatactaggatacatgatggctcttaggttcgactagtgggctaatccgagcaagtgcccgaactcgggcactgtcacagattcaacgttacacgcacttgttaccggc

SEQ ID NO: 8241 - DNA, 423 bp, Glycine max
  Clone ID: jC-gmle01810030h05a2
cagtcctttccatgtacaaagacataactgttaagattaacggaaatgtctcaaaggaggaagtatttgctcaaattgatagtgcactgacaagtcttatagaggaaaggaaggctgcttcaggatctgtggcagcatagaagacccatcttttgacattttgatctagcatggtgcgttgctggtggtagtggattttaaatgatttatttatagagttaaacaaaagagtcttcactcaaaccaagctgcattttctcgtgaagattgtctcacggcttatatcctcccatttggaaagcaatgtgatgattggcttggaccatgcatgaggacctgtgatagtgtagtgcgcagtatattttacaaatttattttttatgagaaaatgattaccttaaattaaaatcgtttttatgtaat

SEQ ID NO: 8242 - DNA, 475 bp, Glycine max
  Clone ID: jC-gmle01810030h05d1
tttgcatgatgctaggtcacggaattaatcgaccgaggctgactagctcactagcgggcggtcgtcctttttttttttttttcgataattcacaaaaagcctggatcaacatgactcgctatggcatacaagccaccatcatataaggccatggtgccattgtagaacgtatacctgaacaatatacagggccctaaagtgtgacaggtattaaagcctggctgaaggcaaacatcaaatcgcttcaccaacggcaggatctaaagcttgagacacccttcatgggagctggcgcctagcttcgagtgaagactgatatcgtataccatctgaataaacaatttgaacagcactaccaaccgggactgaccatgctggaagcaaatgtcagaagacgggtcttctatgctgcccagatcctgaaccatgctgaatgtcctctataggactgggccgtgcactatgaatccgggcg

SEQ ID NO: 8243 - DNA, 424 bp, Glycine max
  Clone ID: jC-gmle01810030h06a2
aaactttcgaaagattttatccaattgaaattttaaaaatgactgggataaacttaagaattcaattattgaaattgaataagtaaacaatttaattggattggtcgaatggtatcaaaaaaatggagtactaactcccatttcttatttattattgaattaaccgatcaacttgctttgttatcgaacatttctttttgatttcaaaaattttccggaaaaaatttgaatctatttttatatgcgaatcaatcctactacttctggtcctgaggtttctgcgcttgaaaaaaaaaatctgggacgtatcgcccaaataattggtccggtactagatgtagcttttcccccaggtaagatgcctaatatttacaacgctctgatagttaagggtcgagatactgttggtcaacaaattaatgtg

SEQ ID NO: 8244 - DNA, 438 bp, Glycine max
  Clone ID: jC-gmle01810030h06d1
tgtggatatgctaggtacggaattaatcgccgggctcactagctggctgccgccctgtcgtccttttttttgaacattatttacttacaattcttttgttcccttttaatggcttatgtgatccgtgacacaattatcctttttcgcggagcccctgatgaagcgctccgttaactgtctaaacgttccaggggtgagtgaactattagacccagcctgatggcaagcgccaatttgtctacagctgcaacgacttcgccagcttgtttaacccaccatgggggctgttgtacaacactatgaggtgcttgatgtcatatacggtcggtaacttcatccggatcagatcgaaaaacccgggctgcatgtacggctagcttcggcatgtcgcccgcttcaggaggtagccaaaatggggcttgatgaggacggttaccc

SEQ ID NO: 8245 - DNA, 431 bp, Glycine max
  unsure at all n locations
  Clone ID: jC-gmle01810030h07a2
gttgaagatgccatgggaaacctctttggcaaaaataaaaagcgtgacactgaaagtgccaacaataataaaggaagaggtggaagaatctacactgccgtgaccacaagaggcttaccacctcatttcccaacacaattacctcattcacagcctccaccgctattatatccaactctagaacctccgacaccgncaccgccgccgccggcgccaccggcactaccacaatccatgtccaagaaaccaagttttgcgagagttttcgctaaacaaagctcttcagtcatgaacaacaatcaatctgctgccaagaagtatgctttgattcgtgataacttctctacccttgaacaggtgactacagccctgaggaaagaaggattagaatcatcaaatctcatccttggaattgattttacaaagagcaa

SEQ ID NO: 8246 - DNA, 438 bp, Glycine max
  Clone ID: jC-gmle01810030h08a2
ctttctcctaaaacatctgcagtgggttcttcttcttctattacaacaacgtcgtccaagaccatgaccatggccatggccacgatcctgctcctgttcacggtcttcgcggtttcatcggccctagacatgtcgataatctagtacgacaacgcccacgccgccacgtagcgcagcgacgaggagctgatgtccatgtacgagcagtggctagtagagcacggcaaggtgtacaacgcgctcggagagaaggagaagaggttccagatcttcaaggacaacctgcgattcatcgacgaccacaactcccaagaggaccgaacctacatgctcggactgaaccggttcgcggatctcaccatcgaggagtacagggccaagtacttgggaaccaagatcgatcccaaccggaggctcggctagaccccgagcaaccga

SEQ ID NO: 8247 - DNA, 463 bp, Glycine max
  Clone ID: jC-gmle01810030h08d1
attactgattattaaagcttggcgcatcaatacattacaatacaatatgtaactatgaactatcaatatatgatcgttatttatgtctgtgatacacacaattcaggccatgatattcgtacgtgatttacagcaacttctaacttatttaatacattataccaacccaactaggagcaattttcattatacaatgacacttatctttaaactctgaagcatgacaaggtggtagtcaccagggaccatattcttatgcaatttatgccacaactggataagacgcacaagttgcaacaccacacatgttcttgcccaattccattttgaagtagccattctcaccccaagcttctccccatgaattttttatgagccaatatgggacgccatgttaactccataccctacagcaaggactgcatgggtcacatcctgggaagtgctaccgcaaatgtcacta

SEQ ID NO: 8248 - DNA, 405 bp, Glycine max
  Clone ID: jC-gmle01810030h09a2
ttcaattcttcatttctcaaatcgcaattcgtaaaaccataacaacacaaagtgtctcaaattcacattaaattctccctccccgaaaaggatgtcgttcgaggtggaggaggaggaggaggcgttcgagcacacgctcttggtggtgcgcgaggtgtcggtgtacaagatcccgccgcgcagcacctccggcggctacaagtgcggcgagtggctccagtccgacaagatctggtcgggccggatccgcgtcgtgtcccgccgcgaccgctgcgagatccgcctcgaggatccgagctccggcgagctcttcgccgcgtgcttcgtctaccccggccagcgcgagaccgccgtcgagcccgtcctcgactcctcccgatacttcgtcctcaagatcgaggacgg

SEQ ID NO: 8249 - DNA, 339 bp, Glycine max
  Clone ID: jC-gmle01810030h09d1
cttgggggtctaaatgcttaaaaacactttttacaaaccggtttatccaaacgagataaaagaatcaatattccgtgggtttattacttgcaccatgtcaatacatggggtctttgggggtaaattatattgtgaaacatgtgcactgagacacatacacgggtctttttattaaacatacgtccccatacatttgctgcagaagaagacccttgagacgaaaacgcccaacatttttaatggaagggctgtccatgggaacatttatagcgccacgggcggggcccctaggggaaaaattttctgcactttaaaaaaattgtgaaaagccttggaaga

SEQ ID NO: 8250 - DNA, 520 bp, Glycine max
  unsure at all n locations
  Clone ID: jC-gmle01810030h10a2
cgagaattgtatttgcacagtccagaggaagctcgccaattgagaaggaaagctctctctcgtattgaatggctgcaaaaagctgatgtgcctaccatagcacagattgaagagttccattcgatgcagaggatgatgaatgctcctgattcaaatgataatattgatctactgttgagcattgatttgttgggtttacaaggagcaggtaaagcttttccaaacaagattgtttttgatgataagcttgtgttggctaacacacaagaattctttgatggaaattttccagtggattcttggttaccaatttttgtgaattgtctttatcctgtaagtcaattaccttcagaagctgtcgttgtaaatgttacatgtggtagggccgggggtnggntttacccaccactgcttgnattagttctgcagttaacaatcgctcctcagatatcaacaaaaggattcgcacagcacttgggagaggtaagaaaattgtttttcttactagaagtgatccttt

SEQ ID NO: 8251 - DNA, 233 bp, Glycine max
  Clone ID: jC-gmle01810030h10d1
gtgggaacatatttattgtatataggacagcgcttgaaagaggggaaagaaatacaaaagaccacaaagacaatgcaaaaagacgaaattgaaactaatataacagacaataacaagaaacaagaaaagggaacaggagaaggaaagcgaagaaagaacggccaaaccaactctaacggccaagataggccctcgaggaggaccaaggacaaggagcaccacacgtggagcaa

SEQ ID NO: 8252 - DNA, 567 bp, Glycine max
  Clone ID: jC-gmle01810030h11a2
caacgatccagatgtgttgttggcagctgcacgcaaggtggagcctttttgcgattatgttgatattaatcttgggtgtcctcagcgcattgctaaacggggatactatggcgccttcttgatggataaccttcctctggtgaaatctctggtagaaaaattggctgttaaccttcaggttcctgtttcatgcaagattaggctctttccaaatttagaggacactttgaagtatgctaggatgcttgaggaggctggttgtatgcttttagctgttcatggcaggacaagagatgagaaggatgggaagaaatttcgagcagactggaacgctatcagggccgtgaagaatgcagtcagaatccctgtccttgcgaatgggaacataaggcatatggatgatgttagagactgcttggaagagactggtgttgaagggggtgctttctgccgagacactgcttgaaaatccagctctctttgatggattttcgaaccgccgaatgggtgtctgaaagtgaaggaaccaatctggattgaaaacttgaccaggcagatctgctaata

SEQ ID NO: 8253 - DNA, 485 bp, Glycine max
  Clone ID: jC-gmle01810030h11d1
gaaacgttcaaggtaataacataaatttatctgctctgagcaaacatcagcgttttaatagggtacaacactgtcaattggcaattgccataagaatgaagacaaatacaacacatagattagaaatttgaactattctcacttctaatcactacaaaattgtatctaaatcaggtgcaatcatgctagctttggctggccgcaccacctctaccgcataagatatttcattgaggttctggcttaactttgaactccaaatgttgtgcagctgtgttaatctgggtaactgcctgctgtatgttccacttcagtatttttgtaaagtggaattctagtacctgtactcctaagtcgatccaccatgtcataaagaaactcaaaagtcagtttagattgtttggtaagttcctccctgatgtgaggctgaaggctgaaccagtctcccaacaatttatgaacatgagaacgaatcattctccacg

SEQ ID NO: 8254 - DNA, 571 bp, Glycine max
  Clone ID: jC-gmle01810030h12a2
caaaaagaagcctggttaaaagagaaggcggcaggaggtggctatgagtcgtgcgcgtgtgtattgcgacgtgaacgaaacgcgcccacgcgagtactgggactatgagacgctgaatgtagcctgggggtacgtttctcgtctcttttttcctccctccttcgcccctattgccctttgctgccccatcgaaatctttcgctcgataagggggaatggcgttggtttctgcgcatttgaacacagctccagcattatttggatggatcaatgtcattgccgctgtgtttttgtagggaaggctcacagacgtcttgttgtgaatacacagggatcaggacaattacgaggtgatccgcaagatcggccgaggcaaatatagtgaagtattcgagggttataacgtagccagcaactctcgctgcgttatcaagattctcaagccagtcaagaagaaaaaaatcaaacggtacgtatgtttgtagagtttattgaccatgtactggctgtctactttttggttatcacgcttgttgttgatgcttcgtagtgagatcaagatcttgcaaaa

SEQ ID NO: 8255 - DNA, 533 bp, Glycine max
  Clone ID: jC-gmle01810030h12d1
gaaagtaaaagattcgtatacacgttacactgccgcactcacgctattggcctcgtcaaaattcaaagtaggcaaacgtatccatcctgccttgccagcctcgtcgtccgcacaggcaaccctccacgcttttgctactgggcgtggtatgtccttgtattgtgttctcgctttgttatctaagccccgctcgctcctctcctcgttacgctgctcttgttggtggcggcatgttttgcaaagcagatcgatggctggcttttatcaaggattgctcaaaactcatacaacacctccacacctctgttttctcttctcgctccttatgcctttgaaacgaggggtgatcttcaccaagtactttacgcgcttgagtcggatacgctggtgatctcgtcggtgtgatgcgcaccaccacgcagcttctgttcagctgcatcacgtaccggctggaagtacgcgtgctgcatggcctcctttgccgctagtcgctcttggtggtcataacgcagcaaaccgtccagaaaatcgat

SEQ ID NO: 8256 - DNA, 561 bp, Glycine max
  Clone ID: jC-gmle01810031a01a2
caccacaccaatgccaatacccatgtgcaacgaaattcaagcccaagcccaagcccaagcccagagcccaacctgggtttaagctcgtcggtttcaaaaacttcgtccgaaccaatcctaagtcggaccgctttcaagtcaaccgcttccaccacatcgagttctggtgcaccgatgccaccaacgcctctcgccgattctcttggggacttggaatgcctattgtggcaaaatctgatctctccaccggaaaccaaatccacgcctcctacctcctccgctccggcgacctctccttcctcttctccgctccttactctccctctctctccgccggctcctccgctgcctcctccgcctccattcccagtttcgacgccgccacctgccttgccttcgctgccaaacacggcttcggcgtccgcgccatcgccttggaagtcgccgacgcggaagccgctttcagcgccagcgtcgcgaaaggagccgagccggcgtcgccgccggttctcgtcgacgatcgcaccggcttcgggaggtgcgcctctacggcgacgtggt

SEQ ID NO: 8257 - DNA, 452 bp, Glycine max
  Clone ID: jC-gmle01810031a01d1
aatagaaaaatactatccataaaagtttctgtgatttcattttcatacaagggaggacactatcattgtaattctatgtattatagagtataaacaccctatgccacattgattcctcattaatcatttcaacaaaggagtatttgtgttcttccaatgtgcttacgcggttcttttagcttccaaagtcttctcatattcttcaatggatttgaaaagctcagaaaaattgcctttcccaaaacccccacatgcacccttctggtacaccttcccttcctcatcctccaccatgcacccgatcctctgaattatctctatgaatatcgttggcctgtccccaacaggcttggtgaaaatctgaagcagagtgccctgatcatctctgtcaacaagaatcccaagctcctcacactgcttaatctggtcaacggtcaacacatcatcggcac

SEQ ID NO: 8258 - DNA, 571 bp, Glycine max
  unsure at all n locations
  Clone ID: jC-gmle01810031a02a2
gcgattcccttttcccttcgcaactccttcttcaggattccaatttcatccctataagctttctttcttattttcattttagggtttctctcattattcctcttttcttatttcatcttcttcggtttcttttcgcacgcaaattctttcgttcttctcctttttccgtccttatcttatctccttttttcccttcccctttgaatcctcaggcctatcggttgttgacgagacaaaaaaaaaaaaagacaaaaaaagaagagagtagggatttcgatttgtaattttattttttgttctgtggatatattcgattctatttttcgtcctctgattatattctagctgtttttctagggaaattattgtcaattgggttattcacaagaaactctgtgaagtttttgctgcgtcgttttagtttgccatccgaaattgagggttttcttgttagatctctgcccgtctcacaccttttttctgttggtttttttttttaaggttttcatatttttttccttttcttcttgnattggtttggtttttgagaaggaaaaaaaaagggtcctcg

SEQ ID NO: 8259 - DNA, 461 bp, Glycine max
  Clone ID: jC-gmle01810031a02d1
gaaaaaaaattgtattcatttttttaagggccaagtccaccataaatgaatttcacttgatacaagctagagctaaaagtgacatcaacatggatatttgaacacatcataataccactttccttattttctcctccaaggatggcaaaaataaaaaataaacagagtacatacaccacaacctggcaagagtgaatttatcaatacagctaatgaagaagtaacacaagtctaaatgatcagtgttcaaactggttatgcatgcataaaagccaatcacaaatattatttgaatgtgatgttgaaaagcacaacatccggactgcagccctcataacctcataatcacaacgtgccacataactgaaaatccatagtatgcagtaggtgatcaataataatcatggtaacatctggttcctgcagattacactctagtagctgcaagaaacacaaaaatg

SEQ ID NO: 8260 - DNA, 353 bp, Glycine max
  Clone ID: jC-gmle01810031a03a2
agcagaagcagcatatatgaatatgaattcaatcccacacgtgctgagtgttgctgggtctgattctgggggtggtgctggaatccaagctgatcttaagacttgtgcggctcgccgagtctactgctccactgtcattactgctgttactgctcagaacactgctggggttcaaggactcaacattctacctgaggattttgtggcagaccagttgcactctgtgctctctgatatgcatgttcatgtcgtcaaaacaggcatgctgccctcttttaatatagacaaggtcctttgtcagacccttaagaaattccccatcaaagctcttgtgggagaccctgtcatgatat

SEQ ID NO: 8261 - DNA, 487 bp, Glycine max
  Clone ID: jC-gmle01810031a03d1
agcctccaaatgttttgttctgccccagtatcgagcaatcataaactacttaattggtatgttttgtaagtttagcacggcgccgaaaagaatatgcagttatatatttccatcctagaggcaaaagcaactacaactttagtaatcacttccttgactagaaagaaccaagcaaaattgctcccacattctaatatattcattgtatcaacaatgctgcctaacttactaatgcgtgcaagtttcttgtctcagtcaaaatgcattccctgtcaaatagagcagaaacaacagcaaccccattgagatttggtgcaccaagtttcatgacttcacgtgcatttgacagaccaatgccaccaattgcaaccacatgaagtgttgaggccaggcatacttccttcaagccttctaagcctatagtacgattatttgcctttgtattagttggataaacaccaccacaaccaatgtaatctgcaccatc

SEQ ID NO: 8262 - DNA, 614 bp, Glycine max
  unsure at all n locations
  Clone ID: jC-gmle01810031a04a2
agcagaagcagcagatatgaatatgaattcaatcccacacgtgctgagtgttgctgggtctgattctgggggtggtgctggaatccaagctgatcttaagacttgtgcggctcgccgtgtctactgttccactgtcattactgctgttactgctcagaacactgctggggttcaaggactcaacattctacctgaggattttgtggcagaccagttgcactctgtgctctctgatatgcatgttcatgtcgtcaaaacaggcatgctgccctctcttaatatagtcaaggtcctttgtcagacccttaggaaatttcccatcaaagctcttgtggttgatcctgtcatgatatctaccagtggggatgtacttgttggtccttccgttcttgctggatttctggaggagctgcttcccatgactgacattgtaaccccaaatataaaagaggcatcagttttacttggtggtgtgccgctgaaatcagtttctgacatgcgcactgctgccaaattgatacatgatttgggtcctaggaatgtacttgtcagggtggtgacctccctactncgntagatgctattgatgtattctttgatggtgaggagttcta

SEQ ID NO: 8263 - DNA, 473 bp, Glycine max
  Clone ID: jC-gmle01810031a04d1
agcctccaaatgttttgttctgccccagtatcgagcaatcataaactacttaattggtatgttttgtaagtttagcacggtgccgaaaagaatatgcagttatatatttccatcctagaggcaaaagcaactacaactttagtaatcacttccttgactagaaagaaccaagcaaaattgctcccacattctaatatattcattgtatcaacaatgctgcctaacttactaatgcgtgcaagtttcttgtctcagtcaaaatgcattccctgtcaaatagagcagaaacaacagcaaccccattgagatttggtgcaccaagtttcatgacttcacgtgcatttgacagaccaatgccaccaattgcaaccacaggaagtgtagaggccaggcatacttccttcaagccttctaagcctatagtacgattatttgcctttgtattagttggataaacaccaccacaaccaatg

SEQ ID NO: 8264 - DNA, 608 bp, Glycine max
  unsure at all n locations
  Clone ID: jC-gmle01810031a05a2
attctcagttacctcctgttatttgggaaaacccatccatgaggcttttctgttgtatttgctggccatatgacacagtttagatgttaagatatgatctcccaaataaatggcaccaatgcaattcaacgatattgcatagatatattcctagctgcctttaaattgcttccctatgcagttcaatacaagttcattatgtttggagatggacacaagaacccaagctactgtgatcttgtcaacatgattacttctaatgtttttgatgctgccgtaggtgacattgcgattgtctctctccgaacaaagattgtggattttactcgaccatatatagagtcggggctagttgtggttgctccagtaaaaaaaattgaagtcaaatgcttgggctttcttgcgaccatttactccacatatgtggggtgtcactgctttttttttcctctttgatggagcagtggtgtggattcttgaacatagaacaaacgatgagtttcgagggttaccgaaggaacatatagttacagntctttggtaagtactcttgttgtagcttgtgcacatagctagntagtcataactcatcnttgtatgcttttgca

SEQ ID NO: 8265 - DNA, 453 bp, Glycine max
  Clone ID: jC-gmle01810031a05d1
gggcgcaaacaacatggttgacaaactaaaactgcaaaagcatacaaagatgagttatgactaactagctatgtgcacaagctacaacaagagtacttaccaaagaactgtaactatatgttccctcgggaaccctcgaaactcatcgtttgttctatgttcaagaatccacaccactggtccaacaaagaggaaaaaaaaagcagtgacaccccacatatgtggagtaaatggtcgcaagaaagcccaagcatttgacttcaattttttttactggagcaaccacaactagccccgactttatatatggtcgagtaaaatccacaatctttgttcggagagagacaatcgcaatgtcacctacggctgcatcaaaaacattagaagtaatcatgttgacaagatcacagtagcttgggttcttgtgtccatttccaaacataatgaacttgt

SEQ ID NO: 8266 - DNA, 620 bp, Glycine max
  unsure at all n locations
  Clone ID: jC-gmle01810031a06a2
accaaaaccaatcggatcgtttcctctgcggagtcagaaatccatggatccctacaagaatgggccatcaagcgccttcaattctcccttctggactactaattccggtgctcccatctggaacaacaactcatcgctgactgttggatctagaggtccaattctgctggaagattaccatctggtggagaagcttgcaaactttgacagggaacggatccccgaacgtgttgtccatgctcgtggagctagcgcaaagggtttctttgaagtcacgcatgacatttctcacctcacatgtgccgatttcctccgagcccctggagttcagacccctctcatcgtccgtttctccactgttatccacgaacgtggcagccctgaaaccctcagggatcccagaggtttcgctgtgaaattctacactagagagggtaacttcgaccttgtgggaaacaacttccctgtcttcttcgtccgcgatggcctcaagtttcctgacatggtccatgctctcaaacccaaccccaagtcccacatccaggagaattggaggatcctcgatttcttctccaccatcccgaaagccttacatgttcttcttcttatncgatgacgtg

SEQ ID NO: 8267 - DNA, 489 bp, Glycine max
  Clone ID: jC-gmle01810031a06d1
gacattataaaattttattcgaaatataaatgaagactaaaccccaaatgaacggagaatcatgggacgtccagatcctcatccttgtcacaatggacatatattattaagtggacaagtcaaaaagttgagttcatgaaataaacaatatacagttattctgtaataaaaggaccagtcctttcaaattattacagtgccacagacttctcacttgttcctacatctgcaactcctagaagctatggtatccaccaccaatcttagatacttggcttcaagttcaagtgagatgctatcttttgtccaagagaacgatcagcctgagaccagtatgatatccagatgctgcggatttcatgggtgacacgtgggtcagacaaagcatcaacccatcggcggacaaatctttcttgcctgtcagagggccaggatcggtatctctccccaggttgcttgaagttgttctccttctcaatcatgcacttt

SEQ ID NO: 8268 - DNA, 384 bp, Glycine max
  Clone ID: jC-gmle01810031a07d1
aaaaaaaaaaattttttaggccccaattttttttttttgggaaaaatgggggggacaccccttttaggatttaaaaaaatgggtttggaacttttttaaccttaacaggaaactaaggggggggtagggggcccaagaaaatttatcggggggggaaaaaaaaaaaaaggggggttttacccccataactggggggggaacaattaagaggggccaaaaattttggggggaggggttggtggtaaaaaaaaaaacaaggggggaaaattgtttgattctagggggggttggaaaaacaaaattaaacccccgatttgggagttttgaaaaacaggcggggggggggaccaagcctttttatttacaaggggggccccttttttt

SEQ ID NO: 8269 - DNA, 521 bp, Glycine max
  Clone ID: jC-gmle01810031a08d1
gcagaactggtcattgatattgtttccgctgtctcatctgctgtagtattacattcaatttaataaataaaaaaaaaaaaagacaaaggaataccaacttttctatatttcaatatagaaaatcaagcaaccgatgcttatcgggtcctcagggtcatggttcataggattttggcacctgttagtagtcagtttctgtatttttggcacaatcagttattttggcctcatcttgtcaggcttgatacacgaatgtcaatgtatatacacaataacacagtaattttttgtgccctttcactccaacatctgcttctgttcactaggacaagttcagtaacagaagacacagaatcagagtaaaaccctcaatcaaatccctaagattgtaggtgtcagacactttagtccttaacattctaaaatcctcattttagtccctgactttgcaacaaaaattattcactgtagtccatgtccacatttttgaatgtatgaacaaaaaaaagtgaatgacattt

SEQ ID NO: 8270 - DNA, 377 bp, Glycine max
  Clone ID: jC-gmle01810031a09d1
gatgtagtaatctgaaactgatctatttactagatatgaaaatatggttaagcaataatactaaaaatattaatactaacaacaacaacaataatgatgcatgcatgttttctctattctctaccaataggatcaatcaatacaatcagattcgacacctgtgtgccacatacatatatatcatgctctgaacagtcaaaatcatcctgattaggctttggcgaggtcaacaaagctgtgtaaaggcgaagctctgtctgtccgatggaagaagaccgtgacaaatgtctcctgggccttataaaggacaatgaagccaaagtcaacctatgcttggacctactgcatgcccattgaatgggcacagcagcccaagt

SEQ ID NO: 8271 - DNA, 513 bp, Glycine max
  Clone ID: jC-gmle01810031a10d1
gtgtccatgcgcggaccggaataacgggccgacacgctcagtatgactgcgggcggcctttttcttttttttttttttttttgtgctatgtaacaacttctccgtgatgttcatcttttctaattgattttccaactcatcatgagtcacctatgaaacaataagacattctctataataatggcagttaatgagtctaaagaatgggataggaacagtctcaatggtatgaaatacatactttcttctgcttgacagtcttacatgcttgacttagcttctgaagggttagtggcaccagaaaaactaaatcgctgaggcagaacatgctgacatcaagaagccactactggcgagatgagccgatgcctagattgcgttagtttgagctatgcaactcgcggagcaattcagtttagaagtgatctccacgagatgcaaattcattaatcaattgatctggcttcagctttagctacagtcatctacatgacaaaaatctcaatgttttca

SEQ ID NO: 8272 - DNA, 221 bp, Glycine max
  Clone ID: jC-gmle01810031a11d1
ctctgatattgttcattatttgaagtacgtgaccatacacaaatctaaaaactctcaaaagtcattttgggactttgacgctcactttccggggactatagacggtggcataggcccaggcgtcgatgtgacagggtcagccaggtgatcgatgaggatcttacaatggaccctggccggtgacaatggcctgaacaaagaagccaaacatagcgaacatg

SEQ ID NO: 8273 - DNA, 394 bp, Glycine max
  Clone ID: jC-gmle01810031a12d1
caaagaacataaacttgctacctattaccaaatagctgccttactacctatcctttccaacgatcacaccctacagtcttcagcctaaaagccaacccgaagaagaaccaaaggaaccaaaggaaccaaaggaaacaagcaaagggaaacaccacgctatgcagatacccaaaacattttctctctcatccatcctacctgaatcatcgatttcacaccagagataacaagactagaaaagggtcgtttcgtcatgtttttcgtatgtaatgatggccgtccgcgtgtctcctaataagttccagaatgtaccacaatctttgagggagtccaaagtgaaaagttggcaataactggtttgatcccgaatgtgtagggggaggagtaaaacatg

SEQ ID NO: 8274 - DNA, 550 bp, Glycine max
  unsure at all n locations
  Clone ID: jC-gmle01810031b01a2
tccaatggtgaagatctagaaggttatgctggtgcaggtctttatgacagtgtgccaatggatgaagccgagaaggtggtgcttgattattcatcagacaaactgatccttgatggtagttttcgccagtcaatcttgtccagcattgcccgtgcaggaaatgaaattgaagagttgtatggcactcctcaggacattgaaggtgtcatcaaggatggcaaagtctatgttgtccagaccagaccacaaatgtaaacttgcatacccatgtcttctaagccacctacctcaactatgttcatccccgagcaacacgtcgtttcaaacgtggccgtggcagcttctgtgagttcaagagtaacccccggattaccaaacatggccttatagatttattacatgatatattgaaaattaaggaataagtgtataaaaacggaatattgtaaattaagaaaaatttagacggtcttatatattctttttccctactatatacaatatagngtatctagttacttcttcctaatcaaaattatatttttacttg

SEQ ID NO: 8275 - DNA, 502 bp, Glycine max
  Clone ID: jC-gmle01810031b01d1
caagtaaaaatataattttgattaggaagaagtaactagatacactatattgtatatagtagggaaaaagaatatataagaccgtctaaatttttcttaatttacaatattccgtttttatacacttattccttaattttcaatatatcatgtaataaatctataaggccatgtttggtaatccgggggttactcttgaactcacagaagctgccacggccacgtttgaaacgacgtgttgctcggggatgaacatagttgaggtaggtggcttagaagacatgggtatgcaagtttacatttgtggtctggtctggacaacatagactttgccatccttgatgacaccttcaatgtcctgaggagtgccatacaactcttcaatttgatttcctgcacgggcaatgctggacaagattgactggcgaaaactaccatcaaggatcagtttgtctgatgaataatcaagcaccaccttctcggattcatccattggcacact

SEQ ID NO: 8276 - DNA, 507 bp, Glycine max
  unsure at all n locations
  Clone ID: jC-gmle01810031b02a2
aaaacatggctctaacacttcgttcttcaacttcttttattaatcagaaggaaaccaaagtgctcaaaacttctgacaatgcccctgcaatagttagtttttcaaaattcaagccatcatcatcattgttccggctccgggcaaaaaattccatgcaagaagctcatcacactcgtgagaaatgggagaaggtgctggctccgtcggtcgcacatagccacaatgattcaaagagagtacctgtgtatgtgatgttgccattagacacagtaacaatgggaggaagcttgaacaagcccagagcgatgaatgcgagtttgatggccctgaagagtgcaggggttgaaggtgtaatggtggatgcttggtggggttttggtggagaaagaaaggcctttgaagtacaactgggaaccctatgctgaacttgtgcagatgctgcaaatgcatggcttgaagcttcaagatgttatgtctttccatcagngngggggaaatgttggagac

SEQ ID NO: 8277 - DNA, 450 bp, Glycine max
  Clone ID: jC-gmle01810031b02d1
ctgtagcttccctttttctataaaaaaatatcttatgatgcttttaactatataccaagatgcctgaacttgcaaaaatatgcaattacacaagagcagcctcttgcgtgtgcttttcctgtgttgctttgatgtgcccaacataaagatcactcccatgggaatcagctgccggaagtctctctctgcgaccaccctcagacatgcttcttacgaaatccactaggtgccgccagttgtcagcttcaaacaacctcttgttcattcttagatatgtgaatgcagccaatccactgccggattctgacttacttgttgataaaacttgagcatatgcatctgcatcatatctctccaatgcattgtcccccgcaagctctgctctagctgatgttgttgccatcttcacctggtgaactaaccgttcaggtgagcagtttgcaaagtctg

SEQ ID NO: 8278 - DNA, 310 bp, Glycine max
  Clone ID: jC-gmle01810031b03d1
cccagggggggaaacttttttgggggcccattttgaatttaaaaacccattttccttaaaataaaacgaaattttcgaagtcttaaaaaccaaaaaacaaagaaccgctttttcattatgggtaacaaacaagatgtttaaaaaggggtctttcaatattgtgaacaggggaatttttatccttccggtcaaaaaaaaccccttcaaaaagggccaaatgaaatttttcaaaaaaaccctccaaaaaatttcaccaggcccacccccttttttcccaatttatgcggccccggggggggggacccctaaa

SEQ ID NO: 8279 - DNA, 586 bp, Glycine max
  unsure at all n locations
  Clone ID: jC-gmle01810031b04a2
gcgcaaagaacaacaaactaattaggtactgaccatttccgtctatatataaggccaataacccaacacgttctataaacatatagtgactaacctcccactgaagagtaattggtggattccagcaatggccgtggttcatggcagttgggtcaagcttgatcaaagaggagaagggcaaggagcgagaagctcacatgctatagccatagtagcacagaaggtgtatgcatttggtggcgaattcgtgccacgtgtccccgttgataacaaacttcacgtgttcgacctagagactttgacttggtccgtggctgatgcatcaggggatgccccaccgccacgtgtcggtgtcacaatggccgtagtgggagaaaccatatatgtctttggtggaagagatggtgaacacaaagagctcaatgagctctattcttttgacacaagggccaacaaatgggccttgattcaagtggcgatattgggcctnctcaccggagcttaccactcatgaccgcagatgacaacacgtgtatgntttcggtggtgtggggttcacgggaggctaatgactgtgggctttgat

SEQ ID NO: 8280 - DNA, 467 bp, Glycine max
  Clone ID: jC-gmle01810031b04d1
gagccacgaaatcatctatttgagaattgatcacacacttaataatttattccagtacaaaagcacaagtacattcacaagctacatacaataagtataaaagattccctaattcccatgccattgtcctctcacagggtgataaatatatttttaattcatcatatcatctaattgagaattaagcacacacttcctaatttgtttcactacgcaagaacattcacaagctactaaattgaccatcaacgattcataagttctcatgtcattgtccactcattgacatcataaacacatttagaatccatcatagattatgcgaccatatcatactatttcaccaacccttgagaaagagcaaggaagaagatgtcatcaagcctatcattactaggagagttgccaccatacaccaacaacccctcgtggccgccccgccaagctctggcaaaagcacaccaccc

SEQ ID NO: 8281 - DNA, 303 bp, Glycine max
  unsure at all n locations
  Clone ID: jC-gmle01810031b05a2
agctggttgggagaaagcacttccgacatacacaccagaaagccctgctgatgctacaagaaatctgtctcagcaaaatctaaatgcccttgttaaggttcttcctggtctacttggtggtaattcnnaccttgacaattacctcccactgtaatcttcaccttttggtgattcctataactgtgctgccggatgcataactgtgaggctcggggttaaagatcatcatgtgaaatgaacagatgtcggggcttccccacgtggttcccccttaatacaatactgtgatggaaccaccccttt

SEQ ID NO: 8282 - DNA, 454 bp, Glycine max
  Clone ID: jC-gmle01810031b05d1
gtccagaattgagtgctagagtgagcatcactaattcaactacaccacagagcaagccaaatagttgttacaaattcatacaacttcattaattcaactcatccttgaatgtaagtggttcctctgacaatcatatgcaagaacaatctaatcttccttattggggctaaagtgatatctcaaaaaacaagtcatgtaacagtaacccaaagccacaagtgaaaaccacaagttctagatgagataaaagaaactcaacaaatatatctacgaaagttctttggcagcagcaataacagcttccttggtgataccaaactccttgtatatttttccagctggagcacttgctccaaatcgatcaatgcctatggcctttcctttgcttccaacaatcttgtgccaaccaaatgttgatcctgcctcaatgctaactctagctggtactgaagca

SEQ ID NO: 8283 - DNA, 619 bp, Glycine max
  Clone ID: jC-gmle01810031b06a2
caacaaatctctcttactcctatccttcttcccctacttatatctaataaatctctctaactaactaattaactaaatcatcaatagtttatgtgttttaactcacttttccttctccttatatcctaacactatactagattgagcaaagagttgtattttatattgggtaaattttgtggtggactaccttaacatgtggtccattaattggtgcaccatcataattactagctattataagtaaacgcgcatctatctggttttgtatagtgtctcaaactttttttagagtgtgtttggatgagggaatttaaaacagaattttaaattctaagaatttcaaatacttcaattaaaatttttttattttcaaaattttgtgtttggataaaaaaaattaaaattttgagggtaaaagaaaatgagtcgagagttcgagaatgagatttcggaaacttttaagtggaagagaggatgaatgttacacaggaaatacgaaaacattttagaaaattcttctataaaaagagaatttcaatttctcacattaaaaggaaattaaaatatcatattttaggtggttaaaattctatttaaaattttaaatcttcatgaa

SEQ ID NO: 8284 - DNA, 321 bp, Glycine max
  Clone ID: jC-gmle01810031b06d1
aaaaaaaaaaaaacccctttttgtttcacgcggggggcaacaccacctctttcactagaaaaaaaaaaaaaaccggccccaacaaaaaaaaaaattaggggggggggggggtcttcccttcaagacagaaaaaaaagttccctggggggggaaaactttttagcaaaaccattttctttgggggggaaaaacaagggggccaattggactcacacgacttttttttgaacccggacaaggggggggccttcaaaaaagagtttcccccctttctcttgggataaatagggggagaaaggggggggaaaaagatcacatttt

SEQ ID NO: 8285 - DNA, 573 bp, Glycine max
  unsure at all n locations
  Clone ID: jC-gmle01810031b07d1
agcaaagacaatgctatcttataactgatatttgaagcgggagcatcaatacaatacaatatgtaactatgaactatcaatatatgatcgttattatgtctgtgatacacacaattaaggccataatatacttatgtgatttacaacaacttctagcttattttatacatcatgccaacccaactaggagcaattttcatcatacaattacacttatctttaatcatcattcatcaatactggcatcagcaatacgctctaaactctgaagcatgacaaggtggtagtcaccagggaccatattgttatgcaatttatgccacaattggataagatgcacaagttgcaacaccacacatgttcttccccaattccatcttgaagtagccattttcaccccagctttctccccatgaattttttatgagccaatatgggacaccattttcaactccatatccaacagcaagaacggcatggttcacatcctgggaagtgctaccacaagtgtcactagtgaaaactncattctcgtagaaatggacccattcaccacctgaaagggcacactac

SEQ ID NO: 8286 - DNA, 473 bp, Glycine max
  unsure at all n locations
  Clone ID: jC-gmle01810031b08d1
catcaaaattagtagagcattaggagcattgttgatttagtctgtatcacataagagactttacaaaataggtagcaatgcatagaaaggcatatataatttagtaccgtctaaaggtaagattcaagcgaccagggcgtagattagtatgttggagcaagaggttgggggcagtgtttggatgaatagaggcgacgccatggaatatatttctagaggggccaccaaagatcaaaacatcaccggactggagtagcaatttttgaggctggtcgagatccctgtggtcagcgtagaggaagtcagcagagtctccaatggagaaggatatgacgggcaagcctaggcgaagactatctggactttcatccttgtcctgatgaagacccagacggccggtttgggagtaaaagttgacaatgcagatgtcagggggaaagggnggaaggagggcattggaatccttgagtgca

SEQ ID NO: 8287 - DNA, 454 bp, Glycine max
  Clone ID: jC-gmle01810031b09d1
cctgtggttggatgaaacttaagagcagtggattatcatcattatcacatatgatgaagcaatattcaagaggtgcaagaactgtctgaataggaataagagtttatgtacaacgggaaatgaaaatagttgtcatttgaacacactatgctgtggcagcagcttgttcttcaacagcctgtgatgctggcagaagggtgcaaatcaggatgcggtcaccgtacacattatcaacacgtcctgtggtaggccagaactttgaagcacggagccaaggagctgggaaggctgcatactccctggagtatggatttgtccatgcatcagccatgagcagtgatggtggacgatgggcgctcttaagtacatttgtgctaatgtcagcatttccgtaatgaatctcagcaatttcatgtctaatggaaataagagcatcacagaaccttgctagttc

SEQ ID NO: 8288 - DNA, 457 bp, Glycine max
  Clone ID: jC-gmle01810031b10d1
cgtgcgatatgcgccggattaattccagttcccgggtcgacactacgtcggcggccgccctcgtcttttttttttaaaatttaaaacagaagatatctacttcagaattttggaaaggtacttgaaactgtaaaactcatcttaagttaaaaaagattgacacagttactatctttacacaggttaagatcctaccaatcccattatccgtagcgacatgcccaggacatcaaacaagccaggccctagtagtatgtgaaagtaatttttcagaagtaggctatgtatcagctgcaaccagtgcagatctagcacgtgtaacagacgcaatatccgaatcaagctgaagcttatcgacgcacccaaaacttaatctgtactctatatctgccaagatattcatcaactgcactcgcacagctgaaggcatcgtaatcttaaagacaaacatgtgcac

SEQ ID NO: 8289 - DNA, 503 bp, Glycine max
  Clone ID: jC-gmle01810031b11d1
aaaacagaagatatctacttcagaattttggaaaggtacttgaaactttaaaactcatcttaagttaaagaagattgacacaggtactatctttacacagattcagatcctgccaatcccattatccgtagtgacatgcccaggacatcaaacaagccgggccctagttgcatgtgaaagtaattattgagaagtaggctatgtagcagctgcaaccagtgcagatctagcacgtgtaaaagaagcaataaccgatccaagctgaagcttatcgatgcacccaaaacttaatctgtactgtatatctgccaaatcattggtcaactgtactcgcacagctgaaggcatcttagtctgaagaacaaacattgtcacttctctgacaatatcaatcagggccaaccgtttccttgtcttcatttcatctattcttttaaagctatctgcaaattgttcatttagaagccagtaagatgttagctcaatgcttttggcatggattc

SEQ ID NO: 8290 - DNA, 536 bp, Glycine max
  Clone ID: jC-gmle01810031b12d1
gtctactactcgcggcctttttttttttttttttatttacaacaaacatgatatatatagtattacatatcacacaaccataataagcaagactggtttaagacaaacattacaaaccctcaccaatacaaataattgataatcacattactacaatccttaaacttgaaaatatgctctttgccggttcttgcgtgtgttgtcctattgctgccgaatatgagaagtatatgttccatcgatatgtatttctgtatttcttttaaccgtgatacatactgtgataccatcgatatgacactcaacttatatttgcatctcacaacttatctatcaatgaattatactatttatattcataaaaaatgaagaacgagaagaatatctgaagtgttggtgtggaagctgttctgccaccaataggtagaaaagccccattactccagtgtggccacggctgctgctgtagttagactctagagttatagtttcaccatcaattatctttacagaaacctgttgagggatacatgtgc

SEQ ID NO: 8291 - DNA, 568 bp, Glycine max
  unsure at all n locations
  Clone ID: jC-gmle01810031c01a2
aaacttaaggcttaagccatggcatcctcatcctctctgcatctatctcaggcccttctggcacgtgctgtgtaccttcatggctcttcttcttctgaccgtgtctcactctccttcccatcattctctggcctcaagtcacattctacatgcaaagcagcagcagccacgtcctcgcgtagaaggggtgcttgtccatccaccaacgttgttcgagccgctgcggttgagacactcgaccaaaccaccgaggtttctctggtggagaaatccgtcaacaccattcggtttttggccattgatgcagttgagaaggccaactctggtcaccctggtctccccatggggtgtgctccaatgggtcacattctctacgatgagataatgaggtacaatcctaagaaccccgcttggttcaaccgtgaccgtttcgttctctctgctggacatggctgcatgctccaatatgctctccttcaccttgctggctatgacactgttcaggaacaagaccttaaggaattccgacaatggngaagcagaactcctggacatcctgagaactttg

SEQ ID NO: 8292 - DNA, 541 bp, Glycine max
  Clone ID: jC-gmle01810031c01d1
gttacaaattcatacaacttcattaattcaactcatccttcaatgtaagtggttcctctgacaatcatatgcaagaacaatctaatcttccttattgtggctaaagtgatatctcaaaaaacaagtcatgtaacagtaacccaaagccacaagtgaaaaccacaagttctagatgagataaaagaaactcaacaaatatatctacgaaagttctttggcagcagcaataacagcttccttggtgataccaaactccttgtatatttttccagctggagcacttgctccaaatcgatcaatgcctatggcctttcctttgcttccaacaatcttgtgccaaccaaatgttgatcctgcctcaatgctaactctagctgttactgaagcaggtagaacactctccttgtattcatctgactgctcatcaaaaagttcccagctaacaaaagaaacaactctaacagcttttccttccttccttagatcctcagcagcagcagcagcaatttccaactcagaaccagttccaatcaaaataaca

SEQ ID NO: 8293 - DNA, 569 bp, Glycine max
  Clone ID: jC-gmle01810031c02a2
caaaaatatgccactcccatgatgcccctagatgaagaaattctttctaaagttgcacaagatatggttgaggaatggtttgattgtgttgatgaggaggattcctttgaggaagtttctttaagtgcagcacttaatggtgttgagggtttggactatatggaaagaattcctcttgccacatctgagggttttcctcatgtgctttcacgcaaaaatggtgaaaaaggcaaaagaagatttgtttctggggatggtgaagagatgacattgattccgggaaccagtgttgaagaggcttacaacaagctaatagttgaacttgagaaaagtgttcctacattggttggcattgaatgtcccaaggatgagaaacttcctcgtcgcaaaatttttgacaaacctaagacgcgctgcttcactattctccctatggagtttaatcttgtggtccgtcaaaagtttttaaattttgtgaggttcattatgaagaaaagggacaagcttagttgtcaagttggaatcaacccatactccatggaaaggactggtttggcccatagattact

SEQ ID NO: 8294 - DNA, 508 bp, Glycine max
  Clone ID: jC-gmle01810031c02d1
aaacacactcattgcacatagtaatgcgctttatttaagtgaataaaatattacatactagttcacaaatgcaaaaggacactcatcaaccagatatttgagactcttacagttctcaagaagtcgcgtcagcatagggttagtggcgttagaactcagaatttcattcttaacgccaaaaagaacagccagtaaagctactggaaaaggatcaactctagtaagaaaaacaattttcttacctctcccaagtgctgtgcgaatccttttgttgatatctgaggagcgattgttaactgcagaactaatccaagcagtggtgggtaaaccaccacgtccactaccacatgtaacatttacaacgacagcttctgaaggtaattgacttacaggataaagacaattcacaaaaattggtaaccaagaatccactggaaaatttccatcaaagaattcttgtgtgttagccaacacaagcttatcatcaaaaacaatcttgtttggaaaa

SEQ ID NO: 8295 - DNA, 576 bp, Glycine max
  unsure at all n locations
  Clone ID: jC-gmle01810031c03a2
gctcctgcagctccccttgcaagaaaagattacctctttgctcaacaaactgctgagaacattgctgcgctcctcgctcctcagtctggtttctactatgatatttgggtggatggggaaaagattttgacatcagaaccacctgaagtagttcaggcacgaaatgacaattctcatggtacaaacttcccggattcccccgagcccatctatggaactcagttcttgccaaggaaattcaaaattgctgttactgtgccaactgataactccgtggacattctcacaaatgatattggtgttgttgttgttaccgatgacgatggggagcctcaagggttcaacatatatgttggtggtggaatgggaagaactcataggttggaaaccacttttcctcgcttggcagaaccaataggttacgtaccaaaggaggatattttgtatgcagtgaaagcaattgttgttacacaacgagaaaatgggagaagagatgaccgcaagtatagtagattgaaatatttgataagctcttgnngaattgaaaagttagaagtgtagttgagcaatattatg

SEQ ID NO: 8296 - DNA, 427 bp, Glycine max
  Clone ID: jC-gmle01810031c03d1
aaaagaataacttttccataatagtaataaaaactgaacaagggaacacgtttacatgtgttctccacaccatattttgtaattaaccactaactaatacatgatggcaatttacaaatcctgattaatgaactttattggagcaagcgcaaaatcggaaaaaggttttggctagcaagattattgtgaaaaaaaaccaagctgtcgaacacccaaaattggatccagaaatgacagaaaggcttattttatgttcaaaaactcggtctaaatgaggaaccaaaagattttccggaaagccgtttcagataaaaaaacaaaaacccgaacattattttagtggaacccgagttaccacacagtaacaacagagttgtgttcagttgcctatccaccattcctggtaaccataaagcaacatcacata

SEQ ID NO: 8297 - DNA, 580 bp, Glycine max
  unsure at all n locations
  Clone ID: jC-gmle01810031c04a2
ttttacttcccctatggctcgtcactccttgctcttagccctcctcctcttcgccgccgtggccaccggcgcgatggcggtggccgcgtccgacgccgacgacatcctgatccgtcaggtggtgccagatgttggcgaagccgaagaggaggacaacctgctgaacgccgagcaccacttcgcgagcttcaaggccaagttcgccaagacctacgccaccaaggaggagcacgatcatcgcttcggcgtcttcaagtccaacctccgcagagccaggctgcacgccaagctcgacccctccgccgtccacggcgtcaccaaattctccgatctaactccggccgagttccgccgccagttcctcggcctcaagccgctccgcttcccggcgcacgcccagaaggcgcccatcctccccaccaaggatctccccaaggatttcgattggcgagacaaaggagccgtcactaacgtcaaggaccaaggggcgtgtggttcgtgttggtctttcagtacgacgggagcngtggaaggagctcataattggccactggtgagctcgtgagcctttacgagcaac

SEQ ID NO: 8298 - DNA, 380 bp, Glycine max
  Clone ID: jC-gmle01810031c04d1
ggggatccttttggggttggcactaccacatccataagaaccaacattgacaggggcacgtatattagtttaattatgcaataactgaaacataatcaggggcaagtattcccctgttgcagtttgaaacaaccccaccccgccaatctccatagagaggtgcttatcttgcaccatttttaggaccacacatttccttggatttcccacttgtttttgtcaagcattcataccgaaattacctactacataaacaacatgggcttagcagtttcctgatcctatacggagataattttaccacgtccaaatgagaaagtgcacaacataaatttttatacaaactccccttagtccagtatcacatcacaaccacaatc

SEQ ID NO: 8299 - DNA, 513 bp, Glycine max
  Clone ID: jC-gmle01810031c05a2
aaacaatatagatacgatcttttatcctataattttatcaattatgcagataagaaagactcatatatttatggatatagatccctatttcaagtaaaaaaaaaccaagtgatttcttctaattacaacacgtataaaaaagaattattggatatcatagataatctctttatcaagaattatatatcggaagatgcgattctagatatggaaaaaaatatgtatagaaagtattttgattggatgggaatcaatagagaaatactaaatcgttccatatcgaatccagaattttggttcttttcaaaatttgtgatattttatgacgcatataggggtaactcgcaggttataccaatcaaattactttttttttcttctaatgtaaatcaaaatgttagtgaaaataaaaagaacattactagaaagaaaaaaaatgaatctcttgaattggagttagagactcgaaatcgggcaaaagcagaataccctgatcaacgaaatctttgatca

SEQ ID NO: 8300 - DNA, 522 bp, Glycine max
  Clone ID: jC-gmle01810031c05d1
gatctcttgttcttgtaatatatttataaaaatttttcttattaacatgaattttttctgggtatttgtgataaatttttcgtttattcttttgaattaatgaaagacctatggtttgatacataaaaaattgtttattgttttttctagacaggcgaactggttcgataacaaatatttcttttttcataaatttgttatttttctttttccttaagcctagaagaattaaattcttctgattttgaatcatcataatatctagacctagttctcctctttgaatagaggctattgtaatttctcttaaattttttaatctaatcaggagacaatatactttgacattgttaaatattctttgacctaagaaattattccaatttaaatgtaaaatcaaaaaatttcttagtaagaaattaagttctgcctccatctcgggcttggctttctttttctttatacccttactattcttttcactgtctgatcctacataatcgttttccatatcttttcttg

SEQ ID NO: 8301 - DNA, 493 bp, Glycine max
  Clone ID: jC-gmle01810031c06a2
ctaaaccttacactgaaagcatactcactttttctgtgcagaacgactggcgctactggacgaagactttgacttaccctgtggagatgtaatggacctcggggattacatggtccgagaggagcggaagatcacatcccgcgccctccagaagactctcctcatggtaaggaaaggattgcaaaccccgaactgcctggacgagactacatgattatacgcggggactttgctcgacggaactgatgattatattagcaccgacctgggattaggcctgtatctgtgcgctcggacaagggcgagatatttagggctggggcgatggtattaaaaccatgaagaaaggtgaaaatgctattttaaccatgtcctcccgagctattttatggtgaatgtggctgcaattcaactattactgctaatgctacacttcaaattgatgcttatctggtgtcatggactagtgtgaaggacatatgcaaggatgggg

SEQ ID NO: 8302 - DNA, 434 bp, Glycine max
  Clone ID: jC-gmle01810031c06d1
accagcagcttcaagtttttctttagtgaacaaatcccaggactccttctctttctcaaatgaaactacctaaacttccaaataaacagttggggtaggaggaactaccaacccctcctgctgggactttgatgaaccaaaagcatattcaggcgcgatggtcatcagggcaacctcaccctttttcatagggaatacacctctattgagcccatcagcaacttgttcctcacctgggaagaatgcaaaccgtctgctcttctgtatgatggaccttttccaaaaaggcggcaccatcttgtagcttaccaagctcgttgaactttagcaatggccccttcatttggacgctcatatcctgccccttacttcaggatcttccttatgaccttgttgtcatgagttacttcagacacagttttacatgaaactaa

SEQ ID NO: 8303 - DNA, 481 bp, Glycine max
  Clone ID: jC-gmle01810031c07d1
gggcaagaaaataaagaaattgcattaaaaatggagtaagaacatacattttgctcctaattaaaatcgatagccatattctcatgcatgaaataaaagcccgctaattacatattaagatacaaacatttagcatgcactttagattttcatatgaagcaaattatttgggaacaaagttcaaatacctaaattagcctaatcattgacaaactactattgcaccttgcttttcatgggtattatcccctcaaaaatgggataactgagcgccgccagatagccaagtagaaaaagttggccagacatcttttcaaaatctttcacattaaatagtctccataaaccaccaaagaagcaaagaatattcactatgagtaatccaaccaatggagacatgaacaaagctgcaccttcgaactcgaacttaccttgttcatatttctcaaacttctctttggcaacaactttatttgataaa

SEQ ID NO: 8304 - DNA, 470 bp, Glycine max
  Clone ID: jC-gmle01810031c08d1
ataaattagtacaagaagctatgctgcttttccactaaagtagcaatgccaaatcctgttgttgaacgcttcttgtcatttcacataggaccaaccatgtcaatgtgcatccattgaaccttttcatcaacaaactgttttaagaagagagcagccacaatagcagcaccttgtcgaccaccagtgttcacatgtcagcaactcctgatttcattgtttcccagtaactttcccctaatggcaacctccatagtttctccccactcacatcagaagcttcaaaaacttcctttgctaggtcatcactgggtgtaaacacaccagcaattgagggtccaagggcaacaacgcaggccccagtcaaggttgccaagtcaataatcttttcaacaccttgattacaagcatataccagagcatctgccagggtaagtctaccttcagcatcagtgttgttaacctctatagtc

SEQ ID NO: 8305 - DNA, 552 bp, Glycine max
  Clone ID: jC-gmle01810031c09d1
gtggatatgtccggattgaattattcccggcagctgagtctactcggccgccctttttttttttttttgattttgggttctgaacaaaacccagatatattacgcgccaaaaatgtcttctgattgtctaaacaaaactgtgtcactcggcttacacagaaacattggacagaagtttgtaacttaattttcaatgataacgtaagaaaaagaaaacctagaacaaactgaatgcatcatgaaatcaagctccaacaatttcagtgggttcctctgccactatttcatcagcaggtctgtctaccttggcaccaacatcctctgagtaatctccatgaacctccatcagtttcccaagatcaaacttaggggctttcaggatcttgactttacgaacaaacacattctgcagagggtaaatactagatgtcgccttctcaatctcttttccaataatctcaggaataaacttgcggaccaactccttcaaatcacaggatgttgcctggttggtcatgatctccctcatcttcctacgaatcctgctaatct

SEQ ID NO: 8306 - DNA, 513 bp, Glycine max
  Clone ID: jC-gmle01810031c10d1
atgtgcactggccgaattaattccagttcccgggtcgatcatcttactcggccgcccttgttttttttttttagcaacttggaatgagactgaaaattttatttatttcattacatgtgataacatacagaacaaagggcaggtatgaacattattagacactgtaggatgagcaggtgccaaggttacaaaagtgaagccttaaaagaactcggacttggtcaatataacttccctttccatagggacaaaaaggtagtggatatgggagacctatatagcatgctggcacatccaaacccctgctgacaagagttcatatacaccgaccttgacaactgcaaccacgctaatcacagcgcatgacactgaaacttctaacctgcccttcgagtaaaactgatacccaaacatgatgtgaagaacatagttgaaccacatgacacatatggtaaacaaagactgatacagtggtacaggtagctcgtaaaacttagacgactaatacacaca

SEQ ID NO: 8307 - DNA, 486 bp, Glycine max
  Clone ID: jC-gmle01810031c11d1
acacctgaagtttatatgctttcgattcatggtaatggagttgctttacaatttttcctataaccgtacaattgcttgtccttcataaattttaaaaatctgaaaaggacagtaatacaatttacattggcacggacaagctttgcatagatacagggtaaattctcgagctaagaaccaatttagcaccagccatcccaattctaaaatattaaacccaatttagataattttatcaataaaaaagagaagaaatagagatattgaatcaaatttctactaaaaagttaaaattaaattacgcacatcagtttctgaaaaattaaatgaaagaacttctaaaaaagactgatgtacataaattaattttaattcataagagaaatttgatttattttcttctccagtaaattctcgttgagaagtttatctaaagtggagcttaatctggttcatattcaactgcttctcggatgatcccagcga

SEQ ID NO: 8308 - DNA, 520 bp, Glycine max
  unsure at all n locations
  Clone ID: jC-gmle01810031c12d1
gtggctattatnannnnaatcgggtcccccgctacacgagctactagtcggcgctcgttctttttttttaaataactctgtttaccaattagcaatagcatgtcctcgaatataaacataatccaaaagaaatttacaactaagattataatatatgaaccagaaaagttgtaattgcatccttcactttcctaacccatccgatatctaattaattctgatttaatatttgttttcaggtagcaataagtattactaatgaaggctcgttgtgcaaggctatgttgttgtctcagtcttgatatcactgtaaccatgaactactacttgaattttcattgagccacctacaaacctttcaaaaagattgttcaccattcatagaatgataagttaaagtcctttgttttcctggacaaccatgaccaagaatggactttaatcatctcccatactatttcagaatgtaacacaatttaaaccaatgtacaaattagaaactgagccaattcaacaagat

SEQ ID NO: 8309 - DNA, 550 bp, Glycine max
  Clone ID: jC-gmle01810031d01a2
ttgatggtcttgcctctcgctcggctgcatactaccagcaaggtgcccgtttcgccaaatggcgtactgttgtgagcatccccaacggtccctctgctctggcagttaaggaagctgcctggggtctggctcgctatgcagcaattgctcaggacaatggattggtcccaattgtggaaccagagatcttgcttgatggggagcatggtattgacagaacttttgaagtagcaaaaaaggtctgggcagaggttttcttctaccttgctgagaacaatgtcctttttgagggtattcttcttaagcctagcatggttacacctggagctgagtccaaggacaaggccagtcctcagacagttgctgattacaccctcaagctccttcacaggagaattccccctgctgtccctggaattatgtttttgtctggcggacagtctgaggttgaagctaccctcaacttgaatgccatgaaccaatctccaaacccgtggcacgtgtcgttctcgtatgccagagccctccaaaacactgccttgaagacatg

SEQ ID NO: 8310 - DNA, 532 bp, Glycine max
  unsure at all n locations
  Clone ID: jC-gmle01810031d01d1
gagattcaaccatgtttgttatatattgagacataatcaatcaagtacaccactcacagcagaaggtttataagctgtaaaggtacatgtaaccataaacaaaaatagtctccaagactataaaaacattacattttagacaaattagtcttcttccacttcatcctccgtcaacacctactataactgctggtgttgctgctgcctaacatgtatcatattcactacatacatcttagtaggagtagcctttgacgaacaactccttcttggcttcctcggattcaccctcaccggtgtacttcccaagctgggcgagcgagttggacttggcacggaaaaggagtgcatcttgtgccgccttcacgttctctgggcggcctccccatgtcttcaaggcagtgttntggagggctctggcatacgagaacgacacgtgccacgggtttggagattggttcatggcattcaagttgagggtagcttcaacctcagactgtccaccagacaaaaacataattccagggacagc

SEQ ID NO: 8311 - DNA, 558 bp, Glycine max
  Clone ID: jC-gmle01810031d02a2
gcaaattctcctcctacaccaacaaaaatggcaccttctccacaagaaatcatcttccgatccccactccccgatattcccatccccacacatctcccattgtactcttactgcttccaaaacttgtcaaagttccatgaccgtccatgcctcatcgacggcgacaccggcgagaccctcacctacgccgacgtcgacctcgctgctcgccgcatcgcctccggcctccacaaaatcggcatccgccagggtgacgtcatcatgctcgtcctacgcaactgcccgcagttcgccctcgccttcctcggcgccacccaccgtggcgccgtcgtcaccacagccaaccccttctacacgccggcggagcttgcgaagcaagcgacggccacgaaaaccaggctcgtcataacgcaatccgcgtacgttgagaaaatcaagagtttcgcggacagcagcagcgatgtcatggtgatgtgcattgatgatgatttttcttatgaaaacgacggcgttttgcatttctcaacgctcagtaacgccgacgaaacggaagcccct

SEQ ID NO: 8312 - DNA, 402 bp, Glycine max
  Clone ID: jC-gmle01810031d02d1
ccagccaaccctggccttttaattttttttttgggaaccgggattaaaaatgggaacaaaacccccacccgggggggcctggggtccggaaaaaaaaacccccccgattttcctttggcacaatttgggccctaatgggccccccccaaaccttcgtgaagtgtgggcgtaaacccccttcaaaaaatttccccggggggggctttagaaataaggcccggaaaaaaaaccctccctttttttttgaaaaaacccccctggggggaaagggttttttggatttaaccccgggggacctaaaaaccttttgcccttaaaacaaaggcaaggggaattccccctggagtttgttttttaatgcccccaaggggggttacaaaaaggtgggggggggcaataaaa

SEQ ID NO: 8313 - DNA, 581 bp, Glycine max
  Clone ID: jC-gmle01810031d03a2
ctctcttcgttctatcaccgaaacccttcttccattaccggcgaacgaagtcggtggcagaaaaggaacaacctccattcccaaatcgtaaaatccgatgacgaccgctgcaagacccacatgggcacctgctaaaggtggcaatgaacaaggcggtactcgaattttcggtccctcacaaaagtactcttctagggacatcgcatcgcacaccactctcaagcccaggaaggaagggcaggacactcaggatgaattaaagagaagaaacctacgtgatgaactggaagatcgtgaacgaaggcatttctcatcaaaaaataaatcttatgatgacagggatcacggaaagggtagccatctgtttttggaaggttccaagagagacattgaagatcgcattgttgctcgtagtgttgatgcagatgattctgacgttgaagtcaaaagtgatgatgacagtgatgaagatgatgatgatgaggatgacactgaagcattgctggctgagcttgaacaaataaagaaagaaagggcagaggataagctacgcaaggaacgacaacacaggaggaggagct

SEQ ID NO: 8314 - DNA, 429 bp, Glycine max
  Clone ID: jC-gmle01810031d03d1
cattgaatgttattttatggtctgactcttaaacccagttggcattaacaagcatacaccatgttacagcaactacgagtaacatgttaaaatacggttataagagaaacaaatatatccatcaacattgaatcatacatttagatacaaactgcaaattaataagttctgttgagaccaaaatccaaacaactcggacttctggcacaaggacttacttcatgtatttatgcagaaattttctatggaaatcattcctgatggtgtcattgatgaatcgcttagctgttttggtttcaccacgggactggttcttaaacaccacatgatcatcccaccttcttttcacattgaaagatgctgttggattatttagcagagggtttccacgcagaagctctgcctcctttactttaagctcctcctcct

SEQ ID NO: 8315 - DNA, 592 bp, Glycine max
  unsure at all n locations
  Clone ID: jC-gmle01810031d04a2
caagcttgccttcaacttccataaagaagtgtgacattttcactggggaatgggtgccgaacccaaaggctccatattacacaaacaaaacatgctgggctattcatgagcaccaaaactgcatgaagtatggaagaccagactctgagctcatgaagtggaagtggaagccaaacggatgtgacctacctgtgttcaaccccttccaattcctagagattatgaggggaaaatccatggcatttgttggtgactcagttggcagaaatcagatgcagtccatgatttgccttttatcaagggtggaatggcccatagatgtatcatataaaagagatgactattttatgcggtggaggtacccaagttacaacttcaccatggctgctttttggacaactcatttagtgagatccaaagaagcagatgcaaagggtccaggcccaacaggcctttgcaacctttaccttgatgagccagatgagaaatggataacccaagttgaagattttgactatgtcattcttaatggaggacatnggtttacccggtcaatggtgttctatgagaagcaaaaattgttggatgccat

SEQ ID NO: 8316 - DNA, 473 bp, Glycine max
  Clone ID: jC-gmle01810031d04d1
gaatcaaatttgatcttttttataaaagatttacaatacatgtgcgcaaggaagtttacaattacatgcaagattccataaaaaaaaattgataaatgtatgcaatcaatttcatttgtcaatttgaatgcaaatgaagcctctcttcagctgagctcacaccctccatcttcaacattcctagtagaaaatcactccatgtgtgtataggccccggcaagcaccaatgcacacaatcattgtacaatgtcacattttcattaagccagtgcccatatctacttgggtgaccatctggtctcagcaatgatgcttgtgtgatatcaaatagcctatatttcaaacccttctttttggcttccttctccgcaattttgaactcctctaattgaatcatataaaactccaaattgaggccctctaattgtgtctcatcgctcttaaatggcttagttctaatgcaattcccaccc

SEQ ID NO: 8317 - DNA, 632 bp, Glycine max
  unsure at all n locations
  Clone ID: jC-gmle01810031d05a2
ggagtgtgtgcgagttgtttatttcaaagaatagattggatccaaccaaactgcactttttagttataactaagaaaatgtgcataatcccgcgaattacttctgaaaattacttctgaattaatgaaattttttcaataatttaagaaaaaatatttaagaactatagcatttcgcgatttattggtaatccactttgattctctattaaccaataattttggactattaccatggttaaagtgaatagtttgaagtctagacgcagtgtagtactctttctaccactatgttaatacagaaatgaaatggtttcgataaaattattagatttttttttcgatatagaacactcatgtcgataaaatggcttgaatcctatttacttacggcaagaaattgaaaaacgggttaatttaaccctcccttttgtacaatgcgtaatcgatgacctatgtataaatgaataagaattctttggatttgagaaaaaaaacaactttgctgacatatattttgttggtcagaagagtcctncgaatattctggtcttatattgggattgttttcaatattttaaaaataanaatagcgaagagaggataggctcattacataaaaaaatggtaaat

SEQ ID NO: 8318 - DNA, 428 bp, Glycine max
  Clone ID: jC-gmle01810031d05d1
tttttttttttttttttttttttttttttttttttttttttttttttttttttttttttttttttttttttttttttttttttttttttttttaatttccaaccaaacccatttttttaaaaatacaaaattaccccccaaggaaaaaaaaagattttaaaagccccctttttacaaaatggggaggggaaattaaaacggcttaaaaggggcaaccaactttttcccccccggcccgggaaaaaaaaaagccccccccgggctggaaaaggcccctcaaaaagggcctcggcccccccaaggaaggcctgggaaaaaaaaaaaaattctttgaaaggggggttattccggttaaaaaaccccccccccccaccaaaaagcccccccccccgcccaattctaaaagaacaaaaaacccccaccgcccc

SEQ ID NO: 8319 - DNA, 524 bp, Glycine max
  unsure at all n locations
  Clone ID: jC-gmle01810031d06a2
gcgagaaatggcgatggcaatggcgcttcgcaggctttcatcttcaattgacaagcctctgcgccctctgttcaatgccggttccctctactacaagtcgtctttgcctgatgaagctgtttacgacaaggagcgacccggagttacatggccgaagcagttgaatgctccacttgaggtcgtggatcctgagattgctgatattattgagcttgagaaagctaggcaatggaaggggctagaattgataccgtcagagaatttcacctctgtgtctgtgatgcaagcggttggatcggttatgaccaacaaatacagtgaggggtaccctggtgcaagatattatggtggaaatgagtatattgacatggctgaaacactgtgccaaaagcgtgccctagaagcttttagattggatcccgctaaatggggagtgaacgtgcagcctctgtcagggtctcctgcaaatntccacgtttacactgcattgcttaaacctcatgaaagaatcatggcacttgatc

SEQ ID NO: 8320 - DNA, 395 bp, Glycine max
  Clone ID: jC-gmle01810031d06d1
ttttttttttttttttttttttttttttttttttttttttttttttttttttttgttttttttggtcatttttttttttttttttttttttatatattttaaaaatttttatgttttataacccccctaggggggagggggacaaaaaaccacctgaaaaaaaaaaaggggcttaaacccctcaataaaaaaaggtggtataccaaaaacaaaaaaggaaaagaattgcggagaacaaaaaaaaaagggaaaaccgcctcaggcaaaaaaatgggaccccgccccccccgcataaaaaaaaagccccccctcctaagaaggggcccaaaaaaacccggggagccgaccggggaaaatttttcctcataaaaaccagggggcaaagggctttttat

SEQ ID NO: 8321 - DNA, 469 bp, Glycine max
  Clone ID: jC-gmle01810031d08d1
aataaaatcatgacggcactaatcttcaaaatcatgcagtgtaacaataaatgcattacaagaccatagataacaaattctatggtaactcatccaacaacgctaatcaatttagtttaacacactaaatggctggaagaaaccaaaagagaaaataacgaagtcaccatgccttcttcccctcagtttccccctttgcttgttggtgacagcatggcatcatgcattacaactacagaaaagcatctttctcaagtagctttaggacttcattttgattgtttagcttcgcaacatcgattggagttttaccatccatattctggagagtaactgcagcaccattttcaaggagaagggccacacattcctttctgccataaccagctgcataatggagagcagtgttcttattcttatccaaagcatccacttttgctccagcctcgaggagaacttgagcacattt

SEQ ID NO: 8322 - DNA, 478 bp, Glycine max
  Clone ID: jC-gmle01810031d09d1
aaatactaacaaatacaaacggcatttattgagataggtcaacgagttgcattcatggagttatgggtacacacaacataatattgcaagaaaaggattagttctttcaggtaatccaaaatcacatccttatcgtactctttgcacgtctgcaactctaacaatcattctggagttggcaacaacattaaatatttggcctcgtgctgagatgagaagctatcttttggcctagagaacggtcagcctgagaccagtatgatatccagacactgcggatctcatgggtgacccgtgggtcagataaagcatcaacccatcggcgagcaaatctatcttgcctgtcaggtgcccaagaccggtatctctctccgggctgcttgaagttgttctccttctcaattccacacttttcacgccttccactgcagatagcaggaggtatggggaacctttctgcatgacgaacaggatcata

SEQ ID NO: 8323 - DNA, 396 bp, Glycine max
  Clone ID: jC-gmle01810031d10d1
aaatgcaagtgatatcagagtaatacattgggtaaagtatttggtttatatagtttgtaattacgggcttgtcaaaatgtgtatggaccagcccatcagcacaagttcataatatacaatgttcactattgttttaatccgtgttcttcctgttggatttcataacctattacacaactgattgatagcatgggctaaacaaactgcagtatttaaatatggcaccattttctttccgtgagtaatgtagctgctactggttttatcaacaagaacaacattaacctcacatagctccatctttgcttgaactctgctccatgtcagtctgatcttgccatggccacttcagattagaagatgaggagcactgctgtggaactgaaaatgaatatg

SEQ ID NO: 8324 - DNA, 455 bp, Glycine max
  Clone ID: jC-gmle01810031d11d1
aaatgcaagtgatatcagagtaatacattgggtagagtatttggtttatatagtttgcaattacgggcttgtcaaaatgtgtatggaccagcccatcagcacaagttcataatatacaatgttcactattgctttaatccgtgttcttcctgttggatttcataacctattacacaactgattgatagcatgggctaaacaaactggagtatttaaatatggcaccattttctttccgtgagtaatgtacctgctactggttttatcaacaagaacaacattaacctcacatagctccatctttgcttgaactctgctccatgtcagtctgatcttgccatggccacttcagattagaagatgaggagcactgctgtggaactgaaaatgaatatgagcttgtactggcacactgcttcttacatgatgaagaatcagctgtggagcaaatgtct

SEQ ID NO: 8325 - DNA, 460 bp, Glycine max
  Clone ID: jC-gmle01810031d12d1
aggctgaaagcaaataatgactttcatatccaacataacccctcatgctagagccctttggccttgaagcgacaacatgattatgagggctttgatactattatatcaggaaacaattatcttaaaattttaagctattaaatgaaattttacatatctcacaaacaaatcaagagacagcaacatctaacacacagtttcctctgatataacattgagaagaaccaaatgaaagtgttccattgagttgctcctctaacatgcaacaaacagcttcaatttcacttccttgtccggttcgtgcttttctgggaaacactggtactccttctattacctctggagagatttgatcctccatggccaactcttctaattgatcttctggtgcagctacgcgtgctgctcccgagtgcagctctggcaacactatcgcttaatatatccggtgtcctatgag

SEQ ID NO: 8326 - DNA, 525 bp, Glycine max
  Clone ID: jC-gmle01810031e01a2
aacaaagaaaaaaaaaaacccttagccaacacaaccatcatggccacctctgctattcagcaatcagcattcactggtcaaactgctctgaagcagctcaatgagttcgtccgcaagaccggtggcgccggcaaaggtcgcactaacatgcgccgcaccgtcaagagtgctcctcagagcatttggtatggccctgaccgtcccaagtacttgggtccattctcggagcagattccatcatacctgaccggagaattccctggtgactacggatgggacactgctggattatcagctgacccggaaaccttcgccaggaaccgggagctggaggtgattcacagcagatgggcaatgcttggtgcccttggctgcaccttcccagagatccttgagaagaatggtgtcaaattcggcgaggccgtgtggttcaaggccggtgcacagatcttctcagagggaggccttgactacttgggcaacccaaacctgatccatgctcagagcatccttgctatctgggct

SEQ ID NO: 8327 - DNA, 500 bp, Glycine max
  Clone ID: jC-gmle01810031e01d1
ggggacccaaatttctaatatataaaaatataatggttctcatacagatttttctgctacacaggtgtagttacattagtgaaaatggagttaaacacaagggaactgcaaaagggagcagaagattgcattgcatgtaggcatcctcattgtccagggacaaagttagtggcataagcccaagcattgttggcaacaggatcagcaacgtggtcgtaaaggttctgaatagggcccttgccagtgacaatagcctgaacaaagaaaccaaacatggagaacataggcaagcgaccgttcttgagttccttgaccttcaactcagcgaatgcatcagggtcatcagccagaccaagagggtcaaaagcaccaccagggtagattgggtcaagtccttcaccaagtggtcctgcaccaactctgtaaccttcaacaaaccccatgagcacaacctgaacagcccagatagcaaggatgctctgagcatggatcaggtttgg

SEQ ID NO: 8328 - DNA, 544 bp, Glycine max
  unsure at all n locations
  Clone ID: jC-gmle01810031e02a2
gctgggggaccgcatcactgctcttcagcaattggtttcacctttcggaaagacggatacagcatccgttcttcacgaagccatcgagtacatcaagttcctccatgaccaagttttgagcactccatatatgaaaaacaacggagctcccattcaacaccagcaggattgtgataatctgaaggactcagaaggggcaaaacaagatttgagaagccgagggctgtgtttggtgccgatttcaagcacattcccagtggctaatgagaccagtgttgatttctggacgtctacatttggaggcgcactcattggcaggtagagacaagtggagaactcgtgacaataataactatatatttataaataaactaaaaggaagaagaagaagaagaaaacacgattatgctaaagagaaaattaaagcttgagagaacanaagagcaaaaaagaaaaaggaagctactcttcaagaggacacgtaaagcagaatgatgtacactagtaaatgattagtgactactggaagagatcgaatatagat

SEQ ID NO: 8329 - DNA, 396 bp, Glycine max
  Clone ID: jC-gmle01810031e02d1
tttgtttttttttttttttttttttttttttttttttttttttttttttttttttttttttttttttttttgtttttttttgggaacgggccactagaaccccctttttttgcacatttttgtttggttcaaaaaaaaaaaaaagttaaaggggggggaaaacccccttgagggtaaaaaacttttccccaaaaaaaccctgttcttttatgggaacaaaggggggggtgccagaaccccccctttgatgaaatgtcggcataaaaatatgatcctttaacccctggtgggaaaaaatggttatgtttatttgcacactcccctcaaatttaaccccttgaccggccccccttggggggaaaaaaaaaaaaccctaaaaccttttaaagccccctt

SEQ ID NO: 8330 - DNA, 528 bp, Glycine max
  unsure at all n locations
  Clone ID: jC-gmle01810031e03a2
ctgaagttacccaaaacttgcctttcaagtgtgttcagtttcttatattggtgtatttaattttggagtgacaagatcttggcttgggaacagtaaaagaaagcagaaagagcgagtttgcatttaagtctctacaggtgaaatctgagatttgcttcatgttttctcaaatctgtcaagaaatatcaatttcattgaacacacacgcattgctggttggaaactgaaccaaagagcaagacccatcattattgaccctgctctttacttatcaaagaaatctgatttagcattgactactcaacgaagaacacttccgacgtcttttaaactgtttactggctcagcttgggttgtactgactcggtcctttgtggagtattgtatatgnngatggggataactttccacggactatgctaatgtattacacaaaatttatctcctcgccagagggatattttcacactgtcgtttgtaacactgaggaatttcgtcacacggcggtaaaccatgatcttcactaca

SEQ ID NO: 8331 - DNA, 439 bp, Glycine max
  Clone ID: jC-gmle01810031e03d1
aaccaaccaaaagtccactgtgaaatttaattgcctttttttgtaactcaacaaaaagtgttgcaattgcataaatggttgcccggcagtgcaaccaaaagcgtgcctagaccgaaacaagcaccaaaactgctggtgtgagtgcttgttgattgttaatatgagaacctatattgaacacaaaattcagaccttttacatcagatatatatgatctataaccacacttatgtacacttgacatcattcatcctacttggagggtacccctttgtcacaaacactgcttgcttagagattctttagataacagcacctgaagcagctcacgtagcctctcagcaccaggtcctgacctaaacattgtatcattgccacgaacagaacaagggtctgccccaccatctgtgttcccatcacaccatgcaccaggtgaaaa

SEQ ID NO: 8332 - DNA, 597 bp, Glycine max
  unsure at all n locations
  Clone ID: jC-gmle01810031e04a2
tagagttttctcttttccactgaaaatcaaattagggtttggatttcggaattgccacagaatcatggccactctgaaagagcttcttcctcctgcaaaatcctcctccaccgcctactacgaccacaccaacgatccatggttcaagcagcgtttctcctcagaagaggaggagaaatccgccgccgccgccgccgccaagcagaagcccgttcccccctacctgaagcgcgccggcttcgttcctcggaaaatcgaggacttcggagacggcggcgccttccctgagatccacgttgcacagtatcctctcgacatgggaagagaaaagtccggcgccaaacctggatccaaaatcctccctgtcaccgtcgacgctaacggcaacgttgcctacgatgccatcgtgaggcaaaacgagaacgcaagaaaaattgtctacacgcagcagaaggatcttatccctaagtttctcaagaacgacgaagatgancgacgacgtcgtttccgacgacgaagcacagaaacagatcgaggaaacgatgcaggagaccaaggccgctttggagaaaatcgtgaacgttagggtaagcgctg

SEQ ID NO: 8333 - DNA, 345 bp, Glycine max
  Clone ID: jC-gmle01810031e04d1
cattcaatatataatttactggaaagagattggtgtaacatccataagcagttttaacagaattgaaatagtgtacaaaaacagtttatttcaccacctaaacagggcggcagggcagggggttggaaaaaaaccaaaatgcttacacaagcacattgttttaaccacccattttcagacatagcaacctaagccatttcgggggatttttaacagtcaacactaccccctaaaaataggtcaggcaacattaaatattgggctacctaatgccctttttaaaatccaatgcgagtcctacctgaaccttcctcgttaccatcccggatagatgaaccaacactt

SEQ ID NO: 8334 - DNA, 570 bp, Glycine max
  Clone ID: jC-gmle01810031e05a2
aatttttcttctctaactttcgcatattcgaaaaccaaaagcatgggtcagggaacaccgggcggtctgaaccggcagggtcttccgggggaccggaagccggacggcggcgacaagaaggagaagaagttcgagccggcggcgccgccggcccgcgtgggccgtaagcagcgtaagcagaagggcccggaggcggcggcgcggctgccgacggtgacgccgctgtcgaagtgcaagctaaggctgctgaagctggagcgcataaaggactacctcttgatggaggaggagttcgtggcgaaccaggagaggctgaagccgcaggaggagaaggccgaggaagacagatccaaggtcgatgatctccgaggttctcctatgagcgttggtaacctagaggaactcattgacgagagtcatgccatagtttcgtcctcggtggggcccgagtactatgttggtatcttgtctttcgtcgataaggatcagctcgagcctggatgcgctattttgatgcataacaaggttctctctgtttgtgggcttcttcaagatgaagttgatccaatg

SEQ ID NO: 8335 - DNA, 451 bp, Glycine max
  Clone ID: jC-gmle01810031e05d1
ggcaggaaaattttcccgatttttttaaatcaaagaaagctatgtaactatagttgagattaaatcccgtgataatgtagacccataaacgaccacaaatcaaaatacaaacatccgttcacagaacaacaaaaagactgtaataaagaaagaaggccggggtaaatgatgaagatgcttcacatatacagtccttctggcaccccttctttcttcttaaacataaccttatcctttgccttcttgaagtcggcatgcgtcaccttcatccggcgttctcgtaaagcaagtaagccagcttcagtacatattgcttttatatcagctccagagaactcatccttagtcataacaaattcttctaagttgacatcatcagctaatgtcatccttgaagtatctctggaaaatgcgtcttcttgttttgatatcagggagaggaaattcaatc

SEQ ID NO: 8336 - DNA, 528 bp, Glycine max
  unsure at all n locations
  Clone ID: jC-gmle01810031e06a2
ggacagatggaagggtcttgcctatgatatctcagacgaccaacaagacatcacaagaggaaagggtttggttgactcccttttccaagctccacaggatgctggaactcactatgcagtcatgagctcctacgagtacctcagcactggacttcgccagtacttggacaacaaaatggatggattctacattgctccagcttttatggacaagcttgttgttcacatctccaagaacttcatgaccctgcccaacatcaaggttcctctcattcttggtatctggggaggcaagggacaaggaaaatctttccaatgtgagcttgtctttgccaagatgggaatcaaccccatcatgatgagtgctggagagttggaaagtggaaatgcaggagagccagcaaaactgatcaggcagagataccgtgaagctgcagacatgatcaagaaagggaaagatgtgcgctctcttcataacgatcttgatgcangagctggtcgttttggtggaccacacatacactgtga

SEQ ID NO: 8337 - DNA, 508 bp, Glycine max
  Clone ID: jC-gmle01810031e06d1
aaaggaaaaggcaccaaattcaatttaagtggacactgtaactcaaaattatagaggaagacggtccaatatgaaaaatatagtaagatcatctcaaacttagcatcttctctttgcacctaagacattgagaatgctaagaatgttacacgcaagttccatcacaacttctagcacttggattagtacaacaaccttcacgaacagaaatatttacttgccaagtttgctttgcctccaattcaagactggaagaaagttcccctctgaatagcatcctcgttagcatttccaagagcagcctcgttcaagtacttgtcagccaattggactctcttgacattctcttgttcttggacaagcatgttaccatacagcaagagcttctccagagtcatcttgggctgctcaaaggttggaggtccatcttttgagttcacaagcttcttcccaacactgtcaacaccaacaccagaaatccacttcctcacttcatcatcatatactc

SEQ ID NO: 8338 - DNA, 347 bp, Glycine max
  Clone ID: jC-gmle01810031e07d1
ggaaaaagggcaaaaaaccattttttaaaaaaaagggcaagaaaccaatttttcaatcccgaaaaaaaaaaaacaatttttcatttcttttctttcccaagcctaaaaaatacacaaacccgtgtttttaaatatttttgcaaccttgggttttaaataatagtcttcacctgaatagactggaaagccataggaaaggcccgtgtcggagcaacatttgaaaccacttaaacaacatttccttgggtgatcaaccctttaaatttcataagttgcccaaactttgagatgttagattcagcattatcggacaaatcaaccagaatgggcccaacaccccattgcaa

SEQ ID NO: 8339 - DNA, 531 bp, Glycine max
  unsure at all n locations
  Clone ID: jC-gmle01810031e09d1
aaccaataaatttgagacatctacttctatagtgaaaatacggactacaaatcagtttcaaatgacaaccatcaaatttggaacatacatttaaactttcaacagacactcatctaggaagaagcctgtcagatattgaaactgtgtacatgtagtctcaatgcatgtaagtgtattactttcccaaactgttaatgccaatgacatcttgcagctgtataactcccaagtcccaaataccgaaatcctctctcgggtatagacgaaaagctaaatcctcagaactgcttgggcttggaatctgctaatgagactggtatagctctgccattcaagtccacgccatttaaggactgaattgcactgttgacctcatcagggctactgaaagtcacaaatccaaagcctcttgatcgtccactttccctgtcatagattaccctagcttccaagacattcccttgttcacgaaacaatggactaagtgctacattgtcaacaccccaagcatgattacttacatgnaacacg

SEQ ID NO: 8340 - DNA, 391 bp, Glycine max
  Clone ID: jC-gmle01810031e10d1
cttgtgacatatattactttacatatttaccattactccaagtccaggccatgagcttgaatttattttcacactctatagttagaaatcttggtgaaaggaactaagccaagtttgtttaagctgcaacttgttccatgtttcagattcttcaattctgcaatgatcaaaacttcaccaaaacttctatatatatatattggatcaatcatcatgcatggctacaccttgctatctgcttctgctacatgttcggacaatttgtctgacagacggggattgcccaaatctatcctactacttatatcatgatcatcttgtaagtttgatgattgtggtgccgactctgggttaatctcagcaaactctttggctgtaccccatagcacaa

SEQ ID NO: 8341 - DNA, 435 bp, Glycine max
  Clone ID: jC-gmle01810031e11d1
tgtcctttttttttttttttttttttttttttttttttttttttttttttttttttttttttttttttttttttttttttttttttttttttttacaccaaaaaaacgccggggtaaattccccacggatacggggggcaaaaaccccaaggggggaagccaaaacggaaaaaaacccggggggagcccaaaaaaaaacccctgggggaaaaaacaccgcggggagggggggccaaaacaaaagaaggggtaaaagggcccgggggaaaaaagggggcccaaaccccctgcgggggggtcactggggaaaaaaaaagggggggggttgcccacccccaacctggggagttccccccccactaaaagggaccccagggcccctttaggcaccttccgggggccccccccagagaaaaaaaacttgggggccccccc

SEQ ID NO: 8342 - DNA, 497 bp, Glycine max
  Clone ID: jC-gmle01810031e12d1
tttttttttttttttttttttttttttttttttttttttttttttttttttttttttttttttttttttttttttttggggacccaaacccaaatggaaaaaaaaaagcccgcgagaggaaaacccggttccaaggccataacccaagaagctcaaaccccctacctgaggggaaccctaaacgcaagcaaaacgaaataaatttaaaaacccaggtttgccccaacctttttttcccccaaagggggtttttaatttgtacccatttgaagggggcaaacccccccaatttcggctttttccctaaaaaaaaaaaccacagggtcccaaaaaaaaccctatgggcccactggcccgtaattggggccaaaaaagggcccccaataaagcccaaaaaaaggggtaaaagctccccaatcaggcccaaaattttttgggccaaaaaccccccaaaaggcaacccccctttggttaaccaccgggacttaagggttttg

SEQ ID NO: 8343 - DNA, 512 bp, Glycine max
  Clone ID: jC-gmle01810031f01a2
ctttccttcattttctctcttcctctcaccgagtcacgcactcggcttgactcgtacgaactccgatccccccccgagtcacactcaaccagcaccaccgcccgatccgacgatgtctcgcgcctcctccgccgcagattccgccgcctccggtgagatcatactgttcggagtcagagtcgtcgtcgattccatgaggaagagcgtcagcatgagcaacctctcacagtacgagcatcctcaagacggcagcaacaacaaagacgctctcgccgccggttacgcctccgccgacgacgccgctcctcagaactccggccgcctccgggagcgcgagcgaaagcgaggagttccgtggacggaggaagagcacaagctgtttttggttggattgcagaaggtagggaaaggtgattggagaggaatctccaaaaactacgtcaaaacgcgaacgccaacgcaggttgcgagccatgctcagaagtactttcttcgacgaagcaacctcaatc

SEQ ID NO: 8344 - DNA, 427 bp, Glycine max
  Clone ID: jC-gmle01810031f01d1
gggaaggccatatcgaacggcaatacattttcagcagataaaaaccgagaggcctttgtttttttcagtttcatcaactactacaaacataaacgggcaaataaacaagaatctaaagtcatgacattaatttacataagccaaccagaagaaacagggcagggccttttccggggtctgttccaggaacagaaggatcaaattcagccacttaaaacttttttttgccttctttaatccatcaccctttccttcaacctctttctttttctcccaccaaaaagaccgggaactagagaaagattagtctttgtaattaatatgtgaatccaagggccataatctcaagcaacactaatgatgctttctccattgctgaaacattgtatggcatgtaaagctgaatgtcttgatgatgtctggcttt

SEQ ID NO: 8345 - DNA, 419 bp, Glycine max
  unsure at all n locations
  Clone ID: jC-gmle01810031f02a2
ctcccaacccccacccgtagtttctaccaccttcagtcacggcgtaatacactaaccaacccagcatgtcgctgcctgcttgtcccgccgaacaactggcccaacttctcggcccaaacaccacagacgcctncggcgncgnctnccttatctgcggccagttcgccgccgtggacagcaagttcgtctacacggccttcgccgtcgacaacacctacctcctcttttccgcctacctcgttttttctatgcagctcggcttcgccatgctctgcgccggctccgtccgcgccaagaacaccatgaacatcatgctcaccaacgtcctggacgctgccgccggcggnctcttctactacctcttcggcttcgccttcgctttcggctccccctccaacggcttcatcggtaaacatttc

SEQ ID NO: 8346 - DNA, 427 bp, Glycine max
  Clone ID: jC-gmle01810031f02d1
caggcagtaaaatataaaaactacttccatttttttacattagacataatgaaaaagtttaacataaaagtctcaaattagggaaaagaaaaaaaaactttttgcctcacggccaaacagtagtatttctactatataccaatcttcttcctttttttttggggaaaactacaaaaataaatcccacaaatttccattttccacagccatttgtcatttccaggaccaacatgccttagtaaacaaccaccccccacagaaacgtacgcattttccaccagaatttttaacttccagcatccaccaatgcccgaccaatgacaattacaaatcaaaatccctaattgcccatcatcataaaaagaaaaatctccgaaaaaagaagacccccgacaaataaaaaaaaaaagaagtaaaaagtcttgag

SEQ ID NO: 8347 - DNA, 559 bp, Glycine max
  Clone ID: jC-gmle01810031f03a2
aacatgcccatcctcgacaagatcaaagaggcattctcctcttcatcctccaaggaggacccgctccgccgactcggccaagagcacctccggaggcctaggcaacgagggtctgcctaatcttaccgccaaagacgacaagacggccgttacgcccagccacactgccgctacagaggacaagctgccagagctgcctgaaaaggctgtctttgaccacgacaaggtcactgtcatcttcgtgctgggtggaccgggagctggcaagggcacacaatgtgagaggatggtcaaagattatggattcgtccatctttctgctggagacctgctacgagccgagcagcaacgaccgggatctacatacggagagatgatccagacgtatatcaaagagggacaaatcgtccccatggaggtgactgtcaagctcctcgagaacgctatgcgagatgccctcaaccagccaccctctttcgaaccctcatctcctctcagcagtggatggcagaatggtcgaggtcgattcctcatcgacggtttcccacggaagatggat

SEQ ID NO: 8348 - DNA, 524 bp, Glycine max
  Clone ID: jC-gmle01810031f03d1
ctatgcatgtatgtctgcaatacatgtggaagcggtatgataagagcatgacacgcgcatccgcaaatctctccccctacaggtcatggaatccgctctagcagaccatgaccgacgctcgtctatgtcccgctgccttagaacgaccgcatctagacaacagggccgagctgaggaatcgctccatccgaagtcgcaggcaacgtggcattctcgagaggcttgacgctctcagtctgatgctttggcaaccgctcttccagcgccagagtgaccttggcgtatacctcgtcgacggaaggagacgagtcgacttcgacgactttgccttctttgcggtacatgtcgacgacgggcatggaagtctcgacgaatgttcggaaacgcttaacgatggactccttgttgtcgtccgcccttccggaagtcttgccccgctcgagcaatcgaccgagcatgacttcttctgtggtcgagaagaagagaacgaaggacgacttgcagaccgactcgtcaaacttgag

SEQ ID NO: 8349 - DNA, 557 bp, Glycine max
  unsure at all n locations
  Clone ID: jC-gmle01810031f04a2
cactcataacacaaagcacaaagcaaagctcatccttgagttaaaaaatggcagcagcttcttccatggctctctcatccccatccttggctggcaaggccgtgaagctgggcccatcagccccagaagtgggaagggtgagcatgaggaagaccgtcaccaagcaggtctcctcaggaagcccatggtacggcccagaccgagtcaagtacttgggcccattctctggcgagcccccgtcctacctaaccggtgagttcccaggcgactacggctgggacactgctgggctttccgcagacccagaaaccttcgccaagaaccgtgaactcgaagtgatccactccaggtgggccatgctcggagccttgggctgcgtcttcccggagttgctgtcccgcacggggtgaagttcggagaagccgtgtggttcaaggccgggtcccagatcttcagcgagggtgggctcgactacttgggcaacccaagcctgatccacgcccaaagcatcctcggcatctgggccacacangttatcctaatgggtgcccgtggag

SEQ ID NO: 8350 - DNA, 502 bp, Glycine max
  unsure at all n locations
  Clone ID: jC-gmle01810031f04d1
gtaaaaagcaagtaacattaagttggattcggatacacaagataattcacattatctgaagtacttcaccaaacacaaatctaaaaactctcaaaagtcatttcgttctttgacgctcactttccggggacgaagttggtggcataggcccaggcgttgttgttgacagggtcagcaaggtgatcggcgaggttctccaatggaccctttccggtgacaatggcctgaacaaagaagccaaacatagagaacatggccaatcgtccgttcttgagttccttcaccttaagctcagcaaaagcctctgggtcatcagcaaggcccaatgggtcgaagctgccacctgggtagattgggtcagtgacctcaccgagggggccaccagcaatacggtaaccttcaacggcacccattaggataacttgtgtggcccanatggcgaggatgctctgggcgtggatcaagcttgggttgcccaagtagtcgagcccaccctcgctga

SEQ ID NO: 8351 - DNA, 547 bp, Glycine max
  Clone ID: jC-gmle01810031f05a2
ctattagccacaaaacacacacacacatattctcacacaaactgcaaccatggctactaccttatgttacaattctcttaacccttcaacaaccgttttctcaagaacccatttctcagttcccttgaataaagagcttccactggatgcttcaccttttgttgttggctataactgtggtgtaggatgcagaacaaggaagcaaaggaagaaagtgatgcatgtgaagtgtgcagtggtggaggctccaccaggtgtttcaccctcagcaaaagatgggaatggaaccaccccttcgaagaagcagcttcgtatacttgtggctggtggagggattgagggtttggtttttgctttggctgcaaagagaaaggggtttgaggtgatggtgtttgagaaggacttgagtgctataagaggggagggacagtataggggtccaattcagattcagagcaatgctttggctgctttggaagctattgattcagaggttgctgatgaagttatgagagatgcttgcatcactggtgatagaatcaatgga

SEQ ID NO: 8352 - DNA, 471 bp, Glycine max
  Clone ID: jC-gmle01810031f05d1
cacgggcaagtttatgggtggcatgttataaatctaactttaacaaattacaaatgtcatacacaaaaagttttggaggggagtaacaaatttatacccaagagtccctcttaaatgtccatataggcatgtaacatatcagatcttaaatgactagactggggtataataccccaccctaaaacaatgcagatggtcctatacaatagcaaattggggctgtataatttttccataacttacaaattgcaattgagcaaaatcagtcatactccctgcaaagctagggggctttcattttctgagacttttggaacagagcttgtcaccttaacacggaacgaaaccttctcagaaccaaactgaataacatcagatggacggatgcgagcaggataattaggaggtacccggtcctgctttccttcgttgacaatgatccaggtgccatgctcactccgtaaatcaatc

SEQ ID NO: 8353 - DNA, 613 bp, Glycine max
  unsure at all n locations
  Clone ID: jC-gmle01810031f06a2
ggtgaatggtggcatgcggggtttcacttaacgaccgcaattgttggacccacgatactaaccctgccatacgcgttcaggggattggggtggggacttggatttatgtgcttgacggtgatggggatcgtcaccttctactcttacttcctcatgtccaaagtgctcgatcactgcgaaaaatccggtcgccggcatattcgtttccgggaactagccgctgacgtcttaggtgcgtcattactatgcataatgctaccatggttacgttacttggtttgtgtcaccgcacaaacaagaaaactttaactttcttgtttctccttttcctcgctttcagactgcgtgttaggttcatcattaactgtcttcttgacttgtttaatcaattcttttttattacttttccttaaagactcttagatttaaataattagaggcttgtgacaaattcggattgcaaaatcattntaaaggtgcaaaggtaggaattgtgaaatatgatattttaatttatcattttatgtataaaaaggtgaattacacctcttatgtgcaaatttntttcgtttagaaaattttcttttataagatttatcttctttctttattt

SEQ ID NO: 8354 - DNA, 501 bp, Glycine max
  Clone ID: jC-gmle01810031f06d1
ctcttcctaaaacatttaaaacctaattaaaaagaggtatattatttgtaggacattacttttgtttctttttttttttcccgtcaaatcaattattttatcctacaactttatctttcttctctttctatctgtccttttattgtaaaaacttatataaggaaaggaaattatacaaattcaatctcatcggaaaatggccaaaaggattattctagatttattggtccaggccgaaatgcatatcattatcatgtgtgtgcaaaattaccttcatgattaaccaaaatttcaaattttcaatgtgtagaatggtgacttaaaaaatcacaattacaatctcgttgcaccacttgtgaaaaaagcagtccattattgaatttgaatcttatgattttcttcctctctctcttttttcaatgaaaatatatcattttcacattgactagcctcttagccattttcatttgtttctactcactacaactcatcagttcggct

SEQ ID NO: 8355 - DNA, 516 bp, Glycine max
  unsure at all n locations
  Clone ID: jC-gmle01810031f07d1
cagattatactttatgaaattattatacgaagcattcacatttttactgcacctgaatactcaaccaaaaaccacactgcaaatacaatgcctcaaacaaaatatttaatgaaaacataaaacatcaatctacacaatctcaactattttagtgaaacaaaaaaatccaactgtggcattattttagcccagcgaagaagacacagttactatccgcatgtcacaatggagctgtaaccgcgagcctgcagtatacagccatgagcataagagttttgcatggttccgtgtggttaggccgagctaatcttcattggtcatcaggaaagggatgcataacttgacccagcaaacagcaacaacacacaaatgcatcaaggtgaacctactccagggaagagttctgatattttattgaagacatccataacctccttatcattttggtatntagtaatattcattggattctgcgaacaatccatgatagctgcttgaactctaggattttgaaat

SEQ ID NO: 8356 - DNA, 505 bp, Glycine max
  Clone ID: jC-gmle01810031f08d1
ctaaacttacgatagggatgaaaatatgtaatttagatctttaaaaaaaaatccatatgttcggaatagacctaaaatggaatagatgtatctagggattagtcgtttcaaaaagaattctccctagatacacaatacacatggcattctatttttttttatttcaaaatggaatcaattttataagtttaaaaaagacctaaagttagggatttctcaataggtaatgttgctccaatacctaaccaaagggcaactacagtaccaatcaaaaagatggtggttgctactggacggcgaaatgggttttggaatttattaacattctccaaaaagggtactgttaataatcctgtaggtaccgaaaccattaaaagaacgcccaataacttattgggcactgtacgaagtatttgaaatacgggaaagaaataccattcgggtaatatttccaaaggagttgcaaatggatccgcgggttccccaatcatggatggttctagaa

SEQ ID NO: 8357 - DNA, 475 bp, Glycine max
  Clone ID: jC-gmle01810031f09d1
aggtccgaaagatcactatcattatcgctgaacaatgttatttaacaaaagtatcaaccacaaataaaaacaacaacccaacttcccaatcatcgtcacgtccagcaaaatacattcaaaagctatctaaaatctggggaacccacattggcattaaaaaccatgaccatacaattttttagagaaatattatgggcaccatgcctcttcaacaatcccctaaacgttgcttaggcatcagcaaacccaagctcggaaagcttttggtgagcctcagcgtaatcagcaaagaaggcatcttcgtccgctgcatatttatcaacgagagggcggaatacagggtcagacaaaagagccttgtcagaaggcagctgaaggagaccttccttctgaccactcaacaactccgcgaagtatgagttgtcgaaaataagaggattagaggtccagggacccataaatccagaacgctcct

SEQ ID NO: 8358 - DNA, 404 bp, Glycine max
  Clone ID: jC-gmle01810031f10d1
aaaataacacacacttgacacatcattaccacatttacaagaggtgtggaaattttcaaatagacggagcttatctaacaagagggacatgtctaatttcctttatcgaattccacacacgagccaactagagaaaacccccattcccgatcatgccaaggattccgcattttcagaaaatctggcagtaacctgtggcacagaaaaagctggcgtaacagcattcccagcaatttcaaaatcttgagaaattcccaggggaatatcaaaaactgtagactggttgggattgtcaataaggaaactcaagtgccataaagtttgatttgcccacatccaactccacatttcaaaaccgttattaggaccacatacctttattgggaagatcaattcccaggaat

SEQ ID NO: 8359 - DNA, 360 bp, Glycine max
  Clone ID: jC-gmle01810031f11d1
gtctcggtaaatagaatatatatagaaaatagcatcatgtgctatcgaactacaaatccaagagaatgccatgacataacgttagaacttttttaatgtagcattgataatttcaaagccctcaccctgtcaatttggatcaccaagtttctaaacagttgcctcaattctaggcttcatccaaccacgccagtgtgacatgtttagttggcaaccgattttgtcttacaagttcaattgctccattgttgaccattatttgctttccaacaagttcaatgagccaaactgttttgtaaatgtggcttataacaatcagccagagggcaagcagcaaacaaaggaaatcaacaagcaaat

SEQ ID NO: 8360 - DNA, 552 bp, Glycine max
  Clone ID: jC-gmle01810031f12d1
tgtttttttttttttttttttttgatgataaaaggattcttaatgatttttgcaacaagaaattcagaaaataatattcaaataattacgaggacataattttttcgtttcacactgcagggcaaaaaaaactcaacatcaggactgtagtaaagacaagagtacttgtgctttataggcttcttgatcatatctcataaattgaggaaaataaacaaagcatgcactgttctacacttctactcctaaatcctaatctaacttgctagaggagatttcactacagccttcacttagacatggggaacacggtgtgggaggccctatatcgtcatgactaaaatccacagtgaagtcaaagaaactagctttaacatcaacaagtctctgaagtttgctgctactagagggcttcttgccatgtgatcttctagccttcatcttgactgtctgaaatatgcgatacacagcagaatctgccactggcatctgacatggctaggaagctacaaggcgcaattcgtgcatgacccactgagttcttggctcatg

SEQ ID NO: 8361 - DNA, 563 bp, Glycine max
  unsure at all n locations
  Clone ID: jC-gmle01810031g01a2
gcgttcttgttgtacggaccgccggggacggggaaatcgtatttggccaaggccgttgccacagaagctgattctacgtttttcagtgtttcttcatcagacctggtttcaaagtggatgggagaaagtgaaaagctggtctcaaatcttttccaaatggctcgcgaaagtgcaccttctataatattcgttgatgaaatagattctctatgtggtcaacgtggagaagggaatgagagtgaagcttcaaggcgtattaaaactgagcttctggtgcagatgcagggtgtgggacacaatgatcagaaagttcttgttcttgcagctacaaatacaccttatgctctagaccaggcaataaggcggcgtttcgataagcgtatatacatacccctacctgatttaaaggctcgccaacacatgttcaaggtgcacctaggagatactccccataacttggctgaaagtgattttgaacatttggctcgcaagacagaggggttttcaggttcagatatatctgtctgtgtgaaggatgttttattngaacctgttcgcaaaac

SEQ ID NO: 8362 - DNA, 496 bp, Glycine max
  Clone ID: jC-gmle01810031g01d1
tttgtttttcttttttttttttttttattcacatcaaatttatttttctgattatttcatcagtctgttcttatacacaaattatgattagtaaaaatatgcatttcacttgatccaatagcactgtaaattacaaatcataacatgtttaagctagtgcagatgattgaagaaaaattccgtcagaattatccttcctctccgaactcctttgtgaatctctcatgaacatcaaggtcagacttgcttacggtgggtctttgtctagcaagtactttgtcaaaatctgttctcgatataggaggtgggaggatcttagaagcaagtcctttcgcagcaatatcctgcattgtagtttgcactgaaccctgttgctttggcccacatgggatccacataccctcaggattcctaaagaaaaacatggcatcttgggttttgcgaacaggttcaaataaaacattcttcacacagacagatatatctgaacctgaaa

SEQ ID NO: 8363 - DNA, 535 bp, Glycine max
  Clone ID: jC-gmle01810031g02a2
ctggctttacttctatctcacgcagatcttctgttgatagtactcaaaatctgtctattccttttggtccaagctcatacctttctgcacaggctcgagtagttgatgagtattctatgtcccagattatcttacaaaatgtgcttgatggaggggtcactggtatgttaatagttgtcactggtgcaagccatgttacatatggatctagaggaactggagtgccagcaagaatttcaggaaaaatacaaaagaaaaaccatgcagttatattacttgaccctgaaagacaattcattcgcagagaaggagaagttcctgttgctgattttttgtggtattctgctgcgagaccctgtagtagaaattgctttgaccgtgctgagattgctcgggttatgaatgctgctgggcggaggcgagatgccctcccacaggatcttcaaaagggaattgatcttggtttagtatcaccagaggtattgcagaacttctttgatctggagcagtatcctctaatttcagagctcactca

SEQ ID NO: 8364 - DNA, 511 bp, Glycine max
  Clone ID: jC-gmle01810031g02d1
tttgtttttctttttttttttttttttttttttttttttttttttagagggacaactggtggttttatatttcattttaacaagacttgccaagagatttatcccttaaagccgagagcacttatgtttcgagtttgagacacctttatttattccacttgcatttgaaaaataaaaatattacattcaccaaactgggaaaggggaaatatctaagcgcatttaagtgaacccgggtagggattgttttcaagttttttcaaaaaccagaacctattcctttgggcctattgtaccaggttttccagggtggtaccaaattaccaagaaaaaaaaatggtgctgcgtattgtcaccacatttatttttctctctaataaatgctggctttttatggttcgttgcataaaaatgcagccggattcggaggaactgatgctgaaggctctgtctttctaaccagtagggcagaaaagcgcgcttgggcaatccattgctgggatccccaata

SEQ ID NO: 8365 - DNA, 614 bp, Glycine max
  unsure at all n locations
  Clone ID: jC-gmle01810031g03a2
acacattctggtcaccggtggtgccggtttcattggcacccacaccgtcgttcagcttctcaaagctggcttcagcgtttcaataatcgacaatttcgataactccgtcatggaagcagtggaccgcgtccgccaagtggttggccctctgctttctcagaacctccaattcacccagggcgatctccggaatagggatgacttggagaaactcttctccaaaacaacatttgatgccgtgatccactttgctggcttgaaagcggttgctgaaagcgttgcgaagccccgtcgctattttgattttaatttggttggcaccatcaacctctacgaatttatggcaaagtataattgcaaaaagatggttttctcatcatctgcaaccgtttatggccaacctgaaaagataccgtgtgaggaggatttcaagttacaagctatgaatccctatggacggaccaagctttntctggaagaaattgcccgagatattcagaaagctgaaccagaatgggagatcatattactgagatacttcaatccagttggggctcatgaaagtggcaaactcggtgaagatcccaagggcattccaaataacctcatgcctt

SEQ ID NO: 8366 - DNA, 546 bp, Glycine max
  Clone ID: jC-gmle01810031g03d1
aatatcaaatcaatggccagtctaatttaaagatattgtttaaatacatagctttaacttcttgaaatgctgccaaatttttattgtcaagattatacaacgaactgcctaaacaaatcatccaacatgaaagtattctatataagagatgcctatttatgtgaaaagcattcgtagatgagcagtatatttctcaagctaattcaaggcttccccgcgtaaccccagggattgttctttgcccaattccattggtccctgcacatctcctccacaccatagtttgccttccaaccaagttctttctcagctctctctgtagatgcataaacctcagtcgcatctcccggtcttcttggacataattttactggaattttcttgccagaagccttttcaaatgctgcaaccatttcaagcacagatgttccacgaccagttcccaggttgtaagcagtacaacctatgttctccgttgtgaagagctttcgcagggcagcaatatggccatctgccaagtccatcacatggatataagtcccgatc

SEQ ID NO: 8367 - DNA, 460 bp, Glycine max
  Clone ID: jC-gmle01810031g04a2
agaagggctatgccctttctttactcagaagggccttatgccaagtgccaccgaacaaggtgttattcatttgaaacatcttttttcccgaatacaagataatattcatgtcaatttcgatcatttctataggagaaaatcggcatagagagattttatcttatagaaatgattgaaaaatacattcaattatgtcctcgcgtatcaaatattttacttttgatatcgatgcgtgcgatttctttgcagcatttaatgtatgagagacagaagactatcacttacagttttatctgttgaatatgtggtttcactttttttgatgattcatgaagtactagtatttgtggatacaacaatcaaatgattatcagttaaaggaccgaagggtgaagcacatagaaatgtataaaatgtatgagcctagaggcggtacctagacaaaatagatgtaagttca

SEQ ID NO: 8368 - DNA, 343 bp, Glycine max
  Clone ID: jC-gmle01810031g04d1
aaagggacacaaacccaacatacttggtgagtctattgatatctagggcaactcgatgcactcaatgcagccattcctttctcttcttaaaaatcctccaagtcgtaactcataaaaccttctatgactcaaaaatccggtagagaatttcatgataagagctgtgcaagaaacaaatgatcccctctttcactgcttatacccaccggatcctcacacatatttgtctcctttcatcaaagaaccttattcttgaaccttgaacgtagaacttacttctattttcactagggaactactctctgatcatacctgctataactttctattggagatacacttt

SEQ ID NO: 8369 - DNA, 539 bp, Glycine max
  Clone ID: jC-gmle01810031g05a2
gtcgcagcaaaaccaagccacccactaacttgtttggtccaagacatggctctgatcctgcatgctaccaaaacaaacaagaatgccttcaagactctgattgcggcagagtacagtggcgtccaagtggaattggcccctaatttcgagatgggtgtctctaacaaaactcctgaatttctcaagatgaatcctattggaaaggttcctgttttggaaacgcccgatggtccagtctttgagagcaatgcaatcgctcgttacgttgctcgactaaagggtgacaacgctttgttctcatcttctgccattgataatgcccacattgaccagtggattgatttttcatccttggagatcgatgctaatctcatgaaattgctcctaccaagacttggatttgccccataccttcctccagttgaggagggtgcaaattctgcgttgaagagagcatttgaggccttgaacactcatcttgcctccaatacttaccttgttggccattctggtacccttgctgacatcataacaacatg

SEQ ID NO: 8370 - DNA, 386 bp, Glycine max
  Clone ID: jC-gmle01810031g05d1
aaataaatgtgtatactggtcttgctatagtcataaaagataatgtgtaacaaaatgaagctttaagtttcagggttgaagatcccaaccaaaacagctattacagaaataggatagaaaccaatgacatacgaaaaagacacacgacaaaaatcagtattttgactagggactaaaatgttgttgctgacttgaagcacttagcatccaaaagaggttctccctcaaatggtgcataatcctcgatcatctgattgacgcgctctttctgagtttcatcagagatatcaaccttggtccagtgatagagctccatatcatagcattcatcaatgacagattgtggaatctcttggacgcggaagagccacaaccccttcacctta

SEQ ID NO: 8371 - DNA, 564 bp, Glycine max
  Clone ID: jC-gmle01810031g06a2
gaagcctccaggtttccttcttctaaaggaagtaaatatattataaatgagcaggaggaaatatctcaacagcatgttaatggcaatagcttggcagataaactagggttttccaattcaagctacagggaggacccatcttctggaagctttttgaatgttctggcaaagccttgggaggggccaattgggagtgctgaccagtgtattagcagtggtcaagagggccttacttatgatgacaactctatacatggatacttaaatgatgttttggttgaaaatgcaattgtggatgatactgatctgaatcctttggagtttttagcttccctgttccctggttttgcagcagaaagccttgcggaagcttactttgctaatggatgtgatttacatctgaccactgagatgctcaatcagttagagcttcaagttgatggcggtttcaatcagaatctgaattcaaagactctgtcagctcccaatctcagtgcaatggactaccctgcacttacttcaccagatggccagactgcttcagtaaaatatgtggttgataat

SEQ ID NO: 8372 - DNA, 561 bp, Glycine max
  unsure at all n locations
  Clone ID: jC-gmle01810031g06d1
cctgttcttcgggcatatacagatacaacaataactaaaatgtccgtgttggtggactttatactgtgtcaaaaaacttgtacacattcttggctggttcaatatatcacaacacgtagtaggcctggctgagtttccatgaagtcaatgccctcttcaagaagaaaacgctgtacagctattggaagtctcgcaggagtgcgagaacccctggtatgatgacctgtccccacaagaatataaacctgcaaacgctgctcggcagctatggcagtgcttttcagcacactcaactcatgtttcagcacatgaatggcttcacttgcgtgcaacccatgtaggtctactatcctctcatttcctcttccattgccctgcacctctggagcaactggatttctctggcggtaaatggattcttgagcttttccatgagcagccttcatatgcatgttgtgcagttgccctttagcacttagttcctttgctagggctttatcaccaattagataggctngctgtgcctgctcaaatatgcattacgtaagcatgcatgatcgc

SEQ ID NO: 8373 - DNA, 547 bp, Glycine max
  Clone ID: jC-gmle01810031g07d1
atataagaccactttatttacaacaaacatgatatatatagtattacatatcacacaaccataataagcaagactggtttaagacaaacattacaaaccctcaccaatacaaataattgataatcacattactacaatccttaaacttgaaaatatgctctttgccggttcttgcgtgtgttgtcctattgctgccgaatatgagaagtatatgttccatcgatatgtatttctgtatttcttttaaccgtgatacatactgtgataccatcgatatgacactcaacttatatttgcatctcacaacttatctatcaatgaattatactatttatattcataaaaaatgaagaacgagaagaatatctgaagtgttggtgtggaagctgttctgccaccaataggtagaaaagccccattactccagtgtggccacggctgctgctgtagttagactctagagttatagtttcaccatcaattatctttacagaacctggttgaggataacatgtgctcattccctacatgtaggctactttcgttc

SEQ ID NO: 8374 - DNA, 512 bp, Glycine max
  Clone ID: jC-gmle01810031g08d1
atcggaggacttcaagtcttactagccgattttgaacagttcaaaacgcctttacgataactacacagtttgctggccgcatcttccctttgctccttcccatcgcatcctcgaaaccaacacggtgctacaatctcgcagcccaaccccattcccacaaaccaccaatcctcactgcttcagctgctccttcttctccgcctcggtcaatcccagatgatccgtcccactcctccctgtatccttgacgaagttcccaccagccttggtagtgtcgcccaggccctgggtgacgcctgtgacggtgtcgccgacacccttgcccgccgtcgtcacgacgttgcctgctgcgtcggtgacggtgcccacgcctttgcctagcgtgtttgttgctgcgccgagggtgttgccgaggccgctggctgcggtgccgaagaagcccttaggctgttgctggttcttgtcggtcatactggcgatggtttgtatatacgaaattgatcgagtttatt

SEQ ID NO: 8375 - DNA, 509 bp, Glycine max
  Clone ID: jC-gmle01810031g09d1
gagtctactacgggcggcgctctgtcctttttttttttttttttagaaacattgtgaattgatgtcatttcacaaccaaacatatacttcgtgcatgacagccacggatcaaccgctagtacatatgaacaagcctgaaccatcacaatcacgctatttgcgtattacaaattatacggagtacaggaggggataaagctacctatacaaccacagccaatcagaaatgctgaaagagtcaaaggttaattcaagttcaatggcctaccattggctgccttcatagccgatctctctctctctgtctctctaagcagagaacgtaacactaggacagaagatgcataccgaatcctgcaattgggtccttatccccaatccatggctaatatcagcagtaactcaattggacaaaaaacacatgggaaaaaacagagaagggcaaaagaatgatgcctatgaaagattactactcccaagcgccactgtcatagactaactgtcattgg

SEQ ID NO: 8376 - DNA, 485 bp, Glycine max
  Clone ID: jC-gmle01810031g10d1
aaggggaaaatatacaaagatatttaaccactcaataaagtctgatgtaatactatgaattctacactagcattgtgtggtttgtaatacaagaccggtaggattactcatggactgttgcaacttgtaacatcagctgagtatctaagaatagttaaaaacatagagagccatggccaacattaacatgcttgaccaacattgatcattacatctaaatgtcttcaagatcagggagaggaaaccgaagaatcgcagcagtgccacttatctgggctagatggtctccagagacatgcatggacgaaaatacatggacagagccccctgaatccttaacagagttgaccaagttaacatacttttttcttgctgctatatctgaattcctgaaaagctcatccgtaatgagaagcatttgtacagctagtcgttcattggcaacctcaacatgtttcattccataacatgcacgttatggatca

SEQ ID NO: 8377 - DNA, 549 bp, Glycine max
  Clone ID: jC-gmle01810031g11d1
gtgtgagtaagtatatatgactaggaattaattgagtaattttttaattaactagcagggaaccccattttgattattattttcccaatactaagcgagaaaggtcttggcagcatctaagctagggaaataagtgggctcaaggaatatctgagtgaacccattatcggcctcggagctccccatcataaccggcacaacctgcttataggcgtagaagaacctcttcatcgtcacctcaatcgcctgcatcccctgcaaaacatgaaccttctcgaacccggtccttttctgtttctccgagtaaaccttcatcgccgactccatcattccgggcccacccgtggggtccaccttcacctccaatatctccggcaccttctgcctcagatccctacacattctcggcaccttcacgagctccctcgacctgaagcaaaacgccaccatttccccgcaatttctcatcatgcccaactccttcttcaagcctaagaaatccctcggatccatcatacgtgcacgtccttaacctgcgttaacaacttc

SEQ ID NO: 8378 - DNA, 449 bp, Glycine max
  Clone ID: jC-gmle01810031g12d1
aatcaacatcagttctattattcctttgcgtattggaaataaaataattcacatatggtaatgttgttggcttccgccatgcactttaatacccataattacacagatagcagggcatctattatcatgataaaatcaaacggagaatctctccagagagcttgaatgatttttctgtttcttccagacagtggtccttttcttcccgactccaaggttcagcaactttattcaacttgtctctcacattctgcaacaatcgcggaaggtcatcatcccatttgtagaactccaacgccttgttgttaagtaacttttcagcaacctttttcccaatcattcgaccaccagctgaatgagcaaagtagatattgtaaaaatggcaaatgaatgcttggggatccttcacagataactccttaagatattgcgcataggtaagaccagga

SEQ ID NO: 8379 - DNA, 605 bp, Glycine max
  Clone ID: jC-gmle01810031h01a2
gccgcccttttttttttttttttttaaagtagcaaagacaatgctatcttataactgatatttgaagcgggagcatcaatacaatacaatatgtaactatgaactatcaatatatgatcgttattatgtctgtgatacacacaattaaggccataatatacttatgtgatttacaacaacttctagcttattttatacatcatgccaacccaactaggagcaattttcatcatacaattacacttatctttaatcatcattcatcaatactggcatcagcaatacgctctaaactctgaagcatgacaaggtggtagtcaccagggaccatattgttatgcaatttatgccacaattggataagatgcacaagttgcaacaccacacatgttcttccccaattccatcttgaagtagccattttcaccccagctttctccccatgaattttttatgagccaatatgggacaccattttcaactccatatccaacagcaagaacggcatggttcacatcctgggaagtgctaccacaagtgtcactagtgaaaactccattctcgtagaaatggaacccattcaccacctgaaaggccacactaac

SEQ ID NO: 8380 - DNA, 555 bp, Glycine max
  Clone ID: jC-gmle01810031h01d1
tcgcgatctagaacattgaagattccacaacagtgggagggagatccaaaaagagagagtggaaaagatggcgcggttgatcacagtggtgtggtgcgcggtggcggtgctattatgcgccgcggccggtgcgtcgtgggtggaggaggcggcgaacccgatacgaatggtgtctggcgtggaggcggaggtggttcgggtgatcggggagtgccggcgtgcgttgaagtttgctaggttcgtgagcaggttcgggaagagttaccaaagcgaggaagagatgaaggagaggtacgagatattctcgcagaatctcaggttcatccgctcccacaacaagaagcgtttgccctatactctctctgttaatcattttgctgattggacttgggaggagttcaaaagacacagactaggagctgcccaaaattgctctgccactcttaacggcaaccacaagctcaccgatgctgttcttcctccaacgaaagactggagaaaagaaggtatagtgagttcagttaaagatcaacgcagctgcggatcatgctggac

SEQ ID NO: 8381 - DNA, 601 bp, Glycine max
  unsure at all n locations
  Clone ID: jC-gmle01810031h02a2
cgtctctgaaatctcgagggtttcatcgttgctgaatcaacaattcggaaccagttagcaatgttcagattctggggatcacaagagcaacaatcgcaggatggttcttcgcagtcacagtcgtggtatccgccatcggtggtgagttcacctacttcatcgaggcctgttacaccgactgcatcttcttcttcattatcgcagaggccttcgtctcatgttccaccttccgaagctgctgcagttattgccgttttgaaggacaagagtgttgatgagttgcggaagcttttatctgacaaagatgcgtatcaacagtttttgcattcgcttgatcaggtcaagattcaaaataatctgaaagatgaactttgcaaggagaatttacagcttgcagaggaaaatcttcaaaaggaacctcgcatcatggaacttaggaatcaatgtagaataattcgaacaactgagttagctgctgctaaggagaaattaaatgagcttgagaagcagaaagaagacatgttgaaattgaattccccagcatcccttttncaaaggatcaagagtcttgcaataagactgacgaggaatctgaaaactt

SEQ ID NO: 8382 - DNA, 525 bp, Glycine max
  Clone ID: jC-gmle01810031h02d1
aaaaaaaaagtcattgcattttttttacattttacaaaacaacagtaaatcctatatcggcgatgatgatctcatagcctatcacaaaccagaaaaataaatgcaagtccatacctcatcccaagtggcctgaaaccacttgacaatgtcaacacaatgaacaatctcaggctctacaatatgaacaatctcattgatagtagatggttctatcccaacgactgcaacttctatataattggtggcaaatatctttgaccaatgataactattgacaatagtgaactaaaaatcaaatacatacttgccaaaaccagttttaatttcttaatatttcgtgttgtgcttatactgttgatgttttagcagcaagatgtacaagagttttcctgtggtaagtagtacgtagcttcttgtacttttgcaaaaaagcagcaaggtctatctctctgtcaaggagatgctggtgcaagttttcagattcctcgtcagtcttatttgcagactcttggatcctttggagaa

SEQ ID NO: 8383 - DNA, 588 bp, Glycine max
  Clone ID: jC-gmle01810031h03a2
atttcttccaacgacggggctgatcccatgcaagggcttattactgatgatgcattaaaggactctgactttcttgaactaattgtttctcttgatgatttcatgtattctcttacatatgcgcctccatttgaaaatttaccagtagaatctgggaaagtggtacctacctcagacaaggatgattccggggttggaacaaaatcaaaacctgctgatttaacaccaaatgagcaagcggatatcactggtgataataagtctgagaagtttcaaagcacacatgtaaattcagattctttaaaggagaaaaaggttaatgctgaatctggggccatttcttctgatgtgggatacagtgggagtcaagctgacatgaagtcaactgatggtcgtaccaaggaaaggtcaactgatgatgtgaagtctgcttccagcgatgctgagttgagaggcaatctctttcgtgcggaagagagatatgataatgacaataggtactcgaaagatgcaatccccactaagggtgaatgcctctgggagggaatgcttcaccaaatatctctagcactcattcagtcataagca

SEQ ID NO: 8384 - DNA, 499 bp, Glycine max
  unsure at all n locations
  Clone ID: jC-gmle01810031h03d1
gcaaaattgttgtcctcgtatttattcaactgagcacctactgctgtcaaactaaaacaagagaaaaatggtcatttgtttgttctacgaggtattgatgctacagaaaaaaaaaatagctcgacaccttacaataagcttacatactacagtatatgaaagacatgaaaataaaaataaaaagaggaaactaatatcctctacttctagacgcatcttgaggccaggtagtgccttgcgcatagggtggtccacctcctggctgtaggttgctaccctggggagaaggaacccactgagggtcaaaatttctttgaccatgggtcacattcattgggggttgaagatattgtggtgtcattattggctgttgctgtgaacccggaaatgattgattcaaaatgtgaggcctaagatgaaagttgtgcattgtctgttggggaggaaactgattctgggagttttggggctgccattcangtatgtcatcatcatcatc

SEQ ID NO: 8385 - DNA, 553 bp, Glycine max
  Clone ID: jC-gmle01810031h04a2
ctcagcctccacagcactactgttatatatggattcgatgcttcttcgatcttttcctaatatgtaacaacgcttcttctctcgccaccactggttcttatttgccaaatgcttcatggcacaataggaaaatccaaaaagaatataattttttgaggtttcggtggccaagtttgaaccaccattacaaaagcattgaaggagggtgtacatgtaaaaaatgtaatataaaatttgttgtgaaagcgacctctgaaaaatcttttgagtctgaacctcaagcttttgatccaaaaagcattttggactctgtcaagaattccttggatgctttctacaggttttccagacctcacacagttattggcacagttaagttcaagcttttccataattactcttagaacgaaccctcaaatacttatattcatttggacgaatcacttttctagatgaaagtaatattctgaaggttttaaaatggctctctttttctgtgtttgggcaggcattaagcataatttctgtgtccctcctttgctgtgagaaaata

SEQ ID NO: 8386 - DNA, 442 bp, Glycine max
  Clone ID: jC-gmle01810031h04d1
ccatcccaaaaaaaatattttttcatttaaattagcaattaaaaacttaaaactaatgtagcgactccaagccggcctgtgacaaaggcagccccatttaaacaaaactaattctcaagtcaatattgccgctgcatcctcatttaacaaagggaatgagtaagttttctgcataaaatagcttccaaataaacatatagaaggatgttatcgaagctttgcttttcaaatctacagatttggcatgaaaccagagaattgaagccagaacagggtgtcccagacccgtgacaattttgctccaaagacaaggagatgcagctcccaccaggagggcgactccataagctttttcaagaaggataacacaagtccagaataccggtttctgacctaaacgcactgaaaaagatgggatgccaaatactttatctccttcaat

SEQ ID NO: 8387 - DNA, 597 bp, Glycine max
  Clone ID: jC-gmle01810031h05a2
caacactcctatttttccatttaatctcccacttctgagttgtcacataaaaaccctaattcccaattcctttctccaatcgctcctccctccgcgccacgtcgctaggctctgtagggttctgagttccgattcgcgagggaaaatgagcacgcagaagaagcgaccgtaccacatagaagcgttcaagcaccgcgccgtgggggatcccaagtacgccgagaagacatggaaggttctggaacacgctattcatgagatatacaatcacaacgctagtggccttagctttgaagagctttacaggaatgcttataacatggtgttacaaaaatttggggagaaactttacacaggacttgtgacgaccatgacttctcatctaaaagaaatttctcaatcaattgaatctgctcaaggagaaattttcttggaagagatcaacaggaagtgggtagatcataataaggccttacaaatgatccgagatatactgatgtacatggatcgaacttttataccgagcaaccataaaactcctgttcacgagcttggattgaatctttggagagattgtgtgatcattccagcaaaact

SEQ ID NO: 8388 - DNA, 517 bp, Glycine max
  Clone ID: jC-gmle01810031h05d1
ataaaaaaaaaattggtttatttttgtttagaaataagaagctaaaaatgatatatttaagttttgcagcctgaaaagaagtaaccctgagaaatctaggttttgttgagtatgcagagagttacactacttgcggcaatttgtgatgtgcactcaaacttatgacagacagaatcacacaagagccatgccaaatcaaaagcacatacagttcaagcaagatagcggtacagttttctgtccactttatccctctccaaaaactcacgctcaataagggattcaatccttttcttaataacaacaggattaggcaaaaaccgtgactgcagctgctttgtgacctcagcaacaatattattatgatctagagtccgcctagacttcattatcctcacaatggctgcttcgatctgtggctttctgtcttcttccactctttgcctagtttctaggttttctggttcagactccctctgagcaacaacagtccctatctttaccttgaagaacttac

SEQ ID NO: 8389 - DNA, 372 bp, Glycine max
  Clone ID: jC-gmle01810031h06a2
agtctctactctctatcactagtctgtattacatattgcttacaagatggcaacatggtcagcgtgccttgtacggaatggtttatctacaccgcgctatataataactcttaataaggacttccatggcagaagatatctctactgatcttggagactatcattattgcacagcaataaggcatgaaccgcattttccataaaggcctctttggagcaaaggcaagaagaagggcgaagggggtttctgaaactgttgcttggaaatctgggagaaggatggcctgcactattgggaagtgacaaagcttatgctgatgaacaaggcgtttcattctccagaatgtcttactccacgtttctggagtattt

SEQ ID NO: 8390 - DNA, 378 bp, Glycine max
  Clone ID: jC-gmle01810031h06d1
aaacaatgataaggacctttttcggttttataagaagacagggttcttaaagaaacacgtgaactttagaccttaagaaaccgcaatgtttttcattggaaaatgccccaatttatgacatgaaacatgacgtcctttgtctaccactcaaaacaagcaatgagcaggcacaattttctgttaccctaaactatggcagaggctgctgagggcattatgaactacgggactttccatatggacgaggcttcaaaattgggcacctaaacatggggtcgaacttggggttgggggcacaacacgcctttgaaagaggttttgtgctcaattatgaccacccaggacggatgcctctccccttagaattgatttatacgc

SEQ ID NO: 8391 - DNA, 412 bp, Glycine max
  Clone ID: jC-gmle01810031h07d1
aaaagtaactagcaaatatataggtataggccaatttttgtcttaaaatacaagatataccaattctgatgcaaaagaccgaaaaacaataaaagaattttgtttttttggggtagaggataataataacacctaactattagcatgtatgagtattgatgtacaaaattacaaacgcaactgtagtttgcataatgcacaagcaatgtaaatcttgggaacatcaagtttctttggtcagtgccctcctgggctcctattccatgacaaataagagggatctccaagttgccttggcttgacaagatatacgacggtaaaggccattgacaaaaagaagctcagtcctccaacagtgagataagcaatgccaaggaagtcattctttccaccgagccagctagtagttgac

SEQ ID NO: 8392 - DNA, 494 bp, Glycine max
  Clone ID: jC-gmle01810031h09d1
aaggggaaaatatacaaagatatttaaccactcaataaagtctgatgtaatactatgaattttacactagcattgtgtggtttgtaatacaagaccgctaggattactcagggactgttgcaacttgcaacatcagctgagtatttaagaatagtaaaaaacagagagagccatggccaacattaacatgcttgaccaacattgaccatcacatctcaatgtcttcaagatcagggagaggaaaccgaagaatcgcagcaatgccacttatctgggctagttgatctccagagacatgcatggacgaaaatacatggacagagccccctgaatccttaacagagttgaccaagttaacatacttttttcttgctgctatatctgaattcctgaaaagctcatccgtaatgagaagcatttgtacagctagtcgttcattggcaacctcaacatgtttcattccataacaagcacgtgatggatcatttgaaagc

SEQ ID NO: 8393 - DNA, 460 bp, Glycine max
  Clone ID: jC-gmle01810031h10d1
ccgcagaaacccataacatacttaaagttcaaattaaaaatcgctagtttatggctgaatctcaaataatgatagacataacatgacttatgatgaggggtaggcatgtatggtatgaggttcatctcgaagtacaacgccaactttgaagcctggactaatccagacaggcatacacttataacttgacatctgataactggatttgcaagacactcttgttgtcgttatgattaagccaacgtagcactgacaaccttaagcatggtcagatactgatatacatactctggcatgttttaaaacggcttaggcactaatcatactgataacatgcatgcgtaaaactggttcccaggattctacagtgatagttgcgcttgcttatgatccgaatggagatttccggacaacctctttcttcattgacaggcttccagttcctgtgtgtttgaagcat

SEQ ID NO: 8394 - DNA, 305 bp, Glycine max
  Clone ID: jC-gmle01810031h11d1
gaaaaatctagtaaaatcatctgaaacttggcatcttctctttgcacctaagacattgagaattctaagaatgttacacgcaagtcccatcacaacttctagcacttggatcagcacaaccttcaggaacagaaatatttacttgccaagattgctttgcctacaattcaagattggaagaaagttgccctgtgaatagcatcctcgatagcatttccaagtgcagcctcgttcaaggacttgtcagccaattggactctcttgacatactctcgctcttggacaagcatgttaccatacgtcaa

SEQ ID NO: 8395 - DNA, 447 bp, Glycine max
  Clone ID: jC-gmle01810031h12d1
agggttaatatattgaaattgatgattaaatacaagctttaaatccaagaatgccaacaacaaattatttccttgctccaacttccaatacaaacttttatggcagacatgagattattccataagataaaaatatgatccaaacttacaagggtctatatgggttcatagacatctgctgcaggggctgggggagcattagctagagcagatgacacaacaaaggcaccaaataagattgtgatactggcagtgaagttgacaagcaaagcctaagaaccatatttgtccaatcctgagttctcaaggaaagtgagcttatccagaaacccaagagcagcagtgcccacagccaagacagattcaaacagcccaaatagcgcgtgccaaggaagtgaagcgcgtttaatgtctggagtcccaccagggaagaaaaagacacaaacc

SEQ ID NO: 8396 - DNA, 488 bp, Glycine max
  Clone ID: jC-gmle01810032a01d1
aaaacataaatcaccgctagtttgacagcgggagagaattacacattacaagaagcaaaattatttaaaagaattaattatttgcaattctagaagtggagctcagacatacagggtaacatacatatttacaaatgcacctaatatggtcatgaactgatgaaagaaaaagtaagacaataagctccaaagctgaaaagaaaaaaacaattttacaacagcttgctatttactctgtcctattatacctcaagatttgattgagattttcacgacagaattaatgattcaagtcaataccaagaaagccggtaggatttcttctgcgatcgatcggcaccttacagagaagcctacttgaattgaaagcctgtttatttatttttcctgccccgtctgtatcatatgcttagctcattctagtctcttcttctattcagcatctttcgggcaagccaagtcaattaaataaatttacatcatatata

SEQ ID NO: 8397 - DNA, 483 bp, Glycine max
  Clone ID: jC-gmle01810032a02d1
agttattccgatattcggacgcatcaacttgttatgaaatcacattgatagcctctactcgtgtcctagctcgtctaagagctagatttgcctcaattgtttgtctcttgccttccgccttattcaaattagcttctgctatttcaagagtttgctgtgcttcttgtggatcaatgtcactacccttttccgcatcatttactaagacagtgatctcattattgcttattctagcaaaaccgcccatcagagccatcgttaaccattggtctttaagaagacgtattctcaaaatacctatatctacggctgtggcaataggcgcatgatttggtaatactccaattggtccgctattagtagataaaatgatttccttcacttccgaatcccaaacaattcgattgcgggtcagtacacagagatttaaagtcatttcttcaaattgctctccatctctaagttcgtagctttcgcagtagc

SEQ ID NO: 8398 - DNA, 501 bp, Glycine max
  Clone ID: jC-gmle01810032a03d1
cataacataattaatttattaattcaattgttcaactattatgctaataacctaaaagtacataaatcctgtatgtgtggaccattaatttgtaacggtacagataacctgctagggggccaaagaccactcaaatgacattatgttgtaactgctaggaattgtgtccacataagacagaccacaaacaagaatcgccgtcaaacattaagccacggaagaaactaatttacaacagacgagcaaacgaagaagtgcattcaaatgaaaaggggaaagataatccaacttgggggggggggaatctagagtttacttctgcattaaagaaatttttcacttgcatcaacccaggaatcaggacgcagcaggacataggttcaaacggcgatatcatgaaattcccattgtgtaaacatcttagttgccaaatcggtctcttcccatgggagcctcctatttccacctgcattgcgttgcacagcattattctgcattgac

SEQ ID NO: 8399 - DNA, 569 bp, Glycine max
  unsure at all n locations
  Clone ID: jC-gmle01810032a04a2
ttcctgtcaaactgcagagaagagggcaaacaattagggtttttcaaattcaacatttcttcgtttaccaattttaggtttttttctctcctcactctgttgccttacctttcaattgcaattcgtacaggaggttgttgtattctcatgcacaattgaaactggcaaatgagtgatgcaaaagaaaacgaggaagctggccagggggtgccctcggtcgtggaagaaaaccagcagttggttgatgcagaggttcaagatcaacctgaagctgcctctgctcctgttccagtagaggaaacttcaaatcatgttgaaattgggtcagatcatgttgaaaatacgaaggaagagccacctgctgaggataaaaatgtagaattagaggttgtttcagagggaattccacangatgttcaaaatactcttctctctgtcccagtagaggctgatgctcaaattttggataggactgagtctgaagaagctgaagcttctggtgcgaaggtggaggctgatgaattaccacagaataataaggaggctgagaataatgatgatattcatca

SEQ ID NO: 8400 - DNA, 344 bp, Glycine max
  Clone ID: jC-gmle01810032a04d1
gtctcggtaaatagaatatatatagaaaatagcatcatgtgctatcgaactacaaatccaagagaatgccatgacataacgttagaacttttttaatgtagcattgataatttcaaagccctcaccctgtcaatttggatcaccaagtttctaaacagatgcctcaattctaggcttcatccaaccacgccagtgtgacatgtttagttggcaaccgatattgtcttacaagttcaattgctccattgttgaccattatttgctttccaacaagttcactgagccaaactgttttgtaaatgcggcttataacaatcagtcagagggcaagcagcacacacagg

SEQ ID NO: 8401 - DNA, 285 bp, Glycine max
  Clone ID: jC-gmle01810032a05a2
cctaaaaagcgcaagaaaacaaaatccccaaaatatctctcgctctgaaaccgccatggatttgcagcagagcgagttcgatcgcctcctgttcttcgagcacgctcgtaaggccgcagaagccgaatacgagaagaaccctctcgacgctgataacttaacaagatggggtggagctttattagagttgactcatttaaagagttttcctgaatcgaaaaaaacgccccaagaggctgtttaaaatctagaggaggctcttgcggaaaatcccaagaagcatga

SEQ ID NO: 8402 - DNA, 344 bp, Glycine max
  Clone ID: jC-gmle01810032a05d1
ggctcggtagatagaatatgtatagaaaatcgcatcatgtgctatcgaactacaaattcaagagaatgccatgacataacgttagaactttgttaatgtagcattgataatttcaaagccctcaccctgtccattaggatcaccaagtttctaagacagttgcctcaattctaggcttcatccaaccacgccagtgtgacatgtgtagttggcaaccgattttgacttacaagttcaattgctccattggagaccattatttgctttacaacaagttgaatgacccagactggtatgccaatgaggcttatgacaatcagccacagggcaagcagcgaacctag

SEQ ID NO: 8403 - DNA, 591 bp, Glycine max
  unsure at all n locations
  Clone ID: jC-gmle01810032a06a2
aggaagatggagaagcagaacgaagaagaagaagagcaaaagaagaagaagaagagttcggtggtgataagaataccttcttatcaggaagtggttgaaagttcgcaggcgaaatccactccttcgtctctcttcgttccctcccaaaccttttccgaagctttcgccttcgtcaaatcctccgacttctactctcctcctccgaaatcgagggaaactggtcaatcggacgctccatcttcaacatcgacaccatctcccgctactgctgcagcttcgtcaacaataccttcctctcaaaatcgcaattcaattcttgtcagccacagacagaagggaaatcccttgctaaaacacattaggaacgttagatgggcatttgctgatgttgtttgtgactacatgcttggccaaagctcctgtgctctctatctcagtcttcggtatcatcttctgcatccagactacttgtactatagaataagggagttgcagaagaatttcaagcttcgtgtggttntatgccatgttgatgtggaagatgtaataaagcctcttcttgaagtaccaaaacagctatgcttcatgact

SEQ ID NO: 8404 - DNA, 510 bp, Glycine max
  Clone ID: jC-gmle01810032a06d1
gacagaatgtacaaagatgagaatatcactcaaatcaagaattgcaaaggtcctaactctccctcccaacttatctcaattctcaacaaccgaaaatctaatcttccatcaatttgttgttatacccaattacccacatgaccccacccctctcctttctcttcctttcccatttgattaaagcctcctaactacctcttcatttgttacagatgtttcccgtttacactcccaataaagttccatggctttacaagcataaagaataaataatctcctgagggtatattggttaaagggaaattattggacccgggaaaaaacttcttggtacctttatgtttcagcttctgattctttggaaataatggattcttctttttcctccacttgtgaagtgcttttcctcttcccaactctaccagaatatttggcaaaagctgcagaaagggcagatttgacagtaacttcgggttctttcttcctacgtttgctcacatcttctgtatc

SEQ ID NO: 8405 - DNA, 612 bp, Glycine max
  unsure at all n locations
  Clone ID: jC-gmle01810032a07a2
ggagggtctcattgccgtttttgaccttggaggtggaacatttgatgtgtccatcttagaaatttctaatggtgtttttgaggtgaaagcaacaaatggtgacactttcttgggaggagaggattttgacaatgccttattggattttctggtgaatgaattcaaaagaaccgagagtatcgacctttcaaaggacaggcttgcactgcagaggcttcgtgaagctgctgagaaagctaagatcgagctgtcttcaacatctcaaactgagatcaacctgcctttcatcactgctgatgcatctggtgctaagcatctgaacataacattgactagatcgaagtttgaggctttggtgaatcacttgattgaaaggaccaaggtaccatgtaaaagctgcttgaaggatgctaacatctctatcaaggatgttgatgaggttcttctagttggagggatgactcgtgttcctaaagtccaagaggtggtttcagagatctttggaaagtctcctagtaaaggagtaaaccctgatgaggcagttgccatgggggcggcaatccaaggtggtattctacggngagatgttaaagagctactactcctagatgt

SEQ ID NO: 8406 - DNA, 403 bp, Glycine max
  Clone ID: jC-gmle01810032a07d1
aggcaaaattttgaatatcgttattcaaacaggcataatttggttctccagaagtactacaagtttaaaaggccttaaggtaaaaaatgaactccatcttttagtacaaaaaaccttatattatatgctaaatgaaaaaagatgattcatctctaacttgtgatctagacaaataaatcagtaaaaagtggatacaaactcctccccgacttacttcttcacctcctcatattctgcctcaggagcctgatccccaccctgagaaccaccagctgaggaaccgccactagaaccacctgacatgtgctctccaatcttggacacagctttgtttgcagcatcaagctttgacttgatttcatcaacattatcccctgacatcgcctgtctcaaatccgaaact

SEQ ID NO: 8407 - DNA, 539 bp, Glycine max
  unsure at all n locations
  Clone ID: jC-gmle01810032a08a2
ggatttaggggggtgagaaaggagaagggtggcttcagaatcttcactatggtgtgtttggccttggaaacaggcagtatgagcattttaacaaggtggcgaaggtagtggatgacatgctcgttgagcaaggggggaagcgccttgtgccagtgggtctaggtgatgatgatcaatgcattgaggatgactttactgcatggaaagaagaactgtggccagcattggatgaattgcttagagatgaggacgatgcaactgtgtctacaccttatactgctgcagttttggagtaccgggttgttattcatgatccattggaagcatctgtcgacgaaaagaagtggcataatgtaaatggtcacgccattgtggatgctcaacatccagtcagggcaaatgtggctgtgagaaaggagcttcatactcctgcatctgatcgatcttgcactcatttggaatttgacatttcaggcactggagttacatatgaaactggngaccatgttggtgtttactgtgagaatttgtctgaaact

SEQ ID NO: 8408 - DNA, 524 bp, Glycine max
  Clone ID: jC-gmle01810032a08d1
agttcatagaaaatagaaatcaagggggtagataacagagagaatatgatacaaattcttttttgtttttgacataaaaaaaccttaggctagtaactgcgatagcatgaccagaatcaaaattacaaataaattagactcattccacttccacaatctcatccaaagcatagttgtttgttgatacattggcatagttgactttgttgaatcgaaccacaacagggtagcgagtgttggggtcctgatcaacagcaaccactgaaccagtgcctttgtaccagtaagattccttcctaagaatattcaccttagcacctctcttggggccaataggtggcggctttggtttagcttcagcttcagctgggggtgtggcggtggcgggtgccaccgctgcaagctcatctgaagcccttacaacacgcctagaagcggtgttctttgtgttgaacatgaccacccttgagtttgtggtggcagctgcaacattaagtgacaacacaaacccagatgctgctgat

SEQ ID NO: 8409 - DNA, 612 bp, Glycine max
  Clone ID: jC-gmle01810032a09a2
cggctcgagcgaaggtggtctcgattgcaagtgatccacgatacactctacgcttcacaaaaccttcaaacccaattccacagaattcttctgcttcaccatgccaccaaagcctttagactatgggtcaataaatgaaaacgtgaagaagagtcaatatgctgtcagaggtgaattataccttcgagcttctgaacttcagaaagagggcaaaaagattatctttactaatgttggcaacccgcatgcattgggacagaaaccactgagcttccctcgccaggttgttgctttgtgccaagctccattcctacttgatgatcctaatgttggactgctattccctgctgatgcaattgcaagagctaaacactatctttcattgacctcgggtggtttaggtgcttatagtgactcccgtggccttccaggagtgaggaaggaagttgctgagttcatactcaggcgtgatggttatccaactgatccagagctcatatatctcactgatggtgcaagcaaaggagtgatgcagatattaaatactatcatcaggggtcaagacgatgggatttggttccagtcccacatacccactctactcagcaacaa

SEQ ID NO: 8410 - DNA, 623 bp, Glycine max
  unsure at all n locations
  Clone ID: jC-gmle01810032a10a2
gctgcttttgtccttttgccacgcttaagatcacccaagagagaacctaagacacacaacacaacacaaacacacagagttagaggagaaatcatcatggcatcagcagcatctgggtttgtgttgtcacttaatgttgcagctgccaccacaaactcaagggtggtcatgttcaacacaaagaacaacgcttctaggcttgttgtaagggcttcagatgagcctgcagcggcggcacccgccaccgccacacccccagctgaagctgaagctaaaccaaagccaccacctattggccccaagagaggtgctaaggtgaagattcttaggaaggaatcttactggtacaaaggcactggttcagtggttgctgttgatcaggaccccaacactcgctaccctgttgtggttcgattcaacaaagtcaactatgccaatgtatcaacaaacaactatgctttggatgagattgtggaagtggaatgagtctaatttatttgtaattntgattctggtcatgctatcgcagntactagcctaaggttttttatgtcaaaaacaaaaaagaattgnatcatattctctctggtatctacccccttgatttctattttctatgactt

SEQ ID NO: 8411 - DNA, 550 bp, Glycine max
  unsure at all n locations
  Clone ID: jC-gmle01810032a10d1
agttcatagaaaatagaaatcaagggggtagataacagagagaatatgatacaaattcttttttgtttttgacataaaaaaaccttaggctagtaactgcgatagcatgaccagaatcaaaattacaaataaattagactcattccacttccacaatctcatccaaagcatagttgtttgttgatacattggcatagttgactttgttgaatcgaaccacaacagggtagcgagtgttggggtcctgatcaacagcaaccactgaaccagtgcctttgtaccagtaagattccttcctaagaatcttcaccttagcacctctcttggggccaataggtggtggctttggtttagcttcagcttcacctgggggtgtggcggtggcgggtgccgccgctgcaggctcatctgaagcccttacaacaagcctagaagcgttgttctttgtgttgaacatgaccacccttgagtttgtggtggcagctgcaacattaagtgacaacacanacccagatgctgctgatgccatgatgatttctcctctaactct

SEQ ID NO: 8412 - DNA, 435 bp, Glycine max
  Clone ID: jC-gmle01810032a11d1
atgggggaaaaaaaggggtcccattttaagcaagagacattttttattcacccacccacccaccaagccaaccccattttttactttcaccggatttcaattatccatagcaagggataacgggcacaggcgtggataaaaagaaacccaaccttgtcatatacttgggggaagagggccacaaattttacataaaaaacatggggggggccagagaaaataaagagatgcctatttatgactctggggttatttttgattttgcaaattaaattacacaatcacagccgtacattacacatgagttgggccttttccaacttaaaagcagaggataacattggcccatgacgcgacacatgccccacctaataatcataattttacatctttacatacaaaatacaaagactttaaatttttaaaagaagaaaa

SEQ ID NO: 8413 - DNA, 117 bp, Glycine max
  unsure at all n locations
  Clone ID: jC-gmle01810032a12a2
cccccgccccccccctcccccccccccccccccgtngtnatgangngtancgtagntnggaattnggtttgaggaattttntagggttttattnattttnngatggtttntgnagat

SEQ ID NO: 8414 - DNA, 452 bp, Glycine max
  unsure at all n locations
  Clone ID: jC-gmle01810032a12d1
aactcgatactccaatgactgattagcatttcactaaatcaactataaacaaccagatatattggtcaaaaacaagaaccacggtaacacgaaaccataaagaaactcgaactcaaaccacaacaactaaaaatacggggcataatcataaaccctaattgacgacatcaagccttagtttttccagcctccattaccaccattaccaccacgagagtaaccacggtctttgccaccggcataaccaccaccaccaccaccaccatagccaccgccataaccaccgtcacgggtacggtattcaccaccggcaccggcaccggcactacgaccaccatatccaccgccaccacgattggattcttcttcttcttcgncggcgccgacggcgacaccgggggactgagcttcattgacagtgatattacggccggccaagttctgtccattca

SEQ ID NO: 8415 - DNA, 507 bp, Glycine max
  Clone ID: jC-gmle01810032b01d1
cctccttaaaatattactttctcttctaaatcgtccttaaagtaaacaaattatataagtaatccctcgagtattaaaaatcatgctaaatagtctttcaagcatcgaacaatccttcaaactagttcctggaagttagtaaaaaatatcaaagtagggattaaattgatgaacattcaaaataccttagggactacttatataatttcattacttcaaagactttagagaaagagtaatacttaaaagaccgaattgatggtttattcgtttcccaatctattcatgtggattagccttcattcccaaatgctgggttgagtctactgtctagcggatctattcaatgacctttatagcatcctttgcaagtcgtgtgacatatgcagcagctaatgcagtggccaacagtcccagccccagtgttagcaactgactgattcctccaaatatattactaagttcagattcatcttgaatcattgctcttgcaaaagcaccagcact

SEQ ID NO: 8416 - DNA, 467 bp, Glycine max
  Clone ID: jC-gmle01810032b02d1
aaaaaatgaaacttttgtttctaatttcaaggtcttgcccaacatccttgagctagattgaagctgttgaaatattattttatcaagtccactttcaacacagaaattcaggatgaaaatgttcttttagcaactttgattacaccgagacatatcaatgccacacagtggggggaaatcaacaaatacaaaaggcaagactcaacactacagtacttattattagcctgaaagagcatagttgagagcgctatggacatcaaccccaatctgagcttcagctctctccaaatcagttgtggctgagttcagtttctgagtgaactcttggagacccttctggactagattcacatcaattcggtgtaccggcacggcctcaacagctattatatcagccacagagtttgcatggatgaatgcaaagccactgctgacaaagtacttggtcacatcgttcccttcat

SEQ ID NO: 8417 - DNA, 368 bp, Glycine max
  Clone ID: jC-gmle01810032b03d1
aaatatataatgatcatgaaggatgaaattagtgtatactaatttattactttattcatttcagtgcgtgggttaacatactagtgatcatatataactgctgccttcttggcactcagatagccacaagtccatatgttctgtaatctgttgccttactttgtgaactgcatcaggtgaggagcagatcttctcattaccttcaaggaccaaaggagattgaggacatcctcgaaaatcagtacaatgggcacaattgctacatgtgatggtgtcggaaggcagatcaggagatgaagcttgatcggacgcctgacgccaaggatcctgtgagccatttgcacatactattttcgaaccagcaattt

SEQ ID NO: 8418 - DNA, 253 bp, Glycine max
  unsure at all n locations
  Clone ID: jC-gmle01810032b04a2
aatgattcctgaccgtccccttgtgtcgtgtgctgtctatgctttcgcgtttgccatctccagtccaattggtgtggccattggaatcatattggatgccacaacacagggtcacgtggcggattggatctttgctatatcaatgggtctggcttgtggagtgtntatctatgtatcagtaaaccatctgttggcaaaagggtacatgccccacagaccgacaaaggttgactcggcctatttaaagtttctt

SEQ ID NO: 8419 - DNA, 572 bp, Glycine max
  unsure at all n locations
  Clone ID: jC-gmle01810032b04d1
gtgtgactcgcgcgcggcacggaattaactgtgcccagagctcgaccgangcatcagctaggtgcgggccggcccgctccatttatatatttttttattatattgtcttgttattttgctttatttgttgttgttataattctttcctaattgttgtgggtgatcagtatcattgtataatttgatttgagttaaactagcagagccattagattccgaggaatggcgcaccacataattttgaacctcgcgacaagttccaaacccaactttaacgcgaacttgagataattccgagaggtcaaaatgtgatccaaccttacaaggggctatctggggacaaacacatctgccgccggggctgggggagcatcagctagggcagataacacaacacaggccccaaataacaacgcgataacggcagtgaacttgacacgcaaagcctcagaaccatatttgtcccatcccgagttctcaaggaaagggagcttcttccgaaacccaagagcatcagggcccacagccaagacaaggacaaacagcccaaatagcgcgtgccaaggaagtga

SEQ ID NO: 8420 - DNA, 560 bp, Glycine max
  Clone ID: jC-gmle01810032b05a2
aaacacactcattgcacatagtaatgcgctttatttaagtgaataaaatattacatactagttcacaaatgcaaaaggacactcatcaaccagatatttgagactcttacagttctcaagaagtcgcgtcagcatagggttagtggcgttagaactcagaatttcattcttaacgccaaaaagaacagccagtaaagctactggaaaaggatcaactctagtaagaaaaacaattttcttacctctcccaagtgctgtgcgaatccttttgttgatatctgaggagcgattgttaactgcagaactaatccaagcagtggtgggtaaaccaccacgtccactaccacatgtaacatttacaacgacagcttctgaaggtaattgacttacaggataaagacaattcacaaaaattggtaaccaagaatccactggaaaatttccatcaaagaattcttgtgtgttagccaacacaagcttatcatcaaaaacaatcttgtttggaaaagctttacctgctccttgtaaacccaacaaatcaatgctcaacagtagatcaa

SEQ ID NO: 8421 - DNA, 359 bp, Glycine max
  Clone ID: jC-gmle01810032b05d1
atgccatgcccggccggaataatggcccggctcgacgagcatactaggtcgggggccgcccttttttttttttttttgagccactgtacatttatcactataacgaaatgcctaagcattctaaactggtacaccaaatgatccttgacaggtacgaccttacccagacactacctaaccaatcaccaacaggtgcggtgcttggcgtacacggctaaacattgcagacagccgcattaacaaagttgcaagctgaatacactggaacccgtagttacaacggcagagctcggcttccatatgcaacttaccgatgcattcctgtgtccatccctcaaggagagcagtcgaccagtcga

SEQ ID NO: 8422 - DNA, 606 bp, Glycine max
  Clone ID: jC-gmle01810032b06a2
atcataatcagtcatagcttcggcgacttcacgatattcctttcttcttctgattgagccaccgacagagcctgcgattaccgtggcggtttcagaatggcggacaagtacaacctcaagaaccccgccgtgaagcggatcctccaggagctcaaggagatgaactccaacccttccgacgatttcatgagcctccctctcgaggaaaatatatttgaatggcaatttgcgattagagggcctcgtgatactgaatttgagggtggtatttatcatggacggattcagttgccttcagagtatccattcaaacccccttcatttatgttgttgactcctaatggtcgtttcgagactcaaaccaagatttgcttgagcatatcaaatcatcaccctgagcattggcagccatcatggagcgtgaggactgctttagttgcattgattgcattcatgcctaccaacccaaatggtgcattgggatcgttagactacaagaaagaagagaggcgtacactggcagttaaatctcgtgaagctccttcttaaattcggactcctgaacgtcaaaagctgatcgatgagatacacgagtacatggtaagc

SEQ ID NO: 8423 - DNA, 405 bp, Glycine max
  Clone ID: jC-gmle01810032b06d1
ttttctttctttttttttttttttttttggttttattttttatgcgcagagcccatgtatattaccgtgtttgcaaagggagtataacaaaagtacaatcaaattgaaaaaacaaaagttctttttgtagtttaaaaaaactctatattatttttcactggcttggggcatacaagattaatttcggaccccagcaaattcgacggaatgtctcaaaattcagttgagaaaagtgccccctgttgggcaaccttatgagcgtttcccccttaatggccacaccagccattgagcgtccacatgctgtctacgatgaccaccgaccatcaggattctgaaccctaggacacggcttaggaccttgaaccctcgggcacgacttttggagcaccccctaccaggaaa

SEQ ID NO: 8424 - DNA, 570 bp, Glycine max
  Clone ID: jC-gmle01810032b07a2
cgatgaatacatcctagtcatcgttatgccatctctaagagagaagcatgatgaattcatgctgagggagcttgtccaaagatggctaaatcataaagtcatggtccggtggctttcgcgcttcttccattatcttgatcgctacttcatttctcgacgctccctgcctggactcggtgcagttggcctcacttgcttccgtgaatcggtttatatggaggtacgagtcaatgctaggaaagctgtgattgcacttattgataaagaacgtgagggtgaacaaattgatagatcgttgttgaaaaatgttcttgatatatttgttgagattggtatgggtgaaatgggtcaatatgaacaggattttgaggtacatatgcttgaggatactgccgattattacaaaagtaaggctgcaaactggattgagattgactcctgcccagattatatgcttaaggctgaggattgcttgagaagggagagagatagagtgtctcattacttacactgtaacactgagcagaaattggtagagaaagtgcaactagagctgctggtgactcatgc

SEQ ID NO: 8425 - DNA, 351 bp, Glycine max
  Clone ID: jC-gmle01810032b07d1
ggggaaaattctgtcaatcatattaataacccctaaaattaagttgggaaatatgcataatttttttaaatagatcccttagaacaaagggctaatttaaactcctgggcaaagaaagaagaccgagaagagattttccgaaattataaagggtaaagcccgaaaattttttggtaaagcagttgattttaacaacgggcgatgagccacactagcttgccttaatttggagcacttaggtggaatataaagggtcaattttttattgggccagcttcactttcccaccttcactttccattaaaggtatcaagatatatatgaaaacaacgtttttgggacaatattttg

SEQ ID NO: 8426 - DNA, 462 bp, Glycine max
  Clone ID: jC-gmle01810032b08d1
gctaaaacaattatgggatactatcatatgcaaatacaggggaagaagctggcgctacattcagacgccagagaaccaccgtattaaggagaaggggaatacaccaccaaacataaacgtaaaaaacagttatacatgaaacgatctaaagtgctattcccgttggaagttaaggatcttaagataaattaccgaataaaatagcgtgtgaatgaaaattcttgcgttttgatgggacataagccctcctcatcagtcgtttccatgaatgggagattataactctattcaatggcttcgatccaatcaccatatatcctactgattttatctggacctttccacttctgatgtgctctctgtcctggcctctgaatagccatggaagaaggcctttgtgaagggactccaatatgatacacatcaaaaataggagccagagtaactgctgcaaccacatta

SEQ ID NO: 8427 - DNA, 628 bp, Glycine max
  unsure at all n locations
  Clone ID: jC-gmle01810032b09a2
gctgcttttgtccttttgccacgcttaagatcacccaagagagaacctaagacacacaacacagcacaaacacacagagttagaggagaaatcatcatggcatcagcagcatctgggtttgtgttgacacttaatgttgcagctgccaccacaaactcaagggtggtcatgttcaacacaaagaacaacgcttctaggcttgttgtaagggcttcagatgagcctgcagcggcggcacccgacaccgccacacccccagctgaagctgaagctaaaccaaagccaccacctattggccccaagagaggtgctaaggtgaagattcttaggaaggaatcttactggtacaaaggcactggttcagtggttgctgttgatcaggaccccaacactcgctaccctgttgtggttcgattcaacaaagtcaactatgccaatgtatcaacaaacaactatgctttggatgagattgtggaagtggaatgagtctaatttatttgtaattttgattctggtcatgctatcgcagttactagcctaaggttgttttatgtcaaaaacaaaaaagaatttgnatcatattctctctgatatctacccccttgagttctattntctatgaactaac

SEQ ID NO: 8428 - DNA, 473 bp, Glycine max
  Clone ID: jC-gmle01810032b09d1
agttcatagaaaatagaaatcaagggggtagataacagagagaatatgatacaaattcttttttgtttttgacataaaaaaaccttaggctagtaactgcgatagcatgaccagaatcaaaattacaaatcaattagactcattccacttccacaatctcatgcaaagcatagttgtttgttgatacattggcatagttgactttgttgaatcgaaccacaacagggtagcgagtgttggggtcctgatcaacagcaaccactgaaccagtgcctttgtaccagtaagaatccttcctaagaatatttaccttagcacctctcttggggccaataggtggaggcttgggtttagcttcagcttcacctgggggtgtggcggtggcgggtgccaccgctgcaagctcatctgaagcccttacaacacgcctagaagcggcgttctttgtgttgaacatgaccacccttgagttt

SEQ ID NO: 8429 - DNA, 387 bp, Glycine max
  Clone ID: jC-gmle01810032b10d1
ggctaaaggaagcttaagtttacattcacacaataataagtacacaatctcatggttatgaacctaatgtcagagctacaagagtaactgtttcggtacacatacaaggcacacaggaaattgcagcagcatctgcaatacatttcttattcataatttatattctaatcacaattcatttattggcagctccagtcattcatagcttcattcatgcatccaacaacttcagcaagtccttctcaatgctcaaaggagaagttgtgggtgcatagcgatcaaccacatttccctctttatcaacaaggaacttggagaagttccatttgataccatccccaaagagtccacctttgcttgattttagatacttgtacagtggagcag

SEQ ID NO: 8430 - DNA, 563 bp, Glycine max
  Clone ID: jC-gmle01810032b11d1
agtaaaacaccttctattatttgaagccacaaagttcagcagaaccacaatgaacaccaggaaatattaattgattatctcaagtgttttttttagtagtgagacaatgtaactcaaaattataaaggataacaatccaatatgaacaagataaattatttgattatatcaagtcatagcttctcttcaagtggagaatgcttaggttctcagggtgtgtataagcaggttccatcatcacttcttgcagttgggtcgaagtttgaggcatttggatcagtacaaccttcaggaacgggaatttttacttgctgggctgctttgccatagaaagttcctcttttgatggcatcctgattagcatcaccaagagcagcctcgttcaagtacttgtctgccagttgtactctcttcacattctcttgttcttggacaagcatgttaccatactccaagagcttgctcaaagtcatcttcggttggtcaaaggttggaggtccttccttggagttcacaagcttcttcccaatcaagtcaacaccaacaccagaaatccacttcct

SEQ ID NO: 8431 - DNA, 465 bp, Glycine max
  Clone ID: jC-gmle01810032b12d1
accaaaatgaaattccataacatcaaaacactaaaatatcaaaccaaattcatccaacttggttggtcattgatattaaaaaacacagtaaattactccttagaacaaaactttgacaaactcatgctctagtgttaattaagaatatgttctgaacaaaaaagctgaatagactacaccaattaatcgaagagactgaaacccatatcatcatcagattcctctttctcctccaccttttcctccttctttgcctcagcagcaggagcagcagcagcagcacctcccccaggagctgcggcgacggcaacggcaccaccaccaccagaaggaaccgtggccaacttttccctaccggcagcaataagctcaactatatccttacccttaacttcagacaaaaacgattcaatcctatcttcatctgcttctactccaacggagccaaagatttccttgatgaca

SEQ ID NO: 8432 - DNA, 549 bp, Glycine max
  Clone ID: jC-gmle01810032c01d1
gtgtccgtgagcacagtgcggaattaatttcgacgagctcactcttacgtgcggccgcccttttttttttttttttttttttttttttttacagtaagaattcttattatttattatgaatgaagacgtaaaaaaaatcaaaagaattacgaagactatttgaaaattgaaagaatgagcactggtcaaagtcacctggtccccgaagggaagaaaaatcaatcctcttgtgaaacattcctctaggaacggtgggtgtgacattgcagaagtttctaatcgaacgtgtctcgcgcactactgctaaaaaaactccttcgctatgataaaagcaaaagagtggtgtcaatttcttttaacgttgtttccccataatttcttccataaccaatcttctaaatctgtttacggtgagaaagcacaaatagatatgctcttcaagttcttccaacatatccaaaaagttagattcgttgtcctgaaattccttcacaacccgcttcaatatttcacacttacagtaattcttcacacaaatatcagcaacct

SEQ ID NO: 8433 - DNA, 319 bp, Glycine max
  Clone ID: jC-gmle01810032c02d1
acttaaataaaaccctgaatttcacactaccacaacaaagaaggcaaaacaacaacgctaagatcccaaagggacagccgcaactcgcaacaccggaagagtataaaaggaaagaggaaaacagaaaaaaccatgggcaacataaaaaagccagaccaacaaaggccaggacaaaccaaagccgaaaccagcaaggaggggaaaccgaataatggcccccggccacttaaaagggctagcatggccccagagacaagcatggacgaaaatacatggacagagccccgggaatcctgaacagaggtgaccacagtgacat

SEQ ID NO: 8434 - DNA, 439 bp, Glycine max
  unsure at all n locations
  Clone ID: jC-gmle01810032c03d1
acaaaaaataaactttattaactaaaacgaacaggtagcataacattaatatcgtgtcaaggaaaaaattaaatgtagaaaagcaacaaatgcgcaagcggaaagagaaagacatcaagactttaacattgcacacattgtaaaatgtagacaatgtaactcaaaattatacaggataacaatccaatatgaacaagataacttattttattatctcaactcttagcttctctccaagtggagaatgcttaggttctcagggtgtgtataagcaggttccatcatcacttcttgcagttgggtcgaagtttgaggcatttggatcagtacaaccttcaggaacgggaatgtttacttgctgagctgctttgccatagaaagttcctctgttgatggaatctcgattagcatcaccaagagcagnctctttcaagtactt

SEQ ID NO: 8435 - DNA, 392 bp, Glycine max
  Clone ID: jC-gmle01810032c04d1
acagtagtacaattatgcggaaacctcagatactgcaagagcaagagtctatggcacagacatggatgagtcagccactactggaggtgcaacacaagactgcaacaactgagtgtcatgaaactcaatttgtggcctatgatgaaatggagctgaggagatgaaattaaacctttcttgacatctgcttgcaatactctaatagggattgctgccaagaagctttacatggatccattgcatgctaacattcctttgaacacaacactacctaattggtgactcttgaactgccattatggctccacagatgaattcatgtatttaccattgactggctgaatctgccactcattctgctctaatacttatgcaacagttctgagatcact

SEQ ID NO: 8436 - DNA, 445 bp, Glycine max
  Clone ID: jC-gmle01810032c05d1
gtggattgcgccggacttattaatggcccggctcgactagcttactgctcgcgggccgcccttttttttttttttttgtcgttattgagatcgttcgtttatttacatatgtcatgaactgtacttggattcaaatagttgacagattacatcaaaaacgtgcttggcttcgacttcattgaagaacgcaaacgcattatatactacagtcattgagaacttgtggaagtatggagaggtctcttcgtattccaacttctcatcgggaacgctaaggagaaacaaagcatccaacgtctcgagatcggaaacttgaaagaagagcgagttcttcttatctcgcaataatgacaataatccgacgatggacgtatccttccattgcggatccttcttcaagaactcgaacaagtttacagagccaaaagccataacctgtaatcca

SEQ ID NO: 8437 - DNA, 55 bp, Glycine max
  Clone ID: jC-gmle01810032c06d1
ttttcttcctttttttttttttttttttttttttttttgagggaaaacattgagg

SEQ ID NO: 8438 - DNA, 490 bp, Glycine max
  Clone ID: jC-gmle01810032c07d1
gaaaacatattgtcataaaacaaactcaacaattcatcattcacggtaagttctagaagttcaaaatatccaaatataaaacccgcacatcaaatcaattattatacattcatccatcatattcgcaaacttcaagcaaaatacaggattttgcaaatgtcacgataagttacaggaaatgtacagaagcctaacagcacattgccagcgacctgcaacctcatcttccacgccttggtgacaattcagcagatcttgatctagatccaggtggtgatctcgacgacttccactgaccacgatcagcatcagacttgtacatagatttctcagcatatccattgctttgattctgttcaataccattgccataagcaggagaataagacctacgcttctgttcaccatccctctccctgggaggacctcttggtgatctggggtgctcagcttgcctcctaggggaaacagagtaatcactttgccgtct

SEQ ID NO: 8439 - DNA, 114 bp, Glycine max
  unsure at all n locations
  Clone ID: jC-gmle01810032c09a2
ccccccccccccccctcccccccccccccccccgtngnantgangngtancgtagtttggaattnggtttgagtaataaantagtatattgaagaggatgtatgtgttattgtt

SEQ ID NO: 8440 - DNA, 489 bp, Glycine max
  Clone ID: jC-gmle01810032c09d1
gctaaaacaattatgggatactatcatatgcaaatacaggggaagaagcggtcgctacattcagacgccagagaaccaccgtattaaggagaaggggaatacaccaccaaacataaacgtaaaaaacagttatacatgaaacgatctaaagtgctattcccgttggaagttaaggatcttaagataaattaccgaataaaatagcgtgtgaatgaaaattcttgcgttttgaagggacataagccctcctcatcagtcgtttccatgaatgggagaatataactgtattcaatgtcttcgatccaatcaccatatatcctactgattttatctggacctttccacttctgatgtgctctctgtcctggcctatgaatagccatggaagaaggcctttgtgaatggactccaatatgatacacatcaaaaataggagccagaagaactgctgcaaccacattatcggcggaagcttttgaaggccctccc

SEQ ID NO: 8441 - DNA, 423 bp, Glycine max
  Clone ID: jC-gmle01810032c10d1
aaaaaaatcaagactttgttcaaaatccctagaaaaggaatagtaacttaaatcattttcatctggacacaaaattaataacattacaacttgcaaatctaatctgaaaccagttcccaaagaaaatacaaaaaacgccactgtatacttagccattaaaaggaaactcaatcagccggacttggaagatcactcaagttaccactcaaaacgagctaggtttaggcctttgggctgcaacattcactctgattgccctcccatccaaactctgaccatcaagggcagcaattgcatcattcatatcagtctcactggacatcgtgacaaagccaaaaccacgtgatcgaccagtctctctgtcatagaccacccgagcattctcaaccttaccatgttcactgaaaatttgctcggctcgag

SEQ ID NO: 8442 - DNA, 115 bp, Glycine max
  unsure at all n locations
  Clone ID: jC-gmle01810032c11a2
cccccccccccccccccccccccccccccccccctngnantgangngtanctaagtttggaattnggtttgaggtgggtgtatgtttgagaagtaagaagnatggtttagtatgg

SEQ ID NO: 8443 - DNA, 358 bp, Glycine max
  Clone ID: jC-gmle01810032c11d1
ggggtaaaaaaaaggccccccccatttttttattcaacccttacacatggttttggcctttaaaaggggggccaacccacgggggttttttttattacattgggggaggcccgggcccattttttaattaactaaaaaagggccaccctggttatttcggaaggcacatgccccggggggcttactaaaaagggggcccggggacaaatgcttcaaccaggtttagctatgggggctaacttatggggggggcaggcctgccataaaacttatccccaccggcctccttaattttggccgggggggaccccgttaaattttttttcagcctccttagagatcaggaccccaaagcccc

SEQ ID NO: 8444 - DNA, 369 bp, Glycine max
  Clone ID: jC-gmle01810032c12d1
cccccccccccaaaaaaataatgaaaaaagggccccggggaaaaaaatcaaaccggaagcaaaaacattgccttctggttacaataaaaaaaatttttttggggttaaaaggggttttgggagggggggggccccatggggcaaaacggaacaaaaaacaaaaataaccggggtttgggaaaaaaaaaaaaaaaattggggggggggggcaaacccaaagggggggttttaaaaaaagggggggtccccaaaatggggatttccattttaagccaaaaaaaacccacctgtgtttgtatacaagggtgggggaccaacccccccccaagtgggggggggggggggaaaaaacataaaagggggggcaaa

SEQ ID NO: 8445 - DNA, 420 bp, Glycine max
  Clone ID: jC-gmle01810032d01d1
gaacgaaaagctcatgaatatttcacgacttcataatgtagcaaatccgaacagcttttctaaatacaagtgaaatacttaaaattgaaatacacaagtttatacgctaacaagactcttgccaagaattatgtcatctgttgagaaatcagcctctttccgatatgttcctctaccaaagtccaggttgtacgagtctgctagaccctctacaagtccaaattcaggttccaatccaagcacgctctttgctttctcaactgatgcatagaaatgctggtcacggaatggaaatgattactttttcccaaaatcaaaatctttagggttgcagtgaatgatctctggctctgggaacccaccagccttagcacatgctcttgctaatcatgacatgtgacatacttatctcccgagatg

SEQ ID NO: 8446 - DNA, 249 bp, Glycine max
  Clone ID: jC-gmle01810032d02d1
acgctcactatgactgcggccggcctgtccttttttttttaaaatttagaactccagatccttccttccgaattgtgaaacggtactagtcactttgcaacgtatcgattgataaggcacatggtcacagatcgtgccttgacacaacggcagatcctgagactacgcttatgggtagagacatgcccaggagttcaaactggccacgcccgtattgtacgcagtagtactattgcagacagaaggctc

SEQ ID NO: 8447 - DNA, 418 bp, Glycine max
  Clone ID: jC-gmle01810032d03d1
gtaaaacagcaagtcacattaagcctggattgcggatacacaagataattcacattatctgaagtacttcaccaaacacaaatctaaaaactctcaatagtcatttggctctttgacgctcactttccggggacgaagtcggtggcataggcccaagcgtcgttgttgacagggtcagcaaggcgatcggcgaggtctctccaatggaccctttccggggacaatggcctgcacaaagaagccagacatacagaacatggtcaatcgtccgttcttgaggaccttcaccttaagctcaacagaagcctctggggcatcagcaaggcccaatgggtccaagctgccacctgggtagattgggtcagtgacctcaccgagggggccaccagcaatacggtaactcttaacggcacccatt

SEQ ID NO: 8448 - DNA, 409 bp, Glycine max
  Clone ID: jC-gmle01810032d04a2
tttgagaaaaaaaaaaaaaaaaaaaaaaaaaaaaggaaaaaaaaaaaaacggcccccccccccccccccccgccccgtcccccccccccccccggccccccctccccccccccccccccccccccccccgcccccctcccccgcccccccccccccccccccccccccctccccccccccccccccccccccccccccccccccccccccccccccccctccccccccccccccccccccccccccccccccccccccccctcccccccgcgccccctcccatcactccccccccccccccctgccacccccccccccccccccccccttcgccccccccccccttccccccccccccccaccccccgccccccgccgccccccccccccctcctcccccccccccccc

SEQ ID NO: 8449 - DNA, 516 bp, Glycine max
  Clone ID: jC-gmle01810032d04d1
tgccctttttttttttttctttttttttttttttttttttttttaaatttttcttaatgtaaacaaattatataagtaatccctcaagtattaaaaatcatgctaaatagtctttcaagcatcgaacaatccttcaaactagtccctggaagtcagtacaaaagtatcaaagtcgggattaaattgatgaacatacaaaataccttaaggactactcatataacatcattacttcaaagactttagagaaagagtaatacttaaaagaccgaattgatggtttattcgttgcccaatctattcatgcggattagtcttcattcccaaatgctgggttgtgtctactgtctagcggatctattcaatgacctttatagcatcctttgcaagtcatgtgacatatgcagcagctaatgcattggccaacagtcccagccccagtgttagcaactgactgactcctccaaatatattactaagttcagattcatctcggattattgctcttccaaaagc

SEQ ID NO: 8450 - DNA, 347 bp, Glycine max
  Clone ID: jC-gmle01810032d05d1
tgactgcgggcggcctgtcctttttttttttttaaagcacatatcctcgctagctagtcccaggtagaggattacctatctctagatgccaacttatacaccagactgaattattcgtaaatgtcgacccggagctcaaccatacgggccaacggacccattggcaactgcccctgggatgcacctgacctggcgaatgcccaagtcatacactatgttatacagccgacctgaatcatccatttttcccccgggttgacatgacctgagaagggtcgtacctccaggtttgacggatgaaatgacggccgaccgcatgactcctgataagtcccagaatgccccac

SEQ ID NO: 8451 - DNA, 580 bp, Glycine max
  unsure at all n locations
  Clone ID: jC-gmle01810032d06d1
cacctatcgcatgcacacatgcaccctttttataaacattaatgataaaaaaaatcttgtgtataaggaaaggaattaaaggaaagcaatataatcaattttaatctttaaaaaaaactttaatcttttcagacctatatttttacatttccaacagcttactggcaatgagacattttttctttaagaatagtgcattacgcttcaattcatactactctaaactcatcttttgaattttattttactttttatttgctttattgtttgttattcattccttattttcatttttgaaaattaagttgtctgttgctgtgttctcactgtcaagtttctacattcctttgctaatattttttttcctaacatgccttttaatttttacctatatttttctttagaattatatatttgngtgagaactgttttccctttccccctcctctatctcttctaatttctttcttgccagcaattcacctccagtatgtgtgaaatggtcgtctttgtattaaaaaaaatagaaatccctatagtaaaatcgtacctgtccacaaataaatcaaactgaatgctg

SEQ ID NO: 8452 - DNA, 414 bp, Glycine max
  Clone ID: jC-gmle01810032d07d1
ccagcaaactactatttttttatggaatcttagccaattaacaagcaaacagaaatcctttttattttttagacccataagagaaaaaatttttccccaccccagggccagaaggcaacttgagaagcaccaaagggctcgtatgacttgacattcaagggtcaaagaccaagctttttgtttttcgcttcacgggttcaaagagcccagacgatagataacgctctccaaaactggggaagaccgcaacaaggggttttccagcattttcgggcctcttcgttattttaactgcagcagctgcagcaccaccagatgattttcccaccaggaaaccttttttcaatgcaagaagcttagcagtttcaatagctttttcacttgaaatttgaacaactttttcaggtaaatcaa

SEQ ID NO: 8453 - DNA, 509 bp, Glycine max
  Clone ID: jC-gmle01810032d08d1
gagccggagcaaacacttattgtcaatgagataaaagtcatcacgaaagaaaacttagaacgatgcatcccccatcatacacgacatgggaacaaatggactaccgaaatatggtgttatttaaaagacaataattataagttcacagaagcaatggcaggacagcttttcaggtcaaagacaagctaatgatgcttcgggatataaacatttcaggggtaaccaaaccatacaatcaaaatcttcaaacaacaacttgtccaaagagctgctttcggatctctggaagctttttacggaacactacatcaagtcgtgcatcaagagtattttcgcacacaatcttttcatcacgagaagccaacaccaccccaccagagcagtagagatcatgagaattgtgatgactgggtccaagtggaagataaacttggttgtcaacaatgatctctgggggatcaacatttgctttctcagcatactcctgtgcagatgaatccagcacatgc

SEQ ID NO: 8454 - DNA, 111 bp, Glycine max
  unsure at all n locations
  Clone ID: jC-gmle01810032d10a2
ccccggccccccccctcccccccccccccccccctngnnatgangngtangctagntnggaattnggtttgagataaataggagaattttatttattttaaatttnngagg

SEQ ID NO: 8455 - DNA, 574 bp, Glycine max
  Clone ID: jC-gmle01810032d10d1
gcatattcgtctgtaattcttcgattttttgagacttaccctctattaaaaactttggaaatcccatatatattataacttgaataagatcaattcttttttgaatctttatctgtccaattccctcaacaccagaggatattcttatatttttttgtatataatttttgatacaatctcgtatttttttatcttcttgtatattctcggaataatttgttggttgagcaaaccaaaaagaaaataaacaaataagacgtatcattttttgtcccataattccccactactatacataaaatgatacgtcttatttgtttattttctttttttttttctaaagatatctatagataaatatatctatatatatctatagatatctttataacccattctagctcattgactaagttcggtgactagcattagctactgtaaaaaaaaaaccaattcaaaaaatcgaataaaacacgactaattttattaatttaaatatttaatttcattaaatatttaattaaagaatttttttttttttattaaaaaaatgaattggattcattttaataaa

SEQ ID NO: 8456 - DNA, 287 bp, Glycine max
  Clone ID: jC-gmle01810032d11d1
cccccccccccaaaatcttaacaaccgaaaggcccagggggaaaaaattagacgggaaaccaaaataccagcatgatgggaccggtataaaaaatctttctgggcaaaaagggaaagcgggcggggtggggccccattggggaaagagggggaaacgccacaatcccaagggggttggggggaaaaacaaacaaaatggggggaaagtcccaacacgaaatatgggttaaaggaaaattggtgaaccccataaaagggttttggttttttgacgcaataaaccccgg

SEQ ID NO: 8457 - DNA, 505 bp, Glycine max
  unsure at all n locations
  Clone ID: jC-gmle01810032d12d1
ataaatctgtttaaaaccattcaaattggattcacagtttgcgaggactaaagatattcttgtgtttgctaaggtacaaagggcaaggccaatgtccaacattttaatttaaaagaaataagacaatcaccaaacagcctaggcacatcaataattttcccttaaaacaatttagtccaactccaatataattccgatactgcccaccagaatggaacaatatcaccagagaaccaccagctttgtcagaaattcaaccactacctgacaggacctgatgaggagatccagatccagatcgtgatcgtgatcgggatcgtgatcttggcctagaagatttgattggtgatgctgattgagatctagatcgtgacctagacacagaacgctccagagatctacttctaactctttttggacttctgctcctgctggggctcctgctggggctcctgctgcggctcctagaacgactactctcatacttnctcacccgaatataagc

SEQ ID NO: 8458 - DNA, 414 bp, Glycine max
  Clone ID: jC-gmle01810032e01d1
ccacattgtaagcaaattaaaatagcatgtgaatatgggacaaatccaaatattgctgctgcattgtcacatcatctacagacccttgaaaactaacagcagtcaaatatgttcgccatttggaatttgaatccaaatccagagcatcgataatataaccctatgtacagcgccaatgtctgactgatagcagatccataacattatctatcactgatcataacacaatggcaaggatctttatgatacgtgcagcattatgtgaacaaaggtggaagcgcctccagatggtgctacagcccttcggctctccttgtacttcatcattgactgcttctgcacgttcacatatgcttacactgtttacacactgctgaccttgatcttacctccgaaggacctatggggtttcac

SEQ ID NO: 8459 - DNA, 300 bp, Glycine max
  Clone ID: jC-gmle01810032e03d1
aaatgggaatagggggcacctaaatttccttcaatatgtccttttagcgtggacatgagggaacgaaaaatattgaacaggacacatcatgtcggtatatccaggcattacgtgacaaaggagaatctgctaataaaaagggaaaaccttactcttacagctaaagaatgcctcgccagcccaaaagttaaatatcctagccaattttgaaaggtctatttataaaacctccaccttccctatacttcgacgtgaaaggcttctaagtacctaaaattttgtgccccacatcgaaaaatg

SEQ ID NO: 8460 - DNA, 382 bp, Glycine max
  Clone ID: jC-gmle01810032e04a2
tgggaaatgccctacctttgagtgcggtttgaactattgatttacgtaattggaagtaaccaactaggtttacggcgaaacctagaaatcgatcactgatccaattggagtacctctacaggatagacctcaacagaaaactgaagagtaacggcagcaagtgattgagttcagtagttcctcatataaaattattgactctcgagatatagtaatatggagaagacaaaattgtttcaagcaccgacagaaccggaagcaccctttgtttcaaagtttcaaagaggggaggacgggttattcacatttcatttgatggtaagaggcgaattgaaagctaagctgtggtatttctaaagattccccccgggaaaatagagat

SEQ ID NO: 8461 - DNA, 377 bp, Glycine max
  Clone ID: jC-gmle01810032e04d1
actacggcgccggctcgccctttttttttttttttttttttttgaaaacttaaagcatcacttaagtcttaatattattacttccatacttgtatttttgcattaatcatctcaatgcatttagaacatctatatggaatctaatggcgttccgctgttgctcattgagattacattttatttctctagcatttagcatttatgttccagcaagagatgaaaggttacaacaagaatgcaaatgttgaagccagatacatcaccaaaagaggataaccaaacaacaaaatcctaggtaaatagtagccaaactaattttacttgatggatctttgcataaccaaacatctaacgatcgctacgcgtgcgacagcaca

SEQ ID NO: 8462 - DNA, 408 bp, Glycine max
  Clone ID: jC-gmle01810032e05a2
gtttaattccccttgtgatttgtcatcctttgatttcaaggaggatatacaaggagtaggaatggattctcttcaaaaacagcaagaggtttcaatttggtaccagtgaaaatgcgaagagggaaactcgtgtatcacggacttttattgtgtcattaaagagggtcatgtgaaagtcccttgactcaaaaagcagttaatgcatttttcttcccatgtaatagtttaggtcttagatattttatgctttgggaggtctggtctggtctggtggcattatattatgggttaataaatcatgggtgttcccataatgtaaccctttttatgtgtctctttatgtgttagccctatgttacttatatcatatgtacgactgtgatataaataaaagatttttattctctt

SEQ ID NO: 8463 - DNA, 369 bp, Glycine max
  Clone ID: jC-gmle01810032e05d1
tgcactgcgggcgggctgcctttttttttattacaacaaacatgctatatattgtatttcgtactacacgggcacaaattgtgtgactggtccctgacgcataaaacataatgctacctagacacgcaagcgatgaacacatctctaccctacttaccggcggctagttgcccttagcagcgtcgggcttgagttggggaacagcctgcgaacctgaggggccactggtctaacgctatgacttagggggactcccttagaaccaggaatcctagtgagaccccatcgatgggacactcgacttccagactgttcatgcggcttaggtatcaatgacttatgctgggtagcgtccacagactagcggat

SEQ ID NO: 8464 - DNA, 465 bp, Glycine max
  Clone ID: jC-gmle01810032e06a2
ctgaaggagagtttgtatgtactcagtgaaccttgtggggcatcaagatcttgatggtatactctggttgctcatggagggaaaatttttgtgattggaattaggaattttaacacattttataggataaacgggagatggggagtgacttataattggaatttgatatttttgtggaaagttgtatagaggaagcgaccatcatgggtttcatgaaattgctgtcagatatctcccttctcacatgaatctaactagttttgctgtgttaaagtcatggtctcagaaatggcttttctataggagattagattaaagtgctatgccattcatagcctgagggtggttacatttctcaagctgacttcagctaccatacaatgtaaaatgcttattgttcttgtagactgaactcgcatactgttgattgttttctcctgaataatgaagaatgtgtttttaatt

SEQ ID NO: 8465 - DNA, 466 bp, Glycine max
  Clone ID: jC-gmle01810032e06d1
aattaaaaacacattcttcattattcaggagaaaacaatcaacagtatgcgagttcagtctacaagaacaataagcattttacattgtatggtagctgaagtcagcttgagaaatgtaaccaccctcaggctatgaatggcatagcactttaatctaatctcctatagaaaagccatttctgagaccatgactttaacacagcaaaactagttagattcatgtgagaagggagatatctgacagcaatttcatgaaacccatgatggtcgctttctctatacaactttccacaaaaatatcaaattccaattataagtcactccccatctcccgtttatcctataaaatgtgttaaaattcctaattccaatcacaaaaattttccctccatgagcaaccagagtgtaccatcaagatcttgatgccccacaaggttcactgagtacatacaaactctccttcagg

SEQ ID NO: 8466 - DNA, 599 bp, Glycine max
  Clone ID: jC-gmle01810032e07a2
ccgctcactacaccgccttttccacacttccatcgtccggcacttcatggccgcggcggagcccactataagcccatctaacacgcgcgtgggctggatcggcacgggcgtcatgggccagtccatgtgcgcccacctcatccgtgccggctacaccctcaccgtcttcaaccgcaccccctccaaggcccagcccctcctcgacctcggggcctacttcgccccctccccccacgccgtcgcagcccgctccgacgtcgtcttctccatcgtcggctacccctcggacgtccgctcagtcctcctccacccctcctccggcgccctctccgccctccgccccggcggcgtcctcgtcgacatgaccacctccgaaccctccctcgccgtcgaaatcgcggacgccgctaccgccaaaggctgccactcaatcgacgcccccgtgtccggcggcgacaccggcgcgaagaacggaaccctagcaatcttcgccggcggggaagaatcgacggtgaagcgtatggaagccttgttctcccatttggggaaagtgaactacatgggagggagtgggaaggacagttcgcgaaactggcgat

SEQ ID NO: 8467 - DNA, 530 bp, Glycine max
  Clone ID: jC-gmle01810032e07d1
aaacagccaaatagttattatgcgatagcattcattctgcaaagtagactatagatacaatacaatgcatgtttaaaaatttcaggtattggaggagggaggaagagtaacattgttgagtcgctcaaggaccaaaataagagcctgagtgcccaaattaccttcaccgtgagccctaagcgacacataaagctgttgagcgagagccaagccaggcaaagcaatccccatattctgacactccttcaagcaaatccccaaatccttaacgaagtggttcacgaagaaccccggttccaaatccctattcaagattctctttccgtacaaatcaagcgacttggaaccggccgcgccggtggaaatggcgtccaggtacaaccccacatccagccccgccttgtgcgcgtacaccatcccctccaccaaccccaccatcgtcgaagctatcgtcacctgattcgccaagttcgcgaactgtcccttcccactccctcccatgtaggtcactttccccaaatgggagaaca

SEQ ID NO: 8468 - DNA, 635 bp, Glycine max
  unsure at all n locations
  Clone ID: jC-gmle01810032e08a2
aagtagttgagaactaagaaggagaagcaaatggcttcctcaatgatctcttccccagctgttaccactgtcaaccgtgccggtgccggcatggttgctccattcactggcctcaagtccatggctggcttccccaccaggaagaccaacaatgacattacctccattgctagcaacggtggaagagtgcaatgcatgcaggtgtggccaccagttggcaagaagaagtttgagactctttcctacctgccagaccttgatgatgcacaattggcaaaggaagtagaataccttcttaggaagggatggattccttgcttggaattcgagttggagcacggtttcgtgtaccgtgagcacaacaggtcaccaggatactacgatggacgctactggaccatgtggaagctgcctatgtttggttgcactgatgcttctcaggtgttgaaggagcttcaagaggctaagactgcataccccaacggcttcatccgtatcatcggattcgacaacgttcgccaagtgcagtgcatcagcttcatcgcctacaaagccccaggcttctaagtgtgaaaaanttgcanagcatttgtagccgccaccccactttgtttgttgtactaaactacatccca

SEQ ID NO: 8469 - DNA, 297 bp, Glycine max
  Clone ID: jC-gmle01810032e08d1
ggatcgttgagaacagtaaactgattggaatttccagtaatcagctgagtaagagttacatggaacattgcaactaactattaccaggtacaccaaattgaaatatttttctgccatcaaactccattttttcttataccaatgttctaataacagacattttttataaaaaatttttaatgggtgaaaggtgtttctgttttgcataacgaggacgctttacatacccctatccattgtggtggatttaaaaacatttcctgtgttcatctgaatgaccaaacttattctttgcct

SEQ ID NO: 8470 - DNA, 621 bp, Glycine max
  unsure at all n locations
  Clone ID: jC-gmle01810032e09a2
gaaaatgaacgacgcagatgtctcaaagcaaatccagcagatggtgcagttcatccgccaggaagctgaggaaaaggccaacgagatctctgtctccgccgaagaggaattcaatatcgagaagctgcagttggtcgaagccgacaagaagaagatcaggcaagaatacgaacgcaaagagcgccaagttgaaattcgcaagaagattgagtactcgatgcagctaaatgcttctcggattaaagttcttcaagctcaagatgacgtgatcagttccatgaaagaagctgcatccaaggaactgttgaatgtgagtcatcatcatcatttgaatctactgagtcatcatcatcatgagtacagaaaccttctgaaagatctcattgttcagtgtttgcttagactgaaagaaccttcagtcctattgagatgtcggaaagatgacctgcacttggtagagcatgtgctggattcatctgcacaggagtatgctgagaaagcaaatgttgatcccccagagatcattgttgacaaccaagtttatcttccacctggacccagtcatcacaattctcatgatctctactgctctggnggggtggggttgcttctcgtgatgga

SEQ ID NO: 8471 - DNA, 464 bp, Glycine max
  Clone ID: jC-gmle01810032e09d1
gagccggagcaaacacttattgtcaatgagataaaagtcatcacgaaagaaaacttagaacgatgcatcccccatcatacacgacatgggaacaaatggactaccgaaatatggtgttatttaaaagacaataattataagtacacagaagcaatggcgggacagcttttcaggtcaaagacaagctaatgatgcttcgggatataaacatttcaggggtaaccaaaccatacaatcaaaatctttaaacaacaacttgtccaaagagctgctttcggatctctggaagctttttacggaacactacatcaagtcgtgcatcaagagtattttcgcacacaatctttccatcacgagaagccaacaccaccccaccagagcagtagagatcatgagaattgtgatgactgggtccaggtggaagataaacttggttgtcaacaatgatctctgggggatcaaca

SEQ ID NO: 8472 - DNA, 603 bp, Glycine max
  unsure at all n locations
  Clone ID: jC-gmle01810032e10a2
tgcttcaccttctgctctagaaaattcagtgctgaaacatggcttcggctactctctctgtagccaaaccagcccttcaggcaaatgggaaaggcttctctgaattctctggcctccgaagctcatcaggcttccttcccttttctagaaaatcttcagaggatttccattctgtcattgccttccagacctatgcagttggaagcagtggaggatacaagaagggtgtgacagaagcaaaactgaaggttgccataaacgggtttggaaggattggaaggaacttcttgaggtgctggcacggtcgcaaagactcccctcttgatgtcattgccatcaacgacaccggcggcgtgaaacaagcctctcaccttctcaaatacgattccatcctcggaaccttcgatgctgatgtcaagcctgttggcagcaatgtcatctccgtggatggaaaggaaatcaaagttgtttctgaccgcaaccctgccaaccttccttggaaggacttgnggatagacttggtgattgaaggaaccggngtgtttgtagacagagaaggtgcanggaaacacattcagcaggagctaagaggtgctcatcact

SEQ ID NO: 8473 - DNA, 520 bp, Glycine max
  Clone ID: jC-gmle01810032e10d1
caaggtaagaattttattgcacaatgagaaggcagagaaaattgatggttctgtttctcagtacaagtttaaaagaaaaatgaagcaacaagtgttgtagtggtagtagtagtagtaagcatacaaaattacaatggcatggtacatacataataatttaattaccaatgagaatttgtttggctctcacttccatttgttggcaacaatgtcagccaaatccacaaccctttgggagtagccccattcattgtcataccaagcaatgaccttcaccatgtcatctcccatgaccatggtcaacgaggagtcaacggttgaggacacatcagtgcacctgaagtcaacggacacaagtggctcatcacacacagagaggattcccttgagctcattgtctgcactctctctgaatgctgcattcacttcttctgcaaaggtcttttttgagacctgaacgacgaggtccaccactgatacgttcggtgttggcacacggagtgcaatgccattgagtttg

SEQ ID NO: 8474 - DNA, 500 bp, Glycine max
  Clone ID: jC-gmle01810032e11d1
gaagtctgaacaaagttcagagtcaacatcaacatctagatataaaagtagtggcatgaaattaaaggcactctgttttatattcagcatagactatattgcggcttagaaagagatgagatcatctttcgatgacggctgcttctttgtctcgtgtcccccatctgatgcttccccacctttcttcccaaaaatcatctcatcgagatcatccatcatgtcatcattgctccctccctcgacaccagtccttgatccagctggctttcgaatcaaagcatcttctttactatgatagggtgactcgtctggttcaacagcaacaggtatcatagctggttcaggatgaagtggagtagttgcaggctgcttcaactcttcgtatttggtgaggaccttctgaatctcatcgttaacattcaaggcctcaaaaagcactgcttcattatccccagccgtttcaacaattcgctggacagtagtctgtgaccgacgacact

SEQ ID NO: 8475 - DNA, 515 bp, Glycine max
  Clone ID: jC-gmle01810032e12d1
aaacagataactgaatttattatttctcagagtcaagtcaagcattatgatacatcataccccaaaacaccaacaacagtactcaggtgagcagttattacatcgtactttcacatgaacgcgtcataaaggcagataaaagcaaatacatacaacacaggaccttaaggctcaagcacagcacaatactatgtgacttaaacggtgacacaattcagcaattattcttaaagcactacggatttgctgaatttgttcataattttagagccttgttagtgtagaatcacacattcttgtgaaccagctaccaccacagtagggtgttcgcttgtgctgactgcatcaacttctttgacactttcaacgttgacatcctccaattcaccacagccaatggcttcaaaaataagatcattgacttcttgaaacctctcttgagagagggacacctctgcaagaagcctccaagcattgccttcagatgcctcatcataatccttcttcctctttag

SEQ ID NO: 8476 - DNA, 579 bp, Glycine max
  Clone ID: jC-gmle01810032f01d1
ggtgtctgtcccgaattattcccgggtccgagcaccacactatactactcggcggctcgcccttttttttttttttttttttttttttttttttaaaaggaaaaggcaccaaattcaatttaagtggacactgaaactcaaaattatagatgaagacggtccaatatgaagaatataggaagatcatctcaaacttagcgtcttctttttgcacctaaaacattgagaatgctaaaaacgttacacgcaagttccatcacaacttctagcgcttggattagtacaacaaccttcacgaacagaactatttacttgccaagtttgctttgcctacaatccaggactggaataaagttcccctgtgaatagcatacggcgttagcatatccaagagcagcctacgttcaagtacttgtcagccaattggactctcttgacattctttagctcttggacaagcatgttaccatacagcaaggagttctccagagttaaattgggctagtaaaggttggaggtacatcttttgagatcacaagcttattcccaacactgtcaactccaacgccagaaatccac

SEQ ID NO: 8477 - DNA, 435 bp, Glycine max
  Clone ID: jC-gmle01810032f02d1
gtctgagtgataatgcatatattcacataattaaggagtaaaatcatatcatcccgcttagaattagaacccttctaaggactgtaggctactatagcaccaatgctacaaagggttctagaatttgattactgctatatacaatacacattatatatatatatgcttttttctttagtgaatgcatgtcttccatcttccattagggaagctagagatcaaagctgcgactgtggaaatggaagatggaatgatggctgatgccttgtcatactgtgtgacctgatttcttcagcaacactggtctgaagtgttgaagggccacaaactatgacacccacattaacaaggccccatttctctgatatcgagtcataaattgctttatagtttggcctgcaaccataatgaatgaccgttgactttgcaatacta

SEQ ID NO: 8478 - DNA, 459 bp, Glycine max
  Clone ID: jC-gmle01810032f03d1
gaaaacttgaagcatcacttaagcgtaaccattaatgcttccatcacttgggtccttggcgtcgactcatatgaatgtgaggagaacgtactatggaatctagagcagttccgctgatgctcattgcgattacatgaaatttcacaggtctatcgcacaaatgatgcgacaggtgctgataggacacagcatgattggatatgacatagcaaggaacctgatgaaaggaggatatccaaacggtacaataacatgcaacatagagctcaaacttaacttcctgttgggatcgtgcttttctgggaaacactggtactccttctattacctctggagagatttgagtcctgatggccaactcttctaattgatcttgtgctgcagatacgcgtgctgctcccgagtgcagctctggcaacactatcgcttaatattccgcgtgtcctatgagccttgaca

SEQ ID NO: 8479 - DNA, 52 bp, Glycine max
  Clone ID: jC-gmle01810032f04a2
aaaaaaaaaaaaaaaaaaaaaaaaaaaaaaaaaaaaaaaaaaaaaaaaaaaa

SEQ ID NO: 8480 - DNA, 463 bp, Glycine max
  Clone ID: jC-gmle01810032f04d1
aggtaccgggcccccggtcgacggcttcgatagcggtcgccctttttttttttttttagctaacaattgtctctacatataccagacgtaagtacgtaacccagaaaatacctgccaattaaataggtctaaagaccctctaccccctcaccaaatatcccttttctatcactacaaaactgctggctgctttatagctctctgaaacagccaaagaacagattaatttttttatgaaaggaacatttatcagacacacgaagcgcatttacaatcaatttccctcaattaagctcttcaacctattacgggctgtttcagacagactgcactgcttgaatcttcgcctttggggtggacatgattcaacaatgctttcaatgggcgacaagtatacgacaatcacggtgagaatatctgatgtatttaggcgcatagcatccttgactagctctctggcaca

SEQ ID NO: 8481 - DNA, 532 bp, Glycine max
  Clone ID: jC-gmle01810032f05a2
ttctgccactttcttcattctacctcaacatatctttcaccttctaaccatacttttgtttttctcgatttccaaggaacttttggattcttagctgccaccctcatatgatatttcttgaaaccttgtgttaaaaattgtgtccttttgaacttcaataaaaatttgatttttttttcttagtttcatacccacatacccattgttggatttgaactagttttacttgcctcatggcccttcatataagcagcggttgttttactgtgatgtgtaactcaagagttcacagaataagagctgttgcttcagagggttctgctactcttaatacagttgtggaggagaacgtgaaattgggtggctctgatttgaaggtatcaagggttggaattggagcttggtcttggggcgataccacttactggaacaatcttgaatggaatggaatgagaaggctgctagagctgctttcaatgccagtattgatggaggtctaaccttttttgacactgctgaagtctatggctct

SEQ ID NO: 8482 - DNA, 467 bp, Glycine max
  Clone ID: jC-gmle01810032f05d1
atcggcacatgcaaggcgaaaccgggcccccgggtcgacactcttacggcggccgcccttgtcctttttttttaaattactttgtttaccagtaagaattctcatgatctattatgaatgcatacgtcaaaaaaatcaaacgacttacaatgactatttggaacctgaaagaatgagcacgggtcaaagacacctgtaacccgaagggaagaaaaattaatccgattgtgaaacagtcctctaggaacggtgggtgtgacattggaaaggttgctaagcaaacgtgtgttgcgcactactgctaaaaaaacctgtaccctttgactaaagctagagagtggagtgaatcaccttcaacgctgtttccccataagttcatccataaccagaactgctaaatctgagtacggtgagaaagcgcacatcgatgagctcttcaggactttacaacatatccaaactgttag

SEQ ID NO: 8483 - DNA, 651 bp, Glycine max
  unsure at all n locations
  Clone ID: jC-gmle01810032f06a2
gaaaggacaatcctccatagaatatttgcacaatcctctgtgggctgaaaccttaacgtggacaactccggagaaactcttgaaacctctcccacgcttcagccaaactctcctgctcctgcactaaattcccaatatccctctgtatttgatcagttttaactacagagaaatatttctcaaggaatttattaacgcagtcctcccaagtcgtgatcttgtgttcaggtaaagcacaaagtcaatcccaggctttcccattcagtgagaatggaaaagcatccaatctcacatactctgtgggcacgctttgcacattgatggtgccagtcaacctcaggtacgtggggtcttcagagtctgcctcatggaactgattgctttctataatctgcaagaagccatgtctcagctcaaaattgacttctgcccccagagttggcaacaatatgttattagctatctccacttgaggagtgagatagtctaacaaggtctgctctacctgctcattaacaacagtctcacccnccattgcctctgtttccagccatgtttcttctcctctgcttagctctattcctgcgagcaactntctcgatcttaggtcgtgtagaagcacttgtcactgagatcgagtgagcatgaaac

SEQ ID NO: 8484 - DNA, 277 bp, Glycine max
  Clone ID: jC-gmle01810032f06d1
acttctgatttatttggtaaaaaccagaaccccggcaacccgaaaccctaaaggaacgtgaacgggggccacaaaaacaaaaaaagcggagcaggtcccgagggggggaggaagaaacaaaccttggtagctcccgggggggggggggccatcaccaccacgagggagaccacgggcggggccgccgaaaaaaagagaaggaacaacaccgaccctgggggcggggggaacacgggaacggaaacggaaaacaccagcggccccgccaacgggaaga

SEQ ID NO: 8485 - DNA, 408 bp, Glycine max
  Clone ID: jC-gmle01810032f07a2
ttttagtcctgatgttgcgggtaagcacccctcaattctccgaagaattcgagcgggtcagggaactttttctgtatattgaagatggggacctttggagggggagactcccgaacagcaaagctttagaagcggtttgaggatttggatattgaatttgatgccaggaaaaacccttccttgtttgatcagttgctttcactagacttggataatattattagtacaggcacggtgagcttatcggacaagcaaaaactaatcgatgattgtctcagaaagtcatatgaaattgcccttgggaatgctgaatttggttattgcctggctgtcaatgcggatactgctctttcagaagtgagaagtgaattgggacatccatttgcttctaaaagccacaaaatgaat

SEQ ID NO: 8486 - DNA, 475 bp, Glycine max
  Clone ID: jC-gmle01810032f07d1
aggcaaataatttcgaaaccaattgatttctaatgctacaatgttacatggacaagacttaacattatccaaataaatatctagatgattggagggactattcaaacattattttgccttacctaatagaataaataactactacatgggtacccaaaaaatagttaagagagttgcataatacactaattgatagaactatttaacatttcacacgacacatcttgtatactccttcatctccccatgtcaagtgcaaatatcggatcacaccttccatttttcaaattcatccgctgttaacataaaagagctcgcatttcgatgtccaccacctccaaattcctgagagataggcgtggtatctttattctccacactcctcagacttatttttagcctttgatcattttcaagctctggtacattataaacaacagcaccaatacccctcaaattcattttctggctttta

SEQ ID NO: 8487 - DNA, 548 bp, Glycine max
  Clone ID: jC-gmle01810032f08a2
gttcaactgaggtgatggcttagaatttgccttctcccgcccaagtgaagcccttatttttctgttcaaataactccacaaaacttccaggtagcttttctttgaagagaaaagatagtgacacaacagtagagagacgagtttattgctctgccgctgctcaatcaccaccaccagcatggccaggaacagctattcccgagccttctgatttcaagacatgggatgggcaaaaacctatttctgtcttaggatctacgggttcaattggaactcagacactgagtatagtggctgagttcccagaaagatttaaagttgtgagccttgctgctggctctaatattactcttcttgctgaccagattaaaacatttaagcctgaagttgttggtcttagaaatgagtctttaattgatgaactcaaagaggctttggctgatgtggatcacaaacccgaaatcatccctggagagcaaggagtcattgaggccgctcgtcaccctgatgccaccactgtagttacaggcatagttggttgtgcagga

SEQ ID NO: 8488 - DNA, 438 bp, Glycine max
  Clone ID: jC-gmle01810032f08d1
gatctcttgttcttgtaatatatttataaaaatttttcttattaacatgaattttttctgggtatttgtgataaatttttcgtttattcttttgaattaatgaaagacctatggtttgatacataaaaaattgtttattgttttttctagacaggcgaactggttcgataacaaatatttcttttttcataaatttgttatttttctttttccttaagcctagaagaattaaattcttctgattttgaatcatcataatatctagacctagttctcctctttgaatagaggctattgtaatttctcttaaattttttaatctaatcaggagacaatatactttgacattgttaaatattctttgacctaagaaattattccaatttaaatgtaaaatcaaaaaatttcttagtaagaaattaagttctgcctccatct

SEQ ID NO: 8489 - DNA, 74 bp, Glycine max
  Clone ID: jC-gmle01810032f09a2
gttgcaatgttccatgtaactcactattaccaggtacaccaaattgaatatcagtttagtggtgtcaacgatcc

SEQ ID NO: 8490 - DNA, 437 bp, Glycine max
  Clone ID: jC-gmle01810032f09d1
ggatcgttgagaacagtaaactgattggaatttccagtaatcagctgagtaagagttacatggaacattgcaactaactattaccaggtacaccaaattgaatataccccttcaaaacatcaggaagtcttgccctaccaaacagcacttaaatcataaatttcttcaatgactccgattagatcattcacagttgactaaaagatccaacaattgcgaaacacctaccggtgcaatagttcggcgtctacagaatttttcatgaacatagcttattcatccccatttgaatttcgaggggaagggcttatagaagcattagggcgaccagatggtgagacactgccaggggttagacaacgcccatcgcggttacgatgtgcaggactttcaccccgtggactctttctaggggaaggactcctttgaggggaagt

SEQ ID NO: 8491 - DNA, 574 bp, Glycine max
  unsure at all n locations
  Clone ID: jC-gmle01810032f10a2
ccccgccccccccccccccccccccccccatgangtnnngatgaagagtaagtaagntaggaattngggtggaggttatagatggggaggggangnanttttttttttttctttttttttttttcttcttttttccccctccttttttttctcttttttccccccccccccccccccccccccccccccccccccccacacccccccccccccccccccccccccccccccccccccccccccccccccccccccccccccccccccccccccccccccccccccccccccccccccccccccacccccccccccccccccccccccccccccccccccacccccccccccccacccccccacccccccccccccacccccccccccccccccccccccccccccccccacccccccccccccccccccccccacccccccccccccccccccccccccaccccccccccccccccccccccacccccccccccccccccccccccccccccccccacaccccccccccccccccccccccccccccacccccccccccccccccccccccccc

SEQ ID NO: 8492 - DNA, 413 bp, Glycine max
  Clone ID: jC-gmle01810032f10d1
ggaaggaaatggaaaggaaaacattgagggaggaaccttgagtacttatcaaagatactcagggaacatggaaatagaaaaatttttcatttttaagatccttaggaaaaaaatttttccccctatccaagggacgagtgttccttgaaaaagataaaatggcttatatgacttgaaatttaaggcccaaataccataccttctgttttttcttcacgtggtaaaagaacaccgcccatttttatcgctctctaaaacttgggaagaccgcaacaatgagttttccagcattttctggcctctttgtttttttaaccgcggcagttgcagctggaccagaataatatttcccacacgaataattttttttttatgcaaaaaggttagcagttataatagctttttttcctgaa

SEQ ID NO: 8493 - DNA, 424 bp, Glycine max
  Clone ID: jC-gmle01810032f11d1
accaacataaatttactttgttattatagggattaacagaaatatgtgactaaattgcagggacttggctgaagatatagcatatatctttttttctaaaagccgataaaatagacaatgaattgccggtttaacagattaagcaggtggtccaacagctacaccatccttgagcctggatttaccatacagggtttcttcaaaccggatgatctcattcttggatccataagcaacttgagttctctcatcaatgttagggatgactttgtctagcacagactgatgaccatcactggtggaacctccggctttttcaatcaagaaccccaacggagctacctcaaacaacagtctcaacttggctttggctgatgatgatgtcacattgggaaaatgcctttttcttttacaaaatttgggt

SEQ ID NO: 8494 - DNA, 489 bp, Glycine max
  Clone ID: jC-gmle01810032f12d1
accaacataaaggtactttgttattatagggattaacaaaaatatgtgactaaattgcagggccttgtctgaaaatatagcatatatctttttttctaaaagccgataaaatagacaatgaattgccggtttaacagattaagcaggtggtccaacagctacaccattcttgagcctggatttaccatacagggtttcttcaaaccggatgatctcattcttggatccataagcaacttgggttctctcatcaatgttagggatgactttgtctagcacagactgatgaccatcactgctgtaacctccggctttttcaatcaaaaaccccaacggagctaccttaaacaacagtctcagcttggctttggctgatgatgatgtcacattggtgaagatgcctttttcttttacaataatctggttgacatctggcaccattcctcccgtgtttctcaatgtgtacttttcattggcctaggatcgatc

SEQ ID NO: 8495 - DNA, 609 bp, Glycine max
  Clone ID: jC-gmle01810032g01d1
gtgtcctctgtccggaatctatttacattcccggcgtcgacacgtctactagtcggcggctcgccctttttttttttttttttttttttttttttatttataattttaaaataaacttcgtagaaaacacggatcaatggaaaaacaaaagctcctacctacacctattaatggtttttataggttcacatctttttcatacatatatacatacattgtaaaagggagcagaacatgtacagccttacagctaaagcctaaaggactctatacataacatcaaacttattgtaaagagatcatttttcatacctgaaccccaatcctctgtgctacctacttaaaggagttaacatcgtttccccaaagccaagcatcacagccagcatccctggcaccccatatatcattactgcggtcatccccaacatgaacaggatccttgggttttacattcaataattcacatgctttgagaaatatactcggattaggcttctctgctgcaacctcagctgacactgctactgcatcaaaccaattgtcacaatttaatgcccgcaagagaggtcttaatctagtgtcaaagttgacacaacagctaatttc

SEQ ID NO: 8496 - DNA, 331 bp, Glycine max
  Clone ID: jC-gmle01810032g02d1
attcatggttttatggttacacacaacataattttgcttgataaggaggggcaaaaacaagtaaaccggcctcacatccaaagcgacacggggcacgtaaacaactgtaacaaacacccaggagaaggcaacaaccctcaccctaaggccaaaaggggacaccacaagcccccaacaggccgaagaaccgacaaacctgaaaccagactgaattacagacaccccccatctgaggggaaaaccaagggtcacaaaaaccaacgggcgatcttcgagcaaagcgaatcatgcccgccagagcccaagacccgcatccaaactccgggctgca

SEQ ID NO: 8497 - DNA, 458 bp, Glycine max
  Clone ID: jC-gmle01810032g03d1
gacctcaaagctagaattccattttgaataagcacaagaaaagttgcaggaaaacattaaaacaatttaagacattgccaattagctacgcaacaaagccttctccttctgtggccatggagcctccttcacgaaacacgctataaatttgaacccccatagaaaagtatgtaccaagctgtgtgaaacctttcagaaatcctcataagtaatcagttctggctgaaagaccttctcagtccagtcaatccttggcatcacttttaagtatctcgacaggcattttgcaaggaaccaggtcctatctttaaatttaatcattttaataggaaaaatttatcattccttaactcgtgactttaatcatatcagcttcactggcactggaatcctccccacactcgcttggctttttctcatctactgcatccttgctggttactttatcatctttacta

SEQ ID NO: 8498 - DNA, 412 bp, Glycine max
  Clone ID: jC-gmle01810032g04d1
gtggatgatgtgccggactagattaacgggtcgacgcgctgagtatactgcgggcgggctgtccttttttttttttttaggttgactgcatatgatggcttttatattatggaaacccttttgagttttagaaagtgggcatgaaagacataacgtgaacaatggggctggagagaaactttaacgggtaccgagggaaaaagcatgaagagcaaatcccagagctcatacgtaccatacacgcaaacatagagagcgccttatatagcccgcagtttgctaagatctaccattgtgacaaacggattggatgataggcaacgaggtgatactttaacatgcaacttacaacagcaagtacactgccttgagaaactcaagctactctgggacagactggacctggactatg

SEQ ID NO: 8499 - DNA, 258 bp, Glycine max
  Clone ID: jC-gmle01810032g05d1
aaaactcgaactcaaaattattatttaagctgaaacaaactcgattaattattagtgcaacaaataaactatatatatcaaaacccttaattaagcttctctgaatactatagcaactccggataaccgatccattcagtgcttctcaatgaactccttgatcctagaaatgagagcatcggtttgagcactaacattggggtccatatccacagcaatcttattcagataaaaactatgtgtcatccctttgctaac

SEQ ID NO: 8500 - DNA, 445 bp, Glycine max
  Clone ID: jC-gmle01810032g06d1
aaaactcgaactcaaaattattatttaagctgagacaaactcgcttggttattagtgcaccaaaaaaacaatgtatatcaaagcccttaaaggagcttctctgcatactatagggggttacggataacctggtccatggaggggcttctcaatgagagctccatgaacctagaagatgatagcatccgggtagagcactaacgagggggggccatatccacggcaatcggagtgagataaaaactatggggcatccctttggtaagataaggctccacattaattgttgggcttcatgaaggcctcatagtactgcatttccgtgttcctcaccaagttcatcttcggcaggcatagcagcaccgggggccggcttagcccttcgagtggcggtgccgtctgaaccatcgggcagcgaaaggggtggttcttgatggccccaaca

SEQ ID NO: 8501 - DNA, 525 bp, Glycine max
  unsure at all n locations
  Clone ID: jC-gmle01810032g07d1
gagcgagttaattgttttaactccatcttcaacacggatgacaaccattccagaaagcaacaaaaatggaaattacattttttttttcagacacatggggggatgtgtccaacaagagaacaacaaatgcaacaaaaatcaaaaacagagaaaaacaacttgtagctttatttacacacagggagaccaaagaaaaagcggttcagaaaactccaccagccatggaaggaatgtcatcaaagcaccaaaggttcatgaggtttccaccatcctgagttgtgtcaccagatagcaaggattccaatgaagtatcgccccagctcccttcaagataaggcatctgaaagaacttcaactcagattcaatatccacaagctcctcagagagtgtctttgcagaatcatcttcaatagataccacattctgagagttaggctgctgctggttggcattttgcacaaaatgagattcacaatccanaggagcagaaagcatggatgagatctcaggagcataatcaaatg

SEQ ID NO: 8502 - DNA, 112 bp, Glycine max
  unsure at all n locations
  Clone ID: jC-gmle01810032g08a2
ccgccacccccccccccccccccccccccccccatgangtggtatgnatgcgtaggtaagattggaattngggttgagaataaatttgaataaatatggatatataaattat

SEQ ID NO: 8503 - DNA, 519 bp, Glycine max
  Clone ID: jC-gmle01810032g08d1
aaatgaatgaaagaatgaattgatttctacaatctacaactgatttctatgactagatctgctgcagaactttcaaactatagccaatttgaagagaggaacaaattgtgagcacaccccttgaactgcactttccctcctcttcatgacttgtcctaatttctctgccctaacaacaccgcgtgagtgcttctgttctaccactttgtagattccaaaagcaagagaccaagtgcatttttggaaattttttgagaagtaagaaatcgcatttaggatgtgaaaactataactattagtttctgactaagcgtgtaaaaatcacgtctgtgacttggaaccaaacacgctatacaattttttttttacaacctactcatatccccatcctttttggaatgcagttgagtttgtcttctgaccaattcatccaaagcctccttcatccaagcataagggcatatttcttttgcctcatccacagtcatctgcatgatgatgcacatcaatgaaacatta

SEQ ID NO: 8504 - DNA, 518 bp, Glycine max
  Clone ID: jC-gmle01810032g09d1
gatctcttgttcttgtaatatatttataaaaatttttgttattaacatgaattttttctgggtatttgtgataaatttttcgtttattcttttgaattaatgaaagacctatggtttgatacataaaaaattggttattgttttttctagacaggcgaactggttcgataacaaatatttcttttttcataaatatgctatttttctttttccttaagcctagaagaattaaattcttctgattttgaatcatcataatatctagacctagttctcctctttgaatagaggctattgtaatttctcttaaattttttaatctaatcaggagacaatatactttgacattgttaaatattctttgacctaagaaattattccaatttaaatgtaaaatcaaaaaatttcttagtaagaaattaagttctgcctccatcttggtcttggctttctttttctttatacccttactattcttttcactgtctgatcctacataatcgatttcaatatctttt

SEQ ID NO: 8505 - DNA, 815 bp, Glycine max
  unsure at all n locations
  Clone ID: jC-gmle01810032g10a2
tttgaggttantaaaagtagatggtnagattagatanaaacatgcgaaatagatacctgaaatccgctagctaaaataaagatcaaccaaatgaatctatatgaaaaaagcccccctaattcctttacaacacgaacacccccgcccccccccactccccccccccccccccccccccccccccccccccccactccccacccccccccaccccctatcacctccccacccaccccactcgcaccatccagaccccgactcaccatcccccactgcgatacccgacccccctatccccaagccccacccacccccccccccgtccctccccccctccctcccccccccccccccccccccccaccccccccgccccccccccccccccccccccccccccccccccccccccccccccccccccccccccccccccccccccccccccccccccccccccccccccccccccccccccccccccccccccccccccccccccccccccccccccccccccccccccccccccccccccccccccccccccccccccccccccccccccccccccccccccccccccccccccccccccccccccccccccccccccccccccccccccccccccccccccccccccccccccccccccccccccccccccccccccccccccccccccccccccccccccccccccccccccccccccccccccccccccccccccccccccccccccccccccccccccccccccccccccccccccccccccccccccccccccccccccccccccccccccc

SEQ ID NO: 8506 - DNA, 550 bp, Glycine max
  unsure at all n locations
  Clone ID: jC-gmle01810032g10d1
gatctcttgttcttgtaatatatttataaaaatttttcttattaacatgaattttttctgggtatttgtgataaatttttcgtttattcttttgaattaatgaaagacctatggtttgatacataaaaaattgtttattgttttttctagacaggcgaactggttcgataacaaatatttcttttttcataaatttgttatttttctttttccttaagcctagaagaattaaattcttctgattttgaatcatcataatatctagacctagttctcctctttgaatagaggctattgtaatttctcttaaattttttaatctaatcaggagacaatatactttgacattgttaaatattctttgacctaagaaattattccaatttaaatgtaaaatcaaaaaatttcttagtaagaaattaagttctgccctccatcttgttcttggctttctttntctttatccccttactattcttttcactgtctgatcctacataatcgntttcaatatctttttctgggttgagatagatgattcaagatttcg

SEQ ID NO: 8507 - DNA, 491 bp, Glycine max
  Clone ID: jC-gmle01810032g11d1
ccaggattctaattcgtatatagctgtatataatatcgatcaaaaccacaattgagattttgagaagaaaacaaataaaataaaataaaggagtagagaaagacaaggtagctgctagttatttacgcataattctaatggacacaaagaaccaaataaaagaagaaaaaaaaggtgtttaattaatttgacggtcatggttaagctgaggataccaattaccaagattctgtctctcatgaattagtatactaccatcatcagttgctttaaaccgtgtgaggaaaatatatttatgaatctccctttttttctttgttcatatattcttttcccatttgatggttgcttatttctgctctcaatcagaagaacaattaatccacgattcgaccataccttcgcttggtacagacacaacacattccggtcctttttcttcatgaaaatccgaattattagtaaccttgactcgctgatccgaaacaata

SEQ ID NO: 8508 - DNA, 422 bp, Glycine max
  Clone ID: jC-gmle01810032g12d1
ggtagcaatattttttttgaccatttacatgaaaacgctttttatgtgctagttacaacctacacaatcaatcacacaatggatgtcaacccatcatgatgacaaaatttaagcatctatgccatcctttgaaacaagaacattctttaaagacttatgaagggggaaaaaaataccactgatggtttgttgccttgaagatatagagcatataagttcaaactcttgaggggtatattatatgaacctcctcttaaaattacgagtagttgcttggtatgagcgtactaacaagctaactgctataccaactcctacacataagccaagcccaattccaacaccaactcttacaccagcattaaaccatgatagttcaccatcttcctcatctacatatattgttctttggcaatacatgc

SEQ ID NO: 8509 - DNA, 373 bp, Glycine max
  Clone ID: jC-gmle01810032h01d1
ggaaggaaacaaaatttaattcatatattttttctcctaagacatattatcacttttacataattaccattactccaagtccaggccatgagcttgaatttattttcacactctatagttagaaatcttggtgaaaggaactaagccaagtttgtttaagctgcaacttgttccatgtttcagtttcttcaattctgcagtgatcaaaacttcaccaaaacttctatatatatatattggttcaatcattatgcatggctacaccttgctatctgcttctgttgcatgttcggacaatttctctgacagaaggggttgttccaaagctatcctactacttatatcatgatcatcttgaacgtttgatgatagt

SEQ ID NO: 8510 - DNA, 390 bp, Glycine max
  Clone ID: jC-gmle01810032h02d1
ggaaggaaacaaaatttaattcatatattttttctcctaagacatattatcacttttacataattaccattactccaagtccaggccatgagcttgaatttattttcacactctatagttagaaattttggtgaaaggaactaagccaagtttgtttaagctgcaacttgttccatgtttcagtttcttcaattctgcaatgatcaaaacttcaccaaaacttctatatatatatattggttcaatcatcatgcatggctacaccttgctatctgcttctgttacatgttcggacaatttctctgacagaaggggttgttccaaatctatcctactacttatatcatgatcatcttgtaggtttgatgattgtggtgccgcctctggttt

SEQ ID NO: 8511 - DNA, 361 bp, Glycine max
  Clone ID: jC-gmle01810032h04d1
gtggcatagcggactgattaatggctcgactcgactgagtatactagctcgcgggctgtccttttttttttttttttattttttgattttgtttgttttttttttatggaaactttttttgtttttttcaattggacatgatttactttatgtttactatgttgctggagagaatcttaaacggatacagtgggaaaaagtttgaagttcaaatcccatagctcaaaagtaccattaacgaaatcataatgtgctccttttaaagccagagttttgttaacaacttcatttctaacaaatggatatgttaataggttaccaagtgatacgttcacagcttaccttttacaggtagttcatt

SEQ ID NO: 8512 - DNA, 342 bp, Glycine max
  unsure at all n locations
  Clone ID: jC-gmle01810032h05d1
aaaaaaaacagcccatacataaataaaaagggcccttatggggctatatccaacttttgaaatttactttactcccccaaatttggcataccaaattacaggccaatggcaaattggggggagaaaaaggcataattagttacttttgcacattatagggccttcaaatacaggggggggaaaaacattaacatacctttaatttttgatacaaaatgcatttggggactgcccagcttttttcattggtaattaattaccccacaaagggcctttaaaaagaaacttgaataccaaggggggcttttaactgggcaagggacttnggggggcctgggcctt

SEQ ID NO: 8513 - DNA, 490 bp, Glycine max
  Clone ID: jC-gmle01810032h06d1
caacaaaaccaggacataattgcatataattaaaatcctaagcactttacagtattaagttcataataaagggctccaaatgatctattctgacctcataaatgtcagttatcagagactgcataaagaacaggatgtagtatctcctagcctgaaacaaacaatccaatgtaccgacacaaggttgataacttaatacaggtgatcgataaatcacttccctctatggttttttatacaccactaagatctcacaaggccatcaaaagttgccttcagctccttcttcggcttgtgccatatacatttggaatagtctaaatatctactagggttaactacctacatttaccattttccgagcttaaaaaatataaaggtccctttacattcttcagcacaacctgcaagcaaatctatttgaataacttttcacaaacactatcaccactctccagcacgttttgatagtagagccgccttaacaata

SEQ ID NO: 8514 - DNA, 416 bp, Glycine max
  Clone ID: jC-gmle01810032h07d1
ggatctgaattgtgttgagcaggtgatactgtcacgttgtttgcatcaagcagagaggcagttcctgtaaagatactttgcaaacctgtactggaagtagagacaccagaagtaacattctttatgccagaggaaggaggcagagatcctttgactgatcctagcttaattgtatctgaggcaggtgatgcaaaaatctgggggctattgtcagttacaggagttggagaagcaatccatggccctcgaaggggggtttgggacattcaaggggtgttgtgtccaaaaaaattcctgacacgagaattttgataaggatgtcttggtgtaattgcctggggataattcacgacagaaccttttttaatggtccaagattgcacggattcaatacctagacctagagttgatcgact

SEQ ID NO: 8515 - DNA, 536 bp, Glycine max
  Clone ID: jC-gmle01810032h08d1
agttcatagaaaatagaaatcaagggggtagataacagagagaatatgatacaaattcttttttgtttttgacataaaaaaaccttaggctagtaactgcgatagcatgaccagaatcaaaattacaaataaattagactcattccacttccacaatctcatccaaagcatagttgtttgttgatacattggcatagttgactttgttgaatcgaaccacaacagggtagcgagtgttggggtcctgatcaacagcaaccactgaaccagtgcctttgtaccagtaagattccttcctaagaatcttcaccttagcacctctcttggggccaataggtggtggctttggtttagcttcagcttcacctgggggtgtggcggtggcgggtgcccccgctgcaggctcatctgaagcccttacaacaagcctagaagcgttgttctttgtgttgaacatgaccacccttgagtttgtggtggcagctgcaacattaagtgacaacacaaacccagatgctgctgatgccatgatgatt

SEQ ID NO: 8516 - DNA, 549 bp, Glycine max
  unsure at all n locations
  Clone ID: jC-gmle01810032h09d1
aaatgaatgaaagaatgaattgatttctacaatctacaactgatttctatgactagatctgctgcagaactttcaaactatagccaatttgaagagaggaacaaattgtgagcacaccccttgaactgcactttccctcctcttcatgacttgtcctaatttctctgccctaacaacaccgcgtgagtgcttctgttctaccactttgtagattccaaaagcaagagaccaagtgcatttttggaaattttttgagaagtaagaaatcgcatttaggatgtgaaaactataactattagtttctgactaagcgtgtaaaaatcacgtctgtgacttggaaccaaacacgctatacaattttttttttacaacctactcatatccccatcctttttggaatgcagttgagtttgtcttctgaccaattcatccaaagcctccttcatccaagcataagggcatatttcttttgcctcatccacagtcatctgcatgatgatgcacatcaatgaaacattagggcactaacanattgaacataccaaatta

SEQ ID NO: 8517 - DNA, 498 bp, Glycine max
  Clone ID: jC-gmle01810032h10d1
aaaaccatagacgttgttccttcatatataagacccaaaagcgaaaaaaagcaaataacaatacatatactttgtcgttaattaacattaatttgtagctgtaaataataagcatattaggcagcagaaggtgctggcacaaactgaaagcccccagcatccaatagtgccgatgtgaaacgttccacgttgacagagttgttattgtagtccagtgtctcatcttcatatatgtcccaccacttcttcacaagcatcttgatatcttccctatccatgttctcttccttcccagtgaacctccaaggcttagacccagcagcacagtaatgaaccacttgaactttatcaagttcaacattttcagggtgacgccacaacatggccagcacaaggttgtacatgttcggtattggcttggacttgtccttgaagtacatgttgagaaagtcctgctcagcacaagaagtgggcttggtgagttggacaaggttggag

SEQ ID NO: 8518 - DNA, 362 bp, Glycine max
  Clone ID: jC-gmle01810032h11d1
ggaaaaaaaaaaaaacaaaaaaaaaaaaaaaaaacccggagggagaagggggaagaaacgaggggggacgggggaagaaaaagggagggggctgggagcccaggggggcgggaaaagggaaccgggggggcaggaaaagaacccgggcgagaaaaaaagaggcacgagaaaacggaggggggggacaaaaattcaaggaaagccacgacggccgcccgcactggacaaccaagcacccccacaccaggggcccaaaaagggaacgtcgccggccccagggaaacgggggggggcggggggccccctaaaaaaaagcccacaacacaaaccgcgacgagcgcccagagaggggcagaagaacc

SEQ ID NO: 8519 - DNA, 490 bp, Glycine max
  unsure at all n locations
  Clone ID: jC-gmle01810032h12d1
aagctgaaacggttttcatttatcattaaagatcaactgctgaacaattacaatggtaaaacaaaacaaatgaaagaattaattctgccatcaaactccactttatctcagttcactgttctaataacaaacattttttaagaaaaatcttcaatcggtgcaaggggctactgtattgcaaaacgaggacgctgtacctacaccaagccattctgctgcatttaaaagcatttcctgtgtacaattgaaggaccagactcatactctgccttcgcaatccacatttgttggaaagtgctgagagaagccaagatagagccaccaatccagacactgtactttctctcaggtggagcaaccaccttgatcttcatgctgcttggggccaaagcagngatttccttgctcattctatcagcaatacctgggaacatagtagaaccaccacttgagactatgtttccatacaagtccttcctgatatcaacat

SEQ ID NO: 8520 - DNA, 458 bp, Glycine max
  Clone ID: jC-gmle01810033a01a2
caaaaatgtctcacttcggacgttcgggtcccccagacatttccgacactgactctcttctggttctcaacatcaccttccgtaccaccgccgacgacctattccctctctgggacaagcacgggaaggtcgtggacatcttcatgcacaaggatcgaagaactggagagtcatggggttttgcatccgcgcgtgacaagtatgctgatgaggctcagaaggccgtggagaggctcgacgggagagtggatgacggtcgtgaaataaccggacagtttgcgaaagatgggcctaaagctgagaggattcacaaaggaaggattattgaaacatccgcgagatcaaggcgatcaaggagccgtagcccaaggaaaaggcatcgtgatgattacacagatcgagattataggaggctagagtcgcagcagaagttatgagaggtatgaacgtgacaggca

SEQ ID NO: 8521 - DNA, 458 bp, Glycine max
  Clone ID: jC-gmle01810033a01d1
ggcaaaatccctcaaactgagagattaacctgtcaactgcaaggtctaatagttaccaaacaccgaagtagacgacatagcaagtcaaaatataaaaccattcaaaacatcaggaagtctgaccctaccaaacagcacttagatcataaaatccttcaatgactccgataagatcattcacatagactaaaagatccaacaatagcaaaacagctacaggtgcaatagtccggcgtctccagaatttttcatgaacatagcttattcatccccatttgaatttcgaggggaagggcttcgagaagcatcagggcgaccgcgtggtgagacactgcgaggggtaggagaacgcccatcgcggctacgatttgcaggactttcaccccgtggactcttcctaggggaaggactcctttgaggggaagtgctcctctgaggggaaggactccttcgaggac

SEQ ID NO: 8522 - DNA, 550 bp, Glycine max
  Clone ID: jC-gmle01810033a02a2
caaaaatgtctcacttcggacgttcgggtcccccagacatttccgacacttactctcttctggttctgaacatcaccttccgtaccaccgccgacgacctattccctctcttcgacaagtacgggaaggtcctcgacatcttatcccaaggatcgaagaactggtgagtcaaggggttttgcattcgtgcgttacaagtatgctgatgaggctcagaaggctcgtgagaggctcgacgggagaatggttgatggtcgagaaataaccgtgcagtttgcgaaatatgggcctaatgctgagaggattcacaaaggaaggattattgaaacatccccgagatcaaggcgatcaaggagccgtagcccaaggaaaaggcatcgtgatgattacaaagatcgagattataggaggcgaagtcccagcagaagttatgataggtatgaacgtgacaggcaccgtgggagagacaaagattatcgtagcagaagcaggagccgtagtgccagtcttgattacaagggtcgtggtaggggacgctatgatgatgagc

SEQ ID NO: 8523 - DNA, 519 bp, Glycine max
  Clone ID: jC-gmle01810033a02d1
ggcaaaatccctcaaactgagagattaacctgtcagctgcaaggtctaatagttaccaaacaccgaagtagacgacatagcaagtcaaaatataaaaccattcaaaacatcaggaagtctgaccctaccaaacagcacttagatcataaaatccttcaatgactccgataagatcattcacatagactaaaagatccaacaatagcaaaacagctacaggtgcaatagtccggcgtctccagaatttttcatgaacatagcttattcatccccatttgaatttcgaggggaagggcttcgagaagcatcagggcgaccgcgtggtgagacactgcgaggggtaggagaacgcccatcgcggctacgatttgcaggactttcaccccgtggactcttcctaggggaaggactcctttgaggggaagtgctcctctgaggggaaggactccttcgaggactaggactgcgccgtgcaggggagccgctatcaactgatctgctccggctctactattacgc

SEQ ID NO: 8524 - DNA, 500 bp, Glycine max
  Clone ID: jC-gmle01810033a03a2
aaaccctacttctacttcccccctttgctctcaaaccttatcacctaatccttatcctcccaaaccagaaaaccatgtctacctccgcagcttccctcgcactcccaaccctcactctgcgaacccgacaacctctatgttctccccagtgcttctcctcgaccctctccctcacacccaacaacaaacccatttccatttctgctgtttttctcaaaccaacaactctgtcgtcgtctcgcttcgttccccacgtcgcggtgtcgtcggatttggggcaggaggaggacaccttcagtgacggagacggccccagcttctcccccgaccttaagctctttgtcgggaatcttgcgttcaacgtcgacagcgcgcagctcgcggagctctttgagagtgccgggaatgtggaggcgggtgaggtgatttatgataagactactgggaggagcagggggtttgcgtttcgcaccatgtcttcggctgaggaagctgaagcg

SEQ ID NO: 8525 - DNA, 544 bp, Glycine max
  Clone ID: jC-gmle01810033a03d1
aacctataaatttgagacatctacttctatagtgaaaagacggactacagatcagtttcaaatgacaaccatcaaatttggaacatacatttaaactttcaacagacactcatttaggaatgaagcctgtcaaatattgaaactgtgtacatgtagtctcaatgcatgtaagggtatttgtttcccaaactgtttttgccaatgacatcttgcagctgtataactcccaagtcccaaataccgaaatcctctctcgggtattgactaaatgctaaatgctcagaactgcttgggcttggaatctgctaatgagactcgtatagctctgccattcaagttcacgccatttaaggactgaattgcactggtgacctcatcaaggctactgaaagtcacagatccaaagcctctagatcgttcactttccctgtcatagattaccctagcttccaagacattccctagtgcacgaaacaatgacttaagtgctacattgtcaacacccgaagcatgattacttacatgaacacgggtttactatctg

SEQ ID NO: 8526 - DNA, 622 bp, Glycine max
  unsure at all n locations
  Clone ID: jC-gmle01810033a04a2
cgaattcactgtccaagaaaataggttgtggatgttgcaatgtcgaagcggaaaacgtactggtaaaggtgcattcaaaatagctgtagatatggttaatgaggggcttgttgatattcgttctgcaatcaagatggtagagccacagcatcttgatcaacttctccacccacagtttgaggatccatctacttacaaggataaagtgatcgccgttggtttgcctgcatcccctggagccgcagtagggcaggttgtattcactgctgatgatgctgaagaatggcatgcacaaggaaagagtgtcatcttggtgaggaatgagactagtccagaggatgttgggggtatgcatgcagctactggaatcttgacagctagaggtggtatgacatctcatgctgctgttgtagcccgtggatggngaaagtgttgtgtgtctggttgctctgacatccttgtaaatgatgctgagaaggtgtttgtagttggggataaagtgataggagaaggaaaatggatctcactgaatggatctacaggtgaggtgatactgggaaagcaccactttctccttcggctctaagtgatgatttggaaatttcatgttttggctgatgaa

SEQ ID NO: 8527 - DNA, 319 bp, Glycine max
  Clone ID: jC-gmle01810033a04d1
ctgggacatttatttttttttcatatttaccattactccaagtacaggccatgagcttgaattgagtatcacactctattgttacaaaatacggtgatgggaacaaggcccagtatgattacagtgctacttgttccatgctaaagtatcttcaattatgcattgaccaaaagtacaccaaaacttctatatacctgaaccggatcaatcatgatgcatggctacaccgtgctatcagctgctgttacatgcccggacaattagtctggcagaaggggacgccacaaatctatcctactacttatctcatgaacatctt

SEQ ID NO: 8528 - DNA, 619 bp, Glycine max
  Clone ID: jC-gmle01810033a05a2
ctttcacctacacaagtttctattcaaaggaaattggtcatttgaatggctcagttgttgtctccagtgtacactgaacctctcaaatcgaatttaagttccataagctcatggaggatgctaccaaagactgcaactgctttcaattttgtaacacacaatggcaaacgaagagggtgtggaagggtaagagttgcttctgaggaaaaatctttttcaacgagtggcactgctgttgtagatgactactatgcagttttgggtctgcttccagatgccactccagggcagatcaagaaagcgtactacaattgcatgaaagcttgccacccggatttgagtgacaatgatcctgaggctacaaatttctgcacgtttatcaatgaagtatatggggtgctcagtgatcccatccagcgtatgatttatgatgaaattcatgggtattctttgacttcaatcaatccttttctagatgattctagtccaaaggatcatgtctttgttgatgaattcagctgcatatgctgcataaactgtgccaatgtagcttgtgatgtgttcgaatagaggaagagtttggaagagccagatgtacagccaatgcgggaagcctgaa

SEQ ID NO: 8529 - DNA, 376 bp, Glycine max
  Clone ID: jC-gmle01810033a05d1
gttcttgatttaccccaaaaaaacttgggagttgttgacaacaaaaaagggggcacgcgaaacacggggggggttgaaaaacgataaataacacggcggggaaccgaaaaaaaaggcgcgggggaaaaaaaccccgggggggggggggccccatttttaacagggggagaagggcctgggggaaaaaagggggcccccacacctgggggggggcagtccgggcaaagcaaaggggggggggggtaacaaccccctgcttggagcttgcccccctgttggagaacaaaagggggaccccttgggcgatgaattgagatgccccggtcccgacaaaaagcattgggggggcccccaaagaggcccccacagaaactgg

SEQ ID NO: 8530 - DNA, 564 bp, Glycine max
  unsure at all n locations
  Clone ID: jC-gmle01810033a06a2
ctgctttcttccctcacccctctaaaaatcacaaagattctaccttttgatgcaaatgggatcaacccaccaaccctagggtcacataccagcaagattcattctttcattcaatctcaaaccaaacaacccccatttcaattatggcaccatttcccacttcccattacttcagggccttcactttctccattttgttcctcaaaaccctagcttttgacccaattcctctgttttcctatgctggctttggaaaagatctgaaatttaagcccaacgtggccctttttggtaatgcaaaggttctcaatgaagggtctgggattcatttctctggctttgggagttcaagaggcactgggagaatcatgtacaagaaacccatcaagctttctcaaggtaaaccaaggcaattagtgtctttttctacttactttgcattntcagtgtccttggaagatggnggtggcttggcttttgttatggctccaaagggttctcaaggtaatgtgttttatcaaagttcttcttctgggttgaatgatggaaaaattgaagttggtg

SEQ ID NO: 8531 - DNA, 392 bp, Glycine max
  Clone ID: jC-gmle01810033a06d1
gggacccaatcccaatttgggaaacaatcaatcagcttcggaaaaccctcttcttgttcctttgccaagagccctcctttcgaaacacgctggcaaaacctacctccctagaaaactatgtacctttccagaaccaaacctttcttaaacccttttttcccttacgggggtgtttaaatttttacccctttccaggggtttctttcccacacttttgggttttttcccatgcataactcttagagggttcccaaaaaaattccttgggcccccttggcctttattggtgcccaaaatgggcccccatggctcccccaataaaggtgttaaagcccccccatccggcccaaaatttgtttggctaaaaaccctctaaaagcctgccccccttt

SEQ ID NO: 8532 - DNA, 545 bp, Glycine max
  Clone ID: jC-gmle01810033a07a2
tctcaatgggttcttcttctattacaacatcgcccgcaaccatgaccatggctgcgatcgtgctcctgttcacggtctttgccgtttcctccgccctagacatgtcgataatctcgtacgacagcgcccacgcggacaaggccgtcacgttgcgcaccgaggaggagctgatgtccatgtacgagcagtggctcgtgaagcacgggaaggtgtacaacgcgctcggcgagaaggagaagcgcttccagatcttcaaggacaacctgcgattcatcgacgaccacaactgcgcggaggaccgaacctacaagctcggactgaaccggttcgctgatctcaccaacgaggaatacagggccaagtacttgggaaccaagatcgatcccaaccggaggctcggaaagaccccgagcaaccgctacgcgccacgtgtcggcgacaaattgcctgattccgttgattggaggaaggaaggtgctgttcctcctgtcaaagaccaaggaggctgtgggagctgttgcgcattctcagcaatcggtgcagta

SEQ ID NO: 8533 - DNA, 261 bp, Glycine max
  Clone ID: jC-gmle01810033a07d1
ccacattgtaagcaaattaaaatagcatgtgaatatgggacaaatccaaatattgctgctgcattgccacataatctacagaaccttgaaaactaacagcaatcaaatatgttcgccatttggaatctgaatacaaatacagtgcatcgataatataaccctatgtacagagccaatgtctgactgaaacttgatacagaacattatctattttgcatcataatacaagggttaagatctttatgccacgtgcactgttat

SEQ ID NO: 8534 - DNA, 546 bp, Glycine max
  Clone ID: jC-gmle01810033a08a2
aaactacaaaggtttatccaatgtcaaaaactacttccaccatgtcggctacatccccaatgcaccacacttagacgacaactgcgatgacaccctcgtatctgccatcaaaacctaccaaaagaattacaacctgaacgtcaccggcatgttcgacatcaacacatcttaaacaaatcatgacaccccggtgtggcgtccccgacataatgatcaacacagacaaaaccacatcgtgaggcatgatctcggactataccttcttcaaagacatgccgcggtggcaagctggaaccacacaactcacctacgctttctacccggagccaagacttgatgacactttcaaaagcgcgattgcaagggccttcagcacgtggaccccagtggtgaacatcgcgttccaagagacgacgtcgtatgaaacagccaacattaagattcttttcgcgagtaagaaccacggcgatccgcatccttatgatgggccaggtgggatattgggccatgcatgcgctcccactgatgggaggcgccactttgacg

SEQ ID NO: 8535 - DNA, 419 bp, Glycine max
  Clone ID: jC-gmle01810033a08d1
agctcactaccttgcggtcgtccttttgtttcctgtggaagtgttaaagcaaatgccaaaacgtttggtatatttgacacatatgaggaaacactactcattaagtgcttatcctgtatgcatcggctaatctacagctggttccttctgaatctagagaaagctgtgatacgatctcctacgcgctcttgccagggttgttgaactagagtcagtgaagctggataactggggcaaatctctaatgcaacttaccgaaatatatctctagtactaggcaagccccacctagctatcacggttacggggtgataccatagatcctttgtacccggtgtatggcaaagtagacctaaactgacacttgctcagctgagggcatattaaaggtaacaacgaacgttgttacgtccgtcaaa

SEQ ID NO: 8536 - DNA, 506 bp, Glycine max
  Clone ID: jC-gmle01810033a09a2
gatttattctgggatttacgttgttctggggttgtttgctgagaattatcggttacattcgaagcaggaagaggatgaaaaaaatttggtgtcaaagggtgctgtggttaaaggtgttctcctccaacagctagttcaggctgtggttgcaaccctttgtttgcgctgacaggaagtgacaaccaaaatactacaagccataatacttctctacttgttttagcaaggcaatttgttactgctatgcttgtaatggatgcatggcaatactttatgcacagatacatgcatcacaacaagttcctttacaaacatatccactctctacatcacagactcattgtaccctattcatatggagctctgtacaatcaccccgtcgaggggcttctgaatgacactgttggtggggctttatctttcctactctccgggatgagtcctcgagcctccatcttcttcttctcctttgccaccattaaaacagtggatgatcactgcgggtt

SEQ ID NO: 8537 - DNA, 405 bp, Glycine max
  Clone ID: jC-gmle01810033a09d1
gatatcgtccgccggataaagctactgcagctactctcgggcgccttttttttaccctgagttattgctttaaatggggtaggacacccaacactttttagcattcaatggcatacggaaaaaaatataacaggacacatcatatgacatttccagggtacatgcaaacggagaaactgtccatgaaaagggaaaacactactagcccatattcagaatgccttcaagcaaaaaagttaatcatccttgtaaactttgcaaggactaatttcaaaaccaccaccttaccttgacttcaacgtgttacgcatgtaggtacctaaaattctgtcccaaattactgaaaaagggtacgaaaaaacttccttgatgccataaagccagaggtgcacattgaggtatgct

SEQ ID NO: 8538 - DNA, 291 bp, Glycine max
  Clone ID: jC-gmle01810033a10d1
gaaaacttaaagcatcacttaagtcttaatattatttcttccatacttgtatttttgcattaatcatatcaatgcatttagaacatctatatggaatctaatggtgttccgctgttgctcattgtgattacattttatttctctagtttttagcatttttgttccagcaagtgatgaaaggttacaacaagaatgcaaatgttgaagcaagatacatcaccaaaagaggataaccaaacaacaaaatcctagttaaatagtagccaaactaattttacttgttgaagcatt

SEQ ID NO: 8539 - DNA, 436 bp, Glycine max
  Clone ID: jC-gmle01810033a11d1
aactggggaacgatattgatttttaaaataaaaacataaacgacatattttcgttgaagcgaggttcattccttatttcaaaacattgtaaacaggagcactttatccagagatgcaatgcacaggttcaagggagacacttgtcaaacagttcagacatatgagaacacttcataaaagggattccccttaggcaaccaccatgaaggcgaaggacaagatgcaaaggggattccttctgaatgttgaaatgtgtcaagggacgaccattttccaatggcttccgagtaaaaatgatcctctgctgatctggagggataccttgcatgacctgaaacttagcttgcacattgtgaataggatcagagctttccaccttcaggggacaggtgatgcctgttagagtgttcacaaaaatgtgcataccttcacgaag

SEQ ID NO: 8540 - DNA, 303 bp, Glycine max
  Clone ID: jC-gmle01810033a12d1
tcgccctttttttttttttttttttttttaatttatgttttcttttttaaactgggaagcggggttggtatttaaaataaaaacttaaacgtctttctttccctgaaacgagctctggccatcgtttggaaacctaatgaacagcagctcttcaaccagagagtgcaggccccagcctaggggggaccctgtacaaccaccttatccatatgggacccctctcttaaagggatttcccgtgctgacccccccgaaagcgaaggacagaatcccaagaggattccctttggatattggattctg

SEQ ID NO: 8541 - DNA, 201 bp, Glycine max
  Clone ID: jC-gmle01810033b01a2
cacttgtataatatttctagcatgtcttaacatgaacctgatatggtagatgtaaatttcgttattaatgatttttttgttgtttagagttgagcttcatgaaatatttacagaagtatatatagaaagttgtaccaatcttgtgtttggctttaacaaaaagaaaacaagtctgtcattggaagacataatttttaagat

SEQ ID NO: 8542 - DNA, 155 bp, Glycine max
  Clone ID: jC-gmle01810033b01d1
aaaagccaaacgcaaaaatgggccaactttctatatatacttttggaaatatttgatgaagcccaactttaaacaacaaaaaaatcattgataacgaaatttacatctaccatatcaggttcatgttaagacatgctcaaaatattatacaagtg

SEQ ID NO: 8543 - DNA, 634 bp, Glycine max
  Clone ID: jC-gmle01810033b02a2
gtggttccctcagacatatctgtaacgctgcttcttctgtgaggcatcaatggagacaaaagctttgtccttcgctctgtctctcaatgacctcaccaacaaccgcttcacttccaatacgccacatgctgccgccaaagtttccgtctttaccgtcagatgctcttcttcgggtagtggagagaggccttggaagaattcagatgctagacttgtgcttgaagatggttcaatttggagagcaaaatcgtttggtgcttcagggacccaagttggcgaggttgttttcaatacatcattgacagggtatcaagaaattttgactgatcctagttatgctggccagtttgtgctcatgacaaacccacatattgggaatactggcataaattttgatgatgaggaatcaatacagtgtttccttgctggacttgtaattagaagtttgagtatcagtacctctaactggagatgtaagaagcctctgggggattacctagctgaaaggaatatcatgggaatttatgatgttgatactcgtgcaatcacgcggcgattgcggcaagatggcagtcttattggtgttttgagcactgacaattcaaaaagggatgaggactgcttcacatgtcta

SEQ ID NO: 8544 - DNA, 478 bp, Glycine max
  Clone ID: jC-gmle01810033b02d1
agtaattactctcataaaattggtgatgccagcaaccaaaattttggtgttgactgcgatgagcagtagtacattaggcctcattgaggtttatgacaatcatggccgtgcttacccttgcaaaggaaatgaacatgagaaaatcttaatcttatagatccctagaaaaccttaataaactcatctacaaaatcatagaaatggactcataacttcgtaatttttcagcagatgcattattctttttgccccgaacgaacaagagcagctcccttcaaccacttatgcatccaaagcctgtgctgctgatagttggtgtagactttcttttggtctgttttttccttgcttcattagctctacaaactccctaaaagcatagtcagaatcatgaggtccaggggatgcttcagggtggtattgaagaaacataagttgttgagcggtgaaagcaagaccagcacaacttcatcattta

SEQ ID NO: 8545 - DNA, 550 bp, Glycine max
  Clone ID: jC-gmle01810033b03a2
gcctgagccaccaccagagggtcgcttgcccgatgccactaagggttctgaccatttgagagatgtgtttggcaaagctatggggcttactgaccaagatatcgttgctctatctgggggtcacactattggagctgcacacaaggagcgttctggatttgagggtccctggacctctaatcctcttattttcgacaactcatacttcacggagttgtagagtggtgagaaggaaggtctccttcagctaccttctgacaaggctcttttgactgaccctgtattccgccctctcgttgataaatatgcagcggacgaagatgccttctttgctgattacgctgaggctcaccaaaagctttccgagcttgggtttgctgatgcctaagcaacgtttaggggattgttgaagaggcatggtgcccataatatttctctaaaaaattgtatggacatggtttttaatgccaatgtgggctccgcagattttagatagcttttgaatgtattttgctggacgtgacgatgactgtgaagccgggtgtggttt

SEQ ID NO: 8546 - DNA, 517 bp, Glycine max
  Clone ID: jC-gmle01810033b03d1
aggtccgaaagatcactatcattatcgctgaacaatgttatttaacaaaagtatcaaccaccaataaaagcaacaacccaactttccaatcatcgtcacgttcagccaaatacattcaaaagctatctaaaatctggggaacccacattggcattaaaaaccatgaccatacaattttttagagaaatattatgggcaccatgcctcttcaacaatcccctaaacgttgcttaggcatcagcaaacccaagctcggaaagcttttggtgagcctcagcgtaatcgggaaagaaggcatctttggccggtggatatttatcaacgagagggcggaatacagggtcagacaaaagagccttgtcagaaggtagctgaaggagaccttacttctgaccactcaacaacttcgtgaagtatgagttgtcgaaaataagaggattagaggtccagggaccctcaaatgcagaacgcttcttgtgtgcagcttcaatagtgtgacccccagatagagcaacga

SEQ ID NO: 8547 - DNA, 605 bp, Glycine max
  Clone ID: jC-gmle01810033b04a2
atttaaacttcttctgtctctttctcagttctctgtttaatttcaagttcaagctggtgaaatcttggattagtgctcccactctcctatctggtataggacttcgtgggtagacttttctatttctctcctttctttcactctcttcttctcactgatccgcattgccgttcaaagtggtcttatttgaaaaacacttgggcgttggtgcaaatgtttgcttcgttaattttctctggggacaacaggctcactgagaaaacaatttttacttgcagagatttggacatcttggttgtttattatacaatagcaactcaatttagaaaatttctaccgcattacattaggtggcatctgtataccttgttgatctacattctcccatcttttctcactgctgaaattaaatataagcggaatttgagtaatattcatatttccggcttattttacgacggcagatacaaattctggactaaacacgagaaaaatcttgctttgacagaagaggaaaagatggaggtgattagaaatagaggcattcctgctgatgttcttgcaaagcgagctcatgaaattgaaaacatgttgctcatgaaagc

SEQ ID NO: 8548 - DNA, 432 bp, Glycine max
  Clone ID: jC-gmle01810033b04d1
aaaataacacgcacttcacacatcattacgacaattaaaagaggtggggaaattttcaaatcgaccgagcattctcaacaagaggggcatgtcttaattccctttattgaattaaacgaacgaccaaacgaatgaaaaccccaattccagatcatgccgaggattccgcattttcagaaaatctggcagtcgcctgtggaacagaaaaagctggcataagagtattaccagcaatttcaaaatcttgggaaattcccaagagaatatcaaaaactgtaaactgtttgggattgtcaataaggaaactcaagtgccatgaagtttgatttgcccactcagaactccacatttcaaaaccattattaggaccacatacctctattgggaagatcaattcccacgaatgtggttcccattttgtccacttacatg

SEQ ID NO: 8549 - DNA, 599 bp, Glycine max
  unsure at all n locations
  Clone ID: jC-gmle01810033b05a2
agaccagaccagaccgggtatcagacacaactcaagcaaaagaaataagaagcagaaaaatggaaaatggcagaggcagattatactgttccattgagcgacattgctgcatcacgttctgactctgaatgataagagacaaacgcatagaccctgcgattccctttcctcaaatcttgcaacacccttacactagctacaataccaaatctaccaaaaagttgtttcaagtcttgaggccccgcactcctggaaagattgccaacatacaacttatgaggaccttcatagtatataactctcttgggtgatgagttcattgtttcaagattccttctcttgggattcatctcagctgaaaatctaacccgcacttcacgcccaccaaaatccttgagtcgtaaaaaaccgaaatttcagataaaacagcagccagaagatatgaacgaaatagaagcagggagtgggagtgactaaccgatgcatccaatgccgcaattgctnttcttgccgagttaatagaagccattgtgacataagcactccctctactntcaccagtttccgcactccggcanacctgaaaagagaaatcacga

SEQ ID NO: 8550 - DNA, 541 bp, Glycine max
  Clone ID: jC-gmle01810033b05d1
tttcttattttttttattttgtctcggtaaatagaatatatatggaaaatttcaggatgtgctatcgaactacaaatccaagagaatgccatgacataacgttagaacttttttaatgtatcattgataattttaaagcccttaccctgtcaatttggatcaccaagtttctaaacagttgccttaattctaggcttcatccaaccacgccagtgtgacatgtttagttggcaaccgattttgtcttacaagttcaattgctccattgttgaccattatttgctttccaacaagttcaatgagccaaactgttttgtaaatgtggcttataacaatcagccagagggcaagctgcaaacaaaggaaatcaacaagcaaattcttcaccaccttggagatataaactttcatggtttcgtcattctcaaacagcttctgttactgccctgaatcttcaggatccaattgacttacagtgatggcatgcttttgacagatcgggaagaaacacaaattgaaaaagatctaaattcattagaaa

SEQ ID NO: 8551 - DNA, 639 bp, Glycine max
  unsure at all n locations
  Clone ID: jC-gmle01810033b06a2
gctttgaatctccctgttgacatacatgggtttgcttctctgattacaaaaatcacttttggggagatggggaggttcgaaaaccatgttgtcaaaggaggcatcaagttgccaattgggttcaggttttgtcccaccgatgaagagcttttccttactacctcaagaagaaggcgtttgctcaacaattacccgcttcagtcatttcagagtttgacgtgtttcagactgagccatggaaacttccaggtgaattgagggaaaataggtacttttttagcaatagatcaaatggaaacatcaagagacctgctggttctgggtgctggaaatctgtaggcaaagaaaaacaaatcatccattcagagagcaatcaagttattgggatgaaggaaacactgtttttttgcaaagggtcccatgagacaagaactcagtgggtcatgcacgaattgcgccttgtagcttcctacccatgtcagatgccagtggcagattttgctgtgtatcgcatatttcagaanaacaagatgaagacaagaagatcacatgggaagaagccctctagtagcagcaaacttcagagacttngtgatgttaaagctagtttctttgacttcacttgtgattttaatcatg

SEQ ID NO: 8552 - DNA, 521 bp, Glycine max
  Clone ID: jC-gmle01810033b06d1
gatgataaaaggattcttaatgatttttgcaacaagaaattcagaaaataatattcaaataattacgaggacataattttttcgtttcacactgcagggcaaaaaaaactcaacatcaggactgtagtaaagacaagagtacttgagctttagaggcttcttgatcatatctcataaattgaggaaaataaacaaagcatgcactgttctacacttctactcctaaatcctaatctaacttgctagaggagatttcactacagccttcacttagacatggggaacaaggtgtgggaggccctatatcgtcatgattaaaatccacagtgaagtcaaagaaactagctttaacatcaacaagtctctgaagtttgctgctactagagggcttcttcccatgtgatcttcttgtcttcatctagtttttgtgaaatatgcgatacacagcgaaatctgccactggcatctgacatgggtaggaagctacaaggcgcaattcgtgcatgacccactgagttctt

SEQ ID NO: 8553 - DNA, 601 bp, Glycine max
  Clone ID: jC-gmle01810033b07a2
aaaatctttccaatgtgagcttgtctttgccaagatgggaatcaaccccatcatgatgagtgctggagagttggaaagtggaaatgcaggagagccagcaaaactgatcaggcagagataccgtgaagctgcagacatgatcaagaagggaaagatgtgcgctctcttcatcaacgatcttgatgcaggagctggtcgtcttggtggaaccacacaatacactgtgaacaaccagatggtgaatgccactctcatgaacattgctgataaccccaccaatgtgcagcttccaggtatgtacaacaaggaagagaacccccgtgttcccatcattgtcaccggtaacgatttctcaacactctatgcacctctcatccgtgatgggcgtatggagaagttctactgggcaccaacaagggaagaccgcattggtgtttgcaccggaattttccgcactgatggtattcctgaacaggacattgtcaagcttgttgacaccttccctggccaatccattgatttctttggtgcactgagggccagagtatatgatgatgaagtgaggaagtggatttctggtgtggtgttgacagtgttggga

SEQ ID NO: 8554 - DNA, 266 bp, Glycine max
  Clone ID: jC-gmle01810033b07d1
aaaaggaaaaggcaccaaattcaatttaagtggacactgtaactcaaaattatagaggaagaccggcctttatgaaaaatatagggagaacatctcaaacttaacgtcttatctttgcaacctaagacattgagaatgctaagaatgttacacgcaagttccattacaacttctaccactgggattagtacaacaaccttcacgaacagatatatttacttggcaagtttgctttgccttcaattcaagaactggatgaaaggttc

SEQ ID NO: 8555 - DNA, 622 bp, Glycine max
  Clone ID: jC-gmle01810033b08a2
ttttcaaataaagtaaacattgttattcatatttatgtcacccgagaatcagatcctccattggaagagggatatagttacaaaccaataaaatcttcattctgtcctatggctagtgattgtggcatgtctgttttggttggtacaggagacaatttttggtctggactatatgtcatctcatctaccgttggctttgtgatattgctggctttgttgtatgtttactacgtaaccccatttcacatagaaacatggtggtacaggggactactatatgtaatctgcatggttgcaagtgttgttatctttggtggttctgtggttgcaatgtggcatatttgggaaaagcaaaattctttgaaggacaagtccaatgatacaaaggttgataagattcatcaaaatggctctttggctaccaaggatcaaagtcaagacagtagtattgcaaagtcaacggtcattcattatggttccaggccaaactttaaagaaatttatgactcgatatcagagaaatggcgccttgttgatgtgggtgtcatagtttgtggcccttaacacttcagacaagtgttgctgaagaaatcaggtcacacagtatgacaagacaacgcct

SEQ ID NO: 8556 - DNA, 275 bp, Glycine max
  Clone ID: jC-gmle01810033b08d1
gcctgagtgataatgcatatattcacataattaaggagtgaaatcatatcatcccgcttagaattagaacccttctaaggactgtaggctactatagcaccaatgctacaaagggttctagaatatgattactgctatatacaatacacatgatatatatatatgctcttctctttagtgaatgcatgtcttccatcttccattagggaagctagagatcaaagctgtgactgggggaaatggaagatggactgatagcgtcgtcttgtcatact

SEQ ID NO: 8557 - DNA, 311 bp, Glycine max
  Clone ID: jC-gmle01810033b09a2
ctcaaacaagtaaaattagtttgagcacgcgccgactacgatgttgatgatcgcttaccctcgttgggtgaggtatcttgcttcaacacttgcattcttgttggaacctctcatcactcgctggaacacaactgctttacactccaacaaatccatggaatcacattgagccacggcggaacaccttcagactccatatagcgtcttcttcctgcttcgacatcattaacgccaaagtacacggttggaagaaacaatattcagacttacgtgatgctttaagttttcaaaaaaacgacgcattacccttg

SEQ ID NO: 8558 - DNA, 293 bp, Glycine max
  Clone ID: jC-gmle01810033b09d1
gaaaacttaaagcatcacttaagtcttaatatgatttcttccatacttgtatttttgcattaatcatatcaatgcatttagaacatctatatggaatctaatggtgttccgctgctgctcattgtgattacattgtatttctctagtttttagcatttttgttccagccagtgatgaaaggttacaacaagaatgcaaatgttgaagcaagatacatcaccaaaagaggataaccaaacaacaaaatcctagttaaatagtagccaaactaattttacttgttgaggcttcgc

SEQ ID NO: 8559 - DNA, 502 bp, Glycine max
  Clone ID: jC-gmle01810033b10d1
agctaacaattgtctctacatataccaacgtaagtacgtaacccagaaaatacctcccaattaaataggtctaaagaccctctaccccctcaccaaatatcccttttctatcactacaaaactgctggctgctttttagctctctgaaacagccaaaaaacagattaatttttttatgaaaggaacatttatcaaacacaagaattgcatttacaatcaatttccctcaattaagctcttcaacctattacgggcttcttcagacagactgcaagttttgaatcttcgcctttggggtggacatgattcaacaatgctttcaatgggcgacaagtatacgacaatcacagtgagattatctgatgtatttaggcgcaatgcttccttgactagctctctggcacattgctgtgggtcatcatgccttcttaatcctcgacgaacaagactaactgcaacttggctagacattacatcccaaatcccatcacatccaatgatc

SEQ ID NO: 8560 - DNA, 355 bp, Glycine max
  Clone ID: jC-gmle01810033b11d1
aagggggtataataattttaagaattacgaatacaaaaaggaacctgaaagaaggagcacgggtccaagacaccgggtccccgaagggaagaaaagggaggcctcctgagaaacagagctcaaggaacggagggtgtgacaaagcaaaggttgctaagccaagcgtggatgcggactaccgctagaaaaaccccaacccccggaaaaaagcgggaaaaaggagtgaggggcctaaaccccggtaccccgaaatgtcatccctacccaaaagtctaaatccgggacggggaaaaggcgcacagcgaaaagctcgagggggccctaaaaaaaatccataagagcaaaaaggtgcccc

SEQ ID NO: 8561 - DNA, 377 bp, Glycine max
  Clone ID: jC-gmle01810033b12d1
ttgttttttttttttttttttttttttttttttttttttttttttttttttttttggggttggagtggtttttactactggcttcatctacagctggtaaattgattaccatccccatacacaaaaaattggcgaaggcttcaaagacacggcccaaaacgaaacaaaagcggcagcatacaaaacacgcacaaaaatgacgacgatgatggaggaagggaaaccaaatgtccttgcttgtcaaaccaacaaaagatagtacctgttctgatccagaagggaccaaaaactcccctttcattgtaccactgcgcggcgagaaaccaaaccttccgccggtcatagggtgccccccaacaaaccaagggagcggcaag

SEQ ID NO: 8562 - DNA, 625 bp, Glycine max
  unsure at all n locations
  Clone ID: jC-gmle01810033c01a2
gaattagcgaagaagcataagagcgtcgatggatagtctcaagttcgcatctttgacgctgcctccttgttctcgacgctctgggatgctaggaaagaggttgaattcccctttacttattattgattcttcagcacagctttgctattgcaagactgatcttgctgccgcatcatcaagttttccactgccaaatatgagattttcttgtagattttcaccaagtgtagcagcagaaacatggacctcgaatctttcttccaaacaatggatattgcactcaactgcacagatagaaaatataatcacaagtaatgaggatcaaagcatgtgggaagcatgtaaacaagctctttctgcatttaactttagcgatgaagaaaaggacaagatacttggaaaagcatttggtcttattcattccccttactggggagaagaacgtagtaaggaagttccaaaattaaagacagtaaatggagtattagactatctgaggagtttaaatctttctgacgatgatctgtccattttgcttaanaagtttccagaagttcttggaggtatttagaagaagagttgaaaggcaatgtaaagatcctgcaggagcagtggagtattaagg

SEQ ID NO: 8563 - DNA, 525 bp, Glycine max
  Clone ID: jC-gmle01810033c01d1
agagttacaattatatcaacataggatcaaatattatgtaagagtccatcaacaataaaacctcttcagacaaaaggaacataatttacaaacaaacttattgtgatttacttcattccatggtctggacactacagcaataatcataatttcaaaatcatcctcttcaacttgagaatgaattacttcttgccactttgcatcatagaaagtgagaaactttcttcacatacaactctgccttctattgttggagagggtggatgaatgaacaaagcaattatgcagcagtcaactaatgttgcaaaaagatacatctctcatccaatcacctagaagcgagcccagcatctagtgcattgtgcaatacagtctcccttacaatcaacattataacccaaaacttttggatttctaaggagaagattcctaagagaatgtgccttaatactccactgctcctccaggatctgtacattgcctttcaactcttcctctaaatacattcaagacttctggaacttt

SEQ ID NO: 8564 - DNA, 449 bp, Glycine max
  Clone ID: jC-gmle01810033c02a2
caactagtaacacatacactaatctctctctgtctgttataggatggccgccaataccaggagtcgagggatcaccggcttagggaagctaggcaacaaccggatctggactttcaacgcacctgcttttacatcacagaggggagcatgcaggaccggcttagtgtgcgacaagaaccctgatgatgagacccagtctggacaggtccgagactatgtgatccaggcggcaacacaatccggcacatactgtgccccacatacacagactggagtattcgggcccgcccaaggaggagaccaaactgcttgtgccattgactatgatgcgctggaagagaaggcccggtctctccccaccagtctctaggatgacgagaagcctgacacccttccttaacaaccattggaggacatcatatcatcatactagaagaaatgaacactgt

SEQ ID NO: 8565 - DNA, 355 bp, Glycine max
  Clone ID: jC-gmle01810033c02d1
ctaagcatgatacttatgatcagatttactttaagggtgcatgaacagagaaacccctgatgcctaagggaacatatgttactggcatgctccgggacagcgactcaatcacatggtctggacactacaggagtaattcaacagctagaaggaggactggaaaccatgggcacagcctgacaggctgccactgtgtttatttaaaagagagatacaattctgaagatccacactgtgtcttaaagaggggagagaggcttttaatgaacctagcgactgggggggcgaaacctggtgttgtactacaatgcatctgtgagtacggcacctacaagctggccaactacttcggggg

SEQ ID NO: 8566 - DNA, 592 bp, Glycine max
  Clone ID: jC-gmle01810033c03a2
ctcgttttctcacacactcgcactttctctctctaaaaaccaccatttccgaggtcgagttttctggctctatttatatggtgtgtaatccgtgtttcgttgttgcgtgcgcgtgcgatttggaatctggtggtgcgaggggcatttgaatgtgagagaggatttttgatttttttttggattcgcggtaggtagatcggcgatggcggaggtttccggcgacggcggcggcgccgcgctgtcggtgtcgggatcgttcaaggaggggagaggctcggcaaggcggcgcggcggcggaagaggagtgaggccgccgagcatggacgccgacgagttcatgaatttgttgcacggttcggatccggtgaaggtggagctcaatcgcctcgagaatgaagttcgagacaaggacagggaattatcggaagcacaggctgagatcaaagccttgaggctctctgaacggcttagagaataagccgttgaagagctgacagaagaactgtcaaagttgacgagaagctaatactaacggagtcttttctagaaagcaagactcttgaaataaataaaatcatcgatgaaaagaggc

SEQ ID NO: 8567 - DNA, 512 bp, Glycine max
  Clone ID: jC-gmle01810033c03d1
agaaacattgtgaattgatatcatttcacaaccaaacatatacgccgtgcatgacagtcacggatcaaccgctagtacatatgaacaagcctgaatcatgacacataacactatgcggggcattacagattttaaggagtcaaggaggggataaagctgcctatacaaccacaccactcagaaatgctgaaagagtcaaaggttagtccaagttaaattgcctgccattggctggcttgatagccgatctctatatctctctctctgtaagcagagaacgtaacactaggtcagaagatgcataccgaatcctgcaattggtttcttatccccaatccaaggctaatatcagcagattactcaattggacaaaatacaccagggaaaaaaccgactatggcataagaatgatgcctatgaaagattactactaccaagcgccactggcatagactaactgtcattgggtgctgcgtgttcatccaccccgtgtgacgtttcttccagaaatt

SEQ ID NO: 8568 - DNA, 557 bp, Glycine max
  Clone ID: jC-gmle01810033c04a2
agccatgaagatcgttcggagagacctagtacctaatggacctggcagcgttaagatggtggcagtggattcggatgatctctggtttgcgtataacttgatagctcccggagactctgtcatggccgatactgtcaggaaggttctaagagaagctgctaatggcggacgggaagcagaacgcgtcaagctcaaattggaaattaaagtcgaagagctttctgattatgacaaagaaggttctattttgcgtgttcgtggaaagaacattttggagaatgaatatgtcaagattggagcatttcatactttagaactcgaactgcagcggccgtttgtgctcagaaaggatgtttgggattctttggctttggaggtactacagcaggcctccgatcctggtgcaagtgctgatctagcagtggtgttgatgcaagaaggattagcccatatcctccttgttggtagaagtatgactgttactcgttcgcggatagaaacatcaattcctcgcaaacatgggcctgcaattgctggttatgagaaagctttggata

SEQ ID NO: 8569 - DNA, 514 bp, Glycine max
  Clone ID: jC-gmle01810033c04d1
aaggggaaaatatacaaagatatttaaccactcaataaagtctgatgtaatactatgaattttacactagcattgtgtggtttgtaatacaagaccgattggattactcagggactgttgcaacttgcaacatcagctgagtatttaagaatagtaaaaaacagagagagccatggccaacattaacatgcttgaccaacattgtccatcacatctgaatgtcttcaagatcagggagaggaaaccgaagaatcgcagcaatgccacttatctgggctagttgttcttcagagacatgcatggacgaaaatacatggacagagccccctgaatccttaacagagttgaccaagttaacatacttttttcttgttgctatatctgaattcctgaaaagctcatccgtaatgagaagcatttgtacagctagtcgttcattggcaacctcaacatgtttcattccataacatgcacgtgatggatcttttgaaagcatgtcgtagaaatccttcat

SEQ ID NO: 8570 - DNA, 483 bp, Glycine max
  Clone ID: jC-gmle01810033c05a2
gcgtcgtctccaatctgcgctgcctacgacaactacctccgcctccctgagctcagagccctctgggcctacaacgacttccctaattgggccaacgagcccatcttaaagcccaccttacacgccctcgaaatcacctttcgcttactcgcagccgtggtatccgacccgaggccgtacataaacaagcgcgagtggacccggcgggtggagtctgtcgccacggaccaaattcagatcatagctatgctgtgtgaatatgaagaagaaaaccccgagacacgtggcacgacgccaccggtgagtgacattaacggcttcatcgctcaaagcagaagctacagcgaggagagcctgctcccgcgcctcgccacgtggcacaaatacaacgacgtggcgcggagaatcctcgattcggtagagtaccagatgatgaggtgcacgcacaccttaggtttaggagaggcgaatctcgcgggtaag

SEQ ID NO: 8571 - DNA, 526 bp, Glycine max
  Clone ID: jC-gmle01810033c05d1
gtgtgagtaagtatatatgactaggaattagttgattaattgtttaattaactagcagggaaccccattttgattattattttcccaataataagcgagaaaggtcttggcagcatctaagctagggaaataagtgggttcaaggaatatctgagtgaacccattatcggcctcggagctccccatcataaccgccacaacctgcttataggcgtagaagaacctcttcatcgccacctcaatcgcctgcatcccctgcaaaacatgaaccttctcgaacccgtaccttttctctttctccgagtaaaccttcatcgccggctgcatcatcccgggcccacccgtggggtccacctccacctccaatatctccggcaccttatgcctcagatccctacacatcctaggcaccttcacgagcttcctcgacctgaagcaaaacgccaccatttccccgcaatttctcatcatccccaactgcttcttcaacctcaagaaatcctccggatccatcatcacgtgcacg

SEQ ID NO: 8572 - DNA, 579 bp, Glycine max
  Clone ID: jC-gmle01810033c06a2
gttccgtgtaaggagaagtcacaaaatttctcagctcctgcctgtatacttcacatggcctaatcccacagtcgcacactcttccaccctgccatcaccaatcatcaacacaacgcccattattatttaaaaatccttaatatattattattcttcggccatcgctttttcttgaagactacttcatccttcttattagtttctttttatttcaatctttctcactcgcacgcacgcacgcacagtctctagtggtaccgtgccggttcatttgcttcatccaccacctcattttcagagatttcgtgcactcaacaaactctcatccacccatggcgtcatcactatcaacaatagctctattcctgccccaatcgctctatattaagccccggctggcgccacggtctcttcctccccctcaattccgctcccttttcctaacctcaccggcgggtgctcgtactgctactgtcatgcctagaagggcggcggtcatcgtgtcggcggcgacggcggagacgccgaagaagaagggcgaatcgaaggggttcgggagagatgagggtcgtggcgatg

SEQ ID NO: 8573 - DNA, 492 bp, Glycine max
  Clone ID: jC-gmle01810033c06d1
aatcaacatcagttctattattcctttgcgtattggaaataaaataattcacatatggtaatgttgttggcttccgccatgcactttaatacccataattacacagatagcagggcatctattatcatgataaaatcaaacggagaatctctccagagagcttgaatgatttttctgtttcttccagacagtggtccttttcttcccgactccaaggttcagcaactttattcaacttgtctctcacattctgcaacaatcgtggaaggtcatcatcccatttgtagaactccaacgccttgttgttaagtaacttttcagcaacctttttcccaatcattcgaccaccagctgaatgagcaaagtagatattgtaaaaatggcaaatgaatgcttggggatccttcacagataactccttaagatattgagcataggtaagaccaggagaagaaggttcaagaatggtataaccttgctccttgaaccact

SEQ ID NO: 8574 - DNA, 525 bp, Glycine max
  Clone ID: jC-gmle01810033c07a2
ctcttctgcatcaccattcaccgctgagagaacatcacaacacaacaaacaaaggagcctctcggtttccaatgtgaagagagcgaacatggctctaatcgctgccaggattctcggttccaattcgaggccggcggtcgcgctccaccgctggcagtggctggcgtactcctccgcctccgcggcggtggcggagccggagaccacggaggtgaaggactacgccgattaccggcgctccctgtacggacagatcacgcacaaggcgctcctcgtcgacgccgttggcacgctcgtcctcccttcgcagcccatggctcagatatatagaaagattggggagaagtatggagtggagtattcggaggatgagatactgttcagatacagaagagcgtatggtcagccttggggaaaatctcgtctcagatatgttaatgatggtaggcctttttggcaatacatagttagttattccactggctgttcagatcctcaatattttgaagaactttataactatta

SEQ ID NO: 8575 - DNA, 429 bp, Glycine max
  Clone ID: jC-gmle01810033c07d1
tcctttttttttttttttttttttttttttttatttataattttaaaataaacttcgtagaaaacacggatcaatggcaaaacaaaagctcctacctacacctattaatggtttttataggttcacatctttttcatacatatatacatacattggaaaagggagctgaacatgttcaggcttacagctaaagcctaaaggactctatacataacatcaaacttattgtaaagagatcatttttcaaacctgaaccccaatcctctgtgctacctacttaatggagtgaacatcggttacccaaagccaagctttacagtcagcatatctgggaccccatatatcatttctgcgggcatccccaacatgaacagcattctcgggttttacatacaataattcacatgctttgagaaatatagacggatt

SEQ ID NO: 8576 - DNA, 569 bp, Glycine max
  unsure at all n locations
  Clone ID: jC-gmle01810033c08a2
gttccctgtatccactcctcgtcagggaagatctgaagcagtgctagctgctcacgtcctgtaatggacgcatactcctccggcgaagaagtggttgttaagactagaaaaccatatacaatcactaagcaaagggaacgatggacagaggaggagcataataggtttctagaagctttgaaactacacgggcgagcatgggagcgcatagaagagcatataggaacaaagactgccgtgcaaataaggagtcatgcacagaagttctttacaaagctggagaaagaggcccttgtaaagggtgttccaattggacaggctcttgatatagacattccccctccacggcccanaagatagccaaacaatccttatcctcggaagaccaggattggtaccacatcattacataatggagcaaaggatggaaaactcaatttagttgaatcttcacatgtttatcaagcactggacttgaaaaaagaaccacttgcagagaaacatgatttagacgaagggctaacaactgtaaaagaaaataatgatgagaaccacgctaagttttactc

SEQ ID NO: 8577 - DNA, 488 bp, Glycine max
  Clone ID: jC-gmle01810033c08d1
tttaatttcttttctttttctttttgtttttatatgttatttgggatctagttgcatttatggatttatggtttcacacaacatattattgtaagatattggattatttctgtcaaggaatccaaaatggcattctaatcgaactttttgaacgtgtgcaactgtaacaatcattctggagtaggcaacaacataaaacatttggcctcgtgctgagatgacaagctatcttcaggcctagagaacggacagcctgagaccagtatgatatccagacactggggatctcatgggtgacccaagggtcagataaagcatcaacccatgggcgagcaaatctatcttgcctgtcaagtgcccaagaccggtatctctctccaggctgattgaagaaggactgccttctaattccacactgttcacgccttccactgcatatagcaggacggatggggaacctttcttgatgacgaacaagatcatacctt

SEQ ID NO: 8578 - DNA, 537 bp, Glycine max
  Clone ID: jC-gmle01810033c09a2
accaaccaagaaactttctgcagctgcaccaccgtttaatccatcgacagttccagtttttggctctgttactgttccaggtttcaaagatcatggtggtattttgcctccaccagtaaatatttctcctttgctttcagtcagtccccgaagatcttcacatcagtctgctactgctagggttccatatggtccacgaatatctggtggctataacagatatgggaaccgtgttccacggaataaaactgtattcctctcaggtgaaccttcccctgatggaaaccccaatagccctcctagaataatgaacccacatgccacagagttcgtacctggccaacattgggtacctaatggctatgttgcgcctcctaatggatatatggcttctccaaatggaattccagcctctcctaatagttttcccccagtgtctcacaatggtatgcctgtgtcacccagtggatatcctgcttcactaaatggtatccaagtgaatcaaaatgggtttgcaacatcttccaccagttcaac

SEQ ID NO: 8579 - DNA, 579 bp, Glycine max
  Clone ID: jC-gmle01810033c09d1
gacctcaaagctagaattccattttgaataagcaaaagaaaagtagcaggaaaacattaaaacaatttaagacattgccaattagctacgcaacaaagccttctccttctgtggccatggagcctccttcacgaaacacgctataaatttgaacccccatagaaaagtatgtaccaagctgtgtgaaacctttcagaaatcctcataagtaatcagttctgcctcaaagacctcctcagtccagtcaatccttggcatcacttttaggtatctcgacaggcatcttgcaaggaaccagttcctatctttttttttaatcattttaataagaaaaatttatcattccttaactcgtgacttcaatcatatcagcttcactgtcactgtaatctccccaacacttgcttggctttttctcatctactgcatccttgttggttactttatcatctttactacaaccagatgggaggctgagatcttcctgcttttcttctacttcaggattttcactgctggcagataattctttaggattttggtcaacatgcttcttttcagaacttacatctgttgaaa

SEQ ID NO: 8580 - DNA, 499 bp, Glycine max
  Clone ID: jC-gmle01810033c10d1
ctgaatatgtctgcttcttttctatggaaacccttttgacttttccaaagtgtacatgatttacttcaggtttactatgttgctggagagaatcttaaacggatacagtgggaaaaagtttgaagttcaaatcccatagctcaaaagtaccattaacgaaatcataatgtgctcctttcaaagccagagttttgttaacaactgcatctctaacaaatggatatgttaataggttaccaagtgatacgttcacagcttccttctcacagttagtacattgctctgagaaacttaagtcacttggtcctgctttaaccttggactttgctggagtacaaatttggacccattgctctatgaattcacttgcagggggcccgtcatctgggatagacatgagcccctttatacctccacagcaactgtgtccaataactacaatattctccacctttaaatgcaatactgcatattcaatggcagccccagctcctgaata

SEQ ID NO: 8581 - DNA, 177 bp, Glycine max
  Clone ID: jC-gmle01810033c11d1
gggagataaagtgaaaatgcttgttcactttagtggcggaaggtactataccaactactttcctgagtacacgagtccgcagtccaatccgcgggagtcccccctacaatttgcactatctgtaactggcctgttccatcaacctccgcgaggcaaggacttatgtgaacaaccttt

SEQ ID NO: 8582 - DNA, 487 bp, Glycine max
  unsure at all n locations
  Clone ID: jC-gmle01810033c12d1
ggggggaaagaatgtactgcagacttgtattgatacaataatggaatatattatgttattggactttgcaggaagctgcaaatatattaaatgatgagaatgcgcacttgctttgcccttcaatgactatataagtaccccaaaagtagcacaagtgtagatttgctggatattcttgaaatgacaaaaagttcaaggctctctcatccctatattaggaccaaaaaaaggtttgtgttttttttttttaacaaagtgtcctcggcatgcacaagcttatgcaatccgttgaaggttatatgccaccatatcctcaagggctaaacgaaacacactctgaggtaggcattggagactttgaattgcaagatcagctttctcttttgctaactcttgngctctttcaatgcccccacaactcttgaccaaattgatggcctcgtcaagcgaaccaacctcactgaattcagactcaatgatatccctc

SEQ ID NO: 8583 - DNA, 601 bp, Glycine max
  Clone ID: jC-gmle01810033d01a2
cttaactccaattctagaataaaattcctattcttcttctcatttcaactctttgcaattgcgatctttcattccttttttttactcttggtaagcgtagttcggtgttggagaaccagcttccagttccagaatactgctgaacagaggtcggcttcgctttattgagactcagttgtgtttctactaggttatcttctctgaattgcaaatgaatgatcgttgaaaaaccatgaagaaggtgaggagaaagatcggcaagtatgaggtgggccggactattggcgaaggcaccttcgccaaggttaagttcgcaagaaactcggagacaggggagagcgtggctattaaagtcatggctaagaccaccattctccagcacagaatggctgaacagattaaaagagagatatccattatgaagattgtcaggcatcctaatatagttagattgcacgaagttttggctagccagaccaagatctacataatccttgaatttgtaatgggaggggaactatatgataaaattggtcagctgggagagctttttgaaatgaatctaggcactactttcacaacttatagacgcagttgatca

SEQ ID NO: 8584 - DNA, 423 bp, Glycine max
  Clone ID: jC-gmle01810033d01d1
gaaaaacaatatcatcgtttcttttctgttattccttagtatatatttctgccccaaccaaataatggattgttttcgtataccattgtgggggtagatttgctacaagatgcattgcaataggttttttacttccttcttccaagattattaagccatgttgtaagttgacagcgtatgctgtgcattgtgatagctagaagaagcatgctaactttttagtatgttcggggaccagctgaagctttcagcctttcagtgctcttctaattagatttgcatcatacccgcaagaattggattataaagtcatttgcttgcgcagattagaatttggcatagtccctgccggtctccaaataatgtttcctagtttgccacaaaaattcttgtaaaacttgtggtagtcaaaagtatccccag

SEQ ID NO: 8585 - DNA, 568 bp, Glycine max
  Clone ID: jC-gmle01810033d02a2
gcccactgatgtgcctgatacaggtttgctttgtgatctcctctggtcagacccaagcaaagaggtccaaggttggggaatgaatgacaggggagtttcatatacatttggtgctgataaggtctcagagtttcttcagaaacatgatttggatcttatttgtcgtgctcatcaggtggtggaggatgggtacgagttctttgctaaccggcagcttgtaacaatattttcagcacctaattattgtggagagtttgacaatgctggcgctatgatgagtgttgatgagacactaatgtgctctttccaaatattaaagccagctgataaaaaagcaaagctcaactttggaagtactactactactaagccaggaaactctccagcaggcataaagtccttcctgggtacaaaagtatgaagttaattttggtgaaattgatgccacaaccgtcagcttggtcttgaagatgtaatagttgaagaaaaggaaagtagagttccatttaatcatgatattttggaattggtaaaacaaagggaaacaccatcatgaactatgtagact

SEQ ID NO: 8586 - DNA, 399 bp, Glycine max
  Clone ID: jC-gmle01810033d02d1
ttttttttttttttttttaatttttttttttttttttttttttcctttgtgattttgggacatattctactcgaccaaacaatggaaaaaagcacacaaaacacaagccgatagatacgccacagcacgcaaaccaaaaaaatgacaaagacctactcccaacactcaaaaccaaagcaaaacagggacagcctccgcaccccaaagagcgaactagaacaaaagaaaaaccacactctcactggccggggcccgggtttgcctctacccttgcaacgcctaaatattaacaggaaccaggaccccccaaaaaataagaggaacaagtccctttccaacacaaatgagaagggggcggaatcaccaccaccaaaataaacttggagccgttgtccccac

SEQ ID NO: 8587 - DNA, 611 bp, Glycine max
  Clone ID: jC-gmle01810033d03a2
agccatgaagatcgttcggagagacctagtacctaatggacctggcagcgttaagatggtggcagtggattcggatgatctctggtttgcgtataacttgatagctcccggagactctgtcatggccgttactgtcaggaaggttctaagagaagctgctaatggcggacgggaagcagaacgcgtcaagctcaaattggaaattaaagtcgaagagctttctgattatgacaaagaaggttctattttgcgtgttcgtggaaagaacattttggagaatgaatatgtcaagattggagcatttcatactttagaactcgaactgcagcggccgtttgtgctcagaaaggatgtttgggattctttggctttggaggtactacagcaggcctccgatcctggtgcaagtgctgatctagcagtggtgttgatgcaagaaggattagcccatatcctccttgttggtagaagtatgactggtactcgttcgcggatagaaacatcaattcctcgcaaacatgggcctgcaattgctggttatgagatagctttggatagttctttcagatggttttgcagctttcttgaacatatagatttcatgtgggtcg

SEQ ID NO: 8588 - DNA, 533 bp, Glycine max
  Clone ID: jC-gmle01810033d03d1
gctgctcgaattattccggtcacagctactgtcggggccgccttttttttttttttttaggggaaattacaaagatatttaaccctaagaagtctgatgtatctatgaattacactacattggggttgaatacaagaccgtggattctcaggacttgtgcacttgaacatcagctgagtatttaagaatagtaaaaaacagagagagccatggccaacattaacatgcttgaccaacattgtccatcacatctcaatgtcttcaagatcagggagaggaaaccgaaaaatcgcagcaatgccacttatctgggctaggtgttcttcagagacatgcatggacgaaaatacatggacagagccccctgaatccttaacagagttgaccaagttaacatacttttttcttgtggctatatctgaattgctgaaaagctgattcgtaatgagaagcatttgtacagctagtcgctcattggcgacctcaacatgtttcattccataacaagcacgtgatggatcatttgcaagcat

SEQ ID NO: 8589 - DNA, 639 bp, Glycine max
  unsure at all n locations
  Clone ID: jC-gmle01810033d04a2
cgttttaccgttttgcattgttgaattgaaggtttttgcgactgagagcttcttcgtgttctctttttttgcatgttcgtttttctcgactagatttgatggagtgcgtttctctgtgatctcgaggggaattcggcgatgtgtgagctaattcggtgcctggtgtttgattctggtttcgcttttgcgcatttgtttgctagagttatatgaaatgtttgattggaacgacgaagagctagctaacataatatggggtgaaggaggtgagagtgatgatcatattgtgccttatccagaggtaaatgaagatgttagcaacaaaaaagaatggaatcaagaagctgctgcgactaagctcactgagctgaagagaccggaggctaaaactgattttcatgaaagaaagctaggaagcagctccaaccttgataatagtggagaactacctacctcaggatatggaacaaatgcatggcctgacttggctttatccagttcagctaaaattgatcatggttccctgggtactgaagtatctaataatttaagtgaacttagcanatngagttcatcaagagaagaaactcacaacatgagnagcatgctgaattttccaaatgctcatgaaggaaagag

SEQ ID NO: 8590 - DNA, 413 bp, Glycine max
  Clone ID: jC-gmle01810033d04d1
ccgcagaaacccagaacatacttaaattcaaattaaaaatcgctagtttatgtctgaatctcaaataatgatagacataacatgaattatgatgaggggtaggtaggtatggcaagtggcacatatcgaaatacaacaccaactttaaagcctgggctaagtcagtcaggcaaagacttaaaatttgacatctgataactggctttgcgagacacttttgttgcaggtatgattaaaacaacatagcactcacaaccttaagtatggccagatactgatatacatactctgacatgttgtaaaacagcagaaacactaataatactgataacatgcatgcataaaactggatcccaggattctacagcgatagtggcgcttgcttatgatccgaatggagatttccggacaac

SEQ ID NO: 8591 - DNA, 306 bp, Glycine max
  Clone ID: jC-gmle01810033d05a2
tggacgggtggtaacttgcctgcccaacaccaagatactggaaagagagtccaattgtctgacaagtacttgaacgaggcctggactgggaaatgctaactacgatgctgtgaacagaggaactctctcacaatcttgaatcggaggcagaggcaacgtgtaccgtaaatgtgtacgtgactgagagatgtgctgacccacgctatcaaagttgagatgggactctgcgttgacatgcttagaattctgactggcttatgggcatagagaatatgccgagctggagacgataacactatattgatg

SEQ ID NO: 8592 - DNA, 305 bp, Glycine max
  Clone ID: jC-gmle01810033d05d1
gaaaaatatagtaaaatcatctcaaacttggcatcttctctttgcacctaagacattgagaattctaagaatgttacacgcaagtcccatcacaacttctagcacttggatcagcacaaccttcaggaacagaaatatttacttgccaagtttgctttgcctccaattcaagattggaagaaagttcccctgttaatagcatcctcgttagcatttccaagtgcagcctcgttcaagtacttgtcagccaattggactctcttgacattctcttgttcttggacaagcatgttaccatacgtgaa

SEQ ID NO: 8593 - DNA, 561 bp, Glycine max
  Clone ID: jC-gmle01810033d06a2
gttgtagtgaatattagtgttgcaattgcaaattggatctctggtgctttttttccccctttctttttcctattatgtaggttaagtcttacctcctaagctttagaggagttaactgggaactgtgtttctctcaaacatgattagaaagcttcatctgcaacttacaggcttgaaatagatgttttgggcctctgaagatttgattaattgttatttgttatttttaagatgttttgattaatttattggccacgttctctacctacttgtcattttgaatttaataattcatcggatcctgaatttccaacttgtgggatggacatggacccacatgcctatctgttttggatttgagtgagaaatgagctgtcattaacaaaaaaaatcatgatattcagagatcctttgaatctgaattaacactaagttccatctcatgcatcacgaggtcaaagttacgtatgaagaataacttattatacaattaccagttgatattcctagttgaatggtgctatcacttttaggaggtccctacatcttacgtacatttcc

SEQ ID NO: 8594 - DNA, 448 bp, Glycine max
  Clone ID: jC-gmle01810033d06d1
agggttaatatattgaaattgatgattaaatacaagctttaaatccaagaatacaaacaacaaattatttccttcctccaactcccaatacaaacttttatagcagacatgagattattccataaaataaaaatttgatacaaacttacaagtgtctatatggcttcataggcatctgctgcaggggctgggggagcatcagctagagcagataacacaacaaaggccccaaataagattgtgataatggcagtgaaattgacaagcaaagccttagaaccatatttgtccaatcctgagttctcaaggaaagtgagcttttccagaaacccaagagcagcagtgcccacaggcaagacaaattcaaacaggccaaatagcgcgtgccaaggaagtgaggcccgtttaatggctggagtcccaccagggaagaaaaagatcacaaacc

SEQ ID NO: 8595 - DNA, 531 bp, Glycine max
  Clone ID: jC-gmle01810033d07a2
caaaaaaatgggtggtttagctagcaatcttcctctaattgttatggtgggtctgcaaattcattatgcagcacttgctatattcacaagagccgctttgttagatggattgagtacgacggtctttgtagtgtacaggcaaggcatagccactttggctttggcgcctatgtttttctctcctaagcggagacaatcagtgaaagattctttgggattcaggagcttctttttgatgtttgtgaccgctcttgttggagtcacagcaaatcagaatgcatactttaaaggtttattttatgcatcctctactgcagctaccgctatgagtaatctgataccagcattaacgtttgtaattgcggcaattgcgggatttgagaaagttgacataagcttaagaagcacggccaagatattagggacagtttgttgcgtcgctggagccttaaccatggctttggtcaaaggacagaagctgttacacacagagttccttccttctatacatcttactggcagtgaaggtga

SEQ ID NO: 8596 - DNA, 400 bp, Glycine max
  Clone ID: jC-gmle01810033d07d1
ggaaggaaacaaaatttaattcatatatgggcttctcctaagacatattatcacttttacataattaccattactccaagttcaggccatgagcttgaatctattttcacactctatagtgagaaattttggtgaagggaactaggccaagattgcttaagctggaacttgttccatgtatcagtttcttcaatgatgcaatgatcaagacttcaccaaaacttctatatatagatattggttcaatcatcatgcctggctgctccttgctatctgctgctattacatgtaaggacaatatgtatgacagaaggggttgcatcaaagctatcctactacttagatcgtgatgatctggtgggctcgatgagtgtgctgcacgctctggtttaatgtcagt

SEQ ID NO: 8597 - DNA, 565 bp, Glycine max
  unsure at all n locations
  Clone ID: jC-gmle01810033d08a2
caaaaaaatgggtggtttagctagcaatcttcctctaattgttatggtgggtctgcaaattcattatgcagcacttgctatattcacaagagccgctttgttagatggattgagtacgactgtctttgtagtgtacaggcaaggcatagccactttggctgtggcgcctatgtttttctctgctaagcggagacaatcagagaaagattctttgggattcaggagcttctttttgatgtttgtgaccgctcttgttggagtcacagcaaatcagaatgcatactttaaaggtttattttatgcatcctctactgcagctaccgctatgagtaatctgataccagcattaacgtttgtaattgcggcaattgcgggatttgagaaagttgacataagcttaagaagcacggccaagatattagggacagtttgttgcgtcgctggagccttaaccatggctntggtcataggacagaagctgttacacacagaggttcctttcttctatacatcttactggcagtgaaggtgacgattggctgctgtgatgtctattgctcttagc

SEQ ID NO: 8598 - DNA, 411 bp, Glycine max
  Clone ID: jC-gmle01810033d08d1
tcgtcctttttttttttttttggaaggacacatactttaattcatatatggtctgtcctaagacatattatcactgtcacataattaccattactcctagttcaggccatgagcttgaatttattttcacactctatagtgagaaatattggtgaagggaactaggccaagtttgcttaagctgcgacttgttccatgtaccggtttcttcaatgatgcattgatcaagacttcaccaaaacttctatatatctatattggttcaatgatcttgcctggctgctccttgctatcaagctgcttggacatggacggagctttgatatgacagatagggtggcatcaaagctatcgtactacttagaccgtgatgatctggtgagctcgaagagggtagtgccgtctctggtt

SEQ ID NO: 8599 - DNA, 484 bp, Glycine max
  Clone ID: jC-gmle01810033d09a2
ctttctctctctaaagctgaaacttggacactgcaacaagacaagcactcaaagtgcttcgaattcgtcactgatcacgtttctgcaatgcaccgcgtgggtagtgcaagtaatggaaacaattcaactcgccctcgtgaggagaagagattaacctacgtgtggaatgattctgatgacataaagcattgtgcaggcataaattgtctggctctacttacgtctgcggcatctgatgggtctgattatctcttcaccggcagccgtgatggcaggttaaaacgatgggcactaggtgtggatagagcaacatgcttggctacttttgaatctcatgtcgattgggttaatgatgctgttcttgttgcagagtacacttgtttcttgttcttcagatacaacccttaagacatggaatgccttgtcctttggaacctgcactaggactctccggcaacactctgactatgttacttgcctcaca

SEQ ID NO: 8600 - DNA, 390 bp, Glycine max
  Clone ID: jC-gmle01810033d09d1
atggaaacccggtttacttttttcaaagtgtcatgattttactttatgtttactatgttgatggggagaaaaataaacgggagcaacaggaaaaaagttcgaagcaaaaatcccatagctcaaaagtaccattacccaaatcgggatgtgctcctttcagagccagagttttgctaacgcccccatctataacaaaaggctatgttaataggggaccaagtgatacccacacagggggcttctcccagaccgtacaaggctctgagagactcaagtcactcccccctgctataaccttggactttgcccgagtacgggggcggacccattgctctatgaaaacactggctttggtccccccaaaagggaccgacatgagccccattatac

SEQ ID NO: 8601 - DNA, 499 bp, Glycine max
  Clone ID: jC-gmle01810033d10d1
ctgaatatgtctgcttcttttctatggaaacccttttgacttttccaaagtgtacatgatttacttcaggtttactatgttgctggagagaatcttaaacggatacagtgggaaaaagtttgaagttcaaatcccatagctcaaaagtaccattaacgaaatcataatgtgctcctttcaaagccagagttttgttaacaactccatctctaacaaatggatatgttaataggttaccaagtgatacgttcacagcttccttctcacagttagtacattgctctgagaaacttaagtcacttggtcctgctttaaccttggactttgctggagtacaaatttggacccattgctctatgaattcacttgcagtggtcccgtcatctgggatagacatgagcccctttatacctccacagcaactgtgtccaataactacaatattctccacctttaaatgcaatactgcatattcaatggcagccccagctcctgaata

SEQ ID NO: 8602 - DNA, 403 bp, Glycine max
  Clone ID: jC-gmle01810033d11d1
aaaataaccctgtaaaatctatatcgccttcaatagaagggtagaaggttttccgaggaaagaatatcgtttaagattccctttccctgttactatttctagttgccgtgtatatctttatccatgaaatatataagaaatgagagcctgatttaaagagctgagctgaggaaacaataatagaacagaatacaacctaattaactaaccattacctaagcggtgcataggcgttcactaaactgaaaagggtgtatacaccatcatgagtaaggacaaaaaaaatcaagttatatagacacgaacatcctcttgggatttggctaacaggttgtattggccagaagctgcaacaagcaaacaatcaagcaatcaatttacttcttcccccacatgctgcatg

SEQ ID NO: 8603 - DNA, 230 bp, Glycine max
  Clone ID: jC-gmle01810033d12d1
cttcgtttcttttttttttttttttttttggggaaacaactcacactgtcgtttgccttttttatatgtggaaatacttaatagtacattgcaatttgtctagataaatgaggctggcctatcacccaaaaatttacaaatttggtgcacaatgttttgttcttacacactatatattgggcctcacaaaacgagatcttaagactataccttaagcttgtttctttaca

SEQ ID NO: 8604 - DNA, 589 bp, Glycine max
  unsure at all n locations
  Clone ID: jC-gmle01810033e01a2
ctcttgtgttgttgccttcatggccaagccagtgtccattgaggtatggaacccaagtggcaaatacagagttgttagcaccaaaccaatgcctggaactcgttggatcaatcttctcgttcaaaatgatgttcgccttgaaatatgtaccgagaagaaaacgattctgtcagttgaagacatcattgctttgattggtgataagtgtgatggagttattggacagctgactgaagactggggagaacagttgttctctactttgagcaaagccggaggcaaagctttcagtaacatggctgttggttataacaacgtggatgttgatgctgcaaacaagtatggtgttgctgttggaaatactcctggagtgctcactgagacaacagctgagttggcagcttcattgtctttggcagctgctagaaggatagttgaggcagatgagttcatgagggcaggattatatgatggatggctacctcatctatttgttggaaacttgctcaagggacanactgttggtgtaattggagctggtcgaattggatccgcttatgcaagaatgatggttgaggggttcaagatg

SEQ ID NO: 8605 - DNA, 528 bp, Glycine max
  unsure at all n locations
  Clone ID: jC-gmle01810033e01d1
agtgtagggacataaggtataacttcatttatgtttaattaatgtttgaaatactacaaacacatgatgctattattaacctgacagtctttatatgcacagtgccatcagcaccccacatacacaaaaaaaagaacagactagccacagagcccaactcaacagacaaaaattggtcatttgtgcaattgaaggcccttgtaggatagaaccatgtatgtttatagctttgaagttggcaaacccagggcttttgcattaacaatgcttggggatgcagctggtggttgagcattctcattgaggaatggttcaaccctattggcatcaaaccaaactgggtaccctttgatcttccccagcacgtttagagctgctagtgtagccattccctcacgagtccacttggaggcagatgcaatgtggggtaccacaatggcattcttcaactctgcaagcccgggtttcatgtagggctcttcctaaacacgtcaaggcctactcgaaacatcnggttctgttttaaat

SEQ ID NO: 8606 - DNA, 555 bp, Glycine max
  Clone ID: jC-gmle01810033e02a2
gtttggtggggaatcgcccttaacatgatcgcatattttgttgcttctcatgcagcaggggcgtgctggtacttgctggggatacaaagggcagccaagtgtctcaaagtgcagtgtgcgaaaacaagtggttgtggcatgaaaatcctgtcttgtcaaacgcctatatattacggaagcaacagtttgctagttagggataaggcaaggttggcttgggcagagaacagggaagtgagacacacatgcctaaatggtcctgacagctacaactatggagcttatagatggactgttcagcttgtcacaaacgataatcgattggaaaagatacttttccctatcttctggggcctaatgactctcagcacttttggaaacctagagagtacaactgaatggctagaagtagttttcaacatcattgtgctgaccagtggccttcttcttgtcactatgttgattggaaacatcaaggtatttttgcacgcaacaacgtcaaagaagcaagcaatgcaattgaagatgaggattattgaatggtggatgagaaaa

SEQ ID NO: 8607 - DNA, 240 bp, Glycine max
  Clone ID: jC-gmle01810033e02d1
aatctgagaccgatctatttacgtagatatgaggacttgttaaggcaacaattacaaacagcttttttatatccacatcaactactttaaagcgtgctttaattgtttatacgctaccaatactatcactcagaacaatgtaattcgacacctgtgtgccacatccatatatatcatgttctcaaaagtccaaatcatcctgattaggcttaggggaggctaacacagctgcgtagaggc

SEQ ID NO: 8608 - DNA, 537 bp, Glycine max
  unsure at all n locations
  Clone ID: jC-gmle01810033e03a2
gtctttgccaaaatcgcatcactcgtcgcccccaattcacattccctcccccaccccctttctctccaggatctctcctcgtaccaccgccacctcgaaccacccctccaaggcggaacaacctcgtcctcacgcaacaaatgcctcagactctcactctacctcgccaccttcctgttcctaacttacctactcttcctcctcctctactcctactgggcccacgcttcctccgccaagtactacgttgtcctcgactgcggcagcaccggcacccgcgtctacgtctaccgcgcctacgtgcgcttcaaccgccacaccactctgccaatcgccatcaccttcctgagaaacccctcccacaagaagcctcccaccggccgcgcctacgatcgaatcgaaaccgaacccggtatcgataaattagtaaacaacgtgtctggtttgaacaatgcactgaaacctttgctcaggtgggccaagaagcagataccagtgcgtgctcacaagtctacattnntgttcctttatgccact

SEQ ID NO: 8609 - DNA, 477 bp, Glycine max
  Clone ID: jC-gmle01810033e03d1
gtgctatgtaacaacttctccgtgatgttcatcttttctaattgattttccaactcatcatgagtcacctatgaaacaataagacattctctataataatggcagttaatgagtctaaagaatggtataggaacagtctcaatgttatgaaatacatcctttcttctgcttgttagtcttagatgcttgacttagcttctgaagggttagtggcaccagaaaaactaaatcgctgaggcagaacatgctgacatcaagaagccactacgggcgagatgagccgatgcctagattgtgtttgtttgtgctatgcaactcgtggagcaatccagtttagaagtgatctccaggagatgcaaattcattaatcaattgatctggcttcacctttagctacagtcatctccatgacaaaaatctcaatgttttcagaagacattgccttaaaccttcacggcttcaccagatgaacttcag

SEQ ID NO: 8610 - DNA, 352 bp, Glycine max
  unsure at all n locations
  Clone ID: jC-gmle01810033e04a2
gagttgtgtacttaaccataaacaaaaatagtctccaagactataaaaacattacattttagacaaattagtcttccacttcatcgtccgtcaacacctactgtaactgctggtgttgctgcctaacaagtatcatattcactgcanacatcttagtaggagtagctattgacgaacaactccttcttggcttgctcggattcaccctcaccagtgtacttcccaagctgagcgagcgagttggacttggcacggaatgcgagtgcatgttgagctgccttcacgttgtctgggcagtctccccatgtctccaaggcagtgttatggcgacccttgtaagttccaacgaata

SEQ ID NO: 8611 - DNA, 208 bp, Glycine max
  Clone ID: jC-gmle01810033e04d1
tttgtttgttctgtctttttttttttttttttttttttttttttttttttttttttgggggcttcttgggggtttttgtctacttattaggaaagggggggacaaccaaacacaaaaatagacctcaagaaggccacaacccctccgaaagagggggagacccggcgcgaggggggcctacaccccaaaaaaaaaaatcgcccggggg

SEQ ID NO: 8612 - DNA, 591 bp, Glycine max
  unsure at all n locations
  Clone ID: jC-gmle01810033e05a2
atcaagaacctgcaggctttgaatgctcagcagcagtctgagtatgatgagtctgtgatggagatgcagcaagagatcaccgagctcaggctcatgggcgacgctcgcgccgagaccattaccttgctcgaggtttccattgaagacatcaagaagcgcgctcttgccgctgagcaggacaatcgcaccaccatcgactctatgcttcttacccagcgtcagctccaagaccagaacgaacagctcgcagctgctctcaagaaacgcaacgccgatgcccttgctgccatccaagagatgaaggtaagacgcgttgaggtgaagacacagccactcgacctcaaccgtgttgttgccggcaaggtcaccaagaccagcgagaaggtcaagatcggaaagaagggcaagaagaaggtcagcaagcgtcaatgggactctggcttcggcgtcgatgagaacgtcgaagacgctgatgagctcaatggcgagggaccagtcgccgcgtgattcccttacttttnctttatggcggagcangagatgtatatgcatacacacatttactttcgcgttgcaagcccgcatgtttac

SEQ ID NO: 8613 - DNA, 530 bp, Glycine max
  Clone ID: jC-gmle01810033e05d1
caaagaacataaacttgctacctattaccaaatagctgccttactacctatcctttccaacgatcacaccctacagtcttcagcctaaaagccaacccgaagaagaaccaaaggaaccaaaggaaccaaaggaaacaagcaaagggaaacaccacgctatgcagatacccaaaacattttctctctcatccatcctacctgaatcatcgatttcacaccagagataacaagactagaaaagggtcgtttcgtcatgtttttcgtatgtaatgatggccgtccgcgtgtctcctaataagttccagaatgtaccacaatctttgagggagtccaaagtgaaaagttggcaataactgttttgatcccgaatgtgtaggggaggaagtaaaacatggcggcttgacagcggcgaagtaaatgtgtgtatgcatatacatctcctgctccgccaataaagaaaagtaagggaatcacgcggcgactggtccctcgccattgagctcaatagcgtcttcgacgttctcatcgac

SEQ ID NO: 8614 - DNA, 614 bp, Glycine max
  unsure at all n locations
  Clone ID: jC-gmle01810033e06a2
gacgatctcgccattatgctggcactaggtatttgaggcgaggtgtaaatgacaagggtagagtagctaatgatgtggagacagaacaaattgtatttgaggatgttcctgaaggtcttccagtccaaatatgctctgttgtccagaatcggggttcaatccctctcttctggtcacaggaaacttcacgtctaaatcttaagccggatattatattgtcaaagaaagatcagaattatgaagccactagacttcactttgaaaatcttgtcaaaagatacgggcatcctgtaataattttgaatttgattaagtcacacgagaggaaacctcgagagtccatacttcgttctgagtttggtaaggctattgatttcattaacaaagatttatcacaggagaacaggttgaggtttcttcattgggatcttaaacattttcagagcaaagcgacaaatgttntgctacttctgggaaaagtggctgcatatgctttgacagtaacaggttttttatattgtcaagtgccaccaactcctagacctgaagactgtataaaatgtccatctattagctttcatccacaagacaagctgatgtcgacaacaaagatg

SEQ ID NO: 8615 - DNA, 526 bp, Glycine max
  Clone ID: jC-gmle01810033e06d1
aaaacataaatcaccgctagtttgacagcgggagagaattacacattacaagaagcaaaattatttaaaagaattaattatttgcaattctagaagtggagctcagacatacagggtaacatacatatttacaaatgcacctaatatggtcatgaactgatgaaagaaaaagtaagacaataagctccaaagctgaaaagaaaaaaacaattttacaacagcttgctatatactctgtcctattatacctcaagatttgattgagattttcacgacagaattaatgattcaagtcaataccaagaaagccggtaggatttcttctgcgaacgatcggcaccttacagagaagcctacttgaattgaaagcctgttaattcatttgtcctgccccgtctgtatcatatgcttagctcattctagactcttcttctattcaggatctttcgggcaagccaagtcaattgaataaatttacatcatatatatgaatgcaaaggaccattctatgtgaaaattcaattgc

SEQ ID NO: 8616 - DNA, 565 bp, Glycine max
  unsure at all n locations
  Clone ID: jC-gmle01810033e07a2
caaaatattgcagaatcaaaagtagctctagtatatggtcaaatgaatgaaccgcccggagctcgtatgagagttggtttaactgccctgactatggcggaatattttcgagatgtcaatgaacaagatgtacttctatttatcgacaatatctttcgcttcgtccaagcaggatctgaagtatctgccttattgggtcgaatgccttctgctgtgggttatcaacccactcttagtactgaaatgggttctttacaagaaagaatcacttctaccaaagaggggtccataacttctattcaagcagtttatgtacccgcagacgatttaaccgatcctgcgcctgctacgacatttgcacatttagatgctactactgtactatcaagaggattagcggccaaaggtatctatccagcagtagatcctttagattcaacctcaactatgctccaacctcgaatcggtggtgaagaacattatgagactgcgcanagagttaaacaaactntacaacgttacanagaacttcaagacattatagctatccttggcttggacgaat

SEQ ID NO: 8617 - DNA, 490 bp, Glycine max
  Clone ID: jC-gmle01810033e07d1
aggtattccgatattcggacgcatcaacttgttatgaaatcacattgatagcctctactcgtgtcctagctcgtctaagagctagatttgcctcaattgttggtctattgccttccgccttattcaaattagcttctgctatttcaagagtttgctgtgcttcttgtggatcaatgtcactacccttttccgcatcattgactaaaacagtgatctcattattggctattctagcaaaaccgcccatcagagccatcgttaaccattggtctttaagaagacgtattgtcaaaatacctatatctacggctgtggcaataggcgcatgatttggtaatactacaatttgcccgctattagtagataaaatgatttccttcacttgcgaatcccaaacagttcgattgggggtcagtacacaaagatttaaagtcatttcttcaaattgctcttcatttctaagttcgtagctttcgcagtagcttcatcg

SEQ ID NO: 8618 - DNA, 561 bp, Glycine max
  Clone ID: jC-gmle01810033e08a2
gaaaatgtgggtcatggtatcattttgtcaataggggccctccgaaaattgcaacatgccacattaatatttttgtgttggctgtttcttctaagttagttactgtttcaaacataggccacgtaagtgaaattctctgttcattctatgggattaagaaactatttttatgtgaccaagaatctggagtctcttcttcatcggtttggcattgaagaagaccttttgtgattggaaatcaagtaaatcaatggggagttcttgtgggtctggtaaacatcgtgggggcatggtgatcattttgttttgagctcttttagtcctcgcagaggtgccataaagtggttgctgatggggaaacactaaccttgtcaccgtgcagataaattttcttcccactttactgtgatatgatctctgtggaaactttaaattcttaagtggtctactttcatacaacagcctccacgattgtgagttttgtacagcaggccacatttgtgggtgctagtacaaacccaccaagatgatgttgccactagcaggttactgtggaaattt

SEQ ID NO: 8619 - DNA, 418 bp, Glycine max
  Clone ID: jC-gmle01810033e08d1
cataacataattaatttattaattcaatggttcaactattatgctaataacctaaaagtacataaatcctgtatgtgtggaccattaatttgtaacggtacagataacctgctagggggccaaagaccactcaaatgacattatgttgtaactgctaggaattgtgtccacataagacagaccacaaacaagaatcgccgtcaaacattaagccacggaagaaactaatttacaacagacgagcaaacgaagaagtgcattcaaatgaaaaggggaaagatagtccaacttgggggggggggaatttaaagttttgttctgcattaaagaaatttttcacttgcatgaacccaggaatcaggacgcaacaggacataggttcaaacggagatatcatgaaattgccattgtggaaaca

SEQ ID NO: 8620 - DNA, 657 bp, Glycine max
  unsure at all n locations
  Clone ID: jC-gmle01810033e09a2
agggtcacctgttaaacaatctcctggtgtccttgttgactcacagcaaccagacctagctttgcaactatgatgaggtattgttgtcatggtatggatatttccacttgaattggactggtcatgaaatttggagctcctgtaatcgaatgttgaattttgatccttgaaggtgtgcataataaatgtgaaaatgccaaagtctacccggattggaatttagcacaaggtagtcctgagtcgaaatgacagtgctggagacttcggtggatttaacagaaataacttcaggacttaccatagtttcctgatgaggattaccgaatccatggaccatgtctctgttaacctagggttgaagttgtagaaaaagtcggcaagttgattgattatattggtagctggtaaactgcaaaatattttgttgatgccttgtatgtatattgtttacaaatttgattaaatttggttgcctagatatttcattccattgacgactacttgtgtccgaccccacctagtgggataaggcgttgntgttgttgttgttggtgtgttgncgacgactacttgtgtatctggatggtggtagggcatcacttctaatcatgctattctatttgaacactagccatcatgaggatattnttttttttt

SEQ ID NO: 8621 - DNA, 540 bp, Glycine max
  Clone ID: jC-gmle01810033e09d1
gtctcggtaaatagaatatatatagaaaatagcatcatgtgctatcgaactacaaatccaagagaatgccatgacataacgttagaacttttttaatgtagcattgataatttcaaagccctcaccctgtcaatttggatcaccaagtttctaaacagttgcctcaattctaggcttcatccaaccacgccagtgtgacatgtttagttggcaaccgattttgtcttacaagttcaattgctccattgttgaccattatttgctttccaacaagttcaatgagccaaactgttttgtaaatgtggcttataacaatcagccagagggcaagcagcaaacaaaggaaatcaacaagcaaattcttcaccaccttggagatataaactttcatggtttcgtcattctcaaacagcttctgttactgccctgaatcttcaggatccaattgacttacagtgatggcatgcttttgacagatcggaagaaacacaaatgaaaaagatctaaatacatcagaaagttgcatagcagaaaccaatt

SEQ ID NO: 8622 - DNA, 540 bp, Glycine max
  unsure at all n locations
  Clone ID: jC-gmle01810033e10d1
gtctcggtaaatagaatatatatagaaaatagcatcatgtgctatcgaactacaaatccaagagaatgccatgacataacgttagaacttttttaatgtagcattgataatttcaaagccctcaccctgtcaatttggatcaccaagtttctaaacagttgcctcaattctaggcttcatccaaccacgccagtgtgacatgtttagttggcaaccgattttgtcttacaagttcaattgctccattgttgaccattatttgctttccaacaagttcaatgagccaaactgttttgtaaatgtggcttataacaatcagccagagggcaagcagcaaacaaaggaaatcaacaagcaaattcttcaccaccttggagatataaactttcatggtttcgtcattctcaaacagcttctgttactgccctgaatcttcaggatccaattgacttacagtgatggcatgcttttgacagatcggaagaaacacaaatganaaagatctaaatacatcagaaaggtgcatagcagaaccaattt

SEQ ID NO: 8623 - DNA, 353 bp, Glycine max
  Clone ID: jC-gmle01810033e11d1
gtgccttgtgtccggtcccgggtcccgggtctacctgctcggcggccgcccttcttttttttttttaaaaaaaagggtaacgcagtcacatttttttaggtcactaccaaattgtggttgagatattcaattacgagcgatgtctgagaccttcttaagtcacaacactcaatgaaatgacgaggacgcacgcatcctctgccatactttaaagtatctggcggtgtccatgattctctctattactttcataggaaggccacattaatagtgaaccaagccactagcgggctcgacggtctccgctagctccaacagaatgacgagtgctaatcttttcaccagcatatttt

SEQ ID NO: 8624 - DNA, 397 bp, Glycine max
  Clone ID: jC-gmle01810033e12d1
atgcatagtgttcgtgacccgggtcccgggtctacctgctcggcggccgccctttttttttttttttgaatgaggccaaacccgttattcaatagaatagcaaaacacgttatacaagttgcaaattcctatgaacatagatatgaaggtaattaggtaaagtaaaccaagaaagccacctaaatcataacaagttactaattaaccccaataagaaaggagtataaatattctgctattaattgtttctcgtcacttgctttggagctaatatacacatttctcacaaagaattagtatggacattcttgtaattgtagctcaacactctcataacagaactagctagctcagttcttggaaccagaaagaggaggttggtgcagctgctgataca

SEQ ID NO: 8625 - DNA, 500 bp, Glycine max
  unsure at all n locations
  Clone ID: jC-gmle01810033f01a2
gacgaagtgaggaagtggatttctggtgttggtgttgacggcattgggaagaagcttgtgaactcaaaagatggacctccaacctttgagcagcccaagatgactctggagaagctcttgacgtatggtaacatgcttgtccaagaacaagagaatgtcaagagagtccaattggctgacaagtacttgaacgaggctgcacttggaaatgctaacgaggatgctattaacaggggaactttcttccaatcttgaattggaggcaaagcaaacttggcaagtaaatatttctgttcctgaaggttgtgctgatccaagtgctagaagttgtgatgggacttgcgtgtaacattcttagaattctcaatgtcttaggtgcaaagagaagatgccaagtttgagatgattttactatatttttcatattggactgtcttcctctataattttgagttaaagtgtccacttaaattgaatntggtgccttttccttttgtcct

SEQ ID NO: 8626 - DNA, 448 bp, Glycine max
  Clone ID: jC-gmle01810033f01d1
aggacaaaaggaaaaggcaccagattcaatttaagtggacactttaactcaaaattatagaggaagacagtccaatatgaaaaatatagtaaaatcatctcaaacttggcatcttctctttgcacctaagacattgagaattctaagaatgttacacgcaagtcccatcacaacttctagcacttggatcagcacaaccttcaggaacagaaatatttacttgccaagtttgctttgcctccaattcaagattggaagaaagttcccctgttaatagcatcctcgttagcatttccaagtgcagcctcgttcaagtacttgtcagccaattggactctcttgacattctcttgttcttggacaagcatgttaccatacgtcaagagcttctccagagtcatcttgggctgctcaaaggttggaggtccatcttttgagttcacaagct

SEQ ID NO: 8627 - DNA, 362 bp, Glycine max
  unsure at all n locations
  Clone ID: jC-gmle01810033f02d1
cctgtggttggattaaactcaagagcagtggattatcatcattatcacatatgatgaatcactattcaataggtgcataaactagatgaactggaatactaactgatgtacaacggaactgaatatagatgtcattccaacacactatgctgnggcatcaacttgttcttcaacagcctgtgatgctggcagaagggtgcacaaacaagtagctgataccgatcacattatcaacgggaactacggtatgccacaactttgaagcacggagccaaggagctgggaaagctgcatactgcctggagtatggatttgtccatgcatcatccattagcagtgctggtggacgatgggcgctctta

SEQ ID NO: 8628 - DNA, 600 bp, Glycine max
  Clone ID: jC-gmle01810033f03a2
cggctcgagcgcactgaacgaagatagaaaagagttttagcatcgtgattcgtgacctatcaatggcgcagacgacccatcccatggacatcgacgaccacacttacaccgccagtcctgacaagggcaaaagtgtcgtcttcgccggaaaccctcccgccgccggcaaggccattccgtgggtcgaaaaataccgccctcagtccctcgacgacgtcgctgctcaccgtgacattgtcgatacaattgataggctaaccactgagaacagattgccccatcttctgttgtatggccctcctggcacgggcaaaacatcaacgattcttgctgtggcacgcaaactgtatggttcacagtaccaaaatatgattttggagctcaatgcatccgatgatagaggaattgatgtcgtgcgccagcagattcaagattttgctagcactcagagcttatcatttggtgttaagtcctctgtaaaattggtattgttagatgaagcagatgccatgacaaaggatgcccaatttgcgctacgtagagtgattgagaaatatacaaaaagcactaggtttgcacttatctgtaatcatgtaaaca

SEQ ID NO: 8629 - DNA, 444 bp, Glycine max
  Clone ID: jC-gmle01810033f03d1
aaaacagaagatatctacttcagaattttggaaaggtacttgaagctttaaaactcatcttaagttaaaaaagattgacacagttactatctttacacaaattaagatccttccaatcccattatccgtagtgacatgcccaggaaatcaaacaagccaggccctagtagtatgtgaaagtaatttttcagaagtaggctatgtagcagctgcaaccagtgcagatctagcacgtgtaaaagaagcaataaccgatccaagctgaagcttatcgttgcacccaaaacttaatctgtactctatatctgccaaatcattcatcaactgtactcgcacagctgaaggcatcttaatcgtaaaaacaaacattgtcacttctgtgacaatatcaatcagggccaacccttttcttggcttcatttcatctaatcttttaaagctatc

SEQ ID NO: 8630 - DNA, 567 bp, Glycine max
  Clone ID: jC-gmle01810033f04a2
cggctcgagcgcactgaacgaagatagaaaagagttttagcatcgtgattcgtgacctatcaatggcgcagacgacccatcccatggacatcgacgaccacacttacaccgccagtcctgacaagggcaaaagtgtcgtcttcgccggaaaccctcccgccgccggcaaggccattccgtgggtcgaaaaataccgccctcagtccctcgacgacgtcgctgctcaccgtgacattgtcgatacaattgataggctaaccactgagaacagattgccccatcttctgttgtatggccctcctggcacgggcaaaacatcaacgattcttgctgtggcacgcaaactgtatggttcacagtaccaaaatatgattttggagctcaatgcatccgatgatagaggaattgatgtcgtgcgccagcagattcaagattttgctagcactcagagcttatcatttggtgttaagtcctctgtaaaattggtatttgtagatgaagcagatgccatgacaaaggatgcccaatttgcgctacgtagagtgagtgagaaatatacaaaaagca

SEQ ID NO: 8631 - DNA, 523 bp, Glycine max
  Clone ID: jC-gmle01810033f04d1
aaaacagaagatatctacttcagaattttggaaaggtacttgaaactttaaaactcatcttaagttaaaaaagattgacacagttactatctttacacaaattaagatccttccaatcccattatccgtagtgacatgcccaggaaatcaaacaagccaggccctagtagtatgtgaaagtaatttttcagaagtaggctatgtagcagctgcaaccagtgcagatctagcacgtgtaaaagaagcaataaccgatccaagctgaagcttatcgttgcacccaaaacttaatctgtactctatatctgccaaatcattcatcaactgtactcgcacagctgaaggcatcttaatcttaaaaacaaacattgtcacttctctgacaatatcaatcagggccaaccctttccttgtcttcatttcatctattcttttaaagctatctgcaaattgttcatttagaagccagtaagatattagctcaatgtcttttggcaatggatttccagtgcacaggtaaaca

SEQ ID NO: 8632 - DNA, 501 bp, Glycine max
  Clone ID: jC-gmle01810033f05a2
acagccttgaacttgaactatcgtgtcttcttggctttctctgttcaggatcaacatggatattgtatcacgagctttgctatttccgttggctatacttgtgctcatattaagcacaccttgctcaggtgcttttgggaagagtggaactaatgtgaaaacagctatttttctgtcccccaagtttgaacttggaccaggatcggtagccaataaatatgattatgacgctgattttccaagaggtcatatagcacttaagagtttcaatgctgaagtagttgatgaagcagggaaccctgtgcctcttcatgaaacttatctccaccactgggttgttgtaagatactatcaacctaaatatgcgacgacacacacaaactatgatggacataggatacttcacaactctgaccatatatttgcgaggaacagcggcttatgccagagagatactctaggacaatactatggccttggatctgaaacacgaggaacagg

SEQ ID NO: 8633 - DNA, 511 bp, Glycine max
  Clone ID: jC-gmle01810033f05d1
acaacaaacatgatatatatagtattacatatcacacaaccataataagcaagactggtttaagacaaacattacaaaccctcaccaatacaaataattgataatcacattactacaatccttaaacttgaaaatatgctctttgccggttcttgcgtgtgttgtcctattgctgccgaatatgagaagtatatgttccatcgatatgtatttctgtatttcttttaaccgtgatacatactgtgataccatcgatatgacactcaacttatatttgcatctcacaacttatctatcaatgaattatactatttatattcataaaaaatgaagaacgagaagaatatctgaagtgttggtgtggaagctgttctgccaccaataggtagaaaagccccattactccagtgtggccacggctgctgctgtagttagactctagagttatagtttcaccatcaattatctttacagaacctggttgaggataacatgtgctcattcctacaat

SEQ ID NO: 8634 - DNA, 512 bp, Glycine max
  unsure at all n locations
  Clone ID: jC-gmle01810033f06a2
gaacaatctatttgtgttgttgttggaatactgagctgagagtggtggagtcaggatatcatatcatgtgcactctctcactgccatgcctctcttattctcttcacactcacacttaccagtctggacgcttctctcccccttgttcttttatcttcacacctgatagacgctctcacagtcacttcctgactccatgctcctccctcagacagagagaaagagagagcaaaaagcaactaggcaagatcaacactgccccgtctgagtctggcttgaagcgcttgtttagtcccaataacaacaagaccgaagtcgaaggtgacgccgacgccgacgccgacgctgacctcgacttccaggatggaaccgccttgaagggcaccctcttggccggactcttgctcctcggtgttgatggcggntctgcctccgttggctatatctacaaggaccaagtcaattccttcttgaccacctctccgtcttcattgaggttatggtcctgctgg

SEQ ID NO: 8635 - DNA, 597 bp, Glycine max
  Clone ID: jC-gmle01810033f06d1
cctccttaaaatattactttctcttctaaatcgtccttaaagtaaacaaattatataagtaatccctcgagtattaaaaatcatgctaaatagtctttcaagcatcgaacaatccttcaaactagttcctggaagttagtaaaaaatatcaaagtagggattaaattgatgaacattcaaaataccttagggactacttatataatttcattacttcaaagactttagagaaagagtaatacttaaaagaccgaattgatggtttattcgtttcccaatctattcatgtggatttgtcttcattcccaaatgctgggttgtgtctactgtctagcggatctattcaatgtcctttatagcatcctttgcaagtcgtgtgacatatgcagcagctaatgcagtggccaacagtcccagccccagtgttagcaactgactgtttcctccaaatatattactaagttcagattcatcttgaattattgctcttccaaaagcaccagcactgacataagcccatgttcctggaagcatccccaaccaacttcccaatacatatggaataaacttaacagatgttaatccatataaataatt

SEQ ID NO: 8636 - DNA, 600 bp, Glycine max
  unsure at all n locations
  Clone ID: jC-gmle01810033f07a2
cggctcgagctttctctttctctccgacctagcgagaccgagcgatccgatcctaaccccgcgatgctccgccgcgcaaccacctccctcatctccggcgcctcccgccgccgcctctccaccgacgtgccggcgacgccggcggcggattccgtcttcgcggaggcgtggaagaaagtgagccccaacatcgacccgccgaagacgccgctggcgtacatgaagccccgaccacccactccttcgactctcccctccaaactcaccgtcaacttcgtcttgccctacgcttctcaattggccgcaaaagaggttgatatggtcattgtaccagcaacaactgggcagatgggtgttctcccaggacatgtagcaacaattgcagagttgaaacctggtgtcctatctgtacatgaagggaacgatgtgaccaagtactttgtcagcagtggctttgcattcatccatgcaaactctgtggctgatataatagctgttgaggccgtgccggtagaccgaattgatgtgaatctagtccagaagggtctccaagagttcactcagaaactggactcagccacaactganttggagaaagct

SEQ ID NO: 8637 - DNA, 527 bp, Glycine max
  Clone ID: jC-gmle01810033f07d1
aaaaaatgaaacttttgtttctaatttcaaggtcttgcccaacatccttgagctagattgaagctgctgaaatattattttatcaagtccactttcaacacagaaattcaggatgaaaatgttcttttagcagactttgattacaccgagacaaatcaatgccacacagtggggggaaattgacaaatgcgaaaggcgagactcaacactacagtacttattattagcctgaaagagcagagttgagagcgctatggacatcaaccccaatctgagcttcagctgtctccaaatcagttgcggctgagttcagtttctgagtagaactcttggagacccttctggactagattcacatcaattcggtctaccggcacggcctcaacagctattatatcagccacagagtttgcatggatgaatgcaaagccactgcttgcaaagtacttggtcacatggttcccttcatgtacagataggacaccaggtttcaactctgcaatggtgctacatgtcctgggagaaca

SEQ ID NO: 8638 - DNA, 498 bp, Glycine max
  Clone ID: jC-gmle01810033f08a2
tcaggattccttaaatgcaaagcttaatagaacaaaaactgaaaacccctggttcgtttttggtggctcatatgctggagcactcagtgcatggttccgtctcaagtttccccatttaacatgtggaagtctggcaagttctgcagctgttcttgctgtttataactgcacagaatatgatcaacagattggtgagtcagcaggtgctgtatgtaaagcagtattacaagaaactactcaactcattgagcacacacttgcatcctatggaaaggaactcatggcttcttttaatgcacatgatctcgataaagatggagactttatgtatctaattgctgatgctgcatgctgtagcatttccatatgcgcatcctgatgaggtttgcaagcctatggttgaagcacataatgctggagaggacttgggggatgctcatgcccaatacgttaaagagtactacattggaacctttggcgttaatgtgcacacttatg

SEQ ID NO: 8639 - DNA, 429 bp, Glycine max
  Clone ID: jC-gmle01810033f08d1
aaatatataatgatcatgaaggatgaaaggagtgtatactaatttattactttattcatttcagtgcgtgggttaacatactagtgatcatatataactgctgccttctgggcactcagatagccacaagtccatatgttctgcaatctgatgccttactttgagaactgcatcaggtgaggagcagttcttctcattaccttcaaggaccaaaggagattgaggacatcctcgaaaatcagtacactgggcacaattgctacatgtgatggtgtcggaaggcagatcaggagatgaagtttgcttggacgcatgatgccaaggatcctgtgagccatttgcaaatactatgttcgaaccagcgatttttgagcctccgatgtataaattaagggcatcaaccataggaaagatgccctctacaagata

SEQ ID NO: 8640 - DNA, 586 bp, Glycine max
  Clone ID: jC-gmle01810033f09a2
gcgatttgtttccttccatctccgccgtaccatgtcggaagcaccaccgcctccaactgccgatgcgtcaccgcctccgtactggtgctaccactgcgagaagcgcgtctccgtcgaaacgctcgcgaatctccccgacgtcgtctgcggcgagtgcaagaacggctttgtggaatccatgcccacgccgtcgcgctctcgctccccctccgcctcctccgacgacccctacttcggctcgcagttcctccaggtccttcgcctaatcgctcagtcggcgcgtgacgacgacgcgtcgcctccgccgccgccgagccgctctccggagaacgatttcctcaggatcgagctcggcggctgggacaacgacgaggagaacgaaaacgacgacgataacggcgacgaggagttcgaggaacacgaggaggcggaggatcgctccggcaacgaagatccgcacggaggagacgacgaggatctgagaagaaggaggcgcgagctacttcggcttcggattagggatttggcgactcgtacgaggagcatgcggaaccggatcttggatgggccgagaatctgatgggcc

SEQ ID NO: 8641 - DNA, 380 bp, Glycine max
  Clone ID: jC-gmle01810033f09d1
ggggtgttatttaaccatcttttgaaaccccaattccacccactaaaaaacccccacacaaacccccaacagccaacccgggaaaaaagctaagcccccaagacgaaaccgggaacacccccccccacccaaaaaaaaaccccaaacaccccaaaaaaaccccccacccggcccaaaagcccccaacaacctaaaaaaccccaacaaaaaaaacagcaaccccggcccacaccaacccaaaaaaccccccaaccccacaaaaaaaccgagaaaacccacaacccccccaacattatccccaacccggccaacacgaccaaccacaaacccaaaaggccgggaccccccggcgcagaaccaaacagaggcccccccccccc

SEQ ID NO: 8642 - DNA, 522 bp, Glycine max
  Clone ID: jC-gmle01810033f10d1
gagccactgttcatttatcactataacgaaatgcctcagcatcctaaactttctcaccaaatcatccttcagtgctttgaccttcgccagtcactacatagccaatcaccaacaggtgcggggcttggcgtccccgacttgacatagtactcgggcgcatcaccaaagttccaagctgaatacacttgaacccgcagttacaatggtagatctcgttttccatatgcaaattaccgatgcattctcatgtccatccctcaatcagtgccgtcgcccaatcgcatagtgctcagactcgagctgcgaaccttctgaatgtggcctatcgcctcaattagatgtgggacgaacagctagggattttccgtcgcacggaaatgtcccagaccaggcatcgtcttatgcatagcgccaggaatcttggcggctgattactgcgacatctcaggcgtgatggaccagtcgtacttgccggagagcatatgcacagggcaactctgcgtatcaatcgacgccacgcga

SEQ ID NO: 8643 - DNA, 270 bp, Glycine max
  Clone ID: jC-gmle01810033f11d1
ttcgttttttatttttatcttttttttttttttttttttttgattctttttttgatcttcttatttagtttccgttgatatttgatccacacaaggaaaagcacattgccattcgatggacattgcgggcaaaccgaaaacgaccgggtcgacagatggcaagacaatagagctccgggggaagggacgctgccaacggaagaggagaggccaggcgcaaaaaggaagagtcccctagaatggcagaggcaaacagagcttttgcacatt

SEQ ID NO: 8644 - DNA, 415 bp, Glycine max
  unsure at all n locations
  Clone ID: jC-gmle01810033f12d1
ntgctatgtgtctacattcccgggtcccgggtcgaccatactcggtggccgccctttttttttttttttgaatgaggccaaacccgttattcaatagaatagcaaaacacgttatacaagttgcaaattcctatgaacatagatatgacgggaattaggtaaagtaaaccaagaaagccacctaaatcataacaagttactagttaaccccaataagaaaggagtatgaatattctgctcttaattgttactcgtcacttgctttggagctaatatacacattgctcacaaagaattagtttggacattcttgtaattgtagctcaacactctcataacagaactagcttgcttagttcttggaaccaaaagtaagaggntggtgcaactgctgatacatagcagcaaggctact

SEQ ID NO: 8645 - DNA, 404 bp, Glycine max
  Clone ID: jC-gmle01810033g01a2
caaaagatggacctccaacctttgagcagcccaagatgactctggagaagctcttgacgtatggtaacatgcttgtccaagaacaagagaatgtcaagagagtccaattggctgacaagtacttgaacgaggctgcacttggaaatgctaacgaggatgctattaacaggggaactttcttccaatcttgaattggaggcaaagcaaacttggcaagtaaatatttctgttcctgaaggttgtgctgatccaagtgctagaagttgtgatgggacttgcgtgtaacattcttagaattctcaatgtcttaggtgcaaagagaagatgccaagtttgagatgattttactatatttttcatattggactgtcttcctctataattttgagttaaagtgtccactt

SEQ ID NO: 8646 - DNA, 404 bp, Glycine max
  Clone ID: jC-gmle01810033g01d1
aagtggacactttaactcaaaattatagaggaagacagtccaatatgaaaaatatagtaaaatcatctcaaacttggcatcttctctttgcacctaagacattgagaattctaagaatgttacacgcaagtcccatcacaacttctagcacttggatcagcacaaccttcaggaacagaaatatttacttgccaagtttgctttgcctccaattcaagattggaagaaagttcccctgttaatagcatcctcgttagcatttccaagtgcagcctcgttcaagtacttgtcagccaattggactctcttgacattctcttgttcttggacaagcatgttaccatacgtcaagagcttctccagagtcatcttgggctgctcaaaggttggaggtccatcttttg

SEQ ID NO: 8647 - DNA, 560 bp, Glycine max
  Clone ID: jC-gmle01810033g02a2
ggtcattggtgcgaaaatggcaaactctaattgaagcccatgtggatgtgaagacaactgataactacacattgaggatgttttgcattggatttaccaagagaagagctaaccaagtgaagagaacctgctatgcacaatcaagccagattagacagattcgtaggaagatgagggagatcatgaccaaccaggcaacatcctgtgatttgaaggagttggtccgcaagtttattcctgagattattggaaaagagattgagaaggcgacatctagtatttaccctctgcagaatgtgtttgttcgtaaagtcaagatcctgaaagcccctaagtttgatcttgggaaactgatggaggttcatggagattactcagaggatgttggtgccaaggtagacagacctgctgatgaaatagtggcagaggaacccactgaaattgttggagcttgatttcatgatgcattcagtttgttctaggttttctttttcttacgttatcattgaaaattaagttacaaacttctgtccaatgtttctgtgtaagccgagtgacac

SEQ ID NO: 8648 - DNA, 279 bp, Glycine max
  Clone ID: jC-gmle01810033g02d1
aattgctgactcgtcggcgtccgaccttttttttcgttcttgattttgggttctgaacataacccatatatattacacgccaaaaatgtcgggtgatagtctaaacaaaactgtgtaactaggattacacagaagccttggacataagtttgcaactatgcttccaaatgataacgtaagaaaaagactgcttataacaaactgaatgcatcatgaaatcaagctccaacaatttcaatgggtgcctctgccactatttcatcaacaggtctgactacc

SEQ ID NO: 8649 - DNA, 636 bp, Glycine max
  Clone ID: jC-gmle01810033g03a2
ggattgcagaagctaaaatcacttacagttgcatcttgcaaaggagtaacagatattgggcttgaagctgtaggaaagggttgtccaaatctgaaaattgcacacctccacaagtgtgcatttctgtcagacaatgggttgatgtcattcgccaaggctgcttcatcacttgaaagcctacgattggaagagtgccacagaattacccaacttgggttttttggtgtcctttttaactgtggtgcaaaattgaaggctatctctttggtgagctgctatgggatcaaagatctgaacttggtgttgccaacagtatctccatgtgaatcacttcggtcgttgtctatcagtaactgttctggatttggcaacgcctccctgtctgtattgggaaagctgtgccctcagcttcagcatgttgaattgagtggacttgagggagtgacagatgcagggcttcttccactccttgagagttccgaggctggtttggttaaagtgaaccttagtggttgcacaaacattatccgacaagtagtttcatccttggccaatctgcatggttggactcttgagaatctaaaccttgatggttgcaaaatatcagtgatgctagcttgatggcaattgctgaaa

SEQ ID NO: 8650 - DNA, 582 bp, Glycine max
  Clone ID: jC-gmle01810033g03d1
acttgctgactcgtcagcggccgacctttttttttttttttagcaacttggaatgagactgaaaattttatttatttcattacatttcataacatacagaacaaagggcaggtatgaacatcattagacaatataggaggagcagttgccaagttcaaaaaaatgaagccttaaaaaactaggacttggtcaaaataacaacccttcccaaagggacaaaaaggttgtggttatggcagacctatatagcttgctgccacagccaagcccctaaaaacaagacttcataaacaccgaccttgacaactgcaaccaccctaatgacagcacatgacactgaaacttctaacctgcccttcgagtaaaactgatacccaaacatcatgtgaagaacatagttcaaccacatgacacatttggtaaacaaagactgatacagtggtacaggtagctgtaaaaacttagaaaactaagacacacatggtggcaaaaccgatgcaaagccgagctaataacatcaggtgccaacaccagtaacaaagatttctaacttcagaacccggtagctatgttctcagatat

SEQ ID NO: 8651 - DNA, 610 bp, Glycine max
  Clone ID: jC-gmle01810033g04a2
ggaaagtttgaatatatttagaaagattgtggatttggtggacatttgtcactctcagggagttgcattgcataacctgtgtccatcttatattaaattgtcgccatcaaaccagatcatgtaccttggtttacctgttcaaaaacagatggtggatagtgttgtaaattctgaagttgttcacttagataattcttttattagaaaaaggctgtcagagcaagtaacatttccctcccttgatatggggtcaaagaaaaaaaaatttaatgagaatgtgagagttactggtggtgacttgtgcctcgaaactgcaagtgataggaaacttcatagtcatacagttggatcacaagattattacaatgaatatgaggaaggtacccaattttctaaatataacattggaagaatgtctagcatccctcgcgtatctaatgcaggtcaaatgccattgacttcatgtgaaaaatttgaaaataaatggtacacaagtcctgagggaggttacacaacatcatcaaatatctattgtcttggtgttctccttttcagttacttggtcattttgactctgaaagaacacatattgcagccatgtctgatcttc

SEQ ID NO: 8652 - DNA, 577 bp, Glycine max
  Clone ID: jC-gmle01810033g04d1
acacctgaagtttatatgctttcgattcatggtaatggagttgctttacaatttttcctataaccgtacaattgcttgtccttcataaattttaaaaatctgaaaaggacagtaatacaatttacattggcacggacaagctttgcatagatacagggtaaattctcgagctaagaaccaatttagcaccagccatcccaattctaaaatattaaacccaatttagataattttatcaataaaaaagagaagaaatagagatattgaatcaaatttctactaaaaagttaaaattaaattacgcacatcagtttctgaaaaattaaatgaaagaacttctaaaaaagactgatgtacataaattaattttaattcataagagaaatttgatttattttcttctccagtaaattctcgttgagaagtttatctaaagtggagcttaatctggttcatattcaactgcttctcggattgatcccagcgatatttaagtataacaagccttttctacatatgacaatgggaaaatgggtttgaaatcgagttgacatcacgatgaatcaacttttaaaga

SEQ ID NO: 8653 - DNA, 460 bp, Glycine max
  Clone ID: jC-gmle01810033g05a2
gttctccatcacctaccacacacttcatttcttgaaagaagaaccggatctggcgggtggggttgagggattcctggaaggggtcggatttttcactttcatgtgaagggatagatgcaaacaagtaccttttgggctttggtttggtgcattgtatacccttcctgagtactgtatcaagaaaactccatgcccttccctaccaaaattgatttgaatggctacattgctgagtaagtattttggccttgtatgtggtcttaagctttatgatgtccggtggactataacgagtttgagagtctgaccttgaatattatgtatatgaatattataaagcacgaagcgctggacataatacaccaggacaagtggtcaatgatggatccagaaacatttacaatgattaagttggaattgttgtgaatgacacaccaaaaaatgtctgtattgtcaatga

SEQ ID NO: 8654 - DNA, 318 bp, Glycine max
  unsure at all n locations
  Clone ID: jC-gmle01810033g05d1
tgtcgtatgtcgacggcgaccgcggaattacttcccgggtcgccggcggccgcccttttttttttttttaaataactctgtttaccaattagcaatagcatgtcctcgaatataaacataatccaaaagaaatttacaactaagattataatatatgaaccagaaaagttgtaattgcatccttcactttcctaacccatccgatatctaattaattctgatttaatatttgttttcaggtagcaataagtattactaatgaaggctcgttgtgcaaggctatgttngtgtctcagtcttgatatcactgtaaccatg

SEQ ID NO: 8655 - DNA, 488 bp, Glycine max
  Clone ID: jC-gmle01810033g06d1
acagtaagaattcttattatttattatgaatgaagacgtaaaaaaaatcaaaagaattacgaagactatttgaaaattgaaagaatgagcactggtcaaagtcacctggtccccgaagggaagaaaaattaatcctcttgtgaaacattcctctaggaacggtgggtgtgacattgcagaagtttctaatcgaacgtgtctcgcgcactactgctaaaaaaactccttcgctgtgataaaagcaaaagagtggtgtcaatttcttttaacgttgtttccccataatttcttccataaccaatcttctaaatctgtttacggtgagaaagcacaaatagatatgctcttcaagttcttccaacatatccaaaaagttagattcgttgtcctgaaattccttcacaacccgcttcaatatttcacacttacagtaattcttcacacaaatatcagcaacctgtctccaatgttcaacctcatcatctaac

SEQ ID NO: 8656 - DNA, 585 bp, Glycine max
  unsure at all n locations
  Clone ID: jC-gmle01810033g07a2
cttgagaggctttaagaatactgctggaattgagcctgaagatgttgcaaagcgcctcatggactacggttttcatgcaccaacaatgtcatggcctgtgcctggcacactcatgattgagcctactgagagtgaaagcaaggccgagttagacaggttctgtgatgctcttatttccattagacaagaaattgctgagattgagaaaggaaaggttgacattaacaacaatgtacttaagggcgcccctcatccaccatcactgctcatggctgatgcatggacaaaaccatactccagggaatatgcagccttcccagctccttggctccgtactgcaaagttctggcctaccacaggacgtgttgataatgtgtacggtgaccgcaacctcatttgcacccttctcccagcatcacaggctgttgaagaacaagcagctgccacagcataatgtgttcaaatgacaactattttcatttcccgttgtacataaactcttattcctattcatacagntcttgcacttgttgaatattgcttcatcatatgtgacaatgatgataatccactgctcttaagttt

SEQ ID NO: 8657 - DNA, 388 bp, Glycine max
  Clone ID: jC-gmle01810033g07d1
attaaaatacttaaaccaacagtgcgggaaaaaataggccaaaaaagcaaagataaaatacaaacagaagaaacttgctacaaaagccgaggattgaagaacccgtaaaagcagggaaagtcaaagccgggggtaacgggcaaggccacattggaccaagcaaaaaacagcaagagaaaaaacggaaaggaaagggaaaaggggaaggaaagccagggaaatgggaaaagaggacatcggggaacggcatggcgaggaaacagggagagagtcagctgaatggggagcagggaggagggggcaaaggaggtagtgggtaccgggcccattggaaacccgaaatgcggatggccaaaaccatgaaatggggagccagggggctaggggg

SEQ ID NO: 8658 - DNA, 554 bp, Glycine max
  Clone ID: jC-gmle01810033g08a2
gccataagtcccttccctattgtaatttctgccagcctcaaaaaagacttgctctgcctctgccactctctgagtaggactacactgccatggctgcctcagtctccactgttggagctgtcaacggagctccactgagcttgaacagctctggagctggagcttcagttcccagttcagccttctttggcaccagcttgaagaaggttattgcctcaagggtccctaacgtcaagatttcttctggaagtttcaaaatcgttgccgcggaaaaagagattgatgagaaacaacagacagacaaggacagatggaaaggtcttgcctatgatgtttcagacgaccagcaagacatcacaagagggaagggtttggttgattccctcttccaagctccacaggatactggaactcactatgcaatcatgagctcttatgagtaccttagcactggacttaaacagtacaacttggataacaacatggacggtttttacattgctcctgcttttatggacaaagcttgttgtcacatcagcaagaacttcatgacc

SEQ ID NO: 8659 - DNA, 389 bp, Glycine max
  Clone ID: jC-gmle01810033g08d1
acctttgtgtcgttcttttttttttggtttaccctacaaaacccttaacctcactcaagggtcatattacggaacgctagtaaatggacaaggccaaaatgaggtgtgacataccatcaaatgtgcaagcgggaagggctgactcgacaggggtcactatgggcacattgcagaatcgttacagtctgacttagccctgtccagcataaccatgcaatatgaacattgtaacttagctttgtatgtcacctctgaggtggtcttgaagtggacaacgcttagcgttccaccttgtgtatggtcagggcccatcatacacttctcgggacgggttacacggtcagggccctgtgaatgctgaacatatgcgaccgggaaagtggacttgc

SEQ ID NO: 8660 - DNA, 580 bp, Glycine max
  unsure at all n locations
  Clone ID: jC-gmle01810033g09a2
gaggtgcaccccgagcaaaacgacgacgtcgttttgtgggacgaggagtttcacgcgctctgcactctcaacgcgtacaaagacaatgcctttcacccctgggaaatcgctttctctctcttcaacggtttgaatcaaaggtcaaagactaaagttcctgtggttggaactgcagctttgaatctagctgattttgcatctgtggttgatcaaaaggattttgatttgaacattccactcacagtttctggtggctctgtggagtcttctccttcacttagtatatcgattagtttggtggagttaagagcggttcaagagagcacagagttagttcataataaagcaatagtgcctgtgcctgtggcttccgctaattcgcctttggttcagtcaggggagactaccttggctgagaaagacgagctttcgacgatcaaagccggtcttcggaaagtgaagattttgactgagtttgtgtctgttaggaaagcaaagaaagcctgccatgangaggangggagtgagggaaatttcttttgcaggagtgaggattgtgaatacaattattcctttgact

SEQ ID NO: 8661 - DNA, 542 bp, Glycine max
  unsure at all n locations
  Clone ID: jC-gmle01810033g09d1
acagtagtacaattatgcggaaacctcagttactgcaagagcaagagtctctggcacagtcatggatggttcagccactactggaggtgcaacacaagactgcaacaactgagtgtagtgaaactcaatttgtagcctatgatgaaatggtgtttgagttgatgatattaaacctttcttgacatctgcttgcaattctctaatagggattgctgccaagaagcttttaatgtattctttgcatgcttccttccctctgcacacaacctcctcttcttggtcactcttcaactgttcttctgtctccacagaagaatccatttctttaccattgattggctggatctgcctttcattctgctctaatacttctgcaacagtttgaagatcactggctgtttttttgccagaacctcgagcaacatcttgcattttgtatattactgtgtcgctgtcaaatttcaagatatacgcctgattgcatccttcatagagcctntcccccaaagtgtcaatgatgcagtaagcatcagcttcaactt

SEQ ID NO: 8662 - DNA, 511 bp, Glycine max
  Clone ID: jC-gmle01810033g10d1
gttgttattgagatcgttcgtttatttacatatgtcatcaactgtacttggattcgaatagttgacagattacatcaaaaaagtgcttggcttcgtcttcattgaagaacgcaaacgcattatatcctccagtcattgagaacttgtggaagtatggagaggtctcttcgtattcgaacttctcatcgggaacgcgaaggagaaacaaagcatccaacgtctcgagatcggaaacttgaaagaagagcgtgttcttcttatcttgcaataatgacaataatccgacgatggacgtatccttccattgaggatccttctccaagaactcgaacaactttacagaaccaaaagcaagaacctctaatccattgtctcttgcttgactcttaaccttggattgaacttgcatctcgaaatcaatgtcgtcgactgcttcaccggtgatactcatcgaaggttgggttctcgtaatgacaggttccgcaacttgctgaacaatcgaactcttctg

SEQ ID NO: 8663 - DNA, 519 bp, Glycine max
  Clone ID: jC-gmle01810033g11d1
tttgtttttttttttgtctactttcattttttattttaaataccgcgactaatcacataaaatttgtgtttgttctttttatatttatattatttatatttttattctttgtacaatttattactagtatagtaatcgattccctaaatctatgaacccctccaactaaatccaataatttttttattttattattaatcaagaatttcgtgtatagctagaacggccctcacaaattgcaaatactaatttgttaagaattaatcgaattgaggctatagcatcatcattagctggaattgaaatatcggcgaggtccgggtcacaatttgtatcgattgaacaaattgttggaatttccaaagttatacattctcgaagagccgcatattcttcttgttgatcgacgattattacaatatcaggtaaccccgtcatatatttaatgccggcaagatatgtttccaaatgagctaaatgtcttttgaatatagcggcatctctttttgaaaactattg

SEQ ID NO: 8664 - DNA, 338 bp, Glycine max
  Clone ID: jC-gmle01810033g12d1
aaaggctagagccagtcatgacatgatgatttgcagcatgaaagaatacaagcatatttacatatggcatatgtataccactactggttgtacatatacatatgcataggggctttcatatgatttttaccaaacaaaacagctaactaacaaaatggggtcatgagcctctcgagaaaggccacatgacatcaagggggtggctcggccaaaaaaaaagtatgccaccagccacatgcaacgtttttagctacacaaccttcgatggtaacttcagaaggaatgttacggtctatcacgtccccaagggcaagctgtccatacttgttccatcccca

SEQ ID NO: 8665 - DNA, 565 bp, Glycine max
  Clone ID: jC-gmle01810033h01a2
ctggaatcaatgattcaattcagcatagacaactttgtaatttgcaattggtggatttgctgagcatgtgttatctgctcccttgtacatcatgccagaacatttcattcatgaacactccaattaacttcatgagattgtatgcttgtaaattttattgttgttaatcaatgataagctctatgttctttagtgatgagtaacattttggttctttcagactttgtcctcatgggctacttccagtgttgaagaggtggcttcaacaggacctggcattcgctttttccagctatatgtgtacaaggacaggaatgtggttgctcagcttgtgagaagagctgaaagggctggattcaaagccattgcccttactgttgataccccaatactaggacgcagagaagctgatatcaagaacagattcacattgccgccatttttgacattgaagaactttgaaggattggaccttggaaagatggacaaagctgatgactctggacttgcttcatatgtttctggtcaaaatgatcgtactttaagctggaaggatgtgaagtgg

SEQ ID NO: 8666 - DNA, 405 bp, Glycine max
  Clone ID: jC-gmle01810033h01d1
aaggcagcagcagcagtagtcccccaagtttcatcatataagggttaaaaaaaattaagccttgggttttccaaatccaaccttaaatgagttctccaaaaaggaaaaaaaaggggggtcatgaaacacatatagaacgggttcctccattggtctgccccacattatacaaactggggtcaaagggggggcaaattttttataattttggcaatgcgcggggaaaaatgcgagggtggtcccaatcagggacaatgggatcacgagggatatccttggggggggggcaacccctcaagggcctgggtagctcaaactcctcacggagcatccgcaggacgttttttacaccagccttttctttagcggccaaggggaacaccccagggggtccaataaatatgc

SEQ ID NO: 8667 - DNA, 576 bp, Glycine max
  unsure at all n locations
  Clone ID: jC-gmle01810033h02a2
agtttccagatatggttcatgctcttaaacccaatcccaagaaccacatccaggagaattggaggatccttgacttcttctctcactttccagaaagccttcacatgttcacctttttatttgatgatttgggtgttccacaagattacaggcatatggatggttttggagttaacacatacacactgatcaacaaggctgggaaagcagtgtatgtgaaatttcactggaagaccactagtggtataaagtgtctattggaggaagaggccattaaggtgggaggagccaaccacagccatgccactcaagaccttcatgattcaattgctgctggtaactatcctgagtggaaactgttcgttcagacaatagatcctgagcatgaagacaaatttgactttgaccctcttgatgttactaagacttggcctgaggacattatacccttgcagcctgttggtcgcttggtcctgaataaaaacatagataatttctttgctgagaatgaacaacttgcantttgccctgccattgtggntcctggtgtatactactcagatgantagatgcttc

SEQ ID NO: 8668 - DNA, 454 bp, Glycine max
  Clone ID: jC-gmle01810033h02d1
aaatactaacaaatacaaacggcatttattgagataggtgaacgagttgcattcatggagttatgggtacacacaacataatattgcaagaaaaggattagttctttcaggtaatccaaaatcacatccttatcgtactctttgcacgtctgcaactctaacaatcattctggagttggcaacaacattaaatatttggcctcgtgctgagatgagaagctatcttttggcctagagaacggtcagcctgagaccagtatgatatccagacactgcggatctcatgggtgacccgtgggtcagataaagcatcaacccatcggcgagcaaatctatcttgcctgtcaggtgcccaagaccggtatctctctccgggctgctagaagttgttctccttctcaattccacacttttcacgccttccactgcagatagcaggaggtatggggaacct

SEQ ID NO: 8669 - DNA, 580 bp, Glycine max
  unsure at all n locations
  Clone ID: jC-gmle01810033h03a2
gtttcagttgttcctccatggcaattaattccagctgaaggaaaagttgaggaatgtccactggaggagcttggtcttgaaaatgaatcagaaaaaccaagcaatgcattactaggacgggcatggtcgccgggttggagaaatgctgacaaggctttaacagaattcgtggagcagcatctactagactactccaagaaaaggctgaaggttggtggagactccacctcactcttgtccccatatcttcattttggagaattgagtgtgaggaaagtttttcaagtgacacgtatgaagcaaatattatggacaaatgaaggcaacagtgctggtgaagagagtgtaaatcttttcctcagggccattggacttagggagtactcacgctatctttgtttcaactttcctttcacccatgagaaagcacttctgggacacttaaagttttttccttggaatcctgatgctgatatctntaagaattggagacaaggtaggactggctttcctttggttgatgcaggaatgagagaacnnttgggcactggctggattcacaacagaataagagtaatag

SEQ ID NO: 8670 - DNA, 404 bp, Glycine max
  Clone ID: jC-gmle01810033h03d1
aaatgcaagtgagatcagagtaatacattgtgtaaagtttttggtttatatagtttggaattacgggcttgtcaaaatgtggatggaccaacccatcagcacaagttcataattttcaatgttcactattggtttaatccgagttcttcctggtggatttcataacctattacacaactgattgattgcatgggcttaacaaactggagtatttaaatatggcaccattttctttccgcgagtaatgtaactgctactggttttatcaacaagaacaacattaacctcacatagctccatttttgcttgaactctgctccatgtcagtctgatcttgccatggccacttcagatttgaagatgaggagcactgctgtggaactgaaaatgaatatgagcttgta

SEQ ID NO: 8671 - DNA, 579 bp, Glycine max
  unsure at all n locations
  Clone ID: jC-gmle01810033h04a2
gtttcagttgttcctccatggcaattaattccagctgaaggaaaagttgaggaatgtccactggaggagcttggtcttgaaaatgaatcagaaaaaccaagcaatgcattactaggacgggcatggtcgccgggttggagaaatgctgacaaggctttaacagaattcgtggagcagcatctactagactactccaagaaaaggctgaaggttggtggagactccacctcactcttgtccccatatcttcattttggagaattgagtgtgaggaaagtttttcaagtgacacgtatgaagcaaatattatggacaaatgaaggcaacagtgctggtgaagagagtgtaaatcttttcctcagggccattggacttagggagtactcacgctatctttgtttcaactttcctttcacccatgagaaagcacttctgggacacttaaagttttttccttggaatcctgatgctgatatctntaagaaatggagacanggtaggactggctcttctttggttgatgcangaatgagagaancttgggcaactggctggattacaacagaataagaggtatag

SEQ ID NO: 8672 - DNA, 472 bp, Glycine max
  Clone ID: jC-gmle01810033h04d1
aaatgcaagtgatatcagagtaatacattgtgtaaagtatttggtttatatagtttgtaattacgggcttgtcaaaatgtgtatggaccagcccatcagcacaagttcataatatacaatgttcactattggtttaatccgtgttcttcctgttggatttcataacctattacccaactgattgatagcatgggctaaacaaactgcagtatttaaatatggcaccattttctttccgggagtaatgtagctgctactggttttatcaacaagaacaacattaacctcacatagctccatctttgcttgaactctgctccatgtcaatctgatcttgccatggccacttcagattagaagatgaggagcactgttgtggaactgaaaatgaatatgagcttgtactggcacactgcttcttacatgatgaagaatcagctgtggagcaaatgtcttgggcaatgcttgacat

SEQ ID NO: 8673 - DNA, 603 bp, Glycine max
  unsure at all n locations
  Clone ID: jC-gmle01810033h05a2
ttgacttatccagatgccaatctttcaaaagaggctttaactgccataagtgtagtcctgtctctaaatccaacttcaactattgctcacatatctggtattggtataaaagccatcccttctatttcacacttatccagtctccgtgctgtcaacttgtcaaacaatttcatagttcacatctcaccaggagttctaccaaagggtattcaaacacttaacttgtcaaaaaacaaaatcagcacccttgagggcctcagagaattggccaagttgcggatacttgacctaagctacaaccgcatttcgagaattggacaaggtttgtcaagttgtacactaatcaaagagctgtatcttgttgggaacaagataagtgatgttgaagggctacacaggctattgaagctaacagttctagacttgagcttcaacaagatcacaacagcaaaagcattaggccagcttgtggctaacttcaactcacttaaggcccttaatctccttggaaattcaattcaaagcaacatcagcgatgaccagctaagcanagcagtctgtggtcttcttccaaagatggtgtacctgaacaaagcacctgtc

SEQ ID NO: 8674 - DNA, 526 bp, Glycine max
  Clone ID: jC-gmle01810033h05d1
aggctgaaagcaaataatgactttcatatccaacataacccctcatgctagagccctttggccttgaagcgacaacatgattatgagggctttgatactattatatcaggaaacaattatcttaaaattttaagctattaaatgaaattttacatatctcacaaacaaatcaagagacagcaacatctaacacacagtttcctctgatataacattgagaagaaccaaatgaaagtgttccattgagttgctcctctaacatgcaacaaacagcttcaatttcacttccttgtccggttcgtgcttttctgggaaacactggtactccttctattacctctggagagatttgatcctccatggccaactcttctaattgatcttctgttgcagctacgcgtgctgctcccgagtgcagctctggcaacactatcgcttaatattccgcgtgtcctatgagccttgacaggttgcttgttcaggtacaccatctttggaagaagaccacagactgctttgcttactg

SEQ ID NO: 8675 - DNA, 585 bp, Glycine max
  Clone ID: jC-gmle01810033h06a2
acgaaacatggcaagagtggtggcactccaacagaaccaactatctttctctaccttagcttcctctctttctgacttcagtggaaccagacttcaaactcaacttcagttcaagagaaagcaatgccatccaaaagggtctttctacgtctccgcatcgagcaccaagaaaatcctaataatgggaggcaccaggtttattggtgtgtttttgtctaggctccttgtcaaagagggtcaccaggtgactttattcacaagaggtaaagcgcctgtcactcaacagttgccaggtgaatcagacagtgattatgctgatttttcttccaagatcttgcatttgaaaggagacaggaaggacttcgactttgtaaaatccagtctctcagcagagggatttgatgttgtttatgacataaatggacgcgaggcagatgaagttgaacccatactggatgctctgcctaatctggagcagtttatttactgctcttctgccggtgtctatctcaaatctgatctattacctcacgcagagactgatgcagttgatcctaagagcagacacaagggatagcttgagac

SEQ ID NO: 8676 - DNA, 310 bp, Glycine max
  Clone ID: jC-gmle01810033h06d1
atgaacgaaaagctcatgaatatttcacgacttcataaggtagcaaactccgaacaaggttttctaaatacaggcgaaatacttaaaattgcactagaaaagtttatacgctaacaagactcttgccaagaatgatgtcatctgatgagaaatcagcctctttccgatatggacctctaccaaagtccaggttgtactagtctggttgaccctttacaagttcaaatgcatgttccaatcgcagcacgctattaggtttgtaaactggtgcaaagaaatgctcgtcacggaacgggacagatgacttttt

SEQ ID NO: 8677 - DNA, 615 bp, Glycine max
  unsure at all n locations
  Clone ID: jC-gmle01810033h07a2
ccacttgccatggcagcagcagcgtcaatgtgtatgagcttcaacctggcaacagcattcaagggtctctctttttcttcttcttcctcatcgttcttcgctggaagtggtagttattctctccgcgcgggtcccacctcggtggtgtcgctgccccggcgctgcccgctgaccatagagaacgcccacaagaagggggcgggcagcaccaagaacggccgcgactcgcagggcaagcgtctcggagtcaagatatacggcgaccaggtcgccaagcccggctccatcatcgtccgccagcgcggaaccaagtttcatgcaggaaagaatgtggggcttggcaaagattataccattttctccttgattgatggagttgtaaaatttgagaaatatggacctgacaggaaaaaggtgagtgtttaccctcaagaagtacagcctgagaaccccaacagctatagagcaaggaagagagagtacttccgagtgaggcgtgaacgcanaanagctagacaagaaggagcaatacttaaatctcaactggtgctggcttctgcagatgatgcagcaatcactaatccagtgtgttgattctgattcaatcgtctaaat

SEQ ID NO: 8678 - DNA, 514 bp, Glycine max
  Clone ID: jC-gmle01810033h07d1
attccaaatactacaaaacaaatgctcatactgtagaattcatcaagcaatgttttgattcaaatggcgcatgatgactgattgtgcattgctacttcaacaaaactcaatacaatgctaaaggatctacggataaacaagagtaaaaaatggggaccagggtattttacacatttagacgattgaatcagaatcaacacactggattagtgattgctgcatcatctgcagaagccagcaccacttgagatttaagtattgctccttattgtctagcttttttgcgtgtcacgcctcactctgaagaactctctcttccttgctctatagctgttggggttctcaggctgaacttcttgagggtaaacactgaccttattcctgtctggtgcatatttcttgaattttacaactacatcaatcaaggacaaaatggtataagttatggcaagccccacattatttcctgcatgaaacttggttccgcgcttgcggacgatgatggaaacgggct

SEQ ID NO: 8679 - DNA, 546 bp, Glycine max
  unsure at all n locations
  Clone ID: jC-gmle01810033h08a2
ctcataacacaaagcacaaagcaaagctcatccttgagttaaaaaatggcagcagcttcttccatggctctctcatccccatccttggctggcaaggccgtgaagctgggcccatcagccccagaagtgggaagggtgagcatgaggaagaccgtcaccaagcaggtctcctcaggaagcccatggtacggcccagaccgagtcaagtacttgggcccattctctggcgagcccccgtcctacctaaccggtgagttcccaggcgactacggctgggacactgctgggctttccgcagacccagaaaccttcgccaagaaccgtgaactcgaagtgatccactccaggtgggccatgctcggagccttgggctgcgtcttcccggagttgctgtcccgcaacggggtgaagttcggagaagccgtgtggttcaaggccgggtcccagatcttcagcgagggtgggctcgactactngggcaacccaagcctgatccacgcccagagcatcctcgccatctgggccacacaagttatcctaatgggt

SEQ ID NO: 8680 - DNA, 412 bp, Glycine max
  Clone ID: jC-gmle01810033h08d1
atcagcgtgacgaccttgttgtcgtcctttttttttttgtgctatgtaagcacttctcatgtagatgtgcagggggatacacaggattattcaccttatcatgagtactttaccaaacactaatctattaactttcaaaagggattgtgtacgatgacgcttactgttcggggaccaatttgatggctttggaccacagcgctgttgttggctgggtcagcttagatgctcggctatgtttttcaatggaccctgtgccctgaaaaaggtctgagctgagagcgccacatgttggaacatggaccctcgtccggccatgagatcctgcaccttaagctgagcaagagcctctgggtcatcagtagggcccattgggtctaaactgccacctgggaaaatcgggtcaatgacc

SEQ ID NO: 8681 - DNA, 329 bp, Glycine max
  unsure at all n locations
  Clone ID: jC-gmle01810033h09a2
gggttatattattgatgcactgtatttgtattcaaattccaattccaaatggcgaacatatttgattgctgttagtttcccaggttatgtagactatgtgacaatgcagcattatttggatttgcccgatattctggctatttcatttgcttataatgtggaattcactggacccctcttctttnanaaaaaaaaaaaaaaaaaaatataaaaaaaaaaaaaaaatctgaaaaaattgggtgtccttttactggcgggtctagaagacccggaaattaaatggggactggttcctgaaagcgcacccagctttccttaaggggggcccc

SEQ ID NO: 8682 - DNA, 330 bp, Glycine max
  Clone ID: jC-gmle01810033h09d1
gtcttattacgggttcttttcaacgatcacaccctacagtcttcagcctaaaagccaacccgaagaagaaccaaaggaaccaagggaaccaaaggaaacaggcaaagggaaacaccacgctatgcagatacccaaaacatgaaatatctcatgcgatcctacctgaatcatcgatttcacaccagagataacacgactagaaaagggtcgatgcgtcatgtgtttcgcatgtaatgatggccgtccgcgtgtctcctaatcagttccagaatgtaccacaatctttgagggagtccaaagtgaaaagttggcgataactgcccagatccc

SEQ ID NO: 8683 - DNA, 448 bp, Glycine max
  Clone ID: jC-gmle01810033h10d1
attggaatataatattcgcaattttttacgtggagcataaacatacagggtaacatacctaaatacaaatgcacctaatatgggcatgaactgatgaaagaaaaagtcatacaataagttacacagcttacaagaatgaaacaattttacaacagcttgctattaactgtgtcctattatacctcaagatttgactgatattttcacgaccgaactaatgattcaagttaataccaagaaagcccgacggatttcttctgcgatcgatcggcaccttacagagaagcctatttgaattgaaagcctgattatatatttttactgccccgtctgtatcatatgctaagctcattcgagtatactcctctattcagcagtcttttgggcaaggcaaggcaattgaaataattcacaggatggtatctaaatgctaggggaccattactat

SEQ ID NO: 8684 - DNA, 248 bp, Glycine max
  Clone ID: jC-gmle01810033h11d1
ccgaaacgcatcacacagaattggcgtgaggattttcaatatgaaaaaaaacaagatttttatcctgtggactatgtataccaagtataggggtccataccctaaagctttgggcccttcctacgaaatccaccaaacaatctatgttagtatcaaaggagagttacgagcctcgctagaacggccctatcaaatcgaatgggctgatgggccaaaaaaaaatcttgccgccggtctaaggccatcat

SEQ ID NO: 8685 - DNA, 331 bp, Glycine max
  Clone ID: jC-gmle01810033h12d1
ttcgtctctttttttttttttttttttctcaaaattaaaaatatacaatgagtgaattaatgccgcagcaggagttgtcacccaagtctcatgatcttatgcttaaacgaaatcatgcatagagctttgcaagggccaccttaagtgagtctttctaaaaggaaaagaaaggtggttcatgaaacacatatcgagctgacggctccattgttgtgcaccacattatacaatcttgggtcacatgaggagcatttttttgataatcttggccatgcgcggggatgaaagccccgttggttccactcactgacaatgcgatcacgagagatat

SEQ ID NO: 8686 - DNA, 478 bp, Glycine max
  Clone ID: jC-gmle01810034a01d1
gtcgccctttttttttttttttttttttttttttttttttttttttattaattttttttgttggtgttgaatctttggttttaatttaaattttttcgtctcccaccccaaaacactggcgtgcgactgggtcccaaaacaaatcaagaaacacctaccccatttttagcaccacaaccaagtttcttccggtgacaaccaccatatcaaaaattacagctcttttattacgaaaaaaaatgctggccccccaaccatttaaagaagcacccttaggagatggtacattcgggcttctctcctcctcggagcacacgtgatgaaaggatcaactctaaggaggatctcacctgcctttgttgaagacagcaatacagcttgcttgactcctaatgctaaggatatcccccgaaaaggcatgtttcctacagagccagaaataacatcaattccagcattgcaaacctccgtctgatgc

SEQ ID NO: 8687 - DNA, 291 bp, Glycine max
  Clone ID: jC-gmle01810034a02d1
gcgctcgcccttttttttttttttttgtttaaaacatatgactttttttacattgctttttatagtcacaccccagtcatgacgcatgttgcattttgttcatgcgttcgcaaaaggatatgaacatcacagacgaccctgcacataggggtggcgattacagaaggactccgcccttccctatcccctcatcgcgggggttatctgaccccaaaaaaactggactggaatagcaaacccacaaaagtttccataaatgccatgaatatcaatagacatttctctaaacac

SEQ ID NO: 8688 - DNA, 423 bp, Glycine max
  Clone ID: jC-gmle01810034a03d1
agcattggaccaatttgtttcttgagcaaatactaatgtacaatgatgcctccacatagacagcaatggctaagcacagggaaatggatttgaagttaagtactttattggatcagagagaaaacctatacattcagaactcacattctgatgcccgtggatgactgctgtttccaacatcaaatgtgcctggcaggaataagtcatcttcttctgcacttatcagggcattctttgctatgcattggaatgcttctacaacattaagaccttctttggccgatgtctcaaaatatggaatatttccttttgatgcacaccaagcccgagccttgttttctgacaccactctgctgttcccaccatcaatatctatcttgtttcctatgacaacaaaaggaaaattctgtggatcagaaggac

SEQ ID NO: 8689 - DNA, 461 bp, Glycine max
  Clone ID: jC-gmle01810034a04d1
tcgcgatctataaccccgatatagcagtaaaagcaagacgcgtaggcggatcaactcatcaagttcccgttgaaataggatccacacaaggaaaagcacttgccattcgttggttattgggggcatcccgaaaacgtccgggtcgaaatatggctttcaaattaagttccgaattagtggatgctgccaaaggtagtggcgatgccatacgcaaaaaggaagagactcatagaatggcagaggcaaatagagcttttgcacattttcgttaatccatgaacaggatctatatagacacatagacccatgaatccatacatctcgatcgaaaaagaatcgaaattgatgaatatatctctcgaaacaaacgaaaaggaaacgaaaaacaaaaacataaatcatggatcaattaagccctctcgggactcgcttaagaatgagaaagaggaatcttatgtaaa

SEQ ID NO: 8690 - DNA, 399 bp, Glycine max
  Clone ID: jC-gmle01810034a05d1
gatgataaaaggattcttaatgatttttgcaacaggaaattcagaaaataatattcaaataattacgaggacataattttttcgtttcacactgcagggcaaaaaaaactcaacatcaggactgccgcaaagacaagagtacttgagctttagaggcttcttgatcatatctcataaattgaggaaaataaacaaagcatgcactgttctacacttctactcctaaatcctaatctaacttgctagaggagatttcactacagccttcacttaaacatggggaacaaggtgtgggaggccctatatcgtcatgattaacatccacagtgaagtcagagaaactagctataacatcaacaagtctctcaagtttgctgctactagagggcttcttcccat

SEQ ID NO: 8691 - DNA, 511 bp, Glycine max
  Clone ID: jC-gmle01810034a06d1
tcttttttttttttttttcaatgctcatgcaatttatcagtacataatatgttccaaacttcgagtagggatcattacaaaatcttggcatcaactaagctctttagctaccttccaacaacggaggactcactatccatgcattttattcagttaaagcatccagtctaacgtccccatacttaatcagaacaggctatgcagtgaccggcctaatttgtctcctccccaacagcattggattcttccatgctgttatcatgagagtttacagcatccgcaactacatcatgattggggctgctacttacttccactgcagcacccatttatagcatggtcttcccatcatcagtatagctggcagtagcagcaacttccagttttccatcgacattctctgcagctggtgtgggattagccaatttatcagaatctacatccatgtcatggctaacgctagaagtagcctggtcatgcacaatatctacttgctggtcagcagttccat

SEQ ID NO: 8692 - DNA, 428 bp, Glycine max
  unsure at all n locations
  Clone ID: jC-gmle01810034a07a2
gaagtaaaaagccttagccttgcctacaactccaaacacaaagacatcatcatccatggatggctacgggtacactgtcggagctgacaacagagctcttttgaacctgaatggtgctggagctggagctacagctcccagggcagccgtgattgggaccacgcttgaacaatgtgattgcctcaagggtccccaacagcaaggtttgcggtggaagctacaagattgctgctgcagaagagaagacagagattgatgagaccccacaggacgactaggacagatgggaggggcttgcctatgatatatcagacgacccacaagacatcacaagaggaaagggtttggaagactccctttttcagctgcacaggatgctggaactcactatgcagncatgagcttctacgagtacctgagtactggac

SEQ ID NO: 8693 - DNA, 169 bp, Glycine max
  Clone ID: jC-gmle01810034a07d1
atgactatgggagaacccaccaaatacctgcccagtgaactcagtcactacaaaatcttgagacggtccccacggcatgggaaatccagcacgcgcatgataagtttcaaacccgcttttactctctaaacaattgaaactgctaaaagtgcttcccgcatttttgatc

SEQ ID NO: 8694 - DNA, 491 bp, Glycine max
  Clone ID: jC-gmle01810034a08a2
atggcttcatgtagcgcacctccctccctgatgctggtccaccctcaagacctctctcgctctcagagaaccacattctctctctatcctctcctttttaagccctgcaaatgcctccacatagagcccaaatccaggacttgccatgccctcgtcgccgctttggctgcagaggtccaagtgcctctaactgtccacgacacggaggaggacgacggttctgatggctccaccgccacctgcggcgtcaccaccaccaccaccaccaccaagcctaagaaaggcaaggccgcgttgcctcttaagagggacaggacgagatctaagaggttcttggaaattcaacaattgagggagcgttagaaagagtatgacttgaagaccagcaatatctttggttgaagagacagctaacacctagtttgtagaaacagtagaagcccattttcgcctcaacattgaccctaaatataacgatcaacaattaagag

SEQ ID NO: 8695 - DNA, 460 bp, Glycine max
  Clone ID: jC-gmle01810034a08d1
atatagcttctagaaaacatgaagctgatcttgtaaatggtttactcggccatagcaattgtattgagtacaatgaacacaggcggttgaagagtgaaatacctaataccaatgatcaaaacgtaaaaatgaaaatttattcccacgaaaagaaaatataattagatctctggtgttagttaccaagtaatacaaggaaaatcctcagccggggtcaaagattatgtaatgtagcaaagtgcaaacatttgtaacagagagatcctatcccctgtgtatgtaactttggtaacatctttgactaaatatttggcaagatctcacaatggcacccgggataggtgacagaggccaaacgaacatttacatgtgaaggttctattctgatggaggtctgtagtcaagcatctccctgatatttaacctgattgaaggtcccatggccgagcatatgtgagca

SEQ ID NO: 8696 - DNA, 315 bp, Glycine max
  unsure at all n locations
  Clone ID: jC-gmle01810034a09a2
cgcaccactagcacttcattgagttcatttcacagttcctattcgtaccaaatgacaaccaccaatacgagtttctctctctagaaccaccgaagcgaagaagaagagagaagagaatcacggtttcgccatggacgcggcatcgcagctcgtctcctgcggaatcgatcccttccatcgcgcctcctntacttccccgcgccaccgccgccacagcaacctcctcctactacgccgtcgctccagccgtgtcttcgccgtctccggcgagccgaaacccgccgtcaacggagcaaactcgaggccgtctccgac

SEQ ID NO: 8697 - DNA, 510 bp, Glycine max
  Clone ID: jC-gmle01810034a09d1
atgtaaaataatggtcatatatacaatttttgaacaactgtcaaaatatacacaattgtgtgcagtaaggtagacagaattctcttacaaaaatgtatcacgaattaatcgtgctaaaacccgagaagataatctgctaacaacctccggaagcactttaacagagatgcctggtaacactgggagaagctcttggataatctgaggaatattcagtgcctgaccagatgttcttgatagggaacttccagcagtcaagaactccaccaccatctggacattgttcaatataacttcatcctcttcagttatggtgggtataagagccgcaggcttaaagggtcccactgtaggtaccatgctgaaaacaggggttacattctgaactcctagcaaggacattactctcaccagttgttccctcgttactgcatcgatgcccttgacgatctcgtccaaaagaaattctcggtaaaaattccccctgtcagacaacaaaaacgctaaagc

SEQ ID NO: 8698 - DNA, 485 bp, Glycine max
  unsure at all n locations
  Clone ID: jC-gmle01810034a10a2
cgcaccactagcacttcattgagttcatttcacagttcctattcgtaccaaatgacaaccaccaatacgagtttctctctctagaaccaccgaagcgaagaagaagagagaagagaatcacggtttcggcatggacgcggcatcgcagctcgtctcctgcggaatcgatcccttccatcgcgcctcctctccttccccgcgccaccgccgccacagcaacctcctcctcctacgccgtcgctccagccgtgtcttcgccgtctccgccgagccgaaacccgccgtcaacggagcaaactcgaggccgcctccgaccagagccgtcaatggcggcgtctccacgagaattggagatgtttcgaaggagattaagagagtgagggcgcaaatggaagaggatgaacagttagcgacgctcatgaggtgtcttcgaggccagaatntgagggactcgctcttcgctgagggacgatgttgacttcgtc

SEQ ID NO: 8699 - DNA, 496 bp, Glycine max
  Clone ID: jC-gmle01810034a10d1
atgtaaaataatggtcatatatacaatttttgaacaactgtcaaaatatacacaattgtgtgcagtaaggtagacagaattctcttacaaaaatgtatcacgaattaatcgtgctaaaacccgagaagataatctgctaacaacctccggaagcactttaacagagatgcctggtaacactgggagaagctcttggataatctgaggaatattcagtgcctgaccagatgttcttgatagggaacttccagcagtcaagaactccaccaccatctggacattgttcaatataacttcatcctcttcagttatggtgggtataagagccgcaggcttaaagggtcccactgtaggtaccatgctgaaaacaggggttacattctgaactcctagcaaggacattactctcaccagttgttcccttgttactgcatcgatgcccttgacgatctcgtccaaaagaaattcttcgaaaaaattccccctgtcagacaac

SEQ ID NO: 8700 - DNA, 621 bp, Glycine max
  unsure at all n locations
  Clone ID: jC-gmle01810034a11a2
atcaaatcctaatgatatgactggggagactggtactcttggttatatggctccagaggttttaaatggcaacccctataacaggaaatgtgatgtgtacagttttggcatctgtttatgggaaatatattgttgtgacatgccatatcctgacctaagtttctcagaaatcacttcagctgttgttcgccagaacttaagaccagaagtaccaagatgttgcccgagttctctggcaaatgtaatgaagaagtgctgggatgccagtcccgataagcggccggagatggatgaggtagtttccatgctggaggccattgacacatccaaaggtggaggtatgatccctcttgatcagcagcagggttgtttctgcttccgcaagcatagagggccttgatgttttatttgttagcccagcaaacaatttggttataatggattttcactatttgaagaatcaatttgtacctatagtgagaaagcagcatttggatcctagatgagacaaatacacagtagggggtacagttaagaggagctggtgacatgtcaatatgttggtgggtgtgtaaaactgnacctctgaatttctttacctttttttcccccacattggtt

SEQ ID NO: 8701 - DNA, 411 bp, Glycine max
  Clone ID: jC-gmle01810034a11d1
aagcgaccaaagaggttttatttcccattcaataaaaagcttgtattgtttacatagcaaatggatccaacttaatcacatcaattatgattgcgagtttgcaattgtataatgaaaatcctgcttgttacaagtccaatctggccacattgccaccaagctgaaagtaatacccattcccccataacccaaaccaatgggggggaaaaaaaagggtaaagaaaatcagaggttcagttttacacacccaccaacatattgacatgtgaccagctcctcctaactgtaccccctactggggatttgtctcatctagtatccaaaagctgctttctcactatagggacaaattgattcttcaaattgggaaaaatcattataaccaaattgtttggtgggctaacaaataaa

SEQ ID NO: 8702 - DNA, 299 bp, Glycine max
  Clone ID: jC-gmle01810034a12a2
ggcagtcgccggtgccggcgccggcgccggcactagatgccggagcatctggatccgggtcgagctcggtctccatgattggtgcttacgctgagattacttgctcagcgtctttaagctgctgaagaataatctgaatgatggatcgatttagtgtgaagattatcgattcctactgcacactcagaagaatcgcagctgctctataatacgttacgagtgatgattatcctgtacgtgtcaaacatagagacagagggactgtacaccattcttatattgaaccatgtaacgctggt

SEQ ID NO: 8703 - DNA, 435 bp, Glycine max
  Clone ID: jC-gmle01810034a12d1
tttctttttttttttttttttttttttttttttttttttttttttttttttatttctcaatgattatttgttaccacatttttttataagcgaggaagggtagacaaaaaccttaatttttgttagtaaagaacttacgatgggttgtatcagaagaaagatcatgactctcaagcatttgaatactactagaatctccagaaaaatggactaaagatgagcaggaaaaagcagctctggaagaacctggtttaaggagccacggtcccacggacttaaggggcaaactgactgcaggaaagttgctggttgaagttctgggtttcacaaaatgtgcaagagagacgtctgcttcggcagggttagaaactccctcttggaaggggacctcaaacagcaaagactggtacaaacaaactttatcttccttgcaat

SEQ ID NO: 8704 - DNA, 408 bp, Glycine max
  Clone ID: jC-gmle01810034b01d1
tcgcccttttttttttttttttttttttttacttttttttttttttttttttttgggtcttgtggtggtctttttaattatttttatctcgtttttttttgttgataaccaaacagtgctaaaagaccagacccttgggttttgtgaaacgccgtacccgagggaatggcccccaaggagaaagcacgcggctgaacatcagcgaaaaagaaggggctctctgtggaagagaaaaagaccccagcccccaatgcgcggggggaaggccttccccccgagcgggggggggggggagtaccaatgacgcctgtgggtgggggaatatagcgctaccagggggggggtctgccggttagggccacacccagcgggctgtgggagtttcaaagcaggaagggcgcggtagaa

SEQ ID NO: 8705 - DNA, 473 bp, Glycine max
  Clone ID: jC-gmle01810034b02d1
tttttcttttttttttttttttttttttttttgtttttttgtttactccaattgcggattatcatttcattgaatcgactataaacagccagatattttggtcaaaaacaagaaccacggtgacacaaaaccttaaagatcctcaaactcaaacacaactaaaagtactgagcctaatcataaaccctaatcaacgacatcaagccctagtttcttaaggctacatcaccaccgttaccaccacgagagaaaccacggttaccaccaccaccataaccacggtctctggcgccgccattgacaccgttaccggcaccgtcatattcaccggcgccgtcttaacctacaccgccaccggtacggttgtatccccgttcaccaccgggaccaccaccaccattttcaccaccgggaccaccaccatatgcaccaccttcaccgactgcgccgacaccggcaccacgggactgagc

SEQ ID NO: 8706 - DNA, 412 bp, Glycine max
  Clone ID: jC-gmle01810034b04d1
ttttttttttttttttttttttttttttttttttttttttttttttttttttatttttttttttttttttttttttttttttttttttttttggaacacccccagaacaagggggggggttttttataaaaccaaaaaagaggccggggaggggcaaaaccaaggggtttaaacattttttaaccccccccaccccccataatggggggggtcaaaggggccccggggagcaccccacctaaattttttccaccccttcggaaaggggaggggggcaacgtttttccctggggggccaaaacgggggagaaaaaaacaagcttcccccaagggggggaaaaacaacagaaggggcgccgcccgcttttggggggatccccccacactatgtggcgggggggggaacccctgg

SEQ ID NO: 8707 - DNA, 414 bp, Glycine max
  Clone ID: jC-gmle01810034b05d1
cgtaggccgcccttcgttctttttttttttttttttttttttttattttaaattctgaaaagcaacagacaaaagtgacgtgaggattttctatatgaaaaaatacaagcttataaacctttgtacaatgtataccactactggttgtccatatactaatgccttggggctttcatatgaaattcaccaaacaaaatatttaactaacaaaaatgggttttgagcctttctagaaaggccccaagaaatcgaaagggcggattggccaaaaaaaaagtgtgccgccggcctcacgccacttttatgttgaacagccttataggggaagttcagaaggaatgttgccgcctataaagaacccgagggcaagctcgccattcttgattcattcccagcagaaaacttttccatttt

SEQ ID NO: 8708 - DNA, 300 bp, Glycine max
  Clone ID: jC-gmle01810034b07a2
aaaaaaaaaagaaacaaaacaaacctacttgaagataaaaaaaacacgggagctctctggctataggaggtacccaccttcaaagtaatcactgctcggtaccggcaggaaaaccaggtcttcctgtagggaagacaagacatagcttggcgcaaacaagcactaaggggattcactgggcagaagatgtttaccttgcacaaaaccacagaacgaccaaggcggaagcggaaacagcaacacctgtggcgcctaatgagggagctaactaccattacttggggagggcacactgcgttg

SEQ ID NO: 8709 - DNA, 450 bp, Glycine max
  Clone ID: jC-gmle01810034b07d1
atcctgcgattaagtcccggctcgccgagtctcactaggcgcgggctcgccctttttttttttatttttcattttttttatatttttattatctgtcaaaacgcgcgggagagctctttaccaaagattggtttcaacctaattaaagggtggctgtgtaaaagcaaacgacttagttgtctttgaacccataccttttaaatatctaatcggacgttcgggtgctttatctggacgatgctgtgctgtgccctgtctactatgaagcctatccaccagcgtcgcactggcccatgctgttaccttgtgatgttgacagctgtctagtacaaaagattggcgcagctggtaccttacattgcggcccccactgatacactgctttaaccatacatggctaagctggtgatgtgactgaccgcctttttgccataaccattttgctctggg

SEQ ID NO: 8710 - DNA, 606 bp, Glycine max
  Clone ID: jC-gmle01810034b08a2
acgaagcttgcgcgtgctctcatcagtggccagcctgtagaaccaggtccacaaccccctgacctgcttgataagcaaataagcttattaacaccagttgtgatggatgcaacccctattggtgtaaagtttggggattgtagctctgatgttcccaagaactcgaactttaagagaggtgacatggtgtctgttactttctggtctgcgtgccctcgtaacgaccttatgactgaaggtacattttccctggtggaatttctccaaggaaaggatacttgggttcctgcttatgatgatgatgatttctgcctgcgcttcaagtggactaggcctttcaaactcagctctcacagtaaagctaccatagaatggagaatcccacaggatgtaacttctggtgtatacagaatcaaacattttggggctgcaaagggcttgttaggatcaatttatcactttactggatcatctagtgcatttgtagttgcataagaaaggggggcatactgattgataaacgtgtttatggttcaacaccaatctactatatgtggttattgactgactgtgcacaatcctaaaattaataaggatgattcttcg

SEQ ID NO: 8711 - DNA, 507 bp, Glycine max
  Clone ID: jC-gmle01810034b08d1
ccggtggaatcatccttgatttaattttaatgtattctgccacagttcagtacaataaaccacaatatagtagtaatggtgttcgaaccattaaacacgtttaatcaatcagtatgcccccctttactatgcaactacaaatgcactagatgaaccagtaaagtgatgaattgatcctaacaagccctttgcagccccaaaatgtttgattctgtatacaccaggagttacatcctgtgggattctccattctatggtagctttactgtgagaactgagtttgaaaggcctagaccacttgaagcgcaggcagaaatcatcatcatcataagcaggaacccaagtatcctttccttggagaaattccaccagggaaaatgtaccttcagtcataaggtcgttacgagggcacgcagaccagaaagtaacagacaccatgtcacctcttttaagttcgagttcttgggaacatcagagctacaatccccaaactttacaccaataggg

SEQ ID NO: 8712 - DNA, 549 bp, Glycine max
  Clone ID: jC-gmle01810034b09a2
cgcaccactagcacttcattgagttcatttcacagttcctattcgtaccaaatgacagccaccaatgcgagtttctctctctagaaccaccgaagcgaagaagaagagagaagagaatcacggtttcgccatggacgcggcatcgcagctcgtctgctgcggaatcgatcccttccatcgcgcctcctctacttgcccgcgccaccgccgccacagcaacctcctcctactacgccgtcgctccagccgtgtcttcgccgtctccgccgagccgaaacccgccgtcaacggagcaaactcgaggccgcctccgaccagagccgtcaatggcggcgtctccacgagaattggagatgtttcgaaggagattaagagagtgagggcgcaaatggaagaggatgaacagttagcgacgctcatgaggggtcttcgaggccagaatttgagggactcgctcttcgctgaggacgatgttgaacttcgtcttgttgaggtagacgagagtagagagtttttgccattggtgtatgatcctgcccgcatttctgc

SEQ ID NO: 8713 - DNA, 400 bp, Glycine max
  Clone ID: jC-gmle01810034b09d1
aattacaggggtcgaaatcttgtgcgcccaactttctgtgtttgagtatgaatctctggactatatctgaaattagttatattattatcatgcacagagaatcctacaaaacggtattaaatgtataggaagtgagatgtgaggtggtggggagagaaaaaaaccgttccacaggatctacgggggaatctaaacgggggaggggcccccatttgggtattataaatcattgtccgtagcctgtcatgacttctgcgaaattctccccacgagcaagacaatctgccacttacgaggtgcccacctcaaatgtagtgttgcatagcatcgcggaaacctttgccaccacgcatgtcgtccttcaaagcctgggcgacctccagcacacgctttagatgtt

SEQ ID NO: 8714 - DNA, 619 bp, Glycine max
  Clone ID: jC-gmle01810034b10a2
cgaattatatctacaatttctcgtttgtgacgaacgagaacgagagctatttcacatactccatgtataactcgtccatcatatcgcggttcgtgatggatgtctcggggcaggtcaagcaattcacgtggttggaaaaatgctcagcagtggaacttgttttggtcgcagccgagacaacagtgtgaggtttatgccttttgtggcgcgtttgggagctgcactgaaaattcaatgccgtattgtaactgtttacctggttttgagccgaaatcaccgtctgattggaatctggttgattactcaggtgggtgtgaaaggaaaaccatgttgcaatgcgagaatttgaatccctctaacggggataaggacgggtttgtagcaattccaaacattgcattacctaaacatgaacaatctgtgggatcagggaatgcaggggaatgtgaatcaatttgcttgaacaactgctcctgcaaagcttatgcatttgacagtaacgggtgttcattttggttgacaacctctgaatttacaccagtatctcagatgatagtagcggacaaactttgatgtcaaacttgcacatctgagtttatgatgataaaagcaaaattgg

SEQ ID NO: 8715 - DNA, 509 bp, Glycine max
  Clone ID: jC-gmle01810034b10d1
gaagaccaaaataaaatggggtgcataaatttaggcatttagcatggcattacagaataaaagataataaaataccagagagaaaccaaacctatcatattttgatacaataggtagcacaaaccactcccctcctcacagcatactcctttcttgaaccggaaatttctaatgagaaaaattaaaaaattcgcactcatatctactttgtgtctttctcctgttagaaaattccagagatggagaggcctctggataaccaagataacatcttgtctgatctcaccaaacacctctccagatcttgatcatatcattgaatacagtaacagctatatcaaattatatattgattgaaaaataaactaacatggaaaataaaatctagtgatttgcaccatacattacaattacattggtaaaaaccgaataagaaaaaaagacataaacatgccctctaattttctccttccaaggacttggagcttgctgaagagatgttacttatg

SEQ ID NO: 8716 - DNA, 567 bp, Glycine max
  unsure at all n locations
  Clone ID: jC-gmle01810034b11a2
tgaagaggcttacaacaagctaatagttgaacttgagaaaagtgttcctacattggttggcattgaatgtcccaaggatgagaaacttcctcgtcgcaaaatttttgacaaacctaagacgcgctgcttcactattctccctatggagtttaatcttgtggtccgtcaaaagtttttaaattttgtgaggttcattatgaagaaaagggacaagcttagttgtcaagttggaatcaacccatactccatggaatggactggtttggccaatagattactgagtaagggcaacgatattctgtgttgcgattatgctagttttgatggtttgattaccaagcaagttatgagcaagatggcagaaatgataaacagtctttgtggtggtgatgaaaaattgatgcgtgaaaggacacacctgctgttggcttgttgttcaagaatggcaatttgtaagaaagatgtttggagagttgaatgtggaatcccttctggatttccgctcacangtatttgtaatagcatttttaatgagatgctcattagatatagctatgaaaaattact

SEQ ID NO: 8717 - DNA, 441 bp, Glycine max
  Clone ID: jC-gmle01810034b11d1
aaacacactcattggacatagtaatgcgctttatttaagtgaataaaatattacatactagttcacaaatgcaaaaggacactcatcaaccagatatttgagactcttacagttctcaaaaagtcgcgtcagcataggggtagtggcgttagaactcaaaatttcattcttaacgccaaaaagaacagccagtaaagctactggaaaaggatcaacttttgtaagaaaaacaatttttttacctctcccaagtgctgggcgaatccttttgttgatatctgaggagcgattgttaactgcagaactaatccaagcagtggtgggtaaaccaccacgttcactaccacatgttacatttacaacgacagcttctgaagggaattgacttacaggataaagacaattcacaaaaattggtgaccaagaatccactggaaaatt

SEQ ID NO: 8718 - DNA, 499 bp, Glycine max
  Clone ID: jC-gmle01810034b12a2
gagcaatacaaagacccaaattcaagcctatgtttttgatgtaattagggcaagtgttccaaaactaaacttggatgatgcttttgagcagaaaagtgaaattgccagagctgtggaagaagaacttgagaaggctatgtcagcttatgggtatgaaattgttcaaacactgattgttgatatagatccagatgtgcatgtgaagcgggctatgaatgaaatcaatgctgctgcaagattgaggttggcagctaatgagaaggcagaggcagagaagatcttgctaatcaaacgagctgagggcgaggcagagtctaagtatctttctggtctgggtattgctcgccaacgtcaagcaattgtggatggcttgagagatagtgtgcttggattctcagttaatgtacctgggacaagtgcaagagatgtcatggacatggtccttgtcactcagtattttgacactatgaaagacattggtgctgcctccaagttttct

SEQ ID NO: 8719 - DNA, 483 bp, Glycine max
  Clone ID: jC-gmle01810034b12d1
gttatatgtaactttcacaatttagacaacttgtatatacagggatacttgatagtttagttatgcatgatccacaatatagacaacagaatatacagtattacttgactgcctgaaactgaaagtataaatcgatagagtaagtccttgaactggtcctccaaagattttggtcaacaaatcaatcccacagagatacaaatcaaatactaaattattttgtgttaccacttctttagtcctctatgtgaacaaatgtgggaaccttttacatatttgtgggactaatgtgatgacaaaaatgttaagaacattaatgaggtgatgccataatctttggaagatcaattttgcagtttattttaaaacaaaagcacaaaacacactgtacagaaatacaggtgtacaaccacaggcgctatagcttggaacatactcccatacgaaccagatacaatatctaggtggagtaaaggctactga

SEQ ID NO: 8720 - DNA, 383 bp, Glycine max
  Clone ID: jC-gmle01810034c01d1
aaaggaaaggggcttttttggtaacgacattacctatatatatatatatttcactacccaattttaattaaaaatggccttggggttcacattatttaccttaaaaatgcggttacaagacctatacccagttcctttggaagctcatccccaacggggacaagagtccagacaacacgaaaaattgcatttgccacaagggcctttctccatgtgccaacctgtggcacatcatttaaccatggttttttcggtgccctttgacataacaaaacataaagcccccaagggagggaaagagggccaccaagcccttcttatccaagccatgtatatgttggtaaaacaaagcccaatagcgcatttttttcaaaagcaccctg

SEQ ID NO: 8721 - DNA, 440 bp, Glycine max
  Clone ID: jC-gmle01810034c02d1
aaacaacaactaaagggagacaatttatttgttagaaaataaatgtaaacatcatcttatttacagacactgaagatttaatccaacaatggatgaatgattgttaccactgttttatctaatttccaccataaaaagttaaaaactaactgaattctattaaaaaaaaaatcctacctacttttggcagctggataaaactaatgcttcctacgttaatttacgccatctttatcctaataactcaagccttcaaatggtgaaatgcgaacaagaaattaaaaatggaattttcgcattaagatggattaaaaatgaccgagatgacaccataaaaatcatttgaatcaatttaatgaccaatgatttctcctatgtttagctatcgttgtatgcatagaaatggacaaagacttcgaagttcaacacgtttcttagct

SEQ ID NO: 8722 - DNA, 538 bp, Glycine max
  Clone ID: jC-gmle01810034c03d1
acacgggaacacacataacatatttcataacaagtcttccttcccaagcatgtataaaatcaacaagggagcggagtatgaaaaaagattacaaacagagaagtgctagtaacaaattttctagcactgtctttctcatgccctgttttatccgctaaaattcatgtgattcttactcatttataaataggacctatcaaataaaaatgaaactcatatatctaataggatacacatgaatttaacctaacaaaaaaagtcataaaaaattgtactactagcatttctctaacaaatattaaacttaagagcccaaaagagagataagagaggcggagtatatgcacacaacaattcaacacaatattcaaaccgtagtgatactctccagtctccattgattcccttgataactggaagatgtaactgatataagttttcctatgcttgctcccactttttaagtttgagactcttcataaagctgtgcatagaatctcctcgtctgtgagcacgatcaagctcaagatgctgacat

SEQ ID NO: 8723 - DNA, 290 bp, Glycine max
  Clone ID: jC-gmle01810034c04d1
aaaaagagtgtaatgtaataatttaatatggtacacacacctacacgacaagtttcgtgagctgcagaattagaaaataagcaatacagacaatgaacaaggaaactaagaaataatttatgcaaaactagagattttctttgtgtgggtgcatggatatatcaagcatcaagttgaagcctccccattcaagcgtatttttttaggacctttttattcaccttggttgcaggctgttccgatcctgtttttattggcctctaccgaacatcttttgtaaggattaaacc

SEQ ID NO: 8724 - DNA, 147 bp, Glycine max
  Clone ID: jC-gmle01810034c05d1
ggacaaataatcatgctttcttcaagatgcatgccttgcctgttataaaatcatccacgcatgaacataacagtttacacctacatccctatctcaatgaaaggggcagttacagtgtcactaaataaaacatttggtttatttagt

SEQ ID NO: 8725 - DNA, 543 bp, Glycine max
  Clone ID: jC-gmle01810034c07a2
agaagaacgagtgagtgtgtagttgaaagaatgctatgttgatgatgacacatggatgatggatcatggatcatggatcatggatggatgattaagatttttcttcaacacaagggaaggtagcaaatagaaaaaagcacctcaatttgtgaaagcattgcttgcagtacataagcactaacaacacagtgtgtgaatatatataaactaggtagcgtagtagtactattattactaaacttgttacatcaaaaaaacaaatggagacacacgctgagataagggtgtcaaagttcaagagggtttgtgtcttctgtggtagtagccctggcaaaaagagaagctaccaagatgctgccattgaacttggcaatgaattggtctcaaggaacattgatctggtctatggaggaggaagcattggtttgatgggtttggtttcccaagctgttcatgatggtggtaggcatgtcataggagttattcccaagacactcatgcctcgagagctaactggtgaaacagtgggagaaagaaaagctg

SEQ ID NO: 8726 - DNA, 269 bp, Glycine max
  Clone ID: jC-gmle01810034c07d1
cacatgggaacaaagtaggaccacatgtccagaccactcccggaactttacaggagacatgacctttatttttttgtctttagaggggccaacaaaacacaatactgatattccaccctaccttcttacaccttctataacctatctaacgtcaacttgcctgccctggaaacacaatctgctaccccgacatgtaatactcttatgggccagcgacctgttggaccatctggaacctcagcgtaaagacgacatttctatcgacacag

SEQ ID NO: 8727 - DNA, 539 bp, Glycine max
  unsure at all n locations
  Clone ID: jC-gmle01810034c08a2
gattttggtgctgtgagaaatttatagagagagaaagagagatgtgtttggtttgtggaataatgggtgacttgaatcgttgaatgagatattattgagtttgattcagaaatgaacaaagacgaaagcgattggaacgaaaagaaagcgcaagatattaagctttggggagttttcatcttcagattaatcggcgccaccgtcactgctttctccgtcgcaggcaaaaggaggcagctctttccgaacagcatttcaagaagaagcatggaagaggtacaataagcgattgcaagaggagtatgatgaggagatggagagggtggaacgaataagacgtatgcacagtgtgtataatagagaaagggataagcatacaagaaactactagagctggaacgaaaatggtgccggagcacatcatcaacattttcaaagagatgaatggtattggaaggctgaagcatccttcanagagcagtgggccaatcaacatactcaaagagggagcggaaactattccgtatcacatcactact

SEQ ID NO: 8728 - DNA, 539 bp, Glycine max
  Clone ID: jC-gmle01810034c08d1
gcaatgcttattaattaaatatgtatttcttcaatcaatttcccggaaaagaaattcaacgcatccaaggataacagctttataatacaacacatcaacatcattattaatttatgatgtgataatttttaaaaaaaaaatatatgatatgatgtgataattacccaaaatttactagcagcaaaatcatattttagctggatgataatactattttatgaagttaaggaggacctttgatgatgattttgaatacctcacctttaaggttccaggattgttaggcagaggtggccaattacagattctggttttttctttcctgttgtatggcctcatatgaacaaattacttctttgaacttggcctcagcagcctctctattatcctggttctggtcaggatgatactgctttgccttggtcctaaatgcttaatctccgcttctgtatatggtgttgttctaaacctgtcaagacctaaaactgagtagtgatgtgataacgaatagtttccgctccctctttgagtatgttgat

SEQ ID NO: 8729 - DNA, 316 bp, Glycine max
  Clone ID: jC-gmle01810034c09d1
tttttttttttttttaaaattttgggaatttaatttttttttttttttgtaactagctaattgttttgttatagaaaacaaagagcgatgactgtaacgtgcctaaggaactaaactcaaagtaatttttatttcaaagggattttctgccctattttaaattatattgttttttaaaaagtttggtaaataactaccattgaaaggtacacataatatttaaccaagttataactcgggattgacggtctacgctagcttcaacagaatgacgaatgctaatcttttcaccagcataggtctgttgaagccattc

SEQ ID NO: 8730 - DNA, 520 bp, Glycine max
  Clone ID: jC-gmle01810034c10a2
cagaagttaaagaagagggtatttttactcgtaccagtactttggagagtatcgattgtgtggaaaccatagaacaggggtttattcccttgactcgtattgaagataatttgaatgggacacaaattgcacataaagctggcgaattatctgtatttttgggtgtaccacttttttactgatgagaattgaacttaattagaaattaaattgcacaaaaagcttcagaattgtcctatttattgagtgtacctttatgaaatattttgaaaaaaaaaaaacgtttttttttttaaaaatataaccatttttatagatgaggcgatatttgtttacgaaatgcgataattgtcttcctaacccgaagtgctctttggtgtatttataagaagtcatagttttttgttgaatcggaacaattgttatcctttcgaaacaccaaaatgtacttatttgaaatgacagcgaaaactgtcgagttcaaatcatacatgcctcctttttctaaaaaaacaaggga

SEQ ID NO: 8731 - DNA, 578 bp, Glycine max
  Clone ID: jC-gmle01810034c10d1
tttcttttttttttttctattatactgatattatactgaatagaattacataaagtatcaacaaaaaaattgagttatttttatgagtttaatatgttgataaatatgcgggactagaaattcattttggacaattgaaccttctcaaattgtttcttcttaagaactaaaaagatttgtgctaaaataatagatgcgaagaagaacaagagaccttggacacgtaacggatcttgaagtactatttccgcatccccctgaccaaatccacccacatttggattacttgttaatggctgatcaagttcgatagattcaccttctgaaacaagaagttctggtcctggaggtataatatcaatcacttcacgcccatccaatgcatccactatagttatttcgtatccccctttttcttttcgtatgatcatggttaccatacccgctgctgcagcattatacacattattattactcttgctcccgacaagataaatctgaccccttcccctgttcccacctacgtatataggatattttaagagatgaacatctctcttagtagtgggatcccggga

SEQ ID NO: 8732 - DNA, 542 bp, Glycine max
  Clone ID: jC-gmle01810034c11a2
aattaatatgcacatcaccttcttctcctactcctcattaagctagttagctatctatctaggtgcaaccttttcatcgatctatcaccctctttcatatattcctaacttgtcccccaaaatcaaatggctgcgaaacggttttttgatgattctgatcaagacaataataagccaccaggcgataaacggatgagaactacaccaagaccttcttttgcttcggtaataggagaagtgatgatggtgaaaaacttgcagaaccttttctcaggcttggagcccttgcttagaagagtggtgaatgaagaggtggagcgagtgatgaggcattgtactgtgccacgtacaataagaaggtccccttcgttgaggatcgaagcagcatcattggagaaaccatcgaactatgaactcatgttcagcacgaagctattggtccctatattcacaggaagcagaatagtggacatagatgggaacccaatccaggggattctggttgacaaaagtggcggtgatggtgaattagtagcggttcc

SEQ ID NO: 8733 - DNA, 531 bp, Glycine max
  unsure at all n locations
  Clone ID: jC-gmle01810034c11d1
aatgaaaggattagatcattatcaccatttataaaacatcattgatgtttcgtgattgctgaaattatggtaaaacatagcaacactagcccagcaaaggcaggttgcattttttggagaagagccaggcctcatctttgcacagatccttgaaatgggcctcacaatacactacgcctaaccagaaagagaaaaaggaaagcccaatacgagccaagacaggcggggcagagtttatgtaatgggccaacactacttcacactaagtcactgaaacctaatttgattcttcaattgttaattcgtatttacggctgaaagtcaaagtactaaatttttgttctaaggccaccttgcggcaccatcaactgaggggcttatgtcactgtccgattgtgaatctaagaagctgtaaggtatgccattcacaaatgatgttgtgccaaatgttccattcactgcccactcgctgcatccaattgtgcattatgggttggtacatagntaccaacttcgcagattatcaccaaa

SEQ ID NO: 8734 - DNA, 477 bp, Glycine max
  Clone ID: jC-gmle01810034c12a2
attaattgtacatagttttcaagtgtatatggcaggctttagggatcttaatgagatattagttgagtgcttaaacctttatcaacaaacctatttaagggactgaactttaatttataccaatcgaggacctcaaatttattaaattttgtattaataaatgctcaggagacaaaataaaatatcaaatttggcatgtgataataatgataatatcagcaaagcacctagtgtatatgatttaactttgtaaatacataactatgattgttactattgtgataaaattgaggccctcaattgatattgaaataagttaaggttcttaacataaatcttgaagataaaggcttccttaattggttataacattatagttaaggtccttcgagtacaaactagttgaggttactcttcatattgacattctcaaagaaacacgtgtattaattttttatgattggttgtatcggagag

SEQ ID NO: 8735 - DNA, 474 bp, Glycine max
  Clone ID: jC-gmle01810034c12d1
ccgaaacaaccaatgataaaaaattaatacacgtgtttccttggaaatgacaatatgaagagtaacctcaacaagtttgtactcaaaggaccttaactataatgttataaccaattaaggaagactttaacttcaaaatttatgttaagaaccttaacttatttaaatatcaatggaggacctcaattttaacacaatagtaacaatcatagttatgtatttaaaaagttaaatcatatacactaggtgctttgctgatattatcattattatcacatgccaaatttgatattttattttgtctcctgagcatttattaatacaaaatttaataaatttgaggacctcaattggtaaaaattaaagttcagacccttaaataggtttgttgataaaggtttaagcactcaactaatatcttattaatatccctaaagcctgccatatacactttgaaaactatgtacaattaat

SEQ ID NO: 8736 - DNA, 461 bp, Glycine max
  Clone ID: jC-gmle01810034d01d1
ttgttttttttttttttttttttttaaactacatctaaagggagacaatttatttgttagaaaataaatgtaaacatcatcttatttacagacactgaagatttaatccaacaatggatgaatgattgttaccactgttttatctaatttccaccataaaaagttaaaaactaactgaattctattaaaaaaaaaatcctacctacttttgtcagctgtataaaactaatgcttcctacgttaatttacgccatctttattctaataactcaagccttcaaatggtgaaatgcgaacaccaaatttaaaatggaattttcgcattaagatggattaaaaatgaccgagatgacaccataaaaatcatttgaatcaatttaatgaccaatgatttctcctatgtttagctatcgttgaatgcatagaaatggagaaagacttctaagttcaacacgtttctt

SEQ ID NO: 8737 - DNA, 462 bp, Glycine max
  Clone ID: jC-gmle01810034d02d1
tcgccctttttttttttttttttttaaaccacaactaaagggagacaatttatttggtagaaaataaatgcaaacataatcttatttacagacactgaagatttaatccaacaatggatgaatgattgttaccactgttttatctaatttccaccataaaaagttaaaaactaactgaattctattaaaaaaaaaatcctacctactttaggcagctggataaaactaatgcttcctacgttaatttacgccatctttatcctaataactgaagccttcaaatggtgaaatgcgaacaagaaatgaaaaatggaattttcgcattaagatggattaaaaatgaccgagatgacaccgtaaaaatcatttgaatcaatttaatgaccaatgatttctccgtatgtttagctatcggggaatgcatagaaatggcgaaagacttcgaagttcaacacgtttctt

SEQ ID NO: 8738 - DNA, 483 bp, Glycine max
  Clone ID: jC-gmle01810034d04d1
aaccaaggtgttgcattgctattctccaatcaataaccatatgatgaagaattaatatcttgttccttactgctaatatatagactttacaaattgaacaaaattcagggtaacttcatccctttaatcaactgtgatgaccaatatctataatgaatacggctttcagccagctcctatactgtctgcatctttggaagaatatatgtgacattacatcaatggtaatgatttacttcttcgtcactttagcagcaacacattaatgagttatgcgcttcagcacaccagcggtaactggttaactcaaaaagcatttgcaagttacagcttcacggtgaaagtctaccttgttttcttgtttgtaatttttggattcttggacattcggatacttgcgggggtgacctctactagttcatcttcttggatgtattcaatgcagtcatccagactatagtccaatggcgtatcaagaatcac

SEQ ID NO: 8739 - DNA, 498 bp, Glycine max
  Clone ID: jC-gmle01810034d05d1
aaattcaagtagacataattaactctaattgcagggcaggaacaaatggttctaagtaaaatttctccgccacccaccccaatccactggcgtgcgactgggttccaaaacaaatcaaaatttacctaacaaatttttagcattacaaccaagtttcttccaattacaaccaccatatcaaaatatcacagcactcatattacgccaaaaaatgctggcaccccaatcatccaaagttggaccctcaggatattttacattcggtcttctctcctcctcggagcacacgtgatgatttcatcaactctaaggatcatctcagctgcctctgttgaagatagcaatacagcttgcttgactttgaatgcttcgcatatcccccgttcagccatgtctccaacagagccagaaataacatcaattccagcagtgcagccctcctctgatgctctgcacgagctgagaaataactcagcactgtccaaaccagatatcagc

SEQ ID NO: 8740 - DNA, 547 bp, Glycine max
  Clone ID: jC-gmle01810034d06d1
agctactattactcggccgccctcgttctttttttttaaaaaattataattccaaacatccatccatatagtgtatttaaaagttcgcaagaataattgctatttgacatttgttataccttcactgcatataacatagtactttatatatcatccaatatccatactgctttatttctgaaatgatgtgtacgagcgtttatgcactttgctaagcatttatgataccttgctccaaatagacacgggacaccactttatatttattctcccaacttattcgtatttaagaaaactacattgaaactcaaccttatgctcgaaattaagacccatttccaagcataaaccactgctgcatgtcgcgtcggcatttggactgctagctgatgacttattatttgatgagaatgcatcttatgggtgatccctcagcaccagccaacctaagaggtatgcaatggaccgtatatattgctgctgccacatcatgaagcttgaggccttccacgagaatgatttccctgcctttcagaaaaacaaggtg

SEQ ID NO: 8741 - DNA, 505 bp, Glycine max
  unsure at all n locations
  Clone ID: jC-gmle01810034d07a2
acaagtagttgagaactaagaaggagaagcaaatggcttcctcaatgatctcttccccagctgttaccactgtcaaccgtgccggtgccggcatggttgctccattcactggccttaagtccatggctggcttccccaccaggaagaccaacaatgacattacctccattgctagcaacggtggaagagtgcaatgcatgcaggtgtggccaccagttggcaagaagaagtatgagactctttcctacctgccagaccttgatgatgcacaattggcaaaggaagtagaataccttcttaggaagggatggattccttgcttggaattcgagttggagcacggtttcgtgtaccgtgagcacaacaggtcaccaggatactacgatggacgctactggaccatgtggaagctgcctatgtttggttgcactgatgcttctcaggtgttgaaggagcttcaagaggctaagactgcataccccaacggcttcattcgnatcatcgg

SEQ ID NO: 8742 - DNA, 385 bp, Glycine max
  Clone ID: jC-gmle01810034d07d1
gattaaaacatatgactatttctacattacttcatagagtcacaccccagccatgacacatataacatcttgttcatgcgttcgcatcaggataagaacatcacagtggttgttgaacataggtattgttatcaaattaggacaccgcccttccctatcccctaataacagacgttatcttaccccaaaaaaacaggacgagaaaagcaaacccacaaaagttctcataggatgccatgcatgtcaatatacattatctaaacacacattagcccatggtatacttctgggtacagatgcgtgcagtggccttatacttggcccggacagttttagacatgtgagcgatttacggaacaagtggatcatcaggatttggatcagt

SEQ ID NO: 8743 - DNA, 107 bp, Glycine max
  Clone ID: jC-gmle01810034d08a2
gtaaattctatcttgcttgagttattattggcttcacacataaattgcgtgtaactgtaaaccctggctgagagccataaattcaaataaatcttttagttgctggc

SEQ ID NO: 8744 - DNA, 107 bp, Glycine max
  Clone ID: jC-gmle01810034d08d1
gccagcaactaaaagatttatttgaatttatggctctcagccagggtttacagttacacgcaatttatgtgtgaagccaataataactcaagcaagataaaatttac

SEQ ID NO: 8745 - DNA, 494 bp, Glycine max
  unsure at all n locations
  Clone ID: jC-gmle01810034d09a2
ggcccctctctatgcacgttccacggttgagtttttgccaaaatttagtgtgagaggagtctggcagagatggcgtgagtcatatccaaccgatggttctaaggctgaagaggctttaactgggttcactgtagatccaactatctatgcccgagtgatacaagggtctcatgcaagggatcctgagctacaagctgcttcagtatctgctgcaaaaacacagcgtgttatcatgtgtgggacctctgcactcacactgcctgttatgcaacaatgggaagccatcactgggcatcgtttattggaacgatatggcatgactgaatttgttatggcattgtctaatccattggaaggcgagcgccagcctgtaaccganggcaaaccatttcctggtatacaggccaagattattgcatatgaagacagtgtcaatggaaatactggaatgggtgagctatgcattacaagcccttcattcgataaagaatatt

SEQ ID NO: 8746 - DNA, 482 bp, Glycine max
  Clone ID: jC-gmle01810034d09d1
caatacaataaatacttcttattaaacacattcaatcaatcgccttcatacagctaaaatgctaaaattatgctatactttctcctttatcttccccctaataatatgctaaaacttattcaacttataaatgtcataatataaaggtttctatttcactcaataattggcgcaattttatttgagattgccaccatcttaaactggtttcaataaattaactttgcctagtgaatatgaataaatgatcaaatggtgttcactgttctgaaacaagcagcttcttcagctcttttttatttaccttccccatgggattgcgagggagtttatcccacacgattagctgagttggaatcttgtaaggtgcaattttgtctttggcccagttggataattcttctaggcttagaacaggctttgattctcgagcttcgttgtcgttaacatcggcctgtggcacaacgattgcactaacaatc

SEQ ID NO: 8747 - DNA, 534 bp, Glycine max
  Clone ID: jC-gmle01810034d10a2
ctcagtgaagaaagaaagatatgagataattccttctttatcttttttcatagcagtgaagaaaaaactgagaaagcatgggcgtggactactacaagattcttcaggtagatagaagtgccaaagatgaggatcttaagaaagcatatcgaaggctagccatgaagtggcaccctgataagaaccctaacaacaagaaagaggctgaagctaaattcaagcaaatctccgaagcttatgatgttttgagtgatccacagaagcgaggaatttatgatcagtatggtgaggaggggttgaatggggtgccgccaggcgcaggtggttttcctggtggtggcgacggtgggccgacgtcattccggttcaaccccagaagtgcagatgatatattttccgagtttttcgggttttcgagaccctttggtggtggaatgggggacatgggtggccgagctggtggctctggattttcaggggtggcccgtttggtgaagatatctttgctcaatttatgaatgcagctgttgagag

SEQ ID NO: 8748 - DNA, 441 bp, Glycine max
  Clone ID: jC-gmle01810034d10d1
aacaaatatcatcctttaataaactgttctaactgaaatccaattcacagcggcagcaatttccatttgaaaacaaataaaccgagcataaaataactggcatcttacaatgttagctaaatgggaggaagagctactgctgttgcttaaggagatgtcaataatcgcttgatgccacttttctgttcggatgtaagcctggagggaaacttgattttgaacttgattcttaagtttcccttcttggaaggttcttttggaatgggcataccctctcctttgacaacttcttcatatgtaggactaatagcggaggtaatggggaatgtaagattccccccatcaagggttgttagctgcactgtgtaacctgtgaagggttctacaagcgatatcttgtgggcgacaacaagatcattgccatcccttttaagagactat

SEQ ID NO: 8749 - DNA, 475 bp, Glycine max
  Clone ID: jC-gmle01810034d11a2
attaattgtacatagttttcaagtgtatatggcatgctttagggatcttaatgagatattaggtgggtgcttaaacctttatcaacaaacctatttaagggactgaactttaattattaccaattgaggacctcaaatttattaaattctgcattaatacatgctcatgagacaaaataaaatatcaaatttggcctgtgataataatgataatattatcaaagcacctagcgaatatgattaaactttttaaatacctaactatgattgttactattgtgttaaaaatgacgtcctcaattgatattgaaataaggtaaggttcttaacataaattttgaagataagagtctatcttaattggttataacattatagttgaggtcctacgagtacaaacttgttgaggatactcttcatattgacatttccaaggaaacacgtgtattaattttttatcattggctgttttcgg

SEQ ID NO: 8750 - DNA, 413 bp, Glycine max
  Clone ID: jC-gmle01810034d11d1
caacaataacacacactttgcacatcattactacaaaaacaaaacgtgtgtgaatattcaaatcaactgagcattcatcaacaggagggacatgtctaaattcctatattgaattaaacatacgaacaaacgaaagacagcacacatgctatatcaagcatgggattcacttattatcaaaagatctcggagatgacctgcggaacatgaaaagttggcataggaatttatccagcatgttcaaaagcttgtcaatttacccagagaatatcaaaaactgcttactgactgggaatgccactaatgaaactcatgtgccaagaagcaagatttgcccactcatagactcccagtgccaacaccttcattaagaccacttgcctttattgggaagatcaatacccaggaacgtg

SEQ ID NO: 8751 - DNA, 509 bp, Glycine max
  Clone ID: jC-gmle01810034d12a2
gtacatcaagccggacgagctcgaccgagaggaggaagaagccgagcaggaaatgagtgatgacggctgttgctcgtcagaaaacgacgaggatgtgtccgagagtgagaagcccgtgaaagacccagtgcgcgttgtattgtggaaagacagcaagggcgagaagcatcatatgccagtgcttcagagcacgattgatgccgagaatggagtaggtggcaatgagaccaccaagctctagacagacgacatcggcgatatggccaatcatatcttcagtgaggaagagcttttcattgcctcccccgtagttcttgggtttgctttctctgaaaagctctggctggagttctcactgtctggtattgaggagatccagtggaatgctgaagccttcgaatcgctcgttcttgcggataagatcaagtccaacctgaagggccttgtctcgtcgcaccggttcaatgccgctcgcacgattgacgatgttattcaaggccaggggaaag

SEQ ID NO: 8752 - DNA, 496 bp, Glycine max
  Clone ID: jC-gmle01810034d12d1
aattacagggtcgaaacttgtcgcccaacttctttttgagtagaactctgacatatcgaaatagtatatattacatgcacgagatcctcaaaacgtataaatgtattgatgtgagatgagaggtggaggggagagaaacaaaccgtgccacaggatctacgaaagaattcgtccagcacattttccccattcccgtatcattcatcattgtcgtcagcctgtcatgacttctgcgaaattctccccacgagcaagacaatctgccacttacgaggtgcccacctcagctgtagtgttgcatagcatcgcggtaacctttgccaccacgcatgtcgtcctcgaaagcctgggcgacctccagcacacgcttcagatgttccatacaaagggctgtttcttcgacaatgcgattgactgtcctgtcttaacgtgtttttgatctgtcgaccgttcatattcttcttactcagctcgttgaagtcgtcatctgtgaaca

SEQ ID NO: 8753 - DNA, 447 bp, Glycine max
  Clone ID: jC-gmle01810034e01d1
aggacaaaaggaaaaggcaccaaattcaatttaagtggacactttaactcaaaattatagaggaagaccgtccaatatgaaaaatatagtaaaatcatctcaaacttggcatcttctctttgcacctaagacattgagaattctaagaatgttacacgcaagtcccatcacaacttctagcacttggatcagcacaaccttcaggaacagaaatatttacttgccaagtttgctttgcctccaattcaagattggaagaaagttcccctgttaatagcatcctcgttagcatttccaagtgcagcctcgttcaagtacttgtcagccaattggactctcttgacattctcttgttcttggacaagcatgttaccatacgtcaagagcttctccagagtcatcttgggctgctcaaaggttggaggtccatcttttgagttcacaagc

SEQ ID NO: 8754 - DNA, 556 bp, Glycine max
  unsure at all n locations
  Clone ID: jC-gmle01810034e02d1
gtgcctctcgnnnnngggtaccgccctcgaggactactcgtcggccgccctcgccctttttttttactcaccatctcatcttcactatcatcgtcatcactcgccaattcatcttccatcccagcctccacaacattctcatccatatacctaacctcatgaatcctccccttcttcttcttcttcttctccgtccctccctcaatcgaatcactaacctcaccatccctctccttctcattcttcttctcctcaaccttaaatccctcaatcttcaacttcacatcaggaacagtctggtagaccggcagagccacgctctccagcagcttcaaatgcagcgacctcacattgccccacttcttgggcacaacctccacaatcccctcaatcgcggcaacgacattctccacaatctcatccctctccatcctcaccttggcaaccctaaccacactacaggtccccgtcctcatgaacagcatcgcggacgagcaggccctctccacctgctccttccagctccccttcttcaggtccaccggcaccggaatct

SEQ ID NO: 8755 - DNA, 470 bp, Glycine max
  Clone ID: jC-gmle01810034e03d1
aacatcgtaatcataatttagattgttccccttaaagcagaggttcggactacaggcaacatctagtgctgatttttcaattacaatacccatacagaatataattggaaaggtaatatatttacattcagaatgaaacagcagcgtcagcatccatatcagtcacctctctgacgaggtttttggtggaaggcaaaccagctgttacatcctcttcaatcccacattcgtttgtccctcttcggatcttgaagtaaccatcatctccccattctctgttccactgatttgcgagaagccaatagtcctccccatcatcagttgttccccacccaattagctttactgcatgaccacctagttcataaccagtgatgtgtttgtaaactcctgatttgtagtaagcaaaatcctcataaacggtaaatgcaacttcaactggcccattcttgtaaacttccgccatgata

SEQ ID NO: 8756 - DNA, 468 bp, Glycine max
  Clone ID: jC-gmle01810034e04d1
aacatcgtaatcataatttagattgttccccttaaagcagaggttcggactacaggcaacatctagtgctgatttttcaattacaatacccatacagaatataattggaaaggtaatatatttacattcagaatgaaacagcagcgtcagcatccatatcagtcacctctctgacgaggtttttggtggaaggcaaaccagctgttacatcctcttcaatcccacattcgtttgtccctcttcggatcttgaagtaaccatcatctccccattctctgttccactgatttgcgagaagccaatagtcctccccatcatcagttgttccccacccaattagctttactgcatgaccacctagttcataaccagtgatgtgtttgtaaactcctgatttgtaagaagcaaaatccttataaacggaaaatgcaacttcaactgcccattctttgtaaacttcgcatgata

SEQ ID NO: 8757 - DNA, 403 bp, Glycine max
  Clone ID: jC-gmle01810034e05d1
agcgaacaacaaacacaatatctcatcttattgggacttgacgtggactatcaaattatgtaaaacacaaagtattacattgattgccaaataaagctcaaagactttatgaataacttctgcgacatgccgtaagcaaaggaatggctgcctctgagagagcaccatgatgaacatgatcaaagacgaacgggctacctgtctacgtgatatggatcccagacccaatatactctagctgacggccttgaccggaacgcacgaaaattcgagttccattgacctctagtggttttgcacatacaacactacgacgggtggtgtattctgcttcgtggccacatcaagcgacctgtgggagtttcaatgcatgtttcgtggggtgggtaaatagagaggcctt

SEQ ID NO: 8758 - DNA, 435 bp, Glycine max
  Clone ID: jC-gmle01810034e06d1
acacgcggaacacacataacatatttcataacaagtcttccttcccaagcatgtataaaatcaacacgggagcggagtatgaaaaaagattacaaacagagaagtgctagtaacaaattttctagcactgtctttctcatgccctgttttatccgctaaaattcatgtgattcttactcatttataaattggacctatcagataaaaatgaaacttatatatctaataggatacacatgaatctaacctcacaaaaaaagtcataaactgttgtactactagcatttctctaacaaatattaaacttaagagcccacaagagagataagagaggcggagtatatgcacacaacaattcaacacaatattcaaaccgtagtgatactctccagtctccattgattctcttgataactggaagatgtaactgatata

SEQ ID NO: 8759 - DNA, 472 bp, Glycine max
  Clone ID: jC-gmle01810034e07a2
aacaccccccacgaagcaccaattatggctctgaatctttgtatctcacctaagtttaaatgggttccttccttagatagtgcttcctattctttgagaccttcacttgggtcttgttttggtaacataaacattgctagtgtgagtctaagtactactagaagtttgagtttgaggaggagtgggagtgttagtgtaagatctagtttagaaactgcggggcccacagtcacagtgggacaggtcactgaggttaacaaggacaccttctggccgatcgttaaggctgccggggataaaaccgctgtccttgacatgtacacacaatggtgtggcccttgcaaagtgatggctccaaagtttcaagaattatctgaaaagtatctggatgttgtctttctaaagcttgattgcaaccaatacaacaggcccctggcaatagagctggggattaaagtggttcccactttca

SEQ ID NO: 8760 - DNA, 63 bp, Glycine max
  Clone ID: jC-gmle01810034e07d1
accaaagttggttcgaagttttatagaggatcggggtgttggacagattaccatatctatcac

SEQ ID NO: 8761 - DNA, 611 bp, Glycine max
  Clone ID: jC-gmle01810034e08a2
cagtgacttgagaatggccttgccagtggtcgtcgacgcagagtacctcaaagaggtcgacaaggctcgccgcgatctccgcgcactcatcgctaacaggaactgcgctcctctcatgcttcgattggcctggcacgatgccggaacttacgatgctaagaccaagactggtggacctaacggctcgatccgtaacgaggaagagtattctcacggcgccaacaatggctggaagaaggctattgatttctgtaaggaagtgaaggaaaaacatccctaaaatacatatgcagatctctaccagcttgcgggtgttgatgcagttgacgttaccgcgggtcccacaattgatttcactcctggtagaagggatccaacaatatcttctaatgaagggcggcttcctgatgctaaaagggtgtttcacagctccatgatatcttttatcgaatgggcttgactgaccgaggatattgtgcactatctggaggacatacactgtggagagcacatccagagagatcagggtttgatggcccttggacagaggacccttttgagtttgacaactcatactttgtggaactttgaaagaagattatgctgggctg

SEQ ID NO: 8762 - DNA, 489 bp, Glycine max
  Clone ID: jC-gmle01810034e08d1
aactgggaatgctaaaatttgtattaacatattaggaagttgctaccaaattgagtatttagggatagttttagtctattcatataaaaaaaagtctgaatggctcgcgcattattctttattggtgctcagtaaacagaatctgaagctgcaaaaatgaaccctgttttcacattatgggtcagggtcacgcctacgctacagccaagcgaaatgaacaagtccagtttacttccctcttttgcgaacttcatacaagtaactgatgatcaccactgcggcagtaactacaactcctacagcaccttgtgccagtatggtcccatccttaatagaaatcggctttgaacttggcacaaagcctagctctgaaaggttcttatgtgattcagcataatctcgaaaaaatgcatcctgcgcctttgcatatagctcaacataacggcgaaactcagcatcctccaataaagccctgtctgttggaagttt

SEQ ID NO: 8763 - DNA, 360 bp, Glycine max
  Clone ID: jC-gmle01810034e09a2
ctcgagccgaatcggctcgagcaaaggttgctgtaggagataagattgcagtagtgctaagtgctaacacctgctgtgaacaatggcctctgcatcagcatctctgctcaagtcttcacttgctcttgacaagtctgagtgggtgaagggacaaacccttcgccaaccttttgcatcagctgtgagatgcaaccccaccaccccatcaggcctcaccatcagagctggttcctatgctgatgagctcgttacgaccgcgaaaacagtggcttcaccagggaggggtattacggccatggatgagtccaatgctacctgtgggaagcgtttggcttcgattgggctagagaacactggagc

SEQ ID NO: 8764 - DNA, 525 bp, Glycine max
  Clone ID: jC-gmle01810034e09d1
gccgagcttaaaccattttgttatatattgagacataatcaagtacacaactcatagcaaaaggtttattaagctgtaaaggtgcatttaaccataaacaaaaatagtctccaagactataaaaacattacattttagacaaattagtcttccacttcatcgtccgtcaacacctactgtaactgctggtgttgctgcctaacaagtatcatattcactgcaaacatcttagtaggagtagcttttgacgaacaactccttcttggcttcctcggattcaccctcaccagtgtacttcccaagctgagcgagtgagttggacttggcacggaatgcgagtgcatcttgtgctgccttcacgttctctgggcggcctccccatgtcttcaaggcagtgttttggagggctctggcatacgagaatgacacgtgccacgggtttggagattggttcatggcattcaaaatgagggtagctttaacctcagactgtccaccaaacaaaaacataatttcagggacagc

SEQ ID NO: 8765 - DNA, 171 bp, Glycine max
  Clone ID: jC-gmle01810034e10a2
gagggacagggaggacaggatgtgaagctgcgacattttgtacgcgaaacagacccgctaccaagttgtactgcagacatggacgatacgggtctaacggtatcgccaagaatctttgtatgggctacaacagtcgtatcagttggtgtgtagcactagatatcatatata

SEQ ID NO: 8766 - DNA, 457 bp, Glycine max
  Clone ID: jC-gmle01810034e10d1
tttcgttctttttttttttttcgttttcagaacagtataaaatttatattcacaaataaagagacatataccctggataccggagatgactacggagtcaataaggtggcctactgcctcctaatgcagctgcggaaaacgtacaatttatcggcaccatcaaagggggcggccgggatctgcccagccaaaactatagatttatttccatcagggggtataactggcttaatgtgatccccggggccaaatggtgactgaatgacatgtggttaaacaaccaaatgcggtactgtgatgtatctatgtagataaacggttgcttccagactgtccattttattgtcaacagccgttcacggcacaccgtctgtatgagcctgccttcacacagaacctgatagatgctccacaccatcaactctgccaaacgagcatattgctccatgctacaccc

SEQ ID NO: 8767 - DNA, 471 bp, Glycine max
  Clone ID: jC-gmle01810034e11a2
gaccgaaccaagacggcgtgtcgtgcagtgcctgtctccgagaccaacgaagcgcagcacccgttgcatctctctcttaatcctctttctctttctttgaaagcaacaaccaaagaagaaactaaattatacaatgatcgaaatccctctacacagaaccaaaaccctcattacatccgatcgatcaattttctccattttgcgaccaatttcccctctttccatcggattaaattcggaagaagaaaagcggaacccgcgaatcgatggatctccggttcgaggcgaggattggaggggcgtggaggtggggcccgtgatgggattgaaatcggttggattgattggaagaagaagcactttctcagtggtggtggtggtgatgagaataagaaaagaaggaggggcactaatggaagtctaattggggaaagtgaatctttctctcacttgaatttgggggcggctttc

SEQ ID NO: 8768 - DNA, 455 bp, Glycine max
  Clone ID: jC-gmle01810034e11d1
atggggaagacacactcattgcacatagtaatgcgctttatttaagtgaataaaatattgcatactagttcacaaatgcaaaaggacactcatgaaccagatatttgagactcttacaggtctcaagaagtcgcgtcagcatagggttagtggcgtacgatctcaaaatctcattcttaacgcccaaaagaacggtcgatcctggtgctgcagaaggatgaactgtaggaagaaaaacaattgagttacctctcccaagtgctgcgcaaatccttttgctgatatctgaggagcgattgttaactgcaaaactaatccaagcagtggggggtaaaccaccacgtccactaccgcatgtaacatgtacaacgacagcttatgaaggtagttgacttacaggattaagacaattggcataaattggtaaccgacaatccactgggaaatttccatca

SEQ ID NO: 8769 - DNA, 585 bp, Glycine max
  Clone ID: jC-gmle01810034e12a2
gtaaggagagaaagagatggcagacgatctgtttgaaggattgccccctccttcctcaaacactcttcttcctcatcaacaacaacaactccaaccacaaccaattgttgttgctaccaacatcaacgacactgaatcctctgcagttccggctccaaagccaatcctcaaaagtgccctcaagcgccccaaccctactcaacctgacacccaagctgcagcacctaagaaaagcttgaagttcaaaaccacgacggatgcttctgaagcacaagttattgaggccatgcagaagatatcttcacacatcaagaaccctgcaaagttcagcaaggctgcaaagcttgctatacagctgattcaggcaggaagtgtaaagtcagaaattagtgattatttttttgccatattagaagctgcaatgtcatcatccattacttgtacagatccttcagttcgagcagattatcattctctgttctccgtagctcaaaacaccaaagaacaccttaataagaagcaaaagaatcaactggcaacttggacaataatgctgtggtggcaatgattatatacgaagatagc

SEQ ID NO: 8770 - DNA, 514 bp, Glycine max
  unsure at all n locations
  Clone ID: jC-gmle01810034e12d1
aaaaaaaagggtaagtaagtcacatttttttaagtcactaccaaattgttttgtgatattcaattaggagcgatgtctgagacctacttaagttacaacactcaatgaaatgacgaggacgcacgcattctctcccctcctttaaactattttgcagtttccatcatcctctctattactttcatagaaaggtcacagtaatatttaaccaagccattgctgggctcgacggtctccgctagctccaacagaatgacgaatgctaatcttttcaccagcatatttttgttgaagccattcaaaagcattcacatcaagttttccattaactgacttgccttgcttccgacgagtatgttgctcccgtattgaagcccacaatttcccaacagcatccctctggcgagctgtanatcttgccacattatcaaaggcatgcttcactaaaatatcaattacagtctgacaccatggtgttttataacgccgagcagcaatgtctaaacaagttatc

SEQ ID NO: 8771 - DNA, 530 bp, Glycine max
  Clone ID: jC-gmle01810034f01d1
tcgtcctttttttttactcaccatctcatcttcactatcatcgtcatcactcgccaattcatcttccatcccagcctccacaacattctcatccatatacctaacctcatgaatcctccccttcttcttcttcttcttctccgtccctccctcaatcgaatcactaacctcaccatccctctccttctcattcttcttctcctcaaccttaaatccctcaatcttcaactgcacatcaggaacagtctggtagaccggcagagccacgctctccagcagcttcaaatgcagcgacctcacattgccccacttcttgggcacaacctccacaatcccctcaatcgcggcaacgacattctccacaatctcatccctctccatcctcaccttggcaaccctaaccacactacaggtccccgtcctcatgaacagcatcgtggacgagcaggccctctacacctgctccttccagctccccttcttcaggtccaccggcaccggaatcttcctcttctagaaaaaactcttcc

SEQ ID NO: 8772 - DNA, 496 bp, Glycine max
  Clone ID: jC-gmle01810034f02d1
agcatcacaaataacaaacgtattcacacgtcccacaactttgttttcgacgaatacacacatcaactaattagaatattataaccgtaagatattatttgcagaagcctattgtctagttacaacaacctttttacacttcaatcatttgaaactgctgtaagagatacttccccttttgctccttcttccaccttattccactgcttgtcaacatccacagaacttttcttgctctcgaacacttttgccgtgtcataagaagcatgtaaccccaatagcacatagtataccaagagaaaccctgtccagaccccaaacctgataaatgaatctttatcaatagagccaagaaggaatatgttaatagcaatagataaagaaggtagccatggaaccaaaggcaccccccaaagtttcgggtgctttgcctgtggaacaaaaagccaaagacctccagtccctaaaatccacaacggcacagaaactgcatacc

SEQ ID NO: 8773 - DNA, 236 bp, Glycine max
  Clone ID: jC-gmle01810034f03d1
atgctgaccaaatagatatatggaagctcgtaaatcttttacattacataaaaaagctgtctctgctacaccattatgcagccctcacttagattaacacttcttctaactggacaaaatcagcgagctatccaagaaaatgacaaaagtcaaccaactataccctggatacactcactattccaaaaattttatgtactgatacagtttccgcgatgatgatcaacgacctcaac

SEQ ID NO: 8774 - DNA, 241 bp, Glycine max
  Clone ID: jC-gmle01810034f04d1
acataaaaaaaaaaaagccggcactgtttatccggggggccgaccgcacccagattgggacaacgtgttactggacatttccccctcgcaattaaaaaacccgacgaatgccatccataaataaattgtacccactccctaccccttgaaaaggctccactgccccacgaaaaaaaacgacccccacttactaagggttgcagacccttcatggtaaagccgcaagctttgaattaaaaag

SEQ ID NO: 8775 - DNA, 404 bp, Glycine max
  Clone ID: jC-gmle01810034f05d1
atgcactgtgttatttcaggtccgcgacgatcgagctcactcggccgcggccgcccttttttttttttttttaaaccataaaaaacagttaacaaaacttccttataaattaaatgcaaatttaagacatccctcctcagcagcaaaggaaatggactaaaaccctatggctgcttgtgaatttgaaaatctcagacttttaccatcaaaacaaaaaacagtactcatcaaaaacaatcagcaacgaaaatgttaccgccgatcaagaacccagttttgaaggctacggctacatgaaatcggcggacacttcaaaatataactggtaaaacaaacacctaagactctgcaaagataaactactgtaaaggaacaagtttttttgaaaccacgttgatgatcac

SEQ ID NO: 8776 - DNA, 260 bp, Glycine max
  Clone ID: jC-gmle01810034f06d1
tcgtcctttttttttggaaatttaacaaccagcgacgcatgggtattctccaatctgggaccatatgatgcataattaatatcttgttacttactgctaatatataaactttacatagtgaacacatttcagccacccttcattcctataaccaactgtgaggaccaatatctatcatgaatactgtttacagccaactcctattctgtttggatcttgggaagaacatatgcgacattacattactgcacaagatttac

SEQ ID NO: 8777 - DNA, 495 bp, Glycine max
  Clone ID: jC-gmle01810034f07a2
cgttgccattctcatcctcctctgtctctctctctccaccatagccatggagccttacaagctccggccattcagcgccttcaattcttccttctggactacaaattctggtgctcctgtttggaacaacaacttctctttaaccgttggagctagaggtccaattctgcttgaggattatcatcttgcggagaagcttgcaaactttgacagggaacgtatcccacaacgtgttgtccatgccaggggagctagtgcaaagggtttctttgaggtcacacatgacatttctcacctgacatgtgcagatttccttcgagcccctggagatcagacgcctgtgattgagcgtttctcaactgtcattcatgagcgtggtagccctgaaaccttgagggaccctcgaggttttgccgtgaagttttacaccagagagggtaactttgaccttgctggaaacaaccttcccgtcttcttgaacgtgacggcatgaaa

SEQ ID NO: 8778 - DNA, 414 bp, Glycine max
  Clone ID: jC-gmle01810034f07d1
gtccattgtgttattcccgggtcggctacctgacgtctcactacggcgcggcgctcgccctttttttttttttttctaagcacatacaaacggcatttattgagatagctcatcgagttgcatgcttggtgttatgggtacacaactaaaattgcaagaaatggatcagtcctttaaaattgatcgacaatcacattcttattgtactctttgcgcgcttgcaactctaacaatcattctggggttggcacccacatttaatattgggcctcatgctcagactagatgctatattttggtctagagaacggtcagcctgacacccgtaagatgtcctgacactgcggactacatgggtgacccgtgggttgtataagtcatcagccctcggagagaaatatatcctgcctgtat

SEQ ID NO: 8779 - DNA, 368 bp, Glycine max
  Clone ID: jC-gmle01810034f08a2
atgagctcctacgagtacctcagcactggacttcgccagtacttggacaacaaaatggatggattctacattgctccagcttttatggacaagcttgttgttcacatctccaagaacttcatgaccctgcccaacatcaaggttcctctcattcttggtatctggggaggcaagggacaaggaaaatctttccaatgtgagcttgtctttgccaagatgggaatcaaccccatcatgatgagtgctggagagttggaaagcggaaatgcacgagagccagcaaaactgatcaggcagacataccgtgacgctgcagacatgatcgagaatggaaagatgtgcgctctctttatcaacgatcttgatgc

SEQ ID NO: 8780 - DNA, 319 bp, Glycine max
  Clone ID: jC-gmle01810034f08d1
aacctggagacagaaaagggaaggggcccacccctaaagaaagggccccctgtacgccaacttaacaaggggagcgggcccatttaaaaaacaataacaagagcaacgctaacaaatagaaccttttcctcccccggaagattcagaaacccaaaatggttccccccaaggttccctgaaacttgaagcgggggggtataacccccccccgtgcaagaaaagaatacttgtggggcaaaaggacctttgcccccctggaaaaagcgggaaaataccccccccgcttaacaaccctcggagagagcaaaacaaaaccccc

SEQ ID NO: 8781 - DNA, 194 bp, Glycine max
  unsure at all n locations
  Clone ID: jC-gmle01810034f09a2
gctcatagtggttcgggtattgactcgttgacctgcgagttagtctcactgctcttggttagataagatgtctgtaaaaccaccgacacatgtgcgagtggtactacttaaattatgtactagtgcccatccatccgatacagntgcaaattgctgaactaaagtcttttgaaaaaaaaaaaaataatggcgcg

SEQ ID NO: 8782 - DNA, 174 bp, Glycine max
  Clone ID: jC-gmle01810034f09d1
ccaaaatacattagttcagcaatttgcaactgtatcggatggatgggcactagtaataatttaagtagtaacacacgcacatttgttttttttttttctgtcatcttatctaaacaagagcactgagactaactcgcaggttaacgagtcaatacccgaaccactatgagcctt

SEQ ID NO: 8783 - DNA, 538 bp, Glycine max
  Clone ID: jC-gmle01810034f10a2
aatggcctcagccgcatcccccaccactttctctctcctccactccgccaccccttcctcctcctccaccgccacctccgcctccccctccccctcgcgcgtgcagctcacctcctccctccgcgcccgcccgctgcgccgtctgggcttcgccgcggcggacccgctgctcgcggcgagtgtagcggcgcgcgtggcggcggtgagaggaggaggaaagggcgcgaggggggtggtgtcgatggcgaagaagagcgtgggggacctgagcgcggcggacctgaaggggaagaaggtcttcgtcagggccgacctcaacgtcccgctcgacgacaaccagaacatcaccgacgacaccagaatccgcgccgccattcccaccatcaaacatctcatccaaaacggcgccaaagtcattctctccagccacttggggcggccgaagggtgtcactcccaaatacagcttggcgcctctagtaccccggctttctgagctcattggtatccacattgtcaaggccgaggacagtattggt

SEQ ID NO: 8784 - DNA, 512 bp, Glycine max
  Clone ID: jC-gmle01810034f10d1
gccagcaactaaaagatttatttgaatttatggctctcagccagggtttacagttacacgcaatttatgtgtgaagccaataataactcaagcaagataaaatttacactaacagacttcgaagggtcctacaacatatgctcttttacaagattgacaacactgacacctgaggatgggaaaattttccaagatgaaaagtgtcttacacagcgactgggacggcttcatcaagagcaaggactcctggaagctctttgccttccaataactccaaactggcaccaccaccagtagatatgtggctcatgacactagcaactcctactttctccacagctgcaacagaatctcctcctccaataattgtgggcaccccctttccactgaggtcagccagcttctttgcaatagcctctgtaccaacagcaaacttgtcaaactcaaacactcccattggtccattccatatgatggtttgggtagtatccaatgcttcactgaatgattta

SEQ ID NO: 8785 - DNA, 554 bp, Glycine max
  Clone ID: jC-gmle01810034f11a2
tcaaaacactcataacacaaagcacaaagcaaagctcatccttgagttaaaaaatggcagcagcttcttccatggctctctcatccccatccttggctggcaaggccgtgaagctgggcccatcagccccagaagtgggaagggtgagcatgaggaagaccgtcaccaagcaggtctcctcaggaagcccatggtacggcccagaccgagtcaagtacttgggcccattctctggcgagcccccgtcctacctaaccggtgagttcccaggcgactacggctgggacactgctgggctttccgcagacccagaaaccttcgccaagaaccgtgaactcgaagtgatccactccaggtgggccatgctcggagccttgggctgcgtcttcccggagttgctgtcccgcaacggggtgaagttcggagaagccgtgtggttcaaggccgggtcccagatcttcagcgagggtgggctcgactacttgggcaacccaagcctgatccacgcccagagcatcctcgccatctgggccacacaagttatcctaatgggt

SEQ ID NO: 8786 - DNA, 501 bp, Glycine max
  Clone ID: jC-gmle01810034f11d1
gtaaaaagcaagtaacattaagttggattcggatacacaagataattcacattatctgaagtacttcaccaaacacaaatctaaaaactctcaaaagtcatttcgttctttgacgctcactttccggggacgaagttggtggcataggcccaggcgttgttgttgacagggtcagcaaggtgatcggcgaggttctccaatggaccctttccggtgacaatggcctgaacaaagaagccaaacatagagaacatggccaatcgtccgttcttgagttccttcaccttaagctcagcaaaagcctgtgggtcatcagcaaggcccaatgggtcgaagctgccacctgggtagattgggtcagtgacctcaccgagggggccaccagcaatacggtaaccttcaacggcacccattaggataacttgtgtggcccagatggcgaggatgctctgggcgtggatcaggcttgggttgcccaagtagtcgagcccaccctcgctg

SEQ ID NO: 8787 - DNA, 402 bp, Glycine max
  Clone ID: jC-gmle01810034f12a2
tacttgtatatacatattttgtcccgtctttgtaaatacaattgggacactactaggattgggaagaagggtctttacatttttagtttggcaaatagatattgcaactacctttgaataaatctatttctgaagaagcaattacaactttcaagggatgatagcattttgtggcataaggattaaggaggcataaaggaccaattgctttggaatattcactcatgacaaggcacagggtcatgcgtgtatgccaacacatagtaatgatgtgtgtttatattcagtaggcaactggcagatcgggttatcccttgtcacttttgtataattattttggaagaatttatgatgtcaaagttattgattaatattaatggcgacattgtatttattatttgt

SEQ ID NO: 8788 - DNA, 403 bp, Glycine max
  Clone ID: jC-gmle01810034f12d1
acaaataataaatacaatgtcgccattaatattaaacaataactttgacatcataaattcttccaaaataattatacaaaagtgacaagggaaaacccgatctgccagttgcctactgaataaaaacacacatcattactatgtgttggcatacacgcatgaccttgtgccttgtcatgagtgaatattccaaagcaagttggtcctttatgcctccttaatccttatgccacaaaatgctatcatcccttgaaagttgtaattgcttcttcagaaatagatttatacaaaggtagccgcaatatctatttgccaaactaaaaatgtaaagacccttcttcccaatcctagtagtgtcccaattgtatttacaaaggcgggacagaatatgtttatacaagtt

SEQ ID NO: 8789 - DNA, 463 bp, Glycine max
  Clone ID: jC-gmle01810034g02d1
tcttttttttttttttttcaatgctcatgcaatttatcagttcataatatgttccaaacttcgagtagggatcattacaaaatcttggcatcaactaagctctttagctaccttccaacaacggaggactcactatccatgcattttattcagttaaagcatccagtctaacgtccccatacttaatcagaacaggctatgcagtgtccggcctaatttgtctcctccccaacagcattggtttcttccatgctgttatcatgtgagtttacagcatccgcaactacatcatgattggggctgctacttacttccactgcagcacccatttctagcatggtcttcccatcatcagtatagctggcagtagcagtaacttccagttttccatcgacattctctgcagctggtgtaggattagccaatttatcagaatctacatccatgtcatggctaacgctag

SEQ ID NO: 8790 - DNA, 171 bp, Glycine max
  Clone ID: jC-gmle01810034g03d1
ggaaaaaaagcctttgaccacagaaggggatgtaattcttgccacgtagcgacaaaggcaaacaaaatccccacatgtttctaagtgaccccatttagaaaagagtcttaatttaatgtctccaccggtgactcgaaacttgcttcggagctcccatacacatttctcaca

SEQ ID NO: 8791 - DNA, 247 bp, Glycine max
  Clone ID: jC-gmle01810034g04d1
cttaacatcatcatcagtaagaaaaactgtgcggaaaagaaagattgtgcatggaaacttattcaacatatctgcgctgttctctttacacaaggcatttttccttctctggaaggtgaaagtcgtttgccgatatactaaaatgcttgcgaaaactaaaacacaaataagaaccaagatgtcgcctatttactagacggcatcttttagacaataggctcatctctcagatatttatattcaaagg

SEQ ID NO: 8792 - DNA, 493 bp, Glycine max
  Clone ID: jC-gmle01810034g05d1
tgaactgtcgaattcaggcccgcgaccatcgacgctcactacggccgcggtcgccctttttttttttttttttttttttttttttttacttaaggtaaaggctccaaatttaatttaagtggacactttaactcaaaacaatagcggaagacagcccaatatgaaaaataaaggaaaggcggcgcaaaattggcaacttttctttgcacccaggacattgagaattctaagaatgttacacgcaaggcccatcacaactggtagcacttggatcagcacaaccttcaggaacaaaaatacccacctgcccagtttgctttgcctccaattcaagacgggaagaaagcccccccgttaataggaaactcgttagcatttccaagagcaaccttggtcaagcacccgccagccaattggactctcttgacattctcttgctcttggacaagcatgttaccatacgtcaagagcttctccagagtcatcttgggct

SEQ ID NO: 8793 - DNA, 450 bp, Glycine max
  Clone ID: jC-gmle01810034g06d1
aacatcaaaccaaaaataaagagtgaccccctttaagcggaggaatggactacaggcaacatttattgctgatcacttgaataacaatacccatacaggatataagagggaaggcactgtattaacattcaaaaagaatcaacagtgtgagcctacctgtaagccacctaactgacaaggcttcctgcggaaggcaaaccagaagaaacattcttttcaacaccacattactccatccctattctgatcatgaaagaaccataatggccaaatgcgatgatcaactgattagcgggaagccaatattccgaccgatcataaatggccgcgcagccaacttgctaaactgcgtgaccacctaaatgatcaccagtgatgtgtatgtaaacttctcgggtggtgcatacaaaaggctaatgaacgggaaatgcaactctaactggaccattc

SEQ ID NO: 8794 - DNA, 498 bp, Glycine max
  Clone ID: jC-gmle01810034g07a2
ctcataacacaaagcacaaagcaaagctcatccttgagttaaaaaatggcagcagcttcttccatggctctctcatccccatccttggctggcaaggccgtgaagctgggcccatcagccccagaagtgggaagggtgagcatgaggaagaccgtcaccaagcaggtctcctcaggaagcccatggtacggcccagaccgagtcaagtacttgggcccattctctggcgagcccccgtcctacctaaccggcgagttcccacgcgactacggctgggacactgctgggctttccgcagacccagaaaccttcgccaagaaccgtgaactcgaagtgatccactccaggtgggccatgctcggagccttgggctgcgtcttcccggagttgctgtcccgcaacggggtgaagctcggagaagccgtgtggttcaaggccgggtcccagatcttcagcgagggtgggctcgactacttgggcaacccaagcctgatccac

SEQ ID NO: 8795 - DNA, 103 bp, Glycine max
  Clone ID: jC-gmle01810034g07d1
agagcacaaatcacgaatttatccagtttttggcttaaaagtatacatcatgaaagtctgtaagccaaacgcggaaactacaccatgaagtcgtgcttacgtg

SEQ ID NO: 8796 - DNA, 468 bp, Glycine max
  Clone ID: jC-gmle01810034g08a2
cacagaccaaagtgcagagaacaacaaagttcacaactttaaggaaaattgaaatggcccaagtgagcagagtgcacaatcttgctcaaagcactcaaatttttggccattcttccaactccaacaaactcaaatcggtgaattcggtttcattgaggccacgcctttggggggcctcaaaatctcgcatcccgatgcataaaaatggaagctttatgggaaattttaatgtggggaagggaaattccggcgtgtttaaggtttctgcatcggtcgccgccgcagagaagccgtcaacgtcgccggagatcgtgttggaacccatcaaagacttctcgggtaccatcacattgccagggtccaagtctctgtccaatcgaattttgcttcttgctgctctctttgagggaacaaactgtgtagacaacttgttgtatagtgaggatattcaattacatgcttggtgca

SEQ ID NO: 8797 - DNA, 320 bp, Glycine max
  Clone ID: jC-gmle01810034g08d1
cgggcccgaaaaaaaaaatcctttggaccaaccaaacccgggggctttttaacaaaggcacttttattgcaggcctttaaaagggttttgtaggaacaaaagcaaccctaatccccccggcgttgggggggattacatgttaaattcttgtttgcccaactcaaaggccaaaacgcttgggggtttgagaacccgctaagggctttaaagggctcgggaaatgatttctgggggaggcccgaaaccctgaagggttttggaaccatcccccccacgccaaaaaaaaaaggccaggcccttttggggccaaacaatgggtt

SEQ ID NO: 8798 - DNA, 538 bp, Glycine max
  Clone ID: jC-gmle01810034g09a2
atatgaacttactcaacttggtcagtgctgacttatgttaataattacttcagacttgtgtagtagtaaatgctcctaatgtcaaagactacgtcagatttgtgtagtagtaatgccactcatgtcaaatagtcaagtcttcacccaactggtttggatgaagcttaaagttggtgttagatttctgtattatgtaactcgttttagttgccccacatcaatagctaaacctggtgactgtcattgagattgagtcttgatatcaaattatggtttttattaggtttatgtatgtttctggcttgaccggttggtcatggattcaaatccagaaacatctttgcatatgcaagggtatgactgtataatggcgtccggatccgctccattttcaatgtactgaatcctgtgtgttaaagcttttaaacgggtgtgactttgtttacttagctcaatttttttatagataaaggctgaaatgcgtgagaacaacatgcaaaatgattctcgaagcaatgacactgccacactggtgccc

SEQ ID NO: 8799 - DNA, 499 bp, Glycine max
  Clone ID: jC-gmle01810034g09d1
aacataaacgaatttcaaattttataatctgaaattatttacattcattcgttcaatggaaaaaataaaaccaaagatgagaacaaagcacagaacaaggagcaccacttgcttcatccttacaagtctcgaacatcataaagttgtgaattgttgagcggagagagatgggaaattgggttggatgtttggcctccagcagtggcgagggacggccacttggtggaggcaaagatggttttgcactgcaaccttggtcggggttagtgtgacaagggcaccagtgtggcagtgtcattgcttcgagaatcattttgcatgttgttctcacgcatttcagcctttatctataaaaaaattgaactaagtaaacaaaatcacaaccgtttaaaagctttaacacacaggattcagtaaattggaaatggagcggatccggacgccattatacagtcatacccttgcttatgcaaagatgtttctggatttgaatccatga

SEQ ID NO: 8800 - DNA, 538 bp, Glycine max
  Clone ID: jC-gmle01810034g10a2
ttcgtctctaatctaaatcgacttgctttcgaatatgtggattcaaaaacaagtcgagtttttgttactttcttttttgtataaaaattgttttaatgtaatcatttcattatatatatctattataattttataattttttcaattttttttttctttttttctaatatttttaaattcccatttttctactttacaaattctaaaaagagagtagaaaatagattgataaaataccgagttaattttcatttacgtctttactttaaaaaaagttttcgttatatagaagaaaaaccctgacctaaaaaggatagattattatgtatcgattgaatcaatgactattcatgattccataattgaatcaattacatactggatccaagctaaaggaatgttatggtaaaacttcttttgaaacgatgtggtaaaaagcaacgtgcgacttgaaagacatgattagattagctgtggattcttacatccgccattttttctagaatatagaaatgaacatgctcttgactcgacatcg

SEQ ID NO: 8801 - DNA, 542 bp, Glycine max
  unsure at all n locations
  Clone ID: jC-gmle01810034g10d1
ctatatcggttaaaattttagggtcttcccttagactggtattttcaataggaccaagactatccattgatttacttaattcacacctgtattctaacttcctattaaacaacatagaattaaaccaccatttttccatcgagtttttcctctatttacacaaaaatataatgaatgtatagtcattggatgaagaataaaataatagaaatattccattttgaatattctatctcatgtatttactataaaaaaagtatataaatcaaataactaggattagtaactgaaaataataaagagcgagttggtgttaaaaagaaatgataataaaatcaaaaataataagaaacattaaaaaaaaagggcctcaataggggtaatctatttatctatttatgagtccaattacttcatttagcgactattttttttctttttcctatattctatcttttatctctatacattttttcattttgctttgaagatcgatgcaaanttcatttctttttctggctatagaaaactacatcctatca

SEQ ID NO: 8802 - DNA, 601 bp, Glycine max
  unsure at all n locations
  Clone ID: jC-gmle01810034g11a2
gcaagatagacttgacaactactgtcctaggcttcaaaatatccatgccaatcatgattgccccaacagcctttcagaaaatggctcatcctgagggagaatatgcaacagcaagagctgcatctgctgctggaacaatcatgactttgtcctcatgggctacttccagtgttgaagaggtggcttcaacaggacctggcattcgctttttccagctatatgtgtacaaggacaggaatgtggttgctcagcttgtgagaagagctgaaagggctggattcaaagccattgcccttactgttgataccccaatactaggacgcagagaagctgatatcaagaacagattcacattgccgccatttttgacattgaagaactttgaaggattggaccttggaaagatggacaaagctgatgactctggacttgcttcatatgtttctggacaaattgatcgtactttaagctggaaggatgtgaagtggcttcaaacaatcaccaaactgccaattctggtgaagggtgtgctgactgctgaggacacaaggatagctatacanagtggtgcagctggaattatagtgtccaatcatggagc

SEQ ID NO: 8803 - DNA, 447 bp, Glycine max
  Clone ID: jC-gmle01810034g11d1
ctcaaaattaagaatatacaatgagtgaattaatgcagcagcagcagtagtcacacaagtatcatcatataatgcttaaaagaaattaagcatagagttttccaaatacaaccttaaatgagttctccaaaaaggaaaagaaaggaggttcatgaaacacatatagaactgtttcctccattgttctgcaccacattatacaaacttggctcaaatgaggagcaaatttttcataatcttggcaatgcgcggggaagaatgcgaggttggtcccaatcagtgacaatgtgatcacgagtgatatccttgagtgaggggcaaccactcaaggccatggttagctcaaactcctcacgtaggatccgcagcacgtttcttacaccagcctgtccttcagcagccaaggagaacaccacagggcgtccaataaatatgccagaggcacct

SEQ ID NO: 8804 - DNA, 512 bp, Glycine max
  Clone ID: jC-gmle01810034g12d1
aagaaaaattatattttgatgttcataatttaaagcagtacagaatacaagaaaatcaatagcaggttacaccgaaggagccatcaaattagagtatgctaatactaggatgtggttaacatacaaaaacattatcgaggagcaccataaacttgggtggagtcgtattgataagcagccggctggggggacaatgttttgccatacacagccgaagcacttgctggtacagctgcataaccagctggttgcgtgttagactgttcataaccagtttgagtgggagtgggttgaacataacctggctgcccacttggttgggctgtactatatgctggtgcagcaccagtgctataaccaggatcttggggtgcttggtagccataaactgcgttagtgggagccggctgctcagggtaacttggctgtgaagatggatatgatccataaccagtgggaccaacctgcgcataactggctgcaggctgggcagcaagcttaccataagtggg

SEQ ID NO: 8805 - DNA, 346 bp, Glycine max
  Clone ID: jC-gmle01810034h03d1
aagtacacaactcatagcaaaaggtttattaagctgtaaaggtgcatttaaccataaacaaaaatagtctccaagactataaaaacattacattttagacaaattagtcttccacttcatcgtccgtcaacacctactgtaactgctggtgttgctgcctaacaagtatcatattcactgcaaacatcttagtaggagtagcttttgacgaacaactccttcttggcttcctcggattcaccctcaccagagtactttccaagctgagcgagtgagttggacttggcacggaatgcgagtgcatcttgtgctgccttcacgttctctgggcggtctccccatgttt

SEQ ID NO: 8806 - DNA, 281 bp, Glycine max
  unsure at all n locations
  Clone ID: jC-gmle01810034h04d1
ntgcagtgatgttataattaattcgacgagctcactgctcggtggtcggcggccgccctttttttttttttttttgagtacacaactcatagcaaaagggttattacgctgtagaggtgcatttaaccataaacaaaaatagtctgcaagactataaaaacattacattttagacaaagtagaggtccacttcatcgtccgtcaacacctactgtaactggtggtgttgatgcctaacaagattcatattcactgcaggcatcttagtaggagtcgctttt

SEQ ID NO: 8807 - DNA, 321 bp, Glycine max
  Clone ID: jC-gmle01810034h05d1
gctcgccctttttttttagttttttttttttcaagcgggaccaaaggtgccggaactttgttttagacgaatgcacactttaactaattataatattggaacccggggatattattagcagaagcctattgtatagttacaacggcctttttagctctgtactcattagaaactgatgtaagagatagttccccttttgttccatcttacaccttattgcattggtcggcaacatccacaggaatataattgttctcgtgcagttttggcgtggcctacgatgcaagatggggagaaagctcctctgatacgaagagaaac

SEQ ID NO: 8808 - DNA, 503 bp, Glycine max
  unsure at all n locations
  Clone ID: jC-gmle01810034h06d1
ctggatctcgnaattgggtaccgccctcgaggacgactcgtaggccgcccgtcgtctttttttttactcaccatctcatcttcactatcatcgtcatcactcgccaattcaggttccatcccagcctgccaacattctcatgcatatacctcacctcgcgaatcctccccttcttcttgttttttgtgtgcggccgtccctcaatcgaatcactaacctcaccatgcctctgcttcttattgtgcttctcctgaggcgtaaatagatcgatcttgaactcctcatttggatcaggctggttgaccggtatagccacgctctccagcgggtgcaaatggagtgaccgcacattgccccacttgttgggaggaggttcacaatccgctcaatcgcgggatcgacattttacacaatctcatcgctctgcatcctgaccttggcgagcgtgatcacactactggtacgcgtgcttatgagacagcatcgcggacgagcaggccctc

SEQ ID NO: 8809 - DNA, 572 bp, Glycine max
  Clone ID: jC-gmle01810034h07a2
cttctggttctttgaagaagaacccttctctttgcgcgtgtcccgttctcttctccaatcctcctccatccccactgtgtgatctgatcctaaaccctatagccatgactaccatggaggttaagctatggaatgacaagcgcgagagagaaatgtatgacaactttggggagctttatgccattatcaaagccgctgagaggcttgagaaggcctatgttagagatataatctcaccccaggaatatgagttagagtgccagaagctcatagctcatttcaaaaccttagcttccacccttaaagacaccgtgcctagcattgagcgatttgcagatacttacaagatggagtgcccagcggcgattaaccgtcttgtggtttccggtgttcctgctacggtggagcatcgtgcgactgtggctgcctctgcttccacctcggctgctattgtggccgagtgcgtccagaattttattacttctatggattctttgaaacttaacatggtggctgtggatcaggtgcacccgttgctctcggcctttatgcttcactcaataagttgacta

SEQ ID NO: 8810 - DNA, 287 bp, Glycine max
  Clone ID: jC-gmle01810034h07d1
tagagcgtgcggaatcggggcccccccgagctcactactagtcggcggcggtcgccctttttttttatcttaccatcttatctttactatcatcgttgttactcgcctattcatgtggggtaaaaggccacacttcattctgatccatgtacgtaccgtcacgagggcaaaaaaagtggtgcggggttttgaacgccggccctcagaaaaagcagtgggagcaccggtcctggcctcctcatggtcctggtctgtggactcaggcaagtcgaacgggagctcctcgt

SEQ ID NO: 8811 - DNA, 507 bp, Glycine max
  Clone ID: jC-gmle01810034h08a2
cttctggttctttgaagaagaacccttctctttgcgcgtgtcccgttctcttctccaatcctcctccatccccactgtgtgatctgatcctaaaccctatagccatgactaccatggaggttaagctatggaatgacaagcgcgagagagaaatgtatgacaactttggggagctttatgccattatcaaagccgctgagaggcttgagaaggcctatgttagagatataatctcaccccaggaatatgagttagagtgccagaagctcatagctcatttcaaaaccttagcttccacccttaaagacaccgtgcctagcattgagcgatttgcagatacttacaagatggagtgcccagcggcgattaaccgtcttgtggtttccggtgttcctgctacggtggagcatcgagcgactgtggctgcctctgcttccacctcggctgctattgtggacgagtgcgttcagaattttattacttctatggattctttgaaacttaaca

SEQ ID NO: 8812 - DNA, 548 bp, Glycine max
  Clone ID: jC-gmle01810034h08d1
cacaatataaaataaagcttcaatgatcagcacatagccatcatttgtaaatatccaggatccagcattaaaaatgtatgagctgtgaccaaatagaaaattcctttccaatcatcagattagtatccaaagaaaaaaaaacatgaaaaaaaaggaaattctgatttaatgtacaagcactggccactcagtcatgtaccagcattgggcagggctgccataaaggaattgtaagaagactcaagatcaaagtgaagctgccgcgcctgttgttcagtcaactcatcagctgcacccatcttggataacctcgcaatccactccttcatttttgttttcccctcaaaatcaggtggcaggatagtcaacttattgagtgaagcataaaggtccgagagcaacgggtgcacctgatccacagccaccatgttaagtttcaaagaatccatagaagtaataaaattctggacgcactcggccacaatagcagccgaggtggaagcagaggcagccacagtcgcacgatgctccaccgtagcaggaacacc

SEQ ID NO: 8813 - DNA, 631 bp, Glycine max
  unsure at all n locations
  Clone ID: jC-gmle01810034h09a2
atttaattaccgtaggaagtactttccaacccaacaggttgcttatcacactccaccacggtttcctttggatgtaattgaaaatattcgcaaaggagcatctctgttatttcaacggctttgcctgcaagattttgcacgaattgatggatggtttttgccaaattcaagttccaaattatcaccattttcccaaagtgagtttggaagaacagaatctggtgccataatattcactgacattaacatgataagtggtatggaacagaccagttttctatttcagcaagcttctaaggttggtttttctcatacaaacatccttagaagcattattcaccatgcttgcttgcgatttccaaatcttgcatcagttagtggtatatcaggtcagcttccaagcaggtcaaaatccttacaacgtaacacatcagaacggcaagtatctcttatgagtggtacgaatgtctggctcaatttgctagccttccatgatgtaagtctccacaatcaggaagaccttaaagttactgtaaataatgctttgcttgagggaactccatgtttgctttctcctacangtgagtgtgcatctagcattgatatgggaaaaagggctgatgatgtaatg

SEQ ID NO: 8814 - DNA, 407 bp, Glycine max
  Clone ID: jC-gmle01810034h09d1
ggaaaggaaggaaaaaaattttgaaattaaagtttcacattataaagggacccaagttccaaataggaaattaaagtttcacaataacttcaagggggaacaacatttgatagacaatgtaaacattcttttaaatagatttacatggacctttcaaatgccaaatcaaaaagcttacggaagaattgatgaggatacaacgggggttgctctactagggcctgatgaatcaaaacaggggaaggggtctttccaggcacagtttttacctttattatcaaaacctcttcactggcaacatttacaaatgcatcaatgcgtgaaaatccttccaattgaagagtggttgcaatcagtttaatatgctggttacatttctttaaagcattctcactcataattgacaa

SEQ ID NO: 8815 - DNA, 589 bp, Glycine max
  unsure at all n locations
  Clone ID: jC-gmle01810034h10a2
aaaccctagaacgggagagatttcattccccaaaaaatctcttccttctctctcctcatttctgagttcccaactttcctcacctgagatctggtgtgacgtgcatcacaattgaatcgaattgaaatttgttgtcgtggttgcagcaaggaatgccgctggtattagcgaaaagcgattcgatccagattcgcgaggtatggaacgataacctggaagaggagttcgcgttgattcgcgaaattgtggacgattacccttacatcgccatggacacggagtttccagggatcgttctccgacctgtggggaatttcaagaacagctacgattaccattaccaaaccctaaaggacaacgtcgacatgctcaaactcatccaattgggcctcactttctccgacgagcacggcaaccttcccacgtgcggcgacgaatccggcacgtgctgcatctggcaattcaactttcgcgaatcaacgttaacgaggacgtcttcgccaacgactccatcgagctcttgcggcagagcgggattgattttcagaggaacaacgaanacggcatcgacgccaccgtttcgggagct

SEQ ID NO: 8816 - DNA, 546 bp, Glycine max
  Clone ID: jC-gmle01810034h10d1
ctctaattaattccctttgttatcaaaatggctgtggctatggctgcttgcagtcttggacttcacttgagtgctgacaacaccttgagaccttttgaaaaaaccactatcttgaaggccctctctatctctgatgctactaaaccatgttacatttctcacaaaacaagattatcatcttcatcttcaggaataacaatgatcccacgagcaacaacagttattggtactgtggaggatggaaatcaaggagaggctgataccattccaactccggtagttattattgatcaagactctgatccagatgcaactgtggtcgagataacctttggtgatcgccttggggctcttcttgacactatgaatgcgttaaaaaacttggggctgaatgttgttaaggcaaatgtctttctagattcttctggcaagcacaacaagttttccatcacaaaagctgattctggaagaaaagtggaagatccggagttgttagaggcaatccgtttgacaatattgaataatatgattcagtatcaccccgaa

SEQ ID NO: 8817 - DNA, 602 bp, Glycine max
  Clone ID: jC-gmle01810034h11a2
gccggccatgtttgccgagccgtacgtcgccgacagcaaggacccggcgtactcgccgcccacaccaggcatgaaggtgcagacgaataagaacgccctcgttcccgagatcgtccccactttcgagccttccgacgccgacattcccgacaactatgtcacccagaccgtgttgaagcaaaaatacctcccgcccatcacatggcggaatctgctctccaacatccaatgggtttcgttcttggcgttgacgatcacgcctgctctggccatctacggcctgtgcacggtgccttacaatcagaagacggcgatctgggctgtcatttactactacatcaccggtctcggcatcactgctggctaccatcgtctgtgggcacaccgctcgtacaacgcttcggtgcccctccagtacgcgctttcgctcgccggcgccggcgccgttcagggctcgatcaagtggtggtcccgtggccaccgtgcgcaccaccggtacaccgacaccaagctggacccttactcggcgcacgagggcttctggtgggcgcacgtcggatggatgctcggcaagccgcgcggcaagattggcgttgccgaca

SEQ ID NO: 8818 - DNA, 490 bp, Glycine max
  Clone ID: jC-gmle01810034h11d1
gtcattactatgtgcatgtgtctctcgtaggtacggctagacgagccggtatgtgcaatgtctaaggaatgtgtgtgtactgtatgtatgtatcggtacggctcttaaccgatcaccgtgtctgccccaaaaggctttcgccatctcaccctctattcatctattctgctcccaccaacacctattgcgcaaccagctcggcaatctcgccattcctatccgcacgagccatcgcgtcgagggcctgtcccgactggatgcgcgagatgaccccgggtcgaatctcgggctccgtcttgacgatcctgtacacctcggaaggcgggagggcaagcgtgaacgggttggcctgaatggcatcgggctggaacttgggcacggcaggcttgattcgtgcgcggatcgaagcttccgtggcgcgagacgaagaagatccgaccgaatcggcgagcgaggccaggtcgtccgaagacgaggcggccgacatggc

SEQ ID NO: 8819 - DNA, 332 bp, Glycine max
  Clone ID: jC-gmle01810034h12a2
cttgatgaactgaatcaataagcaacagaataaaatggataaagattgcttttgattccagttgtttaattgtcaactgtttaagaatagctatgttgcaaagtagagactactgtgtggtgttgttgatttattagtagagtataaaattaaggatgttttgtcaatgtgtgatgctacatattttctactttgatagtttcctgttcaaaatcacgcaagtataagtgcatgcaatttcaaattccgtgttgtatatatgttaagctactatatgtatgtgatctgttggcacgacttgtgccttttaataaaatagttctttgaattcc

SEQ ID NO: 8820 - DNA, 332 bp, Glycine max
  Clone ID: jC-gmle01810034h12d1
ggaattcaaagaactattttattaaaaggcacaagtcgtgccaacagatcacatacatatagtagcttaacatatatacaacacggaatttgaaattgcatgcacttatacttgcgtgattttgaacaggaaactatcaaagtagaaaatatgtagcatcacacattgacaaaacatccttaattttatactctactaataaatcaacaacaccacacagtagtctctactttgcaacatagctattcttaaacagttgacaattaaacaactggaatcaaaagcaatctttatccattttattctgttgcttattgattcagttcatcaag

SEQ ID NO: 8821 - DNA, 502 bp, Glycine max
  Clone ID: jC-gmle01810035a01a2
gggactcactctggcagcggcactctcggtggctataatctttctgtggtgagttgtcaagatgtacacatcaaggaagaaaatccacaaggataaggatgctgagccaactgaatttgaggaatcagtcggacaggcattgtttgatctggaaaataccaacaatgagctgaaaagtgatctgaaagatttatacataaactcagctgtccaaattgatgtttctgggaaccgcaaggctgaggttatccatgtcccctacagattaaggaaaggattccggaagattcatgtcaggcttgtgagagaacttgagaaaaagtttagtggaaaggatgtaatcctgattgccacccggaggatattgaggccaccaaagaaaggttctgctgttcagcgtccccgcacccgaacacttactgctgtacacgaggcaatgctggaagatattgtattgcctgctgagaattgtggaaagcgttgtaagtataaaaatgatggt

SEQ ID NO: 8822 - DNA, 523 bp, Glycine max
  unsure at all n locations
  Clone ID: jC-gmle01810035a01d1
ccaaaacaaaacactgacataaatagtagaaatacgggcatcatttgttataagaaaatatatcaaattctacattgataaaccaggagacagtattttctataagtaccacccctaaagaaaatccagaattaaagccaacttaacaaaaccagcatccaccatatataattcagaaacaaatgcaaagctaacaaatagaacctaagcctcggtggtaggatactcaaacacaatatctttgcccgaaagtttcctgtatactgcagcaaaagtctccaatttgtactcggtgttgtttcgctccttggggtccaaaaagaccttcataatcttggaaccatcaattttatacctaacacgctttccaacaatctcagcaggcaatacaatatcttccagcattgcctcgtgtacagcagtgagtgttcgggtgcggggacgctgaacagcagaaccttttttggtggcctcaatatcctncgggtggcaatcaggattacatcctttccactaaactttt

SEQ ID NO: 8823 - DNA, 461 bp, Glycine max
  Clone ID: jC-gmle01810035a02a2
atttctatcacctaaagcttcatgatagtcaggttaggactcatagttgctgcttcacttgcagcttttactgttaagcagctgaatgtcaaaagctcaaaaccagaacttaaagatgagtgcacagaagaggagcatgttcttcaagacaatgaaagggtggaggaagaggagaaagaggatgttaagttaattagcaacataattaatacagcgaatgacttataggatgatattctaccagaatttgaagatcttctgcctggggagattgagattccattaccacctgataaggatgagaaagacaaagtttatgaaattgagatggcaaacaatgcaagtgaactagaaagattgcgacaactagtgaaggaattggaggagagggaagtgaaacttgcaggagaaatgcctgagtactatggattgaaggagcctgagacaaacattgtggagtt

SEQ ID NO: 8824 - DNA, 403 bp, Glycine max
  Clone ID: jC-gmle01810035a02d1
ctcacccttactatcttctgccttctcttcttttgacttatcaatattatccttatcctcatcttcatccttctcatcctcctccatcaccacttcaactttctcattttctttgctctcctccttctccttaataccaccctccacttccatagcatttactactggtttctcagattcctcttttccattttctggctcaccttccattgttggcttaatctcagcgtcttcatccattttatcattttcagatatatgatcatctgtcttatcctcttctatttctttcaactcatcacctttgttatcttctacttttttcacaccatcaacttccccatcctacttaacttctttcacacatgacacaccatgcacttccttatcctcttttacttct

SEQ ID NO: 8825 - DNA, 547 bp, Glycine max
  Clone ID: jC-gmle01810035a03a2
gtggattggttgcagctggtgtcatcccatcaccttttgattatgctgatgtagttactaccacaactcacaagtcacttcgaggaccacgtggagctatgatattctacagaaaaggggttaaagaaattaacaaacacggaaaagaggtattgtatgactacgaagacaaaatcaaccaagctgttttccctggactgcaaggtggccctcacaaccacactattactggtttagctgttgcgttgaagcaggccactactcccgaatatagagcatatcaagagcaagttctcagcaacagctttaaatttgcacaggctctgagtgagagaagctatgagcttgtctctggtggaaccgagaatcacctggttttggtgaatctgaagaataagggtattgatggctccagagttgagaaagtgttggaagcagttcatattgcagctaataaaaacactgttcctggagatgtgtctgccatggttcctggtggcatcaggatgggaacccctgctcttacttctagaggatttgttgagga

SEQ ID NO: 8826 - DNA, 401 bp, Glycine max
  Clone ID: jC-gmle01810035a03d1
ccttgaattctcctttttcttaacatttttatttactatatttttattccccgcaaaaacggggggggaaataagcttattaacaaaaaaaccccctaacaggcgggggaccccccttttggggggggggggacaaaacccccaagaaaaaaaaatggggtgaagaggccctttaacagccacgccccttgccgacacacaaaaaacaaaaaagtcttgggggaaccccaaaaaaagggcggccccgaccttttaaaaaaaaagtgggggggcccccccccccggggaccaaaaatttcatttggtggattcctaaccccgaaccccaggggatacccaccaggaaatacctcggttccaacatgtgggggaggagggggggaaaaaaaaacacagggggg

SEQ ID NO: 8827 - DNA, 528 bp, Glycine max
  unsure at all n locations
  Clone ID: jC-gmle01810035a04a2
tttaaaatctgaaccatggagatcaaaagttgatagccttttgatagtcacagcaatggattctttcaaggaaggatcagttggtgaagaaagaagcgtgtttcaacaaaaggaacctgctgcaactaccacagatttgcaacttgctgcattgcgtgctttattggtatcctttctttcatttgctcgggtacgacctccatatttagcccagggtcttgaacttttccgtagagggaggcaacaaactggaacaaaactagctgagttctgtgcccatgctctgttaaccttggaagtgcttatacatcctagggcacttccaatggtagattatgcctatgcaaataacagttcttttggtgaagctcacagtaatctccaacatgaatattttggctggagcaacagtacgccatatggtttaccacaagatcctnctgactatgatgatgatctgtgtgctagatggcttgaaaatggcaatgaagccgatgaatcatttgataaaaatacanaatacaccca

SEQ ID NO: 8828 - DNA, 485 bp, Glycine max
  Clone ID: jC-gmle01810035a04d1
ccaaaactgctcgactatcattttcatttttgtaaaaacaaagtcaaaacttcaaaggttttaccttgggaaaacagatagaaaaaagagaatgaaattgaactacaataaatgttccttatgcttctatggataaaaataaattacaaaatcttcccttattcggaatcagaatctgggtctccatccacaatatcaggaaaatcattttcatccgccagtgccttgtcatgatccaattgaaaagcaaattcctcaaaaatatttttacagcctgaggttctatgccataaactaccactcagagaagcaaatttgaagtctttattagccgagcttccttgtcctgattccttatgactggcttcattacgagtaacagagctgtctgaaacaatcttctcggacactttatcatcagttacatcactgcaagtttcagccaccaggatgtttgtagtgcaagaaacagttttctgaaattg

SEQ ID NO: 8829 - DNA, 479 bp, Glycine max
  Clone ID: jC-gmle01810035a05a2
cgttctctagggttttctcatcccttttcgacccccaattactcttttctctgttcactcagtgtttgttctctttcacttccaatctcgatttcctcgttgtaagaaccctcaatctcgcaaaacccgcggttcaattcatcgttcccttcaatctagggtttcgtttcgagaatgccaccgaaaacggcgaagcgagggtctgcgtcgagcttctcgaagaggggcggcagaggcggcaggggaaccctgaaggcttcacagaaccaacagcaacacgaacctgcggaagagaccgtgaaggtcgaagagaaacaacaacccgttgttgttgttgttgctgaggaggaacagcacacagtggtggtggaagaagagaaccctgctgttgaagagaaacggcttgtggttgaagagaaagaatctgtagtggttgttgaggacatggctattgacatgaaccaaatggctcctgaggc

SEQ ID NO: 8830 - DNA, 422 bp, Glycine max
  Clone ID: jC-gmle01810035a05d1
gacttactggtcggcggccgccctttttttttttttttttttttttttttttttttgataagatcattaacgatatcattaagaaaacactaaaagatataactcgaacgccaaagaaactgaaaaaaagaaaaatcaattaaaaaacttaaaatattatgattccttgttctttttttcctcctccttctcctgaaacatcacaccactttctagaagtcatcaccatcgtaaccaagatcatcctccactctttccgccacgtcatcttcaacttcatttcccacctcatgaccctcatcttgttcaagttccttctaatcatgatcaactccaccatactcctcaggttcatactcaggatcattatccttcaaatctaagcgtgcatctttctaatattcatctatggagtccttaac

SEQ ID NO: 8831 - DNA, 274 bp, Glycine max
  Clone ID: jC-gmle01810035a06a2
cgttctctagggttttctcatcccttttcgacccccaattactcttttctctgttcactcagtgtttcttctctttcacttccaatctcgatttcctcgttgtaagaaccctcaatctcgcaaaacccgcggttcaattcatcgctcccttcaatctagggtttcggttcgagaatgccaccgaaaacggcgaagcgagggtctgcgtcgagcttctcgaagaggggcggcagaggcggcaggggaaccctgaaggcttcacagaaccaacagc

SEQ ID NO: 8832 - DNA, 508 bp, Glycine max
  Clone ID: jC-gmle01810035a06d1
ccagtaaaatttctccaataaattaaagctaaagtccaattatagaacatcaccaggacagaaaaaatgtagcctgttctctttaacataaccacaacaacagataagcaactgatggaggactcattgatgttagcaaacaaacaaatcagctagcacttgagaagctgcttgttaatctgtacatccaccatgaacacatttaagcctcaacactgcctcttgtccaaagcttcactgctttattaccattattgcttttctgattctttcacttattacggaaggaaacgatacagaaaattaccaaggacagtgctaaacatcttttctccatttttcatcttccttcggcaattatgttattaactccaacttcatcaagtatggccatctaagaaatgaaccaagaggcactggcaaatgctaatgttctattctaaaatggccaaagtataatattacagtcaccttaacatcatcaacggctgaaaaactgaaaatctgg

SEQ ID NO: 8833 - DNA, 520 bp, Glycine max
  Clone ID: jC-gmle01810035a07a2
ctatgacatgattcaatcgatgcaccaaaaagaattagcagagatctcgaggtggtggaaagacttgggacttattgaaagacttggttttggaagagatggaccaagagagtgtttcttatgggcattggggatttttccagaaccctcgtcattcaagttgccgtattgaacttgcaaaagccatctgcgttttacaagttatagatgatgtgttcgacacttacggaacattagatgaacttgttctttttactaaggcaatcaaaaggtgggatcttgatgcgatggagcaactacctgaatatatgaaaatatgttatatggcattgtacaacaccacccatgaaattgcatacaaaattcagaaagaccacagcctaactgtagttgcttgtttgaaaataacatggatagacttaattgaagcttatcttaaagaagccaactggttcaacaacaaacatgtgccaactttttagcaatatttggataatggggtgatttcttcaggatcata

SEQ ID NO: 8834 - DNA, 476 bp, Glycine max
  Clone ID: jC-gmle01810035a07d1
tccttttttttttttttttctttttttttttttcaaggaatatgtactcttctatatataaattaaattgtttaactagcctattaattatattagcatatattatgatgaatcgaggaagtcaagccatgactaaagacaaaaactttgaaaattgataaatgggaatcaagtaacatgattgatatcgattttcatctcgatagttgatacagggagtaaacagcaatgcttgaacatgttcatcaactgcaggcctgtcttgatcatctgcatgtcgataaataactggagaagttctagccatgttgagagaagccctcataactgactcaggaacattggtggtcatggtaagaccatttatctctggccataagttatctatgagttgccttataagtttcctggcaacattttcatctgaaatattattgcgcttcatgagacattgtatgctacatgcattatcacct

SEQ ID NO: 8835 - DNA, 549 bp, Glycine max
  Clone ID: jC-gmle01810035a08a2
ggtctttggggaaagttctgaatactccagaagttgtgcgtgtatatattggctcatttaatgttaagcctataaacgaaggctttgttggcccattaggacaggaactttttgagaaggaacagaatgatctcttggcagacttgggtagatattccaaggaaggcatgcgacagtcggatcaatgaatttgtgaaacgtgctagatctgctaaaattcatgcatatataattagtcatcttaggaatgagatgcctgcaatgatgggcaaagctaagactcaacaaaggcttatagataatcttgaagacgaatttagaaaggttcaaagggagtttcatctaccagctggtgattttcccaatgtagaacacttcagagaggttttgagtggctatagcattgacaaatttgagaaactaaagcccaaaatgattcaagccgtcgatgatatgcttggatatgaaataccagagttattaaagaaattcagaaatccttatgattgaattaaaagaatgtttaaacatgttattatgtgatgaatg

SEQ ID NO: 8836 - DNA, 221 bp, Glycine max
  Clone ID: jC-gmle01810035a08d1
tcgtcctttttttttttttttttttttttttactatgaaatggtggaaacaattcccattgggtattctgcaaataacagtacctttgaccattttaggccatgtggaaaaaaaattgtgactcaaagcagccaaatcgcactaccaacgcccgaggggggactacaaggctctggggggaagcgcgtggagggcgggaaccaaagggaaaataggggggg

SEQ ID NO: 8837 - DNA, 585 bp, Glycine max
  Clone ID: jC-gmle01810035a09a2
tcatgataaagaaaagctgcaatcaatccttgaaactagggatcttgacattaaggatctgaaggatgaagtcaaacaactcaatagaatctgtgaagactctaaaatgatcaagaatgaattgtctgagctcacctatgtattaaaaaaaattatggatattttgggagctggtgaatgggttgtagataggaaatctaaaggttcgaaggaattaataccagcattggagaagcatatcattgccattctttcagaatctgaaaattcaaaatccaaggctcaggaacttgatattaagttagttggaagtcagaaggttattgatgaattaacgaccaaggttaaattacttgaagattcactccaagataggacttctcagccagacattgtacaggagaggagcatatatgaagcaccctcattacctgctggatctgagataattgaagttgaagagggatcatcacttagcaagaaagcaatatctcctgtcccatcggctgctcatgtgcggaatatgcgaaaaggatctactgaccatcttgcactcgatattagtggggagtctgataatttgat

SEQ ID NO: 8838 - DNA, 415 bp, Glycine max
  Clone ID: jC-gmle01810035a09d1
gaccgcgtgggtccggtcgcgagcatacccggtcgacggctccttttttttttttttttttttttttttttttttttttttttttttttttttttttttttttttttttggggatttaaataagtcatccttaaaatttttgtacatttttgttcccttaacgttcgaaaaaattcatttacctattttttcccccccaaatcctttgattttgaagctgtcagaccatgggggggtaatgccatgggggggcttccattttaaagaaaaagaaggctggcaaaaaagggggccaaacattgtagaccaggatctttgaatccctaagaggggattgcgggaaacaaataggggattgacgagacttaggaaaaacaggcttaagaagcaaatggaaagacctggattaaagggg

SEQ ID NO: 8839 - DNA, 498 bp, Glycine max
  unsure at all n locations
  Clone ID: jC-gmle01810035a10a2
accgccacaaatttctccatagttatgggcacttccattctcgacgccctgaacgttcgcgtggaaggttccggcgacaagtaccttgtcctggcccacggcttcggcacggaccaatccgcgtggcagcgcgtgctcccttactttacccgcaactacagcgtcattctctacgacctcgtctgcgccggcagcgtcaaccccgaccacttcgactaccgccgttataccaccctcgacgcctacgtcgacgacctcctcaacatcctcgacgccctccgcgtcccccgctgcgcctacgtcggccactccatctccgccatgatcggcatgctcgccttcatccgccgcccggacctcttctacaaactcatcctcatcggcgcctcccctagattcctgaacgacaaggactaccacggnggatttgagcagggagaaatcgagcaggtgttttcggcaatggaggcgaactacgaggcgtgggtcaacggattc

SEQ ID NO: 8840 - DNA, 220 bp, Glycine max
  Clone ID: jC-gmle01810035a10d1
atgataataataataataatattaataaaaacaaacaatcacactaacaaacaagtctctctaatttcttctcttttttttttctttcctttaaaaggagagaagcacaagagcaataagttgattaataatactaaaaatggccacgcatcacgtgaaatccacgtgcaaattcttattcttaaattaaaatcccagtccaagaaccaacacccacacg

SEQ ID NO: 8841 - DNA, 278 bp, Glycine max
  Clone ID: jC-gmle01810035a11a2
cggctcgagaagttttggaattttctattcaatccacttccttcacattttcataaaagggggaagagaaaaaaaaaaaaaaagggcggccgaacacctttagcataaataaaaccccaaaattagttgcgggccccttcctgcttgctttccggcttcccgattattgtttcgtctccggccttggggctatcccgctcttcactgatgggggcgagtacttgtcttccgcatcaacttccactgtgcctgcctctgggggttattttgcccctatc

SEQ ID NO: 8842 - DNA, 62 bp, Glycine max
  Clone ID: jC-gmle01810035a11d1
aaaatgtgattgatttttacagggttttaaattttaaattcaaaaaaaaacgaaagggcacg

SEQ ID NO: 8843 - DNA, 83 bp, Glycine max
  Clone ID: jC-gmle01810035a12a2
cggctcgagaagttttggaattatctattcactccacttacttcacattttcattacttgggacccaaatcctataacaaaac

SEQ ID NO: 8844 - DNA, 345 bp, Glycine max
  Clone ID: jC-gmle01810035a12d1
tcctagtcggcggccgcccttttttttttttttttgtttcatgttatgagcacctgggactgcagtggatagaaaatgaactgcggcagcactctgagcgggtatggcctatatcaaagccaacatccgcgtagaagcggcagcactggcaactattagtggctgctaaataaaattcatgcggcgtatgcttgaaagctccatgatcaggaaatccctggggatgaccaagtgcgtaggctatgagatcaatacatgttacacagctgtcaccaaaacatactggtccagggcgatcatactgcccagcggacctcagccggtgtgcgcaagggtactgctctg

SEQ ID NO: 8845 - DNA, 471 bp, Glycine max
  Clone ID: jC-gmle01810035b01a2
cttttctctctcgttttttctcaaaaagttgcaagagttaaagcaaaaaccaaagtgagagagaaaatgatgaagccatcgatgctcagatctcttcactctgccgccacccgcggcgcctcccacctctcccgccgtggctacgcctccgagccggtgccggagcgcaaggtggccgttctaggtgccgccggcgggatcgggcaacccctctcccttctcatgaagctcaaccccctcgtttccagcctctccctctacgatatcgccggaactcccggtgtcgccgccgatgtcagccacatcaacaccggatctgaggtagtggggtaccaaggtgacgaagagctcggaaaagctttggagggtgcagatgttgttataattcctgctggtgtgcccagaaagcctggtatgactcgtgatgatctttttaacatcaatgctggcattgttaagacactgtgtact

SEQ ID NO: 8846 - DNA, 444 bp, Glycine max
  Clone ID: jC-gmle01810035b01d1
agcaacaaaaagctctcagacttaaattattaaatcatggcgtatacctactctaaataaaacaacaaagtcgccacaccactgccggcaacaatacaacaatggttctgagattgcaaaatttgatttggttcttgaaggaataacattaacattagcctaccagacacgtatgtgataacatgttcaattactggttggcaaatttgattcccttctcaattgatgatttgagttcaggcttaaggctttcgaggccttgttgctcaaaatctgagagaggtcctaagcccagaacttcctccactccattcttcccaagcctcaccttggaagcaaagtagggaagttcagtaacagtggattgcacgaatgagcactccacaacatctgggactccattgaggcccttaaggcaagcatcagcaaatagggcaccagcat

SEQ ID NO: 8847 - DNA, 578 bp, Glycine max
  unsure at all n locations
  Clone ID: jC-gmle01810035b02a2
tagggttatcatttctccatttccattttctctctcacttttcaagaatcgtaagctatgggaaagtcttacccaactgtgagtgctgattaccagaaggccgttgagaaggcgaagaagaagctcagaggctttatcgctgagaagagatgcgctcctctaatgctccgtttggcatggcactctgctggaacctttgacaagggcacgaagaccggtggacccttcggaaccatcaagcaccctgccgaactggctcacagcgctaacaacggtcttgacatcgctgttaggcttttggagccactcaaggcggagttccctattttgagctacgccgatttctaccagttggctggcgttgttgccgttgaggtcacgggtggacctgaagttccattccaccctggaagagaggacaagcctgagccaccaccagnagggtcgcttgcccgatgccactaagggttctgaccatttgagagatgtgtatggcaaagctatggggcttactgaccaagatatcgttgctctatctgggggtcacactattggagctgcacacaaggagcgttctg

SEQ ID NO: 8848 - DNA, 352 bp, Glycine max
  Clone ID: jC-gmle01810035b02d1
agggccgaaagaacactttcattatcgctgaacaatgttttttaacaaaagtttcagccccaattaaaaacaccatcccaacttcccaatcattggaacgtccagcaaaataccttcaaaagctttttaaaatctggggaacccactttggcattaaaaaccaggaccatacaattttttaaagaaaaattatgggcaccatgcctttttaacaatcccctaaacgttggttaggccttagcaaacccaagcttggaaagcttttggggagcctcagcgtaatcaggaaagaaggccttttcgtccgctgcatttttatcaacgagagggcggaataccgggtcaaacaaaa

SEQ ID NO: 8849 - DNA, 482 bp, Glycine max
  Clone ID: jC-gmle01810035b03d1
cattcgaattcattttatttatatattaatattatattcaaatgaaataaaaagatattaaaagatactaattataagaatttgaaagtgaaattataaagttattaaatgattaatcaatttttttctacctgttcctgtagtaaaaagagttccatctgttcttgaatagcttccttcaaaaggacttctgcttccccagtgaatgtcttggtagaagatatgatttctttgaattgaggtttattcgtgtttaagtaagcacgtaactcaacaagaaatttccttacctgtccaatttctaatgaatcaagataaccattcgttccagtataaatagttattatctgttcttccacggtaagaggagctgattgggattgtttaagcaactcgcgcaatcgttgacctcttgctaattgattttgagtagctttatcgagatcagaagcgaattgggcaaaagcttctaattctgcgaa

SEQ ID NO: 8850 - DNA, 384 bp, Glycine max
  unsure at all n locations
  Clone ID: jC-gmle01810035b04a2
agacccctcctagaccatgcgccttggccattttctcctgctcacgactcttgccgtcatcgcttgctgtagcacctctgctatcgctgaagacttcgttcaagtcaacagcttaccgacggattttcgacacgagctgacccacggaagccgtcgcaatcttaaaggaagcgtgagtgaaatcaatttcgctcaaaacagcgcaatttccaatttcatggaaaagctcaagatgcaaggacagtctttatcagccttctggaaggatttcaaacaagctgctaaagtaaagcttcccgaattctataagtttctcatatcccatgtaaagatgaaaaagaagcaaccaaacatggcggaaacgcctncgaggagtccttcgtc

SEQ ID NO: 8851 - DNA, 518 bp, Glycine max
  Clone ID: jC-gmle01810035b04d1
caagttgggcaattggatgttggatgttaacggacaaaatgcgattactatggaatactttcgatagctactgcgacttgatgcgatgcaagcgtgacgaacacaccacgggtacttacttgtctcgacgtgaccaggcgatgattcttgaagacaatgcacccctcgggccttattgtccgtctggttttggtagtatttgcggggaagtgccttcactcaaagctggcgaatttttcggcggtgacatcccaggcgatgttaattccatattcggcttgacggacgcagtcacctcttgcggagggacggcatgattcggtgtcgaatgttgacgatccagtccggcagacgaaggactcctcggaggcgtttccgccatgtttggttgcttctttttcatctttacatgggatatgagaaacttatagaattcgggaagctttactttagcagcttgtttgaaatccttccagaaggctgataaagactgtccttgcatcttgagcttttccatg

SEQ ID NO: 8852 - DNA, 519 bp, Glycine max
  Clone ID: jC-gmle01810035b05a2
gctgaggagatgcacatagatgcttctaatgtcaccagggaatattctgttgaccatcagtcttctaatatggtttcaaatgtttcagcagcatataatgatactgttcatataacaagagaaagttctgtggctactgagtgccctcccgttgttgaaagtgttgagacatacagggatagaactccagtagccacagatagttctcatccacgaagaacctcttccactgttagggaatattctgttgacaatcggttttctaacatggtttcaaatgtttcagtggtgcataatgacactgttcatataacaagggaaagttctgcaactactgagtgccctcctgttgttgaaaatgttgagacatacagagatagaactccagcagccactgatagttctcatccacgaagagcctcttcctctgttttaaacaccagcgatgtcgagatgggtgatgccagtgaccatccactcatactgtctggagaccaagaggtcccgttcacatacatg

SEQ ID NO: 8853 - DNA, 459 bp, Glycine max
  Clone ID: jC-gmle01810035b05d1
ttttcattataatatcggaggtgcattgataacaaaaatgtcagtaaactttacaaaaccacttatagattaaaagtagcaaagctaaaatcacctgacaaatgatgtaattacagaaacaaatgatatatccattcaagaactgcaatgcatcctaagaagaaatagacatctcatccgacaaataaacctccaacgggaacgccaagaacaatgaaatgatgcaaagcattcatgcctcagctgtagtgtgtacaccaggcaacttttaatcacatttgtaatgctgtttctttcctccttttcccaggactcatggtgatttttcttttactgttgaacttggatcaaagagaagactattttgtcaaaatgaacaccaaacattttatcgacttttgtcgacttctccataagtctataggacaaatttgaaccttcacctcattcacattttat

SEQ ID NO: 8854 - DNA, 138 bp, Glycine max
  Clone ID: jC-gmle01810035b06a2
tgctggtgtaacaaagtagatgaaaaataatatgggtttgtagtgattcacgttttttcatgctctcagacatgtaaacattactttggttttgttatgaatgcctcatcctgggaacaccttggtaaaaggtgatat

SEQ ID NO: 8855 - DNA, 138 bp, Glycine max
  Clone ID: jC-gmle01810035b06d1
atatcaccttttaccaaggtgttcccaggatgaggcattcataacaaaaccaaagtaatgtttacatgtctgagagcatgaaaaaacgtgaatcactacaaacccatattatttttcatctactttgttacaccagca

SEQ ID NO: 8856 - DNA, 521 bp, Glycine max
  Clone ID: jC-gmle01810035b07a2
gaagttaaaagccttagccttccctacaactccaaacacaaagacatcatcatccatggctgcctccgtctccactgtcggagctgtcaacagagctcttttgaacctgaatggttctggagctggagcttcagctcccagttcagccttctttgggaccagcttgaagaaggttattgcctcaagggtccccaacagcaaggtttccggtggaagcttcaagattgttgctgtagaagagaagaaagagattgaagagacccagcagaccgacaaggacagatggaagggtcttgcctatgatatctcagacgaccaacaagacatcacaagaggaaagggtttggttgactcccttttccaagctccacaggatgctggaactcactatgcagtcatgagctcctacgagtacctcagcactggacttcgccagtacttggacaacaaaatggatggattctacattgctccagcttttatggacaagcttgttgttcacatctccaagaacttcatga

SEQ ID NO: 8857 - DNA, 323 bp, Glycine max
  Clone ID: jC-gmle01810035b07d1
gtattattatgttttgtttattctatttgtttttttttagggcaaacggaaaggggccccagttccatttcaggggacccggggctataaaattttaggggaaaaaggtcccatctgaaaaaaattcaggggtcaccctaacaatacaacattgttttgggacctaaaaactttgaaccttaacaaacaggcccccccagatcagatacacattctaaccccgggtgttagacacacccctttcagagcagaaaattttcttcccccatggggctgtgccccccaatagaaaggggaaaaaaaggcccctttcaaaaagcacc

SEQ ID NO: 8858 - DNA, 482 bp, Glycine max
  Clone ID: jC-gmle01810035b08a2
ctctctcttgcttgcgaaggaagggtcccacgtacacttgtttatcattcaacagcaagagagagaaagtgctgctgacaaggcaaaattcaacaatgtttttgtgaagaatctatcagaatcaaccaccgatgatgagttgaaaaacacttttggtgaatttggaactattactagtgctgtagtaatgagggatggggatgggaaatcaaagtgttttggatttgtgaattatgagaatgctgatgatgctgctagggctgttgaggctctcaatggcaaaaattttgatgacaaagaatggtgtgttggaaaagctcagaagaaatctgaaagggagaatgaattgaaacaacgatttgagcagagcatgaaagaagctgctgataaatatcaaggcgcaaacttgtatgtaaaaaatttagatgatagcattggtgatgaaaaacttaaggagctgttcttcccttttggtaccatta

SEQ ID NO: 8859 - DNA, 424 bp, Glycine max
  Clone ID: jC-gmle01810035b08d1
atgcaaatcaaactcatgtaatcatagataagtcaacaaatgatttccatgtaccaaaatgcaaggcataattaaaatcagtgctgaagtatccttcaaccaaaaggtggtggtccataacataccaaaagtgtctaatctaacgaaacaaactcaacctgaaaactgtatcaaagccagtgcagaaaataacaatccatcatcactacgtaaactccaaaatataaaccttaagaaacaaggttgtcattaagagataacgaaacaaactcaacctgaaatctgtatcaaagccagtgcagaaaataacaatccatcatcactaagtaaactccaaaatataaaccttaagaaacaaggttgtcattaagagataaggaagccagctgatcagcagtaccgtcagcctgctgctgagcaacat

SEQ ID NO: 8860 - DNA, 600 bp, Glycine max
  unsure at all n locations
  Clone ID: jC-gmle01810035b09a2
gatcttgcaaaaaaaaaaaaacacaatggcagcgagcgctcccactccacgcgaagagttcgtgtacatggcgaagctggcggagcaggccgagcgctacgaggagatggtggagttcatggagaaggtctccgccttcgccgagagcgaggagctgaccgtggaggagcgcaacctcctctccgtcgcctacaagaacgtaatcggcgctcgccgcgcctcctggcgcatcatctcctccattgagcagaaggaggagagccgcggcaacgaggaccacgtcgccgtcatccgtgactaccgctccaagatcgaggccgagctctccaacatctgcgacggaatcctcaagctcctcgacacgcgccttgtcccctacgccgnctccggcgactccaaggtcttctacctcaagatgaaaggagactaccacaggtacctcgctgagttcaagaccggcgccgaccgcaaggaagccgncgagagcacgctctccgnctacaaagccgatcatgacattgctaacaccgagctgccttcactcaccctatcaggctgggtctngctctgaatttctctgtgtttactatgagattctta

SEQ ID NO: 8861 - DNA, 288 bp, Glycine max
  Clone ID: jC-gmle01810035b09d1
aaaataacacacacttcacacatcattacgacaattaaaagaggtgtggaaattttcaaatagacagagcatactcaacaagagggtcatgtctaatttcctttattgaattaaacaaacgaacaaacgaaagaaaacacaaattccagatcatgcagaggattccgcattttcagaagatctggcagtagcctgtggaacagaaaaagctggcataagagttttaccagcaatttcaaaaacttgagaaatttccaagagaatatcaaaaactggagaccggttggg

SEQ ID NO: 8862 - DNA, 491 bp, Glycine max
  unsure at all n locations
  Clone ID: jC-gmle01810035b10a2
gttgtggtggaggagttgcagctgcagttcttgcaaattctggtcataaagtagtagtccttgagaaaggagagtattttgtttcacatgattattcttcccttgaaggtccatccatggatgaacaatacgaatccgggcggattatgccgagtcttgatgggaagatgatgatcctggctggctcaacagttggtggaggctctgctgtaaactggtctgcaagcatcagaacacctgattctgttctgagggaatggcctaaaaaatataaaattccactctttggtagctccgattaccaatctgcgatggactcggtgtgcagaaggattggcgtaacagagaagtgcaagaaggaaagctttcagaaccaaattctcatacaaggatgtgagaaaatgggcttgaaagtagagtctgtggctataaattcctcagcagatcactattgtggntcatgctgttatggttgccgaacatgagataag

SEQ ID NO: 8863 - DNA, 342 bp, Glycine max
  Clone ID: jC-gmle01810035b10d1
gaactaagaaacacaggataaataacattttattacaaagtcctccatagcatacaataacaaagttacatggaaattcattaactaccactaacaataccgttatagccgggtcaaaatgctgaatttaaacaaaactaaagagatgaagcacatgtacatttatttttatttttatgaaacttagattgaaacaatacaacttaactatatgttgatgctttgccaagtgattctgcaatcttactggcaatacagtaagatgtagactgaatggttaccatggtgttgacaccaactgcactaggcaaaacacttccatgacacacatacaagccttct

SEQ ID NO: 8864 - DNA, 511 bp, Glycine max
  Clone ID: jC-gmle01810035b11a2
cactacactttgtctctgttctgtgtgtgcgagaaatggcgatggcaatggcgcttcgcaggctttcatcttcaattgacaagcctctgcgccctctcttcaatgccggttccctctactacaagtcgtctttgcctgatgaaagctgttaacgacaaggagcgacccggagttacatggccgaagcagttgaatgctccacttgaggtcgtggatcctgagattgctgatattattgagcttgagaaagctaggcaatggaaggggctagaattgataccgtcagagaatttcacctctgtgtctgtgatgcaagcggttggatcggttatgaccaacaaatacagtgaggggtaccctggtgcaagatattatggtggaaatgagtatattgacatggctgaaacactgtgccaaaagcgtgccctataagcttttagattggatcccgctaaatggggagtgaacgtgcagcctatgtcagggtctcctgcaatttccacgttacact

SEQ ID NO: 8865 - DNA, 122 bp, Glycine max
  Clone ID: jC-gmle01810035b11d1
gattaagaaatttggtatttgaagcctttattacatatgcatctatacatttcaacataccgatcaaaattttcgggattctaccattaaagggttttgacattggttttaaaaaatggtgg

SEQ ID NO: 8866 - DNA, 595 bp, Glycine max
  Clone ID: jC-gmle01810035b12a2
taaaagccttagccttccctacaactccaaacacaaagacatcatcatccatggctgcctccgtctccactgtcggagctgtcaacagagctcttttgaacctgaatggttctggagctggagcttcagctcccagttcagccttctttgggaccagcttgaagaaggttattgcctcaagggtccccaacagcaaggtttccggtggaagcttcaagattgttgctgtagaagagaagaaagagattgaagagacccagcagaccgacaaggacagatggaagggtcttgcctatgatatctcagacgaccaacaagacatcacaagaggaaagggtttggttgactcccttttccaagctccacaggatgctggaactcactatgcagtcatgagctcctacgagtacctcagcactggacttcgccagtacttggacaacaaaatggatggattctacattgctccagcttttatggacaagcttgttgttcacatcttcaagaacttcatgaccctgcccaacatcaaggttcctttcattcttggtatctggggagggcagggacaaggaaaatctttccaatgtgagct

SEQ ID NO: 8867 - DNA, 392 bp, Glycine max
  Clone ID: jC-gmle01810035b12d1
tcacttgtcggcggccgccctttttttttttttttttttttttttttttttttttttttttttttttataggacaaaaggaaaaggcaccaaattcaatttaagtggacactgtaactcaaaattatagaggaagacggtccaatttgaaaaatatagtaagatcatcttaaacttagcatcttctttttgcacctaaaacattgagaatgctaaaaatgttacacgcaagttccatcacaacttttagcacttggattagtacaacaaccttcacgaacagaaatatttacttgccaagtttgctttggcttcaattcaagactggaagaaaggtcccctctgaatagcatcctcgttagcatttccaagagcagcctcgttcaagtactt

SEQ ID NO: 8868 - DNA, 463 bp, Glycine max
  Clone ID: jC-gmle01810035c01a2
ctcagaaagcatagcattctatggtggagagaggaaagaagaaacttatattcaacagaagtttaaaaccttggttaggcacatgtatagtgtgctacatgaccattggtggtttggcatgattcaggacttattattgaagtaccttggtgctactgatgctgttattttgattattgaacctttcttttctggtcatctaaggcctgatagttcaactttagggcgtgcagagatgttaagcaatcttagatatcatactagtgtcataatttccttatttcaggctctaggaactctttctatcagtgcaagactgctcaatcgtcttagagggtatgctgatcgcatttatgaattaatggctgtatcaagggagctaagcttggagaatgagacatcttccctgcaaagaaatgcaagtagaaattgcatacgtgaagctaactacattgaatttgat

SEQ ID NO: 8869 - DNA, 307 bp, Glycine max
  Clone ID: jC-gmle01810035c01d1
ataaaaaaactattccggtttaatgccgtttaattgaaaaaaaaaattttaaaaattccttccaatggttacaactggggaataaatttctaactaactaataaaagaagcgaaaaccctggccataaattgattatttactgcggagatttttctttaaaccattttggctttgggggctggttttggttggtttcccccccagggggacggggccaaaaaatgaatgttgggtaatccgggcaaccccaatgggaaaagaaatgggaaaaaaaaatggcggaatggccaccagggcaagcctaaa

SEQ ID NO: 8870 - DNA, 479 bp, Glycine max
  Clone ID: jC-gmle01810035c02a2
attaaaattaaccatagttaatataatggggtcggggattaaggtttcgttttctgtgttgtgattgttagggttagtcattgagggtgatcatgctgcgtatgctcaagactcaccaacagactttgttaatgcacacagcgcttgatgatcacaggttggtgtttcaaatatacgttgagatgacacaggtgtgggttttgcacagaactatgctaaccaacgcaaaggtgactgcaaacttgaccactctggtggtgatggaaaataccgtgagaatcttgccggacgcaccgggcacctaagtggttcaaatgcaaagaaattgtcggttgatgagaaatccaagtatgactacaattccaacacgtgcgtaggtggggagtgcaagcactacactcaggttgtttggaaaaactttgtgcgtcttggatgttgcaaagataagtgtgacaatggaagcacttttattacttgca

SEQ ID NO: 8871 - DNA, 434 bp, Glycine max
  Clone ID: jC-gmle01810035c02d1
acaccccacaacgttcaaaactaacatcattatatattaatcatgggagtcatgtcctcacatgtttttattactatccaccgggaaaatatcatttcccccatgaatttatagtcgtcacgtagctaaatccatgatgttaagaattatttcttaatatataagccagcaatctgaagggggagcttggtagctggtacactgcaactacttagtaggggttttggccaacatagttgccaggaggagcattgttgcacgtaatgaaagagccttcattgtcacaccttacttttccacatccaagacgcacagagttttttcaaacaacctgagtgtagtgcctgaactccccaccaacgcacgtgtaggaattgtagccatactttggattttcatcaacccacaattttactggatttgcaccacttaag

SEQ ID NO: 8872 - DNA, 458 bp, Glycine max
  Clone ID: jC-gmle01810035c03a2
cgttgccattctcatcctcttctttctctctctaccattgccatggatccctacaagcgccggacgtccagcgccttcaatactcccttctggactacaaattctggggctcctatttggaacaactactttccttttaaagcgttcggagctagaatgtcccattctgctcggaggattatcatctctggggagaagctagcaaattttgatagggaacgaatcccagaacgtgttgtacatgccaggggcgctagtgcaaagggtttctatgaggtcacccatgacatctctcacctgacatgtgcagatctccttcgagcccctggagtccagacgcctgtaattgctcgattctcaactggcattcatgagcgagggagccctgaaaccctgagggacccttgaggatttgccgtggagttttacaccagagagggtaactttgaccttgttgg

SEQ ID NO: 8873 - DNA, 376 bp, Glycine max
  Clone ID: jC-gmle01810035c03d1
attattcctttgtttaaacttattttttgtttttttatacttttaaacctttcattacgagaccgacctattgcatttatatatttgcttaagagcaaagggcaacgcacgcctttaatggggggggggggcccaccccaccctaattggccaaaaaaggaattaacttctcagggtatcaaaaaaacccactcaaactgactgtttgcccggctggactggtaaaaaattagagggggggcgggaccagccaaaaattgtagcccccagatctaaaaaaaaacatgtttttcactcccaaaaacgggagtccttaggcccctgggacaaaaaaaacggcggacacaatgggggccaccggggtgaataaaaatat

SEQ ID NO: 8874 - DNA, 538 bp, Glycine max
  Clone ID: jC-gmle01810035c04a2
cgttgacgttctcatcctattctttgtctctctaccattgccatggaaccctacaagcgcgggacatgcagcgccttcaattctgccttctggactacaaattctggtgctgctatttggaacaacaacttccttctaaccgttggagcttcaggtccaattctgctggaggattatcatcgcgcggagaagatcgcaagtttcgatagggaacgtatcccagagcgtgttgtccatgccatgggcgctagcgcagagggtttctttgaagtcacccatgacatttttgacctgacatgtgcagattcccttcgagcccctggagttcagacacctgacttcgatcgtctctcaactggcattcatgagcgtggtagccctgaaaccttgaaggaccctcgaggacttgccgtgaagttacacaccagagagggtttctttgaccttgctggaaacaaccttaccatgttctttgtacgtgatggcatgaaatttgcagatatgggtgatgctcttagaccccaaccccagaaccaca

SEQ ID NO: 8875 - DNA, 471 bp, Glycine max
  Clone ID: jC-gmle01810035c04d1
atactatggttaaaacctacttaaaccttttttatacttttaaaccttccattacgagaccgacctagtgcatttatataattgctatctaacatatgtcatcttactcctttaatttattgtccaatcccacacaaccctacttgtgccaccacaggaattaacatcacaatatattaaacttattcactcaaactgactgattcttctgctttattggtatatcattagagggaggactggactgccaaaacttgaagttcaaagatcttatttacagcatgttttccacttcctaaaacggaagtcctttggattctggcacaaaaataatgacgaacacaatgggtgcaacagtgatgaatatgaatatcatgaatgtggatgaggtcccaatggcttgtgtcaaggacagaaaagactgggcctcaatgagattagagacccaattttgggtttatgccatccccc

SEQ ID NO: 8876 - DNA, 582 bp, Glycine max
  Clone ID: jC-gmle01810035c05a2
agcaccttcttctctcgtgtttcacaaactaaagaacaacaatatgcctccaatcttgccggatttctgcaactcggtgaaactcaagtacgtgaaactagggtaccaatacctggtgaaccacattctgactctcactctcatacccatgatgatcgccatcttcatggagattctacgcttaggccctgaagagatcctgaacctgtggcactccctccacttggaccttgtccaaatcctctgctgcgccttcctcatcatcttcatcgccaccgtctacttcatgtccaaaccccgcaccatctacctcgtcgactacgcctgcttcaagccacccgtcacctgccgcgttcccttcgcaaccttcatggaacactccaggctcatccttaaagacaaccctaagagcgtcgagttccaaatgcgtattctcgaacgttccggtctcggtgaagaaacatgtctccccccagcaatccactacatccctcccaagcccaccatggaggccgcccgaggagaagccgaacttgttatcttctccgccatggatgctttgttcaacaaaacaggtctcaa

SEQ ID NO: 8877 - DNA, 347 bp, Glycine max
  Clone ID: jC-gmle01810035c05d1
cataaaataagcaattatcttcttgttcttgaacaattctccatcctagagcttaacgatctcaggaatatcgaccgggtaacgatcaatgcaatcagcccaaggcccatcaaccggtgtcttaatgcttctgttgcacttccacacagcactgttgcattcaaagccactcccagacgctatctgccacaccctatcacccttcttcatcctccccttggactcaatgtagttgagctcataccacagcgaagaagacgaagtgttcccaaacctgtgaagggtcattctagaagcctcaacgtgttccgtagaaagctgaagattcttctgaagctcatcaatca

SEQ ID NO: 8878 - DNA, 601 bp, Glycine max
  unsure at all n locations
  Clone ID: jC-gmle01810035c06a2
gtgcatacatagctatctatttatctatagcaagtgcgtcaagagacacgtggtaccctagctagagtgccattctgtggtttctttctttctttctttctgcatcacatcacaatttgcattgcctcgtgtcctttttcttctttgctctccaaaaatctcacacacacaggtatctagcaaatgggttctcaccaacaagaaccatggctattggagaatgggaaaccaagggttttgaccaaggagaccaggcatggccgttctgcacacagaatgtcctccacctctttgcgcaagaaatctagccgaactcttgtctcaaaggttccatgtgccactctcagaaactttctttcaaatttgcaagaggttattcttggcaccaagctttccattctcatccctgctattccagctgccatcgntgctgagtgctttggctttggaagaccttggatttttatattaagcttacttggacttacaccacttgctgaacgtgtgagcttcattacagaacaagttgccttttacactggtcccacagttggaggacttctgaatgctacatgtggaaatgntactgagctcataatag

SEQ ID NO: 8879 - DNA, 453 bp, Glycine max
  Clone ID: jC-gmle01810035c06d1
ataaaattaaaatttataaaaattttatttcccacgagacctagtacaatatatagtaacacaataaatacaagagattctgcaaactgaaaaagggattcttactaaagcaaactcaaacaagaacaacttccactcatttggcatctaccgtagtaacacaagatcaaaagcagcttctctgatagaacacacgtacgtatgattcaacatctttcacagtagtggttcatttctaacagctgcttttggaacttaaaataattggcatggttttgcaaagggctaactttttttcccccccttctttatggatatgacaatgggatccgaatggaaccattacccatccattgaatttgaatctgaatttgggtttggatcgataccaccattcttcatctcaggaaaggacaagaaataggccaaagcctactaattaagcgcttaaac

SEQ ID NO: 8880 - DNA, 595 bp, Glycine max
  Clone ID: jC-gmle01810035c07a2
aagttttcaaagccaagcaaatacgagctttacccaattttcttgctgttgaattttccactgttcaatcttcaaaatcacatttttctcgatcttcaccttctgggttgctttttttttttcttcttcttcttcttcttcttttgatttcgctatggaatcgaaaaaccctgcgaggtttacgctggggaagcagtcgtcgcttgccccagaacgccataacaaagaagcagagctccaaaaagatggggaagctgttgatcagggtgtgaggttgatgtattccgcattcgaacgcgatgtggatggaattcgcgacgcgttggagtctggtgtgagtgtgaattacaaggatattgataatcgcactgctcttcatgttgcggcgtgtgagggctccactgatgttgttgatttattgctccaaataagtgctgaagttgaccccaaagatcgatgggggagcacgccactcgcagatgctattttttataaaacgaatgacgtgatcaaactattggagaagcatggagcaaagcctttgattgcccctatgcatgttaatcatgcgcgtgaagtcccagagtatgaaatc

SEQ ID NO: 8881 - DNA, 508 bp, Glycine max
  Clone ID: jC-gmle01810035c07d1
gttacataataatgtacatgacagggagcaaattccttagaatacgtgtatatgttacatacaaatactaattctgtcaccagacataaatgtaattggaaataaatcatcgagtataaagaatcttgaaagacgaaaacaaccatgaacctgtgaatgaatacacacgagaaaacgttgcaaagctccaactcaagaagtcaaatttggttgctatcttttatctttataccaatattttagttacaggataagaccaatgttctccttcatattctgcttgatgtggagcgagatgaaccgacacgactacttccatttgaatgatctctcttcaacaaggcctccagattttggaagcatttcaatggcctaaccttccaatgtcttttgtgaccaattgtgttgtagatggactccagctttgttattatttgcctaaatgttggccgctttgctggattctcattccagcactcttcaatcaattctcgaattccatgggagt

SEQ ID NO: 8882 - DNA, 493 bp, Glycine max
  Clone ID: jC-gmle01810035c08a2
gactgttcttcatcagttgtatgagatgaatccacctaaatacacgtggttctataatttggttgcgtgaaacaaaccagcagatgggaaacgttttattcgatcccttgggaaggagcaacaagagcttgctgaaagagtgatggtcactcgacttcacctttatggtaaatgggtcaagaaatgtaaccatgctgagatatatcaagagatctttgatgaaaacttggagttaatgagggaacggctcatggagacagtaatatggcccacatatgacacaaacacagaacagattgggtgataattcatctcaaatttttactgtgtgttccaacctcttcctagtctaggtatatttttagttgcaatatcaatctgttatgattacaaaattgtcatttgtgtcattttcctttaataggattcttagatttatgttatgtaaattatgtatatatatgtaccttgttaaatacacaatccattatgt

SEQ ID NO: 8883 - DNA, 273 bp, Glycine max
  Clone ID: jC-gmle01810035c08d1
acataatggattgtgtatttaacaaggtacatatatatacataatttacataacataaaactgagaatcctattaaaggaaaatgacacaaatgacaattttggaaacaaaacagattgatattgaaacaaaaaatatacctagactaggaagaggttgaaagaacaagtaaaaattggggaggaatattcaaccaatttttttggggttggggcaatctggggccatattaactggctcatgagagccgttccttaattaactccaagtttt

SEQ ID NO: 8884 - DNA, 498 bp, Glycine max
  Clone ID: jC-gmle01810035c09a2
ctcacaacaacaacaacaacccctttcccccaaaccctagaatcgccccacacagatcctcatcgctcccatccaattcccaaccattttttttctatcccaaacaccgttgaccacacacactcgaggttttatccattaaagttccgctttttattcctgggtcctttttttttttcttctctttttattgggcataggaatgttgggtactgggttgaacttcgggcgcgctcgcggcgaggatcggttctattctccggcaaaggctcgccggtcgcttctaactatggagaatgacaagctgcgtagggcccaaagcgacgttgccgcgtctcgctccgttagagacaaatcggtggattcgggtaaccggataccggagaaccgggtcgggtcggacgaggcaaagaagagtggcgcggttccttcgtgtgaaccggtggcgaaccggttgagtaatctggagcggttcttgcaggcgatcacaccctccgt

SEQ ID NO: 8885 - DNA, 321 bp, Glycine max
  Clone ID: jC-gmle01810035c09d1
cttcataagcaattattttattatttgtaataaaaaaggacaattcagtcagcaaacccaaactaatcacaaaaaagaagaaaatgcatacagggcaacctaaaacgtgctttacagaaaaatgacggcggattaaacgtggatccagccagtctattgatcaaactttaaagacacttctaagcctagaaatttggaacccttaaaggaaaaatggtaacagagggttaaccctggcggttttcaaacatgctgattgagctgactttcattggagttggcaccaccaacggagcttctggagagtcactaacagcaaat

SEQ ID NO: 8886 - DNA, 528 bp, Glycine max
  Clone ID: jC-gmle01810035c10a2
ctcacaacaacaacaacaacccctttcccccaaaccctagaatcgccccacacagatcctcatcgctgccatccaattcccaaccattttttttctatcccaaacaccggtgaccacacacactcgaggttttatccattaaagttccgctttttattcctgggtccttttttttttccttctctttgtattgggcataggaatgttgggtactgggttgaacttcgggcgcgctcgcggcgaggatcgggtctattctccggcaaaggctcgccggtcgcttctaactatggagaatgacaagctgcgtagggcccaaagcgacgttgccgcgtctcgctccgttagagacaaatcggtggattcgggtaaccggataccggagaaccgggtcgggtcggacgaggcaaagaagagtggcgcggttccttcgtgtgaaccgtgggcgaaccggttgagtaatctggagcggttcttgcaggcgatcacaccctccgtgcctgctcagtgtctgcctaagaggacgac

SEQ ID NO: 8887 - DNA, 449 bp, Glycine max
  Clone ID: jC-gmle01810035c10d1
cattcgaattcattttatttatatattaatattatattcaaatgaaataaaaagatattaaaagatactaattataagaatttgaaagtgaaattataaagttattaaatgattaatcaatttttttctacctgttcctgtagtaaaaagagttccatctgttcttgaatagcttccttcaaaaggacttctgcttccccagtgaatgtcttggtagaagatatgatttcttggaatggaggttatttcgggtttaagtaagcacgtaactcaacaagaaatttccttacctgtccaatttctaatgaatcaagataaccattcgttccagtataaatagttattatctgttcttccacggtaagaggagctgattgggattgtttaagcaactggcgcaatcgttgacctcttgctaattgattttgagtagctttatcgagatcaga

SEQ ID NO: 8888 - DNA, 351 bp, Glycine max
  Clone ID: jC-gmle01810035c11a2
acaaaatagatttgcctacatgcggctctttacttcaaggcagaccggcgaggtgaccttgggcttcgcttctcttcatatgaatcctgactgcattttcgatgctgaaaaattgatcccgagatgagctatagaggctacatgcacgcataacgctgacctcaatgacttggaacacatggtggaatatgctacaagatctcttgatggtggcgggacaccaaagccctctttagatatgcgtgagatgacgtgcgatatacagtgaggctgaccgatttttatatccatggcaggacccacttgggagagaaggtgacagatacagcacaccagggcccaacaacagat

SEQ ID NO: 8889 - DNA, 466 bp, Glycine max
  Clone ID: jC-gmle01810035c11d1
agtaaaaaattgagctcgaaaactcacacacaccatcaatttaaaccttgaattttaaacattgtaattggaggtcgatataatatacaaccatgacagtactctcagtagtgctaggaaagttgggtcaagggataatgcagcaacaccatgcatgaagttactaacaaaatctgagccaacaaacaaaacagaaaacaaaacactctatgactcaagctgagcataccagatgccctggatcttgacatcctttggagcctttgctcccaaatcagtgtcagatggttgaacactctcgaacacaccgataacctcacccgtctcaggcttggtcttggtgacactcaaggtgattttgcccttggatgatgaggcacttttattggtttccttggcaagttcttcctcatctcctcttccaccagcaggcatagcaactgcattgtcataacctgtggaagca

SEQ ID NO: 8890 - DNA, 515 bp, Glycine max
  unsure at all n locations
  Clone ID: jC-gmle01810035c12a2
aaatgataatcacatttcccagaaattatggcatgcccttcaggttgcttaaatgggggaggtcaaattaaaccaaattcagggcaatctcctaaagaactaagtcagttgttagaatcagtttacatggaaaatgttttggtagcatcaccatttgacaatcccatcattaaaggcttatatgacaagtggcttgaacagcctggttctgtgaaagctaggagatacatgcacacacaatatcatcctgttgaaaaaagcattacttctcagttgcataattggtgaggtgttgaaactgaacttttcatattgcttattctcaaggtcattttgtggtattactattaggcggaagagtactttaatccttttgctatggctccttgtggatatgtttgcatattggagtcgtccaattttggtattgaacagattnntttgatgtatatagatccttgatctgcacccatttagatagaaagaattatgcattttgtaatttaccatttgga

SEQ ID NO: 8891 - DNA, 350 bp, Glycine max
  Clone ID: jC-gmle01810035c12d1
ttatgtcggcggccgcccttttttttttttttttttttttttttttttttttttttttttttttttttttgggtttttttttttttttttttaattttttttcttaaatttaaactccatagaacccaaaaaaaaacaaacacgcccaaacatatccgaaaaaacacgacaaaaataccaccaccaaaaaacaggaccccaacaccaagaacggggcgcaaacccaaagaaaagccaaagaaacccgcaggggaaccccacaacagggccccgaacattacaagccaacaaacgggaaccaaggcacaaaaaagcgaaaagccacaccaaaaaaaaacaggccgaagaac

SEQ ID NO: 8892 - DNA, 497 bp, Glycine max
  Clone ID: jC-gmle01810035d01a2
caccaaccttcaaagtccatgaagtctgctccattttgccgccacaagaaaccccaccaacaactcttcccttcaccctcttcgacgtcctatggcttcggatccccccagcggagcgtctcttcttctattccttcccaaacccaacaacaacattatttttcgacaccaccgttctcccaaatctcaaacacttcctctccctcactctccaccacttgccttctctggccggcaccatcacatggcccaatcactcacccctccctctcataacctacactcccggcaacaccatccccttcacaatcgcccaatccaacgcagatttcaacaccctctcttcaaacctctctcaagtcaaccaccaccttcaaaacctaataccccacttaaccatttcccatgaagaagcttccgtgttagcacttcaactcaccctctttctcaaccaaggcttttcgattggaatcacaacccaccacgctgcacttgat

SEQ ID NO: 8893 - DNA, 381 bp, Glycine max
  Clone ID: jC-gmle01810035d01d1
accgagagaactcatgtatctcatctcatgatatatataaatattcatatactaacccataaaattattgaaacttatttaatgaaggctataacctcatcttacaagttctttttttccgcaaacatcgagattcaagaatatccttttttcctcttacaatagatttttcgaaaccccaccaaccaagtttgaaagcctccatcatcatcatcatcatcatatttattccaaggactcaagcccttgagcaaaaaccgaagaaaacgcctccatttgactcttggtcaacgccaacccaatttgaatgcctccactgtgatccctagtctccgaaagtgaaaacgcacccgttttatcaacggaagtaacatccacttt

SEQ ID NO: 8894 - DNA, 541 bp, Glycine max
  Clone ID: jC-gmle01810035d02a2
ctctcatctcatcggatcgatcaagcatcagggagctttgagggttgattctctggtgtggtagcgatcagcacaatagaaaatgttttttgacggatatggatatcatgggacatcatttgagcagatatatcgatgctacccagcttcctttattgaaaagccccacatcgagagtggtgacaaaatgatcatgcctacatcagaccttgaccgggtagcatctctgcatattgattacccaatggtgcttgaactgcggaatgatgctgccgagcgggtttctcattgagggggtctggagttcattgctgaggaaggcatgatatacatgccatactggatgatggagaacatgcttttacaagagggggacattgtcaaagcgaaaaatgtgacacttacaaaggggacatatgttaagctacagccccacacaaaagactctttggatattttcaagccaaaagctatcttagaaacaacattgaggagatttttctgcttgactactggagatagcattatggcggcttacaac

SEQ ID NO: 8895 - DNA, 427 bp, Glycine max
  Clone ID: jC-gmle01810035d02d1
accattcagacacgattgcaaccctcgtcaagagcttcgttcacaagtaatcaaaggtattttctgtggcatctactggtctatctactgcttataatacaataaataaatcaaagtttttgcaatagacatcgatccatgcatagatcaacaaagtaacttgctttaaaagtaaaaggccattttaatttaaccccgtaaagaatacttcttccctgaaaaaggttgaaatttcagctcttctttctctttacgtggctctggttttgactctttcgcctttcctgtctctttagtacggttagcatttgacccaaacacaaacttgccctgagattgacgagcattactttgtgaactagaagctgcagaagactgcaaattgacaacctcaggtttctggtccttagaccctgaagaggaaact

SEQ ID NO: 8896 - DNA, 414 bp, Glycine max
  Clone ID: jC-gmle01810035d03a2
ttgtgtatctcctataactgtacaactctttttctcatgcttacttttagtgttgattattattacttttacatgtgtttgtgttgtttcaggttctcagttgtttcatttcatgccaattattcacttgtctcctaaaacccaattgatagttccttccaatcttaattactcctttgctacaacaggaaccagaaagttcaagtctttccagctcaaggctggattttgggaatcaattaaatctgggttgatgaagaataactccatgcaagtcattgatccaccctctgcagatgaagaagacgaagaacctctgcctcaagagtttgttcttgtggaaaagacagaacccgatggtacaattgagcaaataatattctcttcacgtggagatgttgatgattatgatct

SEQ ID NO: 8897 - DNA, 406 bp, Glycine max
  Clone ID: jC-gmle01810035d03d1
gaaaagttgcaaaacttttttaagaagtgaataacttacaaacacctaaaacacaataattacaggattgacgtacaatctttatactttcgtattacaagtgatagataaatttgtcactgcttctgtcgttgtatatttcatggttgcaaattgcaatgttaacataatccaaaaacaagctttggtagggttgcaattagtgattcgggtaccaaaacatgccttttatgccctctgggtcagcttcaaagcctaaattgcgataaaattccacaacttgactatctgcaaacagagttatattgccaatgtccctttgcagaagagttcgaatcagtttctctataagagctttaccaagaccttggccctggtagccaggatcaactaggacatcccaaat

SEQ ID NO: 8898 - DNA, 595 bp, Glycine max
  unsure at all n locations
  Clone ID: jC-gmle01810035d04a2
gggagattattcatagctgacacaaacaacagcttaattcgatatctagatttaaacattaatgaaactgaactccgtacgttggagctcaaaggaattcagcctcctaagccaaaatcaagatcttttaaacgtcttagacgacgagcatcagctgacacaatgccaattaccattgacaccatttcatcaaatgtgggaagaattaattgcaaggtttactattgcaaggaagatgaagtttgtttgtaccagtctttgctgtttgaggtccccttccaagagggagtttctaaccctgccgaagcagacgtcactcttgcacattttgtgaaacccaaaacttcaaccagcaacttcctgcagtcagttgccccttaagtccgtgggaccgtggcaccttaaaccaggttcttccagtgctgctttttcttgctcatcttttgcttatttttctgtatatactagtagtattcaaatgcttgagagtcatgatctttcttctgatacaacccatcgtaagttcattactaacaaanattaagggttttgtctacccttcctcgcttctttgaagtgtggtcatcaatcatca

SEQ ID NO: 8899 - DNA, 522 bp, Glycine max
  Clone ID: jC-gmle01810035d04d1
gtatccaataaaataaattatacaacatgattacacaatgatgattgatgaccacatcttcaaagaagcgaggaagggtagacaaaaaccttaatttttgttagtaatgaacttacgatgggttgtatcagaagaaagatcatgactctcaagcatttgaatactactagtatatacagaaaaataaacaaaagatgagcaagaaaaagcagcactggaagaacctggtttaaggtgccacggtcccacggacttaaggggcaactgactgcaggaagttgctggttgaagttttgggtttcacaaaatgtgcaagagtgacgtctgcttcggcagggttagaaactccctcttggaaggggacctcaaacagcaaagactggtacaaacaaacttcatcttccttgcaatagtaaaccttgcaattaattcttcccacatttgatgaaatggtgtcaatggtaattggcattgtgtcagctgatgctcgtcgtctaagacgtttaaaagatcttgattttg

SEQ ID NO: 8900 - DNA, 433 bp, Glycine max
  Clone ID: jC-gmle01810035d05a2
ctagttctagatcgcgagcggccgcccttttttttttttttttttattcttcccaccttgtggtgcgggatcttctttttttttcttatttctactcatttcatttccaaagggggcgcctcgcccttttttttctacattgttacccctcctttagtgcccccagattccttcaaggtttgcactggggaaaagaaccggggggggtgccccctataacctcgtttcctcctttaaaaaaggtgcttgtggtccaattacgctaaccctttcccttagctttaacaacacctaagagcttttccccccaacattgatcagaaaggccttgccctttttaaccccccaataaccccaccattgtctggcttgcgctgggataccctgccgggtattttccctttgagacgacaacattttttttggttgccct

SEQ ID NO: 8901 - DNA, 409 bp, Glycine max
  Clone ID: jC-gmle01810035d05d1
gcgatctagggccacagcaacaataacaatggcagcctcactacaagctgcagctaccttcatgcaacccaccaaggtgggcatggccactcgcaacctcaaatctacacaatgcatttctaaggcttttggcttggaacccgctgcagctaaactcatttgctcccttaagcccgatctcaaagattttgctcaaaaatgtgtcgacgccaccaaaattgcaggattcgcccttgccacctcagctctcgttgtttctggagcgagtgcagaaggtgttccaaagaggctaaccttcgacgaaattcagagcaagacatacttggaagtgaagggaactggaactgctaatcagtgcccaaccattgaatgtggagtggactcatttgccttcaggcagggaaataca

SEQ ID NO: 8902 - DNA, 590 bp, Glycine max
  Clone ID: jC-gmle01810035d06a2
gcgagatattgtactggtgaggtctcggtcaaaactactggaggaattgcaaaagctccttcccccaacagtactgatacctgaaaagagattggaacatctagttgaacaagcccttatcttgcaacgagaggcgtgcctgtttcataactcattggataaagagatgtcattatattcagatcatcactgtggaaaaactcagataccttctaggacattacagatattagaagcacacgatgatgaagtttggtatgtgcaattttcgcataatgggaaatatttagcttcagcatcaaatgatcgatctgcaatcatttgggaggttgacatgaatggtgaactgtctgtcaagcataaattgtctggtcaccagaaacctgtttcttctgtttcatggagtcctaatgaccaagagctcctcacgtgtggtgtggaggaggctgttaggcgttgggatgtctctaccggtacgtgcctgcaagtttatgaaaaaaacggtcctggcctcatctcctgtgcatggtttccaagtgggaaatatatactttctggccttagtgacaagagcatttgcatgtgggatt

SEQ ID NO: 8903 - DNA, 431 bp, Glycine max
  Clone ID: jC-gmle01810035d06d1
gagattgatgaaaagtcacatgcatgtttaggtatgaatgtcgtctacttgtgatagtgaaggtatttacacgtacaattgcaaggttaaaaaaagaaatggaattggaaacagtttgcgtaggttcatctaaattcgccgccattgcagtaatggacgccattggtgcgtacattagggtactttacattcaggcgctttaggccccatatccgaattgtccggtcatcactggcggaggctaacatgtgtgggttagctggattccagctcacacagttaactgctccagaatgaccaggcaatgtctctattaaatcccccgagcttctgtgccatatgtaaacctgagaatcctcactaccactagcaataaaagattgctcaagaccaccaaagcaagatctgataacgaaccggctgcgtttatg

SEQ ID NO: 8904 - DNA, 597 bp, Glycine max
  Clone ID: jC-gmle01810035d07a2
gaaaaaacaattggaaaatggaattaattgtttgtttgatgcaaagcactttgcagttaccatactgtcatcatttcattcccccctaacaatttgccaactaagaaaccccacctttccagctttttgctctctcaaaacttgctcctattgttgttgttgttaccaaaaggttgttccaaatctggatttcaaaaacaatatagattcgccgcaacccatttgaatctctgagagaaggagcatatcaaaatcatttttctttttcctgaagagcaaatgggggcgtatagagctgatgaggattacgattatctgttcaaggttgagctgattggggactctggtgtgggaaaatcgaaccttttgtctaggttcaccaagaacgaattcagccttgaatccaagtccaccattggggttgagtttgccaccagaagcattatggttgatgaaaaggtactcaaagctcatatttgggacactgctggccaggaaaggtaccgagcaatcactagtgcatattatcgaggagccgatggtgctttattagtctatgatgttacccgccatgtacatttgaaaatatgagagatg

SEQ ID NO: 8905 - DNA, 379 bp, Glycine max
  Clone ID: jC-gmle01810035d07d1
agcaaaatggaagtgcatgcttcctgaaaaattgacttgaattgaacagatttctctgcatagcaaagcagaaagttgagattgtaatgctctctagacaatcattttcatgctttaagggtgaaactctacatggatataaacagaacatatacagaggtttttactgcatgctcaagcagaacaacatccatctttcttaacagccgatacgtcatcacgagacccaacatttatcgtctgtccttttggtaatgctgctggatcatcaccaatttcaagggccttcttgcttacaacatgatagatctgtgtcagcacttctgtgaaggcattttcaacgttcatggactcgagggcagatgtttccatgaaaaac

SEQ ID NO: 8906 - DNA, 550 bp, Glycine max
  Clone ID: jC-gmle01810035d08a2
gggaaagtgtacgagaaaattatctctctctatatatagatagataaatgataaaagcctggagggtgcgtcccatccctgaaaatgctatgaggtgttgggaaatggttgaagtagttgaataggaggatcgctatgactatagcttcttggtaaatttaccaaagatgaaaatgatttatttgatattatggatgactggttgcggagggaccgtttcgtttttgtaggttggtccggtctattactctttccttgcgcctatttcgccttggggggttggttcacaggtacgacctttgtaacttcatggtatactcatggattggcaagttcttatttggaaggctgcaacttcttaaccgctgcagtctccactcctgctaatagtttagcacactctttgttgttactgcggggtcctgaagcacagggagattttacccgttggtgtcaattaggtggtctgtggacttttgttgctctccacggcgctttcgcattaataggtttcatgttacgtcaatatgaacttgctcgatctgttcaa

SEQ ID NO: 8907 - DNA, 482 bp, Glycine max
  Clone ID: jC-gmle01810035d08d1
aagaaaaaagaaagttctaattattaataaattatatctatatatatatatatacagatagatattctatatcttttatcttaattaatatttgacccctccttataatgtgttatagttttctttatttttaggaacttatccattccttttttaatgtgcccgacaatccgaaagaattctgggggaggggtcatttcgtttttgatctagaataaatagagcttcaagaaatgagagaattaagaatacccacgagaaacactaatccaatccataatgatgtaccggaaaatacaacatttttgttattcgaccaaccttcaggagaagcaaatacaacaggtacactaatcaataaaataaatgaaatagcaattaatgcaaaaacagctaattggaaagcaatagtcatgtttctaatcctccaatttaccaacaaaagaacctttaccattgatcccccaaccccttgatccctt

SEQ ID NO: 8908 - DNA, 545 bp, Glycine max
  unsure at all n locations
  Clone ID: jC-gmle01810035d09a2
gcatttggaaatttggctgatgacaccatcaattttgaggcttttccccacaagctggtgcagtttggagagattcaggaaaaagttgtattgaaattttcacaagaggaatttcttacagcttgttcaactcaggtgcgtcctgcaacaactctgttggctgatgggtgtccatatttgtatgctatggtgcatgatagttcagtgtctacaataccaggtgattttgtcattggtgttaagttgacaaccataaacaatatgtgtgcatatgggctcaatcctggtatttcaggttctcgtgttttgggcaccattcctcagtctatttcacagcaaactgtttggaatcaaatggccacagtgagaacaccattgaattttgattctagcaagcagagcttttgtcaattttctatcgaccttctcggtggaggaattttagtggacaaaactggagattggatcacacttatacaaaattctccaattagtaacttgtngagagttgctgcttggaaacaggctgtgtaatggttaaaatt

SEQ ID NO: 8909 - DNA, 329 bp, Glycine max
  Clone ID: jC-gmle01810035d09d1
aaaataacacacacttcacacatcattacgacaattaaaagaggtgtggaaattttcaaatagacagagcatactcaacaagagggtcatgtctaatttcctttattgaattaaacaaacgaacaaacgaaagaaaacacaaattccagatcatgccgaggattccgcattttcagaagatctggcagtagcctgtggaacagaaaaagctggcataagagtattaccagcaatttcaaaatcttgagaaattcccaagagaatatcaaaaactgtagactgtttgggattgtcaataaggaaactcaagtgccatgaagtttgatttg

SEQ ID NO: 8910 - DNA, 564 bp, Glycine max
  Clone ID: jC-gmle01810035d10a2
accagcaggtgagttgcgttacccttcgtacccatagcaaaatgggacatggaaattcccaggaatgggtgctttccaatgctatgacaagtatatgttgagtagcttaaaagctgctgctgaagctcacggtaagcctgaatggggaagcacaggccctactgatgctggccactataacaactggccagaagacactcaatttttccgcaaagaaggtggtggatgggatggtccatatggtgagtttttcctcacttggtactctcagatgctgttggaacatggtgacaggattctctcatcagccacgtcgatctttgacaacactggagttaagatctcagtgaaggttgccggcattcactggcactatggtacaaggtctcacgccccagaactcactgcaaggtattacaacacccgattccgtgatggctacctccccattgctcaaatgctggcgcgccacggagccatctttaacttcacctgtgtcgagatgcgcgatcaccagcagccacaagaggccctttgtgcacctgagaagctggtgaagcaagt

SEQ ID NO: 8911 - DNA, 217 bp, Glycine max
  Clone ID: jC-gmle01810035d10d1
gataagaccattaacgatatcattaagaaaacactaaaagatataacttgaacgccaaagaaactgaaaaaaagaaaaatcaattaaaaaacttaaaatattattattccttgttttttttttcctgcttcttctcctgaaacattacaccactttttagaagtcatgaccatcgtaaccaagatcatcctccactctttccgccacgtcatcttca

SEQ ID NO: 8912 - DNA, 593 bp, Glycine max
  Clone ID: jC-gmle01810035d11a2
accgaacactcttcttcaatcaagcgaaggtggtctcgattgcaagtgatccacgatacactctacgcttcacaaaaccttcaaacccaattccacagaattcttctgcttcaccatgccaccaaagcctttagactatgggtcaataaatgaaaacgtgaagaagagtcaatatgctgtcagaggtgaattataccttcgagcttctgaacttcagaaagagggcaaaaagattatctttactaatgttggcaacccgcatgcattgggacagaaaccactgagcttccctcgccagggtgttgctttgtgccaagctccattcctacttgatgatcctaatgttggactgctattccctgctgatgcaattgcaagagctaaacactatctttcattgacctcgggtggtttaggtgcttatagtgactcccgtggccttccatgagtgaggaaggaagttgctgagttcatactcatgcgtgatggttatccaactgatccagagctcatatatctcactgatggtgcaagcaaaggagtgatgcaaatattaaatactatcatcaggggtcaagacgatgggattttgg

SEQ ID NO: 8913 - DNA, 324 bp, Glycine max
  Clone ID: jC-gmle01810035d11d1
gttctattatgctttgtattttttaaattttttgctgaagtatacttcttccaaaaggtggtggtccataacataccataagtgtctaatctaacgaaacaaactcaacctgaaaactgtccaaagccagagcagaaaataacaaggcatcatcactacgtgaactacaagtttaaaccttaagaaacaaggttgacattaagagagtacgaaacaaactcaacctgaaatctgcatcaaagccaaagcagaaaataacgatccatcatcactaggggaactgcaaaagataaaccttatgaaacaaggttgtcattaagagat

SEQ ID NO: 8914 - DNA, 531 bp, Glycine max
  Clone ID: jC-gmle01810035d12a2
ctcgagccgaatcggctcgagcctaagcctgagacataccatagactatatggtgtttctgcacaattgccatggagcctaagacacaaccccaagcgaatagtcctccaccaaaaccttgggaacaagcaggttcctcttcgggtccagcgcctttcaaacccccgtcagctggcaacacaagtgatgtagttgaggcttcagggactgcaaaacctggggaaattgtttctagctctgataggagtgcagctgtcaacaggaatactcttgggaggcctgttcccacaaggccatgggagcagaattatggaaacagcacctatggaggatatgggtctacaatgaattataattctgggtatggatctggaatgtatggatcttcttatggtggactaggaggaggaatgtatggatcatcttatggtggggggatgtatggtaacagtatgtacaggggaggatatggtggcatgtatgggtcatccgggatgtacggcggtggaatgtataacagtggcttaaggg

SEQ ID NO: 8915 - DNA, 181 bp, Glycine max
  Clone ID: jC-gmle01810035d12d1
aaaaaatcaaaattatgcattatctatgatattggaattaaactgcaattaaacctaaaacttaacgcagaattcatactataatcataccgatgtttggcagaaccatgcgtaaaggcaaactcgaggaatattcaccctacgattacacgaaaaaaaacgcaattaaatggcccccgaa

SEQ ID NO: 8916 - DNA, 525 bp, Glycine max
  unsure at all n locations
  Clone ID: jC-gmle01810035e01a2
tgaagtcttgcccttctctcttcaactccaaacacaagacatcatcatccatggctgcctccgtctccactgtcggagctgtcaacagagctcttttgaacctgaatgggtctggacctggggtttcagctcccagttcatccttctttgggagcagcttgaagaaggttattggctcaagggtccccaacacaaagatttcctctggaagcttcaagattgttgctgtagaagagaagaaagagattgaagagacccagcagaccgacaaggacagatggaagggtcttgcctatgatatctcagacgaccaacaggacatcacaagaggaaagggtttggttgactcccttttccaagctccacaggatgctggaactcactatgctgtcatgagctcctacgagtaccttagcactggacttcgccagtacttggacaacaacatggatggattttacattgctccagcttttatggacaaacttgntgttcacattaccaagaacttcatgaccctgccca

SEQ ID NO: 8917 - DNA, 283 bp, Glycine max
  Clone ID: jC-gmle01810035e01d1
aaaaacgaaaacccgggttttttgtaaaaactgacctgtttctacttacccactcgatgaagggctttcgagaggaattggggggcgcaaaaagggggggggcccaatttggggggtacagaggctcttcccaggggcgggcagccggacccccgaaaaaccggtgcccacctgggagaaaagacctgggccgctcgggccccaaagaaaacaatgggagggcccggggagggtaaacaaaatccgaaaactccttggctaggagaagaaccggcggggaaaa

SEQ ID NO: 8918 - DNA, 516 bp, Glycine max
  unsure at all n locations
  Clone ID: jC-gmle01810035e02a2
tgaagtcttgcccttctctcttcaactccaaacacaagacatcatcatccatggctgcctccgtctccactgtcggagctgtcaacagagctcttttgaacctgaatgggtctggacctggggtttcagctcccagttcatccttctttgggagcagcttgaagaaggttattggctcaagggtccccaacacaaagatttcctctggaagcttcaagattgttgctgtagaagagaagaaagagattgaagagacccagcagaccgacaaggacagatggaagggtcttgcctatgatatctcagacgaccaacaggacatcacaagaggaaagggtttggttgactcccttttccaagctccacaggatgctggaactcactatgctgtcatgagctcctacgagtaccttagcactggacttcgccagtacttggacaacaacatggatggattttacattgctccagcttttatggacaanacttgtgttcacattaccaagaacttcatga

SEQ ID NO: 8919 - DNA, 380 bp, Glycine max
  Clone ID: jC-gmle01810035e02d1
gaaaccaaaccaaccgggttttgatacaaaagcgggccctttccacttcccccctaacagaaaactcctttctggaaccggtaggggctaaagagggggggggggccctttttcgggtatacacgttgtgtcccaatgcgcggagaaacccccccagaaggacaggcccccggataaccaagataacatctgggccgagcgggcccaaaaaatttacaggtctggcccaggggggggaatacagtaacagccacatcctttttatgtagggggaggggggaaaaaacttgggggggaaaacccaggggggtgccccctggggggcccccacataggttttcaccgccccccaaaaagagacaagggcccgccctgggggg

SEQ ID NO: 8920 - DNA, 522 bp, Glycine max
  Clone ID: jC-gmle01810035e03a2
tctctctctctctctcgctctctgatctgatttgtttcaggagccacccgctcctgcaggtttcttttgcggttggagtggaaggccattctcgcaacgtttgagttcagcagatccagaatttttcataaaacaggtttaagagaatgaagaataccgaacgaattgccaattaggctgtagcaggtttaaccttagcgcctcttgatgtgaaagtagatccgaatttaaatgatattttgactgcttccctcactgtcgatgagggctgttaccgctccgttaaaccaaccccaccaactgagacaatgtccaatgaacatgccatgcgttttacctttgttgggagtgcaatgttattgtcactcttcttactcttcaagattctattccaggacttggtgaacactgcaatgacaggctacatttctgtacttgggattgttgctctttcgggaacaatattaccatttattaaacggtctctgccaaagcattgggatgacgaccttatagtctggc

SEQ ID NO: 8921 - DNA, 532 bp, Glycine max
  Clone ID: jC-gmle01810035e03d1
atggaaacccagactggggcagtcagccagtaaaagcaaaacgccaatttgaaaaataagtaatacatttttttttaatcacaatcagttacagaggtgtgctgctgaaataagttagctttaaaagaaacggttttctcagaaaaaagcagtatttgttctgtgactcggaagtattggtattgggcatgcttcaacttattcaacctttttgctagacttgtcgtcagcactctcttgaggtgaattggcagtctttgactcatcgaactccaacaactgtttgacatcaccattccataagcaatgagcagccaaaaatccaattacagaaggtacaatatacaaaagagcaggctgtgcagcctgaaaccagttcatcacaacaattgtaaggaccaagccaacagtgtatcctacaaatgcactcttgaaatactggggctgttttcctctagatacatcaaatcgcaaagccaatgctacaaaaataccagggataacaatatcaccaagggccaacattgaaaat

SEQ ID NO: 8922 - DNA, 505 bp, Glycine max
  Clone ID: jC-gmle01810035e04a2
ggaacttcactctaaagggatcttcattctgaaccttaaaccttttaatgttcttctcaatggtaatgatcaagcaattttgggagatgttggtattcctagccttttgcttggctcatcattcataagctcggacattgcctaagaggttttggacctcccaattacatggctccagagcaatgggaaccagaggtcagaggtcctatatcttttgaaacagattcttggggattcggctgcaccattgtcgaaatgttgaccggtaatcaaccttggtatggatgttctgttggcagaatataccagtctgttgttgaaaagcatgaaaaacccaatattccaagtggccttccttcttcagttgagaatgtcctcaggggatgctttgagtatgatttgaggaatcgccctttaatggtcgatattctgagtgtctttaaagtgctctgaatgaactgaccaataatcatggagaatggagatatcaaagaaatgggaaagt

SEQ ID NO: 8923 - DNA, 337 bp, Glycine max
  Clone ID: jC-gmle01810035e04d1
aaagtccatgtttaattattatgtaactgttttgagatagaaacaccaaaataaataaactaccgaccattggacgaggtaacactttccttaaaaatcatattagcaactgcaggaacccacattgagctaactggtattggagcactggaagtggaagggttctttgtagtagttgtagttgtagcagaggtggcagcattttgattttgaccatcaagatattgagtttcagtttctattgcagttaccttgttggtcctcctcactttctttccaactgatatgcctagtttgagagcagtgaatagaccaattgcaattagaacaggcctaa

SEQ ID NO: 8924 - DNA, 362 bp, Glycine max
  Clone ID: jC-gmle01810035e05a2
cgcagatgtctcaaagcaaatccagcagatggtgcagttcatccgccaggaagctgaggaaaaggccaacgagatctctgtctccgccgaagaggaattcaatatcgagaagctgcagttggtcgaagccgacaagaagaaggatcaggcaagaatacgaacgcaaagagcgccaagttgaaattcgcaagaagattgagtactcgatgcagcaaatgcttctcggattaaagttcttcaagctcaagatgacgtgatcagttccatgaaagaagctgcatccaaggaactgtggaatgtgagtcataatcatcattggaatctactgagtcatcatcatcaggagaacaaaacctttttga

SEQ ID NO: 8925 - DNA, 440 bp, Glycine max
  Clone ID: jC-gmle01810035e05d1
aaataatccctgttttattttatttttttaaaatcaaagcagcaatgagccggagcaaacacttattgtcaatgagataaaagtcatcacgaaagaaaacttagaacgatgcatcccccatcatacacgacatgggaacaaatggactaccgaaatatggtgttatttaaaagacaataattataagtacacagaagcaatggcaggacagcttttcaggtcaaagacaagctaatgatgcttcgggatataaacatttcaggggtaaccaaaccatacaatcaaaatcttcaaacaacaacttgtccaaagagctgctttcggatctctggaagctttttacggaacactacatcaagtcgtgcatcaagagtattttcgcacacaatctttccatcacgagaagccaacaccaccccaccagagcagtagagatcatg

SEQ ID NO: 8926 - DNA, 240 bp, Glycine max
  Clone ID: jC-gmle01810035e06a2
agataattcatctgatgaaatgaggaagaagactgctgcaagtgagaagtcaccttttcatacagtgcatagtgagatatctcaggaccataagaaatgcattggtggcttttctcctattatcaatcaaaagagttcaaaaggaccaaagggccgcaaggtttctgatttagtcaataccattgatgtgcttcctaattctgagactgatatacaggctacttccactgcttgtaataa

SEQ ID NO: 8927 - DNA, 318 bp, Glycine max
  Clone ID: jC-gmle01810035e06d1
attgcaaatgtgtggcaaaggacaaattgaagtggaacgggaaatgatttccaacgaagaggaacatgactttaccatttgatcatttcaacaaacctttttataaacaagtcaacatggataaattccatatacagcctacaggattaaattaaatcatattggaaacaccttaaaatcaatattaacatctactggactagtctgcctaaaccgagggaaacaagaatttccattcctatggtccctattttaaaattataaataaatttccccatttttgccaagggggtgggcctttcaactgaacaaaaccgg

SEQ ID NO: 8928 - DNA, 480 bp, Glycine max
  unsure at all n locations
  Clone ID: jC-gmle01810035e07a2
cattttgctagcgcaatcatcttgttccccaattaattaggttttttcagagtatcacattttgcatcgattcctctacgcacgccaccgtcaatcatctcagcacaacgttgcgattcggacaatcgcaatacggtctgacctgtaccttagatagtttcaccagtcaagtctttctgtgtggcatatcaaatttcattaggactaaccagactgcaaaacaaggcatacttattgactccatttggctaaaatgacaganatccttagctacaccgcttccagacagttatctcaaatgttccttgccattgccttctttcacggttctgaatattttctagcagttgtcatttcatgggagatcaaatgtaactctaaagtctcttttgattagcaaacattatattggggcaatgatcttttcgttgcttggatacatcattgagattgttttagtacctgagctaaaggaacatt

SEQ ID NO: 8929 - DNA, 533 bp, Glycine max
  Clone ID: jC-gmle01810035e07d1
aattcctggtcggcggccgccctttttttttttttttcattgaaaacttaaagcatcacttaagtcttaatattatttcttccatacttgtatttttgcattaatcatatcaatgcatttagaacatctatatggaatctaatggtgttccgctgttgctcattgtgattacattttatttctctagtttttagcatttttgttccagcaagtgatgaaaggttacaacaagaatgcaaatgttgaagcaagatacatcaccaaaagaggataaccaaacaacaaaatcctagttaaatagtagccaaactaattttacttgtttgagcatgcctgatcagtgcattccagaatcgttgccagtggtaaaatcagtaggcttgctagaagcccatgaataatctgcaacaatctcgtccaaccatgaaacttaacatgatcaccatctaacccaaccctggatttttattttcagatgcttcacacaagcacagttaattgatagatcttcattttacaaatggcacccctga

SEQ ID NO: 8930 - DNA, 633 bp, Glycine max
  unsure at all n locations
  Clone ID: jC-gmle01810035e08a2
atttagttggaggggttcatagatttagggaatcgattactatactagtaataaattgtacaaaaaataaaaatataaataatataaatataaaaagaacaaacacaaattttatgtgattagtcgcggtatttaaaataaaaaaatgaaagtagacaaataaaaaaggaaaggagatgtttgaataaaaataattccccttcaagttcttattttttgagaggacaggacaatatgaatgttttattatgctctatcaacacattaaaaagattatatgatatatctgctgtggaagtaggtcaacatttctattggcaaatagggagtttccaagtacatgcccaagtacttattacttgttgggttgtaattgctctcttattggtttcagccattctaattattcgaaatctgcaaaccattcccgctttcggtcagaatttctttgaatatgttcttgaattcattcgagacgtgagcaaaactcatattggagaagaatatggtacgtgggttcctcttattggaactgtgntactatttattgctgatactaatgggncgggggctctttaaccttggaaatcatacaattacctcacggtgagttagctgcacccacaaatgata

SEQ ID NO: 8931 - DNA, 524 bp, Glycine max
  Clone ID: jC-gmle01810035e08d1
aattcctgggcggcggccgccctttttttttttttttgaatatccaatatatactaatatatgctaatatatgctaatcgaatatctatctatatctatctacctatatctatatagatataggtagatagatatagatgtttactaagtagattatattgagccgcaatatatgtgcggcaagctaaacgaaaaggactattttgtagaaaactggtcaatgatggccttccatggattcacctatataagccgcagctaaagtagcaaaaatgagagcttgaataccgcttgtgaataatccaaggaacatgacaggtataggaactactaaaggtactaaagaaacaagaacaacaactactaattcatcagctaatatatttccgaaaagtcgaaaactaagagataagggttttgtgaaatcttctaagatgttaatcggtaaaaggattggggttggttggatgtatttattaaaataagctaatcctttttttgaaagacccgcatagaaatatgca

SEQ ID NO: 8932 - DNA, 408 bp, Glycine max
  Clone ID: jC-gmle01810035e09a2
ggccacatcccagcacacatatggaagacttcactgtacaatcttaaatgctggaagatggtaatggatccgctggaaatgatgcgatgggggatgtaagtggcacaaagaagctgaaagcgcgttcacatgctgataaggctatacttgggaccggatggaaactacttgctgcaccgtatatagaagatactaaggatatggaccatcattcccttgataatacaacccaactaattcaccattctgctataaccaatgatcattctcaaacgcttgagaactccgctgcttctgagcaggaacaaatggagcccttttaggctgaattacattgctccctatgccgagccactcatcgagcgatggcatactcaacaatacccttgcccgtggaggaaaacatat

SEQ ID NO: 8933 - DNA, 307 bp, Glycine max
  Clone ID: jC-gmle01810035e09d1
gtagcagaagcgaccctaggtgacgtgtaccaacgggtttacacacgagggagcatataagacctatgggtatcagctgggaactgcatcgtatgatgcacgtatccaggagcttggcatctcacgctagcggtaggagcttgatagagctcgagggggctaaagctatactgccttgaatccttgggaggcaaacttgcatggcattgacaatgattaagactccgctataaaggactgtcaacacaacatctaatggcatgaaggggaagcatggtgtgatcatggaccatgaaccttccggggg

SEQ ID NO: 8934 - DNA, 509 bp, Glycine max
  Clone ID: jC-gmle01810035e10a2
gggcacataccaaagatgagaaaaatgatcacactcttgttgttcatggcttggctgatgcttgtagattcgtttgtaatgatgcaaagtttctctcacgtggcataatgaggttggatgctcgtgcacgtcaagatgttgcttttcttgggactgaatttctcaaacttgatgctcgggcaagagaggatactgagaaaattgaccgtgatgtcaaggaaaaagctagccgacttattcatattgctactatattgaaggataaagctcattccagattaaaaaatgctgctgatgagcattggagtgatggggccttagaggctgatttacgtattgctgacttacgtgctaagcaacgtgcgatggaagatccccttatggccttggagcttatcaaaaacatccacaacaggatggtgagcaagatgtataactttccacttcgcagagataaaggatccctttcagaaaataatgtaagaggtcgaataatgcttgagaagaat

SEQ ID NO: 8935 - DNA, 403 bp, Glycine max
  unsure at all n locations
  Clone ID: jC-gmle01810035e10d1
gtagcagaagcaatatgagttctttcgtacaaacgagtataatcacaaatgtgcatctaagatctatgaatatgagcaaagaactgcattttatgatgcacataaacagcatattggcatcttacactagcagtagtttctttctagggattgcgtgggttaatcctatactagttagtatacttgggaggcaactatgctgtacagtgcaatgtttaaaatatttctcatttggtatcttcattatcagattctatgcttcctttttcttccatggtgttttcatccatcatgaacctccagctatcgccttcctctatttcccattgttttttcagttcataaatagctttggatgctgcngcagcaatggctgggttgctatcttctgccagtctctgta

SEQ ID NO: 8936 - DNA, 415 bp, Glycine max
  Clone ID: jC-gmle01810035e11a2
ctctgagcaaggtcgagaggggcgagagcgagttggatcggttgtcaaggcacaggatctccctcggtgtggctgctgggcttgaatacctttacatgaatcacaacccacgaatcattcatagagatctcaagcctgcttatatcctccttgaccatgacatggaggcatgaattgctgattttggactctccaaggctatgcccgattacaagactcacataacaacctccaatgtggctggcactgtgggctatattgctcctgagtatcatcagatactcaagctcactgataagtgtgatatttacagttatggagtgattctcggcgtattgggcattgggaagcttgcttctgaagatttctttcagcacactgaatagatcagttcggtcaagcggatgaagaagac

SEQ ID NO: 8937 - DNA, 323 bp, Glycine max
  Clone ID: jC-gmle01810035e11d1
gaaacaacgtaaaactattttattttcagggtgtatccataaacatgtaaagtggaaactagttgtgacagactagattatacatagatcatcgcagtgctgaatttttctttttccaaagaaattcagcaatccgtgataaaggaaacaagattacatcggttcattatttaccctatgaaccaacattgatcctctagttatcaactatattcttaaacaagcacactttggcacaaatatggtacacaatatttcacatacttaaacatacagcagattcagtgtttgatctgtgacagcatgcacctaacatccttact

SEQ ID NO: 8938 - DNA, 540 bp, Glycine max
  Clone ID: jC-gmle01810035e12a2
ggtttgtattagaggacctaacgtgaccaaagggtataaaaacaaccctgatgcgaatgattctgcgtttcaattcgggtggttccacactggtgatatcgggttttttgattcggatgggtatttgcaccttgttggtcgcatcaaggagcttattaaccgtggaggggagaaaatatcaccaatagaggttgatgctgtccttctatctcatccagacattgctcaggcagttgcattcggagtaccagatgacaaatatggcgaacaggtatgtgtttttaattagtgggaaatacatctcttataaaacgggtttagttcttaatagtctagtaaaaactaaaaagtagatttatgataaattgaggttatgatatattttaaactaaatcaagttgatacacttaattgtttattttaaaaaaatcattttagaggaatcgtgtgcatggtccttgactccttgttacctttattacttttgattttccgcctcacccttggtttatttatctcttctttaatcactttgggttc

SEQ ID NO: 8939 - DNA, 368 bp, Glycine max
  Clone ID: jC-gmle01810035e12d1
aaaaatataaacctaatccttaaatgtttatggaacatcagacttgcccataggctaattcaatgttaaaatttatggttggtctacttcaagaataatattcatttgggctatttattggcacgctatttatttcggctccagatagtattcagctgctcaagtttgagaaacaaagtgctctgctacctgacgccttagaatcttgccagctgcggtcttgggcaaagattccgtgacgaagaccttcttagggactttgaaagctgcaaggttcttcttgctaaaattatgctcctctgcctcatcaatgtttgatccttcattcggggtgattgcacaatgtatcggatccaatgttacatgcg

SEQ ID NO: 8940 - DNA, 455 bp, Glycine max
  Clone ID: jC-gmle01810035f01a2
aaattagttcattctctttgcgcagttccctacctctcctttcaagatgcagatcttcgtcaagaccctcaccggaaagaccatcacccttgaggtggaaagctctgacaccatcgacaacgtcaaggccaagatccaggacaaggaaggaattcccccggatcagcaacgtctcatcttcgccggaaagcagctcgaggacggccgtaccctcgccgactacaacatccagaaggagtcaacccttcaccttgtccttcgtctacggggtggcatgcagatcttcgtcaagactctcactggcaaaaccataaccctagaggtcgaaagctctgacaccattgacaacgtcaaggccaagatccaagacaaggagggaatccccccagaccagcaacgtctcatcttcgtcggaaagcaacttgaggacgggcgcactctcgccgactacaaca

SEQ ID NO: 8941 - DNA, 270 bp, Glycine max
  Clone ID: jC-gmle01810035f01d1
ggaaaacaaacagtagtaacattaatgggacaattgagttcaacccaaaccaaacttattttcaaaggtcattacagacccatttcacattacatttttttttaaaatgtttgggaaaatccaacatcgaacattacacagaaatcagctccagtttaaaaccccccacaaaaacccaacaccaagggcagagttgactccttttggaggttgaagacagcgagggcccttccatcctttacctgttggccagaaaaaaaaacccttttt

SEQ ID NO: 8942 - DNA, 509 bp, Glycine max
  Clone ID: jC-gmle01810035f02a2
aagaaatataactaatattctttagaataatcaaaaagaatattaaattcaaataaattttagatagaaaaaagacttaaaaaggaggatttgaaatgcgagatctaaaaacatatctttccgtggcaccagtagtaagtactctatggttcggggctttggcgggtctcttgatagagatcaatcgtttttttccagatgcattgatattcccttttttttcattctagttattgacacggaaaggggtgaagaagattatagatccaattaagtattaaatatatgtaattaatatgtaattaatctcctcttctttatttcgacttttatttcttcttttttttacaattgtaatagaataagttaggaaagagaaagaataagggttaatttggcctaattgaaattcggagtgaaactcgggatctcgtccaggcttccatggaattgaattaataattcaattccatttctattaataaaagagtgaaagcagaaatttaaat

SEQ ID NO: 8943 - DNA, 545 bp, Glycine max
  Clone ID: jC-gmle01810035f02d1
acaacataaaaacccaaattgaattgtcgtaattttcaaacaaaacatcaatcaatatttcattcaaatctcaattcaaaattggatttagaattcttaatttctatattttttttttcttaaagtagtagttctagcggttgactcgcttttttcaaattgtttttcattattaagaaaaggtaacaaagataaaatacgagcttgttttatagcaattgttattaatcgttgttgttttaaggtcaatctatttacgcgtctggataatatttttccttgttcactaataaatcgactaattaaacccatgtttttataatcaattcggtcccccgattggatcgggggcaaacgcctacgaaaagatcgcttggatttcataaagagtcgcttagatttttccatggtttatttatccctattccaaaaatcacatttattacaagaaatactataaaggatttgtttttttattctgacttttttaatatatggtggtatttttttaatatatgttggtatatactgatatttgatatatt

SEQ ID NO: 8944 - DNA, 548 bp, Glycine max
  Clone ID: jC-gmle01810035f03a2
gaggaaaagaggagaggcggggcggagcagagacgaatggcagatcagagcgagcattcgaaaacggcgttgcctccggaggaccaggaccgtcccgttcgggtatacgcggatggcatctacgatctcttccactttggccacgcccgctcccttgagcaagccaagaaatcaaggagtttcttcaaggttccattcacagacacttactttgggattttaggtttccgaatacatacttgcttgttgggtgttgcaacgatcaagtcacccacaaatacaaaggcaaaactgttatgacagaggccgaacgatacgaatccctgcgccactgcaaatgggtggatgaagttattcctgatgccccctgggttatcaatcaagagtttcttgacaagcacaacattgactatgtggctcatgactctcttccttatgctgatgccagtggtgctgccaatgatgtttatgaatttgttaaatctggtgggaggtttaaggaaacaaaacggacctgagggatatccacgtcagatgtataatgagga

SEQ ID NO: 8945 - DNA, 184 bp, Glycine max
  Clone ID: jC-gmle01810035f03d1
gttacttggaatttgtgtttttttttttctctgttaaaaatttggtttttccctgctcgatcttactgctttcctcaaaaagactaggtcttcttccaaccggacaaaagcaggcgcccaaccaacaaaatgacggaggccaaccaccaacacccagggggcacgaccgaacccccaaaatcga

SEQ ID NO: 8946 - DNA, 269 bp, Glycine max
  Clone ID: jC-gmle01810035f04a2
cgttttggctgctgcttatgcccacgagctcccccgatatggaattacacttggattaaccaactacgctgctgcctacgccaccggacttttgttggctagacgagttctcaccaagctcaacctcgctgacaagtacaagggtatctgtcaacgtaactggagaggattacaacgttgaggagatcgatgatgctccccgacctttcctcgctttattggatgttggacttcgacgaacaccacccggatgcagagtcttcgctgcc

SEQ ID NO: 8947 - DNA, 401 bp, Glycine max
  Clone ID: jC-gmle01810035f04d1
cttgcacattgacaacctttattttttctttattatatcaccttggcttactcttgagcggaagccttgttagctctgggtactctgaccttgacagcgttctttcgttgcttgttgttaagtcgttgagccttcttggaagagtgcttggggggctttcgctcagccttcttgatggagggatcagctcggatagcagcatgagccttcttgtagagagcctcgagtccttcagccttaactccagccttgacgtatcgggagaagaccttggagaacttctcgttgtcttgctcagccaaaagcttcatgtaatcagcaacgtgtcctccgaagatgtactttctaaggacatcggcgttgagcttgttagcctcatcgtcgtatccaacgtatcttcg

SEQ ID NO: 8948 - DNA, 439 bp, Glycine max
  Clone ID: jC-gmle01810035f05a2
agataattcatctgatgaaatgaggaagaagactgctgcaagtgagaagtcaccttttcatacagtgcatagtgagatatctcaggaccataagaaatgcattggtggcttttctcctattatcaatcaaaagagttcaaaaggaccaaagggccgcaaggtttctgatttactcaataccattgatgtgcttgctaattctgagactgaaatacaggctacttccactgctggtaataaacctgaaaatctggaggataataacatcaaggagggctctattgtagaggctttcaaagatggagaaggattcacagcagcatggtacacagccagcatattaaacttgaaggatggtaaagcttatgtatgctatgttgtgcttctagatgacgaatgtgcaggacctttgaaggaatggatttcccttgaaggtgga

SEQ ID NO: 8949 - DNA, 357 bp, Glycine max
  Clone ID: jC-gmle01810035f05d1
attgcaaatgtgtggcaaaggacaaattgaagtggaacgggaaatgatttccaacgaagaggaacatgactttaccatttgatcatatcaacaaacctttttataaacaagtcaacatggataaattccatatacagcctacaggattaaattaaatcatattggaaacaacataaaatcaatattaacatctactggactagtctgcctaaaccgaaggaaacaagaatttccattcctatggtccctattataaaattataaataaatttccccatttatgccaagggtgttggtctttcaactgaacagaaccggcacactggaattcctcgttcaaccttgggtttaccccct

SEQ ID NO: 8950 - DNA, 518 bp, Glycine max
  Clone ID: jC-gmle01810035f06a2
cagaagaagctccagaacattggagaaaactacatccgattttcgcgaagcaacgcaacgacggcgatgggagcgtccacttcggcggagccgagagtgtcggcggagcagaaagaggcggaggccgtcacagccttcacccggagctctccccctgcttcagaaagccttctccaagctcgctaatcccgagaccaacgccgttcccttagaaaatctccagcaatgcttcagtttcggtcgcgaaggtcgaagttattccggaagcaacgtgccagattcgtttccggtgttgttagatcacttagcctcatccctagttgatcaatttttcgtgcctgacaaagagggaataatttgggttgaattcgtgagggggtacaacaagtgctgtgctatggtgtccgcgtaggtttctttgaatatgctcatgagaggtgttcgctgctatttcacaaagtgcgaacgtgcctttgatttggagtttgaatcaggggatgatgattgcaaggtaaacg

SEQ ID NO: 8951 - DNA, 478 bp, Glycine max
  unsure at all n locations
  Clone ID: jC-gmle01810035f06d1
acacaaaccccgtatagtgcattaagcgatatatttgttaatatatacattttttgtagtatgtacggctacttaaggatcacgagcctgaaaagtaatgacaaaacataatataaagcatgaaatatattccacgcttatgcctgttaagtattgcactaagcaatgcaacactagagatgatccaactcagcggtcttcctttcgtacagcatttggatcagacatcatgtccatcatcattttctcaggtgaatcctcccaactcgcaaatgtcttcaagtcaacttttcttctttgctcagtgaaaagctcttctctcttctcgtaagagttctgcacttnctttgctactttcccaccaagtccccaaacttcaacttcagaaatcagaccctcgacaggaaggaaaccctgatctggaaagagagatccactcccgtaagttttgtcaatagcatgatggcgaacagtcact

SEQ ID NO: 8952 - DNA, 429 bp, Glycine max
  Clone ID: jC-gmle01810035f07a2
ggtgggagaaaccgggtcacagcccactattcgggtatgacttttggtaccaaccacgtcacaataccatgattagcacatcatggggtgctcctagtgcttttacaaaaggtgttaacttacagcatctctctgatggattatacgggaggcatctccatgtatatagctggcctgggggcgaactgagacaaacaatggaccttggtgattcagggcttatacccttagagataaggtttttgcatgatcctgctaaagatacaggttttgtcggcagtgcattgacaagtaacatgatacgattttttaagacccatgatgaatcgtggagccatgaggttgccatatcagcgaaaccatagaaagtgcagaactggattcttgctgaaatgcctgagcttataactgactctgtgatttctcttg

SEQ ID NO: 8953 - DNA, 535 bp, Glycine max
  Clone ID: jC-gmle01810035f07d1
aattcctggtcggcggccgtccttttttttttttttttttttttctaagatgagcttaatatatttatgcaattgcaaactgtcttcaaaaagttgaagattcacaagagcattatttatagcatagtagctcattacaaccatatgacagatccgtttattaaagggaaataatgacacgtatgtttaaatccatatatctgaagtacagtcaccaccaggatatctcatctcatgggcaagagaaggaccatcaggctcagttccaaagtccacaaagaagttggggttgattttcagtccacctttctcagtatcaacatcaatctgtattatgtgggagcctttctggacaagctctggataaaattgtttgtcccaagtactaaatagtgagttggtagcatagagccgcttcccatctaaactcaattgaatcatctgagggccccctgtaacttgtttccctgaatctctggaacttcagctggccatgtttcaccatcatcagttatagctactacagggctttctt

SEQ ID NO: 8954 - DNA, 433 bp, Glycine max
  Clone ID: jC-gmle01810035f08a2
aaggaaaaatgggtttcattgctttcgacttcaaatgcacttattataatacatggtagtcatgagtttcattaatgctgcattcttgcatgatgtgcgaataaaggcacaggccatccacaagcaaaacattgcccctcacacgttggctggtgggggttctgaatcttgagaaaaaaaaaagttgatggatgagaagagaatgaaaaaactggaagaagctgctcaatctggaagcattgacaccgtcattgatcctgcatcttccatcagacgacacgtgaagtgaaagctaacccgcaccaagaaaactggtcacatgacatctgaggcaacatgggtaattactaccatgtttgctgcgcttgaggagcactcctcatacggttccttgcgcacccatggacgtcatgaagtactggctgctgccgtt

SEQ ID NO: 8955 - DNA, 379 bp, Glycine max
  Clone ID: jC-gmle01810035f08d1
gtcctttttttttttttttttgacttacagaattcacaactgtataacagagatgttgagacattgaccatcgtgtgctatttcagatagatcttcatactttatgtacaagggaaaatcttcattaaacaggccaaacaaggtagcatcccacataacctataatagcttcagaaaaagctatggaatggtcaatgtcattagataggggatcatcgacctcatgatccggcctatctggaggttttgcaggtcccacatctccctattctgataaacgcttgacaagatgagtcagccaagcaaggaatgtattaagagcctgtcccatgaccttaacctctttagtgggtacaggaatgagagcatctgcatcttt

SEQ ID NO: 8956 - DNA, 517 bp, Glycine max
  Clone ID: jC-gmle01810035f09a2
catcaattgagaaagatgcaacaaaagaatttcacattgaaaagggtcgtggtacaccttggaaagatataccaaatgtggcatttaagttatctagaaggaagactgaagatacattcaaattgctacatacaattctgtttgggaaggagagggaaggcagttgagatcaagagtaatatatcaaggttttctggttttgtgtggcgtgaaaatgaggaaaagcaaatgattaaagtaaaagaaaaacttgacaagtgtaataaagagaagttactggagttctgtgatgtgcttgacttaacaattgccaggccaacaacgaggaaggaagatattattgctgcgctgatagactttttagctgcccctcatgcaaccacaactgtgttacttgcagaaaaagacatgtccagtgagggcaaaaagcgcagacatgttgtaaaacatggttcatcaagatctgcaacaacttcaagacgttctgcgaagagttagaataaaaatgaagattctt

SEQ ID NO: 8957 - DNA, 197 bp, Glycine max
  Clone ID: jC-gmle01810035f09d1
aaccccaaggggcaaaattttatttaaccggaccaattgggcaaacggggggcaacttggccaagccttttcatgaacgggcttaaaccccactatttgtgtcaccggggttgtaaacaaaaaacggcccaaggggggccccccaaaaggttaaatggacaaaaaccaaggttttttaaaaggggggggggctaaaa

SEQ ID NO: 8958 - DNA, 647 bp, Glycine max
  Clone ID: jC-gmle01810035f10a2
ggcaccttcagctccggttaaaaaggctgaaaccttttggactatctgtaataggtgcaggacacattatgaatatctcagggtttatttgaatcacacccttttatgtccaaactgtaatgaagcttttgtcgctgtagagaggggtccaccaccaaatgtttttaagccaccaaattggtcttctcatcaacggcatcagaattctcaacaccatgctggaagtaataatacaaattttcagtggggttctcactctagaatggctggttttggtagcacagatggatcaacatctgttgcagctcaagctgcaagtgttgtgcagcaggcaagtgagaaagtaaggagggagggttcttttcacaaacctatgaaaaaaaggaagacagatgatattcgcattaatggttatcaaggatacatggcaaatcatatggctacaagagatggagcggctggtttgggcaccttctctgaaccaggaaaggttaacttggaaacagaaaggaattatggttttttaggtcttcctggcaagcattacagcacaagagaattgtcaatgtttgaaatacgaaacatgttgattgataagtcgcgcatttgaattcgtaagaaacttcaagaatggaaatcaatggctg

SEQ ID NO: 8959 - DNA, 421 bp, Glycine max
  Clone ID: jC-gmle01810035f10d1
gaaagtaatcttaatctgtgagttacaattaaaaaataacgcagctttagacaaataatagcagccttgcattgggtatgacactacaattagcaaatgaatcggatgtaattataactcatgagtttataacacaaggcagaatatgcacgcccataaactggaagagtaaagcaccaggcatggacgacatgaaatgccagaactataagtctattcatcttgcttgcagaacgatgaatgataactgccacgggtctaagaataacatatctgaaaattatacaacaaaaaccgaaaagctgtggatcccttcgatccatttataacaccaaaagggcactatagaatatctctgccaggctaagagaatgaaagagtcgtgaaagagtggattttcattatcttcattatgatttct

SEQ ID NO: 8960 - DNA, 588 bp, Glycine max
  unsure at all n locations
  Clone ID: jC-gmle01810035f11a2
aatatacacaacaaaaggctcggtttcgcacagcacacttccctctccaatggaaaatcaattcccagttatcagtgattcctactgtgttccttatcttatcaatctacgaatcaatacagaaaaaggtatcacttacgacgcanacagtgtccgtcacttttatatcaaagataaattattcacacttcacaagcgacgtgtcctgtgtgataatcaaggaaaccccatcgtcactctatacaagaagagaatgacattgcatgggcgatgccaagtttttaggggttataaaagcaaagatttctctcaattgctcttttcagtgaagagatcagcaatgataccgagtgggatgattaacttagaggtcttcctcgctaacaaccaaagagaaagtgcctgtgactttagagtcaacgtttgtagagataaaagatcatgcactgtttatgccggtgaatctcctagaattgttgccacgatggataataatgacggctttcatgttntggtctatccccatgcggactacgcattcatagtggcactacttatgattgttagcgagatgaaacattattttga

SEQ ID NO: 8961 - DNA, 380 bp, Glycine max
  Clone ID: jC-gmle01810035f11d1
gcggtcctaatgtcaaaatatattaactcatcacaatgcaacaattacaatcacaattatgatcgcatcagtcatatttttcatattttcctacaattacttggaatataaaagttttctgactcactacaatgtaactagaaaccaccaccgggatcgcaatttaaaactatgcttgtatgatacaagacctacccacaaagaagatagatgatttgattagggaatttgcatgacagagtgttcgtgctcaagagagtgtatccaggaacctctttgatggtcctggcttattgaaaatgcaaatggtatttggcattatccattcaacccagactttgttaacgctttttggttctctcaaattcatgcaatgaggt

SEQ ID NO: 8962 - DNA, 299 bp, Glycine max
  Clone ID: jC-gmle01810035f12a2
gttcaactcacatcatttgttgtatttgaactacaatcgatacctatacaaatttactatgaaggaggtgcaaatgaacagagaagacatcttcataagaaaggaataccaaagactagctttcaccacatgaacaaactggactgaattaactgtcctgtgaagctagatctgccctcttgccttttgtatccttcgactggggatcaaccgatctttttgaatccaggaactggtgatttatatagacccggcttatcttctaggacacagggacagatggtgtatactaggttgct

SEQ ID NO: 8963 - DNA, 352 bp, Glycine max
  Clone ID: jC-gmle01810035f12d1
atacaacaaaaaataccattcattgctgcccgttatgccctgtaatttcacataaccgaaaataaaatttcagagaaaaaaataacttgcgaaaacatttttctgttcatattttattcgtaatattgctaggagaatttacattatcaaatacaacaaatgatgtgagttgaactacaatcgatacctatacaatatttactattaaggaggtgcaaatgaacagagaagacatcttcagaagaaaggaataccaaagactagcttccaccacatgaacaaactgcactgaatttacttccctgacaagctagagttgccctgttgccttaggtatcccttgactggacag

SEQ ID NO: 8964 - DNA, 502 bp, Glycine max
  Clone ID: jC-gmle01810035g01a2
ggagatacttctcaatttataccatccagggatgctgacattgctatcctggaagaaccagaacatttgaattggtatcatcatggaaagcgttggacggacaaattcaaccatgttgttggtattgtccacacaaattatttagaatatatcaagagggagaaaaatggggcactccaggcattcctggtgaaacacataaacaactgggttacaagagcatactgccacaaggttcttcgtctctcagctgctactcaggatttaccaaagtctgtaatttgcaatgttcatggtgtgaatcccaaattcttgaaaattggagaaaagattgctgcagagagggagctggggcaaaaagcctttacaaaaggggcatatttcctgggaaagtttggtgtgggcaaagggatataaggagttgattgatttattagcaaagcataaggctgaccttgatggtttaagttggatgtatttggaaatggagaggatgctaatg

SEQ ID NO: 8965 - DNA, 500 bp, Glycine max
  Clone ID: jC-gmle01810035g01d1
atcattactgaacaatttatttcatgttaaaccgatgcaaattcattacagcttattctcacaaggttacttgggagaacgtcctgttactttacattagcacgtgttttggtaatattgaactacctcacttacaaaaacaaaaagaactacaaaatttaaggattgaaaacttagcaggcacctaacacaagcaactgtaaaacaaactacaaattcaaccactaaatctattcaccagccatccgtaaatttttctacctacatgcatttaaatgatggcttttacagtactgcttgtcataatctggtgtgacaagttttccttcaaacatccaaactagtcaacccattcaccagccatagataggattttctaccagtggaggcaagagatgaaggtctttacagtgctgcttatcatagtcacgtgtcccaggtattgctcctgtacataatctcagaaattcattcccagtaagacaatagtgagcaaatgc

SEQ ID NO: 8966 - DNA, 470 bp, Glycine max
  Clone ID: jC-gmle01810035g02a2
gcgagtttatggtcacaacttcattatgtttcgtgtgataatctggaaatgcaagaagcttatcttgtcaatctcgtaaatgtgttacgagaattgtatttgcacagaccagaggaagctcgtcaattgagaaggaaagctctctctcgtattgaatggctgcaaaaagctgatgtgcctaccatagcacagattgaagagttccattcgatgcagaggatgatgaatgctcctgattcaaatgataatattgatctactgatgagcattgatttgttgggtttacaaggagcaggtaaagcttttccaaacaagaatgtttttgatgataagcttgtgttggctaacacacaagaattctttgatggaaattttccagtggattcctggataccaatttttgtgaattgcttttatcctgtaagtcagattaccttcagaagctgacgatggaaatgctacatgtggta

SEQ ID NO: 8967 - DNA, 552 bp, Glycine max
  unsure at all n locations
  Clone ID: jC-gmle01810035g02d1
aaacacactcattgcacatagtaatgcgctttatttaagtgaataaaatattacatactagttcacaaatgcaaaaggacactcatcaaccagatatttgagactcttacagttctcaagaagtcgcgtcagcatagggttagtggcgttagaactcagaatttcattcttaacgccaaaaagaacagccagtaaagctactggaaaaggatcaactctagtaagaaaaacaattttcttacctctcccaagtgctgtgcgaatccttttgttgatatctgaggagcgattgttaactgcagaactaatccaagcagtggtgggtaaaccaccacgtccactaccacatgtaacatttacaacgacagcttctgaaggtaattgacttacaggataaagacaattcacaaaaattggtaaccaagaatccactggaaaatttccatcaaagaattcttgtgtgttagccaacacaagcttatcatcaaaaacaatcttgtttggaaaagctttacctgcttcttgtaaacccaacanatcaatgctcaacag

SEQ ID NO: 8968 - DNA, 368 bp, Glycine max
  Clone ID: jC-gmle01810035g03a2
gtttggaatttctgaagcgtaccgtattttattgtgatatcatttgtgtcactggatggactgccactccaatgcatgatgttcaggttacaattgattggtttattttctctcacgaatgtgttcccaggacttattgtgtttaaatccacaaaatccttttgagttgaataggtggatggggaaactgactttcccccagggcactttccgaagagttaagagaatgcctctttctatagggggaggagctggtgcaaagaatgctattctcatgaatatgccaaatgctgctctttcaatgtggagatattttgttggagatctcgtctttgaagtttctaagatgacttctccctacattaaat

SEQ ID NO: 8969 - DNA, 505 bp, Glycine max
  Clone ID: jC-gmle01810035g03d1
aaaataacacacacttcacacatcattacgacaattaaaagaggtgtggaaattttcaaatagacagagcatactcaacaagagggtcatgtctaatttcctttattgaattaaacaaacgaacaaacgaaagaaaacacaaattccagatcatgcagaggattccgcattttcagaagatctggcagtagcctgtggaacagaaaaagctggcataagagtattaccagcaatttcaaaatcttgagaaattcccaagagaatatcaaaaactgtagactgtttgggattgtcaataaggaaactcaagtgccatgaagtttgatttgcccactcagaactccacatttcaaaaccattattaggaccacatacctctattgggaagatcaattcccaggaatgtggttccgattttgtccacttacatgcatcgaaatgctctgtactgttgctgtttgttaaaaacacttgtaccaatgaggcccaatcactccttttgact

SEQ ID NO: 8970 - DNA, 605 bp, Glycine max
  unsure at all n locations
  Clone ID: jC-gmle01810035g04a2
gtttggaatttctgaagcgtaccggatttcattgtgatatcatttgtgtcactggatggactgccactccaatgcaggatgttcaggttacaattgattggtttatttcctctcaggaatgtgttcccaggacttattgtgttttaaatccacaaaatccttttgtgttgaataggtggatggggaaactgactttcccccagggcacttcccgaagtgttaagagaatgcctctttctatagggggaggagctggtgcaaagaatgctattctcatgaatatgccaaatgctgttctttcaatgtggagatattttgttggagatctcgtctttgaagtttctaagatgacttctccctacattaaatgtacagtctctttcttcatagcatttggaaatttggctgatgacaccatcaattttgaggcttttccccacaagctggtgcagtttggagagattcaggaaaaagttgtattgaaattttcacaagaggaatntcttacagcttggtcaactcaggtgcgtnctgcaacaactctgttggctgatgggtgttcatatttgtatgctatggtgcatgatagttcagtgtctacaata

SEQ ID NO: 8971 - DNA, 404 bp, Glycine max
  Clone ID: jC-gmle01810035g04d1
aaaataacacacacttcacacatcattacgacaattaaaagaggtgtggaaattttcaaatagacagagcatactcaacaagagggtcatgtctaatttcctttattgaattaaacaaacgaacaaacgaaagaaaacacaaattccagatcatgcagaggattccgcattttcagaagatctggcagtagcctgtggaacagaaaaagctggcataagagtattaccagcaatttcaaaatcttgagaaattcccaagagaatatcaaaaactgtagactgtttgggattgtcaataaggaaactcaagtgccatgaagtttgatttgcccactcagaactccacatttcaaaaccattattaggaccacatacctctattgggaagatcaattcccaggaat

SEQ ID NO: 8972 - DNA, 578 bp, Glycine max
  unsure at all n locations
  Clone ID: jC-gmle01810035g05a2
tggtaatggcagcgtcactacaagcagcagctactttcatgcaacccaccaagttgagcaggagcaacactttgcagcaaaagtctactcagtccatttccaaggcttttggtttggaacctgttggagctaaaaaggtcacatgctcccttcaggctgatcttaaggacttggctcacaagtgtgttgatgctaccaaaattgcaggattcgcccttgccacctctgccctcgttgtctctggggcaagtgctgaaggtgttccaaagaggctaaccttcgacgaaatccagagcaagacctacttggaagtgaaggggacaggaacagcaaaccagtgcccaacaattgatggtggattggactcatttgccttcaagccggggaaatacaatgccaagaagttgtgccttgagccaacttcattcacagtgaaggccgagggtgtggccaagaatgctccccttgagttccaaaacacanagctcatgacacgtttgacctacactctggatgagattgagggaccctttgaggtgtcttctgatggcactgtcaagtttgaggagaaggatggc

SEQ ID NO: 8973 - DNA, 463 bp, Glycine max
  Clone ID: jC-gmle01810035g05d1
aaaaaattgagctcgaaaactcacacacaccatcaatttaaaccttgaattttaaacattgtaattggaggtcgatataatatacaaccatgacagtactctcagtagtgctaggaaagttgggtcaagggataatgcagcaacaccatgcatgaagttactaacaaaatctgagccaacaaacaaaacagaaaacaaaacactctatgactcaagctgagcataccagatgccctggatcttgacatcctttggagcctttgctcccaaatcagtgtcagatggttgaacactctcgaacacaccgataacctcacccgtctcaggcttggtcttggtgacactcaaggtgattttgcccttggatgatgaggcacttttattggtttccttggcaagttctatctcatctactcttccaccagcaggcaaagcaactgcattgtcataacctgtggaagca

SEQ ID NO: 8974 - DNA, 520 bp, Glycine max
  Clone ID: jC-gmle01810035g06a2
acacctccaccaaagcataacaatgctcaattcctctttcctctccctttctgaacacaccttttcccacacaccccatcatttcccaacaaggtctgcttctcaaaaccccaaccttcatccaaagtttcaatctttagcctttggaaaccgtggagggagtgaatttccatctgggtcttgctccaatacccccagaagaaaaggggtgttggttgtgcggtcaaagtcaacgctgggagtagaagaagtggtggtaaagggaggaggagtgaagggtaaggctgaagagtttgatgcaattgtgatagggtctgggattggagggctggttgcagggacacagctggcagcgaagggtgcccgagttctggttttggagaagtatgtgatttctggcggaagctctgggttctaccagagagatggctatacttttgatgcggggtcttatgacatgtttggtttcactgataaggacaatctcaatttgataactcaagcgtttgaagcaaatggt

SEQ ID NO: 8975 - DNA, 442 bp, Glycine max
  Clone ID: jC-gmle01810035g06d1
aaatattaccatcaattacttaaatcacctgtaagacatgatatccttcagcaaggggaaagaaaacacctataagacatgatattatcaaaattattgcattaaatttatacacttcaaactttggccccttcaattattttttccaagctctgccactgcatggatcaaattggaactaaccacatctatatactgtgacaatttggtgactcttgaaaattgtggaagaaatctgcagtgaaccaatgctgtaatgaaagttgagcttcttatgcaaaagggatgatgatactgcatccaacatatgctcctatatatctcatgccattgtgcttaaccaaccaagcaaccgaagcagcatggaatccaacacaagtgactttttcttcagcccattatctgcagctactcgatgagcacacataactcctgagaaagc

SEQ ID NO: 8976 - DNA, 599 bp, Glycine max
  Clone ID: jC-gmle01810035g07a2
ggctcgagggcaaacaaagatggttcactccaacatgcctccaaagtcccccaaactctctctcccggataataacattccaatcccccttcgccagaacgacatcaccgcagcgtcgtctccaatctgcgctgcctacgacaactacctccgcctccctgagctcagagccctctgggcctccaacgacttccctaattgggccaacgagcccatcttaaagcccaccttacacgccctcgaaatcaccttccgcttactcgcaaccgttttatccgacccgaggccgtacataaacaagcgcgagtggacccggcgggtggagtctctcgccacggcccaaattcagatcatagctatgctgtgtgaagatgaagaagaaaaccccgagacacgtggcacgacgccaccggtgagtgacattaacggcttcatcgctcaaagcagaagctacagcgaggagagcctgctcccgcgcctcgccacgtggcacaaatccaaggacgtggcgcggagaaatctcgattcgtagagtaccagatgatgaggtgcacgtacaccttaggtttaggagagggcgatctcgcgggtaagaagat

SEQ ID NO: 8977 - DNA, 463 bp, Glycine max
  Clone ID: jC-gmle01810035g07d1
catgatccaaaagaatagtcaaataaatattattttacagacaaagatttgtttacaccaacctattacaaaaatttagtccttttttttttctctttgttttcccgtttgtgtgagtaagtatatatgactaggaattaattgattaattttttaattaactagcagggaaccccattttgattattattttcccaataataagcgagaaaggtcttggcagcatctaagctagggaaataagtgggttcaaggaatatctgagtgaacccattatcggcctcggagctccccatcataaccgccacaacctgcttataggcgtagaagaacctcttcatcgccacctcaatcgcctgcatcccctgcaaaacatgaaccttctcgaacccgttccttttctgtttctgcgagtaaaccttcatcgccgtctacatcattccgggcccacccgtggggtcca

SEQ ID NO: 8978 - DNA, 571 bp, Glycine max
  Clone ID: jC-gmle01810035g08a2
ggagattggagagggatttctagaaacttcgtgaaaactcgcacgcctactcaggtcgctagtcacgctcagaagtactttctccgccgccacaaccagaatcgccgccgccggagatctagcctcttcgacatcaccaccgatacggtgatggaatcttctactataatggaagaagaacaagttccgccagagacggtggcggcgcctctccccgccgcatatccgccgtcgcattacggggcttttgccggcgcgggttttccgatagctccggtggtgttgccggtgagtggcgagagactaaccaagccgatcaggccgacgccgattttgccagtgcctccgtcttcgaagatggctaatttgaacttgaaagagaaagcttctccgacaaatctcattgagcctttgccgttgtcgttgaatctgccatcgccgacgccgcggtctcaggatcagtcgtcggcgagtagtgggcactcgtcaccgtcgtcgtcgtcatcggcggcagcttttcaggctatgtctgcagcgaagttcggcagcggcggggatagtatcatcagcg

SEQ ID NO: 8979 - DNA, 536 bp, Glycine max
  Clone ID: jC-gmle01810035g08d1
ttcgtcaaccaagagtttttttgttgtattcttttcattccaacgtaatagtggtcctagattgtgttgcattcgaatacttcttggttcaacccaagtccaagaacacagaaactaaatctaaaaaaaaatggtaagcataatatattcctttgtctaatctaatctaaggaatattttaatgaccccagtggcattacacagaccagtcgcatctcaagagtacccggtgccctatcatttcacgctcacactcccccatacatacagaaacaagaatccctcaacagctacagaatatgacaacccatctttctaattctaaattctactaaacctgtacactgaaaccagcaattaaattgcctaattacctacataacctaaacccatagtatatatttatttttccaaatcataattaattaccattatactcattaattcaaatatcccctccctcctacctatattatgattatctttcgtaatagtcaataaatccccaacacatcatctcaatttttccccctctt

SEQ ID NO: 8980 - DNA, 427 bp, Glycine max
  Clone ID: jC-gmle01810035g09a2
gatttggacatgcatgcatgcgccggtgggcctcccctcacatacctctgctcacttatggtcggcgagtgggacgataccatgcggagaggactatcgcactgtgatgtatccgcctgtgtaaccggggtgacaccggcagaatgtggatacggagaccatctatatgagtgctgttcactaacgacaagacgaactgactgacgcaggagcgcggagcgtcacccctaatgagaaaacaagatcgtctctaccaaagtcgggcaagaatgaagctcatttcggacatgagactgcgaggctggacgactccagtggtttccatgcgctccaggggaagaatgcaattcttccaagtgagaggactgctatggcaggactattgagtttggccgtgtatggatgaatccacacagaacatggtgct

SEQ ID NO: 8981 - DNA, 254 bp, Glycine max
  Clone ID: jC-gmle01810035g09d1
gaaatggttaaccatgctgattaatctttaaagcattcataaaacagtcgcagtttatcatatgcaatgtgtgcagcaagaataccacagctagaggccaacattaatgaaagcactctggatagcaacagctggcagaaacattctactgcacaaactgtaaatggagatagcaccggaagcttaaaaccacagatcttacagggcacaggattactacgtcaatgctacataaaacgtgctcccacaaaccc

SEQ ID NO: 8982 - DNA, 247 bp, Glycine max
  Clone ID: jC-gmle01810035g10a2
gaggcagttcattggtacgctcaagaaggacttggttgttgcatcatagagcgcttctggattggcttcacgaaaatggaaatggtacatggcgtttcatcttgcggtcctgtcagagcccggcgaaggcgcacaggactggagaggcttgcagggtagtttgttcaaatgataccaaacgaacgttctgcctgttgaaaaataaaaataaaaaacaccatgctagaaataaaaaaacaaattttag

SEQ ID NO: 8983 - DNA, 197 bp, Glycine max
  Clone ID: jC-gmle01810035g10d1
aaacaggcaaaacgttcgtttggtatcatttgaacaaactaccctgcaagcctttccagtcctgggccccttggccgggttttgacaggaccgcatgatgaaaccccatgccccatttccattttcgggaagactttccaaaagcgctctatgatgcaacaaccaagtccttcttgagcgaaccaatgaactgtctc

SEQ ID NO: 8984 - DNA, 439 bp, Glycine max
  Clone ID: jC-gmle01810035g11a2
acgaaatagatttgcgatttttgtctcttaaattcatgtttgaatggtggtgtgactttgctatttggttctatttttatgaagcctgactgcaattttgcttctgaaaaattaatcaggaaatatgttattgttactttttatacgcatatctatatcttctttttttttttaatcatggtggaataagcttcaaggatctcttcctggtggtggaagttcaaatttttcttcaaatatgcatgggattacatgctataaagtgtaggcctgtaggattcttatatctatggtagattaccatggtgagatgggttagtttataggcttcattttggtctacatacaattgaggtggaaagaaatggcttctgctttggttcattatgtatgaacccagaattgtcagcattgaagagaagaaaactcaagaagaatt

SEQ ID NO: 8985 - DNA, 531 bp, Glycine max
  unsure at all n locations
  Clone ID: jC-gmle01810035g11d1
acgtgctcactagtcggcggccgccctttttttttttttttaaataataatttgtcatttcacacatacaaggtatatatacatatatgtagttatgatctaatagctacattcaatgattttattacctttgtccgcatttatatatacttaattcactactccaatattacaaatcaagttatacaacacatattcctacatataccgtaccataagggataaatttcataattgaccacccatgtctttggaagaatgtgatgcaaggccttttttcacctgcttcattttccatgataccatcccaaaaggccttgtccattgtctgcttttattttcccctcagtgtccttggagtcaaaattcatgggggtagccacatggaaaacaccagtgcaacctttaatggcttcatcaaagcttncctctgagcangatcagcctttcacagagacaatttggtcttggaatctggcggcttcaccaaatgcttcaccttcttcatgttagctttgagaatgctatgat

SEQ ID NO: 8986 - DNA, 569 bp, Glycine max
  Clone ID: jC-gmle01810035g12a2
gattctcttcagtctataggggtaaacatgttgatgacagtggatttgatgaggacatactgtttgattcacacaattctgaaacttttggtgatgaaacttttggtggtgtgtttggttcggtcgttaagaggcctggtgaaataagtggtggaaaaggaaatgatggagctcgaacattggcaaattcttcctccatggatcacacacaatcatgtcaatcaaatacctgtgtggatttaagccgctctggttcttatgatcatgcgaagcagttagcatcggaactccctgccaaaagctactccacatcagatggggaaagcaggattcaggagaacttgaatagtaatcaacatggagacaatgctattaccaaggaagaaaatccaattcaagctgaggaggatgttcaactgtcaagatctgaggattcacaaggaccactctactcgaagaagatggctctgataaaggggtattatctcctaatgccagttcttatgccccttcatctcatacttcatctaaaactcatgagaagatgggatcacatggagatttgatcg

SEQ ID NO: 8987 - DNA, 292 bp, Glycine max
  Clone ID: jC-gmle01810035g12d1
aaaaagtaaatttttcatggcattaaagagttaaaaagagagggatggaaaaggtcaatctgagttaatctatcgcacggccaaagcctgagaaaccccaaaagatgtatgggttaacacaaggtcataaaattatatcccagaattagcgaacctggcagtaatatataatataagcctttagagatttttccatcagctgcagatatcctcgtttaaaacttttcaggacaaccacttagtttattcttttcaagcaaggatttgacttgccaacaagaatacgaatagc

SEQ ID NO: 8988 - DNA, 484 bp, Glycine max
  Clone ID: jC-gmle01810035h01a2
agatgttgctcatgacatggaagatgctatagatgaattcagccttggccttgttgatcaacatggacaaggcaacaattcttcgtttcatatgaactttttcacccggcataagattgcttcaaatatacaaggtatcaaatccagattggacattatatcccagaaacgtccagacataccttggataggctcaggctcaagtcaacgattgtcatcaaggcttgatagccaaggtgatgcacttctgctagaagaagctgatcttgttggtattgacaaacccaaaaagcagcttagtgacttgcttttcaatgaagaagcaggtagggctgagattcccgtttatgggatggggggttggcggaaaaaccaccttggctaaacaagtctatgatgatccaaaagagaagaagcgtttcaggattcatgctaggatcagatgttcatagacttttaaactagatgagcttctgaaagacct

SEQ ID NO: 8989 - DNA, 353 bp, Glycine max
  Clone ID: jC-gmle01810035h01d1
ggcttccaaaggggggttcaaatcccccaaggcccttttttttggggaaaatttccaactgggcgtccaacatttaggggccccgcttcaaaagctcacccttttttttttcagaccccccgggattcattttcaaaaaacaaattttggcccccgctttatttgggggaaacccgaaaaaatttgcggtccaaactcagggaaccggaaaaaacaaaaaacgggattcacttggactcccccattgggggggtgggaaaaaaaaaaaaaaaaaagtttaacccttccgagcggacaaattttcagactttggatggcaggacccccccgggaaacaccctttttttctccca

SEQ ID NO: 8990 - DNA, 453 bp, Glycine max
  Clone ID: jC-gmle01810035h02a2
ctccaattcttcctccatttcacgccaacatgctccaagaagaaacttttccgttttcgccatgtccggcgatgatgcaaagcggagtgttccattgaaggattaccgcaacatcggcctcatggctcacatacatgctggaaagactactacaacggaacgcattttgtactatactggaaggaactacaaaattggagaggtgcatgagggaacagcaactatggactggatggaacaagaacaagagagggggattaccattacttctgctgcaaccactacattctggaacaagcaccggatcaacattattgatactcctggtcacgttgacttcaccttaaaagtggagcgtgctcttagggtgttggatggagctatatgcttgtttgacagtggtgctggtgtggagccacaatcagagactgtggggaggcaggctgataaata

SEQ ID NO: 8991 - DNA, 487 bp, Glycine max
  Clone ID: jC-gmle01810035h02d1
cttcatccggttcaattccttccaggtagttctccatagcctggtcatcgaactcaactatggtttctatcatctgggctcggtattcctgagcctgctcttgaagatcttctggaacatctacaatatcaaacttggcacccagctcttctccagaccaaactatagccttattcctaacaaggtctataactcccttaaagttatcctctgaaccaattggtaactgaattacaagtggtttagcacccaaattcgttactatcatgtctcttgttcgataaaagtttgctccaagacggtccattttattgacaaaacaaattcgcgggacaccgtatttatcagcctgcctccacacagtttctgattgtggctccacaccagcaacactgtcaaacaagcatatagctccatcccacaccctaagagcacgctccacttctaagggtgagtcaacgtgaccaggagtatcaataatgttgat

SEQ ID NO: 8992 - DNA, 241 bp, Glycine max
  Clone ID: jC-gmle01810035h03a2
ctcctactaagatcatcttgccacacatgctacagtaacccaaggatccaacattaatttgtctaaattgtgtttgtggtttatatagtcttggacactatttttaatgatgattattacttgtaccttttctacttaatgaacttctagccaataattacgaatcttggacttcaacgtgcaccatcatgttcgaaactcttggaactttgataaaaagaaaattttgattactcacccc

SEQ ID NO: 8993 - DNA, 242 bp, Glycine max
  Clone ID: jC-gmle01810035h03d1
ggggtgagtaatcaaaattttctttttatcaaagttccaagagtttcgaacatgatggtgcacgttgaagtccaagattcgtaattgattggctagaagttcattaagtagaaaaggtacaagtaataatcatcattaaaaatagtgtccaagactatataaaccacaaacacaatttagacaaattaatgttggatccttgggttactgtagcatgtgtggcaagatgatcttagtaggag

SEQ ID NO: 8994 - DNA, 600 bp, Glycine max
  Clone ID: jC-gmle01810035h04a2
aagacgtcgatgaggatggctaagacagcatttcctgggcttggttcgccgattactagtgttgatgttacttatgatggcaagtgggtgcttggcactacggatacctacttggtgctcatttgtaccttgtttacggataaagatgggaggacgaagaccggatttagtggtagaatggggaacaggatacctgctccgaggctcttgaagttgactcctcttgattcgcatttggctggcgcgaacaataagtttcacggtggccatttctcgtgggtcactgagaatggtaaacaagaacgccaccttgttgcaactgtgggcaagtttagtgtgatatgggattttcagcaggtgaagaacagtgctcatgaatgttacaggaatcaagaagggctgaagagctgttactgttacaagataatattgaaggatgagtccattgtagaatcgcgatttatgcacgacaaatttgctgttagtgactctccagaagctccgttggtggtggcaactcctatgaaagtcagctcaatcagcatgtctggaaagcgacatggttaaacctctgttacattttttttttaaggttcaaat

SEQ ID NO: 8995 - DNA, 333 bp, Glycine max
  Clone ID: jC-gmle01810035h04d1
ccagtaaaatttctgcaataaattaaaggtaaagtccaattatagaacatcaccaggacagaaaaaatgtagcctgttctctttaacataaccacaacagcagataagcaactgatggaggactcattgatgttagcaaacaaacaaatgagctagcacttgagaagctgcttggtaatctggacatccaccatgagcaccttgaaagcttaacactgcctcttgtccaaagcttcactgctttattaccattattgcttttctgattctttcacttattacggaaggaaacgatgcagaaaattaccaaggacagtgctaaacatcgtttct

SEQ ID NO: 8996 - DNA, 558 bp, Glycine max
  Clone ID: jC-gmle01810035h05a2
cgaaaacagaaaatcttgagaactattctaaactcagaagaattacgggaaggggccattgaacagctggaaaaagcccaagcccgcttaaggaaagtcgaaacggaagcagatcgttttcgggtgaatggctattctgagatcgaacgagaaaaattgaatttaattaattcaatttatacgactttggaacaattagaaaattacaaaaacgaagccattcattttgaacaacaaagagtgattaatcaagtccgacaacgggttttacaacaagccttacagggagctctaggaactctaaagagttgcttgaacaacgagttacatttacgtactgtcagtgctaatattggcatgtttgggacgatgaaagaaaaaataactgattagtctttctattataaaatagagtataggcattatttttttcttctaaaaaaataaaattaagaaattttcatggtaaccattcgtgcagatgaaattagtaaaattatccgtgaacgcattgagcaatataatacggaagtaaaaattgtaaatacgggtaccgta

SEQ ID NO: 8997 - DNA, 460 bp, Glycine max
  Clone ID: jC-gmle01810035h05d1
gctagagaacaatatcttaatattctaaacagcattataatggaaatttcagtgtcattatgaaaataggcagttcaaaaacgcgtactaatggaaggacaacctgaaattgcccagtacatccacacttcataacgaagaacatgaatgcccaaaatctcagtgacaccgagattagcattcaacaccttctccctttgaaaacattacacaagggaagttcaatcactaattagaagtatggtactggtaattttgttccccgtcacctttgggtgcggcttctttaatttcatctgcaccatcatcctgcatgtcagaggtccacagggtagggttatcacgaagaaattgcatgatcaaagtgctatccttggatgattcctcttccaacgtatccaattcagcaatagcctcatcaaaagcctgttttgcaaggctgctgcacgatcaggagagt

SEQ ID NO: 8998 - DNA, 518 bp, Glycine max
  Clone ID: jC-gmle01810035h06a2
agaatttctctctctgaaatatcttgtggggtttatctgttttttgttcaccttcatagttgagaagatacataaagttgattttttttaatataatagtaatataaagctgtgtttgttgggtgttttggaggatctgctttgctttgctgtgttcagtggattgtgttaaaggggttttgagaattcttgttgaagttgaaaaagctgagagtttttggttgaagttctgctcccatggctgctcaattgcaaaaatctgcagatgaaatgaggaagaaggttcacggtgattcttcaacgggtgaacttaataattccaattcgtgtgcatctgggatgtggtttgtttgttcaggttccttccaagggtgcaagttccccttctgattcaagatcatgtgtatcatctataggggatgcttctggcagtgttaaggaagttgatgtggatcatgagtacttgtccacagatcagggggttccttatcctgctggtgctattatgggtactacta

SEQ ID NO: 8999 - DNA, 498 bp, Glycine max
  Clone ID: jC-gmle01810035h06d1
tcctttttttttttttttggaaccaaactgagcttattatgtgcaaacaaaaattatttttttaaaaagagtaaatgacacatgcttttcatagcaccctgtaacagctatatcaccgggtccatccactttccaaagactttcttcctttgtagttttgtacaattaggaatgcagtcacccacttgcccagataaaaattattatttttttcttctttatctccctttctaaagcatcatcatcagcaagaattttttggtttagaacttcaagtttgaattcattagcttttttttcttactttgtggcccacatgacttaccgcggaccagcatgctgacatggtgggtccccaggaatagcatcagccctacatgttactcagtcattcactttcttaaccaccttaggatcctccatgttcttcacggatgataggtctaatgacccaagtctggttaattcctctatttgctgtacattgatatggggcat

SEQ ID NO: 9000 - DNA, 603 bp, Glycine max
  Clone ID: jC-gmle01810035h07a2
ctcaagggcatgtcaatcccttgatgaccctctcagaaaagttggttgagcatggttgcaaagtcatttttgtgaacacggacttcgaccacaagcgagtggtaggttccatgggcgagcaacaagatagccttgacgaatcacttctaaagttggtttctatccccgatggtttaggacctgttgatgaccgaaacgatgcgggcaagttatgtgatgctatgcaaaacaccatgccaactatgcttgagaagctcatagaggatgttcatttgaatggtgacaacagaatcagcttaattgttgcagatttctgcatgggatgggctttggatgttgggagtaaactgggaatcaaaggagccctgttgtgggcttcaccagcagctttatttggccttctatacaacatccccaagcttatcgatgatgggatcatagattctgatggtggtaagaatatcatatattttcctatatattcgaacttgcttgattttatttgggctctatgggcacaaattttgttatgaataaaatatgtttgtgattgtaacaattattttggatttatttattataatcaattgaaaaagattatac

SEQ ID NO: 9001 - DNA, 490 bp, Glycine max
  Clone ID: jC-gmle01810035h07d1
tgtttttttttttttgttattaatctttttcaaattgattaataataaataaatacaaaaataattgttaacaatcacaaacatattttattcataacaaaatttgtgcccatagagcccaaataaaatcaagcaagttcgaatatataggaaaatatatgatattcttaccaccatcagaatctatgatcccatcatcgataagcttggggatgttgtatagaaggccaaataaagctgctggtgaagcccacaacagggctcctttgattcccagtttactcccaacatccaaagcccatcccatgcagaaatctgcaacaattaagctgattctgttgtcaccattcaaatgaacatcctctatgagcttctcaagcatagttggcatggtgttttgcatagcatcacataacttgcccgcatcgtttcggtcatcaacaggtcctaaaccatcggggatagaaaccaactttagaagtgattcgtc

SEQ ID NO: 9002 - DNA, 584 bp, Glycine max
  Clone ID: jC-gmle01810035h08a2
tgcgtcctttacgagtcaataagaagtacacttctccctacaacgactccagatgctgaacctgtacccacccgccacacacagtgcctggaacggccagccggtctcatacccacccggtacagactcgatcgtgaatgagatctttgaggccaccaagggcacgggcaccaaggagaaggagttgaacaaggcgctgggcggcaagacggccacgcagcgtggcttcattgccaagcgctaccaggagctgcacaaccaaagcctacgcgatctgatggacaacgagacgtcgggccactacgagttcctactcaagctgctggcatcgcccttgcccgaagcagaggctggtatcctacgtaaggccaccaaaggtttgggcacaaaagaggatctcatctaccccgtggtcgtaggccgcactaacgcagagatcaacatcctcaagaagatgtactacgaagcgtacggtgaggatctgggctccgtactggacagcgacctacacggcgacttccaaacggtgattctggcgtcgctgcaggctgcgctagtgccgtacgatgccaacattcacaacg

SEQ ID NO: 9003 - DNA, 405 bp, Glycine max
  Clone ID: jC-gmle01810035h08d1
gacgtccttttttttttttttttttttttttttttttttttttttttttttttttttttagagcatgtataagaatttaccattttaccatcaagcagcagacgattatgagtaaggcaaacaatgcaactggcgactcattctcatcatcagtagcagcagggacaccctacgcgtatgacgggtcattaacagctgcagccaattagtcacgggcgtgaaacactgacagcagcagctcgccatagtcgccggtcacctcctcggcaatgcgctcgcgcaaatccttgccatacttcttcttggacacgggcttgatgtcgcgcagcacgatgtggtagcgcactacagccgagctcaaagcgttctcattcgggccaaaacccttcatgggctttttgaaca

SEQ ID NO: 9004 - DNA, 612 bp, Glycine max
  unsure at all n locations
  Clone ID: jC-gmle01810035h09a2
aggttttctggttttgtgtggcgtgacaatgaggaaaagcaaatgattaaagtaaaagaaaaacttgacaagtgtaataaagagaagttactggaattctgtgatgtgcttgacataacaattaacaaggcaacaacgaggaaggaagatattattgctaagcttatagactttttagttgcccctcatgcaaccacaactgtgttacttgcagaaaaagagaagcccagtaagggaacaaagcgcaagcgtgttgtaaaacggggttcatcaagatctgggacaacttcaagacgttctgtgaaggtaatatctctcctttaactgccagaatgtgaaatataatttgtgtatttcaaagttaagtcatgtagaatatcagtcttgcattgttttgactatgctagtttatctcacttttgcttgtttatgctctctgcattgcaagctatcacaaaattgttcttgtcctagtgaatgactagttgttcttatcccatgtcagtaacggtgcatttgattcactaaataatagcggagaggacagcactaanaacactcattacaagttctgttattaacatggaaatatgantatatggctaactaatt

SEQ ID NO: 9005 - DNA, 470 bp, Glycine max
  unsure at all n locations
  Clone ID: jC-gmle01810035h09d1
gtcttcctctgactcatctgtgtcagatgcactctttctccgcgctactgtagaatcttcgtttttcttctgcctctgaaaaatacatgccgaaaagttgagcaaaccaaataactaatgagaagctcccaataaaaacaaactaaaattgcaatatcacttgtgtagttgcattggtactatatttttggatagtatgggattagactaacatgatcaacaaacaattaagtactacagtagtagtactaccaagaactcatcccaatacaactattgttttgggggccataatgtgaacctaaaaccaatgttgtcaaaattgcaattctactaataggatcgtatgatcccacaagattctagcttcttccatgtttgttaatttataccaaggatccttaatcctggaatttgagntatatcaccaggattgcttgtgggacccatcaaatggaaacttattcaat

SEQ ID NO: 9006 - DNA, 502 bp, Glycine max
  Clone ID: jC-gmle01810035h10a2
atagcattgggttcttctctagtctctgttctaccacaaaaatggtcccaaaaccaatcttagtcacaacaccaccgccggcaacttctgcaccctctccactgctcaacgcagtttcacccctcaaaacagaagaaaaaccccaaacacaaaccctaaaaacccccaccaccaccactcaaaaagctataaccaaaccaagcccatcatcatccaccaccaaaacgacgccgcagcagcgcgtggagctaaagagaaaaacaaactcatgggtccccgcactaatgctaaacgcatttgacgacatcatcaacaacttcatagaccctccactcaaaccctccatagaccctcgccacgtgttgtcacaaaacttcgcccccgtccacgagcttcctccgacggagtgtgaagtcattgaaggctctctcccaccgtccctcgacggcgcctacatacgaaacggccccaaccaacagttcctgccgcgtgggccctacca

SEQ ID NO: 9007 - DNA, 231 bp, Glycine max
  Clone ID: jC-gmle01810035h10d1
attgtaaatgacttattaacccccattaattaaatctgagaaccatgtatggggcaaaaaaccacctttaggacacatgtgaaaaggcaaaaaggggtggaaaaaaagccctaaaggggaaccatttgggggcacagtcaggggaaaaaaattgcccaaaagaaaaccccgggggaaaacggccaagaaaccaccgggggaacccgcccaagacgtttaaaaaaggcccaa

SEQ ID NO: 9008 - DNA, 442 bp, Glycine max
  unsure at all n locations
  Clone ID: jC-gmle01810035h11a2
ctcacgcaggtcgcgttcttcactctaaccggcgccgttacggtgctcaagtcctgccggcacctcctcccctacgccgatgaaatcaacgttgtgaaacgctgcgtcgaggccgtcagcgccaaggcctgcagcgaggccaacttccccagccgctcgccaccgaactggtggacggaggagctcgccgtcctcgacatcgatttcttcggcaacgtcatcgtcgccatgaagcagcgaggcgcgaagcctctcaccgtcgccgctgcgatcatcacctacactgagcgcgctctacgtgatctcgtccgcgaccacaccggcaacggaatccggtacacagatcccggcgattccgattccagatccaaacaacggaagcttctggaagcaatcgtggatctatntccctcggagaaagccgcgtttccgatccactttc

SEQ ID NO: 9009 - DNA, 335 bp, Glycine max
  Clone ID: jC-gmle01810035h11d1
gactgcaaaagttttttccttaataacatatacacagtgtattaaacaattaattcacacactatgatgagaagatcgcaagaatcagagcacccaatatcatgaatattggcatgatccatgatccctaagaaacgtaccgtgaaaactatatgaattctgtgcatacacatcacaaattgcatattctgaaaaaggaaaccatgatgaacctcgcataatatatgctcataatttaattcaattctaacttgggctaagacatagagaaccttctccttttgggcttgggcaaatgcacgctagcatcttccaaatgggtcgtatccttggac

SEQ ID NO: 9010 - DNA, 596 bp, Glycine max
  unsure at all n locations
  Clone ID: jC-gmle01810035h12a2
acttgtagtgcttggtagtcataantgcctcgagtacactaaccagtagtactgatagtgtggcgtttctgtcacacagggccatgtgtcctaagacacaacaccctagcgaatagtccttcaccaaagccttgggaacaagcaagtttctcttcgggtccagcgcctttcacacccctgtcagctggcaacacaagtgatgtagtttattgcttcagggactgcaaaacctggggaaattgtttctagctctgatgggagtgcagctgtcaacatgaatactcttgggaggcctgttaccacaaggccgtgggagcagaattatggaaacagcacctatggaggatatgggtctacaacgaattataattctgggtatggatctggaatgtatggatcttcttatggtggactaggaagaggaatgtatggatcatcttatggcggggggatgtatggtaacagcatgtacaggggaggatatggtggcatgtatgggtcatacgggatgtacggaggtggaatgtttaacagtggcttatggggtccaatgggtgtttatggcatggggggtggggcttattgagaacaagacc

SEQ ID NO: 9011 - DNA, 457 bp, Glycine max
  Clone ID: jC-gmle01810035h12d1
tcctagtcggcggccgcccttttttttttttttttttaattaagaactcacgttgagtattggtatcataataaaaaagggggatggatatcagagtaatcctcaacatcatcatacatcatgtatggaaagctaggctaagagtaacaatagcttttggaatgatatgacatgatacatataagttttgcttcgagtcttttcaagtatttataatccttctacagaatgattatgtgaagtgtcctctacaatgaaaatctcacattgattgaagcacagtaaaactgtatgcgtgtgtgtgtacatttttcccttcctgcttatcatcgctttatcaatctaaaatttatgcataccttgaattaaacatgctggggactctcaagcatgagtatcgttagcctgtacccacgaggcataaattccctgatctttcactaaatacatataatct

SEQ ID NO: 9012 - DNA, 403 bp, Glycine max
  Clone ID: jC-gmle01810036a01d1
ggtactagtcggcggccgcccttttttttttttttttttttttttttttttttttttttttttttttaaagaacaattataatatatgcaatgcaagttcggtattccaccaagtggacgaattatttaacgaggaaaaaaagatttaccgaagctatttattacagcttaagtgaatgccaacatactactactttaaggggaggcagtccctaacagattggtaatggttttcataaaccctttatgctttagatatacttatgaagtttggctaataccccgggatgacaatttgacaagaaacaaaatttattcacattatttttgggatgtaaaacctttgaacaaaagcacaccaacaggaccaaaggcctgagtcagaaccagggggatggcaacg

SEQ ID NO: 9013 - DNA, 475 bp, Glycine max
  unsure at all n locations
  Clone ID: jC-gmle01810036a02d1
gacaagaaaagaaaaacattacatttgatttgaattagaaacgaaatggatatatataaccagtacaattcaaggtaacacagcttaacaggaagaacaatgtaaacttcactatctcatttatctgccgtaaatattcaacagtgcagatcatctctaattattccctcagaaagaaacaacttcaaccataggcaacagcaaatcattgacttggcttaacttagtgaacttcagaaaaatctttcaaaacaaacgcaggctaataatggtttttggtccattataaaccaaactagcttgcttgatagtgaactcagaaatcaagtaaaatagcagggggaaaaatcctgaaacggngccgttttggaagaaaaatagataacctcgacaggattttcttctactattgaattcagccccaagagagagagcttcttcaactctcttgaagctctgtagtaaaataatgaat

SEQ ID NO: 9014 - DNA, 543 bp, Glycine max
  Clone ID: jC-gmle01810036a03d1
gtgagtatgtgaataagttcccgggtcgactagctcagtggccgcccttttttttttttttttttgttgtataacatatacggtgttataattggttaactaattagtagtaatagggttctttaaagaaaattacatatatgatacaacatatggcaaaaacaatgatgaaaagatcaatagtgatggcagaaactgcctgatcactaagcttcatattccttccaccaaggcggtcaaccatgtctggaacaggttcccagttcttgagttgttgctcgcgaggatcctctaatttcattttcatcttctctgcgtggcggcttgcaacctcttgagcaagggtccagtcatagaatttccgactctcttcattgctaagaacgttgtaaacctctcttaatttcatgaacttttctgaggcagtttggaaagggagggaagttgtgtcgggatgatactcctttgacagtttccgataagcaactttaatttcttctaaatccgcatctggtgatacgcctaagaattcgtaatgagaac

SEQ ID NO: 9015 - DNA, 502 bp, Glycine max
  Clone ID: jC-gmle01810036a04d1
ctgcctctacctgaaattctataattgtaatatggtatcaaagtgatatcatcctcaatatataacctatcttgtgatattttgctgctaagttcactaaaatttggaactactttgttatcgtctaaccattcgagtcaccaccattaaggatggataattgagctccacacgcctaaccattaagtgaagacaacctgactcaaaagcctcagaacatcatccctattctggctgctattgcctctaatcatattaccttgccttctttcagggataatcttgccacctatgttcactttgacatggctgtgtggctcctgtaggatgcagaaatctggcatgttctctccatcagctaggtttctgagatcttagggattgctaaggagagaaaaaatgtagggaaggaaaaatacttggatattatttcaaaaataacacagatacatatataggcagggctgcctaattacatagtgaatgtagaatggaaaataaa

SEQ ID NO: 9016 - DNA, 513 bp, Glycine max
  Clone ID: jC-gmle01810036a05d1
tttctgttttttttttggacttttaacaccgaagttacattcaaatttactccatcagtcagtaccaacacactataaactatgccttgcgatgcatgagagcaaacagaactcaacaggacatctgaatgcactaggttccctgacacctggtgggatctaacaaggatacacatctaaagatgtactcagttcaacacagaatggaaccttgagtccacatagctgtcaacatcccagagaaaagaaccaaatgtgacatgctctaaaacaagcttctttaaaccaccaaagctaattgtgatagattcatccttagagactgtccgctcaagggttacaacaatttgaggtcttccaaacaatgcttctgagtgcttctcgatgatgctgacaggctctatggatctaagtgctgcatatgttagtagtgtatcaccgtcaaaggacatcacgcagatacgcaacctgtgtgactttacaccatagccgaatccaccgggacggacatca

SEQ ID NO: 9017 - DNA, 335 bp, Glycine max
  Clone ID: jC-gmle01810036a06d1
tttcgtcctttttttttttttttgataaatgggctccaaatatttatagagaaacaacttcagttcatatactggccaaaatggggtcatcattccattaactttgcgggaaaaacaaatgctcaacagggttatacactacaagcatgatgatacaacgtgtacaaagctctattaaactcgaggaggggacaatagatggagagcaatctaagttggtccggactctaggcaaactttccttgataatcatgttgatactgatattgagcctcatcttactactaatggtcatctgattccaagcagtacctaacgtttgcatctgaatctaa

SEQ ID NO: 9018 - DNA, 488 bp, Glycine max
  Clone ID: jC-gmle01810036a07d1
atgacatatgtttcccgggtcgacgggctgactagctcgctgccgcaccctgcgcccgcagcctcaacggtaagaatctaacatctactatcacatacataaaccacccacattagtggtgaacaacatcactgaaatgatcttcatgcataagagcattgcactattaaaaaggcaagccatataatggctacccaaactaaacacactcactacgaaacgaaatagagtgaaatctacgtttctccatataacacacaagaagaaaacacaatgcttattcagactcaccacacacacacaccaaagaaaaaaacaccaggggcgagtgcctaccttcaactccttgcatgtcactagtttacaaccctaaaacacacgctttggcgtatatcggttactgacttatggagggaaatttcacacccatctgacacggacaacagtatcccgacggcaacttttacacatacaaatgaacctgctat

SEQ ID NO: 9019 - DNA, 341 bp, Glycine max
  Clone ID: jC-gmle01810036a08d1
ccgctgatgtaactgatcgacgagctgactagcctactagccgccctgtcgtccttttttttttgtttttttgcctagattcattgtgtttaggagaatacaccagccccatcttacaatattgggcgctacgggcattattgcatcaactacagaatgggacaggaatataaggcactcaaatgcttacaggactcatataggattccgactgaaggccagattgagcatgggatatctcaagattgatatgaggacctatctcaaaacagcacgtgaagctttggaactggtccatattatttaacatgaccgactctctagaatccggatccatgcat

SEQ ID NO: 9020 - DNA, 366 bp, Glycine max
  Clone ID: jC-gmle01810036a10a2
gcgtcgctccgcaccagtttcaccgcacgaatatcttgttgttaggagcgatccgagaaaaactctgtaaacatgttggtttaccaggacctccttacaggtgatgagcttctctctgactccttccgttacaaggaaattgagaatggaatgctgtgggaaagttgaggggaagtgggttgttaaaggagcagttgatgtaaacattggtgcaaacccttctgctgagggtggaggagaagatgagggagttgatgatgcagctgttaaggttgttgacattgaagacacattcagactttaagagcaacccgcattcgataagaaacagtttgttaccttcatgaagaggtttatcaagaattt

SEQ ID NO: 9021 - DNA, 501 bp, Glycine max
  Clone ID: jC-gmle01810036a10d1
atgttgtgggaattattaccggctcactagctgcgtggcgggcggccgccctttttttttttttttaattaaattaccaagtcgtattcaaatacttatcaataaaaccatgaagccaaattaaaatatttttagtacacacccaaaaattcttcataagaaacttccgggaatctagcacgaccaaaatcatgcattgatgaaattctaacccatcgataattaaatttgatgggaattatgatgtagcagtagcacacgtctcaccattaaaatcaaaataccaggtcaaagtttcaagtaacttaggacagaacgtaaaaaaaagctagataaaatgagtagatagctcggcacattaagtcacttagcacttgacctgctttaaggcatatgcaaagtacaggaatgttggatcagcagcgccgtccttgtagtaggcaaagaccaagcaagcatcatcacccatgctctcaccaacaaaaaattggaaatctttaa

SEQ ID NO: 9022 - DNA, 396 bp, Glycine max
  Clone ID: jC-gmle01810036a11a2
ctcttctggatgcagactccactcgctgatgttgctggcggagccctttatctggcggtttcaactcaattctctgctgctagaggcaacagcaaagagagtatatggaagaagctgggaacattgggttaccttggggcttttactttgactgtgggtatcgggctgttattttcagcgctgtcgaaccctcgccgaattcccatcctgcccatcatcttcagcatcatcggtatggtgactttcattctcaacgaaatttacttggctaccgaccccatcatcccagtcacgctgctcaagtctcgaggtatggcgattacatgcttgagcacaggcggcttcatgatggggcggtggagtgttcttttgttacacctaacctacactcttgcg

SEQ ID NO: 9023 - DNA, 516 bp, Glycine max
  Clone ID: jC-gmle01810036a11d1
ctctcctgttgctatttttctgctaagttaacactctgaactgcattgtgttttgtggatatattgcaacataaaaaataaaataaaaaacacttccttcatggggtatcttcattgattaattacccttgctagctagttaattatcaattcttttaggccacgaaatcccgcaacaactgcgcagcaaatctttttctgttttgaataatgtcaatgctctcataactggtgcctgagtgagaattaaaaggtggagtagtgttgatggcaccacaaaactcattattcgcattattggttgttgatctcattcccaagtgcatgttctgtgagaggaatccatgttgatgagtcgttcctgagagggaaaggttattattattctcaatgctgtgtggaagtccaagagtgagagaaacaccatttccatgaaacctaggagccagcgattgctgatcaccgacatgatgatgatgatgatggaaccttccaatgtcttccatattgggaaat

SEQ ID NO: 9024 - DNA, 456 bp, Glycine max
  Clone ID: jC-gmle01810036a12a2
ctcttctggatgcagactccactcgctgttgttgctggcggagccctttatctggcaattccaactcaattctctgctgctagaggcaacagcaaagagagtatatggaagaagctgggaacataggattaccttgggggttttactttgactggcggaatcgtgctggctttttcagcgctgacgaaccctagccgcattcccatcctgcccatcatcttcagcatcatcgctatggcgactttcattctcaacgaaatttacttgggtaccgaccccatcatcccagtcacgctgctcaagtctcgaggtatggcgtttacatgcttgagcacaggcggcttcatgatggcccgctggagtgttcttttcttcacacctacctacactcttgcgggacgtggctgggctcccgctgctgctggtagcattctgatcgccacgaacggcggcttt

SEQ ID NO: 9025 - DNA, 422 bp, Glycine max
  Clone ID: jC-gmle01810036a12d1
ccatgcaaaaactgcgattacttcctgaatttacattaaatgcatctaaacttaaatggggattcgtacattgaataatcaatctgtgcatgacaatagaaggaccattttacacgctttcaccaacataaaaactcccccctaaagacatttaagccttacaacttaattaaacaagcttcccaatgtttctccaaggcttgcaatcatagagttgtgccaacccttctcacttgggagtgaaagcagcacatatagtcccatgaccaggatctgcagggtgagcaaagaggttgccattaggaccactgcctgtgtaaatgtgctggaaccatgcccccatcacagcctacatgggcaacctcccattcttgatcggctttagtttcaactccttgatcttaccaagagaaccactttcc

SEQ ID NO: 9026 - DNA, 462 bp, Glycine max
  Clone ID: jC-gmle01810036b01d1
tccttttttttggtcgtcctttgttttttttttttcatttgataaaatagtttattaacttcgtgataggaatacacacataaaaagtacacgagagtactttgtagatgtttaggcagtgctacttcatggcattattatcagcattgcagattacagtggctggatgctttatttatattggtagatattatttccagcagattatttaattactcatggcaccaaattgggaaatcaaccatcaactttcatgtctgtctctggaagccaggggaatggcagtgttggtttagttgcttccagaagaacctcaatggggaatctttggtgcagatggctttcaatggtgttatggcgtgattatacttttgagggtttgcacagtaatcctgatctgcatgcatctttagcacatattttttgaatatattaaaatttgatttttgcagtagatcatct

SEQ ID NO: 9027 - DNA, 342 bp, Glycine max
  Clone ID: jC-gmle01810036b02d1
tgactgctcggtggccgcccttttttttttttttttttttaaaaagttaaaatttcattaaattatactactacttacaacatgatatgatgacatattggtgaatcccaaaccaggtatccttcgccatgtagtagcgagaaatgggacattatggatcgccttatctcaaaaggcatggtcattacactaaaacaggagctcatcatgtctagtaactagactaatgatgtgtcccttgttttttactcagtggaaagtaaacaaacaacagacgcaaatcgcagctaacgcagaaaagtgacccccatggtgtcatcttgggatccacccaagcttcat

SEQ ID NO: 9028 - DNA, 344 bp, Glycine max
  Clone ID: jC-gmle01810036b03d1
tgaacctagctcagtggccggccttttttttttttttttttttttttttatttattctttggcttgaacgtggcaatcggcatttcatctgaaggaaggggctaaatggctcacgggcccagcagctaatgggaagtggctgatgaggcccatggcatgcattgcttgacacggctgcttcagttgcgtgccaattgagcctgcggatctgggactattggagcacaagttcttaagatgtgtggcaacgaagtggacgggcaatatccctttctgctggagctttgacgccgtggataatcccgactccttgatggggacccaccgttggtaatttaagatca

SEQ ID NO: 9029 - DNA, 540 bp, Glycine max
  Clone ID: jC-gmle01810036b04d1
agtagatgggaattaattaccgggctgactagccgacggccgccctttttttttttttttttttggagatgtatttgttgtatattattgaagttggggtatacattctagtatatggtttttttttccctctcttggcttgtagttatttctatgttcatggataatgacacttagaaatagtgaccaaaacagaaatcatgatactttgagatgctccaaaattgctgaaatatcacagtcctcatagctcttctctgcataaataatgttggggctatcttgggagaacacatcttctcttttgtaactgtcttcactgcgaagaagcctttcactgccatattcaacagccccctttaaaacaagtgtcttctgtatgccagccactagttcttcataatccgtgtcacctttttctcccacaaatacaaccactttggatagatcaattccccacttgactgacagataccttagtgcttgttttcttgaagcaaataatggtatcacatttaatctcaatcctgcatgtgtata

SEQ ID NO: 9030 - DNA, 420 bp, Glycine max
  Clone ID: jC-gmle01810036b05d1
ctggtatgggaattaattaccgggccgactagctgcacggccggcctggtcgtctttttttttttttttgcttgtttaaattctaggaaagtaatagctaacgattaaacagtgttagataacggaaccgtaagaattaaggccgcggggaaaaagaggtgatagactggaaaattaaaagcaatactctgcgatacatgcgcatggcgcaagagagtacctgagatgagttggaccatgagaagtaaagaacaaactagcgaacttcgacatagcgctattggaccaaacagcttagttctagaccgagcaaatgctaacggacgagaccattcctgaagcggaaaattcaccatctttggacgcacggtgacccaaccccatcctcatgtgccagccgccaagaaacaggacctaaac

SEQ ID NO: 9031 - DNA, 142 bp, Glycine max
  Clone ID: jC-gmle01810036b06d1
ggactgacgatgcttgattaaattcttcataagtgcataatgacaatttaaatatgtatgatattgaatacataacagttacaacaagggggaaaacgagctgtttggctagaaacattttagctaaactaatcattacatg

SEQ ID NO: 9032 - DNA, 415 bp, Glycine max
  Clone ID: jC-gmle01810036b07d1
tgtcgtcctttttttttttggacttgccaatgttaaagagctgatattgaactggtattacaacgatattactgccactcacccgttagaccgctatccaacttttcaactgtattaaaccttcatcacactctacaatattgcactgaccaaatgatcaggaccattactcatacggaatccatgcatgaacagccaaccggcatctgacttggaaccactaattcatggtgcacaggcccgcccatctacagaagaacctacagtctgcacaccgagaactaccaagggccttaggagacggagttgacacacttctgacaccgatttaagcgagctttgggaaaaggcaagacaccatcggtacgcactattcgagaaagcctcccatgctttatggacactgaactcatga

SEQ ID NO: 9033 - DNA, 307 bp, Glycine max
  Clone ID: jC-gmle01810036b08d1
atgtatatataaaaatatgtaatgctcaacactcgcaagacatgtttttccagcaaaaagtaatactgaagatattgggggaacctacacgttaaacagaacagtaacgggaacgtcacaaatgacattcacatctgttacacatgaataagccacgaaaatcaagaattgcctctgaacctatcccggagtctatatatagactccctctaactaagctcttggtatctcttaaaacagagagtcgaagagggttgtacagaatgctgtgccgtgttctgcacatactagagcctttgcttcatgc

SEQ ID NO: 9034 - DNA, 387 bp, Glycine max
  unsure at all n locations
  Clone ID: jC-gmle01810036b09d1
gtgtctctcgnnnnnnnacncctnccccccctcgctgtctacacgctggacgtcctttttttttttttttaatcattttactaagaaaagtttatcattccttaacttgtgacttcagcttcattgtcactgtaatctccccaacacttgcttggctttttctcatctactgcatccttgttggttactttatcctctttactacaaccagatggggggctgaaatcttactgcttttcttctacttccggattttcactgctggcagataattcattagcattttgcacaacatgcttcttttcacaacttacatctgtcgaaaatgaatccttattttcctcatcaagagtcttactgttggtttcaaggccagtttcaacatat

SEQ ID NO: 9035 - DNA, 470 bp, Glycine max
  Clone ID: jC-gmle01810036b10d1
tgctgattgcataattcccagctcgcctgagctgagtccgcccttgtcgtcctttttttttttttttcctaacttattctattacaattgtaaaaaaaagaagaactaaaagacgaaataaagaagaggagattaattacatattaattacatatatttaatacttaattggatctataatcttcttcacccctttccgtgtcaataactagattgacaaaaagggaatatcaatgcatctggaaaaaaacgattgatctctatcaagagacccgccaaagccccgaaccatagagtacttactactggtgccacggaaagatatgttcctagatctcgcatttcaaatcctcctttgtaagtctttcttctatctaaaattgattcgaatttaatattctgtttgattattctaaagaatattagttatatccctttagaatcttttttcctttctcatattctattct

SEQ ID NO: 9036 - DNA, 202 bp, Glycine max
  Clone ID: jC-gmle01810036b11a2
gcatgctctgcattaattgaatctggccaacagcgcaggtggagagtgctggtttgctgtatttgtggcagctccttggcgcattggcgtcgcatcacgtgaacttcgcatgtcgcctcgagtcgtctcagggctgcatggcgatgcgtgttatcatgcctcacttcaaaaggcgagtaaataccggctcatccaccagatt

SEQ ID NO: 9037 - DNA, 496 bp, Glycine max
  Clone ID: jC-gmle01810036b11d1
ccaacaaaacaaaagggagaaccctgttggtatacatgataaattataaaggtatacaaaaacctgtactagttactggggcttgtgttacatgttgacaagataccccaaaatgccctatttccttcctctgctcatggccaactaactttttttccctctagttaatgcagaaaacaacagaaattttttctgtctgcttaacttctttggtgcatctgaattcctacctggaattacaatggtgtttagttttttctgcctgcttgacttgtctgcatgatctaaagacgcgtcttcgactgaatcagtgtttaattgcttgttgctgatggttgtttggtccagaattgctccgttttccaaaggatatgaaacaactgggcttgataaaataggtgttgaaaggttttgctctgatgttgttggtactactttgttagaatttacttcctttgagttaggatttgttcctgtacaccttgagttttggatg

SEQ ID NO: 9038 - DNA, 488 bp, Glycine max
  Clone ID: jC-gmle01810036b12a2
aaaaaacctctcaaagatatatcagttgccacaggagttgctgaaggaaccattaggaactcatacaaggatctttatccccatgtttcaaaaataataccaagctggtatgcaaaagaagatgattgtgaagaaccctgggcatgccttaaaggcaaaacatagcgaccacatttaacaacttagatgccattggaacgttctgttctggatctactgaactgttttatacttttaattcaaaatgaaaatgcctcttctattagtattttcttcttctaactgcacattaattttggttaaccctcccaatttgagaattctaggggagaggcaccgctgatatatagaattagctcaacctttatgatatgaagctcattttgcacttgcggtgaaattgctggggtcatataggggtataggtatttgtagcatgaggaaatgctaaatgctctaatttttttttttgaatatatcttttatta

SEQ ID NO: 9039 - DNA, 293 bp, Glycine max
  Clone ID: jC-gmle01810036b12d1
gggcaacagcacaagcacaaaaatatatttctatatgcgtgtttcgggggtaaaacaaacggaccccaaaaaaaatgtggtccttatgaaaatcccaatgttttttggctctgctaacgcacaaaaccccccccaacattgcgggggccggaagaatggggggacctgctgacaatatcaaatacccaacccccccaaccttttgccggccccgtgaattatcataaaagaatcaatctcgctgagccacgggaatatataacctggtcacacccccctctgtggtcgggggg

SEQ ID NO: 9040 - DNA, 323 bp, Glycine max
  Clone ID: jC-gmle01810036c01d1
tccttagtcggcggccgccctttttttttttttttttttttttttttttttttttttttttttttttttattttgtattattttatcattaatttttttataaaaagagtttatggcaaaaaatacaaaagaaaaacaaataaaaaaaaaaaaaaaagaagggacacccaaagcgaaagaaggcagaaaaaaagaagaaaaaaaataaaaacaagggaaaaaaaaagaaagaggaaaataaaatgggggccgaaaacctccccaggaaagggggggggcaaatacagtgccacaataaaaggggcaacgaatttatgccccgc

SEQ ID NO: 9041 - DNA, 513 bp, Glycine max
  unsure at all n locations
  Clone ID: jC-gmle01810036c02d1
gaaaaataaagggattgattcactcctaagaaccaagtattcaatgtagttttggttactggtgacctcttctgtacatgtacaaactcactcgtgtaaccaaaggagataaaacaaaataattgggaatgtataagattatgaatgttcttgtgtattttctgcctcgtcctattgctacctttgtaatccttgtttgcaaagagggcagcatgatataattcttagccattgatccacacattttaggtggaacaaatgggaacagggtaattgcctaacttcttctttgtctttgtatttggccaagcaaatgcaacattctggatcttggttgatcaatctttcactgctttgagagtcattggcaatgtccaagttggaatgaagccctttatatctccaacttgngagttgtgagatttgatcatcagatgcccctctagcagaggaccccatgctcatgttgtatccaaggagggtgctcattagtggcacatncacacacaaaag

SEQ ID NO: 9042 - DNA, 505 bp, Glycine max
  Clone ID: jC-gmle01810036c03d1
ggataaatattctaaattaatgtaaaagaataaactgctacttataagaaataatattgttgcaagaataagcacctaacttcttctaaggagcaaaccaaactaataatagaacgatcgatgtggatttacactagctgaagaacactgcgccagcaaaactatcgtggccatctattaagcttatcatgttgcataaatcttgagcattgactccagcctgagttatttacatacacaggtcatttagaccgttacaacatgccatagcgtaactggtactttaacattgaagttcttgtatcttgtttggaagttcagtgccctgatgcagaaggaaaatacaaaggctaagatgactgtgaaagctaccaaaactgcagcaactggacccatgaagtcggatttaaacccgtagtggtcttcaatatatcctttgacagtgaaattctgagtagtactcccaggcacaaaaagatggtcctctatatctctatattgagag

SEQ ID NO: 9043 - DNA, 559 bp, Glycine max
  unsure at all n locations
  Clone ID: jC-gmle01810036c04d1
ctgggatggaatctattgccgggctgactagccggcggccggccttttgttttttttttggataaatattctaaattaatgtaaaagaataaactgctacttataagaaataatattgttgcaagaataagcacctaacttcttctaagtagcaaaccagactaataatagaacgattgatgggggattacacttgctgaagaacactccgncagcaaaactatcgtggccatctattaagcttataatgttgcataaatcttgagcattgactccaggctcagttatttacatacacaggtcatttagaccgttacaacatgccatagcataacttgtgctttaacattgaagttctttcatcttgtttggaagttcagtgccctgatgcagaaggaaaatacaaaggcatagaagacagtgaaagctaccaaaactgcagcaactggacccatgaagtcggatttaaacccgtagtggtcttcaatatatcctttgacagtgaaattctgagtagtactcccaggcacaaaaagatggtcctctatatctctatatt

SEQ ID NO: 9044 - DNA, 357 bp, Glycine max
  Clone ID: jC-gmle01810036c05d1
gcctgtcgttctttttttttttttttgtttttgctccaacaggcattcattcgttattcgaaatttcgtctatctttgttccccccttaaaactgcaacaaaaaggacgatcgcgagggacgagctaaatgcgcactacctaaggatgagaatgtcatctcaatagagtataccaacattaatgtaactgatcagacacgtgaaacatattcgtactgttagcccgcacagactttgcctatgagcgcatgataatgagcagggctcaattggcgacaaagtggggcctggagtctacgtatctctggagataccagagaaaataaccaaaagtgatggctactatgacgagcattt

SEQ ID NO: 9045 - DNA, 321 bp, Glycine max
  Clone ID: jC-gmle01810036c06d1
tggtcggcggccgcccttttttttttttttttttttttttttttgttttttttttttaaatcggtaaaaatgtgatttatatcaacacatcacattacatgggttttcccagttctggagaaagccatggtcatctgactcatctggaatgtgagctcttggctgactcatagcgctacatgagaaactcgatggggccttccaaatttgcaaaaggtgcccccttttagggccaataccctctttgaattctcgatcaaaacagagccaagtgaccgatttagccttcaatgggaccccccttgaaaggggcagaatttt

SEQ ID NO: 9046 - DNA, 376 bp, Glycine max
  Clone ID: jC-gmle01810036c07d1
agcctgagtataattcgcgagctactagtcggctggccggccgctcgcccttttttttttggggggatatggaaacttttttatttttttttttatttgatttttattttttttatttgtataaattagaattccagtgtcatacgattattataggtacattcaaagcaaatagtaatatatatgacaatgtgagtaatgattatataaatagcatatacaacagaaattcgtaggttactctataaaacgggatattggaattcttcagcaatttcctgaataaactggaatcccatttattgatctggtcaatattgctgggtcttggctgtatacaggctgaagattatcagggtaaacttggtcacccttt

SEQ ID NO: 9047 - DNA, 431 bp, Glycine max
  Clone ID: jC-gmle01810036c09d1
aaaataacacacactttacacatcattacgacaattaaaagaggtgtggaaattttcaaatagacagagcatactcaacaagagggtcatgtctaatttcctttattgaattaaacaaacgaacaaacgagagaaaacacaaattccagatcatgcagaggattccgcattttcagaagatctggcagtagcctgtggaacagaaaaagctggcataagagtattaccagcaatttcaaaatcttgagaaattcccaagagaatatcaaaaactgtagactgtttgggattgccaataaggaaactcaagtgccatgaagtttgatttgcccactcagaactccacatttcaaaaccattattaggaccacatacctctattgggaagatcaattcccaagaatgtggttccgattttgtccacttacatg

SEQ ID NO: 9048 - DNA, 492 bp, Glycine max
  Clone ID: jC-gmle01810036c10a2
ccgaagttcacatctgtttggaataagcttcttttccatacaattgaatttttagaattatggctcagttattgtcaccagtatgcatggaggctctgaaaatccacaatccatcattgaatctttgttcaagaagctcatggcggatgctggtgaaaggtgcaagtccttgcacctttctgacacacagtggtagtaagcgaagagggtttggcaaagtaagagttactgctgaagactcagtttctccctctgagaccattgcagatgactattatgaagttctgggactgcttccagatgcgacaccagagcagatcaagaaggcatactacaatagcatgaaatcttgccacccggatttgagtggaaatgatcctgagaccacaaatttctgcatgttcatcaatgaagtctacacggagctgaacgatcccgtccaacgcatgatttatgatgaaagtcatggctactctttaacttcaatcaatc

SEQ ID NO: 9049 - DNA, 333 bp, Glycine max
  Clone ID: jC-gmle01810036c10d1
gcaaccataattatgattttataaacaagctttcttatattttccaaagtattactatggttcatctatttctaaaaatttaccttaataggagttgctgcatatacaatcatgggtagtagaatgagaaagaagatctcattgggttaacttaggaggctattaatggacctatttcaccggacttaattgtttaataaaagggtaatggaagactggtcacttggccttggcaagggttggctttggaaagttaaatgggggagggttatcaacacctctacttgagtattccctccatcttcgtgccgctgaagcaactctttttggttt

SEQ ID NO: 9050 - DNA, 498 bp, Glycine max
  unsure at all n locations
  Clone ID: jC-gmle01810036c11a2
gcaattgaagttaaaagccttagccttccctacaactccaaacacaaagacatcatcatccatggctgcctccgtctccactgtcggagctgtcaacagagctcttttgaacctgaatggttctggagctggagcttcagctcccagttcagccttctttgggaccagcttgaagaaggttattgcctcaagggtccccaacagcaaggtttccggtggaagcttcaagattgttgctgtagaagagaagaaagagattgaagagacccagcagaccgacaaggacagatggaagggtcttgcctatgatatctcagacgaccaacaagacatcacaagaggaaagggtttggttgactcccttttccaagctccacaggatgctggaactcactatgcagtcatgagctcctacgagtacctcagcactggacttcgncagtacttggacaacanaatggatggattctacattgctccagcttttatggacaagct

SEQ ID NO: 9051 - DNA, 469 bp, Glycine max
  Clone ID: jC-gmle01810036c11d1
aatagagtaaattggaattgagaggtttgcttttaaggcatcaatcacttgggtacataaatggcatgaacaatgagtcgaagcaatggcagaagaataatattaacgccatcaccacttgtaacagtgcactcagtccctctgcagcagcatggaaatcagacatagcccttgctcttcagactctccactgcatccttgatgatttggtctacaggagtgaactctagacctaaatcaatcagctttgttgatgcatcctttgtacttgccctcaacaaccctggctgggtatcctttggcaacttgaccacatcgtattcagggtataactcagaaaccttggccacaagatcactaaagtgacgaatagattccacacacaagtgccttcctgctgctttcttgttctcaagtgccaaaatatgtgccaatgctatgtctttgaagtgagccattcccataaaga

SEQ ID NO: 9052 - DNA, 521 bp, Glycine max
  Clone ID: jC-gmle01810036c12a2
gatatgcagaccgagttaaaagtctatccaagagtggaaatcctagaaaggaccaggccccaaatcctataccaccaccagcaattaaagaggtttcatccacatcttcacttccaggtagtgttggtgcagaggattttaataatggtcaacgtcaagaggtaaaaacaatggacatgagcaggaaagttgtcgaaaaggaaagttctttgtacagctccgctgctgatgttgacaaacaatcaagtttttcttctagttgtcaattcaatgggcgagaggaaaaaagctcagcttctgccccaatggacagggaaaagtttgaagtaaagaattcttacggtggtgattctaccagtcagaagatgaactcttattccctaaatgttacagatgagaaagtgcaaagggtgtcctctccacgcagaaaaaggactaaggaggagaaatctgaaagatcttgtaaattgggtaaaacgggatgtcgatggttatgatcattccaccacaagctccaaaca

SEQ ID NO: 9053 - DNA, 433 bp, Glycine max
  Clone ID: jC-gmle01810036c12d1
atgttatatttaggtggtctttatttttttttcttatgggacaaaaatacattagagtcaaaaaaattagaatacccaacagaggatccatttttttttataaaatgaacaaaaacctttaaaactatatcggttacaaacactgagaaatgacattttgaacatacacctcattactgaacatgacaaaccgggaatattaggggggcactctaaaactacttaaaatctcttgttcttttagtcgacgcaggaatctaaaaaggggtgcttggagactgacaagactaactgctttgcgagaaagcacgaaaacaaactgggtcacgtccctgtcaataaaacttcccggctggtccacttctgccagtggggggattccttcacgaacaatgtgcattgtgaattcaatttccttcctatgagcagcaat

SEQ ID NO: 9054 - DNA, 491 bp, Glycine max
  Clone ID: jC-gmle01810036d01d1
tgcaatgcgactagctataggcccccgaattaattcccggtcggcggccgtcctttttttttggtcgccctttttttttttttttaatttgaaaaataaagggattgattcactcctaagaaccaagtattcaatgtagttttggttactggtgacctcttctgtacatgtacaaactcactcgtgtaaccaaaggagataaaacaaaataattgggaatgtataagattatgaatgttcttgtgtattttctgcctcgtcctattgctacctttgtaatccttgtttgcaaagagggcagcatgatataattcttagccattgatccacacattttaggtggaacaaatgggaacagggtaattgcctaacttcttctttgtctttgtatttggccaagcaaatgcaacattctggatcttggttgatcaatctttcactgctttgagagtcattggcaatgtccaagttggaatgaagccctttatatc

SEQ ID NO: 9055 - DNA, 308 bp, Glycine max
  Clone ID: jC-gmle01810036d02d1
ctcgatattggactcctgtctgttggaatctgcaacaactcccaccttgggttacggcttaaatacttcctaacggttctcggctcatttgatctcgacacaaatgaaaaagtatttacctctgggacactggtgtctaaaatcgtctcaatataaagggagacccacaacagtctcgcgcgccctttcctcatcatgtgatgcctgcgcaaacagtggggcttaaaccatgaaatggagagcagagaagcattctcagaagggaactggaactcaatttgaacctgagggggcatggaatgtaattg

SEQ ID NO: 9056 - DNA, 385 bp, Glycine max
  Clone ID: jC-gmle01810036d03d1
ccaaccaacattttcttaaaaatcacttcaatctcttatccaaacaaaaaaaaaattacattacttcataatcaaattttatataatcacatggatctaaaataaattctataaacgtagatccaaacagtctcataagatttttatttatttggatgtattaatgcacaattcccatatatagtacgatgaaagtgaggagagtgaaatttcagactcagacatggcctccatctgcctggggctgatatgttcgacgcctaagctgagaatcagaattgggttgttgcagaaatattttggtgggatcattaggatcaacatacgcatgtctcatcatctcatcaactggagtctgagatgcctgcaaaggatccacataatt

SEQ ID NO: 9057 - DNA, 399 bp, Glycine max
  Clone ID: jC-gmle01810036d04d1
tagctgcgcggccgccctttctgttttttttttttttttttttttttttttttttttttttttttttttttttttttttttttttttttaaatgaacgatttccagtggggttttaaactaaacaattttgcaagttttgccaagaagggcaaccctaaaggcggtaattagagtctcccaaaagtctattaggacaaagttcactgaattggctggtaaaattaactagcattacttccttccccacaaggaacactcaatacttcgcccactttttggcccattttaggccccatacaaaaacatggccagatcacctagcacttaatacatggggctggcaggaatttaagcccgaaaattgctgcgattcccaactttttttccaattgggaaac

SEQ ID NO: 9058 - DNA, 494 bp, Glycine max
  Clone ID: jC-gmle01810036d05d1
ccagtaatagtatttaatattataagcagagattcataattcagattagccgaactttatacagaagcgaccaattaccaaacattaaaaaaaaaaaaaggaagcaaccatgagcttaacacacgcatcacaagtccaaaacactagaacttgctgaaaggcaagacatgaccactgtattctaaggatgtttgtttaacgcaaaacaccggagtgcacgaaaaccatcacagacataatacataagtttttagctacacattaatagtttatcattattcctaattaagggctatctctgcttgaagcttgctctcccaacacctgacttgcaagtgcaggggttgcaggagcagtttggtccacatttgcagccatcgttctcagcgggcacacccatttcagcaccctcaaattgagccttaacaggtgccactcccatgaccaaggtctcgatggtggttgactcagtgtagctcaagactgggtacatc

SEQ ID NO: 9059 - DNA, 457 bp, Glycine max
  Clone ID: jC-gmle01810036d06d1
ccagtaatagtatttaatattataagcagagattcataattcagattagccgaactttatacagaagcgaccaattaccaaacattaaaaaaaaaaaaaagaagcaaccatgagcttaacacacccatcacaagtccaaagcacttgaacttgctgaaaggcatgacatgaccactttattctaaggatgtttgtttaacacaaaacaccagagtgcacgaaaaccatcacagacataatacataagtttttagctacacattaatagtttatcattattcctaattaagggctatctctgcttgaagcttgctctcccaacacctcacttgcaagtgcaggggttgcaggagcagtttggtccacatttgcagccatcgttctcagcgggcacacccatttcagcaccctcaaattgagccttaacaggtgccactcccatgaccaaggtctcggt

SEQ ID NO: 9060 - DNA, 426 bp, Glycine max
  Clone ID: jC-gmle01810036d07d1
gaatattacatatatgatacaacatatggcaaaaacaatgatgaaaagatcaatagggatggcagaaactgcctgatcactaagcttcatattccttccaccaaggcggtcaaccatgtctggaacaggttcccagttcttgagtagatgctcgcgaggatcctctaatttcattttcatcttctctgcgtggcggcttgcaacctcttgagcaagggtccagtcatagaatttccgactctcttcattgctaagaacgttgcaaacctctgttaatttcatgaacttttctgaggcagttttgagagggagggaagtcgtgtcgggatgatactcctttgacagtttccgataagcaactttaatctcttgtaaaagcgcatctggcgatacgcctgagaattcgtaatgagaacctaaagaagc

SEQ ID NO: 9061 - DNA, 403 bp, Glycine max
  Clone ID: jC-gmle01810036d08d1
gatcaactagggttttggctctctaagatgttattaggccgactacaataatggtgcattaatcgcaaaatggataattgaccactctatggtctgaactatactggatatttcgtacacgttgtaagctatgtgcccatatcactctgaatatgcgtgaaaaaatatctacaacgtgagcagtatcatggcacctgataccatcccagcaagggtggcaacctatgtcggaatctcagataagtagaaaccgaaggtggcaaattccactaagggtgcggcctcgatcttgaataaagggcctttcccaatcagctatatcctgaaatgcatattctggaaaaacctcaaatggctccttacaggatcattcttagccaaatcgtaagaagcgccacgtatt

SEQ ID NO: 9062 - DNA, 382 bp, Glycine max
  Clone ID: jC-gmle01810036d09d1
atcatcaaatagaggtttcaatttcaacaattcatcacaagtttcataacatccaaattagagaccattcatcttaacacaattccaacagaacattagacgatcaaaattcaattgaatcgccagatgtgataacaaacaaatagcacaattataaaagaaaaaaacttgggtgaatcaggaaaactgtctatatagcttccagagcttgcaggacatcagccttgaaatcctcaaaagcttcaactccaaagctgaagcgaaccaggttgtcataaatcttgtacttggccctttctgactgaggaagatcccagttagacgaaatagcaggttgatccacaatgctcttacaggcaccaaacgaggccgtaagatatgg

SEQ ID NO: 9063 - DNA, 498 bp, Glycine max
  unsure at all n locations
  Clone ID: jC-gmle01810036d10a2
tagcgatagacagaggagagagaaagagagggagtaagtgggtaaaggaaagaaaactaaagaaacaaacctaacacaacacaaatccttgaaacgacgacggaaatggccgtttcgagctcgcacatgcgtttcacctttgagtgccgctccgatcccgatttctcgccccccccgccgtccttcgacaacctccgccgccgaaacttccgctcctccgcaggatccggcgcggcgtttcacggcatctcctccctcatcctccgcttccctcccaacttccagcgccagctaagcaccaaggcgcgccgcaactgcagcaacatcggcgtcgcgcaaatcgtcgccgcttcgtggtcgaacaacagcgacaactctccggccgncggggctccggcgccgcccgcggtcaccgccacggacgccgctacggtgcctctccncgtcgtcgtcgccgccaacgaggacgtcgttgtctccgccgcggcagacgagaac

SEQ ID NO: 9064 - DNA, 468 bp, Glycine max
  Clone ID: jC-gmle01810036d10d1
cagtcacgccaaaatttattattggctgcagataatgttaaactttgaaaatctctcctcagacaccgtctgaacgaacaatttccttctttttcacatgatacgttaacacaaggcaaagagtaaaaatggtttgctgctggtaatggtaatcatcaaatcagaaaaaggcgctctcctctattcatatactttgcattcctcatcagcagggtttgtctcgcagaattcctccaatgggtctccactccctgctttagctgcccctggccacttgcttgctactaggtgtgccaaatccaccaccctttggctgtaaccccattcattgtcataccaagcaaccaccttaaccatgtcatctcccatgaccatagtcaaggaggagtcaatagtagaggaaacatcagagcagcggaagtcgatagacacaagtggaacatcacacacgtccaacacacctttcag

SEQ ID NO: 9065 - DNA, 502 bp, Glycine max
  Clone ID: jC-gmle01810036d11a2
gtgggaatcgctcgccatgaatggcgaggggagtgaagcaatgcaagtggagatggagattgagaaggagaggttggtgtacatgtggggttaccttcccggagctctgccgcagaggacgccactgttgacgccggttctcgttagggttccgccctctggttactcttggaaggatgtttgcggtggtggttgtggattcgccatggctatctctgagcctggaaagctcataacatggggttcaacagatgatttaggccaaagctatgttacatctggcaaacatggggaaattccagagcctttccctcttccaactgaagtgactattgtaaaagctgcagctggatgggcacattgtgtttctgtgacagattgtggagaagtttacacatggggatggagggaatgtgtaccctctgggaaggtgtttggtgaatcattaactggggtaagccccgaaaaggatgtaccaggaaagcaaagttcattcttgact

SEQ ID NO: 9066 - DNA, 505 bp, Glycine max
  Clone ID: jC-gmle01810036d11d1
tgtgggcactggcgtccgagtccgattaattcccggagcgaccatgctcagctggccggcggccgcccttttttttttttttttttagacacgccgaaatttattgttggctgcagggaatggtaaactttgaaaatctattgtgagacgccgtttgagcgaacactatcttcatttttgacaggatacgtttacacagggccactttttttattagtaaaaaaaaggcacgggtgttctttaaaaaaaaaaaggggcaccccgccctcttattataaagcgcctccagctcgccgggcggggggcttgtatatctccaaaagaggggaaacaacccctggttaacccccccgaaaaaaaggggggggggggggccttacaaatgggggggggcctagtctggggggggatcatttggaacaacaaagaaccccccgcccccagaaaagggtccttaataaaaagaggggggtgattttttttttctcaaccaaaaaaaaaaata

SEQ ID NO: 9067 - DNA, 528 bp, Glycine max
  Clone ID: jC-gmle01810036d12a2
gaagtgaagacttgtgatgtttctaactctgctggaatccagatacttcaaaaaatgatttcacttgagcgaaatgaatctggtttgtctctggatggaagccttgtcagtgaaattgaaggtgaaagcgcagtcgacaggctaaaaagacaagttgaccatgacaggaaacttatgaatgctttgtataaagagctggaggaagaaagaaatgcttctgcagttgctgcaaatcaagcattagccatgatcacaaggctgcaggaagaaaaggcaacattacatatggaagccttgcagtacttaagaatgatggatgaggagtctgagtacgaaacagaagctttgcaaaaagctaatgaccttcttgttgagaaagagaaagagatagaagagttggaagctaagcttgagttctataggaagaagttccctgatgaatctgtgctggaaaacatggtggattcaaactctgaaatgaaggtgaaagatattggattggatcattgcattcgaaaagatgagagt

SEQ ID NO: 9068 - DNA, 523 bp, Glycine max
  unsure at all n locations
  Clone ID: jC-gmle01810036d12d1
aatctcaaaccatttgagtatatattattttatgtacttaacacttaacacagtacacatgcatatatagagcaacacatttcaaggaaacattctccaaaccatactgatctcccaaaataaactggaagatgattaacttaaagacacacatatatatataagccaaaagcatatatatatataagacaagtcgaaggaatatgctcataattggttgcttatgcttcagccaaagagatggtggtgcttctttccatgagcttcctcatcttgctcctttgcttcctttttctcatgatgttcatggaaggcaaacccaccagatcccactgcagctgctgctgcaaccttctcttatatcttgtgcctgtgagcatgctctgggtctttctctgccttgtgcttctcatgcaaggcgtaagcagcagcagatgcagcacctaactcaccaaggtgctcaagatgctggnggngcttctcttccttcttatagtcaacctcatcatcatacccaccacca

SEQ ID NO: 9069 - DNA, 496 bp, Glycine max
  Clone ID: jC-gmle01810036e01d1
gtatcagaaatctacactctcagtacattatacatagagaactctcaatttcgttggtcttctagccatccttggaggatgtagattttggagcagtggttgttaaccacagcaagctcctttgcactttctgaaacagcgactttgatcgtgtattacacaaagtgaaagcaattgcatccaaataccaatcacctcgccccttaaaacccacaacacagcctccatctatcgaaaaagtgaatagagtcccttcttcaactccatatggtccaaaggttctgtggatgctcttgaatgtcaatgaccgaatcacgggggtgcctccgcgaacaactggacagtagcggccggtcacactgaccaagagctcatctgggaattgcagcttaatctaggatacatgaaaaaaccgaacacttttttatatttgcttggaatttgacgaaatggtgaagcaaagagaagtttacctcagctgtaatgtacctcaact

SEQ ID NO: 9070 - DNA, 436 bp, Glycine max
  Clone ID: jC-gmle01810036e02d1
aaggaaacattaccccaaagtctatgattacgttcacaatgtaaaagggtcacaaatagaaattttaggtgcatactatacaattcaatattacacaatattcgacatattcaaagcctcaaacctgggccagtggtcactggatctttaacacagatttcttgtgacttattcctaagccctattaccacaaggatgtttaacagttctcagggcatcaacatttgaggctcttgcacaagaggctgagtaacttgcgcaaaatgcttaaattccctttccacgttttgccaacatttgggtggactgattccttggttcatatttttaacaaaccccacaaacttcctacacagattctgttcaaacaaatgcggattcattctcacgtataccaaagcccacatatctttatcaccggacttaccatcaacat

SEQ ID NO: 9071 - DNA, 486 bp, Glycine max
  Clone ID: jC-gmle01810036e03d1
atgtgaggataaatgaatatatctcttatttaagaaaattataaatatttatcttaaaattttatatttatacctcttacttttgtgtgttaattttttcttttctcactcttttatcttattagattaattcttgacaaataattatctccaccagcctcgtgcttgacatgccaatttcttaatgatagcatgcagtgcaattcatgggtaagcaggatggcaattctcttagtgaaaacatgctatgagtgtatcatgatacgtatatgaattctggaattctcgagcctcagtttggacggttctacttgcaagttgcaaattgcaatgtgacatccttagtgtatatcggccttttccacttatctctagttcttgggcctaatgcgtcacatttgcccacttgagaaggttcttttattttcaatttttagcggccctctatgaaccatgttgactgacatacccagagaatcttttata

SEQ ID NO: 9072 - DNA, 504 bp, Glycine max
  Clone ID: jC-gmle01810036e04d1
tcctttttttttaaataataactatccaataagactttcaaatgttaatggaaataaattaccgagtgcgacacatcgtcaatttaaaaacagttcagacttgattacatggttttaaaaagatcagaaaagtccacaaattgtagttttgcttccaagagtcttaagctctctttgtcactatcaccattatcactattattgccaaacctgtgaaggttcctcccatgctaattttactatccatgaaacttgctttagtgttcccatcgacatcaccagacatcttctctttcatagcatcaggtgttgggaatatgttctgaaggaaaccagacaccctacttaccaattcaataacggttagctttacattctggagaagatccatgaaatcgaaaatcccattccccgggtgagactcagctgacactcccaatctttcaggggattcaactgtttcagaagtacaacttgagaacttatccaaattctcagtatttc

SEQ ID NO: 9073 - DNA, 463 bp, Glycine max
  Clone ID: jC-gmle01810036e05d1
gcctcaaaattccattctactaaattcataatgtataaatacttcatttagaagcaagcagtgttctttttcaaaacagagagacgaaaaggaaagactcaagatactctattgcctaacatacaaggttgaatcgtacaaatgaatgtgaagcgaagtgctcatatgtgcaaggtctaaaactcagccgagccaggtgttcgaggaaaaggaataacgtcccttatattgtccattcctgttgcaaattggacaagtctttcaaaccccaaaccaaagcctgcatgaggtactgaaccatatcgacgcacatcaagataccaccaatatgcatccttattcagctctaaatcatctaaacgagcttctagatactcaagcctttcttctattgggcttccaccaataagttcaccaatccctggaaccaacatgtccatggatgcaactgaccggccatcat

SEQ ID NO: 9074 - DNA, 473 bp, Glycine max
  Clone ID: jC-gmle01810036e06d1
gacactaatttagaatttcttactgaattgtgatataaacatatcacaatcaaatataattttccatattacataacaagatatataaaattataaaattttactaacattatatgctagtattaatagacgttacaaagaattagctcacatataagccatgtaacaatgataatcccgaaaaaaaattactttagcttaactctgctcttgcttgttttacctttcttcttaaaaggcgttggattcagcaatcgcctgaaggggaataaaggtagtccctgaggcgtccttcgcttcactctcaatccacctgaagcaaactgatcagaatcagtgctcacttcactaagccttttatctttcattataacatctggcaataaatgttttgcagcagtggaatcatcttccattttcatctcatcaagttcaagtgcatcagtttcccgtttgtcctccatcgaagtatc

SEQ ID NO: 9075 - DNA, 399 bp, Glycine max
  Clone ID: jC-gmle01810036e07d1
gctcagtagtcggccgtcgtcctttttttttttttttttgctataaataatttttattaactaatctagtcctgcatagagatatatcaactcatctctaggccaaagtaaaagaaaagattgatgtttttcatttttcactgagatattcaataactaaaaaatgaaaactaaattggaaaaataacgaagtttttttatcttcaccatctcatcagacaccacagctaaactatgttctgtacctaattggaagagagcaacattacatgtaaaatggacagactaggaacacatgaaaaaaagactttgagaacttgactcgagtggaggtggaagatatacaagattatgccgaagccactatcttatcaactccaatgtctttgccactccata

SEQ ID NO: 9076 - DNA, 463 bp, Glycine max
  unsure at all n locations
  Clone ID: jC-gmle01810036e08d1
ggtataactcatctggtattccaactttatccgtgaatacaaacaactaataacacgcagaataatgataattttcaggacgaacgtaggggtagagttaaatccaaactaacacaaggagctcttgacactacattcgactatttttccattaaaatacacgatagtcaactgcagccatcataatattgcttgcgtgcaaatttgcattccatgaacgaggcctgatatcaatgttcggaaaggcaagaaggcatggctagttgactagttattatggtggctagcagacagatacgaaaaaatgatggaaaccatgatgaccagtacgataatcatggttgagccatatccactttcatccttcacaatgtaagatttccttttactcaagagaccagattctctgcaagttntctgtatagcttccagcctgctcaatgctttagatgcattgggatca

SEQ ID NO: 9077 - DNA, 298 bp, Glycine max
  Clone ID: jC-gmle01810036e09d1
ataagatgtttgatttggactggttacatgggctgaagccccctttataacacgccaatggggcaaaagattcccgaagatgagacacaacatgagatgcccaggaaccaacccccgaacacagaagtggcgcctgcgaacaaacaaacggctcccggagtgaaccagggctgacggaaaaaaaaatttcttttgcaataaagggacaacctttgggcggaaaaaggaccctacccaagggtaggtcccagggggcaaaaaacgggaccgaaaaattccccaaagggccccacggggg

SEQ ID NO: 9078 - DNA, 533 bp, Glycine max
  Clone ID: jC-gmle01810036e10a2
aagcataagcgcgaacagcaagagcatgcgctcgttcattcagcaggcggatcattcctcgcactagaccaaccttacctcgaccatggagatgtacatgatcgtcggcaaggaccatacgcagccatcgatgacggaccgccggagatgcagcatgcagcgtctacaggactattcgtcaatgttccaagtccaacaagaggtcttcgaaatggccttgccactcgtccatactcataccaccaagcaccccgatatgacgaggtacgcgtcagtaaagggagcggcaacattcatcccatccttgagcgtcaagacgaagacgatcttgagcgagggggtaatgtgcgcaacccattctcggatccagctcatggacccgagcctagcccgtcacacgacagatttagcaacgctgaggcgaagcttcatgagttcaaacgcgtgctcaattctggactggatatgctccatcaacgatccattcaaggacccgcacccaatccgtgggcagtacccaactaccgggatct

SEQ ID NO: 9079 - DNA, 382 bp, Glycine max
  Clone ID: jC-gmle01810036e10d1
gtataaacctgattgtccatttagaaaacaattgacatgtgctgaggccttggttgaggccgcggcccaattcaccccgcgcagtcaagcccggagagccgcccatactgaccgaagaatcagccctgcggatcaacaacctttgggatggtcatgaacctagaaagcgaccaatgtttcttatggccacgccggcctcaaacggagcctttgcctttggtgaacgctatgtgcacaactgaacaacgccctaattcgaaccggcatgtgcgacttccggttcctaaaatgcagggtgccgccactccgactccttggagtactcgtggagcctgctctccctaggaccccacccgtggaactggacgccatgcccccaccg

SEQ ID NO: 9080 - DNA, 471 bp, Glycine max
  Clone ID: jC-gmle01810036e11a2
gacaaattatggctttcatccgggtgaactagacaatttcaaactactcagctctgtgtcaaacctgaaaagaatcagactagagcggatttctgttcctcacttaggggcattgaaaaatcttggaaagttatccctcttcatgtgtagtaccataagtcagggcttttgaaaatggtaccatcacagttttggattcatttccaaaactatcagatttgaacattgactattgcaaggatatggtgaaattgcctactgggatctgtgatattgtctcactaaagaagctcagtattactaattgtcacaagcttagttctctgccccaagaaattggacaggtgttgaatttggaactcctgaacataagtccctgtactgatttggaagagataccaaattctattggaaaactttctaagctaagactttttgacctctcaaaactgcataagcctttcaagttta

SEQ ID NO: 9081 - DNA, 389 bp, Glycine max
  Clone ID: jC-gmle01810036e11d1
ctctcctgttgctatttttctgctaagttaacactctgaactgcattgtgttttgtggatatattgcaacataaaaaataaaataaaaaacaattccttcatggggtatcttcattgattaattacccttgctagctagttaattatcaattcttttaggccacgaaatcccgcaacaactgcgcagcaaatctctttctgctttgaataatgtcaatgctctcataactggagcctgagtgagaattaaaaggtggagtaatgttgatggcaccacaaaactcattattcgcattattggttgatgatctcattcccaagtgcatgttctgagagaggaatccatgttgatgagtagttcctgagagggaaaggttattattattctc

SEQ ID NO: 9082 - DNA, 481 bp, Glycine max
  Clone ID: jC-gmle01810036e12a2
caaagcacaaagcatagctcatccttgagttaaaaaatggcagcagcttcttccatggctctctcatccccatccttggctggcaaggccgtgaagctgggcccatcagccccagaagtgggaagggtgagcctgagggaaaaccgtcaccaagcaggtctcctcaggaagcccatggtacggcccagaccgagtcaagtacttgggcccattctctggcgagcccccgtcctacctaaccggtgagttcccaggcgactacggctgggacactgctgggctttccgcagacccagaaaccttcgccaagaaccgtgaactcgaagtgatccactccaggtgggccatgctcggagccttgggctgcgtcttcccggagttgctgtcccgcacggggtgaagttcggaaaaccgtgtggttcaagggcgggcccagatcttcacgagggtgggctcgactacttgggcaacccaagcctga

SEQ ID NO: 9083 - DNA, 505 bp, Glycine max
  Clone ID: jC-gmle01810036e12d1
gatgacaaatatatattttttatatttcctttgaatggaagaggcaccacaacctcactccaatgataaacatgccacactcttattctactcaaggtctcaatcaagggcacttgtgaaataaatactaagggcagccaggtccttatatgaagttatagccaaccataatgataataataatacaagacatcttaataacatggaattcaaatcttgcttattttcatagtttatatcccaaaacatagttttatccttgaagaaatacttaaacgtctccatcccaaagttcttccaaggtcttgcaagacccattttcagatagccatatgtcccctgtgtattgcctgcgttgtggaacctgactgatcctctctaaatcctcttcactcagcacaaaatcaaatatgtccaggttctgcttcatcctctcgctgttggtgcttttagccatggcacttgacccttgttggacacccattaagtgcacctgagctatggc

SEQ ID NO: 9084 - DNA, 550 bp, Glycine max
  Clone ID: jC-gmle01810036f01d1
agccatatgatggaatcagggtcgacgagctgactagctcagctaggtcggctgtctttttttttttttatgtatctatataatacaattgaacttacgatatcatcaaatctatgtatcatacgttatttcttttagtgaagagggaaccgatgcgtgacataatatctataggtaagatatcatatcgtatgatagtgatcatatatagcagagtcgatatctctatgaacatgatctaaagagctatttgacccctacttgtcctgagatatggtggaatttattcgtaggaacttacccatgcctacttcaatgtggacgggtatccggacgaatcttgggggagggggccttgcgatttggagctcacacagatcgagcttcactgattgagagacttgtgactacccactagaaacactgatccaatccatactgacgccccgggaagcacaagaccgtggttattagaccaagctttaggagccgcgtttacaactgggacactattcaagacggtcactgagatagcccttaatgctaaaac

SEQ ID NO: 9085 - DNA, 516 bp, Glycine max
  Clone ID: jC-gmle01810036f02d1
ctcactaggtcggcggtcggccttgagcctcaacgggaagatctcagaactataaacccacgtgatgggacccgcaccaatggagaacgtggccacgtaagccaacaccatggctatgctcaatgcaacggcccacattagtttcctctcggagtgaccaatgatcgtgaggctgatagcgagcgtgaggagagagagcaccatgcccccgacactagacaacaacaacggacgacgacccacgcggtccaacgtaaaagtagccgccaagatgaaaacggctttgacgaatccaacggccacggttgcaagaagtttatgcgtgtcgtctttgatcccagccttctcgaagatcctggggctgtacaaaacgacggagtctacgcccgacgcttgttggaagacgtgaatcccaagggcagcgattacgatgtgacgaattgggggcgttggatagaagaagagttctttccatacgccttcacctgtgcttcgtttggttacctgaacgacgtc

SEQ ID NO: 9086 - DNA, 470 bp, Glycine max
  Clone ID: jC-gmle01810036f04d1
ccgcgctgccgtccttttttacaagttaattgaagaaattcaatttgtttaatcaaattccccaaccccctctgtttttatttggtcactacggattatctgcaataaaatattatatggcgaaaatattctaaattgtgaaaaacctaaatcttggatatacgatattgcatgacggcgataacaaagatcattggattgatatttgtagaatatgcctatcttcacacatgcacgaacgaataggaatcggactctaggagaagacaaaaactgctccctagagtacctttgccatattgcaattgatgctgcgcaaattatgtatctatatacatgtccatcttaagtgcataatcgaagtccattaaatggtattgcacaatcgcaatctttatattagaactgtctattctagccatatgaaatctgactataacagcgacataaccgtaatattcgaatttatt

SEQ ID NO: 9087 - DNA, 390 bp, Glycine max
  unsure at all n locations
  Clone ID: jC-gmle01810036f05d1
tntttttccatgtccattcgttatattctatactagttaacggttactttcattatgcattacaggatacacatgcacttttaaaatttagacttcaaagaaactaggatccactttcataacttgcaatatcagactaccgcgtacgatggaaaagctagccactgcacagttaccatatgcgacatgatcaagtgtctgctatggctacttaaacctacagaccaggtacaggcgcgaaagaggaagtatgcttaaccacatttggggaacaggccaggcgaactattttcctttggaccttaagcttactactgcccgatgggttgggctccatgccagcaggagactctctggttgaagaagcatcagaccttattgaggatgctt

SEQ ID NO: 9088 - DNA, 255 bp, Glycine max
  Clone ID: jC-gmle01810036f06d1
aaaaccccgggatacactcacatggggcaaaaaaaaaaattgggcccgtatagccaaacagcggtgatggaagcaaatcgctgaagaagaaaaatgcgcaaggcctaaaacaagttccacgaaagtgcggaaagcgaaactttagcctcggacctggccaaaaaaggccccccgaggccctgaccgagggggaatcagttcttcagagccggcccgtgggggaagaccagggacggatcattaggaaaaacaaac

SEQ ID NO: 9089 - DNA, 282 bp, Glycine max
  Clone ID: jC-gmle01810036f07d1
gtgtatgattaattactcttctttttttaagtagcaaaccaaactaataatagaacgaccgaagaggattgacactagctgacgaacactggcggcagcaaaactatcgaggccatctataaagctgatcatgttgcataaatcttgagcattgactccagcctgggtatttacatactcaggccaaaaagaccgagacaacatgccataccataacggggactataacattgaaagacgtggatcttggttggaagttcagggccctgaagcataaggaaa

SEQ ID NO: 9090 - DNA, 298 bp, Glycine max
  Clone ID: jC-gmle01810036f08d1
aaaagaacacacacttaacacataaatacgacaataaaaagaggagcggaaattttcaaattgacagatcatacttagcaagagggtcaagtgtaacacccttgattgaattaaacctacgaacactcgattgataccacaaatttcagataatgcagaggataccggattagcagagtatctggcaaatgcctgagggacagaaaaagctggcataagaggattaccagcaattacaaactcttgagaaattcctaagagactatgaaaaactgtggactgtctgggaatgtcaata

SEQ ID NO: 9091 - DNA, 363 bp, Glycine max
  Clone ID: jC-gmle01810036f09d1
gttgtataattaacaagtgtataaatattgctgctcttttctttgttacgtgcctaaaattgcgatgagttgaatattacagaaatgtgaatgcaaggattatatacctaaagttaagttgtccttgcctttaacctcatcttctcaagtttaacgcattggccactgcttacaaataccgtacggaagcctgccaaagttgcaaggatagtcacccaatttcagttcacactcaattgctatggcacaggagcataaattggaaggcattctgcttactaccgatccatcgatctacttcttagcaaatgtgaacagctattttatgccacatggactagagtatggttttagctgctaaag

SEQ ID NO: 9092 - DNA, 454 bp, Glycine max
  Clone ID: jC-gmle01810036f11a2
aaaacatctcaatgggttcttcttctattacaacatcgcccgcaaccatgaccatggctgcgatcgtgctcctgttcacggtctttgccgattcctccgccctagacatgtcgataatctcgtacgacagggccctcgccgtacaaggccgccacgttgcgcaccgaggaggagctgatgtccatgtacgagcagtggctcgtgaagcacgggaaggtgtacaacgcgctcggcgagaaggagaagcgcttacagatcttcaaggacaacctgcgattcatcagacgaccacaactacgcggaggaccgaacctactagctcggactgaaccggttcgctgatcttaccaacgaggaatacagggcctatgacttgggaaccaagatcgatcccaaccggaggctcggaaagaccccgagcaaccgctacgcgccacgtgtcggcgacaaattg

SEQ ID NO: 9093 - DNA, 474 bp, Glycine max
  unsure at all n locations
  Clone ID: jC-gmle01810036f11d1
acaaacaaaagcttgattctatatttcatttcatttcactatatgagactgagagtagagttagatttttctgtacatattatgatgcagaggtagatttttcaaccaaataccccaagcacaatcaagcagggagaattgtctagtctttcagaagaatttttcaagcgatttaacaacctaggggtagcttatctcactttaatgtaatcagcaaacaccactgaaacctaggcctaatatgaagctataattatggtgtctgccatgtgcactcatgagctccttagaaactcccaaggtcctgatcccgttccaattctcaagaagccagcaaatgccctaagacccatatagatggtcaaagcaacccanattccaatgaaaccaccagcggatgacaaaataagcagagaaatgatgctaagaattgccaccacaaccatggagaaggctgaatatgcaaaatcagat

SEQ ID NO: 9094 - DNA, 496 bp, Glycine max
  Clone ID: jC-gmle01810036f12a2
gccgtaagattgaaaaaggtcatgtggctttatgcataatggttgctcgatcatgagtccagagatttaagcaatgagactgatatgtgacatcatagattgatggattctattatgattgttatgctaactctgaaaatgttcttaggagttcactggtgcccttttggaaacttgacccggctttcttatctttcgaggaaagggatttttcttcaattgcatatcatgatgggctgggacaacatgctatatttgcagaacatacagctggatcatctgctagtcatccttgcccgtatattgcctactttggaccaatacatccctccaccttcaattctggcttaactgtttccgaagcttctaatttcaaccactggaatggtccacctgtacctggagacatgccaacctgctacacattttctggcagtggatctttattaatcacaggcgggaacacagttcctctcatttctcttctggcaacagc

SEQ ID NO: 9095 - DNA, 429 bp, Glycine max
  Clone ID: jC-gmle01810036f12d1
aataggatacaatatataatatataaaaggtagaatgcataaactatcatacaactgagaactaaaaaggacaatttaaacacaaacaaaataaagcatacacacataataatgttcaatcctgtttgagaaaggaaacaatctggtcgatcaaaacctgagcattctcacaattcggtttgaacaaatgaaaaacatggacctcatccttcgtctccaccactttcgcaacaccagaccacccattcttctcaagcaactccttatagtacaaacccctgtccctcaccaaatccttctccgcaacacaaagaagcaatctttcacaagctaacttccccagctgaggatccttactcgggttaataatcgggtcatcggatccactctcactagggcacgcaaaccgccacaaatcgtgtatcttct

SEQ ID NO: 9096 - DNA, 439 bp, Glycine max
  Clone ID: jC-gmle01810036g01d1
ctcactagccggcctttcgttctttttttttttggactgccaatgttaaatttagtttattattcttgtattacaacattattactgccactcaccggctagacagcaatccaactctacaattgtattaaattttcatcacactttacaatatagctcgcaccaaaggatcatgatcattactcatacaatctacatggtatcacataaatgaagcaaaaaacttggacagactaatcctgtattttcaaacccctgaatctaaggaagaacctttagtgtgcacaccaagaactaccaatggcctcaggaaatggagtggcgtcgattcttatttggatttgtgcgacctttgggaaaaggcaagacaccatcggcacgcacaaaaggagaaagcctcccaagttttttggacactgaactcatgaatgatcttcga

SEQ ID NO: 9097 - DNA, 513 bp, Glycine max
  unsure at all n locations
  Clone ID: jC-gmle01810036g02d1
ntgccatgatgggtcccgggtcgacgggtcgactagccggcggccgccctttttttttttttttttttggactgccaatgttaaatttagtttattattcttgtattacaacattattactgccactcaccggctagacagcaatccaactctacaattatattaaattttcatcacactttacaatatagttcgcaccaaaggatcatgatcattactcatacaatctaaatggtatcacataaatgaagcaaaaaacttggaaagactaatcctgtattttcaaacccctgaatctaaggaagaacctttagtctgcacaccaagaactaccaatggcctcaggaaatggagtggcgtcgattcttatttggttttgtgcgacctttgggaaaaggcaagacaccatcggcacgcacaaaaggagaaagcctcccaagttttttggacactgaactcatgaatgatcttcgaggcaaaggaggcttatcagcagaaggtgaagcacttaca

SEQ ID NO: 9098 - DNA, 121 bp, Glycine max
  Clone ID: jC-gmle01810036g03d1
tttcgttcttttttttattattatctgtttatttatacgcttgaacaaggacttcgaattgcaaatttcagaatattacaactcgcggcgcttaccgaaaacctgatatccatatgcatgc

SEQ ID NO: 9099 - DNA, 306 bp, Glycine max
  Clone ID: jC-gmle01810036g04d1
gtgaactgataatggaaacacttgtattaaaactgcaaactacagcattcaagattatacaatacgctacacttttaaaaagccttatatctatatctatccactgcaaagctgtggccagatttaaagacttctgcaggcatatgtttgatacacgttaagcatatgacattctcccgcaattggactttgacaccgctctatataatccctggattgcagcaccacgtggagcagcttccataggtgaaatgttgagaattgctacgcccttgccgttgttctgggcttcatcggctgcaatgt

SEQ ID NO: 9100 - DNA, 437 bp, Glycine max
  Clone ID: jC-gmle01810036g05d1
atgccgagggacgagacgcgagctcgcctagctcacgtggcgcggcggccgccctttttttttttttttttttttttttttttttttttttttttttttttttttgtttttttgcgcttttttgtttttttttttttttttttttgtgtttcctttataaaaaaaacaggccgaagtagaaaaatgttttgcccgggaaaaaccctgccgtagcccggccaaatcgaaagggggtcgttcccctaaagccacctggggaaaaaccaagaggcccgcagggggcgcccccccaaaaaaacgggcaaccagagcggcttctgggaaacccccctggtcgggcgttttaaaccccgcggccgggggggtttctcgcagcgggacgggcacaaaagaaaggggcaaagcgcggggaacaaacaaatttttgccttccccct

SEQ ID NO: 9101 - DNA, 499 bp, Glycine max
  Clone ID: jC-gmle01810036g06d1
caaagtggtaatatactaatatatcataagttcaaaatccaaataaatccccaattgatacatcataagtttaaaataaactgacttgcaaaataaaaaatacaacacaatagaatagaacaagtagaacttagacattacataaaaaaacatagaactcaaacatgctttgtaagttcaatctttcagctatatataagtggcaatgtaaagctaatccattgaagatgagcttcatgacattacaagctcattggcaacgtgctccatggtagggcgagatcgtggactttcagtcaggcaggcaattgctatctttgcaattgatgccacctccttaacaataggctttgttggatgagggagacgtttgtccaagttctgcatcaatgccatattatcaagtgttgaggtcacgccattcgacgaagatgatagcaatgacgatgatgtaacatgaccagggtgctatcctaaaagtatttcccacgctaggacc

SEQ ID NO: 9102 - DNA, 411 bp, Glycine max
  unsure at all n locations
  Clone ID: jC-gmle01810036g07d1
acagttgccaccttgatctatatttccattgactccaaaaagtaaatcacagggacagattatggacacaagtctgatggaatttcacaacactttctcccttggattactccttaaatactccctacggttctcggcttatataatatatacacaaaagaaaaagtttttagctctaggacacaggtgtctcagattctattatttatttattggaatccaacaactgcctcgagcatatattcctcatcatgtcatgcctgagcaaacagttagccttcaagcatgatatgctgagcaaagatgcattcacagaagcaaactggaactcatnttgaatctgagctagcagaaaatgtagtgggagtactattgtcacgcagagagttctctccacgagcttccacattg

SEQ ID NO: 9103 - DNA, 467 bp, Glycine max
  Clone ID: jC-gmle01810036g08d1
gggaaaagcagcatgtcaacaggatttaatcaggtagcttccacatcaagtgatccacatcaagtgaggaaattttggccacagcatgcacatataaagctggcttgttaaagtcggtaaatttcgaatatatactaggagcaatgcattttttggttgggctacctaggactaactcatttaattcaagaaaaatggttgaatacagaaatttatcggttagctagaaccaacagcccaaaaaatgcctcaagtacaacccagaaaaaacaatagacttacaagactattatgacacaatctaaacagaaacttcacattattttaaattgggatcttccaccggcacccgaagcaaagaaagaatgctgcatccaaatcacacaagatattcttctacacaaaacttcgaagttcctacattgctcttcacaggggccaagttcatgctaaacttgtcaaaaact

SEQ ID NO: 9104 - DNA, 372 bp, Glycine max
  Clone ID: jC-gmle01810036g09d1
gaaactgattgcaagctatattgccccctctcagtagtcaatatcaacattgcaagattttcattcacaataaattaagacattgaattcttacaccaatatgtaactgaattgcaggatcgctaatttgccactcaaaactgagaaataatacattgttgcatgtatcaacttatctagttgacatgcatcactcacttattattttgcaaataccattacatatatcaagggcagtcatatttgaggtgtcatattcaaacttctcaacagcgtttttatccttttgcacaatatagcctgaaattttggactgttcatccaagttaggcacaatatttgtgacagaagcatacattgaaagtaccatct

SEQ ID NO: 9105 - DNA, 504 bp, Glycine max
  Clone ID: jC-gmle01810036g10a2
atcagaattgcccacttcacaaaaacttcaattcagacctcacctgcccgcctttcccgcaacttctttacccgcccacccctcctcgcagcctacaacatgccgcaatccccgcaaatcctcaaaatcgaagacctccccgcgtccgaagcaaaatgggtttcatttcaaaaaatctcctggcaagaccaaacaggccgcgagcgcgtatgggaagccgctgcgcgcaaaacgcggggcacatctggtgttgacgccgtcgctatcaacgctattatccggcacccgtcgcgaccaccgtctactatcatcattctgcagtaccgcccgccagtgaacgcggtatgtgtggagttacctgcaggactagtcgatgagaaagagagtccgggagacgcgagcgtgcgggaacttcacgaggagacgggatataaagggaaattggcatttatttcaccgacgatggtgagtgatccgggactaagcacggcgaacatgcagctc

SEQ ID NO: 9106 - DNA, 379 bp, Glycine max
  Clone ID: jC-gmle01810036g10d1
ggggctgaataagttcattcgcttgcattactacactatacacgctatcaagactatcttcaactaaacggcgaggtaggaacgttgccctgccgggagacgttatgtctactggaagcgcttttcagcggccttccagttgatgacgttccagatggccttgaagtactcggccttgcggttctggtagtcgaggtagtaggggggctcccaggcgtcaacacccaaaataggacggaattgaccgacgacggggtcctgggtggcatacgtcctgatctggatagctccagggtgcgtgtcctggaccaaccaagcccagatcgtgccctggacaccccgaagcgcaatggttgaacctttacttgaaggcatccag

SEQ ID NO: 9107 - DNA, 492 bp, Glycine max
  unsure at all n locations
  Clone ID: jC-gmle01810036g11a2
ggtgaagatagagttcaagcagtttgttctgaagaaaatgggtggctattctgtgcaatatatgacggctttaatggaagagatgcagctgactttctggctggtaccctgtatgaaaccatcatatcttactttaataagttaatttgggaattggagccgggttccatcaaagcttatgataaaggatgcttgggtggatccctgcaatataagttggatgatagtcttatttatcacgagaatcaatctctgtcgagatttaagggaataaacaattctaatcatggttgttttgcaaagtgtaatccttctactaagtcagaagtatcatgtgattcattttcacatggggtacttgatatccttcaacgtgccattagtcaggctgagaatgatttcttgtacatggttgagcaggaaatggaggaacgtcctgatttaagttctatgggatcttgggtttacttgngcttcttacgggaatgattt

SEQ ID NO: 9108 - DNA, 522 bp, Glycine max
  Clone ID: jC-gmle01810036g11d1
ggataaataacattttattacaaagtcctccatagcatacaataacaaagttacatggaaattcattaactaccactaacaataccgttatagccgggtcaaaatgctgaatttaaacaaaactaaagagatgaagcacatgtacatttatttttatttttatgaaacttagattgaaacaatacaacttaactatatgttgatgctttgccaagtgattctgcaatcttactggcaatacagtaagatgtagactgaatggttaccatggggttgacaccaactgcactaggcaaaacactcccatcacacacatacaagccttctgcttcccaagactcaccattctcattgagtgcaccttcttcttcagaggcacccattctacaacttgacatctgatgtgcagtggtaaacactgtccacacttcattccttgaccttggacccgcaactattgtcacagtgtcaagaaactcctgcaaatcttcctccttcatccccttacacttgctcgagccg

SEQ ID NO: 9109 - DNA, 525 bp, Glycine max
  Clone ID: jC-gmle01810036g12a2
ctcgagccgaatcggctcgaggttgttgtaaagctagccttgttgcagccatggccacccacgcggctctagcttctacaaggatccccactaacaccaagttcccatccaaggcttcacactctttcccaacccaatgcgcctcaaagagacttgaggtgacagaattctctgggctaagatccacttcatgtgtgacatatgctaacgatgctagagaatcttccttttttgatcttgtagcttcccaactcactcccaagaccaatggatcatcaactcctgtgaggggagagacagtggccaagttgaaggtggcaatcaatggtttcggacgcattggtagaaacttccttcgctgctggcacggccgaaaagactcaccccttgaggtcgttgttgtcaacgacagtggtggtgtcaagaatgcttcgcacctgcttaaatatgattccatgctgggaacttttaaagcagatgtgaaaatactggacaatgaaaccatcactggtgatggtaagccca

SEQ ID NO: 9110 - DNA, 405 bp, Glycine max
  Clone ID: jC-gmle01810036g12d1
gaaaaaaacgacgggtcttattaattatgataaataactgctaaacagacaggccttaggaccgatatgcatcagtctggatggaacattgaacatatgcgaatgacgggcaaacgtaagtgagaataaaaggagactgatatgagcacgcaacacaagggctgttgtataggatcggtctatccaacctctgtgataatttttatagctggtgatgggtgctagaaccataacgctactcttctttataataagagtggaaacctacgatgcccttgattgcttcaaaagatggcatgcttcccggaggaggaacagcgcctgctttaatagcagagagggcaacctgactcgctctgttgcaaaccccaatcaacgaaagtggataagtaaccagtctataac

SEQ ID NO: 9111 - DNA, 472 bp, Glycine max
  Clone ID: jC-gmle01810036h01d1
tgcctgatgtgacctattcccggtcgacagctcactagctcgcgcctttcttttttttttttttttttttttttttttttttttttttttttttttttttttttttttttttttttttttaggacaaaaggaaaaggccccaaattcaatttaaggggaccctttaacccaaaattttttgggaaaaccggcccatttgaaaaattttgtaaaaaccttttaaacttgggattttctttttgcacctaaaacattgggaattctaaaaaggttaccccccaggcccattccaaattttaacccttggatcagcacaacctttaggaaccgaaatttttacttgccaagtttgctttgcccccaattcaaaattgggagaaaggtcccctgttaaaagcatccccgttagcatttccaagggcaaccttgttcaagtacttgtcaaccaattggacttttttgacattttctt

SEQ ID NO: 9112 - DNA, 456 bp, Glycine max
  Clone ID: jC-gmle01810036h02d1
tgtcgtcctttttttttggggggaaaggaaactttattattatttcttttaaaagataaaaataattcttatatgtataaattagaatcccagtgtcatacgattattataggtacatccaaagcaaatagtaatatatatgacaatgtgagtaatgattatataaatagcatatacaacaaaaattcgtaggttactctataaaacggtgtattgtaattcttcagcaatttcctgaataaactggaatcccatttatttttctgttcaatattgctggttcttgcctgtatacaggttgaagattatcagggtaaacttgttcaccctttagcatcagcaattatttgctgcaaacatttcataacataggagatagaaggtcgtctccagtgttccgtggcccagcagagctcaatcaaggcagccacttgaggattcacatgccctggaatc

SEQ ID NO: 9113 - DNA, 512 bp, Glycine max
  unsure at all n locations
  Clone ID: jC-gmle01810036h03d1
aggacaaaaggaaaaggcaccaaattcaatttaagtggacactttaactcaaaattatagaggaagacagtccaatatgaaaaatatagtaaaatcatctcaaacttggcatcttctctttgcacctaagacattgagaattctaagaatgttacacgcaagtcccatcacaacttctagcacttggatcagcacaaccttcaggaacagaaatatttacttgccaagtttgctttgcctccaattcaagattggaagaaagttcccctgttaatagcatcctcgttagcatttccaagtgcagcctcgttcaagtacttgtcagccaattggactctcttgacattctcttggtcttggacaagcatgttaccatacgtcaagagcttctccagagtcatcttgggctgctcaaaggttggaggtccatcttttgagttcacaagcttcttcccaatgccgtcaacaccaacaccagaaatccacttnctcacttcgtcatcatatactct

SEQ ID NO: 9114 - DNA, 527 bp, Glycine max
  Clone ID: jC-gmle01810036h04d1
tgtcgtccttttttttttaatatcatatttctgtaactacttggatttaagaactggaacaagaatagagcttctccacagtcttgagaaacttggtcgacatgcaccgattgcaaaccatggtgcaataatccaactgttcagagaggctatgtcttatcctgtaaacaaaaccgctatgcaactgtctagatacttactaccaacatcagggttcaacaaaattattcccaataagcaaccatgattctaaacagtcacaagggaaagttcatagaagcctcggctacattaatgatcacaacttattgttgtgccaaaatacacctttgctctaggtactttgatctggctccacataaatacactctgttgtctatctccacattgccttgacaaatggactttcatcaaaccggtaatactcttccaaaatgggtcttatagactttgtagcctccattgcatgataatgtggcattgtggataacatggatgtgctacatgaatgtctgagatattatgga

SEQ ID NO: 9115 - DNA, 369 bp, Glycine max
  Clone ID: jC-gmle01810036h05d1
gtatcataaatgtgcacttttactactatatcataagttcaaaatccaaatgaatacccaattgatacatgataagttcaagattaactgacttgcaaaataaaaaattcaacacaatataataggacacagtgaacttagagcttacataaagcgtcatagaactgaaacatgctttgtaagctcaatctttcacctatatataagtggcaatgtagagctaatccattgaagatgagctacatgacattacaagctcattggcaacgtgctccatggtagggcgagatcggggactttcatgaacgcaggcaattgctatatctgcaattgatgccaactacttaacaataggctctgctggatgag

SEQ ID NO: 9116 - DNA, 358 bp, Glycine max
  Clone ID: jC-gmle01810036h06d1
agattgatagacataaatagaatgcattgatcacgtgtttggagagatgaggcatccactataccttactcatgacaattgagagggatccattacaggtcaatcatggggcatggtacaagtattagcatatatgctgataagccttacagtgaaacattgtagtatacaaaagctgtcaaggatacacactctatagtcaaaaaaatgcacgagagcgacgatatgaaccatgtcaaagcacttgcagacaatgtagaagaggctgagaccgtgcgcgacaagatagaaatacttgacaactataataattctcaaacataccgaaggtgcgtgcttcctgtttaacaagacctta

SEQ ID NO: 9117 - DNA, 404 bp, Glycine max
  Clone ID: jC-gmle01810036h07d1
gtatatgtaagatgcttgaatatattaagataacatttctcaggtataaatcaaccgtctacaaccataaaactaaagaaaacaattcaactcggtcccacaatcaaaacttgtaaaatacagaataagcggaggataaaaaaactaagaaacataacagttaaaatttggatcaagatcaagcatctgcaatggtcacctcaacctccacaccaggttcgatcgtgatagaggtaatctgcttaaccacatctggggaactgtaaaggtcaatcactctcttgtgcaccctaagttcaaatctgtcccatgtgttggtaccttcaccacagggtgatttcctggtagtgatgtgaaaaaccttagtgggcattctaacaggtcccttcaccctgagtctctta

SEQ ID NO: 9118 - DNA, 403 bp, Glycine max
  Clone ID: jC-gmle01810036h08d1
atatgtaagattcttgaatatattaagataacatttctcaggtataaatcaaccgtctacaaccataaaactaaagaaaacaattcaactcggtcccacaatcaaaacttgtaaaatacagaataagcggaggaaaaaaaaactaagaaacataacagttaaaatttggatcaagatcaagcatctgcaatggtcacctcaacctccacaccaggttcgatcgtgatagaggtaatctgcttaaccacatctggggaactgtagaggtcaatcactctcttgtgcaccctaagttcaaatctgtcccatgtgttggtaccttcaccacagggtgatttcctggtagtgatgtgaagaaccttagtgggcatcctaacaggtcccttcaccctgagtctcttat

SEQ ID NO: 9119 - DNA, 357 bp, Glycine max
  Clone ID: jC-gmle01810036h09d1
tgccgccctttttttttttttttttttctttttttttttttttttttttttttattctttttttttatttttttttttttttttttttatagggaacctcaaaagcgacttattccctttaagccacaggttaacaaacaaatgggacccattcaagggtttgaaaagcgaaaagcccccctgggcaatgccaccaaaatacccgttcccgtcggaaaaggaaaaccaaaaacggtgccccctttgaaggttcaaaacctaaattgaccccccctttcaaccccaacccaaatttctgcccaatgccagccccaacaagggagctatggagatgggacccacattccttgggggcca

SEQ ID NO: 9120 - DNA, 548 bp, Glycine max
  unsure at all n locations
  Clone ID: jC-gmle01810036h10a2
gaggaagcatatccctacacaggaaaagatggtgtctgcaaattctcagctgaaaatgttgctgttcaagtccttgactctgtgaatatcaccttgggtgctgaagatgaactaaaacatgcagttgcatttgttcggccagttagtgtggcctttcaggtggtgaatgggttccatttctacgagaatggagttttcactagtgacacttgtggtagcacttcccaggatgtgaaccatgccgttcttgctgttggatatggagttgaaaatggtgtcccatattggctcataaaaaattcatggggagaaagctggggtgaaaatggctacttcaagatggaattggggaagaacatgtgtggtgttgcaacttgtgcatcttatccaattgtggcataaattgcataacaatatggtccctggtgactaccaccttgtcatgcttcagagttagaagcgtattgctgatgccagtattgatgaatgatgattaaagataagtgtnattgtatgatgaaaatgctcctagttgggttgcatgatgt

SEQ ID NO: 9121 - DNA, 523 bp, Glycine max
  Clone ID: jC-gmle01810036h10d1
aaaaataatatattatcctttatttcaagtaatcgtatttaaaataatagaataaattccaccgaacctttataaaagttacagcaatctatatctacatctagttagttgttagcaaactgatgtgtctaattttcctttgtaaaaagaatgccgcctccaacgagtacattggtagagcatccctcgttattagctccggaactccctgttgataaaatataaatccgttcttttccttggctttctacataatacaccatagtctatatcattaaaatggttagatcctagtttcagacaagagtgagtctccctactactactactggtgctactaatcctactatctaactttctatgctgtaaagttgtgtttgaagacaaacgagaaacatctatccctcgcgagccttctgcatcaggagaaactgaatcatacctgtccatatcagataggggtgaatgtcgcaaattcaagggagaagatgaggatgatgatgatgtgtcagaatcagaattc

SEQ ID NO: 9122 - DNA, 510 bp, Glycine max
  Clone ID: jC-gmle01810036h11a2
attttatccaattgaaattttaaaaatgactgggataaacttaagaattcaattattgaaattgaataagtaaacaatttaattggattggtcgaatggtatcaaaaaaatggagtactaactcccatttcttatttattattgaattaaccgatcaacttgctttgttatcgaacatttctttttgatttcaaaaattttccggaaaaaatttgaatctatttttatatgcgaatcaatcctactacttctggtcctgaggtttctgcgcttgaaaaaaaaaaatctgggacgtatcgcccaaataattggtccggtactagatgtagcttttcccccaggtaagatgcctaatatttacaacgctctgatagttaagggtcgagatactgttggtcaacaaattaatgtgacttgagaagtacagcaattattaggaaataatcgaattagagctgtagctatgagtgcgacagaaggtctaatgagaggaaatggagtgattgacac

SEQ ID NO: 9123 - DNA, 386 bp, Glycine max
  Clone ID: jC-gmle01810036h11d1
aatctcaaaccatttgagtatatattattttatgtacttaacacttaacacagtacacatgcatatattgagcaacacatttcaaggaaacattctccaaaccatactgatctcccaaaataaactggaagatgattaacttaaagacacacatatatatataagccaaaagcatatatatatataagacaagtagaaggaatatgctcataattggttgcttatgcttcatccaaagagatggtggagcttgtttccatgagcttcctcatcttgctccttcgcttcctttctctcatgatgttcatggaaggcaaacccaccagatcccactgtagctgctgctgcaacctactcttctattttgtgcctgtgagcatgctctg

SEQ ID NO: 9124 - DNA, 578 bp, Glycine max
  unsure at all n locations
  Clone ID: jC-gmle01810036h12a2
ggaagatccagagatggcttcaaattggtcaagagaagaagatgacagaagcttgtaaaacacttgatcaattcatacatgcacgcatagcatctaagagagaggagctaagcaagtacaacgaaaatgaaatgggtgaagctcatcatgttgacttgttaacagctttgatgagagaaggaaaagcacatgacgataaatttctaagggatgctgtgttcaatctatttgtggctggaagagataccataacttcagctctcacgtggttcttttggcttgttgctacaaacccctcagttgaagccaagattctcgaagagatgaaagagaagcttgggaccaaagaaaagtcgcttggggttttaagcgtggaggaagtgaaaaggctggtttatctgcatggtgctatatgtgaagcgttgcgtctctttcctcctataccctntgagcgcaagcaagcaataagctctgacatgcttnctagtgggcatcgtgttaattccgggacaatgatnnatatttctttgtatgcaatgggaagatttgagnaacatggnggaaagattgttttgagt

SEQ ID NO: 9125 - DNA, 426 bp, Glycine max
  unsure at all n locations
  Clone ID: jC-gmle01810036h12d1
ggttgagtgtgattaattttttgtgtacaaattgatgctttgaagtggggacccaaggggatccagcttgttttagacaacactaccgacaggggcgcttgctcaacgagtgctgagaattaaactaactttgctccctatggacctaagtaaaaagacatttgcccaccttctttcctaatggaccccaaccggggggaagataagtaaccccgtccacccctggggaaaataacaacaaagagctgacctgcattgtctggtggctcccccaccctcattgatgatactgcaacagctcctgatggaattatcatcagaaaagcgtctttcaaggcaagcagcttagcagcttctatagacacggacttgtaacctgaataacttnatctaggagacttacatccagaactttgggaaagatac

SEQ ID NO: 9126 - DNA, 536 bp, Glycine max
  Clone ID: jC-gmle01810037a01a2
tgtgaaaccaaggtgattcctggtgaatatggtttcgttgcccagcttaatgagggtcgtcacctcaagaagagaccaactgagttccgagttgacaaggtccttcaaccctttgatgaaaacaaaattccacctttaccaaaaggttgggcaagaagaggtcctcttccaatttgaagctagcgaggatggacaagtccagttctttccaaatgctccagttgatgttgacaattctcccagctttgttgccatcaatgtcagtcctattgagtatgggcatgttttgctgattccgcgcattttcgagtgtttgcctcaaaggattgaccgtgagagcttcctccttgcacttcacatggcagtggaagctgataatccatattttcgattgggttacaacagtttgggtgcttttgcaaccattaaccatcttcacttccaggcttattatttggctctgcccttcccaattgagaaggcccccactaagaaaatggcaagtttaaatggtgggggtgaagatatctgaactg

SEQ ID NO: 9127 - DNA, 96 bp, Glycine max
  Clone ID: jC-gmle01810037a01d2
ataaatatacaaatatttattacaaagggaaaccagaatttcaggtagtgaagaattcatcctttagatctactacacgaacatacagaaatctga

SEQ ID NO: 9128 - DNA, 495 bp, Glycine max
  Clone ID: jC-gmle01810037a02a2
ctctctctctctctctctctcaatcgttcttcacgagagagagagacatggacgccgtcgttcaaaccagaggccttctctctctccccaccaaccccaaaaccagggtttcgcatcatctggattcattttaacggcctcaaacaccgttttctctctctaaaacccaaacccctctccgccccttttctctccgccgccggcgccaaatttcacccctttggcccaaagccccaaaatttattcatctgccgggccgaggccgctgctgccgcagatgggcctgcccagcccgccttcggggaagccgaggtcgccgaaaaacccaaacttttgggaatcgagatcaccaccttgaagaaaatcatccctctcggtttgatgttcttctgcatcctgttcaattacacgattctgagagacacaatggatgttctggttataactgccagagggagcagtgcggagattataccctttctaaaacgggggtga

SEQ ID NO: 9129 - DNA, 372 bp, Glycine max
  Clone ID: jC-gmle01810037a03a2
gctcctcttaccgtggaagaacagataataactatttatactggaacgaatggttatcttgattcattagaaattggacaggtaaggaaatttcttgttgagttacgtgcttacttaaacacgaatatacctttaattaaaagaaatcatatcttctaccaagacattcactggggaagcagaagtccttttgaaggaagctattcaagaacagatggaactctttttactacaggaacaggtagaaaaaaattgattaatcatttaataactttataatttcactttcaaattcttataattagtatcttttaatatctttttatttcatttgaatataatattaatatataaataaaatgaattcgaatg

SEQ ID NO: 9130 - DNA, 61 bp, Glycine max
  Clone ID: jC-gmle01810037a04a2
agatgaacgtactttctactttcagctttaatgcattgcttcttttattgacctgtctatc

SEQ ID NO: 9131 - DNA, 522 bp, Glycine max
  Clone ID: jC-gmle01810037a06a2
aatttctatagagctgaagaaattaatattaatcaatcaatcaaaatggggttgtgcaaggtttcatttcctgtattatgtgtgttggggttggtcatgattgtgagtcacgttgccaatgctcaaaactcaccagcagattacgtcaatgcacacatcgctgcaagatcagaggtgggtgttcaaaacttggcttgggatgacacggttgctgcttttgcacagaactatgctaatcaacgtaaaggtgattgtcaactgatccactctggtggtggtggccaatacggggagaatcttgctatgagcactggtgacctacgtggcacagatgcagtgaaattgtgggttgatgaaaagtctaactatgactacaattctaattcctgtggtgggggagagtgtctgcattacactcaagttgtttggagagactctgtgcgtcttggatgtgccaaagtagcatgtgataatggaggcactttcatcacttgcaactatgctcctcctggcaactatgtt

SEQ ID NO: 9132 - DNA, 641 bp, Glycine max
  Clone ID: jC-gmle01810037a07a2
aagagattgaagagacccagcagaccgacaaggacagatggaagggtcttgcctatgatatctcagacgaccaacaagacatcacaagaggaaagggtttggttgactcccttttccaagctccacaggatgctggaactcactatgcagtcatgagctcctacgagtacctcagcactggacttcgccagtacttggacaacaaaatggatggattctacattgctccagcttttatggacaagcttgttgttcacatctccaagaacttcatgaccctgcccaacatcaaggttcctctcattcttggtatctggggaggcaagggacaaggaaaatctttccaatgtgagcttgtctttgccaagatgggaatcaaccccatcatgatgagtgctggagagttggaaagtggaaatgcaggagagccagcaaaactgatcaggcagagataccgtgaagctgcagacatgatcaagaagggaaagatgtgcgctctcttatcaacgatcttgatgcaggagctggtcgtcttggtggaaccacacaatacactgtgaacaaccagatggtgaatgccactctcatgaacatttgctgattacccaccaatgtgcagcttccaggtatgtacaacaagg

SEQ ID NO: 9133 - DNA, 617 bp, Glycine max
  Clone ID: jC-gmle01810037a08a2
caagagagttatatactatgaaggtcctcataagttgtatgttggcaatctttccaggagtgcggggcctcaagacttgaaacaactttttggtagatttggtattgtagctagtgtaagggtgttgcaagatttgaggaaagggaatcgcagggtctatgcgtttgtctcttatcattcagagtcagaacgtgatgcagcaatgtcgctcaatggaacagaattttttggtcgtgtgctagtgattagagagggtgtagagagagaggactgagacctaactggatattcatattttccatagagattgttgcaattttgattgttttgggaggatgctctctgttctggcttttggggggcttataggctcctttgaccaaactaagcttgatgcaagaacattcctgagctagaaaatgtcagcaagcagagttgacctactttgaaaagtccattaaaattgcaatcagcaatgtctctgtatatttgaaatttgaaacatgcttttctgagtgacaaagtattcaacttaaggtcaagaacaagactgccagacctgataggaacttctcttcattgttttacatattataaatattaaattactgtgacag

SEQ ID NO: 9134 - DNA, 538 bp, Glycine max
  Clone ID: jC-gmle01810037a09a2
cttacatttggttggggactttatggacaggatcaacatgtaggtaaagtagaatatggtgggcaaaagcaatgtagatgttgaagatgaggttcactctaacaagggataatatctattctgttactttacaatatttatatttctattcgctctctttgttgttgcatgctaatgcttgttaattattctaaattaatgtcatcttgtgttggaaaagtgtgggcaaggaagtacagatgatgaactgagcccgagttgcgtatcttccttattgggtattcaaatagagggagttgctgcaggactgtggcatactgtgtgtacatctgtggatggtgatgtatatgcatttggtggaaaccagtttggacagctgggaactggtggtgatcaagctgagactataccgaggctcttggattgtccgagcttggaaaatgtgaatgtaaagaggatatcttgtggggctcgtcacactgctctaatagcagataatggaaaagtcttctgctggggatggaacaagtatggacag

SEQ ID NO: 9135 - DNA, 567 bp, Glycine max
  Clone ID: jC-gmle01810037a10a2
tgtggttgcattttatggtgtggtacagcatgggccaggaggaacaatggccactgtggcagaatatatggtggatggttctcttaggcatgtattacttcgcaaggataggtatcttgatcgtcgcaagaggctgataattgcaatggatgcagcttttggaatggaatatttgcactcaaaaaacattgtgcattttgacttaaaatgtgacaatttgctagtaaacttgaaagatcctttacgtccaatatgcaaggttggtgattttggcttatcaaaaattaaacgcaataccttggttactggtggtgtgcgtgggactctaccttggatggcaccagagctgctgaatggaagcagcaacaaggtctctgaaaaggttgatgtgttctcctttggcatagtattatgggaaattctgacgggtgaggagccatatgctaatatgcactatggtgcaattataggtgggattgtaaataacacattaaggccaatcatcccaagcaactgtgatcatgaatggagagcactaatggaacaatgttgggcacccaatcctgc

SEQ ID NO: 9136 - DNA, 602 bp, Glycine max
  Clone ID: jC-gmle01810037a11a2
gatagacatcacaactactgtcctgggcttcaaaatatccatgccaatcatgcttgccccaacagccatgcagaaaatggctcatcctgagggagaatatgcaacagcaagagctgcatctgctgctggaacaatcatgactttgtcttcatgggctacttcaagtgttgaagaggtagcttcaacaggacctggcattcgctttttccagctatatgtgtacaaggacaggaatgtggttgctcagcttgtgagaagagctgaaagggctggattcaaagccattgcccttactgttgataccccaagactaggacgcagagaagctgatatcaagaacagattcacactgccaccatttttgacattgaagaactttgaaggattggaccttggaaagatggacaaagctgatgactctggacttgcttcatatgttgccggtcaaattgatcgtactcttagctggaaggatgtgaagtggcttcaaacaatcaccaaactgccaattctggtgaagggtgtgctgactgctgaggacacaaggatagctgtacaaagtggtgcagctggtattatagtgtccaatcacggagctagac

SEQ ID NO: 9137 - DNA, 566 bp, Glycine max
  Clone ID: jC-gmle01810037a12a2
ctccataaagaattctccttcctatcaagtttctattcaaagtctccaatattcctaaacacttttcctaaacataaaagccttatttccaacatttcatcctctccgtgacgacaccatcattgtcgctcttcttcttctctagagtgaaacagccgccggagcctccgccgtcgcgacaaaagtaacgaatcacttctctgtccggcaaaggcggcacgcagtaattctccttaaaggaatcgtacgagccgacgaatttggtgttcatgtaattgcataagattccgtacctctcgtttttcgtgacccgcaggtttaggtttgcggaagagtccttgccactgtcctcggagatgtcgatgtgtactaggtttacccgacctgcgaaaccctcctcggttatggacaaagatacgagtgttttacctagtgagtatgttatgcacattcccacagagaactcgcccgtttcagtttcaccctctctggatttctgcatttgggtgttgatttccaacggagaaccaccggacttaagcctcacaacactcttatttcgttgc

SEQ ID NO: 9138 - DNA, 554 bp, Glycine max
  Clone ID: jC-gmle01810037b01a2
tggaagaccactgcttattgtcgcaaggttgctctaaaagttatggcaatggccacaggagagggaccagctgaagctaccccaactgaggtgccagagattgtcaagatctcttcaagaaacttgggaccaaagttgatgattaagtatgcagtgagttcactcgccttggttggggtgattgcattgtggggctcatttggattgatctcagcaattgataggcttcctttgattcctgggattcttgagattgtaggcattggatacactgggtggtttgtatacaagaacatagttttcaaacccgacagggaagctttggttcggaaagtaaaagaaacatacaatgaaatactcgggagcaactgaaagtgttaggaaatgctgagatgctgttgacacgaaatagccattatcttgctgcttcctattgaagatgtcatcatgcttcattttgtcgccataagcttttgaccatactttatcccaagtaatgtaatatgttctgaaaaaattggatctttttatatatcttgatccacttttaagac

SEQ ID NO: 9139 - DNA, 468 bp, Glycine max
  Clone ID: jC-gmle01810037b02a2
ggctcgagggaaaaatgatcgggtagccaaatcaccgttaacctaagaaagagaagtagtagcagtagcagtaggaagaggatgatcggcgtctgaaagatcaagcagtacagtaacgtcctcgacaagcccctcaccaagggcaagcaagaggttagtttgagcgcattcgcgttcttgttctcggagcttgttcagtacaaccaaacgcaggtcgacaatattggcgagcttgaacgaagactggaggatgctggatatgcggttggggctcgagttcttgagctgctttgccacagagataagggaaacagaagggagacacggctgttgggtattctttcttttgtacacagtacagtatggaaagtattatttggaaaggttgctgattcactggagaaaggaactgaacatgaagatgaatacatgatcagtgaaaaggagcttctcgtaaacaaattcatt

SEQ ID NO: 9140 - DNA, 485 bp, Glycine max
  Clone ID: jC-gmle01810037b03a2
ctagtttcttacaaggctctactctactgcttcaccttctgctctagaaaattcagcggtgatacatggcttcggctactctctctgtagccaaaccagcccttcaggcaaatgggaaaggcttctctgaattcttctggcctccgcagctcatcaggcttccttcccttttctagaaaatcttcagaggatttccattctgtcattgccttccagacctatgcagttggaagcagtggaggatacaagaagggtgtgacagaagcaaaactgaaggttgccataaacggatttggaaggattggaaggaacttcttgaggtgctggcacggacgcaaagactcccctcttgatgtcattgccatcaacgacaccggtggcgtgaaacaagcctctcaccttctcaagtacgattcgatcctcggaaccttcgatgctgatgtcaagcctgtaggcagcgacatcatctctgtcgatggaaagga

SEQ ID NO: 9141 - DNA, 564 bp, Glycine max
  unsure at all n locations
  Clone ID: jC-gmle01810037b04a2
ctagtttcttacaaggctctactctactgcttcaccttctgctctagaaaattcagtggtgatacatggcttcggctactctctctgtagccaaaccagcccttcaggcaaatgggaaaggcttctttgaattctctggcctccgcagctcatcaggcttccttcccttttctagaaaatcttcagaggatttccattctgtcattgccttccagacctatgcagttggaagcagtggaggatacaagaagggtgtgacagaagcaaaactgaaggttgccataaacggatttggaaggattggaaggaacttcttgaggtgctggcacggtcgcaaagactcccctcttgatgtcattgccatcaacgacaccggtggcgtgaaacaagcctctcaccttctcaagtacgattcgatcctcggaaccttcgatgctgatgtcaagcctgttggcagcgacatcatctctgtcgatggaaaggaaatcanagttgtctgtgaccggaaccctgccaaccttccttggaaggatttggggatagacttggtgattgaaggactgg

SEQ ID NO: 9142 - DNA, 535 bp, Glycine max
  Clone ID: jC-gmle01810037b07a2
aaacttccgaaagattctatccaattgtaatcataaaaatgactgggataaacttaagagttcaattattgaaattgactaagtacacaatttaattggattggaccaatggtatcaaaaaaatggacaactaactcccatttcctatttatgattgaattaaccgaccaactcgctttgatatcgcacatttctttttgattccaaaaattttccagaaaaacatagaatctatttttatctgcgaatcagtcctactacttctggtcctgaggtttctgcgcttgaaaaaaaaaatctgcgacgtatcgcccaaataattggaccggtactagatgtaactcttcccccaggtcagatgcctaatatttacaacgctctgatagataaagctcgagatactgttggacaacaaattaatgcgactcgtgaacgccagcaattattatgaaatcatcgaattagagctgtaactatgagtgcgacagaatgtctaatgagaggaatgtgagtgattgacacatgagctgcccta

SEQ ID NO: 9143 - DNA, 460 bp, Glycine max
  Clone ID: jC-gmle01810037b08a2
ctcctgccgaaagatactcactcaatctcaacataaagagagagagagagagctagagagagagagagatagatatgaccgattacacagagagattcgatgggaacggtgaaaaaaaagaactggacaactctcatcattagcctaattctgattgctttcctctacccacccgctacgatctcaccgatttcatatctagccatggatctcgcgattatgacagagattctttcataatctgagattaagagcggctgatagggagagacagggtgataaactgggaaaaggggaggtacagcgaatgggacaaatgtttggatcgggactcggtgagaatcttgcaccaggacagatatctggattttaccacactctggtagagggagcgcgatcttcttggtgagaacgaatgggaccgactcggggaccgccatcattgatatcgacacatgga

SEQ ID NO: 9144 - DNA, 593 bp, Glycine max
  Clone ID: jC-gmle01810037b09a2
tcttccctgtagatcacgttacattgcaatacctcaaattaactggacgaagtgatgagactgtggcaatgatagaggcctatctcagggcaaacaaattgtttatcgactataatgagcctcaaccagacagagtttattcatcctatctcgaattgaaccttgacgaagttgaaccatgcatctctggacccaagagacctcatgatcgggtgcctttgaaagaaatgaaggctgattggcatgcttgtctcgacaacaatgtgggattcaaggggtttgctataccaaaagatgtacaaggcaaagttgcaaaatttgatttccatgggcagccagcagagctcaagcatggaagtgttgtgattgctgcaatcacaagctgtacaaatacatcaaacccaagtgttatgcttggggctggtctcgtggcaaagaaggctcacgagctatgtttgcaggttaagccatgggtaaaaacaagtcttgctcctggctctggagttgttacaaaatatctactcaagagtggcctgcaaaagtatctaaatgaacagggtttcaatattggtggatttggctgtaccacatgt

SEQ ID NO: 9145 - DNA, 564 bp, Glycine max
  Clone ID: jC-gmle01810037b10a2
tgctaaactaagtttgttaataaaatgaagatttctggagcaaatgtgactgggtgtggggtttgccagtttgtgtatggattttaagaataatccaggatgaggcatctccgttattatgtgccggtataattaagccagcactccggcttggtcttgtagccagaatctgattctggctagaatagtagtttgctgaggctttcagaagcagtcaagaatcaagatagatttctgagaatcagatcaggtctactcattagtcatggatagcagcaagaagggagccctcatgagtaatgaaagcgcaaaagatttatcagtcatggttctgaaacagcatcagtacaagaagaaccaaccaaagttaagttctaccccgcaagagagacgtgatcaatcccactgccttatctgtaggggaaacaacagttgtcaaacagttcatgcaagaacaaaactgatgaatactttgattggaaaagggaagccacatgaagctcaggccgtcttcaacacttaactgtagaagggcatagccaactctcatacatacacaacttt

SEQ ID NO: 9146 - DNA, 572 bp, Glycine max
  Clone ID: jC-gmle01810037b12a2
tcgaaaatgatgaatgaagcggctggtgaaccctaattagttgtcggtgtttgttggaagagcacatctctgttttcttcgtcatcttcccctcccctccccaaccagagatgcgccccgcaacacatatgtactaaagctttcaacttttcagcatcctttcagatgttagcgaaaacccataacaaaggggatggatctaagtccctggctaagatactggcaaaatggaaagaatataatgcccagattgattccagcagtgatgcggataagccagttcgcaaagttcctgccaagggatcgaagaaggggtgcatgaaaggtaaagggggccctgagaactcgcggtgtaactacagaggtgttaggcaaaggacttggggaaagtgggttgctgaaatccgagagccaaacagaggcaataggctttggctaggtactttccccactgccattggagctgcccttgcatatgatgaagcggccagggcaatgtacggttcctgtgcccgtctcaactttcccaatgtttcagtttccagtttctctgaagaatctttcaaagattc

SEQ ID NO: 9147 - DNA, 471 bp, Glycine max
  Clone ID: jC-gmle01810037c01a2
ggctcgagtggtgggtttcctgggggcttcccaggggccgggggcatgccagggggcttcccaggggccgggggcatgcctgggggcttcccaggggctgggggcatgcctgggggattcccaggggctggtggcatgcctgggggattcccaggggctggtggcatgcctggaaacattgattttagcaaaatcttgagtgaccctgaactgatggcgtcatttggcgatccagagattatggctgctcttcaagatgttatgaagaaccctgctaattttgccaagcaccaatcaaatccaaaggtagctcctgtaattgcgaaaatgatgaccaaacttggaggtggtcccaagtgaatactgttagatgcttgtaagttatttgagacttcaactttccagccctctggcatcgggtatttaatgtgtattgcatttttaatcttaccgaaaatattaaacttttta

SEQ ID NO: 9148 - DNA, 405 bp, Glycine max
  Clone ID: jC-gmle01810037c02a2
gtacaggcgacacgcggctagaggttgctcttatcaagttgaatccgctattacactctggactttgtcatggtacacaggctagcctaaacgttaggttcttcataccacatacagtggaagatgaattgacaggtgctgcaagagagttctttgagaaccatggtattgaagcgagcccggagaagagagcggtttatctaactcggatgttcaagtggttcagtggggcttttggacgagagacagaaatatcgttgcggataatgaatctcttcggaaccaaataacgtcggtcttgtgacacatttcatgggagagagtggaccgaggcacatctgttcaccagaattatcattggtcaatgaattcttgattagttttgatgcaactactgattattac

SEQ ID NO: 9149 - DNA, 631 bp, Glycine max
  Clone ID: jC-gmle01810037c03a2
aaaaaatcttactttatgaatacatgccaaacaagagcttggactcatttatatttggtcagtatcacatattccatcatacaacttccctgaagtgctcttcaaccattacaatcataatttcactaaccttgttcttaatttgaaatgtgaaatgtatatcttgaaagacccgacacgaacttcactcctggattggccaatacgatttgagataatcgtaggcattgcgcgaggcatgttgtatcttcaccaagactccagattgagagtgattcatagagacctgaaaaccagcaacattcttctagatgaggagatgaatccaaagatatcagactttggtcttgccaaaatatttgggggaaaagaaactgaagcatgtacagggagagtaatgggaacctttggatacatggctccagagtatgccttggacggattcttttcaaccaaatccgacgttttcagctttggagtagtccttctagagattctcagtggaaaaaagaacactggattctatcagtccaagcaaatttctagccttttgggtcatgcatggaaagtatggacagagaaaagctactggatttatggacccaatcttttgtgaacatgcacgaaatga

SEQ ID NO: 9150 - DNA, 262 bp, Glycine max
  Clone ID: jC-gmle01810037c03d2
actaaaaagacagacaggaaatccaaaatttatccttaaaaataatacagaatactctaaattgttataaaatacaattaaaatatcattaattattttacacgtactctaacaatagctttaatcatgcactattgaccttcttgataactgctcttatactgacctatatctggtttgctcgaagaggaagctgtgctagaaagatgcttttacacaaaaaaggttggttgcgtgggaattggcatgcttgctgcctttt

SEQ ID NO: 9151 - DNA, 125 bp, Glycine max
  Clone ID: jC-gmle01810037c04a2
gataactttaatatggaccataactgaacgttttgatcgtatcgaaccgatgctataaagactggagctcatgcatctcatgagcgctctaaccatttggacgagcgcgtgctaagatgagacaa

SEQ ID NO: 9152 - DNA, 558 bp, Glycine max
  Clone ID: jC-gmle01810037c05a2
ggttcccagagccagagatcattcactacaacttggtcatgttaaggatttggcaaaagcttttatccaggttcttggtaatgagaaggccagcaaggaagtattcaacatctcgggagataagtatgtcacatttgatggattagcaagagcattggctaaagctggtgggttcccacagccagagatcaattcactacaaccctaaagaatttgattttgggaaaaagaaatcatttacattccgtgaccagcatttctttgcatcagttgagaaagcaaagagcgtgcttggattgcaacctgaatttggacttgtagagggtctagcagactcgtacaacctggactttggaagaggaacatatcggaaagaggctgatttctcaacagatgacataattcttggcaagagtcttgttagcgtataaactattctatttcaattttaagtatttcacttgtatttagaaagctgatcggatttgctacattatgaagtcgtgaaatattcatgagcttttcgttcagtattttcttcaacaaaaaataatggga

SEQ ID NO: 9153 - DNA, 287 bp, Glycine max
  Clone ID: jC-gmle01810037c06a2
gggagaggagcatggaattcaaacctcccaaattctatggagaaggattaaattgccttaagctgtggagagctgtaacgagattgggtggctatgataaggtgacttcatgtaaattatggcggcaagtgggagaggctttcaagccctcgaagacatgtaccactgtctcatgaactttttgggggatttatgaaaaggcacttcttgattatgaaagacataaaattaaaggtggtgagctgaatgtccctgttgcttctcatccagagcctataaatattgaa

SEQ ID NO: 9154 - DNA, 618 bp, Glycine max
  unsure at all n locations
  Clone ID: jC-gmle01810037c07a2
caacactctatgcacctctcatccgtgatgggcgtatggagaagttctactgggcaccaacaagggaagaccgcattggtgtttgcaccggaattttccgcactgatggtattcctgaacaggacattgtcaagctttgttgacacctttccctggccaatccattgatttctttggtgcactgagggccagagtatatgatgatgaagtgaggaagtggatttctggtgttggtgttgacagtgttgggaagaagcttgtgaactcaaaagatggacctccaacctttgagcagcccaagatgactctggagaagctcttgctgtatggtaacatgcttgtccaagaacaagagaatgtcaagagagtccaattggctgacaagtacttgaacgaggctgctcttggaaatgctaacgaggatgctattcagaggggaactttctttcagtcttgaattggaggcanagcaaacttggcaaagtaatatttctgttcgtgaaggttgttgtactaatccaagtgctagaagttgtgatggaacttgcgtgtaacattcttagcattctcaatgtcttangtgcaaagagaagatgctaagtttgagatgatcttact

SEQ ID NO: 9155 - DNA, 359 bp, Glycine max
  Clone ID: jC-gmle01810037c08a2
ctttcttctttgctagaattaatacagtttcaccaatatcatgtttgagaaagagtagcggcctggtgagccctgtatatgaatgacatccactgaggaataatcagtcacctggagacattggagcatgccttagggctcatctaaggaatcgattctcacttgccttacacaacaaaaacagcttagacctaggagaccttgctgatgtaatatgtgattgctgacatcaccgctctattcacaacgggaacggattgacaacatctcacatacaaaaagggtgtgggcagaccaatgcaccaccatgaatggagcttactgccaaaagatctttctggagcccactgcgggacata

SEQ ID NO: 9156 - DNA, 610 bp, Glycine max
  Clone ID: jC-gmle01810037c09a2
ccgccacctccgcctctgtcgctactccccacgccctctccgatcgtgtggcgcagttcggcgagggcgtggggaggttcttccgcgagctgcgggagatggcgcggtcggatccgcggaaggtggtgtttgcgggcgaaggcggagctgtcgctggcgctggtgtcgctgttcatttacatcaaggaggagcagctcagcaagtactccatctgggccattctcaccgtcgttgtcgtcttcgaattcagcgtaggtgcaactttgaacaaagggttcaatcgttctttgggcacaatttccgctggagggcttgcgctgggaattgctgagttggccgttttgtctggaaagttcgaggaacttatcattgtactatgcatatttatcgcaggattctgtgcaagctatgtgaagctactgcctgcaatgaagacatatgaatatggttttcgtgtgtttttgttgacattttgcattgtattggtatctggaagaactagcagggaatgtttctccacagccttttatagattaattcttattgcaattggtgctggcatatgtttgtttgtaaatattttcatataccccatctggtctggggagg

SEQ ID NO: 9157 - DNA, 630 bp, Glycine max
  Clone ID: jC-gmle01810037c10a2
ccgccacctccgcctctgtcgctactccccacgccctctccgatcgtgtggcgcagttcggcgagggcgtggggaggttcttccgcgagctgcgggagatggcgcggtcggatccgcggaaggtggtgtttgcggtaaagcggggctgtcgctggcgctggtgtcgctgttcatttacatcaaggaggagcagctcagcaagtactccatctgggccattctcaccgtcgttgtcgtcttcgaattcagcgtaggtgcaactttgaacaaagggttcaatcgttctttgggcacaatttccgctggagggcttgcgctgggaattgctgagttggccgttttgtctggaaagttcgaggaacttatcattggactatgcatatttatcgcaggattttgtgcaagctatgtgaagctactgcctgcaatgaagacatatgaatatggttttcgtgtgtttttgttgacattttgtattgtattggtatctggaagaactagcaaggaatttttctcccagccttttatagattaattcttattgcaattggtgctggcatatgtttggttgtaaatatttcatataccccatctggtctggggaggatctgcataaattggtggtgaaaa

SEQ ID NO: 9158 - DNA, 466 bp, Glycine max
  Clone ID: jC-gmle01810037c11a2
ctaaaacgctctcaaagagccgaattacctgaaagcttcatggggtttcctgaatttggctgtcaaaaaacccagggtgtgctcttggaatggttgtagtgctatggagtttgtttgtgttgttgcttggattggatagccatttgagtgaggtgtctggattacttcctcttggcttgtttttataatcttggtaaagatggttctgcatagctggatttccagctctcatattcttgttaatttcttgctgctgcttggttgtggcataacctacgggactgacactgatatcttctgcttgaaaagtatcaaagaatcccttgaagacccctataattatttgaagttctcttgggatttcaacaacaaaactgaagggtatatctgcaggtttaatggggttgagtgttggcaccctgacgagaacagggtcttgaatctcaaactgtcgaatatgggactc

SEQ ID NO: 9159 - DNA, 577 bp, Glycine max
  unsure at all n locations
  Clone ID: jC-gmle01810037c12a2
taacatcacacagcattagtatgtatcagcaacaagggtcagatccaacaaagcaatcaccggcaaccggttttccggtgagctatagcaattcaacaacgtattcgaccaacgaggcttcctacgctccagtccccacctccccagcccaaacctcttgtcgattggtccaccggcctctgtgactgcttctccgaatgtggaaactgttgcatgacgtgttggtgtccatgtgttacctttggccgagttgcagaaattgttgacaagggatccacatcatgtggtgctagtggggctctgtatacgctgatttgctgtgtcattggctgtggctgcctatactcttgcttctaccgccccaagatgagacgacagtatggtctaaagggaaatggttgttcggattgcttgactcattgcttctgcgagccctgcgccctctgtcaagaatatcgtgagcttcaacaccgtggatttgacatgattattgngtggcatggaaatgtcgagcaacgaagtcggngagtagccatgactgctacaacagcttcatcagtcgaaatggcatgagccg

SEQ ID NO: 9160 - DNA, 569 bp, Glycine max
  Clone ID: jC-gmle01810037d01a2
atttctttcttctgatacccccaattgatttgttgcaaagctcaatatggcttcagtcaagctcaacaccccgcagacgggcgagtatgagcagcccaccggccttttcatcaacaatgagttcgtgaaggctgtcgacggcaagacttttgaggtcatcaacccctccacagaagaggtcatcacctccgtgcaggaggcgaccgagaaggatgtcgacattgctgtcgccgctgcccgcaaggccttcaacggcccatggaggaaagaaactccagagaaccgcggacgtcttctcgtcaagctcgccgaccttttcgagaagaatgctgatctccttgccgctgttgaggctctcgacaacggaaaggcgttcggtatggcccgaagcgtcgatgttcctgccgctgctggttgcctgagatactacggaggttgggccgacaagattgagggcaaggtcgttgataccactcccgacacattcaactacatcaggaaggagcccatcggtgtttgcggacaaattaatccatgggaacttttccctgctcatgtgggcatggaag

SEQ ID NO: 9161 - DNA, 502 bp, Glycine max
  Clone ID: jC-gmle01810037d02a2
ctcgagccgaatcggctcgagctcagtgaaagagaatccgaggcgaagagaagagaaaaattaagatggaggggaaggagcaggatgtgtcgctgggagcgaacaagttcccggagagacagccgattgggacggcggcgcagagccaagacgacggcaaggactaccaggagccggcgccggcgccactggttgacccgacggagtttacgtcatggtccttttacagagcagggatagcagagtttgtggccacttttctgtttctatacatcactgtcttaaccgtcatgggagtcgccggggctaagtctaagtgcagtaccgttgggattcaaggaatcgcttgggccttcggtggcatgatctttcgcctcgtttactgcaccgctggcatctcagggggacacataaacccggcggtgacatttgggctgtttttggcgaggaaagtgtcgttgcccagggcgattttctacattgtaatgcaatgcttgggtgc

SEQ ID NO: 9162 - DNA, 583 bp, Glycine max
  unsure at all n locations
  Clone ID: jC-gmle01810037d03a2
gagaactttaaaaatgacctcgaaagaatgaattgtttggatcttaacgatgctataaacactgcagctcaagcatatcatgagcgctatgagcagttgaaagagcaagtgggaagaggagaaaagccaatctcaatcatggaccaaaaggcaattgatggtgataaagggaagaaagagcctgaagctcccaaggagaagaaaaaggctatttcgatctctaaagcagagggaaagcctaacaaacttgctcctccttctggttggaaaaatccatccgggacatcaggaggaatgcagtctgctcagaacgtgattaacctactcgatttcgacgatgaagttgagagttcgaatgggaataaacaagagcatgcccatgtccagcctcaaggacataacagcgatgttgaagtgagtcagacacacaacacaattacagtgaaaagcaccaatacggcttctatctctggagccgntgatctactggacttagactctgaagatggcagcaataatctcatgcaacctgttatggctgatgatgcctacaatagaaggtgcactaacaattcaggaactc

SEQ ID NO: 9163 - DNA, 551 bp, Glycine max
  Clone ID: jC-gmle01810037d04a2
tctgtctctcctctgtcctataactttacctttctatcctcaggaaccatgaagtagtagtgaagaactaatcagccacaaatccaaacgacccctttggcctaaagctccctccttttctccaatggcaacatgggttttatcagaatgtgggttaaggtctcttccaccagtgtttcccaggccaacaagacccatttcgtgccaaaagccttcaaagtttagatttttaagcataaacaagggggtggcagatctgaatctccaaccaagagggttcacatgttataactctagggagagaaagtgggaatcgggagtgagtgctccactgaaggttgccaccactgagggagaggaagaagagggaatcaatggggctaatggggttgttgaggaagtaccagaatttgaccctagtgcaccaccacccttcaaattggcagatattagagcttccattcctaaacactgttgggtgaaggacccttggaagtcatgagttatgtttgtagagatgtcattgtggtttttgggttggctgctgctgc

SEQ ID NO: 9164 - DNA, 282 bp, Glycine max
  Clone ID: jC-gmle01810037d05a2
cgacacacacaaactatgatggacataggatacttcacaactctgaccatatatttgtgaggaacagcggcttatgccagagagatactctaggacaatactatggccttggatctgaaacacgaggaacagcttcggatgttcctgatccttttgggatagttgtaggtgatcctgcagaatttcagagggatatgaagagaagtggatgggtaatattcacgcccttgatacgcgccgcgtggtggataggatggggtgcactgagtgtaggtgtgacct

SEQ ID NO: 9165 - DNA, 161 bp, Glycine max
  Clone ID: jC-gmle01810037d06a2
cgacacacacaaactatgatggacataggatacttcacaactctgaccatatatttgtgaggaacagcggcttatgccagagagatactctaggacaatactatggccttggatctgaaacacgaggaacagctacggatgttcctgatccttttgggata

SEQ ID NO: 9166 - DNA, 603 bp, Glycine max
  Clone ID: jC-gmle01810037d07a2
gcttttgcttgtgctgtgctggcctccatgacttccatcttgcttggctacgatattggtgtgatgagtggagcagccttgtacataaaaagggacctgaaagtgtcggatgtgcaaatcgagatcctgcttcggaatcatcaacctctactctctgataggctcatgcctcgccggcagaacctccgactggataggtcggcgttacacgattgttttcgccggcgccatcttctttgtcggagcacttctcatgggtttctcccccaactattcctttctcatgttcggccgtttcgttgccggcatcggcatcggctacgccctcatgatagcccccgtctacaccgccgaggtctccccggcctcctctcgtggcttcctcacatccttccccgaggtttttattaatggagggatattacttggatacatatcaaactatggattttcgaagctgacactgaaggtggtatggcgaatgatgcttggagtgggtgcaattccttcggtagtcctaacggtgggagtgttagcgatgcctgagtccccagggtgctagtgatgaggggtcgtttgggagaggcaagaaaagtgcttaac

SEQ ID NO: 9167 - DNA, 345 bp, Glycine max
  Clone ID: jC-gmle01810037d08a2
ctccaaccaattacaatctttctcaattctctatagacataaaaggtggaggaaatagagaggggatatctgtagacaggatcacacacatacaaaaaacttcatttagatgctttgaaaagagttgccacttgggaataacgcttatgtattaggttaacattgtgatgtctggaaatgcatctgtcacaacagtagatcgggcctcatagcaacaagacgtttttaacaaaccagcatctttccagaacgtttcgtcgcatgtaattgttctatatctgttccacttccctagtgaatagatctttccaatagatgtctcgtggacctaataattgtttcgaa

SEQ ID NO: 9168 - DNA, 517 bp, Glycine max
  Clone ID: jC-gmle01810037d09a2
ccgccacctccgcctctgtcgctactccccacgccctctccgatcgtgtggcgcagttcggcgagggcgtggggaggttcttccgcgagctgcgggagatggcgcggtcggatccgcggaaggtggtgtttgccgcgaatgcggagctgtcgctggcgctggtgtcgctgttcatttacatcaaggaggagcagctcagcaagtactccatctgggccattctcaccgtcgttgtcgtcttcgaattcagcgtaggtgcaactttgaacaaagggttcaatcgttctttgggcacaatttccgctggagggcttgcgctgggaattgctgagttggccgttttgtctggaaagttcgaggaacttatcattgtactatgcatatttatcgcaggattttgtgcaagctatgtgaagctactgcctgcaatgaagacatatgaatatggttttcgtgtgtttttgttgacattttgtattgtattggtatctggaagaactagcagggaatttttctc

SEQ ID NO: 9169 - DNA, 589 bp, Glycine max
  Clone ID: jC-gmle01810037d10a2
attttatatttaggttacgaggaaattatcatgaatccaattatttctgctgcttctgttattgctgctgggttggccgtagggcttgcttctattggacctggggttggtcaaggcactgctgcagggcaagctgtagaagggattgcacgacaaccggaggcagagggaaaaatacgaggtactttattgcttagtttggcttttatggaagctttaacaatttatggactggttgtagcattagcacttttatttgctaatccttttgtttaatcctaaaaaaatagaaatacatatccttttttccgtggacttgctttaccggtcttgctttttcgaattctatttatattaatatttcactcctataattctttatccgttcggacaagaacacaggggaaggactaattgaaaggtgaagaattcacatactgattcgccctctttcttctcttttttagtccaatgaccccccctttttttttaagataatttttctcaagtgttaaaacttgagagattttgcaatggatataagaactggtatctaattcgaataagtatcattcttttagggaatctt

SEQ ID NO: 9170 - DNA, 622 bp, Glycine max
  unsure at all n locations
  Clone ID: jC-gmle01810037d11a2
gtggtgccttatcgctgtggttttcatcgtcttccttctcttatatttctttttttttttgtcttcgccgcacgccgaaacaatggccggaaaaggagagggtcctgctatcggaatcgatctcggaaccacctactcttgtgttcgtgtgtggcaacatgaccgagttgaaatcatcgccaacgaccaagggaacagaacgacgccgtcttacgtcggcttcactgataccgagcgtctcatcggtgatgcggctaagaaccaagtcgccatgaaccccatcaacaccgtcttcgatgccaagaggttgattggtcgtagattcagtgactcctctgttcagagtgatatcaaattgtggccttttaagggtcattgctggtgctgctgacaagccaatgatcgtggttaactacaagggtgaagagaagcaatttgctgcagaagaaatctcttctatggtgctcatcaagatgcgtgagattgctgaggcttaccttggctttcacgtgaagaatgctngtgtcactgtccctgcttacttcaatgattctcagcgtcaagctaccaaggatgctggagtcattgctggtcttaatgtgatgcgaaatatcaatgagcc

SEQ ID NO: 9171 - DNA, 584 bp, Glycine max
  Clone ID: jC-gmle01810037d12a2
acactttccaatacaataatcactaactgaatattcgatcggagatgtctgccgccgccgaagaagctaacgctcccgccgtcgaaaagccggttgaggaggtgaaggcgccgaaccccgcgaaggagaagaaatcctaatgctccgaaggaaaagaagccaaaacaggccaaaacagcttcacatcctccatattttcagatgattaaggaggctttgatcgctttgaacgagaaaggaggatcgagtccttatgcgatagcgaagtacatggaggagaagcacaaggcggtgctccctgcgaatttcaagaagattctaggtctgcaactaaagaaccaagctgcgagagggaaactcgtgaagatcaaggcttcgtacaagttaaccgaagccgcgaagaaggagaacaccgccaaagtgacgaaggccaacgctgagaaaaaggaatcgcgtccaaaacgaagcataaccgcaaccgccgctgctccgaagaaaaccgaggcggttaaaagggcagcgaagaaggtatggccgaagaagacgaaaaagtgtcgacgcctgcgaagcccaagcagcccaag

SEQ ID NO: 9172 - DNA, 425 bp, Glycine max
  Clone ID: jC-gmle01810037e01a2
atgcaccaacaatgtcatggcctgtgcctggcacactcatgattgagcctactgagagtgaaagcaaggccgagttagacaggttctgtgatgctcttatttccattagacaagaaattgctgagaatgaaaaaggaaaggttgacattaacaacaatgtacttaagggcgcccctcatccaccatcactgctcatggctgatgcatggacaaaaccatactccagggaatatgcagccttcccagctccttggctccgtactgcaaagttctggcctaccacaggacgtgttgataatgtgtacggtgaccgcaacctcatttgcacccttcttccagcatcacaggctgttgaaaaacaagcagctgccacagcataatgtgttcaaatgacaactattttcatttcccggtggacataaact

SEQ ID NO: 9173 - DNA, 100 bp, Glycine max
  Clone ID: jC-gmle01810037e01d2
cctgtgattggatgaaacttaagagcagtggattatcatcattgtcacatatgatgaagcaatattcaacaagtgcaagaactgtttgaataggaataag

SEQ ID NO: 9174 - DNA, 93 bp, Glycine max
  Clone ID: jC-gmle01810037e03d2
tcctttttttttttttatacgaattatagcttctagggctgtattatatcggatcggggtaggaatcttcaatcgtccttaattctcaattca

SEQ ID NO: 9175 - DNA, 509 bp, Glycine max
  Clone ID: jC-gmle01810037e04a2
cttgatcaaaaatcaaattctgagagagattatttttttatgaaatctctttaaataattttttctttcttgttttccctccactccttttcatattaaaagctatgcaatttactctttttcatcggcaattttcaatattccttcttacaaatgtataaactacattaaccaatttgtgaatgaatgttatatcataaaaaatgctttatagataatataactcaatataggtgaagaagagtgtgttggtgaacatatatatctttgaataatattattcttactcatttttcccacatccctattttacaatttttttttcttttttactttcatcacattggttatcttattctacactcctctatctgtctctctcacacacacacattcagttgtaaaatgtgtattataaagttgtcctatgaacaacatttttctagcaagtaggtatagacgtatagttaatgtataaaactatgggatgagaggtctttgcttctgac

SEQ ID NO: 9176 - DNA, 575 bp, Glycine max
  Clone ID: jC-gmle01810037e05a2
cagatgctatcaaattggaaaatgacctgaactctaccatgcgggaggcatttagggaaaagttatggcactctccacactacaagagatatgttgacctcaaagatagcccactacaagagatatggcttaggcttcactcactgcatatccccccacacttctgcttcacttacttagacaccttgattgtggacggctgccattttttatcagatgcggtgttacccttctctttacttcctttattgcctaaattgaaaatattgaaagttcgaaactgtgattttgtgaaaatcatatttgatgtgacaactatgggaccactcccttttgccctggaggatttgattttagagcggctgccaaatctggagaatgtttggaattcaaatgttgaggttacgttcccccaagtcaagtcattggcactctgtgatctgccaaatctggagaatgtttggaattcaaatgttgagtttacgttcccccaagtcaagtcattggcactctgtgatctggcaagttaaagtatgacatcttgaagccatttacacatctagaaccacatgctc

SEQ ID NO: 9177 - DNA, 493 bp, Glycine max
  Clone ID: jC-gmle01810037e06a2
cggctcgagcggctcgagaaaaactttgaccggcaagaccatcacccttgaggtggaatcctccgacaccattgacaacgtaaaagctaagattcaagacaaggaagggatcccacctgaccagcagagacttatctttgcgggtaaacaacttgaggatggtcgcacccttgccgattacaacatccaaaaggaatcaacccttcatctcgtgcttcgcctcaggggtggcatgcaaatctttgtcaagactttgaccgggaagaccatcacccttgaggtggaatcctcggacaccattgataatgttaaggccaagatccaggacaaagagggcatccccccagatcagcagaggctgatttttgccggtaaacaacttgaggatggaagaacccttgctgattacaacattcagaaggaatccacccttcacttggtgcttcgtttgagaagtggtatgcaaattttcgttaaaactttgaccggaaag

SEQ ID NO: 9178 - DNA, 627 bp, Glycine max
  unsure at all n locations
  Clone ID: jC-gmle01810037e07a2
cgcgcgctgaagtttgctaggttcatgagcaggttcgggaagagttaccgaagcgaggaagagatgagggagaggtacgagatattctcgcaaaacctcaggttcatccgctcccacaacaagaaccgcttgccctacactctctctgttaatcattttgctgattggacttgggaggagttcaaaagacacagactaggcgctgcccaaaattgctctgccactcttaacggcaaccacaagctcactgatgctgttcttcctcccacgaaagactggaggaaagaaggaatagtgagtgatgttaaagatcaaggcagctgcggatcatgctggacattcagcacaactggggctttagaagcagcctatgcacaagcatttgggaagagtatctctctttctgagcagcagctagtggattgtgctggccgtttcaacaactttggctgtaatggtgggttgccatcacaagcctttgagtacatcaaatacaatggaggacttgagacagaggaagcatacccctacactggaaaagatggtgtatgcanattctcagctgaaaatgttgcccgtcaagtcattgactcggtcaatatcaccttgggtgctgagaatgaatta

SEQ ID NO: 9179 - DNA, 464 bp, Glycine max
  Clone ID: jC-gmle01810037e08a2
gtgacacgctcagagtccaaacccgcacctgtacaacagcctgtcgtacaacaagccgttgtacaacctcctcccaccctttcccccgtcaaaagttttgacccctttttcgacccccaaccggtcacccagagggtggtccaacccccccctcagcctgtgtacaaccccccaccccaacaatattaccccccacagcccattgtacagcagccagttgtacagcaacaacaaccggggcctaaccccttcttccagcccgcagtgaccaatggccccagccaatgggtcacttttggaaacgccgtaccgttcgcgccttctcagggaactttggcgggaaattacgtcaaccagccacaagtacagcagaggccaaacaccgacctcgccggtctcgtatccctcgtcaagacacagacaaaagacgaagtcgagaggagaaaaaaagacgaagacggaag

SEQ ID NO: 9180 - DNA, 547 bp, Glycine max
  Clone ID: jC-gmle01810037e09a2
gtggaaatgatcctgagaccacaaatttctgcatgttcatcaatgaagtctacacggtgctcagcgatcccgtccaacgcatgatttatgatgaaattcatggctactctttaacttcaatcaatcctttcttggatgattcaagcccaagggatcatgcctttgttgatgaattcagctgcataggctgcaaaaattgtgccaatgtagcccctggtgtgtttgcaattgaggaagactttggaagagccagagcatacaaccaatgtggggaccctgaattagttcaacaggcgattgacagttgccctgttagctgcattcattggacatcttctgcacagctatcattactggaagatgagatgcgccgtgtagaaagagtcaatgttgccctaatggtatcaggaatgggaacagcatcaattgatgttttcagaatggcaagttccagatgggaaaagaggcagtcaaaagtcttggcaaaagcaaaattgagaatgatgagggaagaaggttctgataagaaaaattcgtactgggacaa

SEQ ID NO: 9181 - DNA, 568 bp, Glycine max
  Clone ID: jC-gmle01810037e10a2
agatggggttagaagggaaggaaacgccgtcgtttatgagggattttctcgataagtgtggtggctgcgccgttattgacggtggttttgccactgaacttgaaaggcatggggcggacctcaatgacgaactctggagtgccaaatgccttattagctccccacatcttgtccgaagggttcacctagattacctcgatgcaggagcaaacataatattaacagcatcttatcaggccactattcaaggttttgaggccaaagggttctctagagaagaaggtgaaactatgcttagaagaagtgtggagattgcacgtgaggcacgagaaatttattatgataggtgcaccaaagattcttctgactttatgagagatgaaagatataggaaacgtcccattttaattgcagcttctgtgggaagctatggagcgtatttggctgatggctctgaatatgttggggactatggtgatgcagttactgtccagacactgaaagattttcacagggaaagagtaaagattcttgttgaggctggtgctgacttaatagcctttgaaac

SEQ ID NO: 9182 - DNA, 620 bp, Glycine max
  Clone ID: jC-gmle01810037e11a2
atataatctagagggtgcagagtagattaaaaaagataaagatgatcgatatgaaattgatgatgatgttgctgatgtggggctctgaatcccaaggccgattactgtctatcccaacaaaacctaacccagatgatgctcctgcctctgctcgttggctcgtctccctcaatttctggggagtcttgaatactatctcatctgatttgggtggagctccctttgggaatgtggtatcatatagtgatggactacctaacgaaagcactggaatcccatacttttacttgacaactctagacccgacagcaagaaatgcactgcaagatgataaagcttcattcacggtcagtgaataccctcttgggacctgtggcaggagagacccaatgaaccctacttgttccaaaatttctctaactggaaagctgaaattggttgatgaaaagtccaaggaagccgaatttgctcgaaatgccttgttttccaagcatccagagatgaaagactggcctgaggatcacaactttcaagtcttcaaattagaaaatgaaaatatatttctaattaattggttgggtggccccaaaccactcacagtggaacagtacttacatccc

SEQ ID NO: 9183 - DNA, 587 bp, Glycine max
  Clone ID: jC-gmle01810037e12a2
ctcgagccggctcgagagagaatacctcattgtttattctggacaaatttgatgggaactctgaactggttgcagagttggttaccgttaatgggtttaaagcagcttatgcgattaaggatggtgcagaaagaccgcgaggatggaagagtagtggtcttccttggatagaaccacggaaaacattgagttttgacaatctgacagatgctatatctgaagcaataggagataccactgatggcgtggcagttactcttggggttgctgcagctgctgctggacttagtctattagctttttctgagatagaatcaatcctccaggttgttggatcagctgcgctcattcagtttgcaagcaagaagcttttgtttgctgaggaccgagagcaaactgtgaaacaacttggtgagttcttgaacaccaaggttgcccccaaagaacttgttgatgaaataaaggatattggaaaggctcttctaccatcctctaccgataataaggctcttcctgctccggcagagaaaagttcagagcttgctacagctgatagcactgtacagagagcagtagctactcccgag

SEQ ID NO: 9184 - DNA, 573 bp, Glycine max
  Clone ID: jC-gmle01810037f02a2
attattttcaattcggaattcttattaattactttaaaccgaataaatcttgataattgaaaaattaagtcataatttattggttgattatatcattaactatttctttattttatatttaggttacgaggaaattattcatgaatccaattatttctgctgcttctgttattgctgctgggttggccgtagggcttgcttctattggacctggggttggtcaaggcactgctgcagggcaagctgtagaagggattgcacgacaaccggaggcagagggaaaaatacgaggtactttattgcttagtttggcttttatggaagctttaacaatttatggactggttgtagcattagcacttttatttgctaatccttttgtttaatcctaaaaaaatagaaatacatatcctttgttccgtggacttgctttaccggtcttgctttttcgattctatttatattaatatttcactcctataattcttaatccgttcggacaagaacacaggggaaggactaattgaaaggtgaaagattcacatactgattcgccctctttcttcttttttt

SEQ ID NO: 9185 - DNA, 553 bp, Glycine max
  Clone ID: jC-gmle01810037f03a2
caccgaatgatttggatcagaaaagcattgaagatcagcatgaagaggacaattgtaaggaagttaggtgcattgagttagaagacgtaattacaaacacgcataaacactcaaactcagcagatttaaagatcacatacatacactgattcgaatgcatcatctcctagtgcaaacacagctatcttaggattggttgtagttgataatagagacaaggaaaaagtagtagatttgagttcttctctgtcaaaggaagacaaaagattgaacaatatgcaccaagattttgttcttccctctccaaaagaaatttctgtgtgcatgacaggaaacagtacaagtagttctagaaccttgaagttgagccgaagtagaagttgtatagcaagtatcatgaggaatttatcttcagattggtttgaagatgaagacgtaattcagaacactcctccaatagggaatgaaaaagccttccctggaagaccagaggggcttccgaagaacatttatgcactaaattacaatgccaatgcagagaggctttcatgta

SEQ ID NO: 9186 - DNA, 100 bp, Glycine max
  Clone ID: jC-gmle01810037f03d2
ctcaggacagactaacaaacctgcaaccttataaccgggcacggttaacaattaatagcaaccagactttgaagcctacatcatcattgatctccttttt

SEQ ID NO: 9187 - DNA, 473 bp, Glycine max
  Clone ID: jC-gmle01810037f04a2
caaaggttgctgtaggagataagattgcagtagtgctaagtgctaacacctgcagtgaacaatggcctctgcatcagcatctctgctcaagtcttcacttgttcttgacaagtctgagtgggtgaagggacaaacccttcgccaaccttctgcatcagttgtgagatgcaaccccaccaccccatcaggcctcaccatcagagctggttcctatgctgatgagctcgttaagaccgcgaaaacagtggcttcaccagggaggggtattttggccatggatgagtccaatgctacctgtgggaagcgtttggcttcaattgggctagagaacactgaagctaaccgccaggcataccgtaccctcctcgtgacagttccaggccttggtcagtacatctctggtgccattctctttgaggaaacactctaccaatccacaactgatggcaggaagattgttgacgtgctgcttg

SEQ ID NO: 9188 - DNA, 209 bp, Glycine max
  Clone ID: jC-gmle01810037f05a2
caagtccagcgactgcaactaatccttagactgcaagactattaccctacctgaggaagccgttgacaccatagacaacgccaacattcctattaaagacagggataagatccctacctactgctcaaagacttatttttgcagcaaaacaactgatgatggactcacctcttgggatgacgacacttccacggactaaccctttgata

SEQ ID NO: 9189 - DNA, 569 bp, Glycine max
  unsure at all n locations
  Clone ID: jC-gmle01810037f06a2
cggctcgagcggctcgagaaaaactttgaccggcaagaccatcacccttgaggtggaatcctccgacaccattgacaacgtaaaagctaagattcaagacaaggaagggatcccacctgaccagcagagacttatctttgcgggtaaacaacttgaggatggtcgcacccttgccgattacaacatccaaaaggaatcaaccctccatctcgtgcttcgcctcaggggtggcatgcaaatctttgtcaagactttgaccgggaagaccatcacccttgaggtggaatcctcggacaccattgataatgttaaggccaagatccaggacaaagagggcatccccccagatcagcagaggctgatttttgccggtaaacaacttgaggatggaagaacccttgctgattacaacattcagaaggaatccacccttcacttggtgcttcgtttgagaggtggtatgcanattttcgttaaaactttgaccggaaagccataaccttggagggggagagttcagataccatagacaatgtgaaagctaagattcaggacagggaggtatccca

SEQ ID NO: 9190 - DNA, 493 bp, Glycine max
  Clone ID: jC-gmle01810037f07a2
cagtacgagactttactgcgaagccacacatgattgtcattcgatccttcgacgtcaacaagcctggtgctgaaatcgatgagctcaagggtggtgttgctggtggcagtatcctgactggtgtactaaagctgggagacgagattgagatcaggcccggtattgtctcaaaggacagcgccggaaagattcagtgcaagcccattttctcaagagtagtgtctctattcgctgagcacaacgatttgaagttcgctgttccaggaggactgattggtgtcggtacacgcgttgaccctaccttgtgtcgtgcggatcgtctcgtcggtttcgttcttggtctccgtggacatcttcctaacatctacactgagctcgaagtcaactacttccttctccgaagattgcttggtgtcaagactgcagactgcaagcatgccaaggtagccaagcttgcaagaatgaagttttgatggtcaacatcggatcaact

SEQ ID NO: 9191 - DNA, 537 bp, Glycine max
  Clone ID: jC-gmle01810037f08a2
cagtacgagactttactgcgaagccacacatgattgtcattcgatccttcgacgtcaacaagcctggtgctgaaatcgatgagctcaagggtggtgttgctggtggcagtatcctgactggtgtactaaagctgggagacgagattgagatcaggcccggtattgtctcaaaggacagcgccggaaagattcagtgcaagcccattttctcaagagtagtgtctctattcgctgagcacaacgatttgaagttcgctgttccaggaggactgattggtgtcggtacacgcgttgaccctaccttgtgtcgtgcggatcgtctcgtcggtttcgttcttggtctccgtggacatcttcctaacatctacactgagctcgaagtcaactacttccttctccgaagattgcttggtgtcaagactgcagacggcaagcatgccaaggtagccaagcttgcaaagaatgaagttttgatggtcaacatcggatcaactgctaccggtgccaaggttgtggctgtcaaggctgacgctgctc

SEQ ID NO: 9192 - DNA, 624 bp, Glycine max
  unsure at all n locations
  Clone ID: jC-gmle01810037f10a2
gccaaatgacggatccgcgtcgaacagagatcatgattgtattagcaatgctacgcctactgctactgctactgctgctgctactaacactactcctactgcagctactactaatgataactgtaacagtggttatggaaataacataccgagtatgatcgaggagacggtgaggagttgtttgtcgccggtgttgaaggagttgatggcaggggccatgggaggaggagcgtttggagcgagagggttttcgttgaacttgaaccctatgcctttgatgaattggagttttggcggtggggaaatggtggatgagaaatggaggaaacaacagatattggagttggaagtgtactcaaagcggttggagctggttcaggatcagatcaaggctgctatggaggagttgcggtcacacggaggaggttgatcaaatcttttagtttgcttttggttttgtagtgagtgattggagttcttcttcctcttcatcatcaatggntggttcattctcatagcttaagtgttagctagtagtaactagtaagtgggaactagcggttttcttttcgatttagctttcgctgattcggggggcacttgttctttaaaatataatgtttt

SEQ ID NO: 9193 - DNA, 599 bp, Glycine max
  Clone ID: jC-gmle01810037f11a2
ggaaccctagatctgaaacttaccttgactccgctctgccacggctgagaaaatagcgacgcggaaacacgctcgtcttcacgaccctgcgatccagcgcggcgtgtcctgcgattcctctctgcgacgagtcttcgcagggtgaagaattgcgaggccagccgccggtgaagaatcgcgcgattcgtctggaaatcgcgattcaagcacgattcacccccgatacatagattcaaccacgattcaggaacaaaaacgagacaaccttcgattcgtattggtagaagctggcatcgtatcgaatcgcgcgatacgtatcggtagaagctggtatcgtatcgaatcgtgcgatacgtatcgtgaatcgtacgatactaactaccgtggtctgaaccattttaatttgtggatcaaataacaaggctcctcggttagaattcctgatcggtcatggctgattttcagacctctacccacagagccaagtggattttctctcctcaacagctggttgagaaatatagagctggccatcagagagccaaacaaatctagagaagtgtggagccacactaatggaagtagatgttgatggatcg

SEQ ID NO: 9194 - DNA, 615 bp, Glycine max
  Clone ID: jC-gmle01810037f12a2
ggaaccctagatctgaaacttaccttgactccgctctgccacggctgagaaaatagcgacgcggaaacacgctcgtcttcacgaccctgcgatccagcgcggcgtgtcctgcgattcctctctccgacgagtctccgcagggtgaagaattgcgaggccagccgccggtgaagaatcgcgcgattcgtctggaaatcgcgattcaagcacgattcacccccgatacatagattcaaccacgattcaggaacaaaaacgagacaaccttcgattcgtattggtagaagctggcatcgtatcgaatcgtgcgatacgtatcggtagaagctggtatcgtatcgaatcgtgcgatacgtatcgtgaatcgtacgatactaactaccgtggtctgaaccattttaatttgtggatcaaataacaaggctcctcggttagaattcctgatcggtcatggctgattttcagacctctacccacagagccaagtggattttctctcctcacagctggttgagaaatatagagctgccaatcagagagccaaacatattctagagaagtgtggagcaacactaatggaagtagatgttgatggatcgttgtcatatccctgac

SEQ ID NO: 9195 - DNA, 619 bp, Glycine max
  unsure at all n locations
  Clone ID: jC-gmle01810037g01a2
atgtggctagtgtagtcaactacttccaatttctccaaagagccagggcactatgtaatcttctgggaaataagtggtgaagcaagtgaagaagtgcttggtggatgctgcaactgtttggacaagtcttttgttgatgctggctacacaagctcacgcaaagtcaactgcataggtgccctcgaactccgagttgttcggagaggaacattccagaagatacttgagcattcccttgcactaggagctgctgtgagccagttcaagacatcaagatgtgtaggccctacaaacaccaaagtgttgcaaatattgaatgaaaatgttgtcaagaactatctcagtactgccttcaattgagttgtaagaatagctatatctatctatctatctatatatagatatatttatatagttccctttctcaattgaataaaaactttgccttgtttttctacttttcatttccatgcttaattctttctgttctgcctgacacagtccaagcacacctctgttggtaccttcattatcatcacctcctcttgcacccttttacaatataataagcgatgggtgaccataatggataggaaatcacatgttcgttnggaactga

SEQ ID NO: 9196 - DNA, 195 bp, Glycine max
  Clone ID: jC-gmle01810037g01d2
cagttccaaacttacatgtggatttctatccattatgggcaaccgtcgcttattatattgtaaaagggtgcatgaggaggtgattactatttaattatctttattatgtgttctcatgcattgtactagtatctacaattatcattttttcttcgtctttttctgctaataaactcttccacttttattttttta

SEQ ID NO: 9197 - DNA, 583 bp, Glycine max
  Clone ID: jC-gmle01810037g02a2
cgcggcttcaaccttgtagttattctctttcttcttttttagctatccctctcttgaaaaatctagatctcgttcttccttgatctacgttacgcttttagtgaccggatctgtatggatctgaaccagatctacacgccgatggtggttttggcctggtctttcatagatctgatgcatggaggctcagatctactgtacagaggtgtgcgattcatgttcgtctctcttttggaatctgtttcgtagaaagtcgtttggtcttccatgtcgcatggctcttgaggtattttttttgcagatactgtagataatcgatgagaagaacgcagatccagccgcttccgcttgttcgatcgctacagacgcttgtatcggattattcatgattgattcataagcagcatgtcttcctccggctatagttgttgcagatctcggatgttgtaaaattagtgtatgatgtgaagctatgggctggaaaatgtggatgtaggagatttcgggacgaaaggccttcaaacgcttcgtcgtttgtgttactgagtcctgagtgatcttggcttccgacctttgccatgac

SEQ ID NO: 9198 - DNA, 113 bp, Glycine max
  Clone ID: jC-gmle01810037g02d2
aaatcaaatcaataaatatattgatcaactaaatctaccggtaggaaaatttcattttttacttgtaaagagcccaaattatcttcaccttaatatttgtagaggtcgtcagt

SEQ ID NO: 9199 - DNA, 512 bp, Glycine max
  Clone ID: jC-gmle01810037g03a2
tttctctctcaccattctcttcttcttctccctttcttagattctcccttttttctctttaccctccgccatggctgaggataaggagatgtcttcctctgtcaccaatggcgatgattctctcactggccacatcatatctacaactattggaggcaaaaatggggaacccaaacagactattagttacatggctgaacgggttgtaggaactggatcatttggaattgttttccaggcaaaatgtttggaaactggggaagcagtggccattaaaaaggttttacaagacagaagatacaagaatcgtgaactacagttaatgcgtgttttggatcatccaaatgtcatctctctgaagcattgtttcttttcaactacaagtacagatgagctttttcttaatttggtgatggaatatgttccagagtccatgtatagagtcattaagcactataccaatgctaatcaaagaatgccaatcatctatgtaaaactttacatgtaccaga

SEQ ID NO: 9200 - DNA, 186 bp, Glycine max
  Clone ID: jC-gmle01810037g03d2
aatgaaaacagataagatagcacaattacatttgacaaggaaaggaactggtcaacaacattacaaattaggcacattacattaataagaggaaaccgtacccaacatcctcgcattaaaactctgtgtggaccctaccctccttccagctaaggttttggtttttcccttacagaagctatttaa

SEQ ID NO: 9201 - DNA, 527 bp, Glycine max
  Clone ID: jC-gmle01810037g04a2
tttctctctcaccattctcttcttcttctccctttcttagattctcccttttttctctttaccctccgccatggctgaggataaggagatgtcttcctctgtcaccaatggcgatgattctctcactggccacatcatatctacaactattggaggcaaaaatggggaacccaaacagactattagttacatggctgaacgggttgtaggaactggatcatttggaattgttttccaggcaaaatgtttggaaactggggaagcagtggccattaaaaaggttttacaagacagaagatacaagaatcgtgaactacagttaatgcgtgttttggatcatccaaatgtcatctctctgaagcattgtttcttttcaactacaagtacagatgagctttttcttaatttggtgatggaatatgttccagagtccatgtatagagtcattaagcactataccaatgctaatcaaagaatgccaatcatctatgtaaaactttacatgtaccagattttcaggggattgg

SEQ ID NO: 9202 - DNA, 141 bp, Glycine max
  Clone ID: jC-gmle01810037g05a2
acaccacttgctgaacggatgagctttattacagatcacgacgtcttttacactgatgcgaccgttggaggacttatgaatgctacatgtgggaatgtttctgagctcataatagcaaaatttgcccttagcaggaacaaa

SEQ ID NO: 9203 - DNA, 461 bp, Glycine max
  unsure at all n locations
  Clone ID: jC-gmle01810037g06a2
attgatatgattgagaagatccttaataatgggtatgcctacattgttgatggggatgtgtactttaatgtagaaaaatttccagaatatgggaaactatctagtcgagatctagaagataatcgagctggtgagagggttgcagttgattctagaaagaaaaatcctgctgattttgctctttggaagtctgcaaagccaggggagccatttttggaaagtccctggggtcctggaagacctgggtggcatattgaatgcagtgccatgagtgcagcttatcttggttactcttttgatattcatggtggaagaatcgaccttgtgttttctcaccatgagaatggaattgctcanagntgtgctgcatgtaagaaaagtgatataagtatatggatgcacaatggttttgtcaccattgactttgggaaaatgtcaaaatttttggggaattttttcac

SEQ ID NO: 9204 - DNA, 620 bp, Glycine max
  unsure at all n locations
  Clone ID: jC-gmle01810037g08a2
ccctacgtttgaagagggaaatgaatctggttgtcttgataagaaagatttggacacttgtggccctgaatctgaatcacatccagtgagcaagatgcagtcttctggagacatttgtgaagttattaggactcataagaggaatgattttccagtttctttagacaacaaaaacagtttagatcagttgaagcagtttgatgtaattgataattgctcagatcaccactttattcaagaggggaaaggattgacatcatctcagtttaaaaagggttgggtgaagaaggtacaacaagaatggagcatcctggagaaaaatcttcctggtgcacacttcttcttatttattttgagccatattattttatatgctttggagcatatattgttatacaatggctaaaatcaggctacaaaattatatatgcattgcagcagttgcaggtccctgtccatatagccctgtcaatatatggacagggatcgatccttgtttaattcctttagccattttaatctggaagganaacacttgagattatattagagacaagtttcaattttaggaagaccaggacccttatattgtgtagattactgcaatatgggaattaaat

SEQ ID NO: 9205 - DNA, 578 bp, Glycine max
  unsure at all n locations
  Clone ID: jC-gmle01810037g09a2
gcaagttcatggctaaacaacgttgcagtcaggaaagccatccatgctgaatcggaaaaagtggcgggtccgtgggaattatgttcgagtaggatagagtaccatcacaatgctggaagcatgattccttaccacaagaacctaaccaggcttggctatagggcacttattttcagtggcgaccatgatatgtgtgtaccgtttactggaagtgaggcttggacacgatctttgggttacaagattgtggatgaatggaggccatggaactcaaataaccaagttgctgggtacttgcaagcgtacgagaacaacctcaccttcctcacaatcaagggagctgggcacaccgtgccggaatataagccgcgggaggcgttggatttttacagccgttggttggaaagggaagctaatataaggaaatgcatcatgtggcgtaaaataaaacatacatgatcgattattaatgaatagaaagtacagcagtgtattttagctttttcgttagtgatttatcctttacattaaatcatatatgcattgggatttcgcanaagggaaaccaaaaagaaatc

SEQ ID NO: 9206 - DNA, 575 bp, Glycine max
  Clone ID: jC-gmle01810037g10a2
agagggtgcaactttggaccctgttacaccaagccaatagccaagttattgcttgctatcagaactcagaagaggttgaatcatggagatgaaagtaaaggagaggattggtacagtattctgtaaactgtagttgattgaataatatgatagtacctatttataaaacaagagtgatagtcttctaattgctcacctaactaacatctaagttctaactaactcttctaaaagaatgacagctgcatgagttgagtatgttctctgatactatatataactataaattgcctaattacatgtataatttccacttatttatcaatgaaacggcatgcagaaaaaataaaagaccacagtaatgcagatgtaacggtagacgaatatcatcggtataaggaggatattggaatcatgaagtacatgaatttggatgcttatagattctccattgcttggtctagggtactaccaaaaggaaagcttagtgcaggtgtaaacaaagaaggaataaactactacaacaacctcatcaatgagctactggctaatggtctgcaaccatatgtgaccct

SEQ ID NO: 9207 - DNA, 587 bp, Glycine max
  unsure at all n locations
  Clone ID: jC-gmle01810037g11a2
actccttcaattcccacctcaaccaattccatccaatgctttatttcacttttagaaacaaagtttcagtttaccctgaatcagttggattttccaaactttcaccaactgggtacacttgaaaacagttcaggggctcctgattcagcataaagttttaatttttcgttcatttattatatgtgtcttcaattcaacttggatttgtatacaagttccctctttgttcatttatttgggtacagtaagaaatagtctcttttaagctttcagtatatataaattttaagaatgatacatacagttgattctgttgattattacttgatcaatccctagtggcataagttctagtttttttttttatccgtgggaatcgaagacattgtcagaggatatgggttctagtttttggtttgttttaaatgttatttatttacatgaaattatgaactgttattttgctatgtaagatttgtgaatatgcttaaaacataggcattgatgtcatttatatgaactattattttttttgtaagatttgtgaatatggttaaaacatangtattgatgtcctttatatgaac

SEQ ID NO: 9208 - DNA, 624 bp, Glycine max
  unsure at all n locations
  Clone ID: jC-gmle01810037g12a2
caatcccatggcccaaacaatggctggggcaaatgcgtccaattcgtcatctcttgaatgccctaatggtgattctgaatccaatgaagagggccagtctttgtccaatagcgggatgaatgaggaagatgatgatgccactaaggattcgaagcctgctgctcctaatgaaacaggaaattatgagcaagaacagcaagggatgcagcatactgcatcatctccaccatccatgcgtgaagaatgccttactcagacaccacagctggaacttgttggtcattcaattgcatgttctacaaatccttaccaggatccgtattatgggggcatgatggcagcttatggtcaccaacagttgggatatgctccttttataggaatgcctcatgccagaatgcctttgccccttgagatggctcaagaacctgtgtatgtgaatgccaaacagtaccaaggaattctgaggcgaagacaggctcgtgctaaagctgagcttgaaagggagctcataaaatctagaaagggcataacatgctcacaaacattggacagaatttggttctactattactagtgtncttcttaacgttttgggatcctctattgggctatatgctgaca

SEQ ID NO: 9209 - DNA, 576 bp, Glycine max
  unsure at all n locations
  Clone ID: jC-gmle01810037h01a2
tgtcactctcattctcgatggcggcgaagatttcattggcaattggtttgagaactctcttcactgttttgggacttcttatgcttgctatcgttctttacactgtcttcaccgatggtcttccgtttcgcaaagaacttctcacaccgtggatggcagcaactttgattgatttttatatcaacgttgtagctttggcggtctggattgcttacaaggaatcaaacttaatcagctcaattctgtggattgttttgcttgtctgccttggaagcatcactacatctgcctatattgttgtgcaatttctgaagctgtcatctcaagaatcttcacaggatcctatgtattatgttctattgcggaatccaaataagaacggcacagcacctcaaagaaagcattcatctatcgtgactctaagaataattttcagcattntgggtgttgtcatgcttggaactttggtgtacactcttatcaccgatggttctcctttccgtatagagcttataactncgtggttggcagcaacattagttgacttctacttcaacgttgtggctctagcagtct

SEQ ID NO: 9210 - DNA, 112 bp, Glycine max
  Clone ID: jC-gmle01810037h01d2
catgcaagtaacaaatgaatagatacttatgatctgaacattttctctgattcggaagtcttaaacttcataatcaattacagtgtttgctctatacatatgaaatattctt

SEQ ID NO: 9211 - DNA, 562 bp, Glycine max
  Clone ID: jC-gmle01810037h02a2
actcaatattctcaacaacacactactttccttcttccaataatgtcttcttcattctctgttcgttttcttgctcctccatcatcatgcttccccagctctcggcccaagacatggctctgcgccgccaccaccccaacggtggctccggcaactgcctcctcggaggtggaggcttcaaggttggagcctagagtggaggagagagatgggttctgggttttgaaggaagagtacaggggaggcatcagccctcaggaaaaagtgaagcttgagaaagaccccatgaagctctttatggaaggtgggattgaggacttggctaagatgtcccttgaggaaattgagagctccaagcacaccaaggatgatattgatgttagactcaagtggcttggcctttttcataggagaaagcagcattatggtagatttatgatgaggctgaagcttccagatggggtgacaacaagtgcccaaacacgatatttggctagtgtgatcaggaagtacggaaaagatgggtgtgctgatgtaacaacgaggcagaattggcaaattc

SEQ ID NO: 9212 - DNA, 504 bp, Glycine max
  Clone ID: jC-gmle01810037h02d2
gagaaatatatagcatacatctttgaagaaataaagtgtaacttagggactagcaaagaatgtacatgtcttatccaaaagtgtacatgcatatgatataatgcatgtctcatgatcatccctttctcttttatgtagaggacactgatacttttgttcagggacaatggtagatttagtaaagaaactaaaattgccaatggccataaagtttaatcttccccttcctctctattcctttggacagcaccaaaatgctttactagtatgtctaccacaataggcaccaagttcttgcaaggcacacccttcttatacacctcagctagatgtgaatcactttcaattctcccttccaggaaaatattcacaccttagtggtcttaccatttttatccctagccatgcaccccatgaaaccaatggtcagaactggcacctggtcacaatgtgttggggcaaccagtccaatgctttttcacagcctagacacaacacttgcct

SEQ ID NO: 9213 - DNA, 417 bp, Glycine max
  Clone ID: jC-gmle01810037h03a2
gtggcttatcacatgacaatctgagcattggctctcgttcttagaattctttgattgcggaggatgttacacacacagggctatagcaattggcatctcacgcacatgagccatgggtataggagactggcagaccgaggttgttgaccgaggaaaagtggcatctctcgacacgctacagcatgtactccacgtatgggctcgagacgtgtagcctagctcttgcctacatgctttcatgtggcacactcagacgcctgctgttaaaattgcaagatgtgattgtaggggccagagctttacatactcatacgtgccatggcagctgccatcatagccgagtgctgttgctttagcagacctaggcttcttatatagagctgacgaggacttacaccacttgctgaacgagtgagc

SEQ ID NO: 9214 - DNA, 216 bp, Glycine max
  Clone ID: jC-gmle01810037h03d2
gccgccctttttttttttttttaaacaagcattaatagaatttttatttctcacacaataaatacaagagattctgcaaactgaaaaagggatttcttactaaagcaaactcaaacaagaacaacttccactcatttgtcatctaccgtagtagaacaggatcaaaagtagctttttgatataacacacttttgtattattttgaacattttgcac

SEQ ID NO: 9215 - DNA, 513 bp, Glycine max
  Clone ID: jC-gmle01810037h04a2
aaggcttatcacatcacaatttgtgcattgcctcgtgtcctttttcttctttgcttgccaaaaatcttacacacacaggtatctagcaaatgggttctcaccagcaagaaccatggctattggagaatgggaaaccgagggtgttgaccaaagagaataggcatggccgttctgcacacagcatgtcctccacgtctttgcgcaagaagtctagccgaactcttgtctccaagcttccatgtgccacactcagaagcatccttttaaatttgcaagaggttattcttggtaccaagctttccattctcatccctgccattccagctgccatcattgccgagtgctatggctttggaagaccttggatttttatattgagcttacttggacttacaccacttgctgaacgtgtgagcttcatcacagaacaagttgccttttacactggtcccacagtcggaggacttctgaatgctacatgtgggaatgttactgagctcataataacatatt

SEQ ID NO: 9216 - DNA, 548 bp, Glycine max
  unsure at all n locations
  Clone ID: jC-gmle01810037h05a2
ttccattcaacccatggttgggaactagtgattggtttcgtctataaagattttggatttgctcaaaatgatcaaattatatctggtcttgtttccacttttccagtcattttagatacaattttaaaatattggatttttcgttatttaaatcgcgtatctccatcacttgtagtgatttatcattcaatgaatgattgactgacaaaatgattcacttatcaaattttaatttaaagttttttagcttaaaagaaaataactttgctttttcccttctttttaacccccttaaatgaaaaaaggggttccccgacttggatagggaactatgcgagtgacctacctaatcttattgtagaaattttcaggatcaatgattagaccatgcaaactagaaatgctttttcttgtataaagggaagggatactcgatccatttccatatcgatcatgatatatataataattcgagcacccatttcagacgcatatncaattttgcacagcagggttatgaaaatccccgagaagcaaccggtcgtatt

SEQ ID NO: 9217 - DNA, 321 bp, Glycine max
  Clone ID: jC-gmle01810037h06a2
ttccattcaacccatggttgggaactagtgattggtttcgtctataaagattttggatttgctcaaaatgatcaaattatatctggtcttgtttccacttttccagtcattttagatacaattttaaaatattggatttttcgttatttaaatcgcgtatctccatcacttgtagtgatttatcattcaatgaatgattgactgacaaaatgattcacttatcaaattttaatttaaagttttttagctaaaaagaaaattactttggtttttcccttctttttaacccccttaaatgaaaaaagggggtcccccactttg

SEQ ID NO: 9218 - DNA, 525 bp, Glycine max
  Clone ID: jC-gmle01810037h07a2
cagcgagtgagcgagcgagcgaggtagggttttcgttgttcccccgtctttgaattcagttcgcgacgatggggtccatccccgatccaggcgagttgagcgagttgactcagccgagcttcgacgagttccagcgccaaacttccctcatgaccagctgcaccctcctctggaaggagctctccgaccacttctcctccctcgagcaagacctcaaccacaaatccgaagccctcaaacgcaagattcgcaccctcgacaacactacttccgactccctccgcctcctcgatcgccgcgaaacctccctcgacgccacgctccagatcgccctccgcacgctcgacacgcgccgcaccgctgccctctccgccctcctcaccgacgccgacgacatcatcaacagctcccccgacggtgaggtcgacgacaccaccggcctcatcctcaaactcaagtccttctgcctccgcatggacgcattcgggttcttcgccttcgtcagcgccaagaagaggagctcga

SEQ ID NO: 9219 - DNA, 544 bp, Glycine max
  Clone ID: jC-gmle01810037h08a2
gcgactggaattgatcgaggattgctgaagcatgataagacgggcaagattgtgctggttcctcagccatcggattcaccgaacgatccgtacaattggccaagatggaagaaggagatgttcacggttgtgatcgcctatggatgcggttgcgttggagccattggtcctcttccgggttcagcattcgtgcctctcgctgagcaattcggcgttccgctgcagcgattcgtactgggttgcaacggctcatgtatcgctgctatcgccgtgggctcactcacctggaattctcttgctgtaaaattcggcaagcggccggtatatatcgtgaccacgcttggtttggccgtgtcatgcttctgggccgccgaagccaaaagctttggatctttggcagcagcgagaacgatccaaggactctgcatggctccatttgaagcgcttatccctgcttctgttgcggatatttggcacgtccatgaacgtgggtttaggatggccatgttcaatcttggtgtgcttggtggaattaatctggctg

SEQ ID NO: 9220 - DNA, 462 bp, Glycine max
  Clone ID: jC-gmle01810037h09a2
gaagcaacatgcaaagagcacccagatactgtcggtggtgcaatgatgagtggactacgagaggctgatcgcatgattgacatattgagcagagggaatgattatattgcagacgtggaggcattggcagctgctcggtgacagttagacactgaacgggatgaagttagggatataataaagagacttgatgcattagagctctctaacataatgtacaagaactctttagaaggtgctcacattttaacccgggaagctttgctgagggaaatgatctttaatacgaaaaccactgctgggcgcttacatgtggacaaacaaatgctaactcttgctgaaggatactttgaagtcttttgctggaaagaaagaggggctagccattctcaattcatggatgctggactcaatggggaaggatggtacccaactcttgaggcactgtttgcgtcttgttgt

SEQ ID NO: 9221 - DNA, 577 bp, Glycine max
  Clone ID: jC-gmle01810037h10a2
agagggtgcaactttggaccctgttacaccaagccaatagccaagttattgcttgctatcagaactcagaagaggttgaatcatggagatgaaagtaaaggagaggattggtacagtattctgtaaactgtagttgattgaataatatgatagtacctatttataaaacaagagtgatagtcttctaattgctcacctaactaacatctaagttctaactaactcttctaaaagaatgacagctgcatgagttgagtatgttctctgatactatatataactataaattgcctaattacatgtataatttccacttatttatcaatgaaacggcatgcagaaaaaataaaagaccacagtaatgcagatgtaacggtagacgaatatcatcggtataaggaggatattggaatcatgaagtacatgaatttggatgcttatagattctccattgcttggtctagggtactaccaaaaggaaagcttagtgcaggtgtaaacaaagaatgataaactactacaacaacctcatcaatgagctactggctaatggtctgcaaccatatgtgaccctttt

SEQ ID NO: 9222 - DNA, 570 bp, Glycine max
  Clone ID: jC-gmle01810037h11a2
caatcccatggcccaaacaatggctggggcaaatgcgtccaattcgtcatctcttgaatgccctaatggtgattctgaatccaatgaagagggccagtctttgtccaatagcgggatgaatgaggaagatgatgatgccactaaggattcgaagcctgctgctcctaatgaaacaggaaattatgagcaagaacagcaagggatgcagcatactgcatcatctccaccatccatgcgtgaagaatgccttactcagacaccacagctggaacttgttggtcattcaattgcatgttctacaaatccttaccaggatccgtattatgggggcatgatggcagcttatggtcaccaacagttgggatatgctccttttataggaatgcctcatgccagaatgcctttgccccttgagatggctcaagaacctgtgtatgtgaatgccaaacagtaccaaagaattctgaggcgaagacaggctcgtgcttaagctgagcttgaagggagctcataaatctagaagggcatacatgctcacaaacatggacagaattggtttactatactagt

SEQ ID NO: 9223 - DNA, 624 bp, Glycine max
  unsure at all n locations
  Clone ID: jC-gmle01810037h12a2
tgaagcatggcttcatgtagcgcacctccctccctgatgctggtccaccctcaagacctctctcgctctcagagaaccacattctctctctatcctctcctttttaagccctccaaatgcctccacatagagcccaaaatccaggacttgccatgccctcgtcgccgctttggctgcagaggtccaagtgcctctaactgtccacgacacggaggaggacgacggttctgatggctccaccgccacctccgccgccaccaccaccaccaccaccaccaagcctaagaaaggcaaggccgcgttgcctcttaagagggacaggacgagatctaagaggttcttggaaattcaacaattgagggagcgtaagaaagagtatgacttgaagacagcaatatctttggttaaagaaacagctaaaaccaagtttgtagaaacagtagaagcccatttccgcctcaacattgaccctaaatataacgatcaacaattaagagcaacagtaaatcttcctaagggaaccgggaaacccgttaagtggctgttcttactcaggcgaanaattcgatgaagcaaaaatggccgagctgatttggtgggtgggaggatctgatagacagataa

SEQ ID NO: 9224 - DNA, 393 bp, Glycine max
  Clone ID: jC-gmle01810038a01d1
cccaggggcacaaatttttttcggtatattgaaggccatatttcaactattttactccagctgggcatactaaatacacaggaagacggtaaaaatttttatactcaccaggattacaatccaggaggcaaccttaatgcctaaatatattacaaattttggcacccatatgttacaaaattgggcgtctacctgggtatgaataaaataaaactattttagctttcactattaaatctgagggcttaacatttacaggttagttactctcggcagaaacaaaatttcaaaaataatatttctttacagcactataaccagtatcattagttcctcgctgaaaatgggaataatagcatgcccctgacctgacctttcagtctgtcatatgac

SEQ ID NO: 9225 - DNA, 336 bp, Glycine max
  Clone ID: jC-gmle01810038a02d1
cccaggggcacaaatttttttcggtttattgaaggtcatatttaaactattttactccagctgggcatactaaatacacaggaagacggtaaaaatatttttcctcaccaggattacaatccaggaggcacccttaatgcctaaatatattacaaatattggcaaccatatgttacaaaatggggcgtctacctgggtatgaataaaattaaactattttagcttttactattaaatctgatggcttaacattaacaggttagttactctgggcagaaacaaaatgtcagatataatatttctttacagcactataaccagaatcattagttcctc

SEQ ID NO: 9226 - DNA, 367 bp, Glycine max
  Clone ID: jC-gmle01810038a03d1
gtgttgagtgatatctattttttgcttaaaaattgaagcttgaagtgtcaatccaaatgttttttttcgtacacaagaccacactaccgacaggggtgcccgcttaacgagtactcagggagacccaacacaaacaaaaaatgcgccttagtcaaaagccataagaacagcttctggcctaacggattcaaactggggggaagataagtaacgccccccacagctggggaaaatcacaccattgggcggcccagaaagtgctggggggggcccacctttatcgctactgttgaagcaccccctgacgaaattcccaggaaaaaaccttctttcacggcgagcagaagagcagtttctatagccaccc

SEQ ID NO: 9227 - DNA, 361 bp, Glycine max
  Clone ID: jC-gmle01810038a04d1
attctgttgtttattttttataggattaattgttctatttttacttatttttactaatttattcacgaacctacattgtgctctgagggttaacaggggcccacatcacagaattagaggcatgggatcgtctctggcggtctattggcctgaatatttgttggcatactacgagaatgctgggaaatccactggatattcattctaccaagaggaccctcattcgtgaaagatgtgagttgcgccgaaactgatttggacaagatatcacggtgcgggcagaaaagggccctggggaacgtaaagacagaagccgtggaattatcacttgcaactgagctgtaggaaagattggattctt

SEQ ID NO: 9228 - DNA, 418 bp, Glycine max
  Clone ID: jC-gmle01810038a05d1
cgaagaattggcaaatcttaaatgcaagttgatgcctttgaagtcctctgattcatccctagcatgattacaattacggtcacggggtcatggtacttccttttccttccagctggaatattcatcaactgttccatgctcagaccggcaaaaaaagctgctttggctccaagctgttttatgagaaactttggtggatcaccaaaaggatggttcaagatttaagactccacaagctttactgcctcatgattgctggagaaggcaaataaaccatcactcgcctactataacaaattgatcggaatttgagattctgtggacattcaatgacgggttaatggatatgtatggtgggcttttaagaacgcgaactccaaggattcccatcaaaggctgattcagacttttgtttttc

SEQ ID NO: 9229 - DNA, 455 bp, Glycine max
  unsure at all n locations
  Clone ID: jC-gmle01810038a06d1
acacataaatgcatttttctttggctatacttgggtgggcataattgtattccagaagggacacaaattcatgggggtcgcgaaattggaaccccaccgaggaaacatttttttttataaaatggacaaaaaccttttaaactatattgcgttcaaacactgagaaatgacatgttgaacatacccgccttcactgaacttgagaaaccgggaatataaggggggcactcaaacactacttagaatctctcgctcttttagtcgaggccggaatatcgaaaggcgcgcttggagacggacgagacttgctgttctgggagaaagcccgagactaaaccgggggtggtccctgtcaataagactttccggctggtgcacttctgtcagtggggtgattccctcacgagcaatggngattgtgaatccactttgcttgctatgagcagcatttagtg

SEQ ID NO: 9230 - DNA, 337 bp, Glycine max
  Clone ID: jC-gmle01810038a08d1
ctactaaacaatttggttatccctgtctttatacatgataaattttaaaggtataccaaaacctgtactagttactggggctttgttgttcaagtggacaagacaccccaaaatgccctattttcttcctctgttcaaggccaactaaccctagttccctctagttaatgcaaaaaacaacagaaatttttgactgtatgcaaaacttttaccccgcaccagaattcccgcctgcgatgacaatggggaatcaattgattctgcctgcttgacatgcccgcaagatctaaagacgcgcctccgactgaatcaaagaaaaattgcttcgtgctgatgg

SEQ ID NO: 9231 - DNA, 495 bp, Glycine max
  Clone ID: jC-gmle01810038a09d1
aaacttagcaccactaaaattatccgatgttgcaaagcacttgaaacataaatgtcaataacaagaaatactagccaaaaaatactcatccaacaaaactgtagaacgatgaaaaattctgtccaacctatcatgacaatatattaagtgcaatcagaaattcactgaattttaagaaccactactcaaaagacacggtacgatttccccatggtactcttcagatataggcagcgaacgttctgccaattctttttcagcaaagagacaaggaagttaacactcagttgtacattttggaagatttgcttttcctccatgctaacattccccacagctactcccatgcagagaaccttcttaagctggaacttgaccatggccttggtctcattaacctttgactcgagagattcttggtgagtcacaagtgtagggaacttccctgccttgttgagaccaggtcccaagagacgaggaatctgcttgatgact

SEQ ID NO: 9232 - DNA, 404 bp, Glycine max
  Clone ID: jC-gmle01810038a10d1
ttgttttttttttttttttttttttttttttttttttttttttttggggccatgacgcaacacatgccccacctaagaatcataattttacatcttgtacatacaaaatgcaaagacttttaattaaaatttaaaaaaaaaggataaaccgatcatcttggtgaaatgaaaccgaaacccagaaacattgtgttgaatttttgtggcgcccccaacttgattaatcatgaacggtttgattgaatcacttggactttaagggaatggccctgattacaaactgggggaaaagtgctgaaagtgcaccacccatgaagggggccacccagaaaaaccaggggtcttcccaaccaagggccttgttgaatattattgcaggaccaaaactacgagctggggtgata

SEQ ID NO: 9233 - DNA, 488 bp, Glycine max
  Clone ID: jC-gmle01810038a11d1
aaatccaacaacgacacatgctctcatccactaatttatcacttgagatgacaatgcaccagtatttcttcccaaacctgattttcccaactagatacgatcttattttatgccctccaaggcaaagaaactagaggagaccaatgtccatcacactgccacatggctgcccgaaagatgaattccaaggccagccagagtataaagtctgtcataacatgccagccaggctaaaagcattatgtaacgtttctcaagcatacataaattttgattttcgacaataactgtagtttgacataaaacaagtatatcaccgattttgtgaaggcattctgtcggattcgtgccttaatcgaaagctgctggatctgatacttgggtctgacacactggcagtctggtggtatgctcgccaacttgattctctaccaacatggtttaatggcaatgaaggcaagtgctctctttccctagcatggaatcga

SEQ ID NO: 9234 - DNA, 469 bp, Glycine max
  Clone ID: jC-gmle01810038a12d1
acttgaaaatacaaatcctccatcaaatcttccagttcatttatacaacctactaacgacaaccataattcgtaatattcgatatcatcacaggtaggacatcccttctccatagtttagatggcgtttatgcttaaagaaccttttgaccataactacaaccataaggtaatgttacacatggtaaaattgcaacaaactacaatccaacccaatgatggtttagccctttccccctactttttaatgttttctctagaacgaatgtacaaaatcaaatgctaattcccagacaagcaaacaatatgtaacaagaaccaaatatatatatatatatatatatatatatatatatatatatatatatatatataatattagaaaacacaaaaaaatatcaaggaatatggggcacaaaaattatcactcggatgaaatgtgcacacccggttatatagtttttacatgc

SEQ ID NO: 9235 - DNA, 432 bp, Glycine max
  Clone ID: jC-gmle01810038b01d1
gggaagaaaaacattttgttcaaatcaaaggggccttaatatctttcaactgagaagttatgttcaagtcatcagcccagtcggacatgataattggaagccctatatacactaggggttctatactaatcaaataaaatcacccttcataaacatgtgtacacccttggacaaactttttccatcaattagtatttgtgcctccaaaagctacaccaacatactggagggaaaagctgcggaacatcaatgagattgatattcccccgttgatggataaattgccaaaagaaaatgttaattctaagcaacagtgccaaaatattcttgcaagaactgataaagctcttctgccaccaaagcaggatactcctcttggggaagaagagcacctgggacttccacaaacttgctaacccctttagctccctt

SEQ ID NO: 9236 - DNA, 409 bp, Glycine max
  Clone ID: jC-gmle01810038b02d1
agtacaaaaggctgatattttagtatctttctgagattattaagcagttccactgatgtcaaatccgttatcatcagcaattacggatgacaccaaaaatttagagtgctattcttaagaagaagaaaaaaatctatgaacaaagagaagcattacacatggtccttatatataagagacaaaaactagtttttccttatcacatttattttctgatgaactctacacccttctggatgcttcctgctaactctctctttgccttttccaatccaatcctttcatactcattcaggggacccagttgataaacctcttctgctccagcacgacctagacgtaccttggttgcaaagaagggaagttccgtaacctgagaatcaacaaaagcacactccactaccccagc

SEQ ID NO: 9237 - DNA, 446 bp, Glycine max
  Clone ID: jC-gmle01810038b03d1
agtacaaaaggctgatattttagtatctttctgagattattaagcagttccactgatgtcaaatccgttatcatcagcaattacggatgacaccaaaaatttagagtactattcttaagaagaagaaaaaaatctatgaacaaagagaagcattacacatggtccttatatataagagacaaaaactagtttttccttatgacatttattttctgatgaactctacacccttctggatgcttcctgctgactatctctttgcctttgccaatccaatcctttaatactcattcaggggacccaggtgataaacctcttctgctccagcacgagctatacgtaccttggttgcaaagaatggaagttccgtaacctgagaataacaaaagcacacttcactaccccagcttcttcttttaagccacggaggcatgcaccagcaaact

SEQ ID NO: 9238 - DNA, 529 bp, Glycine max
  Clone ID: jC-gmle01810038b04d1
gacatgctcactaggtcggccgtcgcccttttttttttttttttttttagaataaatgtcttgaatggatttctttagaattggtattcttatagcttttattgctaaaagcctaaaacgtcaagactatatacaggtaaacaattttaaaattaattagttagttttctcagtagataacaagctaaacatctgtaatatatatacaaatctatcaaaacttacatgtacataatcaaccccttctacttcgttgagcagtagggggtaatttctccgatggaccagtaggaagcttctgtccagtctcttgttcaatcctcttcttgagctccctcagtatacgaacttgtcccaacttctcaggagacaacttgtcccaataaattccttgaggctttgggatagatgtatttgtaaaaatgacctgtgtcggggtacaaatgatatccactggtacatcatggattaacagcttttcaactggaatatcatccaccaattggcagtcatgcacagatgtaacaac

SEQ ID NO: 9239 - DNA, 307 bp, Glycine max
  Clone ID: jC-gmle01810038b05d1
ccgaaattggggcccataaacttgttatgaaaaacccttggaaaggcatacttggggaccaattctgataaaagcaaaaattgcgccaaatgattgacttttggactcccccttatttaaaagaccttcgggtatttatagagaataccgggcttttgggggagcaaagagacgacccttttccgcacaatttactaaaagggggggcttattttggtgtgttttatcaaagcggcccattaaagcctttgttaaacattggtctttaaagaaacattttctcaaaaccactgtttctacgggtggg

SEQ ID NO: 9240 - DNA, 539 bp, Glycine max
  Clone ID: jC-gmle01810038b06d1
acggcaaagggagaattttattgtaaaaagaaaatttgaatgggcagataaaagaaaaccttgtcaactcaatgcagcaaaacgttcaatgaaaccccgaataaaaagacagggggagaaaaaggaaaaaagttaatataaaaaacactcaatactatttaaaatcctattttcttatatcctggatgaaagcaagctatgttactgtacaggtgcaaccagccttggtaacctggttcacatagtgcacaatgtaacttcctcctggtcgcagatccgatcataagtgtatgaatcttatatacaacagcctcaagcaacaggttgatctaattctcttatcccaatctggcgcaattgttgtaggtgaccagctatttcctgcaataatttaagtccttcttctccattgctcgataagttgatactatgcttaaggaaactcaaatcagcctcaagaacttgcaaccttccaataaaatctgaaaccaaactcccagtagaagataaatcattattcccaccgagcgcaagggagc

SEQ ID NO: 9241 - DNA, 521 bp, Glycine max
  Clone ID: jC-gmle01810038b07d1
cgggttatgtctcttctcttgcccatctatggcatgtccctagcagtgactgacttgctgcatatcatctcatattcaatcttcctcctattgcttggaaatgtaaatatcctctaagtcttctttctcttttacaagcgacagccgtgctccgtttcatccttgctaacacatatgcacccttcaaccccccaaacccccgccatctcaaagcttcatcgtcttcgcagcatgccaccccgccgcccaatgccacaaccttgcatacaccggcttcccctccctatcatacttgaccagtctctcatacaactcattcagcgggaccaccaccctctcaataaactctccatcatccagcgcctgctccggctcttcatctccctcctttaaattcacttccaccgtcgcgagctgcatgttcgccgcgcttagtcccggatcactcactatcgacggtgaaatacatgccaatttccctttatatcccgtctcctcgtgaagttcccgcacgctcgcgt

SEQ ID NO: 9242 - DNA, 298 bp, Glycine max
  Clone ID: jC-gmle01810038b08d1
ttcgtctttttttttttttttttttttttttttttttttttttttttttttttaaaggaaaaggccccaaattcaatttaagggggcactggaactcaaaatttttgaggaagacggcccaatatgaaaaatattgtaagatcctctcaaacttagcatcttctttttgcacctaaaacattgaaaatgctaaaaatgttaccccccagtaccatcaccacttttagcccttggattaggacaacaaccttgacgaacagaaaaatttacttgcccggtttgtttttccttcaaacca

SEQ ID NO: 9243 - DNA, 524 bp, Glycine max
  Clone ID: jC-gmle01810038b09d1
agaaaagcaaaaccggcaagcagagtcaataattcttttctccaagggtaatagctatgatatccaaataataccaatttgatataataatatcagccaacgaatgtgtgctgaggaaaaagaaaaggaatccttttatgaaagagattggtgattggtcaacttttgcgtctatatatgctaatttttgtaagactccacctatgtaattctattagaaaaagagaaatacaaaacttgtagttgaccacatcatgttaattgtgaatatgagaaaatccattgcccttcttgactgtgacacagtcataggcgaccaaccaacctcctaggctcctattgactattaaaaagacatcgttttccatgaaattacgacaaaactataagatcaattgaaaggtgttaaaacaccaacattccataaacaaaaaacctatttaattttcaacatctgtgggatgcaccattctacattgttcagtgcccgaagaaatatggtgaaagcaggcaattgggaagca

SEQ ID NO: 9244 - DNA, 364 bp, Glycine max
  Clone ID: jC-gmle01810038b10d1
aaaagggaacccccgctttaaaggggggactaacataagaaaacctttaacccttccttaaaaaaatgggagggggtttgccccccaagccctttccaaaattcccattgggaatcccccaaaagggccccccgggcggggttacccaaaaaaggggtagggggaactcccaaagggatcaaagccaaaaaattttttttttccccccccgccttttaagggaattaccccggggggattattttcccccgccccctttttgaatttttgaaaaacctgccccccctttatatggtttaccaacaaaaaaaaaaaatttttctttaaaaggatgtttaacctttatcgccaaaaggccttcccc

SEQ ID NO: 9245 - DNA, 516 bp, Glycine max
  Clone ID: jC-gmle01810038b11d1
cagtcacgccaaaatttattattggctgcagataatgttaaactttgaaaatctctcctcagacaccgtctgaacgaacaatttccttctttttcacatgatacgttaacacaaggcaaagagtaaaaatggtttgctgctggtaatggtaatcatcaaatcagaaaaaggcgctctcctctattcatatactttgcattcctcatcagcagggtttgtctcgcagaattcctccaatgggtctccactccctgctttagctgcccctggccacttgcttgctactaggtgtgccaaatccaccaccctttggctgtaaccccattcattgtcataccaagcaaccaccttaaccatgtgatctcccatgaccatagtcaaggaggagtcaatagtagaggaaacatcagagcagcggaagtcgatagacacaagtggaacatcacacacgtccaacacacctttcagtggaccctcagctgcctttctgaatgctgcattcacatcttcagcagt

SEQ ID NO: 9246 - DNA, 463 bp, Glycine max
  Clone ID: jC-gmle01810038b12d1
cttatactcctcattactataatacattgagtaaaaactttaactttaaaacataattaagttcatatttgcattgtaaaggttatgtttactttagattttaggctattgtactgcagtataactataaaataatatttacttacgcataaaataataaggaatttcttcaatccctcaacttttaagcaatgtatgcacttcaggatccatcatattgaaataattaatgtaactcaatatatcgttatgcgtattctgatgcaaaactgcaatgcccacggcgagtgtgtgacatgcagagcaaaacacgtcgtaccgaaaaactggcacgggaatttggagtgccacacttgcgaagtacgagttgcaaaggcaccgaaattcgagttgcctataggcacaactatacattattcacaactcacaaaagcgggtgcggacatttcgactgacgatgcac

SEQ ID NO: 9247 - DNA, 112 bp, Glycine max
  Clone ID: jC-gmle01810038c01d1
aaaaaaccaacattcaatttaatcattctaattaaaacaagcatcacaaggaccatgtgctaagttgccaaggactagttgagttttaagaatactgggtcttccgtgctta

SEQ ID NO: 9248 - DNA, 407 bp, Glycine max
  Clone ID: jC-gmle01810038c02d1
agtacaaaaggctgatattttagtatctttctgagattattaagcagttccactgatgtcaaatccgttatcatcagcatttacggatgacaccaaaaatttagagtactattcttaagaagaagaaaaaaatctgtgaacaaagagaagcattacacatggtccttatatataagagacaaaaactagtttttccttatcacatttattttctgatgaactctacacccttctggatgcttcctgataactctctgttcgccttttccaatccaatgctttcatactcattcaggggagccagctgataaacctgttctgctccagcacagacctatacgtaccttggatgaaacgaaggaagttccgtaacctgcgaatgcacaagagcacactgcactacccca

SEQ ID NO: 9249 - DNA, 452 bp, Glycine max
  Clone ID: jC-gmle01810038c03d1
agtccctaaataaatcagtaaattatcattgcatccagtttgacacaatttacactatattcaaaagttggggtttgtctataagggaaattaatctcaaactaccatgtcagcttctttcaaagttgatgggatccccacatacagccgcatggccgatttatactgttctggtaaggcagcaccagcctgaatgcacatttccacttctacatgcgcctggccataagaattcctaagctctcgttctagcagcgcatttacatcaggaacatgccatacaaatcttggagggatcaaatcatccagaactgcagactgccaaccatgctgcccattgcgttgttggtgtttatgggcttcacagtttttagctttgagaccctgggcaccaacatgaatttcaaggcaatatccacacaccctcacattgtacatcctcattagtctct

SEQ ID NO: 9250 - DNA, 520 bp, Glycine max
  Clone ID: jC-gmle01810038c04d1
gaatacacattattatccatattttaaacaagattattacacatgaaacagtcacggccattggtctaacatttatagaaagaggtcataggagcaaattgaacgaaaccagcttcagttaacatcaactcgaggaacctcaaactttagatttggaatcatagtttcaaatgcttcccatgaaccaggtcatgtcttaggagctaatagaatgaagccagtttaagttaacctcgactcgaggaacctctaacttcagatttggaagcatagcttcgaatgcttcccatgaagcagctgtctcttcatcacataccaccaccttcaaattctcaagattggttactgagtatggcaattcacaccttgcacagcttgtcatattgagattcctgagattacatagatcaccaatgtcctctggtaaacttgaaaggcttatgcagtttgagaggtcaagaagtcttagcttagaaaagtttacaatagaatctggtatctcttccaatcagtacaggaa

SEQ ID NO: 9251 - DNA, 444 bp, Glycine max
  Clone ID: jC-gmle01810038c05d1
aaaacggacaaaaggctgtgattgccagggcatgtctaacaactgataaaagggggagcccttcgctggctcgaaaaatctcccacatttacgaatgctttgtaataacttttctggttcaagcttgagttatgggttctcattttgcccaggttatgcttaactattcggccgtaatacaaatacatcaaatgtccaattttccttcaaatgctatgagatcattgcgtaacctttttttgtccctcctgagccttaggttcgtttttaacgcccttccagccagtatccgcttgtacaacgcaccatgataaaggcgagaccaccagcagctaaaaacaatcctctcaaagcgtcttcgtacccagcaatggctttagctttacttcgctcctttcaacaaactgaccatagctggactgcccaagagacggcgaacaaggt

SEQ ID NO: 9252 - DNA, 465 bp, Glycine max
  Clone ID: jC-gmle01810038c06d1
atcatcaaatagaggtttcaatttcaacaattcatcacaagtttcataacatccaaattagagaccattcatcttaacacaattccaacagaacattagacgatcaaaattcaattgaatcgccagatgtgataacaaacaaatagcacagttataaaagaaaaaaacttgggggaatcaggaaaactgtctatatagcttccagagcttgcaggacatcagccttcaaatcctcaaaatcttcaactccaaagctgaagcgaaccaggttgtcataaatcttgtacttggccctttctgactgaggaagatcccagtaagacaaaatagcagggtgatccacaatgctctcacagccaccaaacgaggccgcaatatatgggattttcaatgaatcaataaattttattgtggtatgtagatctccatcaatctcaaaactgacaacaccaccgaaaccagtca

SEQ ID NO: 9253 - DNA, 439 bp, Glycine max
  Clone ID: jC-gmle01810038c07d1
gaagcgggagcatcaatacaatacaatatgtaactatgaactatcaatatatgatcgttattatgtctgggatacacacaattaaggccataatatacttatgtgatttacaacaacttctagcttattttatacatcatgccaacccaactaggagcaattttcatcatacaattacacttatctttaatcatcattcatcaatactggcatgagcaatacgctctaaactctgaagcatgacaaggtggtagtcaccagggaccatattgttatgcaatttatgccacaattggataagatgcacaagttgcaacaccacacatgttcttccccaattccatcttgaagtagccattttcaccccagctttctccccatgaattttttatgagccaatatgggacaccattttcaactccatatccaacagcaagaa

SEQ ID NO: 9254 - DNA, 495 bp, Glycine max
  Clone ID: jC-gmle01810038c08d1
gtaaaaagcaagtaacattaagttggattcggatacacaagataattcacattatctgaagtacttcaccaaacacaaatctaaaaactctcaaaagtcatttcgctctttgacgctcactttccggggacgaagttggtggcataggcccacgcgttgttgttgacagggtcagcaaggtgatcggcgaggttctccaatggaccctttccggggacaatggcctgaacaaagaacccaaacatagagaacatggccaatcggccgttcttgagttccttcaccttaagctcagcaaaagcctctgggtcatcaggaaggcccaatgggtcgaacctgccacctgggtagattgggtcagtgacctcaccgagggggccaccagcaatacggtaaccttcaacggcacccattatgataacttgtgtggcccagatggcgaggatgctctgggcgtggatcacgcttgggttgcccaagtattcgagcccaccc

SEQ ID NO: 9255 - DNA, 487 bp, Glycine max
  Clone ID: jC-gmle01810038c09d1
gcataaaaattaaactattttgatttgattccatttggatgagtgaaaacaacttttgcataaaaattgaagcttgaagtgtcaatccaaatgttattcaacttattttagaccacactaccgacagtagtgcttgcttaacgagtactcagtgcgtactaacctaagctatttatgcaccttagtcaaatgtcatttgttcagcttctttcctaatggattcaaacagtggtgaagataagtaacgttctccaaaactggggaaaatcacaacaatgagctttcctgcattttctggtctcttccccacctttattgctgctgctgcagcagctcctgatgaaattcccatcagcaaaccttctttcaaggcaagcagtttagcagtttctatagcctcttcacttgaaacctgaataacttcatctaggagatttacatccagaactttgggaatgataccagcaccaattccctggatcagatg

SEQ ID NO: 9256 - DNA, 500 bp, Glycine max
  Clone ID: jC-gmle01810038c10d1
ttcgtctttttttttaaattatgcacctgctgctcactctttagaggattaactgcctcaattttacttatctcactcaattcatccacgatctcactcttgctctgaggtttaacaggtgcccacatcacagcatcagtcccatgggatttctctgccggtctattggcctgcatattttttggcatcctacgagaatgctgtgatttccactggctattcattctaccatgggattcctcatttgctaaatatctgtgttgctccgaaaactgatttggatctttagacaagggtgctggctgaagtgggccctgatctaactcaaagtctgaagccttggacttatcactttcaactgagcttttggaaagattggattcttttggtattgccgatggtagtgcagcctgagatgaaccttcttcatgtttctgtttgttttggccattcctgatattcttctttttcagatttactggagactcaaccacagcagc

SEQ ID NO: 9257 - DNA, 524 bp, Glycine max
  Clone ID: jC-gmle01810038c11d1
agtcgcaacttataatttatagattttcatgcctcatcaatctacactgatgaatttacatgatgaataagtttataaaatatctagtagttttagaataaaactttccctatcagcctaaataagcctattagtaatgacactttttttatattattatgtaatatatgcattatatataattatgtatatataatataacataatatatcacttaattaaagtctaaccctaatacaaaatctaacacggtacagtcaaacagaaggcaaggaaagatacatgataccgatcaattaatacgaaaaggaaacacgaacaaataacaatgaatacatctttaggtttaatagacataaatgacacttaatcttctgcatgcttttgcacttttggagatcgagtgaaattctcaggtcaaattaagtatcattccctttctgtatctgtacctttaaaccatccttcataagaagaacaattgaaagggctcgagtagcaacaaaaccctccaccacttggac

SEQ ID NO: 9258 - DNA, 434 bp, Glycine max
  unsure at all n locations
  Clone ID: jC-gmle01810038c12d1
cattcgaattcattttatttatatattaatattatattcaaatgaaataaaaagatattaaaagatactaattataagaatttgaaagtgaaattataaagttattaaatgattaatcaatttttttctacctgttcctgtagtaaaaagagttccatctgttcttgaatagcttccttcaaaaggacttctgcttccccagtgaatgtcttggtagaagatatgatttctttgaattgaggtttattcgtgtttaagtaagcacgtaactcaacaagaaatttccttacctgtccaatttctaatgaatcaagataaccattcgttccagtataaatagttattatctgttcttccacggtaagaggagctgattgggattgtttaagcaactcgcgcaatcgttgacctcttgctaattgattntgagtagc

SEQ ID NO: 9259 - DNA, 363 bp, Glycine max
  Clone ID: jC-gmle01810038d01d1
ctcttgttgtttattttttttaggattaatttgttttttttttcttattttacttcaatttattcactatttttactctggccccgaggttgaccaggtgcccacatgaaaacaacagtgccatgggatttctctgccggtctattggactgaatattttttggccccctacgagaaagctgagataacacgggctcttcattctaccatgggattcctcatttggtaaatatctgtgtcgctccgaggactggtttggatctttaaacaagggtgctggctgaagtgggccctgatctaactcacagtctgaagaaaaagacttagcactccccactgaacttttggaaagattggattctt

SEQ ID NO: 9260 - DNA, 354 bp, Glycine max
  Clone ID: jC-gmle01810038d02d1
actcatgtatcttcaaaatcattgtataaaattcagaccctttacttatttataaacataagcctgatattgaccaccaaagttaactcgtttgatgtgtgcatcttgacaaaagagagcttccttctttgataagaacagacacactgccaccatcggcccttgagatacgcaattcttggtcgaggtatgcggtgagttaccaggactgaacattgctgctggaaattgggatcttcaagggaggcctacttgaaattggagacactaccgatgtggctgtgtcttggacagaggtatgggtgccctagcaaagtgctaggctaatattgtgacccaaaaagaccacatttt

SEQ ID NO: 9261 - DNA, 442 bp, Glycine max
  Clone ID: jC-gmle01810038d03d1
acaacatattttctccaattaacgaataaacaaatttcaatattgcttcaagtacagtacatttttttacctaaaggaagaagataagcatgggttttttgttttttttttcaacaaacaaaaagatcttgcttcatagtcctatcctatttttacattatacaaatccatatattttttcacttgcaaattaatctattagtagattaattagtcctaccatttggatttaggcaaattagcaacctaaatcagagaggacaatcaccagcatcatgtctattttttcccttagttgggttaccttaaaacatcattgaaagagcaaaagttccacaaaatctcaaacaaccattagtggagattggggtgacaaaggaggcacactaaagatcgttcccataacagtagtgagccaaaagcctttccaacatgatggagt

SEQ ID NO: 9262 - DNA, 534 bp, Glycine max
  Clone ID: jC-gmle01810038d04d1
tcgccctttttttttttttttttttttacaaacaaaagcttgattttatattttatttcatttcactatatgagactgagagtagagttagatttttctgtacatattatgatgcagaggtagatttttcaaccaaataccccaagcacaatcaagcagggagaattgggtagtctttcagaagaatttttcaagcgatttaacaacctaggggtagcttatctcactttaatgtaatcagcagacaccactgaaacctaggcctaatatgaagctataattatggtgtctgccatgtgcactcatgagctccttagaaactcccaaggccctgatcccgttccaattctcaagaagccagcggatgccctaagacccatatagatggtcaaagcaacccaaagggcaatgaaaccaccagcggatgacaaaataagcagagaaatgatgctaagaattgccaccacaaccatggagaaggctgaatatgcaaaatcagatgccccaaagttgacaccatcaaatacaaatgct

SEQ ID NO: 9263 - DNA, 509 bp, Glycine max
  Clone ID: jC-gmle01810038d05d1
agattcaatagtatcttgtataatctacaaagctacaaaagaattgctaaagatacactctccaacgtactttttttaacacattagcactaacacactcctacaacacactattgttatttgttagttaatttattaaaattacaaaattaaaaagaaaaaataatgaaccctacaaaattgagatttccaataaacttcatctaataataaaagatatattcaaaaaaaaaattagagcatttagcatttctcatgctacaaataactattaccctatatgacccagcaatttcaacgcaagtgcaaaatgagcttactatcataaaggttgagctaattctatatatcagcggtgcctctcccctagaattctcaaattgggagggttaaccaaaattaatgtgcagttagaagaagaaaatactaatagaagaggcattttcattttgaattaaaagtataaaacagttcagtagatccagaacagaacgttccaatggcatcta

SEQ ID NO: 9264 - DNA, 446 bp, Glycine max
  Clone ID: jC-gmle01810038d06d1
aaggggaagtaaagcttagttactacagtttgaaaaaacgccaagcacctttcgctaaacaatcattctgggctgggcccttttcttgtccctggcaccaattcattcctcgaagttttcaccatcaagccacccatatcgatcgatgaatcaaccctcttgatcatcatcatttacaatctccttgaaccaagaaaccgacaaaagttttttttgacctcgccttcctcatcctctccctatccctctcctgaactctactccccgaactcaacaacgcccttattcgaacctgcatgtgggactccgtctccctcaactccagggtgccaccactccgactcctcgtcgaactcgtcgagcctcctctccctaggaccccagccgtagaactggtcgccatgcccccaccgatcaaactcccacctccttgttgttgatttttc

SEQ ID NO: 9265 - DNA, 533 bp, Glycine max
  Clone ID: jC-gmle01810038d07d1
ttcttttttttttttttttttttttttccaaacggacaaaaggctgtgattgccactgcatgtctaacaactgataaaagggggagcccttctttggctcgaaaaatctcccacatttacgaatgcttcttaataactcttctggatcaagctagagttatgggttctcattttgcccaggttatgcttaactattcggccgtaatacaaatacatcaaatgtccaattttccttcaaatgctatgtgatcattgcgtaacctattgttctccctcctgagccttgggttcgtattgaacgcccttccagccaggttccgcttgtacaaacaccatgataaaggcgagaccaacagcagctaaaaacaatcctctcaaagcgtcttcgtacccagcaatggctttagctttattcgctcctttcaacagactgaccatatctggactgcccaaaagacggcgaacaaggacaccgtggctgtcgtctaacgtttcctccaaagacttcctgaaatacgggtgaacagaccacc

SEQ ID NO: 9266 - DNA, 444 bp, Glycine max
  Clone ID: jC-gmle01810038d08d1
tcgcccttttttttttttttttttttttttttttttttttcaaaatgttgttttttttggatatttttgatattattaatccatttcactgttgtccaaaccaaaatcatcaccccggacagtgacaggaaaattggggaagcctatcctaaagaagaaaaaaactctttttgagcggtgagaaaccatacacatggtccttatatataaaagaacaaaaacagggtatccttatcacacccattttctgaggaactctacaaaaatatggatgcttactggtaactctatttaaaccttttccagggcaagcctttggtactttttctcgggacccaacccgaaaaggggggccggctcctgcacgacgtagacgaacctgagagccgcaaagaagggaggttacgtttccggagaagcaacaaaagcaaactcgactacccc

SEQ ID NO: 9267 - DNA, 480 bp, Glycine max
  Clone ID: jC-gmle01810038d09d1
agattaaatgcctgaatggatttctttagaattggtattcttatagcttttattgctaaaagcctaaaacgtcaagactatatacaggtaaacaattttaaaattaattagttagttttctcagtagataacaagctaaacatctgtaatatatatacaaatctatcaaaacttacatgttcataatcaaccccttctacttcgttgagcagtagggggtaatttctccgatggaccagtaggaagcttctgtccagtctcttgttcaatcctcttcttgagctccctcagtatacgaacttgtcccaacttctcaggagacaacttgtcccaataaattccttgaggctttgggatagatgtatttgtaaaaatgacctgtgtcggggtacaaatgatatccactggtacatcatggattaacagcttttcaactggaatatcatccaccaattggcagtcatgcacagatgtaacaac

SEQ ID NO: 9268 - DNA, 406 bp, Glycine max
  Clone ID: jC-gmle01810038d11d1
tcgccctttttttttttttttttttttttttttttttttttttttttttttttcagaccaactccgtaaaaatataatttaaggcaacttcggtttttacataaatgccgctgtaaaactggttcccacccaaggaaatcaataccggtttaactgccggcaataataagggggagaatcccaatgaataatccataaaacaagctgagggagattgtcttttgaaaatccgtcacgaaaagaagcaaaaaatctcactattattagctaaagtggagatctaaacctgaccataatcagtttctgcctattgcaacccataccggggcactcccaccacatacgagatttgaaaacccaaactaactgaaaaagtttgactaaacgtggggtgggccaggcccaa

SEQ ID NO: 9269 - DNA, 486 bp, Glycine max
  Clone ID: jC-gmle01810038d12d1
gaaactaaaatcaatcatccaattgccataataaaaattcccaagtaactcaattaacttgaaacatagtatacgaaacaaaaggtgctgttcaagcttcaaaagcagctcataacaaatataaaggaaaatgatcgacaaaactgacataatctaggaatgtaggtcatcagataactagcttcaagggcaatttaagatgaagcaccacttcgaagagcacccttcttcttgcttgttgccaattgggtctcagcctctttcttcacaggctcttccttctcagacaatatcagctcaatgtggcatggagatgacatgtaagggttgattcttccatgagctctgtaggtacgacgcctttgcttctgtgcttgattaacctggacatgggaaatgtacagagcatcgacatccaaaccttttacctcagcattacttctagcgttcttcagcaaatctaggatgaacttagctgatttgacg

SEQ ID NO: 9270 - DNA, 531 bp, Glycine max
  unsure at all n locations
  Clone ID: jC-gmle01810040a01a1
cccatccaaagccaaggaactggctggagcttcttccaggcaaatggcgtctattatactccacagggaagcatgtaggcctgaccctccgccaacctcctctccgtgtaatcgttggcgatgtgcatttaactgtgacaagagaatcaaaattgaaagctaatctttcattcaactctgacactggattctctgtcatgattggtcaggactggcctcatgacaaagctggtaagagtggaagattgcaggtgaattcttcatttacactaagatccgggagactgttatatctgaagcaagacaagaccacagagaagttcttctttggcccttccagcaatgtggaggctttagctcagaaattcaagggcaagaaatggagaaaagtagtccctttcgaggagcttncatcaagtcttccagccgncaagcttgcatcaggtgatattgatgtgagaatgaatcttgatgatccattaaatcanaacgttgatactgcgagaaatgttctacaagaacttagaacac

SEQ ID NO: 9271 - DNA, 539 bp, Glycine max
  unsure at all n locations
  Clone ID: jC-gmle01810040a02a1
agaagagagagaaagaaagaatgaatgaataaataatcatgcactctctttctattcttcttctttctatcataacataactatgatatcaacaccatataataattaatagcaataatttagtaatactctcttcattgtcaattccatcttcacttcacttcacttctctgttctgttgaatattcaatcattcgcaaaacgcatacttttctcttcattctcagcttttttctttcatttttaattctccgttttccaaatccatgattgcatctcgccgctgcgaaaccgttccgccaccgtcgattcccgatctccggtgacccgaaaatgctccctttcgcgcatacgaatcccaccatgggaagccgcaacaacaacaacaacaacgccaccgccgagacggttttcgccggcgtcaacgccatcgtcgccgncgaatccagagtccaacccaccgacgcgccgaaaaaacgttggggaggctgctggagccaatattggtgtttaggatctcgtaagagcagtaaaagcag

SEQ ID NO: 9272 - DNA, 511 bp, Glycine max
  Clone ID: jC-gmle01810040a03a1
gtgaaagagaatccgaggcgaagagaagagaaaaattaagatggaggggaaggagcaggatgtgtcgctgggagcgaacaagttcccggagagacagccgattgggacggcggcgcagagccaagacgacggctaggactaccaggagccggcgccggcgccactggttgacccgacggagtttacgtcatggtccttttacagagcagggatagcagagtttgtggccacttttctgtttctatacatcactgtcttaaccgtcatgggagtcgccggggctaagtctaagtgcagtaccgttgggattcaaggaatcgcttgggccttcggtggcatgatcttcgccctcggttactgcaccgctggcatctcatggggacacataaacccggcggtgacatttgggctgtttttggcgaggaagttgtcgttgcccagggcgattttctacattgtaatgcaatgcttgggtgctatttgtggcgctggcgtggtgaagggtttcgag

SEQ ID NO: 9273 - DNA, 559 bp, Glycine max
  unsure at all n locations
  Clone ID: jC-gmle01810040a04a1
gtagagttaacaagaccagagagagagacgaagccgaacgaaacataaataaaaccttgctcttttttcacgccctagctcattttcttctccgttctcttctctctgttcctcactcactcgcatttattcaccatgactaagcaacaagctaattggtctccatacgataacaacggaggatcatgtgttgcaattgctggagcagattactgcgtcatcgccgcggatacgaggatgtccaccggttacaatatcctcactcgcgattactccaaaatctcccaactggcggagaagtgtgttatggcttcttctggttttcaagctgatgtcaaagctttgcagaaggttttgtctgctaggcatttgatttatcagcatcaacacaacaaacaaatgagctgccctgcgatggctcagttgctctcaaacactctntattacaaacgcttctttccttattatgctntcaatgttttgggtggccttgacaatgaaggaaagggatgtgtcttcacatatgatgctngtggttctatgagagggttgatatagc

SEQ ID NO: 9274 - DNA, 618 bp, Glycine max
  unsure at all n locations
  Clone ID: jC-gmle01810040a05a1
tgaaattcgaacaatgattttttcattttctttttaatacttttttggtttagactccctaagaatctgtcgatatttccaattaaatcttcttgttcctgtgaaggtcctataaaaaaaagggctatgccctttctttactcagaagggccttattccaagttccaccaaacaagtttttattcatttgaaacatctttttttccgaatacaagaaaaaattcatttcaatttcaattatttctataagataaaatcgatatagatagattttatcttatagaaataattgaaaaatacattcaattatgtcttcgcgtatcaaatattttcttttcatatcgatgcgtacgatatttttccagcaattaatgtatgtgagacagaaactttcacttacagttttttctttttaatattgtatttcattttttttaataattaataaaataataataataatgaataaaaaaatcaaataataattaataaaaagaanaaagtgtaaatcaaatagaaatttataaaatctatgatcctagagtagttccctagacaaaatagaagtaagttcacatacaagattcaataagattctctgatgaaaggagagaaata

SEQ ID NO: 9275 - DNA, 519 bp, Glycine max
  Clone ID: jC-gmle01810040a06a1
cgtcgatctggaacggattccaatagaggaagtgtttgagcagctgaaatgttcaagagcaggtctaacatcagaggaagggggcaatcggcttcaagtctttggaccaaacaaattggaagagaaaaaagagagcaagtttttgaagttcttgggatttatgtggaaccccttgtctcgggttatggaagctgctgctataatggccattgctttggcaaatggaggaggaaggccaccagattggcatgactttgtcggaattatcgcgctgctagtgatcaactccacaatgagttttattgaggaaaacaatgctggcaatgctgctgctgctcttatggctggtttggctcccaagactaaggtactaagggataaccgatggagtgaacaagatgctgcaattttagtaccaggagacataatcagcatcaagttaggagatatcattcctgccgacgctcgtcttcatgagggtgatcctttgagtgttgatcagtctgctctgactggaga

SEQ ID NO: 9276 - DNA, 535 bp, Glycine max
  Clone ID: jC-gmle01810040a07a1
aattcattttaatcctaattctgcacttcttgatcattcgatttttctcctcaaggttcgtctctgtttcatctcttttcatcatcgcagcctaattagccttagtttattgatttagctttggtctttcaccatggttacatttttacgtttctatctttcgatttgtgattttttacgttaatatgtgtataccggttttgtcgttgttgaatccgaaactttccattcgactttctgattccgtatctcgtttgtcacatgcaaaatctttcccgatttttaatctggctatctgatttgatttgattttgaggaattagggttcgcggtttgatttgattctgtgattcgcttgttatatgtaaaatattcccggttcctaattttagggtctgcgatttattttcttttatcacttttgaggaatcagggatcgtggtctgacttattgcgcattatttagttggatgcgtgcaaatctttccttatcttctaatagggtttagggtttgcgattgtcattctgggaata

SEQ ID NO: 9277 - DNA, 585 bp, Glycine max
  Clone ID: jC-gmle01810040a07d1
ggcgaaacgagctcaatacatcatattaaaacataaaaagcagcacctaaaccagaacagcaaacaagttcaagggagaaattgaacataacagacatgacatacaagaacacttgaaaaaagacacgcttaaaacaagaacacttgaaaaaaaacacgcttaaaaaccaccgcgaaggcgaaggacgagatgcaaggtggattccttctgaatattgtaatctgccaaggtacgaccatcttccagttgcttcccagcaaaaataagcctctgctgatcaggtggaatgccctccttgtcctgaatctttgccttcacattatcaatggtatcagaactttcaacctccaaagttatggtttttccagtcaaagtcttaacaaagatttgcatgccaccacgaagccgcaacaccaagtgcagggtagattccttctggatgttatagtcagcaagggttcttccatcttcaagctgtttcccggcaaagataagcctctggtggtctggtgggataccttccttgtcctgaatcttagctttcacatgggctatggaatctgaactcttcaccttcaagggta

SEQ ID NO: 9278 - DNA, 584 bp, Glycine max
  Clone ID: jC-gmle01810040a08a1
gtccttctatgattgcacaagtcaagcatagcttaagacgatcacttcgaaagggattgcctaggctggaggccacatattatatgtctttctacgaagaagattcttcacatgatgaaaaattgctaacatttgcaaaactagattttaatatgttgcaggagttacatcagaaagaagttaacaatgtgaccaggtggtggattaagaatttaaatgtctcaacgaaattgccatttgtacgagataggattgcagaatgttacttttggattttgggaatatactttgagccacaatattctcttgctagaaggataacaacgaaagtaattgctctatgttctgtcattgatgacatgtatgatgcctatggaaccattgacgaacttgagcttttcaccaatgcaattgagaggtgggatatttggtgcttggatgatctcccagaatacatgaaagtatgttatatagaaattttgaatgtttatgaagaaatagaggaagagatgagaaaacaaggaaaagtatattgcatcaagtatggctagaaagagatgaaaagattaatcaaggctcacatg

SEQ ID NO: 9279 - DNA, 452 bp, Glycine max
  Clone ID: jC-gmle01810040a08d1
aagctaaagaaaaattaccatgttattttacataaattaaagaaacagatcaataataaaataactaagcttttagcttatacgggcagacattttattaactaataaagttttgagggaatccttcattaaccctccgggatttggataattatcttcatttttgtaaagcccgtaaatcatgcccccaagggtgacaacccgcaaaagaaaattcattggcacttcagtgggattaagggatgcctcattgatggcctttcaagcacttttaaccatttcaagtggtttattaagggcattttgccttgagggggtatggtgcttcatatagctttcaatgcttgatgcaacgggttttcttttctgctcaaactcatttccaacaatggcatccataagcctaccaataattgaagcagccccaataattattggatcacttgttgccc

SEQ ID NO: 9280 - DNA, 627 bp, Glycine max
  unsure at all n locations
  Clone ID: jC-gmle01810040a09a1
gaggacttttgagacacattgtggatccttgtctcaatacgggatgaaacacatgaggtcctttgcaaacatctgcaatgtagggataaagaatgaacaaatggctgaggcttcagcacaagcttgtgtcagtattccttccaatccctggagttctctgcaaaggggtttcagtgcataataactccctgtaatgtgcactagtaaagaccaaagtatgattattgttacattatgttacatggttgtacttgtatatacatatcttgtcccacctttgtaaatacaattgggacactactaggattgggaagaagggtctttacatttatagtttggcaaatagatattgcaactacctttgtataattctatttctgaagaagcaattacaatttacaagggatggtgccatttacggcataaggattaaggagggataaaggaaccaattgctttggaatatccactcattacaatgcatgtatgacaacacatagtaatatgatgtgtgtttttattcagtgggcaactggcagatcgggttttcctggtcactttngataatattcccgaagaattatgatgcaaaattatgggtaatataatgacacttgattnatttgt

SEQ ID NO: 9281 - DNA, 517 bp, Glycine max
  Clone ID: jC-gmle01810040a09d1
acaaaaataaatacaagttgtcattaatattaaacaataattttggcatcataaattcttccggaataattatacaaaagtgaccagggaaaacccgatctgccagttgcccactgaataaaaacacacatcatattactatgtgttgtcatacatgcattgtaatgagtggatattccaaagcaattggttcctttatccctccttaatccttatgccgtaaatggcaccatcccttgtaaattgtaattgcttcttcagaaatagaattatacaaaggtagttgcaatatctatttgccaaactataaatgtaaagacccttcttcccaatcctagtagtgtcccaattgtatttacaaaggtgggacaagatatgtatatacaagtacaaccatgtaacataatgtaacaataatcatactttggtctttactagtgcacattacagggagttattatgcactgaaacccctttgcagagaactccagggattggaaggaatactgacacaagc

SEQ ID NO: 9282 - DNA, 494 bp, Glycine max
  Clone ID: jC-gmle01810040a10d1
agtaaaccatttatatcatttattgaaaaagtaattaatgtttgagtaaccacatatattctatttcatccatttgaggaagtttgtataaaactacagatagtgtaggcagttcctacccctggctgaaaagagatacttataaggcaaaatttaaaaataaataaataataaccatagatagcaatgaatacaaaattaagccacaagccacatgaagtaagttgtccaaaaagtgactgcaactgaggccaaagcatatgtccatagcatgataacagaacattcaccttcaccagctccaaacaattgcgcgattgtgcctatagccattgctggtggaagtgcatattgaaggagaagcacaaactgatataagggatctggttgcaccaaacccaactgtgttgctcctttaataactagaatacccaaaattggcaggaaaatatatcgaactactataattccaagaattgtccaaaacgaagtat

SEQ ID NO: 9283 - DNA, 539 bp, Glycine max
  unsure at all n locations
  Clone ID: jC-gmle01810040a11d1
ggtattccaactttatccgtgaatacaaacaactaataacacgcagaataatgataattttcaggacgaacgtaggggtagagttaaatccaaactaacacaaggagctcttgacactacattcgactatttttccattaaaatacacgatagtcaactgcagccatcataatattgcttgcgtgcaaatttgcattccatgaacgaggcatgatatcaatgttcggaaaggcaagaaggcatggctagttgactagttattttggtggctagcagacagataagaaaaaatgatggaaaccatgatgaccagtacgataatcatggttgagccatatccactttcatccttcacaatgtaagatttccttttactcaagagaccagattctctgcaagttttctgtatagcttccagcctgctcaatgctttagttgcattgggatcatttttgtcaaccttggactccaacatagaagcanaatcaaagaaagcaccatagacatcagcccatagtcgtagttcgtcaatcactttt

SEQ ID NO: 9284 - DNA, 275 bp, Glycine max
  Clone ID: jC-gmle01810040a12d1
cattaaaaacacatacaaaatcaaaaaaagacgggaccaaaaagaaggaacaaagaaacaaaaggaaaaaaaagacaaaaaaggagacaaaaaaaaaaaaaaaacagaaggaaacagacaaaaaaaagaaaagaaaagaaaagggggagggggccaggaaaaaaaaaggaaccaagacaggcggaaaaaaccagaggaagaacaagaagggaaggagcaaaacccaggaaagaaaaaaaggaaccaccaaacgaaccaccggggacaaaaccagg

SEQ ID NO: 9285 - DNA, 608 bp, Glycine max
  unsure at all n locations
  Clone ID: jC-gmle01810040b01a1
ttgttgctgtagaagagaagaaagagattgaagagacccagcagaccgacaaggacagatggaagggtcttgcctatgatatctcagacgaccaacaagacatcacaagaggaaagggtttggttgactcccttttccaagctccacaggatgctggaactcactatgcagtcatgagctcctacgagtacctcagcactggacttcgccagtacttggacaacaaaatggatggattctacattgctccagcttttatggacaagcttgttgttcacatctccaagaacttcatgaccctgcccaacatcaaggttcctctcattcttggtatctggggaggcaagggacaaggaaaatctttccaatgtgagcttgtctttgccaagatgggaatcaaccccatcatgatgagtgctggagagttggaaagtggaaatgcatgagagccagcaaaactgatcaggcagagataccgtgaagctgcagacatgatcaagaagggaaagatgtgcgctctcttcatcaacgatcttgatgcangagctggtcgtcttggtggaccacactatcactgtgaccaccagatggtgatgccacttatgaca

SEQ ID NO: 9286 - DNA, 498 bp, Glycine max
  Clone ID: jC-gmle01810040b02a1
ggtaaagagttagaggaagctataatccaagttttggaagacaacaccgcgagtgagactcatgaatgggaactagtgaaattgaaatcatatgccttgatttctccatatttaccaaagaaataatagaatggaatagaaaggccttcaagaggatgtaaaacctcaaacacttaatattagaaatggcaaattttccaaaggtcccagataccttccaaatagtttgagaatattggaatggtggagatatccttcgaattgtttaccatctgattttaatccgaaaaaacttgtcatatgcaagtcacccaatagttgctttacgtcatctgagatggatggcttatccaaggcaagtttaaagagtacattttcctcaccacggaatattttcctcatggatctactcgacattccgtaatgagtgagcttttgtatccgtatcgaagaatccggttatctactcggcagctattgaatcagcaaccgctggta

SEQ ID NO: 9287 - DNA, 587 bp, Glycine max
  Clone ID: jC-gmle01810040b03a1
attccgcaacagagagtagaaaagatggcgcggttgatcacagtggtgtggtgcgcggtggcggtgctactgtgcgccgcggcgggcgcgtcgtgggtggaggaggcggcgaacccgatacgaatggtggcggtggtggaggcggaggtggttcgggtgatagggcagtgccggcgcgcgctgaagtttgctaggttcatgagcaggttcgggaagagttaccgaagcgaggaagagatgagggagaggtacgagatattctcgcaaaacctcatgttcatccgctcccacaacatgaaccgcttgccctacactctctctgttaatcattttgctgattggacttgggaggagttcaaaagacacagactaggcgctgcccaaaattgctctgccactcttaacggcaaccacaagctcactgatgctgttcttgctgccacgaaagactggaggaaagaaggaatagtgagtgatgttaaagatcaaggcagctgcggatcatgctggacattcagcacaactggggctttagaagcagcctatgcacaagcattatgggaagagtatctctctttctgagcagc

SEQ ID NO: 9288 - DNA, 479 bp, Glycine max
  Clone ID: jC-gmle01810040b04a1
ctaccttagattccttctccaacaatggctctcgccgtttccactacttcttcctcttcagcagctgctgcagcttctagctccttcttctctcgtctcggatcttcctccgacgcaaaagctcctcaaatcggttcgtttcggtttccggagaggtcgcttgtttcgtctgttgttgtcaatgtaactcaacgacgctccttggtgaggccactcaacgccgaaccgcaacggaacgattctattgttcctcttgcagcaactatcgttgctcctggtacgttttccgcgttatgttatgaacacattaccttgttttcagggaattttctgaaataaagctcccccccattctatttcgcgcctcttaaacggaggcagatacagcgttgttttgatgcgttggcgtgtgattgcagagggtgagaaggaagacgaagattttgagcaaattgcggatgaccttgaaatgcagctcc

SEQ ID NO: 9289 - DNA, 595 bp, Glycine max
  Clone ID: jC-gmle01810040b05a1
gaaatgattgagagtggtgtcattaagcttggtgataagcagagtgaaagcaaatgtgctcttgtgtatggtcaaatgaatgagccccctggtgctcgtgcccgtgttggtcttactgggcttactgtggctgaacacttccgtgatgctgaagggcaagatgtgcttctttttgtagacaacattttccgttttacccaagctaactcagaggtgtctgctttgcttggtcgtatcccatctgctgttggttaccaaccaaccttgtctactgatcttggagctcttcaagagcgtattacaacaaccaagaagggctcaattacctctgtccaagctatctatgtgcctgctgatgacttgacagatcctgctcctgctaccacttttgctcacttggatgccacaacagtgttatcacgacagatctccgagcttggtatctatcctgctgatgaccccttggattctacatctcgtatgctttccccccttattttgggtgcggatcactatgaaactgctcgtggtgtacagaaagtacttcagaactacatgaatcttcaagatatcattgctattttgggaatggatg

SEQ ID NO: 9290 - DNA, 499 bp, Glycine max
  Clone ID: jC-gmle01810040b06a1
agcgaaacccaagacaagaatcacagcgcacagtgacacatacatagaaaaaaacgaaacacaaacagaaacagagttattggaaaacacgaaacactaattgatttgaattcgattcgattgaggattgctgtttgggtgtcttgatggtgtcggtgaacccaaacctcgctcaaggcttgtacttcttcgatccctccaacatgaccctttccggagtcaacaatcttacaccgccgtcgacgccggctccggctgctcctgccgccgtcgaggattcgaataagaagatccggaaaccctacacgattaccaagtccagggagagctggaccgagcaggagcacgacaagtttgtagaagctctccaattatgtgatcgggactggaaaaagattgaagcatttgttggatcaaaaacagttatccagatacgaagtcatgcacagaagtaatttcttaaagttgagaagaatggaacacgtgaacatgtacctgc

SEQ ID NO: 9291 - DNA, 529 bp, Glycine max
  Clone ID: jC-gmle01810040b07a1
aattcttatcacaccactcccctctttaatcatgcaacgctctcactctttccctctctagagacctcgccctgccatgtcatcacaaaccgcgcccacggaggcgccggagccttatacgccggttctccgctcccgcaccgatgccggccgaggtcccgcccccgcgctggcgctccttctcggccgcgccggccgccgtggcccatccatgctggtacgtgagacggcggcgcgtgagctcgaggagcgccgcgctgactggggctactgcaagccggaggtggcgctcgacatgtcgtggaacatggccttcgtggacgactcggcggctatgctcgcatgcaccagcttcgagcacgcgaccacgccgatccgagtgtggatcgatgggtacgcgctgcagtgcctcgtgcacgtgttgctcgtgtggctcgagtaccggcgccggagccggagggactctcgcagcggtagtcagagggcgcgggacgttgagagcgacgccggcagcagatacgatgacgac

SEQ ID NO: 9292 - DNA, 534 bp, Glycine max
  Clone ID: jC-gmle01810040b07d1
catagcgtaatcaagaaactcacatcttaaaataagaaagttcataccatagtccataaataaacaagatacatagatggattaatgtaacacaatcaacttaataaagcctacgattactcaaccagtagcaaatgaaacaatccagtttccgtcagaaaagaaatgaacaacctacaaattggacatctctgaatctaacaaaggacgaaataattctaagtagactacagttgctaacttattcgtcaataaatgctctatatatcttttctctacagaaacagctaaacgaaacaaccatcaaaacccagcgagtagggaagtaaactctttcttgtcttgaaattatatatacatattacacaacagttgttgaaacacccagttgggacttggtaggttcttcgttttctgtcacacttgttcgtttcccttgagaatattgtacttgcagagaggacaagttgcattcatcttcagccatttcacaatgcacgacgaatggaaatgatggttgcagggaagagcatg

SEQ ID NO: 9293 - DNA, 543 bp, Glycine max
  Clone ID: jC-gmle01810040b08a1
gaaatcaagagcagagctgaaacttcttctcttcacttgaaactgtgtttgaaaaagaaaaaaaacatggccacactattctcacctttgtctctgcactctgctcgcccctcttcttcttccttttcttcttcttcttcttcttcttcatcttctcccttctttgccttttgcagcttccctttgcgctctcgcatttcatctttgaaggcacaaacaattcttcttcagaagatgaagcgcgtggtaaaggcagtggaagaagagacccagcaagaactcaccgctgtggatgagtctgaacaaccatcaacctccgaagcaccacccgttgtggttcccgtttccccatcagatactctcaccatgttctttcaggcagagggaacagtgagtgaaacagctattccagctttaaccaaagctttagaggagacagatggtgttactgatttgaagtttcagcttgccgagggacttgcaattttagagttgaagaagcagacaacagtccaagctacaggagtggcttctggtctttta

SEQ ID NO: 9294 - DNA, 488 bp, Glycine max
  Clone ID: jC-gmle01810040b08d1
aataaagaaatctttcatttttttaaagaaataataccaataaggataacaagaacaacaataataataataaccaatatcctcagtcagccctatccaaaccaaaaggatggttcggggctttagtcaggaatgggtgaaaggcatgttcttaaaatttttttttttactccctaaaactatgggtataacaccggcacatttagtttaggcaacgggaactttttcatcctcaaaactcagattaaaggcctgtagttaaaagcctgaaccttgaaggggttttaaaagaccagaagccactccggtagcttggactgtgggcggctttttaaactctaaaattgcaggtcccttggcaagctgaaacttcaaatcagtaacaccatttggctcctttaaagcttgggttaaagctggaatagctgttaaactcactggtccctttgcctgaaagaacatggagagagtatttgatggggaaacgg

SEQ ID NO: 9295 - DNA, 593 bp, Glycine max
  Clone ID: jC-gmle01810040b09a1
ctcgagccgaatcggctcgagccaacacaaagatttcctctggaagcttcaagattgttgctgtagaagagaagaaagagattgaagagacccagcagaccgacaaggacagatggaagggtcttgcctatgatatctcagacgaccaacaggacatcacaagaggaaagggtttggttgactcccttttccaagctccacaggatgctggaactcactatgctgtcatgagctcctacgagtaccttagcactggacttcgccagtacttggacaacaacatggatggattttacattgctccagcttttatggacaaacttgttgttcacattaccaagaacttcatgaccctgcccaacatcaaggttcctctcattcttggtatctggggaggcaagggacaaggaaaatctttccaatgtgagcttgtctttgccaagatgggaatcaaccccatcatgatgagtgctggagagttggaaagtggaaatgcaggagagccagcaaaactgatcaggcagagataccgtgaagccgcagacttgatcaagaaagggaaagtgtgtgctctcttcatcacgatcttgatg

SEQ ID NO: 9296 - DNA, 544 bp, Glycine max
  Clone ID: jC-gmle01810040b09d1
aggacaaaaggaaaaggcaccaaattcaatttaagtggacactttaactcaaaattatagaggaagacagtccaatatgaaaaatatagtaaaatcatctcaaacttggcatcttctctttgcacctaagacattgagaattctaagaatgttacacgcaagtcccatcacaacttctagcacttggatcagcacaaccttcaggaacagaaatatttacttgccaagtttgctttgcctccaattcaagattggaagaaagttcccctgttaatagcatcctcgttagcatttccaagtgcagcctcgttcaagtacttgtcagccaattggactctcttgacattctcttgttcttggacaagcatgttaccatacgtcaagagcttctccagagtcatcttgggctgctcaaaggttggaggtccatcttttgagttcacaagcttcttcccaatgccgtcaacaccaacaccagaaatccacttcctcacttcgtcatcatatactctggccctcagtgcaccaaagaaatcaatggatt

SEQ ID NO: 9297 - DNA, 535 bp, Glycine max
  unsure at all n locations
  Clone ID: jC-gmle01810040b10d1
ctatgtatctatataatcgaattgaaattacgattctatcaaatctttttatttactttttttttttttaagaaaaaagaaagttctaattattaataaattatatctatatatatatatatacagatagatattctatatcttttatcttaattaatatttgacccctccttataatgtgttatagttttctttatttttaggaacttatccattccttttttaatgtgcccgacaatccgaaagaattctgggggaggggtcatttcgtttttgatctagaataaatagagcttcaagaaatgagagaattaagaatacccacgagaaacactaatccaatccataatgatgtaccggaaaatacaacatttttgttattcgaccaaccttcaggagaagcaaatacaacaggtacactaatcaataaaataaatgaaatagcaattaatgcaaaaacagctaattggaaagcaatagtcatgtttctaatcctccaatntaccaacaaaagaactttaccattgatccccca

SEQ ID NO: 9298 - DNA, 520 bp, Glycine max
  unsure at all n locations
  Clone ID: jC-gmle01810040b11d1
aacccataacataaaacatttattaatatacaaacatttattacaaagggaaaccagaaatacagcaagtgaagatttcatccttaagaactactacaagaacaaacagataactgaatttattatttctcagagtcaagtcaagcattatgatacatcataccccaaaacaccaacaacagtactcaggtgagcagttattacatcgtactttcacatgaacgcgtcataaaggcagataaaagcaaatacatacaacacaggaccttaaggctcaagcacagcacaatactatgtgacttaaacggtgacacaattcagcaattattcttaaagcactacggatttgctgaattcgttcataattttagagccttgctagtgtagaatcacacattcttgtgaaccagctaccaccacagtagggtgttcgcttgtgctgactgcatcaacgtctttgacactttgaacgttgacatcctncaattcaccacagcccatggcttcaaaataagatcat

SEQ ID NO: 9299 - DNA, 315 bp, Glycine max
  Clone ID: jC-gmle01810040b12d1
aacgttattattggaatctgtcttaacatggacaagttttctagaaccactttgaaaaatagaggacggccaaatatctactataacaatcaataacgacaagtacattagcaaatatataaaaatccaaaaactccatcctcctccacaagaggcaaagtccaaaatagagctaatgctcctaacaaggtaaatccactggttccagaaaccgatttattcagacctctcattttttgcacgagcaagacactaaatcgcaactagacaagcacataatgtgtagacaagcaactttgcacgacaccaccttaa

SEQ ID NO: 9300 - DNA, 530 bp, Glycine max
  unsure at all n locations
  Clone ID: jC-gmle01810040c01a1
gacaaatcgcatccaaaatggtggaactgaagttgttgaggcaaaagctgggacaggttctgcaacactatcaatggcatatgcagctgccaagtttgctggtgcatgcctccgtggcttaaaaggagaagctggggtagtggagtgtgcttttgttgattctcaggttacggaacttcccttctttgcaaccaaggtacgtctaggtcgtgctggagcagaagaggtttatcaactgggtcccctgaatgagtatgaaaggattggattggaaaaggcaaagagagagttagcaggaagcatccagaagggtgtagagttcatcagaaaataaatgtgataaggaaaaactagtttttgtctcttatatataaggaccatgtgtaatgcttctctatgctcatagattttcttcttcttcttaagaatagtactctaaatntgtggtgtcatccgtagttgctgatgataacggatttgacatcagtggaactgcttaataatctcagaaagatactaagatatcagcc

SEQ ID NO: 9301 - DNA, 579 bp, Glycine max
  Clone ID: jC-gmle01810040c02a1
cttttgagttgcattgttgcatcaccgcaagtccacaacatggctgccactgccgctgcaggcatagcttccttgttttcttcttctattaacagtgtcaaatgtcttcgttcctccaagaactgctccattatagacccccttataaccacagtgccctcaaaccgtggcatgtttgtgtcacacttggtggaacctttgtccattgggggtgccattaattcgcacaagttgtgggggcctagaatttctgctgctgttgcacaagaagaggctgctgttgtggctgatgatgaggtagatgatggtgctggtttagttgaagaagagaaagtggaggagaatgaaggagaagtagttgcagaacaagactctgattcctctgccaccaagctttattttgggaatttgccttatagtgttgatagtgccaaacttgcacggctaattcaggaatatggtagcgcagaactcattgagcttcagcattatcattattttattgataactaacatcttatagtgattcaaatctgagagcggcttcaactttcttagatagccttcccaatttctggc

SEQ ID NO: 9302 - DNA, 511 bp, Glycine max
  Clone ID: jC-gmle01810040c03a1
cgcgcagcagcgtcggagtttcgaccaaatctgtcggaaggccgaggatggtcgccgatttcgcgaggccggtggtgcgtgtccgagcggtgacgagcgacgacgagtggggcccggagaaggaggaggaggcatacagcggacgagtggccgtggaggagaaaccgacggagacggaaacggagaagctgaagaaggctttggtggattcgttgtatggcacggatcttggactgaaagcaacgagtgaaacgagagcagagatcgttgaactcatgactcagctagaggccaagaaccctaaccctgctcccactgacgccttgactctgctcaacggagaatggattctcgcgtatacgtactttgcaggtttattcccattgttgtcaagtggaacactaccattggtcaaggtagaggaaatatctcagactattgacacgctgaattttaccgtccaaaactctgttcagttcgctggtcctttggccaccacctcaattagtac

SEQ ID NO: 9303 - DNA, 547 bp, Glycine max
  Clone ID: jC-gmle01810040c04a1
gaagaactcaagagatggagagtggcggtaatgggaagagagcacatgaagaagcggggccttcatctgggattgatggaaggaaacttgaaatgactgaaaaagcgagtgatgatgataaagaagaggaggaggaggaggaggaggaggaagaaggagccattgaagatagcaaaaatggtttttttgttcctgggcctcttctttctctcaaggaacagatcgaacgggacaaggaggacgaaagcctaaggagatggaaagagaagctgttgggttgcttggaaagtgatatagatgggcaattggatcctgaagtgaaatttcactccataggaattctctctgaggattttggtgaaattgtcactcctctacctgtggatgaaaatcgcaatggctgtactctatttactctcaaggaggggtctcgctatcagcttaagctaaaatttagtggtctgcacaacattgtgtctggcttgacatactccaacactgtgtggaaaggaaggcttcagttgatcagagcaaaggaatgttgggt

SEQ ID NO: 9304 - DNA, 526 bp, Glycine max
  Clone ID: jC-gmle01810040c05a1
ctagttctagatcgcgatctagaacgattgtttgttgttgtaactcgttcttcttcttttgttgttctgtgtttgtgtttgttttttctctcacctgaaaatgtcttgctgcggtggtaactgtggttgcggaagctcctgcaagtgcggcaacggctgcggaggctgcaagatgtacccagacttgagctacactgagtcaaccaccaccgagaccttggtcatgggagtggcacctgttaaggctcaatttgagggtgctgaaatgggtgtgcccgctgagaacgatggctgcaaatgtggaccaaactgctcctgcaacccctgcacttgcaagtgaggtgttgggagagcaagcttcaagcagagatagcccttaattaggaataatgataaactattaatgtgtagctaaaaacttatgtattatgtctgtgatggttttcgtgcactctggtgttctgtgttaaacaaacatccttagaataaagtggtcatgtcttgcctttcagcaagttcaagtgtt

SEQ ID NO: 9305 - DNA, 509 bp, Glycine max
  Clone ID: jC-gmle01810040c07a1
tcaaaatttacataattgttgtgtcaataaagaggattccactgtccttaaggatgataagggaaatcaatatcacacagcaaagctgcataagttcaactcctttacacctttcccaggattgagagctgcagggccaatggtgtccatgtttgcaaggagattaggtgccatcaaacaattccagcatacagaatagtctaccccacacaggaagacattatacagtggtggtgcaccacctcagaagctggtgctgagattccaactgaagaagatccaatagaaagaatcacaattcataataagaaaatgttagatttcctatggaggcaaagtatctaccgttaacagctccaatttattcttcgttctgtatacaaaagttgcctttctttgcttaaagttaaagatgcttcacccaaccacccaacacgcatcatcaaagacgagctattccaagaatttggtttgtctctgaaaggaaagtagtggcaatctaccttact

SEQ ID NO: 9306 - DNA, 474 bp, Glycine max
  Clone ID: jC-gmle01810040c07d1
tgtcgtcctttttttttttttttttttttttttttgagatctcaaaggaaagcgtgttaaatcagaactaaacagagttcaaaacattggccacaaagcacagatccaaaactcaaaaacagcaatttccgaaggggctattcactggccatggacaaaattattaatttcaacggaaagttagggttaacggcggtagtttttttgaagagcccaacctacggcttggaggaggcaccatctgccgaaaattcatgggcatcgggctgagcggccaatactttgcagctacctccggttacagaaccttcctagatgattcttacagaggcaccagcttcgggacttacattggcatgaaccgatttcctccaatcagcatggacctattgagcctgagcaagaggagcaaccttagctggaacaatggcccaaactgcttaggaggcccaaccaccatggttccagtttgac

SEQ ID NO: 9307 - DNA, 590 bp, Glycine max
  Clone ID: jC-gmle01810040c08a1
ttccaatattacatgtacatctgccctctgcactcagctctctactgctacaggtaaatatttgattctcaacatttcaagatgattatatgtgctggaaaaacttaccaacaaaatcatggttatatgtgttttatagaagaaacattttgaatcaagattgctaagggacttgcgtgtttgataccattgagttaaatgttcagatagaaaacaatatgatgattctaaaatagacttgtccaaatatacattcaatatttaattagatgtttggccgtttgagttacttgagttgatacaaatgcaatacatttttctttcgtctcatatttcaacttgttaaactaaataattataaaaatgattttttttcttattttgtattcccacttgttacttattcaataaagacaaaactttaaataacttggttccactttagaaaacgattttccctgctaattgaaaattaaaggtgttttttttccctatcaatggtcaacttatatgaatcaacgagtcaatactatttcaaataatgactaagctcactgacttaaccatttcgcatacctctctacttttca

SEQ ID NO: 9308 - DNA, 456 bp, Glycine max
  Clone ID: jC-gmle01810040c08d1
attcaacaaacctttaattaataacaagaacaagtttacattattttttttcatcttacatatgtacaattgcaagcaatcgcacagcttgagagtcatacatatttcacctcctccattcttttacaacattatattatatgttttccaacaattaatcactatttaatttcccccacattattggtttcccttttctatttccactgttacattatgtcatgacaacaacaatagtaataatgaaagcctagaaccaattaagattcctttgtccctaactagcccaaagcatgtttaatcattaatcacttgcacccaccagcaccaaacccaattctcccacctccaacatcatacacaacctctattggtctctgttgtacgttcccatatatagtaacatcactatcgtcaccatttgcggcaaaagccaaacaaacctgcttggtactc

SEQ ID NO: 9309 - DNA, 594 bp, Glycine max
  unsure at all n locations
  Clone ID: jC-gmle01810040c09a1
ctaagctgtttgttttctgttgaagtggtcgcagctcaaggccttccttcttccatgaatggacttagactatccgtttgcgttagaaagaaggaaacaaaggatggtgcggttaagacaatgccatcaagggtttcacaaggagctgcagattttgaagagacccttttcatcaggtgtcatgtttatcatacctccaaccaaggcactgcaaagcagatcaagtttgagccacgccccttttggatatacctttttgctgttgatgctaaggagcttgattttggaagaagctccgtggatttgactgagctaataagagaatccattgagaaaaaccaacaaggcacgcgggtgaggcaatgggacacaagctttggcctgtctggaaaggcaaaaggaggagaacttgtttctcaaactgggtttccagatcatggagaaagatggaggagttgatatatataataatcaagtggagaattcaaagtccagctctggcaagcttagtagtttctcttcttcttntgctcgtaaacaatccaagacatcattcagcatgtctagtcctagaatgacaagtagaaatgatgc

SEQ ID NO: 9310 - DNA, 520 bp, Glycine max
  Clone ID: jC-gmle01810040c09d1
gatggcatgaaacctggtagagctaaaacctaccttttatcgttgaaataccatatgtcttatatacgacttagaaattttattgacttttacagaaacaactaatgatgacacaacatttacacaattcttgaattcataaatcttcccaaatggtataggtagctgcagtggcttggcttaggtgtgttgtagacaagaacaacctttcacttggacatgaatgcaagactacttccttggcataattaattaataatagaatggaggtgctaattactactttccaagattgatatctggatttctcatggttttgagccacatgtcagcaactattcgcgatgaaatgctccacaactggtcttgttgtccctttgccaatgattgcttccctttcttgttccctgcctttcccaaaccatatgcaaccaaccattgcattgcagtaagtctctgcttcccactgtcccatgcattcttctttatggcacttgtcaacttgaaaccccccacatgc

SEQ ID NO: 9311 - DNA, 461 bp, Glycine max
  Clone ID: jC-gmle01810040c10d1
ataaaattaaaatttataaaaattttatttcccacgagacctagtacaatatatagtaacacaataaatacaagagattctgcaaactgaaaaagggattcttactaaagcaaactcaaacaagaacaacttccactcatttggcatctaccgtagtaacacaagatcaaaagcagcttctctgatagaacacacgtacgtatgattcaacatctttcacagtagtggttcatttctaacagctagctattgcaacttaaaataattgcaatgcttctgcaaagtgctaactttttttcccccccttctttatggatatgacaatgtgatcagaatgaaacaataaccaatccattgaatttgaatctgattttgggtttggatcgataccaccattcttcatctcaggaaaggacaagaaatagaccaaagcctactaattaagcgcttaaaactgcatt

SEQ ID NO: 9312 - DNA, 521 bp, Glycine max
  unsure at all n locations
  Clone ID: jC-gmle01810040c11d1
agtatcaagcatgtaacttcttaacattcaccaccaagaagctggcaacatagacacaaaggagtaaattcagcccatagtaaaacgcagcctccatgttcatcatttcatttccctatacaaattctgttagacatgacaaccttagcagaacatatagtaccagttccaggagaacactttctggaccccttataccctcctatgaagatttctttgcctatcatcacagctgaagcagtggtaatgccattacaaccccaaagatggagaagagtaatagcatcatccacgttggaaatggttttctgtttttcctcacttccttcaacccatctactcttctcatgtcttctccattggattctaatttcttttccaaaactggccttgaactcttgtcgggagacgtatccgatgagaccctctctggagcagcctgctcagaaagctgntgctggttgtacttctcaacatactcagggaacatcttcctgaatgagcatttctacagttgaaag

SEQ ID NO: 9313 - DNA, 506 bp, Glycine max
  Clone ID: jC-gmle01810040c12d1
atgattaacgaaataattttgatatgtagattaaataaacacacgaagtacaaataaacattggtctctctaatcacaaaggagattaagtccattgtggtgtgccttcatgactgaattataccaaagtactacccttaacatactcagtaaaagccagagcaatcaaacccaacatagcaaatctcccattccacagttctgcatctgaggacatgaaccctttggacttagactccacgctgacaccttggaagagtggaatcaaggaagcaagggtaaggaccacacttgtccccaagaaccatgggatgccaccattggatatttgttctaacacaccttgccctttggctacttccactgccattgcagccacaaacccaatcatggccaaccttccattgatcctctcaggtgctggcccactgaatgccaacacatcagaaaacttagtgctcacctttggtgaaggagcagagactggctgtggcttgggttctact

SEQ ID NO: 9314 - DNA, 576 bp, Glycine max
  Clone ID: jC-gmle01810040d01a1
gaaatgatgaggagagtggggtgggaggccatggcttaaagtatgagtatagccagctagaaaaggttaacaaatcatgccctaaacacaagcctaatgacaaggggaaaagatatcctgaggcctattctgatgacatgagatttgatatgtcaattagagagtccaataaaagggtagcatggggttattcagcacccttagctgttgatgatgaattttatgagtctggcatgtatgcatcttcttattctttctcaagtttctcaactgaagttcctgatggaaccctcaacatcaacgacaacaatggtagcttatttaacatgagctacaagattagcctctcagtgatatcatattcaaagataggggacaatacttctgtgtttaatttgtcctctgagagagtgaagatctctgcagaaggagtttatgatgccggagcaggaacgttgtgtatggtaggttgccgtgaccttctctcaaacacaaacactgagataccaatagctcattctgtggactgtgagattctactgaagtttcagtttccatcattggacacatatgatg

SEQ ID NO: 9315 - DNA, 576 bp, Glycine max
  Clone ID: jC-gmle01810040d02a1
caacgaaccactctgaagccgctcacgttatccacaacactctcaaccctccttaaaccctaaccaatccaaccatggcttcttcttccaccttcactgcaatgtccgcctgcaagctctcctcctccgccgccatctcctccttcccctcccgccgccgctccaacgccgtcgttctgtcgaggcgcagccgcgccgccagggtctccgccatggccaaggagttgcacttcaacaaagacggcaccgcaattaagaagctccagagcggtgtgaacaagctcgcggatctggttggggtcacgcttggtcccaagggaagaaatgttgttctcgagagcaagtatggctcgccgaaaatcgttaacgacggtgtcactgtcgctaaagaggttgagttggaggatcccgttgagaatattggtgccaagttggtgagacaagcggctgccaagacaaacgacttggctggtgatggaaccacgacctcggttgttcttgctcagggtcttatagccgaaggtgtcaagggttgtgcagctggggccaaccctgtgctcatcacacgtggcattg

SEQ ID NO: 9316 - DNA, 556 bp, Glycine max
  Clone ID: jC-gmle01810040d03a1
cacacactcactctctctctctctctctctctctctctctctgctcccattaatttcacgatggcaacactcttcgactctctcgccgtcgtgcgtctccccaccgccgcccgccggacctccgttatgctcccgcactgcgctggcctcaggctcagacccgccgccgcttcgcgcctagttgcgtcccccgctcgcaggatcgcttctcgcgcagcgcgcgtcgcctgcgaggctcaggacaccgccgtggaagtggctcctattactgatgcaaactggcaatcccttgtccttgaatccgaatctgctgttttggttgaattctgggcgccatggtgtggtccctgccgaatgattcaccctataattgatgaacttgcaaagcaatatgctgggaagctcaagtgttacaaactcaacactgatgagagcccttcaaccgctactcggtatggaattcgaagcatcccaactgttatgatcttcaagagtggtgagaagaaagatacagttattggtgctgtgcccaagtcaacattgaccacgagcatag

SEQ ID NO: 9317 - DNA, 520 bp, Glycine max
  Clone ID: jC-gmle01810040d05a1
gctcggaattcggctcgagctcaggtaagatcggttcaggatcatgggatccttttctatcagataggaagggctgcttcacaaaatgtacttctaagtaattgctccatagatcctatatctatctatatgaagaagaaatcatgtgacgggggggattcttatttgtacaaatggtacttcgaacttggaacgagtatgaagaaattaacgatacttctttaccttttgagttgttctgccggatcggtcgctcaagacctttggtctctacccggacctgatgaaaaaaatgggatcacatcttatggactcgttgagaataattctgatctagttcatggtctattagaagtagaaggcgctctggtgggatcctcacgtacagaaaaagattgcagtcagtttgataaggatcgagtgacattgcttcattcgtccgaaccaatgaatgccttaaatatgattcatgatggatcttaatctatcagtgatcagagatttctctatgagaaatgtg

SEQ ID NO: 9318 - DNA, 411 bp, Glycine max
  Clone ID: jC-gmle01810040d06a1
ctcgagccgagaagaggtcctcttccaatttgaagctagcgaggatggacaagtccagctctttccaaatgctccagttgatgttgacaattctcccagctttgctgccatcaatgtcagccctattgagtatgggcatgttctgctgattacgcgcattttctagtgtgtgcctcataggatcgaccgtgagagctaacttcttgcacttcacatgagagtggaagctgataatccatattttcgattgggttacaacagttggggtgcttttgcaaccattaaccatcttcacttccaggcttattattcggctatgcccttcccaattgagaaggccctcactaagaaaatagcaagtttaaatggtgcggcgacgatatctgcactgttgaagcatccagctagagg

SEQ ID NO: 9319 - DNA, 324 bp, Glycine max
  Clone ID: jC-gmle01810040d07a1
gtaaagaatggttctggtatcttgaatcatgaagacagttcaaattttgattaaaaaaaatatatgaagaccttaggttgttgattacaagttgaggaccttttagttttattaactaggcttaactattgaggtacaacacaatttggagaagtggttgatgttgatgattcgttctgaacatgaaggattggatcaccaaacatgtattttgaatgtggaattttgatatggctattttatatctctagttatctcagtttgctcctttatgaaagagaccttgaagaacaaagtagattaccgatctacggtgaacaaaaa

SEQ ID NO: 9320 - DNA, 292 bp, Glycine max
  Clone ID: jC-gmle01810040d07d1
gttcttcaagggctttttcataaaggagcaaactgagaaaactagagatataaaatagccatatcaaaattccacattcaaaatacatgtttggtgatccaatccttcatgttcagaacgaatcatcaacatcaaccacttctccaaattgtgttgtacctcaatagttaagcctagttaataaaactaaaaggtccttaacttgtaatcaacaacctaaggtcttcatatattttttttaatcaaaatttgaactgttttcatgattcaagattccagaaccattttttac

SEQ ID NO: 9321 - DNA, 559 bp, Glycine max
  Clone ID: jC-gmle01810040d08a1
cttctctcggagccgctattatccccagacgccaccgccgcagcaccagaagaagaagaagagtgatggctgagtacgacctaactccgcggatggcgccgaatctcgacaggcaccttgtgttccctctcctggagttcctgcaggagcggcagctctacgacgacgaccacatcctgaaggcgaagatcgaccttctcaacaacaccaacatggttgactacgctatggacatccacaagagcctctaccacaccgaggacgtcccgaacgatatggtcgaccgccgcgccgaggtcgttgcccgccttaagtcgctcgaggaggccgtcgcccccctcgtcgccttcctccagaacgaggctgctgtgcaggagctccgagcggacaagcagtacaatctccagatgctcaacgaccgatatcagattggtcctgcacagatagaagcgttgtaccaatatgccaaattccagtttgagtgtggaaactactctggtgctgctgactatctttatcagtacagagcttttgtgcacaatagtgaaaggagttgagt

SEQ ID NO: 9322 - DNA, 479 bp, Glycine max
  Clone ID: jC-gmle01810040d08d1
gagaggaagcttatggcgaacattttaagcaaaatcgttatcaatactacttgtttggatccacaagtaacacaggagaacccctactactccaagaggtatacaggccataaatttgaatgtaattctaaatccaaaataaacagccaaaaacaatttgatgcatccggatagataaaacaaatactctcattggtctacctacacaatcatcgggttgtttgagcttgtgcatgttccaaaagttgactaaccaacttgtaagtgcgtccgttaagggccttggtatgggctatcagttggtcatacacatttagatgattaggttccatgataactgctccagtttcggagtcaattttggcattaagctttgagctccggatgagagtaacaatccatctctcagcctcctcataattgaaatttaacttttcagcaagcactcccatgtcaatgcgttggtgaattctacagta

SEQ ID NO: 9323 - DNA, 422 bp, Glycine max
  Clone ID: jC-gmle01810040d09a1
ccgagaaaaaaatagaaggttttttgatggtaaactaatatttctagtatcagagttctaaagaaggaaagaagaatgggaggttcatcggatacgaagcttatgcaagacctgttgttgtacgctgatagccgcggcgcttagttgcttggtgttgtttgtctgactgagacacctgaaccctaattgctactggttcaagatcgttcttgatcataagagatactatgatgtgcaccgggtacaatatcctatttagactatcctttacaaggttgtaactggcggagaagtgagatatggcttctactgggtttcaagctgatgtcaaagtctttgcacaggttacgtccgctatggctttgatttatcagcatctacacaccatacaaatgagctacttgtttatgcactgtaagctt

SEQ ID NO: 9324 - DNA, 390 bp, Glycine max
  Clone ID: jC-gmle01810040d09d1
accttgttagtgatccgttagtgatcaacgactcttgcactacgaatgtatcctatataccaattgggacctctactacaattaccaagacctactcggagacagtagctagagaccgtgtacgactttaccaataccgaatttagatagctcaaactttgaaggaattcgcgacgaataaatggaacctcgagatgggaacaagcaccgtctcggacacaaaattggtagcggatctttccgagagatcaatctaggaactaatatccagactaatgaagaggtagcggatgagcaagaaagtgtcaaaaccaaccatactgaatggctgaatgaatccaagctggataaaatactgcagggaggaaaacgggatgtccaaaatgtcaa

SEQ ID NO: 9325 - DNA, 575 bp, Glycine max
  unsure at all n locations
  Clone ID: jC-gmle01810040d10d1
agcaatgaaaataatcatacaattattgcatatatatacatacattaattaatctagcattgttcgatcgatcgacctcttaattaattaagctagtgaaaataaatagagcctgatttccgtgaattaaggagtcttcacaagggcttgcaaaatatatactacttgacttgactggcagcatacattttattcaggaatgctgtatagcatcatgagcaatcagccttaattaggttttgcagcagattgactgctaatgatgttatacaatctccatgaatattatattttcctctctgctgtatatatgctgcatatgcatgataacccattaatatatagtaagttgagcaatctaccgaaatccctcaccaaaagcaggagcccaatagtcagctccattgtcacttccaacttggagcgtacatgacactggaaccaggcacaaccctctactcctcaggtctttctttgcttcttcttgagaatcctgctcactactagctgctntcctcttcaaacagtntcattncagcaactgaccgggtcttcagggaatataccaatcttct

SEQ ID NO: 9326 - DNA, 125 bp, Glycine max
  Clone ID: jC-gmle01810040d11d1
gaactggttccactattgtgagaggttgtccctgttatctttagtcaaattgacaatagtggaacctctcacaataaaatttcgacagaaaatgatgtgttctacaattgcctttactacaaaac

SEQ ID NO: 9327 - DNA, 497 bp, Glycine max
  Clone ID: jC-gmle01810040d12d1
acaaataataaatacaatgtcgccattaatattaaacaataactttgacatcataaattcttccaaaataattatacaaaagtgacaagggaaaacccgatctgccagttgcctactgaataaaaacacacatcattactatgtgttggcatacacgcatgaccttgtgccttgtcatgagtgaatattccaaagcaattggtcctttatgcctccttaatccttatgccacaaaatgctatcatcccttgaaagttgtaattgcttcttcagaaatagatttatacaaaggtagttgcaatatctatttgccaaactaaaaatgtaaagacccttcttcccaatcctagtagtgtcccaattgtatttacaaaggcgggacaaaatatgtatatacaagtacaatcatatagcataatgtaacaataatcatactttggtctttactggtgcacattacaggaattattatgcactgaaacccctttgcagagaac

SEQ ID NO: 9328 - DNA, 599 bp, Glycine max
  unsure at all n locations
  Clone ID: jC-gmle01810040e01a1
ctgcatcagcatttccccttcaaagaacaatttcagggcaatggtgccaagagaaccagcattacctactcgatcggtgggtggaggctttatgaaccaaaatataggaaaagctggggaggacatagagatgggcaggaaaacagtgtgggacatgggtgctggaatggatgataacggagctccaataaacgatgatcgtgtgactataaaggatggcgaattgtctcctgaaattaggacaacagtagatgactcggaccgtgctggaatgcatcctaggcgatctagctggggaagaaaaagtgggagctgggaaatgtcccctgaagttctggctttggcggccagggtgggggaaccaaaccgtgtcggtggaggcagcagtagtttgatgcacgagaacagtcatgtgtaagccattatgcttcaagtagtgtgaccaaaggacttgaaatttgatttcacggttataatgaaaaaaatatattacactgttcatgtggtgattctacagcataattatgtgcaatatggngttgtaggcatttgcaaggtgttgcaagtgttttttaggcatttgttctaagaagaaattg

SEQ ID NO: 9329 - DNA, 484 bp, Glycine max
  Clone ID: jC-gmle01810040e02a1
taacagtgcaagtggttcggcgtggttgttagtgagttggttaagcgacggcgtttggttggggttagtattatgcagagaatggcgtacacgttttcgtttccggaggaggtgctggagcacgtgttctcgttcatatggaacgagagggacaggaacgcgatctcgctggtgtgtaagtcatggtacgagatcgagaggtggtgcaggaggaaggtgttcgtggggaactgctacgcggtgagccctctgatggtggtcaagcggttcccggaggtgagatccattgcgctcaaagggaagccgcactttgcggacttcaatttggtccccgatggctggggaggttacgtctgcccctggatcgccgtcatggctcgcgccttcccctgcctcgaagaaatcaggctcaagaggatggtcatcaccgacgagagcttggaactcatcgctaagtccttcaagaacttcaaggtcttggttc

SEQ ID NO: 9330 - DNA, 532 bp, Glycine max
  Clone ID: jC-gmle01810040e04a1
aaagcacaaagcaaagctcatccttgagttaaaaaatggcagcagcttcttccatggctctctcatccccatccttggctggcaaggccgtgaagctgggcccatcagccccagaagtgggaagggtgagcatgaggaagaccgtcaccaagcaggtctcctcaggaagcccatggtacggcccagaccgagtcaagtacttgggcccattctctggcgagcccccgtcctacctaaccggtgagttcccaggcgactacggctgggacactgctgggctttccgcagacccagaaaccttcgccaagaaccgtgaactcgaagtgatccactccaggtgggccatgctcggagccttgggctgcgtcttcccggagttgctgtcccgcaacggggtgaagttcggagaagccgtgtggttcaaggccgggtcccagatcttcagcgagggtgggctcgactacttgggcaacccaagcctgatccacgcccagagcatcctcgccatctgggccacacaagttatcctaat

SEQ ID NO: 9331 - DNA, 490 bp, Glycine max
  unsure at all n locations
  Clone ID: jC-gmle01810040e05a1
aaacacagcaaagtgatggaagtgacaagtgctgttcaccttcactcagttgggtttctgcatttacagacacacgttgaaaggctcaacggtagagctttcttcctctccacaagaccaagaaaagtgaaggttcatcttccttgtcatcaccatcatcatctaaaccacttaagcaataccaacggtattggtgcttgcagtgatagaacaagtgttatactcaactacacttctggtacttgcacaacttcttctgctgcggggtccctatgtgaagtggaaacgataaagcagaagtgccttacatggcatgnggaagggtcaatattgcatcaactactttgtgtcttctgattctcctcagcagttgcatggcagccaccctgctctgttacttgatcatggcttcngtgcctgcattcctcactggcgcacgaatatcagcacactggcccagaattatactgattatgctattgatcttctt

SEQ ID NO: 9332 - DNA, 416 bp, Glycine max
  Clone ID: jC-gmle01810040e06a1
ccgagaacaaaaaaaaaaaaaaaaaaaatccgggattcgctcttctcttggaaaagtgaaaaccagaagtacgaacgaaagagaagagcgatttagaagtgagagaagatggggttgtcgttcacgaagctgttcagcaggttgtttgcgaagaaggatatgaggattctgatggtaggtctcgatgctgctggtaagacaaccatcttgtacaagctcaagcttggagaaatcgtcaccactatcccgaccatcggatttaatgttgagactgtggagtacaagaacatcagcttcactgagtggaatgttggtggtaaggacaggatccgtccactgtggaggctttatttccagaccactcagggtttcattttggtggttgatagcaatgtatgaaatcgagtggttgaggc

SEQ ID NO: 9333 - DNA, 383 bp, Glycine max
  Clone ID: jC-gmle01810040e06d1
aaaaaccaaacccctgggaaattttttcaatcaaaaatcaaccaacccagatgtaggcaacacagcacgcccccccaaaggggggcaagagtcccaattttggctaaaagttttacctaatttaggcaatcttccaaccccaagttccccaaaagaaaatccttttagcaagcttttggcttttacaacattccctaaaaaagataagcttttttttccaaaaaccgccaaactcgcatgaaatccccagacaggaccaaaatttttcaaagggccaaggctttgggggcaaggttgtaaaaaagccagtccaaaccctaatagagcccctttccaaaagttgcccaagggctttggaaatcccaggggcgttgccgggggga

SEQ ID NO: 9334 - DNA, 635 bp, Glycine max
  unsure at all n locations
  Clone ID: jC-gmle01810040e07a1
cgagaaatggcgatggcaatggcgcttcgcaggctttcatcttcaattgacaagcctctgcgccctctcttcaatgccggttccctctactacaagtcgtctttgcctgatgaagctgtttacgacaaggagcgacccggagttacatggccgaagcagttgaatgctccacttgaggtcgtggatcctgagattgctgatattattgagcttgagaaagctaggcaatggaaggggctagaattgataccgtcagagaatttcacctctgtgtctgtgatgcaagcggttggatcggttatgaccaacaaatacagtgaggggtaccctggtgcaagatattatggtggaaatgagtatattgacatggctgaaacactgtgccaaaagcgtgccctagaagcttttagattggatcccgctaaatggggagtgaacgtgcagcctctgtcagggtctcctgcaaatttccacgtttacactgcattgcttaaacctcatgaaagaatcatggcacttgatcttcctcatggtggccatctttctcacggatatcagactgataccaanaagatatctgcagtctcgatttttttgagacaatgcatatcgattgatgaagtcaggatcatcgc

SEQ ID NO: 9335 - DNA, 394 bp, Glycine max
  Clone ID: jC-gmle01810040e07d1
atatcaaccactttactgaatgattgaaacccaagataaggggataggatgaacagacacatgcacaaaaaaataggaataagaagccataattacataggcataaaaacatttaaacattacgaacgaaaaaaagagaaaaacacatcatataggtgaaaggaaaccaaaaaacacaaacatgggcttgataccaggggacgtgaaagccgcaactggaaaaaggctgaaccgtttgaccgaagcacttgcacttggagggaatggccctgaaacgacctggtggaagagtgctgcaagagctgcaccgatgaatggtcccacccagaagatccagtgttcatcccaaccaaggtccttgttgaagaagatagcagcaccaagactacgagca

SEQ ID NO: 9336 - DNA, 564 bp, Glycine max
  unsure at all n locations
  Clone ID: jC-gmle01810040e08a1
caaactgaaggtatgaagggcaatattaatgctctgtctgggttaattcatcaatatggcaaggaacgaaaatctgtacattggggtgataagggtggcaaaacagggttttcaataggggctgcaaggaaggtaaatgctttgtcgttagtgatcggacctggtgctggatataacctgaaatctaatccattacctgaagaggatagtccaacccgtaatagtgtggagtcaaagaagcatagcatatttcaagaacaaatccgggctgaacgagaatctttcaaagctgtttttgataggagacggcacaggattggtgggcttgatgtggaggaggactgaaagaaaccgacccaatgcagaaggctttcacaaaacagagtatggggagggaagatctatcatgcattcagctctatccctccctgcattggagaagttgttaccaggatttgaatccgtcacaagacagatttagagactgattccgaaatttggtaatgtcatcaaaatagacgggttacttgaactcattcttgatacttncatgcattagaggag

SEQ ID NO: 9337 - DNA, 475 bp, Glycine max
  Clone ID: jC-gmle01810040e08d1
atatacatcccatcgtatattcctatcaataaaataaacatcatcatacacgattgtttatatttgaaggacaatcacatgagtgtatttcctcttcagacgtctgttaaaccgataacgtattcttctttcagagtacgtaatgtctataaatggcaaatagcatgctggtacaagaaaagaaaaacctacacttacatagacgctgagttgaccttatcacatcaggtgtataaatatttcatattaatcatcaaataaaattttacatcattgcacaaaaactcaggttggggacatcactttcttttcccagccaccaaacaattcaactctattctttcacttaaactcctctaatgcatggaagtatcaagaatgagttcaagtaacccgtctattttgatgacattaccaaatttcggaatcagtctctaaatctgtcttgtgacggattcaaatcctggtaacaact

SEQ ID NO: 9338 - DNA, 533 bp, Glycine max
  Clone ID: jC-gmle01810040e09a1
taataatataaataagaataaaaaaataaaaaaaaaaaaagaatctatataaatataaaaataatatatataaggtacaaatagtaaatcgaggtacccattttatgataaactttccttccatttttgttcctctagtaggcctagtatttccggcaattgcaatggcttctttatttctttatgttcaaaaaaacaagattttttagatacagaaaacaaagtaaaattctggggttttttattccccaattataatactaaattcaaaaaaaggagagtaatgagtataatctttcgctcagacgatgtactgatatattctatggcggaggttcgaagaacaagcaatttattttgggccgttttcactttgttaggttcattggggttattgttcgttgcaatttccagttatcttggtatggatttgttctttatttctgagaaaattagtgatttttcttttattccggactttatttattttccatttattcccacaggggccacgatggctttttatggaatcg

SEQ ID NO: 9339 - DNA, 539 bp, Glycine max
  Clone ID: jC-gmle01810040e09d1
caaaaggtacacaaaataaataggacaattctgaagctttttgtgcaatttaatttctaattaagttcaattctcatcagtaaaaaagtggtacacccaaaaatacagataattcgccagctttatgtgcaatttgtgtcccattcaaattatcttcaatacgagtcaagggaataaacccctgttctatggtttccagataaacgatactctcaaaagtactggtacgagtaaaaataccctcttctttaacttctgttattattctgatggagtgaagctcgttcataggtatttcgagaataatacgacgattttttccaggaaatccccaacgaacaaaacgtacctttttcccttttttattgaagatatcaaaaccaccacctatatcccaaaaaataatcgacccaaaataaaaactactaaagagacccgcgattccataaaaagccatcgtggccccttgtggaataaatggaaaataaataaagtccggaataaaagaataatcactaattttctcagaaataaagaac

SEQ ID NO: 9340 - DNA, 522 bp, Glycine max
  unsure at all n locations
  Clone ID: jC-gmle01810040e10d1
catcgaaaatttaacataggaaaagaaaaatttatttggatcaataaatacatagcaagcctatattacaatcattccttaccttttctatttcttatcttgcttcttctatattgatcaataaaaactgaagactggacctgtttcccacaattaggtggtaccattgaacaaagttcatgatgctcaagggtgagataggttttttcaaaacaaccaagggcaaaccagggcagaaaataatgcaccagtgaatggcctcattggaaaagattccggaaaccgttgaatatttttagggcccttaattcaccagccctcatgtccctcagttttcttcgcagtatgtattgagcacgaaataatatccttcgctcactagtacacaagtccacagctagctgtttcagaaagagccttcggttgagttgtttaggagaagtcacatccagatccagtgatccacttgcctgtaagaactngttgnattttgatatgctggattcacaactatctagtatg

SEQ ID NO: 9341 - DNA, 496 bp, Glycine max
  unsure at all n locations
  Clone ID: jC-gmle01810040e11d1
caatctcaatgacagtcaacaggtttagctattgatgtggggcaactaaaacgagttacataatacagaaatctaacaccaactttaagcttcatccaaaccagttgggtgaagacttgactatttgacatgagtggcattactactacacaaatctgacgtagtctttgacattaggagcatttactactacacaagtctgaagtaattattaacataagtcagcactgaccaagttgagtaagttcatatgctgagatacatatattgtcaagattttgacagacgaaacataaatattaatgataacatgcacatgcgaaacagctgttcaggattatatgatgatagactttaacggttgccttgattatgatccagacagctgacaataacagagaacatttgcatatctccaatttctggggaacctttntcttcattgagaggcttcaagcacctgatctccagcatcagctagatcattggtagaagc

SEQ ID NO: 9342 - DNA, 476 bp, Glycine max
  Clone ID: jC-gmle01810040e12d1
aagaagaaacaagcattaatagaatttttatttctcacacaataaatacaagagattctgcaaactgaaaaagggatttcttactaaagcaaactcaaacaagaacaacttccactcatttggcatctaccgtagtagaacaggatcaaaagcagctctctgatagaacacacgtatgtattatattgaacatcttgcacagtggttcatttctcacagctattgcaacttaaaatacttgcaaagcttctgcaaattccaaactttctttttctcccttctttatggatatgacaaagtgatcagatcatgaaacaataatcaatccattgaatttgaatctgatttttggtttggatcgatgccaccattcttcatcttaggaagggacaacaaataggccaaagcctactaattaagcgcttaaaactgcattagtggttggtttaagtgtgaagttagtaacatcagcttga

SEQ ID NO: 9343 - DNA, 567 bp, Glycine max
  Clone ID: jC-gmle01810040f01a1
tggaaatctgttacgagttttttggcactccgttgatgggatgccactttcaaaatggctgtttatctctgccagcatagttaccgagttctggagttaggtatttttctttccagtgttggcacccgatgtttttagcactgttttgtatcggttttgccaccatgtgtgtccttgtccttgtttctttgcagcagtacatgtatcgagtctttccagtggtgtttacccaatttttaacgtatttgagcttatgctctgtacgcgatttttgggtctaagttttagtcaaggggcatgttgaagttccagtttatgtggtgatgttgtcctggttactttggcagttcttcagagttttatgaagcctttgtcatcgggagctttggtcatggcagcaagctattatacaggtctgtcgtcacaatcttttccctttgggggatgggttgtttttttaactaccaaagcccttgtttattaggcttcaattttttttggaacttgacattgtaacctctatatcatgtaatgatacttactgaaatatgccccttgtactgtatg

SEQ ID NO: 9344 - DNA, 577 bp, Glycine max
  Clone ID: jC-gmle01810040f02a1
cggaattcttattaattactttaaaccgaataaatcttgataattgaaaaattaagtcataatttattggttgattatatcattaactatttctttattttatatttaggttacgaggaaattatcatgaatccaattatttctgctgcttctgttattgctgctgggttggccgtagggcttgcttctattggacctggggttggtcaaggcactgctgcagggcaagctgtagaagggattgcacgacaaccggaggcagagggaaaaatacgaggtactttattgcttagtttggcttttatggaagctttaacaatttatggactggttgtagcattagcacttttatttgctaatccttttgtttaatcctaaaaaaatagaaatacatatccttttttccgtggacttgctttaccggtcttgctttttcgaattctatttatattaatatttcactcctataattctttatccgttcggacaagaacacaggggaaggactaattgaaagtgaagaatcacatactgattcgccccttttcttctctttttagtcccatgaccccccctt

SEQ ID NO: 9345 - DNA, 541 bp, Glycine max
  unsure at all n locations
  Clone ID: jC-gmle01810040f03a1
atttccggcttattttacgacggcagatacaaattctggactaaacacgagaaaaatcttgctttgacagaagaggaaaagatggaggtgattagaaatagaggcattcctgctgatgttcttgcaaagcgagctcatgaatttgaaaaacatgttgctcatgaaagcctcaaggatcaaattcctgctgttgacaagttgtattctactaaggttaataagtttgcaaaaattatgaaccttagacaaagtgttgttggtgatcttaaacttcttactgatgggaagttatatgagggtaagcatattcctgtatctaatattagtgcaggggaaaatcatgtagttcaaatacccctaatggcacaggaggaaattctgtcttctagtgcaagtgatttcagaactgcaatggtgagtaaaaatagcaagcctcaagctactgcaatgcatgtgggagctatagaaattatcattgatagtttcgcaagtcctgactgcaacatagttggtgcaatgcntttggttgatacttatcata

SEQ ID NO: 9346 - DNA, 558 bp, Glycine max
  unsure at all n locations
  Clone ID: jC-gmle01810040f04a1
tgcaattgaagttaaaagccttagccttccctacaactccaaacacaaagacatcatcatccatggctgcctccgtctccactgtcggagctgtcaacagagctcttttgaacctgaatggttctggagctggagcttcagctcccagttcagccttctttgggaccagcttgaagaaggttattgcctcaagggtccccaacagcaaggtttccggtggaagcttcaagattgttgctgtagaagagaagaaagagattgaagagacccagcagaccgacaaggacagatggaagggtcttgcctatgatatctcagacgaccaacaagacatcacaagaggaaagggtttggttgactcccttttccaagctccacaggatgctggaactcactatgcagtcatgagctcctacgagtacctcagcactggacttcgccagtacttggacaacaaaatggatggattctacattgctccagctnttatggacaagctnngtgttcacatctncaagaacttcatgaccctgcccaacataaggttcctctcattct

SEQ ID NO: 9347 - DNA, 575 bp, Glycine max
  unsure at all n locations
  Clone ID: jC-gmle01810040f05a1
ggaaagaataggaaaggttatttctttatattttccccggatcccactactaagagagatgttcatttcttaaaatatcctatatacgtaggtgggaacaggggaaggggtcagatttatcttgacgggagcaagagtaataataatgtgtataatgctacagcagcgggtatggtaaaaaaaatcatacgaaaagaaaaagggggatacgaaataactatagtggatgcattggatgggcgtgaagtgattgatattatacctccaggaccagaacttcttgtttcagaaggtgaatctatcaaacttgatcagccattaacaagtaatccaaatgtgggtggatttggtcagggggatgcggaaatagtacttcaagatccgttacgtgtccaaggtctcttgttcttcttcgcatctattattntagcacanatctttttagttcttaagatgaaacaatttgagatggttcaattgtccgaaatgaatntctagtcccgcatatttatcaacatattaaactcataaaaataactcaacttttntggtgataaattatgtaattctattca

SEQ ID NO: 9348 - DNA, 515 bp, Glycine max
  Clone ID: jC-gmle01810040f06a1
tgcagatcttcgtgaaaactttgaccggtaagaccatcacccttgaggtggagtcctccgacaccatcgataacgtgaaagctaagattcaagacaaggaagggatcccacctgaccagcagagacttatctttgcgggtaaacagcttgaggatggtcgaacccttgccgactacaacatccaaaaggaatccactctccacctcgtgcttcgcctcaggggtggcatgcaaatctttgtcaagactttgactggcaagaccatcaccctcgaggtcgaatcctcggacaccattgataatgtcaaggccaagatccaggacaaggagggtatccctccagatcagcagaggttgatatttgctggtaaacaacttgaggatggaagaacccttgctgattacaatattcagaaggagtctaccttacacttggttcttcgtttaagaggtggcatgcagattttcgtcaagactttgacgggaaagaccatcaccttggaggttgagagttca

SEQ ID NO: 9349 - DNA, 372 bp, Glycine max
  Clone ID: jC-gmle01810040f06d1
cttggcttcttaataacaaattacctatcctaatacaaaccaatcccacgccaaccacaccactcacacgaaacaccactgaactacaagggggaacaaccccacagaacccaaacaaaaaacccaacaaaacaaagcacacaaaaaagggaaacacccaaacaacaaaaaaaaaaaaaaaagaccccccaaaacacggaaagcgcaagacaccccgcaggggggcccagggcaaaccccaaagcggataccaacccccccccaaaagggggccccgctcaccccccccccaaaggggggcaacccaaaacgaaggagggccgccccggaaggaacccacccgaggggggaaccccacacaccaaggggccc

SEQ ID NO: 9350 - DNA, 512 bp, Glycine max
  Clone ID: jC-gmle01810040f07a1
cacgaggagatgcgggcggccccgccgccgaagccgaaggagaaggcggaggaccggtaccgcgacgacgaggacgacgatcccatggagagctttctgatggcgaagaaggatttagggttaactctcgcgtcggacgcgctgcacgctgggtatgattccgatgaggaggtttatgctgccgcgaaagctgtagacgctggtatgattgagtatgattccgatgataaccctattgttattgacaagaagaagattgaacccattcctgctcttgatcactcttccattgattacgagcccttcactaaggatttttatgaggagacaccttcaatatcaggtatgagtgagcaggatgtaagtgaatacaggaagagtttggctattcgtgtatcaggttttgatgttcccaagccaataaaggcatttgaggactgtgggttttcttcacagattatgaatgctattaaaaaacatggatatgagaagccgacaactatacaatgtca

SEQ ID NO: 9351 - DNA, 486 bp, Glycine max
  Clone ID: jC-gmle01810040f07d1
gaatcgaacaaacctcaaacctttctacttcttggaagttaaaatcatataggtgattgaaaactggtgcattatttatacagacataatcaactcttgacttgacctaaatataggaacattgatacatttggcagtgggtgtcattcaatgtgacaactatctatcccaacctgatggtctccgcctttctttaggtttagaactgttcgtgctcttctgaccaggatttactccataaccttgactggtggaaattaccgctgatgtagcaggattgggtgaagcagtactctgataagtatttatgtcaccaccaattgatccaccggatacaaaaccagggagtgctgttctcttattagcagtcatgcttgtattgttaccaaagccttgattctgagagtttgatgaagcagcaacaaagttactcttgaattgtgacatcattcctgttcgcagagaatttacagcggcagatcgact

SEQ ID NO: 9352 - DNA, 581 bp, Glycine max
  unsure at all n locations
  Clone ID: jC-gmle01810040f08a1
gcagcaggagaatgtggatatagtgccaaagcaaaagcctcagacgctggattccctgtttgcaaacatgaaggagcaaagaatgagagttttgtcaatgcagaataatgctgtgcaacgcaatggaggtggaaataagaggctcccatggagaagaggccgatttggcaactaagttgttcacacaatggggaatttcatgatatcaccttttgaacctatgtcctggcctgctgcgtcctgactcctcctgggttgatgcaagtgaaaaatttctcgagtgcagaagaaaactctagattccccaccccctagttggatggattatctttccccctttcattcgaatggacttcttcatttgctcgtccgttggatattagtgtcttccgtggcttaatgtttgttctggtctggtctgtggtccatatgtggacacaattcctaacagttacaatataatgtcatttgagaggcctttgggcccgtagcaggtttatctgtacttgtatgtttttcttttnttgatattaagtatgggacagtantttcttgctatggtcaactaccatgatgggctt

SEQ ID NO: 9353 - DNA, 461 bp, Glycine max
  Clone ID: jC-gmle01810040f08d1
cttgaaacgcaaaagcccatcattgtagttgaacattagcaaagaaatactggcccataactaaatatcaaaaaaagaaaaacataccagtacagataaacctgctacgggcccaaaggcctttcaaatgacattatattgtaactgctaggaattgggtccacatatggaccacagaccagaccagaacaaacattaagccacggaagacactaatatacaacggacgagcaaatgaagaagtccattcgaatgaaagggggaaagataatccatccaactagggggtggggaatctagagttttcttctgcactcgagaaatttttcacttgcatcaacccaggaggagtcaggacgcagcaggccaggacataggttcaaaaggtgatatcatgaaattccccattgggtgaacaacttagttgccaaatcggcctcttctccatgggagcctcttat

SEQ ID NO: 9354 - DNA, 403 bp, Glycine max
  Clone ID: jC-gmle01810040f09a1
ggctattggctctacctggtgacaactactctagcgacttgactacatctgatgagagagtgcaaggcccagatcatgatggatgtgatcctaagattggggcgattgatggacatggcggttctatgatgcgactatatgaagctagtcgccgtaaacgagcacatgatttggaccgagtacgtgacgtacgtgttgatgaacgagagtgcttacaggcactggatgcatgagcatgtctccgtggaggatgagatgacgactatatggagagacatgctattgactgatctgaggcacatgatcatgggctagatcccatggatggcgactggagctgacgtcgatgtggagttcaccatagtgatcagatgacatgagattgctgaaccacatttgaaga

SEQ ID NO: 9355 - DNA, 314 bp, Glycine max
  Clone ID: jC-gmle01810040f09d1
aaatataaggacccagtcatcgtacattgcaatgcgccatatatacgtgattactggattacagtactaacatgcacatgcatacgggaactaattagccaaatatttgacactcttacagctattatgacgatgagtcaccacaaggtcattggcgaatgtactcaaaatcacattcttaatgctaatacgaacaaggcgtagagctactggaagctgatgctccttactaggaaaaaccactggcttaccaaacccaagtgctgagaccattcatttgttgaactagcaagaccctaagttacctgtagacc

SEQ ID NO: 9356 - DNA, 495 bp, Glycine max
  Clone ID: jC-gmle01810040f10d1
ggaaatcaatatatattattcctttcaaagaaacaatttacaaaaagaaaagggtgggtggaaaaaactgtatcttatatggcttgcaaaacaggataatcaatgttggattaactgattagaatgttgttgcaggcctaggccaccaacatggatggggtgggggaaataaaaaaataacttgcttaatttgttactaacccacataagcatgtactgtacttactctagagtctaaaatactcaatgcaaatgatttacaacctggaggttggatcaaatccattaccattagagacatgggctactttctcatccgcggcatcatcgataaacctcttccagaaccaatgctgcttccacactctctcggtcatctcttcgatggggacattcttagtctcgggcaacaggaaaagcacgaagacagacatgacgaggacccagccagagaagaacaagaagataccaaacttgaagtggcagagcatagag

SEQ ID NO: 9357 - DNA, 451 bp, Glycine max
  Clone ID: jC-gmle01810040f11d1
gagatctcaaaggaaagcgtgtttattcagtactaaacagagttcaaaacattggccacaaagcacagatccaaaactcaaaaacagcaatttccgaagcagcttgaaaggcagcattatatcagttcctaactacgaatttcaattcttcttcacagtggcagcatttatgatgtccacgaactccggcttcagggaggcaccaccaaccaaaaatccatcaacatcgggctgtgcggccaattctttgcagtttcctccatttacagaacctccatagataattcttacagatgcagcaacttcggcactcacattgtcatgaacccatttcctcaaatcagcatggacctcttgagcctgagcaggagtagcaacctttcctgttccaatggcccaaactggctcgtaggccaaaacaacattggcccaatttgatattttagctgca

SEQ ID NO: 9358 - DNA, 532 bp, Glycine max
  Clone ID: jC-gmle01810040f12d1
actgctaataggtagacattaaattttatatatggatatgatgcaattcatacttcagaagagtcttatgaaataattgaaaattaaaaatagaacacaagtgggctttttgaaacccagaaacaagaaatatccattcttaatcagaaacaaacttcaaaatgataaattaaaagaaaagtgattaaattggttgagatggtaatttcttatttgctaggaagtgtcgaaccaactgcagagcttgcttgggtgtgaaagtaggaacttgatgaccagcacctcttatggtaacaaaagtaagtccatcgtaagcaatggtccatcctcccacctgcttgctggtataccagggagtccaatcttcgacgatcccaagccccaactttctaagagtgtatcttgttgaagtcacgggaattcttccatcggtatctccactggtaacccaaatgcgaataccaccagcaataagcttcttgatgacaggaagcatggactgtggtgagtcattccaaaatgtgatattatc

SEQ ID NO: 9359 - DNA, 589 bp, Glycine max
  Clone ID: jC-gmle01810040g01a1
gaacaagctgggaagcaaggaattatggtggcgtctcagagtcaaaaccccattgagcaaatccaagcgcgcttcaaggacttggaaactggattccgcctctggctctccaagcagtccctccccgtcgaggccgtcgtcgtcaccaccaccagcgccgaccagggcgccgccatcggcgccttcatgggcaccctcaccgccgacgcctcctacaccttccccacccctactaccaacgcctctctcaatccccaagccatggcgtctcttaaacaagcgcaggctctagctggaggtcctttaattcaggcgcgaaactttgctgtgatgacgggagtgaacgctgggatttcctgtgtcttgaaaaggataaggggaaaggaagatgtccagtctagcatggcggcagcttttggttcaggggccttgttttcattagtaagtggcatgggtggaccaaatcaagcaacaaatgcactcacttctggacttttctttgcacttgttcaaggtggactcttccagataggacacaagttctcttaaccacctgctgaagatactcactatgctaaaacatgacaca

SEQ ID NO: 9360 - DNA, 472 bp, Glycine max
  Clone ID: jC-gmle01810040g02a1
agcgaacgtacggcttagactcgaacgctgccgtgatgttcaccgaatgcttgcggggctacaacgcactcatcgcttacaagcctatatgggtatgcgcagagtgtgacctgtcatcagagaaggcgttgatacctctcgtcatacaacttgtccatgaaatcatatctcactatggcacgtgacgctatagtcacctgcccatgttcccggctccggaaactagaaccgcaccccatctgatggatcatggactgggacacacgctagtgcgtttgaccttgttcaacctcgacttcatatgcggctgtgatgactctactgcttccacgctcgggtcgaagccgggtgcctctactttcactacgtcctagcccctgttctccaaacggcgatcaccaaactcgcattctgcggtctccgaactgtcttcatcaccgccggcgtggacaccgaactctgcttgatgcgc

SEQ ID NO: 9361 - DNA, 595 bp, Glycine max
  Clone ID: jC-gmle01810040g03a1
gtaatgctgctcttcagataccaacaagcttccgatacagacatggtaatgaacatgagcaacgccgcggaagaggtcgtacgtttcgtcgtgatactgaaaatcaactttctatggccattgaagctagtttggaaacagctaatgcagagcaaacatttcttgatcaatcgacatcaagtagtgggcaagttgccgttgatgatgggaatgatgatatcgatgctctcattcagccatttgaatcattagctgcaggttctgaagcatctgcaagataccttcaagccttggggcatagctctaggaatggacctctggaagattcttgctttccaccactacccataatttccagcaatggccaacaaaggtccaaacatgaactggaaggttcatctagtaacactatggctgcacgtctgcgtcggcatggcaacagaactgtatccgttatcaattctggtaatgcttggccagcagcaggtcgtggactggtacagtcatcaagtaatccttcacaatctatactttcacacataatgtccttggactggctcggtacactgggccagatgaaacagttattaacagt

SEQ ID NO: 9362 - DNA, 584 bp, Glycine max
  Clone ID: jC-gmle01810040g04a1
gaaaagagaaaaagactgattaatgacattaatgaaaccggggtgaagcaacaaggcatgatagcccggttattgtcaaaatttctcagatgcagtgttaaacagacactccaacaggtccccgcccgcacattgtctatatcagctgatgaaacgaacacttcagaccagtcccacatacaaccatcccaagctgaagttctggttttaaatcttcaaactaagaagtactcctttccagagtacatggagaaaatgagcgaactaaaagttcttatcatgacaaattatggttttcatccctgtgaacttgaaaattgcaaactacccagctctgtatcaaacctgaaaagaatcagactagagcggatttctgttccccacgtaggggcattgaaaaatcttgaaaagttatccctctacatgtgtagtaacataagtcagatttttgaaaatggtaccatcccagtttcagattcatttccaaaactatcagatttgaacattgactattgcaaggatatggtggaattacctactgtgatctgtgatattaccccactaaagaagctcagtattactaa

SEQ ID NO: 9363 - DNA, 535 bp, Glycine max
  Clone ID: jC-gmle01810040g05a1
agatgttgttaggctgtatcactcactcaatgaaggaaatactgacgaagctgaacagtttttcaaaacattatattcatttgtatatcttcaagggacatatcttaaaccacatgttgccattgtggatggaataacaatgggatgtggatctggaatttctctaccaggaatgttccgtgtggtaactgataaaactgtgatttctcacccagaagctcaaataggtttccacccagatgcaggagcttcttatgttttgtctcgtctacctggctacttaggggaatacttggcccttacaggagataagcttaatggtgtagaaatgattgcctgccgccttgctactcattattcactaaatgcaaggctctgtgtgctagaagaacgtcttggtaaactaatcacagacgaaccttctgttgtggagtcatccctcgcacagtatggtgatcttgtttatccagataggagcagtgtccttcacaggattgatactattgatagatgttacagtcacgaaactgtggag

SEQ ID NO: 9364 - DNA, 502 bp, Glycine max
  unsure at all n locations
  Clone ID: jC-gmle01810040g06a1
atctctcaccaacttccgctacttcctactccaaccactttcttttttcccgcagtcatgggcaaggtcaagatcggaatcaacggatttggaagaattggccgtttggtggccagggtggctctgcagagagacgatgttgaactcgttgccgttaacgatcctttcattaccaccgattacatgacatacatgtttaaatacgacagtgttcacgggcactggaagcatcacgatgtcaccgttaaggatgagaagacccttctcttcggtgacaagccagtcactgtttttggacacaggaaccctgaagagatcccatggaagtcgactggagctgacatcattgatgagtccaccggagttttcaccgataaggataaggctgccgcacatttgaagggtggtgcaaagaaggttattatttctgcccccagtaaggatgcccgcatgtttgntggtggtgttaacgagcacgagtaccagccagagcttgacatta

SEQ ID NO: 9365 - DNA, 495 bp, Glycine max
  Clone ID: jC-gmle01810040g06d1
aattaaaaggtccatgtaaccattagtttcgataaaccaccgaaacgtcattactggaatctgtcttaacatggacaagtatacgagaaccacgtggaaaaatagaggacggccaaatatctactataacaatcaataacgacaagtacattagcaaatatataaaaatccaaaaactccatcctcctccacaagaggcaaagtccaaaatagagctaatgctcctaacaaggtaaatccactggttccagaaaccgatttattcagacctctcattttttgcacgagcaagacactaaatcgcaactagacaagcacataatgtgtagacaagcaactttgcagtacaccaccttaaaaagacttcttggcaacgaatacaagcaggtcaatgacacgtgagctgtatccccactcgttgtcgtaccaagaaacaagcttcacaaagttcttattcaatgcaattccagcctttgcatcaaaaatacttgatct

SEQ ID NO: 9366 - DNA, 549 bp, Glycine max
  unsure at all n locations
  Clone ID: jC-gmle01810040g07a1
ccgataagtacaccgcgctgggcgcgaagattccgaaagggtgtcttttggtgggcccaccgggaaccggaaagacccttctggcgagggctgtggcgggggaagctggggtgccgtttttctcgtgcgcggcttcggagttcgttgaactttttgtgggagttggtgcgtcgagggtgagagatttgtttgagaaggcgaaggggaaggcgccgtgcattgttttcattgatgagattgacgccgttgggaggcagagaggggcggtgctcggaggtgggaatgacgagagggaacagactattaaccagcttctgacggagatggatggcttttctggcaattctggtgttattgttttggctgccactaacagaccggatgttcttgattcggcgttgttgaggcctggccggttcgacaggcaagttactgtggatagacctgatgttgccggcagagttaaaattcttcaggtgcattctagaggaaaagcacttgcanaggatgttgacttttgaaaaattgcaggagaacccctggattcac

SEQ ID NO: 9367 - DNA, 477 bp, Glycine max
  Clone ID: jC-gmle01810040g07d1
gaaagtgtaactcagccgtagaaccatattttttatttatttattgcgtaagctgctgtgctaattgttttttctccttgaatttgataaaataattattgattcttacagtgtacaagtcagagcgtattttatagtacaaacataattctgtgacttgcgtgtatgattatgcaacatataattcggcttttccatcaatgaatagactcatgaactcttcaccatccacagtttctttttctatgagaagttgagcaagcttgtgaaggatatcaatgtgagttgagataatatgtgttgccctagaatatgctctctctaccagttccctcacttccgcatccactacatccgcagttgccatggagtaatccttttgcgatgacatctgttgacccaagaatggatttccaccaggtccaccaatggcaacttgtccaatttttttgctgaatccaaatctctcaaccatct

SEQ ID NO: 9368 - DNA, 576 bp, Glycine max
  unsure at all n locations
  Clone ID: jC-gmle01810040g08a1
cttaaacccaatcgaagaaaaataaaatgttgttccacaatccaccacataccgactgaaaaaaaaaaactcagtttgtgggtttattatactttgattgattaattaattattagttattagttagttggttaatcaatggaagagtgtcacacggtgttcggaaagtacgagatggggaggcttctcggcaaggggacgtttgccaaagtgtattacgggaagcaaataagcacgggcgagaacgtggcaatcaaagtgatcaacaaagagcaagtgagaaaagaaggaatgatggaacagatcaaacgtgaaatctccgtgatgcgtttggtgcgacacccaaacgtggtggaaatcaaggaagtgatggccacaaagacaaaaatcttcttcgtcatggaatacgtgcgtggcggngaactcttcgccaaaatctccaaaggcaaactcaaagaagatctcgcccgcaagtattttcagcagttaatcagtgccgttgattactgccacagcagaggagtatcccaccgtgatctcaaaccagagaatcttctcctcgacgaagacgaaaac

SEQ ID NO: 9369 - DNA, 523 bp, Glycine max
  unsure at all n locations
  Clone ID: jC-gmle01810040g08d1
ccattccgaatgtagcagcagcacaatatatttaattgcagtttatgtacagcctcaccttcaaaaggtgcaaaaccctatctttccaaaaaatcaggcagggaataaagacgaaagcgacaaacccaaagcaaaagaaagaaaagtcgttagaacattaccgtttctagaaccctctccgtggactgtcacgctaattataattaattaatttatatagtactaacaacaacaacctgcttatgacactcctcaccgtgacaggcgggaacgttagcagcacacgtggcatccccttgccacgtccaaacaatgtccttcagcgcgggcctcacgtcctcctcacagaacttcgcgtattccaacgtgtcgccggcggacttcgaaaactcaacaacggcgacctccggcgccacctcgaacacctcagccgtgaccgccagcctccctttcctcccctccgncgcgccctgcagccggatcttgaagtccttaacctccgncacgcggaaactcagccccc

SEQ ID NO: 9370 - DNA, 386 bp, Glycine max
  Clone ID: jC-gmle01810040g09d1
cccttgcactatcggatcgatactggagataccttagccaaggttgtaatcctgaacggtacaagtgaacaaaacttttgcatgtacagttagcgatcgttggaaattacatatgattacagtccgcggatagagcagtagtctcgtgaacaggatctgccttgtgcgacaagccgcctactactgtccttgtagtggtgctcgctcgagatctttagagcaccctacccttgacctgcttccttttcctggggtcaatagcccgccagatcgcgacggctgggaagccaaaagcggtgattgcggtggcagaaatgagcatgatcctttgggagttgccgtatgcgttctggatgccaattttagtcgggctgccgataggatag

SEQ ID NO: 9371 - DNA, 484 bp, Glycine max
  Clone ID: jC-gmle01810040g10d1
cactcaatacaaacagtaaattttgtatatctaaggacgacaagacatcattcctatgaccaaacaatgcttacatgaaaagaaaagaaaaggaaaaagagagaaaacaattaacttgccaagatatatgtggagaaaattacataaaaagagaaggctaggtattaaaatatttcactaggaccccaaaatgttgagaattggttggatcatgcacatatagatattctgttctgctgcaaaagggcatgtgaaactatgcagagcagcatccagactttttaacagctgagacatcatccctacttccaacattgatggtctgccccttaggcaaggctgcagggtcatctccgatctcaagagtcttcctgctaacaacgcgatatatctgagtgagcacttcggtgaaggcgttatcgacattcaaggactccagagcagatgtttccatgaagaacgtgttttctctctcgcaaacgcc

SEQ ID NO: 9372 - DNA, 509 bp, Glycine max
  Clone ID: jC-gmle01810040g11d1
gaaatcaacgtgaatttatagaattaatcttaagtaaacatgattttagagtaacttgatttttgtttggatatatatatatatatataaaccaatcaaattacaataaaaacatgatccatcatctgcattattcacatcaaaattttgtactttcctaattctgctggtccgtactgacggatttttaccgttttaaataactgtaatggtggtgtgtgtaagaatgggacagtcagtggccaaaaatccaagaatcaattatccacccaaccaccaattaaaattttcctcagatcctagggtcccatgattccaaccaaaagcagcatcacaggccaaaaaattaagcacccatcaaaccactttttagcttttccaacttatgttcctcttcccccctgcaaaaataatgtctagaccactgcaggctctcggagctttttctgaagattatgtgccacagcatcaataaattcctcgtgttcaagtaaaattcccttgatacc

SEQ ID NO: 9373 - DNA, 477 bp, Glycine max
  Clone ID: jC-gmle01810040g12d1
gccgagcttaaaccattttgttatatattgagacataatcaagtacacaactcatagcaaaaggtttattaagctgtaaaggtgcatttaaccataaacaaaaatagtctccaagactataaaaacattacattttagacaaattagtcttccacttcatcgtccgtcaacacctactgtaactgctggtgttgctgcctaacaagtatcatattcactgcaaacatcttagtaggagtagcttttgacgaacaactccttcttggcttcctcggattcaccctcaccagtgtacttcccaagctgagcgagtgagttggacttggcacggaatgcgagtgcatcttgtgctgccttcacgttctctgggcggcctccccatgtcttcaaggcagtgttttggagggctctggcatacgagaatgacacgtgccacgggtttggagattggttcatggcattcaaattgagggtagc

SEQ ID NO: 9374 - DNA, 556 bp, Glycine max
  unsure at all n locations
  Clone ID: jC-gmle01810040h01a1
gctttgctcaagtctcagcgatatgatggcagacccagcaagtatcatagcaagctggttaactccttcttacctcttcatcttggtcaacctcgtcataggcaccatagccatcaactttcgcttcagttccacgcccaaaaaccaacaagcccaccacccgcaaccactcagctccttcaatacccatcatcaccaacccaactgcactcagccccaactccttccaataccctcactgttgcagcgagtcacgtccttcaacctctacctccacagacaccaacccacacctacagaaacacaacatctgcatcccgaaccccaaccccaacctgaaaagcctgcggaactgcttaggactccctcactcttggagcgactcaggtccttccataatctttctctccacaaacatgtgcaacccgagccagagccagagccagaacctgaacctgagaagccggaactggttcggagtccctcgctcttgcagcggattcagtccataaacttctnccatgtctacagatccgacttcagtcaccgagatgat

SEQ ID NO: 9375 - DNA, 612 bp, Glycine max
  unsure at all n locations
  Clone ID: jC-gmle01810040h02a1
cagagacagcggctgccagataacagcaatgttgataaaataagggaatttataaggagtgtgtatgtggatggaagatatgctgggacgaagtcttcggaaaagcctccaagagatgcacagagtcctggaattcatgaagatgagattaggcgtgccagttcttatcattcatattctcaaagtcctccatatgattatcaatatgaggatcggcggtatggaaaacaagtagctgcactgaccaggaagcctggttcagataaagctcgctataaagggaagatgtctagtattatatacagtcctgaccgcttcagtgatcacgtgtatgatgacagatttgcaaatgagagatctggtccacgaatttccgacttttctgagtctagtggtggcgaacaattgaaatctgatgttcagtctcccaactttcataaggatatcaagattagcagtccatcctatcagcggcgttctggtacaagttcaagtgaagatgtgtggtcccaagcaaganatgcatctctggaaataatgccaatgccaagagagatgcagatggaattcgtcctccgcagagaactgcgttagcttaatcaacagacaaca

SEQ ID NO: 9376 - DNA, 559 bp, Glycine max
  unsure at all n locations
  Clone ID: jC-gmle01810040h03a1
tcctcctctttttgttagccctactgcacacttgaacaacatggtgacccgccgtcagctctcagtgatagcctccattgtggctgttgccagcgcacaatgtcctgactatctcgactacgcggaagtaccgcatggcccttactcttcgggaagatacaatctttcgtatcaacgccctgaaccagcatgccggacattcaactcttccgttgtggaagacgcgattactcgcgtgaaaggagacatcgcagacccggatctgaggaggttgttcgagaacacataccccaacacccttgacacggccatcagatggaaaggcacagctgagggaagcgacgaggagttgacctttgtcatcacgggcgacatcaacgccatgtggctacgcgattccgcgaaccagatgcagtcttacctccctcttcttgaggcttcgtcttcctcggactccatcgcatcgctataccgcggtgtgatcaatcttcaggctcgctaccttctcacatctccatactgtaactcgttccagccgncagtggagtctggcattgag

SEQ ID NO: 9377 - DNA, 576 bp, Glycine max
  unsure at all n locations
  Clone ID: jC-gmle01810040h04a1
cgatttctcgccccccccgccgtccttcgacaacctccgccgccgaaacttccgctcctccgcaggatccggcgcggcgtttcacggcatctcctccctcatcctccgcttccctcccaacttccagcgccagctaagcaccaaggcgcgccgcaactgcagcaacatcggcgtcgcgcaaatcgtcgccgcttcgtggtcgaacaacagcgacaactctccggccgccggggctccggcgccgcccgcggccaccgccacggacgccgctacggtgcctctccccgtcgtcgtcgccgccaacgaggacgtcgttgtctccgccgcggcagacgagaacggggctgtacagttaaacagtagttcttattcttcatttttgaaatccgatgcaagcaaaacgattcatgccgctgaaagactgggtaggggtattgagactgatggaattaccacccctgtggttaacacttctgcctactttnttaagaaaaccgctgatctcattgatttcaaggagaatccgcaagtgagttatgaatacgggcgctatggaaacccaacgacgtggttctg

SEQ ID NO: 9378 - DNA, 502 bp, Glycine max
  Clone ID: jC-gmle01810040h05a1
agaacaatggcagcatcaaagatgaagttgttcttggatccggtgatagccatgttggcgatggtagcaactggggtttcacctgctgtggcacctgccccagatgctttatacattgccaccacctcatttgtacacactgctgctgctactgtatgatgacctgagcttcaggtcttctatgactagttagactatcaacgaccgttagttgtctgctgcattacatacatcagtattaacatctggaccatgctggagtgcatcctaggctagctattctgtgaagatacaactcagcctgagaaatgtccggtgactactctgttgtgactaccagggtggatgaaccagacgatgcatttagatgcagatgtagattgatgcacgagagcagtcatgtggaagccattttgcttcaagtagtgtgaccaaaggacttgaaattagatttcactgttataatgaaacaaatacattacactgcccatgtggtgattct

SEQ ID NO: 9379 - DNA, 521 bp, Glycine max
  Clone ID: jC-gmle01810040h06a1
gttccttaaataagagaacaacccaaaacctttccaaaatacacgtgccgcaaattgcttacccaatcaccagccatggcagaggttgacccagctttcattcaagaaccacaacacatgccaaatctctccaccattcaggcagacagaattgccataatggatctctatgcaattaccatccacacagattgagaccctattgcagttgaaagcttggtgactgagattggacctgcatgccatgagtggggcttctttcaagtgactaaccatggagcgccactcactctaaggcgtaacatcgagaaagcctcaaaactggtctttgctcagactctgaaggagaagagaccggttcgcataaatgagagctctacaatggggtatcatgacaccggtcacaccaagaacgtcatgcactggaaagaaggctctgatactctagcctaagaccccactttcattcctctcacttctgatgcacatgatgatcgagtcaatctatggactaataaatc

SEQ ID NO: 9380 - DNA, 487 bp, Glycine max
  Clone ID: jC-gmle01810040h06d1
aaatggtaataatttagttgttttattgggtgatacttgcatacattaaggcacactaggaagtaaatttgactcagtcatttatatcagaaacgttgtcttggatcaacgctgctacatatcatgatatcatacccaatttatatgcataagctatatggcgctggaatcctgctaatatactaccctttaagctatcttgtaatgatgaatttgaatgtcctcctcattttgcttcttgaaattgctgttccctctgtggacaagaaacttgccccaattgtatggcctatatttcgaagggttatgctcattgatcagctcctccaaaggctttactttggcgcaccgtgcactgaagatgaagaccgtgacggagagccttcacttctaagagtgggaccaccactctgtgatccacactctcatatgcatcattgctgcaaacctgaacagtatcaccaatgttgataatataggcatttgg

SEQ ID NO: 9381 - DNA, 508 bp, Glycine max
  Clone ID: jC-gmle01810040h07a1
ttccgcaacagagagtagaatagatggtctcaaaagtggcatagatgtgctaggcggtgatggtgatactgtgcgcggtggtggtcgcgtcgcgggtggaggaggcggcgaacccgatacgaatggtggcggtggtggaggcggaggtggttcgggtgatagggcagtgccggcgcgcgctgaagtttgctaggttcatgagcaggttcgggaagagttaccgaagcgaggaagagatgagggagaggtacgagatattctcgcaaaacctcaggttcatccgctcccacaacatgaaccgcttgccctacactctctctgttaatcattttgctgattggacttgcgaggagttcagaagacacagactaggcgcttgccaaaattgctctgccactcttaacggcaaccacaagctcactgatgctggtcttcctcccacgaaagactggaagaaagaaggaatagtgagtgatgttaaagatcaaggcagctgctgatcatgctg

SEQ ID NO: 9382 - DNA, 534 bp, Glycine max
  Clone ID: jC-gmle01810040h07d1
acaatacaatacaatatgtaactatgaactatcaatatatgatcgttatttatgtctgtgatacacacaattcaggccatgatattcttacgtgatttacagcaacttctaacttatttaatacatcataccaacccaactaggagcaattttcattatacaatgacacttatctttaaactctgaagcatgacaaggtggtagtcaccagggaccatattcttatgcaatttatgccacaactggataagacgcacaagttgcaacaccacacatgttcttccccaattccattttgaagtagccattctcaccccaactttctccccatgaattttttatgagccaatatgggacgccattttcaactccataccccacagcaaggacggcatggttcacatcctgggaagtgctaccgcaaatgtcactagtgtaaactccattctcgtagaaatggaacccattcaccacctgaaaggccacactaaccggccgaacaaaatgcaactgcatgtttaatcattctcagca

SEQ ID NO: 9383 - DNA, 543 bp, Glycine max
  unsure at all n locations
  Clone ID: jC-gmle01810040h08a1
aaggttgctgtaggagataagattgcagtagtgctaagtgctaacacctgcagtgaacaatggcctctgcatcagcatctctgctcaagtcttcacttgttcttgacaagtctgagtgggtgaagggacaaacccttcgccaaccttctgcatcagttgtgagatgcaaccccaccaccccatcaggcctcaccatcagagctggttcctatgctgatgagctcgttaagaccgcgaaaacagtggcttcaccagggaggggtattttggccatggatgagtccaatgctacctgtgggaagcgtttggcttcaattgggctagagaacactgaagctaaccgccaggcataccgtaccctcctcgtgacagttccaggccttggtcagtacatctctggtgccattctctttgaggaaacactctaccaatccacaactgatggcaggaagattgttgacgtgctgcttgagcaaaacattgntcctggtattaaagtcgacaagggtttggtgccccttgcaggttccaacgacgagtcat

SEQ ID NO: 9384 - DNA, 529 bp, Glycine max
  Clone ID: jC-gmle01810040h08d1
gattgccgagcttaaaccattttgttatatattgagacataatcaagtacacaactcatagcaaaaggtttattaagctgtaaaggtgcatttaaccataaacaaaaatagtctccaagactataaaaacattacattttagacaaattagtcttccacttcatcgtccgtcaacacctactgtaactgctggtgttgctgcctaacaagtatcatattcactgcaaacatcttagtaggagtagcttttgacgaacaactccttcttggcttcctcggattcaccctcaccagtgtacttcccaagctgagcgagtgagttggacttggcacggaatgcgagtgcatcttgtgctgccttcacgttctctgggcggcctccccatgtcttcaaggcagtgttttggagggctctggcatacgagaatgacacgtgccacgggtttggagattggttcatggcattcaaattgagggtagcttcaacctcagactgtccaccagacaaaaacataattccagggacagc

SEQ ID NO: 9385 - DNA, 505 bp, Glycine max
  Clone ID: jC-gmle01810040h09d1
aaaacataaatacttcagactccagtaactggaccataatataaggtactacacttattagaactgaaacgtaacatggcaagcaatatttagttcataatcactacgaatttgttcatagccttgttactggagaacaaggcattcatgtgaaccagccaccatggcatgctgtgcgtttgggctaacggcatcaacttcctcaagacgttgaggcttgacattcatctcaaccgatgatgtaatggcttgaaaaacaagagcagtgacttctagaagcctctcttcagagagggaaacctcagcaagaagcctccaagcattggcttcagatgcctcctcatagtccttcttcctcttcagcaccatgtgcccactaatttcccacacagcaggattcacttgggtctccagaagctcaggactcacttctccaagggcttgtttctctgcatagcactgtggtaagagaaatatttgccttccacaatctgaaataagtaca

SEQ ID NO: 9386 - DNA, 472 bp, Glycine max
  Clone ID: jC-gmle01810040h10d1
ccaaaatcatgaagaagatttattgactataattgaattgtttacaaaacacaatctagcatttcaagtttccaacatatggtgtgcaagcaatatgcaccttctattggcaatgaatttagtcatcagtaacaataagctgtcctctaacttaaaaaggagaaaaaaaaagctgcccttgccgggggcttctaatccaatgaagacggccaattctgtaaaagtcaaattggaatttaataccaaaacttgacaagcccgttaatccttgttgcaaccaattttatgctcattcttatctgcacactccatggtagtagccaagaccagccataatccatatgttatctagtttacaattgcagtattgttctaatatctgataggaccatctaggctcccggatgcaaactgctggacaattggattagttgaagttgtaaattcatgagtcattccttcccaaacaatc

SEQ ID NO: 9387 - DNA, 530 bp, Glycine max
  Clone ID: jC-gmle01810040h11d1
atatgactctggtgttatttttgattttgcaaattaaattacacaatcacagccgtacatcacacatgagttgggcctcttccaacttaaaagcagaggataacattggcccatgacgcgacacatgcaccacctaataatcataattttacatctttacatacaaaatacaaagactttaaattttaaaaagaagaaaagagataaacagatcatcttaatgaaatgaaaccaaaacccacaaacattggcttgatttttgttgttgttgttgttcccaacttgattaagcatgaaccgtttgattgaatcacttggacttgaagggaatggccctgattacgacctggtggtagagtgctgcaagagctgcaccgatgaatggtcccacccagaagatccagtgttcatcccaaccaaggtccttggtgaagatgatagcagcaccaagactacgagcagggttgataccagttcccgtgatggggatggttgcaagtgaaccaagaacacagcgaacccaattggca

SEQ ID NO: 9388 - DNA, 511 bp, Glycine max
  Clone ID: jC-gmle01810040h12d1
acgttctattatatatatatctatctatattctatatatagatatattgtttaggttatcaagtattaatctgaaataaataagaattgctgcttctaatacttataataattactacaaattctaataattactacaaaagggatatatgttagataaaatagattaattaatctatttcacaaaaaaataatgtatccatagcacagtttcgtcttataatacctcgggtgctaatgaaactattttagtgaaatttaactgtctcaattcccgggcgattgcacaaaagattcgagttccttttggatttccttcttgatcaatgacaactgcagcattatcatcatactgaattattataccgttgctacgtttgagttctttacaagtacgtacaattacagctctgatcacttctgatctttctaagttcgtatttggtactgcttgtttgattacagcaacaacaatgtcaccaatataagcatatcgtcgattactagctcct

SEQ ID NO: 9389 - DNA, 560 bp, Glycine max
  Clone ID: jC-gmle01810041a01a1
gcgagttaaggttaagcagggaaagacaaagcgattatggacggttcacgacggctactaggacagtctgtaggggttttcaatgaagggatttgtttagttttatctcgctggtcggctcttcgatcggctgttgagaatgaatggggcggccgtgagtcccgccttaaagccgatcaacttgccggtgacattcttacctggttcactcaatccaaagagccactttatattgatgacttagaagacatactggatcaaggtatgctttctctcaatgtagaggtcgaggatggcagcgttgaagaggtagctgaaaaactaatggttatgcatgaagaattcttagaaggtaattttagttcttttgaagatctcaggaaagccaatcttgagcaagctactcttcctcatgtaacacagattgtcaacgaagacgattcagatgaagatggtgatcatgatgaaaaaatgattgcggatgataattcttcaaacatgaatcccgagatttcaacatctgattcaaacatgaattcagtgaacaggccagtaaatga

SEQ ID NO: 9390 - DNA, 539 bp, Glycine max
  unsure at all n locations
  Clone ID: jC-gmle01810041a02a1
ccgtatttcatatgcttgtgaggacaaaagttctttgaaaagtatgtatagtccagtgcttggttaccttgacaaagtgaaggataaattacgaaatcctgaggattaccaggaatttttgaagtgcctaaatatctacagcaaggaaataattgcccgacacgagttgcaatcattggtgggcaatttactgggaaaacatgcagatcttatggagggatttgatgaatttttggctcaatgtgagaagaatgaaggattccttgctggtctcctgaaaaaaagacacggaccaaaaccagtgaaggtagaggacagggatcaagatcgtgatagggatgacgggatgaaagaaagggatcgtgaatgccgagatagggacaaagcaactgctaacaaggatgtttcagttcctaagacgtttctatataccagcaaggataagtatgcagcgaaacctattagtgagctggatctttctaactgtgaacaatgcacttcccagtaccgncttctaccgaaaataacccataccacca

SEQ ID NO: 9391 - DNA, 504 bp, Glycine max
  unsure at all n locations
  Clone ID: jC-gmle01810041a03a1
gaagaaggcacagttacaaactatactttccacaaatacaagtctggctacattcatcactgtcttattgaaggccttgagtatgagactaaatactactatagaattggaagtggtgattcttctcgagaattttggttcagaacacctcccaaagttgatccagattctccctacaaatttgggatcattggtgatttggggcaaacgtttaattctctttccacccttgagcattatatacaaagtggagcgcagactgtcttatttgttggagatctttcttatgctgataggtaccagtacaatgatgctggtttacggtgggatacatggggacgatttgttgaaaggagtacagcatatcatccatggctatggtctgctggaaatcacgaaatagactatatgccttacatgggagaaggttgatcctttcaacactatctttaccgatatactacttcctacttgggctncaatagctcagtcctctctggtatg

SEQ ID NO: 9392 - DNA, 521 bp, Glycine max
  Clone ID: jC-gmle01810041a04a1
agaagtttaacaacaccctgcgggttcttctacggtggtagttctagaacaaactaagcgacgactgacgtggtggattgtggaaacgcaaagagcaattgttccgagaatgagcaattaatgaatgaatgatcaatgtctcatcaggagcaagcctttgtgtctcttctctctcagctcgccctttctttcgacggtgccgttttgggcttggccttggcctacgccgtcgtccgcaccctttttaaattcaccgacacctctgccgccctccgtaagctccaccgcgccccttctgtctacgtctgcgacctccgatccctcctcgacgagataccctccgacgccgacggaaactccgacggtggcaacatcgtaattgtccgcggcactgtcgatgccaagtccgccgtcgaaggcggcacctggaaaaccctgagaccttgtgtcttggtttcttgcgagtccggcgataaaagtgttattgttcagagaactcaaacgtgtatatacaatgaatg

SEQ ID NO: 9393 - DNA, 479 bp, Glycine max
  Clone ID: jC-gmle01810041a05a1
caaagattttgagaatgtctagctgtgggtgtggaagcagctgcaactgtggcagcaactgcagttgcaacaagtactcttttgactacgttgagaagatcacaaatgagactctagttttgggtgttgggccggtgaaggcccaattcgagggtgctgaaatgggtgttgcagctgagaacggtggctgcaactgtggatcaaactgcacttgcgacccatgcagctgcaagtgagatcaacatgcataaccttcaagcagagatagctgtgatacatgtatcaataaataataagtatgtgttgtgtttgaagttttagaataaagtggtcatggcccgcctttgcaaattcaaatgttctaggatttgttacgggtgttttaagctgtggttgctttgtgtttggttggtctcttataaatatgtaatttgaatcgtcaatctctgcttataaatggaatactattggtgttatgt

SEQ ID NO: 9394 - DNA, 515 bp, Glycine max
  Clone ID: jC-gmle01810041a06a1
gaagaagttcattgcgttttgaagaggcacagaacaaaaaaaaatatgagaagaatctcgaatcttctctctaaatcgaaacaactcgctgcattcgcaagcctagaaaccaaacttcgcgccaatgcgcttcgctcttactgcgatcaatcgcaccttcgccgccaaaaccgtccagggccgcttgtgcagtacaggagtctagttgatcaagggaagttgcggcacgatcctttccatagagtgttgcatcggagcttgagaatttgcttgcaaggttggagcagtacgagaaagatatggaagagtatcatgtgaatctagctaattgggagaagcagcgggagaatgagcgtcggaggcttctcatggaggaagttgagctgcaccagaaggacgagtactggtggaagcggttgaacaataagcttaccgaaaggtgggaatcccggaaaagaccaaaaaatatggagtcaggggtagggaaatgggtatcatatctcacacgagagaag

SEQ ID NO: 9395 - DNA, 563 bp, Glycine max
  unsure at all n locations
  Clone ID: jC-gmle01810041a07a1
gctgctcaaggtacacgcacccacacccacacccacatctgcctctgctcaactgcaatggcgctgcagtgtaagtgtggcacccaccactctggcgtttcccaattcctactccatttctgcggaaagaggaagaagagaatggaattggagggtgaaatgcagcagcagcagtgcggagattgagaaaggggctgcgagttttgggcccgggagcccagtgagagcaaccaacattctggtggttggagcgactggaaccctgggaaggcagattgtgcgacgggcactcgacgaaggctacgacgttaggtgtctggtcaggcccaggcccgctcctgccgacttccttcgcgattggggagcaacagttgtgaatgctgacctcagtaaaccagaaaccattcctgctaccttggtcggcatacacactgtcattgactgtgccactggccgtcccgaggagcccatcnaaaccgttgactgggaaggtaaagtggctcttatacaatgntgccaggcaatgggaattcagaaatatgtcttctactccatccataact

SEQ ID NO: 9396 - DNA, 388 bp, Glycine max
  Clone ID: jC-gmle01810041a08a1
gtcgccatgaaccccatcaacaccgtcttcgatgccaagaggttgattggtcgtagattcagtgattcctctgttcagagtgatatcaaattgtggcctttcaaggtcattcctggtgctgctgacaagccaatgatcgtgggtaactacaagggtgaagagaagcaatttgccgcagaagaaatctttttcatggtgctcatcaagatgcgtgagattgctgaggcttacctaggctccacagtgaagaatgctggtgacaccgtccctgcttacttcaatgattctcagcgtcaagctaccaaagacgctggtgtcattgctgctctaaatgtgatgcgaattatcaatgagcctactgcagctgccattgcttatggtctttgat

SEQ ID NO: 9397 - DNA, 369 bp, Glycine max
  Clone ID: jC-gmle01810041a09a1
gtttttcaccaaagcagtaatcatagtatgtagttcccatcctgtttaatttgtaaacccttgtcagtaatgtgtagttgaattatgtggataagtggtctccagtagcatatgtatgttctcttttggaaattgcttatgtataaatcgatcggatgcttcctcagaacaggcacagtagaacgagctgtctatcagtagctcctgtactatttaaatttttgtgaaaatgtgacacgctgcatggctatatcagaattatgatgagacacaccttgtcagtaatgaataattgagttgcaccttgcttcactagaatcttgatgatgattatatccttataacattccaaggttacgtgaattaccc

SEQ ID NO: 9398 - DNA, 335 bp, Glycine max
  Clone ID: jC-gmle01810041a09d1
aggaaaaaacttacatcattaatctctgctgttttagtactaaaaacattttcggggaaaaaaggcatgattcagggatccaaaactgacgattttcctccaaattctcagaaaatgaagcaacattcgataactgcaacaaaatcaacggttgcgacaaagggagagggttttgtttctcttccagggtgccctgcgtgatggacgatttttgtgggagagatgtcctctgccacgtaaacccctattgcttttcccagcaaaagtgaggccccgcagttccctgtgtttatggactggattgcagagccaggtgattcttggatcatttctta

SEQ ID NO: 9399 - DNA, 469 bp, Glycine max
  Clone ID: jC-gmle01810041a10a1
ggactggtttggccaatagattactgagtaagggcaacgatattctgtgttgcgattatgctagttttgatggtttgattaccaagcaagttatgagcaagatggcagaaatgataaacagtctttgtggtggtgatgaaaaattgatgcgtgaaaggacacacctgcttggcttgttgttcaagaatggcaatttgtaagaaagatgtttggagagttgaatgtggaatcccttctggatttccgctcacagttatttgtaatagcatttttaatgagatgctcattagatatagctatgaaaaattactgcgccaggctaaagctccaagtatgtttttacaatccttcaaaaattttgtttctctgtgtgtgtatggcgatgataacttaattagtgttcatgaatatgtcaagccttactttagtggttctaaaatgaaaagctttcttacttgtcataatatca

SEQ ID NO: 9400 - DNA, 449 bp, Glycine max
  Clone ID: jC-gmle01810041a10d1
aaacacactcattgcacatagtaatgcgctttatttaagtgaataaaatattacatactagttcacaaatgcaaaaggacactcatcaaccagatatttgagactcttacagttctcaagaagtcgcgtcagcatagggttagtggcgttagaactcagaatttcattcttaacgccaaaaagaacagccagtaaagctactggaaaaggatcaactctagtaagaaaaacaattttcttacctctcccaagtgctgtgcgaatccttttgttgatatctgaggagcgattgttaactgcagaactaatccaagcagtggtgggtaaaccaccacgtccactaccacatgtaacatttacaacgacagcttctgaaggtaattgacttacaggataaagacaattcacaaaaattggtaaccaagaatccactggaaaatttccatcaa

SEQ ID NO: 9401 - DNA, 396 bp, Glycine max
  Clone ID: jC-gmle01810041a11a1
ttgagaactaagaaggagaagcaaatggcttcctcaatgatctcttgcccagctgttaccactgtcaaccgtgccggtgccggcatggttgctccattcactggcctcaagtccatggctggcttccccaccaggaataccaacaatgacattacctccattgctagcaacggtggaagagtgcactgcatgcacgtgtggccaccagttggcaagaagaagcttgagactctttcctacctgccagaccttgatgatgcacaattggcaaaggaagtagaataccttcttacgaagggatggattccttgcttggaattcgagttggagcacggtttcgtgtaccgtgagcacaacaggtcaccaggatactacgatggacgctactggaccatg

SEQ ID NO: 9402 - DNA, 428 bp, Glycine max
  Clone ID: jC-gmle01810041a11d1
attcattagttctcatccattaatttccattgaagtccgaaaacagaaaccaaaaatacaggatgatgaaatctcaaaaagcaaaaacaaatgggaatgtagtttaagtacaaacaaacaaagtgggggggcggctacaaatgctttgcaaatttttcacacttaaaagcctgggggcttgtaggcgatgaacctgatgcactgcacttggcgaacgttgtcgaatccgatgatacggatgaagccgttggggtatgcagtcttagcctcttgaagctccttcaacacctgagaagcattagtgcaaccaaacataggcagcttccacatggtccagaagcgtccatcgtagtatcctggtgacctgttgtgctcacggtacacgaaaccgggctccaacttgaattccaagcaaggaatccatccct

SEQ ID NO: 9403 - DNA, 475 bp, Glycine max
  Clone ID: jC-gmle01810041a12d1
aaaaacttgagaactgaattgatgattaagcttttttttcatgatcttgggtggttgaatcaaatcacatcataccttctttattattgatttttgttgtcattatacaacattacaaaatttattaccaatatgcattttttcaatattcattctcacattagagcatatttcgcaaccccaattgtggaactgcacgacataaagaagaaaatacatgatactttagagccacatgcactacaaggtcacgaactatattgaggacatgaatttgcaggcatttgtgtgtgattatacacacacattgcatattttaatccggatgcacatcttggcccacatgaagccagaaatcacctttttgctgctctccgtcaatagaaacatgtttcagcagtataccaaacaaaatttttccctgctttaccctcctgtaggatgctaaagttgccaaaggttcatttgacttttg

SEQ ID NO: 9404 - DNA, 503 bp, Glycine max
  unsure at all n locations
  Clone ID: jC-gmle01810041b01a1
tgagaatacaggtatagcattggcctgtgctatgaatagttcttttagggggcgtgccagttctgatatttacaccatctgctctcaagactgtgaattatggaatcctgcttgcacaaaagcaatgactatgtcatttaatccaaacccgtgttctgatgcatggagtttggaatttctgaagcgtaccggatttcattgtgatatcatttgtgtcactggatggactgccactccaatgcaggatgttcaggttacaattgattggtttatttcctctcaggaatgtgttcccaggacttattgtgttttaaatccacaaaatccttttgtgttgaataggtggatggggaaactgactttcccccagggcacttcccgaagtgttaagagaatgcctctatctatagggggaggagctggtgcaaagaatgctattctcatgaatatgccaaatgctgntctttcaatgtggagatatcttgctggagatctcgtctttg

SEQ ID NO: 9405 - DNA, 434 bp, Glycine max
  Clone ID: jC-gmle01810041b02a1
gtaaaagatgccttgtttgaaacttcattgaaaaacaaattaaaggaatggcttttggaacgaattatcttaggcagcaagagtactgaatatgatgcgcaagggcaagctgcaattcatttgtgtgcaatgctgggatataattgggcaatttccttatttacatggtcgggcttgtcgctggatttccgtgacaaatttggatggactgctcttcattgggcagcatattatggaatagagaaaatggttgcaactttgctatcttgtggggcaaggccaaacttggtcacagatccaactcctcaatatccaggtggatgtactgctgctgatcttgcttatgtgaaaggatgtgatggcttagctgcatacctttctgagaagtctctggttgagcagttcaatgacatgagcttggctgaaatatcagt

SEQ ID NO: 9406 - DNA, 392 bp, Glycine max
  Clone ID: jC-gmle01810041b03a1
gaattcactcattacaaacagaagatagggagattgatatgacagggagatagaatgacaatgaccactctatgcttacatgaaaagagaatgataaggaactagatgaaaagcgtacaaggtgcgaagagtatgtcgagaagatgacataaagagagtgtgctgggaggaacaagatcttactaggaccacaatatgttggtaattggtaggatcatgcacgtatctatctactggaaagctgcaaaagggcatgctaaactatgcagggcctcatccagactttgtaacagatgggacatcatccctactaccaacaatgatgaggtgccactttagcaaggctgatgggaagattacgatctcaagagaagtcctgttagcgaaccgat

SEQ ID NO: 9407 - DNA, 475 bp, Glycine max
  Clone ID: jC-gmle01810041b04a1
cattcccccagctgggaagggtgtactggaatcagagtgtagctgtggggtgcagattgattactattcttgtgttggccttttcaggatgggcaagtgcaagggttgtgggcagataggaagaatgggaacaacaaatgggtcaatgagttcttatgaattttcgttgatgttgcctcctgttgtttctttttgggattgtatgttccgtaaaatgaggtattcctacagacctgagtgggtgtagtggttagaacgtaactctagtactagtctcaatactttaactaaatagagtatattagcataacaatttagggaaaggggagaaattataaacaaaaaaatgtatacagctttaaagaaattctcttggaggataggagttctcaaaagatatcttttttaagtatttatatagatagtgggctctatggataacatggcatgtaataaagggcaacgcttgagaaag

SEQ ID NO: 9408 - DNA, 524 bp, Glycine max
  Clone ID: jC-gmle01810041b05a1
cttccttctccgcgcgttctttttctctccctgcccaaaaccactactgccatctgtcttctctcccactaccctccttcactctctcatctcgccgcccaagacattcttcttccaacctcttcacacctcttcgctctcccacaacccccatttttgcatcggcccctggcggaggaaccggaggaggacatgccggcggaggtggaggtggaggcgacggtgaatcggaggacagggatcggaaccgagaggaggcgctgctggttctcgccgaggcagggaggccgctggagaaattgccggcggatttagcggcggcggttgaggcggggcgagtgccgggctcgattgtgaagaggttgttcgagctggaaaaatcggcagtgttccggtggctgctgaatttcggagggtttagggagaggttactggccgatgatttgctcctcgctaaggttgccatggagtgcggtgttggcatctttacaaagactgctgcggagttggagaagcgcaaagaa

SEQ ID NO: 9409 - DNA, 494 bp, Glycine max
  Clone ID: jC-gmle01810041b06a1
ggatcaggaccttgggagttcctaaggagctcatgactgcacatggcagacacggtagttatagcttcatattaggcctaggtttcagtggtgtttgctgattacatttaagtgaagagaagctttccctaggtttttaagtcgcttaaaaaattcttcggaaagaataggcacttttccctgcttgattgtgcttggggtattggttgaaaaatttacctctgcatcataagtatgtacagaaaaatctctaactctactctcatagtctcatatatagtgaaatgaaatgaaatatagaatcaagcttctgtttgtaaccatgcaaatataattaattgcatgaataacgtgaaaatgaaagattgcatggaatggaacaatcactagtgctgaaaaaagatgcagaactcctttcgtttttaggaagtttgtatatggtaatcacatcaacttagtcctcattgcaatataatttgaaatcaaagtattta

SEQ ID NO: 9410 - DNA, 572 bp, Glycine max
  Clone ID: jC-gmle01810041b07a1
ggaaaaagttgtattgaaattttcacaagatgaatttcttacagcttggtcaacgcaggtgcgggctgcaacaactctgttggctgatgggtgtccatatttgtatgctatggtgcatgatagttcagtgtctacaataccaggtgattttgtcattggtgttaagttgacaaccataaacaatatgtgtgcatatgggctcaatcctggtatttcaggttctcgtcttttgggcaccattcctcagtctatttcacagcaaactgtttggaatcaaatggcaacagtgagaacaccattgaattttgattctagcaagcagagcttttgtcaattttctattgaccttctcggtggaggaattttagtggacaaaactggagattggatcacacttatacaaaattctccaattagtaacttgttgagagttgctgcttggagaaaggctgttaatggtaaaaatgtgatgctgggaatgcacagtcaaaggagtgattggcctcattgtacagtgtttttacaacagaacagtcaagcatttgtgctgtagtgacaaatcgacccattct

SEQ ID NO: 9411 - DNA, 339 bp, Glycine max
  Clone ID: jC-gmle01810041b08a1
tggatttgagggtaataccgttatcattgtcattgcagctactaacagggttgacattcttgattctgcattgttaaggccgggacgatttgataggcaggtcacggttgatgttccagatatacgaggaaggactgaaattttaaaggttcatggtagcaataaaaagtttgaagctgatgtttcacttgaggtaattgctatgagaacacctggttttagtggagcagatctggcaaacctgctgaacgaagctgctatattagctggtcgtcgaggaaagacagcaatttcttccagagagattgacgattccattgataggattggggctggaat

SEQ ID NO: 9412 - DNA, 393 bp, Glycine max
  Clone ID: jC-gmle01810041b09a1
cttctttttaacccccttaaatgaaaaaaggggttccccgacttggatagggaactatgcgagtgacctacctaatcttattgtagaaattttcaggatcaatgattagaccatgcaaactagaaatgctttttcttgtataaaggaagggattactcgatccatttccatatcgatcatgatatatataataattcgagcacccatttcaaacgcatatccaatttttgcacagcagggttatgaaaatccccgagaagcaaccggtcgtattgtctgtgccaattgccatttagctaataagcccgtggatattgaggttgcacaagcgggactttctgatactgtatttgaagcagatgttcgattccttatgatatgcaagtgaaacac

SEQ ID NO: 9413 - DNA, 499 bp, Glycine max
  Clone ID: jC-gmle01810041b09d1
acaagttaattgaagaaattcaatttgtttaatcaaattccccaaccccctctctttttatttgttcactacgtattatatgcaataaaatattatatggcagaaatattctaagttggaaaaaatagaaactaagatataggatttttcaggaaggggttaaaaaagattattttattgatatttttagaatatttctatttcgacacaaacaagaaggaataggaatcggactctaggaaaagacaaaaaatcccccctagagtaccttttccatattttaattgattttgtttcaaattatctatctatatagatatctattttatgtttagtatcgaatccaattttattgtattttacaatcgaaatttctataatagaactctctattatagaaaaatgaaatctgaaaaaaacagtgtcataaccataatattcgaatttattggggggttgaaaaaacaaagtcaaatagtcttcctgacaatatccatac

SEQ ID NO: 9414 - DNA, 514 bp, Glycine max
  Clone ID: jC-gmle01810041b10a1
aattcccggatctactgcatctttgcaatttataaagatagcagattgtgattggctcaagagaaactttaagcagatgtctaatgttttgtgggtggctcctgaggataaggcgagtttatggtcacaacttcattatgtctcgtgtaataatctggaaatgcaagaagcttatcttgtcaatctcgtaaatgtgttacgagaattgtatttgcacagtccagaggaagctcgccaattgagaaggaaagctctctctcgtattgaatggctgcaaaaagctgatgtgcctaccatagcacagattgtagagctccattcgatgcacaggatgatgaatgctcctgattcaaatgataatattgatctactgttgagcattgatttgttgggtttacaaggagcaggtaaagcttttccaaacaagattgtttttgatgataagcttgtgttggctaacacacaagaattctttgatggaaattctccagtggattcttgctaccaatttttg

SEQ ID NO: 9415 - DNA, 522 bp, Glycine max
  Clone ID: jC-gmle01810041b11a1
cgatcacgcagaagacgaacttccatgtcgaagacctgaacctgttccctatcgacaatggccacaagaacaaggcgcataagctcaatgctggatatcatgagtgggacttcagcttcaagctgccgtccaacttggatcagagcgttgaggggctccccaccaattgggtcgtctacaacatcaaagcatctgtagatcgcggctacatgagcaaggcgctctctgcctcaacgcacattcgtgtgattcgtaccctgggacgcgatatgctggagtcaatgccgatggagcagatcaacgaagatatttgggcgaataaattggcctataagattactgttccccagaagaactacatcgtgggaacacacatcaaggccgacttcgtgctgataccactaagaaaaggtgtggagatcgcgacgatcaagatggaactcatcgagtcgcgccaactcttcgctgattatgcgggccggcgcatcagccaccagcaagacgtccatgttgctgtcaccg

SEQ ID NO: 9416 - DNA, 464 bp, Glycine max
  Clone ID: jC-gmle01810041b11d1
ctcggccgagccactgcggctctgtgcatagaagggtgtgtttgcaccgctgcccaccatgctgtggtagccgcctggtgtcatgaagcccgaaggatcgatatcgttgtacaattcatcgagctgatgcagtccataggttggtggagcattctggttgacctcatcttgtaccgcttgctggttgagcatatgttggtcgataagaacactttggtcctctgcagggggcatatttggcgagatgaacaggtgaacgtggttcttgacgagaagttgactggtgtggccttcaggattcttcagattgacgtatagccttaatttatgcgacaagcgaatgttctctgtgtcaacggactggcggcagttcttgagagatttcggcagttcgagcgtcatggcaaagcgatgcgactcgtcgaaaagctcgtctccgttctcaacaccatcgggcacccgtt

SEQ ID NO: 9417 - DNA, 489 bp, Glycine max
  Clone ID: jC-gmle01810041b12d1
agaaaataaacagactaaattaaaacgaaaactcaaaaacttaaaagccaactatatttcagtatttcccaccttgcttctacccctgttgaaagtaacaaagtaagctgctctgcaacaaagtagatctgaatttacaagacaggaaacgaccaaacaagtaaaataaaaagagagaaaaaaaaaggcttagagaaggataaacccgaacaaaaaccaaaagatataagcatcttaggcagaaaaccctaaaaaaccccaaaaccctagaggagtaaaccctgttaggagctaaccactgtaaacaaaacccaatgagaagggattggtgctagcattctatgaactaactccgcccagccaatctcaatatacagatctttatcttcactaggcaaccaatcacactatcttcagactgcaagagaaggcaagacagatcaaatccgggcggtaccaaattgctgataaatatacttctaagaacac

SEQ ID NO: 9418 - DNA, 566 bp, Glycine max
  unsure at all n locations
  Clone ID: jC-gmle01810041c01a1
agccacttcacactcactcactcttgttgccttcatggccaagccagtgtccattgaggtatggaacccaagtggcaaatacagagttgtcagcaccaaaccaatgcctggaactcgttggatcaatcttctcattcaaaatgatgttcgccttgaaatatgtaccgagaagaaaacgattttgtcagttgaagacatcattgctttgattggtgataagtgcgatggagttattggacagttgactgaagactggggagaagagttgttctctgctttgagcaaagcgggaggcaaagctttcagtaacatggctgttggttataacaacgtggatgttgatgctgcaaacaagtatggtgttgctgttggaaatactcctggagtgctcactgagacaacagcagagttggcagcttcactaactttggcagctgctagaaggatagttgaggcagatgagttcatgagagcaggattatatgatggatggctacctcatctatttngtggaaacttgctcaaggggcaaaacagtggtgtaattggagctggtcgaattgatc

SEQ ID NO: 9419 - DNA, 517 bp, Glycine max
  Clone ID: jC-gmle01810041c02a1
ctccgcagcagccacacttcttcgccgtttcagctgaagagccatccgcaggtaagcaatggttaagcataataatgttatccccaatgggcacttccggaaacactggcaaaactatgtgaagacttggtttaatcaaccagcccgaaagaccagaagacggttggctcggcagaagaaggctgtcaagattttccccaggcctactgctggatctctcaggcctattgttcatggccagactctgaaatacaacatgaaagtcagagccgggagaggattttcactggaagaattgaaggctgcaggaattcccaagaaacttgctccaactattgggatttctgttgatcaccgcagaaagaatcgttctttggagagtctgcaggccaatgtgcagaggctcaaaacctacaaggctaagttggttgtgttcccaagaagggcacacatggtcaaggctggtgattctagccttgaagagctggcaaatgccactcaagtccagggtccattc

SEQ ID NO: 9420 - DNA, 449 bp, Glycine max
  Clone ID: jC-gmle01810041c03a1
aaagaaataaagttgaatattgagaataccgtttcttccaacttccacggtccaataaaaaatttgattcagccatttttgttccagcgagtctcctttcttatttcttcggttcctctcttcttctcttttcccccaaaacacaagagagagaagaaagacgaatggagggtgagggtgcagcagtgtggcaaggtgcggttttaggtggaataatcttctggcttgtttctgcttcataccttaacgctactcgcaaacttaggtctttcttacaaccttgggttactcatcacgttgacactcaaacccctattatcctcaagatccagagttacgggtttgggttcctggatgcacttttctctgggttgtcttgcgttgtttctgtgcccttttacactgcttttctccctctgctattctggagtggtcatggcaaattggcg

SEQ ID NO: 9421 - DNA, 558 bp, Glycine max
  Clone ID: jC-gmle01810041c04a1
cgcattggtgtttgcaccggaattttccgcactgatggtattcctgaataggacattgtcaagcttgttgacaccttccctggccaatccattgatttctttggtgcactgagggccagagtatatgatgatgaagtgaggaagtggatttctggtgttggtgttgacagagtagggaagaagcttgtgaactcaaaaaatggacctccaacctttgagcagcccaagatgactctggagaagctcttgctgtatggtgacatgcttgtgcaagaacaagagaatgtcatgagagtccaattggctgacaagtacttgaacgaggctgctcttggaaatgctaacgaggatgctattcagaggggaactttcttccagtcttgaattggaggcaaagcaaacttggcaaggaaatatttctgttcgcgaaggttgtttgactaatccaagtgctataagttgagatggaacttgcgtagaacattcttagcattctcaatgtcttaggtgcaaagagaagatgctaagcttgagatgatctactatattttcatattg

SEQ ID NO: 9422 - DNA, 447 bp, Glycine max
  Clone ID: jC-gmle01810041c05a1
gttactgttgaatcgaatggattgggattttgttgatctgaaatacgcatttgacatggctagcgcgattgtttatgactcttacttctaaggtgaccaactagccaatatgaccaccgacgacgtagtcagaccttatcgttgttctagcaactagattcttattctcacacgaagaggtgcagatgaccaatttaggaataggagttgtcactggcagaatgaatgtataatatgagaggattcatctcaatgagcagatgcgctacctcgatggcagacattggggagatattggtaatgaaccgaccagacagatgaagggaatgagtgttgtgctaaagacttatactcgacagacaatctttctacctggtgttgagcttgttgatcctgacatgataaaacccggcgatctagttggtggtaacaaggatagttacttaa

SEQ ID NO: 9423 - DNA, 474 bp, Glycine max
  Clone ID: jC-gmle01810041c06a1
gtgagatgcaaccccaccaccccatcaggcctcaccatcagagctggttcctatgctgatgagctcgttaagaccgcgaaaacagtggcttcaccagggaggggtattttggccatggatgagtccaatgctacctgtgggaagcgtttggcttcaattgggctagagaacactgaagctaaccgccaggcataccgtaccctcctcgtgacagttccaggccttggtcagtacatctctggtgccattctctttgaggaaacactctaccaatccacaactgatggcaggaagattgttgacgtgctgcttgagcaaaacattgttcctggtattaaagtcgacaagggtttggtgccccttgcaggttccaacgacgagtcatggtgccaaggtttggatggtctagcctctcgctcagctgcatactacgagcaaggtgcccgtttcgccaatggcgtactgttgtgagca

SEQ ID NO: 9424 - DNA, 535 bp, Glycine max
  Clone ID: jC-gmle01810041c07a1
cttcgccgccgtggccaccgccgcgatggcggtggccgcgtccgacgccgacgacatcctgatccgtcaggtggtgccagatgttggcgaagccgaagaggaggacaacctgctgaacgccgagcaccacttcgcgagcttcaaggccaagttcgccaagacctacgccaccaaggaggagcacgatcatcgcttcggcgtcttcaagtccaacctccgcagagccaggctgcacgccaagctcgacccctccgccgtccacggcgtcaccaaattctccgatctaactccggccgagttccgccgccagttcctcggcctcaagccgctccgctttccggcgcacgcccagaaggcgcccatcctccccaccaaggatctccccaaggatttcgattggcgagacaaaggagccgtcactaacgtcaaggaccaacgggcgtgtgggtcgtgttggtctttcagtacgacgggagcgttggaaggagctcattatctggccactggtgagctcgtgagccttagcgagcaacag

SEQ ID NO: 9425 - DNA, 343 bp, Glycine max
  Clone ID: jC-gmle01810041c08a1
aaaaaaaaaaaaaaaaaaataaaaaaaaaaaaaaaaaaaaaaaaagaaaaaacggaatctttttaaatttaaaaatactacttttaggggacaaaaagtaaatcggggtccccattttatgaaaaactttccttccatttttggccctctagaaggcctagtttttccggaaatcgcaagggcttctttatttttttacggtaaaaaaaacaaaattttttgcatccgaaaaccaaatgcaaattctggggctttttattccccaattatatatcctaaattcaaaaaaaggagagtgaggtgtttattttttcgctcaaacaaggtcctgattttttttatg

SEQ ID NO: 9426 - DNA, 348 bp, Glycine max
  Clone ID: jC-gmle01810041c09a1
tttagagagatagagagaggaagaaagaatggcagcttgcactgtctactcaacacaatctctgagcacaaattgctccatctcaaccccatcaaagacgcaactcagttttttccaccaaaagcaggtagttttctggaggaacagcaagaagggcagctgcagcagcagaagaagctatgtgataacatgtgctgcaggtgactcacagacagtggtgattggcctggctgcagactcagggtgtgggaagagcaccttcatgaggaggctgaccagggtgtttggaggagcagcatagccaccaaaggggtggcaaccgtgactgcaacactctcatcagagaca

SEQ ID NO: 9427 - DNA, 415 bp, Glycine max
  Clone ID: jC-gmle01810041c09d1
agagaaagagaagccaattattggctcaatcttggatcaacataactgaatctcagcctcgctttttcttctcggataagtacatacatacatagggtttttttcattaattatcatgcagaacagcctaataacaattgacaaaataacatgaaatagagtggaattgtggaaaacatgaaagaagaaagaaaatgatgattttgatgatgagagaactcaatttggctgcgttgctcgatcgatatatgtatatatattatgggaggttcaattcctaagcttttgcagctactggagtctcagccttgctggctattagctgctcatatagatctcttatcttcaaaccaactatggtttggaaagagacctgttccattgttgctgccgggaaaatcagcatgcttcaaca

SEQ ID NO: 9428 - DNA, 384 bp, Glycine max
  Clone ID: jC-gmle01810041c10a1
ctcgatttcatgcacttcctcttgcatctcaaagagttgcagcatttacagatacagataatgaacttgtatatgatgtcctcatatctaaagtacggcaacgcctcattgacgtgtcccgtttgccaatttggctatcagtcgaggaacaaggagcctttactcttcctaccttcagtgcatatccacagtcatatgtcaccagcgttggtgaatatcttcttactttaccccaacaattggagccgcttgctgagggaatatgtaacaatgaagaacatgactgagcacatgtctctgcaactgaatggatgttcaaggacgcagacggtgcaactgcactttacatagcgcagacgcaggggattgaccacatttcagatc

SEQ ID NO: 9429 - DNA, 432 bp, Glycine max
  Clone ID: jC-gmle01810041c10d1
ctgacagactactctttcttttctccgataaaccaaatgcagcagattgtatcccttttgtaactagttacaaattcaatatgcaagcaggtatattcacccacaagacaaaaaactgcaaggaggcattgcggatgtaaaagaatctcctctgcaacgcaaaaacatgtctggaaagagggagggggtggaaggggctccattgcttgaagttagtaaggaacattcatgaatccaaattcactcgtcgcatcttacagacaaggtttgctgttggcaaatcaagttggtttcctgaatctgtctttaaaagatcttttagctggtttcttggagtagaaagacaactttggaatgtagccagaactggagggattggcattgaaagagcagagagcacattactaagatactcaatatcaactgatagct

SEQ ID NO: 9430 - DNA, 382 bp, Glycine max
  Clone ID: jC-gmle01810041c11a1
cttgttgccgccaccactcttctaatgtctagttctgagagcacaaacgcgagaactagaacagcgtcatggttttctaccccattctttgttatcgttctcccggtggccgtggctgcgcttctctaccggctcgaaccattcaagccggttcttttgccggtccagctgggccggtccaccgtggcggttccggatcgtaacggccacatgcaatatggatctggaacgtgtgggtgagggacacttggggggcccggatgacttggcctacgactctgcagcacgttgtgtttataccggctgtgactgatggctggatcaagcgagtcacagtggatgactcggaggctgactcagaggttgatgacttggtcaacac

SEQ ID NO: 9431 - DNA, 509 bp, Glycine max
  Clone ID: jC-gmle01810041c11d1
aaaagaaattccatttttattatataaaaatatatataacagattcatgaatggaattttcacatcatgacactccagaaactaaacattttcacatcatgacactccagaaactaaacattttcttgtacatcattaaccttacaagatgttcactgttgctcaaactgtggggagagcaggatatttctcaacatcaaaacgtgttacaaaggggtagaaaatggaaccagcatatatatgattcccaattttaatcgcactagtcaatgctaatttgggatcataataatgtgcagttggttttccttctaaatccacgactagaactcctccattcttcgagatagatagactccctacatactttgtaaacattgcaaaagccttcctaatgaaagggtatctatatgccaattccaattcgggagaaagggccgtgaacattgcaatcaaatagtgcccttgtccatcataatgaatgttatcaggcatgccaggcaggtcac

SEQ ID NO: 9432 - DNA, 335 bp, Glycine max
  Clone ID: jC-gmle01810041c12d1
aaataaaaggctcaacggggaatgaaaaattgaagtggggacactcccccaactaataatttgggggccacgtaacttcatacaagaaaaactgttttctatagagggatccaaacacgaagcttacttcctatacgggggcgggggcacccagcttttaaggcacactggtacgggccactttggggttgaaagcggtgccaccttttaaacgaagtcccagacttattaacctaatccaagttcattagggggcgggattctgcactgatgcttatagttttccaccctctcccacaacttataacggggcaaacactggttttcctcataag

SEQ ID NO: 9433 - DNA, 503 bp, Glycine max
  Clone ID: jC-gmle01810041d01a1
tctagatcgcgagcggctgcccttttttttttttttttttttgagtaaattactcatgccttcgcaacgtagttgctagctggccaacatcctcagggacgcggcatacagtagctactgcaacggtgatcaacgatcactaacgactgggtcggaacctggcctaggaacagtaaccaccagcccgccattggcggcagggttgctacgataacaactcacgttttacgtcgcagttgtcgaacgacggggatactccctgaagttaaaccaacccctttggggtcggtccgtcggtacttcattgaagcaccgtagatcggcttgatccaagccgaacttctgaaggtcccaatgggcatacttcagtaatcggagcgatgctctgacataagagtgcataagccctcttcaacggagaggagtcgcaccctttaaagatacgctaaaagcgtatctcaaggtcttgtgctgtaatttacagctaagaccagaacgaaatc

SEQ ID NO: 9434 - DNA, 509 bp, Glycine max
  unsure at all n locations
  Clone ID: jC-gmle01810041d02a1
atttgttgatttttttttaggttaaatttcttgtgactgtattaaaaaatgatttcgtggaactggtgattttttgtagacgaagaataacttgaatttattattttacttgcattgttaattttatcaagggtggacatactctagttggaagtggtaaattactcgctaacagggaaggggagttgaacaagaaacagcagtgcctggcgaagaagagaaagaaaacaatcatgagcttcattctgtttccgattctctttgcatttacctttctgtcctcgcccgttctctctgcttcggatctggtcctcgccaaggttgaccgtcgcattgatctgacttcacagattgtgcgcatcactacttcactaaaggtgcagaatacgggatctgatgttgtgtctgagattttgctgtcctttcctgagaaccaggcangtaacttggcatacttgaaggcaacacttggtgatgggaagggaaaatcaaaaccatcttctggtgtg

SEQ ID NO: 9435 - DNA, 547 bp, Glycine max
  Clone ID: jC-gmle01810041d03a1
gcagcacagaagagggaaaacggcaccgccgccgtagaagaaaacaaccatggtgcacgtctccttttacaggaactatgggaagacattcaagaagccgcgtcgtccgtacgagaaggagcgtctcgacgcggagttgaagctggttggtgagtacgggcttcggtgcaagagagagctgtggagggtgcagtacgcgctcagccgcatccgcaacaacgcgcggaacctcctcaccctcgacgagaagaacccgcgccggatcttcgagggagaggcgctgctccgaaggatgttccgttacggtctcctcgatgagacacagaacaagcttgattacgtcctcgccctcaccgtcgagaactttctcgagcgccgcctccagacccttgttttcaagtgcggcatggccaagtgcatccaccatgctagggttcttatcaagcagagacatatcatggttggtaggcaagtggtgaacatcccatctttcttgggtagggttgactcacagaagcacattgacttttcacttacagtccccttg

SEQ ID NO: 9436 - DNA, 506 bp, Glycine max
  unsure at all n locations
  Clone ID: jC-gmle01810041d04a1
ctcggacaccattgataatgtcaaggccaagatccaggacaaggagggtatccctccagatcagcagaggttgatatttgctggtaaacaacttgaggatggaagaacccttgctgattacaatattcagaaggagtctaccttacacttggttcttcgtttaagaggtggcatgcagattttcgtcaagactttgacgggaaagaccatcaccttggaggtggagagttcagataccatagacaatgtgaaagccaagattcaagataaggagggtatccccccagaccagcagaggcttatctttgctggtaaacagcttgaagatggacgaacccttgcagattataacatccagaaggaatctaccctgcacttggttttgaggcttcgtggtggcatgcaaatctttgttaagactttgaccggaaaaacaataactntagaaagttgaagttctgataccatcgataacgtgaaggcaaagatacaggacaaagagggga

SEQ ID NO: 9437 - DNA, 500 bp, Glycine max
  Clone ID: jC-gmle01810041d05a1
catcatcaccatttcacctatttttctctctctctctctctctctctcgcatcacaatttcatcaaaaccttttaagtcttcatagttttccttctttctttctttgtgaaaaaacaaaaagtccaaaccatggctcagaaaaccgagaaagaagaaaccgacttcaaggttcccgaaacgattacgctttgcgttaacaactgcggcgtcaccggaaaccctgctaccaataacatgtgtcagaagtgcttcaccgcctttaccacctctaccgacaccacgtacggcgccggaggtgccggaatagcttctccggctaccagatccggcatctgcgcgcgtgcactgaagagatcttttaccgaggagccctcgccgccggcggatcctgcgtcttcagaccagacgaccccgtcagaggcgaagcgcgtggtgaaccgctgctccggctgcaggaggaaggtccgactcaccggatttcggtgccgatgcggtgagc

SEQ ID NO: 9438 - DNA, 512 bp, Glycine max
  unsure at all n locations
  Clone ID: jC-gmle01810041d06a1
ttcttccttctccttctcttctctgcttctcttttcatctccgaaaacaatgaagctcattagcagcattaaccccaaaaatctcaaactcagtcccaaacgcttctttcgcaaaaaggaacgatctttagtctcacgctccgacccaccttcattcggatccggatcttcctccgacgactccaccacaaatcacaagccttccgccggtaaccaaactccgaccagcgtcctcccgggcgtctacggagactggtccgacgtcgccgccgtcgacgtgcggtgggacctcgcccaggcctttcgcctcatcgaccgcgacaacgacggcgtcgtcacgcgccaggacctcgaggcccttctcacgtgcctcggcgcgtcgccgtgccccgacgacgtggcggtcatgctcggcgaggtcgacggcgacngcatcaccgtagaaaggctcatgagctacgtcgggtccggtctgaaaccccggtccgatccggacgagctcaaggaggcgt

SEQ ID NO: 9439 - DNA, 538 bp, Glycine max
  unsure at all n locations
  Clone ID: jC-gmle01810041d07a1
acccattgaagaagacaaggttagggaaccctgttgggtacaaattggttccaggtgccacagcagctagcctgctggatccagaagatcctccacagaaaagagcagcttttacaaacaatcaaatatgggttactccttacaacaaaagtgagcaatgggctggtggtttatttgcttaccagagcaaaggggatgatactcttcaagtctggtccaacagggatcgtccaattgagaataaagacattgttttgtggtacacaatagggttccatcatataccctgtcaagaggactatcctgtcatgcctactgtatcatcaagttttgatttgaagcctgctaatttctttgagagaaatccaatccttggagtccctcccaatttcgaagatgatttacctgtttgcaaggctcgtgattcagcttgagatcccatcagttggtttttagtctaattagatacatgctttatttatgcatgtagcanatgatgatgcccaaactgaactntaaacctaacttaaagtaaaga

SEQ ID NO: 9440 - DNA, 459 bp, Glycine max
  unsure at all n locations
  Clone ID: jC-gmle01810041d08a1
gtgcagagcatgtgttccttgtggctcatgactggggagccatcataggttggtacctctgcatgtttcgccctgacaaagtgaaggcctatgtctgtcttagtgctacttttatacgcataaaccctatcgtaagaaccgcatatgggattcgcgctatgtatggagaacactactatatcttcccatttcagaaaccagtggaaatggaggctcatatggctaaagttggcacaaaaaatagggagctgtcggcaccatggactggagtgcaaagccaagtggcagataaatacataacaggtgagttggacatggtgtacacctcgttaggcatgaaagagtatgtacacagtggaagcttcaaacaagatgtgcccaatttacaaggctgntgtgcagaaaggagtagctcactttaataatctagaagctgccgctggaatcagcagtcacata

SEQ ID NO: 9441 - DNA, 473 bp, Glycine max
  Clone ID: jC-gmle01810041d09a1
caataccaaggtatggaaagggaaaggaagcaggaaacgaagtagactacattgtaggaatgagcacatgttatcctcaaccaggttctgtaaagataattgatggtgaaactataactctagagtctaactacagcagcagccgtggccacactggagtaatggggcttttctacctattggtggcagaacagcttccacaccaacacttcagatattgttgtcgttcttcattttttatgaatataaatagtataattcattgataggatagtcgtgagatgcaaatataagttgagtgtcatatcgatggtatcacagtatgtatcacggttaacagaaatacataaatacatatcgatggaacatatacttctcatattcggcagccataggacaacacacgcacgaaccggcaaagagcatattttcaagtttaaggattgttagaatgtgatgatcaattatttgta

SEQ ID NO: 9442 - DNA, 435 bp, Glycine max
  Clone ID: jC-gmle01810041d09d1
ctagttatataagaccactttatttacaacaaacatgatatatatagtattacatatcacacaaccataataagcaagactggtttaagacaaacattacaaaccctcaccaatacaaataattgataatcacattactacaatccttaaacttgaaaatatgctctttgccggttcttgcgtgtgttgtcctattgctgccgaatatgaaaagtatatgtcccatcgatatgtatttctgtatttcttttaaccgggatacatactgtgataccatcgatatgacactcaacttatatttgcatctcacaacttatctatcaatgaattatactatttatattcataaaaaatgaagaacgagaagaatatctgaagtgttggtgtggaagctgttctgccaccaataggtagaaaaagccccattactccagt

SEQ ID NO: 9443 - DNA, 434 bp, Glycine max
  Clone ID: jC-gmle01810041d10d1
ctaaagatatctatagataaatatatctatatatatctatagatatctttataacccattctagctcattgactaagttcggtgactagcattagctactgtaaaaaaaaaccaattcaaaaaatcgaataaaacacgactaattttattaatttaaatatttaatttcattaaatatttaattaaagaatttttttttttttttataaaagaaatgatttgaatttcattttaataagaattccattttgtaatatttagttataaattacgatttaaaaatttatgttaaaattaacgttaacgacgagatctattatcatttttcgcatgtcctcggaaatttagagtaggtgaaaattctcctaatttatggcctaccatacgatctggtatataaatagggaaatgctcttttccgttgtgatagcaat

SEQ ID NO: 9444 - DNA, 546 bp, Glycine max
  Clone ID: jC-gmle01810041d11a1
gaagaagttgattgcgttttgtagaggctcttaacaaaaaataatatgagaagaggctcgaatcgtctctctaaatcgaaacaactcgctgcattcgcaagcctagaaaccaaactttgcgccaatgcgcttcgctcttactgtgatcaatcgcaccttcgccgccaaaaccgtccagggtcgcttgtgcagtacaggagtctagttgatcaagggaagttgcggcacgatccttcccatagagtgttgcatcggagcttgagaatttgcttgcaaggttggagcagtacgagaaagatagggcagaggttcgtgtgaatgtagcgtattgggagaagcagggggagaatgagcgtcggaggcttctcatggaggaagttgagctgcaccagaacgacgagtactggtggaagcggttgaacaataagcttaccggaaggtgggaatcccggaaaagacccaaaaatatggagtcaggggtagggaaatgggtatcatatctcatacgagagaagaagtgggatcactagttggtcaccgtccact

SEQ ID NO: 9445 - DNA, 488 bp, Glycine max
  unsure at all n locations
  Clone ID: jC-gmle01810041d11d1
aattagatctctggtgttagttacaaagtaatacaaggaaaatcctcagccggggtcaaagattatgtaatgtagcagtgtgcaaacatttggaacagagagatcccatcccctgtatgtaactttggtaacatctttgaataaatatttggcaagatctcacaatggcacccgggatagctgactgaggccaaacgaacatttacatgtgagggttctattctgatggaggtctgtaatcaagcatctccctgatatttaacctgattgaaggtcccatggctgagcatatgtgagcacttttccagtacacacctttagcacctgaaggtttgtttgcctctactgatttcactgcagcaagcaagtttacaagaagatcctcttctggaaagtcagcttttccaaaaggtaagtgcacgattccagttttgtctgccctgtattcaactnttccctgcttgaattctgctatagcctggggaata

SEQ ID NO: 9446 - DNA, 537 bp, Glycine max
  Clone ID: jC-gmle01810041d12d1
atgaaactaatgccaaatctgctcaataataataaaaaaaaagcatgtgcttggtgggtggtggggtagtattactgaccaaaaattaaaatagaaaattacaccactaagtcacaaactaaactaccaatttaaatgtattttacagaaatagttgtttatatttatcaactttttgatagaattaaaaaaatttattttttagaagaataaaaaaaagtaaagatattttttgttagaattaaaaaaattaattttctaagttttgctaaacacgttcttgtgatattttttttaatgattcttttaatgattgacttttaaaataattatcttaaaatttaataattatatcatacaattgttatataaaacttttaaaattttagatgtataactcatttttttcatttctttttctcctattggttagaacagcaagtaaagatattttggtttgtgagtaaggcaattggcattatcacgagaaatttaatgccacaaaaatcaggtctggaagcaactagcaataataat

SEQ ID NO: 9447 - DNA, 545 bp, Glycine max
  unsure at all n locations
  Clone ID: jC-gmle01810041e01a1
gtttgattgccaaatcaatatccatggcttcggaggacagaaacgaagaagagcttcacgttctattggtggcattctctgcccaaggtcacatcaaccctttgcttaggcttggcaaaaaactactaagcagaggcctncacgtcaccctcgccaccaccgaattagtttaccaccgcgtcttcaagtcctccgccgccacccccaccgacaccgtccccacttcaatcaccaccaacggaatccaagtgctattcttctccgacggcttcggaaccggcctagacaacaagaccatcacccccgaccaatacatggaactcataggaaaatttggtcccatcagcctctccaacatcatcaaagaccacttcctcaacggttcccaaaaactcgtttgcatcatcaacaacccctttgtcccatgggttgcagatgtagctgccaacttcaacatcccatgcgcatgtctctggatccaaccctgtgctctctacgccatatactaccgnttctacaacaaccttaacacgttccccactctg

SEQ ID NO: 9448 - DNA, 565 bp, Glycine max
  unsure at all n locations
  Clone ID: jC-gmle01810041e02a1
aacagacaagagcacaagcacaacacaacacaacacaacatcctccaggaacgggaatcccacgccgcttgtaactccatctcggtgtttgattctctgcttcttccttcattccccttcggaatcgatcgatccatcttcctcttccaatggcaacccctaccgacaataataacaaccctgcacaggaaaaccctaacaaaaccctagaccccaccgaaccagatccaatccctgccactgaggacgccaccgccactaagggctccgacgccaaggaccccgccgacgccgacgccgacgccataacttctccgccgcccgattccggaaacgacgctccgctctccgatattcagaagaagatgcgccgcgccgagcgattcggcatttccgtccagttgtccgagaaagagaagcgcaattcccgagccgaaagatttggcactgtctccgcatcgcagggatcagagccatcaaaatcggaggatctgaagaggaaggctagggcagaaagtttgggatgcctagtncaactacaactgcagacgaagaggcaaagaag

SEQ ID NO: 9449 - DNA, 540 bp, Glycine max
  unsure at all n locations
  Clone ID: jC-gmle01810041e03a1
caagacatcatcatccatggctgcctccgtctccactgtcggagctgtcaacagagctcttttgaacctgaatgggtctggacctggggtttcagctcccagttcatccttctttgggagcagcttgaagaaggttattggctcaagggtccccaacacaaagatttcctctggaagcttcaagattgttgctgtagaagagaagaaagagattgaagagacccagcagaccgacaaggacagatggaagggtcttgcctatgatatctcagacgaccaacaggacatcacaagaggaaagggtttggttgactcccttttccaagctccacaggatgctggaactcactatgctgtcatgagctcctacgagtaccttagcactggacttcgccagtacttggacaacaacatggatggattttacattgctccagctnttatggacaaacttgttgttcacattaccaagaacttcatgaccctgcccaacatcaaggttcctctcattctttgtatctggggaggcaagggacaagg

SEQ ID NO: 9450 - DNA, 498 bp, Glycine max
  unsure at all n locations
  Clone ID: jC-gmle01810041e04a1
gcaagccccactcaaccaccacacctctcctcgttcacgctacccctttctgctcttcttctacctttcaagttttaaaagtataaagatggcagagacattcctatttacctcagagtcggtgaacgagggacaccctgacaagctctgcgaccaaatctccgatgctgtcctcgacgcttgcctcgagcaggacccagacagcaaagttgcctgcgaaacatgcaccaaaaccaacttggtcatggtcttcggagaaatcacgaccaaggccaacgttgactacgagaagatagtgcgtgacacctgcaggaacatcggcttcgtctcaaatgatgtgggactggatgccgacaactgcaaggtcctcgtcaacattgagcagcagagccctgatattgctcagggtgtacacggccaccttaccaaaaaacctgaagaaattggtgctggtgaccagngtcacatgtttggctatgccactgatgaaacccctga

SEQ ID NO: 9451 - DNA, 545 bp, Glycine max
  Clone ID: jC-gmle01810041e05a1
tcttcggcagataactgaagcttcgcgtggagcaattacttcctttgtgcagaggactactaataagaagggtcaagtgttgacgtagctgataaacttacctcaatccttggatttggcataaatgaaccatgggtcgagtacttgtcaaacaccaaattttaccgagctgatagggaaaaactcagaaccttgttcgatttcttgggagaatgtttgaagttggttgtagccgataatgaattgggaagtttgaaacaagccttggagggtaagtatgtggagccaggacctggtggcgatccaattagaaatcctaaagttttaccgacagggaagaatattcacgccctggacccacaagctattcctactacagcagcaatgcaaagtgccaaaatagtggtggatagattgattgagaggcagaaagctgaaaatgggggaaagtatcctgagactgttgcacttgtattgtggggaacagataatattaagacatatggtgagtcccttgctcaagtcttgtggatgattggtgtgaa

SEQ ID NO: 9452 - DNA, 522 bp, Glycine max
  Clone ID: jC-gmle01810041e06a1
gaagaatgggaatgtaaaggtgtgacaggtgcttttccacgtcttcaacgtctttctatggagtgttgtcccaagctgaaagggcacttgccagagcaactatgtcatttaaattatctaaagatttctgggtgccaacaacttgtaccttctgctctcagtgcccctgatattcatcaattatacctagcagactgtgaagagctgcaaattgatcatccaacaactttgaaagagcttaccattgaaggtcacaacgtggaggcagccttactcgaacagattgggcgcaattactcttgttcaaataacaatattcccatgcacagttgctatgatttccttctaagcttggacatcaatggtggctgcgactctctaacgacctttccgctagatatcttcccaatactcaggaagatttttatcaggaagtgtcctaatctaaagaggatttcacaggggcaggctcataatcatctccagagtcttggtatgagagagtgcccccaattagaatca

SEQ ID NO: 9453 - DNA, 501 bp, Glycine max
  unsure at all n locations
  Clone ID: jC-gmle01810041e07a1
gacgcatgtttgccccgaccaagatctggcgccgctggcacaggaaaatcaatgtgaaccagaagcgctacgccgttgtctccgccatcgctgcctccgccatcccctccctcgtcctcgcccgcggccaccgcatcgagtccgtcccggagctcccactcgtcgttagcgactccgccgagagcgtcgagaaaacaaaagaagcaatcaaagtcctcaagcagatcggagcattccctgacgcagagaaagcaaaagacagtcgcagcattcgtcctggaaaggggaaaatgcgtaactgtcgctacatctcacgccgtggaccactcatcgtgtacggaacggaaggagccaaagccgttaaggccttccgtaacgtccccggcgtggaagtcgctaacgtcgagaggcttaaccttctgaaacttgctccaggaggacacctcgggaggtttgtggtttggacaaaaagcgctnntgagaagctggattcgattatgg

SEQ ID NO: 9454 - DNA, 493 bp, Glycine max
  Clone ID: jC-gmle01810041e08a1
aaagaaaagaaaactggttcttcttttcgcgttgcgttttcttggtgtctctgtcgattcttcttctgaattttaatacttaggaagtttagttttctctcttggcttctccggttggagtttccggcgaccttgtcggagattttgttgtttatttttcacaccacttgtgaaacttctcaagaaaaagaaaaaggatgtctcttgctgattggttctatggaattttggcgacccttggcctgtggcaaaaggaggcgaagattttgctcctagggttagataattctgggaagaccactttgcttcacatgctcaaagacgagagacttgttcagcatcaacctactcaatatcccacttcggaggagttgagtattgggaagataaagtttaaggctttcgacttgggtggtcaccagattgctcgtagggtctggaacgacttacgctcaggtggatgctgtagtgtacctcggtgatgcatttgaca

SEQ ID NO: 9455 - DNA, 447 bp, Glycine max
  Clone ID: jC-gmle01810041e09a1
catttattcacatccatatccactcactattccctcctccttcctttgcctctttcgcttttgctttctaggttttttttttttcttcttgctctttctctgtgtccatggcgggaaaaggagggaaggggcttgtggccggaaaaaccactgcagcgaacaaggacaaacacaaggataacaaaaggcctgtctctcgttcatcccgtgctgggatccagattcctgtgggtcgtatccataggcagctgaagcaaaggctgcacgcaaatggacgtgtgggggcaactgctgctgtgtacttggcctccattctggaatatctcactgctcaggctctgtagctggcggggaatgctagcaaaaatctgaaggtgaagaggatcacaccaaggcacttgcaactcgctatcaggggagacgaagagctcgacaccctcatcaaag

SEQ ID NO: 9456 - DNA, 467 bp, Glycine max
  Clone ID: jC-gmle01810041e09d1
aaaacaaaaaacttttaaaatccagcagcattacaatcccaggggtttcacaacagggaagttaaaagccaatagaatgaccttttacccaataacattaacatttgttcataaacaggaaagaagggctactacactaacttcttcataaacataaaggaacacttttttggggaaacaaagggggatttgattttcattttttggcaactttgttgatcaagggcttgggaatgggagggataacaccccccccaggaaggggccctttgatgaggggggaaagcttttcgtctcccctgatagcgagttgcaagggccttggggggatccttttcaccttaaaaattttggtaagattccccgccaggttcaggaccttagaagtgagattttccaaaatggaggccaagaacaccgcagcagtcgcccccacacgtccatttggttgcaccctttggttcaac

SEQ ID NO: 9457 - DNA, 474 bp, Glycine max
  Clone ID: jC-gmle01810041e10a1
tgagttttttttccttggaatagctgaggctttcagctcagttgggcagcttgagtttttctacagttatattcccaaatccatgtctagttttgcaatggctattttcactcttgaactagctgctgctaatacagtggcaagtgtgttggtgagcattgtggacaaggtcactagtgtaggagggaacaagagctggctatcaactaacattaatagtggacatctgaattactattatgcactgctcagtttcttaagtataattaactacctctactttcttgctgtttgttgggcttatggtcctgctccggggccaaatcttgaagcttctgcaggcaaggaagaagagtcatttgattatagggacttacctactttgtagattagtttttagtcaacaacagatagatactataaacacttggagaaattagagcattgttagtgggtttgtttgaaaaactaata

SEQ ID NO: 9458 - DNA, 557 bp, Glycine max
  unsure at all n locations
  Clone ID: jC-gmle01810041e10d1
gatataaataagttcattatcatgtaaaagcttccactacaatagcagtaattagtgtgcgaaagctacattcatctcatgattcattccatttttgcatcattatactacctagagcataataaaactcttagcatagatatacttttcacctattagtttaacaaactaataacaacactataaaaacaactaacaatactataattttgaagtctcagataaatatgttaaaagtcccttgaaaaatgactgaattttattataagtcccaaataaatttttctttattttaaattctcgatatattaaaatctttgttttaaatctctatcatcagttaagtgatgacatattaccttacaaactaattttctaaatatcatcaatgattataatagtgtcacgtcatcacataactaacaagaaagactcaaaacaaaagttttaataaattaagaattcaacacaacccanaaatttattaagaatccaaaataaaaattcgatcatttatgaggactttaaacatattaaatcttacatcattatactac

SEQ ID NO: 9459 - DNA, 456 bp, Glycine max
  Clone ID: jC-gmle01810041e11a1
ggctcgtggcctatactattgcattggtgggtcactcaaaagtggctcccttcaactgctgtcatagagaatgaaggccacctgtgattggagtctcaatgggttcatacgctacttggagttgtctaaagtatttgccccacaggcttgcagggttggcactgatagcaccagtgatcaattacaggtggccttcattccctaagagactgataagggaggactacaggaggaaacttgtccagtggtgtatgtggcttgcaaaccactggcctagactattgcattggtgggtcactcaaaagtggctcccttcaactgctgtcatagagaagaaccctgcatttttcaacaaaagtgatgtggatattctaaagacaattcctgggttccctatgcttacaaaggacagtttaagggaaaaggctgttattgacactcttcgccatgactgga

SEQ ID NO: 9460 - DNA, 498 bp, Glycine max
  Clone ID: jC-gmle01810041e11d1
gcaattcacacatattctttttatttgccaaacaaatgtaatttatacaattgacagtttcctttaaaaaatctaataatatacatattagattttgaaatcatggcatattaagattcaaataatggtgctttagatctatatgcaacattttcttgtccaagtaaaagtgccttcaaaatggcctcacacaagcccctatagtatataattaaatggccaccatctggaacttcatgatactgtatccagggcagcttccctgaaacaaatctctggagttcagagggcacaaccttatcttcgtagccatgccaaatgtgaaacgaacctgtattgtgagggaatggattacttagcttcattgggtcaaattcccattttccaaaagccaccctccagtcatggcgaagagtgtcaaaaacagccttttcccttaaactgtcctttgtaagcatagggaacccaggaattgtctttagaatatccacatcactt

SEQ ID NO: 9461 - DNA, 488 bp, Glycine max
  Clone ID: jC-gmle01810041f01a1
tcgtgagatgtaacccttcctcagcatcagctctcaccatcaaagctgcttcctatgctgacgagctcgtcaaaaccgccaaaacagtggcctcaccggggcgtggtattttggcgatggatgagtcaaatgcaacctgcgggaagcgtttggcatctattgggttagagaacacagaagctaatcggcaggcataccgtaccctacttgtgacagtacctggtcttggtgaatacatctctggtgccattctctttgaggaaactctctaccaatccactgtcgatggaaggaagatcgtcgacgtacttgttgaccaaaacattgttcccggtatcaaggtcgacaagggtttggtgcccctagctggttcgaacgatgagtcatggtgccaaggtcttgatggtcttgcgtctcgctcagctgcatactaccagcaaggtgcccgtttcgccaaatggcgtactgctgtgagcattcgcaacggt

SEQ ID NO: 9462 - DNA, 485 bp, Glycine max
  Clone ID: jC-gmle01810041f02a1
ggaagaacgaagcagaagaagcatctcagaacagaaccaccgaacccactcagaagcaaatccgaaaacccctcatataatagtactggtattcagctgttcatgacaaaagcctgaaccgatcatgtcagaaggtgcagaaattgatgagcgtgtggaccttgacgaggaaaattatatggaagagatggatgatgatgttgaagaacaaatagatgatgatggagtggatggaggtgaagatgaaaatgctgaaggtagtgttgaagaacatgaatatgaggactcagcagctgaggctggtgggaaagaccaattgcctgaagcagaaaaaagtgacattgctactgaatttggggatgatgagcaaaaattgtctttcattgatgaagatgagaaagagaagcatgatgaacttcttgcccttccacctcatggttctgaaagtcttattggtggactttctcgggatgtatgtgaagatg

SEQ ID NO: 9463 - DNA, 581 bp, Glycine max
  Clone ID: jC-gmle01810041f03a1
tcatcttgtggagaagcttgcaaactttgacagggaacgtatcccagaacgtgtggtccatgccaggggagctagtgcaaagggtttctttgaggtcacacatgacatttctcacctgacatgtgcagatttccttcgagcccctggagttcagacgcctgtaattgttcgtttctcaactgtcattcatgagcgtggtagccctgaaaccttgagggaccctcgaggttttgccgtgaagttttacaccagagagggtaactttgaccttgttggaaacaaccttcccgtcttctttgtacgtgacggcatgaaatttccagatatggttcatgctcttaaacccaatcccaagaaccacattcaagagaattggaggatccttgacttcttctctcactgtccagagagccttcacatgttcacctttttatttgatgatttgggtgttccacaagattacaggcatatggatggttttggagttaacacatatacgctgatcaacaaggctgggaaagcagtgtatcgtgaaattcactggaagaccactagtggtataaagtgtctattggaggaag

SEQ ID NO: 9464 - DNA, 519 bp, Glycine max
  Clone ID: jC-gmle01810041f04a1
agcgaggaagagatgagggagaggtacgagatattctcgcaaaacctcaggttcatccgctcccacaacaagaaccgcttgccctacactctctctgttaatcattttgctgattggacttgggaggagttcaaaagacacagactaggcgctgcccaaaattgctctgccactcttaacggcaaccacaagctcactgatgctgttcttcctcccacgaaagactggaggaaagaaggaatagtgagtgatgttaaagatcaaggcagctgcggatcatgctggacattcagcacaactggggctttagaagcagcctatgcacaagcatttgggaagagtatctctctttctgagcagcagctagtggattgtgctggccgtttcaacaactttggctgtaatggtgggttgccatcacaagcctttgagtacatcaaatacaatggaggacttgagacagaggaagcatacccctacactggaaaagatggtgtatgcaaattctcagctgaaaat

SEQ ID NO: 9465 - DNA, 569 bp, Glycine max
  Clone ID: jC-gmle01810041f05a1
ctcccaattactttgttgcatttcacacaccaacttcccatagaagagagaagagagaagagactcttccttccatcctgcaactcaaatcatcatgcaagactccagctcaatgaagatctcccctctggatctcatgtccgccatcttcaagggcaagctcgacccctccaacgtctcctcctgcaccaacgccgccgccgccggcttcctcctcgagaaccgcgacttcctcatgctcctcaccacctccgtcgccgtcctcatcggctgcgtcgtcgtcttcatctggcgcagatcatcctcccccaaggccaagcctctcgagcctcctaaacgcgtcgtcgagaagcttcccgaaatcgaagtcgacgacggcaccaagaaggtcaccatcctcttcggcactcaaaccggcaccgccgaaggctttgccaaggccacagctgaagaggccaaagcgcgatacgagaaggccacgttcagagtcgtcgatatggatgattatgccgccgatgacgatgaatacgaggaaagttcaaaaaagagactcacgttcttttctttta

SEQ ID NO: 9466 - DNA, 518 bp, Glycine max
  unsure at all n locations
  Clone ID: jC-gmle01810041f06a1
cgctaacctcaaagagagttcagtatttatacaaataaaagttttttctttttttatttctggttttcgttttggaatggctgggatttgctgtggagttgttggagaagccgccgagacttcttctcccatcgaacccacctcacgcccttccgcacgccggagtttggaccttttgcccttgaaatacatagctgctgacgtgtcagtcccgccgctggagaacagccggaagcgccagaggctggataggcgcgcttctccggcaagggagtgcgataacgcggttcatagttccaaatcgaaggtagttgaggttgttccgaattattcttcgaagagtccaacgttggactccacaagtccaacagttgtcgaggagtatccgaggtatggggtaacgtccgtttgtggaaggaggagggacatggaagacgccgtttcggtccatccatcgttttgccaagaaactttatctcatgataaanaaatagggtttcatttcttcgctgtttcga

SEQ ID NO: 9467 - DNA, 340 bp, Glycine max
  Clone ID: jC-gmle01810041f07a1
taagcatgttacatgcaaaccaaaattatgtagttaccaaacaaacataattttgaattcaagtaggtgccatatagttcctttgattgtagttggctgtagactgtacagggaattcaattgcactgaactccatgaataccaattgagttggatgcttggataaaaatggctgttcaaaactctctccaaataactagaagtggtagtggtggttatgacgatgacgggcgtgctaaaaggactggaactttatggagtgctgtggctcatatcatcacagccattatcggtgctggtgttatgtctttagctaggagtacttcccaattgggatgga

SEQ ID NO: 9468 - DNA, 415 bp, Glycine max
  Clone ID: jC-gmle01810041f08a1
cgaaccttgctcaaggtcattgttctcggcgatagcggggttggaaagacctcgttgatgaatcaatacgtgcacaagaagtttagtcagcaatatgaggctaccattggggctgattttgtcaccaaagagcttcagattgatgacagacttgtcactctacaaatatgggacactgctgggcaagagagatgccagagtctcggggatgcattttacagaagtgccgattgctgggttcttgcggatgacgtgaatgtgatgaaatcgtttgatacccttgagaactggcacgaggagtttcttaaacaggcaaacccttctgatccaatggcatgtacgtttattttactgggaaacaatatcgatcttgactgggggaataagcgactggtcactgacatgaaagcgaaga

SEQ ID NO: 9469 - DNA, 395 bp, Glycine max
  Clone ID: jC-gmle01810041f09a1
cggatacagcattgaagacgtttgaccaaacggcggaatcaagaaattgagagctggtggttactctaactgttctcgcaaaccattctgatacacatacggatggatagatcgttgcatgcaaccatagtgatattaggatcttgtgttctttgttaccaattagggattattgttgctctccttcaaactgcatctttccaaatcctctatttgcgaatgagttttgatcagctttctactgagatagacactctactgctacatggacatggcggaatacgagatcggttgtgtgcgtttacagaaacggatggtaatatgctttttccagccaggactctatgctgaccctgaatgaaggggtcttatggctgttacgcaatcccagttgg

SEQ ID NO: 9470 - DNA, 501 bp, Glycine max
  Clone ID: jC-gmle01810041f09d1
gcacgcaaacaaagtgatttattaatccattcgatgttcaaatggtaatagaaacaataaaggtctaaatgcccaaatggtctctaacagaagctaaaaaagacaacaaagaaaaacaataacgtatctggaaaaccagacttattttcacaaggacagaataataaagacacttaaggaaactactcttcctcatcttcctcattccagcactttagagttgatctaggtgaaccacagtcactagtcttcccgaatttttggtagacaacagaaccacccattccaagcccttcgtggctcctctcttcacgacagtatcccttaacatccagaaagcaggtctgctcaaacgacttgcttgcaccatccacatgaactgcaacagaaaactcagttgggaggaaacatgccaataccctctgaaccatttcgttcagattcaccgctttgaagtcataaccaacagtttcgaagcttgcataactgaaaccatcttct

SEQ ID NO: 9471 - DNA, 426 bp, Glycine max
  Clone ID: jC-gmle01810041f10a1
gctcaattcttgctggaggcttcaagatctttgtacagatttctggtactgcattcactgctttgtgtgctagaaagaaaaaagaaatcaatttgcacttcagaactactaatttttcattggtaaatttgactctccttgtccatcacagagaaaatcgagttgaatcctcactgactcatttgtttttttttggttagcgcagaacagagcctaggtatggaaactcttgtatatgggtgagcaccagtgccgccaatttgataactcattgtggcaattatgagtgcagagtttgcgatcacgtcaatcaagaggtttctctataggacaactctgagtttattacacaagtactatttctgcatgagcgcctgtgagatattatgagatgcgtactagggggcagctaagaagcttaaaaag

SEQ ID NO: 9472 - DNA, 317 bp, Glycine max
  Clone ID: jC-gmle01810041f10d1
atgccgggggagaaagtgttggtttttaacttttacaaaatgttaccgacccttaggaagattgtgggttcgacgtgctttttgacaaactttgggggagtacaaagtctccaaagcgggattatatttggcggggccaaaaatttctccctgtcatcgggggaagagctgcggaagacataagcacttggatggggattttttgaaagacttttttcttttgcgaggggggaaattggaagggggaatgctgtcccaaaccgaattttttgaacccggggggggaaaagatcattcccttggccaaaaacgggggt

SEQ ID NO: 9473 - DNA, 532 bp, Glycine max
  Clone ID: jC-gmle01810041f11a1
ccgcgtccctctgtaccactactcctggttgaactcgagcagcctcgccaacgcttccggcgatcctaactacggatccaccgacttcattcccgagaacgccctgaacggctccgcccagcctgtgcacaaagccggcggcgctcccggcggcaaccccagcctctacgacgtgctcttgcgcgtctacgccactgtcaagaacaccggctccatcgtcggcgaggaagtgccccagctctacctctctcgcggtggtccctacgaccccgtcaaggagctcagaggcttcgagaggatctccatcgcgccgaacaccactgccagagtcagctttgatatcactcgcaaggatattgccagctggaacactgttgagcaggattgggttgtgcaaaacacgactaagaatgtttgggttggcagctcgagcaggaacttgcctcttagcggtgtgcttgcttgagattgttgatggggtggatgatttgatcttcatggctgatgatagaatattactacacgatagaca

SEQ ID NO: 9474 - DNA, 517 bp, Glycine max
  unsure at all n locations
  Clone ID: jC-gmle01810041f11d1
atgattatgtacagtagtatattcatctatgtctatcgtgtagtaatattctatcatcagccatgaagatcaaatcatccaacccatcaacaatctcaagcaagcacaccgctaagaggcaagttcctgctcgagctgccaacccaaacattcttagtcgtgttctgcacaacccaatcctgctcaacagtgttccagctggcaatatccttgcgagtgatatcaaagctgactctggcagtggtgttcggcgcgatggagatcctctcgaagcctctgagctccttgacggggtcgtagggaccaccgcgagagaggtagagctggggcacttcctcgccgacgatggagccggtgttcttgacagtggcgtagacgcggaagagcacgtcgtanaggctggggttgccgccgggagcgccgccggctttgtgcacaggctgggcggagccgttcagggcgttctcgggaatgaagtcggtggatccgtatttaggatcgcccggaagcgtggcga

SEQ ID NO: 9475 - DNA, 559 bp, Glycine max
  Clone ID: jC-gmle01810041f12d1
catactcttgataaaaaaaatggaaatatgacttcatattatacacgcttttcgaaatccaaagaatatgaaacaaaatcaatgttacataaaacaaggacaccatcctcagctgaaatttaaggatgattaatcaaatttttttatgcagatatatatatttctgtacatcatgatggaacatttactctgctgctatacaatttttcacttttctgttttcttttaccttccactttgtatatatggggcaatcttcatgtcgccagtttaccttcagagacttgagtatcatctgatgaatctggggaatgagatttggctttgctcgtagttctattatatccatatccaaaagaagttccatttgtttcggatagttcagtgagctcagaaagatggcgggatctgaattcatttatagtcgctgcaatctctgatgtaggaagtttagcctgagcaagcacggcagctgctagttgaagacttggttccaaggtctctgggacaacagcagtagctccagccttttctaaattaatcatgatcacatcatgag

SEQ ID NO: 9476 - DNA, 488 bp, Glycine max
  Clone ID: jC-gmle01810041g01a1
cggctcgagtcatgccagaaaaaggaactccagaatacgatgaacttgtggcgaatcctgataaggcttatctgaaaacagttacttcacagtttctggctgttcttggcatttcacttgtagagatcttgtccaaacattctagtgatgaggtctaccttgggcagagagacactccagattggacatctgatgctgagccattgcaagcctttgagaagtttggcaaaaaacttgctgatattgaggaaaggatcttgagaatgaatagtgatgagaaattcagaaaccggtatggtccagttaagatgccatacaccttgctttatccttctagtaaaggtggactaactggcatgggggttcctaacagtatctcaatttaatttaaagggggctgtaaccagagtcttgtctttagttgtatcaaataataatggccttaaaggaccttggttattttgaattatgattttataatggccaat

SEQ ID NO: 9477 - DNA, 565 bp, Glycine max
  unsure at all n locations
  Clone ID: jC-gmle01810041g02a1
atccgtttctgtttttccaattttgccctccgctttttccctatttcccaattttgccctcttcttcttctaccatgacctacttgaagtcgtagctcgagtccgtgttcgccttttccaattcccaatttcaatttcccaaacttcgtaggatttccgtcgaataatggaacctcgagttgggaacaagttccgtctcggtcggaaaattggtagcggatctttcggagagatctatctcggaactaatattcagactaatgaagaggttgcggttaagcttgaaagtgtcaaaaccaagcatcctcaattgttgtatgaatccaagctgtataaaatactgcagggaggaaatgggattccaaatgtgaaatggtatggtgttgaaggagagtacaatgtgctcgtgatggatttacttggccctagccttgaagatttattcaacttctgcagtcggaaattgtctctcaaaactgttcttatgcttgctgatcagatgctaaatcgagttgaaattgttcattccanatcatttttacatcgcgacatcaagccagacaac

SEQ ID NO: 9478 - DNA, 540 bp, Glycine max
  Clone ID: jC-gmle01810041g03a1
actttcatttcatttccgttttctctccaaaaacgtctctctctctctctctcttttccctttaaacgccgaccaacgacacgacaccgtttcgatggtggtgaagatgatgcggtggaggccgtggccccctctcgtctcgaagaagtacgaggtgaagctagtcgtgaagacactaactctccagggctgcgatctggtgcgcacgtccgcagagaaaggtttcgtgctccagattaagtggaagggtcccaaacttaccctaagctctctgcgacgcaacgctgttgctagaaacttcaccaaagaggtgcaccccgagcaaaacgacgacgtcgttttgtgggacgaggagtttcacgcgctctgcactctcaacgcgtacaaagacaatgcctttcacccctgggaaatcgctttctctctcttcaacggtttgaatcaaaggtcaaagactaaagttcctgtggttggaactgcagctttgaatctagctgattttgcatctgtcgttgatcaaaaggattttgatttgaacat

SEQ ID NO: 9479 - DNA, 479 bp, Glycine max
  Clone ID: jC-gmle01810041g04a1
gttgtttttcataactaggatacatgagagacatcaaaatatttactgtactatttgttttattttacatgctccttctattgtcattttgcctactttctaagtaactcttctgtataatgacatgaataaaaatattgcataaataaaggattggattttcttgtgtagattcctttttctattttctttctctttttcagttttctctgttcctctgctttcatttcttacattttcaactcttcattaactttcttgctaagggaatcttcgtcgtggaatctgaggaaacgtcagtatgaaaatcaaggaattttcctcgccataatgaacgagagaatcactagaggcacatgttggtagaagattttctctggggattgacttgattgattgatcacagttcatgctaaacaaccaaccaaacggctattctgactattttttgatcctgtttctaatcttgtttcttagac

SEQ ID NO: 9480 - DNA, 515 bp, Glycine max
  Clone ID: jC-gmle01810041g05a1
gtattgacaaaactagtgcaactttgcaatttagaaagttagcagattgtgattttctcaagagaaactttaagcagatgtctaatgttttgtgggtggctcctgaggataaggcgagtttatggtcacaacttcattatgtttcgtgtaataatctggaaatgcaagaagcttatcttgtcaatctcgtaaatgtgttacgagaattgtatttgcacagtccagaggaagctcgccaattgagaaggaaagctctctctcgtattgaatggctgcaaaaagctgatgtgcctaccatagcacagattgaagagttccattcgatgcagaggatgatgaatgctcctgattcaaatgataatattgatctactgttgagcattgatttgttgggtttacaaggagcaggtaaagcttttccaaacaagattgtttttgatgataagcttgtgttggctaacacacaagaattctttgatggaaattttccagtggattcttggttaccaattttt

SEQ ID NO: 9481 - DNA, 486 bp, Glycine max
  Clone ID: jC-gmle01810041g06a1
atccaagttcactttggtggcagttgaacgagtttgcaaccccacacacaaaaaccaaacccttaaaaatgtcatccccctcgccggtggccacggtggtctccgccgccgcgctgtacgaccgcgccaaagccgtgaaagaattcgacgaaaccaaggtcggagtcaaaggtttgatcgattcgggaatcagaaccatcccccctttcttcgtccacccgcccgaaaccctagcggacctcaagcgcggaaccaaacccgggtccgcgccggagatccccacggtggacctcgccgccgaggagagctcccgcgccgccgtggtggagcaggtccggcgggcggcgagcaccgtgggattcttccaggtggtcaaccacggcgtcccggaggagctgctattgcgaacgctggcggcggtgaaggcgttccacgagcagcccgcggaggagagggcgcgggtgtaccgtaaggagatggggaagg

SEQ ID NO: 9482 - DNA, 439 bp, Glycine max
  Clone ID: jC-gmle01810041g07a1
caacatctttcacgctgatacctatcccttacacaccataacaacctagcatatcatctaggagcgaagaaaacggaggcgatctatctcatccgcaccaccacacctgaaccgccaccgcacttcttcgccaccctccccttacccctcttgccacatcctccctatccgccatgtctcgcacagcaactgccaccccaccgccggcatactttcctcctcgcaatgcgacaccgacgatgcggcactgcgccgccccaaacgtcaacgcagtgcatttaggacctcgccacgcacatgagccgcaccacccgaagaaaaaggcccgaaatgtctccgcggcgtttgtgggcgctttgagccccgaagaagaagccgatggagatgggaacggttacgccggcgggagaggcgctagccatgtcattcgaggagatct

SEQ ID NO: 9483 - DNA, 434 bp, Glycine max
  Clone ID: jC-gmle01810041g08a1
catattcctatgtgccaccgttgacgagaaactatgcatgcgagcctacactccaacaagcagcgttcacgaagtgggatacttcgacctcgtcgttaaggtttacttcaaaggggtgcaccctaagttccccaacggtgggatcatgtctcaacacttggactctctccccattggttctgtcttggacgtgaaaggcccacttggccacattgaatacactggcagaggaaacttcctcgttcatgggaaaccaaggtttgccacgaggctagccatgttggctggtggcacaggaatcacacccatttaccaagtggttcaagccattctaaaggatccagaggactgcaccgagatgcatgtggtttacgcgaaccgaaccgaggatgatatattgctgaaggaagagcttgatgagtgggctacgaagt

SEQ ID NO: 9484 - DNA, 308 bp, Glycine max
  unsure at all n locations
  Clone ID: jC-gmle01810041g08d1
aatagaatccattatttatatataacaataaactactatatacacatacaatgtattctagtttagtcccctaaaacacgagcaagttattctgggtgtcgtagcccaacttctccaaattcggctggactgcaaattgaatcataggtggtggtccacaagtcaatgccaaggtatcaggagatgcatttggaatatgctccgtcaggatactttcagtgatgaatcccacactgtatttccacccttctcttatgctntcttgtatcacgtaccacaccttcaacctatcatactttttagcccac

SEQ ID NO: 9485 - DNA, 334 bp, Glycine max
  Clone ID: jC-gmle01810041g09a1
ggaagtcaccgccgctacttctccaccttctcgcgttctcctcatctccgccggtgccagccacaccggtgcccttctctctgggaatgttgtgtgctcgtggggtcgcggagaggatggacagttaggccatggtgacaccgatgatagactcttacccactcatctgagtgcattggatgctcaacaaattgattctattgcatgtggagctgatcatacccttgcgtattccgaatcacgcaatgaactctatagttggggatggggtgattttggaaggatgggtcatggcaattctagtgatttgctcattcctcatcctattatagca

SEQ ID NO: 9486 - DNA, 340 bp, Glycine max
  Clone ID: jC-gmle01810041g09d1
cacaaaaggactggggcctcgatttttattaaacccctaacccccgtaattcccggggcccaaacaaattttacccaaaagggaaaggtttgctaaaaaaaaagtggataaaaaaacccggggcggttttttctcatatgacccccattaacatttactactatggggaaagccaaattactaggggcatgtgagcgggggctccattgaactggggggggggaaatcaatattatgcttcattttcctttaacggaaattggccccaaaaaaccgggtcccgttggacatcactttgtgggacactgttttaaagcctatcccccctgtttgaacaagc

SEQ ID NO: 9487 - DNA, 445 bp, Glycine max
  Clone ID: jC-gmle01810041g10a1
taattggggagggtacgtggaactcatggaaatggcgaagaagcatggcctcaaggtgcaggctgttatgtcatttcaccaatgtggcggcaacgtcggagactcttgcactattcctttgcccaaatgggttgcggaggagattgataatgaccacgatcttgcatatactgatcaatggggaagaagaaactatgaatatatatcacttggatgtgatactttgccggtgctcaagggacgatccccagctcaatgttatgctgatttcatgcgagctttcagagacactttcaagcacctacttggtgataccattgtggaaatccaagttgggatgggaccagcttgtgagttgcgttacccttcgtacccagagcaaaatgggacatggaaactcccaggagttggtgctttccaatgctatgacaagtgtatgttgagt

SEQ ID NO: 9488 - DNA, 480 bp, Glycine max
  Clone ID: jC-gmle01810041g10d1
aaagggtcacaaatagaagttttaggtgcatacaatacaaaacaatataatacaaaattttacatcttcaaagccacaaacctgggctgttggttcactaaaactttcacacagcctccttgtgacttattcctaagccctattaccacaaggatgttcaacaattctcagtgcatcagcactgcagcctcttgcacaagaggctgtgtaacatgcacaaaatgctcagcttccctctccacctcttcccaacacttgtgtgcactcttcccttctttcatcttcttcacaaaccccacaaacttcctccagttatttggttcaaacaaatgcggattcatcctcaggtatgtgaaggcacacatctctctatcaccagactcaccatcaacatccaattgtgatgcccttatgatctgctcatgtgcatactcgtcgtaccgtggcagcgcgtttttgcccgcaagtggaacctgtgcc

SEQ ID NO: 9489 - DNA, 567 bp, Glycine max
  unsure at all n locations
  Clone ID: jC-gmle01810041g11a1
aaatttaccatcatcatccaccaattcctgggcatggccgtgctacctttctcatactcaagatctcccactttatctctaccatcatctcaacaaataaggcctaaaacaaaaccaaattccaagacaaacacatgctctctaatccactgctgccacagccaaacagaaccaatcgaactaaatggccaagccagatttcgagagaagaaccctgccactgcagttgcatcccccgtggttgttccaccaaggcctcgaaggataatccttgttaggcatggagagagtgaaggaaacgtggatgagagcgtgtacacaagaatacctgatccaaagatatccctcactgagaaaggaaaggtccaagcagaggaatgtggcaacaggataaagcaaatgatagaaaatgaccatgaccaacattggcaggtttacttctacgtctctccatatagaaggacacttcanacctngcagcacctcgctcgtccttttcaacgctctagaatcgctggcttcagagaagagcctcgcattcgagacaagattttgggaatttcaaac

SEQ ID NO: 9490 - DNA, 294 bp, Glycine max
  Clone ID: jC-gmle01810041g11d1
aaaaaacaaaagcggggaccccccgaaaaaaaaaaaaaaaaaaggggggggggcccccttttgcaaaaaaaaaaacaaaacacccccccccccttagagggcaaaaaaaaaaaaaaaaccctgggggggggccccccccccggggcacaagggggggggaaaaaaggggccccccccccccgggaaaaaacccccccgggggggtttccccccccccgggggggggggaaaaaaaaaaaccccccgcggccaccctaaaaaagacaccggggggggggaaaaaaggcccccccc

SEQ ID NO: 9491 - DNA, 468 bp, Glycine max
  Clone ID: jC-gmle01810041g12d1
aaaataaaaacataaacaacatactttcgctgaaacgagttcaatacatcattttaaaacataataaacagcagcacttaaaccagagatgcaaagcacaagttcaagggagacactgaacaaacagataagacatatgagaacacttcataaaagggattccccttagcaaccaccacgaaggcgaaggacaagatgcaaagtggattccttctgaatattgtaatctgccaaggtacgaccatcttccaattgcttcccagcaaaaatgagcctctgctgatctggagggataccttccttgtcctgaatcttagctttcacattgtcaatagtatcagagctttccacctccaaggtaatggtcttccctgtcagagtcttcacaaatatctgcatacctccacgaagcctcaacaccaaatgcagagtggactccttctggatattataatcagcaagagtacg

SEQ ID NO: 9492 - DNA, 341 bp, Glycine max
  Clone ID: jC-gmle01810041h01a1
gttaggtgtattggatttatagggacacggagtgttaagtaaactattaaatcttctgagacagttaaatttgtaaactattccaaacttaataaatctacatgaggcgacccctgaatagctgttaatatgccagctctatgtccagaaagtcacctctgcagctgatcgttaattcgagaaagggcatttatccctcgaactatggtttctatagtttcgatgctctctacaattccagtctcgagtaacaataccctttcctatacacactggtatttgtattaacggcctgtagctcgataatcaggggctactatctcatccgcggcatcatcgat

SEQ ID NO: 9493 - DNA, 531 bp, Glycine max
  Clone ID: jC-gmle01810041h02a1
attttgaaaagtgttgtgctttgggttgagaattgtggcagggcctaatgggtaactgcctagattcttctgccaaggttgatgcagctcagagctccaaatccacttctgcatcaggaatctcaaaaactactccttccagtttatctattccatcatacagtgaaaaaagcaatgcctcaagtcttcccacaccaaggtctgagggtgaaatcttgtcttctcccaatcttaagcccttcacattcaatgagctaaagaatgccacccgaaattttcggcccgatagtcttctcggtgaagggggatttggatatgtctacaagggatggattgatgaacacacatttacggcttcaaaacccggatcaggaatggttgttgctgagaagaggctgacacctgaaggttttcaaggtcacaaggagtggttgactgacgttaactaccttggacaactgtaccatgctaatctggttaaattaatcgggtactgcttggagggagagaacccgctattggtgtatgagt

SEQ ID NO: 9494 - DNA, 591 bp, Glycine max
  Clone ID: jC-gmle01810041h03a1
tgttgttcttcctcagtttaatcagcttccacagaaatcagtagaagtaactgcgatcaaacaacagcttttatctcaatatgatgttcttctgtctcgcatcaatgacctaaaagaagctgctgaaaaagagatttggatgttagctcgaatgtgccaacttgagaacaaaatttcagctgttggagaacctgcttatcggactcggataagtaaagtcaaaagggttcgcgagagcctgcaaaactccctcaggggacggattgaattgattgaaagctatgctaggatttcctcaatgattgaaatcgaagtggagatggagactgatgttcttgctgctgaaactgctagtaatatggatagtatcaaagaacagatagagcaaatcatggagcttgaaaatttggaggagagatggaaaatacaagcagaagcaaatgatgaggctgaaagacttcttagttcccagcccatgcctttggacgaagtttaaagttgaatggatgcatctgattcgtgtgctgtatcattaggcaagcttcaccctccagctcaatgatcttttcaactgagcaaaagagcagcatc

SEQ ID NO: 9495 - DNA, 519 bp, Glycine max
  Clone ID: jC-gmle01810041h04a1
gtcaaacaaacaaacccaacattacaaccatggcaacggtgacacaaccgtgtgcttcgtggacgcgcggttccgttcctctctcgaagcgcgtcctcccacgacgtcgtttcaccacacgcctcaccacgtacccacaagctgctctggttcaagcaccgcctccaccaccaccttcttcgcccagagacagctctagctccattcagcttctgaccttgtcacgtgccaatgacctgcaagccgaggccagagccatggcacgtgccgccaatgccaccgtctacaacccgcaactcattgcgtccatgtacggttcccaacccatcaaggtggtgcggaggacccttcagattctgactgcgttgggttcgttcgggctgaaactgttgctggaccagaggaatggagcgcttgataagaacagaagagttcgtgctgttgagcttaaggacatattcacgaagctgggtcccacttttgtgaaatgggtcagggattggccaccaggcctgacat

SEQ ID NO: 9496 - DNA, 544 bp, Glycine max
  unsure at all n locations
  Clone ID: jC-gmle01810041h05a1
tgccttcatctttctctatcttaaccttcaccttgcaaagtgtaccaaacctcagatggatcatcaaaacaaacacgtagcagtctttgctttcccctttggcagccaccttatgcctctattaaaccttgtcctcaaactagctcattcccttccaaattggtcattctcattcattggcacagacaaatccaatgcaatccttttcccaaaaccccacatcccaaataacatcaaggcctatagcataagcgatggaatcccagagggtcacgtcctatgcaaaaacccaactgaaaagttgaatctttttctccaaactggtcctgagaacttgcacaaaggtatagaacttgcggaagcagagacaaagaagagagtcacatgcatcgttgcagatgctcttgtaacctcttctctctttgtggctcagaccctcaatgctccttggattgcactttggcttcccaattcatgctgactctctctatatttctacactgaatngatacgtcagcactgtgcaaaccatgcttggaacaca

SEQ ID NO: 9497 - DNA, 523 bp, Glycine max
  Clone ID: jC-gmle01810041h06a1
ctcgagccgaatcggctcgagcggatgtgtgagtttgcatggttggatagcaatggcagcaaagaaggtgtgtgtaacaggtgctggaggattcgtagcgtcttggcttgttaagcttcttctttccaaaggctacattgtccatggaactgtgagagaccctgaacctgctactcagaaatatgaacacttgctcaaactccacggagcttctgaaaacctcactctcttcaaggcagatctcttgaactacgaatctcttcgctcagcaatttctggatgcactgcagttttccatcttgcttgccctgtaccctcaatcagtgttcccaaccctcaggttgaaatgattgagcctgctgtgaaaggaacaactaatgtacttgaagctagccttgaagctaaagtgcaacgacttgtctttgtatcatctttagctgctatttccaatagccccaatttgcctaaagataaagtgattgatgagtcctattggtctgataagattactgcaaaacaactc

SEQ ID NO: 9498 - DNA, 392 bp, Glycine max
  Clone ID: jC-gmle01810041h07a1
agaattcaaagagagagtttcttgttctgtattttttgatttgatcatttcaatcttcaatttttttttatatatccaccaatccgcaaagtgcaaatttctaatctttcacgtattgggttcttctcttttccctcttcgtctccgatcgatccaattctctttccatggctacgatcggacacaacaatctcaatgccaaattggttcttctcggggacatgggtgctgggaaatccagcctcgttttgcgctttgtcaagggtcaatttctcgaatttcaggaatcaacaataggggcagcgttcttttcacagacgctggcaataaatgatgcgacagtgaagcttgagatttgggacacagcaggacatgagaggtaccatagcttg

SEQ ID NO: 9499 - DNA, 407 bp, Glycine max
  Clone ID: jC-gmle01810041h08a1
gtgagaaagagagagagagagagagaaactgagagaaattcgcaaaccctaatgtcggaaagatcggcgatggctgcctccaaggatcgcgagaacttcgtctacatcgccaagctcgccgaacaggccgagcgatacgaagagatggtggaatcaatgaagaacgttgcgaatctcgacgttgaactgactgtggaggagcggaatttactttctgttgggtacaagaatgtgattggtgctcggagagcatcgaggaggatcctgtcttccattgagcaaaaggaagaaacaaaagggaacgagttgaatgcgaatcggattgaggagtacaggcagatggttgaattggagctttcaaacatctgtaatgatgttatgacagtgattgatgagcaccttatccc

SEQ ID NO: 9500 - DNA, 279 bp, Glycine max
  Clone ID: jC-gmle01810041h08d1
acaccataagcaattctcatcaatcaaatcccccagagactggaggaaaaggattgggaatgaaataggccatttccagacaccacacaaataaaaacataccataaatatagcacaaatggagtatctctttcccctatcgggaagtatggggcaatcaacaagaaacaaagagaaaacaatggaaccctatctctagctaatacacggataagtaacggccctcatgtttcattcccaaacgcatgcatcgaatcctaaggaagatcccatcaacaa

SEQ ID NO: 9501 - DNA, 436 bp, Glycine max
  Clone ID: jC-gmle01810041h09a1
tggaaaggctacaaatttaagaggacaagtgtctttaccaaccttgggagctggcgaagatgcatacgatgttcattttgaatgggacagacgacttctgaattcccggggcattttacattcataacttgatgcctggtgagtcatatctcaagtctgtaactctcggagacatctcaaaccacggaaccattcactgggtgtgcgactgctgggtttacaactcaatatcctaccattctgatcgcatcttgtttggcaacaatacatatcttacaacgcgagacaccggctacacttgtcaagttcagagaagaagacctgcagaatgtaagatgggatggctctggcgagcgcaatgaatgggataggatctatgattatgacgtctacaatgacttgtgcgatgcatatgagggtgaaaggtatgcacgcc

SEQ ID NO: 9502 - DNA, 263 bp, Glycine max
  Clone ID: jC-gmle01810041h09d1
acacgggcaatgaaattttaaggacaacccttgctgtaatggaaatcgtttacataagatgatgatttattctagtttgcactttgccatgccagctatcattgttgaaacatgcgcgagaacacttaacagcaatttatacaaacagaatttcttcattaacacttaacagcaaacacgagaacattcaatcaccccaaatacataacttaaccatacataggtagatgaaggaatcatattccttctattcacttttattg

SEQ ID NO: 9503 - DNA, 424 bp, Glycine max
  Clone ID: jC-gmle01810041h10a1
caatgatcgtgaagtccgaccggagccggcagcgcgaccggccttcttccggcgtggcttcgccagcgtggaaggctcggagtcctctgaacagattcggtggcggcgatgacgacggcgatgacgacgacgacgacggaggaggattctcgacgttcgtagtgcgatcaacggtgaagtccggcgagagagagtcggtgagcggaaccgtggttcgacggaccagtggcggcggcagcgtcagtgtcggtgtcggtgtctgctcgacgatggagagagcggtggctagcatgcaagggatgggagagttcggattcggaaagcagaggaagggaagtggatctcctcagaacgatgaaggaaggcatcaatcgataacgacgaagggttcgacgagttcgatccctgattgtgttaccagaga

SEQ ID NO: 9504 - DNA, 498 bp, Glycine max
  Clone ID: jC-gmle01810041h10d1
agtcgaaagtcatgcatattctatttacatacaaatatgtggcagcttacaaaactctaaatcttctagggtttacttaacaaaactaggaaaaatagttaaagcaaccagcaaaacattgggtactagttacacaaccatgccattgacctgtatgaatatataaaccaatgacacgagaaaagaaaatgggttttgtgatctttgcagccattaaaggtaggggatttaaaatagtcacaataagatacctacctacaaccgaagaatggttcgaagggtgtcagatagattttgaatagtccgctgctcctgggtcgcttgcagctcctgcagcggcatatcttcgtaacacattttatggtaagctaaagcctgcgccaaattcattagagtagaacttgatgtcaatctttggtaaatgcttggaggaagaggcatctgctcatttagtcctctccggccctttttggactgtccgtcaccactaaaaagctc

SEQ ID NO: 9505 - DNA, 233 bp, Glycine max
  Clone ID: jC-gmle01810041h11a1
caataatttaatggttattatcattgtaacaatcggaaagcttggcggtgtttgggggtccttagctgaaagggcccattccagagccactttgtgatttaatatttttaaagaatattgggtagcccaactatcgcaccgtgtgttctcattgtccgttatattcattatactatttctagcttacttgtaatagctgcatattgaccatccaacaacttttaatgagctta

SEQ ID NO: 9506 - DNA, 74 bp, Glycine max
  Clone ID: jC-gmle01810041h11d1
gataataaccattaaattattgtcattgtaacaatcggaaaggcggggccctctcctaccctcgcacttttgct

SEQ ID NO: 9507 - DNA, 537 bp, Glycine max
  Clone ID: jC-gmle01810041h12d1
cacttagaaaactgtgattttctctttgtcttgaagtcataaaatgccttgtagtgtcatcatcaaatcatgtttctgtaaaattcgtgaaatttgctatgcttgtgtaatttaaaaaattgaacatttacaaattacaagtaagaaaatgaagatgaggataactttacataagtttgaaagaatcgaatttgttggtaaccatttatatcattttctcaaacttatcaagcatttttaccctttgcatggatctgacaaatagtgtcataaaaatacctgcaccaatgaaagatccattcgcaatagttatgttgccttggctgctcatagtgataccaagatttagcagagttcctcctaatacggtatacatagttgccatttgtaaacccgttgctttccgagcagctctttcagactcaagcactcggacccgaagttttagatcccctgcctcaagttgctttgtaaactcttctattctttgaactctgtatggcattgacatggtataggttgtagcatcctcgagcc

SEQ ID NO: 9508 - DNA, 291 bp, Glycine max
  Clone ID: jC-gmle01810042a01a1
ttttcttctaaaaaaataaaattaagaaattttcatggtaaccattcgtgcagatgaaattagtaaaattatccgtgaacgcattgagcaatataatacggaagtaaaaattgtaaatacgggtaccgtacttcaagtaggcgacggtattgctcgtatttatggtcttgatgaagtaatggcgggtgaattagtggaatttgaagagggtactataggcattgctttgaatttggaatccaaaaatgtgggggttgtataaaggggggatggttggaagatacaagaggg

SEQ ID NO: 9509 - DNA, 353 bp, Glycine max
  Clone ID: jC-gmle01810042a01d1
cattcgaattcattttatttatatattaatattatattcaaatgaaataaaaagatattaaaagatactaattataagaatttgaaagtgaaattataaagttattaaatgattaatcaatttttttctacctgttcctgtagtaaaaagagttccatctgttcttgaatagcttccttcaaaaggacttctgcttccccagtgaatgtcttggtagaagatatgatttctttgaattgaggtttattcgtgtttaagtaagcacgtaactcaacaagaaatttccttacctgtccaatttctaatgaatcaagataaccattcgttccagtataaaatagtattatctggtc

SEQ ID NO: 9510 - DNA, 490 bp, Glycine max
  Clone ID: jC-gmle01810042a02a1
gtcaattcctctttctctttccacaaggcaacaacaacaacagggttgatgcaatttttgttcccataataatgtctgggagaaggaggaggaagttgaaattgttgagtgatacaattactgacagcagaagagctgcagtggaggtggaaaatgaaaatttggagctgcaaacttggtctgatctccctactgaactcttagaattaattctgtcccgtttaagtctagatgataatgttcgggcttcggttgtttgcaagagatggcattctgttgccacttctgtatgtgtggtaaaccaatcaccgtggttaatgtattttccgaaatttggtgactggtatgaattctatgaccctgtgcaccgcaaaacatattccattgagttgccagagttgagtggatctagagtttgttacaccaaagatggttggtttcttctataccgtcccagaactcaccgcgtggtcttcttcaatccctttac

SEQ ID NO: 9511 - DNA, 311 bp, Glycine max
  Clone ID: jC-gmle01810042a02d1
gacgatccaaataaaagttaaagatgaataacaatcataataataaataaatctacagatcatatgcccaaataaacgactcaataaatctgtaggtaaaattctagtacgaactccaattattctgcataaaaactacatcactattgtgttgggaaaaatcttaaaaattctagatcagcagagagactggataatcaacggggttaagtctaagctttccccaacagatgtgattcttcacataatagtagcctgctattgagtaaagacgctgccttcggcatgcttccaaatgagcttcactaatg

SEQ ID NO: 9512 - DNA, 503 bp, Glycine max
  Clone ID: jC-gmle01810042a03a1
gtcacccgcgaacaacccacaagatggcaactaaatacccgcttgacgaaaaagtagatagctcagcagatcatattgatgatgttgagactcagcaagagcgtgtcctcagcacgcaagagaatgaagcacatcaggagcatgtattcgatccgaaggagacgaaacgcattctccgaaaggtggactttcgcttgatccctgtactagcagtgttatatctgcttgcgttcctggaccgcagcaatattgcaaatgcacgcgttgcaggaatgaatgcagagctggagttgaccggaccgcagtataacatggcgttgactgttttcttcttcccatacgcaatattcgaagtgccttcaaacgtcgtgctcaaactcatgaaaccaagcgtgtggatctcgatcttgatggtaacttggggcatcgtcatgactttgcaaggcattgtcgagacttatgaacatctcattgtcaccagagtgcttctcgggctattcgaa

SEQ ID NO: 9513 - DNA, 432 bp, Glycine max
  Clone ID: jC-gmle01810042a03d1
acagtaatgctgggatattaatattacatcatagtcaaaccagtggaaacatacaaacacccccagcttccgacggaatagttcattggtgccaaagttataccgaatacggcgctgattttcaccttccccacaaatcctttttcagtttttccctatatccccctggtaaccccgctaccctttttctgaatttgatttgctttataggcaaaaaacatgatgaggcctaccaggtattccattaaaaactttaggtacattgacaagtaaaacatactatgactatggtttaaacaaattaagtacatagtattagcaaattaaccgcattatacaggaagcgtttctggcaaggattcgggggctccgctgctaccattgagcacaatcacattaccatcagaatcaacatccactataacagagtcg

SEQ ID NO: 9514 - DNA, 499 bp, Glycine max
  Clone ID: jC-gmle01810042a04a1
ccaaattctcaactttcctaactttagcaaccatccaagaagttgatcagttccttgtctctccttgaattataaaaccattcacagtcttgaacccaatttcactctttgcacctcaaacaccttataagcctcaatttcacaaccaaaaatgcaaagttcaatctcacaatctgagatttgcatcactgattaccttctaccccaagaagttccatctcaatttcaatttccagatatgagcaacaataacataccaatgaaccataccaaccttcaaatgcctcaaatcacatctttctccaagcctccaaggtcctcatcaaatctaagcaaccgcaaaccgtccttgagaaacatcacaatcccttccataacctcaggtcttacaacaactatgtcacaaacaacaacaacaacaacaatagctacaaccatgtataacaacaatcaagttacttcttcttcagatgaaaccaacaacatcaaagagaacaag

SEQ ID NO: 9515 - DNA, 308 bp, Glycine max
  Clone ID: jC-gmle01810042a04d1
gggggcttaatattttttaagactgtctttgttttttatacaaaaaaggccgagccccaccacggggttattcggcagagacctgccacccaaggcaagcagcccctggggagctgttcctgttccctcaatttcggcgaggaagccgttctcatttaacgccgagcgaaccgaaagggggtttgtggaaaaaagatttaacgagggcggcctacttgataccccgacaaaagccagaaccgagccagtgcttgggggcctgcgcttccttaaagacgggggacccgagcgcaccgtcgagattgccg

SEQ ID NO: 9516 - DNA, 460 bp, Glycine max
  Clone ID: jC-gmle01810042a05a1
gcgtttcggaagcagacacagatggctcgtacgaagcaaaccgctcgtaagtccacaggaggaaaggctcctaggaagcagcttgcaaccaaggctgcacgtaagtctgcaccaactactggtggtgtgaagaagccccaccgttatcgtcctggtaccgatgctcttcgtgagattaggaaataccagaagagtaccgagcttttgatccggaagctccccttccagaggctggttcgtgaaattgctcatgacttcaagactgatctgcgtttccagagccacgccgtgcttgcattgcaagaagctgctgatgcataccttgatgggctctttgaggacactaacctgtgtgccattcacgccaagcgtgtaaccattatgcccaaggatattcacctggcaagaaggattcgtggcgagcgtgcttgagttggtggttggaaagatgaagatgatt

SEQ ID NO: 9517 - DNA, 537 bp, Glycine max
  unsure at all n locations
  Clone ID: jC-gmle01810042a05d1
agtaattcaatttttcaaaattggatcgcatgtacataaggataaaacatgaataatggaaggaacatcaaattcttattagcaatttacactatatatgtaattaacaagagaagcgtgcatgaacacactttccaccctttacctctctttctataattttgagataaatatcacggtcattaaaaaatgtaactagctgcgtaattggaaaaaaaattgtaattgactatgaatcatcctaattttgctttgcatgagctatctcaccagacttgtacattcttgctcgtcttgaatattcttggatctttcgatcacgctctttgagcatctgatcattgttgtttgaagaatccattaccggacccccnnntttgtagatattgtttcccatggatccatgcccatcctgaattaaggtttcagttgaaacttttccattttcaattttcctgggatcaattctctgagaatggtgtttggtatcatgccctcttcttgactctgatccattagttgactccaaagatattt

SEQ ID NO: 9518 - DNA, 472 bp, Glycine max
  unsure at all n locations
  Clone ID: jC-gmle01810042a06a1
ctgagtcttgcaattgaagttgaagtcttgcccttctctcttcaactccaaacacaagacatcatcatccatggctgcctccgtctccactgtcggagctgtcaacagagctcttttgaacctgaatgggtctggacctggggtttcagctcccagttcatccttctttgggagcagcttgaagaaggttattggctcaagggtccccaacacaaagatttcctctggaagcttcaagattgttgctgtagaagagaagaaagagattgaagagacccagcagaccgacaaggacagatggaagggtcttgcctatgatatctcagacgaccaacaggacatcacaagaggaaagggtttggttgactcccttttccaagctccacaggatgctggaactcactatgctgtcatgagctcctacgagtaccttagcactggacttcgncagtacttggaccacaacatggat

SEQ ID NO: 9519 - DNA, 156 bp, Glycine max
  Clone ID: jC-gmle01810042a06d1
accaaaaaaaatccaaatatatcaaattgtcaattaacagattgtacctggcaggtaactgatccaaaaggaatcgatatagttcagtaaatacattgacccagaagagccagacataataaagtattccataagatcaggtggttggaatctaag

SEQ ID NO: 9520 - DNA, 533 bp, Glycine max
  Clone ID: jC-gmle01810042a07a1
acacacttggctgaggaaggtcggaaaagaaaatggagttgttcttctacacggtgttcggtggtttggccgcggttgtggcagttatggagctgagcaagaacaacaaggatcgaatcaacacctcttccgcattcaattccttcaagaacaactacctcctcgtctattccctcatgatggctggagattggctacaaggtccatatgtctactacctttacagtacatatggatacgggaaaggggacataggacaactcttcattgctggttttggatcttccatgctctttggaacaattgtcggatctctagctgacaaacaaggccggaagagggcttgtgtgacttactgcataacctacattttgagttgcatcaccaagcattctccttaatacaaagtcctgatgttgggccgcattttgggaggtattgccacttcacttctggtttcagcatttgaatcatggcttgttgccgagcacttcaagaggggctttgatcaacaatggcttgcattaacattc

SEQ ID NO: 9521 - DNA, 344 bp, Glycine max
  Clone ID: jC-gmle01810042a07d1
atgattattaacacttaccgcctaacgtttaaaaacaattgccaaagaaattatcccccccatctgcacagaggccacattgtgcgggcgaaaaaaacaaaaatcccagcaaaaaaaaaacgccccctctcaagagaaagaaaaaacgcaacaaacaaactaaggggcagcccaatttgaagaccttattataaaaaaaaaacccccccaatcaaaaaactccacctagagattattaaacaaaaaaaaccccaccttagccgagacaaaaaaaatagaatacccccaaaaaaaggtaaaaagcgccaaagcaaaaaaaaaaaaacggcatttaaacactccac

SEQ ID NO: 9522 - DNA, 494 bp, Glycine max
  Clone ID: jC-gmle01810042a08a1
attcaacaatatttacaatggcactggcatttttggtatccaagttacaacaggctcagattttgtatcaaaagccattgatatagctgctaatgagattcttggtgttgctactcctggacaagttgaccaggcacagcttaatcgagccaaacaggctaccaaatctgcaattttgatgaatttggaatcaagaatggttgtttcagaagatataggaagacaaattttgacatatggtgagaggaaacctgtggaggatttcttgaaggcagtggatgaagtaacctcaaaggatatcacttcaatttcgcaaaaactcatttcttcccctctcacaatggcatcatatggagatgttctctatgttccaagctatgaatcagtgagcctcaagttccgttcctaatgagattgtttccatccatcatattgagtcttctttgtatacaatcaagtcttgtacggctgaaaggtgtaaaattaagttaaac

SEQ ID NO: 9523 - DNA, 508 bp, Glycine max
  Clone ID: jC-gmle01810042a08d1
atcaaactattgtcaatttccaattataaagtaatcagtttcatgcaatgggttcaaaatacgctggcaagcaaaggaaacttaaaaagacatccacgagttacttcatcaagcaccagtagcctcaaccatttcttgttccacggtgcttggggtaactgggtagtaatggtaatgaagttccccaacatcatcaccagacagtttcttccatccatttggtcccacatagtaaacgctagcaactccaccactggccccatcacgaaatgttgcatgataaattgctcgtcgagcaagttcagcagcttcctcaactgacaggtcataccggtacccgctatccaatacaccataagcatatggtgaaccagatccaaccgagaatctagtgcctttaagtcttcctccttcactatcaacataatatagaccagggcccgtctcatcccatccggcaatcatggtaccaacagataaacccattccacgataagagtataaaata

SEQ ID NO: 9524 - DNA, 115 bp, Glycine max
  Clone ID: jC-gmle01810042a09a1
gtttcccagaaaagcaggaacaggtcaaggagccgaactaaacatcattagatgtctgtaaaaggtgcaattcatcagtatttataagacttgataaagtggaggagtatttttc

SEQ ID NO: 9525 - DNA, 495 bp, Glycine max
  Clone ID: jC-gmle01810042a09d1
aatgctgaatagccattcaaattatctcaaagaactgaaaaaacagcagtgctctatcatacaattaacctaggtagcaaggatggggtttctcccttcatctatttcaatagttaggagatgttgaggatctgatccatttggtccctccgagtaaagtgtaggaaggtatgcatagtatgccggcaggtagcgtgaaacaaaatctctcacctcatcatctgtcattccaggcttgcctgcctccctcatggcaatctcagcctgtaagcgccattggaagacacagtttgggttcttaatcttgatgactatccaagactttatgtatttgtcccaagcatcatagtaagcttcaaggtttttatttacagtttctagctggggatcaacaacctttactgcgtcaactggaaggggcttgaaaccaagcattcaaccttcaaacaacacaaccgtcaggggcccttcaacttctgaccatgttgaaggatc

SEQ ID NO: 9526 - DNA, 425 bp, Glycine max
  Clone ID: jC-gmle01810042a10d1
gggggaggattcaccccttgggacataaacgagaaaataaagtttaaaggaccgcagggggcctttagcaaatgaagatttataataacccccaacttctttttatgggggtcccaggggtcacttgaaaactaggacattaaggggggtattaaatatccctctaaaatcaggggtttcagagggggttaaggcttttactcttggtcataaaagggcccaattaaaaggggtttttcccttttcaaaaagaaacaaaatttggtcctggtttacttttttttaagggtaaatattcccctaggggcccttacacccaaaacaaattttcctggccatgagggggtgagggggggggaatttctcaagcgggaaccccagagggaacagcaaaaagaattctcccttttcattcttggaaaaac

SEQ ID NO: 9527 - DNA, 497 bp, Glycine max
  unsure at all n locations
  Clone ID: jC-gmle01810042a12a1
ctcgagccgaatcggctcgagcacaaagcacaaagcaaagctcatccttgagttaaaaaatggcagcagcttcttccatggctctctcatccccatccttggctggcaaggccgtgaagctgggcccatcagccccagaagtgggaagggtgagcatgaggaagaccgtcaccaagcaggtctcctcaggaagcccatggtacggcccagaccgagtcaagtacttgggcccattctctggcgagcccccgtcctacctaaccggtgagttcccaggcgactacggctgggacactgctgggctttccgcagacccagaaaccttcgccaagaaccgtgaactcgaagtgatccactccaggtgggccatgctcggagccttgggctgcgtcttcccggagttgctgtcccgcaacggngtgaagttcggagaagccgtgtggttcaaggcccggtcccagatcttcagcgagggtgggctcgactacttgggcaac

SEQ ID NO: 9528 - DNA, 511 bp, Glycine max
  Clone ID: jC-gmle01810042a12d1
gtaaaaagcaagtaacattaagttggattcggatacacaagataattcacattatctgaagtacttcaccaaacacaaatctaaaaactctcaaaagtcatttcgttctttgacgctcactttccggggacgaagttggtggcataggcccaggcgttgttgttgacagggtcagcaaggtgatcggcgaggttctccaatggaccctttccggtgacaatggcctgaacaaagaagccaaacatagagaacatggccaatcgtccgttcttgagttccttcaccttaagctcagcaaaagcctctgggtcatcagcaaggcccaatgggtcgaagctgccacctgggtagattgggtcagtgacctcaccgagggggccaccagcaatacggtaaccttcaacggcacccattaggataacttgtgtggcccagatggcgaggatgctctgggcgtggatcaggcttgggttgcccaagtagtcgagcccaccctcgctgagatctggga

SEQ ID NO: 9529 - DNA, 281 bp, Glycine max
  Clone ID: jC-gmle01810042b01a1
ataacaattgcaaagtttgagatcacccagaaagcattatcaattttaaaagcctactcgggtattgagcgtttatcaaagtttacttaataagaacttaatttttttttttttcaataaagaatagttagtaacttcggaaaaagagaatctagtttattttcttacatagaatcctcatatatgtgtgaataacacatacattttttctatagatacattccaattctttgattagtgctcgagccggatgacgaaaaattattatattcgggtctttg

SEQ ID NO: 9530 - DNA, 377 bp, Glycine max
  unsure at all n locations
  Clone ID: jC-gmle01810042b01d1
ctaaacttacgatagggatgaaaatatgtaatttagatctttaaaaaaaaaatccatatgttcggaatagacctaaaatggaatagatgtatctagggattagtcgtttcaaaaagaattctccctagatacacaatacacatggcattctattttttttttatttcaaaatggaatcaattttataagtttaaaaaagacctaaagttagggatttctcaataggtaatgttgctccaatacctaaccaaagggcaactacagtaccaatcaaaaagatggtggttgctactggacggcgaaatgggttttggaaattattaacattctccaaaaagggtactggtaataatcctganggtcccgaaccctttaaa

SEQ ID NO: 9531 - DNA, 390 bp, Glycine max
  Clone ID: jC-gmle01810042b02a1
cagtaaagtttggttgacttatttggtatttgaagctttgggtttttaatagatatatctagtttaatgaatggatttgtaagttgagtatgttataagtttctccgttaggtcaccttggaagccagactttttatgcaattggcggatggtattggaactttgtaggttctgcttggtttggtttttccttttattcgattttcatgttgtggccaagaattaggtgcctcgagttaggaggacgatagtctaagcatcttttctcacagggatttttgagtcagtttctgtttatatttattatatgcataattggcttttatgtttgcagtacactcagaaatcagaatgtttttattggttgaggtgctttacaaaataattaaa

SEQ ID NO: 9532 - DNA, 263 bp, Glycine max
  Clone ID: jC-gmle01810042b02d1
gaaaaaccccccaaaaaaaaaaaaaaaagaggaaaagggggggcccggaaaaaaaaaaacccaaaaaagcaaaaaaaaaaaaaaaaaaaaaacggccaaaaaaaccccgggaaaaaaaaagcacaaaaaaacggcccccaaaagcgggggcccaaaaagtggggcccacaaaggaaaaaaaaagagagggaaaacccccccccagggaaccccacaaggctcaaaacacccccccccatggaaaaaaagagggggctaaaagg

SEQ ID NO: 9533 - DNA, 520 bp, Glycine max
  Clone ID: jC-gmle01810042b03a1
ggagtgcatcttcaaagatcatggatagttatgtccataacttcactctttcttcttccggtgttcatcttcacgaggccgattttgatgctcttaggccaagatgagaatatagcagaagtggcaggaaatatttctctttggtcaattcctatgatatttgcttttattgcctctttcacttgccagaatttcctgcaatctcaaagcaaaaataccatcatttctttcttggcagcattctcaatagttattcatttgttcctctcttggctattgacaattcaattcaagctcgagattcctggtgcaatgacttcaacaaatttggcattttggattcctaatattggtcaactaatatttataacatgtggttggtgctccgatacatgagaaaggttctcatttttggcattcaaagatctttggcctgttgtcaagctttccctttcatctggtatcatgttatgtctggagctctggtacaacacaatattggttcttttaacgggcaaca

SEQ ID NO: 9534 - DNA, 452 bp, Glycine max
  Clone ID: jC-gmle01810042b03d1
aaaaaactcatctataaaacatttcagatataagatatgtacccgtaatagttacagcagcaacagaaagagattggagaagggggaatatacgtagcaagctacaacagtgaatggaaacaatttacttctgcaagtaagaaataaggattattcaagcagtctgaagccagaagctttgttctacttaacccagaaagaaatggggaactagagagctaaagccagcataaccaaccctttttcttatcaatttttcttctttctatttagtgggaaatgggagacctgcaccactcaaagtagaagagaagctacaagcagagacagagtggacataaagaagcagacagcgaccttagtctgtgcatttcgtggtggttgtgctactggcccagttccagcaatagggctagatggggctattttagaaacagaacgcaaagggggtt

SEQ ID NO: 9535 - DNA, 479 bp, Glycine max
  unsure at all n locations
  Clone ID: jC-gmle01810042b04a1
aaaagattctaaagaaatataactaatattctttagaataatcaaaaagaatattaaattcaaataaattttagatagaaaaaagacttaaaaaggaggatttgaaatgcgagatctaaaaacatatctttccgtggcaccagtagtaagtactctatggttcggggctttggcgggtctcttgatagagatcaatcgtttttttccagatgcattgatattcccttttttttcattctagttattgacacggaaaggggtgaagaagattatagatccaattaagtattaaatatatgtaattaatatgtaattaatctcctcttctttatttcgtcttttatttcttcttttttttacaattgtaatagaataagttaggaaagagaaagaataagggttaatttggcctaattgaaattcggagtgaaactcgngatctcgtccaggcttccatggaattgaattaataattcaat

SEQ ID NO: 9536 - DNA, 450 bp, Glycine max
  Clone ID: jC-gmle01810042b04d1
caaccaaattttccttactggaaaagtttttcaatttcaaataaaaatgccatcaaaaatgccatcgccatttaacataggccacttaagcagtttatacagatattcccgcgggggagcaaaaaagaaagaaaaaaaatttaaggggttattacagaacgtgttaaactcctaaaaactttttttaatctaaagaaaaactatggggtatggataataataaactataatcatcacgattcaccgaaaactagggtttgaaatgagagcaagtagcatgcttcttcagaagcgaaggactgaatccccccatggaagtttcaaattcaatctggcccaacacatcctccaattgataccctccaatcacaatgagggttccttgggtttttcacctccataaacaaaccctaagcacataacatgggcgttcacctgcaccatggagtt

SEQ ID NO: 9537 - DNA, 63 bp, Glycine max
  Clone ID: jC-gmle01810042b05d1
attggaagcccagagatgatttaaaaaaaaggggtagggttaaaaataatcccccatgaagga

SEQ ID NO: 9538 - DNA, 412 bp, Glycine max
  Clone ID: jC-gmle01810042b06a1
atcacggcaagcatgttcgcctccaacttcgtcgtcaaggacgaagccctcaagcacacccgtggcgaagacaagctcacgcgcttccgccaaaacaacaccatcgccacgggcaactacatggaaaacagcttctgcagcgtctgcggcaccctcatgtaccggcgcagcagcggctaccccggcatgagcatcccgcgcatcggcaccatcgacgactttgccctgcaggagaccaagttcaagccgcgcgtggagacgtttgagaaggatcggtgcaagtggttgcagcctgcgacggtggacgagcatgtcgagggcgcgtattataccgcggggaaggagtggaagagtaagcatgatggggcgggttcgcagtcttgagtgggagtggggaaggtggttgggagtt

SEQ ID NO: 9539 - DNA, 443 bp, Glycine max
  Clone ID: jC-gmle01810042b06d1
ttttttttttttttttttttttttttttttttttttttttttttttttttttttttttttttttttttttttttttttttttttttttttttttttttggggggccaaaaccaaccaatgggaaaaaaggactttggaccccaaaaaaaaaaccccctttttcgcccgggggaaaaaaaaaataaaaaaaaacccccccccccccaaaattccattttaaaaaaaggaaaaaaaaatttgaaggggggggaaaaaaaaaaaaaaggggttaccggggggaaaactttggggggggggggcccccttgggttttttaaaaccccccccatttttaaaccccggagggggggaatttttttttttttttccccgaaaaacccggaaattggggggggccccccccctaaggggggggcgaaaaaaattcccccaccgccccaggg

SEQ ID NO: 9540 - DNA, 513 bp, Glycine max
  Clone ID: jC-gmle01810042b07a1
tcttgaagtgagcttgcacatatagctaaccagtgttagtatcattgatcatgggagagtcttctaattcttctgcttcatacattcatatggtgcagcacatgattgagaagtgtttgatctttcacatgtcaaaggaagaatgcatggaagctctctccaagcatgcaaatattaagcctgtcataacatccactgtgtggaacgagctagagaaagaaaacaaggagttttttgaggagtatgccaaagccaagagtaaggacgaacgaatgtcggaggaagagacaagccaaatgatacagaagatgatctcagattcctctaaagtaacgttctcatacggaaggagcacggagactagacaacaagagtggtccactacctcatgaacaaaaattctagtgatctctccctatcttttatttaaatgctattgctagaggatctttgagttagcaaataacagtgtgccatatcagcagctgaaagaattgatatgggataaccgta

SEQ ID NO: 9541 - DNA, 477 bp, Glycine max
  Clone ID: jC-gmle01810042b07d1
aataattatcaggaaaattaaaaaaaaataagcacaaaacattttctaacaataaaaaacgtttatgttcaatactttctcaaaagaatcatatatgcatcaaacagttacagccaatgcccgtcgtcgtaaccaccctttattcttctgcttcctttgtttggcacgtccaaaggacgtcctgcaacttacgctccaagaaggatgcgactgatttttctcattttcaggcaatgccacgtacttcttccaatcctcaagcaaaattttgagatcattgactttgttatctaaaccaacacaacaattggcatgcattgttgagaccttgttgaagtcctttgcatgctgacaaaaccctccaaaataactagtgctaaggaacctaatcttcagcttcatgttggaaatgaaggagttcttttttatcttgttgaggacatcctgggcatgcaactttgggtaggcatttctaga

SEQ ID NO: 9542 - DNA, 472 bp, Glycine max
  Clone ID: jC-gmle01810042b08a1
aacttgagcaaatgcgatctgaccacatgaggaggcttaacccaactccatataaggttagtgttagtgcaaaattatacgacttcattcatttcctgtggctcaatgaggcaccagttggggagctacagtaaggcaaataaaatggtggcgtgccttcagaacccaatggttttatatttagttttgttatggaagcggaaaaattggctttattagtttcatagttaggtgttggttgtactaatgcccctcctcacatgggtagtgcttacaccaccatcgccgccgatgccattgctcgcttccaggggcttcttcaggtgtatggtggaaatctaggatggtgctttattgaagaggcctattacaagctcctactggaggccctacttagcaaacaacaaggttctgcagaatataaggtgggaatggaacttaccaaatagtttggtaatcttggaactgggcg

SEQ ID NO: 9543 - DNA, 536 bp, Glycine max
  unsure at all n locations
  Clone ID: jC-gmle01810042b08d1
aggttcaacaaatctatggtgcgcatcatttatttattttactattttttcttctgcatcgggatgacatcacttttagtattcttcctctgcttatatatttctaaatattatttaatattacatcttagtctaactgtgtctatggtttttagacacattaaatctgcaaagtgtgtaaaatggtaagaatggtatatttgatcacggttcatcgggccaatcagtagggtcgtcgccttcatagaacaaaccatctacgatttggtcaattacggaatcgatgaatgcgttgcagctgacggtgaagattcgaccaactctgtttcgagcactggagaaccatgcaaagagtgctgcacaagttactgcacccaaacacaccccaccagcctctgtgattccttcaatgtccatctttctgaacatagagtttcctgtcaccatttccattgtcaccgtcgctgcaaacaccatcatagctagacgaccagagatgatctcaanatcatgacttttcttagagctctcaatat

SEQ ID NO: 9544 - DNA, 489 bp, Glycine max
  unsure at all n locations
  Clone ID: jC-gmle01810042b09a1
gaaaggagagggtccagtggtgttgttcctccacggcttccctgagctctggtactcatggcgccatcagattctctctctcagctccctcggctaccgcgccgtcgctcccgatctccgtggctacggtgacaccgaagcaccaccttcaatcagcagctacaactgcttccacatagtgggtgatctcgttgcgcttattgactctctgggtgtccaacaagtgttccttgtggctcatgactggggagccatcataggttggtatctatgcatgtttcgccctgacaaagttaaggcctatgtctgcctcagtgtccctctcctccgcagagacccanacatcagaacggtggatggcatgcgtgctttgtatggagacgactactatgtctgcagatttcaggtttattaatcaagtctctcattttgcttatctttatcccacccttggttttctttctctttctaattaactgtgcacgaaat

SEQ ID NO: 9545 - DNA, 531 bp, Glycine max
  Clone ID: jC-gmle01810042b09d1
aacaagaacaataattataatcctgtaaacacaccgcaaaaagcgagagagagagagaggtcccacaaatatagtaggtctttcaaggcaagtatcagctcagtttgatagcaagaaacaaataaagaatatggagggcattaacgttaagtgacaaacaacatttacccacacaacccaaattaacctattgttgcattatggctcaatgggtgtcagcagactcagcactacaagtgtgatgcaataaatacatggaatttaacaatgacattaaacgagccaacccaatcctacacatgtcatccaatctcaaacaaaaaataataaaaaaatatatagatatatccgcagtatttgatgaaatctggagataactgaatcgaactgtgcagaagatgcagaaaccaaagcgaatttatttgcttcaactttctggaacaggagcaggagcaggagcaggagacttcagaagtggttggagtgctttaacaacaatgctcatatttggcctaaactcagcttcatact

SEQ ID NO: 9546 - DNA, 382 bp, Glycine max
  Clone ID: jC-gmle01810042b10a1
tgcctcaaagtggatcctgaaaaagtgagacgtctaagtttaagtgagcaacagcttgaaaaggctgctataaattatggacaacaaattgtcaggtttactcagcggaatatactgagggtgtatccaaaaggtactcgcattgactcatcaaattataacccattaattgggtggatgcatggagctcagatggttgcatttaatatgcaggggtatgggagatctctttggctgatgcatggaatggtcagagccaatggagggtgcggttatgctaaaaaaccaaattttctattggagactggtccagatgacgaggtcttcaatcctaaagctaagttacctgtgaagactactttgaaggtgactgtatatatgg

SEQ ID NO: 9547 - DNA, 481 bp, Glycine max
  Clone ID: jC-gmle01810042b10d1
tttttttttttttttttttttttttttttttttttttttttttttttttttttttttttttttttttttttttttttttttttttttttttttttttttttttttaagggggaaaaggtatccaccccgggcaaaaaaaaacccgccaaaggaaacaaaccccccccctttctttggaaaaaccccaaaggggggaacccttttaaaaaaacttccccaaaacccttaaaaaaaatggggaagggggccaaccccgggccaaaagggggggggaaaaaccccccccaaagattccccccccccccccccctaaattgggggcccccctggaaaaaaaaccccacaggggggacaaaaagacgaaaattttttttatgtgtgcccaaaagctggccaaaaatttggggggggcccgggggggggtttaccccaccccaaaaaagaaagggtactggggggggggcgaaattggcccccgggg

SEQ ID NO: 9548 - DNA, 494 bp, Glycine max
  Clone ID: jC-gmle01810042b11a1
ctctgagatagagctacagcaccattatcattcatctccattactttcctattcgatcctcgatccctctcccacatagaagattcatcaccccaaaacccaattttttttaataatacaactgcaattatttttattttctcagtaaaaaaaaaaaaaagagaaatgagttcgattcatttgttaaacactcttgctgttccgcttcgttctttttctcctccgtcgctctttccgcaatgccattctcctctccgttcttcttccgctgttccaaaacggcgtcgattctctaactgctctgggttccgtcttgcttcaagtcaaaccgtgaattcggttccgcgtgcgaatggaacttacaccggttccgatttcatgacaaagaagcaagatttgcatgttgtcaaaaccaccaccaccgttgatgatgctttggaggctcttggtaacaacagaatcagtggtctttcggtgatcgatgaggactggaa

SEQ ID NO: 9549 - DNA, 458 bp, Glycine max
  Clone ID: jC-gmle01810042b11d1
cataataaagggctccaaatgatctattctgacctcataaatgtcagttatcagagactgcataaagaacaggatgtagtatctcctagcctgaaacaaacaatccaatgtaccgacacaaggttgataacttaatacaggtgatcgataaatcacttccctctatggttttttatacaccactaagatctcacaaggccatcaaaagttgccttcagctcctccttcggcttgggccatatacatttgtaatagtctaaatatctactaggtataactacatacattaacattatccgtagctaataaatatagaggttacgctgaccatcatcagcacaacctgcaagcaaatctatttgaataacttttcacaaacactatcaccactctccagcacgttttgatagtagagccgccttaacaatatttccccgtgtaataagtccaaccagctt

SEQ ID NO: 9550 - DNA, 485 bp, Glycine max
  Clone ID: jC-gmle01810042b12a1
gtcaatgtatatgaagataaagcaacagaaatcttgaggcctgttgggtcagcaactcaaaggatatacatggctgtctattcattggagaagagtcttggcttggatccaaatgacccaatcattccatttgttgttcttgtaggctcttcagccacattatgggccttttattggttgtggacatatggaggttactcaggaaatttgtcccctaaatcagctttcgagcttttggctgaagacgcaaatgctgcacttattgatgtccgctctgaggaaatgcgagaaaaagatggaattcctgatctccgacgggctgctaggtttcgttatgcaagtataattcctcttgaggttgatggctccatacgcaagttgttgaagagtggtagagagcttgatgattccttgattgcagctattattcgaaatttgaagattgttaaggacagttccagtgttataagtgtggatgctgatgg

SEQ ID NO: 9551 - DNA, 395 bp, Glycine max
  Clone ID: jC-gmle01810042b12d1
ggggacaaaatggatcacccaaaaacatttttattattttgacaggggaaattggcccccccccttttggcggggcatgcatgccacaaaatcaaacataatcatccccatgaaatggttttttttttttctattttggcaaaacccctacaggcagggcaaaatccggggcaacacaaagtttggataatttcaacttgcaatttttcaatcggggaaggtaaatttggggggaccaaattaaaccctcttctaattttcatgggagcccatgacaatctaaaatgatcccataccttctgattgagaggaactgtcggttcaagaaccggatcttggttaccctcactatcaaaggggtgggattcatgtttgggagcagcctgcaatacccg

SEQ ID NO: 9552 - DNA, 491 bp, Glycine max
  Clone ID: jC-gmle01810042c01a1
cagaagaacaagttgttgagaactaagaaggagaagcaaatggcttcctcaatgatctcttccccagctgttaccactgtcaaccgtgccggtgccggcatggttgctccattcactggcctcaagtccatggctggcttccccaccaggaagaccaacaatgacattacctccattgctagcaacggtggaagagtgcaatgcatgcaggtgtggccaccagttggcaagaagaagtctgagactctttcctacctgccagaccttgatgatgcacaattggcaaaggaagtagaataccttcttaggaagggatggattccttgcttggaattcgagttggagcacggtttcgtgtaccgggagcacagcaggtcaccaggatactacgatggacgctactggaccatgtggaagctgcctatgtttggttgactgatgcttctcaagtgttgaaggagcttcaagaggctaagactgcataccccaac

SEQ ID NO: 9553 - DNA, 263 bp, Glycine max
  Clone ID: jC-gmle01810042c01d1
attcattagttctcatccattaatttccattgaagtccgaaaacagaaaccaaaaatacaggatgatgaaatctcaaaaagcaaaaacaaatgggaatgtagtttaagtacaaacaaacaaagtggggtggcggctacaaatgctttgcaaatttttcacacttagaagcctgggggcttgtaggcgatgaagctgatgcactgcacttggcgaacgttgtcgaatccgatgatacggatgaaaccgttggggtatgcagtct

SEQ ID NO: 9554 - DNA, 160 bp, Glycine max
  unsure at all n locations
  Clone ID: jC-gmle01810042c02a1
acaatcatatttaattatcctattaattcgtataagtaataataatgaatgttcacatgtaggtagttattaactangatatgtatattgtctaaatatcagacgttaaattgaaactatcataaaaatatnnnncctggtgtgttagactgtccggaat

SEQ ID NO: 9555 - DNA, 395 bp, Glycine max
  Clone ID: jC-gmle01810042c02d1
gtaaaagaaaaacctgaatattgatgttattgctgcagcatgacaatctttttttaatgacataaagatacaatgtagctatttccagttaaaagccgcctcatagatcaaacaaatggagaaagaataataccattctttttgaaccatggctgccaactagatccagaataaacatttgccccaaagcaagaagggacatctcaatttctaattctactgccagagggaattggctggcctggcaatttctcaaagcaaaaagcataatgtatcacaacctccttcctcccatttttgcaaaccttggggctactccaaatataactgccttagtcagtagtccttgatcaagagtgcaggcaagggcaatggctccaccaacaattaaaagc

SEQ ID NO: 9556 - DNA, 528 bp, Glycine max
  unsure at all n locations
  Clone ID: jC-gmle01810042c03a1
aaaacatctcgtcttattaatcatcatcatcaacatcaaagttcaattcattctactcattatttcttgttagtgactagacagtgtattaagaatgaatcatattccattatagaacatcagtcctattcattataatcttaaggaattgttaattatattggaccacttagactctagttaacatcgcagaatgtgtatctttagatccttaaaattcccattttgaacagttttgtttctgatcctcgaaaagctccaggatttgatttgtaataagaaatctatcaacttgttcatgggttaatgtgcattttaaatggagtttgtgccacaattatcatcttctatctcgaaacgatgagtcttacctcttttttcttttggttgctccatattttatctttcctttctgggtggcttctgcttgcaggcaagttctactgacatcagaaatcatggtttgcattggactactnctaagcttccatataatgattccttactcagtgacttcatatgttggat

SEQ ID NO: 9557 - DNA, 350 bp, Glycine max
  Clone ID: jC-gmle01810042c03d1
ctactagtattgagtaattatcagtcagatacatgtgatgattgagccacaagcataacttaattatataatatagttgactttgaaactggcgcataagcaatgtctgccattattttacttgattgtttctcatactggcagtcaattttgcttatattcaaccacccaatctgtaaaacgatatgccaagatttaatggagaaacctctatggggcaaaaaatacagcttacattggagcgtacggtgaatatggaaccacacaggcatttgacacaggaactacttcagggcttttgctggctgtgattcctcttatagcttcgggataatctttagctccaaaaa

SEQ ID NO: 9558 - DNA, 289 bp, Glycine max
  Clone ID: jC-gmle01810042c04a1
ctgccacagaaaataacagttccaactattgtgtttcttctgctgcaggttctgtatcagactccaagtctgcttctatggatgaatcagagagtgtgttgtcactcacatcaccatcttctgtgcttgaattggatacatctgctttcaatttgattgggagtggtaaggtttcaagcaatgaagttgttgagactaaaggattggaggctgaagttgctgagactaaaaatttggcagctgaatttgccgagctggaaatgctggaaatgccggatttgagtttgct

SEQ ID NO: 9559 - DNA, 402 bp, Glycine max
  Clone ID: jC-gmle01810042c04d1
gacaattgcaaccgggaagcttcaattccaaaggcaataaacatcacacggcataaatttcaaatttaagtccaagaaatataaaaatcaaatgatacgacaaccaaaaacaatgaaaaatggtcaaagactcacgttttgctttggccctgtccctaaccatggtgcgctctattgcctccacaataccattgactggatgagctctccgactgtaatcaagagagcagaagccgtaacctggaccaaccatgaccgagtactcctaaatggagtccctggaatactgggggacataagagcataccttgactgaactacaccgagtgctgcttgatgcacacatcgatttgggcaggctttagagggaactttacaccattgtgctgtgcccctgcatga

SEQ ID NO: 9560 - DNA, 491 bp, Glycine max
  Clone ID: jC-gmle01810042c05a1
gaagaagcatggcctcaaggtgcaggctgttatgtcatttcaccaatgtggcggtaacgtcggagactcttgcactattcctttgcccaaatgggttgtggaggagattgataatgaccacgatcttgcatatactgatcaatggggaagaagaaactatgaatatatatcacttggatgtgatactttgccggtgctcaagggacgatccccagttcaatgttatgctgatttcatgcgtgctttcagagacactttcaagcacctccttggtgataccattgtggaaatccaagttgggatgggaccagcaggtgagttgcgttacccttcgtacccagagcaaaatgggacatggaaattcccaggaatgggggctctccaaggctatgacaagtatatgtggagtagcttaaaagctgttgctgaagctcacggaaagcctgaatggagaagcacaggccctactgatgctggccactataacaact

SEQ ID NO: 9561 - DNA, 426 bp, Glycine max
  Clone ID: jC-gmle01810042c05d1
aacttaactaactcaaccaattaaccattttgtgtttttcttaagcgcaaaaagattaactttcaacactcaagattagggcaaatgcttcagagctcaagaagatttacaatgctcaatacatataacctaccagagaaaagctgattcacaacggttttcccccttacaattactgatcaaaatgaaaaccctttcgttatttatgattttgtcacacacttttaacctaagagagggttgtgcgcttaaaccttctattgtatgagtaaaattattcagtttttttggagctcttatgccaggcattataatctgtactgcttaaggctaagctttggaaagcaaaagctatcaatagaagtattatggaactccagtggtgtaacacggaccataatggatgctgggaggagtctgaccggc

SEQ ID NO: 9562 - DNA, 641 bp, Glycine max
  unsure at all n locations
  Clone ID: jC-gmle01810042c06a1
cttaaacaagaaacctccttagattacttatgtaatttgccacctcataggtgagtccgtttttctcctttacttaacataggttatcatgaggggattattatggcagataaatgacatctgcatatagaactactttgattacttaaacaagaagcatcctttgattacttatgcaatgattttgtaggagtaagataaattggtctcattatatgtttttggatcattattatgctttacattatattgacgttttcaattttttcatcaacttgcccttttagataatagtaccaccccttaaatcttgaagttaacatattattcgtttttatttgcagatttgtgactctttacgctaagacaattcctgagtccattgtcggtgagacatttttggagcaatatcaaaatcataatgatcctgtcactactattgatccgaagcgtacttacgggagtagagctcccacaatgcattccatatttgaaaatttccgagtcgtggntagtacttcattaaagaatttaaattgttattggatatgaataactgatgatttgctctaatggtgcatccttttnccaatattatgattagtctcagaaactgtgtggaattgtcctaagaaaatttt

SEQ ID NO: 9563 - DNA, 359 bp, Glycine max
  unsure at all n locations
  Clone ID: jC-gmle01810042c06d1
acaccaaaaacaactgatcattacgagttttgttgaagagggaaagtaagtagtgctacctgtgaggagcaccagaaaggatgggatcattcactgctgaacgatgctttcccaatgcaggaatactaagagaacgtgttcttaatttggctttcctctcattcttttccacgagcaaagaagaataagaaaatagtggctctgccaactcgcttctacttctaaggaaaagatccaggtttcgacgatacttgtaccccccatgcattttacttcctagttcaccggtaacaccatcaaccctgatcctatactcttcatcatctgaccaatacccattntccagcacgtcttgcatc

SEQ ID NO: 9564 - DNA, 473 bp, Glycine max
  Clone ID: jC-gmle01810042c07a1
gagagaagctgcgcaccttttcatactagtgctgattgctgaaactgccatcgctcgccatttgcacaaagatcccaacaacacttgaaagttgaaacagaaaaacaccaatccctcatcgtactgttccgttatcaattctcgtgtataagtctgcctacgttccgcttactttgccatcagagtaagtccacgctttgaacccggtcgggtcacacatggctacaccaccacaatgggaatttagctgtgacatggaaatgtattttggatcggaggagaatgcttacattgtgtatgctgacttagcagttgacaaagagttacagtctgataaagtcaaacgacttatgacagtgtctgatggaaagctatcaatgcactttgaggcaacagaagccagatttcttcgggcatcaattaacgcttctggagatgtcctgacactaaccagcaaaactattgaagaattt

SEQ ID NO: 9565 - DNA, 512 bp, Glycine max
  Clone ID: jC-gmle01810042c07d1
gcttcaagtacagtacatttcttgaccaaatgaaacataactaagggaagaagataagcatgagagcttttttttttttaacaaacaaaaaaatcttgcttcatactatcctatatttacattatacaaacccatatatcttcacttgcaaattaatctattagtagattaattagtactaccattttgatttacgcaaattaccaacctaaatcagagaggacaatccccagcatcatctctccttaatttggttacctcaaaccatcattgaaatagcgaaagtccacaatctcaaacaaccattagtggagatagtggtgacaaaggaggcacactaaagatagttcccataacatcagtgtcccaaaagcctttccaacatgatggagtcaaagggcaaacagctttgggagaacactcttctttcttcacatgcttattactattattattggtggtaaactcacttttctcataggtggtgcttttactctcttcctctctttccc

SEQ ID NO: 9566 - DNA, 427 bp, Glycine max
  unsure at all n locations
  Clone ID: jC-gmle01810042c08a1
gatgattttggctataaggaacttggttcagagaaatctggacgtgatgcaaatggaaatatttggcgtgaattttggagagaatccttgtgtctggaaaatgggcttatgagttttgagaaaactgcagacaagtggggacgaaatgttaatggtaatgagtggcaggaaaaatggggggagcgctacaatgctgctggtcaaacagaaaaatgggcacacaagtggtgcagtattgacccaaacacaccgcttgaacctggacatgctcatgtttggcatgaaaggtggggtggcaaatacgacgggtacggtgggagcataaaatacaccgacaaatgggccgagcggtttgtggatggtggatgggataaatggngtgacaaatgggatgaaaattttgatccaaatgctaatggtgtgaagc

SEQ ID NO: 9567 - DNA, 486 bp, Glycine max
  Clone ID: jC-gmle01810042c08d1
gagaaagttcaactatttaataatttaaaagtaacagatgatatcttccaaatccatagtattctacaaattataatttgtttcccggctgtgtagaggggctaacacctgaatctgctggttcacagcttgctttttggaacactgacagatgcatttctggatctgttttctactgatcgagatacctgcttcacagcctcttttgctaaatggcgaggccgactcagccaaagtcctccgtcaacaatcataatgtcgccattaatgaattttcctgcatctgatactaggaaaagtgcagccatggcaatatcccacttctccccaagtttatacagcggcatgtaatctctggctttgctacttatttcatcaggagccagtttactcatgccaggggtgtcacttattggacctggtgcaatcccattgactctaatatcatagtctgttccccattctagtgccaagtttctcgtagtg

SEQ ID NO: 9568 - DNA, 390 bp, Glycine max
  Clone ID: jC-gmle01810042c09a1
acacgttgaaagaatcatatgctgtgacttccacagcacaaagattgtataagcagtgggacagcatgatatgcaagccacgactattggggtgatgcaacagcccaattgagcccggaacttagagaaattgatctcccataggtgcgattaatgctcaagattgtcgatgaggagctagtggatagtttctatggtgcaccactcattgtggagaccatgctggaatgaatcatgcgggcacagatctgaatggaggggcattgcaccaccttactactatatgtctaacttactcatcgatgtagaattacgcctgaggggatcaacggcaaactggacgatggatgttaatcaccatgccattagatgcgatgagcatcatgggga

SEQ ID NO: 9569 - DNA, 293 bp, Glycine max
  Clone ID: jC-gmle01810042c09d1
aggacaaaaggaaaaggccccaaattcaatttaaggggacactttaactcaaaattattgaggaagacagtccaatatgaaaaatatagtaaaatcatctcaaacttggcatcttctctttgcacctaagacattgagaattctaagaatgttacacgcaagtcccatcacaacttctagcacttggatcagcacaaccttcaggaacagaaatttttacttgccaagtttgttttgcctccaatttaagattggaagaaagttcccctgttaatagcatcctcgttagcatt

SEQ ID NO: 9570 - DNA, 412 bp, Glycine max
  Clone ID: jC-gmle01810042c10a1
aaaataagttgtttagagatatgcaagagaagggacttgagctcatgtctaaggggaaaatggctattgtctttctcttgaatgacaaagagcatcaggggagcatttctgactctaacaaggttgaaaatgaagcaattgacacttcggtacttcacatgtttcaaaaggtcaaagatcatgtttctgtgcctttaattttggtttcctcagcccaacaaattcagtcttttaggaatctgtttacaagcaacaattacttcgcatttgactctgaaaaggtatggtttttggaggaagagaagctgccagtaattagcagtttgcccaagggacagaacagatataagattttaatgaaatcaccttgggaaatactccaatctccagttggatctgggggacttattag

SEQ ID NO: 9571 - DNA, 526 bp, Glycine max
  Clone ID: jC-gmle01810042c10d1
cagagaaaataaagagatgcatatatatgactctggtgttatttttgattttgcaaattaaattacacaatcacagccgtacatcacacatgagttgggcctcttccaacttaaaagcagaggataacattggcccatgacgcgacacatgcaccacctaataatcataattttacatctttacatacaaaatacaaagactttaaattttaaaaagaagaaaagagataaacagatcatcttaatgaaatgaaaccaaaacccacaaacattggcttgatttttgttgttgttgttgttcccaacttgattaagcatgaaccgtttgattgaatcacttggacttgaagggaatggccctgattacgacctggtggtagagtgctgcaagagctgcaccgatgaatggtcccacccagaagatccagtgttcatcccaaccaaggtccttgttgaagatgatagcagcaccaagactacgagcagggttgataccaattcccgtgatggggatggttgcaagtga

SEQ ID NO: 9572 - DNA, 472 bp, Glycine max
  Clone ID: jC-gmle01810042c11a1
ggaaagcagccacaattgtattggaaatatgttcaattgcacttgtcccaaccttgtacatagcatctaggggtaaaatttgttgcgctgtagacattagtgataatgtcaaaaggtttaatgcaaatgcagttatgaatttcaacaatgatcttaggatgttggagagttttgcggatgagaagttccattgttctggcttggctgaattttactctggagctagttttaagagctgtatgatagaagcacgacaattaatgaatcttctgtcaagtagtcagcctgagaacttcatgaatcctgttataagggagaaaaactactatgcgttggattataagatggtaggctccatttgtgataaattcaaggattctccagatgggatatttggaaagtcttttaaataaaaacacaaagcaaagtgctaaaaagaaatcaatggacatgctccaaaagcgacttaagg

SEQ ID NO: 9573 - DNA, 232 bp, Glycine max
  Clone ID: jC-gmle01810042c11d1
ggggcagaaagggtctttttttcccggaaaaaaaaaaagaatcggggaaatcccgaaccccttttctttgggggggtaccccccctaaggggagaacccccccattttccccctggggaaaggaaaaaatagttttcccaggcttggcaatggaaacccttaaggcggtttttgggccgggcccttggtttctttttagcccctggcttgggggtttttttggaaagacttc

SEQ ID NO: 9574 - DNA, 495 bp, Glycine max
  unsure at all n locations
  Clone ID: jC-gmle01810042c12a1
ggattttctttctttttaacatgctttggattcctaattttgactttgacccgttgtacgaatttaatggtttttgtgacgctctttcacgtatagccaatgcttgaacgtcttgaattgtttcggactgttcgcaatttctgatagcgctataatcttgtagggagagtcgctttgacgggaaacaagggttttcgctgcaattctaatcggtcaaattggaatcgtcggatcaatttgtcatgaagttcctggagtgttctgctttagatcggcttaatgatttcttgggtaatttgaatctgggagaacgtactatcaaaggatgccttgaagcttatagttgcaaacatgctggatcggataaaaaactctccatcagtttggagacagagattcttgattatcttgggaaatcatccgacactgattcctnctcaccagatcaaaccttcttaaccagaaccagccgaaagacattggtttacctggttc

SEQ ID NO: 9575 - DNA, 504 bp, Glycine max
  Clone ID: jC-gmle01810042c12d1
cagatgaatgtaacaatactctaccaatttcaaatatgttttttgataatattacaccagaggtgtgtcctaacagtcgagtatgatacagaatccaaacctacgatgtgcataggaggaagatacagatgttaaatctactatattgatacggatcggatacatatgctatatctacgactcaggccacactgaaacggtctttgatatacagaactacgcatctgaaaccatcttatattacagaactacacatgggaggatcagaagtcttcatatgctaactaatcgaggtagaagcgactcatatatccatgtcagcaaatatctcttcatcgtactcattgtgtatatcatcaataagcagtccgtcagcaatcaagttactaaaacaactgaatcgaaaagatacaatccgcttaagctttctattgtaaaacaagaaattaaaggaccatattgttcctccactctctagtaatggatctgcttcaaaatcaggga

SEQ ID NO: 9576 - DNA, 472 bp, Glycine max
  Clone ID: jC-gmle01810042d01a1
aaaatcgatctgatttttttcgtacttttcgctcaatgatgaaatgggtcagattctacaggaccaaaccttgtgggagttaaggaatgatggaagaaaagaaataaaaaaaagtaaataaaaatgcagtagaagagtcctgattccaaacgaaaaaattcaaacttgattgaaaaggatctttctgattattgaagaatgggacaaaaggattgatcgcgaaaaagatttcttgttcttattagaagatcgtgattggatccacatatgtttggtaaaaagaaagaaaaatattcttttttgagaataataaaaaaggaaagtgttcaattggaacatgaaaacgtgacagaattggtcctagttactcttcggaacggaatagaagaaggggagaggatctcgaaccgaactaagaaacggatccaatgacttcaaaagaattgacgaagagccatatgaagtgaaaatc

SEQ ID NO: 9577 - DNA, 448 bp, Glycine max
  unsure at all n locations
  Clone ID: jC-gmle01810042d01d1
cgagagatatattcatcaatttcgattctttttcgatcgagatgtatggattcatgggtctatgtgtctatatagatcctgttcatggattaacgaaaatgtgcaaaagctctatttgcctctgccattctatgagtctcttcctttttgcgtatggcatcgccactacctttggcagcatccactaattcggaacttaatttgaaagccatatttcgacccggacgttttcgggatgcccccaataaccaacgaatggcaagtgcttttccttgtgtggatcctatttcaacgggaacttgatgagttgatccgcctacgcgtcttgcttttactgctatatcgggagttactccacgtattgcttgacgtanaacagatagtggatttgtttctgtcttttgtgaatctttntcatagctcgatagataatttgataagccaatga

SEQ ID NO: 9578 - DNA, 475 bp, Glycine max
  Clone ID: jC-gmle01810042d02a1
gtctcaccgaactgatgacacagttaaatgaaaaatcctttgaactggaggtcaaaacagcagataaccatataattcaacaacagcttagtcagaagatccatgaatgtgaaagccttcaagaaacaattggctctctgaaacatcagctggcagatgcattagagttgagaaacttaagtcctcaacctttctctgtaaccaaagactaccatggtgaacctcaccatgacaaggaaagtgccatgataaccaataccaatgaaaagattcttttgcaagagcaggcaggcgagatagaagggatgaatcaaaagttggcggaactaacagaatcaaaagaacagctagaactttttgaatcagatactggcagaagagagttcatatgctaaagggctagcttcagctgctgcagtggagcttatagcattgtcagaagaagtttccaaactcatgaaccagaatgagagat

SEQ ID NO: 9579 - DNA, 486 bp, Glycine max
  Clone ID: jC-gmle01810042d02d1
caagtcaaataataaccggaagattaacattttcagtatgtccaaacatcaatacacaatgaaagttatgattcataaaaccaacattgtggatcaaaaggaaaatataaaaccaaaatttgttctaaacttaatctagcaaccaaataaaatacaagttgtgcattttggctcatcatttgctttccagctggtcaaatcgatcccacgacactgacagggacttattttgataacagtcaatatcaatgtgaatacaaggcttttctgccagattacacatttttcctctcttgctataagttagcaatagaaaatagaaaacctgttgatataggtaacagaacatatagctcgaattattcttaacctacttattgataccctgggtctatacaccatccatgtgaaatcttttctatcaaaatttgttgttgaccaaaaatgagaaacgagcctacaaaataaccaccaaattaatgggga

SEQ ID NO: 9580 - DNA, 436 bp, Glycine max
  Clone ID: jC-gmle01810042d03a1
gtgatgggcgacgagtcggataagacgaaggagctcctgaagcgggagaaggtggagaatgtgcctcacttcagcttctacaagagcaaggagaagatacacgaggaggaagggattggtcccgacatgctggtaggggatgtgctatactacggggacaaccactctggtgtggtgcagctgcacaacgtggaggacgtgcagaagctcatagaggaccacaagctggatcacaagctcatcgtgctcgatgtgggtctcaaacattgtgggccctgcgttaaggtttatcctacagtggttaagctctcgaggcagatggactcggtggtgttcgctcggatgaacggggacgagaacgagagctgcatgcagttcttgaaagacatggaagtcatccaggtccctacctttctcttcataagagatggcaaca

SEQ ID NO: 9581 - DNA, 243 bp, Glycine max
  Clone ID: jC-gmle01810042d03d1
caaaaaaagggggcccctttacctcaaaattttaggggaagacccccccatttgaaaaaatccggaaaactttttaaaactggggtttttttttttgccccaaaaacatggaaaattttaaaaatgttacccgcaagccccaaaaaaacttttaccatttggaacaacccacccttaaggaacaaaaatttttccttcccaagtttgttttccccccaataaaaaatggaaaaaaagcccccc

SEQ ID NO: 9582 - DNA, 113 bp, Glycine max
  Clone ID: jC-gmle01810042d04a1
ttttgttttaaaaaaattacccatatttattggtactaacaacttagcgtgtttgtcatgaccttgggtggtcggaacaaatacctgataccttctttattttcgaattgtga

SEQ ID NO: 9583 - DNA, 501 bp, Glycine max
  Clone ID: jC-gmle01810042d04d1
ctacaatagtaaaaaatttattattgaaacaaaattatatatgaatttcttaccataataatatcacattacgagaatcacaacaagtaatttaaaacaacatacctaattcatatccccaaaagaagaaagtgtcatgtacatactgtttctgcaaccaataatagataatagatcattacatgacacaaattccttctctttcttcttgaggaattaacgaggcaatatcatttgctactaattgggcatccatgttagctccaaagaaaccccttcttgacagcccaacacaatacaaaccatttcgacctttccaatgatttgggaaactgttttttggaaagccatcctcatttagaagatcatcaccccccttaagccacttttgagttgatctcttgaagcctgtacagaaaacaattgagtcgaatgtgtacgatttgccatcctggaacaaaacttcattacctcttatactctttatttcagctggcaaca

SEQ ID NO: 9584 - DNA, 331 bp, Glycine max
  Clone ID: jC-gmle01810042d05a1
ccactaccaatggtgattttgttcaaggaaaagatctcgcaatggttaaagttaatgtagcatgtgctgctgttggcttgacatcaagttacactccaactccattgttggaatctggtttgcaaaaagacagagggttaattgcggagtattttggaaggatgtcttacgttgctcacaacgttaatcagccccaagagaaagatttgttggagggaaatttttcctttgatattaaatctcgctctagattggaaaaagtttcctctacaaaagcacaatttgttagtggaaaaaccttcaaatatgatataatgggcgctggttcaca

SEQ ID NO: 9585 - DNA, 516 bp, Glycine max
  Clone ID: jC-gmle01810042d05d1
agtgcagtaaaagaagtcaagaactcggaagtattgttatttgattggtctctattacaggactatcttgagcatactatttgtatccctccccctccaagaaagtactcctcaagtcttgtctcttccatgctttcccctttctccccaaaatgcaatcaaattttaccagagatctatccaaaagaggactataattcaaaaaacaacaatacttaaaccttatcaaagaggggacagcctaataaaacaaatcaattacaccacaaatttttagaaataacaaataaacaaaactagaaagcttcaggaaggaatgttagcttgacatatccaaagcatttgctttattatataaggaacaaattagagtcagtttgacttcatgctagctcattgtaattggttaaacttcccaatagcaaaccaacatattatataaacccagtcacctattcggcttccgagtgaaacacatcataaatcacatgcttcagcattcactcttttgaagaa

SEQ ID NO: 9586 - DNA, 539 bp, Glycine max
  Clone ID: jC-gmle01810042d06a1
tggacatattggtgaaagacatcaatggaaatccatacatggttccaaacacagcttttgatgttggaatgctagatctaacgcacccaaaaactgcaacttggttcaagcagattctacgagaaatggtggacgatggagttagaggatggatggctgattttggtgaaggccttcctgttgatgctgttctatattcaggtgaagatcctatttcagctcataacagatacccagaactatgggccaaaattaacagagagcttgtggaagaatggaaaagtagctccctggacaaggtgaaggaagatgaagacgagggcttggttttcttcatgagggctggttttagagatagccctaagtgggggatgctattttgggaaggagaccaaatggtcagttggcaaacaaatgatggaataaagagttctgttgttggcctactcagcagtggaatttctggctatgcctttaatcacagtgacattggaggatactggacagtaaacttacctatagttaaatatagaagaagt

SEQ ID NO: 9587 - DNA, 266 bp, Glycine max
  Clone ID: jC-gmle01810042d06d1
ggaggaaaaaaaaaacccgggttaaggggatggggccaaaaaaacttcccctatgaaagcaccaaaccggctacacatccaagggggttttttcggggggggggccaaactaagggggaccccgggggcccaaatgggggggggaacccaagggggaaatacttagcccgggccccccaaactttgaaaaggggcgggacctccagaagaaatttcccaaaggggggcccccccgccaaaaattttatcccccaaaaaggcccccc

SEQ ID NO: 9588 - DNA, 513 bp, Glycine max
  Clone ID: jC-gmle01810042d07a1
ctttggaggagtatggtaccaatttgaccaagctagcggaagagggaaaattggatcctgttgtgggaaggcagccgcaaattgaacgtgtgactcaaattttaggtcgtcggactaaaaataatccttgtcttattggagaacctggtgttgggaagacagcaattgctgaaggtctcgctcagcggattgcaaatggtgatgtacctgaaaccatagagggaaaaaaggtcataaccctcgacatgggtctgcttgttgctggaactaaataccgtggtgagtttgaggagaggttgaagaaactgatggaagagatcaaacaaagtgacgagataatacttttcatcgatgaagtgcacactttgattggagcaggagcagcagaaggggcaattgatgctgctaacatactaaagccagctcttgcaagatgtgaactacagtgtattggagccacaacattagacgaatacaggaagcacatttgaaaaagatcctgctttggagaga

SEQ ID NO: 9589 - DNA, 559 bp, Glycine max
  Clone ID: jC-gmle01810042d07d1
aaagtagtagttctagcggttgactcgcttttttcaaattgtttttcattattaagaaaaggtaacgaagataaaatacgagcttgttttatagcaattgttattaatcgttgttgttttaaggtcaatctatttacgcgtctggataatatttttccttgttcactaataaatcgactaattaaacccatgtttttataatcaattcggtcccccgattggatcgggggcaaacgcctacgaaaagatcgcttggatttcataaagagtcgcttagatttttccatggtttatttatccctattccaaaaatcacatttattacaagaaatactataaaggatttgtttttttattctgacttttttaatatatgttgttatttttttaatatatgttgttatatactgatatttgtatatattcaactgttaatgatagaatacagatagatctatctatatagataagaaaaatagatcattttacatgttaaagtctttggttcgaaggtaacacacaagcgatcaatttgatctatttctttttttctgcgtga

SEQ ID NO: 9590 - DNA, 516 bp, Glycine max
  Clone ID: jC-gmle01810042d08a1
cttggcttcttcttcctctgaacgcattttccgctgccgcaacttcgaagtcgccagctcagcatcctcgaaatcagtctgctgctgcaggtggttgcaatctggcatggatttcctctggagcgagaatgcggcgacgccgcgcgcctcgcatttctccgttgcgatctacttcgccttcgccagtttcgcggccaggttcttccttgacagattcgtctttcgcaggttggccattaggattttgacgaagggtagagctcctttacatattactaaggaaatgcaagtaaagattggaaaatgctcagaatcaatgtggaagctaacatattatgctacagttgaagcattcattcttaaaattacctaccaagaaccctggttcagtaacacgaaattatacttcaatgactggccaaatcatgagttgaagagtcccctagtgttgtactacatgtgccagtgtgggttctacatatatagcaatgctgctattcttacatgggagactcg

SEQ ID NO: 9591 - DNA, 518 bp, Glycine max
  Clone ID: jC-gmle01810042d08d1
gtgtatacaatgatagattgctcacaggactacgatatgtcgcacggcctcaacattctttaagactgacactgcttctcataccctgactgccgacctacaccacatagcgatacagcggcgacttgtcacccatggcaagcagttcctcctcgctgtactgctccctcacttccgcctcggtcatttgatctctcttcttgttgagcgacccgtaagccaacctcaggaaaagcgtcgcaacgatgcccgccaacaagatacccagacaaaagccatacccgagccagtacttcggcgcctgcgcttccagaaagatgttggacccgatcgcgccgcctagattgccgatggagatgagcagagccatgccgacggagcgcttccatgttggtgcaagattgttgccgacccagctcaagatgccgataatgggaggatacacgcctgctggaatggcaaagaggaaagcatacgtgagaccagggtatcgtgggtgagggatcgcaagaagagca

SEQ ID NO: 9592 - DNA, 554 bp, Glycine max
  Clone ID: jC-gmle01810042d09a1
caataatggcatcttaaagattgcagattttggtctggcaaattttattgacccccatcacaaggttccattgaccagccgtgtagtaactctgtggtatagaccaccagaactcttacttggagcatctaattacggagttgctgtggatttgtggagcactggttgcatactgggggaactgtatcgtagcagacctatattacctggaaaaacagaggttgaacaattgcataggatttttaaactttgtggctcaccatctgaggactattggtgcaagctgcggacgccacattcaacagtattcaggcctcctcaccattataggcgttgtgttgctgaaacatttaaagaatatccatctgctgccacaaggcttatcgaaaccctactttctttagatcccacacttcgaggaacagcagctgcagcccttaagagtgaggtaagtgcttttatgtttacaacaagtggagtacttatgtaacctggatgagattggacttcatccttatacaaatgtactatactcattgtgtgagaattgagta

SEQ ID NO: 9593 - DNA, 447 bp, Glycine max
  Clone ID: jC-gmle01810042d09d1
gggaactacaatatcaagctggaactagggatcacccttccattgtcgactacttccaggacccaaggatatgggtgtccgctacttggagctttcaactcccaccggacccttacaaactcccaaacaccttccccactcccactcaagactgggaacccgccccatcatgcttactcttccactccttccccgcgggataatacgcgccctcgacatgctcgtccaccgtcgcaggctgcaaccacttgcaccgatccttcttaaacgtttccacgcgcgggttgaacttggtctcctgcagggcaaagtcgtcgatggtgccgatgcgcgggatgctcatgccggggtagccgctgctgcggcggtacatgagggtgccgcaaacgctgcaaaagctgttttccatgtagttgcccgtggcgatggtgttgttttggcggaagc

SEQ ID NO: 9594 - DNA, 156 bp, Glycine max
  Clone ID: jC-gmle01810042d10a1
cttagattccaaccacctgatcttatggaatactttattatgtctggctcttctgggtcaatgtatttactgaactatatcgattccttttggatcagttacctgccaggtacaatctgttaattgacaatttgatatatttggattttttttggt

SEQ ID NO: 9595 - DNA, 74 bp, Glycine max
  Clone ID: jC-gmle01810042d10d1
tttttttttttttttttttttttttttttttttttttttttttttttttttttttggtcttttggtgtgttttt

SEQ ID NO: 9596 - DNA, 509 bp, Glycine max
  Clone ID: jC-gmle01810042d11a1
ggctcgagtgtgaatgtgccttgaccttctatcttcaattctaaacgggggacagggtcagacatggctggctacggctccactgacggagctgacaacagagctcttgtgaacctgaatgggtctggacctggggtttcagatcccagatcatgcttctttgggagcagctagaagaaggttattggttcaagggtccccagcacaaagatttcctctggaagcttcaagattgttgctgtacaagagaagacagagattgaagagacccagcacaccgacaaggacagatggaagggtcttgcctatgatatctcagacgaccaacaggacatcacaagatgaaagggtgtggatgactcccttttccaagctccacaggatgctggaactcactatgctggcatgagctcctacgagttccttagcactggacttcgccagtactcggacaaccacatggatcgattttacattgctccacttttatggacaaacttgttggtcac

SEQ ID NO: 9597 - DNA, 517 bp, Glycine max
  Clone ID: jC-gmle01810042d11d1
atcatggggactgcgacaactttattttattttatattattttttttgggtgtgggggatgtcttggatgtaggcatatctttttaatcatcatatttgatagtttgagaaagttcaactatttaataatttaaaagtaacagatgatatcttccaaatccatagtattctacaaattataatttgtttcccggctgtgtagaggggctaacacctgaatctgctggttcacagcttgctttttggaacactgacagatgcatttctggatctgttttctactgatcgagatacctgcttcacagcctcttttgctaaatggcgaggccgactcagccaaagtcctccgtcaacaatcataatgtcgccattaatgaattttcctgcatctgatactaggaaaagtgcagccatggcaatatcccacttctccccaagtttatacagcggcatgtaatctctggctttgctacttatttcatcaggagccagtttactcatgccaggggtgtcactt

SEQ ID NO: 9598 - DNA, 519 bp, Glycine max
  unsure at all n locations
  Clone ID: jC-gmle01810042d12a1
ctcgagccggtcatggtggagctttgagggtgcagtaggagaccctcaaactctattactcaaacaggattgcagcggattcacggcacccaacttgtccaacttcaaccaaaatctaaacgcaagtttggcagacctgagagcagaagtgagcaaccaaaggaagcactttgccacttctcaatcaaccaccggaacgagtcctgtctatgccatgattcaatgcaggaactacctctccaacaccgactgcgctgcctgcctcgccgccgccgacgccaagattcgcaactgctccaccggagctaacggtgcccgtgtcatttacgacggctgcttcctcaggtacgagagcaatgatttctttgcccagatcatgcctcgcagcagcatactntgtggaagtcagagtgcagatgaaagcacagctttcagtgaagctggacaacaagtactaacggatctacaaatagcaacaccaaaaatcactggctactatgcagctaccaagacacaagt

SEQ ID NO: 9599 - DNA, 581 bp, Glycine max
  Clone ID: jC-gmle01810042d12d1
gattcagtgcaacaaatctatgtatggcatttatacaaacatccaacactaccaaagagtgctaccaggaataactaattacaactaccaattaatcatcacaacaaactttaattacttatcatgcatctgtatgctctacaacatcattctgcccctctaacatgtgcatcatatacataattaatcatcgagcaggtactatagaactggaggcagtagcattagatgtagaggaactagttgaggcaaaaatatctctgtggggctttaatttagactcaataaagataggcattgaaggtctcatatgctcaagtgcattgctactgagtagcactactacttcagacatagctggtctcatcgcagccgatgcttgagtacacaacaaagcaatttctatgattttcttcacttcttctgcatcatagttatcattcaagggttcgtccaccaactccaagtgcatgcctctctcatacaacttccatgcttgtcgaagaagggactcttcctcaccatcatcatcaactctcacatcagtactcttttgaccacttatgatttctagcactaca

SEQ ID NO: 9600 - DNA, 485 bp, Glycine max
  Clone ID: jC-gmle01810042e01a1
gctttccagaagcatcacccacaccaacatgaagttctctcacgccctcgtatgggccaccgtggccatgggcctcggcgccgacgcgaaattgtttggcaaagacaagcccgtgtacgaagactggtccctcgagcagtcccttgcgttcctcaaggagcagggcgtcaaggtgcgcgactcgcagtcgctggaagaggtccgcaaggccgtcctcgagaatgccgacgcggctgctacctggggcgcaggtgccgcgggcaaggcgcaagcgtactttgaggctggcagcgccgctgccctggaggcttgggacgagagccagctgcgagagtatcttctcgagcagggcgtggtttcgccccagtcgacgcgcgagcagctgctcgtgcttgcgaggcaaaaggcgtctgccgctttcacggcaatctatggccaccctaccgaccaggccgcgtcgtctgtctcgtcggcatactatgacg

SEQ ID NO: 9601 - DNA, 476 bp, Glycine max
  Clone ID: jC-gmle01810042e01d1
cgggctgcacagaactcttcatcattcactagctacgaaactcttttctctcgcctcttgctccactccccctgctccccatcaccagcttcgacatcctccgcccccctcatcaccagccagatactataaaacacagtcttgtatatagcgatcacctcatctcgtctctttcatctccaccctgacaccccgctttagagctccttcttggcgctcttgctcgcctgcgcactcacactgctcagactggcagagtacgagctcgcgctgctcgccgcgctcaccgcgctcttgctcgcgacagagtacgccgacacgaggctcttgctcgccgacaccgacgtcaccgacgcggcgctcgcagccgacgaggccgaagccgcgagcgacttgctcaggctcgacgcagacagcgaggccgagtgcgcgagcaccgacgcggccgacgaggccgacgaagcgagcgacgaggc

SEQ ID NO: 9602 - DNA, 459 bp, Glycine max
  Clone ID: jC-gmle01810042e02a1
caatgtcagagaataaagtggaaatggcgaggggttcaaagcaagctgttaatggagcaagtttggtagaaagagatcctagcctggccttgacaaagacaaagaaatctacaacctctaaagaacttccaccactggaagagctaaaagttttgccctcagatgaaggattcagttgggccaatgaaaattacaattccttgcaaagatcaattgatgtttggtcttttgttatttctttacgtattcgagttctgttggacaatgcaaaatgggcatatttgggtgactttacagaagaaaaacagaaaagcagaaggcggaaaactgctgcatggctaagggagtgtgtattacagcttgggccaactttcattaaacttgacagttatcatcaacaaggtcggatctatttccccgtgaatttgtagaggagcttgcaaaattgcaggacagggt

SEQ ID NO: 9603 - DNA, 425 bp, Glycine max
  Clone ID: jC-gmle01810042e02d1
tctttttttttttttttttttttttttttgtattgttttgttttttcaataaactatattggtcttatgcatatttttaagatcaatatacaatttgcctttagggcgtgtacttaatttaacttggaggattgaggaagccataatttagaatgaaaatgggaaaactaaaagttatttggctaacctattgtaccaaagggtgatgaaaaattcttttctccttacaaaacaatgatattcactttatcatgaaggaacagtttcttgcaaatacattaccctccaatcatgtttctgtacaactcgaacacgaatatcgtatgcttatgagaaaaatatgaatggaaaaagagatcaagaatctatctatatataaataaatatatatcatgcatatgcttgaagcccgaaggagttgaatt

SEQ ID NO: 9604 - DNA, 538 bp, Glycine max
  unsure at all n locations
  Clone ID: jC-gmle01810042e03a1
gacatatactcctttgggatgtgcatgatagaaatttttacttctgagttcccgtacagcgagtgctctaaccctgctcagatatacaagaaagttacttcggggaagctaccagaagcctattacagaatccatgacttggaagcccaaagatttgtgggaaaatgtttggcaaatgtctcagagaggttgtcagcaaaggagctcttgttggacccatttttagccaaggaacaactagactctccacttcctagcccaacattacctaaaaaacaagcccccacactcaatttcactgcatcacttgccaaagagttatctcagccaaagagtaaccaaacaaaggactcacacatgacaatcaccggatcaataaatgaagaggatgacacggttttcctgaaagtacaaatttctaacaaagatgggcanaagagaaacattttctttccatttgacaccatatacgacactgccattgatgtggcaatggagatggttaaagaactggagattagtgacttggaaccattgg

SEQ ID NO: 9605 - DNA, 480 bp, Glycine max
  Clone ID: jC-gmle01810042e03d1
aaatatattaaacacgtaatcttattatatttgagtttcaaattcatggacataaagaaatctagaagaattaatctctctcatacaagtgtgaatgaagatatatacgtttaaaactcctcctaaaagtgaattgagcgagggaacaagccttcaattctttattgaaaagaaaaaatgagggggataagaagatacatacttcattctatataatatgcgtttaggcagcggggcttgctaccttagcaagtaagattatcaccggtggcaacaccgcattgtctacagtagtcagtgtagctattaacgcgagcctgaactgtggaagggttggcaccatcacattcaagttgaccgtttatggctctgatgggcgcaccaaacccttgagtgatgacagggcgcacgtgttgcatccatgtccacagcgctgtcttgaaagacatcacaggatcattgcccactgtttcaggagcg

SEQ ID NO: 9606 - DNA, 523 bp, Glycine max
  unsure at all n locations
  Clone ID: jC-gmle01810042e04a1
agatactggaggtccagcatctgaatcatcatcatatgtgcttccattgtctgttactatctttccaccacaatttatatgaagagaatataagcacatatgatgatgattcagatactggaggtccagcaagatttcaccgaagtggaacaaaaaattgggcatatatcaatactggtaactttatggataatgacgctggcgcctattatatcgtgcaaaataaaactttgctttctatggacaatgttgacctatacatggatgctcgagtttctcccatttctcttacttactatggattttgcctgggaaatggaaactacacggttaatctacattttgcggaaatcatgttcattgatgatcaaacatttaacagcttaggaagacgagtatttgacatctatattcagggagcgctagtgaagaaggactttgatattgtagaagaagcaggaggaattggtaaggcagtcatcacatcattcactgctgttgtgactagntataccttggagat

SEQ ID NO: 9607 - DNA, 524 bp, Glycine max
  Clone ID: jC-gmle01810042e04d1
gcaactgtctagcctctcaattcaattatctacatgaaatgtttaatttacaagccaagagcaccaaggggggtcttcccttgtccagcctcaaagtagaaaatcagcatggccaacatagcaatcctggcatgcttaatctcagccaatttcaatctttccagcttctctgtatccggaatgtaaactccatccttgatagtgccagcaaagctcaaagggtcaaagaatttgcctcctgggtagccttgctcaccagtggcattggcaaagttctcagctgttcttgaccatggagtggcccattccactgactgtgagtctgggttgaagaaatccacccatctcttgctctcaacccaccccatgaggatcaactgggttcccagaagagtaccaaaggagaaaggagcaattgcatttgggtcagctccagcctcaaaccatggcactccactccatgcctgccccacaaagattcctagaactgcagccattgcccacctcccatgaatgagctcagc

SEQ ID NO: 9608 - DNA, 282 bp, Glycine max
  Clone ID: jC-gmle01810042e05a1
gtcattttattggctggacttcagggagttgggaagacaactgtttgcgcaaagttggcaaattatctcaagaaacagggaaaaagttgcatgctagttgctggggatgtttacagacctggtgctattgaccagctcgctgttgtgggaaaacgggtgtatgtacgaaagatttcaggagagtcgaatgtggaatcccttctggatttccgatcacggttatacgtaatagcattcctaatgatatgctcattagatatagctatgaaagattactgcgcc

SEQ ID NO: 9609 - DNA, 365 bp, Glycine max
  Clone ID: jC-gmle01810042e05d1
atattaaaacacactcattgcacatagtaatgcgctttatttaagggaataaaatattacatactagttcacaaatgccaaagggcactcatcaaccagatatttgagactcttacagttctcaagaagtcgcgtcagcatagggttaggggcgttagaactcaaaatttcattcttaacgccaaaaagaacagccagtaaagctactggaaaaggatcaactctagtaagaaaaacaattttcttacctctcccaagtgctgggcgaatccttttggtgatatctgaggagcgattggtaactgcaaaactaatccaagccggggtgggtaaaccaccacgttcactaccacatgtaacattta

SEQ ID NO: 9610 - DNA, 557 bp, Glycine max
  unsure at all n locations
  Clone ID: jC-gmle01810042e06a1
atcgatttagttgcaactggaacacaggtttctttcaatgaaataatattaatatcaatttaataagctggtaatgtaaaatactgctaatgttaatatgaagtttggatggtcttattggcagaagatgctaggtggtgttcatcaatattctgaaaggtaaaacgattttggtttttaatgataatataaccatgaatctaacatcagatattgaacgctacacatcaaaaataaatcgagccaacgcatttaattgtaagtgtcttcatattacctgtgttctgtcacatctttttgcataatattggcactaagtcttttttgatagaaattgtgaagatgtactgttatcattgtatcaactatattgtgcccttctttttttatttgatttggcaaacacggctacttttctccaaataagatggatcatttgtattgccggctttgtgcacaattatctacttgtaagaagtncaatttcgggcaacaacgttttgtatgcagaaataggtcattagcattggtaatctccaggcgataaatggaatatc

SEQ ID NO: 9611 - DNA, 332 bp, Glycine max
  Clone ID: jC-gmle01810042e06d1
cagggaagctgaaaattgcatataaatatgtctgagtgataatgcatattttcacataattaaggagtaaaatcatttcatcccgcttaaaattaaaacccttctaaggactggaggctcctttagccccaatgctccaaagggttctagaatttgattactgctatatccaatacacattatatatatatatgcttttttctttagagaatgcttgttttccattttccattagggaaactagaaaccaaagcttggactgcggaaatggaagatggaatgatggctttgtcttgccatactgggcgacctgatttcttcagcaacacttt

SEQ ID NO: 9612 - DNA, 513 bp, Glycine max
  Clone ID: jC-gmle01810042e07a1
gttcagtactactgaaattcaaggagaaaaccaattatgaacttgtctacaggattgatgagatagttggtgatgcagttgattcagctattcgggatatcaaaagatttgctcattctgtgattctccataagtcctctgtatatccccttaacgacttcttcctgactggctctacaaagattgtgccaaagttcaaatcttctaatatctctgtttacgttgaaacattcagcaatgagtttgtatcttctgcatgggatttcttgtcagattcaaccgtggagatcaacacatttgttcaagatgctgaaattgatggtgtcatcacagacttgccaaaaacagctaatagatacagaacgaacaaatgcttaaatttgggtgagaacacaccttcatacatgaaaccagctcaagtaggtggccttttcaaacaaatagccaaatattccttgccacctgctgtggctcctgacccttgcctgactgaagatgaagtgacagaacccc

SEQ ID NO: 9613 - DNA, 394 bp, Glycine max
  Clone ID: jC-gmle01810042e07d1
cggaaaaagaaaggaaatttcaaggttgatagaaatttaccccctcaactttcccgataatagaaattgaaaaacccttgggcgggtttaatagcccaagaaaaacccggggattggcttttaacccctcattggtcttccatccctaaagaaacaaataaatttaaacaaaactggcaaaacaactctcccaggaactagttttttcctgggatctcaaaaaactttggcatttttaaaccaggaccccacttgtgatgggggaggagacctagtcttttggatagaacccattcctatgaagctggaaaatttatacccaggggttattgggggggtttttaatcccacccgcaaacttattgggcccaaaggggtgaaaatatgaatcggg

SEQ ID NO: 9614 - DNA, 534 bp, Glycine max
  unsure at all n locations
  Clone ID: jC-gmle01810042e08a1
gaaaaatcactctttgtctctcttcctcttctgggattgttcaatttgggaatgtggcgcatgaatcccaacccgggtctgaaattttcagatctcttacttttacaccccttgtcgcgaaccaagaccaaacacagacacacccttccatcaacgttaactccgtcaaaatcaacggcaaaaaggtttctttcgacacccccttgggtgggggtgctcagctgagcacggtggtgccttacaccactctccaaacctcgatctatgcaaacttcgaaagcgcttatttgaaagccgcttcgtctatgagcatgaaaagggtcgatccagtttccccctttgggctctgcttcgaatccaacggcgttggaagctcccaagtggggcccaacgtgccggtcattgatctggtcctgcagagcgagatggtgaagtggagcatacacggaagaaactncatggtgcangtgaacgacgatgttatgtgcttangggttgttgatggaagtgagaatccgaggaaccctattggga

SEQ ID NO: 9615 - DNA, 535 bp, Glycine max
  Clone ID: jC-gmle01810042e08d1
gcctgtataacactagcaacagaaaatatattgccataaataaatccgtggctagattcattaattttgaatttaaaaaactaaatcaaagaaggaacatgaaactaatcatctgatgtaattgtttcatgatcagattccaccttggaccacttattaatacgattacgagctttagttacctgttcgtcccaatcagttttgtaagtgattacagtcagcactacggtttgaataaatgttccaaacaacattccaatccaaatacccttgacttgcaaattcaaaacgttaccaagcacaactcctacaggaatacctatgatgtaataacaccctatgttcacatatgctacaatactttgccaccctgctccaatagcaacccctgagagtacaggttgaacactgtttagtagaatagagattgccaacaaaggtgacaagtccccaacggcatcggccacgtctttatttgaggtaaatatgtaagcaagttttcccctttaaaattagaaaataagaagagaacaaa

SEQ ID NO: 9616 - DNA, 517 bp, Glycine max
  unsure at all n locations
  Clone ID: jC-gmle01810042e09a1
ggttatccaactgatccagagctcatatatctcactgatggtgcaagcaaaggagtgatgcagatattaaatactatcatcaggggtcaagacgatgggattttggttccagtcccacaatacccactctactcagcaacaattgctctgcttggtggtacccttgttccatactaccttgaagagacagcaaattggggtcttgatgttaatgaacttcgtcaatcagttgaacaggctcgctttaaaggaataactgttaaagcaatggtgatcataaatcctggaaaccctactggtcaatgccttagtgaagctaatctaagagaggttttgcaattctgctatcaagaaaatttagccttgcttggagatgaggtttaccagacgaatatatatcaatgaacgacccttcatcagttctagaaaggttttgatggaattggggccacctataagncaggaagttcagcttatttcttttcactctgtgtcaaacgttattatggtgaatgtg

SEQ ID NO: 9617 - DNA, 290 bp, Glycine max
  Clone ID: jC-gmle01810042e09d1
aaaaatgttaataattgttgaaatggttcaaaatttaaccatactatacatgttctggggaaagacaacaaaggtagaactcttaaagtggttaaatataagccatgattaactattattcttcatcgtgactgcaccatcatccttgctagcgttagccttttctgaggtgagtgcaccatcatccttgatggcgttagccttttttggggtagctcgaccacgtatttttaggtacccaaattttccaacaccgggtgatgaaccttcaaaaatgaagggcaaataac

SEQ ID NO: 9618 - DNA, 462 bp, Glycine max
  Clone ID: jC-gmle01810042e10a1
ctctcctccgtttcaacagtgacggcgctgcttcctctgttcactcttctgtttgctccgtcaactccgttaacagcagcagttaccgttccaccagcagcatccgcgagatcgatctgatcccctccgacgccgtctacgacctccgctgcatcgccgagcgcatgctctcctccggctacctccgcgagtgcatccaggtctacggcagcgttcgaaaatcctacgtcgacgcgagcttccgcaagctccacatcgaaaagctcagcatcggaaacgttcagcgcctcgagtgggagcagctcgagaacaaaatcagacgctggataaaagccgccaaggtctgcgtcagaactctgttcgcgagcgagaagaagctctgcgagcaaatcttcgacggcgtcggaacttccatcgacgacgcttgcttcatggagacggtgaaaggtcccgcgattcagc

SEQ ID NO: 9619 - DNA, 286 bp, Glycine max
  Clone ID: jC-gmle01810042e10d1
gcaataaaaaagaaagttattggcgatatggagcaaaatttgaccatgctttacttgcacgggcgaaagacggcataagaagcactctaagcgaggagaaaactaaaccaggatggacattcgtctttcatctatactgttacataatacttgctagcgtaagctatattttgagagcggaccccatcactgccgattgcttgagcctgttactggtcgcttcatcaacgacgtattttttctgtccctgaatcacacagcttcccagggacgaaccttgcaaaac

SEQ ID NO: 9620 - DNA, 336 bp, Glycine max
  Clone ID: jC-gmle01810042e11a1
cactatctcatttctttctattcatttcttcattccaccatcaccatggtcaaggagaagaagaacgtggtggtcaagaacaagaagccaaacaacaatgccgacgagcttcacttccgcggcgtccggaagcgaccatggggccgctactccgccgagatccgtgaccccggcaagaagacccgcgtctggctcggcaccttctacaccgccgaggactccagccgagcctatgacgccggcgcccgcagattccggggacccaaaggcaaaaccaacttccccgtgccacccgacgacagcaacaacaacgacgttaacgtgaaccaaaacaag

SEQ ID NO: 9621 - DNA, 484 bp, Glycine max
  Clone ID: jC-gmle01810042e11d1
ggggaaaaaaaaaaaaatattggtttttccccaaattcccccaaaatttccgagggtccccgaaaaatttttttaaaccctaacaatttcaaaaccgggccccgggtaatacctccgggggccctaaaacccaaaaagaggggaaagcccccccttttcccccaagggggggcccaagtaaccccttaaggggaaaataatcctcccaaaaaaaaaagggggggaaaaaaatccccctgggcccttttttgggggatttttttttaagaaaaaaaaaggggagaaaaaaggggggtaatttttctttgggggggcccaggtaaaaacgggaggggccccttttttgggcggcccattccccccccccggggggggggggggtttcctttggacccgaccgggttcaaaccggagggggaaaaactgggtcaagagggggcccggccaaaaaaaaaacccggcccctggtgctccaacggggggg

SEQ ID NO: 9622 - DNA, 542 bp, Glycine max
  unsure at all n locations
  Clone ID: jC-gmle01810042e12a1
ggtggaaccactcaatacactgtgaacaaccagatggtgaatgccaccctcatgaacattgctgataaccccacaaatgttcagcttcctggcatgtacaacaagcaagagaacccccgtgtgccaatcatcgtcaccggtaacgatttctcaacactctatgctcctctcatccgtgatgggcgtatggagaagttctactgggcacctacaagggatgaccgagttggtgtctgcaagggaattttccgcactgacaatgttcctgaggatgaaattgtcaagcttgttgacaccttccctggccaatctattgatttctttggtgcactcagggctagagtatatgacgatgaagtgaggaagtggatttctggtgttggtgttgacttgattgggaagaagcttgtgaactccaaggaaggacctncaacctttgaccaaccgaagatgactttgagcaagctcttggagtatggtaacatgcttgtncaagaacangagaatgtgaagagagtacaactggcagacaagtacttgaa

SEQ ID NO: 9623 - DNA, 499 bp, Glycine max
  Clone ID: jC-gmle01810042e12d1
gaaccacaatgaacaccaggaaatattaattgattatctcaagtgttttttttagtagtgagacaatgtaactcaaaattataaaggataacaatccaatatgaacaagataaattatttgattatatcaagtcatagcttctcttcaagtggagaatgcttaggttctcagggtgtgtataagcaggttccatcatcacttcttgcagttgggtcgaagtttgaggcatttggatcagtacaaccttcaggaacgggaatttttacttgctgggctgctttgccatagaaagttcctcttttgatggcatcctgattagcatcaccaagagcagcctcgttcaagtacttgtctgccagttgtactctcttcacattctcttgttcttggacaagcatgttaccatactccaagagcttgctcaaagtcatcttcggttggtcaaaggttggaggtccttccttggagttcacaagcttcttcccaatcaagtcaaca

SEQ ID NO: 9624 - DNA, 517 bp, Glycine max
  Clone ID: jC-gmle01810042f01a1
atcttttctgaattcaatcaatgtgatggattactccttgcttgttggagtagattctcagaagcacgagcttgtctgcgggatcattgattatctcaggcagtatacttgggacaaacatcttgagacatggatgaagtcttcacttgttgtgccaaaaaatgtgttgccaactgtaatctctcctaaagaatacaaaaagaggttcagaaagtttatgtctacatattttttgagtgttccagatcactggtgttcccagaaatcctccaatccttgcaaactttgttgctcaggggaagatgacccttcccagcaaaagccctagcacaagattgccaagtggtttctctgtccaaatctttttgattcaatttctcaaaagagaaaaaaaatacatattgagaaattatgcaagtagttagcaagtactggatatagacagtcaatattgattataaatctagccctgctattctgcgatttttaacgaatttctagggatgctgtcattaca

SEQ ID NO: 9625 - DNA, 435 bp, Glycine max
  Clone ID: jC-gmle01810042f01d1
aggggaagggtacaaaggaaagctagcaactgtacttttcattgattaaataaacctttacatttaccttaggcctacaaaaatttactcatctcatactgggagagggtggacctgtaaatgacagcatccctagaaattcgctaaaaatcgcagaatagcagggctagatttataatcaatattgactgtctatatacagtactgctaactacttgcataaattctcaatttgtattttttttttcttttgagaaattgaatcaaaaagatttggacagagaaaccacttggcaatcttgtgctagggcttttgctgggaagggtcatcttcccctgagcaacaaagtttgcaaggattggaggatttctgggacaccagtgatctggacactcaaaaatatgtagacataactttttgacctcttttgattc

SEQ ID NO: 9626 - DNA, 491 bp, Glycine max
  unsure at all n locations
  Clone ID: jC-gmle01810042f02a1
ctcagattgcaattgcctcttctcttctcccagaatcggtgtaggttacaggtttaagggttttgttttcatttaggtcactaatccgatatcatgaagctcgatacgactagtctcgaatcgtttcccacactgattgcacctcaaaacgacgtcgccggagaactctccgccgctccgttctttgaccttccgaattccaatgacttcgatgggttcttgaaagacgctattcagatggtgaagcccgcgaagggtactacaactcttgcttttatatttaaagagggtgttatggtagctgctgattctcgagctagcatgggaggatatatatcgtcgcagtctgtgaagaaaattatcgaaatcaatccgtatatgcttgggacaatggctggtggtgctgctgattgccagttttggcacaggaatctcgggattaagtgtcgtttgcatgagttggcanataaaaggagaatntcagtgacagg

SEQ ID NO: 9627 - DNA, 462 bp, Glycine max
  Clone ID: jC-gmle01810042f02d1
aattgaaaggagtgcgatttcattacaaaattaaaagacagaaagaaatagtatggtggaatatattaactattcccaacgggacaaacttagataatgcccccacctcccccccccaaaaaaaaagaataccatcagaactaccaaaacggagatttctcctcaatagaaatctaatgcactacaatatttataccaaaaacacttaaaaaaattgctccacttgtcctttctgcttgtttcttcaatcccttctctctttgtgagcatcaggtttaccttctcactcaaatcgcatcgtacacagtcggagacggaaacttcattagtaagactgaagtagctaaagttcagtgcctcctccaaacataggcaaaagccagttaaatgttcaacggttctgactcggcatacctatccttgatttgccaatcttctgtctttggcttatccgaaatcacc

SEQ ID NO: 9628 - DNA, 498 bp, Glycine max
  Clone ID: jC-gmle01810042f03a1
tttgcattcgccgacttctcacttctaaatctcccagaccaatttaagagctcctttgactttattgatgggcatgttaaaccagtggttggaaggaaaatcaattggttgaaagctggacttatagaatcatggtttgtgataactgttagcccaaactatgctaaagaactggtgtcaggtccagacaagggagtggaattggacaacatccttcgcaaaattgatgatgatggtcgtttggttggaattgtgaatggcatggatgttcaggagtggaatccaaccactgacaaatatatagctgtcaaatacgatgtttcaacagtattggaagcaaaggctcttttgaaagaagccctccaagcagaagttggattgccggtcgacagaaatattcctcttattggtttcattggtaggcttgaagagcaaaaaggttctgatattcttgcagaagctattccccaatttatcaaggagaatgttcagttggta

SEQ ID NO: 9629 - DNA, 285 bp, Glycine max
  Clone ID: jC-gmle01810042f03d1
aataaaaaccaggtcctgagccattgattatgatttgggttttcaaagggattcaaacccaaaaatattctgggagaactattagaacaatggttttgtcccccgaaataatgagaggggcaaatgtggctagcgcccaaaccctaaattttttgccacccaaagggtcctccggggaggttacctttattttccccctttcacccgtacaaaaatgtgttgtgtacaaagaacaccctatctgatggggggaaaccttttctttcaggacggacctggaggctc

SEQ ID NO: 9630 - DNA, 525 bp, Glycine max
  Clone ID: jC-gmle01810042f04a1
gagagaagcaacaagctttcttctgtctactccgatgattcggagccatctagcatgtttgatgaggtgctgctttgtaaggatggtaagagtccatccattttttatgctggccgtgaaccatcaccatcgcagattgctgactcaggaggatctaatgggaagaaaacacgatcaaagagaggttccaataaggggacaagggcaagcgtgacgacggtggatttatggactttgctaattcaatgtgcacaggctgtggctagctttgaccaaaggactgcaaatgaaacactgaagcagattaggcagcactcttcaccttttggcgatggacttcagcgtttggctcattacttcgccgatggcctcgagaaacggttagctgctgggacaccaaagttcatttcctttcagtcagcatctgccgcagatatgttgaaagcataccgagtgtatatctcggcatcaccatttctaaggatgtctaatttcttggcaaccgcactattctgaagctagcgc

SEQ ID NO: 9631 - DNA, 285 bp, Glycine max
  Clone ID: jC-gmle01810042f04d1
ggaaaaaacccccccccctttatcagggtttataaaacccggggaattggcccttttacaaacatctagggggggttcattggggcccttggcccgttcctggttttgggggaaacctcgggccgaattgcggggttaagaaaaggggcgggggaagaattagtttttttttgggggcccctaaattaaattgcccggccggcgtggtaccacccctggacggggaaaacccggggggtacccaatttaattgtcttggaggaaaaacccctttcaccggggggg

SEQ ID NO: 9632 - DNA, 513 bp, Glycine max
  Clone ID: jC-gmle01810042f05a1
gaaatatctgaagggagatttgatgcctgtccacccatacagacgcagacaagacctataaattctctcaacagtcatgaacactggaaaaataactcataggagaatgaaaattgttacaacttggagctaactaaggagaaagaaggaatgacattactgtcattacattcaacttcaactagacaaaacacaaatgataaggagaatgtcgagtcttatgcactgtatgagagaaaggaaatctgtcatagaagtgataatgtggaaggtctctggataaatcgttttttaccaaagtcaacttcccccttggtagtttttgaccaccttaatgagagaggtggttctgaagtccattctgcgtcttgcgcaatgcttccacattcccataaacacatttctctgaaaagctgcaagattgaagaggccagagaacaatctactgatgaccaactgctcgctgaggcttcaaaattacataactgtggtatcaataaagaggattccact

SEQ ID NO: 9633 - DNA, 463 bp, Glycine max
  Clone ID: jC-gmle01810042f06a1
ttccacttccaacgccatgcctctttttggaattttccagataccctcatttatggacataatcactgacctcgccatgttcattactccgctatggattgcggttatcgtcggcgtcgtcgtgggctgggcgtggaagcccaaatgggcctttcaccccaaagacgctcttctcaagtttcgctctcctcgccctcccaatccccaaaacgacaccgcttttacctactccgccaccagttcctccgcgcgtgagaaagacgcgagtgggagtcctgtggtgacggaagacgatttgctgcatctgtggaagttggttgaggaaaaagacggagggcgggcatggattcagatgatggaccgttctaccccgaccatgacctatcaagcgtggcgtaaggatcctgaggtacgccttacctttcattcttcccttttgcagtttggtagaattgagtgagtg

SEQ ID NO: 9634 - DNA, 417 bp, Glycine max
  Clone ID: jC-gmle01810042f06d1
gactatataagcaaagcaagttcctttctcagaaagtttagtaaacatgtgtttgttgagctgaacttaatagaagtagaaataagtatgtgtagtaagaaaattaataagtgacacgaacaccttggtacctgagaatttccccaatgagctcccctttgccagaaccgacgtacctgccttcaatgttgccatctctgatgaagagaaaggtagggacctggatgacttccatgtccttcaagaactgcatgcagctctcgttctcgtccccgttcatccgagcgaacaccaccgagtccatctgcctcgagagcttaaccactgtaggataaaccttaacgcagggcccacaatgtttgagacccacatcgagcacgatgagcttgtgatccagcttgtggtcctctatgagct

SEQ ID NO: 9635 - DNA, 587 bp, Glycine max
  Clone ID: jC-gmle01810042f07a1
ggattggtgaggtaaacttgaattgaagtgaagaaggagatggctgcaacctcttccttgtgctcatcgaccctccaatcccagatcaatggattcttccttcacaaaacctctctttcccatactccttccctcactttctccaggaggaaaatttcaaccacagtgaaggctacatctcgagtcgacaagttttcaaaaagcgatatcattgtctctccgtccattctttctgcaaacttttcaaaattgggagagcaggtgaaagcagtggaattggctggttgtgattggattcacgttgatgtaatggatggtcgctttgttccaaatattacaattggacctcttgtggttgatgcattgcgccctgtgacagatcttcctttggatgtacacctgatgattgtagagcctgaacaaagggtaccagattttattaaggcaggagctgatatagtcagtgttcattgtgaacaatcttccaccatccatttgcatcgtacagttaatcaagtgaaaagtctgggagcctaagctggagttgtcttaaaaccccgtacccccttaagtgccatagaatatat

SEQ ID NO: 9636 - DNA, 428 bp, Glycine max
  Clone ID: jC-gmle01810042f07d1
aaaacaaaaattacccatatttattggtactaacgccacatcgggtgtctgaatttcttacctatagggtaccacttttcgagaatcccagcacgtaatttaaaagcatcttaccctggtcataccctcaaaataagaaagtgtactggtcatactgatattgccccctatactagagaagtgatcattacatggcccaaatcgcttctctttctttttggggaattaacgaggcaagatcatgtgccactaattgggcatgcatgttatattcaaagaaacccgtttttgacagcccaacacaaatacaaaccattttcgacctttccagtgatttgggtaactgttttttgcgaagccatccccatttaaaaaatctcaccccccttaagccatatttgaggtgatcctttggggcctggtcagaa

SEQ ID NO: 9637 - DNA, 438 bp, Glycine max
  unsure at all n locations
  Clone ID: jC-gmle01810042f08a1
cagaaaatataataggtgaaatgaatatcgatttcaattccgccactgaatttcgaaaccaaaaaaccattccaacgaagaagatgaacctcgaagaagagggttagttacttctgagtgagtgagtgagttagtggttcctctgaggaacggtgaggaccttcaatttctcaagttctcaaccgttcgttttctctttcgttcccctaaccgccgtggatgggacaatctgtttcctccgccgccgtcgctagccgtcgcgagagggaccaaggccaccgctccgtcaactcttccaagaccagattcaccgcctcggtttcgccgatggccggttattcctccggcgccgccgaagaaggcgaataccatcgcgtggaggcccgtgccgatgaatccaccgactacatctncgatctcccgaacgagtgcctggct

SEQ ID NO: 9638 - DNA, 553 bp, Glycine max
  Clone ID: jC-gmle01810042f08d1
cttggaaaagaacaatcttccacaagggagatttgctcctgcattattcatagaaacataatagtactagatttcaaaaacgttatgctgtcaacctgaatcaggtatcttccgacactggctaatacagcattttttaaccactactcaccgataagtgagtagttcacaaaatccactatatacacttcagatttttattgaaaggctaattacttttactctaataaagagagttgtagctgtagcaggtagcaataatggatgagatgcagatgaggagtgcagggagtaagggggtattcaggagtttactttcactgaaatacccagagattgttattgttccatctgcaattactcgggctagagttccagcttctgttgacagcaatcccccattgaaggttccacgtgaaagccttgatgacatcatttttgatagaagtgaaaggttcactcctggattaattgagcaaacaaaaaaacggtggcacattcaaggagcaaatttcagcttcagagtttagcattagatgtgaaccaacttaaa

SEQ ID NO: 9639 - DNA, 522 bp, Glycine max
  Clone ID: jC-gmle01810042f09a1
tggaggcacagctcatcagacagtgttgttgccacaaacaaagagggttcaaatgacactaaaaaatcaggaaaagtaggttctcaaagtagtggaaatgatcactcttcttccaataaaagatcgtccaatgaaattttccctgaaccattggaaatacaagatgtggagacaggagtgacaagataaccacttgtgaaatgggtttggttattctttagtctgtgagatttttttaccactttctcggataattggtggtgccatagcaattgcttgttattagcacgtcagactccacccagcatccattatggtccatattgaagcaacggagtaccataatactgctattgatagcttttgctttccagagcttagattaagcagtacagattgaaatgcctggtatgagagcttccaaaaaactgaatattctacttattcatagattggttgaacacacagccctctctaaggtaaaagtgtgtgacaaattgaaaatatgaatggtttaattta

SEQ ID NO: 9640 - DNA, 512 bp, Glycine max
  Clone ID: jC-gmle01810042f09d1
ccaactaatttctttacactagctttgattgcaacgatacaagcgaattaattcaggggcaagaattgaaaaatcacttggatgctatgttatacatatctaaagttcatcctttgatgaatgctttattaaagaatgcctaaacttctcaggttattcaaaaaggtttctccaacctgggagccaaccttaacaaatacagcagggtatcctattggagcttctacccattcttcacgtccttgtttggaaaacacttttcctgtccagatatggatccaactgctactctctcccaatggaaaataagctttaacttttttctttcctttgtcaaggacaggcaccactaggaactcagaaccaaccaagaactgctgataactcaaacgatgcacacattcatcatcaggataatggagaaataggtggcgacatatgggcaatcctttctgtgcagcttcctttaccagttgaattcggtaaaatttccatgctttgtatacttttgc

SEQ ID NO: 9641 - DNA, 517 bp, Glycine max
  unsure at all n locations
  Clone ID: jC-gmle01810042f10a1
gtcgtgaaaaaaaataaaaagggaggtgagagagtgaattagacaaaccaaaccaaagcggaatgccgcacccttcaataatccattcttcaaacaatggctgaggaacatcctcgccctaggcttcttcttcttcttccttttctcgatcttcttcaataatcttctttgcagcattgtcgtcgttgttgcggttgcgtgcgatgggcgaggtggggaagatactttacatagtggtggtcgatgactccgagaggaaagagtccttccgctactcgcgtcccgttctgcagagcacgctccagctcatgggttgcaaagcgcgtcacgccttcaagatcagccaaagagtgtttgaactcacaaggaaagagaattctactgatgttttgaagccggaagtagaagccctatcagattttgatggtttcaagaggaattnttgtaagagagatgggtaaagtgtaccatttgagttgtacaaaagcgcacatctgcatttggtcggagagaaatt

SEQ ID NO: 9642 - DNA, 433 bp, Glycine max
  unsure at all n locations
  Clone ID: jC-gmle01810042f10d1
aggggcatacaatacaaaacaatataatacaaaattttacattttcaaagccacaaacctgggctgttggttcactaaaactttcacacagcctccttgtgacttattcctaagccctattaccacaaggatgttcaacaattctcagtgcatcagcactgcagcctcttgcacaagaggctgtgtaacatgcacaaaatgctcagcttccctttccaccttttcccaacacttgggtgcactcttcccttctttcatcttcttcacaaaccccacaaacttcctccagttatttggttcaaacaaatgcggattcatcctcaggtatgtgaaggcacacatttttctatcaccagactcaccatcaacatccaattgtgatgcccttatgatctgctcatgtgcatactcgtcgnaccgtggcagcgcgttt

SEQ ID NO: 9643 - DNA, 298 bp, Glycine max
  Clone ID: jC-gmle01810042f11a1
aattcgaggacagccagtgaaccagaaggctggttgctgctcgacttagagagagacgaagtatttggggtcttagaagttcatgtgtctcagtggcatctaaaactagcttttcacattgctttcatatcaagattgttcgtcatgattcgttcctcttatcgttaagccgttgttaaaacttccattattttctatgtatttgattttaaaagaaaaaacatttgtacaaaattaggaatattggtgaatagcagtatttgccttgttctttgtccctcaaaaaaaaaaaacaaaa

SEQ ID NO: 9644 - DNA, 281 bp, Glycine max
  Clone ID: jC-gmle01810042f11d1
gagggacaaagaacaaggcaaatactgctattcaccaatattcctaattttgtacaaatgttttttcttttaaaatcaaatacatagaaaataatggaagttttaacaacggcttaacgataagaggaacaaatcatgacgaacaatcttgatatgaaagcaatgtgaaaagctagttttagatgccactgagacacatgaacttctaagaccccaaatacttcgtctctctctaagtcgagcagcaaccagccttctggttcactggctgtcctcgaatt

SEQ ID NO: 9645 - DNA, 488 bp, Glycine max
  Clone ID: jC-gmle01810042f12a1
aaaaacaagtagttgagaactaagaagaaggaaatggcttcctcaatgatctcctccccagctgttaccaccgtcaaccgtgccggtgccggcatggttgctccattcaccggcctcaaatccatggctggcttccccacgaggaagaccaacaatgacattacctccattgctagcaacggtggaagagtacaatgcatgcaggtgtggccaccaattggcaagaagaagttcgagactctttcctacttgccagacctcgatgatgcccaattggcaaaggaagtcgaataccttctaaggaaaggatggattccttgcttggaattcgagttggagcacggtttcgtgtaccgtgagcacaacaggtcacctggatactatgatggacgctactggaccatgtggaagctgcctatgtttggctgcactgatgcttctcaagtgttgaaggagctttaagaggctaagactgcataccccaatgg

SEQ ID NO: 9646 - DNA, 403 bp, Glycine max
  Clone ID: jC-gmle01810042f12d1
agcttattcattagttctcatccattaatttccattggaggccgaaaacagaaaccaaaaattccgggtggtgaaatttcattaaggaaaaacaaaggggaatgtggtttaagtacaacaaacaaaggggggggggtaccgatgctttgcaaatttttcaatgacttaaaaacctgggggcttgtaggcgaaaaaactgatgcactggacttggggaacgttgtcaaatcccatgattcgggtgaagcccttgggggatgcagtcttagcctcttgaagctccttcaacacctgggaagcattagtgcagccaaacatagggggcttccacatgggccagtagcggccattataatatccaggggacctgttgtgctcacgggacacaaaaccgtgctccaac

SEQ ID NO: 9647 - DNA, 477 bp, Glycine max
  unsure at all n locations
  Clone ID: jC-gmle01810042g01a1
aaagagttgaagacttgaagtgaagaaagaaagaattgagaaaggatagggtttagggttggcaaaggaaggaagggatggaagcagctgtggtggacgtcggctctaagcttctcaaagcggactttgcaattcctgaccagactcccgccatgataattcccactcagatgaagcaattgctcgatgatggatcagtcactgatagttcactggctgacaatgtcaccgttgatcccgtcgtgcgaggatttattagagattgggatgccattgaagatttgttgcaccatgttttgtatactggcctcggatgggaaattggcaatgaaggacaaatactatttactgatccactttgtacccctaaggcgaacaaagaacagttggtgcaactaatgtttgaaacattcaacatctcagggttttatgcctcagaacaagcagtgttatcactctatgctgngggacgtatct

SEQ ID NO: 9648 - DNA, 496 bp, Glycine max
  unsure at all n locations
  Clone ID: jC-gmle01810042g01d1
ccttccaaactattattaaaacattaatacaagatatattattaattcataaattaaaacataaattccaaactatcatataaaaggaacaaaggggtgtgctagaagaggtgtagctagtagctacaggctacaaggttacaaatggccaaaatgaatattttacaggagatatccacattacaaagatatgcaagctcctagagctccaacatatgcatgtttaaggaacaggtatttacggaaatcttccactgctacctgngaagtcatgcagagtgagaagattgcattaatggagatcgctgcagcttttaagatatacacgacatctagcacttggaatatacagctattacagcatgttacagtaccagtagatgcagaggaataaatagttgttgaaaccatgtggatagatactggtagaacattttccgtgaacaatggaagtccagtttcatcatagtctgccttagttatatgctgattttga

SEQ ID NO: 9649 - DNA, 461 bp, Glycine max
  Clone ID: jC-gmle01810042g02a1
aacacgtttagtgcactgcgagctgcggtcggcgaggcccgcggttcgggcgagggaaccggccggtccggttcaggttacgatcccgaaacccaaagcggcggaggcggaaggcgcgaacatcgttttgcagccgcggttgtgcactctgagatcctacggttcggatcgagcgggggttctgatcaaggcccgcaaggagggtgacgatgatgacgtgtcccccttcttcgccgctctttccgactatattgagagctctaagaaaagtcatgattttgagatcatctctggtcgtctagctatgatggtgtttgcagcgacggtgacaatggaaatggtgacaggaaactctatgttcagaaagatggacattgaaggaatcacagaggctggtggggtgtgtttgggtgcagtaacttgtgcagcactctttgcatggttcttcagtgctcgaaaca

SEQ ID NO: 9650 - DNA, 352 bp, Glycine max
  Clone ID: jC-gmle01810042g02d1
gtcctatgttggacatatataggtatatgtatattccaattaaaaacaagctactctttgcgaccaatgatagtttctgacgaccctcttaattagcaccattccatttccatatatacattgactcgatacgacaagacacatatgacacacataaaaccaggcctagcttcctacgctttccacgtttccatgcctgccactcatcatgctcttagggctagccgggaatgatcacaacaaggagatacgcctgttatataatgttggcgttacattgagttttgtgattatcgtatgtgtacaacacagcacatacatacatacgttaatattcgccacatcaacgaca

SEQ ID NO: 9651 - DNA, 328 bp, Glycine max
  Clone ID: jC-gmle01810042g03d1
cttggttaaggccatttttaatacattaagaacacaaaattacatccatacatgtatagagagaagaagatcaagttactgtctaaagtctcaataactcttgctaaagatattacctcttctttttacagatgctcatgtttggtctgaaatcaactttatattgcgcacacaatggaaccattggcattggcgatctcaagccaaacatgcaaacttttggggctgaccatttctatgacattccacccacaaaaagggcgctaacagtatcatactttacctggcggctgactgacactatattagccactttatccgctacact

SEQ ID NO: 9652 - DNA, 484 bp, Glycine max
  Clone ID: jC-gmle01810042g04a1
ctaccgaagcccaaacgcaagcaccttccgggttcgccactgccctcacgaccactcttctcactcactggggattcgagggctatataaggtggctaaggggtatcaaatcgacctacaagcagcgccgagattggatatgcgatgctttccaggacaacttccatttggagcttgacctgaagagcattgggcaggcgtataatggggagaagggggtggtcctggagatcgaggggctggggaggggggtgacttgttatgcgaaacaaaatgctgaaggggtcgaagcgaaatgggacgagaagaggggtgtcgcaccaaagaggaaaggacgtgctctggtctctatcattccgacgaccgccgggatgttcatcatactagctgtccatagatagcataaccccaaaaacctttcactctcgagctctggttaatcacccttcgaggccacaccacaactgatggacattcttttgcc

SEQ ID NO: 9653 - DNA, 550 bp, Glycine max
  Clone ID: jC-gmle01810042g04d1
agcatgtaccaaaccatacagtattattatcagttaattaatacaaacaagcataggaaggttgatggtatggaggttttctgcagttgatgaatcctgcccataaaaaagatctcgataccttaaatatcaaaacaaaagcgcaattataacaccctttcacttcagctgcgactttatatctggttgaattcgtttttggacaagatcagaacttgttgataaaatcgtatatgtaattatcgatttcctctgctgcttcttgattattgaagtgagccactcctttctgcacaatcacttgttctaaatttggcacatcttgcttgaaccctccgccgtggatatactccttcaagttcagcgagttgtataccatgtccaactcacctgttatgtattttacgggcaccttgatttgccctcctgtccatggtgccgtcaacttccaattttctgaaatacatacaataattaattaattaatggtcttttttattgggacccgtcatgttgacaaatattttcccagaaagaacattaacttaag

SEQ ID NO: 9654 - DNA, 452 bp, Glycine max
  Clone ID: jC-gmle01810042g05a1
ctcctcaaaatcagttagtggaagttcagggctgcagaacagttcctttgtttctggcattgagtacaggaagcgtcctctatattctgtatttcccacaaagcctgctcaagtttcctctgtggaagacctctatgaatttatttgctcgggacctttacttgacaaaataggcatcacacaagagcaggtggccgagtccatcgataattggttgttatatggccggtacctatgcagactgtttcagcttaatgaattgttccttacagagcctcaaaaggctaggatttatcattactatgtacctgtctttctctggtgtgaacagcagattactgagcatcagtccaagttcaaagatggagaagatatacctgctttagtgattggttttagtgctcctcaaggttgtggaaagacaacccttgtctttgctcttgactatcttt

SEQ ID NO: 9655 - DNA, 460 bp, Glycine max
  unsure at all n locations
  Clone ID: jC-gmle01810042g05d1
atatatatatatatatataagtagtatatattgacaagccttacaagaccaacaagtctcctcaagaaaacaaaatacacaacacattttgtttcttacatcatttaacggggcacataattcacgatatcatccagctactacatacaaactcttgctactaacacatcttaatgactgtacataataataataataataatggggagcagaaggatgcacattgcacagaatcaattattaataaactcaaagcgcatgagaagctttacagngttgtatttatctcccttttggctatgcagtggaattgctcgaatgccacttctaagctcccagataggtaggcatgtttgtccaccaaagtcatctttctcagacatgtcatactcgtgaacttttacgcgaagcaaggccaactccggaacagtgagagggaactcaaatgcctcattccatg

SEQ ID NO: 9656 - DNA, 493 bp, Glycine max
  unsure at all n locations
  Clone ID: jC-gmle01810042g06a1
caggactccagaattgatgttttcttatgcctcatctgctcatgaacgaggcatacaagtcattattgctggtgctggtggtgcagctcacttgcctggtatggttgctgctcttactcccttgcctgttattggcgttcctgtgcgtgcttctaccttggatgggattgattcactcttgtcaattgtccagatgccgagaggtgtccccgttgccactgttgcagttaataatgcaactaatgctggattactggcggtgaggatgttgggtgttgccaatgatgatcttctgtcaaggatgagtcgatatcaagaggaccaaaaggaaagcgtattggacaaaggagataagttagaaaaacatggttggaaatcctacttaaacaatagttaattatccccattaatttggtggttattttgtaggctcgtttctcattnttggtcaactacaaattttgattagaaaagatttcacatggatggtgta

SEQ ID NO: 9657 - DNA, 520 bp, Glycine max
  Clone ID: jC-gmle01810042g06d1
caagaaattccatatttcaacatacaaaaagagaaatatcacaacagaagtcttacaaacaagcaaacatctcctaacaaaagcataaattaaactatattacaagttttattttgcaatattcggatgagtccgtataggatacaaatattcacggacatcttaattcataaggcattacaataattaataaataccccaaagcataacaagttaaaaaagaaaaagagcattggaacctatggagattggagtttcaataagaaaaacatccgcctccttctggattctgaaacccaatgttctcaacggcaccaaccgtcttgaacattctcctcttgtgaatctcctccatcagtgatcgttgcagttgttgtctcctcaggtccacgaaggaacggatcctggttagcctgtgcattccatgacacctgtgagaatccattctcatgttgcataactgtttggtgaaatcagcatccatcacttcttctctaggacaaaatcttatgcacttttc

SEQ ID NO: 9658 - DNA, 533 bp, Glycine max
  unsure at all n locations
  Clone ID: jC-gmle01810042g07a1
tgaagttgaagtcttgcccttctctcttcaactccaaacacaagacatcatcatccatggctgcctccgtctccactgtcggagctgtcaacagagctcttttgaacctgaatgggtctggacctggggtttcagctcccagttcatccttctttgggagcagcttgaagaaggttattggctcaagggtccccaacacaaagatttcctctggaagcttcaagattgttgctgtagaagagaagaaagagattgaagagacccagcagaccgacaaggacagatggaagggtcttgcctatgatatctcagacgaccaacaggacatcacaagaggaaagggtttggttgactcccttttccaagctccacaggatgctggaactcactatgctgtcatgagctcctacgagtaccttagcactggacttcgccagtacttggacaacaacatggatggattttacattgctccagcttttatggacaaacttgttgntcacattaccaagaacttcatgaccctgcccaac

SEQ ID NO: 9659 - DNA, 387 bp, Glycine max
  Clone ID: jC-gmle01810042g07d1
agggggaagcaaacattatttgtttacacaaactgggttactggataccctttttatggatcaaaaacaaaaatgcacacttttctgctaacaaccacacttttctgttaacaaccattggacaccttttgctcaaatccttcccactgaaatttaattgtcgtaatggattgacttaaattccccaatacaatacaattttatatcaaatgtcaaacatcaggggcagctccctgggacttttttagctttgctacaaaaacccacatgttggcaaggtcattttctagggatggttctctttgctttgattcttcaaacttcctttgaagctcgggttttttatgatcccaatctaaaagagcagattcatatgaaagctccctt

SEQ ID NO: 9660 - DNA, 403 bp, Glycine max
  Clone ID: jC-gmle01810042g08a1
acacgatgcaggaagcgacgaaggtgataataatcggtgccggaacttctggtatcgccaccgccggttgcttaacgaagcaatcaataccttacataatgctcgagagagaagactgtttcgcttcgctgtggcagaaatacacctacgatcgtctccaccttcatttgaggaagcaagtttgcgagttaccgcacttaccgtttcccaagtcttaccctcactacgtgcctcggaagcagttcatagactacttgggaaactacgttaaccactttgagatcaagcctctgtaccagcgtgcagtggagttggtggagtatgatggatggaaagggatttggagagtgaaggctcagaatagaagatctggtgagcttgaggattacgctggaaagtacct

SEQ ID NO: 9661 - DNA, 557 bp, Glycine max
  Clone ID: jC-gmle01810042g08d1
gtaaataacaaaaatgcacacttttattgattgcatcagatattgcttaaatagattaagttaaaaaactgaaaaactgaaaataacaactaactagctaaacttcagcaactaagcttaagctgctaagttactcacacataacaatcagacaacctaacaacaaactccttaaaacttggtaaataattaaacataaaaataaaaaataaaaaaccaaagctactgatgcatacatttgcacacgttcaaacaatcacaaatagatttacaagaaagaaatgaattttgcacataaactcacaacaaaataattaatacaaaattaaagcaacttttctccaaagtctttaatctctcttctccaagtaagaagaatctaggcccacaggataaagatctgctacagaagtagatgaagctgtccatggttcttcctttgagttactcagctcttggtaatacaatctcattttctccattttcttctcatccaatacctcaggtgtctctccagaaaactcttcatcaacaacaattttttcttctagcatgct

SEQ ID NO: 9662 - DNA, 505 bp, Glycine max
  unsure at all n locations
  Clone ID: jC-gmle01810042g09a1
gaagaagggttgaaggaagaaaaaaagaaaaacacagaaatggagggtgggaacaacagcagcagtaacaacaaccctgatgagttggcggtggggtgcttgctttcgatcaggacaacgttgggcgacgaattcgaaggccaggtcgtcaccttcgatcgcccctccaacattctcgtactccaggagccttccaaacctagccctcgtcgaaatcttaggttgctcaaagccaattacatcaaagacttcacctttctcggccatgcccaagaccctcttgatcccaacacctgcttccttgacctcaccgctctccaacaaagggaagatgttgctgttagacaagcggaggctgatgctgagaggattgnggttggtgttaccagcgaggcacagagcatctttgatgctttgtccaaaacgcttncagtccgctgggacangacagtcatagttgtgatgaatgaggtgcgtgtcagcagtccttatcactctgaaatct

SEQ ID NO: 9663 - DNA, 437 bp, Glycine max
  Clone ID: jC-gmle01810042g09d1
gactaaaaaaatagtgcaataaactaattctggttctaaaaaaattaataatatactgaataaagtgtcgaagaacaataattaaattaattcaaggaattaaattaaaacaataattatattgatcaactaaatctaccatatgaaaatttcattctttacttgtaaagagccgaaattatcttcaccttaataattgtagatgtagaagaataatcagaatcttcctaaatccacgtaatttcttcgaaaatgctttgcccaacacaatgatattgtcacaccagaagctatgcggcggcttccatttgatattccatttatcgcctggagatttacaatgctaatgacctatttctgcattacaaacgttgttgcccgaaattggacttcttacaaagagataattgtgcacaaagccggcaatacaaatgatc

SEQ ID NO: 9664 - DNA, 481 bp, Glycine max
  Clone ID: jC-gmle01810042g10a1
taacagccaaagcatggcttctctctcttgctccgccaacgaccttgccccactcttcaacgacaccgccgccgccaactacctctgcgcccaattcgattccatttctagaaagctcaacgtaacaacctacgccgtcgacaacacctaccttctgttttcagcgtatcttgtcttcgccatgcagctcggcttcgccatgctctgcgccggctccgtcagagccaaaaacaccatgaacatcatgctcaccaacgtcctcgacgccgccgccggcggtctctcctactacctattcggctttgcattcgccttcggcggcccctacaacggcttcatcggccgccacttcttcggcctacgaaaattcccgaaggactcccctccctccggcgactacagcttcttcctctaccactgggccttcgccatcgccgccgcaggaatcaccagcggctccatcgtcgagagaacacagttc

SEQ ID NO: 9665 - DNA, 444 bp, Glycine max
  Clone ID: jC-gmle01810042g10d1
aaaataacacacacttcacacattattacgacaattaaaagagggggggaaattttcaaatagacagagcatactcaacaagaggggcatgtctaatttcctttattgaattaaacaaaccaacaaacgaaagaaaacccaaattccagatcatgcagaggattccgcattttcaaaaaatctggcagtagcctgtggaacaaaaaaagctggcataagagttttaccagcaatttcaaaatcttgagaaattcccaagagaatatcaaaaactgtagactgtttgggattgtcaataaggaaactcaagtgccatgaagtttgatttgcccactcagaactccacatttcaaaaccattatttggaccacatacctttattgggaagatcaattcccaggaatggggttccgattttgtccacttacatgcatcgaaatgctc

SEQ ID NO: 9666 - DNA, 485 bp, Glycine max
  Clone ID: jC-gmle01810042g11a1
caaagattcagattgcggaaaatctttcggatttgaggaccaggtagggataagtcgatgggcttgtaacagagccacgaaaggagaggagttttggtttccaaaacctcgtttcttctcaatacaaaaaaaaaaaatgctgcagaagctgtgtttgatggcttctcatggatgccctcccggactttctttgcagcaagagctggacatggttggctgcaccattaccaaaggttgtaaaccattattgccttctcctgtattgaaactagaaattatcagatatgggtccttcctaaatccattcgacgagtctagcaagtcccagaaagagtggttcaattctaatcagattgtcaacatgaacttgtcgactcaaaggcctatgctcattgatgtccaagaaacctatccaagcccagtagatattggctttggcatcagtgacaatgcagtgagcacgataaaattttgcaatgtatcat

SEQ ID NO: 9667 - DNA, 539 bp, Glycine max
  Clone ID: jC-gmle01810042g11d1
cgtaaattctagattttagctacaaaaaagaatcaaagtttttcatgtttcagtagcatatcttagatcaaagattactgctatatgtgatgaatattagtggcactagcattacagcatgcgttaatcttttgcagagataatccatgcgctgataccaagcaacaatttcaccaaaacagtatttcatcgcaaaattttacattacactttacaatttgtcttaccgccctaatgccaagcatacgagtatgttgcttgctttgtttattaaaatgaggtactaaccataccgtaagtacaccatccaagtgctgatcaagccaatcatccacaatcttgtgcttccaacatcaagcaaaggttcatttggtttgaaaccaagattgctttgtatcacatccccaaaagacatggccatggacatccaactgatcaggtataatggttgttccaatgtgtggccttgcgaagcttacagctcttcaaactcaacgtgatcatgtccttagaggagtgctcaagctaaccttagcact

SEQ ID NO: 9668 - DNA, 475 bp, Glycine max
  unsure at all n locations
  Clone ID: jC-gmle01810042g12a1
cgccggccgccccacgccgccgctgacgacggagccatccaccacaagaagaggagggactcctccacttcctctcccaaggcctccgacgcgctccctctccctctttacctcaccaacgccatcttcttcacgctcttcttctccgtcgcctacttcctcctccaccgctggcgcgacaagatccgcagccacacccctctccacgttgtcactctgtccgagatcgccgccattttctccctcatcgcctccttcatctacctcctcggcttcttcggcatcgacttcgtccagtccttcatctcacgcgcctnccacgactcctgggacctagacgacgccgtaacagctccctcccccgcaattaccaaattgccctcacgggataccttaattattttctccgaggacgacganngagatgtgaactccgtcgtcgagggcgtcacgcccttctacgcgcttgagtccc

SEQ ID NO: 9669 - DNA, 488 bp, Glycine max
  Clone ID: jC-gmle01810042g12d1
gatagatatgctaagcatattatataggggaaaagaattacaatacaacacgtcaaatgtcttggttgaggagaaaaaagagcgttaacacccactcaatggctcggcagaacaagcaacgaaaagtatacaggaaagaaaggaaggatccagaaggggacagggaacatgtggagtagaactcttctttcctctctccaaataattaaagatctacacagacagcaatgcaaagccaaacgtggatgacaacaatctaatctaatgtttctccattttccttcccaaatttcgcttaccctcaattttttatttattctggagtccacaattaatgactgcaaccacgtccttgacctcaagattatgatattttggttacatctttgcttgatctgttgtatttcatatggctgttcactagctgccctgctgcaatggcagacatcagagacagctctcctgctaaaacagatccagcaacaatg

SEQ ID NO: 9670 - DNA, 466 bp, Glycine max
  Clone ID: jC-gmle01810042h01a1
gtgagcttcattacagaacaagttgccttttacactggtcccacagttggaggacttctgaatgctacatgtgggaatgttactgagctcataatagcaatatttgcccttagcagtaacaaaattgccgtggtcaagtattctctgttgggttctattctttcaaaccttcttctggttcttgggacctctctattatgtggtggcattgcaaacgttggagtggaacaaaaatatgatagaagacaagcagatgtgaactcacttatgctgttgttgggattgttgtgctacttgcttccaatgctgttcaaatacagtggtgcctcagctgctctcactgtagacccttcactacacttgtcaagagcttctagcattgtgatgttgattgcatatgttgtctacattgtctttcaactgtggacacacagggagttatttgaagaagaaaatgacggtaaag

SEQ ID NO: 9671 - DNA, 410 bp, Glycine max
  Clone ID: jC-gmle01810042h01d1
tttttttttttttttttttttttttttttttttttttttttttttttttttttttgttttttttttttttttttttttttttatatatttatttaattaaaaaataaaattaaaaaaaaaaaaaaaaaaaaaaaaaaaaaaaaaaaaaaaaaaaaaacaaaaaaaaaaaaagaaaaaaagaaaataaacacaaaaaaaaaaaaaaaaaaaaaaaaaaaaaaaaaaaaaaaaaaaaaacaaaaaaaaaaaaaaggggtattcaaaaaaaaaaagcaaaaaaaaaaaaacccccacatttagggccaaaaccagggaaaaaaaaaaaaaaaaaaaggtctatgaaaaaaaaacaccggggaagaaaaaaacaatgagaaagaaggggggaattaaaaaaaaaggttctggag

SEQ ID NO: 9672 - DNA, 535 bp, Glycine max
  Clone ID: jC-gmle01810042h02a1
aaagcaagttgttttttttttagagaagagaagcaataaatcaatcaatcaaatcattcttacattgttgttacgatggaatcaccgttcagaccagagattctgaagggaaaggttgctctaatcaccggtggagcctccggaatcggattcgaaatttccacccaattcggcaaacatggagcctcggtcgcgctcatgggccgccgcaagcaagttcttcagtccgctgtctccgttctccaatccctcgccattcccgcggttgggtttgagggggatgtgcggaagcaagaggatgcggtgagggtggtggaatcgactttcaagcattttggaaggattgatatacttgtgaatgctgcagctgggaactttctcgtttctgcagaggatttgtccccaaatggctttcggacagttctggacattgattctgttggcacattcacaatgtgccatgaagcactaaaatatctcacaaaggggggaagaggaaggagcaactcttctagtgggggatcaataataaaca

SEQ ID NO: 9673 - DNA, 372 bp, Glycine max
  Clone ID: jC-gmle01810042h02d1
aaacaaatacaatatattacaaatttctaaatataagaaaacaagtgtcatgtttgtctgtgtcatgtcaacaattagcattcaggaattgagagtaggtagtagtagaagaagataattagagtgactaagcattacatattaaacccttgaaacatcatgttatacaaattcaaaacagtgtgaaaatcttttcctgtttgaaagaaacaaatatgggtccattcacaccgtaaaagtcatagtccacttcaacaatgtaacattcaatatatgaggagacgtaacagcttcattacttgaccaaattctttaatagttttggtggctagtgttaggacatctacataagctcttaatgatgtcccgaga

SEQ ID NO: 9674 - DNA, 461 bp, Glycine max
  Clone ID: jC-gmle01810042h03a1
cacacatatatacatgttgctgttttgttggtgaagaaatcgaagatattcaaaggcacatcatagtttgtgtgtatatatatatatagtcttcttcacaagaaatcatagtgaccaattttgccaccctaattgagctagctattcaatcgatgaaggacaccacggccggcgccgccgtggagaccgccgcaggctacggcatcaagccgtcgagctccgatggcagccaccttttggtgagaagggccatgcaattcaccatgttcgttgttgggtttgctgtgttgtggatgtttctctataacactgcctctccctttggattccatggcttctcgcattacttcattgatgagtcagcaaaagctggatatgatccgaagctacaaagtgttcttagaaacgcatctatgaaagataagacagtgataatcacaactctaaatgatgcatgggca

SEQ ID NO: 9675 - DNA, 322 bp, Glycine max
  Clone ID: jC-gmle01810042h03d1
catgaacgaaatacaaattatttttgctgcccggggggaaacaaggggacttatttctgaatctgttggggcacagattgctttttggaacactgacagatgcatttctggagctggggtttaccgatccaaaaacctgggggggaggctatttgggtaaatggctaggcctactaaggcaagggcctacgacggcactcataatggcggcattaacgaattttcctgcgggtgggactatgaaaagtgctggcatgggattatcccacttctccccaaaaccatacagggggatgttatctctggctgtgcttcttattgc

SEQ ID NO: 9676 - DNA, 498 bp, Glycine max
  Clone ID: jC-gmle01810042h04a1
tcactcactcactcactcactcactcgcaagcaaaaagaaagaatcccaggcgaggaaaagatggaggggaaggagcaggatgtgtcgttgggagcgaacaagttccccgagagacagccgattgggacggcggcgcagagccaagacgacggcaaggactaccaggagccggcgccggcgccgctggttgacccgacggagtttacgtcatggtcgttttacagagcagggatagcagagtttgtggccacttttctgtttctctacatcaccgtcttaaccgttatgggagtcgccggggctaagtctaagtgtagtaccgttgggattcaaggaatcgcttgggccttcggtggcatgatcttcgccctcgtttactgcaccgctggcatctcagggggacacataaacccggcggtgacatttgggctgtttttggcgaggaagttgtcgttgcccagggcgattttctacatcgtgatgcaatgcttgggtgc

SEQ ID NO: 9677 - DNA, 401 bp, Glycine max
  Clone ID: jC-gmle01810042h04d1
gaataaataaatttgttacttatggactatcaaaaaaagtacatgttttatcgcggggtgtgcatgcctatgaaataatgcatgtctaatgatcatccctttctcttttatgcagaggaaactgatacttttgttcagggacaatggaacactttgggaagaaactataattgccaaaggccataaagataaatcttccccttcctgtgtatacatttggaccgcaccaaaaagctttatttgtataggtaccacaaaaggcaccaagtaacttggagggcgcacccttcttatacacctcagctaggtgtgaagccctttcaattcttgatgaaaggaaagtttttgcaccttaagtgggattaggattctcatccatagctctgccccccctgaaacca

SEQ ID NO: 9678 - DNA, 492 bp, Glycine max
  Clone ID: jC-gmle01810042h05a1
ccatcgtcctgctcatttggcacatgcttctccccctgaatactttgtccgcctggagaacacaacttacaaagacgatctatatttaaggaagaggacaaggatgcgtcggtggctttgttgtacttgtcaggtggaagagtcttacccatcaaatgaaaatgaacacctgaaaagcccaaggaattatggagatggcaaccaaaaaggctcaaaggtgtcagctcctgtcaaacctgaaacacaaaaggcacctccacctattgaagctccagccttgtctttagatgagctgaaggagaagactgacaactttggttcaaaggcattaataggtgaaggatcgtatggaagggtgtattatgcaaccttaaacaatgggaaagcagtggctgtgaaaaagcttgatgtttcatctgaacccgaatcaaataatgagtttttgacccaggtttccatggtctcaagattgaaggatgacaattttggtga

SEQ ID NO: 9679 - DNA, 548 bp, Glycine max
  Clone ID: jC-gmle01810042h05d1
ccagctcaaatggtaaatctcattcataaaatatggttgaatctcgtgtctacataaaaaattccacatattaaaggaatatcatacacgatacatcatatatatgcccatattttttgttttttggggcatttgtgatttctttctctctcatacatgagtattacgaagtactaatactatctaatctattggggctgtcatttaatacatgaatattccctctcatcactaaatcaatataatttattgaattattctctaacctccactatacaaaccttatccaacgaacatgcgtttaaggaactatatatgctacaagagagctcatatgaattgggggtggaccaggtgagagtaacccattctttgtcaactttctcaacaaaggaatgtgcctttgggattgcatcaaattggagtttgctgctttgcttcgttaacttctttacaagtccatcgagaatatcaagtcaagttttctttcgaatcatgattttaggcgaaatttgatcccaatcttggctcccgtgaattattcaacc

SEQ ID NO: 9680 - DNA, 558 bp, Glycine max
  unsure at all n locations
  Clone ID: jC-gmle01810042h06a1
gcatgtatctatgaatgatggaaccaccacaaacgaggttgatgatcaacgttttcatagtgagtttcttagcactacttgtgaacttggtggtgggagtgctcggcgctgataactatagcagagatgattttcctcttgactttgttttcggttcaggaacctctgcttatcaggtggaaggagctgctaacaaagatggaagaactcctagcatctgggacacctttgcctacgctggatatgcccatggagaaaatggagatgtagcctgtgatgggtaccacaagtacaaggaagatgtgcagctaatgctggaaacagggcttgatgcctatagattttcgatttcatggtcaagattgttaccaaatggcagaggacccgtcaatcccaaaggattacagtactacaacaatctcatcaacgaacttatcagcaatggaatccaaccacatgccacgctacacaactntgatcttncacaggtacttgaagatgaatatggaggatggattagtcgtgacatcatangagacttcacatactacgcagaag

SEQ ID NO: 9681 - DNA, 479 bp, Glycine max
  Clone ID: jC-gmle01810042h06d1
gcccaacatagcctgtgtcatatctaggctattaagaaacgctttaatttatgctaatcttgaagacatgcactcactacactgatttgaatagtgtaatttccgtgtccatgtacatttctataatatatttagaagaaaacaaaaattggaagaaggataaaacataatattaataagaagcaaggagctgggggaacttcatgagactaagattccctcacatctttgttctcattattatggggttgccacattttcctttgcctgtggagcaatttcttctccatcacttccaggttcactgccaggaactcccaggcttagcagcacttcctcccacttcttagcaggccccttccaggaaagatcttgagccatgcagttctttattatttctgtaaaagctggagttccatagactgcaagggcccttttgacagtctttgctatagcatccacatcagctggatccacag

SEQ ID NO: 9682 - DNA, 423 bp, Glycine max
  Clone ID: jC-gmle01810042h07a1
cgcaaaatgataggaaagaaattcttatgcgttgttgtagcggtggcctttgttatgataacaaaggtgccccaaaatgtgagtgctcaaaactgtggttgtgctgaagggttatgttgcagccaacatgggtattgtggtaacggtgaggagtactgcggcacagggtgcaagcagggtccttgttattcgagcacaccaagtactaacaatgttaatgtggctgacattgtcacaccacaattcttcagtggcataattgatcaggctgactctggctgtgctggcagaacttttactcacgagatgcttttcttaatgctctcaattcctataatgactttggtagacttggttccaggatgactccaagcgcgagattgcagctgcttttgcccatttcacacatgaaactggacattt

SEQ ID NO: 9683 - DNA, 530 bp, Glycine max
  Clone ID: jC-gmle01810042h07d1
aaataaataacacaatgaatggaatgtcttgtatatacaataaacgacatggtacgatgcaaactagtaagatcaatatacaatttgcctctagggcgtatacttaatttaacttggaggattgaggaagccataattagaatgaaaatgtgaaaactaaaagttatttggctaactattgtaccaatggttgatgaaaaattcttttctccttacaaaacaatgatattcactttatcatgaaggaacagtttcttgcagcttcattaccctccaatcatgtttctgtacaactcgtactcgtatatcttatgcttatgagaaaaatatgaatggaaaaagagatcaagaatatatatatatatatatatatatatatcatgcatatgcttgaagcccgaaggagttgaatttggtgggaacgaattatatcatgttctcaaacttgtcaagtttctttacccgttgcatagaccttaaaaatagagcccctcaaatgcctgcaccaatgaatgatccatttgcaaaag

SEQ ID NO: 9684 - DNA, 253 bp, Glycine max
  Clone ID: jC-gmle01810042h08a1
ctcgagccgttctcactgtctctccagagaacttgatagagagatggcagctgcaacatctggtgctgtgttaaatgggttgggatcttccttcttgagtggaggaaacaggagccaaacccttctggcctctgctattggaggcaaagttggtgctgctgttactgttaatcccagaaaactcattgggcgtactgctgctccaccagaaaagtcatggctccctgaggttaaaagctgtgggattttgact

SEQ ID NO: 9685 - DNA, 504 bp, Glycine max
  Clone ID: jC-gmle01810042h08d1
ctgttggaatctcggcaccagcttctgaggtggatcaccaccactgtataatgtcttcctgtaggataagagagagatggaacaaagtaaacaaaaattagatgtccattccataagttaataatgctgttcgtgtaaatcactataagattaaataattctgataatcatataagattgaatgtgttgaacacaccacttgctatgtaaagtttataagacaggaccattgacagttggtggggctgagaaaaagcaaaagctaacgttactgttgtgatccactcatatccaaacttaataatgttggataacaagttccaccttatagttagaaacaaataaaaggatgtataaaaaaaattgaatattaagatttttttgtaataaataagtcactgaaagttcaccagtatcatattcttagacacgaccagatcataaattttaaataaatagttattgactttgacaatcaggacttgatcagtccccacacaaaat

SEQ ID NO: 9686 - DNA, 271 bp, Glycine max
  Clone ID: jC-gmle01810042h09a1
tctgtgttgcgattatgctagttttgatggtttgattaccaagcaagttatgagcaagatggcagaaatgataaacagtctttgtggtggatgatgaaaaattgatgcgtgaaaggacacacctgctgttgacttgttgttcaagaatggcaatttgtacgatagatgtttggagagttgaatgtggaatcccttctggatttccgatcacagttatacgtactagcatttctaatgatatgctcattagatatagctatgaaagattact

SEQ ID NO: 9687 - DNA, 489 bp, Glycine max
  Clone ID: jC-gmle01810042h10a1
aaacattgttattcatatttatgtcacccgagaatcagatcctccattggaagagggatatagttacaaaccaataaaatcttcattctgtcctatggctagtgattgtggcatgtctgttttggttggtacaggagacaatttttggtctggactatatgtcatctcatctaccgttggctttgtgatattgctggctttgttgtatgtttactacgtaaccccatttcacatagaaacatggtggtacaggggactactatatgtaatctgcatggttgcaagtgttgttatctttggtggttctgtggttgcaatgtggcatatttgggaaaagcaaaattctttgaaggacaagtccaatgatacaaaggttgataagattcatcaaaatggctctttggctaccaaggatcaaagtcaagacagtagtattgcaaagtcaactgtcattcattatggttccaggccacactttaaagaaattta

SEQ ID NO: 9688 - DNA, 346 bp, Glycine max
  Clone ID: jC-gmle01810042h10d1
ggaaaaaaattggacgggctttatgagtaacattccactcccaccccaaaatacaaagttgagttgtacaaaaacaaaaatgacccgcatattccttacaacatatcccgcatatgtttgaaacgactcatctttgcctaaattacatttttttccgggacaaccctcattttttggaatatgaattgaactaataaggggaaataatcattttagccgaaaaaagctgaatcaaacaaggtggggctatatgaattgctctaatgaggggaaaaaattattttagctgaataacgctaaatcaaacaagttgatcaccggggacctgttgaaccaaacttcccat

SEQ ID NO: 9689 - DNA, 399 bp, Glycine max
  Clone ID: jC-gmle01810042h11a1
aacagtttggaaccccccaaaaatgggtgcaacgacggccattgccgcactctctcttcactgcttctccaaatcccacacacacttttcaccctttcgcactctccctcgcctcacatgctccttctcttcctccatcaaattcaacatctccttcgctccccctaagcccaagcccaagcccgaacccgacgcctcaaacgagcccgacgggccgctcctcatcccgtggatcgtccggcgcgaggacggcaacctcaggcttcaatcagaacctcccccgagccttctcaatgccatcggcaccgtccaaacctgaaccaaaaaggacaataagcaaaccaaaaccaccgacgacaccgacagcaacaccactaaacctcaaaggctcgctacaca

SEQ ID NO: 9690 - DNA, 521 bp, Glycine max
  Clone ID: jC-gmle01810042h11d1
gaacaggcgctctaggttaaacttgtatcattttacatacaggcacgtaatcaccgtttacaacaatttcaataaagataccagcaatccgccgggttggttcacgtccatcggaaaaagtcatatctcttctaagcagtagtttaaaatcttctcccagttcttctagactatacatatatgctgattgcaagagcatgatattggcttcacgttaaacactccggaaagtagtgtgcactgccagggtatcagaattcaatagctcaaatcaaacaagtgctgaacaacactttgaaaatagcttcagagctgttctaatatgaataagaatgaggaatgtttctagctccagtaatttaagaagcaactttattagctcttccaccccaatgcgttgagattcgttttatttaactcaatatactttcctaacccaaggtctggtggaagtctaaacccaccaatgcgtactcgctttaatgaatgaatctcaagtccagctctttttgcgagttcac

SEQ ID NO: 9691 - DNA, 423 bp, Glycine max
  Clone ID: jC-gmle01810042h12a1
aaaaaattaaaatttataaaaaagaaagaagagagattatagaaagcgaaagagagagggttcaagttcaacaagcctctcttctttgtgttcttgcgaagaagaaaaatccctccgagtcaactcggacgagttgcctcatcgtacggttccttcctcggactctttcctcttcttccccttccgaatcaccgttcgcagggttttgctctctctctctctctgtctctcgcttcgtttctagttcagatctcgcattggcttcagctgaaaccacgcggtttaatttcattcccttaaattagggatttatcttatgtcgaaacacttgaagtgatgatggtgtggttgttgtgagaaattaatgatcgttgagggtgtgggacattggtacagagctttcagtgtagttgacaactacct

SEQ ID NO: 9692 - DNA, 459 bp, Glycine max
  Clone ID: jC-gmle01810042h12d1
ggggaaaagggaaaaaaaaaaacccccccctatgggggcccccccctggggggggcccaattttttccccggggggtttcccaggagggtcccacccaaagccccttcccaaattttaaaaaccaaaacccttttttagccccccctttttttttcccggaaacccaaaaagcctttttttttttaatttaaaaggccccccctaaaaaccccgggggtgggcaaacttaaaaagggggggggggccccccccccttggtttcgccccggcccaaggggggggggtttcccttgggaaaaggcgggaaaccaaattttttaaaatttttcaaaaaaaagggggcctcccccccgggggttttggggcaaaccccaaaaatttttgggggggggggggggtttatgggcccccttgggaccaaaagaggtttttgaaaaaagccccctcccccccctccc

SEQ ID NO: 9693 - DNA, 251 bp, Glycine max
  Clone ID: jC-gmle01810043a01a1
taagattgagacaaggcttttttgttggttggagatgcatgattgtggtgtgctttgttttcatttcatcatatgacagccttgtgggtttctttggtgtttcttgatgcatacttaatttactttattattgtgtatttatctcttccatttacaaaaaaaaaagtttgtgtaggtttccttctttgaagtaaaaagaaattaaatatgtactgaaaatggaataatagtgtgttttatttgtgttttat

SEQ ID NO: 9694 - DNA, 251 bp, Glycine max
  Clone ID: jC-gmle01810043a01d1
ataaaacacaaataaaacacactattattccattttcagtacatatttaatttctttttacttcaaagaaggaaacctacacaaacttttttttttgtaaatggaagagataaatacacaataataaagtaaattaagtatgcatcaagaaacaccaaagaaacccacaaggctgtcatatgatgaaatgaaaacaaagcacaccacaatcatgcatctccaaccaacaaaaaagccttgtctcaatctta

SEQ ID NO: 9695 - DNA, 251 bp, Glycine max; identical to SEQ ID NO: 9693
  Clone ID: jC-gmle01810043a02a1

SEQ ID NO: 9696 - DNA, 251 bp, Glycine max; identical to SEQ ID NO: 9694
  Clone ID: jC-gmle01810043a02d1

SEQ ID NO: 9697 - DNA, 396 bp, Glycine max
  unsure at all n locations
  Clone ID: jC-gmle01810043a03a1
gtacttaacatcaccaccaggaaatccccgtgtggtgaaggcaccaacacatgggacagatttgagctgcgtgtgcacaagagaattattgatctctacagttcccctgatgtggttaagcagattacttcaatcacaattgaaccgggtgttgaggtcgaggtcaccattgcagatgcttgatttttgccccattttttccccgcatgctagtttcttttgtaatttatcctttttgctaggtatgttgagtcccatatgttagggttaatgcatttccttttgccgttaaaatttttgatgttgattattgtggaaggggaattattgacttgatcgattatcttttgttttatgtttatcgnnncanaaaanacaaaaaaaaaaagaatataa

SEQ ID NO: 9698 - DNA, 246 bp, Glycine max
  Clone ID: jC-gmle01810043a03d1
cggaaaaacaaaaaacaaaagaaaaacgaccaagcaaagaatccccctacccaaaaaaaacgcacaaaaaatctaaacggcaaagggaaagggatcacccccaacaagggggacccaaaaaacctagcggcggggggggatgccaaaaaaaccccgccgggggggaaaaaagggggcaaaaaacaggctatggaaggagggacccccgcccgcaagaaagaaaaagggggacaaaaaaaattcggg

SEQ ID NO: 9699 - DNA, 584 bp, Glycine max
  unsure at all n locations
  Clone ID: jC-gmle01810043a04a1
gtgagattgagaatccgatccttcgtttccgaaattctcgcgagatggacgagaacctgctcgacgatattatccggaggctcgtcgcggcgaagaacggtagaacgacgaagcaggtgcagcttacggaggcagaaattcgacaactctgtgtttcctccaaagagatctttctcagtcaacctaatcttctcgaactcgaggctcctattaagatttgtggagatgttcatggccaatactcagatcttttaaggttgttcgaatatgggggatacccacctgaagcaaattatttatttctcggagattatgttgatcgtggtaagcagagcatagagacaatatgtttactcctcgcctacaagatcaaatacaaggagaatttctttcttctcaggggcaaccatgagtgtgcatccatcaatcgtatatatggtttctatgatgagtgtaagaggaggtttaatgttcgcctctggaagacatttactgattgctttaattgccttcctgtcgctgctctgatagatgagaagatccttngcatgcatgggtggactatcgctgatcttaaacacttg

SEQ ID NO: 9700 - DNA, 406 bp, Glycine max
  Clone ID: jC-gmle01810043a04d1
cgcgcgccacgactgatcaagaccggtaccacggtccgagacttaactgtcccagagtccgaccgaagcctcaccctagtccgagcggcccgccccctttttttatttattttcttgtttacttttattcttttgtattttgtaattttatttatgtatttactcacgctatttgtttaattctagatatgctttgatctcaacaatgaagaaagaacaaacaataaacatcaagaaaaaggccccaaacaaaaaataacagcaacccacaacaagagacaacaaaaaacaaaaaaaaaaaacaaaaaaaaagaaaacaaaaaacaaaaaacacaaaaaacaaaaaaaaaaaaaacacaaacaaaaaaaaaaaaaaaaaaaaaaacaggacacccaaaagaagatg

SEQ ID NO: 9701 - DNA, 519 bp, Glycine max
  Clone ID: jC-gmle01810043a05a1
aacgaataagaagccttcacaccgcttcgttttgtggtgcttgcttctttttctcttccttttcgcttcttactagtattcctttcttcttcatttcgttttctccgccgttttcgtcactcagcatcagcagcaacagcaccaggtgtctactatctgactacacatgtgctgtttacattgtctttcaattgggtgaagtctgactgaagagcaatgcagaaggataccagtaccactgccccatcaaccacaagcggtcgggttaggcaccgaaaacgctcaaatgaggttattccggaggttagcaaagcaaatgggacccaattactggttaatgacaaaagcaaatacaaatccatgctaattcgagcatattcatccgtatggatgattggcggctttgtattgatcatctatatgggtcatctctacatcactgcaatggtggttgttatccaaatcttcatggcaagggagcttttcaatctactcaggagagctcatgaagataggcag

SEQ ID NO: 9702 - DNA, 559 bp, Glycine max
  Clone ID: jC-gmle01810043a05d1
aatggaaaacaatttatatcctattcatcatataatttgttcacacattacaatctgcgcttccattcacaatataggcaacattgatagaagaagaaaaataattgttgatcgcattagaacagaatatattatcaaaacgtgattcaagctacatttaaggtaattgaaaaatattaacacccctcacctccaggaattgaatacatcacaggcgttcaattactgccattggccatgtcaattatttaagatcacgagtgaacggtagctgttcaagcaaagccatcaatcaactattcaaacacgggcgagaaaaacagaatggaactaacggtcaacatacactatgcacatcttgacagcttctgaacctttgaatcgtctcacccaaaagatagaaaacgcatgtacagagtatcttttcctttccccctgtatgtaaaggaatacaatagggtgacagaacaaatacacctcgccatgaatctaagatttccttgtaatcccctgttggaaaatttccccaagccttcaatatagagcttctggttcatcg

SEQ ID NO: 9703 - DNA, 552 bp, Glycine max
  unsure at all n locations
  Clone ID: jC-gmle01810043a06a1
gtttgttgttgtaactcgttcttcttcttttgttgttctgtgtttgtgtttgttttttctctcacctgaaaatgtcttgctgcggtggtaactgtggttgcggaagctcctgcaagtgcggcaacggctgcggaggctgcaagatgtacccagacttgagctacactgagtcaaccaccaccgagaccttggtcatgggagtggcacctgttaaggctcaatttgagggtgctgaaatgggtgtgcccgctgagaacgatggctgcaaatgtggaccaaactgctcctgcaacccctgcacttgcaagtgaggtgttgggagagcaagcttcaagcagagatagcccttaattaggaataatgataaactattaatgtgtagctaaaaacttatgtattatgtctgtgatggttttcgtgcacttctggtgtttgtgttaaacaaacatccttagaataaagtggtcatgtcttgcctttcagcaagttcaagtgttttggacttgtgatgggtgtgttaagctcatggntgcttcttttctttttttttta

SEQ ID NO: 9704 - DNA, 425 bp, Glycine max
  Clone ID: jC-gmle01810043a06d1
catagttcaaattagccgaactttatacagaagcgaccaattcccaaacattaaaaaaaaaaaaaaagaagccaccatgagcttaacacacccatcacaaggccaaaacacttgaacttgctgaagggcaaaacatgaccactttattctaaggatgttggtttaacacaaaacaccagagggcccgaaacccatcacagacttaatccataagtttttagctccccattaatggttaatcattattcctaattaagggctatctctgcttgaagctggctttcccaacacctaacttgcaagtgcaggggttgcaggagcagtttgggccacatttgcagccatcgttctaagggggcacacccatttcagccccctcaaattgagccttaacaggggccactcccatgaccaagggctcgggg

SEQ ID NO: 9705 - DNA, 509 bp, Glycine max
  unsure at all n locations
  Clone ID: jC-gmle01810043a07a1
gttatatcctctctaatgttgggttacctaaatggagcagcacagaaattaggaatcaggagcctcataccaatggtcctgttctggatgatgttttgctagcagacccagagattgcctatgccattgaaaatgaaaaggtggttaataagaccataaaaatatacaacattgatcgtgctgcatgtggacgtatagctggtgtcattgcaaagaagtacggtgacactggttttgctggacagttgaatataacatttacaggaagtgctgggcagtcatttgcatgctttctgacacctggaatgaacattcgccttgttggagaggctaatgattatgttgggaagggcattgctggaggtgagttggttatcactccagttgacaagaccggttntgaacctgaggatgcagctattgtagggaacacttgcttgtatggtgcaactggtggacaggtcttcgttagagggagagcangggaaagatttgctgtgagaaactcg

SEQ ID NO: 9706 - DNA, 559 bp, Glycine max
  Clone ID: jC-gmle01810043a07d1
caaggagaaaacaatattttttcattaatcagaggagagaaaagatgactaggcatatcaagccccaactaatttattttcaccgtccacaaaaatcccaatcagattcgaatcaactgcattttatatacagttttgctttcacatggctatacaaaagagaatgctaatgctttagatggatgtatacggggtgcatcgtactgctggcaaaaatgatcttgagaatcaatgcagcgaccatggtttcaagggatagtttaatccccatattttggctagcatttccaccttattgatagcttctccaattcctgtacaaatcagggatacaacaatggctccatagcctggcgtaatcaatgtaatgtaaccttgcatcgtcaccctaagcagactgataagtgacctgatctgccgtagttgtgtcgtacttggcatttgcctcaggggtatcctcttcactaggtggaaccagctgccaaaatagtgataaatacttctcccagtccttcagaatagccgcaccttttgtactaccgttttttcaacatgagct

SEQ ID NO: 9707 - DNA, 514 bp, Glycine max
  Clone ID: jC-gmle01810043a08a1
ctgctcagaagataagggaagcaattgaagtggttacatatgagtatatatggtcacagatagatgtgattagaggtcaggagcaactggataatgcaagggctttgttctttggacaaaatgaaggaaaggatgccttgttttatgggaaccctaaccttcttattacaagttggatgagcatgccaatgcacgaagcagattttggctggggaaagcctgtgtatttaggtctaggaagtgtatctacacaagatagggcactgattattcaaagccctgatggtgacggctctattattctgtccatacactttcagatggaacatatgcagcttttcaagaaatatttttatgaagatatgtgaactatattcacatcgctactatcttgaacttcttgtatgggagcttaatttacgtgtgatctgcaatttctcatgtttaataaatttagttaaccatgtgggttaactataagcttgaatatgactgattagctataatcttggtc

SEQ ID NO: 9708 - DNA, 514 bp, Glycine max
  Clone ID: jC-gmle01810043a08d1
gaacaaaattatagctaatcagtcatattcaagcttatagttaacccacatggttaactaaatttattaaacatgagaaattgcagatcacacgtaaattaagctcccatacaagaagttcaagatagtagcgatgtgaatatagttcacatatcttcataaaaatatttcttgaaaagctgcatatgttccatctgaaagtgtatggacagaataatagagccgtcaccatcagggctttgaataatcagtgccctatcttgtgtagatacacttcctagacctaaatacacaggctttccccagccaaaatctgcttcgtgcattggcatgctcatccaacttgtaataagaaggttagggttcccataaaacaaggcatcctttccttcattttgtccaaagaacaaagcccttgcattatccagttgctcctgacctctaatcacatctatctgtgaccatatatactcatatgtaaccacttcaattgcttcccttatcttctgagcag

SEQ ID NO: 9709 - DNA, 520 bp, Glycine max
  unsure at all n locations
  Clone ID: jC-gmle01810043a09a1
gcaagactgatcaagtcgtcatcgtctttggagcgggtccggttgggctgttatgtatggccgttgccaaggctttgggagcgaggagggtcattgcggtggatatccagcaggagaggctggatttcgccaaggggtatgtggcgacggatatctttgtcccggaaccacgaggaaaggacgagacgcccgatgcgtactgctcgagaatgtctgaattgatcttgagctcgctcaacatccccgctcttggccctggcggtattgacttggctatcgaggcgaccggagcaccttcgtgtgtgcaaatgggtatccacgttctcaagccgaccggtacctacgttcaggtcggtatgggatccaacatgaccgtccccgtacctctctttgacgtcataaccaaacaactaaacgtaaccggttcattccgatacggcgctggggactaccccttggccatctctctcgtcgaaagaggatnggtagacctcaagccactcgtcacgcaacgatatga

SEQ ID NO: 9710 - DNA, 371 bp, Glycine max
  Clone ID: jC-gmle01810043a09d1
gcgtggcacatcaatgcatagaaaaactcataactatttgggagtgtgcactactaggcaactcatgggggtggacgcataatacacttgataacaggcttgccattagcgaccttgccctgtctggtcaattcgaacgcctccaatgcatccttaaagtcatatcgtagcgagaccagtggcttgaggtctaccaatcctatttcgacgatagacatgcactgtgcgtcttgcacatgaccgaatgctaattacaccggattcactagcatgaacgcttaggactctttgaagaggtacggggacggtcatgttggatcccataccgacctgaacgtcggtaccgggcggctcgagaacgtgtataccca

SEQ ID NO: 9711 - DNA, 478 bp, Glycine max
  Clone ID: jC-gmle01810043a10a1
gcgtggaggcgctatggtaaaaagaagctggaagagtctcttagggaagaggagaacaggctgcaagatgcattgtccaaagcaggtggtagttcaccaagtctaggtgccacaatatatgcttcaaggtttgcagctaatgcacttagacttttacgtagaaatggcacatggaaggccagggtgccagagagaatatcacccatgttgctgcagaagcctgctgagcctgattttacatctgaagaacaatagttgtggaaaaaattggtggttctgtaataagaaaagaagggatgagagtgaaggaaaattcacatcaaatgaccttttttgatagagggccaaaatggcatttcgtttatttattctattttttaagttagtgtaaagatgtctgtaaaatatacactatgaagctgtatatataaatatatgattgttgctgaagtatttcattcgtaaaaaacaaaaataa

SEQ ID NO: 9712 - DNA, 464 bp, Glycine max
  Clone ID: jC-gmle01810043a10d1
acgaatgaaatacttcagcaacaatcatatatttatatatacaacttgatagtttatattttacagacatctttacactaacttaaaaaataaaataagataaacgaaatgccattttgggcctctatcaaaaaaggtcatttgatgtgaattttccttcactctcatcccttattttcttattacagaaccaccaattgtttccacaactattgatcttcagatgtaaaatcaggctcagcaggcttgtgcagcaacatgggtgatattctctctggcaccctggccttccttgtgccatttctacgtaaaagtctaagtgcattatctgcaaaccttgaagcatatattgtggcacctagacttggtgaactaccacctgctttggacaatgcatcttgcaacctggactcctcttgcctaagagactctttcagcttgtttttaccatagcgcctgcacgc

SEQ ID NO: 9713 - DNA, 318 bp, Glycine max
  Clone ID: jC-gmle01810043a11a1
gttttcttttcgttcgcatcttctctctctctcagtgtgtgattccgcagaaagatgaaggtggtcgccgcgtatttgctcgccgtcctcggtggcaacaacagcccctccgccgatgtcatcaaggaaatccttggctccgttggagtagaagcagatgaagataggattgaatcgtttttgtctgaagttaagggtaaggatatagttgagcttattgctgccggtagggaaaagttggccacggttccttctggtggtggtggtgccgttgccgtcgacgcagctcctgtgggaggtgctgctgctgctgctcct

SEQ ID NO: 9714 - DNA, 593 bp, Glycine max
  Clone ID: jC-gmle01810043a11d1
accaaaatgaaattccataacatcaaaacactaaaatatcaaaccaaattcatccaacttggttggtcattgatattaaaaaacacagtaaattactccttagaacaaaactttgacaaactcatgctctagtgttaattaagaatatgttctgaacaaaaaagctgaatagactacaccaattaatcgaagagactgaaacccatatcatcatcagattcctctttctcctccaccttttcctccttctttgcctaagcagcaggagcagcagcagcagcacctcccccaggagctgcggcgactgcaacggcaccaccaccaccagaaggaaccgtggccaacttttccctaccggcagcaataagctcaactatatccttacccttaacttcagacaaaaacgattcaatcctatcttcatctgcttctactccaacggagccaaggatttccttgatgacatcggcggaggggctgtcgttgccaccgaggacggtgagcaaatacgcggcgaccaccttcatctttctgcggaatcacacactgagagagagagaagatgcgaacgaaaagaaaacttgagccgaatt

SEQ ID NO: 9715 - DNA, 308 bp, Glycine max
  Clone ID: jC-gmle01810043a12a1
tcagcttctttacccatcatcatcatggagctcctcgggtacctgaatcagggtcacccttctagaggaacaacacttgttattactctttcattggtgctttcgacacttgtgtccttctccactttcacacatgccttctgttcttctgcgtttccggaactgaatcctataaaacctaggcactcacgtattctcaggagtgccgtgcaacatgaaactcctacatgacagctttctgaaatatggtcacctctggaaagccaaggatggaaaccttatgttgaatcatacaagccatcattacc

SEQ ID NO: 9716 - DNA, 467 bp, Glycine max
  Clone ID: jC-gmle01810043a12d1
ggagtggaaatagcttttttattttcactagatataatgttaaataataagacaccgaactataaaatacacaggctacatccgtgagcaataataataatttaagtatatactactactagtcactactaagcttggcacatgcaatcaggagctggatacgtatatattgattgatgtggcttcctcagccttagttccccttgtctattttggtgaccttcaaccactgcatcctgaaactctgaccactctatggttgtattcaggaaaagctgacccatcaatgccatatttggccttatagtctttaagttcaagtatgtccggtgtccaaccaatgcattgtgcatatttcctggggaagcagagatgaagatgtcactatgcaagccaacatagtagtcaagtgcagctaatagagaagcttttgcctttatctgagaacgctcttcagatgaagcaag

SEQ ID NO: 9717 - DNA, 539 bp, Glycine max
  Clone ID: jC-gmle01810043b01a1
aaaattgccccgctactactgtaaatttcgatagggattaaaaaacaaagcctttccgtttcatctcgaattgtgaattgaatattcaatgactaaaaaaatggaataaaaaaacgaagaattcaaagaatgattccaaattgaaggtaggataagaacaaaggttctacatattcacaaaaaaaaactatgtatgtaggtagagacgaaaaaataaatctcgaagtaattcgtagagttcaataactattattattttcaattcggaattcttattaattactttaaaccgaataaatcttgataattgaaaaattaagtcataatttattggttgattatatcattaactatttctttattttatatttaggttacgaggaaattatcatgaatccaattatttctgctgcttctgttattgctgctgggttggccgtagggcttgcttctattggacctggggttggtcaaggcactgctgcagggcaagctgtagaagggattgcacgacaaccggaggcagagggaaaaatacg

SEQ ID NO: 9718 - DNA, 467 bp, Glycine max
  Clone ID: jC-gmle01810043b01d1
cattcgaattcattttatttatatattaatattatattcaaatgaaataaaaagatattaaaagatactaattataagaatttgaaagtgaaattataaagttattaaatgattaatcaatttttttctacctgttcctgtagtaaaaagagttccatctgttcttgaatagcttccttcaaaaggacttctgcttccccagtgaatgtcttggtagaagatatgatttctttgaattgaggtttattcgtgtttaagtaagcacgtaactcaacaagaaatttccttacctgtccaatttctaatgaatcaagataaccattcgttccagtataaatagttattatctgttcttccacggtaagaggagctgattgggattgtttaagcaactcgcgcaatcgttgacctcttgctaattgattttgagtagctttatcgagatcagaagcgaattgggcaaaagc

SEQ ID NO: 9719 - DNA, 495 bp, Glycine max
  Clone ID: jC-gmle01810043b02a1
ataaaaaacacagagacagtgttcttagcgccgccgttgccctaccatcttcatattattctattgcctttctttcacgtttttctggtttttaagcccttccagtgccctatttacgcttatacccttctggttatgatagcttccattcggcgtcagccagagagccgaagctcttggcttccacacatactttcggtgccgtcgattgagatacaaagcctccaagccagccgagccaatcctcaaattccaactttacccctccctgcaaatattgttttcttttaacggttacttccaccatgcctaattcgaagaacaaccgtaacggacacggcgagcctcaccgccgcgagaaattgacaaagaaatcgtcgtccttctacggtcactcatcgccgccttccatgtccggcgaaccgatccggcggccgaagacggttgccgatcttttgtcggagaggcaccgcgcggctttagcgacgccggcga

SEQ ID NO: 9720 - DNA, 394 bp, Glycine max
  Clone ID: jC-gmle01810043b02d1
tttttttttttttttttttttttttttttttttttttttttttttaaatgtcaaacatcagggacttttattacgcaagagtctagacattatacccgggtcaaacatcacagacgtatttttttacaagcaacagcgggccattcactcactgaggcattctaaaattaaaattaaaaataataaaaaaatatctccaaataacatgtggctggcatgggcaaacactagtagcctccaataataataataatttttaccgagagaaatccatgaaccttaaccaaccaaacgcgccacccttggtcgttttgacagcctcttttgaacacgaaccaaacgggggcgttccactacccttggtcccattaccaccacaattccttggacacag

SEQ ID NO: 9721 - DNA, 516 bp, Glycine max
  unsure at all n locations
  Clone ID: jC-gmle01810043b03a1
gtaaactagaagtacagatttatttcttcaatgggggatgctgagaatgcccttccaccttcaaagaaaagggctgctggaagggagctcactcgagatactcccattgatgatgaggaagatgcccctgagcttgagactggcactttcaagagggccagccaagaggttatgggcaccagaaggatagtcaaagttcgtcgccaaccaactaattctgctccttctgcaaatccttttgctggaatacgcctggttgctcccactgaatccagtgctaatcctgctgagactactactgaggtaaaatcagctggggaaaacaccgttgcagatgaatcaaaaagtaatgatacagctaaggattctgagaaagcaggagatggggaagctaagcagcctgagagcaaaactaatgaggcagaggataaacttactgaaagtaaggatgctgctgaagaaagcaatgcagacaaggagcatactgcagaanaggaaagtactgatgatgaatcg

SEQ ID NO: 9722 - DNA, 424 bp, Glycine max
  Clone ID: jC-gmle01810043b03d1
aaatccaaaattaagttccattatcagttggagacttcactcaaattcaagtacactaatttaagtataatagactatgccacacaagggcaaacgaactcggaatagcaaattatctttgtgaaggaacatctaacgagacagacattgtgagacatgagtaaggagtgtctctcaatcatcagaagcctttggggaattttcaggggtcttgagaactgtggatgtctcacctttgtgttccatgacagtggctttaaactcctccactatggagccgtccttgaacttcaaggcaaatgttgaaagaccacctttcccttgggtggcactattgatgcaggcaaaagtaacacccttgttgaacatatgagtgagcttcatatgagggtagagacgtgcattcaaaatcaatctaaaattt

SEQ ID NO: 9723 - DNA, 389 bp, Glycine max
  Clone ID: jC-gmle01810043b04a1
gtctctcaaatttgtttcattgcattgtattctagttaatacggcaggagttcacataagacttgtttgttagaaatatgcctgacatagtattcctattctacagctgcgaactgtaaattatacaatttagcacatgcaaaatgaaagtatgtgtactccatcttgtcgactgtgatcgaaaggtatgcaatgttggtgtcttggatattagaaacttctttgattgcgtctagtagaaaaaccagtgtcgtcttcatctttgatgaagggtttaaatctagcgaggccaccacttccactgtatgcttggcttctgtttgcagcttgatgatcggatggatctggattgccacaaatctcaagtttgattataaatgtagctgtgc

SEQ ID NO: 9724 - DNA, 539 bp, Glycine max
  unsure at all n locations
  Clone ID: jC-gmle01810043b04d1
tcgcgatctagaaccctgtccactggccaggatcagacctcttgtgggaagatatgtgccgcctgaagttgttgctgttcgggtgccacttctaaatttgtccaattttcaaatcaacgattggcccgatatgtcagcaaaaagctatgcaatcatggttctcatcctccctactgatagtgttagaaaatggcgagaccatgagttggaacttgttgatgtggttgcagatcaggtagcagttgccctttcacatgctgctattttggaggagtctatgcgagcccgtgatcaactcttggagcagaatgtcgctttagatttagctcggcaagaggcagagatggcaattcatgcccgcaacgattttcttgccgtcatgaatcatgaaatgaggacgccaatgcatgcaattatagcattgtcatcccttctcttggagactgaactgacttcagagcagagggttatgatagagaccagtgngaagagtagtaatgttttggcgacactcattaatgatgttctagatctttctc

SEQ ID NO: 9725 - DNA, 489 bp, Glycine max
  unsure at all n locations
  Clone ID: jC-gmle01810043b05a1
gaagctcttgacgaagtgaggaagtggatttctggtgttggtgttgacggcattgggaagaagcttgtgaactcaaaagatggacctccaacctttgagcagcccaagatgactctggagaagctcttgacgtatggtaacatgcttgtccaagaacaagagaatgtcaagagagtccaattggctgacaagtacttgaacgaggctgcacttggaaatgctaacgaggatgctattaacaggggaactttcttccaatcttgaattggaggcaaagcaaacttggcaagtaaatatttctgttcctgaaggttgtgctgatccaagtgctagaagttgtgatgggacttgcgtgtaacattcttagaattctcaatgtcttacgtgcaaagagaagatgccaagtttgagatgattntactatatttttcatattggactgtcttcctctataattntgagttaaagtgtccacttaaattgaatttg

SEQ ID NO: 9726 - DNA, 408 bp, Glycine max
  Clone ID: jC-gmle01810043b05d1
aggacaaaaggaaaaggccccaaattcaatttaaggggaccctttaactcaaaatttttgaggaagacagtccaatttgaaaaattttgtaaaatcattttaaacttggcattttttttttgcacctaaaacattgggaattctaaaaatgttacacgcaagtcccattacaacttttaacacttggatcagcacaacctttaggaacagaaatatttacttgccaagtttgctttgcctccaatttaagattggaaaaaagttcccctgttaaaagcatcctcgttagcatttccaagggcagcctcgttcaagtacttgtcagccaattggactcttttgacattttcttggtcttggacaagcatgttaccctacgttaagagcttttccaaagacattttgggc

SEQ ID NO: 9727 - DNA, 526 bp, Glycine max
  unsure at all n locations
  Clone ID: jC-gmle01810043b06a1
aaaatacccaggatttgaggtgctggagaagaagggataaagtgtatggtatgggggcgtggtgaccgagggcacgaaaggaggaaactattggctacagaaagtcgtttctttagccgggtttctttcaaaaaatggtgcagagtctctgtttgatggcttctcatggttaccctcctggccttgtcttgcacccacaagtactgggcttgccctgcgctaccatgaagggctaccaaacattctttccttctccagtagcaaaagcagacctgatcagatatcagtctcgttgtcttgagccaagtccatgtgaggagtcaatgaaatctcaaaatgaatggtttgattataacaagtttgtcaatgtcgacttctcagttgaaaggcccatgcttattgatgaccaagcaaactgctcaaatgcagttcttcttggctttggcattgttgaccaatgcactaagcgtgatgaaattataaatttactaatgtctgagactgccgaagcanggatagatggagc

SEQ ID NO: 9728 - DNA, 547 bp, Glycine max
  unsure at all n locations
  Clone ID: jC-gmle01810043b06d1
aataaagaaagtcagtttattgattccattgcaaaattctatagtacaagctaactataacaccaaacaatgcttcctgggttaactgaaagtagcaaattaactacaacagccaattgcttatcaacttggtgcctaaccttggttctaactatctgcttctccaaaagccatcactgtaacatccaaccagccagaaataactacatcattggagatgttactcaagcaagccttagcactaccactgctagcaaggctgcagcagtatagtaaatatctcttatgctcctatccagcttctgcaacatttcctcttctttcaaacccaactttccggcattcttgctgatgttgacaatcgtggcccttagcttatttacagccccagaaagccaaaccaacccaaatccaaaccctgtgttgaacaagctataagcacaaaaggtagcccttccacaagctaggttacacatcacagatagcaggactgcaaggccggtaccggcaatgccagcagaaaatngtgtcaggagcttccgaagct

SEQ ID NO: 9729 - DNA, 504 bp, Glycine max
  unsure at all n locations
  Clone ID: jC-gmle01810043b07a1
ctgctcagaagataagggaagcaattgaagtggttacatatgagtatatatggtcacagatagatgtgattagaggtcaggagcaactggataatgcaagggctttgttctttggacaaaatgaaggaaaggatgccttgttttatgggaaccctaaccttcttattacaagttggatgagcatgccaatgcacgaagcagattttggctggggaaagcctgtgtatttaggtctaggaagtgtatctacacaagatagggcactgattattcaaagccctgatggtgacggctctattattctgtccatacactttcagatggaacatatgcagcttttcaagaaatatttttatgaagatatgtgaactatattcacatcgctactatcttgaacttcttgtatgggagcttaatttacgtgtgatctgcaatttctcatgtttaataaatntagttaaccatgtgggttaactattagctngaatatgactgattagctat

SEQ ID NO: 9730 - DNA, 514 bp, Glycine max; identical to SEQ ID NO: 9708
  Clone ID: jC-gmle01810043b07d1

SEQ ID NO: 9731 - DNA, 541 bp, Glycine max
  unsure at all n locations
  Clone ID: jC-gmle01810043b08a1
gaaaaaagaccctttccattctcctccttttcttcctcctccactggctgcacctcgctgccgtgtctctgcctagcgtgaaattggcctcatttcccatctgggtcctgtgaattgcgattggaaccgcgttttccccgcttctgggcttggctcagaagtagtcagaatgatgtctgtcacaggcaaaagcattgattttgctggcaaaaacttggtctcttgtggctgctcttccaatgcttcttcgtttgataggtacactgtgaggaactatgccaagctgaatagtaataattctaaagggtgtggcagagatcatggggctcgtaaattggtttgttgtaagaagaggagcactcattgtcgggtttcttctatgaagactgcacagcctacggtgaatggggggactcatgcatttgaaggccttaccacaggattggacttgaagggttattcagaagaccccatttnccctgctaggctttttgaagtggttgccgatgatctgctaactctcaataaaaatcttcagtcg

SEQ ID NO: 9732 - DNA, 477 bp, Glycine max
  Clone ID: jC-gmle01810043b08d1
aaaagaaacatcaattatcattttttattttactgttttcaagatcccaaaaaggaaaaatggggggaaagaatatactgcagacttgtattgatacaataatggaatatattatgttcttgtactttgcaggaagctgcaaatatattaaatgatgagaatgcccgcttgctttgcccttcaatgactataaaagtaccccaaaagtagcacaagtgtagatttgcttgaaattcttgaaatgacaaaaagttcaaggctctctcatccctatattaggaccaaaagaatctttttgggttttttctttaacaatgtgtcatcagcatgcacaagcttatgcaatccgttgaaggttatatgccaccatattttcaagggctaaacgaaatacactctgaggtaggcattggagactttgaattgcaagatcggctttctcttttgctaactcttgggctctttcaatgcccccac

SEQ ID NO: 9733 - DNA, 529 bp, Glycine max
  Clone ID: jC-gmle01810043b09a1
ataaaaatacacagtgagctctcgcttctagccctagggcgctgctcccgattgtctctcttcggattgagtgaattgtgaaatgggttggaaagctgctgagaaactcattaggcactggaaagttgtcagaggggataatgttatgataataaggggcaaagataagggcgagactgggactattaagcgtgtcattcgctctcagaatcgtgtcattgttgagggtaaaaatctggtgaaaaagcacatcaagcaagggcaaggtcatgaagggggcatctttacagttgaagctccaatccatgcctccaatgtgcaagttcttgacccagtgacagggaagccttgcaagattggacacaaatatcttgaagatggtactaaagtcagagtatcaagaggaataggatcatctgggtccataatccctcggcctgagatcttaatgataagaactaccccacgacctactgtccttggtcccaaagatactccaatggatctggtcttggagaaagactacgat

SEQ ID NO: 9734 - DNA, 317 bp, Glycine max
  Clone ID: jC-gmle01810043b09d1
gaagtaaccgtccttaaaaggagatcacatcaattgaacaggaaaagataaaaacaaattattagttttttagctattggaaactcatgatcacattaaacacagaaatttgaaagcaatttaacagaatcacgataaagaaagcctgtgacaaactcactccatatcttgttcatcatgatagcagactacctaacttgaataaggtacctaatgtccttaaagctcaagcatgcccctaactgttttagcatcgtaagtcttctacaagacaagaaccattggaggatatttggtaccaaggacagtaggtcatg

SEQ ID NO: 9735 - DNA, 550 bp, Glycine max
  unsure at all n locations
  Clone ID: jC-gmle01810043b10a1
caactgcaaggttcttgttgttgctaacccagcaaacaccaatgcattgatcttgaaagaatttgctccatctattcccgagaaaaacatttcttgtttgactagattggaccacaatagggcactgggccaaatttctgagagactgaacattcaggtttctgatgtaaagaatgtcattatctggggcaatcactcatcaacccaatatcctgatgttaaccatgcaactgttggggagaagcccgtccgcgagcttatagctgatgatgcctggttgaatggtgaattcattactactgttcaacaacgtggtgctgcaattatcaaagctagaaagctttcaagtgcactatcagctgctagtgctgcttgtgaccatattagagattgggttcttggaactcctcagggcacctgngtgtcaatgggagtatattctgatggttcctacaatgttccagctggactgatctattcattccctgtcacttgtgccaatggngaatggacaatagttcaaggactttcccattgtgagttctcaagg

SEQ ID NO: 9736 - DNA, 420 bp, Glycine max
  Clone ID: jC-gmle01810043b10d1
gcgtaatagcagggcataatactctacgtatgagtttgcacgcttgggcatcccacatacatcaagaaatcttgtacagccaccacaaacacagcaaaaagttctagccataaaaaaggggcactaacacataaaattagaggactgatccaaaattcaatatgcgggccatgggctaattgcatgactaaaactggaaagctcaaatatactatcctcctaaaaggattagatgttgaaatacaagggattccaatgaaagacaaactctctggagggatagtcccttggtgtcttagaaggagctttattcaaaattgaagctacacttctgtgggcaaaccatgggagcctactaacaaggaccgtagcccataaggagcgatggcctttaatttaggcttgagtaagccaatgcct

SEQ ID NO: 9737 - DNA, 554 bp, Glycine max
  Clone ID: jC-gmle01810043b11a1
gattgagctcctttacccatcatcatcatggagctcctcgggtacctgaatcagggtcacccttctagaggaacaacacttgttattactctttcattggtgctttcgacacttgtgtccttctccactttcacacatgccttctcttcttctgcgtttccggaactgaatcctataaaacctaggcactcacgtcttctcaggagtgccgtgcaacatgaaactcctacatcacagctttctgaaatatggtcacctctggaaagccaaggatggaaaccttatgttgaatcaaataagccaacattaccagagaagtccgagggatatatccaggtctttcttgatggaggtttgaaccaacaaaggatggggatatgtgatgcagttgctgtggcaaagatactgaatgctactctggtgattccataccttgaattaaatcctgtatggcgagattcaaggatgatatttctatagttaaagagctgcctaaagagttcagctggagcacaagagagtactatggcttggctattcgagaaacccgaatc

SEQ ID NO: 9738 - DNA, 452 bp, Glycine max
  Clone ID: jC-gmle01810043b11d1
ggagtggaaatagcttttttattttcactagatataatgttaaataataagacaccgaactataaaatacacaggctacatccgtgagcaataataataatttaagtatatactactactagtcactactaagcttggcacatgcaatcaggagctggatacgtatatattgattgttttggcttcctcagccttagttccccttgtctattttggtgaccttcaaccactgcatcctgaaactctgaccactctatggttttattcaggaaaagctgacccatcaatgccatatttggccttatagactttaagttcaagtatgtccggagtccaaccaatgcattgtgcatatttcctggggaagcagagatgaagatgtcactatgcaagccaacataggagaccagtgcagctaatagagaaacttttgcctttatgtgagaacgctc

SEQ ID NO: 9739 - DNA, 453 bp, Glycine max
  Clone ID: jC-gmle01810043b12d1
cgtcctttattttttgttttttgttttttatttttttttttgaatcatgtattatgtgttacagttttgctcgtctatgaataactttgacaggtagaaactgtaaaaccttacctgaccaatattggaaacaagctatgatatctaacataaactatgcatatagagccgaaaaaattctagcagcaaaacatgtttggatgtggtaagttatgctactccagctgtatccatatctggaaccccgtcaactcccttgaaaacaacacgtaattttctcaaacaggaaaacttttggtcgttcttgattgttgtaccattcacatgcacaacatccttgggcaatttacccatgagattaaaaagagattgatccaggtttgatcgagtcatttattgcaatacagggggagcttggatgtacagattctttcctcgatgtgtaatactagc

SEQ ID NO: 9740 - DNA, 541 bp, Glycine max
  unsure at all n locations
  Clone ID: jC-gmle01810043c01a1
gggcaagagcaaaaaaagaggatctttgtgtaaagtgaatggcttgccagattggccactgatggccattatagtagagcaaatggaagggcagagagatttgatcactgagaaaacagtttcccatcttagtgatcaggcaataaaaaatgtttactcttggtacataatgttcaccgtttgggggtgcttattctttggtgccatgaaggatccatattacgactcagaaacatataggggagatggaggagatggaactggcaactggatttatgaaaagcaagatgctatggaagcagaagccagagaagctctgtggcgggaggagttgattgaggagatagaacaaaaggttgaagggttgagagaacttgaagaggctggcaagaagaactagtcaactgattcatacctttgcttccacccattaaccaagcgattctctgttattgtatataaaaagagtaatttcttatgcttcaaaatgcaatgctgaaccacagatagtactttgaactaatatatatggngtcgcaat

SEQ ID NO: 9741 - DNA, 473 bp, Glycine max
  unsure at all n locations
  Clone ID: jC-gmle01810043c01d1
attgcgaccccatatatattagttcaaagtactatctgtggttcagcattgcattttgaagcataagaaattactctttttatatacaataacagagaatcgcttggttaatgggtggaagcaaaggtatgaatcagttgactagttcttcttgccagcctcttcaagttctctcaacccttcaaccttttgttctatctcctcaatcaactcctcccgccacagagcttctctggcttctgcttccatagcatcttgcttttcataaatccagttgccagttccatctcctccatctcccctatatgtttctgagtcgtaatatggatccttcatggcaccaaagaataagcacccccaaacggtgaacattatgtaccaagagtaaacattttttattgcctgatcactaagatgggaaactggtttctcagtgatcaaatctctctgcccttccattngctctactataa

SEQ ID NO: 9742 - DNA, 541 bp, Glycine max
  unsure at all n locations
  Clone ID: jC-gmle01810043c02a1
gggcaagagcaaaaaaagaggatctttgtgtaaagtgaatggcttgccagattggccactgatggccattatagtagagcaaatggaagggcagagagatttgatcactgagaaaacagtttcccatcttagtgatcaggcaataaaaaatgtttactcttggtacataatgttcaccgtttgggggtgcttattctttggtgccatgaaggatccatattacgactcanaaacatataggggagatggaggagatggaactggcaactggatttatgaaaagcaagatgctatggaagcagaagccagagaagctctgtggcgggaggagttgattgaggagatagaacaaaaggttgaagggttgagagaacttgaagaggctggcaagaagaactagtcaactgattcatacctttgcttccacccattaaccaagcgattctctgttattgtatataaaaagagtaatttcttatgcttcanaatgncatgctgaaccacagatagtactttgaactaatatatatggggtcgcaat

SEQ ID NO: 9743 - DNA, 518 bp, Glycine max
  Clone ID: jC-gmle01810043c02d1
attgcgaccccatatatattagttcaaagtactatctgtggttcagcattgcattttgaagcataagaaattactctttttatatacaataacagagaatcgcttggttaatgggtggaagcaaaggtatgaatcagttgactagttcttcttgccagcctcttcaagttctctcaacccttcaaccttttgttctatctcctcaatcaactcctcccgccacagagcttctctggcttctgcttccatagcatcttgcttttcataaatccagttgccagttccatctcctccatctcccctatatgtttctgagtcgtaatatggatccttcatggcaccaaagaataagcacccccaaacggtgaacattatgtaccaagagtaaacattttttattgcctgatcactaagatgggaaactgttttctcagtgatcaaatctctctgcccttccatttgctctactataatggccatcagtggccaatctgggcagccattcactttacacaaag

SEQ ID NO: 9744 - DNA, 498 bp, Glycine max
  Clone ID: jC-gmle01810043c03a1
catcatccaaatctcacaatgtcgtcaactcttctcccagtgacagcaactcccattttcactctcaccaaaaccctccctctccccaaaccctacctactctcctataaattcaaattcaacaccctcgtccgccgctgctccctctccgaccacgaggagcagcgctggctccgcgaagagcagcgctggctccgcgacgaacaccgctggctccgtgaggagcagcgctgggctcgcgagcgcgaccaactcctccgcgagatcgccgacctcaagctccaaatccaggcgctggagcgtcgcctcttgacgcgcgatttgtcctctccggcttccatctccgacgccgtcgccaatgtcacgttgctcttgcaggtgctcaaggacaagaatctggttctcgagagcggttcgagcctgcggaacacggaggaggtgaagcaattggaagaggtcgtctaacatgtgaagggagggtgtggtggtgaggaatct

SEQ ID NO: 9745 - DNA, 379 bp, Glycine max
  Clone ID: jC-gmle01810043c03d1
aacatagcattacattttgcgatttaacaaatcataaagtttgaaacagacgtagttcggacaagggtaaaatgtatgtttgagtattactcagaatggaatatcacctcattcattttgaaggttaaaaatgcatgcaccgttctatgttgtaatttgaggtttctctgcagattttcacgtagctctgtaagctccaaagccttgaaagttaaaaatctctcaaatattaagttcctatttcccagttttgatgattaaatagcatactatacaaaattttgtgatgcaatgatactgataattacatgcctgagtatgaaacgatgaactagaaatgtatgtcatacctataccattgttttccctccacttagat

SEQ ID NO: 9746 - DNA, 545 bp, Glycine max
  unsure at all n locations
  Clone ID: jC-gmle01810043c04a1
taactactatggaggtaatcgtttcctcaacaattgttgtggaagttgctgcaatttctctcgcgatggttgtggtggtggtcgcaactatggtcatggtggtagatagtctaacattaagtgtcaaatctatcataaatatggtcatgtggcttcctattgctattacaggcatgatgataactatgtctctactcaaccaatggcctatccaaatcagaatcagtactcaaatcaaaatcacaatcaaaagaaccaacacccaaaccaataccaaaatcagtatcccactaaccaacatccaaaccaatatcccactcaatcttcccattcatatcctaatcagcctccatatcggaatgctccacctcaacgcaaaaatccaccaccacaagctcatctaactcgtgctcagtgctcctctccacanaattggtatccagatttaggtgcatctcaccatgttacaaatgtttctcaaaatattcaacagaccacacccttttgaggaccagatcaaattactattggtaatggtcagggat

SEQ ID NO: 9747 - DNA, 468 bp, Glycine max
  Clone ID: jC-gmle01810043c04d1
caaactctatgatttcaattaatatttacaaatcctttattttttaagaaaatcctacaaatttaataccgaagcgacaaaagtattttcaacaataggaagtataaaaaatataaaccaaggccaattacacaaatacgcttcagatcaaaatccacactaaacaggaatagcacatacctaggaatttcataatttaaataggaccaaaatgttgagcaaaaatagtcttgttataaatgacttaaaaatattaccattccctttatattaatggtttttacaaaagcaaggtaaaatacttgcatttccttactgcttgaaaacaaataatggtaaacgtgtacacaatacctggtacatcatattccactgaccaactgggggtaaacaattcttttctttcaagcaaagggaaatctaatttcattgaaaattatatccttggagatgtatattctgtcatct

SEQ ID NO: 9748 - DNA, 563 bp, Glycine max
  Clone ID: jC-gmle01810043c05a1
gaacaagtagttgagaactaagaaggagaagcaaatggcttcctcaatgatctcttccccagctgttaccactgtcaaccgtgccggtgccggcatggttgctccattcactggcctcaagtccatggctggcttccccaccaggaagaccaacaatgacattacctccattgctagcaacggtggaagagtgcaatgcatgcaggtgtggccaccagttggcaagaagaagtttgagactctttcctacctgccagaccttgatgatgcacaattggcaaaggaagtagaataccttcttaggaagggatggattccttgcttggaattcgagttggagcacggtttcgtgtaccgtgagcacaacaggtcaccaggatactacgatggacgctactggaccatgtggaagctgcctatgtttggctgcactgatgcttctcaggtgttgaaggagcttcaagaggctaagactgcataccccaacggcttcatccgtatcatcggattcgacaacgttcgccaagtgcagtgcatcagcttcatcgtctacaagcccccag

SEQ ID NO: 9749 - DNA, 452 bp, Glycine max
  Clone ID: jC-gmle01810043c05d1
attcattagttctcatccattaatttccattgaagtccgaaaacagaaaccaaaaatacaggatgatgaaatgtcaaaaagcaaaaacaaatgggaatgtagtttaagtacaaacaaacaaagtggggtggcggctacaaatgctttgcaaatttttcacacttagaagcctgggggcttgtaggcgatgaagctgatgcactgcacttggcgaacgttgtcgaatccgatgatacggatgaagccgttggggtatgcagtcttagcctcttgaagctccttcaacacctgagaagcatcagtgcaaccaaacataggcagcttccacatggtccagtagcgtccatcgtagcatcctggtgacctgatgtgctcacggtacacgaaaccgtgctccaactcgaattccaagctaggagttcataccttactaagaaggtatactacttact

SEQ ID NO: 9750 - DNA, 532 bp, Glycine max
  unsure at all n locations
  Clone ID: jC-gmle01810043c06a1
gttccattcactcacataataatccgtgacccatttcagatttcgtcttaacgcacataaattcaggttcaaaatctcacctttgttgattttggcgaggattttgagaatggttgtggctgggggtgctaagttcaatttgagaagaggcaatggttcttctcataatgttgtcaatggctatagcagtgatggagatctttgcagaattagcaaaagtgggtgtttttcgtcggtggctgaggtggatagagacccttcttgcgtttcattcaccactttcaacattctggctccgatttacaaacggattgacccacagaaccagggcctgcgagaaagtgacttcagagcattctggttggccaggaatgagaggattcttgattgcttgctttctgaatcatcttccattatgtgccttcaggagttttgggttggaaatgaagaacttgttaacatgtatgaggagagacttggngatgcttgctacaatttcttcagctcgcgcgaaccaacaatcgcggagatg

SEQ ID NO: 9751 - DNA, 560 bp, Glycine max
  Clone ID: jC-gmle01810043c06d1
acataatatgcacatccacttctacattgcaaaaatatctttacattgttatcccattaccagagaaaaaaacatggccagggcttaccaaaactgattacagcacaacactactttaatttgactccaaacacatatacaagacagactaatcactaattatggcatgacatgtttggtaggggactaaaaatgaaagtgaaaaaaagtatcacttcagtttacccctacaccaaactggtcccaaaattgaatatttttctgtgggctaagactattagtgccatgaagtacattcagttttgtgaggcagaacatctcatccttgctggtgaaaacacagctgtgagtctagcatgatcagaaagagaataatcttctggccatagtcctttctccacttcacgcggatacagcattgcattcttcaccttaaaaccaatagcttcttgctcctgttctgtgttacaatcttccgtgcaaccattcagattttccaacacatgctctggacatgtagaattccatattttctgcttgaattcttcaagtctatgaca

SEQ ID NO: 9752 - DNA, 496 bp, Glycine max
  Clone ID: jC-gmle01810043c07a1
cttgcaattgaagttgaagtcttgcccttctctcttcaactccaaacacaagacatcatcatccatggctgcctccgtctccactgtcggagctgtcaacagagctcttttgaacctgaatgggtctggacctggggtttcagctcccagttcatccttctttgggagcagcttgaagaaggttattggctcaagggtccccaacacaaagatttcctctggaagcttcaagattgttgctgtagaagagaagaaagagattgaagagacccagcagaccgacaaggacagatggaagggtcttgcctatgatatctcagacgaccaacaggacatcacaagaggaaagggtttggttgactcccttttccaagctccacaggatgctggaactcactatgctgtcatgagctcctacgagtaccttagcactggacttcgccagtacttggacaacaacatggatggattttacattgctccagcttttatggac

SEQ ID NO: 9753 - DNA, 543 bp, Glycine max; identical to SEQ ID NO: 6114
  Clone ID: jC-gmle01810043c07d1

SEQ ID NO: 9754 - DNA, 537 bp, Glycine max
  Clone ID: jC-gmle01810043c08a1
attgaagttgaagtcttgcccttctctcttcaactccaaacacaagacatcatcatccatggctgcctccgtctccactgtcggagctgtcaacagagctcttttgaacctgaatgggtctggacctggggtttcagctcccagttcatccttctttgggagcagcttgaagaaggttattggctcaagggtccccaacacaaagatttcctctggaagcttcaagattgctgctgtagaagagaagaaagagattgaagagacccagcagaccgacaaggacagatggaagggtcttgcctatgatatctcagacgaccaacaggacatcacaagaggaaagggtttggttgactcccttttccaagctccacaggatgctggaactcactatgctgtcatgagctcctacgagtaccttagcactggacttcgccagtacttggacaacaacatggatggattttacattgctccagctattatggacaaacttttgtgtcacattaccaagaacttcatgaccctgcccacatc

SEQ ID NO: 9755 - DNA, 538 bp, Glycine max
  Clone ID: jC-gmle01810043c08d1
agaggaagacagtccaatatgaaaaatatagtaaaatcatctcaaacttggcatcttctctttgcacctaagacattgagaattctaagaatgttacacgcaagtcccatcacaacttctagcacttggatcagcacaaccttcaggaacagaaatatttacttgccaagtttgctttgcctccaattcaagattggaagaaagttcccctgttaatagcatcctcgttagcatttccaagtgcagcctcgttcaagtacttgtcagccaattggactctcttgacattctcttgttcttggacaagcatgttaccatacgtcaagagcttctccagagtcatcttgggctgctcaaaggttggaggtccatcttttgagttcacaagcttcttcccaatgccgtcaacaccaacaccagaaatccacttcctcacttcgtcatcatatactctggccctcagtgcaccaaagaaatcaatggattggccagggaaggtgtcaacaatcttgacaacgtcctgttcaggaattgaatc

SEQ ID NO: 9756 - DNA, 446 bp, Glycine max
  Clone ID: jC-gmle01810043c09a1
ataaataggacaattatcacctactctaaatttccgacgacatgcgatatatgattatagatctcgtggttaacgttaatgctcacataaatgtttaaatcgtaatctataactaaatattacaaactggaattcttatccaaatggactgcaaatcattccttttatatgataccctacgattgtttacttaaatatttaatgacttgaactatttaacttaataaaattagtcgggtgctattctatttcacgaaatgggttttctttcacagtatctaatgctagtcaccgcacttaggcaatgagctagaatgggtcttgacgatatctatggatgtatctagacctacctatctatagatatctttagaatcaacagaagagcttagacgtactggacgtctactgtcatggatagctacggggaactatcggacagaaaa

SEQ ID NO: 9757 - DNA, 385 bp, Glycine max
  Clone ID: jC-gmle01810043c09d1
gcatattcgtctgtaattcttcgattttttgaggcttaccctctattaaaaactttgggaatcccatatatattataacttgaataagatcaatgcttttttgaatctttatctgtccaattccctcaacaccagaggatattcttatatttctccgtatataatgtttgatacagtctcggattactggatcatcttgtatattctaggcatactttgatggtcgagctaaccattcgggtatataacaaataccacgttgtagatcgagtgccatggtgccaccctcctattcataaaatgatacgtctaaatcgacaattgcccttggccatatttacggacttttacaggcacccttgtctgaaggagcatgccataatct

SEQ ID NO: 9758 - DNA, 523 bp, Glycine max
  unsure at all n locations
  Clone ID: jC-gmle01810043c10a1
gatagataagccttccacagcctcacaaaaatgaagaacactacctcgttcgctctctttctactttgtgccttcttcacctcatacctaccttcagccaccggtgcttttgtgcttgacagtgatggaaaccctcttgaaaatggtggcacatactatgtgccagcaccaaataactgcggtggaatagaatacactacatcaggaaacgaaacttgccctatcactgttgtgcaacatcacgacccaacctgtaaggggtttccgataacgatttcgtccccggcccgaatccgttacatctccgaaggccttaatgtgaacatagggttcactttcagaccccctccgtgtgccccctcttctttgtggactgttctcaaggatcaatctgaacacccagacccctacgaaggagtaatattgcctgttaaacttaataatgaggacaacagcaacaatacagttcccggttggtttaaaattcagaaacttccctaggactntattacaacctactaca

SEQ ID NO: 9759 - DNA, 421 bp, Glycine max
  Clone ID: jC-gmle01810043c10d1
agccatagaataatttattacaaaatgaagcatttatttagccttacacaagatcactcactaggagaaagtacatgattcttgagggcaattaagtggtacttcttcatgcagaagaatgagttgatcttgatgcgtctgaaagtttctgaaactctatgacttggcgccgcgcaaactgagccaccagcaaacgcctgtttccgtattggtcgaaattagagccaacactccaacatgggctttggtcaagtggacagaacacaatgtagtaggttgatattaagtccaagggaagtttctgaattctaaaccaaccgggaactgcattgttgctgccgtgctcattattaaggttaacaggcgatattactccttcgtaagggtctgggtgttcagatcgatccttgtgaacagttca

SEQ ID NO: 9760 - DNA, 551 bp, Glycine max
  Clone ID: jC-gmle01810043c11a1
gcgatttcggaagggtcgtgtttccctgcttcagtttcagcttcggcttcgagaagcgtcgattgggtccttaagctgttccttctctgtttctgatgacaagcgcttggacaaatatgagctttgcaatcaaacatagggatatagagagggaatgggagaatcggggtggagttatggttatttttttaaaattattggagattcttgctcactctcagaagatgtatgcctgctaatatactggaatggatgaggagatcaaatttaatttcaatattgttatagctttggagcatcttggagcaaatgagcaatggagcttgtggagcacggctcacctcaaggattgctctcttggtttgcttcatagttttggttttatttatttttgtgtaatcattagagtaatgatgatgataattagacattttagatttaggcatggcttaaaaaagtgagagaaatcttctctactgacaagctttcaattttggttgtagacatactgtataactcctatcaaacatgagcggtcgcttttctcgcac

SEQ ID NO: 9761 - DNA, 574 bp, Glycine max
  Clone ID: jC-gmle01810043c11d1
ataaatctgtttaaaaccattcaaattggattcacagtttgcgaggactaaagatattcttgtgtttgctaaggtacaaagggcaaggccaatgtccaacattttaatttaaaagaaataagacaatcaccaaacagtctatgcacatcaataattttcccttaaaacaatttagtccaactccaatataattccgatactgcccaccagaatggaacaatatcaccagagaaccaccagctttgtcagaaattcaaccactacctgacaggacctgatgaggagatccagatccagatcgtgatcgtgatcgggatcgagatcttggcctaaaagatttgattggtgatgctgattgagatctagatcgtgacctagacacagaacgctgcagagatctacttctaactctttatggacttctgctactgctggggctactgctggagctactgctgcagctgctagaacgactactctcatacttcctcacccgaatataagctctcgaccagggattgttaaactcacagtcatccaatttccgaatggcatacttcatgtgatcataata

SEQ ID NO: 9762 - DNA, 490 bp, Glycine max
  unsure at all n locations
  Clone ID: jC-gmle01810043c12a1
caaagaagcgcaaaaggaacaagtatgcttttgcttgtgctgtgctggcctccatgacttccatcttgcttggctacgatattggtgtgatgagtggagcagccttgtacataaaaagggacctgaaagtgtcggatgtgcaaatcgagatcctgctcggaatcatcaacctctactctctgataggctcatgcctcgccggcagaacctccgactggataggtcggcgttacacgattgttttcgccggcgccatcttctttgtcggagcacttctcatgggtttctcccccaactattcctttctcatgttcggccgtttcgttgccggcatcggcatcggctacgccctcatgatagcccccgtctacaccgccgaggtctccccggccttctctcgtggcttcctcacatccttccccgaggttnttattaatggagggatattacttggatacatatcanactatggattntcgaagctgacact

SEQ ID NO: 9763 - DNA, 529 bp, Glycine max
  unsure at all n locations
  Clone ID: jC-gmle01810043c12d1
accctgcgcccgcagcctcaacgggaagatctcagaactataaacccacgtgatgggacccgcaccaatggagaacgtggccacgtaagccaacaccatggctatgctcaatgcaacggcccacattagtttcctctcggagtgaccaatgatcgtgaggctgatagcgagcgtgaggagagagagcaccatgcccccgacactagacaacaacaacggacgacgacccacgcggtccaacgtaaaagtagccgccaagatgaaaacggttttgacgaatccaacggccacggttgcaagaagtttatgcgtgtcgtctttgatcccagccttctcgaagatcctggggctgtacaaaacgacggcgtctacgcccgacgcttgttggaagaagtgaatcccaagggcagcgattacgatgtgacgaattgngggcgttggatagaggaagagttctttccatacgccttcacctgtgcttcgtttggttacctgaacgacgtcgtcgatgcaactcttcgggatccct

SEQ ID NO: 9764 - DNA, 587 bp, Glycine max
  unsure at all n locations
  Clone ID: jC-gmle01810043d01a1
ctcgagccgattcggctcgagaattaatcatttaaaaattataaaaataattataagttttaataaaaaaaattaaatctaatcataaaataataaaaaaataactacaaaaaagtaaagttttatacttttaccttttgtatcaggattatttaataataaaataaaaattacaatctcgaaaaataaagatttaagcataattatttttaatatttcacaattatataaaaattatatttagattttataaaaatacaatttattaatatctagttatctaagaaattaatttaattaaagttaacatatttaattaatttaaaattaaattttagtaaacaaaaatcttaaaagataagttataagataaaatataaaaaaattaaaactcaatactggtagtaataaaaatattcaacagttaagtttgtaaaaatttaagtgaaaaaaatttaaataaaatttattttaaaaatagattataaataaacacaaataagttaagtaaaatgaataaattaatatataagaattattntaaagcaagaactcggcaagtaattttcagctgttatcaaaacata

SEQ ID NO: 9765 - DNA, 567 bp, Glycine max
  Clone ID: jC-gmle01810043d02a1
tggagcccctttacaaggggattggacagagtgctatttgggctgtcatgaccgtggttgttgtgttggaattcaccgcaggggcaactttatgcaaaggactcaacagaggattggggacattgttagcgggattattggcatttcttgttgggtatattgcaagtgcatctggccgagtctgtcaagctattatcatcggagctgcagttttttctataggagctcttgctacttatatgaggtttattccctatataaagaagaattatgactatggtctagttatatttctcttgactttcaacctgattgctgtgtcgagctaccgggctgaaaatgtcttgaaaattgcacatgatcgcgtatacaccattgccataggctgtgctgtttgccttctgatgagtctactggtatttccaaattggtcaggcgaagatctccataattccacggtttacaagctcgaaggccttgccaaatctatagaagcttgtgtgaatgagtacttttacggagaaattgaaggctctggggatatgaaattatctgaggatccaatat

SEQ ID NO: 9766 - DNA, 477 bp, Glycine max
  Clone ID: jC-gmle01810043d02d1
aaacactgaatgcatccatgcactttataacctgaaagatcgtcatcctcctactactactaatagtagtaaaaaaatactgatgaaatatattaattatatttaatatccatgagcatgattgatgaaataacagataagagattatccatctttggtctcttaattagtcggctccatgagaaggtaaatggttctgtgacacgtcaattcgaggctcctgacaagtgacaacaaagtcatccccgggtatgaagtctttaaagcatgctagtctccccagttcctcaacttcctctatgacaaggtccagtttagccactgtttccacaagcaaagacgcaaaggcggcgaaaggaagcgcctcagagaactcaaggctagttattgcaattttactcagttgcggcctcaaagacttcctttctgattcctttggctgttcaactgaaaccctttttggtttccattccagca

SEQ ID NO: 9767 - DNA, 294 bp, Glycine max
  unsure at all n locations
  Clone ID: jC-gmle01810043d03a1
gggtcacccatgagatccgcagtgtctggatatcatactggtctcaggctgaccgttctctaggccaaaagatagcttctcatctcagcacgaggccaaatatttaatgttgttgccaactccagaatgattgttagagttgcagacgtgcaaagagtacgataaggatgtgattttggattacctgaaagaactaatccttttcttgcaatattatgttgtgtgtacccataactccatgaatgcaactcgttgacctatctcaataaatgccgtttgtatttgttagtnttt

SEQ ID NO: 9768 - DNA, 279 bp, Glycine max
  Clone ID: jC-gmle01810043d03d1
aaaggctaacaaatacaaacgggatttattgagataggtcaacgagttgcattcatggggttatggggacacccaacataattttgcaagaaaaggattagttctttcaggtgatccaaaatcacatgcttatcggactctttgcacgtttgcaactttaacaatcattctggaattggcaaccaccttaaatattgggcctcgtgctgaaatgaaaagctttcttttggcctaaagaacggtcactctgaaaccactttgatatccaaaccctgggga

SEQ ID NO: 9769 - DNA, 463 bp, Glycine max
  Clone ID: jC-gmle01810043d04a1
cccaacccccacccgtagtttctaccaccttcagtcacggcgtaatacactaaccaacccaccatgtcgctgcctgcttgtcccgccgaacaactggcccaacttctcggcccaaacaccacagacgcctccgccgccgccttccttatctgcggccagttcgccgccgtggacagcaagttcgtcgacacggccttcgccgtcgacaacacctacctcctcttttccgcctacctcgttttttctatgcagctcggcttcgccatgctctgcgccggctccgtccgcgccaagaacaccatgaacatcatgctcaccaacgtcctggacgctgccgccggcggcctcttctactacctcttcggcttcgccttcgctttcggctccccctccaacggcttcatcggtaaacatttcttcggcctcaaggacattccttcatactgctacgactacagctact

SEQ ID NO: 9770 - DNA, 450 bp, Glycine max
  Clone ID: jC-gmle01810043d04d1
gtttcgtccttttttttttttttttttactatataccaatcttcttccttctttttttggtgaaaactacaaaaataaatcccacaaatttccattttccacagccatctgtcatttccaggaccaacatgccttagtcaacaaccaccccccacagaaacgtacgcatcttccaccagaatctttaacttccagcatccaccaatgcacgaccaatgacaattacaaatcaaaatccctaattgcccatcatcataaaaagaaaaatctacgaaaaaagaagacccaagacaaataaaaaaaaaaagaagtaaaaagtcatgagtatcaaccggagttggatctaacagaagtaacaagtaaccaaggtttgaatccttacaaggaatatgtatccaaatttaatgtttgactaatgagacatgcatatgggaaaaaaagatcattcat

SEQ ID NO: 9771 - DNA, 302 bp, Glycine max
  Clone ID: jC-gmle01810043d05a1
ctcgagccgctcgagccgctttcgaaagattttatccaattgaaattttaaaaatgactgggataaacttaagaattcaattattgaaattgaataagtaaacaatttaattggattggtcgaatggtatcaaaaaaatggagtactaactcccatttcttatttattattgaattaaccgatcaacttgctttgttatcgaacatttctttttgatttcaaaaattttccggaaaaaatttgaatctatttttatatgcgaatcaatcctactacttctggtcctgaggtttctgcgcttg

SEQ ID NO: 9772 - DNA, 302 bp, Glycine max
  Clone ID: jC-gmle01810043d05d1
caagcgcagaaacctcaggaccagaagtagtaggattgattcgcatataaaaatagattcaaattttttccggaaaatttttgaaatcaaaaagaaatgttcgataacaaagcaagttgatcggttaattcaataataaataagaaatgggagttagtactccatttttttgataccattcgaccaatccaattaaattgtttacttattcaatttcaataattgaattcttaagtttatcccagtcatttttaaaattccaattggataaaatctttcgaaagcggctcgagcggctcgag

SEQ ID NO: 9773 - DNA, 445 bp, Glycine max
  Clone ID: jC-gmle01810043d06a1
ctcgagccgattcggctcgagctttgccttctgcatgttggttctctgtaaacagatactgcaaaagaagaataatattgaatatttggttgggttgaatccctgggttgaagcgttgcagacatcacggctattctaagagtgtctcgctctctcattcatgtcccaactgtacgacggaggacaggttgcgtaactgccaccaacccttcgccgcacggtgggcgtggtgctttgccttctgaaggtggtagcccttcagacttgctcttcttagctggtggtggttctgctgtcttctagcttcttcttaactcttttttctttttactacttttaagctaccttgttttcaaaataacaaaaacaaacactttcttacttcataagatcaccttttcttcatcttctacttctccttcactaaaatgatgctcaaaatcaa

SEQ ID NO: 9774 - DNA, 449 bp, Glycine max
  Clone ID: jC-gmle01810043d06d1
aaaccccaaaagggaaaaaaaaaaacaaacaaaacattattaaaaagggggacccaaaaaacccgggggggaaaacttttccccaaaaaaaccccccacccgggggaaaaaaggccccggaaaataatattccccgcgaaaagaaaccccaaaaaaaaagaaaaaaaaagcttttagaaaaaaaagcccccaaaaacccaaacccccttttcgggggggcggttttaaaagggcccccccaaaaaaaaggggcaaaagggggaaaaaaaggttttcctttaaaacaccccccccaagggggtaaacccccggggaaaaggaagcctaaaagggggccccctttaaaaaattttcttaaaaacccgggggaatttgggaattggggaaaaaaaaaaaaacctggtttggggaaacccccacttttgggggaacccccccccccccccaaa

SEQ ID NO: 9775 - DNA, 523 bp, Glycine max
  unsure at all n locations
  Clone ID: jC-gmle01810043d07a1
attgaagttgaagtcttgcccttctctcttcaactccaaacacaagacatcatcatccatggctgcctccgtctccactgtcggagctgtcaacagagctcttttgaacctgaatgggtctggacctggggtttcagctcccagttcatccttctttgggagcagcttgaagaaggttattggctcaagggtccccaacacaaagatttcctctggaagcttcaagattgttgctgtagaagagaagaaagagattgaagagacccagcagaccgacaaggacagatggaagggtcttgcctatgatatctcagacgaccaacaggacatcacaagaggaaagggtttggttgactcccttttccaagctccacaggatgctggaactcactatgctgtcatgagctcctacgagtaccttagcactggacttcgccagtacttggacaacaacatggatggattntacattgctccagcttttatggacaaaactttgtgtcacattaccaagaacttcatg

SEQ ID NO: 9776 - DNA, 530 bp, Glycine max
  Clone ID: jC-gmle01810043d07d1
agaggaagacagtccaatatgaaaaatatagtaaaatcatctcaaacttggcatcttctctttgcacctaagacattgagaattctaagaatgttacacgcaagtcccatcacaacttctagcacttggatcagcacaaccttcaggaacagaaatatttacttgccaagtttgctttgcctccaattcaagattggaagaaagttcccctgttaatagcatcctcgttagcatttccaagtgcagcctcgttcaagtacttgtcagccaattggactctcttgacattctcttgttcttggacaagcatgttaccatacgtcaagagcttctccagagtcatcttgggctgctcaaaggttggaggtccatcttttgagttcacaagcttcttcccaatgccgtcaacaccaacaccagaaatccacttcctcacttcgtcatcatatactctggccctcagtgcaccaaagaaatcaatggattggccactgaggtgtcaacaatcttgacaacgtcctgttcaggaa

SEQ ID NO: 9777 - DNA, 614 bp, Glycine max
  unsure at all n locations
  Clone ID: jC-gmle01810043d08a1
agatggtccagattagtaccacaaaaatggagaaatagaataactgaatatcgtatagctcaaaataaagatttaaccaaatgcaattcatatgaaaaaagccaattaattctttacaaagaacaacaagtaaacgcattaaaaaaaaaaattagaaaacaatatagatacgatcttttatcctataattttatcaattatgcagataagaaagactcatatatttatggatatagatccctatttcaagtaaaaaaaaaccaagtgatttcttctaattacaacacgtataaaaaagaattattggatatcatagataatctctttatcaagaattatatatcggaagatgcgattctagatatggaaaaaaatatgtatagaaagtattttgattggatgggaatcaatagagaaatactaaatcgttccatatcgaatccagaattttggttcttttcaaaatttgtgatattttatgacgcatataggggtaactcgcaggttataccaatcaaattacttttntgttcttctaatgtaaatcaaaatgtagtgagaatactagaacatactagaaagaatagaatggatctcttgaatggagtagagac

SEQ ID NO: 9778 - DNA, 542 bp, Glycine max
  unsure at all n locations
  Clone ID: jC-gmle01810043d08d1
gatctcttgttcttgtaatatatttataaaaatttttcttattaacatgaattttttctgggtatttgtgataaatttttcgtttattcttttgaattaatgaaagacctatggtttgatacataaaaaattgtttattgttttttctagacaggcgaactggttcgataacaaatatttcttttttcataaatttgttatttttctttttccttaagcctagaagaattaaattcttctgattttgaatcatcataatatctagacctagttctcctctttgaatagaggctattgtaatttctcttaaattttttaatctaatcaggagacaatatactttgacattgttaaatattctttgacctaagaaattattccaatttaaatgtaaaatcaaaaaatttcttagtaagaaattaagttctgcctccatcttgttcttgtctttctttttctttatacccttactattcttttcactggctgatcctacataatcgntntcaatatcttttttcttggtttgagatagatgattc

SEQ ID NO: 9779 - DNA, 533 bp, Glycine max
  Clone ID: jC-gmle01810043d09a1
ataaataggagaattttcacctactctaaatttccgaggacatgcgaaaaatgataatagatctcgtcgttaacgttaattttaacataaatttttaaatcgtaatttataactaaatattacaaaatggaattcttattaaaatgaaattcaaatcatttcttttataaaaaaaaaaaaaattctttaattaaatatttaatgaaattaaatatttaaattaataaaattagtcgtgttttattcgattttttgaattggttttttttttacagtagctaatgctagtcaccgaacttagtcaatgagctagaatgggttataaagatatctatagatatatatagatatatttatctatagatatctttagaaaaaaaaaaagaaaataaacaaataagacgtatcattttatgtatagtagtggggaattatgggacaaaaaatgatacgtcttatttggttattttctttttggtttgctcaaccaacaaattattccgagatatacaagaagataaaaaaatacgaga

SEQ ID NO: 9780 - DNA, 423 bp, Glycine max
  Clone ID: jC-gmle01810043d09d1
gcatattcgtctgtaattcttcgattttttgagacttaccctctattaaaaactttggaaatcccatatatattataacttgaataagatcaattcttttttgaatctttatctgtccaattccctcaacaccagaggatattcttatattttcttgtatataatttttgatacaatctcgtatttttctatcttcttgtatattctcggaataatttgatggtcgagcaaaccacatagaaaatatacaaatacgacgtatcattttttgtcccataattccccactactatacataaaatgatacgtcttatttgactatttgcttcttacggttctaaagaactctgtcgcataatacatctatatatatctatagatatcttaatcacccaatctagctcattgctcagatcggtgact

SEQ ID NO: 9781 - DNA, 531 bp, Glycine max
  Clone ID: jC-gmle01810043d10a1
cttattttgaatctaaaaaggtgataaattgataccttttatatctaaggaagactgtaaaaaaggaaacaagcaagaaacagagaatgcgcagaaagatatgagagtaaatgctcccccaaagtcagataagattctctggactcctatttccattaccaaattcctccatatcccccacaatcattacccctccattcttataccagaaccctctcagcaattctttgtcctctaactaacttattcccttgacaaaagtctactccaaattagacccatttgccctcttgggcctacggacataaacctgaaaaggtttcttctctttgggccggttcccatcataaattatgtcccacaacacagttttgtcctgtttcaagatttgttctaaactttgtttagttagtctgtaaaattagcgttgttctagatctacaaaatttatcagtttattatgttcataggatatatggttattagttccatgttcaatacattttctggccaagtgttttatggaaatac

SEQ ID NO: 9782 - DNA, 483 bp, Glycine max
  Clone ID: jC-gmle01810043d10d1
gattctgccaaccagtaactataacttcattaattgagaatagtacataagtttacatgctcggtagcaaacagccaaaatggctgattactattatttacaaggaaacagatcaagagtcattacaagtcttgaaaccctcacaactgtaaccaggataattgggtaatactttgctttcgacctttcttcacaaattcaatcataatagtcaacgaaaacaagtattttaagagagtagttatacatgaaaatttttagttagcatcatttgcagagaagtcaggctcagggggtttctgtagtttcactaactccctggcagtcttggcaagtcgattgcgatgtacaccacgtagggtgtgcgcagcaaactttgaggctaacaaggcagcaccaaagctgtaggaactgccaccaacattttcatgagctccgtctgactcatcttccttttgacgaggctcataattttctttttgg

SEQ ID NO: 9783 - DNA, 555 bp, Glycine max
  unsure at all n locations
  Clone ID: jC-gmle01810043d11a1
cccatccaatcgcaaccaggaaatggatgtggttccttatccagtaacacccccaaacctcatttctctgccacatgaaccctcccaaacacagaaaccatagcaaaaagaaacccagattattgattattaataatggaagccatattcgtcaccaaacccgcttcccattctctcctcttaactaaactctctccgaatcccaaacacttgttccctccacaccaacaatcctttcacaacatgcgccacaaacccacgcgctttcgccccgtcatcgctgttttccaaaaccaacatcaacaagatgcagctgcagcttccaaccacaccgaagatgagttctacggcgaagtcaaaggcatcattggaagcagagccttggaagccgtcaccggaatggagtacctcatcgagtggaacgacggccacgcgccgtactgggttcccgccgacttcatagccaaagacgtcgtcgccgagtacgaaactccctggtggactgccgccaagaaagccgacgagtccgcgttgaanaacttaatcgaatccgac

SEQ ID NO: 9784 - DNA, 474 bp, Glycine max
  Clone ID: jC-gmle01810043d11d1
gaggaaaatatgtattggatttgattagctttttcatgtccacaacttgatttggtacaaaacaattattaattaatttgctcccgaaattttgcaacaaaatcccagtccaaacaaactatgaaaaatcacaggctagggctatcctgattggaaaagaccacagcgggcccattactactgggctgggcctggttgttacttccctcgaaagctttgacaagctctgggtccacattctcctcgggctcccatgtgggctcctccaaatcggcccatttaaccaaaaactccggcgtcccttcatccgctacccttttcgcgagcaccgcctcagcgacggcgtactcgaggccagcctcgtagtctttcaccaaatcctccgtcacaaacttggccttcacccactcgttggcaccaccgtccttccaccgcacaagatactccaaattctcacccttttctgtgcgttcc

SEQ ID NO: 9785 - DNA, 416 bp, Glycine max
  Clone ID: jC-gmle01810043d12a1
cgttctttaaccgcggtaatctgagcattgcgcgcgacctgctcgacattctcgcggaggccaagcaggaggtccccgcctggctcgtcgacattagcaaggagcgctcgtttggcggcggtggcggctacggccgcgggcgtggcggtggtgggcgcggtggcggtcgcccgacgggcgggggacgcgatgtgcgcatgggcgggggtggtggtggtggtggcagcagtggtgggttcggtggcgcccgcagcggcggcggagggtggggcggcagcggtggtggattcggcggctcgggcggcgcgttctcgactaacggcggcggtgggggcggtgcgagctagtggtaagcgtcgttggcgaagccgatcagtgcggtgcgcgggcagtgaacgtcgcgttcacgctcgatc

SEQ ID NO: 9786 - DNA, 476 bp, Glycine max
  unsure at all n locations
  Clone ID: jC-gmle01810043d12d1
caaacaaaaagggtacattcgtctccctctctacatgggttgggtaaaaatgatacacgcgcaaatctctcctctgtcttgtatatacaggccaaataaataaaaatgccttctgaccgtctctcgcagacctcgcgatgccttttttgtcgttataatgtatttgctgttgtcgtcgtgccgtgtgttggtcgtcgcttgtaggggcgacacaatgtgtttgatttggatctattctctattgttgttgggcgnaaagggaagggagggtagtaaatgcatgcgcaagacgtgggccaaccaaaatctgctgtccgcattggcatgctcatgcagcttgtaataagaaggttagggtttccataaaacaagggattctttactttattttgtccaaagaacaaagcccttgcattattcagttgctcctgacctctaatcacatctatctgtgaccatatatactcatatgtaac

SEQ ID NO: 9787 - DNA, 490 bp, Glycine max
  Clone ID: jC-gmle01810043e01a1
tgatcattcattcactaatcatcaagatgaattagcctcggttgttgtgaacttcataaaggaaaccttgcaccaggataggagtactgctaactagtttcaagccagttgaattcctactgatgacaattatttttttcttgtcatggatgaacctgcctttgatgttctacaacatatttgagctcttctagtttttgcctattaaattagtgaatcttgcatcattgtgaaaataacggcgaaagcagtatctgcgagtgttatttacctctgatcagatgcatgtacaaagttactttgacattatcaatttatgaatgcaaacagttatctcatggtaccaccctgtggccagggcaaaagccttagaggggttatataactacaaatgatcatatataacggtcatcctagttatgtgtgtgctaagttccacatctcatattcgttgtgggtaaatgttatgacatggaaacttcctagtttt

SEQ ID NO: 9788 - DNA, 449 bp, Glycine max
  unsure at all n locations
  Clone ID: jC-gmle01810043e01d1
aaaactaggaagtttccatgtcataacatttacccacaacgaatatgagatgtggaacttagcacacacataactaggatgaccgttatatatgatcatttgtagttatataacccctctaaggcttttgccctggccacagggtggtaccatgagataactgtttgcattcataaattgataatgtcaaagtaactttgtacatgcatctgatcagaggtaaataacactcgcagatactgctttcgccgttattttcacaatgatgcaagattcactaatttaataggcaaaaactagaagagctcaaatatgttgtagaacatcaaaggcaggttcatccatgacaagaaaaaaataattgtcatcagtaggaattcaactggcttgaaactagttagcagtactcctatcctggtgcagggtttcctttatgaagntcacaacaa

SEQ ID NO: 9789 - DNA, 563 bp, Glycine max
  Clone ID: jC-gmle01810043e02a1
cctcaccacaacaatttgggcccaccaaaccacccgaacttgcaatactgtgtcgccaacaagcccgaaccgggtccttcttccaaatctcactccgtggtagaggaggatgtgattgcaagatgaggtagaaataacgctgtaaaatcgaaatcttatatcacttggttttccgtggatttgtgacatgattgatttgaacaaaaaaatcagaattagagtttcagctagtgttttgtattaaagttaggaccaagcttagatataattgcttaggtgtttttgttcatgttctcctatacattttagttttactttggtaatctatgtagatataatttcttaggtgcttttaataacgtttagtagcttcatttcggtaatctatgttaacttttactagtattatgcaatttgctgaggtcaaactctaattttgattggagaacaacactaacaacacttaaggaactgcgttctaagttttgtagattaatagctagaactcgattctcattgaaaatcaggaaaaaaaaaaaagaacacttgagaacttgattaag

SEQ ID NO: 9790 - DNA, 462 bp, Glycine max
  unsure at all n locations
  Clone ID: jC-gmle01810043e03a1
gagaacaacaatggttcctccattgctggaaggagacttgagatcacagcacgaactgctgtggcttcaaagacaattgaggtggaggttgacaagccacttggcctcaccttaggccaaaagtctggtggtggtgttgtcatcactgctgttgatggtggtgggaatgcagcaagagcagggttaaaggcaggggaccaagtcctttacactagcagtttctttggggatgaattgtggcctgcggataagcttggatttactaaaaccgccatccaagcaaagccggactctgtctactttgttgtcagcaggggtgctgaagtagacgttaaaaagctcacaaagcgacctgctcctcctcgatttggaagaaaactgaccgagactcanaaggcgagagctactcacatttgccttgattgtggatacatatacaccttacagaaaccttttgatgag

SEQ ID NO: 9791 - DNA, 280 bp, Glycine max
  Clone ID: jC-gmle01810043e03d1
gacatgatcattcaaggagatttataagagacacatgctccaatattggacaactttggaggacagaaaataaacaaaattaacatgttggggaattaataaaaggctactgaagaccataaacaagcaaagctgcaactgaccctacaccagccaggagtccaataataactccaattggaggcaagctacccaccaatagcttttccagtgttaacatcataacgggcaaacctcttctttggtgcttgacattgaagacacccgtatgtgtacggct

SEQ ID NO: 9792 - DNA, 163 bp, Glycine max
  Clone ID: jC-gmle01810043e04a1
attgggttataaaaaaaggggggaaagaggggaattgccaaaaacaactctattattttagaagaggaaaaagtatcccacccccttgggcgaggcatgccattcgacaaaaacaaaattatttactccaagaaagggatttttttttttcttaattggaaaa

SEQ ID NO: 9793 - DNA, 58 bp, Glycine max
  Clone ID: jC-gmle01810043e05a1
aaaaaaaaaaaaaaaaaaaaaaaaaactggcttccttcttttgtttatatttacagga

SEQ ID NO: 9794 - DNA, 469 bp, Glycine max
  Clone ID: jC-gmle01810043e05d1
ataaaaaaatattaaattataaagataaaaaatatatttaattcaatttcttattaagataatgtatactacatataattaattagagttgaaaaacacacaaaaatatagcgaaagcttccaaaagttaaaattttgtgtaccctaccacatgtcacatgcaaatttagggcagaatttaaataaataaataaaagatgtatcctaactttcaacaagattcaatgggttttcaagttcccattgatcttgtttaatttatcccaacttacacaacagaaatgaaaactaaaaaagaagcatgcatgtaacatgctcgatcaattccaaagtatcactacgatggaaatgcttaaaccttcattgctgaagacgtactgattttcaatcctgaacaaaggatgacaactacgaacaaaatttctaagtataaaaatcctgtagattttacgcatgaatccttcttttg

SEQ ID NO: 9795 - DNA, 123 bp, Glycine max
  unsure at all n locations
  Clone ID: jC-gmle01810043e06a1
aaaaaaaaaaaaaaaaaaaaaaaaacctggcttccttcttttgtttatatttacaggagcnnntccctccctcttcccaaaccctacctactctcctattaatttcaaattcccctccccttt

SEQ ID NO: 9796 - DNA, 467 bp, Glycine max
  Clone ID: jC-gmle01810043e06d1
ataaaaaaatattaaattataaagataaaaaatatatttaattcaatttcttattaagataatgtatactacatataattaattagagttgaaaaacacacaaaaatatagcgaaagcttccaaaagttaaaattttgtgtaccctaccacatgtcacatgcaaatttagggcagaatttaaataaataaataaaagatgtatcctaactttcaacaagattcaatgggttttcaagttcccattgatcttgtttaatttatcccaacttacacaacagaaatgaaaactaaaaaagaagcatgcatgtaacatgctcgatcaattccaaagtatcactacgatggaaatgcttaaaccttcattgctgaagacgtactgattttcaatcctgaacaaaggatgacaactacgaacaaaatttctaagtataaaaatcctgtagattttacgcatgaatccttcttt

SEQ ID NO: 9797 - DNA, 449 bp, Glycine max
  Clone ID: jC-gmle01810043e07a1
attcacatcacttgataacaattctgtaagttacaatcatcattatataatgctcttgcagatgttcctattagtgctagaaacattttggatgatcctgaccttaaaaatgctgtaaaagccttcaggtaacttcatgcttgttgatcttattagtatctgcttcctaaaaaaacattagtcatctacaattgtagttaatagttgactaagaattttgatggatgatagtttattattgtggtttgatagaaatagaagccatcttgggcctatgttaggtagttggaattggctcagaataagcactggaattagaaattaaatttcaattgccaacaggctaagacttacggcatcaaattcctccccttccacttcagacaataaccactccgtgaagtccacctaatagctgttctcaccaactcatatcagctgcttttgat

SEQ ID NO: 9798 - DNA, 531 bp, Glycine max
  Clone ID: jC-gmle01810043e07d1
acaggaatgttgaaacttcttatttgaatataatccagaaattaaagtacaaagtattcacatctcttaatagttgataagcaagttcttgtaaactacatctcttaaaacttcttcaccttaggcgtgtgttcactgcttggaagtaatatctttaagcttttccttcaattcaccagtctggtgcatattgagaacaatatctgatccaccaataaactctcccttgatgaaaatttgaggaaatgttggccagttactgcacagaaagaacagggagaacagtaggatatcattaaaaaaatcgttatttattaattattaaacttttaaaggaaacaagtgattaaacttggaagcaccagtacttgtcaatttgccatgataacatgcttaaaaacaaatcaaatatgagctcacagttatatcacataaaatgcaaagacaaaatgacatataaccacaaacatgcgtagacatttgcaggctgactagtttccagagatttggcaagcctgtggctcagatgtc

SEQ ID NO: 9799 - DNA, 572 bp, Glycine max
  Clone ID: jC-gmle01810043e08a1
atcaacagcaacagcaacagcgccaccaccaccaccatcaacaacgacaaaaacaacaaaaccgacaggcaaaagatccgataccatcaatgcccccgaaagcgacccttcacagcaccttgcaatgaataacagacaaggcttctcggaaaaccaagcaaagaagtccaccgcatccaccaccaccaccaccatcgcctctgaggtggcgccacccgtgtctcagtgcttcgacgactcagacctgcccgcacacagattaatggcctctgatgacacgtgtcatttggtcacagcagattttgggaccgcatctgcaagtgctgacattggatccacactcattaggtttgggaccacacccggtgacgtgtcactcaccctagggcttcgccacgccgggaacatgcccgagaaatctcctttctctgttagagactttggagccatttaaacttcaatatatattatatagtactacttcacataataataatcaaaataataataaatattatataggaagaatgcttatcatattgatatgtatatcatatcatcaaaagaaaaca

SEQ ID NO: 9800 - DNA, 509 bp, Glycine max
  Clone ID: jC-gmle01810043e08d1
aaaaataataaagtacatatatcgggaaaaataatcatgaaaaacaatctgctatacagttatacaatagataccatattaatgttgcgcctaattaatagctaccttcagactacctttctcatatcgtattgccttttttattctcctgtccttccacaatgcaaataagacagatcgaggaataactgagaaacaataaaggggggaaaaatgttttcttttgatgatatgatatacataataatatgataaagcatcttcctatataatatttattattattttgattattattatgtgaagtagtactatataatatatattgaagtttaaatggctccaaagtctctaacagagaaaggagatttctcgggcatgttcccggcgtggcgaagccctagggtgagtgacacgtcaccgggtgtggtcccaaacctaatgagtgtggatccaatgtcagcacttgcagatgcggtcccaaaatctgctgtgaccaaatgacacgt

SEQ ID NO: 9801 - DNA, 558 bp, Glycine max
  unsure at all n locations
  Clone ID: jC-gmle01810043e09a1
gtagtttttgaagtatagagatggcagagacattcctatttacctcagagtcagtgaacgagggacaccctgacaagctctgtgaccaaatctctgatgctgtcctcgacgcttgcctcgaacaggacccagacagcaaggttgcctgcgaaacatgcaccaaaaccaacttggtcatggtcttcggagaaatcacgaccaaggccaatgttgactacgagaagatagtgcgtgacacctgcaggaacatcggctttgtctcaaacgatgtgggactggatgccgacaactgcaaggtcctcgtcaacattgagcagcagagccctgatattgctcagggtgtacacggccacctcaccaaaaaacctgaagaaattggtgctggtgaccagggtcacatgtttggctatgccactgatgaaacccctgaattgatgccattgagccatgttcttgcaacaaaactcggtgctcgtctcaccgaggttcgcaagaacggtacctgcccttggctgatgcctgatgggaagacccaagtgacncgtgagtattacaatg

SEQ ID NO: 9802 - DNA, 358 bp, Glycine max
  Clone ID: jC-gmle01810043e09d1
aatgattacatttgatgccagaaaaaacaaaatagactggacaggaggaagagaaagtgagaagcacacacgaataaagtgaaatcaatgacacatactatacatacgattcgggcaaagttgaaagaactgccaggacacagcctagaagtgtgaatggccttaggcctcctcccacttgagcggcgagatcacttaccatgtgaagccaaggttctttcttgccaagtgtgcatatgcagcaatcttcaaatgccagaaagttccaccgctaatgagatcaaggttgacggagaccatgccaggcctgaaataaaagttgtccttcacaaggtctatgatcacattgtctgggatc

SEQ ID NO: 9803 - DNA, 483 bp, Glycine max
  Clone ID: jC-gmle01810043e10a1
accacttgaagattctccttttcaaatttcaacctttttcccccaaaactaacaaacccctcttcttctcaatcattgcatggctcttcactgattctataataataatttcagattcgtttttcgttctttgttaccatggagttgatttcaggtctaccagaggacgtagcccgagactgtttgattagggttccctatgatcaattcccggcggttgcttcagtctgcaaaggctggagcgcggagattcactcgccggactttcaccgtcggaggagaaccaccaaacaagcccagaaaatcctcgtcacggttcagtccaagatagactccgataaaacccgaaccggtttgctcgcgaagtccaccaccaacccggtttaccggctcagcgtattcgaaccgaagacgggttcatggcgcgagttacccctgggacccgaactcgctttcgggctccccatgttctgtcagatagcg

SEQ ID NO: 9804 - DNA, 248 bp, Glycine max
  Clone ID: jC-gmle01810043e10d1
aaagaaaacagaaaggggggttaatataaccctttttacccaaactccccgaaacaaaactggagtccttgggcccaataattgtccgcattttaacctggtaaaaaaaaaaccagtgaagcagccctaaattcggaaaaggctacctgattggacatgacccggggggacccctgggctggaccgctgataccaaggccgcttttttagagccaacaccaagcccgcttgggggcccccaaagccac

SEQ ID NO: 9805 - DNA, 557 bp, Glycine max
  unsure at all n locations
  Clone ID: jC-gmle01810043e11a1
ctctttatttggagaatcgctaagagtggcctccaaatcaacaataaaggtttcaaagacaaagaatacttcactcgtgaccagatgtgaaattggtgacagtctcgaagaattcctcacaaaagcaacaccagataaggggttgatcaggttgttggtgtccatgggagaagcattgagaacaatttccttcaaagtgaagacggcttcatgtggtggaacacaatgtgttaatacttttggggatgagcatcttgcagtggatttgctagctaatcagcttctttttgaggccttagattactctgatgtctgcaagtatgcttgctctgaagaaaatcctgagctcttggacatgggaggtccagttgaaggtggatttagtgttgcatttgatccccttgatggctccagcattgtggacacaaatttcacagttggcaccatctttggtgtgtggcctggagataagtngacccgcatcaccggaagagatcaagttgctgcagccatggaggttcttggtcctagaacaacatatgtacttgctctaaaag

SEQ ID NO: 9806 - DNA, 391 bp, Glycine max
  Clone ID: jC-gmle01810043e11d1
accaacataaatttactttgttattatagcgattaacagaaatatgtgactaaattgcaggtacttgtctgaagatatagcatatatctttctttctaaaagccgataaaatagacaatgaattgcaggtttaaccgattaagcagttgctccaacagctaccccatccttgggcctggatttaccatacggggttttttcaaaccggatgaactcattcttggacccataagcaacttgagttctctcatcaatgctagtgatgactttgtctatcacagactgatgaccatcactgctgaaacctccggctttttcaatcaagaaccccaacggagctacctcaaacaacagtttcagcttggctttggctgatgatgatgtcacattg

SEQ ID NO: 9807 - DNA, 372 bp, Glycine max
  Clone ID: jC-gmle01810043e12a1
ggaaaaggcccaatcagttttcctgtcacagcagcttgaattgcaaagatgaggaagaccaccatggctaagcgagaatgcttgatctcagcaagttgaagtctggctttttcttcaggaaaaggcccaatcagttttcttgctaccttcaacaagtgacatcatataacaatataatataactttataaatgaaaactttcaaccttgttctcattctcctcggttaagttatccacatcctcatctaattttattaattcttttctgtacacccaaaagatgatgaaaactgctacgtataattatgtatgtatgtttgtactctgttgtatgcttctgtgtgatattcagaattgtttctactttggtg

SEQ ID NO: 9808 - DNA, 372 bp, Glycine max
  Clone ID: jC-gmle01810043e12d1
caccaaagtagaaacaattctgaatatcacacagaagcatacaacagagtacaaacatacatacataattatacgtagcagttttcatcatcttttgggtgtacagaaaagaattaataaaattagatgaggatgtggataacttaaccgaggagaatgagaacaaggttgaaagttttcatttataaagttatattatattgttatatgatgtcacttgttgaaggtagcaagaaaactgattgggccttttcctgaagaaaaagccagacttcaacttgctgagatcaagcattctcgcttagccatggtggtcttcctcatctttgcaattcaagctgctgtgacaggaaaactgattgggccttttcc

SEQ ID NO: 9809 - DNA, 434 bp, Glycine max
  Clone ID: jC-gmle01810043f01a1
ggagatcaagtcaaacattctgaagccagagatagtcatgtgaggctactgtcttaaattcatagcatgtgattaggaagttgtaagtttttgtgtctgaaatgtttgtttgtttctttttttttttttttcccgcatcccaatccgtttttctttgttacatattttacaagttgtgtaatattcagtgttatttatctatctttttaagccaagatttctctgtaattatttgagataaattccgctaagaaccagataatggtggacctctgtcatgaaacgaaaaaacttggaaactttttcctagtcctaggtatatttccatattacggaccccaatgggtgtgcattttatgtgttctgtactttgtattatgtgtctggaccatggagacccaatttggatcttattttcaagcctttcttgagtc

SEQ ID NO: 9810 - DNA, 434 bp, Glycine max
  Clone ID: jC-gmle01810043f01d1
gactcaagaaaggcttgaaaataagatccaaattgggtctccatggtccagacacataatacaaagtacagaacacataaaatgcacacccattggggtccgtaatatggaaatatacctaggactaggaaaaagtttccaagttttttcgtttcatgacagaggtccaccattatctggttcttagcggaatttatctcaaataattacagagaaatcttggcttaaaaagatagataaataacactgaatattacacaacttgtaaaatatgtaacaaagaaaaacggattgggatgcgggaaaaaaaaaaaaaaagaaacaaacaaacatttcagacacaaaaacttacaacttcctaatcacatgctatgaatttaagacagtagcctcacatgactatctctggcttcagaatgtttgacttgatctcc

SEQ ID NO: 9811 - DNA, 434 bp, Glycine max; identical to SEQ ID NO: 9809
  Clone ID: jC-gmle01810043f02a1

SEQ ID NO: 9812 - DNA, 434 bp, Glycine max
  Clone ID: jC-gmle01810043f02d1
gactcaagaaaggcttgaaaataagatccaaattgggtctccatggtccagacacataatacaaagtacagaacacataaaatgcacacccattggggtccgtaatatggaaatatacctaggactaggaaaaagtttccaagttttttcgtttcatgacagaggtccaccattatctggttcttagcggaatttatctcaaataattacagagaaatcttggcttaaaaagatagataaataacactgaatattacacaacttgtaaaatatgtaacaaagaaaaacggattgggatgcgggaaaaaaaaaaaaaaagaatcaaacaaacatttcagacacaaaaacttacaacttcctaatcacatgctatgaatttaagacagtagcctcacatgactatctctggcttcagaatgtttgacttgatctcc

SEQ ID NO: 9813 - DNA, 335 bp, Glycine max
  Clone ID: jC-gmle01810043f03a1
aggaaaaagccttaacctaaatatgcggattgaactattgaattacgtaaaaggacgggaccaacttggtttgcggatagacccagaaatgtatcactgacccaatcggacaacctctacaggattcactttaacgagaaacttaagagcttgcgttgtacatggacagagttaggaccttcctcaaaatgtatattgactctagacaatagaacatgggggaagacaacattagtttaagggccggcggaaccaaaagaaccctctagctcacattaatagagaggcgaggactagggatttacattgcatttgaccgtcagaggcaatttgaa

SEQ ID NO: 9814 - DNA, 248 bp, Glycine max
  Clone ID: jC-gmle01810043f03d1
ccattccggaatatcaagttataaaccacgatttacaaacttatgttaaaattaacggtaacgacgagatctattatcaggtttcgcatgtccaccgaaattcatagtacgcgaaaaggtctcctaatttatggcctaccatacgatctggcatataactaggtcagtgctcttttccagtggggagcagcaacggtatggccaatcattgttggtataacggcaggggctatggaccaagctattat

SEQ ID NO: 9815 - DNA, 535 bp, Glycine max
  unsure at all n locations
  Clone ID: jC-gmle01810043f04a1
cagaaccctcgctcctcgccagaaattgtattgcagaggaaagaccgagaaaaaagaagaaggaattttgatggtaaagtaatattctaatttccaaaattcgattttgttgccgaaggaagaaaagaaggaaatgggaggttcatcggatacgaagctcctgcaagacctgttgttgtacgcagcgagcgcagcgctgagttgcttggtactattcgcgggtttgagacacctggaccctaatcgcgaagcatcgaagaaggctctcgagcacaagaaagagattgcaaagcgtcttggtcgtccccttattcagactaacccttacgaggatgtaatagcctgtgacgttataaatcctgatcacatcaatgtggagttcaactctattgggggactggaaacaatcaagcaagctttgtttgagcttgttattctgcctctaaaaagaccagacttgttttcacatggcangcttcttggaccacaaaagggggtcctgttgtatggaccgnccggcactggaaaaacatgc

SEQ ID NO: 9816 - DNA, 523 bp, Glycine max
  Clone ID: jC-gmle01810043f04d1
ataaccaatgtataatatatatatatatgttcctataactagtataactaaggatgtaatcactgttacaatctgaactaggctaaatgacagtagaagaatgctctaaagcaaacattttaaggatcctgggaatctgattggaggttaatcatgtgagaaaccacaagcttagagatttcatggattgcagcttgaaactgagaatcacctgactcaccaggcactgtccatcttgaaggtgactgaaggctgaatccaccgtattcactagcagcaacctttgtcttctttgaagtagcaagggccttctcaaaatctaactgggacaaaggtctaggggcatgagattgttttcctttcttctcttcatccagtagttctctaataggaaaataggcagctttcttgcaaagatcaaatagatctgaaccagtgtaaccctcacacaaaccagctatatgaccaaagtctatgttgtcttcaaccctctcaccctttaagacaaccttcaatatttcag

SEQ ID NO: 9817 - DNA, 568 bp, Glycine max
  unsure at all n locations
  Clone ID: jC-gmle01810043f05a1
ctcgagccgaatcggctcgaggaagctaagagaatacaccaaaacccaacatgaaaacccttaacaaagcctcacttattttattccctctcttgttcctttccctattcaagcattcccatgctgcaggaatcgctatctactggggccaaaacggtggagaaggcaccttagcagaagcttgcaacactagaaactaccaatatgtgaacatagccttcttgtccacttttggcaacggccaaactccacaactcaaccttgcaggtcattgtgaccccaacaacaatggctgcactgggttgagcagtgacatcaaaacttgccaagaccttggcatcaaagtgttgctctcccttggtggtggtgctggaagctactccctcagttcagctgatgatgccactcaacttgcaaactacctctggcagaatttccttggaggtcaaaccggatcagggccattaggtaatgttatattggatggcattgactntgacattgtatctggtgggagtgaccattatgatgacctagccagggcattaaatagcttcagctcacaaag

SEQ ID NO: 9818 - DNA, 559 bp, Glycine max
  Clone ID: jC-gmle01810043f05d1
tcgtcctttttttttttagaagaagcgcaaaaatttcagactatggtagggttgaaaatgacatatttcgcaatgaacttttaattattttggtaattataccatatgtaacttgtaggtgacatattacaataaacatatgtagcgttcaaagcacattgaatatatatatagtagaaaaaccaatcacgagcggtgattagtattatttaaataatggaattaatgacatagtttttctataagtctataacatgattaaacacttccaataatagcattactataaccattttggacatcattgaatctgttccagagcatgactccaccatactttgaagactgtttaatcacaggaagaacctgagaagtcaacacatcagagggcacaaagccaccacttggagcagctgcctcagatgcaggaagccccatgaagatttgagaagctggcactgtgatccattggttccatgaattgatcaaattggtggtgtttccactggagtattggcatgaaagggtgttgtagaattgaacccacacatagtcaaaa

SEQ ID NO: 9819 - DNA, 525 bp, Glycine max
  Clone ID: jC-gmle01810043f06a1
gtaagaacagggagacccaatcagctttttttgttgatgtgtcaacatctatatgaaccatgcatttgtaaatgtgataagatggaatgaactaccaatttagtctcctaagtattattaccctctctcttgagtagttcctaaagtaataaaactatataagtaattccctaagcattaaatttccatcaatttagttcctaaattgatttattctattaacgttcaggatcattgtgaaaggttttttaatatttgaaggactacatatcatgatatataatatttcagggattattattattttttaatttagggatcatttaagagagagtaatacttcaaagaatcaagaatgaaattgatagtttatttgacatagatggctcgtgatttatgatgtgctgactattttgttgttttttaatctaaaatataaaatctctaatctttataatcaaaaaatacttaagggtatggctcaaaggggttgatgttggtgcatataagcccttctgaagagga

SEQ ID NO: 9820 - DNA, 467 bp, Glycine max
  Clone ID: jC-gmle01810043f06d1
gcttgtcaagggtaaaaaaggggtggattcatttaaaagggcatgatgaccaactttagggaaagttaggggccccaaataggtccccaattacataagcaaatgactaattagacccaatatgctcaaaaacagagaatgatcatgttaatgaagtaattaacagatcccaacccagaaaagatcaagaaaacacacctattcatataccactcggtactatttgttacagacaaatttaaactgcaaaaagttaaacatgcaatccctttaccacattaaaaaatctggaaccaaaatgccttttgaacctttagatcaaatcagacatcctttttctgtgacgacccactgaaactttaaagttttggcctgatgatggaaccatcttgctttcaggagttgggacttttggttccaaattattggtgcatttaggcttttctgtgaaaacacgttttggaatt

SEQ ID NO: 9821 - DNA, 450 bp, Glycine max
  unsure at all n locations
  Clone ID: jC-gmle01810043f07a1
attcacatcacttgataacaattctgtaagttacaatcatcattatataatgctcttgcagatgttcctattagtgctagaaacattttggatgatcctgaccttaaaaatgctgtaaaagccttcaggtaacttcatgcttgttgatcttattagtatctgcttcctaaaaaaacattagtcatctacaattgtagttaatagttgactaagaattttgatggatgatagtttattattgtggtttgatagaaatagaagccatcttgggcctatgttaggtagttggaattggctcagaataagcactggaattagaaattaaatttcaattgccaacaggctaagacttacggcatcaaattcctccccttccacttcagacaataaccactccgtgaagtccacctaatagctgntctcaccaactcatatcagctgcttttgatg

SEQ ID NO: 9822 - DNA, 517 bp, Glycine max
  Clone ID: jC-gmle01810043f07d1
acaggaatgttgaaacttcttatttgaatataatccagaaattaaagtacaaagtattcacatctcttaatagttgataagcaagttcttgtaaactacatctcttaaaacttcttcaccttaggcgtgtgttcactgcttggaagtaatatctttaagcttttccttcaattcaccagtctggtgcatattgagaacaatatctgatccaccaataaactctcccttgatgaaaatttgaggaaatgttggccagttactgcacagaaagaacagggagaacagtaggatatcattaaaaaaatcgttatttattaattattaaacttttaaaggaaacaagtgattaaacttggaagcaccagtacttgtcaatttgccatgataacatgcttaaaaacaaatcaaatatgagctcacagttatatcacataaaatgcaaagacaaaatgacatataaccacaaacatgcgtagacatttgcaggcttgctagtttccagagatttggcaagcct

SEQ ID NO: 9823 - DNA, 553 bp, Glycine max
  unsure at all n locations
  Clone ID: jC-gmle01810043f08a1
atcgatcatgatatatataataattcgagcacccatttcaaacgcatatccaatttttgcacagcagggttatgaaaatccccgagaagcaaccggtcgtattgtctgtgccaattgccatttagctaataagcccgtggatattgaggttccacaagcggtacttcctgatactgtatttgaagcagttgttcgaattccttatgatatgcaagtgaaacaagttcttgctaatggtaaaaagggagctttgaatgtgggggctgttcttattttaccggaaggttttgaattggcaccccccgatcgtatttcgcctgagattaaagagaagataggcaatctgtcttttcaaaactatcgtcctacaaaaaaaaatattcttgtggtaggccctgttcctggtcaaaaatataaagaaataacctttcctattctttccccggatcccactactaagagagatgttcatttcttaaaatatcctatatacgtaggtgggaacagggngaggggtcagatttatcttgacgggagcaagagtaataataat

SEQ ID NO: 9824 - DNA, 549 bp, Glycine max
  Clone ID: jC-gmle01810043f08d1
acaagttaattgaagaaattcaatttgtttaatcaaattccccaaccccctctctttttatttgttcactacgtattatatgcaataaaatattatatggcagaaatattctaagttggaaaaaatagaaactaagatataggatttttcaggaaggggttaaaaaagattattttattgatatttttagaatatttctatttcgacacaaacaagaaggaataggaatcggactctaggaaaagacaaaaaatcccccctagagtaccttttccatattttaattgattttgtttcaaattatctatctatatagatatctattttatgtttagtatcgaatccaattttattgtattttacaatcgaaatttctataatagaactctctattatagaaaaatgaaatctgaaaaaaacagtgtcataaccataatattcgaatttattggggggttgaaaaaacaaagtcaaatagtcttcctgacaatatccatactcgagtttatttgtattacgttacaagtaactctttaaatatagtataaa

SEQ ID NO: 9825 - DNA, 554 bp, Glycine max
  Clone ID: jC-gmle01810043f09a1
gtagtttttgaagtatagagatggcagagacattcctatttacctcagagtcagtgaacgagggacaccctgacaagctctgtgaccaaatctctgatgctgtcctcgacgcttgcctcgaacaggacccagacagcaaggttgcctgcgaaacatgcaccaaaaccaacttggtcatggtcttcggagaaatcacgaccaaggccaatgttgactacgagaagatagtgcgtgacacctgcaggaacatcggctttgtctcaaacgatgtgggactggatgccgacaactgcaaggtcctcgtcaacattgagcagcagagccctgatattgctcagggtgtacacggccacctcaccaaaaaacctgaagaaattggtgctggtgaccagggtcacatgtttggctatgccactgatgaaacccctgaattgatgccattgagccatgttcttgcaacataactcggtgctcgtctcaccgaggttcgcaagaacggtacctgcccttggctgaggcctgatgggatgacccaagtgactcttgagtattac

SEQ ID NO: 9826 - DNA, 391 bp, Glycine max
  Clone ID: jC-gmle01810043f09d1
gttcattgtataggatcacatttgaggataggaggaacggaatagaagggagaggaagaggaaaaggagagaaagacccaacaagcaaagagaagtggcggctccaaatgcagagaagattagggacactcagaaaaaagggggaatgacaacgagtgaggagggacagggcacaggccaaaagccagaagagcggctggatcagttgaaacgagaagggaaggaccactgttccaaagtggccatacgcaacacctgagaagaaccagtgtaaccacccctcgggagatcaacgtggacggagatcgtaccagggcggaaatcggagacctgctgcgcacagggaacgcgaaactgggcaggaacttgaacagcaagataggagtccata

SEQ ID NO: 9827 - DNA, 261 bp, Glycine max
  Clone ID: jC-gmle01810043f10a1
ggctcgagatttttgttgtttctaacctttgaaggcgccttctcctctctttctctttctgcaaccgaaccaaaaattagggtttctcgatcttcttcatttgtcactgctctcaccgtttcagggttttaccttcccaacacgacacagggctggttctgagcaattttgttcgttttgaagagtatttatctgtttcagcagtttttttgttttatttattttttaattgggggctacttgtaaaggtgttatcccgat

SEQ ID NO: 9828 - DNA, 449 bp, Glycine max
  Clone ID: jC-gmle01810043f10d1
caggcataacgggtatgttccattgaaatcatcggcgggaacctgttgttcatttcaaccaccactgtaatattacaaaaaccttagcccaacaaagtggggaaatattaaattccaacataaattggttgacactggaaagagtatgcttcgagagaaataagtcagataaccacgatcggcaataacaaaaagctcgatttctccccttgcataatctacaaccagtctcccaccaaaattaccacccaaaatgaagggtataaaaagttgtcgacacgaaattcctaatatgttagtaatcaccaatacctaccatcattacacaacctttattgatgtggatactagaccacatacacaacccattccccacaatgattagcactgttaaatagtacacaatgacgatggcttgaaacacacgtaaattgaagatcataaaaaca

SEQ ID NO: 9829 - DNA, 372 bp, Glycine max; identical to SEQ ID NO: 9807
  Clone ID: jC-gmle01810043f11a1

SEQ ID NO: 9830 - DNA, 372 bp, Glycine max
  Clone ID: jC-gmle01810043f11d1
caccaaagtagaaacaattctgaatatcacacagaagcatacaacagagtacaaacatacatacataattatacgtagcagttttcatcatcttttgggtgtacagaaaagaattaataaaattagatgaggatgtggataacttaaccgaggagaatgagaacaaggttgaaagttttcatttataaagttatattatattggtatatgatgtcacttgttgaaggtagcaagaaaactgattgggccttttcctgaagaaaaagccagacttcaacttgctgagatcaagcattctcgcttagccatggtggtcttcctcatctttgcaattgaagctgctgtgacaggaaaactgattgggccttttcc

SEQ ID NO: 9831 - DNA, 581 bp, Glycine max
  unsure at all n locations
  Clone ID: jC-gmle01810043g01a1
gttatataacatttatacaataaaaaaaaagagttctggccatggctgcatcattatttatgccttcatccatagtggaggaagaagcgaggttcgaagccgaagtggcggaggtgcaagcatggtggaactctgagaggttcaggctaacaaaaaggccatacacagcaagagatgtagtgtccctccgaggcaacctcagacaaacctatgcctcgaacgagatggcgaaaaagctatggcgcctcctgaagaaccaccaagctaatggaacagcctcgaggacttttggtgcacttgatcctgttcaggtcacccaaatggccaagcacttggatacgatctatgtctcagggtggcagtgttcagccacacacaccacgagcaacgagcccggtcctgaccttgctgattacccttatgacactgtcccaaacaaggttgagcacctcttctttgctcagcagtaccatgacaggaagcaaaaagaggagaggatgagaatgagcagggaagagagggcacggacaccttatgtngattacttgaggccaatcatagctgatggtgacactggcttt

SEQ ID NO: 9832 - DNA, 557 bp, Glycine max
  Clone ID: jC-gmle01810043g01d1
aaacacagaaacaagttttccttgttctccttgcccacatggctaaagagtctgaactagtaagaaatgtaacaaattatgcaggaaaaaatagcagaatgattcaatggcctgtttatattattgaggacatttattccaatccaacacagaaattggtgaattttccattaagttccactctcagcatgcagcatagttcggcagaagtagcactttcacattctggccttagcaaccacaatactgcctctatcaatgtttacagctcctgatctagtccatgattctttaaactgctcttcagttactccttttcccattgcagcagttgaagccacacctccctggacagtcttgaggtacctatcatagtaattagcaccagcccatttttggtgagctagtgtgtcaaccccattgttcctctcctctctctgaatcctctccacataagccagcattcccctattggcaaaatcccttgcaaatggtgaagttatgagtgcattggaatgaagaccttccacagtgatgaactgccacacataccccaa

SEQ ID NO: 9833 - DNA, 547 bp, Glycine max
  unsure at all n locations
  Clone ID: jC-gmle01810043g02a1
ctaaacacaaagagaatattgggatatttccaatgaagacggagctgaacaagagacacagagaccctccacgaaatgctgtctattattcctttggatatctcggtatcctcaactcttgccaaagtctcacctttcaataacagttttaagaaaccaacctctttcccatccaagctttcaccttcctctgatgaattctctctcctttctctctcccactcaggaatttgcagggctagtcaagttgttgatttgttcccaaccgtgtcccccgaaattattgtccgcgaggcaaggttggaggactactggggagtggcagagacgcactgcaagtgcttcttccctgaatattccttcccattagattttgtgctgaggatagacagattggtggtggctatgttagcagctatgttagccggattctttaggcctagagattgcagaaggatctgtttggtggctgttattgacagctcacttgatgagtcattttcatttgaaagtgagggtctcaagattggtggttntgatgggaaat

SEQ ID NO: 9834 - DNA, 468 bp, Glycine max
  Clone ID: jC-gmle01810043g02d1
atatatataatagataatgggttatagaataaatattacttcctcccaagggaatttttgagaagtttcatcatgaagttgaatctgatgtctggtgagggtcttggctgaggccaatttgctccttctggaaccatgatacatttgtaaccttggcctttggataacattggggccacaggattgttcaagtcacagggcaatgcaatggcacgacagccccaacttttggcatgacactctgcctttgctatcaatttcttagctatcccctttctccgaaaattttcccggaccgccacatttgatatgtatgcaattccagtccttctatgtcgacgtggcccctttcttgggaaaaagtctgcattattggctactggtaatataccagccacatagcccttgttgaggctgaatttcccatctaaaccaccaatcttgagaccctcactttcaaatgaaaat

SEQ ID NO: 9835 - DNA, 509 bp, Glycine max
  Clone ID: jC-gmle01810043g03a1
cgcgaagcgaagtgtagaaagagaaactgaattcaatggcgccactttcattgcctctgaatttgaaatggacgccgttgagtgtgaaggccaccgccaccgccaccaccaccagcaaggtccctgaggtgccgctgccggagaagatccgcaactctagaatcctcgtcctcggcggaacgggtcgggtcggaggatccactgccattgcactctccaacttatgtcccgatcttcaaatcctcgtcgccggcagaaacagggagaaaggtgaagttctcactgcaaaacttggcggcaattcagaattcgctcgcgttgacatcgacgacgtgaattcgctggaaactgcattgaagaatgtagatctcgtagttcatgccgctggtccctttcaacaagcagaaaggtgtagcgtgcttgaagctgcaataaatactcagactgcgtatcttgatgtctgtgatgacacaagctatgcatggcgcgcaaaatccttcatgaatagg

SEQ ID NO: 9836 - DNA, 440 bp, Glycine max
  Clone ID: jC-gmle01810043g03d1
actggagaaggttgtagctcattttcatctagcaaaaccaaatagataggcatagtgtgcctggttcttatgggcatctcatcgattaatcccatacatgcatgaaaatgaacgatgtctcaagaattatacacttacagcctcgcagtacaataactttttgtttagcgaatatcacttttgctttggtacgggaagacttataagtatattcctaacccaaactcttttggattcgtttcaaccatccatggtgacctgttcattataaagttaaacgttccctggctagcacgcttgagaagaacttctcttgcttcaattggaattccttgagcctcttcaggaaaccaaactcctggctgcgtgcttccttcaagaattgcaagtgcaaaagcagctgttgcaattcctacagatactgaaagtcttctatgact

SEQ ID NO: 9837 - DNA, 536 bp, Glycine max
  Clone ID: jC-gmle01810043g04a1
aaattctctttagagagatagagagatagagagagagagaaagaaattaagaaaaaatggcagcctgcactgtctactcaacacaatctctgagcacaaattgctccatctcaaccccatcaaagacacagctgagtttcttccaccaaaagcaggtagttttctggaggaacagcaacaggggcaacagcagcagcagaagaagctatgtgataacatgtgcagcaggtgactcacagacagtggtgattggtcttgctgcagactcagggtgtgggaagagcaccttcatgaggaggctgacaagtgtgtttggaggagcagcagagccaccgaagggtggcaaccctgactcaaacacactcatcagtgacaccaccactgtcatatgcttggatgattaccactctttggatagaactggcagaaaggagaagggtgtcactgcccttgaccctagagccaatgattttgatctcatgtatgaacaagttaaagctcttaaggatgggaatgctgtttgaaaaccaatctac

SEQ ID NO: 9838 - DNA, 481 bp, Glycine max
  Clone ID: jC-gmle01810043g04d1
gtctcaatcttgtatcaacataactgaatctcagcctcacttttttttctcggataagtacatacatacatacatatgtgtttttttcattaattatgatgcagaacagcctaataacaatagacaaaataacatgaaacacagtgaaattgtggaaaacatgaaagaagaaagaaaatgatgattttgatgagaactaatgcaatttgactgcgtcgctcggtcgatatgtatatatattattatggcaggttcaattcaattcctaagcttttgcagccactggagtctcagccttggtggctattagctgctcatataaatctcttatcttcaaaccaactatggtttggaagagacctgttccattgttgctgccggggaaatcagcatgcttcaacatctgttgagtaacctctccatagaactttgtagagaggttgcttaggtggctctcaacgtatattagttcatctagtct

SEQ ID NO: 9839 - DNA, 551 bp, Glycine max
  Clone ID: jC-gmle01810043g05a1
attgagtgtcctccttggttttgcttcaattatggctttctcttctttcttttcccattctccattggcattgaagattgatcgcttggggcagactataaaaccttgtggtacagttgagaaggggcaaaagttttctttccctatcagaagtaatggtggtgagcttgaactttgttaccagagtcaacttaatcagagaagtagagtcaacctaatcagagattggagtttcataggaggatcaagaattgttgttaaaccaaatttcgtgagattggttccttttcgaaaagccagtcgtgtctatgcttcatggttgtcaggatcacaacttgctagcagcgcctttacactgggaacaacagcagtgctaccattttacacactcatggttctagctccaaattctgagctaactaggaagtctatggaaagtagtgtaccatatgtagtgcttggcattctatatgcatatttgttgtaccactcttggacccctgagacagttggacttatttttgcaagtaatacttgctaccagagctgac

SEQ ID NO: 9840 - DNA, 536 bp, Glycine max
  Clone ID: jC-gmle01810043g05d1
gaacatcaagtcaaaataatttatacacttgagatggaacaaaatactaatagtattttgattgaggggaaaacaattccaaacaaaattacaagtaacttaatttaaaaacttgaacatgaatttctgaaactcttaaacttcaattaaatttcttttttggttatgtgggaaagcaagtaggtgccctctataagctgtgcttgttttttctggcacttttagtcatttctttggtgatggcatgactaagaaccccaatagggcaaaagaacaagcacagagaaactgaatgccgagtctctatctgattctctaatccatcaagaaaaacatgccttgcagcaaagagatccataaccaaaaggtgaatccaagctgatgctaaagtcatctcactggagaacattttccctatactagtcagctctggtagcaagtatttacttgcaaaaataagtccaactgtctcaggggtccaagagtggtacaacaaatatgcatatagaatgccaagcactacatatggtacacta

SEQ ID NO: 9841 - DNA, 582 bp, Glycine max
  Clone ID: jC-gmle01810043g06a1
attgagtgtcctccttggttttgcttcaattatggctttctcttctttcttttcccattctccattggcattgaagattgatcgcttggggcagactataaaaccttgtggtacagttgagaaggggcaaaagttttctttccctatcagaagtaatggtggtgagcttgaactttgttaccagagtcaacttaatcagagaagtagagtcaacctaatcagagattggagtttcataggaggatcaagaattgttgttaaaccaaatttcgtgagattggttccttttcgaaaagccagtcgtgtctatgcttcatggttgtcaggatcacaacttgctagcagcgcctttacactgggaacaacagcagtgctaccattttacacactcatggttctagctccaaattctgagctaactaggaagtctatggaaagtagtgtaccatatgtagtgcttggcattctatatgcatatttgttgtaccactcttggacccctgagacagttggacttatttttgcaagtaatacttgctaccagagctgactagtatagggaaaatgttctccagtgagatg

SEQ ID NO: 9842 - DNA, 560 bp, Glycine max
  Clone ID: jC-gmle01810043g06d1
gaacatcaagtcaaaataatttatacacttgagatggaacaaaatactaatagtattttgattgaggggaaaacaattccaaacaaaattacaagtaacttaatttaaaaacttgaacatgaatttctgaaactcttaaacttcaattaaatttcttttttggttatgtgggaaagcaagtaggtgccctctataagctgtgcttgttttttctggcacttttagtcatttctttggtgatggcatgactaagaaccccaatagggcaaaagaacaagcacagagaaactgaatgccgagtctctatctgattctctaatccatcaagaaaaacatgccttgcagcaaagagatccataaccaaaaggtgaatccaagctgatgctaaagtcatctcactggagaacattttccctatactagtcagctctggtagcaagtatttacttgcaaaaataagtccaactgtctcaggggtccaagagtggtacaacaaatatgcatatagaatgccaagcactacatatggtacactactttccattagacttctagttagc

SEQ ID NO: 9843 - DNA, 475 bp, Glycine max
  unsure at all n locations
  Clone ID: jC-gmle01810043g07a1
gtaaacagaaaatctgaggcgcgagtggctggtgaaggcagcgactgcgagggaagggaagcatctttagctccaaatccaatggcggatacctcaagccgatcaagagacctcgacaagctccttctccgccctggcaatctcgtcggtcctaggttcgaacctggccctgagttgcgagatgaccttcaggccttcgccaaagtgttggtggttggggctggtggcttgggttgcgaattgttgaaggatttagccctctctggtttccgaaaccttgaggtcattgacatggatcgcatagaagttaccaatctcaaccgccaattcttgttcagacttgaagatgttggcaaacccaaagccgaggtagctgccaagcgtgtcatggagagaattagtggtgtggaaatcgtgccgcacttttgcaggatcgaggacaaggaaattgaattntacaacaatnttaacatta

SEQ ID NO: 9844 - DNA, 557 bp, Glycine max
  unsure at all n locations
  Clone ID: jC-gmle01810043g07d1
cgcctatancagcgcattgggtaccgtacctcccgggtcgacatgctcataggccgcccttttttttttttttttgagaaggtcacgaatcattaagtgaaacaggtatcaagtgttacagttttgctcgtctatgaataactttgacaggtagaaactgtaaaaccttacctgaccaatattggaaacaagctatgatatctaacataaactatgcatatagagccgaaaaaattctagcagcaaaacatgtttggatgtggtaagttatgctcctccagctgtatccatatctgtaaccccgtcaactcccttgaaaacaacacgtaattttctcaaacaggaaaacttttggtcgttcttgattgttgtaccattcacatgcacaacatccttgggcaatttacccatgagattaaaaagagatagattcaggtttgatcgagtcatttcttccaatacagggggagcttgcatgtacagattctttcctcgatgtgtaatactagcttttgataatcgcaacttaggatgttcttccagaagatccatgaact

SEQ ID NO: 9845 - DNA, 581 bp, Glycine max
  Clone ID: jC-gmle01810043g08a1
gtaaacagaaaatctgaggcgcgagtggctggtgaaggcagcgactgcgagggaagggaagcatctttagctccaaatccaatggcggatacctcaagccgatcaagagacctcgacaagctccttctccgccctggcaatctcgtcggtcctaggttcgaacctggccctgagttgcgagatgaccttcaggccttcgccaaagtgttggtggttggggctggtggcttgggttgcgaattgttgaaggatttagccctctctggtttccgaaaccttgaggtcattgacatggatcgcatagaagttaccaatctcaaccgccaattcttgttcagacttgaagatgttggcaaacccaaagccgaggtagctgccaagcgtgtcatggagagaattagtggtgtggaaatcgtgccgcactgttgcaggatcgaggacaaggaaattgaattctacaacaattataacattattgcccttggtcttgattccattgaggcccgcagttatatcaatactggtgcctgcagttttctagagtacgattctgatgataatccacaagaagagaccatcaa

SEQ ID NO: 9846 - DNA, 508 bp, Glycine max
  Clone ID: jC-gmle01810043g08d1
gagaaggtcacgaatcattaagtgaaacaggtatcaagtgttacagttttgctcgtctatgaataactttgacaggtagaaactgtaaaaccttacctgaccaatattggaaacaagctatgatatctaacataaactatgcatatagagccgaaaaaattctagcagcaaaacatgtttggatgtggtaagttatgctcctccagctgtatccatatctgtaaccccgtcaactcccttgaaaacaacacgtaattttctcaaacaggaaaacttttggtcgttcttgattgttgtaccattcacatgcacaacatccttgggcaatttacccatgagattaaaaagagatagattcaggtttgatcgagtcatttcttccaatacagggggagcttgcatgtacagattctttcctcgatgtgtaatactagcttttgataatcgcaacttaggatgttcttccagaagatccatgaacttttgcaatgtgattgaaggtctagtt

SEQ ID NO: 9847 - DNA, 510 bp, Glycine max
  unsure at all n locations
  Clone ID: jC-gmle01810043g09a1
aaaaattactgatgtttttttttcctacaaaatgtatgatttttgtccatagaagaagagtagaagagagtgtggaggtataaggagaaagtgacattatttttggtttatttatttatttttattttcaatccataagacataagtaacatctgtacagttaggctgggaccatgctcaccctggccatgtagcttgtactatacagatttcatttgaaccctgaatagcttctgcagttactttaagtcttcattcatcaaccatgtgttagttctatcattttaagcgtgcaagatatcaaaatgctgtcatttaattgaatgcaacttacaactaccttgatatgatgtgtctttcattctgatacttagtggtattgctcttagccttgtgtattactattatcatcgatacaactgtctaacagtataaaaggaaaatgtaatctatcacatttgagtaactgacagaagtgggtttttctttntaagaacagagtattggaaa

SEQ ID NO: 9848 - DNA, 546 bp, Glycine max
  Clone ID: jC-gmle01810043g09d1
aagtaaaggctgaccaattgcagataaaacttataagtataaaactaacaatagtggaaagtaggtaaacgactttaccgaaaggcaaatctaaaaagaaaagaaaaagagaaaaaaaaaactataattaattcactgggggtctccatgatcagccacaactttccataaatgttgttataggaactaggacttaatttgtatgatcttgattaatgatgtttgcttcttcagaattagatgctgctgatgttttaatgttggagtccttggagagtcctcttccacgccaataaagaaaatagcgcagcatataggaatccactaatgaatcaggaattgcccttatgagaaacccctgcacagaatggaggaagtatggctcaaccagtttttcgtatccaatccatcttgtgcatgttttactatacatagccggcgttggaacaaaaattgatgtcttcattttggtcatctttgttgatacaaataatggaacctgacattggatgtcaattccttgatgcttgtattcaaactgatgca

SEQ ID NO: 9849 - DNA, 405 bp, Glycine max
  Clone ID: jC-gmle01810043g10a1
caaacacagccttgaacttgaactatcgtgtcttcttggctttctctgttcaggatcaacatggatattgtatcacgagctttgctatttccgttggctatacttgtgctcatattaagcacaccttgctcaggtgcttttgggaagagtggaactaatgtgaaaacagctatttttctgtcccccaagtttgaacttggaccaggatcggtagccaataaatatgattatgacgctgatgtttcaagaggggatttagcacttagaagttaatgctgaagtagtttgattgaacagggaccctgtgcctcttatgaaacttatcttcaacactgggtggtgttagatactctatccacctatatatgtgacgacacacacaaactatgatggacataggatact

SEQ ID NO: 9850 - DNA, 409 bp, Glycine max
  Clone ID: jC-gmle01810043g10d1
acaacaaacatgatatatatagtattacatatcacacaaccataataagcaagactggtttaagacaaacattacaaacccttaccaatacaaataattgataatcacattactacaatccttaaacttgaaaatatgctctttgccggttcttgcgtgtgttgtcctattgctgccgaatatgagaagtatatgttccatcgatatgtatttctgtatttcttttaaccgggatacatactgggataccatcgatatgacactcaacttatatttgcatctcacaacttatctatcaatgaattatactatttatattcataaaaaatgaagaacgagaagaatatctgaagtgttggtgtggaagctgttctgccaccaattggtagaaaagccccattactccagt

SEQ ID NO: 9851 - DNA, 308 bp, Glycine max
  Clone ID: jC-gmle01810043g11a1
caaagtgattgattccagttccaatggccttgggcaccagcgccttgatcggaaggaaggttcttgtctcacccccaacccccaaaacaaccaaatcatctactccgctacaattccttttcaagagaagcatcttaaatgctcacaattcacaagctgctctagctgcccttatcttttcctccgcgagcctctctgtgaccccacaagcccttgccgctgataacgtcacccctccccctgtaattgaagcccaacagaccacttaacccctccaacatatccatccctttcttactcacaaaacc

SEQ ID NO: 9852 - DNA, 508 bp, Glycine max
  Clone ID: jC-gmle01810043g11d1
gaaagtgtaactcagccgtagaaccatattttttatttatttattgcgtaagctgctgtgctaattgttttttctccttgaatttgataaaataattattgattcttacagtgtacaagtcagagcgtattttatagtacaaacataattctgtgacttgcgtgtatgattatgcaacatataattcggcttttccatcaatgaatagactcatgaactcttcaccatccacagtttctttttctatgagaagttgagcaagcttgtgaaggatatcaatgtgagttgagataatatgtgttgccctagaatatgctctctctaccagttccctcacttccgcatccactacatccgcagttgccatggagtaatccttttgcgatgacatctgttgacccaagaatggatttccaccaggtccaccaatggcaacttgtccaatttttttgctgaatccaaatctctcaaccatctgccttgccactcgtgaaacttgcatgaagtc

SEQ ID NO: 9853 - DNA, 580 bp, Glycine max
  unsure at all n locations
  Clone ID: jC-gmle01810043g12a1
caaagtgattgattccagttccaatggccttgggcaccagcgccttgatcggaaggaaggttcttgtctcacccccaacccccaaaacaaccaaatcatctactccgctacaattccttttcaagagaagcatcttaaatgctcacaattcacaagctgctctagctgcccttatcttttcctccgcgagcctctctgtgaccccacaagcccttgccgctgataacgtcacccctccccctgtaattgaagcccaacagagccaattaaacccctccaactcatcctcccctttctcacagaacctcctcctcacagctccaaagccacaagcctccttcgacctccccgaaggcaccaactggcgctacagcgagttcttgaacgccgtcaagaagggtaaagtcgagcgagtcaggttcagcaaagacggttccgccctccagctaaccgncattgacggccgtcgcgccttcgttattgtccccaatgacccggacctcatcgacatcctcgccatgaaccgcgtcgacatttgcgtcgacgagggcgaatcccccaacagcttgttcaacatcat

SEQ ID NO: 9854 - DNA, 461 bp, Glycine max
  Clone ID: jC-gmle01810043g12d1
gaaagtgtaactcagccgtagaaccatattttttatttatttattgcgtaagctgctgtgctaattgttttttctccttgaatttgataaaataattattgattcttacagtgtacaagtcagagcgtattttatagtgcaaacataattctgtgacttgcgtgtatgattatgcaacatataattcggcttttccatcaatgaatagactcatgaactcttcaccatccacagtttctttttctatgagaagttgagcaagcttgtgaaggatatcaatgtgagttgagataatatgtgttgccctagaatatgctctctctaccagttccctcacttccgcatccactacatgcgcagttgccatggagtaatccttttgcgatgacatctgttgacccaagaatggatttccaccaggtccaccaatggcaacttgatcaatttttttgctgaatcca

SEQ ID NO: 9855 - DNA, 546 bp, Glycine max
  unsure at all n locations
  Clone ID: jC-gmle01810043h01a1
cagaaaccaatgctagacgagcgttagttgagcagtctcgatttcaagaagctctgattgtagctgaagcttataacctgaaccagccaagtgagtgggctttagtactctggaaccagatgcttaaacctgaagtaatggaggagtttgtggctgaatttgtggcagttttacctcttcagccttcaatgctgtttgatttagctagattctatagagctgaagttgctgccagaggggaccaatcccatttttctgtctggctcacagggggaggattgccagctgaatgggctaaatatttagggagatcattcaggtgcttactgaagcgaacaagggatttgaagttgcggacgcagttggctacagtggcaactggatttggggatgtcattgatgcatgtacagaagaaatggataaggtccctgacaatgcagcgccactagttctgaagaagggtcatggnggagcttacctccctttaatgtgaaactttctactggtaatcatcataatgattggataatcacgatggataggaa

SEQ ID NO: 9856 - DNA, 475 bp, Glycine max
  Clone ID: jC-gmle01810043h01d1
gtaaaacatgacaaatggatttttatattgatgtacaagaactatacatttttgaggggaaaaataagaagaaaaaagaaaccaatggggcattctattctactagcctcaaaaccgacaataaactaccctctcctccctgcaaaaaaaatggagaaaaccaaaactacaatggtgttttacaagaatgagctataaatacagttggcctaatatacaaccatcaagcattcactcaaccaaaaaatatacatctcactttcaccaactaaccgtccaattttcattcgatcaacacttaaggtttctgctcgccatcttcaatgtttgcagcaatattccctaatcaatgggttcaaggtcaagaaccagcttcctatccatcgtgattatccaatcattatgatgatttacagtagaaagtttcacattaaagggaggtaagctcccccatgacccttcctcagaactagtg

SEQ ID NO: 9857 - DNA, 250 bp, Glycine max
  Clone ID: jC-gmle01810043h02a1
ctatgacctgtggggcgaaaatatgctgctagtctgcaagactcttccagcttcactcctattcttgcatgaggatgattaaactagggatgtggctgatgcttcccaattgcctgctttcaccataatttcttcgggcattgaacaatgtagaatggtgcattccacagatgttgaaaattaaataggttttttgtttatggaatgttggtgttttaacacctttcaattgatcttatagttttgtcgt

SEQ ID NO: 9858 - DNA, 250 bp, Glycine max
  Clone ID: jC-gmle01810043h02d1
acgacaaaactataagatcaattgaaaggtgttaaaacaccaacattccataaacaaaaaacctatttaattttcaacatctgtggaatgcaccattctacattgttcaatgcccgaagaaattatggtgaaagcaggcaattgggaagcatcagccacatccctagtttaatcatcctcatgcaagaataggagtgaagctggaagagtcttgcagactagcagcatattttcgccccacaggtcatag

SEQ ID NO: 9859 - DNA, 572 bp, Glycine max
  unsure at all n locations
  Clone ID: jC-gmle01810043h03a1
aaattctctttagagagatagagagatagagagagagagaaagaaattaagaaaaaatggcagcctgcactgtctactcaacacaatctctgagcacaaattgctccatctcaaccccatcaaagacacagctgagtttcttccaccaaaagcaggtagttttctggaggaacagcaacaggggcaacagcagcagcagaagaagctatgtgataacatgtgcagcaggtgactcacagacagtggtgattggtcttgctgcagactcagggtgtgggaagagcaccttcatgaggaggctgacaagtgtgtttggaggagcagcagagccaccgaagggtggcaaccctgactcaaacacactcatcagtgacaccaccactgtcatatgcttggatgattaccactctttggatagaactggcagaaaggagaagggtgtcactgcccttgaccctagagccaatgattttgatctcatgtatgaacaagttaaagctcttaaggatggaatngctgttgaaaaaccaatctacaaccatgtcactggtctcctggatccccctgagctc

SEQ ID NO: 9860 - DNA, 435 bp, Glycine max
  Clone ID: jC-gmle01810043h03d1
gtctcaatcttgtatcaacataactgaatctcagcctcacttttttttctcggataagtacatacatacatacatatgtgtttttttcattaattatgatgcagaacagcctaataacaatagacaaaataacatgaaacacagtgaaattgtggaaaacatgaaagaagaaagaaaatgatgattttgatgagaactaatgcaatttgactgcgtcgctcggtcgatatgtatatatattattatggcaggttcaattcaattcctaagcttttgcagccactggagtctcagccttggtggctattagctgctcatataaatctcttatcttcaaaccaactatggtttggaagagacctgttccattgttgctgccggggaaatcagcatgcttcaacatctggtgagtaacctctccatagaactttgtag

SEQ ID NO: 9861 - DNA, 466 bp, Glycine max
  Clone ID: jC-gmle01810043h04a1
gaaaaatccttccaattttcctaatgaacacaaaccctaattccccccttttgatgataacagaccctgaatttttagttaactgaaaaacatcctcatggatgcaccacgtgtctctcgagcaatcggcgaccccaaaatccgccgcgttggtttcttcgcttcagattcttccgccaccgattctctcatgatcccgtcgccacgtcatcgctccattccggttccgccgacgcacccttccggagatcgccacgtggcatccgggagctacgatcccacggaatacccaaaactcgctactggcattgaaaagagaggggaggaagaagaagagaaagaagttctgcaatcaagcttaaagccgttgaaagcaaaaactaccaaggctgagagacgggccttgcatgaggcacagagagctgctaaagctgcttctaaagacgagggaagtaaagcagttgct

SEQ ID NO: 9862 - DNA, 512 bp, Glycine max
  Clone ID: jC-gmle01810043h04d1
aggagatgaatacccactttttattgaataataatttgtttaaatagaaatttttataactaaaagaaatcataaaagcaataactaactttctaaacaatagccactaacataacggcgactaagtaacaaaaaaaataaaccgtcctaaagactcgatcaaacagctagcagaaaacaaattaataggcaattgctgatacacacatttaacaactaactaaaatttcgagtatataaaaaattccatttatctagatcgattgcagggctgttaacaccactttctgcattctctatatctacatcaacaaatgctctcgtccatattcacgtactattacaggcacgcttgtaggagggagcatgccataatctgtcacaataaccgagacataatctgaaggagtagcatcatacatcaaattcaaaagcctcaaattatcttcactggcccaattgctaagataactgacatccattcgtccaggaaccctggcaatagcatctgg

SEQ ID NO: 9863 - DNA, 498 bp, Glycine max
  Clone ID: jC-gmle01810043h05a1
cgagtttctctctctagaaccaccgaagcgaagaagaagagagaagagaatcacggtttcgccatggacgcggcatcgcagctcgtctcctgcggaatcgatcccttccatcgcgcctcctctccttccccgcgccaccgccgccacagcaacctcctcctcctacgccgtcgctctagccgtgtcttcgccgtctccgccgagccgaaacccgccgtcaacggagcaaactcgaggccgcctccgaccagagccgtcaatggcggcgtctccacgagaattggagatgtttcgaaggagattaagagagtgagggcgcaaatggaagaggatgaacagttagcgacgctcatgaggggtcttcgaggccagaatttgagggactcgctcttcgctgaggacgatgttgaacttcgtcttgttgaggtagacgagagtagtgagtttttgccattggtgtatgatcctgccagcatttctgcatattggggaaaacgt

SEQ ID NO: 9864 - DNA, 517 bp, Glycine max
  Clone ID: jC-gmle01810043h05d1
gcaacatgaaaatatgtaaaataatggtcatatatacaatttttgaacaactgtcaaaatatacacaattgtgtgcagtaaggtagacagaattctcttacaaaaatgtatcacgaattaatcgtgctaaaacccgagaagataatctgctaacaacctccggaagcactttaacagagatgcctggtaacactgggagaagctcttggataatctgaggaatattcagtgcctgaccagatgttcttgatagggaacttccagcagtcaagaactccaccaccatctggacattgttcaatataacttcatcctcttcagttatggtgggtataagagccgcaggcttaaagggtcccactgtaggtaccatgctgaaaacaggggttacattctgaactcctagcaaggacattactctcaccagttgttcccttgttactgcatcgatgcccttgacgatctcgtccaaaagaaattctcgggaaaaattccccctgtcagacaacaaaaacgc

SEQ ID NO: 9865 - DNA, 574 bp, Glycine max
  Clone ID: jC-gmle01810043h06a1
cagtcggataagggggaagcgagcaatactctcgaatgtcacagataagcattctgctacacataaccaacactgccttctcgtttgagcattatataaactcagtcggtgctcataacttttcctcacacgactctgctcactcatatttatattgaacaaacagagatcccaaatcaatggatattgaagcaggtaaagatattcctgtaagagacccagcgctactcgatgacgacggcagaatcaaaagaaccgggaacgtgttcactgctaccacgcacatagtaacggtggtggtgggtgcaggagtgctggctctggcatgggccatggctcagcttggatggatagctggcatagccgttatgatcctctttgcatgcatttctgtttacacttacaatcttgtagctgattgctacagatttcctgacccagtcagtggcaagagaaactacacttacatgcaggccgttgatgcctaccttggtggaaaaatgcacgtgttctgcggatccgtcctatatgggaagctcgccgggttacagtgggctacactataaactagtct

SEQ ID NO: 9866 - DNA, 546 bp, Glycine max
  Clone ID: jC-gmle01810043h06d1
gatataactgagacagaaatattttgactagttgaaatagtgttgctcacactgtaagttggaataatgtagctgacaaataattttgcattcagataattttcactgccttgttttaattaacttgtctcccttctttttctgcctagctatagctattttcacatttctcaaatgtgagacactggaatgtgcaaccaaatgccctattgtttatactggaaaagtttgtatttttttatattcttgctaattccacgaaccgaaccaactgccgcggaaactgtaactaggaagcacgcgaagctcaatatttgaagacaacaccacttcaatgatagtctttttacccgtttctgtgcaatgtgcatttgtacagggaagaagacaatgagaggccaaaaccctattgctccaagcaaggcaagaaactcattgaaaaatggcatagccatggcaataactgtggccactgccacatacattgacctccaaattatcctaaacaaagtgatgttacatgttaaggagcccattttgatggga

SEQ ID NO: 9867 - DNA, 504 bp, Glycine max
  Clone ID: jC-gmle01810043h07a1
gatggacattgcttgtgggggtcggcatagtgttgtgataacagatgctggggcgcttcttacattcggctggggactgtatggccagtgcggacaagggaataatgctgatcagctaagaccaactctagttccttctttattgggaactagagtggaaaaaattgctgctggactttggcatacattgtgtgtttctgtaaatggtcaaatttatgcatttggtgggaatcagtttggacaattgggtaccggtagtgaccagcctgagacttcacctagacagttggatgcttcccgttttgaaaataagcattctagtatagtttcttgtggggcccgtcacagtgctttgctaactggtacgcctccattaccatgtgcttttcaggggaacttttaaaaccaatcttagtatttgcatgctttgataatgtcatatggcttattcatattagagaattgaccaaaaggattcgtgccaataatcagtctttggtctat

SEQ ID NO: 9868 - DNA, 419 bp, Glycine max
  Clone ID: jC-gmle01810043h07d1
cattgccttgcatgaacataataagggaacaaaatacatatggtaaatacacaggcatatcgaataataccatgaaacaagaccactaatgttggcccttcccaagaattaagatcagtttaatccacataaagggcgctataaattaatgcaaaccaaaaaaaccttggatttccgttaggggcaagctccaatttaaaaatggaaagctgggaaaggggaagaccttacaaaaattgggaaaattagaaggatggagtgaacagaccaactgggttggtgattttggacaattttactttccactaatgaaatggggccttggggaggaaccttttaaaacagtttttgaacaaatggggtcaaacgggtttatcacccatcaatagggtatgccaccagccacaggcaacattttt

SEQ ID NO: 9869 - DNA, 458 bp, Glycine max
  Clone ID: jC-gmle01810043h08a1
ctagggttagtcaagatatgggagttgaggctcctatacctatcagtgtgaaattaggagatttcaacagtctgttccgtaaaattgtaacggctgctgagcatcctcatttaagcattccagaaactgaagctggaagaagccgcaagcagtaccacaggcttattaatcgatctcttatggctgtttcagttggagctgcagtggtcgtagttgggctggcagcttatagggtatatgctgcaaggaagaatgcgtctggttaaaagacaggttttgtcaatggatcaatgtccattagtttgatatgaatgcagcttgctcctggctagatatgtcaagttcaacattcagttggtttttttatgccatctgttgtagagtttgattttttttttttaatagaatcacagtatttaatttttctttgtcaaggtgaattgaattagcataatttt

SEQ ID NO: 9870 - DNA, 452 bp, Glycine max
  Clone ID: jC-gmle01810043h08d1
atactatggtttgtttgaaaatgacatatttttgtaatgaacttttaattattttgtgaattataccatatgtaactttgaaggagacatattacaataaacatatgtagacgtcaaagcacattgaatatatatatagtagaaaaaccaatcacgagcggtgattagtattatttaaataatggaattaatgacaaagattgtgctaaagaccataacaagattaaacacttacaataatagcattactataaccaggggggacattattgaaactgatccagagcatgactaaaaaaaactttgaagacggtttaattaaaagaagaacctgagaagtcaacacatcagagggcacaaagccaccacttggagcagctgtctcagatgcaggaagccccatgaagatttgagaagaaggcactgggatccattggctccatgaaacgatc

SEQ ID NO: 9871 - DNA, 524 bp, Glycine max
  unsure at all n locations
  Clone ID: jC-gmle01810043h09a1
caaacacagtcttgaacttgaactatcgtgtcttcttggctttctctgttcaggatcaacatggatattgtatcacgagctttgctatttccgttggctatacttgtgctcatattaagcacaccttgctcaggtgcttttgggaagagtggaactaatgtgaaaacagctatttttctgtcccccaagtttgaacttggaccaggatcggtagccaataaatatgattatgacgctgattttccaagaggtcatatagcacttaagagtttcaatgctgaagtagttgatgaagcagggaaccctgtgcctcttcatgaaacttatctccaccactgggttgttgtaagatactatcaacctaaatatgtgacgacacacacaaactatgatggacataggatacttcacaactctgaccatatatttgtgaggaacagcggcttatgccagagagatactctaggacaatactatggccttggatctgaaacacgaggaacagctacngatgttcctgatcc

SEQ ID NO: 9872 - DNA, 472 bp, Glycine max
  Clone ID: jC-gmle01810043h09d1
acaacaaacatgatttatatagtattacatattacacaacctttataagcaagactggtttaagacaaacattacaaacccttaccaatacaaataattgataatcacattactacaatccttaaacttgaaaatatgctctttgccggttcttgcgtgtgatgtactattgctgccgaatatgaaaagtctatgtgccatcgatatgcatttgtgcatttcttttaaccgcgattcatactgggataccatcgatttgacactcaacttatatgtgccttgcacaacttatttatcagtgaatcttcctatgaatagccataaacaatgaagatcgagacgaatttctgaaaagccggagcaaaagctgatctgtccccactaggttgaaaagccccattactctgaagaggccacggttgatgctgcatttagactctgagtcgtagtttcaccatcaattatctttaca

SEQ ID NO: 9873 - DNA, 341 bp, Glycine max
  Clone ID: jC-gmle01810043h10a1
aatgggtgccgttgaaggttaccgtattgctggtggccccctcggtgaggtcactgacccaatctacccaggtggcagcttcgacccattgggccttgctgatgacccagaggcttttgctgagcttaaggtgaaggaactcaagaacggacgattggccatgttctctatgtttggcttctttgttcaggccattgtcaccggaaagggtccattggagaacctcgccgatcaccttgctgaccctgtcaacaacaacgcctgggcctatgccaccaacttcgtccccggatagtgagcgttatagaacgaaatgacttttgagagtttttagatctgtg

SEQ ID NO: 9874 - DNA, 414 bp, Glycine max
  Clone ID: jC-gmle01810043h10d1
gtaaaaagcaagtaacattaagttggattcggatacacaagataattcacattatctgaagtacttcaccaaacacaaatctaaaaactctcaaaagtcatttcgttctttgacgctcactttccggggacgaagttggtggcataggcccaggcgttgttgttgacagggtcagcaaggtgatcggcgaggttctccaatggaccctttccggtgacaatggcctgaacaaagaagccaaacatagagaacatggccaatcgtccgttcttgagttccttcaccttaagctcagcaaaagcctctgggtcatcagcaaggcccaatgggtcgaagctgccacctgggtagattgggtcagtgacctcaccgagggggccaccagcaatacggtaaccttcaacggcacccatt

SEQ ID NO: 9875 - DNA, 259 bp, Glycine max
  Clone ID: jC-gmle01810043h11a1
agattgatgagaaacgaagaataaaaatggctctggatgtggctaggggcatgaattgcttacacaccagcacacctacaattgttcatcgagatctaaagtctccaaatgttttggttgataagaactggaatgttaaggtatgtgatttcgggttgtcacggttgaagcacaacacatttttgtcatgcaagtcaactgcttgaacaccggatagttaggcttctgaagttttgcgaactgaaccctgaaatgagaa

SEQ ID NO: 9876 - DNA, 457 bp, Glycine max
  Clone ID: jC-gmle01810043h11d1
gcaaaagtataaatattcttgctttcaagaacagtaatttacacattaccgagttttggttcctcggacaagctatcatcacaaatacaaaatggctctgcagttgtttggttgcagcagttgatattttcctcaacacaaacattttccgttacaagctttgatatatttatttccccttttattgtgttcttgttacctttatagcttatacgcacataactatgcaaaatgcctaattattcacacttgaagcgagacatttcagggggttgaatttacagaaatctcctgcggcatatgtggagctacctggtcatgatgagatgggataaccagacgctgcagaggctttagagccactgtgagttgtgcaaacgagggccgcaaatttggatcctgttgccaacactcccagattattctagcaactataggatcgacttgctttggaata

SEQ ID NO: 9877 - DNA, 492 bp, Glycine max
  Clone ID: jC-gmle01810043h12a1
gggtattgctatccttacgccaacatcagccatagacataattttgtcacggaaaatcgtccccctgctcaggttttccgtgacaaaattatgtctatggctgatgttggtgctggaggtgaagatgccattgttacatttgagggtattgctatccttacgccaagaggacgatacagtgttgagttacacatgtcattcttgcggcttcaaggacaggctaatgatttcaaaatccaatatagcagtgtggttcgcctatttttacttcctaagtctaatcaaccacatacctttgtcattattagtcttgatccccctattcgaaagggacaaactttgtaccctcatattgtgatgcagtttgaaactgattatgttgttgaaagtgaattggcaataaatgaagatctttataacacatagttcaaggacaagttggagctgtcttataagggtcttattcatgaagtgttcaccacagtattacgt

SEQ ID NO: 9878 - DNA, 427 bp, Glycine max
  Clone ID: jC-gmle01810043h12d1
aaaaaaaagtaggcttgatccaatattttaaatcatattcgtgcaacagttgaagcaaaaaattgttacaaatcctacatcagttggccataaacttgtgtcaatttacgaagcatatgagtagatgccatcaccagtaagaaatatacggctcatggcttacattagcttgctgcataagtatttataaaactgcaagattttttttcacagccttaggcactgtcagattcatttcctgaatcaatattcatgggttgtggattcttgtagccactaatctcatccatgtaacgttttttatcttcacgcgccttggcctcgtatggttccttctcttccgcagacaactttttccatttctctccaagtactctttccacatccgtaaatgaaattccaggattagttttctttagattctctc

SEQ ID NO: 9879 - DNA, 409 bp, Glycine max
  Clone ID: jC-gmle01810044a01a1
tgccatactagcaagtccaggattaatgtctgggtctgcacgcttactatacctcggacgtcctttcgagcatttaaagaaacctaggactccccactcagaagaagaaccaacatggcacccacaatctctaattattcgcattctataagggttgcagagccattcattgcttcctcctctaataaggagtcattcaccttagcatgcttgcactgcactgcatatcatcaacggaatgcttattcttcaagtcaccagtgatgctcacatgctgatcgttcttgacttcacagacacattgtgtggtccttgcaaactcatggaccctggtcccctataggctgctggagatcacacagaagtggaggacatcatgattgatgtcgatgtgtatacaggatgtgac

SEQ ID NO: 9880 - DNA, 489 bp, Glycine max
  Clone ID: jC-gmle01810044a01d1
ggaagagtaaaataaacccaaaacaggccaataatattgatatatgttaatagatgcccttgtatattaaacatgagcaactacacgtgtcatattacattgcatacttgtaaagtgtaatggtaaaagaatgacacatatatcttctcattgggtgaaaatgatgaggacaccaacttattgcaacctcagttgttggtagttttttttttttcttgaattggttgttgagcattttgattttattacagtgcataatcatatttatttattttatgtgcttctcaatcgaccttttcagctcctccttcttcacccccaccactctatcagcaactttgcctttctgaacgagtacgaatgttggcaattggtggacctggagtgcttgagacacttccgttaactccttcacatcaatcttgatgaactcaacatctgtgtaattttcagcaaactctaggataacagggtccatgagtttgcaag

SEQ ID NO: 9881 - DNA, 510 bp, Glycine max
  Clone ID: jC-gmle01810044a02a1
ctagtttcttacacggctctactctactgcttcaccttctgctctagaaaattcagtggttatacatggcttcggctactctctctgtagccaaaccagcccttcaggcaaatgggaaaggcttctctgaattctctggcctccgcagctcatcaggcttccttcccttttctagaaaatcttcagaggatttccattctgtcattgccttccagacctatgcagttggaagcagtggaggatacaagaagggtgtgacagaagcaaaactgaaggttgccataaacggatttggaaggattggaaggaacttcttgaggtgctggcacggtcgcaaagactcccctcttgatgtcattgccatcaacgacaccggtggcgtgaaacaagcctctcaccttctcaagtacgattcgatcctcggaaccttcgatgctgatgtcaagcctgttggcagcgacatcatctctgtcgatggaaaggaaatcaaagttgtctctgaccgcaacc

SEQ ID NO: 9882 - DNA, 442 bp, Glycine max
  Clone ID: jC-gmle01810044a02d1
ttttttttttttttttttttttttttttttttttttttttttttttttttttttgggggggtttattttttttttttatttttgttccgtcttgtaggataataatcatgcaaaaaagagaaggggaaaaaaaaaaaagagggaggggacaagaaaaggccgagggacggaaaagggggggggggaaggaaacaccccgggggggggggaaaaaaaaaaaaggggggggggggaaagaacaaaggaaaaaagaaaaagaagaaacacaggggaggggggggggggggggggggaggggggaaaaaaaaaccaaaaggggggggggggaccaaaaaaaaagagagacacagggaaaaaaagggggggggggcggcccacccaggggggggggggggagggaaaaccacaaaccccggggggggggggaccccccaacggggag

SEQ ID NO: 9883 - DNA, 559 bp, Glycine max
  unsure at all n locations
  Clone ID: jC-gmle01810044a03a1
agctaaaggaatgttatggtaaaacttcgtttgaaacgatgtggtaaaaagcaacgtgcgacttgaaagacatgattagattagctgtggattcttacatccgccattttttctagtatatagaaatgaacatgctcttgactcgacatcgtttgttctgttccactagaacttattgttttggggacgggaaagcagttgatgatgtaagttgatgatgtaaatagtacatgatggagctcgagtttattcatttatcaggggcaagtatctaaggttagtaaaaattaataagttagaaaaacttcgtaagtttatttttgatagaaaaatagaaaggatccaatttgagcaaggttcaaaaaaatggttggaattagtaaaactgttttgatcaaaagtgtagccgcaggaattaaccttctatttgtatgattctttcatagaaagaaaaaatggtatgttgctgccatttttgaaaagattgaagattcccgaagtaatgcctaaacctaatgattcaaagataagctaaaagatcatggaacangtaaatacc

SEQ ID NO: 9884 - DNA, 564 bp, Glycine max
  Clone ID: jC-gmle01810044a03d1
cattaatggaatttcgtttgttgattcgagctaagttccataaaaacaccagccctttttaaaatgtcctgaacagttcctgtaggttgagcgcctcgttcaaggaaatatagaataacaggaatatttaaataggtttgattctttattggatcataaaaacccactttccgaagatctcttccctctcttcgagatcgaacatcgattgcaacgattcgataaacggctcattgggatagagatagataaataatgcaccccccccctagaaacgtataagaagttttatcctcgtacggctcgagaaaataaaaaattataatgtatgtagaaaattatgatgtcaaatagatcaataaaatcatcaaatcaattaaactatgacttaagtatttttctttcgtattttctttttgaaaaaaaactcctcatatttataactccataactcaaattggataattatcaaatgactaaaaggagaacaaagcctttagtagctatttcatttattgagtggtctctactcccctttcttgcccgtgtgacgttctttataat

SEQ ID NO: 9885 - DNA, 520 bp, Glycine max
  Clone ID: jC-gmle01810044a04a1
tattgcccaagccctatacaaccaaaccctaacacacacccatttgattcagtttccatggctagcctcaaggttgcatttttggctgcagtgctctgcatggttgtggtgagtgcacccatggcacatgcagctatcacgtgcgggcaggtgacgaatagcctgatcaattgcatcggttacctccagaacggaggaacgccgacgtcgggatgctgcaacggagtgaagagcctcaatgccgccgccaagaccaccgacgaccgccagacggcgtgcaactgcctcaagtcggccgccagccaaatctccggcttcaaagccaacaacgccgactcgctccccggcaaatgcggagtctccatcccctacaagatcagcacctacaccaactgcgctaccatcaaggtttgaagagaaagtcatggacgcaggaaaccggaaactactcactagtatatgagtagcattattaatattaagaatcagatcgaaggtgatgaaggctccacttatatgc

SEQ ID NO: 9886 - DNA, 465 bp, Glycine max
  Clone ID: jC-gmle01810044a04d1
gggagaacccaatattaaagtagatataactatgtgtaactcatacagagaaataacaacgcaacacaatttaaagctatccaatacaaatctctcatacaagaggagaggggcatataagtggagccctcatcaccctcgatcttattcttaatattaataatgctactcatatactagtgagtagtttccgggttcctgcgtccatgactttctcttcaaaccttgatggtagcgcagttggtggaggtgctgatcttgtaggggatggagactccgcatttgccggggagcgaggcggcgttgttggctttgaagccggagatttggctggcggccgacttgaggcagttgcacgccgactggcggtcggcggtggtcttggcggcggcattgaggctcttcactccgttgcagcattccgacggcggcgttcctacggtctggaggtcaccgatgcaattg

SEQ ID NO: 9887 - DNA, 595 bp, Glycine max
  unsure at all n locations
  Clone ID: jC-gmle01810044a05a1
ggtgaattgaagtgtttgagtttggcatcttctgatggtgctttatttataattattgtcatcaagtttcagactcattctggatcactgagttgattctcttaatgtcaagataaaaaaaataaaaggtagatgatgcatggaagcttgagaaatgcaaataaaagtagaaaagcctctagcagagaaagaaaattggctttgcagcaagatgtggatacgttgaagaagaagctaaggcatgaagagaacattcatagagcattggagagggctttcaacagacctttgggagctttgcctcgtcttccgccttacctccctccctatataccagcccttctggctgaagtggcagttttggaagaagaaattgtaagacttgaagagcaggttgtgcatttcagacaggatttgtaccaggaagctgtctacatgtcatcttctatgaggaaattggaaaattcagtttccgctccttctaacangtcaaatccaacaatggatagtcccaagttggataaatggaagtctcttacccaatcaactggtaattcaacagcatcatctgcaactaagcctaccacaacacttc

SEQ ID NO: 9888 - DNA, 521 bp, Glycine max
  unsure at all n locations
  Clone ID: jC-gmle01810044a05d1
gttatacaatgattcttttattcactttagttaaaagaaggaacctgaacatttctcccaaagggagtagagaaaagatgatcatgtacatttttatatgtatgatctactgctgtatacaaaattgcaatggccaaaagggagtgaaattatgtgcatatcaagtatctaaagctgaactcatatggcataatttgtacaaattgtgataagggctcggtttttctttcctcaaggaatttaagggcttctttccccaattcacttggtaactggagacagatccaatccagcaatgactccaagtcttttgcaaagttcagcaaataccaatccagtagctttgggatagcaaactttgaagttgaaaatccaattgctgcctgtaagtactctcttttggccacttccagttcattctcaacctgngatgctgtgtaaactctcacagcaggagaggaccaagttccagaagagagagcaaatgtcactaggggttctgacagttccattccatatat

SEQ ID NO: 9889 - DNA, 562 bp, Glycine max
  Clone ID: jC-gmle01810044a06a1
caagatatgaagaagctttctctttacgcttgtttactcactttgagtctgctgatttttcttccccatatcaaagcaagtcaagctaataaacttgatgagttgatcctatctaggagctcacataatcctcctgtgaccctttcttgggcagaggaagatgcattgaaaatgcattctgctgcttatgttgcgccccaagagggactaaggcaagctgacaagattgtcacactgcctggccagccacatggggtgaactttgaccaatattcaggccatgtcacagttgatccaaagactggaagatcacttttctattattttgatgagtctccacataactcttcagctaaacctttagtattgtggctcaatggaagaccaggttgctcctcattggggtatggggcatttgaggagctgggaccctttagagtcaactctgatggcaaaacactatttcataacaaatatgcttggaatgaagtggcaaatgtgctgctcttggaatcccctgctggagtgggcttctactactcaaacactacctctgactatg

SEQ ID NO: 9890 - DNA, 461 bp, Glycine max
  Clone ID: jC-gmle01810044a06d1
atataaaaagtttttatgcaaactgaaatttttattaagaaaatgttaagataagatacattcctttcataaaaaatacaaagtgtgataaatattcttcccctatgaaacttagcagtacatttagatgctacggaaccttattaataaaactgttattactatagtccaacaagtagctattgcacaaccttcatctcaaggcaataacttttaaatcaacttcatacttagaatccatcgtatggtgaagcaggaggcagggttccagagaggaatgatgagatcatggtcaaagatcgggctggttgccagcttggaacaaaatgtcctgctcctcttactgtaacaaacgtcactgctttgtatcccaccacatatcctccaacctcatttccagaataccatggatgccaatcaacctgaatagggagcctcagggtgttgattgaatatctgga

SEQ ID NO: 9891 - DNA, 639 bp, Glycine max
  unsure at all n locations
  Clone ID: jC-gmle01810044a07a1
cagcaagtggaccccagtggtgaacatcgcgttccaggagacgacgtcgtatgaaacagccaacattaagattcttttcgcgagtaagaaccacggtgatccgtatccttttgatggtccaggtgggatattgggccatgcattcgctcccactgatgggaggtgccactttgacgccgacgaatattgggtggcgtctggcgatgtcaccaaatcgccggtgacaagtgcgtttgaccttgaatctgtggcagtgcacgagatcgggcacttgctcggattaggccactcgtcggacctaagagccatcatgtatccttctataccacctcgaactaggaaggtgaatctagcgcaagatgatatagacgggattcgaaagctctatggtatcaacccctaattattatagctaggtgttgtttgtactagaactagagttttatttcggtaatttgcattaaaggattctgaaagttatcgaggtgaaattattctaattcaagaacaacaaanatagcatgtaagatattgaatttagttttctctaattaagaataaccagctgatactggtgatgctatatgataatgaataatgtgcanattacccttaaaaaaaaaaaaaaaagggcggccg

SEQ ID NO: 9892 - DNA, 494 bp, Glycine max
  Clone ID: jC-gmle01810044a07d1
aaggtaaatttgtcacatttattcattatcatatatgcatcacctagtatcagctggtttattcttaattaagagaaaactaaaatacaatatcttacatgctatttttgttgttcttgaattagaataatttcacctcgataactttcaaaatcctttaatgcaaattaccgaaataaaactctagttctagtacaaacaacacctagctataataattaggggttgataccatagagctttcgaatcccgtctatatcatcttgcgctagattcaccttcctagttcgaggtggtatagaaggatacatgatggctcttaggtccgacgagtggcctaatacgagcaagtgcccgatctcgtgcactgccacagattcaaggtcaaacgcacttgtcaccggcgatttggtgacatcgccagacgccacccaatattcgtcggcgtcaaagtggcacctcccatcagtgggagcgaatgcatggcccaatat

SEQ ID NO: 9893 - DNA, 529 bp, Glycine max
  Clone ID: jC-gmle01810044a08a1
cacaccaagagaaccaaactcctccactgcctctctctccgtcgcctcctccggccacttcatcctcccaccaaacagcccctcaaccaatccctaacggacgcaaccttctctcttcagctcctcttttcaacctctgccggaatccgccaattaggttctgatcaacctttcacagattagaggggcaggggctgtaagtgaggatgaatttgcaacaagctgggcagtctaaatcctccaatggatatggccgccgaaaatctgaaagagaaggggcaactaaatcggagaataagatcttgtctgggaaattaaatgccaacagattggcaaatgcagtcgtcacaggcgcagtgactggcagtaaaggtggcagttatgagagcccttcacatgaccgattagtatatgtaacaacatgtcttattgggcaccaagtggaagtccaggtgaaaaatggatccatatactctggaatatttcatgcaacaaacacagacaaagattttggaaatcatttgaaaat

SEQ ID NO: 9894 - DNA, 506 bp, Glycine max
  Clone ID: jC-gmle01810044a08d1
aaaaagtaaattttgcatggcattaaagagttaaataaagaggaatgagaaaggtcaatctgagttaatctattacacgaccaaagcctgagaaaccccaaaagatgtatgagttaacacaaggtcataaaattatatcccagaattagcgaacttaataatatataatgagccttcagagatttttccataacctgcagatatcctcgtttaaaacttttcaggacaaccacttagtttattcttttcaagcaaagatttcacttgccaataagaatgtgaatagccaagtcgtcaataatcccgtcccttgtattgcatttcaggcatgtaactcggcatgtataaagcttgcctgggatgaccaagaagctgtccatactggggtgcattcggatgaaaatatccttgagacggcatttgtgctacctgaggattatatatgaccggttgtggactagcaaaagtaggtccaattccaatacccatgggcatgcctggcatac

SEQ ID NO: 9895 - DNA, 513 bp, Glycine max
  Clone ID: jC-gmle01810044a09a1
ccacttttccttgttccagggtgaaaagtgggttgtgcgtgtggccagatgtgagacaactttgctttagaaaaggcatgctatatggatttatgcggttgttttctacaccgttgaaaacgctccgtggagctagccgctcgctgagagtgactcaattttgcagtgttgccaatatgtcttcctcattgcagattgaattggtaccttgcctgaaggacaattatgcttatctgttacatgatgtggacacgggtacagttggtgttgttgatccttctgaagctgtgcctatcatagatgccttgagcaggaaaaatcgaaatttgacatacatactcaacactcaccatcatcatgatcacacgggtggaaatgtagaattgaaagcaagatatggggcaaaggtgattggttcaggaactgacaaggaaaggattcctggcattgatatccacttgaatgatggagataagtggatgtttgctggccatgaagtgcgtgtaatggaca

SEQ ID NO: 9896 - DNA, 545 bp, Glycine max
  Clone ID: jC-gmle01810044a09d1
aataataatttatattactaatttttttgtatgttgagacttgcagatagatcctcaagaagccacttatacgcgctcttggtagcaaaactcagtccagagtccagacccatatatggctcttgttcctttgagggaagtgggggtgggtcgccattggccaaggagtttactttaaactgctagctagccttcttcccgccacatatcctcaactgagtgagtgtcatgtatgtattgtacacctctaaatcgcaccacaactttctaaggcaccaagtacatacagaccctcccaaatggaaacaaaatttctgaaatcatattgagaacatagcatcaagcacattttatgccacggatggattcataccctaccctacatagaacaagtttcttcagactttcaaaatattataagtaaataatctaaaaattatcctttgcttgccggatgacaccaagggcttctgcatcatttgctggggctgcaatctttagtgattgccggattggcagcactgatgtacgaaggaatggattac

SEQ ID NO: 9897 - DNA, 361 bp, Glycine max
  Clone ID: jC-gmle01810044a10a1
ttcgcagttcccaaattcattttaatcctaattctgcacttcttgatcattcgatttttctcctcaagatgcagatattcgtaaaaactttgaccggcaagaccatcacccttgaggtggaatcctccgacaccattgacaacgtaaaagctaagattcaagacaaggaagggatcccacctgaccagcagagacttatctttgcgggtaaacaacttgaggatggtcgcacccttgccgattacaacatccaaaaggaatcaaccctccatctcgtgcttcgcctcaggggtggcatgcaaatctttgtcaagactttgaccgggaagaccatcacccttgaggtggaatcctcggacac

SEQ ID NO: 9898 - DNA, 487 bp, Glycine max
  Clone ID: jC-gmle01810044a10d1
aactatgatacgatattgatatttaattcttttggcgaaacgagctcaatacatcatattaaaacataaaaagcagcacctaaaccagaacagcaaacaagttcaagggagaaattgaacataacagacatgacatacaagaacacttgaaaaaagacacgcttaaaacaagaacacttgaaaaaaaacacgcttaaaaaccaccgcgaaggcgaaggacgagatgcaaggtggattccttctgaatattgtaatctgccaaggtacgaccatcttccagttgcttcccagcaaaaataagcctctgctgatcaggtggaatgccctccttgtcctgaatctttgccttcacattatcaatggtatcagaactttcaacctccaaagttatggtttttccagtcaaagtcttaacaaagatttgcatgccaccacgaagccgcaacaccaagtgcagggtagattccttctggatgttatagtcagc

SEQ ID NO: 9899 - DNA, 542 bp, Glycine max
  unsure at all n locations
  Clone ID: jC-gmle01810044a11a1
cacaaagcacaaagcaaagctcatccttgagttaaaaaatggcagcagcttcttccatggctctctcatccccatccttggctggcaaggccgtgaagctgggcccatcagccccagaagtgggaagggtgagcatgaggaagaccgtcaccaagcaggtctcctcaggaagcccatggtacggcccagaccgagtcaagtacttgggcccattctctggcgagcccccgtcctacctaaccggtgagttcccaggcgactacggctgggacactgctgggctttccgcagacccagaaaccttcgccaagaaccgtgaactcgaagtgatccactccaggtgggccatgctcggagccttgggctgcgtcttcccggagttgctgtcccgcaacggggtgaagttcggagaagccgtgtggctcaaggccgggtcccagatcttcagcgagggtgggctcgactacttgggcaacccaagcctgatccacgcccagagcatactcgccatctgggccacacangttatcctaatgggtgcc

SEQ ID NO: 9900 - DNA, 449 bp, Glycine max
  Clone ID: jC-gmle01810044a11d1
gtaaaaagcaagtaacattaagttggattcggatacacaagataattcacattatctgaagtacttcaccaaacacaaatctaaaaactctcaaaagtcatttcgttctttgacgctcactttccggggacgaagttggtggcataggcccaggcgttgttgttgacagggtcagcaaggtgatcggcgaggttctccaatggaccctttccggtgacaatggcctgaacaaagaagccaaacatagagaacatggccaatcgtccgttcttgagttccttcaccttaagctcagcaaaagcctctgggtcatcagcaaggcccaatgggtcgaagctgccacctgggtagattgggtcagtgacctcaccgagggggccaccagcaatacggtaaccttcaacggcacccattaggataacttgtgtggcccagatggcgaggatgct

SEQ ID NO: 9901 - DNA, 577 bp, Glycine max
  Clone ID: jC-gmle01810044a12a1
cctttgcaaaaccacgtttcgcaaactccactcagatacaccaattcacagtccgatacaaacaccaaacagccaagatgcaccgaacatacagcatgcgctcgtctcgcgcgcccacggcgtcgcagattcagagcccgccccctccgtcgtcctcgacgaagagcggacgtttcttcggaaaggccaatatcggccacaccttccgccacaagtcggcaggcgcattcggccccgacctcgcgaagaagctttcacagcttgtcaagatggagaagaacgtgatgcgcagcatggagctggtttccagggagcgcatggaggtcgctcaacaactctccatttggggcgaggcttgcgacgacgacgtctctgacgtcaccgacaagctcggtgtgctcatctatgagattggtgagctcgaggaccagtatgtcgatcgctacgaccaatatcgcgtcaccatcaagagcatccgcaacattgaggcctcagtccagcccagccgcgatcgcaagcagaagatcaccgaccagatggcgcagctgaagtacaaggagcccaactcccccaagat

SEQ ID NO: 9902 - DNA, 428 bp, Glycine max
  unsure at all n locations
  Clone ID: jC-gmle01810044a12d1
aagaacaattactgtattacgttattattgcgagatgcccaccccgcctatcgcatcgtaaatcatcaagaagttcgtgtatacaaaacgcgctccttcatattgccgaggccacgcaagtccgacgcgtcaagtcactctccgcagcgccatcaacatcggtaactccgtcgggggtatacatcgtcaaccgcggagtatcattagaggacacggaggccaacactagcatacacgtcagtgagacgtctatgcagcgatgaccctctcctcctcacgaccgcgctgatgctcgctagcaatagtggagttgacatcatcatcgaggtcgtcacggtcctcgtagtcgttaccttggtgctctgtggcggngatccagaggccggactccctgctgtcgagtggctggtcttggccggagaggtcat

SEQ ID NO: 9903 - DNA, 494 bp, Glycine max
  unsure at all n locations
  Clone ID: jC-gmle01810044b01a1
gagaaggtcacgaatcattaagtgaaacaggtatcaagtgttacagttttgctcgtctatgaataactttgacaggtagaaactgtaaaaccttacctgaccaatattggaaacaagctatgatatctaacataaactatgcatatagagccgaaaaaattctagcagcaaaacatgtttggatgtggtaagttatgctcctccagctgtatccatatctgtaaccccgtcaactcccttgaaaacaacacgtaattttctcaaacaggaaaacttttggtcgttcttgattgttgtaccattcacatgcacaacatccttgggcaatttacccatgagattaaaaagagatagattcaggtttgatcgagtcatttcttccaatacagggggagcttgcatgtacagattctttcctcgatgtgtaatactagcttttgataatcgcaacttaggatgttcttccagaagatccatgaanctttgcaatgtga

SEQ ID NO: 9904 - DNA, 586 bp, Glycine max
  Clone ID: jC-gmle01810044b02a1
gttcaagtccttgactctgtgaatatcaccttgggtgctgaagatgaactaaaacatgcagttgcatttgttcggccagttagtgtggcctttcaggtggtgaatgggttccatttctacgagaatggagttttcactagtgacacttgtggtagcacttcccaggatgtgaaccatgccgttcttgctgttggatatggagttgaaaatggtgtcccatattggctcataaaaaattcatggggagaaagctggggtgaaaatggctacttcaagatggaattggggaagaacatgtgtggtgttgcaacttgtgcatcttatccaattgcggcataaattgcataacaatatggtccctggtgactaccaccttgtcatgcttcagagtttagagcgtattgctgatgccagtattgatgaatgatgattaaagactagtgtaattgtatgatgaaaattgctcctagttgggctggcatgatgtataaaataagctagatgttgctgtaaatcacataagtatattatggccttaattgtgtgcatcacagacataataacgatcatatattgataggtcata

SEQ ID NO: 9905 - DNA, 441 bp, Glycine max
  Clone ID: jC-gmle01810044b02d1
tttttttttttttttttttttttttttttttttttttttttttttttttttttttggttttatttttttattttttttttttttatatattttaaaaaaaaaaataaaaaaaaatttaaaaattttaaaaaaaaaaacagaatttataaaaaacgaaaaaatgaaagggaggaaaaaaaaaaaaaaaaaaggaaacaaaaaaaaaaaaaaagaaggggggataaaagggggggaaaaaaaaaaaaaaggggaaaaaaaacttaaagggataaaaaaaaaatctggatttataaaaaaaaaaaggaccccaaaaagggggaaagatttgaaaaaaaaaaaagcgtgtagttagaaaaagataaagaaaagcgggcagaaacggagccttaaaaaaggaggaaaagaaaggggggggcaaaacgagggcaaaaattggaagag

SEQ ID NO: 9906 - DNA, 603 bp, Glycine max
  unsure at all n locations
  Clone ID: jC-gmle01810044b03a1
cagcaagtggaccccagtggtgaacatcgcgttccaggagacgacgtcgtatgaaacagccaacattaagattcttttcgcgagtaagaaccacggtgatccgtatccttttgatggtccaggtgggatattgggccatgcattcgctcccactgatgggaggtgccactttgacgccgacgaatattgggtggcgtctggcgatgtcaccaaatcgccggtgacaagtgcgtttgaccttgaatctgtggcagtgcacgagatcgggcacttgctcggattaggccactcgtcggacctaagagccatcatgtatccttctataccacctcgaactaggaaggtgaatctagcgcaagatgatatagacgggattcgaaagctctatggtatcaacccctaattattatagctaggtgttgtttgtactagaactagagttttatttcggtaatttgcattaaaggattttgaaagttatcgaggtgaaattattctaattcaagaacaacananatagcatgtaagatattgcatttagttttctctaaattaagataaaccagctgatactaggtgatgcatatatgatcatgaataaat

SEQ ID NO: 9907 - DNA, 474 bp, Glycine max
  unsure at all n locations
  Clone ID: jC-gmle01810044b03d1
aaggtaaatttgtcacatttattcattatcatatatgcatcacctagtatcagctggtttattcttaattaagagaaaactaaaatacaatatcttacatgctatttttgttgttcttgaattagaataatttcacctcgataactttcaaaatcctttaatgcaaattaccgaaataaaactctagttctagtacaaacaacacctagctataataattaggggttgataccatagagctttcgaatcccgtctatatcatcttgcgctagattcaccttcctagttcgaggtggtatagaaggatacatgatggctcttaggtccgacgagtggcctaatccgagcaagtgcccgatctcgtgcactgccacagattcaaggtcaaacgcacttgtcaccggcgatttggtgacatncgcagacgccacccaatattcgtcggcgtcaaagtggcaccttccatcagtggga

SEQ ID NO: 9908 - DNA, 578 bp, Glycine max
  Clone ID: jC-gmle01810044b05a1
gaagatggagatgtatcagatctggagcaggagaatagcgttgggagcgttcgcgtttgttctgcttttcctatcggcctcagcagacgacgtcgttgtgctctctgaagataacttcgagaaggaagttggtcaggacagaggagctctcgttgagttctatgctccttggtgtggacactgcaaaaagcttgctccagaatatgaaaagcttggtagcagcttcaagaaagccaaatctgttttaatcggcaaggttgactgtgatgagcacaagagtttgtgcagcaaatatggagtctctgggtacccaacaattcagtggtttccaaaaggatctcttgaacccaaaaagtatgaagggccacgcactgctgattcacttgctgagtttgtaaatacggaaggaggaacaaatgtgaagattgctacagctccttccaatgttgcggtgcttacatctgaaaattttaatgaggttgtcttagatgaaaccaaagatgtcttggctgagttttatgcaccctggtgtggacattgcaaaagtctgctctactacgagaaagtgcccagcattt

SEQ ID NO: 9909 - DNA, 385 bp, Glycine max
  Clone ID: jC-gmle01810044b05d1
ggggaaaaaaatcgtaagttcggaatttttaaccccaaaagcgccatgcaagataagggcaatagtcccgactcaaattaagcccttcaagtttccacgttgaatatttcccagcattttcgatttcaaagtcaaacaatcattaggagctgcgattggtcacgagcttccatgaaaaatgggtaatgatgccccaaaaagtcaagccgcatatgtcgacaagatatttttctttagaggtaactcgtcggccttggcaggactaatggacttgtcaagtatgccctgtaggcgctggatttcggtcttagcataatcagaacctttttccaagtaattcttggcagctttcaaggaaatcttcccgggccttgaggcaaaaccc

SEQ ID NO: 9910 - DNA, 197 bp, Glycine max
  Clone ID: jC-gmle01810044b06a1
cgtcaacaagatgattctgtaattctaagctatgggtattgtttgtaatgcttccccatttgtgttgattttgaatctattcctcttaaaagccactgccaaaagcaaaggcaaacaaatggtggttgtgtgaacaccaactttattttgggaccaatgcgtgccaatcctttcaaaccaaaattgtccttttcacc

SEQ ID NO: 9911 - DNA, 197 bp, Glycine max
  Clone ID: jC-gmle01810044b06d1
ggtgaaaaggacaattttggtttgaaaggattggcacgcattggtcccaaaataaagttggtgttcacacaaccaccatttgtttgcctttgcttttggcagtggcttttaagaggaatagattcaaaatcaacacaaatggggaagcattacaaacaatacccatagcttagaattacagaatcatcttgttgacg

SEQ ID NO: 9912 - DNA, 350 bp, Glycine max
  Clone ID: jC-gmle01810044b07a1
ctcgagccgattcggctcgagatgctttggcaatgcatttgaagcaggctcaacagagcaacccctttcctgggcgcttcccacctgatgtcttctaatggggtgaatgtgtagaatgtaataataaaggcagcaaacagctggattaattatgtcgtgttgtttttctttcttacaaaggtcaagcgttgttgtagtttgctcttatagcttctgttggtcagagcatggtttctgcttttatagttcaggacttcaggttatatattctatcctatcaacacagtatagtatccgacagtatcagaatatatcgtcactcaattcaattacccgtttggaattttatg

SEQ ID NO: 9913 - DNA, 350 bp, Glycine max
  Clone ID: jC-gmle01810044b07d1
cataaaattccaaacgggtaattgaattgagtgacgatatattctgatactgtcggatactatactgtgttgataggatagaatatataacctgaagtcctgaactataaaagcagaaaccatgctctgaccaacagaagctataagagcaaactacaacaacgcttgacctttgtaagaaagaaaaacaacacgacataattaatccagctgtttgctgcctttattattacattctacacattcaccccattagaagacatcaggtgggaagcgcccaggaaaggggttgctctgttgagcctgcttcaaatgcattgccaaagcatctcgagccgaatcggctcgag

SEQ ID NO: 9914 - DNA, 565 bp, Glycine max
  Clone ID: jC-gmle01810044b08a1
cagcttccaatgcagaagaaagtagttggggaacatattgccctggggagtatcctagtcctcccccagaatattcaacctgcttgggtgatctgtacagtgttgcttggatggaagacagtgacagacacaatttacgaacagaaactctgcatcaacaatataaattggttaaagagaggactatatctggagattcatactatggctctcacgtgatgcagtatggtgatgtacggcttagcagtgatgttctcttccattatttgggtacagatcctgctaatgataatttcacttttgtggacgaaaactccttatggtcaccttcaaaaccagtcaaccaacgtgatgctgatctcatccatttttgggataagttccgcaaagctcctgagggttctctcaggaaaaatgcagctcagaaacaagttttggaagcaatgtctcatagaatgcatgtagacaacagtgtaaaacttattgggaagcttttatttggtattgaaaagggtccagaagtactcaacgcttgtagaccggcaggatccgcacttgctgatga

SEQ ID NO: 9915 - DNA, 488 bp, Glycine max
  Clone ID: jC-gmle01810044b08d1
gagtcccaatattttacaaataataaatacaatgtcgccattaatattaaacaataactttgacatcataaattcttccaaaataattatacaaaagtgacaagggaaaacccgatctgccagttgcctactgaataaaaacacacatcattactatgtgttggcatacacgcatgaccttgtgccttgtcatgagtgaatattccaaagcaattggtcctttatgcctccttaatccttatgccacaaaatgctatcatcccttgaaagttgtaattgcttcttcagaaatagatttatacaaaggtagttgcaatatctatttgccaaactaaaaatgtaaagacccttcttcccaatcctagtagtgtcccaattgtatttacaaaggcgggacaaaatatgtatatacaagtacaatcatatagcataatgtaacaataatcatactttggtctttactggtgcacattacaggaattattatg

SEQ ID NO: 9916 - DNA, 551 bp, Glycine max
  Clone ID: jC-gmle01810044b10a1
cccaagtctagcagaagaatggaatgaagcaatgtcaagcatacttgaatggctggcaccacttgctcataacatgataagatggcagtctgagagaagttatgagcagcagagctttgtttcccggacaaatgtgctgctggtacagaccctttactttgcaaaccaagaaaagacagaagaagtaatcactgagcttcttgtgggactgaattatgtctggaaatatggtagggagctcaatgcaaaagctctggcagagtgtggcagttttagggtagacaatgaatatcctaatctgaatggataaataatctgtataggttgtggccatttcctacaggaatccagttccttgccagagatgaggacttgcagaaacaccaattatcagtcttgttaaatcgacaaatgtgaatcaaatgctagcataagtatgagagaagtacctatgtattcattattgtggaaatttagtatcagaatgcgtacctggtgagaaattttttaaaatcattttatcgtaattttctttgatgagttcctaagct

SEQ ID NO: 9917 - DNA, 423 bp, Glycine max
  Clone ID: jC-gmle01810044b10d1
aaaaagggatttgggaaaaaacccattccccttggggggaaaaaactttccaattaaattggcaaaagggccaaaaaaattcccccccctaaaacatcccgggggaaaagggcccctttaaaaggggagggccaactttgaaaaaagaaaaccccttttccgggttttagcggttgggaccccttaaaaaaaaattaccgaaaaaggtttttaaaaaatttttccccggggcccctttttgaaactaaattcccacaaaaaggaaaacaaggggccttttttaaaacttaggctagcattggatccacattgggcgattaaaaaaaaaggaaaatgggggtttttgaaagccctaatttttggaaaggaactggtttccttgaggaaagggccccaccctatccaaattttttatcccttcaa

SEQ ID NO: 9918 - DNA, 469 bp, Glycine max
  Clone ID: jC-gmle01810044b11a1
agcggagcagttgggcatatgttttcatcttctcctggatattcaactgatcttcatcactcatccttttcatctcatgaaaaacaacctagaaatactcattttatttcacagtcattaagtaacatggcttcattgccattatcttattcttcaaatagtgaaccgataccttctacaacatcaaccccttattccaatggaaacagtgtttcctggcatacagattccttgcctagctttctcgatttccctgccaatacctccattggtaatagtcaagtagaaagcagtgactgcaatatcatggcaactgaagagtattctaagcgaaatgattggcaggagtgggctgaccaattaatcagtgatgttgatcctttgacttctaattggaatgatcttcttgctgacaacattcaagatcttgaaccaaaggtcgcataatcatcttctcaacttccaatag

SEQ ID NO: 9919 - DNA, 419 bp, Glycine max
  Clone ID: jC-gmle01810044b11d1
ttttcgttctttttttttatataacaggcctttttttttaacaatttggaacacgtaaaataaacaattcatattggagatggactccctaacatagaattttgggtggtagtatttggtaagatactgtcctaggtcaatcctgacttatgatttgagttgtacccattatctgtactgcacactagaatcttatcctaacatggatgctaaataacaagttcgaagaacgctttggtcaaaaatttgactcatcatttttgtaacaaaatgacagacacacatgcaagtcctcattgatcacaacaggacagggggaactcaagctatggagctctagacattaatctaccaagtcttccttactaaataaaaatcttaaatgaatcagtatcgtcttgtcagttcaatgctgattc

SEQ ID NO: 9920 - DNA, 514 bp, Glycine max
  Clone ID: jC-gmle01810044b12a1
agcggagcagttgggcatatgttttcatcttctcctggatattcaactgatcttcatcactcatccttttcatctcatgaaaaacaacctagaaatactcattttatttcacagtcattaagtaacatggcttcattgccattatcttattcttcaaatagtgaaccgataccttctacaacatcaaccccttattccaatggaaacagtgtttcctggcatacagattccttgcctagctttctcgatttccctgccaatacctccattggtaatagtcaagtagaaagcagtgactgcaatatcatggcaactgaagagtattctaagcgaaatgattggcaggagtgggctgaccaattaatcagtgatgttgatcctttgacttctaattggaatgatcttcttgctgacaacattcaagatcttgaaccagaggtcgcagaatcatcttctcaacttccaataggacaccaatcccaaagccatcaacaacttcctgcttcatctggag

SEQ ID NO: 9921 - DNA, 440 bp, Glycine max
  Clone ID: jC-gmle01810044b12d1
ggtacagttaaaataaacaattcatattggagatgtacgcactaacatagaattttgggtggtagtatttggtaagatactgtcctagttcaatcctcacttatgatttgagttgtagccattatctgtactgtacactagaatctcatcctaacatggatgctaaataagaagttcgaagaacgtcttggtcaaaaatttgactcatcatttttgtaacaaaatgacagacacacatgcaagtccttattgatcacaacaggacagggggaactcaagctatggagctctagacattaatctaccaagtcttccttactaaataaaaatcttaaatgaatcagtatcgtcttgtcaggtcaatgctgattcaatagaccatatggcttacttctctgtccttggacgctttgaggctttagcactatcttcactagcat

SEQ ID NO: 9922 - DNA, 379 bp, Glycine max
  unsure at all n locations
  Clone ID: jC-gmle01810044c01a1
cctctctacaggtccttaacaaaattcaattctggttgtggctggccagccttctatgaggggattcctggagccataaatcgcaatccggaccctgatgggatgaggacagaaataacgtgtgctgcttgtggnggacatctaggtcacgtctttaaaggagaaggatttccaacgcccactaacgaacgccattgtgtcaatagcatttcactgaaatttgcgccagccaattcttaataaaaattgagtctgctgttcggacgtgactgcttaagtacccaacattagtaaaaaaaaattatgcaatgtacttatattatgaatgaagttcatataatgatggctaaataccaattttaattaaagagttatgttg

SEQ ID NO: 9923 - DNA, 457 bp, Glycine max
  Clone ID: jC-gmle01810044c01d1
cgccctattcgcaccgggcggtgtaccgggcccgggtcgacgagctcactcggcggccgcccttttttttttttttttcaacataactctttaattaaaattggtatttagccatcattatatgaacttcattcataatataagtacattgcataatttttttttactaatgttgggtacttaagcagtcacgtccgaacagcagactcaatttttattaagaattggctggcgcaaatttcagtgaaatgctattgacacaatggcgttcgttagtgggcgttggaaatccttctcctttaaagacgtgacctagatgtcccccacaagcagcacacgttatttctgtcctcatcccatcagggtccggattgcgatttatggctccaggaatcccctcatagaaggctggccagccacaaccagaattgaattttgttaaggacctgtagagagg

SEQ ID NO: 9924 - DNA, 529 bp, Glycine max
  Clone ID: jC-gmle01810044c02a1
gggagaatatatatataaacatgatgtgctaattaaggttattttttaaatataattttggagaaattttataaaattcatttgataattacattgtttagttagcaaaaacattatagcatactcaaatttaacaaattgcaaatgattgttgtctattcatctttgagtctcacatatgaagtcactgcaaatttagctaaagttattcataagtaaaagtgagaaaggtcaagtgtttgtgttatattctccattcaacaagaaaaaaccttcaatatccccttaacatgatttatatattgtataataaatgtttatgttaaatgtcaaacatagcagattatggccccattgtaagcggtaaaatagcagattatgcaggtcgtcgagttgtaagtcaaagtcaggctacacttaattctaatttcaatgtttctattgctcacctttggttattttgcattctgacgtgcaagcaatgggtttctgagaggttctctgcatcttgggatcacttatcatagca

SEQ ID NO: 9925 - DNA, 573 bp, Glycine max
  Clone ID: jC-gmle01810044c02d1
ataattaaataataatttgtcatttcacacatacaaggtatatatacatatatgtagttatgatctaatagctacattcaatgattttattacctttgtccgcatttatatatacttaattccctactccaatattacaaatcaagttatacaacacatattcctacatataccgtaccataagggataaatttcataattgaccacccatgtctttggaagaatgtgatgcaaggccttttttcacctgcttcattttccatgataccatcccaaaaggccttgtccattgtctgctttattttcccctcagtgtccttggagtcaaaatccatgggggttgccacatggaaaacaccagtgcaacctttaatggcttcatcaaagcttccctcttgagcaagatcagccttccacagagacaatttggtcttggaatctggcggctccaccaaatgcttcaccttcttcatgttagctgaagcatgcatataataataataataataataataataataataataataataataataataataataataataataataataataataatat

SEQ ID NO: 9926 - DNA, 533 bp, Glycine max
  Clone ID: jC-gmle01810044c03a1
cccaacccccacccgtagtttctaccaccttcagtcacggcgtaatacactaaccaacccaccatgtcgctgcctgcttgtcccgccgaacaactggcccaacttctcggcccaaacaccacagacgcctacgccgccgcctcccttatctgcggccagttcgccgccgtggacagcaagttcgtcgacacggccttcgccgtcgacaacacctacctcctcttttccgcctacctcgttttttctatgcagctcggcttcgccatgctctgcgccggctccgtccgcgccaagaacaccatgaacatcatgctcaccaacgtcctggacgctgccgccggcggcctcttctactacctcttcggcttcgccttcgctttcggctccccctccaacggcttcatcggtaaacatttcttcggcctcaaggacatcccttcatcctcctacgactacagctacttcctctaccaatgggccttcgccatcgccgacgacggcatcaccagcggaagcatcgacgaacgcacaca

SEQ ID NO: 9927 - DNA, 432 bp, Glycine max
  Clone ID: jC-gmle01810044c03d1
actatataccaatcttcttccttctttttttggtgaaaactacaaaaataaatcccacaaatttccattttccacagccatctgtcatttccaggaccaacatgccttagtcaacaaccaccccccacagaaacgtacgcatcttccaccagaatctttaacttccagcatccaccaatgcacgaccaatgacaattacaaatcaaaatccctaattgcccatcatcataaaaagaaaaatctacgaaaaaagaagacccaagacaaataaaaaaaaaaagaagtaaaaagtcatgagtatcaaccggagttggatctaacagaagtaacaagtaaccaaggtttgaatccttacaaggaatatgtatccaaatttaatgtttgactaatgagacatgcatatgggaaaaaaagatcattcatcaatggtgg

SEQ ID NO: 9928 - DNA, 554 bp, Glycine max
  Clone ID: jC-gmle01810044c04a1
gttgagttaggggactctggttttgaaactcttaatccaggtgattcccatgcatcatcaatttatgctagtgctgatgttgatatgggtggtactgatgctgaaggaaatcaatcagagcaaccaactgtatctgaagacaggagggatgagatgttatcaactcagaacactgaggttgctccagatgcaactcaggccgaccaagttagtgcaaataatgaagcttccggtgctaatactatcgaccctacctttttggaggctctgcctgaagatcttcgggcagaagttctggcatcccaacaagctcagtctgttcaacctccagcttatgcaccaccttctgcagaagatattgatcccgagtttttagctgctcttcctccagatattcaagcagaagttttggcccaacatagagctcaaagggttgcccagcaggctgaaggacagccagttgacatggataatgcctctataattgctacttttcctgctgatttgcgtgaaaaggtcttttgacttcttcggaagcttgtctgtcagcacta

SEQ ID NO: 9929 - DNA, 437 bp, Glycine max
  Clone ID: jC-gmle01810044c04d1
aaagaatcgaacaatttttttttggggcaaaaacctcaattatgtattccaaaatttggccctcctcaatctttttaaaaaattctagaaccataaaaggctgtttggccctagaaaccccctttaaattaagattggccccttttgcaaaagcttgacccagtttgaaggctgtcaaaaagctcccaaactaggcctgggaaaattttcccatgaaaaaaaccttttagccatttttgcggggggagcctcaaaataaattgatccccaacattaaaatgccccattgactcattgggaggcttaccaatagggcccacaacagaatagcagcccgaactccttttccaaatgacaagttggagacccaaatgggggaacccctgtgcaaaaaaaaaaattttgccccaaagtgctggtcaacccaaaccaaaccc

SEQ ID NO: 9930 - DNA, 542 bp, Glycine max
  Clone ID: jC-gmle01810044c05a1
cttctatttttcaagtaacttaaggtttcaaacctaggaagttggaagtcatggcagcaacattgatggcagcaacaacaagttctggtactcttaaagcaactcctttccttggccaaggcaagggtgccaatgccaatgctcttagggatgttgtctccatgggaactgggaagtacaccatgggcaatgatttgtggtatggaccagacagagtgaaatacttgggacccttctcagctcagaccccttcatacttgaaaggagaattccctggggattatggatgggacactgctggcttatctgctgacccagaagcatttgccaagaacagggctcttgaggtgatccatgggcgatgggccatgcttggagcactaggatgcatcaccccagaggtgctagagaagtggttgagagtggacttcaaggagccagtgtggttcaaagctggagcccaaatattctccgaaggtgggctcgactatttgggacacccaaaccttgtccatgcacaaagcatcctggcagtgctgggc

SEQ ID NO: 9931 - DNA, 348 bp, Glycine max
  Clone ID: jC-gmle01810044c05d1
aaacattgtattctgactttaacattgctatacctttctaattggttgcaagggacaaaactatattaacaaacaagagacaaacgagggtaaaattgaaccaaaggccttaagaagtacactgagccaacaaaaaaagggatcatataacctacacataaatcacaggggtaagaacgagggatgggaccatagggattcgggaagaaccaagtcatatgcggtctaagaccctggggaaaacttaggggggtagacccaagcgttgggggccacagggttgtctaggaaggccaaaaggttcttcaaaggaccttgggaaaagacaatagcttgaacccagaattc

SEQ ID NO: 9932 - DNA, 525 bp, Glycine max
  Clone ID: jC-gmle01810044c06a1
gagtatcctagtcctcccccagaatatacaacctgtttgggtgacttgtacagtgttgcttggatggaagacagtgacagacacaatttgcgaacagaaactctgcaccaacaatataaattggttaaagagaggactatatctggagattcatactatggctctcacgtgatgcagtatggtgatgtagggcttagcagagatgttctcttccattatttgggtacagatcctgctaatgataatttcacttttgtggatgaaaactccttatggtcaccttcaaaaccagtcaaccaacgtgatgctgatctcatccatttttgggataagttccgcaaagctcctgagggttctctcaggaaaaatacagctcagaaacaagttttggaagcaatgtctcacagaatgcatgtagacaacagtgtaaaactgattgggaagcttttatttggcattgaaaagggtccagaagtactcaacgcttgtagaccggctggatcggcacttgatgatgactggcac

SEQ ID NO: 9933 - DNA, 422 bp, Glycine max
  unsure at all n locations
  Clone ID: jC-gmle01810044c06d1
gcccactgaataaaaacacacatcatattactatgtgttgtcatacatgcattgtaatgagtggatattccaaagcaattggtccctttatccctccttaatccttatgccgtaaatggcaccatcccttgtaaattgtaattgcttcttcagaaatagaattatacaaaggtagttgcaatatctatttgccaaactataaatgtaaagacccttcttcccaatcctagtagtgtcccaattgtatttacaaaggtgggacaagatatgtatatacaagtacaaccatgtaacataatgtaacaataatcatactttggtctttactagtgcacattacagggagttattatgcactgaaacccctttgcagagaactccagggattggaaggaatactgacacaagctngtgctgaagcc

SEQ ID NO: 9934 - DNA, 549 bp, Glycine max
  Clone ID: jC-gmle01810044c07a1
acttattctcctactcttgttcctgttcctacccaacacctgcttctctttctcatttcaaactccttcaagcaatgaattctcgaatcaaagttcttcctctctgaagcagcagattctggagctagctaatagtcccagcacggtgaaatggatgaagagaataaggagggaaatccacgagcacccagaacttgcatatgaagagttcagaacaagtgctgtcataaggcgtgagcttgacttgttgggtgttgaatacaagtggcctgtggctgggactggtgtggtggccaaaattggttatgggtctcctccttttgttgctcttagagcagacatggatgccttgccaattcaggaaatggttgattgggatcataagagcaaagtagatggaaaaatgcatgcttgtgcacacgatgcacatgttgccatgctacttggggctgcaaagatactgcaagaaatgaaagacatgttacagactactggtgttctaatatttcaaccagctgaggaaagaggcacaggtgcataagacatgat

SEQ ID NO: 9935 - DNA, 410 bp, Glycine max
  Clone ID: jC-gmle01810044c07d1
ggggcaagccaattcaatttgcctttaaaaaaattttttccctgacaggttttttggccaaagaatttggtgaatccccacgggggggggggggtttacaaaggggctaaattttttgaaaaagaagggtttgaaaaagcaaatgctttatgccatgccccccccaggggaagccccttttccccaatgaaaaaagaagggccttgacccgggggggggggccccctcttctgggttggggggcccccaaaaacaaaagacccgggggccttttccaagtaaaaagccaaattttcccctcctgggaagaggggggccaattttatgtttacttccccaacaattttgcttgacactcccccggcttgggggtattttcacacaccatttgggggcggagggaatggggg

SEQ ID NO: 9936 - DNA, 313 bp, Glycine max
  Clone ID: jC-gmle01810044c08a1
cgtaattgctgacgaaaattatatgtttctggactctaaagtttcactcaaatcgaggggagaagcaattaatgtcatgctgctatatatatatatatatagtttttatttggtgcctcatctttttaacactattcctgtgttaaaactcggtggtgtcacatctttgctttaaaattccgtgttcttttccagtttgcagttgcaataatcttctaatgttgtactgaggcaaaggcttgcccttttagccactcaataaatatgagaacttcattaaaaaaaaaacaaatcaaaaaaagacaagaagcac

SEQ ID NO: 9937 - DNA, 279 bp, Glycine max
  Clone ID: jC-gmle01810044c08d1
aaaagaagctctcatatttattggggggctaaaagggcaaccctttgcctcagtacaacattaaaaaattattgcacctgcaaactggaaaaaaacacggaattttaaagcagagatgtgaccccccccctttttaacacaggaatagggttaaaaagatgaggccccaaataaaaactttttttttttttttttagcagcctgaccttaattgcttctcccctcgatttgagggaaactttaaagtcccaaaacatattattttggtgagaaattacc

SEQ ID NO: 9938 - DNA, 530 bp, Glycine max
  unsure at all n locations
  Clone ID: jC-gmle01810044c09a1
cttattttgaatctaaaaaggtgataaattgataccttttatatctaaggaagactgtaaaaaaggaaacaagcaagaaacagagaatgcgcagaaagatatgagagtaaatgctcccccaaagtcagataagattctctggactcctatttccattaccaaattcctccatatcccccacaatcattacccctccattcttataccagaaccctctcagcaattctttgtcctctaactaacttattcccttgacaaaagtctactccaaattagacccatttgccctcttgggcctacggacataaacctgaaaaggtttcttctctttgggccggttcccatcataaattatgtcccacaacacagttttgtcctgtttcaagatttgttctaaactttgcttagttagtctgtaaaattagcgttgttctagatctacaaaatttatcagtttattatgttcataggatatatggttattagttccatgttcaaacanttttctggccaagtggtttatggaaata

SEQ ID NO: 9939 - DNA, 485 bp, Glycine max
  Clone ID: jC-gmle01810044c09d1
gattctgccaaccaggaactataacttcattaattgagaatagtacataagtttacatgctcggtagcagacagccaaaatggctgattactattatttacaaggaaacagatcaagagtcattacaagtcttgaaaccctcacaactgtaaccaggataattgggtaatactttgctttcgacctttcttcacaaattcaatcataatagtcaacgaaaacaagttttttaagagagtagttatacatgaaaatttttagttagcatcatctgcagagaagtcaggctcagggggtttctgtagtttcactaactccctggcagtcttggcaagtcgattgcgatgtacaccacgtagggtgtgcgcagcaaactttgaggctaacaaggcagcaccaaagctgtaggaactgccaccaacattttcatgagctccgtctgactcatcttccttttgacgaagcttcataattttctttttgga

SEQ ID NO: 9940 - DNA, 464 bp, Glycine max
  Clone ID: jC-gmle01810044c10a1
cttgaagcaaatcttcccctattccaaagtcgaatgggagcattgcttttcctaatctctgctttactttctcggggactggacttggttcaaagtgacagggatgatcccagcctaccactggttactgcaccttttgggcatgcctaccaggaaattgagaacctactgctctgtggggaggctgttcctaatgtgcttgatggaaggatggatttaggaggaggaatgttcgtgaaaggtatatccggatatgtggaagttggatttctgactctattagaatccctgaatctttgcaaggttgctcagttactgaaatccccatagtggcctatatgggttgaggggagtgaatcccattacacggtgctgtttgctcttgaccccagcgttcaaaatgagaatgaactgtaaggaaaggatactctgattcccagagctattgatgcacaagatcagag

SEQ ID NO: 9941 - DNA, 510 bp, Glycine max
  unsure at all n locations
  Clone ID: jC-gmle01810044c10d1
aaatcaaacacaacctacacatctaggtgcgataatattattatatgactgttcattttcccatattccagaagccaagcatgatgctttactattacagcaatttcagaaacaagacccggtttcacgtttattactaataaccccccacgaactgtatataactcttccggtggcaatacatttaaaatggatgttacacttaggctttgacaatgaatatcgcatccctcttttttgtacctttagaatagcatgacaaaatcgaagagaacgttgaatatacactaatccacactatatataacggctattatgcacatattggagaaaatttggagatctgaaccctccctgttcatgtgcctcgaggtaccacatcaaattaaaacataaaaactttatctactctttgctgaaccgattgtgctttccctgtacgaaacttgtaagaaccaccacaaatgactctatataatgtctgtcaaactatactangaggatcccctg

SEQ ID NO: 9942 - DNA, 557 bp, Glycine max
  unsure at all n locations
  Clone ID: jC-gmle01810044c11a1
gaaaaagtacaaggcgttcaatccgctgaacctgccagacaggcaatggcccaacaagaccatcgagaaacccccgagatggctgtcaaccgatctgcgagacggcaaccaatctctggttgatcctatggacggcgagcaaaaatggatgtacttccagatgctcacaagacttggctacaaggagatcgaagtttccttcccctccgcatcgcaaaccgacttcgacttcacacagcgcctcgtccagacacccggcatagtgcccgacgatgtctggctgcaggtcctgtcgccgtgccgcaaagagctcatccgccgcactgtcgactccctgaagggcgcaaagaaggccatcctgcatctctaccttgcgaccagcccgtgcttccagcaaatcgtcttcaacatgaacgacgaggagacaattgccctggcggtcgagtgcacaaaatacgcgagatcaatcacaaaggacgaccccgagcaggcagggacacagtggcactacgagttntcgcccgagacgttctccgattcgaacctgaattcgcgct

SEQ ID NO: 9943 - DNA, 497 bp, Glycine max
  Clone ID: jC-gmle01810044c11d1
gacaggtgtcaaggtgcatttttgtcttcgataataccactacagctcttatggtccactgtgagcaagagcgctttgctggtcgaaagtagggattggactttctcgtgctgtgataagtctgttgtattgagaataaacttgtacgcacttttgaacaccaagttcctgcccaatgccaatgctatcatctggaaagtgcaacgagaatgaaggcaagtcgacctttaaacgcctgcgctcttcacatccgcctgctcaccactgaccatcgcctccagcttgtcaacaacagtgccattctgcttctgctcaccctggtcatccgcactatgcgcgctcctcaggggactgttaggaatatccagggtatcactcctcttgggcctgaacgggatgggagtgctaggtcttgaagacaaaaacgaagaagccgcgctgagcagcgcgatcaaactcgcctgcacgacgtcgtggtggatgccgacgccccacac

SEQ ID NO: 9944 - DNA, 510 bp, Glycine max
  Clone ID: jC-gmle01810044c12a1
agaatgagcaccactcaagcttcctccaacaacaagaagaccaaacgcaatcacaagaaatccctctccctccccgcccgtaacggaatcacccctccggatgatggcggagaaagaaccgttaaaaagcttcggttgtcgaaggcgctcaccatccccgacggaaccaccgtctctgaggcctgcaggcgcatggctgctcgccgcatcgacgccgttttgctaactgattccaacgccctgctttccggaattctcactgacaaggatgtggctactagagtcgtcgccgaggggctgaagccggaggagacgacggtgtcgaaagtaatgacgcggaatcccatctttgtcacgtcggatacgctcgccattgatgcgcttcagaaaatgattcagggtagatttagacacctccctgttgtggaaaatggtgaagtcattgccatgctggatatcaccaaatgtctttatgatgccatatctagaatggagagcgctactcaacag

SEQ ID NO: 9945 - DNA, 415 bp, Glycine max
  Clone ID: jC-gmle01810044c12d1
aataatattgtaattgatttcatcaaatggcttgaccttgatggtgatctaactgataatatctggacgcaaaagtcgtaagtgatgaaagttgataaatatatggaattacaagtaccttaattgagaagaacatggggacacttcagtattgcatgccacgactatatctttggttctaattacatcagtgactcaaaaagaaaaagataattaaaaacggctgattagagagactccacatcatccacctattccgtgtccatcatttcctttgtcaacgagcatttgatttatgacgaaactctgggattcatagagtaagattatagcatgttttggtttcaagctggcaaacatattactgtctagagcgctttatgtacaccaatacgctaaatgctcgttgaacaac

SEQ ID NO: 9946 - DNA, 460 bp, Glycine max
  Clone ID: jC-gmle01810044d01a1
ggagcatttaccaaacactctgaggcaggcattgatatataaggctctaggatttccaatgccttattttgcacatgtttctttgattttagctcctgatcggagtaaattatcaaaacgacatggggcaacatcagtgggtcagttccgggagatgggatacctaccggaagcaatggtgaattacctagcattattaggttggggcgatgggactgaaaatgagttttttacacttgatcaacttgttgaaaaattcactatcgaacgtgttaacaaaagtggtgctatttttgactcaacaaagttaaagtggatgaatggtcagcatttaagagcacgttcatcagaagagttgaccaaacttattgcagagtactggaagacatctggcttactcacagtatcagatgggccctttattgatgaagcagttcacctacttaaagatgggattgac

SEQ ID NO: 9947 - DNA, 351 bp, Glycine max
  Clone ID: jC-gmle01810044d01d1
ccatatcttatttaaataatttaaaaaaaaacatcactccaaaatatccatgtttccaaattccaaaaatgggaaatttatctagtcccattgaaataaaaacttgcctaaacaaaatggaactcattatatgactttaaaagatccctcggtaaattttacaaatcagacttttttagtcaaatttgccgaaaaaaaaaaaccaaaaaacagagggctccaaacagatgtgtaaaaccatgggattatttgatagaccttgaaagggaattctaagttagacaggagcagcagtttttttgacaggttggcccttggacaatgcttcccagtcaatttgcctaggctttt

SEQ ID NO: 9948 - DNA, 560 bp, Glycine max
  Clone ID: jC-gmle01810044d02a1
gagatctcgtctttgaagtttctaagatgacttctccctacattaaatgtacagtctctttcttcatagcatttggaaatttggctgatgacaccatcaattttgaggcttttccccacaagctggtgcagtttggagagattcaggaaaaagttgtattgaaattttcacaagaggaatttcttacagcttggtcaactcaggtgcgtcctgcaacaactctgttggctgatgggtgtccatatttgtatgctatggtgcatgatagttcagtgtctacaataccaggtgattttgtcattggtgttaagttgacaaccataaacaatatgtgtgcatatgggctcaatcctggtatttcaggttctcgtcttttgggcaccattcctcagtctatttcacagcaaactgtttggaatcaaatggcaacagtgagaacaccattgaattttgattctagcacgcagagcttttggtcattttctattgaccttctcggtggaggaatttagtggacaaaactggagattgatcacactatcaaaattctccattagtac

SEQ ID NO: 9949 - DNA, 438 bp, Glycine max
  unsure at all n locations
  Clone ID: jC-gmle01810044d02d1
aaaataacacacacttcacacatcattacgacaattaaaagaggtgtggaaattttcaaatagacagagcatactcaacaagagggtcatgtctaatttcctttattgaattaaacaaacgaacaaacgaaagaaaacacaaattccagatcatgcagaggattccgcattttcagaagatctggcagtagcctgtggaacagaaaaagctggcataagagtattaccagcaatttcaaaatcttgagaaattcccaagagaatatcaaaaactgtagactgtttgggattgtcaataaggaaactcaagtgccatgaagtttgatttgcccactcagaactccacatttcaaaaccattattaggaccacatacctctattgggaagatcaattcccaggaatgtggttccgattntgtccacttacatgcatcgaa

SEQ ID NO: 9950 - DNA, 451 bp, Glycine max
  Clone ID: jC-gmle01810044d03a1
agcagttgtcacccaactaattttcttcaaaggatccaggttttcaaaagaaagaggaatcactctaatgggagccatgatcataatatgcagcctgccaatatgcttaatctactttccccaatggggtggcatgttctctggtccttcatctaaaaaggtcacagaggaagattactacttggctgagtggaactcaaaggagaaggagaaaggctcccatcatgcaagcttgaaatttgctgataatagcagaagtgaaagaggcagaaagctgaatgcttcaaccgagcttaccgaggaaatcacacccccacatgtttgattgctcctcttgaacttgttaatgttaacccttgtaccttcacttaagcctgcccctgaagtttgtgatatcaaatcaatgtgtgttcatatgtttgctatataatgaagctttccttgggaagtg

SEQ ID NO: 9951 - DNA, 451 bp, Glycine max
  Clone ID: jC-gmle01810044d03d1
cacttcccaaggaaagcttcattatatagcaaacatatgaacacacattgatttgatatcacaaacttcaggggcaggcttaagtgaaggtacaagggttaacattaacaagttcaagaggagcaatcaaacatgtgggggtgtgatttcctcggtaagctcggttgaagcattcagctttctgcctctttcacttctgctattatcagcaaatttcaagcttgcatgatgggagcctttctccttctcctttgagttccactcagccaagtagtaatcttcctctgtgacctttttagatgaaggaccagagaacatgccaccccattggggaaagtagattaagcatattggcaggctgcatattatgatcatggctcccattagagtgattcctctttcttttgaaaacctggatcctttgaagaaaattagttgggtgacaactgct

SEQ ID NO: 9952 - DNA, 563 bp, Glycine max
  Clone ID: jC-gmle01810044d04a1
cgcaaagttgattctttctctctttatctttctttccccaatttgtgagtgttactgttgaatcgattggattggcattaggttgatctgaaatacgcaattgacatggcgagcgcgatggtagaggacgcgaacttcgaagatgaccaactagccaatatgaccaccgacgacatcgtcagagcttctcgtcttctcgacaacgagattcgcatcctcaaggaagagttgcagaggaccaatttggaattggaatcgtacaaggacaagatcaaggagaatcaggagaagattaagctcaataagcagttgccctacctcgttggcaacattgttgagatattggaaatgaacccggaagacgaagctgaagaagatggtgccaatattgatcttgactcacaaaggaagggaaagtgtgctgtgctaaagacttctactcgacagacaatctttctacctgctggtgggcttgatgaccctgacatgtaaaacccggtgatctggctggtgttaacaaggattagtacttaatcctggataccctgccctacgagtatgat

SEQ ID NO: 9953 - DNA, 495 bp, Glycine max
  unsure at all n locations
  Clone ID: jC-gmle01810044d04d1
accacgaaattaatgatcagattgcatgtttttaaaagatacgatgattccagtatgctgtgggttatcataccattagattgccaaaaaaaagaaaagaaatagataacaaatgtcaaacatcgacttaggttttccattggcttgatatgtctcaatagatcttcgtaaactgaaaaatagcttgttccaaaatccagcctatgcataataattgaggcttgctttcttctttgcttggacttgaataataccttcattaaagtcctcatggttcacctcagttgcatcacggcgtagagccaacatgccagcctcaacacaaacagccttcagttgagctccattgaaatcatctgtggaccgagcaagttcttcaaagttgacatctgggtgaacattcatcttcctcgaatggatctgtagaattcgagctcttgcttcttcacttgggtgtggaaactcaattntacgatctaatcgaccagaacgcat

SEQ ID NO: 9954 - DNA, 110 bp, Glycine max
  Clone ID: jC-gmle01810044d05a1
ttttaagagtaaaaaatgtcacgtgaaaattggtcaagactatatctagtccgaaaccatgtaatagtttgttgtcaatttaagataataaaataataaactactgctgc

SEQ ID NO: 9955 - DNA, 110 bp, Glycine max
  Clone ID: jC-gmle01810044d05d1
gcagcagtagtttattattttattatcttaaattgacaacaaactattacatggtttcggactagatatagtcttgaccaattttcacgtgacattttttactcttaaaa

SEQ ID NO: 9956 - DNA, 527 bp, Glycine max
  Clone ID: jC-gmle01810044d06a1
ctcatgtgagtttgcatcagttgatgtgagtgatgtgctgggaacaaacaggctcaatataacaaaaacagttcgtaagttttctattgattccaatttaagacccactggtgctgagtttcattcaggtacagttgcaaatgctgtaaagcatgatgatgaagtagatgaagaatctgttgaaggttctttttcactcacaacacataattttgataaatatgttcatcagtaagtggcaacttctaaaaatatttcattcaatttttctttgctttagctttgtgagaactcagaagttccttttaatatgcattgtttactcggtttttaataattcttttgcaggtttccaattactgctgtaaatttttatgcaccttggtgttcctggtgtcaacgtttgaaaccttcatgggagaagacggctaaaattatgaaagagagatatgacccagaaatggatgggcgtattattgtggccaaagtagattgcactcaagaggtgatttatgcacgaggaatca

SEQ ID NO: 9957 - DNA, 419 bp, Glycine max
  Clone ID: jC-gmle01810044d06d1
tttttttttttttttttttttttttttttttttttttttttttttttttttttttggtttttttttttttttttttttttttttttttttttttttttttttttttttttttttttttttaaaaaaaggggaaaatgggggggggttaaaaccccccaggaaaacccaaacccggggaaggaaaattttccggggggggccaaaaaaaaattttgggggggggggaacacaaaaaaaatccccaaaaaaacccccgggggaaaagggccctccccaaaaagggggcccccccctaaaaaaaaccccccccttttaaaaaaaatttgggccaacccaaaatttttaaaaaaccaaaaagggggggggaaaaaaaggcccaaaaatcccggccccgggaaaaaccccccacaagggggccc

SEQ ID NO: 9958 - DNA, 588 bp, Glycine max
  unsure at all n locations
  Clone ID: jC-gmle01810044d07a1
atttgactcacgagaggagagtaatgtgtgggaagtagaagtagaagtagaaggagagaagcaccactacgtcagcgattcctttgcctttttcttctttcttagactcgaagacaagtttgatcctattttgagaatcgcattcagatggaaagcgcatcagagcttgtggaattcccgttgttgctgacaccaatcgattccaactacagagcttgcaccattccttacagattcccctccgataaccctcgcaagcccactcccaccgaaatctcttggattgatctcttcctcaactcaatcccctctttcaagaagcgtgcagagagtgatacttctgttcctgatgctgcagctaaagctgaaaaatttgctcaaagatatgctgatatacttgaagatttgaagaaagatcctgaaagtcatggtgggcctcctgattgcattcttctctgcagacttcgtgaacttgtgcttagagaattgggattcagagatatcnttcaaaaagtcaaggatgacgaaaatgcanaagccatctcacttgttgagaatgttgtcatcctaatgatgccattgaagatg

SEQ ID NO: 9959 - DNA, 548 bp, Glycine max
  Clone ID: jC-gmle01810044d07d1
gtagaataacttcttattacaagtaagatgttttggttttatcacctttataatactaaaatgacattttaaagagtatccaaactacaggcatgtaatggtgtatcaagatgaaggattaacagtagaaaaattgcaggtctgcagcattagtaggaaaagaatataacttcatagctaacttgaaacttcattgtatttgaatacacagtcatacaaacgtccaccgagaaattgtgctacctcgggatgtttcaccattccaatcttaagagaatcacatttaaattgagcatagagatttgtttctattccacgacccatcccttctaagatgacaagatctgcatcgctggcaaggtaagcaagctcctgtgacactcttgtaagatcaatgacaggtaaatcattgccagagttcgcaattaagagatttgaagtactgacacccacaagctgtccatcttcatcctttaactttgatataatttcaactagctcagaacaagtcacatcattgatggatgggagtcattagcagccaatac

SEQ ID NO: 9960 - DNA, 52 bp, Glycine max
  Clone ID: jC-gmle01810044d08a1
tagatatgagactgaataaaattaacatatatcatggtaaataattagacga

SEQ ID NO: 9961 - DNA, 636 bp, Glycine max
  unsure at all n locations
  Clone ID: jC-gmle01810044d09a1
tggattcaaaatgggaccatcgaagagaacattatctttggtttaccaatgaacagacagaagtacaatgaagttgttagagtttgtagcttggagaaggacttggaaatgatggaacatggggaccagacagagattggagagcgcggaatcaacctaagtgggggtcagaagcagcgcatacagcttgccagggctgtgtatcaagactctgatatatatcttcttgatgatgtttttagtgctgttgatgcacacactggcactgaaatattcaaggaatgcgtgaggggggctctgaaaggcaagaccgttattcttgctacacaccaagtagacttcctacataatgtggatcttatagtggtgatgagggacggaatgatagtccaatcggggaagtacgatgatctacttgcgtctggaatggattttagtgctcttggtgcagcacatgacacctctatggaactagtggagcaaggtgcagtcatgactggngaaaatttgacatgccattgaatcaccaaagcagcttcgaatacagagagccaatgtgaaagcactctcttgccagtcaagtctggcaggaaggtctaactcatcaagaggagaagagagactgaaagtagctac

SEQ ID NO: 9962 - DNA, 372 bp, Glycine max
  Clone ID: jC-gmle01810044d09d1
aaaggcccaacgagaagcccaaagttttttacgggggaggcaaaattaaaaataaaggggggggggcaactgggtaattggcccccgggccctgggttttataaattgggccccaaaaaggggttttttttggtgggataccaaagctccttaagcccgggggtattaaaaaaacccttcccaggggggggttattttttacttggccaaacagcaattttgcggggggggaattgcccctttttaaaaaaaaaggccttttttctttttggggggcctggggagaacaatcaaaacttaaaggggttaccccaaggtgggttttttgttattggctgaaggggtgaaaaaaacacatgcctggaacttttt

SEQ ID NO: 9963 - DNA, 530 bp, Glycine max
  unsure at all n locations
  Clone ID: jC-gmle01810044d10a1
tggattcaaaatgggaccatcgaagagaacattatctttggtttaccaatgaacagacagaagtacaatgaagttgttagagtttgtagcttggagaaggacttggaaatgatggaacatggggaccagacagagattggagagcgcggaatcaacctaagtgggggtcagaagcagcgcatacagcttgccagggctgtgtatcaagactctgatatatatcttcttgatgatgtttttagtgctgttgatgcacacactggcactgaaatattcaaggaatgcgtgaggggggctctgaaaggcaagaccgttattcttgttacacaccaagtagacttcctacataatgtggatcttatagtggtgatgagggacggaatgatagtccaatcggggaagtacgatgatctacttgcgtctggaatggattttagtgctcttggtgcagcacatgacacctctatggaactagtggagcaaggtgcagtcatgactggngaaaatttgaacaagccattgaaatcacc

SEQ ID NO: 9964 - DNA, 392 bp, Glycine max
  Clone ID: jC-gmle01810044d10d1
aaaggcccaacgagaagcccaaagttttttccgggggaggcataattcaaaataaaggggggggggcaactgggtaattgccccccgggccctgggttatttaaattaggccccaaaaaagggttttttttggtgggataccaaagccccttaaccccgggggaattaaaaaaacccttcccaggggtgggttattttttacttggccaaacagcaattttgcggggggggaattgcccccttttaaaaaaaaaagccttttttcttttttgggggcctgggaagaacaatcaaaacttaaaagggttaccccaaggtggggtttttgttattggctgaaggggggaaaaaaacccatgcctggaacttttttataggcccctggaacgggg

SEQ ID NO: 9965 - DNA, 507 bp, Glycine max
  Clone ID: jC-gmle01810044d11a1
cggctcgagtgaccccctaagtgctctggatgcacatgtggctagacaggtttttgataaatgcatcaagggagatttgagagagaagacccgggttcttgtcacaaatcagctgcattttctttcacaggttgatagaatcattttggtccatgaaggtatggtgaaggaggagggaacttttgaggaactctctaaccacggactgctgtttcaaaagcttatggaaaatgcgggtaagatggaggagtatgaagaagaagaaaaggtagttactgaaaccaccgatcagaagccatcttcagaaccagtggccaatggatcagttaatgatcatgcaaagagtggaagtaaaccagaagaaggaaaatctgttcttattaaacaagaagaacgagaaacaggggttgtcagctggaatgttctactgaggtacaagactgcattatgaggcgcccgggtggattccgtaatctttgcatgctatgtctcaacggaaactttacg

SEQ ID NO: 9966 - DNA, 347 bp, Glycine max
  Clone ID: jC-gmle01810044d11d1
ccgcgctggccgccctttttttttttttttaaagaaatcctttaggcaatcaaaaatcacaacactacatgacaagaagttctgctctcctaaacaaatgaaaaaacgttctattcaccataaaaataacaagttcttggtggatttgtcttaacaagattatacctaaatcacttttagcatcctctaaagcatcatgccgctagcgcactctaggagttatgcgcccaacacttatctgtaataacttggggttgttaccttaggacgttatcaatcctgttatggcagggcgcgcttgatgcaccttgctagtttcccgtacatataaactgagacaagatgga

SEQ ID NO: 9967 - DNA, 369 bp, Glycine max
  Clone ID: jC-gmle01810044d12a1
caaagtttcttcctttctctgctctttgtcttctctgacacatttggggccttgttgagtgtgtttttgcaagagggtatggcgaaggacgttgaggttgctgagcgtggctccttctctgggaaggactaccaagaccctccaccagcaccactcattgatgctgaggagctcacaaagtggtccttttacagggctcttattgctgagttcattgccactttgctctttctctacattactgggctcacagttatagggtacaagcaccagacggatcatgctgatgcgtgtggtggggttggcattcttggcattgcatgggcctttggtggcatgatcttcatccctggctactgcactggtggg

SEQ ID NO: 9968 - DNA, 380 bp, Glycine max
  Clone ID: jC-gmle01810044d12d1
aaaattaaaatttaaaatatttcccatgatttgtttgagtacagagatgacagaagagaataacttaaaaaagaaaaatgacacactaaagggaagaacaccacagaggaaagtgcaaacggctccccctgtcataaaagagactttaatctacacttatccacaatcttgaagacataatcgagagggtcaaagaaacgttgcaaatacaaagccaaaagcatttcccattattaaacttgccatatcaacctccatctctccaattatcttctttccactagagccatcatcatgaagagaaagacatctcaattatgggggttactcctgaatgatccaagggccttggctgcacctgctctcaagatgaactggtg

SEQ ID NO: 9969 - DNA, 507 bp, Glycine max
  Clone ID: jC-gmle01810044e01a1
cagaaagcaagatgtcagcattgaatatgatgcatgtacaattccaaatgattgtggttcattggttgttgccaaagttggaaatcacaaacaaattgttggtttccatgttgctggaagcaaaggaagactgggatatgcttcattgataccatacgttgagccagttgtgcaagctcaaagtgctgaagtttactttgacttcttccctgtggaggttgatagtcaagagggagttgctcacattggtgaattgaaatctggtgtctatgttccactgcctacaaaaactaatttggtggaaactcccaaggaatggcaactggatctaccttgtgacaaaattcctagtgtcttgactacaactgatgagagattggtaggcacagaacatgagggatatgatccttttcttggtggaattcaaaaatatgccactcccatgatgcccctagatgaagaaattctttctaaagttgcacaagatatggttgaggaatggtttga

SEQ ID NO: 9970 - DNA, 245 bp, Glycine max
  Clone ID: jC-gmle01810044e01d1
aaacacactcattggacatagtaatgcgctttatttaagggaataaaatattacatactagttcacaaatgcaaaaggacactcattaaccagatatttgagactcttacagttctcaagaagtcgcgtcagcatagggttagtggcgttagaactcagaatttcattcttaacgccaaaaagaacagccagtaaagctactggaaaaggatccactctagtaagaaaaacaattttcttacctt

SEQ ID NO: 9971 - DNA, 526 bp, Glycine max
  Clone ID: jC-gmle01810044e02a1
gccatcagcattctcaacacctcctccctcactcactcatcaatggcatcaacaatatcagcaatggccatgatcaacgccaaatgcgtcaacccaaagttccccaaccccaccaagctcgtaccatcaaaaccttcccttcaggtcaaccttccaaagggcctaatagcctcacccgaaaacaccaaactttccactgcgacagcaatcgcaggagcaatattcacaaccctcggaacctgcgacgccgctttcgccgttcaacaaatagccgacatagcagaaggcgacaaccgcggtctggcactgttgctgcccataattcctgcaatagggtgggttctgttcaacattctgcagccggcgctgaaccaactgaaccgcatgcgcagcaccaaaggcgtgatcattgggttggggcttggcggcttggctggcttggtggctgcgccgcatgcatcggcggcggcggcttctgaagtggcggcgatggctgaagctgcctcgaacgacaacaggggacagc

SEQ ID NO: 9972 - DNA, 507 bp, Glycine max
  Clone ID: jC-gmle01810044e02d1
aataaaagaaaagcggatatagcattagatacaagttgcaggaagcaagttacatgaaaactattagtatgatcatatgatgataattgatatcccacagcatttaattaagccccttccctatttaaatttcacaaacattaaatcactgggatctcatcctgttgagctggttaagagcaggctgcaagatgttgtaaagaacccaagcaatagccggcgtaaccacaaacagcagaagctgtcccctgttgtcgttcgaggcagcttcagccatcgccgccacttcagaagccgccgccgccgatgcatgcggcgcagccaccaagccagccaagccgccaagccccaacccaatgatcacgcctttggtgctgcgcatgcggttcagttggttcagcgccggctgcagaatgttgaacagaacccaccctattgcaggaattatgggcagcaacagtgccagaccgcggttggtcgcttctgtatgtcggctattgttgaacg

SEQ ID NO: 9973 - DNA, 575 bp, Glycine max
  Clone ID: jC-gmle01810044e03a1
gaatttttgtaaagtttcctttttttattctgtcttttcattctttttttcaaagtgaatttctaggattttttgttttcaattgagggcacaaaaaataaactactgactggaatttccaattgtcttgccgggtccctgagatttgaagtgtgtttttttccttttggtgggtggatccgaagttcatgaattctctcttttccccaaccaatttgttttgttgctgaataaattagttctgtctggcaaaggttgttgagtctctctagtgctggaaaattttgtggtgattcatgattttttttttaactgaggaccttcaattttgtttttgtgcattgatggttgtctcacaatcacaaatctagtctccaaaattggtgatttcacaggggtgtgctgttaactttcctgtttgtttcatcttcaagctcaattctggttctgggtttatcttttactggaagacagactttgaggtagattccttataagtgggcataagttcaagtgtagagaatgagtcagcctaagattaagcgccgagttggtaagtatgaagtggggaggac

SEQ ID NO: 9974 - DNA, 272 bp, Glycine max
  Clone ID: jC-gmle01810044e03d1
aggaagatagatttataccacttttcttacaattttttggttcatgaacataactggaactgttgatgagtaaaattcttacataaactctggatgctttcaaaaaatagtcccatgggacccaatatataagtaatatgtgattaaatggccaaacaaaccttcacgaaggaaccttaagaggaaataaccaatgaagaaattggaaaattgtagaaccttagacattaagaaaattacccaagagaatgataataacaatatcactttgg

SEQ ID NO: 9975 - DNA, 152 bp, Glycine max
  Clone ID: jC-gmle01810044e04a1
tttctgtacagtagagaagtatatgtatctgactatatcggtgcttttaaaatgtacatttcttttctagtcttttttcctttatttgatgccttagaactgtgagatatacaatgatgatcctttccgttggtattaactttttcttttgg

SEQ ID NO: 9976 - DNA, 152 bp, Glycine max
  Clone ID: jC-gmle01810044e04d1
ccaaaagaaaaagttaataccaacggaaaggatcatcattgtatatctcacagttctaaggcatcaaataaaggaaaaaagactagaaaagaaatgtacattttaaaagcaccgatatagtcagatacatatacttctctactgtacagaaa

SEQ ID NO: 9977 - DNA, 529 bp, Glycine max
  unsure at all n locations
  Clone ID: jC-gmle01810044e05a1
gagttctgagtttcataggagaaaaaaaatgacagaagaacaaaccaaaacggttgagtcagaatcagtaacaccaccacctgctgctgctgctccttcacaggttcctcctgctgctgaggctgaacatgttcctgaggctccaaaggatgtgactgaggagaaatctgtaattccagtgccttcttctgatgacaagcctgatgaatccaaggctcttgtcttggttgagagtaagatattataatgttgattctggttggttatgttgtcatgttcccaaagctgggattatatatatatggttggtgaggataaagaaaagaaaaagaaattgaaatctatctgcaattttttgttggagtctctctgcatatgttctatactttatttatcttctttntttaaaatccatttggttaattaactaattctttgaagaacttaatttgtgctttctttattgcaaagggtgttttacttttactatcttataactgtttgagagaaaaagaaagagattttttta

SEQ ID NO: 9978 - DNA, 352 bp, Glycine max
  Clone ID: jC-gmle01810044e05d1
aaaaaaaaaccccaggggggaaaaaaaaaattttttacccaaaaagggggggggtaaaaccccccaaaagggggggtttccccccaaaaaaagggacaggaacaaaattcccaaaattaaaacaaaaaacccccttgtttggggggggggtaaaaccccaaggtccccaaaaaaaaaaaacccttttttttgggcccccaaaagggttaaaattaaagggttttaaaaaccccagggggttttttgggggctggcccagggggtttatattggggaggggggcccctggcctaaaaaaaaactcccccttttttgggccaaaaagaggggtttttttataaactccctgggg

SEQ ID NO: 9979 - DNA, 393 bp, Glycine max
  Clone ID: jC-gmle01810044e06d1
agccgaatctagcactgccgattaattaccggggagccgcgctgactactagtcggccgccgtccttttttatttcttttatattttttttttatattaattaataattttaaattgggggggattattacattcaataccgacaaatcactacatcacgaccaactaccacttgactaaatatacattttaaacaaaaactaatcttctttaaacgcattttttgcacgcgagggtttaaatcaaccacagggaagaatataaaaaataatagaattgaagtctcacaatctggggaaacaacaaacaggggggccaaaaatctttggggaaatacaaaacattctggtttatttatttgcctttatcccccccaaggggggacccttttaa

SEQ ID NO: 9980 - DNA, 570 bp, Glycine max
  Clone ID: jC-gmle01810044e07a1
cttgttcttcttccttctcttcattctgtctctacccttcaacgcaactttctttcttttctattgagcttccaatattctcacgccttgcaatcgtagttgcaccctccaaactccttcccttttctttcatctgttcaggtacttgcagtaagagaacatattgtaaaactaaaagggaaaaatggccttagatcactttgaggagactgtgcaccaaaaaggaaattggaaatcttccagtgaaatcattgcagattctgatagaaatgcctctggtgactttgactgcaacatctgcctggagtgtgtgcaagatccagtggtgacactttgtggtcatctttattgctggccctgcatatacaaatggcttcattttcaaagcacctctttggatgatgaagaacaacagaggccacaatgtcctgtatgcaaatcagaagtttctcaatcctcccttgctccattatacggccgtggccaaaccacattaccttctaaagggaagccacgtcaagtaggcactgtcataccacatagacctcatggtccaagaacacttaacac

SEQ ID NO: 9981 - DNA, 499 bp, Glycine max
  unsure at all n locations
  Clone ID: jC-gmle01810044e07d1
gttctaaaaatggtatgagaatatcattattcacttcatatagctcgtagagagattggtaatttacacataactcagcatcaatttgcagcttctctaacatagaatacatctggatcaatgagtgaatgtattctatgtaaggatgcactataactaatgatgaaaatgaagtagcaatcagaataagagcagacacaaaactaggcagcaaaggaggaaacaacttattctgctgagtgatttatcaacttgcattaaatgtcttctcatccttgggttactggtccccgaaagattgtacgaattggcgtatgtatgaatgtttgacacgtggttaccaaagacccttgcatatatcatctcaccaaagattccaaatgtgttgtctattgaaccagttgttctaatcataggtgaggtgtaaccgcttggaatcgagttgaagtgttgttgaggatgataaggattactatagggatggtaactntgagaaata

SEQ ID NO: 9982 - DNA, 526 bp, Glycine max
  Clone ID: jC-gmle01810044e08a1
cattacattagattggtggtaatggcagcgtcactacaagcagcagctactttcatgcaacccaccaagttgagcaggagcaacactttgcagcaaaagtctactcagtccatttccaaggcttttggtttggaacctgttggagctaaaaaggtcacatgctcccttcaggctgatcttaaggacttggctcacaagtgtgttgatgctaccaaaattgcaggattcgcccttgccacctctgccctcgttgtctctggggcaagtgctgaaggtgttccaaagaggctaaccttcgacgaaatccagagcaagacctacttggaagtgaaggggacaggaacagcaaaccagtgcccaacaattgatggtggattggactcatttgccttcaagccggggaaatacaatgccaagaagttgtgccttgagccaacttcattcacagtgaaagccgatggtgtggccaagaatgctcccctttgagttccaaacacatagctcatgacacgtttgacctacactc

SEQ ID NO: 9983 - DNA, 276 bp, Glycine max
  Clone ID: jC-gmle01810044e08d1
ttgtttttttttttttttttgagctcgaaaactcacacacaccatcaatttaagggttgaattttaaacattgtaattggaggcccatataatatacaaccatgacagtactctcagaagagctaggatagatgggtcaagggataatgcattaacaccatgcaagatgatacttacacactgtgtgccaagaaacaaaggagaagagaaaacactgtgttacttaagatgagaataccagaggccctgtattttgaaaacttttgaagccttagc

SEQ ID NO: 9984 - DNA, 490 bp, Glycine max
  Clone ID: jC-gmle01810044e09a1
cttgatattataggatatccgaagaggctgtggaagtaaagcatgaattgattgagctgcaaaagcatatctcagcacaaggtattcttgttcaggatttaatgactggtgtctgccgtgaattggaagagtggaatcaatcaagcaacgatgttgctgaaattcagcaagaacctgaactacctgaactccttgagcctttaccaaatgagagaaatgaccagaaaatattattcttggaaaccatcgatgtacttttggctgagcataagtttgaagaagcattagaagcattagatgctgaagaaataaattctgcagagttgaagggctcagggaataactcttcagatgatgtttccttgtacatgtcttccttgctggaaaggaaggcaatgcttgaagaccagctggctggaattgctgaacaaccttctgttagtttccctgagctgaaaacagccttaaattgtttaataaaacttggaaa

SEQ ID NO: 9985 - DNA, 509 bp, Glycine max
  Clone ID: jC-gmle01810044e09d1
gcaaaaagaaagagccatcatcaaaatatgtcgaccaaaaatatatcaatcaatacaaaaaaaaaaaacgggaatagagaaacccaagccaccttaccctcctttcaaaatatacacatgagatatcaatctacacttactcttcgaccctaatttaaatccaagggatcttcctatcccctagcacggtctatgaacatgtcctacaatatgccatgacattgcaaatttgataactgaggacacttacatttttctcaaaatctcaaactacaactactctatattttaaataatccagagagaaaaaaaaaaatcaattatctggatcagacaagttagaggggctgtcaagttcggccatgctagcagatgcaaaagactcggttgattccatagaagacagggatgaaacagtatcagagtctgagacaacttcgtcatgatgaacaatgatgtgatcttcatcggtgtcggatgcctcagaccctgatgccccaagcaagagc

SEQ ID NO: 9986 - DNA, 570 bp, Glycine max
  Clone ID: jC-gmle01810044e10a1
acatgatgaaaaattgctaacatttgcaaaactagattttaatatgttgcaggagttacatcagaaagaagttaacaatgtgaccaggtggtggattaagaatttaaatgtctcaacgaaattgccatttgtacgagataggattgcagaatgttacttttggattttgggaatatactttgagccacaatattctcttgctagaaggataacaacgaaagtaattgctctatgttctgtcattgatgacatgtatgatgcctatggaaccattgacgaacttgagcttttcaccaatgcaattgagaggtgggatatttgatgcttggatgatctcccagaatacatgaaagtatgttatatagaaattttgaatgtttatgaagaaatcgacgaagagatgagaaaacaaggaaaagtatattgcatcaagtatgctaagaaagagatgaaaagattaatcaaggctcacatggctgatgcaagatggcttcatttcaatcatacaccgtcaatagaggagtacatgctagttagacatgtatcaagtggctacttctatggtgatca

SEQ ID NO: 9987 - DNA, 529 bp, Glycine max
  Clone ID: jC-gmle01810044e10d1
ggttgtatattcgtttccctattttaatttattaattatataagaggcctaattttagaaaacacattaataaaattaaggtatacacaccaaattaagctaaagagaaattaccatgttatattacataaattaaagaaacagatcaataataaaataactaagcttctagcttatacgggcagacatcttattaactaataaagttttgatgtaatccttcattaaccctcctgcatttgtataattatcttcatctttgtaaagcacgtcaatcatgcgcacaaggttgacaacacgcaaaagaaaattcattggcacttcagtaggattaaggcatgcctcattgatgtccttccaagcactcttaaccatctcaagtagtttattaatggcatcttgccttgaggtgttatgttgcttcatatagctttcaatgcttgatgcaacgtgtcttctttcctgctcaaactcatttccaacaatgtcatccataagcctacaaataattgaagcagccccaataatt

SEQ ID NO: 9988 - DNA, 532 bp, Glycine max
  Clone ID: jC-gmle01810044e11a1
gtcatcttgtcattcaccgttaaagtcgtactgattcctcttcatctttcgttaaggcgagtacttttcgttcttgatctgttggttacgatgtcgtattcaaggagatctaggtattctccttctccttctccttctccatacaagcgatacggtaggtctgtgtccaggtctctctcaatatcaagatccagaagccgttcaaggagtttatcaagagatgcagaaaatccaggaaacaatttgtatgtgacaggattgtctcctaggattaccaagagagaactggagaaacattttgctgctgaaggaaaagtgatagatgtccatctggtagttgatccttggacaagggaatcccgtgggtttggctttgtgacaatggagactcttgaggaggctgaacgatgtgtaaagtatctgaatcgctctgtacttgaagggcgtgtcatcacggtggagaaggctaaaagacgacgtggtcgaaccccaacgccagggaggtatctaggactgagaactattcgtgctc

SEQ ID NO: 9989 - DNA, 389 bp, Glycine max
  Clone ID: jC-gmle01810044e11d1
aagggaaagtacgaaattagataatctatactgagtaacataatttcaatcccatactacatgaaataagatcagggggtttttagacaagtcctgaacggaaccaaacgaaaactccatctagaactgcatacatataccacactaatatattatccactataagcctaagatgttaagccatataggaccaacaaatttcaagttgaaggagaggtagaccttggagtatttgacctcgatactgatcttgaacttgcattcacactcgagcttcttgagtagcgtttctcacatttgccactcctcttagagcttcttgaatggctcctccttgacctgggggacacatttcgtgagttgcttctctttgaaacaggtgtagcact

SEQ ID NO: 9990 - DNA, 612 bp, Glycine max
  Clone ID: jC-gmle01810044e12a1
gagagagagagcgtttttgtgtttttctctgtcacaacttattattattattgttgtttgggacacaactcagagagttcttgcgaatttgcaatctctctctctctctaacgttggtctttcctttcccctttctgccgacgattttggttgtctcctttggatcagttagggccctttgtgctggtttgtagcttttgctgaataccagcaataatgaagaaggttattggtcaaactgttagggaccttaaaagagaagtaaataagaaagtgctgaaagttcctgggattgaacagaaggttcttgatgctaccagcaatgaaccatggggtcctcatggatcacttcttgccgatattgctcaggcaaccagaaaccctcatgaataccagatgatcatgtcagtaatctggaagcgaattaatgacactggcaagaattggcgacatgtctacaaggctttgacagtactagagtacttggtggctcatgggtcagagagagtgatagatgagatcagagaacatgcttatcaaatatcaacattggccgattttaatatattgattccagcggaagagatcacggaacaatgtcaagaagaaatc

SEQ ID NO: 9991 - DNA, 342 bp, Glycine max
  Clone ID: jC-gmle01810044e12d1
aaaagggacaatggaaaaattattttaatatcaaaccacctgttggtgttcaaaaaatgaggaacaagcacagaaagcaataacccaagcaaggttattatatccagtcactggtacacaacattgatgctcaaagcacctacataaagggggacccaaaaagaatggtaacaacatatttataacaaatacacgtacgtaacactgggtcactttacaaaaaattgcagctttaatgatccaccgctataaacccaaaatgtacactactactaggcgcactgggattggcatttctctttcacaacttgtagcaaaaaacaatcagtcatacttcacctt

SEQ ID NO: 9992 - DNA, 587 bp, Glycine max
  Clone ID: jC-gmle01810044f01a1
gcagtgcgcatgatccttgggctagaatcctttggccctacaccaaagaagccattaaatgaatgcttggatattgaaattgaggacgatgaaccaaaacgaaaaccatctttggaagagattgatgccttggaggaggtccggcttgcaatagagtacattgtgattcctggtggagaagctgtggaacttcttcctagacgttctgaaattattgcccggcagcttgaactcgttcaaagttatcagttggctgctgaaaagtcaggtaccgatcagaatcccaggttgcaaattcttccattgaggctaaatacaaaaaaagcctctaaatctactgttgcccgcaagaaaacaagtcctacctcaatgtctactggtgacagcggcaatggcaccagtgttaccaggcttcctattttgcctgaataattcaattctttccccaattctaacgattcacttcactggtttgtacatgtatgatgtatgtaacatgtacagtcatacatgtggtgtaaataatttattcatagcctaagagcttgtatctcaaatggggtgtgacatttatgacggaagttgat

SEQ ID NO: 9993 - DNA, 528 bp, Glycine max
  unsure at all n locations
  Clone ID: jC-gmle01810044f01d1
ggaggagtaaaataatgatatattacattttatgtagattgattttttcaatatatataccttggtacaagaaggggtagcttggcggaggatcaaacttccgtcataaatgtcacaccccaattgagatacaagctcttaggctatgaataaattatttacaccacttgtatgactgtacatgttacatacatcatacatgtacaaaccagtgaagtgaatcgttagaattggggaaagaattgaattattcaggcaaaataggaagcctggtaacactggtgccattgccgctgtcaccagtagacattgaggtaggacttgttttcttgcgggcaacagtagatttagaggctttttttgtatttagcctcaatggaagaatttgcaacctgngattctgatcggtacctgacttttcagcagccaactgataactttgaacgagttcaagctgccgggcaataatttcagaacgtctaggaagaagttccacagcttctccaccaggaatcacaatgtactcta

SEQ ID NO: 9994 - DNA, 603 bp, Glycine max
  unsure at all n locations
  Clone ID: jC-gmle01810044f02a1
gcgacaaggcttcaacgttggggttataataaccttaaccttggtcgctgtctttctctctctgtggatggaacaaactagaagtggcaagagaagcttcaaatcacattcatctaccctaccttaaccataaccaaatcccaaatattaaccccccctttttttaatgttgatgtaaggaactaatttgaagggtggtggtgattaggttattagcccttagggtttataaatgttgagtacctcttcttattctgtcttcacccgttcctttctccccaatccaattaagggtatcccccgaccagctacacttcgaccttttcctgggatcttggaatctcatgccaagtctccaaagaacagattgagtattttgtgctttaggcacgaccatcattctccagaaacaccccaacctgaagttatcgagcactatcttcatgaggaattggtgcaatctgaattcaatgactccagtgtcaccaaaagagactggaaatcaaccattcagaatgctgcagatgaagtctttaaagtaatnggttatcgatgggttgtgccatggaatgcaatgactatattacaagttatgcttctttg

SEQ ID NO: 9995 - DNA, 531 bp, Glycine max
  unsure at all n locations
  Clone ID: jC-gmle01810044f02d1
aatacaaaagtccttcagcatcatgttacccaaaatgaatgtttacagtaaaaaggaaggggggagtaactcaaattatactacgtattcatagcatatatggacaaatgaggggcactgtttttcataatgtacaattataagattgcatcagctcatgttactccttccttgcaaatacacttgatcagcgtaccttaacgatgtacgtactgttctatatgcatatgcattttacttctgaaaatgcttatccaaagcataaacccgcatgctagtgcctgcaattctacctacacattggactctgcttacaagagaatcacaacgtttgagaagctatttcatcaaatctaagaagacgaagccattccaaagactatgcaacagcattgatggcagtaaattccttgaccgtgtatatatcacacccatcaccatcccaagaaatataaggggaagcatcctctgtatgttaaaatgtgcaagagcaaggcgattgncttaccagttttgacaccacactgcatg

SEQ ID NO: 9996 - DNA, 574 bp, Glycine max
  Clone ID: jC-gmle01810044f03a1
agagccctttcttctcttcccccattttttcctctttcttcctcgcctagctagctccagaaaattaggatctgcttcagatctagtgtttccctgtcccaaatcacgagtccattgagtttgattttgtggatgaaaagcatagatagggcttttgcaaaactctccaatgtttcttgaaattatatgaccatgcgtcgaattcgtatgctgcactccttctccgtcgtgttcctctactggttctacgttttctcatgaactccctcttaaatccgtgattaattagatctatctccttagttaatccttgtcttttccaataattaattagatctgcgtctcctttttggattagtttcttttttggttctgttatcaaatcaaataaaaaatctccttctcggaaatggcatcaccgatccaacaacaacaacgctcgactactacaagttctggatctgaaggaggagatccgcatatcatcgatgagaggaagcggaagaggatgctgtcgaaccgcgagtctgcgcggcgatcgcggatgaggaagcagaaacagctggaggatctg

SEQ ID NO: 9997 - DNA, 519 bp, Glycine max
  Clone ID: jC-gmle01810044f03d1
gaagatgagattacttttaattaaaataaaacagccaccataaaaaatgattacaagtcgcgcaaagggacacacactgccactaccagccatcaacaccctgtacctcacattcatctctctcaggaacccaatgcattgatgaccacacgatacttttgatgcagacagataacactaatagtaatataatacacataacagagaaagttactaccgcactgaataaccctaattaaagtaaaatcctcaggaatgatcaacgcagaaacatgtttgcggtggccataatcggttgtatcggatgaggaatctgccagggcttgaggagaggatctggaatctcgggaatctcaacggataacccttcgacctcttcagcgatctcaaggatggagttcaagaagcgcaatcgatcggccagttccattgtctgtgctctcagaatgctgttcgccgcttcggtctcgacgcacgcttcttccttggcctctatgttctccgcaagcttcttgttcg

SEQ ID NO: 9998 - DNA, 617 bp, Glycine max
  unsure at all n locations
  Clone ID: jC-gmle01810044f04a1
tgcaccaccaataagctccataccttctaattctctactctctctcacttctctctatcacatttttcttacaagatggcagcatcatcagcatgccttgtagggaatggtttatctacacggggtaatagaataactcttaagaaggacttcaatggaagaagatatctctactcatcttggagattttcattattgaacaacaataaggcatcaaaagcattttccataaaggcatctttggagcaaaggcaagaagaagggagaagggggtttctgaaactgctgcttggaaatctgggagttggtttgcctgcactattgggaagtggcaaagcttatgctgatgaacaaggggtttcatcctccagaatgtcttactccaggtttctggagtatttggacaaggacagagttaaaaaagtggatctttatgacaatggaaacactgctgatgctgaagctgtttcgcccgagttggggaaccggtcacagtatgttagagttcaactccctggacttaaccaagagctccttcagaaattcanggaaaagaatatttgacttgcagctcataggtcccaagaagagcaggttctctttagctaacctgatgg

SEQ ID NO: 9999 - DNA, 540 bp, Glycine max
  Clone ID: jC-gmle01810044f04d1
gacgtaaagaaactacaaatttttacactaaaaacagtttctcttttatacatactctctgttgtcatttgtcaacactacaaaaaatgaaaaagtaaggtagaatctttaatcattcacaaatatggagcaggctgcagagggcattctgtattctaagataatacatatgaaagatgttacatatataggctattcaaacagtggctggtactggagttgaaggagcaacacggttttcagctggaatttcaacaaactcagacaatatagcacggaattcatctccgctcagagtctccttctccagaaggacttccacaatcttgtcaatggcctcacggttgttccttatatgctccagtgcaatttcatatgcttcatctgagatcctcttgatggcagcatcaatgtcttctgcaagcctctctgacattgagttccttgccatcattctcatgatgacatccccaccttgtgctgatggttccataagtgaccaaggaccaatatcagacattccaaatgtggtcaccatct

SEQ ID NO: 10000 - DNA, 480 bp, Glycine max
  Clone ID: jC-gmle01810044f05a1
tctataatcactcactttccacactctcttaatcacatcccttaattatcgttctttctctcactttctctctgtgtgcgccattccgttgttcgcagcttctccttcgccggaacacttctccgaccgatccaactatcaattttccggcattgactccgatgattcctcactcggatccatagctctcacagtctccgggccactttttttttcttcttgttccttgctttccagatccgaatcccgacgcgaaaatcgggagagagaacgaacgaaccgttgatactacatggattagcatcacctcgatgaaaacctcttccacacgcgcctcacgaaacgattcgttttcctctcccacaaaatcatcatcgtccaatcctagggttagggtttttttctcaccgcgacaggatgttcaagaaaatcatgaaaggcgggcacaagaagccctccaagtccgacgccagtgatccg

SEQ ID NO: 10001 - DNA, 169 bp, Glycine max
  unsure at all n locations
  Clone ID: jC-gmle01810044f05d1
tgccatatcggaanncntcccgaattgtgtgtaccgcccccctcgaggtcgacggaatcggcggccgcccttttttttttttttttttatttttttatttaaaattgtgatttttttctttttgggagggaacttttttctttatattatcttcaaaagggcaaaaatt

SEQ ID NO: 10002 - DNA, 532 bp, Glycine max
  unsure at all n locations
  Clone ID: jC-gmle01810044f06a1
tgcaattgaagttgaagtcttgcccttctctcttcaactccaaacacaagacatcatcatccatggctgcctccgtctccactgtcggagctgtcaacagagctcttttgaacctgaatgggtctggacctggggtttcagctcccagttcatccttctttgggagcagcttgaagaaggttattggctcaagggtccccaacacaaagatttcctctggaagcttcaagattgttgctgtagaagagaagaaagagattgaagagacccagcagaccgacaaggacagatggaagggtcttgcctatgatatctcagacgaccaacaggacatcacaagaggaaagggtttggttgactcccttttccaagctccacaggatgctggaactcactatgctgtcatgagctcctacgagtaccttagcactggacttcgccagtacttggacaacaacatggatggattttacattgctccagcttttatggacatactngctgctcacattaccaagaacttcatgaccct

SEQ ID NO: 10003 - DNA, 409 bp, Glycine max
  Clone ID: jC-gmle01810044f06d1
aggacaaaaggaaaaggccccaaattcaatttaaggggacactttaactcaaaattatagaggaagacagtccaatttgaaaaatatagtaaaatcatttcaaacttggcattttctttttgcacctaagacattgagaattctaagaatgttacacgcaagtcccatcacaacttttagcacttggatcagcacaaccttcaggaacagaaatatttacttgccaagtttgctttgcctccaattcaagattggaagaaagttcccctgttaatagcatcctcggtagcatttacaagtgcaggctcgttcaagtacttgtcacccaattggactctttggacattctattgttcttggacaagcatgttaccattctgtaagagcttttccagagtcatcttgggct

SEQ ID NO: 10004 - DNA, 555 bp, Glycine max
  Clone ID: jC-gmle01810044f07a1
gtgtttgtgaaactccctctcacacacaagtcacaaaaacaacttgtgttgttccaatggcatcagcaacaccccttttgaaagatgagctcgacatcgtgatccccacgatcaggaatctggatttcttggagatgtggaggccattctttgagccttaccatctcataattgtgcaagatggtgacccttcaaagaccatcaaggtccctgaaggctttgactatgagctctacaaccgcaatgacatcaacaggatccttggccccaaggccaattgcatctccttcaaggactctgcatgccgttgctttggctacatggtctccaaaaagaagtacatctacaccattgatgatgactgctttgttgccactgatccatctggacacaagattaatgcacttaaacagcatatagaaaacctcctctgtccatccacacccttttttttcaacaccctctatgaacctttccgagaaggtgcagattttgttcgtggctaccctatcagtctacgggaaggtgtaccaactggcagttctcatgggcttt

SEQ ID NO: 10005 - DNA, 523 bp, Glycine max
  Clone ID: jC-gmle01810044f07d1
attattacacatgtaacgaaatgctgccatgtgaactctacccattaaacagtaataaaaagaaagtaacgccctacgggtgtacttgttctttctaagctcaaatcattaagttactaaatagaattacagctaacaatgctgcaaaattcaagccaagaataaaagttaagttgaaaataaatactaaggggaaaaaatacagtatataaatagttccacttcaagttctgtggctgttgttatgcacttaaccaaaactgattcatgctttgccattggccactgatgctccagctgggttaagctcatcccaagcttcaatccaagtgaccatggcatctgccaacttgtcaaagtaaggatctaccttggtaagcttttccttgacttgcttggcaagctcaatgtagcacttctgaacaatggtagcttcttttggaagaacaacactctggaagaatgggataatgtcttcttgccagaatatgcctttgtactctttcttcaagttcacaaatgg

SEQ ID NO: 10006 - DNA, 480 bp, Glycine max
  Clone ID: jC-gmle01810044f08a1
gtgtttgtgaaactccctctcacacacaagtcacaaaaacaacttgtgttgttccaatggcatcagcaacaccccttttgaaagatgagctcgacatcgtgatccccacgatcaggaatctggatttcttggagatgtggaggccattctttgagccttaccatctcataattgtgcaagatggtgacccttcaaagaccatcaaggtccctgaaggctttgactatgagctctacaaccgcaatgacatcaacaggatccttggccccaaggccaattgcatctccttcaaggactctgcatgccgttgctttggctacatggtctccaaaaagaagtacatctacaccattgatgatgactgctttgttgccactgatccatctggacacaagattaatgcacttaaacagcatatagaataccttctctgtccatccacaccctattttttcaacaccctctatgaacctttccgag

SEQ ID NO: 10007 - DNA, 519 bp, Glycine max
  Clone ID: jC-gmle01810044f08d1
cacatgtaacgaaatgctgccatgtgaactctacccattaaacagtaataaaaagaaagtaacgccctacgggtgtacttgttctttctaagctcaaatcattaagttactaaatagaattacagctaacaatgctgcaaaattcaagccaagaataaaagttaagttgaaaataaatactaaggggaaaaaatacagtatataaatagttccacttcaagttctgtggctgttgttatgcagttaaccaaaactgattcatgctttgccattggccactgatgctccagctgggttaagctcatcccaagcttcaatccaagtgaccatggcatctgccaacttgtcaaagtaaggatctaccttggtaagcttttccttgacttgcttggcaagctcaatgtagcacttctgaacagtggtagcttcttttggaagaacaacgctctggaagaatgggataatgtcttcttgccagaatatgcctttgtactctttcttcaagttcacaaatgggtt

SEQ ID NO: 10008 - DNA, 524 bp, Glycine max
  unsure at all n locations
  Clone ID: jC-gmle01810044f09a1
cttgcaattgaagttgaagtcttgcccttctctcttcaactccaaacacaagacatcatcatccatggctgcctccgtctccactgtcggagctgtcaacagagctcttttgaacctgaatgggtctggacctggggtttcagctcccagttcatccttctttgggagcagcttgaagaaggttattggctcaagggtccccaacacaaagatttcctctggaagcttcaagattgttgctgtagaagagaagaaagagattgaagagacccagcagaccgacaaggacagatggaagggtcttgcctatgatatctcagacgaccaacaggacatcacaagaggaaagggtttggttgactcccttttccaagctccacaggatgctggaactcactatgctgtcatgagctcctacgagtaccttagcactggacttcgccagtactaggacaancacatggatggactttacattgctccaagctttatggacaaacttgactgtcacattaccaagaact

SEQ ID NO: 10009 - DNA, 508 bp, Glycine max
  unsure at all n locations
  Clone ID: jC-gmle01810044f09d1
aaaaggaaaaggcaccaaattcaatttaaggggacactttaactcaaaattatagaggaagacagtccaatatgaaaaatatagtaaaatcatctcaaacttggcatcttctctttgcacctaagacattgagaattctaagaatgttacacgcaagtcccatcacaacttctagcacttggatcagcacaaccttcaggaacagaaatatttacttgccaagtttgctttgcctccaattcaagattggaagaaagttcccctgttaatagcatcctcgttagcatttccaagtgcagcctcgttcaagtacttgtcagccaattggactctcttgacattctcttgttcttggacaagcatgttaccatacgtcaagagcttctccagagtcatcttgggctgctcaaaggttggaggtccatcttttgagttcacaagcttcttcccaatgccgtcaacaccaacaccagaaatccacttcctcacttcgncatcatatactctg

SEQ ID NO: 10010 - DNA, 593 bp, Glycine max
  unsure at all n locations
  Clone ID: jC-gmle01810044f10a1
atagaatcgtcgattttctctttctctgactctagggtttcattattttcttctgtagatccatctatctagcttcggagctgcaaatggacgtcgcagtcactgccttccggtcaccgctgatcatcctccgaagaccggtcaacgagtctgcctcagctcggttcggttccacttttgggttttccagaaagcaacggttcagttcagtatgtatccccaaacacaagcacaagcaaggtcgtagaagagggtttgtagttagagcttctgcatcctcatctccggagtcggatgatgccaagattgctcctcttcagtttgaatcctcaattgggcagttcctttctcagattttgaaagatcatccgcatcttgtgcctgctgccgttgaccagcagctccagcaactccaaactgaccgcgatgctcatcaacaaaacgaacaaccttctgcttcaaccactgatttagttttgtacaggagaattgctgangtgaaggctaatgaaaggaggaaagctctggaagagatcttgtatgcattggtagtgcagaagttcatggatgctaatnnattcttgataccctct

SEQ ID NO: 10011 - DNA, 559 bp, Glycine max
  unsure at all n locations
  Clone ID: jC-gmle01810044f10d1
ctaactagaaaataagcttccctttattagggaaatccagagccactaccactacagtatatacatattaattagggaaacaatatttggacttttaacaccgaagttacattcaaatttactccatcagtcagtaccaacacactataaactatgccttgtgatgtatgagagcaaacagaactcaaaaggacaactgaatgcacgaggttccctcccacctggggggatctaaaaaggatacacatataaagatttactcagttcaacacaaaatggtaccttgagtccacatagctctcaacatcccagagaaaagaaccaaatgtcacagcctctaaaacaagcttctttaaaccaccaaagctaattttgatgttttcatccttagagactgccccctcaggtgttacaacaatttcaggtcttccaaacaatgcttctgtgtgcttctcgatgatgctgacagcctctntggatctaattgttgcatatctttgagtgtatcaccatcaaaggacatcacgtagttacgcaacctggttgctttacaccatag

SEQ ID NO: 10012 - DNA, 529 bp, Glycine max
  Clone ID: jC-gmle01810044f11a1
tggggtctctgcctctgcaattcagcgggctcaagtgctccccactctcatcttcttctctcttctccaaaccttctctttggacccaacaatcccaaaagcgcgtttcaattaccattgcgaactcaatagcaatagccaatgcgcagaacaaagagagagcgaggcttaagaaactcttcgaagaagcctacgagagatgccgcaatgctccaatggaaggtgtttccttcaccatcgaagacttcactgctgctcttgacaagtacgacttcgattctgaagttggcggcaagattaaaggcactgtgttctacacagataacaatggagcagttgttgatatcactgcaaagtcttcggcatatttgccactgcaagaggcgtgcatccacagggttaagcatgttgaagaagcaggcttagttcctgtgttcaaagaggagtttttgatcattggtgagaactcaatagatgatagcttggtcttgagattaaggtctcttcagtttgaccttgcatgggaacg

SEQ ID NO: 10013 - DNA, 500 bp, Glycine max
  Clone ID: jC-gmle01810044f11d1
aatatgaattagttctatttatttaactcacaataatacattggcatcaagacatcgttcggcaacaattgatagttagttacaaacaatattataaaaatgtaagcaaacagaaagaaaagagcacgcaattctgaatcatgattcttcagctggtggtacctcactcaaatccagtccctcttcaggcaagtctgaagtaaatggtcccaggatcccatcaccgctgatagtcaatccactctcaggctggaaccttagcatgtctgcacgagccatagcttctgcttgggctattctctgtctgaatgtctgagccatctcctccgccttctcaaagacaagctttggattgcgaatcatgtctccaggtgtgggctctaacttcttagtggaaagacttactcgacctctctctcggtcatggcttaagatcatcacctttaatatgtcaccaggtttgagcacagttgaaatatcagttacacggtcatgactga

SEQ ID NO: 10014 - DNA, 494 bp, Glycine max
  Clone ID: jC-gmle01810044f12a1
aaattatctgaaagataaggaggccacgtaccccaaattttggcggttgaggagcagctccttcatttcctcttactctgttttttctgtttctgttggctaagaaacaaagaaagagcccagcgataaagcaaaagcgcatttccgctgatgtatgtgtgtgtttgcgatgccaggtggggcaaccgtctgctacggtcaccggtttctctgacgtgatctgcattcgactcgtccacgactcagctacccgactcggtcgcgacccgttccggttcaacttggatccgtgtttgtgtccaatggtaatggcgatagtaagcggttcagctccaagatgagcctcattcccagagccgttgattcttccaccgtacaatcttccgtcgtttacgacgatggcttctccgtttctaagctttcatttggtgtgattggtctaggtgttggactctcactcttgtactacggttttggagcatattttaatattc

SEQ ID NO: 10015 - DNA, 565 bp, Glycine max
  Clone ID: jC-gmle01810044f12d1
ccaaatgctatttttcttcttttcttgtatgtcaaaatgtacacttgatacaatgacttgatacttttgagcataatattttttttttttacatattttacaggacctaagtcctgtaattgactaaaccatgcaacatggaagaggataaaacggtccataacttcatgaaggagaagcattggggtctgtattggagataagtcgaacctcatacaaatctttctcacccttaccaatttcagctgtaattcctggcccaaagaatgaagtaaatttggcctgtctttgttcaaaatctgacaactgcagagccttggcctcaaaaactaaaccaaacagtatttaccatcttgcgtgacttcttcacgaatcgattgtaaaacaggagcacttctccttggtattcctcctccttggccatactgaaatatccgtttcaatgcctcatccaaatgctgctcatctccatagcgatatctggtaacatcgctcttcacctgtttaagaaatggagttgcacatttttccctcaagctttgagcatcctgatatgttaggcatg

SEQ ID NO: 10016 - DNA, 541 bp, Glycine max
  Clone ID: jC-gmle01810044g01a1
ctctggtcggagttgaagtgaagcatgcggcggagggcgcaccggaggagaattgctccgccaagcccaccaagcagggcgagggcctccgccactactattctcacaacatccacgagcatcagctccttctccgtcaaaagacgcataacctcaaccgtcttgaggctcagagaaacgagctcaattccagggtgaggatgctgcgcgaagaattacagcttttgcaggaaccaggctcttatgttggtgaagttgtcaaagtcatgggcaagaacaaagtccttgtcaaggtccacccagaaggaaaatatgtcgttgatattgacaaaagtattgacattacaaagattactccatccactagagttgcacttcgcaacgacagttatgttcttcacttagttctgccaagtaaagttgatccattggtcaatctgatgaaagttgagaaggttcccgattctacttacgacatgattggtggtttagaccagcaaattaaagaaatataagaggtcattgagttaccaatcaaaca

SEQ ID NO: 10017 - DNA, 504 bp, Glycine max
  Clone ID: jC-gmle01810044g01d1
aaaaatactctataaatgtagtgtgccgtccgaagacacagacaaggaaaaactcaaagaaagaatcatatgattcggtacataacttggtaaacttaagcaaaatgaaatccaatgccactgtaaattgaaataaccctaaggtgtgttcgctgcccatcttcgcaggataataatgtgcaccacaaacatgaaataaaaatcacttccacaacttccgcaatgacatgtttttttcagtctcctttttcatcaccttggccacagccatctcaaaatcctcctgagtcacgtgtaccctccgctccctcaatgcaaacattccagcttcggtgcaaacagccttaagttcagcaccagatgctccattcatcttctcggcaatcttcttcagatcaatgccacgcattaaattcattcttcttgaatggattttcaaaatatccagccgagactcttcattagggtttggaaattcaatcttccggtcaatccgtccaggtc

SEQ ID NO: 10018 - DNA, 593 bp, Glycine max
  unsure at all n locations
  Clone ID: jC-gmle01810044g02a1
ctctgagagaagctctcgaaattcttctgatactcgtagaattttaatggcttgttcatcatccgattcaaaaaaaccagtgacgtcgctgttgttcttttccttcctaattccgataccttccgattctctttccgccctacgcatactcgatacttgttcatctctctctttctcaaattccgattcctttttgtagcatacacaccgtactagcccaactaacaaaccaaacaaaaccgttaccatgggaaaacgtaattctcaacgtaaaagtgctgcgatgttcgatagtgatgacgatagtagcgtgacttcgtcgtcaactgctcgttctgatttgatgtcggtgtctggggctgaagatgttcaatttgttcaagattccttgctcgaccaagctctcgacgcattagatgagaaacggggttccacgagggagaaagctttgtcatcgatcattgacgctttcaatagcaacatgcagcatgagtttgtggagaagaaatctgctaccttactacatcaatgtcttgcttcaataanaagggatccaaaaggcatctgctaggagatagctttgcatctcatgc

SEQ ID NO: 10019 - DNA, 502 bp, Glycine max
  Clone ID: jC-gmle01810044g02d1
agtatctatttgccattcatattataaatcccatgtcatgggaatatactgtataattgataaaagtaacaagaccaaaagtataaacactgataaaatatatgaatgttgtacatgaaatgaaagattgaatctctaattgagacataattattgttgttccagtcaaattcatgcctcctcgtcaaccacaccgacagcgtagtggccgaagtttctgccctcagataatatccgctgcttattaagtgattgcgtcctagccttgttcaaaaacgaatttggagacttaaacattctcttttcaccaccagacattctgtgttcgttggtattaagatactttctcttcggtgagaaaccaaagacttcatgtaggaactcattttcctgcatatgcttgatgaatcctcccccaagaaaatgcttgataaaattcaactgcatcatttcagaccatgatgatgcctgcagggaatcaccaccaatcttcattgaaata

SEQ ID NO: 10020 - DNA, 542 bp, Glycine max
  unsure at all n locations
  Clone ID: jC-gmle01810044g03a1
cgagaggtacttgctcacagatatatttttttttttgtctccatcattttctcgagagctttcagtttctgtggttcatctttcttcttcttaatctttccccccctctctgtaacatcccgcttctctgaatccctttctgctaatcatctgtctttcaagctaagattttctggtttgtcttttaattcaccaaaaagcaaacttagaaggatttttcgaaagccaggtgttttcagaaacgagatccaggttttattgtcgaatttcgctagtcatattaatatttcatcatttttttttcctttgaaaccagccaagagggttatttttgatccctcaaagctaatttctcattttcttttccgggactgaagaggttgtctatttgaaatctccttcatcctttcctttcttgttgaaaagtttttgtttttgttttaattaaccagcagttcttcagttttagaacgacgcaggttgaattatcatggcagctatgatggatttttacagcagcagcacagangttcaatttcact

SEQ ID NO: 10021 - DNA, 467 bp, Glycine max
  Clone ID: jC-gmle01810044g03d1
acaataataaatccatatttttataattaaaagtagtagattacagcgatgcacttgagaaacatattaagtggactaattctccctggtcaagcaagaaaaaaaccagctatgacccaaggtagagagagattatacacagaatactagtaattaactaagactggctctgcaattgccaaaaactccattgcagtagcagccacctgagaagacactaagacctagactagaccatacataatgaagattaatacccttacataacaacataggacactaagaaaacacggcttcacagagaatcccagtcgatctcataagaggggtacttctggagattaaaattatccgaatcaccttcccactgcggctcgctgacgtcagcgaaagtcagaaccgaaagcggcgaagaaccttcagaagaggaggaagcagcttcgaccttacaagagttgttgtcgttg

SEQ ID NO: 10022 - DNA, 575 bp, Glycine max
  unsure at all n locations
  Clone ID: jC-gmle01810044g04a1
caaatttaacccttttgcttctgccattgttgagttttcttctgcaatacgattgaatttcaatatagggttggtgtagaaggttgttctgtgttctcgtgcgtggttaaattttggagatgagtgatgcaaaagagaatgatgaagcagggcagaatgtacccttgactgtggaggaaactcaggagttagttgaagcacaggttcaactagaagatttggctgctcctgtgtccaaaggggatacttcaaatcatgttgaaaacgggaaggaagaggtagtggcacctgtggaggataaaattgtgaaaccagaagcagattcggagtgcattccacaaaaagatgttctaaatagtgaaaatactcttcagccagtccccgtaatggacaatgctcaagttttaaataaaacagaaggtgaatatgcttcagatgtgaagagcaaagctgaagaaactccacagtgtgataagagaatcgagaatgatgctaatgtttggcanatcaacatggatactgctgaaacgacttgtgcggtgaatcccatagcttttgaagtggctgatagtaaa

SEQ ID NO: 10023 - DNA, 426 bp, Glycine max
  Clone ID: jC-gmle01810044g04d1
gacaggagaacatcaggtgaaaaatttaaataaaaaattattaacataattcagagttaatagaatacggcatgaatttggcttaggggtcaactatcctataaaccatggcaaattagttcgtcatgaatctatcagccttctctattctgattgctctcaaatggaactcgaacaaacaattgtccatgcaaggtcaccacagccgacgtctgctgagtatcaattcttgaaggcaagctgacaaccttcttgaaaggtgtcaccccccatggattgtcagaattctcgggctctccacttatgaccaagcgtccagctgggtctgattgaacacgcacctcttcccgcagaaggccaggaactaaagcatagacctcaaaacaatctttagtttttggcacattgacttttacccaatcagca

SEQ ID NO: 10024 - DNA, 512 bp, Glycine max
  Clone ID: jC-gmle01810044g05a1
accttgaggatccaaaggctcaggaagaaattttacttccactttcaagattatgttgatttgattatctggaaggtgcaattcttggaccgacaccatttactaatcaagtttggtagtgtagatggaggggtgtcccgaaatgctgatcaccacccagcttttgttgctgtatataacatggatacaactgaaattgtatcattttatcagaattcaccagacgagctttatctgttgtttgagcagttctgtgaccacttccatgcaacatcaaggaattcaatgtatatgaatttcatatcttctcattcaaataatatccacgcactggaacagctccggagcattaaagataaggcaagcagctctgcacagtttgtgaagaagatgcttgcctctttgcccttcagctgtcagtcacagagtccttctccttacttcgaccaatctctgttccggtttgatgataagctgatttctgcaactgatcgacataggcaatcaactga

SEQ ID NO: 10025 - DNA, 435 bp, Glycine max
  Clone ID: jC-gmle01810044g05d1
aattagaatgctgttgcaaataatacttttccaatattttttaaatgataaaaatttcggtaattagtttaaaattttaaaataaaataaaatgaccaaaatttagaagagcgtcgattgtcacagcaatcgttagaatctgattgacatacattttggcttgcaagtaccgactgaatatacatcctcttgattcagtaaagacggtaacagtggaagacaagtaaatgtaaatctactctcatttgtaatctataaatctacgctcatcttcgaaagtgaatatttacaactgaaggctgcaagaacaaagtctgttgaacagagagagcaaggggcaaaattggatgaaaaagaaacgacgagatcttttttgcacgaccatccatactaccagcttcaggacctggtttgatcttaaatttgagagaatac

SEQ ID NO: 10026 - DNA, 485 bp, Glycine max
  Clone ID: jC-gmle01810044g06a1
cgccgatgacggttcaggcgggtcgggttcggaccctgaaagaaggttctcgcggagaatcgggtttgggtccggtcgtgtactggatgttcagagaccaacgtgtgacagacaattgggctctgatccacgctgttgctgaggccaacaaagccaacgttcccgttgccgttgttttcaatctcttccacacctttcttggcgccaaatcccgtcatttagggttcatgctcaggggcttgcgccaattgtgccaccgtatgcaacactctcttcaaatcccctttttcttgttccagggagaggcagaggagacagtgccaaagtttcttagagaatgtggagcttcacttttggtgacggatttctcacctttgcgggaagtacggaggtgtaaagaagagatatgcaagagggtaagcgattcggttgctgtgcatgaagtggatgctcacaacgttgtgcccctttgggttgcctctgat

SEQ ID NO: 10027 - DNA, 377 bp, Glycine max
  Clone ID: jC-gmle01810044g06d1
acgggccactccccaaaagaaggaaactggggcataccctaaaaaaaataaaacaacttgggtggttttaacgggtccctatcacctttaaaaggggggtgtgggaccaactagtttgggggggaacacaagcggttacaattttattaaccgcccataggggggggaaaaaaagaagggggggaacgccccacttaaaactgaagggaaattacaagattgttcctggcttcctgcttgaaaaaacatccgccaaaaaaggggaacttttgttaaaagaaaaatttcaataagactctttaatacatttttttaaacacaccttttttttggttaaaaattattgaaaaatacaaatttttttctcactttttttt

SEQ ID NO: 10028 - DNA, 431 bp, Glycine max
  Clone ID: jC-gmle01810044g07a1
ctttggctagtcaaaagatggaaggagaagctactatggctacgagggctaacatgtgcgacacgagcagtctggtccgctaattcgtgacgtgtggtgcgcatactgacttactctgcgcaaagtgcgacgctcgcatacacccctcgctgacccagaagcatcgcaagcgagcgctcaaggccggctaacgcgcagctgcagtgttcctatgcgaggttgacgctgactgggtatgcgcctcctgggacaacgcatccacgcagacacacgctctgcaacggaacaatggtgatcagattgatatgaatgcagcttgctcctggatcgacgtctacgagctcgcatacaatgctgacttggacgacgactactgaaccgcttgatggctcttgctcaaccctgtcacaagcgctaatgtccctaacaac

SEQ ID NO: 10029 - DNA, 355 bp, Glycine max
  Clone ID: jC-gmle01810044g07d1
aatacatggacggtttttacaggtccaagtttcattcaaaagacctttaccaaaatattaaagcatccgattagaacaacggcaagtttttatattccaaaaaaaatcccttatttggccccaggggggggccatttttatgggtcatgatcctaaagcatctctcatttttgggggccatttgtgaaacacagctttttcagaaagagggaacaatgccatatccaacttctgtaaaaagagggggggaaaacatttgatccactaaaaataaaacacttgttcttttggcaaaaggaccttttatccgggggctagtttttagataggccttccttgaggaaaacctgattgt

SEQ ID NO: 10030 - DNA, 312 bp, Glycine max
  Clone ID: jC-gmle01810044g08a1
aaaaaaactagtgcatatataattggctttgattaaacataagttaccatgaaactatgagtggctatggattatgctttaaagaaacattaatacgtacacagctgttcacaatttgatatatagtgaaacgcatcagcctcaccgcataacgcgcatgctgtaaagttctcacttccacccagccaagcagtgcgaccgggtagtctcaagtcgggtcgcagtgatgaggatccgacccgttcgcgctgcgcctgagcgcatatcggagaaggtggaggagagcataatgaacgcgcatgaggcgtgcgc

SEQ ID NO: 10031 - DNA, 440 bp, Glycine max
  Clone ID: jC-gmle01810044g08d1
gaaaaaaactagtgcatatataattggctttgattaaacagaaatgaccatgaaacttttagtggctatggatatatgctataaagaaacatcaatacgtccacagctgtatacactatgacatacagggaaacgcagtaaagtcactttccaacgaaccatgcatgctcagaactccaaaggggggatccatatggaacccgggaggatcattaaaggacactgaggccgacactagcatacacgtttgtgagacgtctatgcagggatgaccctctcgttctgacgaccgagctgatgctacgtagcaatagtggagtcgacattatgatcgaggtcgcaacggtcctgggagtcgttaccttggtgctctgcggcggggatacagaggccggactccctggtgacgagtggatggtcttggcccgagaggtcatggt

SEQ ID NO: 10032 - DNA, 388 bp, Glycine max
  Clone ID: jC-gmle01810044g09a1
gcgcattatagcacaccacacaaaaaagcaaaacagagagaacaactgttactcacacacgccatgggtaaatgaatggtttttgagcaacagcagttaaaagagaaaagggattcagcgaagatgacatcggttggtgtggcaccaacttcgggtttgagagaagccagtgggcatggagcagcagctgcggatagattgccagaggagatgaacgatatgaaaattagggatgatagagaaatggaagccacagttgttgatggcaacggaacggagacaggacatatcattgtgactaccattgggggtagaaatggtcagcccaagcagactataagctacatggcagaagcgtgtgtagggcatggatcatttggagttgtct

SEQ ID NO: 10033 - DNA, 479 bp, Glycine max
  Clone ID: jC-gmle01810044g09d1
agataattgcagacattttgtcctctattgtatgttacaatctgctgtgatacaggaaacagggtattctacataaccatcgggggttgggtgataatgagtagcatgtatctctaaatctgcttttacagggcaaccgaatacaataaagataccaacaaaaatatcatattaaatagaaaaggaaagcgcagcattctcatatggaaacaacacttcacgagcctagaaacgggcattgcttccttgcatgctctggaaccaatttcaccaaaatctcagatgggactcctttcagttcatgggatttgaaattaaatagtggtggaaggaatcggccatttggcaagcgagtatttggatcacgaagctcgtcgaagaaaggatgcgtcaaggcatcaaaagctgtgcaccgcaagttaggggagtattgtagtagtcttgataccaaatcaacagcctctggaggcatgcgctta

SEQ ID NO: 10034 - DNA, 606 bp, Glycine max
  unsure at all n locations
  Clone ID: jC-gmle01810044g10a1
gcgcattatagcacaccacacttaaaagcaaaacagagagaacaactgttactcacacacgccatgggtaaatgaatggtttttgagcaacagcagttaaaagagaaaagggattcagcgaagatgacatcggttggtgtggcaccaacttcgggtttgagagaagccagtgggcatggagcagcagctgcggatagattgccagaggagatgaacgatatgaaaattagggatgatagagaaatggaagccacagttgttgatggcaacggaacggagacaggacatatcattgtgactaccattgggggtagaaatggtcagcccaagcagactataagctacatggcagagcgtgttgtagggcatggatcatttggagttgtcttccaggctaagtgcttggaaaccggtgaaactgtggctatcaaaaaggttcttcaagataagaggtacaagaaccgggagctgcaaacaatgcgccttcttgaccacccaaatgttgtcgctttgaagcactgtttcttttcaaccactgataaggatgaactatacctcaatntggtacttgaaatatgttctgaacagttnatcgtgtgatcaaac

SEQ ID NO: 10035 - DNA, 461 bp, Glycine max
  Clone ID: jC-gmle01810044g10d1
agataattgcagacattttgtcctctattgtatgttacaatctgctgtgatacaggaaacagggtattctacataaccatcgggggttgggtgataatgagtagcatgtatctctaaatctgcttttacagggcaaccgaatacaataaagataccaacaaaaatatcatattaaatagaaaaggaaagcgcagcattctcatatggaaacaacacttcacgagcctagaaacgggcattgcttccttgcatgctctggaaccaatttcaccaaaatctcagatgggactcctttcagttcatgggatttgaaattaaatagtggtggaaggaatcggccatttggcaagcgagtatttggatcacgaagctcgtcgaagaaaggatgcgtcaaggcatcaaaagctgtgcaccgcaagttaggggagtattgtagtagtcttgataccaaatcaacagcc

SEQ ID NO: 10036 - DNA, 564 bp, Glycine max
  Clone ID: jC-gmle01810044g11a1
gacaagcagcttaagaaaaatctgcaaagaataaaacaagaggaggaaatgcaacttacttgttgatataaacttcagacagagcgagttgttgtaaagctagccttgttgcagccatggccacccacgcggctctagcttctacaaggatccccactaacaccaagttcccatccaaggcttcacactctttcccaacccaatgcgcctcaaagagacttgaggtgacagaattctctgggctaagatccacttcatgtgtgacatatgctaacgatgctagagaatcttccttttttgatcttgtagcttcccaactcactcccaagaccaatggatcatcaactcctgtgaggggagagacagtggccaagttgaaggtggcaatcaatggtttcggacgcattggtagaaacttccttcgctgctggcacggccgaaaagactcaccccttgaggtcgttgttgtcaacgacagtggtggtgtcaagaatgcttcgcacctgcttaaatatgattccatgctgggaacttttaaagcagatgtgaaaatactggacaatg

SEQ ID NO: 10037 - DNA, 494 bp, Glycine max
  Clone ID: jC-gmle01810044g11d1
aagaaataccatatcaatcaatatatgggcgatattcatgaatttcagtcacgccaaaatttattattggctgcagataatgttaaactttgaaaatctctcctcagacaccgtctgaacgaacaatttccttctttttcacatgatacgttaacacaaggcaaagagtaaaaatggtttgctgctggtaatggtaatcatcaaatcagaaaaaggcgctctcctctattcatatactttgcattcctcatcagcagggtttgtctcgcagaattcctccaatgggtctccactccctgctttagctgcccctggccacttgcttgctactaggtgtgccaaatccaccaccctttggctgtaaccccattcattgtcataccaagcaaccaccttaaccatgtcatctcccatgaccatagtcaaggaggagtcaatagtagaggaaacatcagagcagcggaagtcgatagacacaagtggaacatcacaca

SEQ ID NO: 10038 - DNA, 588 bp, Glycine max
  Clone ID: jC-gmle01810044g12a1
gacaagcagctcaagaaaaatctgcaaagaataaaacaagaggaggaaatgcaacttacttgttgatataaacttcagacagagcgagttgttgtaaagctagccttgttgcagccatggccacccacgcggctctagcttctacaaggatccccactaacaccaagttcccatccaaggcttcacactctttcccaacccaatgcgcctcaaagagacttgaggtgacagaattctctgggctaagatccacttcatgtgtgacatatgctaacgatgctagagaatcttccttttttgatcttgtagcttcccaactcactcccaagaccaatggatcatcaactcctgtgaggggagagacagtggccaagttgaaggtggcaatcaatggtttcggacgcattggtagaaacttccttcgctgctggcacggtcgaaaagactcaccccttgaggtcgttgttgtcaacgacagtggtggtgtcaagaatgcttcgcacctgcttaaatatgattccatgctgggaacttttaaagcagatgtgaaatactggacaatgaaaccatcactgctgatggtaagcc

SEQ ID NO: 10039 - DNA, 509 bp, Glycine max
  Clone ID: jC-gmle01810044g12d1
aagaaataccatatcaatcaatatatgggcgatattcatgaatttcagtcacgccaaaatttattattggctgcagataatgttaaactttgaaaatctctcctcagacaccgtctgaacgaacaatttccttctttttcacatgatacgttaacacaaggcaaagagtaaaaatggtttgctgctggtaatggtaatcatcaaatcagaaaaaggcgctctcctctattcatatactttgcattcctcatcagcagggtttgtctcgcagaattcctccaatgggtctccactccctgctttagctgcccctggccacttgcttgctactaggtgtgccaaatccaccaccctttggctgtaaccccattcattgtcataccaagcaaccaccttaaccatgtcatctcccatgaccatagtcaaggaggagtcaatagtagaggaaacatcagagcagcggaagtcgatagacacaagtggaacatcacacacgtgcaacacacctt

SEQ ID NO: 10040 - DNA, 554 bp, Glycine max
  Clone ID: jC-gmle01810044h01a1
tttgagctaaccagtctccaacaacaatctctctcaggaataggatatggatggctcagcctcaaagcctggtcacacaacaagaggagttggtttggttaaagcttctgttaacttatatggcaacaggattgaagatgtcaatagtcctttgctgaaaaaatatttctcaacgaagcaatcttctaaagcaaaagaactccacagagcaagcaaggatatggttcggtacaaagagaccaaacgggtagcagaatctgcaaaagctcaagcagaagctaagctttccaatgccaaacagacagtgaaagaccttttctctatgattggggaatctagctacaaggcaaaagcccgaatgcgagatgtggcaccactaaaggagtatgggaaaccaagcaagaatgatgatgataatgagtattcacaagttatgagagaattggaacatgctaaacgggaatttttccaacttaagcttgatgtggcttctgttttggaggagaaacagcgagcagaataggaaatcgaagcatcgagatccagcatgctgt

SEQ ID NO: 10041 - DNA, 513 bp, Glycine max
  Clone ID: jC-gmle01810044h01d1
cgctgcttctgtttcggacttgagcttatcaagagtttgggacaagttactgactattgatttggccttttcctctgcagcagacaccgcttctaatttagatttcgctctcaagagcttgtaactgaggtttcgaacttttgcacccattttcgattcagtgttctttaaatgaaccgtggctgtattcacatgcttcagctcatttcttgtaacatccatagaggccataaacttaaaaccttgttctctaatggaagctaagtccttctttgctgcctctatttcttctgttgcagtctctaaaacaccaacatctcttgattctccttccacatgctccatgctctcacctctttcaacccttttcttaacaaagttcaactcattcttcaacatatcaatatcagacaatgtcgtggccaatttcatttcaagctcttttgactcatttatctcttcaatggcctctttcaatctggttccttggattttcaagagcttcaatgtctc

SEQ ID NO: 10042 - DNA, 547 bp, Glycine max
  Clone ID: jC-gmle01810044h02a1
tttgagctaaccagtctccaacaacaatctctctcaggaataggatatggatggctcagcctcaaagcctggtcacacaacaagaggagttggtttggttaaagcttctgttaacttatatggcaacaggattgaagatgtcaatagtcctttgctgaaaaaatatttctcaacgaagcaatcttctaaagcaaaagaactccacagagcaagcaaggatatggttcggtacaaagagaccaaacgggtagcagaatctgcaaaagctcaagcagaagctaagctttccaatgccaaacagacagtgaaagaccttttctctatgattggggaatctagctacaaggcaaaagcccgaatgcgagatgtggcaccactaaaggagtatgggaaaccaagcaagaatgatgatgataatgagtattcacaagttatgagagaattggaacatgctaaacgggaatttttccaacttaagcttgatgtggcttctgttttggaggagaaacagcgagcagaataggaaatcgaagcatcgagatccagc

SEQ ID NO: 10043 - DNA, 457 bp, Glycine max
  Clone ID: jC-gmle01810044h02d1
cgctgcttctgtttcggacttgagcttatcaagagtttgggacaagttactgactattgatttggccttttcctctgcagcagacaccgcttctaatttagatttcgctctcaagagcttgtaactgaggtttcgaacttttgcacccattttcgattcagtgttctttaaatgaaccgtggctgtattcacatgcttcagctcatttcttgtaacatccatagaggccataaacttaaaaccttgttctctaatggaagctaagtccttctttgctgcctctatttcttctgttgcagtctctaaaacaccaacatctcttgattctccttccacatgctccatgctctcacctctttcaacccttttcttacaaagttcaactcattcttcaacatatcaatatcagacaatgtcgtggccaatttcattcaagctcttttgactcatttatctc

SEQ ID NO: 10044 - DNA, 536 bp, Glycine max
  Clone ID: jC-gmle01810044h03a1
agaggtcctactggctttggagtatcttcacatgcttgggattgtctaccgtgaccttaagccagaaaatgttcttgttagggatgatggacatattatgctctctgactttgacctctccctccgatgtgctgttagtccgaccctcgttaaaacctcgtccacagattctgagcctttaagaaagaatgctgtttactgtgtccaacctgcatgtattgagccaccttcctgcatccaaccatcctgtgttgctcctactacatgcttttcaccccggcttttctctagcaaatcaaagaaagacaggaagccaaaaaatgaaatcggcaaccaagtgagtccgttacctgagctcattgcagagcctaccgatgcccggtccatgtcatttgttggaactcacgaatacttggcaccggagatcattaagggtgaaggtcatgggagtgcagttgattggtggactatcgggatctttctatatgagctgttgttcggtaaaacgcctttcacgggatccggtaaccgagcta

SEQ ID NO: 10045 - DNA, 546 bp, Glycine max
  Clone ID: jC-gmle01810044h03d1
aaaacacataaacagactaattctgcattttaattgatttttggatttagattctatgacagtgcattcaggcaatggtgaatttctaagcggaaaaaagtccttttgtgatgacatgacacttgtttacaaagcaaataaaaatatactaaatcttcattttgtttgatgcccatgtgctccattttccacaattacatacttaccaataccattgggaccttaagagcatcatcaccaccattggctggttggaattcctagtagtgcattggcaggcagtgttgaaatgttgtttttataagcctttttttgagatgacagagaagctatgcattaattatgccatacaaatttgaaactgcaaatagccaacaaaaacaaacatacaattcctcatcatatctgttcctgaaacattgaaaaacagttcctccccctcttaacagaaaccatttgcaatcaatatattgtctctaccctctctctagaagaaatcaaactccagataattatcagaacctttctgattagctattgacatat

SEQ ID NO: 10046 - DNA, 464 bp, Glycine max
  Clone ID: jC-gmle01810044h04a1
gttgaagagtggtggttgcggtggttgtggaggtggttgtggaggctgtggaggagggtgtgcaaataggttggagagtaccggctgtggaggtcgttgcggtgatcctttggttggtgactgtgacattcacgaacttcgcacagaaactctgcatcaactgtatgaattggctgacgataggtctatctctggacattcatactctggctctctcttgatgcagttttgtgatctactgcttatcagcgatgcactcttgcatttttcgcattcatatcctgcttatgctaattacacttttgagtacgcatactacttatggtcaccttcataacctgtcaacgcaacgagatgctgatctcatcctttgttgggacatatgcctttctgctcctgcatgctctttcatgttaactgcatctcataaacaatttatgcaacctatgtctcatttaatgcat

SEQ ID NO: 10047 - DNA, 450 bp, Glycine max
  Clone ID: jC-gmle01810044h04d1
ggctatcaaaatccatatattccatcacgagggagaaaaactttgcgacacaagagagtttataccacactaataaaaaaaagagtagaatctataccacatgaaaatatcttaatatccataagcatgcataaacagaaaggcataaggacacacacaggtaactaactgagaatcattacctccaagttgattattacacatttaactctcctgcttatttttctacgttttctgtctaagaaagacatcaatgagagagaagcgaaattgagaagctcatagacacacgttcatacatacaatacaatagtgacaatgcataatcatgaaacatgcttcatgcagtgactgcttcttcattcacatactttagctcttcattgaaatgttcatcaataccacatttactatccataagatcaccaccacaaccttcacagccactac

SEQ ID NO: 10048 - DNA, 551 bp, Glycine max
  Clone ID: jC-gmle01810044h05a1
ctttgttgcatttcacacaccaacttcccatagaagagagaagagagaagagactcttccttccatcctgcaactcaaatcatcatgcaagactccagctcaatgaagatctcccctctggatctcatgtccgccatcttcaagggcaagctcgacccctccaacgtctcctcctccaccaacgccgccgacgccgccttcctcctcgagaaccgcgacttcctcatgctcctcaccacctccgtcgccgtcctcatcggctgcgtcgtcgtcttcatctggcgcagatcatcctcccccaaggccaagcctctcgagcctcctaaacgcgtcgtcgagaagcttcccgaaatcgaagtcgacgacggcaccaagaaggtcaccatcctcttcggcactcaaaccggcaccgacgaaggcttcgccaaggccacagctgaagaggccaaagcgcgatacgagaaggccacgttcagagtcgtcgatatggatgattatgccgacgatgacgatgaatacgaggaaaggttcaaaaagagactcacgttctt

SEQ ID NO: 10049 - DNA, 447 bp, Glycine max
  Clone ID: jC-gmle01810044h05d1
acctccaaacatttttttatagttcatacagtacaaggaattgtctgcgtctctgaacctttctttgaggttcatcatacattacaaaaagaaaactgaagtaaaatagttcatagtctaggtataaacagtatataataaattacacgaaccaaaaagaatcctttagaaaatatagtgaaaaagaatcgtaggaaatgtcgtcgtgatggcaacaagcgccccccctcaattttgagggcactaatgaaaggtggcacaaataaggccctttcaaaatcctctagccacaactctatgttttattaatatcttcgtcacccccacggcttgcattcagatatcatcaccatacatcgcgcaaatatctgccagtagtttgtagattctttaccatgctctcagccttggaactatcgagagaaccctgctcttgcaaaattgtgt

SEQ ID NO: 10050 - DNA, 536 bp, Glycine max
  Clone ID: jC-gmle01810044h06a1
cgttgccattctcatcctcttctttctctctctaccattgccatggatccctacaagcaccggccatccagcgccttcaattctcccttctggactacaaattctggtgctcctatttggaacaacaactcctctttaaccgttggagctagaggtccaattctgctggaggattatcatcttgtggagaagcttgcaaattttgatagggaacgtatcccagaacgtgttgtccatgccaggggcgctagtgcaaagggtttctttgaggtcacccatgacatttctcacctgacatgtgcagatttccttcgagcccctggagttcagacgcctgtaattgttcgtttctcaactgtcattcatgagcgtggtagccctgaaaccttgagggaccctcgaggttttgccgtgaagttttacaccagagagggtaactttgaccttgttggaaacaaccttcccgtcttctttgtacgtgatggcatgaagtttccagatatggctcatgctcttaaacccaatgccaagaacca

SEQ ID NO: 10051 - DNA, 539 bp, Glycine max
  unsure at all n locations
  Clone ID: jC-gmle01810044h06d1
aaatactaacaaatacaaacggcatttattgagataggtcaacgagttgcattcatggagttatgggtacacacaacataatattgcaagaaaaggattagttctttcaggtaatccaaaatcacatccttatcgtactctttgcacgtctgcaactctaacaatcattctggagttggcaacaacattaaatatttggcctcgtgctgagatgagaagctatcttttggcctagagaacggtcagcctgagaccagtatgatatccagacactgcggatctcatgggtgacccgtgggtcagataaagcatcaacccatcggcgagcaaatctatcttgcctgtcaggtgcccaagaccggtatctctctccgggctgcttgaagttgttctccttctcaattacacacttttcacgccttccactgcagatagcaggaggtatggggaacctttctgcatgacgaacaggatcataccttgaagggaaggaatngacctcctcatccctgtgaatgaaattcatgaaaccttcatga

SEQ ID NO: 10052 - DNA, 480 bp, Glycine max
  Clone ID: jC-gmle01810044h07a1
gttttgtcgcagcattccatacgaggccgaagggaagagtttttgttgggtttgggaggctaagtagggtttgcgttgagaaagagagagatgggaagagaaaaggagacaacaaaggtagcttacacagtggagcagcttgtagccttcaatccatacaatcccgatattcttccagatctcgaaaactatgtcaacgaccaggtttcgtcgcaaacttacagcctggacgcgaatctctgccttcttcgcctctaccagtttgaaccagagaaaatgagttcccagattgtggcccgcatattggtcaaggctctcatggcaatgccggcgccagatttcagcctttgtctctttttgattccagaacgcgtgcaaatggaggagcagttcaagactttgattgtcctgtctcactatttggagacaggaagatttcggcagttctgggatgaagcagcaaaaagtcgtcatatagtt

SEQ ID NO: 10053 - DNA, 466 bp, Glycine max
  Clone ID: jC-gmle01810044h07d1
agagaacaggccatctgttcaacgaataataaagcatagcaaagcaaattaattttcagacaggtatgcaaaacatgagtaaactacaatagctgtccactaattctcaaattgaagcatccaaggggaagggaaggtgttgctccaactgatataatatccgcataatctccttcaggatagaaaattggcagtctaccatagaaaaatcaactaagaatagggaagatgcgagtaatgtgctccaatggtacactgtctgcagcatttttcttcaaagctgggtcattaaattcagttctagggaggacaacgagttgacccctgccttggcttttctcaacaacccaaccactgttggctacttgatgttcaatgaatttgtccaaggataaaccttctatgttaatagcctcagcaagcacagttctaggaatcctttggtaagtcaaggaaaggacatgga

SEQ ID NO: 10054 - DNA, 223 bp, Glycine max
  Clone ID: jC-gmle01810044h08a1
gttatagtcaaataccatcatgtgatcttccaatagacaacttcaaacaaaatctaagttgtgtaggaatagcagaaaagtagaatgtacattgaataaggacgttttctgaaagaaacaggcatcctagtcaagcacatcgacaatacatcaataacatatacttttgtagatggcttaaaagaatcgtacatgtaatcaaatttatttattaacagtctag

SEQ ID NO: 10055 - DNA, 221 bp, Glycine max
  Clone ID: jC-gmle01810044h08d1
agactgttaataaataaatttgattacatgtacgattcttttaagccatctacaaaagtatatgttattgatgtattgtcgatgtgcttgactaggatgcctgtttctttcagaaaacgtccttattcaatgtacattctacttttctgctattcctacacaacttatattttgtttgaagttgtctattggaagatcacatgatggtatttgactataac

SEQ ID NO: 10056 - DNA, 516 bp, Glycine max
  Clone ID: jC-gmle01810044h09a1
cgcttgagctctgcgagatcttgagtcgccgatttgaaaagatgagtaagcttcagagtgatgctttgcgtgaagccatctcaggaatcatggccgattccaaggagaagaatcgcaaatttgtggagaccatcgaactccaaatcggtttgaagaactacgatccacagaaggacaagcgtttcagtggctccgtcaagttgccccacatccctcgccccaagatgaaaatttgcatgcttggtgatgctcagcatgttgaagaggcagagaagataggactggactggatggatgtagaagccttgaaaaagctaaacaaaaataagaagttggtgaagaagctagctaaaaaataccatgcttttttagcatctgaagcagtcattaagcagattcctcgtcttttgtgtcctggtctcaacatagcaggaaagttccctacacttgctactcaccaggaaactcttgagtcaaaggttaatgagtctacggccatggttaaatttcaactta

SEQ ID NO: 10057 - DNA, 539 bp, Glycine max
  Clone ID: jC-gmle01810044h09d1
gagtaaaaacaaaagcagcaccaaaaacagcgcatatcattatcaaatgtttttgaacatgaaaacgaaacactttaacataaaaatccatcccacaaaactgtaacaagatgataatttgtatctagctattaagattaatcaacatatcatgcacgatcacaatttcaccgaaataaaaaaagaaattcctcaaaagacacggtaacatttccccattgtactcttcagatacaagcacctaacattttgccagttctttttcaacaaagagacaaggaagttaacactcagttgaacattttggaagatttgcttttcctccatactaacattgcccacagctactcccatgcagagcactttcttaagttgaaatttaaccatggccttagactcattaacctttgactcaagagtttcctggtgagtaacaagtgtagggaactttcctgctttgttgagaccaggacccaaaagacgaggaatctgcttaatgactgcttcagatgctaaaaaagcatgtattttttagctag

SEQ ID NO: 10058 - DNA, 592 bp, Glycine max
  Clone ID: jC-gmle01810044h10a1
cgaaaatgtggaagagaacgggttttgaagaagaagcagttcaattgatcaactcagatttcagggacctaagtctagctgctaatagactcgcccatcatgccatcaaacttggtggcattggctttggagcctcttttttcggattgtttgctgccattgctgctatttatctgttgattttggatcgtacaaactggaaaacaaatattctcacagcactactcattccatacattttcttcagcttgccttcattaattttcgacgtcttcaggggagagcttggaaaatggattgctgcagttgctgttgtattacgccttttccttccaagacacttccctgattggctggaattgcctggtgctctgattcttcttatcgttgtagctccttctctaattgcaagcacctttagagacaacattgttggggtggtagtgtgcctcatcattgcatgttatttgctgcaagaacacattcgggcttctggtggtttcagaaactccttcactaaagctcacggcatatcaaattccattggcataatacttctgttgtttatcccatctgggcgctggtggtcata

SEQ ID NO: 10059 - DNA, 359 bp, Glycine max
  Clone ID: jC-gmle01810044h10d1
aaaaaaccagaaaggcccactaaaaaagggggaaccccttttaaagggggttttctttggagggtccgaaaaccccgggggggttggcccatttgggatattggggtttcatggtcaaagggaaatttggtggagttgctaggaaagcatttggggggaacaaaaggggggtataatcccgggccgcccccaaggggaattttttttttttcccccggggaaaaaaaccacgatttccccaaatattcctggtttttgaatccccccccggttgaaagaccccccataaaaccccttaaattttgggtttccaccctctttgaaacccgggggcttaaacggggatttttttccccttt

SEQ ID NO: 10060 - DNA, 534 bp, Glycine max
  Clone ID: jC-gmle01810044h11a1
cggagaaagctcttagggatctcaatacaattcttggtactgaaaggaagaatgaggactccagtaaggcatgtttatccaagccttctgttgataatgctgatgaaaatattgaagaatggcaaaagaaaaagaacagttcctccttggtttctccagctgttaatggaaatcaggctgtgactgctaattccagtgcagaggttgtaaatgcagaagtagaatatattgaatctgagaacttgaatgatgtagacgatgctgatacttgtctcaagactctcttggctggacttgactcaaaggattgggtcctggtttgtgacacactgaataacgtacgtcgattgtctatatttcataaggaagcaatgcttgatgtgctgggggatgtgatcacatctattgcaaagtccctgaaaagtcctagaagtgctgcttgcaaaactgccattatgacatctgcagacattttcagtgcatataatgatcgtatactagattcattggaccctctcctagtacaacttcttc

SEQ ID NO: 10061 - DNA, 462 bp, Glycine max
  Clone ID: jC-gmle01810044h11d1
aaccacaaatagggggaaaataatagaatacacattataaatcttgggctcaattgtcgaactgtatttacagaagaaaatgataagcaaaccaggaaacgatgaagtccgctaagtgaagtaaaaatgtgcgtgttatgaaacaagaccctcccgagcgatactggtcacacgaagtacagcttgagcacttagtggagaaagctttgactgacagaagctttcccaagatctcacctctgaatcctcattcacagaatcaccattcacagtatgctcattgacattattatgatcattattgacaggagtagctggcatgagatcatgagaagatttctcatacacattttgaagctcaagaagtagagttcgggctgctttcctggactcagggagctggtcactcaactgagatgcagctacttggatcaatttgtcatcccatatgtgtttatgcct

SEQ ID NO: 10062 - DNA, 515 bp, Glycine max
  Clone ID: jC-gmle01810044h12a1
tcctcatccaccttcgttagatttccccctcaacattttttgtttttctctccatcccaattatcgccacctcctctttcttcaaatttcaatctcagaggatgggtggtgaggaattgtgtttgatggagaactcagggaaagggaagaggctgtggaagaaggtgaagtaccagctggtggagtaccactccttgcccggttatttgagagacaacgagtacattctcggtcactatcgatccgaatggcccatcaggcaggttttgttgagcgcattcaccatccacaacgaaactctcaacgtttggacgcatttgatcgggttcttcatatttctggcattgaccatatacactgccatgaatcttaattcgctacagcagtttcctgacatgctcaagaaggccgacctgcacacattacaatcagaaatcttgacgtgtctcccttccatgcctgatttgcacatactcagggagggaatctcaagtcggcatattaaagaatatctg

SEQ ID NO: 10063 - DNA, 512 bp, Glycine max
  Clone ID: jC-gmle01810044h12d1
gcataacatccacatgatttttaattaaaaataaaaaatacacaattttgttgcaggaatgagagggcaacccttgggactataatcttgagaagccacttcggcttccaaaatagtatcccgacttccagagcaaaacacaaggctaataatacaacttgaataacaagatacatgcaggcagaagaaaaatgtttctagtatgtcacgatagaccaaataaaatttttattgctgactagtgacttgtgtgctaagggttctaagtgcgtacataatccctatggctgcataaacatcccctaccggaatcacaaattcacatcagttggaggagtgtatactagcacatacttactagttacataacagcagagtattcaaccactgttcgttcatagatgcatatcaaatcaacaaccttgaaggtcacgccacctgagataaactaaccctgcccgattatgagcgtatgccccagccaccaccaatatatgaaacaattggtgact

SEQ ID NO: 10064 - DNA, 478 bp, Glycine max
  Clone ID: jC-gmle01810045a01a1
gttcaactggggtgatggctttgtttttgccttctaccgcccaagtgaagacccttattggtgtattcaaataactccacagaacttatcaggtagcttttctttgaagagaaaagatagtgacacaacagtagagagacgagtttattgctgtgccgatgctcaatcaccaccaccagcatggccaggaacagctattcccgagccttttgatttcaagacatgggatgggcaaaaacctagttctgtcttaggatctacgggttcaattggaacttagacactgagtatagtggctgagttcccagaaagatttaaagatgggagccttgctgctggctataatattactcttgttgctgaccagattaaaacatttaagcctgaagttgttggtcttagaaatgagtctttaattgatgaactcaaagaggctttggctgatgtggatcacaaaccccgaaatcattcctggaga

SEQ ID NO: 10065 - DNA, 325 bp, Glycine max
  Clone ID: jC-gmle01810045a01d1
gacaaaaggactttactgtgaaaagtatttttcacctgaaaagcaaacatgccctgaggcacatagccactatattgcaattgatctgaactaataaatagcatcgccttaaatatgcattacatttaattcctacatataaactacttcctctatactaggggtatctctgcatacaccacaaacatggatcctatgactatgaatcattttgacgggggaaaatactatttctctccttggttctgacccatcgaattgaaactagcaagtagcaactgatgcccttaatctgttcaatcaaaattcaggatcaaggatagtt

SEQ ID NO: 10066 - DNA, 607 bp, Glycine max
  unsure at all n locations
  Clone ID: jC-gmle01810045a02a1
gttcaactgaggtgatggctttgaatttgccttctcccgcccaagtgaagcccttattgttctcttcaaataactccacaaaacttccaggtagcttttctttgaagagaaaagatagtgacacaacagtagagagacgagtttattgctctgccgctgctcaatcaccaccaccagcatggccaggaacagctattcccgagccttctgatttcaagacatgggatgggcaaaaacctatttctgtcttaggatctacgggttcaattggaactcagacactgagtatagtggctgagttcccagaaagatttaaagttgtgagccttgctgctggctctaatattactcttcttgctgaccagattaaaacatttaagcctgaagttgttggtcttagaaatgagtctntaattgatgaactcaaagaggctttggctgatgtggatcacaaacccgaaatcatccctggagagcaaggagtcattgaggccgctcgtcaccctgatgccaccactggtagtacaggcatagttggtgtgcaggataaaagccacagttgcagcattgaagcagggaagacatagcatggccacaaaagacatga

SEQ ID NO: 10067 - DNA, 333 bp, Glycine max
  Clone ID: jC-gmle01810045a02d1
cggcccaaaaaaaaaaatttgggggggctttccttccttgaaccactggccccctccaaaacggggcccggggttaaaaaaaaagccccttcaaaaaaatcattttttttttggggttccccaaggggcccctttcttttctaaaaaaaacaagaggggttccaaaaaaactttttcccccaccccatcctaaaaaaaaaaaaagacccccttttttttttttttttaaaaaaccttttgaccccgggccccccccctttttttggggttaaaaaacccccccctttttgttgaagagccgtccggaaaaaaccctctttattacccccccac

SEQ ID NO: 10068 - DNA, 488 bp, Glycine max
  Clone ID: jC-gmle01810045a03a1
ggagatattcatgcaataactgcagcaaacaatcttctagctgctgcaattgatacccgaattttccatgagtcaacacagtcagataaggctctttttaaccgtttgtgccctccaaataaagaagggaaaaggagctttagtgatgtcatgttcaggcgtcttaagaagcttggtatttcaaagatcaatccagatgatcttacaccagatgaagtaaataaatttgctaggcttgatattgaccccaattctatcacatggaggagagtaatggacatcaatgaccgattcttgagaaaaattactattggccagggacctgacgagaaaggaatggtgagagaaacaggctttgatatttcagttgctagtgagataatggctgttttggcactgacaacatccttagctgatatgcgagagaggcttgggaaaatggttattgagaatagcaggagtggtgaccctgttactgctgatgatct

SEQ ID NO: 10069 - DNA, 536 bp, Glycine max
  unsure at all n locations
  Clone ID: jC-gmle01810045a03d1
ctcagccaatattttgactttgagggatgataaagcttatgtaggctacacttcacgttgtagctgcgtgaaggtgcagggccattaaaggaatgggtttcacttgtatgtgatggagacaaacaccccagaatacgtactgctcgtcctcttaatactttacaatatgaaggaacaagaaagagacgtagagctgctatgggagattatgcatggtctgttggggatagagttgatgcatggatacaagaaagctggtgggaaggagtcatcacagcgaagaataaaaaagatgaaacaacatttactgttcactttcctgctagtggagaaacgttggttgttagagcttggcatctccgtccatcccttatctggaaggatgggaaatggattgaatcttccaaagtgggggcaaatgacagttctacccatgagggtgatacaccaatcgaaaaacgacctaaattgggtagtcatgcggtagatgtaaaagggaaagacangatgtcaaaaggcagtgatgcctgggagtc

SEQ ID NO: 10070 - DNA, 399 bp, Glycine max
  Clone ID: jC-gmle01810045a04a1
tattgccccacttgttaaggtttcaggttttaagacagtattccgccagaatgccgatccaagaaaggtcaagaatatttcaaaggcggagatgtttcgtttctcccaccaggtaccttcacactggcttactggtgtagagggtcacaatgctccgaaaggttgcttggagcttgatcctgctgctactccgatggaacttcttcaggtgttagccgaggatctggagcaagtaattctaatgacaactgaaaaatctgtggaagatgaattgaagcacaaagagaattccagggaggagggtttgatcaagatgtgccagacaactaaggacgaatgttctgatgaaaggtgggagaaaaaaaaaggaagtctgagagctgcctgacaactaaaaag

SEQ ID NO: 10071 - DNA, 461 bp, Glycine max
  Clone ID: jC-gmle01810045a04d1
tgaacttgggataacaataattgcatattcaccaattgctcaaggtgctctcactggaaagtatactcctgataaaccaccaagtgggccaaggggcagaatttatactccagaattcctaacaaagctccaacctttgctgaacaagatcagtgaaataggggagaagtatgataaaactccaacacaggtatccctgaactggctggtagcacaagtcaatgttgtgccaattccaggagccaagacagcagaacaagctgaggaattcagaggtgcacttggctggagactaactgatgaagaggtagctgagctgcgtagtgtggcttcagaaattaaacctgttataggttttccagttgaaaaactctagaatatagcatgcaccttctaaatcaaatgtaaagatgtatctgtttatggatatagctcttgttattattaattatttattttgc

SEQ ID NO: 10072 - DNA, 509 bp, Glycine max
  Clone ID: jC-gmle01810045a05d1
ctggaacagctaatcatattcattctcgacgaccccagcgtgagcagggtcatgagagaagccaggttctcaagccccgccgtcaaagccaccatcgaacagtccctcaacgccgtcccctccaccgtttattcccgattgagattccggccaagcgcggtggctccggtgaattccgccccggggcggaatttgtatctgaacccgcgcctgcaacaacagcagcagcaggggagtactgcacaacacaggggcgacgaagttaaacgaattttggatattttgctgaggacgaagaagaggaacccgatcttggtgggggaatcggagcctgaggcggcgatcaaggaggtgataaagaagattgagaacaaggaattgggagaaggggctttcgcgaatgctcacgtgattcatctggaaaaggagctttcgagtgataaggcgcagatacctgcgaggttgaaggagttggtggatttgattgagaccaggatcgggaattctgg

SEQ ID NO: 10073 - DNA, 442 bp, Glycine max
  Clone ID: jC-gmle01810045a06a1
gttcccattgttcacatgggaactgggcacggactgcacagggaacatgtgcgcactgggagcttgtactttgccaagatgggaatcaaccccatcatgattagtgctggagagttggaaagtggaaatgcaggacagccagctcaactgatcaggcatcatataccgtgaagctgcacacatgatcaagaagggaaagatgtgcgctctcttcatcaacgatcttgacgcaggagctggacgtcttggtggaaccacacaatacactgtgaacaaccagatggtgaatgcctctctcatgaacattgctgataaccccaccgatgtgcagcttccaggtatgtacaacaaggaagagaacccccgtgttcccatcattgtcaccgggaacgatttctcaacactctatgcacctatcattcgtgatgggcgtatggagaag

SEQ ID NO: 10074 - DNA, 515 bp, Glycine max
  Clone ID: jC-gmle01810045a06d1
aggacaaaaggaaaaggcaccaaattcaatttaaggggacactgtaactcaaaattatagaggaagacggtccaatatgaaaaatatagtaagatcatctcaaacttagcatcttctctttgcacctaagacattgagaatgctaagaatgttacacgcaagttccatcacaacttctagcacttggattagtacaacaaccttcacgaacagaaatatttacttgccaagtttgctttgcctccaattcaagactggaagaaagttcccctctgaatagcatcctcgttagcatttccaagagcagcctcgttcaagtacttgtcagccaattggactctcttgacattctcttgttcttggacaagcatgttaccatacagcaagagcttctccagagtcatcttgggctgctcaaaggttggaggtccatcttttgagttcacaagcttcttcccaacactgtcaacaccaacaccagaaatccacttcctcacttcatcatcatatactct

SEQ ID NO: 10075 - DNA, 283 bp, Glycine max
  Clone ID: jC-gmle01810045a07a1
cagatgagcactgtcaggattttttgtatcaaatcctccgtgggttgaagtacatacagttctgctaatgttctgcatagggacttaaaaccgagcaaccttctgctaaatgccaactgcgagttaaaaattagggattttggactggctcgtgtgacctatgaaactgattttttgactgaatatgttgatacgagagaggtccgtgcaccggagcttctgttgaactcttgtgactacactgcagcaattgacgtatggtctgctgggtgcattctcatgg

SEQ ID NO: 10076 - DNA, 321 bp, Glycine max
  Clone ID: jC-gmle01810045a07d1
aagagggggggggagccaatgaattggacaataatttgaagcaaaaagccaatacaaataccttttgattgtttcagtctaccaattatgcctttgatggaaataattcaactccaaaaacacctgggttcagatgatagattttttttccccatgaaattttttgatctatgggcacaaacattacacgatccaaattcaatgataacaaggctatcactactggtgatactcgagggtaaatgctaaagcctctcgggatatcaatttttttatttgttcctcaaacaaagcatgttgttcaaagtcaaagctgaaggg

SEQ ID NO: 10077 - DNA, 460 bp, Glycine max
  Clone ID: jC-gmle01810045a08a1
actatctatcatgtaaaaagcctcttgcagaagtatagaactgccagatacaaaccagagccatcagaaggaacgtctgagaaaaaggtgactccaatggaagaaatgaaatctctagacttgaaaacgagtaaggggatcactgaagcattacgtttacagatggaacttcagaagcgacttcacgaacaacttgagatccaaagaaagttgcagattcaaattgaagaccaagggaaacgtcttcagatgatgtttgagaaacagagagagatgggtgacagcaaggttaacgtctccttggacgagccttctgctgctgcaccatcagaaacagtagaaaccacatatgaggaacgccacatatttgaaagcatttcacaagccatacccgaagagaaggagtcaagcacaacaaaacaaattgctggtgaagctgaagaaatgatcaatgaagatg

SEQ ID NO: 10078 - DNA, 461 bp, Glycine max
  Clone ID: jC-gmle01810045a08d1
ggatccaataatatttctacaagttccatggagtccaaaccagtggaagaatattaaacaaatctagaaggcataaaacaacgatcctgctgttacgaacttttcacccgttttgtgggtggagcaacttcatcttacttgatcatttcttcagcttcacctgcaatgtgattcgtggtgcttgactccttctattcgggtatggcttttggaatgctttcaaatttgtggcgttcctcatctggggggtctactgtttctgatggtgcagcaacagaaggctcgtccaaggagacgttaaccttgctgacacccatatatgtctgtttttcaaacatcatctgaagacgttggccttggtcttcaattcgaatctgcaactttctttggatctcaagttgttcgcgaagatgcttctggagttccatctggaaacgaaatgcttcagtgatccccttact

SEQ ID NO: 10079 - DNA, 435 bp, Glycine max
  Clone ID: jC-gmle01810045a09a1
gtggtgtttcatttgtgaaacttacaacaacacaaggccatcatcatggcagctgctgccccaatggcaagccaactcaagtccaccttcactaggactcttgtagctcccaagggcctctctgcctcttcaccacttcacctcgtgccttctagaaggcaatttagcttcactgttaaggccatccaatcagagaagccaacctatcaagtgattcagccaatcaacggtgacccattcattggaagcctggaaaccccagttacatccagccctttgatcgcatggtacttgtccaacctgcccgcatacagaaccgcagtgagcccactactaagagggatcgaggtgggcctggcccacggataccttttggtgggcccattcgtgaaggccgggcctattaggaacaccgagatcgccgggcaagcgggc

SEQ ID NO: 10080 - DNA, 405 bp, Glycine max
  Clone ID: jC-gmle01810045a09d1
ggagagaggaatgaacattataacatgttgagagtcatacaatacatcatgtacatccatctctattgcacaaatagtccattcatggagaatgaataagaaaaagtaaagaaagctagtaagcacattcatcatttgatgtagtatggaaggtccaagacgtagaggaggaagtaggcccaaataacacccgaaatgcctccgaagaagaagcctccggtgaacttggcccacccatcagcagtttggagctgatcgggctccttcttgcggcccgtcaaggtcagcgacggagcagtggatggggctccttcgttgaaggatgaaatcccatagattgtgaggcaaaggctgaggatcaccacaagcccaccggcggccagagagcccgcttgcccggcgatc

SEQ ID NO: 10081 - DNA, 489 bp, Glycine max
  Clone ID: jC-gmle01810045a10a1
gaaagaagatttcatcattttgcatttatgctggtatgtactattgaattgtaatctatatttatagaccctttaaatattatgaccatgttgttttctattaaggacagtttttttatttttgtccagatccaatcagccataccaacataatttaccttgttattatagtgataaacagaaatgtgactaaattgcaggtacttgtctgaagatagcatatatctttttctaaaagcagataaaaatagacattgaattgcgggtttaacagattaagcagctgctccaacagctacaccacccttgagcctggatttaccatacagggtttcttcaaaccggattatctcattcttggacccataagcaacttgagttctgtcatcaatgttactgatgactttgtctagcacagactgatgaccatcactgctgtaacctccagctttttcaatcaagaaccccaaaggagctacctcaaacaac

SEQ ID NO: 10082 - DNA, 449 bp, Glycine max
  Clone ID: jC-gmle01810045a10d1
agggggaaaactgattttattggacaaaacatgcttacaaaaatatgattgagaataaaggtcaatggatcttgaaattacaaagcatctgccatcaaccagaaatcctctcctgactgtgaaatacaagtatttacatcctaataacaaaaggattgagcaattctatgatatctagcaagctataagaacaaatgcatagatgtatttacaactaagagaaaccataacttatctctataaaggaacagaatatttttttggctgcattcatgggcacactgtacaatagtaactgaaacttcatgttcttcacaaccttacctgtatttgatttcctcgtttcctaaccatgaaccattttaggacattgcatacctttctccatctcctctgtgcaccaccattggccgtaggacgtgccagcctgaagctatcaatagcaccct

SEQ ID NO: 10083 - DNA, 374 bp, Glycine max
  Clone ID: jC-gmle01810045a11a1
tttcttttttttttttaacgcttaaaatagatgctccactccaaaccgggaccaagggggcataacagataatttgaaactgaaaaacaccaccactcactacatgactaaagcaatcgggaataaacaaacaaaaacaaaaatcagccaatgactatcattgctttaacagctcttagaagcatcttcaagtgctgtagtcgatccatttccttctaacagcccttgtgtatttattcttccatctgctgcatttgcaggagcagattcattgatcaagggtgcatcaagagacttcggaaatgtaaccgccccaaatgtgaaatcactgggcttgctgaactgttttggtaactgctgttccttagactttt

SEQ ID NO: 10084 - DNA, 417 bp, Glycine max
  Clone ID: jC-gmle01810045a11d1
gcgagcaatgcgttttatcgatctgcatgcgcaacagcgctctggacatctgcaatatgtacacatcatgcagagcatcctcacttctggctgaccttctgcgtgagctcgggtgtcagctcaaacaggtcgccaacgagaccgacgtctgcgacttggaaaattggcgcatcgggatccttgttgatggcagcgatagtcttcgaatctttcatgccggcgagatgttggatagctccgctgactccgacagccaagtaaaggtcgggtgaaacgatcttgccagtctggccaacctgaagggagttgtctgcatagcctgaatcgactgccgcgcgcgacgcaccaatagcagcacctagagcgtctgccagaggttccatgatcttgtcaaaggtcttcttattcttgaggcct

SEQ ID NO: 10085 - DNA, 540 bp, Glycine max
  Clone ID: jC-gmle01810045a12a1
gtacaactgctgattttatatatcattttaacaagacttgcggagagatatatcccttaaagccaagagcacttatgtttcgatttgagacacctctatttattccacttacatttgaaaaataaaaatattacattcaccaaactgggaaatgggaaatatcaaaacgtatagaagtgagccgtggaaggaattgtaaacaagttatgacaaaaaccagaacctattcctttgtgcctattttaccagcttttcaagaatagtacaaaattaccaagaaaaaaaaatgatgcaacgtattttcaccacatttatttttctctctcatcaatgctggcttcttctgtttcgttgcataaaattgcagcaggattcggaggatctgatgctgatggctctgtctttctaacttgtaggccagtaaagcgcgctaggtcaatccattgctgggttccccaatatgaattgactgtccgtgctacaaaagaaagcatatttacaaagaatgtttgagaagcaaactgttcagaaatccgatgc

SEQ ID NO: 10086 - DNA, 415 bp, Glycine max
  Clone ID: jC-gmle01810045a12d1
gtaaaaagcaagttacattaagttggattcggatacgcccgattgtccacattatctgaagtacttcaccaaacacaaatctaaaaactctcaaaagtcatttcgttctttgacgctcactttccggggacgaagttggtggcataggcccaggcgttgttgttgacagggtcagcaaggtgatcggcgaggttctccaatggaccctttccggtgacaaaggcctgaacaaagaagccaaacatagagaacatgggcaatcggccgttcttgagttccttcaccttaagctcagcaaaagcctatgggtcatcagcaaggcccaatgggtcggagctgccacctgggtagattgggtcagtgacctcaccgagggggccaccagcaatacggtaaccttcaacggcacccatta

SEQ ID NO: 10087 - DNA, 364 bp, Glycine max
  Clone ID: jC-gmle01810045b01a1
ataacacaaagcacacagcaaatcttatgcttgagataaaaaatggcagcagctctcttgcatggctctctcatccccatccttggctggcaaagtcgtgaagctgggcccatcatccccatacactggacgggtgagcctgaggaataccgataaccaacacgtgttctgaggaaccccatggtacagaccataccagctcaagcacttggacccattctatggctagcccccggcctacctaaccggagaattgcccagcgactacgggtgggacactgttgatcttttcgcagacccagagaccttcgcccagaaccgcgacactgaagatgtccactctctgtgggccattctcgcagcc

SEQ ID NO: 10088 - DNA, 542 bp, Glycine max
  Clone ID: jC-gmle01810045b01d1
gccaaaaaggacaataaagtttctagccttattttatatattgctggattgatgtttttagctacattggtatgtgccagagataacatatataacaagtgtatgtattatagcataatccttagtttaggggcaaaaatgttcctccaacatgaaggttttaaaaacttgaccaagtcctttcccttgcacagaccataatatcactcatcaggatgaaagcactccatattgatcagtctgcttaggtagtgtagaagccaagaatttaccattggtacttagcagcaacaagaacctcctcatactgctgagcagcattggcccaactaagatcctgcgtcatccctcgccgttgaagcccttcccagctctgcttatactgcctgaaggtcaacaagcagttccctatcgcgtttattaacttgttagtttctgcactgtcaaatgtccatccaaggcctgactcttaaacggattaaaaggcttcacagtgtccctcagtccaccgacagcatgtacaactggaattgttccataat

SEQ ID NO: 10089 - DNA, 493 bp, Glycine max
  Clone ID: jC-gmle01810045b02d1
gtaaaaagcaagtaacgggaagttggatgcggatacacaagataattcacattatctgaagtacttcaccaaacacaaatctaaaaactctcaaaagtcatttcgttctttgacgctcactttccggggacgaagttggtggcataggcccaggcgttgttgttgacagggtcaacaaggtgatcggcgaggttctccaatggaccctttccggtgacaatggcctgaacaaagaagcctaacatagagaacatggccaatcgtccgttcttgagttccttcaccttaagctcagcaaaagcctctgggtcatcagcaaggcccaatgggtcgaagctgccacctgggtagattgggtcagtgacctcaccgagggggccaccagcaatacggtaaccttcaacggcacccattaggataacttgtgtggcccagatggcgaggatgctctgggcgtggatcacgcttgggttgcccaagtagtcgagcccac

SEQ ID NO: 10090 - DNA, 471 bp, Glycine max
  Clone ID: jC-gmle01810045b03a1
gcgctgtggtctcaaattttatgcatagtctctctgctgttatgcagcgattgtgcagcatcttttgccaaggagcaactaaaggaccgggttggtaggctcccaggtcaaggcttcaacatcagcttcgcacactatgctgggtacatcaccgtcaatgagaaagctgggagaacactcttctactggttcattgaggcacttgaagatcctcattctaagccccttgttttgcggctcaatggagggcctggatgttcgttcattgctttcggacagtcagaagaagttgggccttttcatataaattcagatagcaagacccttcatttcaatccctattcttggaaccgagttgccaacattatttttcttgacactcctgttggggttggattttcatattcgaataacacatccgacatgctgatcaatggcgatgagaggacagctgatgacaatttagtattt

SEQ ID NO: 10091 - DNA, 359 bp, Glycine max
  unsure at all n locations
  Clone ID: jC-gmle01810045b03d1
tgaagctgggcacttggttcctatggatcaaccaaaagctgcacttcagatgttcagaagctggatgggagggaatttgatctaacaaaaggagattagagataattaatgttcctcataatttttacatgaatagtgatcataattatttggggnctaaaaatntatgtctattttaaagtccaaccttgatttatcatagtcatttttgtcccactggttcttgttatatatgcactcgtcactcctcaagaggatgaacatatgtggaggatttcatctctgaaggcaccatatactgagagtttcttgcttccgatttcttatttgaaaaagtggaaagtatggtcatccaaata

SEQ ID NO: 10092 - DNA, 361 bp, Glycine max
  Clone ID: jC-gmle01810045b04a1
acgccaaattacccacacgcaaacgacaacaaccgcgcgcgtttcacaccttcataactcggagtagcatacgcagcgtcgttgactcgcaactcgtaacttggcctcgcgcgccgatggcgtcggtccccagcaccgtcgctccccgcacctttctgccgtcgattcccaagccgagagctcctcttcacgccgcgaaatccgtcgccagcgccgcgcgcaacttcccgagactttcgcacaacctcattctctccggaaacaaacgcgcggtggcggtgaactcggcgtcggaggagttcgacgtgatatcggtgcagagcgaggacattaccgaccagcaggagggcgtcgtggtgag

SEQ ID NO: 10093 - DNA, 439 bp, Glycine max
  Clone ID: jC-gmle01810045b04d1
gtggtactattggatctgccctgtggcgtggaccttgaatggattggtggcttcggaatatggagacaacagggacaaacttgagaatggtcaaagggttgaagaatttgtgaagagttattttgggtttgaacatgattttctaggggtagtggcatctgtggtggctggcttctcactattgtttgctttcatcttcgcctttggaatcaaagtactcaacttccaaaaacgatgaaatcatcccaatgattctcactctagagcttttatgcatccatttgaagcattgaataatttatatgaaaaatgcttagtggtgacgggtgaactaaatttacaattttctttttctttttttttattcattggaatcaaatttaagtatagaagtttactcccattcaaacttattattctacttattgagctggactcc

SEQ ID NO: 10094 - DNA, 287 bp, Glycine max
  Clone ID: jC-gmle01810045b05a1
ggaaaatgcatttctgataactgaagctgttagaggtgatgggggcatcctttataattttggcatggaaagattcatgcccttgcatgatgagagggcagaacttgctccaagggatgtggtggctagaagtattcacgaccaactttaaaagcgctatgagaagtatgtgcttctcgatataagtcacaaacccaaggaagaaattgctctcccattttcccaaccttgcttctacgtgtattcagtatggtttggacataactcctcgaacaatcccagctgtt

SEQ ID NO: 10095 - DNA, 514 bp, Glycine max
  Clone ID: jC-gmle01810045b05d1
tcctcatccaccttcgttagatttccccctcaacattttttgtttttctctccatggcaattatcgccacctcctctttcttcaaatttcaatctcagaggatgggtggtgaggaattgtgtttgatggaaaactcagggaaagggaagaggctgtggaagaaggtgaagtaccagctggtggagtaccactccttgcccggttatttgagagacaacgagtacattctcggtcactatcgatccgaatggcccatcaggcaggttttgttgagcgcattcaccatccacaacgaaactctcaacgtttggacgcatttgatcgggttcttcatatttctggcattgaccatatacactgccatgaatcttaattcgctacagcagtttcctgacatgctcaagaaggccgacctgcacaaattacaatcagaaatcttgacgtgtctcccttccatgcctgatttgcacatactcagggagggaatctcaaggtggcatattaaagaatatct

SEQ ID NO: 10096 - DNA, 515 bp, Glycine max
  unsure at all n locations
  Clone ID: jC-gmle01810045b06a1
ctccaaagttgaaccataattttaaatccaaccaagagacaccatgtcatcaagtgggaccatttggagctatgaggaagaaaaagcatttgagaatgccatagctatgcattggattgaggaatcctcaaaagagcaatgggagaaaattgcttcagcagttcccagcaaaagcatggaagatgtgaagcaacattaccaggttctagtagaggatgtaagtgcaatagaggcaggtcacatatcattcccaaactatgctgcttttgaggaaatcacatcttcaaataaggactttcatggctctttcaaggccacaagctcagataaaagatcaaattgtaattatggacgtggtttttctgggttaggacatgactccaccactcatagtagtgggtaaggaggcttgtcaaggtcatcacaacaagaaagaagaaaaggaatcccatggactgaagaggaacacacggtatttttacttggtctanagaagttggaaaaagagaatggag

SEQ ID NO: 10097 - DNA, 548 bp, Glycine max
  Clone ID: jC-gmle01810045b06d1
gggaaacataattaccacgacatctacgaaagcattcaaatgcagagtatgtattcatcatgtaaatacaacacaataacaagtcatccataagcagcatataggatttcttgagaggtacatataaagccagaagaaaaatatataagatacttttcttccacagtgtctctagtaaaaggaccctaaaaaaataaaatatgacatcatagggttcctgaaaccccactacaacatatttgtcagaatctagtgcccacttcaatctttctttttatctttcagaggtcctctgggtatcttgctcaataccttcgcatcaaacactgcatattgcttcttaatctcggcaattgctttctcaccaaaagagtcgacatgatcttcatatttctcataaagcacaggcacagtgtgaagcaaaacaaaagctatgtagaacaaggtcaagaagttggcccaacaacccagaatagagaaaacccataatccagcaatcactgataagaaacttctgagatcccttccagaaaagcatatccttaaca

SEQ ID NO: 10098 - DNA, 392 bp, Glycine max
  Clone ID: jC-gmle01810045b07a1
ttaacttcatcctcatacgaataataacaaataaataaaaggagggaaaaagaaaaacaaagaaaatctagtacttattgtgcttccgcaccaacagttgtgtgctagaagcctttgcagagtgcagctgcagctggttcaatgattcaaaaatgttcagctctttgattcggagcattcatcattgcccaaattgcaattttttcagaagaatagcaacaatttaggaagtttctgaagcaatagggagtggtggacacaggataggatcattggattatcagagaatttgatggtcatcatacacagcggctaggaaaggatataatggctactgatgcactaattggactcagcggaggaaagaggctcctgagttcatcataccatta

SEQ ID NO: 10099 - DNA, 501 bp, Glycine max
  Clone ID: jC-gmle01810045b07d1
attaaaacaaaaattacccatatttattggtactaaaaccatatttaaagggatttacaaatctccaatgttcccttatataattgtcctctttttgaatcaggaagtcaaatttctaggtacatacttcctctgtgtatatatacattgtaacatatttctatgatgagtccaaatttaatgtttcaatagcatggcttccatttgtctcttcctcgcagcatgttttagtttctccaatgcaacaagtccaacttgccttactctttctcttgacaaacctatccgtttactaatgtcttcccatgtaagaccttctttatccaatccataataaagtcgaataatttctctctctcgttccacaagggtcacattaatgagtttgctcacttcggcctttagtgcccactcgtctactccattccatgggatgttctccactcgatcattcgcaatataactatgatgagtttctccttgtataccattcagagaggg

SEQ ID NO: 10100 - DNA, 449 bp, Glycine max
  unsure at all n locations
  Clone ID: jC-gmle01810045b08a1
ttccattctctctgtgtattttcctacctctcccttcaagatgcagatcttcgtcaagaccctcaccggcaagaccatcacccttgaggtggaaagctctgacaccatcgacaacgtcaaggccaagatccaggacaaggaaggaatccccccggaccagcaacgtctcattttcgccggaaagcaacttgaggacggccgtacccttgctgactacaacattcagaaggagagtactcttcacctcgtcctccgtctccgtggtggcatgcagatcttcgttaagacactcaccggcgagaccataaccctagaggttgaaagctccgacaccatcgataacgtcaaggccaatatccaggacaaggagggtattcctcccgaccagcaacgttttatcttcgcccgaaagcaactcgaggacggncgcacccttcgcgactacaaca

SEQ ID NO: 10101 - DNA, 446 bp, Glycine max
  Clone ID: jC-gmle01810045b08d1
ggggggatattagagtactattattaatgggacacaattgagttcaacacaaaccgaacttattttcaagggacattattacagacccattaaacatcaaagttcttcaaatgttttgggaacacatccaacattacacaacgagcttaaaaccccccacggagacggaggacaaggtgaagggttgattccttctggatgttgtagtcagcgagggtccttccatcctcgagctgcttgccagcaaaaatcagcctctgctggtccggtgggatgccttccttgtcctgaatcttggccttcacattgtcaatggtgtcagagctctccacctcgagggtaatagtcttacccgtaagagtcttcacgaaaatctgcataccaccacgaagacgcaacaccaagtggagagttgactccttctggatgttgtagtcagcaagggt

SEQ ID NO: 10102 - DNA, 493 bp, Glycine max
  Clone ID: jC-gmle01810045b09a1
ggctggttcaactgaggtgatggctttgaatttgccttctcccgcccaagtgaagcccttatttttctcttcaaataactccacaaaacttccaggtagcttttctttgaagagaaaagatagtgacacaacagtagagagacgagtttattgctctgccgctgctcaatcaccaccaccagcatggccaggaacagctattcccgagccttctgatttcaagacatgggatgggcaaaaacctatttctgtcttaggatctacgggttcaattggaactcacacactgagtatagtggctgagttcccagaaagatttaaagttgtgagccttgctgctggctctaatattactcttcttgctgaccagattaaaacatttaagcctgaagttgttggtcttagaaatgagtctttaattgatgaactcaaagaggctttggctgatgtggatcacaaaccccgaatcatccctggagagcaaggagtcatt

SEQ ID NO: 10103 - DNA, 359 bp, Glycine max
  Clone ID: jC-gmle01810045b09d1
attaaaccccttattacacccaaaggcaataaaaacaccccccgagcaagatctcgaaggaaagagaaccaacgcagacctttacaaaaacagttcaaccttccccaaaaaggagcggctcccaacacacaaccctaaagcacacaaaatgggggaccaaatattgcgccttttggctcgctccaacaaaaaggcaaaccctctggagcacatcacaaaaatagcttggatgagagggaggaaggcctcccccccggtgcgccctccccgagaatgaaccaagaccgtgaaatcatcgagaaaaaaaaacttatgaaccaaaacaaaatacccatggtacgccggcctactaaaaagaa

SEQ ID NO: 10104 - DNA, 543 bp, Glycine max
  Clone ID: jC-gmle01810045b10a1
ttttttttttttttttttttttattatttatttttattttctttttgggtattattgtattttttttttttataaaatatctttattcttttatattactatttatattcacaatttttattattgttttaaacaaaaaaaaaaaaaaaaaatactctttaacaaaaaaaaaaaaaatttaaaaaccaaaaaaacacaaaaacaaaaaaaaaaaaacaaaaaaaaaaagagcaacaaaaaaaaaacccccttttctaagaaggacttagaccaaaaaaagaaaaaaccccccacaaccataaaaacacatgtataaaaaaaaaaaaatccaaaaaaaaaaaaaaattatacgcacaaaaaaaaaaaaataagccccccaaaaaatttgagcccaaaaataaaaaaaaaatacaaactaccccctgggtatcccaaaccccaacaaaaaaaaaaaaatctccccaacaaaaaataaaaaaaaaccccccttctttattggccccccccccgcatccgcccctccttatccaaagacactttttt

SEQ ID NO: 10105 - DNA, 471 bp, Glycine max
  Clone ID: jC-gmle01810045b10d1
gatcttgaattgtgtggctcaattgagttcaccagcaattaaaacattattgggcacattatttacaagaaaattacacaagtaccattcagatgtttaggtgaatgtgtactatttagctataaatacccctcacacacaagctgtccattcataagcagatactaagtttgaaactaaaactcgacgggaactacatttcatttgagacggggggccatgaaattatcattcgtctttctgatgcaaaacactaggcaggctattattaccattgagagcagcgtgatatattcgtttttcagctagcccaatatcagaaagtatcaaattaccctcagtagccatcaaccttctaacattattagcgtatagtttgggatcatccatctcctgctgtgaaggatggtaaacaggtaatcggatcacctccatataattcacaaactgacacaggagaaatatcacatg

SEQ ID NO: 10106 - DNA, 482 bp, Glycine max
  Clone ID: jC-gmle01810045b11a1
gtaaaaagcaagtaacattaagttggattgggatacacaagataattcacattatctgaagtacattgcaataacatatacttcaccaaacacaaatctaaaaactctcaaaagtccacaagtcatccttttctttcatgctcacttgccggggacgaagttggtggcgtaggcccaggcattgttgttgactgggtccgcaaggtgatcagcaaggttctccaatggacccttaccggtgacaatggcctgaacaaagaacccaaacatagagaacatggccaatctcccgttcttgagttccttcacattaagctcagcaaaagcctctgggtcatcagcaaggcccaatgggtcaaagctgccaccagggtagattgggtcagtgacctcaccgaggggcccaccagcaatacgataaccctcaacagcacccattaggataacttgggtggcccagatggcgaggatgctctgggcgt

SEQ ID NO: 10107 - DNA, 401 bp, Glycine max
  Clone ID: jC-gmle01810045b11d1
gcttgggcaaaacttagtttattgggctggggactgagcttacacaattatacttttggaaccctataatatttatatactagaagaaacagtagagcctaatctcagaaattagggcctctaatgcatttctcactttttacttccttttttacaaaacatgtttttgtagggcagtagcgactgccttccttccaagggataagtccttcttagggcagaaaccttatgacatgttgcatcagccaaatattaacatatattccaagggatcaacagctgctgcattgacagatgccagtgcattaggggggggctccatgaagaaaaggaaggagcttaaaacaatgatgaacattgtgaatatcaatagtgatttgcaagaatcaccatatttttta

SEQ ID NO: 10108 - DNA, 448 bp, Glycine max
  Clone ID: jC-gmle01810045b12a1
gacccgcgaaattatagctaattagctaaatatccattgaacactgtcatcaatccaaaataaaaaaaggagaaaaaaacatagccaaaaaaggcattagagacgctactaacaagaaacgcatcatatttaattttaatcaacctcctccatcttgctgccctcagcatcagcctcggcctcctccagtgggggcatttcagcatcagcttcacctgcatcctcgtcaatgctcagtccaagcttcaacattctgtggatcctgtttccaaaagtgttgggctcgtcaaggctgaaaccagaagtgagaagagcagtctcaaacagcaacagaacaaggtccttcacggatttgtcattcttgtctgcatcagcacgcttcctgagctcctccatgattgggttctcagggttgatctccatggtcttcttgcttgacatgtaccct

SEQ ID NO: 10109 - DNA, 463 bp, Glycine max
  Clone ID: jC-gmle01810045b12d1
aaaatcaagattgttccatatctgtgtatagaatgggatatatgtggtagaattcaatgggatgacttctttacattaactggtccgaatatcttacagccttaaacttctaatgatagcttcaattttttccaaaaatgattgaataaaatattaaattaaggttcaacatctaactttatgcacacggcacaaatccatatttcattcgacaacttagggaactcaagatattttcctaatcaaccaacattgtttccccatttgtagcctgaattgtggccttggtactctgtaggctcaagtgttttttcatttcctgagacctgacaaactcctcaattctagcttttagcgcatcatcgggaatcaacatatccccagtaagatgagaacggttgaatgggtcaggactaatccctaaaagatgcctctgaatgacaggacgatcaatcgtgatcct

SEQ ID NO: 10110 - DNA, 448 bp, Glycine max
  Clone ID: jC-gmle01810045c01a1
ggtcactatgtgtgctatgtgaagaatatccaaaacaagtggttcaaggttgatgacagtgtggtgacagctgttgaattggatagagtcttgacaaaaggagcatatatgcttttctatgcaaggtgctcgccaagggccccaagatttattaggaacagaatactgtccccagattcaaaacgtaaagtcagtggaaagactcttacaacgaaagcgagatctatatctacaaattctggagttgctgaacatgtgaacagttccatttctccagatgactcacctgccttggactttatgtattcaaaatttcaccacctgaaaaggattatggaagaagactcgtcaagagataattcatcccttatcagcagcaacttcgatgaacgttcttgtcgtacagatagcacccgtgattcaactagcacagatgacttctcttgat

SEQ ID NO: 10111 - DNA, 486 bp, Glycine max
  Clone ID: jC-gmle01810045c01d1
atgaacttgaacctttatttgttcaccggggttggagttcaaaactgcacaaaggagacttgatctcaaaaaatgagaaaaggaaaacaaaaatcacatttaaaggatgctcttctcttcactgttgcgtgctcttttcaataatagctattaacttcagcgatcaatgccttcaattttgtcttccacttctgaatacaactgcctgagcttctcaatattatcttctgaagtttcccaataaccacatccattggcttccaagaatgtctgcaccagtttcctgaaggagtttggattagtgctcatgagcttgatcagcatttgctcatcttgaatgaaagttgtgttggcttcttcatacacccaaatatcaacttggcctgaagttgcactccaccccactgtattggtgagaatcttatcgatctcgcgtacaccctcatatgcagtagacaacatgccttcataccactttggattaac

SEQ ID NO: 10112 - DNA, 476 bp, Glycine max
  unsure at all n locations
  Clone ID: jC-gmle01810045c02a1
ggggcagggagatcagatacgaacancaatnnnngagcacgcgtgcgcacgctcgtaatttgggtataggcctttcaatccaaacccatgctttgttccacatgaatacccttctgagtattactaaggaagcaatgatgggcactgagactggaatgctatttatataattatgaaccttgctggcaggacagcgtccagtgttgatagggataactgctttaacatagacgatcaggggtacggctatgcaccatatggtacatatgcttctaccgaattcttttatgccatgattcaacaggatggtcagcagtacaggctgcaacagtgccgagatgcattgctttattacaaatgttcaggttatggtgatgggtactaccctacccacagaatctgaactgcatagggagaaatctcaactcctgatgatgttgctgagtgcgaactataacacatgctatgaattaagg

SEQ ID NO: 10113 - DNA, 281 bp, Glycine max
  Clone ID: jC-gmle01810045c02d1
tgaagccggccttcttggttcctttggatcagactcaaaagctagcacttcactatgttacggaagcctcgagtggcgaagtaaatttatatctaacaaactgaaaatcaccgacactcactgcttctcataaagtcttacgtgaataagcgatcataattctttgggggccaatgactatcattgctttaacagctcttagaagcatcttcaagtgctgtagtcgatccattcccttctaacagcccttctgcattcattcttccatctgctgcatttgc

SEQ ID NO: 10114 - DNA, 483 bp, Glycine max
  Clone ID: jC-gmle01810045c03a1
cacacttttgtcaaggcataggattggtgaggtaaacttgaattgaagtgaagaaggagatggctgcaacctcttccttgtgctcatcgaccctccaatcccagatcaatggattcttccttcacaaaacctctctttcccatactccttccctcactttctccaggaggaaaatttcaaccacagtgaaggctacatctcgagtcgacaagttttcaaaaagcgatatcattgtctctccgtccattctttctgcaaacttttcaaaattgggagagcaggtgaaagcagtggaattggctggttgtgattggattcacgttgatgtaatggatggtcgctttgttccaaatattacaattggacctcttgtggttgatgcattgcgccctgtgacagatcttcctttggatgtacacctgatgattgtagagcctgaacaaagggtaccagattttattaaggcaggagctgatatagtca

SEQ ID NO: 10115 - DNA, 356 bp, Glycine max
  Clone ID: jC-gmle01810045c03d1
atactagtattgagtaattatggggcctatacgggtgatgattgagcctcacgcatggcttaattatataatatatgtgactttgaaactggcgcataagcaatgtcagccattattttacttgattgtttctcatactggcaaacaattttgcttatattcaaccacccaatcagtaaaacgatatgccaaaatttaatggagaaacctctatggggcaaaaaatacagcttacattggagcgtacggtgaatatggaaccacacaggcatttcacacagcaactacttcaggtcttttgctgggtttgattcctcttatagcttcggcataatctttagctccaaaaacagcag

SEQ ID NO: 10116 - DNA, 382 bp, Glycine max
  Clone ID: jC-gmle01810045c04a1
gacaccttgaagtcttacacgttgcattggccgcctcaaagatggcaggagtatgaacctattctgagctactgtcgcgaaaatggaattcatcttgttgcttgtggtacaccactgaagatcttaagaactgtccaagcagaaggaattcgtgggcttacaaaggatgaacgttaactatatgcacctccagctggttcaggctttatatctggctttacttctatctcacgcagatcttctgttgatagtactcaaaatctgtctattccttttggtccaagctcatacctttctgccaggctcgagtagttgatgagttttctatgtcccagattatcttacaaaatgtgcttgatggaggggtcactggtatgttaat

SEQ ID NO: 10117 - DNA, 524 bp, Glycine max
  Clone ID: jC-gmle01810045c04d1
agagtattcagtgtctcgtgttgaataatcaatggaagtaggaatgtctctgaacgcgctggttcggcttcctctctcgaattcacgcttccacgacgatgctgctccgatgattattaggcactctctgttttcgagccgaaagcaacagcagcagcagcagagttataaggttccacagcgtcatcaagtgttcgtggttgaagccaagggcaaaaagggaatgatgtctcgtcaatttcagcgcaatgctcctcctcctttacccaagattgaagacgatggcaatcccaaattcgtcatcttcattcgcatggccaatgtatacctttggtaccctcttagtatcgtatcaggcggcaccactgctaaaataatggttgcagctaaagataattttctcggcaagtatatctacaaagacactcttgatagaaatctcgctgctgttatctacagagatgagaaggaggtacagaaatctgcattcaaacagtaccgtgtattgcgaacagctactgatt

SEQ ID NO: 10118 - DNA, 465 bp, Glycine max
  Clone ID: jC-gmle01810045c05a1
ggaattttcttctacattgcaatagtccaacagaacacaatgctggtcttccaagcccttcaatccgacagacgcattctcagcaccaacttcaagatcctagcagcctcctacaccatcttccagatgctgagcctaaccatatggctacccatctacgaccgaatcctcgtgccgtcgctccaaagggtcaccaaaaaagagggtggcatcacagttcttcaaagaataggctttggcatgttcctctctatactatgcacaatggtgtctggtgtagtggaagaaagaagaaggacattggctttgaccaatcctattggattagagccaagagaaggtgccatttcttcaatgtcaggtctatgggtgggttctcagctaacactggcagggttatctgatgcattcgcgattgtgggacaagttgagttttttacaaacagtttccagaggacatgaaaa

SEQ ID NO: 10119 - DNA, 461 bp, Glycine max
  Clone ID: jC-gmle01810045c05d1
gtctctcaaatttgtttcattgcattgtattctagggaatacggggggagttcacataagacttgtttgttagaaatatgcctgacatagtattcctattctacagctgcaaactgtaaattatacaatttagcacatgcaaaatgaaagtgtgtgtactccatcttgtcgactgtgatcgaaaggtatgcaatgttggtgtcttggatattagaaacttctttgattgcgtctagtagaaaaaccagtgtcgtcttcatctttgatgaagggtttaaatctagcgaggccaccacttccactgtatgcttggcttctgtttgcagcttgatgatcggatggatctggattgccacaaatctcaagtttgattataaatgtagctgtgctttctttgtcaggaccctcactctcaatccatatgtggcctcccatgaggtttacaaatcttttacaaatgg

SEQ ID NO: 10120 - DNA, 397 bp, Glycine max
  Clone ID: jC-gmle01810045c06a1
atgttggttctctgtaaacagatactgcaaaagaagaataatattgaatatttggttgggttgaatccctgggttgaagcgttgcagacatcacggctattctaagagtgtctcgctctctcattcatgtcccaactgtacgacggaggacaggttgcgtaactgccaccaacccttcaccgcacggtgggcgtggagctttgccttctgaaggtggtagcccttcagacttgctctccttagctggaggtggttctgctgtcttctagcttcctcttaactctttttgctttttactacttttaagctacctcgttttcaaaataacaaaaacaaacactctcttacttcataagatcaccttttcttcatcttctacttctccttcactaaaacg

SEQ ID NO: 10121 - DNA, 511 bp, Glycine max
  Clone ID: jC-gmle01810045c06d1
aagtggacactttaactcaaaattatagaggaagacagtccaatatgaaaaatatagtaaaatcatctcaaacttggcatcttctctttgcacctaagacattgagaattctaagaatgttacacgcaagtcccatcacaacttctagcacttggatcagcacaaccttcaggaacagaaatatttacttgccaagtttgctttgcctccaattcaagattggaagaaagttcccctgttaatagcatcctcgttagcatttccaagtgcagcctcgttcaagtacttgtcagccaattggactctcttgacattctcttgttcttggacaagcatgttaccatacgtcaagagcttctccagagtcatcttgggctgctcaaaagttggaggtccatcttttgagttcacaagcttcttcccaatgccgtcaacaccaacaccagaaatccacttcctcacttcgtcatcatatactctggccctcagtgcaccaaagaaatcaatggat

SEQ ID NO: 10122 - DNA, 357 bp, Glycine max
  Clone ID: jC-gmle01810045c07a1
ggggtatagctcagccaatattatgactttgagggacgataaagcttatgtatgctacactttacttgtagctggtgaaagtgcaaggccattaaaggaacgcggctcatatgatcggatgggtacaaacaccccaaaatacggacccggttgaactctctagaacattgacaatatgaagaaacaagacacgagaccctgagctgttatgggagattatgcatggcctgggggcgatagagatgatgcctggatagcaagaaagcttgtgggaaggagtcgtcaccgcgattaataaaaaagatgagaccacaattactggacactctaccgctgatggagaaacgatgactgtga

SEQ ID NO: 10123 - DNA, 379 bp, Glycine max
  Clone ID: jC-gmle01810045c07d1
ggggcatgtagagcatcccgttagggtatcatttgaagaacaaacaaaccttttccaccaaggtaacatggagaatatcggttttcagcacagcctacgggtcaaatcacattcaaatttaaataaatactaaaaaatcaatatgaccgaccgtttactggactatagtccggctaaaacataggaagcaagaatttccattccattcctagggtgggtctctattataaatatacacatctatgcttgggatgtcgggcatttaaataacaggccgggcttttaactgtaccgcatgattgcaagctcccttccatttaactcttagtattacgattatgtgaaaccggaggaatctttgagatgatcaaagagctct

SEQ ID NO: 10124 - DNA, 442 bp, Glycine max
  Clone ID: jC-gmle01810045c08a1
gcatatccctacacaggaaaagatggtgtctgcaaattctcagctgaaaatgttgctgttcaagtccttgactctgtgaatatcaccttgggtgctgaagatgaactaaaacatgcagttgcatttgttcggccagttagtgtggcctttcaggtggtgaatgggttccatttctacgagaatggagttttcactagtgacacttgtggtagcacttcccaggatgtgaaccatgccgttcttgctgttggatatggagttgaaaatggtgtcccatattggctcataaaaaattcatggggagaaagctggggtgaaaatggctacttcaagatggaattggggaagaacatgtgtggtggtgcaacttgtgcatcttattcaattgtggcataaattgcataacaatatggtcccttgtgactaccaccttgtcatgctt

SEQ ID NO: 10125 - DNA, 456 bp, Glycine max
  Clone ID: jC-gmle01810045c08d1
agcaaagacaatgctatcttataactgatatttgaagcgggagcatcaatacaatacaatatgtaactatgaactatcaatatatgatcgttattatgtctgtgatacacacaattaaggccataatatacttatgtgatttacaacaacttctagcttattttatacatcatgccaacccaactaggagcaattttcatcatacaattacacttatctttaatcatcattcatcaatactggcatcagcaatacgctctaaactctgaagcatgacaaggtggtagtcaccagggaccatattgttatgcaatttatgccacaattggataagatgcacaagttgcaacaccacacatgttcttccccaattccatcttgaagtagccattttcaccccagctttctccccatgaattttttatgagccaatatgggacaccattttcaactcca

SEQ ID NO: 10126 - DNA, 490 bp, Glycine max
  Clone ID: jC-gmle01810045c09a1
ggcatgcatcactccattacctaataatggatatggaggaaatgttacagagtggcctttgcggcttcatcaaccaccagacaggcttcatagcatccaattggatgccattatatccagagatgaactcttgagggctgacacaaaatattggtttgaaataatagaaagttatgttcgggctttccgttggcaggactacaacctgagaaatgtaatggacatgagggcaggatttggaggagttgctgctgcgctgcatgatctccagatcgactgttgggttatgaatgttgttcctgtcagtgggtttaataccttgcctgttatatatgacccggggctgataggagttatgcatgattggtgtgaaccatttgatacataccccagaacatatgatctgctgcatgcagcaaggtttttctctgttgaaaaaaagaggtaaacgtgtacatctcaaccttatgcttgagatggatcggatgct

SEQ ID NO: 10127 - DNA, 525 bp, Glycine max
  Clone ID: jC-gmle01810045c09d1
ataatgctgtagagattgatacaaggcaagttctttaaagtgtttacaagaaaacctgttagtagggattcaacattgtaattaagactaccatttctggcaaatagcagaattttttatgggttagttttggccacatttctggcacaaaatgagatttctggtggagtaccatgttccggttgcatgagccaatatatggtgttctataagttacagacacaattgagcaattcagaaccctttatcagaccttaatatcttccagcttgaatagggaccctctcctacatcatttatggtatttgaccatcccagtgcagttgcaatttcttcaagctcacctataacatgtgtggtgtcacgtatatatacacgtcctcctggtcttagcatccgatccatctcaagcataatggttgagatgttacacttttacctctttttttcaacagagaaaagacctgctgcatgcagcagatcatatgttcttgggtatgtatcaaatggttcacaccaatcatg

SEQ ID NO: 10128 - DNA, 404 bp, Glycine max
  Clone ID: jC-gmle01810045c10a1
gacgggaaaattcatcaagcaatgttttgattcaaatggcccatgatgactgattgggcattgctacttcaacaaaactcaatacaatgctaaaggttttccggataaacaagagtaaaaaatggggacccgggttttttacccatttagaccattgaatcagaatcaaccccctggattagggattgctgcattatttgcaaaagcccgcaccagttgagatttaagaattgctccttcttggctagcttttttgcgttcacccctcactcggaagaactctttcttccttggtctataaatgtgggggttctcaggctgtacttcttgagggtaaacactcacctttttcctgtcagggccatatttctcaaattttacaactccctcaatcaaggagaaaa

SEQ ID NO: 10129 - DNA, 300 bp, Glycine max
  Clone ID: jC-gmle01810045c10d1
gggaatccagcccccccaaaatttatttttggctgcaaataatgttaaactttgaaaatttttccttaaaccccggttgaacgaacaatttccttttttttcacatgatacgttaacccaagggaaaaagtaaaaatggtttgctgctgggaatgggaatcatcaaatcaaaaaaaggggccctcctctattcatatactttgcattcctcatcaacagggtttgtctcgcaaaattcccccaagggggctccactccctgttttaactgcccctggccacttgcttgctactagggggg

SEQ ID NO: 10130 - DNA, 424 bp, Glycine max
  Clone ID: jC-gmle01810045c11a1
aaattcatcagaaaacccattatcaattggggggtggaagggagcaataaaaacttacaaacgacaaatcacatcacaaccaatattttggagaaaaaacagacaacccttgctttctcaaccaacaaacaaatgaaagagacggagctcatgaccaatcgctcttatccctttcttatatcttgtgaatagaccatagtaacatacacaccctccctccttgtagctaaccacattcttccgcttgtcttaaattaagtctatgcaaaaaaccttgacctaaacttggttgacactgaatacatgaatacctctgtgatcaaataatgctcccttgacagcttgtatccatgaagaataagtgccaaatccttggtcatattaccagactctactactacaatgcaagctgccttttgctttt

SEQ ID NO: 10131 - DNA, 490 bp, Glycine max
  unsure at all n locations
  Clone ID: jC-gmle01810045c11d1
aaaactagttaattgtaaataaatctaacacatcaattacttgtcaatcacaattttgaaccgttgattaaaaataaaggtgcactatatgatggtgatatagtggtgcaccacctattgtatggttcacccgatcattcactatagaaggaaaacaaaagaagacaaaactaaaaagaacaccacaagtttcagtgcatttttagctattcatagattagatttgatggctgacttagcagaaataacttccctcattacaccttcttgaaccacagacacaagatgctctcccttctgattgaacatttggccagtgacatagccgcgggcattattggcagtaggactaaagatcacaaatagtatccaatcatcagctcttaaaggtctgtgaaaccacatggagtggtccagactcacagcacgagccttccttcccttcctacggntggggttcaaactcacttgagggaagatagatctgatg

SEQ ID NO: 10132 - DNA, 534 bp, Glycine max
  Clone ID: jC-gmle01810045c12a1
aagttgaaaggcgttgatttatagtcataactaaagaagatgtgttgaacaattgccaataatagaacaaaaacaaatgaaagaatttactgtcatcaattcagtcaactgatttaacaacacatttttatcatataaaacgaggacaccgtattttctttcaccaagccaccttgcaacattcagaagcatttcctgtgtacaattgaaggaccagcctcatcatactcagcctttgcaatccacatctgttggaaagtgctgagagaagccaagatagagccaccaatccagacactgtactttctctcaggtggagcaaccaccttaatcttcatgctgcttggggccaaagctgagatttccttgctcattctgtcagcgatacctgggaacatggtagatccaccactgagaacaatgtttccatacaagtccttcctaatgtcgacatcacacttcatgattgaattgtaagtggtctcatgaatgccagaagctttcattccgatcatggatggttggaagagaact

SEQ ID NO: 10133 - DNA, 433 bp, Glycine max
  Clone ID: jC-gmle01810045c12d1
aaaactagttaattgtaaataaatctaacgcatcaattacttgtcaatcacaattttgaaccgttgattaaaaataaaggtgcactatatgatggtgatatagtggtgcaccacctattgtatggttcacccgatcattcactatagaaggaaaacaaaagaagacaaaactaaaaagaacaccacaagtttcagtgcatttttagctattcatagattagatttgatggctgacttagcagaaataacttccctcattacaccttcttgaaccacagacacaagatgctctcccttctgattgaacatttggccagtgacatagccgcgggcattattggcagtaggactaaagatcacaaatagtatccaatcatcagctcttaaaggttctgtgaaaccacatggagtggtccagacttacaagacgagc

SEQ ID NO: 10134 - DNA, 431 bp, Glycine max
  unsure at all n locations
  Clone ID: jC-gmle01810045d01a1
gccattcaaatcaaattcatgctttggtccaaagggatacccttctgcgtattatcatggaagatatgatgggcaaggtgattggaatgcttattgcaaaaatatgaaccttggtggagggatggctcatggggcttatggagataactgctcttatatgtaccatcaaggatttggttattcaccatatgggacatatgcttactcccaattactcttgttcgaggatacaacaggatggtcagcactgcgggctgccacagtaccaaaatacatgggcctattacaaatctacagcttctggtgatgagacaattactaccaacaaaatcggtctttcagaaggagaaatatcaactactggcgatgttgctgattgtgtnactgcgacagatgctatgaataaaagaaacaatgttaacgagggcgat

SEQ ID NO: 10135 - DNA, 467 bp, Glycine max
  Clone ID: jC-gmle01810045d01d1
atagggaagaactgggatttaggacgtcagatcggaaattatcccttcgacaatcataaaaaagcaagcaatacactgttcactttctcacaatcatttgatcaaacactacttatctttagtccacacacactacggttacggaaacatcaacagtttcatcatcattttcatcaattctgattttagcttccacacaagtcattactggtgggcacactgtaccctttgggcaccaccaggcatgtcatcatcctcatcatatgcctcctgagcttgggggtgcttcctcctaggctcctcctccatgttgacatcatggagggtgggttcctcacattcatccacctccatgtctgtcaattgtgaagaaggctttggtggcagaacagcttccaaggccttaacctggtcagggtttaaggaatctgggaactccacagtgaagtgaatgtgaagcttcccct

SEQ ID NO: 10136 - DNA, 381 bp, Glycine max
  Clone ID: jC-gmle01810045d02a1
ccgtactgatgtcccgcaacggtgtcaagtttggagaatctgtgtggctcaaggccgggtaccagatcttcagcgagggtgggctggactacttgggcaacccaagccttgtacacgcccagagcatcctctgcatatgggccacccaaggtatcctaacgggtgctgctgagggatatctgattgctggcgggcccctctgtgagggcactgacccaatctaccctgtgggcagcttttacccattgggccttgctgatgacccacaggctttagctgcgcttaatgtgaaagaactcaagaacgggagattggccatgttctctatggtggggttccttgttcaggccatagtcaccggtcagggtccattggagaacc

SEQ ID NO: 10137 - DNA, 448 bp, Glycine max
  Clone ID: jC-gmle01810045d02d1
cgggtcgagctcgcacctcatgttgctcgatttcatcaccaccgctgcgtagaacggtctttctttgttcgtctgtttcttgcttagaccatgtcgctcaagcgcccccccgatgatgggaaaactccagacgacaagcgtagaaagcctcctcctttctccagtgtggtgcgtgacgcgatgaagttacaagcactcgggcatttgctggagccaattctagagcccttggttcgtaaagtggttaaggaagaagttgaagccgccctaaagaggcatttaaccagcatgaaacagacctgtggaaaggagtttcatactactgaattaagaaatttgcagctgcagtttgaaaacagcatttgtcttgctgtctgtacaggagctcgcattgaaggagaggatggctccaacttaagaataagtttagttgatgccctaacaggga

SEQ ID NO: 10138 - DNA, 492 bp, Glycine max
  unsure at all n locations
  Clone ID: jC-gmle01810045d03a1
aaattggtgacagtctggaagaattcctcacaaaagcaacaccagataaggggttgatcaggttgttggtgtccatgggagaagcattaagaacaatttccttcaaagtgaagacggcttcttgtggtggaacacaatgtgttaatacttttggggacgagcagcttgcagtggatttgctagctaatcagcttctttttgaggccttaaattactctcatttctgcaagtatgcttgctctgaagaaaatcctgagctcctggacatgggaggtccagttgaaggtggatttagtgtcgcatttgatccccttgatggctccagcattgtggacacaaatttcacagtaggcaccatctttggtgtgtggcctggagataagttgactgggatcaccggaagagatcaagttgctgcagccatggngggtttgggtcctagaacaacatatgtgcttgctctaaaagacttccctggcacccatgaatttc

SEQ ID NO: 10139 - DNA, 250 bp, Glycine max
  unsure at all n locations
  Clone ID: jC-gmle01810045d03d1
gggtnttcgcccgtacgtctgaagatctggnnngaattaaccnccgggtcgcaatgctgctcgtgcccgccccgacttcttgatgttttttaaacgcttgaaactctttcatccgcaccaagggtgctgctggggctcaacgtggatattccacagaagctggctccatcaaaacgctcctgtttcttgagcaccgggacggccagaacaatccgggatccttgaacgctctttacgcctttaaaaagct

SEQ ID NO: 10140 - DNA, 578 bp, Glycine max
  unsure at all n locations
  Clone ID: jC-gmle01810045d04a1
gtacggaaacgatacaaagtagatggtcaggacatggaagtaacatatttccactcttatatcgatggtgttgacttcgtttttattgacagtccaaacttccgccatttacaggataacatatacaggggaagccgagaggatattctaaaacgcatggtgttgttttgcaaggcagctgctgaggttccttggcatgttccatgtggtggtgtttgctatggagatggaaatttggccttcatcgcaaatgattggcatactgctttgctgccagtgtatctgaaagcctattatcgtgaccatggtataatgaagtacacaagatctgttcttgtgattcataacatagcacaccagggtcggggccccgttgatgattttcgctacacggacttacctgaacactacatagaccttttcaaattatatgacccagttggaggtgagcacttcaatatctttgcagccggtttaaaggcagctgacccgattgtcactgtgagtcatggatatgcatgggagattaaaacttccgaaggtggtggggttngcatgggatcatatatgagaatgac

SEQ ID NO: 10141 - DNA, 526 bp, Glycine max
  Clone ID: jC-gmle01810045d04d1
tcataacacaaagcacaaagtttagctcatccttgagttaaaaaatggcagcagctggttccatgggtctctcatccccatccttggctggcaaggccgtgaagctgggcccatcagccccagaagtgggaagggtgagcatgaggaagaccgtcaccaagcaggtctcctcaggaagcccatggtacggcccagaccgagtcaagtacttgggcccattctctggcgagcccccgtcctacctaaccggtgagttcccaggcgactacggctgggacactgatgggctttccgcacacccagaaaccttcggcaagaaccgtgaactcgaagtgatccactccaggtgggccatgctcggagccttgggctgcgtcttcccggagttgctgtcccgcaacggggtgaagatcggagaagccgtgtggttcaaggccgggtcccaaatcttcagcgagggtgggctcgactacttgggcaacccaagcctgatccacgcgcagagcatccttggcatctgggccac

SEQ ID NO: 10142 - DNA, 477 bp, Glycine max
  unsure at all n locations
  Clone ID: jC-gmle01810045d05a1
tgaaccatgggctgacatactcgaanaccaatcnanaagtncgcatgcacacgcccggaagctgggtctagatatcacgtggcacagggccaagttcatccttgagtaaaaaaaagtgagaatggtattgcatggctgtctgatacccatccatgactggcaaggccatgaacctgggcccatcacccccggaagacaccatggacagcagtgaagaagaccgtctccaagcaagcctgctcaagaggcccatgggacagaccacaccgaggcaagtacttgggcccattctatggcgagccctcatcctacctaaccagtgagagcccaagcgactaccgataggacactgatgggctttgcgcatacccagaaacctacgccaagaaccgtgaactcgaagtgatccactccaggtgggccatgctctgagccttgggctgcgtcttcccggagttgctgtcccgcaacggggtg

SEQ ID NO: 10143 - DNA, 432 bp, Glycine max
  unsure at all n locations
  Clone ID: jC-gmle01810045d05d1
ctgaagctagaacttttattgaaacccttttaggagtacatagactttatatggctacccctttacattttacaagattgatgaaccaacaaatacatttacaaaatatgctagcagttgccaacaatccaccacagccccaacttctaaaatatgtcagaaatatgggattcaaacacttgaagctttttgcagactagcagcatattgtcgagcccattggtcatagtgaataatttcttcgagtgacggagatgctactaattccttttgatgttcctgacaagttagttccacaaccttgaatatatccagataactaatcttttcttcaacaaacatttctacagctttctcatttgctgcactaagaactcctgtcatggtgcctncagcacgttccgcagcatagcaaagattcaccgatggaaa

SEQ ID NO: 10144 - DNA, 410 bp, Glycine max
  Clone ID: jC-gmle01810045d06a1
cggctcgaggagactttgagtcttggcctctccactgcctccagaagctaccaatccaggctcaagtcacacttcgagctattcatcgattttgatgagggcaatggggacgaggagttgaggacggcttatccatgccctttttgcactgaggattttgatcttcttgagctatgttgccatattgacttggaccatcctgtagaagccaagtctgggatttgtcctgtttgtaccatgtggataggaacaaatatggttgatcatatagcactacaacacggaaacctgtttaagagtcagctcaaatcaaaatgctacaaggatgaatcctacccacctctttccttttcaagaaagggtgaacactggcaatcgttgttctactgggttatctgcgatgtctacct

SEQ ID NO: 10145 - DNA, 502 bp, Glycine max
  Clone ID: jC-gmle01810045d06d1
ctgaagctagaacttttattgaaacccttttaggagtacatatactttatatagctacccctttacattttacaagattgatgaaccaacaaatacatttacaaaatatgctagcagttgccaacaatccaccacagccccaacttctaaaatatgtcagaaatatgggattcaaacacttgaagctttttgcagactagcagcatattgtcgagcccattggtcatagtgaataatttcttcgagtgacggagatgctactaattccttttgatgttcctgacaagttagttccacaaccttgaatatatccagataactaatcttttcttcaacaaacatttctacagctttctcatttgctgcactaagaactcctgtcatggtgcctccagcacgtcccgcagcatagcaaagattcaccgatggaaacttcttgtcatccggtgcataaaatgttagagaaccatacttgctaagatcaagacgagggccagttact

SEQ ID NO: 10146 - DNA, 317 bp, Glycine max
  Clone ID: jC-gmle01810045d07a1
gtcttttttcactcttaagttctcgtttgcggtcttcggtttcctgaaactggggttttcaattaccatccattcgctaataattaaagatgtttgggagggcaccgaagaagaccgataatacgaggtactacgaaattgctctggtctggaagaacactacgcacgatgatctgaagaacgcttatagaaagccgtcatcaagaatcaccctgacaagggcggagatccctagaagtttaaagagctcgcacaagcatatgacgttctgactgaccctgagaagcgagagatatatgatcagtatggtgaagatg

SEQ ID NO: 10147 - DNA, 321 bp, Glycine max
  Clone ID: jC-gmle01810045d07d1
ctcttgttatggaaaagaaccactatgtacgccggggtatcggaaattttcccttgcacccctatagaaaagcatgctgtgcactgtctactttttcccaaacatttgaccaaacaccacttatttttaaccgctcacactacgggttgggaaacatgaacaggctcgcataatttacatgaattttgattctagcgtccaaccaaataattactggtgggcacactaggccctctggggcccacggggcctggtgcgaacctcatccttatccttgcgagatcgttgtttaccgctactacaaatccccatcatgtggac

SEQ ID NO: 10148 - DNA, 487 bp, Glycine max
  Clone ID: jC-gmle01810045d08a1
gaaattttaaaaatgactgggataaacttaagaattcaattattgaaattgaataagtaaacaatttaattggattggtcgaatggtatcaaaaaaatggagtactaactcccatttcttatttattattgaattaaccgatcaacttgctttgttatcgaacatttctttttgatttcaaaaattttccggaaaaaatttgaatctatttttatatgcgaatcaatcctactacttctggtcctgaggtttctgcgcttgaaaaaaaaaatctgggacgtatcgcccaaataattggtccggtactagatgtagcttttcccccaggtaagatgcctaatatttacaacgctctgatagttaagggtcgagatacttgtggtcaacatattaatgtgacttgtgaagtacagcaattattaggaaataatcgaattagagctgtagctatgagtgcgacagaaggtctaatgagaggaatggaagt

SEQ ID NO: 10149 - DNA, 314 bp, Glycine max
  Clone ID: jC-gmle01810045d08d1
gaatgatagggctacctctgggactttaatttttgagaagccactttttgtttcaaaatagtatcccgacttccagagcaaaacacaaggctaataatacaacttgaataacaagatacatgcaggcagaagaaaaatgtttctagtatgtcacgatagaccaaaaaaaaattttattgctgactagtgacttgtgtgctaagggttctaagagcgtacataatccctatggctggataaacatcccctaccggaatcacaaattcacatctgttggaggagtgtatactaacacatactttcttgtttcatta

SEQ ID NO: 10150 - DNA, 446 bp, Glycine max
  Clone ID: jC-gmle01810045d09a1
gttttaacaataatattactagtttcattgatagttgcattgagagtttcaatttaggtgatattgacaaatacaatgatatttatttttatagttacatttttttgaagggcagaaattgtagtgaaagcgataattctagtactagtataataactagtacgaatgatacaaatgatagtgattccactataggagaaagttctaataatctcgatgaaagtcaaaaatataagcatttgtggcttgaatgcgaaaattgttatggattaaattataaaaaattttttaaatcaaaaatgaatatttgtgaatactgtggatatcatttgaaaatgggcagttcagatagaatcgaacttttgattgattctggtacttggaatcctatggatgaagacatggtttctctggatcctattgaattcattccgagaggaacctat

SEQ ID NO: 10151 - DNA, 494 bp, Glycine max
  unsure at all n locations
  Clone ID: jC-gmle01810045d09d1
atattattatataaagatagtctataatcactagaatttctagatatttatacttagtatataataattctagtgattatagctaagccaatatatatcataatataatatacccttttcttattcaaagaatttatggctatgccttatcatttttagtcaaagaaaagaaattatggaattgaaataactcactcagaacgccctttaaaagattacgcggtacgattgaatcaaataagcccttatggaataaatattcagctgcttgtgaaccttcaggtactgccttattcaatgtttgttcaattactcttttaccagcaaatgcaatataagcatttggttcggcaataatgatatcccccaacatgccaaaactagcagttacccccccagtagtgggagatgtaagtatggatacatagaataactttttattntnttgataatcatataaagcagaagagattttagccatttggatcaagctc

SEQ ID NO: 10152 - DNA, 292 bp, Glycine max
  Clone ID: jC-gmle01810045d10d1
ctccaatcctctctcatattcaacaatctcaaatctatcttccccacacctttcttcctaccaaaccccaggggcccccaaaacaacccaacacccacaaaaaaaggattaccccccccaacattctcctccccccccaaaaggggccacttttcaacaacaacacaaaaaccccccccccccccacaaaaaaaacccttttttataaaaaaaaaaaaaaatggcggcatccaaaaaacccccccccttccaacaccgaaaaaaaaaatccctccctttcccaccacaaaaa

SEQ ID NO: 10153 - DNA, 394 bp, Glycine max
  Clone ID: jC-gmle01810045d11a1
tttttttttttttttttatatttatttttattttttttttttttttggttttttctagtttttttttttttttaaaatttattttttttataattttatactacatactaccactaatcatttcaattaaaaaccaaaatttcctaattacaaaaaaaacggaccataaaaaaaaaacacctaaaaccaaaaaaaaaaaagccaaaccccccaacccccttcaccaaaaaaaaagaacaaaaattaaaaaaaacaaaaaaaaaaaaaaacccccaacaaaaaaaaaacctcaccctttaaaaaaaaaaaaaaagattggccttaaaaaaacacaccccataaaaatacaaaaaaaaaaacacgctgtatatacacaaaaaaaaaaattctcctc

SEQ ID NO: 10154 - DNA, 399 bp, Glycine max
  Clone ID: jC-gmle01810045d12a1
agggtcttgaggggaaaaattggtaacccctttgattaaattggaaaacagcaaacccccaaaactgggttccaactacaaagaaacattacaatcaatttgggcttaaacaggggcagctgatttagggtatcctctaaagaactgggggggtttgggtgaggagaaaacactatctggggtctctaatctattaacacttttaacacaaaaactcgaactatttatgttggccccctcaaatggttacaagaaccttttgaccattgacacaactgttaaaaatctttggggtcataaattgctttttgatcccaaaggagcccaagacaaattgggatgtacactggtaccaacattggctagatatcaaaactgacaaaaagcagccccttatta

SEQ ID NO: 10155 - DNA, 393 bp, Glycine max
  Clone ID: jC-gmle01810045d12d1
gcaagccgaattccagcactgttaagaacaaaaggaagcaagcttggtgtgatacatcaatcaccatctttattgtgagtcatatacaaagattgatgatgggctagcttcctttgatgccaagaagctaattttcttcctttcacctgaatcaagcccttgtgatacatgcatcaatacacataaaatgtaacgtgcctaggctagatcactataagttgtattattacatacacaaggaggagactccagaacctgtattataatacaccctaatcttccaatcagcctcaatcatttcgaatgagaagagaggctgagtttacaaggaagaagaattaatatgggttttgctacccttaacaaccaattacaactcaattgcaaccaatc

SEQ ID NO: 10156 - DNA, 504 bp, Glycine max
  Clone ID: jC-gmle01810045e01a1
gcgacaaggcttcaacgctggggttataataaccttaaccttggtcgctgactttctctctctggggatggaacaaactagaagtggcaagagaagcttcaaatcacattcatctaccctaccttaaccataaccaaatcccaaatattaaccccccctttttttaatgttgaagtaaggaactaatttgaagggtggtggtgattaggttattagcccttagggtttataaatgatgagtacctcttcttattctgtcttcacccgttcctttctccccaatccaattaagggtatccaccgaccagctacacttcgaccttttcctgggatcttggaatctcatgccaagtctacaaagaacagattgagtattttgtgctttaggcacgaccatcattctacagaaacaccccaacctgaagttatcgagcactatcttcatgaggaattggtgcaatctgaattcaatgactccagtgtcaccaaaagagactggaaatc

SEQ ID NO: 10157 - DNA, 535 bp, Glycine max
  Clone ID: jC-gmle01810045e01d1
atatatatataatgtatttagctggttttgggcaaaacttggattgatagaaatcacaactgctttacaatatgggggaatagaattgacaggctacaaggtgatacagagtaaagggctttatcttgaattaaacttgtcctgatactccaaaagattatacacaaactacgcatcacagcagcagccttacttggactgatttcttatagttatttccagagaaaagcaaattgccagtggtgacagcaggccaggcaacataatggtgctcgataggccactaattcatgagtactgtgttggagcatacggtgaatattgaaccacatgggcatttcacacagcaactgcttcaggtcttttgctggttttgattcctcttatagcttcggcataatctttagctccaaacacagcagagcctgcaaccagagcattggctccagcctcaatcaccttgtaagcatttgctggaccaactccaccatctacttcaatccatggattcactcccttttccgcgcacactctt

SEQ ID NO: 10158 - DNA, 453 bp, Glycine max
  Clone ID: jC-gmle01810045e02a1
gaaatatttgttggatttcaaatttcttcctttagaaggcttctaaaagtcaagactggggaggatgtgcttatcaccataagttggtcatacacaatcctcttgcaaatttcaagcatcggtttggtggtcactattgacattggtggtataaagttggggccattttcttgctgccttttataagtcgctgctttttgtgagttttgatatctagactatgatggttccagagtacatcactatttgtcttggtttgctctggaatctaaaagcaatttatgagaccaaggatttttaatagttgcgtcaattgtcaaaaggatcttgtgaacatttcaggggatcaatatagatagttcgagtttttgtgttaagagtgttgatagattagagaacacagatagcgatttcttcttacccaaacccccccaattgtttagaggatacact

SEQ ID NO: 10159 - DNA, 533 bp, Glycine max
  Clone ID: jC-gmle01810045e02d1
agccgccgaacggcaacggcaacagcgttcgcgatgaccgtcctctgctgaagccggagcctccggtctccgccgacagcatcgccgatatggagaagaagttcgccgcttacgtccgccgcgacgtgtacggcaccatgggacgcggcgagttgcctcccaaggagaagctcttgctcggtttcgcgttggtcactcttctccccattcgagtcgttctcgccgtcaccatattgctcttttattacttaatttgtagggtttgcactctcttctctgcgcccactggcgaagaggaacaggaagattacgctcacatgagtgggtggaggagaaccattattgtttcgtgtggacgcgccctctccagactcatgcttttcattttcggcttttattggatccccgaatcgaactctgcctctcaggaagacaagagtcggcagcccgaagagttgaggagacctggcgtaataatttctaatcatgtgtcgtacttggatattttgtatcacatgtcttcctcattccct

SEQ ID NO: 10160 - DNA, 570 bp, Glycine max
  Clone ID: jC-gmle01810045e03a1
gtttatttcatggccggcctcagactcagtgttgcaccatttttcctcacggttctcactgttttcctctgcattgtggctgctcagggacttggacttgctattggggccacacttatggacttgaaaagagcaacaactttggcttcagtaactgtgatgaccttcatgctggctggaggattttttgtgcagagggtccccatatttttttcttggattcgttacatgtcattcaactaccacacctacaagcttcttctcaaggtgcaatatgaacacatctcaccagtcatcaatgggatcagaattgatagtggtgcaacagaggtagctgctctaatagccatggtttttgggtaccgcttcttggcatatctttctctaaggagaatgaaacttcaatctggagcttaaattcaacttgatcactctttgcatgttgggtgatatattaattaaacaaagaatcacatgtactaagaaggaccaataattggagtacctagcacattagagatagtggctttcttttattttgcttgtgaatattatatttcatttaattag

SEQ ID NO: 10161 - DNA, 471 bp, Glycine max
  Clone ID: jC-gmle01810045e03d1
ggctttttaactagtccaatacttcagttgaatgattcatcatcaggaactggtcaggaagaaggactcaaacttgttagaaaatatggtgattcttgcaaatcactattgatattcacaatgttcatcattgttttaagctccttccttttcttcatggagcccccacctaatgcactggcatctgtcaatgcagcagctgttgatgccttggaatatatgttgatatttggctgatgcaacatgtcataaggtttctgccctaagaaggacttataccttggaaggaaggcagtcgctactgccctacaaagacatgtattgtaaaaaaggaagtaaaaagtgagaaatgcattagaggcactaattactgagattaggctctactgtttcttctagtatataaatattatagggttacaaaagtataattgtgtaagctcagtccccagcccaataaactaagttttg

SEQ ID NO: 10162 - DNA, 527 bp, Glycine max
  Clone ID: jC-gmle01810045e04a1
ggaaaacaggtggggatgagtgatgtatgttaccctgacagtctgattgggaatattccaaatgtatattactatgctgcaaacaacccttctgaggccaccattgccaagcgcaggagttatgcaaacaccattagctatctgactcctccagcggaaaatgctgggctatacaaaggtcttaagcagttaagtgagctcatctcctcatatcagtccctcaaagacaccggccgtggggcacaaattgtgagttcaattatcagcacagctaaacaatgcaatcttgacaaggatgtgactctgccagacgagggtgaggagatcccacctaaagagcgcgaccttgtggttggacaggtgtattccaagatcatggagatcgagtctcgtttgttaccttgtgggcttcatattattggtgagcctccctcagccttggaagcagttgctacactggtcaacattgctgcacttgatcgtgctgaagatggtatttcttctcttccaatcaatatagctgacac

SEQ ID NO: 10163 - DNA, 509 bp, Glycine max
  Clone ID: jC-gmle01810045e04d1
gtctgaacaaaattcttgagctaaaagaattggaggctgagatgtcaaatacgggggagtgggagcgacgaccagttcaagagaggcaggagaggacccggttattccattctcaagaaaatattattcggatagatatgaagttggcaaacgaagatgttagtatgcttgcatttacttcagagcagattactgctccattcctacttcccgagatggttgaaagagtggctagcatgctcaattactttctgctgcaattggtgggtcctcaaagaaaatcgcttagtctgaaggatcctgagaaatatgaatttcgtcctaagcatttgctaaaacagattgtgcacatatatgttcatctagctaggggtgacacgaattccatcttcccagctgccatctcaaaggatggccggtcatacaatgatcagttgtttagtgctggggcagatgtccttcacagaattggggaggatgggagaattatacaggaatttattcaactt

SEQ ID NO: 10164 - DNA, 302 bp, Glycine max
  Clone ID: jC-gmle01810045e05a1
gagatcacaagccacacctccgatgttatgctcaagataaaaaatgggagcatgtcagatggatagcatgctcattgctatccctgagtggcacggtcatatatatctcggaccatgactcccatacacggaccaggggagcctgaggaatacccataaccaacaggtgtctgaggaacaccatgggtccaaccggaccatatggagccctggaatccattgtatggctagctgccggtgtacctaaccggagaattccccagcgactacgggtgggacactgctgggcttttcgcagaccc

SEQ ID NO: 10165 - DNA, 490 bp, Glycine max
  Clone ID: jC-gmle01810045e05d1
gtaaaaagcaagtaacattaagttggattcggatacacaagataattcacattatctgaagtacttcaccaaacacaaatctaaaaactctcaaaagtcatttcgttctttgacgctcactttccggggacgaagttggtggcataggcccaggcgttgttgttgacagggtcagcaaggtgatcggcgaggttctccaatggaccctttccggtgacaatggcctgaacaaagaagccaaacatagagaacatggccaatcgtccgttcttgagttccttcaccttaagctcagcaaaagcctctgggtcatcagcaaggcccaatgggtcgaagctgccacctgggtagattgggtcagtgacctcaccgagggggccaccagcaatacggtaaccttcaacggcacccattaggataacttgtgtggcccaaatggcgaggatgctctgggcgtggatcaggcttgggttgcccaagtagtcgagcc

SEQ ID NO: 10166 - DNA, 306 bp, Glycine max
  Clone ID: jC-gmle01810045e06a1
gggtatagatatcacatatcacagagcacatcttatacttgactaaagaagcgggggcagcttctggcatggttctctcatccccatgcttggctgaccaggtcaggaaactgggcccatcaggcgcaccactgggacgggcgagcatgaggaagaccgtcacgaaacatgtctcctgacgaagcccacggtacggcccacacctagtgaagaactggggcccaatctttggctagccctcatactacctaaccggggagtggccaggcgactacggctgagacactgctgggctgtacgcagacc

SEQ ID NO: 10167 - DNA, 356 bp, Glycine max
  Clone ID: jC-gmle01810045e06d1
tttttttttttttttttttttttttttttttttttttttttttttttttttttttttttttttttttttttttttttttttttttttaaaccgggaatatttaattctttcatttggggggaaaaaaaagggttttttgggttgttcccccccccttttttttttgtaaaaaaaggggggtttgcccctaaaggatattttattttccccccccccccaaaaaaattgcaaaaaggtgttatgttccacccaaaaaaactttttattccccccgggttcaaagggcaaaaaaaaccccccccccaacccaattttacccccccccaaagcacaatagggggttaggggccccccac

SEQ ID NO: 10168 - DNA, 417 bp, Glycine max
  Clone ID: jC-gmle01810045e07a1
gtgtttgtgaaactccctctcacacacaagtcacaaaaacaacttgtgttggtccaatggcatcagcaacaccccttttgaaagatgagctcgacatcttgatccccacgatcaggaatctggatttcttggagatgtggaggccattctttgagccttaccatctcataattgcgcaagatggggacccttcaaagaccatcaaggtccctgaaggctttgactatgagctctacaaccgcaatgacatcaacaggatccttggccccaaggccaattgcatctgcttcaaggactctgcatgccgttgctgtggctacatggtcttcaaaaagaagtacatctacaccattgatgatgactgctttgttgccactgatccatctggacacaagatttatgcacttcaacagcata

SEQ ID NO: 10169 - DNA, 415 bp, Glycine max
  Clone ID: jC-gmle01810045e07d1
cacatgtaacgaaatgctgccatgtgaactctacccattaaacagtaataaaaagaaagtaacgccctacgggtgtacttgttctttctaagctcaaatcattaagttactaaatagaattacagctaacaatgctgcaaaattcaagccaagaataaaagttaagttgaaaataaatactaaggggaaaaaatacagtatataaatagttccacttcaagttctgcggctgttgttatgcagttaaccaaaactgattcatgctttgccattggccactgatgctccagctgggttaagctcatcccaagcttcaatccaagtgaccatggcatctgccaacttgtcaaagtaaggatctaccttggtaagcttttccttgacttgcttggcagctcatgtagcacttctgaca

SEQ ID NO: 10170 - DNA, 523 bp, Glycine max
  Clone ID: jC-gmle01810045e08a1
atagtttcaatgattatagcttattttctccatgattttttatcagaattcaatttgtgataccattttgcaatcatttttatgctactaatgctaactcttggtgagagcatttgaccatggagctgcttgtccccaactcttccccaaagaagtggttaatgcgtgggtaaaaagaggaaggggtttaaacaaccttctgtgttacatcgtaaagttctaaactaactacttcatttacttttggagtcttgaactactatttgaatgaaggtgaagatgaagcgaaaggttaacaaaagttactgaattgaaagtgatttattgatccaagatctgaagattcacaagtactttgcaaaattagggtgaaagcccatggaatggattgtttccactaagtcatattgaatgctgatttttggaggaaatttttaaaaatactgagaaatggactgttcccttggtggaggaaagagatggaaataatatatattcctttatttctttttcctcttgattg

SEQ ID NO: 10171 - DNA, 555 bp, Glycine max
  Clone ID: jC-gmle01810045e08d1
cataaaggattataatcaatattggatgtttggaagatgatctgtacaaaagtaacgagaagtttcttatcaacgctcaataacagcacctaaaatctcaatagttgggtgttttcatgcaatcccatgttccagctatctactacataaaaaagaaaggacttttgatcgaacaaagttccttgtcacgggaaataacatctcttacattcctcacaaggactattgtaaacatggcaatgctaccaatctattcacggaaactctgagctgcacaagatagtttccagttttacaacaacaaaacctgcagatacaaactatctatcagagcttgatatcaacatatagattcataactactggatgaacaaatatataaaaattgaaaaaaccaaacacggatgcaattttacaactttttttggtccagattatacagcaataatccagctacataatttaaaaaccaacaagcaatccacatattagcttgaaccatgggataatgataagaaatgcaaaattgagaatagaaacaataaaccaatcaaa

SEQ ID NO: 10172 - DNA, 492 bp, Glycine max
  Clone ID: jC-gmle01810045e09a1
aaccctttcgacttaacgccctttcccaaagaggttgtgagtctcaagaatctcaattggctctacctatcgaactgcaccctcggatggaagcttccggtaggactcggcaacctcacggagctcaccgaattagaattctccgataacttcctcaccggcgattttcccgcggaaattgtgaaccttcggaagctctggcagcttgagttcttcaacaattccttcacgggaaagattccaaccggcctgagaaacctcacaaagcttgagcttttggatgggtccatgaataaactcgaaggggatttgtctgaattgaagtacttgaccaatctggtttcgttgcagtttttcgaaaacgatatgtcgggggagattccggttgagataggcgaattcaaacgcctcgaggctctgtctgtgtacaggaacaagatgataggtcccattcctcagaagggtggttcctgggccaagtttgattacatc

SEQ ID NO: 10173 - DNA, 398 bp, Glycine max
  Clone ID: jC-gmle01810045e09d1
ggacactaccagtttcatttaattagtaaattaaggaagaaggaatttgcttctcttttttttcttttattgggagtactagatgcagacccttttactacacaagtcttccactttaaaatagacattaaagaagccaagactaatattttacagtgttccctctttccgggaaaatttacatcaattatagataactcgtggaggtggttggttccccttcaacttcatgatgatccataatcttcagtccggttgtaaccaactatggaggatggaatacaatacattacttgtgcgtgactcctattttcttttcactgtcatctttggtaataacaatcccaaccaatttacaaggctcggcatcctcaagcttttgaaccacagctctcatg

SEQ ID NO: 10174 - DNA, 522 bp, Glycine max
  Clone ID: jC-gmle01810045e10a1
atatatatataatgtatttagctggttttgggcaaaacttgggttgatagaaatcacaactgctttacaatatgggggaatagaattgacaggctacaaggtgatacagagtaaagggctttatcttgaattaaacttgtcctgatactccaaaagattatacacaaactacgcatcacagcagcagccttacttggactgatttcttatagttatttccagagaaaagcaaattgccagtggtgacagcaggccaggcaacataatggtgctcgataggccactaattcatgagtactgtgttggagcatacggtgaatattgaaccacatgggcatttcacacagcaactgcttcaggtcttttgctggttttgattcctcttatagcttcggcataatctttagctccaaacacagcagagcctgcaaccagagcattggctccagcctcaatcaccttgtaagcatttgctggaccaactccaccatctacttcaatccatggattcactcccttttc

SEQ ID NO: 10175 - DNA, 437 bp, Glycine max
  Clone ID: jC-gmle01810045e10d1
ggacactaccagttttatttaattagtaaattaaggaagaaggaatttggggctcttttttttcttttattgggagtactagatgcagacccttttactacacaagtcttccactttaaaatagacattaaagaagccaagactaatattttacagtgttccctctttccgggaaaatttacatcaattatagataactcgtggaggtggttggttccccttcaacttcatgatgatccataatcttcagtccggttgtaaccaactatggaggatggaatacaatacattacttgtcgttgactcctattttcttttcactgtcatctttggtaataacaatcccaaccaatttacaaggctcggcatcctcaagcttttgaaccacagctctcatggttggtctcaaagccggaagagtccccgtgcacagcact

SEQ ID NO: 10176 - DNA, 498 bp, Glycine max
  Clone ID: jC-gmle01810045e11a1
aaaattgtaacattattcagacttgtgcaattgaaataaatagaaaacttgggtacggttaatctaacgagcaaaaagataaagatgtcgaatgtttctagttgttttacatgtcaattcttacagcggcacaccaaggaacaaaatgtccagatgatggtagagtcccaaagagcaaagagaggatatagaaaggtggttgagctttggtaactgcgaagcgaacaagaaccaagaccaagagggtaaagaatatgatataatacatttagtggaacttgagactggtcaagatgttgttgtgcacggggtcagccaaatgatctaggaggttttggtatgggccaacacctgtgacaagagcttgaacaaagtaacccaagattgccaacatagccaaccttccattcttcacttccttgagcttcaaatccttcaaggacttctcatccttaccaaagccaagtgggttgaagaaaggtccttctgggtaagctg

SEQ ID NO: 10177 - DNA, 413 bp, Glycine max
  Clone ID: jC-gmle01810045e11d1
gtgtgcacaaagtcaaaaagttttccaatgcattgggaccaaggctgaagattcagcaactaatctctcaaattcttcatctcaactaatgaagctaatacattcgcaaagtacattaaacatccgcagctaatacattcctccaattctatctcgtcccattccatgcctatcatgcctatcatctcttgcacgatgcatgaacgtatcccgacgatattcttttggtggtgggccacctcttattggagagcggcttctctctctaacatcacgagcccaccgaccacctcgatggtgaggaagtgatggcaaaaaaggcacagggggtgacagtggcctcctttcaaatcctttcctttcatcagagaagccatctcttccacgatctctattatcccagtccagtgggg

SEQ ID NO: 10178 - DNA, 488 bp, Glycine max
  Clone ID: jC-gmle01810045e12a1
atgaaacaatactattttggtagtgaacaattgtgaagacgggaaaaaaatcaacagaatcttacaaaagattaatatgaggttctcctcccaactaaaagagaaaccccaaagtaataaaaaaatttcaccaacaccatgtgtaaaagcatacaacagttatgaaatactagtatatactataccaatcctgtggctgtataaaatttacaacaaaacaaaccaaaaaatgcaataaatcgaatggaaccttatttgtccaataaatcctagtcccccacttccaaaatttccaaccttccatagctaccaaaaagggaaaaaaaaaattccttcagcatagtagagactcaaggaacatgtcatctctaggctcctccttggtcctggaggagaaaacattgtcagatagttgctgctggttcacgtaagattgcattggattcccaaaccctgagaatccaaaactttctggactttgtagcatc

SEQ ID NO: 10179 - DNA, 413 bp, Glycine max
  Clone ID: jC-gmle01810045e12d1
gagggctcaaagtcaaaaagttttccaatgcatagggaccaattgtgaaaattcagcaactaatctctgaaattcttcatctcaactaatgaagctaatacattcgcaaagcacattaagcatccgcagctcatacattcctacaattatatgtcggcccattccatgcctatcatgcctatcatgtcttgcacgaagcatgaacgtaccccgaccatattcttttggtggtgggccacctcttatgggagagcggcttctttatctaacataacgagcccaccgaccacctcaatggtgaggaagtgatggcaaaaaaggcacagggggtgacagaggccttctttcaaatgctttgctttcatcaaagaagccatgtcttccacgaactctattatcccagtccagcgggg

SEQ ID NO: 10180 - DNA, 555 bp, Glycine max
  unsure at all n locations
  Clone ID: jC-gmle01810045f01a1
caacatcaaggttcctctcattcttggtatctggggaggcaagggacaaggaaaatctttccaatgtgagcttgtctttgccaagatgggaatcaaccccatcatgatgagtgctggagagttggaaagtggaaatgcaggagagccagcaaaactgatcaggcagagataccgtgaagctgcagacatgatcaagaagggaaagatgtgcgctctcttcatcaacgatcttgatgcaggagctggtcgtcttggtggaaccacacaatacactgtgaacaaccagatggtgaatgccactctcatgaacattgctgataaccccaccaatgtgcagcttccaggtatgtacaacaaggaagagaacccccgtgttcccatcattgtcaccggtaacgatttctcaacactctatgcacctctcatccgngatgggcgtatggagaagttctactgggcaccaacaagggaagaccgcatttgtgtttgcaccggacattttcgcactgatggtatttcttgacaggacattgtgagcttggtgacaccttccct

SEQ ID NO: 10181 - DNA, 451 bp, Glycine max
  Clone ID: jC-gmle01810045f01d1
cacttcccaaggaaagcttgattatatagggaacatatgaacacacattgatttgatatcacaaacttcaggggcaggcttaagtgaaggtacaagggttaacattaacaagttcaagaggagcaatcaaacatgtgggggtgtgatttcctcggtaagctcggttgaagcattcagctttctgcctctttcacttctgctattatcagcaaatttcaagcttgcatgatgggagcctttctccttctcctttgagttccactcagccaagtagtaatcttcctctgtgacctttttagatgaaggaccagagaacatgccaccccattggggaaagtagattaagcatattggcaggctgcatattatgatcatggctcccattagagtgattcctctttcttttgaaaacctggatcctttgaagacaattagttgggtgacaactgct

SEQ ID NO: 10182 - DNA, 369 bp, Glycine max
  unsure at all n locations
  Clone ID: jC-gmle01810045f02a1
cgactggacggtgcacgaaacacannnaatttgcgtgcaaaccccggaagttgggtatagtgctggagggagtggcaccctttctgctaatatatcaacgcctaagagtgctgcagaccagaccatcaatgtactcactcctaggaggcttgggcccctgatccacctgagggacaagtagccttcagaaccaaagatcacaaggcaccaccagaaggggaatgacgctacaccctagatatgctgcagggtcgacgaagatatggattctatgggagagggaatacaatgctaccctacgtgagcaatcggggactatgtgacaatgatttcttctggacgaacaaggaagagcctatataagacgag

SEQ ID NO: 10183 - DNA, 556 bp, Glycine max
  Clone ID: jC-gmle01810045f02d1
tgaagggcaagcttaatggaatagcgctccgtgtgcctacacccaatgtttcaggggttgaccttggtgtgaatgttgagaagaagggtcttactgctgaagatgtgaatgcagcattcagaaaggcagctgagggtccactgaaaggtgtgttggacgtgtgtgatgttccacttgtgtctatcgacttccgctgctctgatgtttcctctactattgactcctccttgactatggtcatgggagatgacatggttaaggtggttgcttggtatgacaatgaatggggttacagccaaagggtggtggatttggcacacctagtagcaagcaagtggccaggggcagctaaagcagggagtggagacccattggaggaattctgcgagacaaaccctgctgatgaggaatgcaaagtatatgaatagaggagagcgcctttttctgatttgatgattaccattaccagcagcaaaccatttttactctctgccttgtgttaacgtatcatgtgaaaaagaaggaaattgttcgttcagacggtgtctgaggagag

SEQ ID NO: 10184 - DNA, 427 bp, Glycine max
  Clone ID: jC-gmle01810045f03a1
accacttgccatggcagcagcagcgtcaatgtgtatgagcttcaacctggcaacagcattcaagggtctctctttttcttcttcttcctcatcgttcttcgctggaagtggtagttattctctccgcgcgggtcccacctcggtggtgtcgctgccccggcgctgcccgctgaccatagagaacgcccacaagaagggggcgggcagcaccaagaacggccgcgactcgcagggcaagcgtctcggagtcaagatatacggcgaccaggtcgccaagcccggctccatcatcgtccgccagcgcggaaccaagtttcatgcaagaaagaatgtggggcttggcaaagattataccattttctccttgattgatggagttgtaaaatttgagaaatatggacctgacaggaaaaaagtgagtgtttac

SEQ ID NO: 10185 - DNA, 553 bp, Glycine max
  Clone ID: jC-gmle01810045f03d1
cgatgataatcatccagagtttcaattgaaaagatttgactattttggttttgggtgatcaaatgaagttcaccatgctgatgttgtagctttgacaaagctatcatgcttggtgctgccccatgagcactcagcattgctgcagccaaagtctatttggagtgcagaaaaatctcatgatacatgctcacttgtggagcatatattgcatttggaccctatagaggtagacatcttccgaggaatcactcctccagatgctccaacatttgggaaggtatttggtggacaaatagttggacaggcactggctgcagcatcaaaatctgttgattgtcgtaaagttgttcatagcttgcatgtctattttcttcttgtgggggattttaacatacccattatatatcaagttaagcgtctccgtgatgggaagagttttgctacaaggaaagtggatgcaattcaaaagggaaatgtcatattcacttttgtggcttcatttcataaggaagaagtgggtttcaccaccaggaagtgtctatcccatcagtcc

SEQ ID NO: 10186 - DNA, 487 bp, Glycine max
  unsure at all n locations
  Clone ID: jC-gmle01810045f04a1
gtcttttttcactcttcagttctcgttgttgttcttcgctttcctgaaactagggttgtgaatttcgattcattcgttaataattaaagatgtttgggagggcaccgaagaagagcgataatacgaggtactacgaaatcctcggcgtctcgaagaacgcttcgcaggatgatctgaagaaggcttacaagaaagccgccatcaagaatcaccctgacaagggcggtgatcccgagaagtttaaagagctggcacaagcatatgaggttctgagtgaccctgagaagcgtgagatatatgatcagtatggtgaagatgcgcttaaggaaggaatgggtggtggcggnggccatgatccgtttgatatcttttcatctttctttggaggtggaagtagtcgaggtaggaggcagaggcgcggagaagatgtggttcaccctctcaaggtctctctggaggacctttatctcgggacttctaagaagct

SEQ ID NO: 10187 - DNA, 555 bp, Glycine max
  Clone ID: jC-gmle01810045f04d1
cgatgataatcatccagagtttcaattgaaaagatttgactattttggttttggggatcaaatgaagttcaccatgctgatgttgtagctttgacaaagctatcatgcttggtgctgccccatgagcactcagcattgctgcagccaaagtctatttggagtgcagaaaaatctcatgatacatgctcacttgtggagcatatattgcatttggaccctatagaggtagacatcttccgaggaatcactcctccagatgctccaacatttgggaaggtatttggtggacaaatagttggacaggcactggctgcagcatcaaaatctgttgattgtcgtaaagttgttcatagcttgcatgtctattttcttcttgtgggggattttaacatacccattatatatcaagttaagcgtctccgtgatgggaagagtcttgctacaaggaaagtggatgcaattcaaaagggaaatgtcatattcactttggtggcttcatttcataaggaagaagtagggtttcaccaccaggaagtgtctatcccatcagtccct

SEQ ID NO: 10188 - DNA, 535 bp, Glycine max
  Clone ID: jC-gmle01810045f05a1
ggtcactatgggggctctgggaagaatatccaaaacaagtggttcacggctgatgacagggaggtgacagctgttgaattggatacagtcttgacaaaaggagcatatatgcttttctatgcatggtgctcgccaagggccccaagattaattaggaacagaatactgtccccagattcaaaacgtaaagtcagcggaaagactcttacaacgaaagcaagatctatatctacaaattctggtgttgctgaacatgtgaacagcttcatttctccagatgactcacctgccttggactctttctattcaaaatttcaccacctgaaaaggattttggaagaagactcgtcaagtgataattcatcccttatcagcagcaacttcgatgaaagatcttgtcgtacagatagcacccgtgattcaactagcacagatgacttctctgcatatctttttggtgattcaaggaatggctggagtagtgtgtggaggagttatgattctgcacatcttcatcatcctcatcttctccctt

SEQ ID NO: 10189 - DNA, 523 bp, Glycine max
  unsure at all n locations
  Clone ID: jC-gmle01810045f05d1
aagaaaaataatatattatcctttatttcaagtaatgggatttaaaataatagaataaattccaccgaacctttataaaagttacagcaatctatatctacatctagttagttgttagcaaactgatgtgtctaattttcctttgtaaaaagaatgccgcctccaacgagtacattggtagagcatccctcgttattagctccggaactccctgttgataaaatataaatccgttcttttccttggctttctacataatacaccatagtctatatcattaaaatggttagatcctagtttcagacaagagtcagtctccctactactactactggtgctactaatcctactatctaactttctatgctgtaaagttgtgttagaagacaaacgagaaacatctatccctcgcgagccttctgcatcaggagaaactgaatcatacctgtccatatcagataggggtgaatgtcgcanattcaagggagaagatgaggatgatgaaatgtgtcagaatcaaatt

SEQ ID NO: 10190 - DNA, 292 bp, Glycine max
  Clone ID: jC-gmle01810045f06a1
ttcactacaaacacaggctttgaatcttatggtttccctctaccaattatctgggcaggaaccatgaaacaatgaaaaaattatgcatattccatacacatggaccttggctgaattatctatctttgatgatgtggaaatcactggtaataattctaccacccttgacatgtttttacacgatatgaaacatgtactatttcccgatggtcttatgcggtaattcaccaagatgttaatcaacacagactggaacagtgccgacatatatgctcttatcaccaaacttctg

SEQ ID NO: 10191 - DNA, 455 bp, Glycine max
  Clone ID: jC-gmle01810045f06d1
atccaaatatattattattttatggttttggtaacagagttagaacaccaattgacacttattgagcaatccaaaatccaaatacacgagatatattaagaacttttcagggcattatattaattgatgatacatattgctacttgtccttcgaagacaccggacagattgcctatgtcctcagcacattagatatgtagaataaaatcttagtactcaagattgcaagagcttctcgatgtctttctcgattttcagaggtgaggtggtaggtgcatatctgtccacaaccttcccttctttgtttactaagaacattgtgaagttccacttgataccatcgccaaatattccccctttcttctcctttaaaacttgtaaagggcactgcattctttccattgacttaaccttatcaaagataggaaaattagcttgaaccttgtggaaactac

SEQ ID NO: 10192 - DNA, 351 bp, Glycine max
  Clone ID: jC-gmle01810045f07a1
caagagaggaggttgtagctgattacaaggctgcatccttagccccagatgtgttggagaagaaacagatgcaaactgaaactctctctgctgtctttgagacatactttcgcattttgaagaagacaatgcagtccatatgtgccacgcctgaagcaaacgctggggcattatctgctgcaggggaacccctccctttgcttgctccatgtctgaaaggactggcaaaattttcacatttgattgaccttgatttcatgggtgatctaatgaaccatctgagagtacttgcttctggaagtagcaactcacgcaacacttctgacaagtgttctaaatgtttgaccgtat

SEQ ID NO: 10193 - DNA, 360 bp, Glycine max
  Clone ID: jC-gmle01810045f07d1
aggaaaaaacctcggacttcatcattatatattcattcaaaggagccaaatccaattttcataaaaaaagaagaaatgaccgttttacaaaattgattgcgccttaaaccaccatcagtttatattaggcaatgaataaataccggattgaaaaagtatgataacacaaggtcattttgcattacttgcacttcaattgaaaaagaatctcctccatattcatgcactcaaatgtggggaaacttggttgaggaacacacttgagaattatttccaccccaaatgaaatgaactgtaactataactgaaactaatgggtggtcatctactttgttttgagcgcttcttatattggtcata

SEQ ID NO: 10194 - DNA, 346 bp, Glycine max
  Clone ID: jC-gmle01810045f08a1
ggcaatttataaacaagccaaatgagagaggattgtttctagaataacgtcattggattttggatttccagtttgagtttgtgtctgtttatctgagtctgaaaatcatacatagtacattgttgcaattcaattaacagatacttaaatgccgcaggtggtctagctaatctcttgctgtttaattcatattcaaggaatttgagagtagtctatttgttcgtgtgactttttatgtgtctgttttcaggcacataccattgttttagtgagcctggtgatcatatcccaaagaggctagtatatatcaattgtgcacattctcaggcgtgctatttatgttttt

SEQ ID NO: 10195 - DNA, 360 bp, Glycine max
  Clone ID: jC-gmle01810045f08d1
aaattaacacgcttacttcaaaggaccaattttaataacagcgtttccaatatgaacataaaacaaaacctccatgcccggggataatggaaaattggagtaacattggccccaactgggtgggtggaccacagccattattagtcggttcccaaaccaaataaggatgctatttttttccacaaaaacataaatagcacgcctgaaaatttgcacaattgatatatactagcctctttgggatatgatcaccaggctcactaaaacaatggtttgtgcctgaaaacaaacacataaaaggtcccccgaacaaatagactactctcaaattccttgaatatgaattaaacagcaggagat

SEQ ID NO: 10196 - DNA, 466 bp, Glycine max
  unsure at all n locations
  Clone ID: jC-gmle01810045f09a1
ctctcctttgtttcattctctaacttatcttttgtttagttttgctgatctgtgtcgtgcagtctctggcgaggttaccaaagactccgtggtgcccaacaacaacgtttgatacatcaagagacacataacataacagaatactcaaaacattctccatttctaatcaagaaaacaatcagaaatgttacctcaaacattagccatccctgcattactctttgnggtattcatatttattctatctgctggtgtgttgcaatcaaaacaaaatgagaaatatccacctggtcccaagaccctgccaattattggcaacctccacatgctagggaaactaccacaccgcacccttcaatcccttgcaaaacagtatggacctataatgtccttaaagctaggacaggtcacaaccattgtgatttcctcccctgaactgctggactattcttaagacccatgacac

SEQ ID NO: 10197 - DNA, 435 bp, Glycine max
  Clone ID: jC-gmle01810045f09d1
aacgtgacaaagagaaagatacgcatagaaaggagttggagaataagtagaagtactggtcaaccttttaatattacagttttgttgggtaccagtgacaccattgcatttagtgcactgggtttgatccaattgctacaaagaagctataaggcagggaccaattcttattttaagaaacaaaatacaagtatcatttcctaatttaatgataagtaaatcttagcaaacctaatatattttaatttatttctttccaacttcaccagctagccggtaagttggcacagctagcaagtgattacttcttggaattgtgaggccaaatttttcagtcatgtccaagttatctggggacatgcctaatggaagttcccaattgaagcagtgcactaattgagctagaacaatcttaacagtagttagacccaaatg

SEQ ID NO: 10198 - DNA, 349 bp, Glycine max
  Clone ID: jC-gmle01810045f10a1
gaacacaaaaaaaaaaaaagtttttcgcgggcaaaaaaaaaaaaaaaagggggaaaaggcctcttaaaaagggtccataaaaaaaccggaaaaaaatccctggggggaaaggatttcaaaaaaaaaaaaatggaccccccccccctaaccaaaaaaacaaaaaaaaaggggttaaattttgggggaaatggcccaccgaaaaaaaaaagtttggaaaaaaaaaaaaatctttttttgggggaaaaaaaaaaaaaaaattttccccgcgccttaaaaataaaaagttattaacccctcggggggttttttcccccaaaaagggctgattaaaaacaaaaaaaaatgcggg

SEQ ID NO: 10199 - DNA, 433 bp, Glycine max
  Clone ID: jC-gmle01810045f10d1
gggcatgtaaagcatcccgttttgttatcattggaagaacaaacaaaccttttccaccaagggaacatggagaatatcggtatacagcacaacctacggatctaatgacctctaaatttaaataaatactaaaaaatcaatatgaccggccggctactgaactattgtccgcctaaaacataggaagcaagaatttccattccattcctagggtgggtctctattttaaatatacacatttttgcttggtatgtcggtcatataaataacaggccggtcttttaactgtaccgcatcattgcaagctcccttccatttaactcttaggattacgattatgtgaaaccgaaggaatctttgagaagaacaaagagctctgcaatccttctaataagcttgatgttggctggatcctgcgattggatctccgggg

SEQ ID NO: 10200 - DNA, 387 bp, Glycine max
  Clone ID: jC-gmle01810045f11a1
tttatttttttttttttttttttttattttttatttttcttttattgggaattttaggttttaaaaacacaaacaaatgcccaaaaggacaaaattaaacaacaaaaatccttacaaaactccaaaccattgtagaacaaaacaataaaatacgggtataataagataaaacatcaacacaaataaaactaaactggcctaaagcacaagacaatactgaaacaaattcaataaccaatacaacataacaagctgatgacttcaaatgtgcactagaatggaaactaaataaagaacacgtatctgagctgcccaatgcgggtacaaaaaccaaacctgttatacaatttccagaccaaaaaccctaaaaaaaccatgccccatctg

SEQ ID NO: 10201 - DNA, 380 bp, Glycine max
  Clone ID: jC-gmle01810045f11d1
gcaaaataaataattaagaataacaggagctatatccataaacagatacatctttacatttgatttaaaaggggcatgctatattctagagtttttcaactggaaaacctataacaggtttaatttctgaagccacactacgcagctcagctacctcttcatcagttagtctccagccaagtgcacctctgaattcctcagcttgttctgctgtcttggctcctggaattggcacaacattgacttgtgctaccagccagttcagggatacctgtgttggagttttataatacttctcccctatttcactgatcttgttcagcaaaggttggagctttgttaggaattctggagtataaattctgccccttggcccactt

SEQ ID NO: 10202 - DNA, 300 bp, Glycine max
  Clone ID: jC-gmle01810045f12a1
aaaaaaatccaacatcacattgttttcaggggtatacatatttttagaaaagaatgatgtttcaattatcatgtatgaagaaaactaagcacatatgtgagtaaggccagaaattatgcatttctagaaaacttaccaacagataaaaacaatgggaaataacacgtccatatgttacaatgctccaacatcaacaaccaaaaaatttcactaagaattgcttctagtacagtgtaaaaactatcaccctacaaaagccaattgatggtaatgttgccaagccatgtgaacatggagaac

SEQ ID NO: 10203 - DNA, 451 bp, Glycine max
  unsure at all n locations
  Clone ID: jC-gmle01810045f12d1
gccttgtaacggtttttccttggttctactacgcgtctttgacttatacatgccaaagtgttctatttacatttctaccacaaaaaaaaacggatatcaccattcaccaccactgtttgaataatatactattcccccaccactctcacagtagcaggtaaccactcttgggagccccagcgatcggagtagccatcatcttcgagcctaaacagcatcgaagagttatggtcatgtgtggttgaattcaaattctttttcagttggtggaaactgggaaccaacgctttgtccatccattcatncaatggtggtttggcctaaccacactccgctggtgatcttgtcaagagcctctccctgcacttcaattgacaccccattcccaaccacagcagagaacctcttaatgatggatgacgagaaattccggcgtaggagatcgaaattc

SEQ ID NO: 10204 - DNA, 494 bp, Glycine max
  Clone ID: jC-gmle01810045g01a1
gtgaaaaagggggagtttcttattccttctagacgcttccattgatcggcgatttctgatacatggcggagcatcacgaacacgaggaagtgaagggtgagtccttgttggagaagatttctgggaagatccacgaccacgattcctcgtcttcgtcggattccgacaacgacaaaaccagcgccactgattccttcaagtctaatgttttcaggcttttcggcagagaaaagcccattcatcatgttcttggcggtggaaaaccggctgatgtttttctatggagaaacaagaagatatccgcatcgacactcggagttgcgaccgctatatgggttctagtttgaattgcttgagtaccacctcctgactttggtttgacacttactgatccttgctctggcggggtatgtcttgtggtccaatgcatccactctcatcaacaagagtccaccaaagatcccacaagtgcgcattccagaggaacctgtttt

SEQ ID NO: 10205 - DNA, 542 bp, Glycine max
  Clone ID: jC-gmle01810045g01d1
cttctccaatcggaccaatccccttactcgacttcttatatttaaagtgattagtgtatctacttcaacgatactattgttccgtaccattatggaagaagattctggtaaaatatgcacttcctcgggaatgaaaaaaaattgatctactttaatttggtattttgtcttaaattctttaactccttgatactcaattaaaaaatcctcttttttaaaaatggaatttatacctatagtcctatatttagtaattcccgagctctgtgttcggtattgaggatcatcgaaataagcaagaatgctatttctacgaaaaataccattgattggtatttcaatcgagatactggaagctaacattagctctttgtctcgttcttgaatcgattggaattgaaatggaataattaatctatttctccgcctctttgctaataaatccgtagtatcatggaaaatagtaggatgtgtaaaatgacaatgatctatagatatgatttgattaaatattgaataatctgaaatccttctttcttttt

SEQ ID NO: 10206 - DNA, 502 bp, Glycine max
  Clone ID: jC-gmle01810045g02a1
aaggagtggtaaattaagagcatggctgcacaagctcttgtatcatcatcatctcttaccttctcagccgaggctacaagacaaagtcttggaccaagatcactccaatctccatttggcttctcaagaaaagcctcctttcttgttaaggcagctgctactccccctgtcaagcaaggatcagacagacctttgtggtttgcatcaaagcaaagtctttcctacttggatggcagccttccgggtgactatggatttgaccctctgggactttcggaccctgaaggaacaggagggttcattgagccgaaaaggctagcatatggagagataatcaatggtcgttatgcaatgttgggtgcagttggtgcaatagcacctgaaattctaggcaaggctggtctgatccctcatgagacagcactcccatggttcaaaaccggtgtgttcccacctgcaagaacctacaactactgggcagactcctacacacttgtcgtgt

SEQ ID NO: 10207 - DNA, 485 bp, Glycine max
  unsure at all n locations
  Clone ID: jC-gmle01810045g02d1
ngtncntgcgggactgcactaggtatgactccncatgcactcccacgtgggggcggaatccggctcgagttcggcttccttttgtacccttttagcaactttatacaccccgacgcgtttgcggagaaacttttgagcattctcggacctatgttccttcggtccccttgatatcatgaggacagtggtgcttctgcctgttctatgccatggctgcatcgcgggggagtgaggttatttccgcgctgttttgggcggttgccaatcatataacgactatggaaaaagcagaacgatcccacccactggtgggacttgcggccaatgtaacccttatgttctctggccggacagagacatcttttgtaacctgaggcagacttcatgttctggagtccatggttgggccatctctctcaaagcaatgaccaacatacctgcgggtatggggttagcagttcgattcctgccctggtgggggaaca

SEQ ID NO: 10208 - DNA, 468 bp, Glycine max
  unsure at all n locations
  Clone ID: jC-gmle01810045g03a1
ggcccccaagagtctgctcttaaagaagaacatattttgaaccaactcaatggcatgaccgttcaagaggcaataaacgaaaacaagctgtttatgattgattatcatgatatatatctacctttcttagaagggatcaatgcccttgatggtaggaaatcatatgccacacgcaccatctttttcttgactccacgtagcactctcaagcctgtggctatagaacttagcctccctcacgctggacctaattcccgatcaaagcgcgtggttacacctcctgttgatgctactactaattggatgtggcagcttgccaaggcccatgtttgctccaatgatgctggggtgcaccaacttgttaaccattggctacgcacacatgccaacttggaaccatttatattggcggctcataggcaattaagtgctatgcatccaattntcaagttgttggacccccacatg

SEQ ID NO: 10209 - DNA, 520 bp, Glycine max
  Clone ID: jC-gmle01810045g04a1
aagagtgtgcgcggaaaagggagtgaatccatggattgaagtagatggtggagttggtccagcaaatgcttacaaggtgattgaggctggagccaatgctctggttgcaggctctgctgtgtttggagctaaagattatgccgaagctataagaggaatcaaaaccagcaaaagacctgaagcagttgctgtgtgaaatgcccatgtggttcaatattcaccgtatgctccaacacagtactcatgaattagtggcctatcgagcaccattatgttgcctggcctgctgtcaccactggcaatttgcttttctctggaaataactataagaaatcaggccaagttaggctgctgctgtgatgcgtagtttgtgtataatcttttggagtatcacgacaagtttaattcaagataaagccctttactctgtatcaccttgtagcctgtcaattctattcccccatattgtaaagcagttgtgatttctatcaatacaagttttgaacaaaacccgctaaat

SEQ ID NO: 10210 - DNA, 393 bp, Glycine max
  Clone ID: jC-gmle01810045g04d1
gattggttgcaattgagttgttattggttgttaagggtagcaaaacccatattaagtcttcttccttgtaaactcagcctctcttctcattcgaaatgattgaggctgattggaagattagggtgtattataatacaagttctggagtctcctccttgtgtatgtaataatacaacttatagtgatctagcctaggcacgttacattttatgtgtattgatgcatgtatcacaagggcttgattcaggtgaaaggaagaaaattagcttcttggcatcaaaggaagctagcccatcatcaatctttgtatatgactcacaataaagatggtgattgatgtatcacaccaagcttgcttccttttgttcttaacagtgctggaattcggcttgc

SEQ ID NO: 10211 - DNA, 406 bp, Glycine max
  Clone ID: jC-gmle01810045g05a1
ttcggaacaaattgatgctttgcaacatatggactcccaaggcttattatatggaactggggaggacaaggtgatagcaatgcttattccaaatctatgaaccttgatagagggatggctcaaggggtggatagtgataacagttcttatatgaaccatcagggatatggttatgcaccatattgaacatatgcatcttccaagttctgttatccgaagattcaacaggacggtcagcattactgtctgcaacaggtccactatgcatgttcttattacaaaatgacaccttctagtgatgtgtgatgtactaccaacaaaaacaatcttgcagacagagaaatatcaactactgttgatgttgctgattgtgtgtcttcaacaaatgctgttaataaaggaaaca

SEQ ID NO: 10212 - DNA, 501 bp, Glycine max
  Clone ID: jC-gmle01810045g05d1
aacgctaaaattagatgctccactccaaaccaagaccaagatcacataacagataatttgaaactgaaaaacaccaccactcactacatgactaaagcaatagggaataaacaaacaaaaacaaaaatcagccaatgactatcattgctttaacagctcttagaagcatcttcaagtgctgtagtcgatccattcccttctaacagcccttctgcattcattcttccatctgctgcatttgcagtagcagattcattgatcaaggttgcatcaagagacttcggaaatgtaaccgtcccaaatgtgaaatcactgggcttgctgatctgttttggtaactgctgttccttagactttttctcctgagtcaccttttcacgatcctcgtagaacccaaaatcatccaagatgcatgtttggcttgaatgctccttgaatattttgacaagttgaacacccttctcaaacttaacctcctgagtatccctactatttgttaca

SEQ ID NO: 10213 - DNA, 403 bp, Glycine max
  unsure at all n locations
  Clone ID: jC-gmle01810045g06a1
ggaaaagcgagagtcaagacgatatancaattnanaagtacgcgtgcacacgctcgtaatctcggtattgccctactgaattcacagtatagtattgaatatgatgaaactgttgggtgcaaggccgggcaccacatactcactgagggaagtgttatctacttgggcaaaccatatcttgttgacgaccgaagtgtactctgcctttcggacaccataggtattcttagggccgccgatgacggctatattatagctagaggacacctatgtgacgtaactaacacggtttgacgagatgaccgatttgacccatctggcgtctaccaaaacacaaaaactaagggtgcccttaatattatagaacttaggaacgggagaaaaaacctagtcgctctggtgg

SEQ ID NO: 10214 - DNA, 410 bp, Glycine max
  Clone ID: jC-gmle01810045g06d1
atgggggcagagaaacaatagaggcaagttttagtgttacaaacttacaggtcatcactttatttttattctccaggggcggttaagacttattatcacccccctttcctttttaattgaatagaacaatgtgtttcaccccttactggttagaccacacccccaactcggtttttttttccccccccacccaattttataaaactgggcccctttgtttttttttttcggggggcccccggccccttaattcggtgatcccctctaaccattttttttttggggaaaaaaacccccctaactttaaaattggaggcattgcccttgccaaaaatgcctatcggatttgcatgggggagttcaaaacagtttccaaggggataagaactctccattcgaaaattactttt

SEQ ID NO: 10215 - DNA, 485 bp, Glycine max
  Clone ID: jC-gmle01810045g07a1
cggaaccggaaatgaatagggtttggtttctactattccttctgctgatctcgaaatgcgatcatgtgtggagctcttacgcgggttccgctagctccgtcatcaacccttccaaggtcaaacagatttcctggaagccaaggtttcctcacggatttggaatgcgaccacttgatctctctagcgaaatcggagcttaagagatctgccgtagcggataatctctctggagagagccagctaagtgatgttcgaacaagctctggaatgttcatttccaagaacaaggatcctattgttgctggtattgaggacaagatttcgtcatggacctttcttccaaaagaaaatggggaagatatacaagtattgagatatgagcatggccagaaatatgacccgcattatgattacttcactgataaagttaacattgctcggggtggacatcgcatcgcgactgttctcatgtatctcactgatgt

SEQ ID NO: 10216 - DNA, 517 bp, Glycine max
  Clone ID: jC-gmle01810045g07d1
aataataaattaatttgtatttgttatatcgttttatacatagaggataagtgtaagcaatgaaagaaaaaagcagaatcccccgagaaggtctcaattcttccacttgaagtggggttgtgatagtagaaccctgattggaaccattataataatgcagaattactttacagtccgggaaaaaaaatcaagaactagttgaaatttgaaacccgaggcagagatggcttgtagtatctaggaaagcattcagtaaaatttctaacacgccttgcagcttttcctacaatagccgggaatgtctgaagatccaatcatatactcaggatttttagtgcattctccaagtgaagcccatctctcacagcttacatgattatcagaacaatcacctccagctcccacagtcttatcaaacgagtctacatgaatccactttgttgcggaccatttctcaccttcgataacagggcatccagcatggagactgctagtgtctggggtagcatttgtgtga

SEQ ID NO: 10217 - DNA, 530 bp, Glycine max
  unsure at all n locations
  Clone ID: jC-gmle01810045g08a1
gagcatttggctgtcaagcacttctcagttgagggacagttggagtttaaggctatcctctttgttcctaagagggcaccttttgacctctttgacacaaggaagaagcctaacaatattaagctttatgtccgccgtgtctttatcatggacaactgtgaggagttgattcctgagtatttgggctttgtcaagggtattgtggattccgaagatctaccactcaacatttcaagagaaatgttgcaacagaacaagatcttgaaggtcatcagaaagaacttggttaagaagtgccttgagctcttctttgaaattgcagagaacaaggaggattacaacaagttctatgaggctttctccaagaacttgaagctaggtatccatgaggattcacagaacaagggaaagattgctgaattgctcangtaccactccaccaagagtggtgatgaaatgacangcctcaaggattatgtgaccaggatgaaggaggtcagagtgacatctactacatcacacgtgaaagc

SEQ ID NO: 10218 - DNA, 466 bp, Glycine max
  Clone ID: jC-gmle01810045g08d1
agacccgcgaaattatagctaattagctaaatatccattgaacactgtcatcaatccaaaataaaaaaaggagaaaaaaacatagccaaaaaaggcattagagacgctactaacaagaaacgcatcatatttaattttaatcaacctcctccatcttgctgccctcagcatcagcctcggcctcctccagtgggggcatttcagcatcagcttcacctgcatcctcgtcaatgctcagtccagcttcaacattctgtggatcctgtttccaaaagtgttgggctcgtcaaggctgaaaccagaagtgagaagagcagtctcaaacagcaacagaacaaggtccttcacggatttgtcattcttgtctgcatcagcacgcttcctgagctcctccatgattgggttctcagggttgatctccatggtcttcttgcttgacatgtaccctgccatgctgttgtccctt

SEQ ID NO: 10219 - DNA, 498 bp, Glycine max
  Clone ID: jC-gmle01810045g09a1
gaagaacaagtagttgagaactaagaaggagaagcaaatggcttcctcaatgatctggttccccagctgttaccactgtcaaccgtgccggtgccggcatggttgctccattcactggcctcaagtccatggctggcttccccaccaggaagaccaacaatgacattacctccattgctagcaacggtggaagagtgcaatgcatgcaggtgtggccaccagttggcaagaagaagtttgagactctttcctacctgccagaccttgatgatgcacaattggcaaaggaagtagaataccttcttaggaagggatggattccttgcttggaattcgagttggagcacggtttcgtgtaccgtgagcacaacaggtcaccaggatactacgatggacgctactggaccatgtggaagctgcctatgtttggctgcactgatgcttctcatgtgttgaaggagcttcaagaggctaagactgcataccccaacggcttca

SEQ ID NO: 10220 - DNA, 437 bp, Glycine max
  Clone ID: jC-gmle01810045g09d1
agcttattcattatttctcatccattaatttccattgaagtccgaaaagagaaaccaaaaatacaggatgatgaaatctcaaaaagcaaaaacaaatgggaatgtagtttaagtacaaacaaacaaagtggggtggcggctacaaatgctttgcaaatttttcacacttataaacctgggggcttgtaagcgatgaagctgatgcactgcactttgcgaacgtttttgaatccgatgatacggatgaagccgttggggtatgcagtcttagcctcttgaagcttcttcaacacctgagaagcatcagtgcaaccaaacataggcagcttccacatgtgccagtagcgtccatcgtaatattctggtgacctgttgtgctcacggtacactaaaccgagctccaactcgaatttcaagcaaggaatgcatcccttcct

SEQ ID NO: 10221 - DNA, 519 bp, Glycine max
  Clone ID: jC-gmle01810045g10a1
ggacataaattatttactcattaaatttaagtacattatgtgtactgtttactggaaagttgatgttacctaacatacatgaatttccgcgggatgcaacgtatatataattagctttttcacattccgcatcaaaaatctatgtccatatcaaggacaaaatttgatttagcaaagtcatttttctcccactgcttctggtcatatctccactcgttactcctcaggaggatgaacatatgtggtggatttcacctctgaaggcaccatagactgagagtttcttgcttctgatttctcatttgaaaatgtggaaagtatggtcacccaaataagctcaatggtatccacccagaggagtctttgttcaaccggtatcacaccataagtaatgagatgggcaaatggccatagcttccatccggccgtcaacatggggaaaaacgttgccttcaattcatttaaaatactcataggaggatcaagacgcagtaatgcaacaacagtataatatatgct

SEQ ID NO: 10222 - DNA, 192 bp, Glycine max
  Clone ID: jC-gmle01810045g10d1
ggttcttggggttttttttaccaaccaccgcaaaaaattttttccccatgattcttgaaaggggttaaaaaaaaaaaaaaatttccccccctcctttttttaaccccaaatttatcgggggatgcatgaatctcagaatctgtggcatgatcaacagctaccagttcaacggctctgaggtcgttaaggcca

SEQ ID NO: 10223 - DNA, 531 bp, Glycine max
  unsure at all n locations
  Clone ID: jC-gmle01810045g11a1
acggatataatgtctcctttatttcattcatacagatcaccaagcatgcaaacaaacaaggaggaatgttactgtgacattcatgaacatcgcaaagggatatgtaaatgacatccataaagcttttgaaaggtgatagagcaagtcactttgatttaagagagaccaatgactttttcagttgttgtatcaagaccaatgtcatagaagcatggccttgttggaagccctggcatcgtactcattgttccaactaaaggataaataaatccagcgcctatactagctctaacatcccttatgggcaagacaaacccacttggagctccctttgctgcagcattgtctgagaaagaatactgagtcttagccatgcagattggaagacctgaaaatccttgcttgctatacatctcaatctgcttctcagcctgttctgagtactcaacacccctggctccatatgactntgctattgcctctattttctcttttatactcagttcaacaggatacaggaacttcaatggt

SEQ ID NO: 10224 - DNA, 391 bp, Glycine max
  Clone ID: jC-gmle01810045g11d1
attaaggagtccagctcaataagtagaataataagtttgaatgggagtaaacttctatacttaaatttgattccaatgaattaaaaaaaagaaaaagaaaattgtaaatttagttcacccgtcaccactaagcattttttatataaattattcaatgcttcaaatggatgcataaaagctctagagtgagaatcattgggatgatttcatcgtttttggaagttgagtactttgattccaaaggcgaaaatgaaagccaacaattgtgagaagccagcctccacagatgccacttcccctagaaaatgatgttcaaacccaaaataactctttacaaattcttcaaccctttgaccattctcaaggttggccctgttgtctccatattggg

SEQ ID NO: 10225 - DNA, 455 bp, Glycine max
  Clone ID: jC-gmle01810045g12a1
ccttggtatttaaatccatatctatgtccatatacgccacaaggcaattcttaggattacatctacattggaaaaaaggggttggcatttaaactaactctatactgacataaactaagtaccattggatccattcaacaatttccttgcttaaactaagagtagaatttaatttaaaacaacatatttatgaatttccacagaaaggattttaattccatactaataagaaagaagaaaaaaacctaactacaaataagaaagagaaaaaaagagttgttattgatgcattgttggaggtgccattgggtaagcaagaggaagaacataaggtggatgaggatgaacatgggggtggggtccaggaggaagcatgacaggagtgccaactgcagatgccatgtgccctggaggagcagccacaggatgtccaactggtgttccatacatgccta

SEQ ID NO: 10226 - DNA, 470 bp, Glycine max
  Clone ID: jC-gmle01810045g12d1
gcataacatccacatgatttttaattaaaaataaaaaatacacagttttgttgcaggaatgagagggcaacccttgggactataatcttgagaagccacttcggcttccaaaatagtatcccgacttccagagcaaaacacaaggctaataatacaacttgaataacaagatacatgcaggcagaagaaaaatgtttctagtatgtcacgatagaccaaataaaatttttattgctgactagtgacttgtgtgctaagggttctaagtgcgtacataatccctatggctgcataaacatcccctaccggaatcacaaattcacatcagttggaggagtgtatactagcacatacttactagttacataacagcagagtattcaaccactgttcgttcatagatgcatatcaaatcaacaacctttgaggtcacgccacctgagataaactaaccctgcccgataatgagc

SEQ ID NO: 10227 - DNA, 530 bp, Glycine max
  unsure at all n locations
  Clone ID: jC-gmle01810045h01a1
gagaatccccgtgtgcccatcatcgtcaccggtaacgatttctccacactctatgcgcctctcatccgtgatgggcgtatggagaagttctactgggcaccaacaagggatgaccgcattggtgtctgcactggaatttttcgcaccgattcaattcctgaacaggacgttgtcaagattgttgacaccttccctggccaatccattgatttctttggtgcactgagggccagagtatatgatgacgaagtgaggaagtggatttctggtgttggtgttgacggcattgggaagaagcttgtgaactcaaaagatggacctccaacctttgagcagcccaagatgactctggagaagctcttgacgtatggtaacatgcttgtccaagaacaagagaatgtcaagagagtccaattggctgacaagtacttgaacgaggctgcacttggaaatgctaacgaggatgctattaacaggggaactttcttcaatcttgaattggaggccaagcanacttggcaagaaatatt

SEQ ID NO: 10228 - DNA, 520 bp, Glycine max
  Clone ID: jC-gmle01810045h01d1
ctaaaatctgagatttgattgcaaagtaaacctgatacatctgactgagattgacccaaattacctatagggaatatatttcttgctaagttgctatagttaaacaatgaatgaagtaaaatcagaaaactataagggagtagactatcactttaaggttcttatttcactagatttcaattaaatctacccatttatacgtattgtggcacaatttgatgccttactggtacatgggctgcttgtgtaattgccgagaactccatgtactgtttacaggtgaacttggaaaaatgattgttggaagtctcttactctcctcgagataaggaaaatcaacagtgtaatgtagtccacggctctcatgcctagaaagcgcactgctgaccaccagctttgcacaacaaaagaggtttctcatctcacagatctcaggcccgaccattgttggctttcatccatgctgaaacagagactcctcccatttagcttctaaactaccaattttttgctcagcagt

SEQ ID NO: 10229 - DNA, 447 bp, Glycine max
  Clone ID: jC-gmle01810045h02a1
ctattttcttacaaggctctactctactgcttcaccttctgctctagaaaattcagtggttatacatggcttcggctactctctctgtagccaaaccagcccttcaggcaaatgggaaaggcttctctgaattctctggcctccgcagctcatcaggctttcttcccttttctagaaaatcttcagaggatttccattctgtcattgccttccagacctatgcagttggaagcagtggaggatacaagaagggtgtgacagaagcaaaactgaaggttgccataaacggatttggaaggattggaaggaacttcttgaggtgctggcacggtcgcaaagactcccctcttgatgtcattgccatcaacgacaccggtggcgtgaaacacgcctctcaccttctcaagtacgagtcgatcctcggaaccttcgatgctgatgtcaagc

SEQ ID NO: 10230 - DNA, 572 bp, Glycine max
  Clone ID: jC-gmle01810045h02d1
aaccctttcgacttaacgccctttcccaaagaggttgtgagtctcaagaatctcaggtggctctacctatcgaactgcaccctcggatggaagcttccggtaggactcggcaacctcacggagctcaccgaattagaattctccgataacttcctcaccggcgattttcccgcggaaattgtgaaccttcggaagctctggcagcttgagttcttcaacaattccttcacgggaaagattccaaccggcctgagaaacctcacaaagcttgagcttttggatgggtccatgaataaactcgaaggggatttgtctgaattgaagtacttgaccaatctggtttcgttgcagtttttcgaaaacgatttgtcgggggagattccggttgagataggcgaattcaaacgcctcgaggctctgtctttgtacaggaacagattgataggtcccattcctcagaaggttggttcctgggccaagtttgattacatcgacgtgtcggagaatttcttgacggggacgattccgcctgatatgtgtaaaaagggaactatgtcggcgctgctcgtgct

SEQ ID NO: 10231 - DNA, 534 bp, Glycine max
  Clone ID: jC-gmle01810045h03a1
aagagtgtgcgcggaaaagggagtgaatccatggattgaagtagatggtggagttggtccagcaaatgcttacaaggtgattgaggctggagccaatgctctggttgcaggctctgctgtgtttggagctaaagattatgccgaagctataagaggaatcaaaaccagcaaaagacctgaagcagttgctgtgtgaaatgcccatgtggttcaatattcaccgtatgctccaacacagtactcatgaattagtggcctatcgagcaccattatgttgcctggcctgctgtcaccactggcaatttgcttttctctggaaataactataagaaatcagtccaagtaaggctgctgctgtgatgcgtagtttgtgtataatcttttggagtatcaggacaagtttaattcaagataaagccctttactctgtattaccttgtagcctgtcaattctattcccccatattgtaaagcagttgtgatttctatcaatacaagttttgacaacaccagctcaatacatttatatatatt

SEQ ID NO: 10232 - DNA, 540 bp, Glycine max
  Clone ID: jC-gmle01810045h03d1
tttatatgctgcacgagttggtggtgatcgaaaagaatatacagttgtattagaagggagaaaagcgttaatctccgatggcttcgtccagggacaaggaaccagcgccgccacatcatcacccacctcttctgagcagcctcgtcgtccgcccctcccatacggatgccgccgcagccgccggtggtggtcgggctgccgatttcgagcccggcgaactccaccgcgatcctcctcccccttattcccgctccgatcgatatcccgatgaacctggatatagaattcgtgcaggttcctcatctccagttcaccgaagagatgcagatcgccgttttgcttctgattataataacttgtcacgaagccgtggttatggtggtgggagagatccaggaagatatcgagacccttcacctccgtatggacgaggtagagtagggggcaggccaatgggtagtggacttgctagaggggaaggcaacaatagaaataatcccaatgtgcgttctagggagggagattggatttgcctgatcc

SEQ ID NO: 10233 - DNA, 450 bp, Glycine max
  Clone ID: jC-gmle01810045h04a1
agcagttgtcacccaactaattttcttcaaaggatccaggttttcaaaagaaagaggaatcactctaatgggagccatgatcataatatgcagcctgccaatatgcttaatctactttccccaatggggtggcatgttctctggtccttcatctaaaaaggtcacagaggaagattactacttggctgagtggaactcaaaggagaaggagaaaggctcccatcatgcaagcttgaaatttgctgataatagcagaagtgaaagaggcagaaagctgaatgcttcaaccgagcttaccgaggaaatcacacccccacatgtttgattgctcctcttgaacttgttaatgttaacccttgtaccttcacttaagcctgcccctgaagtttgtgatatcaaatcaatgtgtgttcatatgtttgctatataatgaagctttcctttggagag

SEQ ID NO: 10234 - DNA, 415 bp, Glycine max
  Clone ID: jC-gmle01810045h04d1
tttatatgctgcacaagttgttggcgagcaataagaatatacagctgtgataaaatggtcaatagggtaaatctactatggcttcgctcagggacaaggaaccagcgccatcacataatcccaccatcttttctgagcagcacttgtcgatacgcccataccatacggatcccaacacactcgccgaaggaggttctgctggctacttcaagcccgccgaactccaccgtgatcctcctcccgattattccacctctgatcgatatcccgacgaacctggatatataattcgcgcaggttcctcatctgcagtgcaccacacagatgccaatcgccgaattgctgctgataataataactcgtcacaaatctcggcttatagtgaggggagagatccaggaatatatcttgaccc

SEQ ID NO: 10235 - DNA, 499 bp, Glycine max
  unsure at all n locations
  Clone ID: jC-gmle01810045h05a1
gggggtggacgaggtcgagcgtagaacagaagtangagttgggaggcacgctcacataaggcaaataataaagatataggcagtggcatccattctgtttcttaccaatgccaaacaatgcttcaaaccacaccaacactgcagccacttccggaggctctggccagtgatccaccaaagggacaattcccttcagaaccaaagatcacaagcaccaccagaagggcaatcacccttcaccctagagatgctacaaagtccaggaagttttggattctcagggtttgggaatccaatgcaatcttacgtgaaccagcagcaactatctgacaatgttttctcctccacgaccaaggaggagcctagagatgacatgttccttgagtctctactatgctgaaggaatgttcttttttcctttttggtagctatggaaggttggaaatattggaagtggcggactaggatttattggacaaataacgatccattcgattta

SEQ ID NO: 10236 - DNA, 510 bp, Glycine max
  Clone ID: jC-gmle01810045h05d1
aatacaaaagtccttcagcatcatgttacccaaaatgaatgtttacagtaaaaaggaaggggggagtaactcaaattatactacgtattcatagcatatatggacaaatgaggggcactgtttttcataatgtacaattataagattgcatcagctcatgttactccttccttgcaaatacacttgatcagcgtaccttaacgatgtacgtactgttctatatgcatatgcattttacttctgaaaatgcttatccaaagcataaacccgcatgctagtgcctgcaattctacctacacattggactctgcttacaagagaatcacaacgtttgagaagctatttcatcaaatctaagaagacgaagccattccaaagactatgcaacagcattgatggcagtaaattccttgaccgtgtatatatcacacccatcaccatcccaagaaatataaggggaagcatcctctgtatgttaaaatgtgcaagagcaaaggcgattgaacttac

SEQ ID NO: 10237 - DNA, 347 bp, Glycine max
  Clone ID: jC-gmle01810045h06d1
tttttttttttttttttttttttttttttttttttttttttttttttttttttttttttgggattatgtgcttttttatttcattttttactctttttttaaaataaatgtgcactattttatggagaaaaaaaagagcaccaccaaaacacggtttacccgagcgggcactatataaggaaaacaaaagagaacaaaaccaaaaaaaacccgcccgttttattgcgggtgtacccacccatagaggcgaatttatggttgagttaacaaaaaaaactttcctgattataccttcctgaaccccccccacaagaggcattttcttttaaaaaaacacccgttttttt

SEQ ID NO: 10238 - DNA, 480 bp, Glycine max
  Clone ID: jC-gmle01810045h07a1
gagcatttggctgtcaagcacttttcagttgagggacagttggagtttaaggctatgctctttgttcctaagagggcaccttttgacctctttgacacaaggaagaagcctaacaatattaagctttatgtccgccgtgtctttatcatggacaactgtgaggagttgattcctgagtatttgggctttgtcaagggtattgtggattccgaagatctaccactcaacatttcaagagaaatgttgcaacagaacaagatcttgaaggtcatcagaaagaacttggttaagaagtgccttgagctcttctttgaaattgcagagaacaaggaggattacaacaagttctatgaggctttctccaagaacttgaagctaggtatccatgaggattcacagaacaagggaaagattgctgaattggtcaagtaccactccaccaagagtggtgatgaaatgacaagcctcaacgattatgtg

SEQ ID NO: 10239 - DNA, 461 bp, Glycine max
  Clone ID: jC-gmle01810045h07d1
agacccgcgaaattatagctaattagctaaatatccattgagcactgtcatcaatccaaaataaaaaaaggagaaaaaaacatagccaaaaaaggcattagagacgctactaacaagaaacgcatcatatttaattttaatcaacctcctccatcttgctgccctcagcatcagcctcggcctcctccagtgggggcatttcagcatcagcttcacctgcatcctcgtcaatgctcagtccagcttcaacattctgtggatcctgtttccaaaagtgttgggctcgtcaaggctgaaaccagaagtgagaagagcagtctcaaacagcaacagaacaaggtccttcacggatttgtcattcttgtctgcatcagcacgcttcctgagctcctccatgattgggttctcagggttgatctccatggtcttcttgcttgacatgtaccctgccatgctgttgt

SEQ ID NO: 10240 - DNA, 532 bp, Glycine max
  Clone ID: jC-gmle01810045h08a1
gaaaaagtacaaggcgttcaagccgctgaacctgccagacaggcaatggcccaacaagaccatcgagaaacccccgagatggctgtcaaccgatctgcgagacggcaaccaatctctggttgatcctatggacggcgagcaaaaatggatgtacttccagatgctcacaagacttggctacaaggagatcgaagtttccttcccctccgcatcgcaaaccgacttcgacttcacacagcgcctcgtccagacacccggcatagtgcccgacgatgtctggctgcaggtcctgtcgccgtgccgcaaagagctcatccgccgcactgtcgactccctgaagggcgcaaagaaggccatcctgcatctctaccttgcgaccagcccgtgcttccagcaaatcgtcttcaacatgaacgacgaggagacaattgccctggcggtcgagtgcacaaaatacgcgagatcaatcacaaaggacgaccccgagcaggcagggacacagtggcactacgagttttcgcccgagacgttc

SEQ ID NO: 10241 - DNA, 412 bp, Glycine max
  Clone ID: jC-gmle01810045h08d1
gacaggtgtcaaggtgcatttttgtcttccataataccactacagctcttatggtccactgtgagcaagagcgctttgctggtccaaagtagggattggactttctcgcgctgtgataagtctggtgtcttgagaataaacttagtcgcacttttgaacaccaagttcctgcccaatgccaatgctatcatctggaaagcgcaacgagaatgaaggcaagtcgacctttaaacgcctgcgctcttcacatacggctgctcaccactgaccattgcctccagcttgtaaacaacagggccattctgcttctgatcaccctggtcatccgcactatgcgcgctcctcaggggactgttaggaacatccacggtatcactcctcttgggcctgaacgggatgggagtgctaggtc

SEQ ID NO: 10242 - DNA, 249 bp, Glycine max
  Clone ID: jC-gmle01810045h09a1
cgaactcataggaaactcgcacgattaataccggggctgacaagctcactactcgtgaggctgccttctttttttttttttgatcaaccaaaagcaggactcaatacgtaccggggccagaggggcgtggaatgtaacttacaactggaaaacaccaccaatttatgtgtctctaaagctgtaccgtaataaccgacaaaaactattggggccattgactatcattgttttaacaactcttagaaacat

SEQ ID NO: 10243 - DNA, 413 bp, Glycine max
  Clone ID: jC-gmle01810045h09d1
caccttcatcctctcattctgtatttttggctttttttttcaacccccattcactccattaacactctgactctaaaatggggtacactaaaaattcgacagcccccccctcttttttcgacccctattaattgtgggactagctctcatctcactatgggccaactacgaggcatccaaaaccttccacatcaccgtggtaaacgacgccaaggactcccccgcgggacgccgtttcgccctctcctatgtctcaaacgacgaagcctctcgcatactcctcaacacaagctcctacgtagaacactttttttatccaaattgtaataacaatgataacaattaccccaagaagcacatagattgtgtcaccctccagctacctcgccggaatttcaacgtgaccgacatcg

SEQ ID NO: 10244 - DNA, 512 bp, Glycine max
  Clone ID: jC-gmle01810045h10a1
gcttctttctttcatcacaccccattctcccaaactaacaaacaaatcccagggagcgaccaaccatggcttccaagctctgcgactcatgcaaatcagccactgctaccttgtactgccgccccgacgcggccttcctctgcggcgcctgtgactctaaggttcatgccgccaacaagctcgcatcgcgccacccgcgcgtcgtgctctgcgaggtgtgcgagcaggcgcccgcgcatgtgacctgtaaagccgacgccgccgcgctctgccttgcctgcgatcgcgatatccactccgccaaccccctcgccagccgccacgagcgcatccccgtcacgccgttcttcgagtccgtacattcagtcaaggcctcctcgccgatcaacttccaccaccgcttcttcttcgacgccgacgctgatgctgacgtcagcaccgaggaggccgaggccgcgtcatggctgctacctaatgcaaagacagatctaaattcgtctcagtacttgttc

SEQ ID NO: 10245 - DNA, 362 bp, Glycine max
  Clone ID: jC-gmle01810045h10d1
acattgcataattcaaacaaaagaaggggtaggccatatatacagcagcaaaagcaaacataagaaaacaaaaaagtaagcattcatattcatatatgatatatatgataatcatcaacacgacggaacgacgccgtatccagccagaggggccgcatcagtgcgtttcgcgaaccttcctttgattcttggcctcgtttcggcatacgcttttctcgatgcgtaacgaatggtcttctcgaactttcggttctttcttttctccctgtacctcaacactttagcctccctattcgccgccgagaactgcgccgtcaccgtcaccggagccactttgctgtagctgcagttcgatatcttcg

SEQ ID NO: 10246 - DNA, 475 bp, Glycine max
  Clone ID: jC-gmle01810045h11a1
acatctaatattggggttggtgcgataaaaaaaaaacacaaattgggtaacgcgtaaaagaaatcaacatcggattccccatgtgaaacagtcaaatacagtcaattagaacttatttaaagggagaatattaacgtaaattcaggaggcaccgactagctcaagattgggcattgatgttcctgctaggaaggctttgaacagtgtcaaagcaagttttggtgaatgcaaaggaacttcgtgccccgcaccccttacaaccacaaacgtaagggcagcatatttttgagtgcatcctcccaccttcccattattataccatgctcgccaaggactcacagtaggaaggtcgagagcttttatgctatagcgagtagatgtcacgggtattaccacgtctgtgttaccactgaacacccatatcctcaatcccatctgaataagttcatgataaatattgagcactgttcttgga

SEQ ID NO: 10247 - DNA, 468 bp, Glycine max
  Clone ID: jC-gmle01810045h11d1
gaattctacaaattttccagattgcatcgagtttagaagatcacaattctagagtaaattggtctagttgaaatgcaatctctaagtaaattcctgtcaaataaaatgcatagatattacaacccgtaatttacacaacaattccaggaatctcttgaactgataacggtgccattacatgtcatcctacatgctatccattccaaaacatcatggattacaacatacacgagtgatcaatcagtatcgtaaagatggtgttcactctgcagaatataaaacaattttgatggttacagatctaagaacaaaacctggagtagcattgttgtgcacagaagtttccccattaaccaatccataaacataattgagctttctgatctcatagggccacaggctactcataacaattcaagcaaatcatttccagctatagtttcatcctttaaccttggccttttcttt

SEQ ID NO: 10248 - DNA, 479 bp, Glycine max
  Clone ID: jC-gmle01810045h12a1
accaacaacactactcagctgagcagttaggatatcgtactttcacatgaaagtgtcataaaggcagataaaagcatatacattcaacacacacgaccataaggctcaagcacaaggcaatagtatgacttaaacggtgacacatttcagcaattattcttaaaacactgcagattttctgaatttgttcaaaatacaagagccttgttactgtagaaccacacattcttgtgaaccagccaccaccaccacagtagggtgttcgcttgtgctgactgcatcaacttcttttttgacactttgaacattgacatcctccaattcaccacagccaatggcttcaaaaacaagatcattgacttcttgaaacctctcttgagaaagggacacctcagcaagaagcctccaagcattgccttcagacgcctcatcataatccttcctcctctttaaaaccatgtgtccactaatttcccaca

SEQ ID NO: 10249 - DNA, 580 bp, Glycine max
  Clone ID: jC-gmle01810045h12d1
tcgcgatctagaaccctgtccactggccaggatcagacctcttgtgggaagatatgtgccgcctgaagttgttgctgttcgggtgccacttctaaatttgtccaattttcaaatcaacgattggcccgatatgtcagcaaaaagctatgcaatcatggttctcatcctccctactgatagtgttagaaaatggcgagaccatgagttggaacttgttgatgtggttgcagatcaggtagcagttgccctttcacatgctgctattttggaggagtctatgcgagcccgtgatcaactcttggagcagaatgtcgctttagatttagctcggcaagaggcagagatggcaattcatgcccgcaacgattttcttgccgtcatgaatcatgaaatgaggacgccaatgcatgcaattatagcattgtcatcccttctcttggagactgaactgactccagagcagagggttatgatagagacagtgttgaagagtagtaatgttttggcgacactcattaatgatgttctagatctttctcgactttgagatggtagcctcgaattagaaaagggaaaatca

SEQ ID NO: 10250 - DNA, 469 bp, Glycine max
  Clone ID: jC-gmle01810046a01a1
aaagtttcttcctttctctgctctttgccttctctgacacatttggtgccttgtagagcgtgttttggcaggaaggtggtatggcgaaggacgttgaggttgctgagcgtggctccttctctgggaaggactaccaagaccctccaccagcaccactcattgatgctgaggagctcacaaagtggtccttttacagggctctcattgctgaattcattgccactttgctcttcctctacattactgtgctcacagtcatagggtacaagcaccagactgacctcaaggaaaatggtgaaatctgtgggggggttggcattcttggcattgcatgggcctttggtggcatgatcttcatccttgtctactgcactgctgggatctcagggggtcacattaacccagcggagacatttgggctgtttttggctcgcaaggtgtctttgatccgagccatcatgtacatggt

SEQ ID NO: 10251 - DNA, 450 bp, Glycine max
  Clone ID: jC-gmle01810046a01d1
aaaattaaaatttaacattttccataaatatattttgagtacagagatgacagctgaagagaataacttaaaagaaaaaaatgacacactaaagggaagaacaccacagaggaaagtgcaaaaggctccccctgtcatgaaagagactttaatctacacttatccacaatcttgaagacataatcgagagggtcaaagaaacgttgcaaaacacaagccaaaagcattcccaattattattaaacttgccatatcaacctccatctctccaattatcttctttccactagagccatcataaggaagagaaagacaactcaattatgggggttactcctgaatgatccaagagccttagctgcacctgctcttaaaatgaactgatggtagaaggctgcaatggctgccccaataaatggtcctacccaaaagatccaatgggcatcccat

SEQ ID NO: 10252 - DNA, 295 bp, Glycine max
  Clone ID: jC-gmle01810046a02a1
gtagcgtctagggcctatacatcaccattctgtcttaagcaaaagcctgcttccttaaaagcgtatagagcacgtggtgtgggtatgctgaaatgggccaggtccgggcctcaggatacaggggtgccacatgcccagaggttcggactagcccatgaaaccctactatctgacggtggtgtcgttctttggtagagaggttgcactggacctaaccatcatgaaaatggaagaggccatctccacttagtgaaaacatttcttgataaccagggggcggatactgcgatcgcat

SEQ ID NO: 10253 - DNA, 281 bp, Glycine max
  Clone ID: jC-gmle01810046a02d1
aaagacaaaaaaccaaacgtgttactaatctcaaggaaatttaaattcgaggaaaaaaaatgttctagcctatggctaattatataaaggcgccagtcacatgaaacatgcggccttattgcccgcgcttgcacatgcaccatacagatgcccactcagggctgcttgagctccaggaacctacctgcttaaaggtttgaaacgacaaacggacacacactttcgtcaaataattccaacactgcagacacccaattgacggcatgaacgtcattgctttc

SEQ ID NO: 10254 - DNA, 520 bp, Glycine max
  Clone ID: jC-gmle01810046a03a1
cctaaccttaaataattctcctctcacccttataaaaacactcattttaactcccacttttgcatttccacctatctatctatccatctatcttttctaacatggctgctgggactggactctttgcagagattttggatggagatgcgtacaagtactatgctgatggagagtggaagaaatctgcttctgggaaaagtgtttccatcatcaaccccactaccagaaagactcaatacaaagttcaagcttgttcacaagaggaggttaataaggtcatggacttagcaaaatctgcacaaaagttatgggcaaagaccccactatggaaacgtgctgagcttcttcacaaggcagctgctatccttaaagagcacaaaactccaattgcagagtgcctggtgaaagaaatagcaaagccagccaaagatgctgctatggaggttgtaagatctggggatctggtttcttacactgctgaagaaggtgtaggattctgggagagggaaagtcttggcgt

SEQ ID NO: 10255 - DNA, 456 bp, Glycine max
  Clone ID: jC-gmle01810046a03d1
ccccctcctttcattgattggacattcaatttaactggaacacaattatattccttacttaatgataaggcacaagataaaaattcagattcatatcatgctaaatatgagtacgacaaggggtcacgtgaagtagctacgtgacagatcaatcaaactcgttattcatctttatgataccctgctgcaaaagagaaggcaatgttgaactcatacgttttgaacgttcactatgatttatggaacatgatataaattgattttcctccatgcatgtgtgggtataactattacactactagcccatagtataggaagggctgggtaagttgatcacaaacgttttgaccttgggcatcatgtttatgctgtggggaatcccttgagatccaatgccactgtcctttataccctgaaagggaaaatgatctggcccacgagccggggcggaattta

SEQ ID NO: 10256 - DNA, 254 bp, Glycine max
  Clone ID: jC-gmle01810046a04a1
ctctaacacagtgtccactcgtgcgctcttgatatcctcatcctagaggacggcacgggggttcttaaagcaagagatccatattgtctcttgctagtaccgcaaggcatttttaggactggtcgagttagcgtcaacggtttcaatactggagcgtcagattccacgtcacaccagtttctggccgcgagttccatgatccttgcatcgcagtccgccacaaccatggttacaggggtgagcgctcttacacc

SEQ ID NO: 10257 - DNA, 429 bp, Glycine max
  Clone ID: jC-gmle01810046a04d1
aatactaacaattcatatccttgctacaaatgcatacaacgtgttggattaagggcatgctttaatgcaagtgggtcctttgcctataatatgcatgaacaatcagttctgtgttagcgtggctactagtgattggatagaaaaccaataacgtcaacggaaccccaagcctccatcagtgaaaacctcattctctggatgcgagccacctgaacagaaagcttccacatcaatttgccaaggttctcgggcagcagcattgacagcttccttggcgttaccatcctgggagactatatcttctgctggacaactgggttcaaaacgaacaatggctgtctactctccttgaggaacagcgattgtttgccaactaaatgtttgttctgaactaatgctaactctgacaagttgccgagcggggagaac

SEQ ID NO: 10258 - DNA, 472 bp, Glycine max
  Clone ID: jC-gmle01810046a05a1
attccattctctctgtgtatttccctacctctcccttcaagatgcagatcttcgtcaagaccctcaccggcaagaccatcacccttgaggtggaaagctctgacaccatcgacaacgtcaaggccaagatccaggacaaggaaggaatccccccggaccagcaacgtctcattttcgccggaaagcaacttgaggacggccgtacccttgctgactacaacattcagaaggagagtactcttcacctcgtccttcgtctccgtggtggcatgcagatcttcgttaagacactcaccggcaagaccataaccctagaggttgaaagctccgacaccatcgataacgtcaaggccaagatccaggacaaggagggtatccccccggaccagcaacgtctcatcttcgccggaaagcagctcgaggacggccgtaccctcgccgactacaacattcagaaggaatcaacccttca

SEQ ID NO: 10259 - DNA, 476 bp, Glycine max
  Clone ID: jC-gmle01810046a05d1
gacaattaatcatttcatatttcacacattcataacaaacgtaggtgggatattagagtactattattaatgggacacaattgagttcaacacaaaccgaacttattttcaagggacattattacagacccattaaacatcaaagttcttcaaatgttttgggaacacatccaacattacacaacgagcttaaaaccccccacggagacggaggacaaggtgaagggttgattccttctggatgttgtagtcagcgagggtccttccatcctcgagctgcttgccagcaaaaatcagcctctgctggtccggtgggatgccttccttgtcctgaatcttggccttcacattgtcaatggtgtcagagctctccacctcgagggtaatagtcttacccgtaagagtcttcacgaaaatctgcataccaccacgaagacgcaacaccaagtggagagttgactccttctggatgttgt

SEQ ID NO: 10260 - DNA, 504 bp, Glycine max
  Clone ID: jC-gmle01810046a06a1
ctaaaacatctcaatgggttcttcttctattacaacatcgcccgcaaccatgaccatggctgcgatcgtgctcctgttcacggtctttgccgtttcctccgccctagacatgtcgataatctcgtacgacagcgcccacgcggacaaggccgccacgttgcgcaccgaggaggagctgatgtccatgtacgagcagtggctcgtgaagcacgggaaggtgtacaacgcgctcggcgagaaggagaagcgcttccagatcttcaaggacaacctgcgattcatcgacgaccacaactccgcggaggaccgaacctacaagctcggactgaaccggttcgctgatctcaccaacgaggaatacagggccaagtacttgggaaccaagatcgatcccaaccggaggctcggaaagaccccgagcaaccgctacgcgccacgtgtcggcgacaaattgcctgattccgttgattggaggaaggaaggtgctgttcctcctgtcaaaaa

SEQ ID NO: 10261 - DNA, 565 bp, Glycine max
  Clone ID: jC-gmle01810046a06d1
aattccacattgtaagcaaattaaaatagcatgtgaatatgggacaaatccaaatattgctgctgcattgtcacataatctacagaaccttgaaaactaacagcaatcaaatatgttcgccatttggaatttgaatacaaatacagtgcatcgataatataaccctatgtacagagccaatgtctgactgaaatttgatacagaacattatctattttgtatcataataaaatggtaaagatctttatgttacgtgcagcattatgtgaagaagggggaagtgcatccagctggtgctttagtccttcgtcttcccttttacttcatcattggctccttctgcacgttcacatttccttaaactgcttaagcactgctgaccttgttcttacgtccgaaggtccaatggggtttcgctggagtacgccttaatgccttcactccaaaggggttgttcttgctcctgagacaagttccagcgtaagtgttgcagatgggatagtctgcagggcaacaactgtagtggtcatcacagcaggaagcacccctcagaggacagcaaccc

SEQ ID NO: 10262 - DNA, 447 bp, Glycine max
  Clone ID: jC-gmle01810046a07a1
cattggtattgcctttctttccaactggatcctttgagcgaatggaggaagaaggagatgtagcaactgccttcaccctagcaaggatgttgtcaaatattccaatttcaagaggtggcccaactagtttagtcatatatgacattcatgccttgcaggagaggttttattttggagatgaagtcttgcctttgtttgagactggtattcctctcttaaagcaacgtctgagtcagcttcccgatgctgataatgtagttattgcatttccagatgatggtgcatggaagcgattccacaagctgtttgataatttttcactagttgtatgtactaaggttcgtgaaggtgacaaaaggatagttcggctcaaggaagggaatgtctctggtcatcatgtagtcattggtgatgatttggtccaatctggaggcaccctgattgagt

SEQ ID NO: 10263 - DNA, 521 bp, Glycine max
  Clone ID: jC-gmle01810046a07d1
aagggaagattagatgatttgcattcaacggtcttgtaccagagttgacactcaatcaggtcacagtacagaagaaattaacaggtttcattgtggtaaactagtagcaatgcacatcacaactgaaaagatgttattctaaagctaatcagggatgaaaattgtagttgagaatcccttttaacacagttcaatgctttcccctcgaaaaattttgccttcaaatttgtagggcattagcaatagacccggctagactcagcacttcaaaaggagctgtatttgctacagctttgacagtaagagggcaagaatctgtaatccagaagtaggcaaatgcattctccaggcgtcttttttatgagtgaatcgctcccatgattggttaggaaacacgccatgggtaacataggcactcacctttgctgcaccattggctgccaaaactttctgacactcaatcagggtgcctccagattggaccaaatcatcaacaatgactacatgatgaccagagacat

SEQ ID NO: 10264 - DNA, 467 bp, Glycine max
  Clone ID: jC-gmle01810046a08a1
cacaaggcagaaagcaagctcatcctagagttttaaaaatggcagcagcctcctccatggctctctcttccccatccttggctggcaaggccgtgaagctgggcccatcagcccccgaagtcgggagggtcagcatgaggaagaccgtcaccaagcaggcctcctccggaagcccatggtacggcccagaccgcgtcaagtacttgggcccattctctggcgagcccccgtcctacctcactggcgagttcccaggtgactacggctgggacactgctgggctttcggccgacccagaaaccttcgccagaaaccgtgagctcgaagtgatccactccaggtgggccatgctcggggccttgggctgcgtcttacccgaactgttgtcccgcaacggggtcaagtttggagaagctgtgtggttcaaggccgggtcccagatcttcagcgagggtgggctggactac

SEQ ID NO: 10265 - DNA, 482 bp, Glycine max
  Clone ID: jC-gmle01810046a08d1
gtaaaaagcaagtaacattaagttggattgggatacacaagataattcacattatctgaagtacattgcaataacatatacttcaccaaacacaaatctaaaaactctcaaaagtccacaagtcatccttttctttcatgctcacttgccggggacgaagttggtggcgtaggcccaggcattgttgttgactgggtccgcaaggtgatcagcaaggttctccaatggacccttaccggtgacaatggcctgaacaaagaacccaaacatagagaacatggccaatctcccgttcttgagttccttcaccttaagctcagcaaaagcctctgggtcatcagcaaggcccaatgggtcaaagctgccaccagggtagattgggtcagtgacctcaccgaggggcccaccagcaatacgataaccctcaacagcacccattaggataacttgggtggcccagatggcgaggatgctctgggcgt

SEQ ID NO: 10266 - DNA, 477 bp, Glycine max
  Clone ID: jC-gmle01810046a09a1
cagtgtttcatcatttgggtttcgcagaagagagagaaacccattgctagagagagaaactcgcagtcgcagacatgtcttccttcgatgccttcgccgacgacttgaacgtcaactcttcttccactcgccagcacgacgatgacgaggacaacttctctggctacggcggctactcctccttcaccggaggattctccgccgacggagatgtcgccgtcgatcactccggcgacgcgtcgccggagatctacggcttcactgattcgaatcccgcttactctcagtctcccttcgaatcggccaccgtagagaacgaaaacggaaacggatactgcgacggcgacggggtttttgtctacgacggtccggtgcttcctccgccgactgagatggagccggaggaaagttacgctcttcgcgagtggcgccgtcaaaatgccattcaggtagaggagaaggagaaaagggaaaaag

SEQ ID NO: 10267 - DNA, 332 bp, Glycine max
  Clone ID: jC-gmle01810046a09d1
agacccccatttttcccacattttctttgtctaaaagggtggtctttttaaaccccggatcattggaaccccccgccttaaatggaaaaaaggggtttaactccccccaaaccttaaaggttaaaaaaataaaaagcccccccagagctttaaaaacttttacccgggggaaaagatttattaaacactgggggggggaaaaaggggtggccaaaaaaaaattgggggggaacccaagttttatagacaaaatttttggggaggttgttccttaaagggaggagcttctttctgggggtctttttagagggccttaaagggggcattctttg

SEQ ID NO: 10268 - DNA, 494 bp, Glycine max
  Clone ID: jC-gmle01810046a10a1
cagtgtttcatcatttgggtttcgcagaagagagagaaacccatttctagagagagagactcgcagtcgcagacatgtcttccttcgatgccttcgccgacgacttgaacgtcaactctttttccacttcgccagcacgacgatgacgaggacaacttctctggctacggcggctactcctccttcaccggaggattctccgccgacggagatgtcgccgtcgatcactccgccgccgcgtcgccggagatctacggcttcactgattcgaatcccgcttactctcagtctcccttcgaatcggccaccgtagagaacgaaaacggaaacggatacggcgacggcgacggtgtttttgtctccgacggtccggtgcttcctccgccgacggagatggagccggaggaaggttacgctcttcgcgagtggcgccgtcaaaatgccattcagctagaggagaaggagaaaaggggaaaagaaatgagattgaagat

SEQ ID NO: 10269 - DNA, 580 bp, Glycine max
  Clone ID: jC-gmle01810046a11a1
gcgagaaatggcgatggcaatggcgcttcgcaggcttttatcttcaattgacaagccgcgtgcgccctcggttcaatgccggctccctctactacaagtcgtctttgcctgatgaagctgtctaccaaaagggagccaaccccggagttacatggccgaagcagttgaatgctccacttgagggcgaggatcctgagatcgctgatattattgagctagagaaagctaggcaatggaaggggctagaatggataccgtcagagaattttacctctgtgtctgtgatgcaagcgggtggatcggatatgaccaacaaatacagtgaggggtaccctggtgcaagatattatggtggaaatgagtatattgacatgggtgaaacactgtgccaaagcgtgccctaaaagcttttagattgcatccccctaaatggggagtggaacgtgcagcctctgtcatggtctcctgctaatatgcacgtttacactgcattgctttaaccctatgaaagaaatatggaacttgatcttcctaagggggcccattttctcacgggtatcatactgatacccaaaagatt

SEQ ID NO: 10270 - DNA, 122 bp, Glycine max
  Clone ID: jC-gmle01810046a11d1
taaggggggggggtttttttttttttggaaaaccccccccctacggtggtgggtgcccccctttggggggggggggctaaaactctttttttaaaaaaaattgggttttaaaacccttttta

SEQ ID NO: 10271 - DNA, 384 bp, Glycine max
  Clone ID: jC-gmle01810046a12a1
gaaacatctaagtgagatacacagtttttaggtagcaagcgtgagtgggtcaccttcgagacatatcagctacatatcgggcgcatatgggaattgcgccactaaaatactgttcatagatgggcggcttagctaatgctgtgcagacaatccttgcaaaccctatgatccgcattttcagtgggtctagggagaaccatattggcgttgctgcttatcacatgaaagggaatgttggccggaaagttacgtccatggctgaagaaaaaccaccaagatctgctgcgaccccagttgcaccacacaccagcagaacccaagccacaggactgactctacttcttcagcaaaggagatcaccaagctttctgatgtgttggcttt

SEQ ID NO: 10272 - DNA, 547 bp, Glycine max
  unsure at all n locations
  Clone ID: jC-gmle01810046a12d1
ctccaattaatccattccgnatnccnnannncnnnnttnnnnnnnnnnnncnnnnnnnnnnnnnnnnnnnnnnnnnnnnnnnnnnnnnnnnnnnnnnntttnnnnntttnnnnnnnnnnnnnnnntntgggttggttttttttttnttttttttttttttttttttttttttnntttttgttgttcttttttgacttaattacaccaaggtaccacccttaacatactcattaaaagccagagcaaccaaacccaacatagcaaatctcccattccacagttctgcatctgaggacatgaaccctttggacttaaactccacactgatcccttggaagagtggaatcaatgaatcaagggtaaggaccacacttgttcccaagaaccatgggataccaccattttatatttgttcaaacacaccttgccctttggctacttccactgccattgcacccacaaacccaatcatgtccaaccttccattgatcctctcacgtgctggcccactgaacgccaacacatcagaaaacttgttgctcacctt

SEQ ID NO: 10273 - DNA, 294 bp, Glycine max
  Clone ID: jC-gmle01810046b01a1
gtttcgtttaggtgtttgccaccaccattctgcgttaagcttaagccaccttccgtcggacggtgatagagcacttgatgctcgaatgacatcaaaagacacttgcgggccaatagatacaaggtgggtcaccgagaagagcatcgatatcacctacttgtcccgacgtgtcggattcactgtcgctctcgatctaacatcttggttcccgcaatcatgcatgtattcggaagacgctttctctcattaacgagaactgtccttactacataggccatggattctgcactcgca

SEQ ID NO: 10274 - DNA, 456 bp, Glycine max
  Clone ID: jC-gmle01810046b01d1
aaagacaaaatcccagacgtgttactaatatcaaagaaatttaaatacgaggttaatttctattctagcctatggcaatttatattctggagcaagtcacatgagacatgccaccttattgcatgcactttcacatgcaccaaacaaatgcctacacagggcaactagtgctacaaaaacatacatgcttcagggtttgaaacaacaaacggccacacactttcgccaaataattcaaccactgatgacaccaaatttcctgtatcaatgtcatgcttccaagcctgagcaagagtggacgacaccttcctttgttgatctccaagctccctgcccggcacgttgtccatggataatttgcgagccattgacattgtagaaacccccactcatggggaatatgcacctgtagaaccttggatgtcaactaacatggagttgattgctaccacaccc

SEQ ID NO: 10275 - DNA, 361 bp, Glycine max
  Clone ID: jC-gmle01810046b02a1
cgatcgcataccggaacgagtactagagattgtcagtattgcggaaggacattttcgcgtaacgatgtacttcaaagacatctaaagacgcatgtggggcatcaagttggggatggtagaccgagagcgtcacctagtccatctatcgctcctgaggttccggattcaaggtcaattatccatcaaacacctcagatccaacaagaccagatctatcctcaggaccctctctctgcaaataccaatctgacggttcaggctggaccatcgactggcgattcagctataactggaccggtgtatacgactcaacaggatgaagcttggagaatccttcatgggctggtacaagctactcaac

SEQ ID NO: 10276 - DNA, 429 bp, Glycine max
  Clone ID: jC-gmle01810046b02d1
aaagacaaaatcccagacgtgttactaatatcaaagaaatttaaatacaaggttaatttctattctagcctatggtaatttatattctgcagcaagtcacatgagacatgccaccttattgcatgcactttcacatgcaaaaaacaaatacctacacagtgcaactagtgctacaaaaacatacatgcttcagggtttgaaacaacaaacggcaacacactttcgccaaataattcaaccactgatgacaccaaatttcctgtatcaatgtcatccttccaagcctgagcaagagtggacgacaccttcctttgttgatctccaacctccctccccggcacgttgtcgatggatatttgacgagccattgacattgaagaaacccccatcatggaggaatattcacctgttgaaccttgcatgtcaact

SEQ ID NO: 10277 - DNA, 422 bp, Glycine max
  Clone ID: jC-gmle01810046b03a1
cttcttcttcttacttacttgtacactcttcaaccactcaacaaagtggctggtttttggttcttaagccatggcatacacatcctctctgcatctatgtgaggcccttatggcacgtgctgcgtaccttcatggatcttcttgggaccgtgattcactctccttcccatcattgtctggcctcaagatacactctccatgcaaagcagctgccacgatctcacgcagaaggggggcgtgcgcttccaccatcagagttcgagccgctgtgagagagacactgctccagaccactgaagtgtctctggaggagaaatacgtcaacaccattcggttgtcgcacattgacgctgttgacaaggtcaagtgtggtcaccctggtcttaccatggggtgtgctccaatgggacacattttctacg

SEQ ID NO: 10278 - DNA, 541 bp, Glycine max
  Clone ID: jC-gmle01810046b03d1
aaaactcacaagccaaatagttgttacaaattcatacaacttcattaattcaactcatcctttaatgtaagtggctcctctgactataatatgcaagaacaatctgatcttctttattgtggctaaaagtgatatctcaaaaaacaaataatgtaatagtaacccaaagccaccaccagtgaaaaccacaagttctagatgagataaaacttaaaagaaagtcaacaaatagatctacgaaagttctttggcagcagcaataacagcttccttggtgataccaaactccttgtatatttttcctgctggagcacttgctccaaatcgatcaatgcctatggcctttccttggcttccaacaatcttttgccaaccaaatgttgatcctgcctcaatgctaactctaactgttaccgaagcagggagaacactctctttgtattcatctgactgctcatcaaaaagttcccagctaacaaaagaaacaactctaacagcttttccttccttccttagatcctcagcagcagcagcagcaatt

SEQ ID NO: 10279 - DNA, 498 bp, Glycine max
  Clone ID: jC-gmle01810046b04a1
gaagaagaaggttacttccgcaaggaaatctttgtcgttacaacaagagcataagaataagcattataagactagagggaaagttgccaacgaggaggaagttaccagcttcaaaactacgagtttggggcagcaaccacagagaaagaagcagagttcactggctgcaaagcgtaagagattacttcggacagcagaagaagaaaaagctctcaaggtataagtctcataaaatatcatattgtcctagaacatactgaattatttatatcaagctctaacaatgtcaaatgggttaaaacttcaaacaaaagtgttgatttcaaatacataatcatagttgaaaaacatataatgtacctttagttaagaatatgggtctgaattagtgatgagtagacatctctgcattccatgattaaaccaaaaacattatatcgtaggcagtggggttgcgactgaaaggagaaccctaatttgcatatgtacccaacaatc

SEQ ID NO: 10280 - DNA, 556 bp, Glycine max
  Clone ID: jC-gmle01810046b04d1
acgaattccatctttaagaattctttcatatagtttatacatgtacttgccagctaaaaccccaaaattgaaagagcataaaagatagaacaacaaataataaaataattacctaaatatcacttcttataaatcaaaagtataactacaatcagtacttctacttttcttggagataatgttcttccatttatccttgagatcaacaggagtacgagtctcatcaaatacacgacagccaaattccaaaattttcctccaagggatattctgattttctgtggagaactttgatactccttcctgaaatgtgagaaccaaagctataattgagaaataaaagccttgtgcggctataatatcttagatgaatattgtataatacacctcgtccaacggaaaaagctccttaattgattatatatgttttacaactttaaagtccataataacttatgagaacataaaatgtttaccaggatgttggaaactgtccaaactccaaacaaatcataaatacacaggacattttaaaagaaaataataaaataataga

SEQ ID NO: 10281 - DNA, 567 bp, Glycine max
  unsure at all n locations
  Clone ID: jC-gmle01810046b05a1
ctaaaacatctcaatgggttcttcttctattacaacatcgcccgcaaccatgaccatggctgcgatcgtgctcctgttcacggtctttgccgtttcctccgccctagacatgtcgataatctcgtacgacagcgcccacgcggacaaggccgccacgttgcgcaccgaggaggagctgatgtccatgtacgagcagtggctcgtgaagcacgggaaggtgtacaacgcgctcggcgagaaggagaagcgcttccagatcttcaaggacaacctgcgattcatcgacgaccacaactgcgcggaggaccgaacctacaagctcggactgaaccggttcgctgatctcaccaacgaggaatacagggccaagtacttgggaaccaagatcgatcccaaccggaggctcggaaagaccccgagcaaccgctacgcgccacgtgtcggcgacaaattgcctgattccgatgattggaggaaggaaggtgctgctcctcctgtcaaagaccaaggaggctgtgggagctgttgggcatctcagcaatcgtgcagtngaaggataaatagata

SEQ ID NO: 10282 - DNA, 536 bp, Glycine max
  Clone ID: jC-gmle01810046b05d1
aattccacattgtaagcaaattaaaatagcatgtgaatatgggacaaatccaaatattgctgctgcattgtcacataatctacagaaccttgaaaactaacagcaatcaaatatgttcgccatttggaatttgaatacaaatacagtgcatcgataatataaccctatgtacagagccaatgtctgactgaaatttgatacagaacattatctattttgtatcataataaaatggtaaagatctttatgttacgtgcagcattatgtgaagaagggggaagtgcatccagctggtgctttagtccttcgtcttcccttttacttcatcattggctccttctgcacgttcacatttccttaaactgcttaagcactgctgaccttgttcttacgtccgaaggtccaatggggtttcgctggagtacgccttaatgccttcactccaaaggggttgttcttgctcctgagacaagttccagcgtaagtgttgcagatgggatagtctgcagggcagcaactgtagtggtcatcacagc

SEQ ID NO: 10283 - DNA, 536 bp, Glycine max
  unsure at all n locations
  Clone ID: jC-gmle01810046b06a1
tctctctagggtttgatcagactcaagggtttaagccatgggaaaaaggaaggcaaaggcaaagcctcctccaaagaagcgaatggataagctcgataccgtcttcagctgccctttctgcaatcatggcagcagcgtcgaatgccgccttgacatgaagaacttgataggggaagctatttgcgggatatgccaagagagctttagcactaccatcacagctttatcagagccaatagacatatacagtgagtggattgatgaatgtgaactggtaaaccacccggacgatgatggtgctgagcactgatgctcagattcctgttcttgtggttgcgaacggattaactggccaattttatatcttcaacctgtaactatgtcggttcctgatgtgagtgagcactggtgcaactataagatgcatgtaatagcttagttatgtaatagcatgtgcaagaacatgagaataattgtcctatttagatgaagcccnctggataaaagctagtctgaatatctaatactattatact

SEQ ID NO: 10284 - DNA, 344 bp, Glycine max
  Clone ID: jC-gmle01810046b06d1
aatccaaactgaagcccatcataaagcttttttttaacccctttttcccaagtcacttccaaaggggaagaaaaacccactttttacatatgcaacccgggcacactttccgaaacaggataatagttttagattttacagactagcttttaatgcagggggcttcatttaaaaaggacaattatttttaggttcttgcccatgcttttacataactaagcttttacatgcatcttattgttgcaccagtgctcactcacattaggaaccgacttattttcggggtgaagatataaaattggcccgttaatccgttcacaaccacaagaacaggaatttgagcc

SEQ ID NO: 10285 - DNA, 495 bp, Glycine max
  unsure at all n locations
  Clone ID: jC-gmle01810046b07a1
gcaaaaagcaatgggaaaactgtgttgcattcttctgcaagaaatggctacttggaggttgtcaaggcccttgtgagcaaagaaccagaaattgcaatgagaattgataaaaaggggcagacagcactccatatggcagttaaaggacagaatcttgagttggtggatgagctcgtgaaattgaatccatctttggccaatatggtggatgccaaggggaacactgcactgcatatagcaacccggaagggtcgtctacaggttgttcagaagttactagattgcagagaaataaacacagatgttatcaacaaatctggagaaactgctttagatactgcagagaaaaatggtcgtttggaaattgccaactttctgcaacatcatggagctcaaagtgccaagtccatcaagtcacctactacaaacacggnccttgagctcaaacaaacagtgagtgacataaaaagtgaggttcataaccagcttggacac

SEQ ID NO: 10286 - DNA, 534 bp, Glycine max
  Clone ID: jC-gmle01810046b07d1
gtataatattcaaattctgatgaagctaatgtgaaaatacctaaaataggcatgatgatccaatactttcaatttagaataacattcacttatcaagtggactatgattacatcttttgcctatgttctgcaaaggcatgcttttgttgcagtagttaatgtttgttttactaagcaacaaacacctacaatgttagtgtaactggccaaaaaaggagggagaactctgaaatggtagaaatcaaagttatattgcatacactgtcttatactcattctctgatcctgacatcattgacatagacattgactgcctactgctcattgttgtcctaagacttcgcaatcttgaggcctcaaggcgatgagcaatcacccaataacagagtgttcctaaagtagctgccataatcactgttcctagagctgtggctgctatagccaactctttatgatccccaacaattatgtatgacattgcaataaatgccacagaaatcagcacacatgcaacccacatcaacttatttataa

SEQ ID NO: 10287 - DNA, 461 bp, Glycine max
  Clone ID: jC-gmle01810046b08a1
tccaaatcctcctttttgtctctctgaattccaatagttgttgtgttctgaagagagaacatgtcaagcaattcagatgcagcagcagcgacggtgcatgctcgtggccgtttggccatgctcgctgctcacctcctcccctttgaactcactgatcacgacgccctccgccctatccctctctccgctcagttgccgccgacgaacctcgccggaagtttgaccgtcgtcgacgacagaaccggcaagaagtaccagcttcaggtctccaaagaaggcactgtcaaagcttctgacctcaagaagatatcgactgggaagaatgacaagggactcaagctttatgatcctggctatttgaacacggctcctgttcgatcagcaattagttatattgatggtgatgaggggattcttagatatagaggctaccctattgaggagttggcagagaaaagcac

SEQ ID NO: 10288 - DNA, 450 bp, Glycine max
  Clone ID: jC-gmle01810046b08d1
actggtacacagaaaactctcttatttctttaacacaaacgttttgctaatcaattgtacatggtactgctcccatgagatatgtaaactatgcttatctgtttattattccattgtgacaattaacgaataatttgaaagtagaagtactgaaacgtgactttcacataaaggctcaacaaatcacaccagcatcgttcttctggtaggtgatggatgtgacaccagtagcattatttatgcagagaaatgtcatccttttggtcatcttgctcatataactaaattgagcctgtaagctataccccggatccggcaagccgccgctttgaggcatttgatatggacacctcgccaagcttgtcagcatctcttgatgtagtcctgacattgactggtgtataatgccgtaaccagtccccaacgtaaacctgttgaggtctcaaaatc

SEQ ID NO: 10289 - DNA, 470 bp, Glycine max
  Clone ID: jC-gmle01810046b09a1
gggacctcaaatcagagtcattgttgaatatgctactttacaacgtgttccacgacagtggtataaaaaggatctttgtgatggaaccatatataaagagtctgaggatctggagtgtatagaactacttgccaagcctgttgagaatattacgagagccgtgatacaattggtgaacagggaatgataactaactggtgctgaaaaagatatgcctattattacaccactgatgtgctttgtgcgcccaagcagaactgccatgggacatatgaggccactgtcaaatggaaaagggaatataacagctggcgcttcattatacgggggccctagttacgccacatcaagacgtggacttggaaagaagagagtcattgctacaatgtatgtagcaagggacccaatgaaaagctgtactgtcagagacgaaccatcttatacttaggtacctgagcaagatgatcagc

SEQ ID NO: 10290 - DNA, 466 bp, Glycine max
  Clone ID: jC-gmle01810046b09d1
agacggaaattaatttccacactggaataaggcccgcaagacccttatttatccttagtaacacacaccatttatgggatttaggggtctgagctctacaagaaactccactggcaacagaagaccgaagacacgaacctgaaacattatccatggaatggtgcttcaaagtagggagcaaagattggccaaaaactttccaggatcatttcaagcgcccaattgtatttggcagacagctaaatgatttaggaactaaggaaaaaggcacacaatacctcgaataggggattgcttatacaggaactaaggaaacgggtacagaataccctggatttatattgacactaaaaccactcacaagattaactttataaacccagactatgctcatactagggcaacttggcaaggtgtgcaaatttatccataattcttcaaacaagcaacaactcgtaactgggac

SEQ ID NO: 10291 - DNA, 530 bp, Glycine max
  Clone ID: jC-gmle01810046b10a1
ggcacgtttaagttgattcttcaatttactgaggattatccaaacaagccaccaactgtgcgatttgtctctcgaatgtttcacccaaacatttatgcggatggaagtatttgtttggatatattacaaaaaccagcgggagtcctatttatgatgtagctgctatactcacttctatccagtcattgctttgtgatcccaacccaaattctcctgcaaactcagaagcagctcgaatgtttagtgagaacaagcgggagtacaatcgaagagttagagaaattgtggagcaaagttggacagctgactaagcttgtcttcatatgcttctgggcctttgaagtcacgaattagattgcactgctacctataagaatcattgtgccaacttactgaattttatgtcacattccttactgctttgaatgttaggatcatcttatgtttaattcagttgagggttgtgcattgtccatgtcagttcatgtattatagaattctgtcaatttgcattaagattgttgtcaaca

SEQ ID NO: 10292 - DNA, 105 bp, Glycine max
  Clone ID: jC-gmle01810046b11a1
ctcatggctctttccgatcccactcccactgctactctgacattcaaatatgcaattgggtcccaccattcaaagccaaactctctattctcatcctcaccacaa

SEQ ID NO: 10293 - DNA, 149 bp, Glycine max
  Clone ID: jC-gmle01810046b11d1
tttctttaccctcaaaaccctccacggaatcgccaatggagttgctcttagcctcacaaacatttttaatttccaaaaatatcctttttccacttttttatagcggaaacatactttcactgcaccacccagagtgtgaaaaatattgt

SEQ ID NO: 10294 - DNA, 504 bp, Glycine max
  Clone ID: jC-gmle01810046b12a1
ctcatggctctttccgttcccactcccactgctactctgccattcaaatatgcaattgattcccaccattcaaagccaaattctctattctcatcctcaccacaaaaactgaacacaacccaccttataatacaagtagctgattctggcaagtggagcaacatggtttcatttttcccaggttttataaccgaaggtagagatgttcagagcctcaaggtggatctctatgaagcaattgcaccacttgaccgaggtgccgaggctactcctgaggaccaacaacgtgtggaccagattgctcgtaaacttgaggctgtgaatcctgttaaggagcctctcaagtctgatttgctcaatgggaaatgggagcttttctatacaacatctcaatcaattctgcaaacacagagaccgaaacttttgaggccaaatggaaagatctatcaggcaattaatgtggataccttaagagctcaaaatatagaaacttggcccttctac

SEQ ID NO: 10295 - DNA, 646 bp, Glycine max
  unsure at all n locations
  Clone ID: jC-gmle01810046b12d1
ctcaatgaatcgatccanatncnnannnccnntttnnnnnnnnnnnnnnnnnnnnnnnnnnnnnnnnnnnnnnnnnnnnnnnnnnnnnnnnnnnnnnnnnnnnnntttnnnnnnnnnnnnnnnnnnnnnnnnnnnnnnnnnnnnnngggnnnnnggggnnnnnnnnnnnnnnnnnnnnnnnnnnnnnnnnnnnnnnnnnnnnnnnnngngnnggagaaactctcgatgtcatgtagatttactccaatgctaaaaaaactgtttctttaccctcaaaaccctccacggaatcgccaatggagttgctcttaccctcacaaacatttttaatttccaaaaatatcctttttccacttttttatagcggaaacatactttcactgcaccacccagagtgtgaaaaatattgtccatcgcaagtgcaattctgttatataagatacattaaatcatactttcgttatgtaactgaggttgaaaaaacattacaccacagaattgtgattcttgtatagcggaaatatgatttctttgtataatgaatgataaaatcatactttcgaaattttgttttttttttcctactcccataatatgattatgttacaaaatgatattaatatattgtgcatattttttttaaatg

SEQ ID NO: 10296 - DNA, 357 bp, Glycine max
  Clone ID: jC-gmle01810046c01a1
gttacactgaaggtggtcaattgaccgaggcagttctgcgccttccttacactgttgtatgatttgatgagatggacaaagcccgtcctgttgtgttcaacatgatgcttcagatcctggaagagggaagactgacacacactttgggcacaacggtggattataagaccactcttcgtataccgacatctattgcagaaagccgtgtgattgagagaggaggcctcactattggatttgatctggtttctgatgcgaatgctaacatgtatgacagactccctagcctgcccaccgatgagctatatcaatactctctgccagaatcttagaatgggaaggttgaaatgaatgcct

SEQ ID NO: 10297 - DNA, 392 bp, Glycine max
  Clone ID: jC-gmle01810046c01d1
tttttttttttttttttttttttttttttttttttttttttttttttttttttttttggtttttttttttttttgggtgaaaaagggcccaaaaccctaaacctggtattataaggcaagaatcctggcattacatggttaaaactaaagcaaggaacgcgccataaggaacatttccggggggggtgggattttacatcggggccaaactaggggaaaaataaaagccccccagtttccgacagaatagtttattggggccaaagttataccaaatacggggcttttttaacctttaggttttcaaacccctctttgggcattatggcagcaatctccttaacctccagttttgggggcggcctgaaaacttttttttcttccaacctatt

SEQ ID NO: 10298 - DNA, 289 bp, Glycine max
  Clone ID: jC-gmle01810046c02a1
cacatctccaacaacttcatgaccctctccaacatcatacgcacccctcattcttggcatctggggcggcaatggaccagggaaaggtttatactgtgatcctgtcttcagccaatatacttatgaagcctatcatgaagactgcattgacagcaagaaagtggtaatgcacgtaaggccgcgtaactgaatatgtaacaaaaccgcgaagctgggtacgtgaacataaaagctgagagtgtgcactatattcatcaaccagctacaagcaagagctgatgaccctgct

SEQ ID NO: 10299 - DNA, 457 bp, Glycine max
  Clone ID: jC-gmle01810046c02d1
atagaggaagacggtccaatatgaaaaatatagtaagatcatctcaaacttagcatcttctctttgcacctaagacattgagaatgctaagaatgttacacgcaagttccatcacaacttctagcacttggattagtacaacaaccttcacgaacagaaatatttacttgccaagtttgctttgcctccaattcaagactggaagaaagttcccctctgaatagcatcctcgttagcatttccaagagcagcctcgttcaagtacttgtcagccaattggactctcttgacattctcttgttcttggacaagcatgttaccatacagcaagagcttcttcagagtcatcttgggctgctcaaaggttggaggtccatcttttgagttcacaagcttcttccaacactgtcaacaccaacaccagaaatccacttcctcactttatcatcatatactc

SEQ ID NO: 10300 - DNA, 506 bp, Glycine max
  Clone ID: jC-gmle01810046c03a1
tctctctctccaccattgccatggatccttacaagctccggccatccagcgccttcaattatcccttctggactacaaaccctggagctcctagggggaacaacagctcctctttaaccgttggagctggaggtccaatgcgtggttgaggattatcatgttgtggagaagcttgcaaactgtgacagggaacgtatcccacaacgtgttgtccatgccagaggagctagtgcaaagggttgcttggaggtcacacatgacatttgtcacctgacatgtgcagatttccttcgagcccctggagctcacacgcctgaaagtgttcgtctctcaactgtcattcatgagcgtggtagccctgaaaccttgagggaccctcgaggttttgtcgtgaagttttacaccggagagggtaactttgaccttggtggaaacaacctatccgtattctttgtacgtgacggcatgaaaattccagatgtgggtgatgatcttaaaccccatcc

SEQ ID NO: 10301 - DNA, 487 bp, Glycine max
  Clone ID: jC-gmle01810046c03d1
aaatactaacacatacaaacggcatttattgagatagctcaacgagttgcatgcatggagttatgggtacacaactaaaattgcaagaaatggataagttctttcaaattgatcgaaaatcacatccttatcgtactctttgcacgtctgcaactctaacaatcattctggggttggcaacaacattaaatatttggcctcatgctcagacgagatgctatcttttggcctagagaacggtcagcctgagaccagtaagatatccagacactgcggatttcatgggtgacccgtgggtcagataaagcatcaacccatcggcgattaaatctatcttgcctgtcaggtgcccaagatcggtatctctctccgggctgcttaaagatgttctccttctcaattccacacttttcacgccttccactgcagatagcaggaggtatggggaacgtttctgcatgacgaacaggatcataccttgaaggga

SEQ ID NO: 10302 - DNA, 473 bp, Glycine max
  Clone ID: jC-gmle01810046c04a1
ttctattcattcaagattcagcaagtgcgttttggaagcagagaccgaactacttcgagatggcccgtacaaagcaaactgctcgtaagtcaactggaggaaaagctcccaggaagcagcttgcaaccaaggctgcacgtaagtctgcaccaacaactggtggtgtgaagaagcctcatcggtatcgccctggaactgttgctcttcgtgagattaggaaataccagaagagcactgagctcctaatcaggaagcttcctttccagaggttggttcgtgaaattgcccatgatttcaagactgatctgcgtttccagagccatgctgtgcttgcattgcaagaggctgctgaggcataccttgttgggctctttgaggacactaacttgtgtgccattcacgccgagcgtgtgactattatgcccaaggatattcagctggcaagaaggattcgtggtgagcgtgcttgagtt

SEQ ID NO: 10303 - DNA, 504 bp, Glycine max
  Clone ID: jC-gmle01810046c04d1
ggccaaatatgcgagaaataacattaagggtggaaattcaaaatcagaacaaacagacacgataagctagcttcaactagattagatggcaacagaaagttgtccaatacaattcccaaagtggctgcacaaccagaaataaaacgagaaataaaggatccaaaaaaatcaaatacatgccaaatttctaacaaccagacctttacagtgtcttaggcagtatttgccaatgacaattaatatgactaccaagtaaacacctatttttccctaataacctataggcttcaacaaaaagaaaacttattaacaaaacaccatccgcagccaccaaacaatccatcttcacaaacacagaacgcaccaactcaagcacgctcaccacgaatccttcttgccagctgaatatccttgggcataatagtcacacgcttggcgtgaatggcacacaagttagtgtcctcaaagagcccacaaggtatgcctcagcagcctcttgcaatg

SEQ ID NO: 10304 - DNA, 380 bp, Glycine max
  Clone ID: jC-gmle01810046c05a1
ctttttgccattggtaggtgggaaaaggtttgtccaaagatgataaggcgcacaaattagctctaaggcactggcttgaagctattgatccacgtcatcggtatgggcacaatctgcacatatactatgctgtttggtttcataagcagagttcacaaccttttttctactggttggatgttggagacgggaaagaagtgtatcttgacgagtgcccaagaagtgaattgtctatgcagtgcataaagtatcttggacccaaagagagggatgcgtttgaagtgattattgagggaggatggcttgtttacagaaaaggccagaacctagcacacactgtagagggagctaagtggattttagtcttagctcatatagaa

SEQ ID NO: 10305 - DNA, 350 bp, Glycine max
  Clone ID: jC-gmle01810046c05d1
gggaaactaaaaaagcattcattttttataaaaatttttggcctccaagaaggggaaattgaccccactcctaaaatacctttgggtaaaacaaacggggggtcaaaaaaggatccactcggagctggatgacccaaacaattggccaagaaaaaacttaatgaaaaaattcatcctgggggtcgatgttggggggggggacctttatcctagattttaaaaggagggcctaatgcccctaattgccttgcaattaaaaaattgaaccccccccttaattaaattggggggtgattttgggcaaacttatcatgggctagggatttcccagtgcccaagccttggggata

SEQ ID NO: 10306 - DNA, 319 bp, Glycine max
  Clone ID: jC-gmle01810046c06a1
cagtgtgccactggtcggcggaaaaaggctggaacgaggatgataatgctcatattttggctgtaaggtcctgccttgacggtatggatacaccgcttcactttggccacaatggggccatatactacgttgttgggcgccatacgcataattcacatcctatggactacaggtttgatgcgggagacaggctgaatttcttgtatctcaagatccccaaaaaatgagttgtgtacgctgcgcatagaggagcctggacctctagagagggaagcgtatcacgagatcattgagggaggaaggcccgtgtacataaaag

SEQ ID NO: 10307 - DNA, 304 bp, Glycine max
  Clone ID: jC-gmle01810046c06d1
agagacatcgggcgaaactcaaaaccggaaaaatagaaagtgccattttcctactgcaggagcgggaaaaaaccccacctcctttaattcctgtgtccaattccccctgggggtctcagggggaatccccaggggatatcattcccaaccaattgggcctgcattgtctccccgaagaaaaacattatggggtgtccaactcaatacgggggaccttttcctttgaatttaagggcgagacttatgtggggaatgcgccccgcatgtagaagatcaactccccccttaatgcaccttggggttg

SEQ ID NO: 10308 - DNA, 566 bp, Glycine max
  Clone ID: jC-gmle01810046c07a1
catcctcacaaatacaattatacaaacacatattcattctcctcacataccaaaaataaattatttttcttgttattttccctttgctaacggaaagccatgaaattcgggaagagcctgagcagccagatcgagaaaaccctgccagagtggcgcgacaagttcctctcctacaaggagctcaagaagaagctcaagcaattcgaccctcccgcccccgcctccgccgccgatgaacgccccggcaagcgcctcaagaccgacgccggcaacgccgacgccgacgccgtttccgacgcctccgacatgtcgaaagaggagagcgacttccggaacctgctggagaatgaactcgacaaattcaacaccttcttcgttgagaaggaggaagagtacattatcagactcaaggagttacaagatagtgtggcccaagttaagggttcgcgggaagagatgatgaaaatccacaaggaaattgtgggattccatggagagatggtcttgctggaaaactacagtgcccctcactatacagggctagtgaaaatacttaaaagtatgac

SEQ ID NO: 10309 - DNA, 516 bp, Glycine max
  Clone ID: jC-gmle01810046c07d1
cagcaaaatgtcaaaacataacttctttaaaatccagaggttttattatatggaacctataattctataaaattaactccatctttacatttagcatcttacatctgtgttagtatctaaggcgtgcataacagaggcgtccgatttaagagaagaaaaatagatgggaaaatagccatccctctacattactcagcaacgtaacccagcaggttacttggctgcttgttccaaaacagggattttcttccatgtttctttttctgaaccacttatcttcaacggtggcaatgaaaacatgctaactggtgagcttccacttctaatttcctgcaaaacatgcaatgctgatacagtactcttcatataaaggctctccatgtactcgatctcagctaattccttcggaatcaccaaaccatcactcttggtagtggttgaagttgaaggatcaaaaccttcagcttggggagttgtctcagtggaaactggagcaggatcattcacagggaaaag

SEQ ID NO: 10310 - DNA, 368 bp, Glycine max
  Clone ID: jC-gmle01810046c08a1
ctataaccaacgaacacactctcacataactctctctctctctctctctctgagtccttcttcttcttcgtccagccaacatgagctcaatcgttcagggtttctccaagtcactggccatgaccattctgtctgagatcggtgacaaaacgttttttgcagctgcgatactggctatgcgacaccctagacgcctagtcttatcaggttgcttatcggctttgattgtgatgaccattctctctgctcttgttggctgggcagctccaaatctgatctctcgcacatggactcatcacattacaacatttttattcttgggatttggactttggtccttgaaagatgctatatttgaacaaggggat

SEQ ID NO: 10311 - DNA, 554 bp, Glycine max
  unsure at all n locations
  Clone ID: jC-gmle01810046c08d1
aaacataacaatccactcacgttgactgtttatattgaatttggctgtcatcctacaatggtaaatttattttaaactacaaaagggtcgaaataatgaaatctatgacctggggaggattaggcacgaagctgagcatttttagcaaccaaccccaaccataataacaaacatatttgctaaacatgtcttgtaaaaaacacaatgaataatcactaaccaatagcacagccttcatgattcaactggagagaggaatgactgaattccaaaaacaatgaaaagaattccacctgagagtgcaacaattttttcagatatctgagaagctaaactcttccctccaacaacagcagcagaagtgcacaatgcttgtcccagaatccctccaagaaccacaccaaatgggttctcatctgcagccaaacctatggtagccagctggctcttgtcaccccattcaccaaaaaaggtgattgaaaatgcctgtaaaaagataggagaaaaaaactgagataaaaatgacccgttatgcttntttgtggcatcatcat

SEQ ID NO: 10312 - DNA, 365 bp, Glycine max
  Clone ID: jC-gmle01810046c09a1
ctgtgggtgctccggctggctgatatgcagcagattttgccccagattcagcaagttcttccaaaaggacctttccctacattgtaacacaagacgtgatcagcatctgctatatctgcatctaaaaaagaggacaccgttgctctgatgaacactctgcgtgcactggcactggcctttcaatcacaagtcctctggaacttccttgggaactagagaacatattttcaggaactgcaccatggaaaagagttgggttgcctcacgggtagtgtatgtgctcatcaaactcttttgctactataatatcttctcaaggactgatgcaaatgggcaaaatcccacatggacagcgattggaaacc

SEQ ID NO: 10313 - DNA, 497 bp, Glycine max
  unsure at all n locations
  Clone ID: jC-gmle01810046c09d1
agcacaaaaagcaaaagtcaattgcatcactttacataatgaaacagatttttacagagtactatataatgaaatgttacatgtaaaagtgcccctatctactacacattggcaatcaatcaacttgatacggtatgtctcaaactttggatgatggggcacattcaggaaaacaacaatatggcagatcttccattgtgaaaattactccagcaaaaaaaattcaaattactggggcaaaatctgctgcatatcagccagccggagcacccacagatagaagggttcttcnagnaagttccttttgctcaattataaggacaacagggttactgaccacagattgaagataaactatgagctcacctcttttcttgatggtgatatagaagatgctgttcagtcttgtgttacaatggagcaaaaggaacttctggaagaacttgctgaatctggggcaaaatctgctgcatatcagccagccggagcacccacag

SEQ ID NO: 10314 - DNA, 65 bp, Glycine max
  Clone ID: jC-gmle01810046c10d1
aatgttagcgtgatgagagagtaaaccttgccgggaaaagtaaacatcgttaaaggaccatgggg

SEQ ID NO: 10315 - DNA, 83 bp, Glycine max
  Clone ID: jC-gmle01810046c11a1
gggtagcggagggagagtagatgggtgtggatggagcgtttttagaaggagtaggtatgatgaacaatgacttttaccatttg

SEQ ID NO: 10316 - DNA, 469 bp, Glycine max
  Clone ID: jC-gmle01810046c12a1
aatctctccaaccttattgcttcttcaatcaacaaactattcacagtttcactctctcctttgttgttgtttgatggaaaactgcatcttccactaccatcaccacacactcctcactcttcctttaattttctcacaaaccccacttcagattcttcacaagacctgatcttggtggtggtggtggtggtgttcgtgttgcttcttcttcttcttcttgtttgttattccataggcgaagaccctttatcagagcaagtgctggagcaagcccatgtgagtttagtagcctaaactctcctttggagccacgttccatggtggggaagttcctcattggtgttcttcagaaccaccctcagatgttccatcttgctgttggggaggagctgaagctcttggctgaggatcgtgatgcggcacatgctcgcatggtgcttggttctgcttctgatgaggccctgcttca

SEQ ID NO: 10317 - DNA, 570 bp, Glycine max
  unsure at all n locations
  Clone ID: jC-gmle01810046c12d1
cacaattatacgatccccatncgananncnnnnnnnnnnntnnnnnncnnnnnnnnnnnnnnnnnnnnnnnnnnnnnnnnnnnnnnnnnnnnnnnnnnnnnttnnnnntttnnnnnnnnnnnnnnnnnnnnnngggggnngggtggnttntntttntttttctttttttntttttttttttttttttttttttttctttcctttcacttaaaagctaaaaccaaaactcactatatatacaaggacaattcactcaacaacttagcaatttatactccaactattgcctttatactactcattcatccttaacgttatatacattctcaatgtaatcttctatctcccacgataaacatccaaaagcaacaccttacaatactagtctcttcaagctagaaaatgacatcaaaactcacatcatcattctcaacttaaccctattcctcgttattaaaaacagcacaactataactcccaaccaaattcaccgcctccttacacctcaatctgtcacatatttgcaatcatcccttgttaaagctcataacataacattttaagtcctca

SEQ ID NO: 10318 - DNA, 447 bp, Glycine max
  Clone ID: jC-gmle01810046d01a1
agcttttcttgcagagactctgaaccatggcttcatgtaccgcacctccctccctcatgctcgtccactctcaagacctttctccctctcttcgctccttctctcacaggcccatttctagaaccaccttctctctctatcctctccttttgaagccctccaaatggctgcacatagagcccaaatccaggacttgccatgccctcatcgacgcttggtctgcagaggtgcacgtgcccgaaactctacacgacacagaggaggacgacggggctgatggcttcaccgccaccaacaccggtcccaccaccaagcctaagaaaggcaacgccgcattgcctctcaagagggacaggacgagatctatgatggtcttggaaatacaacaattgagggagcgtaagatagagtatgactgtgagacagcaatatcttcggtttaagaaa

SEQ ID NO: 10319 - DNA, 500 bp, Glycine max
  Clone ID: jC-gmle01810046d01d1
caaaacgtaaaaatgaaaatttattcccacgaaagaaaatataattagatctctggtgttagttacaaagtaatacaaggaaaatcctcagccggggtcaaagattatgtaatgtagcagtgtgcaaacatttggaacagagagatcccatcccctgtatgtaactttggtaacatctttgaataaatatttggcaagatctcacaatggcacccgggatagctgactgaggccaaacgaacatttacatgtgagggttctattctgatggaggtctgtaatcaagcatctccctgatatttaacctgattgaaggtcccatggctgagcatatgtgagcacttttccagtacacacctttagcacctgaaggtttgtttgcctctactgatttcactgcagcaagcaagtttacaagaagatcctcttctggaaagtcagcttttccaaaaggtaagtgcacgattccagttttgtctgccctgtattaacttttccct

SEQ ID NO: 10320 - DNA, 430 bp, Glycine max
  Clone ID: jC-gmle01810046d02a1
gtgactcccgcggcctttcaggagtgaggaaggaagtggctgagttcatactcaggcgtgatggttatccaactgatccagaactcatatatctcactgatggtgccagcaagggggtgatgcagatattaaatactatcatcagaggtcaagacgatgggattttggttccagtcccacaatacccactctactcagcaacaattgctctgcttggtgggacccttgttccatactaccttgaagagacagcaaattggggtcttgatgttaatgaactttgtcaatcagttgagcaggctcgctttaaaggaaaaactgttaaagcaatggggatcataaatcctggaaaccctactggtcaatgccttagtgaagctaatctaagagaggttttgcaattctgttatcaagaaatttaaccttgctt

SEQ ID NO: 10321 - DNA, 523 bp, Glycine max
  Clone ID: jC-gmle01810046d02d1
acaacgcctaaagcacagtatgcagatatatattttagcatcacaactggttatttacacaaagaataaagccacataaagatgcaatgcacatatttgattgtaggaaaaaaaattgacaaagacgagaaaaaagacactattgctttgtctctcgaaaattacacacatttctattctttccaaaagagctaagcttaccacaaaaaagatcaaataagtttttgtacttaatgcctcaatcaattcaattcccattcctataatctgatcaaacaccatttccttttccatctttaatatctaagtaaccccacatctcaaaaagaacccccaagtttttggcgcacctcctttgatgcagcatagcttctgctttcagttacatttgaattggaaaggacctcggacgcaatttcccagctttcacttcgtccctcactcgagtgccttgcttcggatcgaattgttggggcccggcgatctgaacccaaaacttgatcaacttcagatgtattatggg

SEQ ID NO: 10322 - DNA, 505 bp, Glycine max
  Clone ID: jC-gmle01810046d03a1
gatatctgctgcccttggagaggaggatattaccacccggcaaactgatcctgaggtaattgttgaggattattttactgatgaagaaattggggtacatgaactccatcagatgatgtggaaggacaaaatgcgtctcatgcgactgaaagaacaaacgaaatctaaggaaggaattgatgcaacgaatcagaggctactccaagaacaggctcagagaaaaaagatggcgagggctcatgatggaatcttgatgctcatgctgaagatgatggaggtttgtaaggcccacagatttgtctatgggattattcctgagaaggagaaaacggtgactggagcatctgataatcttcgtgaatggaggaaggataaagtcctgttcgatcgaaatggtgctgctgacatattcaagtgtcaagctgataacactattccagggaggaatgatggatgccatttcataggtccaactgcacacacaatgcaagagctgtttgacaca

SEQ ID NO: 10323 - DNA, 525 bp, Glycine max
  Clone ID: jC-gmle01810046d03d1
ggaagaaacttcaactcttatttatatcccagtcttgcatagaatagtaatcttaagtaacaaggctagactgataaaaaaaaaaaaaagcacacaagggctaaacatataagttttttattgtaacaactactagacctgtaaaggataagtcaaaaatatctagttctactaggcctacagaattacatgtgaagaaaattccagtaagacttggctgaaggaacatcacatgaaaataagaattcatgatgtggataacgagcttccagattcaacttgtcattttcactggtaccatattgaaatatctggctgtttctgaagagtatccatccctactccttgcatatcctccttgaaatcaaatgatgccaaatcacaaagggaaccaaacattgagtggaagttgttgttgttgtgattggtctcaaagggagcattcaaagctttgaaacggtcaaattgaccttcttctcttgaaacatgtgatgattgttgggcatgttagcttcatcaaagatg

SEQ ID NO: 10324 - DNA, 542 bp, Glycine max
  Clone ID: jC-gmle01810046d04a1
attttgactgagcgtggttattccttcaccacctcagccgagcgggaaattgtaagggatgtgaaagaaaagctgtcttacattgcccttgactacgagcaagaactggagacagccaggaccagctcatccgtcgagaagagctacgagttgcctgatgggcaggtcatcactattggcgatgagcgtttcagatgtccagaggttctgttccaaccatccatgatcggaatggaagcttcaggcattcatgagacaacatacaactccataatgaagtgcgatgttgatatcaggaaggacctttatggtaacattgttctttcaggaggaacaaccatgttccctggtattgctgacagaatgagcaaggaaatttctgcattggcacccagcagcatgaagatcaaggttgtagcaccacctgagagaaaatacagtgtctggatcggtggttctatcttggcatctcttagcaccttccagcagatgtggattgcaaaggcagaatatgacgaatctggtccatcaatggtgcacag

SEQ ID NO: 10325 - DNA, 536 bp, Glycine max
  unsure at all n locations
  Clone ID: jC-gmle01810046d04d1
ggagntcaacggatgaaggattataattatgcataccaagggtacaagcgtagtttgatataatccagctaactcatactcagaatgaaccagttaaaaacttatcaaagtataagaaaagaactggaccattttaaaaaacaactctcctcaccttctgcaaataaatgatcactccaacaagagaataaaatgaaaggataacaaaagctagaatcaaagggttacaatctgcaatgcattgcttccagacaaatcgtgatgatagtagtctttcccttcaataaccctatctatcgaaacagtttagaagcactttctgtgcacaattgatggaccagattcgtcatattctgcctttgcaatccacatctgctggaaggtgctaagagatgccaagatagaaccaccgatccagacactgtattttctctcaggtggtgctacaaccttgatcttcatgctgctgggtgccaatgcagaaatttccttgctcattctgtcagcaataccagggaacatggttgttccttctg

SEQ ID NO: 10326 - DNA, 545 bp, Glycine max
  Clone ID: jC-gmle01810046d05a1
ctttttgccattggtaggtgggaaaaggtttgtccaaagatgataaggcgcagaaattagctctaaggcactggcttgaagctattgatccacgtcatcgttatgggcacaatctgcacatatactatgctgtttggtttcatagccagagttcacaaccttttttctactggttggatgttggagacgggaaagaagtaaatcttgacgagtgcccaagaagtgaattgtataggcagtgcataaagtatcttggacccaaagagagggaagcgtatgaagtgattattgagggaggaaggcttgtttacagaaaaggccagaaccttgtacacactgttgagggatctaagtggattttcgttcttagctcatctagaattttgtacgttggggagaaaaagaaaggctcatttcagcactctagttttttagctgggggtgctactattgcatctggaagattggttgcccagaatggagttcttgatgcgatatggccctacagcggtcattactgtcctacaaagaagcacttatggaat

SEQ ID NO: 10327 - DNA, 412 bp, Glycine max
  Clone ID: jC-gmle01810046d05d1
gagaaaccaaaaaagtattcattttttataaaaattattgccttacaaaaatggaagattgccccacctcctaaaatacaattgggtaaaacaaatggggggtaaaaaaatgatccctcaaaagctggatgaccaaaacaattggcccagaaaaaacttaatgaaaaaataaatcatggggttagatgttggggggggggacctttatcctaaattttaaaagcagggcctaatgcacctaattgccttggaattaaaatattgaactcccaccttaattaaggtggggggggattttgggcaaactaatcatgggcttggaattcccatgtgcacaagccttggggataggaggatttttggactaagccttggggagggaaatggggctttggaagcaatttttgcaagg

SEQ ID NO: 10328 - DNA, 496 bp, Glycine max
  unsure at all n locations
  Clone ID: jC-gmle01810046d06a1
cacaacggggtttctagtatgcatagtgttgctttgggttccaagtatttgaaagcaacacaggagcttcttgatgaagttgtgaatgtgggcaagggaatctccaaaggggaggaatctatggaaggggctaagaaggagaagatgaaagggaatattgaatccacttctggggttggcgatggttcgagctgcggaagggagaataatgatcgagccaaacaaggagttgaactcagcacagcacagagacaagagcttcagatgaagaagtccaagcttgtgaccatgctcgatgaggtggagcaaaggtacagacagtatcaccaccaaatgcaagttgtgctaacatcgtttgagcaagcagcgggtgttggtgcggcaaagtcttacacggcccttgccttgaagacaatctcaaagcaatttcggtgtctcaaagatgcaatctcttcacaaatcacgacaactagcaagaccttangtgaagataatt

SEQ ID NO: 10329 - DNA, 538 bp, Glycine max
  Clone ID: jC-gmle01810046d06d1
gcaatgaatgaataattaatttaacaaagtaaggcatataactccaaatccaatatataatacattacctatccaaacaaaccattcaattccttgtattgtacctagctacttttcaataccatatacaatataccttccccaactcaacttgaatccttaaattaaactaattcagaacatgtaaatctgaattccctgcaagttcataatcttgaaccagtttccatctttatacatggagcaagttaccataaacttctccatttcttttatttctttttttttcccctcctgttgctattcttctgctaagttagtgtgtcgtaacactctgaactgcattgtgttttgtggatatataatatattgcaacatcagaaaaagaagaaaataattcaattctttcggggggtgggcttcattgattaattatcctagctagctagttaattatcaattcttttaagccacgaaatcccgcaacaactgcgcagcaaacctctttctgttttgaatgtcaatgctctcataactg

SEQ ID NO: 10330 - DNA, 586 bp, Glycine max
  Clone ID: jC-gmle01810046d07a1
agcctcttttacagttcagtctcttgttaaagcaaaatggtcttagaagagtgtgtagtgcatgatgtgaggctatcctcagttgggccaggccgggccaccaggtcggaggtgttccacagcccgggtggcttggacttggccatgaagcttcactatctcagggtggtgtacttctttgctagtgaggctgcacaagacctaaccatcatgaaaattaaggaggccatgttcactttgctcaaccattacttcatcacatgtggccgcttccggcgatcggattccggtaggcccttaatcaagtgcaatgattgtggagtaaggttcattgaggccaagtgcagcaaaaccctagatgagtggctagccatgaaggattggcccttgtacaagttgctcgtctctcaccaagtcattggcccagaactatctttttctcctcctgttttggtgcaggtaactaaatttaagtgcggtggaatttcattgggtcttagttgggcccatgtattgggggacccgctttcagcttcaaattcattaactcttggcgcctaatattgaaaaatatgggcctcaacag

SEQ ID NO: 10331 - DNA, 467 bp, Glycine max
  Clone ID: jC-gmle01810046d07d1
aagaagaatcacaccatgtcacatttacgtttaacgtgagacacacatgactttaaagtaatacactatgtactacaaactaaaagtttcccttgctcacaaatatacttaataaaaaagaaatttattcgttgataaacacttaatctcattaaaacttaattatcctcaagcagaagaccaattatcttgagctcagatttaagcttcaccatttcatcctccggtataatcatggtcacaaacttcccatcaacaccattctcgatagaaccttttggccacggatacaccaaaacaatcccttcatctccaaccccttgaagggtgtagtaaacaaactttggtgtgtgtcccttcaattgcaagtcatacacattggtgtcttccaagtctagaaatgtcaaattgacaccatacacaaagaaatcactcacaccttggtctttctcaatggcttcctcaat

SEQ ID NO: 10332 - DNA, 487 bp, Glycine max
  Clone ID: jC-gmle01810046d08a1
ggtcacagagggtgtgagaggtttctactttctatacatggaaacttgtttccaattagcagtttttccctttttcttcttctaagccttcacagaatttttaggttggtgattttggtgtttgccgcttcaaaactgatggcagtgtttggttggcaaccttgtcctttcaggtgattcctatgatctttcagtcacacacaaacacaaacatcaacactgttatgagcactagttcaacaacttaaggttctcaatttgtggcatattctgtgtcttggtttcaggaaacataaaagtaagctatggtgagtgagtcagtgagtgagtgagtcagtgagagaaaccaaaaaacaatggcagattcagaaaagtacaacaagaaaccctcttcatcgtctttcttcagttctccaaaggttgttcaccaatttcactccgaaaggtttccatgaaaccgaaaccatgatgagccctaccttcacac

SEQ ID NO: 10333 - DNA, 433 bp, Glycine max
  Clone ID: jC-gmle01810046d08d1
gatcctatgtgagtgattatagtattattattgctgtagattactttatataaacaataaacaaaagataatgtaagctcaagtcatacaatgatatcattacaaaactgtggccagcccaacgtcaatccccaaatatcatcatttcaataaaatcacctacagtatctctgccctttcaattcctctctatctttctacactgctacctcagagagggttgtgataagcagaaatagaaaaaccaggtggtacagtgatccagaatttccaaggactatttttgtgtcctagaaaaataaaaatgaaggtggtattattagaaattctaagccctttgaagtttgaagcaagattgaatggctttggatgggtgggggggttaaagggaatgaactaaggcccatagatatcactgggcttccaattggct

SEQ ID NO: 10334 - DNA, 516 bp, Glycine max
  unsure at all n locations
  Clone ID: jC-gmle01810046d09a1
tgaatttgcaattgaagttaaaagccttagccttccctacaactccaaacacaaagacatcatcatccatggctgcctccgtctccactgtcggagctgtcaacagagctcttttgaacctgaatggttctggagctggagcttcagctcccagttcagccttctttgggaccagcttgaagaaggttattgcctcaagggtccccaacagcaaggtttccggtggaagcttcaagattgttgctgtagaagagaagaaagagattgaagagacccagcagaccgacaaggacagatggaagggtcttgcctatgatatctcagacgaccaacaagacatcacaagaggaaagggtttggttgactcccttttccaagctccacaggatgctggaactcactatgcagtcatgagctcctacgagtacctcagcactggacttcgccagtacttggacaacaaaatgattggnatctccattggctcagcttttatggacaagctngttgttcaca

SEQ ID NO: 10335 - DNA, 484 bp, Glycine max
  Clone ID: jC-gmle01810046d09d1
agaggaagacggtccaatatgaaaaatatagtaagatcatctcaaacttagcatcttctctttgcacctaagacattgagaatgctaagaatgttacacgcaagttccatcacaacttctagcacttggattagtacaacaaccttcacgaacagaaatatttacttgccaagtttgctttgcctccaattcaagactggaagaaagttcccctctgaatagcatcctcgttagcatttccaagagcagcctcgttcaagtacttgtcagccaattggactctcttgacattctcttgttcttggacaagcatgttaccatacagcaagagcttctccagagtcatcttgggctgctcaaaggttggaggtccatcttttgagttcacaagcttcttcccaacactgtcaacaccaacaccagaaatccacttcctcacttcatcatcatatactctggccctcagtgcaccaaagaaatcaat

SEQ ID NO: 10336 - DNA, 481 bp, Glycine max
  Clone ID: jC-gmle01810046d10a1
agccgtgttgtgaagagtcagagacaattgttggatcctgggaatgttggttcgacgatgcatgcatcggtgacatggattactttgtgaagaccctttcaagcatcaaacagaaaggtgctacgtgcgaacttgattggttccatcatcactcattatgcctccatatggctccctgacctctcttcctctgctgaaaatggtgtcaccactcacttccaatcccccgaaagcgtcacaaattcatggatgaagaagaggttctttgcggaaaccttggagagtgttctgcctcctgagaaggattctgtcccatgcaacttcctccttcgccttctcagaaccgccaacatggtatcgtgttgacgccacttatagaggtgagcttgagaaccggatttcgtggcagctagaccaagcttctttcaaagagctcatgataccctccttcagccacacgtgtgggacactcttggatgtt

SEQ ID NO: 10337 - DNA, 194 bp, Glycine max
  Clone ID: jC-gmle01810046d10d1
ggatttcctccacttgtggggagtccttttgaccagactggttttcatgtccataggtgtttgtcttccaaatccaacttccctttcagcctcctcctcttcctcttcttcttcaattttctccacctctcctacattgctgctaaacgtaggcattccaaactttcctccatttgaataagcccttctttttc

SEQ ID NO: 10338 - DNA, 475 bp, Glycine max
  unsure at all n locations
  Clone ID: jC-gmle01810046d11a1
aaaaaaaagattctcaagaaatataactaatattctttagaataatcaaaccgaatattaaattcaaatacatgttagatataaaaaagacttaaaaaggaggatttgaaatgctagaatttaaaaccatttctttccgtggcaccagtagtaagtactctatggctcggggctttggcgggtctcttgatagagatcaatcgcttctttccagatgcattgctattccctttcttttcattctacatattgacacggactggggcgaagaagattatcgcatccaattaagttttaaatatctgtaattaatatgtaattaatctcctcttctttatttccactggtatttcttctttttgttaccactgtaatagaatcagttaggacagagaaagagtaatggttaatttggcctaattgaaattcggagagaaactcatgaactcgttcaggcttccatggnattgaatta

SEQ ID NO: 10339 - DNA, 269 bp, Glycine max
  Clone ID: jC-gmle01810046d11d1
taaaggacaatctatttacgcgtgtggataatattttaccttgtccactagaaaaggcactagttcaacccatgtttttataatcaatggggcccccctattggatggggggcaaacccctacaaaaagagcgtttggattttatgaaggggccctaaaaaattaccatggttcattcatccctatcccaaacatcacctttgttaccagaaatactataagcggttggttatttaattctgcctcttctaagataaggtgaaaatttt

SEQ ID NO: 10340 - DNA, 530 bp, Glycine max
  unsure at all n locations
  Clone ID: jC-gmle01810046d12a1
aaaaaaaagattctaaagaaatataactaatattctttagaataatcaaaaagaatattaaattcaaataaattttagatagaaaaaagacttaaaaaggaggatttgaaatgcgagatctaaaaacatatctttccgtggcaccagtagtaagtactctatggttcggggctttggcgggtctcttgatagagatcaatcgtttttttccagatgcattgatattcccttttttttcattctagttattgacacggaaaggggtgaagaagattatagatccaattaagtattaaatatatgtaattaatatgtaattaatctcctcttctttatttcgncttttatttcttcttttttttacaattgtaatagaataagttaggaaagagaaagaataagggttaatttggcctaattgaaattcggagtgaaactcgggatctcgtccaggcttccatggaattgaattaataattcaattccatttctattaaataaagagtgaaagcagaaatttaaatggaatg

SEQ ID NO: 10341 - DNA, 560 bp, Glycine max
  unsure at all n locations
  Clone ID: jC-gmle01810046d12d1
cgaaactatatctgatctcattacgaaannccnnnnnnnnnnnnttnnnnnnnnnnnnnnncnnnnnnnnnnnnnnnnnnnnnnnnnttntnnnnnnnnnnnnnnnnnnnnnnnttttnnnnttttttntnttnnnttttnttnntttttttttgtgtttttggtggttttttttttttttttattatttttttttattttttttttnttttttgtttttttttttaattcaaatttttttaataccaaaggatattaacccttgttgtttaaaggtcaatctattcacccatgtgcccaaaatcttcccttgttcactaaaccaaaaactaattaaccccatcttttaataatcaatccccccccccaattggatcgggggcaaacccctacaaaaaaatcccttgcatattaaaaaccagtcgctccaatatgtgccatcggtgataaatccctcccccaaaaatcacgtttttcccaacaaaaactataaacgattcaacttattattctgactttatccaatatatgttggaaaaattttaatagagcttcaaata

SEQ ID NO: 10342 - DNA, 470 bp, Glycine max
  Clone ID: jC-gmle01810046e01a1
ggatattctggaaggggtggctcggctccggatctccaatgacattgaatttgaggagcagagtttcatggctttgatgaatgagtcaaaggagagacgggcaaggcaaaacgctgatcctgctgctgtcccaatggagattcgagctgggaaggctcttgatgctatctatgtgtgttgctttggaaaggactccatagaggaagaagacaagagactgttgactgcaatgcttggcgctgttttcgcatcagttcaacgcgaagagatccggcgccttgtcaaagacaaggcagagaaagtagcagcaggagttgatgatgaatatgtttcagaactcaagcctctatcaaaagaagctgtggaactacaaatgaaagaccttcagttccttcaacaaaatagtgagacttaactaggtgaagcctgtgatttccactacacagtgatgcattgaatgaaattatatt

SEQ ID NO: 10343 - DNA, 525 bp, Glycine max
  unsure at all n locations
  Clone ID: jC-gmle01810046e01d1
aaataataaaatggcattggagacatgcattacttgtccatttataatgctaacataagttacatgaaatttctgcattttcagaaaagtcatgaccccacatttcaacatgtatctgaaaaataatagtgtgatctatgatgactgtcttttttctttgagtagcccccaaaggctaaatcggcttagttcacaaaatataatttcattcaatgcatcactgtgtagtggaaatcacaggcttcacctagttaagtctcactattttgttgaaggaactgaaggtctttcatttgtagttccacagcttcttttgatagaggcttgagttctgaaacatattcatcatcaactcctgctgctactttctctgccttgtctttgacaaggcgccggatctcttcgcgttgaactgatgcgaaaacagcgccaagcattgcagtcaacagnctcttgtcttcttcctctatggagtcctttccaagcaacacacatagatagcatcaagagccttcccagctcgaa

SEQ ID NO: 10344 - DNA, 405 bp, Glycine max
  Clone ID: jC-gmle01810046e02a1
tgacaaccacgcattcctacactggagaccagaggcttttggatgcttcacaccgtgacttgagaagagccagggctgcagcacttaacattgtcccaaccagcacaggagctgccaaggccgtgtctctagtgttgccacagctgaagggcaagctcaatggaatagcgcttcgcgtgcctacacccaatgtttgaggtgttgaccttgttgtgaatgttgagaagaagggtcttactgctgaagatgtgaatgcagcattcacaaaggcagctgaggggccgctcaaaggtgtattggacgtgtgagatggtccacttgtgtatatcgacttacgctgctctgaggcttactctactattgactgctccctgactatgggcgtgggagatgatatggctaaag

SEQ ID NO: 10345 - DNA, 506 bp, Glycine max
  Clone ID: jC-gmle01810046e02d1
acaagaattcagaaattcaatatcaatcaatatatgggtgatattcattcagtcacgccaaaacttattattggctgcaaataaatataaactttgaaaatctctcctcagatagactgtctgaacaatttccttctttttcacatgatacgttagaaaaggagctctcctctattcataaactttgcattcctcatcagcagggtttgtctcgcagaaatcctccaataggtctccactccccgctttaggtgcccctggccacttgcttgctactagatgtgccaaatcgaccactctttggctgtaaccccattcattgtcataccaagcaaccactttaaccatatcatctcccatgaccatagtcaaggaggagtcaatagtagaggaaacatcagagcagcggaagtcgatagacacaagtggaacatcacacacgtccaatacacctttgagcggcccctcagctgcctttctgaatgctgcattcacatcttcagcag

SEQ ID NO: 10346 - DNA, 387 bp, Glycine max
  Clone ID: jC-gmle01810046e03a1
cggcgccgtcactgagctatacctgagctgtcgccctcgcatgcgcgcctgcattagcttggagctcgggtcgaggaaaaagtgacctagatcttgtgttgatcgctgatctatatcatcgtggcgttttcgtctgcgcctgtgaattgctgggacggaaacaaatggaaaacgattgtcatattgcgacctggatcgaggctatctttccttgtacggcaccatctacacgcgctatcaataatgtccccctccatgcctgataagaatggaaagacagtggatagtgtgattggatatggctctgtggaggatgacacctattgaatctcatggttctgtaaccacagagggactgagttcttacatgaggggggggacgaatac

SEQ ID NO: 10347 - DNA, 505 bp, Glycine max
  Clone ID: jC-gmle01810046e03d1
ggaattcgagacataaccatagacaatattaagttaattgcaagaatacaatttgtaaaaagccattaagaagtaccatcgagtacctaagcacttgctcattgaatcagaagctgaaactaagcacttgcttcacatgtctgcatatttctttacaacaagctcctataacaagtaaaacagatgcctagattgtactggtttggaaagcatatgattcgcctgttgttgcaaagagaaccataagaagagttaaatgagacacggggagatttttactttcatgaaagcttcaacttcggctttatggcttgtgaactttgaacccaaaaactctcggaacatagccttgtgctggtttctgtggcttcagttgtccataagtcatcaagaagaggtgtggaaatgttgttccaaagtaagctccatcaatgttgccttgatacttggaacgcggatagtaaagatcttcacacctagggcagtatattttcacagtacttga

SEQ ID NO: 10348 - DNA, 495 bp, Glycine max
  Clone ID: jC-gmle01810046e04a1
cttgagctatgtttcagggataatagggcagggatgtacaaagaacgagagcgaggtggtgtttccgtttccgcctctaaatccgaggatcggaagcgaatcaacgacgttctcgataagcacttggaacgatcctctccttccacttcccgccccatcaacaccgctttcaagaattccaacctccaagtggaggaatctgagacggagagtgaagagtctgatgttagtggctctgatggggatgacacctcttggatctcgtggttctgtaatctaagagggaatgagttcttttgtgaggtggatgatgattacatacaggatgactttaacctctgtggattgagcagtcaagtgccctactttgattatgcccttgatttgattctcgacgttgagtcatcccatggtgacatgttcacggaggaacagaatgagttgattgaatcggcggcggaaatgctttatggtatgattcatgctcgatatgtg

SEQ ID NO: 10349 - DNA, 500 bp, Glycine max
  Clone ID: jC-gmle01810046e04d1
ggaattcgagacataaccatagacaatattaagttaattgcaagaatacaatttgtaaaaagccattaagaagtaccatcgagtacctaagcacttgctcattgaatcagaagctgaaactaagcacttgcttcacatgtctgcatatttctttacaacaagctcctataacaagtaaaacagatgcctagattgtactggtttggaaagcatatgattcgcctgttgttgcaaagagaaccataagaagagttaaatgagacacggggagatttttactttcatgaaagcttcaacttcggctttatggcttgtgaactttgaacccaaaaactctcggaacatagccttgtgctggtttctgtggcttcagttgtccataagtcatcaagaagaggtgtggaaatgttgttccaaagtaagctccatcaatgttgccttgatacttggaacgcggatagtaaagatcttcacacctagggcagtatattttcacagta

SEQ ID NO: 10350 - DNA, 511 bp, Glycine max
  Clone ID: jC-gmle01810046e05a1
tacctctgcatttttctctcgctctctgccttccatcaccctcgccatttcccttcccaagatagtagaagatggcagacgctgaggatattcaacctcttgtttgtgacaatggaacaggaatggttaaggctggttttgctggagatgatgccccacgtgctgtgtttcccagcattgtaggtcgtcctcgtcacactggtgtgatggttggcatgggccaaaaagatgcatatgttggtgatgaggcacagtctaagaggggtattttgactctcaagtaccccattgaacacggaattgtgagcaattgggatgatatggaaaagatttggcatcataccttctataatgagcttcgtgttgccccagaagagcatccagttctcttaactgaggcccctcttaaccctaaggctaatcgtgagaagatgacccaaatcatgtttgagacctttaacacccctgctatgtatgtagccatccaggctgttctttactttatgcaagt

SEQ ID NO: 10351 - DNA, 233 bp, Glycine max
  unsure at all n locations
  Clone ID: jC-gmle01810046e05d1
ggaaaanccagctaactcatactcagaatgaaccagtcaaaaacttatcaatgtttttgaaaagaactggaccatttaaaaaaaaaaaaaaaaaaccaactttcctcactttttgcaaataaatgatccctccaaccagagaataacctgaaaggggtaacaaaagcttgaatgaaggggttacaatctgcaatgcattgcttccagacaaatcatgaggatgggggtctttc

SEQ ID NO: 10352 - DNA, 450 bp, Glycine max
  unsure at all n locations
  Clone ID: jC-gmle01810046e06a1
cgatcgcataccggaacgagtactagagattgtcagtattgcggaaggacattttcgcgtaacgatgtacttcaaagacatctaaagacgcatgtggggcatcaagttggggatggtagaccgagagcgtcacctagtccatctatcgctcctgaggttccggattcaaggtcaattatccatcaaacacctcagatccaacaagaccagatctatcctcaggaccctctctctgcaaataccaatctgacggttcaggctggaccatcgactggcgattcagctataactggaccggtatatacgactcaacaggatgaagcttggagaatccttcatgggctgttacaagctactcaacctgtttctgccccttcatactctctcaaacaagatgtaatcaacccattccccgatatgttcagcaatcaagccgcangttcatgggac

SEQ ID NO: 10353 - DNA, 561 bp, Glycine max
  unsure at all n locations
  Clone ID: jC-gmle01810046e06d1
gacgaacgactatagtattatgacttggctacatactatatgaatgtattgtacaacaacccgaagcaccggtccatatccctccgtccaccgtcctcatactgaggaccgagtctcagtcatcttcgccaacaccaaagccaaagctgcgcctatcctccactctttacatcctccgaggtacctcactccgtatctcataatcgcctcagggagatttgaagggttattaaacaaggtcaacaatgaacctctatcctccgagtccagacgggctaattgatcttgatatgagctctcgggggatttgatcgatgtaaaagtccacaatgtcatgacagcgacaaagacgctaatcggagcgtatatgctcggcgtgtggtttggaaaatcgaggacttttagcagttgaatagcgtgagaggcggaacgtaaactcataggatcgtcgacccattcccggagaatgaacagtacactttcaatcttatgcgggccaaatttacctgaaatagcgtagatgtccttcaaatggtaattcacgcantgaaagcgagatga

SEQ ID NO: 10354 - DNA, 509 bp, Glycine max
  Clone ID: jC-gmle01810046e07a1
aacaacatggcaactattgcatctgcatgccttccttcctacatcatcaaaaaaccacttggatttcacccttcaaacctccacaacaagtgtttctctaagtccaatgcctccacctccactctcacatgcaaggcatcatcatcatcatcatcaaccatgatggactttgacttgtatgaccttctgggcattgacagctcttgtgatcagtcacaggtcaaagtggcgtatcgctctcttcagaagcgctgccaccctgacattgctggccctgctggccatgacatggccatcatactcaacgaagcttattccattctctctgacccaaatgcacgccttgcctatgataaggagcaagcaaaaagttcagaattcaaaggcttcactggcagacccatatactcggtctggtgtgggtcagaaagtgagcagcgggcaatatttgtcgatgaaatcaaatgtgttggttgcctgaaatgtgctttgttagctgaaaagacttt

SEQ ID NO: 10355 - DNA, 371 bp, Glycine max
  Clone ID: jC-gmle01810046e07d1
caaaattgaaaacccaacaagtttgggttaatatttcaaagctgggtcaaaaaattgataaagtatagcattcttaagggctaaagtggtatacttatacataatctactgggaagggattcatgggtttttttacataccttacagattattacatgggggggtatatatatatttatatatatatatatatatatatatatatatttcccgggaaaaattaaagcccctaatatatacttccacctatttttatttccaatttttgacaaaagatttgttattgcccttccaattattttcccctttgctggtgtcagggtactcttgtgccaaaagatgttaacaatttgccgaggttgacaaccacc

SEQ ID NO: 10356 - DNA, 460 bp, Glycine max
  Clone ID: jC-gmle01810046e08a1
attcgatttgcagacagtaattgtaggaggagctgacacaaccagtacctctcttacatgggcaatgtgtttgattttaaaaaacccatatgtgttggaaaaagttaaagctgaatttgacatccaagttgggaaagagaattgcataagcgagtctgatataagtaagttaacataccttcaagccatggtcaaagaaactttaagattgtaccctccaggtcctctctcgggacctcgtgaattcactgagaattgcactttaagtggctacaatatcgaaaagggaactcgcctaattacaaatctttggaagattcacacagatcttaatgtttggtcagatccattagagtttaaaccagaaaggtttcttaccactcacaaagacattgacattaggggtcatcattttgagctactaccatttggaagtggtagaagaatttgtcctggaata

SEQ ID NO: 10357 - DNA, 443 bp, Glycine max
  Clone ID: jC-gmle01810046e08d1
attccatatgatagttaagttgaaagagacaatacatatacatagcttcaaaatagttcgagacaaatctaatttaaccaaaatggatcacatatactttaatattcgacaatccaccaagatcacatagctaccaaaggatcacttgctttcataacaacttggagataaacgtggtttaataaaaatctcaagtggagtggctttagcgttgactaatccaaagctttcagtcatatcaagaggttcagtagacggatttaatatttcaaaggaatgcaaaaaactagcaagagggaaatgaagcattcgaaggccaaaggatattccaggacaaattcttctaccacttccaaatggtagtagctcaaaatgatgacccctaatgtcaatgtctttgtgagtggtaagaaacctttctggtttaaactctaatggatctg

SEQ ID NO: 10358 - DNA, 486 bp, Glycine max
  Clone ID: jC-gmle01810046e09a1
ctcgagccgaatcggctcgagggaagccatttgcttctccttcttagttctcttccccagctgttaccactgtcaaccgtgccggtgccggcatggttgctccattcactggcctcaagtccatggctggcttccccaccagaaagaccaacaatgacattacctccattgctagcaacggtggaagagtgcaatgcatgcaggtgtggccaccagttggcaagaagaagtttgagactctttcctacctgccagaccttgatgatgcacaattggcaaaggaagtagaataccttcttaggaagggatggattccttgcttggaattcgagttggagcacggtttcgtgtaccgtgagcacaacaggtcaccaggatactacgatggacgctactggaccatgtggaagctgcctatgtttggttgcactgatgcttctcaggtgttgaaggagcttcaagaggctaagactgcataccccaacg

SEQ ID NO: 10359 - DNA, 483 bp, Glycine max
  Clone ID: jC-gmle01810046e09d1
attcattagttctcatccattaatttccattgaagtccgaaaacagaaaccaaaaatacaggatgatgaaatctcaaaaagcaaaaacaaatgggaatgtagtttaagtacaaacaaacaaagtggggtggcggctacaaatgctttgcaaatttttcacacttagaagcctgggggcttgtaggcgatgaagctgatgcactgcacttggcgaacgttgtcgaatccgatgatacggatgaagccgttggggtatgcagtcttagcctcttgaagctccttcaacacctgagaagcatcagtgcaaccaaacataggcagcttccacatggtccagtagcgtccatcgtagtatcctggtgacctgttgtgctcacggtacacgaaaccgtgctccaactcgaattccaagcaaggaatccatcccttcctagaaggtattctacttcctttgcaattgtgcatcatcaaggtctggcaggt

SEQ ID NO: 10360 - DNA, 469 bp, Glycine max
  Clone ID: jC-gmle01810046e10a1
tccatcttttggcttgaggagtctgaaatcgagttctttatttggagaatctctaagagtggcatccagatcaacactaaaggtttcaaagacaaagaatacttcactcgtgaccagatgtgaaattggggacagtctggaagaattcctcacaaaagcaacaccagataaggggttgatcaggttgttggtgtccatgggagaagcattaagaacaatttccttcaaagtgaagacggcttcttgtggtggaacacaatgtgttaatacttttggggacgagcagcttgcaggggatttgctagctaatcagcttctttttgaggccttaaattactctcatttctgcaagtatgcttgctctgaagaaaattctgagctcctggacatgggaggtccagttgaaggtggatttagcgtcccatttgatccccttgatggctccagcattgtggacacaaatttcaca

SEQ ID NO: 10361 - DNA, 294 bp, Glycine max
  Clone ID: jC-gmle01810046e10d1
tgaattgccggtttaacaaattaagcaggtgctccaacagctacaccacccttgagcctggatttaccatacagggttttttaaaaccggattattttatttttggccccattagcaacttgggttctgtcatcaatggtactggtgactttgtctaacacagactggtgaccattactgttgtaacctccagctttttcaatcaagaaccccaaaggggcttcctcaaacaacagtcttagtttggctttggctgatggtgatgacacgttggtgaagattcctttttctttt

SEQ ID NO: 10362 - DNA, 580 bp, Glycine max
  Clone ID: jC-gmle01810046e11a1
tcactggacgagatttgaacttcacaatcccacctgaagcaagtgacttcagttcatggaggaatcttcccaacagagaatttgagctcgagagaccacttcccctgatcaagagcactctgaattcacaccccaaagaagctgcttaatggatctgtgttgaatttatcaactcatctgcctagcctcagtaatggtaatgggactgtcctgtcttctattagcagcaagaaaaggaaggacttttttctttatgggaaagatgaagaatgctgtttggctattaatcctccatctgatcggagtccagatttggtaatgcacccaagtgaatcacactggttgaatgacttcagaggggtgatgaagaatgtttgtggaccatttacagctgcaaaaactgtttatgaggacgaacaaggtttcttgatcattatcagtctgcccttcgaggatcttactagtgtgaaagtttcatggaggaacactgttactcatggtatcataaaggttttttgtgtgagcatatctttgcagccatttattaaaagaaacgttaggacatttcagctttcagagc

SEQ ID NO: 10363 - DNA, 272 bp, Glycine max
  Clone ID: jC-gmle01810046e11d1
caaaagggcctaaccaagggttttttaaaaacaacatggggtatttccccaaaattggccgatgggaaacaaaaacttgatgcttttttggtacgggaaaaagttttggaccctttttttcaagcaaaggtcccggcccctcttgaaaacatttatttatgggaaggtaggggcattctgtttgagcgggggtatatgggaaaaaacccccctgggggggaggattttggaaggggttttaaaaacaaagaggtccaaacttttttttaaaa

SEQ ID NO: 10364 - DNA, 520 bp, Glycine max
  Clone ID: jC-gmle01810046e12a1
tgttgacaattctcccagctttgttgtcatcaatgtcagtcctattgagtatgggcatgttttgctgattccgcgcatatttgagtgtttgcctcaaaggattgaccgtgagagctttcttctttcactttaaatggcagtggaagccgataatccttattttcgattgggttacaacagcttgggtgcttttgcaactatcaaccatcttcacttccaggcttattatttggctctgcccttcccaattgagaaggcccccactaagagaattgcaagtgtaaatggtggggtgaagatatctgaactgttgaagtatccggttagaggctttgtctttgagggcggcgaaatgctggaagatctatcaaacgttgtttcagatgcatgtatatgtcttcagaacaacaacatacctttcaatgttcttatctctgactgcggaaagcaagtgtatctgttaccacagtgttatgcagagaaacacgcacttgggtgtcaaaaaactcagcattcactt

SEQ ID NO: 10365 - DNA, 480 bp, Glycine max
  Clone ID: jC-gmle01810046f01a1
ggacaagaaagatacaaatgataaaattgaagagggtactgccaatggtgaggaagaagagtcttctgagttttccttgttcagaagactatttcgcgtgcaccctgtagaggctaaaagtggtgtgttcaatgaaaacaagtataatggcggtttatttgaaagtagtccaggtacagagaattttttacgtaaattgctcagagaccgtgaccgttcaattgaagattcagagctattgggttcaaaaagacagaaagagaagcattctgtatccccaaagcagcagagtgaaaagtccagcacaaagcctccattaccaattagttagtctcagttccggaaaggggcttatcatgactcattggagtttgtgcagtcattatgtgatacatgatatgggttagaggatgtatttcccatagaagatcgcacaagtgctcttcgcgaggcacttgtagaaatcaatctacatgtagc

SEQ ID NO: 10366 - DNA, 426 bp, Glycine max
  Clone ID: jC-gmle01810046f01d1
ggaaaagacagaccccgttgaattgaacatttgaaaatgggatcaagaaaaattaccgcccagtttgcttacacttaggcctgtccatcatttccttcccaacactttggagtttgaacactccgaaagacaataaatcagtttacaaagcaaccatttcaacacccatttcaaatgggggctgtcccgctcaaatcactggacactttggactatttttttgcatttaggaggctaaagaaacttttccaagcagcagagcttctttcgtttgatacgggggaaatgaaataaaaaaagaccccgctccaggaaatatagcctggtacactgtacaaattttaagggccgtttggattttcctgggagaaaaaagggtggacgcccccacctattaaatcttccctctgggaaaaactttaaagc

SEQ ID NO: 10367 - DNA, 507 bp, Glycine max
  Clone ID: jC-gmle01810046f02a1
cttcacttccgctcgggctatattcgaagggccttctgtcgcatctaacaagaccgggaagagacagataagctttctgatcgaacattgttgcggcatcagataacgcatacatgttcggaaagggccgcacagaaaaaggcttcaacgaccagtttgtctcaaaggaatatgacaatcatcccatcaactggtcagaataggagcgagcgaggcttgataataatatgctgcggaaactcgatttgcgcatgtgctatactgggagttatttatattctcaaatacatggatctagacaatgtcccagctgccagagccaatggtctagaaagggacctcaaactgacgggcaaccaggatacaaagtgttctatccttgctctacgatggatacattctggttcatgtagccttcaatatgatagatgaaaagacaggccgacccaccatatacctgcctactagcattgttatttggcgcctcatttccacccttttctatct

SEQ ID NO: 10368 - DNA, 494 bp, Glycine max
  Clone ID: jC-gmle01810046f02d1
aagccaggcgatggtatatttttcttgatagtgtatgactatcgaaatgcaacggtgccgattgcctgaaagtcggcattacggatgaaagtctggctacaaacgaagcttgaaaccaatctctcgtttggccttgccagagagcacgttcggtcggttgattagacaagaagagcaaaagaagagacttttgaggatgttcgtgataaatgagcagctacttttttttgggtgctatagtacgtcgggcctgattcatgagactgtcggctggctcaaagcatatatcggaacccaggtcggacatccaaagaagttgggatctttccgtctctgacaccgccaagagttgcactgtcgtctccgtgggcagctctctcctgttcgagcacctcgattttcttgttcatccgattgagatcccatcgatggaacgtcagacccatcaggcagactccaaacatggcaatgctgatgccaaaactatagcgata

SEQ ID NO: 10369 - DNA, 513 bp, Glycine max
  Clone ID: jC-gmle01810046f03a1
cttgagctatgtttcagggataatagggcagggatgtacaaagaacgagagcgaggtggtgtttccgtttccgcctctaaatccgaggatcggaagcgaatcaacgacgttctcgataagcacttggaacgatcctctccttccacttgccgccccatcaacaccgcttccaagaattccaacctccaagtggaggaatctgagacggagagtgaagagtctgatgttagtggctctgatggggatgacacctcttggatctcgtggttctgtaatctaagagggaatgagttcttttgtgaggtggatgatgattacatacaggatgactctaacctctgtggattgagcagtcaagtgccctactttgattatgcccttgatttgattctcgacgttgagtcatcccatggtgacatgttcacggaggaacagaatgagttgattgaatcggcggcggaaatgctttatggtatgattcatgctcgatatgtgttgaccagcaaaggaatg

SEQ ID NO: 10370 - DNA, 499 bp, Glycine max
  Clone ID: jC-gmle01810046f03d1
ggaattcgagacataaccatagacaatattaagttaattgcaagaatacaatttgtaaaaagccattaagaagtaccatcgagtacctaagcacttgctcattgaatcagaagctgaaactaagcacttgcttcacatgtctgcatatttctttacaacaagctcctataacaagtaaaacagatgcctagattgtactggtttggaaagcatatgattcgcctgttgttgcaaagagaaccataagaagagttaaatgagacacggggagatttttactttcatgaaagcttcaacttcggctttatggcttgtgaactttgaacccaaaaactctcggaacatagccttgtgctggtttctgtggcttcagttgtccataagtcatcaaaagaggtgtggaaatgttgttccaaagtaagctccatcaatgttgccttgatacttggaacgcggatagtaaagatcttcacacctagggcagtatattttcacagta

SEQ ID NO: 10371 - DNA, 551 bp, Glycine max
  Clone ID: jC-gmle01810046f04a1
cttagaaagaaaaaaacttaaatcaaaatacttaatagcatggcgatacatttatacaaaacttctaccccaagcacacgcaatggagccgtagacagtcaagtaaaatccaatccacgaaatcatttgatctatggacagcatcgttgtggtaaaggccgtaatgccagaggaatcattaccgcagggcatagagggggaggtcataagcgtctataccgtaaaattgattttcgacggaatgaaaaaaacatatatggtagaatcgtaaccatagaatatgaccctaatcgaaatgcatacatttgtctcatacactatggggatggtgagaaaaaatatattttacaccccagaggggctataattggagataccattgtttctggtacagaagttcctataaaaatgggaaatgccctacctttgagtgcggtttgaactattgatttacgtaattggaagtaaccaactaggtttacggcgaaacctagaaatcgatcactgatccaattggagtacccttcaggatagacctcaacagaaaactg

SEQ ID NO: 10372 - DNA, 536 bp, Glycine max
  unsure at all n locations
  Clone ID: jC-gmle01810046f05a1
cttcaagcagttacactggtaaagtatacacatacgatggcttgtacaaggttgtcaattattgggcagggaagggaatatccggatttacagtctacaagtttagacttaggaggcttgaagggcaacctacattaactacaaatcaggtatattttacatatggacgtgtacctcaatctctaacagaaatacaagggttggtttgtgaagatatcactggaggtcaagaagatatgcccattccggctacaaatttggttgatgacccccctgttccacccacagatttcacatattgttagtcactcaaggttgcataaaatgtgaagcttgccatgaatgccaccggatgcaaatgtgaaggcatttgtaatgacccaacaagctgtgcgtgtgcattgcgtaatggctctgatttttcctatgtatctcgggatggtggcaggttaattgaagctaaagatgtagtttcgaatgtggtcccaatgtggttgcggtcctggttgngtgaacccaacgtctcaaagaggact

SEQ ID NO: 10373 - DNA, 410 bp, Glycine max
  Clone ID: jC-gmle01810046f05d1
agccaaaaaagaaacctattttatttccttgcatctgcacaaaaaggtacaatgttcctttggtgccatttcagcccaatacataaactgggcaaattaaccgggaatgaatagagaccactttgcagctcatgttttaaacaaccaatacttaaccgcacttgttttgcaattgcaaaaataccacattcaacttccagagttttagaataatcgctttctgcaaactgaggctccacagaaacatgggatttgcttaatcttcccatccgagtccaacacgcttttaagcacgccaccatagtcatatgttaattcctgcaaagggggtatgttgtctgtatcaaacaacattttacgagccaatctcaaatcatcgggtgtgctcaaaacacattggacaaacagat

SEQ ID NO: 10374 - DNA, 441 bp, Glycine max
  Clone ID: jC-gmle01810046f06a1
cttcaagcagttacactggtaaagtatacacatacgatggcttgtacaaggttgtcaattattgggcagggaagggaatatccggatttacagtctacaagtttagacttaggaggcttgaagggcaacctacattaactacaaatcaggtatattttacatatggacgtgtacctcaatctctaacagaaatacaagggttggtttgtgaagatatcactggaggtcaagaagatatgcccattccggctacaaatttggttgatgacccccctgttccacccacagatttcacatattgtaagtcactcaaggttgcaaaaaatgtgaagcttcccatgaatgccaccggatgcaaatgtgaaggcatttgtaatgacccaacaagctgtgcatgtgcattgcgtaatggctctgattttccctatgtatctcgggatg

SEQ ID NO: 10375 - DNA, 423 bp, Glycine max
  Clone ID: jC-gmle01810046f06d1
agccaaaaaagaaacctatatcatttccttgcatctgcacaaaaaggtacaatgttcctttggtgccatttcagcccaatacataaactgggcaaattaaccgggaatgaatagagaccactttgcagctcatgttttaaacaaccaatacttaaccgcactagttttgcaattgcaaaaataccacatacaacttccagagtattagaataatcgcttcctgcaaactgaggctccacagtagcatggcatttgcttaatcttcccatccgagtccaacacgctatcaagcacgtaaccatagtcatatgttaattcctgcaaagggggtatgttgtctgcagcaaacaacattatacgagccaatctcaaatcatcgtggtgtgctcaaaacacattgaacaaacagattaggctcacaac

SEQ ID NO: 10376 - DNA, 437 bp, Glycine max
  Clone ID: jC-gmle01810046f07a1
gttgagttgagtttttttattgcaatctgtttttgtctgtctaataaaatatttttatttatttatgagccttctagagagaaagggagatgaatgttgttacttgttattagtggaggcttctgaagagagtgaagagtagtagcgtgtgttgtgttgttgttgctgctgctgctgcaatgggaactccaccaacggatgagcttgtgaagaagatccaacagctggaggaaggacacgcgcacctgaagcaagaaatgtcgaaactaaaactctccgatgtgagacacggccaccatcgccagaggtcgcactccgtctctccgcagcgttctagattgggagctccgccgaagaagcggagcgatgcaccggctgctgcgtggaaacgaagttcgtgttcttttaacagtcgtcgccgctgcagagggagagtc

SEQ ID NO: 10377 - DNA, 546 bp, Glycine max
  Clone ID: jC-gmle01810046f07d1
gtgattctaatctatgtagtcaaacgaatttttttccctttcttttcgctaccttctgtacaacttttaaatagtggcgcaaacatttgcatagaaaagtacaatgcgggtggtgatcgatccgattgacaagactccaaacacaacaccaccaatcaattgaagaaactttaaaatgccactagagaaaaataagatgactaatccaatcactatcaaaagtttggcaatccccacctctcttttaagttttatcagtccatctcccttcttcgttcttcataataccttagcaaatgttggaggactccaggatcagctactctacatggttccaagaccagctgtttgtacttggtactaactcatctactccagcagctttggtaaaatatatgcaaaaaaatcattaagcatcagccacagccacagtgacagaaaaaatagctccaaggttgtctaggactccttttgggtgctttccttggcagtggatcgggcagcctggaactgaatggcatactgtttttgcagctctttaagctt

SEQ ID NO: 10378 - DNA, 439 bp, Glycine max
  Clone ID: jC-gmle01810046f08a1
gcgttgccattctcatcctcttctttctctctctaccattgccatggatccctacaagcaccggccatccagcgccttcaattctcccttctggactacaaattctggtgctcctatttggaacaacaactcctctttaaccgttggagctagaggtccaattctgctggaggattatcatcttgtggagaagcttgcaaattttgatagggaacgtatcccagaacgtgttgtccatgccaggggcgctagtgcaaagggtttctttgaggtcacccatgacattaatcacctgacatgtgcagatttccttcgagcccctggagttcagacgcctgttattgctcgcttctcaactgtcattcatgagcgtggtagccctgaaaccttgagggacccttgaggtgttgccgtgaagttttacaccagagagggtaac

SEQ ID NO: 10379 - DNA, 460 bp, Glycine max
  Clone ID: jC-gmle01810046f08d1
attgagataggtcaacgagttgcattcatggagttatgggtacacacaacataatattgcaagaaaaggattagttctttcaggtaatccaaaatcacatccttatcgtactctttgcacgtctgcaactctaacaatcattctggagttggcaacaacattaaatatttggcctcgtgctgagatgagaagctatcttttggcctagagaacggtcagcctgagaccagtatgatatccagacactgcggatctcatgggtgacccgtgggtcagataaagcatcaacccatcggcgagcaaatctatcttgcctgtcaggtgcccaagaccggtatctctctccgggctgcttgaagttgttctccttctcaattccacacttttcacgccttccactgcaaatagcaggaggtatggggaacctttctgcatgacgaacaggatcataccttgaagg

SEQ ID NO: 10380 - DNA, 94 bp, Glycine max
  Clone ID: jC-gmle01810046f09a1
cttattcgtaagttaaaagaataataataataataataacataggcccatctgcctgggcctagcttgctgctattcagacaactcatatgata

SEQ ID NO: 10381 - DNA, 242 bp, Glycine max
  Clone ID: jC-gmle01810046f09d1
ataaaaagacttataaaaatttatatttttttttaaacaacgggggcgcacttttttggtactaaatcacttaagcccccctttgaatctcacattttttttaacttcccaataagaataataataataataataacctgggccccgttttttgggaccaatcccctttggtgatgaaccctgaataaacccctcccaccttttatttcaaacccgggacctatggacccccgggggacccc

SEQ ID NO: 10382 - DNA, 544 bp, Glycine max
  Clone ID: jC-gmle01810046f10a1
tgttgacgtgctgcttgagcaaaacattgttcctggtattaaagacgacaagggtttggtgccccttgcaggttccaacgacgagtcatggtgccaaggtttggatggtctagcctctcgctcagctgcatactacaagcaaggtgcccgtttcgccaaatggcgtactgttgtgagcatccccaacggtccctctgctctggcagttaaggaagcaacctggggtctggctcgctatgctgcaattgctcaggacaatgggttggtcccaattgtggagccagagatcttgcttgatggggagcatggtattgatagaacttttgaaggagcccaaaaggtctgggcagaggttttcttctaccttgctgaaaacaatgtcctttttgagggtattctccttaggcctagcatggttacacctggagccgagttcaaggacaaggccaggccttagacaagtgctgattacacccctcagctccttcacaggagaattccccctgctgttcctggattatgtttttgtctggtggacagtttg

SEQ ID NO: 10383 - DNA, 380 bp, Glycine max
  Clone ID: jC-gmle01810046f10d1
tgcaaacatcttagtaggagtagcttttgacgaacaactccttcttggcttcctcggattcaccctcaccagtgtacttcccaagctgagcgagtgagttggacttggcacggaatgcgagtgcatcttgtgctgccttcacgttctctgggcggcctccccatgtcttcaaggcagtgttttggagggctctggcatacgagaatgacacgtgccacgggtttggagattggttcatggcattcaaattgagggtagcttcaacctcagactgtccaccagacaaaaacataattccagggacagcacggggaattctcctgtgaaggagcttgagggtgtaatcagcaactgtctgaggactggccttgtccttggac

SEQ ID NO: 10384 - DNA, 550 bp, Glycine max
  Clone ID: jC-gmle01810046f11a1
tgcccttaggcacggcaatacataacatagaaatcacactcggaaagggtggacaattagctagagcagcaggtgctgtagcgaaactaattgcaaaagaggggaaatcggccacattaaaattacccttttggggagggccgtttgatatccaaaaactgctcggcaacagtcggacaagtgggaaatgttggagtaaaccagaaaaatttaggtagagccggatctaaatgttggctaggtaagcgtcctgtagtaagaggagtagttatgaaccccgtagaccatccgcatgggggtggtgaagggagggccccaattggtagaaaaaaacccgcaactccttggggttttcctgcacttggaagaagaagtagaaaaaggaagaaatatagtgataatttgattcttcgtcgtcgtacttaatagtagagaaaatagaaattgtttcttcgtctttacaagaaaaggagtaattaactgtgacacgttcactaaaaaaaaatccttttgtagcgaatcatttattaagaaaaataaataaacttaa

SEQ ID NO: 10385 - DNA, 484 bp, Glycine max
  Clone ID: jC-gmle01810046f12a1
ttagatatagaggatatcctattgatgacttggcagagaaaagcagctttatggaagggtcatatctcataatgtatggaaatttgccttctgaaagtcaattaacagaatgggagtttaccatattctcacccttcccctgtaccacaaggagttttggatatgatacaatcaatgcctcatgatgcacattctatgggtatgcttgtcaatgccatgagtgctttgtctgtttatcatcctgatgcaaatcctgctctcaaaggtcttgatatctacaactcaaagcacgtgagagacaagcaagtagcacgggttattggaaagataacaacaattgctgctgcaattaatcttagattggcaggaaggccacctgtgcttccatccaacaaactttcttacacagagaacttcctatacatgctagattcttttggccatcgatcatataaacctaatcctcggctaactcgagcactgg

SEQ ID NO: 10386 - DNA, 553 bp, Glycine max
  unsure at all n locations
  Clone ID: jC-gmle01810046f12d1
gaactcattgatcaatagcgancccnnnnnntttnnnnnnnncnnnnnnnnnnnnnnnnnnnnnnnnnnnnnnnnntnnntttnnnnnnnnnnnnnnnnnnnnggggnggggggnnnnnnnnnnnnnnnngngnnntttttttttgtttttttttttggtttttctgaaaccatagtctaactgatttcatgatgttatttatctatttgacttcataattttattcataaacaaacaaacttattttatataccagaaaaaaaaattaattttttctctgaagtggactttattgaccacttggcattttcactatgttaagccccagatccagcaagtcgcctctttgaggcgtttgatacagccaattgaccaagtttgtcagtgttacttgatgtagtcctttgattgattggtgcataatgcctcaaccactccccaacataaacctgttgaggtctcataatctttgtatcaggatcatccaatgactctcgccaatgtgccaagtacccagccattcgaaggatggcaaataaaacagtgaaaaac

SEQ ID NO: 10387 - DNA, 344 bp, Glycine max
  Clone ID: jC-gmle01810046g01a1
gtacacaagttgctataaaaatgggaaatgccctacctttgagtgcggcttgaactattgatttacggaagtggaagtccccaactacgcttaccgcgaaacctagaaatcgatcgctgatccgatcggagtgcctttactggatagacctaagcacaaaactttagagtgacggctgagcgcgattgagtgcattcatctctgatctaaaatgatggtgtctcgggatacactgatctggatatgacaacattgtatgggcacctacagaaccggaagcaccctctgattgcagattaatagagggggaggcggtttattcacatttcataacatggttagag

SEQ ID NO: 10388 - DNA, 360 bp, Glycine max
  Clone ID: jC-gmle01810046g01d1
ataaaagaaatgatttgaatttcattttaataagaattccattttgtaatatttaggtgtaaattacgatttaaaaatttatgttaaaattaacgttaacgacgagatctattgtcatttttggcatggcctcggaaatttagagtaggtgaaaattctcctaatttatgggctaccatacgatctgttatataaataggtaaatgctctttttcgttgaggatagcaatggtgtggccaatcattggaggtataatgggggatgctctggaccaaggtattattatatctttttccgcttttgagttaagtttatttattttttttaataaaggattcgctacaaaaggattttttttt

SEQ ID NO: 10389 - DNA, 400 bp, Glycine max
  Clone ID: jC-gmle01810046g02a1
gtacagtagtggctataaaaatggggaatgccctacctttgagtgcggatggaactgttgatttacggaattggaagccaccgactgcgtttaccgcgaaacctagagataaatcactgatccgggcggagcacctttactgggtagacctaaggacagaactttggagtgacggatgagctcgatagattgcattcatttctgatctaaaatgagggagtctagggatacactgatctggatatgacaaacccgtaggggcgcctacaggacgggaagcaccctttgattgcagagaaatagacgcgggggcggtctactcacattgaataacttggttagaggctaattgaaagcatagccgtggggaaattgacgactttctgcagcataaatggag

SEQ ID NO: 10390 - DNA, 547 bp, Glycine max
  Clone ID: jC-gmle01810046g03a1
gatgacattgcattcaatggggaaaacccaaggcctggagtcatcattaacaaaccagatggaggtgatgtttataaaggagttccaaaggattacaccggcgaagatgttactgttgataacttttttgctgctttacttggaaataagtcagcactgactggtggcagtgggaaggttgtggacagtggttctgatgatcatatatttgtatactatactgaccatggaggtcctggggtgctcgggatgcctgctggtccttacttatacgcggatgatctgattgatgtcttgaagaaaaagcatgcttctggaacatataaaaacctagtattttatctggaggcatgtgaatctgggagtatctttgaaggtcttgttcctgaagatattaatatttatgcaaccactgcttgcaatgcagaagaaagtagttggggaacatattgccccggggagtatactagtcctcccccagaatatacaacctgtttgggtgacttgtacagcgttgcttggatggaagacagagacagacacaatt

SEQ ID NO: 10391 - DNA, 563 bp, Glycine max
  Clone ID: jC-gmle01810046g03d1
aatattaaacaataattttggcatcataaattcttccggaataattatacaaaagtgaccagggaaaacccgatctgccagttgcccactgaataaaaacacacatcatattactatgtgttgtcatacatgcattgtaatgagtggatattccaaagcaattggtccctttatccctccttaatccttatgccgtaaatggcaccatcccttgtaaattgtaattgcttcttcagaaatagaattatacaaaggtagttgcaatatctatttgccaaactataaatgtaaagacccttcttcccaatcctagtagtgtcccaattgtatttacaaaggtgggacaagatatgtatatacaagtacaaccatgtaacataatgtaacaataatcatactttggtctttactagtgcacattacagggagttattatgcactgaaacccctttgcagagaactccagggattggaaggaatactgacacaagcttgtgctgaagcctcagccatttgttcattctttatccctacattgcagatgtttgcaaggacctatgtgt

SEQ ID NO: 10392 - DNA, 530 bp, Glycine max
  Clone ID: jC-gmle01810046g04a1
gttaaaagccttagccttccctacaactccaaacacaaagacatcatcatccatggctgcctccgtctccactgtcggagctgtcaacagagctcttttgaacctgaatggttctggagctggagcttcagctcccagttcagccttctttgggaccagcttgaagaaggttattgcctcaagggtccccaacagcaaggtttccggtggaagcttcaagattgttgctgtagaacagaagaaagagattggagagacccagcagaccgacaaggacagatggaagggtcttgcctatgatatctcagacgaccaacaagacatcacaagaggaaagggtttggttgactcccttttccaagctccacaggatgctggaactcactatgcaggcatgagctcctacgagtacctcagcactggacttcgccagtacttggacaacaaaatggatggattctacattgctccagcttttatggacaagctagttgttcacatctccaagactttatgaccctgcccacatc

SEQ ID NO: 10393 - DNA, 412 bp, Glycine max
  Clone ID: jC-gmle01810046g04d1
ggggttaatttttttaatttgactgtccaaccctgaaaccttttttaagatcatttttaaacctaccattttttttttgcccctaggaaattctaaaagaaaggcacgctccccccaaataccctcaacaccccccgcccccgaaaaaaaattaaaaccgtcaccaaccaaaacattcacttttcccctaccccccccccccgaattacaaccgcaaaaaagccccccccagcacaccaacccatttacctctttcgaaaacaccccccccccacccccaaaaagacattgccccccccggggccctcccccccaattcgaaaaacaggggaccccccctgaagaaaaaacccccccccatattgggcccaccaaccctgggaaagccctttttggaacacataagcttttt

SEQ ID NO: 10394 - DNA, 588 bp, Glycine max
  Clone ID: jC-gmle01810046g05a1
gtagatggtccagattagtaccacaaaaatggagaaatagaataactgaatatcgtatagctcaaaataaagatttaaccaaatgcaattcatatgaaaaaagccaattaattctttacaaagaacaacaagtaaacgcattaaaaaaaaaaattagaaaacaatatagatacgatcttttatcctataattttatcaattatgcagataagaaagactcatatatttatggatatagatccctatttcaagtaaaaaaaaaccaagtgatttcttctaattacaacacgtataaaaaagaattattggatatcatagataatctctttatcaagaattatatatcggaagatgcgattctagatatggaaaaaaatatgtatagaaagtattttgattggatgggaatcaatagagaaatactaaatcgttccatatcgaatccagaattttgtttctttcaaaatttgtgatattttatgacgcatataggggtaactcgcaaggtataccaatcaaattacttttttttctttaatggaaatcaaatgttgggaaaataaaagacattctagaaagaaaaaatga

SEQ ID NO: 10395 - DNA, 518 bp, Glycine max
  Clone ID: jC-gmle01810046g05d1
gatctcttgttcttgtaatatatttataaaaatttttcttattaacatgaattttttctgggtatttgtgataaatttttcgtttattcttttgaattaatgaaagacctatggtttgatacataaaaaattgtttattgttttttctagacaggcgaactggttcgataacaaatatttcttttttcataaatttgttatttttctttttccttaagcctagaagaattaaattcttctgattttgaatcatcataatatctagacctagttctcctctttgaatagaggctattgtaatttctcttaaattttttaatctaatcaggagacaatatactttgacattgttaaatattctttgacctaagaaattattccaatttaaatgtaaaatcaaaaaatttcttagtaagaaattaagttctgcctccatcttgttcttggctttctttttctttatacccttactattcttttcactgtctgatcctacataatcgttttcaatatctttt

SEQ ID NO: 10396 - DNA, 437 bp, Glycine max
  Clone ID: jC-gmle01810046g06a1
gtgactcccgcggccttccaggagtgaggaaggaagtggctgagttcatactcaggcgtgatggttatccaactgatccagaactcatatatctcactgatggtgccagcaagggggtgatgcagatattaaatactatcatcagaggtcaagacgatgggattttggttccagtcccacaatacccactctactcagcaacaattgctctgcttggtggtacccttgttccatactaccttgaagagacagcaaattggggtcttgatgttaatgaacttcgtcaatcagttgagcaggctcgctttaaaggaataactgttaaagcaatggtgatcataaatcctggaaaccctactggtcaatgccttagtgaagcttatctaagagaagttttgcaattctggtatcaagaaatttaaccttgcttggagatg

SEQ ID NO: 10397 - DNA, 483 bp, Glycine max
  Clone ID: jC-gmle01810046g06d1
attgtaagttcagagatgatatagaagaaagtgtaaggtttaagaattatctccaaggacaaatagtagaaagggaggttatgtttttcttacaaaagcacaagagtataatgcatcttttacgataattttcttacaaccttgaataacctctattgtcttcgtattgctccatgaattcatcattgaactttttgaaactatccataatagcgggcatgtcttcctcgtctggtaaaatagtagtcctcaaatggaagaccccttctctctgtccaaatcctgaaccaggaacagtggatatgccagtggcttccaaaagtttgaggcagtagaaaacatctggaacctttgcagcctgtttagcagcctctaaagctcttggcggcaaacgtatttgagggaatgaatacatggcaccttcagtaaaattacaaaccacatttctgcaactgttgaatccatcagtcattagccttgctc

SEQ ID NO: 10398 - DNA, 503 bp, Glycine max
  Clone ID: jC-gmle01810046g07a1
gctcttcaagagcgtattacaacaaccaagaagggttcaattacctctgtccaagctatctatgtgcctgctgatgacttgacagatcctgctcctgctaccacttttgctcacttggatgccacaacagtgttgtcacgacagatctccgagcttggtatctatcctgctgttgatcccttggattctacatctcgtatgctttccccccttattttgggtgcggatcactacgaaactgctcgtggtgtacagaaagtgcttcagaactacaagaatcttcaagatatcattgctattttgggaatggatgagctcagtgaagatgataaattgactgttgcccgtgcccgtaagattcagcgattcttaagccaacctttccatgttgctgaagtcttcactggtgccccaggaaaatatgttgagttgaaggagaacgttgccagctttcatggtgtgttggatggaaatacgatgacctttcaagcaatcgtttacat

SEQ ID NO: 10399 - DNA, 528 bp, Glycine max
  Clone ID: jC-gmle01810046g07d1
acgctggccatggaccaggtggaacagttgcagagtttttaacattaatgcatccaacgttctcaaccagaaagtaaaaaatgtacatcctcttgcccttttccccttattaaataacacaacttaaaaacaggggggcagtttggccacagacattgaccgtagttcatctcacagtcggcaacattaaaatggaaggaaggaataacctgatacattttcatacccaaaaaatggaaaattttgttgtttggcattgccaagagttcctaaattattaaatttagcaattacaaaaaaaaaagggattaaaatgagaacagggctgtgtgtgattaagacgctgcagattccttagcaattttctcggcctttgcaatgacctcctcaataccgccaaccatgtaaaacgactgctctggaaggtcatcgtattttccatccaacacaccctggaagctggcaacgttctccttcactcaacatattttcctggggcaccagtgaagacttcagcaacatggaaag

SEQ ID NO: 10400 - DNA, 504 bp, Glycine max
  Clone ID: jC-gmle01810046g08a1
ctcattgccgcaaatgactcctcctgctagtgttaggtgaattccctcgcttcacatgcatgatcgcaccttcaactctcttcttcttcttcttctccatggctttttttcaaggttttggcgccgtggagttcgttttgtagcatcaccgtatcatcagcttcagcttgctttcaccaaaacggctttactatttggtgtgttccatgtcacaaaaaacgaaaggagatattccttttacccactcctcgtcagggaagatctgaagcagcgctagcagcacacgttctctaatggacgccgactcctctggagaagaagtggttattaaaacaagaaaaccatatactatcacaaagcaaagagaacgatggacagaggaagaacataacaagatttctagaagccttgaagctatacgggcgagcatggcagcgcatagaagagcatataggaacagagactgctgtacaaatcaggagtcatgctcagaaattctttaca

SEQ ID NO: 10401 - DNA, 552 bp, Glycine max
  Clone ID: jC-gmle01810046g08d1
ggtacttaatgtttcttgtctaagtctattttagcggagtttttaactgcagtaacatcaggccaagaaagtaaaaagtgtgtatgtagtaatttaatatggtacacagacctacacgacaagtttcgtgagctgcagaattagaaaataagcaatacagacaatgaacaaggaaacttagaaatatatgcaaaactagagattttctttgtgtggttgcatgggaatatcaggcatcaagttgaagcctccccattcaagcgtaatctcttgggacctttttcttcaccttggatgcaggctgttccgatcctgttttcattggcctctaccgaacatcttttgtaaggtttaaaccctgttcgacgagtctttagctttcctggtccaagacctatggttagcagtccctcctcctcattggtatctttgacaaatagcagatttttctgcaccccatcacaaatagaactgcatttcttgctttcaaggtcttcatctttgtagtctgtgtttagctcgttatccttgatgctatctatctcgatatct

SEQ ID NO: 10402 - DNA, 484 bp, Glycine max
  Clone ID: jC-gmle01810046g09a1
cttttgtaaagcttttttttttttctatgcactacactctttggaaggaacgagccatgggggagttaggttctgcacgctctgcttccagcgagtgttctttcttcgtttcaacaccttaatttgcaccacgcttgttttttcagcttgagaaatggcacaagaaacctttctattcacatctgaatctgtaaacgagggtcaccccgacaagctgtgcgaccagatctctgatgcagtgctcgatgcgtgccttgaacaggaccctgacagcaaggttgcctgtgagacatgcaccaagaccaacatggtcatggtctttggagagatcacaaccaaggccaacgtagactatgagaagattgttccgtgacacatgccgcgaaattggattcatctctgatgatgttggtcttgatgctgaacaagcaaggtgttggtcaacattgagcagcagagccctgatatcgccaaggtgtgcacg

SEQ ID NO: 10403 - DNA, 59 bp, Glycine max
  unsure at all n locations
  Clone ID: jC-gmle01810046g09d1
tagtcatggaacacgcaaattattcatccacacctagcaggacatncaatggagggggg

SEQ ID NO: 10404 - DNA, 537 bp, Glycine max
  Clone ID: jC-gmle01810046g10a1
cgattgcaagaggaaaagaagaagattaaaggctccatcgaaatcaatttcccacagggtcaaacaaatggttggagttggaaaacaaaacaagagaaaatgggtggacgcaagtgtttgttaacgtttggtgttgagtttggtgttgatgatgagtatggcagaggcgcaatctggtactagcgcagactgcgcccaggagctaattccatgcctggactaccttaatggcacgatcaacccaccaagctcctgctgcgaccctctgaaacgaacagtccaaaacgaactcgcctgcctctgtaacatctacttctcccctggccttcttcaaagcgtcaatgtcactgtcgatgaggctctcggcctcagtcgccgctgcggcgtcactagcgatctcagcagctgcaaaaacgggtcagcttcagcttcgggttcacggccaccaccagccacttctggaggtgacaaaagaggagcaagcacagtcacattcaccgggctttctttcctccttttattttggtgtctatgctg

SEQ ID NO: 10405 - DNA, 512 bp, Glycine max
  unsure at all n locations
  Clone ID: jC-gmle01810046g10d1
atcccgtagccatcgatccccnncnnnntnnnnnnnnnncnnnnnnnnnnnnnnnnnnnnnnnnnnnnnnnnnnnnnnnnnnnttttnnntnnnnnnnnnnnnnnnnnnnnnnnnggggnnnggggnnnnnnnnnnnnnnnnnnnnnnnnnnnnnnnnnnnnntnnnntnntnngnggggttgaaatacaaagataacttcaacatagtagaggctccgaaggataaacaaccaccttcctaattaaacagcatagacacccaaaataagaggaggaaagaaagcccggtgaatgtgactgtgcctgctcctcctttgtcacctccaggagtggctggtggtggccgtgaacccggagctggagctgacccgtttttgcagctgctgagatcgctagtgacgccgcaacggcgactgaggccgagagcctcatcgacagtgacattgacgctttgaagaaggccaggggagaagtaaatgttacagaggcaggcgagttcgttttggactgt

SEQ ID NO: 10406 - DNA, 521 bp, Glycine max
  Clone ID: jC-gmle01810046g11a1
ctctgtcaattaatcaaaagaatgaactaacggatactataattactgataatgtcaggttagaacaagatattgttaagccggagatggtggaagaaccatcatacagaaatgatgtttctgttttttatgatgaatcacattcaatggatgttggagggctgcatgagaaaaaggcatctgtggaagaaaatatcaataatgtttcaagtccagacttgaacaagaccaatagcagtgatgatgtagggtattcagaaaagttgaacttggacagaagttctggtgatgattctatggaagaggatttgcctgagactaagcaaattgattctaagtttaatgttgatgaacttaaagacaaagtttagattgaaaagcctattgtgaatgaggaaagttgtactatagctgttggagatagtctatctgcaggaaaagatgatacccaccaagatattgacattagtcctgctgccctgactgagaaacggaaatttaatgaagttgggaacagtgag

SEQ ID NO: 10407 - DNA, 541 bp, Glycine max
  unsure at all n locations
  Clone ID: jC-gmle01810046g11d1
atccaatgatcgcattccgnatncnnaannncnnnnnttnnnnnnnnnnnnnccnnnnnnnnnnnnnnnnnnnnnnnnnnnnnnnnnnnnnnnnnnnnnnnnnnnnnntttttntnttttttnnnnnntnnnnntnntnttnttttgggggntttgggtgtttttttttttttttttttttttttttttttttttttttttttttttttttgttgtgtaaatttatccaaccccagacgcttttaattcaccacttctaaaactaaaaaaatttaactctcaaaatacattaccaatgacaattttttcccaaaacaaaacaccaccagatcttcccacaagacccattcaaaataatcccatagcactaataaaaatctccaaatcatttaaagggcttcaagggaaaaattgcccgctaatggcctatctactgcctcccccttttaccctgtgttgaaaattttgcggcaactttctcttcaaacaaaggtgttatagctaaacccacgagtcccctgggttttgcccaaaaaatcat

SEQ ID NO: 10408 - DNA, 500 bp, Glycine max
  Clone ID: jC-gmle01810046g12a1
ctctgtcaattaatcaaaagaatgaactaaaggatactataattactgataatgtcaaattagaacaagatattgttaagccggagatggtggaagaaccatcatccagaaatgatgttcctgtttcttatgatgaatcacattcaatggatgttggagggctgcatgagaaaaaggcatctgttgaagaaaatatcaataatgtttcaagtccagacttgaacaagaccaatagcagtgatgatgttgggtattcagaaaagttgaacttggacagaagttctggtgatgattctatggaagaggatttgcctgagactaagcaaattgattctaagtttaatgttgatgaacttaaagacaaagtagagattgaaaagcctattgtgaaggaggaaagtagtactatagctgttggagatagtctatctgcaggaaaagatgatacccaccaagatattgacattagtcctgctgccctgactgagaaacggaaattt

SEQ ID NO: 10409 - DNA, 508 bp, Glycine max
  unsure at all n locations
  Clone ID: jC-gmle01810046g12d1
tacaagtctaatctcattccgaaatccccaaannccccnnttnnnnnnntaananncnaananaaccanaannaanannaanattaaaaaaaaaaaaaaaaaaaaaaaaaaaaaaaaatttttatattattttataaantataatattaaatattatatttgggggtataggtttataatttataaatatattatatattattattattaattttattataaaaataatattttataaatttttcccacccccattgctcttatttcaccacttctaaaactaaataaatttaagtctcaaaatacattaaccattacaatttcttccccagacaaaacacccccaaatctcccaacaaaacccattcaaaataatcccatacccctaataaaaatatccaaatcatttaaaggcccccaaggcaaaatttccaagctaatggcctatttactgcctcccccttttacccttttttaaaaatttttcgacaactttctcttcaaacaa

SEQ ID NO: 10410 - DNA, 354 bp, Glycine max
  Clone ID: jC-gmle01810046h01a1
gagtacatagagaaaatgagtgaactctggaaaggaatcatgtccatttttcgcacataccacagtgaactattcttcttgaacttctcctctgtgaaccgaacgtgataaaattcaggatgagcctgatctgtcatatctagttaaccctgtcagaaaggcgcgacaagttcctcttctacatggggctcaagatgaagctcgagctattaaaccgtcccgtccccgtcttcgactccgatgaacgcccctgcgagcgcctcatgacctactccggggacatcgacacctacgctcctggcgactcctacgacgtgtcaatggaggagagcgactttcggaacctgctggaga

SEQ ID NO: 10411 - DNA, 480 bp, Glycine max
  Clone ID: jC-gmle01810046h01d1
gaatattagaaaacatactttataaaaacaaactttttaacttaccatagttcaattattttgtggacatcatcatgctaagatgttcactcatgacaacacatacaacaaataaaatcgccaacttctttcaagtaacatagtactggttacactaaacatgcaaatactactacagcaacttgaatacacattattatccatattttaaacaagattattacacatgaaacagtcacggccattggtctaacatttatagaaagaggtcataggagcaaattgaacgaaaccagcttcagttaacatcaactcgaggaacctcaaactttagatttggaatcatagtttcaaatgcttcccatgaaccaggtcatgtcttaggagctaatagaatgaagccagtttaagttaacctcgactcgaggaacctctaacttcagatttggaagcatagcttcgaatgcttcccatgaagca

SEQ ID NO: 10412 - DNA, 470 bp, Glycine max
  Clone ID: jC-gmle01810046h02a1
cgaaatttctcagccaaagaacaaggatcagaatcgcttaatcaagttgaggaagatggcactagtctccggaggaagatcaacactgaaccctaacgcccctctttacattcccgccgcgttccgccaagcggaggatttttctacacaatggcggcaggtggtgacgacactgacatggaaccatgactactggctaagccagcagcacgatgatggagccttctatggtgaggatgggtttgatggcaatgatggggccgatttacttactgattcgactgattttgatgctggtgaagatatttctgcagagtttattcggtcgtgtgaatcccacgaagaaactggacccaaaggaactgcatgagcttctacagatgaacccttatagaagaagctaccaatctaagagactgggcccaacgccttagctttaggccatttaactgatatgggtgataatgttg

SEQ ID NO: 10413 - DNA, 544 bp, Glycine max
  Clone ID: jC-gmle01810046h02d1
gaataattgtaggttgtagcagcttttacaacatcagtacataaaacagtcacatttttttctccatctttttcctttccctatttaccatacattttggcaaaaggcagagaaggatagattggaagtttgaaaccttgcctatacaagaagttacaggaagttgaagctacggataacaacatgatacaaacatatcagctaaatgacctaaagctaaggccttgggtccagtctcttaggttggtagcttcttttaaaagggttcatctctaaaagctcatgcagttcctttgggtccagtttcttcttgggattcagaagatcgaataaactcttcaaaaagatcttcaccagcatcaaaatcaaacgaatcaggaagcaaatcaaccacatcattgccatcaaacccatcctcgccatagaaggctccatcatcgtgctgctggcttagccagtagtcatggtaccatgtcagtgtcgtcaccagctgccaccattctggagaaaaatcctccacttggcggaacgcggccggaaatgt

SEQ ID NO: 10414 - DNA, 355 bp, Glycine max
  Clone ID: jC-gmle01810046h03a1
gctctctcagacttctacaatacctctgcttctcagctaccttttcctgatgaggctgcagagctgctgtacaagaggactgcgccagaagcggcgtcgttggtgagttgggttctgtggatactgtctttcacattgtggacactgttgctctgtggaagactttccttggactggaagtggcctttcattcgcatgttctctgagatttccttggagaagagagaacaaattttcgggaactggaccactgtaaagaggtgggtagccttactgctaatgtttgtgctcatccaactgctttgcttatataatttcttctcaaggactgatgcagacgggcaaaatcccacat

SEQ ID NO: 10415 - DNA, 478 bp, Glycine max
  Clone ID: jC-gmle01810046h03d1
ttttttttttttttttttttttttttttttttttttttttttttttttttttttttttttttttttgggggccccaaaagttcattatttatccctaaaaatttaacaggggattttcccttggggtggtgggagggcccattctaaccatacaataaaaactggcgtgatattggaaacattaagctcaacccgggggggggggatccatttttttttatagaactcaaaaaccccgggttaaaaacctttttttacaaaggcctcccttgcatacaaaaacaaaggtccctgggaaatcattaactccccctaacaataccggtttagccggggcaaaatggtgtattttaaccaaacttaagagatgaagcccctgtccctttttttttttttttttgaaacttaaattggaacacaaccacctaactttttgttgatgctttgcccagggaatttggaatctttctggccatac

SEQ ID NO: 10416 - DNA, 399 bp, Glycine max
  Clone ID: jC-gmle01810046h04a1
gctctctcagacttctacaatacctctgcttctcagctcccttttcctgatgaggctgcagagctgttgtacaagaggactgtgccagaagcggtgtcgatggtgagttgggttctgtggatactgtctttcagattggggacactgttgctctgtggaagactttccttggactggaagtggtctttcattcgcaagttctctgagatttccttggagaagagagaacaaattttcaggaactggaccagggaaaagagttgggtagccttacgggtagtgtttgtgctcatcaaactcttttgcttctatattttcttctcaaggactgatgcaaattgacaaaatcccacaatgaaagcaattggataccaagtggacaccaaggagaagttgatc

SEQ ID NO: 10417 - DNA, 368 bp, Glycine max
  Clone ID: jC-gmle01810046h04d1
gggggcactaaaagttcataatttttccataaaaatttaacaagggatttatcctgtggttgttgggagggcccatgctctccatacaaaaaaagctggcctgatattggaaaccttaagctcaacccggcggggaggcatccatttttttttatagaaccaaaaaaccccgggtaaataacatttttttacaaaggcctccattgcatacaataacaaagtttcctggaaatttatttacttccccttacaattccggtttagccggggcaaaatgctgtattttaaccaaacttaagggatgaagcccctgttcctttttttttttttttttgaaacttaaattggaacaatacaacctaactttt

SEQ ID NO: 10418 - DNA, 449 bp, Glycine max
  unsure at all n locations
  Clone ID: jC-gmle01810046h05a1
gtccagggttcagcatcatcgggtagggcgcggagagatgctgcagcaagggctatgcagggttggcactcacaacgtctccttagcaatggtgaatttagtgatcctattattaaggataggaactctttgtctacacaaaagcgtgaaaagcagcttaaaaacatcaatttacttaaacgcaagaaatcatcagacacagttaatgctgtcaaagtggcacacagccaaccatctagaccacaatcggacacatatgtggttgacattggacctcctgctgattgggtaaaagtcaatgtgcaaaaaactaaagattgttttgaggtctatgctttagttcctggccttctgcgggaagaggtgcgtgttcaatcagacccagctggacgcttgtgtataagtggagagcccgagaattttgacaattcatggngggtgacaccttt

SEQ ID NO: 10419 - DNA, 463 bp, Glycine max
  Clone ID: jC-gmle01810046h05d1
acaaccaacgttgcccctttactaaggggggattttaaacaatggttaaaattgtaaagcttttgacagggaaacatcgggggaaaaatttaaataaaaaattttttacctaattcagagttaataaaatcccggctgaatttggtttagggggcaacttttcttttaaccatgggaaaatagttcggcatgaatttatcaaccctttttattttgaggggcctcaaagggaacttgaacaaacaattgtccattccagggcaccacagcccacctctggtgagtatcaattcttgaagggaagctgacaacctttttgaaagggggccccccccatggattggcaaaatttttgggctttccaattatgaccaaacgttcagctgggtctgattgaacacccccctttttccgcagaagggccggaactaaagcatatacctcaaaacaatcttttgttttt

SEQ ID NO: 10420 - DNA, 485 bp, Glycine max
  Clone ID: jC-gmle01810046h06a1
ccggctacatcgactacgaccgcttggaagaaaaagccctagacttcaggccaaaactcataatctgcggtggcagcgcgtaccctcgcgattgggactacaaacgtttcagggaagtcgctgataagtgcggagcattgcttctctgcgacatggcgcacactagcggccttgtggccgcgcaggaagtgaacagccccttcgagtattgcgacattgtgaccaccacgactcacaagagcttgcggggcccacgtgcggggatgatcttttaccggaagggccccaagccgccgaagaaggggcagccggagaacgcggtttatgatttcgaggacaagattaacttcgcggtgttcccttcgctgcagggtgggccccacaaccaccagatcggtgctctcgccgtggcgctgaagcatgccgcgtcgcccgggtttaagcctacgcgaagcatgttaaggcgaacgccgttgcgcttggaa

SEQ ID NO: 10421 - DNA, 493 bp, Glycine max
  Clone ID: jC-gmle01810046h06d1
aaaaaagaaagaaaggcagcacgtattatttcaattgttaaataagaaaaaaaatatgatatcaatcaggctaacaaaattaaacatgaaatcaaagacaaagaaacttcaaacttttgaattgaaacaccatggcgataaaccctatcactcccaggaaaggaagacacatatttcctttttctccatttctgcactttgtgtcgaacttgagtgacacaatttagtagaaagtggtatggttgaacctaatccttgtacttcatttcagataccaggaagccaggcatgtcaaacaaggcagagaacttctcaacatcagctttgagatcttcaatagccttgttgttgacgagacccttgttgaaatccttgagaagtttgccatgctccttctggatctccagtgtgagagtcacagcacgggtgaaggaactcaccaatctgctcaaagtctttttcaaccaaaaccctagaagtcatggcaggggca

SEQ ID NO: 10422 - DNA, 415 bp, Glycine max
  Clone ID: jC-gmle01810046h07a1
ccttccttcaccttcttcgttgcttgcggtgccctagattttctctatcctttcaatcgttcccgaattccctcccgctagggtttcccatggattccgaggacgatatgcacgacgccaacgatgtggagtcccttgacgacgatttctacagtggcgagaccgaggacgctcccatggattactacagtgactacgacgacgaagctgacgattacttcgacgatgctgacgattctgaccgggttgagtctcgccgccctgagcaaaactttacaatattgagggaattggatatccggcaaaggcaggaggatgacatagctagagtagcggcagttctttccataccgcgggtttctgcgagcatcctacttcgtcactacaactggagtgttagtaaggtgcatgatgc

SEQ ID NO: 10423 - DNA, 404 bp, Glycine max
  Clone ID: jC-gmle01810046h07d1
catcatacactccctcttgtttagctgcttcataacgattgcaagcataaaatccaccagtcctttcaccatggtctgaccatgcaccaaggcatagccagcaaaactcaaatttacaaggaggagtacatgtcatatgcatgcacccttggtttttttcaattggtcgcttgcacttgggacatggttttgagttagcaagtatccagttcatgttttcagattcagcactatttttcaaaatccactttgaaacagtgccacagtcaactggacggtgagcctcctctgtgcaattccagcaaaagctatatgaacagaggcaagatacatcataatttccactgccagcatcaaaagtaactgcatattcacaacctggagcaggacaccacttggtcttc

SEQ ID NO: 10424 - DNA, 466 bp, Glycine max
  unsure at all n locations
  Clone ID: jC-gmle01810046h08a1
gaaaaaatgaccaagatcttctttgtatcgctgttatgtctgatcatagcagcttcttctgggtttgtgaattgctttgatgttgaaaagaaggaaaagattgtaatatttgagctcaataaaggtgacctttctttgaaggtcaccaactggggtgcttcaattttgtccctggtgattcctgataagaatggaaagatgagtgatgttgctcttggatatgattctgttaaggattacactaatgatacaacatattttggagcaactgatggccgggttgcttacagaattggaggagctcagtctactctaaatggaatccattacaaattatgtgctaatgagggaaacaatacacttcatggtggagccagaggatntagtgatgttctttggaaagtgcatatgtatcaaaaagaaggttcaagtcccagcattaccttcagttaccacagttttgatg

SEQ ID NO: 10425 - DNA, 477 bp, Glycine max
  Clone ID: jC-gmle01810046h08d1
cctaccacccaaaagagaagggattttattattaaatataattcacatatgtatcaaaaaagaattctgcattagaaatacagaatcaaaatatcaataaaaagcaacaaatccaaaccaaaaacatgtttagagaaacatcttgaaaggttctgaagctgccaccaattatgagactaaccatgggactctaattattcattctaaaaggaccccaagtttggatgaaatccaaagttataaatgctacactgacttaccgtggcacattaaaaatgggggaaagctcactcctcctatctcactttgaactaatgtagggatttttggtggaaaacttaaaaagcatataatgcttgtaaggcttttctggtgtcacaattgttgaagggaaattaggctgattcactgaatcagggaaggcttgagactccaaacatagtcctgaatgagattggtacacatatccaccttttc

SEQ ID NO: 10426 - DNA, 498 bp, Glycine max
  Clone ID: jC-gmle01810046h09a1
tcataacataacattaagatatatattcagcttcttgtcttttccgttacctttttccgctgaaatcactgatccacaacaagaggcactcagagagcatttgttgatttggatttggaaggttccacttttgatattggaagcaacttagctcccttcctctctctttattttccacattgtacaaatgaattttcagggtacttgttggtagtggtggttgacaaagatattgaagatgggaattttgagcactatagcaagcttttttggatttggaatgggaacttcaattgggctagtcattggatactatttgttcatatacttccagccaacagatgttaaagatccaggtattcaacctttgattgagcaagatgctaaaacattacaactgttgctttcagagatacccacttggattaacaacccagactatgatcgtcttgactggcttaataaatttagcgagtatatgtggccttatctggacag

SEQ ID NO: 10427 - DNA, 102 bp, Glycine max
  Clone ID: jC-gmle01810046h09d1
aggggttagaaccccttttttgggggggcttgctttaaaaaaacattcgtgcccaccggatttttttttttttccacattgtggggaatcccgttgttgggg

SEQ ID NO: 10428 - DNA, 494 bp, Glycine max
  Clone ID: jC-gmle01810046h10a1
tatgcatctaagtttggagttgatgaaggaaaaatgatggaaaggctctggggtgaaaacttctttgatccagccacaaagaaatggtccagcaagaatactggttctgctacctgcaagcgtgggtttggttccaggtctgttacgagcccatcaagcagattattaacacttgtatgaatgatcagaaggataagctgtggcctatgctgcaaaagcttggggtcaccatgaaatctgaggagaaggacctaatgggcaaagcattgatgaagcgtgtcatgcaaacctggcttccagcaagtagtgcattactggaaatgatgatatttcatctaccctctccatcaacagcccaaaagtatcgtgtggagaatttgatgaaggtccccttgatgatcaatatgcttcggctatcagaaactgtgatcctgagggtcctctgatgctctatgtctcaaagatgattccagcatctgacaggggcagatttt

SEQ ID NO: 10429 - DNA, 586 bp, Glycine max
  Clone ID: jC-gmle01810046h11a1
ctctgtcaattaatcaaaagaatgaactaaaggatactataattactgataatgtcaaattagaacaagatattgttaagccggagatggtggaagaaccatcatccagaaatgatgttcctgttttcttatgatgaatcacattcaatggatgttggagggctgcatgagaaaaaggcatctgttgaagaaaatatcaataatgtttcaagtccagacttgaacaagaccaatagcagtgatgatgtagggtattcagaaaagttgaacttggacagaagttctggtgatgattctatggaagaggatttgcctgagactaagcaaattgattctaagtttaatgttgatgaacttaaagacaaagtagagattgaaaagcctattgtgaaggaggaaagtagtactatagctgttggagatagtctatctgcaggaaaagatgatacccaccaagatattgacattagtcctgctgccctgactgagaaacggaaatttaatgaagttgggaacagtgagcctgccaaaggcaacgcaggtggaacactgaaacagttaaaggtccagatgcacaaagcactac

SEQ ID NO: 10430 - DNA, 538 bp, Glycine max
  unsure at all n locations
  Clone ID: jC-gmle01810046h11d1
ctccgaagtcattatctcantccccnaatnncnnnnnnnnncnnnnnnnnnnnnnnnnnnnnnnnnnnnnnnnnnnnnnnnnnnnnngnnggnnnnnnnnnnnnnnnnnnnnnnnnnnnnnnnnnnnnnnnnnnnnnnnnnnnnnnnnttnnnnnnnnnnnnnnnnnnnnnnnnnnnnnnnnnnnnnnnnnngggngnnnggggggggnnnnnnnnnnnnnnnnnnnnnnnnnnnnnnnnnnnnnnnnnnnnnnnnnnngggggggaaatttttccaaccccccaacctcttatttcaccacttctaaaactaaataaatttaattctcaaaatacattaccaattacaatttcttccccaaacaaaacaccccccaatcttccaacaaaacccattcaaaataatcccatacccctaataaaaatatcccaatcatttaaaggccttcaaggaaaaatttgcaagctaatggcctatctactccctcccccttttaccctttgttaaaaatttttccgcaactttctcttcaaacaa

SEQ ID NO: 10431 - DNA, 405 bp, Glycine max
  Clone ID: jC-gmle01810046h12a1
cacaattgaaattataaacacgactgttatatactaaacacttcacttatccaatttgggtagggtaacaatttaattgtattgagcgaatgggatcagaaagatggaccgctaactcccatttatgagttataatagaatccaccgaccaacttgctttgtcatccgacacaatcttttgattgcaaagatgttccagatacaatccaaactctatttttataagcgaatcaatcctactacttgtgcccctgaggtctctgcgcttgaaaaaaaaaaactgcgacggctcccccaaataatcggtccggccctagatggaccttttcccccagggaaaacgcctaatattgacaacgctatgatagtaaaggggagcgatactgttggctaacaaaataatgg

SEQ ID NO: 10432 - DNA, 476 bp, Glycine max
  Clone ID: jC-gmle01810047a01a1
gaagcatctaagtgagatacacagttgttaggtagcaagcataagtgtctaaccttagaaacatatctgctacatatcgtgtgcattttggaattgtgccactaaaattctattcatctatggctgcctcatcttatgctatgcaatcaatccttgcaaaccctatgatccgcatttccagcgggtctagggagaaccattttggtgttcctgcttatcacatgagaaggaatgttggcctgagagttaggtccatggctgaggaagagcaaccaagtcagcctgcgaccccagttacaccaccaccagcagaacccaaaccacaggcagtctctactccttcaccaaaggtgagcaccaagttttctgatgtgttggcgttcagtgggccagcacctgagaggatcaatggaaggttggccatgattgggtttgtgggtgcaatggcagtggaagtagccaaagggcaaggtgtg

SEQ ID NO: 10433 - DNA, 619 bp, Glycine max
  unsure at all n locations
  Clone ID: jC-gmle01810047a01d1
tgcgggtgtatgnatttaattccacacttcnggnanncccccntnnnnnnnattttnnnnnaannnacnnnnnnnnnnnnnnnnnnnnnannnnnnnannnnnannnnnanannantttnaantttttanaaaaaannaaaaanannanggggaagggggatatataattaattttttttttattaatatataattttttatntagttcaaaaagagattggtctttctaaccacgaatgacttaagaccattttggtgtgcattcatgactgaattacaccaaggtaccacccttaacatactcagtaaaagccatagcaaccaaacccaacatagcaaatctcccattccacagttctgcatctgaggacatgaaccctttggacttagactccacgctgatcccttggaagagtggaatcaatgaagcaagggtaaggaccacacttgttcccaagaaccatgggataccaccattggatatttgttcaaacacaccttgccctttggctacttccactgccattgcacccacaaacccaatcatggccaaccttccattgatcctctcaggtgctggcccactgaacgccaacacatcagaaaacttggttctca

SEQ ID NO: 10434 - DNA, 498 bp, Glycine max
  Clone ID: jC-gmle01810047a02a1
cacaagactaattcattcaccaaaaagttcttcgcccctagtttgtgcccattctttgtgtgtaagatacttggaccatacgatcctctttctgtgactatcaaacatacatggctttcttgtcgtctaacacaaaaacagagccctaataaccaagaggaggatgagaaaccaataccacacgatcaaaacgtgctgccaaagcacgatgcgtactcacgacaggaaccacgatggcatcatatacccgcgggagactttgcaaggatttcgagcaagagggagtgggtactaattatcgcccgctgctgctatttacatcaatggaggactcagtcagaaaacccgcccgggaaagtttgctttaatactgctaccaatcgaagttcaaaacatccatacaaccacgcatggcagtgactctggtgtttacgatagtgaacgcaggggtgttctttcccaagttgaagaaatactcagccagcttgcttgaacaca

SEQ ID NO: 10435 - DNA, 487 bp, Glycine max
  Clone ID: jC-gmle01810047a03a1
tgctcgagaaccttagaaagttccgttaggaatgccggtcggcgttcgcggcggcgcgaatcagtttaaccatcctcataaacagccacaaccggttccgttgaagaaacaaaaagattcagttccggcgccgcggtcctccggtggagtccgattcggaggagcgagacgcgtcgtcgccggcgtcgagcgacagttttccgccggagagtttcgagaggaagaggccgcggttgatgagttcaaacaccacgaaaggaagcggataaagactgaaggcgaatggttggggaagcgcggtgagggaactgacgcatgcgattctgaaattcggcgacgcgtatgaacaagcggagagttcgaagctgcagcaagtggtggagatggagaagcaaatgatgaaaattccaaggatttggagttgcacaagatgcagttttttatgaagacccacggatggatttcgcgcttaaacttggaagaaaag

SEQ ID NO: 10436 - DNA, 259 bp, Glycine max
  Clone ID: jC-gmle01810047a03d1
tttattataaacaactaaacttattccccacaaagctaatgcaattcgaatctaccttaacctaggtatccctccctggggcattaactgccactattattggtatgattgctggtgttattggagggggggccatgggggttgttgcttgggttaccaccttttcttccaagtttgagctgcgaaatctctacctgggttttgatgaaaaactgcattctttggaactccaaatcctttgcgaatttaatcctttggt

SEQ ID NO: 10437 - DNA, 404 bp, Glycine max
  Clone ID: jC-gmle01810047a04a1
cactaacacaaacctcttccctcttctttttctatccaaatgctccggcagccatggcaggttcttcagcaacagcttcctccaaactcatactattcccccatgcatcatcatcctctttccttaattacaacagccttccgctcctccaccaccaacacccacaaactaacccctctctcctccttcttcctgcaccccaccaccgtcctccggcgcaccccttctttcaccaccaccccgcgtcgcaccttcaccgtccgcgccgcccgcggcaaattcgagcgcaagaagccccacgtgaacatcggcaccatcggacacgtcgaccacggcaagaccacccttaccgccgccctgaccatggctcttgccgccctaggcaacagcgccctcaaaaaata

SEQ ID NO: 10438 - DNA, 475 bp, Glycine max
  Clone ID: jC-gmle01810047a05a1
tctctctagggtttgatcagactcaagggtttaagccatgggaaaaaggaaggcaaaggcaaagcctcctccaaagaagcgaatggataagctcgataccgtcttcagctgccctttctgcaatcatgggagcagcgtcgaatgccgccttgacatgaagaacttgataggggaagctatttgcgggatatgccaagagagctttagcactaccatcacagctttatcagagccaatagacatatacagtgagtggattgatgaatgtgaactggtaaaccacccggacgatgatggtgctgagcactgatgctcagattcctgttcttgtggttgtgaacggattaactggccaattttatatcttcaacctgtaactatgtcggttcctgatgtgagtgagcactggtgcaactataagatgcatgttatagcttagttatgtaatagcatgtgcaagaacatgagaataatt

SEQ ID NO: 10439 - DNA, 485 bp, Glycine max
  unsure at all n locations
  Clone ID: jC-gmle01810047a05d1
caaaacgtaatcggaatccgaatnccnaaannccnnnttnnnnntttnnnnncnnnnnnnncnnnnnnnnnnnnnnnnnnnnnnnnnnnnnnnnnnnnnnnnnnnnnnnnnttttnttttttttttnnnntnnnnnntntttttttgtttttggtggtttttntnttttntttttttnttttttttttttttttttttttttttttttttttttcttttgtgaaaaaaaacacactctttacaaatgcaaccagcccccacataccaaaacagtataatagtattaaatattacaaactaccttctaatccagggggcttcatctaaataggacaattattctcatgttcttgcacatgctattacaaaactaagctattacatgcatcttataattgcaccagtgctcactcacatcaggaacccacataattacaggttgaaaaaataaaaatggccaattaatccgttcacaaccacaaaaa

SEQ ID NO: 10440 - DNA, 425 bp, Glycine max
  Clone ID: jC-gmle01810047a06a1
cagcatcgtcctctcttgagtccccatatcaaatacccaccgtattcaacccggcatgtgacaaatctgctcccatcccatttttcagcaccaaagtttgaaacttttctcaattgggttgtggagaagttgactcaaattattatttttctagcgaaggatgcgctattagaagtgcgaaaattaaatgtccaacatcttcttggtgatggttgagattcatgtatccgattctcagggaaatctttttgtccgggtgtgtgatcaattccactgttaggcgcaggacccatttagttcaatgcttctgagatgcttaactctattggttgtgctaggtttcatgatttttaaacctgccttaggctaataatcatctactactagctattatgattattatgattattatcatccacgtcata

SEQ ID NO: 10441 - DNA, 617 bp, Glycine max
  unsure at all n locations
  Clone ID: jC-gmle01810047a06d1
cgaaaatgcatcccgatacnccaatnncgaaaannncnnnnntnnnnnnnntnttnnnnnnnnnnnnnncccnnnnnnngngnnnnnnnnnnnnnnnnnnnnnnnnnnnnnnnnnnnnnnnnnnnnnnnnnnnntttntntnttntttttttntnttnnttnnttnnttttttttttttttttgggttttggggtgtgtntattataataataatttatattttataataatatttattatttatttttaatattcaatattttttacgatacacattcattattattattccttatcaccatatggtagtgattacaatttctcaacatactcaaacctagaagaagaagaagaaatcctcatcaaatctcacactcagagaccatggatctcaatactgcaatatatccccagaagccataatagggtggttcagataccccatattcaacgggttgaagaagctattattattaattggctcaactaaggtgctcgatgttgctgctgctccaaaacccgccacagtggtggcattcaacacgtcaacgatctcattcagagactctaacctgtgactaaactcacccacctgagccctaagcacctagttctc

SEQ ID NO: 10442 - DNA, 125 bp, Glycine max
  Clone ID: jC-gmle01810047a07a1
gattgttattgtccagactattgagacattggtaatacttgcatatgctctcgcatgacagcggatcggtgtgtacatcacttctgacgcaccatatgaggagggactctcggatgtacttgctg

SEQ ID NO: 10443 - DNA, 353 bp, Glycine max
  Clone ID: jC-gmle01810047a07d1
ttcgttcttttttttaatagtttgagctccaaatattctggatcataatggagaactgtttactggcccgctaacgatttttatcctagcttttgtgcttaattttaacgcgaactgataatggtttaaaaagaggtactccttcaggaacacatgtatgcggttgaaaaaagatgaaggtttgcatatggatggctcctcatcaaaatagattttttattctggataacaactgtatgatgacgggtctgctggctgcagctgggagtctactaaaatccaaggaggaccgaacttgagcacgttgaccaatttaccgctttcgctcaaatgctttataataacaatgctgg

SEQ ID NO: 10444 - DNA, 525 bp, Glycine max
  Clone ID: jC-gmle01810047a08a1
gaaggttattgaccagactattgatacaagggtaaaacttgcatatgctctcgcaagacagtggtttggtgtgtacatcactcctgaggcaccaaatgatgagtggctcttggatggacttgctggtttcttgacagatttttttattaagaaacatttgggaaattatgaggcacggacaggagatacaaggcaaattgtgctgtttgcaaagttgataatggtggagcgacagctttgagctgttcagcttcctgtaaagatttatatggaactcagtgcattggtttgtatggaaaaataagatcatggaagtctgaggcagctcttcagatgttggaaaaacaaatgggtcctgaatcttttcgtagaattttgcaaactatagtttctcgtgctcaagataaaactcgttccataaagactcttagtactaaggagtttcgacattttgctaacaaggttgggaatctttgacgcccatttcttaaagatttctttcctcggtgggttggttcttgtgga

SEQ ID NO: 10445 - DNA, 513 bp, Glycine max
  Clone ID: jC-gmle01810047a08d1
gcgctccaaatactctggatcatcatggtgtcctttattactttcccgtttccgtttcttttccttgcttttgtgcttttctttcccccgagcagaaatttctttacctaatggttctccgtcaggatcaaatcttgcaactgaaagagtttgaaggctggcatatcgtcgtgcatcagcatctatattgttatcctggataatactggatgatgatggatcttctggctgaggttgtgaataaactatacttgaatcagcagtgcactggagttctttgaccaattcatcaccatcactcaaaaactttgcactaccaatgctggcagtcatgcgtgaaccgcgatcatgccaagaattaacttcatcaatattgggattactgatgctaacagtctcagcaaaattcctctggggtgcatctacagaaactgaactgctagctccatgatccatttcattacgaccacctaaagaacgttcaaccacctgattatcagtatcagccctact

SEQ ID NO: 10446 - DNA, 449 bp, Glycine max
  Clone ID: jC-gmle01810047a09a1
tccacctgctgccttctaagaggcaattgatcttcactgttagggccatgcaatcagaaaagacaacctatcaagtgattcaaccaatcaacggcgatcccttcattggaagcctggaaacctcagttacatacagtcccttgattgcatggaacttatcgagccttcccggatacaggaccgcagcgagccgattactaagagggatcgaagtgggcctggctcatgggtaccttctggtgggcccattcatgaaggccggacctctgaggaacaccgagatcgcctggcaagcaggctttgtcgccgttggagggctcgtggtgatctctaccctttgcctcacgatctatgggatttcatcttttaacgaatgagaccgatgcactgccatcgcactgaccttgactgtccggacgaaggatcccgatcagctgcaaactgctgat

SEQ ID NO: 10447 - DNA, 389 bp, Glycine max
  Clone ID: jC-gmle01810047a09d1
aattgacaagaaccatcttttaaaagaaggcccaaacaggagagagagaatttaacattgaaacgtgtttggagtcatacaaaacactatttgccaccatttttatagcgcaaataaggagccattttcacccagtgtcctttcatcgggagtgaataaccacaaaaagtgaacaaggattataagccctttattcacttgatgtactaaggaaggttcaaaacgtataggcggaggttggcccaaaaaacacccgtaatgccttccaaaaaaaagccttcggtgaacttggcccgcccatcaacatatgggagctgatcgggcttatttttgccggcccctaaggtaactgacagggcaatgcttggctcttcttctatgaaagatga

SEQ ID NO: 10448 - DNA, 460 bp, Glycine max
  Clone ID: jC-gmle01810047a10a1
caactacaaaggttgctgtaggagataagatattgaagtagtgctaagtgcctaacacctgcagtgaacaatggcctctgcatcagcatctcttctcaagtcttcacttgttcttgacaagtctgagtgggtgaagggacaaacacttcgccaaccttctgctgcatcagttgtgagatgcaaccccaccaccccatcaggcctcaccatcagagctggatcctatgctgatgagctcgttaagaccgcgaaaacagtggcttcaccagggaggggtattttggccatggatgagtccaatgctacctgtgggaagcgttcggcttcaattgggctagagaacactgaagctaaccgacaggcataccgtaccctccttgtgacagttccaggacttggtcagtacatctctggtgccattctctttgaggaaactctctaccaatccacaactgatggc

SEQ ID NO: 10449 - DNA, 546 bp, Glycine max
  Clone ID: jC-gmle01810047a10d1
gattgccgagattcaaccatgtttgttatatattgagacataatcaatcaagtacaccactcacagcagaaggtttataagctgtaaaggtacatgtaaccataaacaaaaatagtctccaagactataaaaacattacattttagacaaattagtcttcttccacttcatcctccgtcaacacctactataactgctggtgttgctgctgcctaacatgtatcatattcactacatacatcttagtaggagtagcctttgacgaacaactccttcttggcttcctcggattcaccctcaccggtgtacttcccaagctgggcgagcgagttggacttggcacggaaaaggagtgcatcttgtgccgccttcacgttctctgggcggcctccccatgtcttcaaggcagtgttttggagggctctggcatacgagaacgacacgtgccacgggtttggagattggttcatggcattcaagttgagggtagcttcaacctcagactgtccaccagacaaaaacataattccagggacagcaggggga

SEQ ID NO: 10450 - DNA, 400 bp, Glycine max
  Clone ID: jC-gmle01810047a11a1
gcagaaacgacaaaggagtttgtggcaaagctgggactaaagcctggtcagaaagttctggatgttggttgtggtgttgggggaggtgatttctacatggctgagaattttgatgttgaggttattggcattgacctctccataaacatgatttctcttgctattgaacgtgctattggactgaactacgctgttgaatttgattgtgcggattgctatagaaaaacatatcctgagaatacatttgatgtaatatacactcgggacaccatgctgcacgtcaaagtaaggaactatgtttttttttttttttttttttcttgattaaattgttagttttagtagtcgcatgctttatagtattgataggattgtaggtgtatgcctctgaaagtatata

SEQ ID NO: 10451 - DNA, 358 bp, Glycine max
  unsure at all n locations
  Clone ID: jC-gmle01810047a11d1
atgtgttatatttcttatttgtattttgatttgaggggaaaactaatttcaaacaaaattacaagtaacttaatctaaaaacttgatcatgaanaaaagaaaaacaaaaactgcaaaaaaacttcttttaaaaaaaaaaaaaaaaacacgcacgacaaaaaaaaagctagaaaaaaaaaaacgggctctttaagacaacacaaaggagaaggcatgactaataacccccccccggcaaaaaaacaaacacagagaaacggaaggccgagtcaaaaacggaggctctaattcatggggaaaaaaaagccccgccccttagagatccaaaaccaccccgggaaggcaagccgctgccaaa

SEQ ID NO: 10452 - DNA, 369 bp, Glycine max
  Clone ID: jC-gmle01810047a12a1
ctgaggcctgtgcggtgctctgagaggaggggccatagtttgggaccctttgaaccctaatctccacccaaacccattttcccgggaagttccctctgaaacgaagacgaaaatgcagaatcacaggctgaagcagcagcaacaagctctgatgcagcaagctcttctccaacaacagtctctctaccaccctggtctccttgctcctactcagattgaaccaattccaagtggaaatctggctcctggttttgatccaagtacttgccgaagtgtgtatgtcgggaacatccatacgcaggtaactgaaccgctattgcaagaagttttttgcggtactggccccaatgaagcttgatagcttatcag

SEQ ID NO: 10453 - DNA, 513 bp, Glycine max
  Clone ID: jC-gmle01810047a12d1
gatgacaaccatggcatggtaacacccgaataggtgatgagaagataaatgtctgaacagacaatcccctcttaaaatcataaacactcactactaagtagaaaaccgcataatacatgatacaaacccatacaaatgtttgctcatatatggtaggtgtaactaccacaccaccatcgagtaaaaaagtaaaaagaaagggctccctagagtttaacacgaatcaatgtgcacaaggcaggatatatagatgacattaaaccaccgcatcaagagaccgcagtgtgttattggtagtacatcatttgctgtgcagctgcaacattctggaacccaccatcatatattgcctggctagctccaatagctgcttgtttaagaggatgttgcccttggggatgcatcaaagcatggacgccgcccatcttgctcattgctagctgacgctcatacaccaaaagatcagttgcagagaggccaggcaaagatgcagcaacaggtggcggaagggga

SEQ ID NO: 10454 - DNA, 582 bp, Glycine max
  unsure at all n locations
  Clone ID: jC-gmle01810047b01a1
gtcggtgatattggaaagggagaagtctttgttcctgagagtgttgtgcagtttggtgcccgagaggcggggcgagatggtgtccaaactttgaaagctgaggatcacaggataaaatatgatggggtacaccatgggtctagctatctggaacaccttaacttcttgtctgcaatcagagcaaaaggagaaaaggctcctagtgtagatctccaagatggattaatatctgttgctatgggagttgcagcacagctctctatagaatatggtcgatttgtttctattcaggaagttatgaatgagtgcaaaatttgagtgttgcaacttggaagtgagagtaatggttgactctgctgctatgtgttctttgacaaagggatgctgtattgttgctatcactgcctcaagaaaaagtgcaaaatgatttgtgaaatttacatttctttcacctaaactttaatcaattgggaactttagctcctatgttttctgcaacttattttctgtaaactgaaacaagtggaatgttaggaataagagctgaaaattttagcccnngngccaaagatttgatggtct

SEQ ID NO: 10455 - DNA, 497 bp, Glycine max
  unsure at all n locations
  Clone ID: jC-gmle01810047b01d1
ctccaacttaatccgattncgcnatnccnnannnncnnntttnnnnnntnnnnncccnnngngggnnnnntnnntnnnnntgnnnnnnnnnnnnnnnnnnnnnnnttttttntntttttntttttntntttttttttttggggttgtgtttttttttttttctttttttttttttttttttttttttttttttttgtnggggtgntttttgttttaaacaaaaaaacttttccatcctccaaaaacttctacttacaaaaaaaaaagacttatatcacccaatccaacaagatcaactacaaaaaaaatttaactttccaaaacctacccactcttttttagacctcaaaaacattaatattagctttcttttcctaaaaaacacttacttgtttaaccacaataaaccttacctttaaactttccaaacaaaaataatgaactgcacataacccccaaaaaaaaaaaaaataaagccttttttaaaaaaagcgtcc

SEQ ID NO: 10456 - DNA, 352 bp, Glycine max
  Clone ID: jC-gmle01810047b02a1
atccacacactccattttcgattcctttccatttctccgttccccttggaacgttttgtctctgtgtgtctcgatagggcaaaaaccatgaacatcttcaggctcgccggagatatgacccatctttttaagaattctcgtcctcctcctcaaaatctacgccaccaaatcatgctcagggatttctcgcaagactcaagagctctacgcgattgtgttcgtggcacgctatttggatctgttcacggacttcatctccgtttacaacaccttcatgaaggtggtgttcattgccagctccttagccattgtttggtgcatgcgttttcaccccatggtcaggaagaagtta

SEQ ID NO: 10457 - DNA, 419 bp, Glycine max
  Clone ID: jC-gmle01810047b03a1
cccaatgttagattcccgtgtcagagatctcttggactttagcatcgacctagacattagcagtgagggcaaattcacttggaaaattcagagagacatggcagagcgtgcacacacttttgaaaactttcatgctagcattgaagcaaggaagcctgattttgaagcatatattgatccacaaaagcaatacgcagatgcagcgatagaagtgttgcccacgcaactcattccagatgacaacgagggtaagattttgagagtgagattgacacagaaagagggggttaagtactttaacccggctcacttgcttgatgatggctctaccattttatggataccatgtggaagaaagctaacatgcttcctccctggcatcaaatcttttattgacctgcgacttactacggaaatga

SEQ ID NO: 10458 - DNA, 635 bp, Glycine max
  unsure at all n locations
  Clone ID: jC-gmle01810047b03d1
ctgaaaagtggcatcgngaagtccnccattnncganannnnccnnnnnnnnnnnnnnttnnnnnnnnnnnnnnnnncnnnnnnnnnnnnnnnnnnnnnnnnnnnnnnnnnnnnnnnnnnnnnnnnnnnnnnttttnnnnntttttntnnntntnnnntntttttttnttttntgtgttgggggntntttttntnttntnttgtnttnnttttttntttttttttttttttttttttttttttntttttttntttgtcaaaatcacatgaaataaagtggaattgtggaaaacatcaaagaagaaagaaaatgatgattttgatcatgagagaactcaatttggctgcgatgctccatcgatatatgtatatatattatggcaggttcaattcctaagcttttgcagctactggagtctcagccttgctggctattaactgctcatatagatctcttatcttcaaaccaactattgttagcaagagacctgttccattgctgctgccccgaaaatcagcatgcttcaacatctgttgagtaacctctccatagaactttgaagagacgttgcttaggtggctctcaacgtatattagttcatctagtctgtcaaattgtccatccatttctacaac

SEQ ID NO: 10459 - DNA, 436 bp, Glycine max
  Clone ID: jC-gmle01810047b04a1
gttggggaaaggacgtctgaggactttgaaagcatgcttgctgcaggtgatgcagtgtgggatcccaacagaacagttattcatatagatcccaacaacaaagacgagatggaattttggggaggaaataacagtaatggtgctctcatggcaaagaataactttgcagtcaacaaggctgtagctcttgtatgccaaaacttcacttgtagcccctctgtgactgaccattcgtcacttaaagctttgctcttcaaaaaaaccttgctcttagttcacgtaagctattgtgtctgatgaagtggaaaatagtcaacgtcggcgagagcttcctcttagagatgccgctctcaatctacagaactagttgggtctgacttctctgtcagaataaagaaaggcggcattctctgctgacttgaggaattgatgcatg

SEQ ID NO: 10460 - DNA, 484 bp, Glycine max
  Clone ID: jC-gmle01810047b05a1
cagcatcgtcctctcttgagtccccatatcaaatacccaccgaattcaaccccgcatataggcaaatctcctcccatcccatttttcagcaccaaaggttgaaacttttctcaattggggttgaggagaggtttgactcatatttttatttttctaacgaagcagtggctattagaagtgcaaaaattaaatgtccaacatcttcttgttgatgtttgagattcatgtatccgattctcagagaaatcttcttttccgggtgtatgatcaattccactgttaggcgcaggacccatttagttcaatccttctcagatgctttcctctattggttgagctacgttgcatgatttctaaaccttccttagtctaataatgatctactgctaggtattattatgattattattattatcatcatcatcctatataatgaaatctatctgcaatattatttttgtgagtttgtgtctagttagtgact

SEQ ID NO: 10461 - DNA, 555 bp, Glycine max
  unsure at all n locations
  Clone ID: jC-gmle01810047b05d1
tgaaatgactccgatcccattncnnnnncnnnnttnnnnnnnnnnnnnnnnnnnnnnnnnnnnnnnnnnnnnnnnnnnnnnnnnnnnnnnnnnnnnnnnnnnnnnnttttnnnnnttttnntnnnnnnnnnntttnttnntnntttntggttttgggtttttttttnnttttttttttgttttttnttttttngttttttttttttttttttcgttttacgatacacattcattattattattccttatcaccatatggtactgattacaatttctcaacacactcaaacctacaagaataagaagaaatcctcatcaaatctcagactcacagaccatgcatctcaatactgcaatatatccgcaaaaaccataatatggtggttcagataccccatattcaacgggttgaagaagctattattattaattggctcaaccaaggtgctcgatcatgctgctgctacaaaacccgacacagtggtgccattcaacacgtcaacgatctcattcagagactctaacctgtgactaagctcacccacctgaacccta

SEQ ID NO: 10462 - DNA, 465 bp, Glycine max
  Clone ID: jC-gmle01810047b06a1
gtccaacccaaccctcaagatgagtgtctcctccccattcatgaacaccacctgaaaagcctataccatgtctgaagtcagaaggcacaacaacgccgattcggcttggatcatagtccacggtcatgtctatgattgcacccgcttcctcaaagaccatcccggtggcacagacagcatcctcatcaacgccggcaccgactgcaccgaggagttcgaagccatccactccgacaaagccaagcaaatgcttgaagactaccgaatcggcgagctcaccaccacctgctacaactctgattcttcatcgtcaaacccctccgtgcatggcagctccgacaccatccctttgacccccatcaaggaagtgattacaccaatgcgaagcgtggctcttaacccacgcgagaaaattccatgcaagctcatctccaaaacctccatctctcacgacgttaggctttt

SEQ ID NO: 10463 - DNA, 539 bp, Glycine max
  unsure at all n locations
  Clone ID: jC-gmle01810047b06d1
caaaaaaaaaacttaangctgcatgcccgcaatgccgccattnccnnanannncnnnttnnnnnnnnnnnnnnccnnnnnnnnnnnnngnngnnnnnnnnnnnnnnnnnnnnnnnntnnnnnnnnnnnnnnnnnntttnnnnnnttnnnnnnnnnnnnnnnnnnnnnnnnnngggggggggggnggnnnnnnnnnnnnnnnnnnnnnnnnntntntnnttnttttntttttttttttggttgtttttgcccaacttctccaaattctgctggactgcaaattgaatcataggtggtggtccacaagtcaatgccaaggtatcacgagatgcatttggaatattctccgtcaggatactttcagtgatgaatcccacactgtattcccacccttctcttatgctttcttgtatcacgtaccacaccttcaacctatcatacttcttagcccactcatcaagctcttccttcagcaatatatcatcctcggttcggttcgcgtaaaccacatgcatctcggtgcagtcctctggatccttt

SEQ ID NO: 10464 - DNA, 603 bp, Glycine max
  unsure at all n locations
  Clone ID: jC-gmle01810047b07a1
cggctcgagcggctcgagcagcccttgaccgtctagcatctctgcatattgattacccaatgttgtttgaactccgtaatgatgctgccgagcgggtttctcattgtggggttctggagttcattgctgaagaaggcatgatatacatgccatactggatgattgagaacatgcttttacaagagggggacattgataaagtgaaaaatgtgacacttccaaaggggacatatgttaagttacagtctcacacaaaagacttcttggatatttccaatccaaaagctatcttagaaacaacattgaggaatttttcctgcttgactactggagatagcatcatggtggcttacaacaacaagaaatattacatagatattatagaaactaagcctgacaatgccataagcataattgagactgactgtgaggtggactttgctcctaccttggattacaaggaacctgaataacccattgcacccctttctgcctgaaggcagcagtggctgctgangagacccctgctgaagaggagcccaagtcaacccattttctggaaactggagacgcttggatggaaaccattaattatcagcctct

SEQ ID NO: 10465 - DNA, 526 bp, Glycine max
  Clone ID: jC-gmle01810047b07d1
cacgattgcaaacctcgtcaagagcttcattcacaagtaatcaaaggtatttgctgtggcgtctactggtctatctactgcatataatacaataaaaaaaatacacgtttttgcaatagacatcgatccatgcatagatcaacaaagtaacttactttaaaagtaaaaggacattttaatttacttgattggtataaattaaccccgtaaagaatacttcttccctgaaaaaggttgaaatttcggctcttctttctctttagggggctctggtttcgactctttcgcctttcctgtctcattagtacggtttgcatttgacccaaacacaagcttgccctgagattgacgagcattactttgtgaactagaagctgtagaagacagcgaattgacaacatcagatttctggtccttggaccctgaagaagaaactggaggaggctgataatttaatggttttccatccaagcgtctcccagttccagaaaatgggatgaacttgggctcctcttcaacaggggtc

SEQ ID NO: 10466 - DNA, 375 bp, Glycine max
  Clone ID: jC-gmle01810047b08a1
ctcctttggttgattgcccttatgctagctgacaatgctcgcgaggacttctttgaagaagaaggataagatggtgacaagggtgaatttggcacagcctactctgatgcttattatgatgctgattcaggaccgaaggctagttcctgaagtatgctccaggtagaaattagtgtagacctggtatatctgaagctccctttgaatcacgctgaacaattccgtgcaatagtgaatgtacatatatttaaaacggttgctctcggtgaacatttattgtgcttaagcactactgcagaaaacaacatagttgtttgtaaaaaaaagaaaaaattgggagatcttattgtcggatattcgggtttatataacaca

SEQ ID NO: 10467 - DNA, 405 bp, Glycine max
  Clone ID: jC-gmle01810047b08d1
gccttcgtccttttttttttttttttgtcgttcaaaattcttttatttttattgttttaacaaacaaaactgcctttttttggaaaagggtttaacccaaataaaagtggagacccaacacaccatctaaacaaactcgcatacaaaagatcactggagggatacacagtgagaaatggattcttcggtaaaaccaggggccaaaatttttttttacgggaccaaaagttgggccctggtccacgggagcttttccctttcgccttcaaaattttgtggggttggtcgcaccccaacccatgaaacattttcttcgtcgagactgagcaatcccttcagacgattagagagagctcttaacggccgctcctcctagggtgactctcacttgcttgagattaacgc

SEQ ID NO: 10468 - DNA, 566 bp, Glycine max
  Clone ID: jC-gmle01810047b09a1
caggattctagagaggcacacaagagcttaatcttgttctttctattctcatgaatagctagtatttatatcaatgataaatgtttctttgggttaagtggttactacctcttcatggtaattgtcatctttgctctgtgttgatgttttatgattttgggaatattgtgcatggtacactatatgccttggatgacagacttgattggtgcagttcccaagtttactatacccctttaattcctgattatttaactatactttaagggattgatgagtctgtactgctgttgcagtattatttcgacacgttgtatcctcgcatccctgttcctgtattgcggcaggttgtgtctaatcttgaaaagttgaagctccccactacacattctggttcaacaggtgaaactactcgtcacggttctgatgatactgcccgaagaccaccttctgttaaagctgccctttctgactcatttggtcaacgggctgcacatcgggctttcacaagggattctttacctattcgacgtacattaccttatcatgaaaaagatggcagtgat

SEQ ID NO: 10469 - DNA, 344 bp, Glycine max
  Clone ID: jC-gmle01810047b09d1
aaaaaaaccggccgcccgggggggggcctctggacaaaaaccgccccacccccacccgagatctccggccccccggaaaaaagcttccccccctttcccctgaagggggggggggggcctcccccaaaacaaaaattggggaacagggggggccgcccccattttttctcccgggaaacccccccaccccgcggacgcccgggtccccggaaaagcttaaaacctcccaggggccccccccgggggaaaaaccccttacccccccccctttctttggggggaattttccacggggggccccctcttatgaaccccccaaacccccccccggggtgttagggggg

SEQ ID NO: 10470 - DNA, 518 bp, Glycine max
  Clone ID: jC-gmle01810047b10a1
gaagaaatgaaccttcctcctcaaacaaagcaatgatctcagacaagaatgtatcgaggaatgctgctgattatatatctagagaaagtcatgaatttcaaaatcctcatgcaaatatggataatataagattgggacttagtgctattgaagatgtcaattttgttgagaaatcttttgagggtggtgaccgatgcaatcctgctgaagactcaccttgctggaagggagcttctgctgctcgcttttctcatttcgaaccttctgcagctctctctcaagaatttgtacacagcaaagaaagtagctttgggtctgtcattaaggagcctcagaattatctgcttgatacagaatacaatatgaaaacatcatgcgtaaattcaaatggctttcaaatgcatactggagttgactatcaggacagaagttcagcaggttgctccaggagattgtcagttacaaagtttgcacctgagtattgcatgtcaggtagtgctgcttatgatggtcctttt

SEQ ID NO: 10471 - DNA, 563 bp, Glycine max
  Clone ID: jC-gmle01810047b10d1
atatacaaacaggataaagactgaaaaagaccaaattctgcaatatgcatgtctgataaagataataaatctaacccataagcatttattcagagtcatatgctcaaaacataaacatttattgaaccatataaccaaactcttaaaaggtttcaaaatcgttctacaagcttttctccacatgttcccagtctgacgcgaagccatcggagtagtaagtaggaggctgaaactcacaggttccgctaggctgagtttcttgattgtcctccgaatccagatgaaactcctttgggattgacttgtccacggcagtgtaggaattgagatgcaccacaacaggatttgcatggacatccaaacttttaccctcagatacatttgttgcaactgttatgccatccattccttcgacagcagcagattcatctccatgtaactgtttcccttctgaagaaatagaacttgaaccttcatcccgggatttaagaatatgaaacctagccagaacagatgtttcatattcagcactgtttttttcaggaataggggaatcttggcat

SEQ ID NO: 10472 - DNA, 587 bp, Glycine max
  Clone ID: jC-gmle01810047b11a1
ctgaggcctgtgcggtgctctgagaggaggggccatagtttgggaccctttgaaccctaatctccacccaaacccattttcccgggaagttccctctgaaacgaagacgaaaatgcagaatcacaggctgaagcagcaggaacaagctctgatgcagcaagctcttctccaacaacagtctctctaccaccctggtctacttgctcctcctcagattgaaccaattccaagtggaaatctgcctcctggttttgatccaagtacttgccgcagtgtgtatgtcgggaacatccatacgcaggtaactgagccgcttttgcaagaagtttttgcgggtactggcccagttgaagcttgtaagcttatcagaaaggataagtcatcctatggattcattcattactttgatcgcagatctgctgctcttgccatattatctctcaatggaaggcatctatttgggcagcctatcaaagttaagtgggcatatgcgagtggtcagagagaggatacgtcaggtcattacaacatttttgttgcgatctaagtcctgaggtactgatgctacgctgttgcatgctttctgc

SEQ ID NO: 10473 - DNA, 520 bp, Glycine max
  unsure at all n locations
  Clone ID: jC-gmle01810047b11d1
gatgacaaccatggcatggtaacacccgaataggtgatgagaagataaatgtctgaacagacaatcccctcttaaaatcataaacactcactactaagtagaaaaccgcataatacatgatacaaacccatacaaatgtttgctcatatatggtaggtgtaactaccacaccaccatcgagtaaaaaagtaaaaagaaagggctccctagagtttaacacgaatcaatgtgcacaaggcaggatatatagataacattaaaccaccgcatcaagagaccgcagtgtgttattggtagtacatcatttgctgtgcagctgcaacattctggaacccaccatcatatattgcctggctagctccaatagctgcttgtttaagaggatgttgcccttggggatgcatcaaagcatggacgccgcccatcttgctcattgctagctgtcgctcatacaccaaaagatcagttgcagagaggccaggcaaagatgcagcagcaggtggnggaaggggatttgaag

SEQ ID NO: 10474 - DNA, 125 bp, Glycine max
  Clone ID: jC-gmle01810047b12a1
gccagaactggtaacatgatttgttatgcgaccctagagcactgcataccgttgggaactgcctatgactgactgacccactgtagccgaacatgtacattcacatatcatatctgagctatcat

SEQ ID NO: 10475 - DNA, 384 bp, Glycine max
  Clone ID: jC-gmle01810047b12d1
agcccaacaaaaccaaaacgggaaaaaaaaggagacaccaaccaccaggggctaacaaaggccaatggggggggaaaagaacattccttaaaggacaacaagcaacaaggctaaaaacaaaaaacaacccccacaaatcattcagctttcggaaaacccctcttttcttcccccaaaccacaaaaaaacctggcaaaaaaagaaacatggccgggggggtggaccaaaacccctacccgggcctttaaacaaaattcttccacggacctggggggggaaaacccacccccgataaaataataaacgagaaccccaacttggaacccactaacaaaaaaagaaaagtggcccaaaccacccctatggggggtcctaaccggaagc

SEQ ID NO: 10476 - DNA, 554 bp, Glycine max
  Clone ID: jC-gmle01810047c01a1
ctttgatgacattagcctcctctctgatggtcaaatagtataccaaggacctcgtgaggtcgtccttgaattttttgaatctaagggtttcagatgtcctgagaggaaagccatctttcttcaaaaaaaaattcagatatatctatattccatgacatgtgacttcaaggaaggatcagcagttccgtttgataagagaaagaaccacccagcagcattaactactatgaagtacggggtaaacaagaaggagcttttgaaagctaacttctctagggagtatttactaatgaagaggaatgcattggtttacatcttcaagctatctcaagttagttttagttcgcgtttaaatgcaattatgtttgattattacatgattttaatgtgcgatttttctgcttcctttcaccactagcttgcactgatggtagtgttagcaatgacaggatttctgcgaactgaaatgcacaaggattctgtggataaagggggagtttacaccggtgctctttttttcttatagcaatgatcttgtataacggaatgactga

SEQ ID NO: 10477 - DNA, 544 bp, Glycine max
  unsure at all n locations
  Clone ID: jC-gmle01810047c01d1
tacaatttaattgaatcccatnncaaanacnaaaannnnatnnnancnangngccgaggggaaaaaaaaaaaaaaagaaaaaaaaanaaaaattataaaaagaaaaaaaaaaaanaaattggggggagggggaaaaaaaaaaaaaataaaaaaaaaaaaaaaaaaaaaaagnaannaaagaagggggttgngcactcattcccctaaaattttaaaccctctttaaattttaaattatccccttaccaaatcaaaacccctttccaaaaacccaaacattataccaaaatgaattgaaaccccaaaaatcccccctcctacaccccctccaaaatattttttttaaccaaatttttttttaaaaaactttttcactttacttttaaacccacccgcccttttatcaacccccacatttaaacccccccaccccttttactttcaacccccaagacattcccaataataccctttccccccccccggatttttaaccccaccaccctaaaatttccccccccccttaaatttcccccaacccttt

SEQ ID NO: 10478 - DNA, 408 bp, Glycine max
  Clone ID: jC-gmle01810047c02a1
attgaagttaaaagccttagccttccctacaactccaaacacaaagacatcatcatccatggctgcctccgtctccactgtcggagctgtcaacagagctcttttgaacctgaatggttctggagctgggagctttagctcccagttcagccttctttgggaccagcttgaagaaggttattgcctcaagggtccccaacagcaaggtttccggtggaagcttcaagattgttgctgttgaagagaagaaagagattgaagagacccagcagaccgacaaggacagatggaagggtcttgcctatgatattttagacgaccaacaagacattacaagaggaaaggggtttggttgactcccttttccaagcttcacaggatgctggaactcactatgcagacatgagc

SEQ ID NO: 10479 - DNA, 166 bp, Glycine max
  Clone ID: jC-gmle01810047c02d1
tacacgcaagttccatcacaacttctagcacttggattagtacaacaaccttcacgaacagaaatatttacttgccaagtttgctttgcctccaattcaagactggaagaaagttcccctctgaatacatcctcgttggcatttccaaaaagcagcctcgttcaag

SEQ ID NO: 10480 - DNA, 361 bp, Glycine max
  Clone ID: jC-gmle01810047c03a1
gaaaaagagagaggtagagaaaagcgaagagtctctctcttcctatctctctctttcaagggcagggcacaaatcttccacctctacttcttgttcttcttccttctaacctatatcaaaaggaaaccggaaaaaaagaaaaaaaaaaaagatgcataaggttctagaagccgccaatttttatttcttttaatttgtctgagtcagagacgttcgtgattgtaaccatggattattcgtgtgacccaaacggcgacgtttgtgggttcaaagataaacgagtaaatggttgaccctttcttggtcgaggctcttgaaaaccctcggacccgtgtcaccattttgcggatggagctggata

SEQ ID NO: 10481 - DNA, 196 bp, Glycine max
  Clone ID: jC-gmle01810047c03d1
aaaaattatatctaactctgaaatccttaatagctaaaataacttatgcagccaaatggaaaactgtttcccaaccgcactttataattcttgggataatcgaaactcaatgggcgttgaccaaatggagcctggaaaacagcttgtctaaattggccatatgaatgtgcatacattactgcagcacttggccact

SEQ ID NO: 10482 - DNA, 377 bp, Glycine max
  Clone ID: jC-gmle01810047c04a1
gaaaattctctttagagagatagagagaggaagaaagaatggcagcttgcactgtctactcaacacaatctctgagcacaaattgctccatctcaaccccatcaaagacgcaacttagtttttttcaaccaaaagcaggtagttttctggaggaacagcaagaagggcagctgcagcagcagaagaagctatgtgataacatgtgcagcaggagactcacagacagtggtgattggcctggctgcagactcagggtgtgggaagagcaccttcatgaggaggctgaccagtgtgtttggaggagcagcacagccaccaaagggtggcaaccctgacttcaacactcttatcagagacaccaccactggcatatgctt

SEQ ID NO: 10483 - DNA, 528 bp, Glycine max
  unsure at all n locations
  Clone ID: jC-gmle01810047c04d1
ctgcaatccatcctcattcngaatnnccnanaancannnttnannanaanaaaaacnnaaaaaananggagggaaaaaaaaaaaaaaaaaaanaaaaaaaaaaaaattttaattttttaaaaaaatattttattattttttaaattggtgtatattttaaaatatatttttattattattatataaatattataattattattaatttttattctaaaccccctaataacaatttacaaaataacataaaataaattggaattgtgcaaaacatcaaataacaaagaaaattattattttgatcattacacaactcaatttccctccattcctctatcaatatatccctatatattattgcaagttcaattcctaagcttttgcctctactggaatctcaaccttcctagctattatctactcatatacatctcttatcttcaaaccaactattgtttgaaatacaccttttccattgtttcttcctgaaaactcagcattcttcaacatcttttgaataacctctcc

SEQ ID NO: 10484 - DNA, 470 bp, Glycine max
  unsure at all n locations
  Clone ID: jC-gmle01810047c05a1
ttctcgcattggctccgaagcacaccaaattaaaaccacacgcacccgcgacgacacaccgtatcaccaaacgacaacaacaaccacgcgcgtttcgcacctcacgaactcggagaagcaaacgcagcgtcgtcgattcgtcactcgcaactcgggcacgcgcggcgatggcgtcggtccacagcaccgtcgctccccgtaccttcctgccgtcaattcccaagccgagagctcctcttcacgccgcaaagttcgtcggcggcggcgcgcacaactttcggagactgtcgcgcaacctcattctctccggaaacaaacgcgcggtggcggcgaactcggctgcggaggagttcgacgtgatatcggtgcagagcgacgacattaccgaccancangagggcgtggtggtgagcctcgttcagatggaaggcggagactgcgaattggcgacgcaggtgagcggattcgga

SEQ ID NO: 10485 - DNA, 495 bp, Glycine max
  unsure at all n locations
  Clone ID: jC-gmle01810047c05d1
tgaaactttagtttgatactccantnncgaaannccnnnnttnnnnnnnnnnnnnnnnnnnnnnnnnnnnnnnnnnnnnnnnnnnnnnnnnnnnnnnnnnnnnnnnnnnnnnnnntttnnnnnnttnnnnnnnnnnnnnnnnnnnnnnnnnggggngggggggggnnnnnnnnnnnnnnnnnnnnnnnnnnnnnnnnnnnnggggnnggggnggggggaaagggatggtacctaacatacataaatttccccgggatccaacatatcaacctatataattagctttttcacattccccatcataaatctatatgcccatccatatcaaggataaaaatctgattgaccaaacccatttttctcccaacactgcttctggtcatatctccactcgttactcctcaggaggataaacaaatgtggatttcacttctgaaggccccataaactgaaagtttcttgcttctgatttttcattcgaaaatgtggaaagtt

SEQ ID NO: 10486 - DNA, 535 bp, Glycine max
  Clone ID: jC-gmle01810047c06a1
ctttcccttcccactgggataggtattgtggttgcaggacctagagctattgaggcctgaaaacatgctaaatcacttcgagttttctttgactggaaagactacctgaaattctaccagctaggaacgtattgcccatacactccttccatacatttgctgtatggactgagagctgctcttgatctgatttttgaggaaggacttgaaaatgtgattgcaagacacagtcgtttaggcaaagcaaccagacttgctgtagaggcatggggtttgaagaattgcacccaaaaggaagagtggtacagtgacactgcgactgctgttcttgttcctgcttacattgatagtactgaaatagttagaagggcatggaagagatacaatttgagcttaggtcttggactgaacaaagttgctgggaaggtttatcagaattggacatcttggcaacttgaatgagttgcaactgttgggatgtctagctggaggtggagatgatactgaaagatgtgggctatcctgtaaagcttgg

SEQ ID NO: 10487 - DNA, 587 bp, Glycine max
  unsure at all n locations
  Clone ID: jC-gmle01810047c06d1
cganaatatagcattgaatacccaatnccnnnnnnncnnntttnnnnnnnnnnnncnnnnnnnnnnnnnnnngnnnnnnnnnnnnnnnnnnnnnnnnnnnnnnnnnnnnnnttttnnnnnnnnnnnnnnnnnnnnnnnnnnnnnggggnngggggnnnnnnnnnnnnnnnnnnnnnnnnnnnnnnnnnnnnnnnnnnnggnnngnnnnngagggnaatttatattttacagaatttccgaaagatcagaaaaaatgaagtaaacacaagaatgacttgtgactcaaatcctccaagggatcataggaatagtgtcctgtaaatatgcactgtcagcagcaactccacttccaagctttacaggataacccacatctttcagtatcatctccacaccagctagacatcccaacatttgcaactcattcaagttgccaagatgtccaattctgaaaaccttcccagcaactttgttcaatccaagacctaacctcaaattgtatctcttccatgcccttctaactatttcagtactatcaatgtaagcagtaacaacaacagcagtcacaatgtcactgtaccactctt

SEQ ID NO: 10488 - DNA, 517 bp, Glycine max
  Clone ID: jC-gmle01810047c07a1
aaaagacagacatgagccattatctcaaaggtaagcaggagaaaggaggtcctaggttggttatcatgggagagaccaaacaacttgttacccttttgacacaatttcaagaggcaatgaggatggtcaaggatatagtggtaaaaagcagatcgagtaacacgagcaaacgattactgaggaaaaccctcaagaatatgactcctatactgcaggaaatcaatcaatacaatgaacacttggacccacccagagaagaaatcgacactcttatcaaagaaaaagacgccgtagaagagattgtgtgctgctattcctgctgcaggagcatttggtggaccaaattattctcttggcttgcactctacggggataaattttggaataacaagaattattcccttgctgcagatgacaaccaagttcagtatatcaaaaacacactgtacaaggtgaaagaggttcttgagcgtctagacatagagaattttcagctgaaactcagaggtgttggatc

SEQ ID NO: 10489 - DNA, 587 bp, Glycine max
  Clone ID: jC-gmle01810047c07d1
cgaagataagaaaacctacttcataaaaacaaactttcgaaggtatcatagttcaattattttgttggcatcattatgctaagatgtccaatcgtgacaacacacaacacataaaatcaccaacttctttcaagtagcatagtactgtttgcacgacatgcaaatactactacagcaacttgaatacacatttattatccctattttaaacaagattatttcacatgaaacagatacgatcattggtctaacatttttatagaaagaggtcatacgagcaaattgaatgaaaccagcttcagttaacatcaacttgaggaacctcaaacttgagattgggaaagcatagcttcaaatgctttccatgaagcaggacatgtcttaagagctcattgaatgaagccagtttaagttaacctcaactcgaggaacctctaacttcagatttggaagcatagcttcaaatgcttcccatgaagcagctgtctcttcatcacataccaccacttttaaattctcaagattggttactgagtacggcaattcacaccttgcacagcttgtcatattgagattcctgagattgc

SEQ ID NO: 10490 - DNA, 459 bp, Glycine max
  Clone ID: jC-gmle01810047c08a1
aattggtgaacataatatcatctgcttcctcctcttcctccttcaagtcgaaaattgaaacagaattaaaaaccaaacactaccctgtagctttggtgatagcttaaaactcaacaagttaatgattagactaactgtctactgaacgatattccaagtgcaagacaagctagacctggcagcagctatggctccttgatcatgcataatcacaaagcttcaaaattttctcatcggatttccatcaaggctaatgccataaaagatgatatggacggagaaacaagcggatcttcaggacgtagctgggatcctgtgttggaaattgaggtcccttatgagcagaagccggcgaatgagtactcatgtctaaaggatggaatcttgaatacgtggggtgaactaggtccaggatcgtacttacatcgacttggaggtctctggctggcaatatttaca

SEQ ID NO: 10491 - DNA, 580 bp, Glycine max
  Clone ID: jC-gmle01810047c08d1
agtatgaatattatgacatgttttatattggtaatgttacgtttgatctatgtctcttctccatctatttctggctttggctttgctttgaatgacttaaaacaattttctcaactaatagaatatggccttgggccagagtctccacaaattgcaaactgcttttactaaatgaaattgactacatatgctgcctcttttttatcctttattcgagcagatcttcccatttgcagtactgccctcctgctaatgctcgataatacctattcctacagtagacaggtcttccatcagcagcctcagcagcagcagctgctagagcatcatcagttatcacctcgactggtaattaaagcagctcctcttttcttaagagctttgtgttaaccttgggagcttgaacagttgatttaatttcttctttggtaaaggtcgttcgaaaaaaattctccaatggtgtagcaaagataaatagcataactccctgaacaagcaatgctcctgtcccaactagagtttgtttcaacaatttaacgactgggttaacctttgtagagcccaacattctatcacgagc

SEQ ID NO: 10492 - DNA, 515 bp, Glycine max
  Clone ID: jC-gmle01810047c09a1
agccgtgttgtgaagagtcagagacaattgatggatcctgggaatgttggttcgacgatgcatgcatcggtgacatggattactttgtgaagaccctttcaagcatcaaacagaaaggtgctcgtgcagacttgattggttccatcatcactcattatgcctccatatggctccctgacctctcttcctctgctgaaaatggtgtcaccactcacttccaatccctcgaaagcgtcacaaattcatggatgaagaagaggttctttgtggaaaccttggagagtgttctgcctcctgagaaggattctgtcccatgcaacttcctccttcgccttctcagaaccgtcaacatggttcgagttgacgccacttatagaggtgagcttgagaaccggatttcgtggcagctagaccaagcttctctcaaagagctcatgataccctacttcagccacacgtgtgggacactcttggatgttgagctagtcctcaggttggtttagaggattatgagt

SEQ ID NO: 10493 - DNA, 509 bp, Glycine max
  Clone ID: jC-gmle01810047c09d1
gatggtatacgcacatctttattgaatttattccaaatacgacagagttatatcttacattatttctcgagtctaactccaaaaaaacgaacttgtataatataacaaaataacacacattatatcgggtatagtttctgtttcaggacatggatttcctccacttgtggggagtccttttgaccagactggttttcatgtccataggtgttggtcttccaaatccaacttccctttcagcctcctcctcttcctcttgttcttcaattatctccacctctcctacatttctgctaaacgtaggcattccaaacttcctccatttgaataagcccttcttcttcgccgccattctctccatctgcccttgcatggcattgaactggctttgcagcctgtaaacatcttccttcagcttccttatctccatttgctgagcatttgtttcacgctttgaaaggcatcgtcctggtgggtcaaggcctccattggggctcctcaagctactg

SEQ ID NO: 10494 - DNA, 458 bp, Glycine max
  Clone ID: jC-gmle01810047c10a1
gtgcctatcatggtggtcgagtggacagttctatcatgcatagcaccgacttcagagcctacgggcgtaccaagaaggctcacatgaactattgcttggaaatatacatcttgacatcctctgaccctactgatggacctaggggaagtctcgctggcaatgctcttgaggcgctctatgatccgcctgaatgataacgactccttacatgaagaacacatagagactcttgccagatggcccaggcgctggaatcgaatctcaggaaaccatcagataccactacgacatattgacgctgcgattaacgacactgctctagttattgattgacatacccccgaccaatggccttcttcctcagacgcccatgcacaccaagagcctgactgttcttaagaaacacatgatcctgagactgatctatgaaagagccaaggaaagcattacgcagaaag

SEQ ID NO: 10495 - DNA, 409 bp, Glycine max
  Clone ID: jC-gmle01810047c10d1
aagggggaaaaaactggactttaaatgctaaaggtgaatttttggcaggcaaggattgggtgacttttctttttacttccgtaccccctgcactggtaaaacttttggtgcggcctgaaaatggtcagaattgaaaacttgagggtcgtctattttttgatccccagctttcttagaggccgcgagggcatggaaatgcccaccttcggggaggggaacaattgcgcggacacaaggggtctcatccgtttcctaaaaaatcggggggggggatcccttttcatccgggtgaacctgggcatttttttttttaacaaagcaggggggtttgaccttcccctccccttttgtagatgttaactccatccgaggtgcggcaggggctattggctttgatccaacggggggg

SEQ ID NO: 10496 - DNA, 549 bp, Glycine max
  Clone ID: jC-gmle01810047c11a1
gcttcctcctcttacgagcctttccattcactccatcgattcggtgggtgcgggtgctgcgaaaccgagctagaccctgatcggtgtcggcacaccgccggagaacaagatgatcgtctgcgtcgccgtcgtcggtcaccagaaccaatccgttgacattcagagcttcacgggaggccgacgatgctcttaagctccaccacatcgtccattgctcgctcgatgtggtcgacgagcgagtgaacaatcctaaaaagtctggaccgatgcttaatgagacgtttttgggactgctttatcctattgaaaactacaaagtatatggatatctgactaatacgaaggtgaaatttatcttggtgaccacggatctggatgttaaagatgcggatgtaaggaattttttcaggaggttccattctgcatatgtagatgccgtttcaaacccattccatgtaccaggcaaaatgatgaccttcagaacttttgcagaaagagtgagcacaattgtcaagtcattcggcttgagttctgctgggtgaacatcta

SEQ ID NO: 10497 - DNA, 524 bp, Glycine max
  unsure at all n locations
  Clone ID: jC-gmle01810047c11d1
aagcaaatgtgatggttcaatttgaatatgatatattgaaaataggattctgttcaaaatgttcctaagcatttaccactgctaaaactacaaggcaggagcttagaataacaaaagaaaagttgtgccaaatatcaaccaagcatcatcatactaggcaccagttatagatgttcacccagcagaactcaagccaaatgacttgacaattgtgctcactctttctgcaaaagttctggaggttatctttttgcctggtacatggaatgggtttgaaacggcatctacatatgcagaatggaacctcctgaaaaaattccttacatccgcatctttaacatccagatccgtggtcaccaagataaatttcaccttcgtattagtcagatatccatatactttgtagttttcaataggataaagcagtcccaaaaacgtctcattaagcatcggtccagactttntaggattgttcactcgctcgtcgaccacatcgagcgagcaatggacgatgtggtggagct

SEQ ID NO: 10498 - DNA, 459 bp, Glycine max
  Clone ID: jC-gmle01810047c12d1
aatcagaaccgtcccacactaacaatccacccttctcccccaaaaggtgattttaataaatatccaaatataatacttggactaagggtcaaattggttatttttcttacatctccgccccccggagcccacgtatcatatatacctccaaaataaagagccttgaatactagaagaaacgcacctatacctaacaagattaagtgaatacccaaaattgtagtcattttatttctatctttccatacataaccgaagaatggaaaagattcttcaagagtctcaggtcccaaaagtgcatgataaataccgccaaagcccaatactgcagagaaaattaagtgaagtactccagacacaaagtatggaaaggtgtctataacttcccccccaggacctaccccccaacctagagtagctagatggggaagtaaaattaaaccttgttcatacatgggc

SEQ ID NO: 10499 - DNA, 563 bp, Glycine max
  unsure at all n locations
  Clone ID: jC-gmle01810047d01a1
ggtatggacctcagaagcaaagccaggactcttcctgggccagtgagtgaccctgcagagcttccaaagtggaactacgatggctctagcacagaccaagctccaggggatgacagtgaagtcatcctatacccacaagctattttcaaggacccctttaggagaggcaacaatattcttgtgatttgtgatgtttacacccccgctggtgagccacttccaaccaacaagaggtatgatgctgccaaaattttcagccaccctgacgttgctgctgaggaaccatggtatggtattgagcaagaatataccttgttgcagaaagatgtaaattggccacttgggtggccacttggtgggtttcctggaccacagggcccatactactgtggaactggtgctgataaagcatatggccgtgatattgtagatgcacattacaaagcttgtatttatgctggcatcaatattagtggcattaatggagaggttatgcctggtcagtgngaatttcaaggtggtccttctggtggtatatctgctggagatgaggtgtgggcagc

SEQ ID NO: 10500 - DNA, 257 bp, Glycine max
  Clone ID: jC-gmle01810047d02a1
aaaaaaaaataactataaaaaaaaaataccaaaaaaaaaaaacaaaaggcaccatatcgagtacatggaaaaactttgatgcctacaacaactactgggacgcccccttttctttccctttgaccgccccgactatttactacgacaccttccctggctgggtgccgctactttttttttacaagacgattatgcgccggccgacatattgccattaatctctccttcgccgagttgccggcgatctactggttcac

SEQ ID NO: 10501 - DNA, 343 bp, Glycine max
  Clone ID: jC-gmle01810047d03a1
gaagctgctgaatgatgaattatacattgggctaaagcaaaaacgaggaactgggcaggaatatgctgaacttatgcacgaatttatgacagcagtcaagcaaacttatggggaaaaagttctaattaaggttgacgactttgcaaaccacagtgcttgtgatctgcttgagaaatatagatgtacacatgtggtctttaatgatgatattcagggaacagcatccgtggttcttgctggacttggcgcaactctgaagatggttgggggtaacttagctgatcacagattcttattccttggagctggagaggctggcactgccataacagaactcatagct

SEQ ID NO: 10502 - DNA, 112 bp, Glycine max
  Clone ID: jC-gmle01810047d03d1
taacccaacaaataacttacaagaacagaacagcaacataaagaaggtaaaaaaattaaataattgacaataaaatgataacacgaaggggaaagagaaaaagggcttttta

SEQ ID NO: 10503 - DNA, 474 bp, Glycine max
  Clone ID: jC-gmle01810047d04a1
aagaagaagatcgaacgaatgctccttccgttattccattcagcgattccatggtggcgagaggcgtgccggcaatggcggcggtggccgttgccgcccttgacttgacggaatccttcaactggggggcgggacatcaaccgctccccgctctggcaggatcgcattttccacctcctcgccatcctctacggaatcgtcgccgccgtcgctctcgttcaattagtgcgaatacaattgagagtgccggaatatggttggaccacgcacaaggtctttcactttctcaatttcattgtgaatggggttaggtgttttgtttttgtcttccgtcgggatgtgcaaaagttgcagccagagattgtccaacatatcttacttgacatgcctagtcttgctatctttacaacttatgcactgttggtactgttctgggctgagatttattaccaagcacgcgcaatatctactgat

SEQ ID NO: 10504 - DNA, 520 bp, Glycine max
  unsure at all n locations
  Clone ID: jC-gmle01810047d04d1
atcaaatgcatcgattccgatnccnnnnnncnnnnttnnnnnnnnnnnnnnnnnnnnnnnnnnnnnnnnnnnnnnnnnnnnnnnnnnnnnnnnnnnnnnnnnnnnnntttnnnntttnnnnnnnnnnnnnnnnnnnnnnnnggggnnngggggnnnnnnnnnnnnggngngnnnnnnnnnnnnnnggngggnnnnnnnnnnnnnngggggggttcatcgtgttgaattgcagaacctgaacagcaaccacattttcctagagacaatgcaatatcacttatataacacaagccaacgtgtttgacaatccataaaatgtcacgtttcaaaacctacacaaaccttatgagaactttaaaacaatgatattagctttgccaacagaagaaagactgacttctctgtcctctagaaattatccttttagggtggtgtgagaaacatcaaagaaagcatagaaccaccaacgaaatcctgactaaattttctccatatgctagtcttttcagcgtattgggtg

SEQ ID NO: 10505 - DNA, 334 bp, Glycine max
  Clone ID: jC-gmle01810047d05a1
aatactcttggagtagcagtggcggggttagctacagagaatccatggccatggcggctgcatttgcaactacaactgcaacactgagactgccaaatgttggagaaagcaaaagtttgccgctctgaaggggtaaccctaatcccactaagcttaacgttatgcgggggtttggcggttgttctggagtggcagtgagtgtgagaatctgaattggaagggttcaggcgagctccagttcttcttcttctgaggaggaagaagaggcaattgagtgtgcagacaaaagtgactcagaaagtatacttagacgtgagtattgcaaatccagctg

SEQ ID NO: 10506 - DNA, 662 bp, Glycine max
  unsure at all n locations
  Clone ID: jC-gmle01810047d05d1
aactaacaattaattataaaaaattttttatattaatattaaacaatttttaataaaacataacttctctcttccanattattactcacaaacaattataaaaaaaaatataattcttttttnatcaaaaacccatactcaaaacaacttaanaattatnaaaaacaaacaaataatacaaatataatataacttatataataaaaaaactaataataattattttattttcaaaaataaaaaatactatctgaataattgtataaaataaaaaatataaaacaaataaaatataaaaataactatttaaataaattatattctttccaaattcaactaaatgaattccacatttgaacatgcatcttgtaaaaaactccaataattctctggccatccaattcctcatggaaactgcacttccgctaaaggagataccattcaaatggcccattaaattttctaaccctacaacaactcaaatcagaatacatgtgactaataaaagtttgttgattcagtatgaaaataaggagttactgaacatatcttaagaatagtcaaacaaaaatttcaagaaagctagagtttcttcttccacacccctctttccattctcaatctcaacaagttaatagaaagaataaccaacanaaatacac

SEQ ID NO: 10507 - DNA, 522 bp, Glycine max
  Clone ID: jC-gmle01810047d06a1
attgggttgctctctattcattccattttcagaggccttcaagaacagcgctagaacctgcatggctgcaaagcccttcaacattatcttcctcctcctccctttactctctttgggggggggggggcatgaaactgtgaaatcggaacagcacccattggttgtgagcacgtggccctttatcgaggctagccatggctgcatggagggctgtagatgctggctcttcagctgtggattctgtggttgaaggatgctcagcttgtgaggaactcagatgggaagggacagtcggccccggtggaagtccacatgagaatggcgaaactacaatcgatgctatgataatggatggggtgacaatggaagtaggagctgttgcagccatgacatatgtgaaggatggaattaaagctgccagggtagtgatgcaacatactgaacacactttgctggtaggagagaaagcatcagaatttgctatctcagtgggtcttccatggtcccacgaacttgagttca

SEQ ID NO: 10508 - DNA, 563 bp, Glycine max
  unsure at all n locations
  Clone ID: jC-gmle01810047d06d1
ctgactgtaaatttatacaccattcgnannccncnnnnnnnnttnnnnnnnnnnnnnnnngnggnnnnnnnnnnnnnnnnnnnnnnnnnnnnnnnnnttnnnnnttnnnnnnnnnnnnnnnnnnnnggggnggggggnnnnnnnnnnnnnnnnnnnnnnnnnnnnnnnnnnnnnnnnnnnnnnntgnnnacaatnttgcacaatcaatgttaattgctcggttaatatcagatgcaagaataatattacaatataagcacatttatgagccactaactttccctgaccaacaaaattaacatgctgatttgaattaattgttggaacttggaacatactcatttcttgaacagtctctctctcaaggtagcacagtaaaaacttccacatctttcattgcagggctcttgactgagtatttaaatgtccaaccatggcaagcaccagcatgttccccctttttattgagggcaacaattgctcccaaaaaatcttgaaattntcttgctattccngttattgcatctttagcagcaagtttgggttccattcccacctcatac

SEQ ID NO: 10509 - DNA, 478 bp, Glycine max
  unsure at all n locations
  Clone ID: jC-gmle01810047d07a1
gattctctcggtagcttgaactcagcacactcttcggaactctggatctgctgttctgctactctgagacaacattctcatgttgaatcttaatctctgggaaactaagctctaacaacagacatggatggtgtacatcctcttggaaagtcgatgtccgggactgcctagcgtgcacagctaccgcttacgcggcgagcgcagagctgcgtgtattcccgttgatctgagaaacaactgcttatctcagatgaccctagctctgaaatctgcccatgatgctgattcgttggctcttgcgatcgccatgctctgataaagtacttatgcctcaagatcaagatagctcagcatccttgacagatcaagctgaaactcctgatataacctctgaggatacacggatgttagaggatntgaccatggaagatgaggatatgtactagctttgtgaagcagctggcagtaacagacatat

SEQ ID NO: 10510 - DNA, 346 bp, Glycine max
  Clone ID: jC-gmle01810047d07d1
atacaaaaattcttgacacacgggggtaattttttacttcacagtaagggaccgtacaaaaaggactcaatcaatcctataaaattttctgtttatcttcccaagccagtgtttacaatatgaagcacccattctcacttaatttgcaccgtgtaacttataggaaccagactttatatccgggggaaaaaatatccctgggaaacccctccagggtgggcatacaagatcagccactgcccgctctaggaagcttttgacttccaaaaggacagaggagagccgggtcctggcccataactgtgggagtgactgattgtaaaaaggctgctaatggctgtccagc

SEQ ID NO: 10511 - DNA, 573 bp, Glycine max
  Clone ID: jC-gmle01810047d08a1
gattctcagcattgtctccctgatgaattaagttctgaacatttgcagcactgttcacaaaaacttaagcttttgggacatgaagaaacctcaccagtcattcaggaagctattacagaacatctggaaaatgtaggacccaggtcagagctcctgtcaaaattgctgatagcttgggcctaaggtctaatcaggaggctcttattgaggcagtggcccttgaaaggttgaaggagaatgcggaacaaactgaaaagactgcagaagctgaattgattgatcaaatgattgctgttgtaacacatatgcacgagcgtcttgttatgcttaaacaagcccagagtatcagcccagttccaatacctgctgattatcgatgtcctctttctttggagatgatgactgatcctgtgattgtggcatcagggcaaacatatgaacgagctttcatcaagaactggattgatctagggcttactgcttgtgcaaagacacgttagactctggttcataccagacctatacctaattatactgtaaaagcactaattgcatactggtgtgaatcgaaca

SEQ ID NO: 10512 - DNA, 541 bp, Glycine max
  Clone ID: jC-gmle01810047d08d1
accacaacaacaaaaaccagacctttttctgttaatacaaaaaagctagacttacatgtgtaattttttacaacacagaaaggtttttcacaaagaggacacaatcaatcctccacaaatattcttttcccttcccaagcaagtgaaaacaatacgaaacacctttacacactttatttgcaccgtgtaacgtataaattggagacattctataggagtcaattcaaaacctttggataccactcaaggttgggaattcaagatcagcccctgccagcactcccatgcctttgacttctaaattgattgaggagagcctgggccttttctttggcccttggagtgcctgactgtgataaagctactaatggcgggacagctccttgttgaagcaccttgcctaaatatttggtactatgcaagcaaagatgtagaagagcagcagctgcattctcctttcctctcgcagaacccaactcaacaacctcaaccagaacaggaataccaccttcatcaccaattgcatttcttccttctggaa

SEQ ID NO: 10513 - DNA, 408 bp, Glycine max
  Clone ID: jC-gmle01810047d09a1
gtgcctttcatggtggtcgtgtggacagctctatcattcatagtaccaagtaaagtgccttctggagttccaagaaggctcacttctcctcttgcttgggaatctacatctttacatcattggacagtaatcaaagatatgggggaggtttctctggcatatatttgtgctgctgatattcccgccttaatgatagcggggctttacttctatgaccatagtgttgcttcccacatggcacagcagaaggaattcaatctcaggaaaccttctgcataccactatgacatatcgttgctaggattaacgacattgctttgcggattaattggcttacccgcattaaatggagttctgcctcaatcctacatgcacaacaagagcctggctgctctcaagaaacagttg

SEQ ID NO: 10514 - DNA, 408 bp, Glycine max
  Clone ID: jC-gmle01810047d09d1
gggggaaaaacactgaaatttaaatgctaaaggggagttttcgttaggaaggaatttgggcccctttcttttaaattccctaacccctggcctggaaaaacttttgctgcggcttgaaaatttctcgattttaaaactgggccttcatctatattttggtatcatcttcttctagaggagacctttgaatggcatatcccttttttgggggtggggacatttaccggataacaacggattcatcaccttttttaaaaatctggggggggggatccatttttattgggggaaacctggcaatttttttttttaccaaagctggcaggtctgacctttaaccccccttttttagggggtaactcatctaatttttccgcattgcctatttcctttgaacccacagggggg

SEQ ID NO: 10515 - DNA, 446 bp, Glycine max
  Clone ID: jC-gmle01810047d10a1
gttctttccatggatgcaaaagagcatactgcaaaggtacactggagaactgttcccacatctgagacagataatttagctggagacacaatgattgaaactgtgagtgcctatgaacttgacgagcacccagattactactgatgttttggtgatattgtgttcaaggaggctcaaaaacagcttgggtaccaagctgataaagataatgcgaagtcagtgactgacttgaatgtggaagttcctctgataaactgggaccaaatcagtcatccgaattagtatgcagataacagttacctctactgcattggcaatgttactggttttgaagatggtgacatgtaggtgaaaagggctactggattaacaaccaaggttgcaccttatgaaatttttcgaattgataaggccgaaggttcaactgcaacctctgtttcttatga

SEQ ID NO: 10516 - DNA, 522 bp, Glycine max
  unsure at all n locations
  Clone ID: jC-gmle01810047d10d1
caaaccataattagaattatcttcactgacattttcctgcgttgagatagtagaacaacgtagttcatcacgaaacataggtaattatcctcctacaattgacataatttaagtctataaaacatcacaccatcccaccaatataaatttgttatatacaatgtcccttagtcaacttgacaaggcaaaggcgaagttccgtggtgcactttccacaatagcaaactattaggtaccttgagatcatggataacaggcaaatcagaaaatggaaatgccggagaagagactaacatttcaagggcctgattaagtgggaggaaggngaaggacagtgctcgttcatattggcataaggatccaaggtgttatagccaggcaattccatcctatattcaccaagaatctggcagaatggatgccgatcgttctcattggtgcaccatcttggtagacgtgtttggttatcctcaaaaatcctaagcatgtatgcatcacgaattgtgaattcagttacttgaa

SEQ ID NO: 10517 - DNA, 531 bp, Glycine max
  Clone ID: jC-gmle01810047d11a1
gctgaaagcaagctctctatcctttctggtagcaatgccctctgcaactgcaagcttcggattcttcttctgtcgacaacgcctttcttcttctttccccttccctccgcgtccaagactcctctccaccactcccaccccataccctctccaatacgaactcatcatcaaccgtccttcttaccccgactctccccgcccaccacctgctcgacctattgactcccctgaacccgaactcaacaaggcccagaggaagtactacaacaaacgcagaaagaggatgtacggctccgacgaagatgaatcccgacgccccgacgagaccttcgtggagttgaagcccgaggtggtggactttcccactctgcacaagagggaggaagagctttacttctatgacgcctttacttatccctgggagaaggacaagcattaccagatggtttaccagctggagaagaagtacttttctgatcaatgcctcgacaaggcgtttctccacccggacagtcaatgctatgctaatgg

SEQ ID NO: 10518 - DNA, 530 bp, Glycine max
  Clone ID: jC-gmle01810047d11d1
caaatatcaaaagaagaaactattattatgttccacaagtttacctccttcctataagtattgtattccacaaaaaagcattcacgagacctcagattaatcttacaggatccgacctcaaatatctcccaagaacaccgattatcaactatctcgatcttgtctataaatgtaaaaaataatatactgctccatagcatataaagcgacaaaagtacaaggttatatttgaaaaggcattaggcctaacaataaaactatatgttacaccaacattcagtatttgacggccgagattatgatgcttgtcgttgcaattaagacgcaggtacttcatagttaagaagatgcttatttcaatgtttactttggaaggtaaaactccgctttcactgcccttcaaccaaaaaagaaaagtgcatgtcatggctctgaatctcatcatcatgagaggtagcaatagaccagagaagttagagataatttttggtgatagcctcttccagctcttgaaactcccatgcatcatc

SEQ ID NO: 10519 - DNA, 146 bp, Glycine max
  Clone ID: jC-gmle01810047d12a1
ctatgatagttttcttcgaggttaattgattttacaactattagtgattgcactttaaataatgtaaaaattttctttttcatcaagtctgttcaataaaatgttacattttcctctctaaaaaaaaaccaaccatttcatattac

SEQ ID NO: 10520 - DNA, 119 bp, Glycine max
  Clone ID: jC-gmle01810047d12d1
agagaggaaaatgtaacattttattgaacaaacttgatgaaaaagaaaatttttaccttatttaaagggcaatcactaatagttgtaaaatcaattaaccttgaagaaaactattatag

SEQ ID NO: 10521 - DNA, 508 bp, Glycine max
  Clone ID: jC-gmle01810047e01a1
caaaaaagcactttaaatttgattatgtatttagacctgaagataaccaagagactgttttcgaacaaacaatacctatcgtcacatctgtattagatgggtataatgtttgcatttttgcatatgggtaaaactggaactcggaagacctttactatggaaggaacaccacagcataggggagttaactatagaaccctggaggaattatttcgaatatctgaagagagaaatgacgtaataaaatatgaattgtttgttagcatgttggaggtttacaatgagaagataagagatcttttggtggaaaattcagttgaacctactaagaagttggagataaagcaagctgcagatggaacccaagaagtcccaggactcgttgaagcttgtgtttatggaacagatgacgtgtgggaaaagctgaagtctggtaaccgagccagatctgttggatccactagtgctaatgagcttagcagtcgttctcattgttttgtgcgagtga

SEQ ID NO: 10522 - DNA, 541 bp, Glycine max
  unsure at all n locations
  Clone ID: jC-gmle01810047e01d1
taaaacgagtccgaaatcaccatncgaaanaccnnnnnnnnnnnttnnnnnnnnnnnnnnnnnnnnnnnnnnnnnnnnnnnnnnnnnnnnnnnnnnnnnnnnntttnnnnttttntntntnttttnnntttntttntttttggnttttggggtgttttttatatatttttttttttttttnaaattaatttttttttgtatttttaaggaataaatttagttccttgcatttggatgaagaaggccgagatggctagagtaatgaaatctgctatttttcaggcattttcctatgttttagaaaacagagatcacatgcattcactagaagggcccaaatggtataaccaatgactttctgctgctaattttcaagccccccttctgcttgacaggagtccacactaaaggtttgcctcttggatgcctcgggctgccaacaaacttactgctgctcctcatcaaagttggtgatgctgtctcaactgacgttctagcttctggcaatatggcaaacaaccttgaatactgagcttccctt

SEQ ID NO: 10523 - DNA, 535 bp, Glycine max
  Clone ID: jC-gmle01810047e02a1
atgattgagatgatagtgttcctctttcttgtcttgcttatatccctgatcttgagcagcagttccaataatagcctacagcttcccccaagcccaccaagcattcctctgctaggtcaccttcaacaactttaccccttccctatacaaatccctctacaccctctcatacaagcacggtcccctcctcctcctacgcctcggcccctcccgccgcctcctcctacttgtctcctccgccgccgtcgctaccgatgtcttcaagacccacgacctcgccttctcgtcgcgccccgccttcgccttcgccgagaggctccccttcggcacctccggcttcgtcaccgccccctatgggccctactggcgcttcatgaagaaactctgcgtcacggagcttctctccacgcgccaacttgagcgctccaggagcataaggagggaagagatactacgttccatcaaagggttattgacaatgctcgtgagactgttgcacttgatttgggctccgagttaaccaaattaaccaaca

SEQ ID NO: 10524 - DNA, 220 bp, Glycine max
  Clone ID: jC-gmle01810047e02d1
ttctccttttccatctttaccaattttccaatcaaagcactgcaccatagcagcaactgcagtgttcatcaagctgaatgccagtgctgtccctggacaacctctcctcccacctccaaatggaacaaaattgaacttcattctcttaccatcatcactcaaatcctcatgatcttgttcttgcaagaacctttcagggcaaaactcattaggattgtcc

SEQ ID NO: 10525 - DNA, 559 bp, Glycine max
  Clone ID: jC-gmle01810047e03a1
atcatgtcggtgaaggtaattctagcagatgaggataacaagaaatggatcttctgtgaaaaggaagctgcctggaccaaatattcaaaacaggtcaatgtaggggacatttttgaagaaagaattgggttatgttgaggactatggtgcttttgatcatttgcgcttccctgacggtctttatcaccttactggactaatacacgtctcagaagtgtcatgggatctaattcaggatgtcagagatatcttaaaagtaggtgatgaagtgagggccaaagttgttggtattgattggggaaaatcaaggattaacctatcaattagacagctagaagaagatccactcttataaactctggacaaagtaatacctcaggatggatcaactgatcctgactctatgagtggaggggatagcggtagcattgagcctctttcagggctttgaacaatccttgaagagctactacaggaaagagggatttatgaccgaagaatcaagccggaagggtttgaaaaaagagtggtcttccaagactagcagctttgggttttt

SEQ ID NO: 10526 - DNA, 106 bp, Glycine max
  Clone ID: jC-gmle01810047e03d1
atggcatgcatgtaactgtacaaaatcgaatcgcagtgattatcggaagaaaggtctgagtgaatgaaattcaggggacacgctccaatactcgttgtaatgccct

SEQ ID NO: 10527 - DNA, 471 bp, Glycine max
  Clone ID: jC-gmle01810047e04a1
tcaacctcaacccacttaccagtttttccaaattttcattctttttccctttccatgagttgatgcatctttttcaagctaattaagcttgaattagctggtggggttttttaaattcgtcgataaaaaattacagtcgttctgctattttttttttcttcttcttgtgtttttgcttgcagattcaggaactggtgtgtgagatggtttttgttgacttaaagaaccacttccttatttaaatggcagtaagtgattacttaaatccctgaaagacatgcagtcagccttgtttctgctgaaatgaagaacttgcagagctcggaagaattacagtcgtcgactcaagcttctcatgagcccaagagtgaacaaccaaacaatacacaactgatgctccttgtacagacacaggatcaggatttgctacaagtaatgacagcaaaaagtttcaccgcaggatattgaatt

SEQ ID NO: 10528 - DNA, 657 bp, Glycine max
  unsure at all n locations
  Clone ID: jC-gmle01810047e04d1
atgaacanaagcttcagnatcctgcanatcccccnnaatnnnccnnnnnnnnnnncnnnnnnntnnnnnnnnnnnnnnnnnnnnnnnnnnnnnnnnnnnnnnnnnnnnnnnnnnnnnnnnnnnnnnnnnnnnnnnnnnnnnnnnnnnnnnnnnnnnnnnnnntnttnnnnnnnnnnnnnnnnnnnnnnnnnnnnnnnnnnnnnnnnnngggggngggggggggnnnnnnnnnnnnnnnnnnnnnnnnnnnnnnnnnnnnnnnnnnnnngnngnnnnnngngnnngngnnngggcccgactcatcctgataatagttttcttaaaagaatgcaaaagattgctagtttgctactacagggaacaattgacattctctatcttcatcctgatgatattaaatcaggctgctgcctacacttaggtaacagtaaacctgtatgccatgtaagctagatgacatttattaatcctaatttttccctaacctaacaattaatgtgaaacatgcaactcgcctcacctcaagatttctcctcatccgattgagagcatgggggctcagaattaacaaagaagtcatccactatatcctgttgatcaggagattctagcaaaatgtctgaatcagatggcaaaaatggtgaaccaagatagttt

SEQ ID NO: 10529 - DNA, 477 bp, Glycine max
  Clone ID: jC-gmle01810047e05a1
cagagatgcttcgcagaggccaggttgagcatgttaaagccgaaaggaatctccttgcagaggttgacagcaattgcatagtcaagctttattgttctttccaggatgatgaacatttgtatcttattatggagtatctaccgggtggggatatgatgactctacttatgagaaaggatatcttgactgaagatgaagccagattttatgtaggagaaacagttttagctattgaatctatacataagcacaattatatacatagggatatcaagccagacaacttattacttgatagatatggacacttgaaattgtcagattttggactttgtaaaccattagattgtagtacacttgaagaaaatgatttttctgtgggtcagaatgtgaatggatctacacaaagctcaacttctaaacgctcacaacaggaacaactgcaacactggcaaataaacaggagaacacttgctt

SEQ ID NO: 10530 - DNA, 566 bp, Glycine max
  unsure at all n locations
  Clone ID: jC-gmle01810047e05d1
ctgaaaactgtaatctgattccgattnccnnnnnnccnnnntnnnnnnnnnnnnnnnnnnnnnnnnnnnnnnnnnnnnnnnnnnnnnnnnnnnnnnnnnnnnnnnnnnnnnnnnnnnnnttnnnnnnnnnnnnnnnnnnnnnnnnnnnngnnnngggggnnnnnnnnnnnnnnnnnnnnnnnnnnnnnnnnnnnnnnnnnnnnnngnnnnnggganaaangctttgctatcattaaaagaacgcgaatatacatggtattgtctgttttagtgtaacatgtgtgacaacggatacttagtgagagatttacaaatcaatagttgtggccactgacaagagactggtccaagccatattagtgatttcgtgtaacttagaacaaatccaacgcatcaagagtgatattttaaacgcggaaatggtcaaaatgctgagttatgatgattcctacactgtcagactgctgcagagatcatgtggttggggcctgttaggacctgggaagaagattcttgtcgcgatgaggagatacctctaactggggtggcaagagcttcaaaaagct

SEQ ID NO: 10531 - DNA, 484 bp, Glycine max
  Clone ID: jC-gmle01810047e06a1
atgaaatgtgatgttgatattaggaaggatctgtatggaaacatcgtgcttagtggagggtctactatgtttccgggaattgctgatcgcatgagcaaggaaattagtgctcttgcacccagtagcatgaaaatcaaggtggttgcacctcctgagagaaagtacagtgtctggattggtggttctatcttggcatcacttagcaccttacaacagatgtggatctccaagggtgaatatgatgaatctgggccagccatcgttcatcggaagtgcttctaaagttgggtcaagtcgagctggatggtgatcaagttcttgatgcacccagtcctgtgccatatttcagtaaaggttggttgacttcatttggtatgtgaagctttgggatcttaatagatatatctcagttaatgaatggatttgtaagttgagtatgttataagttctccgtaggacacttggaaccagacttttatgcatt

SEQ ID NO: 10532 - DNA, 540 bp, Glycine max
  Clone ID: jC-gmle01810047e06d1
gactcaaaaatccctgtgagaaaagatgcttagactatcgtcctcctaactcgaggcacctaattcttggccacaacatgaaaatcgaataaaaggaaaaaccaaaccaagcagaacctacaaagttccaataccatccgccaattgcataaaaagtctggcttccaaggtgacctaacggagaaacttataacatactcaacttacaaatccattcattaaactagatatatctattaaaaacccaaagcttcaaataccaaataagtcaaccaaactttactgaaatatggcacaggactgggtgcatgaagaacttgatcaccatccagctcgacttgacccaactttagaagcacttccgatgaacgatggctggcccagattcatcatattcacccttggagatccacatctgttggaaggtgctaagtgatgccaagatagaaccaccaatccagacactgtactttctctcaggaggtgcaaccaccttgatttcatgctactgggtgcaagagcactatttccttgctcatg

SEQ ID NO: 10533 - DNA, 106 bp, Glycine max
  Clone ID: jC-gmle01810047e07a1
ggagatggcttcttggcttcgccaaaggcaagatgataacctgatcaattagatactatcattcatatagattctccttttaagtaaattgattgaatggtattac

SEQ ID NO: 10534 - DNA, 565 bp, Glycine max
  Clone ID: jC-gmle01810047e07d1
agcaatgatgccaacactgaggcaacaagttggatgatgaatttctgtccaatgcaagcacgtgtaccagatccaaaaggaagaaatgctgcattttcatttggatcatttagtacacatgaactgacttctgtaatagaaaggtcttcagtagaacctgatccttttgtacccgttgacaaaaaatggtaaggattaaaatcacttgcatcactcccccaactagagtcatccttgtgtaccaattcgacaggtacaaccagtacagctccagcaggtatggttaaaccagttgcaaagcacaagtcatgtttcaaagaacacctctgcagcattggaccagtgggcagaaggcgtgcagattcataaattgtagccaataacaaaggcatcctataaacattttcatgctcatattttgatgggtttcttcctacaatgctaatctccgaataaaccttatcctgtatttccagatgcatgacaagcctagtcaatacattggtgattaaagcagatgtaggttgacatccatgaaatatcacacgcatgatgttcccacaag

SEQ ID NO: 10535 - DNA, 562 bp, Glycine max
  Clone ID: jC-gmle01810047e08a1
cgtttgcaaatgcttgtggagctatgtgtacaacacagaagggagcaattcctgcacttccaaccgctgcagaggcagagaagtttatttccaactctaaggccaaatagactctccttccaaatttgatagtctatctggaaactacccattcattttcattctagagtttcgttttataagcctttgataaccaatgacttgaaattgttgtttctgtttttgaataataaccaacttcttttctcttttttgcacaatgggcacttatagtgtaacactcgttttttaaaaataaatcaaattttaaaaagataatgagatttttataattaaataaataaggagaaataattttattaattaaggtaaataaaatgaatatgtatttttagaaaataaaaatgttggtttatttatttattcaataggaagtaaaatataactatctttatgaaataatcaaataaaacaaatataataaatactcgactcataaccctatttataaataaggacatattacgtcatttattataatgatgatatgtccctagtacgt

SEQ ID NO: 10536 - DNA, 518 bp, Glycine max
  Clone ID: jC-gmle01810047e08d1
agataaaagcaaagaacaccataaaataacattaaatagatatttagaacattacatcaagagtttcagtagcctgctccccaacaaagaagttctagccttccattacgagtaaagcttcaaaacaacaaagaaagaaatgtttttggtgaaagaaaatggaagaagatgaagaagaatgtcttctccagcctctcagccctatttctctatgtttttcatgaagcaaatgcttggctagcctctggttgtggtgctcatgcccttttgtttccaccaatctcagtgttttaaagactcttggacttctcagcacacgaaggcttgctcagcgagcatgtcttgctgagcgagagtaagtgaaaacctgctaagccagtttggacatgctaagcgtgagaagagacaatgtcctcgctgagcgggctggctgtgcgctgagcgtgctgatctctgacttatcatcttctgaggttttgcatccgttaagcgagctgactgcctcgctaagcggatga

SEQ ID NO: 10537 - DNA, 443 bp, Glycine max
  Clone ID: jC-gmle01810047e09a1
cgagacatctctttgatccttggcctcaccctgttgtgtctttacatctcttgaatttgcaccacattccttcatagactgcgtatagaagttcgccatcatgtcaggtatcaccacgcaccctaggatcccgccggtcgtgatggacaacatcacccagcagattggcaacacgccgctcgtgcgcttgaacaagatcccccagtcgctgggcatcgaggccaccgtctacgtcaaggatgaggccttcaacgccggcggctcagtctaggatcgcattgcgctgcgcatgatcgaggctgctgagagggaggggcgcatcaagcccggcgacacactgatcgagcccacctgtggcaacacgggcattggccttgccctcgtggccgccgtcaagggctacaagaccatcatcaccctgcccgagacgatgagccccgaga

SEQ ID NO: 10538 - DNA, 349 bp, Glycine max
  Clone ID: jC-gmle01810047e09d1
ggacaagcctaggggggggtgaattggtttgttattgttgttctcggtgggttgcaggggttaaaatccatgcaaccccttttgttgacttaatgaagatcagatgagttggtattatatttaacccaaaaaaaaaaaaacccccgttgtttttttgagaaaaaatttacacagaaatgcccacccctttttttttttacccccctttttgttacttaccttttaccccccctttttaataggacagacaccctagtgcccggggacattccccttttgcgtggccattcaagtcagcaaatcgaccttggtgaccacgggggggggctttggcttttcattggccttt

SEQ ID NO: 10539 - DNA, 453 bp, Glycine max
  Clone ID: jC-gmle01810047e10a1
tccagatgaaggtggattaagtgttgcatttgatcccgttgatggctccagcattgtggacacatatttcacagtaggcgccatctttggtgtgtggcctggagataaggtgaccggtatcaccggaagagatcaagttgctgcagccatgggggttcttggtcctagaacaacatatgtacttgctctaaaagacttccctggcacccatgaataccttatgcttgatgacggataatggcagcatgtcaaagagaccacagacattggtgaaggaaaattgttctcctcaggatatttgtgagccacatttgacaaccgagattctgcttggttgatcgattactatggcaatgaacagtgcacattgggatacacgggaggaatggtgccagatgtagaccagattattgcaaaagacaaaggcatcttcaccaatgtgatatcaccatc

SEQ ID NO: 10540 - DNA, 510 bp, Glycine max
  Clone ID: jC-gmle01810047e10d1
aggcataccaacataaatttactttgttattatagggattaacagaaatatgtgactaaattgcaggtacttgtctgaagatatagcatatatctttttttctaaaagcagataaaatagacaatgaattgcaggtttaacagattaagcagctgctccaacagctacaccatccttgagcctggatttaccatacagggtttcttcaaaccggatgatctcattcttggatccataagcaacttgagttctctcatcaatgttagtgatgactttgtctagcacagactgatgaccatcactgctgtaacctccggctttttcaatcaagaaccccaacggagctaccttaaacaacagtctcagcttggctttggctgatggagatgtcacattggtgaagatgcctttttcttttacaataatctggttgacatctggcaccattccttccgtgtatctcaatgtgtacttttcattgacatagtaatcgatcaacttagcataatc

SEQ ID NO: 10541 - DNA, 479 bp, Glycine max
  Clone ID: jC-gmle01810047e11a1
ctcgagccgttttgttaggaaaatataggcaaaaagaaaacgagtattaatataatgaacgggtagttgaatagtgtctacgttcaattgtgcatcctcaattatcattctttcttcttcttttcttttatgcttaaaaaataagctttgttagaaggtaggaacttcacttcctcactcaaccgagtccattcacagttcctttggcaatggcaactcacagactcgctttgatcatccaaaacccttcgaacgacgacgagtttttgctcgtgaagcagtcgcgtcctcccaaattccacgatgaagaatacgactctttcgtcgattctgatctctgggacttgccctcggcgcagttgaacccgctgcttgcagaatcagagccaccggttgagttggaacttgcggtctcgcattcggaatcccaggacgtcgatctgaggaaattcgacatccgttcggctctcaacgaggtg

SEQ ID NO: 10542 - DNA, 417 bp, Glycine max
  Clone ID: jC-gmle01810047e11d1
agaaaataactcctccacagagggacacctgtctatttagggaactttcgttgacaggacaatacagcaatgccagcaatgccagcaagaacaccggcaacaagaaatggagatttccctatttgatgtgataaactgccactaccggaagcccatatccatcgagatagaaaatgcagcccacaggtatttttgaacttttggattgaaaaatcctaaaggtagatgcggtatgttctgtcagttccacgaaagaaaaacagccaatctcacaagtaattctcctcagattattatacaagggttatatataagtgttcccgttatctagggccatttcaatgctaacaatgaacttggaggataggctacacattttctcaaaaagatgcaatgaactgataggcagtcagtaag

SEQ ID NO: 10543 - DNA, 326 bp, Glycine max
  Clone ID: jC-gmle01810047e12a1
caaggccaccacgatgccttgtccccaactccatcttccatcagatcacaaagaaaccctaaccctagccccaacccttaccagactcgccggcggaggctccacgacggcgaccgctccggcatggtggtgaaaggccccagcgcgaacctcgtcatgggccatgtcaagatcctcaagagaggcgagacgctcagcgccgagacccgcggcggcgacgacgaaggtttcgatttggttttgggatccacgaaccggttgggtcccgatccgagttccgttccggtccctgggttcctcgctatgaggcggtgatcatggattca

SEQ ID NO: 10544 - DNA, 469 bp, Glycine max
  Clone ID: jC-gmle01810047e12d1
gtcgatcaaaaaactataaattttaatgcattaagtttcagaactacaccagtatattaaaataatataacacattcaagaaaggagacccaacacagcacccacacaaactcgcagacaaaagaacactgcaggaatacacagtaggatatcatattcttgtcttcaaacagcgacctaaatcctctttcacgggaccaaaagttgaaccctgatccacacgagcttttccctttcgcctccaaaattttcttcattcgctcgcacccaaacaaatcaaatcattcgctcgtcgagactgtgcaatcaaatcaaacgatcaagaaagctctcaacagccgctccttctcccgtgactctcacttgcgtgagataaacgccgaaatccaacaataaaatcaaccaatgaatccatgatcaccgcctcatagcgaggaacccagggaccggaacggaactcggatcggga

SEQ ID NO: 10545 - DNA, 404 bp, Glycine max
  Clone ID: jC-gmle01810047f01a1
cgcacacattatgtttcgtacaacttatgatttttaattatgatctttctggggacgacgacaataacataaacacccacctttctatcgttttactagcctgccatgtttttgagcttgagatttatcctataaactatttttttttggaacctatttgtacattgacttagtcataatggtcccccacagctttgtgttaccgtgcaaggcttgatatttttcaatgattgcgcgctacggatagtgtacacctccagctaaaaatcatttgcacagggaagggagattgctaacatatgtcagagtgccaccgacaaatgcctatagggaaggagccgagagggttctttgattagctacgggcgatgcgtgaactgacatagctcttatgagcggctacg

SEQ ID NO: 10546 - DNA, 316 bp, Glycine max
  Clone ID: jC-gmle01810047f02a1
ttctctcttcacttatcatcatacttatatattatataacccaataagtaaattaaatgcatgttagcactttaacattcctttctctaacctcgttcccactctcatattttcccttctgctgatattccggcttaaactaaatcaacaagatgactcagggaaagatagttgaagctgcagaagctcataaaacacttgaggatttcgagcctccaaacgaagcgcacacggaacaagtatgcttttgcttgtgctgggctggcctccatgacttccatcttgctcggctactatattgctgcgatgagtggag

SEQ ID NO: 10547 - DNA, 307 bp, Glycine max
  Clone ID: jC-gmle01810047f02d1
gatagcgagcgtgaggagagagagcaccatgcccccgacactagacaacaacaacggacgacgacccacgcggtccaacgtaaaagtagccgccaagatgaaaccggttgtgacgaatccaacggccacggttgcaagaagtttatgcgtgtcgtttttgatcccagccttctcgaagatcctggggctgaacaaaacgacggcgtctacgcccgacgctggttggaagaagtgaatcccaagggcagcgattacgatgtgacgaattgcgggcgttggatagaggaagagttctttccatacgcct

SEQ ID NO: 10548 - DNA, 504 bp, Glycine max
  Clone ID: jC-gmle01810047f03a1
gaacacactaccctcaacatagtaaagcagctggtgcaagtgaagcagtggctcaaaccatgttgctcatgtctagtgtctctagcagttattccgtggatttgaagaaagaccttttcctccaattgcaggagtaaagtttaaggcctaagttctctcaactctcattcaacccacttgcaccatcaacttcttccttttcttcaccccgtacattcacaaccctggctctcttcaaatctaagacaaaagccgctcctgctaagactaaggttacaaagccaaagcaaaaggttgaagatggtatctttggcacttctggaggatttggttttactaagcagaacgagctctttgtgggacgtgttgctatgcttggatatgcagcatcattgctgggtgaaggaataactgggaaaggaatcctagcacaattaaacctggaaactggaattccatttatgaagcggagcctcttgttctggtattcatcctcttcaccct

SEQ ID NO: 10549 - DNA, 232 bp, Glycine max
  Clone ID: jC-gmle01810047f03d1
agaaattgcccgttcccggattcaaagccgcactgaagaaaaaaagaacgttgaacaacactaggggctcgatttacatggttgggacccccgactcaatgttgaattgggctagaacttcctttccagggataatttctccaatcaaggggaaaacgaaacccaattgagccaatcttcccacaaataggtcggtcgctttcgggaatccgaataaaggacctggaccgag

SEQ ID NO: 10550 - DNA, 524 bp, Glycine max
  unsure at all n locations
  Clone ID: jC-gmle01810047f04a1
cgagaatggtagagaacagttttataattaaacatgttatcgaccagctcactacaatgaatgaaatggtgtaacacatggcaggggattcaaattcaacgaggcgtgtcatcagaagcacttgatccaaaaacacacaggacataaacatacacataattgaagggaataataacccaaaagcgcaggtgcaagaacgtgctgcagtttttgaccaacatttctacgatggaatcccattctttgctgataataagccttctagaaccaacgagaaggcttctaccactgcgggtgaagagttctacgacggaatcccgcgcttccccgaggactccttgccgaacaagcctaagtcaaaggtctcagaggtgagtttacgcttgggcaaagctgttactactcgaattgctattggattagagaaagcagtagaggttttggacactcttgggagcagcctgacanattaaatgtgagcagtgggttctcttctggagctgcaataaggggaataaaatttc

SEQ ID NO: 10551 - DNA, 481 bp, Glycine max
  unsure at all n locations
  Clone ID: jC-gmle01810047f04d1
cgactatcgatcccatcaanncnnnnnnnntnnnnnnnnnnnnnnnnnnnnnnnnnnnnnnnnnnnnnnnnnnnnnnnnntttnnnnnnnnnnnnnnnnnnnggggggggggnnnnnnnnnnnnnnnnnnnnnnnnnnnnnnnnnnnnnnnnnnnngnnngnnngngcntnnctgggagccttacttctgatggccaagctatgaagccataagagaagttcaagaatacaatgtcccactttctctctatctgcatggtagaatgtctcaatccacattacaccagtcttcttttttacttcataccctgagtatgcccactcccctagccaaccaaatctcttatgtgctttcgatgtgttaatggccatgggaaccaaccaatgtaattttttatgcatctcatatgtgatatacgctacacttatctcttctacagcacggagggatggtaatttggaacgtacagctaattttata

SEQ ID NO: 10552 - DNA, 523 bp, Glycine max
  Clone ID: jC-gmle01810047f05a1
ggacgtatgggcacaaaaaacaagcttggaaaggatctcattctgagaagaatagctcaaggcatgtatctgaacaaacaggagatgaggagaatcatggctctaatgagcatcgtgaagatgcacatgaggaagaagatggggatcatctgtcgaaggacaaaggtgggcagaggtatagaaatcaaggaagatcaagaaaacataaatatcgtgctggaaatggaatgggccatggaagtacaccatcaactcatgctgccgaagcatcgaagccaccccctggaccaagaatgccagatggaacacgtggcttcgcaataggacgagggcggtttcctgtccctgcttcgaattagcaaagattggacgccacaaatgagggattgtatttagtagtattatgtgtccgatgctttagtgatgtactagtttttacttgggtccctatgcctgttcgcttgagtcaacatgggtttgttggactggccaattatgtatctcaaatcttggaagtgaagtg

SEQ ID NO: 10553 - DNA, 410 bp, Glycine max
  unsure at all n locations
  Clone ID: jC-gmle01810047f05d1
cacaaatatcatctcgatacacataccaaaaaccnaaataaaatttatacccattctcctctctgccctctaatctcttctctttcaataaatttacttatcatcttttctacttattctacattattcctggcaccggtacactacaaaaacattttccccctcacatctacctcattatctactcttaatattacattatcaactcatctttaaagaaaaatatctttactaaccactttaaaccttaaacatcctctaaaccaaaatactcactcaaaaaaatgttataaaactcactacctccatctttaacacccaattaaaacttacctttacatcacacacaaaacatccaaaacctcaaattttcaaagctttacaccttcctctacccaaattccaacctt

SEQ ID NO: 10554 - DNA, 527 bp, Glycine max
  Clone ID: jC-gmle01810047f06a1
gtgtgtgtcgcagtaagtacccaaatcaatgttcacactcacttctccttcttccagggccttacccatggattctcttcccaaattgcgccacccttctccatttcccactcccttatcctcttccctctccttccgctctttaccgccaccccattttccttcgtcgacgtttaggtcaccctgcatcagagcctcctcctcaccctcccaaaacgaccccgcttttcgcaccccgagatacacgccctccctccgcccgctcctccaaaccctaacctccttactctcccccctcctcgaaaccacctgcatcgtcatcgccgccgacgccttcatcttcatgcgctttcaccacacgcccgtcgtcatcgccgatccgctcacttcccccgtcgaggaaaccgacaccgccttcacccatgaggaagccgtgaggcttcttgtagagcgtctgaacaccaaccctcgcgataccgaggcgcttcacgcgctcatggaggtcacaatcaaaccgcgtacgatgg

SEQ ID NO: 10555 - DNA, 413 bp, Glycine max
  Clone ID: jC-gmle01810047f06d1
gattctcttcattaaccctaccatttatatccaccagaaacctaaccaacagtaatttcgaaccattattacgaggaaaaactaaaaactattaaactaataaccttctatggcgacacctgaatatcagtataaggaaaagggacaagataagacaaaaaaaaaaactcattaggagctctgtgacaatcacaagagtgataacctttctcagcccctagcaccagctccctccctgtccaatttatgcgagaagaacttggtagcgaacatgttgacctcgaaatagtccttgcaaggatggtccttgggaacaagcctgcgaaacttattgaattgtttatcagcttcatgtttctttctaaggagagtataaataataccctgacacaagtaaggtctaaaattcctag

SEQ ID NO: 10556 - DNA, 482 bp, Glycine max
  Clone ID: jC-gmle01810047f07a1
acaaaaacaagaaaaaaggttacctctttcaattttatcccttgttgtgagcttaattcaatttctgctcacacataatggcttgcacgctcgctgattcattactcctattcaagggttcttatcagaaaccagttctgaggagagacattgctgcccggtactccccgggtatatttagtctaaacagtaatgggcttatccagaaaaggttcaggcgtcaaaggaattttgttactaggaataaggttactgtcatacatgccgtggcaattccagtacaaccagctccggtggaaagtgcggagtatagaaaacagctagctgaagactacggtttcaggcaagttggagagccgcttccagatgatgttactttaaaggatgtcatcaattcccttcctaaggaggtctttgagattgatgatgtgaaagcatggaaatctgttctgatatcttgcacttttatgcactgagtctct

SEQ ID NO: 10557 - DNA, 484 bp, Glycine max
  Clone ID: jC-gmle01810047f07d1
ggcatacgaacctaatttgatacataaaaaatttcatatgagaaaaaaagccagtttgggcataattaagcataatcaggcatggtttccttcaaaaatgtaattggacgagaatcttcaggggcaagttcgtcgaaggcaacataattttgctccttgtcgtacacatgacacactggcatgattgtcttcatcaatctccaattccaactagcctcattcagatactgtccccagttttcttggagagacttatgggctgctcttaaattatagcttggtatcctcggggatatgtggtgtggaatatggacattaatatcgggacataggatctcgatccatttaggataatcacaatgaacagttccattaagctgtgcttgcgcagcattccactcttctgagtatttgaatggtatatgcggtgcagtatgatgtaccatggtaaacgtactcatccagaagtgatagcccaaccatg

SEQ ID NO: 10558 - DNA, 451 bp, Glycine max
  Clone ID: jC-gmle01810047f08a1
tgcttgtttatcattttcttacttacctatcacgctctgccacacaacttcgtctgcgcaataacggaataaaaaaacaagactgattactattatggcgccgagggatcataccacaagcaacgctaagcgttaacggtaacggcaacagcggcctgaaggaggagcattttcgaggagtgagaaagaggccgtgggggagatacgacgcggagatcagagatcctggcgagaagagccgtgtatgactcggaacatttgagcacagaggactgatgcagccgcgtgtatacgacgccggagcacgagagttatgtggtcatacggccaacgacaacacttccctgaggccttgggaaaatgttaagaactctagccacatccagagcaggaccgaacagtccttcagccgctagcgctacatcgtcgccgatgccttgcactagacctt

SEQ ID NO: 10559 - DNA, 429 bp, Glycine max
  Clone ID: jC-gmle01810047f08d1
gagacaatcataccgcctacgtattcacatactatcttttctttcccttcccttccctcgttatattcccttatcggaggctgctactttctctacttatataaaaaaaaaaactaacgagagattcataatccgcaccccatacagaaaaaaaatactagaggggggagtaagactttggatcaagcgatctcatgcggaggaggatggttaaggtccagaccgaaaattctagaaccggaccccttaacctcgccttcattatggtttaaaccgataacagaggaagagtccgagtcgctcggcggcgcgtggaactcactcgcccaaacggtaggatgagggcagccaaacgcaaagacacgtggaccggccatgccggcgcgttggacagcgtcaaagtacaaaacctgatttgccggaggcacc

SEQ ID NO: 10560 - DNA, 465 bp, Glycine max
  Clone ID: jC-gmle01810047f09a1
gcagacgaagggcaattcttgaacatgctccttaagctcatcaatgccaagaacaccatggaaattggtgactacactggatattcacttcttgccaccgctctcgctcttcctgaagatggaaagatcttggccatggatattaacagggagaattatgaattgggtttgccagtaatcaagaaagctggtgttgaccacaaaattgaattcagagaaggtcctgctctcccagttcttgatgaaatggttaaagatgagaagaaccatgggagctatgacttcatctttgtggacgcagacaaggacaactacctcaactaccacaagaggttgatagagcttgtcaaagttggcggagtgatcgggtacgacaacaccctatggaacggctctgtggtggcaccgccaaatgctcctcttaggaagtacgttagatactacagggacttcgtgctcgagctc

SEQ ID NO: 10561 - DNA, 304 bp, Glycine max
  Clone ID: jC-gmle01810047f09d1
aagaaaaaaagtcatttgcatataattaattgtccaccgttttccacatgaataatagagaaaagaaaagtacaaacacaaatattttgaagaaaaaaaaataaaaggaaaatatcgattgcttttaaatgcattagcaggtgccactcaatgatgaccaatcatcactagggtgcagaagaagcaacggtggtcttggtccacgattgtgtgattatcagaaaatcagaatcacttgatccgacggcatatagtgattccatcaccaaccgggagcatgcaaatctcgatcctggggttcaca

SEQ ID NO: 10562 - DNA, 436 bp, Glycine max
  Clone ID: jC-gmle01810047f10a1
gtttgagcacacgagaattcagtgggcatgtcaatggcaaaaaaacctgtgaaatactctctggttgacgcgtatactgagtcagtgttcaaaggaaaccctgcagcagtgtgtttcttagaagagaagagggacaaaaagtggttgcaaggagtagctgcagagttcaatctatctgcgacatgttacttaactcgcatcaccgagtcccatggaacaacctcttatgctcgatttgatctcagatggttcactcctgttagtgagattaacctttggggacatgcgatcttagctgctgcgcacacaatattttcatctggtttggtggacaccgatgtagtcgaatttgtggctatatctggaatattgactgccaaaaagatcccagcgatcaatatcactagtgccttagacttgcataagggtgaagctc

SEQ ID NO: 10563 - DNA, 530 bp, Glycine max
  Clone ID: jC-gmle01810047f10d1
ggcattgatttgaactgatgagaccagacgcagggcctgcaaactaaagcactgacctgaccatcttattcaaatcaacaagtattattattataccatgtttgtggacatcaaacactgaaacacataatgctcggaggttgcctattttatgtgataaaataaagtgtcgtaacacttcagaatttcagttacaattctagtcatctgaaacatactttgatgcaataatataatctgcaatgctaagaacaggactagaccagaacacacccttccatcactttaacagccttcccacgcaaaagcaccctttggttctgctcatcaagatgaacattgagaactccccctctggctgatgcctgataagctttgaaatcacacttccctagcttcttgctccaagagggtgccaatgcacaatgtgcacccccacaaacaggatcctcattgactccaagttttgggcagaagaatcgactacagaagtcaaattctgagcctggaggagcaatccccgtaacaat

SEQ ID NO: 10564 - DNA, 547 bp, Glycine max
  Clone ID: jC-gmle01810047f11a1
gtgtgtgatcacattgtttccctctatcgtcttctccctccttgttcaatggtcttagggtttccggtgtccatgcgtagaagctagcaataatgcgtttttgaaacccgtattcatctgtatccaacgatttactagaaggagatcgcaatttctccatcttctcgtttcggtggctcgtgaaatcgaaagttatcgaaactttcgcgcgacacgaagtattgggaaccaagcaaaatttctatggctgacgaaccactatatccaatagcagtgcttatagatgagttgaaaaatgatgacatccagctgcggttaaactcaattcgcaggctatcaacaattgcgcgtgctcttggggaggagcgaacccgtcgagaattaattccatttttgagtgaaaataatgacgatgatgatgaagtacttcttgcaatggcagaagagttgggagtgttcattccttatgttgggggagtggaacatgctagtgtgttgctgccaccgctggagacactttgcactgttgaggaaacctgtgtgagag

SEQ ID NO: 10565 - DNA, 529 bp, Glycine max
  unsure at all n locations
  Clone ID: jC-gmle01810047f11d1
aatgggaactaaatcacatcaatggtcaatgactagtagttactcacaaataaataaccattcagctataattgaaaagcactaaacataaatatgcagtattatttatggtagttggaaatattagcatctcttccgacgtcttcaacctaattaattgcgtgtggaaccatttctgcctagctagacatcatgacatgatcaattgcctgcagtgcttggttggagaaaaatcgcacgtcaacatcgggatcctcactgagctcaaccagacatggacgaatagtcttctccaccacagactgatcaacgatggggaagatggactctaatacctttgccacattgaactttatgttgggcactctgtcttttgatgcagcaacaacaactggtaacaagtttgaacaagtgatttcagggcccatcacaggagcaagcagagagatagcacgaagaatagtcatccgatacaaatagtgtgggttgttgttcatctncaaaacctgaggaattatgtgctgcatag

SEQ ID NO: 10566 - DNA, 430 bp, Glycine max
  Clone ID: jC-gmle01810047f12a1
gtgtgtgatcacattgtttccctctatcgtcttctccctccttgttcaatggtcttagggtttccggtgtccatgcgtagaagctagcaataatgcgtttttgaaacccgtattcatctgtatccaacgatttactagaaggagatcgcaatttctccatcttctcgtttcggtggctcgtgaaatcgaaagttatcgaaactttcgcgcgacacgaagtattgggaaccaagcaaaatttctatggctgacgaaccactatatccaatagcagtgcttatagatgagttgaaaaatgatgacatccagctgcggataaactcaattcgcaggctatcaacaattgcgcgtgctcttggtgaggagcgaacccgtcgagaattaattccatttttgagtgaaaataatgacgatgatgatgaagtacttc

SEQ ID NO: 10567 - DNA, 471 bp, Glycine max
  Clone ID: jC-gmle01810047f12d1
aatgggaactaaatcacatcaatggtcaatgactagtagttactcacaaataaataaccattcagctataattgaaaagcactaaacataaatatgcagtattatttatggtagttggaaatattagcatctcttccgacgtcttcaacctaattaattgcgtgtggaaccatttctgcctagctagacatcatgacatgatcaattgcctgcagtgcttggttggagaaaaatcgcacgtcaacatcgggatcctcactgagctcaaccagacatggacgaatagtcttctccaccacagactgatcaacgatggggaagatggactctaatacctttgccacattgaactttatgttgggcactctgtcttttgatgcagcaacaacaactggtaacaagtttgaacaagtgatttcagggcccatcacaggagcaagcagagagatagcacgaagaatagtcatccga

SEQ ID NO: 10568 - DNA, 498 bp, Glycine max
  Clone ID: jC-gmle01810047g01a1
aaaagccttagccttccctacaacttcaaacacaaagacatcatcatccatggctgcctccgggtccactgtcggagctgtcaacagagctcttttgaacctgaatggttctggagctggagcttcagctcccagttcagccttctttgggaccagcttgaagaaggttattgcctcaagggtccccaacagcaaggtttccggtggaagcttcaagattgttgctgtagaagagaagaaagagattgaagagacccagcagaccgacaaggacagatggaagggtcttgcctatgatatctcacacgaccaacaagacatcacaagaggaaagggtttggttgactcccttttccaagctccacaggatgctggaactcactatgcagtcatgagctcctacgagtacctcagcactggacttcgccagtacttggacaacaaaatggatggattctacattgctccagcttttatggacaagcttgttgttcacat

SEQ ID NO: 10569 - DNA, 525 bp, Glycine max
  unsure at all n locations
  Clone ID: jC-gmle01810047g01d1
cgaaatgaatcgatcccatncgaaancnnnnnnnnnntnnnnnnnnnnnnnnnnnnnnnnnnnnnnnnnnnnnnnnnnnnnnnnntttttntttttttntttttntntnntttttttgggttggtggtntttttttttntttgtttttttttttttttttttnttnnnnttttttgctcttggattagtacaacaaccttcacgaacagaaatatttacttgccaagtttgctttgcctccaattcaagactggaagaaagttcccctctgaatagcatcctcgttagcatttccaagagcagcctcgttcaagtacttgtcagccaattggactctcttgacattctcttgttcttggacaagcatgttaccatacagcaagagcttctccagagtcatcttgggctgctcaaaagttggaggtccatcttttgagttcacaagcttcttcccaacactgtcaacaccaacaccagaaatccacttcctcacttcatcatcatatactctggccctcagtgcac

SEQ ID NO: 10570 - DNA, 435 bp, Glycine max
  Clone ID: jC-gmle01810047g02a1
ttgtacttgtatatacatattttgttccgcctttgtaaatacaattgggacactactaggattgggaagaagggtctttacatttttagtttggcaaatacatattgcaactacctttgtataaaacttatttctgaagaagctattacaactttcaagggatgatagcattttgtggcataaggattaaggaggcataaaggaccaattgctttggaatattcactcatgacaaggcacagagtcatgcgtgttttccaacacataagaatgatgtgtgtttttattcaaaaggcaactggcagagcgggttttcccttggcactttagaatcattatcttggaagaatttatcacgtcaaagttattggataatattaacggcgacattgggtttattattcgaaaaatattgggactcaactatgctttggt

SEQ ID NO: 10571 - DNA, 141 bp, Glycine max
  Clone ID: jC-gmle01810047g02d1
ctgaataaaaacacacatcattactatgtgttggcatacacgcatgaccttgtgccttgtcatgagtgaatattccaaagcaattggtcctttatgcctccttaatccttatgccacaaaatgctatcatcccttgaaagg

SEQ ID NO: 10572 - DNA, 392 bp, Glycine max
  unsure at all n locations
  Clone ID: jC-gmle01810047g03a1
gaggagatagaccccagaagtggtttctgcagctgcaattcaatcttgtacagcaagcgtaagccccttccactccctgccaacaacgccttagacgtcaccaccttgatctcctcccgcgcccagccgggccaccacagcacttagttgacgccgccatcgcccgcctnctcacctacacccagctgtggcggtccgaggagggcgtggcaacctctctctccgtggacatggggatccgaaagggcaacgtggtcctcatcctctcccccaactgcatccacttcccgcgatgtgagcctggccgtgatgttcctcggtgccatcattaccaccaccaaccatgttaacaccacccgcgaaatagacaagcagatcggcgaatccaagcc

SEQ ID NO: 10573 - DNA, 231 bp, Glycine max
  Clone ID: jC-gmle01810047g03d1
tacagcaaaaaaggagctaaagattatttcctcacttgtccaactccgatagaaaaaatatattacgaaaaagctcatctattcagagtttagacgttgcgagtttgatgagatccttccgaagaattttgccagatggatttttgggtatggaggaaataaatgccacttttcgaatccgcttgtacggagccacctgtatgaagtgtaacccacggaatggtcaatatt

SEQ ID NO: 10574 - DNA, 487 bp, Glycine max
  Clone ID: jC-gmle01810047g04a1
gcaaactagtgacagaaaaaaaatggttggtgactaaatagaaaaaaataaaagaagaacacaatcaaagcattaagagagaggaagaatgcaaatggcaattttgttaaaaggaggagcacttggatgattctaggcttcgtttgtgatcattaacatcaacttcttctttgcatgtctcccaaaatggtgccatacccacctcatcatcatcaccaatactacccttgattgcaagtaaatttaaaacggccagcagaaacagaattacctgctctgccgttcaagaatcatctcctagcacagcagctactactgctgaaacaaaggaggaggtaaaggaagccccaaaagccgcagcaccagcaaagaaaccttctgctaaagctccagctaagcctctgcctcaaatgatggaagaggatgtgatcccttcactgaaagcaatatttgaagcccaagaagatttctaaatattgagctggtc

SEQ ID NO: 10575 - DNA, 478 bp, Glycine max
  unsure at all n locations
  Clone ID: jC-gmle01810047g04d1
caaaatgagacggataccccatncggaannccnnnnnnnnnnnnnnnnnnnnnnnnnnnnnnnnnnnnnnnnnnnnnnnnnnnnnnnnnnnnnntttnnntttttnnnnnnnnnntntttnttttttttgggtgttttttnttttttttttttttttttttttttttttttttttttgttttttgtttttttttttggtgacccgagaataattccatttttaaggcactaatctttccatacagcaataaccccctttccttccaaacttttttcaacccaaaaaataatttccctttcaaggaactttttttcatcaaccaaaaatttctcaacggcccttcctctctacttataccatcacaaaaaaaaccccttttgaccaataaggtttcctctgggaaaaaacccccaaaattaatatgggttacctttcttcaaaaactaaccttccaacttattttcctttaaaaccaac

SEQ ID NO: 10576 - DNA, 490 bp, Glycine max
  Clone ID: jC-gmle01810047g05a1
gtttctaccttcaatgctgcctttcaaatgcctctcctccaacgcatcaatggccttgttgcggagcttgacaacatggttaaattggcagagaagtgcaacattcaggttcctatggaggcttgtaattttaattgatgatggaaagaatccacacgagtttaccaaagatgttataaatagcgtgattgtaaagaatcagatcaccaaaggaaaaactgatgctttaaagagtttgcgcaaacatcttttggaggaattggagcataacttccctgatgaggttgaaacttttagagagagtcgtgctgctgcagctgctgagttgaaacgtcaggcacaggcacaaagcgcactgccaaatggagatgtaagggttaaatcaaagattgagtgataggcatatttcttgtgcctttaacgttgatgtatacgttgtatagcgcacttcagcactgttccttgaatctgcatcttggttaaatgttgt

SEQ ID NO: 10577 - DNA, 579 bp, Glycine max
  unsure at all n locations
  Clone ID: jC-gmle01810047g05d1
cgagagtgatattgattccaatnncnannnncnnnnnnnnnnnnnnnnnnnnnnnnnnnnnnnnnnnnnnnnnnnnnnnnnnnnnnnnnnnnnnnnnnnnnnnnnnnnntnnnnnnnnnnnnnnnnnnnnnnnnnnnnnnnggnnnnnnnnnnnnnnnnnnnnnnnnnnnnnnnnnnnnnnnnnnnnnnnnnnncngnnctatacaacgnatacataaacgttagaaggcacaagaaatatgcctatcactcaatgctctgatttaacccttacatctccatttggcagtgcgctttgtgcctgtgcctgacgtttcaactcagcagctgcagcagcacgactctctctaaaagtttcaacctcatcagggaagttatgctccaattcctccaaaagatgtttgcgcaaactctttaaagcatcagtttttcctttggtgatctgattctttacaatacagctatttataacatctttggtaaactcgtctggattctttccatcatcaattaaattgacaacctccataagaacctgaatgttgcacttctctgccaatttaaccatgttgtcaagct

SEQ ID NO: 10578 - DNA, 484 bp, Glycine max
  Clone ID: jC-gmle01810047g06a1
gaacacacttcttataatgacatcaaatgttggaagcagtgtgattgagaaaggaggccgcaaaattggatttgatctggattacgatgagaaggatagcagttataacagaatcaagagcctggtaactgaggagctaaaacaatacttcaggccagaatttttgaatagattggatgaaatgattgtcttcaggcagctcacaaaactggaggtgaaggagattgctgacataatgctcaaagaggtgtttgatagactgaaggtgaaagatattgaacttcaagtgacagaaagattcagggacagagtggtggaggaaggttataaccctagttatggagctagacctctaagaagagccataatgcgacttttggaggacagcatggctgagaagatgcttgccagagagatcaaggaaggcgactctgttatagtggatgtcgattctgatggtaatgtgattgtgctcaatggtagc

SEQ ID NO: 10579 - DNA, 454 bp, Glycine max
  Clone ID: jC-gmle01810047g06d1
gccttcgttctttttttttttttttgttgatagatgaggcctgccaggaattccattaaaaactttaggaacattgacaggcaaaacatactatgactatggtttaaacaaattatgttcattggattagcgaattaaccgtgttatacaggaagcgtatgtggcgaggattagggggctgcgatgttcccattgagcacaatgacattaccatcagaatcaaggttcactataacagagtccgcctccttgatctctctggcaagcatattgtaaaccatgctgcactgcaaaaggagaattatgggtgttcttagaggtctagcttcataactagggttataaccattctgcaccactctgtacatgaatgtttgtgtagcttgaagagcaatttgtttcacatgaagtctatcaaacagctgtatgagcattatgtcagcgatcttcttga

SEQ ID NO: 10580 - DNA, 516 bp, Glycine max
  Clone ID: jC-gmle01810047g07a1
gaaaaaatgaccaagatcttctttgtattgctgttatgtctgatcatagcagcttcttctgggtttgtgaattgctttgatgttgaaaagaaggaaaagattggaatatttgagctcaataaaggtgacctttctttgaaggtcaccaactggggtgcttcaattttgtccctggtgattcctgataagaatggaaagttgagtgatgttgttcttggatatgattctgttaaggattacactaatgatacaacatattttggagcaactgttggccgggttgctaacagaattggaggagctcagtttactctaaatggaatccattacaaattagttgctaatgagggaaacaatacacttcatggtggagccagaggatttagcgatgttctttggaaagtgaaaaggtatcaaaaagaaggtccaagtcccagcattaccttcagttaccacagtattgatggtgaacagggattcctggtgatctcctagttactgtgagctacattctaa

SEQ ID NO: 10581 - DNA, 440 bp, Glycine max
  Clone ID: jC-gmle01810047g07d1
cctaccacccaaaagagaagggattttattattaaatataattcacatatgtatcaaaaaagaattctgcattagaaatacagaatcaaaatatcaataaaaagcaacaaatccaaaccaaaaacatgtttagagaaacatcttgaaaggttctgaagctgccaccaattatgagactaaccatgggactctaattattcattctaaaaggaccccaagtttggatgaaatccaaagttataaatgctacactgacttaccggggcacattaaaaatgggggaaagctcactcctcctatctcactttgaactaatgtagggatttttggtggaaaacttaaaaagcatataatgcttgtaaggcttttctggtgtcacaattgttgaagggaaattaggctgattcactgaatcagggaaggcttgagactccaaacat

SEQ ID NO: 10582 - DNA, 548 bp, Glycine max
  unsure at all n locations
  Clone ID: jC-gmle01810047g08a1
ccacaattgtctccagctagtagctacttgtcttacgaccacttcaatagacaacctagtccagccagatcgaggaacactacaatggccatgattcctttgatgatgatgatactgctgttgctgtttaaatttccttctgtcgtacttgccacactcaaatctgatgaagccaacctcgagctagtattcacataccataaatgtaacgaagagctcggaaactttatcactgagacctactccaacaaccggaatgtccttctgtccaatatgtattctgacaaagaaattgagaatggcttctacaattcctcatacggcgaaggccctgacaaagtttacggtatcggcttctgcagaggagatgttaagccagataaatgccgtagttgcctggaaaagtcctcgacacttctcaccgatcgatgtccagtacagaaagaggcgattggatggtatgacctatgcatgttacgctactncaaccgctcaatagttgagcaaccagttactgatactgacgacatcatcaaatgtagcaacac

SEQ ID NO: 10583 - DNA, 330 bp, Glycine max
  Clone ID: jC-gmle01810047g08d1
aaaggccaaaaaaagaagggcttttatttgtttataggttaacaacaaagggggcccccccggaatttaaaaaacaaccccgttgggttccaaatagaaaagaattgatccccacaaaatcccggactgaaaaaaaaactggcttgggcaaagggctggggatttaaaacaggctttttattaaaaaaacccccgggggggttccgtcttggcaactccaaagggtggatttttaaaagttgttattttgttttaaaaataatttgctttttgcccaattgggttaaaaaaattttacccaggatttgggtcttctattgggcccttttt

SEQ ID NO: 10584 - DNA, 427 bp, Glycine max
  Clone ID: jC-gmle01810047g09a1
taattgaggaataaggtattagaatcaagaggatctattttgtcacttatgttgcggcgagtggagatagtttggaatctgggcttgtactggtctaacttggtgtatgatttcctggttggaagggatgaagaggttgttccgtatcgtgctcgacagcttaagaatctcttgtgtgatctgcggccttcctttattaaagctggtcaggttcttgcaaataggccagatatcattcgagaagattatatgaatgaactgtgcattcttcaagatgatgttccttcatttaccaatcaaattgccttgagaatcatagaggaggatctgggtcaaccccttgaagctgtttacagcaagatctgatcagggacaatagcagctgcaagtataatgcaagtttacagagctacattacgtgcatctg

SEQ ID NO: 10585 - DNA, 204 bp, Glycine max
  Clone ID: jC-gmle01810047g09d1
aaacataagaaagaatatatgaagacagtccagtatgaaagaatatagtaaaatcatctcaaacttggcatcttctctttgcacctaagacattgagaattctaagaatgttacacgcaagtcccatcacaacttctagcacttggatcagcacaaccttcaggaacagaaatatttacttgccaagtttgctttgcctccaat

SEQ ID NO: 10586 - DNA, 513 bp, Glycine max
  unsure at all n locations
  Clone ID: jC-gmle01810047g10a1
acagcaacaataacaatggcagcctcactacaagctgcagctaccttcatgcaacccaccaaggtgggcatggccactcgcaacctcaaatctacacaatgcatttctaaggcttttggcttggaacccgctgcagctaaactcatttgctcccttaagcccgatctcaaagattttgctcaaaaatgtgtcgacgccaccaaaattgcaggattcgcccttgccacctcagctctcgttgtttctggagcgagtgcagaaggtgttccaaagaggctaaccttcgacgaaatccagagcaagacatacttggaagtgaagggaactggaactgctaatcagtgcccaaccattgaaggtggagtggactcatttgccttcaaggcagggaaatacaaggcccagatgttgtgcctggaaccaacttncttcaccgtgaaggcagagggtgtggtcaagaatgccccgctcgaatttcagaacaccaagctcatgactcggctgacctacacc

SEQ ID NO: 10587 - DNA, 147 bp, Glycine max
  Clone ID: jC-gmle01810047g10d1
gctccaaaaggtaactcagacattttaattttaagcattataatcgaagtcattataatatacacacatgataacgctctgagtgcttcgccaactggggtcacaagaccgtggatggagttacaagaaagtagagttacaacatta

SEQ ID NO: 10588 - DNA, 397 bp, Glycine max
  Clone ID: jC-gmle01810047g11a1
gacaaaagcattcattgtcatggctcacataggctaattgttccagatgtaccattctactaggctgacagattaattggatagatcgaatggtatcggcaaggatggagccttacacacatgcttgattcagtattggattcaccctgctacagagtttgtcacactacataatctggagacagcaaagatgctccggatactgtgcactgctatgtctagtatacatgtcagtcgtactagttgagcatgcgaggacttggcgactggatacaacgatgcacgacggcttgcctagttaatctcaacagcccgatgtggactctaacgctgagggacaagtcacagtactgacatcggtatgctagtctaggaccgtgatactgctgactgacac

SEQ ID NO: 10589 - DNA, 474 bp, Glycine max
  Clone ID: jC-gmle01810047g11d1
agggggaaaactgattttattggacaaaacatgcttacaaaaatatgatttataataaaggtcaatggatcttgaaattacaaagcatttgccatcaaccagaaatcctctcctgactgtgaaatacaagtatttacatcctaataacgaaaggatagagcaattctatgatatctagcaagctataagaacaaatgcatagatgtatttacaactaagagaaaccataacttatctctatcaaggaacagaatatttttttggctgcattcatgggcacaatgtacaatagtaactgaaacttcatgttcttcacaaccttacctgtatttgatatcctcgtttcctaaccatgaaccattttaggacattgcatacctttctacatctgctctgtgcaccaccattggccgtaagacgtgccagcctgaagctatcaatagcaccctgtaaatcttgttgaacgtgagattg

SEQ ID NO: 10590 - DNA, 576 bp, Glycine max
  unsure at all n locations
  Clone ID: jC-gmle01810047g12a1
tggaagccgagccgccacacactcacacaacactctctctttccgtgtaaccccttcaatggtctctcaacactgttgaaatttgacccatgcagaccatgctacgagcaaagcagatcactgcactttctagcagtgctaggacttttctcattggtggttcgcgttgtaatgcagcagatggtagttcatgctctagcactgaggatgaaatntgtgtttctagacgacagcatataaaaaatcatgttttacctgcacagaagccatcctccctagcatccaaagctacttctgaggtggatgaaacattggtttcagaaaactcagtaaatgggccagcttgctgcaaggctaagggtgttgaccaatctagctgtattcagcatatcaggtctgcttcaagtccggcatgtaaatcagattctgtaacatatgcttgtgatattgatggtgttcaggaacatgttgagcacttgtctgctctcaattctgaccagttatacagggccagtattgcagctataaattgtctttctgatttagctaaatataagttttctttatcaaatggaa

SEQ ID NO: 10591 - DNA, 340 bp, Glycine max
  Clone ID: jC-gmle01810047g12d1
cttcaaaattcacattcctcagtgtattcttgtaaaaggggattactgtaaagttaaaaaggaaagaagtaattttgaacaaattacatcagggtaatttgctctttcgtttatatttacaaataataatataatatagaaagcatagactatcatagaggattcgttgttattttttgaggaacaaggaatttagaggtatgggatgatagccaactacagtaaatgcatcctttccacataagagtggttcaaccattggcaaagaggctccccacatcccacaaaacaccctgaatttcccttttcagccaaaaatgggaaactgaatgtgtgcaac

SEQ ID NO: 10592 - DNA, 306 bp, Glycine max
  Clone ID: jC-gmle01810047h01a1
cggctcgagcggctcgagcagaagcagaagcaaagggaaatggattcagagccaccatgaactaaacattgattcattctataatatagaagccaagaatcggtcgagttcaaatttatcaaatgaagaattggtaactcaataatctgatcttgttaagttatatagaaaattttcatatagatactattctttatatggcatcaattgtatcagctaccactctcctatatctattttttgttgttgttggtgtgtaatatccaagtgaattcatgtgagaaatgaaagttttaattccgacag

SEQ ID NO: 10593 - DNA, 382 bp, Glycine max
  unsure at all n locations
  Clone ID: jC-gmle01810047h01d1
tgaatgactccattcgnatncnnnnnccnnnnnnnnnnnnnnnnnnnnnnnnnnnnnnnnnnnnnnnnnnnnnnnnnnnnnnnnnnnntttnnnnnnnnnnnnnnnnnnnnnnnnnnnnggnnngggggnnnnnnnnnnnnnnnnnnnnnnnnnngngngngggngngggnccgnnggnggcccttttaagaatagtatctatatgaaaattttctatataacttaacaagatcagattattgagttaccaattcttcatttgataaatttgaactcgaccgattcttggcttctatattatagaatgaatcaatgtttagttgatggtggctctgaatccatttccctttgcttctgcttctgctcgagccgctcgagccg

SEQ ID NO: 10594 - DNA, 339 bp, Glycine max
  unsure at all n locations
  Clone ID: jC-gmle01810047h02a1
caaagtttgagtttaccaccaacacatatttcttacaataggataatggggaagctcgattccagttttgtgggcttttggctctatcaacccacaaatttctcctcattcgggccataggaatccttcgcttcttcccactcccagacacaatatgcaaacagcgttgaatctgtagcaggagctgatactattgactattaatctttaaccactgaagagtgggagaagacgctcacaaatgaacagttctatgattactcgcanaaagggacttggagagctttcactggggagtactggaatactaaaacccccgggatttaccatttgctatgt

SEQ ID NO: 10595 - DNA, 351 bp, Glycine max
  Clone ID: jC-gmle01810047h02d1
aggaaaaacagcacaaagtatatcacatatttagaatattataccatctgcttccgagtgataggtaggtatttcactgtctactgctttggtttgagcttaagggcagcactattgatacagaaacgttttcccgtgggtggaggaccatcgtcaaacacatgtccaagatgagcatcacaaacagcacagagaacctcctggcgcggcatgaaaataattgacaaatccaactttgatttcacatttttcccaattgtctggtaataggatggccacccagttccactattgaacttagtagatgattcgaataaaggtgtgtcgcaacatatgcaatggtaaatcccc

SEQ ID NO: 10596 - DNA, 337 bp, Glycine max
  Clone ID: jC-gmle01810047h03a1
aactggactgacaactgaagtcaagtttgtggagatgcaccatgaatgtgttacagaggcacatactgaaggcaatgtgggattcaatgtttagaatgttgatcgaaatgattagaagcggggctatgtgggactaaaactcacaggatgaccctgcaaaggagggtggtacctgcacagcccaagtaatgatcatgaaccaccctgagtagattggaaatggatatgcgcttgttctcgactgccacactgtgtacattgttgtgaagattgctgaactcatgaccaatagttgactgcgatccggtttagagcttgagaaggaactctcattttt

SEQ ID NO: 10597 - DNA, 331 bp, Glycine max
  Clone ID: jC-gmle01810047h03d1
caattttgccaccgtcgatcaagaacccagttctgggaacaacagttgcgagatgatggtggagacttcaaactttgtccgaaaaacaagctacctagaaaagaagacacaagagtacagaaaagaaaccaacatttattgtaaccaacatcccctgatgaaccagcccgcacgattcacttcttcttctgggcagccttggtgaccttggctccggtaggatccttcttctcaacgttcttgatgactcccacagcaacagtttgacgcatgtccctaacagcaaacctaccaagtggaggatactcggagaaagtttcaacaaccatgg

SEQ ID NO: 10598 - DNA, 555 bp, Glycine max
  Clone ID: jC-gmle01810047h05a1
caacaaaggagttgtaaattaagagcatggctgcacaagctcttgtatcatcatcatcgcttaccttctcagccgaggctacaagacaaagtcttggaccaagatcactccaatctccatttggctttgtaaggaaaagcctcctttcttgctaaggcagctgctactccccctggcaagcaaggatcagacagacctttgtggtttgcatcaaagcaaagtctttcctacttggatggcagccttgcgggtgactatggatttgaccctctgggactttcggaccctgaaggaacaggagggttcattgagccgacatggctagcatatggtgagataatcaatggtcggtatgcaatgttgggagcagttggtgcaatagcacctgaaattctaggcaaggctggtctgatccctcaggagacagcactcccatggttcagaaccggtgtgttcccacctgcaggaacctacaactactgggcagactcctacacactgttcgtgtttgagatggcactgatgggatgttgccagcacagaagattcaagact

SEQ ID NO: 10599 - DNA, 519 bp, Glycine max
  unsure at all n locations
  Clone ID: jC-gmle01810047h05d1
aaaaactcaatcggaatccgnatncnnaaanncnnnnttnnnnnntttnnnnnnnnnnnnnnnnnnnnnnggnnnnnnnnnnaaaaannnnnaanannnaaaaaaaaaaaanaaaaaaaaaaattttttanaaaaanaaaaanaananaaaatannntattggggggatattttataataaaatnaatttatatttaataaaaaaatgtttttattattgaatagttccaaatagcaaatagaggatatagaaaggtggttcaactattgtaactcccaagcgaacaaaaaccaacaccaacagggtaaagaatatcatataatacattcagtggaacttgatactcgtcaatattttgtcttccacccggtcatccaaatgatctacgatgtttttgtattgcccaacacctgtgacaagagcttgaacaaactaacccaagattgccaacataaccaaccttccattcttcacttccttgaccttcaaatccttcaacgacttctcatccttaccaa

SEQ ID NO: 10600 - DNA, 607 bp, Glycine max
  unsure at all n locations
  Clone ID: jC-gmle01810047h06a1
caacaaaggagttgtaaattaagagcatggctgcacaagctcttgtatcatcatcatctcttaccttctcagccgaggctacaagacaaagtcttggaccaagatcactccaatctccatttggcttctcaagaaaagcctcctttcttggtaaggcagctgcttcttccccctgtaaggcaaggatcagacagacctttgtggattgcatcaaagcaaagtctttcctacttggatggcagccttccgggtgactatggatttgaccctctgggactttcggaccctgaaggaacaggagggttcattgagccgaaatggctagcatatggtgagataatcaatggtcgttatgcaatgttgggtgcaggtggtgcaatagcacctgaaattctaggcaaggctggtctgatccctcaggagacagcactcccatggttcagaaccggtgtgttcccacctgcaggaacctacaactactgtgcagacttctacacactgatcgtgtttgagatggcactgatgggatttgcagagcacagaagattgcaagactgggccaaaccangctctatgggcaaacaatactttctaggactagagaagg

SEQ ID NO: 10601 - DNA, 446 bp, Glycine max
  Clone ID: jC-gmle01810047h06d1
aacgagcaaaaagataaagatgtcgaatgtttctagttgttttacatgtcaattcttacagcggcgcaccaaggaacaaaatgtccagatgatggttgagttccaaagagcaaagagaggatatagaaaggtggttgagctttggtaactgcgaagcgaacaagaaccaagaccaagagggtaaagaatatgatataatacatttagtggaacttgagactggtcaagatgttgatgtgcacggggtcagccaaatgatctaggaggttttggtatgggccaacacctgtgacaagagcttgaacaaagtaacccaagattgccaacatagccaaccttccattcttcacttacttgagcttcaaatccttcaaggacttctcatgcttaccaaagccaagtgggttgaagaaaggctctcctgggtaagctggctcaccagaacc

SEQ ID NO: 10602 - DNA, 407 bp, Glycine max
  Clone ID: jC-gmle01810047h07a1
cttttgtgcatgtttgttctctcaacgactcctccgcgaacgagtattattcaatattttggttgggttgaatcccggggttgaagcgttgcagacatcacggctattctaagagtgtcttgctgccttattcatgttccaactggacgactgatgaccggtagttgcgcatctgccgcagcccttcgccgcacggcgggcgtcgtgctttgccttctgaaggtggcagtccttcatacttgctcttcctcgctggaggaggcttcttctactcgcttcactcttttcattactttgagcctgcatggtcttaaataagacatgctaaacagcgactgtgggactaggtaagatcaccgctggttcctcgtcttcttcttctggttcttctacttcgacgacgactt

SEQ ID NO: 10603 - DNA, 362 bp, Glycine max
  unsure at all n locations
  Clone ID: jC-gmle01810047h07d1
tttgtttttttttttttttttttttttagaacaaacagataactgaatttattatttgggagagtcaaggcaagctttatggggcattataccccaaaacaccaacaacagttctcaggtgaggaggaattacattgtactttcacatgaacgcgtcttaaaggcagataaaagcaaatacatacaacacaggaccttnaggttcaagcacagaacaatactatgtgacttagacggagacgcaattcagcaattattgttaaagcactacggatttgctgaatttgctcataaattgggagccttgtttgtggagaatcacgcattcttggggaccggttaccaccgcaggaggccgttcc

SEQ ID NO: 10604 - DNA, 520 bp, Glycine max
  Clone ID: jC-gmle01810047h08a1
cttttctgcatgtttgttctctcaacgactcctccgcgaaagagtattattcaatattttggttgggttgaatcccggggttgaagcgttgcagacatcacggctattctaagagtgtctcgctccctcattcatgtccgatctgtacgacggaggacgggtagttgcgtaactgccgttaacccttcgccgcacggtgggcgtggtgctttgccttctgaaggtggtagcccttcagacttgctcttcctcgctggtggtggtttcttctagtttcttcactcttttcattacttttagcctgcatagttttaaataagaaaaaaaaaacagcgactttgtgactagttaagatcaccgtttcttcttcttcttcttcttcttcttcttctactactactactactacttttcctccacaaaatgatgctcagaatcaagagggttcccactgtcgtttccaactaccaaaaagacgacgctgcagactctcctcgtcccgtcggaggttgtggtcgga

SEQ ID NO: 10605 - DNA, 481 bp, Glycine max
  Clone ID: jC-gmle01810047h08d1
agaacaaacagataactgaatttattatttctcagagtcaagtcaagcattatgatacatcataccccaaaacaccaacaacagtactcaggtgagcagttattacatcgtactttcacatgaacgcgtcataaaggcagataaaagcaaatacatacaacacaggaccttaaggctcaagcacagcacaatactatgtgacttaaacggggacacaattcagcaattattcttaaagcactacggatttgctgaatttgttcataattttagagccttgttagtgtagaatcacacattcttgtgaaccagctaccaccacagtagggtgttcgcttgtgctgactgcatcaacttctttgacactttcaacgttgacatcctccaattcaccacagccaatggcttcaaaaataagatcattgacttcttgaaacctctcttgagagagggacacctctgcaagaagccttcaagcatt

SEQ ID NO: 10606 - DNA, 517 bp, Glycine max
  Clone ID: jC-gmle01810047h09a1
acagcaacaataacaatggcagcctcactacaagctgcagctaccttcatgcaacccaccaaggtgggcatggccactcgcaacctcaaatctacacaatgcatttctaaggcttttggcttggaacccgctgcagctaaactcatttgctcccttaagcccgatctcaaagattttgctcaaaaatgtgtcgacgccaccaaaattgcaggattcgcccttgccacctcagctctcgttgtttctggagcgagtgcagaaggtgttccaaagaggctaaccttcgacgaaatccagagcaagacatacttggaagtgaagggaactggaactgctaatcagtgcccaaccattgaaggtggagtggactcatttgccttcaaggcagggaaatacaaggcccagaagttgtgcctggaaccaacttccttcacggtgaaggcagagggtgtggccaagaatgccccgctcgaatttcagaacaccaagctcatgactcgtctgacctacaccctgg

SEQ ID NO: 10607 - DNA, 536 bp, Glycine max
  Clone ID: jC-gmle01810047h09d1
gctccaaaaggtaactcagacattttaattttaagcattataatcgaagtcattataatatacacacatgataacgctctgagtgcttcgccaactggggtcacaagaccgtggatggagttacaagaaagtagagttacaacattaagaaaaggtctatgagtcaagctgagcataccagatgccttgaatcttaacatccttaggagctttagcccccaaatcagtatcagaaggctgaacactctcgaacaccccaataacctcaccagtctcaggcttggacttggtgacactcaaggtgattttccctttggaagatgaagcacttttattgttctccttggcaagatcctcttcatctcctcttccaccagcaggcaaagcaacagcattgtcataaccagttgaggcaccccttcccttggggtccaagaaagaggaaccacggtaagacggcactaggaactccccactgaagctgtctggtttcccagatgccaccaactgcttaatggtgaagaggaatggcacac

SEQ ID NO: 10608 - DNA, 353 bp, Glycine max
  Clone ID: jC-gmle01810047h10a1
gagactgtcagcttcgcaccgtcatgaacgccattgcaactgctgcacttctctctctccctttctccttctccaaatcatccaagcttgacaccaaaaaggtctaacatactttaaatcacaccaagttgtgcttaagggttgagaattgttcttgttctttgttttatgcagcctttcttttttggtttgaaaggaaggtttagagtgtttgctgtatatggagaagagatagataagaagagtacatggagtgcgctctttgatgtggaggatccaagatccaaagtgccgcagtataaagggaagttcttggatgtataatcagcccttgaatttgcatgatatgatat

SEQ ID NO: 10609 - DNA, 471 bp, Glycine max
  Clone ID: jC-gmle01810047h10d1
ctgaattatcaatatttcattgagctaagatggtaatgccataatacaagaaacgccagttttaaggcgcgatcgaggttaagccaccagttgagatggaaaaagtggggtaaaaaatggacttgatcctgtacacaaataataaaagctaagtgtacagagggtgccatttttacaaggggcttgaataagaggagacaacctctgatcacttttttagtttcctccgcatgaagaatgctctgaaagaaccaaggaaaggcaacgtgtggattagcctagtgcaagggtgtcttctgagtggcttttagttaataaaagttggttccaagactctgagataaaaagtatttgaatctttatcatttgctgaagggtggttgcttagttccttgctccaaggcatttcccatagtctgtaccttaccccaagcttgtcataggatactgggaaattcacacatttgcacc

SEQ ID NO: 10610 - DNA, 525 bp, Glycine max
  Clone ID: jC-gmle01810047h11a1
gtggatcctgagattgctgatattattgagcttgagaaagctcggcaatggaaggggctagaattgataccgtcagagaatttcacctctgtgtctgagatgcaagcggttggatcggttatgaccaacagatacagtgaggggtaccctggtgcaagatattatggtggaaatgagtatattgacatggctgaaacactgtgccaaaagcgtgccctagaagcttttagattggatcccgctaaatggggagtgaacgtgcagcctctgtcagggtctcctgcaaatttccacgtttacactgcattgcttaaacctgatgatagaatcatggcacttgatcttgctcatggtggccatctttcacacggatatcagactgatgccgaacagatatctgcaggctcgatattttttgagacaatgccatgtcgattgaatgaaagtgcacgatacatctactatgaccagatggtgaaatctggtacactcttcaggccaaaattaattgctgatggagctagc

SEQ ID NO: 10611 - DNA, 432 bp, Glycine max
  Clone ID: jC-gmle01810047h11d1
aagaaatatcattgaggtaaaataattcacatcagcatccagcaggattctatgcaattgaggaggctagttgaatttatagcagatacaaccacttacgatcgagtgtaaccccattataggggataggttcaacaatcatttgattaagaaatttggtattcgaagcctttattacatatgcatctatacatttcaacataacgatcaagattttctggattcttacatataaaggcttttgacattggttttaaaatatgttgccgtgctctaccatggatcaggaaaactgatcttgttgaattgcttgccattaagaccatgggatgacctaatggaaaattttcttttctcaagactcgtgcttcatggatgctttatcaaaaccaatggccggaaaatgttttgcatactcctcaacatcaaggc

SEQ ID NO: 10612 - DNA, 503 bp, Glycine max
  Clone ID: jC-gmle01810047h12a1
tccaattgaaattttaaaaatgactgggataaacttaacaattcaattattgaaattgaataagtaaacaatttaattggattggtcgaatggtatcaaaaaaatggagtactaactcccatttcttatttattattgaattaaccgatcaacttgctttgttatcgaacatttctttttgatttcaaaaattttccggaaaaaatttgaatctatttttatatgcgaatcaatcctactacttctggtcctgaggtttctgcgcttgaaaaaaaacatctgggacgtatcgtccaaataattggtccggtactagatgtatcttttcccccaggtaagatgcctaatatttacaacgctctgatagttaagggtcgagatactgttggtcaacaaattaatgtgacttgtgaagtacaggaattattatgaaataatcgaattagagctgtagctatgagtgcgacagaaggtctaatgagaggaatggaagtgattgacac

SEQ ID NO: 10613 - DNA, 226 bp, Glycine max
  Clone ID: jC-gmle01810047h12d1
gttgttaaatatttttttttattcagggcattccggatttaggaccccaggaattggtatgaaactcataggatggcctctacactggttctagcgaggaaggaaagctaaatttgcccagggaggctggttgttgccgaacgccttattgaaataaaaaactgccatttcaagagttaggggggggtcctggggggaaaagaaactaaccgtcggcggggtactt

SEQ ID NO: 10614 - DNA, 544 bp, Glycine max
  Clone ID: jC-gmle01810048a01a1
tgaagttaaaagccttagccttccctacaactccaaacacaaagacatcatcatccatggctgcctccgtctccactgtcggagctgtcaacagagctcttttgaacctgaatggttctggagctggagcttcagctcccagttcagccttctttgggaccagcttgaagaaggttattgcctcaagggtccccaacagcaaggtttccggtggaagcttcaagattgttgctgtagaagagaagaaagagattgaagagacccagcagaccgacaaggacagatggaagggtcttgcctatgatatctcagacgaccaacaagacatcacaagaggaaagggtttggttgactcccttttccaagctccacaggatgctggaactcactatgcagtcatgagctcctacgagtacctcagcactggacttcgccagtacttggacaacaaaatggatggattctacattgctccagcttttatggacaagcttgttgatcacatcttcaagacttcatgaccctgcccaacataaggttcctc

SEQ ID NO: 10615 - DNA, 515 bp, Glycine max; identical to SEQ ID NO: 5900
  Clone ID: jC-gmle01810048a01d1

SEQ ID NO: 10616 - DNA, 448 bp, Glycine max
  Clone ID: jC-gmle01810048a02a1
gcacatgaaccctggggcacttcttatgctcaggagtgctcatggggcaagggcttttctctaccctgtggttgagccttgtgattttcgaggttttgaggttctctctgtgttccacccctccgatgaggtcatcaactcggttgtcatagcacgtaaattatatcactctcttgagcaaggccttgttggctctatgatcctacctaacaagtgttccgagattcaagccttcaaccctctcaaccatggcaacatgattgaggaattggccgttgaggagcaactcttgtgaattattgcttcttttttttttttatctatctctactccgtctcatgctttagatgggagattattattggggtcatgtgcggtaccaacttattatgtaggttacataatatttccacttaattgtgtccgactgttttgcatcacatcgagt

SEQ ID NO: 10617 - DNA, 224 bp, Glycine max
  Clone ID: jC-gmle01810048a02d1
aacagcacagtgtaaaacacttaagctttactcgatgtgatacaaaacagtcggacacaattaagtggaaatattatgtaaactacataataagttggtaccgcacatgaccccaataataatctcccatctaaagcatgagacggagtagagatagataaaaaaaaaaaagaagcaataattcacaagagttgctcctcaacggccaattcctcaatcatgtt

SEQ ID NO: 10618 - DNA, 459 bp, Glycine max
  unsure at all n locations
  Clone ID: jC-gmle01810048a03a1
ctttcgtcgttttggggggctttgaaagagtgtcatggtcatggagggaagaatctgcgaggaattaaagcccaggtattatgctctttgtgccattggaggaatgctcagtgctggcaccacccatcttgccatcactccctttgatgtcttgaaagtcaacatgcaggtgcacccaattaagtattacagtatttcctcttgctttactagcttactgagggaacaagggccatctgttctttggaaaggttggaccggcaagttctttggatatggtgctcaaggaggatgcagatttggtctctatgagtattttaaagaggtttattccaatgtattggtagaccagaacaggagttttgttttctttcttagtagtgcgtctgctgaagtgtntgccaatgtagctctatgtccatntgaagctgttaaagtgagggttcaagcacaaccctg

SEQ ID NO: 10619 - DNA, 358 bp, Glycine max
  unsure at all n locations
  Clone ID: jC-gmle01810048a03d1
aaaaaaaaaaattttnnnaaaaaaaaaaaaaggggggaaaaaaaaaaggggggggggaacccgggggggggaaaaaaaaaaccgggggaaaaaagccaaaaaaaaaacgggggaaaaaaaagagaactttttggggggggggcaacaccaaaaggggggggccccaaaaaaaaaaaagggggggcccctcttttgggggaaaaaaaaaaaaagggggggcaaaaaaacccttaaaagagacaaaaaaaaaaaaaaaaggggggggggaaaaaaaaccccccaaaaaaatattgttttaaaaaaaaaaaaaggggggggagaaaaaaccccacaaaaaaagggggggaaaaaccccctt

SEQ ID NO: 10620 - DNA, 562 bp, Glycine max
  Clone ID: jC-gmle01810048a04a1
cgcgaagcgtgagaagcagtcgataaagaagctggagtcgtcgctgaagctctacgaggcgggcagcgcccccgcactggccattaaggcgagcgtggagaagacgaagaggaggttcgacaactacgcgaagcaggggttgctgtgcggcggcgatgggttgccgcacctgatcgtgagcggagaccagaggcactggggtgagttcatcacacccggaatactattcctgtacatctcgggatggatcggctgggtgggtcggagctacctgattgcgatcagggacgagaagaaacccaccatgaaggagatcatcatcgatgttcctctggcttctcgcttgctcttcaggggtttcagctggcccgttgctgcctacagagaactcatcaacggcgacctcattgccaaggatgtctagataagaaagggtggatggctacattggaggaaagcctggagaatttgtatgtggatgggatccttacgcgctcttttggaattactttttttataaatgtacatgatatgatgtaatctaatgcatgtgaaccacaat

SEQ ID NO: 10621 - DNA, 312 bp, Glycine max
  Clone ID: jC-gmle01810048a04d1
tttgtttttttttttttttttttttttttttttttttttatatttgtttttttttttttgtttttggttcaaggaatgaatccgatgaggaagcccggcacactacaacgaattgaagcaaaccacctggctataaagcactcacagaaaagaaccattgagggcctggcccaaaaatagtggaaactaccgcactcacgaggagcaataataaaatccattttagaaaacctatgtcaattgggacggcaacaaatgaagtactaactggtgataccccgaggatgcgacaaacgataacgatttgataca

SEQ ID NO: 10622 - DNA, 496 bp, Glycine max
  Clone ID: jC-gmle01810048a05a1
ctccagaaagccctgctgatgctacaagaaatctgtctcagcaaaatctaaatgcccttgttaaggttcttcctggtctacttggtggcagtgcagatcttgcctcttccaacatgaccttgttgaaatcatacggagatttccaaaagaatactcccgaagagcgcaatgttagatttggcgttagagaacatggaatgggagcaatctgtaatggtattgctcttcatagccccggattcattccatactgtgcaactttctttgtcttcactgactacatgagagctgccataaggatttctgcactgtgtgaagctggagttatttatgtgatgactcatgattcgattggacttggagaggatggaccaactcatcagccaatagagcacttggcaagcttcagggcaatgccaaacactttgatgcttcgtccagctgatggtaatgaaactgctggatcatacaaagttgctgtggttaacatgaagag

SEQ ID NO: 10623 - DNA, 301 bp, Glycine max
  Clone ID: jC-gmle01810048a05d1
ggtacaaattcatacaacttcattaattcaactcatcctttaatgtaagtggctcctctgactataatatgcaagaacaatctgatcttctttattggggctaaaagtgatatctcaaaaaacaaataatgtaatagtaacccaaagccaccaccagtgaaaaccacaagttctagatgagataaaacttaaaagaaagtcaacaaatagatctacgaaagttctttggcagcagcaataacagcttccttggtgataccaaactccttgtatatttttcctgctggagcacttgctccaa

SEQ ID NO: 10624 - DNA, 605 bp, Glycine max
  unsure at all n locations
  Clone ID: jC-gmle01810048a06a1
ctctttcgctggacaaaacccctttcgccggaaaacccaccgcaacctttgtggttcgcaactccgtttccggcttcaccgtgctcctcttacacgcagtatatatatatgtatgtatatggggaaaactaggtggttgataatattggttacctgtttatgcctgctttccttttctgatggcagagaactcaaggttaggcataaaaagcaacattaccaatacaatcatacagctgctacaatattagtggaatatgcttctgcggtgagttctatgggaattctgtatgttctaacttcaacctttaagatgtgtaggcagaggatttagaattgtttatgtgtattatttggtttctaatcttgggtcagtcatgaatttggaatttgggtttctgatgaaactttcgagtttcaactttcaacttcctctctctctctaaatggttttattattatagctntaattgtaagtctgatatgaatttttggttggttataagaattctgaattcccaaatacgtatttgagactgctttaagtaggccactttaaaccatatnctctttctttactgataatcagaatcatgaattatatc

SEQ ID NO: 10625 - DNA, 306 bp, Glycine max
  Clone ID: jC-gmle01810048a06d1
acacttaacaaagtatcaagaattattaattatgaagtaaaaaaatataattattagttatatatacaagtatgagcatatgtacacgagtccaagactatacaaactccttccagccctagcctgttcaataaaattgttcagctgtatggaccatgaagaaagaagaaatctgaagaataatgccacacggcaaacctctggaacatatcatgcaacagatatctgatgccaattcaatcaacattaatgggattttcctgattgtcaccctctccactcaatttgatgaggggggttgcagga

SEQ ID NO: 10626 - DNA, 424 bp, Glycine max
  Clone ID: jC-gmle01810048a08a1
gtgagatttgcgatggagaggcttcagcgaatgttcgcaggtgcaggtggagctctagggcaccctcccccagattccccaactctcgattcctccgagcaggtctacatctcctcactcgctctcctcaagatgctgaagcacggaagggctggggttcccatggaagtgatgggtttgatgcttggagaattcgtggacgagtacaccgttcgtgtggttgatgtcttcgcaatgccgcagagtggcactggtgttagtgttgaagctgttgatcatgttgttcagactaatatgcttgacatgctcaaacaaaccggaagaccagagatgcgttgtggctggtaccattcgcatcctggatttggctgctggctctctggtgctgacatcaatacacagcagcgttttgaggctcttgatc

SEQ ID NO: 10627 - DNA, 404 bp, Glycine max
  unsure at all n locations
  Clone ID: jC-gmle01810048a08d1
tggggnatgatgcgatgtcaaggttcgcgggcccgcgntaatgaaccgattcgacgagctgactgctcagtggtcggccgccgccctttttttttttttttttttttgggtgctatacaggtgcaaacccattcacaccagcataaactctatattgagccatggagacacgtcccaggaaaggtaccatatcatcctttgagaaactttaaaccctgcaccaaaaagataaaagctcatgccttgcatagatgagcagaaatatttggaaggatcaaaagagcccacggttaagatttgcttcactcagggccataaatcctcaaagtcacatgacatacattggtaaaaccctttgttgctgcttatatttggaggccggcgtccggaaattgaaaataaat

SEQ ID NO: 10628 - DNA, 418 bp, Glycine max
  Clone ID: jC-gmle01810048a09a1
ctcaagtccaccttcactaggactcttgtagctcccaagggcctctctgcctcttcaccacttcacctcgtgccttctagaaggcaatttagcttcactgctaaggccatccaatcagagaagccaacctatcaagtgattcagcctatcaacggtgacccattcattggaagcctggaaaccccagttacatccagccctttgatcgcatggtacttgttcaacctgcccgcatacagaaccgcagtgagcccactactaagagggatcgacgtgggcctggcccacggataccttctggtgggcccattcgtgaaggccgggcctcttaggaacaccgagatcgccgggcaagctggctctctggccgacggtgggcttgtggtgaacctcagactttgcctcacaatctatggga

SEQ ID NO: 10629 - DNA, 308 bp, Glycine max
  Clone ID: jC-gmle01810048a09d1
ttcgttttttttttttttttttttttctgggtgctatacttgtgcaaactcattcacaccagcataaactttatattgtgccatgtagacatgtacttggaaagttaccatatcatcgtttgagaaattataaacctcacaactaaaagtttaaagctcatgccttgaattgaagagcagcaatatttcaaaggatcaaaaaagcccatggttaagatttgcaacaatcagggccatcaatcctcaaagttacatgacatacatagttaaaaccctttcttgctgtttttatttggaggccagcgccc

SEQ ID NO: 10630 - DNA, 262 bp, Glycine max
  Clone ID: jC-gmle01810048a10a1
ggctcgagttgagatattacgcacaacacaatcacggtggacactttgcggcacacgaaaagccacaagagttagtgaacgatataaggaaatgtttcggaccagatggatatgtactcaatgtaaagaggaagaataactctaccagagtcagtatacaggctaaattgtgaaggaaatatatatatgaaggagatatatatgatataaaagaaagaactctattttaaaaaaaacaactaagataaaaattaagatactg

SEQ ID NO: 10631 - DNA, 233 bp, Glycine max
  Clone ID: jC-gmle01810048a10d1
cttaaaaatagaggcctttcttttatatcatatagtatccccttcatatatatattgccttgacacaatagcctggttactgactctggtagagttattcttcctctttacattgagaacatatccatctgggccgaaacatttccttatgtcgatcactaacccttgtggcttttcgcgtgccgcaaagggtccaccgcgaatgggttgggcgcaaaatttcaactcgcgcc

SEQ ID NO: 10632 - DNA, 438 bp, Glycine max
  Clone ID: jC-gmle01810048a11a1
gattttatgaattcctgtagttatatgcttctcaacaaaagttctgtacatcctcatgattgttggtttaaaaaatgcctggttttactgttggaaagaagagatttatccagccaaatatgtgtttcaccaatttgatccatcaagataaatgaactctttcacaaagcattcattgcttattccctgaggcactgaataaagattatagccccattctacctgtgctgcctgatgatgtggctgagtattgacttgcactcgtgcctcgttccaacttccctgctatgggtgatgtgtgtaaaggatggaggtcgtttattcaatgctgagaattcactactgtgcgaaaattgactgggatgctagaggaatggctctatttcttaacagctgactgtgaaggaaaggaaagtcattgagaggttatggattgcc

SEQ ID NO: 10633 - DNA, 323 bp, Glycine max
  unsure at all n locations
  Clone ID: jC-gmle01810048a11d1
tgtcgtccttttttttttttttttaaaattctaaagctatcggttgattcatattatctcaaaaagcccaaaagagaacaatcaacaattcactcacccaccacggtttgaaatagtgctactcaaaagtagacaatctcacgaccaagggatttaggcccatgtctcgctatgagccgcgtaactatctgccacgatcaagctagcccacggatttaaattgagataattatgtgatgtgatcgtgaagaacacttgcactcactgctgtcttnattctcgataaaatgcatagaataggatagatgtatccatcactccat

SEQ ID NO: 10634 - DNA, 519 bp, Glycine max
  Clone ID: jC-gmle01810048a12d1
aaaattctaaagctatcgcttgatttatattatatcaaaaagcccaaaagagaacaataaacaattaactcacccaccacggtttgaaatagtgctactcaaaagtagacaatcacaagaccaagggaattagtccctcataacactaggagccaagtaactaacagccacaaacaagctaaaacacaaaattaaaatcagataatagtatgatgtgatcgtgaggaacactcacactcactgctgtcttcattcttgataaaatgcagagaattccatagatgtatccatcactccatagagccagataagacaaggtttcatgccttgattgttacacaacacaagcacaaaccagatggccttatgtcacaagtttgccactctgaccccagagttgcatttggatcatacagcaatgtttgaaaagcagtttcagcttccagagggaatagcaacaacttttcatctagtatcccaattcgaaaataatgctttgagcttctgtcaacggaactg

SEQ ID NO: 10635 - DNA, 500 bp, Glycine max
  Clone ID: jC-gmle01810048b01a1
acagcaacaataacaacggctttctcactacaagctgaagctacctacatgctacctaccaaggtgggcatggccactcgtaacctcgaatctacacaatgcatttctaaggcttctggcttggaacccgcattagcttaactcattcgatcccttctgcccgaacttaaagatcacgcttaaaaatgtgttcaactccacctaaatggcacgattaccccttgacacctaaacttgtgacgtaattggagcgagtgcataatgtgttgcaaagaggctaaccttcgacgaaatccagagcatgacatacttggaagtgataggtactggaactgcttatcagtgcccaaccattgaaggtggagtggactcattagccttcaaggcatggaaatacaatgccagaagcttggcctggaacacacttccttcacggtgaatgcagaaggtgttgtcaagaatgccccgatcgaatttcagaacaccagctcatgacttgt

SEQ ID NO: 10636 - DNA, 457 bp, Glycine max
  Clone ID: jC-gmle01810048b01d1
ggacaatggattactagtatagtaatcgattccctaaatttatgaacccctccaactaaatccaataatttttttattttattattaatcaaaaatttcgtatatagtttgaacgggccttacaaattggaaattctaatttgttaagaattaatcgaattgggggttttgcatcatcattagctggaattgaaaaatcggggagggccgggtcacaattggtgtcgattaaacaaattgttggaatttccaaagttatacattcttgaagagccgtatatttttcttgttgatcgacgattattacaatatcaggtaaccccggaatatatttaatgccgccaagatatgtttccaaatgagctgaatggctcttcaatatagcggcatttttttttggaaaactattgagtctccccgtcttttgttgcatttctaaggccctgaacttttgaag

SEQ ID NO: 10637 - DNA, 563 bp, Glycine max
  unsure at all n locations
  Clone ID: jC-gmle01810048b02a1
cttttcgtttagcttgccgcacatatattgcggctcaatataatctacttagtaaacatctatatttatctacctatatctatatagatataggtagatagatatagatagatattcgattagcatatattagcatatattagtatatattggatattcaaaaaaaaaataataaataaaaaaattaagagccataattagaattctgtatgatatttacgtttacggcgtgtgataaaaagatactatatagaactaaaggagattcccgtttcagttacattcaattcaacgattgaccaaaagagaattcaaaaaataacatttagatcacccaaattccaatatttctatgaaacaataattaaatctaacgaatttatttcgattgattgtatccatatggggtaataataaaagggggaggagagctaanaaaaacaagataacatataaagaataagtgccgagggtcaaactgtgtgtatataatcggatcactataagacaactctttcttttgacgtttcaaagaatgattttcgaattcgatggatctaaac

SEQ ID NO: 10638 - DNA, 203 bp, Glycine max
  Clone ID: jC-gmle01810048b02d1
aaacataagaaagaatatatgaagacagtccagtatgaagaatatagtaaaatcatctcaaacttggcatcttctctttgcacctaagacattgagaattctaagaatgttacacgcaagtcccatcacaacttctagcacttggatcagcacaaccttcaggaacagaaatatttacttgccaagtttgctttgcctccaat

SEQ ID NO: 10639 - DNA, 466 bp, Glycine max
  unsure at all n locations
  Clone ID: jC-gmle01810048b03a1
tgcaattgaagttgaagtcttgcccttctctcttcaactccaaacacaagacatcatcatccatggctgcctccgtctccactgtcggagctgtcaacagagctcttttgaacctgaatgggtctggacctggggtttcagctcccagttcatccttctttgggagcagcttgaagaaggttattggctcaagggtccccaacacaaagatttcctctggaagcttcaagattgttgctgtagaagagaagaaagagattgaagagacccagcagaccgacaaggacagatggaagggtcttgcctatgatatctcagacgaccaacaggacatcacatgaggaaagggtttggtttgagctcccttttccaagctccacaggatgctggaactcactatgctgtcatgagctactacgagtaccttagcactggacttcgncagtacttggacaacaacatggat

SEQ ID NO: 10640 - DNA, 196 bp, Glycine max
  Clone ID: jC-gmle01810048b03d1
caaaattatagaggaagacagtccaatatgaaaaatatagtaaaatcatctcaaacttggcatcttctctttgcacctaagacattgagaattctaagaatgttacacgcaagtcccatcacaacttctagcacttggatcagcacaaccttcaggaacagaaatatttacttgccaagtttgctttgcctccaat

SEQ ID NO: 10641 - DNA, 476 bp, Glycine max
  unsure at all n locations
  Clone ID: jC-gmle01810048b04a1
cgccaacgaccttgccccactcttcaacgacaccgccgccgccaactacctctgcgcccaattcgattccatttctagaaagctcgccgaaacaacctacgccgtcgacaacacctaccttctgttttcagcgtatcttgtcttcgccatgcagctcggcttcgccatgctctgcgccggctccgtcagagccaaaaacaccatgaacatcatgctcaccaacgtcctcgacgccgccgccggcggtctctcctactacctattcggctttgcattcgccttcggcggcccctccaacggcttcatcggccgccacttcttcggcctacgagattacccgatgggctcctctccctccggcgactacagcttcttcctctaccagtgggccttcgccatcgccgncgcaggaatcaccagcggctccatcgccgagagaacacagttcgtggcttaccttatctactcttctttct

SEQ ID NO: 10642 - DNA, 308 bp, Glycine max
  Clone ID: jC-gmle01810048b04d1
agcaaaatcataacctgcattaatgcatttagtatatataatatatcactatataccaactaatcagtatacaattacaagcaagttattctgcagcaggatacaaactaacgtgacaacagtcgaccaaactagtcttggaattcaaagatgaaaataataaaccaagccaacaaacattttaaaatgtacagtaactctagaagacatttcctaaatgttgacccccacgcattaatttttatacttcatatatgcatccctcgtgtcttgcttgtatatggttttgacaaggctagctttgccca

SEQ ID NO: 10643 - DNA, 564 bp, Glycine max
  unsure at all n locations
  Clone ID: jC-gmle01810048b05a1
caatcatggactctaccatcaactgtaggcagaatggtagcctttttgatgtttcccatatgtgtgggctgagcctcaaggggaaggatgctgtcccattccttgaaaagctagtcattgctgatgttgccgggcttgcccctggaactgggacattgactgttttcacaaatgaaaaaggaggggcaattgatgattcagtaattactaaggtgacggatgaccacatatatttggttgtgaatgctggttgcagggataaagatctggctcatattgaggaacatatgaaggcattcaaggccaaaggtggtgatgtgtcttggcacatccacgatgaaagatccctacttgctctgcagggtcctcttgctgctcccgttcttcaacacctaacataagaggatttgagcaagctattctttggggagttccgtgtgttggacatcaatggctcacagtgctttcttacccggacagggtatactggagaagatggatttgagatctcagttccttcagagcatggactagatcttgccaaggcaatactggaaanatctg

SEQ ID NO: 10644 - DNA, 227 bp, Glycine max
  Clone ID: jC-gmle01810048b05d1
attggtatagggttaagatttaaactcgttcaattgtccttccccacactgttgtacaggaaaaaacttacttgttccggcagctctaataaaggacgctacctaaaatacccatgcaagaaccaaaagctgccaaacttggcgtagcaccaaacggaatacaatatatcgtcactcagaggcgggataagcctaggatggtcctacaaaataaagacgcccggaac

SEQ ID NO: 10645 - DNA, 570 bp, Glycine max
  unsure at all n locations
  Clone ID: jC-gmle01810048b06a1
ggatccaaccaaactgcactttttagttataactaagaaaatgtgcataatcccgcgaattacttctgaaaattacttctgaattaatgaaattttttcaataatttaagaaaaaatatttaagaactatagcatttcgcgatttattggtaatccactttgattctctattaaccaataattttggactattaccatggttaaagtgaatagtttgaagtctagacgcagtgtagtactctttctaccactatgttaatacagaaatgaaatggtttcgataaaattattagatttttttttcgatatagaacactcatgtcgataaaatggcttgaatcctatttacttacggcaagaaattgaaaaacgggttaatttaaccctcccttttgtacaatgcgtaatcgatgacctatgtataaatgaataagaattctttggatttgaagaaaaaaaacaactttgctgacatatatttgtttggtcagaagagtcctncgaatattctggtcttatattggtaattgttttcagtattctaaaaattaaaatagcgaatagaggata

SEQ ID NO: 10646 - DNA, 296 bp, Glycine max
  Clone ID: jC-gmle01810048b06d1
cattcgaattcattttatttatatattaatattatattcaaatgaaataaaaagatattaaaagatactaattataagaatttgaaagtgaaattataaagttattaaatgattaatcaatttttttctacctgttcctgtagtaaaaagagttccatctgttcttgaatagcttccttcaaaaggacttctgcttccccagtgaatgtcttggtagaagatatgatttctttgaattgaggtttattcgtgtttaagtaagcacgtaactcaacaagaaatttccttacctgtcc

SEQ ID NO: 10647 - DNA, 535 bp, Glycine max
  Clone ID: jC-gmle01810048b07a1
gaaaattgctggacccctctcaatgattccttggcatatatataccgtgatgatccttttcttaaggttagttcccaagtttcaaagaatttggattcatagttctccttgatcagatatcagggccgcgtaattttttttgtttttttgcgtacttgaggacactacattacacagacaatagtagttagcatcagagataagcatgtaacataaaccatgtgcctggggtataagctttattaaggatatacttcttagagagattttaaagtaaatttatctttaaaggtaggatagaagccaccccaatttcccaacacagtcatttcttaatctatattcaagggattcggttactctaacgtgagtaatttcagtggttaatgagaaaatcaattattgacattatagatattaggtgcacgtgaataataatagattacgaatgttttaaaataccatcgattgattgaaattacttatcttagcattgctcctttacaagagccaaattcaattcagagattcaaat

SEQ ID NO: 10648 - DNA, 306 bp, Glycine max
  Clone ID: jC-gmle01810048b07d1
ctattggaaactctcatagtcgcagtcaattcacttttctaattgatttgaagccgagtttattttttaatcataattgcgaaaacaatagtaacaacagtaagatagggagcaagaagaaatgaggcagacgcctggtgcatattgtattacaagcagatatagcaatcaagggtgtagatggagactagatatcacccatccttcttgcacatttgatacaatcatccaatagcatcttggcgtcatatttgtatacaaagcctttgtcacacagctttgttgaggcccacttgatatccttct

SEQ ID NO: 10649 - DNA, 535 bp, Glycine max
  Clone ID: jC-gmle01810048b08a1
ctcagtttgcagccctttggtgtatatggttggaaagaaatgctagaattttcactggttgatggtcttcttttgagctcatttgggattgagtatatattttcgctttcttgtggtgttctgctaatggtcttttcagaggagtgtctttgtttgatcgttagagagatcgacatgttttgttacatgtctttgctttttctttttttcttttctttttccttttaccttctcttttatctactttccccttgagggtttcttatccttcaattttgcgtcctgctcttaataaattctgtttataaaaaaaaaaagtcaatactatgtcctgtcaaatgagccaacataaaataaattggtgaataaaatagagataggaatttgttcttgtgttggcatctagtctttgaaagttattaagagatgccaaatggaaagcatgttggcattgtggttatgtctacaaatgatgattcactaatcatcttgtagatttaactgtttattcttgactgattttaagtgagttatg

SEQ ID NO: 10650 - DNA, 279 bp, Glycine max
  Clone ID: jC-gmle01810048b08d1
aaaaattaaatgaaaaaattgagaaaagggacataaatgtcttcaataaaaaaaacaaaaatattatctaaataaggggttatttattattgttaaaataaaaataacaaatcctttcctccgctaaccataaatttcctcctctttccatgaatggacaagctaaaaaggtatcctgactcgtgaacataaaaactccctttgtatgccttaaccagatgaaagaaggggtaatcctttgggataaaaatttcctccccattccacccaaacaaatga

SEQ ID NO: 10651 - DNA, 473 bp, Glycine max
  Clone ID: jC-gmle01810048b09a1
gttcggctcgagatttataataaaatgtggtgcaaactctaattccgaactagtcattaaagccgacgcacgagttcaggaaccaaaaggtagtgaaattgtgagggttgcccctagaccctccgttttggaaaatatgagcttggaggaaatgaaacaagtatttaatgaactacccgaggctctaagcttgcttgctctagcaaggactgctgatggcactcgggcacgatattctagattatacaggaccttggctactaaggttccatcgcttaaggatttggtcggtgagcttgaaaaagtgggtgcactcaaagatgtgagaacatgacctttgaagggttagatggttcttaacttatatgtgcaggtgcctgtgctaaattgctaatgctcttgaggagtttggataagtgttttgcttcgggtagttaatggaagtaggctaaaacgcagcttacgggttcagt

SEQ ID NO: 10652 - DNA, 275 bp, Glycine max
  Clone ID: jC-gmle01810048b09d1
atatgatcagatcaaataattttacctagatatcaatccaaatccaaccacaaatactctcaattttgccaaaaagggggtataactacatggacaatggaaggaaaatgggaatgagttaaagatggccgagcctagacaatgatattatatttaaaaccggatttgccaatgcaatcagatggcgcaacttgtgcaccaggttgaactgaacccgggagctgcgttttaagctacttgcattaactacccgaagcggaacacttaaccaaact

SEQ ID NO: 10653 - DNA, 427 bp, Glycine max
  Clone ID: jC-gmle01810048b10a1
acgctttctccccggagccaagacttgatgacactttcaaaagcgcgattgcaagggccttcagcaagtggaccccagtggtgaacatcgcgttccaggagacgacgtcgtatgaaacagccaacattaagattcttttcgcgagtaagaaccacggtgatccgtatccttttgatggtccaggtgggatattgggccatgcattcgctcccactgatgggaggtgccactttgacgccgacgaatattgggtggcgtctggcgatgtcaccgaatcgacggtgactagagcgtttgaccttgaatctggggcagtgcacgagatcgggcacttgctctgattatgccactcgtcggacctaatagcccttatgtattcttctataccaactcgaactatgaatgtgaatctagcgcaagatcgatt

SEQ ID NO: 10654 - DNA, 297 bp, Glycine max
  Clone ID: jC-gmle01810048b10d1
aaggtaaatttgtcacatttattcattatcatatatgcatcacctagtatcagctggtttattcttaattaagagaaaactaaaatacaatatcttacatgctatttttgttgttcttgaattagaataatttcacctcgataactttcaaaatcctttaatgcaaattaccgaaataaaactctagttctagtacaaacaacacctagctataataattaggggttgataccatagagctttcgaatcccgtctatatcatcttgcgctagattcaccttcctagttcgaggtggt

SEQ ID NO: 10655 - DNA, 592 bp, Glycine max
  unsure at all n locations
  Clone ID: jC-gmle01810048b11a1
ccttattccagaactcttttaacaaagtccaagtccaagttgattcgtatgaaaggagatagcagccacatttcatcaactcctgtccttcactcacagactactatgtatctgcaggataaatctaaagctggagcatcagaaagtggaaatggatctgttggacctattcgtcgaactaggcataaggttggtgcacaattttcttcaagaagagtggcttattcatctctgtatggcccttcacagagacaaagttctggtgttattgaaagtttcacttctgttgcaaagaggacggaacctgttgggacaagctgcactcataagccactaggccttgaggtgggtattccaacagtacacatgcataccagtttgatggctaagaagatattagaccatattgatagaaacactcccacacctaaagagaaatctgctgagctcaagctggcaacgaaatggaagaaccctgaatcttctattgatttcagtactatctggtcaaatgaagataatggttcgcttaanatagatgatgttagcccttataaatatgatgggcttgaaggaaggaatctactctatg

SEQ ID NO: 10656 - DNA, 300 bp, Glycine max
  Clone ID: jC-gmle01810048b11d1
ccaattctaaacggcttcattttacccatctttcctttaagaacaaaagaaaagcaaaagtatagtacaatcagagttaattaaaggctaaaaatacactaatcacaagaaaaaaaaagttggatgacttttggaacattgttttgccattttatttttaacagcagacagcattttttccaaatgagaacgataaccttggcttcttagttgaaccaaagttaaactttatgtctccagcttcattctgaatagcagtattacttgtagaagggaaggaaaaaactactgctggactgg

SEQ ID NO: 10657 - DNA, 346 bp, Glycine max
  Clone ID: jC-gmle01810048b12d1
ccaattctaaacggcttcattttacccatctttcctttaagaacaaaagaaaagcaaaagtatagtacaatcagagttaattaaaggctaaaaatacactaatcacaagaaaaaaaaagttggatgacttttggaacattgttttgccattttatttttaacagcagacagcattttttccaaatgagaacgataaccttggcttcttagttgaaccaaagttaaactttatgtctccagcttcattctgaatagcagtattacttgtagaagggaaggaaaaaactactgctggactggactttttcagaccaaaactatatgacagttcagtagatcctttttt

SEQ ID NO: 10658 - DNA, 561 bp, Glycine max
  unsure at all n locations
  Clone ID: jC-gmle01810048c01a1
cgaccttgcgattcagcgcagcattgaaggcgattttttactagcatggcagcaataatgttgacgactatgaatattcctctgcacacttcggtttgggttaattcccggcggaagagttggtgctgctacgcctcactttcgcagccagacaggaaggagatccgtctcggtttgcccagcaaaggtcgcatgtccgctgacaccctcgaacttctcaagaattgtcaattgtcagtgaagcaggtcaatcctcgtcagtatgttgctgaaattcctcagctatccaacctcgaagtttggtttcagaggcccaaagacatcacaagaaaattgttatctggagatcttgaccttggtattgttggactcgatactttcagtgaacatggccagngtagtgaagatcttatcattgtccacgaggctctcgagtatggtgattgccgtttatcccttgcgattccccaatatggaatatntgaaaatgtaaattcagtggacgagcttgcaaaaatgcctcaatggacagaagaaaagcctctacgagttgctactggt

SEQ ID NO: 10659 - DNA, 426 bp, Glycine max
  Clone ID: jC-gmle01810048c01d1
aggggcacaaataaaataaaatctacttcaaagtttaaaattaaaacaccgaagcaaaatcccagttcaactgaaataacaatccccccggaaaggaccaagaagacagtcacttttttagcgattaccaatgttatgaagagaacgaagggaagaagatacaggcttgctacaaaaattacaatctaaaagggcaattttagttatctacgtcctccattttggggtactaggcttttgcagctttcaccatagatttaatgctcatctactttggaagtatttgaaaaacgaaacatccacaaatgactccatagattgatcataaatggctacagcccaagtttagataggagctgacgccatcttggagtttcttcatcaaaaatataggtcaagggtgatataagaactccactgccttca

SEQ ID NO: 10660 - DNA, 512 bp, Glycine max
  Clone ID: jC-gmle01810048c02a1
atatgatcttattgtcatagagttacttaccgtaagagacaccgggtggtttaagaagactaagagcaaaagaattgagtaatctgcgaggcaatggagaaggagaacgcaagagctttgaaagaatatacgagtacgacatatacaatgacattggagatcctgattaaagccttgaacttcagagacctcctttaggaggtaacgagagaccttatcctagacgttgtcgaactggtcgtccacatagtgaagcagatccattgtcagagaaaagaagtagaaagttttacgttccaagggacgagtgcttctcagaggtgaagcagttgacgttctcaaccaagatattacactcggtgttacttatattgcttccatctctggtgaaaatcatcaaagaaaaggaccttgcattatcctacttcgacgacatagattcactgttcagccatggacttgacttgcctactgaagaaaccgagaagggattcctaggagaaatcatgcct

SEQ ID NO: 10661 - DNA, 412 bp, Glycine max
  Clone ID: jC-gmle01810048c02d1
ggcaattaatcaagagcaaccccttgggttttcgcagtgttctgtttttgaatgaaattctggttaagcagtagtgttgtttaggactaattctggtaatttcgaaaaagaaaataagctaaaaaaaattatcttattggttcaagaacatcctaaagaaacactagtaatatgtgtttatggaaattctgggggtttaggccccagtttatgggactatgtggctatcttatgtttaaattaaaaacccataccggtttaggatcatacttcacacataatatcagattgactttggcaacttaaattgatattctacggggaaccccctttccagtcacacctggctttgagaaagggttcaaaagctcgtacggtacaatgccagctccatttctgttcttaactttgg

SEQ ID NO: 10662 - DNA, 511 bp, Glycine max
  unsure at all n locations
  Clone ID: jC-gmle01810048c03a1
ggctcgagaaatgccaccatcatcatgttgggaactggaaccgggattgccccatttcgctcatttttatggaaaatgttctttgagaagcacgaagattacaagttcaatggtttggcatggctcttcttgggtgtccctacaagcagctcattgctttacaaggaggagtttgagaagatgcaagagaaaagtcctgaaaacttcaggcttgacttcgctgtgagtcgagagcaaacaaacgagaaaggggagaagatgtacatccaaacccgaatggctcaatacgcagaagagctttgggaattactgaagaaggataacacttttgtgtacatgtgtggactaaaaggaatggaaaagggaattgatgacattatggtgtcattggctgccaaagatggcattgattggactgagtacaagacgcaattgaagaaagcagagcaatggaatgtcgaagtctattaatntctgttcacttgacaaatatcatctnctactttatgct

SEQ ID NO: 10663 - DNA, 329 bp, Glycine max
  Clone ID: jC-gmle01810048c03d1
ttcgttttttttttttttttttgtttttttttgttattttttttggattaatcatttttgaaaaagtccacaaacttgcgcctatcatacaccggcaacaaaacacgctaaaagcccttaaaaataccagaaaagaataaagcaacgggaatgaatgcaaaacacaacgcaagagggtttgcagactctgctcccataaaaacatgaccttagttaatgggctactaatctacatcactgaatatataagccagacattgctttgggctcttctttgccataagtcaccaaacattctaatgccagaacccttcctcttgacaccttca

SEQ ID NO: 10664 - DNA, 539 bp, Glycine max
  unsure at all n locations
  Clone ID: jC-gmle01810048c04a1
attgaagttgaagtcttgcccttctctcttcaactccaaacacaagacatcatcatccatggctgcctccgtctccactgtcggagctgtcaacagagctcttttgaacctgaatgggtctggacctggggtttcagctcccagttcatccttctttgggagcagcttgaagaaggttattggctcaagggtccccaacacaaagatttcctctggaagcttcaagattgttgctgtagaagagaagaaagagattgaagagacccagcagaccgacaaggacagatggaagggtcttgcctatgatatctcagacgaccaacaggacatcacaagaggaaagggtttggttgactcccttttccaagctccacaggatgctggaactcactatgctgtcatgagctcctacgagtaccttagcactggacttcgccagtacttggacaacaacatggatggattttacattgctccagctnttatggacatactngttgttcacattaccaagaacttcatgaccctgcccaacatca

SEQ ID NO: 10665 - DNA, 229 bp, Glycine max
  Clone ID: jC-gmle01810048c04d1
gggaaaaaagggaaagggccccaattcaattttagggggcccttttcccccaaatttttgggggagaccgccccatttgaaaaatttttgaaaatcatttcaaacctggggttttttttttggcccccagacattggaaattttaaaaagggtcccccccaggcccctaaaaaatttttgcacttggggcagcacaccctttgggaaaaaaaaattttacctgcccagg

SEQ ID NO: 10666 - DNA, 588 bp, Glycine max
  Clone ID: jC-gmle01810048c05a1
aaatatcaaccctcttctctcttctccaacatcacacagaaaaatggagaagaaaagcatggctaggagagcacattgtcttgtgttaccatatccacttcaaggacacatcaatcccatgcttcaattctacaagctattggaacatcaaggggtgagaataacacttgttacaactcgtttcttctataataacttgcaaaaagtgccaccttctattgtacttgaaacaatctctgatggttttgacctacgggggcctaaagaggctggagggtccaaggcatatttagatcgcttttggcaagttgggccagaaacatttgctgagcttcttgagaaacttggtgaatcaaatgaccatgttgattgtgttgtttatgatgcattcttaccttgggcactagatgtggctaagagatttgggatagttggtgctgcttatctcactcaaaatatgactgtgaatagtatatattatcatgtccaatcgggaaagcttcaagctccactcatagaacatgatatttcccttccttgcttgcccaagcttcatcttgaggacatgcctactttcttctttgatga

SEQ ID NO: 10667 - DNA, 295 bp, Glycine max
  Clone ID: jC-gmle01810048c05d1
aaatgtaagtgacaattagaccatcactattgaatttctaatttagaacatgatcaagcttatcaatgtaacaaatgattcgtaaattctataatattttcataagaacttccaccttcagcggtagctcttacagctaaagttttccactgaatggcattggttttcatctctttgtctctatccattatctcttttatacaatgttttagagcttctcgccgcacaatatttttctcatcaactggagttcgaatacctattttccaaacatcggcaataagctttgcgtttg

SEQ ID NO: 10668 - DNA, 386 bp, Glycine max
  Clone ID: jC-gmle01810048c06a1
ggaatcacaagttttcttcaccaaagtttaacactgtgaatgcttcatcgttagtaagaggatgggggcgtggaagagtgaaccataggtgtagtagtaggggtttgttgtgtttggtggagaagaataagcacataagtgctttagggaagagttctgggacaagtgaggataaggatgagtcagaggaagtgcttcaggccacaattgagaagagtaagaaggttcttgctttgcaaagggaattgcttcaacagatttctgaaagaaggaaactggtttcttcaataaatagtgaaagcactcctgaaatagaaggagacagcatttcttatgagcacagtgacgaatccttgtcaagtgactcaatttcgcagaaaggttca

SEQ ID NO: 10669 - DNA, 308 bp, Glycine max
  Clone ID: jC-gmle01810048c06d1
ggacaataaagtttctaaccttattttatatattgctggattgatgttttagctacataggtatgtgccagacatgacatatataacaagtgtattattacataatccttagtttaggggcaaaaatgttcctccaggacctgcaacatgaaggttttaacaacttgaccaagtcctttccctgcacagaccttgatatcactcagcatgagagcactccatattgatcagtctgcttaggtagagtagaagccaagaatttaccattggtacttagcagcaacaagaacctcctcatactgctgagc

SEQ ID NO: 10670 - DNA, 503 bp, Glycine max
  Clone ID: jC-gmle01810048c07a1
aaaaagattatcttttttaaggatatatccacaccgtgcttcttgcccttctctctctcttcctcacacccaagaagaaaaaaaaagaaaatttctcttttttttgtgatttttttatttgttttgcacacccttcctgaaatctagagacaagccgcaaaattaatccatacccagaatttctctctctgaaatatcttgtggggtttatctgttttttgttgtttttgtttgtacccttcgattcttcaccttcatagttgaagatatatacaaagtatatataatagtatataaagccgtgtttgttgggtgttttggaggatctgctttgttttgctgagttcagtggattgtgttaaaggggttttgaagatttttgctgaagttgaaaaatctgagagttttttggttgaagttctgctcccatggctgctcaattgcaaaaatctgcagatgaaatgaggaagaagcttatggtgattcttcaacggttgaactca

SEQ ID NO: 10671 - DNA, 308 bp, Glycine max
  Clone ID: jC-gmle01810048c07d1
gatgagctgtccaaatcgtgccatttgttatgttgttaaaatcggtaactgcaactacaagaaaaataaaattgaaaataccaagaacaaaggaagaaccaaactgagcttattatgtgcaaagaaagattaaaaaaaaaagtaaatgacacgtgcttttcatagcaccctgtaacagctatctcaccgggtccattccacttccaaagactttcttcctttgtagttttgtacaattaggaatgcagtcaccatttgcccggataaaaattattattattttttctttttctttttcttttctccct

SEQ ID NO: 10672 - DNA, 514 bp, Glycine max
  Clone ID: jC-gmle01810048c08a1
aaaaagattatcttttttaaggatatatccacaccgtgcttcttgcccttctctctctcttcctcacacccaagaagaaaaaaaaagaaaatttctcttttttttgtgatttttttatttgttttgcacacccttcctgaaatctagagacaagccgcaaaattaatccatacccagaatttctctctctgaaatatcttgtggggtttatctgttttttgttgtttttgtttgtacccttcgattcttcaccttcatagttgaagatatatacaaagtatatataatagtatataaagccgtgtttgttgggtgttttggaggatctgctttgttttgctgtgttcagtggattgtgttaaaggggttttgaagatttttgttgaagttgaaaaatctgagagttttttggttgaagttctgctcccatggctgctcaattgcaaaaatctgcagatgaaatgaggaagaagcttcatggtgattcttcaacggttgaaactcataattccaa

SEQ ID NO: 10673 - DNA, 303 bp, Glycine max
  Clone ID: jC-gmle01810048c08d1
gatgagctgtccaaatcgtgccatttgttatgttgttaaaatcggtaactgcaactacaagaaaaataaaattgaaaataccaagaacaaaggaagaaccaaactgagcttattatgtgcaaagaaagattaaaaaaaaaagtaaatgacacgtgcttttcatagcaccctgtaacagctatctcaccgggtccattccacttccaaagactttcttcctttgtagttttgtacaattaggaatgcagtcaccatttgcccggataaaaattattattatttcttctttttctttttcttttc

SEQ ID NO: 10674 - DNA, 501 bp, Glycine max
  Clone ID: jC-gmle01810048c09a1
cagaaatcatggtttgcattggactactcctaagcttccatataatgattccttactcagtgactcaatatgttggatcagcccttatcacatttgtgtctgctgaagttcttgaaggtattttttctcattaagtaatgctcgaaatttatttagtaataaacagaactggcatgaatagaaaggtttgctgacaactttgcattatcagatgaaaatggcaatacttcaactattctgatgactatgaataggtacatagttagtttgtacccatcatgtaataaggtctgattatgatatcatgtaacccatcaattgttaaacaggttgattatttctgttattggcattaacctggtaatttactgtatgtgacaatcttaaatttcataatggtgctttttcttctcatctggaaatattttagatagatttggttgcctcattcatttctatataatgacttggtcaaagatttaagttggttcacatcttatg

SEQ ID NO: 10675 - DNA, 242 bp, Glycine max
  Clone ID: jC-gmle01810048c09d1
aaaaaacccaaaacccgtttaaattgtttcccccgccaaaatggaaagggtacacaaaccatttttaaaaaaaacgggcctttccttttttaaaaagggaaaattgcccaattttttgcccaaggggggcccccggggcctttcaaattaagggaaaaacctaaagggggtaacccgaaataaacccggccccaagggggaaaaaaaaacattttttgaccaaaaccaaaaaaaagggccgg

SEQ ID NO: 10676 - DNA, 518 bp, Glycine max
  Clone ID: jC-gmle01810048c10a1
gagattctgcttctttgctatggaagactcagattcagttgctacgctgatagattccacaacttctaagatacagcagctgcaaaaggcatttgctgaacttgaaagttaccgagctgttactctgaacttgaaatggaaagaactcgaggaacattttcatggtctggagaaatccttgaagaggcgctttcatgaattggaagaccaggaaaaagagtttgagaacaaatcaaggaaggctcatgagatactggagaagcggcaagcagctgtttatgccaaggagcaagccacgttgcagaggcttcatgagaaaagggatgctgctgtatttgacattgtgaatgctcgagaaaagcagacgaaggtcacgataagtgatttggctattgtctccaatgggggtaaggggacatttcatgtggaggacaaaccagtggatgctgtgtcctttgcagctaatggtaatgtggaagaggtggtactttcttctgaaaatggaaatgtggagttgt

SEQ ID NO: 10677 - DNA, 260 bp, Glycine max
  Clone ID: jC-gmle01810048c10d1
acaaaacgagaacagagtacatacattagaggatcagaattttttttagcacagaagttaaaatttaacatgacattttacctgtttcagcaattcttaaagactacatagataaagggcaacatacaacagcttaagggttaagacttaagactaaattttaaacaaagggatttgtagctttttagtcatcagttcaccattatttgggctaactaggggagatatgtagcttggtactgatagccatttccaaagtt

SEQ ID NO: 10678 - DNA, 457 bp, Glycine max
  Clone ID: jC-gmle01810048c11a1
gcatttttctttttcttttcttttttttttgttgcattttttcatgtctttaatgttatgtctattccttgattattggtttagtaacttgattgttggagatgttaatgttggacccttcaatctacaaggctaatattttaagcattatatatttccatcaattgaattgaggcttcctagttccttccgattagagaaattgtcggcttgatgcttttcaatctagaatttttcaaatgtttagagtgcgttttctctgatgatttttgtaataagaactaagacattaccttacattcacaacaacagtatttacgagcccatgtttcggatcggattggatactcttgatgatgcagatggcagcgtcatcagcatgccttgtaaggaactgggtatctacacggtgtgatataatcactatcaagaaggactttaatggatgatatctcta

SEQ ID NO: 10679 - DNA, 195 bp, Glycine max
  Clone ID: jC-gmle01810048c11d1
gggaaaagggggggggagaaccttttatttcccaaaattggggcgggggggaaaggggccatttttttgctaaaaaaaaaaaatttaaaggggggcacaaaggggattgaaaacggggggggctctggggggaaaaggggggcccccgtttaaaaccggtttcatatcccacccgaaaatgttgcggggggtttt

SEQ ID NO: 10680 - DNA, 282 bp, Glycine max
  Clone ID: jC-gmle01810048c12d1
gagggcataatgaaaaagagccaaagaaaatccctggggacaccattattaagaattttggatgctgacctatctacgttaaaaatattaaaatatacttaacaactaggcttgatagttatatgctgcacacagtggaaagtgtcatattgttaggctcaaataccgtaacaacttatatcactctgatcagcacaaccttgaggaaccaccatatttcctggcccggcttgcttgacgctaaaacaactatggttagaaactcaccctgatgagttcatc

SEQ ID NO: 10681 - DNA, 477 bp, Glycine max
  Clone ID: jC-gmle01810048d01a1
gaataaatgaaccttcctcctttaacatagcaatgatttcagacaacaatgattcgaggaatgctgctgattatagttttacagaaaggcatgatatttcaacaatactctatgcactcatatgcgctttatatataatgacttgcaggaacctcagtctacatatttgatagatcgtcatatatcgtttgagaaattcttttgaccggtggtgaccgatgcatttctgctgaagactcaccttgctggaagggagcttctgctgctcgcttttctcatcatgaaccatctgcagctctctctcatgaatatgtacacaacaaagaatgtcgctttggttctgtcattaatgagcctaagaattatctgcttgatacaggggactataagaaaaaaccatgtggaaattcaaatggctatgcaatgcctactggaattgtctctcaagacagacgatcagcaggatctccaaggaga

SEQ ID NO: 10682 - DNA, 496 bp, Glycine max
  Clone ID: jC-gmle01810048d01d1
agataaaattcagtttcatatcatcctaaatacgagtacaacaagtagtcacatatgaagtagctatgcgacatatcaatcaaactcgttattcatctctgtgattcccagctgcaaaagacaatgcaatgctgaactcacacgggtgtacgttcactatgatttatggaacatgctatataatgatgttcccccatgcatgtgtgtattacactactagcccatagtataggaagggctgggtaagttgatcacagtcgttttgaccttggtcatcatgtttatgctggtggtaatcccttgagatccaatgccactgtcctttataccctgaaagggaaaatgatctggcccacgagctggggcagaatttatctgaactgttcccgtttccattgcatcactgatcattattgctttgttgacatcctttgtgaagacacatccctgaagtccaaagttgctagcattacaatgatggattccttcttcaact

SEQ ID NO: 10683 - DNA, 578 bp, Glycine max
  Clone ID: jC-gmle01810048d02a1
caacttgcctacactgtcttagcttagccattaactgcttcagttttttccacagatcatgaaactgtcacagacattggtgcggacacccttctcaacaacatcaccagcgttactccgcactcaaaattccattttgttctcaaatggaaaaagggtctctgtgttggagtatcaaagcctcaggctcccgagttgcgcctgcagcaactcgggatccgctgttacttcttcttcttctgcggcggccaagaagaatccttcgccgccggcgccgcaggttgttaccaattctggatatgattctgcggtgactcaggagctgccagggaagttggaggccttagaggaaggcattgagaacgcgatttataggtgtcggattatggctattctgggtgtatgtgggtctttaactggatcatctctgtgatctatcacgggctgcacatttgatacagcatcgtttatgcaatattctgtcaaccgcagtagagtaatccagacgctgatagaagctatcgatgtctatcttttaagaactgtgatgctcgacttgtgatggggctctatgagct

SEQ ID NO: 10684 - DNA, 434 bp, Glycine max
  Clone ID: jC-gmle01810048d02d1
gggaaagaccaagacaattgcattttcatcctaatttatacagaaaaaaagtaagttttagggcccgctattttttttatggggggatcacttggtatgaacctcactttacatggatgggaacatcattttgcctaattcagcttaaacagcaaaaagaggcaactagaaaaaaggggggcagaaacccagaagcttagcaaatccacaggggggggtataacagcctttttacttttgtgaaacaatccaatcagaagcagcattactttgacgggaccaagcttggttttcagttcatccacaggttttatatccagccattttgggcgttccttaagagggaataaaccaaagagacttgatctgtcagaagggttttgatctactccaagattactgacaaagagctcatagagacccattccaaagac

SEQ ID NO: 10685 - DNA, 557 bp, Glycine max
  unsure at all n locations
  Clone ID: jC-gmle01810048d03a1
tccacaactacaaatctccgctgaacgtggtggaggggaagaggcagtacctgttcgacgataagggaaggaggtatctcgacgcgttcggagggattgctacggtgtgctgcgggcactgccaccccgatgtggtggaggccatcgtggaacaaacgaagcggttgcagcactccacagttctgtacctgaaccatgccataacggattttgctgaggctttggctgctaagcttcccggtaatcttaaggtggcattttttacaaattctggaacggaagcaaacgaattggcaatactgatagcaaaattgtacactggctcccatgacataatatctctaaggaattcttaccatgggaatggtggtggaacgatggggaccacagctcaaagcatttggaaatataatgttgagcagagtggtgttcatcatgcggtgaatccagacccttatcgaggccttttcggttctgatggagagaagtatngtagagatgttcaagaaatcattaattttggaacttcccggaaatgtgcagcttcatatctgagc

SEQ ID NO: 10686 - DNA, 313 bp, Glycine max
  Clone ID: jC-gmle01810048d03d1
atgggactaagcttccatgtaaaatttataaacttgacttgctacaatctaaatagatggtatactggtgtgtttggttcctgcggtgtggtgaaagggatacaattatttttttcacattcaatctcaccacaactctttgtagcctccagatttctacataaaaaatgtgacttttgtggcgccagcatgaaaccaagcatcaacctaatacagtttacttaacatgattatgtaaaatagagatttatttacacttagttcttattttaagcttcacattctggaaaatgtgtagtccatcgcatccaca

SEQ ID NO: 10687 - DNA, 480 bp, Glycine max
  Clone ID: jC-gmle01810048d04a1
ttgcaattgaagttgaagtcttgcccttctctcttcaactccaaacacaagacatcatcatccatggctgcctccgtctccactgtcggagctgtcaacagagctcttttgaacctgaatgggtctggacctggggtttcagctcccagttcatccttctttgggagcagcttgaagaaggttattggctcaagggtccccaacacatagatttcctctggaagcttcaagattgttgctgtagaagagaagaaagagattgaagagacccagcagaccgacaaggacagatggaagggtcttgcctatgatatctcagacgaccaacaggacatcacaagaggaaagggtttggttgactcccttttccaagctccacaggatgctggaactcactatgctgtcatgagctcctacgagtaccttagcactggacttcgccagtacttggacaacaacatggatggattttacattgct

SEQ ID NO: 10688 - DNA, 329 bp, Glycine max
  Clone ID: jC-gmle01810048d04d1
ttcgttttttttttttttaagtggacactttaactcaaaattatagaggaagacaggccaccatgaaaaatataggaaaatcatctcaaacgtggcatcttgtctttgcacctaacacattgagaattctaagaatgttgcacgcaagtaccatcacaacttctagcacttggatcatcacaaccttgaggaacagaaatatttacttgccaagtttgctttgcctgcaattcaggattggaagaaagttcccctgtaaatagcatcctcgtttgcattcccaagtgcagcctcgctcatgttcttgtcagccaattggactctcttga

SEQ ID NO: 10689 - DNA, 481 bp, Glycine max
  Clone ID: jC-gmle01810048d05a1
ggaaaatctttccaatgtgagcttgtctttgccaagatgggaatcaaccccatcatgatgagtgctggagagttggaaagtggaaatgcaggagagccagcaaaactgatcaggcagagataccgtgaagctgcagacatgatcaagaagggaaagatgtgcgctctcttcatcaacgatcttgatgcaggagctggtcgtcttggtggaaccacacaatacactgtgaacaaccagatggtgaatgccactctcatgaacattgctgattaccccaccaatgtgcagcttccaggtatgtacaacaaggaagagaacccccgtgttcccatcattgtcaccggtaacgatttctcaacactctatgcacctctcatccgtgatgggcgtatggagaagttctactgggcaccaacaagggaagaccgcattggtgtttgcaccggaatttttcgcactgatggtattcctgaacaggaca

SEQ ID NO: 10690 - DNA, 311 bp, Glycine max
  Clone ID: jC-gmle01810048d05d1
tttttttttttttttttttttttttttttttttttttttttttttttttttttttttttttttttttttttttttttttttttttttttttttttttttttttttttttaaaaaggaaagggcccccacctaattttagggggcccccgcctccaaaaaatttgggggaagccggccccatttaaaaaatttgagggaaatccctcaacattgcttttttttttttccccccaaaaaattggaaatgctaaaagtgttccccccgagtcccaaaaacccttttaccctggggatgtaaaaaaaccccttcc

SEQ ID NO: 10691 - DNA, 538 bp, Glycine max
  Clone ID: jC-gmle01810048d06a1
gcctcctcgtcttcaatcctttcgttattctcttattcatccttctcttctgaataatccagatctctttctgcccttttctccgtcacgcttttcgtgaccggatctgtatggatttgatccagatctacacgccgatggtggttttggccgggtctttcatagatctggtgcgtagaggctcagatctacggtaccgaggtacaacagagaatcgatgacaagaacgcagatccgacggtagatccagccgattccgcttgttcgatcgctacagacccctgtatcggatcattaagcagcgtgtctcgcgcgttctacacgtgttgccgatctcggatgttgtaaaattagtttatgatgtgaagctatggagtggaaaatatgtggatgtaggagatttcgggatgaatggcctcaaaacgctttgtcgattgtggttattgagtcctgagtgatcttgtcatccgacctttgccatgacaggtgcgctggcatgcaggtcaaaaaatgttaataaaaaagtgtatcggtttgg

SEQ ID NO: 10692 - DNA, 309 bp, Glycine max
  Clone ID: jC-gmle01810048d06d1
gataccaagaaaaaatatcattctatgcttgtgtaaagagccgaagttatcttcaccttaaagaattgtagaagcctaaccagattctttgtaaatccacgatatttcttcaaaaataccttgacaaccacaatgatattgtcatagcagaagtcatatagcgtcttcacattgatattccaatcatcgccagaagatttacaatgttaatgacctaattctgcattacaaatgttgtcgcccgaatctgaacttcttacaagtagataattgtacaattatacaaagcccccgcaatacaaatggccc

SEQ ID NO: 10693 - DNA, 533 bp, Glycine max
  unsure at all n locations
  Clone ID: jC-gmle01810048d07a1
aatgtattccttctctcttagttgatagtaaacttctttttagtgcataattggaagtattttgttggcggatagcatttgggacagaagatctgttcacatatgtcaacagtgaagagtgttggttaaagcggaagcacatatatatttcatgtttggagtatttaggactcatgtgataaaagagtgtatgttggaagaaaatgattgacttttatgataaaacatcactgtcttaatgttccctgttggcgagttggttagaaatatgctgattctttctttctttgttgctgaacaggtggacatttactttggtcactatttactttgggcttgggtcttgtgtctccatatatgggtgtcgctataaacacagtagaatcgattgcaccactgttgatcgtgctgatttagatactgaagaatgcacttatgtcgctgctacacttgatgggactncagaattacctaacctgtgcaagaaatancattgccatcaggagccattcactcggaatactgctggtgat

SEQ ID NO: 10694 - DNA, 228 bp, Glycine max
  Clone ID: jC-gmle01810048d07d1
gggggttaatatgagggggaaaaaaaaaaaaaaaacccgtgaaaaaccacgggggggccccccaagggggggggacacagggggggggggaaaaaagggggggggcaccaagggggggcaacaccaaaccctgtaaaaaaaaaatctttagaaaaaacccccgaaaacccccccccaaaaaagcccccccaaaaaaaaactccccccaaaaaaggggggggggggggg

SEQ ID NO: 10695 - DNA, 478 bp, Glycine max
  Clone ID: jC-gmle01810048d08a1
actggctgcattaacccaaaacatggatcacttgacagtgagcagctgatatactcgaatgcacaggatcgttctaatgcaattgcactcgttgatgcatataactactctgatcactaccttggttgaactcttggacgttacgacggctatgtgtataccaagttagccaaagaggcatggaaggatcctgatgatgatccagtggatactgatggctttaaagagtgtatacgaccgatgcttaatcatcaacttcccaatgctactctggcgttaagtttgtggcaatgatgctatgggcatctaagaaagtcacgcacactattctgatgtacaactgttaatcaagctgcggttgccagctagtaattaccatcgcaacatggtgtatctggaactggaactgggacagactcatttatttatgacattaacgatactcgatgtctaggtaactatgaccttgttggaaaca

SEQ ID NO: 10696 - DNA, 281 bp, Glycine max
  Clone ID: jC-gmle01810048d08d1
cttacaaacacaaacggtctttaatgaaataagtaaacgagttggatccatggccagttgcagacacacctaattgcgatggaagatacggactggcaaacacaagtttttcaaaagcacatacttataatactctgggcacatttgttacattcccaaagcttctggggcacaaaactaccttcagtctatgatctcgtgctggcatgataagcattggttgggtctactgtacggagcccctgggaacaactggataattaaacggtgcctttcatgcc

SEQ ID NO: 10697 - DNA, 533 bp, Glycine max
  Clone ID: jC-gmle01810048d09a1
cgaactcccgatttttcttcctcttcaatctcgtccctctctgtctctccatccttaaatatacacaacatcttctaaggagaaaggggttccgaaagttacgataaaataaaaatggatccaaacgcggtgaagtccactctctccaatctggcgtttggaaacgtaatggcggcagctgcccgtgattatcagaaggaattgcatgctcaagagaagacacatgcatcaagttcagtacatcaggaggttgaccttgacgagttaatggatgatcctgagttggaaaaattgcatgcagataggattgcagctcttaagaaagaagcagagaaacgggaggaatggaagaagaaaggtcatggagaatttacggaagtaaccgagggtgatttcttaggcgaagtcacaggaagtgaaaaagtgatttgtcacttctaccataaggagttctatagatgcacgataatggataagcatttaaagtctcttgcaccaaagcatatcgatacaaagttcatcaagcttgatgc

SEQ ID NO: 10698 - DNA, 302 bp, Glycine max
  Clone ID: jC-gmle01810048d09d1
aaatcgacacttcatttaaaattgtataatcatatattttgatgtaacaatgaaaaaatatgataatgaagtttggtatgctactacgatttcatgcatactccctttctctaatgcactcacagtttagtaccattcaagtcctggcccaattttagtggcttctaatgcactcacgatgaacaataattaaatccattttagaaaacctatatcaatttctactgttacaaatgaagttctaacttttgatacccctcggatgcgagaaacgttagcaatttcctacagggacaggttca

SEQ ID NO: 10699 - DNA, 483 bp, Glycine max
  Clone ID: jC-gmle01810048d10a1
cgaactcccgatttttcttcctcttcaatctcgtccctctctgtctctccatccttaaatatacacaacatcttctaaggagaaaggggttccgaaagttacgataaaataaaaatggatccaaacgcggtgaagtccactctctccaatctggcgtttggaaacgtaatggcggcagctgcccgtgattatcagaaggaattgcatgctcaagagaagacacatgcatcaagttcagtacatcaggaggttgaccttgacgagttaatggatgatcctgagttggaaaaattgcatgcagataggattgcagctcttaagaaagaagcagagaaacgggaagaatggaagaagaaaggtcatggagaatttatggaaataaccgatggtgatgtcttaggcgaagttacaggaagtgaaaaagtgatttgtcacttctaccataaagagttctatagatgcaggataatggattagcattta

SEQ ID NO: 10700 - DNA, 300 bp, Glycine max
  Clone ID: jC-gmle01810048d10d1
aaatcgacacttcatttaaaattgtataatcatatattttgatgtaacaatgaaaaaatatgataatgaagtttggtatgctactacgatttcatgcatactccctttctctaatgcactcacagtttagtaccattcaagtcctggcccaattttagtggcttctaatgcactcacgatgaacaataattaaatccattttagaaaacctatatcaatttctactgttacaaatgaagttctaacttttgatacccctcggatgcgagaaacgttagcaatttcctacagggacaggtt

SEQ ID NO: 10701 - DNA, 381 bp, Glycine max
  Clone ID: jC-gmle01810048d11a1
gtgggaagaagcttgtgaactcaaacgatggacctacaacctttgagcagcctaagatgactctggagaagctcttgacttctggtaacatgcttgtccaagaaccagagaatgtcaagagagtgctattggctgacaagttcttgaacaaggctgcacttgcaaatgctaacgaggatgctattcacaggggaacttgctcccaatcttgaattggatgcaaagcacacttggcaagtaaatatttgtcgtcctgaaggttgtgctgatccaagtgctagaagttgcgatgagacttgcatgtgacattcttacaatgtttaaaagcctatgtgccaagagaagatgcctagtttgagatgatgcacctatattggtcat

SEQ ID NO: 10702 - DNA, 281 bp, Glycine max
  Clone ID: jC-gmle01810048d11d1
aggacaaaaggaaaaggcaccaaattaaatttaagtggacacctttattcaaaattttagaggatgaccgatcaacattaaaaatataataaagcccttttaaacttggcttcttattttttcgcctaacacattgaaaattctaaaaatgttacgagcaagtcccatcactacttatttcactcggatcaggacaaccttcaggaacagaaatatttacttgccaagtttgctttgcctccaattcaagattggaagaaagttcccctggtgatagcatc

SEQ ID NO: 10703 - DNA, 270 bp, Glycine max
  Clone ID: jC-gmle01810048d12d1
gaggacaaaaggaaaaggccccaaatttaatttaagtggacacttttacttaaaattttagaggaggacatgtctatgttaaaaatatagcacaatcctttcaaacttggcctcttattttttgacctaacacagtgagaattctaaaaatgttacacgcaagtaccatcacaacttaaaccattttgatcagcacaaccttgaggaacaaaaatatttacttgcccggtttgttttgcgtgcgaattaagattgggagaaagatcccct

SEQ ID NO: 10704 - DNA, 470 bp, Glycine max
  Clone ID: jC-gmle01810048e01a1
acctcttccatgcagatatgccatgagtttgagaggtttagcacttacttacccgatctcaaggttgctgtcttttatggtggagtcaacatcaaagttcacaaggatctgctgaaaaatgagtgccctcatattgttgttggaacaccgggaagaatactagcattgactagggataaggacctttctttaaagaatgttagacatttcatattggatgaatgcgacaagatgctggaatcactgggtatgtttcattgatgaatagtcactactgatttgaattttactttcgattttttatagtatgattttattgctcttatatgctgtctgcagatatgaggaaagatgttcaagacattttcaagatgactccccatgataagcaagttatgatgttctcagcaacactcagcaaggaaattcgcccagtctgcaagaaatttatgcaagatgtaaatgctcat

SEQ ID NO: 10705 - DNA, 501 bp, Glycine max
  Clone ID: jC-gmle01810048e01d1
ttttttttttttttttttttttttttttttttttttttttttttttttttttttttttttttttttttttttttttttttttttttgggggggggggaaaaaaaaaccttttaaatattcccccttaaaaaaaaaattaaaagggccccctaaaaagggaaaaccctttaaagttttttggaaaaagtaaaaaacccccttttttccaaaataaaaaaacccaaatttttttaaaaacataaaaaaattagggggggggggttaaaacaaaaaccaaaaggaaagaggttaaaaaaaaaaaaaaaattggttccccaacaaaaaattggcgggaaaaagggttcctaaggggcctttgccatttaaaaaaaaaacttttttttctgggacatcccaaaaaaaatcctttttaggggaaaggtccccccccaaaggggttgggccaaaaaaatttttttgttaaaatttttaaaaaaaaaaaatttgaaaaagcccccggct

SEQ ID NO: 10706 - DNA, 442 bp, Glycine max
  Clone ID: jC-gmle01810048e02a1
gataccatcgataacgtgaaggcaaagatacaggacaaagaggggattccaccagaccagcagaggcttatctttgctgggaagcagctggaagatggtcgtactctagctgattataatatccagaatgagtccactctgcatttggtgttgaggcttcgtggaggtatgcagatatttgtgaagactctgacagggaagaccattaccttggaggtggaaagctctgatactattgacaatgtgaaagctaagattcaggacaaggaaggtatctctccagatcagcagaggctcatttttgctgggaagcaattggaagatggtcgtaccttggcagattacaatattcagaaggaatccactttgcatcttgtccttcgacttcgtggaggttgctaaggggaatccctattatgaagtgctctcatatgtctcatct

SEQ ID NO: 10707 - DNA, 459 bp, Glycine max
  Clone ID: jC-gmle01810048e02d1
aaaagggggaaaagattttttctttaaaaaaaaaaaaaagaacccccttttttggggggaagggggaaaaaaatattttaaaaaaaaaaaaaaaaagggcctttaaaccccagagtccaaaaacaaagggggggggggccccccccaaaacaaaaaaaaaattggaaacccccctaaaaggggggtccccttttaccccccccccgagggggagggaaaaaaaaccagggggtccccctaaaaaatttggaaacggcgggggggaaacacttttaaattggttccccaaaaaaaaaagacccttgggggggggggggggaccctcctcggggcgaagatttcctctacaaggggggaaaaaatacggccctccccccccagagggagggggctccctggggagggagcacaacaaatttttgtatcccccagagaggctaaacacaaaggggggggggc

SEQ ID NO: 10708 - DNA, 515 bp, Glycine max
  Clone ID: jC-gmle01810048e03a1
tttatttttatatatcactgccaaaatttcttcttcttcttcttcttcttcttcttctgcttctctttctgggttttgttctctttgctttgtccacaaatggttacaccaaagcatggccacagattcttcaagttccgggcactgtttctcataaccacttcttccacttattccttcttcttcttgtgaatgccccaaactaaccctttaccaaagagccacacgtgccatatatgccttcaagattcttggcacacaaagggcagtgacaggaacatgtcagtttcataggagaaattagaattgttatccgtttattccattcttctcacctgtcttatcgtgtcaaatcttgcagcctctactccccccctctctctctctcatacacacacttttagttttcaaaaaacaacaaacaaaactatatcaaatggttgctaaggactatgatcccttgacatgcgcgggtggtgtgaaaatgggtagtataatgtactgtgttgatcact

SEQ ID NO: 10709 - DNA, 311 bp, Glycine max
  Clone ID: jC-gmle01810048e03d1
aaagattaatcttttttgaattattaagatccattttaagggagataggattccatgtatttctatttacacccatttgaaatcgaacaccctaataatacaataatttaggtatatctatggcccaacgattttttccaaatagtaccattattctttgtaagtgtaataataactccatagcacatcagccttatcattttctctagtccatgacacagaagttatccattttctcctctttgactccaaagctcaagagacaaccatttttaaaaaaatttctctctataaaagttttctctcttgct

SEQ ID NO: 10710 - DNA, 503 bp, Glycine max
  unsure at all n locations
  Clone ID: jC-gmle01810048e04a1
tttatttttatatatcactgccaaaatttcttcttcttcttcttcttcttcttcttctgcttctctttctgggttttgttctctttgctttgtccacaaatggttacaccaaagcatggccacagattcttcaagttccgtgcactgtttctcataaccacttcttccacttattccttcttcttcttgtgaatgccccaaactaaccctttaccaaagagccacacgtgccatatatgccttcaagattcttggcacacaaagggcagtgacaggaacatgtcagtttcataggagaaattagaattgttatccgtttattccattcttctcacctgtcttatcgtgtcaaatcttgcagcctctactccccccctctctctctctcatacacacactnttagttntcaaaaaacaacaaacaaaactatatcaaatggttgcttaggactatgatcccttgacatgcgcgggtggtgtgaaaatgggtagtataatgtact

SEQ ID NO: 10711 - DNA, 312 bp, Glycine max
  Clone ID: jC-gmle01810048e04d1
aaagattaatcttttttgaattattaagatccattttaagggagataggattccatgtatttctatttacacccatttgaaatcgaacaccctaataatacaataatttaggtatatctatggcccaacgattttttccaaatagtaccattattctttgtaagtgtaataataactccatagcacatcagccttatcattttctctagtccatgacacagaagttatccattttctcctctttgactccaaagctcaagagacaaccatttctaaaaaaatttctctctattaaagttttctctcttgcta

SEQ ID NO: 10712 - DNA, 571 bp, Glycine max
  Clone ID: jC-gmle01810048e05a1
aaaacgacaacaccactttcgtcgttcgccgtattcgatttcagagttccgtggcgtccggccatggccctgcgaaacggcggcagaaaaatctccttcgaggtccttagcgtcgaggacgaatcggatccaacggaacgcaaccgcaagaagcgcaggcaccgcgcttcgaaaaagaagaagaagcttctcgatcgggccgattccgattccgcggatccgcgttcggcgccgttggagaatggaggagcctgtaacggattcgagctcgacgctagcaggtactgcggcggcggcggcggaggaggaggaagcgttgtcgtgtgcgaggaggttcgcgaggccgagagtgtgtgcgcggttgcggaggcgcgtggggcggagagtgaggaagcaaccgccgtgcgcggtggcatcgaggggtttaatttcggggaattgaggcagaggaacgtgaattgtgggagttcggaggatttagcggcttcggtggtggtgcgagatgagaaggatgatggcggtgtgaatgcaagtcctgtggagaaaggcacgaacgagcctgataggaatg

SEQ ID NO: 10713 - DNA, 304 bp, Glycine max
  Clone ID: jC-gmle01810048e05d1
atgcaggcctataacattctattattattcagtaataatcaaattatatattgctgtcaaaattggaaggggaaaccatctataggtttaccttcaagttataaaccaaaagttgttcccgtatgtgccaggcaccgatgataattcaggagtctaagtgttcctgaattatcaccctgtggtctttcaaaagatgttttttcgggattcgggaacgagaggaggaatccttgggtaaacaggttatatcaagtcaagaaagcagtattttgtccttccaaactaatcttcatgaaaatgatgt

SEQ ID NO: 10714 - DNA, 450 bp, Glycine max
  Clone ID: jC-gmle01810048e06a1
ctctattctcttctgcatcaccattcaccgctgagagaacatcacaacacaacaaacaaaggagcctctcggtttccaatgtgaagagagcgaacatggctctaatcgctgccaggattctcggttccaattcgaggccggcggtcgcgctccaccgctggcagtggctggcgtactcctccgcctgcgcggcggtggcggagccggagaccacggaggtgaaggactacgccgattaccggcgctccctgtacggacagatcacgcacaaggcgctcctcgtcgacgccgttggcacgctcgtcctcccttcgcagcccatggctcagatatatagaaagatttgcgagaagtatggagtggagtattcagaggatgagatactgttcagatacagaagagcgtatggtcagccctggggaaaatctcgtctcagatatgttaatgatg

SEQ ID NO: 10715 - DNA, 278 bp, Glycine max
  unsure at all n locations
  Clone ID: jC-gmle01810048e06d1
aaagggncacatctttttcatacatatatacatacattggaaaagggggcagaacatgtacagccttacagataaagcctaaaggactctttacataacatcaaacttattggaaagagatcattttttaaacctgaaccccaatcctttgggctacctccttaaaggagtgaacatcggtttcccaaagccaagctttacagccaggatgcctggcaccccatatattatttttgggggcatccccaacatgaacagcatcctcgggttttacatcc

SEQ ID NO: 10716 - DNA, 415 bp, Glycine max
  unsure at all n locations
  Clone ID: jC-gmle01810048e07a1
tgtggttttcatcgtcttccttctcttatatttctttttttttttttgtcttcgccgcacgccgaaacaatggccggaaaaggagagggtcctgctatcggaatcgatctcggaaccacctactcttgtgtcggtgtgtggcaacatgaccgagttgaaatcatcgccaacgaccaagggaacagaacgacgccgtcttacgtcggcttcactgataccgagcgtctcatcggtgatgcggctaagaaccaagtcgccatgaaccccatcaacaccgtcttcgatgccaagaggttgattggtcgtagattcagtgactcctctgttcagagtgatatcaaattgtggccttntaaggtcattgctggtgctgctgacaagccaatgatcngtggtaactacaagggtgaagaga

SEQ ID NO: 10717 - DNA, 309 bp, Glycine max
  Clone ID: jC-gmle01810048e07d1
cacacgggcaaaacaattagtatcccatccaacaaaaatcataaaagttaaaattcaataaaaaagcatcaaataagttttaaacagataaatggatgaaagcaactacacatttagtccacttcctcaatcttggggccagcaccacttccaccagaaggagcagcataatcatcctcggctgccccagcaccagcaccacccatgtcaggaccagcaccaccttggtacatcttggcaatgataggattgcagatgctttccaattccttcattttgtcctcaaattcatctgcttctgcgagctgg

SEQ ID NO: 10718 - DNA, 560 bp, Glycine max
  Clone ID: jC-gmle01810048e08a1
aaaggaccagctagcttctgctgaagccgcaaagaaagaagctcaagatgagctagtgaagaaagctgtgcaatcagtattgccagtggtagagaagctccaagagaaatccacttccaagaatgctccagagtctaataaaactgaaatcaaaccccaagatgttatacctgatgacgaccaactagagactgatgtgtttgaagttccaattgagaagttgacaattgaattcagcaaaccagctgatcaatcagaaaaggaaactcaaccatttgaagacacaaatgcagcagcaatatcaaagccagaaaagctttctgtggatgaacatgaactgacactaaagaatgatgaaattgcattgttgaaaaccggtttggaagagaaaggtaaggagttagagtccatgagtaatgaaaaggagaatctgaagaaccaactgaatgaagcagtttcaaaagtgtctgctgctcaaaccaaggaagaaggaatgactttgcagttgaaccaactgagagaagagttggaaaccagtaaagccaatgcagacaagttgg

SEQ ID NO: 10719 - DNA, 271 bp, Glycine max
  Clone ID: jC-gmle01810048e08d1
gcagcttcaggagaagtgaaatatataatccatctttcaaaaagttcactaccttgcacagatcatgcaacaggaacactacacgcttaatggccttaataataccaggactgcctaaggacaccatagagatgcaaaacagtgagcaactgcttttgccgttcctgctaccattaaaacatgacctgtagctatggactactaattcactaagtggatatataagccagacatcacttctggcatattctttttccataaagcaccgaac

SEQ ID NO: 10720 - DNA, 570 bp, Glycine max
  unsure at all n locations
  Clone ID: jC-gmle01810048e09a1
caagtatgttgtttccttcctcaaggaacatggcaaggaaatatataatgaagttcatgcagcatacattgatacgatgaacaaggttcttagtgctcatttccgtgcttatatacaagcattggagaaactacaattggatatagcaacatataatgatttaattggtgtagagactagaagcagtggcctattcataagagcaagggaaccactgaagaatcgatctgctgtatttgctcttggggataggattaatatattgaaggatattgatgaacctgcattaattcctcatatagctgaagccagctccaataaatatccatatgaggtcctattcaggagcttgcagaagctgctgatggatactgctacttcagaatataatttctgtgatgatttctttggagaagaatctatattttatgaaattttttcaggtccatttggtgtcattgatgagcacttcaattctatacttccaaatngttatgatgctataggtctcatgcttatgattcgattatacacaagcatcagctcatcatgtctcggagacggatccat

SEQ ID NO: 10721 - DNA, 301 bp, Glycine max
  Clone ID: jC-gmle01810048e09d1
attacgaacaactgaggtgtcttccattatacaacaacagtgtgctccatcttttacttgtacttttgcaatccccaaataggtggcacaagaaacaagctaattattcggcggtcccccaagatacaaacggtatttacatatgcatacaggatcccagagcgacgtacattggcatatgtccacatgctatagaatacattgtgtatatgatgccccccacgcactatgacatactcttcatatcagcatgcccgggggcttgctcgaatatggtacatgcaaggatatctgggaacat

SEQ ID NO: 10722 - DNA, 470 bp, Glycine max
  Clone ID: jC-gmle01810048e10a1
aaaaacaaagaacaatgattctgagatctgcagcagctgcagcttctgcttctgcttctgtctcacgcatatcaaaaccccataacccaccattcctttcacttccacaccccaacactctcaaattccataaccaaccttctcataatccacgcaacaacgttcttctgccacttccctcacggactcaacgctgctacattcgagccataagtgacgcaactgcggaacctgaaatttctaagaaagaacaaaacgagtcacctaaagattggaagattaaaatgctctatgacggagattgccccctctgcatgcgcgaggtgaatatgctaagagagaggaataagagttacggcacaatcaagttcgttgatataggttctgatgattactctcccgaggagaatcaaggccttgactacgaaactgttatgggaagaattcatgctattctcttagatggatct

SEQ ID NO: 10723 - DNA, 290 bp, Glycine max
  Clone ID: jC-gmle01810048e10d1
gtaaaataagcttcttaatatgtccctgccatctcagttgtgataagtaccaaagcataaatgctggtaattcagcagatgctggtgtcatgtaacttgtacaatcttgaagggtcagctaagacttcatggagactacagggttaaatacaaatatattttatttacacacatttttatgccagatgcattgcagcaaaattggaaaacggtaatcaaatgcatatgctattgcggacaaagacgtaaaatgtgacactaatctatgttggattctttttgtaaatgag

SEQ ID NO: 10724 - DNA, 498 bp, Glycine max
  Clone ID: jC-gmle01810048e11a1
gtttagttatctactcttttctgcatgtttgttctctcaacgactcctccgcgaaagagtattattcaatattttggttgggttgaatcccggggttgaagcgttgcagacatcacggctattctaagagtgtctcgctccctcattcatgtccgatctgtacgacggaggacgggtagttgcgtaactgccgttaacccttcgccgcacggtgggcgtggtgctttgccttctgaaggtggtagcccttcagacttgctcttcctcgctggtggtggtttcttctagtttcttcactcttttcattacttttagcctgcatagttttaaataagaaaaaaaaaacagcgactttgtgactagttaagatcaccgtttcttcttcttcttcttgttcttcttcttctactactactactactacttttcctccacaaaatgatgctcagaatcaagagggttcccactgtcgttttcaactaccaaaaagacgacgct

SEQ ID NO: 10725 - DNA, 256 bp, Glycine max
  Clone ID: jC-gmle01810048e11d1
ggaacaaacagataactggatttattttttctcaaaggcaaggcaagccttttgatacattataccccaaaacaccaacaacagtgctcaggggggcagttattacatcggactttcacatgaacgcgtcataaagggggataaaagcaaattccttcaacacagggcctttagggtcaagcccagcacaattctttgggacttaaacggggacccaattcagcaattatttttaaagcactacgggtttgctgaa

SEQ ID NO: 10726 - DNA, 325 bp, Glycine max
  Clone ID: jC-gmle01810048e12d1
atgtggaaattatcccaaaacttgctttttacttcagtcaagaacagaaccacgaatagcgtgcttttaagcacttttccccccagacgccgttcatggatccaccccggcaagaaaaggaagattctttctccccaaaaagacttaaggttctggagaaggggagccttatgccctcgagaggaaattacaagccctcgggtcgtattcattacatcgggaagatttggctgcccaaacccggaataaccccccaccccgccttggggggggggggcccccatcttaaaaaactttgcttgggaagggaagggcttggcccccc

SEQ ID NO: 10727 - DNA, 538 bp, Glycine max
  unsure at all n locations
  Clone ID: jC-gmle01810048f02a1
ggatattctggaaggggtggctcggctccggatctccaatgacattgaatttgaggagcagagtttcatggctttgatgaatgagtcaaaggagagacgggcaaggcaaaacgctgatcctcctgctgtcccaatggagattcgagctgggaaggctcttgatgctatctatgtgtgttgctttggaaaggactccatagaggaagaagacaagagactgttgactgcaatgcttggcgctgttttcgcatcagttcaacgcgaagagatccggcgccttgtcaaagacaaggcagagaaagtagcagcaggagttgatgatgaatatgtttcagaactcaagcctctatcaaaagaagctgtggaactacaaatgaaagaccttcagttccttcaacaaaatagtgagacttaactaggtgaagcctgtngatttcactacacagtgatgcattgaatgaaattatattttgcgaactaagccgatttagccttatggggctactcagagaacaaagaccgtcatcatagatcacac

SEQ ID NO: 10728 - DNA, 538 bp, Glycine max
  Clone ID: jC-gmle01810048f02d1
aaataataaaatggcattggagacatgcattacttgtccatttataatgctaacataagttacatgaaatttctgcattttcagaaaagtcatgaccccacatttcaacatgtatctgaaaaataatagtgtgatctatgatgactgtcttttttctttgagtagcccccaaaggctaaatcggcttagttcacaaaatataatttcattcaatgcatcactgtgtagtggaaatcacaggcttcacctagttaagtctcactattttgttgaaggaactgaaggtctttcatttgtagttccacagcttcttttgatagaggcttgagttctgaaacatattcatcatcaactcctgctgctactttctctgccttgtctttgacaaggcgccggatctcttcgcgttgaactgatgcgaaaacagcgccaagcattgcagtcaacagtctcttgtcttcttcctctatggagtcctttccaaagcaacacacatagatagcatcaagagccttcccagctcgaatctccattggga

SEQ ID NO: 10729 - DNA, 546 bp, Glycine max
  unsure at all n locations
  Clone ID: jC-gmle01810048f03a1
gattcagaaaccctcacttgttgttggtgtggttgtgtttttgcatgcttcggacatgtcgatggcgatggtccacccttcggttcacccaatcgaagccccacccatgactgagcatgcaattgcaattgcaatgcccagacacactctgaaggatacgcagggcatgcccggcaccctcggtggcttcctcttgcgcttcgcccagttctctttcgccctcgtttccctctccgtcatggctaccacctncgatttcccttctgttactgccttccgctaccttgttgctgctgtcagcctgcaaagcttgtggagcctctctttgggagttgctgatatgtatgccattttagtaaggcgtggctacagaaatgtgagaattgtccgcttattctctatcggtgatgggattacttcaacacttacattttctgcagcctgtgcttctgctggtattacagtcctcattggcaatgatttgaatgattgtgcacagaaccattgcagcaggtttgagacagcaacagcaatggcgtttatgag

SEQ ID NO: 10730 - DNA, 189 bp, Glycine max
  Clone ID: jC-gmle01810048f03d1
ttttttttttttttttttttttttttctgggggctatacttgtgcaaactcattcacaccagcataaactttatattgtgccatgtagacatgtacttggaaagttaccatatcatcgtttgagaaattataaacctcacaactaaaagtttaaagctcatgccttgaattgaagagcagcaatatttc

SEQ ID NO: 10731 - DNA, 620 bp, Glycine max
  unsure at all n locations
  Clone ID: jC-gmle01810048f04a1
tgcaattgaagttaaaagccttagccttccctacaactccaaacacaaagacatcatcatccatggctgcctccgtctccactgtcggagctgtcaacagagctcttttgaacctgaatggttctggagctggagcttcagctcccagttcagccttctttgggaccagcttgaagaaggttattgcctcaagggtccccaacagcaaggtttccggtggaagcttcaagattgttgctgtagaagagaagaaagagattgaagagacccagcagaccgacaaggacagatggaagggtcttgcctatgatatctcagacgaccaacaagacatcacaagaggaaagggtttggttgactcccttttccaagctccacaggatgctggaactcactatgcagtcatgagctcctacgagtacctcagcactggacttcgccagtacttggacacaaaatggatggattctacattgctccaagctttatggacaagctngttgttcacatctccaagaacttcatgaccctgcccaacatcaaggttcctctcattcttggatctggggagcatggacaggaaatctttcatgtgagcttgtctttcagatggaatcacc

SEQ ID NO: 10732 - DNA, 310 bp, Glycine max
  Clone ID: jC-gmle01810048f04d1
aggacaaaaggaaaaggcaccaaattcaatttaagtggacactgtaactcaaaattatagaggaagacggtccaatatgaaaaatatagtaagatcatctcaaacttagcatcttctctttgcacctaagacattgagaatgctaagaatgttacacgcaagttccatcacaacttctagcacttggattagtacaacaaccttcacgaacagaaatatttacttgccaagtttgctttgcctcccattcaagactggaagaaagttcccctcttgatagcatcctcgttagcatttccaagagcagcct

SEQ ID NO: 10733 - DNA, 546 bp, Glycine max
  Clone ID: jC-gmle01810048f05a1
gattcagaaaccctcacttgttgttggtgtggttgtgtttttgcatgcttcggacatgtcgatggcgatggtccacccttcggttcacccaatcgaagccccacccatgactgagcatgcaattgcaattgcaatgcccagacacactctgaaggatacgcagggcatgcccggcaccctcggtggcttcctcttgcgcttcgcccagttctctttcgccctcgtttccctctgcgtcatggctaccacctgcgatttcccttctgttactgccttccgctaccttgttgctgctgtcagcctgcaaagcttgtggagcctctctttgggagttgctgatatgtatgccattttagtaaggcgtggctacagaaatgtgagaattgtccgcttattctctatcggtgatgggattacttcaacacttacattttctgcagcctgtgcttctgctggtattacagtcctcattggcaatgatttgaatgattgtgcacagaaccattgcagcaggtttgagacagcaacagcaatggcgtttatgag

SEQ ID NO: 10734 - DNA, 296 bp, Glycine max
  Clone ID: jC-gmle01810048f05d1
ctgggggctatacttgtgcaaactcattcacaccagcataaactttatattgtgccatgtagacatgtacttggaaagttaccatatcatcgtttgagaaattataaacctcacaactaaaagtttaaagctcatgccttgaattgaagagcagcaatatttcaaaggatcaaaaaagcccatggttaagatttgcaacaatcagggccatcaatcctcaaagttacatgacatacatagctaaaaccctttcttgctgcttctatttggaggccagcgtccagaaatttaaaata

SEQ ID NO: 10735 - DNA, 546 bp, Glycine max
  Clone ID: jC-gmle01810048f06a1
aactgggagttctagatctctgttcatttggaagcccaaggagaagtcagagcttgttgaggagaaggatgaacagaaaattgtggtttgtggaaaagctgagaagaaacgtggaaagaaaaatggcaatattagcgatgaatctgatgatgaaggattcatgtccaagtccaagaagtctaagtctaaaaagacagagtggaaattgtctcgctgcactactaaggataatcgctgaataatgaagtcagagtgcattgaggattttcctacagttttttttgtaaggttttccaatccaactgctaaccctgtatggtggccaaactcctcccctccttgttttgttttttaggaaatgggatggatgctgttatcacattcttggcttgttcccctggttgtaagatttgatgtttttcttgaagtagtgattttgtatcagatacaagccttatgccaccattttggcttttgtattttgtagtgctagcgtatcatatttaggacataatgcaccatagcattttaggatatagtaatagt

SEQ ID NO: 10736 - DNA, 290 bp, Glycine max
  Clone ID: jC-gmle01810048f06d1
aagcttgaagagactataccatttacaaacatcaacaaaaaggtacaatccaacaaaacactattactatatcctaaaatgctatggggcattatgtcctaaatatgatacgctagcactacaaaatacaaaagccaaaatggtggcataaggcttgtatctgatacaaaatcactacttcaagaaaaacatcaaatcttacaaccaggggaacaagccaagaatgtgataacagcatccatcccatttcctaaaaaacaaaacaaggaggggagggagtttggccacca

SEQ ID NO: 10737 - DNA, 526 bp, Glycine max
  Clone ID: jC-gmle01810048f07a1
aaaggaccagctagcttctgctgaagccgcaaagaaagaagctcaagatgagctagtgaagaaagctgtgcaatcagtattgccagtggtagagaagctccaagagaaatccacttccaagaatgctccagagtctaataaaactgaaatcaaaccccaagatgttatacctgatgacgaccaactagagactgatgtgtttgaagttccaattgagaagttgacaattgaattcagcaaaccagctgatcaatcagaaaaggaaactcaaccatttgaagacacaaatgcagcagcaatatcaaagccagaaaagctttctgtggatgaacatgaactgacactaaagaatgatgaaattgcattgttgaaaaccggtttggaagagaaaggtaaggagttagagtccatgagtaatgaaaaggagaatctgaaaaccaactgaatgaagcaggttcaaaagtgtctgctgctcaaaccaaggagaaggaatgacttttgcagtgaccaactgagagaagagttg

SEQ ID NO: 10738 - DNA, 310 bp, Glycine max
  Clone ID: jC-gmle01810048f07d1
gcagcttcaggagaagtgaaatatataatccatctttcaaaaagttcactaccttgcacagatcatgcaacagtaacactacacgcttaatggccttaataataccagaaatgactaaagaaaccagaaagatgcaaaacagtaagcaactgcttttgcagtttctgctaccatcaaaacatgaccttagttaaagtactactaatttactcactgaatatataagccagacatcacttttggctcttctttttccataaatcaccaaacattctaatcccagaacccttcctctttccacctccaaaac

SEQ ID NO: 10739 - DNA, 561 bp, Glycine max
  Clone ID: jC-gmle01810048f08a1
tcttcttcttcttttgtttctttttttttctgcgtaggcaaagagagagagagaaaagcgtgaatcatgtcggacgaagagcatcacttcgattctcaggcggatgcgggagcgtccaagacgtatcctcagcaggctggtaccattcgcaagaatggctacatcgtcatcaaatccaggccttgcaaggttgtagaggtctctacgtcaaagacaggcaagcatggacatgcaaagtgtcactttgttgcaattgatatttctaatgggaaaaagcttgaagatattgttccatcatcccacaactgtgatgttccacatgtgaatcgcactgactatcagcttatcgatatctctgaagacggctttgtgagtctgttgactgataatggaaataccaaggatgatctgaagcttactactgatgaggcattgcttgctcagattaaagatggattttctgaaggaaaagatctcgtggtttctgctatgtctgcaatgggagaagaacagatctgttcactgaaggacatcggtccccaaaaataatatgatgctatg

SEQ ID NO: 10740 - DNA, 293 bp, Glycine max
  Clone ID: jC-gmle01810048f08d1
cagggcagagaacaaatagggttatatattaaactcaacaaaaacaaataatatgagatgtttatgagaatttcatccacccaagaccgttgtgttccttaattaatggacaaagctaaacttagctcaatttcttctatcccaagcatttgagtttcaagcacaggcaaatttccatcttatgaagtttattttgcacacatgtatcggagaatatactacctgttagcaacataagaagaaaaagcgtgctatcagctatagctacagccatagcatcatattaatttttg

SEQ ID NO: 10741 - DNA, 556 bp, Glycine max
  Clone ID: jC-gmle01810048f09a1
cggatctacaacaaactcatggacttcattcggaatcagcacagggacagaggctatcaagaggtcatatctccaaatgtatttaacatggatctatgggtgcaatctggccatgctgcaaattatagggaggatatgttgatcttagaggtcgacaaacaagagtttgggtcgaaaccaatgaattgcccagggcactgcctgatgtttaaacacagggttcgatcatatagagaacttcctcttcgctttgctgattttggggtttagcatcagaatgaggctagtggtgccctgagtggattaacacgtgttacgagatttcagcaggatgatgcacatatttgctgctgggagtcccagataaaggatgaattgatgaatggcttgaatttcatcaattatgtctataagatatttggcttcacgtatgagctgaagcttttcacgaggccagagaaatacctaggagatattgcaactagcgacaaagctgaaagtgctcttaaagaatgctcagatgatcttggcagccctggcagttgaatgaagggga

SEQ ID NO: 10742 - DNA, 296 bp, Glycine max
  Clone ID: jC-gmle01810048f09d1
actaacaatcataattgaggaccaactcaaaaatgtatattttcctcaaatgtcagccaccaacttaaaagaaaaaaaaaatgtgacatgtaaactctaatgctgatgtaaaaagctcggaacgtaaacaaaaacgatacaaagaaaatattgttaccattcaaatcataaaataaaatcaggataaattgataggttgaaaataaaaataaaattgtgacatgcacacaactgtgtaaaactaaggtatttggggctgaaatttttcttcagttttcacaagcaaagtatcattc

SEQ ID NO: 10743 - DNA, 480 bp, Glycine max
  Clone ID: jC-gmle01810048f10a1
ggggaagcaccagatgcacgtgagggtcatgatgcagcacttgttggcaaacgactatttatgtttggtggttgtgggagatctgctgataacattaatgaggtgtactacaatgacctttacatattgaatacagaattgttcgtttggaaccgtgctacaacatcaggcactccaccatctcctcgtgatggccatacttgctcatcttggagaaacaaaattattgtgataggtggggaagatgaaaatgattcttatctgtctgatgtccacatgctagatactgatactctaatctggagtaaactgtgtacgtcaggccaattgttgccacctcgagctggtcattctacggtttcttttggaaagaacttgtttgttcttgggggctttacagatgctcaaagcctatacaacgacctgtatatgctcaacattgagacttgtgtgtggacgaaagtggcaattacaccctat

SEQ ID NO: 10744 - DNA, 293 bp, Glycine max
  Clone ID: jC-gmle01810048f10d1
aatcttgctttgttttttttttttttgtattttttggttttttttattttgcctatcttattttaattttgttacaaattcattttttttttcctgttgaactgtattaaaaaaaaaaaaaaaaaacccccccgggggggggcccccacctgggggaaaacctacaaacgggggggcccccggcaggccccccggaggaaaattttttaggccccaagggggaaagaaacagcacaggggggaaaaaaccggtggcacccagcctgcaaaaaaaaaaaattttccgccccccc

SEQ ID NO: 10745 - DNA, 421 bp, Glycine max
  Clone ID: jC-gmle01810048f11a1
gacccgtcgtggagcaaaactttacattttgagaccgcaaaatgtctgaagtgaatgcgacccctgaaattcctcaaagcaacaccatctacatcaacaacctcaacgagaaaattaagattgatgagttgaagaagtctctgaacgctgttttcactcagttcgggaagatacttgaggtgttagctttcaaaaccctaaagcacaaaggtcaagcttgggtggtctttgaagatgcctcttctgcttccaacgccctaaggcaaatgcaaggtttccccttctatgataagcccatgagaatacagtatgcaaagaccaaatctgatataatagcaaaagcagatggtactttcgttcctagggaaaaacgaaagatgcatgatgacaaagccaaaaagcggaaggaccaacatgatgc

SEQ ID NO: 10746 - DNA, 284 bp, Glycine max
  Clone ID: jC-gmle01810048f11d1
agaggacaaccaacatgattgttttcacatgcccaaggaagaagacatcgggtatttacgtactgagcgttcatccagcaaatgatagcaggtgatcttcatcgagacaaaagcatgacaaatgacaattctagaaagagaaatagttttgcaacagataaatttgaaacagtatttttttaaatacatatttgtataaaaatggcaaagttattatccctaactacaatcatacacgaagcaataaataccaattaagatagaccactgaattagatggatta

SEQ ID NO: 10747 - DNA, 369 bp, Glycine max
  Clone ID: jC-gmle01810048f12d1
acaatataattctttatttttaatttatttttttaaaaaaggggcccctttcccccccccaacaaaaatgtagaaaaaaaaaacgggaaaaaacccccccaacccccccccaattaaaaaaaaacaacgtttaccaaaaccccccctctaggggccccccccccccccccccaagggggaaaaaaatattaacccccccccccccccctggggaaacccccacccccccgttccttttaaaaaaaaggaggggaacaaaaatctccaaccccccctttttaatttttaaatcaaccacccccgcagtccgttcccccaaaacacccccaaaaaccccccccgggggcaactgcaacattttttttgccc

SEQ ID NO: 10748 - DNA, 429 bp, Glycine max
  Clone ID: jC-gmle01810048g01a1
gccatttgggagttaggttctgcacgctctgcttccagcgagtgttatttcttcgtttcaacaccttaatttgcacacgctgcttcttcagcttgagaaatggcacaagaaacccttctattcacatctgaatctgtaaacgagggtcaccccgacaagctgtgcgaccagatctctgatgcagtgctcgatgcgtgccttgaacaggaccctgacagcaaggttgcctgtgagacatgcaccaagaccaacatggtcatggtctttggagagatcacaaccaaggccaacgtagactatgagaagattgtccgtgacacatgccgcgaaattggattcatctctgatgatgttggtcttgatgctgacaaatgcaaggtgttggtcaacattgagcagcagagccctgatatcgcccagggtgtgcac

SEQ ID NO: 10749 - DNA, 423 bp, Glycine max
  Clone ID: jC-gmle01810048g01d1
ggggagaagacattagacctttgaatgaagttgtagtagtcatggaacacccaaattttttattcacacctagcaagaaattcattgggggggggggttaacttcacaacaattttaagcttgggggttttaaaacttgggggggttcacaacttcccaggggaaggcgggggcatccctttcaaagggtccataagcaggtgttttgaggaacctatggccaccccttttaagggccaagttaatggggatcattccagggctgaagtcgaaattcttctttacaatttgaagaattttcttggcaggaattttcccagtttcataaggggccacaaacactgacaagggcttagggacaccaatggcataggaaacttggacaatgcaccttttgggaagggcatttgccacaacactttt

SEQ ID NO: 10750 - DNA, 453 bp, Glycine max
  Clone ID: jC-gmle01810048g02a1
gttctttccatggatgcaaaagagcatactgtaaaggtacactggagaactgttcccacatctgagacagataatttagctggagacacaatgattgaaactgtgagtgcctatgaacttgtcgagcacccagattactcctgttgttttggtgatattgtgttcaaggaggctcaaaaacagcttggctaccaagctgataaagataatgcgaagtcagtgactgacttgaatgtggaagttcctctgataaactgggaccaaatcagtcatccgaataagtatgcagataacagttacctctcctgcattggcaatgttactggttttgaagatggtgacatggaagtgaaatgggctacttgtttaacaaccaagggtgcatcttatgaaatttttcgaattgataagcacgaaggttcaactgcaacctctgtttcttatgaagcaaat

SEQ ID NO: 10751 - DNA, 521 bp, Glycine max
  unsure at all n locations
  Clone ID: jC-gmle01810048g02d1
attatcaatacatcttcaccacttcttttattttgggagggggtggtggtttacaagaggatattggtatttttttatcaagcacacatttgatattatacaagataagtgaaaacaaattaatattacacataaagtttgaatatccttgacagaaagctggacggcttattcacaacaaggtagaacagacaattacttttgcatctcagcaaactggctgcaatcgattcccttgtcagaaaatgcctctactagctttgggaagagcttagcaagcattattttaaatccagtagaagttcccttttggttttcatgctcagcttttccaccaccaaaaccacatccaataggagctccttcaagatatgccttacaagccaaaagtatatgtttggagcattgtctaaagtgctcttccaccaatgcctcaaaatgcttgggaggctttcttaatagatacaaaatggatttgcaggtgacaaggaaagcattntcattgtaactcactgagtttc

SEQ ID NO: 10752 - DNA, 571 bp, Glycine max
  Clone ID: jC-gmle01810048g03a1
ggagaatagaaaaacagagatggattgccctgatcagtcagttattcgccgtgtttctagtgcagacaaaattagtcttcaggacattgcaagagaacgagttgatataatatgtgagaaaatgcatcatctacctgacgaatttcttgaagaactgaaaaatggacttcgagttatccttgagggagggaatggctcacagcatagagaggaatttttcattttgcaaaagcttgttcagagtagatctgatttaacagccaagacattgataagagcacatcgtgtacagcttgaaatccttgttgcaataaatactggaattcagggatttttacatcctagcatcagtctatcacaaacatcgctgattgaaatatttgtgtacaagagatgcagaaacatagcttgccaaaaccaacttcctgctgaagattgtacctgtgagacatgcactaatggcaatggtttctgcaatctttgatgtgtgttatctgcagcaagtttgactttgaaagtaatacatgccgctggattggatgtgattgtgttctcatggactcacacagac

SEQ ID NO: 10753 - DNA, 269 bp, Glycine max
  Clone ID: jC-gmle01810048g03d1
ccctctaaaaggggtttaattttgaattttgataaaaaaaaaatccccttcctttaaaaggggtttaatttcgaattttgataaaaaaaaaaaaaatcccctttttttaaaccccaaaacattttcagtttccttggttaaccactacattctaaggccctgattttgcacaaccggcctcccacttattttcctaaaaaggggaaaaaaagtggggcaactttggcttgaaaacattaccggggttttaaaacccaacctaggggggt

SEQ ID NO: 10754 - DNA, 595 bp, Glycine max
  unsure at all n locations
  Clone ID: jC-gmle01810048g04a1
ggcgcacgttagcacaaactatcatggccacggcaacagcagctgccacctcgtcctttatggggacgcgtctcctggaggctcactccggagcggggcgagtgcacgcccgattcggcttcggcaagaaaaagggctcccgccccaaagaaagcctacaggggatcgggccgagacaccgacagacccctttggtatccgggcgccaaagcgcccgaatacctcgatgggagtcttgtcggagactacgggttcgatccgtttgggctagggaagcccgcggagtacctgcagctcgagctggactcgctggaccagaaccttgcgaagaacgtggctggggacatcattggaaccaggaccgagctcgcggacgtgaagtccacgccgtttcagccctacagcgaggtgtttaggctccagaggttccgtgagtgcgaactcatccatggaaggtgggccatgctcgccactctcggagctctcactggtgaagtgctcactggtggtacatggcaagacgcccgaaaggttgagctagtagaaaggtcatcataccttgggcaccacttncttcttatcaccacactgatct

SEQ ID NO: 10755 - DNA, 325 bp, Glycine max
  Clone ID: jC-gmle01810048g04d1
ttcgtttttttttttttttttttttttttaccctcgtcattccctctcgattccgggcataataaacatttacaggagaacacttaacatcaagcagaagcatttttggttaacctctgcaatttcacgcttcaagtttttcacaagtactactaatccaactaagtgaaaatgttctaattacaaccaaaagccgaagaagaaaagacttttacaatatgctaggaatagcgacgaggcacaagaaagactcttcttcttaagaggaggatgagaaggtgtcaatgatggctgtgtggagagggtcactcaagcgggtggccca

SEQ ID NO: 10756 - DNA, 522 bp, Glycine max
  unsure at all n locations
  Clone ID: jC-gmle01810048g05a1
ctgggcaatcaaaaggctatggctttgttcaatttgataatgaggaatctgcccaaaaagctatagagaagctgaatggtatgctgttgaatgataaacaagtgtacgtgggacccttccttcgcaagcaagagagagaaagtgctgctgacaaggcaaaattcaacaatgtttttgtgaagaatctatcagaatcaaccaccgatgatgagttgaagaacacttttggtgaatttggaactattactagtgctgtagtaatgagggatggggatgggaaatcaaagtgttttggatttgtgaattttgagaatgctgatgatgctgctagggctgttgaggctctcaatggcaaaaattttgatgacaaagaatggtatgttggaaaagctcagaagaaatctgaaagggagaatgaattgaaacaacgatttgagcagagcatgaaagaagctgctgataatatcaaggcgcaaacttgtatgctaaaanattagatgatagcattggtgatgaaaaact

SEQ ID NO: 10757 - DNA, 292 bp, Glycine max
  Clone ID: jC-gmle01810048g05d1
acggaaactccaaaatataaaccttaagaaacaaggttgtcattaagagataacgaaacaaactcaacctgaaatctgtatcaaagccagtgcagaaaataacaatccatcatcactaagtaaactccaaaatataaaccttaagaaacaaggttgtcattaagagataaggaagccagctgatcagcagtaccgccagcctgctgctgagcaacattccttaggacgtccattgcctcagccacctttgctttcagggcttctggcgactcaagcaaatgcagaacttcag

SEQ ID NO: 10758 - DNA, 442 bp, Glycine max
  Clone ID: jC-gmle01810048g06a1
aaaccgacttcaaagttccggaaacgattacgctttgcgtcaacaactgcggcgtcaccggaaaccctgtcacgaataacatgtgccagaagtgcttcactgcctctaccgccaccacttcctgcgccggaggtgcccgaatagctactacggcgaccagatccggcgtattcgcgcgttctcagaagagatcttttcctgaagagccctcgccggtggcggatcctgcttcttcggaccagacgacgccgtcagaggcgaagcgcgtggtctaccgctgctgcggatgccggcggaaggtcggactcaccggattccggtgccggtgcggcgagctcttctgcgccgagcaccggtactccgaccgtcacgactgcagctatgactacgaagccgtcggaagagaagccatcgcgagggagaatccggtgatcagagctgc

SEQ ID NO: 10759 - DNA, 305 bp, Glycine max
  Clone ID: jC-gmle01810048g06d1
aaacataaaaattagacgagaaatttactaaataaaaaaaacgatcagagtttgatcgatgaaacacaagagaaattcagataaattcttcttcatcttttatcagcaacaatctctctctctctctctctctctcaatctaaaacctcacacacgctctctctctctctcttaaatctgtcatctgctacttttttttttccttcttctctatatatataaatctgcgaaaaaaaaaaacacgaaaccgcgtcaaccgtcaacgacgtcgttttgagattccgttccgttcgggtttttccttt

SEQ ID NO: 10760 - DNA, 151 bp, Glycine max
  Clone ID: jC-gmle01810048g07a1
ctctgaagtgggattatttatcgggggactctgtgatagttagtctcagaaatcggtaaacaaataccggttacagtggatggtcatgtattattaagtgtaggaattggtaacgaataattattttattaatgaaacatgtatttttttt

SEQ ID NO: 10761 - DNA, 253 bp, Glycine max
  Clone ID: jC-gmle01810048g07d1
tggggatgatccgagtcaggttcgccggtacccgtaagtgaactgattccaggggctgactgctcactggtcggccgccgccctttttttttatgggaaaaaaaaatacatggtaaattaataaaatagttatgctgcaccaaaaactacacttaatcagacatgaccatccactgcagccgggataaggggacccatttctgagactaactatcacagagaccacagctatataatgccactacagagctac

SEQ ID NO: 10762 - DNA, 385 bp, Glycine max
  Clone ID: jC-gmle01810048g08d1
tgggaatgatcagactccaggttgccggtcgcccttaatgaactaattcgccggagctgacctagctcagtggccggccttcgtcctttttttttttagggtctacacacttataacagaaaaggtttacaaggaatgacagtgcgaagctggaaatatagcgataagctattaatggctgtggttttagggctaagcaattaacacattgggataattttgaatgttgcacactaataaatcgactaattatacccatgggttcataacaaatttgaggacccgattggatcgctggcaaacgcctacaaaatgaacgcttggattgcataaagggtcccttataaatagcaatggtttatgcatccctatgccaagcctcaca

SEQ ID NO: 10763 - DNA, 525 bp, Glycine max
  Clone ID: jC-gmle01810048g09a1
gtctactgctcaccgcgaatgacttgcaactgaaccagacgaaggaagcaacttctgggaacgaacaacagtacaaccacaatccagtagacctggcaccacagtgcaagcagaacacaaccgaccagcaccgcgctccagtcgcgacgagacacacgctcacaatgtccttccccacctccaacaccacaacccgcagcagctcacccacaacgacatccgaaacccccaccaccctctccaaaccccgcatcctctgcctccacggcggcggcgtcaacagcgaagtcttccgcatgcaatgccgctccctcatcaaacacctcccagccttccgcttcgtcttcgccgatgggccctggttctgcgaagccggaccgggaatcgtccccgtctatgaagactgcgggccttttcgacgctggcttcgttggttaccgcatcagcctgaaacggacgatgagtccgctactgaggagattttctatgagattgagaggtgtaagagggaagatgatgataggg

SEQ ID NO: 10764 - DNA, 299 bp, Glycine max
  Clone ID: jC-gmle01810048g09d1
cgaaaaagctggccgcggacggctgtgatgattactatcatgatcttcgtctatatctccttattcttcgcccatcacgtctccctcaatggtatcctctccctcctcgcgatatcgtatacccaatctttaatcggcttcacatcagtggacttgatcggcaccctgtgatccccatcccactccacaacttcactcgtctccggatcacaatactgcttcaacaaccttcgatgcaaatgcaacccattatccctcaaaccatgcacatgcagcgtaggtaacttcaaaatatgcgg

SEQ ID NO: 10765 - DNA, 471 bp, Glycine max
  Clone ID: jC-gmle01810048g10a1
ggttcatgagcaggttcgggaagagttaccgaagcgaggaagagatgagggagaggtacgagatattctcgcaaaacctcaggttcatccgctcccacaacaagaaccgcttgccctacactctctctgttaatcattttgctgattggacttgggaggagttcaaaagacacagactaggcgctgcccaaaattgctctgccactcttaacggcaaccacaagctcactgatgctgttcttcctcccacgaaagactggaggaaagaaggaatagtgagtgatgttaaagatcaaggcagctgcggatcatgctggacattcagcacaactggggctttagaagcagcctatgcacaagcatttgggaagagtatctctctttctgagcagcagctagtggattgtgctggccgtttcaacaactttggctgtaatggtgggttgccatcacaagcctttgagtacatca

SEQ ID NO: 10766 - DNA, 297 bp, Glycine max
  Clone ID: jC-gmle01810048g10d1
gctatcttaattcttataactgataattaaagcggggcgcatcaatacaatacaatacaatatgtaactatgaactatcaatatatgatcgttatttatgtctgtgatacacacaattcaggccatgatattcttacgtgatttacagcaacttctaacttatttaatacatcataccaacccaactaggagcaattttcattatacaatgacacttatctttaaactctgaagcatgacaaggtggtagtcaccagggaccatattcttatgcaatttatgccacaactggataag

SEQ ID NO: 10767 - DNA, 474 bp, Glycine max
  unsure at all n locations
  Clone ID: jC-gmle01810048g11a1
tgcagcgatttgtttttatctccgccgtaccatgtcggaagcaccaccgtctcagccatcgcctccaaccgccaacgcgtcaccaccgccgtactggtgctaccactgcgagaagcgcgtctccatcgaaacgctcgcgaatctccccgacgtcgtctgcggtgagtgcaagaacggcttcgtggaatccatccacacgccgtcgcgctctcgctccccctccgcctcctgcgacgacccctacttcggctcgcagttcctccaggtccttcgcctaatcgctcagtcggcgcgtgacgacgacgcgtcgccttcgtcgtcgncaagccgctctccggagaacgatttcctcaggatcgagctcggtggctgggacaacgatgaggagaacgacaacgacaacaacgacgacgaggagttcgaggaacacgatgagggcgaggatcgctccggcacgaggatccgcacgggaga

SEQ ID NO: 10768 - DNA, 303 bp, Glycine max
  Clone ID: jC-gmle01810048g11d1
aacagggagaaagtgaaaattccattgaggtagtgtgatatgatcacattcacattgattcaaatgctatatacaagtatcttagcatcatctgaaagctaagaagccaactacataataaaagcttcaaataaattaataataacatggcgcaagctttgatttaaatccactaatgccaacaacaaaaaaagaagaaattcagaaaccacgaaatatattacacaaatggcagaagagaacagagcaagacggagcataccaagcggaatcaaacaatggcacttccacctccaccggaac

SEQ ID NO: 10769 - DNA, 514 bp, Glycine max
  Clone ID: jC-gmle01810048g12d1
aacagggagaaagtgaaaattccattgaggtagtgtgatatgatcacattcacattgattcaaatgctatatacaagtatcttagcatcatctgaaagctaagaagccaactacataataaaagcttcaaataaattaataataacatggcgcaagctttgatttaaatccactaatgccaacaacaaaaaaagaagaaattcagaaaccacgaaatatattacacaaatggcagaagagaacagagcaagacggagcataccaagcggaatcaaacaatggcacttgcacctccaccggaactcgaagcagagttaaccactctctcttcctcatattccttatcatccgctggtagctcatacctgcaaacagggcaagaatttcgagaactcaaccaaggaacaatgcaatctccatgatacccatgcccgcacggcaacctcttcgccaagtctccaacaccgagcaaatccttacatatagcgcacgccacggcttcgctttcggacgc

SEQ ID NO: 10770 - DNA, 477 bp, Glycine max
  unsure at all n locations
  Clone ID: jC-gmle01810048h01a1
gttctttccatggatgcaaaagagcatactgtaaaggtacactggagaactgttcccacatctgagacagataatttagctggagacacaatgattgaaactgtgagtgcctatgaacttgtcgagcacccagattactcctgttgttttggtgatattgtgttcaaggaggctcaaaaacagcttggctaccaagctgataaagataatgcgaagtcagtgactgacttgaatgtggaagttcctctgataaactgggaccaaatcagtcatccgaataagtatgcagataacagttacctctcctgcattggcaatgttactggttttgaagatggtgacatggaagtgaaatgggctactggtttaacaaccaaggttgcaccttatgaaatttttcgaattgataagcacgaaggttcaactgcaacccctgtttcttatgaagcaaatgttgaggagtngacttcagagatg

SEQ ID NO: 10771 - DNA, 521 bp, Glycine max
  unsure at all n locations
  Clone ID: jC-gmle01810048h01d1
attatcaatacatcttcaccacttcttttattttgggagggggtggtggtttacaagaggatattggtatttttttatcaagcacacatttgatattatacaagataagtgaaaacaaattaatattacacataaagtttgaatatccttgacagaaagctggacggcttattcacaacaaggtagaacagacaattacttttgcatctcagcaaactggctgcaatcgattcccttgtcagaaaatgcctctactagctttgggaagagcttagcaagcattattttaaatccagtagaagttcccttttggttttcatgctcagcttttccaccaccaaaaccacatccaataggagctccttcaagatatgccttacaagccaaaagtatatgtttggagcattgtctaaagtgctcttccaccaatgcctcaaaatgcttgggaggctttcttaatagatacaanaatggattgcaggtgacaaggaaagcattttcattgtaactcactgagtttc

SEQ ID NO: 10772 - DNA, 441 bp, Glycine max
  Clone ID: jC-gmle01810048h02a1
gaatgcgcaacatatgaagtctcacaggaggcaggcttctctggtggggagtgtggccatgggtttgttgttttccctcttctgcgtctttggtttgatcattattgccattgagaccaggaagaggaggaagaagaaggaggctgctcttgaagcctatgctgatggtaatttgcattcgggtcctgccaacgtgagctggaagcacaccagtacccgggaagcgcttagcataaaccttgcaacgtttaagaggccgctcaggaggcttacttttgcggaccttcttgacgctaccaatggctttcacaatgatagtctcattggctctggtgggtttggggatgtttacaaggctcagttgaaggatggaagtgttgtggctatcaagaagctgattcatgtcagcggtcaacgggacatggaattcactgctgaaat

SEQ ID NO: 10773 - DNA, 501 bp, Glycine max
  Clone ID: jC-gmle01810048h02d1
gaatgagaaaagtacttttgaaaattctaggaaaacacagatggtaacaactgaagctgtttatatacaagttaaacaactttttttttttgtataaaataacaagactacatacatcaaaggcattcattcccccctttaaccgtttcccccttgtgtctgaaataatttgaagcggcaaagaggaaggaaaaaactttgaggggagctgaatccgtcatctcctccttttctctcttcttgtctgtttcccaaagaatccacatgacacttccggaatttgttgcctaatgcttgctcaattcaggggtttctttaatgctcatctccaccatttcaactgcattgaaactgtcatcttcattggctatggttgactgagaatcaatcccagatcctgcctgaatctccttgaacattgtcaacacttgaaatcatcgtggacgtctccaatgccgatcatccaaacaggaaactgcaatcttcaggtgctgcaaaagc

SEQ ID NO: 10774 - DNA, 534 bp, Glycine max
  Clone ID: jC-gmle01810048h03a1
ggtaatttgtcagggaaggatgattatatggagattgatggtcaaggtagcagaagtgaaactagtggttatcattcggatacagatttggaagatgattgcagagaaacttctgaacctccggttccttcacaaagagttgtcaacatgcttcagggttgtagaagtgttgatgagtttgagagactgaacaagatagatgaaggaacatatggtgttgtatttagggcaaaagataagaagactggtgaaattgtggcattaaaaaaggtgaagatggagaaggaaaaagaaggttttccactgacttctctcagggaaataaacattcttctttcctttcaccacccatgcatagttgatgttaaagaagttgtggtagggagtaaccttgatagtattatcatggttatggaatacatggaacatgatcttaaaggactaatggagggaatgaagcgccctttagccagagtgaagtaaaatgcttaatgctccagcttttagaaggtgtgaagtatcttcatgacaact

SEQ ID NO: 10775 - DNA, 304 bp, Glycine max
  Clone ID: jC-gmle01810048h03d1
tttttttttttttttttttttttttttttttttttttttttttttttttttttttttttttttttttttttttttttttttttaaaaacccaaaacccggttaaatgggttcccccggcaaaaggggaagggtacacatacaactttcgaggaaaacgggcttttccttttttaagaggggaaaattgcccaattttttgggcaaggggggccccaggggcatttcaattttggggtaaagcctaaggggggtcacccgaaaaagaacgggcccccgggggggaaaaaaaacttttttgggccc

SEQ ID NO: 10776 - DNA, 558 bp, Glycine max
  Clone ID: jC-gmle01810048h04a1
gccatttgcatgagatagatagatagaacgaaaccgaatcgatgatggggtgggtggcgaatcggtggacgggcgtcgccgccgccatatggatccagtggagctgcggcgcatcgtacaccttcagcatctactcctacgtgctcaagtccacgcagggctacgaccaatccacgctcgacaccgtctctgtcttcaaggacatcggcgccaacttcggcgttctctccggcctcctctactccgccgtcggcctctacacaacccaccgcgcctccccctccaagtccatatggacctcgctcagcgggccctgtgtcgtcgtcgcggccggcgccgtccagtgcttcgctggcttcatcttcatctgggcctccgtcgtgggcctcgtgagcccgactgccgtgccggtcatgtgcttcttcgcgtggctcgcgtctaacggtcagaccttcttgaacacctaccatgtcgttaccggcttgcgcaattttcctgagtacagctgcaccatcattggtatcatgaagggatttctgcgactgagtggagctatct

SEQ ID NO: 10777 - DNA, 301 bp, Glycine max
  Clone ID: jC-gmle01810048h04d1
aaaattctgtgtacatttctcttataacaaataaaatacaattcaaataatcctcatagacaacccatagaaaactgcattaactatatttatgccaaacagaccagagaaaacaagactggtttcctcagcctttacctagtgttgaaatgcaggcaaatgcaatctccatcatcttgcataatgttttaatcttctaagcacaacttgcttatagaacctccgggtccggaagaataatgccaaaccaaccaaaaacgcaagaaaagcaacagctgccaggataaaaaatgacggcatg

SEQ ID NO: 10778 - DNA, 497 bp, Glycine max
  Clone ID: jC-gmle01810048h05a1
gataaatgacaaatatggaactcattcattccccttctatatcttacatctatagtctttttgccctggcgtatctgtttcacatttaagaaaagtctctagtctagggttatagattgggggaatactctgcaatccgaaattttcttgactgacatgacagaaatgagtattctaaaaaaattcatagaatgtgccgaactgtttgtcttacatgacatgttaaactgaatgaccggaaacacatctacaagacctgcgtactggaacctatagagaaacagtcctattaatcagaacgctcaacgaacatcgcatgaatacgatattgcacttctcgactaatataatttgagtctttattctaagcggttattctattcttggtaatcaagaacttgttgtgactaactcttcgattcgagaatttatatatcacttaagtgacacaatgaaaggtatgcctagtcttctattaactgaaccatgtatcggac

SEQ ID NO: 10779 - DNA, 308 bp, Glycine max
  Clone ID: jC-gmle01810048h05d1
acaagttaattgaagaaactcaattcgtgtaatcaaattccccaaccccctctctttttatttgttcactacgcattatatgcaataaaatattatatggcagaaatattctaagttggaaaaaatagaaactaagatataggatttttcaggaagggggtaaaaaagattattttattgatagtttttagaatatttctatttcgacacaaacaggaaggaataggaatcggactctaggaaaagacaaaaaatcccccctagagtaccttttccatattttaattgaatgcgattcaaattatcta

SEQ ID NO: 10780 - DNA, 530 bp, Glycine max
  unsure at all n locations
  Clone ID: jC-gmle01810048h06a1
attgattcagttttgtgacgctggaacttcatccaagctgttgatcaagggcggcaccgttgtgaatgctcaccaccaacaggttgccgatgtctatgtcgaagatggtatcattgttgccatcaatcccactattacggttggagatgaggtgacggtcatagatgccactggcaagtttgtcatgccaggttaccccttaatcttttcaatctaacactcaccactacttaatatctacacttaattaaagaaaatgaatcaggtcctgctagaattaatgtcatagatgaaggatctatgtatgtacataagatcatgggaagatacatatctgtctttctagtcttcttgcatctacttcaaagtcttgtataaaacaatattnttggtccttagtcaggcacttgatgcactattggatggttctgatacactacaccataggaaggaattgaatgcgtggtagtgagctctattaacaaatcaccttccttaatggtattccaaaactggtggaattcctactc

SEQ ID NO: 10781 - DNA, 292 bp, Glycine max
  Clone ID: jC-gmle01810048h06d1
caaaccaatgacatgctattaaagcatggatctatgactcaaaatatgtatgtagatgacaagttcaatagaaacctgaacagcagctcccatcatctgaatgtgctacatactgtagtgtacagtatcttattaaagctactgggacttctctaacagatttagactgtaactaatgaacattacatgagtggaaaaggtaacacgaagcatacctattatctattgtaatatacatatgggggggtatatatatatatatactattttatttaagcaaaaaactggatta

SEQ ID NO: 10782 - DNA, 313 bp, Glycine max
  Clone ID: jC-gmle01810048h07a1
gtttgaaatgcgacaagtaatttcataactatacattttatcactggtttcactggttggtccttcgccattgttggatctttcaataaaggtatcacgaaagtgtgggctccttttacttaagctccatctactggttcatattatctaatggatccacttgaacaatgttattgttgcaaatgccccaaacttacccgttaccaaagagacacacgtgacatgtattccttaaaaattcttggaacacaaagggcaatgacaggaacatgtcaacttcattggaagaattagatatgatatccgattatta

SEQ ID NO: 10783 - DNA, 311 bp, Glycine max
  Clone ID: jC-gmle01810048h07d1
aaagattaatcttttttgaattattaagatccattttaagggagataggattccatgtatttctatttacacccatttgaaatcgaacaccctaataatacaataatttaggtatatctatggcccaacgattttttccaaatagtaccattattctttgtaagtgtaataataactccatagcacatcagccttatcattttctctagtccatgacacagaagttatccattttctcctctttgactccaaagctcaagagacaaccatttctaaaaaaatttctctctattaaagttttctctcttgct

SEQ ID NO: 10784 - DNA, 583 bp, Glycine max
  Clone ID: jC-gmle01810048h08a1
cttgtatgatggagaagatccagcacagtgaggtggaagtgaagggactgaagctgcacgtggcagagattggaagtggctccaaggcagttgtattcttgcatggattcccagagatctggtacacatggaggcaccaaatgatttctgtggcaaacgctggttatagggctattgcctttgatttcagaggctatggactatctgagcaaccagtggagccagagaaggaaaccatgtttgaccttgttcctgaagtcgtgggtcttttagatgctataaacatcagcaaggctttccttgttggcaaggacttcggtgccatgccaggatatcttacagctgccgtgcacccagaaagagtagctgctgtcataactctaagcattccttttattcttcctggtccctctgctgttcaaaaccaccacctacccaaaggcttctacattactaggtggcatgaacctgtgagggcagaagcagcatttggccgctttcccgtgacatcagtgataagaaacatctacactctcttctctacaagtgagattccaatagcagcagatgatcaagaaatcat

SEQ ID NO: 10785 - DNA, 402 bp, Glycine max
  unsure at all n locations
  Clone ID: jC-gmle01810048h08d1
tggnaatgatcgattctaggttcgcgggccggcctaatgaaccggttcgccgagctgactactcagtggccggccgtcgtccttttttttttaaagattaatcttttttgaattattaagatccatttttaagggagataggattccatgtatttctatttacacccatttgaaatcgaacaccctaataatacaataatttaggtatatctatggcccaacgattttttccaaatagtaccattattctttgcaagtgtaataataactccatagcacatcagccttatcattttctctagtccatgacacagaagttatccattttctcctctttgactccaaagctcatgagacaaccatttctaaaaaaatttctctctattaaagttttctctcttg

SEQ ID NO: 10786 - DNA, 277 bp, Glycine max
  Clone ID: jC-gmle01810048h09a1
gttctagatcgcgagcggccgccctttttttttttttttttacactaaatcattaccttatgatgatttgatgaggacaaatgtacatcagggtcctggcatccgatgccaaattgaatcacaagtgaaccaaggcgtgctagcggacgcgcgttgcttatatataatcatatacgactgatggaccgagccgaattcgttgtcctggattacgaaccagcgccggtggataatggatgaggcgtgtaccgaggatagctctacagttgctggtgct

SEQ ID NO: 10787 - DNA, 243 bp, Glycine max
  Clone ID: jC-gmle01810048h09d1
gttgtcacaccaaaaaagggaccccagggggagggagacccccaaaaacacacccaaagaggggcccgcagggccaaaggacccacgaaataacaagaggcaccggggcccccccaaaaacccagagggcacccaaaacaagcgaggccgggaaacgggaacgagaggaggaaaacgtggccaaacaggggataccaagacaagggagcaccccttaagactcccaaaccaacccccaggaaa

SEQ ID NO: 10788 - DNA, 454 bp, Glycine max
  Clone ID: jC-gmle01810048h10a1
ctctattctcttctgcatcaccattcaccgctgagagaacatcacaacacaacaaacaaaggagcctctcggtttccaatgtgaagagagcgaacatggctctaatcgctgccaggattctcggttccaattcgaggccggcggtcgcgctccaccgctggcagtggctggcgtactcctccgcctgcgcggcggtggcggagccggagaccacggaggtgaaggactacgccgattaccggcgctccctgtacggacagatcacgcacaaggcgctcctcgtcgacgccgttggcacgctcgttctcccttcgcagcccatggctcagatatatagaaagattggggagaagtatggagtggagtattcggaggatgagatactgctcagatacagaagagcgtatggtcagccttggggaaaatctcgtctcagatatgttaatgatggtag

SEQ ID NO: 10789 - DNA, 302 bp, Glycine max
  Clone ID: jC-gmle01810048h10d1
ggaatctgctaaaagtacatttattcttgactaacatattcaaagatgatacactaatagcagtttccctgaaactcatttagcaactagattggagctctgtagagctggagaaccttgttccatgatggtctactgctaatgtcatcccaccaggcacccacatgcttcctctcctctaacaaatactttttccccatattgttcacaacataatcaagaaatggaaggtggctaatatcagcaatgctgaagaaatccccagccaaatacttagtctttgagagcctctcctcatagat

SEQ ID NO: 10790 - DNA, 569 bp, Glycine max
  Clone ID: jC-gmle01810048h11a1
tgcagcgatttgtttttatctccgccgtaccatgtcggaagcaccaccgtctcagccatcgcctccaaccgccaacgcgtcaccaccgccgtactggtgctaccactgcgagaagcgcgtctccatcgaaacgctcgcgaatctccccgacgtcgtctgcggtgagtgcaagaacggcttcgtggaatccatccacacgccgtcgcgctctcgctccccctccggctgctgcgacgacccctacttcggctcgcagttcctccaggtccttcgcctaatcgctcagtcggcgcgtgacgacgacgcgtcgcctgcgccgacgtcaagccgctctccggagaacgatgtcctcaggatcgagctcggtggctgggacaacgatgaggagaacgacaacgacaacaacgacgacgaggagttcgaggaacacgaggaggcggaggatcgctccggcaacgaggatccgcacggatgagacgacgaggatctgagaagaaggaggcgcgagctgcttcggcttcggattatggattggcgacgcgcacgaggagcatgctgaaccggatctt

SEQ ID NO: 10791 - DNA, 308 bp, Glycine max
  Clone ID: jC-gmle01810048h11d1
aacagggagaaagtgaaaattccattgaggtagtgtgatatgatcacattcacattgattcaaatgctatatacaagtatcttagcatcatctgaaagctaagaagccaactacataataaaagcttcaaataaattaataataacatggcgcaagctttgatttaaatccactaatgccaacaacaaaaaaagaagaaattcagaaaccacgaaatatattacacaaatggcagaagagaacagagcaagacggagcataccaagcggaatcaaacaatggcacttccacctccaccggaactcgaa

SEQ ID NO: 10792 - DNA, 567 bp, Glycine max
  Clone ID: jC-gmle01810048h12d1
gtaataagagacccctagcaatctccttggataaatgcttagtttctgcacaactactttacattgtatactcctttatcctatcactcttttctatatacagtgccttgagtttcgagtcttttgactcaataggttgctgccggattatttggttagaagttcgaacaaatatatgagaactataccataaacaaaatttagccacataaatgcctacgctgctgcggacaaaacttaattccctggtgttgggcaaactgtagtagacgccaagagccactgcgatcgaatcaactagcattcgagaacgccacggtcttccatcaagcttggccagctgcaaccggttgaccatcccaaacaccaatatcagatctactttagagcaagcagtgaccaaattttccaaatttccttctacgtgaaataccataacagccattccccttcctccatcagtctcagccacacaagaacatatggctatgcctgcagtggccaatgctgcagtgacctcagccatcatgccttttcggactatacatactacagataaccattgga

SEQ ID NO: 10793 - DNA, 414 bp, Glycine max
  Clone ID: jC-gmle01810049a01d1
aataggtataagccgagattcataattcaaattagccgaactttatacagaagcgaccaatttccaaacattaaaaaaaaaaaaaggggagccaccatgagcttaacacacccattacaaggccaaaacacttgaacttgctggaagggaagacatgacccctttattttaagggggtttggttaacacaaaacaccagagtgcccgaaaaccatgccaggcataatgcataagtttttagctccacattaatgggttatcattattcctaaataagggctatctttgtttgaagttggtcttcccaaacctcacttgccagggccggggttgcaggaacaatttggtccacatttgcaggcagtgtttttagcgggcacacccatttcagccccctcaaattgagccttaaca

SEQ ID NO: 10794 - DNA, 537 bp, Glycine max
  Clone ID: jC-gmle01810049a02d1
catcaagaattgtctcattcattctacttttgattttaaagatcagtcacaacacatacaaaacagtgaaattgcatactttagatgcagaaacagaccatatggacaaatatagattcgttcatgggacaaatctttcactatacagttaaaagcacaccacttaatcatatgtcattcgtaacaatttattcgcatgtatgttggcatagatgcatacttgtatatcctattataaaaagcaacaccactcgactatatagtagttaggtgacacattttccctcagaaccttgaaactgaggaacatgatgctcagaactccctttctgggaacatgataggagctatgagagaccataagtacaaaagagcagttgcccaggaagtgatgattcgaacccacacagaaggccagcccacgtaaccaacttcccgctctcccaacagatgtagaccaacctgtcagaagcattgcagaatacatgctagcaagagagaaaatcaagtggaagaaggcatatgaatatgtaactg

SEQ ID NO: 10795 - DNA, 490 bp, Glycine max
  Clone ID: jC-gmle01810049a03d1
aaatacaagaatagctatatcagaatcagatgaaattattttggttgaatatacaaacatcttaacaggagttcctcctatgcaaaccttaacattagaactaaaagcctcaaaatcaaaatatggcactacttattgtatcttaagagactgagagaaagcaccaaacatgccttcttgattctgtcttgaggactaggtgctactattggatgatgagatgttgcttttggcttgagaggaagcagctgaggcattactctttacctgtgaagtctgtgtggagctggagtcggtgaaaaaaacaacgttctcatggttgtcaacaaaggcttggagggtccttggaattggaggcaaagtcacatccaagaacccttcaaggatttgaaccacctgacccatggaaggcctatgagattcatcatcttggacacaccatgaagctactttgatgactctagtgacctcttcaatgtcagcaattttc

SEQ ID NO: 10796 - DNA, 346 bp, Glycine max
  Clone ID: jC-gmle01810049a04d1
gggccccccaaaaatatgcgtatcacattcatgccattgaaaaaaaattttaatgcttatttaggggccccaactaaacttttacattggattatattttaaacaacttttttttattcagctgtccctgataaaactgggttttttttcaaaatatgggactatcttttgctacctttaaaaaatattaatttttttttcaggggataaagacccaaatttgttactgaataaaaaataccgggggggtgggacttttttttgccatggatgccaagtttattccttgtcaacaaaaaaaatgactttattggaaattcctaccaagccctgttagatatccccc

SEQ ID NO: 10797 - DNA, 388 bp, Glycine max
  Clone ID: jC-gmle01810049a05d1
gagggaaacccctccctactaaaaatcgggttttcaacatcgatcaaaaaggggattcaacaacattgactaaccggtggtgtatggaacggtggtgaaactaccaattttcaacaacagcccataattggcccgggggaaaaatacatttatttttacatgggggcctaccccaaccccggtggagaaaactacactttcaacattgtttttcgccagcatcgatataaaaaccggggctttcaacatcgtttttagtcagcactggtgtagtaaccggggctttaacattgttttttgcccccccgatgtagaacccgggttttaacaatgtttcttgccttagcaacgatggaaaaaaatttggtttcttctatacatttgaaaa

SEQ ID NO: 10798 - DNA, 126 bp, Glycine max
  Clone ID: jC-gmle01810049a06d1
ataaaagaaatgaattgaatttcattttaataagaattccattttgtaatatttaggttcaaatcggaatttatgaccacaagttccaaactggacttattatttacaggccttgaatgtcatcta

SEQ ID NO: 10799 - DNA, 425 bp, Glycine max
  Clone ID: jC-gmle01810049a07d1
gaccagcaattcctatttatcagtattgggatgcaaagtggatagagttattcgtcggaggtctacaccattaacatgcctcaaatgactccagtaataaatctgtttaaaagtatttaactgctgcacaaaagatggcctgcataaataagttctttggaactcctggtttcaatggattgctgggatcttaaaactcaacgggggaacccctaacctctttttacaggcctttgaacttaggatttggtgggatcttctgtcttcagcatttgtggccgaatgcctccttttttattcttctttccacccttcataaaatctttacaactggataccctcttttctcgggttccttgccattcctgcttatgttcacgctttcttttccacatttttttctgttgcttcttgatcccttttta

SEQ ID NO: 10800 - DNA, 308 bp, Glycine max
  Clone ID: jC-gmle01810049a08d1
acggaaagtatatataccctataatgaatgtaaataagcaaatcctgtgagaaaaaagaatttacaagagactgctttgttgatccctgttaacatcttaggcctcacaattcactcttatgttgatttctagttcagctcagcagccatatctttttacctacgcaattgtgtctcatcaatgcaaaaattaaataccaaaagatccacctctttcctttttgcacccaccaatcccatatatgttcttctaatcacctcttggaaatgaatccttgtatcttcctgggatgattgggaccaggaag

SEQ ID NO: 10801 - DNA, 591 bp, Glycine max
  Clone ID: jC-gmle01810049a10a1
atcattgtcaccggtaacgatttctcaacactctatgcacctctcatccgtgatgggcgtatggagaagttctactgggcaccaacaagggaagaccgcattggtgtttgcaccggaattttccgcactgatggtattcctgaacaggacattgtcaagcttgttgacaccttccctggccaatccattgatttctttggtgcactgagggccagagtatatgatgatgaagtgaggaagtggatttctggtgttggtgttgacagtgttgggaagaagcttgtgaactcaaaagatggacctacaacctttgagcagcccaagatgactctggagaagctcttgctgtatggtaacatgcttgtccaagaacaagagaatgtcaagagagtccaattggctgacaagtacttgaacgaggctgctcttggaaatgctaacgaggatgctattcagaggggaactttcttccagtcttgaattggagggcaagcaaacttggcaagtaaatatttctgttcgtgaaggttgttgaactaatccaagtgctagaaagtgtgatggatcttgcgtgtaacattcttagcattc

SEQ ID NO: 10802 - DNA, 564 bp, Glycine max
  Clone ID: jC-gmle01810049a11a1
atgtggagaaacttgatcgtacaggctgtctatcaaatcgcagttcttctcgttcttaacttttgtggtgaaagtattctaccaaaacaagataccaaagctgatgcctttcaagtgaagaatactttaatattcaacgcgttcgtcctgtgccaaatattcaatgaattcaatgctcggaaacccgatgaaatgaatgttttccgtggagtgacgaataacaaacttttcatgggaattgttggagtgacctttatacttcagataatcatcatcgagttccttggaaagttcacctcaacagtgagacttgattggaagctatggcttgcttctcttggtattggccttgtcagctggccccttgctatagtcggcaaattcattccagttcccaaaacaccattggctcgttacttcttgaaaccactcaggcgattgaagaggtctaggtctcgtgctacgcaataagcatcgcttcctcaagtggataaccagccatgcatgcatattaagctaacgcctcacaggttacaatatagtatatattattactgctccata

SEQ ID NO: 10803 - DNA, 384 bp, Glycine max
  unsure at all n locations
  Clone ID: jC-gmle01810049a12a1
cttcagccagcaacttgcgtctctatccattgatttgcaacttgcaaacaacacgaaacaattgcggtgttttttgagcattccgaggatatattttttctctgtaattaattatcctttaaattcccaatattcctcgctctattctcttctcttcgtactaccataggaaggaaggaaggagagagagttatgggttccccagaaaatcaattgtcgctcgcagaagaggctcttcttcaggatgatgagagcaaacaatacacaggagatggatcggttgactttaaagggaggcctgttcttaagcggaatactggcaactggaaagcttgcccatttatcttaggcaacgagtgctgcgaacgttnggcgtactatggc

SEQ ID NO: 10804 - DNA, 363 bp, Glycine max
  Clone ID: jC-gmle01810049b01d1
aactgggtcattttccattttttagttattccgatattcggacgcatcaacttgttatgaaatcacattgatagcctttactcggggcctagctcggctaaaagctagatttgcctcaattggttggctcttgccttccgccttattcaaattagcttctgctatttcaagagtttgctgggcttcttggggatcaatggcactacccttttccgcatcatttactaaaacagggatctcattattggttattttagcaaaaccgcccatcaaagccatcgttaaccattggtctttaagaagacgtattctcaaaatacctatatttacgggtgtgggaataggcgcatgatttgggaatac

SEQ ID NO: 10805 - DNA, 385 bp, Glycine max
  Clone ID: jC-gmle01810049b02d1
cccccccaaggggattgttttaaaaaaaaaaaaaaatttttaaaaccccccccccctttttttgtcattttgggaaaaaaaacaaaccccatttagccttctttggggggggggcttttttttttttttttaaaggcccaaaaaaaaagggggggggggggaaacccccaaatttaaaaccgacccttttggcggaaaaaaaaaaaacaccccctgcaaaaaaaaaccccctggcggggggggggggggcctttttttaaaaggggaaaccccttaaggggggggggggaggcgttaattttgaaatttttgaaacccccaaaaccggtttctttaaaaacccccttccagttttttggggccctttttttccccccggggtggg

SEQ ID NO: 10806 - DNA, 338 bp, Glycine max
  Clone ID: jC-gmle01810049b03d1
cttccttatactcgaacttctttcttggatattacaatttttttctatcgggaaaaggaaagaaaaattagaatccaaacaatgcacaaaaaaatcacctgaatcatatctacaaaacgctgaaaaaaagaaagaaaaaattggaagcagcaaattcaaccacgctttgaaagaaaactgcattttattaaccttacctacacacgacagtagtcgggcaatagtacttactcacttttttaacagtcacagataccgttgtataacctgccacggcacccctttaaccataagggcccaccatagccgtcaccgaaattgtacggcacggataaaaa

SEQ ID NO: 10807 - DNA, 258 bp, Glycine max
  Clone ID: jC-gmle01810049b04d1
acaaaaaaaaaattccccacctggggacaagggggggggccttctgtgggaaaagggaaacccccaatgcaaattttaaaataataaacccccccaacactgggggaaaagggtggggaaaaaaaaaggccttttcctaacccccccccaataaaaacttccctttatttttcccaaagggggggttttttttcccctttgggaagggggggggcccgctccctaaacccctgggaaagcgcggggcccctttttttt

SEQ ID NO: 10808 - DNA, 592 bp, Glycine max
  unsure at all n locations
  Clone ID: jC-gmle01810049b05d1
gaattccacattggaagcaaattaaaatagcatgtgaatatgggacaaatccaaatattgctgctgcattgtcacataatctacagaaccttgaaaactaacagcaatcaaatatgttcgccatttggaatttgaatacaaatacagtgcatcgataatataaccctatgtacagagccaatgtctgactgaaatttgatacagaacattatctattttgtatcataataaaatggtaaagatctttatgttacgtgcagcattatgtgaagaagggggaagtgcatccagctggtgctttagtccttcgtcttcccttttacttcatcattggctccttctgcacgttcacatttccttaaactgcttaagcactgctgaccttgttcttacgtccgaaggtccaatggggtttcgctggagtacgccttaatgccttcactccaaaggggttgttcttgctcctgagacaagttccaacgtaagtgttgcagatgggatagtctgcagggcagcaactgtagtggtcatcacagcaggaagcaccctcaagaggacagcaaccccactcgngcaagcatttcgaactcaa

SEQ ID NO: 10809 - DNA, 491 bp, Glycine max
  Clone ID: jC-gmle01810049b06d1
aaccaacaaatagaatattagatcattccctttgattaatttacaaactacacacaaaaagtttgataagaaaatatgcgatgccagtatggataaagctagagaaagagaagccaattattgtctcaatcttgtatcaacataactgaatctcagcctcacttttttttctcggataagtacatacatacatacatatgtgtttttttcattaattatgatgcagaacagcctaataacaatagacaaaataacatgaaacacagtgaaattgtggaaaacatgaaagaagaaagaaaatgatgattttgatgagaactaatgcaatttgactgcgtcgctcggtcgatatgtatatatattattatggcaggttcaattcaattcctaagcttttgcagccactggagtctcagccttggtggctattagctgctcatataaatctcttatcttcaaaccaactatggtttggaagagacctgttccat

SEQ ID NO: 10810 - DNA, 367 bp, Glycine max
  Clone ID: jC-gmle01810049b07d1
gaagagaatagtaggaaagcagaaagagaagtacatcaatggaaaagaatggttggagcaaatgaaaacctgccactggttctttatgttctcgtattctaacttcttaactgacttcaggaattctctctcagcatatgttgattcatatggataatatcccaaaagcaaaccccatacctcattttgtaattcgtggtcaagtccaccataaaatactctctttctcaaagcttctgaatctgtgactcgtccttcacaatccaagaaggcattccactcttcagaacccaaagggggttgccttggttttccccatactaacgataaattatcgaactcctgagaatccaagacaacaggactt

SEQ ID NO: 10811 - DNA, 448 bp, Glycine max
  Clone ID: jC-gmle01810049b08d1
gatgaataacatgaatcacttttcttgttgaattgttacaaaattgatgtgttggtatgaaaataatatttacaagtatgattttaaactaagcaaccactatgatcttcccaccaaaaatgggagaaaaaacagaagcatgagagtagaatcatctaaaccttttcccttgataaaaacatcagggactaaattatgccagttcatttttcacggacacattgccatccctctgatctatgctcaatgctcctctatccacaaaatttaccattctgtgggaaagtacgcgagacttatctatacatgtggcatgacaagtaccaatgatcaatgaaagtaagttattccaagaccttttcaccagttgaaaaaagattaaacaccacagttccaaccaaatacaacacaactgaaacctttgaaacatcatcccaagagccatgtt

SEQ ID NO: 10812 - DNA, 534 bp, Glycine max
  Clone ID: jC-gmle01810049b09a1
cgaagaagtcccattcattgcactgatagcagcgatggggatcgatcttaaggctgggggtaagagcacaaagaccaaaagaacagcaccaaagtccaatgacatctacctcaaattacttgtcaagctttatcgattccttgttcgaaggacagacagcaatttcaatgctgtgatactcaagcgcttgatcatgagcaaggttaacaagcctccaatttctttgtcaaggttaattaagtatacgaaggggaaggaggataaaattgctgtagtagtggggactgtaactgatgatatcagagtatatgaagttccagcattgaaaattacagcactcaagtttacagagagagcacgtgcaagaatagaaaaggctggcggtgaatgcttgacatttgatcagcttgcccttagggctcctttgggacagaatacggtccttcttagaggccccaagaatgctcgggaagctgtgaaacactttggtcctgctcctggtgtgccacacagtcataccaagccctatgtacg

SEQ ID NO: 10813 - DNA, 616 bp, Glycine max
  unsure at all n locations
  Clone ID: jC-gmle01810049b10a1
attaatttatgtagtacataggtcttcagaaacttatacaacgaaatgagcaactatatagctcaggaaatgctcccaatggaggtgtatctttgcccttcattctggtgcagacacgcccccatgcaactgttgaagtggaaatatcagaagatatgcagcttgtgcattttgatttcaatagcactccctttgagttgcatgatgataactatgttctcaaggcaatgaaactttgtgagggatctcataatgataatacaacagacaatcctacagatggtggtgaaggttctagcatatatgcacaggttcctacttctgtttcaaaccctccaaataggcctccttcatctccaccactccctggaatattgaaggcaagagttaagaacgagcattgatatgcaattttgtactgcattgccttatttaagcatgtttggatattttgtaaagtaatttgtcagtaattaattgtccttcataatagttaatcagtacagccaattcactcagtagggtagaagcgaaccagtatgcatgagtctatattcttctgggttgaattttgcaaatnctttgctaccatatccatattactaccttaagaact

SEQ ID NO: 10814 - DNA, 550 bp, Glycine max
  Clone ID: jC-gmle01810049b11a1
ctcgagccgaatcggctcgagattccacctcatatttcatatgtgttccaaacttcttcttggaatgtcccttcctaaataaccctcaaacaaaagccaccttaacatctcttctctgaaaattctctttagagagatagagagatagagagagagagaaagaaattaagaaaaaatggcagcctgcactgtctactcaacacaatctctgagcacaaattgctccatctcaaccccatcaaagacacagctgagtttcttccaccaaaagcaggtagttttctggaggaacagcaacaggggcaacagcagcagcagaagaagctatgtgataacatgtgcagcaggtgactcacagacagtggtgattggtcttgctgcagactcagggtgtgggaagagcaccttcatgaggaggctgacaagtgtgtttggaggagcagcagagccaccgaagggtggcaaccctgactcaaacacactcatcagtgacaccaccactgtcatatgcttggatgattaccactctttggatagaactggcagaaag

SEQ ID NO: 10815 - DNA, 343 bp, Glycine max
  Clone ID: jC-gmle01810049b12a1
cttcatacaatcagtgacaagtgtggtgatccctttattgtggaaaagaaccctcatatccatgaccctgatgatgtcttcccaggacttgttctcaagattacacgctcacaaacaacatagcttgaataattgaaagttaattcctatacatgtatgtatctttcttcaatatagaacaaggaaaaaaaacttccttatgggcatcctctaaagtttttagttttggtttgcttgttgtatgtactacactttgcctagcaagaaaaaaatgttccttatacactctttcggattgtgttgtacatcgatcttctaaatcaatgtgaaattagtatactat

SEQ ID NO: 10816 - DNA, 233 bp, Glycine max
  Clone ID: jC-gmle01810049c01d1
aaagcaaattaaaatagcttgtgaatatgggacaaatccaaatattggtggtgcattggcacataatctacagaaccttgaaaactaacagcaatcaaatttgttcgccatttggaatttgaatacaaataccgggcattgataatataaccctatgtacagagccaatgtctgactgaaatttgatacaaaacattatctattttggatcataaaaaaaggggaaagatctt

SEQ ID NO: 10817 - DNA, 596 bp, Glycine max
  Clone ID: jC-gmle01810049c02d1
caagagaagagcaaactccaaactgatattcacataaataaccataaccatacacaatcaaatcgtcaacttgaaactttcaagatagataaataaccatcaaactctgaattagtgcctttaagttcaagtcccttttacttaactttctaatgggcctagtatataaaagaacatatgctaataacttgctgccatttcttcttcactcctgcaaaagaaaacattaaaggcttacatttgcatcacaagcaaaaatcaccagagaagaaatagagaacaaattattgaccagtttagttagttttatttatttttttaaaatagtacatcaaactactctaaacaagttaaaggaaactgtttcaaaagcagactatattattttaaattattttcaggcaacaaattcttcacaccatatctgttcttggctttccaataagcagaaaaaattatttgactagtttctgaccaattactaagtctatttttaaaatctaccagacaagaattaattgtataactgaattcaaaacagggcccctaatgtaatgaatattgtaatgtccacatctcaatgaattacaggatag

SEQ ID NO: 10818 - DNA, 71 bp, Glycine max
  Clone ID: jC-gmle01810049c03d1
ttcgccctttttttttttttttaacgttttttcttgttctttttcatattcaatctttctgtttgagcggc

SEQ ID NO: 10819 - DNA, 407 bp, Glycine max
  Clone ID: jC-gmle01810049c04d1
accacatcaaactatatatttaacaattaacacggtaaggtatcgaatatgatcccaaaaagggggaaaatatagcaaaaaataggattaataacatagctttcagcatcaaacatcagctaaaagaattcaaagtgcctaacctttttatcagagtaattattttctgcagattcaccagaagaattctgtactcaggttggttgatcaagaatccctgttccaacccctataatggcttaacttgatgcattccgctgggatggtgcagcctccaaggtaggaacaagatacttgatcaccagacaaaacctcaacagcagtacggaagtacctacttacatactgtcttgtaccagattgcaactcactgcaagatgtgaaaatctgacaactgcatacaatgc

SEQ ID NO: 10820 - DNA, 345 bp, Glycine max
  Clone ID: jC-gmle01810049c05d1
atactattattattgaatttttaatttataacatgatcaatgcttattaaagaagcaaaagaacccccactggaaaaaaaaaaaaaaagaactttcacctccaccggcagctaaaacagctaaagttttccactgaaaggaaaaggataacatataaaagaaactatccaggagaaaagaaaacaaagttaaaaagaaaatcgccgcacaaaaaaaaaataatcaactggagaaagaaaacctattttccaaacaaaggcaaaaagcctggcgattgttctctgatctgaccaacaagggatgggaaacgcggggactcccaagcacaaggtaactaatgtggaa

SEQ ID NO: 10821 - DNA, 392 bp, Glycine max
  Clone ID: jC-gmle01810049c06d1
ataaggagaatataacataaaataaagggcagctgggatatagattgtatgcatataacatataccagctggatattacatacatgaaagaagaagatagggcagtagtgaaaaagacatatgaaattaaaaagcgttggagcatgcgggctttaagttttcttaaccggatcaaagttggaaaccccaataacggctccaaatatgggtactagaacaaacccaccagcaaagatgcttatcaaaaagttcttgagggaaggggagaactcatatccagcacggtgagccaccttcggaaccaccataaatgctgtcacagaagctgctgtgagtcctgcaactgccttcttcttcaagatgcatggatttgagccttggagtttgacact

SEQ ID NO: 10822 - DNA, 300 bp, Glycine max
  Clone ID: jC-gmle01810049c07d1
atattggttattttgttttttcttttaaaaggaaaaagggaaaaaccgataaaaaaggaataacttaacggcccccaccaagggacaaaatggcttcaataaaaaaaaaggtgaaaagggcttttgattttcgcccgcccaaaaatttttcaaaaaaccttttatcctttcaggggaacttgaaaaggggcaaaatgcttttgggaacgggggcaccaaaaggacctatgagggttatgattgggccaacccctggtaaaagagttctaacaaagaaacccaaaattgccaacaaaaaca

SEQ ID NO: 10823 - DNA, 301 bp, Glycine max
  Clone ID: jC-gmle01810049c08d1
ggtataaatggttggtggtcatgcatagaatttatgtgttgtttagctacaaaaactcacaagacagaattgatcattcatgcttcagagtagcatgggatctgcccttatctgtacatcttgactcacattttacagctagtgacatcgatggttttttctacaaacttccttggttaccaaaggactaccgaaaaaaaaatcgccccaaaacatatgaatgagttcaccccatttccctgtggttcatggtggttattttacttaattcaacctgttgctcctctatttgactcacact

SEQ ID NO: 10824 - DNA, 532 bp, Glycine max
  Clone ID: jC-gmle01810049c09a1
caatctcataaataaataatcagaacgaataagaagaagaattgaattcgaaaaatcgtagcgtagcgttggttgcgattgaaacggtacgatgggaagaggaaaattcaagagcaagcccaccggtcgccgccagttctgcaccccggaagatatgcttgctggaacctctaaccgtgctcgaacttttagacagaaagaagctgagcatgaagaggagcctgaggaagtatctggggatgaatctggagaagaatcagaagaggaaacttctaagaaaaaaggaacacaaggagttattgagattgaaaatcctaacttggtaaagccaaagagcttgaaagctagagatgttgatgttggaaaaacaacagaactttcaaggcgtgaaagagaggagatatgagaaacagagagcccatgagcgctatatgaggctgcaagagctaggaaaaacataacaagcaaagaatgatttagaacgtttagctcttatacgtcagcacaaggaagatgctgcttaaaagcgaga

SEQ ID NO: 10825 - DNA, 495 bp, Glycine max
  Clone ID: jC-gmle01810049c10a1
ataagatttatgaaatgatggccttggccttgggaggaagatggggtagatcagaagaagaggagggagatgcacctgttgaagctgctgattcaagcacaagtgaagaaagttcagagccagaagtttatgaaccttctgaagtcattgcagagagtgatccatggacaactgattaggcatactatgccctcatagaataagttacaaatttttggcattatataatgcataccaaaaaggtgagaaaggaaagggagagactgatttttccaatgatttcatggtgctgaaggaagtttctaatatcattatagaactgtgagtgaatgtcctaaggggcaaatcctatggggcctttgcgaatggaattgagtttagtgttcgtaggtgggcaaattttttatacttcatggtcttgtggcattgtgtcattcttttgggtttaagattttcacgtgtttgagtacaaatttgaaagctgaaatgacaaga

SEQ ID NO: 10826 - DNA, 520 bp, Glycine max
  unsure at all n locations
  Clone ID: jC-gmle01810049c11a1
ggtaacatagaattgagaagtaatggaaatgaagaagccgtgttgtgaagagtcagagacaattgttggatcctgggaatgttggttcgacgatgcatgcatcgttgacatggattactttgtgaagaccctttcaagcatcaaacagaaaggtgttcgtgcagacttgattggttccatcatcactcattatgcctccatatggctccctgacctctcttcctctgctgaaaatggtgtcaccactcacttccaatcccccgaaagcgtcacaaattcatggatgaagaagaggttctttgtggaaaccttggtgagtgttctgcctcctgagaaggattctgtcccatgcaacttcctccttcgccttctcagaaccgccaacatggttcgtgttgacgccacttatagaggtgagcttgagaaccggatttcgtggcagctagaccaagcttctctcanagagctcatgataccctccttcagccacacgtgtgggacactcttggatgttgagcta

SEQ ID NO: 10827 - DNA, 574 bp, Glycine max
  unsure at all n locations
  Clone ID: jC-gmle01810049c12a1
ctaacatatctgtagagaaaaccagacaccagaaaaggttcgttcagagacaaaaccccaacgatccaaacggtcattgagcatttcatggtgcgagtcactgagttgaatcggataggaatctgagtttgtgatcgtttgacgcggtcatgggtgctgcgggctccaagctcgagaaggctctcggagaccaattccccgaaggagaacgttactttggcctcgagaatttcggcaacacttgttactgcaacagcgtcttgcaggcactatacttctgtgttccgtttcgcgaacaattactagagtattatggaaataacaaaagcatattggacggggaagaaaatcttttaacttgcttagcggacttattttcacagataagttcccagaagaaaaaaactggtgtcattgctcccaaacgatttgtacagaggttgaaaaaacagaatgaactcttccgtagctatatgcaccaggatgcccatgagttcttgaactttntgctgaatgaacttgttgacattctggagaaagaggctcangctgcaaaaactgatcaggagacatc

SEQ ID NO: 10828 - DNA, 510 bp, Glycine max
  Clone ID: jC-gmle01810049d01d1
aaaaccagcctttgaactcctattattccgaggtatggtagttctcatgcgagttccattaccatataccttggctcaattcttgcacaacagtttacaaatcactcttgccatggagtagaagtaaaattgtattctcaatacacagcatttgcatgagcgttgttatcaaacataaatagttgacccactacaaatccagccacagctgctttcgtccacttgattcaccacttgaaatcacaacgtcccagtatttcttccaaaacctgatttccccaactagatataccatcttattttatgcccaccggggcaaataaactagaggaagcaaatgtccatcacaccggtggctatggaaaaatcaatttcaggccagccagagtatatagtctgtcatacaggacagacccaaggccgagtgccaaagcatatgtacatttttaaagcatacatacttccatataatggaagttgcttacagtgacaggatcaagtgattaccga

SEQ ID NO: 10829 - DNA, 416 bp, Glycine max
  Clone ID: jC-gmle01810049d02d1
agagggaatatttcatattaatggcatgggaactaaaaaaacaaccttgagaaagttaataaatttctcaaaattaaaaattttccatgggtgaattaatgccccccccgcagttgtcacccaagttttatcatataatgcttaaaaaaaattaagcctagagttttccaaataccaccttaaatgagttctccaaaaaggaaaaaaaagggggttcatgaaacacaaataaaactggttcctccattgttctgcaccacattatacaaacttggctcaaatgaggagcaaattttttataattttggcaatgcccggggaaaaatgccagggtggtcccaatcagggacaatgtgatcaccagtgatttccttgagggaggggccacccctcaaggccatggttagcttaaactc

SEQ ID NO: 10830 - DNA, 528 bp, Glycine max
  Clone ID: jC-gmle01810049d03d1
caaggtaagaattttattgcacaatgagaaggcagagaaaattgatggttctgtttctcagtacaagttttagaatgaaaaatgaagcaacaagtgtttgtagtggtagtagtagtagtagtaagcatacaaaactacaatggcatggtacatacatataataattgaattaccaattcagaatttgatggctctcacttccacttgttggcaacaatgtcagccaaatccacaaccctttgggagtagccccactcattgtcataccaagcaatcaccttaaccatgtcatctcccatgaccatggtcaacgatgagtcaacggttgaggacacattagtgcacctgaagtcaacagacacaagtggcttatcacacacagagaggattccctggagctcattgtctgcactctctctgaatgctgcattcactttttctgcaaaggtcttctttgagacctgaacaacgaggtccaccactgagacgtttggtgttggcacacggagtgcaatgccattgagtttg

SEQ ID NO: 10831 - DNA, 240 bp, Glycine max
  Clone ID: jC-gmle01810049d04d1
aagtggtcgggtgaacacttataagatccagaggtctttctctttcaacaaaaccctggcatggctctcaaaagtgtgaaataatgctactcccaaatggattggaaattgctcgggtgttactggcgcgtccaaccaaagtgggctggcattcgaacggggcaaacatgtggtacacaaatactcacacccctaggccggttatgctgcccaaagggatattttcaaaaaaggcctggg

SEQ ID NO: 10832 - DNA, 521 bp, Glycine max
  Clone ID: jC-gmle01810049d05d1
gtacagcagccggtgcattaggcagatcttatcaaagaagagcccttacaacgctttgcagcatttcaatcatctacttcaagacctccagcacggcttcgaggcactttccaccatgctcaccctcacacacacctctcttgcccttggtgtctacggtccaccagcccttgaggccatcttcactgacgacctgatgcgccaaccctttctggccctctttccactcctcatccttgtccatgtggccctgctcactgatgacgacagcaggagcatcccgggatagcgtcggttcttgtcgcccgtctgagtgcgcaagagagcccgccagctgccgctggcgtgcgagtgcgaattgtacgtctcctgcagccgcgccttgaccgtgttctggttgaggctgagcgtcttgcctcgacgtcctggcgagaggatgcgcgagagcgagctgctgcggcgcaagagcaccgatgggatccgggcgagaaccagcggagataagacagaggggagaaggc

SEQ ID NO: 10833 - DNA, 560 bp, Glycine max
  Clone ID: jC-gmle01810049d06d1
aaaaatgaactcaaactttctgggtttttttttggatgtaaagaactcaaactttcttgattccaaatatcgagtcatggaagcataactacaaaacattcttatttctaacatcttcctaattcacatgcacttctaaatatttgaacacttttctaaacttaaagaacttctagatttctatataggtatctccaaatagtttatctaatttcacataatatataaccaacattccaactatgtttcttattttgaacagtaaacagcaaactcaacctgaacttgaacagtaacttcatcgtcccttgggatcattaatctcagagaaaacattctccgggacgattaacctgtcggattccttactcccatagcttgtggtgttcaacccagtgctgttactataatccgaaagttgtatgctactgtgggtactgctaaacatgtcttcactatcttcataatccccaccactcatcaccaaaggcgccactccattaacagcactatcctgaagctgcagaacaaactccaacaccccacgacgtcatacatgg

SEQ ID NO: 10834 - DNA, 413 bp, Glycine max
  Clone ID: jC-gmle01810049d07d1
agaatcaatccaatgataaactcaagttttttttggggaaacccaaaaatgttaacgatgtactacatactttcttagttgaaaggggaaaaagaagtaaaaaaaatgacaaccaactagactatgtcctcccttacgatggtaaacgacctacaagtataacgatcccttaaacaaggggggggggagagctcattggccgaacttaaaaaccaaagaagccaagctcgctagcttttttctttttaaatgtctcaaagtactgatagatgatgggtactggaagccatattcctgttcctgaaccgatggcccccatgaaatttggcaacactgtcagggcaccaatacaaatgccttcaaatgcttgcggagggggaaagtattgattcaactttttcttcaagtttgac

SEQ ID NO: 10835 - DNA, 511 bp, Glycine max
  unsure at all n locations
  Clone ID: jC-gmle01810049d08d1
catcgtaatctcaaatttcattcatgatgattaatgtacagagtacagaaacgcatagataacgctggtaagtaataaacaagccaagaaatttatggatggcgtttatggaacaaatttttgaaacggaagccatccaggatgattcatacaaaaattggttgagcatctaacagtctgacaatgtttcaattaaggcaagctccaagacatgcaagcctaacattattgaaggcaaaaagtatacaacacttcagcaggaatccaggtcacggcagggaggaggcttgggctcacttaacaaagtagtgttccctccttcaggtccactcttaattcggcggggattttgggtgccgngcggnggcttctcaccctttctcagcttttctactatctcaactactatttttggggttatatcttcaaaagtattaataagtatatccctccgatccatttgaataatcggccactgtaatcataggagcattcacacagcatcccatgc

SEQ ID NO: 10836 - DNA, 210 bp, Glycine max
  Clone ID: jC-gmle01810049d09a1
aaagttctttacatgaaagtttgatgatgatgttaccgataaagagctacgagagtgtttttagccgacgctgcaaattttctcaactccagaattgcttccctttgatctgaacctttccaatttcagaatcatcattttctgaacaccaattgataccataaaagtcttcaatattgaggacagaatgagtacatataccaaacacta

SEQ ID NO: 10837 - DNA, 560 bp, Glycine max
  unsure at all n locations
  Clone ID: jC-gmle01810049d10a1
gaggaatcagaatcgcgttagggagaagaagagaaaatcgcaggtgaaaatgagcggaacggtgaagaaagtaaccgatgtagcattcaaggtgggaaggaacatcgattgggatggaatggcgaagcttctcgtcttcgatgaggctcgcagggagttctccaatctccgtcgcgctttcgacgaggttaactcccaactcgaaaccaagttcagccaggaacctgaacccatagactgggattactatagaaaaggaattggcactcgcttggtggatatgtacaaggagcattatgagagcattgaggtccccaagtttgttgacacagtaactcctcaatacaagactaaatttgatgccctattgattgagcttaaagaagcagaggagaaatctctgaaggagtctgagcgttnggaaaaggaaattgttgaagtacaagagttgaagaaaaagctcagtaccatgacggcagatgagtactttgaaaaacatcctgagctgaggaagaagttgatgatgagatcagatatgatactggngctattgatttttc

SEQ ID NO: 10838 - DNA, 490 bp, Glycine max
  unsure at all n locations
  Clone ID: jC-gmle01810049d11a1
actgaaccttcagtttgtttaagtggagatgtcgagactaatgagtgtcttgaaagaaatggaggatgttggcaagacaaacatgctaacataactgcttgcaaggatactttcaggggaagagtttgtgagtgccctgttgtgaacggtgtccagtataagggtgatggttatactacatgtgaagcttttggacctgcaaggtgttctataaacaatggtggttgttggtcagaaactaaaaaaggactaactttctcagcttgctcagactccaaggtaaatggctgtcagtgcccagttgggtttcgtggggatggtactaataaatgcgaagacgttgatgaatgtaaggaacgaagtgcttgtcagtgtgatggctgcagctgcaagaatacttggggtagttacgattgtaaatgcaaggtgaacctcctatatataaaggaacangatgcttgtatcgaaagaagtgaatcaaaatttggac

SEQ ID NO: 10839 - DNA, 498 bp, Glycine max
  Clone ID: jC-gmle01810049d12a1
atcttgtcaagaacctgatgataattgctttacctatgtgcttaaatggaaagggaaaagcggtgctcggacaacatgtactgtagtgtcctacagaatggcttaggactctcttaatccatgtgatgaccagtggctaccttacaaggacatggactgtacagtcataccacaagatataaaagctagtctgactttacgggcatctaggactatgttattgagtagtgacaaggcatataggcacctttacgatcgtggcttacgtcagtttgccatgcatcatactattcctatcgacgtggcacgatgggagaggaagagtcgtatagcggatcatggggtagacttgatgggaaaaatggacttggctatcaacgagtggtctgaacgtaaggttcatgttgttgaacgtggtgacattgcaaatgaaggggagcacatgcagtgggatcagaagaataccctgaaatatcttgagagagtcacatgatacct

SEQ ID NO: 10840 - DNA, 523 bp, Glycine max
  Clone ID: jC-gmle01810049e01d1
atataattgatgtactgcataaaagaaaactaccgaaacattgatcaaaatacattactagaatttgaggcacttgattaaatatcccaaacaaattacattattcccatacggtagcgtgcaccatcacttcttgttaaaattaaacatatttatataacatgcatgaacaatttatttcacaactttctaggagaacacatcttcaagaaattgaccaaagcatttatgaaggcacactttgacaaaataaaaccactgtctccgccaatgaggattgatccaaaggattatcaccaacactatttgtaccatgacatagcatgaagcagaactccaacagaaagcagtgaaatcaattgcagtgtcgttttcctctccatcatgcaatgcagaacttggaggtggcagcgctcatagactgcctctattactgttattccaagtaagatatggaattcctttgtagttggcctcatcaaaattagcaaactggcccttatcaggtgctttgtctgacaaa

SEQ ID NO: 10841 - DNA, 432 bp, Glycine max
  Clone ID: jC-gmle01810049e02d1
cagaagaaatttgaacgaattcccattcatataaacatatactttctgtagacaacaagtacatggacagagcgctaaggtaacaacagctataaagaaattacagataaagattcaaacaatggttctatctacaagaaggatatttcaatatccaaaaatatcctaataaaggtgaaacttgcatagtcacaagagcctccaatattgaaaactatggactataccagcaaaagatattgagctggctgggtggcctactcaattccaccgttcatctctcctcgagtgtaattattgaaacttccatcaagcatggatcctctttggggattttctcccttacgctgattttgatgaagcatctgcaaaagcttgtgcagcctccgcatcagcttctgctgactctgcttcctttgctgcctactctgc

SEQ ID NO: 10842 - DNA, 426 bp, Glycine max
  Clone ID: jC-gmle01810049e03d1
gtggaatgactactacatacatatgcacatatatattgtacaacattggtatcaacaagtcagaacaagtcaatcctacacgcctccttaaccgggcaaaaaagcaatggaggcaaatttcgcacaaaagaaatgatcttccactacatgtaagcagtttaagatctgacatatgcccatatattaacaaggagtattgctgagaccaatacagcggcagaaactgcgagaacattagaccacgtggcacggttagaggaaacctttgaggtgtagtggacccttctgttcactagaaggactttcgaccctgcgacggattctgcagttgcaacatgtttctcactaatgtttcttaggtcggttgactcgggagatgcctcctctggttcatccacatcatctgtaacagaggaactcgagccg

SEQ ID NO: 10843 - DNA, 339 bp, Glycine max
  Clone ID: jC-gmle01810049e04d1
aaagattaattttttttgatttattaatatccattttatgggagataggattttcatgtttttttatttacacccatttgaaatttgtacaccctaaaaaaaaaaaatttttttttttttaaggcccaaccaaaaaatccaaatagggccattattctttgtaagagaaattttttcttcatagcgcataaaacttatcattttctccagcccatgacacagaaaaaatcaattgggtccttttggcctccaaagggggcaaaaaaacggtttttaggggccttttttttttttaaagaaaactctcttgcttcttctagaagagttcacatgagaagc

SEQ ID NO: 10844 - DNA, 408 bp, Glycine max
  Clone ID: jC-gmle01810049e05d1
ggaacaatgcacatgtttattagtcctaacagtttaaattacatgctcctatatattcttaacacaaaaaactttggtaatccaaaaacaagtcttactaaagtattaatagcgtttcccgcaacctaaaattacactcaattgccgaatacatgaaaatgaacagggagaaggggtggacaaaatcccgcatgggccggagggaagtaatcttttttagccaaattcaggaaggccaaaaagtcgatatatgtggaccactttcacttttaaagaattggtttcagaaaaggaagctcaatcatcaacttccgctttaatctttcttaagaaggcggcctttgaatcctcaaatgttgctggggaaattttgacagggccctttttgaaacccagaattgacttctt

SEQ ID NO: 10845 - DNA, 334 bp, Glycine max
  Clone ID: jC-gmle01810049e06d1
aagggagtataaaattgtttttttttaaaaaaaaaaaaaacagggacttttacactcccccaaacgtaaaaaagggaaaacatttaccaaaaaaaaacccggaaacaccgcggaaacaaaaaaaaggagttatttttgtttccccaaatttctggcttccccaaaggagaaaaggccccccattatagggggggggaaaaaaaaccccaacaaaaacatttttggggggggggacaaacggggggggactggcgtcaaaaaaccctgagggaggggggggttttgtgggggggggggttgacaaaaaaaaagtctctggggggggggaaaattt

SEQ ID NO: 10846 - DNA, 344 bp, Glycine max
  Clone ID: jC-gmle01810049e07d1
aatatgaataaggtctatttatttaacttacaataatacattggcattaagacatcgttcggcaacaattgatagttagttacaaacaatattataaaaaggtgagcgaacataaagaaaagagcacgcaattctgaatcatgattcttcagctggtggtacctgagtcaaattcagtccctcttcaggcaagtatgaagataaatggtcccaggatcccatcaccgctgatagtcaatccactctcaggctggaaccttaacatgtctgcacgagccatagcttctgctagggctattctctgtctgaatgtgtgagccatctactccgtcttttcaaagaca

SEQ ID NO: 10847 - DNA, 371 bp, Glycine max
  Clone ID: jC-gmle01810049e08d1
gataattgtattatttttttcatttttttaaccccaaaaaaaaaaacgggggttattccccttttttactacactcttaatggtcttcatttttcccccaccgcctcttttataacaaaaccatgcaaatcagttaacactctgggatgcactttgtgctattataaaaacatgggctcaaacaaagtactactcatatactcgctgcatatatgggccggacatttttttttgcaaaattgtggacatcaattactttttattttaattgggggggccttactctatccaccttgatagtttttttccaagtcgtgattcatacctgaagatcacacatagcctttgtacccacccccttggggaggaac

SEQ ID NO: 10848 - DNA, 571 bp, Glycine max
  Clone ID: jC-gmle01810049e09a1
ataatgtgaaaaaatgaatttgattcatgtaaacgaattgtgacagataggcctaaaagacatgcctcaaatagaagcgcaacggctgttgtacgaaggactggatggtgaaacctggggttggatgaggcttatgtgcagagggctatgatcattcttggataaggtgaacacaattgtgggcagaacgagaacatgtaccatacacttgcacggcttgaagctagagcaaatagatatctgcaggctcgatatttattcaatcaggccactaagtgtaatcctaacagttgtgctagctggcttagttgggcgcaaatggaggtggagcacgaaaactaccgtgctgctaggaaattgtttgagaaagcatgacaggctagtcctaagaataggtatgcttggcatgtatggggcgtttttgaagctcacatgggcaacattgacatgggaagaaaactttaaagatagggcataatctaaaccccagggatgctggtctacttcaatctcttgctttattagaataccattactcaactgcatacgttgcccgggttttgttcaggag

SEQ ID NO: 10849 - DNA, 602 bp, Glycine max
  unsure at all n locations
  Clone ID: jC-gmle01810049e10a1
ttctctacaagggctttttatccgatgaagaatgtgatcatttgataactctggccaaggacaagctggagaagtctatggtggcagataacgagtctggtaaaagcataatgagtgaagtcagaacgagttctgggatgtttctcaacaaggcacaggtatgatgaatcaaagatgatttactttatgcttgtgtgaaaacctttaagttcttcatttgattatgattaattatgtagcatatagagaagtatggttggggatgttcttattttttatttttttggattgtgcttttattggaacacatggctcttgtcatcttccctgtataggcatgtttatttgatggtgcttgatggtgagaaatgtactagaaattagtttggagtttataaataattttgtgagtttgattgatccttgggaaaataagtcaagatagacgagtgacttgagtaagttgaatggaaatgtatgcaaaatgtggattgaattataattagcaataaagtgaagatgcatcaaatcanaagtttatatgtaaataatgactgttcatatatcggtttgtcctacacattctgaagctgtcaaagaat

SEQ ID NO: 10850 - DNA, 476 bp, Glycine max
  Clone ID: jC-gmle01810049e11a1
aaatggagcagcacagaaattaggaatcatgagcctcataccaatggtcctgttctggatgatgttttgctagcagacccagagattgcctatgccattgaaaatgaaaaggtggttaataagaccataaaaatatacaacattgatcgtgctgcatgtggacgtatagctggtgtcattgcaaagaagtacggtgacactggttttgctggacagttgaatataacgaagtgctgggcagtcatttgcatgctttctgacacctggaatgaacattcgccttgttggagaggctaatgattatgttgggaagggcattgctggaggtgagttggttatcactccagttgacaagaccggttttgaacctgaggatgcagctattgtagggaacacttgcttgtatggtgcaactggtggacaggtcttcgttagagggagagcacgggaaagatttgctgtgagaaactcgcttg

SEQ ID NO: 10851 - DNA, 598 bp, Glycine max
  Clone ID: jC-gmle01810049e12a1
ggcttgttgttcaagaatggcaatttgtaagaaagatgtttggagagttgaatgtggaatcccttctggatttccgctcacagttatttgtaatagcatttttaatgagatgctcattagatatagctatgaaaaattactgcgccaggctaaagctccaagtatgtttttacaatccttcaaaaattttgtttctttgtgtgtgtatggtgatgataacttaattagtgttcatgaatatgtcaagccttactttagtggttctaaattgaaaagctttctagctggtcataatatcaccattactgatggtattgacaaaactagtgcaactttgcaatttagaaagttagcagattgtgattttctcaagagaaactttaagcagatgtctaatgttttgtgggtggctcctgaggataaggcgagtttatggtcacaacttcattatgtttcgtgtaataatctggaaatgcaagaagcttatcttgtcaatctcgtaaatgtgttacgagaattgtatttgcacagtccagaggaagctcgccaattgagaaggaaagctctttctcgtattgaatggcttgcaaaagctgat

SEQ ID NO: 10852 - DNA, 336 bp, Glycine max
  Clone ID: jC-gmle01810049f01d1
gggggggaaaaaaaggcaaaaattggccccccccaaacaattttttccgggggggaaaaaaaaaaagagggggagtcccctttaattcaaaaaaaggggaaattttgaaaaaattcaaaaggggccccccaaaaaaaaaccggggtttgccccaaaaaacccccccaaaatggcaccctttttttttcaaaaaaaaattttgggccccccctaccaggggggtcttaaaaaaaaaaaaatttctcaaaaaaaaaacgggttccctttgggggggcattttgggatttattcccaccccccccataaccaaggggggggggggtggaaacctaaaaa

SEQ ID NO: 10853 - DNA, 383 bp, Glycine max
  unsure at all n locations
  Clone ID: jC-gmle01810049f02d1
atgaaaacaattcaagacaactaggctataaatgaaccttcaccaatgtatcaactatcaacaaccagatgaaagcctaagagtgatgatgagatatcaacaaccataagacagaagctactaaggcccttgttagctgtttacctaccttggaccttcaagatgcattcttttgattatatttacaaaatagacaaggaatttaaatactaaaatgctatgcatgatgaccataaattagaggacagcatggtgtaaagaattgtggaggactggggtggggggggggggggttnncccaatttctcctttcttattcttctttccacccttaataaaacctcttcaactggataccctcttttttcgtgtttcttcccatt

SEQ ID NO: 10854 - DNA, 268 bp, Glycine max
  Clone ID: jC-gmle01810049f03d1
gaagtaactgtggatgttcttagttcgggttgaacaccctaatcaagaaactttaaaatcgcttcgtgagtaacaggacttgtcaacataccgtaattcaagctgggattgtacaaccgtcttaaatgacagtttgaagcgaattcctagaaaaaaaaaacaacagactgaattaggaacgccggactctgctgtttatgccttactactatacccacaagtttttttgaactctgatgtcccggcaccattatccacattaacctcg

SEQ ID NO: 10855 - DNA, 121 bp, Glycine max
  Clone ID: jC-gmle01810049f04d1
atgaccattcttttatcttctatttttttttttgttggggaagactcacgatatttaaaattccaaagcccttgggggctatcctggaccaaatgtttcataaacctattaacaccgattg

SEQ ID NO: 10856 - DNA, 364 bp, Glycine max
  Clone ID: jC-gmle01810049f05d1
aaatcaaaggggtgataatcatgagcaaagcaactttcaattgtacaaacattatatcgcgcacacgcatacatgctcattgctaagaacgctcacagcaccatgaaactgctgccagattccaactgattgaacaaagatgaatgacttgtgaaagtgggtttgtggatacaagagactaaaatatccattgtctacaattgcaacctggaaaggctctccttcacaacggactcgtgaagagcttgattaaaaaccatggcttgctgacaaacatgctgtggagcgcctgcacaaggttaaagcggaatgatgcacggagaaattcccggcgctctacacgcgtggttgcctgtagttaaaa

SEQ ID NO: 10857 - DNA, 342 bp, Glycine max
  Clone ID: jC-gmle01810049f06d1
aagcttgaagagactattccttttacaaacataaacaaaatggttcattccaacaaaacactattactttatcctaaaatgctccggggcattatgacctaaatatgaagcgctggcactacaaaatacaaaagccaaaatggcggcataagggtggcgtttgaaacaaaatcactccttcaagaaaaccatggggatcttacaaccaggggaacatgccaagaatggggtgacaccatccatcccattttctaaaaaacaaaacagggagggggggagtttggtcaccatacagggcttgcagttggaatggaaaacctttcgaaaaaaactgtaccgaaa

SEQ ID NO: 10858 - DNA, 368 bp, Glycine max
  Clone ID: jC-gmle01810049f07d1
ggagccaaccataaacaaattatataaaaacactacctacataatcttgactgcgaagggcaaaccatttcaatgttatacatagacataatgtctttttgactttggggtcataatcgatatttgatattacccacaacttattaaagttagcttttggatacctatcacagccttgaaggagactggttccagccccacgggtcattagagatataatgggtcacttgcttcacactcaagtaattatcaaggccccattcttctaattcacgaccaaaaccactgcgtttaaagcctccccatggggcttgagtgaagcatggtagacagcaattaatccacacaattccagccttaacagcctt

SEQ ID NO: 10859 - DNA, 448 bp, Glycine max
  unsure at all n locations
  Clone ID: jC-gmle01810049f08d1
aaggagagaagtaactttcttcattgcacatcatttaaattgagcgacaaaaaaaatcttacagtcttgtctgaattgtttttacacattttggatataaatggatcacacagtcaccggaactttcaacgcctccaatatcttatcatctagctcgaactggatggacttcttatctctcccaatctttacgtactcctcaaaccgttcttttaggtcttcagggaggtttgtggttgattgccatcccaatttagctttggctgctctaggttctgcatataagtgataggtgcggaaagggaaagccttctttgcatcaactccaacagcttttggatcataatgcaaaatgttaacggngcgccctgcagcttgagcacatagttttggctattccgtctagagtcactgcacggtcatttacgcagttgaaaatggtctgatt

SEQ ID NO: 10860 - DNA, 560 bp, Glycine max
  Clone ID: jC-gmle01810049f09a1
attaggctgagaaaacctcactactctgaaagctccaatttggaggaggcgtcgcctgaagagtcctctctccgccttcgtccgtcgtcgtcgatcatcgcttatgactgtaccgtctctctgtttctgtctctggtttattcgattcgattcgattctgtgaatccattgaaatatagaattctctctctctctctctctctctctttgattatcgctgattttgattgacggcctcgctctgtgtaaggtttttgcatctcaaactcgatttttttttggacgcaaacgatagtgtttgtgaatgataatgacgatgatggaattgaaatttctgaccagtgttgaattgcctgatgtatgtgtttttgaaaataaacggagaatctgcatggaaatgatagttaaagtgtaatagattatgaggaagaagctgaggtttgatgaattgattaagggaattggagtagagttagttacttgagatgatacaataagtgcaaattgacctaatgtatttatatgataaaataagtgcaaatgaagtctgtggaaactct

SEQ ID NO: 10861 - DNA, 586 bp, Glycine max
  Clone ID: jC-gmle01810049f10a1
ctcgagccgctcgagccgattcggctcgagaaagaatatgagtttgaacagtctgctttttgttttttgttacttccccttccctaggtcatgccaagccagtctgtttcaatttccacctggaatttataattgcttattatgtgataataagaaattatttttttctgtctagctgattattcttccctaagttttgttactgattgctctttttccgagcattggcagcttcattcaccaggtgttttggcaattggaagtagtatgaaaggagaaaattcatattcacatcatttggattcagatgtatgtatgaatttaatagtccttcacacaattatttgacataatttgctacagtttatccattgggtttcttcttgtttaagtccatgttctgcacaaataaatttctttggtaattgttctttaaaatattcaggttggcgtttcagttgttgatcgttttacattttacactcttgctttctttgagaggctgaatatgtatgacaatgcttcgctgagcaggtactaaaaattttatcagccttttcacgtcaagggatttgtccttgctatc

SEQ ID NO: 10862 - DNA, 514 bp, Glycine max
  Clone ID: jC-gmle01810049f11a1
caaactttgtaacttcaaaacatactcctctgttctctctgtttctcttcaatcttcctgaaaaaaacaaaaacacgaaaaatcatccaccctctcacattctctctctctctcctttcaactaatatggcaattgaaaaccaagacaacactgtcagagaaatcaagccaaagaacaggagaatcatgggtgctggaggccctgatgatgacgacaataggtggccaccgtggttgaagccactgctgaaagagagcttctttgttcaatgcaagttgcatgctgactctcacaagagcgaatgcaacatgtattgcttggactgtatgaatggccctctctgctctctctgcctcgctcaccacaaggatcaccgtgcaatccagattaggaggtcctcataccatgatgtgatcagagtctctgagattcagaaggtgttggacatcactggtgtccaaacctacattatcaacagcgcaagggtggtgtttttgaacgagaggccttaac

SEQ ID NO: 10863 - DNA, 566 bp, Glycine max
  Clone ID: jC-gmle01810049f12a1
gagatacactacaagcctacaactctgtctattgcacaatggatgcagatgcagctcctttgcacatagcaatgtatccatggtttgctatggggcacctcaccccatttctccaccttgccaacaagttagccaaaaggggacacaaaatctccttcttcatacccagaagaacacaagccaagttagaagacctcaatcttcacccaaacctcatcacctttgtccccatcaatgttcctcacgttgatggtcttccttatgatgcagaaaccacttcagatgttccctcctctttgttcccactcattgccactgccatggacctcacagagaaaaacattgaacttctcctccttgatctcaaaccacacatcgttttgttcgatttttccacatattggctaccaaacttggctcgtagaataggaataaagtctcttcagtactggattattagccctgcaacagtagggtacatggcatcctcagctagacaaagagaagatgacatgagaaaaccaccttcagggttccctgatggtccatcaagctgcatgcacatg

SEQ ID NO: 10864 - DNA, 504 bp, Glycine max
  Clone ID: jC-gmle01810049g01d1
caaaatactatattgatgctgtattccaaacgcctttaaatattttacatcaggacatgaataccttaaaatcacaaaggaacatagaaatttcgaatcatgaaggatgaactatgaatccttaatatattatctacttgaaattaaacaacttttcgcatattatacatggaaggaatcattttttggtccaaggaagaaagcacatgcaagaggggtctggcgacaactaagagagctacaattagcgataaaaccaccgagtgttcatcgccgaaatgcattgccttcaccgccagacctgccttgagaataatatgtccgacgacggacactctcagctattgatgtgctccctacttcagctgcaccatatacacttttctgaacagtatccaaaaaattcttgccacaaacattatcattctgaattgcttcctttgtatccgactcctcagccttctttatacgtttccatctctgctcttcatgcaactcagcagc

SEQ ID NO: 10865 - DNA, 536 bp, Glycine max
  Clone ID: jC-gmle01810049g02d1
acgtaaccaaacttgaaaatttacataaagaagtagcttccacaaatccacacaccacatctatacaccggacaagaaactagaagtaacaaaacagtatctactgcaaaaaacatattctaatttaagttcacatttgaacataaaaaactacccccaaacaaagaaaactaacaagagatttaaaaatcaaatccaccgaaatctccaaaaccagcgtcgtaagaaccggcatcagaaatcatgtccccaattagaagtccacccaaggctccttcaagcaaccccgcacccaatcccattcccaaattgttcttccccggtctttgaactgctgcagcagcaggaggaggaggagcgtaaccgtccccgagttgtggcgcgtacccataagccgcttgtggcgcgtacccataagccgcttgtggcgcgtaaccgtatccatgttgtggagcgtattcgtatccttgagcgggttgaggcggcggaggataagcatattgtggcggcggcggcggaggatacatggcgggata

SEQ ID NO: 10866 - DNA, 554 bp, Glycine max
  Clone ID: jC-gmle01810049g04d1
gactagtcagttaaatgtgctactttgcccaaatatttcagtcatcaatataagaaaattgaaatctagcaaaggtctatatctttgttccaaaacaactaacataaacatattagtaaaaacataataatgtaaatgagccaaggatgacttccctatggaacacaggcaattatgatctccaacagagcgctgaagaataacttgctagtgtgccataaaagtttgtcacataaggactgatagacggtgttgatttccaccaccaccaccaccaccaatgtctgcggaataaccctgcatgttccttccaatatgagaagggtaaccacataacctaaagtctgactcatgttgctggaagacatcatcactattagatgtactaatgacatcagaaccacgtggttgtagaagcaccatttctgtagttcaagttttctactgcttgaacctttgattctgacatatttccactcagattcaattgagtacagccagaaacatctaggccacggttttgtgaagtgagtttcaactcttggagctttttg

SEQ ID NO: 10867 - DNA, 383 bp, Glycine max
  Clone ID: jC-gmle01810049g05d1
acgtaaactccaaaatttaaacctggagaaacaaggttgaaattattagataacgaatctggcttaacctgacatccgaatcaaagtcacagcctggtatagcaagacatcatcgctctttaaacttcaaaggataaaccttaaaaaacaaggtgggaattaaagagaaaagaagctcactgtaaaccataaccttcggactggtgctgaacaacatggcttaggacgaccattgtctaacccgcctttggttagagggtttctggcgacgtatgcctttggggaactataggctggtccctccttgaaggctgcctgtccctttggcggcttcattaggatctggccgaaccccaagggggaagagaaagtgacccaccctt

SEQ ID NO: 10868 - DNA, 528 bp, Glycine max
  Clone ID: jC-gmle01810049g06d1
gctgtgctaattgttttttctccttgaatttgataaaataattattgattcttacagtgtacaagtcagagcgtattttatagtacaaacataattctgtgacttgcgtgtatgattatgcaacatataattcggcttttccatcaatgaatagactcatgaactcttcaccatccacagtttctttttctatgagaagttgagcaagcttgtgaaggatatcaatgtgagttgagataatatgtgttgccctagaatatgctctctctaccagttccctcacttccgcatccactacatccgcagttgccatggagtaatccttttgcgatgacatctgttgacccaagaatggatttccaccaggtccaccaatggcaacttgtccaatttttttgctgaatccaaatctctcaaccatctgccttgccactcgtgaaacttgcatgaagtcgtttgatgctccggtggtgacattttcctggccaaaaataacctcttcggcaacccttccacccagggcaacag

SEQ ID NO: 10869 - DNA, 531 bp, Glycine max
  Clone ID: jC-gmle01810049g07d1
gttatcatgaaattaggctaaaaggccatcgaacatgtattattatttgaatataaacgtacacaattacaaactctaaacgagtttttttttttttgttgttgttgttgttacaaactccagcaagtttgaaaagtggtacacaataatgaaataatatattaggcatcttagatggccacactgggcagaacaacagtttcaatggtaagtccaggtccaaaaccgaacaacacaccccattcaagtccttcacctgtggttttaagtccattttcagcagatttcctcctcatctcatccaagatgaaaagaacacaagcacttgacatgttcccatattcactaagcacatctctagtggccttcatcttctcaggtttgagacctaacttttgctcaacttggtcaagaatagcaggcccaccggggtgtgcaatccaaaagatggagttgtaatcagagatgttcaatgggttgaaagccttcaaaagtgccttgtcaatgttctttgagacaatcccggggaca

SEQ ID NO: 10870 - DNA, 549 bp, Glycine max
  unsure at all n locations
  Clone ID: jC-gmle01810049g08a1
gttaagtaattaatggcagcttcaagtagcatcatctccatctcctctgcttcactcttcactccaaaaatccaatgcctccccaaacacaacaaggaccatgatcatgttccaattccatcatcatcatccttcacaacacatgcttctctcaagatatcaagaccaacaacaacgtttggaatcaccacaacaaccacaaggcttaattttcctcctcgtaggttgagttgttcagcatcagcttcttcctcttccactcttccctcggctcttctatttgactgtgatggagtccttgtggatactgagaaagatggccatcgcatatctttcaaccaaaccttccaagagagagaactaggtgttacctgggatgtggacttgtacggngaattgctgaaaattggaagcggaaaagaaaggatgacagcatactttaacaaggtgggttggcctgcgaatgccccaacaggtgaacaagatagaaaagaattcatagctttactccacanacaaaagacagaactatntatggcccttatagag

SEQ ID NO: 10871 - DNA, 553 bp, Glycine max
  Clone ID: jC-gmle01810049g09a1
gggacctaccccttcacctcccttggctccatctcctatgccaggagaatctgagaagcctattccttgtgtttcatcaatatcaaatgctgcaaatattggacatcaacaaacagggggtgcaatagcaccagctcaatcccttgccattgggactcctgggatatcagcctctcctttattggcagaattcagtgctcctgatggtgcgcatggtaatgctttagctgccacttctgggaagtcaactgttacagagcagcctcttgaacgcctaattaatgcggtgaaatcaatgtcaagtaaagcattaagtgctgcagtcatggatattggttcagttgtcagcatgaatgatagaattgcaggatcagctccaggtaatggatccagagcggctgttggtgaggatttggtttccatgactaattgtcgtctacaggctagaaatttcattactcaagatggttccaatggaattaagaggatgaaacgttacaccagtgctatacccttgaatgttgtaccatctgctggtagcatgaatgatagt

SEQ ID NO: 10872 - DNA, 553 bp, Glycine max
  Clone ID: jC-gmle01810049g10a1
ctttctctctctttgccggtgccacaatccctctctctctccgacgtacatttccatctttttagggtttcatttcatggactccgattcctggatttccacgcgcctctcttcctcttcacgccgccaccattatcgatctgatctgtacgcggaggagagtgaagggaacgatgatttcagggcggagtttctatgccctttctgcgccgaggattacgacgtcgtttccctctgttgccacattgacgaccaccaccctatccaagccaaaaacggggtgtgtcccatttgtgggaagaaggtgggagtggatctcgttggacattttactacacaacatgggaacttcttgagggtgcagcgcaaaaggagggtcaggaaaggaggctctgcttcaacaatttctatattgagaaaagagttacaagaaggagccttgcagtcccttcttggaggttcttcatacttagcttcctcaaattccgagcccgatcctctggtatcatcatttatgtttaacccagttgtagctgatgagtctgtgagtgca

SEQ ID NO: 10873 - DNA, 372 bp, Glycine max
  Clone ID: jC-gmle01810049g11a1
cttctggggacaattctttgtaagaagattgattgcatgccttgggagggcatcaatcattgtattcatcctctcaggtgtcatttttgctagcgccctcaccatgggtgtggttggcattgagaacagcattcaaatgataaacaaccatgagttcatgggattcttaggcttctgttccagtcagtgatatattttattctagagtgcattgcattgggcatagaaaacaaaaaaggataatacaaagttggtgtgaagaagacttgtaaaattaagtgtgtaggacaatggcactaccaaatgttggtcaatgcctagttgaccaacaaggaagatcagtgccaaaatattaaggtttcctggctttct

SEQ ID NO: 10874 - DNA, 535 bp, Glycine max
  unsure at all n locations
  Clone ID: jC-gmle01810049g12a1
ggcaggtaccaaactggagctttgacaccgattataagatggctttcacgaggtatgcagagagcagcagcacctcctcatccaccaagacctgcagccagggctgaaaatgttcctgctcccaggccggaaggtgacaatgctgctccagcaggtatgatttggacattttatgcatgtgattatacacgtctcttttgggaaacactagtgatagagctgatgtgatttatgatgtaatttgggaagtcttcacttggaagcttacgaggttcattttatattattatactttattcattaattttctttcggttaaattttatgttcctaattttgtatgaaaaaagtatcaattggagttttttgatcgtgtattgacacaatgacaaatgcttacctttgcttcttatcttttggaagagggtcaacctgaagccgagaatgggaaccagcccgctaatgatgcagaccaggcagtcgagaatganaatgttgcagaacatggcaatgtcaatggtggtaattcagtggt

SEQ ID NO: 10875 - DNA, 537 bp, Glycine max
  Clone ID: jC-gmle01810049h01d1
ggaagacaaaaccaatatccattattttttgttgaaaaaaatactgaacgaaaagctcatgaatatttcacgacttcataatggagcaaatccgaacagcttttctaaatacaagggaaatacttaaaattgaaatagaaaagtttatacgctaacaagacttttgccaagaattatgtcatttgttgagaaatcagcctctttccgatatgttcctctaccaaaggccaggttgtacgagtctgctagaccctctacaagtccaaattcaggttccaatccaagcacgctctttgctttctcaactgatgcaaagaaatgctggtcacggaatggaaatgatttctttttcccaaaatcaaaatctttagggttgtagtgaatgatctttggctctgggaacccaccagccttagcacatgctcttgctaatccatcaaatgtgacatacttatctcccgagatgttgaatacttccttgctggccttctcattaccaagaacctggataaaagcttttgccaaaccttaacatga

SEQ ID NO: 10876 - DNA, 462 bp, Glycine max
  Clone ID: jC-gmle01810049h02d1
ctctccaagggtcaattgcaatcatcttcaaatgcagtgtttccctagctagtgactagcatattaggtgtaatgaaacacataacacgatgcaattccaactagtaaaaaattgagctcgaaaactcacacacaccatcaatttaaaccttgaattttaaacattgtaattggaggtcgatataatatacaaccatgacagtactctcagtagtgctaggaaagttgggtcaagggataatgcagcaacaccatgcatgaagttactaacaaaatctgagccaacaaacaaaacagaaaacaaaacactctatgactcaagctgagcataccagatgccctggatcttgacatcctttggagcctttgctcccaaatcagagtcagatggttgaacactctcgaacacaccgataacctcacccgtctcaggcttggtcttggtgacactcaaagtgattt

SEQ ID NO: 10877 - DNA, 445 bp, Glycine max
  Clone ID: jC-gmle01810049h04d1
aagtaaaaaacttcgcggtttttcatgtaaaatgaatccctcgcatattagttagatctcaccccaaccctgcctccaacctttcgtacaagaacagaacatgattagcatgcatctatgagcttatctcataagaagcaatttatggttccaaacagccatggtaaagatgaatcaatatgaacaagaacccttttgcattatggggatttacagtcttatgactttaagaggaaattacaagcttttgggtcttatgcattatgagggggagcttctggctgatgaaactcggatcaccatacgcaccagaataagagggtgcccttttgcacacaaagcgtgaaatagtgattctctccacaactcttcgaagtaaatgggatttgtacttccaccaaataacaatggtacgtgtgttatcgtgtaataacactccataact

SEQ ID NO: 10878 - DNA, 476 bp, Glycine max
  Clone ID: jC-gmle01810049h05d1
ggaatagaagctaagagattccatttattgacgcacaagaatctgacatgaatgtggcagtcatagtaaaaattgactatagtacaaaataataatgtaacgacaatacatatttacaccaccatcctccaacccaggctacgtacatcaaccgaccacgtaaaaaaatgatggcagctttttccaatgtctaaactgaagcaaccgaaaacagtgtgtataatcccaacaacacattattagatgaactgtgtatgtacatacattcagttgcttgcactgccttccaacaagctcctcaagctacaaagagcctctgcagagaggctacagcatctcaatttccgttggcgaggaggggatggctctggctccgcgtggtcaagggaagagaaacatacaatgatcacagtgagattgtcgaatgtgttgagacgtaatgcctccataaccaggtccctggcgcatttctctgg

SEQ ID NO: 10879 - DNA, 444 bp, Glycine max
  Clone ID: jC-gmle01810049h06d1
atattaatgttacccttggcgtcagttccaacagagacaattttcattccacacatagcagcactagcaggatttgtaccatgtgctgagacaggtataatgcaaacattgcgggggtggtctccccttgccaaatgatatgcacgaataaccataagtccggcatattctccagcagcaccagcatttggttgcaaggagaaggagtcaaacccagtgatggtgcacaacagttcacccaaattattgaacatttcctgataaccttgagcctggtcaactggtgcaaaagggtgaatatcagtaaagctgggccatgtcacaggcatcatttcagttgttgcattcagcttcattgtacaagaaccaagtggaatcatactgtggcatagtgagagatcttttgattggagcttatacaagaacctaagcaactcatgctca

SEQ ID NO: 10880 - DNA, 398 bp, Glycine max
  Clone ID: jC-gmle01810049h07d1
cattcgaattcattttatttatatattaatagggtattcaaatgaaataaaaagatattaaaagatactaattataagaatttgaaagtgaaattataaagttattaaatgattaatcaatttttttctacctgttcctgtagtaaaaagagttccatctgttcttgaatagcttgcttcaaaaggacttctgcttccccagtgaatgtgttggtacaagatatgatttctttgaattgagggttatttttgttgtagtaagcacgtttctgaacaagaaattgccttacctgttcaatttgtaatgaatcaagataaccattcgttccagaagaaatagaaattatctgatctttcacaggaagaggaggtgattgggattgattaagcaactcggg

SEQ ID NO: 10881 - DNA, 522 bp, Glycine max
  unsure at all n locations
  Clone ID: jC-gmle01810049h08a1
aaaaaaaccatggacctcataaattcttcaataagctctcacattttgtgaccaaaataatactttaggaaaaaagaaaaaaatgtcatccactgctagcttgggttatggggctccaacctgcttcaacaacgttcatcacacaaagaagcagcaagcaatgaggaacagtttcttgagcaataagcacaacagtgtgagagtgatgaagggttggagaggaagacatggtaacactaacaacacatccaaaagggtaggaattgtgcagtgtagagggttaggggacttcataggtggagacttgataaagtttgatcttggacgttggctttcagatgttgaagagcacaaagcacttgcaatataccctcctcatgaaggaggctatgagggccgctacttgtcgcgtctcaaacgccaagggtactatntcctcgaccttacggctcgtggccttggtgatcctgaaaccaccctcaccaagattcaccctggttgccctcctcatgttggcaagca

SEQ ID NO: 10882 - DNA, 567 bp, Glycine max
  unsure at all n locations
  Clone ID: jC-gmle01810049h09a1
caaaaactcccgttttctctctctgtttttccatggccatctgatcaaacttttcttgattctctctctcagtttttgctattctgagtgatgggtatgccctgccgctgttcccacacctcccacatcactgaaatcatcatcaccagcttcttccgccacaagtcttaaattacaacaatttccctcaattattcatcaaccaaccaccttaatagccttttccaatggttccttaaagatccaacttggtcggagtaaacatggcggctagtggaagttccttttccaacatcactagcttccttcgcaaccaacaaccctcttcccaacctctcgattcttctctcttcctctctgctccttcaatttttgtttcaggttcgagatccatggtgagttttgaagcagaaggagggaaggggtgtaacggctccttcttccgcgcgtttgacatggacgacaatggggacgagtgcatggatgagtactntcataaacccgagaagaaacgtcgtctctccatgaaccangttcagtttctggagaagagttcgaggaggagaa

SEQ ID NO: 10883 - DNA, 538 bp, Glycine max
  unsure at all n locations
  Clone ID: jC-gmle01810049h10a1
ctcgagccgattcggctcgagcaaacttccaccaccaagtttgcaagaaccatccaccccgtcacccgtctcgagtacattgttctaccacaaccactaccaccaccacctctaggtctaagtccaatgctaagtcattggtcattgagacccggctcgtgccggtgccgccaatgccaacggtcgttaccactgagatccaccgtccaatgaacaatgacccaagtttgcaatcaacatggtctcatagagcttgggtggcagctggatgctcaactttggtcatttccttgggagagtccataaagggtgctattgatttgaacatgtgggttgagcccattgtggcaggttgggttggatacatcttagctgatcttggatcaggggtttaccattgggccatcgacaattatggcgatggctcaaccccaatagttggggctcaaattgaagcctttcaaggccaccacaagtggccttggaccatcactaggcgtcaanttgctaacaatntacatgcaattgcacgtgcagt

SEQ ID NO: 10884 - DNA, 433 bp, Glycine max
  unsure at all n locations
  Clone ID: jC-gmle01810049h11a1
gctattggtttaattctaggcttctttcattgttgacctattatttatcacaacttttcaagaaaaaaaaaggtggagatgcagggcattgaggatcagaaaattcaacagaatgaacccgttggttcaattgctccaaggtatgaagctgataggattcagcaaatagggaatccatggagcactggactatttgactgtcatgagaatcagacaaatggtaatatctactctagtttcattactttaaattagttatatagttagattacttgtttaaacttctgctaaaaagataacaatgaaatttgtagcacttccaatactanagatggagagtcctttctttttctatacaaaaatttagtgcgggaggttgctcttcattccaaggcttgaatattattgtctctaactatcaaaagacttacaa

SEQ ID NO: 10885 - DNA, 584 bp, Glycine max
  Clone ID: jC-gmle01810049h12a1
ccttagccttctttgggaccagcttgaagaaggttattgcctcaagggtccccaacagcaaggtttccggtggaagcttcaagattgttgctgtagaagagaagaaagagattgaagagacccagcagaccgacaaggacagatggaagggtcttgcctatgatatctcagacgaccaacaagacatcacaagaggaaagggtttggttgactcccttttccaagctccacaggatgctggaactcactatgcagtcatgagctcctacgagtacctcagcactggacttcgccagtacttggacaacaaaatggatggattctacattgctccagcttttatggacaagcttgttgttcacatcttcaagaacttcatgaccctgcccaacatcaaggttcctctcattcttgggatctggcgaggcaagggacaagggaaatcttttcaatgtgagcttgtctttgtaagatgggaatcaacccatcatgatgagtgctcgagagtttgaaagtggaatgcaggagagccagcataactgatcaggcagagataccgtgaagctgcagacatgatcaagaag

SEQ ID NO: 10886 - DNA, 341 bp, Glycine max
  Clone ID: jC-gmle01810050a01a1
gaaagagccagcagcggcaatgaaagcactcgcaagaaggagattgctgctttcttggctcaaacttctcatgaaaccacaggtgggtgggcaagtgcaccagatggtccatatgcgtgggggtattgttttatcaacgaacaaaaccaggcaacttattgtgatggtgggaattggccatgtgctgctggtaaaaaatattatggccgaggaccaatccaacttacacacaactacaattacgggcaagctggcaaagcacttggtctggatttgataaacaatccggatcttgtagccacagacgcaaccgtgtcattcaagacagccctatggttttg

SEQ ID NO: 10887 - DNA, 390 bp, Glycine max
  Clone ID: jC-gmle01810050a01d1
gcttatatcttccattgtttcaattgtataatttcatctaaacaatattcagaaaaaatgaaagaaaatatcctcataaatcatgtttgctatctcccctactaaataattagactccatctatacctcaaaccccacgtaggatttatgtacaaacagacgaaagagggggcaaaaaataagtgaaatttaaagaggaccttggacaactttcaataaccaagtttagtcccactctgcctatctacccatgcatcgttaagctaagctatgtactcattcaccttttggctttactttgtattgtttggacctgaagtgacgattgtgatccaccactgagtgcagcagcagcagattcaacatgtgtaagaagatattcatatatct

SEQ ID NO: 10888 - DNA, 324 bp, Glycine max
  Clone ID: jC-gmle01810050a02a1
cccggtcaccccgtcatagccattaggattcgcatcaagagcgatccaatcatggctccgtcaagatctcagccgggcatcgtctcgccagagatcgagaggatcaccttgcacaaccctatcgcctttacagccagggtttatgccgctcctttcctctctctctaccccttgctctactttgcctattatcaccgttacgatcaatggatcaaatctgaagaatggacattcgtctactgcgtcctcctcggtttcggtcacgccctgacgtttctgtccacccgatggtcagtagggatccgaactcgtgtggagaacacc

SEQ ID NO: 10889 - DNA, 419 bp, Glycine max
  Clone ID: jC-gmle01810050a02d1
ttgggctcgagagctactctaggttggggggtaggtcctgggggggaagttatagacacctttccatactttgtgtctggagtacttcacttaatttcctctgcagtattgggctttggcggtatttatcatgcacttttgggacctgagactcttgaagaatcttttccattcttcggttatgtatggaaagatagaaataaaatgactacaattttgggtattcacttaatcttgttaggtataggtgcgtttcttctagtattcaaggctctttattttggaggtatatatgatacgtgggctccggggggcggagatgtaagaaaaataaccaatttgacccttagtccaaggtatatatttggatatttattaaaatcacctttttggggagaaaggtggattgttagtgtgga

SEQ ID NO: 10890 - DNA, 336 bp, Glycine max
  Clone ID: jC-gmle01810050a03a1
gaagaatatcgtgaatgcgtataaaaggaatattaagaaattagcgtcaaaatgttgggtgtgtttagctgcatccatagtgtcgccgacggactagctcgtggccgccggctgccgtactccgtctctgaaatatgactagtgttgcgctgcggatagcggttctgtgtaaacaactcctttgccgtgatcgtggaggccgttgagcatgttcagttcgtttatacccaccacaacgagtcgccgtttcagtcctgatcctttgctgtttatgatgatgtgctctgcttgtttgagggatcccttgacattatgggaaacttgagacaacatata

SEQ ID NO: 10891 - DNA, 79 bp, Glycine max
  Clone ID: jC-gmle01810050a03d1
ttttttttttttttttttttttttttttttttttttttttttttttttttttttttggttttttttttttttttttttt

SEQ ID NO: 10892 - DNA, 226 bp, Glycine max
  Clone ID: jC-gmle01810050a04a1
taggaagagacttcataggagatcatccacagaaacatgatggtctaagctatgtacggactcacatttcatctagtagagtgtaagctatttactaggatgagatggagcaattggtggacatatatggaactggttagcatttttctcacagtcggagcttaatataataatcctcatatgtggattgcttacaaatttgtttccttgcttaatgagcctttct

SEQ ID NO: 10893 - DNA, 367 bp, Glycine max
  Clone ID: jC-gmle01810050a04d1
cggattcgctggctcgttacaagtcttatagtaaatgcagaccggtaccatccatgaagaaaaaaaattggctgccgtgccgacgctgtttatggactgctgttgcggctcgacctgccgaagtcatctttcatcccatgcactgaacgcctaatgctcgtcgtaatccgtcgcttaaaagaccatctggtgtggcctgtctgagctgcggaggctgaagctggcaccgaggtattcggcaaggggggcctccttcttgatggtggctagaagtgccttgtcaacagacttttggtcctcaatacggccctttgcggtctccttcttctggggctttttgccctgcttgaagaacgagtccttaccg

SEQ ID NO: 10894 - DNA, 333 bp, Glycine max
  Clone ID: jC-gmle01810050a05a1
gtcatgataatagatttctctcttcaacttggcatgctcccaaaccttaaccaaacatcgtttgacctgccaactgttacgtacagttttagctgcctcctatgatgggaggagtgtctggcggcggcgacgactacttcgtttaaattcagctaccgtacaagcccggcgaccctttcatcatcaccggcaattgccccgacaagacaggcctcgcttgtgatatctgcagaatcattctcgatttcggtctctgcatcgccaaaggagatgtttcaaccgatggcgtgtggtgttacattgtgttgtgggttattccatactccgtgttgc

SEQ ID NO: 10895 - DNA, 407 bp, Glycine max
  Clone ID: jC-gmle01810050a05d1
aggacttaaaagaattatcacttgaatgaattattagttcaccaaactgtgaaagctagactttgataattacaaactgtgactaacatcgaccccttatagatatgggcaatatttgttcaataacaagtatatttctcaactgcctgaaggtctagttagtgtataccaatgtgactagcacttgacaggaaatttgccaagagaaaacctttcaggaagaagctgaatgacatgcattttgcgggcaaaattttgatagatcatatttccttatgtgctggcactagacaccaattccgaactttcaacattgcttactacatttctctgaattactggaggagatgaacgtgtccttgctttagccaaattcaaccgtaagggccgaccttgtaccttcacac

SEQ ID NO: 10896 - DNA, 350 bp, Glycine max
  Clone ID: jC-gmle01810050a06a1
tcagcaagaagatggcttctatctcacagggccttctttatacctctgccatgctactctccaccaccctgctttatgttgctttctccaggccttcatttcaaattcaccactctaacaaacccaccttgcgctcttgctagaattcataggaaaagaacatggagagaaagaagaataaaaagaataaagtgaaatttgcagatagtgtgaatgatggatgagaaaggaatgagcatagaagcaactgcagaagacaaagtggtggaatgccattgtcagcaaacagaatggctttgtataacgggattctgagggaccgagtgcatataatggagtgctcttactaa

SEQ ID NO: 10897 - DNA, 330 bp, Glycine max
  Clone ID: jC-gmle01810050a06d1
atacttgtgttttgtgtttcttgacatatgattgtactttgggccgataaagcactccacgtcagaaaaaaaggactagacaagtacactttgtctaaaaagatcggacacgaaaaagagggagagattcccccccccgaggaaaaaaacttggctctttttttacaggggggaacaaacagatatcttttaatgccggggagaccaattaaacgtgatccaacagttgttccatgggggacaagcattttaacaggggcgtcccctttaaaataagagctcccctattaatggctttcgagtatggcttccccagcccaaaatggacat

SEQ ID NO: 10898 - DNA, 393 bp, Glycine max
  Clone ID: jC-gmle01810050a07a1
gaactatatcgtacgtataccagagctatgacttcactttaattacgaatttagttacaggccggaaggagtatttgtatacctctataggtctagaaggcttgtttccttgaatggatttcttgagaatgataaaaatgccaatgtgcaaatagtctgcttgctggattactggctaacctgccaaaatccgatagagaactcactttgaagtagattgagatgaatggactctacgcaatcataagcattttgtaaactgggaaatatggtagcaaaagaaaatgctctcactgcactctatatgttcacagaccctacaaatatcgtagtacaccgagatctggtttagcgcggaatatacccttatgcttgatgattatgttaacactg

SEQ ID NO: 10899 - DNA, 342 bp, Glycine max
  Clone ID: jC-gmle01810050a08a1
atctgaagagcggagccaggaaactatagttacaaagcatccaaatttggaaggagagagcatagagataaacccaacaagtgaaactgaagaacatgaacaggtaccagcatcacacaccggagagaaattagagatcaacgatgatgggaatttcatacaagaggaagaaaaagagatggaaaaagaaactgaaaggcagttgcttaaaactgcaacagaaagtgtaccataagatgaagtccagacaaccctgccaacatcaacaattgttaaaggtgagacagttgaaggaattgttcaggaacaaacactcgaggaagagaaatcagcagcaataga

SEQ ID NO: 10900 - DNA, 342 bp, Glycine max
  Clone ID: jC-gmle01810050a09a1
tagaaacattgagaagtggaatgaagctaagtctggcgtacatcttgcgaattcggtttagtttttgagactcttgagcgatcaaattagccgttgaagggctctcatctaagacaacttcgtaaccgtctcgataagatgtacgccagacttagaaacattgagaagtggaatgaagctaagcaaattagaggtggaaactgaatatgatacgtcttaactaccatgatatatatatatagagagagagagagagagtgaagggagttagaaactttaattgataacttatttgcgtgtggattaatcttcagaatgaagtgtcccaataatcttagtggc

SEQ ID NO: 10901 - DNA, 508 bp, Glycine max
  Clone ID: jC-gmle01810050a10a1
attcggctcgagctaagacttggcctgaggacattatacccttgcagcctgttggtcgcttggtcctgaataagaacatagataatttctttgctgagaatgaacaacttgcattttgccctgccattgtggttcctggtgtatactactcagatgataagatgcttcaaaccaggatattctcttatgctgattcacaaaggcacagacttggaccaaactatctgcaacttcctgctaatgctcccaagtgtgctcaccacaacaatcatcatgaaggtttcatgaatttcattcacagggatgaggaggttaattacttcccttcaaggtatgatcctgttcgtcatgcagaaacgttccccatacctcctgctatctgcagtggaaggcgtgaaaagtgtggaattgagaaggagaacaactttaagcagcccggagagagataccgatcttggcacctgacaggcaagatagatttaatcgccgatgggttgatgctctatct

SEQ ID NO: 10902 - DNA, 507 bp, Glycine max
  Clone ID: jC-gmle01810050a12a1
agagcactgccaatttgaatttgtttctattcattttaactttagaaggcaaaacacacaagaacaatatggcattgccccacaaatgtctagcaaagatgtgactcaaattcatcgcatgctgcagctttctgctagctacgagagatggatcttataccttcactggccaccataaagggtgataattggagactcgagtcatggtgcttgctgacctccgttattgctcaatttacaatattgctttcaggaggaataaaaaaaagtacaacaaaccaactgtacttcaataatgaatcaacagacaagatttgacccaaatcatcctatgacaatatctagtaactgaagaactgttatgcctaatcccgtatcttctggactccaacccagcgagcataatccacccacaatagtgagcccaagaaagtgtttccagttctaacagcatagcatactgcgcttagcataagtttgtgctggtgcagcaaatgttcaagaata

SEQ ID NO: 10903 - DNA, 497 bp, Glycine max
  Clone ID: jC-gmle01810050b01d1
ggaaggaaatgtagtttatttaggtttactatttttttacccatacaatattacaataagatttcatattaagtaataattgcaaatacaatagaatctactgaattggtctttaaacaattctagccaaactcaatccatagttatgcgattcagctgtggtcacaaacacattatatcatagcctgtaagcgttcttcgatccttttcttgtgccaataatacattcagtaccatgacctttggtatttatgcatgcaaaagccttaagctaattcaagcctagcaccatgacaaacctagacacaattagagagtctattatgccctacgctttttttcaatccatgatgaaccaggccacgatagtctgggtacttgtgccttactcttgataactagtctttgatcgacttgtttttaagaataaggttccgagcttgattattcatatcttctggcttcattttggagagactgagcctgtatatgatgag

SEQ ID NO: 10904 - DNA, 127 bp, Glycine max
  Clone ID: jC-gmle01810050b02a1
aaaagagttcttttaaaatgcagacagacttaaccttcgctgacccctacgttgtgccattggcacccacaaagattgcttcccatattaccatctttcctactatattgaaagcccctcgcttctt

SEQ ID NO: 10905 - DNA, 433 bp, Glycine max
  Clone ID: jC-gmle01810050b02d1
gttgaaacttgcaacatgttatatacaaattgtgatgtattaaatacgatgcttgtttgctttgaatgagcatatatcaaacactagctgactgacagtctatttacgcggtctggatacatataatccttgctcactacataaatcgactaattaaacccatgtttttataatcaattcggtcccccgattggatcgggggcaaacgcctacgaaaagatcgcttggatttcataaagagtcgcttagatttttccatggtttatttatccctattccaaaaatcacatttattacaagatatactataaaggatttgtttttttattctgacttttttaatatatgttgctatttttttaatatatgttgatatatactgatatttgtatatattcaactgtaaatgatagaatacagatcgatctatcta

SEQ ID NO: 10906 - DNA, 322 bp, Glycine max
  Clone ID: jC-gmle01810050b03a1
ctcggatggattattcttgagagtctttttcagaagtagttcgacgcataagtgtatttacttcacaatcatgggaaccgagacttcgactagtggaaatcctattgctttcagggggagaaaaggttgctttcccagcagcagagattgattaaagatctgcgtttcttaatgcaattgatgattggcttcccatatcttcttcaaggaacgcaaaatggtggttcttagctttacacaacgtcactgtcatggttggagctggtgttcttagccttccttctgccatggcaagttttggatgggggtctggggtggtgat

SEQ ID NO: 10907 - DNA, 487 bp, Glycine max
  Clone ID: jC-gmle01810050b03d1
gcatacataactcattatacactacacaatatgccaccggctcgagggtactgcgaattacacataacaatcaaatgtgatcgctttcaccaaatagaattcagcaagcaatatttaatggatacaaaataaaattcgcatagaatgtcataagaaacttcttagctatatcctattcgcatagaatgtattcagccaagtttgttctccacgatacaataaaagagaagcaaccaaaacgagtatcttagcaatagcatagcattacagaagaaaacggaaaaaattggtgcccaacttcttagctatatcctatttgctgctgttgctggggaggttggtaattcgcatacccaggataactgccatacatattggggtcctgtccaacaggggcataaccataattttcatagcccccctgagcatatccggagtattcaccaccactaccattccactggtttgcatctggttgagcctgttt

SEQ ID NO: 10908 - DNA, 312 bp, Glycine max
  Clone ID: jC-gmle01810050b04a1
agtttgagcctcaccttcgcttccttctttgcctcacgatatgtatatagatcgggaaaggatatatccgttcaaagagggggaatttctatttctggtgtatctgctgctaaggatccctttccatgatggctgcataagatgtttttgccattggatgagagagttttatacaaatgcaaacatccaacatctaaggcgagcatcgttctcttgtatcccagcagtcctgtcagtgcaactttaaactaaaggctagtggaagaagtccttggtccttcctttgctcagcttcttatggcaccaacaatg

SEQ ID NO: 10909 - DNA, 353 bp, Glycine max
  Clone ID: jC-gmle01810050b04d1
acttattttttttttttcagcgtggttgtttattttgatagctctatcatatgataaaaggtcatatgacaaagctatcaacggaaacaaatctacattctataccttaccggagtaaagactaaggggatcatcggtttcttatcatatcatagtcaatggcgaatagacaattttgctttaattcacctattagccgcacctatattacgattaagaagcaactgccccgtgtatagaccctatacgcaaacctctataactataatagttctttaatattcccgcgaattacagcaattattccaataatacataaaccacgaaaatctctttactctcctatctctatc

SEQ ID NO: 10910 - DNA, 353 bp, Glycine max
  Clone ID: jC-gmle01810050b05d1
ttatcttatttgtttgaacctattatcccaaagcaataaaacttgcgcttattgcatgggatcgcaaatggacataacatatatgattacgcatttaatatatattatgcaaatgactaattagtagcacagctaacagtagttattatagcactatgaataatatagtcattaaaagaaatattcgtaagtttgcattagatcatacacctgagattattttgacccttaggaatgctgacttggcggtatcacgttcactgtcttcaccaagatgctgtccggaactgactcgaggcttcgtaactccgtctgccggaatctgcctgtccgatttaagggcttcaagccat

SEQ ID NO: 10911 - DNA, 395 bp, Glycine max
  unsure at all n locations
  Clone ID: jC-gmle01810050b06a1
gagcgacgactgcnatgattttatctgacactgtcgtcatctctgaatcctgcttgagctcttcgtaaccaccaagagctcttggttgctcttgcaattctatattttcttgccacctcactcccttcagtttcagctcatggtccatatgcatgggatggggaggccacatataaattcactacttaccaccctggccaaaactacataggtttatccaatgtccataactacttacaccatctcggctacatccccaatgcaccacacttcgacgacaactttgatgacaccctcgtatcagccatcaatacctaccaaaagaattacaacctcaacgtcaccggtcagttcgacatcaacactcttaaacaaatcatgacaccccggtgtgg

SEQ ID NO: 10912 - DNA, 374 bp, Glycine max
  Clone ID: jC-gmle01810050b06d1
aaagcttaaagaattacaatatatttatataattttactggggagtaacaacaaccacttgcttaccaacattgcgaccggtatagaggccaaccaaggctgcagggcccttctcaaggccctcagtaatgacttccacatacacgaccttaccttctctgatttgaggcaggacaaactccaagaattttggatataaatgatagaaatcagctgcaataaaacctatcacttataacccgcttaaatatgagaattgcccgattagtgacaccatgtaactcagtcagattgctctgggagatcatttcacagacaggtatgcggtcatgaaattacatgttagggagtactggattaagtgtcttgccccc

SEQ ID NO: 10913 - DNA, 400 bp, Glycine max
  Clone ID: jC-gmle01810050b07a1
gaatatactcggataccgagcttaatttccataatctctgcaattttgctcgaggcctgatgtaaccattacatcatcagattcagacaatgagattgaagatcttgatgacgaatgtatggagactatctacttttggggacaaacgaataggattcaagactagtgtcctagaggaaatagctacagcatgtaacatgctttgttgatctgctgatgagcagaaagaaggattctttccatggattgatcatgttgctggatctttagttccacttcctaaattttattaatcacgaggaggttagaaaagcagcagttataacaatgccggagctattacgaactgtaaaattagtctataaaaaaggggcaatttcgtggtcgggatgttacctat

SEQ ID NO: 10914 - DNA, 319 bp, Glycine max
  Clone ID: jC-gmle01810050b09a1
ctcagaaggatcacattggcgcacagagtttggaaatgctaaaagttagagcttccctcgaggaaaaactgaaaaacaagggtctgtacagctccattgcttcaaaacctattaatgcattataacgtttgaaaccagttaatggtatgccttaaatcataatatgattttaatgatgataccatggatgccaacggagaagctagattgattaatggttttgtctccaaataagtttcttagttccttaatgcaaatatgaagaagcccaaggtggttcctggtgatgatgatattaccaaagagagatgatattggt

SEQ ID NO: 10915 - DNA, 374 bp, Glycine max
  Clone ID: jC-gmle01810050b10a1
aagcaaagcaaatagtaaaaatggcgaacgcaccctgccttcgttgcagctctcttgctcttcactgctcaacgcacacttcttcttcctctcactctcagagcctttctctttcttcacacacttctcgcctctcctgggaataaatatagtactaagaaatctcctgggaaggtgaaggccgtgtatgctaatgaattttgggcgcctgagaggagttcacgtcagggaatttggtctatcaggacatggaccaccacctatggtgcatgagcggttccagagtgttattagtcagctttttaatatagaatagtacgttgtggtggagctgtagatgatgatatgtctaacatcatagttgcccagcttct

SEQ ID NO: 10916 - DNA, 398 bp, Glycine max
  Clone ID: jC-gmle01810050b11a1
ctcttatcacagcttatcttggattgctacaaactatggcttcttatgttggaccatatctaattgacggttctgttcagatccatagtggacaacggctgtatgaaaaccatgggtataaattggaacctgcatttgacgttgcaacgattgtgatgtgcctgacccgtaggcattgcatgtttaggttgcagcaggttggtctacgaatacgagcgctgattgatacaacgatctataataaggctctgaccctttatagtcatcaaagcagggtcagacttctggtgagataatgaatttcatgactgttgatgctgtgtgacaaggtgtaatcagttggtttatgcatgaatggtggatggagggaatgtaagtatcacaagcctagatgatta

SEQ ID NO: 10917 - DNA, 563 bp, Glycine max
  Clone ID: jC-gmle01810050b12a1
tttccaacgttttctcttttgcatcctcaatttcctcctccaacctttttcagcgacataacatcatatttctacgtgcacttatctctctgtttgtcaactctctataaatactgtcttgtgcttgttctcccactttcacattaatatgaactcaacttttacgatgttttcttggggcaaaagattccaactctctctacggcatagcataaggccgtttggcagccaatcacaaggctccacgtcatcatcatcttcttcttctttcagctcctttggtgggtccaggcatggtgacaatagggtcagagactttgaggcctttcttagatcaatcacttctggggttgtggttgttagctccaccttaggctattggtattggtcatctttgtcttctcctggtgccaattctcttcagtcatttgctgatggttatgctaatgaagaggatcagtttcaacaaaacgatgaaaacaaacccaagttcctctttaatgatggctatagaagaagagtattcttcaattatgaaaaacgaattcgcttgcagagccccc

SEQ ID NO: 10918 - DNA, 280 bp, Glycine max
  Clone ID: jC-gmle01810050c01a1
cacccacccctctcacacacacacccacaagacacacccgagccatgttcacgtcggcgccgccgccggcctcggcgccgtcgtattcgttgcgctggtcgcgctggggcatctacggcgtcaagaagggctttgtcatctccgactgggccttcggctacgccatctccgtctaatgtcagatcggcggtgagcgctattggccgtcgagcaacgacatgccgttcgagcttgataagtgcgagcgcatactgcgcgcctttatcgacgatggctttcc

SEQ ID NO: 10919 - DNA, 423 bp, Glycine max
  Clone ID: jC-gmle01810050c01d1
aagtacacaactcacagcaaaaaggtttataagctgtaaaggtacatgtaaccataaacaaaaatagtctccaagactataaaaacattacattttagacaaattagtcttcttccacttcatcctccgtcaacacctactacaactgctggtgttgctgctgcctaacatgtatcatattcactacaaacatcttagtaggagtagcctttgacgaacaactccttcttggcttcctcagattcaccctcaccggtgtacttcccaagctgggcgagcgagttggacttggcacggaaaagaagtgcatcttgtgccgccttcacattctctgggcggcctccccatgtcttcaaggcagtgttttggagggctctggcatacgagaacgacacgtgccacgggtttggagattggttcatg

SEQ ID NO: 10920 - DNA, 337 bp, Glycine max
  Clone ID: jC-gmle01810050c02a1
cggagttgaagttcaacatgaacctttgggtggttatatttcttcctatgaaaagcagatagaagttactgcagctgaagcctctattgaagctactgcccaaggcattgcatcaatgctctgcgcccatgaaccatatgttgaatggagaacttgcaccatctgggaagctgcttatggcctgacttctacaagttgctcaactgtcgatactccggaaattctagtttcatccccacttcattgtcgaaacctgtcatggaattagaacatacccctattgaaggtcctggaacatctttctcgtggcagcccatcataggcatgtgttaagaaa

SEQ ID NO: 10921 - DNA, 493 bp, Glycine max
  Clone ID: jC-gmle01810050c02d1
ggccgcccttttttttttttttttaatccaaaaacttaaatttgaatatttctagttctactttctggataggaaaactcagtatacaaacattggttttaatgcatcacttatttctggaatttcagaaactagtccgtcgacaaagataaatacttgctgtcaaaattctgttacaagtgtaaataaaaaggtttgagtagtaatgttttccatcatcttcatcatcctttgtctatatttgccagcaacattttaattgcacattgaaaaattaagcaaatggagaataataaattaataatactaccacttttcagctaccttcattttctttattcattggatctgagctcacagttggaagattccttctgtactgctgagacgtcaatctcctttccaatggtgttttcctcttgcttacaacacatctgttcacccctttgcgcataggcattattgaaggaaaatcttcgtctggaatctgact

SEQ ID NO: 10922 - DNA, 335 bp, Glycine max
  Clone ID: jC-gmle01810050c03a1
agaagttagaagtgatagtgaagaatctcatttccagcttccattatcttctcatctcaatcaggggggaaaatgagcgggcggtcaagccgcacaatttatgttggcaatcttcctggcgacgttcgcttgagagaagtagaggatctattctacaagtatggtcctattggtgacattgatttgaagatacctccgagaccaccaggctatgcttttgtagagtttgaggatgctcgtgatgctgaagatgcaattcaatatcgtgatggttacaattttgatggttttcggttacgagttgaacttgcacatggtggacggggatattcatc

SEQ ID NO: 10923 - DNA, 187 bp, Glycine max
  Clone ID: jC-gmle01810050c03d1
gagacttcgtaggcggccgcccttgttttttttttttttttttgttgtttttttttttgtttttttttttgttgttttgggtttttacccaaaagtctattttagaacgaatttagttttcttatgcccatgcagcattagtttaactttaaagtaaaaaattgcaggggcccgggggggcaccggg

SEQ ID NO: 10924 - DNA, 340 bp, Glycine max
  Clone ID: jC-gmle01810050c04a1
atgtaaaagcgtctcaatcaagaatattggggaagcattggaatgactgcatcgtgactgccgcacggaacatcggacagactctccttccgactacatcaacgccccgcttcctacctccggacatcacacttctatctcatcatcactctgcaaaatcagcatatataatatgccttcgaccatgcgcgtccagcgtacttttttaggcgtttctcaacttcaacttccgcaatgtctttatcaaaaacctccatgagccctctcgcgccacgcaaaccgtcaggatataccacagcgcattacaatggcagtccacctaccagcttcaaaaaccatg

SEQ ID NO: 10925 - DNA, 486 bp, Glycine max
  Clone ID: jC-gmle01810050c04d1
cagaaccgagcttgcagcagcgatttctcatttcatttttcacacttcaacaatggcgaaaaccttcaaatacatcatcctcggtggaggagtttccgctggttatgcggcgagggagtttgccaaacagggcgttaagccaggggagttggctatcatttcgaaagaagcggtagcaccttatgaacgtcctgctctgagcaaggcttacctttttccagagtcccctgctagacttcctgggttccatgtctgtgttggaagtggaggagaaaggttgcttcctgagtggtacacagagaaagggattgagttaattcttagcacagaaatagttaaggtagaccttgctgcaaaatctctgatcagtgctggaggagaaacattcagttatcagattctgattggtgcaactggctcaacagttataaggctgacagatttcggtgtataatgagctgatgcgaaaaacatcttttatttgag

SEQ ID NO: 10926 - DNA, 294 bp, Glycine max
  Clone ID: jC-gmle01810050c05a1
ggaaggagctcatggggctgtattcagaggaaaacttacatatgagattctggtggctgcgaaaatcctcaataatacagagggagaagggaatgagttcattaatgaagtggaaattatgggcaaaatccaccacattaatgtggctcgtttgcttggctattgtgctgattgaattcatcgtgctctggtctacaatttctttccaaatggttcactacaaagcttcatatttccaccagatgacaagcagaattttcttggctgggagaagctgcattaatattgctcttg

SEQ ID NO: 10927 - DNA, 286 bp, Glycine max
  Clone ID: jC-gmle01810050c05d1
ggccgccctttttttttttttttgagatgcatatcacttactaggtgaacttgctcttttggcagggggttgataatggacatatgatatagtccatcgtcgctaacataagggaccctatgcacaaataacatttcaaggtaacatatgaaatatgagcgatcacggtaatatagtgttattagggcaacatatgatgggagccatttgacaagcagttgggatgcttatgacccttagggccgaaggctggtggcgtctattacgtacacttcgtcgtgattat

SEQ ID NO: 10928 - DNA, 230 bp, Glycine max
  Clone ID: jC-gmle01810050c06d1
acggggaccctttgactaaaaattttgggggaggactggccgctatcaaaagtttcaggggaccttttaaggctttgagttttgtctttgaccttcacaaactgacattgcttgaaatgtggcacgccagtctcctagaaacttggatctcttggattgatacaacaacctttacaaacggaaattttaacccgccaagtttgatatgcccccaaattaggactggaaaa

SEQ ID NO: 10929 - DNA, 347 bp, Glycine max
  Clone ID: jC-gmle01810050c08a1
tgaaacgacacacacaaaaaaaagctttagttaggatgacccaagtgaggaacaagcaagtggttctaagagattatgtcaccggattccctaaagaattcgacatgaacattgttgaaggcaccatatatatcgaacggttccagaaatgtctccaatgatgtccttcttaaaaatctctactagtcatgtgatccatacatgcgactcctcatggccaaggaccgttctttcggagatggctccttcacccttgcctctccattgaaaggatatggtgtgtctcaagtgctggaatctggacgtccagattacaagacaggtgatttagtgtgggggattactaa

SEQ ID NO: 10930 - DNA, 258 bp, Glycine max
  Clone ID: jC-gmle01810050c10a1
tcgtcatcgacgaagaaccttgctgagaagtcccgtttcaatttgaccatacccaagattgaaatccctcaatactgatccatagatccaaaaaaattattcagtgtttttttatatatttttttaagttatttgggattaatttgttcttgtacatatatagtacttgggccttattcgctagttttagcttttagattgtagtatacttttgacagtggtgattcaattcaattcatttatttttatttgtaagat

SEQ ID NO: 10931 - DNA, 72 bp, Glycine max
  Clone ID: jC-gmle01810050c11a1
cgagcgcgtaagagcatgagtttgagctcgtgcgacagagcaaataagattgtctcagattattaatgcaca

SEQ ID NO: 10932 - DNA, 473 bp, Glycine max
  Clone ID: jC-gmle01810050c12a1
gcccttttctctctctcttcaatttcacccttttagcatttgtacattcctttcccttccttgaatcgttcttaattgcgagaggggatatcggagaagttgattggcctcccattaattgtctgaatgatctgatggagtctaaagttgggaagaagaagtcgtctagtagtaagtcccttttgtacgaagctcctctcgattacaccattgaagacgttcgaccacacggtggaattaagaagttcagatctgctgcttactccaactgcatccgcaagccatcctgagattccctaggttgtgtgacgacatagcccccgtagtcttgcatctgctatattattctagtctcttcttttcccttttcttgttctcttccttgcccttctgttctctctacctattcagcacgactttgtttctttttgagctaagatggctggctcactattggtttctaaggctaccaa

SEQ ID NO: 10933 - DNA, 336 bp, Glycine max
  Clone ID: jC-gmle01810050d01a1
aaaaaaaaaaaaaaaaactttcgaaagattttatccaattgaaattttaaaaatgactgggataaacttaagaattcaattattgaaattgaataagttaacaatttaattggattggtcgaatggtatcaaaaaaatggagtactaactcccatttcttatctattattgaattaaccgatcaacttgctttgttatcgaacatttctttttgatttcaaaaattttccggaaaaaatttgattctatttattatatgcgaatcaatcctactacttgtggtcctgaggtttctgcgcttgaaaaaaaaaatctgggacgtatcgtccaaataat

SEQ ID NO: 10934 - DNA, 492 bp, Glycine max
  Clone ID: jC-gmle01810050d01d1
gaaacggcagggccaattgcagccaccgaatgtcccatgatcaataaacctcaatatttgtagcagctaaagttaaaagaggaaaagaaaaactaaataacaaaaatatggatgaatgaaataaagagtcctctagttaaatcacaaattacctctatttatttacattattgtgagccatcgttagccatcaaattacagtatacaacaatctcctcctctccatgccgcaccagctacccattctgtaagatttattaggttgctcaaagaaaatgtgcaaaaataatttcagaaaaacatcccttgatcaacaacttcttggataggacggcgttttcgtcaggcgcctctgccaatgtttacatttgacaaatgttacatgcccagctcaaaatggacactttcatgtaatggaaaacaaattgcggaatcgatgtactctgcttgaacaaatgtttgaagactgtgcctgttcgtgagcacctgaac

SEQ ID NO: 10935 - DNA, 146 bp, Glycine max
  Clone ID: jC-gmle01810050d02a1
aaattatgtgctagtatcagtattttagtgaatatatgctgctgcagtccggcttgtgttttctcttgaaactttcttgttgtacttaattgatgatcatgacaatttagtgctgttctaatgcgagatttataactttaataata

SEQ ID NO: 10936 - DNA, 410 bp, Glycine max
  Clone ID: jC-gmle01810050d02d1
ggcgtctatacttttttctgatgtccttgacaataaaagaagcaatgcattaaagctgaaagtagagtgtatgttcatcttcaaaggagtgtaaaagagggtaatatatattttacagaatttccgaaagagcagaaaaaaggaagtaaagacaagaatgacttgtgactcaaatcctggatgggatcataggaatagcgtcctgtaagtatgcactggcagcagcaactccacttccaagctttacaggattgcccacatctttcaggatcatttccacaccagctagacatcccaacagttgcgactcattcaagttgccaagatgttcaattctgaaaaccttcccagcaactttgatcattccaggacctaggcttagattgtatctcttccctgcccttctaact

SEQ ID NO: 10937 - DNA, 330 bp, Glycine max
  Clone ID: jC-gmle01810050d03a1
gatttgatggtggagaatgtggaagatgaggaccctatcatggctgtgaacttgctaactgctgctagcactggcattgctgcttttcttgaggagcttctaagagcaggtttggattcctgacattggagactccaaagggaaaatctcttagcacatagcagcatcaaaagggcatgaagagtgtgattaagacttactcaagcatgcatgcaacatgcatattaaagacatgaacggtaacactgcaatatgggatgctatagcattctatcattactccatatttcggatccttttccagttttctgctgtcactgaacctaacac

SEQ ID NO: 10938 - DNA, 250 bp, Glycine max
  Clone ID: jC-gmle01810050d03d1
cctgccctttttttttttttttgtccatatctactgctattctgcttttattttgtttgctatgatctaaaaaatttttttttatgggtctcaatctacattgttacactctgaaaatttaacgagctacatggctgatactttacccttgttaacaacttgcaaccttctttgcatatggttattaaaaattcaggaggcattttggtattctttaaaaccatatttacccaacatttgaaaaatcatt

SEQ ID NO: 10939 - DNA, 333 bp, Glycine max
  Clone ID: jC-gmle01810050d04a1
gaaaaaaaaaaccctagtaatgccgccgatggggaggaagcgaaaggtagcacccaaatcttctctatccaccgagccacctctcaagcagcaacaaccaaaacccgaaaatccctctcaagaatacgaagaagtcgaagaggaagttgaggaagaagaggtagaggaagaggtcgatgaggaagaagaagaagaagaggaggacgaggaagaagaggaggaggaagaagaagaagaagaagaaaacgacgtcgtcaaacaacagcagcagcaacagcaagacgaagacgacatcccgatatcgaaacttctggaaccgttgggcaaggacca

SEQ ID NO: 10940 - DNA, 536 bp, Glycine max
  Clone ID: jC-gmle01810050d04d1
aaaatcagaatatttcttcggagtggatataataattgttgaagcgtacaaaatttaacaaatccaaaaaagataagatgatttgggtgagctttcactgtgacttacgtctatagtgaagagagctacactgaaagcttaggccatagaaatagagctacagaatacacttatacacctaggcattagtaacttatataagtgaatattatggcactattctgagaccttaatgctttcacttgtgagccacatcttcttttgaattataagcactacttcatcatcatcatcatctttaccttgatctacatcatatatggtcacagcattccagtgtaatgctgacaggtatttctttatgtactccaccatggaacgcttatcatggatgatgatgaaaccctttggccttaggattctgtcaatctcaattaataaatcctctggactgcattctttcttaataatatcagaaaacacagtccatgcatggagtagatcgtacgttcgaaggtaggttgaaatgctttaca

SEQ ID NO: 10941 - DNA, 339 bp, Glycine max
  Clone ID: jC-gmle01810050d05a1
gtgaaacagcaaactagcatcacacgtcgctcaaagccaatgcacctagcaaaaggctgtgcgtgggatacctggcctgctcgcacgacgacactagctactcgaccggctgaaactcactacactacgggcatggctcataacggcatggcagtgtggaaacaacgagctcgtaacaactgcagcaggccatccagcaagatgaagactgacacaatctggaacgcgatcgctatcaaggccaactcgagatcattggctgcaccatctaatgacacagacgctcgggctacgaatgaggtgccccataatgcacaaagtacattgacgacaatgtac

SEQ ID NO: 10942 - DNA, 229 bp, Glycine max
  Clone ID: jC-gmle01810050d05d1
gtgaaagcaaatgccatgtatatacttacagggggtaatttccctgtgacgaaacaaccgtttttatgcccttatcaccaagttccaggaccgaattttgctaggccttaagcaagttttggggcttttcaacaaaaatggctttttgtacgggtttaaggcggtcttgactgatggctactggggtttgaacaaactccggcaggaacccactgatttcatctccggt

SEQ ID NO: 10943 - DNA, 170 bp, Glycine max
  Clone ID: jC-gmle01810050d06a1
tatttctccattttatgcccattggtgttacaagagtacccttccgtagccatgtggaagaagatgcatcctgggatgatatatacaatcgactttatcgataaagattacttactttaggtcaagacgcttatagtgaaataatcaatcaatctaattagccatatcgg

SEQ ID NO: 10944 - DNA, 424 bp, Glycine max
  Clone ID: jC-gmle01810050d06d1
ggtgcatcaaatcaacagagataactctctgaatctttatattatagatctattattgattcattacatacataattcagaaggaaaaaaaaaaaaacataacaaaaaaaaaagtgtccgcttcagatttgatcgcatttttcctattgcacaaagcctgcgcatttcattcaagtttcaacagaagcgtaaaaattgcacaagtgtcttagataaccacattagaaaatgaaaagggcaaccaccacccatcattataataagtaaacaatacctacaaattgcactattgcaaggcattggcaccagccacaatttccagaatttcaccagtgatcttagcctggcgctccctattgtacacaatggacaagttcttcttcaactcaatagcattatctgtggcattgctcatggcactcat

SEQ ID NO: 10945 - DNA, 347 bp, Glycine max
  Clone ID: jC-gmle01810050d08a1
gcaattgaagttaaaagccttatccttccctactactccaaacacaaagacatcatcatccatggctgcctccgtctccactgtcggagctgtcaacagagctcttttgaacctgaatggttctggagctggagcttcagcttccagttcagcctttctttgtgaccagccttgaagaaggatattgcctcaagggtccccaacagcaaggtttccggtggaagcttcaagattgttgctgtagaatagaagaaagagattgaagagacccagcagaccgacaaggacagatggaagggtcttgcctatgatatctcagacgaccaacaagacatcacaagaggaaa

SEQ ID NO: 10946 - DNA, 198 bp, Glycine max
  Clone ID: jC-gmle01810050d10a1
aagtagaaccgtccaaactgatgctcgagaattccagaattcatatacgtatcatgatacactcattgcatgttttcattaagaaaattgccatcctacttacccatgaattgcattgcatgctttcattaagaaattggcatgtcacccaccaggctggtggagataatttattttcaaaaattaatctaataatat

SEQ ID NO: 10947 - DNA, 510 bp, Glycine max
  Clone ID: jC-gmle01810050d11a1
tttgttatactaatattttatttgtgcaggtctctgtgtttatgattttgtttatgtacaaaattaaggaaatttaatctttgtttttgaatgagccttgggttagacatgtaggcgacttcacctagtaggataaggtttttgatgttgtagtttttgaatgagccttagagcagacattatcaagtagtcatagtacattttatgaatgatttattttttcatccaatgactaacaagtagcaattcatcagaatatcattgtctattgcattcattcttctgtatgtgctcattgtcaactcaactggatgatttgttgcccttctttgagaaaaataaagatatgattcctgtgttcctttgaggcaatgtagtgggtatagctatcagctatgagatatgcaaggactgttcatgttcaatttcaaaccttgcaattctctttccccttctcctaatgagacctgttgtgggctttccccaaggccatcaatgatgggcctacct

SEQ ID NO: 10948 - DNA, 491 bp, Glycine max
  Clone ID: jC-gmle01810050d12a1
tgtctccacacacagagatcaaccttattcaatgactggttttggttctttaacggaaaacctgttggtttgatctccaagaaatcttctatctcatgtaaatcaacaggagcaaataatactgaagagaaagaaagtattacaacttatgatgatagggcacataccaaagatgagaaaaatgatcacactcttgttgttcatggcttggctgatgcttgtagattcgtttgtaatgatgcaaagtttctctcacgtggcataatgaggttggatgctcgtgcacgtcaagatgttgcttttcttgggactgaatctctcaaacttgatgctcgggcaagagaggatactgagaaaattgaccgtgatggtaaggaaaaagctagccgacttagtcatattgctactatattgaaggattaagcttagtccagattaataaatgctgctgatgagcattggagtgatggggccttagaggctgatttacg

SEQ ID NO: 10949 - DNA, 493 bp, Glycine max
  Clone ID: jC-gmle01810050e01d1
gtctataacaatttcattaaaacaaagagaatatgaatacattacactgagttaggagaataatagaccccccttaagataaattttcataacaaaccaagcaatacatcaatgaaacaaatcaatccaattcctcaacaaaagaaacaagccctccaaaaagctcaagcatctgtgtattctatctatttacaaaagcagcatgtatgtagttgtctaatgggtcactttttttttattttgatgatggtggtgtcttggggtgtgaagacttgcctgtaatggccttcttcactttggaaattgaatgctatacctttgaccctacacctgataggatgccatgagattttttgtgtgaaactttcgtgtcggtgtcttgagagtttctggatatcacactcacactagatgatgggctaattttttcgaattcgtctcctgcttcggcttcctttgagatgcctggttgagtgatttcggcctctggagt

SEQ ID NO: 10950 - DNA, 328 bp, Glycine max
  Clone ID: jC-gmle01810050e02a1
acggaagtaaaaattgtaaatacgggtaccgtacttcaagtaggcgacggtattgctcgtatttatggtctcgatgaagtaatggcgggtgaattagtggaatttgaagagggtactataggcattgctttgaatttggaatccaaaaatgttggtgttgtattaatgggtgatggtttgatgatacaagatggaagttcagtaaaagcaacaggttgaattgctcaaatacctgttagtgaggcttatttgggtcgtgttataaatgccctgactaaaccaattgatggtcgaggagaattttcagcttcggaatctcgattaatcg

SEQ ID NO: 10951 - DNA, 407 bp, Glycine max
  Clone ID: jC-gmle01810050e02d1
aggcggtggccgccctttttttttttttttttttttttttttgacgaaaataacaggcaattcttgccactaagattattgggacacttcattctgaagattaatccacacgcaaataagttatcaattaaagtttctaactcccttcactctctctctctctctctatatatatatatcatggtagttaagacgtatcatattcagtttccacctctaatttgcttagcttcattccacttctcaatgtttctaagtctggcgtacatcttatcgagacggttacgaagttgtcttagatgagagcccttcaacggctaatttgatcgctcaagagtctcaaaaactaaaccgaattcgcaagatgtacgccagacttagcttcattccacttctcaatggttcta

SEQ ID NO: 10952 - DNA, 334 bp, Glycine max
  Clone ID: jC-gmle01810050e03a1
caaaaacaatggccacttgttcactcatttccacactcttcccttctccttcttctggttctttttcactctctcgttcttcctcaaacaccaccaaaccaaccaccattcacctctccaaatccctccatctgcaaactcccatcctctggctccttcgccccccaaacccaaaaccgacacttccaataatacccctgttccccaaactcaccattcccaactcccttctccttctctgcacctccctcgctctctccttcactctcctcctctcccccgccgactccgccggcgcctttgttgtcacctccccaaggaagctgcagtccga

SEQ ID NO: 10953 - DNA, 401 bp, Glycine max
  Clone ID: jC-gmle01810050e03d1
ggccgccctttttttttttttttttcaaggaaattttactcatgtaaaaagaaaattttatttctgcctctcactgtatttgtgacgcctaactatgtttggaaacacagtagatacatgggcaaccacgtccatttaccagaagatgcagaagcaatacctaccagctctgatctaactgtgaaattacgtcaacatgataccaaacatgctaaaaggcaaggaaaggaaacaaagaaaacaactgaaattttttgacattagatcatcagattcacttcgaaaagtgaatgcatccttaccaaccaagaagcaatacctttaagagagccatcctaatatatagaccattctttgcctgcctaaagtaagcagctcttggatctctaataacttccact

SEQ ID NO: 10954 - DNA, 320 bp, Glycine max
  Clone ID: jC-gmle01810050e04a1
attattctttcgcaccttgcagaatcaattttctctctcaatcgtctttcatggctcgtaccaagcaaaccgctcgcaaatccaccggtgggaaggctcctaggaagcaactcgccaccaaggctgcaagaaaatctgcacctaccaccggtggagacaagaagcctcatcgctatcgtcctggaactgttgctctacgtgagatccgaaaataccaaaagagcacagagcttctgatccgcaagctcccctttcagcgtcttgatcgtgaaatcgcgcaagacttcaagactgatttgaggatccagagtcacgcggat

SEQ ID NO: 10955 - DNA, 466 bp, Glycine max
  Clone ID: jC-gmle01810050e04d1
ataatactctatttgtattatttggtacattaataacttttaagcaaataacaacataccctaagatacctgtcaaaccttttgttttcctgaatcgcgccctcaaaccttatgttaacacttcctataagaaagacaaaagtaatggttaaaaaagtaagatttgcttgcataattacactatatataggagaaggaatttgctcatttttttctataatactcttaattaattactattttttttctataacatttaaatcttatttttataaaaatatatatatatataaatttgaagttaattaattattgtttttatagggtattttattgatgttgtttgctgaatggtgtgatagaaaaaacagacatatctaattttcttgtcttggtaactaactgattaatcaatatatctcaagcaaaatttatcaatctgcaatacatatgttgaaagtgggtg

SEQ ID NO: 10956 - DNA, 457 bp, Glycine max
  Clone ID: jC-gmle01810050e05a1
aagatatatgccttctgatataccagatgtctatgactgtcgcgtcgagctacgcgaatttcggtctcgagatcctagatgcatgttctcaatttatatttcattatatctaggtcaattgataccatactcatatatgtatacgtcaagctcacagtagtcaaatggggtggtcctctgtcgtaatctcagtaataacctattatgtctgggacgaatataatgatttctttgatagttacaatgaagggatggctattcaaatggtgctggaaataaattgtatagctttaacctgtagcactcacaatggtagtgtgcattgtaagtcctgaatacatgacattgagcaatacatgataaccatcattaacaatggatcgtgtgctttgcaggttagattttccggctcctatactacagctgcaaagttttgtagtgttaagagaacgaactt

SEQ ID NO: 10957 - DNA, 538 bp, Glycine max
  Clone ID: jC-gmle01810050e05d1
tttccaacgttttctcttttgcatcctcaatttcctcctccaacctttttcagcgacataacatcatatttctacgtgcacttatctctctgtttgtcaactctctataaatactgtcttgtgcttgttctcccactttcacattaatatgaactcaacttttacgatgttttcttggggcagaagattccaactctctctacggcatagcataaggccgtttggcagccaatcacaaggctccacgtcatcatcatcttcttcttctttcagctcctttggtgggtccaggcatggtgacaatagggtcagagactttgaggcctttcttagatcaatcacttctggggttgtggttgttagctccaccttaagctattggtattggtcatctttgtcttctcctggtgccaattctctttagtcatttgctgatggttatgctaatgaagaggatcagtttcaacataacgatgaaaacaaacccaagttcctctttatgatggctatagaagagaagattcttcaattatgaaaa

SEQ ID NO: 10958 - DNA, 297 bp, Glycine max
  Clone ID: jC-gmle01810050e06a1
gttaaaatgaaagcttgcatttcacgttattcatatcaaatgctcatagcaaaaggaagaggtttgtctccttggcctgctcgattgactactccaccttcttgttggcataaattcactattctactgaaatgttcgagaaggacatggaagtatggacacaacgagctcataatatactggagcatgctagccatccagattaagccagacacaattcgtaacgtgatggatatgaaggcgaatttggtgtcatttgcagcagctttgaaggacatatgagtctgggttatgaat

SEQ ID NO: 10959 - DNA, 394 bp, Glycine max
  Clone ID: jC-gmle01810050e08a1
gaagaaacatatgtcttagctccaatcatcacacatgtgtggttgttcctacaaatactcttctccttgtcctgatctcactccagatactctacctctctctgctactgtaccttcaatcgcctatttctatgctcctctatcactaaaactccatactatcatagcatctacctttcacgtcttcattaaacctccccaaaatcctctgtggtctgagagaactcagaacccgcattgattccgtgaagaacactcataaaatcaccgaggctatgaagcttgtggctgcagccaaagtgagaagagctcaagaagctgttgacaaaggaagacccttctcagagaccctctgtgaagtactctacaacatcaactagccacttcctaactg

SEQ ID NO: 10960 - DNA, 505 bp, Glycine max
  Clone ID: jC-gmle01810050e10a1
gaggaatcttatgtaaataccacagaataaggtttggtcctattcatggggattctgtaaatattccattccaaaaagagaaaaaattcgaaacaattgggattttttggagattggatgcagttactaattcatgatctgacatgtacagaatgaaaacttcattctcgattctacaagaatttttatgaaagcctttcatttgcctctcttcgatggaagttttattttcccagaatgtatcctaatttttggcctaattcttcttctgatgattgattcaacctctgatcaaaaagatatatcttggttctattttatctcttcaacaagtttagtaatgagcataacggccctattgttccgatggagagaagaacctatgattagcttttcgggaaatttccaaacgaacaatttcaacgaaatctttcaatttcttattttactatgttcaactctatgtattcctctatccgtagagtacattgaatgtacagaaatg

SEQ ID NO: 10961 - DNA, 316 bp, Glycine max
  Clone ID: jC-gmle01810050e11a1
ctattgcactagcgtttgagttgtgccgcgttatgcacatatgatatggttgatgggcaatattatgcaaatgtaatctgagtctatgaatgatcctcgggttagacatgtacgtgactaccgacaacaggatcagggtcagtggcgcactcgttttgagtgagccttagcgccgacgttatctagcttatcgtagtacatgagatgaatgatttattagaggatgcaatgactaacgaggattctatgcattacgatatcataggctatagcacttgttcatatggatgcgcttattgtcgactgaactggatga

SEQ ID NO: 10962 - DNA, 322 bp, Glycine max
  Clone ID: jC-gmle01810050f01a1
ctcattatctctcattcacccaatggctgctacggattctgtttcctcttctatctgcaacagaatatacaacctttccttcacacacccttccctttcactcaccagcagcaacttccctcaaagacccgtatctcaaaaaccactcagtctcaacctagtgtcaccaaagattcgctctttcctttcttccactttaccgtcttcccccacctttcgctgcctttgatgggttggaagtagctcaagataccacagagttccaacaagacgaaccagaaccagaaaccgtagaaaaaacagaacaagatgaagagctaaa

SEQ ID NO: 10963 - DNA, 457 bp, Glycine max
  Clone ID: jC-gmle01810050f01d1
cggccaactcgttcccaccggaacatgcgtcgtcgtcgacggccacctcaaacttcctcccgctggcaccagacagaagatcgaactccgcgccgataaggtcctccacgtcggtcccgtcgatcccgccaagtatcctctgcccaaaatgagactcactctcgagttcctcagagatttcgttcaccttcgttccagaaccaacacgatatctgcggtggctagaattagaaatgctcttgcgtatgctacacatacatttttcaacaaggaagggtttctatacgtgcacacccccattgttaccacaagtgattgcgagggtgcgggtgagatgtttcaggtgaccactttgctgagtgaggcggagagattggagaaggagttgttgcagaatccaccttcgtcggaagcggatgtggaggcggctagggttggtgatcaggagaaaggggag

SEQ ID NO: 10964 - DNA, 330 bp, Glycine max
  Clone ID: jC-gmle01810050f02a1
gaacaagtagttgataactaataaggagaagcaaatggcttcctcaatgatctctttccctgctgttaccactgtcaaccgtgccggtgccggcatggttgctccattcactggtctcaagtccatggctggcttcctcaccaggaagaccattaatgacattacctccattgcttgcaacggtggaagagtgctatgcatgcaggtgtggccaccagttggcaagaagaagtttgtgactctttcctacctgccagaccttgatgatgcacaattggcaaaggaagtagaataccttcttaggaagggatggattccttgcttggaatt

SEQ ID NO: 10965 - DNA, 424 bp, Glycine max
  Clone ID: jC-gmle01810050f02d1
ggccgccctttttttttttttttttcaaataaattactttcctgaattaaaattctcaatccaaacacagtcttagtgtcacttacaaaattgacaagtaaaaatataccattactctgaaaatacaggatcaaaactggcttgattgcaaatgacttgatatgccatatatgcttatatcccaaccaataccctacaggctatactttgaccgttgcaataagtaaacaagatacttccatctacgtaaatgattcaaacttggataattttggaaatatattgtaaagctaataacaatatcagctcttgaatctaatgcttctactgatagccgcattaattccagaggattctccaccataaggagcggtcggcctcttgatactctgaacctgccccttgcgattcttaacagcttttt

SEQ ID NO: 10966 - DNA, 306 bp, Glycine max
  Clone ID: jC-gmle01810050f03a1
agcgaacctccggctcatacttggaagctgtggtgatccttaccgtcatgctagcaaggctttcacccacacaacgctcacatgcctctatgggtttacgaaaagatgtcacttctcatcataaaagccgttcctcactcatcttctacaactcctccatgatctcatattccacttccccactggcgtactatcgcacctgcccccgtttccagcttccagaaactttaacccgaccccatctcatggatcatggactcgtactcacccgattccttgtgcagctttttcaaccttgtctttact

SEQ ID NO: 10967 - DNA, 369 bp, Glycine max
  Clone ID: jC-gmle01810050f03d1
ggccgccctttttttttttttttaatatgaatgctttttcttatattaactcattttacatcaatgtgaacaaaggaaaaaaagaagggcataaccaaaaatatagttgcctaggcctgatgccaagttgccaacagaaacgtcagaaaagcttctgtagatgttaagatccaagtgtaataaattccaaactaacgaaattcactaaaagtggtggacctgctgcctatggacttttccttcactgttatctggaaaccagtgactaactttaggatttcaaatcagtaacacattctatttgtagatccactcgttggaacgagcacccgactcatccatatctataaaaatgcttactgactttcc

SEQ ID NO: 10968 - DNA, 491 bp, Glycine max
  Clone ID: jC-gmle01810050f04d1
aattgcaacatctgatcctctccattttccatggtacacagtcccaaatgtaccagaacccagctctcgcaactcttcaagatcttcattctttatgaactgcacagtactggagtcaaattcccctgctacaaccacattcctcggttcattcttgtcatcctggtattcagactcctgtggtcgtatgcttatccattatggcatacatgttcttattttcattgccctttagttgggaatgctcatattcttggtgaaagatacttgcttctggtttagttgctacaggtacatttctctgattttctttaccaatatttaggtgggaatctgtgcgttctggcaaaacaccaccagctggttgaggagcagatggctgagatttactatccccgtcatgtacttttttcacagcagacgtatgaccaatatttttctgatcaattagaaaatcattatcaaacgcctctatagccatgctctgaaat

SEQ ID NO: 10969 - DNA, 334 bp, Glycine max
  Clone ID: jC-gmle01810050f05a1
ctgaagcagaagctggcattgaaattagagatttctaaaccatttcaaattcagatcatgatctggaggtctgtttggtatgagctaaatgatttatcaaatgttgtgttaatatggtcttaaatgataccataatgcctcctgtatttctattaacgatatgcaaagagggttgcaagttgtaaacaagggtgatgtatcaaccatgtagtttgttaaattttcagcgcgttacaatgtagattgatacctctaaaaagaattcttttagatgattaacaaacataataaaagcagaatttcagtacttatggacaaaaaatatatatatggg

SEQ ID NO: 10970 - DNA, 492 bp, Glycine max
  Clone ID: jC-gmle01810050f05d1
gccggcggcgtcgccatgccgccgacgctggcgaccgaggcgctcgacacggacgccggcagcgtggccgcgtggctgagcggcgaggcgagcggcgaagtgcgtggcgagacgcgcggcgaagaggaggcggcggcggcggcggcggcgtcgagcgaggcgcgcgcagagagctccaaggcctcgagcggcggcagcctaggactggcgagcgccgcggcggcactgctgcgcgctggggcagtgaggggcgcagacagcggcgaggcggagccggcgggctcgacgatcagtggagcgtcgtgcagcgtgctgttgttgcacacctgcggactctgctcggcagactcgaagccggacacgccatggctcgtcgagctcgacaccgtcgattcgcgtctctgctcgccgagcgcgcgcggcggcgcgttcgcacagctggagacgcatcggcgctgctgctgggcgcgtcttgcggctgcgcaagcgcct

SEQ ID NO: 10971 - DNA, 324 bp, Glycine max
  Clone ID: jC-gmle01810050f06a1
gtgagatgcaaccccaccaccccatcaggcctcacaatcagagctggttcctatgctgatgagctcgtttagaccgctaaaacagtggcttcaccagggaggggtattttggccatggatgagtccaatgctacctgtgggaagcgtttggcttcaattgggctagagaacactgaagctaaccgccaggcgtaccgtaccctccttgtgacagttccaggacttggtcagtacatctctggtgccattctctttgaggaaactctctaccaatccacaactgatggcaggaagattgttgacgtgctcctcgagcaaaacatt

SEQ ID NO: 10972 - DNA, 321 bp, Glycine max
  unsure at all n locations
  Clone ID: jC-gmle01810050f07a1
gaatactctncataatcgtcatgcacacctcttaactctcaaaatacgactcgagcttcaccaccaaactcctacctttaactgccacacatctatctctctccaccctccaactgcaatggccgtccataccttattcgtgtactttttatctccctgtacaaaaccactactgccatctctcttctctcccactacccatattaactatatatctcactctccataacattcttcttacaacctctatcacacctattcgctctcccacaacccacatttttgcatcagcccctggcggaggaaccggaagaggacatg

SEQ ID NO: 10973 - DNA, 573 bp, Glycine max
  unsure at all n locations
  Clone ID: jC-gmle01810050f10a1
gtgacctgaagccaggagctgaagtaacaataactggacctgttgggaaagaaatgcttatgccaaaagatccaaatgccaccatcatcatgttgggaactggaaccgggattgccccatttcgctcatttttatggaaaatgttctttgagaagcacgaagattacaagttcaatggtttggcatggctcttcttgggtgtccctacaagcagctcattgctttacaaggaggagtttgagaagatgcaagagaaaagtcctgaaaacttcaggcttgacttcgctgtgagtcgagagcaaacaaacgagaaaggggagaagatgtacatccaaacccgaatggctcaatacgcagaagagctttgggaattactgaagaaggataacacttttgtgtacatgtgtggactaaaaggaatggaaaagggaattgatgacattatggtgtcattggctgccaaagatggcattgatgggactgagtacaagaggcaattgangaagcagagcaatggaatgtcgaagtctattaatntctgttcacttgcacaaatatcatcctctactttat

SEQ ID NO: 10974 - DNA, 192 bp, Glycine max
  Clone ID: jC-gmle01810050f11a1
gttatccgtagttgatactttgactttcccatgcacaatattgctcatgggaatgggaatcataacgtacagactttttttattttatccaagaattcttgtgtagttgcccctcacatagcaacggtatatggttaattgatcaatatattgcaacgagtttatgtttcagaagagtaaatgtgaaaataa

SEQ ID NO: 10975 - DNA, 417 bp, Glycine max
  Clone ID: jC-gmle01810050f12a1
gtgcagcaaaaactaatttctcttataattatttatacagaaacttttcctatgagaacttgtaatagagttgaaacaaacagttacaacttaaaaggactagaatttcactccggaactcctgagattgcagatgatgatgactttgagtagcgttcaagcaatgatagtaccttggcagcttttctcctaaggtgtccatccccatatatattcatgccagtgagaccaattaaacgtgatctagctgttgttccatagtattctaccatttcctttgacacaaacaccttcttcaacagtcctagagcttctgcctttagagaatcagttccccagttcaaaatgtccattatggaccttattggattatattcatgcaagacacgagctcccctttgaggaaaatctttcaaa

SEQ ID NO: 10976 - DNA, 480 bp, Glycine max
  Clone ID: jC-gmle01810050g01d1
ctcattccttcatttttaaacctagctccatctccctccactcaccataacatggcatcagaagcaaatgctgccaacaccaacttctgtgtaaatgttagcaacaatggctacattagtgctaatgaccccttgaactggggtgcggcggcggaggctatggctgggagccacctcgacgaggtcaagcgcatgctagaggagtaccggaggcccgtcgtcaagctcggtggagagaccctgaccatctcgcaggtcgcggcgatcgcggcccacgaccagggggtgaaggtggagctggcggagtcctccagggccggtgttaaggccagcagtgactgggtgatggagagcatgaacaagggcactgacagctacggcgtcaccaccgggttcggtgctacctcccaccggagaaaccaacagggccgtgccttgcataaagagctaatagggtttttgatgctggatatttgcaat

SEQ ID NO: 10977 - DNA, 249 bp, Glycine max
  Clone ID: jC-gmle01810050g03a1
caatgtcagatgacatgctcattcatttctcaatcaactcttccaaccaattatatcagtcattgcctacaaagattgctaagttggaagcttgattggttggtaagggttcctccaccgctgctcagcaattatgtttgtcctttgctttttgttctattgctgggaaatttggcggagctgctgaatatacgtcatgatccttccatttccatttattctgatgatgattatggtgggaaattctta

SEQ ID NO: 10978 - DNA, 553 bp, Glycine max
  Clone ID: jC-gmle01810050g03d1
ggccgccctttgtttttttttttacaaccacatgaataccacatatatcttttctttttcatttgtttttgcattgtaagaagtattaacagccaacacaaaattatatttgaaaattcagagagagagagagagagagagagaatgagagagcttgatcagctcagtcctaacacaaatgtacactacagcacgtacgtaacagaacagaacagaacagggttctatgttctacgttttatccttaattagtaagagcactccattctatgcactcggtccctcagaatcccgttatacaaagccattctgtttgctggcaatggcattccaccactttgtcttctgcagttgcttctttgctcattcctttctcttccatccttcacactatctgcaaatttcactttcttctttttcttcttctttctctcgcttttcttttcctctgaatacaagcaagagcgcaaggtgggtttgttagagtggtgaaattgaaatgaatgcctcgagaaagaacttaaagcacggtggtggagagacgcatggcagt

SEQ ID NO: 10979 - DNA, 327 bp, Glycine max
  Clone ID: jC-gmle01810050g04a1
ggaatctgtgaatgttttccttggaaacctgctaacttacccatttgttagagatggcttggtgaacaaaacattgtcactgaaaggaggatactatgactttgttaaaggatcttttgagctctggggccttcagtttggccttgcattctttgacttcgtttgaacatcaaccattatcaatgacctcatcttggttccctaagtattctcctatctaaaatgtactctgtaattaattgctcttgtaataatgcatgcatgtgctgaattttctaataataaaagtggatatggagatttctccacatatcaccctctatttca

SEQ ID NO: 10980 - DNA, 499 bp, Glycine max
  Clone ID: jC-gmle01810050g04d1
tgtctccacacacagagatcaaccttattcaatgactggttttggttctttaacggaaaacctgttggtttgatctccaagaaatcttctatctcatgtaaatcaacaggagcaaataatactgaagagaaagaaagtattacaacttatgatgatagggcacataccaaagatgagaaaaatgatcacactcttgttgttcatggcttggctgatgcttgtagattcgtttgtaatgatgcaaagtttctctcacgtggcataatgaggttggatgctcgtgcacgtcaagatgttgcttttcttgggactgaatttctcaaacttgatgctcgggcaagagaggatactgagaaaattgaccgtgatgtcaaggaaaaagctagccgacttagtcatattgctactatattgaaggataaagctcagtccagattaaaaaatgctgctgatgagcattggagtgatggggccttagaggctgatttacgtcttgctg

SEQ ID NO: 10981 - DNA, 159 bp, Glycine max
  Clone ID: jC-gmle01810050g05a1
cttcaaaataaacaatactactcactccccacaaataaccttcacgccactccaatagaacacaatgagcgctgtttctttgctattctcctgctctatgcatgtgggtgtatctcattccaaggtggctgcaaaaccctcattcatgctgtaatgctc

SEQ ID NO: 10982 - DNA, 454 bp, Glycine max
  Clone ID: jC-gmle01810050g05d1
agttattccgatattcggacgcatcaacttggtatgaaatcacattgatagcctctactcgtgtcctagctcgtctaagagctagatttgcctcaattgtttgtctcttgccttccgccttattcaaattagcttctgctatttcaagagtttgctgtgcttcttgtggatcaatgtcactacccttttccgcatcatttactaaaacagtgatctcattattgtttattctagcataaccgcccatcagagccatcgatgaccattggtctttaagaagacgtattctcaaaatacctatatcttcggctgtggcaataggcgcatgatttggtaatacttcaatttgctcgctattagtagattaaatgatttccttcacttccgaattcccaacaattcgattgcgggtcagtacacaaagatttaaagtcatttcttcaaattgctctcc

SEQ ID NO: 10983 - DNA, 344 bp, Glycine max
  Clone ID: jC-gmle01810050g07a1
attcgttcggctcagtcaacataactataataattataactcctctctttctttctcaactctcacaacacaagaagatggcttctatctcacagggccttcttctcaccactgccatgcttctctccaccaccctgctttatgttgctttctccaggccttcatttcaaattcaccactctaacaaacccaccttgcgctcttgcttgtattcaggtaaattcctttcatttttctctctctagaaactagaaactgtttgctaaaacaattaattctacactattcaacgattaatttcttatccaaaattcattagattttgattattgttttcaaaataa

SEQ ID NO: 10984 - DNA, 303 bp, Glycine max
  Clone ID: jC-gmle01810050g08a1
gcttccgcccctaacacctctccctgtcctgagtggacctcattcctctcccacatctgctccgtcggctacctcccctccctccccgaccaagccttcaccgccgacgtcttacgtgtttgctactccttcctacgcgacgccaccgtctgcctcgccttcgcacgtgaccgtcctaaccttctcaggttgctttctacgagagacattgcggcgctggttgagcacggttccccctttctcttccgtgacgccgacgacttcgtcaggaagatgaagaccttgctcttcaacggtgacacc

SEQ ID NO: 10985 - DNA, 416 bp, Glycine max
  Clone ID: jC-gmle01810050g09a1
cattattaagaaaaggtaacgaagataaaatacgagcttgttttatagcaattgtcattaatcgttgatgttttaaggtcaatctatttacgcgtctggatcatatttttccttgctcactacataaatcgactaattaaacccatgtttttataatcaattcggtcccccgattggatcgggggcaaacgcctacgaaaagatcgcttggatttcataaagagtcgcttagatttttccatggtttatttatccctattccaaaaatcacatttattacaagatatactataaaggatttggttttttattctgacttttttaatatatgttgctatttttttaatatatgttgttatatactgatatttgtatatattcaactgtaaatgatagaatacagatcgatctatcta

SEQ ID NO: 10986 - DNA, 311 bp, Glycine max
  Clone ID: jC-gmle01810050g10a1
aaaggattcgcacagcacttgggagaggtaagaaaattgtttttcttactagagttgatccttttccagtagctttactggctgttctttttggcgttaagaatgaaattctgagttctaacgccactaaccctatgctgacgcgacttcttgagaactgtaagagtctcaaatatctggttgatgagtgtccttttgcatttgtgaactagtatgtaatattttattcacttaaataaagcgcattactatgtgcaatgaggtgtgttaaaatataaaataaacaaacaacttctaaaaaaattaaaaat

SEQ ID NO: 10987 - DNA, 406 bp, Glycine max
  Clone ID: jC-gmle01810050g11a1
agaatggcgaggggagtgaagcattgcacgtggagaaggagagcttggtgtacatggggggttacctgcccggagctctgccagcagaggacgcctttgttgacgccgcttcttgttaggagttgcgacctctgggtacttcatggaaggatgtctgcggcggtggttgtggattcgccatggctatctctgaacctggaaagctcataacatggggttcaacagatgatttaggccaaagctatgttacatctggcacacatggggaaactccagagcctttccctcttacaactgaagtgactattgttgaagctgcagctggatgggcacattgagttactgtgactgatcgtggagaagacaacacatggggatggagggaacgtgtaccctttgggaaggt

SEQ ID NO: 10988 - DNA, 446 bp, Glycine max
  unsure at all n locations
  Clone ID: jC-gmle01810050g12a1
gtctgcaaacttaataaataaatagcattaaaatttcatatggtacaacttcatgctgtctgataaggaaataaaaccaatacaataggccaaaactgcaagaattgccccacagacaaccctatattctcacgcaatatggtaagaaaaaacaattgaggaatagaacgagaagctcccacgccacaattccctaacctcctcttttggactcaatcgcactattaacactcataatatacacattctagagaaagttccctttccaatcacaattgactctgcattctcaaaactgatatagaacaccatgcaagaatgaatgatggaaaccatcttatggcanaaagaatgggtacaaatatagagaccaccaaactggaaaaaagctgttcccaaaagagcaagacaccaactgccaagccagatgctatgaagaaatgatg

SEQ ID NO: 10989 - DNA, 306 bp, Glycine max
  Clone ID: jC-gmle01810050h01a1
gttaaaagccttagccttccctacaactccaaacacaacgacatcatcatccatggctgcctccgtttccactgtcggagctgtcaactgagctcttttgaacctaaatggatctggagctgtatcttcagctctcagttcatatcttctctgggaccagcttgaacaatgatattgcctctagggtccccaacagtaaggttatctgtggaagcttcaagattgttgctgtataagagatgatcgagattgaagagacccattataccgacaaggactcatggaagggtcttgtctatgatatct

SEQ ID NO: 10990 - DNA, 489 bp, Glycine max
  Clone ID: jC-gmle01810050h01d1
ctagctaagtgtctttcaaacctatcttgtgcggccaatatcgcttgtcttcaaacttgcaacaatagacctgatgaaaccgaatgccaaattaagtgtggggacctgttcgaaaatagtgtggttgatgaattcaatgagtgtgcagtctcacggaagaaatgtgtacctaagaagtctgatgtgggagaatttcctgctccaaatcctgatgtccttgttaatagctttaacattgctgatttcagtggcaagtggttcatcactagtggcttgaatcctaccttcgatacctttgactgccaattacatgaatttcacacagaatccaacaaacttgtgggtaatttgtcatggagaatacggactccagatgctggatttattactaggtctgctgagcagagatttgtacaagatcctttctatcctgggatcctttacatcatgacaatgagtaccttcactatcaagatgactggtatattt

SEQ ID NO: 10991 - DNA, 458 bp, Glycine max
  unsure at all n locations
  Clone ID: jC-gmle01810050h02d1
agtaaaacaccttctattatttgaagccacaaagttcagcagaaccacaatgaacaccaggaaatattaattgattatctcaagtgttttttttagtagtgagacaatgtaactcaaaattataaaggataacaatccaatatgaacaagataaattatttgattatatcaagtcatagcttctcttcaagtggagaatgcttaggttctcagggtgtgtataagcaggttccatcatcacttcttgcagttgggtcgaagtttgaggcatttggatcagtacaaccttcaggaacgggaatttttacttgctgggctgctttgccatagaaagttcctcttttgatggcatcctgattagcatcaccaagagcagcctcgttcaagtacttgtctgccagttgtactctcttcacattctcttgttcttggacagcatngtaccatacttccagagc

SEQ ID NO: 10992 - DNA, 329 bp, Glycine max
  Clone ID: jC-gmle01810050h03a1
gaccactgttactttcccttctttactcaaaactgtctcttgcagttccccacaacatgaacagcaacaatcttcaaggaagaagaatgtgaacaagttagcataagttggcaatagttgcacttgctgttggcgtgttaacacttgggtcattatatgatgcatcagcctgcaagactggtggtagaatcgggggccaggtctttaaagtcagagcttcgcgcttctcaccaagaatcaacaatttcagaaccaatatctatattaatttctagagtggcaccttcgctagttggtggctatggttatggttatggtgtgccatttta

SEQ ID NO: 10993 - DNA, 385 bp, Glycine max
  Clone ID: jC-gmle01810050h03d1
aggcgttggccgcccttttttttttttttttaaggtaaatttgtcacatttattcattatcatatatgcattacctagtatcagctggtttattcttaattaagagaaaactaaaatacaatatcttacatgctatttttgtcgatcttgaattagaataatttcaccttgataactttcaaaatcctttaatgcaaattaccgaaataaaactctagttctagtacaaacaacacctagctataataattaggggttgataccatagagctttcgaatcccgtctatatcatcttgcgctagattcaccttcctagttcgaggtggtatagaaggatacatgatggctcttaggtccgaccagtggcctaattcgagcaagtgc

SEQ ID NO: 10994 - DNA, 480 bp, Glycine max
  Clone ID: jC-gmle01810050h04d1
ggccgcccgttgtctttttttttttttttttttatttttttctaatctttgaaatgatgcattttcccactcaacaccatgaccatggccaaacccagcgactcctcgactattcatcttacctaaacctgcatccctctcaccccgaacttcacttcttccgccagatttaagcggagaagtcagaaacgtgagcgccaatgaacttcttcatttactcctcaatctcctttggcaagacaccgtcggtgagcttctcgaggaaggcctaatgggtagatttcaattgctcggtgaatgacctctcccaagcgccaatcttgtcaacagggacattgtcaagcataccgttaacaccagcttctatcaaaggggccataacctcggttggcataaggttgtactggggctgtttgagaacttggtctacctagaacctcggttcaagaggtatcgaagtgaagcgttcaagtcggaacc

SEQ ID NO: 10995 - DNA, 345 bp, Glycine max
  Clone ID: jC-gmle01810050h05a1
aaaaaactaaaaataacatcaaccgatggggtcatttctcccaatccgtttctgtatctgtcttccaggaacactgtcagtgagtgaaggatacgatgaacatcatgtctacccaccagtgtagttggcctgtgagaattcaggatcatcctgactaaggatgtattaatagggctccatttttcagaggatcagactttcttaatgttggataccatactcaaaaatatggtcatagtgccagaaaatgtaggcccgttttttccagttcagtgtgcatcagtacggatccttcagattcagataacactgataagaaaaaacctcagaatggtgaaatgggag

SEQ ID NO: 10996 - DNA, 315 bp, Glycine max
  Clone ID: jC-gmle01810050h06a1
gacaattcaggtttgaatatgaccaagcctgaaagaggaagtactatatctttgccaccgaagcttactcaaataaaggagaaaccagttgattctggcactccgaatgatcaatctgatgatggaaagaatgttgataatcaaagtattagcaagatgaagcatgctcacattgagaaaaggcctactagggtgcctagacctactcctaagccatctggtggtggtgctgctgctgctgttaccacatatgcaaattctttcaacgaagtaccatctgcttcaccaccaccttcttcttctccaggtgcttca

SEQ ID NO: 10997 - DNA, 342 bp, Glycine max
  Clone ID: jC-gmle01810050h07a1
ggacaagcatccagtcagttgcaggtacaaatttcagctatgccagaaacgctggtgaaaagaaagggtgataatttcattcatacaggcaatgacccaggaaaagttttccccttggaagcaccatatcctattcctttgcagccatttgagggcaatttgcatgctaatatatcagatgcttcagctacagctgctatatcagaagggcttcatcctgcattaccatcaaagaacaagggtaagcaccagcagtctgaagatgcctcttcattaattagtagtatgaatcccacacagactcccaagtctgttgaagatgacttctttactacagtcact

SEQ ID NO: 10998 - DNA, 344 bp, Glycine max
  Clone ID: jC-gmle01810050h08a1
cattacacaagaactcttcaaggatccttcttcccacgaaattcatttggtgggaaaatccaagaagagggtggaatttcaagccagggaagatggattatttcaatgctccaggaagaaaccatctctttgttccggggccggttaacatcccggaccagatctttcgagccatgaacagaaacaatgaggactaccgttctccagcaattccagctatgaccaaaacactgcttgaggatgtcaagaagattttcaagaccataactggaatcccatttctcatccctaccactgtgactggtgcttgggagagtgctctcacaaacacactgtctcctggg

SEQ ID NO: 10999 - DNA, 498 bp, Glycine max
  Clone ID: jC-gmle01810050h11a1
cagaaccgagcttgcagcagcgatttctcatttcatttttcacacttcaacaatggcgaaaaccttcaaatacatcatcctcggtggaggagtttccgctggttatgcggcgagggagtttgccaaacagggcgttaagccaggggagttggctatcatttcgaaagaagcggtagcaccttatgaacgtcctgctctgagcaaggcttacctttttccagagtcccctgctagacttcctgggttccatgtctgtgttggaagtggaggagaaaggttgcttcctgagtggtacacagagaaagggatagagttaattcttagcacagaaatagttaaggtagaccttgctgcaaaatctctgatcagtgctggaggagaaacattcagttattagattttgattgttgcaactggttcaaacagtattaggctgacagatttcggtgtataaggagctgatgccaacaacatcttttatttgagggaggttgacta

SEQ ID NO: 11000 - DNA, 399 bp, Glycine max
  Clone ID: jC-gmle01810050h12a1
acaaccacaagaataccacatatatcttttctttttcatttttttttgcattgtaagaagtattaacagccaacacaaaattatatttgaaaattcagagagagagagagagagagagagaatgagagagcttgatcagctcagtcctaacacaaatgtacactacagcacgtacgtaacagaacagaacagaacagggttctatgttctacgttttatccttaattagtaagagcactccattctatgcactcggtccctcagaatcccgttatacaaagccattctgtttgctggcaatggcattccaccactttgtcttctgcagttgcttctttgctcattcctttctattgcatcctttacactatctgcaaatttcactttcttctttttctt

SEQ ID NO: 11001 - DNA, 456 bp, Glycine max
  Clone ID: jC-gmle01810051a04a1
ctctttcttcttttttagctatccctctcttgaaaaatctagatctcgttcttccgtgatctacgttacgcttttagtgaccggatctgtatggatctgaaccagatctacacgccgatggtggttttggcctggtctttcatagatctgatgcatggaggctcagatctactgtacagagatactgtagataatcgatgagaagaacgcagatccagccgcttgcgcttgttctatcgctacagacgcttgtatcggattattcatgatagattcataagcagcatgtcttcctccggctatagttgatgcagatctcggatgttgtaaaattagcgtatgatgtgaagctatgggctggaaaatgtggatgtatgagatttcgggacgaaaggcctcaaaacgcttagtctttgtggttactgagtcctgagtgatcttgtcatccgaactttg

SEQ ID NO: 11002 - DNA, 465 bp, Glycine max
  Clone ID: jC-gmle01810051a04d1
ttttttttttttttttttttttttttttttttttttttttgtttttttttttttttgtttttttttgttttttttttttttttttttgttttttttttgtgttttttttagttgtgtgtcaaaagaacaaataattgtgaaggaaaacaatcccctatgaaaaagataaattttttgaggaaaagggccaaaatttttccccccgtggaaaaggcggagggaaaaaaggagagaataagccggaaacaccatcactttttgcaaaaagggcgtggcccgaagcatggggatcggcccccccaaaaggagcgggggtttccacttggtgggcccgtttgcccccgggagatcccccggggaagggaccctgttgggcataaacaagagggggccccaaaaagggcttgtctgccaggggaacttggggcacaaacgcggggaaaaggacgagcctgttttcggggg

SEQ ID NO: 11003 - DNA, 565 bp, Glycine max
  Clone ID: jC-gmle01810051a05a1
ctcgagccgcttttagcaaaggctattgcaggtgaagcaggtgtcccatttttctgaatctcaggttctgagtttgtagagatgtttgttggtgttggtgcttctcgagtccgtgatttattcaggaaggccaaagagaatgctccatgcattgtttttgttgatgaaattgatgctgttggaaggcaaagaggtactggaattggtggagggaatgatgaaagagaacagaccctcaatcaacttttgacagaaatggatggatttgagggtaataccggtatcattgtcattgcagctactaacagagttgacattcttgattctgcattgttaaggccaggacgatttgatagacaggtaacggttgatgttccagatatacggggaaggactgaaattttaaaggttcatggtagcaataaaaagtttgaagctgatgtttcacttgaggtaattgctatgagaacacctggttttagtggagcagatctggcatacctgctgaatgaagctgtatattagcttggtcggctggaaagacagcaattttttcccagagatc

SEQ ID NO: 11004 - DNA, 291 bp, Glycine max
  Clone ID: jC-gmle01810051a05d1
agtactagcaacaatgggaaaactaacatcgatatcaggctacagagacccacaagggtggaggccgcgaaaaaggccatgaaaaaaggctcacagatagacaacctaccctaaacggatatgagggtggacagacaacaagacaaaggaagagagtgcaggaaaacagatgcaatgaaaccaaacacttgaaccagaatacaaagcagaaaggccagatcgggcacccattaaactagctgagaacgaccgcgagatcattcgcaggacaggcttgcggccaggaaacct

SEQ ID NO: 11005 - DNA, 511 bp, Glycine max
  Clone ID: jC-gmle01810051a06a1
gtctcggccacgtcattgacaaactgttagtgagctttggcctagagatccttaaggttgtgccgggctacgtgtcgaccgaggtcgacgctcgtctgagttttgacacagcagccacgatcgcacgcgctcatcgcattatcgatctgtacgagaaggctggcatcaagaaagatcgcgtcctcattaagattgccagcacatgggagggcattcaggcttgcaagcacctgcataaggagggcatatcgtgcaacatgacgctacttttcggctttgccacaggccgcgggctgtgccgaggccggtggcactctgatctcgccctttgtgggccgtatcctggactggctcaaggccaaaactggcaagtcaagctacgaatctcacgaggatcctggtgtagtatccgcgaccaagatttaccagtgttacaaaagatacgactacaagaccattgtcatgggtgccagctgccgtaacactggtgagatcactgaacttgctggct

SEQ ID NO: 11006 - DNA, 311 bp, Glycine max
  Clone ID: jC-gmle01810051a06d1
gcctatgatgtattttaataatttgtgggtagttgcttatttttttttttttggttgtggttcaggagataaaaattgagctttatgtgggcgcacagtggatcaaaccatccattatccaagtcggccaacttagtgtccaatatctagcttaaaactgggatgccgagcttaggaacttgcaaaatttttttgcacgagcgctgcgctttacctttgggatatgattaagcttggcgtttgaggcgcttaagccaacgattccctaatcgagctctgatggggccaaggcatcctgtttcatgcctaaa

SEQ ID NO: 11007 - DNA, 344 bp, Glycine max
  Clone ID: jC-gmle01810051a07d1
cattcgaattcattttatttatatattaatatgatatgcaaatgaaataaaaagatattaaaagatactaattataagaatgtgaaagtgaaattatcaagttattaaacgattaatgaatttgtatctaccggatcctgtagtaaaaagagttacatctgatcgtgagtagcttgcttcaaaaggacttcgggttccccagtgaatgccttggaagaagatatgattatctttgaattgacgattattcgcgtataagtaagcgcgttactcaccaagaaattgccttacctgcccaattgctaatgaatcaagataaccattgcgtccactataaatagtta

SEQ ID NO: 11008 - DNA, 482 bp, Glycine max
  Clone ID: jC-gmle01810051a08a1
cagctgtgttgactacaatatcagaggaattgccagatgttcccctctgtttgagtctgcacaacctctgtgcaaccctcaaatgcacttctccatcagcaattattttccgttctgcagtgatcaatgcaggctatcgtatatctggaactcatgttaatccattgggacttaaatcagatgcacccatggatgttatttgggatataatgcgctgctgggtaaaaaatcatcctgtgaagcctcaaccagcagatcaaccaggaagcatcatacttgcaaaggaacctgttcttcaggctaattttgctcgagctgtagcatctcttagcaaggcacaagctaagaaggttgcgcgctctctttcacatgctgaaagacactgaggtccaaaacttatggcatgacgtcaaattacaagcaagcatgtctctcttttgagtcctgaaacaattactggagctcttaatcaggaagacgat

SEQ ID NO: 11009 - DNA, 500 bp, Glycine max
  Clone ID: jC-gmle01810051a08d1
attgtctgactttttgctcagaaattggaacttcgattataagaaacaccaaatacaaagtcaccgaaaataaatattattccacacgatacaatttccataatcccaaaaaataaaatgccagattctgatatctaatttgatgcaaagtgccttaatcttccctcagcaatttgcctagttgttaattgagaaacaagcacattttctacttttactcgccactctgcaaaatttagtgaagacaaatggattctttagtaaccacaagcatggaattccatgacctctagattgatgaaaattaatttcaaaacctcatttgtgaactaagaagtgacactatcttcggtctttggcttcttacttttaggttcttcatcgtcttcctgattgagagctccattaattgcttcaggacccaaaagagagacatgcttgcttgtaatttgacgtcctgccctaagttttggaccccagtgtctttcaggatttggaag

SEQ ID NO: 11010 - DNA, 443 bp, Glycine max
  Clone ID: jC-gmle01810051a09a1
ctcctgtatcaacctcatctttatcgtactactacttcccacgttctgctcctttggggatcgtgttcacaaaagatggctgacaatgaggatggaatggataagactactcgtgggaatgaatgggaggttgtatttctgacagcatcgatatatgcagctgctcctggttctgatgaagttgatatgaaggatgatgggaacaaagatgtatatggacaagatgaaggagaaacttcacatgctttattaatgtctcgtaactttgtctttccttccagtcagcatgaaaacatgtctgtggaacctgactatggtgtgatctatgatgattctggagacaaagatgttgtctttgaagagactcctgaagaattgaccattccaagtggaaaggatgaacaaaacttttcattaccaggattggaaatttcagatgagtt

SEQ ID NO: 11011 - DNA, 402 bp, Glycine max
  Clone ID: jC-gmle01810051a09d1
aaatgaaagtgtaaaattaatatttgaaccatcatattagcgacagtttatatgtcaaagtaaatgcaaagcatagatcatctcctgtacttttctgagaaactaaaagtgatttgaaagtaaaggtaattagcatgtatctctgcttaggtgtgctatatacagaagtaatggatcagacatcagagaaaaccactagtcacttggaatacgatatttgaaagagacttgcatgctccagcttcaccagtgcttcagttcaaaagcctacatttgtacatgctatatacatttcttgttcagctttctttggttcacattttaagaaaaccagcacctgaaagtattacctaagcatggaaaataggagacattgatgcttgccacagaagaaatgtcaat

SEQ ID NO: 11012 - DNA, 336 bp, Glycine max
  Clone ID: jC-gmle01810051a10a1
cggctcgagcggctcgagcgaataggggtgtgtcttgattggctagtgattatagtatttaatatgttactattattactactattaataaatttaacttttgttgcaaacaaaaatgttgggtttatttatttatccagctggaaattgatgatagctggggccttatgcttggttggtgttggtctgtttgttccctgtgagaaatgttgcaaaggggaaagaaattttaaatggttgggctcatgtgtttcttcttcccagtgtacagcgttctaatcattgatgaatattatttttcttagaccgaaaaaaatataatagtaataaataaaa

SEQ ID NO: 11013 - DNA, 309 bp, Glycine max
  Clone ID: jC-gmle01810051a10d1
cggtctaagaaaaataatattcatcaatgattagaacgctgtacactgggaagaagaaacacatgagcccaaccatttaaaatttctttcccctttgcaacatttctcccagggaacaaacagaccaacaccaaccaagcataaggccccagctatcatcaatttccagctggataaataaataaacccaacatttttgtttgcaacaaaagttaaatttattaatagtagtaataatagtaacatattaaatactataatcactagccaatcaagacacacccctcttcgctcgagccgctcgagccg

SEQ ID NO: 11014 - DNA, 355 bp, Glycine max
  Clone ID: jC-gmle01810051a11a1
atttttgcaagtaaatacttgctaccagagctgactagtatatggaaaaggatctgtagtgagatgacttttgcatcagcttggattcaccttttggtaatggatctctttgctgcaaggcatgattttcttgaaggattagagaatcagattgagacttttcatttcagcttttctgtgcttgttcttttgccctataggggttcttagtcatgccatcaccaaagaaatgactaaaagtgccagataaaacaagcacagcttatagagggcacctacttgctttcccacatatccaataaagaaatttaattgaagtttaagagtctcagaaatccatgttcaagttcttaaa

SEQ ID NO: 11015 - DNA, 491 bp, Glycine max
  Clone ID: jC-gmle01810051a11d1
agaataataaaaataattagaagcatgaatttcacttaatagtaatttaactagaatacttatcaattgagacccaaaaaaatagaaacacttttagccaaattgctaagctaaaacaaacacgaactctaacactcgggggccctattccaactagtggcgccccaacaaattacactaccccactccaaatcaacatataagaaaaagaaccattattctatccctttgaatgtggctcatcgtgcactccaaattcaaattcccacgtgcacattcacgtacccaatggacacacatgcattttcacagccttcacgaatcacaacaacatcaagagaactcaagtgaaggcttttgacgaaaccaatgaataatcgtggccacttgctcagcctcatgtttgtcgtgtattgtaggatttgcagttcggacacttttgagccacaaaatggaactgaacgtgagaagtttaccacaatcgttgacag

SEQ ID NO: 11016 - DNA, 515 bp, Glycine max
  Clone ID: jC-gmle01810051a12a1
tgaagtgctctgtgaagttgaaactgataaagccactgttgaaatggaatgtatggaggaaggttatctggccaagataatccgcggggatggggcaaaagaaattaaagttggtgaggtaattgctgtaactgttgaagatgagggagatattgtaaagctcaaagattatcaaccttcagcatctgaaccaagtgcagcccctgccaaagaaatatctgacccacctacaccaaagaaagaatatgaggtataggaacctggccgagaacctgagccaaaggcttctaaacccagtgcaccaccctcatatggagatcgcacatttgctagccctcttgctagaaaattgggcgaagagaaaaatgttcctctctctagcattaaaggaacaggacctgaagggctcattgtgaaggccgtcattgatgattacttggcttttggtgctaaagaagttcagcatcctccaaggccatgttgcaacagatgcagcattggattatactgacatt

SEQ ID NO: 11017 - DNA, 439 bp, Glycine max
  Clone ID: jC-gmle01810051a12d1
cagtgattaaatacttcaatcaaaaattggtcagggatacaataacaaaacccaaatgggccatatagaaataccaaggtgaacaaaatctcatcccctgcctacaacgtcttgaaaggaatttagtacgtcatgggagccttcaatttattcttacaacaacatggtctctggattttcaatatagcctttgaatgcttttaaccattcggcaccaattgcaccatctataacacgatgatcacagctgagggtcacagacatgaaggaagcaaacttgaactcttcagcacctgaacccggaacgaccctcctctcagaagatccaacggcaagaatgccagcctgaggaggattgatgattgcacagaattgtctgacaccaaatggccctcccaggttagacactgtaaatgtaccttccttcatattctggggg

SEQ ID NO: 11018 - DNA, 331 bp, Glycine max
  Clone ID: jC-gmle01810051b01d1
gattgccgaaattcaaccatgttatattgagacaatcaatcaagtacacaactcacagcaaaaaggtttataagctgtaaaggtacatgtaaccataaacaaaaatagtctccaagactataaaaacattacattttagacaaattagtcttcttccacttcatcctccgtcaacacctactacaactgctggtgttgctgctgcctaacatgtatcatattcactacaaacatcttagtaggagtagcctttgacgaacaactccttcttggcttcctcagattcaccctcaccggtgtactttccaagctgggcaaaccaattggactt

SEQ ID NO: 11019 - DNA, 496 bp, Glycine max
  Clone ID: jC-gmle01810051b02d1
gagagaacatttttttttgtttcatcatataaaatatatatgttctgaaagaacacatacaagtacacaaaaaaaagggggaaattcataaaaaaatacagaaaaaaaaaaacagaattgagtaagagggaaggaaacatagagaaaattttagcaatcagataataagaagccagtagtagtgcaaaagtcccttgccaagagtgttggaaccccttttagttaagcaggtaccttctcccccttgagtggcttcaccacttcccatgtgaagtcagggtcatctctgccaaagtgtccatatgcagcagtcttcaagaacctgccatttccacccctcttgagatcaaggttgatggagatcatgccaggcctgaagtcaaaactctccttcacaatgctgaggatttccttgtcagggatcttcccagtgccataagtgtcaacaaacacagacaagggctcaggcacaccaatggcataggaaacttgcaca

SEQ ID NO: 11020 - DNA, 368 bp, Glycine max
  Clone ID: jC-gmle01810051b03d1
cctaacaaaagcataaattaaactatattacaagttttattttgcaatattcggatgagtccgtataggatacaaatattcacggacatcttaattcataaggcattacaataattaataaataccccaaagcataacaagttaaaaaagaaaaagagcattggaacctatggagattggagtttcaataagaaaaacatccgcctccttctggattctgaaacccaatgttctcaacggcaccaaccgtcttgaacattctcctcttgtgaatctcctccatcagtgatcgttgcagttgttgtctcctcaggtccacgaaggaacggatcctggttagcctgtgcattccatgacacctgtgagaa

SEQ ID NO: 11021 - DNA, 279 bp, Glycine max
  Clone ID: jC-gmle01810051b04a1
agttgacagtgtgttctcgcaccttgcatggatccaaactgattgaaagtcatgtgggcttggtgacttgaattatcctttgatttctgatgtcaccaaatccatatcgaaatcttatggtgttctcattcctgatcagggaattgctttgcgaggtttgatcattattgacaaggaatgggttattcaccagtctaccattaacaacttggcaattatcagaacttgtgtcgagacatagagaactctgcaggccttacagtatgtgcaggacatccc

SEQ ID NO: 11022 - DNA, 476 bp, Glycine max
  Clone ID: jC-gmle01810051b04d1
gaacacgaaacagagatcataatcaaaataaattgcaaattaatacatagtacacttcaaaatccagcatgcatttattagtatattcccataccctgcggctcaaaatttaaggacttacaaaacattaagaaacaagacccttttgcaattcacactgactgatacagatgcagatagccactcttaactatctagtatcctagctacaccgctgcaaagtagtctttgctaagtttagggtctggtttcatggacttctccccaggcttccacccagcagggcaaacttcatctgggttctcctgcacatactgtaaggcctggagagttctctttgtctcgtcaacacttctaccaattgccaagttgttaatggtagaatgctgaataaccccttccttgtcaataatgaacaaacctctcaatgcaattccctgatcaggaatgagaacaccataagatttcgatatgga

SEQ ID NO: 11023 - DNA, 468 bp, Glycine max
  Clone ID: jC-gmle01810051b05a1
cggctccattctgtgactctgtaaattgtagtgtggcggaatagaatcaaaccaaacacggaataaatccatacactcggttgtctctagtgactgcaaacttgtgttgagttgagtcttgagcttatattcccgatagcagttctctcgaattgtttgcttgcgcggggataagaaaacaatatcaggaaatcaaaatgggcgcacagaaaaaaagcggtgctagggtttcagaggaccccgacgaactggttcgggttccgttgcaggccgttctcttggccgatagtttcaccaccaagttcagacctatcacgctcgaacgccccaaagtgctgctgccgctcgtgaatgttccgatgataaattacacgctcacttggctcgaatccgctggcgtcgaagaggttttcgttttctgctgttctcattcaaagcaagtcattagctacctcgagaaatctgagt

SEQ ID NO: 11024 - DNA, 495 bp, Glycine max
  Clone ID: jC-gmle01810051b05d1
aagaaactcgagggatacgttcttttagcgttttcaaattttccttaactaattcccccacatcatatgcacaaatacatgtcaaaataactacctatttgaattacagggtagatgaatgcactgaagccccttttaagctttggctgagatgaagcaccttaaaaaaatcctttctattcctcgtcatcatcgtcttcttcaggtgcctcttttagccattgaattaacttttgggcctgcttaacaaaaactttatctgcctcgtcagcatcttttaactcggcttcccaactcaaaatagcatcttcttctacaacatcttcattgtacaagtagtgcaaaatccttgtgaacaatggagcaaattccttagcagattcctcacatatttcttcaaatttaagtattacttcgatctgctcatctatgtcagtcagataggatgtaagagcctttttccattttgtaaatacagccttgaacatttgaagc

SEQ ID NO: 11025 - DNA, 521 bp, Glycine max
  unsure at all n locations
  Clone ID: jC-gmle01810051b06a1
gttgaagtcttgcccttctctcttcaactccaaacacaagacatcatcatccatggctgcctccgtctccactgtcggagctgtcaacagagctcttttgaacctgaatgggtctggacctggggtttcagctcccagttcatccttctttgggagcagcttgaagaaggttattggctcaagggtccccaacacaaagatttcctctggaagcttcaagattgttgctgtagaagagaagaaagagattgaagagacccagcagaccgacaaggacagatggaagggtcttgcctatgatatctcagacgaccaacaggacatcacaagaggaaagggtttggttgactcccttttccaagctccacaggatgctggaactcactatgctgtcatgagctcctacgagtaccttagcactggacttcgccagtacttggacaacaacatggatggattttacattgctccagctnttatggacaaactngttgttcacattaccaaagaacttcatgacc

SEQ ID NO: 11026 - DNA, 362 bp, Glycine max
  Clone ID: jC-gmle01810051b06d1
aggacaaaaggaaaagggcccaaatttaatttaaggggccccttttacccaaaaatttaagggaagacatcccaattttaaaaatattgtaaaaacttttcaaacttgggatattctttttgcacctaaaacattgggaattctaaaaatgttccccccaggtccctgaaaaaatttcagcccttggatcaacccaacctttaggaaccaaaatttttactttccaaagatgctttgcccccaaatcaaaattggaaaaaaaatccccggtaaaaagcctccccggtagcattttcaaaggcgacctcttcaaaagccttggaagccaattgggcctttttgaaattctttgggttttggac

SEQ ID NO: 11027 - DNA, 545 bp, Glycine max
  Clone ID: jC-gmle01810051b07a1
ctttctctctctcttttcctctcacactcttcccatctattccctcatggtttcttctctcttgcttcccaataaaaattacccacttctaatcagacaaaaagtagagtggttataagtccatttgtttcttcagtttccacacaactttcaccagaagaaactaacaccttccgttactggctttgtctgtgtccttggcaaccctttgctgattttcactgccacaatcacaaccaattgaagaagaagtttctgggttatggttcacgggtgccgtatagttatataatctgagctgggccccattccatacgcaacttttcctccttcattctcctttattttttattgtcttaagaagtgatggacatggaagaaatttcagagttgaatttggatggtttttcttcttctcacgaggttttggaatcagaacagaagaacatgggtacccagagaatcttggtttcagatcacacaaacggatatcagtattctgctgaggaagctgatagctctgtgattgatatggatttcttctc

SEQ ID NO: 11028 - DNA, 381 bp, Glycine max
  Clone ID: jC-gmle01810051b07d1
cggggctcgtggacggccggaataatatccggcgggacgacgagctcagtacggcggcggccgcccttttttttttttttttttttttttttttttttgtttttttttttttttttttgtggtttttttttttttttttttaaaaagggcaagaaacgtaactttttgaaccctcaaattcggtatgcccttaaagggccctcctaatgaactccagggcccttttttacatgggagctttttgccgtgggtaacttggggggtcgctctcatttaaaagaaatattttttaccgtctaagggaagggattatgtgatcgacttcgcctttttaaggctccaaaaggggaactggtttcggcaggggtacgaaatttttgg

SEQ ID NO: 11029 - DNA, 458 bp, Glycine max
  Clone ID: jC-gmle01810051b08a1
agagcttctagcattgtgatgttgattgcatatgttgtctacattgtctgtcaactgtggacacacagggagttatttgaagaagaagatgacggtaaagatggcgaggatggttcagaagaacaagctgtgattggattatggagtggcattgcttggttggttggaatgactgtattcattgctgtgttgtctgaatatgtggtggatacaattgaggatgcatcagattcatggggtttgtctgtgagcttcctaagcataatcttgctgccgatagttggcaatgcagctgaacatgcaggagcaattatatttgccttcaagaacaagctggacatctcattgggtgttgcattaggttcagcaactcagattgccatgtttgtggtcccattatgtgtaatcgttgcttggataatgggtatcaatatggacatgaacttcaacctcttaga

SEQ ID NO: 11030 - DNA, 435 bp, Glycine max
  Clone ID: jC-gmle01810051b08d1
ataaaattaaaatttattaaaattttatttcccacgagacctagtacagtttttaggaacccaataaattcaagagattttggaaactgaaaaaggggtttttactaaaggaaactgcaacaagaacaatttccacttatttgggatgtaccggagtaacacaaggtcaaaaggagcttttttggtagaacacacgtccggttgattcaacattttttacaggagggggtcatttttaacaggtagcttttggaacttaaaatgaagggaagggtttggcaaaggggtaacttttttttccccccttttttatgggtatgacaatggggccagaatgggactatataccaatccattggatttgaagctgattttgggtttggagcggtaccaccttttttgattttagggaagggccaggaataggccgaaggc

SEQ ID NO: 11031 - DNA, 457 bp, Glycine max
  Clone ID: jC-gmle01810051b09a1
gcgatacaaagccaaaatgcttttactagatcacggtgtggtcttccaattggagggggaatatctttgaattctggtgtgcatcctgttgcagatattccactacatgatcagttttcttgtggaaatgactatgccttgaaggtaaggaaaccatatactatcacaaagcaaagagagaggtggacagatgaagaacataagaagttccttgaagccttaaagttatatggcagggcctggcgactgattgaagattcttcgagagtctagtagaaacagtacaaccttggaggagtcaattgaaatcccccctccacgaccgaaactgaagccaattcatccttaccctcgtaaactagatgagatttcaaagacagaaatttccaactcagaactcccactgaggtcgaattctcttaagccatcagactttggtcaagaaaacaattcttcc

SEQ ID NO: 11032 - DNA, 436 bp, Glycine max
  Clone ID: jC-gmle01810051b09d1
aaacttctctacgcttaatacaacatatttaacccttataatgggtgtatatatgttaaaaacgtaaaaacatggtaaaaaaccgagatgcataatacaaagcccaagcatatctcactgaacttggacatcaataaccttacgttcaaccttggtcttaggaatggtgatataagagcacaccatttttcaactctgccttaaccttgtccttctcgcaattatacggcagctttaaacgggtatcataggaactataggtcctgcttgaccaagaatcatcttcaccatgttcttgatcacttttgaggccaccttttataacaagcatattatcctccactgataccttagcatcttccttggcaagacccgagatgtcaaacctcattctgatatcatgggcttcatctttgatgtcccaaggggcacggat

SEQ ID NO: 11033 - DNA, 374 bp, Glycine max
  Clone ID: jC-gmle01810051b10d1
gttgaatgttgtctggggtaaagtcacaggcatatagtagtatatagtacatacaagagagaaacatttagcgcggtaacaaatacatgatgagattcatagtatgatactattacacatgcggagggatgaagtggttggttctggatcaagaataataaaaagtagttagaagaaattttagaaaatgtcgagaatctcgaggatggagcgattgcaaaggggacaagagccttgattaagccacagttccctggaacacaccctgcaaaaagtgtgtccacatgggatgaacgctgcgccttttttgctttccatgcacacgcaggacaccggatcattccccacaacattctcctctttctctttctcct

SEQ ID NO: 11034 - DNA, 565 bp, Glycine max
  Clone ID: jC-gmle01810051b11a1
gattaagatacccttttgcttttcaatcaatgcccaaatcctcaaaagtcttctgaacattccccagcatgttctcagtgatggaatctcgttaatctatatgccagattcccatcggggtccagctacctcaccttttgacctttctgttctgttgatgaacattcttctcagtgcttctaaattgtagcaaatgcagattgtgattatgggtttccgttagttagttgtgttggattgccctccatagctatacattcagaactgaattttgattaaccttagttttaagtgtattaattaactgtaccatgtaactgaatgctgccaatctgcttctactgtgttatttctgggagttagtttggcctctatggatagcatatggagggtaaagtagagaaaggggtggttctggatctaggaatttgcatggctgaacgctagccttcttgtggagagtgtctctactcttcttggtcatgtcttgactatagcattaattctcaaatattcttcgagtttctcttgaatatgtaaagccaggtctatttgttcaattact

SEQ ID NO: 11035 - DNA, 513 bp, Glycine max
  Clone ID: jC-gmle01810051b12a1
attctgtagcacatttttgggaacagctgtacggatcccctgcgaagtgttgaagcagaggttacaggcgggtctttttgacaacgtgggcgaggcttttgttgcgacttgggagcaggatggtcttaggggtttctttcgtggaaccggagctaccttgtgccgcgaggttccattttatgttgctggcatggggctctatgctgaatctaaaaaggttgccgaacgactactagagcgggaactcggtcccttggaaacaattgctgctggagctttatctggtggcttggcggctgctgttacaacgccgatcgatgtcatgaaaactagaatgatgactgcacagggccgatctgtgtcgatgactttgatagccttctctatactaaaacatgagggaccccttggcttgttcaaaggagcagtacccaggttctgttggattgctcctctaggtgctatgaactttgcaagctatgagttggcaaagtacgccatgaataaaaatga

SEQ ID NO: 11036 - DNA, 479 bp, Glycine max
  Clone ID: jC-gmle01810051b12d1
gcaattgaagtaaaaatgtaatgaacatcaagtcaaaataatttatacacttgagatggaacaaaatactaatagtattttgattgaggggaaaacaattccaaacaaaattacaagtaacttaatttaaaaacttgaacatgaatttctgaaactcttaaacttcaattaaatttcttttttggttatgtgggaaagcaagtaggtgccctctataagctgtgcttgttttttctggcacttttagtcatttctttggtgatggcatgactaagaaccccaatagggcaaaagaacaagcacagagaaactgaatgccgagtctctatctgattctctaatccatcaagaaaaacatgccttgcagcaaagagatccataaccaaaaggtgaatccaagctgatgctaaagtcatctcactggagaacattttccctatactagtcagctctggtagcaagtatttacttgcaaaaat

SEQ ID NO: 11037 - DNA, 435 bp, Glycine max
  Clone ID: jC-gmle01810051c01d1
ggacaataatttattttatttcaagtccatatcgggtctacacatagacacaacataactcatgttgctagagtagttttctcacaaccatcgtgcacacaggccaaaacatctctgtagtctcttgaaatggtaaaggagtcgtagacctctccatcactacttttcttgtactcaaacaagagatatgaatgattgaaagcagtcaatttgccaaacccatagtcaacgtccctataaagactccaaatagggggtgatggtgtgaagtctgacaggtgacttcccccttcaccaacaaccacatgaattgttccattcacagtgccagagtagtgatgcttttcttcattcacacattgattctgataaatggggcatactctttcatagttatggacatgaccataaaatccaatggctactttggacttt

SEQ ID NO: 11038 - DNA, 531 bp, Glycine max
  Clone ID: jC-gmle01810051c02d1
aacaaataaaacagtagtcttcaattacttcaaccaaaaggtctaacaaactacacgattataagcttaaggcaagtaataaccaactaaaattcaagtttgcaaaactatgatttcttattataaagcccctaccctacattcggggaaacttcaaaaccactatttttcatccaaattattcaatgcaaaggggaagcaacatcattgcctcagatagttgtcgtcgtcattatctgtatattaacctccaccaccagaaccgtatttctttccgaacaagacgagctgtagcttatcataaccagcgagcactccagcacctgcaacagcacgtaatatgtttgcaccggcacctttaaagagtgacttagtaccctcttttgcgacaattatcttgaatgcttccaaagagctcttgtattttacagcttctccagatgtcatcatcattcttctacgcacagtatcaatggggtaagaggccaagccggcacctattgtgatcccccatcccaagagaaaactcgc

SEQ ID NO: 11039 - DNA, 512 bp, Glycine max
  unsure at all n locations
  Clone ID: jC-gmle01810051c03a1
acaaaggttgctgtaggagataagattgcagtagtgctaagtgctaacacctgcagtgaacaatggcctctgcatcagcatctctgctcaagtcttcacttgttcttgacaagtctgagtgggtgaagggacaaacccttcgccaaccttctgcatcagttgtgagatgcaaccccaccaccccatcaggcctcaccatcagagctggttcctatgctgatgagctcgttaagaccgcgaaaacagtggcttcaccagggaggggtattttggccatggatgagtccaatgctacctgtgggaagcgtttggcttcaattgggctagagaacactgaagctaaccgncaggcataccgtacccttctcgtgacagttccaggccttggtcagtacatctctggtgccattctctctgaggaaacactctaccaatccacaactgatggcaggaagattggtgacgtgctgcttgagcaaaacattgntcctggtattaaagtcgacaagggt

SEQ ID NO: 11040 - DNA, 328 bp, Glycine max
  Clone ID: jC-gmle01810051c03d1
gtggtatattatttgtttttaatctgatgagataaaaggtaaataaataaacacgaatggataaaaaaaaaacaagaaaactaataaatccactaataaaaccaaggggaaaataatcaaatagggccctcaaaaggatcaaagaaaaacgcctacgaaaagaaaaataggatttcataaagagaagatcagacctctccaaggggagggaaaaccaatccaaaaaagacagggatgacaagaaaaacaataaaggatcaggggaaaaaatctgaaggggggaatatttgggggaaaacatctaatgggaggcccaagaaaccccccc

SEQ ID NO: 11041 - DNA, 584 bp, Glycine max
  Clone ID: jC-gmle01810051c04a1
gttctgccaatcacgaaggactgttaatgtgatctcatctagatgccttccatgtggcactgtggaattggttctgtctaaacctcatagtttgagatacaatgcactaagtttcattttcgttcaagtcccggaactatcatggctgcagtggcatccattcagtgtttattctagccctttggatggaaagaatcaccttgctattctcattaaggttcttggcaaatggacagaaaagttgagacacaggattactgatgttgatgcacaaaaagattcatctgtcataacaacttcagttgaggggccatatgggcatgaagtaccataccacttaatgtacgaaaatcttatattagtggctggtggtattggactttcacccttccttgctatattgagtgacattctccaccgtgttaaggaggggaaaccctgtcaatcgagaaatatgttacttgttcgggcggtgaaaaaatcaaacgagctttcacttctctcaaacattgacatgcaatcaatttgtccatccttttcagataaagtaacattgatatccatatttatgtcacccgagaatc

SEQ ID NO: 11042 - DNA, 486 bp, Glycine max
  Clone ID: jC-gmle01810051c04d1
aaatatacaaggaagctaaaattgcctataaaatatgcctagcgataatgtatatattcacataaggagtaaaattatatcatcccgcttagaattagaccccttctaaggactataggctattatagcaccaatgctaccaaggggcctagaatttggatactggaatttccaattccccttttaaaaatgcctttttttaaagaaagcatggtttccatctttcctttgggggacattagatcaaaactgtgactgtggaaatgggcaaaagggtaaaagggcctccttttgacaacctgggagcccggatttttaaaaacccttttgctaaaaattttaaaggcgcccaaactttgatccccacatgaacaaggccccatttttctgacattggttcataaatttcttaaagtctggcctggaaccataacgaatgaccgttgacttaacaatactaacttgacttggagccttgggagttaa

SEQ ID NO: 11043 - DNA, 539 bp, Glycine max
  Clone ID: jC-gmle01810051c05a1
gaaaagcagaggaaggtcacgataagtgatttggctattgtctccaatgggggtaaggggacatttcatgtggaggacaaaccagtggatgctgtgtcctttgcagctaatggtaatgtggaagaggtggtactttctcctgaaaatggaaatgtggagttgtcttatccagacttggtaaaactttgtaaagagatggatgctgctgggcttcacaaattcatatctgacaaccgtaagaaccttgctgctgtaagggaggaaataccacatgcattaagagcagctcctaacgccgcctgtttagttttagattctctgaaagggttttactgtacagaagtgtcaaatcaggacgtatagaaggatgctaacttactgggtgttcgacgaacatgtatcatgctgatggaatgtctatgtgatttcctgagcaacttacgttgcgtttctaatgtaatttcagatgatatctaggaccgggctaaagcagttgctgaagaatggtaacccagattggatgctcttgacatcgatgc

SEQ ID NO: 11044 - DNA, 497 bp, Glycine max
  Clone ID: jC-gmle01810051c05d1
acaaaacgagaacagagtacatacattagaggatcagaatatcttctagcacagaagttaaaatttaacatgacattttacctgtttcagcaattcttaaagactacatagataaagtgcaacatacaacagcttaagggttaagacttaagactaaatattaaacaaagggatatgtagcttcttagtcatcagttcaccatcatctgtgctaactagtggagatatgtagcttggtactgatagccatttccaaagtagttgccaggattaggagagatgttataagttgcagaacccatgagaggagggcagtgattgtcagttggtgcagggtacatgtaaggtcggtcatacacgtgttgaggatacctgtcagcaactctagcataagacgttttgtcagatagaatgttagtgacacgcgggccatattccacaccattagcacggcgtctcttgggttgaggctttgttgcttaagtacccttttcttg

SEQ ID NO: 11045 - DNA, 530 bp, Glycine max
  Clone ID: jC-gmle01810051c06a1
cacaaattgattatactcaacccttagaggagcttcctttgttgtttgtgcaattgacaagattcaaagatggtgaaagctttgccattggagttgcctgctcccatacgttggctgatggtcttagtgcaattcaattcatcaattcatgggcaaaggtagctcgaggagagacactagagccacatgaagtgccatttcttgatagaacagttctcaaactccaacactctccatcagcaccatgctttgatcacccagaactgaagccactaccactcaaactaggaagttctgatagcattgctgaggaaaacaagaagacatgtgctgtattactgaaactaacaccagagcaagtggggaagctgaaaaagaaggccaatgaccaacccatgaaagaagggtcaagagtaagaccttatagcagatttgaagctattgctgctcatatatggagatgtgcatgtaatgctcgtgaacttgatgagaaacaaccaaccctagttcggttcaacggtgacattcgc

SEQ ID NO: 11046 - DNA, 513 bp, Glycine max
  Clone ID: jC-gmle01810051c06d1
agcataaaaagttcaacatttactgaggtaagatggtttcacaaggatatttctcatagtacatggtgccttcctttgctgatcttaccattctttcctcagacatagtcactgaggtaagatggtttcacaattcttctgttgggctttgcttcctcttgtatccctggtttgctatttcgacccctacccctgctattatcttttgttccttattacttccctaacatgactagtggtaaagtagtcatttcaacacataccaaaatactaacaaactaggaaagtaaaatcaaccacaaatatatattacatatataggaaattgcatatattaaatataaaacttgagcaggacaaagctgatgatgaagactgttcagatgaatgatatgaatatatcatatattctcgtagaagtatttcttgaagagttgcatatgtgctatttggaagtgcatggacacaataacggatccattcccatgaggacttagaagaatcactgcccta

SEQ ID NO: 11047 - DNA, 509 bp, Glycine max
  Clone ID: jC-gmle01810051c07a1
gcgtttctgctctgctagggtttcatcttcttccatcacctccgtcgcaatgaaagcaggcttcatctgaatccgattccccttcgccccttctcctccttcactttcaccttctccgaatcctctaccaattattatgatgaactccatcttcgtctctcacaaccttcgcgtctttggtcccggcttgaatcccttcgcaccttattgcatcgccaatcacaccctttcctctcgctaaataccaattcccctctgcgattttcggggttactttacttgggcgacttgcttttttctttgtggtccggtttgctttaattgctgagaaagatagaaacatgctcgaggaacagcctgttgttttgttcaggaagagccctttcaggaggcgcttgagatctgcctttgataccgatgataggggttggacctcgcttcatgttttcgctcgaataggcgaactcatatcggttaaaatacctatcaatgaaggaatggatgtcaat

SEQ ID NO: 11048 - DNA, 400 bp, Glycine max
  Clone ID: jC-gmle01810051c07d1
ccaaattaaaatcgttccgggactggtgccctaaacaaaaaataaattaggacaagttaacacccccaccaacagggttatatgattatcatatgggacatcccacgattgaagacccgggcatggtgggaaacccctaatgacggcccatttaaacaaattcacaggactattttttaagggggaccctgaacatcctcatattacctccggtttgccaaacaggggtcctgtttagccgggttccgtgcccccactttgaagccccatcgctggcccggaatagtaggtgcccccggggggggactaaaaggtgcccttttacaaaaatttttttgcggaagcgcctctgtttacggggggccccttttccatccggacaagtttgcgcggggggggt

SEQ ID NO: 11049 - DNA, 492 bp, Glycine max
  Clone ID: jC-gmle01810051c08a1
caaaatccaaggcttgttcttgaaaccctaattcgatatcctcctcctgagaagaagaaggatcgatgtgggcagcttcttgcctggcgtcatgctgcgcggcctgcgcatgcgacgcctgcaggaccgtcgtatcgggaatcagccgccgttccgccaggatcgcctactgcggcctcttcgccttctctctcgtcgtcgcctggatcctccgtgaggtcgccgctcccctcatggaatcccttccctggatcaatcacttcaaacacacacctagccgagaatggtttgaaacggatgcagttctgcgggttagcttggggaattttctgtttttcactattctagctgttctgatggttggtgtgaaaacccagagggatccccgggatagtatgcaccatggaggttggatgatgaaaattatctgctggtgccttcttgtaatctttaagtttttcgtcccaatgagatcatcagcttctatgaaac

SEQ ID NO: 11050 - DNA, 452 bp, Glycine max
  Clone ID: jC-gmle01810051c08d1
catcaacaagaatggtctcattcattctactttcaataagatcagtcacaacacatacaaatctttcatgattttagatgcccaaacagaccattatggacaaatttagatttgttcatgacccaaatttttcactatacagttaaaagcccaccactcggaatcatgtcattcgtaacactttattcaaatgtatgctgatatagatgcataccggatatcctattataaaaagcaacaccactcgactatttagtagttaggggacacattttccctcagaaacttggaactggggaacgtgatgctcaaaactccctttctggaaacatgataggagctacgagagaccacaagtccagcagagcagttgcccaggaagtgatgattcgaacccacacagaaggccaccccacgtcaaccaacttcccgttttatccaacagatgttga

SEQ ID NO: 11051 - DNA, 523 bp, Glycine max
  Clone ID: jC-gmle01810051c10a1
ctgccacagtcattagcctcctattgcctttattaaaactgaagttagaggcctttttggttctgtgttctgtgattttgggcctgagtttactgttgttgatgtggatggtgaagaaccccatactggcattattgcatccataagcaatgacaaccctgctctagtatcctgtgttgatgatgagaggcttgagttttaggatggagatcttgttgtattctctgaagttcatggtatgaaagaattgaatgatggaaagccagcacagattacagatgctagagcatactcttttactcttgaagaagacaccacatattatggtacgtatgagaaaggtggtattgtgacgcaagtcaaacaaccaaaggtattgaaccttaagccactcaaggaagcaatcactgatcctggtgattttcttctgagtgatttttcgaagtttgatcgaccacctctgcttcacttagcattccatgctttggataaattcatttctgagttaggtcgctcccctgtt

SEQ ID NO: 11052 - DNA, 467 bp, Glycine max
  unsure at all n locations
  Clone ID: jC-gmle01810051c10d1
aacacgaggaaccaaagttgctttttcaattcatatatgaaatttgacataatgttgcctttgggtatcaattatgaatatgaagcatgagagtcaaacatgctgtcgtttttcacctaagtctcaaacacacctgtatcaagatgaaagcaacctactaacggaaataaatggatatctgagggatgtcgatgtcattatcctcatcatcctcgcatgccacaacaacgtccaaatggcgacggtacgcaagaatttcaaacttggctacttcccttgccagatctgcaacctttttgtccattcgatctttatgccgagggaacatgctattatagagcaggcaactcccacaagaaatactgtaagcattcaagccctttgccttcagccactctagaagttccctgagggtaagattgtctncgagaatccatctttcccaaccggtcaactcatatcttgat

SEQ ID NO: 11053 - DNA, 403 bp, Glycine max
  Clone ID: jC-gmle01810051c11a1
gatgtaagcgattactgcttttttgaatttggatgtgtgttggtttatgggagcgaaatggttgtggctgacattgatgattgaacttagagtaggttccttgctatcaagatttggcgtgctaaaggaagtgtcagatgatgcgtgactgcggtcactatgcttgtaagctgctctgctgtgatggcgattgccctgcctgctctgagatatgcagtacgaagcttctatgtaagaaccatcaatgcccttctacatgccatagagggccttgtgctccttgcccaataatggtgacaattgtatgtgcatgtggagagacacgtttagaggttccttgtggaaccgaaatggacaataagccgccttgatgttctaaaccatgtcctatcactcctttatg

SEQ ID NO: 11054 - DNA, 471 bp, Glycine max
  Clone ID: jC-gmle01810051c11d1
atattattatataaagatagtctataatcactagaatttctatatatttatacttagtatataataattctagtgattatagctaagccaatatatatcataatataatatacccttttcttattcaaagaatttatggctatgccttatcatttttagtcaaagaaaagaaattatggaattgaaataactcactcagaacgccctttaaaagattacgcggtacgattgaatcaaataagcccttatggaataaatattcagctgcttgtgaaccttcaggtactgccttattcaatgtttgttcaattactcttttaccagcaaatgcaatataagcatttggttcggcaataatgatatcccccaacatgccaaaactagcagttacccccccagtagtgggagatgtaagtatggatacatagaataacgttttattttcttgataatcatataaagcagaagaga

SEQ ID NO: 11055 - DNA, 507 bp, Glycine max
  unsure at all n locations
  Clone ID: jC-gmle01810051c12a1
tgatcattacatgtatgagactcaatttagttttaacaataatatcacctaaattgaaactctcaatgcaactatcaatgaaactagtaatattattgttagttgcattgagagtttcaatttaggtgatattgacaaatacaatgatatttatttttatagttacatttttttgaagggcagaaattgtagtgaaagcgataattctagtactagtataataactagtacgaatgatacanatgatagtgaatccactttaggagaaagttctaataatctcaatgaaagtcaaaattttaagcttttgtggcttgaatgcgaaaattgttatggattaaattataaaaaattttttaaatcaaaaatgaatatttgtgaatactgtggatatcatttgaaaatgggcagttcagatagaatcgaacttttgattgattcgggtacttggaatcctatggatgaagacatggtttctctcgaatctattgaatttcattccgaaga

SEQ ID NO: 11056 - DNA, 385 bp, Glycine max
  Clone ID: jC-gmle01810051c12d1
cccgggggggaaagggaacccctttatggggtttaaaaaaaaagcccgacccccaaaaaaaaaaaaataaaaagggggaaacttttaaaaaaacccaaaaaatcccccggcctttttaatttgccaaacaggggggaaaaaaaaaaaaaaaccggggaaaaaggggaaaaaaaggaccttggaaaaaccccaatttttcacaaaacccgagtttaacaacctggaacccccattaagggggggtaaaaaaaattttttgggggggggggggaattttgggaacttttcaaaaaacgggggccccgggacaagggggggggaaaaaagggggcccccccccggggggggaggggggtgtttcccccctaaaaaaataatggggggg

SEQ ID NO: 11057 - DNA, 389 bp, Glycine max
  Clone ID: jC-gmle01810051d01d1
aaaaagtcaaatttcaatactttttttagtgtaaaacaacaaacttaagacctcatataaattacttaaactcgtctctagactgaccttagtagattcaaaattaatacaataattcccagcagaaattaatggagacatatatttccctttttgctgattgccatccgatactcagcgttgctagtaataagcatcaattaagaatctttgcagcagcaatttgagacgtgaattgcacaggtcccccaaaaaattgaaaatatcgataggatattatttttcatgaacgagaggagaatacacaggataccacatattgcttcgcacatactccacagcctgatcttttgacatatgggaaagttccttgggccccacatcaccat

SEQ ID NO: 11058 - DNA, 528 bp, Glycine max
  Clone ID: jC-gmle01810051d02d1
accaaaaaaaaccttcccacatttgactcctcctttataacaaagtcataggacagcatagaaaaccagaaaaaatgtgatatagtttctgtgaccacatccataaacaccattgttaagactagtctgactagaatctataagccataagccaggtcttgaacaaaccaatataaaggcttacaaaaggatctttgcttaaatagaaacaacaggctgccagcaccaaaagctagttctttggcccaatatccttcagggcgcaaatctgttcctcacccatagcagacatgacagacacaacaagatccttgccctcagcaaatccatcctttatctgagtgagcagactctcatcagtgggaagcttgaggtcatccttggtgttcccattttcagtaagcagactcaaaaatccatcctcagcaatatcaatgagctggtaatcagtacgattcacatgaggaacatcacagttgtgagaagagggcacaatatcctcaagtttcttggcagtgaaaatatcaa

SEQ ID NO: 11059 - DNA, 517 bp, Glycine max
  Clone ID: jC-gmle01810051d03a1
aagatttaccgctatgctttccacaatattgttaccacttgttctatgtcttactctgcttgtgcttctcttgttcttcatccgcaatctcagaaccttcaagaacccaccccttcctccaggtcctaaaggccttccaataataggaaatttacatcaatttgatagttccattctttatctgcagctatggcaactctcaaagaaatatggccctatattttctcttcaattagggttaaggccagccatagttgtttcctctcctaaactagccaaagaggtactgaaaaaccatgacctagagtttagtggacgacctaaattacttggccaacagaaattgtcctataatgggtcagagattgcattttccccatacaatgaatattggagaccaattagaaaaatttgtgttgtccatatctttagctccaagcgtgtctctagcttttcctctattataaattgtgaggtgaagcaaatgcataaaaaaatatcttggcatgccctcttc

SEQ ID NO: 11060 - DNA, 610 bp, Glycine max
  unsure at all n locations
  Clone ID: jC-gmle01810051d03d1
cttgatagaacattataacatgcattattttattattttgatcacaaagtccatctagtagttatatatggctcctagtcttggcacaaagacaaagatcgttcttcttgtgttgggtgagtcctggcaatacttgaacatcaatgtcttcctttatcatcccttgtggcaattcccaatcaaaggaatgaagaagattagcaagaacaagttctaatatcacaactgccataggtaaacctgggcaacttctgcgacctgatccaaaaggaattagttggaaatcttgtccacgaaaatctacgtcgctatccaagaatctttcgggaataaactcttgaggatttttccaagattcgggatctctatgaataacccaagcattcacgtataatattgtcttagctggaattcgatagccatgtataatgcactcttcatttgattctcttggtacaagtagtgtggctggtgggtacaatctaaatgtctcctttatcattgccttgaaatacgaaagttnttgaacatcatcttcatctaagaaatcttttgtgccntccacatttctaatttcttcttgaactttcttcattactctaggggtttt

SEQ ID NO: 11061 - DNA, 507 bp, Glycine max
  Clone ID: jC-gmle01810051d04a1
ctgggtttgatttaagttgggggtttctgggtttgagattgaaatggcttatttccgtagctcaatctccctctgcaactcctccgttgaccaatacatggcgaattccctcgatttcgagccgaaatcgaggcacaggaaaacccccaattccctccagtctccgccgagtcggcgatcccggtcggcggtggttgacgttgtgatttttgcagcagttatcgcggcttttgggttcttgttgttcccctatgctcaaattttggctagtgagagtgtcaaatttggaattttgattgtgaatctggtcaaagaggacgttacttttaccccttggatttatatgttcataggtgttagtgttacctttgcagcattgactacttgggttcttgtggcttgcacaataaggaagtgtgggaaccccaattgcaagggtctcaggaaggctgcaacgtttgacattcagttggagactgaggattgtgtgaagaattcaccttcatt

SEQ ID NO: 11062 - DNA, 554 bp, Glycine max
  Clone ID: jC-gmle01810051d04d1
atgaaaagactgactcgtatcacgaggctacggttattaattcgccggctacgacgctcactactactgcggccggcgtccttttttttttttttttaattaattcatattatttggattttatattaccaattgtgaattagttaaactgagtatgatccatagcttcttacaacttattgccaaatgggagggatttattcgaaagacaacctaattttacataaaatatgaccatatcactataagcaacttttctaccaatttaagactgctttctgtatacaatatgctaacctttctataagactttggggttcttcttttctgaatcctacttcttggtctttgactctttttcgggcccggaacctgcaacctaccaacagatcagccacaccttactctgaggacacgaacagcccttccattggggggtgccatcttcttaaggctcggctaagagttgccggcgatgatcacaaaaaaccttaaacagtggcttcttaactccaccatgcttagttaatgaaggtgaatgctttacacaatcc

SEQ ID NO: 11063 - DNA, 547 bp, Glycine max
  Clone ID: jC-gmle01810051d05a1
ttgatattcccttttttttcattctagttattgacacggaaaggggtgaagaagatgatagatccaattaagtattaaatatatgtaattaatatgtaattaatctcctcttctttatttcgtcttttatttcttcttttttttacaattgttatagaataagttaggaaagagaaagaataagggttaatttggcctaattgaaattcggagtgaaactcgggatctcgtccaggcttccatggaattgaattaataattcaattccatttctattaataaaagagtgaaagcagaaatttaaatggaatgtatagggtgggggcaacaatatcataaaaaatacttagttaaaaaaacgaaaatactgtattgcaattgtattgcaattcgaaacgaaatatagttcgagatcattgtattatttttgtactatattaatcttaatcttaattggaacgaaatctttcaaaattggatttctaattcttaatttatattttccgtttttcggtcttttcttttcttagattataatccgaaaaca

SEQ ID NO: 11064 - DNA, 472 bp, Glycine max
  Clone ID: jC-gmle01810051d05d1
aatatatgttgttatatactgatatttgtatatattcaactgtaaatgatagaatacagatagatctatctatatagataagaaaaatagatcattttacatgttaagttctttggttcgaagggtaacacacaagcgatcaatttgatctatttctttatttctgcgtgaattgtatgtttgcaacaacggggacaaaattttctcaattccaatcgactaggcgtattctgtcgattctttttagttatatatctagaaatacccgttgattccttattaacactctttttatcacaaccggtacattccaaaataacaattactcggatatctttacctttggccatgaacctcccttgggtttttaattcacttaactctttcgttttcggattataatctaagaaaaagaaaagaacgaaaaaacgaaaatataaattaagaattagaaatccaattttgaaagatt

SEQ ID NO: 11065 - DNA, 340 bp, Glycine max
  Clone ID: jC-gmle01810051d06a1
ccatgaactttgcatctttctatcatcacatccatggccacagtggtgaagctccacgttttcccagaaagcttgaaccaacacaaaacgaggttgctcaagagaggctttggctcatgcccttcacctggggtgcttggttttggccataaaaattatgatcagttctctgtgaaagtgtgcagggcttttaggactgatgatggtggggatgtgaaggagaaaaagtttctacatttgaagaaaaatgaagagaaaaccaaaagggaaagtgggttttggagttccctcaaggctatcttgctgaggaatttcatggagggttcaatatcagatgatg

SEQ ID NO: 11066 - DNA, 521 bp, Glycine max
  Clone ID: jC-gmle01810051d06d1
acattcaaataaatatattgggtagaaaatatgaaatttcactagtctacaattcaatgaaggctatacatagtaacatactatgactataagcatcttaatgaagaatgctgattgcagggcagcctatatacatagtacatggggagccaaatgtctgagctaagggtgtcaaatgataattgtttaggtggacatggtgggaaaaaaacagatccactttgtttataacttagactttagattcattctattgtcttgatgatttcaggcaccaattacctgtccacaaaagcaaatgcatttttgcattggcagcaatacatcgtcatgttccaggcaaattgctgcctgtgctggaaagaattatgaaggcactgacaactgaaagtgagaagactgataaccaggtgttctctgtgtacatttccattgcatcagtgaaagaaaaccgggctcgatctttggcccaattacgaagtcggtcttgcttaactgcatataatgctcttccctgatca

SEQ ID NO: 11067 - DNA, 527 bp, Glycine max
  Clone ID: jC-gmle01810051d07a1
caccaacaccaatttgatttacacgaaccggttctcgggcccaccgaggcccaattgcgcttgctcaacgggcctgtccatgataaccgtcgaggacgatatcgagtctcttttctccgagacgaactcggaggatgagcggcgcgtgaggaagcaacctagcattggggcgtcggggatttcctccggggtgaagctcgaaaacgtggggaaagcctacaagggcgtgacggtgctgaaggacgtgagctgggaggtgaagaagggggagaaggtgggcctggtcggcgtgaacggcgccgggaagacgacgcagatgaggataatcgcgggccttgaggagccggatttcgggaacgtggtgaaggcgaaggcgaacatgaaaatcgcgtttctgaaccaggagttcgaggtggcgccgagcaagacggtgagggaggagttcatgaacgcattcaatgaggagatggaagtggcagggaagctggagaaggtgcgaaagcgctcgaaggtgccgttatgatttg

SEQ ID NO: 11068 - DNA, 443 bp, Glycine max
  Clone ID: jC-gmle01810051d07d1
ggtagtaatcatccttttatatttccgtaaatgagttagtgaatagatacatgattatacaaaggctgtgtagcttaacccaatatgctagctacatcaccttctggcggtaaattagtgtaacaatgaaatggttcactcaattccatctcttggcatttttcacgccgttggacttctgttttgctgcctgaaaggcctgcatcttatggtacttccgtgcctattacttagccttggacatcttaaatttggctttcactttaggagctttgctatcaacctcagccttgcgtacaagttctctttccctagcatcaaaatgttttggtaaataataatcgtaatcacctgcataatcctgtatggtgccatctttaatttcgatcactctattaactattcgctatataaaatatcgtgcatgagatactgtgataaca

SEQ ID NO: 11069 - DNA, 506 bp, Glycine max
  Clone ID: jC-gmle01810051d08a1
caactggagagtggcaatggatgtgatctacccagctctggtgaggtctttacaatacctgttgccccaggagatgttgtcgttgctggaacagatggattgtttgacaatctgtacaatgatgaggtcactgaagttgttttacattcagttagagctggactagaaccccaagtaactgctcagaagatagcagtactggctcgtcaacgagcactggacaggaataggccgacaccattttctacggctgctcaatgaggctgggttccgttattatggtggcaaacttgatgacataacagttgttgtgtcatacataaccggctcaacatgtgtgagtttttcgccatcttagctttgctacattttgtatattcatatttgtctacagggactgggttgccagccttgtctgtcatttttgacctgaatgcactactgcttcaaaattttatctcaaacttgaggtgcttacttgctatagtgatatattagatacaaaa

SEQ ID NO: 11070 - DNA, 535 bp, Glycine max
  unsure at all n locations
  Clone ID: jC-gmle01810051d08d1
gaagatgaaggcatcttcgtggcccaggattttggatacaaatatatcactatagcaagtaagcacctcaagtttgagataaaattttgaagcagtagtgcattcaggtcaaaaatgacagacaaggctggcaacccagtccctgtagacaaatatgaatatacaaaatgtagcaaagctaagatggcgaaaaactcacacatgttgagccggttatgtatgacacaacaactgttatgtcatcaagtttgccaccataataacggaacccagcctcttgagcagccgtagaaaatggtgtcggcctattcctgtccagtgctcgttgacgagccagtactgctatcttctgagcagttacttggggttctagtccagctctaactgaatgtaaaacaacttcagtgacctcatcattgtacagattgtcaaacaatccatctgttccagcaacgacaacatctcctgcggcaacaggtattgtaaagacctcaccagagctgggtagatcacctncattggcactctccagttg

SEQ ID NO: 11071 - DNA, 500 bp, Glycine max
  Clone ID: jC-gmle01810051d09a1
cactctctcttcattctctttctcttttcctttcacacaaactcctcttatgatgggtcttgatcaagatgctagcagcaactctggccttcagcttattctagggttagctttgactgccaccaccaccaccactccatcatcaccaccatccatttccaacaagcttgatcatgttgatcatcaccaccatcttataactcttagaccaacaacaaagtcatcctataattcctctgaggctgaaccatcattaacgttgggtctttcccgggagagttacctcaaagtccccaaaagcatcataggacacaacaacaacaaagtctcatcctgtgatgaccctcttgacttgtccacacagactaattcacctcatcacagtgctgtttcctccttctccagtggcagggtcaagagggagagggatctcagctgtgaagaattgtggatgcaaagagaatgtcagagggacttagctgtgagggataatagagcca

SEQ ID NO: 11072 - DNA, 440 bp, Glycine max
  Clone ID: jC-gmle01810051d09d1
attaaaaaaaatagtcattaattccttcatagatggatgtcttctataacgatttataaacatacattaataaaggaagagtaaaaagtaattctaatcagcggttacaaatttctacagtatattagttaattacacctttagccttttttcactggttcataagacgtatccctcaaccaaaaaaatacaaaggttgtgggggaactcttctttggttgccttttgtattttttaatgaaaactaaaagcctaattataataacaatatcaatcaacatgctgcagaaggattggcgaaggggttgaagaagtgaggcttatgggccatggagaatgatgtcttgggggaaccgtcggcaccgttgacagcgctgacgacgagcctctctcaagaggggcacatggcgagtgttgccgcaggcataggcatgtacaac

SEQ ID NO: 11073 - DNA, 472 bp, Glycine max
  Clone ID: jC-gmle01810051d10a1
ggccaggcatgccccactcatccaccacacctctcctcgttcacgctaccccttggggctcttcttctacctttcaagttttaaaagtataaagatggcagagacattcctatttacctcagagtcggtgaacgagggacaccctgacaagctctgcgaccaaatctccgatgctgacctcgacgcttgcctcgagcaggacccagacagcaaagttgcctgcgaaacatgcaccaaaaccaacttggtcatggtcttcggagaaatcacgaccaaggccaacgttgactacgagaagatagtgcgtgacacctgcaggaacatcggcttcgtctcaaatgatgtgggactggatgccgacaactgcaaggtcctcgtcaacattgagcagcagagccctgatattgctcacggtgtacacggccaccttaccaaaaaacctgaagaaattggtgctggtgaccagtgtcac

SEQ ID NO: 11074 - DNA, 492 bp, Glycine max
  Clone ID: jC-gmle01810051d10d1
aacttgaacactctctttttgatattgatattaagagacacattggtagggcatacatacaaacagagagtacatgtttttagttgatcacgtaaaaaattacaaaagaacatacaaataacaaaataggaggaagaggagagaaacacacagagtaagagacgtggaaagttatggatattagacatattataagggcaacgctcaaaaaacttccagcatagagcagtggaatgaattacttaggccttctaccacttgaggggtttgaccacttaccatgtgaagtcagggtcttctcttccaaagtgtccataggcagcagtcttcaaaaacctgttatttccacccctcttgagatcaaggttgatggagatcataccaggcctgaaatcaaagttttacttcacaatgttgagaatctccttattatggatcttcccagtgccataggtgtcaacaaacacagacaaaggctcaggcacaccaatg

SEQ ID NO: 11075 - DNA, 487 bp, Glycine max
  Clone ID: jC-gmle01810051d11a1
gccgaacccggcctttacgataaaaaagaagaaaaaaaaaatcccttctctttttggatccctctcttctctcttccatggaaaaaatggcggcagcttctagaaaaccaagaagcgcagtaattggatccctttcttcaacccctaggttctgcaactctcactctacatcatcatcttcttcttcctcagctttcgcttcttccacctccagcttcacctctcgctcctcctccttctttcaccgctcttgctctccaacacgtgtcaacctctacggttccaccgctccctccgtccggttctccctcgaccgttcggtctctccgaaccgctccatctcggtggcgccgagaaccggcgcttcaaggcaaagcagtagcccgcaccaccagcagaagcggacctgcatgtgctcgcctacgacgcaccctggctccttccgttgcagccttcacaagaagagccacgctccggcgccgtactc

SEQ ID NO: 11076 - DNA, 571 bp, Glycine max
  unsure at all n locations
  Clone ID: jC-gmle01810051d11d1
tcgcgatctaggaacttaatttctaattaagttcaattctcatcagtaaaaaagtggtacacccaaaaatacagataattcgccagctttatgtgcaatttgtgtcccattcaaattatcttcaatacgagtcaagggaataaacccctgttctatggtttccagataaacgatactctcaaaagtactggtacgagtaaaaataccctcttctttaacttctgttattattctgatggagtgaagctcgttcataggtatttcgagaataatacgacgattttttccaggaaatccccaacgaacaaaacgtacctttttcccttttttattgaagatatcaaaaccaccacctatatcccaaaaaataatcgacccaaaataaaaactactaaagagacccgcgattccataaaaagccatcgtggccccttgtggaataaatggaaaataaataaagtccggaataaaagataaatcactaattntctcagaataaagaacanatccataccaagataactgggaaattgcacgaacaatatccccccatgaacctacatagtgaaaa

SEQ ID NO: 11077 - DNA, 340 bp, Glycine max
  Clone ID: jC-gmle01810051d12a1
ctatctttatataataatataaataagaataaaaaaaataaaaaaaaaaaaagaatctatataaatataaaaataatatatataaggtacaaatagtaaatcgaggtacccattttatgataaactttccttccatttttgttcctctagtaggcctagtatttccggcaattgcaatggcttctttatttctttatgttcaaaaaaacaagattttttagatacagaaaacaaagtaaaattctggggtttttttattccccaattataatactaaattcaaaaaaaggagagtaatgagtataatctttcgctcagacgatgtactgatatattctat

SEQ ID NO: 11078 - DNA, 509 bp, Glycine max
  unsure at all n locations
  Clone ID: jC-gmle01810051d12d1
aacgcattatatatcctcattgaaagggaagaaaaataatgtaatcagtccttaaaaaaatgtaatcagactaatgaaaaaaatggtggataaagggggcaatcaaactgataaataatcatttgattctagaatatctttgtcttcgttcatccacttcattcatccaatcattgagccataaaagtcccttgtacccataatatgtagcagcaagaagtatgaccaaaataaagacaaatagaagaagccgcttcattcttgaaataattttctgtagttttgaagtttccttggattctagaacttgttcccgcctttttcgccgcttccgaactgatttttctacatctggctcttgtacctctgtaactctagttttacgcaattgtagttctgactcaacaacctgcactttactgttacaatcagaattgcaaggaatgagtccaattccaaatngattttttggaatatccctaggatggcaaccagcangatgatatgct

SEQ ID NO: 11079 - DNA, 505 bp, Glycine max
  Clone ID: jC-gmle01810051e01d1
aatattaaacaataattttggcatcataaattcttccggaataattatacaaaagtgaccagggaaaacccgatctgccagttgcccactgaataaaaacacacatcatattactatgtgttgtcatacatgcattgtaatgagtggatattccaaagcaattggtccctttatccctccttaatccttatgccgtaaatggcaccatcccttgtaaattgtaattgcttcttcagaaatagaattatacaaaggtagttgcaatatctatttgccaaactataaatgtaaagacccttcttcccaatcctagtagtgtcccaattgtatttacaaaggtgggacaagatatgtatatacaagtacaaccatgtaacataatgtaacaataatcatactttggtctttactagtgcacattacagggagttattatgcactgaaacccctttgcagagaactccagggattggaaggaatactgacacaagcttgtgctgaagcc

SEQ ID NO: 11080 - DNA, 535 bp, Glycine max
  Clone ID: jC-gmle01810051e02d1
gttgcaataaaagtgtcgtttaaaagggctattgttaatacatgtgcttcatcacaaaactgaaatgagaaacattgattcataacctgcctcaaaattaagatactatcccagaaagatagttgacaaaactgataaaaacactcccctgaaatgaactcagtctaactaaacaatcgcctgagacttgttaaggatcactccctcatatttcacctggaaccacttcatagcatcctcctttgtgacacggtgctggattccaacacgggacttgcaccttcggcgacgtcccacacgatagccaggacgctccagaacaacaaagaagtccattccataaataccagttgaaggatcatacttgattcccaaatcgatatgctcctgaatgccaaagccaaagcaaccagtatcactgaagttccttctgagaagttcatattccttcaccttcaaaccactctccaaaagttgcattgccttgtcacctctgacagtgacatagcatgcaatcttctcatttcttctaatc

SEQ ID NO: 11081 - DNA, 552 bp, Glycine max
  Clone ID: jC-gmle01810051e03a1
aaacgaaaagccattgttacaagcatttcacacttaacatatcaaaaaaacaaaggtttctactttctacgatgagagacatgaaagacgcaggtgccttgggaggcaagacagcaagagcctgcgacagctgcgtaagcagaagagcaaggtggttctgtgcagctgatgatgctttcctctgccatggctgcgacactttggttcattccgcgaaccagttagcaagcaggcacgaaagggttcggcttcaaactgcttcctcaaaagtaaccaccacgcacgcatggcacagtggattcacacgcaaggcaagaaccccgcgtcacaacagcaagcactttgcgctgcaacagcgtctcaaagacgaagttctcttcaacaacaccagtgttcttcccctcgtgccggagctcggaggggaagaacatgaaccggtggttgtggataacgatgagactgaagagcagatgctgtgtcaggtgctcgtgttcgacccttatgatgtgagaaccgatgacttggatacgttctctgacatggaattcgctg

SEQ ID NO: 11082 - DNA, 566 bp, Glycine max
  Clone ID: jC-gmle01810051e03d1
ccaaaaggcttaaacctgccaataaagatgatcattaattagtactaattactaaacctgtctagagatatatatagacagaaatatcccaagcaacaattctagtaaaattaacctggcccagtaatattatttactagtatttatataatacaggctatatatacgtacatatatatagccaaaccaagtattaacccaaatttgcagaaaaagcaaagatggatccgttaattgattgatgtcagtggtaagcaggaaaagcattggctccaacaaagcatgtcctcttcacaaaacgacctttcattctaggccttttctctgcgttcaacttccttacttcatatcttatcttctttgcaaacaaacgagtccttctcttctctctataccttgacactcttgcttctcttccaccatctaggtgccctcttaagcttcttacttccccacctacaccactcaaacccaaggagaagtcataatcagagttgaacttaggtgggtttgagttgtccatggagaagaccttggtagaccgagtaataccctatatagttagc

SEQ ID NO: 11083 - DNA, 495 bp, Glycine max
  Clone ID: jC-gmle01810051e04a1
ctctcctcccacgcccgccagtactgctcgaccgccgaatcgacgcgagtgcgcctgcgacgagcaccgtaccattgttcgcagcgtcgctgtcatcgcccggctttttccccacactccgctgcgtttcaaggcgcccgttgctcgctggaccaggatacggtcatcgtcgaccacgccctcacccatcgcccgtccggaaccgcgactgcacgacgaactccattccggcgccgacgctgcgacatttcgtctcccgctgatcgactcgctcaggtacgtgctgctgtcaagtccttggttgctttgctgggacgccgactgcgtgggcttgggttcgtcagttgcccgaccctttgccctgccgtcctgtggtgcccgctggtcagcgtcagacatttgatctgacgccgcatcgcgacgctgttccgtggctctgttcgcatctcggattcttccgattggttctgtaccccgttccgtggtctgcgtttc

SEQ ID NO: 11084 - DNA, 345 bp, Glycine max
  Clone ID: jC-gmle01810051e04d1
gcctttgttttttatttttttgtttttttttttttttttttttgttttttgttatgggggttttttttgtgtttacacattgacacaacttatctgatgttgctaaaataggttcctcacaaccatggagcacacaggcccaaaaatctttgaaaaaacttgaaatggtaaaggagtctataacaaattcatcactactgttatgggacccaaaaaggggataagaatggactaaaggaggccgaacgcgaatcccctaaaaaaattgccgccggtgcccaatcttgaggaacgacggaggccaccgggacaaggggtttagccctgaaaacaaaaaagatgaaa

SEQ ID NO: 11085 - DNA, 466 bp, Glycine max
  Clone ID: jC-gmle01810051e05a1
gtctcatcgatgatttctcttacgtgctctatttgtctatttaggatcaccccttcaaagaaagtttctggcttttcttcgtagctcctaaaagttattaaagtaaaagcacaatattatatataatcttggtacgcgttaagccttgccctttatcattctttcttcttttgtttcaatgaatggttttcgtttgaattgaaaacctgcaaagaaagcatcgattttgaatggaggaagggtaccccagaagcaagttcaagaccgtgtgtgtcttctgtggcagcaacagtggcaaccgacaagtcttcggtgacgctgcgattcaattgggcaatgaactgtgtaataggaacatagacttggtgtatggtgggggcagtgttgggctgataggcttaatatctcatagagtgtatgatggaggctgccatgtgctatggatcattccaaaagctctcatgcc

SEQ ID NO: 11086 - DNA, 494 bp, Glycine max
  Clone ID: jC-gmle01810051e05d1
tcctttttttttttttttcacgaaaagctgatcatctctttccatttccaagtgctgtgtgcctttaatgagtggtaacaaccagatatgactatatgacagggaatcaattgaccattaaatgaatgggaggaaaaataatgaaaggaacttgactaaaagcagcagagccaatatataagcactccagtcataaaacaacatagtacacggtaacaaacaacatatggtcccatctatccaggctcttggatacatctcaaatgatgaagaatcacatcataaatcaattttcggagaataaccttccatcaataacagtctcactctgcatctggatattacctaattgattcatctgccagctctgatgatgggcaacatgttcgtgcgaaggagtgtagtgttccattttatcataagcactttgcttgacgtagcatagacaactatattccgtgcacaaggctaaatgaaaccttcttaacaccatt

SEQ ID NO: 11087 - DNA, 528 bp, Glycine max
  Clone ID: jC-gmle01810051e06a1
agctccttctacaatattttttgacttggtgctttccttttggatcttacaatgggaaacagtgaggaagagaaatctactaagactgaaaagccttcttcacctgtaacaatggatcaggcgaatcagaccaaccagaccaatattcatgtctatcctgattgggcagccatgcaggcatattatgggccaagagtcaccatgccaccatactacaactcagctgttgcttctggtcacgctcctcacccgtacatgtgggggccaccacagcctatgatgccaccttatgggcctccttatgcagcaatttatccacatggaggggtttatactcaccctgcagttcctattgggccacttacacatagtcaaggagttccgtcttcacctgctgctgggactcctttgagcatagagacaccacccaaatcatctgggaatactgatcatggttaatgaagaaattgaaagagtttgatggacttgcaatgtcaattggcatggccatgctgaaagtgcagagcg

SEQ ID NO: 11088 - DNA, 393 bp, Glycine max
  Clone ID: jC-gmle01810051e06d1
aaaaaggcaaaataactgggtaaatatcattagaaagtctccacaccaatcgttaattcatacccaattatgtagcgtttaaacaaacccccttcaatttgaaatctctagttcttttcattttacaaacttggtcatccatttttggcaaatttaataaaatacagagtttagggcctaggtaaactgataagcaatgaattagttctgattttgatgggtttggattctaaaattcaactggcccatccctaaggaaattgttagccattattttgggcttggaatatgccaaaactacctgatcagccagtacaattactggttttctggatcaaccagctgccacagcatcaactctaggacttgggtccagcagttgatgccattttg

SEQ ID NO: 11089 - DNA, 520 bp, Glycine max
  Clone ID: jC-gmle01810051e07a1
ctcgagccgctcgagccgattcggctcgagaaaagttcacaagctcagtcagatacagtcattcatacagatcctccttttaaggaagttccctgtctgcagctacagcctctgcctctctgcctcagtttctgtgtaactgattgctgtttttcagtttaaattgagagatggaaccacaacaagaaatggagtggaatgaggcccaaaagattccaataagcgtggaccttgaggtcgtagcaaaaaaacagcttcagttccttgcaactgttgataagaaccgtcacctctatgacggtcctgcccttgacagagctatctataggtacaatgcttgatggattcccttgcttgccaagcattccgagtctccgatttttgaagggccattggtagttcctcttgactgcgaatggatttggcactgtcacatgctcaacccggttaggtacaaaactgactgtgaggaactttatgggcggggacttgacaactttggtgttgccactactgttga

SEQ ID NO: 11090 - DNA, 474 bp, Glycine max
  Clone ID: jC-gmle01810051e07d1
cattatattggaaccaataaaagtcaaaatgattccaggaagcaccatccacttctcctttgccgagacatgtctagatctcaagtcaagcaatgccactgctttgccatagggttcttctatggagaattcaccagctgttaggaaattcatttcatttccccgtttcccattgcgactcagatcatagtctagctttcttccggggaaaattctcacccttttgttggcaccagtaagctcaaagagatgaccatcatttgtagatttgcttggaaggtgaaacaaccaaagattctccaaaatagaccatccattttccataaactcagcacgagtgcgagtttcaccagatttcatgaggccaacaacctactttccaggatttcctatgttctttgcattcttcaaatccctcatttgaaggctgatgattctggtgccattctcatctgctacatgtgtccagctttt

SEQ ID NO: 11091 - DNA, 561 bp, Glycine max
  Clone ID: jC-gmle01810051e08a1
catttgttcaagaaactaccaagtagcaagcttgattattattattattattatcattatcccattgagcttctaaaaatgtgcaaaggtgcagaaggagaaaagcaacatggtttctgcagcagctatctacataaagaatgtgcaaccagaagtgctacatgttgtgagctatgtgggttacaggcttcattgtattgtcaagctgatgatgcatacttgtgtagaaaatgtgataaaagggttcatgaagctaattttttggcccttaggcacattaggtgctttctgtgcaacacatgtcaaaaccttacgcgaagatatctcattggagcatcaatagaggtggttcttccagccaacattaactggaccattggaaatctgcctagcaacagaggaatccacagaaagtgctcaagaatgcataacaacctttccctcttgatataacttccatctttctttttttctgcttagaatatcttttgtaatagaaaaggttagtgagtaccatctcaagtacatatggaagtgctaaatgttcttaaggcatgattt

SEQ ID NO: 11092 - DNA, 448 bp, Glycine max
  Clone ID: jC-gmle01810051e08d1
gagacaaaaagtgagtatcgccattataattgctagtgatataggttacaatatgagatgccaggaactaccatgacatatacttgcaagatatatcattgcatatcggtcaacatagtataacttacttctgacagaaattaggtttcctgctatagaataggcttaaaataaaaataaaccgtagaagttaaattacaattaaactaactacttctaccagaaattaaagaaagtaaaaaacattgcaaatgccctagttctattgaacacggttatattaccaaccattttatctaaatcatgacatgtaaaaacatttagcacttggatatgtacctgagatggtactgactaaccttttctattacaaaagatattctaaggagaaaaaaataatgatggaagttataactcgagggtaaggttgttatgcatacttgagcac

SEQ ID NO: 11093 - DNA, 462 bp, Glycine max
  Clone ID: jC-gmle01810051e09a1
gttgttgctccactcactatctttatttttcctattctatccttctcggttcttaggttagccgagcgtcatcgatccagaaacgataaaggcagtcataaagtgagaatggatctgtgtgctgctcatgcgaagaaccttttccacacaaattcgttttaccacagacccattcccttcaatttgggaaggagcagagtgtttgagatcactgtttcgaggagaaacccttactctaaagggtatcgcctatttgttgtcagcgccacggggaagaacaatcatgaccacaacttctcttcttacggcaatgatgaatggtccattccagaagaagatggtactagagggaatgattcttctgatggcaacatatcagataacaactctgagaaatgtcatcatactaatctggattggcgcgaattcacggcaaagctatatagggatgagttgaagaaa

SEQ ID NO: 11094 - DNA, 429 bp, Glycine max
  Clone ID: jC-gmle01810051e09d1
ggtgctggagctctttgagctctagatgaaattctaaagtttaatcgtaaaaatgcttgccaacacaacttattctcatacttacatcaaactatactaacaagcataatttccaaaaccaagcaacgtacaattcctcttataacaatagagtaggacagggggataaattatctatttattcgacattaaagtgaacatcagtacagttgactttgtagcaccctgattacaggttcttcattcatttgactctgaatttgaaaccatacatgagtagctacatgtcttgctttggcttccggctcaattctgagtcatgaccacccattaactgcaaaatctgctaccacaaactttctgaagaatctgataaagccccacacagcaaacttgagctacatgcaggtacataccaataatctgact

SEQ ID NO: 11095 - DNA, 508 bp, Glycine max
  Clone ID: jC-gmle01810051e10a1
gacaaacttgttgttcacattaccaagaacttcatgaccctgcccaacgtcaaggttcctctcattcttggtatctggggaggcaagggacaaggaaaatctttccaatgtgagcttgtctttgccaagatgggaatcaaccccatcatgatgagtgctggagagttggaaagtggaaatgcaggagagccagcaaaactgatcaggcagagataccgtgaagccgcagacttgatcaagaagggaaagatgtgtgctctcttcatcaacgatcttgatgcaggagctggtcgtcttggtggaaccacccaatacactgtcaacaaccagatggtgaatgccaccctcatgaacattgctgataaccccaccaatgtgcagcttcctggtatgtataacaaggaagagaatccccgtgtgcccatcatcgtcaccggtaacgatttcttcacactctatgcgcctatcattcgtgattggcgtattgagaagttctactgggcaccaa

SEQ ID NO: 11096 - DNA, 542 bp, Glycine max; identical to SEQ ID NO: 7971
  unsure at all n locations
  Clone ID: jC-gmle01810051e10d1

SEQ ID NO: 11097 - DNA, 540 bp, Glycine max
  Clone ID: jC-gmle01810051e11a1
ttgcaattgaagttgaagtcttgcccttctctcttcaactccaaacacaagacatgatcatccatggctgcctccgtctccactgtcggagctgtcaacagagctcttttgaacctgaatgggtctggacctggggtttcagctcccagttcatccttctttgggagcagcttgaagaaggttattggctcaagggtccccaacacaaagatttcctctggaagcttcaagattgttgctgtagaagagaagaaagagattgaagagacccagcagaccgacaaggacagatggaagggtcttgcctatgatatctcagacgaccaacaggacatcacaagaggaaagggtttggttgactcccttttccaagctccacaggatgctggaactcactatgctgtcatgagctcctacgagtaccttagcactggacttcgccagtacttggacaacaacatggatggattttacattgctccagcttttatggacaaactctgtgttcacattaccaagaacttcatgaccctgccaaca

SEQ ID NO: 11098 - DNA, 396 bp, Glycine max
  Clone ID: jC-gmle01810051e11d1
caaattccacattttttaaaaaaccctaggtgggcccttaattggccctggtaaaaaattaaacccgtttttcaaaggggggaaaacatttgaagttttaatcctttgggtttcaaaaattgcatgcgtgaaagttaaaaaaggggagaccttacaggggggtaccagggtttacttttgggttccccccagcaattcaagggggaaaaacaaatgggtattgggagcccctcaatttccttttttaggggtattttgtttgggcattaggggaaaaaaaattttgaaccgggccccttttttgtttttttaccggggttcccttaaaaaggggaaactggtcataaaaagggaaaacatttcttgtcccaataaaaaatgtctcttcagccaaaa

SEQ ID NO: 11099 - DNA, 558 bp, Glycine max
  Clone ID: jC-gmle01810051e12a1
ggcaatactttatgcacagatacatgcatcacaacaagttcctttacaaacatatgcactctctacatcacagactcattgtaccctattcatatggagctctgtacaatcaccccgtcgaggggcttctgaatgacactgttggtggggctttatctttcctactctccgggatgagtcctcgagccttcatcttcttcttctcctttgccaccattaaaacagtggatgatcactgcgggttattgctccctgggaaccttttccacatctttttcaaaaacaactcagcctaccacgatgtacaccaccagctctatggcaacaagtacaacttctcgcagccattcttcgttatgtgggacaaaatcttaggtacctacatgccttacacgttggaggagatggaaggtggtggttttgaaactagaccttgcaaagactacaaggatgatcaaactctttcgcttgacgagtcttctttatctgtactaatattgttttccctttttatgagcagcttctccttttcatgtgatgcctgctatatacatatga

SEQ ID NO: 11100 - DNA, 570 bp, Glycine max
  Clone ID: jC-gmle01810051e12d1
ggcggccgcccttttttttttttttttttaaatttataacattaactttaatttccatttaactgtaaagtaccgtgtgaagtattcatgccataatgtttttcttcttttgagggtcaagtcattatctatcctaattctgatgccggacgtcacattccacaaatatatattcacgccactgccattcatcatttcaattttcatccagtctatggcatggaatggaaacgggtctctatcgtcattaccagagactccatcagcaataatggtgcatcattatatgattatattgatgatgataaacattgtgtcttgcactctaatcttaacaaagctttatcctgttcttggagttggatccaaccaatcccgttatgcgttatcgtgtcccgtgttggcccccccacttgccagttgccaccaaagatatattccctgcaaaacatacactagaaacaattattaatagcataaaaacaacacataattaaatcaaactaaaaagaattaatacgtgttgtaaacgtatctcaccaagtaaacaaatacacacgaaatatatca

SEQ ID NO: 11101 - DNA, 274 bp, Glycine max
  Clone ID: jC-gmle01810051f02d1
aaaattaagaacatttaatatattatactttgtcaaaaatgtattgtcatcttttagtttttaactccttcattttcagtttttcacttggtcacatgaaacacacatcatatcatacaattactgttattgaatatcatgtcaagtagttcaacaaactttagcccaaaaggaatgtgggaagataacatttttttttgtgtgtacgccttggaacctatgatctcatgtattctatcccaagtttcccaccactaggccaacccagtgggtt

SEQ ID NO: 11102 - DNA, 486 bp, Glycine max
  Clone ID: jC-gmle01810051f03a1
cttctgtttcaacctcatcgtcatcgtactactactacccacgttctgctcctttgcggatcgtgtccacaaaagatggcagacaatgaggatggaagggataagactactcgtgggaatgaatgggaggttgtatctctgacagcattgacatatgcaactgctcctggtcctgatgaagttgagatgaaggatgatgggaacgaagatgtatatggacaagatgaatgagaaacgtcacatgctttatttatgtctcgtcactttgtctttgcttccagccagcatgaaaacttgcctgtggaacctgactatggtgagattcatgatgattctggagacaaagatgttgcctctgaagagactcctgaagaagtgaccataccaagtggaaaggatgaataaaacttgacattaccaggattggcaagtttagaggagtttgagggcatgcagcattttgacgagataataacagattatctg

SEQ ID NO: 11103 - DNA, 497 bp, Glycine max
  Clone ID: jC-gmle01810051f03d1
cacacaatcagaatacataagttgaataacttcaagagctatacattgctaatcaatacaaagaagaaaatccataacataaaatgtttgaacattggcattcataattgggaaaggtcaaccaatcctagtaccaaacctgcatttcacaattgtagcacttttcattctcaacctctctctgacatacattttttcgtcatcatcttcacttttaccacaaggataggagcccatacgcactgagccacctttcccttaactttcaccagaggagcttcccctgatcaaggagccacgacggttgccaccaacaatcacatctttgagtcgatatatgggagcaagcaccctgctcctcgcctcatcatttatactgatttgccatttaagttgtaaagctctttcctgctgccagcgttgaccaagcattacaagacccatcacagcagctgcaatgaagacagaccagaatgcatttgcctcttttgcatgag

SEQ ID NO: 11104 - DNA, 521 bp, Glycine max
  Clone ID: jC-gmle01810051f04a1
agcatattcaagatgctattgtttatttagatgctgggtctacagaaagtttccaatttattgcggcatatccaatacttcttgaacttggggcacgagctatttgcagtttggaaaacatgtgcccacttgatttggtggttgattggaactcaaattctgatcctgggaggaaacttgtggttatcacatcaagtctactaagtgatgcacaccggtatattttacgttgcctgagcgcacatcaagttgttcgtcattgcattatatttacatctatctcagaggtgcttatttacagcacactcagcatttcctgattcacctctggggccagatgcatatcatgaatatgaatccttactggttcaagattatgaagaactagttaagaaatcatggacaaaacctggacaggcaaaacataacttttgagatggaggacgttcagagtttcctttcagcggataggatgttcttaatcttgaaagctagttctagtggaagagatttttacgagc

SEQ ID NO: 11105 - DNA, 385 bp, Glycine max
  Clone ID: jC-gmle01810051f04d1
gaaagccaattttgactgcagaaaaaagttattattttgtctatttgaactgcctattcaacagttaaagttacaacgtacaggaaaaccaattcaatttaatttctatctcctatttttctaattgatgaacgaattaaatgtaactcgagtcccctaacagtaagtcgagcatgtcattggaagtgaggagagttgttccaccaacaagcaactctatatcaggtcttccactttcacccaatgccttatgagcttcacgcacctcgagtccattaatgccctcactaacaacacccaaattgacatttgaaccggcagaattgggttggccctgcccagggccaatttttcaaacccactttttaaccagcgccccacaggg

SEQ ID NO: 11106 - DNA, 309 bp, Glycine max
  Clone ID: jC-gmle01810051f05a1
gaagctgcgaagctgaaataatttgagccaaaccagggattgtgcttgctgttaagctcagttgtaattggttcttctagctggaactcctaagttttataacatttttctgagttattatattggtttaccatatgtttacagtttcacgtggactgcaaatgtcaaaaactatcatattccatcataaatgtaattagccattggactcttgttggataagatctcccttggtttacacgatgtcattgtctggcaaatattttggtattaggaacttgaatgtacgcattaaaaaaaaaaaaataa

SEQ ID NO: 11107 - DNA, 515 bp, Glycine max
  Clone ID: jC-gmle01810051f06a1
gggatgtacttgagaaagaatcagtctctatcaatgaagaaagtgattacggggtcgtttgtatgcaccatgttggaattttatgtgaaaacctagaaagatcacttgaattttatcaaaacgttctaggcctcaagattaatgaagcaaggccacatgataagcttccatacaggggtgcttggttgtgggtaggctctgagatgattcatttgatggagctttcaaaccctgaccctttaactggacgagctcaacatggtggtcgagatcgtcacacgtgtattgcgattcgtgatgtttccaagctgaaagcaatctttgataaagcggggatcccttacacacttagtcattctggaagaccagcaatctttgcacgtgatcccgatgcatatgctctagagtttacacaagtagatggttgatgtttatggatattacttgctaagctacacccctttgtcgctataagtcaccagaatgtagaaatatagtttcaaatgattacatgt

SEQ ID NO: 11108 - DNA, 316 bp, Glycine max
  Clone ID: jC-gmle01810051f06d1
atactaattactttcaatcttataattacttattcccggagggctaatacttaccacgagtgctagcataaggtgaacgccagccatactatagctgatagtgccactgctataacagattattatacagctcttctattgcatttactgaatacaaaaaattaatactttacatacatgttatcatatgcaactgggaatctacattatggcctcttatagcgacaaatgggagtatccgaatatgaaccatcaatacccgtaccccatctacttgcgaacactacaaaccgtagccaatcataacccgtgcgca

SEQ ID NO: 11109 - DNA, 506 bp, Glycine max
  Clone ID: jC-gmle01810051f07a1
aacaaacccctgctctcaaagatgttagggctacaagtgaggtggtggagcgctcaaacagaaacttcaaataaaggggatcaaagccatttgggtttgggatttgagatgtccctttgtggtcatgaacttaaggtgggcatgggttcaatagcggctgctgaagtgtttgaagcacatcgcatatctgtagttgacttcacaagttctgcttcatcaataattaaaaatcaaaatcttgttatcaagtttaaagagaggtacatgacatgggaaaaggctgctcctcttggtcttggaatggctgtttatggtttagatttacctgttgagtccaaagatacaattgctgtggaacaggatcatgcattgaagtccaaggatgatgatctgggatcatcttcgtctggacgcagatggagactttggcctattccttttcggaaggtcataacatttgagcatactaatagcaactcatcaaatgaagatgtatttctagattc

SEQ ID NO: 11110 - DNA, 579 bp, Glycine max
  Clone ID: jC-gmle01810051f07d1
tagacggcggccgccctttttttttttttttatacaaggtgtagtacaatataacaagtaagctaaatgttatacaattctgttgataggaggattataatgaaatcgggatttaatgcagatcaaaaagaaggaaagcaatggcatgatcatccccatcaatgaaacctgtatagaaggatacttcaatcaattatggtcatgaaagggtcacgtaggaggaatttctggtttttcggttaacatctttgagggtttcaacttccataccaacggatccttatcaaaaaggaactaagtatcttaagcaatgaactaatcaatatctggcaatggtgttttccaataattccatgagttgtagtcctcctgctcgaccaaagaagttggaggaaacatgtcattgacgagggtatgtaatgacgtatacgactttgcaccaatacggtgactaatagctacctcacccttagggttgataataaatattatgcccttcgggactgcaatctttttgaactaagttcatctgtatctctattgccaaatccaccgtagaatggattatagtcagatggg

SEQ ID NO: 11111 - DNA, 456 bp, Glycine max
  Clone ID: jC-gmle01810051f08a1
cttagcttagcttcttcttctgcgatcaacagtcgcctcctctcctccttattttgcgtcgcctcgccggaaagacacaaaacagagagagagagagagagagagaagggtccgtataaattagggtttctttcacctaacagagccatcgaacctagcctcttttttcttcctctttcgcagagcgagcgactcgcgaaaataagatcctgctcctgatctaggtcgcaaaatcgcagaatcattcgattttgcgattcagatcctgatttttactaccttgcctgtgaggaacgatgtttggctcgaacccttttgggcagtcgtcgtcgagccctttcggctctcaatcggttttcggacagaccaattcgagtagcaataattcttttgccccttagccatttggtagtacagcttcatttggttccgaaaccggcggtttcatatttggag

SEQ ID NO: 11112 - DNA, 536 bp, Glycine max
  Clone ID: jC-gmle01810051f08d1
aagtacgtaaaaaaatgatactaggaaacccatatttgaacatccccaaccgtaagatctatcaaatatccccaaagcaagataagaaccacatcaacaacattggcccaagctatatccacacaatacagtgacaatttacaggaaaaaaacaaatacattttaaagcagaacattggttctgaaactatcaaatttactggggtcttccactgtatcaaaaccagacggaccaaccttagttgtcatcatttatccaactgttttcatcttctactagcttgtagatgctgaaatggctgaccctgatcttccactctcctttagtgggatcatatgataaaaattcagcaccttggtcctcagcctttctcttgagcatctccttggatttctcaatcttcgggccttctgtatactgatggccagtttttttgtcgaaacattttatgttgagtagtgtcacctcagcaggcttattcagcccttgtccaacaggaggtttctttaaatcatccatgtatacaatcaccttc

SEQ ID NO: 11113 - DNA, 470 bp, Glycine max
  Clone ID: jC-gmle01810051f09a1
aatgatctttaccttttacaaggctcagggttattcagttgggtcatctgttgtggaggaagacaagcttagccttgcaactacacttcttgaaaaggccaaggctaaaggggtttctttgttgcttacaactgatgttgtcatagcagacaagtttgctgctgatgctaacagcaagactgtgccggcatcaagcatcccagatgggtggatggagttggatattggtcctgattccatcaagacatttggtgaagcattggatacgactgataccattatttggaatggaccaatgggtgtttatgagttcgataagtttgccacaagaacagatgctatagccaagaaactggcatagctgaatgggaatggagtgacaaccatcattggaggaggtgacttccgtgccgctgtggaaaaggttggacttgcatacatgatgaaccacatctgcactggtggtggtg

SEQ ID NO: 11114 - DNA, 498 bp, Glycine max
  unsure at all n locations
  Clone ID: jC-gmle01810051f09d1
gaggaccatataccaaatcactatagctttggaaattaacacgaaaattagccgctaagaaaaccaaacttaaccaacaaagtaaactcatttggaaatgaacattgttcaagaacaattagatcaaagctcaatgcaacaccaaggatgccacaaaaccctcttattttgaaacctatcctatattaagcctctacaggagcaagagctcgcagctctcattgtaccttaatccactgttggctgaaacccaaccataataataatataaagcacaaacttcaaaggaacgaatgatttttgctcaagcatcatcaagagcaaggacaccagggagttgctttccctcaagaagctctaagctggcaccaccaccagtggagatgtggctcatcttgtctgcaagtccaaccttctccacagcggcaacggagtcacctnctccaatgatggttgtcactcccttcccactcagctctgccagtttcttggctatag

SEQ ID NO: 11115 - DNA, 520 bp, Glycine max
  Clone ID: jC-gmle01810051f11a1
gaggaatcttatgtaaatacttcagaataaggtttggtcctattcatggggattctgtaaatattccattccaaaaagagaaaaaattcgaaacaattgggattttttggagattggatgcagttactaattcatgatctgaccttgtcagattgaaaacttcattctctattctacaagaatttttatgaaagcctttcatttgcctctcttcgatggaagttttattttcccagaatgtatcctaatttttggcctaattcttcttctgatgattgattcaacctctgatcaaaaagatatatcttggctctattctatctcttcaacaagtttagttatgagcataacggccctattgttccgatggatagaagaacctatgattagcttttcgggaaatttccaaacgaacaatttcaacgaaatctttcaattccttattttactatgttcaactctatggattcctttatccgtagagtacattgaatgttcagaaatggctataacagagttc

SEQ ID NO: 11116 - DNA, 524 bp, Glycine max
  Clone ID: jC-gmle01810051f11d1
aaaataataatatgaaaagaaaacattaactataacaatagtactagttaaaaaacaataaataaaaaaacttaaaattataaatataattttaaattaattatgaatttatttacataatttattaaaataatatataatttatattaaatatagaatatcttttatatataatttatttacattattattaatttttatatttaaaaaattatttcaaatatttgataataaaaatagttttgttttctttgttgttaaattaattaaattttttaatttttttttaaataaattgactgaatttttatttaatttttaaaaatactagattaattaattttatcttaatattttgattaattttaatattgaattaaattattaaaaaattaaatatttttaaatttagttggttatttttaatttttataataattgaaatatttttttttatttgataataattaatttattcattttattcatattttccatttattatttgctcaacaattctatac

SEQ ID NO: 11117 - DNA, 607 bp, Glycine max
  Clone ID: jC-gmle01810051f12a1
tttaggaagtattttaataattggggtagttgcattatatttttattatggatctaattcaggagataataattctgatttatgtaattgtattatggatactactattaatcatacaattacaggaacaaataaatcaactttatctagaatatcggaaaaagatattaattttatacaagaatttttagtaggtggtatgccagatatgggtgattcatttttaactaaagtatctgaagaaaatattaaaactatgaaagattctatagcagaaggtattaaatcaaattataatatatctaaacatttactacaaattcaacgtcaagtaggagatatagatactaaacaaactctgttaggttctttattgaaattttggccagaacttaaaaaagttaatcaatctttaattaaaatgtatagaattgttgagcaaataataaatggaaaatatgaataaaaataataaattaattattatcaaataaaaaaaaatatttcaattattataaaaattaaaataaacaactagatttaaaaatatttaatttttaagtaaataatcaatattaaaataatcaaaatttatgataaaattatt

SEQ ID NO: 11118 - DNA, 306 bp, Glycine max
  Clone ID: jC-gmle01810051f12d1
gggccaaaagggaaaggcccccattcaaatttttggggcccccttaacccaaaaattttaggggagaccccccctttttaaaaaaattttaaaatcctttaaaacctgggtttttttttttgcccccaaaaccttggaaatttctaaaattttcccccccgcgccctcataaattttttacacttggaccaaaccaccctttagggaccaaaatttttccttgcccaatttgttttcccccccatttaaaactgggaaaaaatccccccgttaaaaaccccccctttaggcttttccaaggccccc

SEQ ID NO: 11119 - DNA, 502 bp, Glycine max
  unsure at all n locations
  Clone ID: jC-gmle01810051g01d1
aatanatcggtcttgtgattccccataatcaaatagtcttaatcctaaattacttgcaacaagcaaaaattttccaaccatatcaagctactgagacctaaatttgtggatacggtgaatactccaaagacatcaatgccaaagccagaaatctcgatacttccacatcttaatttgaaaatgtaaaaatgacaaaggaagagtgtacaggtaatttggtgtattgtttaagaaaccttgcctctaccatacaaagcattaagtccttaacggacacattctactgcagttgtttaacagttccaatgatgcttgctgtcctaccctaaagccccgtggacctactgtcccatgttagggggcggaggaggaagacggacaccctgaccctgcataggttgggaaggaaaaccttggggaggtggcattgatggaagtctagcacccatgttgaaacccgatgtcccacttgcaacagggggtggaggtggaatagatggca

SEQ ID NO: 11120 - DNA, 563 bp, Glycine max
  unsure at all n locations
  Clone ID: jC-gmle01810051g02d1
cagaaattcagtacagtattattcagtgcagagaacaaatagggttatatattaaactcaacaaaaacaaataatatgagatgtttatgagaatttcatccacccaagaccgttgtgttccttaattaatggacaaaagctaaacttagctcaatttcttctatcccaagcatttgagtttcaagcacaggcaaatttccatcttatgaagtttattttgcacacatgtatcggagaatatactacctgttagcaacatatgaagaaaaagcgtgctatcagctatagctacagccatagcatcatattaatttttgggaccgatgtccttcagtgaacagatctgttcttctcccattgcagacataacagagaccacangatcttttccttcagaaaatccatctttaatctgagcaagcaatgcctcatcagtaggaagcttcagatcatccttggtatttccattatcagtcaacagactcacaaagccgtcttcagagatatcaatangctgatagtcagtgcgattcacatgtggaacatcacagttgtgggatgat

SEQ ID NO: 11121 - DNA, 522 bp, Glycine max
  Clone ID: jC-gmle01810051g03a1
gcgatacaaagccaaaatgcttttactagatcacggggtggtcttccaattggaggtggaatatctttgaattctggtgtgcatcctgttgcagatattccactacatgatcagttttcttgtggaaatgactatgccttgaaggtaaggaaaccatatactatcacaaagcagagagagaggtggacagatgaagaacataagaagttccttgaagccttaaaggtatatggcagggcctggcgacggattgaagattcttcgagagtctagtagaaacagtacaaccttggaggagtcaattgaaatcccccctccacgaccgaaacggaagccaattcatgcttaccctcgtaaactagttgagattccaaagacagaaatttgcaacttagaacttccactgaggtcgaattctcttaagccatcagactttggtcatgaaaacaattcttccaagtcagtgttatctacagttgtttcagaaacccttggtttcttcgattcagatacacctactag

SEQ ID NO: 11122 - DNA, 529 bp, Glycine max
  unsure at all n locations
  Clone ID: jC-gmle01810051g04a1
ggctcgagcggattttctttctttttaacatgctttggattgctaattttgactttgacccgttggagagtcgctttgacgggaaacaagggttttcgctgcaattctaatcggtcaaattggaatcgtcggatcaatttgtcatgaagttcctggagtgttctgctttagatcggcttaatgatttcttgggtaatttgaatctgggagaacgtactatcaaaggatgccttgaagcttatagttgcaaacatgctggatcggataaaaaactctccatcagtttggagacagagattcttgattatcttgggaaatcatccgacactgattcctcctcaccagatcaaaccttcttaaccagaaccagccgaaagacattggtttacctggttctaaccctgtatcacatgtatcccgattatgacttcagtgcagttaaggctcaccagtttttcacagaggaatcacgggacagctntaagcagattnttgatacctacatgcatgaagctttcaaggaatgggc

SEQ ID NO: 11123 - DNA, 87 bp, Glycine max
  Clone ID: jC-gmle01810051g04d1
caaaaaaatgctgttggaaaacacaccccccaggggggggcctaaccatcctggtttgtcacgaatgcaaacctccaagggacaagg

SEQ ID NO: 11124 - DNA, 470 bp, Glycine max
  Clone ID: jC-gmle01810051g05a1
aaaataaaatcaacatactatctaaagattttatccaattgaaatttaaaaaacgactggcataaacttaagaattcaattcttgaaattgaataagtaaacaattgaattggattggtcgaatggtatcaaaaaaatggactactaactcccatttcttattaattattgaattaaccgatcaacttgctttgttatcgaacatatctttttgattgcaaaaattttccggaaaaaatttgaatctatttctatatgcgaatcaatcctactactactggtcctgaggtttctgcgcttgaaaaaaaaaatctgggacgtatcgcccaaataattggaccggtactagatgtatctttttctccaggttagatgcctaatatttacaacgctctgatatgtaagggtcgagatactgttggtcaactaattaatgtgacttgtgaagtacagcaattattaggaaataa

SEQ ID NO: 11125 - DNA, 254 bp, Glycine max
  Clone ID: jC-gmle01810051g05d1
aggtattccgatattcggacgcatcaacttgttatgaaatcccattgatagcctctactcgtgtcctagctcgtcttagagctacattagcctcaagtggtggtctcttgcctttcgccttattcaaattagctcctgctatttcaagagtttgctgcgctgcttgcggatcaatgtgactacccttttccgcatcatttactaaaacagtgatctcattattggtgattctagcgtaaccgcccatcagagcc

SEQ ID NO: 11126 - DNA, 511 bp, Glycine max
  Clone ID: jC-gmle01810051g06a1
atttaaggttatttataaccgtgtggttagaggaagtcatgctaccaagtctatgagatttgtcttctagtaaagattgtacagctactgcatagtccacagttctttgttggtactaatgaaatgttgcagaataattgtgggtaaagaagtttctcataatcttgcacaacagagacctggtatttacatcatttctggaattgaattacaaagtgccctgttgtatcagctcatgtttcatagctgcactatcttttgggaggtttccgatatctgtgtctatctaagatggaggattgtaggcttttcttcattaatataagtctacaggttcatcgcagtcagttctggggtttctgaggtgccttcaaggtgaaaattctggttcccaatgtagttagacaattttgatataatgaattactggactgatggatcggtctaattattatctgtttgtaacaacattatcaatgactttgataataattttgtcaattgctaaact

SEQ ID NO: 11127 - DNA, 586 bp, Glycine max
  Clone ID: jC-gmle01810051g06d1
tgccactatcgaggaccgcggcgcagtttatatccggggcgacgcgcgcatctctacggcgggcgcgctctttttttttttttactcaaaaattaccaaagcacatgcgactgctcctttataatcatagacgtacagacatcatagaagaccagaaaaaatgtgatataaacgatgcgaccacatccataatcaccattggaaagactggctatgaccagaagggtatccagccatattgcccggtgctatgcacactacacaatactcccgagacttgcactagggatgaaccgcgtaaactgatacaactggctgacagcctcaaaagctacatcttaaggcccactctgacttcagggcgcctatcatgagatgacgcatatctgacatgagagacgctacaagatgctagtcctcaataaaatcaccctatatatgagtgtgccaactctcatcagtgggaagctagaagaaattcttggcgtacccatattcagcaagctgactttagaatccaccctgagcagtgtgactgagctggtcatgagcacgattacatgaggacacattcaggacttagaag

SEQ ID NO: 11128 - DNA, 420 bp, Glycine max
  Clone ID: jC-gmle01810051g07a1
ctcatccgtaagctcggctcgagaagatttaccgctatgcttctcacaattttgataccactatggactatgctaatactggaacagtgcaagcctagaacactctacgggttttcataagactcaaaagctacccctcaagtgtgttcaacttcagtgccactaagttctgatgctgacactgaaaaggtggttcaaaagggtgtgcggaatgataatgaccccaccttggtggttagaggcttcaaggagttgggggtgagtgaggagcttgttgaggtgatggaagggattggtgagttagatactactgagatacagtgtgcggctattcctgctgttatggaagggaagagtgtgctgttgagttcaccatctgaacctgacagaaccttggccttcatgctgccacttattcag

SEQ ID NO: 11129 - DNA, 568 bp, Glycine max
  Clone ID: jC-gmle01810051g07d1
gggaaaaattaattgtgtttcattgaacatgttgcaataccatagttgtcattagcggtcaaaacagccactatcacattgcgctttagaaatgttgcaataccatagtggtcggataattgtttccatttcttttgctatcacgggctctattgcgcataccccaaagtgttcatgtatcattattcttctcacaaataataaaacgaaatcctggtatatggtgcttcagcgttggaagatcttgacaacaatatacaaagagacaatcaactcaccagttgcttgctataagaaatatcataaaacctatcttgacttttcttttcttacgtgccatagaaattgtagaccaagatgtcactgttggttcaaaagggaatccatggcctctgccacttttttcctaagagcgttaagagactctgtgaaatgaaatacttccgtttggtccatttctagagacattgcagaaatattctctgcatgatcgcactcaagatgctttaccacggacgattgttcacccaagacttaactattgtgaaattgccaaatagttggaatc

SEQ ID NO: 11130 - DNA, 359 bp, Glycine max
  Clone ID: jC-gmle01810051g08d1
cgcaatggataaaagcaccaaaatgcaattatagaagcacaaattttttagggtaatgaattacagaaaatgtcatgctgtgtattttgaccaaaaattgtgcgtgctcctacaaatcattttactatttagtcatataagggagaaagggaaacagtatgtggtggataatatcagggccatcataacctacacaactctgaacaactcttcataaatatcactgacttaaaatgcaattaggccttcgatttcttccctttggcttcattagatggttggctcttgaaaggcaggaaagtctttccacccatgaatggtctgaggacttctggtatctctaccccatctttcttctg

SEQ ID NO: 11131 - DNA, 520 bp, Glycine max
  Clone ID: jC-gmle01810051g09a1
agaacactgaagctaaccgccaggcataccgtaccctcctcgtgacagttccaggccttggtcagtacatctctggtgccattctctttgaggaaacactctaccaatccacaactgatggcaggaagattgttgacgtgctgcttgagcaaaacattgttcctggtattaaagtcgacaagggtttggtgccccttgcaggttccaacgacgagtcatggtgccaaggtttggatggtctagcctctcgctcagctgcatactacgagcaaggtgcccgtttcgccaaatggcgtactgttgtgagcatccccaacggtccctctgctctggcagttaaggaagcagcctgcggtctggctcgctatgctgcaattgctcatgacaatgggttggtcccaattgtggagccagagatcttgcttgatggggagcatggtattgatagaacttttgaagtagcccaaaaggtctgggcagatgttttcttctaccttgctgagaacaatgtcctttttga

SEQ ID NO: 11132 - DNA, 379 bp, Glycine max
  Clone ID: jC-gmle01810051g09d1
attaagctgtaaaggggcatttaaccataaacaaaaatagtctccaagactataaaaacattacattttagacaaattagtcttgcacttcatgggccgtcaacacctactggaactgctgggggtgctgcctaacaaggatcatattcactggaaacatcttagtaggagtagcttttgacgaacaactccttcttggcttcctcggattcaccctcaccagggtacttcccaagctgagcgagtgagttggacttggcacggaatgcgagtgcatcttgggctgccttcacgttctctgggcgggctccccatgtcttcaaggcaatgttttggagggctttggcatacgagaatgacacgtgccacgggtttggag

SEQ ID NO: 11133 - DNA, 500 bp, Glycine max
  Clone ID: jC-gmle01810051g10a1
tccaaatccagaatgtgcatttctagagacaacaattcttgatgcactgcatatgatgcataatgggaagttcttacatcttcccgtggtggacagagatggaaatgctattgcttgtttggatgttctgcagataactcatgctgcaatttctctggttgaaagtagtcctggagcatctaatgatgcggcaaacacagttatgcaaaaattttgggactcagcttttgctctagagccgccgcctgaagattttgacacccatagtgaagcctctggacggttgactttggatggggcagataccacaaagtctacatatcaatctgcaggttttggaaattcatttgcttttaaatttgatgatcacaatggccatgtgcatcgattctactgtggtgctgaacatcaagaacttctatctgctgacatgcaaagaattggtgatatttatgatggagaacaccctacaatgctgtataaagaccatgatggtgata

SEQ ID NO: 11134 - DNA, 521 bp, Glycine max
  Clone ID: jC-gmle01810051g10d1
aagtgatgaaagttgataaatatatggaattacaagtaccttaattgagaagaacatggtgacacttcagtattgcatgccacgactatatctttggttctaattacatcagtgactcaaaaagaaaaagataattaaaaacggctgattagagagactccacatcatccacctattccgtgtccatcatttcctttgtcaacgagcatttgatttatgacgaaactctgggattcatagagtaagattatagcatgttttgttttcaagctggcaaacatattactgtctagagcgctttaagtacaccaatacgctaatgctcgttagaacaacaacacctgcaaaaataccagaacggagacgcaatgtactggttttctgtatagtggctgtaccaggttgcagctttgctggtttggttgaattgggaacttccaatccaactttaaagccttcagtcctgcagacctagcataactgacggcagccacaagatccgtatcagtcgcaataataat

SEQ ID NO: 11135 - DNA, 507 bp, Glycine max
  Clone ID: jC-gmle01810051g11a1
agcatggtgacgccattgacgagggtcttaccctttcgtcacccaaatggccataatacccttccattttctcttacacgctacccttcttcaccaaacttctccttctcccctctcactctcactctttccatggctgcttcaccccaatcctccgctccaactgtgtcgcctggtgatgttaacatcgacaaagatggtgtatttcaattgattcaagctcatcaggaaaaagctgctagacttccaccagttgaggagattcgaactgtccttgatcgtagcgtgcgcgggatgctctctacattctcaaagaagtttgatggttatccatcagggtctatggttgactttgcatgtgattcaaatggatatcctatattagcagtgagcgacttggcagttcattcaaaggacctaactgccaatcctaaatgttcattgcttgtggctagagatcctgaagataggactgatttagtgattactgtacatggtgatgctatc

SEQ ID NO: 11136 - DNA, 405 bp, Glycine max
  Clone ID: jC-gmle01810051g11d1
gtcttactcaattcacatattttttgtccttttcattatattggggggaagcaaaattggaaggaaatatttgcaggataatgtgttccggaaacaactgtattacactcctatagagcctatattaaccaacacttgagttaatttgatgttaaaagaaagagaacatggttatatgagaattacattttttgaaattcaagaagatttttgccaatgatttttatgatcataccacagtggctatgccactgtatcatggtctagttctgtcagtctcaggtgaaaggccctgttccatggacttcctcggctttcaatgatcttagaggtataattgggtgacggcttgttgctatagataaacaacttctacacctcttctactaagggcggacgttccct

SEQ ID NO: 11137 - DNA, 276 bp, Glycine max
  Clone ID: jC-gmle01810051g12a1
gttctagatcgcgagcggccgtcctttatttttttttttatcttttgttttatcggtagcaacaagccaacaaccaattataactctaagaaaattgaaaggagaggaagaccatggaacagggcctttgaactgaaactgactgaacaggacccagatacaggggcatatccactgtgggatgatcataaaaatccttggtaaaaattttcttgaatttcaaataacgtaattctcatataacctttgttttcactcttttaaaaaccaattgac

SEQ ID NO: 11138 - DNA, 547 bp, Glycine max
  unsure at all n locations
  Clone ID: jC-gmle01810051g12d1
aaggattaccaaagatttgtaagttggtttaaaagtagcagacaaaaatgttaccaatacgtatgcaagtatttatttggcataaatagtgttaataattatgtggtatatgaatatctagttgcaaggcatagccaactaatctcagaatgaagaaaaaatgacaaatcttggaggctgaaacacatgaattgaattgatggattatatgaagattctaggagcacctgttcatcattgatctgtgaagtgatcaatcaactttaggcctagcagcttgaagcatctcaacaatgagagtcttcacatcctttctatcttctgcacatcgagggaaaggtacacgaagcttgaaagtatcaccctgataaccagccttaacattgaaaccaagactatccaaatctagtatgaaggcaaagtccactggaactgaggtccaatgctgcacaatcactttgntatcttcagcatgatctttgttcatatgagacgccactggcttggaaaactgagctatgggatcaactttngcaaattatactca

SEQ ID NO: 11139 - DNA, 479 bp, Glycine max
  Clone ID: jC-gmle01810051h01d1
gcatgtaataaaggtatcatagcatatagcatagcataggtatttcatacattgttcttttgaggagcacatgcagcaattcagtcttactacatgattctctttatttagaaaacaaagttttaccaattaaacaaacttatcagctaggctttgcaccttagacaaactgattaaggtactcatccacagtgatgtatttcacatcaggatatagagctgaagcttccactccaaaagaagactcaatttcaaagttagtatgatccccctttacataagaagagtggttaattgacaggatcacattcacgggtggtgcggactcttcaatttgcttcaggagttgttcttctggaacatagattctttcaagagttttaccaatctttccctcccagagagtaacaagctcattaaacgacaaggtattagctggtggtctaatgtagagaattttgttcaaggttcttggatca

SEQ ID NO: 11140 - DNA, 354 bp, Glycine max
  Clone ID: jC-gmle01810051h02d1
ggggggggaaaaaaaaacaacccctgttgtttttggggaaaaaaaaaaaaggggaaaaaaaggggaccaaccgagggggcccccactttaaatacccccaaaaaaaaagaacttcaaaaaaaaaaaaaccaaaaaagggggccctttaaaaaaaacccggatccccttttttttggggggggcgctagattcaccataataaaaccaggaaaaaaaaattgattcgtggagaaaaaaaaacagcggggaagaggcctaaaaaaatcacgccccccaaagggggcacagacttttacttggggaagaacacacatgttgggggggaaaaaatgggggaaaaaaaaaccccccggg

SEQ ID NO: 11141 - DNA, 475 bp, Glycine max
  Clone ID: jC-gmle01810051h03a1
cagatttcatatggatattttatggtgaaaaaaatgtagcattctataaaccaggcgaataagggttgatttgaaagatgatttggtaacatcctcaatctcattaaaatacttatttctgcatataaattgttgctcttggtcaaattctatcttcttttttgggaggatgctgtacttctcacctgtcaagcatgttattttgtgtgaattatttaatttaaatattgctgcttatttcataatttcatattcatccttctgggatgtgtgtatttagtagagctgttccagattttggctcgccttgtttcattgtttttctttagtgaaatgagctgatactcaaaagaagctatccgccttttgagataaagcacctactcttcataaaacagatatgatctgatgtttttctgagtagctgttattattttgcaatagatgactttatctgtgtggcttattgtaaact

SEQ ID NO: 11142 - DNA, 527 bp, Glycine max
  Clone ID: jC-gmle01810051h03d1
cggcggccgccctttttttttttttttttttttttttttttttttttttttttttggtgtgataaaaacaggaaaggataattatttaatgggatgctcaagcttggcccccatcaaagataagacaaagtttaaaaacaagtacaatcccttttgctcggctgctagctatcatgtccacagaaatccatatactagtatgtcaatagagattgtaaagtaatcatcacaatatcacatgctatttgctacggcctacgggaaagctcgggcgagcaaacttgcttggtgagtaatgctgactcgcataagtagtccattacttcacttgacaaggagtttcggatcaatgtcttttgttttgcgtgataacacgaatgccgatcaacttgcacactacttcaaaacgtgaatgataataacccaataaatcagtggatgaacttactttaacttcctgagccatgagggcttaaatatacacggatacagggtattgccagttgcatgaagcccgcaagtttgtc

SEQ ID NO: 11143 - DNA, 569 bp, Glycine max
  Clone ID: jC-gmle01810051h04a1
ctcgagccgaatcggctcgagctctattacaataaaaacactcaaaagaggagaaggaaagaagaaaagaatggtaacaatagctggtggtgtgagtctttcaagccctagcagggtatttgctaatgctaagggaatagactcagcacaaaaggcccaggccgtgaggtttccagctctgtcgaggcccattcaaaagtggcctggtttggtgaagacccggcccgttcgggcgacgccggagaagatatcggagaaggtagaggagagcataaagagcgcggaggaggcgtgctcgggaggcggcggtgacgcggaatgcgcggcggcctgggacgaggtggaggagctgagcgcggcggcgagccacgccagggagaagcagaagcagtctgacccgctcgaaaattactgcaaggacaatccagagactgatgagtgccgcacctatgataattgatgactgaactcagtcattccaaagttacatgcatgcatctattacttttaccttctgttacgtacattagacaccatgtattatctattaattcttattattataaaca

SEQ ID NO: 11144 - DNA, 489 bp, Glycine max
  Clone ID: jC-gmle01810051h04d1
gaattgtgtttattataaataagaattaattaataatacatggtgtctgatgtacgtaacagaaggtaaaagtaatagatgcatgcatgtaactttggaatgactgagttcagtcatcaattatcataggtgcggcactcatcagtctctggattgtccttgcagtaattttcgagcgggtcagactgcttctgcttctccctggcgtggctcgccgccgcgctcagctcctccacctcgtcccaggccgccgcgcattccgcgtcaccgccgcctcccgagcacgcctccttcgcgctctttatgctctcctctaccttctccgatatcttctccggcgtcgcccgaacgggccgggtcttcaccaaaccaggccacttttgaatgggcctcgacagagctggaaaccttacggcctgggccttttgtgctgagtctattcccttagcattagcaaataccctgctagggcttgaaagactcacacca

SEQ ID NO: 11145 - DNA, 505 bp, Glycine max
  Clone ID: jC-gmle01810051h05a1
attgaagttaaaagccttagccttccctacaactccaaacacaaagacatcatcatgcatggctgcctccgtctccactgtcggagctgtcaacagagctcttttgaacctgaatggctctggagctggagcttcagctcccagttcagccttctttgggaccagcttgaagaaggttattgcctcaagggtccccaacagcaaggtttccggtggaagcttcaagattgttgctgtagaagagaagaaagagattgaagagacccagcagaccgacaaggacagatggaagggtcttgcctatgatatctcagacgaccaacaagacatcacaagacgaaagggtttggttgactcccttttccaagctccacaggatgctggaactcactatgcagtcatgagctcctacgagtacctcagcactggacttcgccagtacttggacaacacaatggatggattctacattgcttcagcttttatggacaagcttgttgttaca

SEQ ID NO: 11146 - DNA, 543 bp, Glycine max
  Clone ID: jC-gmle01810051h05d1
aaaaggaaaaggcaccaaattcaatttaagtggacactgtaactcaaaattatagaggaagacggtccaatatgaaaaatatagtaagatcatctcaaacttagcatcttctctttgcacctaagacattgagaatgctaagaatgttacacgcaagttccatcacaacttctagcacttggattagtacaacaaccttcacgaacagaaatatttacttgccaagtttgctttgcctccaattcaagactggaagaaagttcccctctgaatagcatcctcgttagcatttccaagagcagcctcgttcaagtacttgtcagccaattggactctcttgacattctcttgttcttggacaagcatgttaccatacagcaagagcttctccagagtcatcttgggctgctcaaaggttggaggtccatcttttgagttcacaagcttctttccaacactgtcaacaccaacaccagaaatccacttcctcacttcatcatcatatactctggccctcagtgcaccaaagaaatcaatggattg

SEQ ID NO: 11147 - DNA, 375 bp, Glycine max
  Clone ID: jC-gmle01810051h06a1
aaaaaaaaaaaaaaaaaaaaaaaaaaaaataaaaaaaaaaaaataaaaaaaaaaaggggaacagaaaaaaaaaaaaagggcgtccgccatcttatttgctcgtgttcccgggatttaatttcgggccggtcctctgtggcgttcccatttttcttattcggggtcctcttgttccttgtctgttttattttcatggctgttccctttgtgaatctgttttccgttcccagttcccccttcttatgaccctgatccttaaatgttttttccctggggggcctaacgagtgagcttccttactttatttgtcgttgtcttctctgccctctttccatgttggtaaacctgtctttccacctgaattaaccaatttgc

SEQ ID NO: 11148 - DNA, 356 bp, Glycine max
  Clone ID: jC-gmle01810051h06d1
cataacagatccgaagatcctagttacatgacctggcttgcgaccttgatactgtaccaaaaagggagccgacaaacctgccccgggccctcgtttgaaaagagctcaatcggaaaaagcatggggttgacacatgggacggccgagtcccaaatgcacgtcttggaaccaggggaaatcgccctgaggcgaggcccagtcgcgcttaacaaaagggcgactcgccacatgggcgaagggtacccgcccagtcgggaatgtataaacccgcgaggaggggagggtacaaacaccaggtgccggatcatacgccgtacccagagccgcctgccattggatgcccaactctaagctat

SEQ ID NO: 11149 - DNA, 267 bp, Glycine max
  Clone ID: jC-gmle01810051h07a1
gaagcatcacttaacttgatttccatcaaccaatactcaataaataaacgcgtcaggcgtcctttttattacttcacaccctcacaagccagtgtaatcaaagcatgggctgataatacagataatgtaaacgtaggtcaacaataactatttaaaatagcgaaggtaaactctttagcttcactcggtcaatatactgccatttcaccggttttatcatatggagaatctgtattccattcataccacacttattagatatttttt

SEQ ID NO: 11150 - DNA, 335 bp, Glycine max
  Clone ID: jC-gmle01810051h07d1
attggggggtcatgttctttatctcattcctgaattgttattcattgatttgtaaactgccttagatttatgatactgtcccggcaagatagatgacaaaactgggaccagcactcaagagcaggaaaccacccaagcgaaccaataccccgccacttgctaaggagcactccctcaaaaatcacctggaaccaatgaaaagatgctgcattaggacacggcgctggatacgaacactgaaattgtaccttcagagacgcgccacacgattgcctggaggcacctaaacaactcagaaggccaaaccataaataccatttgaaggagcaaacatg

SEQ ID NO: 11151 - DNA, 186 bp, Glycine max
  Clone ID: jC-gmle01810051h08a1
gacacattcctaaagagttgggtgccttgactgatactaatgtcgcgggtgaaaatagcgcacaagatatgtcatcatcagacagcggaccttcagtagatagaaatcgacattacgaactgacggacttgagcatatgcatctagcctgaagtgagacactgtatctactttaacttgccatgtg

SEQ ID NO: 11152 - DNA, 393 bp, Glycine max
  Clone ID: jC-gmle01810051h09d1
agcagctaagatagtactatcataggagttatagtgtgattatccatatgatgtgcaaacagatcaatcaaatttcaaatgcacactatacataatcgacatttagatacgcatgccttactgcatcataattctgaattcttcaatgcttagcacaccattcccattcaaatcaaactgtttgatcatggctttgcactcatcaatggacttggactcgcccatcttcttaagcatactcttcaagctcttgggggttataaacccacacccttcagtgacatacatgtcaaaagccaccttgaagtaattcaactactgatgctatccacagcttccataagagcaatcaaatcctacatacttagcaacccatctccatcagaatccaat

SEQ ID NO: 11153 - DNA, 388 bp, Glycine max
  Clone ID: jC-gmle01810051h10a1
gttcgaagcctctcgaatccatactcaacagaacattcatttccctataaattcgaggtcgtttcggtccgctctcactccaagaaaacgttttgcagaagattccaatcggggctcagaaaataacgaaacctaatcgccgatcgcgtcgcaaaatgatatcaacattgatcagaagcatagacatgatattccacgacaccaagtcaaacaggtgatttggacactttgtgggactgaacaagaggttcagcaaaactgtgtagattgtggtgttcgtatgggcaagtacttttgaggaaccatgcgagcttcttgatgatgatatatctgagctgcagtaccattgcagtggctgtgcaatatgcagaactggaggaagcgaaaa

SEQ ID NO: 11154 - DNA, 495 bp, Glycine max
  Clone ID: jC-gmle01810051h11a1
ttctagctttacagccgattcggctcattcaaaacttaacattttctgcatgcaggggagcggcttttcccagtcaatataaggaagcgaacatggaagaagagacaaaagtcatatcagaagtttcagtgacaaaggtggctgaggaggcggatcataagaatgatagcattaaggggacaaatggagacctggcaagtgaagctaagaaagaagaggaagagaatgcctttgatggagaattcattaaggttgagaaagaagagaatgtcattgatgataagtcccacaaaactgaaagaagctcagattctcctagcagagaatttctagaagcccaagagaagatacaggaactcgaggttgaactccaaagactaacagaatctttgaagacctctgagcatgaaaatgatcagctgaagggagagatcttagttccaaagagaattggaggagagtggatagaatttgagagctcgactgagtcacaaa

SEQ ID NO: 11155 - DNA, 535 bp, Glycine max
  unsure at all n locations
  Clone ID: jC-gmle01810051h11d1
cgataatttgganccgtccggaattaatnnnnnnnnnccctcgaggtcgacggnnnnngnnngcnngnnnntttttttttttgtcacagcattcaaagaatcttccaactcctttcctctttcattagccgcttgcagtgtagtttcgagggttgaggctcgtgcttgaattgcctcaagttctgatgtcagattagatacatcatcaaggtatttattggcctgcgcttctgaagcgttacgcttctcatctaatgtgcttatttgttgttcaagttcctgaattctgtatttctctgcttctagtaacaactccaactcactcacctttttatcagtatcttccaatttggagtgagaactctggattaaatcttccagttctcggctacgctgatggttcatactggctcggtcttcatgctcagcacacttgccgttgattgtcttcagctcctcctctaattgtgaactccttaaagatgattgatttaattcggattcaagttgagctaccttttccgtgtattcctgt

SEQ ID NO: 11156 - DNA, 533 bp, Glycine max
  unsure at all n locations
  Clone ID: jC-gmle01810051h12a1
cattcccaaggatatgtttctattggctgtgagccatgcacaaggccggttttacccggacaacatgaaagagaaggaaggtggtggtgggaggatgccaaagccaaggagtgtggtcttcacaaaggtaatttgaaacaggaagatgctgcccagcttaatggaaatgggaccttccaaggaaatggctctgccactgttgctgacattttcatctcccagaatgtggtcagcttgagcaggtccgggattgagaatttggcaaaattagagaaccgaaaagaacactggcttgttgtgctctatgcaccatggtgccgcttctgtcaggctatggaggagtcgtatgttgatctggcagagaagttagcaaggtcaggagtgaaggttgcaaaattcagagccgatggagagcagaaggaatatgcaaagagtgaactgcagttgggaagctttcccacaatacttctctcncccagcactcttttcaccaattaagtacccttcagaaaagagagatgttgattcattga

SEQ ID NO: 11157 - DNA, 504 bp, Glycine max
  unsure at all n locations
  Clone ID: jC-gmle01810051h12d1
ggcaaaatctaaaaaagtagattatgatagtgaagaaacaacataatacaaccataactctactcatctaacaaaacaggaaatcacatcctcctcatagaatgactactacaattatatttgtgaggaaggttatctaaatctatacagggatactgctagctgagaatcttcgttttgctatcaaaaactgccattcccattttcagtgaattgcccaaatctgtgaagaaatttattgccggtatggtacgacggaacattgagcaagatactcaattgaccatcaccgtaaggcattcacgaatgccgtcaatgaatcaacatctctcttttctgaagggtacttaattggttgagaagagtgcttggggaagagaagtattgtggggaagcttcccaactgcagttcactctttgcatattccttctgctctccatcggctctgaatnttgcaaccttcacttctgaccttgctaacttctctgccagatcaacatacg

SEQ ID NO: 11158 - DNA, 230 bp, Glycine max
  Clone ID: jC-gmle01810052a01a1
agcatgagaacggcactagccggcggagtaatgcctgtctatgacgatgctttggacattgattcacaccacgtacttcacgtaggctggcacacggctgatcactatgatgatccgtgactaccatagctagctgaatctagagagatactctcacagtgacatcatgctgaacccgtatctcacagctggaaagttgacgcttataacattcgtttctacaccacaca

SEQ ID NO: 11159 - DNA, 354 bp, Glycine max
  Clone ID: jC-gmle01810052a02a1
ggcatcttaacagctccacatttcgggttactgtctgttcatgctaccatttctaagtctgattcttaccgggtacttgacaggtgctgccactcgctccatcactatgatgaaccgactgtaccgtagctagatgagtgctgctatctgctcgtgaagtgttatcattctgaacccgtgtgacatatctgcaaagttgaagttcctaacattgcgctactggccactcatgcggcccaataaagttcagcgtgcttatccggaccagtgaacgaggggctcctcatcaagtactgtgaccagatctgacctgctatactcgacgtattcgtggaccatgaccacgccagctag

SEQ ID NO: 11160 - DNA, 556 bp, Glycine max
  Clone ID: jC-gmle01810052a03a1
ggcccagttctcacagttacgactgattcaatgcttgagcatgtgaataagttgcttgagataccaggatcaaagttgctattcgggggtagtcctctagagaaccattcaattccacctatttatggtgctattaaaccaacagctgtctatgttcctctcgaagaaattatgaaggataagaattttgagcttgtaacaaaagaaatatttggaccatttcaggttatcacggactatcaaaacagtcagctagcagttgtattggatgctttggaaagaatgcataaccatttaacagctgctgtagtttcaaatgatcctttgtttttacaggaagtcattggcaaatcagtaaatggtactacttatgctggtttaagagcaaggacgaccggagctccacagaatcactggtttggacccgctggtgatgctagaagtgcaggaattggaacaccagaggctataaaacttgtatggtcttgccacagagaaataatctatgattttgggcctgtgccaaagaattgggaagttcctccttctacttgag

SEQ ID NO: 11161 - DNA, 376 bp, Glycine max
  Clone ID: jC-gmle01810052a04a1
ggcccagacataacagttccgattgtgtcaatgctggagcatgagaattactctctggtgatcccacgatcggtcttgctgtaccgggacactgctctagatatccacttgattgcatctatttatgtcgcaatcaagccaaccgaggtgtaagatgctcatccagaaactatgaacgctcatgttcatgaggttgtgccctatgatacaattggaccatatcatggtagtacgcactgacataacagatcgtcagcacacgattgggatgctaccaaaagaacgcgtaagattatgacagctgccgtagtattacatgatgctatgtcagtacaggaatctgttgatggatcacctaatgatcctacgtgtgctc

SEQ ID NO: 11162 - DNA, 414 bp, Glycine max
  Clone ID: jC-gmle01810052a05a1
tttggaagcactccactccattatgctgcatgtggtggaaatcaacaatgctgacaactgttgatcgccaagggtgccaatctcactgctgataatgcaaatggatggacccgctaaatgggtgctcgttaagggacaaaacactggcttgaggacatcttaaaaacacctagccaagaccccttacaagatgctccttcaccatatatatttcttccactcctgagcagttgccgatgctgtaagaaagcttgttagtcctatcctgttagatattgactctaataatagctatcagcagcatgtgtaacatatactgtgctaacggccctgattgctatttgtagaaccattcgacaaagaatactgtgctagacagaattataggtccatattcattgatacgatcatagt

SEQ ID NO: 11163 - DNA, 477 bp, Glycine max
  Clone ID: jC-gmle01810052a06a1
tctggaagcactccactccattatgctgcatgtggtggaaatcaacaatgctgtcaactgttgattgccaagggtgccaatctgactgctgagaatgcaaatggatggacccccttgatgggtgctcgttcgtggcgtagagactggctagaggacatcttaaatacacctacagaagaccccttacaagttcttccttctccatatatatctcttccacttatgagcattgtgagaattgctaggtaagtgtgtcagtcctatcctcttatcaattcaaccaatttcttcctatcacggcgtgtgtaatatattcggtgctatctcctttgctactcattgcgagaaccaattgaaaatttatgctttcctagaaattagcatcaatttatttatcataagcacaatgctttccattaatttgtccagtctgccctgacttcaaatcaactagcagatggatttgtcttatcatgc

SEQ ID NO: 11164 - DNA, 524 bp, Glycine max
  Clone ID: jC-gmle01810052a06d1
ttttttttttttttttttttttttttttttattttgtttttttttttttttttttttattgtttttgttttagttttttgttttttaatgtgttaagggtgtatgtatctaaaacggacatatgggtttgtgagcctggcggcaaaaaaaaagaaagaaagggggggggcgctccaacgagggaaaaggccaggggggggggggggggcccccccccccttttataaaccggggggggaaaaagacaccagggggatcaattgatgggggccccccgggggggaaactgggggggggggaaaaaaaaagggtcccttcttttttttttgggaaaaaaaaaagacccgggggaggaggacacccaaccccggggggggggggaaagacaggtggtccccacaaaaaagggccaaggggggggggctcacgcccaaaagaaggaggggggggggggatttggaggggggggcaccgccgccccaatgagggaaaaaaaaagcggggggggggaccttttcgtgccc

SEQ ID NO: 11165 - DNA, 580 bp, Glycine max
  Clone ID: jC-gmle01810052a07a1
ctagcctaaccccttcttaaagcaaccctctttgtcacttcctcttgttggtaaagggcgattaacacaataaacctttacagcaatatcacatcaacttgtcatcttataattgaactgtatgtaaaaaaaaaatttcagaagaggttacgtaccctcctttcttgtcatggaggtggagaatcagaagcaaagaagatatcaaaagctacgcaattggttcaatagcaagcaaaaggaagataggccatcttcattcagtttgaacgaaatacaagatggagcagaagatgagagtgatgactatgagggcaatctctccctgcggtcattggaattagatccatgcatttcaacaaataaactaagggtctttgttggtacttggaatgttgctggaagatctcctgtaggaagtttggctgttgacttggatgagtggttgaatctcaagaatgctgcagatgtatatgttctggggtttcaagagattgtacctttgaagaccttaactgtgataggagcagaggatccagcttgtgcaacaagctggaaccagctaataggaaaacactgaatg

SEQ ID NO: 11166 - DNA, 566 bp, Glycine max
  Clone ID: jC-gmle01810052a07d1
gatcaatgatatttgtataattcacaaaatttatattgtaaattttttcttagttggacttagacctttcaacaatagacctaacatccaccttgattatcaacaccaattgtatttaccatgccttgtcatctaacaataaccttccaaatcctgctatccaaaaaaatgtggggttttaggaaaagcaattatgtgtcatttttgtgatgaccatgacctggctgaaaatttgtgtcacccctttaacgaaagttttaatttgctagtgttagcagccttgtacattcttggttaacgacgataataaggaagattttccgtcttcatctcctttgttcatcccattcttgggattcaacattgttggggggatattatgcaaccccataagtcctctgttagatgatttaatttcaatctgtgtagagaaaagtgctgaaacggggcgatgatcagagaacttgctttcactccgaaaatagtgaagttgctccactcctttaccataccatagaattctatcacaccatgctggagttcttttgtttttcccggatctacta

SEQ ID NO: 11167 - DNA, 285 bp, Glycine max
  Clone ID: jC-gmle01810052a08a1
agtactttggctgcagcccaagaccacatttgtaagacattgggaggccaagatgtccatatatgaattggaagtgtatgttttcttattaggcctatcctggacccaaaggatgtgaccatcggctctctttctgaattccaattccacatttcctcgagatctcgaggcagatatgatcatatatgaattgatctcatttgtattattacttaggcctatgctgatgccaaaggaaatgctatcggaattacttggcgtatcacaatcacacattaccgagac

SEQ ID NO: 11168 - DNA, 574 bp, Glycine max
  unsure at all n locations
  Clone ID: jC-gmle01810052a09a1
gaaccatggacacaatagaacaagaaaacatgcaatttctcgggttcttgggcatctacaaagaatcctacaagctcatattttcatggaggaagatcttcacccagatcaccttcaccctaatcctccctctctccttcatcttcctcatccacatccaagtatccgatctcctcttcgggaaaatcacacacgacgccaaggacttaaccgaaaccctacccggcacaccccaacaccaaaagctccttgacacattctcttccgattgggccactttctttctcttcaaactcctttacttcatttccctactcatcttctccctcctctccacctccgcaattgtttacaccgtcgcttccttctacaccggcaaagaagtaaccttcaagaaggtcctaagcgttgtccctaaggtatggaagaggctcatggtaacatttttgtgcaccgttgttgctntcttcgtttacaatgttatggcagtgttggttctaggcatatgggcactcacaantggtgtgagaaatggtggtggtgcaattttgtcggtcttagcgatattatatct

SEQ ID NO: 11169 - DNA, 469 bp, Glycine max
  Clone ID: jC-gmle01810052a09d1
ttcttctttttttttttttttttttttttttttttttttttttttttttttttttttttttttttttttaaaagaaaaatccgatagatatatgcggggggctttatatctaaccattaaaaaaaacatgggaatcccggcagacatctttagccctaaaaggctcatagcgctcatactcttccaagggatatcacaaagcatgcttgttaacactctcccggggggggggcttgcaaaccaaatacattacaggttgggtaccccgcgtccgctaaaacaaatgggaccctagcgagaaacccccaatcccaaacccttttctttccccccaccccaaaccgaacacctttttttggtttaccacccccgttgaaaacaaaaactgggttaaaaaaaacaaaaagtttggcttcaaaaaaattttgaggggcgggcccgttttcccctttaacaaccccccggtttt

SEQ ID NO: 11170 - DNA, 506 bp, Glycine max
  unsure at all n locations
  Clone ID: jC-gmle01810052a10a1
ctcagaggtggtaactcgggaaccaatatattatggtcttgctgattgtagtttgaaaaagtcattggtaaactggactctgccatatgcccagcgctacattcataaatttcatattgataaatatgataaactcaagcagtctggttttgatattttcaaccatctgaatgtcattgttgttgagaagctgttctacaggaatgttataaagacctgtggcagtgtatcaaaaaaaacgagtcgaatgtagttgtcttttgcagggaaacattttgtacaccattaaagaatcagattatcattccttgtttatggagctttctagtttgttactaaatgggacttctgaattgcacttggcaaatttccttcatatgataacaaccatgacagaatctggttcctctgaggagcaaatagaatttttcattntgaatagccaaaaagtaccaaaactttcagatgaagaaatctgttggacattatcttncgtgtcatcaatt

SEQ ID NO: 11171 - DNA, 333 bp, Glycine max
  Clone ID: jC-gmle01810052a10d1
aaatggataaccgcgtaataagtcttaatagatagtggaacataaccgcgtagacaagtttgtatttacatgctcagatgtggaccttaagcttcgcccaattaaacgaaaaatatgttacacgcaaatgttgcagccataaacactagagatatacacatacaaaaagctgaaactgacaggaactactttcaagaagacctgaatgaaactgaatctccatgaataagagaaggcagaaaaaatctgcttattgtattctcacactatttgcatcaggtatcttccatgcaaaagtagaaacaaatccatgtagcagcaaaatgttgtgta

SEQ ID NO: 11172 - DNA, 441 bp, Glycine max
  unsure at all n locations
  Clone ID: jC-gmle01810052a11a1
ggtgaatccctggctcaagtcttgtggatgattggtgtggaaccagtggctgatacctttggcagggtaaaccgggtggaacctgtaagtcttgaagagcttggaaggcctaggattgatgttgttgttaattgctcatgagtgtttagagaccttttcatcaatcagatgaatcttctggatagagcagtgaagatggttgctgaattagatgaaccagcagagcaaaactatgtaaaaaagcatgcatcagaacaagctcaagcccttggagttgcagttcgagaggcagcatcaaggatcttctccaatgcttgtggctcctactcctcagacatatacttggctgtggagaattcttcatggaatgatgagaagcagctncaagacatgtatcttagcagaaagtcttttgctattgattctgatgcccctggtgct

SEQ ID NO: 11173 - DNA, 339 bp, Glycine max
  Clone ID: jC-gmle01810052a11d1
aagaaagcaattttgaacttgaccctttatttggtcaccggggttggagttcaaaactgcacaaggggcacttggtctctaaaaatgacaaacggaaagctaaactcgcctttaaaggacgctcttgtgttcactggagggggctcttgttaataatagctattaacttcagcgatcaacgccttcaattttggcttccacttctgaatacaaccgcctgagcttgtaaaaattatgttccgaagggtgccaataaccccgtcacttggcttccaagaatggcgggcccattttcccaagggggtctggattagggcttatgagcgtgactgccatttg

SEQ ID NO: 11174 - DNA, 543 bp, Glycine max
  Clone ID: jC-gmle01810052a12a1
gtccttcccgaaggggaccacctcttgtggtgagtggctctgatgacggaactgctaaattatgggatatgcgtcagaggggttccatccaaacattcccagataaataccagattacggctgttggcttctctgatgcatcggataagatcttcactggtggtattgataatgatgtaaagatttgggatttgcgtaaaggtgaagttaccatgacactacaaggtcatcaagatatgattactgctatgcaattgagtcctgatgggtcctaccttcttacaaatggcatggattgcaagctttgcatttgggatatgcgtccgtatgctccacaaaatcggtgtgtgaaggtgttggaagggcaccaacacaactttgaaaagaacttgttgaagtgtggttggtctcctgatggaagcaaggtaacagctggtagttctgatcgaatggattacatctgggataccacgtctcgccgcatcttgtataagcttcccggtcacaatggatctgttaatgagtgtgtttttcatgccaatg

SEQ ID NO: 11175 - DNA, 462 bp, Glycine max
  Clone ID: jC-gmle01810052a12d1
aaatcacaaaagcaccagcattatataatatttttgcaagaacattatatagtcactgaattgatcgaccaggaaacaacagaaggaattcagcatttctaaagtttaccactccctaatggtggtcaaaagcaccaacatgctcatttgatttcctaaacgtggtgcttcatatctccccaagataaatctgcttgtcactgctgcaagatccaataataggcttcttggggatgaaaaacaccctctttaacagatccattgtgacacggtaagcttatacaagatgcggcgagaagtggtctcccagatgtaaaccattcgatcagaactaccaggtgttaccttgcttccatcaagagaccaaccacacttcaacaagttcttttcaaagttgtgttggtgccctttcaacaccttcacacacagattttgtggagcatacggacgcatatcccaaat

SEQ ID NO: 11176 - DNA, 232 bp, Glycine max
  Clone ID: jC-gmle01810052b01a1
agcgttatgacagtatcagggggcgtgggactgagtgtctatgacaatggtgcgaaggtacagacttaccggacacacgacgtcaaatgcaaccagatccattactatgatgctgtgacactaccatagatagctgtatctcgctagctaccctcaaagcgctatagttgccattatgtctctatcagttagcaatcagacgactctaacatcccttgctgagccacacatg

SEQ ID NO: 11177 - DNA, 383 bp, Glycine max
  Clone ID: jC-gmle01810052b02a1
agcatgcgatcggttctagctttagcaggaatgtctgttgtaagacgatgcttcgtttacttgattcttaaccagtaatccacgaaggctggtacttgcatcatctctatgacgatgcgcgatgaccatacctagctcattgtaactcgattctctccaaggccgacaatgccgaacgtggatatcacagttggtcatctgacgctgatcacagtcccttgtatgccatacatgcggtcgtatacagctgggcgtggatacctgtactcttaaacgtgtacagccttgtcagataccatgacgggatctactgagttgaacatcggctttgacgccgatcgtggccacactgatgagagacatctgatctggtcctggtacaa

SEQ ID NO: 11178 - DNA, 393 bp, Glycine max
  Clone ID: jC-gmle01810052b03a1
ctcccaattatcacagctacgactggtataatgctagagcctgtgaataagttgcttgtgattccaataacaaagctgctattacgcgttagtccttgactgaaccatgtacttcaacctattgatggtgcatttaaacctaccgctgtcgatattcctgtggaagatcttatgatggatctgaatttggggctagtcacacaagaagtgttcgtactatttgctgttatcacggactattacaacaagcagcttgcacttgtaatgaatgctctgctgataatgcatatccataaggcagctggtgttgtatgaaatcatcctatgttcttactggaaggcattgtcgaatcagtcactggttctacttatgctggattaagaccgatgacg

SEQ ID NO: 11179 - DNA, 195 bp, Glycine max
  Clone ID: jC-gmle01810052b04a1
cgctgataaaggcgcttaatgtagtgcttaacgcagatggagcaactgcttctcttgtataggatcttgatgctggtattggcatgttcactggacaagacttagttgagatagccgatattgcatctccgactgctctctctgtgctggcgcacactgtcgatctgattatgcacacacttgcgaccagactcg

SEQ ID NO: 11180 - DNA, 488 bp, Glycine max
  Clone ID: jC-gmle01810052b05a1
tctggaagcactccactccattatgctgcatgtggtggaaatcaacaatgctgtcaactgttgattgccaagggtgccaatctgactgctgagaatgcaaatggatggacccccttgatgggtgctcgttcgtggcgtagagactggcttgaggacatcttaaaaacacctacacaagaccccttacaagttcttccttctccatatatatgtcttccacttatgagcattgtgagaattgctaggtacgtgtgtcagtcctatgctcttatcaattcaaccaatttcttcctatcatggcgtgtgtaatatatttggtgctatctcctttgctcctcattgggagaaccaattgaaaatttatgctttcctagaaattagcatcaatctattttcataagcacaatgctttccattaatttgtccagtctgccctgacttcacatcaactagcagatggatttgtcttatcatgctttgaatgcggt

SEQ ID NO: 11181 - DNA, 109 bp, Glycine max
  Clone ID: jC-gmle01810052b06a1
ggctcgagcacgccgctatatgatacgcaatggggtatcctcaaacagagaatacgatcagggggcaacatcggtggcaaaactacctctgatcaagacaacgcgtggt

SEQ ID NO: 11182 - DNA, 405 bp, Glycine max
  Clone ID: jC-gmle01810052b06d1
aaccaacaaatagaatatttgatcattccctttgattaatttacaaactacacacaaaaagtttgataagaaaatatgcgatgccagtatggataaagctagagaaagagaagccaattattgtctcaatcttgtatcaacataactgaatctcagcctcacttttttttctgggataagtacatacatacatacatatgtgtttttttcattaattatgatgcagaacagcctaataacaatagacaaaataacatgaaacacagtgaaatgggggaaaccttgaaggaagaaagaaactgatgattttgatgagaactaatgcaatttgactgcgtcgctcggtcgatatgtatatatattattatggcaggttcaattcaattcctaagcttttgcagccac

SEQ ID NO: 11183 - DNA, 593 bp, Glycine max
  unsure at all n locations
  Clone ID: jC-gmle01810052b07a1
gccgcaactcactgtcttccttctctagggtttttagctcccccaatttcttcgctcaacatggttcttcaaaatgatattgatttgctaaatcctccggttgagcttgagaagaggaaacacaagctcaagcgtcttgttcagtcaccaaactctttcttcatggatgttaagtgccagggttgcttcaacataaccactgtctttagccactctcagactgttgttgtatgcggaaactgccagactgtcttgtgtcaaccaaccggtggccgggcaaggctaaccgagggatgctcctttaggaagaagggagactgagtggattgccatctttttttgtttgtgattggagagtttcagtaatgccttcttttgttttggttatgatgatatgttaattttgttaaatttgtaagacttgagtctacaagcttatccaagacattagggattacacctaattttgcatttctctntactgcaattgggttcatgtggctatgttagatgcttactttttaaaataaatagagtggcatgtattggtaaatgtatctttgcttcttcagatggtagatattttctgataa

SEQ ID NO: 11184 - DNA, 444 bp, Glycine max
  Clone ID: jC-gmle01810052b07d1
atcagaaaaatatctaccatactgaagaaacaaagatacatttaccataacatgcactttaatttaatttaaaagtaagcatctaacatagccacatgaacccaattgcagtaaagagaaatgcaaaattaggggtaatccctaatgtcttggataagcttgtagactcaagtcttacaaatttaacaaaattaacatatcatcataaccaaaacaaaaaagggtttttctgaaactctccaatcacaaacaaaaaaagatggcaatccactcagtctccctttttcctaaaggagcatccctcggttagcccttgcccggccagggttggttgacacaagacagtctggcagtttccgcatacaacaacagtttgagagtggctaaagacagtggttatgttgaagcaaccctggcacttaacattcatgaagaaagagtttg

SEQ ID NO: 11185 - DNA, 516 bp, Glycine max
  Clone ID: jC-gmle01810052b08a1
ccctaatctgaaggctcccgccatctgcgatcggatttcatggctccaaagaaggacaaggctcccccaccttcatccaagcctgccaagtctggcggtggcaagcagaagaagaagaagtggagcaagggtaagcaaaaggaaaaggtgaataacatggtgctcttcgatcagggtacctatgacaagctcctctctgaggcacccaaatacaagctcattactccttccattctctctgaccgtttgaggattaatggatcacttgcaaggaaggctattagggaattgatggctataggttcaatcaagatggtgtctgcccatgcaagtcagcagatttacactagagctacaaacacctagatgtactggttataatttatgtagcattgatgcacctctgaagtgaaattttggattttctgtttgagacgtacctcatgctagattgcatcagttcgacagttgctaaattcatggttgatttccttttacatccttcttggtaatata

SEQ ID NO: 11186 - DNA, 179 bp, Glycine max
  Clone ID: jC-gmle01810052b08d1
gggccaaatattttacccagaaggatgtaaaaggaaataaaccatgaattttacaactggcgaactgatgcaatttagcagggggggacgttcaaacagaaaaaacaaaatttcccttctgaggcgcctcggtcctacataaattataacccggacatctgggggtttgttgctatagg

SEQ ID NO: 11187 - DNA, 547 bp, Glycine max
  Clone ID: jC-gmle01810052b09d1
caaggtaagaattttattgcacaatgagaaggcagagaaaattgatggttctgtttctcagtacaagttttagaatgaaaaatgaagcaacaagtgtttgtagtggtagtagtagtagtagtaagcatacaaatctacaatggcatggtacatacatataatacttgaataaccaattaaaaattggtgggctctcactcccacttgtgggcaacaatgtcagccaaatccacaaccctttgggagtagccccactcattgtcataccaagcaatcaccttaaccatgtcatctcccatgaccatggtcaacgatgagtcaacggttgaggacacatcagtgcacctgaaggcaacagacacaagtggctgatcacacacagagaggattccctggagctcattgtctgcactctctctgaatgctgcattcacttcttctgcaaaggtcttctttgagacctgaacaacgaggtccaccactgagacgtttggtgttggcacacggagtgcaatgccattgagtttgcccttgagggttgggagga

SEQ ID NO: 11188 - DNA, 520 bp, Glycine max
  Clone ID: jC-gmle01810052b10a1
ccatagttggtgttagtcttggtgtagtgtagctagggagggatatatatctgagtaagatggcatcagagcttgaattgcccccaggcttcagattccatccaacggacgaggagctggtgttgcactatctctgccgcaaatgcgcgtcgcagccaatcgccgttcccatcatcgccgaaatcgacctctacaaatatgacccctgggacttacccggattggctacttatggagagaaagagtggtacttcttttcaccacgggaccggaaatacccaaacggttcgaggccgaaccgggcggctggcaccggttactggaaggcaaccggggcggataagcccattggtcagcccaaaccggttgggattaaaaaagctttggtggtttacgcagggaaagctcctaaaggggacaaaagcaattggatcatgcacgagtatcgtctcgcagacgtagatcgctccgttcgcaaaagaacaccctagggtggatgattgggtgctttgccgattac

SEQ ID NO: 11189 - DNA, 505 bp, Glycine max
  unsure at all n locations
  Clone ID: jC-gmle01810052b10d1
gtacggtgagagacctttctatgatcacatgacaacaacgtgtagtagtgtacctatctacattctacaatagctgtacacatgctactactactactaggaacaggtcaacacacatgcaccgttggatcgtcgtcgtcatcatcacatagcataataccaaagcaaacggtggagccaacacatgcgtttgcagcttcaaagttgctttctgtcttactgtggcctagctaagctaacttgatcaataatcgtatgtgtgtggccgcacaggcacactcatggagcttgagtctcgtgctaccgagcaaatgcgaatgggcggcgcgcgtggattttatgtgacagggttctaaatcacgattgtggtctcacggtgagtcagaaaatcttaagagcaattgcggatcgtcatttaaaaccatcatgatgggctcaaaaggactggctgggccattacatgaacatgtgctgcagcagcaacaacatcntgttattgcctgga

SEQ ID NO: 11190 - DNA, 473 bp, Glycine max
  Clone ID: jC-gmle01810052b11a1
ggaagaggctgtggaagaaggtgaagtaccagctggtggagtaccactccttgcccggttatttgagagacaacgagtacattctcggtcactatcgatccgaatggcccatcaggcaggttttgttgagcgcattcaccatccacaacgaaactctcaacgtttggacgcatttgatcgggttcttcatatttctggcattgaccatatacactgccatgaatcttaattcgctacagcagtttcctgacatgctcaagaaggccgacctgcacaaattacaatcagaaatcttgacgtgtctcccttccatgcctgatttgcacatactcagggagggaatctcaagttggcatattaaagaatatctgtacaattgtttgccacatagtgtaaaagatgacttggcgaacataatagcaccactcatgattagaccaattacaaggtggccttttttcgcattttagggg

SEQ ID NO: 11191 - DNA, 470 bp, Glycine max
  Clone ID: jC-gmle01810052b11d1
gcataacatccacatgatttttaattaaaaataaaaaatacacaattttgttgcaggaatgagagggcaacccttgggactataatcttgagaagccacttcggcttccaaaatagtatcccgacttccagagcaaaacacaaggctaataatacaacttgaataacaagatacatgcaggcagaagaaaaatgtttctagtatgtcacgatagaccaaataaaatttttattgctgactagtgacttgtgtgctaagggttctaagtgcgtacataatccctatggctgcataaacatcccctaccggaatcacaaattcacatcagttggaggagtgtatactagcacatacttactagttacataacagcagagtattcaaccactgttcgttcatagatgcatatcaaatcaacaaccttgaaggtcacgccacctgagataactaaccctgcccgataatgagcg

SEQ ID NO: 11192 - DNA, 518 bp, Glycine max
  Clone ID: jC-gmle01810052b12a1
gaagaattacgggaaggggccattgaacagctggaaaaagcccaagcccgcttaaggaaagtcgaaacggaagcagatcgttttcgggtgaatggctattctgagatcgaacgagaaaaattgaatttaattaattcaatttatacgactttggaacaattagaaaattacaaaaacgaagccattcattttgaacaacaaagagtgattaatcaagtccgacaacgggttttacaacaagccttacagggagctctaggaactctaaagagttgcttgaacaacgagttacatttacgtactgtcagtgctaatattggcatgtttgggacgatgaaagaaaaaataactgattagtctttctattataaaatagagtataggcattatttttttcttctaaaaaaataaaattaagaaattttcatggtaaccattcgtgcagatgaaattagtaaaattatccgtgaacgcattgagcaatataatacggaagtaaaaatttgtaatacgggtac

SEQ ID NO: 11193 - DNA, 467 bp, Glycine max
  Clone ID: jC-gmle01810052b12d1
cattcgaattcattttatttatatattaatattatattcaaatgaaataaaaagatattaaaagatactaattataagaatttgaaagtgaaattataaagttattaaatgattaatcaatttttttctacctgttcctgtagtaaaaagagttccatctgttcttgaatagcttccttcaaaaggacttttgcttccccagtgaatgtcttggtagaagatatgatttctttgaattgaggtttattcgtgtttaagtaagcacgtagctcaacaagaaatttccttacctgtccaatttctaatgaatcaagataaccattcgttccagggtaaatagttattatctgttcttccacggtaagaggagctgattgggattgtttaagcaactcgcgcaatcgttgacctcttgctaattgattttgagtagctatatcgagatcagaagcgaatcgggcaaaagc

SEQ ID NO: 11194 - DNA, 541 bp, Glycine max
  Clone ID: jC-gmle01810052c01a1
ccggaagatccgagtccgagtccgcaaaatggatcaatctccggagcggtgttcaacataacaaccaccatgatcggtgccggaatcatgtccattccggcgaccatgaaggttttaggcatagttccggggttggtggtgatcgtgttggtggcactgataacagatgtgactgtggagcttatgctaaggtacacaagttccggtaaatcctacacttacgcgggcatgatggccgagtcctttggctccataggatccctcgcagttgagattagcgtcatcataaccaatttgggggttcttatcatctatgacattattcttggagacgtgctctgaggaaatgagtcgaacggtatcacacacttgggtattctacaagaatggattggcatcaactggttgacctctcgagcttatgctctcattttagcagcactcttcataatgcttccacttgttatgttacgtcgtgttgattcacttgggtgtagttcagcaatatgaatcctactaggcatggtggttgttgtaatat

SEQ ID NO: 11195 - DNA, 482 bp, Glycine max
  Clone ID: jC-gmle01810052c02a1
ggaagcttcaaaagagggccgcagccttgcaaatttcaagtatgcatgtattggatactctgtctacttagacaacaaagattcttctgctggctctcaggataaaacagcaaaattgcccttttgtgttggtcttgaggtggtcttagtggagaaagcttcaaattcagatgctggccatgttcctgctactcataaaactgacgatgaacatgctgctcctcaacctcgaagatacatacctccaaatcatgcgacagagttcttgaataggtttcaaagaaatgcaggcctggtggcatctggtgttgccaaaaacttgaacatagtgggtaactatgtgaaagatctgctaaatgacattctaaactaatcctacaatacaccttgcatgtgtggtacatccatgctcccttaagttgaatttacatttcaatcctgaccgcccaatgtgcaaggtgcattatagaactacttcgaca

SEQ ID NO: 11196 - DNA, 279 bp, Glycine max
  Clone ID: jC-gmle01810052c03a1
cttaactgagatcgcaagcggaccaccttggatttctttattaaaatctgcctgcgaaccatgactttattactacctggaaccgtatgatcacatagaatgttgacatatgaaacaatgttactggcatgctgaacatggttccaccatgcgatagccaaacatacgagctgaaataggagttcaggtgatggacagctgctgatgacttgcatcgactagattaacgctaatgcaggtctgcatgatagctagaaatgtcaccacgcgagtactgag

SEQ ID NO: 11197 - DNA, 291 bp, Glycine max
  Clone ID: jC-gmle01810052c04a1
cttaacctagatcgcaagcggtccaccttggatttctttattaaactttgcctgcgaactaagactctattactacctggagccgaatgatctcattgaatgtggacatatgctccagcgataccggcatgataagcgtggttccaccatgcgatagccaaacatacgagttgagatagtagaacttggtgacggacgtctgctgatgttttgcatctactacattagcgctaacacatgtctgcatgaaagctctaaatgtgaccacgacggaactagcacattcctccc

SEQ ID NO: 11198 - DNA, 295 bp, Glycine max
  Clone ID: jC-gmle01810052c05a1
attcaaaacgcctgctaacgattagaggaaaccgtaacacagacatagaacaaacaacgcgaaacgtgcctgatgcctgtcattaccgtgccatacaatgtagcgcgacagtgccgagctgcgattgctacaatgacacggatagacgatgctccgctaatagtcagggtgatcacgtgcctcttctacccattcgaacacatgcaatctacactgatgtatccctgagataggatccgcaaaggggtctgattgcttgacatctcgtcaaggccttggcttccgtaatggatgg

SEQ ID NO: 11199 - DNA, 458 bp, Glycine max
  Clone ID: jC-gmle01810052c06a1
atttgacaggcctatcaacgtatacttgaatgagaaacaatggcagaggccagcatacggcgagcaaatgcatgagacggtctataccgggcacagacagctctcgacgacagtggctacatacgaataccatatgcaaacgggtaggagttgctacagtttggatccactgtgcacacttgcgttctctacgaatctgaactcatggaatccacaagtgaatagaactcagataggttcagcataacgggctaattgtgtgacatgacgtctagggcatagatactggaccggatggctagagcttacaatgaatggaatggctaactcaacatccttggaggcccctttatgatcaaacgtaccgagacatacccttgacgatacaggagaagactcgtcattggttatcaaaccgactcttgaatgtgcttaccatataaggcagcttgtacagt

SEQ ID NO: 11200 - DNA, 340 bp, Glycine max
  Clone ID: jC-gmle01810052c06d1
ataattctcgttaattaaaatttaaattgacggcatggggattgaagcatgggctcacaatggattttccaacaaatgtcccatcccaaatgacatagtttgcaccaagggacgtacaaccaattattgttgaaagtagtttaaaagctattagcgtttgcattataccttgctgtcaatgtagcccatttaaataggctgtcaacacattgggttatacacttttttcgacccatggcttctaatgctcgaaattttttagagttggcaaaaacactatggcgcccatattttatttctatgatcccgtgataatttattatttgcaacacatggggga

SEQ ID NO: 11201 - DNA, 469 bp, Glycine max
  Clone ID: jC-gmle01810052c07a1
ggaccattgatctagcagcacgtaaacaccatgtcattctggacacccttcgctgctgtcactgtctctattggcgacgctcgtgttttcactgctcctaagtgctctcctaccactcactctcctcatcgaaatttgattgcgaccagagcgtcgatcatcactggttccccactgttgagcagaagaaatcacggacggaacggtgcatgcaacgcagtgcctgtgtcaatagaacgtgagcacagcacccaggacgggaacagcttagatgacgtggctaggcactgttgccatggacgagcacgcagaaaccatcactggtaaaagtgctaccgagaaggtactcctagagaactttggactcacaagtccactgtctacagttagcccttgcagtgaccgcaatcgcgggagtcttgacggatgtcgacatcttccaggcaggctcaaagatctaatcacatat

SEQ ID NO: 11202 - DNA, 141 bp, Glycine max
  Clone ID: jC-gmle01810052c07d1
gcaggaaattgttccttgtttttttttactggagattttgtcttttatttgtagaggatgaccgttcactatgaaaaaaactgtgaaaatatatttggctgggtgacgctcactttccgctgacaaaatcggaggtctaag

SEQ ID NO: 11203 - DNA, 439 bp, Glycine max
  Clone ID: jC-gmle01810052c08a1
agcccactgatatcacagactttacacaacagatcatcattcatggctgacatgggggcaactgtttgcacggctatctcatccccatcctcggttaacaaggacgctactctgagcccagctcccacagaattgttaacggagagcatgatgaagaccgttaccgatcaagtgttctcaggcagacaaagctactgtccaaacggagacatcgacgcggtcccatactctagcgagattgagtactacctaactggcgagaacgccggatactacggttgagacactgctgatcttagcgaacacccagacacctgaacacagaaccgcgatctcgaactgattcactccacttcatccgatgtcggaacctagtactgtgtcatgaactagtaccagtcccttaacgctgtgctgctcgaagactccggcagcatca

SEQ ID NO: 11204 - DNA, 475 bp, Glycine max
  Clone ID: jC-gmle01810052c08d1
ttcgtttttttttttttttggtataaattgggggtggtcatgcatagaatttatgtgttgtttagctacaaaaactcacaagacagaattgaccattcatgcttcagagtaacatgggatctgcccttatctgtacatttttgactcccattttacagctagtgacaccggtggttttttctacaaactgcctgggttcccaagggacaaccaaaaaaatggccccccaaaaacataggagggattcccccccttttcccgggggccaaggggggtaatttaacttatttgaccctgttgctcctttatttgactcacactccgggagaagttgctgcttgcacatgacatggagtcttctttcatgaggcgtatttgcttaatcctcaatataccctgcgaaacctcaccaatggaggggcgtttcctacgtgattagtgcatacatttgtgtgcaattttagcaagctgtctc

SEQ ID NO: 11205 - DNA, 369 bp, Glycine max
  Clone ID: jC-gmle01810052c09a1
ctatatagaagagcttacgcacttcttcgcgtcgaatccgtagcctctggtcttctagcacgtggttacacaacgctacatcactcgttcgaatggatgtggaaatctgctcgcgggggaccacactaagcaccgacactctccgaggccgatctccatctgtccagtcatggggcagagagttatagccccagattacagaggctgcaagaaatactggcttagcacagcactgatgtgcccttattgtaactccaccggcgctgactatagcaaattccgtttcatctgcaccgctcgtgacgctgtccatgaagttaaagcggtgactgactcatgctggaacaaccttggtattgcaggtgatac

SEQ ID NO: 11206 - DNA, 356 bp, Glycine max
  Clone ID: jC-gmle01810052c09d1
gggttaaatgttctcattcaatcaagggaaaaattaacactcacgatcattatggtggagacagacacactatggatgatattacgatcatcagaaaacgcagacataatggcaatgattctctgagagtatacaatgtacgttataagtgataacctttccggaccaaatatcccacgctttagggaaacacttgtttgggccgatagaccggggtaagaaaaaacttgtgtctttcaggacatataggaacatgggaccgcctttactatctgcttgatggcgaaggggactatcatcatccacgctgaaaacgggtgcctgagggttggccactccgtcttaacctctactga

SEQ ID NO: 11207 - DNA, 323 bp, Glycine max
  Clone ID: jC-gmle01810052c10a1
caacgaaacacccaacatggcatcctgagcctagaccacgctgcctttggcttgctgcgactagaacggccctactcaaccgaactacgctctgtcaagctacatgagagcctgaggctgcgagaaacccgcggtaccggctgcgtcggtgacctacccggaacccagcatgcttgcgatccgcaaaatccctcgcgactgctgatccccggggatcggtcccttcaaggaccgtcaagactatctatacaagcaggggcccaacgagctcttcaagcaccgcatgcaagagtacccgacaacggacttacgtacctacatgc

SEQ ID NO: 11208 - DNA, 420 bp, Glycine max
  Clone ID: jC-gmle01810052c10d1
atgtaaaatgtaaccatacaataaacttataaattatcacatactatcattctcgatgataaaaaaataataataataataatactatcatcatcctaaccggtcaaaaacaaaattaataacaaatattaattaattaattaactaattaattaactaactaactaaaagcttgctctctttagggaagtgatagtaacggaagaacccaagggagaagttccctttgtatctcggaaggaatcatagcgaagaaagaactccccaacgaaaagcctcgaaaccaaggtgacgaagtcttttccggcgcattgcttgttcccaagtgttggagactcagtctcaggcccattggaccacagcacgtgcttgaggagcttctcccgttcctccccgacgaacctgttcccgacaaactcc

SEQ ID NO: 11209 - DNA, 495 bp, Glycine max
  unsure at all n locations
  Clone ID: jC-gmle01810052c11a1
ctccagcgtccgattctctcaccgatctcgcgccaaatacaaattcgtgtcaacccaacccagggttccggcgagcatggccgacggtccggctagcccaggcggcggcagccacgagagcggcgaccacagccctcgctctaacgtgcgcgagcaggacaggtacctccctatcgctaacataagccgcatcatgaagaaggcacttcctgccaacggtaaaatcgcaaaggacgccaaagagaccgttcaggaatgcgtctccgagttcatcagcttcatcaccagcgaggcctctgataagtgtcagagagaaaagagaaagactattaacggcgatgatttgctctgggcgatggccactctcggtttcgaggattatatggatcctcttaaatttacctcactagataccgagagatgganggtgatacgaaaggctctgncaggggtggagactcatctgctaagagagatgttcagccaagtcctaat

SEQ ID NO: 11210 - DNA, 431 bp, Glycine max
  Clone ID: jC-gmle01810052c11d1
acaatataataataactttcaaataataattcgaatccaaagataatatacaaaccttaatttaaaaaaaaaaaacggacacaagaaccaacatctcctgtcagtattcacataacataaaaagacattcaatatgccgtgagcacttggtaactggcgtagaaaacatacgttacaacaagagggtcaataataacttggatacctactccgggcctggcatgggaaccatcatatgtggaccctgagaattcgggtaagtaacattttgtgagaaagaaccttgatgagcaagctgagcattaggacttggctgaacatctctcttagcagatgagtcttcacccttggcagagcccttcgtatcaccctccatctctcggtatctagtgaggtaaatcttaagaggatccatataatcctcgaaaccg

SEQ ID NO: 11211 - DNA, 478 bp, Glycine max
  Clone ID: jC-gmle01810052c12a1
ggaggtccagttgaaggtggatttagtgtcgcatttgatccccttgatggctccagcattgtggacacaaatttcacagtaggcaccatctttggtgtgtggcctggagataagttgactgggatcaccggaagagatcaagttgctgcagccatgggggttttgggtcctagaacaacatatgtgcttgctctaaaagacttccctggcacccatgaatttcttctgcttgatgaaggaaaatggcagcatgtcaaagagaccacagaaattggtgaaggaaaactgttctccccaggaaatttgagagccacatctgacaaccccgattatgctaagttgatcgattactatgtcaatgaaaagtacacattgagatacactggaggaatggtgccagacgtcaaccagattattgtaaaagaaaaaggaatcttcaccaacgtgtcatcaccatcagccaaagccaaactgagac

SEQ ID NO: 11212 - DNA, 450 bp, Glycine max
  Clone ID: jC-gmle01810052c12d1
accaacataatttaccttgttattatagggataaacagaaatgtgactaaattgcaggttcttgtctgaagatagcatatatctttttctaaaagcggataaaaatagacaatgaatggcaggtttaacagattaagcaggtggtccaacagctacaccacccttgagcctggatttaccatacagggttttttcaaaccggattatcttatttttggacccataagcaacttgagttctgtcatcaatggtactgatgactttgtctaacacagactgatgaccatcactgctgtaacctccagctttttgaatcaagaaccccagaggagctacctcaaacaacagtctcagtttggctttggctgatggtgatgacacgttggtgaagattcctttttcttttacaataatctgggtgacgtttggcaccattcctccaggggatct

SEQ ID NO: 11213 - DNA, 476 bp, Glycine max
  Clone ID: jC-gmle01810052d01a1
gtaaattgaaagtgatgaccacggacttgcaaacttgaagaatgcatatgtcggctactctgacgacttagacatcactgcatcttatggtggatctcactgataaacagatgaatagccctcacgaggatgaccttgatgtggtattaatggatacagcgtcaagattcagatgattgccatactgctggtactcataacactgaccatgaccctgctgctgctcaaccgttaatatacatactgccaaatcatgcgacagactattggactaggttacaaacaaatgcatgcctactggcatcaggcgttgccaaaaactctgacataatggatgactctgtgaaagatctcctatacgacgttctaaagtagtcctactatacaccttgcatgtgtcgaccatccatgctcccttaagttgattggacatttcaatactaacgcgcaatgtgcacggtgcattatagaactac

SEQ ID NO: 11214 - DNA, 525 bp, Glycine max
  Clone ID: jC-gmle01810052d02a1
ctgtggtgttgatgagctgggtagggtttactccttttctcgccaacccagttgcgagcttgaacgagaagatccttgccgaggtcaacgagtataaggccgtgaaggcctttctgctcgcttacagcacccttgctgaggattgggctaagatttcgccacctatctgatctatcactctgcatggccttctggttaactctgccattaagggagcgtccattaaggtgattagtgacgccaccgtcttctttaccggcaagtggatccctgaaatgttattgtaggctgcctctaaatgaatgatgtatgacatgaagggtgaacacgtatctgagatgtgctatgcgagatgtatgatgtgtgaatcttgaagtaatgtcttaagggcaagaagttgttagttaagattattagaggtagctctatgaacgaggcataataataaatgctgctttatggaccactatggaagaagattgtgtcaaataatggagctagcttgctagccttatgtgctatacg

SEQ ID NO: 11215 - DNA, 278 bp, Glycine max
  Clone ID: jC-gmle01810052d03a1
ctagtctgagatcgcaagcggtccaccttgtattacttgattaaccactgcacgcgaaccgtgtctgtattcctaccacgcgaggtatcatcacattggatgttcacataaaaaacactgttacctgcatggcgagcgtgcttacaccaatcgttagtgaatccaatgatgagaaacccgttgcaaacgatgagcgccgtcgtatgacgtacatcggctagattagtcgaaacgcaggatcgcacttaatacttaagggaggcctcgtcgagtactcg

SEQ ID NO: 11216 - DNA, 474 bp, Glycine max
  Clone ID: jC-gmle01810052d04a1
ggtgaacgcaccaggtttcactctgatgtgctcccttttaatcacatgtctgagcattttaacaaacagatatccttgtctggaaagattccatccggccaatttaatatcatgttcaacatgaaaaaatgttggcctacagacgcagcttctactaaaaaccttgcctatgatggatggttcataacattatataatgtcgaattagatagaaccaacataaccctttctgaaagtgtgaaaaagaatgtgcttaatcatggaaccccgcaacttttggtgagttcattgaaaaatttggtcccaaattaatagtggggtgccaatgggatggaaggatgtggttcatatcaagcagacaaaaaattcagatttacagcaggccgaactgcagaaattgcttaagcaattagctgatgagaggttttctgaggcttcaaatcataagtctaatgtcgatcctgctgacaaatc

SEQ ID NO: 11217 - DNA, 140 bp, Glycine max
  Clone ID: jC-gmle01810052d05a1
attggacaggcctattatcgtttacgtgaatgcctagaaatggttttggcatgccttgacagaacttgcaggaaacggtccttacaggagatgacatggtgtcgcaacagtggagagacgagaatattgcatgctcgctg

SEQ ID NO: 11218 - DNA, 246 bp, Glycine max
  Clone ID: jC-gmle01810052d06a1
atttaacaggcctattatcgtatacttgaatgcctaataatggtttaggaatgccttgacaaaacttgcatgatacgtttcttacaggagatgacattgtgtcgcaacagtggatagcacgagaatattgcactgtctctgctaagagtccgctacacattgtggccaggagcgcgctcttgccgatcctactgatctgaacacatgggatgggcaaatagctataactgagataggatctacgga

SEQ ID NO: 11219 - DNA, 339 bp, Glycine max
  Clone ID: jC-gmle01810052d06d1
ataatgaacacaaactaactgggttttattccggttgaaaaggactaaaactttattgattcccggtcttacgttttgcaagcctaactacccaacattctcatttataacatctgcctaatggagctgcccttctaaatatttgaacacttgtataaaatgtaagaacttttggatttaaacatgggaatctcctagtagattatctaattctacgctaaactctaacgcaacacacgaactatgattcttattgtgaacagataacaacattctactacctggactcgaacaggggcttcctccacccttgggattaattatgtaacaaaaatcatt

SEQ ID NO: 11220 - DNA, 482 bp, Glycine max
  Clone ID: jC-gmle01810052d07a1
cgaacaagaagatggctttacgtgttcctgctcttccgttgacatacgtggctcacgttctggcagttgttgccagcgtcttgttcgtggtctgggtcgccaatttcaggggtggcttggcttgggattctgatcacaagtgcctcatcttcaacattcatccagggcttattggtattggcttactagttcatgggggtgaacgctattataagctacacagcttttcccctaaggaacgaagtgaagaaattgatacaccttgttttccatgccatcgcattaatactaggaatagttggaactcatactgccttcaagtttcacagtgaaagtgggattgccaatctctacagctcgcattcatggatcggaattggggttattgtcctttatggcatccagaggatatatcggtttgcgatctttgtcttccctggtgggacttcagacattagacgcgcctcacttgcttggcacgc

SEQ ID NO: 11221 - DNA, 397 bp, Glycine max
  Clone ID: jC-gmle01810052d07d1
acttacaacaaattattttcttcctccaactccaaatacacccttggatagcccacatgatattattggataccctaaaatgttgacacaagacctacaagcgtctatatgggttaagggacaactgctgcaagagctgggggagcatctactataggggctccctcaccaaaggcaccgaattagaatgtgataatggccttgaacaaggcgtgcgggggctcacaaccgtatttgttcaaacccgaattatcaaggagagcgagctttttcctaaacccaagagcaacagtgcccacagccaaggcatattcaaacagcccatattgcgcctgccacggaagtgcccctcgaataatgtctggagttccagcagcgaataaaaagaccaccaacc

SEQ ID NO: 11222 - DNA, 561 bp, Glycine max
  Clone ID: jC-gmle01810052d08a1
cttcgatgacaccctcgtatctgccatcaaaacctaccaaaagaattacaacctcaacgtcaccggcaagttcgacatcaacactcttaaacaaatcatgacaccccggtgtggcgtccccgacataataatcaacacaaacaaaaccacatcgttaggcatgatctcggactataccttcttcaaagacatgccgcggtggcaagctggaaccacacaactcacctacgctttctccccggagccaagacttgatgacactttcaaaagcgcgattgcaagggccttcagcaagtggaccccagtggtgaacatcgcgttccaggagacgacgtcgtatgaaacagccaacattaagattcttttcgcgagtaagaaccacggtgatccgtatccttttgatggtccaggtgggatattgggccatgcattcgctcccactgatgggaggtgccactttgacgccgacgaatattgcgtggcgtctggcgatgtcaccaaatcgccggtgacaagtgcgtttgaccttgaatctgtggcagtgcacgagatcgggcactt

SEQ ID NO: 11223 - DNA, 459 bp, Glycine max
  unsure at all n locations
  Clone ID: jC-gmle01810052d08d1
gggagtntnttggntacgatccgagtcnagntctgcgaacggcattaatttcccggtgtcgacgacgctcacttagtcggcaggcccgccgcttctttctctttttttttaatggtgaagattgtgttcacaatttaattcacttatacaatataatgcgatcacgcgtagctatcaggcgtggtattatttccttacattgaagaggaaaaactacaaatacgaatatctttacagtgctagtttttgttgtctcttggaattagaaaacatttcacactcgatagactttcaatatcctttaatgcagattaccgaaataaaactctagttctagtacaaacaacacctagctataataattaggggttgataccatagagctttcgaatcccgtctatatcatgttgcgctagattcaccttcctagttcgagggggtatacaaggatacatgatg

SEQ ID NO: 11224 - DNA, 548 bp, Glycine max
  Clone ID: jC-gmle01810052d09a1
tatagggatgctccctcgcacaaagcaatgcctgccatcacctgaattctatgctccttttccctttatccgcattgctctcttctctttcaccgttttttgtctctgaatatccaagatcttcaaggacaatgttatctctgagaaacatttttctgaatagcgcttgatccggcgtgaaacattcaatcgctgataatttactgcttcactttgggctgtgcgagtggagcagcctattttactattaaaggcatattctcttacaaggttgatctgcacagagcatggcgtcttgcgatcaaatgggggaacttgcaaatgtggcacagctgactggtgtagacgctgtgcggttgattgggatgattgtgagagctgcaagcactgcacggatgcataagaaaaactgtaggcagtttgcacagcatctgaagttgattgggaacttgctggagcagctcaagatctcggagctgaagaagtaccccgaaactagggaacctctggagcagctcgaagatgctctaagaagggtctacatattg

SEQ ID NO: 11225 - DNA, 418 bp, Glycine max
  Clone ID: jC-gmle01810052d09d1
gccaagaaattaattcaaactattttaaaccagggaaacaaaaaaaaaaaaaggtttatgatacaccatcaactatttttaaaagcaacctttttcgagtccaacaaaataaaattactattcatagttaaaacgaggtcaggtgcgggaagaataaaaatacataattcctgccttcctgggaaaattttaatagccaaatacccttttttttaatatgatcttaagggaaccttgaacccccaacacccaaatgataatctcatttgttagtaaaaattccatgtcctgagagggtggagggcttgttttggtcttaaaaccactaagcccacggatctccacttctttccattcttgcacaagggcacagctgcaacacattaaatgagagaggaaatcttcaataaatccccct

SEQ ID NO: 11226 - DNA, 453 bp, Glycine max
  unsure at all n locations
  Clone ID: jC-gmle01810052d10a1
aatttccttttgcttcctagaaagagttagttcccggaagcttctctctttgcacttgcatgatttgatctccgccgtggattcgtgatggtgattttatgaacttcctcctctgccccctctttccttttctgattatcattatttttatatttaactagagagagagactcatccttccttcgagacatgagatgaggccgatgcaactgccaccgccttccgcttccggggccaaccctgcccctgcaaccaccaacaacaacaacaaggagcagcgtccccagcgccgccgcaaggacctcacgctgccgctgccgcagcgagacaccaacttggcggtgccgcttcctctgccgncatcgacggcgcctgctgcggcggcgagcggcggagcgagccagcaggcggcgcagcaggtgatccctttctcggagcttgagagactgaacc

SEQ ID NO: 11227 - DNA, 419 bp, Glycine max
  Clone ID: jC-gmle01810052d10d1
atggtaagaagaaaaacactgtaatgtatggctgaaaatccaatattaagatttgattctgtatgaaaatgaaaatgaaaatgaaaataaagcggcacacagggctagctagctaggcaataggcaataggcatgtagaaggatccatcatactaggagggaagaggccttggcggaggagggagtacctgatggaggtttggaggaccctatttgggttggcccggcggcggcacaaagaaggggttttcggcaaccttggaagcaaaccagcggcgagagggatcgcgctgaagacagcgcaagatgaagtccttgaactgagggaagcataacgaggagcctcgggaggctgacacatacaaatggcgcacatgagactggcccaatcgccctgcctctcaaccgcgaaggggaac

SEQ ID NO: 11228 - DNA, 485 bp, Glycine max
  Clone ID: jC-gmle01810052d11a1
gcgtcttctctttccaccaaaccattctcagccgacgctctctccgccttcgcttctctcaattccgatctcggatccctctcccccgcctacctccgactctcactccgtcctcgtcttcccaagagacttcgcatacaggcggctgggagtacctatggaaatcactttcgtgttacaacatatggggaatcacatggaggaggtgttggttgagttattgatggatgtgctcctcgccttcctctctctgaagctgatatgcaagtggatcttgacagaaggaggccaggtcagagccgaattacaactcctagaaaggagactgatacatgtcaaacattttcaggagtttacgaaggaatcactactggaactgcaatgcatgtatctgtacccaatactgatcaaagaggacatgactatagcgagatggcagtagcttataagcccttccatgcagatgctacctatgacatggagta

SEQ ID NO: 11229 - DNA, 295 bp, Glycine max
  Clone ID: jC-gmle01810052d11d1
ccagaaaggagcggagaaccgcatttattgtaaggggccacaacgcttattcagaccgaaagaccgatgcttgtcacccattggtataaatggggcctcttatagaacaccaccatctctcggttcctgacagggtatacaagaagcacatgtccccctcaatttgaaaaacctctatttacggaaaggggaacatgggtaatcttaaatgaagacaaattctgttatttcccccccgaaaaccatggtcacactgccaccatggactggtcaaccttgggagttaaccgggtta

SEQ ID NO: 11230 - DNA, 537 bp, Glycine max
  Clone ID: jC-gmle01810052d12a1
taaatattggaagcgatgagatggtcagcatgaatgagatggctgagatcattcttggctttgagaacaagaatattcctattcaccacattcctggccccgagggtgtccgaggtcgtaattcagacaatacacttataaaagaaaaacttggttgggctccaactatgaggttgaaggatggactgaggatcacatacttctggattaaggagcagatcgagaaggagaaggctcaaggtattgatatatcagtgtatgggtcttccaaagtggtgcagactcaagccccagttcaactaggctcacttcgagcagcagatggcaaagaatgaggtggtcaacatatggctgtagtagtattcacctaaatgtttcaagtgaagagttggattatatacagcaactaaatagcggtatctggttatttctaattagctgctaaggatttcttatgtatctgctggttgttcatgtttgaatcggaagccctgatgttcctaatgcattttatatagttttttaaggcacttcgtg

SEQ ID NO: 11231 - DNA, 476 bp, Glycine max
  Clone ID: jC-gmle01810052d12d1
cacaaggaagaaaagattatttgcttactaatcaattatttagacatcaaaattcaaaacaaataatttagagcttctagtgcagtaaaccaccttaagcaccacgaagtgccttaaaaaactatataaaatacattaggaacatcagggcttccgattcaaacatgaacaaccagcagatacataagaaatccttagcagctaattaaaaataaccagataccgctatttagttgctgtatataatccaactcttcacttgaaacatttaggtgaatactactacagccatatgttgaccacctcattctttgccatctgctgctcgaagtgagcctagttgaactggggcttgagtctgcaccactttggaagacccatacactgatatatcaataccttgagccttctccttctcgatctgctccttaatccagaagtatgtgatcctcagtccatccttcaacctcatagtt

SEQ ID NO: 11232 - DNA, 434 bp, Glycine max
  Clone ID: jC-gmle01810052e01a1
atacttgatgcgcttcttggcggggacacggcagcagtggcgtcttcgccggacagcactacttctacagtgatctgcttccaattgatgcccatctggcagatctacttcgacgagagcatagataccgattagctcgttatgatagagttctcactgatgaggtgcgtaacttgcaaattcatacagccagccactcacgccatggccgactagtctaacgacgtcgacttggtcaagatcgacgtctacgaatgacctgatgtggcgcaggagtgtcacgtgcaggcgatgccgactgtcgtgatgaggtataacgggatggaagtcgacgaggttgctggcgcagagtaggacgagctcgagaagatgattgagatacatggatcgtgagcttagctctgtaatactattcatgcagctagatatctttc

SEQ ID NO: 11233 - DNA, 319 bp, Glycine max
  Clone ID: jC-gmle01810052e02a1
cgccgtagatccagtgagcgttaaccttgtctgacttggttgaacagtacgcttatgagctcatcgagcatgccatgctcatcgtcgcaccggggaagggcatgctggcagcacatgagagctctggcacccttggtaagcacctgttaaacattctcgtagagagcattgctgcctctctccatgctctgcgcgtgctgctatccaccgattcagatgccatgcaatacctgagtggtgtcgtcctcttagtggaaacgctttgccatgaaaatggcctgtgggtaaccatgcgttacggtcctgatagagaacaatg

SEQ ID NO: 11234 - DNA, 579 bp, Glycine max
  Clone ID: jC-gmle01810052e03a1
accaatcttctctccacgcccttcttgggtaaccgtctgaagtgcagcaatggcagatggattgcattcgcagcatccatcggtagttcagaagttatctggacagtcttatcttgtgtccaggcttgctcctaatcactccagaaactgttctaccactggtagttacttcaatggaggtttgcagtcttcaggtttggttccagtcacggcacacgcgccggctgagaaaggggtgtctggatttttgttggatttcctgatgggcggagtgtcggcggctgtgtccaagacagctgcggctccaatcgaacgagttaagttgctcatccaaaaccaggatgaaatgatcaagagtggtcggttgtctgaaccatacaaaggaattggcgattgtttcactcgaaccatgaaggatgaaggggtgattgctctttggagaggaaacactgctaatgttatcagatactttcctactcaggctctgaattttgcttttaggattatttcaagaggcttttcaacttcaaaaaggataaagatggctactgtaaatggtttgcttggaatttagcatct

SEQ ID NO: 11235 - DNA, 478 bp, Glycine max
  Clone ID: jC-gmle01810052e04a1
gtcgactggacgttctataagtctacagagcgcttcttacagtacctgatttgtatacaccggctaatgttaaccctgcggcatcgaattctgtatcgcgcttgcactcaagtgtccaaagcttgcaagcatcagcgtacgactcatggaggaatatagtacgaagactgagttggagctatgacgttcagttaccagagtccatgaggtagtacccttatagatggatgcgactgagaggaaagagaggtgccgacattatgatgagtcgaatgatattcctaggctgaggataggcatctgccgtataaagtagagagaattacgtatgctataatggatagggtattacatgagctgtcagggaacgaagataagagccaggagataactcgaacacatggaggctcggagctagatgcgccgcaatggcctgaaacacttcataatgctcctggacaaaccgatggaaaatata

SEQ ID NO: 11236 - DNA, 352 bp, Glycine max
  Clone ID: jC-gmle01810052e05a1
ctttatctcaacatatcaattactttcccctgtttgagactaactgggtctatctttggtctgggcataactcctgtgcgttgcccccgctcatcgtttcatccctcatgtatgcacctctcgttagatgttgtggtattagctaaccgtgttgcttgacctgacgtgtgtatctttgtcgagcgttcacaatcggagacttggtgggttgcattgttgtgagaagatgagaagagctcgtggtgatgtattgaacgtggattaggctgatgcagtgaacaacctatttaatctacctgatgctatggagaagttcatgtacccttcgtgtagtgctcatgatcaccaccat

SEQ ID NO: 11237 - DNA, 192 bp, Glycine max
  Clone ID: jC-gmle01810052e05d1
attggaacaatgctgaagaagctcatacctaccagtaacaatttcaagctcgccgataaaccttacatgacaagccttggtcatacaaaaactaatctcactaaaggatgggtgcccatgccagggcccctaaagcacactctgtttcttaatgcagaagaatgttctgggcaaacgggtggacaaccccct

SEQ ID NO: 11238 - DNA, 577 bp, Glycine max
  unsure at all n locations
  Clone ID: jC-gmle01810052e06a1
ccttggtaagcttcggtattttcttggtatcaaagttgctcaatccaaggatggtgtggtgatctcacagaggaaatatgcccttgacatcctggaagaaacaggcctgttaaattccaagccagtaggcactcctatggatcctagtgtaaaactgtcaccagatcaggtggaaccattctcagaccctggaagatatagaagattggttgggaaactgaactacctcgcagtcactcttcctgatattgcctttgcagtgagcgtggtgagtcagttcctgaactctccctgccaggatcgttggaatgcagtcagttgaatcctgaaataaactaagagtgctcctggaaaaggtctcatttacgaagataagggacattctcaaattattggctattcagatgcagattgagtggagtcacctagtgatagacatcaggatattgtgtattgattggaggaaactcgatatcttggaaaagtaagaagcaaagtgttgtagccaaatcaagtgctgaagcagaatacagggccatgggcttagtgactngtgagctcatatggctgaaacaac

SEQ ID NO: 11239 - DNA, 298 bp, Glycine max
  Clone ID: jC-gmle01810052e06d1
gggcgaattcaaaatcaaattctcattaatgcagctataagagtagacaataagattgatagactttaatatttacaagttattttacatttcaaaaattcagattttcctttcggtgaaagaatcactgttaattagaaaacaaaggtcaaaagctttcccagtaccttgggaagttggttttgaacttcagaaatggagactcctagattacattgatgcccatgtttgccgacatttgacagcttcatggcgaacagctctctttgaatcgtcaagacactttgatattgctcgt

SEQ ID NO: 11240 - DNA, 553 bp, Glycine max
  Clone ID: jC-gmle01810052e07a1
gttagtctagcagaaacaattagagggtttaaattgattctttctggagaattagatggtcttcctgaacaagccttttatttggtaggtaatatcgatgaagctactgcgaaagctacgaacttagaaatggagagcaatttgaagaaatgactttaaatctttgtgtactgacccccaatcgaattgtttgggattcggaagtgaaggaaatcattttatctactaatagcggacaaattggagtattaccaaatcatgcgcctattgccacagccgtagatataggtattttgagaatacgtcttcttaaagaccaatggttaacgatggctctgatgggcggttttgctagaataaacaataatgagatcactgttttagtaaatgatgcggaaaagggtagtgacattgatccacaagaagcacagcaaactcttgaaatagcagaagctaatttgaataaggcgggaggcaagagacaaacaattgatgcaaatctagctcttagacgagctaggacacgagtagaggctatcaatgtgatttcata

SEQ ID NO: 11241 - DNA, 528 bp, Glycine max
  Clone ID: jC-gmle01810052e08a1
gttagtctagcagaaacaattagagggtttaaattgattctttctggagaattagatggtcttcctgaacaagccttttatttggtaggtaatatcgatgaagctactgcgaaagctacgaacttagaaatggagagcaatttgaagaaatgactttaaatctttgtgtactgacccccaatcgaattgtttgggattcggaagtgaaggaaatcattttatctactaatagcggacaaattggagtattaccaaatcatgcgcctattgccacagccgtagatataggtattttgagaatacgtcttcttaaagaccaatggttaacgatggctctgatgggcggttttgctagaataaacaataatgagatcactgttttagtaaatgatgcggaaaagggtagtgacattgatccacaagaagcacagcaaactcttgaaatagcagaagctaatttgaataaggcggaaggcaagagacaaacaattgaggcatatctagctcttagacgagctaggacacgag

SEQ ID NO: 11242 - DNA, 526 bp, Glycine max
  Clone ID: jC-gmle01810052e09a1
ttatcggaggtgtatttggtgtgttgatgttttattaaacttttgtactcttgctttgaaactagttggttagatttgaaattcttctaagatggatacttcttataggactggtggagtcaagtacgagtgcttgctttttgatatggatgacactctttacccattgagcttaggtctcaatttgttttgtcgcaagaacatacaagagtatatgttagaactcttgcatattgaagagagtgaagtgccaaaaatgtgtttggatttgtatagggaatacgggacaactatggcaggattaaaggtccttggttatgagtttgacaatgacgagtttcatgcttacgtgcatggaaggttaccatacgagaaactgaagcctgatccagtattaaggaaccttctgctttccatgcctcagcgtaaaataatattcaccaatgcagatcatgcacatgcagttaaagttctcaacagattgggtttggaagattggtttgagggcatcatatgctttgaaacg

SEQ ID NO: 11243 - DNA, 548 bp, Glycine max
  Clone ID: jC-gmle01810052e09d1
ctctcaaatttttagttctgcgatttacacttaataatttcacatccgtttcgtgatgccaaattgcaagatttatatattcaagcatcaccatgccgtggagacaatttcaaacttattgtaaatttagatagaaacatactgcagaggtagaaactcttgatttgcttgataagtctgctaaaaacattttatcgatgtaaaacttaagctaggaccatggtttcaactgttgggggttgaatcttttgctgttggttgccatcttcaatctcccaaatttcaggtaacgcttctttgatattatgaatgctgttcagggcatgatcagctccagggaccaaatctgaatggcccactaaaacagtgttaagtccagttatttttgcactttcaacatttctaacactgtcatcaaagaaaattgttttctttggatccacattagcaatccgaatagcagcttcaaaggcttccacagatggtttacagaggatttgtgggtgggaattgaaacatccattttctgttaaatctgtgagcacatg

SEQ ID NO: 11244 - DNA, 117 bp, Glycine max
  Clone ID: jC-gmle01810052e10a1
cggttgtagatcgggagcgaaatcgaagatccgaacggaagatactactaacatctgtgtaataacgacggaactagcttcttctgatgtggatgaggcatcagatgacgctgacaa

SEQ ID NO: 11245 - DNA, 224 bp, Glycine max
  Clone ID: jC-gmle01810052e10d1
catattgcacttaaacaacaatgagtgttttttttcctgtatagcccgacaattttattaccctcctggcaatgtaaaggaacaaacggggaatacccaccctgggaagagcaagcccagcctctctggatacaattagcttggactacataaccaccacccgtatcaagaggatacccaaaacattctcctactgtagcccacctagggcaatgctcattcta

SEQ ID NO: 11246 - DNA, 192 bp, Glycine max
  Clone ID: jC-gmle01810052e11a1
ctctctcccatgccatcgtacctccctccacccgcgttgtcggaatcctgagccgggttcaccgcgccggagactctgcgttctcaccgttgaactcggtttcgaatgatctacgcccatcatcgaccgtccttgtacgtagacggcgcctgtcttcatcgattgtgactactacctactgattcatcagtc

SEQ ID NO: 11247 - DNA, 298 bp, Glycine max
  Clone ID: jC-gmle01810052e11d1
cgggcccggtttacccatggctacttcattggtcaaaggagggaaaaaacgactaggcatatcacgccccaactaatttattttaaccgtacagcgacatcccaaccagactcgaatgaactgcattccatatacagggtttgctcacacagggctttaccaacgagaacgctggtgcctttgatggatggattctgacagcatactaccgttggcaaatttgatctcgccaatcaatgtatggaccatggtcccaggggagagtgtaatccccatatcggggctaccatgtccacct

SEQ ID NO: 11248 - DNA, 464 bp, Glycine max
  unsure at all n locations
  Clone ID: jC-gmle01810052e12a1
gcagcaaggtgatccaacggtcctaagcttgaggcctggtggtggtcgtggcggtggaagcaggcttttcgctcactcgtcctcctcttcctctctctccgccgatctccctctctcgcgccctcatgcctctttctctctcaagactggagattcacggtttgagggtcatgagcgtgtgcgatataccagagatcagcttttacagcttaaagaggctgttgaggtccctgatgatattcttaagattaaacaagatatagaagctgaactttttggtgaagatccaagttggggccgtgctgaaagcaatcttcctcatcaattacaaaatcggtattctgagccagataaccgtgattggcgtggtcgttctggacaacctnctgctagtacagatgagagatcttgggaaaacctcagagataaccgagagnttggtaatagacagcaggatgctagtc

SEQ ID NO: 11249 - DNA, 331 bp, Glycine max
  Clone ID: jC-gmle01810052e12d1
ggggcataaaacgaaaatgatttttatgagcggaccagttaaacaactcccctggcaagaaacataagtaaatggaaactaatgtaatacaaaaacattggccccctatggggaccccttcggagaaactgggcccctagcttaccggaaaaaaaaatccggagctttaggggtgggctttcccccaaaacaatctcaaaaaaacaaaaataaaattttccaggtggggaaaaataccggaaacgggaattttcactttataacatacttaaatacaaaagggttttactttaaaagggatgatgaaaatttggaaatttaaagcaccaaa

SEQ ID NO: 11250 - DNA, 536 bp, Glycine max
  Clone ID: jC-gmle01810052f01a1
ctctcttttgttgaattccttgaaagatgcaacgatgccgaaccctaaggtctacttcgacatgaccatcggaggccaaccggccggtcgcatagtgatggagctgtacgccgacacgacccctcgcaccgccgagaatttccgcgccctttgcaccggcgagaagggcgtgggccgcagcggcaagcccctccactacaagggctccgccttccaccgcgtcattcccaacttcatgtgccagggcggtgacttcaccgtcggaaacgggaccggtggcgagtccatctacggatcgaagttcgcggacgagaacttcataaagaagcacacgggtcccggcattctatcgatggcgaacgcgggacctggcacgaacgggtctcagttcttcatctgcaccgttaagacggagtggctcgacggaaagcacgtggttctcgggcaggtggtggatggccttgacgtcgagaaggacatcgagaaagtgggttccagcttcggtgagaccttccagcccgttgtagtgctgactt

SEQ ID NO: 11251 - DNA, 561 bp, Glycine max
  Clone ID: jC-gmle01810052f02a1
gcacataacaatggaaacgcatttttacgtgttttctctctagattctgctcttaaacgccgtcgttttcaaactctttttttccccttcgcttctctgtctttgtaaccgaaaggggggaaaatataattaacaccgatttcgcgaccaattcttcttctgcgttgaattgggacaacgagaaattggatctcagtttttggcaggaaataaaaattgcatttgagtgtaaaataacagagtatagtgtagggccttgttcttgatactgtgctaaatttgttggatggcggagaaatcatgcatcaagcgccttcagaaggaatatagagccctttgtaaagagccagtttctcatgttgtggctcgtccttctccaagtgatattcttgagtggcattatgtgttggagggaagtgaatgaacaccttttgcaggtggatattactatggaaaaatcatgtttcctcctgaatatccatataaacctcctggaatcagcatgactacacctaatggactgttcatgacacagaaaaagatctgtttgtctattagtga

SEQ ID NO: 11252 - DNA, 327 bp, Glycine max
  Clone ID: jC-gmle01810052f03a1
cttgcaacgggtcagggtacagaggcatcacatgtaaacgaggctatagatctggcagaaaaatttgcgtcgatgaaattgagttaatggtgtatttgcagtatatccttcctggggtgtaagcatgatatggatctttcgtttggtggtataatcataatcatacagaagggaagggcacttgaagtaattattagatccggatgagttgaacaaatttctaatttagtgcctgaatatttttttgctctgatagattatgaagatattttgaaattttaaaaaaaaaaaaactttacaactttaaagacaaattaatcctactgt

SEQ ID NO: 11253 - DNA, 429 bp, Glycine max
  Clone ID: jC-gmle01810052f04a1
cgaatattgacggcatcggcttgcaccatggggtgttccgtccttagcgagcttcctagactgctaagggctatgtgcgtgcagcgactaaggtgatgcctacagagatgatgatcaagaccgtgaggtctacgaaggctattgccggtgaacacgagccattgtgaggtacgactgggacgtttccgttgatggcaaatcggtcaatcacactgatgggatgtggcattgtccccagtgttgatgcatatcaggatggcaactgtgatgaggaagacgctattgatgaaggctactttggtacacttagtgcaagaagccatgctcctatggtgagtggtctagatggagctcaaatctgtaagggctaatgtgctgatgcagagtctgtgacgcaatgtgacaatgtatggactctagagatgcgca

SEQ ID NO: 11254 - DNA, 400 bp, Glycine max
  Clone ID: jC-gmle01810052f05a1
gtgcctgattagacaggcggaagatccagaaatggtggcagggaacgtgacgaaacgatcgcgaagatgccatgctataacacactggttatgaatgatcagaacaggatacctgtagctttcacagtcatgtgcttcatgacacgcggatatggtgatgcttcagacgcactaccaggaaccaatctgtcgactccgaacttattacagctgttgagataccacggctactggttctcctacgacaaagaataacagcattcaagatatggcagaacagacaccgctgtcatctatgccggacacgtgattcatccttacttaagatcacacctccagacttacgtagcatgtcataaagattctgcacctgctgaaaatgagcgccatgaagaggaaa

SEQ ID NO: 11255 - DNA, 438 bp, Glycine max
  Clone ID: jC-gmle01810052f05d1
gtcaaaaacaatggaagtcatattgaattaaccatactatattgaacaaaatcatgatccttcaagggaaagttttcaaatgctgaccgaaagagattatgttttggtgatgaccttccaaatctgcatgcacctgcgttgagtatggctgggctacatttatatgaaggctgaacaggccccgacataagaggtacatggggaaccgtccgcttgaatccttgatcatgcaaaacggtatagatcattgaggggaggcacagacgttttattagctttatgaaccgattgagcatgaggctgtggaacagggcagttgactaccacgggtaaatgttatgagtttcccgccggtgaggaacacataagcgaacagttgaccatttaaccggagcgtggaacgattggttccgtagaagacccagtgttctggggttt

SEQ ID NO: 11256 - DNA, 353 bp, Glycine max
  Clone ID: jC-gmle01810052f06a1
atgtgagagccttctgtccctaatggttgacaagaggcgacaccggaaaacagcaattctctccctgaagaaatctggtcccgagcttcctgagctcctcacacaattttctgccagcattgccggtactggccttgctgtcctgctatctgtgatctgtaagctagcttgtggaaggggggttcccttttgtgcttataagctcctcaacactgggtttggatttgggctggtttggctttcttgggcagttaataagctaagggatacaattgtctgcatgaacaagaatgcaggaaagcttggactgaaagatgaggaaatgattcaaaaggtcgacaagagcctaagag

SEQ ID NO: 11257 - DNA, 508 bp, Glycine max
  Clone ID: jC-gmle01810052f06d1
caccaaaacagtttttcattgcaaaattttacattactttttacaatttgtcttaccgccctagtaccaagcaaacgagtatgttctttgctttgattattgaaatgaggtactaaccataccgtaagtacaccacccaagtgctgatcaagccaatcatccacaatcttgtgcttccaagatcaagcaaaggttcatttggtttgaaaccaagattgctttgctatcacatcctcagtacccatggcaacggacatccaactgatcaggtacaatggatgttccaatgtgtggccttgcaacgcttaccgctcttcaaactcaagcgatcatgtcttcagaggtagtactcaagcaagccttagcactgccactgctagcaatgcggcggctctgaagtaaacttctcttaggctcttgtcgaccttttgaatcatgtcctcatctttcagtccaagctttcctgcattcttgttcatgcagacaattgtatcccttagcttattaa

SEQ ID NO: 11258 - DNA, 491 bp, Glycine max
  Clone ID: jC-gmle01810052f07a1
gcgacaacacatgtttctctcattcggtgctcaattctccttcgtgttctgcactgcggtttgcaggcactaacagtttaacaatcattctcaaaccccgtcacaggtgtgccttcattgaatgttttgcttttggatacttgaaaggaaaccacgtgctgctttattctcgactgctcgagaaggtttgtcaggagttcatattcaatagtctccagtttactttaccaaatccagcgaatgctgaaagatgcggttgaaagtcaagaggtccctgtctcaggttaatgaggttggagctccatctgaggtagccatattgatcctcgatgagattggatgtgcagatcagtgccaacatccattatatgctcatctgcctgaggtggctgggaatcttaggaattggacgatgtcacaacgggatgtcagtgaagatggatgagctctgagcatctttggaatagtgcactgcgttctggacacataag

SEQ ID NO: 11259 - DNA, 515 bp, Glycine max
  Clone ID: jC-gmle01810052f07d1
gaatgaaacacccaaattggtgaaatttgcaatttaggtacacaattgttcaagtatccatcagacaagaggaggctgaaccagccacattattctatgagtcctattaaaattaagcacttgactaagataatgacaaaagaagcacagtgcatacaaaaaccaaggggtgaaatattgatcatgaaactaagcagtttgagaaggttggtgctcttcctggactacttcatgttgctcttgctcttgctgtggtttttctccttgccaggtccaaacaatgtacttaagcgctggtcttatatcctgtttaaaaagcttgtggtactccatggtgtcaccattggactttctaagttccaccatatggaaggtggggtaatcttaaaaatctcagcatcaacacccaaagatcctttcctgccttccttggaaccttccaatttgagcaagcctccatctttcttctttactttcaagcaaagccgcttacaaatttattgcaacttcaagac

SEQ ID NO: 11260 - DNA, 446 bp, Glycine max
  Clone ID: jC-gmle01810052f08a1
gttagtctagcagaaacaattagagggtttaaattgattctttctggagaattagatggtcttcctgaacaagccttttatttggtaggtaatatcgatgaagctactgcgaaagctacgaacttagaaatggagagcaatttgaagaaatgactttaaatctttgtgtactgacccccaatcgaattgtttgggattcggaagtgaaggaaatcattttatctactaatagcggacaaattggagtattaccaaatcatgcgcctattgccacagccgtagatataggtattttgagaatacgtcttcttaaagaccaatggttaacgatggctctgatgggcggctttgctagaataaacaataatgagatcactgttttagtaaatgatgcggaaaagggtagtgacattgatccacaagaagcacagtggactcttgaaata

SEQ ID NO: 11261 - DNA, 532 bp, Glycine max
  Clone ID: jC-gmle01810052f09a1
ggggcgtataattgaatttgctgaaaagccaaaaggagaacagttgaaagctatgaaggttgatactacaattttgggtcttgatgacgagagagcaaaagaaatgccttatattgctagcatgggtatatatgttgttagcaaaaatgtgatgttagacctgctccgtgagaagtttcctggtgcaaatgactttgggagtgaagtgattcctggtgctacttctattggaatgagagtgcaagcttacttgtatgatggctactgggaagacattggtacaatcgaggctttctataatgcaaatctgggaatcaccaaaaagcctgtgcctgacttcagtttctatgatcgttcatctccaatctacacccaaccacgatatttgcctccctctaagatgcttgatgctgatgtcactgatagtgttattggtgaaggatgtgtgattaagaactggcaaattcaccattctgaggttgggctgcgatcttgcatatcagaaggttgcaatattgaagacacgttatta

SEQ ID NO: 11262 - DNA, 506 bp, Glycine max
  Clone ID: jC-gmle01810052f09d1
acgaaataaagaaacttgttttattgaattgattaacgaactttacagcgtgattgctcatagcgggccttctcttccgctattatttacaagccactgcccaaaaatatatatcatgaaacacaaaagcctatcttagacgtggaagcagagcttgataaactctcctgcggtagtaatgagcttcgcagtcaccattaggatttggggtacaagaaatttttgggggagggggttgtgttaaaatgactgttccactaggaattaaagcatccttgattactgtgacaatcccactttttatgaaatacccatctgtttcccttgcagcttcttggacattgtcactgttaataatcttgacattttccccaattcgagcattcttgtcaataattgcccttttgatatgagagttcctgcctataccaattggaacactgcctttggcagccagaaacctcttatcagcctccgtctcgtaataatctgcccccattaataac

SEQ ID NO: 11263 - DNA, 517 bp, Glycine max
  unsure at all n locations
  Clone ID: jC-gmle01810052f10a1
ggggcgtataattgaatttgctgaaaagccaaaaggagaacagttgaaagctatgaaggttgatactacaattttgggtcttgatgacgagagagcaaaagaaatgccttatattgctagcatgggtatatatgttgttagcaaaaatgtgatgttagacctgctccgtgagaagtttcctggtgcaaatgactttgggagtgaagtgattcctggtgctacttctattggaatgagagtgcaagcttacttgtatgatggctactgggaagacattggtacaatcgaggctttctataatgcaaatctgggaatcaccaaaaagcctgtgcctgacttcagtttctatgatcgttcatctccaatctacacgcaaccacgatatttgccttcctctaagatgcttgatgctgatgatactgatagtgttattggtgaacgatgtgtgattaagaactgcanaatttaccattctgtggttgcgctgcgatcttgcatatcagaaggtgcaattatt

SEQ ID NO: 11264 - DNA, 527 bp, Glycine max
  unsure at all n locations
  Clone ID: jC-gmle01810052f10d1
acgaaataaagaaacttgttttattgaattgattaacgaactttacagcgtgattgctcatagcgggccttctcttccgctattatttacaagccactgcccaaaaatatatatcatgaaacacaaaagcctatcttagacgtggaagcagagcttgataaactctcctgcggtagtaatgagcttcgcagtcaccattaggatttggggtacaagaaattttttggggaggtggttgtgtttagatgactgttccactangaattaaagcatccttgattactgtgacaatcccaacttttatggaatacccatctggtttccttgtgcacttatttgccatggcaatggtaataatcttgacattttccccaattcgagcattcttgtcaataattgcccttttgatatgagagttcctgcctataccaattggaacactgcctttggcagccagaaacctcttatcagcctccgtctcgtaataatctgcccncattaataacgtgtcttcaataattgcacct

SEQ ID NO: 11265 - DNA, 429 bp, Glycine max
  Clone ID: jC-gmle01810052f11a1
gcgacgaggagacccaacgggactaagcttgaggcctggcggtggacgagacggtggaagcacgctgtgcggtcactcgtactcctcttgctctctgtgcggcgatctgcctatgtcgcgcactcatgcctatttgtgtctcaagactggagatgcacgggttgagggtcatgagcatgtgcgatataccagagatcagcttttacagctgagagaggctggtgaggtccctgatgatatgcttaagatgaaacaagagatcgaagctgaactttttggtgaagatccaatgcggtgccgtgctggaagcagtcttcctcatcatatacaagatcggaattctgagccagataaccgtgattggcgtggacgctctggacaacctcctgctagtacagatgagagatcttgagaggacctcacagatta

SEQ ID NO: 11266 - DNA, 239 bp, Glycine max
  Clone ID: jC-gmle01810052f11d1
ggaaaactatgttattttataactgttatttgaagcgggagcatttatacgagacactaagcaactatgaactatgaaggtaagagcgttaatatgtctggggtacacacacttaaggccatagtatccatttgcgatcaacaacatcggccaccttatgtgatacattatgcaaaaaaaggtaggctatatttccataaaacaaataccctcattttttggggtggtttatccctcct

SEQ ID NO: 11267 - DNA, 442 bp, Glycine max
  Clone ID: jC-gmle01810052f12a1
tgtaaaactcaaacacacttctataatggatcggaaaagcctcctctgcctcgaaatcatcgccattggcgtcgccgtcgacggaggacagtctgcagcggcgacggccaccacttatactggggttggcaccaccactacctatgcatgcccagtcacaggcccttctaagccaaaatcaccggcgccagtagcttctcccacgtcatcatctccaccagcttcgtccaccaatgctgcaaccgtaaccacacccgctgcatctcccacagtagcatctactgcgtctaaagctgccgctccagctccaggggctacaccttccgcagtcactccttctgcggctacaccaccggcagccacacctgctgccgggactccagagagttcgtcgccagcgccagttccggtgagttatccagctgctcctgttccggagagc

SEQ ID NO: 11268 - DNA, 406 bp, Glycine max
  unsure at all n locations
  Clone ID: jC-gmle01810052f12d1
ggggcttggagtactaaaataataatagggtcaacaaacatcatggcttataaagtaataagagattgaagaaaacaatggttattaaattaattttaaccccccgactgggtccaatccagacactcaatgatccaataatactatgtaacagcagcactgaagcctaaacctattctctagaataacactacttgggcagcccagctcaaggctaagcttccattgccttttttaaagaacctgatggttgaagttccactctggacctaagatactgctggaccaggagacatggaatcctgacttgatcccggagctcctaccggaggaacgggagggccaagcaatgacggcgacggtgctggtgcattgngctatttactcttctttgtcatcttctttg

SEQ ID NO: 11269 - DNA, 535 bp, Glycine max
  Clone ID: jC-gmle01810052g01a1
ctgttctagaaatgcaaatgggaaatatcaggagagcaagagagttgtttgatgctgccacagttgctgacaagaggcatgttgctgcttggcatggatgggcaaatctagaattaaagcagggaaatctaaagaaggcaaggattctacttggtaaaggtcttcaatattgtggacagaatgagtacatataccaaacacttgcacggcttgaagctagagcaaatagatatctgcaggctcgatatttattcaatcaggccactaagtgtaatcctaataggtgtgctagttggcttagttgggcgcaaatggaggtggagcatgaaaactaccgtgctgctaggaaattgtttgagaaagcagtacaggctagtcctaaaaataggtatgcttggcatgtatggagcgtttttgaagctaacatgggcaacattgacatgggaagaaaacttttaaagataggtcataatctaaacccaagggatgctgttctacttcaatctcttgctttattagaataccaatactcaac

SEQ ID NO: 11270 - DNA, 553 bp, Glycine max
  Clone ID: jC-gmle01810052g02a1
ctgttctagaaatgcaaatgggaaatatcaggagagcaagagagttgtttgatgctgccacagttgctgacaagaggcatgttgctgcttggcatggatgggcaaatctagaattaaagcagggaaatctaaagaaggcaaggattctacttggtaaaggtcttcaatattgtggacagaatgagtacatataccaaacacttgcacggcttgaagctagagcaaatagatatctgcaggctcgatatttattcaatcaggccactaagtgtaatcctaatagttgtgctagttggcttagttgggcgcaaatggaggtggagcaggaaaactaccgtgctgctaggaaattgtttgagaaagcagtacaggctagtcctaaaaataggtatgcttggcatgtatggggcgtttttgaagctaacatgggcaacattgacatgggaagaaaacttttaaagataggtcataatctaaacccaagggatgctgttctacttcaatctctggcttattagaataccaatactcaactgcaaacgttgcccgggtt

SEQ ID NO: 11271 - DNA, 544 bp, Glycine max
  Clone ID: jC-gmle01810052g03a1
gtctttgaggagatgtcttcctttgtcaccaatggcgatgattctctcactggccacatcatatctacaactattggaggcaaaaatggggaacccaaacagactattagttacatggctgaacgggttgtaggaactggatcatttggaattgttttccaggcacaatgtttggaaactggggaagcagtggccattaaaaaggttttacaagacagaagatacaagaatcgtgaactacagttaatgcgtgttttggatcatccaaatgtcatctctctgaagcattgattcttttcaactacaagtacagatgagctttctcttaatttggtgatggaatatgttccagagtccatgtatagagtcattaagcactataccattgctaatcaaagaatgccaatcatctatgtaaaactttacatgtaccagattttcaggtgattggcttatatccacactggtaccaaagtttgccacagagacttgaagccttaaaatatacttgaggatcctcttaacaccaagtgaagctatgtga

SEQ ID NO: 11272 - DNA, 341 bp, Glycine max
  Clone ID: jC-gmle01810052g04a1
gtctttgaggagatgtcttcctttgtcaccaatggcaatgattctctcactgtccacgttatatctacaactatcgtgggcacatatggggatgccaagcagactattagggacaaggctgaacgggccgtaggaactgcagcattcggtattgcggtgcaggcaatacgtctggaaactgtggaagcactggccagtgaaatggttacactggagagaagagaccagaatcgagaactgcacttactgcgtgagttggatcatactactgtgataactgttaagcatggccacttgggaactacggggacagatcagctttatgctaatacggtgatgga

SEQ ID NO: 11273 - DNA, 126 bp, Glycine max
  Clone ID: jC-gmle01810052g05a1
caagagccgatgaaagcttgggttcatgaccatgatcgtgatttgcgtgttggacatactgaaggtaagacttcgcgaacagagcttgttggaacctgcggacgatgtacaacttgcactctacag

SEQ ID NO: 11274 - DNA, 206 bp, Glycine max
  Clone ID: jC-gmle01810052g05d1
ctcttagaacacttaatagactattgaccatcaaatgaaaaaccgaacacgatactggacaaatggcaattacatatctgttcacccaagactcaactgcgctggggtatacctgcaggtgtgtgtacactttgacagctatttacgatgcggatagcgaaacccccagccaagcggatgcgcctgggcaatagcatcgtcggcaa

SEQ ID NO: 11275 - DNA, 362 bp, Glycine max
  Clone ID: jC-gmle01810052g06a1
tagctctagccgaagtaagcttggtttcatgaccatgatcctgaattacgtcttgcagaggctgaaattaatatttcgcgaacagagctcattggaacatactgtccatcattaacatgtactatataggtcactttgattagcttcttctatctagcagagaccttttatgaacatatctctgctagcttatgatcatcatctaatcgtcatgatcgatactcttacgtgtggaaactgagacgagtcattggcgcactgtgtatctcattgactccctgtctgtactaagcgaacgtgaatgatccttgtcattcacctaacatatacgtatttactgtactggttctaagtttaactat

SEQ ID NO: 11276 - DNA, 526 bp, Glycine max
  Clone ID: jC-gmle01810052g06d1
gctgtgctaattgttttttctccttgaatttgataaaataattatggattcttacagtgtacaagtcagagcgtattttatagtacaaacataattctgtgacttgcgtgtatgattatgcaacatatcattcggatgttccatcaatgaatagactcatgaactcttcaccatacacagtttctttttctatgaaaagttgagcaagcttgtgaaggatatcaatgtgagttgagagaatatgtgttgccctagaatatgctgtctctaccagttccctcacttccggattcactacatccgcagttgccatggagtaatccttttgcgatgacatgtgttgacccaagaatggatttccaccaggtccaccaatggcaacttgtccaattttttggttgaatccaaatctctcaaccatctgccttgccactcgtgaaacttgcatgaagtagtttgatgctccggtggtgacattttcctggccaaaaataacctcttcagcaacccttccacccagggcaac

SEQ ID NO: 11277 - DNA, 574 bp, Glycine max
  Clone ID: jC-gmle01810052g07a1
gcgacaacacatgtttctctcattcggtgctcaattctccttcgtcttctgcactgcaatttgcagccactaacagtttaacaatcattctcaaaccccctcacaggtatgccttcattgaatgttttgcttttgggtacttgaaaggtaaccaggtgctgctttattcttgactgctcgagaaggtttctcaggagttcatcttcaatattctccagtttactttaccaaatccagggaatgctgaaagatgtggttgaaagtaaagagttccctctctcaggttaatgaggttgtagctccatctgaggtagccttattaatccttgatgagattggatgtttagatcactgccaacatcaattatatgctcatttgcctgaggtggctggaaatcttagcaattgtttgatttcaaaacgggatgtttgtgaagatggatgagctttgagcatctttggaatagtttactgctttctggtcacataagcacctgtatttagtggatacttagtatattatcctattggtagtagcattggttgatgctaaaggatagttacagtaaatgag

SEQ ID NO: 11278 - DNA, 337 bp, Glycine max
  Clone ID: jC-gmle01810052g07d1
gaataaaacacccaaattggtgaaatttgcaatttaggtacacaattgttcaagtatccatcagacaagaggaggctgaaccagccacattattctatgagtcctattaaaattaagcacttgactaagataatgacaaaagaagcacagtgcatacaaaaaccaaggggtgaaatattgatcatgaaactaagcagtatgagaaggttggtgctcttcctggactacttcatgttgctcttgctcttgctgtggtttttctccttgccaggtccaaacaatgtccttaagcgctggtcttatatcctgtttaaaaagcttctggtactccatgggg

SEQ ID NO: 11279 - DNA, 468 bp, Glycine max
  unsure at all n locations
  Clone ID: jC-gmle01810052g08a1
gaggatgagttcagtttcacgaccgatcctacaatggcgacagtcacgttgtccttttccgctaaaaccctaactctaccttatcaccccaaaaccccaatctccaactttaccccggtaacgaatcttcgcctccctgcttctatcgtgacccgaacccgcaattgtaaccggattcgggcggcgctggatggggatttctcggcgaaaaggagcagcagcagcaacaacaacgaccagagggagacgataatgttacctggttgtgactacaaccattggctgattgtgatggagtttccaaaggaccctgcacccacccgtgaacagatgattgacacgtacctcgacactcttgccactgtcttgggaagcatggaggaagctaaaaagaacatgtatgcctttagcaccaccacttacactggatttcagtgcactgttgatgaagcaacctncgagaaattc

SEQ ID NO: 11280 - DNA, 204 bp, Glycine max
  Clone ID: jC-gmle01810052g08d1
ggctgcttaagataatgacaaaaggctatatatgcatattatctaaacttgtacagttcatatcagccactttatgtgttaatattgtagctgccatgaaacttgcagaaaaagttatcacgaacacaaactggttgcacgataagtggctctccaaataacccagacaattaaccctagcatttgccccacgtgttatcctta

SEQ ID NO: 11281 - DNA, 282 bp, Glycine max
  Clone ID: jC-gmle01810052g09a1
atcgtcgtaacattattctattaccaatggcgcatatgtctaacatgaacataatcatgtgcatgccgccgatcaactctgaaacctctattgctgcaccacgcagtaagagtggcatgaggaccatagctgacggaaggacgactgctactggtgcacagagacagctggaacgaacgacgacgagagagggccagacaaggacgatgccgtcggatacgcgcgtcccgatggtacagacacgcgctgaaatcctggcgactactgagaagctgagaacag

SEQ ID NO: 11282 - DNA, 509 bp, Glycine max
  Clone ID: jC-gmle01810052g09d1
ccacttaatatgtggttatgctttatataatttcacccttacggcctaataatgattattcccttgcaaaatgcaaaaacaatatatagaaattgacaaactccatggtctgctacttcataactaggcttttatctacatccaataaattacttatattaacccaaacagtatgtttgggcccaaacaaaaaggtctggttggaacattaaggaacattagggggtggccaagcaattctacgaagttccatacttacagctgaagcttcctcccccactctgttgtgcatgctaaaaaataacacggccagcacaaacatcccaaggccttgttttccccccaagagaaagagtttgagataacctgcaaaaaaaggcgcatagcttttactttgctttcactgaaagatctttattctccttactggattcaactggaaatctgtctaggagtatgggagaacaattaagataatttgcaggaaccagcgaacgcaggggctgaat

SEQ ID NO: 11283 - DNA, 291 bp, Glycine max
  Clone ID: jC-gmle01810052g10a1
ctcaatcccacctcgggtagcaattgtgtaaacgaaggcggatatgtttcacctggacagaatgatcagcgagccgccgttgaggtctcctacccctaaattgacaccgcgcatgagggacggaatgacgaccattgccggaggaaggccgatgctactggtgcgggatccagcggtcacgaccgactacgagcgggggccggacatagaagaagcgatcgggcacgatcatacggctgcacgagtgaacgatgcaggccatgacagatacggagatgcagacgtgagcct

SEQ ID NO: 11284 - DNA, 364 bp, Glycine max
  Clone ID: jC-gmle01810052g10d1
ggggggggggtaaaaaaccaacagggtaacttcaaaaaaaataaacacaaaaaatgttttaaaaaatggtggccacatggcttgcacaaaagtttaggttctttccacacgcttcacttgatctgacccatgggtgaggatttcacccccaagaaaaaaatttgccgttacgcttctttgatgaaaagaaagcggggcttccttgagggtgagaaccccactggcaacaaaggacccttgcaaaatccaattctaccttgaaacaccgggggcagacccccgtttgggccttactgttggaaagtcctttcctggtgggcggtccaataaaaaacgcttccacctccgtttggcccgtttattt

SEQ ID NO: 11285 - DNA, 439 bp, Glycine max
  Clone ID: jC-gmle01810052g11a1
gggagggagatccaaaaagagagagtggaaaagatggcgcggttgatcacagcggtgtggtgcgcggtggcggtgctattatgcgccgcggacggtgcgtcgtgggtggaggaggcggcgaacccgatacgaatggcgtctggcgtgtaggcagaagtggatcgggtgatcggggagtgccggcgtgcgttgaagtttgctaggttcgtgagcaggttcgggaagagttaccaaagcgaggaagagatgaacgagaggtactagatattcgcgcaaaatcttaggtgcatccgataccacaacaagaagcgtttgcgcctatactctatatgttaatcattttgctgattggacttgagaggagctcaaaagacacagactaggagctgcccaaaattgctctgccactcttaacggcaaccacaagctcaccgatgct

SEQ ID NO: 11286 - DNA, 445 bp, Glycine max
  Clone ID: jC-gmle01810052g11d1
agcaaagacaatgctatcttataactgatatttgaagcgggagcatcaatacaatacaatatgtaactatgaactatcaatatatgatcgttattatgtctgtgatacacacaattaaggccataatatacttatgtgatttacaacaacttctagcttattttatacatcatgccaacccaactaggagcaattttcatcatacaattacacttatctttaatcatcattcatcaatactggcatcagcaatacgctctaaactctgaagcatgacaaggtggtagtcaccagggaccatattgttatgcaatttatgccacaattggataagatgcacaagttgcaacaccacacatgttcttccccaattccatcttgaagtagccattttcaccccagctttctacccatgaattttttatgagccaatatgggacaccat

SEQ ID NO: 11287 - DNA, 490 bp, Glycine max
  Clone ID: jC-gmle01810052g12a1
tctcaaactcaaacacacttctataatggatcggaaaagcctcctctgcctcgcaatcatcgccattgtcgtcgccgccgtcggaggacagtctccagcggcgtcgcccaccacttctcctccggctgccaccaccactccctttgcatccccagccacagccccttctaagccaaaatcaccggcgccagttgcttctcccacgtcatcatctccaccagcttcgtcccccaatgctgcaaccgcaaccccacccgcttcatctcccacagtagcatctcctacgtctaaagctgccgctccagctccggtggctacacctcccgcagccactcctcctgcggctacaccaccggcagccacacctgctgccgtgactccagtgagttcgccgacagcgccagttccggtgagttctccacctgctcctgttccggtgagctctgcacctgcactcgcaccgacaactcccggacccgtggtagcaccc

SEQ ID NO: 11288 - DNA, 444 bp, Glycine max
  unsure at all n locations
  Clone ID: jC-gmle01810052g12d1
ggagcaaggagtactaaaataataatagtgtcaacaaacatcatcaattataaagtaataagagattgaagaaaacaatggtaataaatttaattttagccccccgacagggtccaaaaaagacaataaatgatacaataatactatgtaacagcagcaatgaagcctcagcctcttctctagaagaacaaaacaagggtagcccagctcaaggctaagcatccaatgaccttcttcaagcacctgatggtttcagctccactctcgtcctcagatacagctggaccaggagacatggaatcctggcttgatcccggagctcctaccggaggagcgggagggccaagcaatgacggcgacggtgctggtgcagtgtgcttcttactcttctttgncttcttctttgacttgggagcgggtgccggaacctcagcgctgggtgct

SEQ ID NO: 11289 - DNA, 475 bp, Glycine max
  Clone ID: jC-gmle01810052h01a1
ctgttctagaaatgcaaatgggaaatatcaggagagcaagagagttgtttgatgctgccacagttgctgacaagaggcatgttgctgcttggcatggatgggcaaatctagaattaaagcagggaaatctaaagaaggcaaggattctacttggtaaaggtcttcaatattgtggacagaatgagtacatataccaaacacttgcacggcttgaagctagagcaaatagatatctgcaggctcgatatttattcaatcaggccactaagtgtaatcctaatagttgtgctagttggcttagttgggcgcaaatggaggtggagcatgaaaactaccgtgctgctaggaaattgtttgagaaagcagtacaggctagtgctaaaaataggtatgcttggcatgtatggggcgtttttgaagctaacatgggcaacattgacatgggaagaaaacttttaaagataggtcataatct

SEQ ID NO: 11290 - DNA, 405 bp, Glycine max
  Clone ID: jC-gmle01810052h02a1
ctgctctagacatgcctatggttattattgcgatatcaggagagtgggaagatgctgccacaattactgccacgacgcatgcagctgctttgactacatgcgctactccacaattgccgccggcaactctcaataacgcgagctttgtcgttggataagggccgcaatcttgtgcacagaatgagcacatatcccatatactcacaccgattgaaactagagcaactacagatacgcgagctcaatatcgatccaatcaggccacgaggtgtggtcctaatagctgtgctatctggcttacgtcggcgcaaatggatgtgcagcatgggaactaccgtactgctaggaaattgcatgagaaagcctgacacgctagtcctaagaattggtctacttggactgtat

SEQ ID NO: 11291 - DNA, 468 bp, Glycine max
  Clone ID: jC-gmle01810052h03a1
gtccatgcgctcatgtgatgttctgtgaccaatggagacgattttctcactgttgggcatagctatgcaaccatgggatgctatatggcacctcacaccaagactacaccttgcctaccagttagcgcaaagcgggacacgaaacactgcgttattgatactccagaataacacgtgcggaaacagatgacgcaactctcaatccaaaggtcataacctttgtacgaatcaatgttccttacgttgatggaattccttatgatgcagaaaccacttgagatgttccctactcttgttcccactcaatgacaatgacatagacctgacagagaaaaacattgaacttctactccttgatctcaaaccacacatagttttggtagatttttccacatattggctaccaaacctggctcgtagaataagaattaagtctcttcagtactggattaattgccctgtaacaat

SEQ ID NO: 11292 - DNA, 295 bp, Glycine max
  Clone ID: jC-gmle01810052h04a1
ctttaacttggggtgcgacattttagacagataactatgaggacaatactggatcagggctcgctttccgaccacaggactgtctaagctattacctattcagaggctgattatatgaccatatgtatatacaccattgatcgttctgtatgtggatgtatgactgctgtgattggaaactacttccgcgacgctggtttatctggactatcgattatcaagaagtgctcgatagccattggcatgctttctgactcctggaatgaacatatgtcttgctggagaggctaatgat

SEQ ID NO: 11293 - DNA, 508 bp, Glycine max
  Clone ID: jC-gmle01810052h05a1
gaacggtagaacgacgaagcaggtgctgcttaccgaggcggaaattcgtcaactctgtgtttcctccaaagagatctttctcagccaacctaatcttctcgaactcgaggctcctattaagatttgtggagatgttcatggccaatactcagatcttttaaggctgttcgaatatgggggatacccgcctgaagcaaattatttatttctcggagattatgttgatcgtggtaagcagagcatagagacaatatgcttactcctcgcatacaagatcaaatacaaggagaatctctttcttctcaggggcaaccatgagtgtgcatccatcaatcgtatatatggtttctatgatgagtgtaagaggaggtttaatattcgcctctggaagacatttactgattgttctaattgcctacctggtgctgctctggtagatgagaagatcctttgcatgcatggcggactatcgcctgatcttaagcacttggatcagattcggagtatt

SEQ ID NO: 11294 - DNA, 402 bp, Glycine max
  Clone ID: jC-gmle01810052h05d1
cgaaaatatgaatttaatctaaattaaaattctggcgacaaaataagatattcaggattcctccatatggaagtttgaatttgcattgtacattaaaaaaaaaaaaaaaaaactttcataaaggaaaaagggatacataaagggaacgggtcaatcaaagtcgcacaacgaagtgccttgttccttgccagcctttaatttcgttgccaaggggaaagcgcccctcctttaaattgtggtgaatgccagccaacataacgataagccttttgcctaatacaaataatgaatgcctccattcagcttactgaccttggatacctcgggaatgttaattcttcccacccttatgtggcggagttcccggtcttgaagtgttgtagccaaatccacatttccctt

SEQ ID NO: 11295 - DNA, 442 bp, Glycine max
  Clone ID: jC-gmle01810052h06a1
ccccaaccttcgttctatacttcaatcgatgcaatacaatctttagacgaccatcagaatgcgtctcacacacgcagccatcgctgccatcttggcattcaccgtcactgcaagccctgtgcccgagcaccctcaaccaagctctttctaccctgcagctgatccacccgcagagcacccaaagccaactacagttcatccggctgcagagcacccgaagccaacttcggagcacccgcctccagagcatgctaagccgacacctgagcaccccaagccaaccccggaacatcctaagccgacaccggagcatgctaagccaactcctgaacatcccataccgactactgagcattcaaagccaactcccgagcatgcaaagccgactactgagcatccaaagcccactactgagcaccctaagcctaccaccgaacaccct

SEQ ID NO: 11296 - DNA, 377 bp, Glycine max
  Clone ID: jC-gmle01810052h06d1
agagtaatcatgaacgattaaaattaactattaaggagggtcataaggagaatagataatgaagcatacaaagtatcatctcacatacacatctcgtctcatcataaaaggatcgtgatttttagctccagttcatatctcaggtctgggctcataatttccgcagctcaagccaccaagggcgagtgcaagacaaacttcttccacattgcggatgcttcgtgcgccaaagaaagtgagcaccgcttatgccttcttccccttgacaacaatcttgccgtgctcgcacttgagactgatctcctcgccgaaggtgtagtagccgtactcgtgctctggctctggctctggtttgggcgtaggcttgggctcgggct

SEQ ID NO: 11297 - DNA, 499 bp, Glycine max
  Clone ID: jC-gmle01810052h07a1
caaaaatggagaaatagaataactgaatatcgtatagctcaaaataaagatttaaccaaatgcaattcatatgaaaaaagccaattaattctttacaaagaacaacaagtaaacgcattaaaaaaaaaaattagaaaacaatatagatacgatcttttatcctataattttatcaattatgcagataagaaagactcatatatttatggatatagatccctatttcaagtaaaaaaaaaaccaagtgatttcttctaattacaacacgtataaaaaagaattattggatatcatagataatctctttatcaagaattatatatcggaagatgcgattctagatatggaaaaaaatatgtatagaaagtattatgattggatgggaatcaatagagaaatactaaatcgttccatatcgaatccagaattttggttcttttcaaaatgtgtgatattttatgacgcatataggggtaactcgcaggttataccaatcaaa

SEQ ID NO: 11298 - DNA, 519 bp, Glycine max
  Clone ID: jC-gmle01810052h07d1
gatctcttgttcttgtaatatatttataaaaatttttcttattaacatgaattttttctgggtatttgtgataaatttttcggttattcttttgaattaatgaaagacctatggtgtgatacatataaaattgtttattgttttttctagacaggcgaactggttcgataacaaatatttcttttttcataaatttgttatttttctttttccttaagcctagaagaattaaattcttctgattttgaatcatcataatatctacacctagctctcctctttgaatagaggctattgtaatttctcttaaattttttaatctaatccggagacaatatactgtgacagtgccaaatattctttgacctacgaaattattccaatttaaatgtaaaatcgaaaaatctcttagtaagaaattaagttctgcctccatcttgaccttgtgtttctttttccttatacccttactagtcttttcctgtctgatcctacataatcggtttcaatatctttttc

SEQ ID NO: 11299 - DNA, 586 bp, Glycine max
  Clone ID: jC-gmle01810052h08a1
tggatctcttagttgttgcgagggttgcccaaaggcaatatataaggcatacccagtaaaacttacaagtaaaccagatatagagatggcaattagggttgctgtttccattattagaattctaaagtttcaagatcacaatagatctataggataagatccttatatttacagcgaaatggtatacaaagtcaacagatctaaatgaataaaaaatagtatttatggctacgcaaaccgttgaggataattctagatctggtccaagacgaactgttgtaggggatttattgaaaccattaaattcagaatatggtaaagtagctccggggtggggaactactcctttgatgggtgttgcaatggctctatttgcgatatttctatctattattttggagatttataattcgtccattgtactcgacggaatttctatgaattagattcacaagaatcgggtaattagttgttcaatagaaaggaaagttaagcattttggtttcttattgtctggtagtctatttcatttggacttggtagtttgatcgtggaatttctttggttctggatattccggattatg

SEQ ID NO: 11300 - DNA, 484 bp, Glycine max
  Clone ID: jC-gmle01810052h08d1
tctttttttttttttttttttttttttttttttttttttttttttacattagcaaacaaatttattgcataaaaagattcgtgcgtgtttggaaaaaaattcaatttttgtttagttgaagggaaatatcccaatacatgtcttattcttttaaataacccatatttggagcaatgaaatcaattcctccccaaaataaaaaatgattgggattacaaatatgtatgatccatattccctttaaaggaccagaaatgccttgcttacgtattattaaaaagtgcattaacataaataccgcactaagaaaagggaatccaaaagtttgctaactttaaaaacgagtttaggttgattgtcccacactggaacttccgcgtaataactctaccaaagacgatcctattacaggaatagcgtcgggtacgcctgttacaattttgactgcccaataacccatttgatcccaaggtaaggaataacc

SEQ ID NO: 11301 - DNA, 363 bp, Glycine max
  Clone ID: jC-gmle01810052h09a1
ggctcgagattctctgaacaatggcgtatctctctcacctcgacaaactcctgtgcgtgcccccgctcaagtcttcaccctctatttcgccaccacgcagcagcgtcggaatttggaccaaacctgacggaaggccgaggctactggtgcgtgtccgagcggtcacgagcgacgacgagtgggggccgagcatggaagaggcgtacggcagccgtggactcgggaggagaaaccgacgaaggcagagacggagacggataagctgaagaaggccttggcggattcgagctaaggcaccgatcgtggactgtaagcagcaagcgaaacgagagccgagatcgatggactcatcacacagctcga

SEQ ID NO: 11302 - DNA, 244 bp, Glycine max
  Clone ID: jC-gmle01810052h09d1
gggttcgggtaaaaagccatgacaccgaacaaacaaacaacaattttcgatacggttataaaaaaaggatctaaccagaccgtatgaacaccacgcaaagactccacaccccattcatgctcaataatgtactcccaggatcaaccacaagagcattaggcttgaaaccaatattgctgtggaaaaaaatcctcctttcccatggcaaaggacatccaactgaccatgttcactggaagttcca

SEQ ID NO: 11303 - DNA, 543 bp, Glycine max
  unsure at all n locations
  Clone ID: jC-gmle01810052h10a1
atttaaattaataaaattagtcgtgttttattcgattttttgaattggtttttttttacagtagctaatgctagtcaccgaacttagtcaatgagctagaatgggttataaagatatctatagatatatatagatatatttatctatagatatctttagaaaaaaaaaaaagaaaataaacaaataagacgtatcattttatgtatagtagtggggaattatgggacaaaaaataaatccgcttggtttcagacttggtacaactcaaagtcatgattctatttggtttgctcaaccaacaaattattccgagaatatacaagaagataaaaaaatacgagattgtatcaaaaattatatacaaaaaaatataagaatatcctctggtgttgagggaattggacagantaagattcaaaaaagaattgatcttattcaagtataatatatatgggaattccaagtttttaatagagggtaagtcttaaatatcgaagattacagacgaatatgcaaaaaaactgaatgtgtgaatcgaaacta

SEQ ID NO: 11304 - DNA, 389 bp, Glycine max
  Clone ID: jC-gmle01810052h10d1
acatatataactaaagaatcttgttttgttctattatttgttattttataatattctaatgaatctttattttcctttttattattagttattagaatattttgtattattagaaagaataaatagaattggcaaaaataaaaaaaaaattcaataaaatcaaggttatcgcgggcgaatgtttactcttttattatcaatcaaattcagatgtaatgtagggcacaactcctaaaaaaaggattgctttttggtttcttccgccatcccacctaatgaatcattaagatttgtttttaataaaatcttaagtatttgcaggtttcgtcgttcccatcacttctcgattaatggttaggtctgaattcgacaatggagcctttctcata

SEQ ID NO: 11305 - DNA, 537 bp, Glycine max
  unsure at all n locations
  Clone ID: jC-gmle01810052h11a1
gccacacaacctcatcaatttgtgtggcaaagaatttagatagtctagctctcaaatcctcttcttctcttccatccaatcctctcagactgatcttagacgcaaacacatcctaatcacaaaagcggtgaccatggcaaacatgattatggcttccacaaaacctctggttccagtctgcaccagttcccgttcccccacaccaaaactccccattctccaaatttcactccccaaagccccaaccttgaaactgaaactcccaatttcaaagccccagatgctgtccctcctgggagggatagcaccactggtcttggccagaccctccctagcagaagaatttgagaaagcagcactctttgacttcaacctcaccctgcccataataatggtggagtttctgctgctgatgggtgccttggacaagatatggttcaccccacttgggaaattcatggacgagagggacgcggcgatcagggagaagctgagcagcgtgaacgacacgtcngacgaggtgaagcagctggagga

SEQ ID NO: 11306 - DNA, 384 bp, Glycine max
  Clone ID: jC-gmle01810052h11d1
caaaaaaattactacgtaaatagcatataacgagaagagatgcacatagctggggtggggaattttcctacgttttctatattctttaagaaaaaaaacaatgggagcccaattcataacctgaatctctgattttacattgaaaattattacgattacacaattgacacatccaaaagtagaaactgatcaatcctttggtgaggggattgaaatgaaaattacatagacttattaagcagtgggaagaaccttattaacaatctcctggctaagagctgcaatctgggaatcaagggacttgatggtttcttccttttgattctccaagctagacagagcctcctgcagctcagcctcgactttcttcctcccctcagcaat

SEQ ID NO: 11307 - DNA, 117 bp, Glycine max
  Clone ID: jC-gmle01810052h12a1
ctcgagccgttttcaattatgaaattcagacgaaaagaatttacatggacggactatactgccatttcgtgtcttggtgactagagatcagtgaatcctacccatatggctcacatc

SEQ ID NO: 11308 - DNA, 223 bp, Glycine max
  Clone ID: jC-gmle01810052h12d1
aaacagtaagttttatttgttatcgtcattaagcttaggaaccaaactctattcataaggactctgatactctaaattattgggggaaactggacctactgcatatattattaaattcgtagtacactttaaaatttatgatttgacctttaactttgtaatccctatccttgaaacactcaagatgatgaacgtgatttgaccttagacattaggcgacggc

SEQ ID NO: 11309 - DNA, 465 bp, Glycine max
  unsure at all n locations
  Clone ID: jC-gmle01810053a01a1
ctcatcctctaccactaccaccaccacaacaacaaccactaccttcctcctactactactctacctcctcccaacacattccttcttcaaccacaacccaacaacttcttcgctctctgtcaagcactcttcacacgacagcctcttaaactcactcaaccgtctccacctccaagtcacctgacttgccggatccggttactgctctataatacgttcttctcttttctgactcttccatccgggactgtttgctgtttccacacggaccaggccaacctccattctccggatcactctaacatcgtccttgaggccttcattggacctgcgaggacttcttccacttccctcttacaatatgtacccaactcccncagcatccccaacccaaaatggattctgcgcacccgaagaccgcctgggtcaaagtctagctggtcgactccagttgactggcattct

SEQ ID NO: 11310 - DNA, 473 bp, Glycine max
  Clone ID: jC-gmle01810053a01d1
tttttttttttttttttttttttttttttttttttttttttttttttttttttttttttttttttttttttttttttttttttttttttcaaaaaaaaacggcccccaacgggcggcgggggaaccctttgaatgtttttgcatttgtgtgagttcgcccaaggcaaaaatgggggcccccctggggggccccacccccccccagtttggagccagggcccggggtcctctgggggggaaaaccaaaccaacggggggggaaagaacccctttggggtcaaagcccaacaaaaacaaccccgggaaaggcccattgccccccccccaaaaatccgggggaaaaatgggggatggcccccccaatttaaaaccccgggccctaaaggggatggcccaagttaaacgttgtccccaaatagttctaaaagcccaaacccggggtttcccccggaccgggctatttttataacccc

SEQ ID NO: 11311 - DNA, 449 bp, Glycine max
  unsure at all n locations
  Clone ID: jC-gmle01810053a02a1
gcttggtttttggggtttcaagttcttgaaggaggtgaaacacaattaaatgcagaatctctttcatcccaagatatcatgacacaatcatggaagacttctctaagagaattgaatggctctttgaaggatgtaccatggaaggcttttttccaaaatcgtgctgtgtgggctatgatatatgctcatttctgtggcagttggggtcactataactgtctatcatggcttcccacattttttagtgaggagctgaatctaaatctgactgaagctgcatgggtctctattcttccgccactggcttcaatatttgtgactagtcttgcagcgcaattagctgacaacttgatttcaagaggagttgaaaccactgtggttcgaaagatctgccaatcaattgcatttttgtcccctgcaatctgcatgactctntcctcgctggatct

SEQ ID NO: 11312 - DNA, 488 bp, Glycine max
  unsure at all n locations
  Clone ID: jC-gmle01810053a02d1
gccttaaaatgtaagattattgaaacggtcactttctggttgaaacttgcaacagaaggaccagagagcaccaaaagttggtggaaaggatttaaacacgtcaatacattttttggtgaccaaccaccataccatcttcatctattaaaaatatacaatactgctatatactaataagctacagttaaaaataaagaatacttacagtaatgtacctatactatcatttctttgtacttaaattatatgatttgtatatatcaagcggatataccattataccccccgtgtcaaaattctgcttcgcatgaaggtttcttaagtttctaggctatgctcagaataatgaatgattggaacatgaatcagttttgctcagaaaaactttgaggcttactgctggcaaacgccaaccatatgatggtaccagtcacatagaagaagatcgatggtgcanatagtgatatactccatgaatgagttgaatc

SEQ ID NO: 11313 - DNA, 550 bp, Glycine max
  Clone ID: jC-gmle01810053a03a1
ctttctctcttcgcctggtcttggcatctccgcagcaccaccacccaccaccctgcttagaccaggtcctctctctctctagagagaaagagaaaaaagaaaaaaaaaaacaactaacattaagcttttaatagtaagacatggctcaacccagttccaacggggatctgaataataaccagcagcagggtcaggttcagcaacaacagcagcagggtcagtgggcggcggcggcgcagccgcatcagtatcagcagcaatggatggctatgcagtacccggccaccgccatggccatgatgcagcaacagatgttgatgtacccgcagcattatatgccctatgctcaccctcattacccgccgacgacgccgcctgcctcctactaccaccaccaccaccaccacaaacaggccgcggcctcctccgacgagatcaggaccgtctggctcggcgacctccaccattggatggacgagaactacctgcacaactgctttgctcacaccggcgagggtggttcggccaaggtcattcggaatagccaact

SEQ ID NO: 11314 - DNA, 502 bp, Glycine max
  Clone ID: jC-gmle01810053a03d1
gattggtaaccacagattatattgtaggccacaaagaagaaccagaatgacatacttgtgttgccaaattttggtatcaatgtcgtcatatgctgtactccaacatcacacggatccttattctcaatctaaggtgtacatgtacatctcaattctcaaaaactctatttacaaactgtggaaaatagaattattccttgtagaaaatttctgttatgtattgcaatgttcacataattatcctacagtaaaatactgatcttccttcgctgtcaaatggattcaaatccatatagccagttctatttataatccttctctcaagtggattatgcagtgcaacgggttcctttgactatttttagctcattatgtatgtcttacacggcgccttgttgtcgtaaaggctgagcttcagcatgaactacattattttgctggtccagtggcatgtattgtgacatgatagccatgatctcagagtccatgtaagaccggagcc

SEQ ID NO: 11315 - DNA, 554 bp, Glycine max
  Clone ID: jC-gmle01810053a04a1
ggcttccgtcgaccagcgtccgtaccccggcctccacaatggcgtcgttcggcccctcaaaccaggcccggatatcccgcgtcccaagaagctaccccagccgccgacgccactctcggattcctcaagcgacgaagaagaagacaccaccttgaacttgaaggacctgattcgcacgggaacaacggaagttgaatcctccattttcgacccgcgcgacgatggaacctctgaccactggatccaacggaactcttcccttgtccgtttaacgggaaagcacccgtttaactcggagccacccctccctcgcctcatgcaccacggcttcatcaccccggtccccctccactacgtccgcaaccacgggccagtcccccgggcccgctgggaggactggaccgtggaagtcacgggcctggtcaccaggcccacatgcttcaccatggagcaactgctacacgatttccccagtcgcgagttcccagccacactcgtctgcgctgggaaccgggcgaaggaacagaacatggtgaaacagagcatcggcttca

SEQ ID NO: 11316 - DNA, 474 bp, Glycine max
  Clone ID: jC-gmle01810053a04d1
gataaaaatcctttgatattcatttcattcattcagaccaatttaaatccatacaacaaaatccaatttacagagtcacaaatcacaatgactagaagcaatgagaaagaaagcttttctccatcccatttctccctattttcattgtcacagtttgcctagccaattcttgaagctaataataacatcattgccactagaagaaaaaaaaaacgctgataagaaatagaaaaatcaactaaaaaaacaaaagtaaggaggtgtggaactagtagaggaccaaactgctgctaaaggtggcaattctcccaaaaacctcaatttcttgtggtgccagccaattcacatatcaaatcttctgcataacttcagtaattgaagaggctagcatagcacaacatgatcgatcatccatggcgtatcgacaaataatgataataataataataattaggtgttccacaccagggaaaa

SEQ ID NO: 11317 - DNA, 537 bp, Glycine max
  Clone ID: jC-gmle01810053a05a1
cccacatggctctcctcacaagctcgcacctttcacctctctctacaccaataccccccattccccaccaccccgccgccacgtcatcatctccttctccgtctcacccttcaccgagaagcactccacagagcgctaccagagggaccaatgggtctaccagagcaccactcaagagggtcaacctcaaacgacgccgtttcctcctctcccgtgcgattcagcgtccttaagagacgacgacatagcgttgcagctgccagagctgaagaagctgcttcaggttctgagggagaagagggagtgtatcaatggagagggttgtgagccggggaatgtgttcttggtgggaacgggacctggggaccctgagcttctcactctcaaggctgtgagagtcatcaagagtgctgatcttttgctctatgacaggttggtgtccaatgatgtgctggatttggttggccccggtgctaggcttctctatgtgggcaagactgctgggtatcatagcagaacacatgaggaaatacatga

SEQ ID NO: 11318 - DNA, 517 bp, Glycine max
  Clone ID: jC-gmle01810053a05d1
gttgtgagatataaattgtttgacattgaatctaatttgcaaaatcaattgttctatggcgtaattgagttctatcaattacatctgaatcaaaaaaatgaaaattagggtacaaaattaacagaaggaaaatgatcccataacatgggcagatgagaaatcctgcttactaaatgtaaatctgatgccgcccctaaaccttaatgatacaattctgctacaaaaccttatctttccttctcccctaactgattttttcttcttttcttttcctgttcttcgggcatatacagatacatcgatgagtaaaatatcccagtgttggtggactttatactgtgtcaaaaaacacatccttggcaagttcaatatatcacaacacgaagtaggcctggctgagttctcgcgaagtcaatgccctcttcaagaagaactcgctgtacagctattggaagtcttgcaggagtgcgagaacccctggtatgatgacctgtgcccacaagaatataaacctgca

SEQ ID NO: 11319 - DNA, 547 bp, Glycine max
  Clone ID: jC-gmle01810053a06a1
caggcactcctcgagttcttccttcttccttacaaatcccttcattatgggcataaactccaatatatcagttctatatagcagttgttactcaaaatgaaggacctgttcatttgcatattttgctcattcaaaatcattaaaacgatttaggtttcatagtgaatgataagttagcggaattcaacgactttggattgttaacatccatacatctttctcctaggaagcaaacacaacactccactgatcgtgccctgggttcttaccataattttctttcctttctaatttctatattttttattttattattaattggatattattttcctcagctgattagtatacatggtagccaattttttgtgaattacatatttttttcctaatttggactaaagtctgaaaccgctgacaaagattagtgtccaagtcaagcaaattagtcagagaaatttagttaggatagtggaagaggaagacataagtgttggtggcaagccccttggtgcaaggcgctgaattggtcaacattcaagttcat

SEQ ID NO: 11320 - DNA, 511 bp, Glycine max
  Clone ID: jC-gmle01810053a06d1
cagtatataaatgataactgtattataaatccctctttgcagtaattaattaaactggggatgcacccctagttctaatttgccaggagctaatggctttacaatgattagtatccataccatctccactaaaaccaagtgtatgtttggattaccgttccaatccttccaaagttattaactcaaaagtaacaaaagcatgcttctccctacgtactttcaatatagattcaccacctgcaaacggtaatccaaacattatgagagcttcattttagaactgatgcagaattcccgttgacaatgtggtttgagagcttcccatcagatccccaaaatgctgcacacttcaaatcatcctgaaccattaatctggagaactcctcatggttataactcattatgctttttccacctagttctttgggcagattttcctcatcaaaataggacttcatgacctgcacactatctttattattcgggtagacaaacttcaccttctgaaatg

SEQ ID NO: 11321 - DNA, 450 bp, Glycine max
  Clone ID: jC-gmle01810053a07a1
gttctaaatcgtgagcagcccgacctttttattgcatgatatttcttttttactgtcaggtcttagataccgtgaagccgtatacttgatcaataagggaaagatgtgtgctctcttcatcaactatcttgatgcatgaactggtcgtcttggtaggaaccacccaatacactgtcaacaaccagatggtgaatgccaccctcatgaacattgctgataaccccaccaatgtgcagcttcctggtatgtataacaaggaagagaatccccgtgtgcccatcatctgtaccggtcacgatttctccacactctatgcgcctctcatccgtgatgggcgtatggagaagttctactgggcaccaaccagggatgaccgcattggtgtctgcactggaatttatcgcaccgattcaatttctgaacaagacgttgtcatagattgttgacacc

SEQ ID NO: 11322 - DNA, 489 bp, Glycine max
  Clone ID: jC-gmle01810053a07d1
gaacaaacattattatcaaccctaagctactatacacttgtgaaaaacgctaaaaaatgcatcgctcgaaagcacatacaactattatacaacaaaggaaaacccggctggtctagccaaagatgcgtacacacctcttatctttcaagcggggtagcatgatcaggaattatttttgggatacaacctctctgaactcatcgtctctcagggataatatcggagaggaccaataccgatgccttccagccccccgactttctagctttgtcttggatccccccaagtataactcggtgttgctgatgccgaatgggtatcccgttggatatcaaaatgcaatgctcaatcaatcggatcaatctttttcccacaagtgaaacttcggcttgttcgttcaacttccacctcacgatcaatccttacgtcgcgtctatttctttccgagaagaccgccgacaatggggatgttgctgacaccgccaccct

SEQ ID NO: 11323 - DNA, 570 bp, Glycine max
  Clone ID: jC-gmle01810053a08a1
ttctgacagaaaaattcagctggatgtgaatcctcggatcgggtcaacatgttgaaatcggagtttgtggcggtatcagagaaaaatgctgagctgaaaaaacaggtgagagaattgactgaaaggctttatcttgcggagcaagggaaagaccaggctcaaaagcagttccttacattaggaaaacagcctaaagctggaccttttggtactgtaaagggattaagaaccaaccctactgttgttcctgatcaatctgtgaatccaagattggcaaagatattagagaaagttgcagttaaacaagagcttatagtttgacttgcaaacaccaatgtgaaggagatgctggaggtctggttcaccaatatcaagagagttggcataaccaattatctagttgctgctttagacgatgagactgcaaaagtttgtgaatcaaatcaagtcccagtgtataaaagagatccagatgatggtgttgatccattggaagaacatggagcaaccatgctgtctttggtcttaaatttcgaattctaagagaattttttgcagtgggatatagcg

SEQ ID NO: 11324 - DNA, 456 bp, Glycine max
  Clone ID: jC-gmle01810053a08d1
aaagggaaagtcgtgtttataatcaagtacaaaatttcatcgctaatctactatttatgaacaacttttgacaataatccattgtatactagacacctagcaacagagcaagccccaaagatatactacttgacaagaatttggtttcggaacccactctcgtcccccacaaaaaacaaataatgtgcaggcaaggaacggaattgcatatgacacaatgatctaactatcagcggctctgaaaatagtgagcagagacaggaagaggttaatgatgtccagatacaaggagatcgaagcccaaatgtattcatcgtacgagtatctcttgatcaggttgtctgtgtcatagatgatgtagccgcaaaatataatggctgccaagcaaccatagatcatcacggacaatttacccagtggaaacagaacctgaatcagagcaaagaccataagaac

SEQ ID NO: 11325 - DNA, 639 bp, Glycine max
  Clone ID: jC-gmle01810053a09a1
ctggaactgagcaccaagatcgtcgctgatggcagaaactacgctgctcacgcctaggaattaggcaacgccgatcccaaggagccggcgttgtttctgaaaccgacgtcgtcttacttgaaaaacggcgggaaccattcaaatgccacactaacgagggctctctgcattacgaggttgatctcgctgaggtcatcgccaagaaagcacgtgacgtctccgaatcctctgcgatggattatgtcgccggttatgcactggctctggatatgactgctagggaccttcaagctgctgctaagtctgcaggtcttccatggagtttggcaaaaggccaggacactttcaccccaattagttctattttgccaaagactgcagtgccaaatcctgatgatctagaattatggttaaaggtagatgaagaaatacggcaaaagggctcaaccaaggacatgatctttaagatcccattctaattagctacattagctctggcatgacattgttgaaggggatgtcatactaatggtacttctccggtgttggccctgcaagagggtcaacaatacttgtgggtacaagcctgtgacgtcagttaagttgaaaagacttggctgttttctgtaaaacctttga

SEQ ID NO: 11326 - DNA, 609 bp, Glycine max
  Clone ID: jC-gmle01810053a09d1
gatgaataacatgaatcacttttcttgttgaattgttacaaaattgatgtgttggtatgaaaataatatttacaagtatgattttaaactaagcaaccactatgatcttcccaccaaaaatgggagaaaaaacagaagcatgagagtagaatcatctaaaccttttcccttgataaaaacatcagggactaaattatgccagttcatttttcacggacacattgccatccctctgatctatgctcaatgctcctctatccacaaaatttaccattctgtgggaaagtacgcgagacttatctatacatgtggcatgacaagtaccaatgatcaatgaaagtaagttattccaagaccttttcaccagttgaaaaaagattaaacaccacagttccaaccaaatacaacacaactgaaaccttgaaaacatcatcccaggagccatgttgtagaatgtaacctgttgctgctgttccaaagacaccagccaatacttcagcggtattagatagaccaagcaatatgccagaatatcgaggggcgatatcttgatggtttgaatacaatccggactgagagaaagctcagttccctggctgacgtcataca

SEQ ID NO: 11327 - DNA, 532 bp, Glycine max
  Clone ID: jC-gmle01810053a10a1
gaaattttaaaaatgactgggataaacttaagaattcaattattgaaattgaataagtaaacaatttaattggattggtcgaatggtatcaaaaaaatggagtactaactcccatttcttatttattattgaattaaccgatcaacttgctttgttatcgaacatttctttttgatttcaaaaattttccggaaaaaatttgaatctatttttatatgcgaatcaatcctactacttctggtcctgaggtttctgcgcttgaaaaaaaaaatctgggacgtatcgcccaaataattggtccggtactagatgtagcttttcccccaggtaagatgcctaatatttacaacgctctgatagttaagggtcgagatactgttggtcaacaaattaatgtgacttgtgaagtacagcaattattaggaaataatcgaattagagctgtagctatgagtgcgacagaaagtctaatgagaggaatggaagtgattgacacaagagcttgcctaagtgttccagtaggtggagcaac

SEQ ID NO: 11328 - DNA, 541 bp, Glycine max
  Clone ID: jC-gmle01810053a10d1
gattgaaaattttattagccattttaagaaatgggcaaaaatgcaaaagggtcagcgttgtttcaaaaaaccatttttacttactattggaagtaaaaaaattcttaccgcttcagacgtacgaaaaccacggcatcaccgaaggctttacaaacgtgtcgaggtaatgcttctttgtatcggatgcgctcatcgatgtttccatggctagcatggcttggtggaattgggtgatggcatcggtcaggatggcctcgttggagaatggagccgttgtgtagccattcagcaaggactgggacagcgggatcgggcggtagaattgtactaccgtggaggacagcaacgggaacaggtcggacggaatgacgtaatcgaacgggttgacgttcaccccttttttagtcggaagtggtgcgttataaagtgctccagtacggaacggtgccgcttgactgtgccacgacactcttccgttcatgaagtggtgtttcaccgcgttttgaaacaccagattggttacgagtttgatgagatcatc

SEQ ID NO: 11329 - DNA, 595 bp, Glycine max
  unsure at all n locations
  Clone ID: jC-gmle01810053a11a1
tggcaatggagatggttaaagaactggagattagtgacttgggaccaaagctgatatctcctcctcaatcattttagcaatctccaatggttccgtgcagaagagcgtcgcagtcgcaaccctaatcagaaggaagcgcagcttcaagcgagtgacagccaccagccatgggtcgtatgcacagccgcggtaagggtatatcctcttctgctttgccctacaaaaggacacctcctagctggctcaagatctcttcgcaagatgtcgaagaaaatatctgcaagtttgcgaagaaaggtttgaccccgtctcagattggtgtcattctcagagattctcacggtattgctcaggtcaatagcgtcactggcagcaaaatccttcgcatcctcaaagctcacggacttgcgcctganattccagaggacctgtaccatttgattaagaaggcagtttcaattaggaagcatcttgagaggaacaggaaggacaaggactncaagttcaggttgattcttgttgagagcagaatccaccgacttgctcgctattacaagaagactaagaatgctccaccagtctggaagtacgaatc

SEQ ID NO: 11330 - DNA, 597 bp, Glycine max
  Clone ID: jC-gmle01810053a12a1
cacgttttcatctcatctttctaacaaaatgggaaacacttaacaaaaagagggcaagctacatctataatgattgaagaggtgtatagatgaatgtttctgggtaagaggctagtaattggaagaatgtttctcaagttttggggcttcagccattccaagcacacaagttcctctcagagaaagtatccaacaataatagaagagctgtgtcatcaattttctctggccgatcttaggaaatcaacgaacaactttgatccaaagagacaaattgaccttagagcatttggtatcaaagtatacaaaggttgtcttcaacatgatgatggttctgattatacagtcgccgtaaagcgatttaatgtgaaagacagtcaagcacgggaagagttcaagaacgaaatagagttgctctgccagcttcatcaccctaattgtgtctctcttataggattctgcaaccacaaagatgagaagattatcgtgtacgagtacatgtccaatggatctctatatgaacggctaccaggtggggaactgtcatggaagaaaagactagagatctgcatatgaattgcacgtggactacactac

SEQ ID NO: 11331 - DNA, 414 bp, Glycine max
  Clone ID: jC-gmle01810053b01a1
aggaggaggtgagccgtgcttacttcaagatgtggtttgttggacatggttatagtgatgggagcattgcttgacagggaaacacaaaacctgacatggagattgtaacaagggttatgggacctgaagttggatatctgaccacaccaataattcttattcagtgtgctattgttcttctctgccaacgtgacaacctttcaaaaggaggagtttacccttctgggatcatctttggtccaactgatctccaggaaagacttcaacaaaatggaatatccttagatgtcatctcaaaaagcaccatttcttgacttttgcagtttagtagaaacaagtactggtcataaaactgaattattataaatgagtggggatagactatttcttttgtttaaaaacaataatgcaaaa

SEQ ID NO: 11332 - DNA, 349 bp, Glycine max
  Clone ID: jC-gmle01810053b01d1
aaacaaaagaaatagtctatccccactcatttataataattcagttttatgaacagtacttgtttctactaaactgcaaaagtcaagaaatggtgctttttgagatgacatcaaaggatattccattttgttgaagtctttcctggagatcagtgggaccaaagatgatcccaggggggaaaacccccttcttgaagagggtcaccttggcggagaagaacaacagcaccctgcataagaattattggtgtggtcagatatccaactttaggttccataacccttgttacaatctccatgtcacgttttgggtgctcttgcgaatcaatgctcacatgccttttaccct

SEQ ID NO: 11333 - DNA, 499 bp, Glycine max
  unsure at all n locations
  Clone ID: jC-gmle01810053b02a1
gctctcttggactcagttcagttatttcaaaacattttaatctcaacaccaagacgacaatgatcaagtccaaggagttaaaaatcgaagacaccaaccttgctggaatcggatctgagactgacaagaagcttagagaggaggctgctaagactgaacaagcctacaaagatgctggaaagcaagttggtcttcaaatctggagaattgagcaattccatatcaaaagcgttcctaaggatacttacggtagcttctattctggagactcctacgtcgttttgaacacatacaaaaagaagggaagcgaggctctcgcctgggatgttcatttctggttgggaaaatacactactcaagatgaagctgcaactgctgcttacgcgaccgtcatgcttgacgatctcttgggaggagctcctgttcaacatagagaggttcaagagaatgaatctgctcttnttctctcctactntaagaactaccttagaantttaga

SEQ ID NO: 11334 - DNA, 320 bp, Glycine max
  Clone ID: jC-gmle01810053b02d1
gggaaggggccaaattccaagggtttgaaaaaactttataaaaaccaggattggctaaaaaaaaccctaaaattccaaaggggtccaaaccccccccaaaaaaaaacccccaaaggtttagggcccaaggggttttaaaaaaccccttttcccccccctctaaaaaacttgaaaaaggggggccaacaaaacttttggcccttggggggggggttttaaccaacaaaaaaaccctggccctttcccttaaggaggaaccctttcccaccccgggaaaaacttcatttcccggttcccaaaaaaaaaccccccctaaggcc

SEQ ID NO: 11335 - DNA, 661 bp, Glycine max
  unsure at all n locations
  Clone ID: jC-gmle01810053b03a1
gaaaaaggtataggtgtatatggtggattatttaatgttacaacatttacacaatctttcaacatatttatattcttaattagtgccgttatactggtattaactgctttttatcctagaaaagtctttataaaagaacaatcatctttttataaattgttaactagcaaattaacatacaataaaaactctatttcaaacaaaacagcagaacagtttcgtataatagaatacgcacttataatagtatttatattatgtggagcggtatttttaatgagtacagcagacttaatttctgtattcttatctatagagttacaaagttatggtttatacatactgtctactttatatagagattcagaatcagcaactgctagtgggttaacttatttcttattaggaggattatcatcttgttttatcttattaggttcagccttattatacgttaactctggtactactaacttagacaatatatatgtgatatgcagtataagtgaaatagaggacttaaatactcttacatactgataccaaccatattatctacacttatctntaataatattatcagtgtgattcttattcaagtaagtgctgctcccttccattttgatctccgatgttatgatgaatactacatagtactact

SEQ ID NO: 11336 - DNA, 541 bp, Glycine max
  unsure at all n locations
  Clone ID: jC-gmle01810053b03d1
agagggaatatttcatatcaatgtcatggtaactaaaaaaacaacatagagaaagttaataaatttctcaaaattaagaatatacaatgagtgaattaatgcagcagcagcagtagtcacacaagtatcatcatataatgcttaaaagaaattaagcatagagttttccaaatacaaccttaaatgagttctccaaaaaggaaaagaaaggaggttcatgaaacacatatagaactgtttcctccattgttctgcaccacattatacaaacttggctcaaatgaggagcaaatttttcataatcttggcaatgcgcggggaagaatgcgaggttggtcccaatcagtgacaatgtgatcacgagtgatatccttgagtgaggtgcaaccactcaaggccatggttagctcaaactcctcacgtagcatccgcagcacgtttcttacaccagcctattcttgagcagccaaggagaacaccacanggcgttcaataaatatgccagaggcacctagtgctaatgccttgaagacatcagttc

SEQ ID NO: 11337 - DNA, 609 bp, Glycine max
  Clone ID: jC-gmle01810053b04a1
accatggacctttccatcaacacacgcaccccccacacgccgcatcatcgcttcgccaccacacgccgcggttgagatgttcccgccgccgacgcagacgaccctcccctctctgccggatctccttctcacggccctctccgtctgcttcctagtctcctcctcgaagccccacatcggtggttccacccgctgccccttcccgcgtcgattcctcaaaatccccgccatgtccctcacaacgataacaacaacctcaacatcctcgaaaaacaacaacaacctcaattcccacctccctccccgccgccacagcttcgcgtccccgcagtcgctctcggaatggctgaagccgcggctcccctcggaatccttcgcctcgtggggcgtgaagcccggtacgaagaacgtgcacaacctctggctcgagctctcccagggcgaaacctccctcgccgactccacccctgcggttcgaaccgtacacgtcgtcctcgttcgcgtcaccggataacacggcagaatcctagtggagtcgcatcaggatttgtcggacggcagcgttaggaagcgcgggatgcccctgtctgagaagatgaagcccaacga

SEQ ID NO: 11338 - DNA, 439 bp, Glycine max
  Clone ID: jC-gmle01810053b04d1
aggtattccgaaattcgggcccctcaacttggtatgaaaacacattggtagcctctactcggggcctagctcgggtaaaagctagaattgccccaattggtgggcttttgccttccgccttaataaaaataagttttggtatttcaaaagtttgctgggcttcttggggaggaatggcactacccttttccggatgatttactaaaacagggaactcattattggttattctagcaaaaccgcccattagagccctgggtaaccattgggctttaaaaaaacgtattctcaaaaaacctatatctacgggtgggggaataggcccctgatgggggaatacccccattgggccggtattaggcgggaaaacgattttcttcactttcgaatcccaaacaattcggttgggggtgcagacccaaagatttaaaggcatttt

SEQ ID NO: 11339 - DNA, 520 bp, Glycine max
  unsure at all n locations
  Clone ID: jC-gmle01810053b05a1
ttcacatagctatcgtataagatttttccactctgcttccttccaatcttaattgaaggacagcttcagacaaattgtgaaatttaataaagagccaaagatgcccttgtacagaatctgaactgcttttgtctcaaggtctttctgcccttgcaatttgcaaaagtttcaagaaagcttataaaaggagagaacatctgtttttatcaagctctgatggcagggttaaattttgaagccacatatactgacaaccatgatattctgaagatatttgcagctgaaggtgttgaattccttttatcttgtgaaggaaaggtacccgtatcagaatgcaatgggaaaattatatgcctatttttcactgcaaactggtgtagaccttgcagagctttcattccccgtcttgttgaactttatgaaacactgagaaagaggggaataaatctagagatcatcttcatctcctttgaccgtgatgaggatggattttaagaacacttcangaacatgccatggc

SEQ ID NO: 11340 - DNA, 526 bp, Glycine max
  unsure at all n locations
  Clone ID: jC-gmle01810053b05d1
gtatattctttttttttgatttctacttcataggatctcatgtctcaattaagaggagtcatggaaagaactggttcaaaatctcgatcaattcctttttcaaatcctgcggcagctgcgcgagctcttcccgcgtgccataaatggcctacaaataggaagaatcctagaacaaaatgagaagtagctaaccaacttctaggagaaacataattgactgcattaatctctgtagctacgccacccacggaatttaaggaacctaaaggagcatgagtcatatattccgcagaacggcgttcttgccaaggctgtatatcttttttcagtctactcaagtctaaaccattcggaccccttaaaggttctaaccaaggagcacgcaaatcccaaaaacgcatagtttctcccccaaaaataacttctcctgtcggggaacgcattagatatttacctanacctgtaggtccttgagcagatcctacattagccccacgacgttggtctctaactagaaaagtaaatg

SEQ ID NO: 11341 - DNA, 561 bp, Glycine max
  unsure at all n locations
  Clone ID: jC-gmle01810053b06a1
cggctcgagcccaaattcattttaatcctaattctgcacttcttgatcattcgatttttctcctcaagatgcagatattcgtaaaaactttgaccggcaagaccatcacccttgaggtggaatcctccgacaccattgacaacgtaaaagctaagattcaagacaaggaagggatcccacctgaccagcagagacttatctttgcgggtaaacaacttgaggatggtcgcacccttgccgattacaacatccaaaaggaatcaaccctccatctcgtgcttcgcctcaggggtggcatgcaaatctttgtcaagactttgaccgggaagaccatcacccttgaggtggaatcctcggacaccattgataatgttaaggccaagatccaggacaaagagggcatccccccagatcagcagaggctgattnttgccggtaaacaacttgaggatggaagaacccttgctgattacaacattcagaaggaatccaccctttacttggtgcttcgtttgagaggtggtatgcagatttcgttaaaactttgaccggaaagaccat

SEQ ID NO: 11342 - DNA, 371 bp, Glycine max
  Clone ID: jC-gmle01810053b06d1
aaaagaaaccactcactgttttaaccacatgaatataacgtacaaagagaaaacaaaagcgattaaatccttctattgagtatggaaaacaaaagaaagttgcatgtaatcccaatttaatagaaccttattttgcatgacacaaaaaacaaaggcaggggattgagctgagttaactagcaattcttgaattgagaaaaccatatatatatatatataatgtggtggtatcgctattctttagcaactcaaggattcccttccctttgatttgagttcactcacagtcttcgtcactcaatacatcattttcttatttgggaggggtaacagccaggaccacagatcctaaactctgagggaaacctttt

SEQ ID NO: 11343 - DNA, 605 bp, Glycine max
  Clone ID: jC-gmle01810053b07a1
ctcgagccgctcgagccgattcggctcgaggaacacccttcacaagccacttctatttgcggagtttggtatttccacaaagagttatggtggcaactcaacaccaagggatcggttattcaacacggtatattcagcaatatactcatcagcaagcagtggcggggctgctgttggtggcctgttttggcaacttatggctcaaggaatggattcttatcgagacggttacgaggtggtcttagatgagagcccttcaacggctaatttgattgctcaagagtctcaaaaactaaaccgaattcgcaagatgtacgccagactcagaaacattgagaaatggaatgaagctaagcaaattagaggatgaaactgaatatatatatatatatatagagagagagagagagagagaagggtgagttagaaactttaatttataacttaatcgtagtggcaagaattgcctgttattacaagtgaagtgtactacatatgccataaacataactattatagagatatatcgagagaaaccttgtaatgtccgagctagcatttcatctactattatgtcagaagtgatgtactatgtaaaactatat

SEQ ID NO: 11344 - DNA, 515 bp, Glycine max
  Clone ID: jC-gmle01810053b07d1
aaacaacagaaaactctagagttcattcaaacccaacataaaagataaaactatccaatataaacaccatgtccatgtaaattgaacccaaaggagtaagtcacataaaaaatatgaatcaatggcctcagacattgtagacgcggatcaattcacagaacaaaagaagaaccatttctcgagcaataattaaacaaaaaccaatgctcaagaggcagtaatatttacactcccgcgtccaccataacaacaaattcaacctgaaaaatcgcatacaccattcaccaatctttctttaaccaatcaagaattcttcgagtcacgaattttctttgccacggcagccaaattgtcacgcaaagccaaagccttggaagacacagcctcaccatgcaacatagcattacaaggctcgccataacaaccttgattacaatcctcaaactccgaagccagagcggaaaaatcctccctcatcagcaaactattgtgaagaatggagcacgcgccaatgt

SEQ ID NO: 11345 - DNA, 524 bp, Glycine max
  Clone ID: jC-gmle01810053b08a1
ccccaaccgagatctcaacaagctcttcaatgtctccaatgggagggtcccttcaatcccactctggtttccatcttgcaggatcatctgacatgcaaattaggagtccaaacaaaccaagaagttctgaaatgcaaaactccccaagtagtatcctttcagtggacatggaaatgaagcatagtggtgaccatggaaataatagagatgccaacacaaagtttggtattgaaaggcatcaccaacaaaaagatgggtaccctttgatgactagcaatccaaaccatggtggggggtttggagcattcaccatggaagacattggaagcagatttaatgtcactactgagcaactagcttcaaggttccatggaaacggtgtttctctcacacttggacttccccacaatgagaacctttctatgtcaggaactcaacaacatgggttcctctcacagaatatacacctgtgaaggagacttgaaatgggaacaaatggaaatgagttttgtactatcaacact

SEQ ID NO: 11346 - DNA, 341 bp, Glycine max
  Clone ID: jC-gmle01810053b08d1
ccccaggccccccccgaagaaaactataacccacattaagggaactgacccctcagcaaggggagttcgagggggcccaaaaaaagtttagggggagccttcaaacgggtaaaaagaaaaaagggtcgccaacccgggggagggggcaaaattggataaacacggggggcctgcatgtggggggccccaaaaatgaaaaaaacgttaaaaaccaaccaaaaaattgggggggccgctagaaaagataaatagcccccgtttggggggcacttcttccccctaccaagggggggatatgacttaggcggggggggccccctttttttggacccccccaattt

SEQ ID NO: 11347 - DNA, 566 bp, Glycine max
  unsure at all n locations
  Clone ID: jC-gmle01810053b09a1
aaaaaagaattattggatatcatagataatctctttatcaagaattatatatcggaagatgcgattctagatatggaaaaaaatatgtatagaaagtattttgattggatgggaatcaatagagaaatactaaatcgttccatatcgaatccagaattttggttcttttcaaaatttgtgatattttatgacgcatataggggtaactcgcaggttataccaatcaaattactttttttttcttctaatgtaaatcaaaatgttagtgaaaataaaaagaacattactagaaagaaaaaaaatgaatctcttgaattggagttagagactcgaaatcgggcaaaagcagaataccctgatcaacgaaatcttgaatcatctatctcaaaccaagaaaaagatattgaaaacgattatgtaggatcagacagtgaaaagaatagtaagggtataaagaaaaagaaagacaggaacaagatggaggcagaacttaatttcttactaagaaattntgtgattttacatttaaattggaataatttcttacgtcaagaataattaacaat

SEQ ID NO: 11348 - DNA, 571 bp, Glycine max
  Clone ID: jC-gmle01810053b09d1
agttgataactcttggaactttacatagtgatcagtagaataatactcaaatccaagttcgtttggtcacttttaatgacaacatactgataaagaacctgtcaggtaatctacatgtctcctctcctgtacaattccatccaccttcagtttctgcaggtaaaatacaagcaattcttccctcaccaaaagagaaactcaaatgacaattttgtattgaagccagctatacaactcgaacccatgttccaccacacattggacatccataagcccagcggctgatccaccaaatctcccggtcattttgactgggaagattggtggaagctggtgaggcaaaagcacaagtctgccgcagacatcttatacacttgtaccagatcccttaaggccagttttccacaatgcagtaacaacatctcttcgagatcccattttccaaggtatgctcccaggcccaagaagtgttcaacccaaaagctgcatctcgttcagacatcctgcgcttccttggccataagccattggcttcatagtagacatcacaattttccaatgagctggaatc

SEQ ID NO: 11349 - DNA, 528 bp, Glycine max
  Clone ID: jC-gmle01810053b10a1
cttccttgcctactacacattcttcatcacttcattcaacatttctccccttagcttgtttcaccaatggctgctgcggttagtgctgcagtctcttttccatccaccaagtctacctctcttccaagcaggacctccctcattgccccagagagagttgtgttcaagaaggcttcattgcaaaacagagatgtttctagcagtggacgggtagtttccatcagagctcaagtcaccactgaggcaccagccaaggttgaaaaagagtccaagaaacaggatgaaggtgtggttgtgaacaagtttaaacccaagaccccttacattggtagatgcctgctcaacacaaagatcactggggatgatgctccaggagaaacttggcacatggtcttcagcaccgagggagagattccttacagagaaggacaatcaattggggtaattccagatggtattgacaagaatggcaaacctcataaactgagattgtattctattgctagcagtgccattggtgattttgga

SEQ ID NO: 11350 - DNA, 530 bp, Glycine max
  Clone ID: jC-gmle01810053b10d1
agtagctagttgataaattcacacttaaattccaagcaaaatatcaaggggtacaacacctaagaatgctgaagtgaccctacctctgcaaattgctggttgatcaattcaatcatttgcactccaaggaacatatcatgggtacaagtgcaacacacaagaatcctgaagtgaccccagttttgctacttgctacagttgatcaattccatcatttgcactccaagaaaaatatcatagtgttcaaaacctaagaatcctgaactgaccctatctttgctaacttctagttgatcaattcaatcatttacattccaatcaaaatcaagatgtagcttgatggatactgctagaccttggatagaagcttcagaacaaataattcaagtacaaaagcatatatatacgtaagatcacaggagccaaaattgtcagatatccttacctcttttatcttaaagggttgcacaattacaggaaattgattttttgttatttttggttgagctaccaggaaggagctcacaata

SEQ ID NO: 11351 - DNA, 518 bp, Glycine max
  Clone ID: jC-gmle01810053b11a1
atttatcttctacaaccaccgataatgaacctatagaagttgggccagaagatatagcagcagttgcttccctctggtcaggaattcctgtacagaagctcacagctgatcaaagaattcttctgttagatcttgagaatcaacttcggaagcgtgtgattggacaagaggaggctgttgctgccatttctagagctgtgaagagatcccgggttggcctaaaggatcctgatagacccatagctgctatgttattctgtggcccaaccggtgttgggaaaacagaactcgcaaaatctttggcggcgtgttactttggatcggaggcagccatggtacgattagacatgagcgaatatatggaacggcatacagtgagcaaattgataggatctcccccaggttatgttggttatggagagggtggcgttttaacagaagcaattagaagaaaaccattcacactgttattggtggatgaaatagaaaaagctcatccagatttattcaacattctt

SEQ ID NO: 11352 - DNA, 466 bp, Glycine max
  Clone ID: jC-gmle01810053b12a1
ctttgtctctgttctgtgtgtgcgagaaatggcgatggcaatggcgcttcgcaggctttcatcttcaattgacaagcctctgcgccctctcttcaatgccggttccctctactacaagtcgtctttgcctgatgaagctgtttacgacaaggagcgacccggagttacatggccgaagcagttgaatgctccacttgaggtcgtggatcctgagattgctgatattattgagcttgagaaagctaggcaatggaaggggctagaattgataccgtcagagaatttcacctctgtgtctgtgatgcaagcggttggatcggttatgaccaacaaatacagtgaggggtaccctggtgcaagatattatggtggaaatgagtatattgacatggctgaaacactgtgccaaaagcgtgccctagaagcttttagattggatcccgctaaatggggagtgaacgtgcag

SEQ ID NO: 11353 - DNA, 531 bp, Glycine max
  unsure at all n locations
  Clone ID: jC-gmle01810053c01a1
gttatccacctcatcgaccataacactagtgaatgaaataatctctataattgacgaaggaaaacaccgcaaccaaaaacaaaattaataataaaaaatcgttcttgacttcttcttaacttccatcgtccatggcggtttcggggttgagaagcggtggtttgcctctcttccaccatcaccaccaccaccaccaccttcgcttccttcaatcccctccttcctttgccaagctcagttttcttggctccaagtcgtcgaagaaggggttcacagtcttctcccgctatgcgcaagcgcgtgaccttttctcctcgcgtagattccaagatagcatggagaagctgccgaacctggtggaggacattgtgcagacatccttaaacactggtccaaggggtgtcctgaggttggctcaaggtgttcaggccttccttggngttggtcaagagtggttaactgatgtctctaagtcagcaaattcatttgctgggttaccgactgaactgcnacttggtttactctccccct

SEQ ID NO: 11354 - DNA, 501 bp, Glycine max
  Clone ID: jC-gmle01810053c01d1
gacaactatggattattttatttatataccaaagtaatcatacaaataaaatattttgaactaagatggggtacatctagattttgtgtaccaactccttaaaaattgtctctataccctgcttctgctattggaagcaatggaaatcctctgatcctgaagcatgttcaagttgggagccagcaaccgtgtgtaccggtcaaagtacaagagctgtttcaggagaagagcaaattctctaggaaacttcaatccatatgattcactaacccgaaccacatcaagaaagagtgcattcatctgcctctcatcaacaactatattagcagcaacagcagttgcatttgtggctgttccagttgtagttgctacaactatttcagtgtccaattccttaattgatgagaatactttttccaaatctcttgcaaaggccttagcatcaacatcctggtttgtagcacccatttcaattaaggagatgccattgagtcataatct

SEQ ID NO: 11355 - DNA, 533 bp, Glycine max
  unsure at all n locations
  Clone ID: jC-gmle01810053c02a1
aaataaaaaaagaataataaatagaaaaaggagcatgttgattatatagaaagtaaagggcaacaatcatttttgtttaccatgggtaaggacaccatcgctgacataataacctatataagaaatgctgacatgaataaaaaaggaatggttcaaataccatttactaacataacagaaaacattgtaaaaatacttttacgcgagggttttgttgaaaacgtcagaaaacatagagaaaacgacaaatattttttagttttaactctacggtatagaagaaatagaaaaggatcatataaaagttttttaaatttaaaacggatcagtacacccggtctacgaatatattctaattatcaacgaatccctcgaattttagggggcatggggattgtaattctttcaacttctagaggtataatgacagatcgagaggctcgattagaaagaattggcggagatgttttatgttatatatggtaatncttctaacacccgaattatatgagaaacttcgatccattnttggt

SEQ ID NO: 11356 - DNA, 418 bp, Glycine max
  Clone ID: jC-gmle01810053c02d1
ccttatcgtatacccataaaaagaacgttgaatctttttggaaacatatcctataatcaaaatccaatttgcattaattatataagggaacttgaaacataccccggggaaatgattaatgggtaagttattcatttagtaattaaatcttcgtgaatcccccctttttttaattccaggtaaaacccttattacatttaccaatattccttaagggggaaggtctattaaaaacttggggtttctctttctttttttttttaccaaaaatggatcgaagtttctcatataattcgggtgttagaaagattaccattttttacataaaacttttcccgcaattctttttaatcgagcctctcgatctgcattaaacccttagaagttgaaagaaatacaatccccatgccccctaaaa

SEQ ID NO: 11357 - DNA, 519 bp, Glycine max
  Clone ID: jC-gmle01810053c03a1
cggagccctctcttcaggtcaccatctagactgcaatcatggctgatggaccacagcatccatcagttgttcagaagctagctggacagtcttacctggtgtccaggcttagccccaactttaactctaggaattattctgcaactggttcttacgtcaatggcggaatgcactcgcctgggttggctgttgtgtcacctgtatctccagttactgtgcatgctccagcagagaaaggagtgagtggatttctagtggattttctgatgggtggagtatccgctgctgtatcgaagacagctgctgctccaattgaacgagtcaaattgcttatccaaaatcaggatgaaatgataaaaagtggtcggctatctgagccatacaagggaattggtgattgttttgctcgaacaatgaacgatgagggtgtgattgctctttggagaggaaatactgctaatgttatcagatatttgcctactgaggctctgaactttgcctattaggattactttaaga

SEQ ID NO: 11358 - DNA, 448 bp, Glycine max
  Clone ID: jC-gmle01810053c03d1
aacctcaattacatcgaattgaaagtttacatgtatattgtaaaccgacatacacttcaaatcaatacaatatatgatgaattacatccacacaaatctttatttaatagacttgattttcagccatcaagtcatgctagtttcttcataatattttgtttgatagcccagcccaacactaggatctccaatattgaaacacctaataccctaccttcggacccccaatatattgaaagactcaaacaacatcattgggaagaacctccttcactaatcgatggaaatcattatatgatgatcctcccatatcagtggcttctattgctttctttttccactccagacacttttggctcattcccttccccctttctccggttattatttctttcacaagtgttgacacctcctccctttttacatcatctttaatatgcattcctat

SEQ ID NO: 11359 - DNA, 575 bp, Glycine max
  Clone ID: jC-gmle01810053c04a1
gtaaactgaatcagttggattttccaagctctcactaactgggtacacttgaaaatagttcagggcccctaattcaacttaaagttttcatttttagcttatttattatatgtgtctccaattcagcttagatttttatatatgttccaagttccatctttgttcatttatggaagcatagtaatagtatctcttaagctttgattatcaatttaagaatgatacttagagttgtttctattgattattgcctgaccaaaccctagtgacacaggttatagttttttgtttgttttaaacgttatttatttatatgaactgatattttgctatataagatttgtgaatatgcttaaaacatatgcattgatgtcatttatgtgaactattattattttgctatgtaagatttgtgagcatgaataaaacataagcattgatgtcagctatctgtgggcttccaatccttgagtgtgtttattgtctggcttgcgctcgttgggtttggaagaagtgtttgtacactgcatgctatgagagtgaaaattggggcctggctacggcacaagaatttg

SEQ ID NO: 11360 - DNA, 453 bp, Glycine max
  Clone ID: jC-gmle01810053c04d1
ggaataaggatgattcttgaggaccaaagacgttctaatatccttacaataacacggacatgtgcacgctaaagtataagccttcaatacaaaacattatttaactacttgttcactgaacaagacaagattcttcactctttccaacatactatcccatgttatgtaccaagaactttacaggtacatcccaaacacaatattttccaacactgaaatattcaatttaaggagacacgaaccgtaatgggtctaaatccatcagcatgggtaacaatgccaatctggtttcagtaataatcatgtcaacgagggctgtaactttgcattccctttattgggcagaggctctttcaagtcgctcagactcaggttgacctgaattagttgaggattacgtcctattcggagaccatagcaagaatgatgccctgacgcagatattttatgacc

SEQ ID NO: 11361 - DNA, 405 bp, Glycine max
  Clone ID: jC-gmle01810053c05d1
ggggctcccttgtatccaggtgccacagaaatgctaatttctgcaactaaatcaatcacatgttctacctaggagcagcaatagaaactttacctgcaatggaccaggacggactattgtgtatccaaggccagatcttcttaaggaatcttcaccagccctcttggctttaagaacctgctcccgcctggaaggctcaattcctagtccagaacatgaaactaatacaaaatcggtttcttgcccagtaggcaaggctttaatatattccaatataagcttaaagcttcttaaatcctgtttcattggtgcatttccttcaacaggcctctgtcttctaggctcaaagcgtatggtcaaagtatgcacaagaaaggatctacactggatctctggtttcactgg

SEQ ID NO: 11362 - DNA, 500 bp, Glycine max
  Clone ID: jC-gmle01810053c06a1
aacatatagaacactaccctgaacatagtaaagaagccagtgctaggatttgttagtgaagcaatggctcaaaccatgttgctcatgtctagtgtctctagcagttattccgtggatttgaagaaagaccttttcctccaattgcagagtcaaagtttaaggcctaagttctctcagctctcattcaacccacttccatcatcaacttcttccttttcttcaccccgtacattcacaactctggccctcttcaaatctaagaccaaagccgctcctgctaagactaaggttacaaagccaaagcaaaaggttgaagatggtatctttggcacttctggaggatttggttttactaagcagaacgagctctttgtgggtcgtgttgctatgcttggttttgcagcatcactgttgggtgaaggaataactgggaaaggaattctagcacaattgaatctggaaactggaattcccctttatgaagcggagcctcttcttct

SEQ ID NO: 11363 - DNA, 333 bp, Glycine max
  Clone ID: jC-gmle01810053c06d1
acacttattatttttacattctgtttttgatgccaaatttgttgatttatttataaaagaataaccatgccggggcgaccaaaaaaaaatgatcgcgaattgggatagaaacataccgcggggggggaggcgaaagaggaacttgatatgtctgggaaagaattttttcgacgaaaaacttaagaaaggaccatggtttcaactgccggaaaaagaatctggtgctgtgggggggcttcttcaaactcccaaagaagaggaaacgcttctcagaaattatgaatgctgttcagggcatgaccagccccagggacaaaatctggggggcccagg

SEQ ID NO: 11364 - DNA, 653 bp, Glycine max
  Clone ID: jC-gmle01810053c07a1
agtgagtctaagccattatgcaattagtcaagctaagatacttctctggaattacagttacagttctctgttttcgctggtggaatctacaccaccggggtttttgtctctggcttggaaggatgttcctctcttgaccgtctcctcttggcgttagttaatgggttcgacttggttgattgttattggaaagggtttccacctggtccttttttccctggtgtggaacaactaattattattattattattattatttgtcgatatgccatggatgatcgatcatgttgtgctatgctagcctcttcaattactgaagttatgcagaagatttgatatgtgaattggctggcactacaagaaattgaggtttttgggagaattgccacctttagcagcagtttggtcctctactagttccacacctccttacttttgttcttctagttgatttttctatttcttatcagcgtttcttttttcttctagtggcaatgatgttattattagcttcaagaattggctaggcatactgtgacaatgaaaatagggagaaatgggatggagaaaagctttctttctaatgcttctagtcattgtgatttgtgactctgtaattggattttgtgattgatttaatggcctgatgaatg

SEQ ID NO: 11365 - DNA, 235 bp, Glycine max
  Clone ID: jC-gmle01810053c07d1
ccttcaagggagaaacaaccgacaggaaaccacacccttaaagcaaaagccagaggggggaaaagactgaggaacgcggattcatttactccatgtattaccaaataggattggttcgcttctcagacacagcatgagacggtcataaaaaataacaacgtgtttgcaaagtccataacggatgaaaaacgaggaggagggaccactaagaagtaccgaccatatgtggggggca

SEQ ID NO: 11366 - DNA, 504 bp, Glycine max
  unsure at all n locations
  Clone ID: jC-gmle01810053c08a1
cgcccaacaccaaccatcccctctcatcgggaaacgcaccctcgccgaattccaaacccacaacctcaacagcagcaacaacaacaacaataacccactcctttcaaactatctacttcgttctgtgaagcccagaactttccaacacacagaattatccacctttccgtcaaatcgttacggccttccccttctccaccaccttcgccctaacgccgttaacgcgcaacaacaacaaccggttacgaattcgatcctccccaacacaaattatttccctccggttcgcagcagactaaccgcaccccacgaactggagaagaactcaatagaccgccgcctccaggagttggaaaagcagcttctagaagacaatgaagacgaacaaggcgacgccgtttcggtcattaccaacaccaccaccacttccgaatggtcacacacaatacaaaacctaatcactccgcagaaacccacgtcttcgtcttccacttnctctacgac

SEQ ID NO: 11367 - DNA, 527 bp, Glycine max
  Clone ID: jC-gmle01810053c08d1
gaatatccaatatatactaatatatgctaatatatgctaatcgaatatctatctatatctatctacctatatctatatagatatagggagatagatatagatgtttactaagtggattatattgagccgcaatatatgtgcggcaagctaaacgaaaaggactattttgtagaaaactggtcaatgatggccttccatggattcacctatataagccgcagctaaagtagcaaaaatgagagcttgaataccgcttgtgaataatccaaggaacatgacaggtataggaactactaaaggtactaaagaaacaagaacaacacctactaattcatcagctaatatatttccgaaaagtcgaaaactaagagataagggttttgtgaaatcttctaagatgttaatcggtaaaaggattggggttggttggatgtatttattaaaataagctaatcctttttttgaaagacccgcatagaaatatgcaattgatgtaagtaaagctcaagcaacggcagtatttatat

SEQ ID NO: 11368 - DNA, 606 bp, Glycine max
  Clone ID: jC-gmle01810053c09a1
gttttcacacgcatgacacacttcacttctctcctcactttcgggtcagtcttctgaagatcttttggggggttgtgaatttgtgtcttcttggctcccaacccacacgcaacgcaaccatagaatggaatgaatgaaggcaaagcttatacttataaaagagagatagaaattggttgtgaaaaacagaagcactttgtttctaagtaaaaggaatcttcagctgccatgtttcatcgctggagcaattctcatcaacaggatcagggaagcagcgagctttatgctgaatccaagattaaagagctgaagggtgttatcggacccttatctggacgcagtttgacgtattgcactgatgcatgttttaagagatatttggaagctcgaaactggaacgtagacaagttcaagaagatgttggaggagacactcaggtggagatcaacctataagccagaggaaattcgctggcatgaggttgcaatggaaggagagactgggaaattgtatagagcaagttttcatgatagacaaggaacgactggtcttaatttgagacctcgaatgcaaaacacttactcaattgagaatcagttgcggatc

SEQ ID NO: 11369 - DNA, 553 bp, Glycine max
  unsure at all n locations
  Clone ID: jC-gmle01810053c09d1
aacaaactgttctacacatgtatcttcaaaatcattgtataaaattcagaccctttacttatttataaacataagcctgatattgaccaccaaagtaaactagtttgttttgtttatcttgtcaaaagagagcttccttctttgataagaacaaacacactgccaccatcgccccttgagatacgcaattcttcgtcgaggtatgtggtgagtaaccaggactgagcattgctgttggaaattgggatcttcaagggaggcctacttgaaattgttttcactaccgatgtggctgtgtcttggacagaggtaaggatgcctttgaaaagtgtaaggtcaatcttttgacccagaaattccacattttccggtatctctaatgagtccgtaagctgtggagtgccaattatgccttcctcaaactttatctgcacacgttttggacttcgaacatcaaatttggcattagtactaattgaggtggtggccaaaggaccagcgaactgaacagagttttggacggtnaaaatcagcgagtcaataatctgggata

SEQ ID NO: 11370 - DNA, 588 bp, Glycine max
  Clone ID: jC-gmle01810053c10a1
cggctcgagtttgaaattttgataaaccgcgatcacaggttgccgcaccttaaaaccggaaacaaaagcaatcgttacttgatttcaagaatctctcaatttcttcctacttctttgtgtacggtttcttaagggaaagaaaatcactctctgtgctggccacagacttcgtgaatcattttcttttccactattagtttatttgctgaacactctcctatttgatataggacttcgtgtcagatttaaacttcttctgtctctttctcagttctctgtttaatttcaagttcaagctggtgaaatcttggattagtgctcccactctcctatctggtataggacttcgtgggtagacttttctatttctctcctttctttcactctcttcttctcactgatccgcattgccgttcaaagtggtcttatttgaaaaacacttgggcgttggtgcaaatgtttgcttcgttaattttctctggggacaacaggctcactgagaaaaccaattttacttgcagagatttggacatctttggtgttattatacaatagcaactcaatttagaaaattctaccgcattacat

SEQ ID NO: 11371 - DNA, 510 bp, Glycine max
  Clone ID: jC-gmle01810053c10d1
ggataaataacattttattacaaagtcctccatagcatacaataacaaagttacatggaaattcattaactaccactaacaataccgttatagccgggtcaaaatgctgaatttaaacaaaactaaagagatgaagcacatgtacatttatttttatttttatgaaacttagattgaaacaatacaacttaactatatgttgatgctttgccaagtgattctgcaatcttactggcaatacagtaagatgtagactgaatggttaccatggggttgacaccaactgcactaggcaaaacactcccatcacacacatacaagccttctgcttcccaagtctcaccattctcatcgagtgcaccttcttcttcagaggcacccattctacaacttgacatctgatgtgcaagtggtaaacactgtccacacttcattccttgaccttggacccccaactattgtcacagtgtcaagaaactcctccaaatcttcctccttcatccccttaca

SEQ ID NO: 11372 - DNA, 553 bp, Glycine max
  Clone ID: jC-gmle01810053c11a1
ctcgatattttttgagacaatgccatatcgattgaatgaaagtacaggatacatcgactatgaccagatggagaaatctgctacactcttcaggccaaaattaattgttgctggagctagcgcttatgcacgtctctatgattatgaacgtgtacgcaaggtttgcgataaacagaaagctatactattggcagatatggcacacatcagtggattggttgcagctggtgtcatcccatcaccttttgattatgctgatgtagttactaccacaactcacaagtcacttcgaggaccacgtggagctatgatattctacagaaaaggggttaaagaaattaacaaacaaggaaaagaggtattgtatgactacgaagacaaaatcaaccaagctgttttccctggactgcaaggtggccctcacaaccacactattactggtttagctggtgcgttgaagcaggccactactcccgaatatagagcatatcaagagcaagttctcagcaacagctttaaattgcacaggctctgaatgagagaagctatgagc

SEQ ID NO: 11373 - DNA, 610 bp, Glycine max
  Clone ID: jC-gmle01810053c12a1
cagcctgtcaatagtccagtgactgtttgtggtgatattcatggtcaattccatgatctaatgaaacttttccagactgggggtcatgtgcctgagacaaattatatttttatgggagactttgttgatcgaggttacaatagtcttgaagtttttaccatccttttacttctaaaagctagatacccagctaatattactcttttacgtggaaatcatgaaagtagacaattaacccaggtctatggattttatgatgaatgccagaggaagtatggcaatgccaatgcttggcggtattgtacagatgtgtttgactatttaacactttctgcaattattgatggaactgtgctttgtgttcatggaggcctttctcctgacattcgaacaattgatcagataagggtcattgaccggaactgtgaaattcctcatgagggtcctttctgtgatctaatgtggagtgatcctgaagatattgaaacatgggcagtcagtcctcgtggagcaggttggcttttgggatcagggtcacttcggagttcaatcacataaataaccttgatctagttgtcgagcgcaccaactcgttcaggagggcttaagt

SEQ ID NO: 11374 - DNA, 272 bp, Glycine max
  Clone ID: jC-gmle01810053d01a1
aaaaaaaaaaaaaaaaaaaaaaataaaaaaaaaaaaaaaaaaaaaaaaaaaaaaaaggaaactacaaaagggcggtcttccacgtcgagggttttgacccccggcattttttccctgaccgttccctgctgctttatcgggttcccctacattgagggtgtctcacctcttgtttttgacatgcccatacctgtcccctgtcttaacctgttccctgctgggctttcctcacctcttgcagctccttggcatattgtgtttcgcctggggcg

SEQ ID NO: 11375 - DNA, 343 bp, Glycine max
  Clone ID: jC-gmle01810053d01d1
ataaaggggccaaaaccccaggccccaaccgcaaaactgtagctaaaccgagcatgatttaggtcccccaaagccaagacacgggccgggaggtaaaaaaaccgggaaggggaaaacccttgcataccccaaactaaaaacccttgtggcgggccccgtttcaccaaatgggggaaaaaaaaaaagggccccccagccacagcttacaaaaaggggacaccacggaagggccaatgggccccccccggcaggagggccaaaagcccacgcgccaaaagaggtaacccccaacaaaaccgggttggaagccacccccctgaaaaaaacaaaaaaaggggggggg

SEQ ID NO: 11376 - DNA, 540 bp, Glycine max
  unsure at all n locations
  Clone ID: jC-gmle01810053d02a1
cagagactggtcttctcttcccatatttgaacaacatctctcacggccttcatcagctcgaggagtactgcaaaacccagaagtccaatgcttcaatggatgaccttgttcagtcttctgtcatgtcagagtatgatttggcagcagagggagatctgttcaaagctcctgaacctattattgaagagccaatcatggatatggatcccatgacagccaccatctccatgatatcttgtggggaagatgtctcctcacagggactaaaatccactgatattgatattcttcaaaatgatcagtttctgcatgaggtgttctatgaatgtgaaaaggatctcttagaaaaggcagcaatagagccaccattctctgagattctggaaatcaaggttcctcttctgaacattgatgagaacacaattcaagacaacaagctgcttnctgacatgcaattagcatagagtgtcagcttatgaagtttgagctcaatggactggatgcgtggagctgcaatgaagcctgctttcattgatatcc

SEQ ID NO: 11377 - DNA, 179 bp, Glycine max
  Clone ID: jC-gmle01810053d02d1
aatccacctaccaagaaagctactacaaccaacgacccaaaatttgacccgctaaattatagctaatgagcttaatatccattgaacactgtcatcaatccataataaagaagggatacaataacatagccacaaaaggcgttaaagacgctcctaacacgaagcgcgtaatatttaat

SEQ ID NO: 11378 - DNA, 311 bp, Glycine max
  Clone ID: jC-gmle01810053d03a1
cactcttgtacatgatattgtatgggcatatctacactcatgacttgctcctatccgggtgcattgcactgcgaacagagtgagggaacagggtcttattagcgcgtcggagcttatacattccggggaatacaatcctcgatgtatacgcatatgtcctggatagaaggtgtcacatatgcttcgctgctggctgggctataccaagtgtgaaggctgctaggggcatcttgcaaggatgcatgaacatccatggattgcgtattatggcgggtgaatgcaatgctactttggtagtcgcctctggtgac

SEQ ID NO: 11379 - DNA, 426 bp, Glycine max
  Clone ID: jC-gmle01810053d03d1
aggggatgcacacctaggtacactacgcaaccggaataaggtcccgggaccacgcgctcactaggcgcgggccgcccttttttttttttttgtttttttttctttttttatttgtttttttttttttttttcttttgcttttttttttctttttttttttttatttaaaaaaaaaaaggggggccttaccaatggggggggggaaaaagggccccggagttgctttttaatttagcccacaacaacccggtttttaaacaaccacagaaaaagccgggaggccccccacggactccccgaagggcgatgttctcttaaaaacttgaaaaagggggaacacggggtaaaaccacccctggagggaagattaaaatatatccccgccgtcaaaaagagggccctcgataacaaaaaacccccccgcca

SEQ ID NO: 11380 - DNA, 516 bp, Glycine max
  Clone ID: jC-gmle01810053d04a1
atttcatggctcgcaagcctttcaaattcaatgaggatgttctcgagcaacttagaaatgggactgcgaaattcgaggttgtttcttccccggttccttcagttgctgctcctcctaaccggaacacgagcttgtttgggattgggaatagtagcactgtcttattcgccagaattggctcatcctttggtggacactctccagcaatgaagaaacttgagcatttttcagttcagaaggttacaggggatggacggtgtctgtttcgtgcactggtcaaaggaatggcttacaataagggaaccactctcaatcaacgcgaggagagagaaaatgcagatgaattaagaatggctgtgaaagaagctatatgtgaaaatgaaggtgaacgtaaattatacgaagaagccctcattgccatcacagttgacgagcctataaaacgttactgccagcggattgtgcgacctgatttctggggaggagaatcagagctattggtactgtcaaagtatg

SEQ ID NO: 11381 - DNA, 565 bp, Glycine max
  unsure at all n locations
  Clone ID: jC-gmle01810053d04d1
gcaagaagccaagagcaatcccttttcaattaacactattacattattgttatataatgaagctgattatgatgcttgcagcatcaataaagcagtatataatatatacagattttttgcaaattagaggatccaaacaaacaagctaatcaaacaattttgaaagaatatatttttttcttgctttgtaagaatatagctcctctattccctgttcatggtaaccttatctagattacatctgttgaccttgacagtggcacaaaatctatgaggaagctggcattggaactcgaagtacttgttgcagaaagcgtgctgcaagacgttgagtgatcccacccataacacgctccccaagtctgcgtgcttcaggttgctgaagaacctgtagtataggtagtaaaagatctggatcataatcattagaggatcgcagaagttcccatatcctaattacttgatctctaagctctatcaagttttgcatttcagtttctgacgttataatgggtccatttgcattgccattngaaacaagaaccctcatannatcgggaactga

SEQ ID NO: 11382 - DNA, 503 bp, Glycine max
  Clone ID: jC-gmle01810053d05a1
cggctcgagggcttattgggatggacttctgaccttcgagccatatgtgcaagatctttgaggcagcaagactctacatcttttaggaaggtgccttttgttctaattgatgttggacggcggccaaatgctgagtatgttgttgtcaacatggatggatcaagacatccattacctctgacaaccgtttatcataaattgcaaccaataaatgcttctccttatactttcttgcaagcactttttgggcatgaatatccggttggactactagatgaagagaaaattcttccattggggaaggatatcactgctgttggccattgcagtttaaaaaatggaattgctgaaattaagtcctgcaaagatataccatattttttgtctgacttgagtaaagatcagatgatagtagatctttccatcaaggcgaaaatactgttttggggtggtatttcacttggttcgatgtcagttggggtacttggctatgcagttttgag

SEQ ID NO: 11383 - DNA, 471 bp, Glycine max
  Clone ID: jC-gmle01810053d05d1
gataagtcgcaaaagctttgaattgaaatcattcaccttcgtcaataaattaatcctgacttattctcattgaaaacacatgttacattgggaaaacgagactactcaaaagtttacatctctcctagtatttaatgtgggagagacaaacactgtaaccaaaataatgcaccagtaattggcggagaagcagcaatgttgcatttgcagcaagaagaacacagccctaaaaataacttcacagtggacttggtccaccttcctggttaaaagctctcaaggactagtaactaagacttttctgcttcaatttgttgatctagtaggtatacaaaaaaatgaaactagtgttacactgatttaccttggcgttaaaccacatcttcaggactcctgcactcccaaatactgggagttagaagctgccaggagggctgctccaattccagagccatcattagaatgttcaat

SEQ ID NO: 11384 - DNA, 597 bp, Glycine max
  Clone ID: jC-gmle01810053d06a1
gcaaaagtgaggggtagtggtagaaggataaggtgactataaaccgtggaaacggtggtgtagtgtgtgagtgtcattgtgaagttggaaacaatgctagcttcttcgctctccttcctccattcttgcacatccccctcttcctcttccttattgtcaatttcacctccaaaccccaaaccctctcacttcctacctttcgtggtcgaagccaaagacaggacccgcagggaagacaggaccgctcgccacactcgcatcagaaagaaggtcgaagggacgcccgagaggccgaggctgtccgtgttccggtcgaacaagcatctctctgtgcaggtgattgatgacaccgcaatgcgcacgcttgcttcggtgtcgacaatgcagaagacggttgctgatgagttcaactactccgctggccctacagttgaagtagcaaagaggatgggtgagatcattgcaaaatcctgtttggagaaggtgatcacaaaggttgcctttgatcgaggtggatacccataccatggccgtgttcagcacttgctgaaccacccgtgaacatgcctagattctaactaagtagcccttcctttt

SEQ ID NO: 11385 - DNA, 370 bp, Glycine max
  Clone ID: jC-gmle01810053d06d1
atgggaaattctcgatattaacgacgaaattattcttaaccatacacatggcacatggtggctcaaaaagaccacttaaaaattcctaactaagcatcaccttgccaatttttattcttagatcaaatgactattgaacacaatttttagtggtccaaatctagagactatctgactgattttcatggcttccaaaggatgggagtctctgcgatcatggaggggactacctatggatccatattagaagctggccttctgtcctcaaagcaacctttgccatttttctctgtgtctcttccaactctaatggagcttccacggtgtgccacaccccaacagaaggcgcagatgtctgcagtttcatgtt

SEQ ID NO: 11386 - DNA, 567 bp, Glycine max
  Clone ID: jC-gmle01810053d07a1
gaaattttaaaaatgactgggataaacttaagaattcaattattgaaattgaataagtaaacaatttaattggattggtcgaatggtatcaaaaaaatggagtactaactcccatttcttatttattattgaattaaccgatcaacttgctttgttatcgaacatttctttttgatttcaaaaattttccggaaaaaatttgaatctatttttatatgcgaatcaatcctactacttctggtcctgaggtttctgcgcttgaaaaaaaaaatctgggacgtatcgcccaaataattggtccggtactagatgtagcttttcccccaggtaagatgcctaatatttacaacgctctgatagttaagggtcgagatactgttggtcaacaaattaatgtgacttgtgaagtacagcaattattaggaaataatcgaattagagctgtagctatgagtgcgacagaaggtctaatgagaggaatggaagtgattgacacaggagctgccctaagtgttccagtaggtggagcaactctaggacgaattttcaacgtgcttggagagccca

SEQ ID NO: 11387 - DNA, 556 bp, Glycine max
  Clone ID: jC-gmle01810053d07d1
gcaagcagtaacattgtactgtaaagataagtatttaaataatcttagctgtctgctaccaatatgttttgagggtttaaaaaaaaaacaaaaatacccgaatcatatattatatggtcgggttcaatccaaaatttcagacattttaatacaatcttaagaacctggcataccttaacccagctacaaatttaaaaataatactacagtttaggggagagcaataaaatccatcctacttcaacacacagttctgctaataagccccgttaggaagcaccttgaattgcagcagcaggttgcatggctatatcctgattctgtctcacagcaaatccatggccaccataaccctgatgaccaccataatggcctccattggaatcagatctccaatgcttatttcctggactgcgaccccaagaaagacgcactgtctgcttcccaattactgtcccattcaatccctgaattgcttcctcagcattctttctgtcagcaaaatgaacaaatccacaccctttaccaactgggattttcacagagacaacctcac

SEQ ID NO: 11388 - DNA, 542 bp, Glycine max
  Clone ID: jC-gmle01810053d08a1
ctttctcagcttgctcagactccaaggtaaatggctgtcagtgcccggttgggtttcgtggggatggcactaataaatgcgaagacgttgatgaatgtaaggaacgaagtgcttgtcagtgtgatggctgcagctgcaagaacacttggggtagttacgattgtaaatgcaagggaaatcttctatatataaaggagcaagatgtttgtattgaaagaagtggatcaaaatttggacggttccttgcctttgtggtcatagcagttgttgttggtgctggtctagccggttacgtgttctacaaatataggctccggtcttacatggactctgagatcatggctatcatgtcacaatacatgccactggaccagcaaaataatgtagttcatgctgaagctcagcctttacgacaacaaggcgccgtgtaagacatacataatgagctaaaaatagtcaaaggaacccggtgcactgcataatccacttgagagaaggattataaatagaactggctatatggatctgaatccatttgacag

SEQ ID NO: 11389 - DNA, 505 bp, Glycine max
  unsure at all n locations
  Clone ID: jC-gmle01810053d08d1
aaataaattgaaaaagtgatagttgcacactgatttatttatttatttatacatgcaaaagtagtcaaaataattgacatacttgtctacatcaaaagttgacgaggaaaagtaaacctgcgtagctagctagctgtcccatgtacacttttatttaaaaattgaaacataaaaaaatcttgaaacgaagcagctaatagaatccattatttatatataacaataaactactatatacacatacaatgtattctagtgtagtcccctaaaacacgagcaagttattctgggtgtcgtagcccaacttctccaaattcggctggactgcaaattgaatcataggtggtggtccacaagtcaatgcccaggtatcaggagatgcatttggaatatgctccgtcaggatactttcagtgatgaatcccacactgtattcccacccttctcttatgctntcttggatgaggtaccacaccttcaacctatcatacttgttagcccactc

SEQ ID NO: 11390 - DNA, 492 bp, Glycine max
  Clone ID: jC-gmle01810053d09a1
gcactctgcacaatgctttccctctccgtccctcctctcaacctcaaacccataacacccaatgacctgtttctctcatcagcctctccctcacctcaccgtcgctacttcgtgaaacccatctccgccgtcctcaactcatctttcttcaagaaacctgagcagcctctgctgccgcagcatcaagtctaccagcccttccgccctcccccgtctaccctcccctcgcaattcggcaccctcgacatcgccggccgaatcgacatcctcgccaaccgcctcggcctctggtacgagtacgcgcccttaatcaattccctaatccgcgaaggcttctcccctacgacaatcgaagaaaccaccggcatctccggcgtcgagcagaaccgcctcatcgtcggggcgcaggtccgcgactacctcgtccactccaaggccgaccccgaccttctcgctggcttcgagaccggcggcgccgagctcctctacgag

SEQ ID NO: 11391 - DNA, 483 bp, Glycine max
  unsure at all n locations
  Clone ID: jC-gmle01810053d09d1
catcagttacatgatttttatttcataactactgtgacattataatacatcacatgcaaaccaaaactgaatgctaataaccaccaagtttacatgacgaaggcagtatctctaacatcaagttacaagaaaacatgaatgaaaaatagaatcaatggctctgaatagcaacattgataaattgaacacgtgaaatcacagacatgacactcatctccatatttcttcctgaaagaaagatgctaaatagcatatggaacaaattttctccaatggctaaggaacaagttacctgacttagataactgcggcagtcgaaacctgtgtttttctttataaaaatgagtaaatctgngtattactttgttttattcccaatctggaacatggaaaataaaattggttctgaaacagctctgcccatgccaaacactccaatagatagcccaaaagcagggcagaagttctacantttcataaaca

SEQ ID NO: 11392 - DNA, 500 bp, Glycine max
  Clone ID: jC-gmle01810053d10d1
acagagtcaaaatgactgtattcaatattcatatactcactaggttacgtgagataagaaaatatatttgagtggaaaatgtaacccgtaacgtcatattacaggaagagagggaaaaaaaaagtcgaaagtattacataactataggaatgttgttgaaaaagtctatctattactattactgttagctagaaatccgtttagctctgcaataactgtccttctttctgatggaggttcctcgtggcaccacgaaccttcatgcttataagcaatagcatggccatcacgaaaacacagatgctagagcctataactgcacaaaatcgtcaagaaaattgtaaagccaacccccacaatctaaatatttacgaaaaagaactactaatgtatctaaagaaacagtaatgtcaaaactatccaaagggtccaatccaaatttccaagaaggggaaaagggagaacaaagaaattaagtttaatttacctatattacgcga

SEQ ID NO: 11393 - DNA, 585 bp, Glycine max
  Clone ID: jC-gmle01810053d11a1
ctcaccagcagattacgtcaatgcacacaacgctgcaagatcagaggtgggtgttcaaaacttggcttgggatgacacggttgctgcttttgcacagaactatgctaatcaacgtaaaggtgattgtcaactgatccactctggtggtggtggccaatacggggagaatcttgctatgagcactggtgacctaagtggcacagatgcagtgaaattgtgggttgatgagaagtctaactatgactacaattctaattcctgtgttggtggagagtgtctgcattacactcaggttgtttggagagactctgtgcgtcttggatgtgccaaagtagcatgtgataatggaggcactttcatcacttgcaactatgcttctcctggcaactatgttggccaaagaccctactaggttgttacatttgtagcagcgagatggctaccatttaagatgatgagttatataccatacatattaagaattaataatagcatcatgaatttatatagattcatgttatgatattttccatcgtattggaatacatgtgagctcattaattactcacacaaatcaataattat

SEQ ID NO: 11394 - DNA, 511 bp, Glycine max
  unsure at all n locations
  Clone ID: jC-gmle01810053e01a1
aaaaaatttgttttattttttttgaagctctttccgctctctgcaatggtggagatttgagttactgtgtcgcgtctttctcggagttcaacctcaaccgttcaaaattatgcttctgggttttcgtcatttcagacaaaagtttctatttttgaggtgtttctgagcagttacaactttttctgtgcttaaacgtcattgtactgtttctgggtacgtcagttctgcattcaagtacatttgtcttcactgagttaaaaaagattcaatcttttctgctgtttatgattttgttaatgcttgaatcttcaatgggtagggtttaagtgtgttttaaggttttggggtgtcctagtttttctttgattcacaaaaaaatggaggaaagagagatttttagttctgggcatgctgntaatcttctcgaggcctcccatagctttcacgtggcactaaactccgtgccagtttcccggcccacagtggagacaccgcaccagcaccagcaccg

SEQ ID NO: 11395 - DNA, 546 bp, Glycine max
  Clone ID: jC-gmle01810053e01d1
gctgaaatgtaatttcctccttcacaacaaataatatcgttaggttacagtttagaaagcacccacatgcactcatttcaaacatatatcctacatctaactgctacaactcagtaaacaatattagataacaccaaagagaaacaaggaaagcctaaaaagtagatttcctaacactaataacacctaacaaaaagcgaacaatttctcaagtcaaaaccaacctgacactcatccatcccactataagtgtcatgttaattgtcagcatcagtcaagcatgagcccaaaaggggtttgacactgtagaacaccaaatacttggcagggagcatgtttagcatgcaactccagcatctgcatggctggggttggactcattttcagggaaagaggctgaatcatcagaagctgagttcccagagctttggccattgccaaaaatgtggtccactcgaaaagcagctggtgtcatgattggctttactccaccaagaccaattcttatttcttcagcaactgaagtagggttgacatgcatagggg

SEQ ID NO: 11396 - DNA, 574 bp, Glycine max
  Clone ID: jC-gmle01810053e02a1
gttttgaaacagagaacaaagaaccatcgccatgcttgatccgagaacacaccaccccaccaattctttcgaattgtacgacgcaacacgacacaaaccccacacatgggatgttacgaactccggtttgtggccttcgaaaccggctttggaggaggcagaggtagatgattccgggatttgttcaccttccatgaggaccacgagccccccacgccgaaaaaacaaccaccgaagcctctcgccaacgtcgaggacgcaagccatagtgagagggcagagggagctcatggaaatggtgaagaacatgcccgagtccaactacgagctctccttgaaggacctcgttgagcaccacatggttggtgatgctactagacatgaaaaaaacgcggtggaagagagaaacttgagcagcgtgtacaacaagagagaaaaaaatggtggtagtagaaaggctgataataataataataacataaatatggcacaggtgaagaggaacgggaacattgatcgttgaggttctaccttaaaatgtggctccttttcttttgatctagggaccagagag

SEQ ID NO: 11397 - DNA, 444 bp, Glycine max
  Clone ID: jC-gmle01810053e02d1
gaaatgcaaagctattgagacacacgaactatgtaggaataatcttacaagcaatccaatgatgcacacagaagtgttacacactctttaacacatactttctgacaccacactctcctactagttgaaaattatcagaaaatacaaaataaggaggttcgttaaatatgtagcatccaccaatttgtgattttcaatcaataagaaagattgtgttcaaaagagtatttgagagtattttcctaacatttctcgggatacaaatatgatgataaaagcctggttaaaaaagaaccgggaatcttccaacaaggaaatttaccccaagcccttcaaaatggacatacccacttttgattaacaaaataaaggtgcctggataaatgaggagcatgtctagaatcgacggatgtctttatgaggcctgaagttaaggggatgggt

SEQ ID NO: 11398 - DNA, 358 bp, Glycine max
  Clone ID: jC-gmle01810053e03a1
ggtatgagtagagttttcttcaagttaatcacctagctggtgcagagaagaccctgttgtaccagctaggtgattaacttgaagaaaagggtatgagtagagttttagaatcttctttttcttggttgctaagtttagcaattttggtcaccaaatgaaatattgataaggtcatttgttgtgtacagcttttgaggtttgtttgtaaataaaataaaatgtgtatttttctagtgctgactaacagtttgtcttcctctgaatacttttgtatggctatcttgcattctttgccctgtagctccttttagaagatgtgattgtgaacaccgttgaaacggtggggttgtcatttgat

SEQ ID NO: 11399 - DNA, 315 bp, Glycine max
  Clone ID: jC-gmle01810053e03d1
gacacaagttatgaatatataaggcccacttttttttacagtgaaaacagccgaaacgaagttgttaattatacattgccgagagaaatgggtaaaagatattgtcacccaagatttaataattggtctattcttagcctaagcaaaggccatcttgttgcgatagaaaggaatgagaataaatacgttttatctggtgacataaagagaccaactatcgctgcagaaactccatatgtttgatgtattgcaaaaaagccttaactgaacttgtttggtactgagatatttgtacgcccttagttcagaactgac

SEQ ID NO: 11400 - DNA, 570 bp, Glycine max
  Clone ID: jC-gmle01810053e04a1
cagcaccaccttcttcactcactagtccctagtaatggcagatgccaagagcaaccccaatgcacaactccttgaagaactggaagctttgagcgaatccctttacaaacaacacacctccactaccacagccagaagaacaacttcccttgcgttgccacgaacttcagctccgcctatcgaagatgccaaacatgatgatggaaacagcaacaaaactcggcggcgcatgtccatgttcccatggcgatcaaggtcaaagcctgatgatgatgccactgccaaggcagaaaccaaaaagcttgatgacaacacatcaacaatttcttcaggtgaaagcaacaggaaagggatttggaagtggaagcctattcgggctttggctcacattggaatgcagaaactaagctgcttgtctgctgatgacgtggtcatagctcatggccttcctttttccatgaatggactgatactattcgattgtgtgcgaaagaatgaaccaatgatggagcggctaagaccatgccttaagggttgcactaagagctgcagatttggaagagacccttt

SEQ ID NO: 11401 - DNA, 552 bp, Glycine max
  Clone ID: jC-gmle01810053e04d1
gattaaaaagttgccaatcagctttttattgataaaacaaaatttccaagtatcagaacaaaacctactataacagagaataaacaaatcccgaatgcacttattatattggcaaaaaacaaaatgatttgaatgaccaaaattctaggcaatgaagttataaactattaacaatatgatgtccattgtccagagctttggctagacaaacactcagatggagagacaatatcggttatttatttcctaactctattcaacgaactgaagcacaaatggactgttggttgtacaattctgtgactccatttgtgatcttctgcctgtttttcctcctctttgagacaactataaacccttcaccatctgcattcttattttcagtaactcctaatttctctggctcaacgctatcactggaatgaggcactggcttattcttttcttcatttccatacataatgtttatgacagcacggtctttggtaatttcatcagaacaactttccaagttctcaattttccttcatcatgcttagactcatccacata

SEQ ID NO: 11402 - DNA, 527 bp, Glycine max
  Clone ID: jC-gmle01810053e06a1
caaagacaatgttggattttttctcttccactagaactacatactacccttctatagttctgttgttataggagctaattaactgctccaacaaccacaaagagactgaaagaacagcaatggaagctgcattatgcagtgcacttgctctttcacccaatcaagtattcaatgcagcaaatcctggagataaaaatgttcctttgaaatatagcaaagatcggagtgttgtaatgacagtggcagccactggaatattagggaaaggtggtgggttgttggagaggccaaccatagagacaacatcacctggtcgggaatctgaatttgacttaaggaaatcgcggaaaacatccccaccttaccgagttttgctgcacaatgacaacttcaacaagcgagaatatgttgtgcaagtgttgatgaaggtgatacctggaatgacaattgatagtgcggttaacatcatgcaggaggcacattataatggactagcagtggtgatagtatgtgctcaagtggatgct

SEQ ID NO: 11403 - DNA, 438 bp, Glycine max
  unsure at all n locations
  Clone ID: jC-gmle01810053e06d1
cattcgaattcattttatttatatattaatattatattcaaatgaaataaaaagatattaaaagatactaattataagaatttgaaagtgaaattataaagttattaaatgattaatcaatttttttctacctgttcctgtagtaaaaagagttccatctgttcttgaatagcttccttcaaaaggacttctgcttccccagtgaatgtcttggtagaagatatgatttctttgaattgaggtttattcgtgtttaagtaagcacgtaactgaacaagaaatttccttacctgtccaatttctaatgaatcaagataaccattcgttccagtataaatagttattatctgttcttccacggnaagaggagctgattgggattgtttaagcaactcgcgcaatcgttgacctcttgctaattgattttgagcagcttta

SEQ ID NO: 11404 - DNA, 557 bp, Glycine max
  Clone ID: jC-gmle01810053e07a1
tgatacgataccttggtagagagggagtgaattaggaattaggaaacgttcggaattgggtagtaaattaatgggttgagccgagttggttcgtggaaggaagaaataaagaaatcaacataagcagacaaagagcttaggaaaagaagaataagaatggtgtggtgagaaagatgaaggtccgttcggaaagggaaaagacgaaagttgtgattaggcatttgcccccttctctcactcaatccgatctcttccaacacatcgattctcacttcgcttctcgctacaattggttctccttccgttccggcaacaacagtcacaagcgtcagaggcattcccgagcgtatatagacttcaagtgtcccgatgacgttttcgagttcgccgagttctttgatggacacgtttttgttaacgagcgatgtgcccagcataaagtgatagttgagtatgcaccttctcagcgtgttccaaagccaagtgcccaaaaagatggacgtgaagggactatattcaaagatccagattatcttgagttcctcaaactaattgca

SEQ ID NO: 11405 - DNA, 546 bp, Glycine max
  unsure at all n locations
  Clone ID: jC-gmle01810053e08a1
ctattcctcactaggagctcctctccactggttcttcatctgcatgcacacagttgcatagttttggaaaccaagaattcctgaagaagggtagcatcaacaagcagttctgaaaatggagatcaccaatgtcagtgagtatgaggctattgctaagcagaagatgccaaagatggcgtttgactactacgcatctggtgcagaggaccagtggactctgcaagagaacagaaatgccttttccagaattttgtttcggccacgtattcttattgatgtgagcaagatagacttgacaactactgttctaggcttcaaaatatccatgccaatcatgattgccccaacagcctttcagaaaatggctcatcctgagggagaatatgcaacagcaagagctgcatctgctgctggaacaatcatgactttgtacttatgggctacttccagtgttgaagaggtggctttaacaggacctggcattcgctntgttcagctatatgtgtacaatgacaggaatgntgttgctcagcttgtgagaagagc

SEQ ID NO: 11406 - DNA, 537 bp, Glycine max
  Clone ID: jC-gmle01810053e08d1
acatcaaattctatacccctgctttattgacatcaagtacaagaagtagcagcttcactctaataatttccccaccttattacctcaaatatacttacaatataagtaaaaaaaaacctgttggtaatggtattaatattcatatccataaaaactttcaacatgacacagaaaaaaaaatgtcagcttatccttaaactcaactatatataaaaaaaaaggtttacatgaattcaagtgccgatggaatcagcactaacccaagtccaataatgcttcttaacagaaacagcttcatccgcaacaattttgtcttcaaaaacccctccatactcatccacctcgtaggtgcaaaaatccccttcgggcaaacactccacggtggcactgagcgtgtgcaaaacgtagcaaccgggcaaacccgggtaagaacccgaatctcgctcttcaaccctcatctcatacgaattgggatcaatggtgacaatgtcatcgatttcaaaattcttcgctccgccaccaatcgcagacccgagc

SEQ ID NO: 11407 - DNA, 534 bp, Glycine max
  Clone ID: jC-gmle01810053e09a1
aatatatctgtatatcttcagtatcttagtcagaaaacatagaccatgtcgaatttgagtttccttcaatttcatagtagcagccctttggggcactcctcttctcaacccaaaagtccaaccccaaacagcaacaacttcaaatcatcaaaacatacatcaaatgtagggtgcaatattcaaccaaaatcggaggaaatgaaattggtgttcgacaagtttgacaccaacaaagatggcaagattacccttgaagagtacaaagcagctatgaggacaatggggtggggaatcgaaggcactgaggctgatgagtcttttcaggtcatggactctgatggagatggcttcattgacttcaaagagttcatggacatgttcaacgtggaggagacggtgaaagagacggagatcaagagtgcttttcaagtgtttgatttgaatggcgacgggaaaatcagtgctgaggaattatcacaagttctcaaagcctaggggagagttgcagccttagtgcttgcaagaaaatggtga

SEQ ID NO: 11408 - DNA, 517 bp, Glycine max
  unsure at all n locations
  Clone ID: jC-gmle01810053e09d1
atggcaacatactgataggatagaaagatatatatagtgtttaaagtttcttaggtattacaactttatttccatcaccacaaaaatagctagttgatgtaattggtagcaaacttgtgtgtttctgttctctatcaactttagtccttgttgaccttttctagacaacttgggtgaaggtcatagtcacagacatcacaagagaatgtccaaaacttgccttgctttttacatgaatcacatacatatgctttggccatatccaatttcagtacatgttcatgcttcacatcctcaacctgctgaggcaaagcctctccttcctttctaagagctgcttcgaggtctcttatccgtgattcggtgaacgggaaagcttctgcaccgtatgaggagaccattaacttcccattcacactaatgactntgccatctggtccaatgagaaccaaagcaggaatgccctttacataaagattcttcgaggtcatgccttgtcctgtcctcgtatgggaca

SEQ ID NO: 11409 - DNA, 533 bp, Glycine max
  unsure at all n locations
  Clone ID: jC-gmle01810053e10a1
atattccctgaggaggttctaccacgtggaaacgctctttaatggaactttagctttaactggtcgtgaccaggaaactaccggtttcgcttggtgggccgggaatgcccgacttatcaatttatccggcaaactactaggagcccatgtagcccatgctggattaatagtattctgggccggagcaatgaacctttttgaagtggctcatttcgtacccgagaagcccatgtatgaacaaggtttaattttacttccccatctagctactctaggttggggggtaggtcctgggggggaagttatagacacctttccatactttgtgtctggagtacttcacttaatttcctctgcagtattgggctttggcggtatttatcatgcacttttgggacctgagactcttgaagaatcttttccattcttcggntatgtatggaaagatagaaataaaatgactacaatnttgggtattcacttaatcttttaggtataggtgcgtatcttctagtattcaaggctctttattt

SEQ ID NO: 11410 - DNA, 411 bp, Glycine max
  Clone ID: jC-gmle01810053e10d1
aaaccaaaacagcaaacaagttcaagggagaaattgaacataacagacatgacatacaagaacacttgaaaaaagacacgcttaaaacaagaacacttgaaaaaaaaacacgcttaaaaaccaccgcgaaggcgaaggacgagatgcaagggggattccttctgaatattgtaatctgccaaggtacgaccattttccagttgcttcccagcaaaaataaacctttgctgatcagggggaatgccctccttgtcctgaatctttgccttcacattatcaagggggtcagaactttcaacctccaaagttatggtttttccagtcaaagtcttaacaaagatttggatgccaccacgaagccgcaacaccaagtgcagggtagattccttctggatgttatagtcagcaaag

SEQ ID NO: 11411 - DNA, 576 bp, Glycine max
  Clone ID: jC-gmle01810053e11a1
atggggtgtgcttcctcgaagcgtgttgatgcggcagcagtcccctaccgtcccgcacccacaagcttggcggtgttcgacatcaacaccatcgaggagccatggctgaagcacctcaacaacaccatcgaggagccatggctgaagcacctcaacaacaccacccctctcccccaagacaataataaaccctccctccccgcccctattctccacaaactcaacttgctcgacgccaccgatgccccccaatcctgggatgagattagcaaaacactccaagacctcaaatccccctccacctcaccccaacaacaacctcaacctccacaaaagaccaagtccttccacacggtggaagagctagacgccaagctcaaccccaagcccgagcccaagcccaatccagaattgaaaaagcccgctgatcagataattaacagtagcatagttaccgagccagtccgagggaacaagttgaaggaaaacatgttcatagttcgggacaggctggagagacagaatgaagagaaggagctcaccttcgagcgtcttcgtcgggacccgctgagcgcg

SEQ ID NO: 11412 - DNA, 606 bp, Glycine max
  unsure at all n locations
  Clone ID: jC-gmle01810053e12a1
actgcaccagcactgaaaatttggggaaaggaatattgttgaggaagcacttgggggttgtggcattcaacaacataaccaggttggcatttgggaaaagatttgtgaactcagaaggtgtgatggatgagcaaggagtagaattcaaggccattgtggaaaatgggttaaagctaggagcatctctagccatggcagaacacatcccttggcttcgctggatgttcccactggaagaaggagcttttgccaagcatggagcccgccgcgaccgactcaccagagccatcatggcagagcacactgaagcacgcaagaaatctggtggtgccaagcaacattttgttgatgccctactcacattgcaagacaaatatgaccttagtgaagacaccatcattggtctactttgggatatgatcacagcagggatggacacaactgcaatttcagttgagtgggccatggctgagttgataagaaacccaagggtgcaacaaaaggtccaagaggagctagacagggtaattgggcttgaaagggtgattgactgagcagacttctcaaatctcccttacctacaatgtgngaccaaagaagcaatga

SEQ ID NO: 11413 - DNA, 557 bp, Glycine max
  unsure at all n locations
  Clone ID: jC-gmle01810053f01a1
atgagcttatccacaattctaggagtgcattttccgcagttgtttgtttaacaagaatttacacaaacaaacataactggctagaatggccctggagaactgtttgcgagtgaccacagtaggcacagccacaccccaatgcttttctccattttttccatcttcaagggataaacttgtcttcccaactcacagaggtttcaagaaatccttgcaaaactcaacactgtcatacccttatctttactccaccggtgctgcctatagaaaatcccgttttgtttgcaatgctcgtgaagcagtaaatgaagttaaagtggtgactgactcaagctggaacaaccttgtcattgcaagtgagacccctgtgctggtagagttttgggcaccatggtgtggtccatgcaggatgatagcacctgctatcgatgagctagcgaaggaatatgctggaaaaattgcatgctttaagcttaacacagatgattctncaacatagcaacacagtacgcattcagagcataccacaagtctgtcttcaagaatgagagaaaaag

SEQ ID NO: 11414 - DNA, 404 bp, Glycine max
  Clone ID: jC-gmle01810053f01d1
cttgaaaccacccccccaacccgggaggggggggggggtcccccggggaccttcaaaaaaaaaaaaagaagggggccccgttacccaaaaaggggccaaccccgagaggggaaggggggccctaacacttaaaaagaaccaacttcgccccctgaggggggggaaaaaaaggggaaaaaaccaaacttggggggggccggggggaagtctagccccccccccccctaaaatatgaccccgaaatggccgcccagggtctcccacttcccggagaagaaaaaaaccccattcccccccgggcgcgcccccggggtctggaaaaccccccccacaggaccccttttgttcccccccaacgaaaaaaaaaaaaacgggggatctgccatggaccccccaccggggcc

SEQ ID NO: 11415 - DNA, 547 bp, Glycine max
  Clone ID: jC-gmle01810053f02a1
attcggctcgaggccagatctggaacgactctggcaaggtcatcggtcgctgcgagctcattccagctgaggagcgtgaacaaaaggtcgagggaccatttgctggtctccagggtcttcgcgtcatcgctgatggtaaggttgctgacgaggatgagaacgttgttggcgagattgtcgagggtaatgctaagcgccttgttggcatggcagttgatgaggatggtgatattctcgacaagtatggcaacgttaagggccacgctgagcccctacctgatgaggaggaagaggcccctgccgacctttcgatccttgatggactcaccttgaacaagcaaggttacctagtggatgccaacggaaaccctgttggtcgtctcgtcgaaggtaacgtcaaggatctcgctggacgcaagtctgacggcgagggtcaaattcacggagacaccggcaaggttgctggtcgctgtgagttaattcctgaccacgaacgcgtcagcaagcaagagggaccctttgctggtttcgaaggcctacgtgttgt

SEQ ID NO: 11416 - DNA, 256 bp, Glycine max
  Clone ID: jC-gmle01810053f02d1
aacccccggcccctaaaatatggggttccggggccaaaaaaaatttttttttcccaaccgggacgggggggggggaaaaaaaccgcaaaaccttcaaattaccaaccaacaaagggggcaaaaaaaatttttggaaaacccccccttaagggggggggaaaaacaaaaaaaaaaaaggggccacccatttaaaaagggggccaaaaaaaaaaaaaaaaggggccccaaaaaagaattttggtttttcccccgccca

SEQ ID NO: 11417 - DNA, 515 bp, Glycine max
  Clone ID: jC-gmle01810053f03a1
ctgcagcaacaagatgtggaaccaaccattgggaaaaaccgatttggaaagcggttctcgcccgctgtatccgatgatgcttgagagccccgaactgcgctggtctttcatcagaaaagtatactccataatcgccatacagttgctcgtaaccatcgacgtcggcgccgtcgtcgtcaccgtccgcccaatcagcgtcttcttcgccaccaccggcgccggattggctctctacatcgtcctcatctttgtccccttcatcacattgtgtccactttactactactcccagaagcatcccgtcaattacttgctcctagcagttttcaccgtgtctcttggttttgtcgttggattgagttgcgcctttactagcgagaaagttattctggaagctgtcatattgactgctgtggtggtgattgctctaacactctacacattttgggctgcaaggagaggccatgatttcacttccttggacccttttgtttggtgcagtgctagttcttatg

SEQ ID NO: 11418 - DNA, 274 bp, Glycine max
  Clone ID: jC-gmle01810053f03d1
agagtaatcatgaacgattaaaattaactattaaggagggtcataaggagaatagataatgaagcatacaaagtatcatctcacatacacatctcgtctcatcataaaaggatcgtgatttttagctccagaacatatctcaggtctgggctcataatttccgcagctcaagccaccaagggcgagtgcaagacaaacttcttccacattgcggatgcttcgtgcgccaaagaaagggaacaccggttatgccctctttcccttgacaacaatt

SEQ ID NO: 11419 - DNA, 570 bp, Glycine max
  Clone ID: jC-gmle01810053f04a1
cctcactcagattgctggtggaatatgggcagacacagtgggaggaaagcaggtattgggatttggtgtggtttggtggtctgttgcgacagccctcactcctatagctgccaaacttggattgcctttcctactagttgctcgtgcattcatggggattggtgaatgtgttgctatgccagccatgaataatattttgtcaaaatgggttcctgtgtcagagcgaagtagatcactagcgctggtctacagtggcatgtatcttggatcagtcactggactggccttttctcccttcctaattcatcagtttggatggccatcagtattttactcctttggttctctagggacagtctggttttctgtgtggcttagcaaggcacatagttcacctcttgaagatcctgaactgcggcccgaggaaaagaagctcattactaccaactgttcctacaaggaacctgtgaaaacaataccttggagattaattttgtcaaagcccgcagtctgggctctgatagtgctccatttttgccacaactggtgaactttcattctacttacatg

SEQ ID NO: 11420 - DNA, 433 bp, Glycine max
  Clone ID: jC-gmle01810053f04d1
aggtattccgatgttcgggcgcatcaacttgttatgaaatcacattgatggccttttctggggtcctagcttgtctaagagctagatttgcctcaattggtgggtttttggcttccgccttatttaaattagcttctgctctttcaagagtttggggcgcttcttggggatcaaaggaactacccttttccggatctttttctaaaacagggagctgattattgtttattctagcaaaaccgccctttagagccatcgttaacccttggtctttaagaagacgtattctgaaaatacctatatttacggctgtggccataggcgcgtgatttggttatactccaatttggccgctatgggtagataaaatgagttccgtcgcttccggataccaaacaattcgattgggggtggggtcacatagatttaaagg

SEQ ID NO: 11421 - DNA, 600 bp, Glycine max
  unsure at all n locations
  Clone ID: jC-gmle01810053f05a1
cacgaaggaggactcggcgggggagtggcagcttgccaagatggcactggacgcgacggaatttaactatcaacagatataccacttcgtgcacacgcacggagtgtcgatcccgatccaggtcgagatgatgcgtagcatggcgaaggaccacccgatctacgctctactagactaccatttctttggcaactttgatttcgaattcctgagcggaatagtcctttttgcggctaatacaccgtacgacgagtcgatggcgttcggggcgagcggctctattcgctgcctctacgacgagtactcaaaaacgtcgctagctgaagactttcccgctgaaattgcaaataacggtctccagtatctgccaaaccaccgctacgtcaaatatggcgcgatgtactactccatcatcaagaccttcgttactgcgtacgtgaaagcgtactacgtctcagaggataccattaaaaacgattcggagctacagacttgagcagctcgagcgactatcgtctggggcgtcaacgacttgccttcttncttcaagggctatgatgatctcatcaaactacgtaccaatctggtgtttcaaacgcg

SEQ ID NO: 11422 - DNA, 513 bp, Glycine max
  Clone ID: jC-gmle01810053f05d1
atgaaaaagagaatatggtatcaataagtttaagattaattataaaaaaatatacagattagtgacaaatttaacatcactagattaactacacttcttaattcttgtgcagatgccctacatataggacccagagggagtacataactatgatgcgcgatgctttttaggcgagaaattcagcttcaaccactttgatctgatcttatctattagtagacatactcatatattagccactttttgatagagcaccagccgcaaaaagaagattccttcgagaaaaccgcagtgagtaaactggagtagatttggttggtagagttttcagcgatctaagtctgttagcactcccacctttttcttcagccctagaaaccttggtgctcgtatttacatcccacaattttacagtgcaatcagcagatccagatgctatcacagaaccttcagaactgaaagcgagggaccagacacatgatgtgtgcccaaatcaaggtgtgagacagcggc

SEQ ID NO: 11423 - DNA, 388 bp, Glycine max
  Clone ID: jC-gmle01810053f06a1
tagaagagaccaaactaattagcgttgaagaaacagagacgctgtgtgggcgtgggtgtgggtgctggagatagagggagagataaagcatataaaatcacctaccaccttatcacacttctggatccggaactttcattctattgtcatatctccccctccattcggtccttacattgttatcgtgactggctgaccagcgaagggtcacagtctgatccgtcgccggaatggaccgtggccgcctactcctacaccggcctctaagagttcgcatggcaactctgatcaccctgtgctgaatcttaccctatgcaggcctcattacgccgattgcaactaccatttgagaacggtaattttgccgctacagcacacgcttgccttt

SEQ ID NO: 11424 - DNA, 378 bp, Glycine max
  Clone ID: jC-gmle01810053f06d1
ccttatcgtatacccataaaaagtacgttgaatctttttggaaacatatcctataatcaaaatccaatttgcattaattatataagggaacttgaaacataccccggggaaatgattcatgggtaagttattcatttagtaattaaatcttcgtgaatcccccctttttttaattccagttaaatcccttatcacattcacaaatatacataaagggggaagttctattagaaacttgcgttttctctttctttttttttttaccaaaaatggatcgaagtttctcatataattcgggtgttagaaagattaccatatataacataaaacttctccgccaattctttctaatcgagcctctcgatctgtcattatacc

SEQ ID NO: 11425 - DNA, 509 bp, Glycine max
  Clone ID: jC-gmle01810053f07a1
gggattgtccaccaggcctgacatctgcccgccggagtatttggaggagctctctgagcttcaagatggtttgcctacatttcctgatgaggaggcctttgcatgcattgagcgggaattaggactatctcttgactccatcttctcttctatatcgccatcagccgtggcagcagccagtttgggacaagtttataaagctcagttgaagtattctgggaaacttgtggctgtgaaggtgcaacgtcctggtattgaggaagctataggattggacttctacctgataagaggtcttgggatttttattaataaatacattgacataatcaccagtgatgttgttgcacttattgatgaatttgcacgtagagtttttcaagagctcaattatgtgcatgagggacataatgcaatgagattcaaaaaattgtatgctgacaaggaagatatttgtgtccctgatgttttctgggactatactagtgctaaagtactgacaatggagt

SEQ ID NO: 11426 - DNA, 549 bp, Glycine max
  unsure at all n locations
  Clone ID: jC-gmle01810053f07d1
aatcaagatttgcataaccattaaaatagcttaaatataacaaaactttcactagacaatcaaatttcaaccacgcatgagcaatccaaacgagtcttaattatttcaaccaaaaggggggggctcaaactccaggattataagctgatggcatgaaacaacaaaaatgaaaattcttgatcgcaagactatgggttctaagtatcaaggtcctaaatttgggaaaatatcaataccaatatttctcatccataattattcaaatgacaaggcaatcggcatgattatcccaggaaattgtcgtcatcatttttagccgccgccagatccatatttctttccaaacaaaatgagctgcagcttgtcataaccagcaagcacaccagcacctgcaacagcacgcaatatgttcgcaccagcacctttgaagagtgacttggcaccctcatttgcgacgattgtttggaatgcatgcaaagagctcttgtacttcacagcnttctcagaagtcatcatcattcttcttcgaacagtgtcaatgggataaga

SEQ ID NO: 11427 - DNA, 581 bp, Glycine max
  Clone ID: jC-gmle01810053f08a1
cgttctcaaaagcctcatgttgtttgtgtgccattcccagcacaaggccacgtgaacccttttatgcaactaagcaaactccttctttgcaccggtttccacataacctttgtgaacaccgagttcaaccacaagcgtttggtgaagtctcttggacaagaatttgtcaagggacaacctcattttcgatttgagaccataccagatgggttgcctccatctgacaaagatgcaacacaaagcattgcagcattgtgtgatgcaactagaaaacattgttatgagccactcaaagagcttgtgaagaagctcaatgcttcacatgaagtgcctttggttacctctatcatctatgatgggctaatgggctttgcagggaaagtggcaagggatttggacatttctgaacaacaattttggacagccttagcttgtggttttatgggatacttgcaatttgatgagcttgtcaaagaggcatattcccttccagatgaaagatcactactgatgggtattggatcaaatctagactggatatctgaatgaaaattgcgaatagagattgccaagttcggaga

SEQ ID NO: 11428 - DNA, 451 bp, Glycine max
  Clone ID: jC-gmle01810053f08d1
gaagaacaagcaaatattgctttattaagcattgctagaaagaaatatcttatggagatgtctttttgaacaccatatgaccagaatcatccacatcaaacaggcgtccaacaaattcattccaattttgtgctcgttttttgtgagacaaggaggaacctaggacacttgatcttccagaatcctccccaacatcaatttgattaaatgttccatataatgaaggtgaatatgcttgtggaatatccaaagcaactgccctcttaagggctgcatggtactcttcactgtgttctcgggctatagattcatgcctctccatcttctgctcttctgggatctccatatgctgctcatctttatctcgcattaaatcgagagcccgtcgggattctctctctatccaaatgatggcatggtcagaagttgcattgcaagaaagaactaaatg

SEQ ID NO: 11429 - DNA, 551 bp, Glycine max
  Clone ID: jC-gmle01810053f09a1
gctacctagagcttgcacctattggtatcttctacaatatcctctcatagtgctcttcttcttcttcattttcattatcaagatgtctttgctttcggatctcatcaacctcaatctctcagaatccacagaaaagatcgttgctgagtacatatgggttggtggatctggtatggacctcagaagcaaagccaggactcttcctgggccagtgagtgaccctgcaaagcttccaaagtggaactacgatggctctagcacagaccaagctccaggggatgacagtgaagtcatcctatacccacaagctattttcaaggacccctttaggagaggcaacaatattcttgtgatttgtgatgtttacacccccgctggtgagccacttccaaccaacaagaggtatgatgctgcccaaaatttcagccaccctgacgttgctgctgaggaaccatggtatggtattgagcaagaatataccttgttgcagaaagatgtaaattggccacttgggtggccatttggtgggtttcctggaccacagggcccat

SEQ ID NO: 11430 - DNA, 572 bp, Glycine max
  unsure at all n locations
  Clone ID: jC-gmle01810053f10a1
gcagcgtgtcatacaacaacaacaacaacaagaacaacaagcacctccgcccgtgtctcttagcctggacgacgtgaaccccgtaggactgggtcgaagatcgcggcagttgttcgatgaggtttggagaaagttctcgggattgggtcagatttctaggacaatacggtcggatgatcaggaggctctggatgcccttctggtccgagaaggtccgatgtgcgagttcgcaatccctggcgctcagaatactactgtactcgttgttggtgccaccagccgcatcggtcgcatcgttgtgagaaagctcatgctcaggggctacgctgtcaaggctctggtaaggagggcagaccaggaggtgcttgagctccttccaaggtctgtagagatagtcattgtggatgttggtgatcccgccactgtcaaggctgctggtgaaggttgcaacaaaattatatattgtgccactgctcgctctgctataactggngatctcttccgcgttgatcatcgaggcgtttataatcttacttaagcattntaggatcacagtaacaaattggcacaat

SEQ ID NO: 11431 - DNA, 305 bp, Glycine max
  Clone ID: jC-gmle01810053f10d1
aagaagaaccccaggccttttttgatagaagagccaaccagtttttgtttaaacacaaacaaacaaagggggtaggggttaaacatccccccccctatttggaacaaaattgcccgttccgggatttaaagcctccttgaaaaaaaaaagaacattggacaacccttggggctcgatttctttgatggggccccccggcccaatggggaggggggctaaagctccctttccgggtataaattctcccaacaacgggaaaaccaaacccatttgggccaatcttcccacaaaaaggtgggttggtt

SEQ ID NO: 11432 - DNA, 554 bp, Glycine max
  Clone ID: jC-gmle01810053f11a1
tcgaacagttaccaaaatccgatgcaacggatgcagcaggctcctctgcttctgcatctgcttctaaggagggggcgagtgtgcctggggcattgttcgaggagaagcctcagtctgccaatgatgcttggaggaagcttcattctgaccctttgctcatgattcgccagcgcgagcaggaggcacttgccaagatcaaaaacaaccctgtcaagatggctatgatcaagaaatcgattgaaggaactgaaaacaaggagaaagctcataaaaaggaaaagcggaagaagcaccggtctagtaaatcaaagcataaaaaactgtctgattcagaagatgacactactgagaggagaaaaagaaagaccggtaatgaagattctgacaggaagcatcacaaggctcaatcagattcagagtatcaatcaagtgaaggagaaatgagaagaaggaaggatcgcattgaggaccaaaaatacagggaaagatcgcccaatcaccaacagagacaaagaaatggcaaagactacaaagaagatgctggtgacagaaat

SEQ ID NO: 11433 - DNA, 569 bp, Glycine max
  unsure at all n locations
  Clone ID: jC-gmle01810053f12a1
cggctcgagcggctcgagtaatgatttggtgaacactgcacgccaatgggcactggatatgttgggccaccgacgaccatggattgctagtctttataagaccgaaaaattagaaccccttggggaagcaagagagattttgaaatttgcacgagctcaggctcgaaagagggctcctaacctccagcatcctttggtttgcattgatgttattgaagcaggaatagtagctggtcctcgtgcaggactttggaaggaagctgaagcatttgaaggacttgtaaggtcagatacttgcaaaagcttagttcacgtattttttgctcaaagaggaacatccaaggtacctggggttacggattgtggtctggctccaagacaagtcaagaaggttgccatcattggtggaggactaatgggctctggaatagcaacagctttaattcttagcaactatccagtcatcttgaaagaagtaaatgagaagttcttagatgctggtatcaataggattaaagcaaacttacagagccgtgtaaagaaaggtaaattgaccaanggaaattttg

SEQ ID NO: 11434 - DNA, 487 bp, Glycine max
  Clone ID: jC-gmle01810053g01a1
ggcagatagaaaaaagagctgagttttgagttcaaaagatgactaacttcccagtgatcaacttggagaagctcaatggtgaggagagaaacgacaccatggagaaaataaaggatgcttgtgaaaactggggattctttgagctggtgaatcatggcataccccatgacttattggacactgtggagaggttgaccaaagagcactacaggaaatgcatggaagagaggttcaaggaatttatggcaagcaaaggtctagatgctgtccaaactgaggtcaaggacatggattgggagagcaccttccacttgcgtcacctacctgaatcaaacatctcagagatccctgatctcattgatgagtacaggaaggtgatgaaggattttgctatgaggttagagaaactagcagagcagctgttggactagctgtgtgagaatcttggcctagagaaagggtacctgaagaaggctttctatggatc

SEQ ID NO: 11435 - DNA, 301 bp, Glycine max
  Clone ID: jC-gmle01810053g01d1
ttttttttttttttttttattttaattttttttttttttattaaaaatatattttttattatgccgtgtttaacttaaggtaattactgctctttcaagccacggtcattctattcaaaacaattttttctagacaccaacatggctatatatagctgaaaaccccacaccctaaacaaaactgctgggtgaatagaacttaacaaccgccttaatggaacagcaacatatccttctaggagacgtacttctttgcacataagggaatgttgtttcccccaacaaaaatttttgatgggac

SEQ ID NO: 11436 - DNA, 606 bp, Glycine max
  Clone ID: jC-gmle01810053g02a1
ctgattccatcctcccgctcctcctcttctcccaccaactcgccgccacactctccctctcccccaaacaccgcaaaaacaaacgcaaacgcgattttcaacaccccaatcccctcacccgcaccccggactccttccgcaacaccttcctcatgtcctcctcctccttcgagtggctctccggcctcctggagcccctcctcgagtgccgcgaccccgcccccctcttccactccctccacctctcctccggcgcccgcctcgccatcggcctctcccgtctcgccgagggccaggactaccaacaaatctccgcccgcttcgccgtctccgaccccgtcgctaaattctgcgtcaagcaactctgccgcgtgctctgcaccaacttccgcttctgggtctccttcccctccccttccgacctcccctccatctcccaatccttccaatccctctccggcctccccaattgctgtggcgccgtcctatgcacccgctttaatatagtagtcaacgccaatagcaccaccaccaccaccaccaccaacgacatagtctcagtttctcaaggtcgccgccaaatagtcgtcgatcctctttccggat

SEQ ID NO: 11437 - DNA, 514 bp, Glycine max
  Clone ID: jC-gmle01810053g02d1
aacatcaaatcaaaagaaatctttcaaatccatctacgtacctggctacatccaataccatatacaatatatataccccatccccaactttatgaatcctataattaatattaagctaacttaaatctctgcaagtatagttctatatgctactattcaatgtttacagggagctagcatcccctcccatgccaggaattccagtataccagaatcacggtacaatatttcataattagtgactgcatgcatgtgtatatatatgtaaatgaaaataacataaaccctctccttttcttttcttggtgctgctagcgaagttaattagccaagtctagagaaacactcatcagaactctaagatttctctcataaattatccaatattgttttagctagctagctagccatcagttcttacttcctaggccacgacatctggtaataactgatgagcaacaaacctctttctgttttgaatatcaatgctctcataagtggctcctgagtgaga

SEQ ID NO: 11438 - DNA, 564 bp, Glycine max
  Clone ID: jC-gmle01810053g03a1
gcttgttcaaattttaggagcggagaatccagagaaagagagatgtctggtatcgcccgtggacgtcttgccgaggagcgaaagtcatggcgcaaaaaccaccctcatggtttcgttgccaagcccgagactctccctgatgccaccgttaatttgatggtctggcattgcactattcctggcaaggctgggactgattgggagggtggatatttcccactgacaatgcacttcagtgaagattaccctagcaagcctcccaagtgcaaattccctcaaggtttctttcaccccaatgtgtatccatctggaactgtttgcttgtctatacttaatgaagatagtggatggagaccagctataacagtgaagcaaattcttgtgggcatccaggacctgcttgatcaaccaaatcctgctgaccctgcccagactgagggttatcatctattcatccaggatgcggctgagtacatgagaagggtccgacagcagtcaaagcaatatccacctcttgtctagtggtatatctgctcaatataggaactattatagtatggtagt

SEQ ID NO: 11439 - DNA, 418 bp, Glycine max
  Clone ID: jC-gmle01810053g03d1
aaaggaaatggctccaatttcaatttttgtggtcacttatagctcaaaacgatggaggaacacagtccattatgaaaaatatcggaaaatcgggtgaaacttggcatcccctttttgcacctattacattgagaaatataagaatgttacacgcaggtcccacccaacgtcttctcttcggatcggacaaccttgaggaacaggaaatatccactggccaagttagctgtggcgccaagtcgaaattggaagaaagttcccctgcgaatagcatcctcgttagcatttccaagtgcagactagttcacgttctcgccagccaattggactctatggacattctctagttcgtgaacaagcatgttagcatacttcaagagcttctccatagtcatcgggggctgagaaaaggacggag

SEQ ID NO: 11440 - DNA, 538 bp, Glycine max
  Clone ID: jC-gmle01810053g04a1
ggtagctagtcctgcccaatgttctgcaactcctgcaacaagtcagggaggtcaaaatgggacaaccagttctagtggaagcacacagatgcaagcttgggtacaaggggccattgccaagattagtagcactactgacggagtgtccaacccggttcctaacccccccatcagtggtccttcgtcctttatgcccataagcattaatacaggaactttccctggaacacctgcagttcgacttattggggactgtcatttcctccatagattatgccaactgttgctcttctgttttttctttcgacgagcacaacaaccccgctatgcgggaggtgtacagagaactgctgacacaaatctacaaaaacctcaacctaatgcttctgtccctggcaaggtggaggaaattgcaaaaccagtgtcaactgtggttaggccagatgatggtcaggctggtcgagttagtcaacttgtgcctgcatcaaaaggaggtgaagaaccatctccagtgcgttcaagaatcggtactggaaat

SEQ ID NO: 11441 - DNA, 526 bp, Glycine max
  unsure at all n locations
  Clone ID: jC-gmle01810053g04d1
gacacagggaagttggattcatctatattgcatcatccctcaaaaatagtactagtaaaactggcaatgaagttgttcatgaacagtataaaaatcgtcaaagaaaaattacagggtcgtcatatatctacacaacgcaggagggttgatagacttgctgcagcataaagtaggagatgatatttgtgcaagtgaacagaaattaatagacttcgacattccattgctctgctttcttcaattgcctcttgtactcagtccaatcaatgccatctttggcagccaatgacaccataatgtcatcaattcccttttccattccttttagtccacacatgtacacaaaagtgttatccttcttcagtaattcccaaagctcttctgcgtattgagccattcgggtttggatgtacatcttctcccctctctcgtttgtttgctctcgactcacagcgaagtcaagcctgaagttntcaggacttttctcttgcatcttctcaaactcctccttgtaaagcaatgagct

SEQ ID NO: 11442 - DNA, 549 bp, Glycine max
  Clone ID: jC-gmle01810053g05a1
ggttttcagctaacctcttatcaagttttgttcattactgactactgtgttctccaactgggtctgttttgttttcatcaatcaaaattcagaagctcggttctctcacttttctgtacaaaagccatagaaagactatttgggatggactggtactatggatgtgaaagtagtgatcttcttgtatcaaaagatcaagaaaatttgttggaaaggcatccttcaccagaaaattggtcagaatggggaataaatgcacctgaaggctttaattcaccccaggagtatttgatcatggacacagacgaaacagaagtagaattcaatttcattgatgaaagtttcaataatgaaattgagtttgacccttgtcagtatgataaagatcagtctagcagttcaagtgcatgtggaggatttgctgagcaatcgtttcaacaaatggcacttacgtgtgatcaccagcttcaagaccgatcaactttcaaacacacggatgacattttcttggattctgtacttgaagattttccatgtgttgaaaaccta

SEQ ID NO: 11443 - DNA, 470 bp, Glycine max
  Clone ID: jC-gmle01810053g05d1
aaaaggaatccatatgcgctccattataatccttattggccacagtataaaaaagcacatccaccataaatagaaagtcgcccatcatcataatcattttcatgacaaaagtctaaaatagcactccaaaagatctattgttcggattcgacgaccattacaaaaaaataaactgttaaatatcgtagactctcaagtccatataactgaatttttattgggtcccctggtttccttttggcaagatattttctgtagaactggagtaccttcgaggagggttttattaaaaaagaacaggcctagctcttttttcaacattaaactgcccgtccacaaggcctgtaacgccagcagtaattgtttgaccctctttgacagggccaacacccgggggagaaccagttagtatgacatccccttcaaacaatgtgatgacagagctaacgtagcttattagaaatgggatc

SEQ ID NO: 11444 - DNA, 408 bp, Glycine max
  Clone ID: jC-gmle01810053g06d1
gatgttaccttgtcatttcatcatatatatgaacatagtaaaatcctttctttttctttccattattcaacaaacctatatacatatctggaaggttatttccgtctataggggcgttgatacaatagataagagatgaactaccccaagaagtttggggcctggtttattcagcaaatatctgctcaagcatacagagaatccccacataagttctaatcacatattactgctgagtttttccatatagcttgatcagatatagctactcaactctactttcttcctactaaatcagttataagtcattcattccctcttgacatcagactcttcagtccttgcaaatctcccacggattcttggctgactgtcagcaagagccttcctgcaagcatacttgatttt

SEQ ID NO: 11445 - DNA, 498 bp, Glycine max
  Clone ID: jC-gmle01810053g07a1
gtcgcttgaaggatctgatcaagaagcattctgagttcattagctacccaatttctctttggattgagaaaactactgagaaggagatctctgatgatgaggatgaggaagagaagaaggatgaggagggttaggtggaggatgttgacgaagagaaggagaaggaagaaaaatagaaaaagaagattaaggaagtgtcacatgaatggtccttggtaacaagcagaagcccatttggatgagaaagcctgaggagatcacataggaggagtattctgctttctacaagagtctcaccaatgactgggaagagcatttggctgtcaagcacttctcagttgagggacagttggaagttaaggctatcctctttgttcctaagagggcaccttttgacctctttgcacaaggaagaagcctaacaatattaagctttatgtccgccgtgtctttatcatggacaactgtgaggagttgattcctagtatttgggctttg

SEQ ID NO: 11446 - DNA, 335 bp, Glycine max
  Clone ID: jC-gmle01810053g07d1
gaagtagttgacaaggacataaaccgcaaaaaatccatgtacgatgcagtcaaaaacctaagctgatggaaaagaagcataggcatcttgggctaatcaaaaaaactgactgcacggcggcactgaattggtttccattatacacggctactgaaccaagttgctactcacttcttaagagctgcttggacttgacaagcctatcggatcggatgggagctcctttcactgtccgcaccggggctaatccaggctgacacgcctacttagagggtgttcatcgggatcccactcctggggatgggcatgcccccccacccaaatgggggaaactt

SEQ ID NO: 11447 - DNA, 612 bp, Glycine max
  Clone ID: jC-gmle01810053g08a1
gctgaagatgaaaactggggtggtaatggtggtggccatcaaagaaatggcgcattggatcatagatcatgggctacagattttgcaatactggcctcccttccttgcaaaactgaggaggagagggtggttagagatagaaaagcatttctgcttcacagtcagtttgttgatacctcaatatttaaggctgttgcggctatacagcatgtcatggaatccaagtcaaatatcaagagtgaattgaattcttctccgggttctgttctgcatgaagatctcacgggagacttatccattatagtcaaacgtgatatccaggatggaaatacaaagtatgattctatactggatgaatctagcatgcatgaaggggatgctcagaagaatttaatcaaagggttgactgcagatgaaagtgtaattgttcatgtaagtaaataacccaccttgcaaggctatattatgattttttgattgttcaattttccgctttggtgattacaggataacttctccttggctgggtgtgttggacaccactgtcgatatactgcaacagtaaaggttgtgggtattgtgaacgtgaggaagcctgatgtccgggatatt

SEQ ID NO: 11448 - DNA, 335 bp, Glycine max
  Clone ID: jC-gmle01810053g08d1
accgcagcttgggctaaactgagtcctatccctaatctggctacaagcaaatgaaaatgccctacttaggccgcttatatcgtgacaacactgccacatatagatttttgtttatacaactaattatattgcttgttcttttggcacaagatttctactactagacgatcatagtggtaactaccgcggtatgacttcccactacattttatattcttacccctttttaagcaacttggattcctttgcctggggtggaattctaccaccctatacacactgttttgctccagctccgatctaatccccttgagtgtcctcttgaactcctacca

SEQ ID NO: 11449 - DNA, 540 bp, Glycine max
  Clone ID: jC-gmle01810053g09a1
tggtaaattaaaattggaattagcacaattcgcagaattagaagcttttgcccaattcgcttctgatctcgataaagctactcaaaatcaattagcaagaggtcaacgattgcgcgagttgcttaaacaatcccaatcagcttctcttaccgtggaagaacagataataactatttatactggaacgaatggttatcttgattcattagaaattggacaggtaaggaaattacttgttgagttacgtgcttacttaaacacgaataaacctcaattcaaagaaatcatatcttctaccaagacattcactggggaagcagaagtccttttgaaggaagctattcaagaacagatggaactctttttactacaggaacaggtagaaaaaaattgattaatcatttaataactttataatttcactttcatattcttataattagtatcttttaatatctttttatctcatttgaatataatattaatatataaataaaatgaatttcaatgataatagacaaaacaaataaaaacaaaggc

SEQ ID NO: 11450 - DNA, 364 bp, Glycine max
  unsure at all n locations
  Clone ID: jC-gmle01810053g09d1
ttttttttttttttttttttttttttttttttttttttggcacaagaacatatcagggttcattctttaggggttaggcaaaattaatggtttttgtccccaccaccggggttattgggaaatccttccaggttccccaaaagaccttgccnagtgagaagcggggacactaccaattaaccttgaccaacctatttaaaccaagttcaaatattgaccccccattaaggtattagttcccaggaaacaagagccgaggccaggttttcctcataatccttattctccatcttctttaaaaagtaaaaaacaaacaccacttttctcaatagcaatcataaaagtttcccgccgcagggacaac

SEQ ID NO: 11451 - DNA, 558 bp, Glycine max
  unsure at all n locations
  Clone ID: jC-gmle01810053g10a1
tctgagcctgaagagttacaccctccccctggcagacaaagggaactgggttttacattctcatttccagtgaagcaaacatccatagcatctgggactctaataaagtggactaaaggtttcaatattgaggatgcggttggagaagatgtggtgggtggactaaccaagtccttagaaaaaattggtctggatatgcgtgttgcagctctagttaatgacacagttggaactgtggctagagctagattcagcaatcaggatgtcattgctggagtgattcttggtacagggacaaatgcagcttatgtagagtgtgcacatgcaattccaaaatggcaaggtcttctaccaaaatcaggagagatggttattaacatggagtggggtaatttctgttcctcacatcttcctctaacagaatatgatcaagctctagatgcggagagcttataccctggagaacagnattttgagaagatagtttctggtatgtatttaggtgacattgtaggagaagtttgttgaagatggcggaagacgttgacttctttggag

SEQ ID NO: 11452 - DNA, 381 bp, Glycine max
  Clone ID: jC-gmle01810053g10d1
acgggaaaaaaggaaatgcctttttaaaaaattggtgaagcctcacattacaaatttaaacatggaataaaaaggaaagaaacttcttagtttaaaaatctaggccatgttcacgggctgttttaacaagtgcttgaacacggccatggtttgggtatccacctcgatcaaaggcaacctttgggatccccttttccaaacaggattttgcaatgatctcacccatcctttttgttacttaaactggggggccaggggagtatttgaacttattagcaaccgttttttgcattgtcgacaccaaaacaagcgtgcgcattggggggtcatcaatcacctgcacaaaaagatgtttgtttgaccggaacacggacagccttg

SEQ ID NO: 11453 - DNA, 569 bp, Glycine max
  unsure at all n locations
  Clone ID: jC-gmle01810053g11a1
agagaaccgagcatggtgatggccatggccatttcatctccttcttacaacctcactttccttcttcctcgctcaggctcacttcaacctctttctttaactccgccatcttgttctttttttgctcaacctctccgaaacctttcactcaagttctgtgcaaaaattcagagcgttggagttggaagagaaggtccagcttccgatcccaaggccggcgtctcactttacaaacctaaatcctacgaagttctcgttagcgatgccgccaattccctctcttatgctcttcaagacggaaaacttcgcctcgaaatcgatttcccgcctttgcccagcaacatttcttcttataagggatcttcagatgagttcattgatgccaacattcaacttgccttggctgttgtacgaaagctcaaggaaaagaaggaaaccagagcttgcatagtattccctgataaaccagaaaagcgccgggcctgtcaattgttcaaagcagctctagattcaattgatggcattaccataggttccttagatgatgtccctacttnacctatgacttc

SEQ ID NO: 11454 - DNA, 569 bp, Glycine max
  unsure at all n locations
  Clone ID: jC-gmle01810053g12a1
caaaattacaaaacccagtgaaggaagcgcaaaattttccaacagttggcgaaactggtttatgggttgaagtctggttcaggatttgtgggggaagagaagagcactcacaccatatccattatcaatggacttggccgcgaagcttcaccacttagacctgaccggcgtggtcattttggacgcccgaaagccctccgcactccgccaccttccgccacgcgttctcagcagaacaaacaccaacaccaatttgatttacacgaaccggttctcgggcccaccgaggcccaattccgcttcctcaacgggcctgtccatgataaccgtcgaggacgatatcgagtctcttttctccgagacgaactcggaggaggagcggcgcgtgaggaagcaacctagcattggggcgtcggggatttcctccggggtgaagctcgaaaacgtggggaaagcctacaagggcgtgacggtgcttgaggacgtgagctgtgaggtgaagaaggtggagaaggtgggcctggtncgcgtgaactgcgccgggaagacgacgcagatgatgataatcg

SEQ ID NO: 11455 - DNA, 384 bp, Glycine max
  Clone ID: jC-gmle01810053h01a1
ctcggaattcggctcgaggaaaattcggttccagatctatactgatgacaagaggattaagcaagtggtgcagcatgcgaccaaattgaatgatgcaatttctgcagcaagaggtgttcctatgagcagagctcacataagcgttggtggttactatgatggtctttgaaagcatttgattaggtgccttcatgaagcaattggagtctacaatggatcaaccatgccataagatctattaatctggccatatcctatattgctgtaaataacatgatgccagatgttaccttattgttgatgtttgttctgtatattttctctggtcttgtaaattaagtcacagattagcggcactttcattattattattattatttgatt

SEQ ID NO: 11456 - DNA, 366 bp, Glycine max
  Clone ID: jC-gmle01810053h01d1
aatcaaataataataataataatgaaagtgccgctaatctgtgacttaatttacaagaccagagaaaatatacagaacaaacatcaacaataaggtaacatctggcatcatgttatttacagcaatataggatatggccagattaatagatcttatggcatggttgatccattgtagactccaattgcttcatgaaggcacctaatcaaatgctttcaaagaccatcatagtacccaccaacgcttatgtgagctctgctcataggaacacctcttgctgcagaaattgcatcattcaatttggtcgcatgctgcaccacttgcttaatcctcttgtcatcagtatagatctggaaccgaattttc

SEQ ID NO: 11457 - DNA, 624 bp, Glycine max
  Clone ID: jC-gmle01810053h02a1
atatggtgcaggcagttatggatcaggcggcaattatggggacagtggccctggcaataactactcgggaggctatagtggtagtaacagtggacattttggtgatgccggtagtgtaggcaatcatgaaagctctactggttttgccggtaatggatatgatggaagtgtcgtggatggcggtgttggtgcagggtcggaatttggcagcagtggccaattagatagcaaaacaagcagcaatggagatgagggttttggggattacagggatgacaacgatgcagataattttgccaagagggcttgatggaattttatagttttttgttttctgctgctcgtgttctgtatcctacctaaatctctttggacttcaacctgataagcatttcatgcatgttatcttgatcagctagacatggatgggaacaacattatctaggtccatcttaagcgtctttctttccttattttcctaagagtcaaatatttcattgttgttgcttacttttgaagtgattcagtatcaaaccaaattgagatattcatacagcatgtaaatctgtgagttgttgcaagtgggacacagtttgagactatttgggaaattatgatcagtag

SEQ ID NO: 11458 - DNA, 523 bp, Glycine max
  unsure at all n locations
  Clone ID: jC-gmle01810053h02d1
acataaatgaatcattatattcataaatgctgcatcaagtcacataaattttctcggaatccaaacactttttactattgcttggttgggagaaggaagaggagtggggtatactttaacacaattttccaactctatggtttttttagctttccataatctctatgtaacattaaaatataataacaatgtgtatacaatatccatagaaaataaaaagtaaaaagtagagttaactaattaacaccaagcagatgcgacggtgagagttcttcccatccagccaaagcaaatcccaccgttctctacttttaccgcgactcggttcccagcgccaccgagtcgcgctttgatcgactcagcgactcgctgactcagcggcttcaacctgaacccagccatgctcatacgcgctcgccacttnccaaacacctcgcaccgttcacgcggttccttccttcgcacgccaccgagttccccaccttccgactcagtcccttctcgatcctaactcgcgccgagt

SEQ ID NO: 11459 - DNA, 555 bp, Glycine max
  unsure at all n locations
  Clone ID: jC-gmle01810053h03a1
atttagttggaggggttcatagatttagggaatcgattactatactagtaataaattgtacaaaaaataaaaatataaataatataaatataaaaagaacaaacacaaattttatgtgattagtcgcggtatttaaaatataaaatgaaagtagacaaataaaaaaggaaaggagatgtttgaataaaaataattccccttcaagttcttattttttgagaggacaggacaatatgaatgttttattatgctctatcaacacattaaaaagattatatgatatatctgctgtggaagtaggtcaacatttctattggcaaatagggagtttccaagtacatgcccaagtacttattacttcttgggttgtaattgctctcttattggtttcagccattctaattattcgaaatctgcaaaccattcccgctatcggtcagaatttctttgaatatgttcttgaattcattcgagacgtgagcaaaactcagattggagatgaatatggtccgtgggttccttctattggaaacttgantctatttaattttggtt

SEQ ID NO: 11460 - DNA, 392 bp, Glycine max
  Clone ID: jC-gmle01810053h03d1
atccagcaggccactttataatagttttgacataagtacattcacttccgacataattgtaaatgaaatgctagctcgtacattacaaagattctctcgatatatggctataatagttgtgttgattgcattagtaggacacttcacttggaacaacaggccatgcttgcccctaccattaagttatgaataaaaggcgctaactaaccctcttctctgtctctctgtatatatatgtatatatatatattcagcttcaccctctaatgagcttagcttaattccattgataaatgtttctgagggaggcgttcatcttgcgaattcggtttgatttgtgagactcttgagcaataagattagccgttgcagggctcatatctaaaaccagc

SEQ ID NO: 11461 - DNA, 596 bp, Glycine max
  Clone ID: jC-gmle01810053h04a1
ctctgaacaatggcgtctctctctcacctcaacaaactcctctgcatgcccccgctcaactcttcaccctctatttcgccaccacgcagcagcgtcggaatttggaccaaacctgtcggaaggccgaggctactggtgcgtgtccgagcggtcacgagcgacgacgagtgggggccggagaaggaggaggcgtacggcggcggcgtagcggtggaggagaaaccgacgaagtcggagacggagacggagaagctgaagaaggccttggtggattcgttttatggcaccgatcgtggactgaaagcaacgagcgaaacgagagcggagatcgttgaactcatcacacagctcgaggccaagaaccctaaccctgttcccaccgacgccttgactcttctcaacggaaaatggattctcgcgtatacatcctttgcaggtttattcccattgttgtcaagtggaacactaccattggtcaaggtagaggaaatatcccagattattgactcgctgaattttaccgtccacaactctgttcagttcgctgggtccttggccaccaccttattagtactaatgccaaatttgatgttcga

SEQ ID NO: 11462 - DNA, 304 bp, Glycine max
  Clone ID: jC-gmle01810053h04d1
aaaaaaaaacccccccttcaccctttttttacacaataaaaaggggggggggatttttaaaataaccggggctctcccaaaagggggggggggggaattccccttttgggggtgaacccccgggccaacccaaagaagaaccttttccgggaataggggggggttccccgtttttaaaaaaaatgggggggacccgggggaaaaaaaaagggggggaaaaaagtttcccccaccttttgaaaacttggggagaccccccagaaaaataaaaaacggggcactgggggggggtggggaaaaagga

SEQ ID NO: 11463 - DNA, 583 bp, Glycine max
  unsure at all n locations
  Clone ID: jC-gmle01810053h05a1
ggaaagcaattggataccaagtggacaccaaggagaagttgatcagaaaggagaggcctttggaaaagggattaatagaaacaatgtatgaaactgattctactttgatccaatccctcactgaaaaaggccttgaagtcactgaagataaaaggcagaacctgtacaaggtcaaatgtgatgttgtgattgtggggtctggttgtggtggaggagttgcagctgcagttcttgcaaattctggtcataaagtagtagtccttgagaaaggagagtattttgtttcacatgattattcttcccttgaaggtccatccatggatgaacaatacgaatccggcggcattatgccgagtcttgatgggaagatgatgatcctggctggctcaacagttggtggaggctctgctgtaaactggtctgcaagcatcagaacacctgattctgttctgagggaatggtctaaaaaatataaaattccactctntggtagctccgattaccaatctgcgatggactcggtgtgcacaaggattggtgtaacagagaagtgcatgaaggaatgctttcagaaccaaattct

SEQ ID NO: 11464 - DNA, 53 bp, Glycine max
  Clone ID: jC-gmle01810053h05d1
aggggattcgcgaccaataacaacaccgttctttccgagtcaagaaacaccct

SEQ ID NO: 11465 - DNA, 565 bp, Glycine max
  Clone ID: jC-gmle01810053h06a1
tgatgggcgtatggagaagttctactgggcaccaacaagggaagaccgcattggtgtttgcaccggaattttccgcactgatggtattcctgaacaggacattgtcaagcttgttgacaccttccctggccaatccattgatttctttggtgcactgagggccagagtatatgatgatgaagtgaggaagtggatttctggtgttggtgttgacagtgttgggaagaagcttgtgaactcaaaagatggacctccaacctttgagcagcccaagatgactctggagaagctcttgctgtatggtaacatgcttgtccaagaacaagagaatgtcaagagagtccaattggctgacaagtacttgaacgaggctgctcttggaaatgctaacgaggatgctattcaaaggggaactttcttccagtcttgaattggaggcaaagcaaacttggcaagttaatatttctgttcgtgaaggttgttgtactaatccaagtgctagaagtcgtgatggaacttgcgtgtaacattcttagcattcttaatgtcttacgtgcaaagagaa

SEQ ID NO: 11466 - DNA, 351 bp, Glycine max
  Clone ID: jC-gmle01810053h06d1
cctcgccctttttttttttttttttagaatttttttttttttgtattttttttttttttttggtgttgttttgtttattctattctatgattgtcacacaagaatttgttttcacacttctataacacatatcttttaaaaacgcacactgttctacttgctcgaaaattattactaaagtacaaaataaggaggttcgctgcttatgccacccagggcgagtgggggacctcactccttcacaatgagtgtggcttcagcgccaaagaaaaggagcttcctaacatgccttgtgatccaagacatcatagataaacgcccgctcacaagagaactgtgaatctcccaaca

SEQ ID NO: 11467 - DNA, 500 bp, Glycine max
  Clone ID: jC-gmle01810053h07a1
gaagaatatagtgttaaagagagcaagttctgtttaacacagacgagctgtggtagcagctagcgggtgaaggtttttgcgccgcgccttatatcacaccgtcgtccgaaagcgtcgttgccgtgaaaccctagaaagaaacgacgacgtaaatggaggtggagcccgtggagccgcagtcgctgaagaagctaagcttcaagtctctgaagcgcgctctcgatctcttctctcccatccacggacacctcgctactcccgatgccgaaagcaagaaaatacgcactagccacaaggtgagcgtggagtatggtggaatcaaaagcactgccaatcaacctcctcctcgtcaagttagttctgccacccaggatccagggtcctctaacactctggctcttccaggtcccggagattccaaggattctcagaaaggaggaccccaaaagccttggttgttggtccaactatcccatccacaacaccgaatgatactggtt

SEQ ID NO: 11468 - DNA, 459 bp, Glycine max
  Clone ID: jC-gmle01810053h07d1
tttttctttttttttttttatcaaaagaccaccccaccggttcaacggtgtccacaatgagcatattctaaaaggagctacagggctaagaacgcaagatagccatactaatgtattcataggaagacacactgttatttagtactagaaaaatactctttttattttatttacaaacaagctttttaagctggacacatcaaacgaccttatgaatatttcatttggggaccaaaattgctaaacttagcttccaaaaaaatgaacattcttaaactgtactcatacccttttcttcaaggtaatcacctagctggaacaacagggtcttctctggaccaactaggcgattaacttgaagaaaactctactcatacccttaagaccaaattagagccttcgttcgcgagcatgcccacgtctagatctacagagggtttcctaggccagttcactggg

SEQ ID NO: 11469 - DNA, 533 bp, Glycine max
  unsure at all n locations
  Clone ID: jC-gmle01810053h08a1
tcgagttaagccagaactccctttgcccgtaatcccagctgaggcggaacagtccgtccttgaggatttaaggaaccgtgtacagcttagcagtgatgcattgccatcagttagcttttacacatttatcaatactcataatggtttaagctgttcttcaatatcccatgacggatcattgattgctggaggatattctgactcatcactgaaggtttgggatatggcaaagcttggacaacaacagaccagttctctttcgcagggtgagaatgaacaaatatttgggcaaggtggtgggaaaagacagtatacattgtttcaaggtcattcaggccctgtttatgcagcctcttttagtcctgtcggagattttatcctttcatcctcagcagactcgacaattcgattatggagcacaaaacttaatgccaatcttgtatgtnataagggtcacaattaccctgtctgggatgttcagttaggcctgtggggcattaaattgccagctcggtacatgacagaactgctag

SEQ ID NO: 11470 - DNA, 379 bp, Glycine max
  Clone ID: jC-gmle01810053h09d1
aaaaaaaaaaaaccccatttttctttttttattaaacgggttccaaaaccccaaaaaggaaaaatgggggggaaaaaattccctgccaacttgttttggtccaaaaagggaatattttagggccttggcctttggggggggctgccaattttttaaatgatgaaaaggcccccttgttttgccctttaatgactttaaaagccccccaaaagtgccccaaggggaaatttgcttgaaatttttgaaaggacaaaaagttaaggggttttttttcccttttttgggcccaaaaaaattttttgggggtttttttttaaaaagggggaatcagcaggcccaagcttatgcaatccgtggaagggtttttgccccctttttt

SEQ ID NO: 11471 - DNA, 526 bp, Glycine max
  Clone ID: jC-gmle01810053h10a1
ctgccactcatactcattttgcgaaaccggctgaagtatgctctgacataccgtgaagtcattgctattctgatgcagcgacatgtccttgttgatggcaaagtcaggacagacaagacatatcctgctggtttcatggatgttgtatcaatccctaaaacaaatgagaactttcgcctgctgtatgacaccaaaggccgattccgtcttcactcagtcatagatgacgaggctaagttcaagctttgcaaagttcgctcagtgcagtttgggcaaaaaggtatcccatacttgaacacctacgatggtcgcactatccgctacccagaccctctcatcagagctaatgacaccattaagttggatttggaggagaacaagattgtcgatttcatcaagtttgatgttgggaatgtagtcatggtgacaggtggaaggaataggggtcgtgttggagtgatcaggaacagatagaagcataacggaagctgtgagactattcatgttcatgatgccactggccacg

SEQ ID NO: 11472 - DNA, 313 bp, Glycine max
  unsure at all n locations
  Clone ID: jC-gmle01810053h10d1
ggggggaaatgtagggactaatgatagtataacacgttaaatccaaataatgctaccggttggtagcaatttatgtcctgtataagtactaactactaactaactagcactatcactttccttacctagncaaatattttctatacaacctttttaaggggtgggaacatgcccattttgggactgggaaaaatggaatgggtttgaaatgatatgatacgtcaccctttccatggaactttttaggccaaagcttatgtgaaagggcttttttttgtttaacaacccccacccttaagtgggttaattggac

SEQ ID NO: 11473 - DNA, 151 bp, Glycine max
  Clone ID: jC-gmle01810054a01a1
acaggttgttagttttttggtcgaattacagattgttatatgtaataataaacagtcatggtggataatcttggactgtctcatggtggttcctttgattatagtgactattttcattaaatgatcagagattctgtggaaatcatccatg

SEQ ID NO: 11474 - DNA, 408 bp, Glycine max
  Clone ID: jC-gmle01810054a02a1
gaaaaagaaaaaaaagattctaaagaaatataactaatattctttagaataatcaaaaagaatattaaattcaaataaattttagatagaaaaaagacttaaaaaggaggatttgaaatgcgagatctaaaaacatatctttccgtggcaccagtagtaagtactctatggttcggggctttggcgggtctcttgatagagatcaatcgtttttttccagatgcattgatattcccttttttttcattctagttattgacacggaaaggggtgaagaagattatagatccaattaagtattaaatatatgtaattaatatgtaattaatctcctcttctttatttcgtcttttatttcttcttttttttacaattgtaatagaataagttaggaaaaaaaaataaaaa

SEQ ID NO: 11475 - DNA, 546 bp, Glycine max
  Clone ID: jC-gmle01810054a03a1
caagagtttttttctttggcagaagaagctttgaaaatatggtctgagaaggccaaaaccttcagccctccacttttaatagtcatcagtgatgaaaattgcgaccctaaggcacttaaatatgctctgggcaaaggagccattgaatatgaggattttcttcaaagtggtgatcctgagtatgcatggaaacccccagaggatgagtggcagagcattgcattgggttacacatccggtaccactgctagtccgaagggtgtggttttacatcaccgtggagcttatctcatgtctctgagtggagctcttatttggggaatgactgaaggtgctgtgtatctttggacacttcccatgttccattgcaatggttggtgctacacttggacacttgcagctctgtgtggtactaacatatgccttcgccaggtaacagcgaaggcagtgtatggagccattgccaagtataaagtgactcatttttgtgcagcaccagtggttcttaacacactaattaatgccccagctgaggacaccattctt

SEQ ID NO: 11476 - DNA, 434 bp, Glycine max
  Clone ID: jC-gmle01810054a04a1
tttgtgtaccttttgaaatattgtgacagatataaaacgtgttccacctgtccaaaatattgccatgtttatcgatgaatgcgacactttgatttcgaagtccgcttattatatccctaacccgaagtgctacttggagcatgcatcacaagaaatggctcttcttcagatcttagcacttgatgtcctttcggatcaccatggtttccttgatatgatttgacagaggatccgtatgatcacttattccatgaatgggtgatttcatatacatgcttcacggacagggcttactatcgagctgaccgtttacaaggtgacagagtagaagatccatctatctataagctctatgacttgtcatataacttatgcttgatcgaaaggttattatcatctagagttgacgaacgatatgaagcatgggtcattgc

SEQ ID NO: 11477 - DNA, 505 bp, Glycine max
  Clone ID: jC-gmle01810054a05a1
acagcgtcgccgatgacggttcaggcgggtcgggttcggaccctgaaagaaggttctcgcggagaatcgggtttgggtccggtcgtgtactggatgttcagagaccaacgtgtgacagacaattgggctctgatccacgctgctgctgatgccaacaaagccaacgttcccgttgccgttgttttcaatctcttccacacctttcttggcgccaaatcccgtcatttagggttcatgctcaggggcttgcgccaattgtgccaccgtatgcaacactctcttcaaatcccctttttcttgttccagggagaggcagaggagacagtgccaaagtttcttagagaatgtggagcttcacttttggtgacggatttctcacctttgcgggaagtacggaggtgttaagaagagatatgcaagagggtaagcgattcggttgctgtgcatgaagtggatgctcacaacgttgtgcccctttgggtgcctctgataaattggagtacag

SEQ ID NO: 11478 - DNA, 73 bp, Glycine max
  Clone ID: jC-gmle01810054a06a1
catgcttctaatgtttgaatttcatcatggaagacttccatcattacattatattgaagcatttcttgcgctt

SEQ ID NO: 11479 - DNA, 490 bp, Glycine max
  Clone ID: jC-gmle01810054a07a1
agaagctaccaatggctttgagaaagtgctaggaaagggagcttttggtattgtgtacgaaggagtcatcaacatgggttcccttactctcgtggcagtaaaaaggttgaacacttttctcttggaagaggttcaaaaggaattcaagaatgaactgaatgccattggcctcactcatcataagaacttggtccgtttacttggattttgtgagactcacgacgaaaggttgctggtttatgagtacatgagcaatggaactttagcaagccttgttttcaatgtggagaaaccaagttggaaactgaggctacaaattgcaactggggttgctagaggacttctatatctgcatgaagagtgcagcacacagatcatccattgtgacataaagcctcagaacatactccgtgatgattactataatgcaagaatttcagactttggattggccaagatcttgaacatgaatcagagcagaaccaacact

SEQ ID NO: 11480 - DNA, 492 bp, Glycine max
  Clone ID: jC-gmle01810054a08a1
gaagaattcacatactgattcgccctctttcttctcttttttagtccaatgaccccccctttttttaagataatttttctcaagtgttaaaacttgagagattttgcaatggatataagaactggtatctaattcgaataagtatcattcttttagggaatcttccaattgattgaccaatccagataatatatggatatatatatatagatagatctatctatatatatatctaactaatataggaatcttagaaagataattagtctattcataagaggagatgagatcatatgaaaaatataaccgattctttcctttgtttgggctactggccatccgccggaagtttcgggtgtaataccgatattttagcaccaaatctaataaatcttagtgtaatgttaggcgtattggttttttttggaaagggagtgttacgtgatttattagatgatcgaaaacagagaatcttgagaactattcgaaact

SEQ ID NO: 11481 - DNA, 463 bp, Glycine max
  Clone ID: jC-gmle01810054a08d1
cattcgaattcattttatttatatattaatattatattcaaatgaaataaaaagatattaaaagatactaattataagaatttgaaagtgaaattataaagttattaaatgattaatcaatttttttctacctgttcctgtagtaaaaagagttccatctgttcttgaatagcttccttcaaaaggacttctgcttccccagtgaatgtcttggtagaagatatgatttctttgaattgaggattatgtctgtttaagtaagcacgtaactcaacaagaaatttccttacctgtccaatttgtaatgaatcaagataaccattcgttccagtataaatagttattatctggtcttccacggttagaggagctgattgggattgtttaagcaactcgcgcaatcgttgacgcttgacaattgattctgagtagctttattgagatcagaagcgaattgggcaaa

SEQ ID NO: 11482 - DNA, 560 bp, Glycine max
  Clone ID: jC-gmle01810054a10a1
ttttcaaattttgataaagctaccctaggacctaggtttacactttctcttttcttttctgtgagagtgcagcgtcttttcttcttttcaaaattcattcccttgccttgcatgcgttttcactttttcagcgctacacctttctatccgcaatctaagagctggggaggaagtcgattacgttttgatgattattgctatgcttaattcttgtttggaggtttaactatgaaataaacgcttttctgaaaaatattatgttgagtggtttttttgtgccgtgccaaaaaatatctgtcatagggagagaggaagagaccgggggagtgtgtttaggagtaaggagggtagtttatgtggaagagggagtgctgtaagtaaaaaggggacgtgttaatagcaaatgccaaatgttctgtgggtatggagccccaagattttgatggcagagatttgggaaaatgcccctgacagaaattattgtttacaagaaccctatttcatccaatttgcatctttcttgtggatcctgaattgcaatttcagggtacatttgctct

SEQ ID NO: 11483 - DNA, 253 bp, Glycine max
  Clone ID: jC-gmle01810054a10d1
tgtcctttttttttttttttttttttttttttttttttttttgattttttgattttctgtgggtgatatttacttttgttaccccaatgttttttattgtgtgcaaaccaaatttttcttcgaccgccaaaaaaaaaaaaacccgccggacctacatccgaggggtaaaaattacccgttggaaaaaaaacccgccagtaaggaacacccccccccccgtaaaaaggggggctgggaggtccacccccccccc

SEQ ID NO: 11484 - DNA, 512 bp, Glycine max
  Clone ID: jC-gmle01810054a11a1
tgcaaaactggtgggttgggagatgttcttggaggtctaccaccggcattggcaggttttgggcatcgagtaatgactattgtgccgcgctatgaccagtacaaagatgcatgggatacaagtgttgtaattgaggtgaaagtaggagatagaacagaaaaggttcgcttcttccattgttataagaggggagttgatcgtgtctttgtggatcacccttggtttcttgaaaaggtatgggggaaaactggacaaaaactttatggaccaacctactggaaatgattacgaagacaaccaactgcgttttagcctcttttgccaggctgctttggaagccccaagggttctgagtcttaattccagtaaatatttctctggaccatatggtgaagatgtcatttttgttgccaatgattggcacactgcccttatcccctgctacttgaaaagtatgtaccagtcaaggggcatctatacgaatgcccgggttggtttttgtatccacaaca

SEQ ID NO: 11485 - DNA, 506 bp, Glycine max
  Clone ID: jC-gmle01810054a11d1
atctagactattaagaaacgctttaatttatgctaatcttgaaagacctgcactcattacactgattcgaatagtgtaatttccgtgtccatgtacatttctataatctatttagaagaaaacaaaaatttggaagaaggatataaaacataatattaataacaagcaaggggctgggagaacttcacgagactcagactaggagaggcttccctcacatctttgttcttattattatggggttgccacattttcctttgcctgtggagcaatttcttctccatcacttccaggttcactgccaggaactcccaagcttagcagcacttcctcccactccttagcaggccccttccatgaaagatcttgagcatgcagttcttgataatttctgtaaaagctggagttccataaactgcaagggcccttttgacagtctttgatatagcatccacattagccggatccacagcatcacattcaacatttgaggcacccatctgaaa

SEQ ID NO: 11486 - DNA, 556 bp, Glycine max
  Clone ID: jC-gmle01810054a12a1
cagagatttaaccttctttgttcgtagatatgcgcggttactgattagttgatgatagctgtcgacaaatttcacatggaaagagaacgaacacggaaacgcactcatgttggatgggaccgtgcccctccctcagtgtcccgggcacaccggactgtgccagtgcccggcgacgattaattcgagaggaggcacgtttcggcttctaaaagggaccacgatcgacagggccagtatgtcttcaatcttggcgaaaatctcactgctacatataaaatcctcagcaagatgggtgaaggcacatgaggtcgggttttggaatgttgggaccgccaaaccagagaatatgtggctatcaaggtagttagaagcatacggaaataccgagatgcagcgatgcttgagattgatgtgcttcaacaactagccaagaataatagaggaagctcccgatgtgtgcagatcagaaatcggtttgattaccgaagccacgtatgcattgtctttgagaggcttggaccaagcttatttgattttctaaagagaaataaatact

SEQ ID NO: 11487 - DNA, 433 bp, Glycine max
  Clone ID: jC-gmle01810054a12d1
caacgcgactgagccactgctataaataataaagaaatggatacattcaaagttgtaacctgtgcaaccgacaatctttaaaatggaagccattcccaataatctggtttcttaagctcggattcctaaagaagatatgatcgagggcttggcaagctgtaaggcgtttggtcggatcatatgttaataaaccatgtaacaagttaatcgaggaggaccttgaagagaccacatttggcgagacaatagccttaagaggaccaagcttcttgactgcactaatgctgtcccttggaacaacttcttctggccatcttagacgctatccacgcttggaatatttatctgcgcccttgttagacctgcgaatgatgagctctgggatagatcccaaaacattttccatcattgccaggtgctccaagatttcatg

SEQ ID NO: 11488 - DNA, 367 bp, Glycine max
  Clone ID: jC-gmle01810054b01a1
ctcctactgctgaacgccagggcaatcagacccgtgctaagcagagcaacaacgccatcgacatcacgattagggatcgtggagccagtgccagcagcaaccgtgctagaggatctggtgagccctaacagaattgtagtggtcgtagtggccgtagacgcgggtcccgtggagatgcccgcgtgaggagtggtggtattgcacagtcatgagggtgaccgttacagcatgatctgacttgcagagcacgagaagcaagctgtttacggatggagtgccgagactggtgacgtctagcatgctgacaagcatgccggttaggccatagacatgatagaagataaggattccgataaagaagatgccg

SEQ ID NO: 11489 - DNA, 531 bp, Glycine max
  Clone ID: jC-gmle01810054b02a1
cacaagtacataaattccgattttctccctggaaaaatggcagcctctgccggcggccagataactctctcgtcaaccgtccagttacatggagtgacttgtaataggaattggaagcttgtgaagttctgtaatggggaagtcatgggacgtaagcttttgttaaaaaatggtggtggcagcactaaggattttaagcgccaacaacaacatatatgcatgtctctcaccgctgatgtgtccactgaatctaagttgagagacctagatatggaaagaaggaacccaaggacagtgttggcagttatactaggtggaggagctggaacccgtctcttccctcttactaagcgacgagccaaacctgctgttcctattggaggagcttacaagctcattgatgtgccaatgagtaactgcatcaacagtggtatcaacaaggtgtatatccttacccagtttaactctgcctcactcaacaggcacattgcacgcgcttacaactctggtaatggagtcacctttggagat

SEQ ID NO: 11490 - DNA, 595 bp, Glycine max
  Clone ID: jC-gmle01810054b03a1
tacaaagcagatcctgaaagtataactgatgaagagagatttatgtttcgcaaattaggattgaggatgaaagctttcttacttattgggagacgtggggtttttgatggtactattgagaacatgcacttgcattggaagtaccgggaactggtcaagataattgtgaaggctaaaacctttgaacaagtaaaaaaaattgcactagcacttgaagctgagagtggaggtgttctggtctcagttgacaaagtttcaaaaggatattctgtaattgtttatcggggtaaggattaccagcgtccttcaacattgagacccaaaaatctattgacaaagagaaaggctttggcacgctcaattgagctccaacgacatgaggcactcatgaatcatatttcaactttgcaaagtaaagtggggaggataagatccgaaatagagcaaatggagaaggtaaaggacaaaggagatgaagcattgtatgacaaattggattctgcctatcctagtgatgatgagaactcagaggtggaggatggtgagcagggtgatgaggcatatctcaagacctataatagcgaaaatgatagtg

SEQ ID NO: 11491 - DNA, 467 bp, Glycine max
  Clone ID: jC-gmle01810054b04a1
attgcttaataatcttgatagcgacagcttcctgcgtaatcccatcgaaatgatcaacggtctacctatacattgattgcctgatcgccactttctacttgccatcatcatctacggacttatccttcttaaacccattgccttcagatacgtttcatgcaaaaacgccctacttgagcctcctaaggagaaggaacttgccactggcttgtctcagagatcgcgactcctagagttgactcctaagctcaatctgatggggttgatgccatcactatgtgcaacccacccttcactgctttggccattccaattatcatggggtagcagaacagatttgatgaggcacctaagaggaatgatgtcaaagctataggtgtgactggcacatgcgggagatttcctggtggataagatatcagtggtatgcataaggttcacctgactgaagattcctcgcatctcct

SEQ ID NO: 11492 - DNA, 576 bp, Glycine max
  Clone ID: jC-gmle01810054b05a1
gggattgcgggtaataacagaggacctgcatataatcctgttccaccgagctcttcattgttgagttttcctatgaatcaaacctctgaaatgtctgtcaacaatagtttcccaattggaaccaccccaggtatatcaagtatcacaacaaaaggctcttttcaagaagaagttacatcaggaattaaaggatccagtgggtttccaagttatgatatttttaatgaactgcatcatcagaagtcccatgatttggagataacaaacccaggcttgacatacaatgcctcccatcatgtaaaccctttacaaggtaacattgatgttgcaccatcagttttagtgcatcaagggttttcttctacacaacagaccggccaaagcagagatggcgctttgattggaaaagctatgttctccatgggagaaggcttggaacaaaataacctccaaaatgctaacttcaatccacttcttgttgacaattcaataaggatcaaggctgaaagaattcctgatgcaagctcccagactaatctccttcctgagcattattggcaggaggatctgatgact

SEQ ID NO: 11493 - DNA, 570 bp, Glycine max
  unsure at all n locations
  Clone ID: jC-gmle01810054b06a1
acaggatagaaaatttgaatggagagtggtgaagactattccctgtttgagactaggaaagacaaaggaaggcacattcgaaggatctatgcaatctctttgtttgtggccatatgcttcatctgggcttacagattgagccacatacccgcatatggcaaatgggcttggcttggtttgtttgctgcagaactctggtccggtttctattggctctttggtcaagccctccgctggaacatgctgttcagaaaaaccttcatcaatagactctctgaaagatatgagaatagcttgccgagagtggacatgtttgtgttcacggcagacccaatcattgagccacccatgatggtgattaatacagtgttatctgtgatggcttatgactatccagcagagaagctcagtgtgtatctctcggatgatgcaggctcagacataactttntatgctcttttagaggcttctacctttgccaagcattgggtgccattctgcaagagatttaaggtggaaccgatgtcacctgctgctttatttaatacccttgatcaacaaactcacacg

SEQ ID NO: 11494 - DNA, 122 bp, Glycine max
  Clone ID: jC-gmle01810054b08a1
ctctcatgtagtgtgtggtttcgcgttgctgtggcctagcgcgtctctcaatgagtactggaccactgtgtttctatgcccatcctatctacaacatcaatcccacgtctgtctcatacagc

SEQ ID NO: 11495 - DNA, 506 bp, Glycine max
  Clone ID: jC-gmle01810054b08d1
gacaacaactcctcgatgtccatttcggttcattactgcattcgccttttcaacaattcccctttctgggtaaaagacgacacaccccagaggccaaaacataacaaagaagcaagcaaataactaaaatatctcagtcctgaaacaagaattaacaaaaacaactacaaaggaacgacaattagcatgggagtcttggttgttcttcaagcgagtgtaggattctctgcaggagaagtcctccacacgatatctttaagagctggacgaagctccttgctacagaactggttatactccaaggtgtcaccgttgtccttcttaacctccaccaccaaaaacgacggcgtcacggcgtacaagttcgcagcaatagcgagtttaccttttcgccctttttcttgaccctgcaacctcaccttagtctcgctcttcttcacgtcgaacttcaccgccttcgccaaatcttccaatctcgaaatcacgctgctcgcggagcgcgtggt

SEQ ID NO: 11496 - DNA, 328 bp, Glycine max
  Clone ID: jC-gmle01810054b09a1
gtgttctcacgtctttcacttcccatgcctagcaggtcacgtgaaaaaacaccgaatggtcacgtgccctgtgtgcaacgctaactggaaacaactgcagcaaaacgcagacgaaaacaaaggaaacgcagaactcaaaacgacgaggtcgtttaagctccacaactacgacgacgacgagcctctcatgtcgcccacgtcggtctcgcgtttcaatccgattcccgaatctagtgagaacgaagaagaagaagatgaagaacataacgacgaagaaacaaatctcaatgtgtcgtcgatgatcagaaccaaaaacatcgacgcgttc

SEQ ID NO: 11497 - DNA, 461 bp, Glycine max
  Clone ID: jC-gmle01810054b09d1
gagcataaatcggaaaaaaattttattgacactttattttctccctttacaaactacaaaatttagaactatactgaaaaaaagagaaaaaatacatttaaaatctggcatcctcgaagccatgcaagtcactgactctgttcatagactttctcataatagccactttagccagtctctcagctactctccaagccgacatcggcgtaagtggctcccccttttcatcgaagcaattattattacaactacttcttaacttttggctcctcagctcggcttgttcggattcgagccagcgcaagcactcatcaccctgttcgcggctcacagatgctcgagccgaggatagcaactcaagcgcgccagacacgtcgttacgagccatcaaccttctcgactcggctacggcgcgagcgctgacctggcaacgtctcaaccgttcgatctggggtcgcatg

SEQ ID NO: 11498 - DNA, 625 bp, Glycine max
  Clone ID: jC-gmle01810054b10a1
gtttcgttttgccctttcttcaagccaacctcttcacaactcttctttgttcctttcttcctctcactaccaccatgatcacagtaagcgtaagatggcaaaaggagattttcaaagatgtagaacttgacactacccagtctgcttatgtttttaaatgccaattgtatgatttgactggtgtgcctcctgaaagacaaaaaattatggtcaagggtggtcttttgaaggatgatgctgattggtcaacagtaggggtgaaagagggtcaaaagctaatgatgatgggtacagctgatgaagttgtgaagactcctgagaagggaactgtttttgttgaagatcttccagaagaagaacaagtagttgctgttggacatactgctggtcttttcaacttgggaaacacatgttatatgaattcaacattgcaatgcctccattccgacctgagttaaagtcagctttgactaattattcacattcaggacgaaacaacgatgtcgatcaatcttctcatttggtgaccattgcaacccgtgacttgttcaacgagcttgataaaagtgtgaagcctgtggcgccaatgcaattttgatggtatgcggaaaaatatcctcatttg

SEQ ID NO: 11499 - DNA, 542 bp, Glycine max
  Clone ID: jC-gmle01810054b10d1
acagaaatgtaacttgatattcaagtgcctcttggaccctgtagatggaaggaaggagattcagggtaccgtgcttcaattcaaatccttatacatcctttaaaaaaaatgcaaaaactaaaataaataaacacttttttttgctcggcaaaataaataaacactgactaatgagagcatcaaacctcaggagtacaatacaaataatgacccggataaaccatttctcactcaatccttgaatctctgaagtaaacaccaaatcagctcctcttcctagcaattacacagatacaacacgagccttgtacatgattatatacgccatgtgccaatcacctcctccggataggctagctatgtcttcttctacttttggtttgggattgtcatcgccaaactctatccatttgccattttcttgcttgacccaaccaacataatgtcctgaatcagcacttctggccttgtgggttaatacagcaaccaaatcataaattccaatcatctgtgtttccttttcaccctcctccatgggaact

SEQ ID NO: 11500 - DNA, 619 bp, Glycine max
  Clone ID: jC-gmle01810054b11a1
ctgagttcaattacaacctaggaactctcacatcttcttactcttaattttctcttcagaccactcagataatggcaagcactcctagcattccatcacacataaaagcttgggcttattctgaatatgggaacacagaagagattctcaaatttgaatctaacatacctataccagacatcaaggaagaccaagtgctcatcaaggttgtggctgcagcccttaacccagtagattataagagggctcatgggtttttgaagaacactgattctccctttcctactgttccggggtacgatgttgctggtgtggtggtcaaagtgggaagtcaagtgagtaaattcaaggttggggatggggtttatggtgacatcaatgaagatcctgtgaataatccaaaggccattgggtctttggcagagtacactgctgttgaagagaaagtgttggctcacaaacccttcaatttgagctttgttgaagctgctagccttcctttggccatcataactgcttatcaaggatttgaaaaggttgagttttctgctggcaaatctatactagttcctgggggtgctggtggagttggatccctagtgattagctcgcgaagcac

SEQ ID NO: 11501 - DNA, 411 bp, Glycine max
  Clone ID: jC-gmle01810054b11d1
ggaccaattgagtcttattatttatattgcaaccaaaccacaagccaagtatctaattttcaccaccacaattctgaaagagatattcacgtttgatcacgcaaacataaattatggaatgggatgtatgaccactttcccaatggctttattagtcttcaagtgtgcaaatgcctccacggtctgagaaaatggatagggacttttagggtccaatattggcttcaccttcccactctctaagtaaggttttagtttctccaacacagtgccatctgaaattcggctgaagaatatagcttcaggatgtccaaatctcactattggcacaactttgccactttgtttaacagccttcaatgccttctcagtctcactttctctactgcgtcgtacactacatcaaacttc

SEQ ID NO: 11502 - DNA, 593 bp, Glycine max
  unsure at all n locations
  Clone ID: jC-gmle01810054b12a1
ataagctccagaccttctaattctctactctctcacttctttctatcacattttacttgcaagatggcagcgtcatcagcatgccttgtagggaatggtttatctacacggggtaatagaataactctcaagaaggacttcaatggaagatatctctactcaccttggagactttcatcattgaacaataaggcatcagaagcattttccataaagtcttccttggagcagaggcagcagcaagaagggagaagggggtttctaaaactgttgctaggaaatgtgggagttggtttgcctgcactattggcaagtggcaaagcttatgctgatgaacaaggggtttcctcctgcagaatgtcttactccaggtttctggagtatttggacaaggacagagttaaaaaagtggatctgtatgacaatggaaacactgctgatgctgaggctgtttctcccgagttggggaatcggttgcagtatgttagagttcaactccctggacttaaccaagagctccttcagaaattcaggganaagaatattgactttgcagctcatagtccccaagaagagtaagttctcttttagct

SEQ ID NO: 11503 - DNA, 359 bp, Glycine max
  Clone ID: jC-gmle01810054b12d1
gaacactaaaatctcttttatataaacccccggggggcattggccaaccctccaaaaaggaaaaaggtggggtgaaactttaatcattcccaaatatggagcaggctgtagagggcattctgtgttctaagataatccctattaaaggggtttcatttgggggtttcaaacaggggctggttctggaggtgaaggggggacccggttttcaactggtatttcagcaaacccagaccattgaccgcggaattcatttccggtcagggcctccttctccagaaggacttcgacaatcttggcaatcgcctaacggttggtccttaaatggacaaatgcaattgaatatgcttcatctgaaa

SEQ ID NO: 11504 - DNA, 399 bp, Glycine max
  Clone ID: jC-gmle01810054c01a1
ctcgatacagagccaatacaccacctggtggatctccaagaatgagactaatttaagttaagattgtaaatagctatagaaccaaaatatttccacatctccccagtataccttgtggtctttccctctgaggttgaacttcaatttggactctgaagcacaaaccatccaaaatattctgctggtccattctttatacaagagaaccatatacacgagaaccagatgacggaagaaatgattctggccctatgctctcggtgcattggattggggagaccatatttgcttgtaacaatttcttgattattgtaaatgcaatgtgcttactgggtttgtagtaacgtttatgttgtataatgatagttcatggcagaataaaaaaaagtaattttcatc

SEQ ID NO: 11505 - DNA, 485 bp, Glycine max
  Clone ID: jC-gmle01810054c02a1
gtttgttgagcgaaagagccagtctctgattctaccaaatctagggttagggattcaatttaccaacttcctctctctctctctctctcttcctattcttttccttcctccgacaaattttccctctctctctttctctctcttgcagattacgataatcacttttcctcgatctacccttttccgaaagaaacatggttttattttcccgggaaaattctcctcccagttttctcggccaaccttctgtcctatatatcattccttcttcgattcgttgtagaattccaatttcctaggttttctcgatcgatctattgatccgccaatttcaatttggggtaattagattttaatttttggtttcccgtttgttctggaaatattttcttgtgattgttttggtggttgtaaattgtgatagcttcgtggatagtctacgcgaggggttgtaggttgtaaaaaaaagtgtggttcatacgata

SEQ ID NO: 11506 - DNA, 576 bp, Glycine max
  Clone ID: jC-gmle01810054c03a1
cccttatgctgttgatggactagagatatggagtgctatccagacatgggttaaggactacgtctccttgtactatgccacggatgatgcagttaagaaagactcagaactccaagcttggtggaaggaagctgttgagaagggtcacggtgacttgaaagacaagccatggtggcctaagttgaacactcttcaagatctgattcacatttgctgcattattatatggactgcttcagcactccatgcagctgtgaatttcggacaatacccttatggcggtttcatcctaaatcgtccaactctaaccagaagattgctcccagagccaggaaccaaagaatatggtgaacttaccagtaatcatcaaaaggcttatttgagaacaattacaggaaagactgaggcccttgtggacctaacagtgatagagatattgtcaaggcatgcttctgatgaggtctaccttggacagagggacaatccaaatgggactgatgacacaaaggcaattcaagcctttaagagtttggaaacaagctgaagggaatgaggacaaatctcaggaggaacaga

SEQ ID NO: 11507 - DNA, 328 bp, Glycine max
  Clone ID: jC-gmle01810054c04a1
gcaaaagaaatatcttttcccgttttcatcgttgtcaatggttgtgcatctgttgaggctgatggagaaggtcagatgccatcaatcctcttccggaaaccacatattcccattctgggcattgatcctttcgagtttaacgttagaggattttcatgcttatgcgatatgctgatgtgggttgggtaatatggagggtgattaatggttaatggttgttcctctacaatcgatatttgaaaggaattgctggaagtcgatggatgtcaaggtcacagtattcgcttcggagatcgaaatataatagagatactgtcaaagatttgag

SEQ ID NO: 11508 - DNA, 536 bp, Glycine max
  unsure at all n locations
  Clone ID: jC-gmle01810054c05a1
atttcttaattttcttgattgcgagagtcagtagcgaaatccccccgaaatgatgaagggtctttctttacattgattgtcagtttgccactttctactttccatcatcgccttgggacttatccttcttaaacccatttccttcacttccatttcatgcgaaaaagccttacttgattcttcgaaaaggaaggaacttgggacttgtttctctcagagatggcgttgcctaaggttgatttcgaggttggagctgatggggttgctgtcatcactatgtgcaacccacccgtcaatgctttggccattccaattatcatggggttgaagaacagatttgatgaggcagctaggaggaatgatgtgaaagctatagttttgactggcaaaggtgggagattttctggtggatttgatatcagtgttatgcagaaggttcaccggactggggattcctcgcatctncctgatgtctcagtggaactagtagttaattcaattgaagattcgaagaagcctgttngtgcagcagtagc

SEQ ID NO: 11509 - DNA, 604 bp, Glycine max
  unsure at all n locations
  Clone ID: jC-gmle01810054c06a1
actctctcttcattctctttctcttttcctttcacacaaactcctcttatgatgggtcttgatcaagatgctagcagcaactctggccttcagcttattctagggttagctttgactgccaccaccaccaccactccatcatcaccaccatccatttccaacaagcttgatcatgttgatcatcaccaccatcttataactcttagaccaacaacaaagtcatcctataattcctctgaggctgaaccatcattaacgttgggtctttcccgggagagttacctcaaagtccccaaaagcatcataggacacaacaacaacaaagtctcatcctgtgatgaccctcttgacttgtccacacagactaattcacctcatcacagtgctgtttcctccttctccagtggcagggtcaagagggagagggatctcagctgtgaagaagttgtggatgcaaaagagattgatcagagggatcttagctgtgaaggaataataagagccaccgaagaagaagaagactgcgccgtcaccagaaagaaacttatgctcaccanagaacaatctgctntgctagaagacagctttcaacacatagcaccct

SEQ ID NO: 11510 - DNA, 606 bp, Glycine max
  Clone ID: jC-gmle01810054c07a1
gagggaaagaactaagttggatgattgatgagtgatcaggaaggtgaagaacagtatgggtctgaatcgggatgggtggatgctcgaagttggtgcgatcacctggcatcatccttatcggaggatctatggcagattccggggcctgatactccgtgccagacctgccaacacccaactgaaaactggttgtgtctgtcctgtaagcaggtcctctgtagccgttttgtgaacaagcacatgctccaccattctcgtgacactaatctcactcactgcgtcgccctcagtttcagcgatctctccgtctggtgtttctactgcgacgcttacttggatcctcaactcattccccaactccgtcctcttcatcaactcgcctatatttagaaattcggtcagcctgcaccaattgcatgcaccaggctttgattctcattcattgcctttattaactctattttctgcaatgctttgcctttgtgttaaaggcgaatttatcggatcgcctaagtatgatcttcccgccaactaaactagtgattagagaggtaatgctgattataattacatatttatgtatcagattatgtgaactcccccgaa

SEQ ID NO: 11511 - DNA, 507 bp, Glycine max
  Clone ID: jC-gmle01810054c08a1
atttagaaaagttgaagaatatgttaccactattcatcaaatgttgtgatgatctgattagcaaatgggagggaatgttgtcttcagatggaacgagtgaaacagacatatggcctttctttcagaatttggctagtgatgttatttctcgaacagcatttggaagtagttatgaagagggaagaagaattttaaaacttttaaaagagcactgtgctctcacaacacacttttctgtagaggtaccatcctggatggaggtttgtacctactactacaccttgaagggtgaaagggaaatcacccccagattatagaaggcttcgcttatggatatgattaacatgagagacacagttttaagggcgggatgccccactaataacctcgtgagagatacacttgtggtgtcaacccacggggaaattcaagaccagggaaataagaatgttggaatgaatcttgaggaagttattgaggaatgcaagctattctactttgcagggc

SEQ ID NO: 11512 - DNA, 455 bp, Glycine max
  Clone ID: jC-gmle01810054c08d1
gcttaaaggaaatcatatgcatttctcattaatactaaagaaaataaactgataatagtgatatgaaaaggtttgaatctctattgttgaaatgttattacattataaactttcaatatgagctaataattattttttcatatttccaccttatgtagaatgagatgagcaccatgttggggttgaagagtaataacggaagttggagcatgagtataggttggagaaagttcaaacgagaaacgttgtaagatcattgacaaagcagtctttgctttcaaaaaggaaaagttttgtccgatgcatattctaggaccccctccaaaggcaaaaaatgaaacccttacatttgtggcctttagaagtccttcagaaaatctctccggtttgaactctttagcatcattaccccaaagctcacaatcatggtgaaccaaatctattggcaaggaaat

SEQ ID NO: 11513 - DNA, 418 bp, Glycine max
  Clone ID: jC-gmle01810054c09a1
gttaagtctgcgaattacaccaggggaagtttcattttccccagtgctcagccatatccccatcgcaacttttctgaggaagttgctattcttgatggctactacggccaactcgttgctggaagcaatgcttatattttgtgtggccaagacacagcacagaactggcatgactactctgcttccgcagattctgcatctcaatgtgacaatgtttacactcttaaaatgtgcatgactgtcctggatagacagaacgcacagtatttctacacaaaacattgtgttagatctcatggcgactgttaattcgcgcattagaaaaattcttacagattccgagactttgtgactttgactttgaaccatgtggttattcaatgaacttctgtgaacgcgcctgtgtttctacgattgt

SEQ ID NO: 11514 - DNA, 313 bp, Glycine max
  Clone ID: jC-gmle01810054c09d1
tcgttctttttttttgcacgcaaacagggcgatctattactccattcgatgatcaaatggtgattgaaaccctcaagggatagatgccccaagggtttttatccgtcgctccccaagacaccaacgaactacttagctgatctggatacctcactcttttcacagggactgacatataggcgacacttaaggaatccactcttcctacactaccttattgcatcacgtttagaggcagatctatggaaaccacggtgactcatcttaccgaatttttgtaagacacctgaaccactcattacaagcccttcat

SEQ ID NO: 11515 - DNA, 628 bp, Glycine max
  Clone ID: jC-gmle01810054c10a1
ggttccttaaagatccaacttggtcggagtaaacatggcggctagtggaagttccttttgcaacatcactagcttccttcgcaaccaacaaccctcttcccaacctctcgattcttctctcttcctctctgctccttcaatttttgtttcatgttcgagatccatggtgagttttgaagcagaaggagggaaggggtgtaacggctccttcttccgcgcgtttgacatggacgacaatggggacgagtgcatggatgagtactttcataaacccgagaagaagcgtcgtctctccatgaaccaggttcagtttctggagaagagtttcgaggaggagaacaagcttgaaccggagagaaagaccaagcttgccaaagaccttggtttgcggccacggcaagttgctatttggttccagaaccgtcgagctcgctggaagaccaagacgctggagaaggattacgaggctctgcatgcaagttttgagaatcttaagttcaactatgacagcctcctcaggagaaagacaacttaaaagctgaggtggcgagcctcaatgagaaggtgcttgcaagagggaaacacgaggggcacatgaagcagcaggctgaaagtgaagaagaaacaa

SEQ ID NO: 11516 - DNA, 536 bp, Glycine max
  Clone ID: jC-gmle01810054c10d1
aaatgaaatccatagttacattctcaacgagaagacattatttaattacattggaaccaacagtttgattacaagtactaacaaaatgaggcaaaaagaaaacaaacatttctttcctgataaagctaaagctatagccatttttgaagcctggacaaaaagtgcaaatactaaatactaattactaaaaaaacatatgacacaaacacacacatgaacatggaagaaaacttagtatgcccaggtccaaagggcgtgatcttcctcagaaaatccaaaattacaagaactttcaggcgggtcggagtaatccacatcttcttcaagtttgggaaagaggtacgaagggtagagacttttgctgaggttatcttcttcatcttgagacatatccgattgatcatgctcaaacacataagaagaatcaccatgctctagcagtgcggagttaactcatcggtgtaatgaggactatctgaatccaaaatatcactcctggctgaactgatatcttcctgtatacaacccccgacaac

SEQ ID NO: 11517 - DNA, 552 bp, Glycine max
  unsure at all n locations
  Clone ID: jC-gmle01810054c11a1
cttcaacttcacccattcatacgtggtgttgttactgctgctcttttctcttttcttttctctttagttctctcttcccctttctttttctttttcttcttcttctgagcttgtttaagcttttcttccattaacatattatcacaatgtgtggtattcttgctgttcttggttgttctgatgactctcgagccaaaagggtccgcgtgcttgagctctctcgcagattgaagcaccgtggccctgactggagtgggctccatcaacatggtgactgctttttggcacatcaacggttagccatagttgatcctgcttctggggatcaacctctctttaacgaggacaaatccgtcattgttacggtaaatggagagatttacaccatgaagagctcangaaacaagctgcctaatcacaacttccgaactggaagtgatggtgatgatattgcacacctgtacgaggaacatggagaagactttgcggacatgctggagggattcttctaattggtctactggacacccgtgacaacagttttatagtggc

SEQ ID NO: 11518 - DNA, 536 bp, Glycine max
  Clone ID: jC-gmle01810054c11d1
gaactgataaaggaaacacttttattaagacttcaaatcacagcattcaagataatacaatacgcaacactttttagaaagccttataactataaactataaaagctttgcccagatgaaattacactgcaggcaaatttttcattcacctttagcttagttatcttcattggcgcccaaattattctttgtcacatctttgtattagccctggatggcaacaccaaggggagcagcatccataggtattatcttctcaatttctacacccttgttgttctggttttcataggctgaaatgtgcactccaagtgctgctctaccagagggatcaagggttgttagaccaagcagcatcccactcaacagctttggctgtgctacatgcaacacttgctcctccagaacagtgagcctagctgagttctgggggaagaacctctaaagatcattctgtagtaatatgcttcttggtttttggggtgttggggggggtaatggttaccagcattaagcatcattttttcagtcacatg

SEQ ID NO: 11519 - DNA, 495 bp, Glycine max
  Clone ID: jC-gmle01810054c12a1
atttttcttcctcagtagtgtcatttacgcttctcttctctgcagcaactatgcctaaccctaaggtcttcttcgacatgaccatcggcggtcaatctgctggccgcatcgtgatggagctctacgccgacgtcactccgcgcaccgtcgagaactatcgcgcgctttgcaccggcgagaagggcgtatggcggagcggcaagcccctccactacaagggctcgtccttccaccgcgtgatcccgagtttcatgtgtcagggtggcgacttcaccgacggaaacggaaccggcggcgagtcgatatatggcgccaagttcggcgacgagaacttcgtgaagaagcacaccggtcccggcatcctctccatggcgaacgccggtcccggaaccaacggatctcagttcttcatttgcacggagaagacagagtggctcgacggaaagcatgtcgtgctccgacaggtcatcgaaggattgaacgttgtcaaggaca

SEQ ID NO: 11520 - DNA, 260 bp, Glycine max
  unsure at all n locations
  Clone ID: jC-gmle01810054c12d1
aggcgaattatacatgtcctaaatctatcgaaggtagctcatcatgtttttattacgcttctcataacagactccattcactcactctatgaaccccaaccaaccaaccacatgccactgattttgaaaaggaaaggggaagggtttcgaaatgatacttaccaccacattccttcttacgacgactcgataaacaaaagaagagaacaaaaaggcaaaaactactccttnagaaacaacccagattcacctattaaagc

SEQ ID NO: 11521 - DNA, 541 bp, Glycine max
  Clone ID: jC-gmle01810054d01a1
agaaagagaagcattagcaaaagcaagaagaactagtctaagcagaaatggcctcttcagtgatggcatctgtggccctcaaacctgcccctttcactgttgagaagtcctcagttagaggccttccctccctctcaaggaactcctcttcattcagagttgtggccagtggtggcaagaagatcaagactgacaagccttatggaattaatggtggcatggctttgagggaaggagttgatgcatctggcaggaaaggaaagggaaagggcgtttaccagtttgtagacaaatacggtgctaatgtcgatggttacagtcctatctacgacaccaaggactggtctccaaccggtgatgtctacgctggcggtacgactggcttggctatctgggctgtgactctacttggtcttcttgctggtggtgcactttttgtctacaacacaagtgctttggcgcaatatactttgcacatcgatgttttaagctcaaacttagtccatgttactatctaaaaatgaagaattattcatgaagt

SEQ ID NO: 11522 - DNA, 496 bp, Glycine max
  Clone ID: jC-gmle01810054d02a1
gcacgttccgagttttctgatcgctcatagagagttcgacgcggcggttgcagaagaagattgcaagatgaagttcaacatcgcgagtcccaccactggatgccagaagaagctcgagatcgacgacgatcagaaactacgagcattttgggacaagaggatctcacaggaggtcagcggagatgcacttggtgaggaatttaagggctatgtcttcaaaattactggaggttgtgacaaacaaggattcccgatgaaacagggagtgcttactcctggtcgtgttcgacttttgcttcacaggggaactccttgcttccgtggatatggaaggcgtaatggagaacgtatgagaaagtctgttcgtgggtgcattgtcagcccagacctctctggtttgaacttggtaattgtgaagaagggtgagaatgatttaccaggattgactgatgctgagaagccaatgatgagagggcccaagagagcttccaaaatc

SEQ ID NO: 11523 - DNA, 403 bp, Glycine max
  Clone ID: jC-gmle01810054d03a1
gaacaggatgatatgcggctaactgttgaagaatttaaacattctgtcaatgcttacactctatggaaacctggaatgaatatccatgtgtcccatgtgaaacgccgtaacattcctaactacatatttcctggtggtgtacgacctaccttcccatcaaaagtaactgccgagaataaacacagttccaaatcaagggttcctggccatggtcaagctgaaaagcctcaaggaggtaaaacagttgtagttggagcagatgatgtaaggaagagaaagagatcagaggacataatggataataacccaaggaattccaagtcccctgtatctttagctccccccagcagggaagttaatgaggatatatctcctattagtgcttcaagttcttgttctatga

SEQ ID NO: 11524 - DNA, 446 bp, Glycine max
  Clone ID: jC-gmle01810054d04a1
tgacaatgtaaggttggtctgatctacatgattgtggtacccattgctgatgattctacatagtgctcactgttgcagagccccatctgttttggagcctcagagtttatgcatacaagaggggtctttgtagggactttggtataatctgaaacggaggcaacatagaatagaattgaccgatttggtggatgcttcatccacctatagagatacaaatggctctgcttgtggcgggtgaatctggaatatcattgatctatctttctcactaggcccttttctcaacaggcgcactattaggactgacgctgagaaagattgtgtatggctattcgaacaatagcaggcattaggcttcagcagtggtttcaccaacgtcagaacgacagatatcgaactcatatctggaggcttatggctccatgcacctattgctgcaactg

SEQ ID NO: 11525 - DNA, 547 bp, Glycine max
  unsure at all n locations
  Clone ID: jC-gmle01810054d06a1
gaaagccttagggctacagaaaaatgtggggtggcctaaggagattcaaagggaggaaaatcttcccccgttggcctactatgttattagggacattctaaggaaaggtttgagtgaaaatcctaatgcaaagtttatcattacgggtcatagtttgggtggagcactcgcaatcttgtaccctacgatcatgttcttgcatgatgagaagttgctgattgagaggttggaagggatctacacgtttgggcaaccaagagttggagatgaagcatatgcacagtatatgagacaaaaattgagggaaaattctatcaggtattgcaggtttgtttattgcaatgacatagttccgaggttgccctatgatgataaggacttgctcttcaagcactttgggatctgccttttctttaacaagcgctatgaactcaggattctcgaagaagagccgaataagaactatttctcgccatggtgtgtgatacccatgatgttcaatgcttgtntggaactaataaagagctttaccatagcgtacaaaaat

SEQ ID NO: 11526 - DNA, 599 bp, Glycine max
  Clone ID: jC-gmle01810054d08a1
aattgaagttgaagtcttgcccttctctcttcaactccaaacacaagacatcatcatccatggctgcctccgtctccactgtcggagctgtcaacagagctcttttgaacctgaatgggtctggacctggggtttcagctcccagttcatccttctttgggagcagcttgaagaaggttattggctcaagggtccccaacacaaagatttcctctggaagcttcaagattgttgctgtagaagagaagaaagagattgaagagacccagcagaccgacaaggacagatggaagggtcttgcctatgatatctcagacgaccaacaggacatcacaagaggaaagggtttggttgactcccttttccaagctccacaggatgctggaactcactatgctgtcatgagctcctacgagtaccttagcactggacttcgccagtacttggacaacaacatggatggattttacattgctccagcttttatggacaaacttgttgttcacattaccaagaacttcatgaccctgcccaacatcaaggttcctctcatctttgtatctgggaggcaagggacagggaaatctttccatgtgagc

SEQ ID NO: 11527 - DNA, 436 bp, Glycine max
  Clone ID: jC-gmle01810054d08d1
ttgttcttttttttttttttttttttttaaattttttttttttttttttttttttttttttttttttttttttgggccaaaaggaaatggcccccaatgtaaattcagtggaccttttaacttaaaaatgtgggggaacaccaccccatgttaaaaatatgccaaaaacttttcaaaatggggcttttttttttgcgcctaagacattggtaattttaagaatgttacgcccaagatccacaataactttttttgtttgggacagggcaacctttgggaacggaaattttttcttgcccaggttggtttgtcccctagtccatagtgtaaaaaaaatgcccatgcaaaaacccatttgctaagatttaccaaggtgccctgggcaaaattcttttacccccattggaccttcctgacattttattggacttggaaa

SEQ ID NO: 11528 - DNA, 377 bp, Glycine max
  Clone ID: jC-gmle01810054d09d1
atggaagatgatgctcggtacgcaaccccgaataatatcagtgtcgacgagctcactattacgtcggccgccctcgccttttttttttttttttttttagaaaatagcttcaataaatggaaccaacataaaccaacccacatgtgtgcctatgatacattacaggtttgggtgaaccactacacttataaatatcatgatgagggtgtaacagagctggtgttatgtccaaggccaagacctaagtccaagggagcattgtgattaaaggttgtggcatggctattattatggctacaatgcgataaacgaacatgaccatgatttgttatggagtgggtcctgtcggaattggaattcacattaataacatgatg

SEQ ID NO: 11529 - DNA, 584 bp, Glycine max
  Clone ID: jC-gmle01810054d10a1
tgctcgcatcggttactgtgaccagaaggtttcgctcgccggttatcacggcgaggtgaatacgacgtcgttttgcgtttcgtcgcacgcggggaggagtgatgtgttgctcgagaggaggaagttgaagttggctgatactcgcattgttgaaaacacgcagatgaaatccagcgctgaaattgaaattccggtttcgtgctaccagttatgtcattttgcagctcattggtgttcctgatcgagctgagaaagatgaaatagttaaggctgttatgggtttgaaaaatgcggaaattgatgaaggttacacaattgatgtcgttgcagctcgtcaggatctgctgatggatgttagggataagcttcttttcgagccagaatatgctggtaatctgagggaaaagataccctctaaatcttgccttcaaattccttggtcttggttgccaggtgctctttgccttcttcaagaggttggagaatcagagcttgtgctggagattggacagacaagtattcggcatcaaaatgccaagccatatactgatgacctgaatctttccatggcattagctgagttg

SEQ ID NO: 11530 - DNA, 581 bp, Glycine max
  Clone ID: jC-gmle01810054d10d1
tttctttcattttttgacattcaagatagataaattcttgacttaaaaaatgaaagaaagaaatctttacacattacttctgttagcagaaaattgaataagaaatttcaacttttctgataaataccaatgaattccaatcgatcagtaattccttacagggtcaataccatcatcagcctaaatgaagatcgtattttgaattttacggctctccagaaaacagtagggaaggaactaagttagctgcaacatcagttatcctagcgtggcatggtaatgagctcaaatggtcatggtgtttccattatatcattttcacaaaatttccatgatccatcgtcttgcctcttcataacatacttaactttgtcagtgagataatagactgggttcttctgatgtgaaccgtcaacaagttcagatgcttgctctaagagagcttcaatttctgccatgtcatctccatttacatctgatagactgtcagctcgaataatagataactcgagcagaagaaatctccagtaacaagatctgtcttttgcagcattggccaaacctttccactgagcaagcat

SEQ ID NO: 11531 - DNA, 581 bp, Glycine max
  Clone ID: jC-gmle01810054d11a1
ctgttttgtgttcttaggggagttttctttttctggtgatttgaggttggtgacaccattaagtaagggatagagctgtgttctccagtcctggttgatgagggtgctattggtgtggttttgttgatgtaagaagctgaatattgttgtctacatcagaatgggtgctgtttgttgtgttgctgccaaagataaaaccatacaaagtgcatcttccagtgaaatcttgcatcggaatattagacattctccgacatggaacttccggtgggatcatcgagggcgtgtagctggtgaagatactgctgtaacttggttttctaacgatattagtgggaataatggattggagaataaaaatgaatcctcatatgtatcagatgatggagacccgttgcagaattatcaaattcaaaggaatagattgcaaaaatctgcaatctctgaaggaactgctagacatgtgataaattcatcttctgatcatactatttcaaggaatgtctccataaaggtgagcatagaacaggtgaaggaattggctgaatcatcaactttatcatgttcatatcccgcaaaac

SEQ ID NO: 11532 - DNA, 402 bp, Glycine max
  Clone ID: jC-gmle01810054d11d1
ggactaagggatagatgttcatttatcattgcttatgaacaaatttgtggcaatcaacctatggggatggcctcacaacctgggaagaccatagcccagcacccaaaactccctggggcttatggcacttatactaccctccatatttgtagaccacgggccaacagaaccttttttggatatatcaatgaattttatcccaatgccatagactaaatcaatttgtccaaaataacaaaaccctgggcctgtaaagactatctttgactggactatattgacccgaaggatcttttgacttcccttgtttacagaagaattcccgcttttgaacctttagaaaacatgaacccctgtgtacaggtcctaaatgacagcttggtgacattttgtcctttcctc

SEQ ID NO: 11533 - DNA, 355 bp, Glycine max
  Clone ID: jC-gmle01810054d12a1
gccaaggttgaaaaagagtccaagaaacaggatgaaggtgtggttgtgaacaagtttaaacccaagaccccttacattggtagatgcctgctcaacacaaagatcactggggatgatgctccaggagaaacttggcacatggtcttcagcaccgagggagagattccttacagagaaggacaatcaattggggtaattccagatggtattgacaagaatggcaaacctcataaactgagattgtattctattgctagcagtgccattggtgattttggagattccaaaactgtttctctatgcgtgaaacggctggtgtacacaaatgaaaatggagaaattgtcaagggagtct

SEQ ID NO: 11534 - DNA, 398 bp, Glycine max
  Clone ID: jC-gmle01810054d12d1
gacacagtgaagttggattcatctatattgcatcatccctcaaaaatagtactagtaaaactggcaatgaagttgttcatgaacagtttaaaaatcgtcaaagaaaaattacagggtcgtcatatatctacacaacgcaggagggttgatagacttgctgcagcataaagtaggagatgatatttgcgcacgtgaacagaaattaatagacttcgacattccattgctctgctttcttcaattgccttttgtactcagtccaatcaatgccatgtttggcagccaatgacaccataatgtcatcaattcccttttccattccttttagtccacacatgtacacacaaagtgttatccttcttcagtaattcccaaagctcttatgcgtattgagccat

SEQ ID NO: 11535 - DNA, 544 bp, Glycine max
  Clone ID: jC-gmle01810054e01a1
cgattttatatcacctttcaattcgaattagcaaaagcaatgtctccttgcataatatggattccaaacatccatgatctggatgtgaatgagtcgaattacttatccctcggtcttttagtgaactatctctccagggattgtgaaagatgttctactagaaatattcttgttattgcttcgactcatattccccaaaaagtagatccggctctaatagctccgaataaattaaatacatgcattaagatacgaaggcttcttatttcacaacaacgaaaacactttttcactctttcatatactaggggatttcacttggaaaagaaaatgtcccatactaatggattcgggtccacaacgatgggttcaaatgtacgagatcttgtagcacttaccaacgaggccctatcgattagtattatacaaaaaaaatccatcatagacactaatataattagatctgttcttcatagacaaacttgggatttccgatctcaggtaagatcggttcaggatcatgggatccttttctatcagatag

SEQ ID NO: 11536 - DNA, 603 bp, Glycine max
  unsure at all n locations
  Clone ID: jC-gmle01810054e02a1
gaagtcgtctagtagtaagtcccttttgtacgaagctcctctcgattacaccattgaagacgttcgaccacacggtggaattaagaagttcagatctgctgcttactccaactgcatccgcaagccatcctgagattccctaggttgtgtgacgacatagcccccgtagtcttgcatctgctatattattctagtctcttcttttcccttttcttgttctcttccttgcccttttgttctctctacctatacagcaagactttgtttctttttgagtcaagatggctggctcagctattggtttcgaaggctacgaaaaaagacttgagatatcattttttgaaaatggtgtgtttgctgaccccggaggattaggcctccgagcattgtccaaagaccaattggacgagattcttaaaccagcagagtgcactattggtgcatcactttcaaatgattatgttgactcttatgttctgtcagagtcaagcctgttcgtctatccttataaaattatcatcaaaacttgtgggactaccaaattgcttctgtccatccctgtcattctcaagttggctgatgctctngacatagctgtgaaat

SEQ ID NO: 11537 - DNA, 447 bp, Glycine max
  Clone ID: jC-gmle01810054e03a1
ctcaaacacacacagtgtgcagcagcatgagctacatcatgagaagaagatggctctgcaactatgggagacattgaaggaggccatagttgcctacacggggctctccccgcccaccttcttcacccttctggccctgatcctagccctatactacgtcgcttctgggctcttcccctcttccgaccaccgtcacaacaccgcctcgcgcgacttggagccccagatggagcctctgcgaccccccgttcagatcggcgaggtcaccgaggacgacctcaaggcctacgacggcaccgatcccgagaagcctatcctcatggccatcaagggccagatctatgatgtttcccagagcacaatgtcttatggacctggtggaccctatgctctatttgctggcaaggatgctagcagagctttagcaaacatgtcttttgaagagaa

SEQ ID NO: 11538 - DNA, 517 bp, Glycine max
  Clone ID: jC-gmle01810054e05a1
tgacaaagtaaggtttgtttcatcaaaaagatggtggcacccattgctgtttcttctccaaagtccacacttttgcagaaccccatctgttttggtgactcaagttcaagttttgttggggggtctttgaagggtctttgcttcaatctgaaacgaaggcaacaaagaagagaattgaccaatttggttgttgcttcatccacctcaagtgttacaaatagcaatgctagtggcaggttttacttcaacatcactggttttcctttcccacttggtccttttctcaacaggcgcactattaggactgaggctgtgaaggattgtatatggctattcgaacaagagcaggcattaggcttcagcagtgtttccacaaacattagaatgacagttatcaaactcaaatctgggggcttatggatccatgcacccattgctccaactgatgagtgtattcagcttattaaagaattgtgggctccagttgaatatattggtctccctacttttgcttatg

SEQ ID NO: 11539 - DNA, 501 bp, Glycine max
  Clone ID: jC-gmle01810054e06a1
ctttggaaactcacacaccaccaccaccgttttcatcaattgcttatcttctctcattcccttctcttcttgctcaacacacacaaaatatctcttccaatgacaatttctcgtcgtccctcatcatggctcgtctcgcgatcgctgtcgccggcgtgctcctcggggccctctccgcctacaccgcgacggcgcgtccctgcaggaccttcataatctcctcctactcgttccgcaaccctaactccaacaccttcgccaccatcaccgagatccgatccttcgcccgtgtctacatcaccgacaaacccaccggcaaaccctcctccttctacgacctcttcttgccccacgcgactcacctccctgagcccgagcgcgtgaacccacgcgctcccgtagggttcgcctccgcgtacgagtgctcctacctccgcgaccgcaccaaggacatcctcagcggtcgcctcagcctgctcttcggagtcggctgcagcgccc

SEQ ID NO: 11540 - DNA, 464 bp, Glycine max
  Clone ID: jC-gmle01810054e07a1
gcaatgcaggatatgcccctccaagcaatacaggcgggtaccctcctagcaatgcaggatatgcccctccaagcaatgcaggcgggtaccctccgagcaatgcaggctatgcccctccgagcaatgcaggctatgcccctccaaatacagctggatattcttctccgaacgccgcaggaggttaccctcctaatgcaggtggtggctatggtcctggcggtggtgtgcctcagaataactacgcagggaacatgggagggccaccatcaaaccagaacatgggagggtttcaacaaaattcaggatggtcgaacaatgctcccagtagagatgtgccaagcagggatatgggaagaccacctggtgggaacccatattctgggtgagatcactgcagatttttctagcccatgtagataacgaagaattgtgcccaagaaagcagagtttatgctatgtttctc

SEQ ID NO: 11541 - DNA, 561 bp, Glycine max
  Clone ID: jC-gmle01810054e08a1
ccacatccatctttgccttctgcatgttggttctctgtaaacagatactgcaaaagaagaataatattgaatatttggttgggttgaatccctgggttgaagcgttgcagacatcacggctattctaagagtgtctcgctctctcattcatgtcccaactgtacgacggaggacaggttgcgtaactgccaccaacccttcgccgcacggtgggcgtggtgctttgccttctgaaggtggtagcccttcagacttgctcttcttagctggtggtggttctgctgtcttctagcttcttcttaactcttttttctttttactacttttaagctaccttgttttcaaaataacaaaaacaaacactttcttacttcataagatcaccttttcttcatcttctacttctccttcactaaaatgatgctcaaaatcaagagggttcccactgtcgttcccaacttccaaaaagacgacgctgcagactcttctcgtcccgtcggaggttgtggtcggaattgcctcaaagcttgttgcattccagatgcaaagctgcctttgatg

SEQ ID NO: 11542 - DNA, 475 bp, Glycine max
  Clone ID: jC-gmle01810054e08d1
tcgtccttttttttttttttttttttttttttttttttgttttgttttccatcctgaaaaactacaactacggggacaaacagttccctgaattaattatgacccgccgcaggaaagccccaacacactgtcgggtcaggcattatgatccatcataccccaaaatcccaacacccttacttagttgagcggtttttattttggcctttcccacgaaaggggcctaaaggcagataaaagaattttcctttgaccctcacgaccataaggttattgcacagggcatttttttggctaaaacggtgactgattttactagttatttttaaaactctgctctttttcaaaatgggctcaaaatacaaaatccttgttgctgtagacccaccccttcttgggagcgagccgcccccacccccgcggggtgatcccttgggctggctgtttaaactccttttttgacactttgaacatt

SEQ ID NO: 11543 - DNA, 592 bp, Glycine max
  Clone ID: jC-gmle01810054e09a1
aacaaaaactcccgttttctctctctgtttttccatggccatctgatcaaacttttcttgattctctctctcagtttttgctattctgagtgatgggtatgccctgccgctgttcccacacctcccacatcactgaaatcatcatcaccagcttcttccgccacaagtcttaaattacaacaatttccctcaattattcatcaaccaaccaccttaatagccttttccaatggttccttaaagatccaacttggtcggagtaaacatggcggctagtggaagttccttttccaacatcactagcttccttcgcaaccaacaaccctcttcccaacctctcgattcttctctcttcctctctgctccttcaatttttgtttcaggttcgagatccatggtgagttttgaagcagaaggagggaaggggtgtaacggctccttcttccgcgcgtttgacatggacgacaatggggacgagtgcatggatgagtactttcataaacccgagaagaagcgtcgtctctccatgaaccaggttcagcttctggagaagagtttccgagaggagaacaagcttgaacccgagagaaag

SEQ ID NO: 11544 - DNA, 324 bp, Glycine max
  Clone ID: jC-gmle01810054e09d1
ttgctcttttttttttttttttgttttttttttttttacattctcaacgagaagacattatttaattacattggaaccaacagtttgattacaagttctaaccaaatgaggcagaaagaaaacaacacttttttttctgataaagcgaaagctaatatcctttttgaagcctggacaaaaagtgcaaattctaaattctaattgctaaaaaaacatatgacactaactcacgcatgaacatggaagaaatgttaatatgcccaggcccaaagggcgggatattctttaaaaaacccaaaatgtcaatagctttactggggggtg

SEQ ID NO: 11545 - DNA, 465 bp, Glycine max
  Clone ID: jC-gmle01810054e10a1
ctcgacccgaatcagcactgcactagtcctacaccgcctgcgctatacctgatcaacgtctggtgtgtcgctcctgaaggactgatacgtgattttaatgaaatcctcagcgccctggaacttaatattgacagacttcaaagggcaagcctgccactgatggaagggtgttagacgtgttctatatcactgtcgggatggtactgctgtacactaagaagaggccagatgatggatgtgaatacgccatcgacgcttatggagcaatgtgcattgacggactacttcaggtgtctggtcctgaatacggacatgtgcaaggcttatactcgcttgcaccatattatgctgatgagtaatctaagtctgaactgccagacgagtagtctgcgcatcctgatagtctagatgtgacagctctgaagacacctactaggactgtgagcaactgactgcgcccatatc

SEQ ID NO: 11546 - DNA, 372 bp, Glycine max
  Clone ID: jC-gmle01810054e10d1
tcgtcctttttttttgcagaaactttttttttgcttgcgccttgttaaggacacatgagatgatggacagggctaaaggaatgtgttggtccaaaattagataccctgcttgcttaaccttcttcaggacggcagcaccaagcttggtctctaccatcgtaaactggaacggaaagaggaattacatttgatactgaacctgactaccaccccaaccttggttttatatctttgtcaacaatgtgagttcttgctcgccttctggccaatggaaagcggcggctttgctgcgacaaaaatctatactctgcccactggcgttcttgactcgaatgtcgaacaacttcagtcgactaaatgcctactcacaac

SEQ ID NO: 11547 - DNA, 597 bp, Glycine max
  unsure at all n locations
  Clone ID: jC-gmle01810054e11a1
caagaattgaagcatattgatcttcagccatggctacacccttggcctaccaagagcaccttccggcggcacccgaatggctgaacaaaggtgacaacgcatggcagctaacagcagccaccctcgtcggtcttaaaggcatgccggtctcgtgatcctctacgccagcatagtgaagaaaaaatgggcagtgaactcagctttcatggctctctacgcctttgcggcggttctaatatgttgggtgcttgtgtgttaccgaatggcctttggagaagaacttttccccttctggggaaagggtgctccagcactaggccagaagttcctcacgaaaagagccatagtcattgaaaccatccaccactttgataatggcactggtgaatcaccttctgaggaacccttttaccctatggcctcgcttgtgtatttccaattcacttttgctgctattactcttattttgttggctggctctgtccttggccgaatgaacatcaaggcttggatggcttttgtgcctctttggntgatcttttcctacacagtcggngcttttaagtcttggngtggtggctttctctaccatggggc

SEQ ID NO: 11548 - DNA, 522 bp, Glycine max
  unsure at all n locations
  Clone ID: jC-gmle01810054e11d1
catgacaaaatcaaatatctacttataccactcacggattcatcacatttgttaatcatataaataaatacacatgcatgtgtgagcaaggcacagcctaatttcttgactcataagtttatagtcacccctcttgcaccattaacataaggcgagacagtagtgttgccactttgcaaggaaccatgcctagttgggtcatatttttctccatcaccccaaagggcataagcttcctcaccgaggacggcgtcgtcaccgatttccagctgctcgaccggcatcctcaagggtatgaacaattttatgacagggagaataatggcggtggacaccaagttccatgcaataacaaacatggtcgacaccaattgcttgaagaactgcacaccaccacctncaccatagaatgcaccccttgaaattgctactggcaatagaagtctacaaagggctggttctgctaatagacctgtgaggagaccacccaaaaggccagccacagcatgtgtgtgaaacaca

SEQ ID NO: 11549 - DNA, 605 bp, Glycine max
  unsure at all n locations
  Clone ID: jC-gmle01810054e12a1
attccctggagtgtgtggtgtggtgttgctgttgcaaattgcaacactcagtcagcactgcaccactgcatttcatttcccagcttagctacaactacaagcccacgtcgctttcataaaaccacacccacctgccaccatcactttccccaaaacgcaacatcatcaaaacttaaactcagagaatcagagagagagagagagagaaatgagtgaagaagccaaaaagaacttcgccggagctctaacggcgaggcccaactccgatgagccgaaaccggcaccggtgccagctgttcccccgaagaaggtcatcatcaagagcgctgatgagacccgacatgcagaatgagggccgttgaatatcgccgtcgccgcgtttgagaagtacaatgtggagaaagacgttgcggagcagataaagaaggagttcgataagaggcatggccccacgtggcattgtattcgtggacgtaattgtgcttatggggcgactcatgaaccaaaccactttggttatttctactgggatcagaaagcgggtttactctntaaatctggctaagcctaatgggtagcaaagaagtgagatctatgggaattgc

SEQ ID NO: 11550 - DNA, 460 bp, Glycine max
  Clone ID: jC-gmle01810054e12d1
cagtgcatgcttcagcaagcttttttttaagatataatatttcctttttagaaaactcttctaaggtaatccttagattcatatccaaaccgataactagtttacatatcatccaatatacaaggacaagatcacaagaatgtcttgcaaagattttgagtgtcagtggaattaatacatgggggactgcatacagcagcataatcacaagacaattcccatagatctcaacttctttgctaccacaataaggctagccagatttaaagagtaaaaccgctttctgatccaagtagaaataaacaaagtggtttgtttcatgagtcacatatgagccaaaattacgttcaacgatacaatgtcacgtggggccatgcctcttatcgaactgcttctttatctgctccgcaacgtctttctccacattgtacttgtcaaacgcggcgacggcgatatcaac

SEQ ID NO: 11551 - DNA, 462 bp, Glycine max
  unsure at all n locations
  Clone ID: jC-gmle01810054f01a1
caactgtacgacggaggacaggttgcgtaactgccaccaacccttcgccgcacggtgggcgtggtgctttgccttctgaaggtggtagcccttcagacttgctcttcttagctggtggtggttctgctgtcttctagcttcttcttaactcttttttctttttactacttttaagctaccttgttttcaaaataacaaaaacaaacactttcttacttcataagatcaccttttcttcatcttctacttctccttcactaaaatgatgctcaaaatcaagagggttcccactgtcgtttccaacttccaaaaagacgacgctgcagactctcctcgtnccgtcggaggttgtggtcggaattgcctcaaagcttgttgcatttcagatgcaaagctgcctttgtatggtttcaagaatgctaatattgcgaatgatttggacctgcatgcatgcggccggga

SEQ ID NO: 11552 - DNA, 618 bp, Glycine max
  Clone ID: jC-gmle01810054f02a1
tgacgagtcagatgcagaacatcacagctgcgagcacgcgtgcgcacgctcggaagctgggtcgaggaatcggattctgtagatttattgcccctcgttcccgtcttctttgtcacccttctcttctctccgaattcatcaatcacccaccgagttccgaccatggccgaatcggtggagcttccgaggcgatgggcgattcgcccgtgcaggaacaagggcctattgcccggcgccatcatcagaatccgctgcacttcccccaccagtgtgaagttggcggaacaagaactttggcagcgagaagagaaggggttgactggcatgcttccagtgcgtgatgccgatgaaattaagccagtgggtcccactgtatctgaaggagctgatgcaacaaaccagaactcaaaagttcagagcggttcatcggagtctcataagctcgatgcaccgaagcagaatgatgctcattggcataacaggggggtagctgctcgaccattacattgatcaaggggagtggagaaaccgagcgggagggtcacatacacaagttgacgctgaggcctgcgcagatatagtgtccaggaactgagcatgagacgaatataccatact

SEQ ID NO: 11553 - DNA, 500 bp, Glycine max
  Clone ID: jC-gmle01810054f03a1
gtctacctgacgcccttactttgatctgacaccatgcttttggacagaagtccttacctatgggagctcatgtgagcctgttgaagcagagggtggctcagtggggaaggcttccactggctctgaaggagatgggagcttctttgcgagagcttaactaggagcttaggtgagctgtatggagcaggctgcacgagaggcactggctgggtaaaacctatgaaacgaagcacagagagctaatgtcgatgagtactaactacctggcacagaagatcaaggagtgcttcttggacctgtgttctctgcctgaggatagaaagattcctgtagaagttttaatcaatatgtgggttgaaatctatgacatcgatgaagctgaagcatacgccattggggttgagctggcaaacaagaatcttctcagcttaggacaagaggcacgtgtcggtggcatgtatagcagacgctttgagacttctgtgactcaacatgatata

SEQ ID NO: 11554 - DNA, 274 bp, Glycine max
  Clone ID: jC-gmle01810054f04a1
aaaaaacaaatcctttatagtatttcttgtaataaatgttgttattttttctaatgcagacattttcagaccggtggtagtgtgcctgagacaaattatcttcttaagggacacttctttgatcgatggttactttagtttttcagtttttaccattctgctcctctatacatagctagttctccaggttatattgctctatttcacggatatcatgacagtagacgatcaacccatcgcctatggattctatgatgagatgccactggaagta

SEQ ID NO: 11555 - DNA, 542 bp, Glycine max
  unsure at all n locations
  Clone ID: jC-gmle01810054f05a1
atggcatcggatctcactctctcaagtctcaacacgccaccctcttcttcttattcagattgtcataacgaggaagcttgtttgcatatataatagagaaaatggtattgttgttagtttattacaggtttgagtggttggttagtacttcgtagaagttagctggtaacaacaaataagtaaatcttgactctatggaagactacaatttttctgttggtcaagagttccctgatgtgaaagcattccggaatgctattaaagaagctgccattgcacagcattttgagcttcgtactattaaaagtgacctgattcgctactttgctaagtgtgcctcagatgggtgtccatggcggattcgtgcagtcaagctccctaatgccccaacatttactattagaagtattgatgggactcatacttgtgggagaaatgcanacaatgggcaccatcaggcttctgttgattggattgtgagtttcatagaagaaaggttgcgagnatacatcaattataaaccaaaagatatttacatgaca

SEQ ID NO: 11556 - DNA, 462 bp, Glycine max
  Clone ID: jC-gmle01810054f06a1
ccgacaaggaggattacaatggtgtctggaagcatgccaagagtgatgggcatgatgattatggacttcttgttagtgaacaagccaggaaatatgctatagtcaaagaacttgccgagtctgtcagtcttaaagatggaacagctgttcttcagtttgagactcgccttcagaatggcctcgaatgtggtggtgcatatattaaatatcttcgaccccaggagagcggatggaaaccaaaggaatttgacaacgaatctccatattctatcatgattggtcctgataagtgtggtgctacaaacaaggttcacttgattatcaagcataagaacccatagagtggggagtatgttgagcatcatctcaagtatccaccttctgtcccatctgacaaactaactcatgtgtacactgcaattctgaagcctgatcatgaatttgcaatcttgattgatgggg

SEQ ID NO: 11557 - DNA, 468 bp, Glycine max
  Clone ID: jC-gmle01810054f07a1
ctctgcggagggtgtctctgttgtcccaggtaacatcatcttgaatggcagtaataatggctttgaatggttattattacaacaatataaagttgggaaatcaacgaagagcaccacacaatctcagtttttcaggatcaatttcagttcataaattgccaaagaatagaaggtcaaaatcttacaagtcagggaatgataaatttcctaggttcctggtagaaatgcgacagacagaattaccttcatcaaaatatggtacaaatggtagagctgttaaaatggttccagcaaatgaggtagtgaaaagaaagacaatgtcagagaataaagtggaaatggcgaggggttcaaagcaagctgttaatggagcaagtttggtagaaagagatcctagcctggccttgacaaagacaaagaaatctacaacctctaaagaacttccaccactggaagagctaaaagttt

SEQ ID NO: 11558 - DNA, 534 bp, Glycine max
  Clone ID: jC-gmle01810054f08a1
aaaaaaggactcaatcacgaagcagaagaaacccaataagtatttctcatttttatggctcttgccctgaagtcaagttgcttattgcaattgaagaaacctgaggctggtttcaatgtttgtttttcatctaagaaagctataatctccgtgaaaagatacactccggtggccgctatcaggatcatggacgcagtgggactctctgcaacattcaccagattgaaaaaagaaggaaaagtggctttcatcccatatatcactgctggtgatcctgacctttcaaccactgcagaagcactgaaattgcttgattcatgcgggtctgacataattgagctaggcattccatactctgatcctttggcagatggtcctgttatccaggctgctgctacaagatctttagcaaaggggaccaattttaatgtgattattgatatgttgaaggaggttgttccgcaactgtcatgtccaattgcactgtttacatattacaatccaatactgaagcgtggtactgagaaatttatg

SEQ ID NO: 11559 - DNA, 514 bp, Glycine max
  unsure at all n locations
  Clone ID: jC-gmle01810054f08d1
aattgaaccacattttattgaatccaatatctatgatgacaacaactattataagttcgagctcttaaaagcttatttttcaaggaagtgctgcttttaaggagcgggttaaaacttccagttctttcagtccctcttgaggagatttggcctcaccaagcaccttcactatagcactgccaacaatcacaccatcagctccccatcccgctacctgtttcacatgctcaggttttgatattccaaaaccaactgcgacaggtttagtagttgcctctttaatttcctgtagaagggactgaacagaaccactaacagatgcgcgggctccagtgacccccactgagctcacaagatacacaaatccttctgccacatcaacaatggctttcatttcgtctggtggagtgggggctggttgtgagggagtanccanttcaattccatgtttcttagcttctggccttaaagtttccgtctcctccagagggacatctggcactacaagcccatg

SEQ ID NO: 11560 - DNA, 565 bp, Glycine max
  Clone ID: jC-gmle01810054f09a1
taccagtgttcatccaagaccatctgtttctaccaattcgaggtctaagcgtgctggtcatcatcatagtggaaagtgtaaaggtgataaatcaaatttaggtaaaggttttaagcatattccttcttctgggatggaaaagtcagtggtgtctccaaatattcctttaaataatcatgaacacagagcctttccacagagaacaacaacaaaatcaaatcacattgtgacaaattttggttcctacatgcgtgcttcaaacacacagatggtggaagtggttcctacaatcaaggaaagttttaataaacatcccagggatctgaaaatgtcagctagaactgctccaatgaacaggcgtattgtggaagtggtttcagacatactaaggcagttaaggtggggtcccactgcagaaaaggctttgtataacctgaatttttcaatggatgcatatcaagctaaccaaatcttgaaacaactccaagacccctcagttgctcttggtttttttgactggttaaggcgacaaccaggtttcaggcatgatggacatacttacacc

SEQ ID NO: 11561 - DNA, 516 bp, Glycine max
  Clone ID: jC-gmle01810054f09d1
agaaagcatagactatcatagaggattcgctgttattttttgaggaacaaggaatttacaggtatgggatgatagccaactacagtaaatgcatcctttccacataagagtgggtcaaccattggcaaagaggctccccacatcccacaaaacaccctgaatttcccttttcagccaaaaatgggaaactgaatgtgtgcaacaggtcctgcactgcctgtctcaccagagaagaacctgtcaccttgctccgacgaccccatcctgtgataatgtctacccgactagggcgaatcccggataccagcatacgttggcgaaaccaatcaagtgtcctagacaatgctggactagcagttccatcagacatgacatgaagatttattagccaatagcgagagcttttttccttaacagcatctggatacacatttctttgtgcagcagcctcccaaactgaaccagcttcctccttgagcccaactttgttagaaaattcaccactgaatctacaag

SEQ ID NO: 11562 - DNA, 525 bp, Glycine max
  Clone ID: jC-gmle01810054f10a1
ttgggatgctgtagaagggatgcaaatgccaccatatttcgcaaaccctaactcgtcgctctatcacaaactccgaaaccccaagcacttgccaccgcaagtggttgacctgaactatgatccatttgctttatgatgaatcactttttatcaacaagcttcgtataatctagccttcatgtgcaagcaaatggtgctagcaagtaccaaagaattgttcatgggaagcccttttcgactcggcgataaccctactccgggtattggctctatagaggctgctcctcataacacggttcataaatgggttggtgctgctgataagccacaccaggaggacatgggaacgttctacacagctgctagagatcccgttttctatccgcatcacacgaactcggatcgactgtgggggatatggaaaaaattgggagaaggaagaaaggactatagtgatgatccagattgggtagattctgatttttacttctatgatgagaatgccaattttgttcgcgtgaaagt

SEQ ID NO: 11563 - DNA, 127 bp, Glycine max
  unsure at all n locations
  Clone ID: jC-gmle01810054f10d1
ggggnnnnnnatgggaagctaaggctgcgtgacggcaacccgaattaagttccagggtcgacgacgctcactagtacgtgcggcgcggcctcgccctttttttttatttttttttgggagttcactt

SEQ ID NO: 11564 - DNA, 530 bp, Glycine max
  Clone ID: jC-gmle01810054f11a1
caagaatctacttgccctcctggtactgttgacctcaccaaagatgatgatggtttggatacagtgggctcttgtgatattgtagaaagaaaacctaccccggcatctattcatagtcagtttgtcaccccaaatttaatctttccttgagtattgacctcttactggtgttaattacgaatgttgccactcaaatagatgacttttggcctggagttagatttgtccgtagtaagtctgataccccaacagttggtaattctgagctacctgttctgcctgatactgtttctcctacattcagtcagtaatctgctggtcatgacaataaccctgttgttaactctgccatgcataatcaatttttgggaccaaacaacttgcagatgcagatgaatcatatgaattcagttaacgagtatggcagatcatcctcagcaccaagacatattcataggactccggtagctgttcaggccctaccagtccaatctcaggcattgggaccacagcataattcaataactaat

SEQ ID NO: 11565 - DNA, 345 bp, Glycine max
  unsure at all n locations
  Clone ID: jC-gmle01810054f11d1
nagggacagctgctcggtactctacgcgataatatcaggtcacgagctactactactcggccggcgctcgtccttttttttttttttttgggattctgatgttattaagggagcaaaaaactctaaaaaacgcatggccggttatcaccaaaattaatgttggcgcaagatctctggacacacatcttgtccaaagagtaagctcctgagagtgattattgaacaactccaatgagagagtggaacgttgcaaacacctatttttatggcaccttaattgtcagtactgccaacacatacgcagcaaggatgatcatactcgtgtggaaacccgggaaccataat

SEQ ID NO: 11566 - DNA, 299 bp, Glycine max
  Clone ID: jC-gmle01810054f12a1
ccatcacgcaccccgaatatgagtttcggtctccctcctgccggctcgaccccggccgaagaatggggcaataagctacttcaggccgtggatggggctctcgatcaagcgggtgcaaccgcttcgaccggcgggttcgtggatgccgctcccaaagaccaagactcgacctcgcacgacgttcaacaggataatctgcccagactcacaggcggtctcgcttcgagtgccaatgtccagtctatcgccaacgaggcaaagctcgccaagcacagcgaaggcttgaccaaggaagaact

SEQ ID NO: 11567 - DNA, 385 bp, Glycine max
  Clone ID: jC-gmle01810054f12d1
aaactaaaaattcttttattttttaaatttttatgctgtttaaaggtcggataaaatttcattagaagctatgtgtcaagacaccactatattcctaccatcagaaaggatatataccggggagaggaaaattcaattcagaaaacatgggccgagatgctgactcgttacatgcttataatttgggtgcagcttgaactaggcactgaaaagaaatcctttgttttttcttgaagagaaaaccgcacaatgattgaagaagtgccgatacggctctagaccatgaaaggcaatgttgaatatatgcccttggagccaagagattcaaaccataatagggtgccaacgctgtaagggggaaaacccatgcccatgaacgctgaaa

SEQ ID NO: 11568 - DNA, 543 bp, Glycine max
  Clone ID: jC-gmle01810054g01a1
gcaatggccgtttctttggcagtgaaccgtcctctgcttggtcttcacgagaatgtaccattagctgttgctcatccccaattcctcccgttcaaatggccacccaagtccaaactcccctccgtcgtcggaattcgatgctcctcctcccctttcaacgacaaaaccctcatttccatcacacctaacacttcccacctcaatcccaaccctctcgcttgtcgctttcacgcttcccagtttggagaacaggagagcaacaaatacgtggaagcctatgctgtaggacgaaatattcgtatgtctgctaataaagctcggagagtgatcgatcagattcgtggacgtaaatatgacgaaacacttatggtattagaactcatgccttatcgagcctgtgaagccattctcaaaatagtgttttcggctggagctaatgctagcaataatctgggtttaagcaaaggaagtttagttatcagtaaagcagaggttaatgaagggaaaacaatgaaaagggtaaaacctgtagctcgagggcgt

SEQ ID NO: 11569 - DNA, 258 bp, Glycine max
  Clone ID: jC-gmle01810054g02a1
agatgagattctcaaagagtttgctgcaattatggcaagtgggacaatgcgtgctagtgaggctgcagctctagccactaaaagagtcatgcaaagatacggccatactactgctgtgtctcagaattagctacttttcttcatcagaaaacgatttgtgggtctaaaacctctacttactatcactgcaataattgcggtgtttcatatcattggttattatttgaaccgggaaaaacatgatcaacttgtagcacc

SEQ ID NO: 11570 - DNA, 421 bp, Glycine max
  Clone ID: jC-gmle01810054g03a1
ggaagactcaatcagtggagctagagtgctactctcagtggaagtcatctcgcgccagtatcaagaccactacagtatgcgattccttcaccaagtttagatgccttaatttctggtacgtcatcgtgtcagaaatacgccttgtcagaaagctgaagcaaggcatcaagagacggtacatgatgttgcaatggattactatggcaagaggatggccacgggttcatcagagcacacactttagataacaggcgtgagtaatacggcctctcagtattttacaacattgacaggtcatcaatgaccatgacggcaagtggcagctggctcaccctaatgttggttctctacttgcatcacgacactatgatggacgtgccaatgctcgacatgagggcaaacaaggactatggactccagc

SEQ ID NO: 11571 - DNA, 504 bp, Glycine max
  Clone ID: jC-gmle01810054g04a1
gtgaacatgacgccctttctttgttctgtcaccatgcttttggacagaaatcaattcctatgggtgctaatgtgagtttgttgaagcaggttgtggctgagtgtggaaggcttccactggctctgaaggtgattggagcttctttgcgagaccagaacgaaatgttttggttgagtgttaaaagcaggctctcccaaggccaaagcattggtgaaacctatgaaaccaatctgattgatagaatggcaattagtactaactacctgccagaaaagatcaaggagtgcttcttggacctgtgttcttttcctgaggatagaaagattcctctagaagttttaatcaatatgtgggttgaaatctatgacatcgatgaagctgaagcatatgccattgaggttgagctttcaaacaagaatcttctcaccttagtacaagaggcacgtgtcgggggcatgtatagcagttgctttgagatttctgtcactcaacatgatatattga

SEQ ID NO: 11572 - DNA, 534 bp, Glycine max
  Clone ID: jC-gmle01810054g05a1
gttccctttgatttcatgtgggaataatcgtttagcttccaataatgtgcaagatatagccaagcctgttagactaaatggatcctcccatgagttgcagaatggcttagattcagcaatgcgtcatactcacagaattttagcaattttagaggcattattttcattgaagccatcttctgttggcacgccttggagttacagctcaaatgagatagttgcagcagctatggttgctgcacatgtttctgaactatttagaaggtcaaaaacttgcatgcatgctctgtctgttcttattcgttgcaaatgggacaatgaaattcattccagggcgtcatcattgtataatctcatagatattcacagcaaagctgttgcatctatagtgaacaaggcagaaccattagaagcaaccttaattcatgtaccgatttggaaggattccctcgtttgtgttggtggtaaaaggcagaatcagtgtgaaagtagtagctgctttgcccctgagcagacatattgtgtaccttcaga

SEQ ID NO: 11573 - DNA, 572 bp, Glycine max
  Clone ID: jC-gmle01810054g06a1
accaaattacatagaatttttaggcgtaaccaaagtacgtaccaaaccatggcattgacaagtcaattgagaaaccttcttgcagctctagaggctgaggaagcagcccaaaaatccaaaggtaaagtgaacacatacaccaaccatggcgatgggtttcagaacatcactggcactaagaccaacagtggtgcatattctggtgatggtaacactcatcacgccaccaacaactacggtggtggtcctgctataaataatagtggcaatttccagggacatggcaatggaggctttattggtggtaatttcgatgcctcaacgaggaactactgattaatttatgtatgatcaacttcatgtattaaatatcgtgttctgcgctacgtatactaattaataataaaattagagctgcatgctgcagctctaacagtgtgtgatatgaataattacttgagaggggggatacgacacaccttcttgagttcataaaattcaattccgatctttttggttgtggtggattaataataacaatgtgctattattaattattaagtgacttctat

SEQ ID NO: 11574 - DNA, 150 bp, Glycine max
  Clone ID: jC-gmle01810054g07a1
gagaaacagaaccatcaattttctctgccttctcattgtgcaataaaattcttaccttgaaaaaaaaaaaaaaaaaaaaaaaaaaaaaaaaaaaaaaaaaaaaaaaaaaaaaaacaaaaaaaaaaaaaaaaacaaagggccgccccccta

SEQ ID NO: 11575 - DNA, 127 bp, Glycine max
  Clone ID: jC-gmle01810054g07d1
ttcgtctttttttttttttaattcacctactttgttttttttttctatttatgtcctcaagacgcacaagtttcattaaaagaaacaagcgttgggcccatggaacactcccaaaaatccaaaggaa

SEQ ID NO: 11576 - DNA, 548 bp, Glycine max
  unsure at all n locations
  Clone ID: jC-gmle01810054g08a1
ctcaatctctctctctccaatggccaaagacctcgaaacggagattcaaagtgggttgcctcacaaggactaccacgacccaccccccgccccattctacgaccccgccgagctccgaaagtggtccttcttccgagccctcatcgccgagttcgtcgccaccctcctgttcctctacgtcaccatcctcaccgtcatcggctacaaccaccagacagccaccgccgccgagccctgcagcggcgtcggcgtcctcggcatcgcttgggcctttggaggcatgatttttgtcctcgtctattgcaccgccggcatatcagggggacacataaacccggcggtgacgttcgggttgtttttggcgaggaaggtgtcgctgacaagagctgttgggtacatggtggctcangtgttgggggccataagtggggtggggcttgtgaaggctttgcagaagagctactacaacaggtacaaaggtggcgtgaacatgctcgctgatggttacagcaaaggaaccgggttgggcgctgagattattggcacct

SEQ ID NO: 11577 - DNA, 518 bp, Glycine max
  unsure at all n locations
  Clone ID: jC-gmle01810054g08d1
aacgcacatgtacgtaacacttaaaaatacatacacaaattaacatgggcatgtctgttgagatggacgtcaccacaaatatagtaaacataaattaaataaacatagtgacgaggatatacagattattccaatccaccatgtataagcaaattaattaagaacacaattaaatgaagcatgtctctcgtagctcaaatagcttggccagaattacaggtttgaggagctcctgaaagaccctagagcctttgctgcttgggccctcaacacggactggtggtagaatgcagcaagagcagcaccgatgaagggtccaacccagaagatccactggtcatcccaagccttctcgttgttgaatatgacagcaggcccaaggcttctagctgggttgatgccagtgccggtgatagggatggtggccaagtgaaccatgaacaccgtaaacccaattggaagtggtgccaacacggggacatgggagtctcttgctactctcttgngatcggtagcag

SEQ ID NO: 11578 - DNA, 599 bp, Glycine max
  Clone ID: jC-gmle01810054g09a1
ccaaaccctaacacacacccatttgattcagtttccatggctagcctcaaggttgcatttttggctgcagtgctctgcatggttgtggtgagtgcacccatggcacatgcagctatcacgtgcgggcaggtgacgaatagcctgatcaattgcatcggttacctccagaacggaggaacgccgccgtcgggatgctgcaacggagtgaagagcctcaatgccgccgccaagaccaccgccgaccgccagacggcgtgcaactgcctcaagtcggccgccagccaaatctccggcttcaaagccaacaacgccgcctcgctccccggcaaatgcggagtctccatcccctacaagatcagcacctccaccaactgcgctaccatcaaggtttgaagagaaagtcatggacgcaggaaaccggaaactactcactagtatatgagtagcattattaatattaagaataagatcgagggtgatgagggctccacttatatgcccctctcctctcggatgagagattcgcattggatagctctaaattgtgttgcgtcgttatttctctgtatgagttacacatagttatatctactttaata

SEQ ID NO: 11579 - DNA, 335 bp, Glycine max
  Clone ID: jC-gmle01810054g09d1
agggagaacccaatattaaaggagatttaactatgggtaactcataccgagaaataacaacgcaacacaatttaaagctatccaatacaaatctttcatacaaaaggagaggggcatataaggggagccctcatcaccctcgatcttattcttaataataataatgctactcatatactagggagtagtttccggtttcctgcgtccatgactttctcttaaaaccttgatggtagcgcagctgggggaggtgcggatctttgcggggatggagactcctcatttgccggggagcgaggcggcgttgtttgctttgaagccggagattttgctgg

SEQ ID NO: 11580 - DNA, 586 bp, Glycine max
  unsure at all n locations
  Clone ID: jC-gmle01810054g10a1
atcgggaacatcggcgacgcggcggagattctcgaaaacggcgccgtccagagcgtgacacacatcctctccgtcctcagctccgcctccatctccttcttctccgaatggaaaaccactctctccatccccgccaagggagatcaccaaagtccacgcggcggacgccgccgncaaatcggcgctcccgccggagaagctcctctactctctcgagtacgccggccgcgacctcaagctcgtgcgcatggccgtgcctctcagagacaccgagaaggaggacctgctcgattacttggaagcctgcatcgatttcattgatcgcggtcggaaggaaggttccgttctcgttcactgttttgccggagtttccagaagtgcggcggttattacggcgtatttgatgagaaccgaacgtctatctgtagaagatgcccttgaatcgttgaggcagagctgtgaatntgattgtcccaatgatggttttttagagcagttgaaaatgttcgaggggatgggtattaaggttgatcactccagccctatatacaagcgctttcgtctaaaattactatatgagaatcat

SEQ ID NO: 11581 - DNA, 397 bp, Glycine max
  Clone ID: jC-gmle01810054g10d1
cacagcgaagaaaaaaatttgtatattgaaaataatagaaaaacgtacaatggagaacactcattttcttttgtagaaaaaagcattatccttgcttacggtaaaatcatcgagggaacaagccctaatattggaatcccaactcatgcctcaccatttactagaaaccagtaataatctccaatcatagctcgaaaaagtcattctggaagatgcacaaaaattgtaaaactataatagtcctcccttccatataactgcattagttcagcttggaaaagttgagcatgtccaaagagcaagactccaatccttccttacacaatttcattgttggcagcggaccagcttggagaattcgggcagaatacaagtcctagaacacatgacaaaatat

SEQ ID NO: 11582 - DNA, 507 bp, Glycine max
  unsure at all n locations
  Clone ID: jC-gmle01810054g11a1
ggaagacgaaaagagagttgagagagagtgagagggagtgagagggagcagagggagcgaagagaagaaacaaagatggagactcctcctccccaacaaggcgtcgtgaagaagaaggagacaaggggccgaaaaccccaaaccaaaggacgaacacgggaagggtttgaaggaaggtaggaaaacacaacaacaacaacaacatcatcatcagcagcagcaacagcaacaagatcaaccttcggtggacgagaaatacacgcagtggaagtcccttgttcctgtcctctacgactggctcgccaaccacaacctcgtctggccctctctctcttgcaggtggggcccccagcttgaacaagccacttacaagaatcgccagagactctacctttctgagcagactgatggtagtgtgccgaatactctggtgattgcgaattgcgaggttgtgaagcctanggttgctgctgctgaacacatttcgcaggttaatgaagaggcgcg

SEQ ID NO: 11583 - DNA, 479 bp, Glycine max
  Clone ID: jC-gmle01810054g11d1
gccaaccgtaaaaagcatgtctaaagtttcataaagatcataatgaattaacaatgtatgttccgctcagtgattggagaaatgagccacatgaaccacggatcatgatcttcaaacagaaaatagaattgtatcaattaagtaacactaaccacaaatcatcggcagatctacggtaatctagggtttccctactccagccccatacatgaatggttttaaaatgccctgaaacatccaccgcaaatgttaaattaaatgcaaccgcaatcataatataactcatttttgcctacgacgtatgtcatttttcagtctttgaagcacacgccacaacatgagatttgaatttctccagctcggccaaaaccttatcttctggtctggagatcaaatcactcatgcgccatatctgcaacgttccccctcctccagtactttcacaggcatgagacacactaacaatcgcccatggatca

SEQ ID NO: 11584 - DNA, 606 bp, Glycine max
  unsure at all n locations
  Clone ID: jC-gmle01810054g12a1
aaagctttacgtgatcgagcaccataccctgccaatcgtgttgtatgccatctcagtgggagctttgctttcatagtttttgacaagtccacttctaccctttttgtggcttctgatcaagctggtaaggttcctctttattggggaatcacagctgatggatatgtagcatttgctgatgatgcagatttgcttaaaggttcttgtggcaagtcacttgcttctttccctcaagggtgtttctactctacagcagttggaggattgagatgctatgagaatccaaagaataagattactgcaatacctgctgaggaagaggaaatctggggtgcattcttcaaggtggaagggtcagcagtccttgcaggcacagagtaaaagattcattttcaaataaagtaccgtgtgatgtattaatggagtaatgtgtttatgtgcttgtgacggtaaggcttgcatgcggngccatgtaaatacctttaatgataactatgagaagaatgtgactggtagtagagtttatcatggtgttcattagctaggattttctctgtttctcttgacagttgcgctttctatgtaataaagatatgctttgggttg

SEQ ID NO: 11585 - DNA, 349 bp, Glycine max
  Clone ID: jC-gmle01810054g12d1
ctaaaattattttttttgttatttttgttgttttttttttaatgtatattgagatgaccaaaacaatggtaatgaagttaaataaaacccccccacagggtccagaaaagacaatagatgaaccaataataggatgcagcaaaaacagtgaagcctcaacctcctctctagaaaaacaaaatatggggagcccaccgccaggctcatcaaacaaagaccatcttgaagcaccccaaggggcgagatccactctagaactcacatacagatggaccatgacacatggaaccctgggttgaaacctgagctcctaccggaagagagggagggccaagcaaagaccgtgacg

SEQ ID NO: 11586 - DNA, 550 bp, Glycine max
  Clone ID: jC-gmle01810054h01a1
caacaagttcatctgccatcagctcttccagagcatgatttcttgaatgatttggagcctttaggatggatgcatactcaaccaaatgaacttcctcagttgtcgcctcaggatctcacttcacatgccaagatcctagagaacaataagcaatgggatggggagaagtgtattatcttgacttgcagctttactcctggttcttgttctttaactgcatataagctcactccatctggttatgaatgggggcgtgttaataaggatacgggaagcaatccacatggttaccttcccacccattatgagaaggttcagatgctccttagtgatcgcttccttggtttctacatggttcctgataatggtccatggaattacaacttcatgggggtgagacacgcatcagggatgaaatatggagtgaagcttgggactcctagggaatattaccacgaggaccatagaccaacccatttcttagagttcagcaatatggaggaagtggagataactgctgagggagatcgagaggatacattctcttgag

SEQ ID NO: 11587 - DNA, 580 bp, Glycine max
  Clone ID: jC-gmle01810054h02a1
gcaatggccgtttctttggcagtgaaccgtcctctgcttggtcttcacgagaatgtaccattagctgttgctcatccccaattcctcccgttcaaatggccacccaagtccaaactcccctccgtcgacggaattcgatgctcctcctgccctttcaacgacaaaaccctcatttccatcacacctaacacttcccacctcaatcccaaccctctcgcttgtcgctttcacgcttcccagtttggagaacaggagagcaacaaatacgtggaagcctatgctgtaggacgaaatattcgtatgtctgctaataaagctcggagagtgatcgatcagattcgtggacgtaaatatgacgaaacacttatggtattagaactcatgccttatcgagcctgtgaagccattctcaaaatagtgttttcggctggagctaatgctagcaataatctgggtttaagcaaaggaagtttagttatcagtaaagcagaggttaatgaagggaaaacaatgaacagggtaaaacctgtagctcgagggcgtgcccatccaattaaaagcgcactagcatataccatca

SEQ ID NO: 11588 - DNA, 506 bp, Glycine max
  Clone ID: jC-gmle01810054h03a1
atttagttggaggggatcatagatttagggaatcgattactatactagtaataaattgtacaaaaaataaaaatataaataatataaatataaaaagaacaaacacaaattttatgtgaatagtcgcggtatttaaaatacagaatgaaaggagacaaataacaaaggaaaggagatgtttgaataaaaataattccccttcaagttcttattctttgagaggacaggacaatatgagatgatgattatgctctatcaacacattaaaaagattatatgatatatctgctgcggaagcatgtcaacatttctattggcaaatagggagtttccaagtacatgcccaagtacttattacttcttgggttgagattgctctcttattggttacagacattctaattattcgaaatctgcaaaccatttccgctatcggtcagaatgtctttgaatatgatcttgaattcattcgagacgtgagcaaaactcataatggagaagaatat

SEQ ID NO: 11589 - DNA, 532 bp, Glycine max
  unsure at all n locations
  Clone ID: jC-gmle01810054h04a1
ctgtttctcaatcgttagatctcatcttatactcaccggcgagtccatctcgcgccagcgtcgacgccgctccggcaaccgctccggccaccgcctttggttccctcactttctcgtccttcttcttctcagaaatatgccttctcagaaagttgaaacgggtcatcaagacacggtccatgatgttgcaatggattactatggtaagaggctggccacggcttcatcagatcacacaattaagataattggggtgagtaatacggcctctcagcatctcgcaacattgactggtcaccaaggacctgtttggcaagtggcgtgggctcaccctaagtttggttctctacttgcatcgtgttcctatgatggtcgtgtcattgtttggaaggagggcaaccaaaatgaatggactcaagctcatgtgtttgatgaccacaagtcatctgtgaattcggttgcttgggcgcctcacgagttgggtctntgcttggcttgtggctcgtctgatgggaatatatctgttctgact

SEQ ID NO: 11590 - DNA, 505 bp, Glycine max
  Clone ID: jC-gmle01810054h05a1
tttggaggtatatatgatacgtgggctccggggggcggagatgtaagaaaaataaccaatttgacccttagtccaagtattatatttggatatttattaaaatcaccttttgggggagaagggtggattgttagtgtggacgatttggaagatataattggggggcatgtatggttgggttccatttgtatactgggaggaatctggcatatcttaaccaaaccttttgcatgggctcggcgtgcacttgtatggtctggagaagcttacttatcttatagtttaggtgctatatctgattttggttctattgcttgttgctttgtctggtttaataataccgcttatcctagtgagttttacgggcccactgggccagaagcttttcaagctcaagcatttacttttctagttagagaccaacgtcttggggctaatgtaggatctgctcaaggacctacaggtttaagtaaatatctaatgcgttccccgacaggagaagtta

SEQ ID NO: 11591 - DNA, 547 bp, Glycine max
  Clone ID: jC-gmle01810054h06a1
ggtttcaataactccaaaccatgctagttccatcaaactgaaccaactcaccccatcacagatgtttcaaattcaagcccgaatccaggttccacgaggccagtttctgagcccaaagcccattcccatgaagcacgtgcgggcttctccttcttcaaagcccacgaagctgtaccgtggggtgaggcagagacactggggcaagtgggtcgctgagatcagactccccaagaaccgaacacgtctctggctaggtacatttgacaccgcagaggaagcagcgttggcttacgacaacgcagcgtttaagctaagaggagaaaacgcgaggctcaacttgcctcacctgcgtcaccatggagcacgcgcgtacggtgagtgtgggaactacaagcctctcccctctgcggacgatgcgaagcttcaagccattagtcaaagcttggggaccaattcgcagaaacttaaaactcataaccctattggtctagatgcacacaacgcatagactgatacatcggagtttcatgatattagataggttgag

SEQ ID NO: 11592 - DNA, 588 bp, Glycine max
  unsure at all n locations
  Clone ID: jC-gmle01810054h07a1
agccgaacaagatactccagtggtcaatgactctgatctcgtcgccatttctgacaaactacgactagtctcggtcaacgactccgaaccggaaccaagcgctgccgatttgttgaaatccgatgaggaattggccagactcttgcanggtttcagtgtttcacctaagaatttgcgttcggtataatcgattttggaaatggagtgaatttctgtatttatttctagtttcaactttatttgtattttcactttgtgtgtgtgtgcatgcattattatatctgtacaggcagaggaggaagcgctaatgttgcagtagtatgtggcaagccaaaatcctcgagaatttgatagtggagtacggccctactagtcaagtcctcatgttgcagcagtatgggctatatttttttgcggaatatgatattaaatgcataattgactttcatgctgttcttggttcccagaatgggatggagcatagtgcaagcagagatggatttacaggtgagcacaacatagaaagcagtgcaacctgaaaaaggcttaaacaatgctagtctaaatgggatgcacaaggaattaatg

SEQ ID NO: 11593 - DNA, 315 bp, Glycine max
  unsure at all n locations
  Clone ID: jC-gmle01810054h07d1
gggtccaaatcacacggggcagtaaccattattagtaaataattgggaaacacatgaaggaccaaagtctacttcataaccaaacttgacccccaagatgcctttcttttggcccacactatgttgagctatcctccaatttatctcatccnnnnnccccagcaacccttttccttcacctctttaattacactcaatatatcaacaaagattcaaaatcttgtctttcacacacaacaagatcccacctttagatcaatgactacttggagggggtatgaaatattaggtaaagaatctgccactactgcactt

SEQ ID NO: 11594 - DNA, 633 bp, Glycine max
  unsure at all n locations
  Clone ID: jC-gmle01810054h08a1
tggcaatggagaagctcgcttcttcttctactgcaactgttgttcccactcaacacttcctttttcaatttcaccaacattctcttttcttcttccccaaaactgcgttttccaccttccaccggaaccgcacccgaccgctctcactgccatgttgcaaaagcagacaccgtcgcctagaagcattatccagcaaacaggatcaactctgggtcagcgaagaagaattggagctagaattggaagaaggagaagattcgtatttggacggtgatgatgacgacgacgactcgtcgtttttgtcgctcagcgacaagcccgacaggaacatggccatgctcgacgattacgagggcgaggagctcgactttgattacggtcccgaccaccgaagcgggtatgtggcgttacttgggaagccaaatgttgggaagagtacactggcgaaccaaatgctagggcaaaagttgtcaatagttacagataaacctcaaacgacgaggcatcggattctgtgtatatgttctggcacggattatcagatgatactttatgacacacctggtgttctacagaaggaaatgcactngttagactcantgatgatgaanaacgttcgcagtgctgcagtta

SEQ ID NO: 11595 - DNA, 387 bp, Glycine max
  Clone ID: jC-gmle01810054h08d1
ttgttttttttttttccatcttcacattatataacacgtatttggcccccataaccatagggattaagaagcccttcatcttgtcgccaatttgctctaaccttcacttcaatctcaagataaactttcttctgtaaaaaatcttcaacatcaaggcgggcagctgttgcaagcagtttcaaagcctttccttctcttccaataaggataatcttctgagggtttttctcaaccaaaatctctacttgtatgtattcttttgcatttggccgagctttatagtttacaacatttacctgacatgcatatggaatttcatttcgatactggataaaaatcttttctctaacaatttcagctacaaaaaatctctctggatgctcactt

SEQ ID NO: 11596 - DNA, 619 bp, Glycine max
  unsure at all n locations
  Clone ID: jC-gmle01810054h09a1
ttttaaccttaaataatttaccatatatactcaattgtttttttatcttttacttacctttaatcattttcatatagtatatttcttagaaaaaaaatccaaaagtactgtcaaaaacaaaaaaaacattcaattttaattgtaaaaaaaaaatattccttattttaattaacttcagtatgccatgataaaagttattaagttgataaaatagagggaataaggcacttgtacagtattagatattcttgtgggagggaatgccagatgtctagtcagaaggattaagtaacttctccaaattaacttttatttatacatacaaaattttcatttgtatttagaaaatttctctttctctaacccattacatatatggacatgggccactttgtctccagagttttcacgatcaacggtttcacccacagctgctgttttcacttcttcaaccctcatttctggttaaatcagtgcactctacccgtttcctgatacaaccctaatttgatccaaatgacccacttgtaaattctttntttttaaataaataaattcaattctaatcacttcactcaatctcaatatcttgaacgagaatgacagacatggatcattc

SEQ ID NO: 11597 - DNA, 564 bp, Glycine max
  Clone ID: jC-gmle01810054h09d1
aacaaacaactggcacattcttccactacttgggaattacaacatattatgttagcacattacagcatattgtgttatagcatattacaatttcatagttgctaatcagcagcttcactagaaaaatatcctaacaacatcagtttaatatgggtatatataagcctggcttatttttcttccaatacaataccgatgaacttagtaggataattttatgtttcactcagttaaaattacaaactattaggccactttgaattgattagacagccaatactattgtacctgttaattgtaggtctatttggaggttttaatccaaagatagaaaaatctacagacattggagctgattcattcttgccagtattatcatcagttgtctgtctgaaatcaccaaaactggcatcaaccttatctgcttgcagagaatttccttcaaacccatcacgtcctggcatcactctcctagacttcctaggaggtgataatatagtaggaccctcctgtgaattgaaatcagaaaccctagattccctcttgggagcaggtctagggagc

SEQ ID NO: 11598 - DNA, 549 bp, Glycine max
  Clone ID: jC-gmle01810054h10a1
tgtaattgaagagggaactagattaggtggcgagtgaagagaagatcggtgaaggagtgaggtagcaacagcactgccactgccactaccaatagcagaatgggaaccttgggcagagctttctacgccgtcggattttgggatccgcgagaccggccaagccatcgatcgcctcggctctcgtctccaaggcaactacctctttcaagaacagctatctaggcatcgacctctgatgaatctgttcgacaaagctccctcggttcacagggatgcatttgtggcccccagtgcctccctcctcggcgatgtccacgttggcccagcttcctccatttggtatggatgcgttctcagaggtgatgttaacagcattactattggatctggaactaatatacaagacaattctcttgttcatgttgccaagtctaatttaagtggaaaagtcttgccaactatcattggagataatgtcactgtaggtcatagtgctgtgttacaaggatgtactgttgatgatgaggcatttattggcatgggtgcaac

SEQ ID NO: 11599 - DNA, 500 bp, Glycine max
  Clone ID: jC-gmle01810054h10d1
actatattgagattgaagtttcaattcaaaaataacataaccactcttctctcctttgaaccaatagaaggggaaaacagtggtgattaacatcctagacagcagaggtatagctggcatggggcgaagaaaagaaatatcataatccatgaaaatacaggttcaaccggcacatctgaattgacattctttattttaaaatacatgcccaactacagtgctgtaaaactgtagatgtgtgtccctggatgactgaactataccaaactgttccattgtagtcattatcaagaaacaaaaagtaaggcttcttattgggcacagtgagcaaagccacatgccaactcgtgcagcatgtgttgatattagagataacagtgtgagctctccaaacttacaggaaacaaaagcagccattctctggaaaatcgcacataaagacactataaaagaagggataaaaactaagccttgggaactttgtctagcaaaacattatc

SEQ ID NO: 11600 - DNA, 432 bp, Glycine max
  unsure at all n locations
  Clone ID: jC-gmle01810054h11a1
gtgtaatgctgactcacttccaaatcttaatcaattgtcgagagagactgtgcaatgatatatccagaatctgcttcatatagtcaaggtagcataagtaggacaacaactagactaactggtgcaattaagacaactatcagtttattacattcacatgagtatcagttatgccttgaaaacctcataagaatgcggataataccttgatgaagctactgcagcagaccactcacactacatcacattgaggtatagtcatgaagtttaacacattttgtctgatattactaaaagngtctgcctgacagatacgttggtcccctcaagacagtatgagtatattgagtggactacctgatctggcatcatggatcatgaagaagctcggataaagaatgttggtgggaaagtgcagggtttgtattacta

SEQ ID NO: 11601 - DNA, 530 bp, Glycine max
  Clone ID: jC-gmle01810054h11d1
cactaaatatttccttcccttctttttaataatagattctaagaggtaaaatccaaacttcaaatcaatccaactaaatacttacaatcctacattctaagagacaaccaatataacaagccagaagaaaatactaacaacgctaagaggagaacataatttcaccagacaaactagaccctacagttaatccttgtcgagagaagcaaatcagttttggaagtcagattgtaatttaatgatgaaggtaacttgaaactaaacaatttcaagaaccaccacccacatctgctactggatgatcatcttgtacttggcgaacaaactgccctttcacccgaaggcactgatctgccaatctcttccggctttgatatcgcaccagattcaagatggtgagattataaaaatatgccacaggactttccaaattgactaaaaccactgattgcattaatcataaatcaatgaacttcggcaacctatgcttctgtatacaccactctgacaagcatcaggagagtcatgct

SEQ ID NO: 11602 - DNA, 547 bp, Glycine max
  unsure at all n locations
  Clone ID: jC-gmle01810054h12a1
cttaattgccttaaggaacgttcgagaccacagaggtttctctagtcttcttctgtggagagcttgttttctcttgttcattcatctcacttccaattaaggaacaagctttccaccaatttgaatcaccaatggctcgctctttctccaacctcaaggttctctctgctcttgtcgccgacggattctccaacactctcaccaggcgtgggtacgcagtagcgacacaaagcgcaacaagaggaggagcagcctccatcagcggcaagtcaggggaagacaaggtactaggaggaggtgctgaaaaggtttcgtgggtcccagaccctgtcactggttactacaaaccggagaacatcaaagagattgatgttgctgagctgagagccacggttttgggcaaaaaattcaaccactaggctctacttaatttcaataattaacctttttggtttcacgtgaatatgttatatgatatatgaagttcacagaacccttcgngattattcagcatggggtttttttcttggatttctctcttgagaat

SEQ ID NO: 11603 - DNA, 474 bp, Glycine max
  Clone ID: jC-gmle01810054h12d1
caacgggagatccaatcacactagtaaacattaatttggtcatatgctagtccaaattctcaagagagaaatacaagaaaaaaaccccatgctgaataatccccgaaggttctgtgaacttcatatatcatataacatattcacgtgagaccaaaaaggttaattattgaaattaagtagagcctaggggttgaattttttgcccaaaaccgtggctctcagctcagcaacatcaatctttttgatgttctccggtttgtagtaaccagtgacagggtctgggacccacgaaaccttttcagcacctcctcctagtaccttgtcttcccctgacttgccgctgatggaggctgctcctcctcttggtgcgcctttgtgtcgctactgcgtacccacgcctggtgagagtgttggagaatccgtcggcgacaagagcagagagaacctttgggttggagaaagagcgagccattg

SEQ ID NO: 11604 - DNA, 533 bp, Glycine max
  unsure at all n locations
  Clone ID: jC-gmle01810055a01a1
ctcggactataccttcttcaaagacatgccgcggtggcaagctggaaccacacaactcacctacgctttctccccggagccaagacttgatgacactttcaaaagcgcgattgcaagggccttcagcaagtggaccccagtggtgaacatcgcgttccaggagacgacgtcgtatgaaacagccaacattaagattcttttcgcgagtaagaaccacggtgatccgtatccttttgatggtccaggtgggatattgggccatgcattcgctcccactgatgggaggtgccactttgacgccgacgaatattgggtggcgtctggcgatgtcaccaaatcgccggtgacaagtgcgtttgaccttgaatctgtggcagtgcacgagatcgggcacttgctcggattaggccactcgtcggacctaagagccatcatgtatccttctataccacctcgaactaggaaggtgaatctagcgcangatgatatagacgggattcgaaagctctatggtatcaaccccctaattatat

SEQ ID NO: 11605 - DNA, 505 bp, Glycine max
  Clone ID: jC-gmle01810055a01d1
gttcttgaattagaataatttcacctcgataactttcaaaatcctttaatgcaaattaccgaaataaaactctagttctagtacaaacaacacctagctataataattaggggttgataccatagagctttcgaatcccgtctatatcatcttgcgctagattcaccttcctagttcgaggtggtatagaaggatacatgatggctcttaggtccgacgagtggcctaatccgagcaagtgcccgatctcgtgcactgccacagattcaaggtcaaacgcacttgtcaccggcgatttggtgacatcgccagacgccacccaatattcgtcggcgtcaaagtggcacctcccatcagtgggagcgaatgcatggcccaatatcccacctggaccatcaaaaggatacggatcaccgtggttcttactcgcgaaaagaatcttaatgttggctgtttcatacgacgtcgtctcctggaacgcgatgttcaccactggggtccactt

SEQ ID NO: 11606 - DNA, 555 bp, Glycine max
  unsure at all n locations
  Clone ID: jC-gmle01810055a02a1
agcaggaggagttttgcgtttaagggaattgtggcctctggcgtttcggtcgcggcttctactctcacagccgaagcagaaccatcttccaaaggttttgaaagattgccgtacaagccggaagggtacaattattggacatggaggggtcataaaatacattatgtagtgcaaggagaaggctctcccattgttcttattcatggttttggggcctctgcattccactggaggtacaacattccagaattggctaagaaacacaaggtatatgccttagacttgctcggttttgggtggagtgacaaagcacttatagattatgatgctatggtgtggagagatcaagttgttgactttgtgaaggaaatagtaaaagaaccaaccgttttagttggaaacagccttggaggatttactgctttggttgcagcaactgggttgcctgatcttgtcaatggtgttgctcttctaaattctgccggacaatttggcgatgggaaaagggaaagtgaaacttctgaagaaacagctttacaaaagtntctcctaaag

SEQ ID NO: 11607 - DNA, 500 bp, Glycine max
  Clone ID: jC-gmle01810055a02d1
gatcaatgaaaaggatttttatgtaagaaatgaatgcatacattaggtcgaaaaaaatgtacaggtgtgcagaagaagtagaacaatgatcataaagtattcttgctgtgatttttctctattctgagtatcctttacccaattctttgtacacaacgtatactgataactactattaactatttgaaactcaaaacttaatcaagaacttgttttcaattggctttacaaaatcatacgcgttcaaactgtttggagagtcacttcaggagtgagggtggtcaaccaatccaataaagccttgttcacaagctctggtgtctcatcatgtggacaatgcccagcctgcaagttacaagagtagtttttggatagaactctttgattcgattcgctttggctggaccaacccatgggtcaaggtcaccccaaagcagcaacaacgggcatgagagttcacttaagacagcatctagagtgtacttgctctgattcatcat

SEQ ID NO: 11608 - DNA, 556 bp, Glycine max
  Clone ID: jC-gmle01810055a03a1
gttcatcgtgatatttcaagcaagaacgttcttttggattccgatgatgtagctcatgtcgcagacttcggaacagctaagtttcttaatccagattcatccaattggacctcatttgcaggaacctatggatatgctgcttctgaacttgcatacacaatggatgcagatgagaaatgcgatgtgtatagtcttggggtctctgcgttggaaatattgtttggagagcaccctggtgatgttacatctactctattgctagtatctacggacactatgacctcaacacttgatcatatgtcaattatggttgaaattgaacgaacgtcttccagacccaacaagccctatcgataaggatgtgatatcaattgtgatgatagcaattgcttgcttgactgaatgcccacgatctcgccctaccatggaacaggttgccaaggagcttgcgatgacatcgaggtcatcttcaatgtcaccacagacacgcacagagatgaaagactgaacatactaaagcataaacatgctccagttctacttagttcttgtttat

SEQ ID NO: 11609 - DNA, 510 bp, Glycine max
  unsure at all n locations
  Clone ID: jC-gmle01810055a03d1
gcaaacgctaaccctgtttccttccttttaatagcagaggatagaaagtaaagcttacaggtttttatttttgaaatacatgaaaaacattagtataagaaaagtgtgtgacaatacaagaaaacataaaaaagaactaagtagaactggagcatgtttatggtttagtatgttcagtctttcatctctgtgtgtgtctgtggtgacattgaagatgacctcgatgacattgcaagctccttggcaacctgttccatggtagggcgagatcgtgggctttcagtcaagcaagcaattgctatcttcacaattgatatcacctccttatcaatagggcttggtgggtgtggaagacgttcgtccaatttaaccatcaatgacatatgatcaagtgttgaggtcatagtggacgaagatgatagcaatagagaagatgtaacatcaccagggtgctctccaaacaatatttccaacgcanagaccccaaaactatacacatcacatttctca

SEQ ID NO: 11610 - DNA, 558 bp, Glycine max
  Clone ID: jC-gmle01810055a05a1
ctttggacgaaaatgatgtgtgttacaagaccattgaaaaagttgatagggccattgatgggcttaacgtgtacaacatactagagccatgctaccatttccccgatgctgccacagccaaagaaaatggaaccttaccaaggagtttcaagcaattaggagttactgagaggcctctcccagtgagaaagagaatgtttggtagagcttggccttttagagcaccagtcaaacctggtcttgttccattatggccccaattggctcaaactaggcacgtcgcatgtgttagtgatgaagtagcaagttcatggctaaacaacgttgcagtcaggaaagccatccatgctgaatcggaaaaagtggcgggtccgtgggaattatgttcgagtaggatagagtaccatcacaatgctggaagcatgattccttaccacatgaacctaaccaggcttggctatagggcacttattttcagtggcgaccatgatatgtgtgtaccgattactggaagtgaggcttggacacgatctttgggttacaagattgtggatgaat

SEQ ID NO: 11611 - DNA, 549 bp, Glycine max
  Clone ID: jC-gmle01810055a06a1
ctcgagccgaatcggctcgagagattgttgacgtgctgcttgagcaaaacattgttcctggtattaaagtcgacaagggtttggtgccccttgcaggttccaacgacgagtcatggtgccaaggtttggatggtctagcctctcgctcagctgcatactacgagcaaggtgcccgtttcgccaaatggcgtactgttgtgagcatccccaacggtccctctgctctggcagttaaggaagcagcctggggtctggctcgctatgctgcaattgctcaggacaatgggttggtcccaattgtggagccagagatcttgcttgatggggagcatggtattgatagaacttttgaagtagcccaaaaggtctgggcagaggttttcttctaccttgctgagaacaatgtcctttttgagggtattcttcttaagcctagcatggttacacctggagccgagtccaaggacatagccagtcctcagacagttgctgattacaccctcaagctcctttacaggagaattcccctgctgtccctggaatatgttt

SEQ ID NO: 11612 - DNA, 589 bp, Glycine max
  Clone ID: jC-gmle01810055a07a1
gaattggactctgaaaatgaccatgtagatactaataaaattgagtctacaagggctgaggaagaagcatttgctaatggattgcagactattaacaatgatgatttggaggagatccgtgagcttggttctggaacctatggagctgtttatcatgggaaatggaaaggttctgacgttgccattaagagaataaaagccagttgttttgctggaaggccatctgaaagagcaagattgatcacagatttctggaaggaggcgttgatgttgagttcattgcatcatccaaatgttgtctccttttatggcattgttcgtgatggccccgatggttctttagcaacagtcacagagttcatgattaatggatctttgaaacagttcttgcataagaaagatagaacaatagatcgtcgtaagaggctcattatagccatggatgctgcatttgggatggagtatttgcatggaaaaaacattgttcattttgatttgaaatgtgagaatctattggtcaatatgagagatcctcaacgggctatctgcaagattggtgatttgtgtttatcaaaggtaaacagcacac

SEQ ID NO: 11613 - DNA, 561 bp, Glycine max
  Clone ID: jC-gmle01810055a08a1
ctgactcctatagtttcctctgctaattccatatccccgttttccttcactcttgaaccccgattcatttccaccagcacaagaagcatggctgcaatatcaataccttctcacatgaaagcttggacatactctgagtatggaaaatccaaggaagttctcaagtttaatcagagtgtggctttgcctgaggtgaaggaagaccaggtcctcatcaaggtcgctgctgcttcccttaaccccattgatcataagagaatggaaggctatttcaagaacagcgactcccctttacctactgctccgggttatgatgttgctggagtggtggttaaagtgggaagtgaagtgaagaaatttaaggttggggatgaagtttatggtgatatcaatgtgaaagctctggaatatccaaaggtgattggttctttggctgagtacactgctgcagaagagaggctattggctcacaagccacagaatctgagctttgctgaagctgctagccttactttaacacttgagactgcttatgaaggccttgtacgaaccgggttttct

SEQ ID NO: 11614 - DNA, 429 bp, Glycine max
  Clone ID: jC-gmle01810055a09a1
gaaatggccaccacttctgcttcattcgcgagcttctacggcatcttgcgaccttgttcgtccaatccccaattcttcctcttcaacgtcgctccccgaaccggaacctctcattcccgaacccgttcgactcggatcaagtgctcggacggtcagaccgggttcttcacgaaactagggcggttgataaaggagaaggcgaagagcgacgtggagaagcttatgtcgggattgtccaagacccgcagcatcctagccgtcatcgactagctgatcctatattggaacctagccgacaccgatcgggtcctcgacgaactcgaagaggctgttctagcgcacgatggtggagctagactcactattcaaatagtggagaatttgcgcgaggatatattatcagggaagcctacttgacggaatgagatc

SEQ ID NO: 11615 - DNA, 491 bp, Glycine max
  Clone ID: jC-gmle01810055a10a1
ggatgtttggtcatggatatgtgagctccccaactcggtggaggggaccgagtcccactcgccacccatgaagttcgaaatcgcgagtgagaagaacgacgacaagctggacaactcaactcgttccattcacctgatagctgagcgaacctccggctcagactcggaagctgcggtgatcttcaccgtatgcttgcaaggctttcacccacacaacgctcacaagcctctatgggtctccgaaaagtgccacctctcatcagaaaagccgttccttcctctcctcctccaactcctccaggaaatcatatcccactcccccacggcgcacgatagcacctgcccccgttgacagctacagaaactaaaacccgaccccatcgcatggatcatggactagcacacacccgagtccctctacaccttcttcaacctcgtcttcaccatgcgcctcttctggatctgcgccttcgacgctacccccgaaagcc

SEQ ID NO: 11616 - DNA, 537 bp, Glycine max
  Clone ID: jC-gmle01810055a11a1
cctgaacaggacattgtcaagcttgttgacaccttccctggccaatccattgatttctttggtgcactgagggccagagtatatgatgatgaagtgaggaagtggatttctggtgttggtgttgacagtgttgggaagaagcttgtgaactcaaaagatggacctccaacctttgagcagcccaagatgactctggagaagctcttgctgtatggtaacatgcttgtccaagaacaagagaatgtcaagagagtccaattggctgacaagtacttgaacgaggctgctcttggaaatgctaacgaggatgctattcagaggggaactttcttccagtcttgaattggaggcaaagcaaacttggcaagtaaatatttctgttcgtgaaggttgttgtactaatccaagtgctagaagttgtgatggaacttgcgtgtaacattcttagcattctcaatgtcttatgtgcaaagagaagatgctaagtttgagatgatcttactatatttttcatattggaccgtcttcctctataat

SEQ ID NO: 11617 - DNA, 614 bp, Glycine max
  unsure at all n locations
  Clone ID: jC-gmle01810055a12a1
ctctctcaaaaccaaataaaatctttcacaactcaaaactcaagctccaaattttcactttacacctttgaattcattttttcacacatggacgagatcgacgtgcctccgttcttcgtgtgccctatttcattagagctcatgaaggaccccgtgacggtctccaccggcatcacctacgaccgcgacagcatcgagaagtggctcttcgccgaggtgaagaacgacacgtgtcccgtcacgaagcagcccctcctcccggacctcactccgaaccacacgctccgcagactcatccaagcctggtgcaccgtcaacgccttccacggcgtccagagaatccccacaccaaaaccaccggtcgacaaaaccctcatcgagaaactccttcgcaacacctcggcttcggactccccgagccttcagctccggtccctccgaaccctcaagtccattgcctcggaatcccaatcaaacaaacgctgcatcgaatctgcagaagggcgcagttaattcctagcaacaattataaccaccaccaccaccaccaccaccaacctactcgatgatgacatcgagttggaaaatanaacaagttcagnccacgaagcatt

SEQ ID NO: 11618 - DNA, 497 bp, Glycine max
  Clone ID: jC-gmle01810055b01a1
cgtggcaggcggaggagaagcgcctcctgcagcagatcgacgccgcggcggaggagatcgcgtgcctgcgggggcgcgtggcggagctcgaggacgccgccgcgcacggggagagggacgtcgccgagagggacgagatgatcgggttcatgtcgcggaggatcgaggaggagggattgggtgggagggagagggagcgctacggtaagaagagtgaagagtggttccaaaaagtagaagatatggtggggtccaccgctacgagtttggaagaagaagaagaggctgatgttatctatgaagaacagcatagtcagcatttcgggaacaataatggctttgattctaagtttatggcatctgcttctaagttctgggctgagaaagcctcactttgtcagcgcatgcataagacaaattggaagtttagtttacaaactggaaagtccgaactggaaacaggatgtacagtatgaatccctgaatcaatgtataat

SEQ ID NO: 11619 - DNA, 348 bp, Glycine max
  Clone ID: jC-gmle01810055b01d1
tttttttttttttttttttttttttttttttttttttttttttttttttttttttttttttttttttttttttttttttttttttttttttaaaatcgaggggggaaccccaccccccctttttaggggggaaaaaaaaaacaccccccaaaaaaaaaactttttaatgggaaaggggggggttttcctaaaggtggtcccccccagtctttttttttttattgaaaaaaggggatgttaaaaagggaaaattttctaaccaaaaaggcccctccccccagaaaaaacccccaaaaaacgcgaaaatgttgggccaaacaaaatcccaaagttcggaggattatttgg

SEQ ID NO: 11620 - DNA, 539 bp, Glycine max
  unsure at all n locations
  Clone ID: jC-gmle01810055b02a1
cctcagcaaaacattccaagttccatagttggaaccctgaaagcaaaacattaggtcattttgatcgagttgcaaacatgagaaagttgtgttttaacccccaaacagagtcgtttgcgttggcccgcagttctccttcttcaccactatccttaacctcaagcccaactcctccgaggctgagcttttccgaagctgaggcactgatactgaaatggaaccctgacacttccgcttacgccaaagtcacttccctcttctacgaggacaaaaccgaagccaaacactacattgactccgttaaccagcttcagaaatccatgcattccttgctctctcagaacccttcctctgagaaactcattctcgctcataacctaatgcagatggctatgaagaggctcaagaaagagttctaccagatcttatccatgaaccgcgcacaccttgatccagaatccgtctccgncagatcctctcgcaccttcgncaactccagcgccttcgattacgacgacgacttcgctgctgaggacgac

SEQ ID NO: 11621 - DNA, 563 bp, Glycine max
  Clone ID: jC-gmle01810055b02d1
gaaaaagacgttatcgcttttgttggctatgtcaaaactattactacaaccaagaaaaataacggcgtagaaaactcgccgttcaaactgtgcacttagctccaacgccggagaggcgaggacgatacagcactggatgaggttccaaaaaagaagaggttaaccaggtaattttcaatatcctcaggggtaaaggtcacgtactccgtcgccgtcaaatccctcactgttcccaccgtagcaagaacaacattataccactcgcgatatcttggcactatgcttctcgcgatcgaaccttttatttcgtctcgtaattcgcggtcagctacgacgaatgagttctgtttccgatacccttcctcgaatttgcggttgaagctctcgaacacctccctcgcctccgccgcggctggattttccggcaatgacgaaaccacttctccccacgccaccttctcgtagttcgcgacgaacctcttcgctttagcttcgtgcttaaggatccaatcgtcgacaagcacgtactgcaggttcgagcttcgcactctgtcgacaacgta

SEQ ID NO: 11622 - DNA, 558 bp, Glycine max
  unsure at all n locations
  Clone ID: jC-gmle01810055b03a1
tttaagttcatttcctcctctcctctctcttcattttatttttcttccatctgctaggaaaatgtctgtcagcgttgagggctctgcctttggggcactatttgaagaaaaaaatgtccattctgaagacagcaaccaacttgtgttgcatggtgcatttccattggctaaacatgagagacagaatggatttaatgccacagacatgaatgcatttggaaactccttcaggaactatgatgcagaaagtgaaaggcaaagaatggtggaggaattatataggatgcaacacatcaaccagacatatgactatgggaagagaatgagggaggagtatgggaaattggacaaattagaaatgggtatatgggagntgttgtgagctgctcaatgaagtgacggatgatagcgatcctgatttggatgaaccacaaatacaacatttgttgcagtccgctgaagccattagagaagactatcctaatgaagattgggtacatttaactgctcttattcatgatcttggaaagatccttatgcttccagctttggtggcct

SEQ ID NO: 11623 - DNA, 299 bp, Glycine max
  Clone ID: jC-gmle01810055b03d1
aaaaggggccccaaccatttatttaggaagggcccaaccaggaaaaagccaaaatacctggccctaccaaagtacaaacaccgctctgaagataccattaattgggaaaacaccctacccccaaaacataatcctttaagacggaaaccggtcggtcccggttaataaaaaaaatttaaaggggggccgccccttgaatctgataaaaaaaaaaaaccatcccttaaacgtgcggctgaacgatcataatgtactaggataaccaacagccctttccccccccggcactgttgtgccaa

SEQ ID NO: 11624 - DNA, 382 bp, Glycine max
  Clone ID: jC-gmle01810055b04a1
ctcgagccgcttccttttcttcaccccgtacattcacaaccctgactctcttcaaatctaagacaaaagccgatcctgctaagactaaggttacaaagccaaagcaaaaggttgaagatggtatctttggcacttatggacgaatttgatttactaagcacaacgagctctttgtggctcgcgtcgctatgcttggtttacgtatcatcattgctgcgtgaaggaactactgctaaaggaatgctagcacacttaaacctggacactggagttgacattgtatgaagccgagcctgttcttatggatttcattctctgcaccctgctaggaggcatcggaggtgtacgctaccgtggcaaatttgtcgatgacgaacctact

SEQ ID NO: 11625 - DNA, 376 bp, Glycine max
  Clone ID: jC-gmle01810055b04d1
acgacgaactcaatgcattttatgatagatgaggaaacgagttttttaaacacaagcaaacaaaagggttaggggctaatcatcctccccggcatctgtaacgaatttgccagttccaggattcaaagcagcaatgaagaaaaaaagaacgttgaacaacactaggggctcgatttcgttgattggtacccccgtctcaatgttgagttgggctagagctccctttccaggaataatttctccaatcaatgagaaaacgaaacccaattgagccaatcttcccacaaatagctcgttcgctttcgtgaatccgaataaaggacctgaaccgagcccaagggcttccctgaagcctttgcctgaaggaataacacct

SEQ ID NO: 11626 - DNA, 559 bp, Glycine max
  Clone ID: jC-gmle01810055b05a1
ccctgccaaaccttactggaatgaatgccctcagctatctggacatgagcaacaatagttttaagccattggattttccaggatggttttcaactcttaagtccttaacaacattaaagatggagagaacacaactttcaggacaggttcctacttctttgtttacacttatcaatttacagattgtggttctaaaagacaacaaaataaatggtaccttggatatcggctcctcctacagcaatcagctgcgacttgttgattttgagactaattcaattgacagctttgagcaaaaagacgaagttccaaatgtgaaaatcaagataatacttaaagataacccaatttgtcaagaaaatggagaactagaaagctactgctcctcttctcaacccaatgtctcatattcaacaccactaaataactgtcaacctggtacctgcagttcagaacagattcttagtcccaactgtatatgcgcatattcatattcaggaaccttaactttcaggtcaccctcctttttggactttgataacaaaacttactactcaat

SEQ ID NO: 11627 - DNA, 547 bp, Glycine max
  Clone ID: jC-gmle01810055b06a1
cagagcagagagtagccatccgtgccgttatgcgaaaaccccaaaccttcctttaatcagacctcagattaaaatcacactttcatcttcttcactaacgataatggtaaccaagattgggtgagtagtagtgaactgaagaaaaattggaaaaattctttaggggtcaaagtcttgagattttagaagacacgcacgcttcattgtgttggctcacttgaaattagtccaagatttgaggctcaaaaagagtggaggaggcgttggaaggaagctgatattgtgaattttgtcttgacattgaccagagcaattcagagctggagtcaaaaaaggccatcagtatatcacggtcaaagtgaacaatatgggttcgcacaaagagttgcctagaactgcccaaattctccttgtgagttcgcaccaagaggtttatgaaccatgtgatgattcttttgcactggttgatgctcttctagctgaccgcaataacctgttggaacatcgtgcaacattgtgcatggagataggctgtggtagcggatat

SEQ ID NO: 11628 - DNA, 484 bp, Glycine max
  Clone ID: jC-gmle01810055b08a1
ttgaaggatttgaagctcaaggaagtgaagaatggaaggttggctatgttggcaatcttgggttactttgttcaagctcttgtcacaggtgttggcccataccaaaaccttctagatcatttggctgaccccgtgcacaacaacatcttgaccagtctcaagttccactaaatgtattatatcatattctttaccctcttggtcttggttcttgttcgcttcgcagttaccaaagctcaaccacctttctatatcctctctttgctctttgggactctaccatcatctggacattttgttccttggtgtgccgctgtaagaattgacatgtaaaacaactagaaacattcgacatctttatctttttgctcgttagattaaccgtacccaagtttttatttatttgaattgcacaagtctgaataatgttacaattttataaactgtatatgttgtgagagaattttaaaaaataaaataataa

SEQ ID NO: 11629 - DNA, 450 bp, Glycine max
  Clone ID: jC-gmle01810055b09a1
taagatcttcgttgggaacttgcctttcgacatcgacagcgagaatttggcgtcactcttcgggcaggctggcaccgttgaggttgctgaggttatttataatagggccactgaccggagtcgtgggtttggatttgttaccatgagtacacttggagagcttaagaaagctgtcgatatgatcagtggttacgaactatatggaagagtgttgactgctaataaggctgctccaaaaggagcacagactgaacgctcaccacgcccaccaggttcctttagttctggattgagagtctatgttggtgacttgccatgggaagttgacgatgctcggctggagcaaatcttcagtgaacatgtgaatggcgatgatgcttctgtggcctatgacagagagactgggcgatcacgtggcctatgctgactcacaatgtctagcgagactga

SEQ ID NO: 11630 - DNA, 509 bp, Glycine max
  Clone ID: jC-gmle01810055b10a1
cgctgaacaagacaagaaaactacaaagctatgggcaccatcatcgactcccatttcttggccttcactgccctcgtcactattgcctatcagtttttgctttacgtcgtcactgcgctcctcaaattcgacaaagacactgattatgctggaagtacgaatttcattataattgctgcattgaccctggtcatcaaaggctcctggtattttcgacagataatcctcactttgtttgttgggatatggggaattcgcctcggacttttcctgctattcagaattttgcagtggtgagaggaccgacgctttgatgaaatgcgcagtaattcgggtagactggccatattttggatatttcatgctgtctggatgtgggctgtgagcatacctgttacagtgtttaatgcaagcgacagaaatccctttctacatgttgatgatatagctaggcggatcttgtgggctgagggttttattgtggaaggtacatcagatcaacaaaagct

SEQ ID NO: 11631 - DNA, 609 bp, Glycine max
  Clone ID: jC-gmle01810055b11a1
cagcaatgctcgggctcatagattatcaagcagccattcatttgtggaaaatcgacaaatttgatttcttagtgtgcttcactgcttatgttggcgtagtctttggcagtgttgaaattggcctagtcatagcagttgcagtatctctgcttcgagtacttctatttattgcaaggccaaggacatttctcttaggcaacattccaaattctgcagtatacagaaatgtggaacaatatccaaatgcaaatcatattcctggaatcctaattcttgaaattgatgcacccatttactttgccaatgcaagctatttaagggaaaggatcacaaggtggattgatgaagaggaagatagaatcaaagctacagagcaaaccagtttgcaatatgttataatggacatgaccgctgttgctaacattgatacaagtggaataagcatgcttgaagagtgcaagaagactgttgacagaagagggttacaagtaattatttctttctcctctttctgctaagaggagtgtcagcaataatactttctaacaccattcttcaaacatactttctattattaattaaaattattaaatggtacaaaatcatgag

SEQ ID NO: 11632 - DNA, 542 bp, Glycine max
  Clone ID: jC-gmle01810055b12a1
caggcctgaacaagcgaagaagatacacgatttgtggctgaacgaacacgtagattttgagaaagtgttcctcgccggtgacagcgccggcgccaacattgcgagctatttgggtattcgggttggaacagaagggttgcttggtgtgaagcttgaaggggttgttttggtgcatccctttttctggggagaggaaccgtttgggtgtgaagcaaacaggcctgaacaagcgaagaagatacacgatttgtggcggtttgcgtgccctagtgagagtggatccgatgacccgattattaacccgagtaaggatccgaagctggggaagttagcttgtgaaagattgcttctttgtgttgcggagaaggatttggtgagggacaagggtttgtactataaggagttgcttgagaagaatgggtggtctggtgttgcggaagtggtggagacgaaggatgaggtaccatgttttcatttgttcaaaccgattgtgagaatgctcatgttttgaacgaccagattgtttcctttcttaaacagga

SEQ ID NO: 11633 - DNA, 557 bp, Glycine max
  Clone ID: jC-gmle01810055c01a1
actcccaacacttccatatcttatcttctcctcctccatctttgaggttctcacggaaacttctgaagatggctggcatagcattcggaagcttcaatgattctttcagtttggcctccatcaaggcctacattgctgagttcatctcaacccttctctttgtttttgctggtgttggttcagccatagcctatgctaagttgacatcagatgcagctcttgatccaactgggttggtagctgttgccatttgccatggttttgctctcttcgttgctgtttctgttggagccaacatttctggtggccatgtcaaccctgctgtgaccttcgggttggttctggggggccacttcaccttcctaaggggcctttttaccggattggccaattttttggcttcattgtggcattcttacatctcaagtgtgtcactgtgtatgacactctcctatacacagtgttgctgctggagttggagctggtgaaggagttgttacagagatcataatcacatttggattagtgtacacggtgtatgccacagcagcagaccc

SEQ ID NO: 11634 - DNA, 259 bp, Glycine max
  Clone ID: jC-gmle01810055c01d1
accaacctcatgaatttttataagctagaaaacaatgacgtactccaacttttcattaaaagcaaaaaaaaaaaaaaaaaaaggattatgcggatagatgaaaagaaggaaaagcaagaggtaataacttttcctcctttattccagatcagaaattaacccgagggaaccccggggggatcatgaaaataaaaatcactggctaaaggtgcatgctgggtggggattaacgcctatgtattgataagaccaggcaaac

SEQ ID NO: 11635 - DNA, 541 bp, Glycine max
  unsure at all n locations
  Clone ID: jC-gmle01810055c02a1
gttgttgtaaagccttgttgctgccatggccacccacgcggctcttgcttctacaaggatcccttcaaacacaaggttcccatccaaggcctctcactctttcccaacccaatgcgccttaaagagacttgaggtgacagaattctctgggcttagatccacttcatgtgtcacatatgctaacagtgctagagaatcttccttttttgatcttgtagcttcccaactcactcccaagaccaatggatcaactcctgtgaggggagagacagtggccaagttgaaggtggcaatcaatggtttcggacgcattggtagaaacttccttcgctgctggcacggccgaaaagactcaccccttgaagtcgttgttgtcaacgacagtggtggtgtcaagaatgcttcgcacctgctgaaatatgattctatgctgggaacctttaagcagatgtgaaaatactagacaatgaaaccatcactggtgatggtaagttcatcaaggttgtttcaagcanggaccctcttaagctttcatgggctg

SEQ ID NO: 11636 - DNA, 560 bp, Glycine max
  unsure at all n locations
  Clone ID: jC-gmle01810055c02d1
cagttacaagaattcagaaattcaatatcaatcaatatatgggtgatattcattcagtcacgccaaaacttattattggctgcaaataaatataaactttgaaaatctctcctcagatagactgtctgaacaatttccttctttttcacatgatacgttagaaaaggagctctcctctattcataaactttgcattcctcatcagcagggtttgtctcgcagaaatcctccaatgggtctccactccccgctttaggtgcccctggccacttgcttgctactagatgtgccaaatcgaccactctttggctgtaaccccattcattgtcataccaagcaaccactttaaccatatcatctcccatgaccatagtcaaggaggagtcaatagtagaggaaacatcagagcagcggaagtcgatagacacaagtggaacatcacacacgtccaatacacctttgagcggcccctcagctgcctttctgaatgctgcattcacatcttcagcagtaagacccttcttctaacattcacaacanggtcaacaactgaaacattg

SEQ ID NO: 11637 - DNA, 487 bp, Glycine max
  Clone ID: jC-gmle01810055c03a1
cactactacacactatcttatggcgagtgacaataaaaccactctcagattacagcgtctgctgaatgaatagctctggaatttgagaaggccatggaagcattctaagaacaaacatgatctctttgaatgtcttgctgacgatcaccgtgcacttattctatcgaagctcatctccaccgctacatctccttccgatttcataaccattatcttagcatgcacgaggctaaaccgttcaggcctgcactgtcttgtgttagataaatctgtgcccagagtattctgcatacatcctaagaaatggtcacaatatgctcactctcttcataaacactggatgcatgctcagaacgatgatgcctgctacactatcggaacgatcccattttaccgagagaaaaaccgagggaacggtctctcgtcaatggcaaatgcagatatgaagctgctctcaccggagatagtctcactggcagtgatacag

SEQ ID NO: 11638 - DNA, 397 bp, Glycine max
  Clone ID: jC-gmle01810055c03d1
aataaagaacttttaatcttagttggccataaatatatatacatatatataaaaggtactacctcatctgtacatagtacataccaactgattgacatttttttttgaatttatagaatcgcttcttttcctctctattttcttatttttcaaccttagaaattgattctgtcgctgaaacactttttaaaacggcatcgtttgggaccacaaagtcattgttcacatcaacaccaccgttaccgtacattttcaccggcgaacactcaatcttatgccgcaacttccaatccagcgcctgacatccacgtgaacagtaattcactttgccggaaaccgaacaccggcaaactcgtgtggccgggtttccggtcgaccgcacccaatgtgcgcgcaa

SEQ ID NO: 11639 - DNA, 388 bp, Glycine max
  Clone ID: jC-gmle01810055c04a1
gccagcgctctagagcatgtggcaactgatgataataaaactgatggatcatacaaagttcatgactgtcactggacctgaccctaacttattggacatcctaggccaaagctgtccacactgtcagaaacttgaatcgagagacctgacaaggcagccttcgccatggctctcgtctcctaggctactacgtctgacgagatcaggtatgtaagcgtcgacctctgatgaatctgtgctactgatcgttgtgagtctacaggaagacagaagtggtccacaatgcctcccttctgggagatgtgcactttgggacaagctgctacatgaaggctgggtgcgtgctcatacgtgatgatgaccgccttactattaggatctggagcta

SEQ ID NO: 11640 - DNA, 540 bp, Glycine max
  Clone ID: jC-gmle01810055c04d1
acaaattcatacaacttcattaattcaactcatccttcaatgtaagtggttcctctgacaatcatatgcaagaacaatctaatcttccttattgtggctaaagtgatatctcaaaaaacaagtcatgtaacagtaacccaaagccacaagtgaaaaccacaagttctagatgagataaaagaaactcaacaaatatatctacgaaagttctttggcagcagcaataacagcttccttggtgataccaaactccttgtatatttttccagctggagcacttgctccaaatcgatcaatgcctatggcctttcctttgcttacaacaatcttgtgccaaccaaatgttgatcctgcctcaatgctaactctagctgttactgaagcaggtagaacactctccttgtattcatctgactgctcatcaaaaagctcccagctcacaaaagaaacaactctaacagcttttccttgcttacttagatcctcagcagcagcagcagcaatttccaactcagaaccaggtccaatcaaaataacatc

SEQ ID NO: 11641 - DNA, 573 bp, Glycine max
  Clone ID: jC-gmle01810055c05a1
gtgtttttcttcttccctcactctttctctaacgcaactcagttctttctctccgattctgtatccgcttcatggcagttacattgcgcagcaccaccaacaactttcttccgttaagctcttcaaattgttggctttcgaatggttccccttatgcagggagaaaagtgtcggactttcattgcgtactattgagtaaatggtggagttctagaaagggatgccttatacgacatgatgttctatcgagcagtaatcatggtctgttgggctttagaaaatgctattcggttttttctaaacctagaagggggttgcacttgttaccatttgcctcctctgatgatggcgtgactgtaaatgggagcctccaagctagctccggtactgacctagaaaaaatgagggtgaaactgaataggtcactggaagatgaagagttttgtgatggacttgtccaagctttatatgatgcaaccagggtttttgaactggcaattaaagaacatataatcgtctcacgaatgtccctgttatcaacagcctggcttgggtagaccaaatgcatggtga

SEQ ID NO: 11642 - DNA, 514 bp, Glycine max
  Clone ID: jC-gmle01810055c06a1
ctcacatacattaaaaatatactgataaagatagaataagagagagagagagagaatggaagggagagagagttgtcacccattgctgagaggaggtaggagaagagaggagaaaggttacaaccatggcttatccaccactcagatgcatgtcatggctgccatatgtgatgccctcattccttccctcccactcaacaaggacacttcacaagaccaagctctctcagacttctacaatacctctgcttctcagctcccttttcctgatgaggctgcagagctgttgtacaagaggactgtgccagaagcggtgtcgttggcgagttgggttctgtggatactgtctttcagattggggacactgttgctctgtggaagactttccttggactggaagtggtctttcattcgcaagttctctgagatttccttggagaagagagaacaaattttcaggaactggaccagggacaagagttgggtagccttacgggtagtgtttgtgctcatc

SEQ ID NO: 11643 - DNA, 619 bp, Glycine max
  unsure at all n locations
  Clone ID: jC-gmle01810055c07a1
ggaaagggcaaaagaaagttcgaaaaaagaggaggaaaaaaaaaaggaaaatgaggaaagaaaacgtatagaaatagcagaagcctgggatagcattatatttgctcaagtaataagaggtattttattaataacccaatccattcttagaaaatatattctattaccttcattgataataactaaaaatattgctcgtatactattttttcaatttcccgaatggtcggaagattttagggattggaagagagaaatgtatattaaatgcacatataatggtgttcaattatccgaaagagaatttccaaaaaaatggctaacagatggtattcagataaagatcttatttccttttcgtctcaaaccttggcacaaatctaagctacgatccaatgaaaagaaaaaggatctaatgaaaaaaaagaacttttgttttctaacagtttgggggatggaagtcgacttgcccttttctggttctccccaaaaaatagattttcatcattttttgaccccatttttaaagaactaaataaaaaaacgaaacatattcaatttttcacttttcgagttcctaaagtttaagtgaaaaattgaaantgtttctaactatctt

SEQ ID NO: 11644 - DNA, 609 bp, Glycine max
  Clone ID: jC-gmle01810055c08a1
tgcgatccctcccaagaacggctctgatagctctttggtgcagcaagcggcgtaggaatatcaaagacaaagccattcgtgcctcatacctcatttcatcacacccattcatctccatcacaacacaacatacatacgaaccagatccaaccgcaccgatggaaacacaatgatccaaccctaatccaagcgcctcttacctccaagttttgtgattgaagctgcgatggaggaggagacctccgatgcaatgaaccttgatttgaatctgggcccaggcccagagcccgaaactgggcccatgagcaatgaagctgtgaacttggacgattggataggggagcctcttcagagaattagcgaagctgtgaggagggcacggcaaaggtggagatggcgccaccttccgctaccgcatcctgaatttcatgctcactttccaactgaagctacccggcattttcaaataccacctgaggctcgtaatatctccgtggaattgaaccactttttggtcaattctggcaatggaagcgccttgcatgccggcgaaaggagcgttgcggacgatgagagaagggagatgtgcccaagcgtgtgacaatgtca

SEQ ID NO: 11645 - DNA, 482 bp, Glycine max
  Clone ID: jC-gmle01810055c09a1
gaagaattgctcagacacctgttagtgaggcttattcgggtccgtgctataactgccctggctaaaccaatggatggaccacgagaaatttcagcttccgaatctacgagtaatcgactctcctgctcccggtagtatctcgagacgttccgtatatgagcctgtgcaaacaggacttattgctattgcttccgagatccccatacgacttggtccatgagaattaacttataggcgacagacaaacgggtgaaacagctgtagccacagacactatgcttaattcccagggacaaagtgcaatatgtgtttatgtagctattggtcaaaaagcatcttctgaggctcaagtggtgaataccttacaagagacaggagcattgggctacactattgtagtagctggaacagcagagtccccagctacgttacaatacctcatgccttatacaggggcacttgtggctgaatatcttatgcac

SEQ ID NO: 11646 - DNA, 512 bp, Glycine max
  Clone ID: jC-gmle01810055c10a1
tgatggccctgaagagtgcaggggttgaaggtgtaatggtggatgcttggtggggtttggtggagaaagaagggcctttgaagtacaactgggaaccctatgctgaacttgtgcagatgctgcaaatgcatggcttgaagcttcaagttgttatgtctttccatcagtgtgggggaaatgttggagacaattgcagcattcctctaccaccatgggtgttggaagaaatcagcaagaaccctgagctggtttacacagacagatcagggaggaggaatcctgagtacatctccttgggctgtgattcggttcctgttctaaatggaagaactcctcttcaagtgtactctgactacatgagaagctttcgtgacaaattcagagattacttgagcagtgttatcgtggaaatacaattgggaatgggtccttgtggagagcttagatattcattctattcagaaaccaatggaacttggaggtttcccggaatggagaattcaatgtatgac

SEQ ID NO: 11647 - DNA, 490 bp, Glycine max
  unsure at all n locations
  Clone ID: jC-gmle01810055c11a1
caagccactcgaggaccacatcttccagaccatcttccttaacaacaagcacaaggacacttggcaaaaggatgagatcaagaaggacaagatcatccgggaagactggtggcatcagttgatgcattcctggacgcactacgctttcgttgtgccattcgtctgggctttgaacaggaacagcaagcatacgacatatgccgccgcttggaccctcgtcaacgcccacgaagtcgccgtcatctccggaacggccgcggcgtacaagcttggagcggattaccccaaggacctgtatgagaatgactttgccaagttgtgtttcaggctgtacctcctgctagcccatggcaagttgctcaagaagaacaggacgagttaggtcagtgcggcgcgtcggttgtctgtatatagcacgttataatcagcgaatcatgtatcgatagttagtgatccaaaaaaaaaaaatttnttaaaaaaaaaaaataaa

SEQ ID NO: 11648 - DNA, 552 bp, Glycine max
  Clone ID: jC-gmle01810055c12a1
gaagggctatatagcataaacatttgagtcttcattgcacaatgtcgacctcttccattaacgggtggtgcctctcttccatctccccagccaaaacctctctcaagaaggccacattaggcccttttgtcttcgcaaccgttagcactccttcttctccttcttcttcttcttcttcttccttcccttctctcattcaagacaggcctgtctttgctgcccctgcccccatcatcaccccaactgtgagagaggatatggcaaaggaatacgagcaagctattgaagaactccagaaattgttgagggagaagagtgaactcaaagccacagctgctgagaaagtggagcagataacagcttctctgggaacatcatcatctgatggcatcccatcatcagaagcctcagacaggatcaaagctggtttcattcacttcaagaaggagaaatatgacaagaatccagctttgtatggtgaacttgccaaggccaaagccccaagttatggtgtttgcttgctcagactcagggtgtgcccatctcatgtgc

SEQ ID NO: 11649 - DNA, 422 bp, Glycine max
  Clone ID: jC-gmle01810055d01a1
gggaaaggctataaagataaatgctatgagcaaataaggaagactgtagaaggacggtttaacaagcttctaaatgagcttgtgtttgaggacctgaaagcagctttagaggaagcacgagcgattggggaagagcttggagatgtctatgactatgtagctccctgctttcctccaagatacgagatattccagctaatggtaaatctgtacactgagaggtttattcagatgctaagattgcttagcgacagggcgaatgaattaacaaacattgagatattaaaggtaactggatgggtggttgaataccaagataatctgattgggcttggagtcgatgagtctctagcccaagtgtgttctgagagtggtgcaatggatcctcttatgaattcttatgttgagagaatgcaagctac

SEQ ID NO: 11650 - DNA, 507 bp, Glycine max
  unsure at all n locations
  Clone ID: jC-gmle01810055d01d1
agaaataaactgagggtatcattaactaaggaaattgtataaatgaattttacaaaacttgtctattgacagcatagcatttgggaattatgcaaaaggaacaaataatttaacaggcaaaacaagatatatgaataaatgaatggaatcgtacttcaagtgagtttacgccaaagccctcccttggttgctgttaagcacttcacacgtcgaaaaacaaaacctgcctttggaggtcttccatcaacaagtgaattctcatatatctctttgcactcttgaatgacctccttggcatccttccgaggaatgccttctcgtagaccaacaagtttctcaacaacttcaggcgggcagtcaagttgatgttcgagtatatttgtatagatgagtgtaaaggtatccaggctctctgctgaagcaagctccctcaagtcgctaagtacactcactctngtttcaactntagaaacactgatatgttccctaaaaaagntcatgataacc

SEQ ID NO: 11651 - DNA, 576 bp, Glycine max
  Clone ID: jC-gmle01810055d02a1
gcacgttccgagttttctgatcgctcatagagagttcgacgcggcggttgcagaagaagattgcaagatgaagttcaacatcgcgagtcccaccactggatgccagaagaagctcgagatcgacgacgatcagaaactacgagcattttgggacaagaggatctcacaggaggtcagcggagatgcacttggtgaggaatttaagggctatgtcttcaaaattactggaggttgtgacaaacaaggattcccgatgaaacagggagtgcttactcctggtcgtgttcgacttttgcttcacaggggaactccttgcttccgtggatatggaaggcgtaatggagaacgtaggagaaagtctgttcgtgggtgcattgtcagcccagacctctctgttttgaacttggtaattgtgaagaagggtgagaatgatttaccaggattgactgatgctgagaagccaaggatgagaggcccaaagagagcatccaaaatccgtaaactgttcaacctgtccaaggaggatgatgttaggaagtatgtcaacacctaccgtcgtacatttacgacataagc

SEQ ID NO: 11652 - DNA, 459 bp, Glycine max
  Clone ID: jC-gmle01810055d02d1
ggattcaatgagtaacactgcataagaaatacttcaataactcaatgtaatcaaaaatagcaaaaccagagtttatcacaacagccggttataaaataacaaacaaaaactgaatatgatgattaaaacttcaccatatctctttatatctgaaagcagcttacacagctgccttggcagcactggaaagcttggatctccttttagccaaactctcactggggcggtctttttgttccttcaacctggaggcaaggagtttctggtactctgctgcctccgatttggccttggcaattctcttctttttatcagcaatacttgcccgctttcgttggaacgtaagaggggtgaccagtctttgtatcttaggagctttgctcacctttttcccagcttttgtcgtaaatgtcgacggaaggtgttgacatacttcctaacatcatcctccttggacag

SEQ ID NO: 11653 - DNA, 529 bp, Glycine max
  Clone ID: jC-gmle01810055d03a1
caacacactcagatctctcaactcagatctctcaactcagatctctctctgctgccattaatttcacaatggtcactctcttcgactccctcgccgtcgtgcgtctccccaccgccgccttctccccggctgccaccagccggacctacgttttgctcccgcactgcgccggcctcaggctcagacccgccgccggcacgcgcttagttgcgtcccccgctcgcagaatcgcttcacgcgccgtgcgcgttgtatgtgaggctcacgataccggcgtcgaagtggctcctattactgatgcaaattggcaatcccttgtccttgaatctgaatctgctgctttggctgaattctgggcgccatggtgtggtccctgccgaatgattcaccctataatagatgaactggcaaagcactatgctgggaagctcaagtgttacaaactcaacacggatgagagccctataaccgctactcggtatggaattcgaagcatccctactgttatgatcttcaagaatggtgagaa

SEQ ID NO: 11654 - DNA, 399 bp, Glycine max
  Clone ID: jC-gmle01810055d03d1
aattggcaactcgaataagcctaaaaacaaaagacctgctctcattacactgattcaaatagtgtaatttccgtgtccatgtacatttctataatctatttagaagaaaacaaaaatttggaagaaggatataaaacataatattaataacatgccaggggctgggagaactctaccaaactcagactaggagaggtttccttgcaatctatgttgtcttgatcacagcaccaacaactgtatctttcttgtgaccattcttgaagatcataacagtaaggatgcttggaattccataccgagtatcggatgaatggctctcattcgtgacgagcttgttacacttgagctttccagcatatcgctttgccagtacatctattataggcgtgaattatt

SEQ ID NO: 11655 - DNA, 418 bp, Glycine max
  Clone ID: jC-gmle01810055d04a1
tagtgctcgagggaggggaaggagcaggatgtgtggatgtgagcgaacaagtttgccaagagacaggcatttggtactgactatcgtacccagctctaaccagtgcactgatgcatgccatacaagtgtccgatgtgaggcgaaacgtagagatcgaacagaaaaggttacacttcttgcattggcataagaggggagcagattcgtgtttctctacatcacccttgtaaccttgaaaaggagtcgccgaagcttggactaagactttatggaccaacttctagggaatgactcgaacactaccaagtgtgatctaggctctcgtgtactgctgctctggaatctcaaggggacacatgtactcagcggtgacatttgggctgggaccatctagggaatatgtcatgcccagtgccaa

SEQ ID NO: 11656 - DNA, 487 bp, Glycine max
  Clone ID: jC-gmle01810055d04d1
atatgactctggtgttatttttgattttgcaaattaaattacacaatcacagccgtacatcacacatgagttgggcctcttccaacttaaaagcagaggataacattggcccatgacgcgacacatgcaccacctaataatcataattttacatctttacatacaaaatacaaagactttaaattttaaaaagaagaaaagagataaacagatcatcttaatgaaatgaaaccaaaacccacaaacattggcttgatttttgttgttgttgttgttcccaacttgattaagcatgaaccgtttgattgaatcacttggacttgaagggaatggccctgattacacctggtggtagagtgctgcaagagctgcaccgatgaatggtcccaccagaaatccagtgttcatccaaccaagggccttgttgaagatgatagcagcaccaagactacgagcagggttgataccagttccggtgatggggatg

SEQ ID NO: 11657 - DNA, 573 bp, Glycine max
  Clone ID: jC-gmle01810055d05a1
gtttttctgtagtttcactgctatggcacaagctgattgcatctcctgaaacacaaccttgtgcagaaagcacttctgcccaacagggctggagacaggttgttgatgcattatgcaacgttgtatcagcctcaccaacaaaagcagctacagcagttgtacttcaggcggagcgggaattgcagccctggattgccaaggatgatgattcaggtcagaagatgtggagaatcaatcagcggattgtaaaattgattgtggaacttatgaggaatcatgagactgcagaatcattggtaattgtggcaagttcatcagatttactactgcgagccacagatgggatgctggttgatggagaagcttgcactttaccacagctggagctattggaagcaacagctagagcagttcagccagtgctcgagtttggagaatctggattggctgtggcagatggcctttcaaaccttgtaaagtgtcgcctctcaactacaattagatgtctttctcatccaagtgcacatgtccgagctctgagtatatcagttcttcgtgacattttgcatactg

SEQ ID NO: 11658 - DNA, 550 bp, Glycine max
  Clone ID: jC-gmle01810055d06a1
cattgataataaaattgtaatttagtaacaatagaatgtaattttttgtttgtcaagctgaatttgatgtccctgaagcatctgatctgaggacacaaaagaaaatacttcagactgtgagggagcggtggagacaattcaagtctgatttgacgtcgaaatgggcacttgcagccaacaaggaaagtgttgacgacactgtatgcgaaaagtacaacattagcaaggagaagtgggcccaattttgtcagacccacaaagaccctttgtgggagatgtgcgaaaaatggcacaagccatccagaagcaaaacactacccctcacatgttgtcttgtgggggttatcaatatttagaaaacaagttgatggatgaaaagagaaagaagaaattggaggaagttgctaaatccggaatcactgacaccatgattgatccttcatctgccatcaaacgacatgtgaaatggaagatggtccgcaccaagaaaactgggcaaatgacgtctgatgcagcacaggaaattgctaacaagattgattcgttggag

SEQ ID NO: 11659 - DNA, 547 bp, Glycine max
  Clone ID: jC-gmle01810055d07a1
ccgaggaattcattccagaatgcaaatcaaaagctgttcttttcaggcacatcaagaccggggctcaagtcatgtctgtttccaacgacgacgacaataaagtctttggaattgttttccgcactcctccgaaagactccactggtatccctcacattctggagcatagcgtattatgcggctcacgaaaataccctctcaaagagccttttgttgaattgttgaaaggaagcttgcacactttccttaatgcgttcacctatcccgataggacatgttacccagttgcttccacaaatgccaaggatttctataatttggttgatgtctacctggatgcggttttctttcccagatgtgtcgaggactttcagatttttcaacaggaaggctggcactttgagctcaacgatccttccgaagacatcacttataaaggtgtcgtgttcaatgagatgaagggtgtctactctcaaccggataatatacttgggcgagctgctcaacaggctcttttcccagacaccacctatggtgttgacagtgg

SEQ ID NO: 11660 - DNA, 573 bp, Glycine max
  unsure at all n locations
  Clone ID: jC-gmle01810055d08a1
ctcgagccgattcggctcgagcggctcgagcggctcgagctcgagccgcttctgctctagaaaattcagtggtgatacatggcttcggctactctctctgtagccaaaccagcccttcaggcaaatgggaaaggcttctctgaattctctggcctccgcagctcatcaggcttccttcccttttctagaaaatcttcagaggatttccattctgtcattgccttccagacctatgcagttggaagcagtggaggatacaagaagggtgtgacagaagcaaaactgaaggttgccataaacggatttggaaggattggaaggaacttcttgaggtgctggcacggtcgcaaagactcccctcttgatgtcattgccatcaacgacaccggtggcgtgaaacaagcctctcaccttctcaagtacgattcgatcctcggaaccttcgatgctgatgtcaagcctgttggcagcgacatcatctctgtcgatggaaaggaaatcaaagttgtctctgaccgcaaccctgccaaccttccttggaaggattctgngatagacttggtgattgaggaa

SEQ ID NO: 11661 - DNA, 536 bp, Glycine max
  Clone ID: jC-gmle01810055d09a1
gcactgtgttcgacttcgtcaaaagcatcatgagccgctacgacagccgctccggcgacccagcttcctatcgtgatcggaggagtgattctgggctaggtgcacctacagggtttggtggttctgtacaacactcttcatcaaacaggagggattatgatgatggtgggtcaccaaagaggaacctcagtttggatggtttacctcattttgagaaaaacttctacattgagtcaccagctgtaagggcaatgacagatgctgaagttaatgagtatcggcagcagagggaaataactgttgaagggcgagatatcccgaaacctgtcaagacctttcacgatgctggttttccagaatatgtactgcaagaaattacaaaagctggctttactgaacctacacccattcaatctcaaggttggcccatggctctgaaggggcgtgatctgataggaattgcagaaacaggatcagggaagacacttgcttacttgctgcctgccattgtgcatgttaatgcttaggcaatacta

SEQ ID NO: 11662 - DNA, 573 bp, Glycine max
  Clone ID: jC-gmle01810055d10a1
gtatcagggagcctagaggttccttctggtatctcacctggtcagacctttgatgtacagcttccaaagattgaaggttcaggagaggagaccctgctcagcatctcgtttcaactgaaggaggctacgtcatatctcaaggcaggtttcgagatcgcgacagcacagatatccatcacaccagcaacgccattgaagcgacctcagtcatcgggcaagcaaatcactgttgagaaaccattcaggaacaccctcaagatcacggcggatcaagccatttgggagttcaacactcttcatggtagcctcacatcctggatacaaggttctaccgagcttctctccaaggcaccagaaattgacatcttccgcgcacctaccgactacgatatcccacaagacggttgggattggaaagacaagcaactgcatcacgcgaaaccattgactcgcaaggtcgaatggtcacagtctgactcagagaccctcaaggttaccgtgcatcaacgtgtcgcacctccagttctctcttgtctgtcgactgcgttctacgacactttcagcgcacaatac

SEQ ID NO: 11663 - DNA, 558 bp, Glycine max
  unsure at all n locations
  Clone ID: jC-gmle01810055d11a1
cgccttctgtctcaatctcaatccaccagaaatggcaacaatagttagccaccaccaccgcctattctccgccgccacgcgcttcaattccactggcagagactcgcggcggcaaaggagcggcgcatactcggtccggtgcgctgacgtaagcacggtcacgagcgagaatcagcgagtgacggtgagtaacaggagcgattcgctggagatatgccgcgtgctgaacggaatgtggcagaccagcggcggatggggccgaatcgaccgagacgacgccgtcgaggctatgcttcgctacgccgacgccggcctaactaccttcgacatggccgatcactatggacctgctgaagatctatatgggattttcattaatcgagttcgtcgagagcgtcctgctgaattgttggaacaggtcagaggtctcactaagtgggttcctccgccagttaagatgactagtagctatgtaagagacagcatcaatgtttcaaggaagagaaaggatgtggaatcctnggacatgcttcaggttcattggtgggattactcgaa

SEQ ID NO: 11664 - DNA, 542 bp, Glycine max
  unsure at all n locations
  Clone ID: jC-gmle01810055d12a1
ctcgagccgctcgagccgtttccctgtttttcttcacaagcagagctctgtttttaactggtctttgatcaaggatggccataaaggcaattgagttgttgaaaggaagcggaaaccatgaagagatatttgaagttcttgcagcagtggctgcatctttgggggatgtaatagatgatgtgaacactttgcaggtaacacctttaaagggggcaatgaccaatgaggtttttgaggtaaattggccaaccaaaagtgatggtcatcaaagaagggttcttgttcgattatatggtgaaggtgttgaggttttcttcaacagggtggatgaaatccaaacctttgagtgcatgtcaaagcatggacagggtccacgccttcttgngaggttcaccactggcagagttgaagagttcattcatgccaaaacactctcagctgcggacctccgtgaccctgaaatatctgctntgatagcatctaagatgagggagtttcacaatcttcatatgcctggtgcaaagaaggctcagctttggcag

SEQ ID NO: 11665 - DNA, 417 bp, Glycine max
  Clone ID: jC-gmle01810055e01a1
ctcttatattgtttgggggcccgcttgcacctggtcttgcaagtcttggaatgactccacttctagctgctgtatatgtgggtgctttgcagaacatatttagcaagagtgccaagtacagcttatttgatccctgcaaagaaatggcctacattccattggacgaggataccaaggttaaagggaaggcagccattgatgttgtgtgcaatccattggggaagtctggaggtgcccttatccagcaatttatgatcttgacttttgggtcactagctaattcaaccccatacttgggaggaatacttctgctgattgtttctgcctggctagctgcggcgaaatccttggatacccagtttactgcattgcgtatagaggaagaactcaagaaaatggaaagagcagccactgtca

SEQ ID NO: 11666 - DNA, 353 bp, Glycine max
  Clone ID: jC-gmle01810055e01d1
gaacagttaaatgacttctatctttcataggaaaacaaattgcggctcactaaaaacagtaaaccatgataacaagtaaagaaaatcacctgatctatggggacaaaaaaattatctgacttgagaaagtagctggcaagcttattctatcagagcttatatataaacctacaccaaatagtttcatctaacacttctctcaaaagtgctctattttttcattctgaggcaatttttcacagaaagaagatcccatttaattgtgaggagccgatgcttcatatggactacttgaggagtcacctgaggatggattcaatggtgaacctgctgatagagaaccatttgcaccc

SEQ ID NO: 11667 - DNA, 98 bp, Glycine max
  Clone ID: jC-gmle01810055e02a1
ggagaatccaacttgtatgtatagtcttaaatgtctgctgaggagctatcttagtacggcgaccacgttatgcacgatatcccatagatggctgatag

SEQ ID NO: 11668 - DNA, 454 bp, Glycine max
  Clone ID: jC-gmle01810055e02d1
ggaaaccactaaccaataatttatttctatacacactcaaaatacacaacttttgcacagaccaaacttaacgccatttacaaagatgctgaccttttcatcaatgcaatggcatcactcattctaatccaaaaaactgacctataaaaagaaaagaaacgccatgaagtaaaaagaaaaacaaaatgaaacggacaaacatttcagactcaataatttttctacctcctgaccacatgctaccattgtgaacatcattgacctcactcacatgacaatctccggcttcagaatatttgacttgatcttcttgggtgggaaaacaacaccaccattggtgtgaatgtcatcacatacatggacatcttctccaaggatgggcatattatccactcgagcccattgcccaacagtggaatgccacccaacaatactgatggatacacaagcatgc

SEQ ID NO: 11669 - DNA, 533 bp, Glycine max
  Clone ID: jC-gmle01810055e03a1
ggcatggaaagcctctcatttcaattgtatcttcacttggtaaacaagcattgggcttggagaaagaaccccttccagagaagcatgatgtcgacctaaggccatcaaccgtaaaagactatacggtccacagctgctcaaaagtatttaccattctccaagaggcaccctgtgtcatctgtatcttccgacaacaagaattcaacatcaatattagtgccgctgagaaattcatgtgccctaaggaagtttataccttcggtgaaagatgtgatgactcaagatgaaaccaacgactcttttgttactgatgatcttgaaaatgagaaggtggagatagatgatggcaagcacactcaaaagtctaatggcactcgtaaagtctctaagtcggagaattctggtgcttcagaattggatcaaactgagaaaacagatggtcttaattgtgcattaacaattgaacgggtgcaaggcaatcagaattacccacgacatgtccctgtgcacgtatgtgatgcgaaccttggaac

SEQ ID NO: 11670 - DNA, 436 bp, Glycine max
  Clone ID: jC-gmle01810055e03d1
gactgaatgaaggatcattaaattacttaaatgatcaatgctaaaacagtacttaatgtttcttgtctaggtccattttaacagagttttcaaatgcagtagcctcagtccaagaaagtaaaaagagtgtaatgtaataatttaatatggtacacacacctacacgacaagtttcgtgagctgcagaattagaaaataagctcttcagacaatgaacagggaaactaagaaatattttttgcaaaactagagattttctttgcgtggttgcatggatatatcaagcatcaagttgaagcctccccattcaagcgtattctcttaggacctttttcttcaccttggttgcaggctgtaccgatcctgttttcattggcctctaccgaacatcttttgtaaggtttaaaccctgttggacgagtctttagctttcctg

SEQ ID NO: 11671 - DNA, 520 bp, Glycine max
  Clone ID: jC-gmle01810055e04a1
aaagattttatccaattgaaattttaaaaatgactgggataaacttaagaattcaattattgaaattgaataagtaaacaatttaattggattggtcgaatggtatcaaaaaaatggagtactaactcccatttcttatttattattgaattaaccgatcaacttgctttgttatcgaacatttctttttgatttcaaaaattttccggaaaaaatttgaatctatttttatatgcgaatcaatcctactacttctggtcctgaggtttctgcgcttgaaaaaaaaaatctgggacgtatcgcccaaataattggtccggtactagatgtagcttttcccccaggtaagatgcctaatatttacaacgctctgatagttaagggtcgagatactgttggtcaacaaattaatgtgacttgtgaagtacagcaattattaggaaataatcgaattagagctgtagctatgagtgcgacagaaggtctaatgagaggaatggaagtgattgacacaggagct

SEQ ID NO: 11672 - DNA, 562 bp, Glycine max
  Clone ID: jC-gmle01810055e05a1
cccattccacaccccacactcttctcctctatttaacaacgcccgaaaaaaaattagggttttcaatttggggaaataaaaatagggggaaatattctggagagagtgtgtagaaaatatggctgtcgatgatatgacgctgtgcatcatcgtcggctatggaggttcctcttcttctcgtttctccgatgcttatcccaaaaggtaataaataatccttgaagatctttgtctctcttctttaaaaaaaaaactgttttttttcctctctctctctctctctctctctctctcttatggatttgatggttatggttcaatgcttttcccctgattttggagggtttttggagttacctcgaatagggttaaacataattcacctctagcgttttcgaaatctcttcctctcttacagagattgaagagatatatcactgtgtcactctctctgttatataatatagatagatagttaattagttagttctgttcttatttatctattaatttataaagaaaattagaagaactgtattattattattttaaataggttgga

SEQ ID NO: 11673 - DNA, 333 bp, Glycine max
  Clone ID: jC-gmle01810055e06a1
gaaatatgcatcggacgaagatgccttcttcgctgattacgctgaggctcaccaaaagctttctgagcttgggtttgctgaagcctaagcaacgttttggggattgttggagaggcacggtgcccataatatttctctcataaattctatggtcatggtttctaatgcgccactgtgggttcctcaaatttttagatagcttttgaatgtattttgctggacgtggtgatgatgattggagttgggttgtttttatttgtggtcgatccttttgttaaataacattgttcagcgattgcgataaaaaaaaaataaataaacataatatattat

SEQ ID NO: 11674 - DNA, 385 bp, Glycine max
  Clone ID: jC-gmle01810055e07a1
gagcttacaaatcattatggcagtatgggcatacagcattacactgcacatattaaggttggatatgagaacaggtggcacaattttgatgacagccacatatgactcataagggaatatgaggttaacacttgatgctgtctatgcgctatcgtacatgagggtgatgaatgactatgccggtgctagcaatggggctttatcgcgttatgttggtagtggtatgtataaagtatatgtcaagaacatacgtggtgttttcacagaagctgttgataataggtacgcgaaccattttaaatgtatgccgtaatatatggattttattcccattactggttgagacggcccaagcgtgttgatgccttagtgtctctcgttgaaa

SEQ ID NO: 11675 - DNA, 564 bp, Glycine max
  Clone ID: jC-gmle01810055e09a1
ctcgagccgaatcagcactccactagtccttcaccgcctccgatttacctgttgaaggtttggtgtgttgatcaaaaaggattgctacatgatattaatgaaatcctgtgcaaccttgaacttattattcagagagtcatagcgatgccaaccccagatggaagggtgttagacatgttctttatcactgatgggatggaattgcttcacaccaaatagaggcaagattatgtatgtgaatatctgatggatgctttaggagagaggtgtatctccagtgaacttcagttggctgggcctgaatacggacatttgcaggggttttcttctgttccaccagcttttgctgaagagttatttagttctgagctgttagacaagttgtctttgcatgctctcagccaagatatgacaacactgaagacacctactgctactgtggataactcactgagcccagttcataccctgcttcagatacaatgcgttgatccatacggcttgtgttatgacattatgaggatttcttaagactctgatattaaagttgcttttggacgattt

SEQ ID NO: 11676 - DNA, 493 bp, Glycine max
  Clone ID: jC-gmle01810055e10a1
ctcgagccgaatcagcactccactagtccttcaccgcctccgatttacctgttgaaggtttggtgtgttgatcaaaaaggattgctacatgatattaatgaaatcctgtgcaaccttgaacttattattcagagagtcaaagcgatgccaaccccagatggaagggtgttagacatgttctttatcactgatgggatggaattgcttcacaccaaatagaggcaagattatgtatgtgaatatctgatggatgctttaggagagaggtgtatctccagtgaacttcagttggctgggcctgaatacggacatttgcaggggttttcttctcttccaccagcttttgctgaagagttatttagttctgagctgttagacaagttgtctttgcatcctctcagccaagatatgacaacactgaagacacctactgttactgtggataactcactgagcccagttcataccctgcttcagatacaatgcgttgatc

SEQ ID NO: 11677 - DNA, 560 bp, Glycine max
  Clone ID: jC-gmle01810055e11a1
cttaagtgcctcttttggtatcatctatgtccttgtgaaacctgccacttatgctattatttcaaatgcgtcaagctcaaccaatcagggaaaagcacaaacatttattgctgggacacaatctatatctgatttgctatctcctattgctatgagtccattgacttcatggtttttatctagcaatgctccttttgaatgcaaaggttttagcattatatgtgcatccatatgcatgataatttctctttgttttgcttgcttgctgaagccagctgatactagttcgagtaatgacatagagggaagccaagagaccccgcttctgactgataattgattgtatcaattggacaaatacatttggccaatcatgtatatataggcatccttgtctcaataattgctgctccaaatagccatctttttctttatagaattggctataggagaatataagcagaagtataaggaaagggtgggagagagagagagcgatggcttcatcagctatattgaacacttaaacaagtcaaattaatcaatcaacactttctata

SEQ ID NO: 11678 - DNA, 570 bp, Glycine max
  Clone ID: jC-gmle01810055e12a1
gtcaaagatatacgtgagtctatgcttgaagaagttgacttttacaaggaggctgcaaatattgaggcttttaggagatatttagaaacaatgggacttactgggaatgcaacagctccaaaagtgtatcgattctgcagtacaatgaaagttttaactatgcaaagactatatggagttcctcttactgacctagactccataaggtcattagtttctaatccagaaaccagccttataactgctctcaatgtgtggtttggaagtttgcttgcatgtgaatcttttcatgcagatgtacatgcaggaaatctgtggcttctacgtgatggccgtattgggtttcttgacttcggaattgttggtcgtatatcccctaaaacatgggctgctatggaagtcttcttaggatcaattgccattgaagattatgactcaatggcatcttccttaattgaaatgggtgctacataccaggatgttgatgctaaagcctctgcaagagatttggaaaaagtattctcatcaattaaggaattggacactgaaatagtagtagcaactacaact

SEQ ID NO: 11679 - DNA, 285 bp, Glycine max
  Clone ID: jC-gmle01810055f01a1
caactgtacgacggaggacaggttgcgtaactgccaccaacccttcgccgcacggtgggcgtggtgctttgccttctgaaggtggtagcccttcagacttgctcttcttagctggtggtggttctgctgtcttctagcttcttcttaactcttttttctttttactactttaaagctacctggttttcaaattaccaaaaccaacactcttttactctatatgatcaccctttcttcatcttctacttttccttcactaaaatgatgctcacaatcaagagggtt

SEQ ID NO: 11680 - DNA, 507 bp, Glycine max
  unsure at all n locations
  Clone ID: jC-gmle01810055f01d1
acaaggacaaacagttacctgaatttattatttctcgcagcatgaaagccacgatagacagtcaagtcaagcattatgatacatcagaccccaaaataccaacaacactactcagctgagcagttattatatcgtactttcacatgaaagtgtcataaaggcagataaaagcatatacattcaacacacacgaccataaggctcaagcacaaggcaatagtatgacttaaacggtgacacatttcagcaattattcttaaaacactgcagattttctgaatttgttcaaaatacaagagccttgttactgtagaaccacacattcttgtgaaccagccaccaccaccacangtagggtgttcgcttgtgctgactgcatcaacttcttttttgacactttgaacattgacatcctccaattcaccacagccaatggcttcaaaaacaagatcattgacttcttgaaacctctcttgagaaagggacacctcagcagaaagcctcagc

SEQ ID NO: 11681 - DNA, 557 bp, Glycine max
  Clone ID: jC-gmle01810055f02a1
aatcattaaattaaatatttattgcgcgcatctcatattcaccttaaataatgcaggtaaaatgtggtgttattgtcggttggtatacatgcccatgtcttatttgtatgggaagaaatttacgggtccaatcacaccgttagttgtaaatttgagagaagaactttttattcaaccttatgatgaaaatagttggaagaaagcacgtcataaatgtgcaaatgaagatctttactatccccatcattggatacaagatctattatgggatagtttgtatgtattcaccgagcctcttctaaattgttggcctttcaacaagttggttagagaaaaggcacttcaagtaacaatgaaacatattcattatgaagacgaaaatagtcggtatattgccatcgggtgtgtggaaaaggttctatgtatgcttgcttgttgggttgaagatccaaatggagatgctttcaagaagcatcttgcaaggatcccagattatttatgggtttctgaagatggaatgaccatgcaaggtattggtactcaatcatgggatgttg

SEQ ID NO: 11682 - DNA, 315 bp, Glycine max
  Clone ID: jC-gmle01810055f02d1
ggatgaaaaaaatggggggccctgccaatgtatacgaaatttttgtttcaaaattacaaaagtttgggaatacgaaaaaccccattaaacttaatgcccaaattttttttttcaaaacttttatgggggggacattatatttttgggcccacaatttttcaacttaaatggcaaaggaagggactaaaacatttgggggggattcacccaacccccccattggaaaaaatttttttttgaaggagtaatgaaccaagccttttttcaagtatactccaaaaagattttgttggggcccatacccttttttaaact

SEQ ID NO: 11683 - DNA, 436 bp, Glycine max
  Clone ID: jC-gmle01810055f03a1
gttagatacggagattttccttttggctaattggaaagctctatcagaaaaaagctactaatatacaggcaaagcatagactctctactaagaactagtgaaataatcatgctggatataattgctgagcatgaggagaaaatgaagatcccatagatgaactgcctgtaggctaataggaccctgctagtagaatagtatacagtgaaacacgtaagaagagatcgagtatgagagtacttgcatctattactctctgaacttacactatgagatgctttgattattactgatcattgatatgtgtcttaagatatacactgagctacagatccaagtaggaccatagagatgactcccatacgtcattatcattagaaagggacacaggtcaatagattcggtggccatagcctttcctatcgaaggaagaaca

SEQ ID NO: 11684 - DNA, 421 bp, Glycine max
  Clone ID: jC-gmle01810055f03d1
aggaaagaacaaaaccaccgaatttattgacctttttccttttctaatgataatgaagtatgggagtcatttctatggtcctacttgaaactgtagcacagtgtatatcttaaaacaaatatcaataatcagtactaataaaaggaaaacaaagtaaaagatcagagagtaagagaaaaaagaactctcatactctatttcttcttttttggtacactgcatactattctactagcagggtcctattaaacaacaggaagttcatctttggtatcttcattttctcctcatgctcagaaattatatccagcatgattatttgactagttcttactaaagagtctatgctttgcctgcatattagaagctactttctgatagagctttccaattaaccaagaggaaaatctccttatctaac

SEQ ID NO: 11685 - DNA, 558 bp, Glycine max
  Clone ID: jC-gmle01810055f04a1
ggggtgtgcttcctcgaagcgtgttgatgcggcagcagtcccctaccgtcccgcacccacaagcttggcggtgttcgacatcaacaccatcgaggagccatggctgaagcacctcaacaacaccatcgaggagccatggctgaagcacctcaacaacaccacccctctcccccaagacaataataaaccctccctccccgcccctattctccacaaactcaacttgctcgacgccaccgatgccccccaatcctgggatgagattagcaaaacactccaagacctcaaatccccctccacctcaccccaacaacaacctcaacctccacaaaagaccaagtccttccacacggtggaagagctagacgccaagctcaaccccaagcccgagcccaagcccaatccagaattgaaaaagcccgctgatcagataattaacagtagcatagttaccgagccagtccgagggaacaagttgaaggataacatgttcatagttcgggacaggctggagagacagaatgaagagaaggagctcaccttcgagcgtcttcgtcg

SEQ ID NO: 11686 - DNA, 540 bp, Glycine max
  Clone ID: jC-gmle01810055f05a1
gcattttctttcatcacctttggaagattttggagaaagcatttacaatttccatttgcgttgaaccaacatgagcaacagaaaagacaagaatgatgatgagtctagtgagagaggtatattttcacatctaggatatccaagtgcaccacccccctaccctcctccacatggatacccaccatcaggctatccacctccaggagggtatcccccaacagcctatccgccgctgggaggatatccacattccggttactatccttcagaatatccaccagcatatccgtctccgggagggtatccacccactgcttatcctcattcaggatatcatccaccagcttatcctgccccacatggctatccacctgctgcaccttcatatcctggagggcgtggggctggcatgggaggattgttggcagggggtgttgctgctgctgccgctgcctatggtgctcaccatatggctcatggatatcatccgtttggacacggagcctactatggtcatggaaagttcaagcatgggaaata

SEQ ID NO: 11687 - DNA, 593 bp, Glycine max
  unsure at all n locations
  Clone ID: jC-gmle01810055f06a1
cagaattctctaaaagagatctttttctgctctttgaagaaagaagggtctttgcttgattttggagatgtctctgctctcagatctcatcaaccttaacctctccgataccaccgagaaggtgatcgcagagtacatatggatcggtggatcaggaatggacctgaggagcaaagcaaggactctcccaggaccagttagcgacccttcagagcttcccaagtggaactatgatggttccagcacaggtcaagctcctggtgaagacagtgaagtgattttatacccacaagccattttcagggatccattcagaaggggtaacaatatcttggttatctgtgatgcctacactcctgctggagaacctattcccactaacaagaggcacgctgctgccaaggttttcagccatcctgatgttgttgctgaagtgccatggtacggtattgaacaagaatacaccttgttgcagaaagatatccaatggcctcttgggtggcctgttggtggtttccctggacctcanggtccatactactgtggtgttggcgctgacaagggctttggccgtgacattggtgacgcacact

SEQ ID NO: 11688 - DNA, 611 bp, Glycine max
  unsure at all n locations
  Clone ID: jC-gmle01810055f07a1
tggaggtacagctcaagcctttaatggaccaactcagtcgggtaaaagacttgcctgtccctgaatttggcagtcttcaagcatgggaagctagagctagtgctgctgtccgtgcagctaatggagatatcaatgctggtgattctaaaatttcgcagccaggatataatggagtgccttacagtggagacactaaggttgtagttgacttcaatactgaaggcaaaggagagggtgttaagtctgaaactgacagtacatctttaaaggttttgcctccatggatgattacatcaggtatgaatcttacaaaggaacaacgtggagaggtgaagcaagaaacaaagatggatgggacttcaacttccacagcagcacagtacacagatgacaagaagtcaacaattggacatgacaacaatcaaaatatacaggatgagtatattaaggcttattatgctgctttacttaaacaacaacacgaattggaagaagctgcataaaaacaattgtcaaatacacttgctgctgctaatccttctagcagtactttcattcgccaggtnggcatgaaatcaatacgtgaggaagacgatgatgatactgatggg

SEQ ID NO: 11689 - DNA, 544 bp, Glycine max
  unsure at all n locations
  Clone ID: jC-gmle01810055f08a1
gcaacgcagtcctttttctatttgtatgtttgtatgagactgagaaagatagagagatagtgtgtgcagaagatgtggctattcggcagaaaaggggcttctgggttttcatcatcatccactgcagagcatgtcactgaaggaattgatggaactggtttcactgccattgtcacaggggcatccagtggtattggcactgagactacgcgtgttcttgctttgcgtggtgtccatgtgattatgggtgtgagaaatatgcttgctgctaaagatgtcaaagaaacaatactcaaggagattccctccgctaaagttgatgccatggagttagatctcagttcgatgaagtctgtcaggaaatttgcatcagagtttaagtcctctggtcttccattgaacatcttaataaacaatgcaggaattatggcttgccctntcagtctctctaaagacaaaattgaactacagtttgccacacatcacataggtcattntctcttgacaaatcttttgttggacactattaaaaaaacttcacgtg

SEQ ID NO: 11690 - DNA, 528 bp, Glycine max
  Clone ID: jC-gmle01810055f09a1
gattttatccaattgaaattttaaaaatgactgggataaacttaagaattcaattattgaaattgaataagtaaacaatttaattggattggtcgaatggtatcaaaaaaatggagtactaactcccatttcttatttattattgaattaaccgatcaacttgctttgttatcgaacatttctttttgatttcaaaaattttccggaaaaaatttgaatctatctttatatgcgaatcaatcctactacttctggtcctgaggtttctgcgcttgaaaaaaaaaatctgggacgtatcgcccaaataattggcccggtactagatgtagcttttcccccaggtaagatgcctaatatttacaacgctctgatagttaagggtcgagatactgttggtcaacaaattaatgtgacttgcgaagtacagcaattattaggaaataatcgaattaaagctgtagctatgagtgcgacagaaggtctaatgagaggaatggcaatgattgacacaggaagctgcctaagtgt

SEQ ID NO: 11691 - DNA, 538 bp, Glycine max
  Clone ID: jC-gmle01810055f10a1
acaggtacagatgttacctcgaatatacccttgcagggaatgtcgagatcactttaaagaagttcttagagcaaatcctgtactgactggatcacatgctgaattttctcagtggctatgtcatgtgcataatgttgttaatagaagccttgccaaaccgatattcccctgtgaacgagttgatgcaaggtggggcaaactggactgtgaacagaatgcatgtgaaattattggaagtacatcaatttttgggaggatatggcagaaatctacgtaaaaatgattgccacacatactatgtgagatgtgttaaattttgacctttagaaaaatggtttagataggccaagggttatttgatggcattacaccggagtacgtgaatacatattcataactcgaattattttagaaaattaatagttaagcccggtttatattgattttttgagcatcacaatcagagatgtagttgccagagcttgtaattctatacacgattattctaaacaatgtctggttattaacagccttgctt

SEQ ID NO: 11692 - DNA, 535 bp, Glycine max
  unsure at all n locations
  Clone ID: jC-gmle01810055f11a1
caaggcagaaagcaagctcatcctagagttttaaaaatggcagcagcctcctccatggctctctcttccccatccttggctggcaaggccgtgaagctgggcccatcagcccccgaagtcgggagggtcagcatgaggaagaccgtcaccaagcaggcctcctccggaagcccatggtacggcccagaccgcgtcaagtacttgggcccattctctggcgagcccccgtcctacctcactggcgagttcccaggtgactacggctgggacactgctgggctttcggccgacccagaaaccttcgccagaaaccgtgagctcgaagtgatccactccaggtgggccatgctcggggccttgggctgcgtcttccccgaactgttgtcccgcaacggggtcaagtttggagaagctgtgtggttcaaggccgggtcccagatcttcagcgagggtgggctggactacttgggcaacccaagccttgtccacgcccagagcattctcgccatctgggccacccaangtatcctaatgg

SEQ ID NO: 11693 - DNA, 565 bp, Glycine max
  Clone ID: jC-gmle01810055f12a1
agaagattgtggtgaactgtggtattggagatgctgcgcaaaatgcaaagggtttggacgcggcaataagtgatctagcactgatcacagggcagagacctattaagactcgggccagggcttctcttgccacttttaagatcagggaaggtcaaccgcttgggattgctgtgacactaagaggaaatatgatgtattcattcctagaccgagttatcaacctgggacttcctaggacaagagatttccaaggtgtgaaccccaacagctttgatgggcatgggaactacagcattggcattaaggaccagggtgtgttcccagagatcagagccgatgttgttggtaagcctcggggaatggatatctgcatcgtgacgacggctaataccgaccaagaagcacagaaattgttagctcttatgggtatgcccttcagagagggaagtggtcctgccacgacaattcggaaatagaagcttaagtctcatcattttgatgcaaaatcaatgggaagaaggaagaggtgacatagttctgatgcaaatcatatgattaaaggaag

SEQ ID NO: 11694 - DNA, 568 bp, Glycine max
  Clone ID: jC-gmle01810055g01a1
gatggaagaagcccattgcattgggctgcttacaaaggttttgccgattctatacgtcttctgttatttcttgatgcacacaggggacgtcaagataaagagggttgcactcctcttcattgggctgctattaggggcaacttggaggccagtaccgtgttagtacaggctggcaagaaggaagatcttatggtgactgataatacaggcctgactccagcacagcttgcttctgataagaatcacagacaagttgcttttttccttggaaatgcccgaaggttgcttgacaaacgctgtgacgggaacagccgccttggaaagatttccaaattaggacttgctcctgtcctttggtgcataattcttgtgctgttggctacgtatattcattcggtcatcttggcaacaaatatgccaaagatgacagctgcagcaggccttcttgcatggtttggagctttactgcaagtgttggttcggtgatggtgtacaggtgtagcagcaaggatcctgcttatatcagaatgaatatgcatgacactcaggatacaaaagatgatgagcc

SEQ ID NO: 11695 - DNA, 490 bp, Glycine max
  Clone ID: jC-gmle01810055g01d1
agaaaagagccacaataaattgaattaacataaaccaacccagatgtgtgcctatgatacattacaggttaggttcaaccactagacttataaatatcatgatgagggtgtaacagatctggtgttccgtccaaggccaagacctaagcccaagggagcattgtcatttctggttttgccatggttattattatggctacaatgcgtagaatgaacatgaccatgatttgttttggagtgggtactgttggaattggaattcacattaataacatgatggccatttccattgccccttgcatattcggaatggttatgcgagtctccatttgctaagttcgagcttcttgccatgtgcatcattcctataccctcctctgagctacctaattcttcaatgcactcaatatcttcgttgtaaccattgatcaagaaatcagaacagttcttcttgataccatgatcatatgggtttctgaatctaccacct

SEQ ID NO: 11696 - DNA, 570 bp, Glycine max
  Clone ID: jC-gmle01810055g02a1
ctcaagcttcctccaacaacaagaagaccaaacgcaatcacaagaaatccctccctccccgcccgtaacggaatcacccctccggatgatggcggagaaagaaccgttaaaaagcttcggttgtcgaaggcgctcaccatccccgacggaaccaccgtctctgaggcctgcaggcgcatggctgctcgccgcatcgacgccgttttgctaactgattccaacgccctgctttccggaattctcactgacaaggatgtggctactagagtcgtcgccgaggggctgaagccggaggagacgacggtgtcgaaagtaatgacgcggaatcccatctttgtcacgtcggatacgctcgccattgatgcgcttcagaaaatgattcagggtagatttagacaccttcctgttgtggaaaatggtgaagtcattgccatgctggatatcaccaaatgtctttatgatgccatatctagaatggagagcgctactcaacaggggagtgccgttgctgcagcagttgagggagtggaacttcagcgaactactccaaatactttcattgaaacattg

SEQ ID NO: 11697 - DNA, 443 bp, Glycine max
  Clone ID: jC-gmle01810055g02d1
aataatattgtaattgatttcatcaaatggcttgaccttgatggtgatctaactgataatatctggacgcaaaagtcgtaagtgatgaaagttgataaatatatggaattacaagtaccttaattgagaagaacatggtgacacttcagtattgcatgccacgactatatctttggttctaattacatcagtgactcaaaaagaaaaagataattaaaaacggctgattagagagactccacatcatccacctattccgtgtccatcatttcctttgtcaacgagcatttgatttatgacgaaactctgggattcatagagtaagatatagcatgttttgttttcaagctggcaaacatattactgtctagagcgctttaagtacaccaatacgctaatgctcgttagaacaacaacacctgcaaaaataccagaacggagac

SEQ ID NO: 11698 - DNA, 580 bp, Glycine max
  unsure at all n locations
  Clone ID: jC-gmle01810055g03a1
ggaagagtcggctcctgctccgacatcactgctctcactgaacgtgatgctgttttcctttcaggaggaccagactatgagattcctttgggaagaagagatgggctaacctttgccacaagacaagtgacattggacaacctttcaccaccctcaagcaacgcttcaaccatcctaagctccctcggcaccaaaaacctagaccccaccgacgtcgtagcgctctcaggcgggcacaccataggcatcagccactgcagctccttcaccaacaggctctacccgacacaagaccccgtcatggacaagaccttcggcaacaacctcagacgcacgtgccccgccgtcaacaccgacaacaccactgtgcttgacatccgatcccccaacaccttcgacaacaagtactacgttgacctcctgaaccgccagggcctctgtacctacgaccaagacttgtacactgataaaaggactaagggcattgtcaccgactttgccgtcaaccagaacctcttctttgagaagttngtgttcgctatgctcaagatgggtcagcttaatgtgctcaccgggaaac

SEQ ID NO: 11699 - DNA, 421 bp, Glycine max
  Clone ID: jC-gmle01810055g03d1
gaaaacaataaatgagaagctctcattcggatttttccattataactgaggtacaagtagctagctagggccattagacaatggttccttatcacaaaaaaaagccctctgctgggaacaagaaacaagggcttatcaattattcatcatcaccacaacatatatatacaacaaacatacactatcatgcatgcatcgacccagtcacattacatttctatcaaagtttccaccacatcttccaccacagaagtcaagagggacttgttattggcatttctaacggagcaattggcacgaatctccccttgtttcccggtgagcacattaagctgacccatcttgagcatagcgaacacaaacttctaaagaagaggttctggttgacggcaaagtacgtgacaatgcccttagtccttta

SEQ ID NO: 11700 - DNA, 550 bp, Glycine max
  Clone ID: jC-gmle01810055g04a1
ctaaggtcattagattcttattttggaaaactccaagataatgcaaaattgcgtacatttgattcatcacacaaggtgatacagttgcatcacatagatcgtcaagctagatcaaaaactggactggaatctcttgaggagtatcttggcaactaaatcatgaagcaaaccaagaaccttgtgtgccatcgtatgttgagaatcatagtgaagaaaatttagcaccaaaacgatctctcagcaaagatattgaaagatcaaactttaggaaacaaaatgcttttgtggatataagaaggctaaaacgtttacatgatccaaggtctgctatagattcacagcagcaagttgaaacctccagtctctacctaattggcatattggcttctgtaaacattgcagtgtttctatttgaaatagcaagtcctataaggacttctgatttagagctggtttctattccactactatatggagcaaagataaatcatttgatcatggttggagaatggtggaggcttgtaacaccaatgtttctggtacacaattg

SEQ ID NO: 11701 - DNA, 557 bp, Glycine max
  Clone ID: jC-gmle01810055g05a1
aaaaaagaggagcatcacggccatgatcgcattttgctgaggctaaaaagataagcaaagcgtgaaaaatcgcaaaataccaaatcaaaataacaagcacaattacagtgactccgcttgggtcctcttctttgatcttcggtttgattctgcgtttgttcacatcatggccaccgtttcagtggcatttaagtccagggaggaccaccgcaagcagattgagttggaggaggcgcgtaaagcggggcttgcgccagctgaactcgatgaagatggaaaggaaatcaatccttacattccccagtatatgtcctctgctccttggtatcttaatgctgagagacctagtttgaaacatcaaaggaaatggaaatctgaccccaattacaccaaatcatggtacgatagaggtgctaaaatctttcaggcagacaagtatcgtgaaggtgcttgtgagaactgtggagctatgacacatgattcttaatcatgcatgtgaagaccaccgagagtgggagcataatggacaaacaaacacattgctcctgatgaaaaga

SEQ ID NO: 11702 - DNA, 568 bp, Glycine max
  Clone ID: jC-gmle01810055g06a1
ggctgctgcagcagcagaagaagctatgtgataacatgtgcagcaggtgactcacagacagtggtgattggcctggctgcagactcagggtgtgggaagagcaccttcatgaggaggctgaccagtgtgtttggaggaacagcagagccaccaaagggtggcaaccctgactccaacactctcatcagtgacaccaccactgtcatatgcttggatgattaccactctttggacagaactggaagaaaggagaagggtgtcactgcccttgaccctagagccaatgattttgatctcatgtatgaacaagttaaagctcttaaggatggaattgctgttgaaaaaccaatctacaaccatgtcactggtctcttggatccccctgagctcattaaaccccccaaaatcttagtcattgaaggtttgcacccaatgtttgattcccgtgtcagagatctcttggactttagcatctacctagacattagcaatgaggtcaaattcgcttggaaaattcagagagacatggcagagcgtggacacagtcttgaaagcatcaaggctagca

SEQ ID NO: 11703 - DNA, 554 bp, Glycine max
  unsure at all n locations
  Clone ID: jC-gmle01810055g07a1
cgcaagtccacaacatggctgccactgccgctgcaggcatagcttccttgttttcttcttctattaacagtgtcaaatgtcttcgttcctccaagaactgctccattatagacccccttataaccacagtgccctcaaaccgtggcatgtttgtgtcacacttggtggaacctttgtccattgggggtgccattaattcgcacaagttgtgggggcctagaatttctgctgctgttgcacaagaagaggctgttgttgtggctgatgatgaggtagatgatggtgctggtttagttgaagaagagaaagtggaggagaatgaaggagaagtagttgcagaacaagactctgattcctctgccaccaagctttattttgggaatttgccttatagtgttgatagtgccaaacttgcagggctaattcaggattttggtagcgcagaactaattgaggttctttacgacagggatactggaaaaagtagaggctttgcatttgtacaatgagttgtattgaagactgntatgcagtaatagaaatcttgatggaaa

SEQ ID NO: 11704 - DNA, 579 bp, Glycine max
  Clone ID: jC-gmle01810055g08a1
aaataaaagtgcccccattttcccaaaatcaccatctagagttttctcttttccactgaaaatcaaattagggtttggatttcggaattgccacagaatcatggccactctgaaagagcttcttcctcctgcaaaatcctcctccaccgtctactacgaccacaccaacgatccatggttcaagcagcgtttctcctcagaagaggaggagaaatccgccgccgccgccgccgccaagcagaagcccgttcccccctacctgaagcgcgccggcttcgttcctcggaaaatcgaggacttcggagacggcggcgccttccctgagatccacgttgcacagtatcctctcgacatgggaagagaaaagtccggcgccaaacctggatccaaaatcctccctgtcaccgtcgacgctaacggcaacgttgcctacgatgccatcgtgaggcaaaacgagaacgcatgaaaaattgtctacacgcagcagaaggatcttatccctaagtttctcaagaacgacgaagatgacgacgacgtcgtttccgacgacgaagcacatgaacagatcgaggaaacgat

SEQ ID NO: 11705 - DNA, 483 bp, Glycine max
  Clone ID: jC-gmle01810055g09a1
cgacctcttattgatttgtgcacaaaaccacttaattttgaccccaactccattctcctctagttctcccaccatggacctttgcatcaacacacgcaccccccacacgccgcatgatcgcttcgccaccacacgccgcggttgagatgttgccgccgacgacgcagacgaccctcccctctctgacggatctgctgctcacggccctctccgtctgcttcctagtctcctactcgaaggcccacatgggtggtgccacccgctgacccttgccgagtggattcctcaagatccccgccatgtgcctcacaacgataacaacgacctcaacatactggaagaacaacgacggcctcaattgccacctacctccgcggcggcacaggttcgcgtccccgcagtcgctctcggaatggctgaagccgcggctcccctcggaatccttcgcctagtgcggcgtgaagcccggaacgaagaacgtgc

SEQ ID NO: 11706 - DNA, 563 bp, Glycine max
  Clone ID: jC-gmle01810055g10a1
gggacaggaatggttaaagctggatttgctggggatgatgctccaagggctgtgtttcccagcattgttggtcgtccccgtcacacgggagtgatggttggcatgggccaaaaagatgcatatgtcggggatgaagctcagtccaagagaggtatattaactctcaaatatcccattgagcatggtattgtgagtaactgggatgacatggagaagatctggcatcacaccttctacaatgaactccgtgtcgctcctgaggagcacccagttctgctcaccgaagcacctctcaacccaaaggctaatcgggagaaaatgacccaaattatgtttgagaccttcaatacccctgccatgtatgttgccatccaggctgctctatccttgtatgccagtggccgtacaactggtatcgatctagactctggagatggtgtgagccataccgtcctcatttacgaaggctacgctctccctcatgccatacttcgtcttgacttatcaagacgtgatctcactgatgccttgatgaaaatgctacagacgtggtatttctttac

SEQ ID NO: 11707 - DNA, 597 bp, Glycine max
  Clone ID: jC-gmle01810055g11a1
ctgcatcagcatctcttctcaagtcttcacttgttcttgacaagtctgagtgggtgaagggacaaacacttcgccaaccttctgctgcatcagttgtgagatgcaaccccaccaccccatcaggcctcacaatcagagctggttcctatgctgatgagctcgttaagaccgcgaaaacagtggcttcaccagggaggggtattttggccatggatgagtccaatgctacctgtgggaagcgtttggcttcaattgggctagagaacactgaagctaaccgccaggcgtaccgtaccctccttgtgacagttccaggacttggtcagtacatctctggtgccattctctttgaggaaactctctaccaatccacaactgatggcaggaagattgttgacgtgctcctcgagcaaaacattgttcccggtattaaagtcgacaagggtttggtaccccttgctggttccaacgatgagtcatggtgccaaggtcttgatggtcttgcctctcgctcggctgcatactaccagcaaggtgcccgtttcgccaaatggcgtactggtgtgagcatccccaacggtccctctgttctgcagt

SEQ ID NO: 11708 - DNA, 584 bp, Glycine max
  Clone ID: jC-gmle01810055g12a1
aaaaaagattctaaagaaatataactaatattctttagaataatcaaaaagaatattaaattcaaataaattttagatagaaaaaagacttaaaaaggaggatttgaaatgcgagatctaaaaacatatctttccgtggcaccagtagtaagtactctatggttcggggctttggcgggtctcttgatagagatcaatcgtttttttccagatgcattgatattcccttttttttcattctagttattgacacggaaaggggtgaagaagattatagatccaattaagtattaaatatatgtaattaatatgtaattaatctcctcttctttatttcgtcttttatttcttctcttttttacaattgtaatagaataagttaggaaagagaaagaataagggttaatttggcctaattgaaattcggagtgaaactcgggatctcgtccaggcttccatggaattgaattaataattcaattccatttctattaataaaagagtgaaagcagaaatttaaatggaatgtatagggtggtggcaacaatatcataaaaaatcttagttaaaaaacgaaatactga

SEQ ID NO: 11709 - DNA, 559 bp, Glycine max
  Clone ID: jC-gmle01810055h01a1
tgctcttgcaatttgtcagaggttgacgagatacaaggattatcaagagcaaacagtccagtgtaaggaatctaacaaggacaggctctgtgttgatgtcctggagagggagatgagaagaaattctatgactgtgaatatgtctgtttcatcacagctaacagccaatgatttgcacatgagactggattaccttgaagatagagttgcatttgctcggctgttttttcctgctgaggctagggtagccattgagaatgctgaagcagattcatcgtcgatgtacgcaaactcatcggctttgaagggcacaaatggcaacctgaaacaagtagatctaaatgaatctccctctgctcataccagaaaacttcagttaagattacatgcccttatgaaaacagttgagaatggtaggcgcttctttccccattgctctgaagtgcttgataagtttctggaagatgacgatatgccagatgttttcttcctagagaagggcagtgaagacgagcagagaatcaagatagcacgcttcatggaacttaaagatgatgtg

SEQ ID NO: 11710 - DNA, 565 bp, Glycine max
  Clone ID: jC-gmle01810055h01d1
aaatagtcttgcatgtcatctttaaagtaattattacaggaggtgagattttcaattatataacaatctaggatcatataacaaagtaaaaaatacacacttttgggtcttggaaaaggaacaaagatattactaagccaattcgtcttccattctttccttcttctcttctcttggtccaacaactataagaaactaaatcaagctagtaaaaatctcccatgttcatcagcaaaaacccctaatttaacagaacatcttatttgccaaatatgtcactgcttctacttgcaagttgcaacactctactctagaagaacatgggcttcattttctcctcactctatggttaagaccttccctacgagttgaggaagatgaggaagacaccgtagatgaaaaaccagaatggttattttcagccatatccttgtgaaatgccttctgcacatcatctttaagttccatgaagcgtgctttcttgattctctgctcgtcttcactgcccttctctaggaagaaaacatctggcatatcgtcatcttccagaaacttatcaagcact

SEQ ID NO: 11711 - DNA, 553 bp, Glycine max
  unsure at all n locations
  Clone ID: jC-gmle01810055h02a1
tcaacttttacgatgttttcttggggcagaagattccaactctctctacggtatagcataaggccgtttggcagccaatcacaaggctccacgtcatcatcatcttcttcttctttcagctcctttggtgggtccaggcatggtgacaatagggtcagagactttgaggcctttcttagatcaatcacttctggggttgtggttgttagctccaccttaggctattggtattggtcatctttgacttctcctggtgccaattctcttcagtcatttgctgatggttatgctaatgaagaggatcagtttcaacaaaacgatgaaaacaaacccaagttcctctttaatgatggctatagaagaagagtattcttcaattatgaaaaacgaattcgcttgcagagccccccagaaaaggttttcgagtactttgcatctgttcgaagccctagtggtgagatttttatgacacctgccgatttgatgcgtgccattgntcctgtctttcctgcttctgagtcaaaccgtgttaaagagggttttctaagagggg

SEQ ID NO: 11712 - DNA, 524 bp, Glycine max
  Clone ID: jC-gmle01810055h02d1
ccctaaatgatgttgtatatggttgaattcattacagtaaaaagatggatacttatgaacgtattccatcaaaattgaactgagctgatgaacagttttttacacagttcaaccaacaggatgttaaacccccgaagctgtcatgacgtgatgaattgttgctttcccttctttgtacaactctcacaaactcggctgcacttaagcttccgtcacgatttgcatcaaacacatgaaagattatgtcaaccacttcatctgtaatgcaaacaccacacacttgtgatgctgcactctgaaaatcagattttgtcaatactccattaacttttccataactgaatatggccagagagaaggatttcaatttcttgcgtaattctgcaaaatcttgaaacttcttgaatgtaattcttatgtgtcttaggttctggtcactgtttaattcttcgaccctatcaatagtttgtttatgtgattgatgtccgcagatgcaaccaaggacagggcaaaatctctggctg

SEQ ID NO: 11713 - DNA, 600 bp, Glycine max
  Clone ID: jC-gmle01810055h03a1
gacgaagcatacgaggaagagcttctcgattacgaggaggaagacgaaaaggcccccgactccgccggagctaaagtcaacggcgaagctaccaagaagggctatgttggaattcacagttcgggattcagggacttcctttctgaagccagagcttcttcgggctattgtggactcgggatttgagcatccatctgaagtgcaacatgagtgcataccacaagcaattctcgggatggatgtaatttgtcaagcaaaatctggaatgggaaagactgctgtctttgttctctctactctgcagcagattgatcctgttcctggccaagtttctgcactggttctttgtcatacaagagaattggcataccagatatgccatgagtttgagaggtttagcacttacttacccgatctcaaggttgctgtctgttatggtggagtcaacatcaaagttcacaatgatctgctgaaaaatgagtgccctcatattgttgttggaacaccgggaagaatactagcattgactagggataaggacctttctttaaagaatgttagacatttcatattggatgaatgcgacaagatgctggaatc

SEQ ID NO: 11714 - DNA, 355 bp, Glycine max
  Clone ID: jC-gmle01810055h03d1
gtaaaataaaaaaataaaaggccgggggagggccaacaaaaaacaggcccggttaaagacccagaagaggggcgccaccaaacaggggcgaggaacacccggagaaacaaaacgagggccaacgggccaggaacgaagcccgaaaaagacccaggggaaaaggggcccccatgggaaacagacttggggaccaaaaacagcgaagaaacaagacaccaaccggtggggcggaaagctccagggggccaacaaccgtaaaggaggggacaaaaagaggaaggggggccaaatgcagcaaagaaccagcctgggcaggggggagagctttaacacacggaaaccgggaaaggaatgg

SEQ ID NO: 11715 - DNA, 580 bp, Glycine max
  Clone ID: jC-gmle01810055h04a1
cttttcagatattttcactgctcaacttaagactaagcatgagcagcagcagcagcagcagcagattgtttgagaatgggtgaagtgccggctgtgatgcaggcgacgcatggggaacagagcaacaatgcctccgctgttcattgagagcgctttctgcctcggatggtgcttcgggtcttgcttgtcgaagctgatgattctactcgacagatcattgctgcacttctccgtaaatgcggttacaaagtgatgtcttctcatgattcagtaagcatggtgtttaaatgcatgttaaaaggtgcagctgattttcttataaaacctgttcgcaagaatgagctaagaaacttgtggcagcatgtatggagaaggcacgccataagcaggccttctcaaaatttaacactgccggagattgaacttggttttgctgcagaaaaccatgctgcaagcaatgactctagtggttctgtggcttctacaccaaaagatgaaatgcagtgagaatacaagtgatgctcatagcacttgcccatcgtcatctttggaagctgagaatacctacatggaaaatatg

SEQ ID NO: 11716 - DNA, 573 bp, Glycine max
  Clone ID: jC-gmle01810055h06a1
ccataataaaaaaaaaaactttgcaatttcgtaggagatgctcaggagcagcacgctaacacagagtgttacagtcacctgtgttcatcacagtcacagacaatggttccaatcaattcccgtaaattatagattctgtgacgctgctcggaactctctatcatccaacttcgccatcttcaagtggaaaagaacggctaattataatcgtaaccgttctggaatgggaaccttcaccacgcgcgcgttggcgcagccgctccagaacgccgacgaactcatcgattccgtcgagacatttattttcgattgtgacggagttatatggaaaggtgacaaattaatagaaggggtgcctgaaacgcttgacatgcttcggtcaaagggcaaaagattagtttttgtcaccaataactcaacaaagtctaggaagcaatatggaaagaagtttgaaacacttggcctgaatgtcagcgaggaggagatttttgcatcatcctttgcagctgctgcatatctgaagtccattgatttcccaaaagataaaaaggtttatgtcattggagaagatgg

SEQ ID NO: 11717 - DNA, 513 bp, Glycine max
  Clone ID: jC-gmle01810055h07a1
ctctcctatgccttataactttacctttctatcctcatggagtagtaaagaagtcactaatcaaccacaaacctaaacaaccccttttgcctaaagctccttccttttctccaatggcaacctgggttttatcaaaatgtggcttaaggcctctttgaccagtgtttccacggtcaacaagacccattgcgagccaaaaaccttcaaagtctagatttttaagcacaaacaagggtgcgccagatctgaatctccaagcaagagggttaacatgctgtagttttagggatagaaagtgggaattgggagtgagtgctccactgaaagttgccaccaatgagggagaggaagaagagagaaccaatggggctaataatggggtcggtgatgaagtttcagaatttgaccctagtgcaccaccaccctttaaattggcagatattagagctgccattcctaaacactgttgggtgaacgacccttggagtccatgagttatggtgatagagatgt

SEQ ID NO: 11718 - DNA, 485 bp, Glycine max
  Clone ID: jC-gmle01810055h08a1
gttcatctctgagggtggcctgcgggccatagactccctctggagggagtacagtggcgggaaattcgggtacagcgtgcagaagaagctactggagaaggccaatggggacttcaccaagttcttcatcaaggatgggtggatgaagaagcttgacactgagatggagcaatacaactacaggtccttccccactgagttcatctgggagctcaatgatgacaccccagaggggcatttgcctctcacaaacgctctcagagggacacagttgctcaacaacgttctcaaacacccagcttttgatgtagttgatgacatagaagaataagaccaagatggtgagaacaatgaaaatggaggagcaatctctggcacaggattaaaggataatggttcttcttcaaagaggatcttcaaaacggactatagcttctgagtgcatataggaatggatgtactataattaggaggtgtaaatttac

SEQ ID NO: 11719 - DNA, 573 bp, Glycine max
  Clone ID: jC-gmle01810055h09a1
gtgataattatgtgtatgtgaaacaatttgatgataatagatgtgtcattttatgtatgtatcttgatgacatattgatatttggtggtaatatgcatttcataaattatgtgaagtccttattgtttagaaactttgacatacaagaccttggtcaagtacatgtgattttgggaattaagcttataaagaaaaatgatggcatgacttttacccaatcttattatgttgaaaaactattgaagaagtttaattattttgatgcgaaacatgcttttactccttatgactcatccatgaagttaaagaaaaatttgaataatggaatttcttcacataaatattctcaaagtatcggttctttgatgcatttgacaaatttctctaggtctgtctaatattgcacatgcagttggtagattgtaaagtaattgaagaatttagtgatacaagattgaagttctgattatgatgaaataaaattgacgagtgattatgtctctgctttagctggatgtgcagtatcatgaaatattactagacatatgattatttcgtatgaaagcaaaaatt

SEQ ID NO: 11720 - DNA, 573 bp, Glycine max
  unsure at all n locations
  Clone ID: jC-gmle01810055h10a1
ggataacctatgaccatgataaataataagtcttcatactttcactgactattagagttgtagtttttcaccataagccatgaggctccttagcatcatcaccacctccttaacactattcttccttcttctctttctctccatagagctccaagcgtacaccccagaagacaacttcaccatcagttgtggcaccaccgggatagtcttcgacggccaaaggacatggacgggggacgcagacacaaagtacttatctggtggtcaaggcagcaccgttttaacccaagcagcaacacaagatccttctgtcaatcaagttccctacaccacagcacggttatccccttctcagttcaattactccttccccgtttctgcgggccccaaattcgttcgcctcttcttctacccggctgattacccttcctttccccgcactgatgcctctttctccgttcaatctaacggattcaccttcttaataggtttcaacgcctctctaaacgctgacgcngaagccaccaaaaccattctcagggaatatgtggtcaacgtcaacgacggtgagac

SEQ ID NO: 11721 - DNA, 563 bp, Glycine max
  Clone ID: jC-gmle01810055h11a1
gtcgcaaccaatagggaaaccggagcattatgtgcaatgaaggaagtagagttatttcctgatgatccaaaatctgcagagtgtataaagcagttagagcaggaaattaaagttcttagcaatctaaaacattcaaacatcgtacagtattatggcagtgaaatagttgaggaccggttttatatttatctggaatatgttcatcctggttcaattaataaatatgtccgtgaacattgtggtgccataacagaatctgttattcggaatttcactcggcatattccctcagggttggcttatttacatagcaaaaaaaccattcatagggacatcaaaggggctaacttgcttgttgactctgctggagttgttaagctagctgattttgggatggctaagcatcttactgggtttgaagctaatctttctttgaggggaagtccatactggatggctccagagcttttgcaggctgtgatacataaggataacagccctgatcttgcttttgctattgatatttggagtttgggttgtaccatcattgaaatgttcactgg

SEQ ID NO: 11722 - DNA, 584 bp, Glycine max
  unsure at all n locations
  Clone ID: jC-gmle01810055h12a1
aatggcaactggatctaccttgtgacaaaattcctagtgtcttgactacaactgatgagagattggtaggcacagaacatgagggatatgatccttttcttggtggaattcaaaaatatgccactcccatgatgcccctagatgaagaaattctttctaaagttgcacaagatatggttgaggaatggtttgattgtgttgatgaggaggattcctttgaggaagtttctttaagtgcagcacttaatggtgttgagggtttggactatatggaaagaattcctcttgccacatctgagggttttcctcatgtgctttcacgcaaaaatggtgaaaaaggcaaaagaagatttgtttctggggatggtgaagagatgacattgattccgggaaccagtgttgaagaggcttacaacaagctaatagttgaacttgagaaaagtgttcctacattggttggcattgaatgtcccaaggatgagaaacttcctcgtcgcanaatttttgacaaacctaagacgcgctgcttcactattctccctatgaagttaatcttgggtccgtcaaaagtttttaaaatttgg

SEQ ID NO: 11723 - DNA, 547 bp, Glycine max
  Clone ID: jC-gmle01810056a01a1
cgtccatggccactttcttcacccaaacctccttcccctcccactctctctccaaaaccttcgatacccatttcgccccatccccgaaagtcaacgtatttgcgaacttcccggcgaggaggcacgtgggggttcgagtttcgaacgcgctgatcgaaccagacggagggaagctggtggagcttgtggtgagggataattcagaaagagacttgaagaagggtgaggctctttcgttgccgaggatcaagctttcaaggattgacctggagtgggtccatgtcctcagcgaaggatgggccacacccctcagaggcttcatgagagaagccgagttcctccaaacgcttcatttcaactctctccgactcgatgatgggtcggtcgtgaacatgtcagtgcccatcgtgctggctattgatgatgcccagaagcataagatcggtgataacaaaaggggttgctctttcattccaagggagaccctgtttgcattctcaatgatggtgagattataagcattctaaagatgaaagatagccccgac

SEQ ID NO: 11724 - DNA, 546 bp, Glycine max
  Clone ID: jC-gmle01810056a02a1
gcagagatccttaaagatcgtccatcttggttccgtgactgtcggagcctagaagtttttactatgtttcctgctggaaatggaggaaccattgaacttgtttacacacagacatatgctccaacaacactggctcctgctcgggatttctggactctgagatataccacaagtttggaaaatggcagtcttgtggtttgtgagaggtccctgtctggttctggaactggccctaatccagctgctgctgctcagtttgtaagggctgaaacactccctagtggctacttgatccgaccatgtgaaggtggagggtcaatcattcacatagtagaccacctaaatctcgaggcatggagtgtgccagaagtgttgcggccactttatgaatcatccaaggtggttgctcagaaaatgacaattgcagcgcttcgctatatcaggcaaatagctcaagaaacaagtggtgaggttgtttatggattgggtaggcagcctgctgttctgcggactttcagccagagattgagcagaggcttcaatgac

SEQ ID NO: 11725 - DNA, 304 bp, Glycine max
  Clone ID: jC-gmle01810056a03a1
ctcgagccgattcggctcgagcatggttgtacttgtatatacatatcttgtcccacctttgtaaatacaattgggacactactaggattgggaagaagggtctttacatttatagtttggcaaatagatattgcaactacctttgtataattctatttctgaagaagcaattacaatttacaagggatggtgccatttacggcataaggattaaggagggataaagggaccaattgctttggaatatccactcattacaatgcatgtatgacaacacatagtaatatgatgtgtgtttttattc

SEQ ID NO: 11726 - DNA, 532 bp, Glycine max
  Clone ID: jC-gmle01810056a04a1
cagaagcttgtgatttagtttttgatgcagcaagtgagggaaaacaattcttaattgttggtacaaaaaaaaaagcagcggatttagtagcacgggctgcaataagagctcggtgtcattatgttaataaaaagtggctcggcggtatgttaacgaattggtatactacagaaacacgacttcaaaagttcagggacttgagaatgcaacaaaagacggggagactcaatagttttccaaaaagagatgccgctatattgaagagacatttagctcatttggaaacatatcttggcggcattaaatatatgacggggttacctgatattgtaataatcgtcgatcaacaagaagaatatacggctcttcgagaatgtataactttggaaattccaacaatttgtttaatcgatacaaattgtgacccggacctcgccgatatttcaattccagctaatgatgatgctatagcctcaattcgattaattcttaacaaattagtatttgcaatttgtgagggccgttctagcta

SEQ ID NO: 11727 - DNA, 584 bp, Glycine max
  unsure at all n locations
  Clone ID: jC-gmle01810056a05a1
cgagccttatctcaaaagttcttcttttgcaaacactgtccaatttacaaactctccacctcacataatggtttcaaattcaatgttaatggcttcttctctgcattcaccttgcaccctcttcagttcccacaagctttgttcttcttcgatcaaaaccatctcaaaacaaagccacacatttctccatagaaatccctctctccatcgccctttgagtttgggttccaaaagggttcttccttcagtttgcttctttaatactggagacaaatctgactccaaggaatcgggatggcctattctcaagcgatgggaggtgccttggcaatggcaaacagtttcactgacctctcttgcctgtggattgggttttgtgttgacaggtttgactgaagcaattgccttaccatatctcgggatcaaacctgatgtgctaagtttagatgacaaggcagagatacttttattcgatcagagcatcacaactgctgttgtacttggaatcatatatagtgttgccaacactttccagccacttnctgaagacttcttcaaatacgatttgagggaacctttcaatc

SEQ ID NO: 11728 - DNA, 577 bp, Glycine max
  unsure at all n locations
  Clone ID: jC-gmle01810056a06a1
accgaactcaacactcgcagcaccgccatgagtgccgccacttcctccaccctctccaccgtcaccgatgccaatcttcactccagatttcattctcgtcttgttccattcactcatcatttctcactttctcaacccaaacggatttcttcaatcagatgccaatcaattaataccgataagaagaaatcaagtagaaatctgctggacaatgcaagtaacctcctcacggacttattaagtggtggaagtatagggtctatgcccatagctgaaggtgcagtctcagatctgcttggtcgacctctctttttctcactgtatgattggttcttggagcatggtgcggtgtataaacttgcctttggaccaaaagcatttgttgttgtatcagatcccatagttgctagacatattctgcgagaaaatgcattttcttatgacaagggagtacttgctgatatccctgaaccaataatgggcaaaggactcataccagcagaccttgatacttggaaagcaaggagaagagtcattgctccggcttccataactcatactnggaagctatggtaaa

SEQ ID NO: 11729 - DNA, 556 bp, Glycine max
  Clone ID: jC-gmle01810056a07a1
ggctcgagggttcagttaattagtttctctctttgcactttctcttgtttccacaaagccatgaaatcacgtcctttgcacatagcaatgtatccatggctggccatgggtcaccaaaccgcattcctccacctatgcaacaagttagccattaggggccacaaaatctccttcatcaccccaccaaaagcacaagccaagttagaaccattcaacttgcacccaaattcaatcacctttgtcaccatcaatgttccacacgttgaaggccttcctccagatgcacaaacaacagcagatgtcacttaccctttgcagccacagatcatgacagccatggatctcaccaaagatgacatagaaacccttctcactggcctcaaacctgacctcgtcttctatgacttcacacattggatgccagccttagcaaagcgtttaggcatcaaggctgtgcactattgtactgctagctctgtcatggatggttacactctcacaccgtctagatttcaccaaggaacagacctaatggaaagtgatctcatggaacccc

SEQ ID NO: 11730 - DNA, 575 bp, Glycine max
  Clone ID: jC-gmle01810056a08a1
acagagtgcgttgttgctccttcgccacaactccctgccaacatgggtatctccagagattctatgcacaagaggcgtgccactggtggcaagaagaaggcatggaggaagaagagaaagtatgagcttggtcgccagcctgctaacactaagctgtcaagcaacaagacagtcaggaggatccgggttagaggtggaaatgtgaagtggagggcactgagattggatactggaaattactcctggggaagtgaagctgtaactcgcaagactcgtatactagatgtggtttacaatgcctcaaacaacgagcttgtgcgtactcagactcttgtaaaaagtgctattgttcaagttgatgctgctccattcaaacagtggtaccttcagcactatggtgttgagattggtaggaagaagaagacagctgccaagaaggaaactgcagaggagggtgctgctgctgctgctgtggaagaagccaaaaagagtaatcatctgcagagaaaattggagaagcgccagaaagatcgttagcttgatgctcacattgaggagcagtttggtggtggccg

SEQ ID NO: 11731 - DNA, 507 bp, Glycine max
  Clone ID: jC-gmle01810056a09a1
gttgcgctgaaatagagacaatcggttggggttggtagtgttgcgttgcgttgcgtatttgtgaaattgatgcagcgcggtgctcgctgaagtgaagtaatcccttttggttgtgttgtgggtaatgcttctcagtaattctagtccaccattttcatttgtctcaggaatcactatgagtatgactaagggaataactccaagagattctcttttgctgaagcccaaccctttatcttctcttagttcactccattctctccagcatggtaacaatacgattagagttcctgtgactataagaattcaaccagagaggttttgtcatggtgcgctaaccatcaagaatgaagtgccgcaaaatgctgattttcctcgacagtattccagaaaagagaagaaacctttttcagttcccattgtagaactgcgacgagcagctagggagaagatgatgaagatgaaagatgaacccgagaaaccaatgtcagcacctaagaatgggtt

SEQ ID NO: 11732 - DNA, 407 bp, Glycine max
  Clone ID: jC-gmle01810056a10d1
ccccctgggatctaaaagattaattcatacaacagagtttaaataacctgcattacacgcttcccttacctttcccactttttactcctatcccccaagttcaaaagaatgctcaaatgcgggtaacttgcacaattattttttgaacaagctagccagttcacctttctcatacatggggggcaatatatcacaacccccaaccagttcaccatccacaaaaatctgagggaatgtgggccagttgctgtactttttaagggtttccctcaattcgtaattatactcttcgtcgagcacatttacactctcataatctactccttcattttcaagaatggctatcaccctctgtgagaatccacataagggtgcacttctagggcccttaatgaatgcaactacct

SEQ ID NO: 11733 - DNA, 509 bp, Glycine max
  Clone ID: jC-gmle01810056a11d1
agttattccgatattcggacgcatcaacttgttatgaaatcacattgatagcctctactcgtgtcctagctcgtctaagagctagatttgcctcaattgtttgtctcttgccttccgccttattcaaattagcttctgctatttcaagagtttgctgtgcttcttgtggatcaatgtcactacccttttccgcatcatttactaaaacagtgatctcattattgtttattctagcaaaaccgcccatcagagccatcgttaaccattggtctttaagaagacgtattctcaaaatacctatatctacggctgtggcaataggcgcatgatttggtaatactccaatttgtccgctattagtagataaaatgatttccttcacttccgaatcccaaacaattcgattgggggtcagtacacaaagatttaaagtcatttcttcaaattgctctccatttctaagttcgtagctttcgcagtagcttcatcgatattacctaccaaataaa

SEQ ID NO: 11734 - DNA, 582 bp, Glycine max
  unsure at all n locations
  Clone ID: jC-gmle01810056a12d1
gatacgtaaaacaacgctttgaactttccatctttacatcatgcatttacaagggttttgagggagacatttgaagaaacagaacaagatacagaggaaacctttctcgtctattgccccttgacacaacatataggaaaaactatatgaatatagtgagacaaaatgattaaaatgaactatggacagctatagggaactgaggatgtcttttattattgacaaaatagggttgccaaaaggatattcttccaatgtctgaaactttattccatccatccgggcttgaactccatcagaaaatgtcaagccctgaagcagttcctttgccgttctgtcagctccaacgagggaactccctacgcctaacaaaatctcgggtagagaagggctggctctagagatctccacaagtgtaacctgtctgtcttgaggtatatcagccttcatttttgctatggcaatagctcgagaaaggccaccaatagcatcaactaaaccacgcanagctgcatccttaccagtccaaacccttccctgtgcaaactcctccatcttttctacagtcattgatctggatga

SEQ ID NO: 11735 - DNA, 579 bp, Glycine max
  Clone ID: jC-gmle01810056b01a1
gcagagatccttaaagatcgtccatcttggttccgtgactgtcggagcctagaagtttttactatgtttcctgctggaaatggaggaaccattgaacttgtttacacacagacatatgctccaacaacactggctcctgctcgggatttctggactctgagatataccacaagtttggaaaatggcagtcttgtggtttgtgagaggtccctgtctggttctggaactggccctaatccagctgctgctgctcagtttgtaagggctgaaacactccctagtggctacttgatccgaccatgtgaaggtggagggtcaatcattcacatagtagaccacctaaatctcgaggcatggagtgtgccagaagtgttgcggccactttatgaatcatccaaggtggttgcttagacaatgacaattgcagcgcttcgctatatcaggcaaatagctcatgaaacatgtggtgaggttgtttatggattgtgtaggcagcctgctgttctgcggactttcagccagagattgagcagaggctttaatgacgctgttattggattcaatgatgaatggttgact

SEQ ID NO: 11736 - DNA, 595 bp, Glycine max
  Clone ID: jC-gmle01810056b02a1
gatggccagaaaatgatcagtgaccttatgtcaatctatgatacaaattttcaaagcaacaagaacctaagttccagtaaccatgtagctgcagaaaatcccagccttcctcagccaggcattcggcagcaacaggacaacttctttcgcagtcaaggaatcactatggaaggaaacttctatgaagaagccaacatgcccaacaatcatcacatgtttgcaagagaggaaagtcaatttgaccggttcaaagctttgaatgcaccaccctttgagagcaatcacaacaataacttccatttgatgtttgggtccccttgtgatttggcatcctttgatttcaaggaggatatgcaaggaggaggagggatggatgctcttcagaaacaggcagatatctctatttggtatcagtgaaaatgacagcttaaagctggaaacctcatcatcattatcatctatcatggactctttattttccttccaaaagggttggcacccctgatcatgtgaagttcctttggccaaaaaagggttcactgcaattttcttcacatggtatcctggaggcctagtagaactaaaatatttaagc

SEQ ID NO: 11737 - DNA, 594 bp, Glycine max
  Clone ID: jC-gmle01810056b03a1
cacaactatttcaggatcatcaaaacaagaaagcaatgagggtagccgtcttttcaagataatggcaaaatccttttcaaaaagatggcagaatggagaaataagcaatttccagtacctcatgcatctaaacaccttggcaggacgtggatatagtgatctcacccaatatcctgtctttccatgggtccttgcagattatgagagtgaaaatcttgatttgtccaacccaaaaacatttcgtaggcttgataaaccaatgggttgccagactcctgaaggtgaagatgagtttagaaaaagatatgagagctgggatgatccggaggtcccaaagtttcactatggatctcattattctagtgctggaattgtcctattctatcttctccgcctacccccattcagtacagagaatcaaaaacttcaaggtggccagtttgaccatgctgatcgccttttcaatagcataaaggatacttggcttagtgctgctgggaagggaaacacatctgatgtgaaggaattgattccagaaattttctacatgcccgagttcttggagaatcaattcaatcttgacttgggagagaa

SEQ ID NO: 11738 - DNA, 583 bp, Glycine max
  Clone ID: jC-gmle01810056b04a1
ctagaatccgtcgagtattaaaattggttgtagcgtacgctcactatgaacacgcgcctcttcatcctcattgctctctcactctcttcttcttcgccgtttcttgtcggccttcgctgttcactctctcgctaaatttcaaaaccctagaaccgcttctctaaccgcaaatcaaaatcaaatcgaatccaatccaatcgacgcgctaggtatttggtgttcggctgctgttttctctcctagctgcttctgctgttttatggaaaaatgtcttatcagttaactgtcgagatgtttcagttccaaccatgtggttcgttgcaaacagtatgagtgcttccatggtgtgttttggaaggagtcggatcttgttaggttaatttgtacttgcaactgacaaactcaacctcagcttaatctttctatatcttatagatggatcgacgtgatacttcaggatttgtcagcgggggtgcattaaacacctttagacaaatctaaccctaactttgagataaacatctcttttttaccccgaggtcaggaaggctgtactgtgaaattcataaataggattagatat

SEQ ID NO: 11739 - DNA, 581 bp, Glycine max
  Clone ID: jC-gmle01810056b05a1
accgaactcaacactcgcagcaccgccatgagtgccgccacttcctccaccctctccaccgtcaccgatgccaatcttcactccagatttcattctcgtcttgttccattcactcatcatttctcactttctcaacccaaacggatttcttcaatcagatgccaatcaattaataccgataagaagaaatcaagtagaaatctgctggacaatgcaagtaacctcctcacggacttattaagtggtggaagtatagggtctatgcccatagctgaaggtgcagtctcagatctgcttggtcgacctctctttttctcactgtatgattggttcttggagcatggtgcggtgtataaacttgcctttggaccaaaagcatttgttgttgtatcagatcccatagttgctagacatattctgcgagaaaatgcattttcttatgacaagggagtacttgctgatatccttgaaccaataatgggcaaaggactcataccagcagaccttgatacttggaaagcaaggagaagagtcattgctcccgctttccataactcatacttggaagctatggtaaaata

SEQ ID NO: 11740 - DNA, 554 bp, Glycine max
  unsure at all n locations
  Clone ID: jC-gmle01810056b06a1
acagaatcaaatttaactcccttttctccttcatcacgtgacctgcaagcatcagcatcaccatcatcatcatctgaatcgttgaggaaagttgccaagttgatggatagctacattgcagaaattgcttctgatgttaatttaaaaccgggaaagatacgcaggcttgcagaggccctccctgagtcatcaagattattgcatgatgggctttacagggcattggacatatatttcaaggctcacccttggctctctgatagagagaaggaagaactatgcaacatcatagactaccagaaactctcaatccatgcttgtgctcatgcttcccaaaatgacaggttacccctcagagttgttcttcaagtgctcttctttgaacaactgcatttgagaacagcattagctggatgtctcaatgcattggatggtgaaattgctccggcagctcctgttcctataactgccctgngcgacacagcangtgaaattgtacaaagggatggatgggtgactgatgtgcgtgaaaaccaggttttgaggtggatatg

SEQ ID NO: 11741 - DNA, 567 bp, Glycine max
  Clone ID: jC-gmle01810056b07a1
gctcggaattcggctcgagagaaaaacaagtagttgagaactaagaagaaggaaatggcttcctcaatgatctcctccccagctgttaccaccgtcaaccgtgccggtgccggcatggttgctccattcaccggcctcaaatccatggctggcttccccacgaggaagaccaacaatgacattacctccattgctagcaacggtggaagagtacaatgcatgcaggtgtggccaccaattggcaagaagaagttcgagactctttcctacttgccagacctcgatgatgcccaattggcaaaggaagtcgaataccttctaaggaaaggatggattccttgcttggaattcgagttggaggtcaatttcttgcaaccccttttggtttaattatagtttcttagtcttagtttgtttcaacttattttgaagaaataatcgcttctcttgctggcgtgctaaaagtacctttggaaacaaataaaataaataaaaaaagagaagtggttgttttccaataattaagttatctaatggattttccatcctagacttatcaatattgat

SEQ ID NO: 11742 - DNA, 551 bp, Glycine max
  Clone ID: jC-gmle01810056b08a1
atttaccgctatgctttccacaatataggtaccacttggtctatgtcttactctccttgtgcttctcttgctcttcatacgcaatctcagaaccttcaagaacccaccccttcctccaggtactaaaggccttccaataataggagatttacatcaatttgatagctccattctttatctgcagctatggcaactctcaaagaaatatggccctatattttctcttcaattagggttaaagccatccatagttgcctcctctcctaaactagccaaagaggtactgagaaaccatgacctagaggttagtggacgacctatactacttggccaacagaaattgccctataatgggtcagagattgcatttatcccatacaatgaatattggagacaaattacaaaaattggtgatgtccatatctttagctccaagcgtgtatctagctattcctctactagaaattgtgaggtgaaacagatgataataaaatatctgggcatgcctcttttacgatgtacaaacttgatgagtactcatgctctatcag

SEQ ID NO: 11743 - DNA, 536 bp, Glycine max
  Clone ID: jC-gmle01810056b09a1
ctctcacgctaccgccatcgttcatcaatggccaccctcaacctctcttcgttgcaagctctctcctcccatcgtttatgctcttcttttccccaaaatacccctaccccttccttcaatttccagctaaaaccctcaattaacccgcgcccaatttctctgaaaccctacgtttccgagaagcctcgcgcgcgcgtggtggcattggccgtgaagagcctcggcgatacggaggcgctggcggtgtcgcctgaaaatgacggccccgccggagaactgccgtcgggcgccggcgtctacgccgtgtacgacacgaacggcgacgttcagttcatcggtttgtcgcggaacattgccgcgagcgttgcggcgcactggaaatcagtgccggagctgtgcggttccgttaaggctggggtagtggatgaaccagacagagaaactctaacccaagcatggaagtcttggatggaagaatacataaaagatagtggaaaagttccaccttgcaacgaatcaggaaatgccacttgggt

SEQ ID NO: 11744 - DNA, 437 bp, Glycine max
  Clone ID: jC-gmle01810056b10d1
ggatatgccgaaagtggtagtagttctagcgggtgactcgcttttttcaaattggttttcattattaaaaaaagggaacgaaaataaaataccagcttgttttatagcaattggtattaatcgttgttgttttaagggcaatctatttacgcgtctggataatatttctccttggtcactaataaatcgactaattaaacccctgtttttataatcaattcggtcccccgattggatcgggggcaaacgcctaccaaaagatcgcttggatttcataaagagtcgcttagatttttccatgggttatttatccctattccaaaaatcacatttatttcaagaaatactattaaggatttcgttttttattctgacttttttaatagatgggggggagtcctttaatatatggcggaatataccgagatttggatata

SEQ ID NO: 11745 - DNA, 527 bp, Glycine max
  Clone ID: jC-gmle01810056b11d1
aataataataaatagtgaatccagttgcgatatggacaaactgcataagagtactttgcaatattcaacagtttaatacagatttacaacggttgatgattcccacatttgtgaaaaatgggccttagaagaaaaaaacaaaagaggaaaaaaaaacacacggaaaacctgtgtagggcaagatattggcgccctctatcaggaagttcaaatactgagaagggttatataatgtagtataatatgaatgataacccctcaccggcacttggatattctggcagaaactttgaaaataaatgagctggaagaggtaaattttggagaaggggaaaatacagaattatttctcaggaatgtcatacaaaaacaacaactactaagctcaaaagcccaaaatagcaaactgaagaataggagccagatacacccacgttgctgtattaatatcttcccgccgcctctttgtggcactgtacagtattcccacgtcctcgatgcaacgcaaaagcagaatttaccccctt

SEQ ID NO: 11746 - DNA, 352 bp, Glycine max
  Clone ID: jC-gmle01810056b12d1
aataatagaaacgaaagagcaccgttgcgatttggactggctgctttagagcactattgtggatgcaacgggttcattctgataaacatcggatgatgattcccacatttgtgtaatatgttcgcccctagaacatcgcgaatgatgagattgatgcacacggtgaccctgtgtggtgcaagatattggcgcactctatcctgaaggatcaagactgtgaacgggtctagaatgctgggtctccaaaacgataacccctcaccggccctcggatattccggtacaaacttgcattatcaatgacctgcaagaggaaagacttggagaacgggaggactctgttgtctttctc

SEQ ID NO: 11747 - DNA, 466 bp, Glycine max
  Clone ID: jC-gmle01810056c01a1
caccatcttcatcacatggcaaacgcagcatctggtatggcagtccatgatgactgcaagttgaggtttttggagctgaaggcaaaaaggacacaccgtttcatagtttttaagattgaggagcagcagaagcaggtcattgtggagaagcttggtgagcctgcccagggctatgaagatttcactgccagccttcctgctgacgagtgccgttatgctgtttatgattttgagtatctgactgaagggaatgtccctaaaagcagaatttttttcattgcgtggtcccctgacacatcaagggtgaggagcatgatgatttatgcaagctccaaagacagattcaagagggagctggatggaattcaagtagagttgcaagcaactgatcctactgagatgggtcttgatgtgttcaaaagccgtgccaactaaaatgattatttaaaatagtaggctttctggt

SEQ ID NO: 11748 - DNA, 584 bp, Glycine max
  Clone ID: jC-gmle01810056c02a1
cacacttacacacagaataaccataaccataaccataccacagccatggccactctaagcttcaaccccgttagaataaaaacctcaacgttgaaacattccaaactcaccactactccatcaaaacccatcacaatcccatgcaccactccctccaacagccatcccaaactgctccacttccgaacccgttcggtgtccgagagcacccaccagaaagaagcacccgaagcggttctcggagaacatgaagaagaagaagatgatgatgatgacccaacttcggaactgagctacgtggacccagaaactgaccctgagagcatcacggagtgggaactggacttctgctccaggcccattctcgacgtcagagggaagaagatttgggagctcgttgtgtgcgacaagacgctgtcgttgcagtacaccaagtatttcccgaacaatgtcattaacagcattacccttaaggatgctattgttgccgtcagtgaccagttgggtgttccgttgcccagaaacattcgcttctttaggtcgcagatgcagacaatattacaaatgcgtgtaatgagcttcgc

SEQ ID NO: 11749 - DNA, 535 bp, Glycine max
  Clone ID: jC-gmle01810056c03a1
ctggggttgggcagcatcaaatgtgggctgcacagttttacaagtacaagagaccgaggcagtggttgacctcggggggtcttggagccatgggttttggattgcctgcggctattggcgctgctgttgctaaccccggcgctgttgtggttgacattgatggagatggtagtttcatcatgaatgttcaagaattggcaactataagagtggagaatcttcctgttaagatattgttgttgaataatcagcatttgggcatggtggttcagtgggaggatcggttctacaagtccaatagagctcacacctatcttggagacccgtctagcgagaatgagatattcccaaacatgctcaagtttgctgacgcttgtgggataccggcagcgcgtgtgacgaagaaggaagagcttagagcagaaattcagaaaatgttggacacccctggcccctaccttcttgatgtcattgtgccacatcaggagcatgtgttgccgatgattcccagtaatggatccttcaggatgtgata

SEQ ID NO: 11750 - DNA, 590 bp, Glycine max
  Clone ID: jC-gmle01810056c04a1
aacaattccgtgcaggggaatattcctgattcaagctatgaagcaggacttgaattgtcggttcaatcttcaggtttgggtaaccaggaatcggcaatcgaacctgccaaggagtgccttaagatgacaaggaggatgggtccttcaccaaccaagaatgctgctaacttatcaattacattatcaaagtttgtgccttataggaccgaaatagaatggtacaaagcttggtgtcaccagcaagttgatcaaatgggatactacgacttattcaagaggagaaggagcacttcaaaaatggctatgaaagtcaacatgaatcgtcacaaacttgccagattttggaacaatgtgattgaaatgtgggagagaaatgagctgcctcatgatgtggcggtgcgggctaaatgggtcaatgcttcacatttctacaaactattggttgagccactagatattgcggaatattatgggaaggtgatgcacacaaccaaggtgcattacatacagcatggcagagagaagaggtatgagatttttgataggtggtggaaggatgcaatgggcaacacccgtgaaaataatgagag

SEQ ID NO: 11751 - DNA, 467 bp, Glycine max
  Clone ID: jC-gmle01810056c05a1
gtatcctgcctgttcaagaaccaaaaatgatgacacaaataattgtagatgctacggagatcactgtacagaggggcatcatcaataaaggatggggaggccttgggaatatggcagaaccaaaggactctatatacttattggataattgccctcatgagtggcttttcttgcgatgcaaggctgtggttcatcacggacgtgctggcacaacagctgcggggatcaaagctgcttgcccaacatccatagttccttttttcggcgatcaaccattgtgggatgagagagtacatgctataagagttggtgcttcacctatgccagttgatgagtcctcacttgccaagttggttgatgcagtaaaacttatgctggatcccaaggttaaggaacgtgcaatcgaacttgctaaggccatggtaaatgaggatggagagacaggagctgagaaagcatttattaag

SEQ ID NO: 11752 - DNA, 529 bp, Glycine max
  Clone ID: jC-gmle01810056c07a1
gatgtctcgcaaggaaaacctgatctttgaattgcataccaagaaaggggcttggaagatagcaatatgaatcactgatatgtggcacgttaacaagcacaatggtaggcaagcaattaagatggcgttgatggaccaaatgacgattttgatgttattcgatatactgtaattgagtacattcattttagtgctttgatacattcatgagtttcattcctgactcttgtagggtgcaatgattggcgttactctatggcaataactgtttgctgaatttgaggcaaagttgcattgtggttctgcatatttgattcagaacattaaagttgttgacaatcattctacatacaaaacaaatatcccttcaatgtccaaaatatcaagcatgggtcaaagttgtatgtcaacattgatatagcataaatccaagaattccataatagatgtaagtatgtacgtctatgctggcagagtatcaaatgaaggaagtgttctcaatcaaatatagctaatattccaacgaaac

SEQ ID NO: 11753 - DNA, 518 bp, Glycine max
  Clone ID: jC-gmle01810056c08a1
atatagcccaagccctatacaaccaaaccctaacacacacccatttgattcagtttccatggctagcctcaaggttgcatttttggctgcagtgctctgcatggttgtggtgagtgcacccatggcacatgcagctatcacgtgcgggcaggtgacgaatagcctgatcaattgcatcggttacctccagaacggaggaacgccgccgtcgggatgctgcaacggagtgaagagcctcaatgccgtcgccaagaccaccgtcgaccgccagacggcgtgcaactgcctcaagtcggccgccagccaaatctccggcttcaaagccaacaacgccgcctcgctccccggcaaatgcggagtctccatcccctacaagatcagcaccttcaccaactgcgctaccatcaaggtttgaagagaaagtcatggacgcaggaaaccggaactactcactagtatatgagtagcattattaatattaagaataagatcgagggtgatgagggctccacttatat

SEQ ID NO: 11754 - DNA, 579 bp, Glycine max
  Clone ID: jC-gmle01810056c09a1
gcattttaaaaatgaaaaacttcttaatgctttcatttcgcaaaccccccttggacggattggagaagcagaggaagtgtcttcattggtggcattcctctgcttacctgcagcctcttacataacaggacagaccatttgtgttgatggtggattaacagtgaatggtctctatataaattagagaagtactaccaacacactctctaacacacttctcttgacacatattctaccataagttacaaataataaaaaattacaaaatcatgaaaataagatctaggacccatatatttttgtgatatctaaaaaatttcaagcaataaaaaaaatgtattgaaaagagtgtataagataatgtgttgttagcatttttatataaactatgttaagagcaaggtctgatgcatacgttgctagtttttatattagtctcgagaatcaatagctgaaagtcccttggttcaatctatatcatttgggaggtggaatttgttgggaataaatatgtatgtccacgatccaatcatcatgtcatccaatttaattttaataataaagtattatcttattttc

SEQ ID NO: 11755 - DNA, 343 bp, Glycine max
  Clone ID: jC-gmle01810056c10d1
aatgttgaatatataccaatttttgtattattgggtttataactgtcaaaacaacaactgttttttctccattgtagttggaggtacccatcacgtgcaataaaacaatatcttctcgctcatctaatgagaccgcatgacatatgccacacttctgtatcatgaacctatgtgattactcccttctttaagaagattccctttttctatataaaaatattttatgatgctttgaaccatataccaagatgcccccacttgttaatatatgcttttacgggcgagcaggctcttgcgtgtgctaaaaatgtgctgttttgatttgccccacccacagaccact

SEQ ID NO: 11756 - DNA, 507 bp, Glycine max
  unsure at all n locations
  Clone ID: jC-gmle01810056c11d1
aaacagagcaatgtctaattcttgttcagggattcaccaaagtttctatactttgagggggccaatatgtgaggaaagtttgcataaatctcacaagatatatactacagaatacattacttcctcctttcatctattttggcttttgatcattactggggaatccataaaagtattacacacaaattcttcaactgacaaaaaattgagcttgaacacttttcctgtgtccccctccctttttttccatccccttgtcctatataaattaaagcacttcaccaggttgataagccaacatgactcatgcacgcctgtactcatctccacaatcaccaatcactttaagcagatcctttcctttcgctgnggcttctcttatgctgttcacgtcatcttcatcgagaacaagtgaaaagatagcattggtatcttgaatatgttctgccaagccaagtctgacaccaaccattgatcctgctactgcaggctgatctagtatatact

SEQ ID NO: 11757 - DNA, 599 bp, Glycine max
  Clone ID: jC-gmle01810056c12d1
ataaagaacacttcgattgctttatacctttttcgattaaaaatgaaaaataaagaacaatacaaaacattaacacagctcttattgtaagctgtatcaaaaccttttcccaattaacacagctttgtttgacaatttttgctatggccgaactgtaagatgatgttaacaatttttgctacaacaggattgtaataactaggttgctccatgtaatgtaactccacaacaaagcttatgcatggaattaatcaactgctactggctgcatgttttcagcttcttgacgaagctcttggaacagaacagatgataggtatcgttcaccgaagcttggatgaacagtcacaataagtttgcctttgttctcaggcagctgagccaatctgagtgctgcaactgtgttagctccagatgatatccctaccatgagtccttccttcaatgccaacaccctagccatgttaactgcatcttcgctgctaacttcaagaactttttccataacatccaggtccaatatgtctggtttgaatccaaccccattgccagttatatgatgaggaccaggtttaccaccattcagcacattgctttca

SEQ ID NO: 11758 - DNA, 491 bp, Glycine max
  Clone ID: jC-gmle01810056d01a1
cacacttacacacagaataaccataaccataaccataccacagccatggccactctaagcttcaaccccgttagaataaaaacctcaacgttgaaacattccaaactcaccactactccatcaaaacccatcacaatcccatgcaccactccctccaacagccatcccaaactgctccacttccgaacccgttcggtgtccgagagcacccaccagaaagaagcacccgaagcggttctcggagaacatgaagaagaagaagatgatgatgatgacccaacttcggaactgagctacgtggacccagaaactgaccctgagagcatcacggagtgggaactggacttctgctccaggcccattctcgacgtcagagggaagaagatttgggagctcgttgtgtgcgacaagacgctgtcgttgcagtacaccaagtatttcccgaacaatgtcattaacagcattaccctcaaggatgctattgttgccgt

SEQ ID NO: 11759 - DNA, 412 bp, Glycine max
  Clone ID: jC-gmle01810056d02a1
tttgcattgcaggatggtttggcttcaactaggacattggacttagcatcaacactggaaacaggatctggtaatgcccgctcagctggtgaaagtgactcgaataactacaaccttaggtcggtcctcacaattgcattccaatttacctttgagaaccatttgcgggacaatgtggctgttatggctcgccagtatgtgcgtaatgttgtgcgatctgttcagagggttgccatggcaattgctccctctaggctcagtacacagttggggccaaagtcatttcctggtccaccagaggctcttaccttagcaagatggatctgcagaagctacaggctccacacctgcacagaagctttcagcgttgagtccacatcttgtgatgcaatcttgaacaaacttggcacca

SEQ ID NO: 11760 - DNA, 622 bp, Glycine max
  Clone ID: jC-gmle01810056d03a1
attttatttattctatttttttttttttttttttctattttcattcgaattcattttatttatatattaatattatattcaaatgaaataaaaagatattaaaagatactaattataagaatttgaaagtgaaattataaagttattaaatgattaatcaatttttttctacctgttcctgtagtaaaaagagttccatctgttcttgaatagcttccttcaaaaggacttctgcttccccagtgaatgtcttggtagaagatatgatttctttgaattgaggtttattcgtgtttaagtaagcacgtaactcaacaagaaatttccttacctgtccaatttctaatgaatcaagataaccattcgttccagtataaatagttattatctgttcttccacggtaagaagagctgattgggattgtttaagcaactcgcgcaatcgttgacctcttgctaattgattttgagtagctttatcgagatcagaagcgaattgggcataagcttttaattctgcgaatagtgctaattccattttaattaccagctacttgttcatggtttaatttgagtcgccgatcaactcttgaaacggaatacctacttaatagcgggctga

SEQ ID NO: 11761 - DNA, 526 bp, Glycine max
  unsure at all n locations
  Clone ID: jC-gmle01810056d04a1
tatcatatgatcatcataacgttctgttcccttaagttgaaaattgctgtgcaaaatgaatctataatactggctattcagaaggggcaaaaatcagaaatcaaaagaggggacattctgtgagagcatcaaatagcatcgagtaattcatgaggtttgcaatagctgacttgaaagtcgacactgaagatgggagaaactacagaaaggtatgcagctgtgacaggagcaaataaaggaattggattagagatagttagacaattagcttcagctggaatcaaggtggcgctcactgcaagacatgaagagaggggtatccaagcactgcatacactcaaggactcgggtctatctcaccttgtactgcatcatcaagttgatgtggctgatgcaacaagcgtagcttctctggcagatattatcaaatctaaatttggaaaacttgatattctggttaacaatgcanggattcttggagctgtaattaaagacactgattcatacacttcatttctcttgaagc

SEQ ID NO: 11762 - DNA, 569 bp, Glycine max
  Clone ID: jC-gmle01810056d05a1
gcttcctctttccttttctctgctcttgtgatgacagcgacttaatctctgagattccgccataaatgctttcttcgcattctcgctccgtactccgtcttctcgttccgttcggcatcgctaatttctctccgtcgagaaattagaggtgggtgaagtgaggcagaaagttggcaatgattatttctctatggatggaacaggtagaaaatagtacttccagggacttttaatgctagcttaagagtatgggcctttgattttactatgttgagatactttatgagaagtatagagtaaacagcagtttggtttagagggtgaaaagcttcacaaatatcatgctggaaggaagatgatatgatataacaagcaagtggaaactttaggttcattttggctggtgcaaatcgatcttcattatatagtgtagatatacatttgtggtttaacacccgaagaatgttgttcgtatgtgatcaactgttgaaagatcgttgactggtgtcccaagtcagaatacatgggtggccagcgggaaaatcttttgagacagaagtgatctgcct

SEQ ID NO: 11763 - DNA, 578 bp, Glycine max
  unsure at all n locations
  Clone ID: jC-gmle01810056d06a1
cagaatctactctctttttttctaccttagattccttctccaacaatggctctcgccgtttccactacttcttcctcttcagcagctgctgcagcttctagctccttcttctctcgtctcggatcttcctccgacgcaaaagctcctcaaatcggttcgtttcggtttccggagaggtcgcttgtttcgtctgttgttgtcaatgtaactcaacgacgctccttggtgaggccactcaacgccgaaccgcaacggaacgattctattgttcctcttgcagcaactatcgttgctcctgaggttgagaaggaagaggaagattttgagcaaatagcgaaagaccttgaaaatgcatctcctcttgaaattatggatagggccctcgagaaatttgggaacgacatcgctattgcatttagtggtgctgaagatgttgctttgattgagtatgcacatttgacgggtcgaccctacagagtggttagtcttgacactgggagacttgatccagaaacctacaaatttttggatgcgngtgagaagcattatggaattcacattgagtacatgtcccctga

SEQ ID NO: 11764 - DNA, 551 bp, Glycine max
  Clone ID: jC-gmle01810056d07a1
cctagcttgatcaagtctagtggaccgttaaatgagcatgttgcaccaacagttggttctggtccttttctgcttccttctggaactgctaatggctttttaggtgaggaaactgatggtaggccaggttgttctctagacacccgccgtgtatcttgtaaaagaaaggctgttgaacgaaatgttggacaatcttcagatggtggaagttctagctatagtcagcatacagatggtagtacttggaacactcttcctactcaggcttatggggggatcagttttaacagatctgccccaacggatcaggtaaatgcgagacttggcctgagtacaggggatggatcctctgaaagcattcctgtgtcaaatgtagcaagaagctcacgaagtttccacagaaattttcgttcgaggacaagtccttcaagtcaacaaatttctgttcctaccacttgaatctcaagtgggaatgttattaggagttcttgtgtttcatcaccctctcctatattgcaaccatttcatcctgttgatattcctttgacttg

SEQ ID NO: 11765 - DNA, 113 bp, Glycine max
  Clone ID: jC-gmle01810056d08a1
cctaactcgaacacgtatactggaccgctatatgaccatgtcgtaccatccttgggtgatggctcgtctctgcgttgcattgtaactggtaatgatctgcatggataggaaac

SEQ ID NO: 11766 - DNA, 489 bp, Glycine max
  Clone ID: jC-gmle01810056d09a1
gatctacctttagaccaattctaccatggatgctttggaaaaattttgcactttatgttttggattttcgttggttggtgacttagaatgtgatcattgattaagtggtggtactttgattctggcatacccttcattttgatcattgtaaaatccattgaggaatacgacagatcaggggaaaattgtcaactttagtataatcccgacatgggttatgatgcattcatggaaactggagatccagagatagtacatgcctcttatttctatttgtgttgtcatatatgttacaaaaacatcactggcttttacttttgttccatgttacacataccaatgatacctgataagctgtttcgatggttctgttatcactggggtatctagatgtcaacgggatgccattctgatgttcgaactatgcaactgagaactgattattgcgcagagcttttaatattctgctatgaataatgatcctgattg

SEQ ID NO: 11767 - DNA, 387 bp, Glycine max
  Clone ID: jC-gmle01810056d10d1
gttggggggaaaaacagcctttttttttcaaaacccgttttttttaaacagaaaacattttctttccccccccaaaacccaaattcctttgaaccaccccacccaaaactttctggggcgtgcttgcttttttagtccaggaaccatgccccccttacaccaagtttttagcaagttttgtagttgaacaacacatggggcccacaagacccttttttgggaataaagggcctaacccaggccggccaacctaagtaacggggaatggtggacaaattattcttccccgggttctgattctgcgttctgaagcccatcaatggaggggtgggcatttttccaaaacctaaaggttttggtatcacccttcagccccttttgaaaccc

SEQ ID NO: 11768 - DNA, 531 bp, Glycine max
  Clone ID: jC-gmle01810056d11d1
acaaagtgaaagtgagaacacactttattatatgaaaaccgagagcatccaaatacaatagtgcagaagttcaggcaataattacgcatagacatgcataaagtctatgttattcagaagtacaacatagataaggaaaccacaaactctttttaattagatagagatactgttgggaattcctttgaaagtcaacccttcctcacttgaacgatggagcaaagtgtatggcagctgaactggcccagtccggtttctcagacttggatcactgttccttgcattgatttttccttcaattccagtcagtttgcttccaaaccttttgaaagcttctaatgccttcttatcagtagtccaatttggagtctccctctctccaaggtatatctcatcagaagcatgccttgacaatatctctatcactgaaagatcaataagggtctcaaacttgggtgtgattgttctcaaataagccttttgaggattcttcaccatctcatcatactctggggttccttcagctgggat

SEQ ID NO: 11769 - DNA, 386 bp, Glycine max
  Clone ID: jC-gmle01810056d12d1
agcaggtcaacaattgaaattacaccagcattttgtcaaaattgtaagtgtatgttctgatttctgaagtccatgaatggtatctacagtttttccacctgaactcattggcatggtgtactgtcatggaaacaaccaaatctattcagaaaggatttgtgtttcatcacagtggtaagtcacctcaacaaagtattgacactactctgcaacagtcaaggaatggcctaacaacctgattttgaatctgctgcctacttacaatcagggggtgcactccatatgaacttcttgtgcgaacaaaaaacatggaagtggtaacattccgcatgttgtcagatagtttgactaccattctgcatcttatgtttccattagttggtctt

SEQ ID NO: 11770 - DNA, 383 bp, Glycine max
  Clone ID: jC-gmle01810056e02a1
agataatcgaattagagctgtagctatgattgcgacagaagggctaatgagaggaatggaagtgattgacacaggagctgtcctaagtgttccaggatgtggagcaactatacgacgaatttgcaacgagcttggagagcccattgcttatttatgtcctgtagatactggcacaacatctgccattcatagatctgcgcctgactttatacaattagattcaaaattagccatctgtgacacaggaataaaggtagtagatcttttagctccttatcgtcgaggaggaaaaataggacttgtcggtggagctggagtggctacaacggtactgattatggaattgatcaataacattgccagagctcatggaggtgtatatg

SEQ ID NO: 11771 - DNA, 613 bp, Glycine max
  unsure at all n locations
  Clone ID: jC-gmle01810056e03a1
ggcaatccgaaattttcttgaatgatattaaagaaaagagtattctaaaaaaattcatagaatttgaagaactgtttttcttagatgacatgttaaaggaatgtccggaaacacatctacaaaacctgcgtactggaatctataaagaaacaatccaattaatcaaaacgcacaacgaagatcgtatgaatacgattttgcacttctcgacaaatataatttgtttctttattctaagcggttattctattcttggtaatcaagaacttgatcttattaactctttggttcgagaatttatatataatttaagtgacacaataaaagctttttctattcttctattaactgatttatgtataggattccattcaacccatggttgggaactagtgattggtttcgtctataaagattttggatttgctcaaaatgatcaaattatatctggtcttgtttccacttttccagtcattttagatacaattgtaaaatattggatttttcgctatttaaatcgcgtatcttcatcactagtagtgatttatcattcaatgaatgattgactgacanaatgattcacttatcgagatttaaattaaagtttttagct

SEQ ID NO: 11772 - DNA, 54 bp, Glycine max
  Clone ID: jC-gmle01810056e05a1
aaaaaaaaaaaaaaaaaaaaaaaaaaaaaaaaaaaaaaaaaaaaaaaaaaaaaa

SEQ ID NO: 11773 - DNA, 520 bp, Glycine max
  Clone ID: jC-gmle01810056e06a1
gcaaagagagatgggaaccgttagtaacattggcttcctttcagtattcagagttcctctagattcacaacaagcactatcaaagcagatgaagaataaatcatcgtgttgtttcatggttcctcctaatcataactattctattaggcctagtccaatacgttgtaataaactatcagaaagtgggattgaggagaaccccacgaccacaagcacgagcaagaggccctctaagaacaaggacaggatggaggagtacaatatagctatgaagagaatgatgaggaacccttatgagtatcaccatgatctgggtatgaattatactcttataacggacaacttgattgtgggctctcaaccacagaaacctgaagacatagatcacctcaaaaaggaagagggcgtggcatacattttaaacttacaacaagataaggatgttgagtattggggagtagacttgcagtcaataataagaaggtgtcgtgaacttgaaatagccaccgaggagaccggc

SEQ ID NO: 11774 - DNA, 551 bp, Glycine max
  Clone ID: jC-gmle01810056e07a1
gagcagctgatgtatacattggtgcaaacccttctgctgacggtggaggagaagatgagggagttgatgatgcagctgctaagggtgatgacattgttgacacattcagacttcaggagcaacccgaatgcgataagaagcagatcgattccttcatgatgaggtatatcaagaatatgactcccaagctcgatgcatagcaacaggagttgattaagaagcacatatagggagcgactgaatacctgctctctaagattaaagatgtccaatgttttgtaggtgagagcatgggcgatgatgctcgcttggtctttgcctactacgaggacggatctgctgatccaacagtcctgtacttagcatatgccttaaaggaggtcaagtgctcagtgacttactgtaccgagctatctacttataatgtctagtttttcatgaccatctgtcctaagttacttgaaactttgacctggtattgcgatattaacgtgagacctgtgctactggtacatcatacttgccattgtattaattatcgctgggttaga

SEQ ID NO: 11775 - DNA, 571 bp, Glycine max
  Clone ID: jC-gmle01810056e09a1
cctgtgttctttttgacaaatggtggatgtgaaatctatgaagatgtgaggaggaactcattggaggaggccatgaagctctgtttggagaatggattggaaggaattgtctcagagatcaagggaatattcagaaatcctggtgcagtaaccaagatcaaagagtccaagctttctctactttcttatggaaaattaaacaatgttccagaggcagtttacatgcaacatctaatgggaatcgatggggtaattgtggatttggttcaagaaataactgaggcagttgcggatatgataaagccaacaaagggtggtgaaggagagggtttggttgagggttgtgggaaggtgcagggaaactcaaagcctcaattttcacagcatgagttgtctttccttttgaagctcattccacagttgatacaaatttgaatagcagaagagaagacatttcttgaggctttttaattaacttcacaatatgtactgtgtggcccttcacataatcagtggaccctcttggagggggtccataaaaagcttaacctctgtcatatatttcttcttt

SEQ ID NO: 11776 - DNA, 403 bp, Glycine max
  Clone ID: jC-gmle01810056f01a1
cgaatagaaagacagagaagaaacgctgatcgaactagaacggaagcactgactaaactcagagcgagtgaaagtgttgctgctcgatgtctggtggtttcgcccgtggacgcctcaccgttgagctcaagttgtggcggcagaaccatacgcatggatttgatgcgctgccggagtcgctgccaggaggcaccgtgaacttgactgtgtggcattgcactcttcccgggaagactgggactgattgagagggtggctactgcccgattacgctgcactataaggacgactactgaggcacgtctttcaagtgtgcatgcccacaaggtttcttccaccctaatgtatatccttctgggactgattgctagactatacttaatgaggatagcgggtgatgacc

SEQ ID NO: 11777 - DNA, 226 bp, Glycine max
  Clone ID: jC-gmle01810056f02a1
gttaactgtttaaaaggaacagaaacctaagcatgcagaagataacagagcaaagttccaaaaatgacatctaacagtggtgtgcaatcagtaagagccacttcttcttcaactttgttaaaatataaaatagcagtcattaatttaactgaatgagattgaatactaagttctttactttagtcacattcggatggtcaagtttttgccagacagcaatctcctg

SEQ ID NO: 11778 - DNA, 559 bp, Glycine max
  Clone ID: jC-gmle01810056f03a1
tgcttgcaggaaaacgactatcgatcgaccaatgaaacctggacgactcaagcgtcagcagcaggtgctcgccgatgatcgtgcagagatcccgctcatacctgaagaccaattagcagcgccgctagctgccgtgaaattggccgagagcggcgatttcccgcggcttttgatcgccttgaccctgcgtccgcgactcgccagagctactgacgcctctggtatgacagcactgcactgggtctgcagtaaatcgacagcaccgccgcgtgtcgtgcttaccgtggcccgcgcgcatccggcagccgccgccacgcgcaatttggcgggactcttgccactgcacttagcagtgaggaaaggccttgtcctggagaccattcaggcgctgctacacgtgtacccgaatgccattgagatgcgcacacctgatggtaagacatcgcttatgttggctaagaagagaccagtggcgtcgagtgcagtgcttacgctgctggaagtgctggaagctcacgcgaggacgggagcgctgccatcggtagtattaccgacgtcg

SEQ ID NO: 11779 - DNA, 505 bp, Glycine max
  Clone ID: jC-gmle01810056f04a1
cttcacagagagaaagttgttgtaaagccttgttgctgccatggccacccacgcggctcttgcttctacaaggatcccttcaaacacaaggttcccatccaaggcctctcactctttcccaacccaatgcgccttaaagagacttgaggtgacagaattctctgggcttagatccacttcatgtgtcacatatgctaacagtgctagagaatcttccttttttgatcttgtagcttcccaactcactcccaagaccaatggatcaactcctgtgaggggagagacagtggccaagttgaaggtggcaatcaatggtttcggacgcattggtagaaacttccttcgctgctggcacggccgaaaagactcaccccttgaagtcgttgttgtcaacgacagtggtggtgtcaagaatgcttcgcacctgctgaaatatgattctatgctgggaacctttaaggcagatgtgaaaatactagacaatgaaaccatcactgttgatggt

SEQ ID NO: 11780 - DNA, 560 bp, Glycine max
  unsure at all n locations
  Clone ID: jC-gmle01810056f05a1
ctcggacttgcgctcgagtaactattgactctgctacccttttcaataagggtctagaagtaattgaagcacattacttgtttggagcaagctatgacgatattgagattgttattcatcctcaatctatcatacattccttggttgaaacgcaggattcatctgttattgcacagttggggatacctgacatgcgcttaccgctcctttatacattatcttggccagaaagaatctattgctctgaagtaacttggcctcgtcttgatcttagcaagtatggttctctaacattttatgcaccggatgacaagaagtttccatcggtgaatctttgctatgctgcgggacgtgctggaggcaccatgacaggagttcttagtgcagcaaatgagaaagctgtagaaatgtttgttgaagaataagatagttatctggatatattcaagggtgtggtactaactngtcaggaacatcaaanggaantagtagcatctccgtcactcgaagaaatattcactatgaccatgggctcgcaatatgctgctagctgaaaaagc

SEQ ID NO: 11781 - DNA, 469 bp, Glycine max
  Clone ID: jC-gmle01810056f06a1
atagagttgaagtttcagattccatagacaagcttgcaaaagaactgaaggaaaagactgtgtccaacgttgtgaatcccaaagactagttgattgggtatctaaggggacaaaactactttatgtacaaatttggatggccaaagaactagatatgtgtgtgtctgtggggtgtgtgcgtgttaactttggaatggttttgatcattggaagccacttcagaagagaacctaatcaagttatagttattggaggtcgttttagcatcatgtgatcattttccttatcctttgtaaccttcgggaaatgtcacttgcaccttgaaaaagcacgagattgaaaaaatgaatgtaatatgtttgaagtttttctttctagatcttttcttgccatttaagcttttctttactcaagaaattgtaaaataaagggtcgaagacaaaatctatcaggtgagattttcattttc

SEQ ID NO: 11782 - DNA, 553 bp, Glycine max
  Clone ID: jC-gmle01810056f07a1
ggaactggaagcagtgacaagtgagatcgttaggttgattgacacagcaacagtgcctattttggccgttgatgttgatgggctggtcaatgggtggaacataaaaattgctgagttgacgggtcttccaattggtgaagctactggaaagcatttactcacacttgttgaggattcttcaactgatagagtcaagaagatgcttaacttagcactgctaggtgaagaagagaagaatgtccaatttgagatcaaaacacatgggtctaagatggattctggtcctattagtttggtagtaaatgcttgcgcgagcagggatcttcgagataatgttgtcggggtttggtttgtggcccatgatataactgctcagaagaatgtcatggacaaattcatccgtattgaaggtgattacaaggcaattgtacagaaccgcaatccattaatccctcctatattcggcacaaatgaaatttgctggtgttgtgagtggattccagctatgatgaatttaactggatggagcgagaggaggtgatggataaaatgc

SEQ ID NO: 11783 - DNA, 495 bp, Glycine max
  unsure at all n locations
  Clone ID: jC-gmle01810056f08a1
gttttctatcggtatgtatataggtgaataatccaacatgcctttttgtgaagtaaaaaaactaccctcgatccatgcctcaaaagggttgataataagtaaaaaaaatcaatgaattcatgataaaacccttctgcgtttttttattataaatttttttgtcaataaagggatcaaggggttgggggatcaaatggtaaagttcttttgttggtaaattggaggattagaaacatgactattgctttccaattagctgtttttgcattaattgctatttcatttattttattgattagtgtacctgttgtatttgcttctcctgaaggttggtcgaataacaaaaatgttgtattttccggtacatcattatggattggattagtgtttctcgtgggtattcttaattctctcatttcttgaagctctanttattctagatcaaaaacgaaatgacccctcccncagaattctttcggattgtacggcacatta

SEQ ID NO: 11784 - DNA, 552 bp, Glycine max
  unsure at all n locations
  Clone ID: jC-gmle01810056f09a1
tgtaaatactgtatctactccttataaggctgctattcctgaatatcgagtggttattcatgattccaccgtcacatcttgcaatgataatcacttaaatgtggcaaatggtaatgctgtgtttgatattcaccatccttgcagtgttaatattgccgctcaaagagaacttcacaaacctgagtctgatcgttcttgcatacatttggagtttgacatatccgggactggcataatatatgaaactggtgaccatgtgggtgtttttgctgaaaacggcgatgaaactgttgaagaagctggaaagttgctgggtcaggatttagatttggtattttccattcacactaataatgaggatggtactcctctaggaagttctctgccacctccttttcctggcccttgcacactgcgctatgctttggcacattatgcagatctcttgaatcccccacgcaaggcttctntagtggctctggctgcacatacttcggaacccagtgaagcagatagattaacattcctctcatcttctcaggggaaggatga

SEQ ID NO: 11785 - DNA, 614 bp, Glycine max
  Clone ID: jC-gmle01810056f10d1
aaaataacacacacttcacacatcattacgacaattaaaagaggtgtggaaattttcaaatagacagagcatactcaacaagagggtcatgtctaatttcctttattgaattaaacaaacgaacaaacgaaagaaaacacaaattccagatcatgcagaggattccgcattttcagaagatctggcagtagcctgtggaacagaaaaagctggcataagagtattaccagcaatttcaaaatcttgagaaattcccaagagaatatcaaaaactgtagactgtttgggattgtcaataaggaaactcaagtgccatgaagtttgatttgcccactcagaactccacatttcaaaaccattattaggaccacatacctctattgggaagatcaattcccaggaatgtggttccgattttgtccacttacatgcatcgaaatgctctgtactgttgctgtttgttaaaaacacttgtaccaatgaggcccaatcactccttttgactgctgcattcccagacatcacaattttaaccattaaacagcctttcttccaagcagcaactctcacaagttactaattggagaattttggataagtgtgatccaatctcc

SEQ ID NO: 11786 - DNA, 542 bp, Glycine max
  Clone ID: jC-gmle01810056f11d1
attgcaatctctttactggtcatagatagcaggagttcaattgagaattcctcacaaaacttaaaaaaaatgaagagaattccacacaaaagtaaaggagatttcaaagcaaatgacttttcagtctcaggttacaatcaacgacattcacacgaaacacaatagaacaacataacacacttgtgcccaactcacgcctagtcgtggctgatgcactttattcagcttttaacatatgaaattgatggaattaagggtcaattaagccccataatacatcaatttttatttcttagatagcattagtagagtaaaacatgagcttaatttgatgatttagttgtgcccctgagtaaggtaagcatcaatttttttgctaaccacaacagccagttgcaacaaggtatgagcgtcaggaatgtggccctcttgtttctcgtattccattgcccaaagcactacgctgccctttccttttggagtaacttgcaaattagacttgaagctcttgtagagtcccagcacgtcaccctctatgacct

SEQ ID NO: 11787 - DNA, 503 bp, Glycine max
  Clone ID: jC-gmle01810056f12d1
attgcaatctttttactgttcatagatagcatttttttaatttgagaattcctcacaaaacttaaaaaaaatgaagagaattccacacaaaagtaaaggagatttcaaagcaaatgacttttcagtctcaggttacaatcaacgacaatcacacgaaacacattagaacaacataacacacttgtgcccaactcacgcctagtcgtggctgatgcactttattcagcttttaacatatgaaattgatggaattaagggtcaattaagccccataatacatcaatttttatttcttagatagcattagtagagtaaaacatgagcttaatttgatgatttagttgtgcccctgagtaaggtaagcattaatttttttgctaaccacaacagccagttgcaacaaggtatgagcgtcatgaatgtggtcctattgtttctcgtattccattgcccaaagcactacgctgtcctttccttttggagtaacttgcaaattaaacttg

SEQ ID NO: 11788 - DNA, 587 bp, Glycine max
  Clone ID: jC-gmle01810056g01a1
gtcactagggaggggaattgtggattttcacggggagatggttttgttagagaactatactgcactcaactacacaggtctagtgaagataataaagaaatatgataagcgaactggtgcactgcttcgcttgccatttatccaagaggtgctgaaccagcccttcttcaaaattgatgtgcttaacaagcttgtaaaggagtgtgaggtgatactgagtattcttttcaacaatgactggccttcaattagtggggattttgaggaagatgaatatggctccacgactggaaatgaaagcaaagcgacgctgatgcatgttccaaaagaacttgctgaaattgaaaacatggagaacacgttcaccaaactaactttatcagcactgcgtagcttggaagaaattaggggtagaagctcaactgttagcattttctcattgcctcctttgcataactaggctttgcaactgcaagaggattggaaaataaaatgactgcactagcgactgcaaccaaataggtcctcaggataacatagatcttctcgtgttaatcttcacatctatcttaatggttatagaaaag

SEQ ID NO: 11789 - DNA, 530 bp, Glycine max
  unsure at all n locations
  Clone ID: jC-gmle01810056g02a1
ccttgttctgtaccaaccctttcttccacatgttgagtttcagcatcgtcctctcttgagtccccatatcaaatacccaccgaattcaaccccccatataacaaatctcctcccatcccatttttcagcaccaaagtttgaaacttttctcaattgggttgaggagagtttgactcaaatttttatttttctaacgaagcagtagctattagaagtgcaaaaattaaatgtccaacatcttcttgttgatgtttgagattcatgtatccgattctcagtgaaatcttcttttccgggtgtatgatcaattccactgttaggcgcaggacccatttagttcaatccttctcagttgctttcctctattggttgtactacgtttcatgatttctaaaccttccttagtctaataatcatctactactagctattattattattattattattatcatcatcatcatatataataaaatctatctgcaatattatttntctgagtttgtgtctagttagtgtctgggtcctgg

SEQ ID NO: 11790 - DNA, 547 bp, Glycine max
  Clone ID: jC-gmle01810056g03a1
gcggcgcgtcgttgatggcgaaggcggcgattaactctcacgcgcgggctctctacgcgctggccgtgattcagttcaacggaagcgggggcgctatgcgcaagagcggcgtttctcggacacgtcgacgcgctgcgcgagctcggccactgcctacaggacggttacggcgtacggcagaacatcgccgagggacggcggttcctcgtgcaggccaacgcgcgtgagctcgccgtcgtgctgtccaccggcgccgccgcgcgtaccttgctgagttggaatcttcagccgcagcagctccggcaggggtccgggtgtccgcttctcagcgatttcggatgcaacgtgccggcgccggatgtgcattcggcgagcctgttcatgactgagtggttcgccgctcacggcggttctccgggaccggtgctgagactctgttctaacgcggggtgcgggaggcccgagacgaggaagcacgagtttcgaggtgttctgtgtgccgcgaggtgaattattgctcacgcgcgtgccatgcgcttgattggaa

SEQ ID NO: 11791 - DNA, 590 bp, Glycine max
  Clone ID: jC-gmle01810056g04a1
cgcgctggttcgtcaagcagggccggctcgaagaggcgtcccgctcgctccagcgcatccgaggtcagcccgccgactcgtcctacgtccaggaagagctcgcagaaatcgtcgccaaccacgagtacgagatggagctctcgcctcagggcggctacttttcgtcgtgggccgcatgcttttcgggcagcctctggaacccgggaagcaacctccgtcggacgatcctgggcacgtcgttgcagatgatgcagcagtggacgggcgtcaatttcatcttttactttggcacgacgttcttcaaggacctgggcacgatttcaaacccgttcttgatctcgctcattacgacgctcgtcaatgtgtgctcgaccccgctgtcgttctggaccattgagacgcttggccgtcgaccgctcctcatctggggcgctctcggcatgttgatttgcgaatttattactgtcatcattggtaccgcgcgccccaacgacgaggcagtcaccaaggctcagatctcgttcatctgcatctacatcttcttctttgactcgacctgtggtccccgcgcgtgggtgtgcatcggcgag

SEQ ID NO: 11792 - DNA, 532 bp, Glycine max
  unsure at all n locations
  Clone ID: jC-gmle01810056g05a1
ctcgagccgtgagagaaaagattccatttccagaagtagcactgcactagtactctcttttgtttagaaaaaaaaaaatggttcaacaggaagtgcgtaaaggtccttggacagaacaggaagacttcaaattggtgtcctttgttggcttgtttggggaccgtagatgggactttatagctaaggtatcaggtttgaaggtggcgggagaaagtaaaataggcattagaaaaaaagaaataaaaaaatcaatgcttatttgggcatcatgctacaaaaaatagatttatggaagaagcagctagcctttaaccacctccttttgttgtaggtttgaatagaacaggtaagagttgcagattacggtgggttaattacctacatcctggcctcaaacgtggaaagatgacctcccaggaagaacgccttgtcttggagcttcactcanaatggggaaataggtggtcaagatttgctcgaaagttaccagggcgcactgacaatgagatcaagaactactggaggactctga

SEQ ID NO: 11793 - DNA, 512 bp, Glycine max
  Clone ID: jC-gmle01810056g06a1
gaaacacactcattgcgcggaagcagttatcgctgcaagaacaacaatggaagacggcgatacgacggaggaggcggttgtcgttccggtctcaaacggcgacgagcaatcgttttctcattcttcctcacggcaacgcgattcggaggaggaatctccgcacgaaacgttgcgtaacacaaaagcttcaatagagaacatcgtagccgagattctctctctgaagaaccaggcaaaacccaaaccactcctcactctccgactccgagagctcctcactcaaacgttcctgcacttcgtcactctccgccaggcaaatcgctcgatcttgctggaggaagagcgcgcaagaacggatacggagcgtgcgaaggtgcctctggacttaccacacagaagctttagaccctgagttatgagacgagtcaattcgtgaaagcgatacaggtgtgtaacgatttcaagtcgaagtttccgattttgaagtgtgtcggaagaagagtttttgcggc

SEQ ID NO: 11794 - DNA, 479 bp, Glycine max
  Clone ID: jC-gmle01810056g07a1
aaaatgtacccttttgatcggattgtagcaccattctgaacatagaattgtgaacaaggatagaatatatttttaaatacattctcatggaattgttactagagacttttaagggaattgaagtctataatgtatcacaaaacatgatatgttatcataatatacacattggacagatttttaaatatcttgctcgggttgaacttgatcattcgagtgtctgctctaatacaatattttagatatggacatgaatatagggatcatgtgcaatgtaaacttatagaatttgattataaaaaaccagtttaaaattgcatattggagaattgaacttgattaatgtgtaataggcatacattatgtattaggacagatctatgcattagattgttatggagtgacaagaatttgtatttggtaaatacgataatggtatatgtggtcttgaatatgaacttaaagtgattgatatgcac

SEQ ID NO: 11795 - DNA, 537 bp, Glycine max
  Clone ID: jC-gmle01810056g08a1
ctcgagccgctcgagccgttaatttttaaaattccaggaattcaaaagtttggtggttggattctgttttttgggcagcaatggcgaaagcacgcaagtcgcaagaagaaattgcgagtgaagccatcaagcatgctttgaaggctctgcggaagcgccatttgcttgaggaagctgctcatgctcccactgttctagctctttctagacccatcgtttctcagggctctgagtggaaagagaaagcagagaatcttcaaatggaacttcagcaatgctacaaagctcaatctcgcctgtctgagcaacttgttgtggaagtagctgagtccagagcttcgaaaacgtctcttcaagagaaagaaaatgcattggctgatctgcagaaggagttgactgaattgagggatgagtgctctcaattgaaggtggacttggaagaaaaaattaaatctctggaactggttgtcagtgagaattctgaacttaaagcacaactggagcagatgactactaaagccaatatagctgaagctg

SEQ ID NO: 11796 - DNA, 489 bp, Glycine max
  Clone ID: jC-gmle01810056g09a1
attcccctgtgctgagaggggacgaggagctttgctttatcagaaaagggatttaattgcaagttttcaaagagagagagactctctatccctagaagtagtagatcttctaactctagtggaagtacggatgaaacctctaaggagacaaatgtaaagacaccatttggatatacgaggaaagatgtcctattaatcggactgggagttactctacttggcattggcttaaaaagtggactagagtttgttggagttgattcactacaagctggacatgtggttcagctagtgctgggtttgggcctcacagttgggtggatctcaacatatatcgttagagtttcaaacagcgaaatgacatatgcacaacaactacgtgactatgaaggcaatgtgatggagaagcggttagaatccctaacagaagcagagctactagcactgcttgaagatgttgaggacgagaatagtcgcttgctagtggta

SEQ ID NO: 11797 - DNA, 106 bp, Glycine max
  Clone ID: jC-gmle01810056g10d1
aactggaatactattttttttattttactaggactgaggtaccctcaaccggatgcccaatatgttcaattccaaccgaatcctatcatgaattcatatcccacca

SEQ ID NO: 11798 - DNA, 248 bp, Glycine max
  Clone ID: jC-gmle01810056g11d1
tgagaaaaaaaaacaaaaaaggaaaacaaaaaatgaaatgagattaagaaaaaaaacaagcaaagagaaccaaagaagaggggttacaaaccaaccaaaaaaaagacaaatggcacgaaaaaaagcaaccagaaacacgcaaaaaaggggaaatatgattataaaactcacaaaaaaaacaaaagaaagggaaaaaggaaaaagagagagaaagagagagagagagagagaaagagagagaaactaag

SEQ ID NO: 11799 - DNA, 519 bp, Glycine max
  Clone ID: jC-gmle01810056h01a1
gagaatccgaggcgaagagaagagaaaaattaagatggaggggaaggagcaggatgtgtcgctgggagcgaacaagttcccggagagacagccgattgggacggcggcgcagagccaagacgacggcaaggactaccaggagccggcgccggcgccactggttgacccgacggagtttacgtcatggtccttttacagagcagggatagcagagtttgtggccacttttctgtttctatacatcactgtcttaaccgtcatgggagtcgccggggctaagtctaagtgcagtaccgttgggattcaaggaatcgcttgggccttcggtggcatgatcttcgccctcgtttactgcaccgctggcatctcagggggacacataaacccggcggtgacatttgggctgtttttggcgaggaagttgtcgttgcccagggcgattttctacattgtaatgcaatgcttgggtggctattgtggcgctggcgtggtgaagggtttcgaggggaaaacaaaata

SEQ ID NO: 11800 - DNA, 583 bp, Glycine max
  unsure at all n locations
  Clone ID: jC-gmle01810056h02a1
cggctcagccaaccgcgaaaactggttcctagacgctttaaacggcggcgtttcgggcctcgaacgtggccgctccgaagcctcctccatggtctccgaagtacccgattacctcttcgggttagacaactcggaagaaattacaaatcaccaacaccaacgcgacccgcgacccaaacccgttctccaagacagcgtttccgttacggatccgggttcacccgccccggttgtctcgtccccttattgttccacgtcatcagcgccgcacgtgccttctctcccgaaccttccccatgttaaaaccaaacctttaaacttaaacccggttcctgatacacacttcaaggaaaatcaacccgaacctgaaaccgagcctcaaccgaacctctatctaaatccaaataaccctgtcattcactatcctccagaagctgcttattcggtaaatccggttccggttttctatgtttccggtccggttcgaccgggaactgttccggttcctatgcanaccccttacccctacgttcaacaaccatatcatgctgtgatgccacctcaggttccaatcgggtaccat

SEQ ID NO: 11801 - DNA, 575 bp, Glycine max
  Clone ID: jC-gmle01810056h03a1
gattgggtcaataaatatgttacaccttactcgcaagacgtcaatttcaagtacatcgctgttggaaatgaaattcatcccaataccaatgaggcacaatatattctatctgccatgaccaacattcagaatgcaatttcatcagcaaatttacaaattaaggtgtcaacagctatagactctactttgattactaactcttaccctcccaatgatggcgttttcactagcgatgcggagccatacataaaacccataatcaacttcctagtgagcaatggggccccacttcttgccaacgtgtacccttactttgcttatgcaaatgatcaaagcattcctcttgcctatgctctttttacccaacaaggaaacaacgacgttgggtaccaaaacctctttgatgctatgttggattcaatatatgctgctttggagaaagtgggagcgtccaatttgcagatagtggtttctgagagtgggtggccatctgaaggtggagctggagcctcaattgataatgcaggcacttactatgctaatttgattcgtcatgcctcgagtgggaatggaac

SEQ ID NO: 11802 - DNA, 532 bp, Glycine max
  unsure at all n locations
  Clone ID: jC-gmle01810056h04a1
ggcgcagagtagagcagcagagaagagagaaaacggcactgcagccgtagaaggaaaaccgaccatggtgcacgtctccttttacaggaactatggtaagacgtttaagaagccccgccgtccgtacgagaaggagcgtctagacgcggagctgaagctggtgggggagtacgggctgcggtgcaagagggagctgtggagggtgcagtacgcgctcagccgcatccgcaacaacgcgcggaatctccttaccctcgacgagaagaacccgcgccggatcttcgagggcgaggctcttctccgcagaatgttccgctacggactcctcgacgagactcagaacaagctcgattacgtcctcgccctcaccgtcgagaatttcctcgagcgccgccttcagacgctcgtcttcaaatccgggatggccaagtccattcaccacgccagggttctcatcaagcagagacatatcanggttgggaggcacgtggtgaacatcccatctttcttggtgagggttgactcacagaag

SEQ ID NO: 11803 - DNA, 315 bp, Glycine max
  Clone ID: jC-gmle01810056h05a1
attcggctcgagctcgagccgaaaaaaaaaaaaaaaaaaaaaaaaaaacaaaaaaaaaaaaaaaaaaaagggtaacataaaagaattataaaccttattccttttcggggcccatcttctctagcggtccctctttccgtttggacctgtattctgtttggggccgttctttcgattctcgttcggcattcttcattcttttctctagtcctggtctttctccattttttacaatgtgttccattcttcgaagcgtctttaattgtaatctatctttcgtctccttgtggttccctgggttaaatcggccttttc

SEQ ID NO: 11804 - DNA, 538 bp, Glycine max
  unsure at all n locations
  Clone ID: jC-gmle01810056h06a1
ttcggctcgagtggaagcagagacttgagcgttcgagatggaagtggcactcagagttcatggactaaatgtctagctcaagttggcagtcctcatccggtttcacctcataaacaattggttgatgcccctgatagcacttgtgcccaagtgatgcaaacaaagactgaaaaagttagtagtagatgggtgcatgcgacagaaaaagagtgccatgaacttattgatcctcttgatgatgttgcaatgggtaaggacttggccatgggaatatctttgaatatgcgactagagcatccactcaaggaactgtcctgcaatccaatgatgggtaaaggggcaaataagatgtctgatgtagatgatatgcagatcattaaaagacagagcaatgcctgtgaaaaaggacaactggaatacaatggtgataaaaccaggacacgggaaaatcaggctatgaatgttattgatgttactgatagcaacagtccactcgctgaaagcagagacttgaacacntccaatgggttttctgttt

SEQ ID NO: 11805 - DNA, 482 bp, Glycine max
  Clone ID: jC-gmle01810056h07a1
caaggttccaaacctcagccataagacgcctcacctatgatagctcagtggccatggttcccttcggaccttactggaagttcgtgaggaagctcatcatgaacgaccttctcaacgccaccactgtaaacaagttgaggcctttgaggacccaacagatccgcaagttccttagggttatggcccaaggcgcagaggcacagaagccccttgacttgaccgaggagcttctgaaatggaccaacagcaccatctccatgatgatgctcggcgaggctgaagagatcagagacatcgctcgcgagggtcttaagatctttggcgaatacagcctcactgacttcatctggccattgaagcatctcaaggttggaaagtatgagaagaggatcgacgacatcttgaacaaggtcgaccctgttcgtgaaagggtcatcaagaagcgccgtgagatcgtgaggaggagaaagaacggagaggtt

SEQ ID NO: 11806 - DNA, 455 bp, Glycine max
  Clone ID: jC-gmle01810056h08a1
caagtgcctcttttccttccctcacctcattcgccaagtgcaccttgattacctggaaaatggtgcagacattataatcacagcatcttaccaagccaccattcaagggtttaaagccaaaggctattctgatgaagagagtgaagccttgctcagaagcagtgttgaaattgcacgggaggcacgcgaagtttactataaaaattgtgctggatgtcgttcgggtgatggggatgatgatggtagaatcctcaaacaacggcctatcttggttgctgcatcagtagggagctatggggcttatttggccgacgggtcagagtacagtggggattatggtgatgctatcacggtggaaactcttaaagattttcatcggagaagagttcaaatattagcagattcaggtgctgacctgcttgcatatgaaacagttcccattaagcttgaagctg

SEQ ID NO: 11807 - DNA, 515 bp, Glycine max
  Clone ID: jC-gmle01810056h09a1
caatgcctgaggatagaggtttatgctctattgtgactggtattgctgctgaacatgtggaggaaaatttagaaacgaaagaggttcatgaccaacctgccagagaggaacttcccaaagattcacctagtgtcctttcacaagaaatggataagcatcttgattctaaagggtcaaaattgattgccatggaagcggaggaggctgaggagtgcacctctaccactgcagatgcttcttccatgtcttctgcagctgtgtcagatgcagatgctaaggttgaatttgatttaaatgaagggctcaatgcagatgatgggaaaagtggcgagttcaactgcagtgcacctgctggttgcttggtcagtcctgtgccgtttcctgcttcatctatgtcttgtggtattcctgctcctgtcaccgtggctgctgctgcacaggggccctatgtgcactctgaagatctattgagaagtacaggggaaattggttggaagggatcagctgccactagt

SEQ ID NO: 11808 - DNA, 560 bp, Glycine max
  unsure at all n locations
  Clone ID: jC-gmle01810056h10d1
aagtaaattaaccattatttatttggacaataatttattttatttcaagtccatatcgggtctacacatagacacaacataactcatgttgctagagtagttttctcacaaccatcgtgcacacaggccaaaacatctctgtagtctcttgaaatggtaaaggagtcgtagacctctccatcactacttttcttgtactcaaacaagagatatgaatgattgaaagcagtcaatttgccaaacccatagtcaacgtccctataaagactccaaatagggggtgatggtgtgaagtctgacaggtgacttccccctccaccaacaaccacatgaattgttccattcacagtgccagagtagtgatgcttttcttcattcacacattgattctgataaatggggcatactctttcatagttatggacatgaccataaaatccaatgtctactttgtacttttgccaaagcttctgcaaactttcccttcccatgggctcttcaaatgaaccctncatgccataccaaagattaaaggagtagcccaggggacgatgagctga

SEQ ID NO: 11809 - DNA, 389 bp, Glycine max
  Clone ID: jC-gmle01810056h11d1
gtatcggaccatgtattttttgatctttgggcaaaaaccccaaagcaaacgctttttaaggaacacgttttccattggggggtaaaaaggaacctacttattatggcggggagctgaaaaaaaggggccttaactgctgaccatttctggtaacctgagggggccaaaccaaagggggtatcaaagaatttgaaaagaatgatttttgttgttgggaggaaaaaaaaaggccccattgtccgccggacaggggaacctattgaagattacattggggagccgtgcagggggccaaaatattttggggacccgggctcatgaacccatatatctgtgacccaaaaggcttctggaagaactggaataatcccccccataacaacttctcc

SEQ ID NO: 11810 - DNA, 583 bp, Glycine max
  Clone ID: jC-gmle01810056h12d1
accgaaaactggttcttgcttatcattcaagttttgcttccactttctgtaaatactaaataccagaaactgtggatacaaaattacaacacaacacaagacataactctggattatcccaaccactcatacgagttatatcctcgagttttattcattcattcattccatataatgatataaattacagggaaatacaaacaaagacgcacatgagaaattaaacagaagcagcaagaagagaatgaattaaattcaaggcacaatcttataagccttggtcttgtctatccaacttatgaacgaattcttggagttcctgaatcccaaaaacccatgttccttggccttgttcatgctatccaacattccctcccctgagaaaataagatccacaaaccaccaatcagcaacctcgtcaagcttggtaggcagaagctgattctcactcacaatctcatcccaaacaggacccttatccttcatcaattccgacaaactcaaaccttcttcctcaaacccatactcctgaatcccaaactgttccgccagcaccttccaaagatgcttgccacctgacacg

SEQ ID NO: 11811 - DNA, 127 bp, Glycine max
  Clone ID: jC-gmle01810057a01d1
gaaccttatttttcttttcacaggcacgaccttaaacacaacatgtgctgggttactcaattgacccatcagcgcaaaatgctctattacaaaaaacattcagcgagtggtattgtacaggtgtctt

SEQ ID NO: 11812 - DNA, 135 bp, Glycine max
  Clone ID: jC-gmle01810057a02d1
ggcgaatctgatttttaattttacagttagtatgtgaaaccctgaaggtacaaagaacctgaatttgggacttaactcgaaatgtcctataactaaaatgatggtgtcctgataatgttgtggttttcatttaga

SEQ ID NO: 11813 - DNA, 562 bp, Glycine max
  unsure at all n locations
  Clone ID: jC-gmle01810057a03d1
aagcacaaaagacgtggataacttgatattattttattacatacatgcatagatagcctgctctcaaataagtcggcaggaacaaagatagagagattcaacgatcttcaaatttcacatttgccagaaatatataacagaaaagaggggtctgggatatgagttaagttttgatcacattcaactacactatcccaaaccgttactcttaagactttgaacttcacttgtactctaggatcatgttgttctcaggagctaatccaacacaagccctcaggatgttttccagcatagctcgctgctttgacaacgcattcaccactggtgtacccggtggaaccagaggggccttggtcaggtaactaaggatggtcgcaactgggtggaatgagtggaattttccctcattttcagctttaaactcgattcgagtgctgagctcagcangaaggaccaagtccaagataataggagcagctaacagtgaatcctcacatgtgttgtgcaacacaattgtgttctttccacccatgaatatctcagaagtgtactcatccat

SEQ ID NO: 11814 - DNA, 420 bp, Glycine max
  Clone ID: jC-gmle01810057a04d1
accaacataatttaccttggtattatagtgataaacagaaatgtgactaaattgcgggggcttggctgaagatagcatatttctttttctaaaagcagattaaaatagacaatgaattgccggtttaacagattaagcagctgctccaacagatacaccacccttgagcctggatttaccatacagggtttcttcaaaccggattatttcattcttggacccataagcaacttgagttctgccatcaatgttactgatgactttgtctagcacagactgatgaccatcactggtggaacctccagctttttcaatcaagaaccccaaaggagcttcctaaaacaacagtctaaggttggctttggctgatggagatgacccctcggtgaagattcctttttcttttacaataatttggtt

SEQ ID NO: 11815 - DNA, 552 bp, Glycine max
  Clone ID: jC-gmle01810057a05d1
ggatattcaatttaagccctatttcttgtcaaccagggcctctgaaaatttttaagtgcatagcatattttaactgtcatggtaaattattattacctacttcactggtccaaagaacaatctgattatgttttacagcacggaaaggagcgcagataaacaaagaaatggatttgtattatatactgtacatgatgctccacatccatgcaaaggagaaattttttccatcaagttgcctgcaataattctctgatatcgtacccttgaagctgcagaaaagttagaaataatataactcctgagttccaaaaagaatggatagtgatgggagtgagaaggttgtgagtttgagcatatgaaaaccccaaagcagtccctagaacaaacaattggggaaattttccaggagtgagatgtgcaagggcaaaaacagtagcactaatgacaacagcaactggcgtaggaacccacttagtgagggaagtcataaaaaattccccgaaaacagtctcctcaaggagtggagcaagaacacctgtgatgcccacc

SEQ ID NO: 11816 - DNA, 238 bp, Glycine max
  Clone ID: jC-gmle01810057a06d1
aaagacaaaaacacccatataataataataataattgaagtaaacaaatgactaaacaaaactaaaaaataatcaaaaaaaaaaattttcgcttatattccacccctacccaattgctaagctatctttgttatttgatgacacaaacatgactttttctaattaataaaaatttacaatgcagatacggagggaaccatttctagatttcattgggagcctttcccctgttttcctc

SEQ ID NO: 11817 - DNA, 400 bp, Glycine max
  Clone ID: jC-gmle01810057b01d1
gaaaaattgatttatatttttacactcactatgtgaaacacagacggggaaaggaacatcaaattgtgacgtcaaccgatatgacctatcacaaaaataattgtgtgagattaatactcatgttttcatttagagatctgcgttgttaaactaacaacccgggccgtaaggattaacggcgcacaactaccgtagaaattatatacttacgccgccacccgtattgaatagcacaaggatttgaacaaaatcccactttacctctggatcaaaaccttttttactactacaccatacacatgggttacatggaacttaaaaaccccatgtcaagcttgggcaattaacccacctttattctactatctcaccaacaacaactacttggtacttgaccgtt

SEQ ID NO: 11818 - DNA, 451 bp, Glycine max
  Clone ID: jC-gmle01810057b02d1
aatggtaacacgcattttttttttataaattgttcagtatataacacatggtagacctgcccagcttaagacttttagccctactgggccttcacgattacttgtgaagaaaattgcggagaacccttttttggccgaaggaacttcatttgttcagcggggccaacccttttggacggattaatgagagtccatgaccgatgatactgatgacgaggtttccaagtttaagctggcattcccactgataccaaatatagatatttgcgtgtgactgaagagcatccattcctaagccttcttggatatcctctcttgacaacaagggatgccaaatcacaaggggacccgatcgtcaaacggaagtgtttgtcgtgacagctgtcctagggcggagcattcaaagctgtggaccggtgaaattgacttttctttcttgcaaacatagaga

SEQ ID NO: 11819 - DNA, 344 bp, Glycine max
  Clone ID: jC-gmle01810057b03d1
gagctagaatacatgcggatatatattaccggacggagcaacccgcaccccatgccatatatgttcaattccatcagattagtttcttgaattcatatctcatcaagactttgatgttatggaaactgacataggttattacagcggttacttatttacctacgcatatgctactttgttgagggtctctaagtcgctgcacatgttggcattctatggatcagtggcgaaacatcactcgttgatcttcgagggtctcatcatagcggagccttcatggtccacttcatggcactgatgaagcgagccaggctctgtggagcctgatacacatctgaagcatg

SEQ ID NO: 11820 - DNA, 558 bp, Glycine max
  Clone ID: jC-gmle01810057b05d1
caattccaactagttcaaattcgatagagattatttaaaatcaaagtcccacacggaatttccttttatttctgtacatgaaaggactggcaagttaaattacaaatggcaaacaatggcaccaaaaattccactcgcccttaccaggctccccaactctgataattacactgcaagacttgagaagtatgacacacgacctcaatgagatattccatgtattgctctgaaaactcagttgcggaagattgttctgaatgtcttcccaacaatttgacaaccacgctaaattcagtgacaacccgccaggtaacttgaggcaccagctggtttcttcaagtataacaattgaagcagtgtaatgctgtttaaacccctgctgcagtttttgcttcagaacccgactttccctcagacgattcactctttcgaatcttcctagtaggtgtcctcatggtaacaaattcctcagcggcacttgggtgaatgcctacagtggcatcaaagtcagccttggtcaagcgagctttaagagcaactgcaaacccctgcacaatt

SEQ ID NO: 11821 - DNA, 562 bp, Glycine max
  Clone ID: jC-gmle01810057b06d1
atgatgaactctatgcattttatgatagatgagcaaacgagtatttgtttaaacacaaacaaacaaaagggttagtgtctaatcatcctccccctcatctgtaacgaatttgccagttccaggattcaaagcagcaatgaagaagaaaagaacattgaacaacactaggggctcgatttcgttgattggtaccccagtctcaatgttgagttgggctagtgctccctttccggttataatttctccaatcaatgagaaaacgaaacccaattgagccaatcttcccacaaatagctcgtttgctttcgtgaatccaaataaaggacctgaaccaagaccaagagcttccctgaagcctttgcctggaggaataacacctccagtagtaggttcgtcatcaacaaattttccacggtcacctaaacctccaatggctcctagcagggtgaagaggatgaaaaacagaagaagaggctccgcttcataaaggggaattccagtttccagattcaattgtgctagaattcctttcccagttattccttcacccaacagtgatgct

SEQ ID NO: 11822 - DNA, 482 bp, Glycine max
  Clone ID: jC-gmle01810057c01d1
aaaaatataagataccagtaatataaaactagactctgcacaattcaatatgtcgaaagaaaaaaaaaggctgggctttacaaacaagtttatttcccttatttttcacaagttgagatactgaatagaagaaaaagcgatcaaggagccaaccggtcatccttccacagccgttgtgcattgatctcatggggagtatattgcaacctgtcatgcaagcgagattactgcccttgccaaaactcgaaaagttgtggtagatagcctatatccaccccagttcttacgttgagggattaaacttgcatcagagcatttttcttccagctctttgtactcctgagaaagaacatgcgtacccggcactacagtactctgcttgctgactattgctccaatctgactacctctacggcggctatggaaatactgctctgattcctcatcagagactttctgaacaggccccttcacccgtacct

SEQ ID NO: 11823 - DNA, 404 bp, Glycine max
  Clone ID: jC-gmle01810057c02d1
gatagtcgtattttatcaaaaaaatatcaagacaacatcgaaacagagaaatgttaaacagtttctgtcacatccataaacacagttgataaaactagtctgacttagagtctccataactccggggtttaacaagatcatacaaaaatatataacttttgcataaatgaaaacagcaaactaccagcaattgaggctagttctttggcccaatatccttcagtgcacaaatctgctcctcacccattgcagacataactgacacaacaaggtccttaccctcagcaaacccatcctttatctgagtaagcagactctcatctgtaggtaacttcaggtcatccttggtgttcccattttcagtaagcaagctaagaaatccatcctcagcaatgtcaatcaac

SEQ ID NO: 11824 - DNA, 410 bp, Glycine max
  Clone ID: jC-gmle01810057c03d1
actagcacatattgtttaatctcactacatcaaaaaacccaacgggacaatacaaacaacaggagaaggatatcagattacagagatagctgcttgtgcttatagccagctgaataatgggataatacaaatgtttgctaccaaaactactgcaaactatgatgctgaccacaggccaaatcctgcctctatgacagcgttatcattatatatatattgggcaaaccatgcctaacggaacatttgatctacgcaatcagtaccttgttataccgtctccgtgcggtatcacatccttgaaggatccattactgggaatcatcggcaacacatgctcctgacgtggcacactgacatcaagaaggtatgggccacgggaagccaacatttgacgaatttctgctctaagc

SEQ ID NO: 11825 - DNA, 414 bp, Glycine max
  Clone ID: jC-gmle01810057c04d1
ggcaaatgcattctttattaaaagaaactaatgctgaatgtttttctttttttctttttatacaattcgtttacatgaatcaaattcattttttcacattattgtgacagataggcctcaaatacattcctaaaataaaatagcagcagcaattatacgaattacttttttttgtttcctgtggttggatgaaacttacgagcagtggattatcatcattatcacatatgatgaagcaatattcaagaggtgcatgaactgtctgaataggaataagagtttatgtacaacgggaaatgaaaatagttgtcatttgaacacactatgctgtggcagtagcttgttctctaacagcctgtgatgctggcagaagggtgcaaatcaggttgcgggcaccgtacacattatcaacac

SEQ ID NO: 11826 - DNA, 537 bp, Glycine max
  Clone ID: jC-gmle01810057c05d1
ctgaagctagaacttttattgaaacccttttaggaggacatatactttatatagctacccctttacattttacaagattgatgaaccaacaaatacatttacaaaatatgctagcagttgccaacaattcaccacagccgcaacttataaaatatgtcagaaatatgggattcaaacacttgaagctttttgcagactagcagcatattgccgagcccattggtcatagtgaataatttcttcgagtgacggagatgctactaattccttttgatgatcctgacaagttagtctccacaaccttgaatatatccagataactaatcttttcttgaacaaacatttctacagctttctcatttgctgcactaagaactcctgtcatggtgcctccagcacgtcccgtagcatagcaaagatgcaccgatggaaacttcttgtcatccggtgcataaaatgttagagaaccatacttgctaagatcaagacgaggccgagttactctagagcaatatattctttctggccaagataatg

SEQ ID NO: 11827 - DNA, 570 bp, Glycine max
  Clone ID: jC-gmle01810057c06d1
aaacccatgatcattgaatctccacgtcataattgttaataatggatttaattcatacaaaaccttaaagttaataataataaaatgcaaccgataagcattagaaactaatagcagggcaaaaagattcattaaagactgcagggtggagaaaggggtggcagaagaaagattgagggggaaccaaagtatcatagacaaaatcatgcagcaggctgctcctcagtggcaggagcttctttctggggttcttctgtgaggccattagaggtggcatcctttggctgtgaatcaggtgcaccttctgctgcagatccagttgcttttgatgctgctttctcttttccatccttattatctttggcgtctttagcaagagccggtggtggaggaatcatgtgaggtggtggtgtatgcttcagctttaacagtatttgccgcaacctagacagatccgtgggtttgccaagctttgggccttggatgaccgtaattgatggcttcttgtcctgatcctttttgcctctttcttttaatgctgggaacctcacgaggaatgagctcttgcat

SEQ ID NO: 11828 - DNA, 123 bp, Glycine max
  Clone ID: jC-gmle01810057d01d1
aaacacctattaaattttcaacaaagaataaaagattcccacggggtaaggttttattaaaaaaatcactaattccccattacccactattctatccaattttattctctcttaccaaaactt

SEQ ID NO: 11829 - DNA, 366 bp, Glycine max
  Clone ID: jC-gmle01810057d02d1
cctccttctcttcattgacctccccatcatcttctttcccatcatccttttctttatctactttatcaccttcctttgaggtttcttctatatcaatatcccttacagaaacttcaaccttgcttttctctttctcaccctcttcttttacatcctccttctttgcttttttgcgatccttctctttctccttcttatccttactcttatttctcttattttcttcatcaacctcgcctacgacattttgtccctttacctttaaagtgactggttctacatcttttgccttctttccctttttcttctccttctctttgttttccttcttctgttcaccatcaccatttttaacctttcccttta

SEQ ID NO: 11830 - DNA, 470 bp, Glycine max
  Clone ID: jC-gmle01810057d03d1
ttttttttttttttttccgattttctgacgcattatcttgttatgaaattacattgtatgggctcgtactcgtgttctatctcgtctaatagctagacttgccttaattgtttgtctcttgccttccgccttatgcaaatcagcaccaagaatttcaagagaaaagagagctccttggggagaaaggaaaaaaacctttaccaaaacctccctaaaacagagagcggaggaaggaaaaagcgagcaaaagcggccaacagagccttcccccccccccgggggaaaaaaaaacgcacccccgaaagaccaaaaacccccgaagagggaaaacgcgccccaccaggaaagactccaaaaaaaacaaaattagtcgtaaaagggggtgcccttccgtctcgaaacccaaccaccccaaagggggacagccccccccgcaccaaagtcaaaaaaaaaaaacgcccccccctccc

SEQ ID NO: 11831 - DNA, 286 bp, Glycine max
  unsure at all n locations
  Clone ID: jC-gmle01810057d04d1
cacacgaaaaaatttatatttatttatgtaccataaatgagttatataaaatcaaattctacctcgtacataacaaaaatccatatttcaaactacctagcaatgtaatagtgactaatgtccgcctcgaatctaccagatattntgaactctatggcatacaaattctaagggtatgtttggatgaggggaagaaaaagagaaatggatggaaaattaaaaaactttaaggtgtgttttataattgcttacattctattttaattcaaattttaccttaaattta

SEQ ID NO: 11832 - DNA, 465 bp, Glycine max
  Clone ID: jC-gmle01810057d05d1
actatgtatacccatgatcattgaatctccacgtcataattggtaataatggatttaattcatacaaaaccttaaagttaataataataaaatgcaaccgataagcattaaaaactaatagcagggcaaaaagattcattaaagactgcctggtggagaaaggggtggcagaagaaagatagcgggggaaccaaagtgtcatagacaaaatcatgcagcaggctgctcctcagtggcaggagcttctttctggggctcttctgtgaggccattagaggtggcatcctttggctgtgaatcaggtgcaccttctgctgcagatccagttgctttagatgctgctttctcttctacatccttattatctttggcgcctatagcaggagccggtggtgcaggaatcatgtgaggtggtggcgtatgcttcagctttaacagcttttggcgttacctagacagatccgt

SEQ ID NO: 11833 - DNA, 469 bp, Glycine max
  Clone ID: jC-gmle01810057d06d1
aaaactaaaaacgttcattatgaaagggcagagacaacatagtacaaccataactctactcatttaacaaaacaggaaagcaccttcttggaatgactactacaattatatttgcgaggaagattatttaaacctaatcagggatccctcaagctgagaatcttcgcttttgctgtcacaactgccattcccattttcagtgaattgccaaaactgcgaacaaatttattgccggaattgtacgacggagcattgagcaagatactcaattaaccatcgccggaaagcattcacgaatgccgtcaatgaataaacatttttcttttccgaagggtacttaattggctgagaagagtgtttggagaagagtattattgtggggaagctacccaactgcagaccaggctatggatattccttcaggtttccatacgctctgaatttgtgaaccttaagtcctgacccagct

SEQ ID NO: 11834 - DNA, 207 bp, Glycine max
  Clone ID: jC-gmle01810057e01d1
ataatattgttttttttttttaccaacaaaaaaaaccacgacaaaagagaggggaacaaaaatgtaacaaaaatgcaggcactggccagaagaaagtgaaaaaaaaatatccaaacaccaaataaaatgaccacgtgaatcgcccgattaacagattaggccgcagcttcaacagctgcaccacccttaaccctgggttaaccaacc

SEQ ID NO: 11835 - DNA, 449 bp, Glycine max
  Clone ID: jC-gmle01810057e02d1
gggaagaatcattattttctctattaaccatccatgtttacaatccaggaaaatataaaaattaaaaaaatgatcaagaaaaaatattaaaaaaaaataactatctaaaatttaaacaggcacccgtccctagttccgcttttctacattcacaatggcacgagtatattgaggtaaaagccccaaaagaatgtgctatatataaactctagtaaattgtaactgaccctaaggaatattgttcataccacgcgcaaaatgacaaaattcagggcactacaaaaccacaacaccaggaaacaaacaaccagtccataaaatctcttcgtggcaccttgagaagacctcagatagaaatcccagaagctggaaccaactgtcttgatgggacctagtgatgtggcgcaagcacccactcttcgtcagcctcgttaccattaacgagtact

SEQ ID NO: 11836 - DNA, 586 bp, Glycine max
  unsure at all n locations
  Clone ID: jC-gmle01810057e03d1
accatacccgctgctgtagcattatacacattattattactcttgctcccgtcaagataaatctgaccccttcccctgttcccacctacgtatataggatattttaagaaatgaacatctctcttagtagtgggatccggggaaagaataggaaaggttatttctttatatttttgaccaggaacagggcctaccacaagaatatttttttttgtaggacgatagttttgaaaagacagattgcctatcttctctttaatctcaggcgaaatacgatcggggggtgccaattcaaaaccttccggtaaaataagaacagcccccacattcaaagctccctttttaccattagcaagaacttgtttcacttgcatatcataaggaattcgaacaactgcttcaaatacagtatcaggaagtaccgcttgtggaacctcaatatccacgggcttattagctaaatggcaattggcacagacaatacgaccggttgcttctcggngattttcataaccctgctgtgcaaaaatgggatatgcgttngaaatgggtgctcgaatattatatatatcatgatcgatatgga

SEQ ID NO: 11837 - DNA, 192 bp, Glycine max
  Clone ID: jC-gmle01810057e04d1
tggttgtactgtcggcacgactaatttcgggtcgacgagctcactctccgtggtcgcccttcgttctttttttttatacttaaaacgaatttaggacccatgccactttgactaaatacttaaggggactgttctatattaaacatgtccattcagattaacatcggctgatgaattccattttggcaataa

SEQ ID NO: 11838 - DNA, 503 bp, Glycine max
  Clone ID: jC-gmle01810057e05d1
tttttttttttttttttttttttttttttttttttttttttttttttttttttttttttgtttttgtttttttttttttttttttttttttttttttaaaaaattcaaaattttgaaaaaaaccaaaaagcccaaaaaatttcccggccccaaaaaaaaaagggggcccccctggggggggggaaaaatcccccgggggcccccccccccgggggggggcgggccttcccccccgaaggaaagaacccccccagggcaacccccccggggggggtccccgccaaagcccgattccccggaatccccccccccaattttttcggcccaaccaaaaaccccggcaaaaagggaggcccttggacccgggcccggggaaggccccgccccaatttcgggcttacgcccgggggggggggaagaaaaagcgtttagagggggccccccaaattaaagggcggggccgcagttacacccggggggagggggaaaacccgggggggggc

SEQ ID NO: 11839 - DNA, 519 bp, Glycine max
  Clone ID: jC-gmle01810057e06d1
gccacgaacaaaaaagttggctttttctaaataaaacctttttaacttttcaagtatatatacataaaatttaaatgttatcactcgtacaaaatcacttggctgataataagactaacctgtagggtccaaaatctaatattgtttctcctcttcactgccatcatctccatttgtcttatccccatccctgatttctccatcactcaactgcatatcagcagagttttctcttgctggacttgactgcctttgtattaatggttcgtcatcatcagattctgataatgcttgccttcgccgggctatgcttgaggaaggtgcaggcgcttcctcatctgcatcggaatcttcaagcccagctgctgcaagaagaccctgagcattttcctcagcatcatcattcatctgagtttggggctcctctctgtagtttatgtcagcttcttcatcctccatttcctgttcatccatcatatcattttcgggttcctctgtgtcatagcgcgaatttgagtg

SEQ ID NO: 11840 - DNA, 422 bp, Glycine max
  Clone ID: jC-gmle01810057f02d1
aacaggggcaaacaggtccctggattttttttttctcgcagcaggaaagccccgattgacagtcaagttaagctttttgatacattagaccccaaaatcccaacaccacttctcaggtgggcagttgttatatccgcctttcccaggaaaggggcataaagggagataaaagctttttctttcaacccaccccaccataggggtcaagcccaagggaattgtttgacttaaacggggacccttttcaggatttttttttaaaacactggagattttttgaatttgttaaaaaaacaaaagccttgttatctggaaaaccacacatttttgggaaccagcccccccccccccaggggggggttcgcttgggctgactgaataaactttttttttgagactttggacattggcctcctccaatt

SEQ ID NO: 11841 - DNA, 113 bp, Glycine max
  Clone ID: jC-gmle01810057f03d1
caatacaatttgtttttccgcacaattgttataagaccgtcaataggcaagaggatgtgaacgacgtttggcttagaatccttatgttaaaaacatgatatatcagaacatgt

SEQ ID NO: 11842 - DNA, 453 bp, Glycine max
  Clone ID: jC-gmle01810057f04d1
attatccacttaacattgtgcaatgattaaaagattggaacaattggaagcaagtccctagaatgaacaaattctatatcaagaactatgtgggtgagcttgggtcaaccacgccaaaacttattactggctgcagagcaatacaaactacgagagcctctactgagactgactgactcaacatggcactccttttgcacctgatacgtactaaaaggagctttgatgtattggtctacatagcataccttatcagcagagttggtctcacacatatcatggaatgggcttccactctcagctttaggtgcccatggccgcttgctcgctactagatgatgaaaatcgacacgtctttggctgtgaccgcatgaatggtcatacgatggatcgactttaacaatatcatgttccctgaccatattgaaggttgagccaccagtagaggaaaca

SEQ ID NO: 11843 - DNA, 341 bp, Glycine max
  Clone ID: jC-gmle01810057f05d1
ccaggaaaggatgggccgtccattttttggggtggaggcccaaaaacgggggggaccacttttggtacatggtccatatttggcaaactaggggaagattttttgatctaccaggggacaggttacccttgcattggctttgggagcaaaaagattttaaaatacaatcccccccaacaaaaacacaatttttttaattaccttttttttttaggtggaaggaacaatacccgccggcataaaagggtgttaaaacaaagatgaggggggggcaacttttgtttttaccttttcaaaacattcggggttttgggtgggggggataaaatggggggcttttt

SEQ ID NO: 11844 - DNA, 407 bp, Glycine max
  Clone ID: jC-gmle01810057f06d1
agttgggaggccttttgcattgaaaaggggaaaaaagggaaagggccctatttacctgtatcactctactttgggagatggataaaaatcatctacaattcagttgactaaaaatttaaatagaaataattttctaaactgaatcaagggccggaatcaccaaactcaataaacaagaacttcaaattttgagaacaaaaaatgtcactcaaacctccataatctgtttctatatggacaaacttgctggcaataactacactacactgcacaacattttcctgatcaagtaaaagtgagcacttttcatataaaccttcctttggggctagattcaataagccggatctaggagcagacactttattctgcccagtactgaatctttcttgagcagtggcccttta

SEQ ID NO: 11845 - DNA, 133 bp, Glycine max
  Clone ID: jC-gmle01810057g01d1
gtaacacaggccgttagtaattatttggaagaacatgtcttgaagtgtagattgttacatgaggagtgccaacagatgatgacctgaatattcgattcaaaacaatttgtaatagcttcctgactgcatatct

SEQ ID NO: 11846 - DNA, 642 bp, Glycine max
  Clone ID: jC-gmle01810057g02d1
aacaaaaaatacaatcttcattctattagcttaagcatcggcatctacaatcatacatactgctgctagtcaatctcgcattcagtatcagatatcttggtatatatgtagtaccattttcaataaaaatgattatgcaaattactcggggacaaattgtatgggaataaaaatggaaaagcctaccaatttggagagatgcctattgcctatttattaagatataatatttcacaatgtcatgcagatagatacaatcatgcaaaagaaatattcgcacgtagttcctacccaacagttgcatcactatctcacaagttcccagtcctcttttgacatgtcataaatttcaacacaaccatcctcaaacatgatcgagtgttttcgggaatatttatcaaatcgtttaataattccaaacctctcatttccaagttgttttatcctaataacttcaccaatgcaattgtgtaagcactttggttggtcaacaacacgagaacttccaatttgcaaacctccattctgataaacctgatatgccactaattttaatgtagcatcaagagaaagtttaggcttggtagggtcgacacccaacttacgcctacactcagcagcaccacaagtgcaatcttgatc

SEQ ID NO: 11847 - DNA, 145 bp, Glycine max
  Clone ID: jC-gmle01810057g03d1
gggaaaagaatgaaatctcagtttatacccactaaaactgaaacaaacagatttgaaaacgcctgtaacaaaaaatcaacatctttaatacgctagcaatgaatatatatggctttgcaaaggcgagggggaatggaactgcatc

SEQ ID NO: 11848 - DNA, 309 bp, Glycine max
  Clone ID: jC-gmle01810057g04d1
aaaccatatcaaagctcttagaatggaactggtaaacatctttagaaatcaatcgcagtttctttccacaaagaaacaacaccccacttcccgaccacagatgtgtagaaagttcatactggacttcctaactacggaggaatgctaatctaacccgatgagtttgaatggttacctagacgctgacctagtcttcgagactctttgctggtggatgagccacaatatgcacctggctcccaagactgcggaagtactaatatcacagctgaacgaccctatcattacgccggcgtggctaatacaatg

SEQ ID NO: 11849 - DNA, 590 bp, Glycine max
  unsure at all n locations
  Clone ID: jC-gmle01810057g05d1
gatagaagtgtagatcagattaaaattaaaaataaaactcttagatgcaaaccagtgcttgatattttacattcagaacataccaactcgctatcctattggatgtttttcgaaagtaaaagcactactgaaacaacgaacatagactacagttatgcctgaaattattacagctgggtcacactagctagggtgaacccttccaaaagcttaaaggatgcaatgctatacaggttagactttaattataaggtggcacacatgatatgctatgaacaaaatattgatttggaaaaaaagaataatattagccggttaaaaaaacgctgccttgtgcatagcaggaaaaatatggttcactcaaagggcaaaacaaactttcctcatccatcacccatagagggtcagaagaatattcccatgatgatggagaaggcacttgtggtgggcaagagaagttgcaaccctcttcactgttcccttcataaactggctgaagagtgttgttctcttctgacatatngncaatatccttccatatatcatccatagagaacaacccttgttcacctttttgaccctgatcttgg

SEQ ID NO: 11850 - DNA, 573 bp, Glycine max
  Clone ID: jC-gmle01810057h01d1
atccagaaacatttattatttattgctttctaccatctctgcatctctaattgctgtaaaaacactggctctttggaaaactcagaggatgcaattcctactgattgcaaagaaattgacgcagtaattttgataataaaaaccaatctgttattgtacacccatattattgccacatttaagactagcccgtctttatatccttaatgctctcttattgccaaaatcacaatatgtaatcaagttcaagccgcaactttcttggatgtgactgaattgacaatggtagcaaactcaggaccctttaatgaagcacctccaacgagaaatccatcaatatcttcttgctttgctagctcagcactgttccctccatttacagaccctccataaataattcgcgttttagatgcaacttcatcagggacattcttttttagccaatctcgaacagctacatgtacttcctgagcttgctggggagtggccactttgcccgttccaatagcccatacaggttcatatgcaataacaatgttgtcccagctaggaactgcatctgcataagccttc

SEQ ID NO: 11851 - DNA, 415 bp, Glycine max
  Clone ID: jC-gmle01810057h02d1
ggggggaaacaaaaaagggttattggggtgtggaaaaaaagggggtcctccccggggggttttttcttataaaacgtagcaacccgtggaaagcccccgttttattttgttgaccggggtttttttaaagtttgggggagctttcccggggaaccacaggggggttgggggggttccccaaggaaaaaagggccctctggaaattttgaactcctgatatcaaagggggggggtacttggtgtacttttggatccccaaggggggccagaaagaaggtttttttccccccggggggaaaccccaaatttttgaaccccccccccccccacctggtgtttcccccccaggggggaaagaggggtccctccaccccttggcagggggaataaaggttttcggtgggggggggggccc

SEQ ID NO: 11852 - DNA, 396 bp, Glycine max
  Clone ID: jC-gmle01810057h03d1
agttgggaggccttttgcactgaaaaggggaaaaaagggaaagggccctttatacctgtattactttactttgggagaaggataaaaaatcatctaccattcaggagactaaaaatttaaatagaaataattatctaaactgaatcaagggccggaatcaccaaactcaattaacaagaacttcaaattttgagaaccaaaaatgtcactcaaacctccataatccgtttctatatggacaaacttgctggcaataactacactacactgtacaacattttcctgatcaagaaaaagggagcccttctcatataatccttcctttggcgcttgattcaaataagccggatctaggagcagacactttattctgcccaaaactgaatcttttttgat

SEQ ID NO: 11853 - DNA, 466 bp, Glycine max
  Clone ID: jC-gmle01810057h04d1
agaggcaaaagataattaaagtttgtatggatttaacaaaactaatatttagaaaaagacatgcaatataggggggccacaaaaatacctacttcgaactgtgaatatccactatacaaggcgtgtgaggaaaaaaaatttgccaaccaagttcatactttgaagctagagagtcataccagccatttccccaagcaataacttaagggaatttagcttctcctggttttttattcgaatatttggaaaaacctttttttaataacctatagcattcataatctactctagtctttctatttgctttttcagcttatctatcttcttgatcttcccctatggttgtgcagaattagtttcttgaagctctaaataaacagaaaggtttgcatttacaacgagctcagcatattcagatggaacagcatctctttcagagattactgccaaagaggatagattagct

SEQ ID NO: 11854 - DNA, 434 bp, Glycine max
  Clone ID: jC-gmle01810057h05d1
aagggaaatttgtcacatttattcattagggtatatgcttcacctagtatcacctggtttatccttaattaaaagaaaactaaaatacaatctcttacatgctatttttgttggtcttgaaatagaataatttcacctcgataacttttaaaatcctttaatgcaaattaccgaaataaaactctagttctagaacaaacaacacctagctataataattagggggtgataccatagagctttcgaatcccgtctatatcatcttgcgctagattcaccttcctagtttgaggtggtatagaaggatacatgaaggctcttaggtccgacgagtggcctaatccgagcaagtgcccgatctcgtgcactgccacaaatttaagggtaaacgcacttgtcaccggcgatttggtgacatccccagaccccaccca

SEQ ID NO: 11855 - DNA, 377 bp, Glycine max
  Clone ID: jC-gmle01810058c12a1
taatttcttaggtcaaagaatatttaacaatgtcaaagtatattgtctcctgattagattaaaaaatttaagagaaattacaatagcctctattcaaagaggagaactaggtctagatattatgatgattcaaaatcagaagaatttaattcttctaggcctaaggaaaaagaaaaataacaaatttatgaaaaaagaaatatttgttatcgaaccagttcgcctgtctagaaaaaacaataaacaattttttatgtatcaaaccataggtctttcattaattcaaaagaataaacgaaaaatttatcacaaatacccagaaaaaattcatgttaataagaaaaatttttataaatatattacaagaacaagagatc

SEQ ID NO: 11856 - DNA, 377 bp, Glycine max
  Clone ID: jC-gmle01810058c12d1
gatctcttgttcttgtaatatatttataaaaatttttcttattaacatgaattttttctgggtatttgtgataaatttttcgtttattcttttgaattaatgaaagacctatggtttgatacataaaaaattgtttattgttttttctagacaggcgaactggttcgataacaaatatttcttttttcataaatttgttatttttctttttccttaagcctagaagaattaaattcttctgattttgaatcatcataatatctagacctagttctcctctttgaatagaggctattgtaatttctcttaaattttttaatctaatcaggagacaatatactttgacattgttaaatattctttgacctaagaaatta

SEQ ID NO: 11857 - DNA, 482 bp, Glycine max
  Clone ID: jC-gmle01810058d12a1
cacaaaagcggtgaccatggcaaacatgattatggcttccacaaaacctctggttccagtctgcaccagttcccgttcccccacaccaaaactccccattctccaaatttcactccccaaagccccaaccttgaaactgaaactcccaatttcaaaagccccagatgctgtccctcctgagagggatagcaccactggtcttggccagaccctccctagcagaagaatttgagaaagcagcactctttgacttcaacctcaccctgcccataataatggtggagtttctgctgctgatggttgccttggacaagatatggttcaccccacttgggaaattcatggacgagagggacgcggcgatcagggagaagctgagcagcgtgaaggacacgtcggaggaggtgaagcagctggaggagaaggccaatgctgtcatggcggctgctcgagcggagattgcagcggcgctgtacaccatg

SEQ ID NO: 11858 - DNA, 513 bp, Glycine max
  unsure at all n locations
  Clone ID: jC-gmle01810058d12d1
aacctgaatctctgattttacattgaaaattattacgattacacaatagacacatccaaaagtagaaactgatcaatcctttggtgaggggattgaaatgaaaattacatagacatattaagcagtgggaagaaccttattaacaatctcctggctaagagctgcaatctgggaatcaagggacttgatggtttcttccttttgattctccaagctagacagagcctcctgcagctcagcctcgactttcttcctcccctcagcaatcttctgctccacctcagcctgcgtctccttcttcatggtgttcagcgccgctgcaatctccgctcgagcagccgccatgacagcattggccttctcctccagctgcttcacctcctccgacgtgtccttcacgctgctcagcttctccctgatcgncgcgtccctctcgtgcatgaatttcccaaagggggtgaaccatatcttgtccaaggcaaccatcagcagcagaaactccaccattattat

SEQ ID NO: 11859 - DNA, 572 bp, Glycine max
  Clone ID: jC-gmle01810058e12a1
gcgctcccgggaaagtgagggaaagcacgagaaagcttgcgaaaatttcacgttcttctatttgcaaacactgattttccattcaattactgctattattatcaattattattattttgctgagatcaaattggtttatcgtattaagaattttcattattattattactgttgagactttcctcaagtcttgcaccaaagaactgggttcccagttttctccaattctagggcaactttttcggctaaatccctttcttcccatcgaagcgagctctcattgcaaattaaacgcgctttgcgtgctgcgatcttggttgtgatggaaactagggcataaattggccgtgcagaagaaaaaaagcgtttaaagaatgttcttcagcggcgatccttttacacagaagcgtgtcgatttgggaggtcgaagttcaaaggaaagggacccgaaaaacctgttagaacaaacacgagttgagcgcaaccggcgcttatagttgcgccagcagaactctgctgtactcaaaattagaaatgcttcagaaggagaaaagctgcagaactgaacaatc

SEQ ID NO: 11860 - DNA, 533 bp, Glycine max
  Clone ID: jC-gmle01810058e12d1
acaaaataattcacaatttagatatgtacatttagaaaagagacaaattgagaatgaagattgaataagaatatatatacatacactcgcacacaggatatttttattcaattctatccatcagattatttgtcgtttcccattccactgacaatggtcatttgtgagtcattttctaccgccttcaaatctacagatatcgtaaattccactgcctccttttaacttaaatcaaagccagcatcagcatttatggcatacagtaatttggtttccaattgctccttgcttgtataaggcggaagctttagtagattcatacaagtagccgatgttggtaatcggtcaagtgattcttcaacggcattaccggaagccctttgtatgcaaaacataggttcaagatatcggaaaccaagcaaaggcccacgagagcaacctgtcacaaacttcaaaaatttcttcctgttttccaatgaaaagcctttgagaacttcccaaaacatctccataacaaaatgctcattatgata

SEQ ID NO: 11861 - DNA, 535 bp, Glycine max
  Clone ID: jC-gmle01810058f12a1
ctgggatccaaaactaccacgggtttggcttgatttttccaaattgaacaaaactattttccaaggttctggagttattgatggctcaagaagcaaatggtgggcggcatcttgcaaaaagaacaagtccaatccttgcaaaggtgcacccacagcatttacaattgatacaagttcatccataaaggtgaaaggactaacaatccagaatagccaacagatgcattttactatatcacgatgtgattctgttagaattactggcgtgaaagtgtcagcacctggagacagcccaaacactgatggaattcatattagtgaatcaacaaatgtcataatccaagacagcaaaattggaacaggggatgattgcatatcaattgtcaatgctagctctaatatcaaaatgaagagaatttattgtggaccaggacatggaatcagcattggaagtctagggaaagacaactcaacaggcatagtcacgaaagtgattttggatacagcagtttttaaggagactaccaacggtctc

SEQ ID NO: 11862 - DNA, 455 bp, Glycine max
  Clone ID: jC-gmle01810058f12d1
gggcccaaatttcaaaccccccccttttttaaaaaaaaatcccaatcaattttttaaaatcgggggcccttttggttcatcggggcggggggaatatgctaaaatggccaattctctcggatcaatttgggggggagggctaattatttaaaaaccaaaccctccctgggttggggtttggctcatttcaagcctcctccaacaacatagggctccccctccgggttaagggggacataaaacaagcattttacttttaccccatttggtttaaaatctttttaataaagggggtgtaataggataattcatctttagaaaacaaacttattgttcaggggggcgaaaatcttcttcctttatagggggcccttcaattggagagggttgggcccttgaactaagggaatcagcagggggggaaccacccccttgggaaagccttgggctggggg

SEQ ID NO: 11863 - DNA, 577 bp, Glycine max
  Clone ID: jC-gmle01810058h12a1
tgaacacatcattaagaaccataatggacatcaagaggttatggttggatattctgattctggtaaagatgctggtcgctttactgctgcttgggaactttacaaagctcaggaggatgttgtagctgcttgcaatgattatggaataaaggtttctctattccatggtcgtggaggcagtattggtcgtggtggtggcccaacatatctggctattcagtcccaaccccctggctctgtgatgggaacgcttcggtctactgagcagggagagatggtagaggctaagtttgggttgccacagatagctgttagacaacttgagatatacacaacagctgtactacttgcaacccttcgtccacctatcccaccccgagaagaaaaatggcgtaatgtcatggaagagatctcaaacatcagttgtcagtgttaccgcaatgtagtgtatgaaaatccagaattcctggcctactttcatgaagccacaccagaggcagaacttggcttccttaacataggtagccgccctacaagaaggaagagctcagtaggaatcggacaccttcgtgcaatt

SEQ ID NO: 11864 - DNA, 545 bp, Glycine max
  Clone ID: jC-gmle01810058h12d1
ggaaccaaaatgctggaaaaacttaattattttgcatcacattcttatataacagtatatctgagtacagaacaaaccattcaccattatggctatgataatctttccttagcaaacctattataaaacaagggtgaacatatgtgaattgtggaaggcttgtacaatatagtccttgagaagcaaggtcaacctgtattcttcatccctgcagcaatcccatttatggtgataagcaaagcatctctgatcttacggttgtcatcatcacgtcttaacctcttgagtatctccacctgcaacatgttcaagggattaaggaagggaagtctattctcaattagcctcctcaagctcctattattctgctgaagtttctcgtgcccactaataaccatgacaaacttttcagctgtcatgagctcacttcttagttcatgggcaagctcttgcctctcctttgacacaaggactttatcatagtgcttggctataggaatgtcagctttccccaaaaccatctcaataagatctatggcactttg

SEQ ID NO: 11865 - DNA, 545 bp, Glycine max
  Clone ID: jC-gmle01810059a01a1
atttccccaaaaccattcactctctcttgattcatcaaaaagctgctttttttcttcttccttttctcttagcttctaattcagattcaattcgcctctcttttttttcttcattttttttgtcttttgttaatttttttttggtgtcattgtgtttggaaaggagaatcttatcttattttatgtgtacaattgatgtaaagttttcagctttgaattgtacttcttgtggggtgtgtgtattctggagcttgtgtttgatgtaaagttttggaggagttttgcttgttgtacttgtttttgtgtgttgaagagcgaagagcttctgtttgatcaaaacagaagctctttgttggtgtttttgtttttggaattttcttctggtgatctcgttggaaaacccgagctttccgaggctcgggatctgaattgtgaagatggattcatattcaacaaaggagaagcttcagaacagtgttgctgttgtcgcagatagagctgaccttaagttctgctatttgcagaagttcaagctctatgagact

SEQ ID NO: 11866 - DNA, 419 bp, Glycine max
  Clone ID: jC-gmle01810059a01d1
aaggaaccaaaaaagttgactgcagatgatttattgggcagttataacctaagaaccagctatgatttattttttttgggttttttgaatttaaatcatttacagggtttatgattatggaatgtttggggaggcacaaaaacgaattaactattgacatctaccattacctcccaaatgatgctctttttttgaagaaaaatataatcagtaactcaaatgttgtcttgcaaaactcagcttgtttaaaatggtgccactcctatttgcttttggatgatatcttaccatttatttctgtacagcaagtcaggaaccgtccttcaccttcacattcttcggatgtgatgataaaaggcgagcattaaactggctcaaacaaaaagcatttcccctttagttatccaacgttcaaagct

SEQ ID NO: 11867 - DNA, 615 bp, Glycine max
  Clone ID: jC-gmle01810059a02a1
cgaaaaaataaatctcgaagtaattcgtagagttcaataactattattattttcaattcggaattcttattaattactttaaaccgaataaatcttgataattgaaaaattaagtcataatttattggttgattatatcattaactatttctttattttatatttaagttacgaggaaattatcatgaatccaattatttctgctgcttctgttattgctgctgggttggccgtagggcttgcttctattggacctggggttggtcaaggcactgctgcagggcaagctgtagaagggattgcacgacaaccggaggctgagggaaaaatacgaggtactttattgcttagtttggcttttatggaagctttaacaatttatggactggttgtagcattagcacttttatttgctaatccttttgtttaatcctaaaaaaatagaaatacatatccttttttccgaggacttgctttaccggtcttgctttttcgaattctatttatattaatatttcactcctataattctttatccgttcggacaagaacacaggggaaggacttatttgaaggtgaagaattacatactgattccgcctttttttctttttt

SEQ ID NO: 11868 - DNA, 533 bp, Glycine max
  Clone ID: jC-gmle01810059a03a1
cgaattggggttattggtgttactgtcatggctgtgctatctggttttggtgctgtaaacctcccatacagttacttatcacttttcatcagagagattgaggaaacagaaatcaaggccttggaaagacagctaatgcaatcgattgagacctgtgtttcaaagagaaagaaaattattctttgccaaatggagatggataacaagctaggatctgaagagaagttaaatgctagatctttaattaaacgaatagtcggtacggttgttcgatctgtgcaagaggatcaaaaagagcaagatattaaagggttggaagcagaagttctggccttagaagagctttcgaagcaattgttcttggaggtctatgaacttcgtcaagcaaaggaagctgctgcttattctcgaacttggagaggacacatgcagaatctacttggctatgcttgctctgtatattgcgtgtataaaatgatcaagtcattgcatagtgttagtctcaaacaggatggttcagttgatcccgtgac

SEQ ID NO: 11869 - DNA, 428 bp, Glycine max
  Clone ID: jC-gmle01810059a03d1
cgaaaaaacggccaaagtttttgcgggggaatttcaacccctgtttttccaaaattacccttcaccaatatctttccaacggttttttggggccatcggacccttcccaagggcaaaaccttttcgcttccaattttttttctttttaacccagttttggcaaatttcctttgaaacttttggccaacaatttttttgttcaaaaaaatccagttcccatagaaaattaacaaaaaaaagggggctttctaaacgatttggcccaaagcccatttgttgttttaactttaacaattttaaccctctcactggggatttcgccccaccatcgggagttttaacaagcttttcactggcacataaaaaaattgaacgcccttcttccattttcaaataaattcaagagcctccacttggaaaattaaaac

SEQ ID NO: 11870 - DNA, 514 bp, Glycine max
  Clone ID: jC-gmle01810059a04a1
agaagaaattgctgatgtattggaaaccttccatgtcattgcggaacttccttcagacagctttggtgcctatatcatctcaatggcaacagctccatctgatgtgctttctgtagaacttttacaacgtgaatgtcatgtgaagcaaccattaagggttgttccattagttgaaaaacttgctgatcttgaggctgctcctgctgcggtagcccgcctattctctatagattggtacagagaccgtatcaatgggaaacatgaagttatgatagggtactcggactcgggaaaagatgctggtcgtttctctgcagcatgggcactatacaaggctcaagaagagctcataaaggttgcaaaagagtttggtgttaagctcacaatgttccatggcagaggaggaactgtgggaagaggaggaggtcccactcatcttgctatattatctcagccaccggatactattcatggctcacttcgggtaacagtgcaaggtgaagttattgaacag

SEQ ID NO: 11871 - DNA, 459 bp, Glycine max
  Clone ID: jC-gmle01810059a04d1
aaacagaagaaaatccagttaaaatccaagctggcataagccaaaatccgtttttattacatgataacgataatagatagcgtaattgttatttaatgctggtccacatctgtagcagacaacataggttaaaatgtgtgtatccaaagttaagttacttgtataggaaggcaacacaggcatgcagctttttaaccagtgttttgcatgccagcagcaatacccttcattgtcaaaataagggtatcctccagaccaggagcataatcacttgtgggggtgagtttcacaagctcagctgctggcttgtttgattccatgtagtctttggacaaatggggcctcaacttcacatggtagtcaggatcacgaattcgcttcaatgtgtaggcttgcaggacattgagggttgtgatgtatgaatcgcgaaatcgaagtctttgcttcaagtaggggtct

SEQ ID NO: 11872 - DNA, 489 bp, Glycine max
  Clone ID: jC-gmle01810059a05a1
gagtgcatggtcaccactaggagctttcaaaagtgctcaaggtacaaatgcagttatggagagcccaatccttaaggaaattgcttgtgaacgacagaagagcatggctcagattgctctaagatggatatatgagcaaggggcaattgctattgtgaaaagcttcaacaaggagaggatgaaacataaccttgacatatttgactgggaactgagccaagaggaatcacagaaattcagccagattccgcagcgtaggatgtatcgcggaataacttttgtatcagaaaatgggccttacaagaccttggaagagctttgggattgagattcctgaaatcattcctaatagcagcaaaatgtcatataaagctgtgtttggtttaagatgggaggagggaactaggagagaaattttgtacttttcatgtggaactcacatcttttacactttaatagaacacaaaaaatcttctatttctatcctct

SEQ ID NO: 11873 - DNA, 489 bp, Glycine max
  Clone ID: jC-gmle01810059a05d1
agaggatagaaatagaagattttttttgttttattaaagtgtaaaagatgtgagttccacatgaaaagtacaaaatttctctcctagttccctcctcccatcttaaaccaaacacagccttatatgacattctgctgctattaggaatgatttcaggaatctcaatcccaaagctcttccaaggtcttgtaaggcccattttctgatacaaaagttattccgcgatacatcctacgctgcggaatctggctgaatttctgtgattcctcttggctcagttcccagtcaaatatgtcaaggttttgtttcatcctctccttggtgaagcttttcacaattgcaattgccccttgctcatatatccatcttagtgcaatctgagccatgctcttctgtcgttcacaagcaatttccttaaggattgggctctccataactgcatttgtaccttgagcacttttgtaagctcctagtggtgaccatgcactc

SEQ ID NO: 11874 - DNA, 544 bp, Glycine max
  unsure at all n locations
  Clone ID: jC-gmle01810059a06a1
ctgttgcacttgtattgtggggaacatataatattaagacatatggtgagtccctggctcaggtcttgtggatgattggtgtgaatccagtagctgatacctttggaagggtcaaccgggtggaacctgtatgtcttgaagagcttggaaggcccaagattgatgttgctgtttattgttcaggagtattcagggaccttttcatcaatcagatgaatcttctggatagagcagtgaagatggttgctgaattggatgaaccagcagagcataactttgtgaggaagcatgcactagaacaagctcaagcccttgggattgacgttagagaagcagcaacaagggtcttcttcaatgcctcagggtcctacttctcaaacataaacctggcagtggagaattcttcatggaatgatgagaagcagctccaggacatgtaccttagccgaaagtctttcgcttttgactgcgatgcgcctggtgcatgcatgacagataaaagaaaggtctntgagaaggctctgagcacagcagatgccacatt

SEQ ID NO: 11875 - DNA, 504 bp, Glycine max
  unsure at all n locations
  Clone ID: jC-gmle01810059a06d1
gatacaagggaatcattctctatatattaaactgagagcaatatttgacatgttggtttggagtttgcaactgcacaaaggaacatgatccctgaaaatgattaaaattacagcagggaaaaaggagagaggagcaaaatcacattaaaaggacaccatcaacaactttcaattcagtgtgggaaagaagctccagatacaaagaaggcatagttaaaaaacagttaatgtttctgctgttcatctcaattatcacttcagcgatcaatgccttctattttgtcttccacttctgagtacaactgcctgagcttgtcaatgttgtcttctgaagtctcccagtaaccgcgtccattggcttccaagaatgtctgcaccagcttcctaaaggagtttggatttgtgttcattagcttcttcaacatttcctcatcttgaatgaaagttgngttggcttcttcatacacccaattgtcgacttggcctgaggttgcactccatcca

SEQ ID NO: 11876 - DNA, 147 bp, Glycine max
  Clone ID: jC-gmle01810059a07a1
gcattggcaagacgcaccaaaacaagtcggctgggcgcgccaaatggaccaccccataaaacgggcgtaattagaccacccaacgggggcaccatgttttgtacaatcgttaaatattaataaaaactaattatgaaaaaaaacagt

SEQ ID NO: 11877 - DNA, 111 bp, Glycine max
  Clone ID: jC-gmle01810059a07d1
aacgagcgtccaaaacatggcgcccccgatgggtggtctaattacggccgctttttggggtggtccctttggcgcgcccaaccggcttgttttggtgcgtcttgccgatgc

SEQ ID NO: 11878 - DNA, 564 bp, Glycine max
  unsure at all n locations
  Clone ID: jC-gmle01810059a08a1
cggctcgaggcgccgtgagtggggttccgaggacgggagagagagccaacgcgccggttttgacggcgttgggagtgggattccgtggcacaaactcttcttctcttgcgcgttcagttgcgcgaagcagcgtcaggctctgcatatgtcaatggtggatttggagggcaaagaaggttacaggccttccacggagtacgtggaagacagcaacgaaacactcattaacttgactgactcaaccgagcttttgtttcttaagttgccttcttccaatgattttttatctgacatacatgggcagaaattgtttctcactcttcataatgatggcaaactagccagcttcaaggattcgtcaggtaaagtatatgattttgtaagctattctgctcaggagccacacgaaacagtttttgtttcctctacagaaccaataataggaaagatntcaaggcgagtttccactgtccattactctgatcctaaagaacttgaaaatctcaattcaactaacgcataacatgcgcatggatattcttctggagtcacagggacaacttc

SEQ ID NO: 11879 - DNA, 616 bp, Glycine max
  unsure at all n locations
  Clone ID: jC-gmle01810059a08d1
ttttttttttttttattttttttttttttttttttcttttttttttttattaatgtttgtttttgtatttcttttttttttggcctttatgttcattaacccaactcaacaaaaggaaaagggccacccaggggggaaggcgggaaaaaaaaaaaaaaaaaaaaaagggggcccccgggaccccccccaaaaaaaaagggcccaaagaaaaaaaaaaaacacaaaaaaaggggggggaaaaaaaaaaaaaaaaaggggggcccccaaaaaaacaggcccccccccccgaaaaaaaaaaaaagaccccacattcccccccaaaaaaaaaagggggggggaaaaagcccccccaaaggggggggcaaaaaaaaggggccccgggggggaaaaaaaaaaaaaggccccgcagggggggcccctgatggggccccccaaaaaaaaaaagccccccgccaaagaaaaaaaaccccgggtgccacaacagggggcgcccccaaccagatataaaaaaaagagacccacacggcccttaaaaaaaaacaaagggggcccccaaccacaaaaaagaagagngggtggggggccccccctgaggaaagaggcgcccccccggcgg

SEQ ID NO: 11880 - DNA, 397 bp, Glycine max
  Clone ID: jC-gmle01810059a09a1
gttaattgtcagtacggcttgttttttgttattggggattcacttcttctaattcttggtattgctattgatgggtcccttatacaagtagaagtggattagggagttattaagttgtgtctcgatcaatttctcaacagatactcattataagtaaagattttcttatatattaacttatccataggttaaaatcaacctctggagaagctatctgaaagagctctggaaattaacttatgcattgactaattttgatggttctgtacataagtagaaatggattacggagctcttagttgtagatgttttatgttaagagaacatacttgatcttgtgagacaattctgctcgagtcaagttaagtaactgtactgtatatgacacaatctcagt

SEQ ID NO: 11881 - DNA, 238 bp, Glycine max
  Clone ID: jC-gmle01810059a09d1
tttgtttttttttttttttttttttttttatttttttttttttttttttttttaaaagaaaagggggttatttgggttttattggcccctgttacttaaaatttttgaggaagactgtccttttttgaaaaaagaggaagaaaatcttaaacttataattttttttttttcccaaaaaacattttaaaagcttttgatgttaaacacaaattccataaaaaattttaccccttgggtt

SEQ ID NO: 11882 - DNA, 520 bp, Glycine max
  Clone ID: jC-gmle01810059a10a1
attccaatgagttttatactgtatcaaatcattgcccttatttgtcctgtctttcttctcttttgctgcacagagaaatgggcagaatattttcgtgctcatgatattctcttcatcttctggtctgctaaagctgctactgctgccttggaaggcaaaaaacttggttcatcatgggaggatgataacatggggagaacttatagcccagacactaagatatatggaagggatgaacttttggcccgcttgcaatcagaggcagaagagatagttgacaggataagaaattcaggctcctctgatgcacgaccatctaatattaaatcccctgctgaaaatactgctggtagttcatcatcgagtcatgtaattgtgggatttgttggatatcctaacgtggggaacagttcaactattaatgctctggctggacaaaaacgcactggtgtcacctctaccccatggaaaacaaagcactttcagacattaattatctcggatgagctgatcctctgtg

SEQ ID NO: 11883 - DNA, 306 bp, Glycine max
  Clone ID: jC-gmle01810059a10d1
aaagggcaagattttctttaaatgcctcacaaactctatctcccaaatgcctcatagcctgaaaaacaaaaaaaataaccacactaaaacaaccttcatctggggggcacacccccccaaccaaaaaaaccaaaacaattggccccacccccccaaaaaaaaaacaagctttgccgcgaccccaaaaaaaccccccccgggggggggatcccacactgggttactaaacaacaaaaaccaggggtcccccccccccccttataatgccggtgctttttgcatacacaaaaatttgaaacaggcccc

SEQ ID NO: 11884 - DNA, 370 bp, Glycine max
  Clone ID: jC-gmle01810059a11a1
acgagatgaaatgaacgccttaagctttagaggcatataaaacttgcaattcatacttagagacctccatccatagcctacattccaaattcatataccgtttgccttgacctgtataaacgatctcgataaaagatacacgagacgcataatgcggcagcgtcacagagcgatcaaaatagagttccagatgagaaaagcactgtctgactgcgctgcatacagggatagacccaacgaacgtgcttgagcttgcgtgagaatgtatgtgcttgacagtgacattgttaagcttgtagagcgctacaatgagagttagatatcctcatgatacatgctataccgatcagacctggtacccattgaacat

SEQ ID NO: 11885 - DNA, 161 bp, Glycine max
  Clone ID: jC-gmle01810059a11d1
ataggaggaaaggggagggtagccttccttgttttgaccgccggacaataggaatactaacaagctaattattacactatgtactttacatgtggggccctgttaaacaaacactttcattaacgaacatatcaaagatgatagtcgtaggcaaatactac

SEQ ID NO: 11886 - DNA, 541 bp, Glycine max
  Clone ID: jC-gmle01810059a12a1
gcggtatggaaaacaagcagctgcactgaccaggaagcctggttcagataaagctcgctatgaagggaagatgtctagtattatctacagtcctggccgcttcagtgatcacgcgtatgatgacagatttgcgaatgagggatctggtccaagaatttctgacttttctgtgtctagtggtggtgaacaattcaaatccgatgttcagtctcccaattttcataaggatatcaagattagaagtccatcctatcagcagcgttctggttctggttctagttcaagtgaagatgtgtggtatcaagcaagaaatgcatctttggaaactaatgccaatgccaagagagatgcagatggaattcgtcctccacagagaactgtgtcagcacaatcaagagacatcaaatttccatccttgagatcttataattctggcagtttagttgattttttctcagaaccagtccaagcttcagaaccacttcagaataaagcatttggcattcccagaccacctggtactacaagatctgttagcatg

SEQ ID NO: 11887 - DNA, 368 bp, Glycine max
  Clone ID: jC-gmle01810059a12d1
aaaccggaaaaaaaaaaaccggaacccgcttttttacctgaatggggcgggcgggccaataaaaggctttctttttatccccatttttttttaattttgaccaaagggaaaaatccccccaattgtttttcaggaaagttcaatccccccccgttccctttttaaactttaagaaaacttttcctcaattcccggtttgcaaatgcctgatctggccccaatttttttggggggctaaaaattgcggggggggcctcaagggggagcgaaggggtgaacttctttttggttttaacaaaacatttcaatttcttccccgcttaagggggctggggggcaataaatttctttggaaagggattggtctt

SEQ ID NO: 11888 - DNA, 540 bp, Glycine max
  Clone ID: jC-gmle01810059b01a1
atcgaaaatctagagcaaagtgattgattccagttccaatggccttgggcaccagcgccttgatcggaaggaaggttcttgtctcacccccaacccccaaaacaaccaaatcatctactccgctacaattccttttcaagagaagcatcttaaatgctcacaattcacaagctgctctagctgcccttatcttttcctccgcgagcctctctgtgaccccacaagcccttgccgctgataacgtcacccctccccctgtaattgaagcccaacagagccaattaaacccctccaactcatcctcccctttctcacagaacctcctcctcacagctccaaagccacaagcctcctccgacctccccgaaggcaccaactggcgctacagcgagttcttgaacgccgtcaagaagggtaaagtcgagcgagtcaggttcagcaaagacggttccgccctccagctaaccgtcattgacggccgtcgcgcctccgttattgtccccaatgacccggacctcatcgacattctcgccatgaacg

SEQ ID NO: 11889 - DNA, 514 bp, Glycine max
  Clone ID: jC-gmle01810059b01d1
agaaccatattttttatttatttattgcgtaagctgctgtgctaattgttttttctccttgaatttgataaaataattattgattcttacagtgtacaagtcagagcgtattttatagtacaaacataattctgtgacttgcgtgtatgattatgcaacatataattcggcttttccatcaatgaatagactcatgaactcttcaccatccacagtttctttttctatgagaagttgagcaagcttgtgaaggatatcaatgtgagttgagataatatgtgttgccctagaatatgctctctctaccagttccctcacttccgcatccactacatccgcagttgccatggagtaatccttttgcgatgacatctgttgacccaagaatggatttccaccaggtccaccaatggcaacttgtccaatttttttgctgaatccaaatctctcaaccatctgccttgccactcgtgaaacttgcatgaagtcgtttgatgctccgttggtgacattt

SEQ ID NO: 11890 - DNA, 524 bp, Glycine max
  Clone ID: jC-gmle01810059b02a1
ccaccttgcgtggcgccaatgggaaaagccttcgacatcggagccgttccgttcaacgccgacgggtggggtccgccggacaacgcgacctcaggcagcaacaacaacaacctccctctgaacgtccccttcgcccccttctcccgctccgacaaattgggccgcatcggcgactggacccgcaacttcaacaatccgacccgctccaagaaccccgccgatgccgtcttcgacttcgccaacgacgactccttccccgccttcgccgacgacgacgcctccttccgcctcgtagacggaaagcccccgccgagccccaaattcggccccaagtggcgcttacagcagcagcgccagctccctcagcggcgcgacgaggaagtcgaggccaagaagcgcgagcaggagaaggaacgagcccgcagagaccgtctctaccacatgaaccgctcaaaccctaaccaacagcgccgcgaagccgtcgtcttaaatcctgcgggatatccaacccgagtggaacatgc

SEQ ID NO: 11891 - DNA, 592 bp, Glycine max
  Clone ID: jC-gmle01810059b02d1
atcatactaatttggtcgttgacaatagagcgcactataacaaactaaattaatgtttgtagcttgcgaatctcaacatcactctgccaacatggaaatttgtaaaccataaaataataaccctaagcccatatacaattttgaaagatgttgctttggtgcttccacttaaatatgctaaggtctgtaaatcataaacagctgtagcatagaaagaaaaaaaaaaaactcaggttttgctttaaacttttggtccaaaggaacatcacattgcaaaattttggccgacaaagcagtgttaaagaaaattattctgagtgcgatctgttcacaaatgaacggccacatctactccaataaacatctgaccttttaagcttgaccatctatctgcttgtcttccacatcattagtagtagcggctgcttctcccccctcggcgccttctgctggaggctgaacttgttcatcctccggaagtggctcctccacatagtcattttcaaacgcatccgcgggaacctcgtaaatcctaacctggggcttaaatggatccttcacaagaacatacttcccctcattcaatttcatg

SEQ ID NO: 11892 - DNA, 489 bp, Glycine max
  Clone ID: jC-gmle01810059b03a1
tactgatttcaggacatgatgggggaacaggagcaagccctataagttccatcaagcatgctggaggtccttgggaacttgggcttacagaatctcaccagacactcattgaaaatggacttagagaaagggttattctcagagttgatggtgggtttagaagtggagtagatgtcatgatggcagcaataatgggtgctgatgaatatgggtttggttcagtggcaatgattgctactggatgtgttatggcccgcatttgccacaccaataattgcccagttggtgttgccagtcagagggaagagttgcgtgcacgctttcctggtgttcctggggatcttgtcaactactttgtgtatgtagctgaagaggtaagaggcatattggcacagctggggtatgagaagttggatgatgtgattggccggactgatttgttccaaccaagagacatatctgtagcaaaaactcagcatctagatctga

SEQ ID NO: 11893 - DNA, 487 bp, Glycine max
  Clone ID: jC-gmle01810059b03d1
gtgattggttgaaactttattagctttggttattatttattgttacatttgattgaatcatttttcaacaagtgcaagaactgtttgaataggaataagagtttatgtacaacgggaaatgaaaatagttgtcatttgaacacattatgctgtggcagctgcttgttcttcaacagcctgtgatgctgggagaagggtgcaaatgaggttgcggtcaccggacacattataaacacgtcctgtggttggccagaactttgcagtacggagccaaggagctgggaaggctgcatattccctggagtatggttttgtccatgcatcagccatgagcagtgatggtggatgaggggcgcccttaagtacattgttgttaatgtcaacctttcctttctcaatctcagcaatttcttgtctaatggaaataagagcatcacaaaacctgtttaactcggccctgctttacttttagtaggctcaatcatga

SEQ ID NO: 11894 - DNA, 515 bp, Glycine max
  Clone ID: jC-gmle01810059b04a1
atttgcagggatgaagaatatgatattgggaagaggaagaagataaggggcttcaagcatagctttggtgggcctaatcttttccaagaaattgctgtcgagaaatcgaagtttaaaagggcaaagtttgaccaatcttgctcagggaaccctccatttaggatatgacatccagaagaactctatgccttctattgcttggaggcttcttttgtagcaattttgtcaaacgctgaaagtgtaatgaagagagcacctaccttattcttttctccagtaaaaaaatttgtttggtggttcacatcattgtctttgggacagagccgcagagggttgggtttttgtgcacctgtgttcctgttggacatttctcattttcagactgtattattgtaggagctgcacgccgtagctcagaagttttgttcatgattttaaatcattcaagacaatttgtatttcagttttatgttacgaagcgtgtttatcgtgtacccgaagttgtttttggtttg

SEQ ID NO: 11895 - DNA, 572 bp, Glycine max
  Clone ID: jC-gmle01810059b04d1
acacgaaaacatttccttttatgtaatccaaacaaaaacagacttacattcatgaattagaatataaattaactatcttacaatttttcctagaaattaatagtacataaaaatttagtacctaatccaaactcaaaccaaaatacaacttcgggtacacgataaacacgcttcgtaacataaaactgaaatacaaattgtcttgaatgatttaaaatcatgaacaaaacttctgagctacggcgtgcagctcctacaataatacagtctgaaaatgagaaatgtccaacaggaacacaggtgcacaaaaacccaaccctctgcggctctgtcccaaagacaatgatgtgaaccaccaaacaaatttttttactggagaaaagaataaggtaggtgctctcttcattacactttcagcgtttgacaaaattgctacaaaagaagcctccaagcaatagaaggcatagagttcttctggatgtcatatcctaaatggagggttccctgagcaagattggtcaaactttgcccttttaaacttcgatttctcgacagcaatttcttggaaaaga

SEQ ID NO: 11896 - DNA, 552 bp, Glycine max
  Clone ID: jC-gmle01810059b05a1
ggaaacactgctgttgttgaggctgtttcgcccgagttggggaaccggtcacagtatgttagagttcaactccctggacttaaccaagagctccttcagaaattcagggaaaagaatattgactttgcagctcatagtccccaagaagagtcaggttcttttttagctaacctgattgagaatctggctttccctttgctcttgattggaggattgttccttctctcgagacgatccggagggatgggaggtcctggtggccctggatttcctcttgcttttggtcaatccaaagccaagtttcaaatggaaccaaacaccggagtgacatttgatgatgttgctggggtggatgaagccaagcaggactttatggaggtggtggagtttttaaagaagcctgagaggtttactgctgttggggctcgcattcctaaaggagttcttcttgttggtcctccaggaactgggaagaccttgttagccaaggctatggctggtgagctggtgtccatttttctctatatcaagttctgagtttgtgagatgttt

SEQ ID NO: 11897 - DNA, 446 bp, Glycine max
  Clone ID: jC-gmle01810059b05d1
aacactaaaaacagtttctcttttatacatactctctggtggcatttggcaacactacaaaaaatgaaaaagtaagggagaatctttaatcattcacaaatatggagcaggctgcagagggcattctgttttctaagataatacatatgaaagatgttacatatataggctattcaaacaggggctggtactggagttgaaggagcaacacggttttcagctggaatttcaacaaactcaaacaatatagcacggaattcatctccgctcaaagtctccttctccagaaggacttccacaatcttggcaatggcctcacgggtgttccttatatgctccagggcaatttcatatgcttcatctgagatcctcttgatggcagcatcaatggcttctgcaagcctctctgacattgagttccttgccatcattctcatgatgacatc

SEQ ID NO: 11898 - DNA, 556 bp, Glycine max
  Clone ID: jC-gmle01810059b06a1
cttttgtgggggtaaagagtagagagttgatctgtcacggagcgtatagtcgccggcgacggggagggtgcactttaaccgcgattaacgatgattaaccttcgccggagcggcgaaaacatccctgcgaaatcgaagcgattcatacgcccaatggtgaagttcgaggagctgccggagtacttaaaggacagcgagttcatattggactattaccgctccgaatggcccgtgaaggaagccttgtggagcatcttcgcgtggcacaacgaaaccctaaacatttggacgcatgtaggaggatttctcatattcgctgtgttggcggcgatgagcgccacctcggagctctggaatttgctcagatcgtccacggcgctcgggttgtcgaccacggcggcggagatgaacgggtctaacagtgacgccttcccggtaatgtttcataaaacatattttaaattcatagcttcgcataataatagtgatagtgatattacactgccaataataaaagtgatagtagtagtgattattatgcatatgggcaaatcaa

SEQ ID NO: 11899 - DNA, 563 bp, Glycine max
  Clone ID: jC-gmle01810059b06d1
gacataataaaattctaattatttatctctcgagttttaagacacataattattagttggctaatgcacacaagtaggagatccatgtcggaaatctaatatgactagtatggcaacactatgggcaagtgcgccaagaacgacaaaaacatgaaaaatttgatggctgtgccctgtgatatcaaatgctcctggcttccatcgttctggtattctagcaacataaaatccagctccggtggcatatagaatggccatagcaagctcatatccaagtgcaacaagtatatggggatggccccaaaacaggacaacagcatgagctgcaggaattatacctgaaaagcccatggagaggaataaggaggccctgaggggtcggaaccgaggtgtagaaagtgaaggtgcaagtagagtaataatggcaaggactccaagcacagatattgatgccaaatagaataaccttgcgtaaggattgcagaaaaaaacatagtaaattggagcaaagaaagaacagacaatcattagagaaatgccagcataatctagacgccagaaaa

SEQ ID NO: 11900 - DNA, 602 bp, Glycine max
  Clone ID: jC-gmle01810059b07a1
agctcggcaaccttattaggacctcaacttctacattaatctttccatcagacatcagtttctatgattttctgcactcttgtattctgagctgaacaaattctgttcttctctcgtatagtgaagtaaacaataagcacataaaccttcgtggacatggcaacaacagccttgtccacgaccagtgtgctttgcaggaggaaacctcagcacatgcatattatcctaccctcttcacagacactccaaaatggaactctaagaactgatgtaactgcttcagcctcaaaagataatatcagcatagaaagtgagaagtgttgttcctctttgttggtgaacagaagaacagttttggcttctggggtttccttgttgggtttcccgggtgagagtttggctgtggagaaacaaggccttctagctgggagaattcctggcctgtccgagccagatgaacaaggcaagcatttgatcagacaggttggaggacgtatcgcaagccggatgagaagtctggaggacatggtgttggatggagtcctattatttcatacagcttcagagtgcccaaagaatgggaagagtgatgcttatgatct

SEQ ID NO: 11901 - DNA, 541 bp, Glycine max
  Clone ID: jC-gmle01810059b07d1
gaaatgtaacaaaactggtttggtatattgaaggtacaaagatttttgcatatataatctcttgattcacataaatcccagtcagacaaagtagagggaaacaacctctttgttgtactgcaatacaaatatagaaagctgcatttcaattatctctgggttcgcagaagattctagttatacaacccgaaaagattcagctatcttcttcaaatcatcgtagtgtctcttccactgaagaccgctgcctgttacaccaaacaaatataagcggttgccagctgcggtggcagtaatgaaaatatgaggaggctccagctcaaactggtagtaagttcttccttcatgttctgctacattagcgctcagaaccttcccttctacattttccccaatcatttctggaccaaatgcattgatcactttctctggaggtccaattttttctattgtagcattgtcaccaagatcatcagagaatctaagaacaggagcaacaatgacaaacaaacgtccttccttagagctggcaaatctcaaa

SEQ ID NO: 11902 - DNA, 511 bp, Glycine max
  Clone ID: jC-gmle01810059b08a1
caagtagttgagaactaagaaggagaagcaaatggcttcctcaatgatctcttccccagctgttaccactgtcaaccgtgccggtgccggcatggttgctccattcactggcctcaagtccatggctggcttccccaccagaaagaccaacaatgacattacctccattgctagcaacggtggaagagtgcaatgcatgcaggtgtggccaccagctggcaagaagaagtttgagactctttcctacctgccagaccttgatgatgcacaattggcaaaggaagtagaataccttcttaggaagggatggattccttgcttggaattcgagttggagcacagtttcgtgtaccgtgagcacaacaggtcaccaggatactacgatggacgctactggaccatgtggaagctgcctatgtttggttgcactgatgcttctcaagtgttgaaagagcttcaagaggctaagactgcataccccaacggcttcatccgtatcatcggattcgac

SEQ ID NO: 11903 - DNA, 493 bp, Glycine max
  Clone ID: jC-gmle01810059b08d1
attcattagttctcatccattaatttccattgaagtccgaaaacagaaaccaaaaatacaggatgatgaaatctcaaaaagcaaaaacaaatgggaatgtagtttaagtacaaacaaacaaagtggggtggcggctacaaatgctttgcaaatttttcacacttagaagcctgggggcttgtaggcgatgaagctgatgcactgcacttggcgaacgttgtcgaatccgatgatacggatgaagccgttggggtatgcagtcttagcctcttgaagctccttcaacacctgagaagcatcagtgcaaccaaacataggcagcttccacatggtccagtagcgtccatcgtagtatcctggtgacctgttgtgctcacggtacacgaaaccgtgctccaactcgaattccaagcaaggaatccatcccttcctaagaaggtattctacttcctttgccaattgtgcatcatcaaggtctggcaggtaggaaaga

SEQ ID NO: 11904 - DNA, 608 bp, Glycine max
  Clone ID: jC-gmle01810059b09a1
ctgaatctgtcaagaaacaaaatcagcactattgaaggccttagagaattaacacggctgcgggtacttgacttaagttataatcgcatctcaagaattggacaaggattatcaaattgtaccctagtcaaagagctatatcttgctggaaacaagataagtgatgttgaggggctacataggttattgaagctaacagttctggacctgagctttaacaagatcgcaacaacaaaagcattaggccagctggtggctaactacaactcacttcaggccctgaatctgcttggaaatccaattcaaagcaacatcagtgatgatcagctgcgcaaagcagtttgtggtcttcttccaaagcttgtttacctgaacaagcaatctatcaagactcaaaggggacgagaaatactcactgatagtgttgccaaagctgcacttggtaacagcagccggaccttctacagaagagcactaaagaaaggtggcggccatggagggtcaagttccagtgtgcatagaagcagtgctagtggttccccagaaatcaggaacaggtcaaggagccaaactaaacatcattaggtgtctggaaagctgcattcatc

SEQ ID NO: 11905 - DNA, 317 bp, Glycine max
  Clone ID: jC-gmle01810059b09d1
aaaacaataaaaagtgtatagtaggataaatcagtgggggagcttgtacacaagttcccagcattcctctttgataccttcaaatagatatcacacgggtactgggagttatcttgcggtatatttcatttccaatttcaacttttgagttaaacttgatgatgccttctatgaattgttcagatgccatcatattcacttttcacacaaggttttgatgataatgacaacagttgcaacagtccgggcttggccaataattgttttgcatgccaaaattgtttaaatttgagaaagccagatgaaaactttaagct

SEQ ID NO: 11906 - DNA, 570 bp, Glycine max
  Clone ID: jC-gmle01810059b10a1
ggaagaagcatcatgtgtatgcttagttgtcatactgatacttgctctaacattggcatggagggtgctgaactggttatggctaaggccaaagaggttagagaggctcctaagagagcaaggccttcaaggaaatccctacaggcttttggttggggatttaaaggagattatgaatatgcaaaaggaagtcacatccaaacccatgaatctctcccatgatatagtgcctcgtgtcttttcctttctccaacacactctcaacacacatggcaagaattcttttatttggtttgggcgaaaaccaagggtgatcatcacagagcctgagttaatcaaagatgtacttaataagatgcatgatttcccaaagcctgacacgagtccgcttgtcaagttacttgctactggtctttaaaccatgaaggagaaaaatggaacaagcacagaagaataattagccctgcattcaacttagaaaaattgaaaatatgttaccaatattctacacaagttgcaatgatttaattatcaagtgggaggaaatgttgtcttctgatggatcatgtg

SEQ ID NO: 11907 - DNA, 522 bp, Glycine max
  Clone ID: jC-gmle01810059b10d1
gctactattattttttatatttcaactttacgtaaaatgacatgagcaccatattggggctgaagagtaaatactgtaacaggagcatgagcataagctggagaaagttcaaatgagaaatgttgtaaaatcgttgacaaagccatctttgcctccaacaaggaaaagttttgtccaatgcatattctaggaccccatccaaatggaaaaaatgaaactctgccatttgtggccttcagaactccttcagaaaatctctcaggtttgaattcattcacatcatcaccccagagttcgcggtcatggtgaaccatagttgttggtaaggaaacttgcactccagcaggtaatgataggtttccgagtttcatatctctgtcaacatttctattaaggccaactgctggtgggtatagcctaagaacctcattcaaaatcatgctgacaatcttaaggtgacttagcccatcaaaatttggtttttgttgccaaatacttgtaaactttctccctcgcacgtgc

SEQ ID NO: 11908 - DNA, 444 bp, Glycine max
  Clone ID: jC-gmle01810059b12a1
cagttttcgcgtgcgattctcatggaaccgaaggacaaagcgctggatcgagaatcttgattcggtttgatttttacgtttttgacttctgattcacgcgcttttcgacaagctgatacgctcttggatttttgcgggattcgatcgtatcgtatttcattgcaatcatgactcaggcggtggaggtcctgaaccggtatgggacggatctggttggggagccgagagattctgattctgagtgtttggcgggttttgagtgttttctgaacattgtgagggcattgggaatgggatcgtgtatctcagaggttggagctggtggtaattcaccttctcttcttgcttattcgcctgaatccaacatggatggtggaaagagaagaatgttgaggggttcctcttcgtttgatttcaaagtgcctgtgaggatgttcttgaatg

SEQ ID NO: 11909 - DNA, 508 bp, Glycine max
  Clone ID: jC-gmle01810059b12d1
caggatcactcagacaacaatatcattaatctctgacagcaacacaacatggaggtccaaaaacctgactcaggtccataagaaataaatccaattcttttcagttttcactactgactaaattggaaactataacctaagaatgatgcaaatgaaaaacggcagatttcagaacagactatataatattaatctagagacttggatctacaaaaactccaaatctaccaaatatacacagaaggaaaatgacctccagcaacaaaaaaaaaaagcccggtaccccttttcctccagataagaaatatatattacgcgcccccccccccccctcaaatgctgtcgaaggaaatggaagataaataatgaaaagaattttggcagaaaactaccgaaaaatcatcaaaataatgatcctttctctgttgactgttgttgcagcacaatttacccaacctttttgataaaaccagcaaggcttgggagagacatggtacaaaacttgagc

SEQ ID NO: 11910 - DNA, 539 bp, Glycine max
  Clone ID: jC-gmle01810059c01a1
tgtgcttcgaaggggccgaggatctgtcaggtggaggtgggtccaagtacggaaccagtatcctgagggaggttgcactggatccctcccgcgacatcattctcgcctacatgcaaaacggggagcctttgtccccggatcacggcttccccgttagaatgataatacccggtttcattggtggccgcatggtcaaatggttgaagcgcatcattgttactaccgaccaatctcaaaactattaccattataaggataacagggtactcccttctcacgttgatgccgaacttgccaatgctcaagcttggtggtacaagccggactatattatcaacgagcttaacataaactccgtgataaccacgccttgccacgaggagatcttgcccatcaactcatggactactcagatgccttatttcatcagaggctatgcgtattccggtggtgggagaaaggtgacacgtgttgaggttaccctggacggaggtgaaacgtggcaagtgtgcacactggactgtccggagaaacccaac

SEQ ID NO: 11911 - DNA, 387 bp, Glycine max
  Clone ID: jC-gmle01810059c01d1
aaaaaaaattttttgggttttttaaaggggaaaaaaaggggggcccccctgaaaaggccaaaatttttttccaaggtccctcccccccttttaaaccaaaaccacgcttatatgacattttgggggctttaggaaggattttgggaatttcaatccccaagctttttcaaggggttggagggccccttttttgatacaaaagttttttccggaaccaacctaccccggggaaacggggtgaaattctgggaatccccttgggtcaggccccccacaaatatggcaagggtttggtttctccccgggtggggtgggggaaaccccaagcatttggggggcgccctttgggtcccttaaaaagggttgaaccccctgggaaaggggggg

SEQ ID NO: 11912 - DNA, 463 bp, Glycine max
  Clone ID: jC-gmle01810059c02a1
gagaaatggggctgacattcacgaagcttttcagccggcttttcgcgaagaaggaaatgcgaattctgatggttggtcttgatgctgctggtaagaccactatcctctacaagctcaagctcggagagatcgttactacaattcctaccattgggttcaatgttgagactgtggaatacaagaacattagcttcactgtttgggatgttggtggccaggacaagattcgtcccttgtggaggcactacttccagaacactcagggtctttattttgttgtagacagcaatgatagggacagagttgttgaagccagagatgagttacataggatgttgaatgaagatgaactgagagatgccgttttgtttgtgtttgcaaacaaacaagatcttcctaatgcaatgaatgctgctgagattactgacaagtggggtctccactctctgagacagcgtcactg

SEQ ID NO: 11913 - DNA, 555 bp, Glycine max
  Clone ID: jC-gmle01810059c02d1
gaagtgaatatagttttttttttcctggtatcttacaaacaataaacaaaatctccatttcattatatgaatgatacatgaccaaaataaaactaaaaatcagacaaaacctggtggcacattgaattagtatctccattacagttatgggcgttgcatccaaacccaatagaaagctcagagtattacacatcccaaaaagtaaaatcctactacagtttagcaccgagatgtcctaaaccacattacatgaacacaaattcgagttgtcttggaagaggaccaagaaataaaagctagataatgttcaaccctgcatccagaaataccaatccgcaagactcccgtctcccaaaggcattaagccttattggcaatgttgttggaaagccagtccagaccttcgtaaaggccctccccagaggttgcacaggtgctctgaatgtaccagtgacgctgtctcagagagtggagacccaacttgtcagtaatctcagcagcattcattgcattaagaagatcttgtttgtttgcaaacacaagcaatacggcatc

SEQ ID NO: 11914 - DNA, 588 bp, Glycine max
  Clone ID: jC-gmle01810059c03a1
atcaggcttatgtttataaataagtaaagggtctgaattttatacaatgattttgaagatacatgtgtagaacagtttgttaatgctgtgttgcgaattgttggttggttgttaatgtgatggtttatgagcagaatcgaaaggcatcaaccaactttaagtaacatcataaaatgttttctgtgtttgactattttctcaggatcggaagtggtacaaccagtatgcttttgttgggaacagagtgagattcttgttaatctatactcttcctcaccagattggcactcaatttatacttaaatttcaatattggggtagctaattaaaatggaaataaatatttgagggaataaacatttgtattctttctcagaatagatattgaagtaaaaatgtagttgtgaaagtatggctaaatccatcttgctcatatcagtcacatgttcaatcccatagtttttttttctgggccaaaccagtttttgttctgcccaaaataaagagatacacaactaatctgttttcgacctcgctggattcaagacagagatgggagttgctattggcattacccacgtggaggtc

SEQ ID NO: 11915 - DNA, 569 bp, Glycine max
  Clone ID: jC-gmle01810059c03d1
atgtaattatttttatttttttttggtggaggtaccccacaaaaaaaaaataaaagtctatttgtgtttcaagaaaaaaagcacaaaaaaaaccctcccaaggggggggcgggggggggaaaaaaaaaaaaaaaaaaaagattcggggttcgggagaaaaaccccccccccccaaaaaaaaaagggggcatttagtgggagccgtcttgccccccccaaaaaaaaccgaaaaaagaagcccctgcgaaaaattttgggggggggaaagaaaaaaaaaacccccgaaaaaaaaaaaaaaaaaccccccgggggggggggaaaaaaacccacccccttggtctgtgtaaacgacggggggaaaaaaaaaaaaacggggcgttccccatattgagggggaaaaaaaaaaagggggcgggccaaaaaaaaaaaaaaaggggaagaggctcgtggcgctaaccccacaaagagattcccccccctcccccccaaaaacgtatgcccaaaaaatcgggaaaaaaaaaaaaaaaaagagatcccccaacaaattttcctaaaaaaaaaccccccaa

SEQ ID NO: 11916 - DNA, 515 bp, Glycine max
  unsure at all n locations
  Clone ID: jC-gmle01810059c04a1
ccgtcttactcgaagtatcagttttcaaatcttggattcgattccatcactgatatttctcttctctctctctttctctgccgaatatggcgccgcctgcgccagcagttgaaggcggccaggcgccgcaagggcggcagcaacagccgcaaggagggtttggcctctccggaatcatacgcatggcagttttctggtacttcgcctacaaattcttttcccccaaaaaacctaccgaaccttccgctctcatctccaatctctatcagaaggcacagcctctggatatgtggctttatctttccgagtacgagaagttcaatgactttggtagtgaaagttctcttgtatggcatgaaaccaatattccgtatgccgtttggggacctgagagtaccaggactctaactttgaagtatcatccgtctgagtctttgaagcataatggggtctatatgctcatgttttctttgcacactctgngctttcgcctgacccaagtgatccagaatacc

SEQ ID NO: 11917 - DNA, 417 bp, Glycine max
  Clone ID: jC-gmle01810059c04d1
gggggaaaaaaaaatcccaaaagggggtttttggccccaactaaaaaacttttggaattaaaaaaaaaccccccaggggcccctaaaaggcgtttttgccccctccccccaccccagaggggccccagggtaaaaacccccccctccctggggcctagaaaaaattcccgggaaaggggcccaactaaagtttttttttaaaaaaaaattaattgcaaagggggaacaaaggggggaaaaaacaaatcccccccccgggaattttcccggtttaagattcccccggaaaattttcccaaatggggggaaaaaaacccaaacaaaaaggttttttttttttttcctttgaaggggttggtttttccccaacctgtttattcctccctccaaaaccaaatttgttaaccccttttttgg

SEQ ID NO: 11918 - DNA, 562 bp, Glycine max
  Clone ID: jC-gmle01810059c05a1
gattcctggaaagacagtggttgatgtgataaggcagtacaaggagttggaagtggatgttagcaatatagaagctggtttgattccagttcctggctatagtagcactgctatctcacccttcaccttagattgggtgaacactcctggctatgatgggtttaaaggatgtggaaagagaccttcctcagtgagacccattgagcatgaaaggaagaaaggagtgccttggactgaagaggaacataaattgtttctattgggtctgaagaagtatgggaaaggcgattggagaaatatttctcgcaatttcgtgattactagaactccaacacaggttgctagccatgctcagaagtacttcataaggcaactttcaggaggcaaagacaagaggagggccagcatacatgacataacaacagtgaatctcacagaaaccatcacaacttcttgttcagaagacaccaatagatccactttaccacatgttctctcacagccgcagcagcataattctactcctactacccccagaactcatgttcagtggactaatcag

SEQ ID NO: 11919 - DNA, 570 bp, Glycine max
  Clone ID: jC-gmle01810059c05d1
aagtcgaaattccattatttatacactttgcttgaaatccattattcccagacaacaaaaccaaccaagaccaacgtttgggacttggttgcctgccactcctttcaggaagttcttatttgttaaagaaacaaatctatgtaccttccttcaagttcataataactaaccaataatctaggatattcacataagaacttaggaaaaagctcaactcaagcaccgtacttattgaaatggacagaagattctggttctacttctacccattaataattcactacaacaagttctaatgcatggaactagtgttgtgaggactgttgcatttggaaaaccatgttctgtgtctgaggtcccaagtaagaagactcatgaagattctgtccctcaattttaaccccaaaggagttagcaccataaggagacatgaagactctttcatgagcagggttgagagtcatagctactcctgtgttagactgattagtccactgaaaatgagttctgggggtagtaggagtagaattttgctgctgcggctgtgagagaacatgtggtgaagtggat

SEQ ID NO: 11920 - DNA, 144 bp, Glycine max
  Clone ID: jC-gmle01810059c06a1
aaaaaaaaaaaaaaaaaggcaagcctttgtataaaaaaaacaaaaacaagaaaataaattccggacgaagtcgctgaaaaagatactgggggcggtacacaactacgatgctcagccccccgtaattatattcatagccgttac

SEQ ID NO: 11921 - DNA, 343 bp, Glycine max
  Clone ID: jC-gmle01810059c07a1
ctgagaaacggaaaacatctaagatccatgaaattaccgcaatccaatcatattgcagagcgaggacttaaccaagtatattctggaaactgctgtttaccctagagaacctgcgcctctaaaagagctgagggaagccactaataatcacgcctggagcttcactgctactttacctgaagcgggtcagctaatgaccttacttatgaagttctcgcggtggaggtgtcaagtgcgaagcaagagacaccgctgttgaagttgcttccgttactgatgcaaattggcaatcacttgtgattgaatcccgatctcctgtactggatgaactctgggctccatg

SEQ ID NO: 11922 - DNA, 468 bp, Glycine max
  Clone ID: jC-gmle01810059c07d1
ctctaacaggaacacaaaatgcaatggttattcagggggctactaaaaatacagattatgctatcgcagagcattaacacaaaagtgaagcgacgcgcctacaaatattgagcccatcccctacgggagtaagagcaaattccacaccagaatcgtttgggattggtttgttaaattgaattgcagcgtccctccctgacctagggggggggggaactttgtcttcaggccagcaaacacgtacaccccacagtgtgttgtcatacacaagctaccccccaattttgaccagctttataagcctgtcatggtagttcacatagttctccttggcagcatcaatgaaggcaaagtcaaaagatccttaatttgcaggatcttcaagtagcttatccaaaattggtagagctggagactctatgaaatcaatcttgtgctcaactccagcctttttgatgactggtaaac

SEQ ID NO: 11923 - DNA, 480 bp, Glycine max
  Clone ID: jC-gmle01810059c08a1
agattttcctctatatctgctccaacccagaggttagttacttcaatgctttcagataaaagatttattcaggagtactttgaaaccaaccggaaaagaatacgacaaatgcatgatgaatttgtgggttgtttaagtaaactaggaatcaagtgtgccaagagcagtgctggtatgtactgttgggttgatatgagtggattaatccgaccttatagtgagaaaggagaaattgaattatgggggaagtttttgagtgttgccaagatcaatataactcctgggtcagcctgtcattgcatagaaccaggatggtttcggatttgttttaccactataacattagaggagatccctatggttattgatcgaattaggagagttgttgaaaagtgtaatttttctagttgaagttccattgtttcattgacatttacagacgcctgatgttgcagtcagaagctgctcgttagaaatttt

SEQ ID NO: 11924 - DNA, 471 bp, Glycine max
  unsure at all n locations
  Clone ID: jC-gmle01810059c08d1
atatataggctttttgtaatgggcaattggaacatgggcactttggcctggaaaaggaaaaaaggacagcggcctcccggattcaaagaaaaaccaaagggaatttttttaaggaacaacgaaaaaaggggggggaaacccccctggcaaaaaagaaggaaagggggaggggggggggaaaccaaagggggggggggggaaaaacacaaaacaaggtctacccagaaaaaaaaacaatagggacaaaccccccccctaaaaaaaaccaaacaggggggccccccttttggggggggggggggaaaaaaaaaaccacccccgcgtttttaaaaaaaagggggggcgccacaaaaaaataatggggggggtacaaaaaaaaaaagaaaccccattaaaaatcgccgcttttggcaaaagaagggggggattgnccccccagggaggggcacaaatttccacccccgggggggg

SEQ ID NO: 11925 - DNA, 512 bp, Glycine max
  Clone ID: jC-gmle01810059c09a1
ttttcctacaaccttgttccttctccttatgtgaaacatgaattgaagaaaggtgaaagtaatatgaacaaaccaacaaaatcagaagaagctctcaagctaccacacgaggataacaatactttttcagattctaaaacgagtggcactgcagagctagaagactgaagtggaaaggagtcagagaaagcagagaaacatcccctacagactaaacctgcagaagaagaagaaaaagaaaggacagtggatgggctcttaatgcattacactaggaaacaatctgctcatccttgttttcaacatgacaagggaccataaatggtgaggaggacagcgagacatgtgcatactagtctgccagattatgatgatttgtaggctcgtcttgcagctctcaagaagacaacccagccagcctagactaaccagcatcacatgtttgatttcctgatttattgttaatccaacctctcaccggtcactgacaaatagttcttacattctgatat

SEQ ID NO: 11926 - DNA, 235 bp, Glycine max
  Clone ID: jC-gmle01810059c09d1
tgtcgttctttttttttttttttttttatcttttttttttttttttttttttttttacatcttttggaaaacgggggattgaaactggggcgacaacctccctataggtcttgatgaaaaagaaacctccaatactcaggccacctctcaattactccgtggaaaagagaatcacgtttgattccaccctcaaaacgtgaaacaaaggaacctttactactatcacaacatgcta

SEQ ID NO: 11927 - DNA, 515 bp, Glycine max
  Clone ID: jC-gmle01810059c10a1
gatcgaaatcggaagaaggattagggtttgtggagatgcaagggcaaggcgttgatgaagtgagcatagaagagttggcgtcgaatctttccctctacaaagatcaactgaaccaggttagagaactcttaaacgatgaccctgcaaattctgaatatgttgacatggagagggaactttccgaggtcattgccttgaccgaggaactccttgcaactgcaaagcagaatgaaatctctgctcctcctaataatgctgctgcatctccaaccttgtccatacataacgagaatcaattgctagatagtagttctgatcatcaagagaaacttcctgttggcaccaaagttcaggcagtttggagtgaagatggggagtggtatgatgcgacaattgaggcttatactccaaatggttattatgtaagctatgacaattggggtaataaagaagaggttgatcctgccaatgtaaggtcaattcaagaaggttctggtgatgctttattagaagct

SEQ ID NO: 11928 - DNA, 473 bp, Glycine max
  Clone ID: jC-gmle01810059c10d1
gtgaaagaaaaaaaaatatatatatgtggggcgaaagctacaatctaaaacagttctgaagtctcgacacatttcagtagataacattgtttggtttgccatcagtgaacctctacagagaatggttgtttgagcatgttacatacaattgaaagggcatctagccgagtcggtgcataacctaatcatcattttcaacagtaccatctttgaggtgaaaatgtttttctctcttctggaactctgtcaaacctttcccacttcccgtcacaccaacctttccctgaggatcatcaggagatttaaaaatactcttccgttttctttcagagaagaaaccaagcttctttgcctttcctttgggtgactgaaactgctgccaagcattttgccgcttattttgtgtgagttcaagttgctccatacgcatctttgacttaaagcatgtgttttttgcgttttgaagctttaca

SEQ ID NO: 11929 - DNA, 531 bp, Glycine max
  Clone ID: jC-gmle01810059c11a1
attttgcagtttgcatacctatattattagagttcccttttagtatcattgttattattcatttcccttattcaactgctttttaaactgttaatggaaatggcttcctcatccttcatcttaggctcagatttcaaatgcatgttctcttcgaggaacactaaaaccatgtctggatttggtgcactgagacatccacacccaaatggtttgttcagtaaatgcttccactttcatactctatctactagaacggtgtcagggactacaaagatggtttctgatgtttatgttggtggagtcacaagtttcagagtcaatagcaagatgtacaccaagttggattcttgtttggtgataccacctaccccaaatcgtgccaagcctcgagctatagtcaaattcctgggtggtgccttcattggtgctgttcctgaagttacttatggctacctgacagaacttttggcaaaagagggttttcttgttgtggttgtgccttaatatgtgacatttgaccattctcaagct

SEQ ID NO: 11930 - DNA, 357 bp, Glycine max
  Clone ID: jC-gmle01810059c11d1
gcattaaaccttggaaatggctattataatctgaaattgcacacaggtgagacctctgttatatttgcttgaacttagaggatctagaaacattttaaactctaaactgatgatttatccagaattgggtagagttccaaccctttagaatggcattcatcagcctaaaattatgcatagctttgatagaaaagaagcatatgcaaatgtgcatcaatccaataaatggtataagctaccacatattctaatcattatcttaacctgagttatatacaatacataggtcttcaattaccaccttcagattcgaagttccaatacatccactatcttgcttatagccaaaattatact

SEQ ID NO: 11931 - DNA, 549 bp, Glycine max
  Clone ID: jC-gmle01810059d01a1
gttcttcaactatgtggaccagtgttctctttttgcttaaattattttcttctttctttatagttggatatagataaaatctgatggtaagtggctcaacttttctagtaagagaggttatttagtggtgtctgttctattacaaatagttggtgggtcctggccatcttaatgctactgatcttgatggagtattttaatgttgtgtttctacacctggattaccctcttctcttttctgggtgcagatttcgagttcctgtagatcagagaagggctgctaatggaggctttgctgctaagcaaccacttccttcccctcagaagcagcaggagaatgtggatatagtgccaaagcaaaagcctcagacgctggattccctgtttgcaaacatgaaggagcagagaatgagagttttgtcaatgcagaataatgctgtgcatccgcatggaagtggaaattagaggctcccatggagaagaggccgatttggcaactaagttgttcacacaatggggaatctcatgatatcaccttttgaacctatg

SEQ ID NO: 11932 - DNA, 547 bp, Glycine max
  Clone ID: jC-gmle01810059d01d1
aggtgaacattagcaaagaaatactgtcccataactaaatatcaaaaaaagaaaaacataccagtacagataaacctgctacgggcccaaaggcctctcaaatgacattatattgtaactgctaggaattgtgtccacatatggaccacagaccagaccagaacaaacattaagccacggaagacactaatatacaacggacgagcaaatgaagaagtccattcgaatgaaagggggaaagataatccatccaactagggggtggggaatctagagttttcttctgcactcgagaaatttttcacttgcatcaacccaggaggagtcaggacgcagcaggccaggacataggttcaaaaggtgatatcatgaaattccccattgtgtgaacaacttagttgccaaatcggcctcttctccatgggagcctcttatttccacctccattgcgttgcacagcattattctgcattgacaaaactctcattctttgctccttcatgtttgcaaacagggaatccagcgtctgaggcttttgctttggcac

SEQ ID NO: 11933 - DNA, 564 bp, Glycine max
  Clone ID: jC-gmle01810059d02a1
gaaacccaaacccttcatcttcgccaagcgcttcccaattccgttgcttttttcttttccattttctccgcaacaacaacgttttctcttctccactcacaatcgccactccttcgacgaagccgttccaggttgcagcgccgtttaccaacacgtgctcaagttccagcgttcaccgaccattcggtggagcccgcacctcgagaacaccgctagtttcatcggcaccgtcgcccgcgaaccgacgcgcgttaactcaacaaccggtaaattcggagtttacaccgtgcttaaggttccaaaatccaaccaatcaaatagctcctttttccggttgcttctgatgatgcggaacaatgtggcaaaacttgcttcggaacacttgaaatcgaatgatttaattcatgttttaggttctttggggtctttcacgaaacctgatgccaatggaatccttcgattgaattacaaggttcattacacacttttccaatcatagattggaatattgagatggcacatgatcctggcaatttttacatttatagctagagtgatttttta

SEQ ID NO: 11934 - DNA, 377 bp, Glycine max
  Clone ID: jC-gmle01810059d02d1
gggcgcgggaaaaaaaaaaattctttccttttaatttggggggggggaaaacaaaaaaaagaggggggcggggccttaaaaaaccattttggtggggggcaaaaaacccccccgtaaaaaaaaagaggtttttttttgggggggggggggccaaaaacccccccccccaaaagggggggggtttgtggaggggcctttttccaaaaaatttgccccccccccccttttccaaaaaaagggaaaaaattttttccccaaaaataggcccccccccaatgtttttggggggggaacaaaaaagggggggtcccctctcccccccttcttttttttccccccgggggagggaccggggggccccttgtcccccccagggt

SEQ ID NO: 11935 - DNA, 483 bp, Glycine max
  unsure at all n locations
  Clone ID: jC-gmle01810059d03a1
cacgatgctaatcgcatggcgcctcacctccactgctgcatctcagaatcgggacgccgtgttcctcactacatagtacctattagcacactagattttgccaaaaagatcaaattttgaagcaattgtttttgtgggcaacattcattctttgctatccctcgaaaaatcaattttcggcttcgagcatcggatatggagaaggtgatgaacattctgaagccgaagccaaatccgcagcaactattgagggattggcagcgcaagcttcgccaagagtgtcgcaacattgagcgccaaattcgcgatatacagagagaagataaaaatgtgcagaaagctattagagaagctgcatagaggaatgacatgggctctgcaaaggcacttgccaaggaacttgtgagatctaggctaactgtgaaccgcctttatgaaaacaaagcacagatgaatncgatatcagtgcatcctggagagagt

SEQ ID NO: 11936 - DNA, 433 bp, Glycine max
  Clone ID: jC-gmle01810059d03d1
aaaaaactctgggtaatttacatacaaactgcacattccaataccatttttcccattagggttatcaatggtcattttcaatatagatatgacaaataggttacaataaacctgttaacatttctcttttataacataccagggtacaaggtagaggctgcgaaattagaaacttgattatgatcgaactttagcaagccgggcccttatttcttccatttcttcttcataatcaacaccctcagctatagcattttcctttgcgccaacactttgagcaggtagcttcaccctttttttcctcacagtttcaggaagttgagcagctgtctcaccagctattgcgggcaagactttatcaacttcttcttctatctaatcttctatggcctcagaatctagcgctgagtcgacggcatcgtttactatctcc

SEQ ID NO: 11937 - DNA, 510 bp, Glycine max
  Clone ID: jC-gmle01810059d04a1
agagaatctccaattatgcctttctctttctacatgtttttgccacctcactagctgctagcatgcccccctctcctcaataagttttagaattttttgcacttgttttgcttatcgtcttcttggtctgttccaaggtgcaaaagtgacttcttgtggaaccaaaatagcatatagctaggattgggaaaacaaacatataaaccaagacaagagaatataacatcgtatctcgcttttttcttcttttttttttcattcccaacctgtaggagtttttcttcaaattaaaggcaatatgttccccactgctatttcctattcaacttctttgtctgaggatgccagtgtttcttctggtacaaaagttcaggacttgggaggactcaatcatggggtctcaagcatttctcctcagcaacagcctcaaaagatcaagataaagaggagcctccctggaaatccagacccagatgctgaagtgatagccttatctccgaagacccttat

SEQ ID NO: 11938 - DNA, 524 bp, Glycine max
  Clone ID: jC-gmle01810059d04d1
catgacaacaaagcaccaaatatattaatattcagtcaaataaaaaaaaactgaactaaagcattgtacttgatttaaattgagagaacaacaatcaaaactaagatctgaagtctaaagcggattgaaaaaaaaaaaatctataacgaggtgttaaaaccaaaacagattgatgatgattgacgattcaagagtcaagggtcagtgtaatggcaaagttgtgttgcctattttaccctcgtgacttggaattattctcctgtctgtgtctaacaattccaccacgtctcgggggcagtggttgtcccaaggaaaccaaagccttgttggggcttcagaagcgcgtggtggtgatgatgttgacggtgcggttggacttggtggtactctacggccccagtgaacgctagcatatccttgacgttggtgctaacgtcaaccgcgccgccgttagcatctgccgtgagacccagaaagtcccttgtgagacggtcactactcttgaacattgttctcgtgtagtt

SEQ ID NO: 11939 - DNA, 547 bp, Glycine max
  Clone ID: jC-gmle01810059d05a1
gtacttttgcaactggcaatcatttgggttcattgtggctaattgaatcaagaaatcaaaacaatcatccctatcttcttgattggtactacacttcccaacctcatgatgcaacaactcaaagacatattcaagctgatgatccatttgaaagaacggagcatcaatccccagattggatgccctccatcttggtacaaaatgagcaacatgggcatgaagaatacataaatgagtattgcgatgaacgtgtcacttcccatcttggcgcttccacatcagctcccatcttcagggaaagcctaattcaggatcaacattccattgatatgcccctcactaccaagagtcattggtgggctagaagtcactcccagagtggacatggtcagacaagcttttttgagccaccagatttcaatcaccaaccagtatacaattaccatgaaaagttttctgatagagggtcagaggatcatgatcaggaacaacacttgcactggggagattatcaccaagtagtatctagtacagcacatgtagatga

SEQ ID NO: 11940 - DNA, 576 bp, Glycine max
  Clone ID: jC-gmle01810059d05d1
aacgcaaaacaattatagaaatctgaactgccttatgtcaaagaatctatttacagcaaagaatagtttccatttccacacaaataacagaaatgacaatcatgacttgacttcggaactcttgcattccagaagcaagaaccagccaaaacaaataatgaaggacaaagtcatcacttaaaaggttgcagtgctaggatttacagtggaattttgtggagtactgctataaacatcatcaaatagaagattgaattttcctgcatctaaatcatctacatgtgctgtactagatactacttggtgataatctccccagtgcaagtgttgttcctgatcatgatcctctgaccctctatcagaaaacttttcatggtaattgtatactggttggtgattgaaatctggtggctcaaaaaagcttgtctgaccatgtccactctgggagtgacttctagcccaccaatgactcctggtagtgaggggcatatcaatggaatgttgatcctgaattaggctttccctgaagatgggagctgatgtggaagcgcccagatgggaagtgacacgttcatc

SEQ ID NO: 11941 - DNA, 498 bp, Glycine max
  Clone ID: jC-gmle01810059d06a1
cttttatgcagaggaaaatatttttaatgatgtcaaattggatggtgttgttactctggttgatgcgaagcatgctggttttcatcttgatgaggttaagccaaaaggtgtggtcaatgaggctgtggaacagattgcatatgcggatcgtataatttgaaaataagactgacctagttggtgaatcagacattgcttctttggtccagcggataaggaaaataaacagcttggctaacttaaagcggacagagtatggaaaagttaacttggattatgttcttggcattgggggctttgatttggagaggattgagaatgccattaatgatgaaagtgcataagaagatcatgaccacagccatgaccatgagcatgagcaccatgaccatgatcatcaccaccatgaccatgatcattcccatgaccacaagcatgaacaccatgatcatcactctcatgatcatagtcacgatcctggaggtttatctgtcagca

SEQ ID NO: 11942 - DNA, 500 bp, Glycine max
  Clone ID: jC-gmle01810059d06d1
ctagaaatggaacattttttccactaaatatgcaggcgatcagtttagagttctacatggaatataggcacactcgtatatcttcaacgggtttcattggccgaaagagatataattaaagcactgtagtgaacttcttagtatcatagaaaacaggccttgaatcccttttgcaattccttagcatccaagtttttccctatgaatacaattttgtttacccttggttcatctggcccccacaacctttcaggtgaaccttgaaatatgtcatgaactccctgaaagacaaatctctcgttcattccttgaacagacagaaggcccttcatcctataaatgggttcactacgatcaagcaacaaggtgccaagccacatgttagccttctcaaggtctaagcttccttcacaaactatgctgacagatgaaacaccaggatcgtgactatgatcatgagagtgatgaccatggagttcatgcttgtgggcatgggaatg

SEQ ID NO: 11943 - DNA, 454 bp, Glycine max
  Clone ID: jC-gmle01810059d07a1
gtagccggtagcattttcagcgagatttagctgtatgcgcgtgaaaagcacgcaggaaggagcccgtgacggttctgatcaatcgctgtgcagtggtaacctgctttgtgatgtggtggaaggatcttcttccgtcttggttctcgaatcccgagccttacactgctgcttggaccaccatcacctcagcatggctataactataatctagacaaggcaatgaatccttctctcacttcttcctcaaccttgtcgtcgtcttcttcgtcctggttctccggaatcgttcgagttggccgttccaacagtgtcaaaatgtccaataactccgctgctgcaccctcctccgacactgccggccccgtcgtccgcaaaaatcagctccgaggtgttctttgtcagtacggtcccaatcctattcaggttgcatttaagactggtgatttcaagcggc

SEQ ID NO: 11944 - DNA, 585 bp, Glycine max
  Clone ID: jC-gmle01810059d07d1
gtaattcaattcaatatacagtacaaaagtattatttatctttctctgtttctgggttgctgacaaatatgcacacaacaccattctttgaagggatcaactaaaaaaagtaaactaggaattatgtagaaactcaaacattggtaagggcaaaaagggatttacatatgttgtaacaaacatgaatacatggtaagaagtgatgaaagcattggggtaaagttagaggttgagtggggggattcaagggactagggaggaaatgagaggtaggaaatcaatttggcagttttgggtgcctcctgccacagggtcgtggagtttatctcctctgatttctttattctcagctctcaattgcattttccttttgaatccagagcactgttcaatggaattttccctataggcagttattggggcactaggatctgcttcccttggcattaactctagacctcggccttcacttatcatcttagcagccaagtcaatcatagaagctgtatgagggagtgtagcttgatattcccgatcactgactggagcctgaaagatggcagcacgaacagctcgggagcaagc

SEQ ID NO: 11945 - DNA, 590 bp, Glycine max
  unsure at all n locations
  Clone ID: jC-gmle01810059d08a1
gtgtatttccctacctctcccttcaagatgcagatcttcgtcaagaccctcaccggcaagaccatcacccttgaggtggaaagctctgacaccatcgacaacgtcaaggccaagatccaggacaaggaaggaatccccccggaccagcaacgtctcattttcgccggaaagcaacttgaggacggccgtacccttgctgactacaacattcagaaggagagtactcttcacctcgtcctccgtctccgaggaggcatgcagatcttcgttaagacactcaccggcaagaccataaccctagaggttgaaagctccgacaccatcgattacgtcaaggccaagatccaggacaaggagggtatccccccggaccagcaacgtctcatcttcgccggaaagcagctcgaggacggccgcacccttgccgactacaacatccagaaagaatcaacccttcacctcgtccttcgtctncgtggtggcatgcagatctttcgtaagaccctcaccggcaagactattaccctagaagtcgatagctccgacaccatcgacaacgtctaggctaagattcatgacaaggagggaat

SEQ ID NO: 11946 - DNA, 567 bp, Glycine max
  Clone ID: jC-gmle01810059d08d1
aacaaacgtaggtgggatattagagtactattattaatgggacacaattgagttcaacacaaaccgaacttattttcaagggacattattacagacccattaaacatcaaagttcttcaaatgttttgggaacacatccaacattacacaacgagcttaaaaccccccacggagacggaggacaaggtgaagggttgattccttctggatgttgtagtcagcgagggtccttccatcctcgagctgcttgccagcaaaaatcagcctctgctggtccggtgggatgccttccttgtcctgaatcttggccttcacattgtcaatggtgtcagagctctccacctcgagggtaatagtcttacccgtaagagtcttcacgaaaatctgcataccaccacgaagacgcaacaccaagtggagagttgactccttctggatgttgtagtcagcaagggtgcgtccgtcctcgagctgcttcccggcgaagatcagcctctgctggtctggggggattccctccttgtcctgaatcttagcctttgacgtgtcgatggtgtcggagctttc

SEQ ID NO: 11947 - DNA, 171 bp, Glycine max
  Clone ID: jC-gmle01810059d09a1
gaaaaaaaagtgaggctgagattcagttatgttgatacaagattgagacaataattggcttctctttctctagctttatccatactggcatcgcatattttcttatcaaactttttgtgtgtagtttgtaaattaatcaaagggaatgatctaatattctatttgttggtt

SEQ ID NO: 11948 - DNA, 171 bp, Glycine max
  Clone ID: jC-gmle01810059d09d1
aaccaacaaatagaatattagatcattccctttgattaatttacaaactacacacaaaaagtttgataagaaaatatgcgatgccagtatggataaagctagagaaagagaagccaattattgtctcaatcttgtatcaacataactgaatctcagcctcacttttttttc

SEQ ID NO: 11949 - DNA, 572 bp, Glycine max
  Clone ID: jC-gmle01810059d10a1
gaacatcgaccagatctccgcatctgtcgagaaagtcgtccccgtcctccacgccgacgtcgagccgttccgcgtcccgctgcctgcgagcccactgatatcaccgcaacgagagcacccgccgcagctgccaccgccccaaatcacactgcaggaagacagcgacgaggaagctgtcaaagaacaagctgcaaagatgcctcctaagacacagaagcagaaggagcagaaggaggaagaggagcatggcgctgtcttctccgtctccggtcccgtcatcgtggccgagaacatgattggtgttgccatgtacgaactcgtccgtgtcggccacgagaacttggtcggagaggtcattcgtatcgatgccgacaaggccaccatccaagtctacgaggagactgctggtgtgactgtcggcgaccccgtcttcaggtccggacagcccttgtctgtcgaactcggccctggtctcatggagaccatctacgacggtattcagcgcccttctaagggtatcgccgacgactccaacagcatctacatctccgtggtatcgatctgcccgccct

SEQ ID NO: 11950 - DNA, 335 bp, Glycine max
  Clone ID: jC-gmle01810059d10d1
cccaggcctcaacaaaaaattttggggccaattttaaatttacgttccgggaaaaacaaaaaatccccctttgcaagccgttttttcttgtaaataaaaaacccaaacttttccggaattttttggggcagttccttattcttttgggggaccccctccttgcctttgccggggggtttaaactttatgctggggggctgagcttggatctttgaggggttatcggggattttgggccccttggttccctgcaaaaaccccttttgggcctcatgggggaacccccaaatgtttttaaaaaaccattaagtcttccacagggggcaaaactgggc

SEQ ID NO: 11951 - DNA, 575 bp, Glycine max
  Clone ID: jC-gmle01810059d11a1
acttattgaggaacatcgtgcggaagaagcacggtggagctgggaggaccaattccaattcgcattattcgcatcccttgaagctggaggagttggacgacgaggctatggtgatggagatagcgaggttgaaggaggagcaaaaagcgttggaggaagagcttcatgaaatgaacaagaggttagagacaacagataaacgaccacaacaaatgatggcttttctgtgtaaggttgtcgaggacccgcagattctttctcggattctccgagaaagagaaaagaaacacctgggagagaaaaagcgacgcctcattccgcctccgccgtcgacggcagcgacgtcgtcgtcgtcgtcctccggcatcaagacagagttcgaagaagacgaaggtaattataatatcaagtcttcgtcgccggagacagggttggaaatcgacaacaatagtaacaatatttgttcgccgccgccgctgaggtgttggggtgaacagggttgttatgggtacaattgcgccttcgtgccggcacctttgacggtggtagcgccggcgtttacgacgatgggagga

SEQ ID NO: 11952 - DNA, 451 bp, Glycine max
  Clone ID: jC-gmle01810059d11d1
aacaaaactcacagtttgaatattttacataattatatatgcaagattctaatccgatcctactcattaaattgaaacaactctatgttacttgatctacaccatccgcaaagcatttatttaaaaacaatatttatgaaaaaaaaaacctgaaaccgaacacaactataaatatctaacaattttcccactacctttttactctttttcccaaccttttttctttacacagaatcaacgcacaaaaaaggatagaactttcaatacgacagaaaatccaagatgaaattttgtggcagtaataattcattcatttcataacctaaaactaaatctaaaagcccccttccaacaacgaaaacggataaggcggcaccgcattcccctccgcgccatttccccccaaaaccccccacgcctcaaataccctcctcccatcgtcggaaacgcc

SEQ ID NO: 11953 - DNA, 439 bp, Glycine max
  Clone ID: jC-gmle01810059d12a1
attctaaaaactggagaaggcattacagaagtctgccttagtgggtttattgcttttgatgttcctcctccaaagggtccattgtggattcttggcgatgttttcatgagggcatatcacaccgtctttgactacggaaatctacaagttggttttgccgaagctgtctaattaggctttctggaggattttctttgaaaaattgttaagcgtgttgtaaataagctgttataacaattgtagctgggattcactttatggaatcacgaatggatttatccatttaagacgtagaagtatccacttggaacttggaagtgttgtgttgtgtgctttttatatgaaaaaaccatcgtcttcactctttattttattccgtgttgggcagaatattatgccttttctgtccctttcaaaattaggatacttgtaatgtgcc

SEQ ID NO: 11954 - DNA, 439 bp, Glycine max
  Clone ID: jC-gmle01810059d12d1
ggcacattacaagtatcctaattttgaaagggacagaaaaggcataatattctgcccaacacggaataaaataaagagtgaagacgatggttttttcatataaaaagcacacaacacaacacttccaagttccaagtggatacttctacgtcttaaatggataaatccattcgtgattccataaagtgaatcccagctacaattgttataacagcttatttacaacacgcttaacaatttttcaaagaaaatcctccagaaagcctaattagacagcttcggcaaaaccaacttgtagatttccgtagtcaaagacggtgtgatatgccctcatgaaaacatcgccaagaatccacaatggaccctttggaggaggaacatcaaaagcaataaacccactaaggcagacttctgtaatgccttctccagtttttagaat

SEQ ID NO: 11955 - DNA, 207 bp, Glycine max
  Clone ID: jC-gmle01810059e01a1
cagctctttattggaacttcacgttccatgaatttatgacaaggttcttcacgaaagagttggacggtaaatcattgacaaatttcttcaggcagtgatgtacacatatatattagcatctatttctggtgatgtatcaatgttggatatgcgatgatgaattttatgcttaaataagttgtgaataaaaggtgctatatgtttgac

SEQ ID NO: 11956 - DNA, 207 bp, Glycine max
  Clone ID: jC-gmle01810059e01d1
gtcaaacatatagcaccttttattcacaaacttattaagcataaaattcatcatcgcatatccaacattgatacatcaccagaaatagatgctaatatatatgtgtacatcactgcctgaagaaatttgtcaatgatttaccgcccaactctttcgtgaagaaccttgtcataaattcatggaacgtgaagttcctataaagagctg

SEQ ID NO: 11957 - DNA, 569 bp, Glycine max
  unsure at all n locations
  Clone ID: jC-gmle01810059e02a1
gcttctctgaattctctggcctccgaagctcatcaggcttccttcccttttctagaaaatcttcagaggatttccattctgtcattgccttccagacctatgcagttggaagcagtggaggatacaagaagggtgtgacagaagcaaaactgaaggttgccataaacgggtttggaaggattggaaggaacttcttgaggtgctggcacggtcgcaaagactcccctcttgatgtcattgccatcaacgacaccggcggcgtgaaacaagcctctcaccttctcaaatacgattccatcctcggaaccttcgatgctgatgtcaagcctgttggcagcaatgtcatctccgtggatggaaaggaaatcaaagttgtttctgaccgcaaccctgccaaccttccttggaaggacttggggatagacttggtgattgaaggaaccggggtgtttgtagacagagaaggtgcagggaaacacattcaagcaggagctaagaaggtgctcatcactgctnctagtaaaggagatatccccacctacgtgggtggtggtaatgagtatgactac

SEQ ID NO: 11958 - DNA, 538 bp, Glycine max
  Clone ID: jC-gmle01810059e02d1
caaggtaagaattttattgcacaatgagaaggcagagaaaattgatggttctgtttctcagtacaagtttaaaagaaaaatgaagcaacaagtgttgtagtggtagtagtagtagtaagcatacaaaattacaatggcatggtacatacataataatttaattaccaatgagaatttgtttggctctcacttccatttgttggcaacaatgtcagccaaatccacaaccctttgggagtagccccattcattgtcataccaagcaatgaccttcaccatgtcatctcccatgaccatggtcaacgaggagtcaacggttgaggacacatcagtgcacctgaagtcaacggacacaagtggctcatcacacacagagaggattcccttgagctcattgtctgcactctctctgaatgctgcattcacttcttctgcaaaggtcttctttgagacctgaacgacgaggtccaccactgagacgttcggtgttggcacacggagtgcaatgccattgagtttgcctatgagggttgggagg

SEQ ID NO: 11959 - DNA, 505 bp, Glycine max
  Clone ID: jC-gmle01810059e03a1
ctctgatcttggagcgtagaatcgtgaatggtgacaaaggcaaacgcaagaatggagtcacgcatggaagctatggagaaagtggtagaggagaatcacaaagtagtggaatcgcagttgagttcgatcgaagggatgatccacaggttggggtggcatgggagaaaaaatctcctgcgacgaacgtgcacgtagttgatgcgagcgaaggagatgaaggtacagtggcacatgatggctatcggtggaggaatttggaattgcccatatttgacagtgaggattctatgggctggttgacaaagatcgagcgatacttctggttacgcgctgtaagggaagaggacaagctggaggttgttatggtcacgatggatgaggaagctttgggttggttccaatggtgggaatcttggaatccaaatcattcttgcgatagaaggacaatgcagggattcataagccatattgagaagtgtgttggaatggtgaaagggttggagga

SEQ ID NO: 11960 - DNA, 590 bp, Glycine max
  unsure at all n locations
  Clone ID: jC-gmle01810059e03d1
gttcttatcctccactcttcaagccttaaccatggcttccatcaagttctttggttctgaagcctaacctcagtgctaatctcttcctttaaccccttgaggaacacttccaccagaaatggctcctccaaccctttcaccattccaacacacttctcaaattggcctatgaatccctgcattgtccttctatcgcaagaatgatttggattccaagattcccaccattggaaccaacccaaagcttcctcatccatcgtgaccattacaacctccagcttgtcctcttcccttacagcgcgtaaccagaagtatcgctcgatctttgtcaaccagcccatagaatcctcactgtcaaatatgggcaattccaaattcctccaccgatagccatcatgtgccactgtaccttcatctccttcgctcgcatcaactacgtgcacgttcgtcgcaggagattttttctcccatgccaccccaacctgtggatcatcccttcgatcgaactcaactgcgattccactactttgtgattctnctctaccactttctncatagctttcatgcgtgactccattctgcgtttgcct

SEQ ID NO: 11961 - DNA, 525 bp, Glycine max
  unsure at all n locations
  Clone ID: jC-gmle01810059e04a1
gtcttggttggagcggatggaatatggtccaaggtgaggaagcagttatttgggctcacagaagctgtttactctggttatacttgttatactggcattgcagattttgtgcctgctgacattgaaactgttggataccgagtattcttgggacacaaacaatactntgtatcttcagatgttggtgcgggaaagatgcaatggtatgcatttcacaaagaacctcctggtggtgttgatgagcccaacggaaaaaaggaaaggttgcttaagatatttgagggctggtgtgataatgctgtagatctgatacttgccacagaagaagaagcaattctaagacgagacatatatgacaggataccaacattgacatggggaaagggtcgcgtgactttgcttggtgattccgtccatgccatgcagccaaatatgggccaaggagggtgcatggctattgaggacagttatcaacttgcatgggagttggagaatgcatgggaacaaagtattaaatcagggagt

SEQ ID NO: 11962 - DNA, 512 bp, Glycine max
  Clone ID: jC-gmle01810059e04d1
aatgataaactatacagggggattctgtaaatcacaattaaaagtgcaaaaattcatagcttggcattgcttactccattcaacattaatcacgtgcaagtttatgtgtgtcatgttataaatctaactctcacaaattacatatgtcatacacaaaaagtattggagtggagtaacacatttatacccaagagtccctcttaaatgtccatataggcatgtaacatatcaaatcttaaatgactagactggggtataataccccaccctaaaacaatgcagatagtactatacaatagcaaatttgtgctggataatttttgcataacttacaaattgcaattgagcagaataagtcatactccctgcaaagctagtgtgctttcattctctgagactcttggaacagagcttgtcaccttaacacggaacgaaaccttctcagaaccaaactgaataacatcatatggacggatgcgatcaggataattaggaggtacccgggactgctt

SEQ ID NO: 11963 - DNA, 569 bp, Glycine max
  Clone ID: jC-gmle01810059e05a1
gtgtaatatttccacttgaatgaatatggtgaaagattttctattggacagcatatataaaacacaaattcagtttaaaatggcagttcggaggcttaacaacagctatgctctcgactttgcagttgatagatacacatgcaacatttgttaatgcaaataccattcaactacctgtgtatatgatcatacttgatactacagagaaattatttcttttggataggcaataatggttgttatgactgccattaagagtatattgttgtcacttctattttttgtatgtttgttatttttatgcaattcaggtgggaatggaacttaccaaatagtttggtaatcttggaactgggcgtgggcttgaaatggttgctgcctttgaaaaagcttccagcaaggccatatcatattatttttcatcttcctctgctcgctcacatgaatcatccactcaacctgatttcttaattttgcagaaaattccattaataatgtgtcccagaagacccagagatgctactgctgtatatgcatctatggacaaagctgagaaagaactggttgga

SEQ ID NO: 11964 - DNA, 383 bp, Glycine max
  Clone ID: jC-gmle01810059e05d1
ggggtaaagccctttttaaaaccataaaaacccaaaattaccccccaacctttttcaaaaaaaaaaaaacaagcaaccgctaaaaggcccaaaaacccttggaaaaagtttttccccttttttttaaaaaaccccaattttgggctgaaaagaatttcatattgcccacacaatataacccttggcggggggggtccgaaccccaacaagtaaacttttggggccggcccattcgttgtctttaccccccaaaaaaaagggcccaaatcttcatccctccacgggggggggctaaaacccgccattgggactttaacccctccaccggtggggggggaacaaaaaaaaaggttggggggggattggggacttgaaaattaaca

SEQ ID NO: 11965 - DNA, 342 bp, Glycine max
  Clone ID: jC-gmle01810059e06a1
gtgacatggcccagctttagtgatattcacccttttgcaccagttgaccaggctcaaggttatcaggaaatgttcaacaatttgggtgaactgttgtgcaccatcactgggttcgactccttctttttgcaaccaaatgctggtgctgctggagaatatgctggacttatggttattcgcgcatatcatttggcaaggggagaccaccaccgcaatgtttgcattatacctgtctcagcacacggaacaaatcctgctagtgcagctatgagtggaatgaaaattgtctctgttggaactgatgccaagggaaacattaatttataacagctgaggaaggct

SEQ ID NO: 11966 - DNA, 482 bp, Glycine max
  Clone ID: jC-gmle01810059e06d1
ctcaatctcagcaatttcttgtctaatggaaataagagcatcacagaacctgtctaactcggccttgctttcactctcagtaggctcaatcatgagtgtgccaggcacaggccatgacattgttggtgcatgaaaaccgtagtccatgaggcgctttgcaacatcttcaggctcaattccagcagtattcttaaagcctctcaagtcaatgatgaattcatgagcaactgttccattgactccacggaaaagaaccgggtaataattctccaatcgttttgccatgtagtttgcattcaaaatggctatctttgatgcatcggtgagtcctttagaacccatcatggctatgtaagtgtaagagattggcaatatgagtgctgagccccatggtgcagcagcgatggtaccaagtggttgaggtttgtcaggggcaggaattccaccagtttctatcacagggtgtgaaggtaaaaatggtg

SEQ ID NO: 11967 - DNA, 562 bp, Glycine max
  Clone ID: jC-gmle01810059e07a1
gtagcaattaataacttggaatttggctttgaggataagacacttttcaaaaaggcaaatcttacaattgaaaggggagaaaaaattgccattattggtccaaatggatgtggcaagagtactttactgaaattgattatgggtttggaaaagccaaccggaggtgaagttttgcttggagagcataatgtattacctaactattttgagcagaatcaggctgaggcacttgatctggaaaaaacagtgctcgagacagtagaggaagctgcagaggactggaggattgatgatattaaagggcttcttgggcgttgtaattttaaagctgatatgcttgaccgaaaagtttcactattgagtggtggtgagaaggcacggctggccttttgcaaattcatggtaaagccatcaactatgcttgtgttggatgaaccaaccaatcacttggatataccttctaaagaaatgctcgaggaagcattaaatgaataccagggcactagtatcacagtatctcatgaccgatactttataaagcaaatatgttatagagtgatag

SEQ ID NO: 11968 - DNA, 516 bp, Glycine max
  Clone ID: jC-gmle01810059e07d1
atggggtaatcatccttttatatttccgtaaatgagttagtgaatagatacatgattatacaaaggctgtgtagcttaacccaatatgctagctacatcaccttctggcggtaaattagtgtaacaatgaaatggttcactcaattccatctcttggcatttttcacgcctttggacttctgttttgctgcctgaaaggcctgcatcttttgtttcttccgtgcctctttctcagccttggacatcttagatttggctttcactttaggagctttgctatcaagctcagcctcgcgttcaagttctctttccctagcatcaaaattcttctctaaataataatcgtaatcacctgcataatcctgtatggtgccatctttaatttctatcactctattaactatttgctttataaagtatcggtcatgagatactgtgataacagtgccctggtattcatttattgcttcctcgagcatttctttagaaggtatatccaagtgattggttggttca

SEQ ID NO: 11969 - DNA, 534 bp, Glycine max
  unsure at all n locations
  Clone ID: jC-gmle01810059e08a1
ttattgttcaaatctatttttgaaagttagtgcattgataggatattattaataattcaaggctttatttaaacaggatataataaggctttcttccgtgaacatcttgagcaaaagtaagaaaaaaacgatgcttacttctctgaatgaattaacagagcagatgccttcgcttcttgaaattgatcatccatgtgctcagaggcacattgcagatgctcactacttggttgagtcaattcctgaagaagatgaccccattcaagatatttctcatggtcgcaagccatcaacagatctgggctctggatctgaaactgacgttgcacagtggaatgtactccaatttaatacaggctcgtcctcaccatttataataaaatgtggtgcaaactctaattccgaactagtcattaaagccgacgcacgagttcaggaaccataaggtagtgaaattgtgagggttgcccctagaccctcncgtttggaaaatatgagcttggaggaaatgaaacaagtatttaatgaactacc

SEQ ID NO: 11970 - DNA, 445 bp, Glycine max
  Clone ID: jC-gmle01810059e08d1
ggagtaaaagatggtagagcctagacaatgatattatatttaaaaccggatttgccaatgcaatcagatggcgcaacttgtgcaccaggttgaactgaacccgtaagctgcgttttaagctacttccattaactacccgaagcaaaactgcagcaaaagtatactaaaaataattactattacatacaagcataacgggcaagcagagggataaatactttgtacatacattacagggaatctgcttccccaagaataaagcaagccagacagaaatgtaataccacttaaccaaactccccaagagcattagcaatttagcacaggcacctgcacatataagttaagaaccatctaacccttcaaaggtcatgttctcacatctttgagtgcacccactttttcaagctcaccgaccaaatccttaagcgatggaaccttagta

SEQ ID NO: 11971 - DNA, 576 bp, Glycine max
  Clone ID: jC-gmle01810059e09a1
cacggactagcggataaaccaattgatttagaagctggttctagctcttctcatgggccctctgttactacaatagaggctggtaaacatactgtaggtgcagatgacataagggtgtcatcaagtgttgatacccatgccccagttgcaagctcatcatctcttgaatccactggcagcattggtgttactgacttagacattgcaactgttgagtatcaactaaaggctcttggtgtatctaatgcaccaaattcagaaagtctgagttacaaagagaaatggaagaccggctaccagaacaatttgatgcaacgccagggattccagcaacaaaacaatccatatgatgttcctagtgccaactgtcaaaatgtaaattctgtgtatgctggtagggaacaatttccttttaattccaacaagttctccaatgtccagccactactgcagtcatctggttttacaccttccctatatgccacagcagctgcttatatgtcctcagccaatccattttacactaatatgcaggcgtcaggtatatatacctcacaattatgttgccgatacact

SEQ ID NO: 11972 - DNA, 347 bp, Glycine max
  Clone ID: jC-gmle01810059e09d1
ccaagaaaaccacacactaagcacggaagacccagtaaattatacatcaggaagggaagggtttccttccaaataattattcaaataactttttcaaacaattatttgaatgacataattacattgagtttcaaagtataacccctgaagccatcaatgtggaaactatcacggtgcaggtatgaagtcaggagtaaaaacaactggaagctatcgatgtctcagctattttctgtgatcaacagaacatatgttgatgctgcggggtttgcacgtcacagcagcattgctggagacccatggcttcgtctctctattttcatcatgagctgggttgtttgattctc

SEQ ID NO: 11973 - DNA, 595 bp, Glycine max
  Clone ID: jC-gmle01810059e10a1
agataacaatactgtagatatagagagatagttccaagctccaattcccagaaaaaaattaaaactttgcttcttcactttttctcttaccccttctgatctcatgcaatttcccctcatggatccctttgattcgattcgcaaagggtttggctgaagctatctggaatatttctgttacagtttttaaggtctatctatgttttagtcatttttgtccatattcttgtcaataatgagcttatccaagaaaggttcccaaacagacgcaaaattgagctccttaaacaaagcaacctatttgaatccaaatgcagcagagtttgttccatttgccctcagatcatcgccatctggaagcaccagcttggtagatgcaacagcgaggtttgctgctgccggatctcttgggaaagcagttttagatcgagcagaatcatgcatttcaaataattccgatgatgaggctcaccagtactggcgttgtcagcttcctgatgatatcacccctgacttcaaggtcatgggagaggatgaataccaaggtcttaacaacctctctttagcagcttatctataaatgactgatatgaat

SEQ ID NO: 11974 - DNA, 479 bp, Glycine max
  Clone ID: jC-gmle01810059e10d1
ctcaacccgtaaaacctcttttttttcatttttctttttgacttgaccattgccattacttcccatatacagatacaagaatgactacaatgtctatgtgttcatgatgaatttttttaccgtgtcagaaacttgtatatctccttggttcagtatatcacaacacaaagcaggcccggctgcggttcagtgaaatcaaggccttcttcgagaagataacgctgtacagctattgggagtctcgcaggagtgcgggagccccgagtatggtgaccagtgccaacacagatgtaaacctgcaaacgctgctcgggggctctggctgtgcttcgtagcacactcagtttcgtgtttcagcacgtgaatcgcttcacttacgtgcagaccatgtaggtctatcattctttggggccctcttccattctctggagcaacaggattcctctggcgataatagattcttgagctttccatgtgct

SEQ ID NO: 11975 - DNA, 565 bp, Glycine max
  Clone ID: jC-gmle01810059e11a1
ccgatcttttcctctgagaagacgtgtcggtagctgaagcattttataagcctccactttcctgaactagttttaacatacaatctttcaagtacacctccccagcttccatttaagaatggagatcactagaataggccaatggttaagtcttctgatatgtgtactactattactgcagacagaaggggttcctgtgggaatcacttttgttgaaaatgcagtggcaaaaggggctgtttgtttggatgggagtcctccagcttaccacttccacaagggatctggagcagggattaacaactggatagttcactttgagggaggaggatggcgcaacaacgttactacttgcctttcccgtagggacactcgattaggttcatctaagaaaatggatacatcactttccttttctgggtttttcagtaacagtaaaaagttcaatccagatttctatgattggaacagaatcaaggttaggtattgtgatgggtcatcatttactggtgatgttgaagctgttgaccgaaaaccaatttgcacttcaaggagcaagggtttt

SEQ ID NO: 11976 - DNA, 419 bp, Glycine max
  Clone ID: jC-gmle01810059e11d1
ttttttttttttttttatgttcttttttttctttatttttttttttattcttttagggtgtttttttattgttcattttttttatcttcttttattgtattttggaaaaaacacaacagcccccctttttacaaaaaaaaaagcgtttgattccaaggggaaaaatttcacatcctttattgaggggcccccccttaaccctgggaaaccttaaaaatacaaacaaaagctttttttttgggggggggcataaaaaccccacatgttggggggggggaactctcaacaaaaaaccccaggtggggggggcaccatcttgggtggagaaaaaggataagcctgctaacagttgttgtgcggaaaaaaaaaaaaaaccgccccctttaaaaagaaattaagaggagggccccccttttcgg

SEQ ID NO: 11977 - DNA, 547 bp, Glycine max
  Clone ID: jC-gmle01810059e12a1
tgaggttgttgctgttactggcgatggaactaatgatgcccctgcactgcgtgaggcagacattggacttgcaatgggcatagcaggaactgaggtcgctaaagaaaatgctgatgtcattataatggatgataacttcacgactattgtcaatgttgtcaaatggggacgtgcagtatatataaacattcaaaaatttgtgcagtttcaattgacagttaatgttgttgctctggttatcaacttcatttctgcatgcatcactggatctgctccactcacagctgttcagttgctttgggtcaacttgatcatggacactcttggggcattagccctggctactgaacctcctaacgatggacttttgaaaagacccccagttgcaagaggagcaaactttatcaccaaacctatgtggaggaatatcataggtcaaagcatatatcaattaattatccttgggattctaaattttgatgggaagaggctgctcggacttggtggttcagattcaacaaaaatactcaacacgttgatattcaac

SEQ ID NO: 11978 - DNA, 542 bp, Glycine max
  Clone ID: jC-gmle01810059e12d1
ataaacatgtaaaaaagtatattacaaaaaaatatattgtacattacaaaaatgcaccagtgaactatgaagttcgatgactaactagtttctgtacaacaaaaatgaacgtcattataaatgtagcaagtgctgagatctttgtattacaatccaaatggtccacacactgctcaaatgcaggagtgcaaaatatgtggagtatcagatagcatgagcatcccccttgtcatgaaaggtttttattttttgagttttgcacaacaagactcttaaatgaatttatgttaagtaacgaattgcaaaagttttggaactgttctcaaataaaaatgctcctcaaacagctggttctgacataaacagatataaactagttatgttcagtgcgcaaagaggactgttgttggcatatttgccttcaatcatttctttactcaacacccatatatgttttgtcatgcctggaaatttagtatgggatcaagtcttctcaaaactacatagaattagaatgcggtaacgaatggcagcattaaaag

SEQ ID NO: 11979 - DNA, 577 bp, Glycine max
  Clone ID: jC-gmle01810059f01a1
gagaatttgagccatcctaagcaagctgcatgagtcacagatttcattctctctccaactgataagaaacgtagttccatgtgggctcttaggatccactcacttaactctaaactcgtcgtgtgtgttccttctttccacttcaaacttgggaccccagaaaaaagaccctttccattctcctccttttcttcctcctccactggctgcacctcgctgccgtgtctctgcctagcgtgaaattggcctcatttcccatctgggtcctgtgaattgcgattggaaccgcgttttccccgcttctgggcttggctcagaagtagtcagaatgatgtctgtcacaggcaaaagcattgattttgctggcaaaaacttggtctcttgtggctgctcttccaatgcttcttcgtttgataggtacactgtgaggaactatgccaagctgaatagtaataattctaaagggtgtggcagagatcatggggctcgtaaattggtttgttgaaagaagaggagcactcattggtcggtttcttctatgaagactgcacagcctacggtgatggggggactcatg

SEQ ID NO: 11980 - DNA, 556 bp, Glycine max
  Clone ID: jC-gmle01810059f01d1
gatacaataatggaatatattatgttcttgtactttgcaggaagctgcaaatatattaaatgatgagaatgcgcgcttgctttgcccttcaatgactataaaagtaccccaaaagtagcacaagtgtagatttgcttgaaattcttgaaatgacaaaaagttcaaggctctctcatccctatattaggaccaaaagaatctttttgtgttttttctttaacaatgtgtcatcagcatgcacaagcttatgcaatccgttgaaggttatatgccaccatatcttcaagggctaaacgaaatacactctgaggtaggcattggagactttgaattgcaagatcggctttctcttttgctaactcttgtgctctttcaatgcccccacaactcttgaccaaattgatggcttcctcaagggaaccaacctcactgaattcagactcgatgatatccctcaatttcggttctttctccagtgcgaaaattactggtgcagtcaggttgcccttggcaaggtcactgccagcaggctttcccagttgctcggctgatgagt

SEQ ID NO: 11981 - DNA, 570 bp, Glycine max
  Clone ID: jC-gmle01810059f03a1
ttgcactccaattggaaaaaagaagtgaacttgcgatctgggtatccaattttcgaactctttcgatggggaatgatgcagggtcaccgcagggtccggttacgtgtgggtcgtggattcggaggcccgagaatttgaatttggtggtgttgggaaggttcagacgtggcagttcttgtccttctctcttagagattttctccttcgatcccaaaaccacttctttgtctacctctcctctgaccacttatgtgttggaagcagaggaaggtgatcctgttgccattacagttcacccaagtggggatgattttgtgtgcgctctcagcaatggtagctgcaaattgtttgagctgtatggtcgtgaaacaaacatgaagttgttggctaaggaactggctcctctacagggtattggtcctcagaaatgtatttcttttagtggtgatgggtctaaatttgctgctggcggaatggatggacatcttagaatcatggagtggcctagtatgcgtgtgattttagatgaacctagaacacacaattcagttcaagatatggatttagtct

SEQ ID NO: 11982 - DNA, 587 bp, Glycine max
  Clone ID: jC-gmle01810059f03d1
aacttgtaaatttaaggaagctatttgattattcctaaagtttctattaaaattacatatcaataaggcctttaggttcataattttcaccccacaaaaatagaagtaaatgcttgtaatagtgcctaactctataagggcttaaataaatgttgataccagtaataaaaaaaataaaaataaatgttgataccagttacagcttccaaaacagcactgaagactaaaatcaagaacgtctgtgtgatcacatatctactggcccccaaatattttgatcatcataagactggggatcttttaacacaggtttaaaccttggtcttgctggttggtctttgcccatgggaaagttccagaatgaatcagagttctcaaagaatatgtaaaatgcaacagctgatgctaaaaatagtcccaatagcaccaaatagatctgccattctttccaatctttaggtacagtcagcttagtgaccagcgctccccattctactgaggttgtaagtacaaccctttccccgggacagaactcaagcgatgcaatatttgtacccaggtgcagtctcttgctataatggatatct

SEQ ID NO: 11983 - DNA, 533 bp, Glycine max
  unsure at all n locations
  Clone ID: jC-gmle01810059f04a1
gccccataccatactcattaaagtccacacacacagagcaacactgcactgtgtggaaacgaaacatggcaagagtggtggcactccaacagaaccaactatctttctctaccttagcttcctctctttctgacttcagtggaaccagacttcaaactcaacttcagttcaagagaaagcaatgccatccaaaagggtctttctacgtctccgcatcgagcaccaagaaaatcctaataatgggaggcaccaggtttattggtgtgtttttgtctaggctccttgtcaaagagggtcaccaggtgactttattcacaagaggtaaagcgcctgtcactcaacagttgccaggtgaatcagacagtgattatgctgatttttcttccaagatcttgcatttgaaaggagacaggaaggacttcgactttgtaaaatccagtctctcagcagagggatttgatgttgtttatgacataaatggacgcgaggcagatgaagntgaacccatactggatgctctgcctaatctggag

SEQ ID NO: 11984 - DNA, 545 bp, Glycine max
  unsure at all n locations
  Clone ID: jC-gmle01810059f04d1
gaacgaaaagctcatgaatatttcacgacttcataatgtagcaaatccgaacagcttttctaaatacaagtgaaatacttaaaattgaaatagaaaagtttatacgctaacaagactcttgccaagaattatgtcatctgttgagaaatcagcctctttccgatatgttcctctaccaaagtccaggttgtacgagtctgctagaccctctacaagtccaaattcaggttccaatccaagcacgctctttgctttctcaactgatgcaaagaaatgctggtcacggaatggaaatgatttctttttcccaaaatcaaaatctttagggttgtagtgaatgatctctggctctgggaacccaccagccttagcacatgctcttgctaatccatcaaatgtgacatacttatctcccgagatgttgaatacttccttgctggccttctcattaccaagaacctggataaaagcttttgccanatccttaacatgaccaagttgggttatctggtattcctgagccggggatagggaatgggcgtccc

SEQ ID NO: 11985 - DNA, 516 bp, Glycine max
  Clone ID: jC-gmle01810059f05a1
gcagaaagcaagctcatcctagagttttaaaaatggcagcagcctcctccatggctctctcttccccatccttggctggcaaggccgtgaagctgggcccatcagcccccgaagtcgggagggtcagcatgaggaagaccgtcaccaagcaggccttctccggaagcccatggtacggcccagaccgcgtcaagtacttgggcccattctctggcgagcccccgtcctacctcactggcgagttcccaggtgactacggctgggacactgctgggctttcggccgacccagaaaccttcgccagaaaccgtgagctcgaagtgatccactccaggtgggccatgctcggggccttgggctgcgtcttccccgaactgttgtcccgcaacggggtcaagtttggagaagctgtgtggttcaaggccgggtcccagatcttcagcgagggtgggctggactacttgggcaacccaagccttgtccacgcccagagcatcctcgccatctgggccaccc

SEQ ID NO: 11986 - DNA, 380 bp, Glycine max
  Clone ID: jC-gmle01810059f05d1
gggaaaaagcaagtaacattaagttggattgggatacccaagaaaattcacattttctgaagtacattgcaataacatatacttcaccaaacacaaatttaaaaacttttaaaaggccacaaggcatccttttctttcatgcccacttgccggggacaaaattggtggcgtaggcccaggcattgttgttgactgggtccccaaggggatcaacaaggttttccaatggacccttaccggggacaatggcctgaacaaagaacccaaacattgagaacatggccaatctcccggtcttgagttccttcaccttaagctcaacaaaagcctttgggtcatcagcaaggcccaatgggtcaaaactgcccccagggtaaatt

SEQ ID NO: 11987 - DNA, 465 bp, Glycine max
  Clone ID: jC-gmle01810059f06a1
catttcccatataagactcataaccgttcgttcgttcgttcgttccccacttgcttttcattttttttctcccttttcgctaacctcaaagagagttcagtttttatacaaataaaagttttttctttttttatttctggttttcgttttggaatggctgggatttgctgtggagttgttggagaagccgccgagacttcttctaccatcgaacccacctcacgccctttcgcacgccggagtttggaccttttgcccttgaaatacatagctgctgacgtgtcagtcccgccgctggagaacagccggaagcgccagaggctggataggcgcgcttctccggcaagggagtgcgataacgcggttcatagttccaaatcgaaagtagttgaggttgttccgaattattcttcgaagagtccaacgttggactccacaagtccaacagttgtcgaggagtatccg

SEQ ID NO: 11988 - DNA, 455 bp, Glycine max
  Clone ID: jC-gmle01810059f06d1
aaggcaaaccaaacaacaaaattggcgcgtttatagatccaagctgggtttcaattacaattatttatctaattacaacaaaaacaacggtgtttcaggaggctgatttacctcttggttgacacactaattgttttcactactcttaaaatttcccataatttgttgataatttttctgacaattacaaatttcacacacccccgttgattaaaatacctatctacaagtactattttaattacaatcacaagaaatcagtaaagcaccacgcaacaccctgcattttcttcccctttcttttgtcaaaaacaaaattccacaacatcgggtgtccacgcacagttcccattttaggttctcctcaaatcaaccaccaccacgctcacattgtcggaactctgcctaaccaacgccaatttggtcagcaaaatggaggcgttggagcaagcctt

SEQ ID NO: 11989 - DNA, 338 bp, Glycine max
  Clone ID: jC-gmle01810059f07a1
tagggttccaattgctaggcttgcagcagctcaagttgcagtttaagaggcagttaccaatgaatggcatgtgagaggattattgactctcgacaaccgtaaataactctggttcatcataagcccgtatacatcagaaatggaactcataacatataattgtaaaagtgaaagcaaaggaaaattaatttgcaaatgtttgttaataaaaaagagaaaacatggtgtacatgcaaatgtttctcttataccgtgtcttgtcataaaataagacagattcttgtacatgttgtattttatcacaataaaatctttaaaagatagaagattcttgtacg

SEQ ID NO: 11990 - DNA, 338 bp, Glycine max
  Clone ID: jC-gmle01810059f07d1
cgtacaagaatcttctatcttttaaagattttattgtgataaaatacaacatgtacaagaatctgtcttattttatgacgagacacggtataagagaaacatttgcatgtacaccatgttttctcttttttattaacaaacatttgcaaattaattttcctttgctttcacttttacaattatatgttatgagttccatttctgatgtatacgggcttatgatgaaccagagttatttacggttgtcgagagtcaataatcctctcacatgccattcattggtaactgcctcttaaactgcaacttgagctgctgcaagcctagctattggaacccta

SEQ ID NO: 11991 - DNA, 493 bp, Glycine max
  unsure at all n locations
  Clone ID: jC-gmle01810059f08a1
ctcgagcgttttgctttgccacccttcagccagaacactgtttaagttcatgtcatgttggccaacttcggattccaacttttgtttccttgtacttcactgtttactaggttaattaatctcacttcctagaattttcatttttcaacaacttttagtccaagagaataagcatatattctgttagtggtgtgtgctttcactttttgcttttatgacgggtctgataggcatcttttcactgctgttttgcaactagaattgaacaaagtggtagtgagtgtcctttgttgtaaaagggtcatctctaaaagtactactactactatgcctccttcacaattccctcttcgttgggagagcacaggagaccgatggtggtatgcatctccaattgattatgctgctgcaaatggcctctatgatctggtcactgagcttctacaccttgacaccaacctnctcattaagctcacttcccttcgtcgaattc

SEQ ID NO: 11992 - DNA, 553 bp, Glycine max
  Clone ID: jC-gmle01810059f08d1
gagcgccgaacatatattatcagtattattaatattaattattattgtttcatattctacatgaacttttgaaacgtgatcaaccaaactttttcgaagctcctatttaacatttatgcaactaaagaactaaaatgcttagaactgcaatttgacattgtgcagctatttgcatcttccaaagcctggccatgtgctccaaaagaaaagtaccggttcatcaatctcctattgaaagtgccctgcttaaagttcaactgtagggtgccacccccatccattggtcgattggagcaagagggtcccattatatcaacacgtttttgcttattattcgtagaattagaagagatagatagtttttgaaaaagattagatgttgaatgaacaggtagaggcacttgtggctttaccttaatcacgccttgcgttagacctgcatgaaaatattttttggctgtaggacttggaagataagtccttatagatagtgttcttttgttgtttggaagagaacacatttttgagtatctttgcctcaatggaattggaa

SEQ ID NO: 11993 - DNA, 533 bp, Glycine max
  unsure at all n locations
  Clone ID: jC-gmle01810059f09a1
ggaaggtattgacgaaatttgcaatattattcatgataatggaggccaagtatatatggatggtgccaacatgaatgctcaggtgggactcacaagcccgggttggataggagcagatgtttgccatctcaatctccacaagacattttgcatccctcatggaggaggtggccctggcatgggacctattggtgtaaagaaacacttggcaccatttttaccttcacaccctgtgatagaaactggtggaattcctgcccctgacaaacctcaaccacttggtaccatcgctgctgcaccatggggctcagcactcatattgccaatctcttacacttacatagccatgatgggttctaaaggactcaccgatgcatcaaagatagccattttgaatgcaaactacatggcaaaacgattggagaattattacccggttcttttccgtggagtcaatggaacagttgctcatgaattcatcattgacttgagaggctntaagaatactgctggaattgagcctgaagatgttg

SEQ ID NO: 11994 - DNA, 222 bp, Glycine max
  Clone ID: jC-gmle01810059f09d1
gggaagaaacttaagggccgggggttatcatcattggcccatatgatgaagcaatattcaacaagggcaagaactgtatgaataggaataagagtttatgtccaacgggaaatgaaaatagttgtcatttgaacacattatgctggggcagctgtttgttcttcaacaacctgtgatgctgggagaagggtgcaaatgaggttgcggtcacccgacacatta

SEQ ID NO: 11995 - DNA, 551 bp, Glycine max
  Clone ID: jC-gmle01810059f10a1
aagaaattgattatataaatgaaggaaagaatgctgacagattccgccgagattttagaaacataaagtgggttcggatacctctggtatattgggattatactgctttaaaggtgttgaccatggagtatgtaccaggcatcaaaatagaccaggtggatacattaacttcgcgtggttatgatcgattgcgtatctcatcacgtgctacggaggcgtacctgattcagatattgaaaacaggtttctttcatgccgatcctcatcctggaaatcttgctattgatgtggacgaagcaattatttattatgactttggcatgatgggacagatcaaatcttttacccgggagagactgcttgaacttttctatgccatatatgaaaaggattccaaaaaggttatgcaacgccttatagatctcggagccctacaacctactggggacttgtcatcagtgaggagatctgtgcagtttttcctggaccattttgctagccaagcaccagatcaagagcagaccctttctgcaattgggaggatttatttg

SEQ ID NO: 11996 - DNA, 498 bp, Glycine max
  Clone ID: jC-gmle01810059f10d1
gttggtaaccatttatatcattttctcaaacttatcaagcatttttaccctttgcatggatctgacaaatagtgtcataaaaatacctgcaccaatgaaagatccattcgcaatagttatgttgccttggctgctcatagtgataccaagatttagcagagttcctcctaatacggtatacatagttgccatttgtaaacccgttgctttccgagcagctctttcagactcaagcactcggacccgaagttttagatcccctgcctcaagttgctttgtaaactcttctattctttgaactctgtatggcattgacatggtataggttgtagcatcatctgcttgctttcttatctcctccacaagctgtggtgcagtgcgctgcttttgccttatctctaaaagctcctgtgcgtagggtgcagcaatcttagaaaaggagaaatttggattcagtgtgtaacctatgccttcaagtgttgaaaacgccctgagaac

SEQ ID NO: 11997 - DNA, 517 bp, Glycine max
  Clone ID: jC-gmle01810059f11a1
gataaatgagggtcaaagtaagcgcattagatgcatggaacacaagtgcaattccatatgtgatgaagctgttgtaagaactctactcagtagagagcactctcatatggctgagaaatatgaacgctttctgcttgaatcttacattgaagacaataagagagttaaatggtgtcccagcacacctcattgtgggaatgcaatacgggttgaggatgatgaactgtgtgaggtagaatgttcatgtggtgtacaattttgttttagttgtttgtcagaagcacactccccttgttcatgtctgatgtgggagctttgggctaagaagtgtcgagacgaatcagaaactgttaattggataactgttcatacaaaaccatgttcaaagtgtcacaaaccagtggagaagaatggtggctgtaacttggttagctgtatctgtggccaagctttttgttggttgtgtggtggagctaccggccgagagcatacttggtcaagtatagctggtcatagc

SEQ ID NO: 11998 - DNA, 479 bp, Glycine max
  Clone ID: jC-gmle01810059f11d1
agaaaaatcagtgaagttacctccacctataataactccataagataggaataaaagcaccctagaagttgtcctcaagggagccatttacataaaactactagcaaataaatgccaaggtatctatatacagcgctaggatttcaaacagaaaggtagatggcataggaataagaaactttggaaacatatcttatctcagcagagacatatggctaaaagaaagatatgagaaagcaaatggggtgtgaaatccaaaaagaataattccttccttccaaaggcagcaaagcaattttatgttgttagacctgtacgcctgtacgtataataaggggtccttcaaaggcaatttctgtctacaaactctggtggcaagtttagatcaaaaaaaccacctcctccaagaccctcttttctaggacgcttacgagaagagcatccactatcctctgaactccctgatccagatgggcgat

SEQ ID NO: 11999 - DNA, 552 bp, Glycine max
  Clone ID: jC-gmle01810059f12a1
aaaagccttagccttccctacaactccaaacacaaagacatcatcatccatggctgcctccgtctccactgtcggagctgtcaacagagctcttttgaacctgaatggttctggagctggagcttcagctcccagttcagccttctttgggaccagcttgaagaaggttattgcctcaagggtccccaacagcaaggtttccggtggaagcttcaagattgttgctgtagaagagaagaaagagattgaagagacccagcagaccgacaaggacagatggaagggtcttgcctatgatatctcagacgaccaacaagacatcacaagaggaaagggtttggttgactcccttttccaagctccacaggatgctggaactcactatgcagtcatgagctcctacgagtacctcagcactggacttcgccagtacttggacaacataatggatggattctacattgctccagcttttatggacaagcttgttgttcacatctccaagaacttcatgaccctgcccaacatcaaggttcctctcattcttggatc

SEQ ID NO: 12000 - DNA, 524 bp, Glycine max
  Clone ID: jC-gmle01810059f12d1
atgcataacattttcttggtgttatttctttttttggcggggggtcaataattcattcatgaaaatgtccatcgacacttacataagggtacatatgctaaaagaacattacagtgtaacatatgaaaaatgaaagatcacgttaaaagagtgttatcagtgcaacatctgatgggagttatttgataagtggtttgggtgctcatttctttttgggcctaaagtagttactgtatataaggaacaatttgtaatgtttatgatttgggggccgcttgccattcattattgagctctgaacttgacctttctctccaagttcttcagatccttagcacttgaaaatgaagctataagggctagatatgtactaatatttgtacgtcaaacaaaagaaataaattttaaaaaaataaatcaagaatataggacaaaaggaaaaggcaccaaattcaatttaagtggacactgtgactcaaaatttttgaggaagacggtccaatttgaaaaatatagtaagatca

SEQ ID NO: 12001 - DNA, 557 bp, Glycine max
  unsure at all n locations
  Clone ID: jC-gmle01810059g01a1
cttttgaacccaaagagcgggtagctgagatcggagaaccctctctttcttctccttcttcagcagttgaaaataaaaaatggcagatggtgaggatattcaaccactcgtctgcgataatgggacaggaatggtgaaagctggatttgctgggggatgatgctccgagggctgtgtttcccagcattgttggtcgtccccgtcacacgggagtgatggttggcatgggccaaaaagatgcatatgttggggatgaagctcagtccaagagaggtatattaactctcaaatatcccattgagcatggtattgtgagtaactgggatgacatggagaagatctggcatcacaccttctacaatgaactccgtgtcgctcctgaggagcacccagttctgctaaccgaagcacctctcaacccaaaggctaatcgtgagaaaatgacccatattatgtntgagaccttcaatacccctgcaatgtatgttgccatccaggctgttctatccttagatgccagtggccgcacaactggtatcgttctagactctggagat

SEQ ID NO: 12002 - DNA, 568 bp, Glycine max
  Clone ID: jC-gmle01810059g01d1
atagtcataactaaagaagatctgttgaacaattgccaataatagaacaaaaacaaatgaaagaatttactgtcatcaattcagtcaactgatttaacaacacatttttatcatataaaacgaggacaccgtattttctttcaccaagccaccttgcaacattcagaagcatttcctgtgtacaattgaaggaccagcctcatcatactcagcctttgcaatccacatctgttggaaagtgctgagagaagccaagatagagccaccaatccagacactgtactttctctcaggtggagcaaccaccttaatcttcatgctgcttggggccaaagctgagatttccttgctcattctgtcagcgatacctgggaacatggtagatccaccactgagaacaatgtttccatacaagtccttcctaatgtcgacatcacacttcatgattgaattgtaagtggtctcatgaatgccagaagcttccattccgatcatggatggttggaagagaacttcaggacatctgaaacgctcagcaccaatggtgatgacctgtccatccggcaac

SEQ ID NO: 12003 - DNA, 407 bp, Glycine max
  Clone ID: jC-gmle01810059g02a1
aaaaaaaaaaaaaaaaaaaaaaagaattaaaaaagaaaaaaaaaaaaaaatattaaaaaaatgaaaccaatgaaaaaacaagccggtgccggaatggatgctccattcactggcctcaagtccatggctggcttccccaccagaaagaccatcaatgacttttccttcattgcttggcttcggtggaagagtgctatgcatgcaggtgtggccaccagttgacaagaagaagtttgtgactctttcctacctgccagaccttgatgatgcacaattggctaaggaagccgaataccttcttaggaagggatggattccttgcttggaattccagttggagcacggcttcttgtaccgtgagcacatcgggtcaccatgatactactatggacgctactggtccttgt

SEQ ID NO: 12004 - DNA, 167 bp, Glycine max
  Clone ID: jC-gmle01810059g02d1
attcttctacaagacttcttgccaataaaaatgcccccctgctgagaaatcagccccttcccgatatggtcccctaccaaagaacaggtggggcgaggcttgcaaacccctggcggggccaaatacaggttccaacccaagcacgctctttgctttatcaactgaag

SEQ ID NO: 12005 - DNA, 477 bp, Glycine max
  Clone ID: jC-gmle01810059g03d1
ggggaaaaaatatgcttcagcactggcgctttaacacaaagcatcatactccacaaaggctttttagtacccccaatacatcatgtcatgcgtgtgaaactttacatccgtgaaatcaagaacttgaaagatcaaaatccttctacttaaactatagacagaatgcccctacatgaaagcccagaaaaatagaagaccaacttgaagtagctgtaacacccaacactaaggtttacaaagcgagaaacaatttttccactcatacagcacataaatgtaacactagatgaatcctcatgcgagagcacccacaatcctgattgttcttcagggataggaccggtcagcaagatatgaacaattttttggaaagatttatactttatttttctctttctggctttgctgcatacaaacctgtacataatgagcacaatcgtaagctattgagcacttggtgcatctctcatgcttaaa

SEQ ID NO: 12006 - DNA, 540 bp, Glycine max
  Clone ID: jC-gmle01810059g04a1
gtgagagctagctccacagagaaggatgaatccaaggacaaagatgcttcagcattcaacccttttgggtttgtcactgacaacccttctagccgaaatgccattcaactgcctgaaaaccctgctgaggatggcaacgttggccaaatgctttataggatagaagacaagggcaaggaatatgggtcatatgttaaatctggcaagttaagatggtttgtgagagaaactgggtcagcaaatggcagaagaggaacaattgtcttccttcatggggccccaacgcaatcttttagctaccgagttgttatgtctcagttgtcggatgccgggttccactgctttgcaccagactggataggatttggtttcagtgacaaaccacaaccaggatatggttttaattacacagaaaaggagttccatgatgcattggataagctgcttgaggtgctgggggtcaaatcttcttttttcctagatggtcaaggatttcttgtaagctcatatggactaacttgggccctgaagaactcaagc

SEQ ID NO: 12007 - DNA, 444 bp, Glycine max
  Clone ID: jC-gmle01810059g04d1
attaggaaagggaggacaaattcatttcaagaaagctataattttatttgttgaccatcattaaaagaaaagaaaaattaaggcatactaaatttacaatttaattaaggaaaaactcaagaatgcccttccaatgaaataaagcacttggatgcctgcagggtcaattagttgttgaaatcagaagaacattctgaaagcatcaacaactttctcaggccagtcctcttgtggcatatgaccagctccttctatcaatttaagctggatttgtgctggatttcctttctgaaactgctctgccacagactggggcaagtacttgtctgataatccccaagcaagtagtattggtttatcccatctctcagttgtaaatcctgctgatatttcactgaaagtacctttgaagttagcttttcttgcagcttcaagtagagcaaa

SEQ ID NO: 12008 - DNA, 456 bp, Glycine max
  unsure at all n locations
  Clone ID: jC-gmle01810059g05a1
tttccttgttcttcttccttctcttcattctgtctctacccttcaacgcaactttctttcttttctattgagcttccaatattctcacgccttgcaatcgtagttgcaccctccaaactccttcccttttctttcatctgttcaggtacttgcagaaagagaacatatggtaaaactaagagggaaaaatggccttagatcactttgaggagactgtgcaccaaaaaggaaattggaaatcttccagtgaaatcattgcagattctgatagaaatgcctctggtgactttgactgcaacatctgcctggagtgtgtgcaagatccagtggtgacactntgtggtcatctttattgctggccctgcatatacaaatggcttcattttcaaagcacctctttggatgatgaagaacaacagaggccacaatgtcctgtatgcaaatcagaagtttctc

SEQ ID NO: 12009 - DNA, 509 bp, Glycine max
  Clone ID: jC-gmle01810059g05d1
ctaaaaatggtatgagaatatcattattcacttcatatagctcgtagagagattggtaatttacacataactcagcatcaatttgcagcttctctaacatagaatacatctggatcaatgagtgaatgtattctatgtaaggatgcactataactaatgatgaaaatgaagtagcaatcagaataagagcagacacaaaactaggcagcaaaggaggaaacaacttattctgctgagtgatttatcaacttgcattaaatgtcttctcatccttgggttactggtccccgaaagattgtacgaattggcgtatgtatgaatgtttgacacgtggttaccaaagacccttgcatatatcatctcaccaaagattccaaatgtgttgtctattgaaccagttgttctaatcataggtgaggtgtaaccgcttggaatcgagttgaagtgttgttgaggatgataaggattactatagggatggtaactttgagaaataggttgtgaaacac

SEQ ID NO: 12010 - DNA, 504 bp, Glycine max
  Clone ID: jC-gmle01810059g06a1
aaaccccaaacttttgttcttcctctctttgcaatctctatacagaagatttatggataacaggtgcaaatctggttcactgcaacactgttccgtcgcaaatttcttccaccgacaagtgcttgacttcgtggttccgtcgctttttcaacccttcgatagattcattccttggttacgctttctatctcccaaataacattcaagctaccctctttgtactgttattttcttctgaaaaaaaagggcttacagttattgactaggacttttagcaagcaaactctccagattgtggctttctgagttctaaatctgcacgagtcttcagacagagagattgcaaagtgatttgagaccaaattatggtgtaaggaccaagatggccgcttcagcccattcttctcttaagatgatgtcatgggctaaaggtcaatcctttggttggacagcttttgatctcaagcagagaaagaataaggattttgaatctgaagttgacga

SEQ ID NO: 12011 - DNA, 498 bp, Glycine max
  Clone ID: jC-gmle01810059g06d1
gaaataaataattccatctgaattaattttcaatgccaaggcaaatgttttattttacatcaacagggagaccaatatatgtggaattaaatctcaccactgctaaatactcataaagtatatgatccctatgaaatggtacaatacaagaacaagtttctaacggggactcaaaaatcagttttgacgaaacttgggccacactgtaattactcctggtctcatctcctcaaaacggtacctgttttcattgaggaaacttctgacagctgcaggaagagccgccagtcctcgactgtgattaccgatgcctgttatgacatgtaaagctaacggtctaagccgtaatggtgcttgtgtatccaatttttccctgtccatgaaattgaaagatccaagagtagaatgtccaagcccattttccttcactccatttgaagtggctgaactctttgagaagccttggcattcaattctgtagagatgttcttgcaatgc

SEQ ID NO: 12012 - DNA, 489 bp, Glycine max
  Clone ID: jC-gmle01810059g07a1
gagggaagcactcctccaattcaaggctgcacttctggatccctatggcatgctctcttcttggaccacttctgattgctgccaatggcaagggattcgctgcaccaacctcaccgcccatgttctaatgctcgaccttcacggtttgaatcgctctggagacatgcttatttcaagttcataagcaatttctcagatgctatttatgtcatggcagccgtgaaagttttcaagttgcatcacagaggatagctgaaaaattctgaattgtaggtgccagcttgctgaggtggaaaatgcaaagagacacttttaatttggaggagagaaggcatctctcacagttggatttggagaccgagagagaattaaggatggcttctagagctttagggagccaattgtgattgcgatccatcctagctattttcctttttaatttctaaacattttgtttgtagttaggcatgtcaatctagactggttgtt

SEQ ID NO: 12013 - DNA, 423 bp, Glycine max
  Clone ID: jC-gmle01810059g07d1
aaaaaaaggtgcggccttgtattcaaattgggtttaaaaaaaacaacttattcattctttatatgggatcaggctaagcttattcgggaccttgaaggctccatcattggcagaacaccttgacctcttttgatgagggattcgttaaattgcagaactatgagatgtatctcaagcgtgatgagcacttcaatcaccactcctccatcagggccaactttgccaatcaccggtgttaacaccactctgccagagggtgcaattagcattacccatttggcaagcatcggagctcttcatactccaaacatttttgcccaagtttaagatcaggttttgctgcggggattcacattcaattccttgggaaagaatccttttaatctcatataacgtaattccttaaattaaatcctgagacta

SEQ ID NO: 12014 - DNA, 527 bp, Glycine max
  Clone ID: jC-gmle01810059g08a1
attcctttgcccaaatgggttgtggaggagattgataatgaccacgatcttgcatatactgatcaatggggaagaagaaactatgaatatatatcacttggatgtgatactttgccggtgctcaagggacgatccccagttcaatgttatgctgatttcatgcgtgctttcagagacactttcaagcacctccttggtgataccattgtggaaatccaagttgggatgggaccagcaggtgagttgcgttacccttcgtacccagagcaaaatgggacatggaaattcccaggaattggtgctttccaatgctatgacaagtatatgttgagtagcttaaaagctgctgctgaagctcacggtaagcctgaatggggaagcacaggccctactgatgctggccactataacaactggccagaagacactcaatttttccgcatagaaggtggtggatgggatggtccatatggtgagtttttcctcacttggtactctcagatgctgttggaacatagtgacaggat

SEQ ID NO: 12015 - DNA, 280 bp, Glycine max
  Clone ID: jC-gmle01810059g08d1
attaaaaaaatttaaaaataaagaaaaaaaaaaaaaaggaagggaacaaaaaaaatataagagatggagtccacacgaggggggggggcaaaagttggaaaaaacaaaagaaaaaggccaaacaaaaggaaaaaaagggagggaaaaaaaacccccaacaggggggaaaagcccaaaaaaaagggggggaaagaaaaaaggagggggggggggccacaaaaaaaaaaaaaaaaaaaaaaatattttacaccaaaaaaacaaagagggggggggggggaaa

SEQ ID NO: 12016 - DNA, 477 bp, Glycine max
  Clone ID: jC-gmle01810059g09a1
tgaatttccatattctctttctgaacttcttctccttgttgttgtgcgtctctctctctctctctctctgatgttctttttccatggagtcggcgacgattgctggcttccctcgtcaaaccctaattcgggcgtgaaaggcgtgcgaggcaacctcatcggtggagaatggagattgtgaccggagatcggtacctggagaagctggcgcagttcgtggagaaccaggcgggtcctctgatcgaaggagccttggtgtcgaagctaaatccggcgggtctccactacgtgcaatcccggctggaggcgctgcacgagctcgaaagcctccttgccggcgctccggtggactacctccgagcctacgtgtcggacctcggcgaccaccgctccctggagcagctactgcggatcctgcgcctcctcacatcgctgaaaatcggatcggttctgcctcataccatcagggaccccacg

SEQ ID NO: 12017 - DNA, 451 bp, Glycine max
  Clone ID: jC-gmle01810059g09d1
ctattctccaacaaaccagtgttctggttagcacaaaatgcactctcagcattgtcagcaccagcagcaaaatcaattgaatgctgcttacaagttgggtcacaggtagaactcgataaagaatttccattttctcttgcatgaagaattccttgccttgggttgtaaaacttttccttgagctgattttgagataaatgaccatcaacacttccattcatataatatttgcatgggaaattatcaactttaggcactgacaactcaaattcactgcaatcaacatcactacagcttgtgttactatcaaaagataccactgaaaaggaatctgccgacagctgcaaaatttcctccaccaagtgttgccggcgatgaagaaggtcttcttgaaaatgaagaggagacgtggggcaagcagatgatgactgagacccaaatatatcatgaa

SEQ ID NO: 12018 - DNA, 467 bp, Glycine max
  Clone ID: jC-gmle01810059g10a1
gtttcacggaagagcaagacgctctggtggtgaaatcatggaacgaaatgaagaagaattctcaagaactcggtctaaattctttcaagaaaatatcggagattgctccagcagctcatcaatcgtcctcattcttgatggattcaactgttcctttggaggaaaaccccacgctcaaaccccatgccatggctgtctttgtcatgacgtgtgaatcagctgttcaactgatgacagctgctaaagtcactgcgagggaatcaaacttgaaaagattatgtgctactcattttaaagccggtgtaacggctgagcctttcgaggtgacaacgttcgcactattggcgaccataacagaagctgtgcctgccatgcggtcaccatccatgaatactgcgtgggaagaagctcatgatccgctgggcgaagccatcaaatccgaactgaagccctctgattagactcta

SEQ ID NO: 12019 - DNA, 512 bp, Glycine max
  Clone ID: jC-gmle01810059g10d1
gtaacaattcataccatccatgcatttatcattttcccttaccttacaattcacatcaccttcaataactgaattgttaaaatgtgaacactttccgacatagcaaccccaatagcaacatagatacattattaaaattcatacaaacgagaagcacagacccaaacaccaccaccctatcaatcttattcaatttgagagaaagcaactactagagtctaatcagagggcttcatttcagatttgatggcttcggccagctgatcatgagcttcttcccatgcattcttcatggctggtgaccacatttcaggcactgcttcttttatggtctccaatagtgccaactttgttacctcgaaatgctcagctgctacaccggctttaaaatgagtagcacctaatcttttcaagtttgattccctcacagtgactttaccagctttcctcagttgaacagctgattcacacgtcatgacaaagacagccatggcatggggtttgagcttggg

SEQ ID NO: 12020 - DNA, 608 bp, Glycine max
  unsure at all n locations
  Clone ID: jC-gmle01810059g11a1
ggaaagagcggattcctctatccaaacaacttgcttaatgtgaaagcaaacacaaagggctgggttagtactgaaaagttgaaacagagaaacaaggtcaacgattcactcaatgagcagaatcaaggtcctagaacagctaatgcaaaaggtgcattaatgtctggaggtaattctgtgagaggctcagccccaggtgggagtggaaatgttaccaacaaaatcaggacagatcagtacaaccttcctgattttccaaccaaatatgatcatgcacttttctttgtcatcaaatcttacagtgaagatgatatccacaagagcatcaagtacaacgtgtgggcgagtactcctaatgggaataagaggctggatggtgcatttcaggatgcacagaagagaatggaagagaaaggatgcaagtgccctgtgttccttttcttttcggtcaatgctagtggtcaattntgcggagtagctgagatgactggacgagttgatttcaacaaaagtatggatttcctgcaacaagataagtggatggatatttctctgtcaatgcacattataaggatgttcaaatctcaactcgcccatatactcgagat

SEQ ID NO: 12021 - DNA, 528 bp, Glycine max
  unsure at all n locations
  Clone ID: jC-gmle01810059g11d1
ctaaagcatcaacagcagcaagaatttttggtttagaacttaaaatttgaattcattagcttttttttttcttactttgtggtccacgtggcacatcgccacaccatcgtgatcggcatgctggcatggcgggtccccaggaatagcatcagccccacatgctattcagtcattcactctctcaaccaccttaggatcctccatgttcttcacagatgataggtctactgacccaagtgtagtggttaattcctctatttgctgtacactggtatggggcatagattgccttgttttcttctcctgcaataccttctggcggctttcgtaaaattcaaagtcatccaatatggaagttcttgccacataattcttgaaaatgttaagcatttcaacaccttggggaaaactcacctcttgtgtgtctctactatttgngacaggcttgtgatcattattctcgagtattatgtggcgtagttgaggatttggaacatcctttataatgtgccatttgacagagaaata

SEQ ID NO: 12022 - DNA, 429 bp, Glycine max
  Clone ID: jC-gmle01810059g12a1
ggcaaagcaaacttggcaagtaaatatttctgttcctgaaggttgtgctgatccaagtgctagaagttgtgatgggacttgcgtgtaacattcttagaattctcaatgtcttaggtgcaaagagaagatgccaagtttgagatgattttactatatttttcatattggactgtcttcctctataattttgagttaaagtgtccacttaaattgaatttggtgccttttccttttgtcctaaaaaaaaaaaaaaaaaaaaaaaaaaataaaaaacaaaaaaaaaaacaaaaaaaataaaaaacatattaaaaagaaaaaagaaaaaaaaaatgtacaaaaaaaaaagggggggccccccactttgggcctcttcaccccgggatttttttccggaccgtgccctgggggcgtcccacttttccattttgg

SEQ ID NO: 12023 - DNA, 411 bp, Glycine max
  Clone ID: jC-gmle01810059g12d1
tttttttttttttttttttttttttttttttttttttttttttttttttttttttggtgttttttttttttttttttttttttttttttttttttttttttttttcgggcaaaaaggaaaaggcccccaattcaatttaagggggcccttttccccaaaatttttgggggagacccccccatttaaaaaaattagaaaaaattttttaaattgggcgttttttttttgcccccaaaaaattggaaaatttaaaaagggtccccccaaggccccaaaaaattttttaacctggggaaaaccacccctttaggaaaaaaaaatttttcttccccaatttgtttttcccctcgcccaaatttccaattttcctccccggggatgggaaaaaaatttttttttttaggggccccc

SEQ ID NO: 12024 - DNA, 570 bp, Glycine max
  unsure at all n locations
  Clone ID: jC-gmle01810059h01a1
ggctgagtagaaaattgcaatccctgggtttggaaatggcagcggcaggttgtcagaagcttctggaattgagcacgaagatcgtcgctgttggcagaaactacgctgctcatgccaaagaactaggcaacgccgttcccaaggagccggtggtgtttctgaaaccgacgtcgtcttacttgagtaacggcggaaccattcaaatcccacacaacgagggctctctgcatcacgaggttgagctcgctgtggtcatctccaagaaagcccgtgacgtctccgaatcctctgccatggattacgtcgccggttatgcactggctctggatatgactgctagggaccttcaagctgctgctaagtctgcaggtcttccatggagtttggcaaaaggccaggacactttcacccctattagctctattttgccaaagactacagtgccgaatcccgatgatctagaattatggttaaaggttgacgaggaaattcggcanaagggctcaaccaaagacatgatatttaagatcccatttctgattagctacgtaagctctgtcatgacattgg

SEQ ID NO: 12025 - DNA, 549 bp, Glycine max
  Clone ID: jC-gmle01810059h01d1
gctccatcataatcatcactttctacagtataaaaaagcacatccaccataaatagcacgctcagttcccatcatcgtaaacattttcatgacgaaagtctaaaatagcactccaccaagatgtatggtactgattcaatgaccattaaaaaaaaactgttaaatatcgtatagactctgaagtccatataactgaatttttattgtgtccacaagtttccttttggcaagatatttgatgtataactgaagtaccctcgaggagttatcaagaaagaacaggccttgctcttttttcaacattaaactgtacgtccacaaggcctgtaataccagcagtaattgtttgaccctctttcacagggccaacacccgggggagtaccagttagtatgacatctccttcaaacaatgtcatgacagagcttacgtagctaatcagaaatgggatcttaaatatcatgtccttggttgagcccttttgccgaatttcctcgtcaacctttaaccataattctagatcatcgggattcggcactgtagtctttg

SEQ ID NO: 12026 - DNA, 548 bp, Glycine max
  unsure at all n locations
  Clone ID: jC-gmle01810059h02a1
ctttggagctgcgatcctctgcttcgatggccaccgtgcaactccaatccctaacccttgttcgctcctcagcacttccttccgccaccttctcccctccgatcgccgtctccggccgccgcaactccgccgcgctgccgcgctactccggcctccggctccgacccgncgctgagaccaggttcccgactcacgccagctcgagaaccgcttctcgcggcggaggtgtcaagtgcgaggcaggagacaccgctgttgaagttgctcccgttactgatgcaaattggcaatcacttgtgattgaatccgagtctcctgtactggttgaattctgggctccatggtgaggtccctgccgtatgatccacccgataattgacgagctggcaaaagaatatactggtaagctaaagtgctacaaactcaatactgatgagagcccttcaactgctactaagtacgggatacgaagtatcccaactgtcattattgtcaagaatggtgagaagatagatacagttataggagctgtgcccaagacaacattg

SEQ ID NO: 12027 - DNA, 454 bp, Glycine max
  Clone ID: jC-gmle01810059h02d1
aaaaaggggcttaaaaaaaggccaaatttcccccaaaattgggcaactaaaaaaaaggttaaaaaggaaaaaaaaaatggggggcccccaaaactttccgggcccataagggggttttaaaaaaaaaaaaaccccaacctgggaattttgggcttaaggggggggggggcccccaaaaaaaattgtttttcttccaggggaggcctttgtttaccccccaaaaaaaatttttaaaggggggggggcaagggggtttggggcccccccccaaaaaggggtttttttttttccccttttttaaaaaaaaagacgggggggaaacttccaaccccccccttaaaagcggggggggggcccccaaaaaagtgggggtggggcacctttagcaacccaggtttttttttggccggcccccaaattatggggggggtaattggggggggccccccccggg

SEQ ID NO: 12028 - DNA, 147 bp, Glycine max
  Clone ID: jC-gmle01810059h03a1
ggctttccaacattatgggaacctactttcccacttcgtcataaacatggctcatgctacagagatttctaagtggcctgcgcactcaagagagagcctgcttcggctattgaggagtgctaacctgcttacatgatgctaacccac

SEQ ID NO: 12029 - DNA, 265 bp, Glycine max
  Clone ID: jC-gmle01810059h03d1
ccatatacccaggtcttatttttttttatcctattcacgtcacacgctgtttggtgtacattaattgacccctattcttcagtgaataaatgaaaatcactcggccggctctctctgctaggtgccataacctttcgataacagccattgacagagggcatacttaaagtgggataggcccataaacccctctggacagaatgatgaaggtcattgaaaccaaaggtccaacagtcgctgaaatgccgacaaaaagggccatgga

SEQ ID NO: 12030 - DNA, 374 bp, Glycine max
  Clone ID: jC-gmle01810059h04a1
gaaaatcatatgatgttggaaaaatttcagccaccaaagggttggggggttggccggaacggtggaactcgatggagccaggagaccttcagctgccattgaaggataggtcctcccttcacccatggccccttcctgaggttgccaaaagggcatagggaatcaccccaagggactggtggcggtcaaaaagtggttgagaaaaaaaggctggccctttggttagaatggacctgcggttaagggcggattattggccctttgaccccaccactgtcttggcgggaaagcctaaggagaaaaaaaattcccttagggaactcacgggcaagcttttccaggatttcagcattcgggtccttgcgcgaaaaatt

SEQ ID NO: 12031 - DNA, 496 bp, Glycine max
  Clone ID: jC-gmle01810059h04d1
atagaaaattttccctcatcatttgattttcttaaaatatcagtcaacaaagtgtctgagaaaatgatgcacaaagcttacacaagaaagcaagaaattaatcacattaaccaagtttggcaaggacatcgttcagagaagatacagtagcagcatagtacttctctgcttctgggctgctcttaatttttgctgcatgatccagattgctgatatcctggaagagcttgccagtgagttccttgagtgatttcttctcatccttaggctttccagcaatgacagtgttgagatcaaagcgcaaatactcagccctgagacgcagatcattctgaacatatggccaagccttcttttcaatcaacttcttaacaccaacaatctccttggctgattcctttgccctttgtgcagcctcagtaggagacaatggttgaaggaagaacctatctttcaatggcagctgaaggtctcttgcttcatctgagttcaacgt

SEQ ID NO: 12032 - DNA, 522 bp, Glycine max
  Clone ID: jC-gmle01810059h05a1
cttgcagctcgtgtcgctacatccggaaaatgcatctatcaagcattgagatgcaaggaacctccttctaacgatcgcttagcagcaatgcaaatactatttgaggtctgcccgtgttttaaatttggatacatcgcggcaaatggtgcaattacttgagcctgttagagatgaaaagaaagttcacataatagactttgacatcagccaaggaactcaatacataactctaatacaaacacttgcttcaatgccaggtaggccacctcatgtgagattaaccggggtggatgatcctgagtctgtgcagcgttccattggtggcataaacatcataagacaaagacttgaaaagctggcagaggaacttggattgccatttgagtttcgagcagtggcgtcagggacctcagatgttacacaatcaatgcttgactgtcgtccggaggaagcacttgtggtgaactttgcatttcagcttcaccacatgcgcgatgaaactgtctcgacagtgaacgagcg

SEQ ID NO: 12033 - DNA, 478 bp, Glycine max
  Clone ID: jC-gmle01810059h05d1
gaaacgcaaaattatatgctaactaacaagaaaatgatgtcattacaagcctaagcattgatagctgttttgtgttgccatacacatgaaagtatgtattagcataagttgcacgttagtatacatctgagtctgaaccaagcataaacataacagatacaaactaaacaagcaaacaaatactacatcaacactacaatgagtctcatgcaacaaaagaatttgtattggtcacttccatgctgaagcaacaattaagtttttgtcttcccacccaaaatgaagaccccccatttcctcctttatcttgaatttgtcacagtattgcttaataatgagtttcctaattgcttctctcacatttgtgctcattggggatggagtgaagccagccattgacaaccttgccctccattttccggcgacttcataccgttctattctttcctcaccctcgcaagcaacaatgttgactatg

SEQ ID NO: 12034 - DNA, 589 bp, Glycine max
  unsure at all n locations
  Clone ID: jC-gmle01810059h06a1
gacgaaaaaataaatctcgaagtaattcgtagagttcaataactattattattttcaattcggaattcttattaattactttaaaccgaataaatcttgataattgaaaaattaagtcataatttattggttgattatatcattaactatttctttatgttatatctaggttacgaggaaattatcatgaatccaattatttctgctgcttctgttattgctgctgggttggccgtagggcttgcttctattggacctggggttggtcaaggcactgctgcagggctagctgtagaagggattgcacgacaaccggaggcagagggaaaaatacgaggtactttattgcttagtttggcttttatggaagctttaacaatttatggactggttagagcattagcacttttatttgctaatccttttgtttaatcctaaaaaaatagaaatacatattcctttttgcgaggacttgctttaccggtcttgctctatcgaatnctatttatattaatagtgcactcctataattctttatccgctcggacaagaacacaggggaaggactatttgaaaggtgaagaattca

SEQ ID NO: 12035 - DNA, 466 bp, Glycine max
  Clone ID: jC-gmle01810059h06d1
cattcgaattcattttatttatatattaatattatattcaaatgaaataaaaagatattaaaagatactaattataagaatttgaaagtgaaattataaagttattaaatgattaatcaatttttttctacctgttcctgtagtaaaaagagttccatctgttcttgaatagcttccttcaaaaggacttctgcttccccagtgaatgtcttggtagaagatatgatttctttgaattgaggtttattcgtgtttaagtaagcacgtaactcaacaagaaatttccttacctgtccaatttctaatgaatcaagataaccattcgttccagtataaatagttattatctgttcttccacggtaagaggagctgattgggattgtttaagcaactcgcgcaatcgttgacctcttgctaattgattttgagtagctttatcgagatcagaagcgaattgggcaaaag

SEQ ID NO: 12036 - DNA, 510 bp, Glycine max
  Clone ID: jC-gmle01810059h07a1
ggatccgagatcgagcaggaggagagggattgcttgtagtgttaccgagccagataacggtggcgacgagatggagaaagaagcagataaaaatggagaaacgctacgtgtggaagattcctctgagcaaagtatccctccacctgtagatgcagaacaactaaatgagtttagtgatgaaaataagggtcaaagtgatgtgcagaatatggatgatagcaatgaagttgccagtggatcacctctgccaggtgtgaagcctcagaaactggatgaagcaataaaaattcccaaggaaacaattgaaattcttaagaaccaagtttttggctttgatacttttttcgtaacaagccaagatccttatgagggtggagtgttgttcaaaggaaacttgcgagggcaagctgctaaaagttatgataaaatatctaagagattgaaagattaatttggagatgaatacaagcttttccttttagtaaatccagaggatgataagccagtggc

SEQ ID NO: 12037 - DNA, 521 bp, Glycine max
  Clone ID: jC-gmle01810059h07d1
cagcctaaaattttgacgtttgattattcaccttgcgtacgaaccaacgttgacagtttgattcactgataatcctacctgtgtactcagttctcaaaatttcatgtactagcagaataaatcgatgctgccagagtatatggagccatttatttctagaaacttgtgatggtttcttctgtaaatgggaaaggatatggcaagcataccaacaagcctaagagtaaaactgttactccaatagcaacatatttctcaccaggatcagttatttcctcagaaagaggagcaattggacctctttgcaagaagaatatgagaactacccaatagaaagctacatcattaagcagtgatgaaactcccagcaatgcaattgaaacccctgtgaagcgtaatgaagcctttcttccccatagggcaaaagaaattctccctccatcaagttctcctgcaggaatgcttgcgatggcattgatgaagagtcctgcccatgccccaatcacaagagggttgataga

SEQ ID NO: 12038 - DNA, 515 bp, Glycine max
  Clone ID: jC-gmle01810059h08a1
aatcaccaagaggcttaaaaaattatgatcttggtggcgttggtcttggaattgtggtggctcttgataaatccaataacgaggttgctgcacgtgaagttttgcccaaacacaccgtttgcacctacaatttgaaccggtccggcccaattccggttcactacaccaaaaacccagatgaatttgatgtcgaggaatacacctatgtgacatgccgcgtacctaacaaaacgttcactaaggtatactatgatggtggagaaggtgatattattcggagacaaaacatcatcatcaacaacaaaaacaacgttgtagttctcagaagaaccgaaccacaacctttgattgagcccgaatcatcgtaccccacatcgagttttctcagttcatgtcacttatgtggaaagaaactccacggctaagacatattcatgtacagaggagagatagcgttttgtagccctgagtgtcgttcgagtcaaataacgatggacgaaaggaaggaacggtgt

SEQ ID NO: 12039 - DNA, 400 bp, Glycine max
  Clone ID: jC-gmle01810059h08d1
aaaacggggcaactgagatctgaaaattcataactttttggctttttgataaaacaaaaaattcattagaatttttacccctttagccgatcaaaacttttggttttgtttcaaatcaagctgtcttgaataatagtatagccgtatattattatgtttgtacgtaggagcatcatcaatccctgggtaattaatttatttccgcccccagagagggaccctaaagcgcaagaatcccagttgaaaatatttgttcccttgtttatggggaacttgacatttccacagaccttgaagcttttgaactacaccgttccttcctttcgtccattgttatttgactcgaacgacactcagggctacaaaacgctttctcttctctggacatgtatatgttttt

SEQ ID NO: 12040 - DNA, 471 bp, Glycine max
  Clone ID: jC-gmle01810059h09a1
caatgaatcattagggtatcttgcatggttcgatgcgaagcctatccataatggagcagtgcctagcttcaactttggttcttgtcctttatattcggctgttattctatagcacttcacctagatctttggatggatacttgatgatctcgtagagtgctttttagatggtcaccatggtcctaaggcttggaatgcaggccaacttgtctacaaatggctgtccttttgcccttgcttttgatgattctttaaatatcatagtatgttatatccaggtacttaccgtgttctatgccaggcttggtaaacctagaactagaacattgtcgagaaggcttattccatgggtccatgctagctttatgggtgaaggtcgcaggacactgtacaacgtgtcttgtggaatcatctctgacagaaaataggttcaagtggagtgtgcatagaaagccctgggtgacactgttg

SEQ ID NO: 12041 - DNA, 437 bp, Glycine max
  Clone ID: jC-gmle01810059h09d1
ataagacttaaacttgagtttactatcactcaaaccacaacgatttcctgattttatcacatagttttaaaacaaacatagtcatcgatagattatgctaatcttctctgtcaaaggattttaaaataagcatcattatagatagatcatgccacttgccatagagttttgaaacaaagataattgtttatagattatgcccctcacctataactcagttctaaaataaacattatgtatcaataaacattacgatagatacattacttctctaatgaacaggaccctttcaaagcatgtgtaaacacagaagaccttgatcagcatatatagttaaagacaaacctggttgtcacatctctaattttgcaccacctgaatgtcgacacgtctgagcgacagaacatatatacaacataagccttcaattattgata

SEQ ID NO: 12042 - DNA, 565 bp, Glycine max
  Clone ID: jC-gmle01810059h10a1
aagtcattcaaattggtggtaccatttcctagaaactgtggactgcttgatattggtttaagcaggttttgtcctcttatatgtgggcctctaaggatgtctctacttcagagtctttgttatgcacaacttacatatttccctctttattgcttgcccctttggtgtttagccattgtccctcagctttgactagtagatggaattcccttgtaccccaaggtctcagacccatttttcttcatttatctggatatccctctatcagctctcaccaagcacttagtagaagtcctctcaactggaggaacaatcagaaaatggataattgagcaaaggatatggatgatctcatccatcacatgccatctatatggatgcttggatgctctactgaagaaatttggtttaaaagaggctagtttcttgcccaccaattaagtggatgatgatgaacagactaggctttaccaaatggacataattgacttcagaacatcaaacatgttccttgtgccaatggatgcactccttatcatcaacatatcttgcctcatagggggaa

SEQ ID NO: 12043 - DNA, 505 bp, Glycine max
  Clone ID: jC-gmle01810059h10d1
gacaaatatacttttttatgtatttttaaatatagattttttaatgggtgaatggtctctggctttatttcatccaactacatcactttatactgtcaacatgcagttatattctccactatatagcataaaagcaaagctggacgaatatttttggagagacagaatgggcttttacactttccttagtagagaatagattgtagaagtgataattgtggccaagatatttgatgttacaactagagcagttgaaggataaatgcgtccaacatctttccttatcaccaaaccttcaatgattggagagttaacaacaatgatataagctggaagtaaaagctgtatgaacatcttgtcccaatctcccacagataacactctgtagattccccctatgaagcaagatatgttgatgatgaggagtgcaaccattggcacaggaacatgtttgatgttctgaagtcaaatttgtccatttggaaagcctagtctgttcatcatc

SEQ ID NO: 12044 - DNA, 606 bp, Glycine max
  unsure at all n locations
  Clone ID: jC-gmle01810059h11a1
tgattttgattgcactctctgcctgaagttactgtatgaacctgtcacaaccccgtgtggacattctttttgctgttcgtgtctatttcagtcaatggatcgtggaaacaaatgcccattgtgcaggactgttctgtttattagtcctagaacatgttccatcagtgtgacattgaagaacatcatacaaaagaatttcccagaggaatatgctgaaaggaagcaagagcacgacagtttaatcaaagctggtgtagatttactccctctttttgtcatggatgttgtcataccatgtcaaaggtttccactcaatatatttgaacctcggtatagactcatggtaagaagaataatggaaggcaatcatcggatgggaatggctatacttgattcaacaggttccttagctgagtttgcctgtgaagtggaaatcacagagtgtgaaccacttccagatggtcgtttntatatagagattgaaagtcgcatgagatttcgtatcatccaattctgggatcaagatgggtatcgtgttgcagaggttgaatggatacaagatattatgccaccagaagggacaagtggaagagatactttcagcaa

SEQ ID NO: 12045 - DNA, 344 bp, Glycine max
  Clone ID: jC-gmle01810059h11d1
attcttatcattctcttatttgtccatcacttcttatcaatctgttccagtaactcaaaacaatagttctgattctcggaacaaaaaaaaaaaaaaacggtctagccaattttatgaataaaaacaagtcccccccccgctataaccaaacaaaaaacccacccccccaccgtgctatgagcccacaaggacacaaaaaaacctttaaaaatatttccaaaaaaaaaaaaaggtttggaaaagggacgacaccccccccaagggactccaaaaactaaaaaccgatcctttcccagcagaagaaaaaaacaccccccctcgaaaacccatgcgggacacctttt

SEQ ID NO: 12046 - DNA, 549 bp, Glycine max
  unsure at all n locations
  Clone ID: jC-gmle01810059h12a1
aagccaccaaaaaaaaaaaagtagctagatttgttggttatgttcaccttgaaccgttgaagctcttcttttgccttgcaacaattccaagtcacctctgccactgatcacaattcacaaacccaacaatggttttttctgctgtgttcactcccgctctcaaccttgccatttcatccaccacatactgttgtagaagaagaagaacatcatcaaccacaagaagagttgttacagtgaaagctaactcaacaaagaaagatgaatccaaggacaaagatgctccagcgttcaacccttttggatttgtcactgacaacccttctagccgcagtgctattcaactgcctgaaaaccctgctgaagatggcaacgttggacaaatgctatataggatagaagacaagggcaaggaatatgggtcatatgttaaatctggcaagctaagatggttgtaagagaaactggatcagcaaatggcagaagaggaacaattatcttccctcatggngcccctacacaatcttttagctaccgagttgtcatgtc

SEQ ID NO: 12047 - DNA, 487 bp, Glycine max
  Clone ID: jC-gmle01810059h12d1
caaaacttgtgtttgtctctacatttttttttattttttgaaaggaataaaagacaacattagtggttatttctactaaagttctctaacggcttatttaattttccatttggaaatggaggacaacttaatttcaagaaagctataactttatttgttggccagcattaaaagaaaaataaaattaaggcacactaaatttacaatttaattaaggaaaaactcaagaatgcccttccaatcaaataagcactttgatgcctgcagggtcagttagctgttgaaatcagaagaagaacactctgaaagtatcaacaactttctcaggccagtcctcttgtggcatatgaccagctccttcaatcaatttaagctggatttgtgctggatttcctttctgaaactgctctgctacagactggggcaagtacttgtctgataatccccagcaagtagtattggtttatcccatctgtcagttgcaaat

SEQ ID NO: 12048 - DNA, 473 bp, Glycine max
  unsure at all n locations
  Clone ID: jC-gmle01810060a01d1
caggagagcaaaggggacccaggcatatcaagccccaactatttattttgaccgtccacaaaagtcccaatcaaattcgaatcaactgcattttatatacagcttttttcctttcacatggctatacaaaagagaatgctaatgcttcagatggatgtatacggggttcctcatactgctggcaaaaatgatcttgagaatacatgcagcaccatggtttcaagggatagtttaatcccatattttggctagcatttccacctaattgatagcctctccaattcctgtacaaatcagggacacaacaatggctccatagcctggcgtaatcaatgtaatgtaaccttagattgttaccctaagcagactgataagtgacctgatctgccgtagntgtgtcatatttggcatttgcctcgggggtatcttcttcactaggtggaaccagctgccaaaaagtgataaatacttat

SEQ ID NO: 12049 - DNA, 450 bp, Glycine max
  Clone ID: jC-gmle01810060a02a1
ctcgagccgaaacaatctacataaccaaacacaccacatggaaatcagccaaatggcgtttttcacccaagaggactactatcacttctacaacctctacgaagacacagactctaacaacagtctcaacaataacaacagctgcaacaagagagggcgtagcaacagagaagaagaaggtagtggtggaggtgcacaacagaaagggcataatggtaataataatgacgagaacagtgaaagtaactcggaggacttacttgcttagctgattatgtccgacgatgaagaaacttgagaggaacggatcataaaagtagagtacgaacagaattggaacatgtacaacgctcaacgactagaaccatgacccgggccatgaacacctacaaggcccaattagaggaccattacgcgcagtcagaagagttcgaacaaacaatggccaaa

SEQ ID NO: 12050 - DNA, 402 bp, Glycine max
  Clone ID: jC-gmle01810060a02d1
ggaacataattgatttaattccatttctcatcagacaaaaattctctatacaatcaatagttgttgtatacaaatgaccatatttcaatctatgcaatccagttaatctctagttattcaacgtgacatagcgaaaaagaatgagatagtagtaaagttctaaaaaaagcaagaaaacccgaaaagaagaacctagaagactagaaaaagccagtcccagccctcccatggtgcaacaaatagtgcgcaatatgatccctggcctgaagggaagcagaagatcgtattccattttccggcagcatctcatcatcgaaaatctgaaacctccactcatcatccatttcttcattcctcatctacaaatattatgcaaaacgcaacacgcgccaagcacaacgg

SEQ ID NO: 12051 - DNA, 425 bp, Glycine max
  Clone ID: jC-gmle01810060a03a1
gggcgagctaaactctcaatctatccattcatgatgaacgccacttgtacatggaggaactgatcatggctgctccggtcagatacgacaatgccttgaaatggagtatgatcatactgtatgccaatgataattgtgcacagtgacatctttgcactccatcatggcctaagtgggcctggcgatgagacctattggagctactaaacacttgactccatatttacctttgcaccgtgtcatagatactggtgacttttcatgtcctgactcatctgaaccactcggtaccatcgatgctgcaccatgttgctcatgactcagatagccaacttctgacacttacatagccatgatgggttcataaagactcacacgatgcatctaagatagccattttgaatgcaagctacatgtcgagacca

SEQ ID NO: 12052 - DNA, 528 bp, Glycine max
  Clone ID: jC-gmle01810060a04a1
agaaaaactcaaagtcatcatcatctaccatggcacattctgtggcattttccgacgagattcctaacatgagcatgagcttccctttctcccctgctttctctagtagcatctttgacatgatgccaccaccaccaccttcctcatctcacgatcctaaagctgccaactttgctaatagcttcatggacttgctcgctgtccctgctgattattataccccttcgttattcgactgggcccaaaacaccgcccccacgtcagcaccaccaccttccaccacccaaatcaaccaccctcttccgtcgtcagccatctccaatgtccccgacggctccgaggtgctcaacactccggcgtcttccaattcttcgtctatttcatcatcgtccaacgaaacaacaaccgccaccaccgtcaacatagcaacgggaaatgactatgaagaggatgaagatgaaacagcgatagatgcaacagcatgcatagaagaagatgatcatcaagaccaagacatgacttagaaac

SEQ ID NO: 12053 - DNA, 496 bp, Glycine max
  Clone ID: jC-gmle01810060a04d1
gaatggctgaagcccatctttgtttatagcttataggggaagatgatgagaaaagccatcatacacaaaaagctaaacggtactactcaagtaataatgttacaactttttccatacctcatgcattgtgtcaagtcatggggcaatcataacactctctctggtgcatagttttcatctttctttcttaaatttccctcatcatagatatagagttccctgctccattgcttattagcttatattcttgactttccctttcccacattaagtctctgccaccataagtatctacacacgatcttcattctcctcattccccatctgcgttggaacaatgtcctgaagaagcccattgtccctcaagaaaatatgaggagccaccaccctagacggcacaaaacctcgctgatgattctcttggccctgaagaaagccactcaacgatgacgtattggcatagctattattaacacaagaagctgagttaacaaca

SEQ ID NO: 12054 - DNA, 268 bp, Glycine max
  Clone ID: jC-gmle01810060a05a1
atcgtatcctatcgtcgcattgaatgaatgaaagacaaccgtaacttaccttgtgaactatcatgatgcagatctttgctaagacacatagtgctttgacaatgacgctatgatgtggacagtttatgtacgattgatactgtgaagaccatgagataggacaatggagggataccacaccaccatgagcgaatgctttacggtgtgaggctgatgaactgtggacggtcacttgctgattacgacatccataaggagttcactgtac

SEQ ID NO: 12055 - DNA, 430 bp, Glycine max
  Clone ID: jC-gmle01810060a05d1
attgaaagtactaaattcattaaaacatgattgcaaattgtacacattcatagcttttcaaggtccgctaatggacccgggatgcacacatacacaaagttcaggaacatataaaaagaaaagaccagattatagactttcacatacttcagttcacaccaaacaagggacctgcagaccattctcaaactcaaaacccaccacgaagacgcaagacaaggtgaagagtagactctttctgaatgttgtagtcagcaagagtccttccatcctccagttgcttcccagcaaagatcaacctctgttggtctggggggataccttccttgtcctgtatttttgccttgacattatcaattgtgtctgaactttcaacctccaaggtgatagttttccctgcaaagtcttacaaagatctgcatacctcccc

SEQ ID NO: 12056 - DNA, 304 bp, Glycine max
  unsure at all n locations
  Clone ID: jC-gmle01810060a06a1
aagccttattatttacacacttcttttaatatgcctggatatatatgaggccatgtgacaaagagtgaggtactcgnagccacacatattgagatagagaagagcatcttcacttgtagtctagctacgagaaaacatggcagaagtgatggctgagaagatgttagctgtggagggtaatgagaagactatgcaatatggacttgactctggcacttcttggcttggaagttgcatggcttcaggtccatcatcagaaaacgtgtcacttcacagatagctccctgtaactgcttgcgagtga

SEQ ID NO: 12057 - DNA, 236 bp, Glycine max
  Clone ID: jC-gmle01810060a06d1
cgggtgattccttatgggttttcctggaccatctgaaaaaaagggggcatttattctaaacctttggggggccaaaattgtgggcctatcctactgcacagagggcaattttacaaaaaaatactattgaaggaaataggcgaggccttttaaatagggcgtcacacatgacaatacgcgcatgtatacatatctaaacaatttaccaccaataatacgggtacccgtagaaaaga

SEQ ID NO: 12058 - DNA, 523 bp, Glycine max
  Clone ID: jC-gmle01810060a07a1
ggaaaaatgagcatgaaggaaagctaaataagtttgatttatgatgttgcacgtattcgctgatatgacagatcactctgctagggatctattggccagagtgagaataggtgcatgggattctaggtgtgatacaagtcagcatcaccttagagcagcgttttataggatcatcatacgatgatgtggagggaaaagctcagggcttgatgtagtctagaatggtgaatattgaagcaatagtatgcttgggatgaccaccgttagactttgaggggatgaatcggaaactcgccgtatgacagacgatcttgcgaagtctactgaattgtgtgagtcgctaactaaacgttgcattagataaagatggatgtgctgattatcaccctaatattactgcagaaatgatagctggaccattaacgaatatagtatcgttgggatggcaatgacctaagctagagaactaactgaacaggcgggtacaacaggagttcaagtacacagtgcatgacgtatcgac

SEQ ID NO: 12059 - DNA, 329 bp, Glycine max
  Clone ID: jC-gmle01810060a07d1
aaatgaaggtaaccataacaaaaaaaggctcgtgttttacaagccagcaacgatagcattctgaatatacacacgttgaaacaattctccattatgtttttactcgtatacttcaatcagtggtcagagttacatcatgtgcaaggttaacattcattaagaacaactgcactttgagacatcctctgcacaatctctttcccagtaatgaatctcaccagcaaaacttctttttccgcaacttggcttcttcttgtctgtcaatgtaagcaagcagctcttcttgcctcatcaatgcgtcatacagagcctttttagtagcaattaac

SEQ ID NO: 12060 - DNA, 400 bp, Glycine max
  Clone ID: jC-gmle01810060a08a1
gccacaggccttctccgacctcatcgaacgcaccaactggcgctacagcgagtacttgaacgccgataacaagggtgaagtctatcgagacatgctcagcaacaccgttccgtcctccagctaaccgacattgacgggcgttgctgcctacgatattagtcccaatgacttggacctcatttgcatcctggctatgaactgcggaaccatttatgccgacgatgcaaatcccccaacagctggtgcaacatcatacgcagctcgcttttaccattactatcatcttcaggactgttgtttatcttccacacaactcaatgcagagcccacaaggcctagcgcgcttgcatgggccatggacttgctgcggaacaaggtccacattcaggatgctccgcta

SEQ ID NO: 12061 - DNA, 365 bp, Glycine max
  Clone ID: jC-gmle01810060a08d1
aatgggtgaatggtctctggctttatttcatccaactacatcactttatactgtcaacatgcagttatattctccactatatagcataaaagcaaagctggacgaatatttttggagagacagaatgggcttttacactttccttagtagagaatagattgtagaagtgataattgtggccaagatatttgatgttacaactagagcagttgaaggataaatgcgtccaacatctttccttatcaccaaaccttcaatgattggagagttaacaacaatgatataagctggaagtaaaagctgtatgaacatcttgtcccattctcccacagataacactctgtagattccccctatgaagcaag

SEQ ID NO: 12062 - DNA, 499 bp, Glycine max
  Clone ID: jC-gmle01810060a09a1
gtcaggaatcccggctttaggtggtgggtttcctagagttgttgcaacatggggtctgactatagttctcacttacttgaactataggggtatgaccattgtgggatgggttgctgtttgtttgggggttttctcactccttccttttgtggctatgggatttttggcgattccagacctaaagccttcaagatggacagtgacaaacccgaatgatattaactggaatttgtatctgaatactctattttggaatctcaactattgggattccataagtactcttgctggagaagtggaaaatccgaagaaaactcttccgaaggctttgttttatgctgtgatcctagtagttctagggtacttctttcctcttctaattggtactggtgcttgatctgtcaaccgtgagttgtggacggatggatacttctcggatattgctttgattataggatgaccatggttgagatggtggctgcaggctgctgctgcaatg

SEQ ID NO: 12063 - DNA, 443 bp, Glycine max
  Clone ID: jC-gmle01810060a09d1
ggccgccctttttttttttttttatatcaaatttctagtataattgttttcattgctagtaaacataaggcaagttatatcattcaaaatatagctacaatgacgaactttattcttctcttccacgcacaattatatgacgtcccaggcccttcatgaaacgatgaagtgatggtaaaaagacaaagacaacttaggagaacaaacaagacagaatctaaaggacccaattattatgcataataaagaaccacttccttagttcaaacttcaaagctttgatgtttccctcgggtgatgcacgacaatgtaattataagcatccagagtgagaaaatcatcaagcattggtgacgtgcattggcgagtgaagatcttgcaagcctccttgtacattcccttcttgaacttctctgtccccacttccttttcaatcctagcca

SEQ ID NO: 12064 - DNA, 240 bp, Glycine max
  Clone ID: jC-gmle01810060a10a1
aacggccacggcatgctctactctcttcaacttcctctgcacaatacatcttccaccctggctgcatcctccatctctggctgtgctggcatcaggagtctgttgctcatgcttgtatttggagaagcggtaacagcgtcatccgaatcaatgctatacgcttgaacgacgtagggtactccactcgcgaccacatgtgtagttagtgacactacgaaagacttcatgacagaagcaaca

SEQ ID NO: 12065 - DNA, 298 bp, Glycine max
  Clone ID: jC-gmle01810060a10d1
gccgcccttttttttttttttttttttttttttttttttttttttttttttttttttttttttttttttttttggttttggggtttttttttttggaaaaaaaaaaaaaagttttaattttttaaaccaagggttttttaaactacccgatttttattctaagaaatttaaaaaccactaaaatttatggttttgcaaaacttttttttgtaaataaaaacccctttctttgggggagaacttaaaacccttttttttcatccaaatttttcaaaacaagggggaagccccatcattg

SEQ ID NO: 12066 - DNA, 567 bp, Glycine max
  Clone ID: jC-gmle01810060a11a1
gtaatcgctctacgtacttcttgctggttttttacccttccaggatgacaacctggtggccttgtacaagaaaatttaccgcggtgacttcaagtgtccgccgtggttctcctccgaggcgcggaggctcatcaccaagctcctcgaccccaacccgaacacgcgaatcacaatttcaaaaatcatggactcgtcgtggttcaagaaacccgtgccgaagaacttgatgggaaagaaaagagaggaattggatctggaggagaagattaaacagcatgagcaggaggtttctactacgatgaatgcttttcacatcatttcgctctcggaggggttcgatttgtcgccgatgttcgaggaaaagaagagagaagagaaagagttacggtttgcgaccacgcgccccgcgagcagcgtgatttcgagattggaagatttggcgaaggcggtgaagttcgacgtgaagaagagcgagactaaggtgaggttgcagggtcaagaataagggcgaataggtaaactcgctattgctgcggacttgtacgccgtgacgccgtcgtttttggt

SEQ ID NO: 12067 - DNA, 566 bp, Glycine max
  Clone ID: jC-gmle01810060a12a1
caacaaaagtatggatttctggcaacaggataagtggaatggatatttctctgtcaaatggcacattataaaggatgttccaaatcctcaactacgccacataatactcgagaataatgatcacaagcctggcacaaatagtagagacacacaagaggtgagttttccccatggtgttgaaatgcttaacattttcaagaattatgtggcaagaacttccatattggatgactttgaattttacgaaagccgccagaaggtattgcaggagaagaaaacaaggcaatctatgccccataccagtgtacagcaaatagaggaattaaccactacacttgggtcagtagacctatcatctgtgaagaacatggaggatcctaaggtggttgagagagtgaatgactgaatagcatgtggggctgatgctattcctggggacccgtcatgccagcatgccgatcacgatggtgtggcgatgtgccacgtggaccacatagtaagaaaaacaaaagctaatgaattcaaatgttaagttctaaacccgaaaattcttgctgctgctgatg

SEQ ID NO: 12068 - DNA, 518 bp, Glycine max
  Clone ID: jC-gmle01810060a12d1
gcgccctttttttttttttttttttctggggacccaaatttctaatatataaaaatataatggttctcatacagatttttctgctacacaggtgtagttacattagtgaaaatggagttaaacacaagggaactgcaaaagggagcagaagattgcattgcatgtaggcatcctcattgtccagggacaaagttagtggcataagcccaagcattgttggcaacaggatcagcaacgtggtcgtaaaggttctgaatagggcccttgccagtgacaatagcctgaacaaagaaaccaaacatggagaacatagccaagcgaccgttcttgagttccttgaccttcaactcagcgaatgcatcagggtcatcagccagaccaagagggtcaaaagcaccaccagggtagattgggtcaagtccttcaccaagtggtcctccaccaactctgtaaccttcaacaaaccccatgagcacaacctgaacagcccagatagcaaggatgctctgagcatggat

SEQ ID NO: 12069 - DNA, 531 bp, Glycine max
  unsure at all n locations
  Clone ID: jC-gmle01810060b01a1
cttcttcttctctttgtctttgtactagacaaaagaaaaacagagatggcaagtttagaggaagacgagttagtacaaatggtgcaagattttatagaatccgaatcaacatcccccacaagttccacgtcctcaaattgccacaccttaaaccaccgaacccaatattttattctacaggatgttctaaggagtgagggtgatacaggatgtgaggctaaggtattgaagtgtgtattgaaccatatgagaggtagaaagggtgcggagaagactaagacaagtctcagtaaatggcttgttatgaggatgaaaatggatggccttgatgcttctgtatgccacacctcttgggccacctctttgggttgtcctgctggtgagtacgagtatattgaagtgataatagaggatgaccagaattgtggtaaacctacgaggctgatagtagatatagactttaggtcccaatttgaagttgcgaggccaacacaaaactacaaggaatngacagactcggtcccagtgatt

SEQ ID NO: 12070 - DNA, 278 bp, Glycine max
  Clone ID: jC-gmle01810060b01d1
gaaacgaagaaggatattcttttattcaacaagaggtgctcatcacaaaatgctaaaattttaaaatccacgtaagaagtgctcttattttatgtgactagcgtaagtgagaatacaaaaaatacttgtgatgaccaccgaattcatcataaaattgcgaccaaaattgggtgtagttctcagaataagcagagagactcccctagcaacaatttacactcatgttagataattgactagacaaacccgatccaccaccatccaaattcctttttttt

SEQ ID NO: 12071 - DNA, 340 bp, Glycine max
  Clone ID: jC-gmle01810060b02a1
ataatttttcttcgaatcttagcaattgatatcctttcgaaacaccatttttttcttcatttgaattgacagtgaattctttcgatttcttattcgatttatgtattcttttgtctaaattaaacaaggcaaggactaactcccgaactgcaagtaaagagaatgatagaatagaatatagatttatctataagctctatgacttgtaatagaacttatgcttgatagaaaggttattatcatatagagttgacgaatgagatgacgtcgagttcatattataaagactatcaactgcaggcactataacattcattccgcttctatatctgacatctat

SEQ ID NO: 12072 - DNA, 512 bp, Glycine max
  unsure at all n locations
  Clone ID: jC-gmle01810060b02d1
gtaggacgatagttttgaaaagacagattgcctatcttctctttaatctcaggcgaaatacgatcggggggtgccaattcaaaaccttccggtaaaataagaacagcccccacattcaaagctccctttttaccattagcaagaacttgtttcacttgcatatcataaggaattcgaacaactgcttcaaatacagtatcaggaagtaccgcttgtggaacctcaatatccacgggcttattagctaaatggcaattggcacagacaatacgaccggttgcttctcggggattttcataaccctgctgtgcaaaaattggatatgcgtttgaaatgggtgctcgaattattatatatatcatgatcgatatggaaatggatcgagtaatcccttcctttatacaagaaaaagcatttctagtttgcatggtctaatcattgatcctgaaaatttctacataagattaggtaggtcactcgcatagttcctatccaagtcggngacccctttt

SEQ ID NO: 12073 - DNA, 507 bp, Glycine max
  Clone ID: jC-gmle01810060b03a1
gacttaatggagatgttgaatccccatccaaagccaagggttatttgtgattaaaacttgtatatgttctccgttcatgtagtctctacaatgttgctctaagttccattcacttccgttgcaatagcaaaaatagattataccgaagccatgagccttgaccattgttacctgcacttgagattaccactcattcaagcggtaactaaaaagtcccaccttaggtggaacaaacaacttgagctccatatatgtggaacgtctaacgatttttgacatctacgtgcagttccgtttccttgcgcagtactatcgcggcccattagttagcggagatttccaccatgcatttaccatatactaaactgatacaatgcttaatggcagctattagctttcactgtttgatcatacacagctttcttattaattggagggatggaaaccacgaacctcaatagttgctatgatctctttacttaattaaatacttcgctagtgcttatg

SEQ ID NO: 12074 - DNA, 224 bp, Glycine max
  unsure at all n locations
  Clone ID: jC-gmle01810060b03d1
cgattgtatagcttaatttanagacccgatcacggaattaaacaaaaaaggggggggggcaaataatcaatacgattacaaaatctatatatgcctaaatacaaaacagaatgtatgaatattatgattaaatatataacatgacaacaaaagttttaacgagtaaacacccaccatggagcaacatccgatctgaaaactgtttcaacaccaaggaaacaaac

SEQ ID NO: 12075 - DNA, 497 bp, Glycine max
  Clone ID: jC-gmle01810060b04a1
agagacgaccgcggattcctctatttaaacaacttgcttaatgtgaaagcaaacacaaagggctgggttagtactgaaaagttgaaacatagaaacaaggtcaacgatgcactcaatgaacataatcaacgtcctataacagctaatgctaaaagtgcattaatgacctggaggtaatactgcgagaggctcagccccaggtgggagtggaaatgctaccaacaaaattaggacagatcagtacaaccttcctgattttccaaccaaatatgatcatgctctattgcttgatcatcaaatcccacagtgaagatgatatgacacaagatcataacctacaagctatgcaactagcccgtataatgggaataagaggctggatggtgcatttgatgatgcacagaagagaatggaagacaaaggatgcaagagccctgtgttccttttcttttcggtcaatgctagtggtcaattttgcggagtagctgagatgactg

SEQ ID NO: 12076 - DNA, 326 bp, Glycine max
  Clone ID: jC-gmle01810060b04d1
ctaagatgagcttaatatatttatgcaattgcaaactgtcttcaaaaagttgaagattcacaagagcattatttatagcatagtagctcattacaaccatatgacagatccgtttattaaagggaaataatgacacgtatgtttaaatccatatatctgaagtacagtcaccaccaggatatctcatctcatgggcaagagaaggaccatcaggctcagttccaaagtccacaaagaagttggggttgattttcagtccacctttctcagtatcaacatcaatctgtattatgtgggagcctttctggacaagctctggataaaat

SEQ ID NO: 12077 - DNA, 276 bp, Glycine max
  Clone ID: jC-gmle01810060b06a1
ctcattaccaccatttcaccttctcaatctaggaatctgctacactaatgaggaccaagtcacaaccatattgtgcttctgcgcaaccggaccagagattggacgcacaaactggagggcgagacagatgccaagaacatggaatggccaatgggaaggctgcggatgaactcgggagaaggaagtgggcagctacaggcgtaaggctactctgctgagaggtgtctgcatgagtatgatgagcttcgaacacatggtgaaacaaccagagcttct

SEQ ID NO: 12078 - DNA, 326 bp, Glycine max
  Clone ID: jC-gmle01810060b06d1
ggatgaactatgctattatcaacattaacgaaacggtaggggatacaaccacggaatccagcttaaatccatatataaattgagcaaagtatcatgtgaatataatgcataatacataaatatctttttccttaaaaaatatataaagcaccaatgtaaatggctgaataaggaggggaaagaaggccataaaaaagatggatccaaccagacaaattgtgtagatcatcaaaatgcgtccatcttaatcctcccacgtttccaagctcctgatagataaggaacagtgctgcattgtgcagttcaagtttgtggtcagtgatgag

SEQ ID NO: 12079 - DNA, 414 bp, Glycine max
  Clone ID: jC-gmle01810060b07a1
gcggcaggaacacccgtgcctggtttggatggtgtctctgtcacctgcaagtacccaactgatccaactgctgcattggggtatctttctacagcatttcttgccgcatccactgtgactggatatctgtctttgttgtacccttacaaaggaaagtctattccacaaggggttctgattaagcacaccactttcacagtgttcttcaacatttctttgatcaccactggattagctgcagctatgctgttatggccaacaatcaccgaacacattcacctgacacacagtgtgcaccgaaatatcaactatgaatgtcctacagctaaaactgctctacttggaggcggtgcctttctatcactcgactcatctctactttggctgattgcccttatgctagctgacaatgct

SEQ ID NO: 12080 - DNA, 341 bp, Glycine max
  Clone ID: jC-gmle01810060b07d1
aaaagggaaatcaatatatattattcctttcaaagaaacaatttacaaaaagaaaagggggggtggaaaaaactgtatcttatatggcttgcaaaacaggataatcaatgttggattaactgattaaaatgttgttgcaggcctaggccaccaacatggatggggggggggaaataaaaaaataacttgcttaatttgttactaacccacataagcatgtactgtgcttactctagaggctaaaatactcaatgcaaatgatttacaacctggaggttggatcaaatccattaccattagagacatgggctactttctcattcgcggcatcatcgataaac

SEQ ID NO: 12081 - DNA, 418 bp, Glycine max
  Clone ID: jC-gmle01810060b08a1
agttcccgcgccttttgatcataatacaatgactgtgcaacaacctatgtctgtcttaagatcgacgggttcaattgagactgacacactgagtatatgtggatgagttcacacggatacgatatagatgtatgattagccattcgctgcttggcttataatgttgacgtcttcattgctcacctgatgaaatcatttaagcctgaatatgcaggactgattaatgaggcaccagttgatgaacgtatagaggctttgactgttgacagatcacatgcccctattcatccctggagagcaaggacgtaattgacgcctctcggaactccatgtgctactactggcttgtcaggctttgatttgtgagcctgattattcctaaccgctgcagcaattactccagctaaagacttagcac

SEQ ID NO: 12082 - DNA, 429 bp, Glycine max
  Clone ID: jC-gmle01810060b08d1
ctatgtatctatataatcgaattgaaattacgattctatcaaatctttttatttactttttttttttttaagaaaaaagaaagttctaattattaataaattatatctatatatatatatatacagatagatattctatatcttttatcttaattaatatttgacccctccttataatgtgttatagttttctttatttttaggaacttatccattccttttttaatgtgcccgacaatccgaaagaattctgggggaggggtcatttcgtttttgatctagaataaatagagcttcaagaaatgagagaattaagaatacccacgagaaacactaatccaatccataatgatgtaccggaaaaacaacatttttgtaattcgaccaacctcaggagaagcaaatcaacgggccactaatcaataaaat

SEQ ID NO: 12083 - DNA, 605 bp, Glycine max
  Clone ID: jC-gmle01810060b09a1
gccagacaccagatcaacaacagactttatctgcaattggggaggatttatttgcaatagcacaagaccagccattccgttttccatctaccttcacctttgttattagagcattttctacacttgaaggcctaggttacatactcaatccagatttctcctttgtgaagattgccgcaccttatgcacaggaacttttagacataaggcaaaagcgaccgactgggccacaactcgtggaggagataaggaaacaagcagatgatgcaagaaccaattcaatatcgatgccttacagagttcaaagaatagaggaatttgtcaagcaacttgaggcaggagacctgaaactccgagtccgagtacttgagtctgaaagagctgctcgaaaagcaacaatattacaaatggctaccatgtattcagtattggggggaaccttgctaaaccttggtgtcactgtgagtagccaaggcaatcaagcttttgcaaatggatcattcattggtgcaggcattatatgggctctatttttaaggtctatgcaacgggtgaagagacttgacagggttgagaacatgatataattcgttccaaccaaattc

SEQ ID NO: 12084 - DNA, 186 bp, Glycine max
  Clone ID: jC-gmle01810060b09d1
ggccgccctttttttttttttttttttttttttttttttttttttttttttttttttaaaaagaaatttgggaactttccttcccattaatattttgttcaaaacataataaaaataacaggggcataactttatctggcgtatcaaaattctacatatagaaattgaactaagattaaacactag

SEQ ID NO: 12085 - DNA, 200 bp, Glycine max
  Clone ID: jC-gmle01810060b10a1
agatgaccgagattgatgagacccagtactccttcctggccggatcgaagggtcttgcctctgatatttgagaccagctgcaagacatgacaagacgactgggttagcttgactaccttgtgccatcgccacacgatgctggaacttgctaggatccgtgacctgctcgagtacgtgactctgcactctgcaggcttgac

SEQ ID NO: 12086 - DNA, 398 bp, Glycine max
  Clone ID: jC-gmle01810060b10d1
ggccgccctttttttttttttttttttttttttttttttttttttttttttttttttttttttttttttttttttttttttttttttttttttttaaaaaaaaaaccccctttttgcccaaaagaagggcctttttttaagggaaaaaaattttccctcctttttcccaaatgccaaggggccctttttaaccaaatttttggaacctttcccgttttaaaaaaaccccgtcaaaaaaggggtgggggggttaaaacccaaaattttttttttaaccccaaaaaaaacacccccttaagtttctggaaaagggccaacttttgtgaaaaaaaaaattttttttcctttcccaaggggtgggggaatccttttgtttgtttttgggggggggtttttta

SEQ ID NO: 12087 - DNA, 524 bp, Glycine max
  Clone ID: jC-gmle01810060b11a1
catttatgactgggtcaaatcaactggtacccttcgtcttgatcctgagggtgagaacagtaagattcaaaagaatcctcattaccaggcaaaagagtacaagactttaaataacagatgtatggagctacgtaaaacttgcaatcatccatccctgaattacccattacttagtgaattatctacaaattcaattgtaaaatcttgcgggaaattgtggatcctggataggatccttataaagcttcaaagaactggtcatcgagttttgctgtttagtaccatgacaaaactcctagacctcttggaagattacctgaattggcgaagacttgtttacagaagaattgatgggacaactagtttggatgaccgtgaatcagctataatggactttaatagccctgattcagactgtgtcatcttcttgcttagtattcgagctgctgggagaggccttaaccttcagtctgctgacacagttgtcatttatgatcctgacccaaaccctaaaaatgaggagc

SEQ ID NO: 12088 - DNA, 524 bp, Glycine max
  Clone ID: jC-gmle01810060b11d1
gccgcccttttttttttttttttatataatgaaattttattattatatcatatacaccaagaaaaattctatacgaaagtgaatggaaaaccaaacaacaataagaacaaaaaatattgggcacgaattaataaaatgtgcaaagcatcatacccctacgataaataataatagaaaaacctaaaataagaacgcaaatgtcaacaaagcgaaaacgccggacgagggccccacacaagtgaggcaccgaccaccgtcgctagcgtccctctccggtgctgacgtggcggtggagccattgaaattagggttggaaccatagaggaattgaatcccttcgatgtcgtcccttgccaacaccaccttcttcttccgagaagaaatcgtcggaaacataaccgcttcttctaccgatgagtgacctaaccctagcaagtgcccaatctcgtgcaccgccacggattctaaatccaccgctgtcggcagcgctgaccgcgtcacatcgccggaaaccacccagtcct

SEQ ID NO: 12089 - DNA, 543 bp, Glycine max
  Clone ID: jC-gmle01810060b12a1
gcagatttttattctttttcttccaagtttgtttatccttatcctaattccatttggctttaacttttaataacagcagttttctttttgttatttattgctattatgatgtagtaatttcaatcgttttcataatgactccataatggcgattaatgaagtttctgagctgtgtgagcgatttagcataaagtatacgatgcatcgatactggttctggatgttcatgttcgagcaaagatcttttgagtgtgtgcagttactgctttgacgttatggattctcagtaagtaaaatctcggaagtcctcagttaagctcttctgcttacttagggtttggaaagtcacttcatgtagggattagtatttgcactagatccgcggttagagttgaataatttctaacgctggatttgaagtgaatggttttagaaagggatactctgctagagtgctcgggatatatggtcagggcatttgtttgtcttactcgtatagttgtataggttcttgctattctcttttacttgatatctagtgat

SEQ ID NO: 12090 - DNA, 567 bp, Glycine max
  Clone ID: jC-gmle01810060b12d1
gccgccctttttttttttttttatctttaaattctagtagtattaaacatgttcatttctttactatatacttatataagttccttaaaacattacctaaaccttcaccaatccataaaaacaatggtttacggttgttacccaaaacaaaaaacatagataccaaattatattctatagaaatcaccgagagaccggctcttccaattcacttgccaattcaagaagcagtggccgcagtttatctttccaaaactgccccccaaacccccctcccttttcacttcttttcatttcaaccaccaccagctcatcggttaattggtaaaccacaacaataccaatcaaattaccatcctgcccttctagctttgctccaccaccattcttctcccttctcaccaccacccttccctcctccgtcattgcctccactctctccataattttctctggcaccactgtcgaaacaacccgttcaaccgaattcgatccggtcgggtcctcgaaaagacccgacatatccaacccggtcgagaaagaaattaagtcgaaagcattcaaaga

SEQ ID NO: 12091 - DNA, 507 bp, Glycine max
  unsure at all n locations
  Clone ID: jC-gmle01810060c01a1
gaaagaaaaactcaacacaactccccctctccaccctctttttcttttaatttctcatcttatctattaatcttatatacatatatataaagacatagataatagtcatatagatataattatttcggtatattttccttgcatgggctgttaagatgtctcgcacgtgctcacagtgcggcaacaacggccacaactcacggacatgcaccgacggtggcgccgccgggtctccgagggagaacggcatcatgctgttcggcgtaagagtcatgacggaagctaactcctccttcaggaagagcgccagcatgaacaacctgtcacagtacgacgcggagttcaacgccgtcgacgccggctacgccttcgacgacgtcgttcacgccttcggccgcacgcgcgagcgcaagcgaggtgttccttggacggaggaagagcatagattgttcctgttagggttacacanagtcggaaaaggagattggagaggggattctagaaact

SEQ ID NO: 12092 - DNA, 440 bp, Glycine max
  Clone ID: jC-gmle01810060c01d1
aaatctaaaaaaaaatggtaagcataatatattcctttgtctaatctaatctaaggaatattttaatgaccccagtggcattacacagaccagtcgcatctcaagagtacccggtgccctatcatttcacgctcacactcccccatacatacagaaacaagaatccctcaacagctacagaatatgacaacccatctttctaattctaaattctactaaacctgtacactgaaaccagcaattaaattgcctaattacctacataacctaaacccatagtatatatttatttttccaaatcataattaattaccattatactcattaattcaaatatcccctccctcctacctatattatgattatctttcgtaataatcaatagatccccaacacatatcttcaatttttccccctcttggatacatgcccgattaagt

SEQ ID NO: 12093 - DNA, 452 bp, Glycine max
  Clone ID: jC-gmle01810060c02a1
atgaaaggaactccttaggccttagaggcatataagacttccacttcatcctcaacatcatccacccataacctagataccaaattcatatactgtttgataggaccagtccaaagattcgcataagaatttacggccgattttagggaggttcttttagcaacaggggagagttcttgttgttgaaagtcctctctgactgcgctacctccagggattctccaacaaagttgttcgagcttgcgtcacaatctaggtcctcaagaatggggttattaactttttgggtgttagtcttagagttagcagtagttgtgctttgtcctttaccctttagacatgggtccaattgagcatatggtttcagggactatgatcaagcaatttgggggctgttcaaggtgtaggaacattaccttgcatccagctggacgacgacgataggggcacag

SEQ ID NO: 12094 - DNA, 470 bp, Glycine max
  Clone ID: jC-gmle01810060c02d1
attaacatatctagtaacatatatttattaaaatttaaactaaatgattaataatacattaaaaatttaaaataatataaaaattattggtataaattataaatgtgacattaatacttgtgtaagatacccacaataagctaactttgtataaaaagtggatgcttgcttgctttatcttgctgtgtgttttcctaaaaagcttgtgcaaagcttttctagcaacaaccttgactactttaactggatgtcgctctgctagggttcccctagcaagcagccaacgtcatgaccaatcgcaacatcgttttcccatggacctttcttcttgacccttcgtcacccacaatccccgttccttcaaaactccaatcgcaaaaagcctcttttgctaaaatcctcagcaattcatgcgacattgtgattagtaagctaccaaagccttacctcaagggcgatactttctccat

SEQ ID NO: 12095 - DNA, 396 bp, Glycine max
  Clone ID: jC-gmle01810060c03a1
aagcaattgggagaattagccatgtctactggaaagttagaaatggccgaagagtgtttaaaacacgcaatggatttgagtgggttattgctgctatattcttctttagtgagatgctgacggaatatcaaaacttgcaactcttgctaaagagcaagggaagaataatgttgcatctcctttgcttattcatgttgggtaaacttgaggactgccttcaacttttggcataaagcagtcggattccagaagctgctttaatggctcgatcctatcttccaagcaaggtctcacagatagtggcactctggagaaaagatctcatgatcgttgatccaaatgccgccgaatcattggctgatcctgaagagtatcctaaactgctcgatgattggc

SEQ ID NO: 12096 - DNA, 424 bp, Glycine max
  unsure at all n locations
  Clone ID: jC-gmle01810060c03d1
gaaaataaaatatatcccagaattcattatcttaacctcatcttacacaacaagtttacaggaaacgttttgcaagaattataccacgattgctcaagcaacaaaatgttacaaaattccaagccaaattgccgtacaaaattatggaaaaatacgtgatgagttctgagagttggtcactgatttcactactgaaaatggacgtaatttttataatttcctctctatttcccaaatatacaacctagttgtagtaaagtatatgatacactaaaaaaaataaaactagaattgccaggactcgtagtagcaatgatagtaaaagcatctagttgtcaaaatgggagttagatatggcaatggcacttgagaaacaaccacccgaagacaaaacttcaattttcacacggncccatccaaatgc

SEQ ID NO: 12097 - DNA, 194 bp, Glycine max
  Clone ID: jC-gmle01810060c04a1
cgttcaaaacgtatgagttcaacattgccttctcttttgcagcagggtatcatagagatgaataacgagtttgattgatctgtcacgtagctacttcacgtgaccacttgtcgtactcatatttagcatgatatgaatctgaatttttatcttgtgccttatcattaagtaaggaatataattgtgttccagtt

SEQ ID NO: 12098 - DNA, 207 bp, Glycine max
  Clone ID: jC-gmle01810060c04d1
aactggaacacaattatattccttacttaatgataaggcacaagataaaaattcagattcatatcatgctaaatatgagtacgacaagtggtcacgtgaagtagctacgtgacagatcaatcaaactcgttattcatctttatgataccctgctgcaaaaaagaaggcaatgttgaactaatccttttggacccttgagcccgattt

SEQ ID NO: 12099 - DNA, 543 bp, Glycine max
  Clone ID: jC-gmle01810060c05a1
ggtgcatgagggaacagcaactatggactggatggaacaagaacaagagagggggattaccattacttctgctgcaaccactacattctggaacaagcaccggatcaacattattgatactcctggtcacgttgacttcaccttagaagtggagcgtgctcttagggtgttggatggagctatatgcttgtttgacagtgttgctggtgtggagccacaatcagaaactgtgtggaggcaggctgataaatacggtgtcccgcgaatttgttttgtcaataaaatggaccgtcttggagcaaacttttatcgaacaagagacatgatagctacgaatttgggtgctaaaccacttgtaattcagttaccaattggttcagaggataactttaagggaagtatagaccttgttaggaataaggctatagcttggtctggagaagagctgggtgccaagtttgatattgtagatgttccagacgatcttcaagagcaggctcatgaataccgagcccagatgatagaaaccatagttgagttcga

SEQ ID NO: 12100 - DNA, 343 bp, Glycine max
  Clone ID: jC-gmle01810060c05d1
cttcatccggttcaattccttccaggtagttctccatagcctggtcatcgaactcaactatggtttctatcatctgggctcggtattcctgagcctgctcttgaagatcttctggaacatctacaatatcaaacttggcacccagctcttctccagaccaaactatagccttattcctaacaaggtctataactcccttaaagttatcctctgaaccaattggtaactgaattacaagtggtttagcacccaaattcgttactatcatgtctcttgttcgataaagtttgctccaagacggtccattttattgacaaaacaaattcgcgggacaccgtattta

SEQ ID NO: 12101 - DNA, 420 bp, Glycine max
  Clone ID: jC-gmle01810060c06a1
cttcggcttcaggttcgggttccattcctccgcctctccgctgatttccctctcctgtggctgcgcacaccaaacccctccggttcggttgagtccacatcaagggtcatcgcatgaggaggaagagtctgttttcctttaccttcaacctatttccagcgaaaaccacttggaccgtgtcctcgccaaggctcaaacgctcgacgaaggtgtcgttgtcgtttggtagattccttcttccctaatactctgtcgctcgtttgtgttcgatagtgagaggaatttgaacctatcacccgtgcctccttctcccttcaaccacgaaatcaaccttataattctgtggttgactcatatgtcaaattgaactattattgcgtgactgactactgatggaaatttgactgatgcgattctact

SEQ ID NO: 12102 - DNA, 315 bp, Glycine max
  Clone ID: jC-gmle01810060c06d1
aacaaagtgtcctcggcatgcacaagcttatgcaatccgttgaaggttatatgccaccatatcctcaagggctaaacgaaacacactctgaggtaggcattggagactttgaattgcaagatcagctttctcttttgctaactcttgtgctctttcaatgcccccacaactcttgaccaaattgatggcctcgtcaagcgaaccaacctcactgaattcagactcaatgatatccctcaattttggttctttctccagtgcaaaaatcactggtgcagtcaggttgcccttggaaggtcactgccagcaggcttt

SEQ ID NO: 12103 - DNA, 330 bp, Glycine max
  Clone ID: jC-gmle01810060c07a1
cttagtagcaaggaataattcaagtgactcagacaattactactacaataaccactacgtcatcctccatgatcttctaagagagcttgcaatctatcataacaacctggaaccaattgaaaagagaacacgactgattaatgacatacatgaatccgaggagaagcaacatggcatgatagcccgcttattgtcaaaattttgcagatgcagtgtcaaacagacactcctacaggtccacggccgcacattgactatatcagctgatgaaacaaacacttcatatgagtccgacatacaaccatacctagctgaagttctggccagaaa

SEQ ID NO: 12104 - DNA, 426 bp, Glycine max
  Clone ID: jC-gmle01810060c07d1
caaggtaagaattttattgcacaatgagaaggcagagaaaattgatggttctgtttctcagtacaagtttaaaagaaaaatgaagcaacaagtgttgtagtggtagtagtagtagtaagcatacaaaattacaatggcatggtacatacataataatttaattaccaatgagaatttgtttggctctcacttccatttgttggcaacaatgtcagccaaatccacaaccctttgggagtagccccattcattgtcataccaagcaatgaccttcaccatgtcatctcccatgaccatggtcaacgaggagtcaacggttgaggacacatcagtgcacctgaagtcaacggacacaagtggctcatcacacacagagaggattcccttgagctcattgtctgcactctctctgaatgctgcattcac

SEQ ID NO: 12105 - DNA, 501 bp, Glycine max
  Clone ID: jC-gmle01810060c08a1
ggaatatcgacaaactcagctcaactgttgtgtctgcccaaacaaacacgctagtaaaatgaaccatgttgctggtgagcgccgccactgaacactgaacactgattactcactccttcatggccacttcgctgctatctttcttcatttcgcccacaatctcaggcttcatattcaaagcctccgtcatggctaccaccatcgccgtcactgctaccaatgtggctcccgtcgccattgtcagcggcggaagagtgcgcagggccttgcacgacatgggcaccggacaagaccttctcgctcgacgaggagagtccgtaccactcaatttcgagggccccatttttgtgtgcaccaggaacgatgatcttgaatctgtgcttcagtctacacctttttatagatggggtgatctggtgttcttccagaacggaatgctggatccgaggcttgacagcttaggtctggaacatgcactctaagatgatggtttatgatgct

SEQ ID NO: 12106 - DNA, 418 bp, Glycine max
  Clone ID: jC-gmle01810060c08d1
cttcagaaaaggaatatctcttttaaacattaccaatatttgagaggaattttgcccgggcagctaggctccctccacataaattcttattttatgtatgtatacaaggaaaagtaagcatagctaataacaccactaagcatgatcttgtgaaaagaaattaataaagaacctactcaaataattgggaaacaaaaacaagtgatggatccttctcaagttcaatagttccaactatagaggtccttctacccttcaaaaaccggttgtaccattttgcagagagctttgggtatctcttcaactctggatcatccctatcaacgtagtataggccaaagctcgacttgtatccatctagcaacttgaacaaatccaggaaagaccatgcaaaatacccctttttatttgatccatc

SEQ ID NO: 12107 - DNA, 494 bp, Glycine max
  Clone ID: jC-gmle01810060c09a1
cgaaaatcatagtcacaggaccgaattcaaggcaaggctagcttcaacgcaacacttggaaaagtatgcattacatacattatactcacctataccaattgaacatgatttcaagataccaaaattttacaaaagacccttttcccttaaccatctggtaattcagtggaaagagccttctgcgaaattttgacgttcaaaaattatgtcaaattggtatagacgtgtatattttccaagtgttactttgaaatcattgccttgaatttgtttttcatactgaagaccattgcttatcaattatgagccaagattttatctactctaaagtgttggggacaagaggtataacatagagcatgtattattggctaatgtcaaatgggaggtcaatcgtgttgatgcaatagttgtgcttgcttattctagtctctttctggcctaagagttgtatgtgtttccattatttggattttcctatgtaaggtgctctc

SEQ ID NO: 12108 - DNA, 559 bp, Glycine max
  unsure at all n locations
  Clone ID: jC-gmle01810060c09d1
ggccgcccttttttttttttttttaatagaaagtagggatcaacacttgactaacaaaagtgacaatctggcacatatccaaatacatcataatatgtatacacgaattgtagtatacgataaaagctgtaagcctataactgtaaggtttctaaaattaattttgaaggagcaaacatataattgacatgaatgggggcaggatgcactaatgatgagaacaagtatgaaagatcatcatcaatcatcatatagacttcatcatccggctaattgaagagaatatgcctgctgctttgtcaagcaaaccttgcccttgctctgacttctgatcttcatcagcaaatagaagctgcaccatataggaaaggatacccaagagattaaaaattgtcatgtcgattttaatgatgcaagcctatcaaggagagtgactagattgggttcagggtctcttcatatgggttattcaccaacaaatttgctatctttcctttctctaatgataattntcctactatccaaattctctctgaaaaatttaccaacaggaataata

SEQ ID NO: 12109 - DNA, 489 bp, Glycine max
  Clone ID: jC-gmle01810060c10a1
attttatgtatagtagtggggaattatgggacaaaaaataaatccgcttggtttcagacttggtacaactcaaagtcatgattctatttggtttgctcaaccaacaaattattccgagaatatacaagaagataaaaaaatacgagattgtatcaaaaaattatatacaaaaaaatataagaatatcctctggtgttgagggaattggacagataaagattcaaaaaagaattgatcttattcaagttataatatatatgggatttccaaagtttttaatagagggtaagtctcaaaaaatcgaagaattacagacgaatatgcaaaaaaaactgaattgtgtgaatcgaaaactaaacattgctattgtaaaagttgcaaatgcttataaacaccctaatattattgcagaatttatagctggacaattgaagaatagagtttcgtttcgtaaagcaatgaaaatagctattgaattaactgaacagg

SEQ ID NO: 12110 - DNA, 506 bp, Glycine max
  Clone ID: jC-gmle01810060c10d1
ggccgccctttttttttttttttttttgcaagaagccaagagcaatcccttttcaattaacactattacattattgttatataatgaagctgattatgatgcttgcagcatcaataaagcagtatataatatatacagattttttgcaaattagaggatccaaacaaacaagctaatcaaacaattttgaaagaatatatttttttcttgctttgtaagaatatagctcctctattccctgttcatggtaacctgagtggaaagaaacaaaacaatataagtatggcatataattcattcaataaaaaatgaactataatggcagtgcaaattatactgaaaaccaccactaagatctaaataaacctatagtattataaaactaatcgaccagtagtttatgacaagaggcagtagttcaagacttaatagctagaatatggaggggtttgagtatttatcttaaatatctgaccatttacaatctctagaatacgacaatgcat

SEQ ID NO: 12111 - DNA, 248 bp, Glycine max
  Clone ID: jC-gmle01810060c11a1
gttgtgggttaagaagagttgacccatttcaaggttgattaataggagaatcattttagttgattgattgctgttaactaggaggctgatcaaggggtaattaattcacaataacactatcatatactctttccttaatataactgtggtatggcttttgaggctatagtgcctcttttggtatctttcttgtaaatttttccctacaatacaccttgtgtgcctattttcctatatttaccatatga

SEQ ID NO: 12112 - DNA, 512 bp, Glycine max
  Clone ID: jC-gmle01810060c11d1
gccgcccttttttttttttttttttttttttaaaaagtaatttgtgagatgataatggttttttattcttttgcacgagaccgtgcatagcaagctatgtcacagacatagccttaaaactaaaaacattaaagcagcacctaaataacagctgcaaccaacgagttcaacatacactggacataacaacagagaattcaactaatattggacataacagacagactcagaaaccaccacgaaggcggaggacaagatgcagggtggattccttctgaatattgtaatccgccaaggtacgaccatcttccaattgcttcccagcaaaaataagcctctgctgatctggtggaataccctccttgtcctgaatctttgctttcacattatcaatggtatcagagctttccacctccaaggttacggtcttccctgtcagagtcttcacaaatatttgcataccaccacgaagcctcaacaccaaatgcagagtggattccttctggatatta

SEQ ID NO: 12113 - DNA, 562 bp, Glycine max
  Clone ID: jC-gmle01810060c12a1
gatgggtcggtcgtgaacatgtcagtgcccatcgtgctggctattgatgatgcgcagaagcatcggatcggggataacaaaaaggttgctctttttgattccaagggagaccccgttgcaattctcaataatattgagatttatacgcattctacagaagaaagaatagcccgaacttggggaaccattgcccctggcctaccttatgttgaacaaactataaccaatgctggaaattggttgattggcggtgacctagaggtcattgaaccaattcagtacaatgatggacttgatcattttcgtctatctacgacacaactccgtgcagagttcacaatgcgcaatgcggatgctgtgtttgccttccagctccggaatcctgttcacaatggccatgctttgctaatgactgacacccgaaagcgccttcttgagatgggctataagaatcctgtcctcttgcttcatccacttggaggctacaccaaagctgatgatgtcccacttgattggcgaatgaagcaacatgagaaggtacttgacgatggtgttcttgatc

SEQ ID NO: 12114 - DNA, 500 bp, Glycine max
  Clone ID: jC-gmle01810060c12d1
gccgcccttttttttttttttttgtgctaattgttttttctccttgaatttgataaaataattattgattcttacagtgtacaagtcagagcgtattttatagtacaaacataattctgtgacttgcgtgtatgattatgcaacatataattcggcttttccatcaatgaatagactcatgaactcttcaccatccacagtttctttttctatgagaagttgagcaagcttgtgaaggatatcaatgtgagttgagataatatgtgttgccctagaatatgctctctctaccagttccctcacttccgcatccactacatccgcagttgccatggagtaatccttttgcgatgacatctgttgacccaagaatggatttccaccaggtccaccaatggcaacttgtccaatttttttgctgaatccaaatctctcaaccatctgccttgccactcgtgaaacttgcatgaagtcgtttgatgcttccgtggtgacatttt

SEQ ID NO: 12115 - DNA, 461 bp, Glycine max
  Clone ID: jC-gmle01810060d01a1
caaacactcactaactggttgctgaagcaggagcaagctggggtgattgatgcagaactcactattgggctgtctagcatttccatggcgtgcaaacagattgcttctttggtgcaaagagccaacatttccaacctcactggggttcaaggagctgtcaatgttcagggggaagaccagaaaaagcttgatgttgtttcaaatgaggttttctcaaactgcttgaggtcaagtgggaggacagggataatagcatcagaagatgaagatgtgccagtggcagtacaagagagttattctggaaactacattgagagcgttgacccacttgatgggtcattcaatattgatgctgcaatgtcaactgcgtccatatttgggatatcagtccccaatgtgagtgtcttgctgacatttgtgatgaccccacactttgcacaacagaacaaagatgcgtggtg

SEQ ID NO: 12116 - DNA, 189 bp, Glycine max
  unsure at all n locations
  Clone ID: jC-gmle01810060d01d1
tttttttttttttttttttttttttttttttttttttttttttttttggaaaattactgatatgaatgcttttattgccacaaaattatttccaatttgaacatgttcaaagttatacaaaatttttgttcaaaatgatctgcagattggtggaatcatttttttttttgcacaaaagggcggggggng

SEQ ID NO: 12117 - DNA, 435 bp, Glycine max
  Clone ID: jC-gmle01810060d02a1
tgtggatcttcccttacatcacttctcgcgccgaaacccacccttccattcgacgccgccctacgatctcgccgtttacctcaaaacgacggacatgttagaggattttcaagctcgaattttgattggaggaatcttattgtgaacgagaatgtgaatgcagatgattctatgcaggatgcagagaacagaaactccgaaccgtggaataatatgaggctgaatatgaatgcagatgcaaaagctcctccaaatgttgtgcagaatagagggaacataaacttcagaggctggaacaatgtgcgacagaatttgtatgctcctccgaattttatggtgaatagagagaacattagctccatatgccagaatgatctgggccataatgtggatgcagatgcagatgctcttccagactctatgcaggataaagag

SEQ ID NO: 12118 - DNA, 421 bp, Glycine max
  Clone ID: jC-gmle01810060d02d1
acagaaaattctggttattgaatcttcaaaattgtacaaactgtaaacaagaggcagaaaacgcagtctacaagtaacaactagaatcataatgaaatgtgctaaacaaaaatatcatcatgtgcccaaaacagcacctaaattgtgtcttcatcccagttaaataatgctttcttcaaccacctcaattgcaaacacctaaattcgtcgtttctttgggagtctgcaaccattatggggttttcttgtagtatcttcaatgtatacaattggatttctatcccctcgagaaccagcagtaaagccctccttccagctcattattgcattcctttttctcctaaaatgagtaaatccattcactttcatgacaacagatttcaatcccaaacccctagcctttcggccacaacttccgcag

SEQ ID NO: 12119 - DNA, 407 bp, Glycine max
  Clone ID: jC-gmle01810060d03a1
ggctgatgtttatagctttggaatgcttccgatggagatggcaagtaagaggaagaacctaaatccccatgcggatcattcaagtcaactctacttacccttttggatttataatcaacttggaaaagagacagatatagaaatggaaggtgtcacagaggaggaaaatggaatgacaaaacagatgatcattcgtacacttcggtgtctacagtataaaccaagcgatcgctcctgaatgaacagcgttctgaagatgcttagatgagacattgagagcctggatatgcctccaaagccttctgtcatccacatgagacactggagattgatcactgcatgtactctagcataacaatgtcgatggactgcattagttgtacatgctatcgcaaggaaatggtgac

SEQ ID NO: 12120 - DNA, 413 bp, Glycine max
  Clone ID: jC-gmle01810060d03d1
tttgtttttttttttttttttttttttttttttttttttttttttttgtttttttttttttttggggtttgggggttttttctttttctttttttttttttttgtttttttattgtatttggtggtactaatacataaatatgggggaaaaaaaaaaagaggggggccccccggtttataacccggggaaaaaaaaaaacagggaaaacttaaaaaaaggggggccaaaaaaaggggggggcccaacaacaaaaaagggggcccaacaaaaaaggcccccccccacccggggggggccccccccccccgggagagcccccaaaaaacaagggcccccccccccccctggggggacgaaagaaaggctcagacaaaccacccctccccaaagggaaaaaaaaaaaggggggggg

SEQ ID NO: 12121 - DNA, 532 bp, Glycine max
  unsure at all n locations
  Clone ID: jC-gmle01810060d04a1
gttaaaagccttagccttccctacaactccaaacacaaagacatcatcatccatggctgcctccgtctccactgtcggagctgtcaacagagctcttttgaacctgaatggttctggagctggagcttcagctcccagttcagccttctttgggaccagcttgaagaaggttattgcctcaagggtccccaacagcaaggtttccggtggaagcttcaagattgttgctgtagaagagaagaaagagattgaagagacccagcagaccgacaaggacagatggaagggtcttgcctatgatatctcagacgaccaacaagacatcacaagaggaaagggtttggttgactcccttttccaagctccacaggatgctggaactcactatgcagtcatgagctcctacgagtacctcagcactggacttcgccagtacttggacaacaaaatggatggattctacattgctccagcttttatggacaagctnngtgttcacatctncaagaacttcatgaccctgcccaacatc

SEQ ID NO: 12122 - DNA, 291 bp, Glycine max
  Clone ID: jC-gmle01810060d04d1
aaaaggaaaaggccgcaaatgcaatttaaggggcccctggaactcaaaattatagaggaagacggtccaatttgaaaaatatagtaagatcattttaaacttagcatcttttttttgcacctaacacattgggaatgctaaaaatgttacacgcaagttccatcacaacttttaacacttggtttagtacaacaacctttacgaacaaaaatatttacttgccaagtttgctttgccttcaattcaagactggaagaaagctcccctctgaatagcatcctcgttagcatt

SEQ ID NO: 12123 - DNA, 516 bp, Glycine max
  Clone ID: jC-gmle01810060d05a1
tgaaccttctttcagaagagatttgaatttgaatttgaatttgaacttgaaagtgaatatgactgagccaactttggctcataaagtggatgagaatctgaaaaccagcattgaaagtgagatgcatgaagacaccgaagaaattaatgcattgctttactcggacagctatggttattctacccaggatgaggatgatgatgatgaagttactagcacagggcactctccgagtacaatgaccactcatgataactgtgaagcctttaggggggaaaccgcataagaagttgcgagcattgccgggaaaaccaagaagaggaagcaattggatgggtattacgatgacatacaactcattgataccggctgctctcagaatctgaacaagtcttttgccacaggagatgatgcataatcgagatgttctagtaataacaacgaatgatcctcgtctggcactaagaagatgataaaggataagatacgcgacgttctgaggattctgcggagcat

SEQ ID NO: 12124 - DNA, 409 bp, Glycine max
  Clone ID: jC-gmle01810060d05d1
aaataacatcaaccaaagagatagtatcatccaatcctttaagtagtccatagtcatacaccaataacgatacacacaacacaaacccataaatgtagtaagtagggcacaactcagagaacacaaatatctgtttcccacatgcgtcctacactacactgctgcagtaactatcccggaggaaacttgtgaacgagtgtgcccggccaactgcaccaagttacctcgatctttcacagccagtgaaaaaaaaattcttcatctgatcaaacatgacaaggatacaaaaagaggaagcaagtttgggccccatatcagcgttggctcgttttttgagtccttatctggaataaccaaccacaaacacccttctcattcaaaatggttcactcaccaatcaccatactat

SEQ ID NO: 12125 - DNA, 337 bp, Glycine max
  Clone ID: jC-gmle01810060d06a1
taatgcaggtcgagctcttttgctggatcataggagaggtaaattaggagcctggctgcgcgagctcttgcctcatcatattatcttacctcatgagcggaggctgcaagagcgaatattggaccaagatcactccaatctcgcatttggcttttacagacaagcctacgttctcgctaaggcagttgctaccccacttgtcaagccaggatcagacagaccttagcggattgcatcagagcaaagtcttttcttacttggatggcagccttccgggcgactatggattggaccctctgggacttacagacgctgtatgaacaggagggaccattga

SEQ ID NO: 12126 - DNA, 299 bp, Glycine max
  Clone ID: jC-gmle01810060d06d1
aagacaaactcaattaatatgagctttatatataaaccaaaccaaaactcactgtactttgaggctacacaaagcaaggattgtaggaagcatgtggtataatcttgttatgtccataaatttggtaaagaaataagcaaaaatggtgaggtaaggttgagttatagactatcttcctactcaaaatctcacatcatcttgattcgtttgcagcttgaagtagaattgcgtatccctctagttgtcacagaatatggagctgatgctgatttcagagaaggggacttgtcgataaatgc

SEQ ID NO: 12127 - DNA, 383 bp, Glycine max
  Clone ID: jC-gmle01810060d07a1
agaagattgaggatcttcatcctgatatgattgtaaagggttatattaagaatgtcacaccaaaaggttgctttattatgctgtcacgaaagattgatgccaaaattcttctgaccaatctttccgaacaatatgttcaagaacttgagaaagaatttcctattggaaaacttgtcattggcagggctatatctgtggagcctctgtcaaatcgtgttgaagttacactgaagacgtcaacggatcccaatatacccaaatctgaaactatggatttgagtaaatttcacgtcggagatgtatatctggcgcggattaagcggattgagtcattgggataattcattcgactagacaacacatacatggatgagtaatgccct

SEQ ID NO: 12128 - DNA, 356 bp, Glycine max
  Clone ID: jC-gmle01810060d07d1
aagggtaacatttattgttaaaaataccattgcaagatgtaaaccaaatgttttgccgggccgttttttaaactgggtagcaaaacaattgcgtaataaacaaatactactttaccttgctatgaacttatttagggatagggctcaatcttatacactttgacattggtataaatttaatggggggccaccaccactggacgggtgttggggataaccaccttttctcatcatggggttataatttccaggcttgttggacccaggcggaaatccaaaagggggggggtggatttgaaccatacccataggcgcgttaatgccttcatagcctcccatacccatatgtgccatac

SEQ ID NO: 12129 - DNA, 417 bp, Glycine max
  Clone ID: jC-gmle01810060d08a1
gccctccttattgttgatggagtgtcttccatttgtgctcttgatttccgcatggatgaatggggagttgatgtggcaataactggctcccagaaggccctttcccttcccactgggataggtattgcggttgcaggccctaaaactattgaggcctcaaaacatgctaaatcacttagagttttctttgactggaaagactacctcaaattctaccagctaggaacctattggccatacactccttccatacatttgctgtatggtctgagagctgctcttgatctgatatttgaggaaggactcgaaaatgtgatcgcaaggcacagacgtttacgcaaagcaaccatacttgctgtataggcatggcgtttgaagaattgcacccaaaaggaagattggtacagtgacactgtg

SEQ ID NO: 12130 - DNA, 409 bp, Glycine max
  Clone ID: jC-gmle01810060d08d1
acaaacataacatttattacaaagtgaagccagaaatacagcaagtgaaaactttcatccttaagaactacaactacaaggacaaacagttacctgaatttattatttctcgcagcatgaaagccacgatagacagtcaagtcaagcattatgatacatcagaccccaaaataccaacaacactactcagctgagcagttattatatcgtactttcacatgaaagtgtcataaaggcagataaaagcatatacattcaacacacacgaccataaggctcaagcacaaggcaatagtatgacttaaacggtgacacatttcagcaattattcttaaaacactgcagattttctgaatttgttcaaaatacaagagccttgttactgtagaaccacacattcttgtgaacc

SEQ ID NO: 12131 - DNA, 457 bp, Glycine max
  Clone ID: jC-gmle01810060d09a1
cgctacacaaggtgatcaatatgagtccgggacgaagcttgcttatatcttttatatattcactttgataacgaagcttatttgagcgaaaaacatgactatctcagctacatacgagagcatgccacacacagtgatcagcatgcgacccagagagcactaagcgcatgtgggacaacactacacgcatgtaagtttcaacgtctagattccaaggcagaaggtagtgatagcaagaccgacggtagccaaagcaggctcttgtgaatcctaggatggctacagagaagatccatttaatctacatgtagctaagggtgcctatgaatagctcaagggtgcccatgtgttggtataagtcacataatatgactatatcacgcattagttctactaaaacacacagtgctcctagaatagaaataggctttatgagcagtcagaggaaaaatttgta

SEQ ID NO: 12132 - DNA, 569 bp, Glycine max
  Clone ID: jC-gmle01810060d09d1
ggccgcccttttttttttttttttttgccttacttagctatttcttatcattatcctcagctatggcaacaatttcagtgttggtttgccccagcaagctgcttatggatcgagctttcaccattccaagcttcatcctcctctttgtgacaatcacttgctttttctcatcattgttttcagcatcatttcccaaagggtactcttcatgagtgacacgacttgtagtactagactttgttgtttgtttttcgaataaattctcggattgaggcacaatattgatattgttctttggtgcaacacttgttgtgccaatggacttgtttctcacacttgtcatgcttctcaaccttcctttccctaagtgatgctcgcaaagagagtaacccaccaaggtttgttggcaacacctccatcctctcccatttacacgactgcaccttgaaccttccattagtgcaccaccccttaccctcttcttaccaacgttttcttgttcgggttttggtgctcttggtgccacctcttcctcgttctctcttacctcttcttcctcttctttttct

SEQ ID NO: 12133 - DNA, 509 bp, Glycine max
  Clone ID: jC-gmle01810060d10a1
ggataagttcaccaattccatacttctatccaatttatcttcttattctgttaatctggagagagagaagggatgaagctcgttgcgccgagaagtatagagagatatgggccgagtatcgtaaacttgttccatggagaatattgccttacgtttattaggatgaaaaaaaaaagggcttcaccatgaattcttcatcttgccgatgttattaagcacttcgatgtaaattggttcttgatcttgtggtttcaatcttggatcttttcttattgagccatgtagctgcaggagagtgtttcgagggatttatcttaccatctatatttgcgtatcattatgctgcagcctgcaggccttcatttttcaatggccaactctttttgacttgttctatttgcttttagatgagaatttcatggtcaaagctcctaggcttaaaaaaacagtgtcatgttctatgggaagtgcaggaagcaattcggggactgcacgaagcaattgccttt

SEQ ID NO: 12134 - DNA, 401 bp, Glycine max
  Clone ID: jC-gmle01810060d10d1
ggccgcccttttttttttttttttttttttttttttttttttttttttttttttttttttttttttttttttttggtttttttttttttccagggaaaaaaaggggaaatttccggccggggaatcctttttaaaaacaccttttttttttttgggaggggggttaaaccccaataattgtcccccgaaaccacccctttaaaattttggccccttcttttttccccggaattgttcagggggtttaaagggaacctccaaaaatcccgggggcaccatttttttttactgggagaatacttaaggaactagccttgggccctgattcacctttttaataaccttaaggggggggtgggccaaattcaccctgtgaaccattttttctttttttttaaaaa

SEQ ID NO: 12135 - DNA, 601 bp, Glycine max
  Clone ID: jC-gmle01810060d11a1
gttcttggaaacaagtatcaaagcaaattgcttgaagttatagatgccagtgagttgccagaatttctgggaggtacctgcacttgtgaagatcagggaggttgccttagatctgataaagggccctggaaaaaccctgatatattcaagatggttctcaatggtggagcatggcggtcaaagcaagttgtaaaagttcttaacaatgaaagaaaggttattgtgtatgccaagccaggatacccaacggtaaaaggcagtgacacatcaactgctgaatcagggtcagaagccgaagatatatcctctccaaaagcgatgaagagttattcacaccttacgctgacccctgttcatgaggaagctaagatagtaggaaaaacaagctatgccagcaacttgtctgggtatgatgaatatattccaatggtagacatacctgttgatgctggttggaagaagcaagcatctctacagaggtcttacacctctaaaggagcacctactactctcgacactcagaaaactcctgatgggcttcaagctcggatgtgggtagcactgtctggcttcttcttgaccgtattaactcttttacgtc

SEQ ID NO: 12136 - DNA, 542 bp, Glycine max
  Clone ID: jC-gmle01810060d11d1
gccgcccttttttttttttttttttgaaccaactcgatttatatatatatatatatatatatataacaacgtgatatagctttcactttcaaatataaattgaaaaaaaaaaaacactttcatttatctataaagtcttcgtacatatatagcaacataatctttatataaatctctttaaatttaggctttgtgagatccaagctctacctgatgagtttcatcaaggaggtccacatttcccttgtactgatatcttcttgcaacatatataaaaaaaactaggttgagggaagttaacccagctattaggtagtaaaagtagtctagcctcccagcatttatatcatctgttaaccaatccggatggctatgtgttcttgtagaatgatgaactatgttgactattatgctactcacatagctagacacaccaaaagaacacgagaagaaggaattaccaatgcttctcatatgctcaggaaattgcctgttgaagactcaatttgtcctataatattgaaggcctcacatagacccat

SEQ ID NO: 12137 - DNA, 570 bp, Glycine max
  Clone ID: jC-gmle01810060d12a1
tggaggttcatctgtcaccttgagtgccatgagggaggcttggaagtttgcaaagtggtggattccacttgctgcatgagatacagaatagagtgtaagtgccccaaggcttacttttctgcttcagagaatggtggtggtgattctgatgggagcattgagtttcttgcacatagaccaatgatcaaggaaaaatatgacgcttatcaagaagacctttaacgagtacaagaagaccactctggacatacaactggcctaaagggtcaaaatgatccacctattattgaggtgatacaagagaatagcagtagtgaaatagagcaagtgaaattgcctttccttgtctatgtctcccgtgagaaaaagccttctcatgcgcaccatttcaaagctggggccctcaatgtactttaccgtgtctctgctgtgataagcaatgctccatatattctagtgctggatcgtgacatgttctgcaatgtcccagcttcagcacgccaagcattgcgtttccaccttgatcccaagatgtcactttcacttgcgttagtccaatttcctaaaaat

SEQ ID NO: 12138 - DNA, 537 bp, Glycine max
  Clone ID: jC-gmle01810060d12d1
gccgcccttttttttttttttttgaatggaatgtcttgtatatacaataaacgacatggtacgatgcaaactagtaagatcaatatacaatttgcctctagggcgtatacttaatttaacttggaggattgaggaagccataattagaatgaaaatgtgaaaactaaaagttatttggctaactattgtaccaatggttgatgaaaatttcttttctccttacaaaacaatgatattcactttatcatgaaggaacagtttcttgcagcttcattaccctccaatcatgtttctgtacaactcgtactcgtatatcttatgcttatgagaaaaatatgaatggaaaaagagatcaagaatatatatatatatatatatatatatatcatgcatatgcttgaagcccgaaggagttgaatttggtgggaacgaattatatcatgttctcaaacttgtcaagtttcttcacccgttgcatagaccttaaaaatagagcccctaaaatgcctgcaccaatgaatgatccatttgcaaaag

SEQ ID NO: 12139 - DNA, 474 bp, Glycine max
  Clone ID: jC-gmle01810060e01a1
cgtaataacaataaataatcataatagtggcacactaattcaccactttgcacacccaactgcgtaaagctcaaagctttttgacagtttgagcatttcagacaaacatgggggatgatggaaagaagattagtggagagggggggttagtgaaggctgagccagggctctatacggggtcgaagccaacagcgatggacctgttgataactagatcgcaacgacatcggtgatacgtctactggtgcttaactacatcttactttatgcactgatatgtgagtgtcaatccatttacaagcgacatgagtgttgatcggctcctcatagcaggatgagatcttatgccaaagctagtttacctgtacaagcaatctatcaagactcacaggggacgacaaatactcactgatagtgatgccaaagctgtacttggtaacagcaggcggaccttctatcagatagcactgtaga

SEQ ID NO: 12140 - DNA, 341 bp, Glycine max
  Clone ID: jC-gmle01810060e01d1
aaaaacaaaaataatatttaatcattattgattcaatcactgttattcaaccaatacctccattgactcaactaccaatccggttttaaaaacattggtttaatgagatactggatatatatggtacaatcgattatttgttgtatacaaagactgaggcaggacggtacagtgaggctgccaaaattatcacagtttaccctgctcttgcagttgttcctctgtcacaaagaaggcatggaaaccatatggaactctatgcgggaattcgacaactgcaacaggatctgctgacattgtttttgcattgatgacatgcacaaatgattttccggtatttt

SEQ ID NO: 12141 - DNA, 185 bp, Glycine max
  Clone ID: jC-gmle01810060e02d1
aagcacacatcacatttaattatgattgttaaaatgactgggttccagccacgatctacattgattcaactcccgactcggaaatcaaaacattggataaaagagaaactggctatttatggtacaataaaatgtacggtgactgcagggactgcggcctgacaagtacacatgaggcatggcaa

SEQ ID NO: 12142 - DNA, 440 bp, Glycine max
  Clone ID: jC-gmle01810060e03a1
aaaaatcgaagaattacagacgaatatgcaaaaaaaactgaattgtgtgaatcgaaaactaaacattgctattgtaaaaggtgcaaatgcttataaacaccctaatattattgcagaatttatagctggacagttaaagaatagagtctcgtttcgtaaagcaatgaacaaagctattgaattaactgaacaggcgggtacaaaaggagttcaagtacaaatagcaggacgtatcgacggaaaagaaattgcacgtgttgaatggatcagagaaggcagagtttctctacaaaccattcgagcgaaaatcgattatagacgctatacagttcgaactatttatggggctttacggatcaaagtttggatattttctgaataaagaaatacttattattctctatcttaaatgtgctatattgtatcttaaatgtgctata

SEQ ID NO: 12143 - DNA, 485 bp, Glycine max
  Clone ID: jC-gmle01810060e03d1
acatatataactaaagaatcttgttttgttctattatttgttattttataatattctaatgaatctttattttcctttttattattagttattagaatattttttattattagaaagaataaatagaattggcaaaaataaaaaaaaaattcaataaaatcaaaattatcgcgggcgaatatttactcttttattatcaatcaaattcagatgtaatgtagggcacaactcctaaaaaaaggattgctttttggtttcttccgccatcccacctaatgaatcattaagatttgtttttaataaaatcttaagtatttgcaggtttcgtcgttcccatcacttctcgattaatggttaggtctgaattcgacaatggagcctttctcatatcttaaaattaataatcttttttttttttcaatattgaatttgttttttcgtgaatcaatattctcaagtttttattgattcagagctcttaattt

SEQ ID NO: 12144 - DNA, 498 bp, Glycine max
  unsure at all n locations
  Clone ID: jC-gmle01810060e04a1
cgagttgtatctcattttccccatcgcaatcgcattcaggccttgcttagaggcaggttcttgagaaatgatagatcgattgataataacaggtccacttccattgcagaaagtgaattaggcttattgagacaaaagcagactgtatcaggtctaagggaaggtttcgtttttagaaaggacaattttggttgtagtcatgcaaccagtaacacatctgatacctcatccgagaacgacattgatgttaatacaattgaagacactggagctagcagcttacaagcagtcccaactgtacattctcaacaatctgaacctaataacagggtaagtgatggacttgagatatcatgtgatcagatctgctcaaaaggaaccatttgtgagaatttagattggcaaggctctactgctcatgtggaagcangagatttggaatcatctttcagtaccaggggtgaaagaggagatggcacttgaggaaatgttgatatg

SEQ ID NO: 12145 - DNA, 344 bp, Glycine max
  Clone ID: jC-gmle01810060e04d1
gaaacaaaatacttttttattcctttcagaatcatggccacaaaaagagacatcaggttttctattggtgcgctcgacataaatacagtaatcacagcaagaacagaaaaaattattaaaaataaaggtacctggaaacgtccaggagatagaacttgttaggatcctgtattctgttatatgtgtgaccctttaatgtcaaaactattgtatagaataagctcgtatcacttccaccactggtgcttgacacattggacactttcttctactttggagcaaatcattggcacattttgaacatgtgcacatgtgcccacatctgatgaaccagttgagcgatt

SEQ ID NO: 12146 - DNA, 453 bp, Glycine max
  Clone ID: jC-gmle01810060e05a1
cgaaaaaccaacagcgagtgttgtttttgtttggtccaggctggaccagggaatgaatagagatgagaggctttcggttgaagagaactgagttaagcggcgaagccaaacgcagaatcggcggcagaaattgccaccggaagcacgtcgaagacgggtgaaccaaacacaaaattccatccaccacttctcttttcaatccccaactcaaatctgtgaagaaaatctcaatttctaaattgtaattcttagcactactgctagtagtagtaaaaaaaaacaattagaaagtagtagagtggatatttttctttttttcgtttgttttacttttaagatgggtgagaagagcaacgttggcggcgacgcgattaacacgacactgcttcacgtgaagtacgagctgggccggctgttaggccacggaaccttcgcgaaggtgtaccacgcgcg

SEQ ID NO: 12147 - DNA, 294 bp, Glycine max
  Clone ID: jC-gmle01810060e05d1
cctcgaacaacggcgacaaatcgaacccctccgagagcgaaatgatgtgaaaagcattcatcgtagtagaaacctcctgctcatgctgtttaatcttctcctccagatccaattcctctcttttctttcccatcaagttcttcggcacgggtttcttgaaccacgacgagtccatgatttttgaaattgtgattcgcgtgttcgggttggggtcgaggagcttggtgatgagcctccgcgcctcggaggagaaccacggcggacacttgaagtcaccgcggtaaattttcttgt

SEQ ID NO: 12148 - DNA, 470 bp, Glycine max
  Clone ID: jC-gmle01810060e06a1
agaaaatcctaaaggattcaagcttgagttcttctttgataccaatccttacttttcaaataccatcttgacaaaaacatatcatatgattgatgaggacgaacctatattggagaaagccattgggacggaaattgaatggtacccgggaaaatgtttgactcataaggttttgaagaaaaagcctaagaagggttcaaagaatgctaaaccaattaccaaaaccgagagctgtgaaagtttcttcaattttttcaaaccaccagaagtccctgaggatgatgttgacattgatgaagatttggctgaggaacttcagaatcagatggaacaagattatgacattgggtcaacaataagagacaaaattatgcctcatgctgtatcatggtttactgaggaggctgttgagggagacgagtttgaagacctgtaagatgatgatgatggagatgacgatgaggatgatg

SEQ ID NO: 12149 - DNA, 536 bp, Glycine max
  Clone ID: jC-gmle01810060e06d1
aagccacagaattataatattatacaaagttagccaaatctggaagttgttctttggcagttggacaagccctgaattagctaatatcttgaaagtagtaactccccctgccttccgctatgttttcatgatgttcattactataaggtcgagaaatccaaactatcacaataaataacctgtgcaatatcttctatgggagtcacaagctataagtactgttcaccattgtatgacaagtcacccaacacaaaaacaaaagcaacataacaatgaataaagaaagtaaaattactcaccaaggtgttattctctttcaatcatctacctttccccatcattcattatcatcaatattttcatcatccttcatgtacttctcttgcactgctgcaactctataataatcccaattgacaggaccaaccgcaatcttgctaaattcaactgcacttgcttccatcccaacaaatatgtacccattgcttttgtctatcagcttcactaaattccctacactctctttgtcctgaata

SEQ ID NO: 12150 - DNA, 368 bp, Glycine max
  Clone ID: jC-gmle01810060e07a1
ctctctctcaccaaagtcttcctataacgaaaaagataagaagagcagttttccctcaccaaagaagaagaagcaaacaatggccgatcaacttaccgatgaacagatctccgagttcaaggaagccttcagcttgttcgacaaggacggcgatggttgcatcacaaccaaggagcttggaactgttatgcgttcattggggcataacccaactgaggcagagctgcaggacatgatcaatgaagtggatgctgatgggaatggtaccattgacttacctgagttcctaaatctcatggctcaggaagatgaatgacactgattttgatgaggcactgaaagatgcattccggagtttcgacacggac

SEQ ID NO: 12151 - DNA, 155 bp, Glycine max
  Clone ID: jC-gmle01810060e07d1
cccccaaaagtgtggttttttaaaaaaatcagaaattaaagggggggaaaaaaatatgcacatattttctacaaaaaagggcgaaatttatccctttcccaaatttgggggggggcttttttaaaaaaaaaacccgtaccccgtttttttttttt

SEQ ID NO: 12152 - DNA, 373 bp, Glycine max
  Clone ID: jC-gmle01810060e08a1
cgctggtggtcatacttttttaggcaccaccatttggacttggttgatatgtgagaattaaaccaagtgtcttctgtatcattcatttgttgcaacttgatatctataaacacccggccattgttttgtgattcatgtttgtcctaagacctaaagttagcatgtgttaaaaagtggaataaaatctcagtttaagtcctctggtttcatagaatgtagaaaacaaaagatgaagaggattgatgtggtgtctttctagctgtcgtgtattcataaatcatgtatgatttgggaaatcgttgtatttttacctgtgggatataatataaatttacatttgttgctgctctgtattattaaaaaatagaaataa

SEQ ID NO: 12153 - DNA, 269 bp, Glycine max
  Clone ID: jC-gmle01810060e08d1
acacggaaaaaagtgacctgttcaggttctttttcatcttagcttcagttcacaaaatatcaatttgattacaaaatatatttatgcattaatacaaaacagaatgtttgaatttcatgtttaaatatatattatgacaacagaggttttaaggagtctaagcccaccatggagcatcacctgttctgaaatctgtttcaacccaaggaacaaacacgaccttcccatcatctatatcacaatgtgctaatgccagagacaatggagca

SEQ ID NO: 12154 - DNA, 530 bp, Glycine max
  unsure at all n locations
  Clone ID: jC-gmle01810060e09d1
ggccgccctttttttttttttttttagaaacataaactcgttgcaatttattgatcaattaaacatataccgttgctatgtgaggggcaactacacaagaattcttggataaaataaaaaaagtctgtacgttatgattcccattcccatgagcaatattttgcatgggaaagtcaaagtatcaactacggataacgttaggtagatgatgctcatgagggtcaaattccactttgagaaggactactactagcgcgggaagaagaattgatgatctcccgacccagttcatttattttgctgagtagaagcatttgctctgtctccaactgtgttatatacccttcctgtgtatcctctagactttctaactcactcaaagtgtgttgttaatccttcaagattttcatcctctattaatgatcgaaactttttcatcatctctctcatctgggtaggaattnggtgtgatttacttaacgaagagggttgagagtctagagtatgtcttgtttgcatttctggaactt

SEQ ID NO: 12155 - DNA, 540 bp, Glycine max
  Clone ID: jC-gmle01810060e10a1
tccatcaatttccaaacctaccctcctaatataatctcaagaaccaacaactccactgaggatcttggcctttcccttcactccttccaagaccctggtttgattcatggccagacccaagcaggtgcaaaccagacacaaacacctttcaatgaccaaagcctcttctctggctcaactcaagtggggtttgaggccaattaccccaggattgtcacttggaacagtgatgcaagcatagatatgaacagaaccgggttcatggtcaattcaccagcacttctaggccaaggtggttctgctgcattttcccaaagggggacccttcagtccagtttctcaccatcacttcgtccttggagtgagattccaatggcttcatcagaacatcacaagtcacagccaattcaacaagcttcaatctttggcagcaggtttctgtctgatgcattgccggggttctgcattcctgctagaatccaaggagaggatggagttggtcctgacaagccatcatcttcttctactaattctcatcac

SEQ ID NO: 12156 - DNA, 507 bp, Glycine max
  Clone ID: jC-gmle01810060e10d1
ggccgccctttttttttttttttttttttttttttttaacttgaatacacattattatccatattttaaacaagattattacacatgaaacagtcacggccattggtctaacatttatagaaagaggtcataggagcaaattgaacgaaaccagcttcagttaacatcaactcgaggaacctcaaactttagatttggaatcatagtttcaaatgcttcccatgaaccaggtcatgtcttaggagctaatagaatgaagccagtttaagttaacctcgactcgaggaacctctaacttcagatttggaagcatagcttcgaatgcttcccatgaagcagctgtctcttcatcacataccaccaccttcaaattctcaagattggttactgagtatggcaattcacaccttgcacagcttgtcatattgagattcctgagattacatagatcaccaatgtcctctggtaaacttgaaaggcttatgcagtttgagaggtcaagaagtc

SEQ ID NO: 12157 - DNA, 594 bp, Glycine max
  Clone ID: jC-gmle01810060e11a1
gtggctaaagaggtcaagcatccattcaggaatcttctcaagcgcaggaaccgaccccaacttgtcatttccgttgccctacagatattccagcaattcacaggcatcaacgcaatcatgttttatgccccggtgctgttcaacacgttaggattcaagaacgatgcatccctgtattctgctgtgataactggggctgtgaacgtgctctccactgttgtatcgatctactcagtggacaaagtgggacgtcgcattctgttgctggaagctggtgtgcagatgttcttgtctcaagtggtgattgcaatcatactgggaataaaggtgacggaccattctgatgacctttcaaaaggcattgcaattctggtggttgtgatggtctgcactttcgtgtcttcctttgcatggtcttggggtcctcttgggtggcttatccccagtgagactttcccattggagactcgttccgctggtcagagtgtcaccgttttgtgttaacctgctcttcaccttcgtcattgcacaagccttcctctttatgctctgccacttcaaagttggtatcttcttgttcttctctggctgggt

SEQ ID NO: 12158 - DNA, 620 bp, Glycine max
  Clone ID: jC-gmle01810060e11d1
gccgccctttttttttttttttttacgcaatgtaattttatagatcaccgcaaaaatgccttctgatcctggtgctacgcgtacattttgcacaagctaaagctagtagattatctataaaaactgccgcgcaaaatggcttctacaacttgtctagactcctagaatttgaaggtatatatgggtctatatacaagaattgttttggatataggaatggtttcaccgccttgaaaataccaccaagatcaacatggacatcgagaccaccattttgaatccagaagtgtcccagaaattctggtttagcttatctgcggctgcaacttctctttgttgctttgcagctaattgatctctcagttctttgatagctttgtcccgtcgttcacccatcctttgcagttttcgtgtctgagaacgagcttcctgcagacagaattctaacttcaacactttcttcttcagctcttgatcagcacgccgctgtttctccaactgtgactctaattccttagtcttgagcttccagtgagcagacatgatcttaatttcatccttaagttttgctatttcatcatccttaacacctagaatcttattcatcttctcaaaatttt

SEQ ID NO: 12159 - DNA, 520 bp, Glycine max
  Clone ID: jC-gmle01810060e12a1
aattaaaaaagaagggaaagtgtacgagaaaattatctctctctatatatagatagataaatgataaaagcctcgagggtccgtcccatccctgaaaatgctatgaggtgttgggaaatggttgaagtagttgaataggaagatcgctatgactatagctcttggtaaatttaccaaagatgaaaatgatttatttgatattatggatgactggttgcggagggaccgtttcgtttttgtaggttggtccggtctattactcttcccttgcgcctatttcgccttggggggttggttcacaggtacgacctttgtaacttcatggtatactcatggattggcaagttcttatttggaaggctgcaacttcttaaccgctgcagtctccactcctgctaatagtttagcacactctttgttgttactgtggggtcctgaagcacagggagatattacccgttggtgtcaattaggtggtctgtggacttttgttgctctccacggcgctttcgcattaata

SEQ ID NO: 12160 - DNA, 566 bp, Glycine max
  Clone ID: jC-gmle01810060e12d1
gccgcccttttttttttttttttttttttggcaaatttacttaaatatcatcacccctacctcccttctcttttcttttgtttttttaacaaagcatcccttctccttttcttctcacacctcttaactctttcatatctcactccaaaatcattgtgcctttgatattttgtaatactctttcacgattcaccatcctccttttgctaataaaagaagaaaaaagtgcaagacatgcccctctcttagcagcctacacgagagccccttacataagaaaatccaaataatggaaaaacatacaactcctaggccagaaagagactagaataagcaagcaaaactattgcatcaacacgattgacctcccatttgacattagccaataatacatgctctttgttatacctcttgtccccaacactttagagtagataaaatcttggctcataattgataagcaatggtcttcagtatgaaaaacaaattcaaggcaatgatttcaaagtaacacttgtgaaatatacacgtctataccaatttgacataatttttgaacgtcaaaa

SEQ ID NO: 12161 - DNA, 441 bp, Glycine max
  Clone ID: jC-gmle01810060f01a1
ctttatcatttgatctagccatcgaagttcttgttgaacttgtgactaaacatgagggagtgccccgaattttgttatgcaaagtacattatctgaaggaagtacttctttttccagctctttctaggggagacataaaagttattggtggtctttcttgcttgttgtcagaaattgggcaggctgctccatctctaattgtagaagcaagtgcagaggccctagccttgattgatgccctcttgagctgtgtggcatttacaagtgaagattgggagattgcagactcaatactgcagctttggaccactcttgcaagctatatacttggcattgatgaagatgatgcagaaagttgaaaacgcgttgaagacattttttctaccgtgatctcaacattacttgattcactgacattgcgttctcacgtggatgattcta

SEQ ID NO: 12162 - DNA, 321 bp, Glycine max
  Clone ID: jC-gmle01810060f01d1
agaatataaatgtcattaatttactttccttcaaaatcactataattccatatgcggatgatccttcatggatatcctgtacaatttgataaaaagggggcatctatcctaaaccttttgagggccaaaattgtgggcatatactactgtacagagggcaaaaatacagaaaaataatagtaatggaaattggtgaggcattttaaatagggcatcacagttgacaatacgcgcatctatacatatctcaacaatttacaacaaataatacaggtaccgttagaaaagaccagaagtgcctcgtgactcttgatcctgcat

SEQ ID NO: 12163 - DNA, 418 bp, Glycine max
  Clone ID: jC-gmle01810060f02a1
gtctcggaattcggctcgaggcggacgataccgatgggagctgttggctctaaggattttaggacaaagaaaatttttgtaggtggaattccttcaaatgtgactgaagatgaatttagagacttctttacacgctacggcgaagttaaagatcaccaaataatgcgggaccactccaccaaccgatctcgtggctttgggtttatcacatttgaatctgaagaagcagttgatgatcttctgtccatggggaacacaattgactttgctggagctcatgtggcaatgaagaaggctgaaccaaagaagccaaactcagcacctgcatcatacaagcgctataacgactctaggtcttcatacagcagttggtggatatggagatgcttatgatggatttgggggcgcttatgaatgg

SEQ ID NO: 12164 - DNA, 418 bp, Glycine max
  Clone ID: jC-gmle01810060f02d1
ccaaaaatattcaaccaataaaagtgttagaaagtttatctcatgtatagaataacaaaccagcatggagtaattaaatcaaataaaaaacaaaagatggtaattagaagcattacaagcaacaatgaacaagattgagaatacacccgtctacacaatttgcagctcttacatacataaaccagactcaaagggggagccaaatagaaaatttgtttggactttcaagaaatgggtatgctcataaatgaaagtaacgttgacaattttttttttttgaaagagtatataatctatctgatgaacaaaacacaaactacaaacctgctttgatgctagacatattagtcctagactataaatgcttggtttccaatcttatcttccataaggatgatatcgaccagcgctgtatcct

SEQ ID NO: 12165 - DNA, 489 bp, Glycine max
  unsure at all n locations
  Clone ID: jC-gmle01810060f03a1
attgtgtttacgctggatgaaggacctggagtactgtttaaggctttggcagtatttgcattgagggacataaatttaaacaagattgaaagccgaccacaaagaaatcggccattaagagttgttgatgactctaacactggaactgccaagtatttcgattaccttgtctatattgattttgatgcgtctatgactgagccccgagcacaaactgctttaggacatctgcaggaattcgccacatttcttcgggtgctgggctgctatcccatagatacaaccatatagtctatagatagctatctgctttttattggtcaatcttcaatgaatgtcattatattcaagcctgaaactttgaagagaatctgcagctaccttcatgtccaaataaatcaagagctgtcagatggtcaaaaatgtatntacattacatagtagttagcctttattcattttgatagtcagtttatagattgacacgtg

SEQ ID NO: 12166 - DNA, 424 bp, Glycine max
  Clone ID: jC-gmle01810060f03d1
agttctgaatattgattgaatgaaaaattacaatacttgtctctgcttctcttatatatgtgtataagagagttagtataatcacacgtgtcaatctataaaactgactaacaaaatgaataaaggctaactattatgtaatgtaaatacatttttgaccatctgacagctcttgttttatttggacatgaaggtagctgcaaattctcttcaaagtttcaggcttgaatataatgacattcattgaaaattgaccaataaaaagcagatagctatctatagactatatggttgtatctatgggatagcagcccagcacccgaagaaatgtggcgaattcctgcagatgtcctaaagcagtttgtgctcggggctcagtcatagacgcatcaaaatcaatatagaaaagggtaatcgaaatact

SEQ ID NO: 12167 - DNA, 475 bp, Glycine max
  Clone ID: jC-gmle01810060f04a1
gttctgcaaacaacatgctctttactcaccatgtatctgatgcaaataaactcatcaaggacttaactgatttggagttcagatctggggcctcaccaattgatagtcaaaaacttattgcacattatatgtcagccttggatgctgaagttacttttcacaagttttaccctcaatttgatcagttccatccactgcacttctttaccagtcccaattgatgtataatctcagaaaatgcaacttgttcttcgtttggaatcaacactgttggaattatcagggcaccatgcggcgatggcaaggaagctagtgtcttggtaacgccttacaatccaaataaagttggtctgggtgaggctttttccttgggcattgcttactcagtgttctcactgctttcacgtgttacttggctggcaaaagatattgaatggcttgtggctgattcacaatatggagaatattctggagt

SEQ ID NO: 12168 - DNA, 329 bp, Glycine max
  Clone ID: jC-gmle01810060f04d1
agtcaccaaaattcataccataaaaatcttcaaatgcacctttcagtaaaacaaatgcaactggaggaaacacaataaaacctaaagcaatattacaagaggcccttagtaaggttctccaactcctagcttgaaaatcaagcttcaatggtctagccatcagacaaattgggacaatatgtaaagccccaatctctgctgtagcaaagttaatgacggacatgagagacaaaccgatgaatgcagttgatatagttacagactttaagctagcccacttgtttttctcaagtcgagatgcagcagcttaaaaattggtgaacccaata

SEQ ID NO: 12169 - DNA, 537 bp, Glycine max
  Clone ID: jC-gmle01810060f05a1
gaaaatttccttcctcactgttcactctgtttcctcaaacctcaaattttcaaaaccaatctctccagccttcatttatctagtaattggtgttgagggcataacatcttcctgaatcctgaagttctaagcaattgttgaatcttgaagaaatcagcatgcgttggttgggtcttttggttgatgtgtatcgtcaagttgtacgcttgaacttatattgcaaagttattctataggtctccaataccataaacccttttactttgttacttttggagtttagtcccttatttttaactactgccatggaaggcaaccactgtttgatcatttcttcagatgagtatagaattggctgaaggttaggaagtgaagatagagcctggtattttgtatcttcagtgttatttgtcatcgtctcatataggtctatagttctagctgattttgatttgataattagcttggttccttcattatcacatttcattggggcatactcttgtgtgcgcattacattctagtgtggaacgatca

SEQ ID NO: 12170 - DNA, 380 bp, Glycine max
  Clone ID: jC-gmle01810060f05d1
caaccagaatacaccactgcgctgcccttacaatattcacaatccaaatcattcatacaatcacacaaccgacagataaataataatgaaaaagaaacctagaatactcaacccacctctcaattacaacgtagaaaagagaatcacctatgattccaccctcaacacgtaaaacaaagtaacctttactactaccacaacatgctatgtatccaacaaatggggccccagcaggtcatgatgaaaacacaacaccacgctcctaattcaagcactccccaacattgaactttcttcttggtactttagagtctacgctagcatgatatgcgtacaagcttggaagagaggagagaacaaagcacaaaatcaggaatgaa

SEQ ID NO: 12171 - DNA, 400 bp, Glycine max
  Clone ID: jC-gmle01810060f06a1
gtaatcctatacgtacttcttgctggtttattacccttccaggatgacaacctggtggccttggacaagaagaatttaccgtggagacttcaaacggccgtcgaggatctccttcaaggcgcgcaggctaatgaccaagctggtaaacgtcaaactgacctgcccaataacaattacagtgctcatggactcatcggggatcaagatacccgtgccaaataactggatgcgtaagaaaagcgaggaataggatccggaagagaagatataactgcatgatccggatgggactactgctaggaatgcatctgacatgattaccctctccgaggggctcgagctggaggcgatgcacaaggaaaagaacatagaagagagccatttactgcatgttaccaca

SEQ ID NO: 12172 - DNA, 331 bp, Glycine max
  Clone ID: jC-gmle01810060f06d1
aaaacaaaattaaacgcagccatgaatgacccatgagccacaccaatcaatttgcaaacatattcacaatcacgccaacatagcaacaacattacccacgagcacaacaacacgcagcacatgtacctgaatcatcatcgacaacaactcctcgatgtccatttcgggtcattactgcattcgccttttcaacaattcccctttctgggtaaaagacgacacaccccagaggccaaaacataacaaagaagcaggcaaataactaaaatatctcagtcctgaaacaagaattaacaaaaacaacttcaaagaaacgacaattagcatggga

SEQ ID NO: 12173 - DNA, 355 bp, Glycine max
  Clone ID: jC-gmle01810060f07a1
gcagagacttctgtgtttataaatcattgtttgggatttagctctattctttatggctctgttggtgattgaacagatgctgatcttcgccaaaactttgaccggaaagaccatcactattgaggtggagtgcttcgacaccatcgataacgcgagcgctagcatataagacaaggaagggatccgacctgaccagcatagacttatcttcgcgtgtatacagcttgacgatggacgaacccttgtcgactacaacatccgacaggaatccactctggaccttgtgcttaacctgaaggctggtattcaaatctttgcctataattgtactgtcaacatccttgatctcgaggaa

SEQ ID NO: 12174 - DNA, 417 bp, Glycine max
  unsure at all n locations
  Clone ID: jC-gmle01810060f07d1
ccacatggaacccatcattctcaacatattattattgatgagctgtccaaatcgtgccatttgttatgttgttaaaatcggcaactgcaactacaagaaaaataaaattgaaaataccaagaacaaaggaagaaccaaactgagcttattatgtgcaaagaaagattaaaaaaaaaagtaaatgacacgtgcttttcatagcaccctgtaacagctatctcaccgggtccattccacttccaaagactttcttcctttgtagttttgtacaattaggaatgcagtcaccatttgcccggataaaaattattnataatttttctttttctttttcttttctccctttctaaagcatcagcagcagcaagatttttggnttacacttaaaatttgattcattagctttttttttctact

SEQ ID NO: 12175 - DNA, 271 bp, Glycine max
  Clone ID: jC-gmle01810060f08a1
gggatagaggggcctggtgtgtatgagagtctatggctactgctgttgctgccgtgtaccatctgggtactctgcatggcctcaggactatcacaccaggctgtgatgtcggctgatgccgccagagacttacacatgattgaacagtgaaagtcacgagtgtagtgctcgaacgaggtaaactacaattccagatcaaaacctgcagtggcagatgctgagaaggccgtgacacctttggagacactgcctgctgtaatggagctgactc

SEQ ID NO: 12176 - DNA, 301 bp, Glycine max
  Clone ID: jC-gmle01810060f08d1
aaattaatgtacactcaatagtttatctatatagcatatatattttatacatttaattatacacatataaagggtggcttgacaattagtcttataccacatgtggtagttaattaaaaccactcttgtaaaagatagcaatcaagtttttctgctcggaactggagaaggttgcttgtggtttacaccggctctagctttcacattcacgttattattgttggagactctatttttagtagattttgatgacactggccagtgtccactggtaacagccatgtccttgtactgttgcaag

SEQ ID NO: 12177 - DNA, 590 bp, Glycine max
  Clone ID: jC-gmle01810060f09a1
ccgagtaagacccttgacattgttgagtttggccaaaatgccggatgttcataccctcgttaatgattttctgaatcagcttaaaaaacgtaaaattgaaggttctcaggccacagcaaagctcacagcagagttgctccggtctgtgatttcacagcagcgagtgccacacacgaaccaagctacaactctgattaatgcagtgagggctgtgggggagcagcttattgctgctaatcctattgagctagctgttggaaatattgtgaggcgtgttttgcacattataagggaagaggatctttcccttgcaacagctgctatggatggtttgggggtatcagctgcaagtgacgatgaagatgatgcggagcgagatgaaaatcctgttttatctgcggctgctgttgcagctgctgccagaagcacattgcgtccaccgtcattgcaaactcttctagaggatacatctgattcagctgccgctcccaccacatcttcctcagggggtgaatctgacgggagaagtagatctgtggtaaaaggttcacgagggaggaaattgagcatgatgtcatcgaagcagccat

SEQ ID NO: 12178 - DNA, 546 bp, Glycine max
  Clone ID: jC-gmle01810060f09d1
ggccgccctttttttttttttttttaaggaaacagtaccccaaagtctatgattacgtacacaatgtaaaagggtcacaaatagaagttttaggtgcatacaatacaaaacaatataatacaaaattttacatcttcaaagccacaaacctgggctgttggttcactaaaactttcacacagcctccttgtgacttattcctaagccctattaccacaaggatgttcaacaattctcagtgcatcagcactgcagcctcttgcacaagaggctgtgtaacatgcacaaaatgctcagcttccctctccacctcttcccaacacttgtgtgcactcttcccttctttcatcttcttcacaaaccccacaaacttcctccagttatttggttcaaacaaatgcggattcatcctcaggtatgtgaaggcacacatctctctatcaccagactcaccatcaacatccaattgtgatgcccttatgatctgctcatgtgcatactcgtcgtaccgtggcagcgcgttttcgccggcaagtggaacctgtg

SEQ ID NO: 12179 - DNA, 334 bp, Glycine max
  Clone ID: jC-gmle01810060f10a1
cttgtgacccagaaagaccctcttttttttttactttccattctcctgcttttcttcctccgatggctgcacctggctgcctaacgtgaaattagtctcattttccatctgggtcttgtgaattgcgattggaaccgcgttgtctcgcttctgggcttggcttagaagttgtcagaatgatgtctgtcacaggcaatggcattgatttcgctggcaaaaacttggtctctggctgctcttcaaatgcttcgtttgattggtacactgtgaggaactatgccaaggcgaatagtaatcattctaatgggtgttgcagaagccattgacctaaatt

SEQ ID NO: 12180 - DNA, 531 bp, Glycine max
  Clone ID: jC-gmle01810060f10d1
ggccgccctttttttttttttttttttttttttttggagcataagcatataagaatatataaagtaatggttacattctcaaaatttcgttataacctaacactataccaacgttacaacattgtcctaacctctgcgcccatgacaaatcatgtgtcaaaccaaaaaattacagcccaaatgcaataaacgggcaaaagacaatacaaagacctatatttcatctcaaaggttttctcgtgctcatttgatgcattcacaactcaccctatgctgcacaaagcacattagcacttagcagcacactattaggtagtgttagaaccactccatttacagaggcaaccaagatcaaatactgtctccaggtgatttgggaaaacatgtactgtttagttgtcatgccttatctaacacaaagcttggtcttaagatatccagcttagactccaaagtggctgcaagttgaagaattcaaaactaaagcagtggtgaatttatatcaagccctagtactctcgacatattcca

SEQ ID NO: 12181 - DNA, 397 bp, Glycine max
  Clone ID: jC-gmle01810060f11a1
cttgggcttcaggaactggttccattactgcgcctctccgctgattgccctctgctgtggctgcgcacaccaaacccctccggatcggttgagtccacaacaagggtcatggcaagaggaggaagagtctgttttcctttacacttaacctattttcagcgaaaaccactttgaccgtgatctcgccaaggctcatacgctcgacgaaggtgtcgttgtcgtctggtagagaccttcttccctaatactctttcgttcgattgttttagctagtgagaggaatttgaacctatcaccgctacctacttctcccttcaaccacgaaatcgaccttataactcttgattagtatcttatcgtaaatagaacagatattgagggactgacaattgatgga

SEQ ID NO: 12182 - DNA, 572 bp, Glycine max
  Clone ID: jC-gmle01810060f11d1
gccgccctttttttttttttttgaataccttcttcctatcactttgacacaccttttccatgatacattttattatcagataaaattcatacaggacccattaaatagaattgggatcccatatcatttagtaggacctacattaacattcagtttgtgttgaaaaaaattgcaatactaacatttctccatcaaacaaaccagtgtcttgatcataacagggcctccatccaagtgtgtcaccagttgctttttagttcaaatgctcaactaataagattgcttctgctagcataaactatttttttctttaaaaaaataaattgccaccattaatgataaagtttgataaattatactgcataaatgtgtgagcaaaaaccatggtctggctaccccaaaaatgcagtttgattaacatatacaaagggccagactgccagactaaaagggcaccatgtatcatcataatcatatatcttattattttcccttttgatcaaatcggtctctctctaaattagattggtaatacaaattgattgatgaggcagctttcatgttatggacat

SEQ ID NO: 12183 - DNA, 543 bp, Glycine max
  Clone ID: jC-gmle01810060f12a1
atctatgaatgatggaaccaccactaacgaggttgatgatcaacgttttcatagtgagtttcttagcactacttgtgaacttggtggtgggagtgctcggcgctgataactatagcagagatgattttcctcttgacttttgtttcggttccaagaacctctgcttatcaagtgggaggagctgctaacatagatggaagaactcctagcatctgggacacctttgcctacgctggatatgcccatggagaaaatggagatgtagcctgtgatgggtaccacaagtacaaggaagatgtgcagctaatgctggaaacagggcttgatgcctatagattttcgatttcatggtcaagattgttaccaaatggcagaggacccgtcaatcccaaaggattacagtactacaacaatctcatcaacgaacttatcagcaatggaatccaaccacatgccacgctacacaactttgatcttccacaggtacttgaagatgaatatggaggatggattagtcgtgacatcataagagacttcacatac

SEQ ID NO: 12184 - DNA, 384 bp, Glycine max
  Clone ID: jC-gmle01810060f12d1
gccgcccttttttttttttttttttttttttttttttttttttttttttttttttttttttttttttttttgggggttggtttttttttttttttttttttctttttttttttcttttttggtctttttgttttttaacatttactgtgtttcactttgttagttggaagaacaaaaaaaaaaagtgttttcaccgcctcggggggggggagaaattctttttttttttaggaagctcgggggtttttggaacaaaaaaatctctttatataaggtgcggggggtaaagcccatgagggggcgcccgcttgtaataaaaaaattatctctgcacccgaccttaataaacaagttcccccccccccccccctttgttgggggggg

SEQ ID NO: 12185 - DNA, 393 bp, Glycine max
  Clone ID: jC-gmle01810060g01a1
cagaatggtaggatacaggatatgtcatatcatcatgatcaatactacaacgggacaactgggttttataccatggcaatggaggaaggtgcaagagctcggccatatgcagtgcctttgtcaaagacacctgcagtgacgttatcgtggcctcccaattcatggtcaacatctaatggacaacgcctatctgtgcagaacatgggtcctgctataccacctacaaatcggatcactagcgtaccgggtaccaatggaatctatgctgggcattaagaaactgcattggcgggaacttatgataagcagaacatgaaagtggaccaagcgataacatcgtcaacatcaagatatgccagattactggaatcaatgacgactgttgctgatgac

SEQ ID NO: 12186 - DNA, 372 bp, Glycine max
  Clone ID: jC-gmle01810060g01d1
gaaacaaaacgtcttttttactacaaaattaagattgtccattcaagtccaatatggtacatatgataatacaagtgtcactgagcgcagcgggattttatacatgctataccctactaatgccgcgggcagcaaaatcaacaattacaagtttttacgatattttatgagtttgtttaaaacttgaaaagcaataatattgggaatatataatatatagctctcccacgtttccaattggtatagcctggacaactaactattaaggaagtgcccatgtctagtgaaggcagatcgtgattcttagcaacaccttcactacagattagtgttatccatagcttcaataagcattttgtagcctattgcctt

SEQ ID NO: 12187 - DNA, 393 bp, Glycine max
  Clone ID: jC-gmle01810060g02a1
tgccgaggtcgagttattccgctgccacgccgtaactcggaataggaataagctccagggctgccatgctcgtatcctggtacaagcattgacacaaagatggtgtcctgcaactgtgtgtagatccatactggcgtctgatataaggtcatcaaacagatcgtgagcaaggggggactcaaccactgggactgatctagtatgatatacgcccagagcatactcgacatctgggcgggacgacgtatactaatgagcgtccgcacccggtaccgaattgctgaccggcacctgcatgaggacaatgttcccctatagcgagttggatgatagcacccagtgagccttgccaatgacccaacctgtgtgactgagctatacgatcacgatctc

SEQ ID NO: 12188 - DNA, 461 bp, Glycine max
  Clone ID: jC-gmle01810060g02d1
gtaaaaagcaagtaacattaagttggattcggatacacaagataattcacattatgtgaagtacttcaccaaacacaaatctaaaaactctcaaaagtcatttcgttctttgacgctcactttccggggacgaagttggtggcataggcccaggcgttgttgttgacagggtcagcaaggtgatcggcgaggttctccaatggaccctttccggtgacaatggcctgaacaaagaagccaaacatagagaacatggccaatcgtccgttcttgagttccttcaccttaagctcagcaaaagcctctgggtcatcagcaaggcccaatgggtcgaagctgccacctgggtagattgggtcagtgacctcaccgagggggccaccagcaatacggtaaccttcaacggcacccattaggataacttgtgtggcccagatggcgaggatgctctgggcgtggat

SEQ ID NO: 12189 - DNA, 480 bp, Glycine max
  Clone ID: jC-gmle01810060g03a1
gtttgtttcactgtttcagaatgaacggcttaagaagtgaaagagcccctctcttggaggctgagcgtgctggaagaggaaagagggatggtgcctcggaaggtcaagcctcagaccttgagcatggtgatgcagtgccggcggcaaatgtgggattctgtagggtgctttcacttgcaaaacctgaggctggaaagttggtgatcggtactgtggctctgttgattgcagccacatcaagtatcttagttcaaaaatttggcgggaagataattgacattgtctctagggaaatgaacactccataggagaaagatgaagctttgaatgctgataagaacaccatactagaaatctttctggtcgttgtcttcggatcaatttgcactgcacttcgagcttggcttttttatactgctagtgaaagggttgttgcacgactgagaaagaatttgttcactcatcttgtaaaccatgaga

SEQ ID NO: 12190 - DNA, 339 bp, Glycine max
  Clone ID: jC-gmle01810060g03d1
gaaatatcgggagttacaccaaatttgttgctaaactttaatcatgtgtttggactaaagtaagaaaatacagataatgatacattttattttatttggttaagaaaagaaagaaaaattgacatttagatgaagaaaaattcgaaattttctttctttctattttctcttctattcaatttttaagtttttctctcttcactcattttctttcctctgatacagagggtaatgctgtaacttgcaactgtggaagtgaaggtcttccaaggaacttgtgcctcagtatcatttgcccctccccttttgagcagactgaagtgtttaacaagcaagatg

SEQ ID NO: 12191 - DNA, 482 bp, Glycine max
  Clone ID: jC-gmle01810060g04a1
tgcagtcgttgtctaaaccacaatgctttgcttcccaaaacaattctgtgcagagcacttctggggaaagtaccgatggccttggtagctcctctagtgctgacagaatgaaatccttgaatgaaattcctgagagtcaaaatgtgcttgaggagagaagctctaataattcaattggtgtaagggagaaagctatagcgttttctcagtggacaaggatgctagatatacttgaagcatgtcttaagaattcgtcgatccagtatagaagactggatggcacaatgtcagtcactgcaagagattaagctgttaaagattttaacactctccctgaggtttcagttatgattatgtctttaaaggctgctagtcttggtctgaatatggttgctgactgccatgttcttatgctagatctatggtggaatcctacaactgatgatcatgcaatagacccggcacatctgattggacaaact

SEQ ID NO: 12192 - DNA, 381 bp, Glycine max
  Clone ID: jC-gmle01810060g04d1
aaaagaaacgaaatagattaagattggaaaaggaaaagagatattatctatctataatatttacaatgagcacaatttctatgtttctgtctatgctactactctctacaacctatacaaatgttaacaactaaaccaaaatttcaaggtaaacaattgaatcatctctctataaaagacaattcatataatcttcatgtcgagtgtcaacagaggccatgctacaaaattttcagcaccctgtttcttctgcttccaccaaaaagaacaacccactgacacctgctcccagaaaaaaaaaaatcaccaatccaaaaaattaaaattatatatctgtatggatatatgtctaatcacatcataaacaagtattttagatca

SEQ ID NO: 12193 - DNA, 139 bp, Glycine max
  Clone ID: jC-gmle01810060g05a1
agatgaccgagattgatgagacccattccaccgacctggccagatctgagggtattgcctatgatatcggagaccaccaacaagacatcacaggacgaatgggctagggggactcccttttgccagctccacaggtatg

SEQ ID NO: 12194 - DNA, 317 bp, Glycine max
  Clone ID: jC-gmle01810060g05d1
ataaaaactactttcatatatttacattatacataatgaaaaagtttaacataaaagttttaaaggaaggaaaggaaaagaaccctatttgccttacgggcaaacagtagtattaatactatatgccaagcttgttccttcttttatggtgaaaactacaaaaataaatcccacaaattttcattttccacagacatttgtcatttccaggaccaacatgccttagtcaacaaccaccctccacagaatcgtacgcatcttccaccagaatctttaactttcagtattcaccaatgctcgatcgatgacaattacaa

SEQ ID NO: 12195 - DNA, 491 bp, Glycine max
  Clone ID: jC-gmle01810060g06a1
gtagagcattatgactgggacaaattaactggctcccttcgtgtagcgactgatggtaaaagcactgagagacatcggagtactagtttccaggccgacgacgaccggactggaggttacagacggctggagctacgtcgggattgcgagatgcgatacgtgatgacagatggctcagtgaataatgtgcaccttgcgacgagcgatgtcgacgcacaccgtggatcctggataggagccttatgcagcttcaaagaactggtcatagaggtttgctgcatagtaccatgacaagaactcctagacgtgttggatgattacctgaatcggcgaagacttgtttacagaacaattgatgggaccactagtctggatgaccgtgaatcaggtataatggactgtaatagtcctgattgacactgtgtcatgtccgtgcttagtagtcgagctgctgggagaggccttgaccttgagtctgctgacacagttgt

SEQ ID NO: 12196 - DNA, 423 bp, Glycine max
  unsure at all n locations
  Clone ID: jC-gmle01810060g06d1
cttgcatacaaccaattgacctggatgagcaagcagtggagggttatcctgctgaggttgttcgcgtgcactgccgcttccggttcttgagttcttctgtggcaaatgacctttgaacctggtgttttcgccgttggtagttgatccgctttgtgacggcttttgtgacgggcatggatcggtttctgcatcattggtcactctgtgccttttgctagggccaactgtcacttgcctaggggatgatgctgcagtaccagcaggaacttggctggagaaagatagtgcacctcttgcttctcaaagtctgtatccggaaacgcaattttcaaaatatcaaagaagagatcatgaaccttccttgctttagntcttacctcatatgagtatccatagaaatgcattgcgccctaacatgaactg

SEQ ID NO: 12197 - DNA, 351 bp, Glycine max
  Clone ID: jC-gmle01810060g07d1
caacaggagggaacccggccaaaaagggggaaaaaaattttttccccaaaaaagggggaggggccccaaaaaaaaaagggggaaaaaccgggggttttttcccttccccccccccccaaaaaattccccaaatttcaaaggaaacccccccccccttttttggaaaacccccaaaattagccccggggggccaaggcccaaaaaaaaaaattggggggggcccccccgggattttggggggggggggggcccaaaaaaggccccaaaaaaggggggggggggacaaaaaaaatttttcggcgggggaaggaccctttttaagaaagccccccccccttttttttttttttt

SEQ ID NO: 12198 - DNA, 601 bp, Glycine max
  Clone ID: jC-gmle01810060g08a1
gctcacaaagtgaggcctctcaaaaaacaaacaaaagtgacatcaaaatccccttctccttcctcttattctcttataccccacccccacttcttagcttcatccctctctctctctctccttctcaacaattacttgcaagtcttgagttttctcctccctgttctctggttttggaattgagacaggctttatttataattttaaaaacttgtttccctccctcccttatttttgggttttctcaacttgttcttgtcatcttgtaaaacatgggaactgctatagacatgtacaacagcagcaacatcgtagcggatttcctagatccgtatagtgaagagctgatgaaagcacttaagcctttgatgaaaagtgattatttctctgcctcttcttcttcttcactcgaatcacagccttgttctttatcatctaattctctccccacttcgtatccctcttccaaccaaatcaagctcaaccaactcaccccagaccaaattggtcagattcagggcccaaatcacattcagcagcagcagcagcacgtgggccatacccaaaccatctgggcccaaacgcgtcccatgagcacgct

SEQ ID NO: 12199 - DNA, 389 bp, Glycine max
  Clone ID: jC-gmle01810060g08d1
ccgccctttttttttttttttgtggacaaatattgtattaaaaactaaagataggtaaataatttttggttctcaatattattttgtaaatccaagtttccgcgccttccccctaaaacaaaaatgcattattatctccaacttgggaagaaaaatcgtttcctatttttcttctgaaaattcttttgttggctaaccttgtatcggtaaagggaaaattacaataaaaaaaataccaaaaacaaacccaactatatgacaatggacataatacaactatgcaataagaagttccttgttaggagaccaagcaaatacattaagcggcaacttcttgctcttttgtgggcagttggttctgaatgtgctgaggcaccacatcaaacatg

SEQ ID NO: 12200 - DNA, 446 bp, Glycine max
  Clone ID: jC-gmle01810060g09a1
gagatactggtgccagctatgtgattgagtatattgctattgctgctgctatctcttactctctccgcactctgcatcgatttaggaatatcacaccaattcgtgaaatcgaaggattccgacagaatcgtacgaattattgttcaattgtctgcctttactgatgtgctccaacttggtaaactagaggtacagatccaatttcttcaatgggggatgctgagaatgcccttccacctgtaaagaagacggctgctgtaagggagctcactctagatactcccatcgatgatgaggaagacgccctctgagcttgagactggcactatcaagagggccagacaggaggttatgggcaccagaaggatagacaaagtttgtccgacaccaactaattctgctacttctgcaaatcctattgctggaatacgcctgggtgctaccac

SEQ ID NO: 12201 - DNA, 418 bp, Glycine max
  Clone ID: jC-gmle01810060g09d1
ggccgccctttttttttttttttttggttgattaacataaaatcaatcattcagcacatagttgaatcaagcttgccaagttcaaagtaggaacacagttggtctgtccaaatatttctatgtacataacagccactaaacaatttcatgttggaacggaagggaaatccaaaagcacgggtcaacttcttgagccaaccatggtgcttggggcgggtcccatgcttgacacagttagcccgcgatcatacatacgctggatgtgttccctatattctgcaagagacttgacaggtatggctggtgtaagttcaatcacatctcccatcttcaacttggtattgggatcactaacgggttgatgattcaaccttggcctcaactcttccttcaatgggaacctatatgttgtcaacct

SEQ ID NO: 12202 - DNA, 527 bp, Glycine max
  Clone ID: jC-gmle01810060g10a1
attgatgttaattttgattgagtattattgagttttttttgtgaacataaggagtgagaatttgccaaagaagaagaagaagaaacatggtggaaggttagagagtgagagagtgtgaagcatggaagtgggtatgcttccaatctcagcttcaaagagaggaaaactcttggctgctggttacaccactctcgatgccattgctcgtgcctcccccacccaccttgttcgaggttttcctttccagtttcaattctcaacccttctttcattttccaattgggtatgcatatatgttaaaaagttcctctttttttcacctacccattatctcactttgacagatattgatgtttctgagagtgaagccacggaaattctgaatcttgcaagcaaacctagtgctttggagagaccgaatgggtctcacactgctgttgatggtggtggtcagactgcctgggatatgctcaatgatgaaaagttttcttcttacattaccacatcttgtgcagatcttgataaca

SEQ ID NO: 12203 - DNA, 620 bp, Glycine max
  Clone ID: jC-gmle01810060g10d1
ggccgcccttttttttttttttttaattagttctactcattcacatccatatcttaggagaatccatatcacacaatggcttttcaagtaaactaagatgcatgtcaaatatcatcacaatattcatcatctttaaaaaaatgaggagtggcagaaagtgaagagacattaacattacaaccctttttttggataaaattacaagacaaactaagaaggttcagttccactacagcctagtagcaggacttgccactaattgacattttaaggttggattcaaaaaccatcaaataaaaatgtaggaagaagaaaggtcaaggactactacatcactgttataccacccaaacccttggccttcctcctacccctttttttgtcgtttccttttaatcaacatttcttcatttaggtttttgtggccataatgtgatgatcacttggccatcatcaccttaacgaactcctcgtagtttatttggccatcgccatcaacatcggcctcgcgaatcatctcatcaacctcttcatcggtgagcttctccccgaggttggtcatcacatggcggagctcagcagcagagatgaacccattctggtccttgtcgaaacccgga

SEQ ID NO: 12204 - DNA, 562 bp, Glycine max
  Clone ID: jC-gmle01810060g11a1
cttgcagacattcttccccctgcaccattacctgggacaacctcacagcagaacttttcagctcctcctgatgctcaattcttatcctccttttcagcttcatcagggcaaatggcaccacagtctttttttacacagtctggtcaacacgtgcagcaagatttctcagctgtaaccagtcaacctgcagcacaatccttttcagctcctggtggccaacctctacaacccccaccatcagttcccactagtcaacatgcacagcaaccctttccatctcacactgatcaatctgcacagtcagttagtcatatatatggtggatttccttccctggctgctggctctatgactcaagaagcttcttcagccatgttccctcaatctcaaggtggacatatgaaccagacctatgaacaaggatctatgccacttatccctttacacacggctccccaagcttcaacaggacagagtgcaaactatttgtcttctcaatcccccattgatcaagcatcacagtttaacagtgggaactttgtcgggacagtcatttaaccat

SEQ ID NO: 12205 - DNA, 486 bp, Glycine max
  Clone ID: jC-gmle01810060g11d1
gccgccctttttttttttttttttttttttttggcgaatgtttctagttgttttacatgtcatttcttacagcgccacaccaaggaacaaaatgtccacatgatatagaaaggtagaaaggtagttgagttttggcaacgtaaagaatatgtaaaataacatataatacattcagtggaacttgagactggtcaagatgttgttgtgcacggggtcagccaaatgatctaggaggttttggtatgggccaacacctgtgacaagagcttgaacaaagtaacccaagattgccaacatagccaaccttccattcttcacttccttgagcttcaaatccttcaaggacttctcatccttaccaaagcctagtgggttgaagaaaggtcctcctggataagctggctcaccagaacctccaagacccttctctagtcgtaggaagtattgtttgcccatagagcctggtttggcccagtcttggaatct

SEQ ID NO: 12206 - DNA, 544 bp, Glycine max
  Clone ID: jC-gmle01810060g12a1
tccatctttgccttctgcatgttggttctctgtaaacagatactgcaaaagaagaataatattgaatatttggttgggttgaatccctgggttgaagcgttgcagacatcacggctattctaagagtgtctcgctctctcattcatgttccacctgtaccacggatgacaggttgcgtaactgccaccaacccttcgccgcacggtgggcgtggtgctttgccttctgaaggtggtagcccttcagacttgctcttcttagctggtggtggttctgctgtcttctagcttcttcttaactcttttttctttctactacttttaagctaccttgttttcaaaataacaaaaacaaacactttcttacttcataagatcaccttttcttcatcttctacttctccttcactaaaatgatgctcaaaatcaagagggttcccactgtcgtttccaactttcaaaaagacgacgctgcagactctcctcgtaccgtcggaggttgtggtcggaattgcctcaagcttgttgcattccagatgcaaagc

SEQ ID NO: 12207 - DNA, 346 bp, Glycine max
  Clone ID: jC-gmle01810060h01a1
ctcgagccgcacaaaacttgctatagcagtaagctataactcatttgaggctctgtgagaattgagaaatggctaaagatgttgaggttcaagagcaaggaggagagtactctgccaaagactaccatgaccctcctccagcacctttgttcgacccagaggagctcacacagtggtccttctatagagccctcatcgctgagttcatagcaacccttctcttcctttatgtcactgagctcaccattattggctacaaaaggcagactgatacaacggtaagtggcaccgactgcgatggggttggcattctgggcatcgatagagcctatggtggcatgatctt

SEQ ID NO: 12208 - DNA, 437 bp, Glycine max
  Clone ID: jC-gmle01810060h01d1
ggaataaaaaacctgcaacataatatatataaatattactcaagtcaaggtacattacattcatagatgatgattaataaagctttaataaacaagagaagatgagtacttaattatgaagagtaaaatgagaaatgactaaggatgcacaagacagaaaaggaacactcaaggaatacatacatggaaattaaaaaaaagaaaaagaaaaagaaaagacacaaaagggatacaaaatacacccttggacacaagcatgcttatctacaatttgatgcatgcccccatggttttggccttctcttccaaacacccccaacaactgtagctgatgagaggaaaagacgaaaaagcctaaattagggaactgcatagacagatcactagcactcctcaacatagaaattattattcttcgggggaaacaccatgcatag

SEQ ID NO: 12209 - DNA, 264 bp, Glycine max
  Clone ID: jC-gmle01810060h02a1
aattcagccacctgcacccgtttaactaagggagctagtgcacaagtgaggtttcagcctagactatggcgtttcctggcagcagcttctgatcaaggagcgtcaatttttgatgttgaatctgacacacatatttacaccctacactgacatcctgaaccgtcgagctatatcatgctgggatgggaatggtgatgccttggcatctgtgagttctaattggctgaaggtttgtagtatgacctcaggacgagaatgcattca

SEQ ID NO: 12210 - DNA, 467 bp, Glycine max
  Clone ID: jC-gmle01810060h02d1
aacaatccaaataaaatatattaaccatataaataaaaattgcattgcagattggtgcaatgtctaagttgacagtgcctaggattctaaaagcaaaattgtatttatatttatgtactagaagtctagtataccttattgcaacatcaacggtgggagaaaccaactaagattaagctaatgatgaggggtttggataggattcaaacctcatttccacaatgaaatataaaataaaaaataaaaccaagtttggagaccccctttttgctttcaagacctctctctgaactcttttagataaagtactactgacaacgaatatatgtgatgttagaacctaaatcaggaattttatttccacagctttacatagttgtcataacttgcagaggcaaccattccagtgacagatgactgagccaaagcagaaattacattttcatgtgcaggaactgtcaagcttt

SEQ ID NO: 12211 - DNA, 499 bp, Glycine max
  unsure at all n locations
  Clone ID: jC-gmle01810060h03a1
ctctactatactgcttcaccttctgctctagaaaattcagtgctgaaacatggcttcggctactctctctgtagccaaaccagcccttcaggcaaatgggaaaggcttctctgaattctctggcctccgaagctcatcaggcttccttcccttttctagaaaatcttcagaggatttccattctgtcattgccttccagacctatgcagttggaagcagtggaggatacaagaagggtgtgacagaagcaaaactgaaggctgccataaacgggtttggaaggattggaaggaacttcttgaggtgctggcacggtcacaaagactccgctcttgatgtcattgccatcaacgacaccggcggcgtgaaacaagcctttcaccttctcaaatacgattccatcctcggaaccttcgatgctgatgtcaagcctgttggcagcanagtcatctgcgtggattggaaggacatcaaagttgtttctgaccgcaaccctgcc

SEQ ID NO: 12212 - DNA, 446 bp, Glycine max
  Clone ID: jC-gmle01810060h03d1
gatcatcaacattcagatttcaaggtaagaattttattgcacaatgagaaggcagagaaaattgatggttctgtttctcagtacaagtttaaaagaaaaatgaagcaacaagtgttgtagtggtagtagtagtagtaagcatacaaaattacaatggcatggtacatacataataatttaattaccaatgagaatttgtttggctctcacttccatttgttggcaacaatgtcagccaaatccacaaccctttgggagtagccccattcattgtcataccaagcaatgaccttcaccatgtcatctcccatgaccatggtcaacgaggagtcaacggttgaggacacatcagtgcacctgaagtcaacggacacaagtggctcatcacacacagagaggattcccttgagctcattgtctgcactctctctgaatgctgcattcac

SEQ ID NO: 12213 - DNA, 590 bp, Glycine max
  unsure at all n locations
  Clone ID: jC-gmle01810060h04a1
gcagatgacagtgtgattgctttggcgactagatgcccccatctgaggtccctaggactgtactactgcaagaacatcacagatagagcaatgtattccttggcacacagcaaggtgaacaacaggatgtggggaactgtgaaaggaggaggaaatgatgaagatggtctaaggactttgaacattagccaatgcactgcactcaccccatctgctgttcaagctgtttgtgactcattcccttctctccacacatgctcagggaggcactcactcatcatgagtggctgcctcaacttgacatcagtgcattgtgcctgtgctgtccatgcgcaccgtgcattcaccactttcccttatcctgcccattaagaagctcatgcttttgatgttgaacacacttcgaggatgtgccccttgaaagggctcagagaagtgaaagaagtgaaatccacccgccttgtagatgtatgcctgcataagagagacttgaatctagctgattatgtacatcttttcttcaactntatgtcttaaactcgtttggcttaatccccgaatgtgtaagctcgagacattttgatgctaaa

SEQ ID NO: 12214 - DNA, 285 bp, Glycine max
  Clone ID: jC-gmle01810060h04d1
agcatccaaaatgtctcgagcttacacaattcggggattaaagcaaaccgagtttaagacataaagttgaagaaaagatgtacataatcagctagattcaagtctctcttatgcaggcatacatctacaaggggggtggatttcacttctttcacttctctgagccctttcaaggggcacatcctcgaagtgtgttcaacatcaaaagcatgagctttttaatgggcgggataaggaaaatgggtgaatgcacggtgcgcatggacagcacaggcacaatgcact

SEQ ID NO: 12215 - DNA, 335 bp, Glycine max
  Clone ID: jC-gmle01810060h05a1
gcctctaacctcgcagttccttgatctctcctctcaagatgcagatattcgtgaaaactttgaccggcaagaccatcacccttgaggtggaatcctccgacaccattgacaacgtacaagctaagattcaagacaaggaagggatcccacctgaccagcagagacttatctttgcgggtaaacaacttgaggatggtcgcacccttgccgattacaacatccaagaggaatcaaccctccatctcgtgcttcgactaaagggtggcatgcaaatctttgacaagactttgaccgtgaagaccatcaccctttgagtggaatcctgggacaccatt

SEQ ID NO: 12216 - DNA, 225 bp, Glycine max
  Clone ID: jC-gmle01810060h05d1
gaaacgactagttctttgcatctagacaatacgaagcgatgcgtacgggcttagttcttttttaatgcattgatacgacgaaccggttaataaatgtgttaaattggaaccgttctaaaaaactaacgagtcgtgcactaagcatagcaatactatcaatatgatatgagtcattccatttcttagtcgatacaatcttataggaattgatcattttggagaaat

SEQ ID NO: 12217 - DNA, 160 bp, Glycine max
  Clone ID: jC-gmle01810060h06a1
gctcgtaattcggctcgagctggggatggtgaagagatgacattgattccgggaaccagtgttgaagaggcttacaacaagctaatagttgaacttgagaaaagtgttcctacattggttggcattgaatgtcccaaggatgagaaacaaatcttctttt

SEQ ID NO: 12218 - DNA, 422 bp, Glycine max
  Clone ID: jC-gmle01810060h06d1
atcaaatgcatattcttttcactcaagtttttctagtgaatctgtattacatcaactaacaatcaagcaataaaaaatttgaaagaaaataagtaataatgatactgacaagcgtatatttagaaagttcagaagagacaagacacaataatttagttacccatcactgaaagaaggataatggattacatataggcatccctttgcaacaagtgcttcatgaatcaacaaagacaccagcatctttcactacaatcttatccggaaaactcaatcttggcaataaccattccaacaaatagaatgaagagttttgataattggttgtaacaggatgctcatctgaagatcgtacaagtattctgtgtgtaacaaaggactgccagacagaaggcatgtattcacgatactggaaattttga

SEQ ID NO: 12219 - DNA, 332 bp, Glycine max
  Clone ID: jC-gmle01810060h07a1
cttaatttccctctctttaacaaacgtcgtcggttcagctcgactctatcccaacgactcctcctggctcaacgcccacgcccctactggaggcgcgtgggatgcctttctcaactgtaccggttgtcaccggggcgacatgtacgactgactagccaattcaaaatgatactttgaacgattcggttgcttacctcacgcgccgacctcctagaatgtctccgatgaattcgacgactcgctcgaatgcgccatcaaaacttaccagaagaactatgacctgaacgttactggcgttctcaacgacgccgccgtgcagcagaccgggctgc

SEQ ID NO: 12220 - DNA, 359 bp, Glycine max
  Clone ID: jC-gmle01810060h07d1
gatcaaaccaaatccttagcacaaccacattatattacagagagttggcatgcacaattgcaccataagtgcaagaggctgtctaaatgccatacatacagagagaggcaatgtgtccgtgcttgtgcctccccaaagttttaatttattattattattagattgggccagaggatcctcgtgaagtatgtcttagcaggagaatacataagcttaaggtttctcccaatcatgagatatatacattatgatatgatacaagattaagctggaacagcttcctgcactttgccgttgcttgagagtactaagctatcatagtaatcaaccagcaccttccatccaccagggcacataaa

SEQ ID NO: 12221 - DNA, 459 bp, Glycine max
  Clone ID: jC-gmle01810060h08d1
gccgccctttttttttttttttgtacgtcaaacaaaagatataaatttaaagcataaaaaatcaagaatttaggacaaaaggaaaaggcaccaaattcaatttaagtggacactttaactcaaaattatagaggaagacagtccaatatgaaaaatatagtaaaatcatctcaaacttggcatcttctctttgcacctaagacattgagaattctaagaatgttacacgcaagtcccatcacaacttctagcacttggatcagcacaaccttcaggaacagaaatatttacttgccaagtttgctttgcctccaattcaagattggaagaaagttcccctgttaatagcatcctcgttagcatttccaagtgcagcctcgttcaagtacttgtcagccaattggactctcttgacattctcttgttcttggacaagcatgttaccatacgtcaagagct

SEQ ID NO: 12222 - DNA, 502 bp, Glycine max
  unsure at all n locations
  Clone ID: jC-gmle01810060h09a1
attctgacacgcaagaaaacgattttgaacgacatcgtcgcgtgtgctgctgctgcagctaactcttctcttccaacctctgtgttgggtgttcttcactttctccactcccgaggaagatcctcctcttgtgttcacactccctctgaactttctaagggactntgccacaagagagttcaatgcgtttctgtggctatgtctcgttgctgtcaccacccttttgctcagaagactcttcaatctctttaggctgtggcatagggccaaaaccattcctgggccaccctctccctctttctttggacactgcaagcttttttcccggcaaaatttcaccttcactgacgtgttgtcagaatcccatcaaaagtatggacctattgttaagctgtggttaggtcctactcagctgttggtgtccgttacggatccagcactaattcaagagatgcctataaggccaaggataagttgccctttaccggaaaaagtgttcatc

SEQ ID NO: 12223 - DNA, 487 bp, Glycine max
  unsure at all n locations
  Clone ID: jC-gmle01810060h09d1
gccgcccttttttttttttttttttttttgcaaactaggcggatcctatgagtgtttggatgatcttatttaaggttcccaacaaaacactcactatcctaagggaaaattgcctaaaattattacacacaaatggaaggatggtaacctattggaggctcccaacttacttccaatgaaagacctttttgttacaaaatttgaaagcaaaacaaattgtggtggctattttatctttggtgttaatactcattacaaaattacaaaaaaaaagtcctcaattgtggtggctattttatcttatgtgtttcactcaatttggagtgcttcttagtccaatagctcttaaggtggttgaccccttgcttcttgactcaaattcttcaaggtatgacatcaatcctnctttccaattccctttgtgaagctccgcttataggtaaaatcttccctttntttttaccttaaaaggatactaattaacaac

SEQ ID NO: 12224 - DNA, 576 bp, Glycine max
  unsure at all n locations
  Clone ID: jC-gmle01810060h10a1
ctaatagacacgaggactatttaaaaacccggaccgtcgtatcgttccaccggcgccgtcaacctccaaggctcgaaccaccatccttccactcaaccgcgcacttgcactcgtcggctcaagctaccaccgcagcacgcctcagccgccgccagttaacaagcatttgctcataaagaaggaaggaagatggtgtttgggcaagtagtggttggtcctcctggctctggaaaaacaacttactgcaatggcatgtctcagtttctcagtcttattggaaggaaggttgctggtatcaatttggatcccgctaatgattcgttaccctatgaatgtgctgtgaacatcgaggatctcgtgaaactaagtgatgtaatggtggaacattcgcttggaccaaatggaggtcttgtgtattgtatggattatcttgagaaaaatattgactggttggaagcaaaattggaacctcttctgaaagatcactacctactctttgattttcctggccaagtggaactttttnttctccattcaagtgccaagaatgtcatcctgaagctcataaagaaattg

SEQ ID NO: 12225 - DNA, 538 bp, Glycine max
  Clone ID: jC-gmle01810060h10d1
ggccgccctttttttttttttttttttttttttccgctgaaacgagttcaatacatcattttaaaacataataaacagcagcacttaaaccagagatgcaaagcacaagttcaagggagacactgaacaaacagataagacatatgagaacacttcataaaagggattccccttagcaaccaccacgaaggcgaaggacaagatgcaaaggggattccttctgaatattgtaatctgccaaggtacgaccatcttccaattgcttcccagcaaaaatgagcctctgctgatctggagggataccttccttgtcctgaatcttagctttcacattgtcaatagtatcagagctttccacctccaaggtaatggtcttccctgtcagagtcttcacaaatatctgcatacctccacgaagcctcaacaccaaatgcagagtggactccttctggatattataatcagcaagagtacgaccatcttccagctgcttcccagcaaagataagcctctgctggtctggtggaatcccctcttt

SEQ ID NO: 12226 - DNA, 553 bp, Glycine max
  Clone ID: jC-gmle01810060h11a1
cagcaatggcatcaatgactagcttacgtggttcctctcaggctgtgttggaaggtagccttggctccacacgcttgaatgtggggagtggaagcagggtggcctcagtcacacgtgcagggttcacagttagagcacagcaacaacaagtgaatggtggtgaggtacaaagtagccgtagggcagtgctgtcacttgttgctgctggtttgaccactggctcttttgttcaagctgcgcttgctgatgccaaacctatcaaagttggaccaccttccccaccttctggcggattacctggaacattgaactcagatgaaccaagagaccttaagctgccattgaaagataggttcttccttcaaccattgtctccaactgatgctgcacaaagggcaaaggaatcagacgaggaaattgttggcgttaagaagctgattgaaaagaaggcttggccatatgttcagaatgatctgtgtcttagggccgagtatctgcgctttgatctcaacactgtcattgctgcaaagcctaaggatgagaagaaatcact

SEQ ID NO: 12227 - DNA, 450 bp, Glycine max
  Clone ID: jC-gmle01810060h11d1
ccgccctttttttttttttttttttttttttttttttttttttttttttttttttttttttttttttttttaagaggaacaaagcccaccctttgattttttttaagtttctggaatgaaattccaaccgtaacaaatcacagcttcccttacttttatataaccccacattctttcaaaatgggtgggaaaaaaaaaaaatggcctctcaataaattcaaacttttggatcttagggggaaaatgattcagggcccctgaaaaattgcttgaaactgaaacccacttttccattaggccccccattggaccttaaaaacccccattagccacatgacactccgaaaaaataaacaattactggtggttgcactttggagggggttcaccattaccagcctgtgccctttcactttttttaacaggaaaagacttttttttaggcttact

SEQ ID NO: 12228 - DNA, 450 bp, Glycine max
  Clone ID: jC-gmle01810060h12a1
cctacctatcttgttgtggagaaagacagaacccttgcaacatttgcaattaatgccgtgtgcactcatcttggatgtgtcgtgccatggaatcaagcggagaacaagttcatctgcccttgccatggatctcagtacaatgacccaggactagtgctagaagacctgcttcattggctctggcattagcacattgtgatatagatgatgggaaggtcgtgtttgatccttgggttgaaacagatttcagaacaggtgatgctccatggtgggcttagactccttaaaacctctgttggcataatatatatttaaacatgaaattcaaacattctggtttgtattaatgcataaatatatttcgtaatcaaattgatattttgagaactgaagctaagatgaaaaagaacctgaacaggtaacttttttccgtgtcaaaaaaaaaaaata

SEQ ID NO: 12229 - DNA, 548 bp, Glycine max
  Clone ID: jC-gmle01810061a01a1
gtcgtggtgatgtctcgactcgatcggtggccaagagccacatttaaaacttagcggtcatgccatacgtcggtttgtaaagaacattgcacctttgccatcattcagaaggctctctttctcggatctcagccgttcgtcgtcgacgcgaatcaacgaggatcttgcacaagtcttttgggtcggacttggttgattttcagctgattgagctgcgtgccataacacagaattttagcagcaatttcttgctgggtgaaggtggctttggaacagtgcataagggttacatagatgacaatttgaggctgggtttgaaggcacaacctgttgctgtcaagcttcttgacattgaaggtttacaaggacatcgtgaatggcttgcagaagtgatttttcttgggcagctaaggcaccccaatttggttaagttgattggatattgttgtgaagatgaagaacgattacttgtctatgaattcatgccacgaggaagtttggagaatcacctcttcagaaggctaacatcactgccatggggaacaaga

SEQ ID NO: 12230 - DNA, 505 bp, Glycine max
  Clone ID: jC-gmle01810061a01d1
ccgccctttgtttttttttttttttttggatagcttttttttccttttaaaaaccaaaattaacgttccattgtgagggggagacttcactcaaattcaagtccactaatttaagtttaatagactatgccacacatgggccaacgaactcggaataacaaattttctttgtgaaagaacatctaacgagacacacattgtgggacatgaataaggagtgtcttttaatcatcaaaaccctttggagaatttacaggggtcttgagaactggggatgtctcacctttgtgttccatgacagtggctttaaactcctacactatggagcccaccttgaaccttaaggcgaatgttgaaagaccacctttcccttcgctggcactattgatgcacggaaaagtgaccccctttttggccatatttgtgagcttcatattagggtagagacgtgcattcaaaataaatgtaaaattttccttagaccttaataaaagcctggcttttt

SEQ ID NO: 12231 - DNA, 582 bp, Glycine max
  unsure at all n locations
  Clone ID: jC-gmle01810061a02a1
gatttaccaatgtggcggtaacgtcggagactcttgcactattcctttgcccaaatgggttgtggaggagattgataatgaccacgatcttgcatatactgatcaatggggaagaagaaactatgaatatnnatatccacttggatggtgattacttttgggccggtgcttcaaggggacgatcccccagttcaatgttatgctgatttcatgcgtgctttcagagacactttcaagcacctccttggtgataccattgtggaaatccaagttgggatgggaccagcaggtgagttgcgttacccttcgtacccagagcaaaatgggacatggaaattcccaggaattggtgctttccaatgctatgacaagtatatgttgagtagcttaaaagctgctgctgaagctcacggtaagcctgaatggggaagcacaggccctactgatgctggccactataacaactggccagaagacactcaatttttccgcaaagaaggtggtggatgggatggtccatatggtgaagttttcctcacttggtactcttagatgcttgttgaacatggtgacaggattctc

SEQ ID NO: 12232 - DNA, 385 bp, Glycine max
  Clone ID: jC-gmle01810061a02d1
agtcggcggccgcccttttttttttttttttttttaacttttgctttttttttttgcaaaaatactaaatcaagtatgagactcaattgtgggctccccttatgttatggttcactattggacgtttattgcagtataccgcgcaagggctggctatctcgctgtaaaaaaatggttttgtgctggtacgtaatcataaactaactttgctttacaaagcttttgtatgacctccgcacgaggatagaccttcgcaaacttaacagcttttttttaccggggtgctttcaactccttggtacgttagatgcgacttgaatcatcagcactcacgggcggaactttcactgtgatgctaattttttacgagaacaattgacttcta

SEQ ID NO: 12233 - DNA, 493 bp, Glycine max
  Clone ID: jC-gmle01810061a03a1
cacatgcatctttgccttctgcatgttggctctctgtaaacagatactgcaaaagaagaataatattgaatatttggttgggttgaatccctgggttgaagcgttgcagacatcacggctattctaagagtgtctcgctctctcattcatgtaccaactgttcgacggtggacaggtcgcgtaactgccaccaacccttctacgcacggcgggcgtggtgctttgccttctgaacgtggtagcccttcagactagctcttcttagctcgaggtcggtctgctgtcttctagcttcttctgaactctgtcatcctgttactactcttaagctaccttgttttcagaatagcgtagacgaacactgtcttacttcataagatcaccgttgcttcatcttctactgatccttcactaaaatgatgctcaaaatcaagagggttcccactgtcgattacaacttacgaaaagacgacgctgcatgactctcctcgtg

SEQ ID NO: 12234 - DNA, 436 bp, Glycine max
  Clone ID: jC-gmle01810061a03d1
agtcggcggccgcccttttttttttttttttttttttttttttttttttttttttttttttttttaaaatcttaacccttaacgtttactaatatacaaacataacatttattacaaagggaagcccgaaatacagcaagggaaaactttcatccttaagaactacaactacaaggacaaacagttacctgaatttattatttctcgcagcatgaaagccacgatagacaggcaagtcaagcattatgatacatcagaccccaaaataccaacaacactactcaggtgagcagttattatatcgtactttcacatgaaagtgtcataaaggcagataaaagcatttacattcaacacacacgaccataaggctcaagcacaaggcaatagtatgacttaaacggtgacacatttcagcaattattcttaaaacact

SEQ ID NO: 12235 - DNA, 579 bp, Glycine max
  Clone ID: jC-gmle01810061a04a1
agctaaaatgggacttgtgactatgccactgaccccttcttacagcgggttctcttcaaactcaggacttatacatgacaccaccaatcacagaagggtcgatagaagcatgaaactcatagtttcagcgtatcaagatatgccagaagagaagaaaaagcactatttgttcagcagtgcgactgaagctcttgatttttctcaagtgagatccgctgaggatgctcatcttatacaagaggctagagaagccacctaatcatgagaaagaatgagtatggaacagtatggagctcttagaacgaaaattggtggtacatacaatgatgctatcaagtcttacgttgaagcggacggagcatatgttgaagagggctgggttgacaaaacatgcaaggtgtgcaagaaggacactaatggagaagcaaggcaagtggacaagttcggtagatatgttcatgtagcatgtctagagaacgccaacacatggaacttgtgtacaagactggtctgtatataaagagcagcagttcagagtcatggcctgaaatggcggtgggaagactcattatcgcatat

SEQ ID NO: 12236 - DNA, 392 bp, Glycine max
  Clone ID: jC-gmle01810061a04d1
agtcggcggccgcccttttttttttttttttttttttttttttttttttttttttttttttttttaaatttttggtccttgattttttttttttttctttctttccgcccaccgcgaaaacaaaccaaaattccccctcttggaaactgaaatccccaagagctgaaattacgagggcaaaatggggccacaaattattatttctggggataaaaactctttagaaaaaggtcttttccccctcccatttcttgcccacccctgagggccggccgcttttctcaaaaaaacagtttttaaaaaaatcttcctgttgagggcttttttaaggcggtttaaagaattttctttccacacacgcccccttgaggggcattccccagggagttttt

SEQ ID NO: 12237 - DNA, 507 bp, Glycine max
  Clone ID: jC-gmle01810061a05a1
gaagactttgaatttatggtgaaagaagagtaaaggcttttttacaagtgaaggcttgattttggggtggaagaagaatcgaaggaatttgggtgggggtgcgggactttgaaagatcttacagaagtgaaggcattggaattgcttagttttatactgtggttagcgccgctacactagtgcccattctcaattaccgaagcaacaggagtggcagcactagttcaatctccaaagccctcttgccagcttcaatcggtggcgccataccatctacaattttggtgtttcaggtttatgaattctatggtagttaataggaagaatcagaatgggttttgctgttttgattgagtgaatatttagtgatgcctttcaaaagaaatcagatctaggcaggtgtagagaatcaaagacagacataaaactgtgaagaaaattaagttagactgcgcacgtgggactctgtaagcatgcacccaaggcttgattatgtttcgcaatttc

SEQ ID NO: 12238 - DNA, 446 bp, Glycine max
  Clone ID: jC-gmle01810061a05d1
agtcggcggccgccctttttttttttttttttttttttttttttttttttttttttttttttttttttttttttgtttttggaaaaaaataggctcatccacataacaaaccaaccttgttactggggaaagattatccctgggggtggcaagagggcccacttaatttaaccatttcacaacaattggcacagcagaaatttttccacataacaaaccaaaagggtcgccttagttacccacagcctggacccccttggaattaatcaaatttggacatccggggattcaacctaggaaattgaaatcgattcaaacctaaatttggcctgccaataacctttgggttttgcaaatcggcttgggtccttgctttccggcacaaattgtgattccacaattttctttggtaaagattcagatttcgcaataagcatttaccggga

SEQ ID NO: 12239 - DNA, 457 bp, Glycine max
  Clone ID: jC-gmle01810061a06a1
gctggaatttgctgcggggtttttggagaaggtgacactccggcttcactcgaggggactcctcgacccttcaggctccggcgttcggacattttacctttaacagatatctccgacatgcccatgccgccgacggaggctttacggaagcgtaccaagctcatcctcagggactgggataactcaattgaaaattcgcacgaattcactgggcacaaggtgacgaacaaggaatccgaagttgactacaacgacgacggcgcttcggaaactaatatcgtctctgcctcggaacgtgctgatgaagctcccatgttcggcgtgacgtccgcttgcggcatgagaagagacatggaagattccgtctcagtgcgggcttgctttacccactgcttacactactaccgcgtcttcgacggtcaccgttggtgtcatgttgcgactatgtgcaatgagc

SEQ ID NO: 12240 - DNA, 392 bp, Glycine max
  Clone ID: jC-gmle01810061a07a1
cgttcttcttattttgctgctgtgcgttagcgtaaggtgaatgtctcacctgaaaatgacatgctgtggtggtaactgtggtagcggaagctcctgcaagtgcagcaacatctgcagaggctgcacagatgtacccacgacttgagctacacatgactcaaccatcaccgagaccttgttcatgggagtggcacctagcaaggctgaatttgagggtgctgacatggatgtgtccgctgagaacgatggctgcaaatgtgaaccaaactgcttctgctaccgctgcactagctagtgatgctgagggagcacaagctctcagcacagatagaccttaattaggaacaacgataaactattcatgtgtagctggaaacttatgtattacgtct

SEQ ID NO: 12241 - DNA, 435 bp, Glycine max
  Clone ID: jC-gmle01810061a08a1
catgcatctaacatttatactgctcgtgagcctaaggggaatgactcatctcaagatgacataatctggtgtcctcgtggtgtagctagtgctcaatctgctcaagaaacatgtagcagaggctaccacctgtacatacacttgagctaaagaggcatcaagctgcagcgcaacccagtccaatggacgtcatcaacatccactgacttaggcactactgactcgcacacataaagttacagcaaagatctcccttgtgagcctacctatatctgatggcgctgcagcacatagtgattctgaaggtgcacctgctcgcaacactcagcgagcctgtaataagacagctcgaaactattcttgtcgatcacgaaacttatgcaaaacatcagtaagacagtctgaacgatgggatagatctactagagcgactgt

SEQ ID NO: 12242 - DNA, 468 bp, Glycine max
  Clone ID: jC-gmle01810061a10a1
ggatgggtttcgttagcctgtgtcttctgtctgtatcagtatcaggtctgctccaacgcctagagcaccctgtcaaagctgatggctcacttagccttatggtcattggagactggggaaggaaaggaacatacaaccaatctcaagttgccactcagatgggaagggttgctgcaaagttaaatatcgactttgtgatatccactggagacaatttctacgatgatggattgactggtatagatgaccctgcatttgaaatttccttctcaaaaatctacactgccaagagcctccaaaagcaatggtatagtgtgttgggcaaccatgactacaggggtgatgttgaagctcaattgaatccaatccttcagaaaattgatcctagatggatctgccaaagatcatttattgctgatactgaaattgctgagttcttcttcattgattcaacaccttttgtggaca

SEQ ID NO: 12243 - DNA, 164 bp, Glycine max
  Clone ID: jC-gmle01810061a11a1
gatcaatcccaagaacgatgctttaactgcctaacacgctccaaatggactgacagctcatgcctagcctaactgttgcatcgaacacctgcacaggctttgtatccacccatcgactactaccatgttacatgctactattacctgcgggccagtgacaattt

SEQ ID NO: 12244 - DNA, 596 bp, Glycine max
  Clone ID: jC-gmle01810061a12a1
atcaactcgtgctggaggtcttggtattaatcttgctactgctgatgttgtcattctgtacgatagtgactggaacccacaagttgacttgcaggctcaggatcgtgctcataggattggtcaaaagaaagaagttcaagttttccgtttttgtactgagtatacaatagaagagaaagtcattgaaagggcctacaaaaagcttgcacttgatgctctggtgattcagcaagggcgattggctgagcagaagacggtaaataaagatgagttgcttcaaatggttagatttggggctgaaatggttttcagttccaaggatagtacaattacagatgaggatattgatagaattattgctaaaggagaggaggcaactgccgagcttgatgccaaaatgaagaaatttactgaagatgccatcaaatttaagatggatgacactgctgaattatatgattttgatgatgagaaggatgaaaacagatttgatataaaaaaaattgtgagcgagaactggattgaccaccaaaagggagcggaacgcattactcgagtctgatacttaaagcaacatgcgccaggtgtctacaaac

SEQ ID NO: 12245 - DNA, 58 bp, Glycine max
  Clone ID: jC-gmle01810061b01a1
tggagaactacctggaaggaattgaaccggatgaagaaactatggtttctatcatctg

SEQ ID NO: 12246 - DNA, 449 bp, Glycine max
  Clone ID: jC-gmle01810061b01d1
gtcggcggccgccctttttttttttttttttttctttttttttttttttttttttttttggggccgcataaatggtgatgggtaaaatacactaactatccaacccaaggccattttattttgactatatcaggatacaaaaacaaacttcctgcaagaagggaaaaagttgttaacaacagaaaaaagaaagaggtccacatccagagaaggggaaggaaaacccaaggctgcataggcaaacaatagacccaaagtgcttaaaacaccaacaaaaagatgtgtcaaggcctgaagccaacacttgggcaatgtttaaaaactgggaggaaaaataacttgagctaagaaactcaggttacatccatcctcccaatgactacaatgagccagaggagagcttcccccattcatcttggaagggagtgtagtgaaaattaaaaagaaag

SEQ ID NO: 12247 - DNA, 531 bp, Glycine max
  Clone ID: jC-gmle01810061b02a1
cactggtgttgctgatttggttgatggggtatataaactgagtcacttaaccaagctggctcgagaaaataatacggctagcaagtcagttgaagcagaccgcttgcatactatgttccttggcatggcagatgcaagagctggcctcggtaaactgggagaatcgttgcataatatgatgacactagatgcatggccaggggccaagcaacagaggtttgcaaaggagactatggagattatagcacctttggccaatcgcttgggaatttctacttggaaggaacaattagaaaatttgtgttttaagcatctcaacccaagccagcatgacgagctatcatccaagcttgtggaatcgtacgatgatgcaatgattacttctgcaatagagagattagagcatgcacttaaagatgaaggcatatcttataatgtcatttctgggcgacataagagctcgtatagcatttattgcagaatgttcaagacgaaactgaccatagatgatatccatgacatttatgggct

SEQ ID NO: 12248 - DNA, 475 bp, Glycine max
  Clone ID: jC-gmle01810061b02d1
agtcggcggccgccctttttttttttttttttttttttttttttttttttttttttttttttttacaagaacatggaaatttttcatattttggaagggcactttaattacagttgaacaagaagtttcttgccaagacacaagttgaagcccccatggttatgcatgttacaaaaaacacgagctggcctcaaatagatcacttcgaccctttgttttcactgcctaaaatttggaacccttgggtgtaagcaaaacatccgggaatgttaaaaaatccattggagaagccgccaaagacacttcggaagcttataccttaaaaatttcaaaacgttgtgcgtacattctataacccaaaggcagggcagaaccaaaccaaccatttgtcataacgaaaattcaccggggttttatatagctttccaatcaatctccacagaagggaacttgttcaacccaaaattctccattt

SEQ ID NO: 12249 - DNA, 409 bp, Glycine max
  Clone ID: jC-gmle01810061b03a1
ggtttctctgtttctctcttctcttgatctcatactttcactctcactcactattcttcatggatcataatatgtgctcacatatgaggacaaagatggcgataggatgcttgcgggtgatgttccctgggacatgttgattgaaacatgcaagaagctgaggatcatgctgagctctgaggccattggtctagctgcgacggctgtacgcaaaaaggcagagcatgaccttggcagctcctgtgttgctgtctatgcatctaactgtctgcgggactaaaagcttctgggctatcacggactacctaatcagaacgtggttgacttggaagctacaaatgacagcattcagggctgcatagaatctcatactatgctgccttaatgccttcatgcctgattatgactg

SEQ ID NO: 12250 - DNA, 534 bp, Glycine max
  Clone ID: jC-gmle01810061b03d1
agtcggcggccgcccttttttttttttttttaacacatgagcagatccttcaaccacaacattaactcttttcaatctcgcatacataaaatatcgggactcccatagtcaagttcttggagttttgttaagttttaacatcatcttgaaaagaagcttactaaaacataaactccacgacaacataagacagacataataaaaaaaaaaaggattaaggcagcatatgatgagattctatccagtccaaaatgcctttatttattgcttccaagacaaccatgttctgatttgttcagacctgatagcccagaagcttttaaccccgcatacagtttgatggatagagaggaacacaggtactgcctaagccctgctcttacttttttcaacagccctgagagctagaccaatggcatcagaactcttcatgatcctcagcctcttgcatgtttcaataaacatgtcccacggaacatcacccacaagcatccaatcgccatctttgtcctatatgtaagacatattctgatc

SEQ ID NO: 12251 - DNA, 533 bp, Glycine max
  Clone ID: jC-gmle01810061b04a1
gattggtggtaattgcagcctcactacaagcagctgctactttcatgcaacccaccatgttgatcaggagcaacactttgcatcaaaagtctactcagtccatttccaaggcttttggtttggaacctgtgggagctaaaaaggtcacatgcttcctttatgctgatcttaacgacttggctcacaagtgtgttgatgctaccaaaattgcaggattcgcccttggcacctttgccctagctgtctctggggctagtgctgaaggtgttacaaagaggctaaccttcgacgagatccagagcaagacctacttggaagtgaaagggacaggaacagcaaaccagtgcccaacaattgatggtggattggactcatttgccttcaagccggtgaaatacaatgccaagaagttgtgccttgagccaacttcattcacagtgaatgccgatggtgtggccaagaatggctcacttgagttacaaaacacagagctcatgacacgtgtgacctacactctggatgagaatgaggga

SEQ ID NO: 12252 - DNA, 424 bp, Glycine max
  Clone ID: jC-gmle01810061b04d1
gtcggcggccgcccttttttttttttttttttcaagattagcttattatatttatgcaattgcaaactgccgggaaaaggttgaaaattcacaagagcattatttatagaatagtagctcattacaaccatatgacagaaccgtttattaaagggaaataatgacacgcttgtttaaatccatatatctgaagaacagtcaccaccaggatatctcatctcatgggcaagagaaggaccatcaggctcagttccaaagtccacaaagaagttggggttgatcttcagtccacctttctcagtatcaacatcaatccgtattatgtgggagcctttctggacaagctctggataaaattgtctgtcccaagtactaaataacgagttgcgagcatagagccgcttcccatctaatcttaattgaa

SEQ ID NO: 12253 - DNA, 448 bp, Glycine max
  Clone ID: jC-gmle01810061b05a1
gaaggttggtgagcgtgtccgatctacaagagcagccggtgatcaaggcccattatatccttgcactgctggagtctttgcggcattgatgatggcccacattgcgatcctgaggaagaaagggcatccctactcgcaaatcatcaatgagagtgtcatcaaggcacatgactctttgaatcctttcatgcatgctcgcggcgtttctttcatggatgataactgttccaccacagctaggatgggttcgaggaaatgggctccacgacgtgactacatcctaacccagcacgccatggaggctgtggacaatggaactccagataacaggggcttaatcagcaacttactgtacacccagtgcactgagccatttgagtcagcgcttaactgagacccacaggagacattgttgcgccaccagatgcagactatgttcgtccggagt

SEQ ID NO: 12254 - DNA, 508 bp, Glycine max
  Clone ID: jC-gmle01810061b05d1
gtcggcggccgccctttttttttttttttaatgggaagtactagcgtgactcatttaaataggacaccaaggaacgttgctcagtggctgaacacaggcgggtacaaactgtaaaatgacaatacaacttacacactagcatccaatcatgaaaacccaaactaacaagataactgcagttctgagaaatctgaaaaagattcgaagggaaagccataattgcttttaagttctaattgctagaacgcaactccggacgaacaaaggctgcatatggtggcacagaaatgtctactgtgggtctcagttcagcgcaaactttaatggctccgtgcactgggtctgacaggaagttgctgattaagtccctgttaacaggagttccattgtccacagccaccatggcctgctgggttaggatgtagtcaaatcgtggagcccatttcctcgaacccaagctagctgtggttgaacagttatcaaccatggaaggaacaccacgagcatg

SEQ ID NO: 12255 - DNA, 483 bp, Glycine max
  Clone ID: jC-gmle01810061b06a1
gcatttgcaacactaaaaacttcttaacgctctcatttcgcaaacacccacttgtacggattgcagaagcagaggaagtgtcttcatgaggtggcattcctatgcttacctgcagcctcttacataacaggacagaccatttatcactatgggggattaacactgagtggactctatatgaaaccgagaagtactaccaacacactctgtaacacacttctatagacacatcttctaccataagttacaactagtaagaggtgaccaaatcatgagcataagatctaggacccatatatgtgtgcaatatctaaagaagttcaagccatagtgaaaatgcattgaaaagagtgcatctgacaatgtgttgtcagcattattatataaactatgataacagcaaggtctgatgcatacgttgctagctttgatattagtattgacaagaaatagctgaaagtgccttgctgcaatctatatcat

SEQ ID NO: 12256 - DNA, 390 bp, Glycine max
  Clone ID: jC-gmle01810061b07a1
cataaaaagaccaattcgactggtgtagatcctaaagtgtgtacattaaccttacttgatctgtggtcatagacagttacatactctctcgggcattgggcaacatgctagagccatgaatgctacaataatcacacgccagatcgatctgctcatcacaacttctgtcatgtacactattgctagtctgagagaacatcagacacccttcataattatggcctggttgccctaacatgcaagcgcatatagtgaccgagctaagatggtattcacatgtggcaaaccgtacagaatcgcatcgatagagctcacccgaacagacgatgcacatgcccattctatacatttatctgactgaagtcacagaaaccgtattacagacgctac

SEQ ID NO: 12257 - DNA, 451 bp, Glycine max
  Clone ID: jC-gmle01810061b08a1
gatgcattgaacacttctacttatcgtgaccctaaagggaatgatgcatgtaaagatgagaaaagctcagatcctgtggtcaatcttgtgccagattcgtccataaaggatgttgcataaaggaccaccaatagatcaaatttgggaaacacgcaacgagctgcagacttaaaagcttcaatggttgaagaggaacctgcactgccttctgcactaggtactcccaaaactaaagtcccatgatatatcttccttgggagtcgacaaatatctgatggtagcgatagcacagtattgactctcaaggtgcaacctgacgcataactaggcgagcctctcataagacacgttggaaaggaaacttctcgaaagggaaattgcggacaaacaccagtgtgacactctgaacgaggggctggatcaactagtgtgtctgtgatcccatcacctg

SEQ ID NO: 12258 - DNA, 516 bp, Glycine max
  Clone ID: jC-gmle01810061b09a1
aatctttctgcaccatcgttctccatttttggctttacaaaaccactgtgtctgattaagggttctttaatatttccaatatttcttgtagtgaaaaagttgttagctaaaagaagaccaagtttttggtgttgtacaaggaagagacgaattaacatgaaaattcagtgtgacgtgtgtgagagagctccagcaacagtgatttgttgcgcggatgaggctgctttgtgtgccaaatgtgacgttgaagttcatgctgcatacaagcttgcaagcaagcaccaaagacttcttgttcaatgtctatcaagcaagcttcccacatgtgacatttgccaagacaagccagcattcatattttgtgttgaagacagagcactcttctgtcaggattgagatgaaccaatttattcagccggaagcctttccgcgaaccaccagcgcgttcttgctactggtattcgagtggcctcgagttctaattgcaccatcgaccatgaaaaaagtcactcggag

SEQ ID NO: 12259 - DNA, 333 bp, Glycine max
  Clone ID: jC-gmle01810061b11a1
agattgagctcgctcttgcgtttcctcactctatcatgaacactggtgtgaatacggggcactgaaagagtaacacaacgttactacctgctccgagtcaaaatcttgggtcagatgtagccgaaggaatcccaggcgtttcaagaagggtacagcaccaatacagcggtttacttctggacgactctaagggactccctgtacgctgttactgtacgcactcctatgcagcacaccgatcacgtacgtacgcattccgatgacccatctaatacgattgatctggcactactgctcagtatatcgttccagactcatacgcgagcgagtcat

SEQ ID NO: 12260 - DNA, 541 bp, Glycine max
  Clone ID: jC-gmle01810061b12a1
ctcgcgcttccgccgccacactcgtcggagcacactcgccggaaaacactccccggcaaaaaaaaagaaaacctcaaagactaacccgagtcgttatagtgggttggagtgaacgaaaagaaacaaaggcaatacaaaaagggcaaacacgaatacacggttttcattctttcaccactcttgtttccttttacgacgtcgttatggaactcaagtttatgcagttttcgcaacacgttcttcctcattccccttcttcatctcaaaccctcgcttctgcactctcttccccttcatcgtccaaaacgcgaaccctagtgtgtcgtttcgtgaatcgctcgagcctctttccgaccaccacccgccttcttcggagaaccaaatcgtttgagcaccacgcgcttttcacgcgcagggggagtttgagaagggcttgcagcgctagcttggagcctttcttcgacgaagagttcgcgaagaagattgaagatctcgcactcaagtttcagctctctgatgaaaataccaacgcgaacgattt

SEQ ID NO: 12261 - DNA, 543 bp, Glycine max
  Clone ID: jC-gmle01810061c01a1
ttgcaattgaagttgaagtcttgcccttctctcttcaactccaaacacaagacatcatcatccatggctgcctccgtctccactgtcggagctgtcaacagagctcttttgaacctgaatgggtctggacctggggtttcagctcccagttcatccttctttgggagcagcttgaagaaggttattggctcaagggtccccaacacaaagatttcctctggaagcttcaagattgttgctgtagaagagaagaaagagattgaagagacccagcagaccgacaaggacagatggaagggtcttgcctatgatatctcagacgaccaacaggacatcacaagaggaaagggtttggttgactcccttttccaagctccacaggatgctggaactcactatgctgtcatgagctcctacgagtaccttagcactggacttcgccagtacttggacaacaacatggatggattctacattgctccagcttttatggacaaacttgttgttcacattaccaagaacttcatgaccctgcccaacatc

SEQ ID NO: 12262 - DNA, 336 bp, Glycine max
  Clone ID: jC-gmle01810061c01d1
agtcggcggccgcccttttttttttttttttagtgctaaacaaacttttgacctaacatcgcgtccttggatgaagatagcggttctctttttatacaacccaataacaatacccaatgacttgcatgtttaacagaataacctgtcgctcttactgtcacaccgaccttgagcctggctttaccatacagggttggttgcaaccgtattatcttatacttggtcccataagcaaggtgagttctgtgatctggtgtctgaacactatggctatcacagactgatgcccatgactgctgtaacctatatctatctctatcttgaacaactatggag

SEQ ID NO: 12263 - DNA, 608 bp, Glycine max
  unsure at all n locations
  Clone ID: jC-gmle01810061c02a1
cagtgttcttgtattcaatatacttaaaaatgaaacactttcatgcattcaagtataccaaacaaaattccaacactatattttggagaaatatggtttcaatgtgtattctttttcaaatttgtaagaagaatttattactggatatggttaaatatggctgatatatatttttcctgtagggactgcaacctaatctactaactactactgacctctaatgcaggtcaagtctgatctggctaaaaatatccaatcattagaaccaaactctaaatgttatgtcttgtaatgagtgattctcttacactctgaagtataacaattttaccttataaggtttcaattcaatcaaagtaaaatggaaagcgtttccttatttatcaaatatgcttatgttttgtaatgttcttctactaatatgtggcgagcttaatccaaagtgatctttcttttggaactatccagttgaatagcagcatattttcagccttgaactttatatcntatctgtgactgttcttctttaagagtggtattgtatttgatgcacgataactggccttctatcaggtaaagggtcaacttcctattgccattctttaata

SEQ ID NO: 12264 - DNA, 86 bp, Glycine max
  Clone ID: jC-gmle01810061c02d1
agtcggcggccgccctttttttttttttttttttttttttttttttttttttttttttttttttttttctcgagccctcgggccgg

SEQ ID NO: 12265 - DNA, 399 bp, Glycine max
  Clone ID: jC-gmle01810061c03a1
gtgcaatcataggaatgatgccctacttgatggcagtgatataaatgggaggcgggtgaagcaaaggctctagtatgtgaagaacactgcacagcattctgtacaaccctcttctactctccgttttaaaagatagcgagagcttagttagagggagaatatatatataatcttttataggatcagaggcaattcttaattttcttggcttattcatgtgtaagagatgtaaacgtaatttgtgttgttgctgatactgttctgtgtaacgtgtaggtttccgcactatcctcagtattactttttactggaaaaacatgtcttgcaagtgttgagcattacatattcttatgtatacctagatacatatgtatagtatataaaaaaagaaaatgcaga

SEQ ID NO: 12266 - DNA, 413 bp, Glycine max
  Clone ID: jC-gmle01810061c03d1
agtcggcggccgcccttttttttttttttttttatatatatatatatgtatctatgtatatataaaaatatgtaatgctcaacacttgcaagacatgtttttccagtaaaaagtaatactgaagatattgcggaaacctacacgttaaacagaacagtaacagcaacaacacaaattacatttacatctcttacacatgaataagccaagaaaattaagaattgcctctgatcctataaaagattatatatatattctccctctaactaagctctcgctatcttttaaaacggagagtagaagagggttgtacagaatgctgtgcagtgttcttcacatactagagcctttgcttcacccgcctcccatttatatcactgccatcaagtagggcatcattcctatgattgcac

SEQ ID NO: 12267 - DNA, 522 bp, Glycine max
  Clone ID: jC-gmle01810061c04a1
ctggattggagatcacatatctgctatagctgccggagccttttaggttcatcttcacttgctttgctgctgttcccctcatagcgtggatagctctgtcactgacaaatgccattgtaaaagactttgagaatttaaagggcccttgtccgaactgcggatctgaaaacacctctttctttgagactatacttccaatttcaaatggcggattcaccaacactgtcaaatgctccaactggggcactgcaatggaatatgattcaacttcaagatggattacattaccacaaggaagtaacgcctgaggggaagtattgcctgaacatcatatgtatagatccagcaatggtagatcattaatagcagttcttgtgagagtgacaaatttatcatttagcaaatcgtcatgttcttccgcaaatgaccttcaagtcatgttatcactatcacacacaattggtgtcatctcaatttatgtgccaccatcctacttgtaaagataagggctttggatatata

SEQ ID NO: 12268 - DNA, 501 bp, Glycine max
  Clone ID: jC-gmle01810061c04d1
gtcggcggccgcccttttttttttttttttttaatgacaattagcattaattatttaaatagacaattttccttattgttcttgatgctcctgggggatgtaaaggttctggtcttaggagtgtgtaacaaaaatccttacacacgttattctaggttagactcatggatggtgttaagcaccctcataactcaactcttcaagcagaggcaatccagtgtatgctatacaaagtccatattacaagtatatatacaaagcccctatacttacaagtaggatggtggcacataaattgagatgacaccaattgtgtgtgatagtgataacatgacttcaaggtcatctgcggaagaacatgacgatttgctaaatgatgaatttggcactctcacaagaactgctattaatgatctgccattgctgcgacaataaatatgattgtcaggcatacctacactcaggcgttacttacttctggtaatgtaatcaatcctgaag

SEQ ID NO: 12269 - DNA, 467 bp, Glycine max
  Clone ID: jC-gmle01810061c05a1
gatattatgtatagatggagccaattgatcatggaagccaacctgaaaaggaaaaatggaagaggcaaggccacaacagaagtaagaggagccttagcaggaacatgtttggtctcttgcggacgattacattgcacttgacacgaggttccccaccctctgtacaagcattacaggtgaaggtatctatggccaacctgcgtagcgtcagattctgctgctggactcaagaccgactgaggatgataggctaacatactgagaattggactatgcagaatctggtatacattgacccagctcaacaggtttttagctattcgatcgtggatgggactgtaggatttcactcctacgttgaaactatgaaagtgctgccaatggctgatgggagagagactgtgtggctatcagaggctgaacctgacgaagggtggaaactggagcatcttgattacttatagaca

SEQ ID NO: 12270 - DNA, 477 bp, Glycine max
  Clone ID: jC-gmle01810061c05d1
gtcggcggccgccctttttttttttttttggagagtaaatcaagtgttcatatatattcgtaactcaaagtaactttgaactgaaatttttatttaattgctacaacacaatgcaacagcatatcttcagtttttctactagtaagtacatactaatgatacactgaaatcgcaaacacatcaattaaagtacttttttttctcagcaataaaagtacttgataaactgaaaaggctccattgccatatattggtaaatgataatcccttgacaaatattactaacatattttttcacacattctttattaataattaaaatttattaaaaatataattattttaggttatttcttattattagaatttattgcactaacactcctttaattgcttcaggacaaaacttagatatacttttgtaagggttggttgtcttcttctccaatcaaaattaaaatttcattttgataatcg

SEQ ID NO: 12271 - DNA, 560 bp, Glycine max
  Clone ID: jC-gmle01810061c06a1
gatattatctatagatggagccaattgaacaaggaagccaacctgaaaaggaaaaatggaagggcaaggccacaacagaagtaaaaggagccaaagcagaacaagtttggcctcttttggaggatttctttggacttgacaagtggttccccaccctctctacatgcattacacgtgaaggtatctatggccaacctgcgtgtgttcgcttctgctctggtttcaagacccctgtggatgatggcaaacatactgtgaattggactaagcagaatctgctatacattgacccaactcaacaggtttttagctattcgatcgtggatgggaatgtaggatttcactcctacgttgtaactttgaaagtgctgccaatggctgacgggtgtgagattgagtggctatatgaagttgaacctgtcgaagggtggaaactggagcatcttgattacttcatagacacgggctcgcaggtcatggctcagaggatgcaagcagctttgaagacaatggacgaagcagtattcatggcttaaaagttaggacaaaactcatatact

SEQ ID NO: 12272 - DNA, 486 bp, Glycine max
  Clone ID: jC-gmle01810061c07a1
cctaattgctatcaatattcaatattctatactatactttattcttattcttccagttatatggttagtatttgctaatagctcccatcaaaggcccaaaaatgggtaccatcgttgaagcagataacacatataccaagatcctaggaagacggccagtcttttattatggcatgggacacatgctcaatgacataactgctgcttgttgggtcacatattaattattgatctagacagatattggactttcaccaaggaatgcagctgttgtgatgctttctggtcaagtggctgatggatttgtcaccatatttgttggtgaactgacacgtttggacactctaagatatcgcatggtgctggatctttattggtggcactttcattttcttctgttttcggtggttgtgtaccatgcaaactgggtagttacgattcaggtactcttgtaactttgagttacaacgtgtctgcagcaatctt

SEQ ID NO: 12273 - DNA, 470 bp, Glycine max
  Clone ID: jC-gmle01810061c08a1
gcaagttgcagaatagctacactgtgaattttgctacgtttcacagtgactccgacattgtagtgagagaagccctttgtattttcgattctctctctcttttcctggtacttctatttttgagataactaacaggcctttgcaaattgcaacttggctgctgctgtaggctcaatctctcgacttctctctctacacccaactcaccttcagatactgctttctgccgactagtgcgaccagttcatggttctcgcacgcgagtactgaaaaccagctccaatgaagaaggccataggtcaaactgttagggaacttaacagagaacttaatcataagatgccgaaagttcctgggatagaacagaaggttcttgatgctaccaacactgaggagtggggtcctcatggatcacttcttgcacatgttgcacaggcatccagatattatcatgacaacttaatgagcat

SEQ ID NO: 12274 - DNA, 543 bp, Glycine max
  Clone ID: jC-gmle01810061c09a1
gctggaatttgctgtggtgttgctggagaaggtgacactccggctccactcgagcgcactcctcgccccttcaggcgccggagtttggacatcttacctttaaaatatatcgccgacatgcccatgccgtcgacggaggctttacggaagcgttccaagctcaacctcagggactgcgatcacgcaattgaaaattgcgacgaatccactggacacaaggtgacgaagaaggaatccaaagtagactacgacgacgacgtcgcttcggaaactaagaacgtaactgcttcggaagttgaagaagaatctcccaagctcggcgtgacgtccgcttgcggcaggagaagagacatggaagattccgtctcggagcggccttgctttacccaaagcttacactacttcggcgtcttcgacggtcacggttgctctcatgttgcgactatgtgtaaggagcggctacacgagatcgtgaatgaagaaattgaaagcgcgcgcgagatttggagtggaactgacatggagaacgattcctcgctggac

SEQ ID NO: 12275 - DNA, 532 bp, Glycine max
  Clone ID: jC-gmle01810061c10a1
ctcgcgcttccgtcgccacactcgtcggagcacactcgccggaaaacactccccggcaaataaaaagaaaacctcaaagactaacccgagtcgttatactgggttggagtgaacgaaaagaaacataggcaatacaaaaggggcaaacacgattacacggttttcattatttcaccactcttgtttccttttacgacgtcgttatggaactcaagattatgcagttttcgcaacacgttcttcctcattccactacttcatctcaaaccctcgcttctgcactctcttccccttcatcgtccaaaacgcgaaccctagtgtgtcgtttcgtgaatcgctctagcctttttgcgaccaccacccgtcttcttcggagaaccaaatcgattgagcaccacgcgcttttcacgcgcacggcgagtttgagaagggcttgctgcgctagcttggagcctttctgcgacgaagaattcgcgaagaagagtgaagatctcgcactcaagtatcagctctctgatgaaaataccaacgc

SEQ ID NO: 12276 - DNA, 485 bp, Glycine max
  Clone ID: jC-gmle01810061c11a1
tcttgttgccttcatggccaagccagtgtccattgaggtatggaacccaagtggcaaatacagagttgtcagcaccaaaccaatgcctggaactcgttggatcaatcttctcattcaaaatgatgttcgccttgaaatatgtaccgagaagaaaacgattttgtcagttgaagacatcattgctttgattggtgataagtgcgatggagttattggacagttgactgaagactggggagaagagttgttctctgctttgagcaaagcgggaggcaaagctttcagtaacatggctgttggttataacaacgtggatgttgatgctgcaaacaagtatggtgttgctgttggaaatactcctggagtgctcactgagacaacagcagagttggcagcttcactaactttggcagctgctagaaggatagttgaggcagatgagttcatgagagcaggattatatgatggatggctacctcatctat

SEQ ID NO: 12277 - DNA, 576 bp, Glycine max
  unsure at all n locations
  Clone ID: jC-gmle01810061c12a1
tcttgttgccttcatggccaagccagtgtccattgaggtatggaacccaagtggcaaatacagagttgtcagcaccaaaccaatgcctggaactcgttggatcaatcttctcattcaaaatgatgttcgccttgaaatatgtaccgagaagaaaacgattttgtcagttgaagacatcattgctttgattggtgataagtgcgatggagttattggacagttgactgaagactggggagaagagttgttctctgctttgagcaaagcgggaggcaaagctttcagtaacatggctgttggttataacaacgtggatgttgatgctgcaaacaagtatggtgttgctgttggaaatactcctggagtgctcactgagacaacagcagagttggcagcttcactaactttggcagctgctagaaggatagttgaggcagatgagttcatgagagcaggattatatgatggatggctacctcatctatntgttggaaacttgctcaggggcanacaagtggtgttattggagctggtcgaattggatctgcttatgcaagaatgatgggttgagggttc

SEQ ID NO: 12278 - DNA, 494 bp, Glycine max
  Clone ID: jC-gmle01810061d01a1
ctgtactacttgttctatataaattctacccatcccttgctctcatgtcacattgtatttgcactacgaccatttcaggaagaaagaagtgcaatggacatcggaacctatggctatcctacaccagcagtgaaaaagattgagtcttactatgatgtgccagagggagtggatattcggggaagatatgatgcagagtttgcaaaaatcctcacaaaagatgctttgaaattcgttgctgacttgcaacgtgagttcaggaaccatatcaagtatgcattagagtgcagaagagaagcaaagaagaagtacaatgaaggggctcttccagagtttgatcctgccacaaggtacatcagagagcaagagtgggtgtgtgcacctgttccaccagcagttgctgatagaaaagttgaaatcactggccctgtggatagaaagatggtcatcaatgctctcaactctggagctaaagtctttatggctgattttga

SEQ ID NO: 12279 - DNA, 314 bp, Glycine max
  Clone ID: jC-gmle01810061d01d1
agtcggcggccgcccttttttttttttttttcttgcttattttactttttacttaacttttcggaaatttactgggatgagggctttttttgccaccaaactatttccaatttgaactttttcgaagttctaccaaattttcgttccaaacgtactgccaaacggtgcattaatttttttcttaccaccaccggacggggggggcgtgttatcttcctaattatcctattgccaagggtagaattgtggtctgaggtcaggcacttcactgcactcacaacttgtaaccgctgcccaatgttgcgtatatttac

SEQ ID NO: 12280 - DNA, 604 bp, Glycine max
  Clone ID: jC-gmle01810061d02a1
atcaagtctgatggtattgctggcctttatcgtggtttcaacatctcatgtgttggaatcatagtgtaccgtggtctttactttggaatgtatgattctctgaaaccagtggtcttggttggtggattgcaggatagtttctttgctagttttcttttgggatgggggatcacaataggtgccggcttggcctcttaccccattgatactgtgcgtagaagaatgatgatgacatctggagaagctgtaaaatacaagagctctttggaagcattcaagataatcgtcgcaaaagagggtactaagtcactctttaaaggtgctggtgcaaacatattacgtgctgttgcaggtgctggagtgcttgctggttatgataagctacagctcatcttgttcggaaagaaatacggttctggcggtggaagttaatatacagataatgatgacgacaactatctgaggcaatgatgttgcttcccctttgctttgaatcatttggatgaataatagtgggtttggagtttccccgatgtaagggctttatattaacataacatagttttgcaaaacttgattttagttgcttatacatgtcttaagc

SEQ ID NO: 12281 - DNA, 439 bp, Glycine max
  Clone ID: jC-gmle01810061d02d1
agtcggcggccgcccttttttttttttttttttttttttttttttttttttttttttttttttatgaaaagctaacaatttaaaattgaaggaaaataatcaaattttttttttgacaaatgataacataatccacttaacaaataattgtatttcccaagacattctaaacactatcttccacgtttttaattggcatcccatttattggtcaaactaaaaacattgccaaaccggtgaattaccaaaggggttggataaaaagctgcccttctatgggtggtgggttcagagaagtataaacttaacaagcctgcttgaagacctataagaacaaatcatctccatattattgaaacaggacagattaatgcaccaaagtgcgagtgtcctcctgattgcccaaatcagggagctcagaactatgggaaaacttcat

SEQ ID NO: 12282 - DNA, 458 bp, Glycine max
  Clone ID: jC-gmle01810061d03a1
ctgcattgcagatcacatatctgttaaagctggcagagccttatacgctcattgtcacttggataggtgctgatcccctaattgcgcggatcgctatgatactgacagatgccattgtataagactttgtgaatttagagagcccttgtccggactgcgcatctgatgacacctggatctttgagactacacttggaacatcaaatggaggtttcaccaacactgtcatacgctacatctgaggcactgcactggcatgtgatgcatctacaagatggattacgataccataaagcatgtacctgccagcatggacgtctgcctgctaatcatataaagctgaccacctgttggatatcgattttagcactgatatgtaaagcgacaagcctatcatggacgaaaatcatatgctctttcgctcatgaactggaagacctgtcaccactatcatacac

SEQ ID NO: 12283 - DNA, 442 bp, Glycine max
  Clone ID: jC-gmle01810061d03d1
agtcggcggccgcccttttttttttttttttttaatgacaattagcattaattatttaaatagacaattttccttagtgttcttgatgctcctgggggatgtaaaggttctggtcttaggagtgtgtaacaaaaatccttacccacgttcttctaagttacactcatggatggtgttaagcaccctcataactcaactgttcaagcagaggcaatccaatgtatgctatgcaacgtccatattacatagtatatatactaagcccctatacttacaagcttgatggtggcacataaattgagaagacaccgacagagtgcgatagtgataacatgacttcacggacatttgcggaagaacatgacgaattgctaaatgatgaatctgtcactctcacaagaactgctatgaatgatctgccatagctggaacaataaatatg

SEQ ID NO: 12284 - DNA, 446 bp, Glycine max
  Clone ID: jC-gmle01810061d04a1
tataggggtagtggattgacggatgcggtattgcttggcaaggatctaaatcgttaggcagggtgaatacgcaggctgtgaatgcgtgacaaccactaggccgtgttgaatgcgaccatgatgctctctgggtttttagataatgcgagagcctctcctgtgacactctatatgtatggtctctctactgaaacgtcgcacaagggaactaatacggctgaatcatgtggaacagtcgtgcacgctgctgaactggctgacgttgctgccatcggtcatggcatcggtgtcaggctatcgtgagcattacttgagagcgtgactaccttgagcgtcagcgatacatatcacatatttgtaggtgttgccagagacagttcgattggactcctaatgcctttattgcgtgggtgatcataccagggtgaatcatctactgcgggatc

SEQ ID NO: 12285 - DNA, 347 bp, Glycine max
  Clone ID: jC-gmle01810061d04d1
tcggcggccgcccttttttttttttttttttttataggtacatatgaacccttgtatatatgaaaatcagtggtgctcaacacttgcatgacccgcatttccagacaacagccctactgacgattttgcggaaccctccgcgttatacattccaaggccagctacaacccggggaacccacacaggtcttacacacgatgaccctacgattttttagagatgcctttggggctctatgcgattatatctataccctacatgtagcttaggtatcactataccctagctcggaaagcttatgaggggcctacaggatgctgggcagggaggtttacttactcgatgct

SEQ ID NO: 12286 - DNA, 479 bp, Glycine max
  Clone ID: jC-gmle01810061d05a1
gatattatctatagatggagccaattgaacaaggaagccaacctgaaaaggaaatatggaagggcaaggccacaacagaagtaaaaggagccaaagcagaacaagtttggcctcttttggaggatttctttggccttgacaagtggttccccaccctctctacatgcattccagctgaaggtatctctggccaacctgggtgtgttcgcttctgcgctggtttcaagacccctgtggatgatggcaaacaaactgtgaattggactaagcagaaactgctatccattgacccaactcaacgggtttttagctattcgatcgtggatgggaatgttcgatttcactcctacgtttcaactttgaaggtgctgccaatggctgacgggtgtgagattgagtggctatatgaagttgaacctgatgaatggtggaaactggagcatattgattccttcatagacactgtcttgcatgtcatg

SEQ ID NO: 12287 - DNA, 476 bp, Glycine max
  Clone ID: jC-gmle01810061d05d1
gtcggcggccgccctttttttttttttttggagagtaaacaaagtgttcatatatattacgaactcaaagtaactttgaactgaaatttttatttaattgctacaacacaatgcaacagcatatcttcagtttttctactagtgagtccatactaatgatacactgaaatcgcaaacacatgaattaaagtacttttttttctcagcaataaaagtacttgataaactgaaaaggctccattgccatatattggtaaatgataatcccttgacaaatattactaacatattttttcacacattctttattaataattaaaatttattaaaaatataattattgtaggctatttcttattattagaatttattgcactaacactcctttaattgcttcaggacaaaacttagatatacttttggtagggttgcgtgtcttcttctccaatcaaaattaaaatttcattttgataatc

SEQ ID NO: 12288 - DNA, 515 bp, Glycine max
  Clone ID: jC-gmle01810061d06a1
gttaaagagaggactatatatggagattcatactatggctctcacgtgaagcaatatggtgatgtaaggcttaacctaaatgttctcttccattatccggatacatatcctgctaatgataatatcacttttcgggatgaaaacttcttatggtcaccttcaaaaccagtcaaccaacgtgatgctgatctcatccatttttgggatcagtctcgcaaagcttctgagggttctctcatgaaacatacagctcagaaactagttatggacacaatgtctcacagaatgcctgtacgacaacagagtaaaactgattgggaagcttatattgcgcattgaaaagggtccagaaatgactctcgctgttagaccggctggatcggcacttgttgatgactggcactagctgaaaaccatggtgacgacttttgagacacattgcggatccttgtctcaatacaggatgaaacacatgacgacctttgcaaacatctgcgatgtatggataaagaatg

SEQ ID NO: 12289 - DNA, 592 bp, Glycine max
  unsure at all n locations
  Clone ID: jC-gmle01810061d07a1
gtaagttgcagaatagtttcactgtgaattttgcttcgtttcacagtgactccgacattgtagtgagagaagccctttgtatttttgtttctctctctcttttcctcgtaattttatttttgagataactaacaagtctttgcaaattgcaacttggttgctgctgttggctcaatttctcgttttctctctctacacccaactcaccttcagtttctgttttctgccgactagtttgaccagtttatggttcttgcacgcgagtactgaaaaccagctacaatgaagaaggccattggtcaaactgttagggaacttaaaagagaagtaaataagaaagtgttgaaagttcctgggatagaacagaaggttcttgatgctaccaacaatgaggagtggggtcctcatggatcacttcttgcagatattgcacaggcatccagaaattatcatgaaaacttaatgatcatggcagtaatctggaagcggattaatgacactggcaagaattggcggcatgtctacaaggctttgcagtattagaatacttggtggctaatgggtcanagcgagtcatagaggaaatagagaa

SEQ ID NO: 12290 - DNA, 514 bp, Glycine max
  Clone ID: jC-gmle01810061d08a1
gtaagttgcagaatagtttcactgtgaattttgcttcgcttcacagcgactacgacattgtagtgagagaagccctttgtatctttgtttctctctctcttttcctcataattatatttttgagataactaacaagtctttgcaaattgcaacttggttgctgctgttggctcaatttctcgttttgtctctctacacccaactcaccttgaggttctgatttctgccgactagtttgaccagcttatggctcttgcactcgagtactgaaaaccatctacaatgaagaaggccattggtcaaactgttagggaacttaaaagagaagtaaatcagaaagtgttgcaagttcctgggatacaacagaaggttcttgatgctaccaacaatgaggagtggggtcctcatggatcacttcttgcagatattgcacaggcgtccagaaattatcatgaaaagcttatgatcatggcagtaatctgcaagccgattaatgacactggcaagaattggc

SEQ ID NO: 12291 - DNA, 122 bp, Glycine max
  Clone ID: jC-gmle01810061d09a1
gtaaaatcctggatggcctttttattcctactgatgagtttcctgaggaacgtaggggttcctaaaattgcttctcccgcataggggttggaacaattcgtctgtgctaggttccaatatca

SEQ ID NO: 12292 - DNA, 464 bp, Glycine max
  Clone ID: jC-gmle01810061d10a1
ctgtgaaggacaaggctgattttgatgagcataagaagaaagtggtggccaacagtgcatttgagaatcctagtagaaccaccgacaagaacaacatcatggtcggagctcttgttcatattagcattccgcaaacacttctacacgggctccatgcacttgctgaataggaccatgttaagctcttcgaaacgggcacggatgatggttgtgtagaagacaatgccctcatacaaggaatcaatctcaatggtggcaagagcagtgtaagagagagttctcttggccctctcacatgctgatctcaacctcctcaatgctctggcatcttcactaatatgcttcttgtacttcctctggaatccctgaacaaaatggttcaccattctgctatcaaattgttcacgtgccaagagagtatcaccagcagtggctatcacttcgaaaataccctgctcaatggt

SEQ ID NO: 12293 - DNA, 563 bp, Glycine max
  unsure at all n locations
  Clone ID: jC-gmle01810061d11a1
tcttgttgccttcatggccaagccagtgtccattgaggtatggaacccaagtggcaaatacagagttgtcagcaccaaaccaatgcctggaactcgttggatcaatcttctcattcaaaatgatgttcgccttgaaatatgtaccgagaagaaaacgattttgtcagttgaagacatcattgctttgattggtgataagtgcgatggagttattggacagttgactgaagactggggagaagagttgttctctgctttgagcaaagcgggaggcaaagctttcagtaacatggctgttggttataacaacgtggatgttgatgctgcaaacaagtatggtgttgctgttggaaatactcctggagtgctcactgagacaacagcagagttggcagcttcactaactntggcagctgctagaaggatagttgaggcagatgagttcatgagagcaggattatatgatggatggctacctcatctatttgttggaaacttgctcaaggggcaaacagttggtgtaattggagctggtcgaatnggatctgcttatgcaagaatga

SEQ ID NO: 12294 - DNA, 495 bp, Glycine max
  Clone ID: jC-gmle01810061d12a1
catttctccatttccattttctctctcacttttcaagaatcgtaagctatgggaaagtcttacccaactgtgagtgctgattaccagaaggccgttgagaaggcgaagaagaagctcagaggcttcatcgctgagaagagatgcgctcctctaatgctccgtttggcatggcactctgctggaacctttgacaagggcacgaagaccggtggacccttcggaaccatcaagcaccctgccgaactggctcacagcgctaacaacggtcttgacatcgctgttaggcttttggagccactcaaggcggagttccctattttgagctacgccgatttctaccagttggctggcgttgttgccgttgaggtcacgggtggacctgaagttccattccaccctggaagagaggacaagcctgagccaccaccagagggtcgcttgcccgatgccactaagggttctgaccatttgagagatgtgtctggcaaagctatg

SEQ ID NO: 12295 - DNA, 172 bp, Glycine max
  Clone ID: jC-gmle01810061e01a1
ctagtgtttaatcttagttcaatttctatatgtagaattttgatacgacagataaagttatgcccttgttatttttattatgttttgaacaaaatattaatgggaaggaaagttaccaaatttcaattaaaaaaaaagaactatgtctcattctcattcctaaatttctcct

SEQ ID NO: 12296 - DNA, 526 bp, Glycine max
  Clone ID: jC-gmle01810061e01d1
aaaaacaaatttaatatttaatcattattgattcaatcactgttattcaaccaatacctccattgactcaactaccaatccggttttaaaaacattggtttaatgagatactggatatatatggtacaatcgattatttgttgtatacaaagactgaggcaggacggtacagtgaggctgacaaaattatcacagtttaccctgctcttgcagttgttcctctgtcacaaagaaggcatggaaaccatatggaactctatgcgtgaattcgacaactgcaacaggatctgctgacattgcttttgcattgatgacatgcacaaacgattttccggtattttcatcgtgtacaaaacaaatcaagtatccatcatcttcttcagaatcgggaccagggacacgagggacataaacagcttccgagccatactttgctagtcccaagtcatagagaccctgaacatttcctactacttcaagttttgtttctccattatcccggtcagcttgcaaatcatatttaata

SEQ ID NO: 12297 - DNA, 470 bp, Glycine max
  unsure at all n locations
  Clone ID: jC-gmle01810061e02a1
ggactctcgacaaactcagctttacaattgtgtctgcccaaacaaacacgctagtaaaatgaaccatgttgatgttgttcgccgccactgaacactgaacactgattactcactccttcatggccacttcgctgctatctttctacatttcgcccacaacctcagccttcagattcaaagcctccgccatggctaccaccatcgccgaccctgctaccaaggtggctcccgccgtcattgtcggcggcggaagagtgggcagggccttgcaggacatgggcaccggccaagacctnctcgttcgccgaggagagtccgtaccactcaatttcgagggccccatttttgtgtgcacgaggaacgatgatcttgaatctgtgcttcaatctacaccttcttctagatggagtgattcggtgttctttcagaacggaatgctggacccgtggcttgagagcanaggtttggaa

SEQ ID NO: 12298 - DNA, 448 bp, Glycine max
  Clone ID: jC-gmle01810061e02d1
tcgtcggcggccgccctttttttttttttttagttatcaataatttattatattttttaattaatttttttaatggtaatgggaaattcttttaaaataaacattaaaattacaacactccacacatcacacaccacacactagggttgaagacttaagcttcatacaattctcaactcttttagccattgggaatgcaaagggcatgggtctggcttgccttgagccgtagccttctcagagagagaataaaaccaaccatttctccatttgaactccttaactgccgtgggaaagtgggctacggctcgggaatatgcacataagcgctcttccatggcctcttcaaatggtaaccccttttcacttgatgctgctgatgccagttctgttataaggctggacatttcagtgcggaaattccttgtccacgacacctactgaaacc

SEQ ID NO: 12299 - DNA, 481 bp, Glycine max
  Clone ID: jC-gmle01810061e03a1
gacggctgcgacgttctacactttgaccccctcttctctgatttgcgcttgcatcgaggattagatctacatgacttggcactcagggatcccgagccagtctctgatgctagcatttatcgaagtgccggtagactggtacgacatgctcgctaccaggttgactatggtggaagatcatgatcgaccatcggggagcatttgatacacttcggggtgctgcaaggaggctacacataagatctagctgacttggctctgaaggtagtactacctgaaccctgggaacaagaggctcgcgtgagaacctggactttgaggcactaatctcgagggcttgatacttgatggctcttgcatcttgcactgatatttcatcctcaatgcctttattgtgcgagcttgatgacccgtgtgaatgctctaacgcgtgatctctcgccctttcatctgacgaaatcttcccaagacctgcttatgc

SEQ ID NO: 12300 - DNA, 157 bp, Glycine max
  Clone ID: jC-gmle01810061e03d1
agtcggcggccgccctttttttttttttttacatgcaaagctaacttttgacgaaacagcccgtcctttaatgaaggaagggctactctgatcatacaacccaagaccaacatccaatttgtggcattcctatcaagttttccttccaatctttctg

SEQ ID NO: 12301 - DNA, 462 bp, Glycine max
  Clone ID: jC-gmle01810061e04a1
gtctcgaatcccggctttaggtggtgggtttcctagagttgttgcaacatggggtctgactatagttctcacttacttgaactataggggtctgaccattgtgggatggcttgctaggtgtgtgccggctctcatactccttccttgtgtggtgatcggattattggcgattccagaccttaagccttccacatggacagtgacaaccccggatgattttaactggaattcgtctcctaatactctattttggaatctctactattgcgattacatatgttctcttgctggagaagttgcatatgcgcataaaactcttccgaatgctttgtgtcatgctgctatcctagtaggtcgagggtactcctgtgctcttctaattggtactgctgctggtcctgcataccgtgatgtgttgaccggttgctacttgtccgatcttgctctgattatcagacgaac

SEQ ID NO: 12302 - DNA, 440 bp, Glycine max
  Clone ID: jC-gmle01810061e04d1
agtcggcggccgccctttttttttttttttttttttcttttttttttttttttttttttttatacgaaacgccgacaattgaaaattggaggaaaataatcaaattttttttttgaccaatgataacattatccacttaacaaattattgtatttcccaggaccttctaaacactattttacacgtttttaatgggccctccattttttggtctaactaaaaacataaacaaacagctgttttaccaaagggggtggattaaaagccgcccttctatggttgctgggttcacagaagtttaaactttacaagcatgctttaagaccttaaaaaacaaatcatctgcatattattgtaacgggccagtttattgccccaaagtgcgagtgtcctcctgattgccaaaatctgggagctcaaaactatgggaaaactttgtc

SEQ ID NO: 12303 - DNA, 439 bp, Glycine max
  Clone ID: jC-gmle01810061e05a1
gctgtaatagctggcggaagctattcggacggtcgtatcctggactttgatgtacggatcggaattgtgagtcatattatgagagcctatcctgaagctgaacgagccgagagcgatgtgcttctggggatatttcaaggatcggaattgtcaagagatattgatgcaaacgtggtcatatatgaattggaactgacatgtggtgaagagtgcactatacagactacaacgtggacagatcttcctatcatgtgccctggacactatgccaatggagcagatatgcctgcaacagctgacgcgcctgatctggccgtcgttgtgaatgatgaattgactagccgggagcctgctgacatggcagctaaataacacgacgaggagcgactagagtggcctaccattgagagacttcctgagcgagcaacgtcgatgaatg

SEQ ID NO: 12304 - DNA, 125 bp, Glycine max
  Clone ID: jC-gmle01810061e06a1
gataatctggctgaggcaattccgcgtgtcggtttctgggtggtcatcgtgttcatacatgagttgcgggggttagctttctgatgagcccgttccttggccgtcaggatgcgaccatgtgctca

SEQ ID NO: 12305 - DNA, 493 bp, Glycine max
  Clone ID: jC-gmle01810061e07a1
catggcactcatcgaactacagacatgtcgcagtgtcacgtcgtagcgtaacgcctcggaatgtcggcgtcgagcgtgctcttctgatactcactttatctagttcagagtcttgaacggtgcacttctcaggtcacattcatcgcgattgggtggactgctgtgtccctctacattagtcgtggactagctactgccaatcgcaactgccattgtaaaagactctgagagatcctaggggacacgtccaagctgcggtactgaatacacctttttctttgggactatacttccaatttcaaatggcggatccaccagcactgtaccatgctccaaccggggcacttgaatggactctgattcaactccaggattgattacatttccagaaagaagtaccgcctgattggaagtatgcctgaaaatcagcttgataggtccgcctttgggagatcattaattgcagttcttggctgagtgacaaatttatcat

SEQ ID NO: 12306 - DNA, 523 bp, Glycine max
  unsure at all n locations
  Clone ID: jC-gmle01810061e08a1
gattggtggtaatggcagcgtcactacaagcagcagctactttcatgcaacccaccaagttgagcaggagcaacactttgcagcaaaagtctactcagtccatttccaaggcttttggtttggaacctgttggagctaaaaaggtcacatgctcccttcaggctgatcttaaggacttggctcacaagtgtgttgatgctaccaaaattgcaggattcgcccttgccacctctgccctcgttgtctctggggcaagtgctgaaggtgttccaaagaggctaaccttcgacgaaatccagagcaagacctacttggaagtgaaggggacaggaacagcaaaccagtgcccaacaattgatggtggattggactcatttgccttcaagccggggaaatacaatgccaagaagttgtgccttgagccaacttcattcacagtgaaggccgagggtgtggccaagaatgctccccttgagttccaaaacacanagctcatgacacgttngacctacactctggatga

SEQ ID NO: 12307 - DNA, 528 bp, Glycine max
  unsure at all n locations
  Clone ID: jC-gmle01810061e09a1
ctgtttcccgccatatatccaataagctttaaccatgtctgcctttgttggaaagtacgcagatgagcttatcaagaatgccaagtacatagccacacctgggaagggcatcttggcagcagatgagagcactggcaccattgggaagcgcctatcgagcattaacgttgagaacattgaggccaaccgccaagctcttcgcgagcttctcttcaccgctccagatgccctccaatacctctctggtgtcatcctctttgaggaaactctttaccagaaaacctccgatgggaagccttttgctgaggtccttcaagagaacaatgtcatcccaggcatcaaagtggacaagggtgttgttgagttggctggcacaaatggtgaaaccaccactcagggattcgactctctcggagctcggtgccaacagtactacaaggctggtgcacgcttcgncaagtggcgtgcagtcctcaaaattggcccaactgagccctctgagctttccatccagcataatgcacaggg

SEQ ID NO: 12308 - DNA, 536 bp, Glycine max
  Clone ID: jC-gmle01810061e10a1
gcattttaaaaatgaaaaacttcttaatgctttcatttcgcaaaccccccttggacggattggagaagcagaggaagtgtcttcattggtggcattcctctgcttacctgcagcctcttacataacaggacagaccatttgtgttgatggtggattaacagtgaatggtctctatataaattagagaagtactaccaacacactctctaacacacttctcttgacacatattctaccataagttacaaataataaaaaattacaaaatcatgaaaataagatctaggacccatatatttttgtgatatctaaaaaatttcaagcaataaaaaaaatgtattgaaaagagtgtataagataatgtgtcgttagcatttttatataaactatgttaagagcaaggtctgatgcatacgttgctagttattatattagtattgagaataaatagctgaaagtcccttggttcaatctatatcatttgggaggaggaatttgctgagaataaattcggtgtccacgatccaatcatcatg

SEQ ID NO: 12309 - DNA, 532 bp, Glycine max
  unsure at all n locations
  Clone ID: jC-gmle01810061e11a1
tgacaataagatatttgatcttggaagaaagatttggacatcaaagggagaagaaaaagaagctgccaaaaaggagttcatagaggcccttaaattattggaggaacagctgggagacaagacttattttggaggagacgatctaggttttgtggatatagcacttattccattcgacacttggttcaagacttttggcagcctcaacatagagagtgagtgccccaagtttgttgcttgggccaagaggtgcctgcagaaagacagtgttgccaagtctcttcctgatcaacacaaggtctatgagttcattatggacataagaaagaagttcgacattgagtaggttcatgttggattttaatagccatagtgacgtattgatcattcttggcctttcaactaaatagtatttgcgtagtaaattaaaggcacttggatgtaccaaacttcatgcttcttgtangagtgcgtatggtttaaaaatgttctgatgtatctttcatgtgtctggtggttttgtaacagaata

SEQ ID NO: 12310 - DNA, 523 bp, Glycine max
  unsure at all n locations
  Clone ID: jC-gmle01810061e12a1
tgaagaggaaaagcttgctgaagggataaaactttatgctatagcagccactgccacttcaaagcggacaattctttctgatcttgtaactgtttatgcaaagggtgggaagactatagtttttacacagacaaaaagagatgctgatgaagtatcattgtcattaacaaatagtataatgtctgaagcactgcatggtgatatatctcagcatcagagagagagaacattgaatggtttccggcaaggaaaattcacagtgcttgttgccactgatgttgcagctcgcggacttgacattcccaatgttgatttgattatccattatgagcttcccaatgatcctgagaccttcgtacatcgctctggtcgtactgggcgtgcaggaaaacaaggtaatgccattctgttgtacaccagtagccagcggagaacggttagatcccttgaacgtgatgtangctgcaagtttgaatntgttagttcaccagctatggaagaggttttggaggcatctgctgag

SEQ ID NO: 12311 - DNA, 580 bp, Glycine max
  Clone ID: jC-gmle01810061f01a1
ccgatatttcagaagggctgcagcaagtgacgatgagatcgtggttatgattgttcctgattatcagatgttagagtatgtagagagaattgcatccaatctcacaaatgttcctgaacctacgcccctcatcatgtggaatccacgcctgattagtgaggatgttggagttgggtttaatgtccgaaagttaaggcgcttctttctaagcacttttacaactgtctatttcatgagacctatgccgtttggagcaatctttaggtgttatccaggattgtggaaagtgttcagtgacgacaaggaaaggccagatagatatttgcttgccaaggaattcgagagccgtcctgatgctgatgacatcgaggttaatagcttcaattttaaactacattgcaggatacaaccattttctatgtacatggttaagatacctattattcctgttggtaaatttttcagagagaatttggatagtaggaaaattatcattagagaaaggaaagatagcaaatttgttggtgaataacccatagtgaagagaccctgaacccaatctagtcactctccttgatag

SEQ ID NO: 12312 - DNA, 376 bp, Glycine max
  Clone ID: jC-gmle01810061f01d1
agatatcaattgtcatttatatactttaattaattatttcaatggtaacagaagcttcttttaaaataaacattaaatttacaacactccacacatgacacaccacacactagggttgaagacttaagctttgtgcacttctcctctttttcagccatgcgggaatgcaaagggcatgggtctgggtagccttgagccgcatccttcttagagagtgaataaaaccaaccatttcttcatttgaactccttaactgccgcgggaaagtgggctacggctcggggatatgcacataagcgctcttccatggtcgattcaaaaggtgaccccttatcacttgatgctgctgatgccaggcttgttctaaggctggaca

SEQ ID NO: 12313 - DNA, 125 bp, Glycine max
  Clone ID: jC-gmle01810061f02a1
tatagagaccaagccattctccatcttttctgcttgatatattcatatcatatgtctcgccgtattatgtgactatcatgtgagaaagcttcatgttcgaacgcgactgatttcaaacgacatca

SEQ ID NO: 12314 - DNA, 296 bp, Glycine max
  Clone ID: jC-gmle01810061f02d1
gtataaaaaacaattctttgaaggggggtggggcattgttttataaatcacctcgggttttatactattcgaagtgttagaaccaaataatagggaagattacttatgaatgatacatcccgcctacatataagggttccgagattacattcggttggctattgataaccatgaagctccaacttgatactttgagagttgatccaaccaaataagcgggtgaccttatgaaatatcccttgatgcatgacaaatggacagtggcttggctctttctgccgaatttcgggcttacc

SEQ ID NO: 12315 - DNA, 487 bp, Glycine max
  Clone ID: jC-gmle01810061f03a1
ggcgtctgcaacattctacactagcaccttctctttgcccaatggggtttccatctacgatacaagctcaatgccatggtttcatgggatcccgagcctgaaaccgatgccgctacttgtggaagcgcctagagcgttatccgatatatcgcttacagcttgtccaacatcggctgcgccatgtgcaaccacatgtgtggttctgtacactacgaaggacttctggcagaagacacatacggatgagctgatgacgctgtagaggaagccctagtagaaccatggaaaccagatgagcgcgatgcttacagggctacgaggcgcgagtctcgatgcgcttatactacatcagtcgagacacttgcagtggtcattctagaaccaatgacaatgcttgtaacatggatgaccctatggagtactcgtacccgtgcgatgttgaggacaacactgacgatccctacatgagaccagcatatgctgcatc

SEQ ID NO: 12316 - DNA, 405 bp, Glycine max
  Clone ID: jC-gmle01810061f03d1
agtcggcggccgcccttttttttttttttttcgtgcaaagcgaacttgtgaccaaacatagcttccttgaatgaagaaagcactactctgattatacaacccaataacaaaacccaatttcttgcatgccaaacaaaataaccttacgaacttactagcacaccgatcttgagccagatctaaccatacccacatggatgctcactatttatcttccacttgatcatattgccaaggtcagaattgtgatctgaggacatgcacttcaatgctctcacaactttcagagcgtgcccgatgttgcctatatctaccgttgtattgaacaacttacgagtcaccccaagggagaggagcaacttgatctgtgctgacggaccatccacgagtgaacttatggccctt

SEQ ID NO: 12317 - DNA, 432 bp, Glycine max
  Clone ID: jC-gmle01810061f04a1
gtgcaatcataagaatgatgctctacttgatggcagtgatataaatgggaggcgggagaagcagaggctctagtatgtgaagaacactgcacagcatgctgctcagccctgttatactatccgatttaaaggatagcgagagctcaggtagaggcagaatatatatataatcttgtatacgatcagaggcacttcttaagttacttggcattattcatgtgcacgatatgatgatgccattggcgctgtggctgatactgttgctgatcacgtgtagggtttccctatatcgatagtattaccgtctagtggaaaaacatgtcttgcaagagttgagcattacatagttatgatatatacatagatacacatgtatgtatatccacaaatgctataatgagggcggccggacactactgagctcagtaaccc

SEQ ID NO: 12318 - DNA, 417 bp, Glycine max
  Clone ID: jC-gmle01810061f04d1
agtcggcggccgcccttttttttttttttttttatagatatatatatgtatttatgtatatataaaaatatgttaagctcaacacttgcaagagatgtatttacagtaaaaagtaatactgaagatattgaggaaacctacacgttaaacagatcagtaacagcaacaacacagattacattcacatctcttacacatgaataagccatgagaattaaaaattgcctttgatcctataaaagattatagatatattctccctctaactaagctctagctatcttttaaaacggagagtagaaaagggttgtacagaatgctgtgcagtgttcttcacatactagagcttgtgattcaaccgtctcgcattgatatcactgccatcaagcagggcatcattcctatgattgcacgctc

SEQ ID NO: 12319 - DNA, 101 bp, Glycine max
  Clone ID: jC-gmle01810061f06a1
cctcctcacctgatgtaatttccaaggaggctgccactaaacgatatggggtagtgtaagatcacatgaacatgttcacttgcaagcactggctgcaggct

SEQ ID NO: 12320 - DNA, 475 bp, Glycine max
  Clone ID: jC-gmle01810061f07a1
gatgggtggtgatggcagcgttactacaagcagcagctactttcatgcaccccacgaagttgagcatgagcaacactttgcagcaaatgtttactaagtccattttcaaggctttgggtttggaacctgttggagctaaaacggtcacatgctccattgatgctgatcttaaggacttggctcacatgtgtgttgatgctaccaatatctctggattcgaccttgccatctttgacctcgttgtctctggggcaagcgctgacggtgttgccaagaggctaaccttcgacgtacttcagagcaggacctacttggaagtgatggggaccggaacagtttaccaatgcccaacagttgacggtagattggactcatttgacttcaagaccaggaagtacattgccaagaagttgtggcttgatccaacttcattcacagtgaaggccgagggtgtggaccagattgctcccattga

SEQ ID NO: 12321 - DNA, 345 bp, Glycine max
  Clone ID: jC-gmle01810061f08a1
attagattgatgctgctctcttatatatgggcgtataaaccataacttcttaccctgtgacgctgtctcccatacatcatggctgggcgatagcccaagatcggaccttagacatcacataccaaacttgctgtgcacaaggatggcgccaccacctagactcagtttccggccaggacagggactgcttgagaatattgtcacacgcaagcgacgcttccgagtgcacaattcgtgttcatggaggaactcatgaatgtgagcaaccaggaacattccacaacaaagcacctattgctgtggtcaaagctgatgagacatgataggaagacgatgcctgatgct

SEQ ID NO: 12322 - DNA, 549 bp, Glycine max
  Clone ID: jC-gmle01810061f09a1
gcattttaaaaatgaaaaacttcttaatgctttcatttcgcaaaccccccttggacggattggagaagcagaggaagtgtcttcattggtggcattcctctgcttacctgcagcctcttacataacaggacagaccatttgtgttgatggcggattaacagtgaatggtctctatataaattagagaagtactaccaacacactctctaacacacttctattgacacatattctaccataagttacaaataatagaaaattacaaaatcatgaaaataagatctaggacccatatatttttgcgatatctaaaaaatttcaagcagtaaaaaaaatgtattgaaaagagtgtataagataatgtgttgttagcatttttatataaactatgttaagagcaaggtctgatgcatacgttgctagttattatattagtattgagaataaatagctgaaagtccctcggttcaatctatatcattcgggagggggaatttgttgggaataaaattgtatgtccacgatccaatcatcatgtaatcattttaa

SEQ ID NO: 12323 - DNA, 543 bp, Glycine max
  Clone ID: jC-gmle01810061f10a1
gcattttaaaaatgaaaaacttcttaatgctttcatttcgcaaaccccccttggacggattggagaagcagaggaagtgtcttcattggtggcattcctctgcttacctgcagcctcttacataacaggacagaccatttgtgttgatggtggattaacagtgaatggtctctatataaattagagaagtactaccaacacactctctaacacacttctattgacacatattctaccataagttacaaataataaaacattacaaaatcatgaaaataagatctaggacccatatatttttgcgatatctaaaaaatttcaagcagtaaaaaaaatgtattgaaaagagtgtataagataatgtgttgttagcatttgtatataaactatgttaagagcaaggtctgatgcatacgttgctagttattatattagtattgagaataaatagctgaaagtcccttggttcaatctatatcatttgggacggggaatttgctgggaataaatttgtatgtccacgatccaatcatcatgtaatca

SEQ ID NO: 12324 - DNA, 538 bp, Glycine max
  unsure at all n locations
  Clone ID: jC-gmle01810061f11a1
ctgtggtgtttctgagctgggtagggtttactccttctcgcgccaacccagttgcgagcttggaggagaagatccttgccgtggccaacgagtataaggccgtgaaggcctttctggtcgcttacagcaccgttgctgaggattgggctaatttttcgccacctatcttctttatcactctccatggccttctgggtaactctgcggttaagggagcgtccattaaggtcattagtgacgccaccgcctcctttcccgccaagtggatccctgaaattttattgttggctgcctctaaatgaatgaggtatgacatgaaaggtgaacacgtatctcagaagtgttatgtgatatgtatgatgtgtgaatcttgaaataatatcttaagggcaagaagttattagttaaaattattagaggtagttttatgaatgggtcataataataaatgctagctatatgtaccactatggaataagattgggtcataataataaagctagcttgctagctatatggactatacgntactatggaa

SEQ ID NO: 12325 - DNA, 386 bp, Glycine max
  Clone ID: jC-gmle01810061f12a1
ctgagatgttaatgatctgggtagggtttactccttttctcgccaacccagttgcgagcttgaaggagaagatccttgtcgtggtcaacgagtataaggccgtgaaggccttactggtcgcttacaacaccgttgctgaagattgggctaattttacgccacctatacttctttatcactctccatgggctcttggtgaactcttgtgttaacggagcagtacatatagcgtattagggacgccaccggctactttcacgcaagtggatccctgagatgttattgctggctgactttacatgaatgatgtatgacatgaatggcgaacacgtatctcagaagtgctatgagatatgtacgatgtgtgaatcttgcaataatatctt

SEQ ID NO: 12326 - DNA, 585 bp, Glycine max
  Clone ID: jC-gmle01810061g01a1
gacaggaacccagagcagcaaagcatatatggagagagaaagagtgagtgtgttgacgagagagtttcacaaataaactcacaaaaccatgtttttcttcttcttcttggtctttgacaccatgaagaagtagtattagtagatggatgtatatagcttttcaccctttagagttttttggtttctttcttctcttttgttgtgtctccaaaatccttatttctcccgaaatctagagtaagatctcttttttcaagtgtttttgaaagggtgaaatctagtgagagcattcattaatctttgcacctatgaggatccgtaagagacaagtgcctttccctctcttgccggtgactcactcagatcccaacctgatcaaccggtcaccggtgatggtgcaactcaacgatgacaccaaagcttcttcttgcactacttatcatggttcaaccatcactgcaccctcacccctcttggatcgccctcagccggccgatcagcctctcccaccgatcgggaagcccaccaacggctctgatgagtccttcggagaatggcacaaaaagcaagaagagtcttttggtg

SEQ ID NO: 12327 - DNA, 496 bp, Glycine max; identical to SEQ ID NO: 5940
  Clone ID: jC-gmle01810061g01d1

SEQ ID NO: 12328 - DNA, 559 bp, Glycine max
  unsure at all n locations
  Clone ID: jC-gmle01810061g02a1
gccctccttattgttgatggagtgtcttccatttgtgctcttgatttccgcatggatgaatggggagttgatgtggcaataactggctcccagaaggccctttcccttcccactgggataggtattgtggttgcaggccctaaagctattgaggcctcaaaacatgctaaatcacttagagttttctttgactggaaagactacctcaaattctaccagctaggaacctattggccatacactccttccatacatttgctgtatggtctgagagctgctcttgatctgatttttgaggaaggactcgaaaatgtgatcgcaaggcacagtcgtttaggcaaagcaaccagacttgctgtagaggcatggggtttgaagaattgcacccaaaaggaagagtggtacagtgacactgtgactgctgttcttgttcctgcttacattgatagtactgaaatagttaggagggcatggaagagatccaatntgagcttangtcttggactgaacaaagttgctgngaagggtttcagaattggacatcttggccacttgaatg

SEQ ID NO: 12329 - DNA, 487 bp, Glycine max
  Clone ID: jC-gmle01810061g02d1
acaggacaataaaagaagcaatgcattaaagctgaaagtagaaagtacgttcatcttcaaaggagtgtaaaagagggtaatatatattttacagaatttctgaaagagcagaaaaaggaagtaaagacaagaatgatttgtgactcaaatcctggaagggatcataggaatagtgttctgtaagtatgcactggcagcagcaactccacttccaagctttacaggataacccacatctttgagtatcatctctacaccagctagacatcccaacagttgcaactcattcaagtggccaagatgtccaattctgaaaaccttcccagcaactttgttcagtccaagacctaagctcaaattgtatctcttccatgccctcctaactatttcagtactatcaatgtaagcaggaacaagaacagcagtcacagtgtcactgtaccactcttccttttgggtgcaattcttcaaaccccatgcctctaca

SEQ ID NO: 12330 - DNA, 569 bp, Glycine max
  Clone ID: jC-gmle01810061g03a1
agataagtacttttgctacttatacgatggctaagtgcttttcattctctctctctcgttatctgatcttttcgtttgtgctgctacagacacaaacggggaatgggtcaaatgcaacaccgatcaagttgagagtaggggtacccaagagagatggtttccgccaatttgtggatgtagtaccttcggactctcatgaaaaaaagtacaacgtatctggatattgcatggatgttttcaatgccgttgttacccgcttacctttcaaggattctcttcatattcaacaaccttatggtattgaatcaagtgagatttctggaacatacgatgcacttcttcatcagatcccagcaaagtacgatgttgtggtaggggatgtaacaattctggcgaaccgttcaaatttcgtagatttcacgctgccatatacaggttcgggagttaaaatgttagtaccagctcaacatgggaggcaacaagccatgtggattttcgtggaccattcagctgggagcttttgttgagcatagtcattatctataccttcatagggttttccatactca

SEQ ID NO: 12331 - DNA, 414 bp, Glycine max
  Clone ID: jC-gmle01810061g03d1
agtcggcggccgccctttttttttttttttcgggcaagaaaagagtttgagtatcaccaaacttgaagttaagctcatacggtggacccggacaataagctgaaacctcctattatgattgacatattctatttatgcacacagacgagagatacatggtcgtcaagccgtacatacatatctacagaatttaatttccatctgcttgcatagaaaactttgaagagaagggacctatactacggcctttatcgatgcgcgcgagggatatggtgtagcatgaacccgtggaagtggaggacgtgcatgggacaacagcaacagcttactgtgtgccttggctattgagctcactgagtgtctaacaaccattatggagagctcgagcactcatgatgtgctaaaccctgattt

SEQ ID NO: 12332 - DNA, 471 bp, Glycine max
  Clone ID: jC-gmle01810061g04a1
aaaaaagtacttttgctacttatacgatggctaagtgcttttcattctctctctctcgttttctgatcttttcgttagtgctgctacagacacaaacggggaatgggtcaaatgcaacaccggtcaagttgagagtaggggtacccaagagagatggtttccgacaatttgtggatgtagcaccttcggactatcatgagcaacagtgcaacgtatctggatattggatggatgttgtcaatgccgttgctacccgcttacctgttaaggattctcttcatattcaacaaccttatggtattgaatcaagtgagatttctggaacatacgatgcacttcttcatcagatcccagcagagtacgatgttggggtaggggactgaacaattctggcgaaccgttcagatgtacgagattatacgctgtcatatacaggttcgggagttaaaatgttagtagcagctgaacatg

SEQ ID NO: 12333 - DNA, 575 bp, Glycine max
  Clone ID: jC-gmle01810061g04d1
agtcggcggccgcccttttttttttttttttgcgcaagataagagtctgcatattaataatcttcaactaaagttcatacatatgaccccctaattaagctttttcctcctattatttttgccatatactatatatacacacagacgagttctacaagtttgccaagccatacatacatatatacagaatttaatttccatctgcatgcaaggaaatctttgatgagaagggacttattaaacggcctctattgatccgtgcgttgaatcttgagttggatgaactcgtgtttgtggggaaggtggagtggagaacaaaaacttctgactgtatgccttggctatcaaaatcgccctttgccaaataacagtttctgagaccaatagcgctaataaagtagaaatccctgtaatcaagaataaccctgcaaaactatgaaagttgagacttagagtagcagaagaaatttcagtagacgtctcttctcctccaatatcatcattcttcccaaaatatttttcctcaatttctttcattaaatcactttcagtcacattcaagatggccctcgaaa

SEQ ID NO: 12334 - DNA, 331 bp, Glycine max
  Clone ID: jC-gmle01810061g05a1
aatctttctgcaccatcgttctccatttttggctttacaaaaccactgtgtctgattaagggttctttaatatttccaatatttcttgtagtgaaaaagttgttagctaaaagaagacccagtttttggtgttagagaaggaagagaagaattaacatgaaaatttagtgtgacgtgtcgtaaaaagctccagcaacagtgatttgttgcgcagatgaagctgctttgtgggccaaatgtgactgttaagttcatgctgcaaacaagctttgaagcaagccccaaagactttttcttcaatggctatcaaacgagctttccacatgtgaca

SEQ ID NO: 12335 - DNA, 501 bp, Glycine max
  Clone ID: jC-gmle01810061g06a1
ctcgcgcttccgtttccacactcgtcggagcacactcgccggaaaacactccccggcaaaaaataagaaaacctcaaagactaacccgagtcgttatagtgggttggagtgaacgaaaagaaacaaaggctatacaaaaagggcaaacacgaatacacggttttcattctttcaccactcttgtttccttttacgacgtcgttatggaactcaagtatatgcagttttcgcaacacgttcttcctgattccccttcttcatcttaaaccctcgattctgcactctgtttcccttcatcgtgcaaaacgcgaaccctagtgtgtcatttcgtgaatcgctcgagcctctttccgaccaccacccgtcttcttcggagaaccaaatcgtttgagcaccacgcgcttttgacgcgcatggggagtttgagaaggtcttgcagcgctagcttggagcctttctacgacgaagagttcgcgaagaagattgaagatctagcactca

SEQ ID NO: 12336 - DNA, 546 bp, Glycine max
  Clone ID: jC-gmle01810061g07a1
gttttgttgcaaagcaaaaaactacgaggagctttcctccatacgaatccaaggaggagagaggagacacagacacaaaggaaacggaaaaagcaacacacacaaaaaaggtctgtgcctcctcttatatgtaatagatagtttctgaaacaaaagaaaaaaataaaataaaaataaaaggaccacatggattatgaaaacaacagttggatttgggagggggtaaactactacccgcgtgtgtttggtggtctaatggttacagcagccttgctgggcttgtcaaccagctactttggtgggattggggttccatatttgtcactgccatgttcctggtctaatttggggatttttcacaagaagaaatcggggaagaggcgcattcgggtgtacatggatggctgttttgatctgatgcattatggccatgccaatgcactcaggcaagcaaaggctctaggagatgaactggttgtgggtcttgtgagtgatgaggagatcgtggccaataagggccacccgttttgtccatggaggagaggc

SEQ ID NO: 12337 - DNA, 558 bp, Glycine max
  Clone ID: jC-gmle01810061g08a1
cgttgatctcggggttgaaccccagtactttgctctccgctggttgcgagttttatttggacgggaattttcactcagcaacctcttgataatctgggatgaaatcttttcatcagataatagtaaattggaaaaacatgcagaggacaatgcagactctggttttaggatcttcaattcgtctcgcggagcatttatctcagctatggctgtagcaatgatgcttcatataagatcttcgttacttgcagctgaaaatcctacaacctgtctccagagattattaaacttccctgagaacattaacgttgaaaaactaatagagaaagctaaatccttgctggctcttgcattaagcactgagatttcatcctcaatgcctttattggtcgagtatcataaccagggtaaatcagctattgcaagatctcgcaccctttcatctgaatcaatttcaccaaaaactcctgtgaatttggtacctgatagctactgggaagaaaagtggatagtggtccactaggcttgagaactcatacaagatggagtagaagaaca

SEQ ID NO: 12338 - DNA, 471 bp, Glycine max
  Clone ID: jC-gmle01810061g09a1
gtgatgacggtgttgatggtagctggatgtgcagcggcaacagccatagggtacgtgggatagtctgcagaggagcatgtggcttggcagccaatatgcgaccatgtgcgcaaggtctgcacaacacatttgaattgcctcttgctctcttattcagctatcatagtctattgcagaatcactattctatgagtctacaaaatctgctctggttctaccaagaactaatcaaatgacatcaaataccaccaacagcaactaccgatactaacaactagtgtagctatagctctgatgatgaggtcttgatacgggtttattaatactactatatacttcatgtggtgcatgaatttgctccgaaattgttagataggtgtgggatatgaatggctatattgggtatggccatgaatgctacagcatgtaaagcatgagtaatgataatctatctgtctttcatgtcgaagc

SEQ ID NO: 12339 - DNA, 523 bp, Glycine max
  unsure at all n locations
  Clone ID: jC-gmle01810061g11a1
gggtgcagctaagaagctcaaaaagattcaatttcaaggtttgtagtggaagttatgatgatggttatgtgattggtgaagaggaagcaagggatatttcagggttagaggagcctgtaacaaccaaggttctgattccaggtctgcctgatgattcaaaaggtgaatctggtgctccaataagtagttgtttttggggatggaaacctaaactcaatgtgcactatgagaaggccgggtgcgaaaacgtcaatgatttgcctcgtgttctctttttaccaggttttggtgttggctctttccattatgagaagcaacttaaggatttggggcgtgactacagagtgtgggctctggattttctaggccaagggatgtctttgccttttgaagatcctgcccctttgtctaatgaagaggctgcatcaaatggaagtgtttcttcatggngttttggagatgaaactaaaccgtgggcgactaagcttgtttactcggttgatttattgcaagatcaagttcg

SEQ ID NO: 12340 - DNA, 569 bp, Glycine max
  Clone ID: jC-gmle01810061g12a1
ctcgagccgaatcggctcgagctcttatcacctcattactcacccacgttacgccagcaatacctaccatgtccaacaccatcccgcccactgaccccgtcgccgccgtggtttccgactcgctgcccaagccggtggcccccgcagaggccatccagcagccacccgctgccgcgctggagccgttgaccaagaccgagggcggctttttgcaacaggcccgagagaccatcctgccttacgtcgagaaggtgcaaagcacggcgaagccatacaccgacgctgccacgcacaaggtggaggagcttgtccagaagattgagggcactgccccgacgtctgcgaccaccaccgacccgaccgctacgcgggatctgaacgccccggctggtaccaccacgactggacagaccgtcgcggagaaggcccagggcgtcttcgcgcaggtctgcagcgctgtcacaagcaccttccagcaggtcaccaacaccattgagacgcgcacgacgaccgacacgcacccgggctttatcacgcaggtgaccaacgtcgtccacaagggccaggag

SEQ ID NO: 12341 - DNA, 563 bp, Glycine max
  Clone ID: jC-gmle01810061h01a1
ttcactcacaaataatattccattctccattttccaggaatatgcatttcttgctctgtgctctttcctttactttatactatttatttcatgtctccctcctcccaaacacacggttttcataggaactaggaagtaaaatcaatcccacagatcagaaaaaacaggaaattgggtttaattattgtcctcactgaaatgagtagtagtaagaaaaggttcattcctattaatctggaagatgctgcagtggacttgttaaaccatgtggtgaagttgaaggagaagggatggattccactcttcattccactcattttgattgcttgggctattcacagatggctcttctctttctccaattggcttccccttgtacttgctctatgggcatctatgcaatatggaaattatcagcgcaaactacttgaggaagagttgaataagaaatggaaacggatcctactcaacacctcgcccatgacaccattagaacactgtgagtggttgaatctgctattgacacaaatttggtccaactattttaacccaaagttctcaag

SEQ ID NO: 12342 - DNA, 388 bp, Glycine max
  Clone ID: jC-gmle01810061h01d1
agtcggcggccgccctttttttttttttttaataatacagagcagcaacaaatgtaaatttatattatatcccacaggtaaaaatacaacgatttcccaaatcatacatgatttatgaatacacgacagctagaaagacaccacatcaatcctcttcatcttttgttttctacattctatgaaaccagaggacttaaactgagattttattccactttttaacacatgctaactttaggtcttaggacaaacatgaatcacaaaacaatgggcgggtgtttatagatatcaagttgcaacatatgaatgatacataagacacttggtttaattgtcacatatcaaccaagtacaaatggtggcgcctaaaaaagtatgaccaccagcg

SEQ ID NO: 12343 - DNA, 498 bp, Glycine max
  Clone ID: jC-gmle01810061h02a1
aagtatgtcaatgccagtgttggttttggtggatcctgcttccagaaggatatcttgaaccttgtttacatctgtgagtgcattggccttccagaggtggctgagtattggaaacaagtgatcaagatcaatgattatcagaagagccgatttgcgaaccgtgtcgttgcatcaatgttcatcacaggttcaaacataaagattgctattctgggatttgccttcaagaaagacactggtgacacatgggagactcctgccattgatgtatgccaggggctactaggcgataaggtcaacctgagcatatacgacccgctagttaccgtggaccaaatccagagggatctatccatgaacaagtttgattgggatcatcctatccacttgcagcccacaagtcctactactgtgaagaaggtcagtgttgtgtgggatgcctatgaagcaacataggatgcacatggcctttgcattctaaccgagtgggatgagttc

SEQ ID NO: 12344 - DNA, 432 bp, Glycine max
  Clone ID: jC-gmle01810061h02d1
aaacaaaacaagtttccccagaacattcataaaagattggggtacaaaacaacatagaacataaaccctccccagttcccacaattgataccccaattatgtcaactattatgagaacgttaaagaggaaaagaaaaactcttacaaaaaataataaagaatcaaactggctgcctcaacacttgactgatattgcatggcacttgatcaatgatctattttatgccacagcaggcatgtctttgagccatgggtccagtggcttaccaattgagtaaactatgaagccaatctcacgcaacttatcagcatccacaatgtttctgccatcaaaaacaaatgctggtttctgcatgttgtcaaatatcttctggtgataaagagtcttgaactcatcccactcggttagaatgcaaaggccatgtgcatcct

SEQ ID NO: 12345 - DNA, 575 bp, Glycine max
  unsure at all n locations
  Clone ID: jC-gmle01810061h03a1
aaaaaagtacttttgctacttatacgatggctaagtgcttttcattctctctctctcgttttctgatcttttcgtttgtgctgctacagacacaaacggggaatgggtcaaatgcaacaccgatcaagttgagagtaggggtacccaagaaagatggtttccgccaatttgtggatgtagtaccttcggactctcatgaaaaaaagtacaacgtatctggatattgcatggatgttttcaatgccgttgttacccgcttacctttcaaggtttctcttcatattcaacaaccttatggtattgaatcaagtgagatttctggaacatacgatgcacttctccatcagatcccagcaaagtacgatgttgtggtaggggatgtaacaattctggcgaaccgttcaaatttcgtagatttcacgctgccatatacaggttcgggagttaaaatgttagtaccagctcaacatgggaggcaacaagccatgtggatnntcgtgaaaccattcagctgggagcttggttgagcatagtcatcatctctaccttcatagggttntccatactcatcatgg

SEQ ID NO: 12346 - DNA, 558 bp, Glycine max
  unsure at all n locations
  Clone ID: jC-gmle01810061h03d1
agtcggcggccgcccttttttttttttttttgcgcaagataagagtctgcatattaataatcttcaactaaagttcatacatatgaccccctaattaagctttttcctcctattatttttgccatatactatatatacacacagacgagttctacaagtttgccaagccatacatacatatatacagaatttaatttccatctgcatgcaaggaaatctttgatgagaagggacttattaaacggcctctattgatccgtgcgttgaatcttgagttggatgaactcgtgtttgtggggaaggtggagtggagaacaaaaacttctgactgtatgccttggctatcaaaatcgccctttgccaaataacagtttctgagaccaatagcgctaataaagtagaaatccctgtaatcaagaataaccctgcaaaactatgaaagttgagacttagagtagcagaagaaatttcagtagacgtctcttctnctccaatatcatcattcttcccaaaatatttttcctcaatttctttcattaaatcactttcagtcacatt

SEQ ID NO: 12347 - DNA, 392 bp, Glycine max
  Clone ID: jC-gmle01810061h04a1
tgcatatggatatcatttggttcgtggaaccaacactatgtatcacatcgagttcagatgtgccaacacataaaacctctttgctggaaaggttaatgatgcggcacatatgatccattgaccttgatggttttctcactactgaggatgaacatgagcgtaccatgctcaacgttaggctctgggatgaccccttctgatatcatcatgactccactggacatatggtgaccaataccgactccaatgatgacaacaagtactacgtagcttctgctgctaacaacattgctgttgctaaagcattggatgaagcatcgactggcgacatggattaagcttgcttctctagaactgacgctgctctggcatgatcgaagcctgctctatta

SEQ ID NO: 12348 - DNA, 377 bp, Glycine max
  unsure at all n locations
  Clone ID: jC-gmle01810061h04d1
tgtcggcggccgccctttttttttttttttgctcaaaactggtaaatttccagatcaataacgattgcggtgacgccagaaggatacaccatacataagggaaaacaggattggggaaaaataaggtgttaggcgatgcggacaattaaattgctctatggcatgctaagtcanccccttatggcacacacaggaggcgtcccaccccaatataaaaaacagtgtactccgatgcattaacatgaagggcttaccctaatgacttgggcgattctcctctttcataccattcactaggcaagccggaaccgtatgattgttgctgcggcaaccatgtttcttgggtcaggatggacctctccgtacttacggatcta

SEQ ID NO: 12349 - DNA, 511 bp, Glycine max
  Clone ID: jC-gmle01810061h05a1
gctgggcccatcagcccccgacgtcgggatggtcagcatgaggaagaccgtcaccaagcaggcctactccggaagcccatggtacggcccagaccgcgtgaagtacttgggcccattctctggacagcccccgtgctacctcactggcgagttcccaggtgactacggctggcacactgacgggctttcgaccgatccagaaaccttgaccagaaaccctgagctcgcagtgatccactccaggtgggccatgctcggggacttgggctgcaggctttcccgaactgctgtaccgcctcggggtcaagtgtggagaagccgcgcggctcacggccgactcccagatcttcagcgagggtgggctggactacttgggcaacccaagccttgtccacgcccatagcatcctcgccatctgggccacccaagttatactaatgggtgctgctgacggtcatcgtattgctggtgcgaccctctgtgaggtcactgacccaatctaccctggagg

SEQ ID NO: 12350 - DNA, 490 bp, Glycine max
  Clone ID: jC-gmle01810061h06a1
gctgggcccatcattccccgaagtcgggagggtcagcatgaggaagaccgtcaccaagcaggcctgctccggaagcccatggtacggcccagaccgcgtcaagtacttgggcccattctctggcgagcccccgtgctacctcactggcgagttcccaggtgactacggctgggacactgctgggctttcggccgacccagaaaccttcgccagagaccgtgagctcgaagtgatccactccaggtgggccatgctcggggccttgggctgcgtcttccccgaactgttgtcccgcaacggggtcaagtttggagaagctgtgtggttcaaggccgggtcccagatcttcagcgagggtgggctggactacttgggcaacccaagccttgtccacgcccagagcatcctcgccatctgggccacccaagttatcctaatgggtgctgttgaaggttatcgaattgctggtgggcccattcgtgaggtcact

SEQ ID NO: 12351 - DNA, 573 bp, Glycine max
  unsure at all n locations
  Clone ID: jC-gmle01810061h07a1
cgttgatctcggggttgaaccccagtactttgctctccgctggttgcgagttttatttggacgggaattttcactcagcaacctcttgataatctgggatgaaatcttttcatcagataatagtaaattggaaaaacatgcagaggacaatgcagactctggttttaggatcttcaattcgtctcgcggagcatttatctcagctatggctgtagcaatgatgcttcatataagatcttcgttacttgcagctgaaaatcctacaacctgtctccagagattattaaacttccctgagaacattaacgttgaaaaactaatagagaaagctaaatccttgctggctcttgcattaagtactgagatttcatcctcaatgcctttattggtcgagtatcataaccagggtaaatcagctattgcaagatctcgcaccctttcatctgaatcaatttcaccaaaaactcctctgaatttggtacctgatagctactgggaagaaaagtggagagtggtccacaaggctgaagaactcanacaagatggagtagaanaacaggttcctactcggaa

SEQ ID NO: 12352 - DNA, 500 bp, Glycine max
  Clone ID: jC-gmle01810061h08a1
cgttgatctcggttttgaaccccagtactttgctctccgctggttgcgagttttatttggacgggaattttcactcagcaacctcttgataatctgggatgaaatcttttcatcagataatagtaaattggaaaaacatgcagaggacaatgcagactctggatttaggatcttcaattcgtctcacggagcatttatctcagctatggctgtagcaatgatgcttcatataagatcttcgttacttgcagctgaaaatgctacaacctgtctacagagattattaaacttccctgagaacattaacgttgaaaaactaatagagaaagctaaatccttgctggctcttgcattaagtactgagatctcatactcaatgcctttattggtcgagtatcataaccagtgtaaatcagctattgcaagatctcgcaccctttcatctgaatcaatttcaccaaaaactcctgtgaatatggtacctgatagctactgggaag

SEQ ID NO: 12353 - DNA, 325 bp, Glycine max
  Clone ID: jC-gmle01810061h09a1
ggttaaagcctgatcacatgttttgagttttaccgaggcgatgactttcatataggggtcgctgttgtgcgtcgcataattgggcccattctggatccgattgcaaagagatcggaattcctcggcgatattcaggtccacatcttcgtgtcatcgcgaggactatgtgctcagtactgggaagctattacgagggatcttatgatgcctattcagaagactactgaagtgagatcgcgagttcttggggaacagcaactgcacattgtcatgatgtctggcggcatgcatgttgacgacagagtggaagttattgggtggctta

SEQ ID NO: 12354 - DNA, 393 bp, Glycine max
  Clone ID: jC-gmle01810061h10a1
cctcggggaattccaattccacattttcaagatataaggaggcaaaaatgttcatatatgaattggaattatttgttctcttattaggcctatcctgaagccaaaggaaatgagatcggaattccttggggaattccaactccacattttcaagatatatggaggcaaaaatgttcatatatgaattggaattatttgttgtcttattaggcctatcctgaagccaaaggaaatgagatcggaattcctcggggaattccaattccacattttcaagaaataaggaggcaaaaatgttcatatatgaattggaattattggttatcttattaggcctatcctgaagcctaaggaaatgagatcggaattcctcgagggtaccgagctcgaatt

SEQ ID NO: 12355 - DNA, 537 bp, Glycine max
  unsure at all n locations
  Clone ID: jC-gmle01810061h11a1
ctcgagccgaatcggctcgagctcttatcacctcattactcacccacgttacgccagcaatacctaccatgtccaacaccatcccgcccactgaccccgtcgccgccgtggtttccgactcgctgcccaagccggtggcccccgcagaggccatccagcagccacccgctgccgcgctggagccgttgaccaagaccgagggcggctttttgcaacaggcccgagagaccatcctgccttacgtcgagaaggtgcaaagcacggcgaagccatacaccgacgctgccacgcacaaggtggaggagcttgtccagaagattgagggcactgccccgacgtctgcgaccaccaccgacccgaccgctacgcgggatctgaacgccccggctggtaccaccacgactggacagaccgncgcggagaaggcccagggcgtcttcgcgcaggtctncagcgctgtcacaagcaccttncagcaggtcaccaacaccattgagacgcgcacgacgaccgacacgcacccgggcttcatcacgc

SEQ ID NO: 12356 - DNA, 555 bp, Glycine max
  Clone ID: jC-gmle01810061h12a1
cggctcgagctgagagtgagatacagaaaagaaaaaggaaaccctagctggataggtcaaacatcatcatgtcggacgaagagcaccatttcgagttcaaggcagacgccggtgcctacaaaacctaccctcagcaagccggtaccattcgcaagaacggctacatcgtcgtcaaaggacgcccctgcaaggttgtggaagtttcgacttccaaaactggaaagcacggtcacgccaagtgccactttgttggaattgatattatcactgccaagaaacttgaggatattgtgccctcttctcacaactgtgatgttcctcatgtgaatcgtactgattaccagctcattgatattgctgaggatggattcttgagtctgcttactgaaaatgggaacaccaaggatgacctcaagcttaccactgatgagagtctgctcactcagataaaggatggatttgctgagggcaaagatcttggtgtgtctgtcatgtctgctatgggtgaggaacagatttgcgccctggaagatatcgggccaaaagactagcttt

SEQ ID NO: 12357 - DNA, 568 bp, Glycine max
  unsure at all n locations
  Clone ID: jC-gmle01810062a01a1
cgctacaagctccttggtggcctagctgtgcgcagggcttgctatggtgtcttgaggtttgttatggagagtggtgctaagggatgcgaggtcattgtgagtggaaaattgagagcccagagagccaaatctatgaagtttaaggatggttacatgatttcttctgggcaacctgtcaaagattacattgactctgcagtgagacatgtgctcctgagacagggtgttcttggcattaaggtgaagatcatgcttgattgggatcctaaggggaaacagggtcctaaaactcccctccctgatcttgtcacaatccattctccaaaggaggaagaagaatacatccagcctgctccagttttggctgctaatgatattgaggtccctgttgcttgaaaagttatacactggagaagtaattcatagtagctgagtgcctagttnttcttgtgtgcaatgtttgttgtcaaagacattgtcaaaattttgtagtttcttgaattttgaagaaattgttatactcagttacaagtattctaagttatttggtttatctttttcataaaaa

SEQ ID NO: 12358 - DNA, 546 bp, Glycine max
  unsure at all n locations
  Clone ID: jC-gmle01810062a02a1
aaaagcatcgccttcgtaaggcattaggtcagacagctgactggtttaggagagcattgtttgttgagcctgtcaagggtaacttgagattaagtgggtactctgcatgtggacaagatggaggtgtgcagcttcctcatgaatatgttgaagagggagtctctgatgccgacttagttctcttggtgactacaagacctacaactggaaatacacttgcttgggctgtggcatgtgaacgggaccaatggggccgtgctatagctggacatgttaatgttgctcctcgtcatttgacagctgaggcagagactttgctttcagcgactctgatacatgaggttatgcatgttcttggtttcgatcctcatgcctttgctcattntagagatgaaagaaaaagacgccgtaataaggttaccgaacaagtaatggatgaaaagattgggcgaatggtaacacgtgtggtgcttncacgtgttgtcatgcattctcgacatcattatgcgggcatttctgggaaatttactggcttagagctggaag

SEQ ID NO: 12359 - DNA, 504 bp, Glycine max
  Clone ID: jC-gmle01810062a03d1
tttcttttttttttttttttttttttttttttttttttttttttttttttttcttctttttttttttttttttttttttttttctttttttaaaaaggggcaaaaaaaattttttttttaccccgtttttttcccggggggcccaaaaagcataacccaaattttacaagggttaaattcccccccacattcggggaaaaaaaccccccccccccccataaccgaaaaaaaaaacacacggggcccccaagggggcccccccctccctggcccaacaaacgggaatcccagggaaaaaaaaccacgttccaaaccacaaaattaaggggaattttttcctaaaaaccaaatttttttccaaaaacaggggggaaaacgggggccaacccccccaataacccctcaaaaaaaggctccccccccccccgaaaaaagggggaaaaaggacccccccattcttgggggaaaaactggttattttttctctaagattcaacccccccc

SEQ ID NO: 12360 - DNA, 529 bp, Glycine max
  unsure at all n locations
  Clone ID: jC-gmle01810062a04a1
attttaagaattgttttactgaccaaagataactcattaaagctttcaatcatgttagaaaaactgaagtcatatcttcaaaacgatgcttctgaatttcatacacgtttaccaattttaattcgaaacttgtgcacaggtaagaaaccaagcaatagtgaagtggatcagctagtgaatcttgcagaaaaatacactcttgcaaaccatctattttggggcttgtggggacttatttcgagtcatgtcaatacaattgactttgactacaaggagtatgcgaggcagagatttcagcaatactggttgaagaagcctactttattggactcaccaagtatcgtttcccaagatgggattgccaatggtgtgaaccattgacatggatgcttcttatgtatttagcatgttcagcttggtatgtgttgactaatatatagaaaggcatgatgtgatgcataaaatttgtaaataatatataactaanaatgtgtgatttgagaattttacaacagttatgttagtaatc

SEQ ID NO: 12361 - DNA, 541 bp, Glycine max
  unsure at all n locations
  Clone ID: jC-gmle01810062a04d1
atcacaaaaggagggattactaacataactgttgtaaaaattctcaaatcacacatttttagttatatattatttacaaattttatgcatcacatcatgcctttctatatattagtcaacacataccaagctgaacatgctaaatacataagaagcatccatgtcaatggttcacaccattggcaatcccatcttgggaaacgatacttggtgagtccaataaagtaggcttcttcaaccagtattgctgaaatctctgcctcgcatactccttgtagtcaaagtcaattgtattgacatgactcgaaataagtccccacaagccccaaaatagatggtttgcaagagtgtatttttctgcaagattcactagctgatccacttcactattgcttggtttcttacctgtgcacaagtttcgaattaaattggaanacgtgtatgaaattcagaagcatcgttttgaagatatgacttcagtttttctacatgattgaaagctntaatgangtatctttggtcagtaaaacaattctaaaat

SEQ ID NO: 12362 - DNA, 553 bp, Glycine max
  Clone ID: jC-gmle01810062a05a1
ctgtaacctcacacctctccaaaatccgttccccctttctttcaaaccctttttttttttcttccaacaaatcagcgatggcgacgacgtcggtggtgccggcgaatcggcggcgtgcggcggcgaaccccgccgaggatatggacttcgagacgacggagggcgtgaaggccatcgcgagcttcgaggagatggggatcaaggacgatctgctccgcggaatctaccagtacggcttcgagaagccctcagccattcagcagcgggccgtgactccgatcattcagggccgtgacgtcatcgcccaggcccaatccggaacgggcaaaacctccatgattgctctcaccgtttgccaggtcgtcgatacctccgtcagagaggttcaggctttaatattgtcaccaacgagggaactggcctcgcaaactgagaaggttatattggctattggggatttcatcaatatacaagctcatgcatgcgttggaggtaaaagtgtgggagaagacataggaaacttgagtatggagttcatgtggtgtcttgaact

SEQ ID NO: 12363 - DNA, 349 bp, Glycine max
  Clone ID: jC-gmle01810062a05d1
aaggaaaaaccaagtcaagatttcaccgggcttttggagcctaaaattccaaattcaatttcaggggtaacgctttggataaaacaactcaacaaaatttacccgttaatctcaattttcaaccttttcagcaaaaaaaaacccttccttggggacagtcaatccctttttgggaaaaattttaatttgaccaaggggaaaggtttacaagagcatcccaaatgttttccattgcaggaaaccacatttgaacacttctccctgccacaagaaatgacaaacccccttttttaagccccccagggggcaatttttttaagatcagcaaccttctgggggattttataaa

SEQ ID NO: 12364 - DNA, 521 bp, Glycine max
  Clone ID: jC-gmle01810062a06a1
atctcttctcaagtcttcacttgttcttgacaagtctgagtgggtgaagggacaaacacttcgccaaccttctgctgcatcagttgtgagatgcaaccccaccaccccatcaggcctcaccatcagagctggttcctatgctgatgagctcgttaagaccgcgaaaacagtggcttcaccagggaggggtattttggccatggatgagtccaatgctacctgtgggaagcgtttggcttcaattgggctagagaacactgaagctaaccgccaggcataccgtaccctccttgtgacagttccaggacttggtcagtacatctctggtgccattctctttgaggaaactctctaccaatccacaactgatggcaggaagattgtcgacgtgctcctcgagcaaaacattgttcccggtattaaagtcgacaagggtttggtaccccttgctggttccaacgacgagtcatggtgccaaagtcttgatggtcttgcctctcgctcggctgcatactaccagc

SEQ ID NO: 12365 - DNA, 532 bp, Glycine max
  Clone ID: jC-gmle01810062a06d1
caaccatgtttgttatatattgagacataatcaatcaagtacaccactcacagcagaaggtttataagctgtaaaggtacatgtaaccataaacaaaaatagtctccaagactataaaaacattacattttagacaaattagtcttcttccacttcatcctccgtcaacacctactataactgctggtgttgctgctgcctaacatgtatcatattcactacatacatcttagtaggagtagcctttgacgaacaactccttcttggcttcctcggattcaccctcaccggtgtacttcccaagctgggcgagcgagttggacttggcacggaaaaggagtgcatcttgtgccgctttcacgttctctgggcggcctccccatgtcttaaggcagtgttttggagggctctggcatacgagaaccacacgtgcaacgggtttggagattggttcatggatttcagtggagggtagcttcacctcagactgtccaccagacaaaaacataattccagggacagcagggggaat

SEQ ID NO: 12366 - DNA, 470 bp, Glycine max
  unsure at all n locations
  Clone ID: jC-gmle01810062a07a1
ccgaagttaagtctgtggaaatgcaccatgaagctctcacagaggctcttcccggtgataatgttggattcaatgttaagaatgttgctgttaaggatctcaagcgtggttatgttgcctcgaactcaaaggatgatcctgccaaggaggctgctaacttcactgcccaggttatcatcatgaaccatcctggtcagattggaaatggctatgcccctgttcttgactgccacacttcccacattgctgtcaagtttgctgaactcatgaccaagattgacaggcgatctggcaaagagcttgagaaggaacccaagtttttgaagaatggtgatgctggttttgttaagatgattccgaccaaacccatggtggttgaaactttctctgagtaccccccacttggtcgctttgctgtcagggatatgcgtcanactgttgctgtgggagtcatcaagaacgtggagaag

SEQ ID NO: 12367 - DNA, 312 bp, Glycine max
  Clone ID: jC-gmle01810062a07d1
gaacacaaatataaaggtgacatttaaaaagcaaaccaacaacgcaacggcaaagccctaaaactcgctgcgcttaacaaaaatgtaatcaggggttctcacaaacacaccgcattaaaacagaatgataaaaggagtcttgccaccgacgatcaagaacccaattttgggaacaaaagccgcgagatgatggtggagacttcaaactatgtccgaaaaacaagctacctagacacgaagacccatgggcgggaaaccaacatttattgtaaccataagaaacgacttccgctgatgaaccaaaccgcacga

SEQ ID NO: 12368 - DNA, 454 bp, Glycine max
  unsure at all n locations
  Clone ID: jC-gmle01810062a08a1
gaagcttcatggattttggtattttccctacactttgagggtggtatggaccttaaagttaaaggatataccatatcaaaacatagaagaagaccgctacaataagagtcttcaacttcttgaatacaacccagtatacaagaaaactccagtgcttgtccataatggaaaacccttatgtgagtccatgcttattgttgaatacattgatgagatttggtcacataattcattacttcctgctgatccctacgagagagctctggcaaggttttgggttaaatatgctgatgatgacatgttttctgcagttattgcattcttccttagcaataatgatgaagagcgagaaaagagcatagagaagatatgggagcatctcanggttgttgagaatcagtgttttggtgatcagaagaattttttgggggagacattattaacattatggaca

SEQ ID NO: 12369 - DNA, 377 bp, Glycine max
  Clone ID: jC-gmle01810062a08d1
cacaaagggattaatccttgggcttaaaaaaaattgcttttttggggacctgccaaaatatggtcctttagaaacttggcagaagccacccttttttgcagggcggggcggttttgtttaataactggacacaccttaccatgtttttgccatggatgctcgggggggaattttgcatgttcccggaccttcactctatgcagtaattctgcaaccgcaacaagatctgatgaggtcccaaaagctttgacgacatgggcaaatgagtttcccccaaaaaaattgtgtgcaacacaaaacaagtgttcatcatcatcctcagaatcggtaccagggacacgagggacataaacagcttccgagccatacttgcctgg

SEQ ID NO: 12370 - DNA, 508 bp, Glycine max
  Clone ID: jC-gmle01810062a09a1
aattgaagttgaagtcttgcccttctctcttcaactccaaacacaagacatcatcatccatggctgcctccgtctccactgtcggagctgtcaacagagctcttttgaacctgaatgggtctggacctggggtttcagctcccagttcatccttctttgggagcagcttgaagaaggttattggctcaagggtccccaacacaaagatttcctctggaagcttcaagattgttgctgtagaagagaagaaagagattgaagagacccagcagaccgacaaggacagatggaagggtcttgcctatgatatctcagacgaccaacaggacatcacaagaggaaagggtttggttgactcccttttccaagctccacaggatgctggaactcactatgctgtcatgagctcctacgagtaccttagcactggacttcgccagtacttggacaacaacatggatggattttacattgctccagcttttatgggacaaacttgtgttcacat

SEQ ID NO: 12371 - DNA, 544 bp, Glycine max
  unsure at all n locations
  Clone ID: jC-gmle01810062a09d1
aggacaaaaggaaaaggcaccaaattcaatttaagtggacactttaactcaaaattatagaggaagacagtccaatatgaaaaatatagtaaaatcatctcaaacttggcatcttctctttgcacctaagacattgagaattctaagaatgttacacgcaagtcccatcacaacttctagcacttggatcagcacaaccttcaggaacagaaatatttacttgccaagtttgctttgcctccaattcaagattggaagaaagttcccctgttaatagcatcctcgttagcatttccaagtgcagcctcgttcaagtacttgtcagccaattggactctcttgacattctcttgttcttggacaagcatgttaccatacgtcaagagcttctccagagtcatcttgggctgctaaaggttggaggtccatctgttgagttcacaagcttcttcccaatgccgtcaacaccaacaccagaaatccacttgctcacttcgncatcatatactctggccctcagtgcaccaaagaaatcaatggattg

SEQ ID NO: 12372 - DNA, 520 bp, Glycine max
  unsure at all n locations
  Clone ID: jC-gmle01810062a10a1
acacccaccaccctctccatcacacctgcccgcctccatcacaggcgctcgttccacatcaccggcgcctttcctgccgtctcgcacgcctgtcgcctcgccggccgacagcattccaaactcgcccgtcggacttcggtgactgacatagcaacaacgagcgagacaccgctcatcacacaacaccgcaatcatgtctgcagagccagaccactccgccagcaagggtaaggtcaagctcgataatgacccatcgggcgccgagaagcgcgatgagaatgaggtcgccacagcaatcctcaagaagaagaagaagcccaacagcttgatcgtcacagacgccaccactgatgacaactcgattctcgccctctccaacaacaccatggagacgctacagctgttccgtggtgacacagtgctcgtcaagggcaagaagcgaaaggacaccgtnctcatcgtgctggccgatgacgacctcgatgacgggtcagtgcgcatgaaccgcgtcgtgagacac

SEQ ID NO: 12373 - DNA, 533 bp, Glycine max
  Clone ID: jC-gmle01810062a10d1
atcgggcaaatgcttcatttcgccagcggagggcgcgaactattgagacactctatcataacggccagctcctggtgaggcgcatcgcctcattcatgcaacgactgaccgagccatccgcatcatctgtatcataagcatacatcgacgcaaaactagaatccgccgcggccaaccagtttccgtccccatgcctgtataccacaacttggcgtacttaatcgtagagatcctcttcgccagcaccattctgctgagcctcggccgcagcaccctcggcaccaccttcagggaagcggaagaaagcactgccgccagcgctgttcttcatgctctgcgcgaaggcctcgtaccgcctaatctcagtgtctgtgactgagcgacgagccatgctcatggcctcctcgaagtgacgcttcgtgagctctggcactgggtcctcctcatcgacatcctcgtccatcttggtgtcatcgccctctgcggactgacgctccttctgcttctcatggccagcgagatgctctccttga

SEQ ID NO: 12374 - DNA, 496 bp, Glycine max
  Clone ID: jC-gmle01810062a12a1
aacttctgctacttcctactcctaccgcacttctgctccgcaattatcatgggcaaggtcaagatcggaatcaacggatttggaagaattggccgtttggtagccagagtggctctgcagagagacgatgttgaacttgttgccgttaacgaccctttcatcaccaccgattacatgacatacatgtttaaatacgacagtgttcatggacactggaagcatcacgatgtcaccgttaaggacgagaagacccttctcttcggtgacaagccagtcactatttttggacacagaaaccctgaagagatcccatgggggtcaactggagctgacatcattgttgagtccaccggagttttcaccgataaggacaaggccgccgcacatttgaagggtggtgcaaagaaggttattatttctgcccccagtaaggatgcccccatgtttgctgttggtgtcaacgagcacgagtacaagccagagcttgatattattt

SEQ ID NO: 12375 - DNA, 359 bp, Glycine max
  Clone ID: jC-gmle01810062a12d1
ggaaaaaaaagggcggcccaatttttcctttacccaacaaaaaccaggccctttccaaggtttcccgccccacccctccgggggttttaaaaaaaccaaaacccccccccccccccccaaaaaaaaaccccaaaagccccaaaaagggctttggccccccccaaaaaaaccccccctggtttaaaaaccccctttttccccccccccctttttttgcccgggccaaccccttaatcgggcttaaaaaaaaacctccgggaataaggggaaaccccccccctttgaagaacccccctaaaaaaacctttgggcaccaaaaccaaaaaaaacaaagccccgggggcggttccccccccctt

SEQ ID NO: 12376 - DNA, 573 bp, Glycine max
  Clone ID: jC-gmle01810062b01a1
cgccaggactgtcgatgcaagtcagccgcgcgctcaattcggacatggacaccgaccgccccccgttctcgatcaggattcttaccagcacaggacgatggcagggatcgccacggagacaatcgacagcttcatcactgctgcctcgccaaaaagctacgatggatctgacctgaccccttcgcagtattccgacgcctttgcaaatcaaccgacagatctcacagaggatgccttcactccgttcgaatccgtggatgacctacaggacgataggtctataataaaggacatcgatctcgcttctctgggtcatgcgacgcatgatgtgaatgaaagcgcaaactcgctcagtaagaagctgttcgcatgtgaaatatgtggccgctctttccaacggatcgatcaccttgccagacataaggtcaaccacgatagcgtcaagccgttcaattgcatcgtctgccatcgggctttcgcccgtaaggatgtctatcggaagcacttacagaggcacgaggcggacagacggacgcgcaaaccccacacggcaccacttcatgcacattgatc

SEQ ID NO: 12377 - DNA, 368 bp, Glycine max
  unsure at all n locations
  Clone ID: jC-gmle01810062b02a1
ggttgtgaaagcagagaagtgagatacactaagttatcctcataaatacactctaattaggtggcaagataagtgtctaaccttagtaacattgccacatattgtgttcattttggaattgtgccactaaaattctattcaattcatctatggctgcctcttcttatgctatgcaatcaatcctggcaaaccctttgatccgcatttccagcgggtctagggtgaaccaatttggcgttcctgctttgcacatgagaaggaatgttggcctgagagttaggtccatggctaaggaagaacaaccaagtgagcctgcaaccccagttacaccgncaccatcagtagaacccaagccacaggcagtctct

SEQ ID NO: 12378 - DNA, 554 bp, Glycine max
  unsure at all n locations
  Clone ID: jC-gmle01810062b03a1
gtggaagtgagaagaaaaagacatggcagtgtcagcagcaaagttcgatgtggtaatcctaggagcctcaggtttcaccggcaagcaagtcctcaaagaagccctcaaattcctcaattccaaccatttcacctccctcgccatagcgggccgcgacccctccaagctggcccaaaccctcaaatgggccgctcagcccaacccgccgccccaaatccccatcctcgccgccgacaccgccgaccctccctccctccgttccctctgcgaccagacccgcctcctcctcaactgcgtgggccccttccgccgccatggcgaacccgtcgtggcggcgtgcgtcgcgtgcggctgcgactacctcgacatcacgggcgagtcggagttcatggagcgcgtgnagcgtgagtaccacgcggaggcaacaaaaaagggttctttggtggtttcggcgtgtgggttcgactcggttccagcggagatgggcttttggtccattcgaggcagtgggtgggcccggcccggnccacagggtgggggcgtacctgagtttg

SEQ ID NO: 12379 - DNA, 525 bp, Glycine max
  Clone ID: jC-gmle01810062b03d1
ataaagttgtttctttcatagcaatacaagccggtaacaaacctttaccttctgttttgtgtcaagttactactccagtgcatgccaacatgtttcagactagctacattcaaacaaaaccttcagtctagaagattaaaagagggaatccaagttgcacctttttctgaattaattctccatttccaagtaaattaagcctcaattagctctctactagctatctgccactgcccactagtaaacagtctgttctattatgatctccacatgcaataaagtagtcactatgatgtcaatcaacctgaacaaatgttgaagccaattaaagatgatccagctgggtgatcaagccaaatactttttttagtgaacacagggtatctctcaaagtactgaaattcatgaggctaattttctcaacaatatttttccatgcacatagatttagagattatctatctaagtatcaactatgtcacaccatcttggttcaagtcaaatgtcaatataactgtagtattc

SEQ ID NO: 12380 - DNA, 509 bp, Glycine max
  Clone ID: jC-gmle01810062b04a1
agaaacaactcctctctactcaaacccttcttcctcataacaacaaaaacagaaacccctttcccccaaaccctagaatcgccacagacagatcctcatcgttcccaatccaattcccaacaatttctttctatccgaaacaccgttgaccacacacacccgagtttttatccataaaagtaccgttttttgattcctgggtccccttttttttctccttctcttttattgggcataggaatgttgggtactgggttgaacttcgggcgcgctcgcggcgaggatcgattctattctccggcgaaggctcgccggtcgcttcacaccatggagaatgacaagcttcgtagggtccacagcgatgtcgccgcgtctcgctccgtcagagacaaatcggtcggctcgggtaaccgggtacctgagaaccgggtcgggtcggatgaggcaaagaagagcggcgcggttccttcgtgcgaaccggtggcgaaccggttgagtaatctggagcg

SEQ ID NO: 12381 - DNA, 422 bp, Glycine max
  Clone ID: jC-gmle01810062b04d1
gcagcaaagaaagataacttaaagaattcaaatagagttgggggaaattcaagcatgaatacatttaaaagaccatatccagtaaaattcccccaataaattaaagctaagtcctaatatagaacatcaccaggacagaaaaaatgtagcctgttcttttttaacaaaaccataccaacagatacccaactgatgtaggactcattgatgttagcaaataaacagatcagctagcacttgagaagctgcttgttaatctgtacatcctccatgaacacattaagcctcaacactgccgcttgtccaaagctttactgctttattaccattacttttctgattctttcacttcttacggaaggaaacagtgcagaaaattaccaaggacagtgctaaacatcttttctccaattttcattttc

SEQ ID NO: 12382 - DNA, 565 bp, Glycine max
  unsure at all n locations
  Clone ID: jC-gmle01810062b05a1
agcacttagtgctattcaataattacgaaaaaccaacagcgagtgttgtttttgtttggtccaggctggaccagggaatgaatagagatgagaggctttcggttgaagagaactgagttaagcggcgaagccaaacgcagaatcggcggcagaaattgccaccggaagcacgtcgaagacgggtgaaccaaacacaaaattccatccaccacttctcttttcaatccccaactcaaatctgtgaagaaaatctcaatttctaaattgtaattcttagcactactgctagtagtagtaaaaaaaaaacaattagaaagtagtagagtgtttttttttctttttttcgtttgttttacttttaagatgggtgagaagagcaacgttggcggcgacgcgattaacacgacactgcttcacgggaagtacgagctgggccggctgttaggccacggaaccttcgcgaaggtgtaccacgcgcgccacctgaagacggngaagagcgtggcgatgaggtggtgggcaaagagatggtgtgaaggtggcatgatggacagatcaagagaga

SEQ ID NO: 12383 - DNA, 414 bp, Glycine max
  Clone ID: jC-gmle01810062b05d1
aaacgcagccatgaatgacccatgagccacaccaatcaatttgcaaacatattcacaatcacgccaacatagcaacaacatcacccacgagcacaacaacacgcagcacatgtacctgaatcatcatcgacaacaactcctcgatgtccatttcggttcattactgcattcgccttttcaacaattcccctttctgggtaaaagacgacacaccccagaggccaaaacataacaaagaagcaagcaaataactaaaatatctcagtcctgaaacaagaattaacaaaaacaactacaaaggaacgacaattagcagggagtcttggttgttcttaagcgagtgtaggattctctgcaggagaagtcctcccacgatatctttaagagctggacgaagctccttgctacagaact

SEQ ID NO: 12384 - DNA, 576 bp, Glycine max
  unsure at all n locations
  Clone ID: jC-gmle01810062b07a1
ctttaccctttatagataatataaagatagatgaattgagcgaaaataaaaaagattcaacaatttataagaataatccaatgatttctgaaacaaccatttcaattcaatcgataaattcagtaaattgttcattgaaaaaaaaaaaaataaaggatcttaatgctaaaagaaaagcagttataaaaaaaattgaaaaaattaaaaaggggcttgtaatttcagagacaaatattcattcaaacaaaacaacttatgatagtaaaagggtagaattcgaaaaaaaaaaattgcagatattacaaagaagaagaaatgctcgattaactcgtaaatcacattcttttttaaaatttttcatgaaaaggatatacagagatatatttctatatatcagttgtattccgaggatcaatatacaactttttcttgaattaacaaaaaaatttttaaataaatccatttacgataatgaagcaaatgcagaaagaatttataaaacaaatcaaagtataattcgctttatttaaatttacacanatattttcatactagaaatccgaattcacattaatc

SEQ ID NO: 12385 - DNA, 437 bp, Glycine max
  Clone ID: jC-gmle01810062b07d1
acttgttgttctttgtaaagaattaattggcttttttcatatgaattgcatttggttaaatctttattttgagctatacgatattcagctattctatttctccatttttgtgagactaatctggaccatctacttttagatcagtcatattgataataatgatcctttaaccaatttgtccattgatttattacagaattgcgagggttattatgttttaatttataatgaaatattccttgtgctccaaaaaaagaatcctttatttcatttttcagaaaaaaaaaaattccatgatattgaaaaacagatcttaacttatagaggtgtatgttaataattcggcgagtgtaataaattaaaaaatacatctgcgttgtgacaaaaaggagcatgtcacaagaattatgtgaattcggatttctagtatgaaaata

SEQ ID NO: 12386 - DNA, 510 bp, Glycine max
  Clone ID: jC-gmle01810062b08d1
gttggatcccaatcccaattctatttggggggtagcttaaatggttaagtagagcggaacggaagaccctttgatagcatgtgacgcgaagtcctcaagtccgaaggtgattagcagcggagtggtccttaaggctgtcgtacctgctctagtccttccggcgtaatgttctccgaagaatcggatcagtctttccctctgcggctgctacttctttacttattcactagtcttgagattttagccgagactttgctcaggtctcatagaaaagaagattccttcccgctcttctctgaatggagagaatgagttgtactctttcactggaagctatcttactaaagagtgggcctatcttttcgaccctctcgtcactcgtttcctttcgagaagacgaagaggatgacactggggatctttctgacttaaagaacttcccatgagctgccttactgatagggctggatactcaacttagaagatgattgccacttactgacttactac

SEQ ID NO: 12387 - DNA, 483 bp, Glycine max
  Clone ID: jC-gmle01810062b09a1
gaaaaaaaagaaaaagataattttgatttacttgttcctgaaaacattttatccgctagacgtcgtagagaattgagaattctaatttgtttaaatccaaataatataaatagtatgcatagaaacacaatattttataatccaaataaagtccaaaatggtttttcacttttgactaataaaagactatattttgagaaagataacccctaactaaggagttgaagaataactctttggccaaaatatcgattagaagatttagcttgtataaatcgatattggtttaatacccataatggaagccgtttcagtatagtaaggatacatatgtatccgcgaatgaaaattcgataatccaaatttgtcttctatttaccatatttatattggtaatagaagacaaattaatatctatatctatctatatagatagatatagatacataacataaattaagacacgcattatggtatggcatt

SEQ ID NO: 12388 - DNA, 579 bp, Glycine max
  unsure at all n locations
  Clone ID: jC-gmle01810062b09d1
gtgaaataacaggtataattgaattttttaccataaaaaaattaaagtttttcccttctcttcgctttttacttttgatagatattttgattgatcagtaatagtaatgacactaattttgaattttttatataaatctgaatttacttaatttacttaagaattcttgatttttttacaatcgaattaattcttataaataaaaaaaatggaatccatgcaatttaaatagatataaaggagactttttttatagattcaccataaaaaatggtatacttaaaaaaaacataattttgtggattctttttttatctaaggtatatatcagtgaattagtatcaatgccataccataatgcgtgtctttatttatgttatgtatctatatctatctatatagatagatatagatataattntgncgctctctatttaccatataaatatggtaaatagaagacaaatttggattaacgaattttcattcgcggatcatatgtatccttactatactgaaacggcttccatatgggtattaaaccaatatcgatttatacaagctaaatcttctaatcga

SEQ ID NO: 12389 - DNA, 531 bp, Glycine max
  Clone ID: jC-gmle01810062b10a1
gtggaatgtattctatatcagccttggacatggtttctaacttgggatttgtatttggagcaagttcaaacaactcaaatgagagtaggattgctgtgggtgaaatatctgttggagaaatgactgaattggaaagaagcggttaaagaatctaagaacaatcataaaaaggtcatatctgcacaagccacagttgatggtgttaaagttgatggtattgacactaatttggctgtcatgaaggagttactttttcctctaaatgaacttgcgaagtctcttcagtccttggcatattgggatgatccacggaagtctttagtgttttgtttgtttttcagttacatcatctacaggggttggcttggctatgcagcagcgctggtgcttgtgttacttgcagttttcatgataattactcgatgttttagccaaggtaggtcagttcctgaagttaaagtacttgcccctccaccaatgaatacaatggaacaactttggctgttcagaatgctgtcactcagctgaaca

SEQ ID NO: 12390 - DNA, 491 bp, Glycine max
  Clone ID: jC-gmle01810062b10d1
tttttttttttttttttttttttttttttttttttttttttttttttttttttttgttgttttttttttttttttttttttttttttttttttttggggggggaaaccaattttaaaaaaattaatttcgccccccccaaaggggtgaaccccctaaaaatttttttgaacaaaaaaaaaagcccttttaaacaaaaaaatttcccaaaaaaattcccccgggccaaaaaaataaatttctcttcttttcccttttaacccttccaagcggaaacagagcggttggttctctaacccccccatccttaaacccccccgccaatttccaaagggttcctttttttgggggggaaattttgctaaaaacccccaaaaaaaatggcaaaaccttccctttagggggcaaaaaaaccaaaaaacaagggtgttgtagaaaaaaaaaagggttacttttccggccccggggggaaaaaggaacgcaccaatccccg

SEQ ID NO: 12391 - DNA, 433 bp, Glycine max
  Clone ID: jC-gmle01810062b11a1
aatttaaagaaatcaacacacatttacacaacaacatatggaggtgctaagggtgcggaccatagctttcaaatccaaagatgctgccatcccagccatgtttgttagggcagagacagagcaactcaggcatcaacaacccgttcaaggtgtgaaccttgaggtgccaattattgattatagtgacccagatgaagggaaagtggtgcatgagattttggaggcaagtagggactggggcatgttccaaattgtgaaccatgacatacctagtgatgttataagaaagttgcaaagtgttgggaaaatgttctttgagttgccacaagaggaaaatgagttgattgcttagcctgcttgggtctgattcttattgaagggtatggcacatagctttagaaagaggtgaatggcatgaaagggtgggtggatc

SEQ ID NO: 12392 - DNA, 388 bp, Glycine max
  Clone ID: jC-gmle01810062b11d1
ccccacaagtcacactttgattccataaattaaataacaaaacagagaaaccaactttggtcacagatcttatttaatttacttcccacaaggcacactttctttccataaattaaataacaaaccagagaacccctgggctataattatctgggggggcccacttcattcatggggggatcttatggggcttacaataagcataacccttggatttctgggtttggaatttggggggattggctgggttaaccaacttggggggaggaccaacttcttgttcctttttgggttctatgaacacgggccacgacattcttggctaatcttgtgccactggggtgctgtgaaaaactgccttatattttccattgctcagtatctccat

SEQ ID NO: 12393 - DNA, 506 bp, Glycine max
  Clone ID: jC-gmle01810062b12a1
gtgaactccactgttcctattgctgctgaagttttcaagaaggcaggaacttatgatgagaagagattgtttggtgttaccacccttgatgttgttagggcaaaaactttctatgctgggaaagccaatgttccagttgctggtgttaatgtacctgttgtgggcggccatgcaggcattactattctgccactattttctcaagccacaccaaaagccaatcttgatgatgatgtcattaaggctcttacaaagaggacacatgatggaggaacagaagttgtagaagctaaggctggaaagggttctgcaactttgtcaatggcctatgctggtgccctttttgctgatgcttgcctcaagggcctcaatggagtcccagatgttgtcgagtgctctttcgtgcaatccactgctactgaactttccttctttgctttcaaggtgaggcttgggacggttggtgtggatgaagttctgggcttggtgcacctttcagatttgag

SEQ ID NO: 12394 - DNA, 346 bp, Glycine max
  Clone ID: jC-gmle01810062b12d1
gggaaaacaaaaccctttttaagggaaaaaaaatgggaataagggggccccccccctgccattccctttagggaaaccctcccgttaaagggggaccctttttaagggggggccaaatcctaaaccgggttttaaaaaggttaaatccctttggcaacaaacaggttttaaactttaatttttaaacccggggggttcccccccctaaaaaaaaaaacaaaaccgccccaccattggcgaaaaaaataaattaaggggtttgaaaaagcaaaatttggtttggtttttaaaggaatttcccggcccctccccaacatggttgggataacatgttcaattacggggg

SEQ ID NO: 12395 - DNA, 554 bp, Glycine max
  Clone ID: jC-gmle01810062c01a1
aaacgaagcaaacagatctctctctaatatagactatcatatgtcactgatcttccattgatggcttcttgatcaggaatccctataagcacgcagagacatatctagtaaacattgtttggagaagcaattggatcatatgaggtgttcacttggttgtatcggttccctagctgcaaattcagatgtgcaatttttgcaagctttctataataaggaaatttccctcagagtcacacagattagttttgtggatagcgtgaacaaggcgagagtaaatcctttgatccaaggaagcactttgctattgcataagcttggcggaggtggacacaagctatcatcatggctgaaggcgaagggtgtattgagcttaaattccgcatatatgacggaactgatatagcacacagtacatattcttcatctaccacagttggtacccttaagcaaaagctagttgctgagtggcctcaggcaaaacagttacaccaaagtctgtaagtgacctaaagcttatacatgccggtaaagttttgggaaacaataaaact

SEQ ID NO: 12396 - DNA, 554 bp, Glycine max
  Clone ID: jC-gmle01810062c02a1
gtgttcccaggacttattgtgttttaaatccacaaaatccttttgtgttgaataggtggatggggaaactgactttcccccagggcacttcccgaagtgttaagagaatgcctctttctatagggggaggagctggtgcaaagaatgctattctcatgaatatgccaaatgctgttctttcaatgtggagatattttgttggagatctcgtctttgaagtttctaagatgacttctccctacattaaatgtacagtctctttcttcatagcatttggaaatttggctgatgacaccatcaattttgaggcttttccccacaagctggtgcagtttggagagattcaggaaaaagttgtattgaaattttcacaagaggaatttcttacagcttggtcaactcaggtgcgtcctgcaacaactctggtggctgatgggtgtccatatttgtatgctatggtgcatgatagttcagtgtctacaataccaggtgattttgtcattggtgttaaggtgacaacccataacattatgtgtgcacatgggctcaatcct

SEQ ID NO: 12397 - DNA, 541 bp, Glycine max
  Clone ID: jC-gmle01810062c02d1
aaaataacacacacttcacacatcattacgacaattaaaagaggtgtggaaattttcaaatagacagagcatactcaacaagagggtcatgtctaatttcctttattgaattaaacaaacgaacaaacgaaagaaaacacaaattccagatcatgcagaggattccgcattttcagaagatctggcagtagcctgtggaacagaaaaagctggcataagagtattaccagcaatttcaaaatcttgagaaattcccaagagaatatcaaaaactgtagactgtttgggattgtcaataaggaaactcaagtgccatgaagtttgatttgcccactcagaactccacatttcaaaaccattattaggaccacatacctctattgggaagatcaattcccaggaatgtggttccgattttgtccacttacatgcatcgaaatgctctgtactgttgctgtttgttaaaaacacttgtaccaatgaggcccaatcattccttttgactgctgcattcccagacatcacaatttaaccattaaac

SEQ ID NO: 12398 - DNA, 596 bp, Glycine max
  unsure at all n locations
  Clone ID: jC-gmle01810062c03a1
tccacaactgatggcaggaagattgttgacgtgctgcttgagcaaaacattgttcctggtattaaagtcgacaagggtttggtgccccttgcaggttccaacgacgagtcatggtgccaaggtttggatggtctagcctctcgctcagctgcatactacgagcaaggtgcccgtttcgccaaatggcgtactgttgtgagcatccccaacggtccctctgctctggcagttaaggaagcagcctgnggtctggctcgctatgctgcaattgctcaggacaatgggttggtcccaattgtggagccagagatcttgcttgatggggagcatggtattgatagaacttttgaagtagcccaaaaggtctgggcagaggttttcttctaccttgctgagaacaatgtccnttttgagggtattctccttaagcctagcatgggtacacctggagccgagttcaggacanggccagtcctcagacagttgctgattacaccctcaagctccttcacaggagaaatcccctgctgtccctggaatatgtttttgctggtgacagtctgggttgaactaccctaatttgatgcatgaaccat

SEQ ID NO: 12399 - DNA, 437 bp, Glycine max
  Clone ID: jC-gmle01810062c03d1
aagtacacaactcatagcaaaaggtttattaagctgtaaaggtgcatttaaccataaacaaaaatagtctccaagactataaaaacattacattttagacaaattagtcttccacttcatcgtccgtcaacacctactgtaactgctggtgttgctgcctaacaagtatcatattcactgcaaacatcttagtaggagtagcttttgacgaacaactccttcttggcttcctcggattcaccctcaccagtgtacttcccaagctgagcgagtgagttggacttggcacggaatgcgagtgcatcttgtgctgccttcacgttctctgggcggcctccccatgtcttcaaggcagtgttttggagggctctggcatacgagaatgacacgtgccacgggtttggagattggttcatggcattcaaatgagggtagct

SEQ ID NO: 12400 - DNA, 560 bp, Glycine max
  Clone ID: jC-gmle01810062c04a1
tccttcgtctcttttgtttcgtcctttccttcaccacttttcccttttcattttcaggataacaaaacaacactccttgcaggattaaacttcacttcaattgaactaacctatctgtgggttttttgtagattgattcaattcaatggcttcagtaatgctcagtggaactgaaaagctcactctcagaaccctaaccggaaacggcttaggtttcactggttcagatttgcacggtaagaattttccaagagtgagttttgttgccaccactagtgctaaagttcccaactttaggagcttagtagtacccaagtgtagtgtctctgcttcgaggccaacctcgcagccaaggttcattcagcacaaaaaagaggcgttttggttctataggtttctctcaattgtgtatgaccatgtcattaaccctggccattggaccgaggacatgagggatgatgcccttgaacccgctgatctcaatgacaggaacatgattgtcgtcgatgtcggcggctgcaccgggttcaccactcttggtattgtcaagcatgtggatg

SEQ ID NO: 12401 - DNA, 347 bp, Glycine max
  Clone ID: jC-gmle01810062c04d1
agggggaaaaaaaaaagggatgttaacctttaaaccacattaacatccttttataatcattccataaaacaatgttggaataattgaccccttaagactgctggtgggcaaaacaaaatgaccagggggcgggtaccaaatgggtgcattcgggcttcccccccaaaattattatagcttgcaagagccgcccgcaaatttgagctcagttccctaataaactacttgccctttgaccaaaattttcttaattggaagtacatttgatgaaactttgaaaaagatcctggttaaggtttaaaaggggcccctactactaatatctcttaaaatggccgacctttggg

SEQ ID NO: 12402 - DNA, 593 bp, Glycine max
  unsure at all n locations
  Clone ID: jC-gmle01810062c05a1
cttccctccatcctcttctcatctccgtcactctctgtaagactaatccagtgcctgttgtcaatgtcaattgcttcacactgtctgaccatactgcatagttttatagtcatagctgctgatttagtaacatttttcaatacataattgccatagaaagaaaaaaaaatattgctttttgtaccataactagaattccaaattaaattttgatgctttaggtctacccatcatcattggaaccttaaaaatgtcacttgtaatcccctcatcctgtgcagcgcccttgcatttttctcaacgggagattaagagtttgagttcccaccaaaaatttgcctcttattattccatcaccccttttcaacataaagtggctttgagttgtaaaacgaggcatataaggactcacttgagaaatgaactaaatgttcttcataagtatgcagttaggtctaaggggcatgattntgagtcaattaatgatgaatccttgggttgngatgatgatgaagaagtccaagatatggtgtcgccttgggaaggtgcagttatatacaanagaaatgcaacaaatttacatctggagtact

SEQ ID NO: 12403 - DNA, 488 bp, Glycine max
  unsure at all n locations
  Clone ID: jC-gmle01810062c05d1
aatattaattatatattatatttaaatagtactaatgtatgatcatggatctaatacatatggaaagaagcattccaaaggcatactttaaggcgtagctagaaccagaacaatgctccatggatctatattcaataacatccatcatccatgccatgtatgatcatggatccaagagctcttggtaggcgcttaacaatgtcagaacataaaaaaaataaaattcattaaggtcaggacttctacacataacgatacagcactgtgagcaaaatctgcacatgaacttcataattgttacaactgcatcttctctttcaaatttccaagcgggccaaagcttttctcttgtacttcctccttgctacaattgcaatgccagtggtaaagttttgaccacatttcaggcacatgcctttgcacccaggaccacatactngaatcatggtaatctcaagatgcaccctgtcccttatgttctttgaaat

SEQ ID NO: 12404 - DNA, 511 bp, Glycine max
  unsure at all n locations
  Clone ID: jC-gmle01810062c06a1
gcgagttgttgtaaagctagccttgttgcagccatggccacccacgcggctctagcttctacaaggatccccactaacaccaagttcccatccaaggcttcacactctttcccaacccaatgcgcctcaaagagacttgaggtgacagaattctctgggctaagatccacttcatgtgtgacatatgctaacgatgctagagaatcttccttttttgatcttgtagcttcccaactcactcccaagaccaatggatcatcaactcctgtgaggggagagacagtggccaagttgaaggtggcaatcaatggtttcggacgcattggtagaaacttccttcgctgctggcacggncgaaaagactcaccccttgaggtcgttgntgtcaacgacagtggtggtgtcaagaatgcttcgcacctgcttaaatatgattccatgctggngaactttaaagcagatgtgaaaatactggacaatgaaaccatcactggtgatggtaagcccatca

SEQ ID NO: 12405 - DNA, 435 bp, Glycine max
  Clone ID: jC-gmle01810062c06d1
tcgtgatttatatttttttcaaaacatattgtttttacatcaatattcattactcaaaaccagtggggactgataccaaacttgtcactgtactacgaaatgcaacacgatattttaaaccggttttataatcaagagcatactgctgatacactgaaatcgcaaacgcatcaattaaagtacttttctttttcagcaataaaagttcttgttaaactgaaaacgctccattgccatatattggtaaacgatcatcccttgacaaatattactaacatattctctaacacattctttattaataattaaaatttatgaaaaacctcacaatgggaggttatttcttattattagaacttatagcactaacactcctttaattgttttaggacaaaacttagattttcttttgtaagggttggttgactttttttc

SEQ ID NO: 12406 - DNA, 331 bp, Glycine max
  Clone ID: jC-gmle01810062c07a1
cgagcggccgccctttttttttttttttttttttttttttttttctttgggatatggttttatttttacccatattttttattttattttattttatcactttatcatctccatttatacactacactcatcatctgcacttatcaaagaaagaaaacacaggcgcgcctcaaataaaagagacccacacccaaacaccacacaaaacagaggggacacccccccctaaaaaggagaaaacccaccccgaccacaaaaaaaggaaaaccccaccaaacaggaacacaccgacaacaccacaaccgcaaaaaaagtttaaaaaaaaaacaac

SEQ ID NO: 12407 - DNA, 424 bp, Glycine max
  Clone ID: jC-gmle01810062c08a1
agcgagtgattcagcaaaacgtttagaatgaacttgccaagggtattcttagaggagagttcaaggaagaagacacaattttagtagacacagaagtcacagtacttgccaatggtcaaattccccaacaaaagctagtttttaggagggttgaagctgattccagttctgctgctgaagacagacgggaaggctttccacagattctgtgaacgcacttcactgctcctcgtttctccacatgttaggtttcacaacaaattttgagtataggtcgttttcttatactaatgcaactctgatcctgttcatagcatgatatagtttatagttcttcatagaataacttttattggtcaatacaaataccatgcttaagaagtgttaaaaaaaaaaaaatatataataattaatattattatat

SEQ ID NO: 12408 - DNA, 323 bp, Glycine max
  Clone ID: jC-gmle01810062c08d1
atctattctttttgtggttggtagaattattcaatccttctttttttttcaaaattcgtactttttaaaacacagaaccacatgagagctgagacgtccgaaacaagcccttgcgacaaaaatccatgaacagtgacttttcccaccacaccagcttcttggtttggctaacaaaagaaaccgtttgttaccttagcgtgcggagcaccatagtgggtaacaccggcacattgggaaggggttcaaccctcatggggaacttccctggatgcgcccctgtaggaagaacggacatcgcgaacacacccctgaaaaggaaacct

SEQ ID NO: 12409 - DNA, 453 bp, Glycine max
  unsure at all n locations
  Clone ID: jC-gmle01810062c09a1
ggctcttcttcccttcgcctctttttgttcttcttcttcttcaatatttcggagcaactctacatatctttagcctcctcttatatatttcggaagttggtttctgctggaaattttgcaaacaaattcatatactgaaaggactttatgactagggagttctatacaaccagaatcggaatggatctgagcactattgaattggcgaagggagcacgagaagctccagagaactctttacatcattattaagcagtcttatcaaaggtttctttccaagagatgttataagatataattggtaaaattaagtttattgaaagattttgcgaaactttgcctgngatatagtgaaaatggacagatcagatacatcaggctttgtaagtggtggaagctgtatattggaatttgtttttctagccttaaagttctggtagttatgtgagtatt

SEQ ID NO: 12410 - DNA, 395 bp, Glycine max
  Clone ID: jC-gmle01810062c09d1
aaagaacacaagggtttattcaagggggggggggcccccttttaaaaaagacccttttgggggaaggggctttggggggtttaaaaaacggggcccccttttacttttggtgggggaggccagaaaaaacccttagaaaaaaaagggcccagggggtttatgtaatccccccccccctcccccccaaggttgggaacaagggagaaaaaagccttggggcccattccggggggggagggggccccgtcccccaaaaggaaattgcgggtgggggggccccccttcccctcccccttttaaaacgccgccggggggaatttggagattccccccgaaaaaaaacaagggggcccccccggggacccttccctgggggagaaaaaaaaagggggctt

SEQ ID NO: 12411 - DNA, 558 bp, Glycine max
  unsure at all n locations
  Clone ID: jC-gmle01810062c10a1
atcaaaacaaaatataaaaattttgaatagattctatgaaatctcaaaaaatcccgctattcaattattcattaaacatatgaatattagtgcatattattttatcgattagattaaatagattatctatatatatagatagatatctatntgaattgcttcattcgcgaggagccgtatgaggtgaaaatctcatgtacggttctgtaataaagatggaattgagaaacaaccatcaattataacccccaaagaaccagatttcgtaaacaacatagaggaagaatgaaaggaatatcctatcgagggaatcatatttgcttcggaagatatgctcttcaagcacttgagccagcttggataacatctagacaaatagaagcgggacggcgggcaatgtcacgaaatgttcgccgaggtggacaaatatgggtacgcatatttccagacaaaccggttacagtaagacctacttgaacacgtatgggttcaggaaaaggttctnccgaatattgggtagctgtcgttaaacctgggaaaatactttatgaaatgggt

SEQ ID NO: 12412 - DNA, 412 bp, Glycine max
  Clone ID: jC-gmle01810062c10d1
acgttctattatatatatatctatctatattctatatatagatatattgttcaggttatcaagtattaatctgaaataaataagaattgctgcttctaatacttataataattactacaaattctaataattactacaaaagggatatatgttagataaaatagattaattaatctatttcacaaaaaaataatgtatccatagcacagtttcgtcttataatacctcgggtgctaatgaaactattttagtgaaatttaactgtctcaattcccgggcgattgcacaaaagattcgagctccttttggatttccttcttgatcaatgacaactgcagcattatcatcatactgaattattatacccgtgctacgtttgagttctttacaggtacgtacaattacagctctg

SEQ ID NO: 12413 - DNA, 425 bp, Glycine max
  Clone ID: jC-gmle01810062c11a1
gtttgtttctttgtttcagaacgtggcattttgaaactcagcttttactgcagttttttttggttggcaaaactgtttttttttttctcttggattattttgtagacgttgtcaacttgttcactctctagtctccccttgaagcattatgcttgaaggagaattgtattactgtgtataaaacaatgtgggggtcatcgctagcagcattagtatagaatacatggattgatggaaaagaatagaatggaacagaacatggtgaaatgaaatgattataagttttattatttgaattgttaaggagaggaaggaatgcatttcattccattccacaataatcatctttttcttcccgtgtaatttgagggctatgggatgaaacccatgttttttttccttctgatctatcattaaagaggagt

SEQ ID NO: 12414 - DNA, 532 bp, Glycine max
  Clone ID: jC-gmle01810062c11d1
aatgtgtaattggcagacactgtcggcaattcaatatattatgtcaatggcttgtatgtaatgtgttgccactgttcatttctctccttgtacttgttataatgaatcgctattccgctcagaaaactaaaggaagcaaatttcattcggactgctatgcaaaaactttacacttcaatgggcaacttaagacttgtaagttgtcggtttgctcgtggcaaaacattggttcaaaaattcagaaacctgtgataagtataggtccggaaatgtcctataatgatccacgtggggagataagccgaagttaaaggaccttaccctctttcccatcttcctctgctcctcaattaacgtttctatggattgatatggaactactttgtcagctgtactatacaggtaaagctgaggacaaggtttggtgtttcatgagcacattgacaatccttgttaacctcctgtattcaagacacgaaaaatgtgcttaccagttaccacctaacatttaaagtatattatggctctaaaa

SEQ ID NO: 12415 - DNA, 427 bp, Glycine max
  Clone ID: jC-gmle01810062c12a1
ctaacttctttagatctctcccataataattttattggtcttgttccatcatttacaagattcttccgtggcatttatccatttgaacaacaatcgtttgagtggattgtctaaaagaatgttccatggaaactcttctttagtgatgttagaccttagctacgatgaaatatctaacaaccttaaagatctgatacataaccttagttataaaaggttaaatattctccttttaaaaggtaatcactttatgggggatataccaaagcaactatgccagttgatagatttaacatgctagacctttctcataacaatttctctggtgttatccccaaatgcttaggtaaaatgccttttgaggttaagaacccgaaagactttgtagcaagattttctatctttgatccagatctccatatccatg

SEQ ID NO: 12416 - DNA, 440 bp, Glycine max
  Clone ID: jC-gmle01810062c12d1
catacaacttatacataacctttattctatcaaacttagcaaaaacacatggaaatcattctaaacatacaacttgatatattacatatttccaattttgaaaaccttgctcagattatccttgataaagtagtagcaattcatgctcaccaattccatgtagtaaaaccatgcctgcctccaataaggattgatgtataaagctgctgcagttaccaacaatgctgatgtgcatgacacggcaaagctcacacagaaaacatacttttccaacaaactatcattgtctccatcagggtttgagtcatttggtataatagtaggggggggattgcaactctttggcagtggaagtccacaaaggaacggattaccctcatagctgttttcatcaaatgtggaaaattgtcctttaaaatctggtgttggacctgataagt

SEQ ID NO: 12417 - DNA, 552 bp, Glycine max
  Clone ID: jC-gmle01810062d01a1
cttactggaagccttgttgtgagtaagagaaaaggcttcctgcaccgagcacaccaacttgatacctctgattctttctttgcttagaattccacagaatatggagactgttcttttcaatcactccccacctttggaattcaaggggttgagcaaggaggaggaagactcattgctagggcaagtggaaatatggaggtacatgacatgcttcacggactccgtggccttgaaagctgtcatagagcttcgtatagcggacatactagaccgttatggtaaaccactatccttgtcgcaaattgtggagaacatagaagacgcaccctccccagatgcctctcttctccagagagtcctgagagtgatggtgcgcagaaagatcttcagtgcacaagaatcagagacaggagaaaccctcttcggcttgacacgagcctcgaagtggatccttcgcgacacgaaaatgaccctagcacccattgtgcttgctgagaaccactcaattcacctgaactctgcgcactacatcagtgagaatattagagaagg

SEQ ID NO: 12418 - DNA, 480 bp, Glycine max
  unsure at all n locations
  Clone ID: jC-gmle01810062d02a1
gaaagaaaaactcaacacaacaccccctctccaccctctttttcttttaatttctcatcttatctattaatcttatatacatatatataaagacatagataatagtcatatagatataattatttcgttatattttccttgcatgggctgttaagatgtctcgcacgtgctcacagtgcggcaacaacggccacaactcacggacatgcaccgacggtggcgccgccgggtctccgagggagaacggcatcatgctgttcggcgtaagagtcatgacggaagctaactcctccttcaggaagagcgccagcatgaacaacctctcacagtacgacgcggagttcaacgccgncgacgccggctacgccttcgacgacgtcgttcacgcctacggccgcacgcgcgagcgcaagcgaggtgttccttggacggaggaagagcatagattgttcctggtagggttacacanagtcggaaagg

SEQ ID NO: 12419 - DNA, 548 bp, Glycine max
  unsure at all n locations
  Clone ID: jC-gmle01810062d02d1
aaatctaaaaaaaaatggtaagcataatatattcctttgtctaatctaatctaaggaatattttaatgaccccagtggcattacacagaccagtcgcatctcaagagtacccggtgccctatcatttcacgctcacactcccccatacatacagaaacaagaatccctcaacagctacagaatatgacaacccatctttctaattctaaattctactaaacctgtacactgaaaccagcaattaaattgcctaattacctacataacctaaacccatagtatatatttatttttccaaatcataattaattaccattatactcattaattcaaatatcccctccctcctacctatattatgattatctttcgtaataatcaataaatccccaacacatatcttcaatttttccccctcttggatacatgcccgattaagtaacattaatttacacacgcaaattaactactaagaccatacttaattaataacttaatgacactnnattttttctggtttccttcttttcaaagcacgctgatgatac

SEQ ID NO: 12420 - DNA, 554 bp, Glycine max
  unsure at all n locations
  Clone ID: jC-gmle01810062d03a1
ctcgagccgctcgagccgcaaaatctttgtacaaatttctgaacagtttctaggtatggaaactctttcatatgggtcagcaccatgctgccaagttgtgaactcaaagtggaaattagttgaaaagagtttgagttcacgtcaatcaagagtttcctctataggaaaacttggagtttattacacaggtactatttctgcatgtgcgcctgtgagattttatgagatgggtactagggtgcagctaagaagctcaaaaagattcaatttcaaggtttgtagtggaagttatgatgatggttatgtgattggtgaagaggaagcaagggatatttcagggttagaggagcctgtaacaaccaaggttctgattccaggtctgcctgatgattcataaggtgaatctggtgctccaataagtagttggttttggggatggaaacctaaactcaatgtgcactatgagaagggccggtgcgaaaacgtcaatgatttgcctcgtgttctctttntaccaaggtttggtggtggctcttttcattatgagaaagcac

SEQ ID NO: 12421 - DNA, 530 bp, Glycine max
  Clone ID: jC-gmle01810062d03d1
ataacataaaacatctcctgagtaatagttgttcactagcatgctttcttggtgagtaattataggtatattatatatacaagattttacctatgattctaaagcatttgtgtttgttttctctttatacaaactatgaaagagaagacagtatacaaagttgatttatatttgaagatgccatatgattcaccctgtcattgaggtttggctgccagaatattactgaacttggattgagatctgatgaaagatcttatcctgtcccaaagtgagaaattggaagcgaaatatctgaccatcactgacttttttgaaccttctctgggaaattctaattccctgtcaataatagagtgcttcatactgtctagatcttcaagcaatggtaatgacacagaaccctgagactctagtgtttctgatccacccgcgaagtaagaaatttatgatctcaggaacttcatcatgagggcagtgaccagcagggctgatttgataatatggagcttcaggcacctgccttttaa

SEQ ID NO: 12422 - DNA, 508 bp, Glycine max
  unsure at all n locations
  Clone ID: jC-gmle01810062d04a1
ctcttttctgcatgtttgttctctcaacgactcctccgcgaaagagtattattcaatattttggttgggttgaatcccggggttgaagcgttgcagacatcacggctattctaagagtgtctcgctccctcattcatgtccgatctgtacgacggaggacgggtagttgcgtaactgccgttaacccttcgccgcacggtgggcgtggtgctttgccttctgaaggtggtagcccttcagacttgctcttcctcgctggtggtggtttcttctagtttcttcactcttttcattacttttagcctgcatagttttaaataagaaaaaaaaaaaacagcgactttgtgactagttaagatcaccgtttcttcttcttcttcttcttcttcttcttctactactactactactacttttcctccacaaaatgatgctcagaatcaagagggttcccactgtcgnttccaactaccaaaaagacgacgctgcagactctcctcgtcccgtc

SEQ ID NO: 12423 - DNA, 485 bp, Glycine max
  unsure at all n locations
  Clone ID: jC-gmle01810062d04d1
actacaagaacaaacagataactgaatttattatttctcagagtcaagtcaagcattatgatacatcataccccaaaacaccaacaacagtactcaggtgagcagttattacatcgtactttcacatgaacgcgtcataaaggcagataaaagcaaatacatacaacacaggaccttaaggctcaagcacagcacaatactatgtgacttaaacggggacacaattcagcaattattcttaaagcactacggatttgctgaatttgttcataattttagagccttgttagtgtagaatcacacattcttgtgaaccagctaccaccacagtaggggtgttcgcttgtgctgactgcatcaacttctttgacactttcaacgttgacatcctccaattcaccacagccaatggcgttaaaatnagatcattgacttcttgaaacctctcttgagagagggacacctctgcaagaagcctccaagca

SEQ ID NO: 12424 - DNA, 519 bp, Glycine max
  Clone ID: jC-gmle01810062d05a1
tgctcatcaagtccaagaaccaacctaccttttgcaatctcaattcaatggcgtcctctctcattgcgaagcgcttcctctcctcttccctcctctccaggtccctccttcgccccgccgcttccgcttcccaccgctctttcaacaccaacgccatgcgccagtatgacaaccgcgccgacgaccacagcaccgacatcgatcgtcactccgaacgctctttccctagcactgcgcgccgcgacgatatcttctcagatgtgttggatccattttttccgactcggagtttgagccaggttctgaacatgatggaccaggtcatggacaatccgttcctctccgcgtcgcgcgggatcggagctggcgctggagtgcgtcgcggatgggacgcgagggagacagaggatgctctgcatctgcgcgtggacatgcctgggctcggcaaggaagacgtgaagatctccgtggagcagaacactctcattatcaaaggtgaaggtgctaaagaaggcgatg

SEQ ID NO: 12425 - DNA, 384 bp, Glycine max
  Clone ID: jC-gmle01810062d05d1
agacttctaaacaacaagctcattcacaactctatataacaattattacagatacgtttgaagtttcaaaaccaaacacagcaacaatactattaagctggtatatctactaactagattcatcaccacctaataaaagaaaactaaagagtagtgtcgatgcaaaatggccaaatcagcttgggttgttctactcaaccttaacactgatcacgtctttcctctcttcctccttcattttcgggacaacgaccttgagcacaccggtcttcatctcagctctgatctggtcaatcttgtagagcttggccggcaagtcaatcctgcgtagtgtagcgacgagcgctctcttcttcatcgccttctttagcaccttcacctttg

SEQ ID NO: 12426 - DNA, 412 bp, Glycine max
  Clone ID: jC-gmle01810062d06a1
tgctcatcaagtccaagaaccaacctaccttttgcaatctcaattcaatggcgtcctctctcattgcgaagcgcttcctctcctcttccctcctctccaggtccctccttcgccccgccgcttccgcttcccaccgctctttcaacaccaacgccatgcgccagtatgacaaccgcgccgacgaccacagcaccgacatcgatcgtcactccgaacgctctttccctagcactgcgcgccgcgacgatatcttctcagatgtgttggatccattttttccgactcggagtttgagccaggttctgaacatgatggaccaagtcatggacaatccgttcctcttcgcgtcgcgcgggatcggagctggcgctggagtgcgtcgcggatgggacgcgagggagacagaggatgc

SEQ ID NO: 12427 - DNA, 389 bp, Glycine max
  Clone ID: jC-gmle01810062d06d1
agacttctaaacaacaagctcattcacaactctatataacaattattacagatacgtttgaagtttcaaaaccaaacacagcaacaatactattaagctgttatatctactaactagattcatcaccacctaataaaagaaaactaaagagtagtgtcgatgcaaaatggccaaatcagcttgggttgttctactcaaccttaacactgatcacgtctttcctctcttcctccttcattttcggcacaacgaccttgagcacaccgttcttcatctcagctctgatctggtcaatcttgtagagcttgtccggcaagtcaatcctgctagtgtagcgacgagcgctctcttcttcatcgccttctttagcaccttcacctttgataatg

SEQ ID NO: 12428 - DNA, 580 bp, Glycine max
  Clone ID: jC-gmle01810062d07a1
ggcaagtaccatttttatcaatcttatcacccttttgcattgcacctacaaaagggccaccccttcttcccttctcaacttgtacttcatctaattcaatactacaacttctgaatcacttagttgaattgaattatcttcaaaatgagagaaatccttcatgttcaagctggtcaatgtggcaaccaaattggaggcaagttttgggaggtgatgtgtgatgaacatgggattgatgccactggaaattacgtaggcaattcccatcttcaacttgagagggttaacgtgtactacaatgaagcaagtggaggacgctatgttcctcgagctgtgcttatggaccttgaaccagggaccatggatagcttgcgttctggtccttttggaaaaatattcagacctgataatttcgtgttcggccaaaatggagctggtaacaactgggctaaagggcattatactgagggagctgagcttattgattctgttcttggatgtgttcgaaaagaagctgagaactgtgactgcttgcaggggttccaaatttgtcactcactgggaggaggaactggggtct

SEQ ID NO: 12429 - DNA, 415 bp, Glycine max
  Clone ID: jC-gmle01810062d07d1
acaaaacaaacgccatgaaataatagcattaacaataacaaacaaaacccacaacgaagccaataagaaagaaaaatttcaaaacaaaatccgtaaaaaatactactcaccccacatctcatatgtacctagcattaactatacaaacacatcctttcctttcctttcccttaccatcaccatatggcatataccaagggttttgatttgcatttctcatgacatcactagaaatcattaaataggaataattttgatcaatcttcacattgcatctaatcaaaatttggtattggatattaaaaattttgattaatgtaacagtgaaaattgagtcgaccatgatgacgtggtaatctagattatataataatttcttccggagaggctttaatgaggctctcatgcagccatg

SEQ ID NO: 12430 - DNA, 529 bp, Glycine max
  Clone ID: jC-gmle01810062d08a1
ctcgagccgctttttttcttggtttgtgttttcattttgttgtggttttctaaagcgaagtgaaaaattcaatggcggaggttttaaccaaggcgagtttggtttcatcttcttggcatggggttagtcaacggcatcatcatcgaagggtttcaacggttctttcaaataatacatgtagcttccgttccggcgtgggaaagttctcttctttgaagatgaattctcaggttctcagatcttggtcctcttcttctgagtttcagggtaaaaagcttgtctttcatgtaaatataggattacccaatagggtcaattcgcggttgagagcttctactgggactcagatgaaccttagactagggaaagttcagaaatggtgggaaaaggggcttcaacccaacatgaaagaggtgacttcagcacaagactttgtggattcactgttaaacgcaggggacatgttggtggtggttgatttcttctctcctggttgtggtggctgcaaagcccttcatcctaagatatg

SEQ ID NO: 12431 - DNA, 527 bp, Glycine max
  Clone ID: jC-gmle01810062d08d1
ccattggtgaataaaatggcattcattttacaacaataggataggaaacgattccctcatacataaaaaaaaaaataccattaactaataatttcctacagcttctaattttctctaacctcagcaaggcatggattaaaataaacatgcctttgaggaatacacactatcaatatgacatcttcaccaaaccaaaatctacactgtacaagggatagggtcagaaaatgcgttttgctcacaaactgaccacatcatctcccagaagtggtcaaggttctctcattagaggccacagcattgagggtcattgaaggtgaaggaagagatcctgaaccaagagcaggagcagaagcagtttcggttgccaactcttcgttttcatgtgaaggttgtaatggttttggtgagtaggtgaaggaaagatctttgttggcagcaagagcctcgagttctttctcctctaaccttttggttgggcctaagctgcatctgtctgggtgtgtttggctaatgcatctttgaac

SEQ ID NO: 12432 - DNA, 596 bp, Glycine max
  unsure at all n locations
  Clone ID: jC-gmle01810062d09a1
ggttccaaatcctctggcacacttctatctattcttccatcaataggttccattgttggatctactgacttaaggaattattccaaaaactccaccatgcctactcagcttacgattttctatgctggttctgtgtgtgtttatgatgacatttctcctgagaaggccaaggctatcatgttaatggccggaaatggttatactccaactgagaaaatggaacttcccacggtgaaattacagccagcaatttctattccctccaaagatgatggtttcatgataagccaatcctatccaccctcaacctttcccacccctctcccattgacctctcatgtcaattctcagccaggaggaggatcttctagcaacaaagaaatttcaataataagacaagtaggaccttcaactgctcctactaaccatttgggatcacccattattggttctataggatctgcatctaaagaaaaggctcagccagtttgcttgcctcaggcacgtaaagcatncttggctcggnttttggagaaaagaaagggaaggatgatgagaacatcgncatacttatatatgagcaagaaatcacctga

SEQ ID NO: 12433 - DNA, 547 bp, Glycine max
  unsure at all n locations
  Clone ID: jC-gmle01810062d09d1
gacatgtaacagctgaaaagatattaatcatcgatcaatgatcaatccaatagccataataaatctgaagattattcactgtaatatatgtataaaagaaataattatacatcatgatgaaagtaaaaaaaaaaaaaaaaaaatcatatatgacgatttggaaaaatcttcacagtgaagtaaaatactgcaaaaagtaataattgtaaaaaaaaaaaaactcgggaaccaaaacaatatttaggacaaaaatgcctacgaaatttctctaccaatgacaaaaaaaaaatgatcttacaattacagaagtatataaatctaaacttccattcatgtagggctagnttggtgggctggtagtgaacacggatccaggagaagttcaaggagaaactgacactgtctgatccagaagagctgcattcagggtgatttcttgctcatatataagtatggcgatgttctcatcatccttccctttctcttctccaaaaaccgagccaaggatgctttacgtgcctgaggcaagcaaactggctgagccttt

SEQ ID NO: 12434 - DNA, 579 bp, Glycine max
  unsure at all n locations
  Clone ID: jC-gmle01810062d10a1
gttcaggatcatgggatccttttttatcagataggaagggctgtttcacaaaatgtgcttctaagtaattgctccatagatcctatatctatctatatgaagaagaaatcatgtgacgggggggattcttatttgtacaaatggtacttcgaacttggaacgagtatgaagaaattaacgatacttctttaccttttgagttgttctgccggatcggtcgctcaagacctttggtctctacccggacctgatgaaaaaaatgggatcacatcttatggactcgttgagaataattctgatctagttcatggcctattagaagtagaaggcgctctggtgggatcctcacgtacagaaaaagattgcagtcagtttgataaggatcgagtgacattgcttcttcggtccgaaccaaagaatcccttaaatatgattcanaatggatcttatntctatcgtgatcagagatttctctatgaanaatatgaatcggagttttgagaaggggggggagtcctcgaccacaacagatagaggaggatttttcaatcacatcgtttgggctcctagatatgagcc

SEQ ID NO: 12435 - DNA, 455 bp, Glycine max
  Clone ID: jC-gmle01810062d10d1
agttattcagttaaaccaatgattcgttattggagcagatagcaacaaccatctcatctgggaaaagccatctttttctcaacaatgtctttgtcatttgatccaatagcgcttcgttagataggaacagatttgataaatattgataactctcagatagagtattagaacggaaaaatccattagataatgaactattgattctaagccatctctggcaatgaatcaacaattcaaaatgcttttcttgcgtattcttgataaaccagtgtttatatatagatgtaggaagatctgtttgggaagtaaagaagttcccttgacatctcttcatctgtaaagaattgtccgatgtgaaaacacagagacaaaaggcttgatctttgaataggaaaaagagtgggatccgcgggggtcccaaatgaattggcttattcgaaaaaagccctgttctt

SEQ ID NO: 12436 - DNA, 517 bp, Glycine max
  Clone ID: jC-gmle01810062d11a1
aataatcatggagaatggagatttcaaggaaatgggaaagttattccaaaatcaggtagcactggctacacagagtggttcctctcaaaggatcatcttcaggtgggcgacgtggtccgatctagaaagccttccaatgcatgcagacctcaaaacatggacatcccagaaggaactgtcgttggtttagagcgaaatgcagatcacggattcgccctcgtgagggtccatggaattcatgaccctgttaaaattcatatgtcaactcttgaacgtgtcacatttggcttagtagctggtgattgggtccgcctgagggatgaaaatgagaaacactcactggtgggcattctacatgccgtcaatcgcgatggtagagtggctgttggatttctcgggctgcaaactctctggaatggaaactcttcggaactcgaaatcgcggaatcatactgcatcggccagtttgtcaggctcaaagacagcctttcaagtcctcgattcgaatggcgtcgca

SEQ ID NO: 12437 - DNA, 488 bp, Glycine max
  Clone ID: jC-gmle01810062d11d1
aaagtccatgtttaattattatgtaactgttttgagatagaaacaccaaaataaataaactaccgaccattggacgaggtaacactttccttaaaaatcatattagcaactgcaggaacccacattgagctaactggtattgtagcactggaagtggaaggtttctttgtagtagttgtagttgtagcagaggtggcagcattttgattttgaccatcaagatattgagtttcagtttctattgcagttaccttgttgttcctcctcactttctttccaactgatatgcctagtttgagagcagtgaatagaccaattgcaattagaacaggcctaattgcccagtgatgatcctctacatgttggtacttctctatcattccaggacatgtcttgaactcaaccacttccacctcggagggatcagccaagtaggtgcttggttcatttccgaaagggagcattcctgggaacttgacaaccaagca

SEQ ID NO: 12438 - DNA, 495 bp, Glycine max
  Clone ID: jC-gmle01810062d12a1
gtaatagtaatatacataagttttataaccaatggaagcgcgtgcaggagccaatcagcgtattgcaagaatctctgctcatcttcagcctccaaatttccaggaagggagtgatgttcttcttaagagtgctgagtgcagagcaaagggtggggcacctggattcaagttgcaatattggaggctgctgtgggaattggtcacaccccttactttgctgatgaagatgaacccattggtttcagttcttcatctttatgatgttgtcaacacccctggtgtcactgctgatgttagccacatggacactggtgctgaggttcgtggctttctggggcagcaccaccttgaaagtgcactcactggcttggacttggtaatcatacctgtgggggtcccaaggaaacctgggatgacaagagatgatttatttaaaataaatgctggaattgtgaggaccctttgtgaaggaattgccaagagctgccccaatgc

SEQ ID NO: 12439 - DNA, 531 bp, Glycine max
  Clone ID: jC-gmle01810062d12d1
agtacaaaaggctgatattttagtatctttctgagattattaagcagttccactgatgtcaaatccgttatcatcagcaattacggatgacaccaaaaatttagagtactattcttaagaagaagaaaaaaatctatgaacaaagagaagcattacacatggtccttatatataagagacaaaaactagtttttccttatcacatttattttctgatgaactctacacccttctggatgcttcctgctaactctctctttgccttttccaatccaatcctttcatactcattcaggggacccagttgataaacctcttctgctccagcacgacctagacgtaccttggttgcaaagaagggaagttccgtaacctgagaatcaacaaaagcacactccactaccccagcttctccttttaagccacggaggcatgcaccagcaaacttggcagctgcatatgccattgatagtgttgcagaacctgtcccagcttttgcctcaacaacttcagttccaccattttggatgc

SEQ ID NO: 12440 - DNA, 523 bp, Glycine max
  Clone ID: jC-gmle01810062e01a1
ttatcaacagaaaaggggcaaaggccaaggttgttgctgcttagtggttggttaactctgtaaacccaaatgctattgattccaccatttccattcaccacccaaatgctcttcacagtttcccaatttctctcttcaactttctcaggaacaggtattcgaagaaagaattctgggtgaattgaaagtttggatcttttaagcctttaaatttcctctatacatttacctacatatcccaactttgaagtttggatacagtaataatcaaaatggccacttgtgtgtcaacaatttttgcaccatctaatactagaaattccgcaagggtgctttctgttggaggaacaaatctcacttggaattatcctgggagagcttgttttacgaaaatgtatgaccgcaggaatgggttttctggtggcatccagatgtcgggtttacttcaagttaagtgttcagccaattcgcacagtgtaagtccatataataatagccaaggtccttttctagatttacatgc

SEQ ID NO: 12441 - DNA, 573 bp, Glycine max
  unsure at all n locations
  Clone ID: jC-gmle01810062e02a1
cgatatcacagactatatccgcgtacgtagctcgaatctcgctcgagcacctttgttcactcttcttctcttgcggctagggttttagcgcagcttcttctagatttaaggaagatgggtaaggaaaaggttcacatcagtattgtggtcattggccatgtcgactctgggaaatccactaccactggtcacctgatttacaagcttggaggcattgacaagcgtgttattgagaggtttgagaaggaagctgctgagatgaacaagaggtctttcaagtatgcctgggtgctggacaaacttaaggctgagcgtgaaagaggaatcaccattgatattgctttgtggaagtttgaaacaacaaagtattattgcacagttattgatgcgcctggacatagggatttcattaagaatatgattactgggacatcccaagctgactgtgctgntcttatcattgattcgaccactggtggttttgaagctggtatntccaaggatggacagactcgtgacatgctctgctttattcacccttggtgtaaacagatgattgctgctgaacaaaat

SEQ ID NO: 12442 - DNA, 330 bp, Glycine max
  Clone ID: jC-gmle01810062e02d1
ggacccccccaaaaaaaaagggggcctttaaaaaaccaaagccaccccccccgggaaaggcctgaaacccgctgggctaaaaaaaaaaggaaaaggggggtccccccaccccccccctttaaaaccccaattaataaaagcctttttgcccccggggaaaaaaaacccaatttggggaacaaaaggggggaaaaggggggggggacctaaaactttggccgaaaaacaagctccctcaaaaagaaaccccccgggtcccaaaaaaaaccccccctttttggtgaccaacccccccgggagaacccgcccggccgaatcattttttttttg

SEQ ID NO: 12443 - DNA, 493 bp, Glycine max
  Clone ID: jC-gmle01810062e03a1
ttttgaagcacagcgtggaacatataagatacttaaggttgagcctttcaattcagtgcggaagaagatgtctgtgctagtcggtcttcctgatggaagtgtccaagctttctgcaaaggtgcattagaaattagtattaaaatttgtgtaacaaagttattgatccaaatggaacagctgttgatctttctgatgaggaggcaaagaaagtctctgatattataaatggatttgcctctgaagctttgagaactctttgtttagctgtcaaagatgtaaatgaaacccaaggagaagccagtatccctgaagatagctattctctgatagccattgtgggaatcaaggatcctgtgcgccctggggttagggaagctgttaaaacttgtttagctgctggaataactgtccgcatggtaaccggtgataacataaatacagcttatgctatagctagagaatgtggcattcttacagaagatggtgtggcca

SEQ ID NO: 12444 - DNA, 493 bp, Glycine max
  Clone ID: jC-gmle01810062e03d1
gggagaaaatttcttaaaaacgaagccaaaagacaagatttgtagtatgccacagaggccaaaatttcagccacatttgcactaaagaaaatcttagaagggaaaagttatgtttttccttcccgtattttatgccagctcgggaccagaaggtagcgcctcgtaaccatcatggggcgttgtagcatctcctctttcaactgggatgcacttgagtatagcagatataggcatgctaaatgctccgattacgacactgagcacccagaattgccagcttagaggcactgtactggcaaatgttcccaggaactcaactatgagtacttggaacaccactgtggagaagatcaccgtaaaaaatatccagctctcaaacatgcctttgaatatgtttatcttttcgatttctcggctgtttatctcattgaaaacctggcaaaatacaaggagttgaatataaagtgttgagcactatagttgcatctggacg

SEQ ID NO: 12445 - DNA, 577 bp, Glycine max
  unsure at all n locations
  Clone ID: jC-gmle01810062e04a1
gcaaaggctaaagtagattctattctcctcaagcaaaacctatagctcccccacactcctccagtacttgaataaaagctaaataaatattaaagcctttccttcatcaaggtactgtttgatctttgaatttcagtcctcaaagattggaacaacaggaacatgtgtactctcacaattgttcctgtgctcccttctaagcttaacaagccttcgctttctccgcaccacaattctctttttccctactgtggaagacgggtcgggaagaagaacaaagcaatggttcctgttgcaaggttgttcgggccagccatatttgaagcctcaaaactgaaggttttgttcttaggagtggacgaaaataaacacccaggaaatctcccaaggacttatacgctaacccatagtgatataaccgctaagctcaccttggcaatctctcaaaccatanataattctcagctgcaggggtggtacaacagatttcaagggacgaagtgtggcacagtggaaaaaggtgaaaggaggatgtctctgcacgttcactgcccattagtggaggcattttctcttg

SEQ ID NO: 12446 - DNA, 466 bp, Glycine max
  Clone ID: jC-gmle01810062e04d1
aacaaagaaagtaaagaaaaatatataaaaaaaaaaaaattgcaaatacgagcttccttatttacattgaaatgggtttcgaatatttaatttgtatacagggaatttgccaatttggcagcatccccgtaactgtgaattgtagtagtttggctgtttatagattttgttgggtcccaatcccatcacaaggttcgtaatggcggctgggaacttgtttagaccactgaatagggctcaacgtaagcggtggaaagcaacattggcattcttcttggcatggctgtggaattgccaacccctcctcctggaccccacctgtgggtgctgacgcttccttcagtgggccccaacattccaccttgttgaattctggaatgtttgagtgaaagtagacccaaaccaaggcatcttgcaattctgggtagctgttgaataaggttttcatcgccgtgaacgacgggct

SEQ ID NO: 12447 - DNA, 532 bp, Glycine max
  Clone ID: jC-gmle01810062e05a1
caggatttggcttctgctgagaaatcaataagggagacaatggaaagcaaacaagttctgcaggggagtctggaatggctcaagaatgtttttggctcggaggttgagttgccatggagtaggattcgggaacttgttttggaagatgaatcagatctttgggatgaaatttttgaggatgcttttgttggcaggatgaaagcaatcattgacttgagatttagggagctaacaggtgctgttgatgtggtgaactcaatttctgctataggtgacttgtgtaccaagctagatgatgttcaggggtatttgaacagaccttctacggctggtggtgtttggtttctagaatcaaatgccaaaaaaactggagttgcttctgggtttaaagtccagcctgaagagagcgaatttcagtattgtcttaatgcctattttggtcctgaagtaagtcgaatcaaggatgcagttgatgtttcttttcagagcatccttgaggatctattaagtttcttagaatcttcaaaggctt

SEQ ID NO: 12448 - DNA, 324 bp, Glycine max
  Clone ID: jC-gmle01810062e05d1
aaaaagaaaaaaattgccgcttttttttgggaattcaattctttgaataagttttttaaaaaaccgggttcctttgttttccgaactttaaaaaaaaaatctccccagaaaatttggttggatttgggccccttttgccctccccccaaatttttaaacccccccttacagtgcccccgaattttagccgctttcaactggcattagcaagatcctttttccttgccccaaatgacccccgaacttgaatctgccctcacccctttttttgctcatcaggctgttgcccagtttcctcaagcttacaattggggcctttatttt

SEQ ID NO: 12449 - DNA, 513 bp, Glycine max
  unsure at all n locations
  Clone ID: jC-gmle01810062e06a1
cgaacgcttggggtttggaaaagggttttacattttattcgttctccggtgagaaacagaaacacacagaagacagagtgagacgcttctcacgatggagggaggagtatcctacgcgcgcatgcctcgggtcaaaattcgcgagctgaaggacgactacgccaagttcgagctccgcgacaccgacgcgagcatcgccaacgcgctgcggcgcgtgatgatcgcggaggtgccgacggtcgccatcgacctcgtggagatcgaggtcaactcctcggtgctcaatgacgagtttatcgctcacaggctgggcctcatccccctcactagcgagcgcgccatgtccatgcgcttctcacgtgactgcgacgcgtgcgacggtgacggacagtgcgaagtttgctccgtcgagtttcatcttagggttaagtgcatgactgatcagaccctcgatgttacgagcaaggacctctacagntctgaccctactgtcagtcccgttgatttctctga

SEQ ID NO: 12450 - DNA, 478 bp, Glycine max
  Clone ID: jC-gmle01810062e06d1
caaatggtaatcacagtaattactaattagcatccttggctcaacaagttaatacgttctgcaggtattcagttaaagacaagtaagaaacaagttccgggaaacaagttgtgggaaacaagtctgatatccttctaacaaattaatcaacctcctcgcatatgtgcaccaagctcgccaaactgatcatcagcctccactgtatcttcagatagcctcacagcatccagcttctgcttgagaatttctatggcatttagaaccaattgagaagctttaaccgctccagtagactccacagtgaatatgaagctatcctgcctcgcaatgatttctacaagcccaggcttgcccatagcttctgctttcttaagcacctcatcatatatgtgtatgcctcagcatcaaccaccatcacttgttgtgtcactggatcaatttaaagaacgggttggactactgtcaacccattctcttt

SEQ ID NO: 12451 - DNA, 527 bp, Glycine max
  unsure at all n locations
  Clone ID: jC-gmle01810062e07a1
gtctgaggactatattaagaggcagcagttgcgtgaattggcgatgctgaattcaaatttcagagaagagagtcctggaccaagtggaagtgtatctccattcaactccagtggaatgaaacgagctaaaactggccgatgaaaggtttccttgttacttgtagatgagtgttattgttttggagctatctcaatcaaagcatctatgaaagaataggctaacaattattgctggctagtattctggtggttttaaatcctctccctttattttacatttttcttctaaaacaactggagtcaaagctagaaagatttttagagagaaaaaaaatgataatataattgggtattgagaataggtgtgttcaaatgagtctttttcttgcacacttcatacatttattattgaatttattcttgcatctgtaacttgtgagaagcatgagatatatgttatgggtgaagttttaggtcttgagtggaatcaaatttgtgggcatgtgacantgccggtctcatcagta

SEQ ID NO: 12452 - DNA, 374 bp, Glycine max
  Clone ID: jC-gmle01810062e07d1
ctgggacatgacatgtatcgttcaataactgtaacacagtgaataaaatacaaatgtttgagacaaacaactaaaaaaaattcaacctatactataactaatctttgaatactgatgagacccggaatgtcacatgcccacaaaatttgatccactcaagacctaaaacttcacccataacatatatctcatgcttctcacaagttacagatgcaagaataaattcaataataaatgtatgaagtgtgcaagaaaaagactcatttgaacacacctattctcaatacccaatcatattatcattgtctttctctctaaaaacctttctagctttgactccagtcgttttataagaaaaatgtgaaataaaggga

SEQ ID NO: 12453 - DNA, 510 bp, Glycine max
  Clone ID: jC-gmle01810062e08a1
ggcaatcattgcgctctgataatatcaggatgtttgtattggatgaggcagatgagatgctctctcgaggtttcaaggatcagatctatgatatttttcagctgctgccacctaagatccaggttggggttttctctgccacaatgcctcctgaagccttgaaatcacaaggaagtttatgaacaaacctgtgaggattctagtaaaacgtgatgagcttaccttggaggggatcaagcaattttttgtcaatgtagacaaggaggactggaagctcgagacactatgtgatctttatgaaactttggcaatcacccagagtgttatctttgtgaacaccagacgcaaggtagattggctgacagacaaaatgcggagtcgtgatcacacagtttcagccactcatggagatatggaccaaaacacatgggatatcatcatgcgggaattccgttctgggtccttccgtgttcttattaccacagatcttttggcccgtggtattgatgt

SEQ ID NO: 12454 - DNA, 565 bp, Glycine max
  unsure at all n locations
  Clone ID: jC-gmle01810062e08d1
gataatgaaaataaatccagtatatttccaacgtaacgttaaacaagtttcaaatttacagaaccaccttacggatattaaaacaaaacacagagaaagagaaagcagcactctacaatctttagtaataagacaaacaagcaagccagcaacaaaattgcaacaacgcattctgctagacccaaaattagagagaagaatggcaaattcaaatcaccggtttggggttaagttcaagtcttgctagagaaaggccctgggccgtgaaaaataaaataatgacagcggccttcataacaaaaagcataccagtgatgggaagaccaaatcaaatgagatcggctacattggctggcagctcctcaatctgcacattataaaactttaggatgtgaaacagcatggtttcatcatccccagtcacaaaattgatagcaacaccctttctgccnaaccgtccactacgaccaattcgatggagatagttttctggctgagatggcagatcataatgtataacacgtgagacttggtggacatcaataccacgggccaaaagatctgt

SEQ ID NO: 12455 - DNA, 527 bp, Glycine max
  Clone ID: jC-gmle01810062e09a1
cgccctctcccctttgagtgcactgcttgtccgtcgaccttgccattccccttctgggctcaccaccaccaacctcgtctcgacacatcctccctactttcatatcgacttgacgtggtcgctggctaccatcatgcagttcaagtcctccatccttctcatgggcctggccgctgcaggcctcgcctcggctgcccccgccgttgccgacgctgccgcacctgcagtcgagcgatccgagcccgttgctaccaccaacaacgttcagcgcgacaccaccgacgccgctccttcggctgactacggcatcggccctcccatggaccagtggagctacaagcgtgatggccagcccgccggtgactttggtgttggccgtgccgacaggtggagctataagaagcgccagggcgagcccgctggcgactttggtgttggccgcgctgacaggtggagctacaagcgcgacggcgagcctgctggcgactttggtgttggccgcgctgacaggtggagctacaagcgcg

SEQ ID NO: 12456 - DNA, 396 bp, Glycine max
  unsure at all n locations
  Clone ID: jC-gmle01810062e09d1
agggggggcccaacgattgtatgcatgccctcgacccgactggaaagttcgatagggggggaagaccaaaaggagtgtgggggaagaaccgacaagcaagcccccaagcggaaaaaatgcccctggcggggcacaaccttgttttggggcaccggccccgttcggtcaagggtgaataaacccccccaggagcgggagactcgacaatgcactagcgcaatgctactttcacatggccaaatgcaggtcgagaagccctcatcggaggggcgtctatgagggggngtagttgctaaagtgaaagcaccaggttctgatttttgcaggacgaaggactttttactgggacttggagatctccgccttgcgctttcaagtccactgacggttgggggg

SEQ ID NO: 12457 - DNA, 503 bp, Glycine max
  unsure at all n locations
  Clone ID: jC-gmle01810062e10a1
cctcattcccgtagtagacatattctaggctctttgccattcatggtgttgatgtcaccataatcaccaccacagccactgccgccattttccaaagctctatcgatcgcgaccgtgaccgcggccacgctattagaacccacgttgtcaagttcccatgtgaacaagttgggttgccagaaggagtagagagcttcaactccaacactcctcgggatttggtccacaaaatctaccagggactcaccattctccaagaccaataccaacaactcttccatgacttgcagcctgatttcttgttcaccgacatgttctacccctggactgtggatgctgctgctaagttgggaattccacggctcatttatgttggtggaggttaccttgctcactcttctcagaacacaattgaacaattcttacctcacaccaaggtactggtggattacatgacangcaagaggatattctcatattctattctttttcatatttgacag

SEQ ID NO: 12458 - DNA, 390 bp, Glycine max
  Clone ID: jC-gmle01810062e10d1
aaaacaaagatttacctaattatggggaccctaataacatgattacagaaagaagggtccagttgcaaaatctttcaaatcattggatcacacttcttttatttaaccaaaaacatccaaacccttagaatttttttatttcataagggggacaattactagggaacaatacttttatttttcacactttttttgaaggggggatgtcacttatttaaaatcacagggctttgtcctgaattgattgcaattatccccaagagtgggcctaacttttgggggtggccttttgcagtttgagggacttcaactcctggatcagttttttaaattggggggagaagaccctccaacctgaatagcttttttagcagcatcactaagggcttt

SEQ ID NO: 12459 - DNA, 505 bp, Glycine max
  Clone ID: jC-gmle01810062e11a1
cttcaccaatttccccaggaagttgtgggatctcagctggaacgattgttgcaattgtggttccaattacggtcgctgtgcttatatttatagtcggaatttgtttcttgagtagaagagcaaggaagaagcagcagggttctgtaaaggaaggaaaaactgcgtatgacatccccaccgtggactccttgcaattcgatttcagcacaattgaagcggccacaaacaagttctctgccgataacaagttgggggaaggtggatttggtgaggtttacaagggcactctttcaagtggacaagtagtagctgtcaagagactctccaaaagctctggacaaggtggagaagaatttaagaatgaagtggtggtggttgccaagcttcaacatagaaatttagtcaggcttcttgggttttgcttgcaaggagaagagaagatacttggttatgaatatgtgcccaacaaaagtctcgactatattctctttgatccctgaaagca

SEQ ID NO: 12460 - DNA, 585 bp, Glycine max
  unsure at all n locations
  Clone ID: jC-gmle01810062e11d1
gcataatacatatattttatttagttgaaaaataagcaactataatacaaagtgttccaaggtttcgtcatttaaaactaggagaaataagtacatggataataatacatattagaacctccaagcgatcaagcttatcgaggatccatttcgctaatcgacatgtcattcacagacattggtattgattgatcgaatggcagctcctttggcatgtttggatcagttccactgtggacgaaaaatgcaggctgcgtaggagttggtagagtaacagtgttactgtctagcataagaactattgttgccattgtgggtctgtcagctggatcttcttggacacacaacaaaccaatatggatgcttctgatgacttcattctgattataggattctcttaatatggggtccatcagttccaaaggtgttccatccttccaaagttgccaagcatagctcaatagatcctcagcaccatccgtttgatagaaagagctattcttcttgccacttaaaatctccatgagcaggacntccaaactgtacacgtcagacttaacagagaactctncatgcatggcatac

SEQ ID NO: 12461 - DNA, 458 bp, Glycine max
  Clone ID: jC-gmle01810062e12a1
ggctcgagcggctcgagcagaaatttatgagaagacaactggttttgcttgttcaggttttatcatctttccctgttgtctttgcccccaccaaacaagagagaaatggaagcagcatgggccacaagtttgactctgatactgatactcgctctgatgtgtccatggcatgcgctgacctggttatggttgaggccaaagagactagaaaagctgctaagagagcaaggccttcaagggaatccatacacactttttggtggagactccaaggagtttctgaagatgagaaaggaagccttatccaaacccatgaatctctctgatgacataataccacgtgtttcttcctatgaacaacatagtgtcaacaaacatggtaagaattcttttatctggttaggaccaataccaagagtgaccatcttagattccgagcaaataaagatgtatttaac

SEQ ID NO: 12462 - DNA, 399 bp, Glycine max
  Clone ID: jC-gmle01810062e12d1
aggaagaaaacacatttatttttttggctattcaattacaaagttacaattcaacaaaagattttaacccccaaacctgtaaatgaaagtaattaaacatatgacaggatctaagaagggatcattttggtaataaagtataagctttaccggagttgggtgctataatcacacaataagaggctactattttatttcatattgggactttacgtaaaatgatatgagccccatactgggggtgaatagtaatcaacgcagttggagcatgagcatatgctggagaaagttcaaatgaaaaatgctggaaaatcattgacaaagccatttttgctttcaataaggaaaagttttgtccaatgcatattctaggaccccatccaaatggaaaaaatgaaa

SEQ ID NO: 12463 - DNA, 493 bp, Glycine max
  unsure at all n locations
  Clone ID: jC-gmle01810062f01a1
gcgtactgttgtgagcatccccaacggtccctctgctctggcagttaaggaagcagcctggggtctggctcgctatgctgcaattgctcaggacaatgggttggtcccaattgtggagccagagatcttgcttgatggggagcatggtattgatagaacttttgaagtagcccaaaaggtctgggcagaggttttcttctaccttgctgagaacaatgtcctttttgagggtattctccttaagcctagcatggttacacctggagccgagtccaaggacaaggccagtcctcagacagttgctgattacaccctcaagctccttcacaggagaattccccctgctgtccctggaattatgtntttgtctggtggacagtctgaggttgaagctaccctcaatttgaatgccatgaaccaatctccaaacccgtggcacgtgtcattctcgtatgccagagcccttcaaaacactgccttgaagacatgggga

SEQ ID NO: 12464 - DNA, 453 bp, Glycine max
  Clone ID: jC-gmle01810062f02a1
cgtaataacaataaataatcataatagtggcacactaattcaccactttccacacccaactgcgtaaagctcaaagctttttgacagtttgagcatttcagacaaacatgggggatgatggaaagaagattagtggagagggggggttagtgaaggttgagccaaaactcctgcaatggtttcacctcaaaagtggttgatttgttggagaaattggtggtgaagttcttgtatgattcttcactgccccatcactacctcactggtaattttgctcccgtgagtgagaccccttcaaccatggacctttctgtcaaagggtacctttcggattgcttgaatggggagtttgtcatagttggtgcttatccgaaatttgctccctgtagctggatatcactggtttgatggagatggtatgattcatggcttgcgcatcaaagatggaaaagc

SEQ ID NO: 12465 - DNA, 525 bp, Glycine max
  unsure at all n locations
  Clone ID: jC-gmle01810062f02d1
aaaaacaaaaataatatttaatcattattgattcaatcactgttattcaaccaatacctccattgactcaactaccaatccggttttaaaaacattggtttaatgagatactggatatatatggtacaatcgattatttgttgtatacaaagactgaggcaggacggtacagtgaggctgccaaaattatcacagtttaccctgctcttgcagttgttcctctgtcacaaagaaggcatggaaaccatatggaactctatgcggcaattcgacaactgcaacaggatctgctgacattgtttttgcattgatgacatgcacaaatgattttccggtattttcatcgtgtacaaaacaaatcaagtatccatcatcttcttcagaatcggtaccagggacacgagggacataaacagcttccgagccatacnttcctggtcccaagtcatagagaccctgaacatttcctnctacttaagttttggttttccattatncggntcagcatgcaaatcaaatttaata

SEQ ID NO: 12466 - DNA, 453 bp, Glycine max
  Clone ID: jC-gmle01810062f03a1
ggcggctctcagaaaagccgtgttctttgtaatcgctcaatgcttcaccttttccgcatatgctgcaaggtttgaaatcacaaaccgatgcacatacactgtctgggctgcgtctgtgcctgttggcggtggcgtgcaattaaacccgggccagtcatggtccgtggacgtgcctgcaggaacgaaaggggcccgcgtttgggcccgaaccggctgcaacttcgacggttcgggccgcggtggatgccagaccggtgactgcgggggtgtcctcgactgcaaagcttacggtgcgcctcccaacaccctggctgaatacggcctgaacgggttcaacaatttggacttcttcgacatctccctcgtcgacggttttaacgtgcccatggactttagtccaacctcgaatggatgcacacgtggcataagctgcactgcggacattaacggaca

SEQ ID NO: 12467 - DNA, 363 bp, Glycine max
  Clone ID: jC-gmle01810062f03d1
agacgaggaggggcacgcaaagtgcacacgccttatgtaattttattgatctttattttagggcatatattatatattatgtaagggtattgggttcaaggacaaaagacaaccctatagtcagtcccaccattacaagtgaaggggctagttggatcatccttggggtaactataagcatcggggcacctttgcttgaagaatctggaataatcagtgggcccacagctaccggaattgcaacagtactggtcggttttgaagacagtgcaaggggttgttgcaacctccttgagtctttagctcactagggcactgtccgttaatgttcgcagtgcagcttatgcacgtgtgcatccattc

SEQ ID NO: 12468 - DNA, 565 bp, Glycine max
  unsure at all n locations
  Clone ID: jC-gmle01810062f04a1
attccccttatctttctctcttctctctccccgcccaaaccctaactccctaccctattccgctttctctcatccatcatgaaaggaggaaagtccaagaccgaatctaagagagccgatgccaaacttgctgtgaataagaagggcgccgccaccaagactaggaaacccgccggaaaggggaaggcagcgaaagatcctaacaagccaaagaggcctccaagtgctttcttcgttttcatggaggaattcaggaaggtgttcaacaaggaacatcccgacaacaaagcagtgtctgctgtgggcaaagctgctggagcaaaatggaagacgatgtctgatgctgaaaaagcaccttatgtggcaaagtctgagaaaaggaaagtggagtacgagaagaacatgagagcttataacatgatacaggcggaaggtcctactggtggngatgaagaggaatctgagatgtcttgatctgaggtgaatgatgaggatgatgacgaggaatgcagtggcgaggaggatgatgacgattagagaatggactgatgataatagcatttat

SEQ ID NO: 12469 - DNA, 490 bp, Glycine max
  unsure at all n locations
  Clone ID: jC-gmle01810062f04d1
acagcagaaaggggatgataagtcaattatattgatacaaacttaaccagatttcaacaagaaaactctaaatcaaactaaaagctctacaagagataaccatcccttaactaaacagttggatttagaaatacaaataaagagaactcccttctttaaactattcacgttttggaaagacgagcaatttacggaaggaggagcagggaaatattttttggaaagagaaatatgtttataaggaaatgaccagaccacctacacggatgatcaaaatcatcagaacctacataaatgctattatcatcagtccattctctaatcgtcatcctcctcctcgccactgccttcctcgtcatcatcctcatcattcacctcagatacagacttctcagattcttcttcatccccaccagtaggaccttccgcctgtgtcttggtataagctctcatgttcntctcgtactccactttccttttctcagacttt

SEQ ID NO: 12470 - DNA, 211 bp, Glycine max
  Clone ID: jC-gmle01810062f05a1
tgaaaatgcggaatcctctgcatgatctggaatttgtgttttctttcgtttgttcgtttgtttaattcaataaaggaaattagacagagcatactcaacaagagggctctatatgatgttcctcttgacatatgttccgagtccaaatcgattttgtcagttgatgacctcattgcttcgattgctgatcagtgctattgagtctattgga

SEQ ID NO: 12471 - DNA, 348 bp, Glycine max
  Clone ID: jC-gmle01810062f05d1
aaaaagaacccacacttcacacattattaccacaattaaaagagggggggaaattttcaaatagacagagcattctcaacaagaggggcatggcaaattttctttcgttgggacaacgaattcctacttaccaacggaaaccataaaacgcttttcgctgactttcatagctccgaagtagagctacgcgccaaaataaagttagcaaaaccttaagtctatcggcttgatctaaggcctcagacatcagtaggcacgagctgttatatcaaaaaaggcaatgctccctacatatgaacccgagctaagttaagaggtctgacctcaacacctaatactgattgatag

SEQ ID NO: 12472 - DNA, 529 bp, Glycine max
  unsure at all n locations
  Clone ID: jC-gmle01810062f06a1
gttaacaagaatttccaagctgatgtgaaagcgatccgacgtcatattaacaaaaataccatcttgattgttggatctgctccagggtttcctcatggagtaattgaccccattgaaataatttggcaatttcttccgtaggaacttggtcatctggcatcaagctttggtatttgtttccatgtggacctttgccttggtggctttgtattaccatttgctcgtgagcttgggtaccacattccaccttttgatttttctgttaaaggggtttcttcaatatcagtggatgtacataaatacggtttagctcccaaaggaactagcgtagttctttacagaaaccatgaaatcagaaagcatcaatttgttgctgttaccgagtggtctggtgggctgtatgtatctccaaccatagctggaagcaagcctggaagtcttattgccggtgcatgggcagcgatgatatctctagggaaagaaagttactngaaaaatacaaaagaaattatggaagggtcaagaagaa

SEQ ID NO: 12473 - DNA, 338 bp, Glycine max
  Clone ID: jC-gmle01810062f06d1
gggccaaaaaaacccacggacattatttttgggttgggggggctcaaaaaaatttctcgcccctacggacgaagcaagactggaaaatctgcacaggccccccccccccccatatgcgaaaaaattcccccagtctgaaaaaaaaaaaacgcggccttttaaacgtcaccgggggccacccaaacaaaagaaagtcccaatataatatcaaaaactttcccccccttgggaaagaccctcacgaaactcgagtgccctgaagttagaggcgcccactcagaacttcacattaaaaaacctttattaagaccacacacccctattgggaagacccactt

SEQ ID NO: 12474 - DNA, 358 bp, Glycine max
  Clone ID: jC-gmle01810062f07a1
ggttgctgtaggagataagatattgaagtagtgctaagtgcctaacacctgcagtgaacaatggcctctgcatcagcatctcttctcaagtcttcacttgttcttgacaagtctgagtgggtgaagggacaaacacttcgccaaccttctgctgcatcagttgtgagatgcaaccccaccaccccatcaggcctcaccatcagagctggttcctatgctgatgagctcgttaagaccgcgaaaacagtggcttcaccagggaggggtattttggccatggatgagtccaatgctacctgtgggaagcgtttggcttcaattgggctagagaacactgaagctaaccgtcaggcatacc

SEQ ID NO: 12475 - DNA, 395 bp, Glycine max
  Clone ID: jC-gmle01810062f07d1
gattgccgagattcaaccatgtttgttatatattgggacataatcaatcaagtccaccactcacagcaaaaggtttataacctgtcaaggtacatgtaaccataaacaaaaatagtctccaagactataaaaacattacattttagacaaattagacttcttccactttatcctccgacaacacctactataactgctggtgttgatgctgcctaacatgtatcatattcactacatacatcttagtaggagtagcctttgacgaacaactccttcttggcttcctgggattcaccctcacacggtgtactttccaagctgtgcgagcgagttggacttggcacggaaaaggagtgcatattgtgccgcttaacataatgtgggcggcctcccca

SEQ ID NO: 12476 - DNA, 551 bp, Glycine max
  Clone ID: jC-gmle01810062f08a1
tggaccccctctctctcttctgtaccggagccctcctcgccggcggcctctactggttcgtgtgcgttctgggccccgccgagcagaagggcaaacgcgccaccgatctttccggcggctccatctccgccgagaaagtccaagacaactacaaacagtactggtccttcttccgccgcccaaaggagatcgagaccgccgacaaagtccccgacttcgtcgacaccttctacaatctagtcacagacatctacgagtgggggtggggccagtccttccacttctccccctccatccccggcaagtcccaccgcgacgccacgcgcctccacgaggagatggccgtcgatctcatcgaggccaagcccggcaacagaatcctggatgtgggctgtggcgtgggcggtcccatgcgggccatcgcggcccactcgcgggccaacgtagtcggcatcaccatcaacgagtaccaggtcaaccgcgcaaggatgcacaacaagaatgcagggttggagtccctctgcgaggtcgtgtgccggaattttctcaag

SEQ ID NO: 12477 - DNA, 361 bp, Glycine max
  Clone ID: jC-gmle01810062f08d1
aacatagcaaaattaaaaataaaattgaaaagatcaaaatccaaattacaccaagttcatagtaataataataactaataacaataagttaaacccaagataataataattatgaaaaaaaaaaaagagagtaccggaaagaaacaaggtggggggtgttatagttttggaatttcccaatgaaacgctcagttatggacgaccttgtcatggggctttctgcagaggatcatgtgcatcggcgagaaaatgccagagtcaccccctctggtcaaatagtcagaggtcttgaagagcatgtcatgaacatcgacggtccccttgggcgcgatttccaaagcggcgagaacagtgaccacaa

SEQ ID NO: 12478 - DNA, 499 bp, Glycine max
  Clone ID: jC-gmle01810062f09a1
ttcactcacaaataatattccattctccattttccaggaatatgcatttcttgctctgtgctctttcctttactttatactatttatttcatgtctccctcctcccaaacacacggttttcataggaactaggaagtaaaatcaatccacaagatcagaaaaaacaggaaattggttttaattattttcctcactgaaatgagtagtagtaagaaaaggttcattcctattaatctggaagatgctgcagtggacttgttaaaccatgtggtgaagttgaaggagaagggatggattccactcttcattccactcattttgattgcttgggctattcacagatggctcttctctttctccaattggcttccccttgtacttgctctatgggcatctatgcaatatggaaattatcagcgcaaactacttgaagaagagttgaataagaaatggaaacggatcctactcaacaccttgcccatgacaccattagaacact

SEQ ID NO: 12479 - DNA, 429 bp, Glycine max
  unsure at all n locations
  Clone ID: jC-gmle01810062f09d1
gaaacataaactcgttgcaatttattgatcaattaaacatataccgttgctatgtgaggggcaactacacaagaattcttggataaaataaaaaaagtctgtacgttatgattcccattcccatgagcaatattttgcatgggaaagtcaaagtatcaactacggataacgttaggtagatgatgctcatgagggtcaaattccactttgagaaggactactactagcgcgggaagaagaattgatgatctcccgacccagttcatttattttgctgagtagaagcatttgctctgtctcaactgtgttatatacccttcctgtgtatcctctagactttctaactcactcaaagttgntgntaatccttcaagattttcatcctctattaatgatcgaaactttttcatcatctctctcatctgggta

SEQ ID NO: 12480 - DNA, 458 bp, Glycine max
  Clone ID: jC-gmle01810062f10a1
ttcactcacaaataatattccattctccattttccaggaatatgcatttcttgctctgtgctctttcctttactttatactatttatttcatgtctccctcctcccaaacacacggttttcataggaactaggaagtaaaaatcaatccacaagatcagaaaaaacaggaaattggttttaattattttcctcactgaaatgagtagtagtaagaaaaggttcattcctattaatctggaagatgctgcagtggacttgttaaaccatgtggtgaagttgaaggagaagggatggattccactcttcattccactcattttgattgcttgggctattcacagatggctcttctctttctccaattggctttcccttgtacttgctctatgggcatctatgcaatatggaaattatcagcgcaaactacttgaggaagagttgaataagaaatggaacg

SEQ ID NO: 12481 - DNA, 449 bp, Glycine max
  unsure at all n locations
  Clone ID: jC-gmle01810062f10d1
gaaacataaactcgttgcaatttattgatcaattaaacatataccgttgctatgtgaggggcaactacacaagaattcttggataaaataaaaaaagtctgtacgttatgattcccattcccatgagcaatattttgcatgggaaagtcaaagtatcaactacggataacgttaggtagatgatgctcatgagggtcaaattccactttgagaaggactactactagcgcgggaagaagaattgatgatctcccgacccagttcatttattttgctgagtagaagcatttgctctgtctcaactgtgttatatacccttcctgtgtatcctctagactttctaactcatcaaagttgntgttaatccttcaagattttcatcctctattaatgatcgaaactttttcatcatctctctcatctgggtaggaatttggtgtgatttactt

SEQ ID NO: 12482 - DNA, 533 bp, Glycine max
  Clone ID: jC-gmle01810062f11a1
agaaaaaccacagccaaaagttttgtggagcaaaaacaatgggcagctagtgcttccaaatagggtcactgttctctgcaatggtgttgaaggcatatattttccaagccttcatttagttgtgtgcaagtgtgggttttgcaggacagaaaagcaagcacttagtgaatgggaacgacacacaggttccaaattaagaaattggagaacaagtattagggtgaaagattctatgctacctctggaacaatggatgctgcagttggcagaatttcatgctactgctcaggttcccaccaaacctaagaaaccttctctgaaagaaagaaagcataagttgcttaccttcttgcaagagaagtatgaacctgttcatgctaagtggactacagaacgctgtgctgtttgtagatgggttgaagactgggactacaacaaaattatcatttgcaacagatgtcaaatagcagttcatcaagaatgctatggagcaagaaatgtccgagattttacatcttgggtttgtaaagctt

SEQ ID NO: 12483 - DNA, 632 bp, Glycine max
  unsure at all n locations
  Clone ID: jC-gmle01810062f11d1
cccgcagtcagattattccggtcgacagctcacagtccgcgccgccctttttttttttttttttttttttttttcttttttttatttatttttttttttttttttttttttgggttggttttttttttctctcattttatatgttaatccactttgttacgcaagcatgataaaatttacactaacaaacaaccaaaggcccaaaaacaaaagcncctacacaagatgggcagcactgacacccacggaggggaaacacacccaagacaaaaaaagacggacacaacgaccgcaacggaccccacaagagcaaagacaccgggcaccaaaaaaaaaaaaaaaaaaaaaaacgggcgggagaaacaaaaaaaaaaaggcccaggacacaaaaaacccctacctggatcaaagcaaaaaccaaaccacagcccccaaaaaaaaaaagaggggacaaaaaaaaaaggcccccaaccccgtggggcaagcccagaaccacaaccaagcgggagaaaaaaaaaaaaaaaacgggggccgtacaaaagaccgcccccgaaaaaaaaagggcgggggggaacccccaacgaaaaaaaaaaaaaaaccaatccccgggggcaaaaaaaagggaaaaaccc

SEQ ID NO: 12484 - DNA, 519 bp, Glycine max
  Clone ID: jC-gmle01810062f12a1
ctcatttccaccatttcaccttttcaatctgtttctctgctttactaatttgtcccagatcagaaccagattgagcttctgcacaaccagaccagagattcaacgcagaaactggaagcagagacaaatgccaagaacatggaattgcaaattggaaggttgcagaagaatgtggaagagagaaatgagcagcttcaggcgtcagcctcctctgctgagaagtatctgaaggagttggatgatcttagaacacagcttgtaacaacaagagcaactgctgatgcaagtgctgcatcagctcaatcagctcagctccaatgtttagaacttgtaaaagaattaaatgagaaaaatggttcactaagagagcatgaggatcgagtcctgaggctaggggagcaactagacaatttacagaaggatcttcaggcaagggaatcttcacagaaacaattgaaagatgaagttttgaggattgagcacgatattatggaggctcttgcaaaagccggagagaac

SEQ ID NO: 12485 - DNA, 572 bp, Glycine max
  Clone ID: jC-gmle01810062f12d1
acgcaatgtaattttatagatcaccgcaaaaatgccttctgatcctggtgctacgcgtacattttgcacaagctaaagctagtagattatctataaaaactgccgcgcaaaatggcttctacaacttgtctagactcctagaatttgaaggtatatatgggtctatatacaagaattgttttggatataggaatggtttcaccgccttgaaaataccaccaagatcaacatggacatcgagaccaccattttgaatccagaagtgtcccagaaattctggtttagcttatctgcggctgcaacttctctttgttgctttgcagctaattgatctctcagttctttgatagctttgtcccgtcgttcacccatcctttgcagttttcgtgtctgagaacgagcttcctgcagacagaattctaacttcaacactttcttcttcagctcttgatcagcacgccgctgtttctccaactgtgactctaattccttagtcttgagcttccagtgagcagacatgatcttaatttcatccttaagttttgctatttcatcatccttaacacctagaa

SEQ ID NO: 12486 - DNA, 367 bp, Glycine max
  Clone ID: jC-gmle01810062g01a1
cagctatgctggcatacttgtatcctaggtgtacaatcaagagctattgcttttacattgtcggtttacagaccatgaaggactataaggacgttgacactggctgagtcaacttagagtgcaggacctactagaatcatctatgggtgcacctatttgtactaacaatctaaactgcggatgtcgatgttcctattttactcattttccaaggatggtggattatactcatggggactctgctttggattgcatatttcgtgaacgaagggtgagcagataatttgacccaacgaagtggtcatgtaatgattgaagcagtgacttgtagacacaaactagcttgattcatggccacgagatttgt

SEQ ID NO: 12487 - DNA, 524 bp, Glycine max
  Clone ID: jC-gmle01810062g02a1
ccttgccgactacaacatccaaaaggaatccactctccacctcgtgcttcgcctcaggggtggcatgcaaatctttgtcaagactttgactggcaagaccatcaccctcgaggtcgaatcctcggacaccattgataatgtcaaggccaagatccaggacaaggagggtatccctccagatcagcagaggttgatatttgctggtaaacaacttgaggatggaagaacccttgctgattacaatattcagaaggagtctaccttacacttggttcttcgtttaagaggtggcatgcagattttcgtcaagactttgacgggaaagaccatcaccttggaggtggagagttcagataccatagacaatgtgaaagccaagattcaagataaggagggtatccccccagaccagcagaggcttatctttgctggtaaacagcttgaagatggacgaacccttgcagattataacatccagaaggaatctaccctgcacttggttttgaggcttcgtggtggcatgc

SEQ ID NO: 12488 - DNA, 479 bp, Glycine max
  Clone ID: jC-gmle01810062g02d1
aactgtgaaacgatattgatatttaaaataaaaacataaacaacatactttcgctgaaacgagttcaatacatcattttaaaacataataaacagcagcacttaaaccagagatgcaaagcacaagttcaagggagacactgaacaaacagataagacatatgagaacacttcataaaagggattccccttagcaaccaccacgaaggcgaaggacaagatgcaaaggggattccttctgaatattgtaatctgccaaggtacgaccatcttccaattgcttcccagcaaaaatgagcctctgctgatctggagggataccttccttgtcctgaatcttagctttcacattggcaatagtatcagagctttccacctccaaggtaatggtcttccctgtcagagtcttcacaaatatctgcatacctccacgaagcctcaacaccaaatgcagagtggactccttctggatattataat

SEQ ID NO: 12489 - DNA, 536 bp, Glycine max
  Clone ID: jC-gmle01810062g03a1
tattatttggctctgcccttcccaattgagaaggcccccactaagagaattgcaagtgtaaatggtggggtgaagatatctgaactgttgaagtatccggttagaggctttgtctttgagggcggcgaaatgctggaagatctatcaaacgttgtttcagatgcatgtatatgtcttcagaacaacaacatacctttcaatgttcttatctctgactgtggaaagcaagtgtatctgttaccacagtgttatgcagagaaacaagctcttggagaagtgaatgctgagcttcttgacacccaagtgaatcctgctgtgtgggaaattagtggacacatggttttaaagaggaggaaggattatgatgaggcgtctgaaggcaatgcttggaggcttcttgctgaggtgtccctttctcaagagaggtttcaagaagtcaatgatcttgattatgaagccattggctgtggtgaattggaggatgtcaatgttcaaagtgtcaaaaaagaagttgatgcagtcagcacaagcgaaca

SEQ ID NO: 12490 - DNA, 507 bp, Glycine max
  unsure at all n locations
  Clone ID: jC-gmle01810062g03d1
aacccttaacgtttactaatatacaaacataacatttattacaaagtgaagccagaaatacagcaagtgaaaactttcatccttaagaactacaactacaaggacaaacagttacctgaatttattatttctcgcagcatgaaagccacgatagacagtcaagtcaagcattatgatacatcagaccccaaaataccaacaacactactcagctgagcagttattatatcgtactttcacatgaaagtgtcataaaggcagataaaagcatatacattcaacacacacgaccataaggctcaagcacaaggcaatagtatgacttaaacggtgacacatttcagcaattattcttaaaacactgcagattttctgaatttgttcaaaatacaagagccttgttactgtagaaccacacattcttgtgaaccagccaccaccaccacagagnggtgttcgcttgtgctgactgcatcaacttcttttttgacactttgaacattgaca

SEQ ID NO: 12491 - DNA, 547 bp, Glycine max
  unsure at all n locations
  Clone ID: jC-gmle01810062g04a1
gcaaattttcttcccctcaatcgtatattgctcaggtggtgttcctgttcccccccaagcacccctgagattcgttcgcaaaaagcttaataagaacaaaaaataaaaataatattcttcgttattatttcatttcaatttcgttttcgttttcgttttctgttttgatttgatcttccaatggcgtccgatggctttaccgacaagaacaccgtgttcagaaagctcaaggcgaagtctgaaaataagatgtgtttcgattgcaatgcgaagaaccctacctgggcgtccgtcacgtatgggatctttctctgcatcgattgctccgccgtacaccgcagtctcggcgtgcacatcagcttcgtgaggtctacaaatttagactcatggagtcctgagcaactaaaaacaatgagctttggaggaaacaatcgtgcacagggtttctttaagcacatggntggaatgatggtggtaaaattgaggctaagtacacatctagagctgcagactttgataggcaaattctttcaaaggaagttgcaaa

SEQ ID NO: 12492 - DNA, 512 bp, Glycine max
  Clone ID: jC-gmle01810062g04d1
ataaatgtaaacaagaaaactatttcactgatagaagctgacgtaaacactcttttagagttcacgagttcaccacaaactggtatcgactaacccaaaaaaaaaggaataaatctaaaacattagcaacatctaagcagtacctgttatacaaaatagaagcacccgtctatatgacaagcctgaaaatatagcatcttattttctcaaagaattgtatattgaaaactcttctattacatttgaaacataattggctggcatatgtaaaaaactccaaagattctcttaaatacagagcatacacattttagaggattcggtcctgaagatctgtcatcaatgtggaggccaatgagctcagcttctttccagtctctcctgcaatgttcttaagggaagagagatcctgttgtgcctggaaagataatcgattgatgaggtcaccagcagtaagatcaatagttgttgtctcttgagtcaccaaaaagatcagcactggagatggcact

SEQ ID NO: 12493 - DNA, 484 bp, Glycine max
  Clone ID: jC-gmle01810062g05a1
cgtaccctaaccgaattccaagcctacaaccaaaccaacaacaacccaaaccacgtcctctccaacctcctgcttcgtaccgttaagccccgaaccactttctcccataaccatatggactttcccgttcctgaattgcaaagccaaaacctttatgccaaccaaacgcagcgttttggtgttccgttacttcaccagctccgccctcagcccattaatctccccaacaacgggcccgtgcccatgacaggcccaaattttggctaccggaactcgaatttgggttttccaccaaaccagaaccgggttcgtgtttctcctcctgtttctgttccggttcaggttcagtcatctgaaccggaaaagaagatcatggaccacaggcttcttgaattggagagcagcttctggaagataacgacgaagaaggagaaacagatgctgcgtctgtgataaccacgagcgagtggtccgagacttatca

SEQ ID NO: 12494 - DNA, 501 bp, Glycine max
  Clone ID: jC-gmle01810062g05d1
ccaaatctatggcctttccattatctctagatgacgttaaaatatagtaacaatgtgatatataataatattccgaaccaaattaaaaaaaaaaaaggaaaaaaagcgagccgagttaacgccaagcagatgcgaccgtgagtgttcttcccatccaaccaaagcaaatccctccgttctcttcttttacagtcagtcccgagttgactcggttgttggccgtggtgagtcgcgattttattgactcggccatgctttgactcagtggttttaactcgaaccccgccatgctcatacgcgcgcgccattttccaaacacttcacaccgttccacgcgatctcttccttcgcacgccaccgagttatgcaattttcgactcagtccctcctcgagtctgactcggtctaggttgttattggtattttctctccatgcagtggtggcctcaatggactccaacaacgcgctgtaatacgacagcgtctccgccacgcgcgcca

SEQ ID NO: 12495 - DNA, 399 bp, Glycine max
  Clone ID: jC-gmle01810062g06a1
taacgacgcactctactctctcttagggtttcttctcccgccaatttcccctctcccccattcaattccaaaccctaacctcactccacccttgccggaaccgcaccttcgattcgacctagggtttcacagtttcactccgagcacgcacgcacgaacttcacgatgccgtcgctactctccccgggcaaaatccactgcctcgaggtggagaatttcaagtcctacaagggcttccaagtgatcggtcccttctacgacttcaccgccatccttggccccaacggcgccggcaagtccaacctcatggacgccatcagcttcgtcctcggcgtccgcaccggccagctccgtggcgcgcagctcaaggacctcatctacgccttcgacgaccgcgag

SEQ ID NO: 12496 - DNA, 419 bp, Glycine max
  Clone ID: jC-gmle01810062g06d1
actagcttcactttcgaagtattctagttctttaacaacaccttcacgacttttttcctcatctgcaagatccttaattgcttcagcataatcgttgtgtatattaaacaacttccacaagaaatgttctcccttcatagatttcagttcttgttgcagacagagatgcttctctgcttcttgcttctgcactttcttctgctttctctccataaccacagtcttctttttctgataaacaagtgctgatttttcctacgcagcacctttttcctcctcaaactgctcatagcccctcttgcactcgtcagagccggatatctgttccaccagcgcagtgagctctttgggattctacgacgcaatagactccacatcaccctgaaagaccaagaaattgcgagctttgacgagaatgc

SEQ ID NO: 12497 - DNA, 519 bp, Glycine max
  unsure at all n locations
  Clone ID: jC-gmle01810062g07a1
gacccaacttccaggaacttctattgagggagttgaaaagggtggctacaccatttcagacaactcatcaggtaacaagcctgatgttattttgattggaactggttctgagttggaaattgctgctgctgctgctgaggatctaaggaaggaaggaaaagctgttagagttgtttcttttgttagctgggaactttttgatgagcagtcagatgaatacaaggagagtgttctacctgcttcagtaacagctagagttagcattgaggcaggatcaacatttggttggcacaagattgttggaagcaaaggaaaggccataggcattgatcgatttggagcaagtgctccagctggaaaaatatacaaggagtttggtatcaccaaggaagctgttattgctgctgccaaagaactttcgtagatatatttggtgagtttcttttatctcatctagaacttgtggttntcacttgtggctttgggttactggtacatgacttggttttgagatatcac

SEQ ID NO: 12498 - DNA, 379 bp, Glycine max
  Clone ID: jC-gmle01810062g07d1
gagtaatggttttaaactagattctttattttttatttttaagaaaaaaaaatagagaaggatataattcttcctagaagccatatctgtccagaattgagtgctagagtgagcatcactatttcaactacaccacagagcaagccaaatagttgttacaaattcatacaacttcattaattcaactcatccttcaatgtaagtgggtcctctgacaatcatatgcaagaacaatctaatcttccttattgtggctaaagtgatctctcaaaaaacaagtcatgtaacagtaccccacagccacaagtgaaaaccacatgttctagatgagataaaagaacctcaacacatatatctacgatagttctgtggcagcagc

SEQ ID NO: 12499 - DNA, 548 bp, Glycine max
  Clone ID: jC-gmle01810062g08a1
gtacgccaaagatttgttgaactcttgcgatgccaacaaggatgggagagtggatttccaggagttcaggaagtatatggacgacaaggaacttgagctttatcgcatttttcaggccattgatgttgcgcataatgggtgcattttggccgatgagctttgggaggcgcttgtgagagcaggaattaagattgatgatgaagaactcgcccgttttgttgagcgtgttgataaggataataatggtgttataacatttgaagaatggagggattttctgctgctttaccctcatgaggcaaccattgagaacatttaccattatttggagcggatatgtgtggttgatataggggaacagactgttattccagcaggtattggtaagcacattcatgcaagcaggtatctgattgcaggaggagtagcatgtgcagcgttacgcacagcaactgcaccccttgaccgtctaaaggtggtatttgcaaattcaacaacacaatcttatataatgcctgcatttaagatttttgaaaaagggtggttgt

SEQ ID NO: 12500 - DNA, 522 bp, Glycine max
  Clone ID: jC-gmle01810062g08d1
agacaattgtcacaataatcaattgtatttgtagactttattcttgtcatcaatgtctacattgcaaaaccatttccaatgtatagttgtgccaacggtcagccatgtcaataagattaattaccaagcagtaaatttcttcactccaaatccaaactttttttcatagactcataaaccatgtaggtgatgcttgctgacggtacaactttgagtaagttaggaaatattcctttgtagaaccccctcaaaccttcatgttcaagggttttcctgaatacatcagccattcccttatatgagcgttgagcctgcattcttgttctaaccacctgcagcgggtaaacacatgttgctccaagagttccagatacagctccacatcctaattgtactagaggaccacgctctccatcatgaagaatatactgcttggacatatccttcaaggtttcatatgcagcaagatctatgccggcataagggataatccaagaagagaggaatcaatccccttaaaat

SEQ ID NO: 12501 - DNA, 543 bp, Glycine max
  unsure at all n locations
  Clone ID: jC-gmle01810062g09a1
aggttgctgtaggagataagattgcagtagtgctaagtgctaacacctgcagtgaacaatggcctctgcatcagcatctctgctcaagtcttcacttgttcttgacaagtctgagtgggtgaagggacaaacccttcgccaaccttctgcatcagttgtgagatgcaaccccaccaccccatcaggcctcaccatcagagctggttcctatgctgatgagctcgttaagaccgcgaaaacagtggcttcaccagggaggggtattttggccatggatgagtccaatgctacctgtgggaagcgtttggcttcaattgggctagagaacactgaagctaaccgccaggcataccgtaccctcctcgtgacagttccaggccttggtcagtacatctctggtgccattctctttgaggaaacactctaccaatccacaactgatggcaggaagattgttgacgtgctgcttgagcaaaacattgntcctggtattaaagtcgacaaggggttggtgccccttgcangttccaacgacgagtcatg

SEQ ID NO: 12502 - DNA, 532 bp, Glycine max
  unsure at all n locations
  Clone ID: jC-gmle01810062g09d1
gattgccgagcttaaaccattttgttatatattgagacataatcaagtacacaactcatagcaaaaggtttattaagctgtaaaggtgcatttaaccataaacaaaaatagtctccaagactataaaaacattacattttagacaaattagtcttccacttcatcgtccgtcaacacctactgtaactgctggtgttgctgcctaacaagtatcatattcactgcaaacatcttagtaggagtagcttttgacgaacaactccttcttggcttcctcggattcaccctcaccagtgtacttcccaagctgancgagatgagttggacttggcacggaatgcgagtgcatcttgtgctgctttcacgttctctgggcggcctccccatgtcttaaggcagtgttttggagggctctggcatacgagaatgacacgtgccacgggtttggagattggttcatggcattcaaatgagggtagcttcacctcagactgtcaccagacaaaacataattncgggacagcagggggaa

SEQ ID NO: 12503 - DNA, 449 bp, Glycine max
  Clone ID: jC-gmle01810062g10a1
aaaggaaggaacttgggacttgtttctctcagagatggcgttgcctaaggttgatttcgaggttggagctgatggggttgctgtcatcactatgtgcaacccacccgtcaatgctttggccattccaattatcatggggttggaagaacagatttgatgaggcagctaggaggaatgatgtgaaagctatagttttgactggcaaaggtgggagattttctggtggatttgatatcagtgttatgcagaaggttcaccggactggggattcctcgcatctccctgatgtctcagtggaactagtagttaattcaattgaagattcgaagaagcctgttgttgcagcagtagcagggctttgctcttggaagtggcttagaactggctatgggatgccatgccccgtgtgccgcttcaagagctcaattgggtctaccagagctgactct

SEQ ID NO: 12504 - DNA, 429 bp, Glycine max
  unsure at all n locations
  Clone ID: jC-gmle01810062g10d1
caacgaaatcccaatcacttaagattaaagtagcaactcgtcaccccaagaaacaattattttccttcgatttttctctttgtgaaaccaaatttaataatttattctttaatctaggaaggaagcaaacattggttgttacattttctattgtagaacatccaacatatatgctcaacacttggctttctcatagacgtgccattgactttggagtagatgaagcaggtgcactcaagggaatgcctttgagtgctctttcttccaaataccttgagggtttatagaagttaccatataattgtgcccatttttttaggctggtatatatatgattggccccaaccaagtctgcccagaaaacaatgccaccccggtaatttgggaagctcattccagaacagatgncatgtcaaggtctgatgctcg

SEQ ID NO: 12505 - DNA, 547 bp, Glycine max
  unsure at all n locations
  Clone ID: jC-gmle01810062g11a1
gtttaaagtccctaatgaatatttgaattatatatgacagtattggctgatcctaggtttcttgtagaaactggagacagaaatgtttacaatcttagccaacttcccatgcttcaaggctataatccaagccaaagttcatcatacaggcacacaaactactactaaatttcacttcaaattctttcaaacatgcattttgaattgcacaactgaataaaattatttcttcttttttcagatatggatatggggatgcttctctcgctatctatgaaaacatggtgcacaggcctttcatgaatagaagttcattagatgaatctggagctgaattttgtggcagcagattaactgagagaatccatgggaccaatagtaacatcaattggactcgtaacatgttccaagttgattcttcttctagtttcaatgaaccatcaacaagcaaagtccaagaaccaaaacataagttcttctcaattggtggtaatgaatcctcatgcacacanatcaaaatgagccatgttgatctacatcaatcaac

SEQ ID NO: 12506 - DNA, 576 bp, Glycine max
  Clone ID: jC-gmle01810062g11d1
tttttttttttttttttttttttttttttttttttttttttttttttaattattttttttttttggtttttttttatttttttttttttaaatttttttatttattttttaattttgtaaaaaaaaaaaatttttttttttttttttttatttgaaaaaaaaaaaaaaaaaaaaaacggggggggcaaaaaaaaaaaaaaggggggcaaaaaaaaaaaaatttggggggggcccccgaaaaaacccaaaaaagggggccccccacaaaagggaaacccccagccccgggccaaaaaaacccccccccccccaaaaaaaaaaccggggggatctaaaaaacccccggttaaaaaagggggggggcgcaaaaaaaaaaaaggggggggggggggaaaaaaaaaatggggggccaacacccctgggggggggaaaaaccccccccccttaaaaaaccaagggggaaaaaacaaaagggggggaaatgcgggcccccccttgtagggggggcgccccccctccccagggaggggaaaaataataaataaaaaaacacccccccccccccgggggggacct

SEQ ID NO: 12507 - DNA, 526 bp, Glycine max
  unsure at all n locations
  Clone ID: jC-gmle01810062g12a1
cccaaacaccccttccccgatcttcgggggcagcaccggcgggctcctgcgcaaggcacaggtggaggagttttatgtcattacgtgggactcacccaaagaacagatctttgaaatgcccactggcggcgccgctatcatgagggagggtcctaaccttctcaagttggccaggaaggagcagtgcttggctcttgggactaggctcaggtccaagtacaagatcaagtaccagttctacagggtcttccctaatggggaggttcagtatttgcaccctaaggatggtgtttaccctgagaaggtcaacgccggacgccaaggggtgggtcaaaacttcaggtctattggtaagaatgttagtcctattgaggtcaagttcactggcaagcagtcctatgatttgtgagcacacaactctatcttcatcatcatcatgccncgtgcttactttatatgctatatattctcatgtgatatcatgtacctattggcagtttattatgccacacatattgcttaaact

SEQ ID NO: 12508 - DNA, 525 bp, Glycine max
  Clone ID: jC-gmle01810062g12d1
aatccaaaccatgcagttggcacaaataataatcaccaaaatagcgaaaaagaagtgtaaaattaaggtacagagtttaagcaatatttgtggcataataaaattgacaataggtacatgatatcacatgagaatatatagcatataaaggaagcacgggggatgatgatgatgaagatagagttgtgtgctcacaaatcatagggctgcttgccagtgaacttgacctcaataggactaacattcttaccaatagacctgaagttttgacccaccccttggcgtccggcgttgaccttctcagggtaaacaccatccttagggtgcaaatactgaacctccccattagggaagaccctgtagaactggtacttgatcttgtacttggacctgagcctagtcccaagagccaagcactgctccttcctggccaacttgagaaggttaggaccctccctcatgatagcggcgccgccagtgggcatttaaagatctgttctttgggtgagtcccacgtaatgacat

SEQ ID NO: 12509 - DNA, 540 bp, Glycine max
  unsure at all n locations
  Clone ID: jC-gmle01810062h01a1
cgccaacgaccttgccccactcatcaacgacaccgccgccgccaactacctctgcgcacaattcgattccatttctagaaagctcgtcgaaacaacctacgccgtcgacaacacctaccttctgttttcagcgtatcttgtcttcgccatgcagctcggcttcgccatgctctgcgccggctccgtcagagccaaaaacaccatgaacatcatgctcaccaacgtcctcgacgccgtcgccggcggtctctcctactacctattcggctttgcattcgccttcggcggcccctccaacggcttcatcggccgcctaaacttccgcctacgagattacccgatgggctcctctatctncagcttcttcctctaccagttggtcttagccatcgncgacgcaggaatcaccatctctcccttcggcgactacagcttctttctctaccagtgggccttcgccatcgncgncgcagggatcaccagcgggctccatcgccgagagaacacagttcgtggcttaccttatctactcttctttct

SEQ ID NO: 12510 - DNA, 554 bp, Glycine max
  unsure at all n locations
  Clone ID: jC-gmle01810062h02a1
cagaattttaggatacaggataggtcatatcatcatgatcaatactacaacgggacaactgggttttataccatggcaatggaggaaggtgcaagagctaggccatatgcagtgcctttgtcaaggacacctgcagtgacgttatcgaggcctcccaattcagggtcaacaactaatggacaacaccaatttgtgcagaacatgggtcctcctataccacctccaaattggattactagagtaccggatacgaatggaatatatgctgggcatcaagaaactgcattggggggaacttatgataagcagaacatgaaggtgtaccaagttaaaactcgtcaaccccaagatatgccagagtacgggaatcaatgatgactggtgtggattntattcgccttgtgacgaagtgccctcttccattcctcgggctgtttctcaaatcggagcccatccaagttctacaatggagtatgagggggcaacaattgtgtgatacccgtaggcaataggctgacaaatgcttattgaagctatggatgacactaatctgt

SEQ ID NO: 12511 - DNA, 441 bp, Glycine max
  Clone ID: jC-gmle01810062h02d1
gaaacaaaacgttttttttactacaaaattaagattgtccattcaagtccaatatggtacatatgataatacaagtgtcactgagcgcagcgggattttatacatgctataccctactcatgccggggacaggaaaatcaacaattacaagtttttacgatattttatgagtttgtttagaacttgaaaagcaataatattgggaatatataatatatagctctcccacgtttccaattggtatagcctggacaactaactatcaaggaagtgcccatgtttagtgaaggcagatcgtgattcttagcagcaccttcactacagattaggggcatccatagcttcaataagcatttgtcagcctattgccttacggtatcacacaattgttgccccctcatactccattgtagaacttggatgggctccgatttgagaaac

SEQ ID NO: 12512 - DNA, 488 bp, Glycine max
  unsure at all n locations
  Clone ID: jC-gmle01810062h03a1
gaaaaacaagtagttgagaactaagaagaaggaaatggcttcctcaatgatctcctccccagctgttaccaccgtcaaccgtgccggtgccggcatggttgctccattcaccggcctcaaatccatggctggcttccccacgaggaagaccaacaatgacattacctccattgctagcaacggtggaagagtacaatgcatgcaggtgtggccaccaattggcaagaagaagttcgagactctttcctacttgccagacctcgatgatgcccaattggcaaaggaagtcgaataccttctaaggaaaggatggattccttgcttggaattcgagttggagcacggtttcgtgtaccgtgagcacaacaggtcacctggatactatgatggacgctactggaccatgtggaagctgcctatgtttggctgcactgatgcttctcangtgttgaaggagcttcaagaggcttagactgcataccccaatg

SEQ ID NO: 12513 - DNA, 526 bp, Glycine max
  unsure at all n locations
  Clone ID: jC-gmle01810062h03d1
acagaaacacattatatcgttcattcatcccataggccataacaagaaagatcaaccaagctcttctagaaaaaacaaaaatattagaagaaggaaccatatgagaacttagacgtaggagacgagcccttgagacaataattaattaacagtgacttttcccaccataccagctccttggtgaggcgaacagaagaaactgtaggttcccttagcatccaaagtaacgctgtaagtctcaccaggcgcattgagaaggtcttcatcgctcatggagattttccctgcatccacgccgctaggaatctcgtcctcgtcgaacacaacgttgtgggggaaacctgcgttgttcttggacnacgatcttctccccagaggccacggagaaattgttgggaacgaaagccagagacccgtcatcaccacccagcaacacttcaatggcctgggcgttgctagccagcactgcactcgcggcagtggccacaacagcgactcaacgtctttcagcgaagccttgatgccc

SEQ ID NO: 12514 - DNA, 539 bp, Glycine max
  unsure at all n locations
  Clone ID: jC-gmle01810062h04a1
gaaaaacaagtagttgagaactaagaagaaggaaatggcttcctcaatgatctcctccccagctgttaccaccgtcaaccgtgccggtgccggcatggttgctccattcaccggcctcaaatccatggctggcttccccacgaggaagaccaacaatgacattacctccattgctagcaacggtggaagagtacaatgcatgcaggtgtggccaccaattggcaagaagaagttcgagactctttcctacttgccagacctcgatgatgcccaattggcaaaggaagtcgaataccttctaaggaaaggatggattccttgcttggaattcgagttggagcacggtttcgtgtaccgtgagcacaacaggtcacctggatactatgatggacgctactggaccatgtggaagctgcctatgtntggctgcactgatgctttctcaggtgtgaaggagcttcaagaggctaagactgcataccccaatggctttatccgtatcatnggatttgcaacgttcgccagtgcagtgcatcagc

SEQ ID NO: 12515 - DNA, 529 bp, Glycine max
  unsure at all n locations
  Clone ID: jC-gmle01810062h04d1
acagaaacacattatatcgttcattcatcccataggccataacaagaaagatcaaccaagctcttctagaaaaaacaaaaatattagaagaaggaaccatatgagaacttagacgtaggagacgagcccttgagacaataattaattaacagtgacttttcccaccataccagctccttggtgaggcgaacagaagaaactgtaggttcccttagcatccaaagtaacgctgtaagtctcaccaggcgcattgagaaggtcttcatcgctcatggagattttccctgcatccacgccgctaggaatctcgtcctcgtcgaacacaacgttgggggggaaactgcgttgttcttgaacacgatcttctccccagaggccacggnagaaattgttgggaacgaaagnccagagacccgtcatcaccacccagcaacactttcaatggcgngggcgttgctagccagcactgcactcgcgggagtggccacaacagcgactcaacgtctttagcgaagccttgatgcccacc

SEQ ID NO: 12516 - DNA, 511 bp, Glycine max
  Clone ID: jC-gmle01810062h05a1
atagaagaagcagaaagagaagcattagcaaaagcaagaagaactagtctaagcagaaatggcctcttcagtgatggcatctgtggccctcaaacctgcccctttcactgttgagaagtcctcagttagaggccttccctccctctcaaggaactcctcttcattcagagttgtggccagtggtggcaagaagatcaagactgacaagccttatggaattaatggtggcatggctttgagggaaggagttgatgcatctggcaggaaaggaaagggaaagggcgtttaccagtttgtagacaaatacggtgctaatgtcgatggttacagtcctatctacgacaccaaggactggtctccaaccggtgatgtctacgctggcggtacgactggcttggctatctgggctgtgactctacttggtcttcttgctggtggtgcacttcttgtctacaacacaagtgctttggcgcgataaactttgcaaatcgatgtttaagctcaacttagt

SEQ ID NO: 12517 - DNA, 530 bp, Glycine max
  Clone ID: jC-gmle01810062h05d1
cacatccacacatttatagaacagaaggaacacgtatccacaaagtacttcatgaataattcttcatttttagatagttacatggactaagtttgagcttaaaacatcgatttgcaaagtttattgcgccaaagcacttgtgttgtagacaagaagtgcaccaccagcaagaagaccaagtagagtcacagcccagatagccaagccagtcgtaccgccagcgtagacatcaccggttggagaccagtccttggtgtcgtagataggactgtaaccatcgacattagcaccgtatttgtctacaaactggtaaacgccctttccctttcctttcctgccagatgcatcaactccttccctcaaagccatgccaccattaattccataaggcttgtcagtcttgatcttcttgccaccactggccacaactctgaatgagaaggagttccttgagagggagggaaggcctctaactgaggacttctaacagtgaaaggggcaggtttgagggccacagatgccatcactga

SEQ ID NO: 12518 - DNA, 475 bp, Glycine max
  Clone ID: jC-gmle01810062h06a1
gcagatggtgatagggctcatgcgcagaggagaaattggcggggtgatactcggagaaatgggaaggagaccgataggcagccgcatgccccggagaggcaaccttcacctgagacatggcgtaagcctgtggagcagcagctaaaatcagctccaggtgctgctagcacacggtacagtagagcagcttcggcggttgaacttgcacaagcattctccagatctgtatcagatccaaaagtgaatgataggttttcaggtcaaaggggtctgaacactggcaacagcagcaggacacaagttccattttcacggcttgttggtcctacatcaaggcctcagatcaatggttattaaaatatttggtggataattggactcactcaagaccaatttctatgagatagcattggattcatgcaatgtggaattgcagagcacttcatgtagtggctgtggatttagatattttcct

SEQ ID NO: 12519 - DNA, 485 bp, Glycine max
  Clone ID: jC-gmle01810062h06d1
gatgaaactaaaacgaacaattttatggtgttaatcatgctacaatgttttcattaggtaacagccttttcagctccaccacaaagaaagaaaaaaaaattagtgttttggcagcaaatgatatggggcaataaataaaaacaaaataaagcatggtaattgtaagaaggtattgtcacaaccaaggctatgtaacttgagaaatcattaatttctcactcaattgttgtgaatgaggagaaaataactaaaaccacagccactacatgaagtgctctgcaattccacattgcatgaatccaatgctatctcatagaaattggtcttgagtgagtccaattatccaccaaatattttaataaccattgatctgaggccttgatgtaggaccaacaagccgtgaaaatgaaacttgtgtcctgctgctgatgccagtgttcagacccctttgacctgaaaacctatcattcacttttggatctgat

SEQ ID NO: 12520 - DNA, 362 bp, Glycine max
  Clone ID: jC-gmle01810062h07d1
aaaaaaacccaaagtttgagccccccaaatttaaaggggggcgagaaggggtttcccactgccaaaaaaaaaaattttggaaaaaaaaggggggggcaggggaaaaaaaaaaaaggacccgggaggccccaatttaattaaaatgtttttggggggggcttgaggaccccacctgtgggaacaaacaatgaaaaagaaggggggggaccctaaaatttggagcgaaaaaccctctcttcttaaaagagggggggggggaaaaaaaaaaaacccccccttgggggaacccaacccccccgaaaaaacaacccccccgagaaatttatatattgggggagccctggggaacccggggggggggg

SEQ ID NO: 12521 - DNA, 563 bp, Glycine max
  Clone ID: jC-gmle01810062h08a1
gtacgggataacattttgtttggttctgtctttgacccagcaagatatcaaagggcaataaatgtgactgaactgcagcatgaccttgagttactgccgggtggtgatcttactgaaattggtgaaagaggggtaaacatcagcggtggccaatagcagagagtatccatggctagagctgtctactccaattctgatgtgtacatctttgatgatcccctaagtgctctggatgcgcatgtggctagacaggtttttgataaatgcatcaagggagatttgagagggaagacccgagttcttgtcacaaatcagctgcattttctttcgcaggttaatagaatcattttggtccatgaaggtatgggtgaaggaaggagggaacttttgaggaactctctaaccatggaccgctgtttcaaaagcttatggaaaatgcgggaaagatggacgagtatgaagaagaagaaaggtagatactgaaaccacagatcagaagccctctttcgaaccaggtgtcaatggaggcattatgatcatgcaagagtggagtaacccaaaga

SEQ ID NO: 12522 - DNA, 490 bp, Glycine max
  Clone ID: jC-gmle01810062h08d1
aagtcttcgtgtaatataataattgctaaaaaccattcctatctataataatattttaaaaactaaatagacaaaagaacaatctcaatgaagatgagcatcgatgaaaattcttttggtaatcaaaattacaatactacatgaaaagaatttctactcaccaaagtaaacaataaaaagttcttggttgattttcatagctccgttgtagagctacgcgccaaaataaagttagcaaaaccttaggtctatcgacttgatcgaagtcatcagtcatcagtaggcaggagctgttatataaagaagtgcagttttccctacatatcaacctgatcaaagttaattgatctgtcctcaaaaccgaagtctgattgatggaacctgttcacggtcaatctgctcatgatagcaagaccttcaatcattttataaagcgatgaccaccatccgtctggggatatttggcgctgctctaaagattcctcaattt

SEQ ID NO: 12523 - DNA, 570 bp, Glycine max
  unsure at all n locations
  Clone ID: jC-gmle01810062h09a1
gagctctagtgttaaccatatatcagtgcaaatcatgccatataatgaatttggacctcctctttctaatgttacaaaactcacatttgaaggaagaactgatgtcagtgatttgggtctccagtacatcttcaaattatgtgtttcattgcgtcacctgaatattaaaggatgcatttctgtcactgatattggcatatcagatctcatatccacgtgtaaaaaacttaattcaattgtggtttgcgatactttatttgggatctattcagttcaagctctttgctcagctatttctggtagtggcaacttcccctctctacattctagagataagcgtttgaaatctgtggtgtctaattttgaaatgctgcatatgggtggctgcaggggtattagtgagtcatctctactagagcttatgtctcaagcacaagttttgaagagtttatgcctgagatggactgacctggttgaccaggcactgtacaattntgtaggttcttactttgagatgctngatgtttctgataccaagatttctggagctgcattagcttatattattca

SEQ ID NO: 12524 - DNA, 395 bp, Glycine max
  Clone ID: jC-gmle01810062h09d1
caaagtgcaacggctggattctcaatcaacttgacatcgttttgtcagatgtttactacttaacaaacaaatgatcatcttaatcactaagcgttttacttactgccaccaaatcacttgtaaaactaactcatcaacatgtgagaaggatgatgaatgctcagacatacatttactaaagcctttccttcaccactgttctgatgagatctctgctgttccacacaagcaccagagtttcaacatgcacagatcttctatgaacccctggggcaggggctgggagattaaaagcacatctttgagatttgcatctagctatcttcaaggtactaaaaagtatttgtctgcatactgatttggaatgtcaaaatcaccttcacttgcatcgcata

SEQ ID NO: 12525 - DNA, 549 bp, Glycine max
  Clone ID: jC-gmle01810062h10a1
aattcctaattgtttaaacctatttctcatttcttcatcgttcgattcttctcctcctaaagatgcagatcttcgtgaaaactttgaccggtaagaccatcacccttgaggtggagtcctccgacaccatcgataacgtgaaagctaagattcaagacaaggaagggatcccacctgaccagcagagacttatctttgcgggtaaacagcttgaggatggtcgaacccttgccgactacaacatccaaaaggaatccactctccacctcgtgcttcgcctcaggggtggcatgcaaatctttgtcaagactttgactggcaagaccatcaccctcgaggtcgaatcctcggacaccattgataatgtcaaggccaagatccaggacaaggagggtatccctccagatcagcagaggttgatatttgctggtaaacaacttgaggatggaagaacccttgctgattaccatattcagaaggagtctaccttacacttggttcttcgtttaagaggtggcatgcagattttcgtcaagactttgacgggaa

SEQ ID NO: 12526 - DNA, 442 bp, Glycine max
  Clone ID: jC-gmle01810062h10d1
aactgggaaacgatattgatatttaaaataaaaacataaacaacatactttcgctgaaacgagttcaatacatcattttaaaacataataaacagcagcacttaaaccagagatgcaaagcacaagttcaagggagacactgaacaaacagataagacatatgagaacacttcataaaagggattccccttagcaaccaccacgaaggcgaaggacaagatgcaaaggggattccttctgaatattgtaatctgccaaggtacgaccatcttccaattgcttcccagcaaaaatgagcctctgctgatctggagggataccttccttgtcctgaatcttagctttcacattggcaatagtatcagagctttccacctccaggtaatggtcttccctgtcagagtcttcacaaatatctgcatacctccacgaagcctcaaca

SEQ ID NO: 12527 - DNA, 565 bp, Glycine max
  Clone ID: jC-gmle01810062h11a1
aaagactaaagagagttgtggtttggtggtggttgtcgtttttgaaatggcagcgtcgtcgtcagagaagcaagtggtggtgataggcatagacgacagcgagcagagcacgtacgcgttgaattgggctctggataacttttttcccgagcccaattttcaagctcgttctcatccactccaggcccaccgtcacctccgctgtgggcttcgccggccctggagccgctgaggtcttgcctattgtagattccgatttgagaaagattggcgccagagtcctcgaaaccgctaaacaactttgcatcaacaaatccgtaaatgatgtgacagcagaagtggtggaaggtgatcctagaaatgttctttgtgatgctgtagataagtaccgtgctgcaatgttggttgtgggtagtcatggttatggggctataaaaagggcgggtttaggtagtgtcagtgactattgtgctcatcatgctcactgcactgtgatgatcgtgaagaagccaaaatcaaacactgatctgtaatggctgcgtctatatagtacaacaattaacat

SEQ ID NO: 12528 - DNA, 550 bp, Glycine max
  Clone ID: jC-gmle01810062h11d1
agtacaatatttttttactattttattttattaaggatgaaaagagcagtaatggaattgaactcatcagttcaagaacttttcgtgtacaatgtaaggtaaagtcctgatacgtacatattttctgatggttccatctttaaaaataaactgtgcctcaacgtatcaaaccataaagtcaataagccatatccatacaacaagcatagttacgaatttctgtgaacattattttctttctctcttctttggctgaaaggattatgtttattgttgtactatatagacgcagccattacagatcagtgtttgatttttggcttcttcacgatcatcacagtgcagtgagcatgatgagcacaatagtcactgacactacctaaaaccgccctttttatagccccataaccatgactacccacaaccaacattgcagcacggtacttatctacagcatcacaaagaacatttctaggatcaccttccaccacttctgctgtcacatcatttacggatttgttgatgcaagttgtttagcggtttcgaggac

SEQ ID NO: 12529 - DNA, 455 bp, Glycine max
  Clone ID: jC-gmle01810062h12a1
ctcacgcattgttcacctctctctccgtgttgatatgttcagatctttggtttgacaggtttctcaaagaatctctgagctactttctttcccattttttcattgcagtctatctcaacctagattggggcattttccgactcactgactcttgtcacgagcatatctacatataatttcagaacttttaagtgctgaatcgattgtttgtgacggagatcgatcggtcggcgcgatcgtacctgcatgtattgtctaccagtgtatacggttggagaatgagctctgtgcacggaccagatgtgtgcccttctgtccgagccaaacaaggtgggttctgcagcattcctatgattggggcagtgaaaatgaacgttagacgcattagacgtgaattgtggggtctcaatggcgccaaggctaaacccggttttctttcttgccggataaacaca

SEQ ID NO: 12530 - DNA, 538 bp, Glycine max
  Clone ID: jC-gmle01810062h12d1
cagtggaagaatcgaattgaataagcactgaatggttatttgagtacaaatacatataaaagttctcctattagctagtctacctaaaaaaaaacaaatgcacaaataactgagaaccaagtaatatatttacagcattttatctaatcatcccaaatatttttaataatacagcgaaacacatccatcagtcgcatactgcatcccatggatagaaaaacacattacatattaacagctttttaagattgaaacaagtctcagaaaagcagtgaaaagttccacatgattgcattagcattaatgtttataaatatatacaaatattcacagacaatgtaagcatatatagaccgaggaaggaagagaaatgactgcaatcagctcagctgtaccgaaccccctttgacattctaatgtaagattgtatttttacaattaaagcattcagaatctgtttttcatatttttccctgccctaaagttgattaagtggtccctgaacaaagcagcatctttatagcgctcttcaacaaca

SEQ ID NO: 12531 - DNA, 501 bp, Glycine max
  Clone ID: jC-gmle01810063a01a1
gcggaagcaagagatctttgtttgaagagcttccccctgccccgccagtatccaagaggctgcgctgttcctcctcccctattcgcctctctctcccttctctcatcgaccacctgcgccctctcttccctcatatggatgaccaggtcctcgagagagcgctccaagaatgtggcaacgacctagatgcggccatcaagagcctccacggcctctgtttgggatctgctgatgataattctcaacctgctccacaacctgaccaccctaacctcgtcgtcgacacaggtgcgttggaagagaatggggatgcttctgcttctggggatcaggccgctgctgccaattttcctgccggtggagcagaatggattgacttatttgatagagagatgacgtgtgctactagtgttgatgatgccaggtcccgtgctgctagattgctggaggttctagagaaatcaattactgcacatgcgagttctggggtgacaacgggtc

SEQ ID NO: 12532 - DNA, 568 bp, Glycine max
  unsure at all n locations
  Clone ID: jC-gmle01810063a01d1
aagactgggaaataaaatataatttgtagtagtctgctgtgatggtacatcaaagtgatcttgaacatccttagtaattacagtacactcaaatctcaatgctaaaatggggaataaacaattgaataaactggacgaataatttcatctataatatcaaactctatccgaatcgcccctgaactggaaacagttactattccttgacctacaggagcttcacaaactgcaacaatttaacaatacgcattttttttctttgggatattaaccagatgcagctattttactgcctcaattatgatatcctacatactgatcgccctagaaggcatcaggagggaaacacccaggaaaggggctgtattgttgtgcctgattcaaatgcattcgcaaagcatagttattcacctcaagagttctgatctgctcctgatattgagataccaactgcttcaattgctgcaactcttggtttctattctcataatcagaaaggcgttcaagctggattctaaaagcacttttaaaacaatntttctcttagtcaaagcttcaatatgctcct

SEQ ID NO: 12533 - DNA, 506 bp, Glycine max
  Clone ID: jC-gmle01810063a02a1
tccatctttgccttctgcatgttggttctctgttaacagatactgcacaagaagaataatattgaatatttggttgggttgaatccctgggttgaagcgttgcagacatcacggctattctaagagtgtctcgctctctcattcatgtcccaactgtacgacggaagacaggttgcgtaactgccaccaacccttcgccgcacggtgggcgtggtgctttgccttctgaaggtggtagcccttcagacttgctcttcttagctggtggtggttctgctgtcttctagcttcttcttaactcttttttctttttactacttttaagctaccttgatttcaaaatcgcagatacaaacactgtcttacttcataagatcaccttttcttcatcttctacttctccttgactaaaatgatgctcaacatcaagagggttaccactgtcgtttccaacttccaaaacgacgacgctgcagactcttctcgtcccgtcagaggttgtggtc

SEQ ID NO: 12534 - DNA, 541 bp, Glycine max
  Clone ID: jC-gmle01810063a02d1
acaaggacaaacagttacctgaatttattatttctcgcagcatgaaagccacgatagacagtcaagtcaagcattatgatacatcagaccccaaaataccaacaacactactcagctgagcagttattatatcgtactttcacatgaaagtgtcataaaggcagataaaagcatatacattcaacacacacgaccataaggctcaagcacaaggcaatagtatgacttaaacggtgacacatttcagcaattattcttaaaacactgcagattttctgaatttgttcaaaatacaagagccttgttactgtagaaccacacattcttgtgaaccagccaccaccaccacagtagggtgttcgcttgtgctgactgcatcaacttcttttttgacactttgaacattgacatcctccaattcaccacagccaatggcttcaaaaacaagatcattgacttcttgaaacctctcttgagaaagggacacctcagcaagaagcctccaagcattgccttcagacgcctcatcataatccttcct

SEQ ID NO: 12535 - DNA, 485 bp, Glycine max
  Clone ID: jC-gmle01810063a03a1
gattggcacggtggtgcaaaagctgctgaatttgctgcaagtaacttagaaaagaatgtgttagatgaagtaatcgtgagagatgaagataatgttgaggaggcagtgaagcgagggtacctaaacaccgattcggatttcctaacggaggatcttcatggtggctcttgctgtgtgacagcattgattaggaatggtaacctcattgtgtccaacgctggtgattgccgcgctgtcattagcagagggggtgttgctgaggctctaacatctgatcacaggccttcaagggaagatgaaagggacagaattgagaacctggtaagcttctgagtgtgatagtacttaatcttttctctgtggttattgaaaccacatgaacctgtttgaatttggatttgttggttcttaagcattcgaatttgtcttgtagggcggctatgttgacttatgccgtggtgtttggaggatccagagatcttctg

SEQ ID NO: 12536 - DNA, 608 bp, Glycine max
  Clone ID: jC-gmle01810063a03d1
actaaataaataatgtataaattaattaattgtatgctgctcattacataaattattcaatgaaaaaaataattactaaatgttattgttaatatccccctctcccctatgcgggtacaaaaaaattcccaataatgtagtcagatttatatttacagaaaagaatcagctactcttatccatcaggcaccaccaaggctgttcaaagtcgcaaactgcaacgcaatcttaacctcaatgcgatctcaactgcaataatctaaaaccttatgcactacctccccttctgttgtactaaggtaactttaaatatagtgctccaatttgattagcataacacttgtgtcatccaaagagcctcgtgaaacagacaaatctacaagctttttacaagccagcagcaatggttgtgatttgttgttgcctacgagaaaagaacgagcagtatctactgcttcctgattactaacctgaaatgagaatgagaaacaaacttgtttagtgactcagtccaatgcatgagcaacaatattaaaaaatacttaaaaagacactattaacattgaagtgaaatggtcaagttctataccttatcccataatccatct

SEQ ID NO: 12537 - DNA, 462 bp, Glycine max
  Clone ID: jC-gmle01810063a04a1
cgaaaacagaggctacaccaggtaggggaattttggccatggatgagtccaatgctacctgtgggaagcgtactggcttcaattgagctagagaacactgaagctaaccgacaggcataccgtaccctcctcgtgacagttccaggccttggtcagtacatctatggtgccattctctttgaggaaacactctaccaatccacaactgatggcaggaagattgttgacgtgctgcttgagcaaaacattgttcctggtattaaagccgacaagggtttggtgccccttgcatgttccaacgaccagtcatggtgccaaggttaggatggtctagcctatcgctcagctgcatactacgagcaaggtgcccgtttcggcaaatggcgtactgcagcgagcatccacaacggtccctatgctctggcagttaaggaagcagcctgtggtctggctcgctatgct

SEQ ID NO: 12538 - DNA, 534 bp, Glycine max
  Clone ID: jC-gmle01810063a04d1
gccgagcttaaaccattttgttatatattgagacataatcaagtacacaactcatagcaaaaggtttattaagctgtaaaggtgcatttaaccataaacaaaaatagtctccaagactataaaaacattacattttagacaaattagtcttccacttcatcgtccgtcaacacctactgtaactgctggtgttgctgcctaacaagtatcatattcactgcaaacatcttagtaggagtagcttttgacgaacaactccttcttggcttcctcggattcaccctcaccagtgtacttcccaagctgagcgagtgagttggacttggcacggaatgcgagtgcatcttgtgctgccttcacgttctctgggcggcctccccatgtcttcaaggcagtgttttggagggctctggcatacgagaatgacacgtgccacgggtttggagattggttcatggcattcaaattgagggtagctttaacctcagactgtccaccagacaaaaacataatttcagggacagcagggggaat

SEQ ID NO: 12539 - DNA, 463 bp, Glycine max
  Clone ID: jC-gmle01810063a05a1
aatggcctcagccgcatcccccaccactttctctctcctccactccgccaccccttcctcctcctccaccgccacctccgcctccccctccccctcgcgcgtgcagctcacctcctccctccgcgcccgcccgctgcgccgcctgggcttcgccgcggcggacccgctgctcgcggcgagtgtagcggcgcgcgtggcggcggtgagaggaggaggaaagggcgcgaggggggtggtgtcgatggcgaagaagagcgtgggggacctgagcgcggcggacctgaaggggaagaaggtcttcgtcagggccgacctcaacgtcccgctcgacgacaaccagaacatcaccgacgacaccagaatccgcgccgtcattcccaccatcaaacatctcatccaaaacggcgccaaagtcattctctccagccacttggggccgccgaagggtgtcactcccaaatac

SEQ ID NO: 12540 - DNA, 572 bp, Glycine max
  Clone ID: jC-gmle01810063a05d1
gccagcaactaaaagatttatttgaatttatggctctcagccagggtttacagttacacgcaatttatgtgtgaagccaataataactcaagcaagataaaatttacactaacagacttcgaagggtcctacaacatatgctcttttacaagattgacaacactgacacctaaggatgggaaaattttccaagatgaaaagtgtcttacacagcgactgggacggcttcatcaagagcaaggactcctggaagctctttgccttccaataactccaaactggcaccaccaccagtagatatgtggctcatgacactagcaactcctactttctccacagctgcaacagaatctcctcctccaataattgtggtcaccccctttccactgaggtcagccagcttctttgcaatagcctctgtaccaacagcaaacttgtcaaactcaaacactcccattggtccattccatatgatggtttgggtagtatccaatgcttcactgaatgatttaacagaatctggaccaatatccaatcccatccagccatcagggatggcagatgctggcacg

SEQ ID NO: 12541 - DNA, 508 bp, Glycine max
  unsure at all n locations
  Clone ID: jC-gmle01810063a06a1
gtctgaattggccaaagcattggctgcatactactttggctccgaagaagctatgattcggcttgacatgagtgaattcatggaaaggcacactgtctccaaacttattggttcacctcctggatatgttggttacactgaaggtggtcaattgaccgaggcagttcggcgtcgtccttacactgttgtactgtttgatgagattgagaaagcccatcctgatgtgttcaacatgatgcttcagatcctggaagatggaagactaacagacagtaagggcagaacagtggatttcaagaacacacttcttataatgacatcaaatgttggaagcagtgtgattgagaaaggaggccgcaaaattggatttgatctggattacgatgagaaggatagcagttataacagaatcaagagcctggtaactgagagattaacacaatacttggggccaaattttggaattgattggatgaaatgattgtctttaggcagctcacanaactgg

SEQ ID NO: 12542 - DNA, 516 bp, Glycine max
  Clone ID: jC-gmle01810063a06d1
gttacttattttttttttttctccttttacatttttatgtttataattctgtattggtcatgtaaccattaacaaaaattgttctttcaagacttttaaaacattacaattaaagacaggggtaggtttattccactttatcctccgccaacacctactataactgctggcgttgctgctgcctaacatgtatcatattcactacatacatcttagtaggaggggcctttgactaacaactcctccaaggcttcctcggattcaccctcaccggcgtacttcccaagctgggcgagcgagttggacttggcacggaaaaggagtgcatatagtgccgccttcccgttctctgggcggcctacccatgtcttcaaggcagtgttttggaaggctctggcatacgaaaacaacacgtgccacgggtttggagattggatcatggcattcaaattgaggggagctttcaccttaaactgtccacctcacaaaaacataattccagggacagcaggggga

SEQ ID NO: 12543 - DNA, 503 bp, Glycine max
  Clone ID: jC-gmle01810063a07a1
attgttcattcaatttctttttcttctctcatcatctcaaccaacaaatcatttaattgcaatcatctatggcgtctttcgacccgaacgtagattcaagtaattccgacacgttgcgagaatccaatcacaagaagcgcagaaaaatcggagaccacgccgccggcgatctcgatttcgccgccgccgtcccttggagatccgacgtggagcagcggatctactcccgccgcctcgtggaggctctccgccgcactccgtcatcggcgaccaagcctagagccgccggccaggtccgcgagaccgccgaccgcgttctcgccgccaccgccagaggccgaacgaggtggagccgcgcgattctcaagcgctggaggaagctccgcatgcagcacaagaaggcgaaggcggcatcgtccaacaacggtttgaagagaacgaggattggaaacggagagaggaggaacccgttaccggctgttcagaagatagcgcgcgttctc

SEQ ID NO: 12544 - DNA, 501 bp, Glycine max
  Clone ID: jC-gmle01810063a07d1
ggggatagtggaactcaaaggaaggaggaataagcaaatggcatgtacagtgtacacgataaaatacatgaatctgaaaaaaaaaacgatataataattaaaaataaaaaataaaaaataaaaaacacctggcgcaatatagcctaggcgcgcgggtcaactcaacgcggagccggcgagatttgccggcgcggcgccggcgagtagttcggccagagccgtcatggctcgcacttgcatctccaaggcggagatatagtccgtggcttcttccagaaggttcgggaacgaaaccttccggcaaccgggaaccaaccggctgagaacgcgcgctttcttctgaacagccggtaaccggttcctcctctctccgtttccaatcctcgttctcttaaaccgttgttggacgatgccgccttcgccttcttgtgctgcatgcggagcttcctccagcgcttgagaatcgcgcggctccacctcgttcggcctttggcggtggcg

SEQ ID NO: 12545 - DNA, 461 bp, Glycine max
  unsure at all n locations
  Clone ID: jC-gmle01810063a08a1
gctaagtgcctaacacctgcagtgaacaatggcctctgcatcagcatctcttctcaagtcttcacttgttcttgacaagtctgagtgggtgaagggacaaacacttcgccaaccttctgctgcatcagttgtgagatgcaaccccaccaccccatcaggcctcaccatcagagctggttcctatgctgatgagctcgttaagaccgcgaaaacagtggtttcaccagggaggggtattttggccatggatgagtccaatgctacctgtgggaagcgtttggcttcaattgggctagagaacactgaagctaaccgccaggcataccgtaccctncttgtgacagttccaggacttggtcagtacatctctggtgccattctctttgaggaaactctctaccaatccacaactgatggcaggaagattgtcgacgtgctccttgagcaaaacattgttcccg

SEQ ID NO: 12546 - DNA, 460 bp, Glycine max
  Clone ID: jC-gmle01810063a08d1
gattgccgagattcaaccatgtttgttatatattgagacataatcaatcaagtacaccactcacagcagaaggtttataagctgtaaaggtacatgtaaccataaacaaaaatagtctccaagactataaaaacattacattttagacaaattagtcttcttccacttcatcctccgtcaacacctactataactgctggtgttgctgctgcctaacatgtatcatattcactacatacatcttagtaggagtagcctttgacgaacaactccttcttggcttcctcggattcaccctcaccggtgtacttcccaagctgggcgagcgagttggacttggcacggaaaaggagtgcatcttgtgccgccttcacgttctctgggcggccctcccatgtcttaaggcagtgttttggagggctctggcatacgagaacgacacgtgccacgggtttggaga

SEQ ID NO: 12547 - DNA, 604 bp, Glycine max
  Clone ID: jC-gmle01810063a09a1
aattgaaaaaaatctaagtccctttggtcttcatcttctgttctgatccaggtatggcttctaaacgcatcttgaaggagctcaaggatttgcagaaggatcctcctacctcatgcagtgcaggccctgtggctgaggacatgtttcactggcaagccacaatcatgggacctgctgatagcccatatgcaggtggtgttttcctagtttcaattcattttcctcctgactatcccttcaagccaccaaaggttgcttttcggactaaggtgttccacccaaacatcaacagcaatggcagtatatgtcttgacattctcaaggagcaatggagcccagccctaaccatttccaaggtccttttgtcaatttgctcattgttgacggatcccaaccctgatgatccactcgtaccagagattgcacacatgtacaagactgacagggccaagtatgaggctactgcccgcagctggacccaaaagtatgccatgggatgaccatttagaactgtttttcaatgaagcagcagaatcataattattgtaaaagaccaaaggatatttggatgaatttgaatgcttaatttatataagtgaactcc

SEQ ID NO: 12548 - DNA, 432 bp, Glycine max
  Clone ID: jC-gmle01810063a09d1
aggacttacggcaccggcgcctaataaaaaaaatgtggacactttggctaaccaggttttttgttaccactgcggagtgccacttatataaaataaagctttcacttgcattcaaattttcgttcgttcttcaacataaattatgagattgctgctcgcttgaaaaacagctctttttggccctcggatgggatacttctgggggcacatgagggccgactcctcatacttggtccggctacaattgaacatgggtggaatgtttggctggagtggacaatcagggttgggatccgagagcagtgagcaaatatgcctaaggaccctggagagggctagggacgggctccagtgcttggtgagaatggtaagaaatctactggcactgctgcagatgtatggggggcacaccataggccgaagggccacctt

SEQ ID NO: 12549 - DNA, 550 bp, Glycine max
  unsure at all n locations
  Clone ID: jC-gmle01810063a10a1
catcaatcaaactactttcaactcttacccaccaaaccaaacccaccaaaccaccaccatcaagatgcgtttctccaccattgccaccgctgtcatcgccgccggcgttgccaacgcccaggtcgactccatcatctcccgtgtcacctctgccgtaggcggtgtcccctctgacatcggctccgtcgtcagctccatcacctctgacattggctccggtgttgcatccatcaccagcgacgccgcctctggtgcttcatctgtcgcctcttccatcgagagcgacgcctcctctgtcctcagcagccttgcatctgaggcctccaccgctactggctcgcgcgcctctgagatcgcatctgctaccagcgctatcgccagccgtgctagctctgctaagtctgctgccagctctgccgncgncagcgctactggtgccgncgactacaacaacgtccccgncatgggtgccgtcgctggtggtctcctcgccatcgctggtctcttggtagcagctcgacctgcagggctttcttcgactncggacatg

SEQ ID NO: 12550 - DNA, 486 bp, Glycine max
  Clone ID: jC-gmle01810063a10d1
cattgaaataacttattataagtttgtagaccgactggatattctccagtattgccgagaaccattcctatcccgcaaatgtctcataagagacgaagcgtgttcagctcgtggctgatgtcgctagctgatgaaagaaactgtcgaaagagacttttcatgtccggagtcgaaggaagcccttgcaggtcgagctgcttacaagagaccagcgatggcgaggagaccaccagcgacggcacccatggcggggacgttgttgtagtcggcggcaccagtagcgctggcggcggcagagctggcagcagacttagcagagctagcacggctggcgatagcgctggtagcagatgcgatctcagaggcgcgcgagccagtagcggtggaggcctcagatgcaaggctgctgaggacagaggaggcgtcgctctcgatggaagaggcgacagatgaagcaccacaggcggcgtcgctggtgatggatgc

SEQ ID NO: 12551 - DNA, 476 bp, Glycine max
  Clone ID: jC-gmle01810063a11a1
catctttgccttctgcatgttggttctctgtaaacagatactgcaaaagaagaataatattgaatatttggttgggttgaatccctgggttgaagcgttgcagacatcacggctattctaagagtgtctcgctctctcattcatgtcccaactgtacgacggaggacaggttgcgtaactgccaccaacccttcgccgcacggtgggcgtggtgctttgccttctgaaggtggtagcccttcagacttgctcttcttagctggtggtggttctgctgtcttctagcttcttcttaactcttttttctttttactacttttaagctaccttgttttcaaaataacaaaaacaaacactttcttacttcataagatcaccttttcttcatcttctacttctccttcactaaaatgatgctcaaaatcaagagggttcccactgtcgtttccaacttccaaaaagacgacgctgcagac

SEQ ID NO: 12552 - DNA, 496 bp, Glycine max
  Clone ID: jC-gmle01810063a11d1
acagcaagtgaaaactttcatccttaagaactacaactacaaggacaaacagttacctgaatttattatttctcgcagcatgaaagccacgatagacagtcaagtcaagcattatgatacatcagaccccaaaataccaacaacactactcagctgagcagttattatatcgtactttcacatgaaagtgtcataaaggcagataaaagcatatacattcaacacacacgaccataaggctcaagcacaaggcaatagtatgacttaaacggtgacacatttcagcaattattcttaaaacactgcagattttctgaatttgttcaaaatacaagagccttgttactgtagaaccacacattcttgtgaaccagccaccaccaccacaagtagggtgttcgcttgtgctgactgcatcaacttcttttttgacactttgaacattgacatcctccaattcaccacagccaatggcttcaaaaacaagatcattgac

SEQ ID NO: 12553 - DNA, 553 bp, Glycine max
  Clone ID: jC-gmle01810063a12a1
caacaacttcaccaacactaactcaacccgacacacacccacacaaaaaaaaatgtccctcctttcctccggtggcttcttcggccgcagaagaaacgacccgccaccccaccaacccacgtgggaccactaccaggcccaggaccatcaccaccctctgggagtttcccagccccaccacccaccccccttcatgtccttccccagtgactcctcgccggtgctcaacaccgccctcatagagtggaaggagaccccggaggcgcacgtttacaatgcgcacctcccgggctacaagcgcaacgacgtgcgcgtggaggtcgacgacgaccgggtgctctgcatcgtgtgcgggaagagcgtcgagaaggaggagcagaggggaggctggcaccgcgtcgagctctccagtggacagttcgttcagcgcctcactttgcctgagaattccatggtggatcatgttaaggcctatatggataacggggtgctcactatcacggttcctaaacaccacagaggggtcaataaccgtgttagaaacattaacatc

SEQ ID NO: 12554 - DNA, 486 bp, Glycine max
  Clone ID: jC-gmle01810063a12d1
aagacagaatttccattatatataatactacatatatatgtatattaattccctcaatacaccaaagcagtgtcaattaattagtttgcctctgcaaatttcatattgggaactgtttgttataagggtaatccctcaaactaattattgatctaatacatggaatatatatagttgaaacttgaaaggaggcaaaagtctagacttggacgcataacttttgttactattatttatttatctagacaaccgtgtttcttatgcaaagatagcggttagctaggtttcaattctttcatttcatgagacacacaacaacaacactcacggacgagaagagatgttaatgtttctaacacggttattgacccctctgtggtgtttaggaaccgtgatagtgagcaccccgttatccatataggccttaacatgatccaccatggaattctcagcaaagtgaggcgcttgacgaactgtccactggag

SEQ ID NO: 12555 - DNA, 383 bp, Glycine max
  Clone ID: jC-gmle01810063b01d1
ataaaaaaacggggtgttcttattaaaaaaaattaattgggataaggttgccggtaacgtttcctaaaaaaaatgacacccggttgacagtggtaaaatattcccccctcctattttgaaaaatgatgtctcttgttgttggaaaccccccccctgaaagggccttaaactgtctctttagcttgaaccgcgaattttaaaaaaaacaccccggctctgcgggattgcttggtcaaaaaaaaaaaaagaatggttaaatcagcagggtcgtgggcccttcccattcgagggaagggccccccaccgggggacaggctttcctcccccccaagtggcccccccctttgaagggctatgaacgggtttgctatttttttaatccc

SEQ ID NO: 12556 - DNA, 285 bp, Glycine max
  Clone ID: jC-gmle01810063b02a1
tgactcataaggctcacttgactactgcaatgacaacttagattagagtttggttaagcatctgttatggcaatgtactttacagaatgtgaattatcttgtgtatccaaatccaacttactgggactagctttatgcacaaactatctgacatagatctcatatcaacacaagtggattcgccatccatactggagaactcacttcttactctaatcatcgagcgtgaccttcgcaaaaacattcccgtcatcaggatgtcatctcaggactgcgatatgatgg

SEQ ID NO: 12557 - DNA, 385 bp, Glycine max
  Clone ID: jC-gmle01810063b02d1
gggaaaaaccaaccaacaattcgggggggggggaaacccaaaaaaattcccattttttgaaaaccctggggattacccttttcttccccaaacccccattttaaaaccctcaaaaggcccccaggccccccttgttttcccccaaccccaaaaccaaccttacaaaccccggcctgcccccgttttaattttccctcggggcccccaaaccaaaaaaactgccccccgctttacaagggagcgaatgggaaaaccccggggttcccccccctataacccttgggggaaaaccccctttcccccgggggggtaacaccgaaaaggcccccaccggtccccctttccaaaaaatttcccacccccacgccccacgggccccccccgg

SEQ ID NO: 12558 - DNA, 89 bp, Glycine max
  Clone ID: jC-gmle01810063b03a1
aacaggaggaaccaggaactagtttatgtgctacacggagttgctcagggtctcttaacgggtaccacactctcactgatgctagtcac

SEQ ID NO: 12559 - DNA, 436 bp, Glycine max
  Clone ID: jC-gmle01810063b03d1
aattcgagcaaagtgagatagacatgcgatcttaatcattattactgatggttaaagcggggcgcattattacgattcgcttcaatatgatgctatgatctagcgatgtctgatcgatatctgtgaacagagatacacaacatttctggacatgatattctcacgcgaattacaataacttgagctcatttaatacgtcggaccaacccaacttgggacttttttaatgatccaatgactgttatttttatgcgtctaagcatgacggggggggatggaccaaagaccatattctggtggcatttttgcgccccttggatgagacgcgcaaggtgcctgaccacacatgttattaggaacatccattacgaaggtggcattctgaccgcaactgtcttccaatgaattatgtatgagccaatgtgggacggcattt

SEQ ID NO: 12560 - DNA, 421 bp, Glycine max
  Clone ID: jC-gmle01810063b04a1
cttggaccttcctcttgagatcttcttcaaccttcagagtgagaaaacacattcagaaaccacgttactctcttcttcttcttcttctactttgtctctctctcgaggtcattagcaagtattcaccatggaggcaccatcttccaccacacccaacgacccaacaaaaccttgcaacacttgcaccacccttagtctggaggccggcccggcccaagcgagcccactccgaaaaatgtttgccgtggcgaccatcaccgccggcatacagttcgggtgggctctgcagctctatcttctaaccccctacgttcagctgttaggagtcccccacgcggcggcctccttcatctggctctgcgggcccatctgcggactcgaggtacagaccatagtgggctactacagcgaccactgtacc

SEQ ID NO: 12561 - DNA, 592 bp, Glycine max
  unsure at all n locations
  Clone ID: jC-gmle01810063b04d1
gcggcacccaccatgaaagccggcaagttgccaccaccaaacaaagcatcccaaggaccacttaatgtagacaccaccatctgtggcaccacaattgcaagattgaggactcccaaagataaaccttggcctgctcctgaagcgctgcagtatattgatgctagagcaaatggaacactgaaagtaatcgcaagaggaactccgagaaccccaaagaaaaccatggacccaaccaccaccccttcggaggggtgacccacggcggcgggattcatcttgcgctggtgctccgccaccttggtgatcaccaccgtcattccgaacccaattgccagaataaagttcacaatcgcccacagcctcttcactcccccaaccatcttccccaacggctccaccgccagcgacatgaagcccaaaacgacggcgtttaccatcagccctagcgacccaacgcgcactccattggcgtacgcgtnctccctcacttgaccaccgtacacctcgcgccccatccaatcggtgtcgaacaaaaagtaagggaaccaccccacccagttcacagctgtcaccagcatcagcatccacatcg

SEQ ID NO: 12562 - DNA, 387 bp, Glycine max
  Clone ID: jC-gmle01810063b05a1
atttacatattctagtcataggtcatgatgaaacagtcaaggccatcattcgggctgatcagatagctcgaatagtactagaacgcattgagcaatctaatgccgacttaataattgttggtacaactgccgtactgaaagttggcgagggcatagcttggattgaaggctacgatgaatccataggaagctgtgatacgggtagacgtgaagggatctatgggcagggacactgatttcgaactcattgatgtcagctgctggatatatgggtgacactgagaggaggcaataggccaatgcagttcaggcgacgacgttgcactgctgaaatgcctgatgataatgataaagcgcatcctgatgtgtatgacatgacgctaccaa

SEQ ID NO: 12563 - DNA, 421 bp, Glycine max
  Clone ID: jC-gmle01810063b05d1
acgacataaagaccatttactgttatgcagggataaaaataatacataatagaaaaaccaggggaatcatacaaactccttctgataatgagggagtgaaacattagaagccaaaaaaagaccagaaactgtgctgatacctacctctgacacaaaaagagtttcatctgttctcgataagctcctggcaaccggactaccgttttcccaaagaaggtttggtttaaaggcataaaacatgaggagggctgccaagtattgcataaaaaacttcgggtccattgacgagataaacatactttgactatggctaaagcataataagaacattgcgttagcaaataaaccgcattatacaggaagcgcacgtggcgaggatctgagggctactgtgttaccattgcgcacaatcgcagtacca

SEQ ID NO: 12564 - DNA, 582 bp, Glycine max
  Clone ID: jC-gmle01810063b06a1
gtggagtagaacacattcattcaattgcaattttttataatttcatatatcctccaatattgctggtggttagcactcacaagagacaggctcaactaccagacaaattttccattcccggcatctcctccaaacctacgtaccccagataccctaaattcgattcatacacataacacaacacaacctcgttcctttgctgaccaactcggttgttgtttttttctttcactttcacctatggttatggcttctttgattcagttttccccaactcccctctcctctgttcccatcactacccgtttcacccggacccacaagtctcgccttcgttgctccttagatgctaatgtttccgacatgagcgttaacgcgccaaaagggttgtttcctccggaaccagaacattatcgaggaccgaagctgaaagtggcaattattggagctggacttgcaggcatgtcaactgcagtggaactcttggatcaaggacacgaggtggatatatatgagtcaaggcctttttatggaagcaaagttggtcttttggtgacaaggtgggatcacattgaaatggga

SEQ ID NO: 12565 - DNA, 450 bp, Glycine max
  Clone ID: jC-gmle01810063b06d1
gggataggaatcacaatttatagaccccggattttacaactataaacaacactacttgcttcgaaacaatcagttctgaaattatttttggattgaatatacatttgaaaaatgttgcatggaaaaagaacgagctagcttcatgtcaacgtgaccaccttgtggaaatttatcatactaggctcaattcatctttagtatttgatattggtaaggcggctttaaactcatcatcgagctttttccgcaatgccactaatccttcccctgcatcacaaatataggccgaagcttgtctgccagacaagggtgcaccttccatgctggctatgtagtcctgctttgtgtaagatccagcaagaaagaaattcttcactggcgtcttttgatcaggtctatatggatctttaccaggtccctcacgggacaaagattggccaattttaacaa

SEQ ID NO: 12566 - DNA, 561 bp, Glycine max
  Clone ID: jC-gmle01810063b07a1
ctcgacgccgtcgccggcggtctctcctactacctattcggctttgcattcgccttcggcggcccctccaacggcttcatcggccgcccaaacttccgcctacgagattacccgatgggctcctctatctccagctgcttcctctaccagttggtcttagccatcgccgacgcaagaatcaccatctctcccttcggcgactacagcttcttcctctaccagtgggccttcgccatcgccgccgcaggaatcaccagcggctccatcgccgagagaacacagttcgtggcttaccttatctactcttctttcttaaccggtttcgtttaccccatcgtttcgcattggttctggtcctcagacggttgggccagcgcgactcgtagccacggaaatgttttattcgggtctggagtcatcgacttcgcgggctcaggcgttgatcacatggttggcgggatagcggtcctgtggggggctttaattgaaggcccgagaatctggcggctcgatcgttcgggcccgtcagttgctttacgtggtcacagcgcgtctttagtt

SEQ ID NO: 12567 - DNA, 357 bp, Glycine max
  Clone ID: jC-gmle01810063b07d1
gcattaatgcatttagtatatatagtatatcactatataccaactaatcagggtacaattacaagcaagttattctgcagcaggatacaaactaacgtgacaacagccgaccaaactagtcttggaaatcaaagatgaaaataataaaccaagccaacaaacattttaaaatgtacagcaaatctagaagacattgcctaaatgttgacccccacgcattaatttttatactacatatatgcatccctcgtgtcttgctggtgtatggttttgactaggctagctttgcccatagctatgtgcaggtacgaaactaaaaaacgcttgaaaatcataaaccacattttgattaaactt

SEQ ID NO: 12568 - DNA, 436 bp, Glycine max
  Clone ID: jC-gmle01810063b08a1
atcactttcaactaccaagtccctaggacattagacccaaggatcaaactcttggtcagacttcctatatgtcaccgttctcgtcctctagctgccgagaactcgcgatcgttattactctatcccgacatactctctgtgatcatcatgcctgtctggccctgctgccactgcagataacttcgatggcgcactcacttgtgctgagagaacaaaactctctgctgccatgtctgatatatactgtccatactatattgacgatcggtgaagctgctcattcctctgacaccgctggagacagagtcggggaactctcacttcctaatggagaactatatgctgggtactttcttggaacattccagacgcgcaggttgagtatcgtatggacagatgcttgagtatatgaaggtgagtggtgactaaggatgag

SEQ ID NO: 12569 - DNA, 403 bp, Glycine max
  Clone ID: jC-gmle01810063b08d1
ataaaattctttcaaaacaaaaatgaccctggggcacctttatattagagacatacacttttatggcgaatatacagcctgcacataaggaggcaatgacaccctgtacacactttacgtacaaaccaactggttgcatacaccccccaaaccttatgtcggcattatatggggagggaacacttgttgaataaaagccaggaagcgactctagttcaaagactggtccaccccctgacatcatgctgatgcatacctaccaaattcgaaatcccgaaaaactttcttaggcatgtacgactcgcgcaatacttaaatcttaccggggttgagatcagcatatgaagcctgattggacatttgatctaactctattccatgaatgggctgtgccgtaccgggg

SEQ ID NO: 12570 - DNA, 375 bp, Glycine max
  Clone ID: jC-gmle01810063b09a1
gtcatggttctcttttagctaacctgattgggaatctggctttccctttgatcttgattggaggattgttccttctctcgagacgatccggagggatgggaggtcctggtgggcccggatttcctctttgcttttggtcaatccaaagccaagtttcaaatggaaccgaacaccggagtgacatttgatgatgttgctggggtggatgaagccaagcaggactttatggaggttgtggagtttctaaagaagcctgagaggttcactgctgttggggctcgcataccgaaaggagttcttcttggtggtcctccaggaccgggaagacacttgtagccaaggctattggctggtgaagctggtgttccatttttc

SEQ ID NO: 12571 - DNA, 404 bp, Glycine max
  Clone ID: jC-gmle01810063b09d1
aaagggttattaaagttacactgtattatagacgtaaagaaactagtaatttttacacttaattctcttttatatatactctctgggggcatttgtcaacactacaaaaatgaaaaagtaagggagaaactttaatcattcacaaatatggagcaggctgtagagggcattctgttttctaagataatacatattaaagatgttacatataggctattcaaacaggggctggtactggagttgaaggagggacacggttttcaactggaatttcagcaaactcagacaatatagcacggaattcatctccgggcagggtctccttctccagaaggacttcgacaatcttgtcaatcgcctcacgggtggtccttatatggcctagtgcaatttcatatgcttca

SEQ ID NO: 12572 - DNA, 527 bp, Glycine max
  Clone ID: jC-gmle01810063b10a1
cgttcctggatcgttcttctctgtggcggagacatgttggacggtcgttcctgcgttgttccgaggatgttttccggcacttgccaggcagagaacgattggtcttacatgaagtgcttgctggagttggacatcaagaatggcaagcgccctatggagattgatgatgttgaggaggatgagccccaccagccaaggaagtgtactaagaagttggattcttgccatagagttgaaatggctcgaatttcgtttcaacgtcaatctattgaggccaaggattctgttgttccccctatggatcaggagaccattgagccactgagtgtttgtcaaggagttgttgaagaagatggagctttgaccgaccagctattggatgagaaagaacaggaggttgatggttatttgatggattttggtgaccatcaatctgataaacagcagcaggctcagacgggggattcatcagatttcggtgctcaactatctgatgatgatcaattgcagcatgatgatgagaattt

SEQ ID NO: 12573 - DNA, 401 bp, Glycine max
  Clone ID: jC-gmle01810063b10d1
gggggaaaaaaaaattccaaaaatttttttttccttcccccccggaatttttttaaaaaaaacaaattcccctgggggtttttaaaaacccttaaaaaaaaaaccccccgcccccaggggggggggggccccccatttttaaaatttttttttgggcccgggaaccccaagtttgaaaaatccccccccatgggaaagggggggggacccccctttaaggggacccaaagggggggggggttttttcccctcaggggggaaaaaaaaaccccaaaagggggccgagggggccccccccaaaaaaattttggggggaatgggaaaaaaataaaaagttgggcccccttctcccccccctttgggagaaaaaacctcaaaaaaaaatggggggggaaaacccc

SEQ ID NO: 12574 - DNA, 447 bp, Glycine max
  Clone ID: jC-gmle01810063b11a1
aatggccatggttgagctctggtggattacgtgctttctctaactactgttttccacacttaacgaaccagaacacagtgagaaagacataatggcggtggagtacacatgctgctcaacggccttcttcgttcacatactggtcatcgtgctgctcgtgcttttcgcgggcctcatgtcgggcctcaccttgggcctcatgtcgctcagcctcgttgatcttgaagttcttgctaagtctggtactactgaggatcgtaaacacgctgagaagatattaccagttgtcataaaccaacatttattgctatgtactctgctaattcgcaatgctgcagtcatggagacacttcctatttttcttgatggccttgttactgcatggggcgctatcctaatttgtgtgacattaattctcttagttggtgagattataccccaatcagt

SEQ ID NO: 12575 - DNA, 519 bp, Glycine max
  Clone ID: jC-gmle01810063b11d1
catacaatacacgtaggtatcaattaatcaaaagaaaggaaaacgcgcgcgcactaaaaaacaaaccatgatttgctgccttgctggtatgcgtcattgcgatagagacacgcatgtacatctcaaaaacagctgtctggtccctgcatttcatcaacgataatggcttacacgttccaaatcacaactcagatctctatacagcaggtttcaaccctaaaccgcattatctatttaattatttgtaaggtgcaaacaagaaatatgaacatggaaggttttatggaaaaaaagccactgctatgagtcttcaaaatgatgatctgtctcatgaaagatctcctcctgtgaaagctcttcaatgacatcttccatggtaataattccaacggcttcttcttcttcagggagctttggaaggggacttccatctatctccaaaatatccgagtacatattttttgaccattgtctgctccgagaacacctatttgatgactggtttgtatttggaaagct

SEQ ID NO: 12576 - DNA, 401 bp, Glycine max
  Clone ID: jC-gmle01810063b12a1
cgacaaatggcgatggcactggcgcttcgcaggctttcatcttcaatagacaagcctctgcgccctctcttcaatgccggatgcctctactacaagccggctatgcctgatgaagctgtttacgacgaggagcgacccggtggtacatggccggcgcaggagtatgctccactggaggtcgcggatcctgagattgctgatgttagtgagcttgagaaagctaggcgctggcaggggctagagttgataccggcagagaatgatcacctctgtgggtgtgatgcaagcggctggatcggttatgaccagcagatacagtgaggggtaccctggtgcaagatattatggcggaaatgagtctattgacatggctgaaacactgtgcacaaagcgtgccctag

SEQ ID NO: 12577 - DNA, 288 bp, Glycine max
  Clone ID: jC-gmle01810063b12d1
ttttttttttttttttttttttggcttaaacaatacttaatgttttttatttaagtttatttatttggtgtttaaacattttttacatcacacaaagaggggtaaagagcgttcacagtaattcaataccgtacacacatttacaccacaagtttggggggctggggaaacagaaattagcatacaaaataggtgcaccgaaggagggataaagaaatgatttgcaaaaaccaaaagaagcctttatgatactgcggatatcaaacctaaaggggagtctcccctttc

SEQ ID NO: 12578 - DNA, 493 bp, Glycine max
  Clone ID: jC-gmle01810063c01a1
actttttccacccacaaacacgtaactactattccaaactccggcatggccactgccaccgccgtcgccgacacgtcatactttttcggcacccgtctaaacaacgttaacacgacaaccttaaacaacgggagattccacgcgctcttgaacttcggcaaaaagaagacggcgccgaagtcgccgccgaagaaaaaggaagtgaaagtgaaaccctccggagaccggttggtgtggttcccgaatgcggagccgccggagtggctcgatggaagcatgatcggcgaccgcgggttcgacccgttcgggttcgcgaagcccgcggagtacctgcagttcgacctggactcgctggaccagaacctcgcgaagaacatcgccggcgatgtgatcggaaccagggtggaggtcgccgaggttaagccgacggccgttcagccctactcggaggttttcgggattcagaggttccgtgagtgcgaactcatttatg

SEQ ID NO: 12579 - DNA, 486 bp, Glycine max
  Clone ID: jC-gmle01810063c01d1
acaacagagtacaaacatacatacataattatacgtagcagttttcatcatcttttgggtgtacagaaaagaattaataaaattagatgaggatgtggataacttaaccgaggagaatgagaacaaggttgaaagttttcatttataaagttatattatattggtatatgatgtcacttgttgaaggtagcaagaaaactgattgggccttttcctgtcacagcagcttgaattgcaaagatgaggaagaccaccatggctaagcgagaatgcttgatctcagcaagttgaagtctggctttttcttcagggtcgttggccaaacccagaggatcaaagaacctgccacctgggtacaaccttttctctgggtcaagttctgcatttctttgaaactctatgtaccctatcactatcacctcaatccagatcagtgtggtcaatgaaaatggaagaggaagtcccaggtaagatgatccttccact

SEQ ID NO: 12580 - DNA, 558 bp, Glycine max
  unsure at all n locations
  Clone ID: jC-gmle01810063c02a1
ttaataatagaacacaagtagttaattcaataacaacgttttcaaaaattcacttctccttcaacgaggaaagcagcgtttcctgtttttgagttgtcgcattttgagacggcttaaaggcatgggagacattgaagaacaaaccatctgacatagatctcatattaacagaagtggatttgccatcaatatctggattctcacttcttactttaatcatggagcatgacatttgcaaaaacattcccgtcataatgatgtcttctcatgattccgttagcatggtactcaaatgcatgttaaaaggtgcagctgattttcttataaaacctgttcgcaggaatgagctaagaaacttgaggcagcatgtatggagaaggcacgccataagcaggcctnctcaaaattttacactaccagagattgaaattggttttgctgcaaaaaaccatgctgcaagcaatgactctagtggttctgtggcttctacagcaaataatggtgaatgcatcgagaaaacaagtgaggctcaagatatatcgcagctgaagaggtctt

SEQ ID NO: 12581 - DNA, 429 bp, Glycine max
  Clone ID: jC-gmle01810063c02d1
gggggggaaaccaaaaaagggtggcgggaaaaaaaaaaaaaaaaatttttttttttaaaaaacaagcgttcgcgcctattaaagatggggcccctttttttgtttttaatcaaaaaaggtttttccccggggaaaaaaaaaattttaaaaaaaacctccaaaaagctttccatccttctttttaaaaaacccccctttttacaggcccaaaaaaaatttttccaccgcttagggggaaaattattttcccaaaaaaaattaacccttcaggtaatccttgggggaaaaggggaatttaatttggggggccccctgttttttaatggtgaagggatcttggaaaaaaaaaattttgggaacccccccccccatttggttctgggagaaaaatttgggcttggggaaaaaattggctttttacccgggggg

SEQ ID NO: 12582 - DNA, 579 bp, Glycine max
  Clone ID: jC-gmle01810063c03a1
caccttttcaaccgttcactccttcttctgcgtcaccgtcaccatcataatcaccatcccttaccttattcttcttctgtaccatccctctccccattatctcgctctcgtgtcttgtcctctactcctttctccatggcttctgattcccctttccctgtcaccgctcaaaacatcaaccccaaggttctgaaatgtgagtatgctgttagaggagaggctgtcacacttgcccagaatttgcaaaaggatgtacaggccaatccaggttctcacccatttgatgagatactttactgcaacattggaaatcctcagtctctgggccagcagccaataacttttttccgagaggttcttgcattatgtgaccatccagctatatcgtacaaaagtgaaacacagggtttgttcagtactgatgcaatacagcgagcatggcagattgtggatcagattcctgggagagcaactggtgcctatagccatagtcagggtgtcaagggctagcgtgatacattagctgctggaattgagagcgtatggtttcctgccattctgatgactttcatgactgat

SEQ ID NO: 12583 - DNA, 512 bp, Glycine max
  Clone ID: jC-gmle01810063c03d1
attcgattaaaaagagatttatataggacctaatacaagtataagaatggagaaaatcaaatatcctttcaagtcttgcatattcaaaatgcaactataaggagttgacaaatttattcctgaaaacaaaagagactattttctctaactacaaaatccatcctcatcaaatatcaattgggtacccttaaattgacggataaaattcaagtaggacttagtcacggaactcatccatgaatttttcatggaactcagtcaagcgggtgacgatggccggaatcttttcttctggaggcaatatggtgcacctaaaatgccatgtgccaggaacctgtccaaaaccagaaccaggaacaacaacgactcctgtggcattaagcaagcgtttgcaatagaagttatcaggtgttgcatttgcagcctctgcagctttgatagccttttcggacaggcgaatttgggggaacaggtacattgccccttctgctttgtgcatgttacaccctcta

SEQ ID NO: 12584 - DNA, 507 bp, Glycine max
  Clone ID: jC-gmle01810063c04a1
tggaaacaggcatagcatgctacactcgcgggcctttcttgcctagtgtttcttccaagcactctccaccttccatttctccatctttcggcttgaggagtctgaaatcaagctctttatttggagaatcgctaagagtggcctccaaatcaacaataaaggtttcaaagacaaagaatacttcactcgtgaccagatgtgaaattggtgacagtctcgaagaattcctcacaagagcaacaccagataaggggttgatcaggttgctggtgtccatgggagaagcattgataacaatttccttcaaagcgaagactgcttcaagcggtggaacacaatgcgataacacttatggggatgagcagcttgcagtggatttgctagctaatcagcttctttctgaggccttaaattactctcatttctgcaagtatgcttgctctgaagaaaatcctgagctctaggacatgggacgtccagttgaaggtggacttaaggggtgcattg

SEQ ID NO: 12585 - DNA, 600 bp, Glycine max
  unsure at all n locations
  Clone ID: jC-gmle01810063c04d1
gttattatagtgattaacagaaatatgtgactaaattgcaggtacttgtctgaagatatagcatatatctttttttctaaaagcagataaaatagacaatgaattgcaggtttaacagattaagcagctgctccaacagctacaccatccttgagcctggatttaccatacagggtttcttcaaaccggatgatctcattcttggatccataagcaacttgagttctctcatcaatgttagtgatgactttgtctagcacagactgatgaccatcactgctgtaacctccggctttttcaatcaagaaccccaacggagctacctcaaacaacagtctcagcttggctttggctgatggtgatgtcacattggtgaagatgcctttttcttttacaataatctggttgacatctggcaccattcctcccgtgtatctcaatgtgtacttttcattgacatagtaatcgatcaacttagcataatcggngttgtcagatgtggctctcaaatttcctggggagaacaattttccttcaccaatttctgtggtctctttgacatgctgccattttccttcatcaagcagaagaaattcatgg

SEQ ID NO: 12586 - DNA, 549 bp, Glycine max
  Clone ID: jC-gmle01810063c05d1
acgccataatgatcatttacagtaatgctgggatattaatattacatcatagtcaaaccagtggaaacatacaaacacccccagcttccgacggaatagttcattggtgccaaagttataccgaatacggcgctgattttcaccttccccacaaatcctttttcagtttttccctatatccccctggtaaccccgctaccctttttctgaatttgatttgctttataggcaaaaaacatgatgaggcctaccaggtattccattaaaaactttaggtacattgacaagtaaaacatactatgactatggtttaaacaaattaagtacatagtattagcaaattaaccgcattatacaggaagcgtctctggcaaggattcgggggctccgctgctaccattgagcacaatcacattaccatcagaatcaacatccactataacagagtcgcccttcttgatctctctggcaagcatcttctcagccatgctgtcctccaaaagtcgcattatggctcttcttagaggtctagctccataactagggtta

SEQ ID NO: 12587 - DNA, 550 bp, Glycine max
  Clone ID: jC-gmle01810063c06a1
tgaatgatctcaagtttaaaattcatgctcatgatccttcaaattctggagatattcaaaaagagcttcgaaagtctctgttatggttgagggatgaggtccgaaatcttccctgtacatataaatgtcggcatgatgctgctgctgacctaatccatatttatgcttataccaagtacttctttagaatacggaattatcaaaccattacatcaccacctgtctatatcagtccgcttgacttaggtcccaagtacactaacaagttgggagcagaatttcaggagtatcgaaagatatatggtgaaaattattgtttaggacagctgatattttggcataaccagagtaatgcagatccagatcgtaacctggctagagccagcaggggttgcttgtctttaccagacaccagttccttttatgccaaggctcagaagccatcacggcattgtgtttatggtccaaggaccgttagatctatgctggctagaatggagaggcagccgcagagatcttggcccaaagaccggatatggtcattcaaaag

SEQ ID NO: 12588 - DNA, 436 bp, Glycine max
  Clone ID: jC-gmle01810063c06d1
gggaaataacctttcttttttttttcttcctaactttcatttaaaattacataagggttaaacaatgccctacaatcaaatgaattacaaatcaatgggcaaaaaaactggtccccaagaatgactgaaaagcggtccaaggaatgacgcttttggattttaataattacatacctccctccccccacgctaaaacaggcaggcaggtctgaatgaggaaccgctcctccatatctataaattatcgaggggtttttgaccaaaattccccaaaccatgcaaaaatttaacgatcccacatgggttggaatatgggaggtctgtgcttcaaccaatgaaccatctccctgtccagtggagagttattaactacagcatttaacattgggctaccaaagaatttcggagaacttttgaatgaccatatccggtcttt

SEQ ID NO: 12589 - DNA, 575 bp, Glycine max
  unsure at all n locations
  Clone ID: jC-gmle01810063c07a1
ctctctctgttttctctctctcgtctcacttgaaactccacaacccaattttcttttcctatgacccaattccaaatccaaatcaccaattctaattccattcttcaggagttgaattgaattcgtgatgaagagggaccacaaagatagctgcggcggcggcggcgccgccggagggactgtgaagggtgagtgttcctcaatgcagtcaaacgggaaggcgaagatgtgggaggaagagcaacagcagcagcagcagcaacaacagcaacaacaacaacaggggatggacgagttgctggcggcgttggggtacaaggttcgtgcttccgacatggctgacgtggcacagaagctggagcagttggagatggtcatgggttgtgcccaggaagacggaatttcccacctggcctncgacaccgttcattacgaccctacagatctctattcctgggtccaaagcatgttaaccgaactcaaccccgaacccaacaacaacctcgatccatcttctttcttgatcgacaacaacaacaacatcatcaacagcacagcccctgttttcaacgacg

SEQ ID NO: 12590 - DNA, 499 bp, Glycine max
  Clone ID: jC-gmle01810063c07d1
aaacaaattatataataataataatttagagaaaggaaaacaaaacactaaagaggagaaacggtaattatgagagcacaattacaaattacagtctttctttgggttttctttttacttttttttttttttttggtcacccctctcatttatttatcctcttgctgcctggaaggctcactgactcggtcactgactcagttcactggaacaagtccaattaatctatagttttacattcactgagtcaagccactagactcgctggaggagggaagcttccaagcggaggtagcgatgagtggcctagtgtgccagccaagcatgaggcagccgttattctcctcaaccctatacccatcaccgcctgcgaatagagcaagtagcatactcgcttgcttgaatgcgttggacccgagatgaaccgggtcgaacccggccgagtccaatctccccctccactgagtcaaagtctcgtgccgctcgacccggtccgggc

SEQ ID NO: 12591 - DNA, 548 bp, Glycine max
  Clone ID: jC-gmle01810063c08a1
ttcactttcaactttcaagtcaaaaggacaatagtttcaaggatcaaactcttggtaagatttcctatatgtaacccttcttgtcttctagctgttgagaatttgggatagttataactctataaggaaatactccctttgatcattatgcatgtctggccctgtggccacagttgataatttggatggagcactttcttgtgcagagagaacaaaatctcttgatgccatttctgaaatagactgtttatctatatttacaatcggtgaagctgctcattcctctgaagttgctggatttagagtaggggaactctcacttcctaatggagaatcatattctgggtcctttcttggtaacattccagagggtcagggtaagtatgtatggtcagatggttgtgtatatgagggtgagtggagacgagggatgagaaatggatatgggaaaatacaatggccttctggagtaatgtatgagggcgagttctcaggtggctatatccatggtacaggagcatatattggccctgatagtctgacctaca

SEQ ID NO: 12592 - DNA, 506 bp, Glycine max
  Clone ID: jC-gmle01810063c08d1
gaaaatagaaaagaccatttagcatatttatataaaatctaaacatattcaagtcaattatacagcatgcacaaaaggaggcaatgtgacaatgtacacactttctgaataaaccaactggttgaatttaacccccaaaccttatcttgccatttcatgtggggggaacattttctgaataaaatccaggaagcgacgcgagtagaatgttgggtccaccgccgagatagataatgaatcaaactgaatagatttgtatgcatgttcaatcttcttagtcatgttgtactcttgcaatatgtcaattataccaaggtaaagtacaacatcgtaagcctcatggaacatttgaacttcctcttttccaggaatctgctctgccctagcaggcatgttcacacctagctggatttgtagtcttgctgtaccgggtagaagtagatccacctcctcatccccagcagctcgcaatctgctacccctaatgtgtgaccctacaacaacac

SEQ ID NO: 12593 - DNA, 445 bp, Glycine max
  Clone ID: jC-gmle01810063c09a1
gttaaaagccttagccttccctacaactccaaacacaaagacatcatcatccatggctgcctccgtctccactgtcggagctgtcaacagagctcttttgaacctgaatggttctggagctggagcttcagctcccagttcagccttctttgggaccagcttgaagaaggttattgcctcaagggtccccaacagcaaggtttccggtggaagcttcaagattgttgctgtagaagagaagaaagagattgaagagacccagcagaccgacaaggacagatggaagggtcttgcctatgatatctcagacgaccaacaagacatcacaagaggaaagggtttggttgactcccttttccaagctccacaggatgctggaacttactatgcagtcatgagctcctacgagtacctcagcacttgacttcgccagtacttggacaac

SEQ ID NO: 12594 - DNA, 493 bp, Glycine max
  Clone ID: jC-gmle01810063c09d1
aagtggacactgtaactcaaaattatagaggaagacggtccaatatgaaaaatatagtaagatcatctcaaacttagcatcttctctttgcacctaagacattgagaatgctaagaatgttacacgcaagttccatcacaacttctagcacttggattagtacaacaaccttcacgaacagaaatatttacttgccaagtttgctttgcctccaattcaagactggaagaaagttcccctctgaatagcatcctcgttagcatttccaagagcagcctcgttcaagtacttgtcagccaattggactctcttgacattctcttgttcttggacaagcatgttaccatacagcaagagcttctccagagtcatcttgggctgctcaaaggttggaggtccatcttttgagttcacaagcttcttcccaacactgtcaacaccaacaccagaaatccacttcctcacttcatcatcatatactctggccctcagt

SEQ ID NO: 12595 - DNA, 391 bp, Glycine max
  Clone ID: jC-gmle01810063c10a1
ctcgatacggctactccagcatcgataagcagcgccagcgtctgcctgtgggctaggaccggaccgacatcctgtacctggacgagactcgcgccaccactatcatgcgtcggcgaaaccggaagcgggagaaccacatcaaatgacttatcgcatgatcgatgctgtgtgacccgtggaaaaatgttcccctgtaatgcactcaacctaagcgacgtgccgtacaagctgttgctcccagagctgccgaagaacagggagggaaactacgtgaagaggttggctacaccattaggatagaagatgttaccaaaccggatgtaactgtgctaaaggtcttaactgatggagagctgctaaagggaatgatgggacgagcctatgttgacca

SEQ ID NO: 12596 - DNA, 478 bp, Glycine max
  Clone ID: jC-gmle01810063c10d1
aaaaagccatatcccacgattgccttcaaagattacaaacaagaaaacgttctatagtatgcaatttcttaatgaaaaaataaaccttttcgttccttatccttaaacaataatgtaacatctataaaggcattgagacactaacagccctgaggactactgaggattaaaaaagacttccaataaccttgacaaagtatgcaatttacacacaggagagtgctaacaccactggttaatctgctctactcgaactgaagtttgtgatattttaacaatgactttccttcgcctcagacacaggtaatttgcccacagcaaatcagcgaataagatgattagattgcggcagctggtaaaagtgaggagcagcctccaatagacatgagggatctttggctatgacattacgcacgtattgtcgatcagtcgacacatgagaacttgtaataacccactttggatttactctgaatag

SEQ ID NO: 12597 - DNA, 515 bp, Glycine max
  Clone ID: jC-gmle01810063c11a1
cgcctcttcctcttacaaaccacagaacccacacacttgcatacatacccgcgtcttacacgcgtttcacccgcctcgcctctgccttacacatcactctcgcatacccttgacctctgatgacatcggcgccctagtcacctgctccgcccccaacaactagaccaccccagttccccccgcggcttcgtccgcccattgccacacaacatgccgtcagtattctggtcatcccaccgcaggtggagagtgagatattgggtcctcacagctgctgttctctacgtttcatattgtttcgtgcgcggcatgcccctcctcagcaccaacctaccgccctacaccggcaaacacgatgtcggcaccatcgacctcgaggtacctgtcaacccaccgcgacgcgtcgatgagaccatcaacacagagactggcgagctcgctttccaagtcgacactgtgctagtctctgtctttacccttctggaatggctccaaagcacaagagagcacctttg

SEQ ID NO: 12598 - DNA, 494 bp, Glycine max
  Clone ID: jC-gmle01810063c11d1
caaaacaaggactttagtcgacttgatgaactataaaccacacaccccgagctctaaaatgcagtcctttgagtaccatacacctcgcttgactgacaagacgtgacctccctgaacccattccaaaatcgtaaataatgatcatacaatcgtcgaacccaaccaaaaagaagaaagctatcaagccgtatacggcaccgcagtacggcggtctttctctatcccacaaaggccagggaaagcgcagaaagtacttggtgacacatgaacctgccagaactttgcaatgtccgggttatcgatctttctagtttcgccgttgtatgttgggtggctgacttcttccttgagtacttcccggcgatggccgtcgcccaagtatttcatgaatgtctcgctgactttgacgtattggtttacgccctcgtgggcgtcgatggtgctgccggtggtccaggagagcagcatgggctcgatgagtggagcgtccgtga

SEQ ID NO: 12599 - DNA, 526 bp, Glycine max
  Clone ID: jC-gmle01810063c12a1
ctcgtgagctcgagcgagaaatggcgatggcaatggcgcttcgcaggctttcatcttcaattgacaagcctctgcgccctctcttcaatgccggttccctctactacaagtcgtctttgcctgatgaagctgtttacgacaaggagcgacccggagttacatggccgaagcagttgaatgctccacttgaggtcgtggatcctgagattgctgatattattgagcttgagaaagctaggcaatggaaggggctagaattgataccgtcagagaatttcacctctgtgtctgtgatgcaagcggttggatcggttatgaccaacaaatacagtgaggggtaccctggtgcaagatattatggtggaaatgagtatattgacatggctgaaacactgtgccaaaagcgtgccctagaagcttttagattggatcccgctaaatggggagtgaacgtgcagcctctgtcagggtctcctgcaatttccacgtttacactgcattgcttaaacctcatgaaagaatcatg

SEQ ID NO: 12600 - DNA, 303 bp, Glycine max
  Clone ID: jC-gmle01810063c12d1
aaaccaaagggggggggttttttaatttttaggaaaaaccaccccttaccatgggtgggacccccattttagggggaggggtcaaaaaacatttgataaaaaaaattggtttttgaagcccttattaaaaatgcctttatacctttaaaaaaaacaaaaaaaaattttgggattcttacaaaaaaagggttttgacattgttttaaaaaaatgggggcgccccctcccctggaacaagaaaaccggccttggtaaaatgcttgcccaaaaaaccatggggtgacccaagggaaaaatttcttt

SEQ ID NO: 12601 - DNA, 480 bp, Glycine max
  unsure at all n locations
  Clone ID: jC-gmle01810063d01a1
gtcaccctcacccagatgaagatctacaccaacgtcattcgtctgtatggaatcactcgatgcggacacgggctttatatgggcgcgttggcgaagaaactgggaatgcaactgttgatcggagtcgagaacggtccggatcatcccgacaacaataattgatacggatgggagaaggtcacccttacccagataccgtcaagtacgtcatcgagaagatcaacgacttccgggcgctcgatcgatccctcggatacgccaatatccccgttggaaccgtcgaacctccaggcaccatgaccggaaatcccaccgtcatcgacgcatctgatgtggtcatcatcaacacatttggattctggggagggatcgcctacgatggatcatccaacgataccaccgtcatgaccgacgaattcaattcctactacaacagcatctncttcatgaagtcgagatatggaggcacgatgcgaaaca

SEQ ID NO: 12602 - DNA, 530 bp, Glycine max
  unsure at all n locations
  Clone ID: jC-gmle01810063d01d1
gtgatctcattttatttagcataggagcagcacgccactcggttgtcgtccgtgggattcaacttggttcccacatctcgtacatgtacaaatactcctccactctacaacagagccaacaagcaagacaacgccagaacagatgacgccatcatggtagacgcatcgctgacaaattggccctgttcatctgcgttgctcgagtgcttgacggcgtcgttgccggttccggttctggtgattgaatctccgtcgcacgactcgatctcgttggtagacgccttggaattctgggaattctgggaagtagacgtctgaggtgcagattcagaggtagacacgactggagatgcatccttggaatcggatgtcgatggcgtcggatcgtcgggagtagagttgggtgcagaggtagacgccggagcttcggtgctggaggtcgaggtcgatgtctacgtcgacgacgatgtcttgactgcggatcccgaattggaggccgaggtagacgtcnatgtcttggcgttggatgt

SEQ ID NO: 12603 - DNA, 550 bp, Glycine max
  Clone ID: jC-gmle01810063d02a1
aaaaaaataaaaaaaaacccattgatttcttggacctccatgacttctttgtctacccatcacacctatagccgaaagcaaaaatctctcggcctcctctgcaccaattttctgagtttgtacaacaaagaaggtgtgcgcctggtcggtctcgatgacgcagcttcgcggttaggtgtagaaagacgtcggatctacgacatcgttaatgttttagagagtgtgctaaccagaaaagctaagaatcagtatacttggaaaggattttgtgcaattgctgctgccttacaagaacttaaggatgaaggtttgaaagagaatcctggatcatttgatgactgcaatgacaatgcacaagtgtctgatgatgatgacgaggaagaagaaacatctcctaatattaacattgggagtcagagtgagaaggaagatcctgattacactgctactgtcaaattcttcaagaatgaaaacagtacggataaatctctcgcattgcttactcagaattttgtcaaagcttttgcctgctctaaatctgaaatgatct

SEQ ID NO: 12604 - DNA, 431 bp, Glycine max
  Clone ID: jC-gmle01810063d02d1
atgttaaggtattttttattgacctctttttggtattctcattacctttttcttctcaatattacccggtgccctattactctacgcttacatttgcccacacacacaggggcaggaatgatacaacagccgcggaggaggacaacccaccccccccgggggaaagactcctaaacctggacactgtttccgggaaaaaacccgccgcgggcggacaaaacctaaaccgagaggatatatttattttggcaaaccacccccaaatgccagaacaccccccagggggggggttccctgccttctaaaaaaaacaccgaaaatttggggggagtttcaagaaaacccaaacacatatgggggatttttccccccccgggctacatgccccaacaaattacctttcttcacaggggcgaaaaaaatactaagac

SEQ ID NO: 12605 - DNA, 518 bp, Glycine max
  Clone ID: jC-gmle01810063d03a1
attctcatcctcctctgtatctctctctccaccattgccatggatccttacaagcttcggccatgcagcgccttcaattctcccttctggactacaaattctggtgctcctgattggaacaacaacttctctttaaccgctggagctagaggtccaagtctgcttgaggattatcatcttgcggagaagctagcatactttgacagggaacgtatcccataacgtgttgtccatgccaggggagctagtgcaaagggtttctttgaggtcacacatgacatttctcacctgacatgtgcagatttccttcgagcccctggagttcagacgcctgtaattgatcgtcactcaactgtcattcatgagcgtggtagccctgaaaccttgagggaccctcgaggttttgccgtgaagttttacaccagagagggtaactatgaccttgttggaaacaaccttcccgtctcgttgtacgtgacggcatgaaatcttcagatatggttcatgctcttaaaccc

SEQ ID NO: 12606 - DNA, 494 bp, Glycine max
  Clone ID: jC-gmle01810063d03d1
cttaattaattggattacaaggaacacatagtccacaacaatagcagcgaaacatgccgaaaaggtatataaatataaatactaacacatacaaacggcatttattgagatagctcaacgagttgcatgcatggagttatgggtacacaactaaaattgcaagaaatggataagttctttcaaattgatcgaaaatcacatccttatcggactctttgcacgtctgcaactctaacaatcattctggggttggcaacaacattaaatatttggcctcatgctcagacgagatgctatcttttggcctagagaacggtcagcctgagaccagtaagatatccagacactgcggatttcatgggtgacccgtgggtcagataaagcatcaacccatcggcgattaaatctatcttgcctgtcaggtgcccaagatcggtatctgtctccgggctgcttaaaggtggtctccttctcaattgcacacttttcacgcc

SEQ ID NO: 12607 - DNA, 543 bp, Glycine max
  Clone ID: jC-gmle01810063d04a1
aaacaaagaaaaaaaaataacccttagccaacacaaccatcatggccacctctgctatgcagcaatcagcattcactggtcaaactgctctgaagcagctcaatgagttcgtccgcatgaccggtggcgccggcaaacgtcgcactaacatgcgccgcaccgtcaagagtgctcctgagagcatttggtatggccctgaccgtcccaagtacttgggtccattctgggagcagattccatcatacctgaccggagaattctgtggtgactacggatgggacactgctggattatcagctgacccggaaaccttcgccaggaaccgggagctggacgtgattcacagcagatgggcaatgcttggtgcccttggctgcaccttgccagagatccttgagaagaatggtgtcaaattcggcgaggccgtgtggttcaaggccggtgcacagatcttcttagagggaggccttgactacttgggcaacccaaacctgatccatgctcagagcatccttgctatctgggctgttcacgttgcgctca

SEQ ID NO: 12608 - DNA, 499 bp, Glycine max
  Clone ID: jC-gmle01810063d04d1
ctggggacccaaatttctaatatataaaaatataagggttctcatacaaatttttctgctacacaggggtagttacattagtgaaaatggagttaaacacaagggaactgcaaaagggagcagaagattgcattgcatgtaggcatcctcattgtccagggacaaagttagtggcataagcccaagcattgttggcaacaggatcagcaacgtggtcgtaaaggttctgaatagggcccttgccagtgacaatagcctgaacaaagaaaccaaacatggagaacatagccaagcgaccgttcttgagttccttgaccttcaactcagcgaatgcattagggtcatcagccagaccaagagggtcaaaagcaccaccagggtagattgggtcaagttcttcaccaagtggtcctccaccaactctgtaaccttcaacaaaccccatgagcacaacctgaacagcccaaatagcaaggatgctctgagcatggatcaggtt

SEQ ID NO: 12609 - DNA, 562 bp, Glycine max
  unsure at all n locations
  Clone ID: jC-gmle01810063d05a1
ggaaaatcacgacgacaacacaacacccaactggtctgtgactgaggcagcaatggtgctgatgacagcttcataagtataatgggcttggtcactgttacatggacaaattatctaaaaaagcgtattccactaagaataaggtttcttcataccttgaaaggtaatcaaataggccaaattttaatgtctccacctcttgcatctctggaccttcctgacatctggagtcctatttcttcatgtcggagtattccagcaatacataaaagctttaatgagcagactactgtagtgcttgatggaaagttgatatccatggaaatcagatcaaaaatagctgctaaggtaagacaaatgaagaaaggcctaggaaaagttcctggattagctgtaatcttagtgggccaaagaagggattctcaaacttacgttcgcaacaagataatggcctgtgaagaagttggaatcaagtctttggtgactgaattacccactgattgtgcagttacagatgttcaatatgccatcatgagatttaacanagatccatncattcatg

SEQ ID NO: 12610 - DNA, 412 bp, Glycine max
  Clone ID: jC-gmle01810063d05d1
cagcaagaatacgggctttacaaaaactgttaaaaaagaattccagtttttaaactcaatccatgctaaaaatgaccttgaacgaagtattgtagtttcaagaggggtaggggtcaactaaaattgagcatgcccttggcaaaatctaaggtattacatagtggcatagcaccggttatgggcccaaccccgccgggcacaggagtaataagggatgccacttttacggccttttaatagcatacgtcccctgggaggggataaccatcctcgcggccgggatcctaaaccggagttgtaccaacatcgatcacaggtgcaccaggttttatccagttcccacggaccaaattaggccctccagcagctgaaactacaatatcagcttttgaggtgatctgttcagggtttt

SEQ ID NO: 12611 - DNA, 538 bp, Glycine max
  unsure at all n locations
  Clone ID: jC-gmle01810063d06a1
gaaaaaagtgtaaatcaaatagaaatttataaaatctatgatcctagagtagttccctagacaaaatagaagtaagttcacaaacaagattcaagaataagattctctgatgaaaggagagaaatatgtctgaggatccgctgggtataaggagtgaaagaggggatcatttgtttcttgaacagttcttttaaaaaaattttctatcggatttttgagtcataggagattttatgatttatgacttggaggatttttaagaatagaaaggaataactacattgagttcatcgatttgccctagatatcaatagactcataaattattttttattcgaaaccaattaaaattaaaaaagaagggaaagtgtacgagaaaattatctctctctatatatagatagataaatgataaaagcctcgagggtccgtcccatccctgaaaatgctatgaggtgttgggaaatggttgaagtagttgaataggaggatcgctatgactatagctcttggtaaatttaccaaagatgnaaatgat

SEQ ID NO: 12612 - DNA, 448 bp, Glycine max
  Clone ID: jC-gmle01810063d06d1
caggctactcaagtctaaaccattcggaccccttaggggttttaaccaaggggcccccaaatcccaaaaacgcttagtttttcccccaaaaataactttctcctgggggggaacgcattaaatttttacctaaacctgtaggtccttgagcaaatcctacattacccccaaaacgttggtttttaactaaaaaagtaaatgcttgagcttgaaaagcttttggcccagggggcccgtaaaactcactaggataagcggtttttttaaaccagacaaagcaccaggcattaaacccaaaaccggataaggcccctaaactttaagataagtaagcttttccaaaccatacaagggcacgccgagcccatgcaaaaggtttggttaaaatttgccaaattcccccaagtttacaaatggaacccaaccatacatgcccccctttttattt

SEQ ID NO: 12613 - DNA, 537 bp, Glycine max
  Clone ID: jC-gmle01810063d07a1
cttctccctttttctctctgtctctctctctcggtctcgctcttcttctcatcaagcacagagttacagactcaccgatcttccgattctctttcgtcttggtttatgagctcgaaggagagacccactcttggtggcacgcggattaagacccgcaaacgaaatattgctgcgccgctggaccctgcagcattctcggatgcagtggtccagatttatttggataatgctggtgatctggaacttattgctaagagtattgaatcttcagaccttaacttttcaagatacggtgacaccttttttgaggctgctttcactgggggtcgtacacaacctggaactaccaagcctgatgagggggaccgccacccatactctataatagagtgtgagcctaagcgtgaagtcattttaccatctgtaatctacatacaaaagattttgcggcgaaggccatttctcatcaagaaccttgaaaatgttatgcggaaattccttcagtccttggaacttttcgaggaaaatgagaggaaa

SEQ ID NO: 12614 - DNA, 563 bp, Glycine max
  Clone ID: jC-gmle01810063d07d1
gtaccaccaatagaattagtcaagcactgaactcaaagtttcaacagggataagagtaccacccattattgaaataatcactcaaaatacagtaatgcacccgtataacatatcaaagtggcgtgcggaaaaacacacaggctccatgaatatgtcccgagagcacgatggaggaggaggaggagtcaaacacaacacaaatacaaattaaaagataatcagtactactaggcagaaccgaatttaagagaattcgagccaaatatcttagctaaatggtacaagagctgaaagacaaggtaatttcttcagccctgaacctccaccacacttactcctcctcttcagcctcctccagccaattaacaaagggttccagcgccttcacaaaggtttgcctgcccttggagtttgttccttttcggaaccaatgaagaatggtatcttcagccagcacatcctggtcataaagagatctaataatctcagggaacagcttcatcagtttagcatcctcatagcattgcatctgtactttgtacatcagctccagctcaagtttc

SEQ ID NO: 12615 - DNA, 545 bp, Glycine max
  Clone ID: jC-gmle01810063d08a1
gttgtattatggtatcattcgctgagtcggtcctagggttcgttcatttcgttgcgtttccgtaacttctctgcgtttttcttcattctctgaagctttcaattaagcttgatgacagaaaattccttctgtggaatcaacgggttggcggaatcgttgcaatgcaaaaattgcattgtttacttgtcaatcctacaattccttcaaagtatgattcagatctagatcgtcaactggatcgcatgtttgttgaatatggaaagtggttcattcaagatcagtctctcttcacatggcttctgtctactctttccgaatcggtgctttcgagagtgttgaattgtcaccatgggcatgaaatttgggacaaaagccacactcaatactacgccacacttaaggctaaggtgcggcaactcagatctgaactgaaaaccacaaagaaaggtaatcgttcaattgctgagtacacactccgtattcatgctttagtcgattccttgattgctataggagagacaatatctgatcaagaattgcttgat

SEQ ID NO: 12616 - DNA, 445 bp, Glycine max
  Clone ID: jC-gmle01810063d08d1
accaaaaaaaatccccctttttgaaattcccaaaggggagggcccccaatttttttacccctttaacaggttgaaagtggccctgtcccaggggcctttccccaaaaagggggtcccccaccttttcggacccagaccgaccaaaagcaaaaacccgggggttcccccctggggcgggaataggcaaatttgggagacttggacaaactttgggaacctggaacccccgccgccgaaaaaggggaacgcttttaaaactttacaaaccccccccctctagggggccctttaaaacaccccccataaggccccgggttttgccaaaaccaaaattggccgggaacccaaaccacaaggttttccgggggaaaaaaaaaaacacaaatttggttgcgagggtttgaagggcccccccctccttttttttatggaggggggggggggg

SEQ ID NO: 12617 - DNA, 531 bp, Glycine max
  unsure at all n locations
  Clone ID: jC-gmle01810063d09a1
aagtgcttgaataattgttcctgcatggcatataccaattcaaatataagtggaacaggtagtggctgtgtcatgtggtttggcgatttattagacatcaaattgtatccagcaccagaaagtgggcagcgtctatatataaggttgcctccttccgaattagattctatcaggcacaaggtgtctaaaataatgtatgcaacctccgttgctgcagctataggagttatacttgctatttattttctctacagaaggaaaatttatgagaaatcaatggccgaatataacaatgaaagttatgtgaatgatctggatctgccattgcttgatttgtcaataatcattgtagccacaaacaaattctcagagggaaacaagattggagaaggtggctttggatctgtatattggggaaaattagccagtgggctagaaattgctgtgaagagactctaaagaactcggatcaaggaatgagcgagttcgtaaacgaagtanaactgattgcagagttcacacagtaatctt

SEQ ID NO: 12618 - DNA, 575 bp, Glycine max
  Clone ID: jC-gmle01810063d09d1
ggtacttctcgtgcaaaatatccttcataccattcagcaatttcctttacaacaatatccacctatctcgttgattatcagcgagcagttaataaggttatggacatcgcattggttgaactacatgagcttgaatttgcttcaatagattccttcttcacaaaatgccctggctctttaggttcatccaattgcacctcatcactccccaacaagagaaccactgaggtcattgtaggcctatcctctgggtattgttgcacgcacaagagcccaatatggatgcaacgtaacacttcagacgcaatgcatgaatcctccatgtttgggtcaactatttgtaaagccatatcttttttccacaatgtccacacatgatcaacaaggtgaacaatttgctttccactagaacatctacttttcttcccacatataatctccaacagtaaaacaccaaagctgaagacgtcagattttatagaaaattgcccatcgatagcatattctggtgccatgtacccatatgttccaacaatgctatttgtatttccttcaatattctcttcttcaaagtt

SEQ ID NO: 12619 - DNA, 493 bp, Glycine max
  unsure at all n locations
  Clone ID: jC-gmle01810063d10a1
agattgttgacaccttccctggccaatccattgatttctttggtgcactgagggccagagtatatgatgacgaagtgaggaagtggatttctggtgttggtgttgacggcattgggaagaagcttgtgaactcaaaagatggacctccaacctttgagcagcccaagatgactctggagaagctcttgacgtatggtaacatgcttgtccaagaacaagagaatgtcaagagagtccaattggctgacaagtacttgaacgaggctgcacttggaaatgctaacgaggatgctattaacaggggaactttcttccaatcttgaattggaggcaaagcaaacttggcaagtaaatatttctgttcctgaaggttgtgctgatccaagtgctagaagttgtgatgggacttgcgtgtaacattcttagaattctcaatgtcttaggtgcaaagagaagatagccaggttgagatgattntactatatttttcata

SEQ ID NO: 12620 - DNA, 370 bp, Glycine max
  Clone ID: jC-gmle01810063d10d1
ggggaaaaaagggaaaggcccccaattttatttaggggggcccttttcccacaaattttggggggagcccgccccattaaaaaaaatttaaaaaaatttttaaaacgggggtttttttttttgcccccaaaaacttggaaattttaaaaagggtcccccccgggccccaaaaaatttttaacactggggaaaacacaacccttgaaaaaaaaaatttttacctggcaaggttgctttcccccccccttaaaggggggaaaaagctcccccggtaaaaacatccctgttggggattccaaaggcggcccttttaaagatccttgcagacaaaagggaccttttgaaatttttttgggccggggcaagcggg

SEQ ID NO: 12621 - DNA, 442 bp, Glycine max
  Clone ID: jC-gmle01810063d11d1
gcattaaacaaaattttcctaaacagatattcatagttccacatttttaaatgtgtttatgaggaaagccactgacaactgaatccatcaattatacctttatcacctaaaactcatttccagaaataaacgttatatattcaatgccaaatttaatctgacttattccatagctcattgatagatggaccaatacagaaaggatgaatgttggacttctacaacagccacatgagctccttcaaaggtttagaaaatcttcttaatttgctttagaaccaatcttactcttcgcaaacgacggcaagcagaaagctgcggtatgaatctcagagttgtaaaatttaagcggtcttactgacttctgactctcattttcatctatgggattcactggatgcttgaaatcaacaggtggtccctcagctgagcaaagcataaa

SEQ ID NO: 12622 - DNA, 464 bp, Glycine max
  Clone ID: jC-gmle01810063d12a1
gtttctgagagtcttactcgttttgtttttgcactctctaatctcttggagcgcgttgcagattaaatgattttgtatctttggttctcttttaggatcaatggattttagagatttagctcacaagttctctcgttgtattgttactgtaagtcttcagtttttcatatccttacttgccttggccttgagtcagatctgtttgcccgaaatttgatgttctttgaatttaagctctttatttctctcaattcaaatatcatgctgtcatagacacattgttagaccatacctattctttaataaactggtaatctatatccaaatgcgtgtaactaactgggtatattaactcaataaattacctattctgtaagataaataaattatgcttatgaaattttccatataacttgattctgttaacagggtccacgctagtgtatcaagtttcaatctaaatg

SEQ ID NO: 12623 - DNA, 463 bp, Glycine max
  unsure at all n locations
  Clone ID: jC-gmle01810063d12d1
accagatcaatccaccttttaaattaccagatcttaaaaaaaaaaaaaaattaacagttggtacaacccggtcatgacgtgcaattctatctctcatgcatgatgattgacacatttagagtaagtaaaaccactagtgagaaagccctttttccacaaatatatttagctagatatttttctattcttcacgcctatgctttgtgcttgtgcatttaactacctccaaattccttttctacgtaccataattttggtgcactttcgtgaagttgtaaatggctttcattaaggaaccatatctcaagaagttcaatgatcccatgtgtctgtaaaagcccacaaatatcagtcagaatctattcaaaggggggaaaacagaaaaaagaaactgtgtacaaaatggaacttcttactcggngctgttggtttgagtgtttctaagaaaatgtctttttaatta

SEQ ID NO: 12624 - DNA, 517 bp, Glycine max
  Clone ID: jC-gmle01810063e02a1
ctttcatttgcaaattgcaaattcagaacggaaaagcggattctgtctccatcctcagttcccttcctgaagatgttgccctcaaaattgcttcgctgcttcaggtgcgggatttgtgtgccttatgttgttgatcgaggttctggagggaactctgcttctcagattgcatttgggagtctcttgtcagaaacagatggcccttactctcttccttccatttcccttcttcttccactcattctcccaatttcaagaagtggaggaaattgtacttggagaggcaagtggaattgggacttagagcaaggtctgtcgtgaagtttctggaagcttgttctcgctctgagtcactcgagggtggtgactatctgaaagctgttgacaccttgattggtaccatgtatgggtttgaagacgtgcacaggttcttgttcaaccctaaatgaatgtgctgattaacttggctgggctacactattgcctcacaacccttgggattcccggtgataatctt

SEQ ID NO: 12625 - DNA, 513 bp, Glycine max
  Clone ID: jC-gmle01810063e02d1
acaacgagatatggagttcaaatataccacgaaaagaagataacgaacattatgaacttattattgtcttatctttgatgacaaactatacatgttaccgcagaattttacaaacaataactatacacatactaattcagatagatatcaatactttagtttatctccgtatagctattccaatctctgggtaatctggcaggaccaaggtgttgatggacgaccaaccacagagatctgaacacgtaaaacctcatgaacagtacctcggcgaagcactcccaaaacatgctcatcatcttctgttgccaaatctgccaaagaaacccaccgagaatgtgactcatccctcatgcggaagccatagtaccatctaccaactttccaccacttgatgcagacacgccgatcggagatctcatgagtccgaagggcttctacaagattatcacccggaatccccaaggttgtgaggcaatagtgtagcccaccaagttaatcagcacattcatt

SEQ ID NO: 12626 - DNA, 52 bp, Glycine max
  Clone ID: jC-gmle01810063e03a1
cttttattgtcctgtatatcaataatcattgcatcttatgaccttatttgtc

SEQ ID NO: 12627 - DNA, 53 bp, Glycine max
  Clone ID: jC-gmle01810063e03d1
ggacaaataagggcataagatgcaatgatttttgatatacaggacaataaaag

SEQ ID NO: 12628 - DNA, 509 bp, Glycine max
  Clone ID: jC-gmle01810063e04a1
ctcatgtatgcatgtctaatcatatttcgtccgcagtttctgtaaggatggaacaggttgtcgatccatttctttaaatctgctatgaaatttttgcttgtgagattttcatttctgtcggggggctggagtttggagaaattgatagttcaagtgcttgggatgtggagagtccatgattcacttgaggaggatatcatgttcgtgtgttaattcctcacaatgtttttgcagtgtggttgatataggctggtccgatgaacaataatgttgggaaagggaaaaaaggtttggcagaacaaaatcatatgttatttgacaaaaagagtctcgaaaatggagtagttaatggaggggtagcctctggatcatcaactgaagatgacacaagatttaataaggtggttgaagattgaaacaatggattgaggggtctgattcaaatgcatgggagcttgcagatttacaacaaccacctcaagagccagccgtatgctgggagagatttc

SEQ ID NO: 12629 - DNA, 384 bp, Glycine max
  Clone ID: jC-gmle01810063e04d1
ggaaagccaaaatgaaaaattttttttatttagagggtaacctttccaaagggaaccccttttttgggtccctttgggggtttaaagttcagaccaccctaacccgaattttgaacattggctaaaaattccaaatgaaagggcgggttttcccacaataaaaaaaaatttcaactccctaatcacagattcctttaaaaaaaacctccaagtttttttttgggggaacgggggaaaaaacttcccccattccaaaaacctaggggcggttaatggaacggaatcaaccaaaaaaggaccccccttttggctggggttttggaggaatggcaaaaaaattgcccccacccaccaggggggcacttggggaatattttttttttt

SEQ ID NO: 12630 - DNA, 508 bp, Glycine max
  unsure at all n locations
  Clone ID: jC-gmle01810063e05a1
ttcttctctctctctgggaattgaacttaattagaatgccggcttggtggaatagaaagtggagcaagagcaaggaggagcaggagcagccggaggaggaggatgaggaggaagagccacgtgccgcttttcagctgaatttcatgagcggtgagcgggacaagaacaagggtaggagttgtagtaagaagaagaccaagagcttcgacgacaaggtcaaaggggttccgttaccacttccctcgcatagtctcagcgatccaattcaatcatttggatctgtttcggtgtccggtggttccagcatcagctcctccacctcctatgacgatcatccaatttcgcctcccaacaccaacagaggacgagaggaggtgaagttcaatgtgaggtcaaaaagtccgggtcctgtgtcaagaggacctaccagtcctacctcaccgcttcatcaaaggttgcatgctttgagccttgactctcccacggngagtgagtgtcattcattacc

SEQ ID NO: 12631 - DNA, 553 bp, Glycine max
  Clone ID: jC-gmle01810063e05d1
gaaaattacttttttttattctgccatgaactatcattatacaacataaacgttactacaaacccagtaagcacattgcatttacaataatcaagaaattgttacaagcaaatatggtctccccaatccaatgcaccgagagcatagggccagaatcatttcttccgtcatctggttctcgtgtatatggttctcttgtataaagaatggaccagcagaatattttggatggtttgtgcttcagagtccaaattgaagttcaacctcagagggaaagaccacaaggtatactggggagatgtggaaatattttggttctatagctatttacaatcttaacttaaattagtctcattcttggagatccaccaggtggtgtattggctctgtatcgagatgtttcatgccaaggatcaagagcaaacgtggcatttgatgtcattggatatgaggatctgtcattcaaagtgtaactactttgtcccattgtggtgtaagctggatgaggaggagaaaaaaaacagctctgatgcattggctcataccttcgcaa

SEQ ID NO: 12632 - DNA, 541 bp, Glycine max
  Clone ID: jC-gmle01810063e06a1
ggatattacatgctcgactgctgctacttgcgaaaaagtgatgatcaaagcaagcccggtatctcaaatttttgtagctttctctctaccacttccgcgatgccatcctcaagggccacaccgatcgcttctgcgtcttgaacgccgacgtctgctgttcattccctctggaacaaatgttgcgtctgttcgaggagaaggacggcgaggctgtcattctcggcacccgcgtggccaacgatgctgcgaccaacttcggctgcatcgtcagcgacacccatagcaagcgtgttctgcactacgtggagaagccagagtctcacatctccaatctgatcaactgcggtgtctacctcttcagcaccgaagccttcttccccagcatcaagtccgccatgaagcgccgcgcagaccgtccacgtctgctctactacccctcctcagacaccctcgactcttcatacgttgcccgttccggacaagacaacgacgacgacggcgagaagaccgggtcatccgtctcgacaggacttctttctga

SEQ ID NO: 12633 - DNA, 374 bp, Glycine max
  Clone ID: jC-gmle01810063e06d1
aagaaaagggtatggggattcaggaatttacatgccccactggacattcttgggaaaaaagggtgatcaaaacaagcccgggatctctaaattttggagctttccctcttttccgaaacgcccttatttgccaaatttgggcgggataaagggattgtttacggagaggcagaaagcgtcccttttgtgccaacaggcttttgtgacttttaaaaccacaggggaatgcttccccccaaagggaaattcgggaccgcttacatgactatcccgttttgcacggcccttttcaaaccctggaacggcaataactcccggttttttacccaccccttggtggtatccgcgcacctcttgcccaaaaaccggaagct

SEQ ID NO: 12634 - DNA, 512 bp, Glycine max
  Clone ID: jC-gmle01810063e07a1
ctcggtgaagttgcctggaaatcccaaattgggtgaagggaagcccgagaatcaaaatcatgcaattgtatttacgcgtggaaatgcagtccaaacaattgacatgaatcaggataactattttgaggaagctttgaagatgaggaaccttcttgaagaatttcattctgatcatgggcttcgtcctccttctatacttggtgttagagaacatgtcttcaccggcagtgtctcatctctagcgtcatttatgtccaatcaagaaactagttttgtgactttagggcagcgagttttagcaaatccattgaaggtccgcatgcactatgggcatcctgatgtttttgatagaatattccacgtaacccgtggtggtatcagcaaggcttcccgtgttatcaacattagtgaagatatctattcaggattcaattcaaccttacgtcaaggaaatattacacatcatgaatatattcaggttggtaagggaagagatgttgggctcaatcaga

SEQ ID NO: 12635 - DNA, 539 bp, Glycine max
  Clone ID: jC-gmle01810063e07d1
caaaactgatagtgcattgcattaaacccaatactacatgacgatttaaatgacatacactagaaaattgatgatacaactattcacaatgctgacgatttttacagaaatctaggcttcctacaagaagatttaccgactcacccccgcaaaatttaaaagacaccatagattgtatctcgtttaggaacaaggcctgagccaaatacaactatatcccagtattgggattgttcccagctagaataagagaaatttctaaccctcggctaaaagcctggttaaacattaggcgagtttggaatgttgatacaaatgggaaccacgaaaagaaggcaatgggtacaaagatgagcattcccataccagcatcatagaggcgagcaattgatcgaacggatttccatagtccgagcctcttcatcaccggcttccaggcagcagcaattgacagaattccccaaccagtaggattgaaagccaacatagaagcaaatatgtcccgtaaagacagtttggtcaatataactgctacaact

SEQ ID NO: 12636 - DNA, 566 bp, Glycine max
  unsure at all n locations
  Clone ID: jC-gmle01810063e08a1
atcgaacagctcggtcgagggcaccctgtctaggaatttgggtgatgagatcagtcggaggttgcaggatgtgcagcctgttgttgatgaagaggaagaaggggaaggggatagctatgtcaagaccgtggtgactactcagcggacacggaaggtgggcagccgcaagccgtccaatacgaatccgcaagcttcggggaccgcctcggtgccgaccatacatgtcgacgaagaggtccgagagtacgccgacgccggaacgatcacggacgccgtcaggatcttgccattactcgaagaggagtcggcagaggaacaagccgaggccggaccatcgacgacatcctcacctcagataccacaagagaaccctccggcatataccgccaagccagatccggtcaatgagcaggaagtcctggatcgacatcatccgcgcaagcatggtcaagatatcgacgcggatgacgagtacgaagcgctcgtncaggcaacgggagtgaggtgtactgtgctggaagaggaagtgaagttgcggaaaagcgagaggaccaagcgcgggatcg

SEQ ID NO: 12637 - DNA, 508 bp, Glycine max
  Clone ID: jC-gmle01810063e08d1
gtagaatcgtgcatacatgcccggactacttcaaataaacagcataatcttcatcaatcgtcatgtcattactattcacccattcgccgccgcgaactctacgtcggcacccgcccaaccaaccccgccccagctccaagtgcccctgctagactcctcgctccattgggcaagaaaccttctatcgctcctgcagagtagacggtattgaacgagttgaagtatagggcgtctcgggggtgcaggctattacctgtccagagtgtggaagctgccaggacgccgattgcaagggtcaggccccaaggcaacatcttggctgaccacgcggagtgcaagctttttggaaccttgtaccggtcggaagcccgatccgagacgatcccgcgcttggtcctctccgctttccgcaactttaactgctcttccagcacagtacacctcactcccgttgcctggacgagcgcttcgtactcgtcatccgcgtcgatatcttgaccatgcttgc

SEQ ID NO: 12638 - DNA, 577 bp, Glycine max
  unsure at all n locations
  Clone ID: jC-gmle01810063e09a1
acaggtactgcagttgtgctagtcatgctggttacaacattgcttatgattttgatcatgatacttgtgtggcgctgccattggattctggtggtggtgttcaccggcttatcgttgattgtggaatgcacatacttctctgctgttctcttcaaagttgatcaaggtggatgggctcccctagcaattgctggagcatttcttctgatcatgtatgtctggcattatggctcagtgaaacgctacgagtttgagatgcatagtaaggtctcaatggcatggattctcgggcttggaccgagtttaggacttgttcgtgtcccgggaatagggttagtatacacagagcttgcaagtggagtaccccacatcttttcacatttcatcacaaacctaccagccatccattctgttgntgtttttgtatgtgtgaagtatcttcctgtctacactgtcccagaagacgaaagattcctttgtaagagactnggacccaagaacttccacatgtttcgttgcgtggcgcgatatggatacaaagatctgcacaagaaagatgaggattttgagaaaaagc

SEQ ID NO: 12639 - DNA, 559 bp, Glycine max
  unsure at all n locations
  Clone ID: jC-gmle01810063e09d1
gaacaacatagtgatgcatttggaacatcaaatgaataatgaatttcaggattcaacagaaattacccaaagtcattcttctgaagacattccctttggatagtacacactgcacaccataaggagttgttcatatgctacgctaagctcaactgtacacaaaatgactgtcacaaatgataaatcttacttatcttgggctcaagtggaacaattagtgtgatcaagatgtttataaactcaatcaatcaaaagcttttgaataatattaaaacaatattaacatatagatttcaatacatattttattattattaactattttaacatgcttttgattgaatgtgcctataaactcaatgttcacgcaagaattaccaagagaagaggagtagaggctatacatagaaaacctgaccaacatttaatagactctcatgaggaacattgaagatcacactattttccctgcatatcttcctgagaaatgcatatatataatcaacagctattttcttgtggaatcttgaatccctncttgccctgacaactgtgtttc

SEQ ID NO: 12640 - DNA, 496 bp, Glycine max
  Clone ID: jC-gmle01810063e10a1
ttcacctatgcttctcacaaggctgttgatgaatacaaggaggccaaggcgcttggagtggataccgttccggtcctcgttggccctgttacatacctgttgctctccaagcctgccaagggagttgagaaatccttttctctcctctctctccttcccaaggttcttgctgtctacaaggaagttattgctgaccttaaggcagctggtgcttcatggattcagtttgatgagcctacccttgtcttggaccttgagtctcacaagttgcaagcattcactgacgcatatgcagaacttgcgcctgctttgtctggtttgaatgttcttgttgagacctactttgctgacatccctgctgaggcatacaagaccctcacatctctgaatggcgtcactgcatatggatttgatttggtccgtggaaccaacactcttgatttgatcaaaggtggatttcccagcggaaaatacctctttgctggagtggttgatg

SEQ ID NO: 12641 - DNA, 478 bp, Glycine max
  Clone ID: jC-gmle01810063e10d1
aaaatgaaatgctaaattatttctttattccttaattggcacaaagtaaaaactggaatagtattgaatcgatctacaaggaagaaacaatgatgctaggttggacgatgtggttgttaagcacactgttcaactccttctgaaacctctccatggcctcagacggtaaacaaaccggtataaccaacccttcctctcctttagcattcttgaaaggtatgtaaaagctagcaacaccaggtatggctccaacccctcccttggcgggtcctccataaacagccttcccccacccaaactcaacgttttcaaacccagcacgagtcacatctgacacaacataggatctcacaacagtgaagtgaggccgtcccttggccaccattaaattcgccaccgagtgcatgtattcctcagtcacgtccgctttcgcttttctcaccaactcgacagcgtatcccaaaggattctcgcacag

SEQ ID NO: 12642 - DNA, 560 bp, Glycine max
  unsure at all n locations
  Clone ID: jC-gmle01810063e11a1
gcgcgacatacctcctgcctctggcacctaccactctagaccacactcgtgtttcctgactttacactcatatcttcatcttcgccaacatgttccaatcaacctccgcctaaacccctcttcccataaggaagacccgtacccacgtccagctcgacccggcttagccccttctaccaacaactacccaacccctccccacttttctggtcctacacaggtccagcttaattcggcccgtcatggcgtccactattcagttcccccctgctcaacagcaacaacaacaacaacaacaagaagctcaatcatccctgagcctaccaactgccaccacccggtgtcaggcctgtccttcccaataccttacttaggcgactctaatctgcctaagggcatatatcaacaggactttagtcacagcaaatcaacaagctctctcccagcgttgccaagggttctacctnccccacccacgagacatcgcgcaaagctaccgacttttgagtctagcatttctctcaaccaaaagacgacagacgttcgtcaaaataagacac

SEQ ID NO: 12643 - DNA, 317 bp, Glycine max
  Clone ID: jC-gmle01810063e11d1
cttgggggggccccaaaaaaaagccctcccgcccccacaaaaaaaaaagacccctttcaccaagggccccccccctaaaaccccggaatcccaaccataaaaaaaaggggggcccggggggccaagatcacccccactgtagggggggggggggggaaaaaaaaaacggggaaaaaaaaaaaaaaaacccccccttttcccatctgttacaaaaaccccgggactttcaactggatggcccccccccccccccaaaaccccgggaaaaaaattttttttctcctggccgggggccaaaaacccttatcccgcccccc

SEQ ID NO: 12644 - DNA, 483 bp, Glycine max
  unsure at all n locations
  Clone ID: jC-gmle01810063e12a1
gtcctctttactgtttcttgttgtgggaatttcaatggctctcactccatggctagctgaaggaggtcagctccttgcttcccgttttgagttacacgatgttcgaagtttattacctgtggaaagtgagacagatgatctgcaaaatcatatcattatttgtggatttgggcgagttgggcagatcattgcacaacttctttctgagcaacttattccttttgttgcactagatgtgagaagtgatagagtgacaattggacgttccctggatctccctgtgtactttggagatgctggtagtcgagaggtcctacacaaggttggggctgaaagggcaagtgctgctgcggtaactctagattcccctggagcaaattatagaacagtttgggctctgagcaagcacttcccaaacgtgaagactnttgttcgtgctcatgatgttgatcatggattaaatttagaaaaggctggagctac

SEQ ID NO: 12645 - DNA, 531 bp, Glycine max
  unsure at all n locations
  Clone ID: jC-gmle01810063e12d1
gataaaaaaaatggaaatatgacttcatattatacacgcttttcgaaatccaaagaatatgaaacaaaatcaatgttacataaaacaaggacaccatcctcagctgaaatttaaggatgattaatcaaatttttttatgcagatatatatatttctgtacatcatgatggaacatttactctgctgctatacaatttttcacttttctgttttcttttaccttccactttgtatatatggggcaatcttcatgtcgccagtttaccttcagagacttgagtatcatctgatgaatctggggaatgagatttggctttgctcgtagttctattatatccatatccaaaagaagttccatttgtttcggatagttcagtgagctcagaaagatggcgggatctgaattcatttatagtcgctgcaatctctgatgtaggaagtttagcctgagcaagcacggcagctgctagttgaagactnggttccaaggtctctgggacaacacagtagctccagcctttctaaattaat

SEQ ID NO: 12646 - DNA, 414 bp, Glycine max
  Clone ID: jC-gmle01810063f01a1
ctaggacagaaatcaagcattttttcgaactattctttgatgtcaaagtaatagctatgaatagtcatcgactcccggtaaagggtagaacagtacgacctattatgggacatacaatgcattacagacgtatgattattacgcttcaaccgggatatgctattccacctcttagaaagaacagaacttaaatcaaaatacttaatatcatggcgatacatacatacaaaacttctaccacaagcacacgcaatggagccgtagacagtctagtaaaatccaatccacgaaatcatttgatctatggacagcatcgttgtggtaaaggccgtaatgccagaggaatcattaccggagggcatcgagggggatgttatagacgtgtataccgtaaaattgattttcgacggattg

SEQ ID NO: 12647 - DNA, 480 bp, Glycine max
  Clone ID: jC-gmle01810063f02a1
ccgcgcccaatttctctgaaattttacggttccgagaaacctctcgcgcgcgtggtggcgctggccgtgaagagcctcggcgaaacggaggcggtggcggtgtcgccggaagatggccaatccggcggagaactgccgtcgggatccggcgtctacgccgtgtacgacacgaacggtgacgttcagttcatcggtttgtcgcggaacattgccgcgagcgtaggcgcgcactggaaatcggtgccggagctttgcggatccgtcaaggctggcgtagtggatgaaccatacagagtaactataacccaagcatggaagtcttggatggaagaatacatactggttagtgtgaaagttgcacctggcaatgaatcaagagatgccacttgggtcatgcagccacctaaactgtagcctgatctttgattaacgcccggtcaccacatgcaattgagcgtccctcttgagaacctgattgat

SEQ ID NO: 12648 - DNA, 527 bp, Glycine max
  Clone ID: jC-gmle01810063f02d1
gaatgaaaaagaaccattttgtactatgataaaaatcaaatatacataactaattttttcttttgtttcttttctccccttggatctaaaagattaattcatacaacagagttgaaatgaccttgaatgcattacacccttccctcactctccattctgtactcctatcccccaacttcaaaagaatgcctaaatgcaggtaacttgcacaattattttttgaacaagctagcaagttcacctttctcatacattgaggtcaatatatcacaacccccaaccagttcaccatccacaaaaatctgagggaatgtcggccaattgctgtattttttaagtgtttccctcaatccgtagttatactcttcatccagcacatttacactctcataatctactccttcattttcaagaatggctattactctctgtgagaatccacataatggtgcacttctagggcccttaatgaatgccactaccttgttctctctcaccaacgcatcaatgaggttctcaagagggac

SEQ ID NO: 12649 - DNA, 416 bp, Glycine max
  unsure at all n locations
  Clone ID: jC-gmle01810063f03a1
tcgaggcatgttatgcttcaaaggaggaaatttcaagagcaatcaagcctcttgtggaacagtactttcctgtggaaactcaaaatccacacaagtttgctgtactgtatgaggcacgggcaaatactggtgttgacaggatggaaatcatcgatgctgtggcaaagtcagttcctggaccccataaagttgatctaaaaaatcctgataaaactatagtagttgaaattgccaggactgtgtgcttgatcggggtcatcgagaaatacaaggaactttccaagtataatctgaggcagttaacatctcgtaaagactgagccttccaggcaacccgtatagatgtcgntcttgcagcattataatggcttaacggatttaggctttcccttaacttcatgttgatactctggtct

SEQ ID NO: 12650 - DNA, 371 bp, Glycine max
  Clone ID: jC-gmle01810063f03d1
ggccggggaaggggttcttttcccgtttgatttgggaaaacttgctaactacacttagacaaaggacttgctgcaaaaatcattatttaatcttcaccactttccaaaatgaccacagccgtcacagaccagagtttcaacctgaagttaaggggaaccctaaatcccttaagcccttttaacgctgcaagaaccacatttataccggttgcctggaaggctcaatctttaccagatgttaactgccccagattatacttggaaagatccttgtttttttcgaagaccccaatcaaacccacagtgctgggaatttcaactactatagttttatcaggattttttaaaacaactttatgggggccaagaac

SEQ ID NO: 12651 - DNA, 511 bp, Glycine max
  unsure at all n locations
  Clone ID: jC-gmle01810063f04a1
atctccttttaattattcactcaaccctttacactgggtgatgctaaataacatgctaccctctattggtggttgatgctgatactcctcatagtcacaaagtaggtggctagcagtagcatgtgagtgaaggagcctgcctgcagtttttttaatcgtactgtactatgtttgttatgtccacacgaacatgatgactccaaacttgaacttggaaatcgaaaatcattcagaaggcagcagccaagtggcttcaaatgtatccttgcatgaagcatctcatgatcttacaaagggcagcaccaccacttcctcctgtctcacaaaggatgaaactgatccaggtttcattacccttgacttgacactcaacttcaataattccggtgatggcgagttgaaagtctcgagtgatgctagcagtgaacgtggagctgtagctcctgcttcagcatcagcaacttcaagggttttctcttggtactactgcangagggaagttctatagctc

SEQ ID NO: 12652 - DNA, 509 bp, Glycine max
  unsure at all n locations
  Clone ID: jC-gmle01810063f04d1
aacaattaagtaaaagataccattaataatgtgagattaaaataagttcaagtcgccattggaaatacacatctcactgtacattgcacgccctattaattaataatttcatgtctgaagagaatgaaatcaaagactaaaaaatctcaagagaagtggtcgatacatacacataaaaactctgataattaaacccctcacaataaaaatgagtggttgaggaaatttggctggatgcaaagcaacggatgagtcagttcttagccacttatttattactttgtgaaggcctttgcttgtgtatgtatcgncattttcttaagccttaaacttaaagcttcaatgtgagatcaggagatgcagaagcttgtggtggaggaggcaccattggagctaaactagcatttgaactttgagcatgtcctacattaacatcaccagctccttgttggtctacctgtctgaaactgccaggccaaaagaatccaacatcatcatcttccatgaaa

SEQ ID NO: 12653 - DNA, 531 bp, Glycine max
  Clone ID: jC-gmle01810063f05a1
gaacctgtctagggtttctgtccattggaaattgcaaaatctgcatatgtaaacatgttcccttccactaattatacctcctcaggctcttaccctcgtttcccttcatcttcttcttccacttcaccctatccttcttttactctccttcatcctgaaaattcttcttccagcaacaacacctttcttcatgatccacttgctcttacctacataccctctcattaccatgctccaatcccagaaacactagccaattgggcagttgcagattgtgcaatactgaatcaggatctaggtggtgccctttatggcatcaccaagaaaccaatgaagaaagcaactaagaaagacaggcacagcaagattcatacttctcagggtttgagggacagaagggttaggctttccattgagatcgcacgcaagttctttgatcttcaagatatgttagggtttgacaaagccagcaacacccttgactggctcttcacaaagtccaagaaggcaattaaggagcttactcgaagc

SEQ ID NO: 12654 - DNA, 579 bp, Glycine max
  unsure at all n locations
  Clone ID: jC-gmle01810063f05d1
attgatcaaaaactaattatataaaaattgaaatcagctagcaaaagaaaggacggttcctgataaatatatttgacccttataatatcagccacacttaaaatattggtcagaaattatacacgaagcatccttttttgccaactgtcacatgcccttcttggctgatatagagcaacaacaaaaaatcagtacattgtagaaaggaaatataggacagaaaaagttacaggtagaaaaacacagaaagatgcctccatgaccatgatgtttcttagcaaaacactagagacaatcatcggataatactgaaagctaacatattagcttggatgaggattggtgcactcctcccaagattttccaaaaatttgaagccctgtagacagattcatgctggctattgcacaaaaggtggagcgtccattggcaccattattagcttcccaatttggagacaaattgnggaaggagtggtagtcactgttgtttacacttgcttccttagggatcacagcgttttgatgatgaatattggaagacatcanagtgtgtttcaactttcttctgatgacaatg

SEQ ID NO: 12655 - DNA, 562 bp, Glycine max
  unsure at all n locations
  Clone ID: jC-gmle01810063f06a1
ccttctcataaacaacgcgttttctcttctgcttcgtatctattctttgcttttggttttggttgattcaaggccttcacagcattcgttgcggcattttaatcgatttatccaagcaggactgaatgaactaatggagtctaaaggtgggaaaaagaagtctagtagtagtagtagtaaatcattgttctacgaagctcccctcggatacagcattgaagacgttagaccaaacggtggaatcaagaaattcagatctgctgcttactccaactgcgctcgcaaaccttcctgatatccatccagattgatagttcattgcatgcaaccatagttttattaggttttttcttctttgttttcaattaggtttttgctgctctccttcaaactccgtctttccgaatcctctctttgtgattgtgttctgttctgcttcctaccgcgatagtttctcttctgaagcatggccatggcggnttctgcaattggttttgaggtttcgagaagaggctggaaatatcctttttcagccgggactttttgctgaccctgagggaat

SEQ ID NO: 12656 - DNA, 584 bp, Glycine max
  Clone ID: jC-gmle01810063f06d1
gcacgcatacaaagtgatttattaaaatccattcgatgttcaaatggtaatagtagaacaataaaaggtccaaacgccctaacaatggtctaacataaaagggaaaaaacaccaaagaaaaacaatcactgtctggaaaaccggacttattttcgcaaggacataataaagacacttaagaaaactactcttcttcatcttcctctttccagcacttcagagttgatctaggtgaaccacagtcacaagtcttggcaaatttttggtagacaagagaaccacccattccaagcccttcgtggctcctctcttcgcgacagtatcccttaacatccagaaaacacgtctgatcaaacaacttgcttgcaccatccacatgaactgcaacagagaactcagttgggagaaaacatgccaataccctcttaaccatttcgttcagattcaccactttgaagtcatacccaacagtctcaaagcttgcataactgaaaccatcttctggggtaacatgaatggtagaaacagcagcaccttcaacagaagtcatttgataccacatggctcaaagtcaaagtcacaaa

SEQ ID NO: 12657 - DNA, 496 bp, Glycine max
  Clone ID: jC-gmle01810063f07a1
attgcagtgatcccaaaggggagaggaatggagttgggaaggaggatgaacaggaggtgagaaagaaggtactgcagaagcttgatgcttgctttggtgggtctctgttgaaagatgctaatcatgtgagattggacagggtttcggagttgctcatgttttacttatcctcgatgtgctatatatttggttttgattcgctgtgtggccctggcagttcgttcaagtccggtaaatttatttgggcttctgatgctgctggttgtttgaaccaattagaatctagatcgtttctggggaaattggctggtcttcacactgttgttttcgttcctctgaagtctggagtggtggagcttggttcgtttgaaatggtgcctgaagagcagggtgttgtggaaatggtcaggacagcatttggggaatccagtcctggacaggcaaaggtgttttcaaagaattttgggcatgagttaagcctgggggatacataatc

SEQ ID NO: 12658 - DNA, 415 bp, Glycine max
  Clone ID: jC-gmle01810063f07d1
gattgccgttatttatccttgtttgttttttaccagggaggacatttttaatccttccattgacggtagatggaatataggccagcttggttcatgcatccacatacaattaaatttttaaacaccttaaagacattacaaggggcattaacgaggacctgaacattttttaaaccggattccccttcacaaagtgctgctgtggaaaaacaatagcgcgtaaaaacatttttatggcagcccattaacgcgcaggacagggcgatcaaaacctggttgacaatctcagagggaccctccccatagatctgaccaagcagaccaatctaggagggggtggctcaaaacttgtttttatattgtagtagattaacgttccctgggtgagtttttaaggggaacgagggaatttttt

SEQ ID NO: 12659 - DNA, 591 bp, Glycine max
  unsure at all n locations
  Clone ID: jC-gmle01810063f08a1
ccactgtcactcagaccccaactgtaaccaaaaccaaaagtgttacccttagcaagactgatcctaccattatcacagtctgctaccttgccaccatcactgtcaacctcgcaaactttttactccctgtccccatttccatccaactcttcgtaaacagtatttcatgcatattcatcggtagttatagaggagccatcctccaccacactctccctgtggaagaacaaagcaagctcgaaagaatgtccagtaaagacgcctatatgttccctgtctatggatctggagtccttttcggtttatattgcctctacaaatatttcagcaaggatcttttaaacaagatcttgtccgttcacttcaccttctttggattcttcagcttgttacaactcatagcatatcatttagaaaaggttttccccgactgggaacaagttgtcatccataaggctttaagcattcccctncctgtcttgggcactaagaaattcgacttagtcgtcaagaagagtgaaatagttgctggtcttatctccacttctcctactgctctctacttcaccactaaatactggcttcttaaca

SEQ ID NO: 12660 - DNA, 493 bp, Glycine max
  Clone ID: jC-gmle01810063f08d1
ctcatgataaatgtttgaaacagtatacaaaacatagatttaacatttcatatactacataaactcacaacaatcaatatcaaactttacatatctaaaaacttatatattcttcgacatatatataaattattccttcttcttctcaacagcttcattctctttctcttggtcatcgctatattcaaagacagccttgatctcattctggaacaaagcgcacaacataacagcaccagtgcaaccaggaactaagaacagaagagcaggttgagcatgattgaagatagtcatagcatagaaggtagcaatgataccaagagcatatcctaccaagcaggaatagaaataagtggtcttgaccatcttgaagtccaacttttcaacttgtccttgtaattggttaacgatagtcttgtgtacatcatacttcaagcaaagggcaacaaagacaccaggaataacgatatctcctagtcccaacatagagaac

SEQ ID NO: 12661 - DNA, 496 bp, Glycine max
  unsure at all n locations
  Clone ID: jC-gmle01810063f09a1
ggcagaaagcaagctcatcctagagttttaaaaatggcagcagcctcctccatggctctctcttccccatccttggctggcaaggccgtgaagctgggcccatcagcccccgaagtcgggagggtcagcatgaggaagaccgtcaccaagcaggcctcctccggaagcccatggtacggcccagaccgcgtcaagtacttgggcccattctctggcgagcccccgtcctacctcactggcgagttcccaggtgactacggctgggacactgctgggctttcggccgacccagaaaccttcgccagaaaccgtgagctcgaagtgatccactccaggtgggccatgctcggggccttgggctgcgtcttccccgaactgttgtcccgcaacggggtcaagtttggagaagctgtgtgggtcaaggccgggtcccagatcttcagcgagggtgggctggactacttgggcaacccaagccctgtncacgcccagagca

SEQ ID NO: 12662 - DNA, 428 bp, Glycine max
  Clone ID: jC-gmle01810063f09d1
gaaacataatctttttgcattttattgatcaattaaacatatactcgttgttatgtgaggggcaactacacaagaattcttggataaaataaaaaaagtctgttcgttttgatgcccattcccatgagcaatattttgcatgggaaagccaaagtatcaactactgataacgttaggtagatgatgctcatgagggtcaaaaaccactttgagaaggactactactagcgcgggaagaacaattgttgatctccccacccagcgcatttattttggtgaggagaagcatttgctctgtctccaactgggttatatacccttcctgtgtatgctctaaactttgtaactcactcaaagttggggttaatccttaaagactttcatcctctattaatgatcgacaccttttcatgatctctctcatctgg

SEQ ID NO: 12663 - DNA, 569 bp, Glycine max
  Clone ID: jC-gmle01810063f10a1
ccttcatcacaacaaaaagaaagaaagaaacaaagatcgttcattgctttgtagtaagatcagatcatcaaaaatggttttgtcttggtcaagaaggaacgttttccgccgtgccaagaaggagaagtcacaaactcaattggaagtggaggttgtgattcccaaccactttcactgcccggtgagtctggagctgatgacagacccagtgactttatcaaccggcatcacctacgaccgtgtgagcattgagaagtggatcgagggagggaacagaacctgccccgtcaccaaccaggtgctgacaaccttcgacatcatccccaaccacgccattcgcaggatgattcaggattggtgtgtcgaaaatagttcttatgggattgatagaatccccacacctcgtattcctatctcggcatacgaggtttccgacacgtgtaccaggatcttgtcagcttgccagcgtggagatgacaagaggtgtcaggagttggtcgggaagattatgtttgcagtagagagagtgtgaggaacaagaagtgcatagttggtgctggtgctggtgc

SEQ ID NO: 12664 - DNA, 391 bp, Glycine max
  Clone ID: jC-gmle01810063f10d1
ccaaagaatgaattcaaagaatcaattgatgtgtgtatctttttacaggaaagaattgtggatcaataaattgacctacacagaaaaaaaaaagaataagtgaatctagttgccattcatcactaattaaaatggcttcttaagatgctcgaaattcaatgatgagtcagagcactccgctttgttcctgtaaccattcaacagtttacaacaaccacggtagcattctccttggggctctaataacacccaacctgcagaagaaccaaaagcttttgaaaaagcccaacttgaagcgcctcaatcagaatcccttactcccttttgtgacaaatcttcctaagattagacacagtaaaacctgaagcctatggtgacacactcaaaagct

SEQ ID NO: 12665 - DNA, 509 bp, Glycine max
  Clone ID: jC-gmle01810063f11a1
ttcacacactcgaagtcgtttaacgctaaacgacattacctccgcaaccggtgaacggcagaagaagtaaagcgagaaaaccgatattcgcactttaccgcacccagcgactgcgcgtggttttggcgaaaacttctagaacattcttccatggaggttatcagggttctagcggcggcgatcgtggtagcggtgcttgcggcggctcttccggcggacgccggcgacgacaaccgagtattcgcgccgtgcacggacacgcgagtgcagagatccgacggattcacgttcggaatcgcgttcgctccgaaggacaagttcttctacaacaacaacaacagcgttcagttgtcgccgtgcgacacgaggctctcgctctccagtgcgaactctcagatctccgtgttcagacccaaggtcgacgagatctcgctcctcaccgttaattcatcctccttcgtcgcggactcatatggctatatggttgcatttgctggccacagatatgc

SEQ ID NO: 12666 - DNA, 502 bp, Glycine max
  Clone ID: jC-gmle01810063f11d1
attaaaaacaactgttatataaatatacatgccatcattctggtttttcacaaatatattgataagagaagggttgggatgtggctaaagtaataacaagagcaaatcacaatggaatggtacagataaaactaaccaaagaactaaagggaattaaaaaaacttatcatactggctagtgagggaatctctcagatttgaataaagaccatagagtgaatactggcgaaggtttttcacttcataccaagagttgagaactgcaaggtgtctatctgtgccagagaatgccaattgtattcctatgctgcaatccacagttcctccatggctcttgcaagtggatgtttgtagtgcacaatcctgattgttgagacagacagctttcgagttgcttgagcatttagaacacccatctcttttccaatataaattttgcagcctgcccctcttaaactcaaggacaagagtaaaactggtaacagtatatgtgccgtttgca

SEQ ID NO: 12667 - DNA, 504 bp, Glycine max
  unsure at all n locations
  Clone ID: jC-gmle01810063f12a1
cttcaccaatttccccaggaagcagtgggatctcagctggaacgattgttgcaattgtggttccaattacggtcgctgtgcttatatttatagtcggaatttgtttcttgagtagaagagcaaggaagaagcagcagggttctgtaaaggaaggaaaaactgcgtatgacatccccaccgtggactccttgcaattcgatttcagcacaattgaagcggccacaaacaagttctctgccgataacaagttgggggaaggtggatttggtgaggtttacaagggcactctttcaagtggacaagtagtagctgtcaagagactctccaaaagctctggacaaggtggagaagaatttaagaatgaagtggtggtggttgccaagcttcaacatagaaatttagtcaggcttcttgggttttgcttgcaaggagaagagaagatacttgtttatgaatatgtgcccaacanaagtctcgactatattctctttgatcctgaaaagc

SEQ ID NO: 12668 - DNA, 463 bp, Glycine max
  Clone ID: jC-gmle01810063f12d1
gcataatacatatattttatttagttgaaaaataagcaactataatacaaagtgttccaaggtttcgtcatttaaaactaggagaaataagtacatggataataatacatattagaacctccaagcgatcaagcttatcgaggatccatttcgctaatcgacatgtcattcacagacattggtattgattgatcgaatggcagctcctttggcatgtttggatcagttccactgtggacgaaaaatgcaagctgcgtaggagttggtagagtaacagtgttactgtctagcataagaactattgttgccattgtgggtctggcagctggatcttcttggacacacaacaaaccaatgtggatgcctttgatgacttcattctgattataggattctcttaatatggggtccatcagtttcaaaggtgttccatccttccaaagttgccaagcatagctcaata

SEQ ID NO: 12669 - DNA, 593 bp, Glycine max
  Clone ID: jC-gmle01810063g01a1
gttgagccggttaaaacattgctttgagtattactaatgatgtggttacatgaatcgaacataaacaaatattagtcggctgtacctagccgcgaacccatcagctcatgctgctgcaagtttcgctgctacattttggacgtatgcaaattcagacacttcagcaaattctcctaggtgctcccaaggaggttttacaaatagacaaattggttcccctccaagcgttgcagctattgcagctgctactgtagcagctgcaactgcatggagggcagctcatggatcgcttcctatgcgtgctcctcttcatacttcttttgcctgtcctgcatcagtgactacagttccatcaatgaataccggtgaagcaccggctctgaaggcagagcaagacaaaactactctacaaaatcctcctcttcaagatcagatgctggatccataatactcggaagctcaacatgctcaacattcagcttcaaagtcaccagctgccattttatcagattctgagagtggagatgccaagctaaatacttcatcaaagctactgatcatgagacgaacaatacaatttctgagcaccttga

SEQ ID NO: 12670 - DNA, 426 bp, Glycine max
  Clone ID: jC-gmle01810063g01d1
ggctgaatgaaggatcataaattacttggtgttcatggctcaaacaatacttaagggttcttatctaaggctatttagcggggttttaaacccgctttaccctctttcaaagattgtaaaagagcgttcacagttatttaatacgggacacacatttaccccacaagtttcgggagctgcagaatttgaaataaacctcccattttggtccccccttggggggataaaaaaatgatttgccaaaaccaaagggggcctttatgttactgcatatatcgaacctcaagtcgaagtctcccctttcaaacgtatttttttacaaccttgctcttcaccttgattggtggttgctccaaccctattttccttggcctccatggaacattttttgtaggggttaaaacctgttcgatgagtcttaaactt

SEQ ID NO: 12671 - DNA, 494 bp, Glycine max
  Clone ID: jC-gmle01810063g02a1
gaacaacatcatgggaacaacttttatcaaagaagagggtctgtcaatgatcttgtgctcatctgttaccgccgcctaccgtgcctgtgcctgtatgggagctccattcaccgggctcaaatgcatggctgagctgcccactaggactaccaactttgacattacctgcatagctagcaccggcggaagagcacaatgcatgcaggtgtggccaccaattggcaagaagaagttcgagactctttcctacttgccagacctcgatgatgcccaattggcacaggaagtcgaataccttgtaaggaaaggatggattccttgcttggaattcgcgttggagcacgggttcgtgtaccgtgagcacaacaggtcacctgtatactatgatggacgctactggaccatgtggaagctgcctatgtttggctgcactgatgcttatcaagtgttgaaggagcttcagaggctaagactgcataccccaatggcttcat

SEQ ID NO: 12672 - DNA, 501 bp, Glycine max
  Clone ID: jC-gmle01810063g02d1
attcattagttctcatccattaatttccattgaagtccgaaaacagaaaccaaaaatacaggatgatgaaatctcataaagcaaaaacaaatgggaatgtagtttaagtacaacaaacaaagtggggtggctacagatgctttgcaaatttttcaatgacttataagcctgggggcttgtaggcgatgaagctgatgcactgcacttggcgaacgttgtcaaatccaatgatacggatgaagccattggggtatgcagtcttagcctcttgaagctccttcaacacctgagaagcatcagtgcagccaaacataggcagcttccacatggtccagtagcgtccatcatagtatccaggtgacctgttgtgctcacggtacacgaaaccgtgctccaactcgaattccaagcaaggaatccatcctttccttagaaggtattcgacttcctttgccaattgggcatcatcgaggtctggcaagtaggaaagagtctcgaact

SEQ ID NO: 12673 - DNA, 489 bp, Glycine max
  Clone ID: jC-gmle01810063g03a1
gtctaagactaatatacagcgttttcatataatcgatcgcttggcctatatgatgatgatcaccgaaatgccaaccatgaatccagatcgattcatatgcatgcgagccattgtgatatttatgaagttgcatgttgcagatggtgctcaagaccatgttatgtgcattgagactgagagggacgcactcatccaattcaaggctgcacttctggatccctatggcatgctctcttcttggaccacttctgattgctgccaatggcacgggattcggtgcaccaacctcaccgaccatgttctaatgctcgaccttcacggagtgaatcgctcttggagacatgcttattgcacggtcataggcagttgctcagatgctattgatgtcatggcagtcgtgaaagtgttcaagctgcatcacagatgatagctggtgccagcttgatgaggtggaaaatgcgaagagacacttctaatttggaggtgaga

SEQ ID NO: 12674 - DNA, 444 bp, Glycine max
  Clone ID: jC-gmle01810063g03d1
gacccaaaaatgaagaagcaataaccaaacctctcagttcccattgttatgaagattcatcaacttgatacaaaacaaccagttcagatttacatgccaaactacaaacaaaatgtttagaaattaataaggaaaataaactagatggatcacaatcacaattggctgcctaaagctctagaagccttccttaattctctctcggtcttcaaatgcaactgtgagagatgccttttcaccttcaaattaaaagtgtctctttgcattttccacctcaacaagctggcaccagctatcgtttgtgatgcaagttgaaaactttcacggctggcatgacataaatagcatctgagaaattgcttatgaacttgaaataagcatgtctacaagaacgattcaaaccgcggaggtcgagcattataacatgggccgtgaggttggtgc

SEQ ID NO: 12675 - DNA, 560 bp, Glycine max
  Clone ID: jC-gmle01810063g04a1
tccttctccaactcatgtgcttacacctagctatatcaaagcctgaaagttatttcacatgacatacacataaaagccatgcatataaattgagacacatctcatttgaccaccaatcaagacccatctgaatttcaaaaccttaattaagattttctcatttgctttgtacgtttaaatggcttctgcaccagccttaaaacgcacagattctgttgtagataatatgccggatgcattgaggcaaagccggtttcatttgaagaggtgcttcgctaagtccttggaaagggtggaggattttgaaactttatcattttgatggaagaaatggacctagtattgatgacaaaagcgaaagaagtcaagttttggagggcattcttggcttaatacttagctccacacagaaagctggtggagccacccatgatgccctttgcaataaggccttatccaggagtttgggaatttgtaaaagtgagttctgaagacctttctagtgaggctattacccccacagactacctcaaattcaaggaaagggtacaccatgaaaa

SEQ ID NO: 12676 - DNA, 589 bp, Glycine max
  unsure at all n locations
  Clone ID: jC-gmle01810063g04d1
cctcacatagggcattttaatgatcacataaaataattgttattattccacaacagcagagctgctccgtttaataataacaaaaaaaataaaatattaggggtatacatcagagaaatatcaatatccagagtgacaagatgcatcgtactaattgacctgcttcatggttgagacattaatttccaaataacctttgcaatctggaatgtgaacgtcccgtgctacgtgatttgagactcggctgcttgcccactggttgttgaggttcatcactaggaacaggtacagtcttaaccaaattcttgaatataagattatagaacatctgaatgtatctctgctttgcctccttttgttccttattcacttgtctccaaaaggtataaatgttccccatgtttaccatcttgtttgcataaatcttccaggtatagcattcgtttatgcgctgcaatccagctgcagaaatcacgttccattgtgattgattcatnttgcatttttcaaagaaatcagcaattttatggcttgattcatctccattgagggggtcaatgtggaagcccgagaccccatcaacaataat

SEQ ID NO: 12677 - DNA, 567 bp, Glycine max
  Clone ID: jC-gmle01810063g05a1
atcaaatacaagaatttatactctaccacacattaatcactaatgaaacagaattatacaagtatcatcagctggtcctgggtcatctttcaaaccgaaataaataattattaccaaactacaatatttgccatcctacataatgcctaatccacaagaaccatgcctacagctataaactgttagagagggtaataatctttatgtgataatacaagagaaatacaccctttccagaattatgctatcataatgcctcctctgctcattgtacaaagtaacaggtcctcatcactctcgatccattgattgagcatgtgagaaatggtggccagccccatcactttcaccgtcagaaagatcattaagttttgcaattgcatcaataagagcctgctcatgatccttcaatactttctttgctttctcaacttcaaggggatcagggtgatttgcactgaataccctctccaccttcttgattagtgtgtctgtgtgaagtatttgtatatcatcatgcaccttctttcctagggccatttgtgatgacaaaaaatcttttctgga

SEQ ID NO: 12678 - DNA, 562 bp, Glycine max
  unsure at all n locations
  Clone ID: jC-gmle01810063g05d1
gcgatctagaacctcttcggaagcggaatcgatcaatccctcacctcattgctgagatctgcaaactggctatggactacgaaccctacgacagtagcggaactgatgatgaccttccaccaacccatcaaaatagaatttccaggggaggaggaggacgtctggctgggaatgggagatctgctgttgcttcaattccttacccaaggatgtacggtgaaattgatatggagacccaaattcatcagcttgagcaagaagcatacagttcagttctaagagcttttaaagctcaagccgatgccattacttgggagaaagaaagtttgattacagagctgagaaaagaacttagattgtcaaatgaggagcacagagaacttctaggtcgggttaatgcagatgatgtgatacggaggataagggaatggagacaggcaggtggccatcagcctggtgtacttagtactggtcaaggtcttcatgattcaattcccagtcccacagtctctgcttctcgcanaaagcagaagattacaccatctgtaccaccatcacgatc

SEQ ID NO: 12679 - DNA, 557 bp, Glycine max
  Clone ID: jC-gmle01810063g06a1
caaagctttcagtaacatggctgttggttataacaacgtggatgttgatgctgcaaacaagtatggtgttgctgttggaaatactcctggagtgctcactgagacaacagctgagttggcagcttcattgtctttggcagctgctagaaggatagttgaggcagatgagttcatgagggcaggattatatgatggatggctacctcatctatttgttggaaacttgctcaagggacaaactgttggtgtaattggagctggtcgaattggatccgcttatgcaagaatgatggttgaagggttcaagatgaacctaatttactatgatctctaccagtccacacgactagaaaagtttatcacagcctatgctacattcttgaaagcaagtggtgaaacccccgtgacttggaaaagggcagcaaccatggatgaggtcctccaggaggcagatataattagtcttcatcctgtcttgggataaaccacttatcatctagtcaacaaggaaagactagctaagatgaagaaggaagcattcttataaactgcagtag

SEQ ID NO: 12680 - DNA, 526 bp, Glycine max
  Clone ID: jC-gmle01810063g06d1
gtagggacataaggtataacttcatttatgtttaattaatgtttgaaatactacaaacacatgatgctattattaacctgacagtctttatatgcacagtgccatcagcaccccacatacacaaaaaaaagaacagactagccacagagcccaactcaacagacaaaaattggtcatttgtgcaattgaaggcccttgtaggatagaaccatgtatgtttatagctttgaagttggcaaacccagggcttttgcattaacaatgcttggggatgcagctggtggttgagcattctcattgaggaatggttcaaccctattggcatcaaaccaaactgggtaccctttgatcttccccagcacgtttagagctgctagtgtagccattccctcacgagtccacttggaggcagatgcaatgtggggtaccacaatggcattcttcaactctgcaagcccgggtttcatgtagggctcttcctaaacacgtcaaggcctactcgaaacataggggttctgttttaaat

SEQ ID NO: 12681 - DNA, 539 bp, Glycine max
  Clone ID: jC-gmle01810063g07a1
gaagacatagaaaactttggttgtttagagaatacatagaaaaggaatgattctgggtttcttgatatctatcaagaaatcgaatattctggtcagagagaagccactgatgatgcatcgtataataaggagccaagtgaagtcattagagggactgaagctgatcctagttgtgaggaagtaaaagccgatgaggctggctagtccacagaaaccagcttaagctatgatccatatgaaactgtgaagttgaacaaaactcaggtagctgatacaactattgataatgacgaaactttgaacgtaaatccagaggttcattcatgtgatgtgcacgatgatacgatggtagcgagtaatgctttatttcaacatctagagaagatatgaagaaacagatcctgttcacgagacaaacgatttccatgagaaacataatgcaggtgagacttcttacttattcaaattgcccctgacttaatggggcggtcgatcaaatgcaatattttttgaaacagagaccttcaatgcatgcttca

SEQ ID NO: 12682 - DNA, 396 bp, Glycine max
  Clone ID: jC-gmle01810063g07d1
gaggaatggttttaaacaacaagctttatgagttatttctaagagggcagtttcttgagggatataccttttgctacaagccatatcagtccaaaagagggtgctagagtgtgcattactaagttgagtacagcacaaaccaagccatgtgggggaaaaaaagacatacgaccacattaactcgactcatgcgacactgtaagagggtgctctgtcgatcacaagcgagaacaatcaaatcttgcttattgaggctaaagtgacgtcttaaaaaacaggacacgtatcctccttcccacccccagcagatgaaaaccacaagcagtagatgagatgtatgaaactcgcccttcatgattgcgaacgttctctggctttagccataacagatcccgt

SEQ ID NO: 12683 - DNA, 563 bp, Glycine max
  Clone ID: jC-gmle01810063g08a1
aacagattcacattgccgccatttttgacattgaagaactttgaaggattggaccttggaaagatggacaaagctgatgactctggacttgcttcatatgtttctggtcaaattgatcgtactttaagctggaaggatgtgaagtggcttcaaacaatcaccaaactgccaattctggtgaagggtgtgctgactgctgaggacacaaggatagctatacaaagtggtgcagctggaattatagtgtccaatcatggagctagacaacttgactatgttccagccaccatatcagccttagaagaggttgtcaaagctgctgaaggtcgccttcctgtatttttggatggtggtgttcgccgtggaactgatgtcttcaaggcattagcactaggtgcctctggcatatttattggacgccctgtggtgttctccttggctgctgaaggagaggctggtgtaagaaacgtgctgcggatgctacgtgaggagtttgagctaaccatggccttgagtggttccacctcactcaaggatatcactcgtgatcacattgtcactga

SEQ ID NO: 12684 - DNA, 411 bp, Glycine max
  Clone ID: jC-gmle01810063g08d1
agacacacgagtctcatcatataatgcttaaaagaaattaagcgtggagtttttcaaatacaaccttaaatgagttctccgaataggaaaagaaaggaggttcatgaaacacatatagaactgcctcctccattgttctgtaccacattatacaaacttggcttaattgacgagcaaattttttataatattggcgatgcgcggggaacaatgcgagggtggtgccaatcagcgacaatgagatcactagtgatttccttgagtgaggtggtaccactcacggccatggttagcttatactactgacgtagcatccgtagtacgtttattacaccaggctgttcttcacaagtcgatgagaacaccacagggcgtgcaataaatatgccagaggctcctagagctaatgcc

SEQ ID NO: 12685 - DNA, 549 bp, Glycine max
  Clone ID: jC-gmle01810063g09a1
caagaactctccaaggatcctccttcccacgagattctttggtgggaaaaatccaagaggtttgaaatttgaaggcagggaagatggattatttcaatgcaccaggaagaaaccatctctttgttccagggccggttaacattccggaccagatcatccgggccatgaacagaaacaatgaggactaccgttctccagcaattccagctatgacaaaaactttgcttgaggatgtcaagaagattttcaagaccactactggaaccccatttctcatccctacaactggtactggtgcttgggagagtgctctcacaaacacactgtctcctggggatcgaattgtatcgttcctgattggccaattcagcttgctttggattgatcagcagcaacgcctgaagttcaatgttgatgttgttgagagtgaatggggccatggtgctaagcttgatgttctggaatcaaagattgcttcagatacttcacacactataaaggcaatttgcattgttcacattgagactgcaactggggtcaccaatgact

SEQ ID NO: 12686 - DNA, 585 bp, Glycine max
  Clone ID: jC-gmle01810063g09d1
acacaggacaataaaagaagcaatgcattaaagctgaaagtagaaagtacgttcatcttcaaaggagtgtaaaagagggtaatatatattttacagaatttctgaaagagcagaaaaaggaagtaaagacaagaatgatttgtgactcaaatcctggaagggatcataggaatagtgttctgtaagtatgcactggcagcagcaactccacttccaagctttacaggataacccacatctttgagtatcatctctacaccagctagacatcccaacagttgcaactcattcaagtggccaagatgtccaattctgaaaaccttcccagcaactttgttcagtccaagacctaagctcaaattgtatctcttgcatgccctcctaactatttcagtactatcaatgtaagcaggaacaagaacagcagtcacagtgtcactgtaccactctttcttttgggtgcaattcttcaaaccccatgcctctacagcaaagttggttgctttgcctaaacgactgtgccttgcgatcacattatcgagtccttcctcaaaaatcagatcaagagcagctctcagaccatac

SEQ ID NO: 12687 - DNA, 326 bp, Glycine max
  Clone ID: jC-gmle01810063g10a1
cgatgagaagtcagtcattccaagcttgacatccttgaccttctgaactacgtactccatgtcttccttcttggcttgaccgaaatccttgacagtatcgacttatgaggacttgatgtcgcgagctagattcgtggggtcgatagtaaacttctgataactacataatctgtcactacacgctaacaacatggaatactctaacactatcgtttcaactgctttcgtatacctatcactctcgattacacttaacaatcctatatcaaattgttatgatctaataatttcattgcttacaagacaattactcatttcttaatgag

SEQ ID NO: 12688 - DNA, 542 bp, Glycine max
  Clone ID: jC-gmle01810063g10d1
ccattctctaaagagacaaggttttatttgagacccacagaaggattaaacgatcttcgggccatcttttggaggagcccaacttaaactctgtgctttattcctatgaaggacgggaacattgttttttccaattctttataagctaacacttctcctatgatgccatagactagggtttgacatcctccgagccattgactcttgacatcttgagccatgtgcgctgcttggactgccaacttgagcgacttcttacagatacactttaggcggactcaaccattccaagcttgatcccccttgtttcttttagagctggtatatatagtgattggccccaaccaagtgtgcccagaaaacaatgccaccccggtaatttgggaagctcattccaagaacagatgcaatgtcaaggtctgatgctcgaataacaactccatcttctagaacacggcatgcctcattaactactgggaagagtatcatcttcacgatctcttggtcagtaacagatataggctttccattgggcataatat

SEQ ID NO: 12689 - DNA, 510 bp, Glycine max
  Clone ID: jC-gmle01810063g11a1
ctcacacacaccaatggaatcataacaagaaaaagataaacactccccagagttcaaagagcaagcactatttcctctgttgtgtcttttttcaatttgttttccctctctgtagcagcagcagcagtgatggaacgtgctcgcaggctagcaaaccgcgccattctgaggcgtctggtttcagaggcaaagcagcatcagaagaatgaatccgtgctgcactcttccaccacccccatgctgctctattcttcctccaggtgcatgtcctctgttctgcgaagcaggggatccaaaacagagacccttctgggaaggaacatcaacatgtcacgcggcgttgttgttgctgctgctggtggttttctcggcgttggctcggcccggtccatctcggtcgaagcgcttcgaccgagcgacaccttcccccggcggcacaactctgccaccccggaggagcagagcaagatggcagagtcgtgtggcttcggtagcctcgactcctcgtgg

SEQ ID NO: 12690 - DNA, 538 bp, Glycine max
  Clone ID: jC-gmle01810063g11d1
atacgaattactttttttttttttcctgtgattggatgaaacttaagagcagtggattatcatcattgtcacatatgatgaagcaatattcaacaagtgcaagaactgtatgaataggaataagagtttatgtacaacgggaaatgaaaatagttgtcatttgaacacattatgctgtggcagctgcttgttcttcaacagcctgtgatgctgggagaagggtgcaaatgaggttgcggtcaccgtacacattatcaacacgtcctgtggtaggccagaactttgcagtacggagccaaggagctgggaaggctgcatattccctggagtatggttttgtccatgcatcagccatgagcagtgatggtggatgaggggcgcccttaagtacattgttggtaatgtcaacctttcctttctcaatctcagcaatttcttgtctaatggaaataagagcatcacagaacctgtctaactcggccttgctttcactctcagtaggctcaatcatgagtgtgccaggcacaggccatgacat

SEQ ID NO: 12691 - DNA, 498 bp, Glycine max
  Clone ID: jC-gmle01810063g12a1
aagaattgggacctctgaagcttaaaggggatcttgacatcaaacatctaggaaatgtaaaaagtgtaatagatgccaaagaagccaatatgtcaagtaagcaattgaataggttgcgattgtcatgggacaaaaatgaagaccttaaattacaagaaaatgttgaggagattcttgaagtgctccaacctgatacccaacaactttggagattagatgtggaagaatataaaggtgtccattttccaggatggatgtctagtccttctcttaagtatttaacccttttaaatctgctgaattgcgaaaactgtttccaacttcctccattgggaaaacttccttctctaaagattctaggaataatgaagaataatcatgtagaatacctttacgaggagtcctataatggggaagtagttttcggagccctaaaaagtctgaccatacgtcatttgccaaactttaaaaggttgtcaagggaagatgggaaaaagc

SEQ ID NO: 12692 - DNA, 514 bp, Glycine max
  Clone ID: jC-gmle01810063g12d1
gaatgcattaactgataagaagacaggtgagatcaaataaataaagaagtaaataatacaaatccactttttattacattgataaaaagaccgtaggaggtcacataaacaaaggagcaatagcaaacgattcaaatacacagaaatcttcaaacacagccagcgtgaataatctagtctgggctctccaaatacgagaatactcaatcaggactatagtgtttacttcccactgaaatatagggaacatgagctatttttgaccagtcctccccggtttccttctcacatcgcttctctaagtcaggatggcaaccaaaaatagtcaagtgttgcagattgatgaggcttaagcttgttggaagacacgacaacttggaacaaaaaaaaatactcaattcgcaaaagcagggaaggttttcaaaagcagtgagaaatgattctagctttggaagattcctcaatcttcacaccttgagggaagcatatcttttagagcatgcaaatcttcaca

SEQ ID NO: 12693 - DNA, 539 bp, Glycine max
  Clone ID: jC-gmle01810063h01a1
cgcattctcgtcgtaggtttggtttcggagcgaggtttggtttggactttgaagagcaacacactaagcacttggcactcactggcacttgcttcgctttaccctccatcacccgccactacaaaactatacccccacttccttcttccaacctttttctcttctctctctctcaactcaactagtttcaccacttattacagaaagttctctttgttttatcttcttctttctgcctccgaattaccactctcttgctttgctatcttacaggaagaggatcaaaataccccaccataagacaaatccaaaggaacagcaacatcaattatgggaggtttcaatggagaagaaggtgttgtgagagaaaaagaagaagaaaacaagtggccttcatggctgcagccacttctcaagacacgtttctttgttcaatgcaaagtccacgcagattcccacaagagtgaatgcaatatgtattgcttggactgtgtgaatggagccctttgctctgcatgtctcgcttcccacaaagaaca

SEQ ID NO: 12694 - DNA, 528 bp, Glycine max
  Clone ID: jC-gmle01810063h01d1
ctgagggtgccacccaaggaagtggtaacaactgctgtatctttttggcataaatattgattggtaagtgacagaaaaccactatacaacattagtattctataataagccctccacccattggagctttatgtgggaaattcttttcttctcttggcagttctgtaattaaccactgttggtggtggtgttgagggtgtaaagctatggattttgtttctggcacttgcattgcttattatgccatttactgattcttcaccatcagacccatctgcctcacttaacattttcttcttccggaactttttggaggttccaacaatcttgcaaccaagagagcagaagttgaaggaatcaaggaggctgcgttcacagacttggcaggtattggtgaccccttttccaggtctaggttggggcctttcatttaagaacacaatcttggcactgtttataatgtaagtttggacccctgttatgtccagaaatttctgtatctcagacacccttatcacatcatggtac

SEQ ID NO: 12695 - DNA, 501 bp, Glycine max
  Clone ID: jC-gmle01810063h02a1
cggctttgttgggatactcgcatcctgggtgtttagtcaagaactattccttctccattttcactccacagaccatgttggacttgaaggccattaccactggctgctgcagctcatagtgcttgtctcactagtatcatctttggctgcaactatatgtcctaacaatttcaacgcggatctcgtgctttctatttcactcatcttccaaggatgttggtttataaacatggggtttatgctatggattccatcttttgtccctgaagggtgtgcggtgaatttggccaatgccaagtggccatgaaatcattggagcagtgacttgtagtttcaaagaggctgatttcagggccaggggattggccaatttgcaattcagttggatgctttcttcaattctgatatttgcaggaatcatttgcttgacactttctaggagatgtacaattacaacagaccggttggagtatgagagaattcaaactataggtgcaacag

SEQ ID NO: 12696 - DNA, 404 bp, Glycine max
  Clone ID: jC-gmle01810063h02d1
aaaaccaacaaaactaaacttttaatgggtccccaaaaaccccctttttttttacagggcccaaccccccgaaaggggggtgggaaatttgggggaattccggaagccctcaagatcgggggagggtgggctttttccatttaggaaccgggtgggttggaacccccccaacattttttagctggccaagggtttccgggcggggtaaaaaacccaacagggggggggcccttttttttaaaaccggggttaaaaaaaaaccccgggggctttttttattgggaaaacccagggcttatgtccccttgggaccttaaaagggccagccacaaacccgtttaaaaaaccgggctaaaaaaatttagggccgggttgaaaccctctttggccaaaagggggggggg

SEQ ID NO: 12697 - DNA, 515 bp, Glycine max
  unsure at all n locations
  Clone ID: jC-gmle01810063h03a1
gtctaacttgactcgattgcaattgatccacgacacactgttcgcttcacaaaagcttcgaatccaattcctcagtaacatctgcaagaagtcttctccttcaccatgccaccaaagcctttagactatgggtcaataaatgaaaacgtgaagaagagtcaatatgctgtcagaggtgaattataccttcgagcttctgagcttcagaaagagggcaaaaagattatatttactaatgttggcaacccacatgcattgggacagaaaccactgagcttccctcgtcaggttgtagctttgtgccaagctccattcctacttgatgatcctaatgttggactgctattccctgctgatgcaattgcaagagctaaacactatctttcattgacctcgggcggattaggcgcttatagtgactcccgcggacttacaagagtgaggaangaagtggctgagttcatactcaggcgtgatggttatccaactgatccagtgctcatatatctcactga

SEQ ID NO: 12698 - DNA, 560 bp, Glycine max
  Clone ID: jC-gmle01810063h03d1
agaagaaagtgtaaggtttaagaattatctccaaggacaaatagtagaaagggaggttatgtttttcttacaaaagcacaagagtataatgcatcttttacgataattttcttacaaccttgaataacctctattgtcttcgtattgctccatgaattcatcattgaactttttgaaactatccataatagcgggcatgtcttcctcgtctggtaaaatagtagtcctcaaatggaagaccccttctctctgtccaaatcctgaaccaggaacagtggatatgccagtggcttccaaaagtttgaggcagtagaaaacatctggaacctttgcagcctgtttagcagcctctaaagctcttggcggcaaacgtatttgagggaatgaatacatggcaccttcagtaaaattacaaaccacatttctgcaactgttgaatccatcagtcattagccttgctcttcttctcagtgattcaagtattccggtgctctccctaacaaatttgtcataagaaatatctccaggttgaggtggatggagcataactcccataaata

SEQ ID NO: 12699 - DNA, 458 bp, Glycine max
  Clone ID: jC-gmle01810063h04a1
tgtcgcctagtttcgtcttcgacccgcctagcgacgaagaaatcgaacactctgaacacgaagaagaagaagaatccgaagaagaaccagagtcaggatcaggaacaggatcagaatcagagtcagaaggagaaggagaagaagaagaagggcacgaagaagcgcgggttccgaagaagaagaagaagaaaacgcagtctccatgggactttgctaaatacacggaatcagtggcggaggaacacgctcgcaggagcacaacctcggtcgacgagaaaatctccaaagcactcaaacaacgttccacgccgctcgttgctgagcttgaccacagctccgagtccgaacctgatgaacaagaagattatagaccagaggaagaagatgaagaagagggtaatgatggtgatagcaaatcactttttgctccttctgatggaaccttttccatgccgatt

SEQ ID NO: 12700 - DNA, 560 bp, Glycine max
  Clone ID: jC-gmle01810063h04d1
aaaataaatattttttctattggtaacatttaaaactcaatgctataaattatgctatccatttgggataagaaccaagctcacgagatacaatgaacaaaaaaaagggtattggtaggtagtagttactgctaccataccccatatcaccatggccacccaaaagacccacaatcactagctgaaattcacagtggagctccatttaatcacctccatatggtataaggacacgcattttggagatttatggtccttccatgcacatatttatgacaaggattattagcctcagactacttgcgcttgtaccttgacttgcttttgaatgaactctttgacttctttcctcctccaacacctctttttggctttttatccttcatgtcagtctggaatagctcccgcatctcttctgtccttgaaggagttttccgggaattattattagatttctttatattcttctccacaatcttgccagaatctaatgccttcttgacagcctttactgcttttgcccgtcggtatgcaagatcaacaagtgacattccaccctt

SEQ ID NO: 12701 - DNA, 444 bp, Glycine max
  Clone ID: jC-gmle01810063h05a1
ggggcttccacaacatcaaaagggcaaaaaacactttcacacatccgtcgccggctaagctcgcaaacgtaaacgaacttgagttggaacttctccgacgagtacaaccaattggtctcaaaccatatcgtcttttgcttctactcaccgcattctcgaatttcctcttttctgtgacgcgtggcaaaaatttcccccttaatttcgtattttagatgaggttccgttgaagttttctcccctcgttctgttcttctgccatcgatggaacacacaagtgtagcgtgaaaaaaaaaaaaaaagattacttactcagacgaaccaccactctattggataatatcaaagtgcgtcaaaagggaaaaaagcgtaagggagatgggtagtggacatatcaaagtgggacccacacccctctcacttctccttcgctctctccctcct

SEQ ID NO: 12702 - DNA, 539 bp, Glycine max
  Clone ID: jC-gmle01810063h05d1
cgatatactgaatttatctgtaaaaataacaatattttctttgacatgtacaattttttttcatagatttacactagcatctaacctctatgctaaaaatcagatgctttctgtaaaattgaaatgagttgttctacatctagtttaaatatgcctacgtttggaagatgaagacctagagtatattcctcttcagtaaagtccacttttttcaatgttgttttgtaactcgtagtagctgatattgggtgaactctcgcaattgaaacacaatgtctatccccaagttcgaacaaccaaaatctccactctgtcatggtcttcccatccactttagctgatatatttgtccatcttgtgtgagaaaattccactttattcagcccttcagtaagtccactccctatagctttaacatatgcttctttaaggctccaatacctgtaaaattccgtcaatacatcattcaaagtgcctgaattgactatgttatcccattccagacttgaaaagtatgatgagaagaattgaatgaattc

SEQ ID NO: 12703 - DNA, 381 bp, Glycine max
  Clone ID: jC-gmle01810063h06a1
aagctgtgctattctaggtcctaacacttgcactaccgggagataccagcatctgtctcatgccattgctcctaacccagatgcgatgtatggggaaaccctaatcccgcggttctgagacatcgaaatcgatcgaacgaagccgaggagtacgatgagatcgtcagcatcgcgaatcgcagggtgagcaatcttatagggcatgtcatcgaaatcggcctgtaggatcgggttttagataggaacgactattacggcggacaacgccttgtgagctagctgacccaggtatgaatgacagaccggggccatgacgcgtaccctctacacctatacgctagcatggactacctcgtcgttatgaacgccatagctattatc

SEQ ID NO: 12704 - DNA, 234 bp, Glycine max
  Clone ID: jC-gmle01810063h06d1
aaacccaatactacatgacgatttaaatgacatacactagaaaattgatgatacaactattcacaatgctgacgatttttacagaaatctaggcttcctacaagaagatttaccgactcacccccgcaaaatttaaaagacaccatagattgtatctcgtttaggaacaaggcctgagccaaatacaactatatcccagtattgggattgttcccagctagaataagagaaatt

SEQ ID NO: 12705 - DNA, 518 bp, Glycine max
  Clone ID: jC-gmle01810063h07a1
accatttttggtaatacaactaccgaactttcaacactcaatgctttgcttttgtgtgagatggcaggccgtgaagatattccagttgcacagggaagccatgagccattgaagggtggaaagcctcgtgttgctgattttgttcatggtaaagatggactagggaacacattcctacccccacctaaaggtgagaaaattgagaaaagtgctagtgagtttttggtagagaaagtctctgaatatcctggtgaagtatctgtgctagcacttggaccactaacaaatttggctttggcaatcaaaagggattcttcctttgcaagcaaagtgaagagaatagttatacttggtggtgcattctttgccttggggaatgtgaatcctgctgcagaagccaatatccatggagacccggaagccgcagatattgagtttacctctggcgcagatattgttgttattggaataaacattacaacccaagtccaattcacagatgctgatctcctcgaact

SEQ ID NO: 12706 - DNA, 348 bp, Glycine max
  Clone ID: jC-gmle01810063h07d1
caaaaaccaaaaccggaaaaataaggggattttgaatttttttgggcccagccaaaaaatcttttggggcattttcaaccccaaatttttttttccccttgtaaaaaccaaaaacccccccccccgttcaggggggggaaaaaaaaaaaatgaccgcttttttttcaaaaaaaaggggcgaaatcccaacccaaaaaagttcctgtaaagagaattttattgggcccggaaccttttaatattaaacgggggaaaaaccccttgggacccttaatgaaaaaaaaaaaaagcccctttgcctttttttgcaaaaaaaaaactattggcctataactttccaaagctttt

SEQ ID NO: 12707 - DNA, 567 bp, Glycine max
  Clone ID: jC-gmle01810063h08a1
tttgggtgctgacacgaaagcacccacagtagattgttgcagtggtctcacacaagccatgaagaccaacaagaagtgtgtctgccttattctcaaagacagggatgatcctgatcttggcttgaagattaacatgacaattgctgttggtctcccttctctttgcaaaactcctgataatctctcacagtgctcggcacttctgcacttggatcctaaatcacctgaagctcaagcttttaatcaaattggtcagaaatccaatggtggttctatcagtccttcgcccactacttctgctgaaggaatttcccagaatggtagaaaccaggggacagatgaaacggccacagctaagaagaatagtgcgtcttatatcgggaagagattgttagaaagtttggttgcagttgcagggcttctaatttggctatcatgagcttaacttagatactacctatataataccattctcatatcacgttgaaacgtaaaccattgattagttgatagtgtaaagatatttacactcgagtgtataaaatctctgacagactcaccattgat

SEQ ID NO: 12708 - DNA, 184 bp, Glycine max
  Clone ID: jC-gmle01810063h08d1
attaattgtttaaaacctttcgcacacaaaaaaaaatttccaaaacgggtttgccaaaatatctattgggaggatgacgaacatttaatacaccttctgtgggtaatttttttcactatactccatgaaagggttttcttctcacccgggtatacaaatggaagtttttgggtggttttcatag

SEQ ID NO: 12709 - DNA, 506 bp, Glycine max
  Clone ID: jC-gmle01810063h09a1
gcggagaagccgcatcaagacgatgaagcatatgcaattgcctccacaatgcctaagctcaagcatcttgaaatggcttatcatcttatcagcacttcgggtgtccttcaaatacttgcaaactgccctaagcttgaatttttggatcaaagggggtgttggggtgtgacacttgaccacatgtttttaaagcagaaatttccaaaactgaaggttttggggcctttggttcttgacacttatgagagtgatggctgggatgatttctcagatgtgtctgattcatcagagtacttggcctgggactttgtggctggtggcatgggagaatactatgttgatgatagtgatagttacgatggaatgtgggatgatgaagcgaggctagatgagcttcagttcgggttttatgaagggatagaagatgcaagaatgtattggcctccatcttcataagaagctatagctgctgcattacttgtgatcaattgtatgcttttctactc

SEQ ID NO: 12710 - DNA, 559 bp, Glycine max
  Clone ID: jC-gmle01810063h09d1
cgtaataagccagatgttccaattacaacatgtagacctgtaacatgtgagaaacaagggagctttctctttcccttccttttcctacttaagtaagaaatctaaggtaggtcaataacaatctcactcgattatgcatatgctaggcagagcaagccaaacattacttgaaggaaaaaaaaaacacatcattcaaagagcacataaaagaaaagtagaagcattagttacaagagtagaaaagcatacaattgatcacaagtaatgcagcagctatagcttcttatggagatggaggccaatacattcctgcatcttctatcccttcataaaacccgaactgaagctcatctagcctcgcttcatcatcccacattccatcggaactatcactatcatcaacatagtattctcccatgccaccagccacaaagtcccaggccaagtactctgatgaatcagacacatctgagaaatcatcccagccatcactctcataagtgtcaagaaccaaaggccccaaaacctttcagtttggaaatttctgctttaaaaacat

SEQ ID NO: 12711 - DNA, 559 bp, Glycine max
  unsure at all n locations
  Clone ID: jC-gmle01810063h10a1
ggatgcttttgttgaaaagcatggagtcaaattggggcttatgtctggctttgtcaaagctgctgtcaatgcactccaacatcagccgattgtcaatgcagtcattgatggtgatgatattatatacagagattatatagatatcagcatagctgttggtactccaaaggtttttatcagccacctttatcttttctcttttactttgtttatgtagagaaatcaatcaatcattatactatacttttgatgaaacttagccatttgcgattgacttatgtcaactattgtcatggctatggagctaatttacaagttatctagtatatagtgtctaatttagcaattttttacatggctatgaaaattatcaacatgcatgttgtatttgaacaaatattgaccctcaattgccattccagggccttgttgtaccggttatccgcaatgctgataccatgaactntgctgatatagaaaagcagattaatacttttgcnaagaggcaaatgatggatctttatcaattgatgagatggctggaggcactcttacaata

SEQ ID NO: 12712 - DNA, 437 bp, Glycine max
  Clone ID: jC-gmle01810063h10d1
gggtgggggggtttttttttttttttttaactgagttttttcttgttttttgtttttttttttggtggttctcggggaaaaaacccccccgggaagggggaggggccccacaggggggggcggttacccataagaaaacagggggggggggggtatcaaaaacccaccccggggggcgccaaggggggggggaaaaggggggggcctccgccccccgcaaaaagggggggggcgcccatattgggaaggggaccccgggggggggcccccccgaagatctggggggggggcaaaaaagaacaggggccattttccgaaaataccggggggcccagcggccccccccccccataatgggggggggggaacaaaatccccccaaaaaccgggggggcggggcttggggggacgccccccgcattgggcgcggggggggg

SEQ ID NO: 12713 - DNA, 534 bp, Glycine max
  Clone ID: jC-gmle01810063h11a1
agaaatctcattggcgcatcaagactcaccttgctatcagtcacttggatgttaacaagattaatagtattatagctgatatgcgcaaggttttggcaaaaaatcctcaatagagcagaaaaaattgcacagaagggtttttctagagaatattgatccagaaaatcaggctcttatgatattagtatcctgctttgttaaaactagacattctgaagagtacctccgtgtaaaggaagcaatcctcttggatcttctcagagttatcagtcatcatcgagctcggctagccacacccatccgcacagttcagaagatgtgcagtgatactgatttagatgttgatccatttgatgacaccattcccactcgttccagatcaaagaataaccgtcctttccctctgataaatccaccttataaagttaagccttcaactactacaaatgaggacaaagatactaagattgatgaaaccttgccatctgacttcaaagtagaaacgtgacaaattgctgcgacatcgagttcagt

SEQ ID NO: 12714 - DNA, 502 bp, Glycine max
  unsure at all n locations
  Clone ID: jC-gmle01810063h11d1
gaacttaatcttgtaattacatgagaattcattcccactaatatacaaatggataatacaatgcacaatgcccagcttaaaaaagacagctagatcatttttgtaacttcaacaaaaccatctactctatttaaacatcaacatctactctgatcgtcagcctaatccttttgtttaggagtaggaaatgaagacatctcaccatccttcttatccttggaaataggaggttcactcccatcctgatggactgcaacttcctgtggttctgcagggatagattgaatcaattcttcatcaattgcaagagttctctttgagcccagcagggcagcatcaagaacaatattctcttcaaggagtgactagctgatgatgatgacataacagatttctcttatctagtttgatggngaagtagtctctccagaaccaactcgttggattttgacaaatttggatgttgttcccttttctgaactcctactctttccttttgagc

SEQ ID NO: 12715 - DNA, 549 bp, Glycine max
  Clone ID: jC-gmle01810063h12a1
cgttgccattctcatcctcctctgtctctctctctccaccattgccatggatccttacaagctccggccatccagcgccttcaattctcccttctggactacaaattctggtgctcctgtttggaacaacaactcctctttaaccgttggagctagaggtccaattctgcttgaggattatcatcttgtggagaagcttgcaaactttgacagggaacgtatcccagaacgtgttgtccatgccaggggagctagtgcaaagggtttctttgaggtcacacatgacatttctcacctgacatgtgcagatttccttcgagcccctggagttcagacgcctgtaattgttcgtttctcaactgtcattcatgagcgtggtagccctgaaaccttgagggaccctcgaggttttgccgtgaagttttacaccagagagggtaactttgaccttgttggaaacaaccttcccgtcttctttgtacgtgacggcatgaaatttccagatatggttcatgctcttaaacccaatcccaagaaaccacatccaga

SEQ ID NO: 12716 - DNA, 362 bp, Glycine max
  Clone ID: jC-gmle01810063h12d1
ggcccaaaggggtttaaaaattaaatgcccaccccaccaaaagcctttttttggaataaccccaccaggtccaaccctgggattttgggccccccaccaaaaatgcacaaaaggggtaagctttttgaaatcgatggaaaaaaaaacccttttcgtattttttgcccggtgggaactttaaaaattttttggggggggggaaaaacaataaaaaattgcccccccccccaaacaaaaaacttttttttggcctaaaaaaacggtggccgcgtaccccgacaaattcccgaccccgggggtttgcagggggccccccgggaccaaaaaaccttcgaccccctggggaaaaaattttttttgcc

SEQ ID NO: 12717 - DNA, 593 bp, Glycine max
  Clone ID: jC-gmle01810064a01a1
caaggaacatagaaaacaaaacctccaaacagccaaacccgtacctttctgaaccctcactcactcttctgcttcttcagatcatcggataagctccaatattctttaattcccactccacttctctggaatgtgatatttcccccttcaaattctgcttcctattttgtctcaattcccactcttgggtttcgtttccctttcaagaaaccgaaaccctagacgacttttccgcctctgaatttgagcaattggaaccccaaactctttcctaggatagtaacattggagatgaaagcgccaaatgctttgcttggtgcaaaacgcagaatatttcaagggattttcaatgctctgtgttccatggttgtgcttttcttcttttacaaccgggaagacatcatcagcaaccccgattctcagacaatcctcgaatttcacgaatcatgggttgcctcaaaatgcgattttgagagatgggtcttccttgttcaccgtcgaatggtggaaattagcgccacacttcaggcgtagctggtgaaaatgatttacgcgtaagtagttctggatatgtactggttggttcacatgat

SEQ ID NO: 12718 - DNA, 585 bp, Glycine max
  Clone ID: jC-gmle01810064a02a1
aatagatttaacttttaaggtgattattattaaattcaattaatgtattttttgataattgaagaaatcaccttgttgatagacatgcaaggatttatgatgatagaccataaaataatccaaaaggaatatattaagatataaaaacttcacatccaagttcctacccttttgcattttgtactcatcattatttattgtggtttatgtgcttctctctcaatggtaaaatgaaactaatgaatgatcaatttttatggtaacttttagagataaaaacaaaaggataaaaatgataagttggtccataagcccagcacccagcacatgaagttcacttttgccttatagatttatcatgttattctttgtgtcatgtcataaaaatagtgataacttcaaagttcaaaagactaaagtgataatttacctttaattaagctccaattcttatgaaatgaaaatgaataaatatctattttgttccttaaaattgttagagactaacaggatggaaaatttgaatttagtccatctgcagtttagtttgttccccgtgggggcaatcacacgctaaccatgaat

SEQ ID NO: 12719 - DNA, 314 bp, Glycine max
  Clone ID: jC-gmle01810064a02d1
aaaacaaaagaaaataatttttcataatggcaaactcatattttacatgaagtcaaccatttaagagtatacccacacatacaatgcgccaagttttttaattaaactaaaatttgccgagggaaaaataaggggaaggacaatcaattttggcttccaaattgcttttgaatatcgttgaaagatatagggggtgatccccttttttttgctttctgctgagaaggatgttctctccaccccgtcatgtatataacctggaatggtgcaggtacagggccgttttttgcaaaaaacattgaatcataaatagc

SEQ ID NO: 12720 - DNA, 564 bp, Glycine max
  Clone ID: jC-gmle01810064a03a1
cgattttgctctctacaagggtcaacgagtgtgaaaagcagaaaaagcttggtgctttgtgccatcaacatgactatagcaacggatagtttgttgcaggtggtggaggaggaagagggtcctcctgattttgctttgcttgatcccgaggacaattctaggcctcgtagaattgctctcttcgttgagccttctccttttgcatacgtctcaggatacaaaaatcgttttcagaactttataaaataccttcgtgaaatgggagatgaggtaatggttgtcaccacacatgaaggagtacccaaggaattttatggagccaaattaattggatcccgaagcttcccttgtccctggtatcaaaaggtgcctctctctttggcacttagtccaagaataatttctgcggttgctgagtttaagcctgacataatacatgcatcatcaccaggcataatggtttttggtgcccttatcattgcaaagcttctgagtgttcctattgtcatgtcctatcacacccacgtaccagtatacattccaagatacacctttagcttgctg

SEQ ID NO: 12721 - DNA, 520 bp, Glycine max
  unsure at all n locations
  Clone ID: jC-gmle01810064a03d1
cgatcctctcaagggccaatttttatgcatttaatcactagttttccactagtaaaacatgaatggattctccccttactggttgcacaatgtatcttacactatccaatacctcaatatgaattgacattgaaatctagttaatccactctaccatggcacattccataatttttatcccattatatatacatctatcaaatgaatacattacacaaccaaccacacttctgtcccatacaaggcttccttaaagccaaagcaatcaaccatttaaagaaccatccaaagctagcttaaaagaagaatttgctttgcatcaatcaccacccttatgagttggcttctggatctggagatgggaaaataggttgagccaaccattgaaagggtctcaaacagtgagccctcttcttgcgccagaaccaaatggcagctttgtagttttcattgcgaatctttcgagtggctgctctccaatcatacttctncatcctcaaacgtgcagcttctcccatgg

SEQ ID NO: 12722 - DNA, 522 bp, Glycine max
  Clone ID: jC-gmle01810064a04a1
actcattaaagtccacacacacagagcatcactgcactgtgtggaaacgaaacatggcaagagtggtggcactccaacagaaccaactatctttctctaccttagcttcctctctttctgacttcagtggaaccagacttcaaactcaacttcagttcaagagaaagcaatgccatccaaaagggtctttctacgtctccgcatcgagcaccaagaaaatcctaataatgggaggcaccaggtttattggtgtgtttttgtctaggctccttgtcaaagagggtcaccaggtgactttattcacaagaggtaaagcgcctgtcactcaacagttgccaggtgaatcagacagtgattatgctgatttttcttccaagatcttgcatttgaaaggagacaggaaggacttcgactttgtaaaatccagtctctcagcagagggatttgatgttggttatgacataaatggacgcgaggcagatgaagttgaacccatactggatgctctgcctaatctggagc

SEQ ID NO: 12723 - DNA, 519 bp, Glycine max
  Clone ID: jC-gmle01810064a04d1
gttgaaaaaaatactgaacgaaaagctcatgaatatttcacgacttcataatgtagcaaatccgaacagcttttctaaatacaagtgaaatacttaaaattgaaatagaaaagtttatacgctaacaagactcttgccaagaattatgtcatctgttgagaaatcagcctctttccgatatgttcctctaccaaagtccaggttgtacgagtctgctagaccctctacaagtccaaattcaggttccaatccaagcacgctctttgctttctcaactgatgcaaagaaatgctggtcacggaatggaaatgatttctttttcccaaaatcaaaatctttagggttgtagtgaatgatctctggctctgggaacccaccagccttagcacatgctcttgctaatccatcaaatgtgacatacttatctcccgagatgttgaatacttccttgctggccttctcattaccaagaacctggataaaagcttttgccaaatccttaacatgaccaagttgggt

SEQ ID NO: 12724 - DNA, 575 bp, Glycine max
  Clone ID: jC-gmle01810064a05a1
cactctcatatctgccaatgtctgagtggcttgctgaacttccggcgacatttttcagtcataattgccgaaaagcgccacaagaccggccaagagttggcggaggaagtgttgtccttggcacaaggcctactccaccttgggctcacacctggtcaagtggttgccatctctgcttacaatagtgaaaggtatctggagtggttattagccattgcatttgttggaggaatagctgctcctctgaactatcgctggagttttgaagaggcaagattagcaatcaatgcagtgaacccattgatgttagtgactgatgagagcagttacgcaaggtactcaaaactccagcaaaatgatgttccatctctgaagtggcatattttggtggattccccttcctcggattttactaagtggaatgtgttaactgctgaaatgcttaagaggcatcctgtaaaaacttctaccattgactactcctgggcgcctgaaggcgctgtcataatatgctttacttcaggaactacggggaagcctaagggagtcacccttagtcatggagctttgatcat

SEQ ID NO: 12725 - DNA, 538 bp, Glycine max
  Clone ID: jC-gmle01810064a05d1
ggagaaagaatgtgtgcggttactaaattttcagagatacaaaattgtactcaattaatgtgtcactcaatgaattgatcaacattttcacatgaggccgtatacctgaggaatcattgcaatattggtattatggattcaagccattcttcatctttggcattaagaaacatatgttgaagcatgcattggttgtttaagggccaatggaagtatggtatattcaaagattactatgcaaagattgcagctgagacataacttcttttctgacttggtctcttcttattttccctgtcgtggtgagttgaaatggcttcctccatacaataaacgtttttggtatcttaaacctgcttaaatgattttctaaacaatattgataaagattctttctagataggagaaactcttcatttgaagcagacaactgctctgaccattgccaattttctcttagttggatacatgctgctaccatctctgtcaggtgagcatctgggattcccacaacaacaacacttgcaatccctggatg

SEQ ID NO: 12726 - DNA, 490 bp, Glycine max
  Clone ID: jC-gmle01810064a06a1
ttaaaggagattatgaatatgcaaaaggaagtcacatccaaacccatgaatctctcccatgatatagtgcctcgtgtcttttcctttctccaacacactctcaacacacatggcaagaattcttttatttggtttgggcgaaaaccaagggtgatcatcacagagcctgagttaatcaaagatgtacttaataagatgcatgatttcccaaagcctgacacgagtccgcttgtcaagttacttgctactggtcttttaaaccatgaaggagaaaaatggaacaagcacagaagaataattagcccttgcttcaatttaaaaaaattggaagaatatggtacccaatttctaccaaaggtgcaatggattaattattcagtgggaagaaatgttgtcttctgatggatcatgtgaaattgacgtatggcctttccttcaaatttatctagtgatgctattgctccgacagcatttggaagtagttatgaag

SEQ ID NO: 12727 - DNA, 544 bp, Glycine max
  Clone ID: jC-gmle01810064a06d1
ggtagcaaactgctattatcattgctttataaaatttgcaattctgaaatgcaaatcaaacaaggcttgttactattattttttatatttcaactttacgtaaaatgacatgagcaccatattggggctgaagagtaaatactgtaacaggagcatgagcataagctggagaaagttcaaatgagaaatgttgtaaaatcgttgacaaagccatctttgcctccaacaaggaaaagttttgtccaatgcatattctaggaccccatccaaatggaaaaaatgaaactctgccatttgtggccttcagaactccttcagaaaatctctcaggtttgaattcattcacatcatcaccccagagttcgcggtcatggtgaaccatagttgttggtaaggaaacttgcactccagcaggtaatgataggtttccgagtttcatatctctgtcaacatttctattaaggccaactgctggtgggtatagcctaagaacctcattcaaaatcatgctgacaatcttaaggtgacttagcccatcaaaatt

SEQ ID NO: 12728 - DNA, 512 bp, Glycine max
  unsure at all n locations
  Clone ID: jC-gmle01810064a07a1
attccaagttggaccttcagttggaatctcagctggtgatgagatttgggcagctcgttacatcttggagaggatcactgagattgctggtgtggtggtttcctttgaccccaagccaattaagggtgattggaatggtgctggtgctcacacaaactacagcaccaagtccatgagagaagatggtggctatgaagtgatcaaagcagcaattgacaagttggggaagaagcacaaggagcacattgctgcttatggagaaggcaacgaacgtcgtttgacaggacgccacgaaaccgctgacatcaacaccttcttatggggagttgcaaaccgtggagcttctgttagggttgggagagacacagagaaagcagggaagggatattttgaggacagaaggccagcttncaacatggacccatacgtggttacttccatgattgcagacacaaccattctgtggaagccatgagcaaaacctgcatgttttctccctttggatggaaagg

SEQ ID NO: 12729 - DNA, 456 bp, Glycine max
  Clone ID: jC-gmle01810064a07d1
aacatgacaatttcatatattattattatacttcacaatcagcatttctttgttcaagactgataataaccattaaattattgtcattgtaacaatcggaaaacgagggaaaggaatagaagaaaacaatgaacaacccttgccagttagttgcaccaaccaacaaggcaccaaccatagtaccaatcaaaaggtaaaaagagagagagaccaaatcctactaagaaaagcataactgttcctttccatccaaagggagaaaacatgcaggttttgctcatggcttccacagaatgtgttgtgtctgcaatcatggaagtaaccacgtatgggtccatgttggaagctggccttctgtcctcaaaatatcccttccctgctttctctggtgtctctcccaaccctaacagaagctccacggtttgcaactccccataagaaggtgttgatgtcagc

SEQ ID NO: 12730 - DNA, 550 bp, Glycine max
  Clone ID: jC-gmle01810064a08a1
catcatcaagtcttcttcagaaaattacaaatggattcatcacaaagtgcagctcttgggggaaatggtgggagtggtggaaatgggacgttgatttctcaaaataatgacatggcagcctctgcaacaggagctgatgattctatgcagaagctgaaccaggtcagcaattccattcagaaaaccttaggccttatccatcagctttacctcacagtttctaccttcaatgctgcctttcaaatgcctctcctccaacgcatcaatggccttgttgcggagcttgacaacatggttaaattggcagagaagtgcaacattcaggttcctatggaggttgtcaatttaattgatgatggaaagaatccagacgagtttaccaaagatgttataaatagctgtattgtaaagaatcagatcaccaaaggaaaaactgatgctttaaagagtttgcgcaaacatcttttggaggaattggagcataacttccctgatgagggtgaaacttttaaagagagtcgtgctgctgcagctgctgagttgaaacgtc

SEQ ID NO: 12731 - DNA, 378 bp, Glycine max
  Clone ID: jC-gmle01810064a08d1
gagccaccagcccaattaaggggttaataaggaaaaaataggcctcaaatttacaacctttaaccaagagggggaaacaagggacaggggtgaactggcctttacaacggttacataaacgttagaagggccaaaaaaaatgcccatcacccaagggtctgatttaacccttacatctccatttgggggggggctttgggcctgggcctgacgtttaaactcaaaaggtggagcagcacgactttttttaaaaggttcaaccccatcaggggaggtttgctccaattcccccaaaagagggtggggcaaactttttaaagcaacagtttttcctttggggagctggttttttacaaaacagctttttataacattttt

SEQ ID NO: 12732 - DNA, 574 bp, Glycine max
  Clone ID: jC-gmle01810064a09a1
ggagttgataactttgtattccttatttctgttttatttgctaccgtgacttgggttgagagccttatgatggttgttgggagtgtttttccaaactatgtcatgggcgtgatcgtatgtggaggaattgaaggagtcatgattttaacaagtggattctatcgacttccaaatgatcttcccaaaccagtgtggaaattccctttctactacatttccttcctcacctatgctttccaaggactgttaaaaaatgaatttgaagacttgccattttcttcggaagttctagctgacacttggcacgtgcaaatgggtcactctaagtgggttgatcttgctatcatgtttgccatgattgttctgtatcgagttctattcttggccatcagtaagtgcaaggagaaatcaaaacaagttagtgttggcattaaacccgaaactaaaattttctccagaatcaacatcagtgaactccaaatgaggggaattgatgatcataatgctgtctaagcagtagttcgacttcagctcgggggtaacagtctctacgttactattggtaagcttcttt

SEQ ID NO: 12733 - DNA, 605 bp, Glycine max
  unsure at all n locations
  Clone ID: jC-gmle01810064a09d1
gaagatatcaaatgaggatttatatatataaaactaaagcaccttataatcttgaataacatcattaactaatttgagtacatccttatttttcatttcatacagtttgttttttaacacatcagggtcggtctaataaggaaaggtctgggtagcctacacaagattctaggttttaaccatgttaccagtactattgatagtttgatacattcttacttttctatttcattcaatttgttatttaacccattagggttggcttaatgcagtgtctgggtagtctacacaaggttctaggttttaaccttgttaggactattgtacaacaaaaagaaaactataaattcacactcttttttttcactttaaaagaagcttaacaatagtaacgtagagactgttaaccccgagctgaagtcgaactactgcttagacagcattatgatcatcaattcccctcatttggagttcactgatgttgattctggagaaaattttagtttcgggtttaatgccaacactaacttgttttgatttcttcttgcacttactgatggccaagaatagaactcgatacagaacaatcatggcanacatgatag

SEQ ID NO: 12734 - DNA, 420 bp, Glycine max
  unsure at all n locations
  Clone ID: jC-gmle01810064a10a1
gctagtccaaactttaaagcaccttcactctcttaaaaacattctcttcaactcttttccattttatttcttccaaaactggaccttactttacccgaatctaaatcccaacccgaaccaaccatgttcggaccaacccaaaccgcttcccaacctccgaaatccactctcaaattcctctgcagctacggcggcaaaattctcccccgctaccccgacggcaagctccgttacctcggcggccatacccgcgtcctcgccgtcgatcgctccattccattctccgagctattgctgaagctggaggagctctgcggcgcctccgtgaggtacctccgctgccaattaccttccgaagacctcgacgctctcgtctccatcacctncgacgaggatctcgcaaacctcatcgaggaatac

SEQ ID NO: 12735 - DNA, 531 bp, Glycine max
  unsure at all n locations
  Clone ID: jC-gmle01810064a10d1
aattataatctatatcaacttaatttttttaaaatcatttttttttaagtaacacctgcgtcctaatctcagtacttccattccagtattccaatattccatttaaacgacaccgtaacgctattgccagtggttcccgttgtggatcatataaacgtggccaccgtaccgcggcagaggaatattcctcccggaggatttcgatttctccacgccgaccggatacgccgccggcgacggcgacatctgatgtacgcagcggtctgacaccggcgccggagctctatacctccggccagagtcactggcgccggtagggctgcaatacgacgaggacgaggacgacgacgaagcagaggaggaagagatggacgccgatttcgacggaggagtggaaaccttaagcgacggcgatctcggcggcgagaggaaggctctgattntcagcgatgaacgcgatcgtattcctcgtgaggtttgcgagatcctcgtcggaggtgatggagacgagagcgtcgaggtctttcggaa

SEQ ID NO: 12736 - DNA, 517 bp, Glycine max
  unsure at all n locations
  Clone ID: jC-gmle01810064a11a1
gttcttgaggagaagaattggccgccttttttcccaataatccatcacgacattgctaatgaaattccaattcatcttcaaaaattgcaatatgttgcatttactacactgttaggattagtgttgtgccttttttggaatgttatagctgttactgcagcttggattaagggtgaaggtgtaaaaatatggtttcttgccattatctacttcatagcaggggtccctggagcatatgttctgtggtatcgcccattatatcgtgcttttaggaatgaaagtgctttgaaatttggatggtttttcatgttttatctgcttcacataggattctgcatcttagctgcagttgctcctcctatagttttcaaaggcaaatccctgactggcattctggctgccatagatgtgctgggcgaccatgctntgattgggatcttctacttcattggatttggattgctctgcgttgaaactttgatcagcatttgggttattcagcaagtatacatgtact

SEQ ID NO: 12737 - DNA, 587 bp, Glycine max
  Clone ID: jC-gmle01810064a11d1
aataggtagcatgctaaacagaaaaataaataaacaaataacagctgtaaacaaaaatcatgctcagtgaaatatttttgttcacaatttctgtgtgtggcttctaatatacaacattgatccatacacaagttatccacacttccttctccacaagactgatgaatcatattgcagccctcagtgctccccttgcggcctcccgtttcatctcagcggccttcccactgccgcggaagtacatgtatacttgctgaataacccaaatgctgatcaaagtttcaacgcagaacaatccaaatccaatgaagtagaagatcccaatcaaagcatggtcgcccagcacatctatggcagccagaatgcccgtcagggatttgcctttgaaaactataggaggagcaactgcagctaagatgcagaatcctatgtgaagcagataaaacatgaaaaaccatccaaatttcaaagcactttcattcctaaaagcacgatataatgggcgataccacagaacatatgctccagggacccctgctatgaagtagataatggcaagaaaccatatttttacaccttcaccctta

SEQ ID NO: 12738 - DNA, 519 bp, Glycine max
  unsure at all n locations
  Clone ID: jC-gmle01810064a12a1
cttaaaatatagaacacactaccctcaacatagtaaagcagctggtgcaagtgaagcaatggctcaaaccatgttgctcatgtctagtgtctctagcagttattccgtggatttggttttactaagcagaacgagctctttgtgggtcgtgttgctatgcttggttttgcagcatcattgttgggtgaaggaataactgggaaaggaatcctagcacaattaaacctggaaactggaattcccatttatgaagcggagcctcttcttctgtttttcatcctcttcaccctgctaggagccattggaggtttaggtgaccgtggaaaatttgtcgatgacgaacctactactggaggtgttattccttcaggcaaaggcttcagggaagcccttgggctcggttcaggtcctttattcggattcacgaaagcgaacgagctatttgtgggaagattggctcaattgggtttcgttttctcattgattggagaanatattactggaaagggagctctagcc

SEQ ID NO: 12739 - DNA, 459 bp, Glycine max
  unsure at all n locations
  Clone ID: jC-gmle01810064a12d1
acagataaatcgaagtactatgattttaatttactaaaggaaaaaatgatgtctaatcatgacatcgagacgcgtgcaactattgagaaaaatgatatagaattgtttacgacgaactcaatgcattttatgatagatgaggaaacgagtattttaaacacaagcaaacaaaagggttagtgtctaatcatcctccccgtcatctgtaacgaatttgccagttccaggattcaaagcagcaatgaagaagaaaagaacgttgaacaacactaggggctcgatttcgttgattggtacccccgtctcaatgttgagttgggctagagctccctttccagtaataatttctccaatcaatgagaaaacgaaacccaattgagccaatcttcccacanatagctcgttcgctttcgtgaatccgaataaaggacctgaaccgagcccaagggcttccctgaa

SEQ ID NO: 12740 - DNA, 488 bp, Glycine max
  unsure at all n locations
  Clone ID: jC-gmle01810064b01a1
tcacaatgctacatggcattaccacaatataacaagatatgaagcattgtgataaatttgcaatcaggccctttgtgtattatgatagacttggcttgatttgttcctcttgtcttgtctttttttcttttgacaggggagcttattgttgctcgatttgtggtttctagagcaaagtagtgggtagtgtgtccaggctttaggtgtttaagttggattcccatgttcctttattattaccatacaggcatgggattgtggttgtgttcatactccatatctacctttatagatatcatgtgtccaaattgaagtagcatgggatgcaccaatttaaccagtcggcaaggtggcattggcatgcctaagaataaattgtgttaacctagtttcatggtttcagntttctcttcttttccattggtgtagatgtgtagttttgtatcatcatttcttgtttctcaagtcaattggactattattgctct

SEQ ID NO: 12741 - DNA, 444 bp, Glycine max
  unsure at all n locations
  Clone ID: jC-gmle01810064b01d1
agagcaataatagtccaattgacttgagaaacaagaaatgatgatacaaaactacacatctacaccaatggaaaagaagagaaaactgaaaccatgaaactaggttaacacaatttattcttaggcatgccaatgccaccttgccgactggttaaattggtgcatcccatgctacttcaatttggacacatgatatctataaaggtagatatggagtatgaacacaaccacaatcccatgcctgtatggtaataataaaggaacatgggaatccaacttaaacacctaagcannngnaccccactacccactactttgctctagaaaccacaaatcgagcaacaataagcctccctgtcaaaagaaaaaaagacatgacatgaggaacaaatcaagccaagtctatcataatacacataggggcctgattgcaaatttatcaca

SEQ ID NO: 12742 - DNA, 505 bp, Glycine max
  Clone ID: jC-gmle01810064b02a1
cgctcctgccacaagtgcgagactttgttcgtgccgccctcagcaaccatctgtgactcgtgccgccacatcagatgcacaaagtgcccgcgagagcctgccaagttgaccaaatggcctgctggctaccccggggatgcagaagcaggcagcgacgaagagatggagcaccaactcgagaagttccggcgcacctggcgcaaaccacggaccagggtgcgatgggaatgcgaaaagtgtcaaaatctttttgtctctgggtcgccgcaatgtcctggttgtggccacgagcgatgcgacaaatgtaccagatctcctatcaaaaaagccaagaaagaagaacagtttgacccccaagttgttgctgctgtggaggccaaactgagagctcttggggtggacgacgattctcttccgccttctgagattgagaataagtgaaattactctccctattcctattcgacaataacatggctggactatgtctagtatttttcccccc

SEQ ID NO: 12743 - DNA, 305 bp, Glycine max
  Clone ID: jC-gmle01810064b02d1
cttccttattttttttttttttatttttttttcatgggggggaaaaaaacacaaaaataaccccccccttcattgttctataccaaaatatgcaaacttatctcaatttactcacaaaccatagaggggaaaaaaaatgccccccccccaaagcccttttttttccccccccccacaaaaacaccccgggggacaaacccgactttttttttcccacttttagaaaaaaaacgcttaaactagtgacgaaccttccggaccacaacaatcacatttggggtgccctcaacaaaaaaagatatcac

SEQ ID NO: 12744 - DNA, 83 bp, Glycine max
  Clone ID: jC-gmle01810064b03a1
tgaaataatagagtgatctaataattgtatcaagagctagattcctttttattcaatgaaagccagttttttttacactcaag

SEQ ID NO: 12745 - DNA, 83 bp, Glycine max
  Clone ID: jC-gmle01810064b03d1
cttgagtgtaaaaaaaactggctttcattgaataaaaaggaatctagctcttgatacaattattagatcactctattatttca

SEQ ID NO: 12746 - DNA, 534 bp, Glycine max
  unsure at all n locations
  Clone ID: jC-gmle01810064b04a1
ctctcacaaacacactgtcttttggggatcgaattgtatcgttcctgattggccaattcagcttgctttggattgatcagcagcaacgcctgaagttcaatgttgatgttgttgagagtgaatggggccatggtgctaagcttgatgttctggaatcaaagattgcttcagatacttcacacactataaaggcaatttgcattgttcacaatgagactgcaactggggtcaccaatgacttggccaaagtgagacaaattcttgattcctaccagcatccagccctccttattgttgatggagtgtcttccatttgtgctcttgatttccgcatggatgaatggggagttgatgtggcaataactggctcccagaaggccctttcccttcccactgngataggtattgtggttgcaggccctaaagctattgaggcctcaaaacatgctaaatcacttagagttttctttgactggaaagactacctcanattctaccagctaggaacctattggccatacactccttncatac

SEQ ID NO: 12747 - DNA, 424 bp, Glycine max
  Clone ID: jC-gmle01810064b04d1
aagatgcaatgatttttgatatacaggacaataaaagaagcaatgcattaaagctgaaagtagaaagtacgttcatcttcaaaggagtgtaaaagagggtaatatatattttacagaatttctgaaagagcagaaaaaggaagtaaagacaagaatgatttgtgactcaaatcctggaagggatcataggaatagtgttctgtaagtatgcactggcagcagcaactccacttccaagctttacaggataacccacatctttgagtatcatctctacaccagctagacatcccaacagttgcaactcattcaagtggccaagatgtccaattctgaaaaccttcccagcaactttgtttagtccaagacctaagctcaaattgtatctcttccatgccctcctaactattttagtactatcaat

SEQ ID NO: 12748 - DNA, 580 bp, Glycine max
  unsure at all n locations
  Clone ID: jC-gmle01810064b05a1
cagctttgtctcatcattcagagaagcagtctacaaggttaaatgcagaagtgagtcttcagatggacattcgggttctgcttttcaaggaaatgaagcccaaacagataattttatcgaaatgtaccttagaccaccttcagctagtgaagaagcaaggataaatgattggatcaaagtgcggcagtctggaattagatattatttatcacttggtgaccagaggattgttgacaagaatttcatcatcaggcctaaagctgaatttgaggttggtcgaatgacattgggtggattattggctcttgggtacattgttgttgttagttacaagcgtgcctncacaactgtcaataatggcaaggtttcaatgtcttttgaaactattgatgttcttggtgagacgttcatggtgatgagaggaactaatagaaagactgtcagaacagaagcattaaggatgggtattaatggaccttggattactaaatcatatctggaaatgattcttcagagaaaaggtgtacctcgtcttagtacaccaccacttgtgtctaatacaactgtggctggtagtcaa

SEQ ID NO: 12749 - DNA, 489 bp, Glycine max
  Clone ID: jC-gmle01810064b05d1
aaaagaaaaattgtaatcttgaccaatgacaattcatgttctacagtacagcccaaattcctcctctcaatacttttttagcaaacattgaaccttggaacaggctacaagcttgtggacttgtggtcattaacgtctataggggtgttgagtcaatactttcattatttacaaattccatagcggagaagtgggcgggggctgcatgtctgaaactcgttttggtcaccaaattatgtacgtgtgaattaatcaacaattaacctttgaaatgatgaaccacaatgtataatggaacctacactcgagggattagttgctgttggtagtttatgattggacttgccatttaaaaaattgggatcggtatacgaagtaacttaaccagaacggcaaaacatgatcctgaaaatttcaaagatcattattggcgcttcctttgatacagcgaataaccaacaagggcagacatcagaaatgtccatagaa

SEQ ID NO: 12750 - DNA, 490 bp, Glycine max
  Clone ID: jC-gmle01810064b06a1
ccaaaacaaacctaaaactcagttcgcaatgtttctccaactcgaattcggtagccccgatttattgccgcaagtttgttgctcgcacttcaattggagaaaacgagagcgagagcgagaaggagttagggttcgtgggggaggactctgcggtgtttgaattgggcaaacagaaagtatcttcgtggatttatttcaccgctattttgggagtcgttctctatgttcttaacgtcgcatggattgataattcaactggctacggcaaagcttttattgacgccgtttcaacgctttccgattctagcgaggtggtaatgttgatcctaattctcatatttgctggtgtccatagtggcttagctagcttccggaacactggtgagaaactcattggagaaagacctttccgtgtactttttgcagggatatcactacctttggctgtcagtactggtgtgtaatttattaaccacagatatgatggact

SEQ ID NO: 12751 - DNA, 489 bp, Glycine max
  Clone ID: jC-gmle01810064b06d1
aatctcttcatctctgtctatggacaaacagtagattttacagaaaagagacaggatgtgttgtgttcaacctaccaatgaaggttgaaactagcagcctgcataagcgggtgtgcaaagtaagcacctaacgttattgcagtaactgtcaagtatggcagtcgaataaactccttgtagaaatcttttggtaactcttgtcggccatcgaggattgctgcaaaagggacaacacttgttcgactcttaactaattcaaaatcctccccatatcttatggccagtcgcctgtctccattccagacaccaaatagatgatgtgcaatcaagccaattgaagctgcaacagccacggaatttccgatccaaatcgtatgagcaagacaccagataacctgcccaaccatctgtggatgcctggttattcttatgatcccagtttcccatagatgcaatttaggcttgtcaacagctgcaacctctaaaaga

SEQ ID NO: 12752 - DNA, 417 bp, Glycine max
  Clone ID: jC-gmle01810064b07a1
cttacacgcagacttgttgaagtggttcaacacattgttgtacgtcgaacggattgtggtaccattcaaggaatttcggtgaatacccagaatggaatgatgccggaaagaatatggatacaaacattaattggtcgtgtattagcagacgatatatacagaggttcacgatgcattgccgttagaaatcaagatattggaattggacttatcaatcgatttaaaacccttcaaacccaaccaatatctatccgaactccctttacctgtaggaatacatcttggatctgtcgattgtgttatggccaaagtcctactcatggtcacttggtggaattaggagaagctgtaagtattattgcgggccaatccattggagaaccgggcacttcactaacattaagaacttttcatact

SEQ ID NO: 12753 - DNA, 615 bp, Glycine max
  Clone ID: jC-gmle01810064b07d1
accgttcttggtggtatcaacacggcactgtgtcgggatatcttatccatttctccgggaaaatagatatccccggaaaatatttttaattcaatctttttttttttcttctccaatcggaccaatccccttactcgacttcttatatttaaagtgattagtgtatctacttcaacgatactattgttccgtaccattatggaagaagattctggtaaaatatgcacttcctcgggaatgaaaaaaaattgatctactttaatttggtattttgtcttaaattctttaactccttgatactcaattaaaaaatcctcttttttaaaaatggaatttatacctatagtcctatatttagtaattcccgagctctgtgttcggtattgaggatcatcgaaataagcaagaatgctatttctacgaaaaataccattgattggtatttcaatcgagatactggaagctaacattagctctttgtctcgttcttgaatcgattggaattgaaatggaataattaatctatttctccgcctctttgcttataaatccgtagtatcatggaaaatagtaggatgtgtaaaatgaccatgatctatagatatgattggataa

SEQ ID NO: 12754 - DNA, 518 bp, Glycine max
  unsure at all n locations
  Clone ID: jC-gmle01810064b08a1
ggggcatgcaagttgggtttcaagtgagttagaacccaacttgacttcaaatctcatagctagatggtcagctcgtggaggtgagccttgtaaagattccaaggctgtggagattgcaattcctgggttggatggtggggaagtgattgagctatcagctggagatgtgcatgaatttggttttcaagcactggatgattcagggaagcctctttgtgtaggtggggactactttgagactgatctttcaggggactcatggaaatctaggcctttggtgaaagatttcagcaatggttcttacttaatttcattgcaggttcacccagattttgatggggtttacaatctcactataatcctgctctatagacactttgaaggtttgaagtttaccccatggaggttttcttatgaccaaatgctgcgaagtgttgcaatcagattctacataagcagtggtcggctaccagaactgcanggttgcaaggcttcttgatttgacagggatgtgtgga

SEQ ID NO: 12755 - DNA, 578 bp, Glycine max
  Clone ID: jC-gmle01810064b08d1
aaacaaagaatagcctttgaataatactattgatcatggatagtaaaatgtgttttgaggagttaaatcccctgctaatctacaagtggaacaatcttatcatgtatgcataactcacactaacaaaaaatatatgagcaagaaagaatgacaaacctaactatatagaaacagccagagtccaagcattgtggacactacctcaatagtcttcaaccaagcaaaaggtgcgcattattctatattgggtgtgcatacaacacttgctttgaatgctatcttgcacatagcgcattgagaagaacatgagctaacataaggtccacgaaatattgatgtccaatttggccatctctccacttcatctttgctggagctcttccatagtgaactccatcattacaccggttatcaaaatgccatggaaatgtcatatcaaagttatcaatcacaccagaaacaactcctgattgcttcaatttctccaacaacacaccattgaacacctccatcttgttaggattgaatgctagtgaccttgcatatccaccagttgcaactgtatttccgaaaaacac

SEQ ID NO: 12756 - DNA, 290 bp, Glycine max
  Clone ID: jC-gmle01810064b09a1
aagtctttcagtctttctagttctaccaacaacaagtacgaaccaatactaataataatattattattattctcacgggtaaataaataaataaaatggtgcgtgcatagtaataggctaatagggtagtagtttcttcatgttgggtagttggaactccttaagcagcttcagagtctgagaagtgagaagcggaagaagaagcgatgcgtttttgcccgtgttttggatccgaggaggccaaaggggtggcggatcgcgacccggcctgctggtttcgggcatgggcg

SEQ ID NO: 12757 - DNA, 552 bp, Glycine max
  unsure at all n locations
  Clone ID: jC-gmle01810064b09d1
agtacacggcccaatgaaaagtctataatattggagcataatgaaattacattacactcaggtaatttagattacctgaacatacgccaaattgtttattgcacaaacaatgttatctaaggtctttctaagcttgttttctttttctcttaaaaaaagaagaaaaagaaaagcatggaataatattctcttttggtcaatgaggaacgaaaataacaagttcatagaaccataggctgagcatctgccacttttgatgttttagaatgcttgccaaccattggctcaacacccaaccatttttgaatatgttgaaacactgtttcatctcgtaatattccacggtgagaagcagcaactcccaccctttcagtggcttcaagtccatcacccttggcagattcagaaggaaccgttccatctcctccgacgtaagaatatagtggcattgtgtggcatatttcagataagtcctctattggagagttttccgaaccataacaaacatcanaaggtgtgtccaatgatgtcccataaatgttatagaaacag

SEQ ID NO: 12758 - DNA, 535 bp, Glycine max
  unsure at all n locations
  Clone ID: jC-gmle01810064b10a1
caagacatcacaagaggaaagggtttggttgactcccttttccaagctccacaggatgctggaactcactatgcagtcatgagctcctacgagtacctcagcactggacttcgccagtacttggacaacaaaatggatggattctacattgctccagcttttatggacaagcttgttgttcacatctccaagaacttcatgaccctgcccaacatcaaggttcctctcattcttggtatctggggaggcaagggacaaggaaaatctttccaatgtgagcttgtctttgccaagatgggaatcaaccccatcatgatgagtgctggagagttggaaagtggaaatgcaggagagccagcaaaactgatcaggcagagataccgtgaagctgcagacatgatcaagaagggaaagatgtgcgctctcttcatcaacgatcttgatgcangagctggtcgtcttggtggaaccacacaatacactgtgaacaaccagatggtgaatgccactctcatgaacattgctgataacccca

SEQ ID NO: 12759 - DNA, 546 bp, Glycine max
  Clone ID: jC-gmle01810064b10d1
aggacaaaaggaaaaggcaccaaattcaatttaagtggacactgtaactcaaaattatagaggaagacggtccaatatgaaaaatatagtaagatcatctcaaacttagcatcttctctttgcacctaagacattgagaatgctaagaatgttacacgcaagttccatcacaacttctagcacttggattagtacaacaaccttcacgaacagaaatatttacttgccaagtttgctttgcctccaattcaagactggaagaaagttcccctctgaatagcatcctcgttagcatttccaagagcagcctcgttcaagtacttgtcagccaattggactctcttgacattctcttgttcttggacaagcatgttaccatacagcaagagcttctccagagtcatcttgggctgctaaaggttggaggtccatcttttgagttcacaagcttcttccaacactgtcaacaccaacaccagaaatccacttcctcacttcatcatcatatactctggccctcagtgcaccaaagaaatcaatggattg

SEQ ID NO: 12760 - DNA, 526 bp, Glycine max
  unsure at all n locations
  Clone ID: jC-gmle01810064b11a1
cttgatcggtggtgtatttggtgtgttgatgttttattaaacttttgtactcttgctttgaaactagttggttagatttgaaattcttctaagatggatacttcttataggactggtggagtcaagtacgagtgcttgcttttcgatatggatgacactctttacccattgagcttaggtctcaatttgttttgtcgcaagaacatacaagagtatatgttagaactcttgcatattgaagagagtgaagtgccaaaaatgtgtttggatttgtatagggaatacgggacaactatggcaggattaaaggtccttggttatgagtttgacaatgacgagtttcatgcttacgtgcatggaaggttaccatacgagaaactgaagcctgatccagtattaaggaaccttctgctgtccatgcctcagcgtaaaatagtatgtcagggaaatgtcaaaccttctacatacnattgcacagtgaggagcattccacaatattctttgactttgaaatgttatttgcaga

SEQ ID NO: 12761 - DNA, 515 bp, Glycine max
  Clone ID: jC-gmle01810064b11d1
cgggaggccaaatggcaagatttatattttcaagcttcaccatgccggggagacaatttcaaacttattgtaaatttaaatagaaacatactgcagaggtagaaactcttgatttgcttgataagtctgctaaaaacattttatcgatgtaaaacttaagctaggaccatggtttcaactgtggggggttgaatcttttgctgtgggttgccatcttcaatctcccaaatttcaggtaacgcttttttgatattatgaatgctgttcagggcatgatcagctccagggaccaaatttgaatggcccacctgccaacaatgagttattacttgttagcttgcattgcacgacaaaggggttataaatttcttatatcttctcataaaatgcatagatggcaaattgtatcttactaaaacagtgttaagtccagttatttttgcactttcaacatttctaacactgtcatgaaagaaaattgttttctttggatccacattagcaatccgaatagc

SEQ ID NO: 12762 - DNA, 479 bp, Glycine max
  unsure at all n locations
  Clone ID: jC-gmle01810064b12a1
gctttttatttcaaatccaacattactttaactgtcttccacataaatccaccatggccgactcttcttcttcttcttccaaacgccaaaagcaacatgatgatgatgatgatgatgttgaagaacaacaacctctgatcccaggtctccccgaccacatagcagaattgtgtctctcctccatcaaccattctctcttattctcaatctcccactcctgccgccgtctcatatactccccttccttccctccctttttctctctctacgccattctctcccactcctccgccaccatccacttccacaccttcgaccccatctccgcactgggtctcccttcccttncgcaccctcccctccaccacctcctcctncgccgncacccctccttcctctcccgcagcctctccgttcagtgcgtctccttctccaaccgactcgtactcctagccgtcaccacccacaacctctccccg

SEQ ID NO: 12763 - DNA, 393 bp, Glycine max
  Clone ID: jC-gmle01810064b12d1
agcctataacacctatattttattttttgttattaataataatcatgtttgattcagataaaattaattactcttaaccatgtcaatcatacatgcaatcactggtcggctggcatccggggtaagatgtgaacggccaccggctcgaactcttccggcagcaaaatcggcacaatccgcggcggcacagcggcgacatcgacgacggagatcccggaagaaggcgaaacgacgcacagttttcctctctgagcgacgatttgttcggctcctttgagtctcttattctcgagaatgtcttcccacgcgtcctgttcctccacgtatcttctgagaacacctttggcttcgtccacaacgtacatgacttcctctttcatggccgcaacgggt

SEQ ID NO: 12764 - DNA, 526 bp, Glycine max
  unsure at all n locations
  Clone ID: jC-gmle01810064c01a1
gttgcaccttcctcgtaaaagataactcccggtcggcgtgcatagccgccgattgaggcaaaaaaaaaacacaaaacacactgtagctcatcacagccaaacgcggcgtcaacgatgacgagcttctgaaattccaacttcgcccttcttctctgtgtatattcttttttatttatttattattatttctattattttttcggtgaggttagctccatgcctagtcccaagagcagccgcagcggccagatcgagagtcaccggaggggaaggtcgtcgtccttccacggccagtgcgcgatgtctgtcggtcagctccaccgtccgaagacggtttccgacctcccgtcgctcagaagcctcgccggaacggcgccggcgcctatgccggagggattgcctagacagccgccgaagatgctgctgaaggtgacggtgctgagaagcctcgcgcccgtgcaggtgctgatgacgccgggatccaccgtncgcgacctgatagcngcggcngtgcggcagtacgtga

SEQ ID NO: 12765 - DNA, 521 bp, Glycine max
  unsure at all n locations
  Clone ID: jC-gmle01810064c01d1
gcaattgaaagctttaacattaccatgtatgtgtttaaaaatcatacatgctattttacaattttgctttgcttacacacaaatctcaaaccctgtacctaattgccaagccaacctattattttttacaagtaaccggccattcattctgggacaaataaaaaagacatttcaattgaaataaaataacaataatgactaatcaaccaaccaatcacatcatgaactgcatgagtttgaaccaagcaaacccaccaccaccaccaccatatccctccctctctttctctgcctctttcgcacaagacgcaaacgacgtcgttacgccatcttccactgttgtagctggctttctcggacatagaanaaagttcctagatccaagctctagcagcttctccttgctatccaaacctgaaaagaaaaacaaaaaattaacatcacaacaacacaaatcccaatcaattgatttttcaggagaataaaagaaaccaaggactagttaatttatgaataaagta

SEQ ID NO: 12766 - DNA, 547 bp, Glycine max
  unsure at all n locations
  Clone ID: jC-gmle01810064c02a1
agaaagcaagctcatcctagagttttaaaaatggcagcagcctcctccatggctctctcttccccatccttggctggcaaggccgtgaagctgggcccatcagcccccgaagtcgggagggtcagcatgaggaagaccgtcaccaagcaggcctcctccggaagcccatggtacggcccagaccgcgtcaagtacttgggcccattctctggcgagcccccgtcctacctcactggcgagttcccaggtgactacggctgggacactgctgggctttcggccgacccagaaaccttcgccagaaaccgtgagctcgaagtgatccactccaggtgggccatgctcggggccttgggctgcgtcttccccgaactgttgtcccgcaacggggtcaagtttggagaagctgtgtggttcaaggccgggtcccagatcttcagcgagggtgggctggactacttgggcaacccaagccttgtccacgcccagagcatnctcgccatctgggccacccaagttatcctaaatgggtgctgtgagggttatc

SEQ ID NO: 12767 - DNA, 387 bp, Glycine max
  Clone ID: jC-gmle01810064c02d1
ttttttttttttttttttttttttttttttttttttttttttttttttttttttttttttttttttgggaaaaagcaagtaacattaagttgggttgggatccccaagaaaattcacattttttgaaggacattggaataacatattcttcaccaaacacaaatttaaaaacttttaaaagtccacaagtcatccttttttttcatgcccacttgccggggacaaaattggggggctaggcccacgcctttttgttgactgggtccccaaggggatcaaaaagggtttccaatggacccttaccggggacaatggcccgtacaaaaaaccccaaccccgggaaactggccaatcttccgctcttggggtccttccccttaagcccac

SEQ ID NO: 12768 - DNA, 533 bp, Glycine max
  Clone ID: jC-gmle01810064c03a1
cggctcgagattttctccatgctaacaccttcgttcctccacgatttcgccattacgaagaaatacgcgatcttctgtgatattcagctcggattgaaccctcttgacatgatctccggtggctcccccgtcggctccgtcgcctccaaggtcccaaggatcggaatcctccctcgtgatgctaaggatgagtcgatgatgaagtggttcgaggtgccggggttcaacatcattcacgcgataaacgcgtgggaggaggacgagggaagaacggtggtgctggtggcgccgaatattctttcgatggagcacgcgctggagagaatggagctagttcacgcgatggcggagaaggttcggatcgagctggacacagggataatcacgcggcaaccggtgtcggcgcggaatctcgatttcgcagttataaaccctgcgttcgtggcgaagaagaacaggttcgtatacgcggcggtggaggacccaatgccgaagatctcgggggtggtgatactcgacgtgtcgaaggggga

SEQ ID NO: 12769 - DNA, 422 bp, Glycine max
  Clone ID: jC-gmle01810064c03d1
aacggtaataatgaaaaatacaaataatttattcagctgttccttcatgattcacccatacatgaacgatgattactttgtttagctggcatagacttgcatgtaattactaattacacctcatcaattaattctgagaagcaataatggtgctatacattacattacaggacacatgtataatggacagaagcgtggaagacaagccccacacacgaaccatcatgtctcagcttcacgacaacgatactttcctcagctcactctgcttcacaaacaggccatggaacccgtacggaacccgccgaggaagcctaaccgccgggacaacatgagatttcggtgacttcgcgtccatcaccgaaaaccttgactcccccttgctctcatggtgcacgtaactcaccaagtacccatcatct

SEQ ID NO: 12770 - DNA, 529 bp, Glycine max
  unsure at all n locations
  Clone ID: jC-gmle01810064c04a1
gtttagtgacatttgcagtagtagccagcaggacgaggaaaatgggtagtgtggccccaaggttccgcttcctcctggccactcccttccctcttctccgccgccggcaccaccaccaccaccgcaacctcttcctcctctccacccattccctccccttatcttccttctctttctctctcaaactcaaagcctcccaatcccaagcttccgcccctaacacctctccctgccctgagtggtcctcattcctctcccacatctcctccgccggctacctcccctccctccccgaccaagccttcaccgccgccgacgaacgtctctcctactccttcctccgcgacgccaccgnctgcctcgccttcgcacgtgaccgtcctaaccttctcaggttgctttctacgagagacattgcngcgctggttgagcacggctccccctttctcttccgcgacgccgacgactccgtcaggaagatgaagacctttctctcaacggtgacaccaatgtgttggacactgataga

SEQ ID NO: 12771 - DNA, 446 bp, Glycine max
  Clone ID: jC-gmle01810064c04d1
atacaaacattggttttaatgcatcacttatttctggaatttcagaaactagtccgtcgacaaagataaatacttgctgtcaaaattctgttacaagtgtaaataaaaaggtttgagtagtaatgttttccatcatcttcatcatcctttttctatatttgccagcaacattttaattgcacattgaaaaattaagcaaatggagaataataaattaataatactaccacttttcagctaccttcattttctttattaattggatctgagctcacagttggaagattccttctgtactgctgagacgtcaatctcctttcaatgggtgttttcctcttgcttacaacaaatctgttcacccctttgcgcataggcattattgaaggaaaatcttcgtctggaatctgactgagctcagaaatatccttaatctgtgcgacgcgacg

SEQ ID NO: 12772 - DNA, 529 bp, Glycine max
  unsure at all n locations
  Clone ID: jC-gmle01810064c05a1
ctgcatatgaaaattaccacaggatatttgtccctgatgggcatcctttgaaggctgcacccagagagcctttgagggttaatgttctgttccaacatatacaaaatatgctgtctggtgaaactgctgtaattgctgagacaggggactcctggtttaattgccaaaagctgaaattgccaaaggcatgtgggtatgagttccaaatgcaatatggttcaattggatggtctgttggtgctactctgggttatgctcaagccgttcctgagaagcgagtgattgcctgcattggtgatggaagttttcaggtgactgcccaagatgtatcgacaatgttacggtgcgggcaaaaaaccatcatctttctgatcaacaatggtggatacaccatcgaggttgaaattcatgatgggccgtacaatgtgattaagaactggaattacactgngttgattgatgcaatccacaatggtgaaaggaaatgctggactgccaangtgttctgtgaagaggagctagttgaagc

SEQ ID NO: 12773 - DNA, 450 bp, Glycine max
  Clone ID: jC-gmle01810064c05d1
aaaaagaacgatgctttacttaagaataatcgaaatgaacaaaggggataaacaaaggggaacaaaagtgaaagaatttacacacacaaggggggagtcagtttatcataaatgtttcaagccattaacaaaggtaaattccctacaagggcatcatctcaaatgattttcactttcatagagctaaagggcaactgcagcaatttagccataggataaattctgaagattactgaggattgggaggacgggtattggcagcaaaaacccttgagccccattcaagcaattctttactggggtgatacttatgaacaatcacctcaatgaagcatatggagtctttcttgggtcctgtggctgtggcaattgcttcaactagctccttttaacagaacaccttggcagtccagcatttcccttcaccattgtggattgcattaatcaacc

SEQ ID NO: 12774 - DNA, 513 bp, Glycine max
  Clone ID: jC-gmle01810064c06a1
ttcagttaagggtgaaccttatcaacagcatgctcatcactattctgtgtggaacctgttaaatgtgctatagctttatttcaacttctccatggcttcttttctttccttatctcttcccaagttaaacttaataaaggcctcttcagcagctaacaccactacaacaacaacaaccactcttcccacagctgagacactcaatgagaaattgggcagaaaaggcatcaggttcttggagtctgataacactcccatagttgacttaccagtgagaaatggcagctccttgaggctgaggatacctgatgctcatgtgacatcatccaaaccaaaagttaattggaaagatgatggatttcaggaggttctttacacaattcctgcaactgaaactggcccttacaaggccaaaggtggtgttggtttggtcatgaatgaagtgctacaacctggagccaaagggttactaccttccactttagagtggactgtaaatgatgttgactctga

SEQ ID NO: 12775 - DNA, 420 bp, Glycine max
  Clone ID: jC-gmle01810064c06d1
ggcaagccttatggaaccccttttattgatataaaatttgactattgggcataaatcaaattaacaaaatttcccttgttttagggaaaaacaatacaaatcctgctccaagaaaaaaaactaaaaaaaaaatcaaaaggggaaaaaaaccggggggaaaaaaaaaaaaaagaagggaaaaattttttttgtttaggggggtttttcatttttactgggcagctaaaaatcattttatagctttcacattttaaacccgattttttacttttcaaagaattcttgaacaagccaatcatggcaaaatatcatgctcaaaaacttgggcaccttttcatttttccccaggaataaaaggcacaggccccccttttgaaacagggcccgggcaaaagaaaaaacccttttcatatttttttg

SEQ ID NO: 12776 - DNA, 520 bp, Glycine max
  unsure at all n locations
  Clone ID: jC-gmle01810064c07a1
cattttccatttcttctgtgtctgaaaaatttctctttcttgtcttcgtgttttctccttcttcttcgcttcatcgcttgccaattcaagttgcttgacatggctacgcatacgcccaaaaatatcctcattactggagctgctggattcatcgcatctcatgttgcgaaccgtcttatccggaattatccccagtacaaaattgttgttcttgacaaacttgattattgctcgaatctgaagaatctcattccttcaaaatcatctcccaacttcaagtttgtgaagggggatattggaagtgctgaccttgtcaactaccttctcatcaccgagtccattgacacaataatgcactntgctgctcaaacccatgttgacaactcgtttggtaacagctttgagttcaccaagaacaacatatatggtactcatgtcctattagaagccttgcaggtaactggccagatcaagaggttcatccatgtgagcactgatgaggtctatggagagacagatg

SEQ ID NO: 12777 - DNA, 595 bp, Glycine max
  Clone ID: jC-gmle01810064c07d1
aactgaataccccacaaaaaggatataatatatgagcaataaaaagaatacatgccttccaggatgcaaaagcttttaggtaacaagaccctattttctaaggctgctcttaacagaggacgctacaaactagaataaagctacagaaatgttaacttaggaaccatatctggcccaattattatacttgtcaccctctaaacacagtaacatgatggaactatgctgaaactggaatcacttgtagctatgagaacaagaactacatggctagcttttctagtaaggttcttatcaaaacccaacgaaataacaatgaaataaagagtgatctatgtagcccgcaacaaaaatgcataatctttgatttctaaaacatgaaaccgctcaatacttttaagcagttttcttgtttggctcaaagacatacttgatcagtgattccttgatggaaagaagctcagggaactcgttcttcagtttggatgcatccatctcattgttgctccgtggagcaattatcaccttggcttgctcttcaagattgagttagtccacttgaagctggatcaatgaatccctgtcatctcgagaa

SEQ ID NO: 12778 - DNA, 522 bp, Glycine max
  unsure at all n locations
  Clone ID: jC-gmle01810064c08a1
atcatgactttgtcttcatgggctacttcaagtgttgaagaggtagcttcaacaggacctggcattcgctttttccagctatatgtgtacaaggacaggaatgtggttgctcagcttgtgagaagagctgaaagggctggattcaaagccattgcccttactgttgataccccaagactaggacgcagagaagctgatatcaagaacagattcacactgccaccatttttgacattgaagaactttgaaggattggaccttggaaagatggacaaagctgatgactctggacttgcttcatatgttgccggtcaaattgatcgtactcttagctggaaggatgtgaagtggcttcaaacaatcaccaaactgccaattctggtgaagggtgtgctgactgctgaggacacaaggatagctgtacaaagtggtgcagctggaattatagtgtccaatcacggagctagacaacttgattatgttccagccactatatcagccttagaagaggtngtcaaagct

SEQ ID NO: 12779 - DNA, 510 bp, Glycine max
  Clone ID: jC-gmle01810064c08d1
ggataaaggactcaaaattaataatatacaatgagtgaatgcagcagcagagtagccacagaagtatcatcatattaatgcttagaaattaagcatagagttatccaaatacaagtttaaatgagttgtccaaaaaggaaaagaaaggatgagaagaacaggttcatgaaacatatatagaagtgtttcccccattggaaaaagtttttcataatcttggcaaggcgcgggggatagtgcgtggttggtcccaatcagtgacaatgtgatcacgagtgatatccttgagtgaggtgcaaccactcaaagccatggttagctcaaactcctcacgtagcatccgcagcacatttcttacaccagcctctccttcagcagccaaggagaacaccactgggcgtccaataaatatgccagaggcacctagtgccaatgccttgaagaaatcagttccgcggcgaacaccaccatccaaaaatacaggaacacgaccttcagcagctttgacaa

SEQ ID NO: 12780 - DNA, 559 bp, Glycine max
  unsure at all n locations
  Clone ID: jC-gmle01810064c09a1
ctcgagccgctcgatccgtgctattgaagttgaagtcttgcccttctctcttcaactccaaacacaagacattatcatccatggctgcctccgtctccactgtcggagctgtcaacagagctcttttgaacctgaatgggtctggacctggggtttcagctcccagttcatccttctttgggagcagcttgaagaaggttattggctcaagggtccccaacacaaagatttcctctggaagcttcaagattgttgctgtagaagagaagaaagagattgaagagacccagcagaccgacaaggacagatggaagggtcttgcctatgatatctcagacgaccaacaggacatcacaagaggaaagggtttggttgactcccttttccaagctccacaggatgctggaactcactatgctgtcatgagctcctacgagtaccttagcactggacttcgccagtacttggacaacaacatggatggattttacattgctccagctnttatggacanactngatgttcacattaccaagaacttcatgaccctgcccacatc

SEQ ID NO: 12781 - DNA, 542 bp, Glycine max
  Clone ID: jC-gmle01810064c09d1
aggacaaaaggaaaaggcaccaaattcaatttaagtggacactttaactcaaaattatagaggaagacagtccaatatgaaaaatatagtaaaatcatctcaaacttggcatcttctctttgcacctaagacattaagaattctaagaatgttacacgcaagtcccatcacaacttctagcacttggatcagcacaaccttcaggaacagaaatatttacttgccaagtttgctttgcctccaattcaagattggaagaaagttcccctgttaatagcatcctcgttagcatttccaagtgcagcctcgttcaagtacttgtcagccaattggactctcttgacattctcttgttcttggacaagcatgttaccatacgtcaagagcttctccagagtcatcttgggctgctaaaggttggaggtccatcttttgagttcacaagcttcttcccaatgccgtcaacaccaacaccagaaatccacttcctcacttcgtcatcatatactctggccctcagtgcaccaaagaaatcaatggat

SEQ ID NO: 12782 - DNA, 541 bp, Glycine max
  Clone ID: jC-gmle01810064c10a1
gtgtagctgtgcacagctcttttttttttctttttctttttcgaacttgtttctttcgtttgcttctttcttctttttcgtgtcgagttgctgaaaagaatatgctaaaagacaagtcctcttgttaccgcagtttacttttttccctttaacacttaattattaggtggtgaatccgaggacaagaaaaagacactcaaaatgtgattcagttttattttttttctacccttgtctgtgatgtttttctatccctgagttatgatttaaagagtaccgtgcaagtttttctgattgtccttattaatggcttgatttttctgtttccaaaacattggttcctttctcacatgcttggtgtggtcttgtctgggtttcgatttgagtacaactttttgataagcaaaggggatatttgtcctccttggttgacattggcctgtttgcattgagtacttgtagggagtacgtaataagaaggttaattgaattaagtgagaggttaaatgggagaacttctataaaagttgaagtgcataag

SEQ ID NO: 12783 - DNA, 583 bp, Glycine max
  unsure at all n locations
  Clone ID: jC-gmle01810064c10d1
acgaggccgaaaaatattatgtgacttgtaaatgaatttgcagtaaacaaatattcatttacattaaacaaatattcaattgcaataataatgctagtcctcagcttgtcttactgaattctgcagccttgttcttcttgtcggagaaatatcaggccccgtctaatcctctcagcagtgtctcttatgcgtaggagatccaatctttccgcaggcctccgattggagagagtagccagccaaaaactaaagcgctcagggtcttttggtgagggcatcattacttcaacactggcgagtctctcaagttttcttggatcatgttttgctgcttctttagctcttgctatccacgatcgagcatcttcagctgcattatatgtttgttggtgtaaagtctctctttcacttgttccttctggtggcataatatcttgtatccattcaacctctgcaacacgatacccatcttgatccctagaacggatgatacgaaatctcctacgactttcaatctctatataaaaacgaccatctggagtggntcacactctgttatttccacttcacagggcaactcagc

SEQ ID NO: 12784 - DNA, 403 bp, Glycine max
  Clone ID: jC-gmle01810064c11a1
gttctagatcgcgagcggccgtccttttttttttttttttttcacacaaagacatatcaatttggaaaataattataatttacaaggcttacagcacgtaagaattcaaccgaatcagacaattctgcatcttttcttatgcctagaaattgtcagatccttataacaacaggtccaaagctcactttcttgatggaaactatttctatatcacctcacatgaccttacttctggacataagcccaagaacctgatcccaaagcccaatacttgccacacttcccagcccaaccacacttgggctacacgcagccacagtccaatacccagcccttatctcatttctcaaaaaaaaaaaccggcattcatgaaccgtgatatccctaaaaacataaagggccc

SEQ ID NO: 12785 - DNA, 354 bp, Glycine max
  Clone ID: jC-gmle01810064c11d1
gaaaaatgagataagggctgggtattggactggggctgcgtgtaacccaagtggggttgggctggggagtgtgggaagtattgggctttgggatgaggtttttgggcttatgtccaaaaggaaggtcatgtgaggggatttaaaaatagtttccaacaagaaagtgagctttggacctgttgttataaggatctgacaatttctaggcctaaaaaaagaaacagaattgtctgattcggttgaattcttacgggctgaaagccttgtaaattataattattttccaaattgatatgtttttgtgtgaaaaaaaaaaaaaaaaaagggcgggccgctcgctatctaaaaccttgg

SEQ ID NO: 12786 - DNA, 528 bp, Glycine max
  Clone ID: jC-gmle01810064c12a1
gggaagccaaagcgaaaccctaaccctaacggagagatggcggagcacttggcatcgatattcgggacggagaaggacagggtgaactgtccgttctacttcaagatcggcgcgtgcaggcacggcgaccggtgctcccggcttcacacgaagcccacaattagcccaacgttggttctgtcgaacatgtaccagaggcccgacatgaacatgaacatcatcaccaaccccgatcagccccagccccaatctctcgaccccgataaggtccaggatcacttcgacgacttctacgaagatctctttgaggagcttagcaagtacggccccattcagagcttgaatatttgcgacaacctcgccgatcatatggtctttctctccgcttccttcacgcaattttaattcttcttaaatttaattgttttaattgattattttgcttctttcgttgtttgcgcatgttggaaatgtgtacgttcagtttacggaggaagaccatgcagccaacgccctcatgaatctgac

SEQ ID NO: 12787 - DNA, 580 bp, Glycine max
  unsure at all n locations
  Clone ID: jC-gmle01810064c12d1
acttaacaaaaaaaaaaacctttagctattcacatagtcgaaattcatacatcatttcatctgttttccatctaaatacccttcaacattggtgacatacaataaatgctcgacaacaaaatatgaaacattcataggtgaactttatcaaatgtatcgcttcatcctcgcaacaagttaaactcgccgctttttccatttttcttcctcccttgcagaacattacaattgaagcagaaaattaaaacattgatgctatggatgttacaaggttctatcactaaattgacaattccaaatagaataaaaacaatggcaactgaatccatctaactcagcgcaaacgacaaagtcacaaaccagattacttgccactcttgatagcagattttgggccaaacctcaacgttgttgttgctatatctgatgattaccagattcactgccattttgtgcaacactctgttcttgataatcatcattgctttntgtattgttcttggtactagtttccccttgttccttctccctgttccattgctcaattntagctctcctttctgcactattttctctgatc

SEQ ID NO: 12788 - DNA, 515 bp, Glycine max
  unsure at all n locations
  Clone ID: jC-gmle01810064d01a1
cgaaatcttcggtcatcatcctcaaatcttcgctcgctcacctggaagagtgaacttgattggggagcacattgattatgaaggttattcggtgctgcctatggcaattcggcaagacacgatcgtggcgattcggaaaaatgaggcggaaaaggttctcaagatagctaacgtgaatggtgaaaaatattcactttgtacttatcccgccgatcctctccaggaaatcgacttgaagaaccacaaatggggacattattttatatgtgggtacaaaggtttccatgactatgcaaagttgaaaggagtgaatgttggtgaacctgttggacttgaagttcttgttgatggaacagtgccgacaggttctggactatcaagctctgcagcgtttgtctgctcatccacaattgctattatggctgcttttgatgtgaacttcccaaagaaagaacttgcacangttacatgtgattgtgaacgacatatngngactcaatctggtgggatggatc

SEQ ID NO: 12789 - DNA, 568 bp, Glycine max
  unsure at all n locations
  Clone ID: jC-gmle01810064d01d1
ggtgataacaagtttatttttccattacagaaagtcgcagccataagaagggaagcgggttaaggctgcgacttaaaagccgttcggcaatattatcattatttgctttcatcgtatcaactaaaataatttaacaaagaaaatatggtaccatttaatcttactccatcagaaattgcatctaatctgtgtctagatctcaggggaagaaagtcgcagccataagaagggaagcgggttaaagaacactaaaacttgaagatagcagcaccacttgatggcttggaagcaaatacataaaggccaagatcgttcttcttaataacgcccttgtctattctagactggtagaaacattccttcaaattaaggataaattgtggaactatgctctctttcaccaaagcaacagcacaaccaccccatccagctccagtaagccttgcccccagagcaccattgttacgacaaatatttacaagttcttgcaactccggacagctgcattcatantaaacgctgcagctatgatgactctcgttcataaggtcaccaagcttctttagca

SEQ ID NO: 12790 - DNA, 544 bp, Glycine max
  unsure at all n locations
  Clone ID: jC-gmle01810064d02a1
ccaagagcttgctgttttctagctgttgttgcattgctcagccatggatttgaaagctgaggctaacgcgggagatactgagttccaagcagtgaagattccgagacaaggaggatatagagccacatatttcatctttgcaatgatgttgctggataacattggctttgtggccaacatggtaagcttggttttatatttcatgaacgtcatgcattttgactactctggttctgcaaccaccacaacaaactggttgggtactactttcttgctgacgatcgttggagggttcatctccgatacttatatgaatcgcctcaacacttgcatcctctttggcataatccagttgttgggatactccctacttgtgattcaatcccancgacaaacacttcagcctgatccatgtttaaaatcaacatgtgtgcatggcactaaagactttgctgtgtacgcttcaatatacttgctagcacttggtggtggtggaatcagaggctgtgtacctgctctcggagctgatcaatttgatgaaaac

SEQ ID NO: 12791 - DNA, 414 bp, Glycine max
  Clone ID: jC-gmle01810064d02d1
ctcgtgaaactgagttttctcatttatttttcttcattcaggggaatgttttgaaccgtggacacaaagctagtagagtagacgttttcatcattacgaggaggtggatctttgagcaacattcccgtatcaaatggtacaacactttggtatttgtaccattttgcacacatcagataaatgacaaagttaattatgctgagtatagccaaaaaccagtagaataattcaacatggtttcggttcaagtcacgtccctctagccaccctttcttgctcttggcaatcttaccagtcaccaagttgatgagctcaacaaaagctgtgctcaagtagtaaccaatggacaaggaaagaaaggaaaaggaagtggaaagtgaacgcatgccttgaggagcttctttgtagaaaaac

SEQ ID NO: 12792 - DNA, 541 bp, Glycine max
  unsure at all n locations
  Clone ID: jC-gmle01810064d03a1
ataacctgggaggcattagattgccagttctgactcctaatttaaagggttttgaagctgctatagcggctggtgcgagagaagtagctgtttttgcatcagcttctgaatctttctcaaaatcaaacattaattgtagtattgaagagagccttgtccgctatcgagctgttactcatgcggctaaagagctctctattcctgttcgagggtatgtatcatgcgttgttggatgcccggtggaaggaccaatccctccgtcaagagtggcatatgtagctaaagaactatatgatatgggttgctttgaaatctcactcggggacacaattggagttggtactcccggaactgtagttccaatgcttttggctgtaatggctgttgtgccagcggagaagcttgctgtccacttccatgacacttacgggcaatcccttgcaaatattcttgtgtcccttcaaatggggatcagtgcagttgattcttcagttgctggtctaggtggctgtccatatgctaagggagcttcangaaatgt

SEQ ID NO: 12793 - DNA, 377 bp, Glycine max
  Clone ID: jC-gmle01810064d03d1
ccttcacaactcatcaacgagagggggcattttattctttgtcaataattatggggtaaaaaagatgaaacatttggggtcctctcattgcttaaagcatccaaatataatttttttacggcagaacatattatcatatcttggaagcttcaccagttactcggctaaaggcaatggtagtctttgacccggatgggccccccaaatgcttgccgatgaactcaccagctgacatgagctttccgaaacaacgttggtcttcacaccaagcccattcagcatgtacacaacatcttgggtagctacatttcctgaagctcccttagcatatggacagccacctagaccaccaactgaagaaacaactgcgctgatcc

SEQ ID NO: 12794 - DNA, 522 bp, Glycine max
  Clone ID: jC-gmle01810064d04a1
acctgacctaggtttccaccttcatatctttgtccctttctcttctcttctcactcctaagaattcctcaattcttactccatcaccccaccatgtccaacaggttttgcaagttctatgcccgtggagcatgtttgaagggggatcaatgtgattttgctcatgagaaaaaggatgatatttgcagctattatcagaaaggattctgtgcatatggtagtagatgcagatataagcatgtcaaagcttcccaaccgtcatcttcagcaaatggacgccattctcctgttttggatcctgtggtgaatcatatcactaaaggaacatcaagttgggttctgaaggctgtgaagtcatcttcatcggacaagcgtgcaaggagctcgcaaaaaaagaatccagcctctcttggaaatgatgttggtcaatccagtactagtagtgctataccatctgaacatttgttttgtgcatttgctgctgccaactgcccccttgaagataaatgttctcgcattcatg

SEQ ID NO: 12795 - DNA, 404 bp, Glycine max
  Clone ID: jC-gmle01810064d04d1
cttataacttttttttttttggttttttttttttcctaaaccaaaacttttttttaataggagggccttgaaaaacatccaagtggggctttatgctccatcacacgggcttaatgccggcggcggttcttagctgaacaaactttatatcgttctttcacatgcgcccgccatattggcagagaaaagggtgtggattccacactggcgaacaaaccgctcaaacaccggggttttggacgggtttttttgggacacagaaaagcttgtattcttaaaacactggagattttctgcctatgatcatattacacgagccttgttaactgggaaccacacgtgtccaggggccccccaccaccaccacagtttggtgttcccttgtgctgggggcccaaactttt

SEQ ID NO: 12796 - DNA, 528 bp, Glycine max
  unsure at all n locations
  Clone ID: jC-gmle01810064d05a1
gcattacatcacgtggctctcacagtaatcttcaagcagagcgatccgacacgatgggctcagcagcgaaatatgagcttccattcaagctgaacaatccggacctcctacacaatgaatcgttcgtccacggtaaatgggtgaagtcgaagtccggcaaaactttcgaagttgcagatcccggaactggcaagacatggatagattgtccaacaaacgacgcttcagacgttgacgaagcagtcaaaagctcgcatgaatgctttctggaatacaagaagatcagtccgagacagcgtgcgcagatgctgtacaagtgggacgctttgatcaaagagaacagggaagacatcgccaccattcttgtgtacgagactggtaagccgagggctgaagcttatggcgagatcgactattccacaggctttacttggtggttcgcangagaagcagagcgcattcaggggtctgttttcacccctgcactgccgaaccgtcggatcttcaccatcaagcagccgctgggcg

SEQ ID NO: 12797 - DNA, 355 bp, Glycine max
  Clone ID: jC-gmle01810064d05d1
gggggaaaaaaggggacccccccccctgcccaaaattttttgactggggggttgtctccccaagggggggaggggcgggccccctttttcccccctaatcggaagatacaacccccgcgaattcccccgggtgggtcccaccgcgggtcctccaggggaaaccctccgggtttggggcaaatggccttgaggcccgccacgctcttggcaaaatctttctcaaaacccctttgggtggaaccccccaggggggatttccccgccccaaagttcccggggcccccccgtacccccccccagggggtttctggtttttggtccaaagctaccgggggttcacccaaccttgcccgct

SEQ ID NO: 12798 - DNA, 567 bp, Glycine max
  unsure at all n locations
  Clone ID: jC-gmle01810064d06a1
ctcgagccgcaactacaaaggttgctgtaggagataagatattgaagtagtgctaagtgcctaacacctgcagtgaacaatggcctctgcatcagcatctcttctcaagtcttcacttgttcttgacaagtctgagtgggtgaagggacaaacacttcgccaaccttctgctgcatcagttgtgagatgcaaccccaccaccccatcaggcctcaccatcagagctggttcctatgctgatgagctcgttaagaccgcgaaaacagtggcttcaccagggaggggtattttggccatggatgagtccaatgctacctgtgggaagcgtttggcttcaattgggctagagaacactgaagctaaccgccaggcataccgtaccctccttgtgacagttccaggacttggtcagtacatctctggtgccattctctttgaggaaactctctaccaatccacaactgatggcaggaagattgtcgacgtgctcctcgagcaaaacattgntcccggtattaaagtcgnacagggtttggtaccccttgctgggttcaacgacgagtcatg

SEQ ID NO: 12799 - DNA, 357 bp, Glycine max
  Clone ID: jC-gmle01810064d06d1
gccgagattcaaccatgtttgttatatattgagacataatcaatcaagtacaccactcacagcagaaggtttataagctgtaaaggtacatgtaaccataaacaaaaatagtctccaagactataaaaacattacattttagacaaattagtctttttccacttcatcctccggcaacacctactataactggtggggttgctgctgcctaacatgtatcatattcactacatacatcttagtgggagtggcctttgacgaacaactccttcttggcttcctcggattcaccctcaacggggtacttcccaagctgggcgagcgagttggacttggcacggaaaaggagtgcatttt

SEQ ID NO: 12800 - DNA, 563 bp, Glycine max
  unsure at all n locations
  Clone ID: jC-gmle01810064d07a1
cactcctataattctttatccgttcggacaagaacacaggggaaggactaattgaaaggtgaagaattcacatactgattcgccctctttcttctcttttttagtccaatgacccccccttttttttaagataatttttctcaagtgttaaaacttgagagattttgcaatggatataagaactggtatctaattcgaataagtatcattcttttagggaatcttccaattgattgaccaatccaaataatatatggatatatatatatagatagatctatctatatatatatctaactaatataggaatcttagaaagataattagtctattcataagaggagatgagatcatatgaaaaatataaccgattctttcctttgtttgggctactggccatccgccggaagtttcgggtttaataccgatattttagcaacaaatccaataaatcttagtgtagtgttaggtgtattggttttttttggaaagggagtgtgtgcgagttgtttatttcaaagaatagattggatccaaccaaactgcactttnnntagtatact

SEQ ID NO: 12801 - DNA, 476 bp, Glycine max
  Clone ID: jC-gmle01810064d07d1
cattcgaattcattttatttatatattaatattatattcaaatgaaataaaaagatattaaaagatactaattataagaatttgaaagtgaaattataaagttattaaatgattaatcaatttttttctacctgttcctgtagtaaaaagagttccatctgttcttgaatagcttccttcaaaaggacttctgcttccccagtgaatgtcttggtagaagatatgatttctttgaattgaggtttattcgtgtttaagtaagcacgtaactcaacaagaaatttccttacctgtccaatttctaatgaatcaagataaccattcgttccagtataaatagttattatctgttcttccacggtaagaggagctgattgggattgtttaagcaactcgcgcaatcgttgacctcttgctaattgattttgagtagctctatcgagatcagaagcgaattgggcaaaagcttctaattc

SEQ ID NO: 12802 - DNA, 541 bp, Glycine max
  Clone ID: jC-gmle01810064d08a1
ggcatcccggctcactccttgcttacgactaggcacgggagcttcgcctcacacatccaacatcatgtctacatctgcagggcagaatcgccgcccacgggcacccacgatcaccatcgatacctctgcagttggtcgatcatccgagaacctggtccaacccgaacaggaccacagccaggcaagcaacggatcgccaatgttacgaccgacctccactgggcaagcaacgcctccagagctgcgcaaaagtggtagcttcgaaagtcgcgaatcacggccggttagtccacataacatctcatccccgacacagatcagccatcctcaaaacttcctcgccgttcctgtgcaacgaaagagaggaggcagcgtcgagtccgatggcggtgataccatctccaccaccgatacgacctacgtcggcaccgaccatcaatcgaaggctttcggcggcgacgaagtaagacacggcgccggcgaccacccagtattacctgataaggatgcgctcatacccgatcccggcaccgaagccgac

SEQ ID NO: 12803 - DNA, 588 bp, Glycine max
  unsure at all n locations
  Clone ID: jC-gmle01810064d08d1
gctcgatgggcgaccaaccgccgatggagccggcgacaatacctgccatggcggcaccagcgaaagcgacgttcgagcctgagcgcgagcgattacggcggcgacgagattcgggcgttggaggcgctggcgagtgagagacctgcgaagcggcgtcgtccatgtgtggtgttcctggagcctcagaagatgcgcggctgcggctaggagagcgggaaccgaggaggagctccttggggtgagcgacggcgaacttgagactgcgcagacggccgcccttgtatttcctaagccaggcgagttcctccttgatgtccatgaggccttggttgaattgccatgggttctcctcgtcggtgacgatgaggtcgtccttttgtttcctgttggcgtagcgcttgatgattgcagggcagcatttggcggcgaattcgtcagggaccaggcggatgataataccgatgggaatggagatggcgccgagtactatcgcgnacacccattggtatccaagctgatggtggacgtggaatgcctggccaccgacaaagatnatcagggtctgactcgcaccatgatgaggaagat

SEQ ID NO: 12804 - DNA, 611 bp, Glycine max
  unsure at all n locations
  Clone ID: jC-gmle01810064d09a1
catttttctgctgagggaaaagtgatagatgtccatctggtagttgatccttggacaagggaatcccgtgggtttggctttgtgacaatggagactcttgaggaggcagatcgatgtgtaaagtatctgaatcgctcagtacttgaagggcgtgtcatcacggtggagaaggtatacatttctagcagtgccctattttgtggggcctggatttttattagctatttttttttcaaccccaatgcatggaaattatgtgggtgatttgttctttagttcctctaagttttgaaagttttgtgcttgtttccgtttgaagtttctgtggcagcaggttagctgtgtgaagcagctcttcatcaaactctcaaatcacaactaaacaaacaaatcaaatacaccaccaagtatcagatcattggggttgtatgccctgcattactctcttttttattgcatttatatcttattattttgtgcatcgtgaatatgtgattnttaagatactcctctcacaattgcagtgttcagttttctgggtttggataatatgtaacattttgacttcatattgatgctactattgcttacctacctgtgcatggcaatac

SEQ ID NO: 12805 - DNA, 482 bp, Glycine max
  Clone ID: jC-gmle01810064d09d1
accgcgtaatcgggcaatcatctatttataaaaaatgtaaacattagggagatcatatcatctgaacatcagaaaggacaacacagaaaatacaaagtctaaaagaagataatggcaaaataaaaatggaactaaaccaagggaaagttcgaaattagataatctatactgacagtacataatttgaatcctacatgaaataggatcagggggtttttaaacaagccttgaacggatccaaaccaaaactcaatctagaactgcatataccacactaatatattatccactataatcctatgatgtcaagccatataggaccaacaaatttcaagttgaaggagaggtagaccttggagtatttgacctcgatactgatcttgaacttgcactcacactcgggctttttgagtagaggtttctcatatttgccactcctcttggagcttcttgaatgactcttccttgacctgggggacaca

SEQ ID NO: 12806 - DNA, 413 bp, Glycine max
  Clone ID: jC-gmle01810064d10a1
cgaaagtactggaaatgaaaatcaggaaattagtgatgaaggatacctatcccgaagcttggagggaaagaaggcaacagatgtaagacttgctgccattgccattgggacagcctctcgaggagggttggtgaagcttacaattcgtggatgcaattcagatcgtggggtgactagtgtaggtctcaaggcaattgctcatgggtgcccttctctaaaggtttgctctctatgggatgttgctactgttgatgatgaaggcttgattgagattgctagcgggtgtcaccggttagagaagctggacctatgcaagtgtcctaatatttctgacaagacttaaattgcagttgcaaagaactgtccaaagctggctggagtatcaatagagtcgtgtcctaacattggcaatg

SEQ ID NO: 12807 - DNA, 516 bp, Glycine max
  Clone ID: jC-gmle01810064d10d1
ggacgggcttacaaattttcattcattatttttcataaaaaaaacataacagtacaaggggcatatctcagtaagtatcattacatgatatagaggttacaatgacaagttccaaaaaaaatgaagcctaaaaaacaagggctttggtagtaaaaaaaacaacccatcccccaaagggaaaagattgtgaccacagacctgtataataacttgctgccatgaccaaagctcccgatgacaaaggcttcataaaactctgaagaactgccaaagtaaccaggacaacatcaccacataaactggaacttcaacatgccccttgactaaaacttaaacccaaaaatcgcgtacagagcataagctcaaatacgttaaaaattgggtaaacaccactggaaagactcgatacatgtactgctgcaaagaaacaaggacaaggacacacatggtggcaaaaccgatacaaacagtgctaaaaacatcgggtgccaacactggaaagaaaaatacctaact

SEQ ID NO: 12808 - DNA, 304 bp, Glycine max
  Clone ID: jC-gmle01810064d11a1
gttctagatcgcgagcgtccgtcctttttttttttttttggaaaaagcaagtcacaggaagctggattcggatgcacaagataattgacatgatctgaagtgcttcaccaaacacaaatgtaaaaacctttgacgagtgatctagtggttggacggtcacttagcggagacgaagttgctggcctaagcccaatcgttggtgctgacagggccaactaggtgatcggcgaggctctgcaaaggaccctttccggggactatgggctgaacaaaggagccaaacctagagaacatggcccatcgt

SEQ ID NO: 12809 - DNA, 278 bp, Glycine max
  Clone ID: jC-gmle01810064d11d1
gggggggttgtttctttttttttttattttttatgtttttttacttgtggaacaattttttttttgttggggaaaaacacacgaacaaagaatgggggagcacgaaaaaaaaacaaacccaactagggggaaacacccacaaagcaaaaaaagaggaccctaacaaaggggtctttgaccaagcgcccagcccccagagaaaaaaaggggggggcacaccccacccgcagggaaagaaaacgcacacagagcgcaaggagaagaacaagagggaaccc

SEQ ID NO: 12810 - DNA, 415 bp, Glycine max
  unsure at all n locations
  Clone ID: jC-gmle01810064d12a1
agacaatgacaacggtagctgcttctcttgatgccaaagaggtgtctacctccaaaactgaccaaaaccaagtgtgtgactgtgatccccaaactagccatgtcttcaaatcaaaattaccagatatcccaatctccaaccaccttcctctccacgcttactgctttcagaaactatcccaattcttcgaccgcccatgcctcatcgtcggacccgccgccaaaacctacacctactccgagacacacctcatttcacgcaagattgccgccggattgtccaacctcggaatccgcaagggcgacgtggtcatgatccttctccagaactncgncgagttcgtcttctgcttcctcgctgccttcatgatcggcgccgtcgtcaccacagccaatccgttctacaaccgccgcga

SEQ ID NO: 12811 - DNA, 561 bp, Glycine max
  Clone ID: jC-gmle01810064d12d1
aaaaagtgaagaatagaaaggatttgataacacgaataatacaaggtctcgaaaattagtgatctaaaatcacaatacaggcatggtggtgggcaatggacacaaaaatacaatgattatgtgtaagtgcaactgcttctcggactttgacttaatgcagtgaagcattgatacgcaaattacacgtgagaaaccaataatataaataaataaaaaagaaagatattgccaaaaaaaaaggggcaggttctagccttttaaggcgtctgagtggcggcggtttctagctttgctctgaggtctttccttaatatctttcctgatggagacttgggaatagcatgtacaaaataaactttgtgcagtcttttgtaaaacactacctgtttagctataaactcttttacagcctcttcagttagatcaaagccgtttgatctcacaacgaaggcaacaggaacttcaccagcagcaacatccttttgtgggactacagctgcgtctgcaatggagggatggcttacaagaagcccttcaagttctgcagggggcacctggaag

SEQ ID NO: 12812 - DNA, 472 bp, Glycine max
  unsure at all n locations
  Clone ID: jC-gmle01810064e01a1
ctcaaagccacagctgctgagttagtggagcagataacagcttctctgggaacatcatcatctgatggcatcccatcatcagaagcctcagacaggatcaaagctggtttcattcacttcaagaaggagaaatatgacaagaatccagctttgtatggtgaacttgccaaaggccagagccccaagtttatggtgtttgcttgctcagactcaagggtgtgcccatctcatgtgctagatttccaaccaggagaggcctttgtggtcagaaatgttgctaacattgtcccaccatatgaccagtcaaaatacgctggaactggggcagcagttgagtatgctgntntgcatcttaaggtgtctgagattgtggtcattggacacagtgcttgtggtggtattaaggggcttctgtctttcccatatgatggaacctactctactgattttattgaggagtgggtcaaaattg

SEQ ID NO: 12813 - DNA, 381 bp, Glycine max
  unsure at all n locations
  Clone ID: jC-gmle01810064e01d1
gaacttcaaatttggaatagagggtgatggagaaatctccatatccacttttattattaggaaattcagcacatgcatgcattcataacaagggcaatattaatttcagagtacattttagataggagaatacttagggaaccaagatgaggtcattgataatggttgatgttcatacggagaaagaggatgcaaggccaaactgaaggccccagagctcaaaagatcccttaacaaagtcatagtatcctccttttagtgacaatgtcttgttcaccaagccatctctaacaaatgggtatgttagaaggtttccaagggaaacattcacagcttccttctcacagtgtgagcacaactcagcanaaggtgcatccccat

SEQ ID NO: 12814 - DNA, 544 bp, Glycine max
  unsure at all n locations
  Clone ID: jC-gmle01810064e02a1
cccttcttcacttcccttcacattgcagaagagatggctcttgtgaaaccaatttccaatgtcactcccaaatttggcagcagccccagaatgggatcacactccaaattcagcaccataataagaatgtctgccactgccaccccaccaccaccaccctccacctccacaaagccagctgcaagcaacaagaagggcaacatcaaggagaccctcttgactccaaggttctacaccactgactttgatgagatggagaccctcttcaacactgagatcaacaagaacctcaaccaggatgagtttgaggcactgctccaggagttcaagactgactacaaccagacacactttgtgaggaacaaggagttcaaggaagctgctgacaaacttgaggggccactcaggcagatctttgtggagttccttgagaggtcctgcactgctgaattctctggcttccttctctacaaagagcttggaaggaggctcaagaaaccaaccccgtggtggcagagatnttctctctgatgtctanggatga

SEQ ID NO: 12815 - DNA, 522 bp, Glycine max
  Clone ID: jC-gmle01810064e02d1
ggtaaatgtttcctcactgtcttgtacaaccatattttactttagcaccaatactagtaacactcaagatgaacattttgatggagatcaaaaggacataaggaatttaatcaatttatacacaacttcagtacacaagttgtggttcaaactctgccaaatctacagaccctgactcaattggaggcattagatatgttgccaagagttcagacaccaatgcagcaaccagtgggatcctcttcaagttcttcaccaccgctatgtcatcactctccccaacagcaataatcttctcgtttatctccaccatccggtccaacttccgcttgaactctgggttttcaacatcaagaacagctgggaaaatcctagcagttgtgcggtttgtctcgatgatgacatgcatgtcaaattcttttggtgttaagtccaatgccttcatagaaagctgtacgttggcaatcattgagatacattgtaacataaaccgatagacagaagaatcgagaccacaacttt

SEQ ID NO: 12816 - DNA, 508 bp, Glycine max
  Clone ID: jC-gmle01810064e03a1
gtttttccacaatttgttggcttcttccacaacacatgtgcatatatacctatataagtttttgaaactctatcttcaaagttgcgtaatctggagctccttgacataagtttcaactatttgactaatgacatcctgccaaccctcgggggatttacatctttgaaagagctgtatttggttggaattcatttggactcagatcttcatttccaagagaacgatggatttacgtggccaaccggtttacaagcccttgatctggtgggaaacagattaaataacaagtttcttccatcattaaatgggttagaaagtctcaaacatctttatttaggcttcaatcagttagaaggatcgctgaatataggcggattatcaggtttgactagcttggagattcttgatctaagttataataatattagtgattttgtggtccatcaaggcttaaaaagtctacgcagattggatgctctttatttagatgggaatatgatagatggaa

SEQ ID NO: 12817 - DNA, 421 bp, Glycine max
  Clone ID: jC-gmle01810064e03d1
ttttttttttttttttttttttttttttttttttttttttttttttttttttttttttgtttttttttgggggaaaaccaaaaaaaaaagaaaaacaaagtccccaaggccaaaaggaagggaccccccaaaatgggggaaaaacaaccaaaaaccggtcaaaacccccaaaaagggtaaaaaggcgggaaaaatccccaacaaaagaaaaacgcttacccccaaagaaaagaagggcacaataaaaaaagaggcgggggggcgcccaaaaaacccattggggggcacaaacccgggcgcccaacccccagggaaagttccaaaaagccccccaagaggagggggggaaaaacccaagaagggggggggggggccaacaaaaaaaaggggggtggggcacccccccaaacccatggggggg

SEQ ID NO: 12818 - DNA, 422 bp, Glycine max
  Clone ID: jC-gmle01810064e04a1
aagatataactaattatttttatatcttcatcaagatgcgccgagggagaaccgccgccgccgctgccgccgttgtggatcccacgccggaccaggccaaggagacgacgcggttccgtggcgtgaggaagcggccgtgggggcgattcgcggcggagattcgagatccgtggaagaagcagcgcgtttggctggggaccttcgattccgccgaggatgccgcgcgggcctacgacaaggctgcccgatccttccgcgggcccaaggccaaaaccaatttcccccccttccccggcccggcagaggcggaccaccactcgcagattccgctctaccaggcccatgggctttccaccaagttcgagcccgtcgtccaggtgaaccggcccacgagcagcggcatgagcagcaccgtggagtcc

SEQ ID NO: 12819 - DNA, 427 bp, Glycine max
  Clone ID: jC-gmle01810064e04d1
agaatgtaatttattctatgatctgatagccataatttttgtgcagaacaacaacaacaaaaaaaaaagaaaagagtaagttctaattgggggtaagggtaagaagcagatccatgaagaaagcataagcaccaaccagtttttgagatcaggtccaatgctatgacacagtaatggatccaaataacttacaacaacacattcatgcctattataatattactctacaacaccacaacacaatctaacaacttttaattaattaattaaaccagagatggtgaacaacaacaacaacaataacaacaacaagaagaaaatgatgattataccgagaagagggtcttcttcttcttcttcttcttcatcatcagaggcacagcgcggtggccggcaggtcgtcgtcgttgtcgtcgtcggcatcgga

SEQ ID NO: 12820 - DNA, 571 bp, Glycine max
  unsure at all n locations
  Clone ID: jC-gmle01810064e05a1
cagcattcaagattacatgtttgaggagagtgtttgcctgctacttcgagcctcatggttcacacctttatctgttgaagaacatgtggctcatgaagatgtatatgaagacctagaagattattatcagtacgaggatgatgatgatatggatgaagcttactatggtggttcgtccaatcttcgcgttattggcaaccgtagatggggagataatggttatgtcagggctggacgtcaagaagctcggccagtccatcgtctgaacttccaggattcaggagcaagttcttcttcgcgcgagccgaagaagaaagaggttgggaaaattatcacaggcagaagggcaaagagggcacagaaaagggaagcggctgacaaggcggccgaagcaaagcatctgcagcatttaataaggttgggtaggaagtgattctattttatttatatcaggccatcatcatggccttgaactntccttcccataagttaaatattttcttttttttatatatnntttttttcttgtacattggttctgtgctctttactctgaagcatgtaatatatc

SEQ ID NO: 12821 - DNA, 444 bp, Glycine max
  Clone ID: jC-gmle01810064e05d1
gacattgttgaggtgttaatgatattaacattacaagaacatcacaaggaaatttatgtcaacattagacctgcattgagcataataacctaatataacctaaattgttcatggtataaagagtttggaatttccataatccaaccaccccaccaagccattattttaaaacaacttccccaaaatatattacatgcttcagagtaaagagcacagaaacaatgtccaagaaaaaaaaaatttatcaaaaaaagaatattttttacttatgggaaggaaagttaaaggccctgaagatggcctgatataaataaaataaaatcacttcctacccaaccttattaaatgctgcagatgctttgcttcggacgccttggcagccgcttcccttttttgggccctctttgcccttatgactgagaaaattctcccaacctctttttt

SEQ ID NO: 12822 - DNA, 610 bp, Glycine max
  Clone ID: jC-gmle01810064e06a1
acgtatcttcatcaataatcgcagaagcagtttccggtgcatctcatcgtcttccaaaatgaacgacgcagatgtctcgaagcaaatccagcagatggtgcgtttcatccgccaggaagctgaggagaaagccaacgagatctctgtatctgccgaagaggaattcaatatcgagaagctgcagttggttgaagccgaaaagaagaagatcaggcaagaatacgaacgcaaagagcgccaagtcgaaattcgcaagaagattgagtactcaatgcagctgaatgcttctcggattaaagttcttcaagctcaagatgacgtgatcagttccatgaaagaagctgcatccaaggaacttttgaatgtcagtcatcaccatgatgatcatgtgtatagaaaccttctgaaagatctcattgttcagtgtttgctaagactgaaagagccttctgtcttattgagatgtcggaaagatgacctgcacttggtagagaatgtgctggattcagctgctcaggagtatgctgagaaagcaaatgttgatcccccagagatcatttgtgacaaccaagtctatctttcacctggactcacttcatcaaattctcat

SEQ ID NO: 12823 - DNA, 314 bp, Glycine max
  Clone ID: jC-gmle01810064e06d1
accggggggtccggcacaaaatggacggggggggttttttaaaaaacactaccgggaagggttacccctgggttctttttggcccaaaaaccgaaagccaaaaaaagccgggaaacctttgggcattacccctggaaggaaacacaaaaaggacccccggccaccggggccccccaaaaaaagggttttcaaaagacaaaatttttttgttccccaaaacagggggctgtaagcttttcggggccagggcaaaaaaaccaaactttccgtgggggataaaacccaaccgggggggcccaaccacatccattaaa

SEQ ID NO: 12824 - DNA, 560 bp, Glycine max
  Clone ID: jC-gmle01810064e07a1
gattgttctttgtgaactatttttcccatgggtttagtgtttttcataaaaaactgactgataattacgtacaagggcagattaaaatcatcatcaatgaaaaaaggtatatcttggtttttcatgttcatgctcttgggtacagcttttgtgggttaaccttatcatggatacacttggggcgcttgcactggctactgaaccaccaacagaccgcctaatgcacagatcaccagttggccgaagagaacctcttataacaaatatcatgtggagaaacttgatcgtacaggctgcctatcaaatcgcagttctcctcgtccttaacttttgtggtgaaagtattctaccaaaacaaaataccagagctgatgcctttcaagtgaagaatactttaatattcaacgcgttcgtcctgtgccaaatattcaatgaattcaatgctcggaaacccgatgaaatgaatgttttccgtggagtgaccaagaacaaacttttcgtgggaattgttggagtgacctttatacttcagattatcatcatcgagttccttggaaagt

SEQ ID NO: 12825 - DNA, 487 bp, Glycine max
  Clone ID: jC-gmle01810064e07d1
attgaataatatacattacattcgaattctagaaggatagttcggcaatatggagcagtaataatatatactagtatattgtaacctgtaaggcgttagcttaatatgcatggctggttatccacgcgatgcctattgtgtagcacgagacctagacctcttcaatcgcctgagtggcttcaagaagtaacgagccaatggtgttttgggaactggaataaattttccgactatagcaaggggccaactgacaaatccaataccaagagaagcaagccatagcttccaatcaagcctcaccgttgaggtgaactttccaaggaactcgatgatgattatctgaagtataaaggtcactccaacaattcccacgaaaagtttgttcttggtcactccacggaaaacattcatttcatcgggtttccgagcattgaattcattgaatatttggcacaggacgaacgcgttgaatattaaagtattcttc

SEQ ID NO: 12826 - DNA, 472 bp, Glycine max
  unsure at all n locations
  Clone ID: jC-gmle01810064e08a1
tgcaattgaagttaaaagccttagccttccctacaactccaaacacaaagacatcatcatccatggctgcctccgtctccactgtcggagctgtcaacagagctcttttgaacctgaatggttctggagctggagcttcagctcccagttcagccttctttgggaccagcttgaagaaggttattgcctcaagggtccccaacagcaaggtttccggtggaagcttcaagattgttgctgtagaagagaagaaagagattgaagagacccagcagaccgacaaggacagatggaagggtcttgcctatgatatctcagacgaccaacaagacatcacaagaggaaagggtttggttgactcccttttccaagctccacaggatgctggaactcactatgcagtcatgagctnctacgagtacctcagcactggacttcgncagtacttggacaacaaatggatgggatctac

SEQ ID NO: 12827 - DNA, 516 bp, Glycine max
  Clone ID: jC-gmle01810064e08d1
aagtggacactgtaactcaaaattatagaggaagacggtccaatatgaaaaatatagtaagatcatctcaaacttagcatcttctctttgcacctaagacattgagaatgctaagaatgttacacgcaagttccatcacaacttctagcacttggattagtacaacaaccttcacgaacagaaatatttacttgccaagtttgctttgcctccaattcaagactggaagaaagttcccctctgaatagcatcctcgttagcatttccaagagcagcctcgttcaagtacttgtcagccaattggactctcttgacattctcttgttcttggacaagcatgttaccatacagcaagagcttctccagagtcatcttgggctgctcaaaggttggaggtccatcttttgagttcacaagcttcttcccaacactgtcaacaccaacaccagaaatccacttcctcacttcatcatcatatactctggccctcagtgcaccaaagaaatcaatggattg

SEQ ID NO: 12828 - DNA, 596 bp, Glycine max
  unsure at all n locations
  Clone ID: jC-gmle01810064e09a1
ggggaaatgccaaggcacaaattagccatgtccttagatacagagacaatagatgggtgtgcttcagatcatataccctcaattcagaaaatgtagacttcttttttgtagacacaactccttttgttgataaatacttcattgaggataaaggccataactacgattggagaggcatactacccaggaagcgttatatttctaaccttctcaaggacgtggatttggcactaagacaatcaacagcaacctggaaggtagtgattggccatcatacaatcaaaagcattgggcatcatggagacacccaagaacttttaatacattttctcccacttcttaaggcaaataatgttgatttgtacataaacggacacgatcactgcttggaacatataagtagccttgacagttcagttcaatttttgacaagtggtggtggatcgaaggcatggagaggtgacacgaaacagagcgaaggagatgagatgaagttttactacgacggccaaggcttcatgtctgtgcatatttctaaactcagcttcgaatttcttctttgatgtcttcgcaatgccancacaaatggaacacct

SEQ ID NO: 12829 - DNA, 567 bp, Glycine max
  Clone ID: jC-gmle01810064e09d1
ctaaaaactttaatttatttcaaggctttatttttaatttaatattcagccaatgagatgtgaacatatgtttttatattgtttaactagtaaacttattacatgtcacaggagtcaaacttgcaggtgttccatttgtggatggcattgccgaagacatcaaagaaagaaattcgaagctgagtttgagaaatatgcacagacatgaagccttggccgtcgtagtaaaacttcatctcatctccttcgctctgtttcgtgtcacctctccatgccttcgatccaccaccacttgtcaaaaattgaactgaactgtcaaggctacttatatgttccaagcagtgatcgtgtccgtttatgtacaaatcaacattatttgccttaagaagtgggagaaaatgtattaaaagttcttgggtgtctccatgatgcccaatgcttttgattgtatgatggccaatcactaccttccaggttgctgttgattgtcttagtgccaaatccacgtccttgagaaggttagaaatataacgcttcctgggtagtatgcctcttcaatcgtagtta

SEQ ID NO: 12830 - DNA, 542 bp, Glycine max
  unsure at all n locations
  Clone ID: jC-gmle01810064e10a1
attacccctaccagcagcagtcaaaaggaatattgatcagataccctaccacaatgtcttccagcaagggtcaattcgagcagggctaccagcccccagtccagcagcaaagtagcattcccgggaaagagtccgagctagaccctcagcctgagtacgaccatctgcccactccagatggaggcaaggagctctacaaggctgctggcaagcttaagggcaagaaagccatcatcacaggtggtgattctgggattggccgcgcatccgcaattctctacgctatggagggtgccgatagctttatcgcatacttacctgaagaggaagaagatgctcagcatacaaagaagctggttgaagcgaatggagccaagtgctatacctttgccacagacctgacggatcgcgcanattgcaagaaggttgtcgatgaggctattaagcaaatgggtggtatcgacattctcttcaacaatgctgcgtaccagaacatggtcgaggacattaaggatctcgatgaggatcagtgggtgcacacg

SEQ ID NO: 12831 - DNA, 512 bp, Glycine max
  unsure at all n locations
  Clone ID: jC-gmle01810064e10d1
cattattgaatgtcctattcatctatataatcgtgaaatcgtaaatgcacctggcactctagatagaacaactactcgcaacagtgacttcaaggtctgagtgagcaggggcacaacatgaagtaaagacgtttaaccatttacgacggttccaccgttggggtgtaaagtctggccactgatagagctgctgtctggggcagcgagaaagacagcgacagtcgcaatctcacttggctgcgaagggcggccgatgggagcggtgaattgttcaatggccttcttagtcattgtcgcagggatgagcggagtccagacaggacccggcgncgatggcgttgacgcgaatgcccttggagaatactnggttgtgcagagcgcgagtgaaggagatgatagctcccttagttgatgtgtagtcgagtaggtcggggcggccgatgaaagcgttgatggaagcgttgttgatgatgacggagcccggcttcatgtgaggcagtgcgtactttgaa

SEQ ID NO: 12832 - DNA, 553 bp, Glycine max
  unsure at all n locations
  Clone ID: jC-gmle01810064e11a1
ccaagaaaccaagcaaatcattgttctctctgtcctgtgttttgtgatttcccccttcaagccaccaccaatggccaacaacgagatgcaagttgagaggggtttggacttggaaaggtacatggggcgttggtatgagatagcctctttcccttcaaggaaccagcccaaggatggcgtgaacaccagagccacatacactcttaggaatgatggcactgtgcaagtgctcaacgagacttggagtaatggcaagagagggcacatagagggaactgcttttaagtctaaccgcacaagtgatgaggccaagttcaaggtcaagttttatgtccctccctttttgcctatcattcctgtaacaggggactactgngttttgntcattgatggtgattaccagtacgctttgattggccaaccaagcaggaattgcctttggatattaagcaggaaaccccatctggatgatgagatctacaacangcttgttcagagagctaaggatgtacgatatgatgtgagcaaactccacangaccccacagagcgat

SEQ ID NO: 12833 - DNA, 431 bp, Glycine max
  Clone ID: jC-gmle01810064e11d1
ggggtaattaaacaacctttaattggtaaaaacaaaagtaaggggacattagtgaaccaagcaacagccacaccagtgaccccccacaaaagttcatttccagataaaatggcaaaccaatggtttcctgccttaaaggcattctaacttgaaattgcccaactaaaaattcattatctggctattcattgcatggaatgaaattgaaatacattttcattttaataaattatttatcatcatgggggcctatttccccaaaagggatttgagccaccaaatgccttttgtgttttgggggccttcttcctttgggggaggatcgctttggggggtcttggggagtttgctcacatcatatcctacatccttagctctttgaacaagcttgttgtagatctcatcatccagatgggggttcctgcttaata

SEQ ID NO: 12834 - DNA, 502 bp, Glycine max
  Clone ID: jC-gmle01810064e12a1
cttattcatcttttcattcactcactctcactcatggctgaagatgggaacaacaacgatgtacccttacacaaattcaaagacagcaatccaaaccctgaagagttcgatgcaaagggttacagcctcagcggaaaaatcatgctttcagcaataatccttcttttcttcgtcgtcgttttgatgttgtgccttcatatctacgcgcgctggtacctccggcgtgctcgccgtcgacagctccggcgccaacgcgagctccgacgcacccagcttgtcttttacaacgacgacgccacccccgcagccgtgtcacgtggcctcgacgccgtcatccttgccacgctacccgtcttcaccttcgacccggaaaaaaccgggccggagtgcgctgtttgcttgtcggagttcgaacccggtgaaacgggtcgggtcttgcccaaatgtaatcacagtttccacatagaatgtattgacatgtggttccattctcatgacacgt

SEQ ID NO: 12835 - DNA, 406 bp, Glycine max
  Clone ID: jC-gmle01810064e12d1
aaagaaggaaaaaatttttttttcaacgaataagtccctcttttatgttcatcccaaaaccattctacgtcagtatttcgcgccacctaactcacgcgccggtcaccggctacattaaaatccagaaacgtgatttttacacaccggcacgcgccaacaacccaagtttttccgtttccaacaagggccacgtcagcccccgagtcaccgactcactgggtctcctttcgctcacctcgctccgggggggagctacaatcgccgccgccgcacgacgacggggacacgttcccctttttttccctgccgagcattctcgtaaacgacagcatgcgacttatcggggaccgaaacgaggaggatgagtcgcaactcggttgcaactcgttttgaaaattctcgtccc

SEQ ID NO: 12836 - DNA, 543 bp, Glycine max
  unsure at all n locations
  Clone ID: jC-gmle01810064f01a1
ctcccgaggaattctcagcttttccgatttgcaatatgtggatgttcaagtttgtaaaaacttggtgacactgttccctttgtcccttgcccgaaatgttgggaagcttcagacccttgtaatacagaactgtgacaagttggtagaaattattggaaaggaagatgcgacggaacatgcaacaactgaaatgtttgaattcccatttttgttgaagttgcttctttttaagctgtcactgcttagttgcttttatcctgtgaaacaccatctggaatgccccgtattagaaagcttgggtgtgtcctattgtcctaagttgaagctattcacatcagaatttcacaatgatcacaaagaagcagttacagaggctccaattagccggctacaacaacaacctctgttctcagttgataagattgttcccaatctgaagagcttgacactcaatgaggaaaacattatgttgttgagcgatgcacgtttgccacaagacctccttttcaaattaactngtcttgatctatcctttgataatga

SEQ ID NO: 12837 - DNA, 455 bp, Glycine max
  Clone ID: jC-gmle01810064f01d1
ccttcattgattcacattctcgtatagataggctctcaagttgcatcaaacttttggcagttgagcatttcaataaatactccatcccattacagtcgatcacttccaagtctttcagattgatgaaagacactgcacagctcactaatttttctaatcgagggcacccccaaagagttaatatttgaagcttttcagagtatggcttaacccatgggtgctgctctaaccctatcgactccagctctccaagatctaacagtgttaattgtttcaatgcgggaagtgaacggtcatgaacttggagtttctgagagggaaatatctccttcagaccatagcatctttccactcgaagatgttctaagctgggtaccttctgaaggaaatcaaaaggcacagtatctttcttaatgccatcattatcaaaggatagatcaagacacgttaatttg

SEQ ID NO: 12838 - DNA, 293 bp, Glycine max
  Clone ID: jC-gmle01810064f02a1
ctcgagccgctgaggatgaagtaggatttgtaaaacaaattggtgaatcttcaggccttccttctggccaatcatcagttgaacttggtcctaaaagatcaagcaggtttgagttggatttaaacagtattggtgctgatgatgatgcccaaccttcagatcagaggatggagggggcactcttttcaggaagaaatggttattggagcccatcacctgcttcatcgtcgtcatcaatgcaacctttagtacgaaacatcgatttgaatgacagaccattctttcaaaccgat

SEQ ID NO: 12839 - DNA, 220 bp, Glycine max
  Clone ID: jC-gmle01810064f02d1
ggcccaaaaattctttggaaaagaaaaaaaaggtcccggtccggggccccagccttgggggcttggcccggctttttttgaaaccgggggggggggaaacccaagaaaaaaaaccctttttcccccttggccaaacacttttaaaaaaaaaattacccccctctcccccccccttttatgggggggggtcttttcttggtaaagggtccccagaggtggg

SEQ ID NO: 12840 - DNA, 428 bp, Glycine max
  Clone ID: jC-gmle01810064f03a1
gacagattcgggaagctaccctcacgatttggaggaagacaaagatgtgcaaggatggacaatcacaaagtcaagatgggcttgtgatgttcgtccctcaccaagaggtgctgatgatgaacagaagcacggcaaagtgagctccagtcctgaaattggtgaattccatggcggtggaacttcagagagcacaatcactagatcatcaggaagtagtggtagagatcattatttgggtgcttcttctgatgacactgattctgaaaaggacttccttatggactccatggtcaatgttgaggaacaaagtgatgatggtgattcttcatcagattctgatgagtgtggtggattgatgcatgtgctgagaaacataaacatgctttagagttgcagaagtgtgtgtgagtttgagatgattaagaaaa

SEQ ID NO: 12841 - DNA, 399 bp, Glycine max
  Clone ID: jC-gmle01810064f03d1
aggaaaggaaaaaaaaggcgggtaatgtcataccttctcagatctatacatcaatttgctgcttctaatctaatttataacaaacaagagcctaatgaagtccattaccctgttccttgcaatcatatatcattctttggatatgaccatcaacaaggaagacaaagttggaaataatgaccgtaaaaatagcattggtcttggtatttcatgcatccagcaagagtacctgtcctatcactgccaagaaggaaaaattggcttgaaatcagatttgggaagaggggcttcatggaaccaatcatgaaggagagcatcttctgctggtatcctcttttcagggtcataagttagcagctgctgcaacaagtcaaatccaagctcagataaaactggcaa

SEQ ID NO: 12842 - DNA, 531 bp, Glycine max
  Clone ID: jC-gmle01810064f04a1
ggaacagtcgttgaggcagggctagataaatcgaagggaccatttgcttcatttattgtgcagaatggcacccttagacggggagatatagtagtttgtggagaagcttctggaaaggtgcgggctttatttgatgatggtggaaagcgggttgatgaagcttcaccttctatgcctgtacaggttattgggttgaataatgttccaattgctggtgatgaatttgaggttgttgaatccctcgatactgcacgtgaaagggcagaggctcgtgctgagtcattgcgtaatgagcgtatttcagcaaaggcaggggatggaaaggtcaccctttcttccttagcttcagccgtgtcatcaggaaagctgtctggactagatttgcatcaactaaatattattttgaaggttgatcttcagggatctattgaagctgtcagaaaagcgctggagattctaccacaagacaatgtcacactgaagttcttgttggaggcgacaggtgatgtaaacacaagtgatgtggacctt

SEQ ID NO: 12843 - DNA, 522 bp, Glycine max
  unsure at all n locations
  Clone ID: jC-gmle01810064f04d1
atcaaccaatatgctttctcatgattttatttaatgcaatcattagaggataaaacaaactgcaaatattttttaaccaaagtatttacatcggtggataacctttgatcatctaactattgcatctaggagcaaaacacagtaaaaaatacaaatttccaggcctgagtgtaagatgatgcatccatttttttctcttttttttttatcaaaaataagatgatgcatccattatagagcatcatacaaaaaatgaaaaaaaatgcaattcttcccttgtcttatgtngggtgttacaagtatttttgggtcaaggcattgaaactttttccctctctactttgttatatacacttttacagccaacaatggaacaaatcattttgaactcagatcctcagcagtggcaccctcaatgtcaatataaatgatgagggaattggtacctctctcaatgtaataataccaactggagagaaatactatgtttttttcaactggaacttggaatgcatttgcact

SEQ ID NO: 12844 - DNA, 466 bp, Glycine max
  Clone ID: jC-gmle01810064f05a1
ctaaaaactggggattgcaagtttaaatctaattgtaaatttcaccatccaaagaatcggatagcaagattacctctatgcaacctcagtgacaagggtctacctttgagaccggaccagaatgtttgcacatattacagacgttatggaatttgcaaatttggaccggcgtgtaagttcgatcacccagcgccctcaactatggctggacatgatcaacaatccacatatataaactcagctggtgttgatgtggctgaaaatggaggtgccgaagatgggaatcagcagtctgtgtaaaacattttctggctttgaatatgcatatcacccataatttgtaatcttatctaaaaacatgataaatttatttaatttcactagttatgctaatgtggcacaagccttacagaatagcaatatatacggctaatagaagttttattacagtaacatgtagattatt

SEQ ID NO: 12845 - DNA, 467 bp, Glycine max
  Clone ID: jC-gmle01810064f05d1
aataatctacatgttactgtaataaaacttctattagccgtatatattgctattctgtaaggcttgtgccacattagcataactagtgaaattaaataaatttatcatgtttttagataagattacaaattatgggtgatatgcatattcaaagccagaaaatgttttacacagactgctgattcccatcttcggcacctccattttcagccacatcaacaccagctgagtttatatatgtggattgttgatcatgtccagccatagttgagggcgctgggtgatcgaacttacacgccggtccaaatttgcaaattccataacgtctgtaatatgtgcaaacattctggtccggtctcaaaggtagacccttgtcactgaggttgcatagaagtaatcttgctatccgattctttggatggtgaaatttacaattagatttaaacttgcaatccccagtttttaag

SEQ ID NO: 12846 - DNA, 587 bp, Glycine max
  unsure at all n locations
  Clone ID: jC-gmle01810064f06a1
tttaattgtaacgggctatggagccactattagaccctctcaaagatagagctatcaaatcagtcaaggcacccccacatcggcctcttagtcggcaattgatgttcccagaccgtcttaagaataaaccagattggaaagttataagagatcatcttcagaaggaaggacgtatcgacaaggaggaccttataaaacttatcaacgatgctaacaagcttttcaagagtgagggaaacttgatctacgtcgaagatcccctaacagtagtcggagacatccatggacagttctatgatgccataaagattgtagaaattggtggagatccagcaaattcgaaatacttgttcctaggtgactntgtggatagaggttctttttcgattgaagtgcttgtcctgctatactccctcaagataaacttccctaaaacaataaatatgcttcgaggcaaccacgaatgtangcagatgacgacattcttcaacttcagaaactgatgcctttacnaatatgatcaagaaatctatgnattattcatggactcattngacctgatgcctctagcctgtatcatcaacgga

SEQ ID NO: 12847 - DNA, 414 bp, Glycine max
  Clone ID: jC-gmle01810064f06d1
aaggggggggacccaaaaaccccaaaaaaatttgaaaaaaaatccaacccccaaaataggcccggaaaaaaaaaggaaaaaaaaaaaaccggctttaccttttttaaaaaaaataaaacccttaaaaaaacccttttcccaaaaaaaacccccaaaccccccctttaaaacaaaaacccaaatggggggatttttcctacccccttcccaccaaaattaaaccccaatcccgacccttgcccgcccaaaccaagtttatttacctttattccggcccaccccctggggggccccctcccaataaaaaaaacctctttttttgccaaaatgaacccccccaaaacccccctaaaagcccccctcaccctgggaaaaaaaccccaaagaaaacttgttgtctcaaaaaaattctta

SEQ ID NO: 12848 - DNA, 603 bp, Glycine max
  unsure at all n locations
  Clone ID: jC-gmle01810064f07a1
gttgattcgtcagggagacagattgaaatggggctcttgggtcccgtatccagtgatatcgtggcacagtcgcagggaacctcgaatgaacatgttggattattgagagctgtgcctggtgaacctatgtctcagggattgccccttttgagcatgcacagtgagcgggtagaagtacaagcaagtaatccaggaatgcatcaaattctttccgctaacaaacagtccatgcaaatgggtatgcttctgaaaagctcagggccacagcagcagacaacaactcccaagcgcaaggcaccaatggaattatcgtccagtatctcctttaacaagcgggttgcagcaatgggaaatagaccttggttgcagcaagtacctaatgcatcaaataaaggttctctgcagatgcaatccccatcaaatgcctctaggacacaacatttggcagcttctagcaagagaaaaacacagttggataacacttccagtaaatctgggacancctcggccatgagttcntaaagtcaaaatacgcagatgaagcagtccttcagggtcanactgaatcatctgatagtggtaggtccaagatgagagagtctt

SEQ ID NO: 12849 - DNA, 461 bp, Glycine max
  unsure at all n locations
  Clone ID: jC-gmle01810064f07d1
gcaaaattgttgtcctcgtatttattcaactgagcacctactgctgtcaaactaaaacaagagaaaaatggtcatttgtttgttctacgaggtattgatgctacagaaaaaaaaaatagctcgacaccttacaataagcttacatactacagtatatgaaagacatgaaaataaaaataaaaagaggaaactaatatcctctacttctagacgcatcttgaggccaggtagtgccttgcgcataggggggtccacctcctggctgtaggttgctaccctggggagaaggaacccactgagggtcaaaatttctttgaccatgggtcacattcattgggggttgaagatattgnggtgtcattattgcctgttgctgtgaacccggaaatgattgtttcaaaatgtgaggcctaagatgaaagttgtgctttgtctgttggggaggaaactgattttgggag

SEQ ID NO: 12850 - DNA, 526 bp, Glycine max
  unsure at all n locations
  Clone ID: jC-gmle01810064f08a1
gccaaacctctcagtggttctgctaggagttgcactaaagttcacaagaagggcattgcacttggtagatcagtggaccttacaaagtacagtggctatgatgaattagttgccgaattggatcagctgtttgaatttgggggtgaattattgtcaactaaaaaagattggcttatcgtctatactgataatgagggtgatatgatgcttgtaggcgatgatccatggcaggaattctgtgccatggtttgcaaaatttatatctaccctaaagaggagatccagaaaatgagcccaggtacactgagctcgaaaaatgaagagaaccagtcggtgatggctagtgatggtgcagatgcaaaagttgttaaatgtcagccacatcaaaagtttaattcagaaaatggccttgacgcctaatgattagtagattgatttccatagctttcagattctgggatggaaagtaaggaactgtcatgaagccattcatcncagtgggaaacataacttgaagatgaaatcg

SEQ ID NO: 12851 - DNA, 470 bp, Glycine max
  Clone ID: jC-gmle01810064f08d1
acaaaacaacttatgcagaatttgaatgaagtttaattaatacatcatgcagaatggataccatctcacaaattatgattaataagaataagaatcaaaattaaaatcaaataaactggataccaaccataaggccgcgacctggtatacgaaactttcattacattaatgggttgttgttcatagggtgggagagaaacaactatgtacagcaacaactacaaggtgggattgttttaaaaaaaaaaaaaagcaaggtcgatatcaccctatatcacctcactcaaaaacacaattgattaaatactagggattgtataactgggcaggcatatactactaattccgggatttccaaaattggacggatactactcttttaatgccatcttatatatttgatttgaagcagtcactgataagcagcagtcagcctcgatttcatcttcagttatgttttccaactggat

SEQ ID NO: 12852 - DNA, 512 bp, Glycine max
  unsure at all n locations
  Clone ID: jC-gmle01810064f09a1
tatggatgccttggacattgtaaaatggaaatttgtcagtgatagccctggaacatctgtagcaactagttcagtattgttgggtctaattcttcttggaagagcagcttttgttttccccttatccttcctatccaacttggctaaaaaatcaccaaatgagaaaatcagcttcagacagcaagttatcatttggtgggctggtcttatgagaggtgctgtttcaatcgcacttgcatataatcagttcaccatgtcggggcacacttcactaagaagcaatgcaatcatgatcacaagcaccatcactgttgtgcttttcagcacagtggtgtttggtctgttgactaagccactaataaggcttttactgccccatactccacatcataaagaatcaagcatcacgataaccacagatccatctacttcaagtcccaaatcagtcactgtcccacttcttgngagtgcccaagaatctgaagtcgatattgatggccatgatattcatc

SEQ ID NO: 12853 - DNA, 499 bp, Glycine max
  Clone ID: jC-gmle01810064f09d1
gaaaaaaataaaaataatttagctttagctattcaaacttttagtacaagaaatctaataatcaaatattacattttacggaagacgtagagatgagttgagatgcttatggtgcattgcacagccttctcactacccaaagagctaaacaaaatctcaggacaggattcttatacacgcattgctcactccacaaaacttatgcagtttacaaacaaattacatatttcttggcttttttctcaacgccattgatggccattacgttcagttggtgagccaggttctataggaacaaaacccctgccaccaaaaacaggacgcatgaatgcatcatcaaacttacgccacaagcgatgaacagtgtgtgttggagtggaaagtaaagcacggatgctgcttggacgatgaatatcatggccatcaatatcgacttcagattcttgggcacctccaagaagtgggacagtgactgattttgacttggagagatggatct

SEQ ID NO: 12854 - DNA, 547 bp, Glycine max
  unsure at all n locations
  Clone ID: jC-gmle01810064f10a1
aacagagagtagaaaagatggcgcggttgatcacagtggtgtggtgcgcggtggcggtgctactgtgcgccgcggcgggcgcgtcgtgggtggaggaggcggcgaacccgatacgaatggtggcgggggtggaggcggaggtggttcgggtgatagggcagtgccggcgcgcgctgaagtttgctaggttcatgagcaggttcgggaagagttaccgaagcgaggaagagatgagggagaggtacgagatattctcgcaaaacctcaggttcatccgctcccacaacaagaaccgcttgccctacactctctctgttaatcattttgctgattggacttgggaggagttcaaaagacacagactaggcgctgcccaaaattgctctgccactcttaacggcaaccacaagctcactgatgctgntcttcctaccacgaaagactggaggaaagaaggaatagtgagtgatgttaaagatcaaggcagctgcggatcatgctggacattcagcacaactggggctttagaagcagcctatgcacaagc

SEQ ID NO: 12855 - DNA, 538 bp, Glycine max
  Clone ID: jC-gmle01810064f10d1
agggcaaagtagcaaagacatgctatcttaattcttataactgataattaaagcggggcgcatcaatacaatacaatacaatatgtaactatgaactatcaatatatgatcgttatttatgtctgtgatacacacaattcaggccatgatattcttacgtgatttacagcaacttctaacttatttaatacatcataccaacccaactaggagcaattttcattatacaatgacacttatctttaaactctgaagcatgacaaggtgggtagtcaccagggaccatattcttatgcaatttatgccacaactggataagacgcacaagttgcaacaccacacatgttcttccccaattccattttgaagtagccattctcaccccaactttctccccatgaattttttatgagccaatatgggacgccattttcaactccataccccacagcaaggacggcatggttcacatccttggaagtgctaccgcaaatgtcactagtgtaaactccattctcgtagaaatggaacccattca

SEQ ID NO: 12856 - DNA, 488 bp, Glycine max
  unsure at all n locations
  Clone ID: jC-gmle01810064f11a1
ggtttttccggcgaacgatgatcatccctcgcatgacgtggcggcggggcagatgttcgtgaaggaggtgtatgaggttttgaggaagagtccgcagtgggaggagatggcggtgttgattacttacgatgagcatggtggattntatgaccatgtggctacgccggtggaaggggttcctaaccccgatgggatcattggaccccacccttattactttgggtttgataggttgggggtgagggttcccacgtttattatctcgccttggatcgacaagggtactgtgattcatgaagcccaggggcccacaccatattctcaatatgaacattcctctatccctgccacagtaaagaagcttttcaatttaaaatccaatttcttgacaaagagagatgcatgggctggtacctatgaaaagtactnttacattcgagatactccccgtgatgattgtccagatactctttccgacatcaagatgc

SEQ ID NO: 12857 - DNA, 570 bp, Glycine max
  unsure at all n locations
  Clone ID: jC-gmle01810064f11d1
aactaggaacaacatttcataaaagacaacacagtacacgtaatacatttgttttgtatcagaagtcaaatatttaggaaatacaataaatatttatagaagtttcactgtttgaagaataatttaccagaaataaaattattttatttctggtaaaattcttttcaatttaagaacaatcagccactaaaattgttcatgttgaacaaaattaatcaattatctgactaattgttcttcaactgaaaatacttttactaagaacacttgtatttttttcctaaacattatagtgaatatgctacatatataccatatttacagcggtatagtgtgaaagaatcagtaagattctacaagtttgtggttatctccatcagcgactctgcttgtgagggaaggcctcattgtgacaatggctgattcattagccccagctttaagagcagcctttgcagcttccaggaatctcttcaccgcatcttctgcgtacctgtttgcttctttcactgtcatagttntaccaatgtttggataagagtgagtacataatcaccattgagctgagat

SEQ ID NO: 12858 - DNA, 463 bp, Glycine max
  Clone ID: jC-gmle01810064f12a1
caaacatatctcttcctcttctgtccctcaatggaaggatcaggatccggtgtggttacagtctacggcaacggcgccatcaccgagaccaagaagtcccccttctccgtcaaagtcggcctagcccagatgctccgcggcggcgtcatcatggacgtcgtcgacgccgagcaggcccgcatcgcggaggaggccggtgcctgcgcggtgatggccctggagcgtgtccccgccgacatccgggcccagggcggcgtggcccgcatgagcgatccgcagctcatcaaggatatcaagcgggccgtcaccatccccgtgatggccaaggcccgcatcggccacttcgtcgaagcccagatcctcgaagccatcggcatcgactacgtcgacgagagcgaggtcctcaccctcgccgacgacgccaaccacatcaacaaacacaacttccgcatccccttcgtct

SEQ ID NO: 12859 - DNA, 463 bp, Glycine max
  Clone ID: jC-gmle01810064f12d1
ctaaaatccaattaacacggttcaaaacaccgaaaactaaaaacataaccttattataatatataagaagcaactaaaacccttaatagtccaaattgaagcgccacagagaaacaaatctgagaattattattcatttcattcagagcgattggcgaacctctcaaccttgtcatcggtcaaattgataccaaccatggcttcacccaatgcgcagctaacctccgccaaaatctcagggtcgctgtagtgagtcacggcctgaacaatcgccctggcgcgcttcgcgggatcgccgctcttgaaaacgccggagccgacgaagacgccgtcgcagccgagctgcatcatgagcgcggcgtcggcgggggtggcgactccgccggcggcgaagtggacaacggggaggcggccaagctgcttggtctgcatgacgaggtcataaggcgcaacgatgttcttg

SEQ ID NO: 12860 - DNA, 569 bp, Glycine max
  unsure at all n locations
  Clone ID: jC-gmle01810064g01a1
cgccgtcgcaggcgccaccactgccatcgccgaggccgcgataaggactctcttaagattcgaaagaagagcaagtcccaatcccaatcccgcggaaaacgacgccgtaggcattaccaccactcttccgattcctattcttcatcctccctctctgattactccagaagtgaaagttcttctgatagtgaacatgaaacatctcaccgttcaaagaggcacaaaaagagtgacaggccaaagaagaataaggaaaaagatcaaagtaaaagccaccgtcataagtggcagaagcataaagtaaaagaggtaggtcactttttcatgccatttttgttatcttccataggcttgttcaaaatagtttggtattcttcgtatttaaagtttttaactcaagttaccttgaaatgttgactatgtgcgaggcgtcgtttcatttaaatcttcagattgttcataaactngattcagcatgttaatacttattactactggaagttttgctgcatggattctnttctaaatctaagatgcacccatgtattttggatgattctatcatcttc

SEQ ID NO: 12861 - DNA, 487 bp, Glycine max
  Clone ID: jC-gmle01810064g01d1
ggaggggaaaccaagaagggaacaaatttttaataattcagtcacatgtgcccaaataaacacaagaaaaaaaaaaaagtcttggcacataacacaatgattgcccaatctcaaaataccatgtatggaatctgttgggtcaaaaactcctcattctacaaaagctcataacatattccgtaaaagagaaatccactgattgagaaccacacatgtctttcaatggtacgcataatattatggtatccccctcctcttccgcaaggaaatggcaggctgcccggttcttataatggaaaaataatttatgcacccacgtaagtaaatttggttctttgcagattttgttgtaccctatcaaatctaatcaaaactagcatttaaaaagttcagcagttcatttctcttgctttcagctaccttatcttcctttgttttctcaagtttcagaagaatcttcttgccagatacagcactgcgacggaca

SEQ ID NO: 12862 - DNA, 241 bp, Glycine max
  Clone ID: jC-gmle01810064g02a1
ggacctatatgccgccttgagttcccactatggtggcttaccatgctctctgctgagattctaactaggactacctcccagacctgctacagcggagtgctgctccggaagattgaccaccactatagcgagacctatgatggatctgcatgtctagttactggactattgaaagatgataggactgagcacatggaacatgtagccgatgtatgaggcgcaaaatgagtggcgggccgta

SEQ ID NO: 12863 - DNA, 229 bp, Glycine max
  Clone ID: jC-gmle01810064g02d1
gctggagtgccctcatatgctacggatccgttgtttacagaacacgtgagcacatatatactcaaataaagtgtgactgacttggacactctatcataaatcgaaacttttatataatccaattttggaacactctagcaaactgaccccgaatgatccaaatggttattaaacatggcggatagaatacaatgtatgttcgtgatgcatacatgtttcaagatggaac

SEQ ID NO: 12864 - DNA, 504 bp, Glycine max
  Clone ID: jC-gmle01810064g03a1
ttccattccaggatacaaatctgatggagatgtacaggaagattggtagaggggaattcaaatttcctaaatggtttgcaccggatgttcgccggtttttgtccagaatattggatccaaacccaaaggccaggatatcaatggccaagattatggaaagttcttggtttaaaaaggggttggagaagcctgctattactgtgaccgaaaacgaagagctagctccccttgatgctgatggaatatttgaagcatgcgaaaatgatggtcctattgccgagcctaagcaagaacaggccaagccttgtaacttaaatgcttttgatattatctccttctcaactggttttgatttatctggtttgttcgaggacacttttctcaagaaagagacacggtttatgtcaaaaaagcctgcctcaatcatagtcttgaagttggaagaaatttgtaagcggctttgcttgaaagtaaagaagaaagatggaggcttgctcaaattgg

SEQ ID NO: 12865 - DNA, 530 bp, Glycine max
  Clone ID: jC-gmle01810064g03d1
aaacacccaaattggtgaaatttgcaatttaggtacacaattgttcaagtatccatcagacaagaggaggctgaaccagccacattattctatgagtcctattaaaattaagcacttgactaagataatgacaaaagaagcacagtgcatacaaaaaccaaggggtgaaatattgatcatgaaactaagcagtatgagaaggttggtgctcttcctggactacttcatgttgctcttgctcttgctgtggtttttctccttgccaggtccaaacaatgtccttaagcgctggtcttatatcctgtttaaaaagcttctggtactccatggtgtcaccattggactttctaagttccaccatatggaagtgtggggtaatctcaaaaatctcagcatcaacacccaaagttcctttcctgccttccttggaaccttccaatttgagcaagcctccatctttcttctttactttcaagcaaagccgcttacaaatttctccaacttcaagactatgattgaggcaggctttt

SEQ ID NO: 12866 - DNA, 528 bp, Glycine max
  unsure at all n locations
  Clone ID: jC-gmle01810064g04a1
ctttcaaccgctggtccaatatatccagctgctggtttgggaacctatgtagaggcactagtgcgcaaacatgacactgaattcaacgtggtagtaacacagatgaatggttcacatcatccaactgaatctattcatgtgcttcatgttggaaagatgaggattaaactttgtaagggaaagacaacaattgccaaagaatactattcaagttcaatgcagctttgtggagttcgcggaggtggaaatgccgctgcacaagcactattttggcagccaaagcaggggcattcttttgtattagcttttgaatcagagagagaaaggaatgctgccatcatgcttgcaaggagatatgcatctgacctgtatatcatgcttgctggaccagatgacagagcttctctagggacatgatgggcctncttacatcttaatttccccccttgtaattatgagtttcttctacctggattataagggtatttcacagtaaaatctaccttgtatattggtaagtagtaatga

SEQ ID NO: 12867 - DNA, 548 bp, Glycine max
  Clone ID: jC-gmle01810064g04d1
atagtatcttggacactacattggattcttttgaggtaaatctagcaatatacattggattctcttgtattatattacataatgagagtagattcacatattgtcctgtccacgaggccagtgtccatagacaaaatgcaatcagaattctcagtaattgtctgaatgtctgtctattaaatacaaccaattagcatctcaaacacttcgacatggcagccacggattctattataattataatgtaacctaaaacttacgactcacaaaggcaaataaaaaaatgccttggactgatgaaacaaaattatataaatgattcagaccacaaggtatgaatcattactaacttaccaatataacaaggtagattttactgttgaaataacacttataatacaaggtagaaaaaactcataattacaaggggggaaataagatgtaaggaggcccatcatgtccctagaggagctctgtcatctggtccagcaagcatgatattacagtcaaatgcaaatctccttgcaagcatgatggcagcattcctt

SEQ ID NO: 12868 - DNA, 499 bp, Glycine max
  unsure at all n locations
  Clone ID: jC-gmle01810064g05a1
caaactcttattcccactcagtggtgaatttgccaaaccgggataaccgtatccctattcaggaatacaatgttctcgttaagactccctattcctctcgttaaaacaccaccttctccctcttgttattattctcactattatcactatcgttatcgttatcgttgttatcatcctttccatcaccgttcccaaacacagagtcttatcgtctcgaagcgcggttccgccattgcgaagtgtcacgctgatagcgtgacacttcgtgatgacggagtctcgctcgcccaagagtcgttggagccacttccggcggaactcgcggcggagatgatgccgaagcatgtggcggtgataatggacgggaacgngaggtgggcgaaggtgaaggggctgccaccatcggcggngcaccaggcggtggtgcaatcgctgaggaaaatggtgaggcttgtgtgcagctggggaattaaggttctaacggttntcgcgttctcta

SEQ ID NO: 12869 - DNA, 521 bp, Glycine max
  Clone ID: jC-gmle01810064g05d1
aagaatataataagtctacaatatcatttatcttttttccaaatacctgttaacaagtctgtagatcaatatatatataaatatctttccatgttgctttcttatgcctaaatcatggcattgataactagcaaactactaatatttatgttgcttagtatctaattaatgtatatgtttatcaaggtatatcactatatattgcaaacaaatgtttatgaatgtcgaccaccatagcgtctttgtctttgttgaaatgaacttaatgcatctacaaactcatccttcccaaaatctggccagagttcccgattaaaataaagttctgtgtaggctaattgccacaacaagaagttactcactctaagctcgccactagttcgtattagtagatcaggataaggaaactcagtacaattagtttccaattcttgttcataatgttttcgtttatgtcatccaagtgaatgtgaccatctttgactttcttggctacacttttacatgcttgcacaacatca

SEQ ID NO: 12870 - DNA, 437 bp, Glycine max
  unsure at all n locations
  Clone ID: jC-gmle01810064g06a1
ctctcttctctgcaaacaaccttcaaatttccttttgcttcttaccaaaaagaaaccttcctggaagcttctctctttgcacttccatgatttgatctccgccgtggatatgatggaacttgctcctctttccttttctgattaatattattttttatatttaactggagagagagagagagagagagagagtcatccttcttcattttttgatacctggattcgagacatgagatgaggccgatgcaactgccaccgccttccggttccggggccaaccctgcccccaccaacaacagcaaggaccgtccccagcgccgtcgcaaggacctcacgctgccgctgccgcagcgggacaccaacttggcggtgccgcttcctctgcccccatcgacggcttctgctgcggcggcgcancaggtgatccccttttcgga

SEQ ID NO: 12871 - DNA, 541 bp, Glycine max
  Clone ID: jC-gmle01810064g06d1
agaaaaagaaaaggatgataatagtataagaaaagcatggcaaaacaaacagggcatgtaatgtatggcagaaaatccaatattatagagatttgattatgtatggaaaataaaaaaagaaaagaaagcagcaaacagggctagctaggcatggatggagaatactaggaaggaagaggccttggcggaggagggagtagctgatggaggttgggaggagtctgattatggttgggcagcggtggagcaatgaaggggtgttcgaggagcctggaagcagaccagcggcgagagggatcgcgctgcaaacagcggaggatgaaatccttgaagtgaggtgaagcagaaggaggagcctctggaggctgagacatacaaatggcgcacattagactggcccaatcgccctgcctccctacagcgaaggggaaccttcccatgtagaactccagtatgctaaccccaaagctccatatgtcccccgcgtaagcgtcgtattgcccgtcgtttatgtccgtattgatcctctccggactcatgt

SEQ ID NO: 12872 - DNA, 260 bp, Glycine max
  unsure at all n locations
  Clone ID: jC-gmle01810064g07d1
ctgcatggtaagctgcgtaagcacacgaattaattncttggacgacccgctcactagtctggggacgcgcttcgagctgttttttattaacctaaagtctatctctccaaatttccataacacgggagtaacagggaggaactcggatgcaaatcaaactgagacctattaaccatgtccatcattcatgcaaacactgggcattggataccaagggtgagcccttaagagtcatcggtctcgaactcttgcggcagcat

SEQ ID NO: 12873 - DNA, 591 bp, Glycine max
  unsure at all n locations
  Clone ID: jC-gmle01810064g08a1
ctgcatttgagagcagctccttgaggttgacattcaatttctcaaaacaaccaggaaacccacaaacaacagttatccaggctacttttatgaatttgtcctccaattcatatacagattttgtttttcaagcagcagttcctaagtttcttcaattgcacttagatccagctagcagcaatactcttcccgcaaatgggtccataacccaaagtttgaaaattactaatagccaacatgggaagaaatctcttgtcatgcgtataaggatagcatacaagataaatggcaaggatacactggaggaaggacaagtcaataactttcctcatggtttatgaagcccaatgatcaggggtcattaaggtgatgcacaaaacccatcgttttccccagcactccataattattggtgcggttntcatgtttcattccttcaattgaggaaggtatggttcgaccatctggaccactttttggcttaaatttgaagtcgatttggtggcttcacatctttggtntacctttttcttttacttaggtgatttatgtacattagtacaacatattcctgtatgaaaatgccatagt

SEQ ID NO: 12874 - DNA, 265 bp, Glycine max
  Clone ID: jC-gmle01810064g08d1
gagattacatttcattaatcttgagggggaaacattacataaaatcaaatatatcaatcgtctaaaagataccaaattgcattcaacaacactataactttagacagcaaaaccgagcgactacctccaaaaaaatagcaagaaagcacttcaagtactcaataggacacaactctcagtggcttgagaggaaaaatttgactatggcattttcatacaggaatatgttgtactaatgtacataaatcacctaagtaaaggaaaa

SEQ ID NO: 12875 - DNA, 604 bp, Glycine max
  unsure at all n locations
  Clone ID: jC-gmle01810064g09a1
caaatttgggagtggaaagaatgggtttggtgggaaggcagggaaggatcatgatggtgaagttaaggagatgtgggatacaattgctgggggagattctgaggatgatcaagagggtgtcaggaatgtggatgatgacaacttcatagatgacactggagtggaacctgcttattatggtagtgatgaaccacgttctcctgttgatgctccccaggcggaggagggtgaagaggatgaagaaattaaggatcttttcaagataggtaagaaaaagaagaagaatgagagaagtccagcagaaatagcgtatttagttgagactgtcatggctgagcttgaggttacagctgaggaggatgctgaacttaatagacagggaaagcctgccattaataaactcaagaagttgaatcttctgactgaagtcctctcaaagaaacagctttaactagagtttttagatcatggagtgcttactntattgaagaattgcttgagccacttctgatggaagcttgcaaatataatatacgctcggaagtttgaagatattgatgatttcctatagactagagcagatgatgaagagacagctgaaaag

SEQ ID NO: 12876 - DNA, 482 bp, Glycine max
  Clone ID: jC-gmle01810064g09d1
agggaaaatccacatattcattaaattgatgacaagcatgatgattattcaacagaaaacgaaataatagacgaatgcctaaccgtcaaatgtattttgggtttcctgctgcactaaatgaatacacaaatgccgtatacgggtgtattttcatgacatccctctccttcaaatttccatttatcgagctcactggatctccaccttcagaagaatccacattaatgcaggcagcacattatatgagagcttgcagcaggacaaacaaacccgtccagtatcaacggggacacatttataaatatttgatcataccacgaccttccacgctcagttttgtagcctgaagctgcttcttttttggggccctcaattgctgcaatttcttattcatcttcatacgctgctgatcttgtgcagcttggtttgctcgcgctctaatttcttctggatcaattttagactggggacggaccacaaaa

SEQ ID NO: 12877 - DNA, 525 bp, Glycine max
  unsure at all n locations
  Clone ID: jC-gmle01810064g10a1
cgacgccattttgtttcgctgaaaagattcccgacgcatctcataacttttgacaaaggatggcttcaagattctggacccagggtggaagtgattccgaggaggaggagagtgattatgatgaggaggttgataccacggtgggtgaatctggtagtcaagcagtgacaagcaggtacctgcaggataatgcaagtgacagtgatgactctgatggccaaaagcgcattgtgaggtcagcaaaggataaacgtttcgaggagatggcttccactgtcgaccagatgaagaatgccatgaagatcaatgactgggtgagcttgcaagagagttttgacaagattaacaaacagcttgagaaggtcatgcgtgtcactgagtctgagaaggtccccaatctttacatcaaggcactcgtgatgttggaagatttcttggctcatgctntggctaataaggatgccaagaagaaaatgagcagtagcaatgctaaagcctttgactcaatgaagcagaagctgaaga

SEQ ID NO: 12878 - DNA, 556 bp, Glycine max
  unsure at all n locations
  Clone ID: jC-gmle01810064g10d1
aaaagaaaaacaaagataagtttgtgtgaaagacattgatagctcacgtaaatgagcaaggtcaatatgcatcacttaagggtacaattcaaacaaaataaaaccaggtgaaaataggtgtaaaatgaaagcaagctccaatgtaacaaataaacaaagataaaatccgtaagaaaattaaagcctacaagaatgaaaactagaatgctatagtgcgttagccaaattatcaaaactcttattcaggcacgaactcccttaaggctaaccatgcgagtagatccatctccctggggtcccctcaatgctgaacccctttgagcagtcctccctgaacctccatacgaaccccttcctcgtccccttgaatagccactcccagctgcttggcccaatgccattggccttccaccataccctgcacgcccactgccttgccttggctgagaaagggacanggtcttgccacctaccaccggaagaggctgtaccactgccggcagccgcggcggcagcatagtcctggccatctctacgccttagaggcagatccaat

SEQ ID NO: 12879 - DNA, 578 bp, Glycine max
  unsure at all n locations
  Clone ID: jC-gmle01810064g11a1
gggagggcatacctattcggacatatgaaattggacattttaagttggttgatgggaagttttctccggatggaacatcaattgtcctttcagatgatgttggccaaatatattttctgaacacaggtcaaggcgagtcccaaaaagatgccaaatatgatcagttttttcttggtgattatcgaccccttattcaggatactcaaggaaatgttcttgatcaggagactcaacttccaccacacagaagaaacattcaggaacccctatgtgattctagtatgatgccatatccagaaccttatcagagtcaatttcagcaacgtcgacttggtgcacttggcattgaatggcgtccttcattgataaaatatgctgntggtccagattttagtgttggtcaggactacccagtggtacctttggtagacttggaggaatggttgagccacaaccagagttcttggatgccatgttcntggagccagaatatgacattatngtaagtgatgataatgactctgaatcccatgtgaatgaggataggtctagtgcagcccgggcaaggggagtgtatc

SEQ ID NO: 12880 - DNA, 395 bp, Glycine max
  Clone ID: jC-gmle01810064g11d1
accaccacctatgaccttttttattttataaaaccaacttaaaccccaactaattttccaaaatgggattaaagaatgcaaaacaatggtagaagaagcctataaaacccaattggggctttttatatcctttaaaggttccttttaaaccattttgaaattttccggaacttggtcaccagctgagcattttttggaatttaaaaggattcttcagcatttgataacattaccattttattatggttcaaaccttccacactccgatgggaggcattcttcaatcttgattgaattaattcaggaaaaaagggggcaggaaacctgtttggaaactttaacctttcaactacttgggtcaagggttggatatcaaacctcctgtgggctaattt

SEQ ID NO: 12881 - DNA, 377 bp, Glycine max
  Clone ID: jC-gmle01810064g12a1
ggggaaaaccctgcccgcggtccagaggaaggttagggttctgggccggttggttcccggttgcagaaaagaaccgcttcccgtgattctcgaagaggccatcgattacatacccgcgctcgagatgcaggttcgcgccatgcaagctctcgctgacttactcttaggctcttcctccggctcaacctccgtcgccgcgccgccaagttgatctcactttccggcgaatatgccacgtgtcatatattttttttcctcttcttgattattggtattatttgcctcgttttcactttcgtttatgttaattgtccagtacatacatattatatcttcttctaaaaaaaaaaaaaaaggagactatggtattggacatt

SEQ ID NO: 12882 - DNA, 340 bp, Glycine max
  Clone ID: jC-gmle01810064g12d1
agaaaaaaatataatatgtatgtactggacaattaacataaacgaaagggaaaacgaggcaaattataacaaaaatcaagaagaggaaaaaaaatttttgacccgtggcatattcgccggaaagggaaatcaacttggcggccccgcggcggaggttgaggcggaggaaaaacctaaaagtaagtcagcgagagcttgcatggggcgaacctgcattttgagcgcgggtatgtaatcgatggcctcttcgaaaatcacgggaagcggtttttttttgtaaccgggaaccaaccggcccaaaaccctaacctttctttggaccgcgggcagggttttcccc

SEQ ID NO: 12883 - DNA, 462 bp, Glycine max
  Clone ID: jC-gmle01810064h01a1
gaaaattctctcccttccaatgatcatctgaaattacataggattatatttatagggtcatcaagaactcttcagcattaaaaaaggtgatttataatcagaaaacaagggacagccacacagaagttatcttgaatcagaaaacatgatgctaagaagctcttcaacaccagttcttggatccctcctctcatccttcccagatagtcctaacaacaatattcactcagaaacctgtcatgcacttaaacactttccaccaaccagtgtcccacaaccttatcacaaacttacttgccaccaaacccggtcctttgcatgtggttcttctccaatctctccctcaattggtgagcttgaaaggcaaaacaaaggctttagaagagtccaatctgatgggaacttgcaagacttggcctacttttcttgcaacaatgaagaaaggttggagtatttagaccc

SEQ ID NO: 12884 - DNA, 541 bp, Glycine max
  unsure at all n locations
  Clone ID: jC-gmle01810064h01d1
agcaaaatatcgtattacctattcaacaataacattcaatccttcctgttccttctatcgtcaagacccttaataacatgaaatattctccatggtcataatactgcacctacaacttccacaaccataactgtgatccctgattcccttgcgaaaaacaagaacagaatagttagcctgtcaaatttccgttcatatttaggtcttctagaaccttttctcgagcgttcaagctggcttttggaacatgttctgattccatcttaatagcaccgtgtaaagttgcttaaattgcagtgcctttgatgcaacaaaccaacatacaagtactagtagtcccaaataagccacgttgattaattaaaagggtggtcgcttgtcttagtgctactacacatgagtttatgcattcagttatttactgctttctcaacagctacaacattggcttcatataagaactngtttacatcatgagacactctcttgcacgtacaaacttcaccaccaattcaagcacctgcagtagctatagcttctt

SEQ ID NO: 12885 - DNA, 476 bp, Glycine max
  Clone ID: jC-gmle01810064h02a1
ggagtcatatgcaaccttgtgttcccagaatggttgattaccatgctatttgctgtttttctaacttggtctacctcaaagacctgcaacagtggagtggtgttttggaagattgagtcagaggagagaaggaaaaatgatggatttgaagggctagaaaaaggactattggaagatgagagttctgaagaaagggaagagggagttcaggtagagaaagaaaaagaaaaggtgaaaagtattgaagaacaggttatggttcctgaagaaaatataagggtgaggattccttggttgaaattagtggtcttactcttggtctggttctctttcttctccctctatcttcttcgtggaaacaaatatggacagagtatcattccaatggagccatgtggtgtgggatactggattatttcatcagctcatgtccctcttgctttatttttcactgcttggattgtatatagaaaaga

SEQ ID NO: 12886 - DNA, 465 bp, Glycine max
  unsure at all n locations
  Clone ID: jC-gmle01810064h02d1
actagaatgcaatcatatactaaggttccgttgtttacagaaaaagagaagaaataaataataaaataaagtgtgactcacttttacactctattttaattcaaaactttcatctcatttcatttttttccactctagcaaactgtacctgattgagcaaaattgtttttcaacagggtagtttgaatcccatgtatctccctgatgtatagtctttccaagttcgaatggctccgaagctagtcattagaacaatacttaaagtcatcactatgctaaccgaaaatactattaaagatggtcttccatagctttgaattgctttctgcaccactaataacccaattagtgatgcaacaaaacatattagggccaagatgagggcagtctctatgtgatccatgcccncaataggtattgcaggctgacatggtggatgagaagaaaaccatgaaagaacatgtt

SEQ ID NO: 12887 - DNA, 620 bp, Glycine max
  unsure at all n locations
  Clone ID: jC-gmle01810064h03a1
gaggaatcatcctctgttgctattgtcgggagtgggaactaacgccgttggatatgacctttctcctgagtcatcatttgcacgttacatgtctggtcagggatttgaaacttggattcttgaagtacgaggagctgggttgagtattcagggttcaaattccaaggatattgaacagtctgccaatgcaatgtctgagaagatgaaagctgcttcagaaagtgctattgctaccaatggagcagtggcttcaaacaaagaattgaataacgtctctttttgtgcggtatctgaacctgagatttctgcccctaatggagtagaaactgaaaatgtggcaatccaaggtgatctaactaggttaggtactgtttgggatgaatcaaagttggtggcaagattgaccgagactttaatgtttttgtcagaaagagtctctgggtttctgagtgaaagtcaatcaagggtgatgtttaccaaatttctagatcagatttcaaaacttttggtggattctccattatatgaacaattcaatgagtaaatattatcgaggaaagtcagctatctgtttctcctncattatttgatctacaagctcgctttacttttacaatcga

SEQ ID NO: 12888 - DNA, 367 bp, Glycine max
  unsure at all n locations
  Clone ID: jC-gmle01810064h03d1
atagncatgatgaaaagtatcgtgtaagaaattctgtacatatattttacagaaattgagaggcaatgctgaaaaaaacaattagactccttataattcctatttctatatcctcgattgtattccagagtcctaccttttgctgctatggttaggaaacaaaaatgctgaacctccttactccaatgcacaaaagggctctgataaattcttttaacttttcttcataatttaatttaatgtacctgtttggaatttagttatcaagcatgatccaagaaggatgtattagatgaaaattgacggtgtacatcacttgtcgtgacagctaagaaattcaattatacatggatacacctgctccacc

SEQ ID NO: 12889 - DNA, 222 bp, Glycine max
  unsure at all n locations
  Clone ID: jC-gmle01810064h05a1
caaactcttattcccactcagtggtgaatttgccaaaccgggataaccgtatccctattcaggaatacaatgttctcgttaagactccctattcctctcgttaaaacaccaccttctccctcttgttattattctcactattatcactatcgttatcgnntatcgtgttatcatcctttccatcaccgttcccaaacacagagtcttatcgtctcgaagcgc

SEQ ID NO: 12890 - DNA, 562 bp, Glycine max
  unsure at all n locations
  Clone ID: jC-gmle01810064h05d1
aagaatataataagtctacaatatcatttatcttttttccaaatacctgttaacaagtctgtagatcaatatatatataaatatctttccatgttgctttcttatgcctaaatcatggcattgataactagcaaactactaatatttatgttgcttagtatctaattaatgtatatgtttatcaaggtatatcactatatattgcaaacaaatgtttatgaatgtcgaccaccatagcgtctttgtctttgttgaaatgaacttaatgcatctacaaactcatccttcccaaaatctggccagagttcccgattaaaataaagttctgtgtaggctaattgccacaacaagaagttactcactctaagctcgccacttgttcgtattagtagatcaggataaggaaactcagtacaattagtttccaattcttgttcataatgttttcgtttatgtcatccaagtgaatgtgaccatctttgactntcttggctacacttttacatgcttgcacaacatcatattttccactgtatcccactgccacaataagtnggaatct

SEQ ID NO: 12891 - DNA, 477 bp, Glycine max
  Clone ID: jC-gmle01810064h06a1
ctcagtagtgtcatttacgcttctcttctctgcagcaactatgcctaaccctaaggtcttcttcgacatgaccatcggcggtcaatctgctggccgcatcgtgatggagctctacgccgacgtcactccccgcaccgccgagaacttccgcgcgctttgcaccggcgagaagggcgtagggcggagcggcaagcccctccactacaagggctcgtccttccaccgcgtgatcccgagtttcatgtgtcagggtggcgacttcaccgccggaaacggaaccggcggcgagtcgatttatggcgccaagttcgccgacgagaacttcgtgaagaagcacaccggtcccggcatcctctccatggcgaacgccggtcccggaaccaacggatctcagttcttcattggcacggagaagacagagtggctcgacggaaagcatgtcgtgttcggacaggtcatcgaaagattgaacgttgt

SEQ ID NO: 12892 - DNA, 409 bp, Glycine max
  Clone ID: jC-gmle01810064h06d1
aataggcgaaatataaaagccccaattttattgaagggggcccatcctgttttttttatgcttctaaaaacaaaccccatttacttgctttttgaaccccaacccaccaaccccatgatactggttttgaaaagggaaggggaagggttttaaaatgatttccttaaccccccaatcccctaaacgacccccccagaaagaaaagaagagaaaaaaaggggccaaaaccaccccgcaagaaataaccccaattcaaagattaaagcccggggtcaacttcctctaaaaaaattacccccacttgggcaagacaaccggcttggagggcctgccgaagctggaccccaccttttcgatgtccttgacaacggtcaatacttcgagaacctgtgccaacacgaaatgcttt

SEQ ID NO: 12893 - DNA, 406 bp, Glycine max
  unsure at all n locations
  Clone ID: jC-gmle01810064h07a1
cagccttgaacttgaactatcgtgtcttcttggctttctctgttcaggatcaacatggatattgtatcacgagctttgctatttccgttggctatacttgtgctcatattaagcacaccttgctcaggtgcttttgggaagagtggaactaatgtgaaaacagctatttttctgtcccccaagtttgaacttggaccaggatcggtagccaataaatatgattatgacgctgattttccaagaggtcatatagcacttaagagtttcaatgctgaagtagttgatgaagcagggaaccctgtgcctcttcatgaaacttatctncaccactgggttgttgtaagatactatcaacctaaatatgtgacgacacacacaaactatgatggacataggatactttaca

SEQ ID NO: 12894 - DNA, 530 bp, Glycine max
  Clone ID: jC-gmle01810064h07d1
acaacaaacatgatatatatagtattacatatcacacaaccataataagcaagactggtttaagacaaacattacaaaccctcaccaatacaaataattgataatcacattactacaatccttaaacttgaaaatatgctctttgccggttcttgcgtgtgttgtcctattgctgccgaatatgagaagtatatgttccatcgatatgtatttctgtatttcttttaaccgtgatacatactgtgataccatcgatatgacactcaacttatatttgcatctcacaacttatctatcaatgaattatactatttatattcataaaaaatgaagaacgagaagaatatctgaagtgttggtgtggaagctgttctgccaccaataggtagaaaagccccattactccagtgtggccacggctgctgctgtagttagactctagagttatagtttcaccatcaattatctttacagaacctggttgaggataacatgtgctcattcctacaatgtagtctacttcgtttcct

SEQ ID NO: 12895 - DNA, 499 bp, Glycine max
  unsure at all n locations
  Clone ID: jC-gmle01810064h08a1
cgtttattcgtttccctgcttctgtgagaattttgctgacgatcatacgctttctctttctttggctttcggtttcttggtgctgtttgagtgtttgtgcattgtacattattatctctacatgttctgatgttattttccttgcaggttgtgaattatttgcaaatctgattcaactacagtgtctattttgactcccaagattgcaagtggcagttatgggtcataggcacttacataacacatcttcattgttcgatggtgagcctgaccagaactggaatcatttgcatactgatcaacaatatgtgcaccttggtaggactaacacttcagagaatagttcaattatttatcctgctgnaaatatgtccatagatagcatatctttcccctctcattggaattcttcctcaaggtcaaatggatatgcatcctctagtcacaacattgttgtacctccttaccagtcagatgcatcangcacttctaatgatca

SEQ ID NO: 12896 - DNA, 526 bp, Glycine max
  Clone ID: jC-gmle01810064h08d1
ccaaaaacaggttcgtttcctcattttttagggatgtccaaatatatacacaaaatgggattaatttatattacagaagttatttatccttcgtatcctcaggcaaagcagatactttgcagataggacataatttcttcatagatagccactttttaatgcagctcacatggtagtcatgtccacaagtttgaagtgttccaacatcgtccatattcttgtactcttccagacatattacgcagtttccttcgtcttcactttgctcagatgaacaatatattgtttccgtcaaacatttggaaagcaaatcctcagagactcctgtgttcacatagccaatcctctcaccaagtgcaagtagttcctcataactcatgttatctacatccatcctcatgtctcggtgctgatcaagcatattcctggaaccatacactgatgcacgctcaacaaccatgaaaccctcagaggaaaatcgatcatggagaccactctcctcagtcaatgatcgatatctttcact

SEQ ID NO: 12897 - DNA, 468 bp, Glycine max
  unsure at all n locations
  Clone ID: jC-gmle01810064h09a1
gcaaaattttccaacagttggcgaaactggtttatgggttgaagtctggttcaggatttgtgggggaagagaagagcactcacaccatatccattatcaatggacttggccgcgaagcttcaccacttagacctgaccggcgtggtcattttggacgcccgaaagccctccgcactccgccaccttccgccacgcgttctcagcagaacaaacaccaacaccaatttgatttacacgaaccggttctcgggcccaccgaggcccaattccgcttcctcaacgggcctgtccatgataaccgtcgaggacgatatcgagtctcttttctccgagacgaactcggaggaggagcggcgcgtgaggaagcaacctagcattggggcgtcggggatttcctccggngtgaagctcgaaaacgtggggaaagcctacaggggcgtgacggtgcttgaggacgtgagctgggag

SEQ ID NO: 12898 - DNA, 441 bp, Glycine max
  Clone ID: jC-gmle01810064h09d1
gggggtaatcatccttttatatttccgtaaatgagttagtgaatagatacatgattatacaaaggctgggtagcttaacccaatatgctagctacatcaccttctggcggtaaattagtgtaacaatgaaatggttcactcaattccatctcttggcatttttcacgcctttggacttctgttttgctgcctgaaaggcctgcatcttttgtttcttccgtgcctctttctcagccttggacatcttagatttggctttcactttaggagctttgctatcaagctcagcctcgcgttcaagttctctttccctagcatcaaaattcttctctaaataataatcgtaatcacctgcataatcctgtatggtgccatctttaatttctatcactctattaactatttgctttataaagtatcggtcatgagatactgtgataa

SEQ ID NO: 12899 - DNA, 509 bp, Glycine max
  Clone ID: jC-gmle01810064h10a1
cttgagggctcaccagatttgaaggctgcaaaagaggttgctgactatctaggcactgtccaccatgagtttaccttcactgttcaggatggaatagatgccattgaagatgttatctaccatattgaaacatatgatgtgactacaattagagcaagcacacctatgtttctcatgtctcggaagattaaatcacttggtgtcaaatgggttatctcaggagaaggatctgatgagatctttggagggtatttgtacttccacaaggcacccaacaaggaggagttccacagagaaacatgccgcaagatcaaagcacttcaccaatatgattgcttgcgagccaataaatcaacatttgcttggggtctagaagcccgtgtaccatttttggacaaggcgtttatcaatgctgcaatgagtattgaccctgagtggaagatgataaaaagagatgaaaggacgaatgagaagtggattctgaggagagcctttgatgatgaagagca

SEQ ID NO: 12900 - DNA, 548 bp, Glycine max
  Clone ID: jC-gmle01810064h10d1
gaactgataaaggaaacacttttattaagacttcaaatcacagcattcaagataatacaatacgcaacactttttagaaagccttataactataaactataaaagctttgcccagatgaaattacactgcaggcaaatttttcattcacctttagcttagttatcttcattgtcgcccaaattattctttgtcacatctttgtattagccctggatggcaacaccaaggggagcagcatccataggtattatcttctcaatttctacacccttgttgttctggttttcataggctgaaatgtgcactccaagtgctgctctaccagagggatcaagggttgttagaccaagcagcatcccactcaacagctttggctgtgctacatgcaacacttgctcctccaggaacagtgagcctagctgagttctgagggaagaacctctaaagatcattctgtagtaatatgcttccttggtttttggggtgttgggggggtaaatggtaccagcattaagcatcattttttcagtcacatgttttgcagcat

SEQ ID NO: 12901 - DNA, 514 bp, Glycine max
  Clone ID: jC-gmle01810064h11a1
tgtacatcaagaacatgtgctatatgccttgaagactattgtgttggtgagaagctcaggattctgccctgctgtcacaagtttcatgctgcctgtgtggattcgtggcttacttcatggagaaccttttgtccagtttgcaagcgtgatgctagaaccggcttaactgatccaccaccttcagagtccacacccttgctctcatcaaccccagcatctatggcatcctctgtcttatcttctgcaagatcatcactagcttcatcttcagcaatacaaattgcccggacagcatctatggcatcctctgccttaccttctgcgagatcatctctagcttcatcttcagcaatacaaattgcccggacagcatctatggcatcctctgccttacattctgcgagatcatcactagcttcatcttcagcaatacaaatttcccgggcagcttcacagaccccattctgttcccgtaaccactccatagccagtacaccttatgttcagccatctc

SEQ ID NO: 12902 - DNA, 317 bp, Glycine max
  Clone ID: jC-gmle01810064h11d1
attggtactcagaggtgcaattagatgaacaagttttgataaccctagagggatacatcacatgatctctcatgaatcagggggacaaatcccctagacagagcataaagaactttttttacttcaagggggctaggggcaaaacagcccaacattttttttggtagcaggtgactatacttggacatcaagggcatgaaaacgtcaacattcaaaggacaaacaatacccccaagttactggttgcaagctctccaacctataaagggaagaacctcaacccgcccatgtaaacgaaactaacccccgagagaagc

SEQ ID NO: 12903 - DNA, 554 bp, Glycine max
  unsure at all n locations
  Clone ID: jC-gmle01810064h12a1
ctaatacccatttcggtaataacacaatcgcaatccgttactcactctcttccatggcgacggggttactgaagagggcggcgcagcgtgtcccctcctcgccggcgttcaagctggccattctccgggcccacgcgtcggaggcgcaggcccagcaggtggagcccaaggcccgcgaaaccccgaccctcaaaaccttccaaatctaccgctggaaccccgaaaacccctcaaagcccgagctcaaggactaccagatcaacctaaaggagtgtgggcccatggtcctcgacgcgctcatcaagatcaagaacgagatcgacccgagcctcacgttccgccgctcgtgccgcgaggggatctgcggctcctgcgcaatgaacatcgacggctgcaacggcctggcgtgcctcaccaagatcccctcggaaaaaaactccgncgncacgacgatcactcctctgccgacatgttcgtgatcaaggacctggtcgtggacatgacgaacttctacaatcagtataagagtatcgagccctggctgaagaggaaga

SEQ ID NO: 12904 - DNA, 386 bp, Glycine max
  Clone ID: jC-gmle01810064h12d1
aacaaaaggggcccaggttttattaaacaaaaatttagccaaaccccccccaactttgaaaaaattcaaagtccccccccaaatgaacaaatgccaaccttatcttccctttaaaaaaaaaattttaaactttaggctgaaaggacttgatttgggaaaattgctttcctggggtcaacccctttgggcaggccccaccccagttcaatttggggggcccccaaaaaaacttgaattcctcattaagggcctccaatctctccttaaggtacccaaaccgggtggcgcttatccacctataaccggggaacaacccaccgggccccaaaaaggactcggggttccaccaatagctggggcaaaaggtgctacaactggcccaaaaa

SEQ ID NO: 12905 - DNA, 76 bp, Glycine max
  Clone ID: jC-gmle01810065a01a1
aacggcacggtctcattctctcttgctgtttacctactctgtatagtcaatgctcggcgctgagtctggtacacgt

SEQ ID NO: 12906 - DNA, 548 bp, Glycine max
  unsure at all n locations
  Clone ID: jC-gmle01810065a02a1
cacattcctgattccactcacaattcacagttcatagttcatagtccatattcatacaccgtatctttgttctcgctgcctagcatggcatcaacttctctcttcaacttcagactccctctgttcaacttcaacccactgcaccatcgacggataaagaggccaaaatctctgctctcctctcctcgcaacagtccacgcctcgtttcttccattaacgaccatttggcgctcacacgtgtcacatatccgcttctccaatctcactctgctccgaagcgcagattccacgttggtgtacagaaagagtattctgatggggaaagctctgagtcgattgtttctgacgctacataccaagaggaattttcctggtcttctgtagttcttccggttctattccccgcattgagtggctcgttatttggctatgatattggtgccacctctggcgctacaatctcactgcagtcacctgagcttagcggtatatcatggttcaatctttctgccattcagctnggactagcggntagtggttccctata

SEQ ID NO: 12907 - DNA, 478 bp, Glycine max
  Clone ID: jC-gmle01810065a03a1
gttcccccatgatgtttggatcatctgctgttgcatcaactcctcagttgtcattcacttctgctacagctactaccaacacacagcctgcttttggaagttctactcctgctttcacatttggtggttcagctctagctcctgttaataatgatcagatgagcatggaggacagtatggcagaggacacagttcaagcaactccacccgcaactcccgtatttggtcaacaacctgccccacttcaatcaaattttgcatttggagcattagcttcaacaggagcgagtgccttccatttcgcaactcaacagaacattgctccacagaatccatcttcatttcaagcttctggcagtcttgagtttaatgctggagggagtttatcattgggcactggtgtagctgacaatgcgggtcgaacatatgtgacaagttggcataatagaccgcggaagaagtaagactatttggttat

SEQ ID NO: 12908 - DNA, 400 bp, Glycine max
  Clone ID: jC-gmle01810065a04a1
agaattcaattattgaaattgaataagtaaacaatttaattggattggtcgaatggtatcaaaaaaatggagtactaactcccatttcttatttattattgaattaaccgatcaacttgctttgttatcgaacatttctttttgatttcaaaaattttccggaaaaaatttgaatctatttttatatgcgaatcaatcctactacttctggtcctgaggtttctgcgcttgaaaaaaaaaatctgggacgtatcgcccaaataattggtccggtactagatgtagcttttcccccaggtaagatgcctaatatttacaacgctctgatagttaagggtcgagatactgttggtcaacaaattaatgtgacttgtgaagtacagcaattattaggagataa

SEQ ID NO: 12909 - DNA, 298 bp, Glycine max
  Clone ID: jC-gmle01810065a04d1
aggtattccgatattcggacccatcaacttgttatgaaaacacattgatagcctctactcgggtcctagctcggctaaaagctagatttgcctcaattggttggctcttgccttccgccttattcaaattagcttctgctatttcaagaggttgctgggcttcttggggatcaatggcactacccttttccgcattatttactaaaacagggatctcattattggttattctagcaaaaccgcccatcagagccatcgttaaccattggtctttaagaagacgttttctcaaaatacc

SEQ ID NO: 12910 - DNA, 435 bp, Glycine max
  Clone ID: jC-gmle01810065a05a1
ggaaacaggcatagcatgctacactcgcgggcctttcttgcctagtgtttcttccaagcactctgcaccttccatttctccatcttttggcttgaggagtctgaaatcaagctctttatttggagaatcgctaagagtggcctgcaaatcaacaataaaggtttcaaagacaaagaatacttcactcgtgaccagatgtgaaattggtgacagtctcgaagaattcctcacaaaagcaacaccagataaggggttgatcaggatgttggtgtccatgggagaagcattgagaacaatttccttcaaagtgaagacggcttcatgtggtggaacacaatgtgctaatacttttggggatgagcagcttgcagtggatttgctagctaatcagcttctttatgaggccctaaactactctcatttctgcaagtatgc

SEQ ID NO: 12911 - DNA, 556 bp, Glycine max
  Clone ID: jC-gmle01810065a05d1
gtctgaagatatagcatatatctttttttctaaaagcagataaaatagacaatgaattgcaggtttaacagattaagcagctgctccaacagctacaccatccttgagcctggatttaccatacagggtttcttcaaaccggatgatctcattcttggatccataagcaacttgagttctctcatcaatgttagtgatgactttgtctagcacagactgatgaccatcactgctgtaacctccggctttttcaatcaagaaccccaacggagctacctcaaacaacagtctcagcttggctttggctgatggtgatgtcacattggtgaagatgcctttttcttttacaataatctggttgacatctggcaccattcctcccgtgtatctcaatgtgtacttttcattgacatagtaatcgatcaacttagcataatcggggttgtcagatgtggctctcaaatttcctggggagaacaattttccttcaccaatttctgtggtctctttgacatgctgccattttccttcatcaagcagaagaaattcatgggtg

SEQ ID NO: 12912 - DNA, 507 bp, Glycine max
  Clone ID: jC-gmle01810065a06a1
cgcacactgaattcaaaaacatcgaaagagagaggcatggccgagcaaaccttcatcatgatcaagccagatggcgttcaaagaggccttattggcgagattattagcagatttgagaggaagggtttttacttgaaagggttgaaactcgttactgtggaccgtccttttgctgagaagcactatgctgatttgtctgcaaagcctttctttagtggtttggtggattacattgtctctggccctgttgttgccatgatctgggagggtaagaatgttgttacaactggccgaaagattatcggagccacaaacccagctcaatctgagcctggaactattcgtggtgactttgctattgacattggaaggaatgttatccatggaagtgattcagttgagagtgctaacaaggaaattgcattgtggatccctgagggccctgctaactggcaaagctcccagcactcttggatctattgagtatacaaatgcctcaagttgatc

SEQ ID NO: 12913 - DNA, 441 bp, Glycine max
  Clone ID: jC-gmle01810065a06d1
aacaaaaatttttctaaaaaaaaaccaaaacacgggcgggggaaaaaaaaaaaaacgggggggccgccccaccaaaaaaaaaaaaaaaaggttttttacgggaaccccccggccccaacttttagaaaaacccccgggggggcaaaaaacaaaaaacccggaattgttgggggccccccaggggccaaggccaaaaaaaggagcggggggttttttttcccgagagcccccaaagggggggggcctcccccaaaaaagggccccccaagggacccaaaaaggaaccccgggggggcccccccccaaaaagccccccccggggggacccccctcccccggggggggagggaaccccccaaaaacccccccccaaaaaagggggggggggggggggggccaaaaattcccccgccgggtgaaaaaaagttttccccccccaaa

SEQ ID NO: 12914 - DNA, 448 bp, Glycine max
  Clone ID: jC-gmle01810065a07a1
cccatcatgatgagtgctggagagttggaaagtggaaatgcaggagagccagcaaaactgatcaggcagagataccgtgaagctgcagacatgatcaagaagggaaagatgtgcgctctcttcatcaacgatcttgatgcaggagctggtcgtcttggtggaaccacacaatacactgtgaacaaccagatggtgaatgccactctcatgaacattgctgataaccccaccaatgtgcagcttccaggtatgtacaacaaggaagagaacccccgtgttcccatcattgtcaccggtaacgatttctcaacactctatgcacctctcatccgtgatgggcgtatggagaagttctactgggcaccaacaagggaagaccgcattggtgtttgcaccggaattttccgcactgatggtattcctgaacaggacattgtcaagcttgttg

SEQ ID NO: 12915 - DNA, 487 bp, Glycine max
  Clone ID: jC-gmle01810065a07d1
caattaaaggggacactgtaactcaaaattatagaggaagacggcccaatatgaaaaatatagtaagatcatctcaaacttagcatcttctctttgcacctaagacattgagaatgctaagaatgttacacgcaagttccatcacaacttctagcacttggattagtacaacaaccttcacgaacagaaatatttacttgccaagtttgctttgcctccaattcaagactggaagaaagttcccctctgaatagcatcctcgttagcatttccaagagcagcctcgttcaagtacttgtcagccaattggactctcttgacattctcttgttcttggacaagcatgttaccatacagcaagagcttctccagagtcatcttgggctgctcaaaggttggaggtccatcttttgagttcacaagcttcttccaacactgtcaacaccaacaccagaaatccacttcctcacttcatcatcatatactc

SEQ ID NO: 12916 - DNA, 496 bp, Glycine max
  Clone ID: jC-gmle01810065a08d1
ggggatgtaaatgaagtgcataaaatatgcatttcaacaaattaattttacttacacgaacgtatgatacgtaaataccaaagattgatatacacggtacagcattacaggatgccattaattttctatgcgttccatgtcgtgatttccacagcttcattcaggcactgttggagcgtacatatccggcatgacacagacatactgccccaaagcacctgtcgtgaaggggttatgctagtctacaacaggaatcctgattttattattacattaaccttcaaaattttaaccaagtaaggggagcaaatttgattctgttttgtctttatgaaagaatgtgcatcataatttaactatgattttagtgtctgcttcatgtatctaagagcagaccgcagcattgctctagcttttctatcaggagtgcatccagatgtgaccatttcttcatacacggctggaaccttttggaacttttcaacacgaatcaaag

SEQ ID NO: 12917 - DNA, 598 bp, Glycine max
  Clone ID: jC-gmle01810065a09d1
gatcaaccgaactcggattacaacacctcgttcaccagtgtctatgtctatatacatcaacattaaacaataaacagaacataaattaaatgttgttgctattggctgtcggattgtgctaatttgccaacacaaattatgcataaacaagtgccatgttgcattactacccccttttttttttaccaaagagaggtcaacagcatgaccttaattgcaattgcataaaaaaatatgaacaatcaaaaagaagcttgtgaccaaagcttgtactagcattctgcataaccgcctccttcacccttcaaaaagttgtcaatttgttctagcgcctgcaagatacaacgggataacattagataagcatcaatacaaaagttagattcaacttcagctccaggaacttttcagtttgcctggagccgacgaaatggagttagaaggaagggcatgaggcagaaattgctcaagacctcaattgcaatatcagttggagacaattcggacacatctgttttgctcagttttattgctatctctgtcacagacaaaaacagcatcagatcattttaatggtatcatctaagaaacattcaac

SEQ ID NO: 12918 - DNA, 289 bp, Glycine max
  Clone ID: jC-gmle01810065a10d1
ccaaaagaaaaaaagggggaacccctttccccaaaaaaagaaagggggggggggctctttaaaaaacaggggggggggggggattccccccaaattcattgggaaaaccaaaccaaccccccccgaaaattggggttttcccccaaaaaaaaaagggctaacgggtttttaaaaaaaaccaaaaggccccttggggttgttttatttaaaccggacaaaagtgcaaaacaaaatggtgtttgcgaaaaaacacccggggggggggtggggccccccccagggcagtttt

SEQ ID NO: 12919 - DNA, 406 bp, Glycine max
  Clone ID: jC-gmle01810065a11d1
gaccagtaatgtatccatggccaatcatatcgacaaacttgcgctacattcaacgtttcattccattatttcgttcgatccattaaaaagtctgggtatagtatcttgtttgactacagtttcttccattatccggtccacacgacctccccttacgaaacgagagttagaacccgcaggagtcacgatcatttgcttaaacgccatgcccagtctcggtcttcgacgccgtaaagttatccgcggcgttggtgttggagtgggtgaaaaccttcttgaccttttccaacaaaccctccttgtgagctccgccggtaccctcgaggttcttgtcgtggaccccagtggtggtggattctcggccggtcaaaccggtaggctgggaggagtggtaagcggcatcctt

SEQ ID NO: 12920 - DNA, 538 bp, Glycine max
  Clone ID: jC-gmle01810065a12d1
aaaggaaaaggcaccaaattcaatttaagtggacactttaactcaaaattatagaggaagacagtccaatatgaaaaatatagtaaaatcatctcaaacttggcatcttctctttgcacctaagacattgagaattctaagaatgttacacgcaagtcccatcacaacttctagcacttggatcagcacaaccttcaggaacagaaatatttacttgccaagtttgctttgcctccaattcaagattggaagaaagttcccctgttaatagcatcctcgttagcatttccaagtgcagcctcgttcaagtacttgtcagccaattggactctcttgacattctcttgttcttggacaagcatgttaccatacgtcaagagcttctccagagtcatcttgggctgctcaaaggttggaggtccatcttttgagttcacaagcttcttcccaatgccgtcaacaccaacaccagaaatccacttcctcacttcgtcatcatatactctggccctcagtgcaccaaagaaatcaatggatt

SEQ ID NO: 12921 - DNA, 528 bp, Glycine max
  Clone ID: jC-gmle01810065b01a1
agcatgagaatcgttgaataacaaaattttcctagaaacgttttctaatcggtcgcagagaaatgaaaaagctggcaaggaagttgcacaatgaagaagacgaaaacttatctcttccggttcacgacggagactctcgtgccttggaccctcaagagcaagaagagctggttcgttctcttgaaaggagtcaagctcagcagagtcgcttatggaggacggtatttgcagctctattcttctgctacatcgtgtttcttttgtactccatcttccagcaggcttcatctgcatgggaactgcgggatcacgcttacttcatggaggagatctactcgtggatgattatatttgcagactgggtggctgatttagcatgctcatttgccatcataggattgcttgaccagtcaatgcatcgcatgagatggatccattactcatggtacacttgccgtattctggccatcttctggctatattacatgttgaggttgccaaagttccgttgtgatgttatatggctac

SEQ ID NO: 12922 - DNA, 545 bp, Glycine max
  Clone ID: jC-gmle01810065b02a1
aagatattgaggagatacttcaaataaatgatagaagggttttaggaaaggatagccaagatgcccctcaacaacatgcttcttaacttactcattctatgcttttgccagagatatcactcttagatattcattgcatgatattgattaggtcccctataacatctcggatccgtgccaagatgctctatgccactactaaagacaggtttagacgtgagctagatggtgtccattatgaaatccaggctactgaccccacagaaatggatcttgaagtgctgagagaccgtgcacattgaaatgtttaagcacttaaattcattttcatatcagaatctactaggttctacctttaatgaattacctcttcatgctttgtcatctgcagagcccatcttgccacagatatataactcgtatccaataatatgaatctgaaggctgatgggtttaaagcttttggcagctattgttgtaaatcccagtgtgctggacttgtattggatgagcgtgactctatggatccagatagattacttgga

SEQ ID NO: 12923 - DNA, 575 bp, Glycine max
  unsure at all n locations
  Clone ID: jC-gmle01810065b03a1
aagcatctcagaagagaggctcagcgttcaagatgcagatcttcgtcaagaccctcacgggcaagaccatcactctcgaggtcgagagctccgataccattgacaatgtcaagtccaagatccaggacaaggagggcattcccccggaccagcagcgtctgatcttcgccggaaagcagctcgaggatggccgcactctttcggactacaacatccagaaggagtccaccctccacttggtcctccgccttcgtggtggtatggccaagaagcgcatgaagaaagtgtacaccacccccaagaagatcaagcacaagcgcatgaagaccaagctagctgtcctcaagtactacaaggtcgacggtgatggcaagattgagcgtcttcgacgcgagtgcccccagcccgagtgcggtgctggtgtcttcatggccgccatgcacaaccgncagtactgcggaaagtgccacctgacctacgtcttcgacgaggccaaataagcgcatcgccaccggagcacgcgacactgatcgatacgagttacggcatcaaggcatatatgggaggagctggat

SEQ ID NO: 12924 - DNA, 503 bp, Glycine max
  Clone ID: jC-gmle01810065b04a1
atagccttcaaatccttcgtcggcctccgccagtcctcgccggaggccccgcatttcgccgcccagccaagacccgccactccccaccgcaaattccgcgtcttggctggaaaattcagccccaagctcaatggccggaacctccgcgtggcggtggtgggaggcggtccggctggcggggccgccgcggagacgctggcgaagggcggcgtggagacgttcctgatcgagcgaaagatggacaactgcaagccgtgcggtggcgccatcccgctgtgcatggtggggagagttcgacctgccgctggacatcatcgaccggcgcgtgacgaagatgaagatgatatcgccgtctaacgtggcggtggacatcgggaggacgctgaagccgcacgagtacatcggcatggtgcggcgcgaggtgctggacgcttacctgagggaccgcgccaaggagtacggtgcgaacgtcatcaatggcttgatcttgaaatggatattcc

SEQ ID NO: 12925 - DNA, 421 bp, Glycine max
  Clone ID: jC-gmle01810065b04d1
gagaagtaaatctttgctagtactctagcattttacatcattgcagataaaaggtacaaataccggttatgggattgcatgaaattcaatcctttttcttacacatatatagttaattatcacttaattataaggagatcatgtccactaggaaaaacacaaagcaaaaatgaatgataaatatgataatgactattattgtcatacgttaagtttgttcatctccctccttatggcattggccctcactaagctcccaatggtgttaatggccaatttcagatcctccaatggattgccaggcaccactgtcttgtacaagtagctatcaaaggtcatcttctgcacatactcatcagcacacatctccacaaacgcttcccttgcagggttggacctataaaacaccttctgaagaata

SEQ ID NO: 12926 - DNA, 555 bp, Glycine max
  unsure at all n locations
  Clone ID: jC-gmle01810065b05a1
cgcacactgaattcaaaaacatcgaaagagagaggcatggccgagcaaaccttcatcatgatcaagccagatggcgttcaaagaggccttattggcgagattattagcagatttgagaggaagggtttttacttgaaagggttgaaactcgttactgtggaccgtccttttgctgagaagcactatgctgatttgtctgcaaagcctttctttagtggtttggtggattacattgtctctggccctgttgttgccatgatctgggagggtaagaatgttgttacaactggccgaaagattatcggagccacaaacccagctcaatctgagcctggaactattcgtggtgactttgctattgacattggaaggaatgttatccatggaagtgattcagttgagagtgctaacaaggaaattgcattgtggttccctgagggccctgctaactggcaaagctcccagcactctnggatctatgagtaatacaaatgcctcaagttgatcttgaaattggcctttaggtgatccagattatctacatggtttctggtt

SEQ ID NO: 12927 - DNA, 367 bp, Glycine max
  Clone ID: jC-gmle01810065b05d1
cccaaaaacccacccacgggggggggtttacttttcccccgggggcccttttccccccacaagcccgacaaaaggcctttttcccccccccccggcccccctttctttaaaaaccccccccgggggcccacacccaacaagtgggaggaatgggggccccccccggcgccaaatcaaacacacccgggggggttgtttttacccaaccacccccaagggcggggggccctccccgattcaccgcccccccggacccccccacaccaatttcttgggggcccccccccacggaaccccccgggggccaccccccccccgggggaaaaaaaccccccccccttgcccccgcccaaacgggccggggggg

SEQ ID NO: 12928 - DNA, 363 bp, Glycine max
  Clone ID: jC-gmle01810065b06a1
gtaggagctctcgatgcaggcattggactggggacaccgtgctgtttgtaacaacaatttattgattactgtaaatccatggtgtttactgtctgtagtaacgtttatgttgtatattgatagttcatggcaggagaaaaaaagagagtaatttttcatatatactctttctctttttttaaattatgtatccttacttgagaaatgatacgtcatacgtgtatggtgtggaacttggttccaaaccatatccagaatgatgggcttcaaagtttaaagagccagagtcttgaatgtccaaaagaaaacaaagctgtaagatataaatggaaatacttgtacagtgcttaaaaagcttcttat

SEQ ID NO: 12929 - DNA, 305 bp, Glycine max
  Clone ID: jC-gmle01810065b06d1
ggggaaaaaaaaaatttgggtttttaaaatttgaaacccatctttttggatttgggttggaaccaagttccaccccctacccgtttgaggtttttttttttaagggggggttccttttttaaaaaaagaaaaagggtttttttgaaaaaatcccctttttttttttccggccctgaactaacaattttcaacataaacgtttttcccaacaggaaacccccggggtttaccggaataaaaaaatggggggtacaaaaagaaggggggccccagtccaaaggctggtttgaaagctcctaccttgg

SEQ ID NO: 12930 - DNA, 440 bp, Glycine max
  Clone ID: jC-gmle01810065b07a1
cggtagcagataaacctaaagacgaacctcgcaaattccctcaacactggagtcactaagtgggactcggtggaaattcattctgggactcagctaagctgaccaaccatgattcaaaatggttgcattgtatcccaagggtgtgcccctctgaattctaggtcacgcaaccatgtcatacctagtacctctgtctttcgttgcgcttctcgaatgcctcccaaggttgccgtctctaacatccggagcttttggggacataatttggaatttcaatccttgttgccaagaggaatgacattgtcaaacacgttcactgcatcaagcctacgtgtaagtgagggtcaaaattttctctttcgtgttctccctctgttaccccatttgcgcaagtctaatatggtccctcgggcatcaaaggatgtcccaactagctttcg

SEQ ID NO: 12931 - DNA, 356 bp, Glycine max
  Clone ID: jC-gmle01810065b07d1
agaagggaccccaatttccggtaaaatcaaaccctttaaaaaaaaaggccccctgggaaaaatcaaaaacctattttttttaaataaaaaattccttacaaactaactgttttttaaagggggtcaaaaaaaaatttttttccaccaaaaggggtaccaaagggggggggaaaactcctttccccctcccaggtaaaaaaatgggaattgggattttgccgcctcccaaaagaaagggatgggggctttcatacccaaaagagggcccctttttcttttccagacaggtaaaagaaaacccaattgttcggggggccaaaaatggctttcccggttacccccagaaaggggaaggg

SEQ ID NO: 12932 - DNA, 433 bp, Glycine max
  Clone ID: jC-gmle01810065b08d1
gtacgattaaaacacataaggcggatttaattaaggcatcagggtttataccttggaagcccccccttgcttttaaataaacggcaaaaaagttttcttttttagagaacttttttggccgagcaaatccatgccttgggttttgtagctgatgcttttgaagcttgtttttcaggggcttttttggaaaaagggcttgaatgcaaatttatttgggaacccaaacaacatgatccttaggaaggaaggggcaaacaggaatagttcctggtttaactttgagcacctgaaaggccaaatgtttagggttccattctgatgggtgaggggggcacactgataccgttttaaccctaaccccatttgtaccctccaaaggcacaaaataagctctgggggtctcggttttgggacacgaaaaaacagcttaggg

SEQ ID NO: 12933 - DNA, 341 bp, Glycine max
  Clone ID: jC-gmle01810065b09d1
gaaagaaattgtggtattaattaatccggccgtgggggttcaatgaacttacccgaacgtgcaaggcacgctacacgagttagaataaaagaattgctacacgcctattcaagcgtaaagaaaaaacctattcattccacgatcatttacttggagtcctattggattaaagaggaccttgttgcgagctactggagcaccctaaatagtggacggtgctccagaatgcataccaggtacatattgttcaaagccacctggcactgcctgctttacccttccaaagggtatgatttgacgcacaagccttgcttagaagggagagcggcatacagtctagc

SEQ ID NO: 12934 - DNA, 529 bp, Glycine max
  Clone ID: jC-gmle01810065b10d1
gaatggtgaaattttaactttaaaaccattcaaaagtgctacagcgcatatctacatttgctaaacaaaagagatctacataaataaaaaaagaaaaacaattgcattcatcactacactactgcttcgaatccaaagaagatccgccctcatcatccaaaaaggcaccaccacctgaatcgttggaatttttcactgcttccaaattcccatagttttcacatagctccgaatagactccactgtctaccttggataccccagacagtgatactaatcccatagcagcaatgctgtttgcaatagcattaatatctctggttccagtgtaaagaccacgacttccagccacaaggatattgttttgattttcgtctggattagttaaaattgcaggcagagtgtccctcatcatctgttggttaccctggcttgaaccactaagtagcaatcttagagtctctcttgcacccttcaccacagcatcagattcaggaatcaatggcttcacaaggtttggatgcaatgg

SEQ ID NO: 12935 - DNA, 571 bp, Glycine max
  Clone ID: jC-gmle01810065b12d1
gtctcgtcgtataattataaacgccaattgaaaaagaaaagtcttgtaaaatggaacgccaaaataaaataaaataaaaatatcaggaatcttataatcaaccaactattacaaacttcagcataacatattctaaaacaaaaagggccacaagcttcccctaaaactcaggtatagataaccagcacgacggttacccaaccatcataactgagacatgctaaacgtacttgagttgcaaatcataaacaaccaaaatgattggaagaacctgaatgttgcaagtggcggcaactacttttttcctattactacgtaattaagaaccatacaattccatatgatcacaaaccatgtgagccgttccttgtatcttgcagcccccagaatttgaaatccagattgttattcaatgtagtacttatttttgaaaggtgcaagtagcttgccagaatgctgatgaatctcacatccaagttcaacctccatcaaacgatggttttcctttgagcgactcattagaaaagaaacccttaaatcatcaccttcactcagatgcatgggaggatgc

SEQ ID NO: 12936 - DNA, 517 bp, Glycine max
  unsure at all n locations
  Clone ID: jC-gmle01810065c01a1
aaagccttagccttccctacaactccaaacacaaagacatcatcatccatggctgcctccgtctccactgtcggagctgtcaacagagctcttttgaacctgaatggttctggagctggagcttcagctcccagttcagccttctttgggaccagcttgaagaaggttattgcctcaagggtccccaacagcaaggtttccggtggaagcttcaagattgttgctgtagaagagaagaaagagattgaagagacccagcagaccgacaaggacagatggaagggtcttgcctatgatatctcagacgaccaacaagacatcacaagaggaaagggtttggttgactcccttttccaagctccacaggatgctggaactcactatgcagtcatgagctcctacgagtacctcagcactggacttcgccagtacttggaccacanaatggatggattctacattgctccagcttttatgggacagctnngtgttcacatcttcaagaacttcatgaccc

SEQ ID NO: 12937 - DNA, 488 bp, Glycine max
  Clone ID: jC-gmle01810065c03a1
ggaaacaggcatagcatgctacactcgcgggcctttcttgcctagtgtttcttccaagcactctccaccttccatttctccatcttttggcttgaggagtctgaaatcaagctctttatttggagaatcgctaagagtggcctccaaatcaacaataaaggtttcaaagacaaagaatacttcactcgtgaccagatgtgaaattggtgacagtctcgaagaattcctcacaaaagcaacaccagataaggggttgatcaggttgttggtgtccatgggagaagcattgcgaacaatttgcttcaaagtgaagacggcttcatgtggttgaacacaatgtgttaatacttttgtggatgagcagctcgcagtggatatgctagctcatcagcttctttatgaggccttagattactgtcattgctgcaagtatgcttgctctgaagaaagtctgagctctggacattggaggtccagttgaaggtgat

SEQ ID NO: 12938 - DNA, 560 bp, Glycine max
  Clone ID: jC-gmle01810065c04a1
agcttctataaaggaagtttattaagtttcccatcattggaggaattgtcagtaatcgattgcgagtggatggaaacattatgtccaggtaccctaaaagcagacaagttggttcaaattcaaaaggagtcatcagatgctatcaaattggaaaatgacctgaactctaccatgcgggaggcattttggaaaaagttattgaactctgaagattggagattcaatattaacctcaaagatagcccagtacaagagatatggcttaggcttcactcactgcatatccccccacacttctgcttccctaagttacagaccttgattgtggacggctgccattttttatcagatgcggtcttacccttctctctacttcctttattacctaaattggaaacattgaaagttcgaaactgtgattttgtgaaaatcatatttgatgtgacaactatggaaacactcccttttgccctgaagacattgattttagagcggctttcaaatctggagactgtttggaattcacatgttgagcttacgttcccccaagtcaagtcatt

SEQ ID NO: 12939 - DNA, 524 bp, Glycine max
  unsure at all n locations
  Clone ID: jC-gmle01810065c04d1
agctaggaaccaaagtaatattaatttgctttttagagcaaaaattatattaacaggtaaattatttaataatctggagtaaataaacacttaagtgtgtactagtgtcgaattcacgtttgaaaatgaaatgtcaaatcctgaaagcggcattgacgtagactcatgaaaaaggtcttaatttgttcatctcctctaaccattttttcttggtgaatcaatctcctctaagtgcaatattggagtcatatcccttgccagaaatgcctatcgattttgcatggcagagttcagatcagtttccaatgggatatctttccaatcaaatatgacttgtaacagcttgtctgttttgactgtacctgcacacatactttccatcctctcgcaatcccatactgtgaattcctccaaggacgggaaacttaaacntcctttgtagaaccttctcagctntcctaattttttaagtttcaaacaattgagctgctgaaatattatctcattctcatctgattcatccc

SEQ ID NO: 12940 - DNA, 530 bp, Glycine max
  unsure at all n locations
  Clone ID: jC-gmle01810065c05a1
tgcaagctttgaacagatgtcacaaaagttgattgtttcacctattgtgaagactctggtcttcagtaaagttcctgagaaggttagagagtgggttgatagcatttcgcgagattggaggttcaagagaataatccctgctcactttgctgctccaataagtgcaagtaggtctgatttcagggctgcatttgcatttttggatgagtttttgggggaaagtaatgctgcatggccttcactttcccttctcttctcatcaatcatgggaaaggcagccagctattttcctccggatgacatgaggaccctatcatcccttgaccagtttttggtgtctgttggtgctgtgaaaaaaactgtttcaggcaggaaaaggtgagatgagaggtgcatcacaacttggccttgccaatacttgataactnttcaaatgtaaaatcagtataattttgttacattaggagctcgattcttaaggaaaatgtaaatgttgcttgacattggactacatatacatgttgaggaaa

SEQ ID NO: 12941 - DNA, 509 bp, Glycine max
  Clone ID: jC-gmle01810065c05d1
cctcaacatgtatatgtagtccaatgtcaaacaacatttacattttccttaagaatcgagctcctaatgtaacaaaattatacttattttacatttgaaaagttaacaagtattggcaaggccaagttgtgatgcacctctcatctcaccttttcctgcctgaaacagtttttttcacagcaccaacagacaccaaaaactggtcaagggatgatagggtcctcatgtcatccggaggaaaatagctggctgcctttcccatgattgatgagaagagaagggaaagtgaaggccatgcagcattactttcccccaaaaactcatccaaaaatgcaaatgcagccctgaaatcagacctacttgcacttattggagcagcaaagtgagcagggattattctcttgaacctccaatctcgcgaaatgctatcaacccactctctaaccttccaggaactttacttgagaccagagtcttcacaataggtgaaacaatcaacttttgtgaca

SEQ ID NO: 12942 - DNA, 529 bp, Glycine max
  Clone ID: jC-gmle01810065c06a1
caatggagcagttgttgatatcactgcaaagtcttcggcatatttgccactgcaagaggcgtgcatccacagggttaagcatgttgaagaagcaggcttagttcctgggttcaaagaggagtttttgatcattggtgagaactcaatagatgatagcttggtcttgagtttaaggtctcttcagtttgaccttgcatgggaacgttgtagacagcttcaagctgaagatgtcacagtcaagggtaagattgtgggggtgaacaaaggtggagtggtggctgagttggaagggcttagagggtttgttccattgtctcaaatatcaacgaactcaaatgtagaggagcttcttgataaggagcttcctcttaagtttgtggaggtggatgaggaacaatctagacttgtactcagcaaccgcaaggccgtagctggcaaccatgcacagctaggaattggatcagtggtcactggctctgttcaaagcctgaagccatatggtgctttcattgacattggtagcattaat

SEQ ID NO: 12943 - DNA, 563 bp, Glycine max
  Clone ID: jC-gmle01810065c06d1
agtgataatatgaattagttctatttatttaactcacaataatacattggcatcaagacatcgttcggcaacaattgatagttagttacaaacaatattataaaaatgtaagcaaacagaaagaaaagagcacgcaattctgaatcatgattcttcagctggtggtacctcactcaaatccagtccctcttcaggcaagtctgaagtaaatggtcccaggatcccatcaccgctgatagtcaatccactctcaggctggaaccttagcatgtctgcacgagccatagcttctgcttgggctattctctgtctgaatgtctgagccatctcctccgccttctcaaagacaagctttggattgcgaatcatgtctccaggtgtgggctctaacttcttagtggaaagacttactcgacctctctctcggtcatggcttaagatcatcacctttaatatgtcaccaggttgaagcacagttgaaatatcagttacacggtcatgactgatctgactaacgtgaaggaggccattaattccaccaatgtcaatgaaagcaccatatg

SEQ ID NO: 12944 - DNA, 525 bp, Glycine max
  unsure at all n locations
  Clone ID: jC-gmle01810065c07d1
aaaggtataacaactacgtatactgcagttaagggaaagttgattagaagtcttgcctataacttcccttccaaactattaatgagatatattactaattcataattttaagacaaaaattacaaaactatcataaaaaaggaacaaaggggtgtgctagtagctacagcccacaaggttacaaagggccaaagtgaatattttacaggggatatccacattataaagatatgcaagctcctagagctccaacatgtttgaggaacaagtatttatggaaatcttcgactgcaacctaggaagtcgtaaagagtgagaagattgcattaatggagatcgctgcagcttttaagatatgcacgcacatggacatctagcacttggaatatacaaggattatggcatgttacggtaccaacagttgttaaaatcatgtggatagatactgtcagaagcatttccgatgaacaatggaaggtccggtttcatcatagtctgccttggttatatgctgattntgaggga

SEQ ID NO: 12945 - DNA, 536 bp, Glycine max
  unsure at all n locations
  Clone ID: jC-gmle01810065c08d1
aaaggtataacaactacgtatactgcagttaagggaaagttgattagaagtcttgcctataacttcccttccaaactattaatgagatatattactaattcataattttaagacaaaaattacaaaactatcataaaaaaggaacaaaggggtgtgctagtagctacagcccacaaggttacaaagggccaaagtgaatattttacaggggatatccacattataaagatatgcaagctcctagagctccaacatgtttgaggaacaagtatttatggaaatcttcgactgcaacctaggaagtcgtaaagagtgagaagattgcattaatggagatcgctgcagcttttaagatatgcacgcacatggacatctagcacttggaatatacaaggattatggcatgttacggtaccaacagttgttaaaatcatgtggatagatactgtcagaagcatttccgatgaacaatggaaggtccggtttcatcatagtctgccttggttatantgctgatttgagggaaaaccactttg

SEQ ID NO: 12946 - DNA, 409 bp, Glycine max
  Clone ID: jC-gmle01810065c09d1
acccggaaaagggggggttttttaacctaaagttccaaaaaaaccgggaggaaaaaaaaaaccagggggtttgaaaaccacccttggaaaatgggccccgggaaaacccaagcaggacccccattcccatattttttccggaaaaaaaaaggctaaaaaccatggggaacaaattttccccaaggggtagggaaaaagttccccgccttaaaaaacgggggggggcgaaacctgggtttttttttaaaaaaaagagaaaagggggggtttactttggtttatccccaagcggggacagggaaaaaaaaaatgggttttgaaaaaattttgcccctgccaaaccctctaataaattgcccaaaagcgggggggaagtttgacatttcccaaaacaaaaaaagggggggtt

SEQ ID NO: 12947 - DNA, 309 bp, Glycine max
  Clone ID: jC-gmle01810065c10d1
aatcgggggggacatactttttcttgtgtctttcggccaaaaagcgaagaggtttctttttattctggacaaaacctggcaagaataaagaatcctggggtctcttttacatccttgttggcaattcccaacctaataaacaaagaagattccccagtttaatatcctttggggcaaaagaacattagcaagcccgggcgacctatactacccgcaccgggtgggaataactcaacatcttgcccttaaaaatctatagggctgacttagaaccttttaagaaaaaattcttctggggctctccatttt

SEQ ID NO: 12948 - DNA, 446 bp, Glycine max
  Clone ID: jC-gmle01810065c11d1
aacggggagaacccatttttatttttattttggaaacggggaggtcaacacgaagtatatacaaattaacatcaaatgtacctttaccctcaccctctcctttctggcaaaaaagaaaaaaaaagaaagaaataaagaatagaaggctttccaccactattaagtcgctcccttcctggtactcaaataacacgtccatgactggaactttctaagacctggattggcaccctcaagtagcttaaatctgtcaagctgatgccaaaaaaactgagttaatacctcagtcacttcaggtcttttttatccagagtaccatagccaaaaaactcttcaatcaaattggaggtaggtgaagaagtctaaatctgtacttggcgttggacatgttgagtacccaggataccaatctttagaaacacagggctccatcaaataaacatgat

SEQ ID NO: 12949 - DNA, 384 bp, Glycine max
  Clone ID: jC-gmle01810065c12d1
atcggggtgaactttttttttttttttggtgggccaaaggagaggtccatatttttataattaaaagtagcataatacgggcctgcacctgaaaaacattttttggggcctaaatctccctgggcgagcgaaaaaaaaacccgctgggtcccccgggcgagagggattttccccagaaggcctgaaattaaccaagaatggctgggacattgccaaaaactgcatggcagccccagccacctgaaaagaccctaggacctgccctagaccctgccttaggaagattaatccccttggataacaacatggggagctcaaaaaacacgggtttccagaaaatccctggcggtctgataaaaggggaactttgggagaggaaaatta

SEQ ID NO: 12950 - DNA, 536 bp, Glycine max
  Clone ID: jC-gmle01810065d01a1
gaacagtgctcgctttaaaggaataactgttaaagcaatggtgatcataaatcctggaaaccctactggtcaatgccttagtgaagctaatctaagagaggttttgcaattctgctatcaagaaaatttagccttgcttggagatgatgtttaccagacgactatatatcaggatgaacgacccttcatcagttctagaaaggatttgatggaattggggccacctataagcaaggaagttcagcttatttcttttcactctgtgtcaaaaggttattatggtgaatgtggacagcgaggtggatattttgaaatgaccaacattcctccagagacagtcgatgagatctacaaggttgcatcaatatcacttagtccaaatgttccagcacaaatatttatgggagttatgctcaatccacctcaacctggagatatttcttatgacaaatttgttagggagagcaccggaatacttgaatcactgagaagaagagcatggataatgactgatggattcaacagttgcagaaatg

SEQ ID NO: 12951 - DNA, 505 bp, Glycine max
  Clone ID: jC-gmle01810065d02a1
caatttcagaaccaacaatcagaaattggtagagaatctcttggttgagaaaggaagactcagagattctctaccaatttcagaaccaacaatcagaaattgatcgagtccttgctcatcatactgagaaagtgagaatggagttggaggaacaaagaatgaggcaatcaaggatgttggtgagcgcaatccaagaggcaatggtgaataagctgaaggaaaaagacgaagagattcagcgtatggagaagctgaattgggcccttcaagaaagagtcaaaagcatgtgcatggagaaccaaatttggagggaattggcacaaacgaacgaagccacagccaactacctaagaagcaatttggaacaagtcttggcacatgtcggcgaggaacgcgccaccgcggccgaggtggccgatgatgctcaatctagctgtggcagcaatgatgcggcagatgccggagatgacacggcggcatccgcggcggcgaccggtcgtggtag

SEQ ID NO: 12952 - DNA, 334 bp, Glycine max
  Clone ID: jC-gmle01810065d03a1
agctactatcatggaaggctattctgtttgccattattggactaatggtcagtaatcgctcgctagaggatggatacattctgctcagggaccctagaggctgacatgttgctttatattcggagagtgtcttcaaatgctctcaaattggacaatgaccgtggctctgccatgcaatacgcattttgtgaccagatatggaactgtggacagtgtcgatgaattattaacctgagcgatagcccattacgagatatatgggttacgcgttactctctgcatatccttgcacacttctgctttcataaggtacacagcttgattggggacagct

SEQ ID NO: 12953 - DNA, 585 bp, Glycine max
  unsure at all n locations
  Clone ID: jC-gmle01810065d04a1
aacagcttggtccaattcgttagctcaaatcacgtgaaccaagagaacaaaacagcagaagggagtgaaaatgcaacagatgtgaaaagcttgatttggcaatgatgaccaacaccaaagaagaaacaaggatcaaactgcatatatccatctgactttctaccgtttactagaagaccacttcttttagtcattgataacgacaacagcaaagcttttaaggacatagcagaagcggaaaagggagaatcagttgctatgctcctttctccaagctgttcgcctgctttgtctgattgctcacataattcaaatgggagcctattcaccatgtttcttacagctccgctgcaagctttctgtatgctgttaggactttcaggcactgatattgatttggacccattcaacatagcggaaatgctgctctcatcttcattaaataactggggactagcattgggcacatcagacacacttaatcctgtttggggacagattttcgtgatcccttatanggaggcttttttgagatcatatttcgcagctgcgttacctattgcaccatttacatgcaacaaattc

SEQ ID NO: 12954 - DNA, 491 bp, Glycine max
  Clone ID: jC-gmle01810065d04d1
aatgtccaaagttcttgagcagaaccacaaataaaaatatttaaaatacaaatgtgattttagtttccaaggtaattaataaataaacaaaaagattgatcaagatgcagagaaaatgccatgattgcattcattacaaaacattaacgaagcatttaagtgaagaaacattaaagcatgacgacaatggtcgtagcgaaagaaaaaaaataaggtttctatgcaaaacttccttccccttgctctattccattcttctcgaccatgaaacttgttatgtaacgaacatattgaaattcaatccacgttagaagttctcttgtcaaaggcacaaaacctaagatccaaaaaaaaagttcgataacaaaaaaccatgttcacactaaaggctgaacttaaattctaggaaatccaccaggaacaaacagaaatgttgatagaattcatgttttcttgctatacaaacaagctgtatacattatcattctact

SEQ ID NO: 12955 - DNA, 399 bp, Glycine max
  Clone ID: jC-gmle01810065d05a1
caatggagcagttgttgatatcactgcaaagtcttcggcatatttgccactgcaagaggcgtgcattcacagggttaagcatgttgaagaagcaggcttagttcctgggttcaaagaggagtttttgatcattggtgataactcaatagatgatagcttggtcttgagtttaaggtctcttcagtttgaccttgcatgggaacgttgtagacagcttcaagctgaagatgtcacagtcaagggtaagattgtgggggtgaacaaaggtggagtggtggctgagttggaagggcttatagggtttgttccattgtctcaaatatcaacgaactcaaaggtagaagagcttcttgataaggatcttgctgtaagtatgtggaggtggatgaggaacaatct

SEQ ID NO: 12956 - DNA, 518 bp, Glycine max
  Clone ID: jC-gmle01810065d05d1
agtgataatatgaattagttctatttatttaactcacaataatacattggcatcaagacatcgttcggcaacaattgatagttagttacaaacaatattataaaaatgtaagcaaacagaaagaaaagagcacgcaattctgaatcatgattcttcagctggtggtacctcactcaaatccagtccctcttcaggcaagtctgaagtaaatggtcccaggatcccatcaccgctgatagtcaatccactctcaggctggaaccttagcatgtctgcacgagccataacttctgcttgggctattctctgtctgaatgtctgagccatctcctccgccttctcaaagacaagctttggattgcgaatcatgtcttcaggtgtgggctctaacttcttagtggaaagacttactcgacctctctctcgggcatggattaagatcatcacctttaatatgtcaccaggttgaagcacaggtgaaatatcagttacacggacatgactgatctgactaacgt

SEQ ID NO: 12957 - DNA, 530 bp, Glycine max
  unsure at all n locations
  Clone ID: jC-gmle01810065d06a1
attcggctcgagcggctcgagaaagaatattcatgccctggaccctcaatctattcctacaactgcagcgatgcatagtgccaaaatagtggtagataggttgattgagaggcagaaagctgagaatgggggaaaatatcctgagacaattgcacttgtattgtggggaactgataatattaaaacatatggtgaatccctggctcaagtattgtggatgattggtgtggaaccagtggctgatacctttggcagggtaaaccgggtggaacctgtaagtcttgaagagcttggaaggcctaagattgatgttggtgctaattgctcaggagtgtttacagaccttttcatcgatcagatgaatcttctggatagagcagtgaagatggttgctgaattagatgaaccagcagagcaaaactatgtaaaacagcatgcatgataacaagctcaagcccttggagtngaagttcgagaggcagtcacaaggatcttcttcaatgcttttggctctacttctcaacataaac

SEQ ID NO: 12958 - DNA, 523 bp, Glycine max
  Clone ID: jC-gmle01810065d06d1
aattatgaacttgaacctttatttgttcaccggggttggagttcagaactgcacaaaggagacttgatctcaaaaaatgagaaaaggaaaacaaaaatcacatttaaaggatgctcttctcttcactgttgtgtgctcttttcaataatagctattaacttcagcgatcaatgccttcaattttgtcttccacttctgaatacaactgcctgagcttctcaatattatcttctgaagtttcccaataaccacgtccattggcttccaagaatgtctgcaccagtttcctgaaggagtttggattagtgctcatgagcttgttcagcatttgctcatcttgaatgaaagctgtgttggcttcttcatacacccagttatcaacttggcctgaagttgcactccaccccactgtattggtgagtctcttctcgatctcgcgtacaccctcatattcagtagacaacatgccttcataccactttggattcaacagcttggatcttgcgtcaagtctaaccgtctc

SEQ ID NO: 12959 - DNA, 561 bp, Glycine max
  Clone ID: jC-gmle01810065d07d1
caaaattatagaggaagacggtccaatatgaaaaatatagtaagatcatctcaaacttagcatcttctctttgcacctaagacattgagaatgctaagaatgttacacgcaagttccatcacaacttctagcacttggattagtacaacaaccttcacgaacagaaatatttacttgccaagtttgctttgcctccaattcaagactggaagaaagttcccctctgaatagcatcctcgttagcatttccaagagcagcctcgttcaagtacttgtcagccaattggactctcttgacattctcttgttcttggacaagcatgttaccatacagcaagagcttctccagagtcatcttgggctgctcaaaggttggaggtccatcttttgagttcacaagcttcttcccaacactgtcaacaccaacaccagaaatccacttcctcacttcatcatcatatactctggccctcagtgcaccaaagaaatcaatggattggccagggaaggtgtcaagcttgacaatgtcctgttcaggaataccatcagtgcgggaaaatc

SEQ ID NO: 12960 - DNA, 527 bp, Glycine max
  Clone ID: jC-gmle01810065d08d1
cttaagcatgtattttgaaatactcgatatagatgctcatagttatttgcacaaaactggtaaaattccagatcaataaggattgcggcgaagccgcaaagatacaacattcattagggaaaacaggagtggggaaaaataaggggggaggggttgaggaagaatcaattgctcacagagcatgctaagacacctaaatattccacacacagttattgaaacaacccaatatagagaaaatttttctttggtgtattataatataaagcagaaccaaatgacttggaagattctactttcttataccattcacttggcaagttcgttgcggatgagttttgctgcggcaaccatgtttgtgagggctggcttcacctcagtgtacttacgggtcttgagcccacagtcagggttcacccacaagatgttcttctcgagcactgccaacaatctgttgattctgtcagcaatttcttcagttggtggtattcttggggagtggatgtcatagacaccagggccaattc

SEQ ID NO: 12961 - DNA, 580 bp, Glycine max
  Clone ID: jC-gmle01810065d09d1
aagaatataataagtctacaatatcatttatcttttttccaaatacctgttaacaagtctgtagatcaatatatatataaatatctttccatgttgctttcttatgcctaaatcatggcattgataactagcaaactactaatatttatgttgcttagtatctaattaatgtatatgtttatcaaggtatatcactatatattgcaaacaaatgtttatgaatgtcgaccaccatagcgtctttgtctttgttgaaatgaacttaatgcatctacaaactcatccttcccaaaatctggccagagttcccgattaaaataaagttctgtgtaggctaattgccacaacaagaagttactcactctaagctcgccactagttcgtattagtagatcaggataaggaaactcagtacaattagtttccaattcttgttcaataatgttttcgtttatgtcatccaagtgaatgtgaccatctttgactttcttggctacactggtacatgcttgcacaacatcatattttccactgtatcccactgccacaataagttggaatctcgaattttgtttggatc

SEQ ID NO: 12962 - DNA, 518 bp, Glycine max
  unsure at all n locations
  Clone ID: jC-gmle01810065d10d1
atcattaaattgtcgcattaatttatcacacttttttttgtacattcaagaattaaatttaaaattttcatcttttaaggactaatttgtcaacccatcacactttcaaagacgaatttggctatttacgcctaaagctatgaactaagaaagctatgtgatctgctcttccttcaatcttaaacttgccacaggtcgctgctcattgccagtaacacccctgctgctggaactatgtttcacgtcgggtatggcaaacttttgtgcttttagctgggatgcactattgttggcaagggtgtggctattagtcttagctgcaggcacatcatgattgtgttttccttcagatgttgctatgacagctttaggatccattgaagccctctcaacatgcttccgaactttgcaaccttgngtcgtgcatatgtaatagctccttggatatgggttgcctttgacaactttgtgaccatatttgcgccatcgatatccatcatctaagagattcacttcac

SEQ ID NO: 12963 - DNA, 526 bp, Glycine max
  Clone ID: jC-gmle01810065d11d1
aaaaacaaaaataatatttaatcattattgattcaatcactgttattcaaccaatacctccattgactcaactaccaatccggttttaaaaacattggtttaatgagatactggatatatatggtacaatcgattatttgttgtatacaaagactgaggcaggacggtacagtgaggctgccaaaattatcacagtttaccctgctcttgcagttgttcctctgtcacaaagaaggcatggaaaccatatggaactctatgcggcaattcgacaactgcaacaggatctgctgacattgtttttgcattgatgacatgcacaaatgattttccggtattttcatcgtgtacaaaacaaatcaagtatccatcatcttcttcagaatcggtaccagggacacgagggacataaacagcttccgagccatacttccctggtcccaagtcatagagaccctgaacatttcctcctacttcaagttttgtttttccattatccggttcagcatgcaaatcaaatttaata

SEQ ID NO: 12964 - DNA, 561 bp, Glycine max
  Clone ID: jC-gmle01810065d12d1
ggagatgcgtccatcccattgaatatcaacaaattgaaagataaagctatcaacagaacacctgcactcataatcaagcctttgcaccaaccacttcacctctcgcaccttctccatgccaagtcccgcaggtcgaccggcctccacttggtaatcgcaagcgaacttgtccgattgcgtgcgcttcacatggtactcagcgtctatttgttgcacttctgccactggacgtacacgacttgggtgaacttgagatcggtcgagtcggtggtgagcagaccggtagcagagctgttggagctggtcaggcggacctgggagttgatgttgagcatgccggcggcaccgcagggcgaccagacaatcgaggtagagtcggcctcgtcgtgcttgaggtagtcaccggtgactgggccaacgaagctgtactcggtggaagtctgagcagtctgaccagagaagtagtaggtggacttaagggttccggtaacacccttctggatggaagagtagccgcggtagtcggcagacaggatcgagtactggaagcctcggggtact

SEQ ID NO: 12965 - DNA, 586 bp, Glycine max
  unsure at all n locations
  Clone ID: jC-gmle01810065e01a1
gcaagtagtacttgtgctcttctatcccttctcattctttcactctttgtggctgaaatctatggaaatagacaagttcaagctcttaacaaactgcacaagtccaccaagttcagaggaaattcacaaattgataggagtgagtttgaggtagaggagcttgtttatgatgacattgctcactctcaagagggtctcaaagagaaagatagaattgagagtcttccaggacaaccccctgtgagtttttctcagtatggagggtatgtcactgtggataaagtggctggtcgtgccttctattattactttgttgaagctcaacgttcaaaacaaacacttccacttcttctttggctcaatggaggtcctggatgttcatctcttggctatggagcaatgcaagaacttggaccttttcgagtaaacagtgatggcaaaacactacacagaaatatattttcttggaacaaagttgcaaatgttttattcttggagtcacctgctggagtaggattttcctattcaaacaaatcaaaagattatganntacatggagataagaaacagccgcagacattattta

SEQ ID NO: 12966 - DNA, 543 bp, Glycine max
  unsure at all n locations
  Clone ID: jC-gmle01810065e02a1
gccattcgtgcagcaccggatcctctcatttctccggcgataactctcccttttccggcgaattcaccgcttcctcgatatgaatcccgagtatgactatctgttcaagctccttctgattggagactctggtgttggtaaatcatgccttcttctaagatttgctgatgattcatacattgagagctacataagcaccatcggagttgattttaaaattcgcactgttgagcaggatgggaagacaattaaactacagatttgggatactgctggacaagaacgatttatgacaataactagtagctactatcgtggagcacatggaatcattattgtttatgacgtgacagatgaagatagcttcaataatgtgaagcaatggctcagtgaaattgaccgctatgccagtgataatgttaacaaacttttggttggaaacaagagtgatctgacagcaaatagagttgtctcatatgacacagctaaggaattcgcagatcnaaatggcatacctttcatggaaacaagtgcanaagatgc

SEQ ID NO: 12967 - DNA, 459 bp, Glycine max
  unsure at all n locations
  Clone ID: jC-gmle01810065e03a1
gttatcaggaaatgttcaacaatttgggtgaactgttgtgcaccatcactgggttcgactccttctctttgcaaccaaatgctggtgctgctggagaatatgctggacttatggctattcgtgcatatcatttggcaaggggagaccaccaccgcaatgtttgcattatacctgtctcagcacacggaacaaatcctgctagtgcagctatgtgtggaatgaaaattgtctctagtggaactgatgccaagggaaacattaatatataagagctgcggaaggctgctgaaacacacaaggataacttatctgcacttatggtaacatatccttcaacccaccgtgtttatgaggaaggtattgacgaaatttgcgatattatccatgataatggaggccaagtatatatggatggtgccaacatgaatgctcangtgggactcacacgcccggcttgga

SEQ ID NO: 12968 - DNA, 512 bp, Glycine max
  Clone ID: jC-gmle01810065e04a1
aaaactttcgaaagattttatccaattgaaattttaaaaatgactgggataaacttaagaattcaattattgaaattgaataagtaaacaatttaattggattggtcgaatggtatcaaaaaaatggagtactaactcccatttcttatttattattgaattaaccgatcaacttgctttgttatcgaacatttctttttgatttcaaaaattttccgaaaaaaatttgaatctatttttatatgcgaatcaatcctactacttctggtcctgaggtttctgcgcttgaaaaaaaaaatctgggacgtatcgcccaaataattggtccggtactagatgtagcttttcccccaggtaagatgcctaatatttacaacgctctgatagttaagggtcgagatactgttggtcaacatattaatgtgacttgtgaagtacagcaattattatggaaataatcgaattagagctgtagctatgagtgcgacagattgtctaatgagaggaatgga

SEQ ID NO: 12969 - DNA, 508 bp, Glycine max
  Clone ID: jC-gmle01810065e04d1
agttattccgatattcggacgcatcaacttgttatgaaatcacattgatagcctctactcgtgtcctagctcgtctaagagctagatttgcctcaattgtttgtctcttgccttccgccttattcaaattagcttctgctatttcaagagtttgctgtgcttcttgtggatcaatgtcactacccttttccgcatcatttactaaaacagtgatctcattattgtttattctagcaaaaccgcccatcagagccatcgttaaccattggtctttaagaagacgtattctcaaaatacctatatctacggctgtggcaataggcgcatgatttggtaatactccaatttgtccgctattagtagataaaatgatttccttcacttccgaatcccaaacaattcgattgggggtcagtacacaaagatttaaagtcatttcttcaaattgctctccatttctaagttcgtagctttcgcagtagcttcatcgatattacctaccaaataa

SEQ ID NO: 12970 - DNA, 436 bp, Glycine max
  Clone ID: jC-gmle01810065e05a1
aaattttccagtggattcttggttaccaatttttgtgaattgtctttatcctgtaagtcaattaccttcagaagctgtcgttgtaaatgttacatgtggtagtggacgtggtggtttacccaccactgcttggattagttctgcagttaacaatcgctcctcagatatcaacaaaaggattcgcacagcacttgggagaggtaagaaaattgtttttcttactagagttgatccttttccagtagctttactggctgttctttttggcgttaagaatgaaattctgagttctaacgccactaaccctatgctgacgcgacttcttgagaactgtaagagtctcaaatatctggttgatgagtgtccttgtgcatttgtgaactagtattgaatatatcattcactgaaatagagcgcattactatgtgcaatgagt

SEQ ID NO: 12971 - DNA, 442 bp, Glycine max
  Clone ID: jC-gmle01810065e05d1
aaacacactcattgcacatagtaatgcgctttatttaagtgaataaaatattacatactagttcacaaatgcaaaaggacactcatcaaccagatatttgagactcttacagttctcaagaagtcgcgtcagcatagggttagtggcgttagaactcagaatttcattcttaacgccaaaaagaacagccagtaaagctactggaaaaggatcaactctagtaagaaaaacaattttcttacctctcccaagtgctgtgcgaatccttttgttgatatctgaggagcgattgttaactgcagaactaatccaagcagtggtgggtaaaccaccacgtccactaccacatgtaacatttacaacgacagcttctgaaggtaattgacttacaggataaagacaattcacaaaaattggtaaccaagaatccactggaaaattt

SEQ ID NO: 12972 - DNA, 471 bp, Glycine max
  Clone ID: jC-gmle01810065e06a1
cagcttttatggacaaacttgttgatcacattaccaagaacttcatgaccctgcccaacatcaaggttcctctcattcttggtatctggggacgcaagggacaaggaaaatctttccaatgtgagcttgtctttgccaagatgggaatcaaccccatcatgatgagtgctggagagttggaaagtggaaatgcaggagagccagcaaaactgatcaggcagagataccgtgaagccgcagacttgatcaagaagggaaagatgtgtgctctcttcatcaacgatcttgatgcaagagctggtcgtcttggtggaaccacccaatacactgtcaacaaccagatggtgaatgccaccctcatgaacattgctgataaccccaccaatgtgcagcttcctggtatgtataacaaggaagagaatccccgtgtgcccatcatcgtcaccggtaacgatttctccacactctatg

SEQ ID NO: 12973 - DNA, 542 bp, Glycine max
  Clone ID: jC-gmle01810065e06d1
aggacaaaaggaaaaggcaccaaattcaatttaagtggacactttaactcaaaattatagaggaagacagtccaatatgaaaaatataggaaaatcatctcaaacttggcatcttctctttgcacctaagacattgagaattctaagaatgttacacgcaagtcccatcacaacttctagcacttggatcagcacaaccttcaggaacagaaatatttacttgccaagtttgctttgcctccaattcaagattggaagaaagttcccctgttaatagcatcctcgttagcatttccaagtgcagcctcgttcaagtacttgtcagccaattggactctcttgacattctcttgttcttggacaagcatgttaccatacgtcaagagcttctccagagtcatcttgggctgctcaaaggttggaggtccatcttttgagttcacatgcttcttcccatggcgtcaacaccaacaccagaaatccactctctcacttcgtcatcatatactctggccctcagtgcaccaaagaaatcaatggat

SEQ ID NO: 12974 - DNA, 508 bp, Glycine max
  unsure at all n locations
  Clone ID: jC-gmle01810065e07d1
atcaccgccaaaccaaccccaactagtcttccttgggccgccttctgaaccgtccttcttgtctttggacttcccgtcggacttcttgtcttctggcgcatttggaataatggacaacgagtccactctgttgttctggccaggcatcgcggaaggctgggctactaaatcatcaaaagattgcgcgggcttgatcggggagttctgggcggcttgtgcatggcgatttgggcgacctgcttgaggctgaggctggcgctgttgttgcggaggctgctgctgaggctggggataatgacggggaccagcaggctgttgctgggattgaggcgcgtggttggcgggaagagtgacgttccggtagcgtaaactgaggtgtcctgttctgctcctgtggcggnggtgtctcgatgatttggggtacttgctgtggtggaggggtatagccgggcaaaggtgctgtcgttcgaccgttcgaggcgattctcgaatggaactgccgaggctg

SEQ ID NO: 12975 - DNA, 443 bp, Glycine max
  Clone ID: jC-gmle01810065e08d1
ccaatgtcgtgattttatacttgcaacagaaattaaatatttcctgacttacaaactcaagttcaatggtttcttgaatcatttaccctacaaaatatatgccatttttcggtttattagtcacctctcagctcaatcagatccctaactgcttgggccagcttcatcataattcttacagcaaaacccactatcgtgagggtgttcatcagagtgatgttcatcttcatcactatcatcttcatcaaagggcttttgtttatggaagatacagcacttcttggaactctttttctgcatgaactcgttgtctacagtgccctctttccaagaaaccttcttcttcttgcgattgagtgggaggaagaggacttctggttgctgttgttcctgctgggatgaagaggatgatggctcaaagctcaaaattgtatggtggtggt

SEQ ID NO: 12976 - DNA, 535 bp, Glycine max
  Clone ID: jC-gmle01810065e09d1
aaacatctaaactgttctgtacttgcatgatgaggaagaactacaaaccagagaaacattagcataaatgcataatattcaaattctgaaaaccctaaatacaacagatgaatgaaaaacatacatctgtcacaaaagcttttaaagcaacacttgcttgtcagtacagcatctttcataacatcattacataagggacagcggagctcgggtggtagttccccaacagaacgtgttgatggcatcccttctatttctttctcaaaagcagcctcatttggcttcaagacagctactgaaccattaggtaaagcataggaaccttgtggatttaccatcagcatggatcttggaataccagtaggttgcttgacttttctcatgtcataattcgggtcaccatttgtaggacagtgctgaataaaatgtccaggcaccttgcatctgtggcatacatagccttgtggaggtgtttttcgctccatccctgccagacctcagcatcagttgtgatcaacatattagtattaaaaac

SEQ ID NO: 12977 - DNA, 498 bp, Glycine max
  Clone ID: jC-gmle01810065e10d1
aattccatcatgtgtttgttttagaacgataatgtacttgcatgaaaagcgaatgatgatgcaggggtaatgatgaccatgatggaaactcgactcaacaagcaaaccaacgacgaacaggtcgagtagttcgtacgatctggaaataaacgattcgatgctcgattggggtatgagcagaaggaacagggactgatttcacccgtccacacagcagccagccacagcggcagtagcggcggcgacaagtacaaaattcagaggttgagtcttctttccgtatggagagagattatctatcttgcttgagtcaagacgacagagcatggggaggatgaactgaactgttgatatcgatcgaattaagagagtaaggaagaaggcaaaggaccgtattaacaagtagcgagtagtaacgaggcgagcgcgataagtaggcgagcgatgacgttgcggatcttgttgtactccgttcactagagttccggatctttgtcg

SEQ ID NO: 12978 - DNA, 408 bp, Glycine max
  Clone ID: jC-gmle01810065e11d1
agaaaggtaaaagagagtgccaaaatgcccttaattaggcatgcttttgtgtcaaccgcagaccggtatgggtcactcataggaacaaaaccacctcacatgtggatttggggagaaaacttccgactacctagagggctgaatgctacagctctccctgggagagtttcaaattataaaaagacatctattggttcctagttatcaaccgcttctacgagagttggctcatagacgatgggagcctgaaagacatgaagatgcatcacagttgcaacaacgaaggcaagcccgccggctgcaacatcattccggaatcttacaccagggggccttccgggaccaccaatatcaattggcacaggctcaagagtgtgggaagttagattctggattcttccatccttg

SEQ ID NO: 12979 - DNA, 363 bp, Glycine max
  Clone ID: jC-gmle01810065e12d1
ggacccagattcctaaatacgaatgattctcgtctcttcaaaaagctttgggctgttaccaggttgcaaaggacaaaaaacacggttccccctggcatgcaatttcaggctggaaaaaaaccgggaacaaattctcgccctacaggcttaaacgtaaaagcaatttaagaagaattcccaccccacccttttccttgggggcccttgcaatccttggccccaaatcatcccccttttttcccaggggccccgggattgccaaccctttcatttttccttggggattgacaatacccccgctttttctttcgaaaaacatgtgaaggccgacctttcggccccatgggtggggctggcaaacaa

SEQ ID NO: 12980 - DNA, 247 bp, Glycine max
  Clone ID: jC-gmle01810065f01a1
cggacactgattttaaaaacattgaacgagagaggcatggctcgtcagaccttcatcatgatcaatccaaatggccttcaaagagggctgattgtcgaaattattaactaatgtgaaaggaagggtagttacttgactggttcgaaactcgttactgtggaccgtacttatgctgagaatacactatgctgatcagtttgcaaagccaagctttagctgtatggccgattacattgtccatggccct

SEQ ID NO: 12981 - DNA, 224 bp, Glycine max
  Clone ID: jC-gmle01810065f02a1
aaagaaacttcgaactgtggtaattcaggaccttcccttatttgacactgtgaaggggtagacttacaatgcacacgcaattgctgacgctgctctctaaaggggcatgcatctgctaagttgagactgaagcactatcactgcagcctttgatgaaacatccacattagaggacagcgatgatcgctacaaaggctctgctggaggaaagcccgacaccttca

SEQ ID NO: 12982 - DNA, 583 bp, Glycine max
  Clone ID: jC-gmle01810065f03a1
aaaactttcgaaagattttatccaattgaaattttaaaaatgactgggataaacttaagaattcaattattgaaattgaataagtaaacaatttaattggattggtcgaatggtatcaaaaaaatggagtactaactcccatttcttatttattattgaattaaccgatcaacttgctttgttatcgaacatttctttttgatttcaaaaattttccgaaaaaaatttgaatctatttttatatgcgaatcaatcctactacttctggtcctgaggtttctgcgcttgaaaaaaaaaatctgggacgtatcgcccaaataattggtccggtactagatgtagcttttcccccaggtaagatgcctaatatttacaacgctctgatagttaaggggtcgagatactgttggtcaacaaattaatgtgacttgtgaagtacagcaattattaggaaataatcgaattagagctgtagctatgagtgcgacagaaggtctaatgagaagaatggaagtgattgacacaggagctgccctaagtgttccagtaggtggagcaactctaggacgaattttcaacgtgc

SEQ ID NO: 12983 - DNA, 450 bp, Glycine max
  Clone ID: jC-gmle01810065f04a1
cattctcatcctcttctttctctctctaccattgccatggatccctacaagcaccggccatccagcgccttcaattctcccttctggactacaaattctggtgctcctatttggaacaacaactcctctttaaccgttggagctagaggtccaattctgctggaggattatcatcttgtggagaagcttgcaaattttgatagggaacgtatcccagaacgtgttgtccatgccaggggcgctagtgcaaagggtttctttgaggtcacccatgacatttctcacctgacatgtgcagatttccttcgagcccctggagttcagacgcctgtaattgttcgtttctcaactgtcattcatgagcgtggtagccctgaaaccttgagggaccctcgaggttttgccgtgaagttttacaccagagagggtaactttgaccttgttggaaac

SEQ ID NO: 12984 - DNA, 453 bp, Glycine max
  Clone ID: jC-gmle01810065f04d1
aaaaactaacaaatacaaacgggttttattgagataggtcaacgagttgcattcatggagttatgggtacacacaacataatattgcaagaaaaggattagttttttcaggtaatccaaaatcacatccttatcggactttttgcacgtttgcaactttaacaattattttggagttggcaacaacattaaatatttggcctcgtgctgagatgaaaagctattttttggcctaaaaaacgggcagcctgagaccagtttgatatccaaacactgcggatctcatgggtgacccgggggtcaaataaagcatcaacccatcggcgagcaaatttattttgcctgtcaggtgcccaaaaccggtatttcttttcgggctggttgaaggtgttctccttctcaattccacacttttcacgccttccactgcagatagcaggaggtatggggaacc

SEQ ID NO: 12985 - DNA, 291 bp, Glycine max
  Clone ID: jC-gmle01810065f05a1
acttacgctctttgattggaggatacatatctgcgcgcattggggaactctattttggtgaacaccttaagaatcagagtttgttataccactatcaggtttaggactattatctgaactggcatctgagtctactcagcgaccatttcgctacacgcagtcacctttaaaggtgctgaatttgacaaatctggcgagagattgcacagtggacgaacttactagacttgagactctatctggagacagttgtgaccacaatgtgcaatgtaagagtgagcctattaatct

SEQ ID NO: 12986 - DNA, 420 bp, Glycine max
  Clone ID: jC-gmle01810065f05d1
cattaacaacttttatttaatcgcctgcttagctcatgaaaaggcgtttttgttaaacaaataccaaaccacgtcctaattaacgaaagctagagggcgctgtttttcccaatgttagccaccctacctaaagttatggaccaattgcttacacacgatatcggagtctgatctcatataataattattaaccccgggagaatgagagtttcggaatcacatcaacggacgcccgtttcctcacataataggaagcatccctttaaatggtggtgctcacttctgcagatggcactgacctgggccaccacttggtgtatgacacatgaaatgcaagctgttgaatgcgactcggaaactgccttccgggggttgttcgccgagggaccatggcggatggcgtgttacgagggttatgca

SEQ ID NO: 12987 - DNA, 452 bp, Glycine max
  Clone ID: jC-gmle01810065f06a1
caaaatattgcagaatcaaaagtagctctagtatatggtcaaatgaatgaaccgcccggagctcgtatgagagttggtttaactgccctgactatggcggaatattttcgagatgtcaatgaacaagatgtacttctatttatcgacaatatctttcgcttcgtccaagcaggatctgaagtatctgccttattgggtcgaatgccttctgctgtgggttatcaacccactcttagtactgaaatgggttctttacaagaaagaatcacttctaccaaagaggggtccataacttctattcaagcagtttatgtacccgcagacgatttaaccgatcctgcgcctgctaccacatttgcacatttagatgctactactgtactatcaagaggaatagcggccaaaggtatctatgcagcagtagatcctttagattcatcctcactatgctc

SEQ ID NO: 12988 - DNA, 437 bp, Glycine max
  Clone ID: jC-gmle01810065f06d1
aggtattccgatattcggacccatcaacttgttatgaaatcacattgatagcctttactcgggtcctaactcgtctaaaagctagatttgcctcaattggttggctcttgccttccgccttattcaaattagcttctgctttttcaagagtttgctgggctttttggggatcaatggcactacccttttccgcattatttactaaaacaggggtctcattattggttattctagcaaaaccgcccattaaagccatcgttaaccattggtctttaagaagacgtattctcaaaatacctatttttaccggtggggcaataggcgcatgatttgggaatactccaatttgtccgctattagtagataaaaagatttccttcactttcgaatcccaaacaatttgattggggggcagtacacaaagatttaaaggcatt

SEQ ID NO: 12989 - DNA, 566 bp, Glycine max
  Clone ID: jC-gmle01810065f07d1
gatgtcaagctcgccaaaactgtagagccaaccaaggtttacagcgaagctgttctagcactgcactgctacttctacctgcttgactacaggagacgcgtgtagcggccacgaaggcgacgttcagcccacgaacgagcagccactacgttcaccaccacgatgctcacaccaacaaacgcgtagaaaaggccacgcgagaaagtcgaagtcgaatcattttgctgcacgtccgagagtgacgtggtcattagatccgccacgttgggtggtccagccagcacgaaggcgtaatccggctcgtccgatcgcgctgacttcgctgtctcaacggagtagtaaccgggtgtttggtcgggacaggaaacaactcgtagatcgccaccttgttcaccgctgccgcgtacacgatggcactggcctcgcgccagaaccaccagcccttaatcgtgatatccattggcggtgcgttcacgtagccgactttgccccacactgacgtcgacaccgtaggcttgtctgtcacctgtacaagcagctctcctttaccccaacattgacgctcg

SEQ ID NO: 12990 - DNA, 542 bp, Glycine max
  unsure at all n locations
  Clone ID: jC-gmle01810065f08d1
aattgggacatgaggttgctttaaaatatttctctattatgtggcacatctagagtagacttaaattttactagactgtataaggtacgtacaaactacgcataatataatactaggctactttcagcagcacatacaactagattgcatgtaggatgccatgctacatgtagcagcttggagcttaagttacaagaaaagtcagctctactagactctgaatcagtgtgagcatgctggtaaatttcacgaggtattaggttgcttagagaaggccttctaactcgagacttagcttggtgaataaccttcctgtgagaatttcctctaatttctagtttgatctcttccttcctttcagaacccggggagaatatccgcacgacattgctataagaaccagttgcaaaatggagtccatcaccactaaagcagcactcgaatttgtcaaatatgcagtcattattatataactctggcaacttaggacgcagatgctcgtgaattttgatattgcgactggagatgantccatacgcatg

SEQ ID NO: 12991 - DNA, 341 bp, Glycine max
  Clone ID: jC-gmle01810065f09d1
aaaaaaaaatttgagccccccctttttccttcctttatgaacccaactcaagttcagaagcaaccaaaagaaccatttgaggtgttcatggcaaggggaacacttttgggaggaaaaacccggggggggttaagccacaagggaagaggggtgcctgggttttttctatcaccagggggccccacaggaaggcattttttttatgggaccaaccctttcccgaagggttgggggtccgcttgcaccgttagcttggatattgctggagtctcaactgcactagagggggcagccaggcccaaatggccactccccatggaggaagaaaggcctggcccccg

SEQ ID NO: 12992 - DNA, 314 bp, Glycine max
  Clone ID: jC-gmle01810065f10d1
attacatcttgtgtttgttttaaaacgattatgcgcttgcatgaaaagcgaatggtgatgcacggttctggttgaccatgatgcaaacttaactcaccctgcataccaacaacaaactgctcgagttgttcgcacgagcggcacatttcggaggcaaagctcgatgggggtctgagctcaaggaacagggactgatttgaccctttctcacatgagcctgccacagtggttggcacgtttggtatacgtccaaacttcacaggatgggtcttcgttccgtatggagagagattatgtatttcgcttgagcccag

SEQ ID NO: 12993 - DNA, 373 bp, Glycine max
  Clone ID: jC-gmle01810065f11d1
cattgttgtttatgttttcctttttttttttatttttattattttttttgtttttttggtatttttgaggcgaacacagaaccttaaataacaaggacttgctgtcactctaaaaaggctcaggcatgaaacagcctcgcacaggccaagacaacggtggcgcttgaaaaccaatttccaggtggagaaaagccggatccaaatgctcaatccccgcggtatacctaaagcctcttttgacaaggatgcccccatgaacaactgcttcggtggctcctcggatccttgccccctaataatcctcctttttttcaggggggccggtggtattcaaaccgtctatttttgctgcgggggtgacgactaccccacc

SEQ ID NO: 12994 - DNA, 521 bp, Glycine max
  Clone ID: jC-gmle01810065f12d1
atatcaatcttaagacttccactaatcatacagagattattcaacttattacaattcacaaaagccataaaaatacatttggaatacgaagatcggagacttccaagttccaaccagtccgagacaccaataaacttttcatttcttaaatgagagaacaataatctagaatgaccaataacttcataactatactacctcacaagttcagtgagactgaaggaaaaataaaatctaaagctagcaaatggggtactgaaggatttaaatctaaaaagaaaaaaggaaacttcgacaaaggtatgaccaaattgaatattctcaacatgaagaatcattttgggacttagtagcagcttgtgcatgtcttgtctttgaatcatcaagataattctgataaatataagaggcaaaaccccatagagccaaaagcatagaaattatcttcaccccattcatcttatcatgaaaaactataacagcagcaataggagttacggctaaagaaactgtgcttataa

SEQ ID NO: 12995 - DNA, 563 bp, Glycine max
  Clone ID: jC-gmle01810065g01a1
ctttgattctctgttctctgttttgttctgtttcgcgtattgtcttcatacaggaacttgaacaatgaagaatgcaaagggcaagggagcagcaagggcctcaaaagaatcactgaagcccgttgatgaccgaaaggttggaaagcggaaggcttccggtaagcctgggagaagtagtgcaccaaagaaggagaagaaggccaagaaagaccccaacaagcctaaaagaccacccagtgctttctttgtgttccttgaggagttcaggaagacctttaaggctgagaatcctaatgtgaaggctgtatcagttgttgggaaagctggaggagagaaatggaaatccttgtccagtgctgagaaagctccatatgaagccaaggctgcgaaaaggaaagctgagtatgaaaaacttatcaaagcttatgataaaaagcaggcaagctccgcagatgatgaagaatcagacaagtccaaatctgaagtgaatgatgaagatgatgccagtggagaggaagaggaagaggatgatgacggaggagaggacgatgaagatgatgact

SEQ ID NO: 12996 - DNA, 304 bp, Glycine max
  Clone ID: jC-gmle01810065g02a1
taactgttatattaagcatagcatgcagcttaggtcatacatgaggttgtcatttgggaagccttttgtaaggaagctaattcacctattacagataatgtctaaaagatagcttccttcacattcagtagaaagcacactgatatataagcacgtttgttgtcctctttttggagaatttggctgaggcttctccctaggttagattttcatcttttcagaactgctatatctgaggggttcgaactgtacatttgaatgagttattagttcttatgtatcaatatcagattttgatgcttgt

SEQ ID NO: 12997 - DNA, 346 bp, Glycine max
  Clone ID: jC-gmle01810065g03a1
caagtttgtgctgcacaaaatagaaagcattgatgaggcgaacttgggatacagctacagcgtggttgggggtgctgcattgccagacacggcggagaagatcacattcgactccaaattggttgctgttcccaatggagggtctgctgggaagctcactgtcaaatacgaaacaaaaggagatgctgagcccaaccaagacgaactcaaaactggaaaagccaaggctgatgctctcttcaaggccattgaggcttaccttttggcccatcccgattacaactaatcctcttcaacttacttgtcatcacttttttgcttggagacttatccaatcactctgttc

SEQ ID NO: 12998 - DNA, 567 bp, Glycine max
  Clone ID: jC-gmle01810065g04a1
ctgagttggagtttactcaggaggaattggatgctgttcctaaaccagatgatacttctgattcttcaaaaacgattgatttcttggttagccatagccagcctcaacaagaactctgcgacaccatttgtaatttaaacgctatcagtacctctacaggacttgggggaatgcatttggtgttattcaaggttgaagggaaccaccggttaccaccaaccactctttcacctggagacatggtttgtgtgagaacatatgacagcatgggtgcaattacaacttcttgcatacaaggatttgtgaacagttttggggatgatggctatagtattacagttgctttagagtcacgccatggtgatcctacattctctaaactatttgggaagagtgtgcgcattgaccgtattcaaggactggctgatacacttacttatgagcgcaactgtgaagctttaatgctgcttcagaagaatggtttacgaaagaagaatccttcaatttctgttgatgctacactgtttggagatggggaagatgttgcatggcttgagaaaaatcatt

SEQ ID NO: 12999 - DNA, 554 bp, Glycine max
  Clone ID: jC-gmle01810065g04d1
aattgtgaaaccaaacatgcattaaatgtatcacgtcatataccaatcttggggtttcaatgaacttttctgtacgtacttgatacgctacacaattttgaatttatgaattgctatacaactatacaagtttaaagaaaaaacctatccatcccaagtccatatcctccaagtaatattggattaaataggaacttgtttcgtgctactgttgcacactaattaatggaaggtaatattggattcatcccaagtccatatcctccaaaactacctggttctgcatgcttcaccctaccaaagtgtctaatatgacgcagaagccttgctaagaaggtattgtggcatatagtcgagctgtcacagaccaaagctaaatgtttgcgtgctcttgtgatggcaacattgattcttctgctatccccaaggaatccaacagctcccaatgtgtttgatcgtaccatggataaaattactgcatcagcttcccgaccttgaaaactgtcaatggttgcaacctcagtacctgctgcttctggaaattcatcaagctt

SEQ ID NO: 13000 - DNA, 525 bp, Glycine max
  unsure at all n locations
  Clone ID: jC-gmle01810065g05a1
tcttcgcttgcagcttcctccaaacactgtcaccatgcgggttgttttggttcttcccatgtcaaatttggcaagagactttgaggcacaaggcttactgtgagaagcctttagagttttgcaacgaaagcctacgtatatgtagttatgtactgatcgaagccagttcagaatttaggaatatgttctagtccatttcatttattaagcagagttcatcatggtcctgtgagggaagcttagagttgtcattgcatggatcaaaacagcaatgtcctttcatcaatgacatgtgttataggcgattctgatggtggattttgttggggcttctttttcattaactgcagcttcaatataagcatgtgttgcatgtggattccgggaattttgatgtttgatggattatgtaatcttctgttcatgatctttcctctatgtggatataccgcatgtaaatagtataagntttgtcagcaatagaagatgttctttatcagatataaatataagattctaatattc

SEQ ID NO: 13001 - DNA, 470 bp, Glycine max
  Clone ID: jC-gmle01810065g05d1
ggggagggtttattttttctttttttttcctaatggaaacacgcaatcaaaacctccagcacaaacccgcgcggaaatacactaaaccttcttcttccgcgaagaaaaaaaaaactttttttgggggcaaaaaaacctgaattcccgggggggttcgcccccgccaaaaaaaaatcgggaaaaaaaaaatcccaaacccccccaaccaaaacttccgggccccccacaggaaaaccttttttttagcgggcgggggggatgaaaaaaaaacccccccaaagacccccccgcaaaaacccccataacccaaccttttgaaaaaaagaccctttttgttatgacccaaggaagaaccgtccttgccccccccaaaaaaacaaaaaaaacccctttttaaaaaaaggagggggaaaacccatagtctttaatgggcccgggggggcagaaccaaaaaaaaaaataaaaggggg

SEQ ID NO: 13002 - DNA, 322 bp, Glycine max
  Clone ID: jC-gmle01810065g06a1
tcttcgcttgcagcttcctccaaacactgtcaccatgcgggttgttttaggttcttcccatgtcaaatttggcaagagactttgaggcacaaggcttactgtgagaagcctttagagttttgcaacgaaagcctacgtatatgtcgttatgtactgatcgaagccagttcagaatttacgaatatgttctagtccatttcatttattaagcagagttcatcatggacctgtgagggaagcttacagttgtcattgcatggatcaaaacagcaatgcactttcatcaatgacatgttgtatagggcgattctgatggcggatt

SEQ ID NO: 13003 - DNA, 482 bp, Glycine max
  Clone ID: jC-gmle01810065g06d1
gggggtgggttgttttgttttttggttctccgatttaaattattttaacttttgctggttttaaaaaacccccggggaagacccaaacaccgccttttctgccgggaaaaaaaaaaaggttggggggggccccaaaaaaaccccaacccggggggggcccccccccccggaaaaaaaagggcccggaaaagccgaaccccccccacaaccaaaaaacccggggcccccccccccccccccgctttattggggggggggggggaaagaaaaaaacccccccaaaaacccccccccgaaccgggccaaaccccaaggtcacgggggaggggccccggggggtgccccccgcggcccccaaaccttgacccccccccagggggccagggaaaccccttctaaagaaggggggggggagcacgccattccacaaagggggggggggggggaagaaaaacaaacccacaaaaagggggggggggggg

SEQ ID NO: 13004 - DNA, 573 bp, Glycine max
  Clone ID: jC-gmle01810065g07d1
gtaaaaagcaagtaacattaagttggattcggatacacaagataatgcacattatctgaagtacttcaccaaacacaaatctaaaaactctcaaaagtcatttcgttctttgacgctcactttccggggacgaagttggtggcataggcccaggcgttgttgttgacagggtcagcaaggtgatcggcgaggttctccaatggaccctttccggtgacaatggcctgaacaaagaagccaaacatagagaacatggccaatcgtccgttcttgagttccttcaccttaagctcagcaaaagcctctgggtcatcagcaaggcccaatgggtcgaagctgccacctgggtagattgggtcagtgacctcaccgagggggccaccagcaatacggtaaccttcaacggcacccattaggataacttgtgtggcccatatggcgaggatgctctgggcgtggatcaggcttgggttgcccaagtagtcgagcccaccctcgctgaagatctgggacccggccttgaccacacggcttctccgaactttacccgttgcgggacagcaactcggaaga

SEQ ID NO: 13005 - DNA, 431 bp, Glycine max
  Clone ID: jC-gmle01810065g08d1
aatattaaacaataattttggcatcataaattcttccggaataattatacaaaagtgaccagggaaaacccgatctgccagttgcccactgaataaaaacacacatcatattactatgtgttgtcatacatgcattgtaatgagtggatattccaaagcaattggtccctttatccctccttaatccttatgccgtaaatggcaccatcccttgtaaattgtaattgcttcttcagaaatagaattatacaaaggtagttgcaatatctatttgccaaactataaatgtaaagacccttcttcccaatcctagtagtgtcccaattgtatttacaaaggtgggacaagatatgtatatacaagtacaaccatgtaacataatgtaacaataatcatactttggtctttactagtgcacattacagggagtt

SEQ ID NO: 13006 - DNA, 587 bp, Glycine max
  Clone ID: jC-gmle01810065g09d1
aaagtaaaaattgcagaaattttaaacattttctataagtactaatacaatgtcttgctttaacaaaactattagctgtttattacccggatcaagacatcgaatgagataaatggaaaataaaatctagatcacctaactaaattgttttagtatttaaatagagaactggtactgcatagttcgccacgacatttccattttctataatctataatatgttatcacccagtcaaaacaaaataccatcttcgatcctaccgatatgctctaacactagaagaccgagaattggtacatggcaggaatgcaatattcttcagtaagcaaagatagctcctcagcagaagtgattggtacttgagtctgtatcgcaaaaatcatgttgaaacaacacgtctatatacagattgaaccacccaatttgaacttcaagcaattggttgactgccagaagcatcattctcggcatcacttgtcaaggaaagcaaatccgtcaactccaatcgacactcaagccctctaagatagtgtcccaacagcatgcaccaaaagagcaggcgagcaagataatcccgagttaatga

SEQ ID NO: 13007 - DNA, 484 bp, Glycine max
  Clone ID: jC-gmle01810065g10d1
gcagcgaaacatgccgaaaaggtgtataaatataaatactagcacatacaaacggcttttattgagatagctcaacgagttgcatgcatggagttatgggtacacaactaaaattgcaagaaatggataaggtctttcaaattgatcgaaaatcacatccttattggactctttgcacgtttgcaactttaacaatcattctggggttggcaacaacattaaatatttggccttatgctcagacgagatgctattttttggcctaaagaacggtcagcctgacaccagtaggatatccagacactgcggatttcatgggtgacccgtgggtcaaataaagcatcaacccatcggcgattaaatctatattgcctgtcaggtgcccaagatcggtatctctctccgggctgcttaaagatggtctccttctgaatgccacacttttcacgccttgcactgcatatagcaggaggtatggggaacg

SEQ ID NO: 13008 - DNA, 558 bp, Glycine max
  Clone ID: jC-gmle01810065g11d1
aacaactaattagtcattagacaaactgtttagtattcatttgaacaactatttttacaaccagtcactcacaatctcctatgtgtcctaataaaatttgttgtattcattgcaatggcggttgagcaagcatagactccaacagagcagagagctgcagatgccaagagaaggaccttccattgtctcccagaaagcagaattgccaacgcagttaatgcaattgccacagctgaaagagcatttttccaagcttcgaaagctttgacgacggttctacatcctttgcaatgaatcacatgcctaaaatatctgttggcaaaattaggggcatgcattgttccaatgccccccttggttggtgaggaagctgattgtcctgcgactagtccagcaggtgcgtgttcaaccacagcaggctctttaggcaaagagatagtgctgtgaccaaaatgatatggcattccatgccccgctttgtccatccacttcctgtattcagcaacccatgtgtctgatgatttcagattcaggtatagttcctttgttggaaccttt

SEQ ID NO: 13009 - DNA, 505 bp, Glycine max
  Clone ID: jC-gmle01810065h01a1
ctttgattctctgttctctgttttgttctgtttctcgtattggcttcatacaggagcttgaacaatgaagaatgcacagggcaagggagcagcaagggcctcaaaagaatcactgacgcccgttgatgaccgaaaggctgtaaagcggaaggcttccggtaagcctgggagaagtagtgcaccaaagagcggagaagatggccaagaaagaccccaacaagcctaagagaccacccagtgctttctttgtgtcccttgaggagttcatgaagacctttgaggctgagaatcctaatgtgaaggctgtatcagttgttgggaaagctggaggagagaaatggacatccttgaccagtgctgagaaagctccatatgaagccaaggctgccaaaaggaaagctgagtatgaaaaacttatcaaagcttatgataaaaagcaggcaagctccgcagatgatgaagaatcagacgagtccaaatctcgagtgaatgatcaagatgatgc

SEQ ID NO: 13010 - DNA, 113 bp, Glycine max
  Clone ID: jC-gmle01810065h02a1
cttggatcatatgatctgtgttttgttctgtttcgcgtatctgtctgattgcaacaacttggacaatgaagaatgctaacggtgagggaacagctagggcctccatggaatca

SEQ ID NO: 13011 - DNA, 364 bp, Glycine max
  Clone ID: jC-gmle01810065h03a1
ctcagccatattttatctcatgctctgcgattatcttatctaccacgattccctacaccctggaacactagtcgaagtgctgcaacacagaactggagaagggataaggtcaactttgactctctcacacacacctttacgctgcatgcaagaagagaacgaatgagtcggtgacagaagccatggagtactagttgctccacttaatgccaatgaagaagagagaattgcatggatgagagggaagcttcacgagttcaagattctcaattcatacaagttgagcaggcgattccatgctcgggtactgcgattgttcatccacgaatgcgaatctcgactgttcatgatttcggaagcccct

SEQ ID NO: 13012 - DNA, 505 bp, Glycine max
  Clone ID: jC-gmle01810065h04a1
aggtcacattgtcacaatgtggtcaccaattgttctactgttgtgccttattcctcctgtgttcttgctattcttcttccaataccgtagaaccttcaagaactcaaaccttccaccaggtcctagaggccttcccataatagggaatctccatcagctagatagctcgaatcttcatcttcagctatggaaactctcaaagaagtatggccctatattttcccttcaactaggtttaaggcccgccatagtgatttcctcatccaaagtggccaaagaggcacttaaaacccatgacgttgagtttagtggaagaccaaaattacttggccaacagaaactgtcctacaatggaaaagacatatcattttcaccaaatggtagttattggagagaaatgagaaaactttgtgttggccatgtccttagctctagacgtgtctcgagcttttcctcagtataaattgtgagggtaagcagatgatacagaaaatatctaggcatg

SEQ ID NO: 13013 - DNA, 534 bp, Glycine max
  Clone ID: jC-gmle01810065h04d1
ggacccaaaattatatagattatagaatacaattttaacagacttttacatgtgacatttggccaaaatacaaagaggattcttcttatactggacaagtcctggcaagacttcagtatcgatgtcttcctttttcatccctgctggcaattcccaatcaaataaataaagaagattagcaagtataagatccaatgaggcagttgccataagcatgcccgggcaacttctacgaccagcaccaaatggaattaactcaaaatcttgccctcgaaaatctatagtgctgtataagaacctctcaggcaaaaattcttctgggtcttcccatatttcagggtctctttgaatagccaaagcattcacatatactaatgtcttggctgcaatttcataaccatctataatgcaattttcatttgtctcttttggcaaaggagtggcactggtgggtataatctcaatgtctcttttatcactgccttgaaatagggaaacttctgaatgtcattttcttctaagaaatctttctta

SEQ ID NO: 13014 - DNA, 526 bp, Glycine max
  Clone ID: jC-gmle01810065h05a1
tcttcgcttgcagcttcctccaaacactgtcaccatgcgggttgttttggttcttcccatgtcaaatttggcaagagactttgaggcacaaggcttactgtgagaagcctttagagttttgcaacgaaagcctacgtatatgtagttatgtactgatcgaagccagttcagaatttaggaatatgttctagtccatttcatttattaagcagagttcatcatggtcctgtgagggaagcttatagttgtcattgcatggatcaaaacagcaatgtcctttcatcaatgacatgtgttataggcgattctgatggtggattttgttggggcttctttttcattaactccagcttcaatataagcatgtgttgcatgtggattccgggaattttgttgtttgatggcttatgtaatgctttgttcatgattttctctctacgtggatataccgcatgtaaatagtataagttttgtcagcaatagaagattttctgttatcagatataaatttaatttgctatattct

SEQ ID NO: 13015 - DNA, 444 bp, Glycine max
  Clone ID: jC-gmle01810065h05d1
ggggggggttttttttttttttttttttttgttggaacaatcttaaaaccccgcggtcgggaaaaaaacggggggacaagccggaaaacccccttttttccgggggaaaaaaaaaatttttggggggggcgaaaaaaaaacaaaacccggggggggcccccccccgggggaaaaaacggggacaaaaaaaagggcacccccccccaccccaaaaccccgggggcccccccccccccccccccccttgggggggggggggggaggaaaaaaaacccccccaagaaaaccccccgcagggggggccaaacccccacttattgggaaaagggccccgggtggtcaacccccggggggaccctccttaaccccccccgagggggccaaagggacccctcgttaaaaaagggggggggaaaaacacatccctcaaaagggggggggggg

SEQ ID NO: 13016 - DNA, 410 bp, Glycine max
  Clone ID: jC-gmle01810065h06a1
aaaaaatatggttgaatcaattgctgcaacttcactccttggccaccgcccaatttgtggtggaagtttaaccagggatgtttctgctaaacgcaaatctttgaatactgttcggttcccaacaactgagtttcttggtgggggaaggattgtggtttctctggctttgcctaaatctgataagcacgataggtttgtgttttcatcaattaaggccttggctgtggagttaacaagagaagcacatgcttatagggaaacgaaattgcccaatcgggataacacgattgaccgtggattcgatcagaggcctgatttgaggactacggcgaataaggcggataagctgacacttcggaatcccttgctccggcatgagaggatgggatgtcggtggccgggtgctatat

SEQ ID NO: 13017 - DNA, 405 bp, Glycine max
  Clone ID: jC-gmle01810065h06d1
aggagaaacatcaatgttcaatgcataccacttatcattttttccccatttattttgtttaccatatacacaagtaactaacctgtgactaatatcatcaacaatcagatgagttcaatcaactgtacatttataggatttaccaaaaattgtcatcaagggatgatgtatcatgaactttttccacctccagcttcattttaggctccacagacccaaattcagtcatttcaatgtctgcaagattcttcaaatcaaccactgaaagctcgtcaaggggcctgacaaccaagtttgcagccccaagctcatatacaggatgcctgcttgcaacagccacacactttattcgggctttatgagcagcctccactgttagattggagttaccaaacacaatgaccc

SEQ ID NO: 13018 - DNA, 380 bp, Glycine max
  Clone ID: jC-gmle01810065h07d1
ggcacttaaaaacccatttaaatttataaggaaaggttttaaagagaaaaatggcctttgaactttttagctttgaggaatctaaaagcaggtcaatcagaaggcggggttttagttaaaagcaaaacctttttttcttcctttaaagaggtccttacccctaagtgggcactatgcatattgcattcatggggaaagcttattttggcacccggttggcggtttttttttaatttcaaacaaaaacctttttttattgccccttttggcatattaaaagggggcattgtcctggccaaccgggtaaacagaagcagggccagtttttttttggtttttttaaactggataagcccacttggttccagcaatgtttgcct

SEQ ID NO: 13019 - DNA, 371 bp, Glycine max
  Clone ID: jC-gmle01810065h08d1
ccactcgagaccccaaattactttataatgaaaagtttccaaaagtgaaagggccttggaactatgtatgtgtagggaatctaacgccaagccaacaggaaggcggggttttagtggaaacaaaaaccttttttttttcctatgaagaggtccgtcccccccctcgtgaattgtgattgttgctttacgggtaaaagtttactttggcacccggtgggcgtttctttttcagtttcaaagaaaacccctttttaacggaccctattgacgtatcaaaagggggtattctcctgggccaccgtgaaaacagaaacatgcgccgttctttactggtgtatcaaaaaggatacaatcgatggggttcccacaaa

SEQ ID NO: 13020 - DNA, 502 bp, Glycine max
  unsure at all n locations
  Clone ID: jC-gmle01810065h09d1
aaatacaatttttgaagtattacattgctttggattgttcccttaaacttggtcattccttttacattcataaattccttctgtaagtgcacgtttgaaccttgatatcttcgatgggcaaactttcttctgggaaggtacatgccccaatcttctcttctccctggtctggcaacagaccacaaggagcaggagtcacatcacttgaaattccagcaatatcagtgcaagtccatggaactttcttagccttctttgccagttgaatggttacattggatatgcagattccagtgaaagggtcaccagatataccctccaaccttgctgccatagtgacattctcagcaaccatatcacgataattaatgttctgaatcacaggaagtgcattaggatcatagttgtcatcagcatgagacccataatttcctgtcatccaaaatgcccatttcatgngtttcatggtcattcttctaacaaatatgtccttgacataacc

SEQ ID NO: 13021 - DNA, 621 bp, Glycine max
  Clone ID: jC-gmle01810065h10d1
aaatacaatttttgaagtattacattgctttggattgttcccttaaacttggtcattccttttacattcataaattccttctgtaagtgcacgtttgaaccttgatatcttcgatgggcaaactttcttctgggaaggtacatgccccaatcttctcttctccctggtctggcaacagaccacaaggagcaggagtcacatcacttgaaattccagcaatatcagtgcaagtccatggaactttcttagccttctttgccagttgaatggttacattggatatgcagattccagtgaaagggtcaccagatataccctccaaccttgctgccatagtgacattctcagcaaccatatcacgataattaatgttctgaatcacaggaagtgcattaggatcatagttgtcatcagcatgagacccataatttcctgtcatccaaaatgcccatttcatggttttcatggtcattcttctaacaaatatgtccttgacataaccccctcttcctacagcagttttgattctgacccctgattctgaattgatggctacaatgtcctcagctctgacgtcctgaatccaccagacatctcactccctaaagcatcacagcactg

SEQ ID NO: 13022 - DNA, 512 bp, Glycine max
  Clone ID: jC-gmle01810065h11d1
gacacaagttatgaatatataaggcccacttttttttacagggaaaacagttgaaacgaagttgttaataataaattgccgaaagaaatgggtaaaagaaattcccacccaagatttaataattgatctattcttagcctaggcaaagtccatcttgttgcgattgaaaggaataagaataaataagttttagctagtgtaataaagataccaattatcgttacaaaaactccatatgtttgatttatttcaaaaaagtcagaaacgaatatgtatggaatagagatatttgaaccaccaaagtaaagaactgttacaaataaggaagaaatgaataggtttaaataggaagcaacataaaatacaccaaatttgatacccgagtattcggtttgataacccgctactagttcttattccgcttccggtaaatcaaaaggtaatctttcacattctgcttgggacgagattagaaaaacagtgaaacccataggttgacgccacaaattcca

SEQ ID NO: 13023 - DNA, 446 bp, Glycine max
  Clone ID: jC-gmle01810066a01d1
agaaaaagcaatccaccatgtatacgttttaatccaatgctacatgcaaacaattaaaccagaacacaaaacacaacaatatccatccctaacgtacaaaacctcaaacaacacaattgaaccactaaccctttcacgtcacaccatggcttcacccatcagacccaccccaagaacaaacgcaaccactccaaacttgaaactcacggaagaaccagcagaagaagcttcagcgggcaagtccttgttatcaccattgtcactatcatccccagcggcaccggacttcgtcttatccgtcttcggggaagcccctttagccttttctggcgccggtgccggagcctcactgggaagcacaaggtcaagtgggagaagcaccttgtccacctggtatatggcgagcttgttgtccgtgtaaactgttccggtgacggaggcgttga

SEQ ID NO: 13024 - DNA, 534 bp, Glycine max
  Clone ID: jC-gmle01810066a02d1
acaatataataataactttcaaataataattcgaatccaaagataatatacaaaccttaatttaaaaaaaaaaaacggacacaagaaccaacatctcctgtcagtattcacataacataaaaagacattcaatatgccgtgagcacttggtaactggcgtagaaaacatacgttacaacaagagggtcaataataaacttgatacctactccgggccttgcattggaaccatcatatgtcgaccctgagaattcgggtaagtaacattttgtgagaaagaaccttgatgagcaagctgagcattaggacttggctgaacatctctcttagcagatgagtctccacccttggcagagcccttcgtatcaccctccatctctcggtatctagtgaggtaaattttaagaggatccatataatcctcgaaaccgagagtggccatcgcccagagcaaatcatcgccgttaatagtctttctcttttctctctgacacttatcagaggcctcgcttgtgatgaagctgatgaactcgg

SEQ ID NO: 13025 - DNA, 398 bp, Glycine max
  Clone ID: jC-gmle01810066a03d1
catagcatatgacttttgttcgaataaaaagtcaaattgatattataataacaataaggctttaaattctatgtaacaaaataattatacctcaacatgggaccatggcaattctgcccttctatattttgtatactgaaaaagttttatgggggattaagagcaagaagaaatgtacatttatattgttaacaaatactggaattcatagtcataggggatcttttcaacaatggtagaaggcttcacattactgtggcttctaaagcaatccaccattgatttccttagagtcccagatgtaggaaactggctgcatacccactccaccagtgagtctgtgtccacagaaaaatcaagcatgtttctgagaaggagctctgggaatcctattcttt

SEQ ID NO: 13026 - DNA, 96 bp, Glycine max
  Clone ID: jC-gmle01810066a05d1
aaactaaacactgcatagtatagcgcaaaagtcactggcaagattggagacatacccaatttgatagggaagcagttgttaacgctgcacacaggg

SEQ ID NO: 13027 - DNA, 414 bp, Glycine max
  unsure at all n locations
  Clone ID: jC-gmle01810066a06d1
aaggggacactgtaactcaaaattatagaggaagacggtccaatatgaaaaatatagtaagatcatctcaaacttagcatcttctctttgcacctaagacattgagaatgctaagaatgttacacgcaagttccatcacaacttctagcacttggattagtacaacaaccttcacgaacagaaatatttacttgccaagtttgctttgcctccaattcaagactggaagaaagttcccctctgaatagcatcctcgttagcatttccaagagcagcctcgttcaagtacttgtcagccaattggactctcttgacattctcttgttcttggacaagcatgttaccatacagcangagcttctccagagtcatcttgggctgctcaaaggttggagggccatcttttgagttcac

SEQ ID NO: 13028 - DNA, 448 bp, Glycine max
  Clone ID: jC-gmle01810066a07d1
ttgttttttttttttttttttttttgtttttttttcttttttttttttttttattctggttttgggtatactgaccagcggcgaccaaactttttccccacaaggcggtatttgctacaggaaaaaaaaaacaacatagctataattgttaattatgagggcacacaaactattgagccataagtcaacccctacccctatggatatgtttctttttcccctcccccttggcctttaatgattgagggaaccctccatgtgaactaccgtttttccaagacttttataagacctttagattcttaaaggtgctcatctttgtgatcatatgaagcaaaaccctgccatcttctttaccttataaatgatagacgaaatcatttgtgacggggatgtcccaatgccaaatcttgcctatgaactaccacgtctttttctggcatgaacg

SEQ ID NO: 13029 - DNA, 347 bp, Glycine max
  Clone ID: jC-gmle01810066a08d1
gtgtattctgatatttgttggtacaaaactttttcccttcaaaggcggtttttgctacaggaaggggctagcaaaatagatagtattgtaaataaaggggacccacattcttttgagcctagaggcccccccccccctttgtgttgttttttctccccccccgggggccttttttgatgggagaaaccatgcatgtcaactaccgtgggcgggagactctccccaaggctttgaggtctgaaggggggctcatctttggtatcagacgaggcaaaactcttgccacccccctaccttgtagaacgagggacgaaatcttttgtggcggggggatccaaataccaaat

SEQ ID NO: 13030 - DNA, 741 bp, Glycine max
  unsure at all n locations
  Clone ID: jC-gmle01810066a09d1
cctcgcccccccccccccccccccccctagggtagaagagnntantagtaggaggnagnnntttttttttttttttttttttttttttttttttttttttttttttttttttccctccccccccccccccccccccccccccctccccccccccccccccccaaaaaaccccccccccccccccaaccccccccccccccccccccccccccccccccccccccccaacccccccccgcccccccccccccccccccccccccccccccccaccccccccccccgcccccccccccccccccccccccccccccccccccccccccccccccccccccccccccccccccccccccccccccccccccccccccgccggcccccccccccccccctctcccccccccccccccccccccccccccccccccccccccccccccccccccccccccccccccccccccccccccccccccccccccccccccccccccccccccccccccccccccccaacccccccccccccccccccgcgcgcggggcgccccccctccccccccccccccccccccaacccccccccccccccccccccccccccccccccccccccccccccccccccccccccccaccacccccccccccccccttcccccccccccccccccccgccccctctcactccccctcccccccccccccccccccgacaccccccccccccgccccccc

SEQ ID NO: 13031 - DNA, 485 bp, Glycine max
  Clone ID: jC-gmle01810066a10a1
cgagaagcactccctagagcgctaccagagggaccaatgggtctacgagagcaccatccaagagggtcaatctcaaacgacgccgtttgctctctcgtgcgattcggcgtccttaagggagcacgacatagcgttgcagctaccagagctgaagaagctgcttcaggttctgagggagaagagagagtgcggtgaagaaggttgtgcccccgggaacgtgttcttggtgggaactggacccggggaccctgagcttcttactctcaaggctatgagagtcatcaagagcgctgatttgttgctctatgacaggatggtgtccaatgatgtgctggatttggatggccctgatgctaggcttctctatgtgggcaagactgctggctatcatagcagaacacaggaggagatacatgagcttcttttgagttttgcagaagctgcggcaactgttgtgagacttaaaggggtgatccattggtgtt

SEQ ID NO: 13032 - DNA, 303 bp, Glycine max
  Clone ID: jC-gmle01810066a11a1
tatagcaaccccaaagatgacggacggcacataatgcaatacttatatgtaaggcactttgcgggtgcgaaaccaatgcagatgagcctatgcactggtgataacattgggagagcacaaggccaaatgccaagggaccgcgggagcatgccaagacacaaccaagagggacacccacacctcgtggtagaggatggtaaccgccgataggagcacagtggattacgcccgttgactactggcgaaccaaagctgctgcgtagacagaggaggctgattgacattgtggtcctttgccagggc

SEQ ID NO: 13033 - DNA, 416 bp, Glycine max
  Clone ID: jC-gmle01810066a11d1
gggctctacaaaatccttgcattgatgggaaaaataaaactgaatatcagaatagctaactttagctgaaaaaaaaaaaatctataacgactagttttttgttttttttaaaaaaattctccccaaataaaggggggacccaagaaaaaaaaattttttccgtggccctctcattttgtaacgccccagccgaatttacccccgtaatcctatgtgggtaataacatactgtgccaatcccacggtttggaagccactaataacaaggggggattggttcaatttgatttggcctaacctacaaacacctacgttccgcagctttcctttgcaaaccgaatggaggcaccagggagcgggatcatttgcaatcaaaacacacactcaaagttccttatagaaaagtgctacataat

SEQ ID NO: 13034 - DNA, 532 bp, Glycine max
  Clone ID: jC-gmle01810066a12a1
caactacaaaggttgctgtaggagataagatattgaagtagtgctaagtgcctaacacctgcagtgaacaatggcctctgcatcagcatctcttctcaagtcttcacttgttcttgacaagtctgagtgggtgaagggacaaacacttcgccaaccttctgctgcatcagttgtgagatgcaaccccaccaccccatcaggcctcacaatcagagctggttcctatgctgatgagctcgttaagaccgcgaaaacagtggcttcaccagggaggggtattttggccatggatgagtccaatgctacctgtgggaagcgtttggcttcaattgggctagagaacactgaagctaaccgccaggcgtaccgtaccctccttgtgacagttccaggacttggacagtacatctctggtgccattctctttgaggaaactctctaccaatccacaactgatggcaggaagattgttgacgtgctcctccagcaaaacattgtttctcgtattaaagtcgacaagggtttggtaccc

SEQ ID NO: 13035 - DNA, 395 bp, Glycine max
  Clone ID: jC-gmle01810066a12d1
ggatggccgaaattcaaccatgttattttgagacaatcaatcaagtccacaactcacagcaaaaaggtttataagctgtaaaggtccatgtaaccataaacaaaaatagtctccaagactttaaaaacattacattttaaacaaattagttttttttcactttattcctcggaaaacacctactacaactgctggtgttgctgctgcctaacatgtatcatattcactacaaacattttagtgggagtagcctttgacgaacaactcctttttggcttcctcagattcaccctcaccggtgtacttcccaagctgggcgagcgagttggacttggcacggaaaaaaagtgcattttgtgccgccttcacattctctgggcggcctccccatgttt

SEQ ID NO: 13036 - DNA, 503 bp, Glycine max
  Clone ID: jC-gmle01810066b01d1
acaagttaattgaagaaattcaattagtttaatcaaattccccaaccccctctctttttattagatcactacgtattatatgcaataaaatattatatggcagaaatattctaagctggaaaaaatggaaactaagatataggatttttcaggaagggggtaaaaaagattattttattgatatttttagaatatttctatttcgacacaaacaagaaggaataggaatcggactctaggaaaagacaaaaaatcccccctagagtaccttttccatatactaattgattttgtttcaaagtatctatctatatagatatctattttatgtttagtatcgaatccaattttattgtattttacaatcgaaatctctatagtagaactctctattatagaaaaatgaaatctgaaaaaaacagtgtcataaccataatattcgaatttattgcggggctgaaagaacaaagacaaatagacttcctgacaatatccatactcga

SEQ ID NO: 13037 - DNA, 397 bp, Glycine max
  Clone ID: jC-gmle01810066b02d1
gtataatcctatcgagaagaatatgtattaacatggaataaaattgaatacaggcttcctgaaacgcagccagtgctgctgcaaaaccaagttgacattacctttcaaacgaacgaactccaatgaaaagaaagacaaaaaaatcaataagaaaaaaaatgggtgaaatcagactcggatgcacatatgctggccaggttcccataaaagttatgccaccgacgtatgtagcagtaatacgtcagctttcattctccatttgagcaatccaaattcttgttgctgaaggccagcagctagcacgtatccacagggcagtaaattccgcagatataatacttcaacatcttaggtgtgatcggaatatgttgagacttgcacacctatcactttggta

SEQ ID NO: 13038 - DNA, 470 bp, Glycine max
  unsure at all n locations
  Clone ID: jC-gmle01810066b03d1
gcgagaaacattactcgttactgtggttaccgtggtcaacctcgcagagttccaatatacaaagcactgaaacaggaccatttggttttccatatcttatgcaaacacaatccaccttaaaattttctcactcaggtactcatgtctcaacctcctatttacatcactattanccgacctaaatgacgagacgattaaacattgaactaaaagatcatggaacgacatattcccaaaacataaatataagtcgatgatgttgataaagcataaactattctctagcaaagttccaaagtgaaaaacacaatcacttgactaatctccggtctattatatttgtagtagttcccaaaaaacatgaattgccaccatcaaaaaggcttcaaaatgtcttaagcttgtgcaccaagctccaaagagtaaagtgtgattaattgcatcagatcctgggccagtgaattgaattg

SEQ ID NO: 13039 - DNA, 458 bp, Glycine max
  Clone ID: jC-gmle01810066b04d1
aaggggacactgtaactcaaaattatagaggaagacggtccaatttgaaaaatttagtaagagcatctcaaacttaacatctgctctttgcacctaagacattgagaatgcttagaatgttacacgcaaggtccatcacaacttgtagcacttggattagtacaacaaccttcacgaacagaaatatttacttgccaagtttgctttgcctccaattcaagactggaagaaagttcccctctgaatagcatcctcgttagcatttgcaagagcagcctcgttcaagtacttgacagccaattggactctcttgacattctcttgttcttggacaagcatgttaccatacagccagagcttcttcagagggatcttgggctgctcaaagggtggaggtccatcttttgagtgcacaagcttgttcccaacactgtgaacaccaacaccagaaatccact

SEQ ID NO: 13040 - DNA, 521 bp, Glycine max
  Clone ID: jC-gmle01810066b06d1
acaagttaattgaagaaattcaattcgttaaattaaatggcccagccccctctttttttatttgttcactacgtattatatgcagtaaaatattatatggcagaaatattctaagttggaaaaaatagaaactaagatataggatttttcaggaaggggttaaaaaagattattttattgatatttttagaatatttctatttcgacacaaacaagaaggaataggaatcggactctaggaaaagacaaaaaatcccccctagagtaccttttccatattttaattgattttgtcacaaattatctatctatatagatatctattttatgtttagtgacgagtccaattttattgtattttacaatcgaaatttttataatagaactctctattatagaaaaatgaaatctgaaaaaaacagtgtcataaccataatattcgaatttattgcggggttgaaaaaacaaagtaaattgtcttcctgacatattcattactcagtttatttgtattacgttac

SEQ ID NO: 13041 - DNA, 689 bp, Glycine max
  unsure at all n locations
  Clone ID: jC-gmle01810066b07d1
cgccgtccccccccccccccccccctagggtagaagagnntantagtnggaggnagnnntttttttttttttttttttttttttttttttttttttttttttttttttttttcttccccccccccccccccccccccccccccccccccccccccccccccccccccccccccccccccaccccccccccccccccccccccccccacccccccccccccccccccccccccccccccccccaaaacacccccccccccccccccccccccccccccccccccccccccccccccccccccccccccaccccccccccccccccccccccccccccccccccccccccccctccccccccccccccccccacccccaacccccccccccccccccccccccccccccccccccggacaagcgccggggcccacccccccacccccccgccgggccccccccccccccccccccgccccccccccccccccccccccccccccccaaccccccccccccacccccccccgccccccccccccctcccccccccccccccccgccgccccccccccccccccccacccccccccctcccccacggcggccccccccccccccccccccccccccccccacccaccccccccccccccccccccccccccccccccccccccgccccccccc

SEQ ID NO: 13042 - DNA, 480 bp, Glycine max
  Clone ID: jC-gmle01810066b08d1
ttgtttttttttttttttttttttttttttttttttttttttttttttttttttttttttttttttttttttttttttttgttttttttttggtgggggggaaacaaattgggggtatacaggggaaattcttcccccctttttaaacagggggaaaccaagggcccaggccccctttaaaaaaaaacgggggggcctttttgggatcttgaaaaaacccccctcttcttttagaagaaaaaaccctctccttgtgggggacgaaccaatctttgggtgggggggggggaggggaggacctccccccccctgtttatgtttgggaaaggggggggcacccccccccggggggggggaccctcccctggggtgggcgggggaaaaatggaaaaaattttccaagaagggaaaagttttttgtgggcccccagggggggatataaaaaaaattttttttttccagggggggctctccggggg

SEQ ID NO: 13043 - DNA, 297 bp, Glycine max
  unsure at all n locations
  Clone ID: jC-gmle01810066b09d1
ccccacccccccccccccccccccccccgaataattnngggtnangagntattagtnggnggnngnnnttttttttttttttttgaaaaaataatatgatgaggtaaatgaccccccacccctccctcccgccccccctacccccccccccccgccccccccccctgaccgctccccccccccccccccccaccccccaccccccccctctctccccctcccccccccccgcccccccccccccaccccccccccccccccgccccccccccccccccccccccgcccccccccccc

SEQ ID NO: 13044 - DNA, 595 bp, Glycine max
  unsure at all n locations
  Clone ID: jC-gmle01810066b10a1
cagatgcaaccaaaccagattgcccaatcatgtatgccagcagtggcttttttactatgacaggctattcttcaaaggagattattggaaggaactgtcgatttcttcaggggcctgagaccgacaagaatgaagtggccaaaattcgggatgcaactagaaatggaagaagttattgtggcagacttttaaactacaagaaagatggaactccattctggaatcttctcactatcacccccatcaaagatgaccatggcaatactatcaaattcattggaatgcaggttgaagtgagcaagtatacagaaggcgtgaatgaaaaggcattacgaccaaatggattacctaagtcattaattcgatatgatgctcgtcaaaaggagaaagctatgggttctatcactgaggttgtccaaaccgttaaagacccaaaatcaattattaatgataggaatggtgatactgctgccaagcctgaagaacaagagaagttcaattntgattttgtttcgccaagtctgctgatatcgggaatacaaacacacctggtagacaagcttctccactttacatccaacgcatgagttctagt

SEQ ID NO: 13045 - DNA, 110 bp, Glycine max
  unsure at all n locations
  Clone ID: jC-gmle01810066b10d1
cacgcccccccccccccccccccccttgggtnatgagntattagtnggnggnngnnnttttttttttttttttaatnaaaataantagtaatatgtatgatattttaacc

SEQ ID NO: 13046 - DNA, 414 bp, Glycine max
  Clone ID: jC-gmle01810066b11a1
cggggacacaacaactgaactggtaatcgaaggtccattatgcagcgctgatttcatagggactgtgaaggtgcgtctggctggtataggagaccacttattatctattgcagcagaccagcccttgcgagctgctgctacatctacgtttgtagttagagaccttctcaaatctgcggcctggcatcagccaggggggctatgagcctacgcttacgacctggattgagtacagccaagaccttaccccctgtagatgatcaggtctacatgaagctggggctgaagttgcccgtacggacttcgggaagagatgggatcgacagtcccacgcatattacagcttattcagactaactgatacaggagacaagcctgctgacattatccactgaccggagcaaggtgatctaa

SEQ ID NO: 13047 - DNA, 407 bp, Glycine max
  Clone ID: jC-gmle01810066b11d1
cgggcaaagcttcctctccaattttttgttggaagctgcatcatgctgtataatactgtaataggaattacaataagagtcatgctacatagaaaaataggagctgaattttgacagatttcggttcatttcgggcgtggaatgtagtattgaattgagaatttatccaaactctacaaaattcctatgcatggtccttttggggcaataacatatatttatatttggaccggaggtgcggtgtaatgacaaatatgcggctctaaagccaatgggctatagtcgagcacaattagttgattaactgaaacaggtgaatggacaaagcccccatcatttgctaattgaaatttctatacttgctgaagttttgcgaaacggtgggtaatgctttctttcagctaccc

SEQ ID NO: 13048 - DNA, 551 bp, Glycine max
  Clone ID: jC-gmle01810066b12a1
cttcagatctgtttcttcatcggttgttcaagtaaatggcctttgtcaccactgctgaagtgtgtgatgcgaacccacagttaattttgagtggggagcttcgtgcccttcagccagtttttcagatttatggccgtcgacaggttttctctggacctatagttaccttgaaggtgtttgaagacaatgttttggttcgtgagttccttgaagagaaaggcaatggaagagttctagttgttgatggaggcgcgagtttacgctgcgctatattgggtggcaaccctgtggtacaagctcaaaacaatggatgggcaggtattattgtgaatggatgtataagagatgtggatgagatcaatggttgtgatattggagtgagagcccttgcttcccatcccatgaaagccaataagaaaggcatgggagagaagcacgtccccataaatattgctgggacaaggatcagtgatggggaatggctctatgcagacactgatggaattctgatctctcgaacagagctgtctgtttgatttcaattcatgaat

SEQ ID NO: 13049 - DNA, 331 bp, Glycine max
  Clone ID: jC-gmle01810066b12d1
acaaaaaaacaaaaaaaccttgttttccttgccggggggggcgggattttaaacatgtcccaatttaattaaaaaaaaccgcggggataaaacccctggttttttggccccccaaaaaattaaaatctttgggggctttttttctttttggaaaggaaaaaaagaaaccggggagtgttccccccctcccactttaagcaccaaagttctgctttcgtggcactgtcccattctggccataccttccacaatactgcctatataaatttttgcagcaaatgggctagtgcatgattcttgaaactgttctttattttctcccaaacccatt

SEQ ID NO: 13050 - DNA, 583 bp, Glycine max
  Clone ID: jC-gmle01810066c02d1
aacattgcacacattgtaaaatgtagacaatgtaactcaaaattatacaggataacaatccaatatgaacaagataactcattttattatctcaactcttagcttctctgcaagtggagaatgcttaggttctcagggtgtgtataagcaggatccatcatcacttcttgcagttgggtcgaagtttgaggcatttggatcagtacaaccttcaggaacgggaatgattacttgctgagctgctttgccatagaaagatcctctgttgatggaatcttgattagcatcaccaagagcagcctctttcaagtacttgtctgccaagagtactctcttcacattctcttgttcttggacaagcatgttaccatactccaagagcttgctcaaaggcatcttacggtggataaaggttggaggtccttccttggagttcacaagcttgttcccaatgaagtcaacaccaacaacagaaatgcactttctgacctcatcatcatatactctagccctgagtgcaccaaagaaatcaatagattggtccggggaggtgtcaacaagcttgacaatgtcatccttagga

SEQ ID NO: 13051 - DNA, 630 bp, Glycine max
  unsure at all n locations
  Clone ID: jC-gmle01810066c03d1
cgcggcgccagtcacngtagacagactcgaccggaaatgatcgccggctcgacgagcgtactacgtcggcggccgaccttgactgactagttttggtgtggtgtttgttgattaacattacattgcctgccgactagtttacggtatcagcaatagcaagttggcttacacacgcacagatctgatctatctgaagctgaaaacgccgacgcccgacggtgatgatgaagatggggttctcaccttcacgatgctccttcttcctattcctcctcctcctagtggcgctcttcccctcgtcgctctccgagatccggttcttcgagatccgaaacgacgatcgctccatcgttcccttcgatcagattggattcacccacaagggtcgccttgagctcagcgtttgcaaaatatcactctccaattccaaattggacctctacaaggtgggattcttcctctgcaccctggattcctggcttcatgtcttccagcaactggaggatggcgagattcggtgcgcccttcaatccgatctgatcaagtccggctacacctttcattctctcaacggcaaggactctttcagcacgctctacaaagaagaaaccggcgccgatcagtacaacc

SEQ ID NO: 13052 - DNA, 486 bp, Glycine max
  Clone ID: jC-gmle01810066c04d1
tttttcaaccgctttctttgccatctcacagagtttggttgccctttctcttctctctttgctttcttcttcatcattgtccatcaccatgcatattgccctctcaatgttcttcttcttcaccaacacaccagttttctcttcctctccccaattcattggaacttctgccccaacactcacaccaatcttcaacacttgagtaacgagcttttcatttaaaaattgatcagcaaatagaggccaggtaaccattggcactccaacacttatcccttcaagtgttgaattccaaccacaatgtgttaagaatcctccaatggcagggtgcgataatattagtacctgtggagcccaacctcgaattataaggcctctccctttggtcctttcctcaaacccttcttcactgatccatttttccaactcttggtacttacttccctccctaatgacccatacaaatggttttttactatcttctat

SEQ ID NO: 13053 - DNA, 450 bp, Glycine max
  Clone ID: jC-gmle01810066c05d1
gcgaagtgaaatgtggagtggatcaacattgatgaacaaatcaatggcataaattttcataaaacgaaagcaatcagatagcactctctatgaattaacaaaaactaattacttcatcaataactagttaactaccaagttgcactattgcatcctgcatttaagaagagacaactattattagtgccccccctccccctcctacaattggggtaaagtgaggattatccaagccttatatagactacttagccatatcacttggcgtgtgggattaaacacacaccctcactcctaacacaatgatggtgctggaggctgaaatgaaggcatccaaaaaggctgcaattaaggcagactaggggtaaccgcaattaaggcagactaggggtaaccgcaattaagccagctttccaacaccaaccatccaccagagccattttgatttat

SEQ ID NO: 13054 - DNA, 569 bp, Glycine max
  Clone ID: jC-gmle01810066c06d1
gtaaaaatgaatatacatatatttccttatccttcacagaagaaaaagtcaaaaaatacaacgaaaattgaacaagaacagaggtaatgaaatgaatcttgaatttcttcgaagccaagacgacggatttgtatgacgatcctaccttttcctccttttaagtgtgagcaaaatgaatttatagaaaattggttcaaatttccttcggggttaatcccccttttcatatgccaacctgcgatgcaaaccaacactcaacgtttatatttgatgccgtcatcgaggatactatttcccacaactattgaaacactgctccaaaagagatcccacatttccatgtacccttattttaatccaaatctcctagtctcctttcagcacagcaaattcaaagggtactgtctctgtaatctctgtttggtatcttgaatttcaaaccgctgaatgaggaatcagaagcagaataagtgcaatgcagtacagagaaatgcagagggtaacaccagtaataaaattatgcagcatcctccgattgtgttttgtaggtatgaacactgtcttaagtg

SEQ ID NO: 13055 - DNA, 320 bp, Glycine max
  unsure at all n locations
  Clone ID: jC-gmle01810066c07d1
cggcgctcccccccccccccccccccccttgggtngtgagntantagtnggaggnngnnnttttttttttttttttttttttttttttttttttttaataattaaaantgcgccccaccccccactcaaagccgctctctcctctgcaacacccccggcccccctcccgcccccccccaccggccgccccccccccccccccccccccgcccccccccccccccccccccccccgcccccgccacccctcctccccccctcccacccccccccccccccccccccccccccccccccccccccccccccccacccccccc

SEQ ID NO: 13056 - DNA, 444 bp, Glycine max
  unsure at all n locations
  Clone ID: jC-gmle01810066c10a1
gcggaatcgagtactgatacaaactctacgggaangaacgcgggcgcgagcagctaactaggctggggccgccctttatatttgtcacgaacaatatagacataggaggctggttaactgctgtaatatagaccaatgagtttaggttgaagccggggcttactcaacacaggagcctctgacgacttatccaaggccgtgattgtgcccacataaaatgtgcatgcacataacatagcgccggactgagctagcattatgcaagaactgaatcaaaatttgattggaaaaaagttggcctcgtatataaaaattttaagatgctaaaaagaaccacggtgggcggctactagagagctctaccaccctggaataaattacacttcggcttctgcaagagtacctaaatggcctatcgtgagtgcgaaaaaagcttggcgaagt

SEQ ID NO: 13057 - DNA, 535 bp, Glycine max
  Clone ID: jC-gmle01810066c11a1
atataagtatccgttcatgttgattcaattttatgatttaatgcattgtgttgtggctatcggttagccatattcttcatttgtccttcaaatgacaaaacgaatgcaaacattgtacaatcccatggtgtacttcaaaagagaatacaatgtcctgcgctactttccaagaagtaccactcaaaaactagattcctcagttgtcggacgcctcaagaaatatctcaagctgttagcaagaacctgctggagaggcttggagattgctttaccattgtagcttacatgaaactttgccttaaccaagagcccctcagtggcaaattctccggattcaacagcaatgttaatgtcagtaataatctttacaagaacaaccagtgattcaggccgatcagctgtctacacatacagaaagcttctatttgggcaatcatcagaaatgtttatgtgggttgctatgtctacgtcaacctgctcttttggaggcagaagcccaaaagctgcttccaatgctaaccgggaacttgattcc

SEQ ID NO: 13058 - DNA, 195 bp, Glycine max
  Clone ID: jC-gmle01810066c11d1
ttgtttttttttttttttttttttttttttttttttttttttttttttttattttttttttttttcttttttggtttttttttttctgccggaaccctttgaaatccccaactgaggggatccacctaaaacaaaatctgaccttctaccaaaaaagggggggtcccctgttttaacccttaaattctaaaagaa

SEQ ID NO: 13059 - DNA, 623 bp, Glycine max
  Clone ID: jC-gmle01810066c12a1
cggctcgagcggctcgagctcgagccgaatcggctcgagagttgattgatctctatggttgcacattttggtgctggggttttcctcctaattcaactaataagcataatcagcttcattaactggctgactgattgttttgactctgaaaaatatgcagaaaaatgccaaatccaggtgatgttatttgcaactatttcatattttatctgcttggtggggatcattttgatgtacatttggtatgcgccacaaccatcttgcctcctcaacattttcttcattacttggaccctagtgcttctccaactcatgacaagtgtatctcttcacccaaaagtgaatgctggcattttaagtccagggttgatggggctttatgttgtcttcctttgctggtgtgcaattagaagtgaacctgcgggagctgaatgcatcaggaagtcagaatctgcaaacaaaacagactggcaaagcatcattagctttgttgttgcaatactagcacttgttgttgcaacattttctaccggcatagattccgaatgctttcagttcaggaagagtgattcgccagcagaagatgatgttccatatggttatggcttcttccatttcgtttt

SEQ ID NO: 13060 - DNA, 521 bp, Glycine max
  Clone ID: jC-gmle01810066c12d1
ggaactcaaaaacagggtttcattgattgtaacttcgatattatttgtcactgacaaatggtaatccactgcttaccttatgttgaacatatgatgattcactcacaataaaattactttaagcatttaaaccgataaattggcaaatcatgaatgaactttatgatgagcatcctccaaaaggggttttaaagttactttatactccctcagtgataaatgaacaggtattgtgtagcttcaaataaaaaatccaacagcttatgtgcatttttgccagaaccattgcttctgacttcgaatttccagggtgttgcagttgcaaacttgcaattccttttcctaagagctgtaactggaggagtccactaaatgtgtagcaaatatatgtggcaatttaagatcttaatcctcacaatttcaaaccagaatggagataagaaggaagttcttatgtagaatcagcatgtctactcttccatatgattggagctaccagcatccataagtagacacaaact

SEQ ID NO: 13061 - DNA, 521 bp, Glycine max
  Clone ID: jC-gmle01810066d01d1
aaatacataaagcgacattttataagtgcagataataaaattaccggaagaagaagaagaaaaataaaagctagccactagtagagatggtggttttgttggtccacttgagaaccaaattggagatatgggcggtggaggaaccatttggagagagagccttagccgcagcctccttgagatccttgattcggtaacgaagcttcttcccttcatggccttccatgaggcacttgacaacgctggctattttctggctctggacaagtccagtgtgctcggcaactttgggcctcagcgccaccttgactttatgcatgagcataaacgcgttggtcctctgctccgcgaacagaggccaggctattaaaggcacgccgttcaccacgctctgcagtatagagttccagccgcaatggctgaagaatgctctccgtgattgatgggccacaacctgtggctgcggagcccatgacttaaccaaaaagccccttccttttgttctcttcacgaacccttct

SEQ ID NO: 13062 - DNA, 455 bp, Glycine max
  Clone ID: jC-gmle01810066d02d1
cgattaaaaatgaaaaataaagaacaattcaaaacattaacacagctcttattgtaagctgtatcaaaaccttttcccaattaacacagctttgtttgacaatttttgctatggccgaactgtaagatgatgttaacaatttttgctacaacaggattgtaataactaggttgctccatgtaatgtaactccacaacaaagcttatgcatggaattaatcaactgctactggctgcatgttttcagcttcttgacgaagctcttggaacagaacagatgataggtatcgttcaccgaagcttggatgaacagtcacaataaggttgcctttgttctcaggcagctgagccaatctgagtgctgcaactgtgttagctccagatgatatccctaccatgagtcctttcttcaatgccaacaccctagccatgttaactgcatcttcgctgctaact

SEQ ID NO: 13063 - DNA, 473 bp, Glycine max
  Clone ID: jC-gmle01810066d03d1
acaaactgttaagaattctatctatataggctgtgcaatttcctggtacaaaacccattttggtttgcctatgtattattcataactatgtgagaagtcctataccaaattccagggaaccactggacattaccaaaaccaaccaagagggatacccaaaaaagcgtggcagaaaaatgggttaccaccagatataagttcagcggcttctgaactgcttagctaatggttcaaccaaagctgcttttctaagcttataggactgatttactttgtggtcctttgccatggccctcaaatcagtcaatgacaagctattcaagtcaccaggcagcaaagatgaggtcccatcatgggaatccaccaaggaatgcaacttgctagtatgaagaactaactggcttccactgtccatagaaaccctactctgaattgtttccatgtccacggtgattggcaactttgaaactttt

SEQ ID NO: 13064 - DNA, 401 bp, Glycine max
  Clone ID: jC-gmle01810066d04d1
acaaactgttaagaattctatctatataggctgtacaatttcctgttacaaaacccattttggtttgcctatgtatcattcataactatgtcagaatcctataccaaattccagggaaccactggacattaccaaaaccaaccaagagggatacccaaaaaagcatggcagaaaaatgggttaccaccagtaataagttcagcagcttctgaactgcttagctaattgttcaaccaaagctccttttcgaagcttatagtactgttttactttgtggtcctttgccatggccctcaaatcagtcaatgacaagctattcaagtcaccaggcagcatagatgaggtcccatcatgggaatccaccaaggaatgcaacttgctagtttgaagaactaactggt

SEQ ID NO: 13065 - DNA, 530 bp, Glycine max
  Clone ID: jC-gmle01810066d05d1
gaaagattggcatctggataagtcaactgagatgtggttctcatcattgacccaccagcattaggagaaggtgggaagacaatgcttcttctggcattgtcatcatcaaaatcatcctcaggaagcatttgctgaatttcgagacccttcacccatgcatccactctggaaaaagaagatgattctgttgagaaagcaatccattggtcgctttgaaacctgctccccctttgattatcaatatttttaccaattcttcttttgttaaaggattccatagtaattgaatcagaagatttcacaggcctcaatgccttgccttgtttcagttcaagggtgtctgaagagtatccactatttaaagcagcactagtaggaactagtgttgaattgctagggagagttctgcgtgtgttcctgtggctccataggatcatcttccaccacagttttttacttctagaagggagtacctgacttgaagagtgccttttcaacaatactctatcagcactgtagtgactcatcac

SEQ ID NO: 13066 - DNA, 600 bp, Glycine max
  Clone ID: jC-gmle01810066d06d1
tggtcgtccttttttattattttgacaagattagcttttattaaacatgtttctgggaaaggaagttctaatagatgacagggttagactttaagcatcagatgccccctacaagactcctcaatgactgtatgcgcaatcatattaatcagtttgttgttccgttttctaggggtggcaattcaacatcttggatagcttcaagcctaacttttccacccatacatttctggaagaacttcttaccaacctctcttacaaactcccttgtctcatcctcattggatacaattacaatctgtaaaaattgaaaacctgtgattaacccacgtgcatcaatatttttatatgaaatattctgcagatcaataattccaatcaacttttcagttcctatctcccttcctttgaaagcacttgcaattgtcttgtccagtagatatacaacaaatttcttgaattgaatctgatccttggaagcaaaatgtctgttggtttgaacaatcatgacagggaatttatcctgagacaacccctgcaagaagatcttccttgcttccaattcatccggaatttcagattctgaaatgaatccatttg

SEQ ID NO: 13067 - DNA, 438 bp, Glycine max
  Clone ID: jC-gmle01810066d07d1
tcctttttttttttttttcataaaaacttttttttttttttctcacagccaaggaatgaatcctacatgaacacaggaacattctacatctctcttcaccaccaacaggacaatagcttctcctcatttgaaacaacacaattatattccccactcatcttctctccacatgcaagaatggcaacgccggaaatccacccacgaaaaacgctccggaaacaaactccaatccccgcatcttggggccatagagacaacacatcaaacccgaaactgttcaagatcgcactgccgggcacttagatgttgaggccgcacttcttgtcgacaagagacaggtagcgcactttattgacgatcaggccttccaagccattgtggaagatggagagccgatgcaaccacagcatacccttatggatggtctcgtggttgagc

SEQ ID NO: 13068 - DNA, 586 bp, Glycine max
  unsure at all n locations
  Clone ID: jC-gmle01810066d08d1
cacaccccccccccccccctcccgataatttagggtagtgaggtagtagtnggaggaggnggttttttttttttttttttttttttttttttttttttttttttttttgaaccggccaccgcccccccttctccccccgccccccaccccccccccccccccccccccccccccccccccccccccccccccccccgcccccccaccccccccccccccccccccccccccacacccccccccccccccccacccccccccccccccccccccccccccccccccccccccccccccccccccccccaccccccccccccccccccccccccccccaggcccccccccccccccccccccccccccacaccccccccccccccccccacacggccacacggccaccccccccccccccccccaccccccacccccccccccggcgcgccgccgcccccccccgccccccgccacccccccccacctcccgccccccccccccacccccccccccccccccccccgccccccccccccccccccccccccccccccccccctcccccccgcctcccccccccccccc

SEQ ID NO: 13069 - DNA, 531 bp, Glycine max
  Clone ID: jC-gmle01810066d10a1
ctgcactccacttgtcaagagcttctagcattgtgatgatgattgcatatgtagtctacattgactttcaactgtggacacacaggcagctatttgaagccgaaaatgagggtgaggatggtgaggacggtgaagaacaacaagctgagattggattatggagtggcattgcttggatggtcgggatgactgtgcttattgatgagctgcctgaatatgtggtggatacaattgaggatgcatcagattcgtggggtttgcctgtgagctttctcagcataatcttgctaccaataggtggaaatgcagctgaacatgcaggagcaatcatatacgctttcaagaacaagctggacattccattgggtgttgcattgggtgcagcaactcatattgccatgtgagaggtcccattatgagtaatcgttgctaggataatgggtatcgatatggacctgcacttcaacctcctagagacaggttcgctagcattgccataatcagaacaggctgcactttacaggatgggac

SEQ ID NO: 13070 - DNA, 530 bp, Glycine max
  Clone ID: jC-gmle01810066d11a1
gcgccatgatatgtatacgaactcgaccgaatgcacgcgggcgcgagctgctaactcggctcgaggcggcctgcagcctatgctttcgcttttgccatctcgagtccaattggagtggccattggaataatattggatgccacacctcagggtcctgtgccggattgcatctttgccatatcaatgggtcaggcttgaggagcatccatctatgtatcagtaaaccatctgttggcaactgggtacgtgccccacataccatcaaaggttgactcagcctatatcaagtttctagccgtgatgcagggtgtggcagtgatagcggctgagacgatttgcgacacctcaggccggtccaagatagcttctctttacagcatgggcagaaactttgtctttctattttttccaactatttgataatgcatccgttcattacatgacaagtcgtggtagatcctaggtcaggacctggattgggatattctcgtacatatgacttcgccatcatttataggtagaaaagatga

SEQ ID NO: 13071 - DNA, 493 bp, Glycine max
  Clone ID: jC-gmle01810066d11d1
gtattacgaacaaaactcataataattattcaatcaataaagtatacacaccaccaccaaccaacctttttccccacaaggtggtataggctacatgaattaaataacagcatagcttctattataaatcatgtctacagacaaactattgatctataaattcatttctatagctttgtatatatttcttcttcggtccccctttgcctatattgatttaggctaccctccatgtgaactacccttcttcccaagacttttataagtcctcttaattctcaatacatgctcatcttttctatcatttgaggcaaatttctgtcatcttttctaccttataaatgattgacgaaatcatttctgacaagaatatccaaataccaaatctgacctaggaactaccacaactttttctgtaatgtacgtattcattatcaaaaagattaaaaaaagaaaaagaaaaagattctgcaaatgctgtaaagagaagtta

SEQ ID NO: 13072 - DNA, 558 bp, Glycine max
  Clone ID: jC-gmle01810066d12a1
gtcgtgtgcagcctatgcttttgcttttgccatctcgagtccaattggtgtggccattggaattatattggatgccacaactcagggtcatgtggcggattggatctttgccatatcaatgggtctggcttgtggagtatttatctatgtatcagtaaaccatctgttggcaaaagggtacatgccccacataccaacaaaggttgactcagcctatttcaagtttcttgccgtgttgttgggtgtgggagtgatagcggttgtgatgatttgggacacctaaggttgttccaagataacttctctttacagcatttgcagaatctttttctttttcttttttttatctttttgataatgaatacgtacattacagaaaaagttgtggtagttcctaggtcagatttggtatttggatattcttgtcagaaatgatttcgtcaatcatttataaggtagaaaagatgacagaaatttgcctcaaatgatagaaaagatgagcatgtattgagaattaagaggacttataaaagtcttgggaagaaggtagttcacatg

SEQ ID NO: 13073 - DNA, 502 bp, Glycine max
  Clone ID: jC-gmle01810066d12d1
gtattacgaacaaaactcataataattattcaatcaataaagtatacacaccaccaccaaccaacctttttccccacaaggtggtataggctacatgaattaaataacagcatagcttctattataaatcatgtctacagacaaactattgatctataaattcatttctatagctttgtatatatttcttctccggtccccctttgcctataatgatttaggctaccctccatgtgaactacccttcttcccaagacttttataagtcctcttaattctcaatacatgctcatcttttctatcatttgaggcaaatttctgtcatcttttctaccttataaatgattgacgaaatcatttctgacaagaatatccaaataccaaatctgacctaggaactaccacaactttttctgtaatgtacgtattcattatcaaaaagataaaaaaaagaaaaagaaaaagattctgcaaatgctgtaaagagaagttatcttggaac

SEQ ID NO: 13074 - DNA, 391 bp, Glycine max
  Clone ID: jC-gmle01810066e01d1
acgtggaatgaggcttataataccctatattgcttttcttcacatacgctggcagataaagtttcggaactgcagtgccctctaaacacagtcatcaaaacaccaacactataattattaaaagacattttttactcagactgcccaaacacagaaaatcctacatttagattggtgaaccctccatctaacacaagattgtgaccactaacacaccattgactaagaaatgtttcaatcttgatgaagaccgaaatggtgagatttattccaacctaaaaggtgttcatcttgtgccaaacgatgtggccgaagctgctctatatttggcaggtgatgagtcaaagtatgttagtggtcacaatcttgtgttagattggtgaaccctcca

SEQ ID NO: 13075 - DNA, 501 bp, Glycine max
  Clone ID: jC-gmle01810066e02d1
gctcgcaatctccagaggttctgaataaaaactgctttgtcagcaaaaaaagtgtgcagaaaatcatgatgatgctgtgtactaatgatgtagaacaaactttacaacttcataaaatgaaatcacaattccaacgggggggcctgctcgaccaactcgtggaccaacacccgtaaacaatcctttcaaacctccatctctccacacctccatcagtgtctgtcttgtagtcattttcaatgccctaacaggatccctctctatctgccttcgagtttttgcaacatctagtggacatgtggctccagctgctaaagttcctgcaacaaacccagctccaaaatttgccccaagaacactcaatgcattggcatcatcacctccaatcaaaccaagaagttttcttctagttggttcaagtgttgaccaacatatggcagagaagggtacatcacgggcaagttgagcccccatgcccgtccacaaaacacgataaccttg

SEQ ID NO: 13076 - DNA, 524 bp, Glycine max
  Clone ID: jC-gmle01810066e03d1
ccaaagaagaatatctcatgaattaatttcttttagtaataaatttcaagttccacagactaccgtagtagacagaactagttctgattctgataaacatacattaagtggaaacatttctactatgtcaagaatttaagaaaataaaaccaacaggaaaagggagtgcaaggaatttaagaaaatataacagggataatacatgaacatctaaacatactgggtgcccttttctacagcgaaacatgctaaagttacctcacccaaaaaaagagaagtaaaatattcgaaaccccacacgacaggaaagatatatcccctcaataagctcatgcgaacaggaaaaattatctaatttctttccaagaaaaaaaagtaagcaggaaccaacttcatgttgtgagcttgtctagatgccctcgcttaggtatacgtcgcgcatggtgagtgtttccatttcgagcacggttactcacttttttgctacagaaaacagctgacaacactctagccattaaaacaat

SEQ ID NO: 13077 - DNA, 535 bp, Glycine max
  Clone ID: jC-gmle01810066e04d1
acgccactctagaacatcattatttatttatttatttatttatttatagctcttaacacatataattccctggatacaacatgtatactggtcatattcaactctagagagctttatctgatatgatcatccttaacatattcaaagatagctaaatacttaactgtataatatatcacacaaacgtagagtgacatatatagagtaaataataaatataagtttaatttatacacacaaactatgagtatataacatcgttatccaaatattcaacaagaatttactttattaccgcatcatgttaaaatgttgcgataaagtggtgaaatcctattgaatgcttgtgtcaagatgctttgtaggatcaaagtgtgtataaattaaactgtttatctatatatatatatatatcccacactttaattataagaaggcttaattaattaacaagttggaaagggaatcccacaagaagcaacggtttttcgggcattaggagagttaacatactgcttcaagctagcgtttttga

SEQ ID NO: 13078 - DNA, 496 bp, Glycine max
  Clone ID: jC-gmle01810066e05d1
gagtggcattactactgcacaaatctggcgtagtctttaacattattggcatttacttactactagacaagtctgacaaagtcattattaacataagtcactcaccaagctgaataagttcatatgctgagatacatatactgtcaagattttgacagacgaaacataaatattaatgataacatacacatgagaaacaggtgttcagttatgtgatgatagacttcaacggttgccttgattatgatccagacagcctccaattccaggggagactttttcttcattgcaaggcttcaagcacctgatctccagcatcagctagaacattgttagaagcattctctgaggtgtctatgcaacgactgtttttaaattggtcctcaggctgggcctcaagcccttggtgagaaaattgttgattacttttcaagtcctcatctggcaagcatcccatatgaaacttctccatgttagcttctctgctttcaaattg

SEQ ID NO: 13079 - DNA, 177 bp, Glycine max
  Clone ID: jC-gmle01810066e06d1
agcattgcaattaattccactaagggggggtgcttgatacattacgaaaacaaaaagtttcttaatcacactcacaaaagccatggggttttgcatcccaaatagccaaacccggcgtgagtcccaatcccaaaatataacgccctgatttacaaatacagactatccccctaaaaa

SEQ ID NO: 13080 - DNA, 590 bp, Glycine max
  Clone ID: jC-gmle01810066e07d1
gaaaagaatcacaatatcaatatcaatatggtacatacatcgatcccatttgtgcatctatatatataaatagcccgtgtgagaaattaaaattgaaaaaaaaatgaaactctatcctagcgaattcacctgaataaaacacatcgtattttttttctttagttatttataataattcttctaaatgtaagaacaaggaagccttggtgtcgccgttatttccacttatgaaactgcggttgttcctgttccttaatccttttgaacactccttcgatggcaacatcgaaagcatcattcacaccctctaacccttgtttcgtgttcgcgtaaaccaacctcggaatgtactcaatcactttctccctcattctcctcacctactccttggtgaacctctcgagcacgtttttcacggttaaggtcccattcttcaccgcgttacggtctatgaaaaccgagtaactctccggttcacccggtaagaaccactcgtactgcaaatacgcggttcgccgtcagaaaaaaaccggaatcgaaccggccaccatgcagtcgaaaatggacccgcgcgtgaagctgtcccccct

SEQ ID NO: 13081 - DNA, 379 bp, Glycine max
  unsure at all n locations
  Clone ID: jC-gmle01810066e08d1
cgacacccccccccccccccccccccccccttgggtngtgagntantagtnggnggnngnnnttttttttttttttttttttttttttttttttttttttgattttggagaaaagcccttcccacttcaaatcgcaacccctctacaccgcttcacatcccatcggaaagcccaacacctcacacacccccccctcccccctccccccccccccccccccccccgcttccccccccccgcatgcgaccccccccccccccccctccccgcccccccccccccccccccccctgccccgcccccccccaccccccccccccccggcacaaccccccgccccccccccacacttccccccccccgcccccccccccccccc

SEQ ID NO: 13082 - DNA, 567 bp, Glycine max
  Clone ID: jC-gmle01810066e10a1
ctagccttcttcaagtgttcttcctctttaatctgtctatagaatacttacccttttgtcaagactgacctctcgatccttctcaaaagaagaaaattaaaatggcaactgaaaagcttagaggatgtgcatagtattgtgcaagctctaaaccctacttggccatgatctctatacaattcggctatgctggcatgaacattatcactaaggtttccctcaaccaaggcatgagccactatgtccttgtggtctatcgccacgcttttgccaccgctgacatcgctccttttgcctttattattgaaaggttcatagaataaacataaaccttagtgtcagcagcttgccattacactctctctttgttttgttactataaagcttagcaaattaatgcttactcattgcttcaattttccaggacaggtcaaccgaagataacattcccagttgtcatgcaaattcttatcctagctcttcttgggcctgagagtgatcaaaacttatactatgctgggttgaagctcacatccacaaccctctcctgtgcaatgagcaacatgc

SEQ ID NO: 13083 - DNA, 296 bp, Glycine max
  unsure at all n locations
  Clone ID: jC-gmle01810066e10d1
cccccccccccccccccccccccctccccgaataattnngggtnaagagntattagtnggnggnagnnntttttttttttttttaataataaaagntttatgattgtntttcctaatccgactcgcccgcccgcacctcccaccccctccaccctatactcgctcaaccgccccacccacccacccccccccctccccccccccccccccacccgcccccccggacacccccgcccccccccgcccccccccccctccccccccccccccccccccccccccccccccaccccccc

SEQ ID NO: 13084 - DNA, 431 bp, Glycine max
  Clone ID: jC-gmle01810066e11a1
aggccgttgcgaccgcttgtcgaactcacgcgaatgctcgcgggcgcaggcagctaactcggctccgggcgcacctaccctgaacatagtgaacaagccagcgctaggatatgattgagaagcactgggtccaaccatgatgctcatgtatagtgccgccatcagtttttccgtggcttggcagaaggacctctatctacaatagctgagccacagatgaaggcctaagagatctcagctccaatcacacccacttacatcatcagcattattcctttgcttcagcccgaacatacacaactctggccctcttcaaatctaagaccaaagccgtttctgttaagactacggttaccaagcctaagctaaatgatgaagatggcttctttggcacttctgggagatcatgtgttgctcaacagaacgagctc

SEQ ID NO: 13085 - DNA, 507 bp, Glycine max
  Clone ID: jC-gmle01810066e12a1
gtaacataacatcaaggtgcagagagaggaattgaagctagcatgggaagaggtaaggtggttctggagagaatacataataagatcaatcgccaagtaaccttctcaaagcgcagaaatggtttgctgaagaaagccttcgagctatctgtgctatgcgatgctgaaatcgctcttatcatcttctccagccgaggcaagctttttcaatacagtcgcactgacattaacagaatcattgatcagtattgtcaatgctgcttcaacatgtctcagactggcgacgtaactgaacatcaatcggagcagtgcttataccaggagcttttgatattaagagtcaagcatgaatcactccagcggactcaaaggaatcttctgggagaagaactagagccacttagcatgaaagaattgcatagtttagagaaacagctggatagaacgcttggacaagctcggaagcacctaacgcagaagctgatatcacgaattgacgaattacat

SEQ ID NO: 13086 - DNA, 334 bp, Glycine max
  unsure at all n locations
  Clone ID: jC-gmle01810066e12d1
cgccccccccccccccccccccccgaataattttgggtagngaggtattagtnggnggnagnnntttttttttttttttaaaaatattaatattatttttttaaaacccccccccatcacacataccctaaccaagcccccctggcccccccactataccctgacccccgagagccccccccccctccccccccgccccccccccccccccccccccactacccccccccctctccccccaccccccccgcccccccccccccccccccccccccccccccccccccccctcccccaccccccccccccccccccccgcccccccccccccccc

SEQ ID NO: 13087 - DNA, 467 bp, Glycine max
  Clone ID: jC-gmle01810066f01d1
gctcgcaatctccagaggttctgaataaaaactgctttgtcagcaaaaaaagtgtgcagaaaatcatgatgatgctgtgtactaatgatgtagaacaaactttacaacttcataaaatgaaatcacaattccaacggaggggcctgctcgaccaacttgtggaccaacacccgtaaacaatcctttcaaacctccatttttccacacctccatcagtgtctgtcttgtagtcattttcaatgccctaacaggatccctctctatctgccttcgagtttttgcaacatctagtggacatgtggctccagctgctaaagttcctgcaacaaacccagctccaaaatttgccccaagaacactcaatgcattggcatcatcacctccaatcaaaccaagaagttttcttctagttggttcaagtgttgaccaacatatggcaaagaagggtccatcacgggcaagttgag

SEQ ID NO: 13088 - DNA, 566 bp, Glycine max
  unsure at all n locations
  Clone ID: jC-gmle01810066f02d1
acttgagtagacaacttgaaacttttacatcattattcattaaaaaataatttaactttctgatgggggcagcacaacagtgacacctcgatcgcttcttaagcagaggcatcactgtgcacaagaaattttagcatacattacatagccctgtttaaaaagggctaatagaataaataaattatgttatggactgaaaaatacttgtaatgaataaaccatcaatatcatccttaaaagtattacactctctcctaaataacccacaaagtaaaaatggtacaagtaatccttcaagtatcataaatcatactaaatagtctcccaaatatcggaaaattcttcaaattagtccctgaatgttagtatagtatatcagtttagggactaaactgatgaatattcaatacttcagagattacttatataatttcattagtttaagggctacttaggagagagctcgagggaccaaattgatagtttattctaaaataataaaatatatctgacaattattctagaatatgggnatctatattattcctttttcttgatttttctct

SEQ ID NO: 13089 - DNA, 525 bp, Glycine max
  Clone ID: jC-gmle01810066f03d1
atataagtatccgtccatgttgattcaattttatgatttaatgcattgtgttgtggctatcggttagccatattcttcatttgtccttcaaatgacaaaacgaatgcaaacattgtacaatcccatggtgtacttcaaaagagaatacaatgtcctgcactactttccaagaagtaccactcaaaaactagattcctcagttgtcggacgcctcaagaaatatctcaagctgttagcaagaacctgctggagaggcttggagattgctttaccattgtagcttacatgaaactttgccttagccaagagcccctcagtgtcaaattctccggattcaacagcaatgttaatgtcagtaataatctttacaagatcaaccagtaatccaggccgatcagctgtctccacatacagcaagcttctatctgggcaatcatcagaaatgtttatgtgggttgctatgtctacgtcaacctgctcttttggaggcagaagcccaaaagctgctcccaatgctaaccggga

SEQ ID NO: 13090 - DNA, 436 bp, Glycine max
  Clone ID: jC-gmle01810066f04d1
ggggggaaaaaacttttccatttgcctttattagagaacaaaattgaaagaaaaaatggaataagttttttttataaactaaaattagcttattaaacttgggtaaaaaacttattttaatttatgcctaaacaaattttattgggcagcaaaaactaatttcttttataattatttatacagaaacttttcctttgggaacttgtaatagaggtgaaacaaacaggtcccacttaaaagggctagaatttcactccggaactcctgaaattgcaaaagatgatgacttttaatagcggtcaagcaaggataggaccttggcagcttttttcctaagggggccatccccatatatattcatgcccgggagaccaataaaacgcgagctagcggtgggtccataagattttaccattttctttggacaaacaccttt

SEQ ID NO: 13091 - DNA, 375 bp, Glycine max
  Clone ID: jC-gmle01810066f05d1
gagagacaatagtggtatgtaacattataggcagagaggcataattgaaattgccgcagactttatcccgaagcgaccggggacgaaccattaaaaagacaaacaggaagcggccatgtgctgagcacgccaatgacacgtacaaaacacttgaacttgctgaaaggcaggacacgaccacattattcaagggatggggggtgaacacagaacaccagagtggacgagaacgatcacagacctcgtacagaggcttttagcttcacaatgaggaggtaagggtattcctgactaagggctctcgtggattgaagctggatatgccaacacggcaattccaattgagggggttgcaggagcagatagtgccacatt

SEQ ID NO: 13092 - DNA, 347 bp, Glycine max
  Clone ID: jC-gmle01810066f06d1
ggggggcccccccggttttaaaaaaaaaaattgggggcctttcggaaaaaaaaaaaactttccccttgggtaaaaaaaagatcccccaaaaatttattaaattccccccctttttacagggagccctcctgcaaaagtttgggggggccctttttttctttttaaccatatctttccccccccaaagtaaggaccccctttaaaaaagggccccctttggtttttttgggggggacttttttaaaaactccttccctccaaaagtgccttttgggttttttttggggggccccccccaaaaggggggtttaaacccttcccccccccttgggccccttatttttaag

SEQ ID NO: 13093 - DNA, 142 bp, Glycine max
  Clone ID: jC-gmle01810066f07d1
ttgtcgttctttttttttttttttttttttttttttttgattttggagaaaagtaatttccacttcaaatagaagttatctacaagtattcacattgaattggaaagtaaaaacatcacaaaaacatttttatacacatata

SEQ ID NO: 13094 - DNA, 325 bp, Glycine max
  unsure at all n locations
  Clone ID: jC-gmle01810066f08d1
ccgcgcccccccccccccccccccccttgggtngngagntantagtnggnggnngnnntttttttttttttttttaaaggaaagaatttnaatttaatngttttaaaaacagccacccccgccgcgacacgccccccccttccgctcacaaaaccccccctcccgcccctccgctcccgcacacccccccccccccgcccccccccccccccccccctcacccccccccccccccccctccccccccccccccccccccccccccccccccccccccccccccccccccccccccccgccccccccccccccccccccccccccc

SEQ ID NO: 13095 - DNA, 344 bp, Glycine max
  Clone ID: jC-gmle01810066f09a1
aatcatcgctatcgactactgctccaattcgaaggactatcgtctttctcctacccaaaagaatataatttctatggcacccgataattttacctgatcgtgccaccatgtcgaaagacctctactatacttggccactgaaaaacttccatgggggatgcagagcacgacgaaatgtacattgatattcgtaacacatgctggagccattgtgttcgggtgtcttatcaccacgcttagaacgccgcacatatactgtggcttcgcaagcaatcctccagggatatccttacagccccacatgtagggacatgactgtgtacccactctatctctgtgtttgg

SEQ ID NO: 13096 - DNA, 534 bp, Glycine max
  unsure at all n locations
  Clone ID: jC-gmle01810066f10a1
cgggcgttcanatcgcatacagaacccccgaataattccggcgtcggctgcgtactaggctcgaggcagccacgaacaccagataacaccaccgaaacacctcacggcctggtgcctatatcgacaacacccacattatgtggcggccaacagcagcagaggcgatcgcgtcactgctcacattaccctcagctctcgccgagatcagcctaagctcccagaagtctttcgctcgcactgagaacctgtgtgcgtccgacccctacctgtccatctacggagacaggcccgacgatggccctccttgtttcaactgtaaccttgacgacttcacgtgtgttcagcttgccaactgtaccaaaagcagcggcaagtgctcctgtcctactggatttggtggagaggactgcagtcagccactctgtggatctctccccgaaggaaaggacaggctatcaaggcaagggaaagagtgcgaatgacatgaatgatgggagggaataaatcgcaatgttagcacgacggacaacgcat

SEQ ID NO: 13097 - DNA, 570 bp, Glycine max
  unsure at all n locations
  Clone ID: jC-gmle01810066f10d1
cagaaaaacttcatatatattctctcacatctattccaagaaacctacatttacacatgaacatcctacatcactcttcaacacccacaagtcaatagcttcccctcatctcaaacaacacaattatcttccccactcatctcctctccacaagcaagaaatgcaacgccgcaaatccaagcacgaaaaacgcacccgacacaactcccaaccccgcaacatcacgccacagcgccaacacatcaaaaccgaaactgctcaggatcgcactgccgggcacttcgatgttgaggccgtacttcttgtcgacgagagacaggtagcgcacttcattgacgatcaggccttcgaagccgaagtggaagatggagagcgattgcaaccacagcagacccttagggatggtctcgtggttgagcaggaagccgccaaagagcagggagaagagcatgacgagcacgccgagcaagttggctacgccctggttgcggacgacgatcccgaggaacaggcagatcatcgccgcccgtaggttgaagagcacgaggaggagcatgantttgccgaact

SEQ ID NO: 13098 - DNA, 520 bp, Glycine max
  Clone ID: jC-gmle01810066f11a1
tgctctctcaatctctcacgtagctctctcactctcacactgatccaactccaccacaagtcagagaatccgcagatttggccaaagaatctgtagatctgacatccaaagttttaaatacactatcccctcccacctcctcgatcgtgtgtattgtgaacatcactgccacggtcatcgtcactagagtccagtgctagcttttggagcactgtgccaaattatgtcgtgccgctcatcgtcgattcagattcacaatgctaaaaacctgtcataattagattcacagtttttataaatcggtctttgcaatcgacaatctctttcttttcttttcgggtttagggatttagtctgattcctctgtgtttcttgttattgtgcaggcattacttgcgttttctttgaatctgattttggtactattaccaaatccaaagaggctgcgtgggatttcctcaagcttgaaatatttggcaccgatatgtaatggtatctttctaattctataatactatat

SEQ ID NO: 13099 - DNA, 317 bp, Glycine max
  unsure at all n locations
  Clone ID: jC-gmle01810066f11d1
cggcgccccccccccccccccccccgaataattttgggtngagaggtattagtnggnggnngnnnttttttttttttttttttttaagtagtgaaaatnataaattcacctcatccccacctactcacgacccggcatccatattccaacaccgccgctcaccccgccccgaaaacccccccccctcccccccccccccaccctcccccccccccccctcctccgggcatcgctcccccccctcctccggcccgcccccccctcccccccccccctccccccccccccccccccgcccccccccccccccccccccc

SEQ ID NO: 13100 - DNA, 342 bp, Glycine max
  unsure at all n locations
  Clone ID: jC-gmle01810066f12d1
cgcgccaccccccccccccccccccgataattttgggtagngaggtattagtnggnggnngnnnttttttttttttttttttttttgaaagttaaaagagagtggcccaatgccatcaatcccggcctatcttgcacctgcacactcgccctcggccactcatcccaccaaccccacccccccccctccccccccgcccaccaccccccccccccccgcgggccgcctccaccccctcccctgccccccccccccccccccccccccccccccccgcccccccccccccccccccccccccccaccagcccccccacccccccccgggacccctcccccccc

SEQ ID NO: 13101 - DNA, 477 bp, Glycine max
  Clone ID: jC-gmle01810066g01d1
ctccttgaatttgataaaataattattgattcttacagtgtacaagtcagagcgtattttatagtacaaacataattctgtgacttgcgtgtatgattatgcaacatataattcggcttttccatcaatgaatagactcatgaactcttcaccatccacagtttctttttctatgagaagttgagcaagcttgtgaaggatatcaatgtgagttgagataatatgtgttgccctagaatatgctctctctaccagttccctcacttccgcatccactacatccgcagttgccatggagtaatccttttgcgatgacatctgttgacccaagaatggatttccaccaggtccaccaatggcaacttgtccaatttttttgctgaatccaaatcttttaaccatcttgctttgcacttcgtgaaacttgcatgaagtcgtttgatgctccggtggtgacatttttctggccaaaaataa

SEQ ID NO: 13102 - DNA, 458 bp, Glycine max
  Clone ID: jC-gmle01810066g02d1
ctccttgaatttgataaaataattattgattcttacagtgtacaagtcagagcgtattttatagtacaaacataattctgtgacttgcgtgtatgattatgcaacatataattcggcttttccatcaatgaatagactcatgaactcttcaccatccacagtttctttttctatgagaagttgagcaagcttgtgaaggatatcaatgtgagttgagataatatgtgttgccctagaatatgctctctctaccagttccctcacttccgcatccactacatccgcagttgccatggagtaatccttttgcgatgacatctgttgacccaagaatggatttccaccaggtccaccaatggcaacttgtccaatttttttgctgaatccaaatctctcaaccatctgccttgccactcgtgaaacttgcatgaagtcgtttgatgctccggtggtgacat

SEQ ID NO: 13103 - DNA, 455 bp, Glycine max
  Clone ID: jC-gmle01810066g03d1
tcttttttttttttttttaaaacagattacgatagattttgatataaattacttctatagaattatttttgaactacaaataatcacgcaccaattacatcaacaatgcatccaatcagttttatgtgggatttacaaccatttcagtcccaacaaaaataaatttatgaactgatgaacaaaagatttgaccctcaagaaaacctacaagtcaaagaaattgcagatttcagctcgagtttgctacatttaaactatacacatcgaagtctcaatcttctagaacgctgaatgaagtatttcttgatcatatggacatataagtggcgattacaaagtaacccaacacaaggttgaacaacatttgttggtttgacatgccatcaatcatcaaagttctgaacatctagagattacagtaactctcttaattccagtcattcagtaacataatt

SEQ ID NO: 13104 - DNA, 520 bp, Glycine max
  Clone ID: jC-gmle01810066g04d1
aaaaaatccaacccaaaatttgaacacaaattatagtaaaagcaaaccaagccaaaatttgaacacaaattataaagaaaaagcaaaccaagccaaaaattgaacactacaaatagaaagttgacatttaataaaccaaagcaacacaacgcagcaaagtcctgaaactcgctgcgcttaacaaaaatgtaatcaggggttccgacaaacacaacacattaaaacacagataaataaaagcaattttgccaccgtcgatcaagaacccagttctgggaacaacagttgcgagatgatggtggagacttcaaactttgtccgaaaaacaagctacctagaaaagaagacacaagagtacagaaaagaaaccaacatttattgtaaccaacatcccctgatgaaccagcccgcacgattcacttcttcttctgggcagccttggtgaccttggctccggtaggatccttcttctcaacgttcttgatgactcccacagcaacagtttgacgcatgtccctaa

SEQ ID NO: 13105 - DNA, 165 bp, Glycine max
  Clone ID: jC-gmle01810066g05d1
aaagtacacaaaattatactacattcattcatgtccctagaaaacagaatatgtcctgctctaaagcattaatgagaagatgcaatcaattacacttgcaaaatcataagcaaacatattattaacataaaccattcggataggctaccccaacaaaattactat

SEQ ID NO: 13106 - DNA, 642 bp, Glycine max
  unsure at all n locations
  Clone ID: jC-gmle01810066g06d1
gtgctccttgtccacaattgcatgtccaaatatacactataagtaaaatatgtttaacagtaggagtaaaacaaattacaaaacacagaaaaacaagttttccttgttctccttgcccacatggccaagagtctgaacaagtaagaaatataagaaattatgaaggcaaaaatagcagaatgattcaatggccccgtttaatcccttcatttattggagacatttattccaaattccaatccaacacagaaattggtgaattttccccaagttccactctcggcagtatagttctgcaaaagtagcactttcacattctggccttagcaaccacaatactgcctctatcaatttctacagctcctggcctagtccatgattctttaaactgctcttcagttactccttttcccattgcagcagttgaagccacacctccctggacagtcttgagatacctatcatagtagttagcaccagcccatttctggtgagcaagtgtgtcaaccccattgttcctctcctctctctgaatcctctccacataagctagcattcccctattgcanaatcccttgcanatgtngaagtatgagtgcattagatgcagccctccactgtgatgactgcacacatacccaa

SEQ ID NO: 13107 - DNA, 484 bp, Glycine max
  Clone ID: jC-gmle01810066g07d1
agaaggtattaactaaaatttattggattttataataattacttcaaaatagtttcgaatactatccattttttaaaattaaactcttaaaagaagcaatacatctcattgggttaaagagggggggaaaacaaacattattttttggaaaatccaataccgggggccggagccaattgttttccccccggggcttttttttgacaacattgaaaagaacaaaagaacaagcgcacacgaacactcgctcataatatcggtactttcttcaatatcactggatacttcaaatgcttcatcagtttccaaatccccggattcttctgaactggcatcctcatagataactggcactggttgacctttatttactttttcataagcaacccctgtgttatgaatgtctacccaacttgacaaatgaacggccgattcaaaaggccaaactcttgattcaatcagctggtacaatgagttcaaaaca

SEQ ID NO: 13108 - DNA, 637 bp, Glycine max
  unsure at all n locations
  Clone ID: jC-gmle01810066g08d1
cgnccccccccccccccccccccctcccccccccccgaattaattnttgggtngaagagggtantagtnggnggnngnnnttttttttttttttttttttttttttttttttttttttttttttcccccccccccccccccacccccccccaccgccccccccctcccccggcccccggcccccccccccccccccccccccccccccccccccccccccccgcccccccccccccgcccccccccccccccaaccccccccccccccccccccccccccccccccccccccccccccccccccccccccccccccccccccccctcccccccccccccccccccctcccccccccccccccccccccccccccccccccccccccccccacccccaaccccccccccccgccccccccccccccccccccccgccccgcctctccgccacacacaaagacccctcccccccccccaaaccccccccccccgcgccccccccccccccacccccccccccccccccccaccccccccccccccaccccccccgcaccccccccccccccccccgcctcccccccccgcccccgcccccccctcccccccccccccgcccccccccccaccccccccc

SEQ ID NO: 13109 - DNA, 371 bp, Glycine max
  Clone ID: jC-gmle01810066g09a1
agggcatcatattgctgacgtacccaccggaatgaccgccggcgcgaccagctcactcggctgggggcgccctttttcattgattcaagtgagaagcatctacatatgactagagatgccagagtcaggcacgctgagaactaatatacacagcgcttaatcaggaccataaacttgaccctatattggcgacacaggacaacctgaagtgtgtggctcaggcactcgtgtttcaaacggcggtttacgttactattaccgagcctgaatgacgtggcggaggaaccttgtactagaggatcatcggaccgacgttgttctaaaacataacattaaatcggagatggcggcataagcactatctattcttt

SEQ ID NO: 13110 - DNA, 652 bp, Glycine max
  unsure at all n locations
  Clone ID: jC-gmle01810066g09d1
cccacacccccccccccctccccccccccccccgaattaattntagggtggtgagntattagtaggnggnaganntttttttttttttttttttttttttttttttttgttttttatttttgttccccgcccccccccctccccccccccccccgcccccccccccccccccccccccccaccaaacccccacaacccccccccccccccccccccccccccccccccccccccccccccccccccccaccacccccccccccccccccccccccccccccccccccccccccccccccccccccccccccccccccccccccccccccccccccccccccccccccccccccccccccccccccccccccccctcccccccccccccccccccccccccccccccccccccccccccgcccccccacaccccggcccccccctccccccccccccccccccccccccccccccccccccccgccccccccccacacccccccccccccccggccccgcccccccccccccccccccccccaacccccccccccccccccccccggcgccccccccccccccccccccaacccaacaaccccccccctccccccttccccccccgcccccccccgccccccccccccccccc

SEQ ID NO: 13111 - DNA, 189 bp, Glycine max
  Clone ID: jC-gmle01810066g10a1
gcgccatttgtcttttatccatgtggacacatcactcgtgactagatatggcggagtgagcctcgctgagatctaatatacgcagtgctgtatcaggaccataaagttgacactttcttgtgcagacactggacatcttagaagtgtgtcgctcaggcacttgcgttttaacctgctgtttacagcact

SEQ ID NO: 13112 - DNA, 437 bp, Glycine max
  Clone ID: jC-gmle01810066g10d1
atccgtatatttttttatttgaaaaatagactaattgtttttttttgtactattggaggaatgttttatggtgaaaacaaaacaacaaacaccttgtatttttagcggcgaaattgaaaatggggcatgcgcttactactttacagggtgtgcctatgacaaaatattactaccggtaagtaatccgcaagggctcctgttttttttatcctcgcttggaaaaccctgcttttgttatcacacccggtgcctggcacccactttcactatcaatgggggacccgttgagaataagtatctaacctaagtaactcatttgcttttcgaaacgggaagggagacgccttattctgtctaccactcaatgtccgaactcttttgaggagcaccacaaaccttttgttgagcccaaggaataccactgtatttcgtatcat

SEQ ID NO: 13113 - DNA, 542 bp, Glycine max
  Clone ID: jC-gmle01810066g11a1
gtgattatagactatctttatataataatataaataagaataaaaaaataaaaaaaaaaaaagaatctatataaatataaaaataatatatataaggtacaaatagtaaatcgaggtacccattttatgataaactttccttccatttttgttcctctagtaggcctagtatttccggcaattgcaatggcttctttatttctttatgttcaaaaaaacaagattttttagatacagaaaacaaagtaaaattctggggttttttattccccaattataatactaaattcaaaaaaaaggagagtaatgagtataatctttcgctcagacgatgtactgatatattctatggcggaggttcgaagaacaagcaatttattttgggccgttttcactttgttaggttcattggggttattgttcgttgcaatttccagttatcttggtatggatttgttctttatttctgagaaaattagtgatttttcttttattccggactttatttattttccatttattccacaaggggccacgatggc

SEQ ID NO: 13114 - DNA, 505 bp, Glycine max
  Clone ID: jC-gmle01810066g11d1
attgaagatatcaaaaccaccacctatatcccaaaaaataatcgacccaaaataaaaactactaaagagacccgcgattccataaaaagccatcgtggccccttgtggaataaatggaaaataaataaagtccggaataaaagaaaaatcactaattttctcagaaataaagaacaaatccataccaagataactggaaatttgccacgaacaataaccccaatgaacctaacaaagtgaaaacggcccaaaataaattgcttgttcttcgaacctccgccatagaatatatcagtacatcgtctgagcgaaagattatactcattactctccttttttttgaatttagtattataattggggaataaaaaaccccagaattttactttgttttctgtatctaaaaaatcttgtttttttgaacataaagaaataaagaagccattgcaattgccggaaatactaggcctactagaggaacaaaaatggaaggaaagtttatcat

SEQ ID NO: 13115 - DNA, 494 bp, Glycine max
  Clone ID: jC-gmle01810066g12a1
tgattttccaaggtaaaagagcccccgaccaatgatataaatactaccgttgctttagctttacttacatcaattgcatatttctatgcgggtctttcaaaaaaaggattagcttattttaataaatacatccaaccaaccccaatccttttaccgattaacatcttagaagatttcacaaaacccttatctcttagttttcgacttttcggaaatatattagctgatgaattagtagttgttgttcttgtttctttagtacctttagtagttcctatacctgtcatgttccttggattattcacaagcggtattcaagctctcatttttgctactttagctgcggcttatataggtgaatccatggaaggccatcattgaccagttttctacaaaatagtcctttttcgtttagcttgccgcacatatattgcggctcaatataatctacttagcaaacatctatatctatctacctatatctatatagatat

SEQ ID NO: 13116 - DNA, 657 bp, Glycine max
  unsure at all n locations
  Clone ID: jC-gmle01810066g12d1
cccaccccccccccccccccccccgnanggnaagaataattttgggtagaagagntaantagtgggaggnaggggttttttttttttttttttttttttttttttttttttttcccccccccccccccctcttccccccccccctccggcctccccctcccccccccccctccccccccccccccccccccccccccccccccccctccccccccccccccccccccccccccccccccaccccccccccccccccccccccccccccccccccccccccccccccccccccccccccccccccccccccccccccccccccccccccccccccccccccccccccccccccccccgcccccacccccaccccaacacggcccccctccccccccaccaccccccccccccccgccgcccccccccccccggccccccccccccccccccccccccccccccccccccccccaccccccccccccccccccccaccccccccccgcccccccaccccccccccccccccccccccccccccccccccccccccccccccccgcccccccccccccccacccccccccccccccccccccccccccccccccccccccccccccccccccccccacacccccgccccccccccccccc

SEQ ID NO: 13117 - DNA, 392 bp, Glycine max
  Clone ID: jC-gmle01810066h01d1
ctccttgaatttgataaaataattattgattcttacagtgtacaagtcagagcgtattttatagtacaaacataattctgtgacttgcgtgtatgattatgcaacatataattcggcttttccatcaatgaatagactcatgaactcttcaccatccacagtttctttttctatgagaagttgagcaagcttgtgaaggatatcaatgtgagttgagataatatgtgttgccctagaatatgctctctctaccagttccctcacttccgcatccactacatccgcagttgccatggagtaatccttttgcgatgacatctgttgacccaagaatggatttccaccaggtccaccaagggcaacttgtccaatttttttgctgaatccaaatc

SEQ ID NO: 13118 - DNA, 462 bp, Glycine max
  Clone ID: jC-gmle01810066h02d1
cattcgaattcattttatttatatattaatattatatgcaaatgaaataaaaagatattaaaagatactaattataagaatttgaaagtgaaattataaagttattaaatgattaatcaatttttttctacctgttcctgtagtaaaaagagttccatctgttcttgaatagcttccttcaaaaggacttctgcttccccagtgaatgtcttggtagaagatatgatttctttgaattgaggtttattcgtgtttaagtaagcacgtaactcaacaagaaatttccttacctgtccaatttctaatgaatcaagataaccattcgttccagtataaatagttattatctgttcttccacggtaagaggagctgattgggattgtttaagcaactcgcgcaatcgttgacctattgctaattgattttgagtagctttatcgagatcagaagcgaattgggca

SEQ ID NO: 13119 - DNA, 446 bp, Glycine max
  Clone ID: jC-gmle01810066h03d1
gaacaaacgtactgaacgtatatttattatataactgaagaacaagtaaagaaaacacacatgttaatgtcataaatatatctttatttaagcataggttttccatatatatattattgtgttcctttcaaactttcgatcaaatttgtttcacaaagatcctacttaagttgattggaagaatttgtgtgtctggttggcagaaacttctccctcagttcagcagcatcaacctgtccaaagtgattctcaggaatccaatttccactcttaggatctctcatccaaaacttttcctctttaatattaatgacattatcggatgctgactttgacttcatcggtgggccttctatttgcttccttaaactttccgctacaacaacataacatctcttcctgcacctgagaagaaaagaaggacagacaagaatgttggccatgat

SEQ ID NO: 13120 - DNA, 427 bp, Glycine max
  Clone ID: jC-gmle01810066h04d1
agttattccgatattcggacgcatcaacttgttatgaaatcacattgatagcctctactcgtgtcctagctcgtctaagagctagatttgcctcaattgtttgtctcttgccttccgccttattcaaattagcttctgctatttcaagagtttgctgtgcttcttgtggatcaatgtcactacccttttccgcatcatttactaaaacagtgatctcattattgtttattctagcaaaaccgcccatcagagccatcgttaaccattggtctttaagaagacgtattctcaaaatacctatatctacggctgtggcaataggcgcatgatttggtaatactccaatttgtccgctattagtagataaaatgatttccttcacttccgaatcccaaacaattcgattgggggtcagtacacaaagatt

SEQ ID NO: 13121 - DNA, 474 bp, Glycine max
  Clone ID: jC-gmle01810066h05d1
gtgctccttgtccacaattgcatgtccaaatatacactataagtaaaatatgtttaacagtaggagtaaaacaaattacaaaacacagaaaaacaagttttccttgttctccttgcccacatggccaagagtctgaacaagtaagaaatataagaaattatgaaggcaaaaatagcagaatgattcaatggcccgtttaatacttcaattattgaggacatttattccaaattccaatccaacacagaaattggtgaattttccccaagttccactctcggcagtatagttctgcaaaagtagcactttcacattctggccttagcaaccacaatactgcctctatcaatttctacagctcctggcctagtccatgattctttaaactgctcttcagttactccttttcccattgcagcagttgaagccacacctccctggacagtcttgagatacctatcatagtagttagca

SEQ ID NO: 13122 - DNA, 423 bp, Glycine max
  Clone ID: jC-gmle01810066h06d1
ggggggaacaatttgaaaaccccaaccggggtgtttaacataaaaaaaattttgcccttatacaaattaacgggggggcccctggcttaacctttaattttaaaaagaaatccccccgaagggctttttccttaggggggggaaatttttaaaacctaagggggggccatcaaaaagaattttattttttatttgggccaaacaacaccccaaaccccaaattttttttcccggccgcaataatctaaattgaattgaattggtccgggggggaattaaggtccccttgccaactcccaaaaaattccctgggcgaagggttgacttgggccctacaaaaattaagggttttaagcgggtttccggggggcttggaaaaccccacccccgggaccttgggggcccccttaaaaacctcccccg

SEQ ID NO: 13123 - DNA, 362 bp, Glycine max
  Clone ID: jC-gmle01810066h09a1
gtcagatgtaacatttatccatctggacagtacacagatgaatagatatggatgagtttggaacgttgtcaactaaccgatgcagtggcttctaagcctgagaaactagacacttcagtggttgataatggagatcactggagtgtggggcagatgcagttgctatgtttagggagggctatgcttatgcaaaataggctggtgtttatggatgaggcaacaatttttgttgattcccataccgatgctgctatttataagatcataagagaggactttgtagatcgtaccatcatcagcattggtcatataataccaacgcgaatgggctgtggataagtactagtcggagatgcagggtg

SEQ ID NO: 13124 - DNA, 625 bp, Glycine max
  unsure at all n locations
  Clone ID: jC-gmle01810066h09d1
ctccccccccccccccccccccccggataattttgggtnaagagntantagtnggnggnngnnnttttttttttttttttttatttgtataataatttaattgaaacatcccactccctcgcccccccgccccccccacccccccgcccgccccccccggcccccccaacccacccaacgcaccccccccccccctccccccccccccctcccgcaaccccgcccccccgcccccccccccccatccccccccccccgccccccccgccccccaccccccccccccccccccccccccccccccccccccccccgccccccccccccccccccccccccccccccccccccccccccccccccccccccccccccccacccccgccccccccccccccccccccccccccccccccacccgccgccccccccccccgaacccccccccccgacccctcccccacacccccccccgcctctcccccccacccccacccgccgacccccctccccccctccccaccccccccccccccgccccgccacccctccccccccgcagcaccccaccccaccctccccccccccgacccaccacgcccctccccccactcgtccccccccc

SEQ ID NO: 13125 - DNA, 445 bp, Glycine max
  Clone ID: jC-gmle01810066h10a1
ctgaagttgactgactagtttggtgtggtgtctgttgattaacattacattgcctgccgactagtttacggtatcagcaatagcaagtggctcacacacgcacagatctgatctatctgaagctgaaaacgccgacgcccgacggtgatgatgaagatggggtcctcaccttcacgttgctccttcttcctattcctcctcctcctaggggcgctcttcccctcgtcgctcttcgagatccggttctccgagatccgaaacgacgatcgctccatcgttcccttcgatcagtttggattcacccacaagggtcgccttgagctcagcgtttccaaaatatcactctccaattccaatttggacctctccaaggtgggattcttcctctgcaccctggattcctggcttcatgtcttccagcaactggaggatggcgagattccgt

SEQ ID NO: 13126 - DNA, 379 bp, Glycine max
  Clone ID: jC-gmle01810066h10d1
ggcaggggatcaggttctatacttaaaaataatatttgttcaaagccctacacaagggtttaggattttataacactaatgcaaaaactggcttgagtccaaaacacaaaattttgcccaatgatttatgaataatgacttttccccaaaaaaggaaccaggcaaatttctcctggctgttgagatgaaacctgaaagcattgctgaacatggtaccaacttgttcaacaactaattttgttttttgaaagaaattacaattcaaattcattttcaagcttaaaggcctctggggaagccttttccttttcgtgatcgaagacaaaatacggattgggagcctttggcttgaacttgtacccagtaaagaaataaaaag

SEQ ID NO: 13127 - DNA, 577 bp, Glycine max
  Clone ID: jC-gmle01810066h11a1
gaaacaatgggactgttgcactgactgtaggggttactgtatgctagctagagaggaagaacgaacaaaacttggcgacaagcctgtcaagtatcatggaaaatggccattccgtcgtgtttatggaattcaggaacctgtggctgttgctctgtctgccgtcaatcttgctatgcagtttcatggttgggtatcttttttcattcttgtgtactataagttgactttgaggccagataagaagacttactatgagtacactggattgtggcatatttatgggattttatccatgaacgcatggctgtggagtgctgttttccatagtagagccgtggaattaacagagaagctggatttttcttctgctgtggcattacttggattcagcctcattctagcaatattgcgagcttttaacgtgagggatgaggctacgcgagtcatgatttctgctcccttgattgcttatggacaactcatatcatgtatctgaatttctatgaacttgcttatggtttgaacagaatagtttgcacgggaatgggtgttgcccacttcttatttgggccttttg

SEQ ID NO: 13128 - DNA, 553 bp, Glycine max
  Clone ID: jC-gmle01810066h11d1
gaacaggtgtataaagcattgcaattaattccactaagaaagtatgcttcatacatgaggaaaacaaaaagttacaaaatcaaaagcacagaaaccatcgtgttaagcatttcaaataaacgcctacacgaggaaaacaaattttaaaaaaaaaagttctgatgtacaaaaacaaagtaagcagcaacatatttgacatgttcttcatcagatccaacctctgccaaattgtgtctgcagcactattttaccttcttgagcatagctgtggttctaaactcagcatcatcccttataaaaccccaccaaaaaaatgtgagaggaatgcttgttgcatgccatagagcatgagcatccacatatcccatgtaaggtggaaagtcatatgtctccaacaccatagctaagcctcctccaaccactactgcccataatttccatcgcgccgggtggttcgaagcaccagcccaaatggcccaaataagaagctggacaacaaccattcccgtgcaaactattctgttcaaaccatatagcagttcatagaaattca

SEQ ID NO: 13129 - DNA, 541 bp, Glycine max
  Clone ID: jC-gmle01810066h12a1
gtaggctatactaaggtgaaaaaggagagatggcagctgcaacatctagtgctgtgttaaacgggtttggatctcacttcttgtgtggaggaaagaggagccatgcccttcttgctgctagcattggagggaaagttggtgcttctgttagtcctaaaagagttattgtggcagttgctgctgcaccaaagaagtcatggatccccgctgtaaaaggtggtgggagtttcatagacccagaatggcttgatggctcgtaagttcaaccatctatctattcaatttatctcttgtttctcctttctttcttatattctttgttggaaattcaagtatgagtaattagtctcactcacattagtcaggaaatggctcaatgatagtgtattttaaactgtaacttgtttcttatatataggaccagaagtagtatgtcttaaggttttggataaagaaatagagtttgattttcttgataatcatagtcattacattagccagttaagcctccaagagtgttaagagtttgatggattcattt

SEQ ID NO: 13130 - DNA, 641 bp, Glycine max
  unsure at all n locations
  Clone ID: jC-gmle01810066h12d1
cacgtcactccccccccccccccccccccgatttantgttaggtagaagagnntantagtgggaggnagnnnttttttttttttttttttttttttttttttttttttttttttccctcctcctctcccctctcctccttccccccccccctctcccccctcccccccccccccccccccccccccccccccccccccccccccacccccccccccccccccccccccccccccgccaaccccccccccccccccaacccccccccccccccccccccccccccccccccccccccccccccccccccccccccccccccccccccccccccccccccccccccccccccccccccccccccccccccccccccccccccccccccccccccccccccccccccccccccccccccccccccccccccccccccccccccccacaccccacccccccccccccccccccccccccccccccccccccccccccccccccccccccccccgccccccccccccccccccaccccaccccccccccccccccccccccccccccccccccccggcccccccccccccccccccgcaccccccccgcccacacccccccacccccccccccccccccccccccc

SEQ ID NO: 13131 - DNA, 421 bp, Glycine max
  Clone ID: jC-gmle01810067a01d1
gtgaacagcctcaaatatatccaactctgattgactgcgggctaagacatcggttagagcatcatcgtccaaaacaggtgcagcgtatttttttttacactcacgcaggagtgcctgcaagtattctcttcgatcttgagcactagtattattgccgaaaaaaccagctgtagtgctctgtatagcaactccaaggttgtgctcagccgaagccctgactagatcttcaacagtgtgaatccggttaaaccgtataacaagaacattcctgtattggccaattctatgagcccttgctcgagctcgcaaatcaacactgtggattccagtcagggtcaaatgagatcactgggtgagcagactgaaaatttgctccaacaccaccagcccgaatgctgagcgagaaaatcaaatgtgggga

SEQ ID NO: 13132 - DNA, 111 bp, Glycine max
  unsure at all n locations
  Clone ID: jC-gmle01810067a02a1
ccgcgccccccccccccccccccccccatgangtnngatggangngtaagtaagntaggaattnggttggaggggatttntaaaggtttgataattgttttntnattttag

SEQ ID NO: 13133 - DNA, 498 bp, Glycine max
  Clone ID: jC-gmle01810067a02d1
ggaagggggggaattaccaaatgtagttgcatttttttgctgtcatataatgtatagaaataggaacaacttatatcttacaagtcgattttgtaaaattgaattaaactcaaagttacatctaaaatgatattaaaatctatattagtgagtgttgttgggtctgtcgtgttacccgttattggactacgtgcaaatgttcaacaaacttcatgctggagatgttaatcccaaaattaaactccactgactatccttcaataaatttgattggaaccaaaggtccataagattcacgaaaatgtcagcatctgaattattctcaaggagtgaggttcacacttttttggccagcatgccatatattatagcacgaattgaagttcttccacagtacattagcatatagggcacgattcatcattgggagattttagcaattttccaaagcaacaatttcatcattgggaccactccaggtatatatgatcgagaaat

SEQ ID NO: 13134 - DNA, 293 bp, Glycine max
  Clone ID: jC-gmle01810067a03a1
gaaccaagccattctccatccttcttttttgatttaaaaagaacataaccctcctggggtcatggtactatcaccgcaagaaagaagaacccacggaactaaaatgatttcaaatgacaacatcaccggaacgaggaacccagggaaataatggaaatagttcgctcttaacggacgtgctttattcttaacttcagcaacattagacactgtaaaatcaaaagtgagcaacatctgatacgttagtcgatgaagaacgcacagctcttcatacaacaatacttatcgaaaat

SEQ ID NO: 13135 - DNA, 148 bp, Glycine max
  Clone ID: jC-gmle01810067a03d1
ttttcttttttttttttttttttttcaaaattttttggattagcaacaaagctttgatcataaagggagcccatggtatagaaatcacatttggttttatactatttaatgtgaaaaacaaaatatgagcccttactagcttaaacat

SEQ ID NO: 13136 - DNA, 292 bp, Glycine max
  unsure at all n locations
  Clone ID: jC-gmle01810067a05a1
agataccgtactgatacaanacanattcacgttaacggcccacagcccggaattcggatctcggctcgaggctaaaacttaaattcatttctttttttctgttgcgaaagaactcttttggggatcagctatctgaaacaaaggagctgaaactcttcccaacatttcaagcctaactagccacatcaccaaatgaggctctagaaaggttgcgtgtagatagtaacgaatataacggaccggctttattacatactatatccatatctgactgtgaaagtttaacagagac

SEQ ID NO: 13137 - DNA, 592 bp, Glycine max
  Clone ID: jC-gmle01810067a06a1
gactacctcaaattctaccagctaggaacctattggccatacactccttccatacatttgctgtatggtctgagagctgctcttgatctgatttttgaggaaggactcgaaaatgtgatcgcaaggcacagtcgtttaggcaaagcaaccagacttgctgtagaggcatggggtttgaagaattgcacccaaaaggaagagtggtacagtgacactgtgactgctgttcttgttcctgcttacattgatagtactgaaatagttaggagggcatggaagagatacaatttgagcttaggtcttggactgaacaaagttgctgggaaggttttcagaattggacatcttggccacttgaatgagttgcaactgttgggatgtctagctggtgtagagatgatactcaaagatgtgggttatcctgtaaagcttggaagtggagttgctgctgccagtgcatacttacagaacactattcctatgatcccttccaggatttgagtcacaaatcattcttgtctttacttccttttctgctctttcagaaattctgtaaatatatattaccctcttttacactcctttgaagatg

SEQ ID NO: 13138 - DNA, 566 bp, Glycine max
  Clone ID: jC-gmle01810067a06d1
acaggacaataaaagaagcaatgcattaaagctgaaagtagaaagtacgttcatcttcaaaggagtgtaaaagagggtaatatatattttacagaatttctgaaagagcagaaaaaggaagtaaagacaagaatgatttgtgactcaaatcctggaagggatcataggaatagtgttctgtaagtatgcactggcagcagcaactccacttccaagctttacaggataacccacatctttgagtatcatctctacaccagctagacatcccaacagttgcaactcattcaagtggccaagatgtccaattctgaaaaccttcccagcaactttgttcagtccaagacctaagctcaaattgtatctcttccatgccctcctaactatttcagtactatcaatgtaagcaggaacaagaacagcagtcacagtgtcactgtaccactcttccttttgggtgcaattcttcaaaccccatgcctctacagcaagtctggttgctttgcctaaacgactgtgccttgcgatcacattttcgagtccttcctcaaaaatcagatcaagag

SEQ ID NO: 13139 - DNA, 526 bp, Glycine max
  Clone ID: jC-gmle01810067a07a1
ctcggccagattcgtggcagccgctgcgtcaacgcgcacccccgatcggtgcgcatcgtttgggaacactccgccggcaacggtgccgccggtagtggggtcggcgacggagacaggcataaggtgatggggtttgtgggcattcaaaccgggttcacgtcggcggggaggagagagtccttgaggaagacgtggttcccctctgatcgccaaggacttcaacgcttagaagaagctactgggttggcttttaggtttatcattggtagaacaagtgacagagcaaagatgtctgcgcttcaaaaggaagtagcagaatatgatgatttcattttgctggatatacaagaggagtacagtaagctcccatacaaaacgttagcttttttcaaagctgcttatgctctttttgatgctgaattttatgtcacagctgatgatgacatatatttaaggccagatcgtctatcattactactggcaaaagagcgatctcatcctcagacatacataggatgtatgaaaa

SEQ ID NO: 13140 - DNA, 450 bp, Glycine max
  Clone ID: jC-gmle01810067a07d1
ggataaccccaataaagaatgacattaaaatcaggaaattagtaaattaacaatgatctcttgatctattctctcatgtatataaaaaaccttccctaacgaacctttgtcatataggccaacgctaacctttccaagtttacaaggggaatgaaaactagggaaataaaacacaatcacctcttttttagtaaatggaagaaaggggaattagaaagatcaaaagaatggcagtggtagcatctttaagcaataatcaataacaagagcagcaactccttcactaccttccgagcttactttgctttggattatacccccaaattctattcatcatctgattccagagttgggctcttagagcaggtttccttttgatggagttccaacattttcttttctggattacataggcctgaacacttcggaatatcccacactgcaatagat

SEQ ID NO: 13141 - DNA, 549 bp, Glycine max
  Clone ID: jC-gmle01810067a08a1
ggccgccctttttttttttttttactttcaaatttcaatattacattatcaataaaatgagagcagccatttttgcttcaagttatttaatggattaaccttagccattatgctgtattgaacacaacaatggggctcctcacttggtacttaccatcatcccaaaccaaagagcctgaaactataggtccttctagttttcccgtaattgtgagcacaaatgtttgcttttggttaagagaagtgaatggtagaacactggggttcacctcaattttcagtcccttgggagaagtcacagtagctttatatgttgactttggtgacccaacatttgtaacagtcctgttaaaactgccacttacactattggagttggagggtgggacaaagagtgcaaatgaagcatagtttagatcccttgctgaaccattctttgattcagggcagctactgttatcttctgtgatgaagttgaaagtccttgtactatacccttgtccacataaaaatcttacatagtctatttcaccagcatcatatactaaa

SEQ ID NO: 13142 - DNA, 592 bp, Glycine max
  Clone ID: jC-gmle01810067a08d1
tcgcgatctagaacctcgagccgtgttaccaaggttgaattaggtaacaaaatcacctatgagggtacctcaataaatacatttgatctcaagggagaattgtatcctataatttatggtggagatgcaccaaacaaaggcgaaggcatagatggatcatcatcaaggtattgctccagcggttcgttggacaaaaaattagttaagggtaaaattgttctctgtgagagcagaagcaaagcactaggccctttcgatgctggtgctgttggggcattgatacaaggacaaggttttagagatcttcctccctctcttccattgcctggatcttaccttgccttgcaggatggtgcctctgtatatgactacataaactctacaaggactccaattgcaaccatatttaagactgatgagacaaaagatacaatatctcctgttgtggcttctttctcttcaaggggtccaaacattgttacacctgaaattctcaagccggatttagtggctcccggagtttccattctagctagttggtctccagcttccccttcttctgacattgaggtgacaacagaacattgaattt

SEQ ID NO: 13143 - DNA, 482 bp, Glycine max
  Clone ID: jC-gmle01810067a09a1
gcctggtgcaaagaaggcttatatttttcacagagtgaggaagtggcttggtcaagccaaaagtctgtgctccccaaaggatgcaaaaaaatttggcttggacaatctggatgaggaaataaatatcctggagaagaagttatctgaaggatatcaagagattgttttttgtcacaatgacttacaatatggtaacataatgatggatgaagagacaagattaatcactataattgactacgaatatgccggttataatcctattgcatatgacctgcccaatcatttgtgtgaaatggaggcagattaccacagtgacacacctcatgttcttgactacaagaaatatccaggactagaggaacgttaaagatttattcgcaactatctgagttctgaaggcaataaaccaagcaatgctaaagtgaaccagttagtgaaagcttgagaaaaatacactcttgcaaaccatatattttggg

SEQ ID NO: 13144 - DNA, 575 bp, Glycine max
  Clone ID: jC-gmle01810067a10a1
gtgcgtcaagagacacgtggtaccctagctagagtgccattctgtggtttctttctttctttctttctgcatcacatcacaatttgcattgcctcgtgtcctttttcttctttgctctccaaaaatctcacacacacaggtatctagcaaatgggttctcaccaacaagaaccatggctattggagaatgggaaaccaagggttttgaccaaggagaccaggcatggccgttctgcacacagaatgttctccacctctttgcgcaagaaatctagccgaactcttgtctcaaaggtttcatgtgccactctcagaaactttctttcaaatttgcaagagggtattcttggcaccaagctttccattctcatccctgctattccagctgccatcgttgctgagtgctatggctttggaagaccttggattttatattaagcttacttggacttacaccacttgctgaacgtgtgaacttcattacagaacaagacgccttctacactggtcccacaacaggaggacttctgaatgctacatgtgggaatcgtactgagctcataatagcaatattt

SEQ ID NO: 13145 - DNA, 563 bp, Glycine max
  unsure at all n locations
  Clone ID: jC-gmle01810067a11a1
gcggggaagaggttctcccttcggccactgccacctccgccgccaccggcaatcccaccgcttcgcctcctccgctcgctgatcttgtcggtgctcccgatctcgctgctgcctcggacgacgtcgttacccaacctgaaattcacgcgctgatttcagacgaagagcacgatcacgagcatgaacatgacgatgacctcgagcacgagcacgatcagcatgagcatgaccaccaccacgaggaccgcgatgatcacgccgctgtggccgctgtctccttggaagatctcaaactcaagatcattaagcaggcggagtattatttcagcgatgaaaacctgcctactgataagtatctgttgggtttcgtcaagaggaacaaggaagggtttgttcctgtatcagtaattgcttcttttagaaaaataaagaagctcacgcgagaccatgcatttattgttgctgcactgaaggagtcttcactgcttgatgttagtggtgatgggagaagggtcaagcggctcaatccacttcgttncaatgaatctagagatcataagtta

SEQ ID NO: 13146 - DNA, 553 bp, Glycine max
  Clone ID: jC-gmle01810067a12a1
gaagtatatccctagggaaaaataatttcttcacatttacaatgaagcaatccactctattcctgttcctattcctattccccctagttcatgctctttcttacgaagctgcttatattagagatggcctcaaatcctattcccagcttgatctccctcactccgtttttggttctgaaagtgtagccttcgattgccatgggaaaggaccatatgtgggagtgtctgatggtagaattctcaagtggcaagagacaaagagagagtggattgactttgcagttacctcgccacacaggaacaagaaattatgcgacgggtcacaaaatgacaagatggaatcaatgtgtggaagacccttaagcctcaaattcaacactgtaacttgtgaactgtacattgccgatgcatactttgggcttctggtggtaggaccaagtggtggtgtggcaaagcaattagccacttctgctgaaggagtcccacttaggttcacaaatgccttggacatcgacaccaaaactggtgaaagatttttcacagatagcagcat

SEQ ID NO: 13147 - DNA, 439 bp, Glycine max
  Clone ID: jC-gmle01810067b01d1
ttgcctttctttttttttttttttttttttttttttgtttttcctccgtgaatttgttaaaataagggttgattcttacagtgaccaacagagagcgtcttttatagtacaaacatattcctgtgacttgcgtgtatgattatgcaacatgtattttcggcttttccatctgtgactagactcatgaacttttccccatccacagtttctttttctatgagaagacgagcctgcttgagaaggatcttaatgtgagtcgagataatccgggtggccctagaaggtgctctttttaacagttcttttactttcgtatccactacatccgtagctgccagggagtaatcctttcgcgatgacatctgttgaccgaagattggatttccacccggtcccccaatgtgaacttgtccaatttttttgatgaatccaaattttt

SEQ ID NO: 13148 - DNA, 315 bp, Glycine max
  unsure at all n locations
  Clone ID: jC-gmle01810067b02a1
ctcaccccccccccccctccccccctcccggnagagnatgangtngattgaagagtaagtaaggtaggaattnggntagagtntgatatganaatatgattgtggttgtaatatagtgcccccacacaccccgcgcacccacaaacaccccggccccgctcccccacccccccaccgccaacacccccccccccctcccccaccccccccacccgaccccccccccccccccccccccccccccccccccccccccccgcccccacccccccccccccccccccccccccccccccccccccccccccccccccc

SEQ ID NO: 13149 - DNA, 443 bp, Glycine max
  Clone ID: jC-gmle01810067b02d1
acagggaagaacttaaacagaacatgcattaatttaatcagtatacaaatcgcagcaaaataactgtatagaaaacagaaaaaaccatttatactatacagaattactatgtaaacttcagaataactatttatatacaaagaataattatgtttactgaataacaatgtactaaataactgaatatacgctgaataacttaattatactgaataatcgcagcagaaatatcaaaataattgccgcacaagggaattaaaacaaacaaacatacatactgaataacttgataccaagaaaaaatatcattctatgcttgggtaaagagccgaagttatcttcaccttaaagaattgtagaagcctaaccagattctttgtaaatccacgatatttcttcaaaaataccttgacaaccacaatgatattgtcatagcagaagtc

SEQ ID NO: 13150 - DNA, 501 bp, Glycine max
  Clone ID: jC-gmle01810067b03a1
gttcatcatagattagatgcaactgtggatgccattttggcaggaaaacctccattatttgaaatccgtcaatgggatgattctgacaacgagttgccaaaatatgctccattgcccgaagaaaatcttggagaaacttctgacttaactaacaataatatcacgagttctgacaatgaacctagtgaggatgataaagatcacccacgtacttggtccacgaaatggagtaccagtggacctgtgatgacgaggagttcaccaatgcaagtttatacttacaagattcttgaagctgatctgctacaagtggccaaggtaatggggcttgaagatgtaatagatgtgactgatgacattggaactgctgaagcaattctagcatccagttctgagatacgacaaaacccatggatccgtggtgtggcaaagttccatcacgtacctgtatttgttatcaagtccaataccatggcacaaatggtcaaggcagtgcgcatg

SEQ ID NO: 13151 - DNA, 516 bp, Glycine max
  Clone ID: jC-gmle01810067b03d1
aaaataatgatatattacattttatgtagattgattttttcaatatatataccttggtacaagaaggggtagcttggcggaggatcaaacttccgtcataaatgtcacaccccaattgagatacaagctcttaggctatgaataaattatttacaccacttgtatgactgtacatgttacatacatcatacatgtacaaaccagtgaagtgaatcgttagaattggggaaagaattgaattattcaggcaaaataggaagcctggtaacactggtgccattgccgctgtcaccagtagacattgaggtaggacttgttttcttgcgggcaacagtagatttagaggctttttttgtatttagcctcaatggaagaatttgcaacctgggattctgatcggtacctgacttttcagcagccaactgataactttgaacgagttcaagctgccgggcaataatttcagaacgtctaggaagaagttccacagcttctccaccaggaatcacaatgtac

SEQ ID NO: 13152 - DNA, 622 bp, Glycine max
  unsure at all n locations
  Clone ID: jC-gmle01810067b04a1
ggggnnnnaaggggccagtcgatccgatacataacacgtttacgcaccgacgtagctcgaattcggtcagcggcataacatccgctacctcggctgatggtcagagaactcttgccacacctgtcgtcatggatctgtgcgtcagggagatggttgctcgcgccgccaagtacatctttgccggccacctccgaagcacagagaccttccatatctccaactccatcgcgcatttcctcaactgcttcatcggctcctctgcgaacggtggcgccgctgccatccaggcaccgcaacctctgcgacccaagctcaagaagaacggcaagtccaaggtgaaggagcccgttccttctgccgctcctttcactctcacgaggacagctctctggaacgagatcgtcgcgctggtcaaggagaaatttgcgtatgatttggcatttgattatgaggtttcacgtcccaccgttttccttcgctccttctgcttgaaggtcggcattcaagtcgccgcgcgagactacgatttcaccaaggtagacccgttcgtaccggccgatattttggatctgttccccgtcgtcaagcttattaacccgaggagtatggacggacaagatct

SEQ ID NO: 13153 - DNA, 441 bp, Glycine max
  Clone ID: jC-gmle01810067b04d1
ggcgaccttcttggacttcttcttcttcttcttgccgctcttgtctttcggcgctgccgaagtggaggcgacggtgggctcttcctggtcgatggcctcctctcgcttcttgtcctttttgccggccgacgtggacagtttgacgattcctcgcttttcccgtcgactgtcggagttgatgtatcgaaggacctcagagagcggcaagttgcccatgctgctgggagttgcctgcgtgggaagaagacgggtggtggtggccgcaggcgcaggctcaggtcgtctcggcgcggtcttcgggagcatcgcgttgatttgattcagctccttctgcttcgcgacggccgacgcggtgaatcggttcagccacaaacgggattccttcgtcctggtgtcgttctcgcccacgggtgcgctcagcatggcgtaattcctcttctg

SEQ ID NO: 13154 - DNA, 574 bp, Glycine max
  Clone ID: jC-gmle01810067b05a1
cgacaaagtagtggctgactttggatgcggttgtggtacgttaggtgttgcagctgcactgttgagtgcagaacatgttcttggcattgacattgatccagaatctcttgaaatagcttccaataatgctgaggaacttgaggttgacatcgattttattcagtctaatgtcatggacttgggatggagaggtcgaattgttgatacagttataatgaatcctccatttggtactcggaaaaaaggtgcagatttggattttctctccgttgctttgaaggttgcttctcaagctgtttattccttgcataagacttcaacaagagatcatgtgaaacgaacagcattaagggatttcaatgctagcagtgctgaagttatatgtgagcttcgatatgatgtaccgaaaatgtacaaatttcataagaagaaggaagtagatattgctgtggacctctggcgttttgtaccagcagcaagtcatcaaagcagaaatacttgatgcagacaaagatagtgtattttggaatagatgataagattgcaagtaaaaagaaaattttgggtacctaaa

SEQ ID NO: 13155 - DNA, 531 bp, Glycine max
  Clone ID: jC-gmle01810067b05d1
ggaaaggagggagtattatattttgtctgaagggttcactggttcaagaatttcccatgctttacatctggagctaggtaaatttttttataaccttgtcttgtggttatgatagcaagatcttatgcaactttgtgcaatggattattaaaacatcaccaagtttcataatcaagcaaccagttataaccagctcgaagaagacactctgtatgtataagcagaaagagtataacttgctcaaatttatagatacacacaactacagaagtggcatcacccaatttactacaagagctagttacggagaaggtttctaatccttttaggcacccaaaattttctttttacttgcaatcttatcatctattccaaaatacactatccttgtctgcatcaagtatttctgctttgatgacttgctgctggtacaaaacgccagaggtccacagcaatatctacttgcttcttgttatgaaatttgtacattttcggtacatcatatcgaagctcacatataacgtgagcact

SEQ ID NO: 13156 - DNA, 493 bp, Glycine max
  Clone ID: jC-gmle01810067b06a1
gggttgtgaaagcagagaagtgagatacactaagttatcctcataaatacactctaattaggtggcaagataagtgtctaaccttagtaacattgccacatattgtgttcattttggaattgtgccactaaaattctattcaattcatctatggctgcctcttcttatgctatgcaatcaatcctggcaaaccctttgatccgcatttccagcgggtctagggtgaaccaatttggcgttcctgctttgcacatgagaaggaatgttggcctgagagttaggtccatggctaaggaagaacaaccaagtgagcctgcaaccccagttacaccgccaccatcagtagaacccaagccacagccagtctctgctccttcaccaaaggtgagcactaagttttctgatgtgttggcattcagtgggccagcacctgagaggatcaatggaaggttggccatgattgggtttgtggctgcaatggcagtggaagtag

SEQ ID NO: 13157 - DNA, 564 bp, Glycine max
  Clone ID: jC-gmle01810067b06d1
aacgaaataattttgatatgtagattaaataaacacacgaagtacaaataaacattggtctctctaatcacaaaggagattaagtccattgtggtgtgccttcatgactgaattataccaaagtactacccttaacatactcagtaaaagccagagcaatcaaacccaacatagcaaatctcccattccacagttctgcatctgaggacatgaaccctttggacttagactccacgctgacaccttggaagagtggaatcaaggaagcaagggtaaggaccacacttgtccccaagaaccatgggatgccaccattggatatttgttctaacacaccttgccctttggctacttccactgccattgcagccacaaacccaatcatggccaaccttccattgatcctctcaggtgctggcccactgaatgccaacacatcagaaaacttagtgctcacctttggtgaaggagcagagactggctgtggcttgggttctactgatggtggcggtgtaactggggttgcaggctcacttgttgttcttccttagccatggacctaac

SEQ ID NO: 13158 - DNA, 529 bp, Glycine max
  Clone ID: jC-gmle01810067b07a1
ggccgtcctttgtttttttttttactttcaaatgttaatattacattatcaataaaatgagagcatgccatttttgcttcaagctatttaatggattaaccttagacattatgctgtattgaacacaacaatggggctcctcacttggtacttaccatcattccaaaccaaagagcctgaaactataggcccttttagattttccgtaattgcgaacacaaatgtttgcttttggttaacagaagtgaatgggacaacactgtggttaacctcaattataacgcccttgggagaaggaacagtatctttatatgttgactttggatgacccaacattagtaacagtgctgttaaaactgtcacttacactattggagttggagggtggcacaaagagtgcaaaagaagcatatgtcacatgccttgctgaaccattcttatgttcagggcagctactgttatcttctgtgatgaggtgtaaagcacatgtactatacccttgatcacaaaaaaatctgacatagtctat

SEQ ID NO: 13159 - DNA, 405 bp, Glycine max
  Clone ID: jC-gmle01810067b07d1
tcgcgatctagaacctcgagccgtgttaccaaggttgaattacgtaacaaaatcacctatgagggtacctcaataaatacattcgatctcaagggagaattgtatcctataatttatggtggagatgcaccaaacaaaggcgacggcatagatggatcatcatcaaggcattgctccagcggttcgtcggacaaaaaattagataagggtacaattgtactctgtgagagcagaagccaagcactaggccctttcgatgctggtgctgttggggcattgatacaaggacaaggatttagagatcttcctccctctgttccattggctggatcttaccttgccttgcacgatggcgcctctgtatatgactacataaactctacatggactccgattgcgaccata

SEQ ID NO: 13160 - DNA, 558 bp, Glycine max
  Clone ID: jC-gmle01810067b08a1
tgagcttctaaaaatgtgcataggtgcagaaggagaaaagcaacatggtttctgcagcagctatctacataaagaatgtgcaaccagaagtgctacatgttgtgagctatgtgggttacaggcttcattgtattgtcaagctgatgatgcatacttgtgtagaaaatgtgataaaagggttcatgaagctaattttttggcccttaggcacattaggtgctttctgtgcaacacatgtcaaaaccttacgcgaagatatctcattggagcatcaatagaggtggttcttccagccaacattaactggaccattggaaatctccctagcaacagaggaatccacagaaagtgctcaagaatgcataacaacctttccctcttggtataacttccatctttctttttttctccttagaatatcttttgtaatagaaaagggtagtgagtaccatctcaggtacatagggaagtgctaaatgtttttaatgtcatgatttaaaaaaaatggttggtaatagaaccgtgttcaatagaaggagggcatttgcaatgttttta

SEQ ID NO: 13161 - DNA, 462 bp, Glycine max
  Clone ID: jC-gmle01810067b08d1
ggagacaaaaagtgagtatcgccattataattgctactgatataggttacaatatgagatgccaggaactaccatgacatatacttgtaagatatatcattgtatatctgccaacatagtataacttacttctgccagaaattcgctttcctgctttagaattggcttaaaataaaaataaccgtagaagttaaatttcaattaaactaactacttctaccagaaattaaagaaataaaaaacattgcaaatgccctccttctattgaacacggttctattaccaaccattttttttaaatcatgacattaaaaacatttagcacttccctatgtacctgagatggtactcactaaccttttctattacaaaagatattctaaggagaaaaaaagaaagatggaagttataacaagagggaaaggttgttatgcattcttgagcactttctgtggattcctc

SEQ ID NO: 13162 - DNA, 458 bp, Glycine max
  Clone ID: jC-gmle01810067b09a1
gatttatcttccctctccattgttcgttcattcattcactctgggcgcgcgcacgtgctaggaaccatcgattcgagaatgggcaacgactgtgtgccgtcgacggcggcggcggaggtcatggcggtggtggccgttgagctcactgacgcctccagctggaggcacgacatcgacgactctccggcgtggcaggatcgtatcttctacactctcgccgtactctacggtatcgtggccaccgtagctttggttcaactggctcggatacaattgagagtgccggagtacgggtggaccacgcagaaggtctttcactttctcaatcttttggagaatggagttcggtgagtaatctttatcttctttcggaatgtgcagaggttgaaaccagagattgttcaacacatcttgcttgacgtgccgagtcttgctttctatacagcatatgcactttt

SEQ ID NO: 13163 - DNA, 532 bp, Glycine max
  Clone ID: jC-gmle01810067b10a1
ctatagtataattatcaagttaacgtaaagcacccaattaacacagtttgatacaatagggttgcataacctcatttttacttcatgtaaccctatagtataattatcaagttaacgtaaagcacccaattaacacagtttgatacaatgtaacatgaagtaaaaatgaggttatgcaaactatgtagaaaatgattgatggaattaagatgtcaatcatccttaagtacataattaattgcaccagttgttttctaattgtattgtttaaccccagttttaattgcaacaattgcaccatttctaatcgtttgatgattatatccaaatagtttgtagcttttgttgtatgtccattatccatcttcattcataggaagtatttgtgttcctaaaacgtgctgcatgttctaatttgattgatttgcctgtaccaagtatttttgttctgaaccaatgatgttacaatcccacttgtgagtctgtagttacccaagaccctcttttgagggagaacctacttggtgctgct

SEQ ID NO: 13164 - DNA, 538 bp, Glycine max
  Clone ID: jC-gmle01810067b11a1
cggctcgagcggctcgaggaaaaccctcgtcttcgaaatcagcaacaaaaacgcgaagtgtactaagcgaagccattgcagcgtgagaatggggaagaaggcaaaagggtcaaggaagggtaagaaggcatggagagctaacatcagcaccgaagagatcgaagatttcttcgagaaatcaacgaaggacgctctttctggtggctctctacaagccgtttcttccgattctctcttctatgaagacaagtccaaagatcttgctgtgaagaagaagatcgagaaacatagggagagggtgctccgatgtgatagcctgctacagaaaaatcagtttgttaagccagtgccatcttctattctgaagaagtgttctaaaaaccgtaatgtggcctctaaatccaatatgaaagtggccaatcaagatggtgataaggatgattctgccatgtatgatctatgggatgataaaggcaaggatgacacgaaggtgaaaaaggtagcaaagcctactcttatcccagcagtagaagatgat

SEQ ID NO: 13165 - DNA, 405 bp, Glycine max
  Clone ID: jC-gmle01810067b12a1
aagggaaactgccctccttctcattaccattaacacatttggaattgaagtggagtcaatttacctttctatcttcctaatttatgccccaaggaagccaaggcttacaaccatcaagcttcttctcttactgaatgtgtttggattcggagccatgcttctatcaactctctacctgtcaaagggagcaacgcgtcttgctatcataagatggattggccttgtttacaacatcagcgtctttgctgcacctctcttcattattaggcgagtcataaagacgaggagcgtcgaatacatgccatttactatgtgcatgtttttaaccatcaatgctgttatggggttcttctatggccttctcctcagggattattacgttgctcttccaaacacgcttgggtt

SEQ ID NO: 13166 - DNA, 412 bp, Glycine max
  unsure at all n locations
  Clone ID: jC-gmle01810067c01d1
tganaanttctggctaccatgactcggaaaccatttaagggattacaggctcacctaagctgactggcgccctggccgccctttttttttttatcattatatttttttttttttattaaaacttaagttgattgagggggtataagtggtatttgattctcactagataaaaaaaaatcagggcgaccggattttaaactattttagcttaaatcattaagatttagattaccaataatcttgagagtcaatgcctgcatactgttgatgggggtatattagtggctcaacgaacttaatccctcaattaaagctttaaaatcagagggggaagatccaccttcttccatggcccgcctagcttggtgggaaagcacctttgttttgttccttatttcaatggctttttccc

SEQ ID NO: 13167 - DNA, 523 bp, Glycine max
  Clone ID: jC-gmle01810067c02d1
ccttacaaaagcatattaataatggttagagttccaaacatatattgaagctttttccaatatcaaaacgcagataaaattgatgaagatggtgattacattgccataaaagtggctcatcctaaattgttcaaaggtgacttagctacaacagctaacataattggcattacaaacacaatggactctcagggatttgtccgaaaagggtggcgctcattaccctgactgtctgctttggaaggaacactgtaaagcagatcgtgaattttggaatacatcagcatctgagaggggtcaccaccactactgccctgcgaagcgcgagaactctcctgcaatttgatcttttcataaaggtactgcttctcggcctcagcctcgtttaatcgttgtttcaagtagttgctagtaaattcttcctctgatttatcttgcttggcaagagcaatcatttgaagcctctcggcctctcgtttagcctcatcagccttcaattggaacatatcagcctctgcatttt

SEQ ID NO: 13168 - DNA, 538 bp, Glycine max
  Clone ID: jC-gmle01810067c03a1
ggagtctggagctggaggcctagtgtcgtcgtctgagaaagaaggagcctcgtatacctattgggttaggaaaataacggaagatgcagcgcctttgcctctgcctcgtaagctcaacccagaagatcttcccccttcccaatctcaatcttccacgcttgcttcagcttggaatcgcgctgggacatgggaggagaaaagtctaagcaattgggcaactccaagaattaaggagttgcttttctcattaggctccattcagatctcctttggcagggcagaagtagaagatgtaacaaaatgcgttggcgatgcattcatggtgatagttcggaacaagaaacgtgttggttatacatatgagttgaccttaaaagtcaaaggggaatggatcatacaaggagagaagaagtttattgcgggtcatatagatgtcccagagttctcatttggtgaactagatgacttgcaggtggaagtgagactgagtgaagcaagggatatcttgcatcaagacaagacacagatgcggcacgac

SEQ ID NO: 13169 - DNA, 67 bp, Glycine max
  Clone ID: jC-gmle01810067c03d1
gcccttgagaactttcattttggtaggatacaaccacaaattaacacaacgttacctacggaagaga

SEQ ID NO: 13170 - DNA, 476 bp, Glycine max
  Clone ID: jC-gmle01810067c04a1
cagaactgagagaagcaagtgaaacactcaatcacctaggctaaaatcgtctcgtcttcattccttttttttccggtttagagaattgaaaagatttcattgataattgagcaaacacaatgagtgctccacctcatcatgatgatgacgacgacaacgaagaagttttccttgatgagtctgacatcatccatgaagttgccatggataatgaagatcttcctgacgctgatgatgattctgaactcctcgaagaggatgaggatggtgattttgtgcacaaattcactgctcataccggggagttgtactcagttgcctgcagcccaacagatgcagacttggtggctactgcaggcggtgatgacagaggatttctctggaagattggccaaggggattgggcttttgagcttcaaggtcacgaaaaatctgtatccagtttagcttttagctatgatggacagtgtttggca

SEQ ID NO: 13171 - DNA, 480 bp, Glycine max
  Clone ID: jC-gmle01810067c04d1
atctgttaggaaaaattcccaccttcattgaatacacaattctctaagtatgaacattataattcaaaaccaataatgttaaagataaaaaataatcttcgaaaaaaatatccagccttttgttcaatatgattgtctgggtccaggaaaagctcatgtaatatgatttctgtaggtaacatcccctcctccaaggacataaacacagagggatttgcttggatgaatgacaacctcatcctatgcaataatacaacagggattgttcaccgaaaattttcaacctcaaaagcacaagctgttccatcaaccgaggccgagacaaggtaattgcgattagaagacacagaaagagactgaatggcatcagagtgccccttcaatgtttttacgcattcaccagaccggctgtcccacaatctcaccttaccatccacacaaccagaagccacataagacgcaccaagccatgccaaacat

SEQ ID NO: 13172 - DNA, 510 bp, Glycine max
  Clone ID: jC-gmle01810067c05a1
aaaacaaagaaaaaaaaaaacccttagccaacacaaccatcatggccacctctgctattcagcaatcagcattcactggtcaaactgctctgaagcagctcaatgagttcgtccgcaagaccggtggcgccggcaaaggtcgcactaacatgcgccgcaccgtcaagagtgctcctcagagcatttggtatggccctgaccgtcccaagtacttgggtccattctcggagcagattccatcatacctgaccggagaattccctggtgactacggatgggacactgctggattatcagctgacccggaaaccttcgccaggaaccgggagctggaggtgattcacagcagatgggcaatgcttggtgcccttggctgcaccttcccagagatccttgagaagaatggtgtcaaattcggcgaggccgtgtggttcaaggccggtgcacagatcttctcagagggaggccttgactacttgggcaacccaaacctgatccatgctcagagca

SEQ ID NO: 13173 - DNA, 274 bp, Glycine max
  Clone ID: jC-gmle01810067c05d1
ctggggacccaaatttctaatatataaaaatataatggttctcatacagatttttctgctacacaggtgtagttacattagtgaaaatggagttaaacacaagggaactgcaaaagggagcagaagattgcattgcatgtaggcatcctcattgtcccaggacaaaagtagtggcataagccaaagcatttgtgcaacaggatcagcaacgtgggcgaaaaggtttggaatggggccttggcaaggaccatagcctggacaaaaaaaccaaaca

SEQ ID NO: 13174 - DNA, 483 bp, Glycine max
  unsure at all n locations
  Clone ID: jC-gmle01810067c06a1
cctatggctcgtcactccttgctcttagcccttctcctcttcgccgccgtggccaccgccgcgatggcggtggccgcgtccgacgccgacgacatcctgatccgtcaggtggtgccagatgttggcgaagccgaagaggaggacaacctgctgaacgccgagcaccacttcgcgagcttcaaggccaagttcgccaagacctacgccaccaaggaggagcacgatcatcgcttcggcgtcttcaagtccaacctccgcagagccaggctgcacgccaagctcgacccctccgccgtccacggcgtcaccaaattctccgatctaactccggccgagttccgccgccagttcctcggcctcaagccgctccgctttccggcgcacgctcagaaggcgcccatccttcccaccaggatctccccaaggatttcgattggcgagacanaggagccgtcactaacgtcaaggaccaaggggcgtgtg

SEQ ID NO: 13175 - DNA, 544 bp, Glycine max
  Clone ID: jC-gmle01810067c06d1
gaagtcctaagtccatagaaatttttatacatgcacaaactcaaaggtaaacgaatcaaaggtacagaagcaacttaaacattttggtatccttttgggtatggcactaccacatccataagaaccaacattgacagtggcacgtatattagtttaattatgcaataactgagacataatcagtggcaagtattcccctgttgcagtttgaaacaaccccaccccgccaatctccatagagagttgcttatcttgcaccatttttaggaccacacatttccttggatttcccacttgtatatgtcaagcatacatacagaaattacatactacataaacaacatggtcttagcagtttcctgatcctatacggagataattttaccagtaccaaatgataaagttcacaacataaatatttatacaaactccccttagtccagtatcacatcacaaccacaatcaggcatatctttgtatttaatggctggatggatatatagcagctacagttgagaccatggaatctactccacacacattt

SEQ ID NO: 13176 - DNA, 532 bp, Glycine max
  Clone ID: jC-gmle01810067c07a1
tttctagttgatagattggtgtaaagggagacatgggaaggcttttcttgatcaatcttgaaggagacttctatagctgcaaacactgccgaacacattttgctcttgaggatgatgtcatttccagggtttttaatctttttctccctgttttttttccttccatgaaacattattttttatttcttggtactcgattttacaattttttaaaggatagttgggggttttgctagataactagttgatatatatgtaaggcttttatgtgatgttccttgctggttgatcatgatgagagggatgtggtgattcaccccaaagggagggtggcaatagaagaacataggatatgatcatctcaagtgggggataaaaaatattagataagatgtacgtgctcaataatatattttctaaacagtatctgtctcaaacattttcaatgccaacactcagaatggcaagcactgctagtaggaacaatcttattttgatgttctacttataaccatcagtagtacttatacat

SEQ ID NO: 13177 - DNA, 409 bp, Glycine max
  Clone ID: jC-gmle01810067c07d1
ataaaggattgacttatctttggagaagaaattgaatgacgcaacaaatccagttttttacttcgcaaaagttagcaacgcatataaatccctcactgtcaattctaggcattgctttcatcttatttgatggatgttcaaagctcatgagaccatgctcactatgaaacatacccccctgataagaattagtaatttcaatggtggtttacatatcagttggaacccagtctggccattagaatcaaatgttacaaaagttgtcatagatcataaatccaagactgtcttgaagttccttgaggacctgatcagcagggtatggaccccagtcgtgaagagtttgatatgcttcggtgataaacatgacctcatttgttccctttgatagcccatactagactggaca

SEQ ID NO: 13178 - DNA, 465 bp, Glycine max
  unsure at all n locations
  Clone ID: jC-gmle01810067c08a1
ggaattactgatattcagatcggggagacaattgctgataaagtatctgggaaaccactaccttcaatcaaggtggaagaaccaacagtgaaaatgtctttctccataaacacttcaccttttgttggccgtgagggaaagtatgttactagtaggaatttaagggacaggctttatcgtgaacttgagcggaatctggctatgaaagttgaagatggtgaaacagctgatacatttgttgtcagtgggcgtggaactttgcatatcaccatacttatagaaaatatgcgaagagaaggatatgaattcatggttgggcctcccaaagttatcaacaagaaggtggatgaaaaactgttggaaccgtatgagattgcaactgtggaggtaccagaagagcacatgggagctgttgttgaacttctttgcaagagacgaggacaaatgtncgatatgcaaggagtt

SEQ ID NO: 13179 - DNA, 444 bp, Glycine max
  Clone ID: jC-gmle01810067c08d1
aaaaaaatcagagaatgcattagaaatctcattggaaatttaaccaaggtgttgcattgctattctccaatcaataaccatatgatgaagaattaatatcttgttccttactgctaatatatagactttacaaattgaacaaaattcagtgtaacttcatccctttaatcaactgtgatgaccaatatctataatgaatacggctttcagccagctcctatactgtctgcatctttggaagaatatatgtgacattacatcaatggtaatgatttacttcttcgtcactttagcagcaacacattaatgagttatgcgcttcagcacaccagcggtaactggttaactcaaaaagcatttgcaagttacagcttcacggtgaaagtctacccttgtttcttggttggaatttttggattcttggacattccgatacttgcgggg

SEQ ID NO: 13180 - DNA, 200 bp, Glycine max
  Clone ID: jC-gmle01810067c09a1
ctatctcctgacggtccattttactataataatccacaagggaacacatgagcatcggagaacttaaccaaaccgtcgccactcagcataaactaatatgtctgattaaaaaatgaaatctaataaaaatactatggccagccaatatgacattggatcctatgagtgacgacagagtttttacatccttgaacctgaca

SEQ ID NO: 13181 - DNA, 587 bp, Glycine max
  Clone ID: jC-gmle01810067c10a1
ccgattgaggggtctgtgaaccgagatgctgtgcttgcaagagttgcaaccgagaagaggctgtcactaatcaaagcatgggaagaaagtgaaaagtccaaagcagataacaagtctcacaaaaagctttcagccatttcagcatgggaaaacagcaagaaagctgcagcggaggcaaaagaaagttcgaaaaaagaggaggaaaaaaaaaaggaaaatgaggaaagaaaacgtatagaaatagcagaagcctgggatagcattatatttgctcaagtaataagaggtattttattaataacccaatccattcttagaaaatatattctattaccttcattgataataactaaaaatattgctcgtatactattttttcaatttcccgaatggtcggaagattttagggattggaagagagaaatgtatattaaatgcacatataatggtgttcaattatccgaaagagaatttccaaaaaaatggctaacagatggtattcagataaagatcttatttccttttcgtctcaaaccttggcacaaatctaagctacgatcccatgaaaagaaaaggatcttatgaaa

SEQ ID NO: 13182 - DNA, 575 bp, Glycine max
  Clone ID: jC-gmle01810067c11a1
gcggggaagaggttctcccttcggccactgccacctccgccgccaccggcaatcccaccgcttcgcctcctccgctcgctgatcttgtcggtgctcccgatctcgctgctgcctcggacgacgtcgttacccaacctgaaattcacgcgctgatttcagacgaagagcacgatcacgagcatgaacatgacgatgacctcgagcacgagcacgatcagcatgagcatgaccaccaccacgaggaccgcgatgatcacgccgctgtggccgctgtctccttggaagatctcaaactcaagatcattaagcaggcggagtattatttcagcgatgaaaacctgcctactgataagtatctgttgggtttcgtcaagaggaacaaggaagggtttgttcctgtatcagtaattgcttcttttagaaaaataaagaagctcacgcgagaccatgcatttattggtgctgcactgaaggagtcttcactgcttgttgttagtggtgatgggagaagggtcaagcggctcaatccacttcgtttcaatgaatctagagatcataagttatatactggtttg

SEQ ID NO: 13183 - DNA, 663 bp, Glycine max
  unsure at all n locations
  Clone ID: jC-gmle01810067c12a1
gcggggaagaggttctcccttcggccactgccacctccgccgccaccggcaatcccaccgcttcgcctcctccgctcgctgatcttgtcggtgctcccgatctcgctgctgcctcggacgacgtcgttacccaacctgaaattcacgcgctgatttcagacgaagagcacgatcacgagcatgaacatgacgatgacctcgagcacgagcacgatcagcatgagcatgaccaccaccacgaggaccgcgatgatcacgccgctgtggccgctgtctccttggaagatctcaaactcaagatcattaagcaggcggagtattatttcagcgatgaaaacctgcctactgataagtatctgttgggtttcgtcaagaggaacaaggaagggtttgttcctgtatcagtaattgcttcttttagaaaaataaagaagctcacgcgagaccatgcatttattgttgctgcactgaaggagtcttcactgcttgttgttagtggtgatgggagaagggtcaagcggctcaatccacttcgtttcaatgaatctagagatcataagttatatactggtttggtagagaatttgccagaggatcattcaaagaagaacattcaacanatattccatgaagctggaaatattaagaggataaccattcatg

SEQ ID NO: 13184 - DNA, 332 bp, Glycine max
  Clone ID: jC-gmle01810067d01d1
aggaattccgattttcggacgcatcaacttggtatgaaatcacattgataggctttactcggggcctagctcgtttaaaagctagatttgcctcaattgggtggctcttgccttccgccttattcaaattagcttctgctatttcaagaggttgctgtgcttcttggggatcaatggcactacccttttccggatcatttactaaaacagggacctcattagtggttattctagcaaaaccgcccatcagagccatcgttaaccattggtctttaagaagacgtattcgtaaaatacctatatctacgggtgtggcaataggcgcatgattt

SEQ ID NO: 13185 - DNA, 413 bp, Glycine max
  Clone ID: jC-gmle01810067d02d1
ggatgacaaagtagtttcattgatatctaaacacctacttagaggttaaatattagattctcaaaaataaaagtaaaatcgagcccagcatgctatggctatatgacagcaaagacacgcagcataagggtgatttagtggacaacttatcggtccttttggccatttaccaatctattaaataaaacaacgggctactgccaaaccagtacataaatttttggggtccacattggaagcgcacgaagatgttacagaacaaaaaaaataatcatacttcggccataagaaatccaaaactatatatacacattaactcaacttggacaaaaaaatattttaacgaagttcagaaacgaaaggaaaatggccaaggtgtaaaattggatttatttcggacacgaattacaaat

SEQ ID NO: 13186 - DNA, 543 bp, Glycine max
  Clone ID: jC-gmle01810067d03a1
gagtgtgtaacgagaaggtagggtagggtgcatattgcagaggattgggaattttgaatttgaacaacaatccgagcttgcttgtttcctcgttctgttctgagctctaatggaagcactatcccttcccataaacactctcaccaattcctctgccaaacaacacatttatctgagtgcttcttccaattatgcctcagtctcttcttccttacaactcaatccttctctcccaaccagacccctcactctgaggaaaagcgcggttcgagtccaagccgagaatgaggattttgaattgaagcaaatgagggacatggctgctgccagaaagagatgggaagctctgataagagatggaaaaattaaagttcttactcctagggaagctgggtatgcagttcagctatcaaacaagccccttcttgatgtccgtccctcaaatgaacacaaaaaggcatgggtgagagcttcaacctggattccaatatttgatgttgataataagctagattatggaaccattcccagaaaagtcacaag

SEQ ID NO: 13187 - DNA, 555 bp, Glycine max
  Clone ID: jC-gmle01810067d03d1
caaacgtacacaaacacacagtacattaataaacagtcactgtggccagaaggcttctgcagcaatgtaaccaggattcagaattaatctagttagtatatcatacaatgcatggccagttacaatacatacacataaccataacagtaacattaatggagcagtaatatgacactattgaattttttgttatggaaacttcaaagaaaaaacacaagcattttggccaaacaaggtattagtacatagctacatggaagaaacctacattaaaatggctgcctaactatttgcaattataatccagtagtgaaataagatggggcaattatgacaatctcggaaagcctctgccaagggtcagcttccaaaattgagttccttagcctgctgtctgtatatgcttatccgcaaggaatattgtctccgtgaggattaaccgaaaacttacctcaatgggtcctgatatcctgaagatagcgcccaatttgctgagcaccaatatatagtgcatcaacaacgagaatgagtccaatcaggcgtgcagaaaacact

SEQ ID NO: 13188 - DNA, 581 bp, Glycine max
  Clone ID: jC-gmle01810067d04a1
ctcgagccgcttccaccaactgctgtgcgaggaacgacgacgagcacgtgaagctgcagagaccaagccatcgaagatcgagaccaaattagccgaaagaacgacaaaagagcacgaaactgcatcttcctggcagactgcgtccttaaaagtttggactaaacggtgaagaatagaagactttaatctgttgaaaaggaagaaccacaatgatgaagtttgtccgcttttttgcaggtcaaggattgacattgaagagtttgctagaggtccactctcccgagtgtattatgttcccaattggatcacgcaggacgaggaggaagccattttggagcaggtatatgcggttccggatgcttgtgacatttgggtgaagctgaagcatcgccgtctgcagatgtggggaggagaagtcaaggaaccatttgatgctaaaccactgcctcaatggctcatgcagatcagtcacgcactcatagatatgggggcctttactgacgagaagaagcccaatcacgcattgataaatggtgagaaacctcatgtgttggaagttcaagcttttgatttacgagcgt

SEQ ID NO: 13189 - DNA, 511 bp, Glycine max
  Clone ID: jC-gmle01810067d04d1
gttgatgtcatgacgatatcatttgttcgtgatagtagacgtctagcttcgctaccaaatgaccatgcttcattaactaatgcgatcaacactgcaaaggcacttattgctgccgtcatcacgacccgttctaaaagcaatttctcttcatcatcccgctgcgcagctcgaataacgtcattctattgctcatgctgtgaacggcagccacactcgatcatcagcttgcgttcttgtttcgccttcgctggcagcatttgcagatgcatacgtcgatcaagagattgcctgatacacacaatattgctgcgtggatcgtcgtatttgctccggcacgcgagcagatctgctgcgcctgcagtccgtgcctagcatataacgatcggcaaagcccgccacaacatggatcttcatctcactggctcaagttataagggaagggtgtccaagctagagcccgccatgtatagagtggcttcgtcgttaattggcaatcactgatccatgagcg

SEQ ID NO: 13190 - DNA, 533 bp, Glycine max
  Clone ID: jC-gmle01810067d05a1
atccctaacgcgtgcatagcagagtcttagacagagacgcatccatggggcggagacctgcgaggtgttatatgcaaattaagaacaagccataccccaagtcacgtttctgccgtggtgttcctgatcccaagatcaggatttatgatgttggtatgaagaagaagggtgttgatgagtttcctttctgtgtccatctggttagttgggagaaggaaaatgtttcaagtgaggccctggaagctgctcgcattgcttgcaacaagtacatggccaaatttgctggaaaggatgctttccacttgagagtcagggtgcacccattccatgttcttaggatcaacaagatgctttcgtgtgctggtgctgataggctccaaactggaatgagaggtgcttttggaaagccacagggtacttgtgctagagtggctattggacaggtccttctttctgtccgctgcaaggacagcaacagccatcatgcttaggaggctcttcgccgtgccaagttcaagttccctggtcgtcaa

SEQ ID NO: 13191 - DNA, 466 bp, Glycine max
  unsure at all n locations
  Clone ID: jC-gmle01810067d05d1
cgcaaacaaaatttaagtaaatggaatgggctgacaaaataactcaaattcactcttgcaaaactaatgttatccaaaagtctagtttttccaaattaaaagacagactangaactagttgcagtatccaaaaaggctcttccaggttcacgattggccaatggtccatggcacccaagaagctttgcattcacaccatcgggcacaattctgttctctgacttgaacttgagataatcagaacggctaaacttggggaagccccatttcctgctaactataatcttttgacgaccagggaacttgaacttggcacggcgaaaagcctcctgagcatgatggctgttgctgtccttgcagcggacaaaaagaaggacctgtccaatacccactctagcacaagtaccctgtggctttccaaaagcacctgttattccagtttggagcctatcagctccagcccacg

SEQ ID NO: 13192 - DNA, 468 bp, Glycine max
  Clone ID: jC-gmle01810067d06a1
attcctaacgcgtgcatagcagagttagagacagagacgcagccatggggcggagacctgcgaggtgttataggcaaattaagaacaagccataccccaagtcacgtttctgccgtggtgttcctgatcccaagatcaggatttatgatgttggtatgaagaagaagggtgttgatgagtttcctttctgtgtccatctggttagttgggagaaggaaaatgtttcaagtgaggccctggaagctgctcgcattgcttgcaacaagtacatggccaaatttgctggaaaggatgctttacacttgagagtcagggtgcacccattccatgttcttaggatcaacaagatgctttcgtgtgctggtgctgataggctccaaactggaatgagaggtgctattggaaagccacagggtacttgtgctagagtggatattggacaggtacttctttctgtcgctgcaagga

SEQ ID NO: 13193 - DNA, 413 bp, Glycine max
  Clone ID: jC-gmle01810067d06d1
cttgtcgcaaacaaaatttacgcaaagggaatgggctgccaaaataactcacattcactcttgcaaaactaaggttttccaaagggtttgtgtttccaacttttaagacaaactaaaattctttacgcccctccaaaaagtgtcttgcgggatcactgttgcctaatgggccacgggaactaaaatgttttgaattggcacaacagggcacaattttgttctataactggaacctgatatcattagagcggttgcacctggcaacaccccattttctgctaacacttattttctggcgacctacaaactttaacttggccctgataaaatcctccttaacatgatagttgtccctgtccttgtctgggccacaaataaggatttgtccaataaccgctttattacaagtaccc

SEQ ID NO: 13194 - DNA, 500 bp, Glycine max
  Clone ID: jC-gmle01810067d07a1
ggaattactgatattcagatcggggagacaatagctgataaagtatctgggaaaccactaccttcaatcaaggtggaagaaccaacactgaaaatgtctttctccataaacactacaccttttgttggccgagagggaaagtatgttactagtaggaatttaagggacaggctttatcgtgaacttgagcggaatctggctatgaaagttgaagatggtgaaacagctgatacatttgttgacagtgggcgtggaactttgcatatcaccatacttatagaaaatatgcgaagagaaggatatgaattcatggttgggcctcccaaagttatcaacaagaaggtggatgaacaactgatgcaaccgtatgagattgcgactgtggaggtaccagaagagcacatgggagctgttgttgaactttttggcaagagacgaggacaaatgttccatatgcaaggagttggattggaaggaactacactacttaaatataagat

SEQ ID NO: 13195 - DNA, 487 bp, Glycine max
  unsure at all n locations
  Clone ID: jC-gmle01810067d07d1
aaaaaaatcagagaatgcattaaaaatctcattggaaatttaaccaaggtgttgcattgctattctccaatcaataaccatatgaggaagaattaatatcttgttccttactgctaatatatagactttacaaattgaacaaaattcactgtaacttcatccctttaatcaactgtgatgaccaatatctataatgaatactgctttcagacagctcctatactgtctgcatctttggaagaatatatgtgacattacatcaatggtaatgatttacttcttcgtcactttagcagcaacacattaatgagttatgcgctctatcacaccagcggtaactggttaactcaaaaagcatttgcaagttacagcttcacggcgaaagcctaccttgctttcttgtttgtaattnttggattcttggacattcggatacttgcgggggtgacctctactagtacatcttcttggatgtattcaatgcaat

SEQ ID NO: 13196 - DNA, 211 bp, Glycine max
  Clone ID: jC-gmle01810067d08a1
gtcttctcttgcattcgtatggagttatagactctggaggagccttattcggatccgagtgagcacactaacggcgggcaattcaacttgtttaagcttgatggggagtgcctcttaattttacccagggcttgcgcgttgccataaatttcctgatactatcatgctattgtatcgaaagggatgcgggactttatgccctacatcgtag

SEQ ID NO: 13197 - DNA, 460 bp, Glycine max
  Clone ID: jC-gmle01810067d08d1
aaaaattattcatcgatgcctcacttaattacttggaaaaataacctccgctgcgaatattattgacctacagcctacatgtaagtgaattagaatactttcacagcgtcaatgctaaaccacgcacatcgacgtatgcacaaaggactgtccgctttcgttctttcaacatagtgcgaagactaacctttgagccttaaacccacatctgactaaccagagactgaccggggtttacatgtaaaagaaatctccccgcattgctggttaccaagtacggatctcctatgcatatgccttcgctgataggcctaactggctatactacagtgcacagaccaggctatcttggacggcagaatccggctacctttgcacccatgggatctgcctgcataggatggtaatcaccagagagcctatggagcaacgcctgcgatgggtggggtccattcttaaa

SEQ ID NO: 13198 - DNA, 542 bp, Glycine max
  unsure at all n locations
  Clone ID: jC-gmle01810067d09a1
gctgaagcttcagtagatgctgttaactttgttttgaaagaactcgtaaggaaatcaatagctgaaacaaaggaactgaagcgcttcccaacatttcaagccgaactagctgcagcagcaaatgaggctttagaaaggttccgtgaagagagtaagaagacaactgttcggcttgtagacatggaatcttcatatctcactgtggatttcttccggagacttcctcaagaagtggagaaatctggaactcctgctgccacaaatattgaccgatatgcagaggggcatttcaggagaattgcatcaaatgtgtcatcctatatagggttggtggcagacacgcttagaaacacaattccaaaggctgttgtctattgtcaggtcagacaagcaaaacagtcattgctaaaccatttctacacccaaatagggaagaaagagggtaaacagctatcgcanatgttagatgaagaccctgcattgatggagaggagacaacagtgtgcaaaaaaggcttgaactatataaagcagcaagggatg

SEQ ID NO: 13199 - DNA, 454 bp, Glycine max
  Clone ID: jC-gmle01810067d10a1
ctcgagccgctcgaggcctgtgagaatcattgtcgatataaatatggacgtttatatagatatggatatggaaatggaaatagatactgctatttcgactattccatccagaaccttcgatgccctctgtgtaatcgccaacgttcccgcattatatgtggaatactggaaatactgctattcgttgccggtgctgccgaaatggtcattatgttattatggccatgcaaacttttgtttggggtgccactgtttattacactttttatacgtaaatggagaaaaagacatatgtcaatatacgaaagtattgaaaattatctagaacaaaataatttgatgcctattagatactcatacaaggaaattaagaagatgaccggaggttttaaagaaaagttgggtgaaggaggatatggctatgtgttcaagggaaaattgtgtagcgggtctt

SEQ ID NO: 13200 - DNA, 503 bp, Glycine max
  Clone ID: jC-gmle01810067d11a1
tatggatcccctaagtgggttagtactgtcgtcttttagacttgaacttggagaaacaggaaaatccatggaattagtaagagttggaagtgagcaggtgcttgttgttggaactagtctgtcttcgggtccacacacaatggccactggtgaagctgaaagttgcaagggtcgccttcttgttctttgtcttgatcatgtgcaaaattcagatagtggttcagtgacgttctgttcaaaggcagggtcatcatctcaaaaaacttcaccattccgtgaaaattgtacatatgctcctgaacagttatcgagcagtacccttggcagcagtccagatgataatagttgtgatggcatcaaactcgatgaaaatgaagtatggcagttccgattaacttttgcaactaaatggccgggagttgtacttaaaatctgtccttatcttgatcgctactttttggcaactgctggcgatgctttctatgttggggtttccctaatga

SEQ ID NO: 13201 - DNA, 509 bp, Glycine max
  Clone ID: jC-gmle01810067d12a1
cttgagtccatgatggaggggtgctcagattcagatgactacagcttatatgaggagcaaactgaggggtcaaggcaaggcctattgaacaataatgcaaacacagcttcattgaatatggatccaacagtttcatcagtggattcaattgtgtcagtcgcatctccattgcatatgaatgctactattcaatcctctggtcatgttagcagccacactgaggttgatgaagttgagttcttaaacaactgcagggatgctggggtggttcacattcttggaaacacagttgtgagggcaaggagggattcaagattccacaagaaaatagctgctgattatatatatgcatttctgaggaagatatgcagggaaaatagtgtgatcttcaatgttcctcatgagagtctattaaatgttggtcaggttttctatgtatagcctctaaacctcttggtaatttctgcgtgaacattgcgtttataggcacattcaatcagaagcatgtt

SEQ ID NO: 13202 - DNA, 53 bp, Glycine max
  unsure at all n locations
  Clone ID: jC-gmle01810067e02a1
cgcccacccccccccccctccccctcccggaagantatgangtngtatganga

SEQ ID NO: 13203 - DNA, 528 bp, Glycine max
  Clone ID: jC-gmle01810067e02d1
gaattaaacctattttcccttcatttcttttcacattagacaagagtaaaacaatgccgtacaaccaaatgaattacaaatcaaaggtcaagaaaactatacacaagaatgaaggacaaagcgaaacaagaacttatgctatggattaataattagactccccacgctaaaagaggcaagcagttctgaatgatgaaccactctctaatctctaacaagggttttccccaaaccattcagcacgcaaaacttcactggtcccacatggcctggaatattgcaagtctgtgcttcaaccaatgaaccatctctctgtcaagtggagaggtattaattacagcgtctaacattgggctaccaaaaaatttccgagaatttttgaatgaccaaatccggtctttgggccaaggtttctggggctgcttctacattcttgccagcatagatctgacagtccttggaccatacacacgatgccgagaaggcttctgagctttggcataaaaggaactgatgttttgtaatgac

SEQ ID NO: 13204 - DNA, 458 bp, Glycine max
  Clone ID: jC-gmle01810067e03d1
gcaaaaactgcattttcttggacttatctctctttcaactggaactggacgcatagatgctacattttgatcaaacttcaaagcatgaatgaaaaaaacaaaaaatttttttacagacttctgtatatatttgcaatgggtatttaatgagtacaaataaagattcaaacatgcgcgggaaaaattaacatggcatcttcatgtgtcaatgcttgttaaaaagataacctgataaataccagtttttgtaaagctaaaatatagagcacgaacgccgacctgagtagcataagcctctgctggctttcagttcggccagcaaaatgataaggaagcctctgatgaccttcgtaatctgacaaactatgtaacttatcagaggagcctttactgaaacgattcctaacagcagggttcgcctctgaattgctactctccggtcgtcggctagcccattc

SEQ ID NO: 13205 - DNA, 506 bp, Glycine max
  unsure at all n locations
  Clone ID: jC-gmle01810067e04a1
gaaagatgtttgagccctacaaagacaataaggtggagcttcttggacctaagttgttattcatagcccttaatttgggcggcctggcactaggtgtttggaagctcaatgcattggggcttcttcctacacacacatcagactgggtctcatccttggcacctgctcaggaggtggagttttcaggtgggggtgttaatttggggtgatttgcgagttttttcattcccagcttgtcttggagggaatttaagtaaacaaggacaaggattcaaggttggtggtcaacattatattctaatggttatgatggcccacgtgaagcatgactgatttccgatttcaaaaaatgttgtagtcattaaaattggactgggtttgtagtattagtttgaagatgctccgaataattaagatttttctatttatattccggattctaatatttgcacgttataatttcctatatctcttttataaggtttgatataaagaanaatgatgta

SEQ ID NO: 13206 - DNA, 489 bp, Glycine max
  Clone ID: jC-gmle01810067e04d1
agctaatgcttcataaatatacaagaaattcttgtacatcatttttctttatatcaaacctgataaaagagatataggaaattataacgtgcaaatattagaatccaaaatataaatagaaaaatcttaattattcggagcatcttcaaactaatactacaaacccagtccaattttaatgactacaacattttttgaaatcggaaatcagtcatgcttcacgtgggccatcataaccattagaatataatgttgaccaccaaccttgaatccttgtccttgtttacttaaattccctccaagacaagctgggaatgaaaaaactcgcaaatcaccccaaattaacacccccacctgaaaactccacctcctgagcaggtgccaaggatgagacccagtctgatgtgtgtgtaggaagaagccccaatgcattgagcttccaaacacctagtgccaggccgcccaaattaagggctatgaataacaact

SEQ ID NO: 13207 - DNA, 509 bp, Glycine max
  unsure at all n locations
  Clone ID: jC-gmle01810067e05a1
gcagtataccctagctagcccaagcagaaaactttactttgttacgccgccccctctcctctgttgtcttacgacgttagccatggaagtctcaaaaaaagaagctcgagtccgttgttcatcctcgtctgcatcctcatcgactccaccttcttcatcatccagcccactctctcccgcatgggcccatccgaggcggcccacacattcctccctcgaaccgggcttgcccgcttcagcggcacaaggcctcgcacgggccgtattctggtcaggatcagcggcaggaggcagcgaatcatcgtcaccgacgacacgaggcttcgtggggagccacctcgtcgacaaactcatcactcgcggtgacgacatcatcgtgatcgaaaatttcttcacaggaagaaaagagaacctggtgcatctgttcgggaaccctaggttcgagctcattcgccacgtcatcgntgagccgattctgttggaggtcgatcagatctaccacctcgcgt

SEQ ID NO: 13208 - DNA, 524 bp, Glycine max
  unsure at all n locations
  Clone ID: jC-gmle01810067e05d1
cattcaaatgatatcacaatgaatttaactttgcataaggggcaaatataacatttacacacagtatagagccaactgaataacaagcacatacatatgctttaacaattgaattccttagtctgctttaaggatagcaaatatgcggccatgaaacacgcaataccctccactatatcttcttgttctgagtcaaaacgttcactttcccaagaattactttcttctcaacaccagcaccccgatgataatccatggccaacgtctccacaatccttttcccttcatcgtaacaactcctctcaccaattggattcacatttccccagtaagtctctttctgaggatgctccaacggatcaccgtaaacctaactagtactagtaagcagaaacctagccccaattcttttcgcaaggccaagcatgttaagcgtggccatcacattcgtcttgatggtcttcatggggttgtattngtagtgcaccggcgacgcgggacacgcgaggtggtggatctgatcg

SEQ ID NO: 13209 - DNA, 350 bp, Glycine max
  Clone ID: jC-gmle01810067e06a1
atcaaatttaataaccaaactcttccctgtagttgtgttgaatgctaaaaactcaacaggttaatgattacactaactgatgactgtcacctaacttcaagagcgagacaagccggaccttacagatattaatgcatctagatcaatctttatcactatgcttctctattgactcatcggattaccatcaacgcttaggacatataatatgatatgtacggagaaacaagcatgtcacaaagacataactcggatcctgggatacaaattgcagctcatagtgagcagaggacggggaatgctcactcatcaataaaggacgggattttgcattacgagggagaactacg

SEQ ID NO: 13210 - DNA, 383 bp, Glycine max
  Clone ID: jC-gmle01810067e06d1
gactggaaactgatatcaatataagaaaaagcgatcctatgctgactagttcttatccaatacatgaacacaacgaaccgtttgataaactggcctaatggtaacggtcgtaaatacctatcgatacagacactaggcatagcattactatccttatgaaatgatgcagttaaatcattatccgatataaccttatctggttgatcatgcaggagaaatataattaggagcattgtgcataccttgggagctagaacagaagatagaacattttatatggaatatggcgcatgaaagaaaaagaacaatggagttgcctttatttagaacatatccactgtttgatgcctagctcctgatccaacgagagaactgtatagcaa

SEQ ID NO: 13211 - DNA, 428 bp, Glycine max
  Clone ID: jC-gmle01810067e07a1
gtttattaagctttgatttgattccttcgtttagaatttgagttgagactgaattggggttgttcaattgtgtatgaagttttttttttatttgattaattcattttgatgcttacaaatacagatgctgttttgaatgtgaatgtttggtttttggttttatttgaattggtggaatttggagcaggtgaggggccatggataatgaagatcttcctgacgctgatgatgattctgaactcctccaagaggatgaggatggtgattttgtgcacaaattcactgctcataccggggagttgtactcagttgcctgcagcccaacaaatgcagacttggtggctactgcaggcggtgatgacagaagatttttttggaaaatggccaaggggattgggcttttgaggttcaaggtcacgaagaatctg

SEQ ID NO: 13212 - DNA, 566 bp, Glycine max
  Clone ID: jC-gmle01810067e07d1
caaagaaaaataaatttaataataatagaacatagaaaaataatttcttacaataatatatgtacaattaatcggaaaaaaatgcacaaatagagacaacagacaaattggtatcttgtaacttctaactctgctcaagatgggtttagatcccgtgaggtttggccttgccatcttgagagaagaaatcttgctagtgggcttaaattgctatttgaattatgttccttgttttgttgtttcttcctgttatcagcctctgcatttcgggtttcttgagctgacttggtcttgctgaatagttggtctgccagtccctgcaggtccttcaatgaatcttcctttgaacttgccaatcgctgaagcaactttttgacaaaaacatcacaggatttaggttttgtaccctccatgtttattaaagaattgataactgccctcacgagttctggatcatcagcaatagcctcttttaatgaaggaataagtaaaacagataatggcaccgatgatgacattattttagcactttcttcgccatcactagcatgatgtgatcttaacat

SEQ ID NO: 13213 - DNA, 512 bp, Glycine max
  unsure at all n locations
  Clone ID: jC-gmle01810067e08a1
ggggnnnnnnnaaggggccgatcagagtcgggataccaaaaaccacgtatgacgcacgctgccctcatacgtaagcttcggaatctaggcgtcgatgatcagaggcatcctcatattgctgccatagacctgctagatacttctctgcctaaaccgcgtacattacgtgacttttcaaagacacgagtactatggactggatagacacactaacatagttataatgatgatgggcaagcgcattcgtgtcgaagtatcagataacacctcaaataccaagcgacttctattcttgcacttctcaaacttgttcttccatggaatccaggaattgggttctcaaacatgcatcagcactactggctctcttacttaagctaggatgaacaagctggaaactgtgactgagctcactcttggactctgtggttaccaacaccacaggactacacatcaggaaccactctggtatcctagttcaggatgataaacagactaattttgaatgattg

SEQ ID NO: 13214 - DNA, 484 bp, Glycine max
  Clone ID: jC-gmle01810067e09a1
tggaattgctgctgccgatgctacagatgctgctagaagcgcttctgatattgtcctcactgaacctggtctgagtgtcattattagtgcagcgctcaccagcagggcaattttccagaggatgaagaactatactatctatgctgagtcaatcaccattcgtattgtgttcggtttcttgattattgcgttgatctggaagtttgattttgcacccttcatgggttcgattattgccatactcaatgatggtaccattatgactatatccaaggatagagtgaaaccatcaccactttctgatagctggaaactgagggagatatttgctactggcgttgtgctaggaagttacatggcactaatgacagtagtatttttctgggcaatgaaagataccaacttgttctcgaacaagttaggtgtgaggccattgatagatagccccgatgaaatgatggcagccttataccttcaagtcagc

SEQ ID NO: 13215 - DNA, 433 bp, Glycine max
  Clone ID: jC-gmle01810067e10a1
gggccataagttcactcctcagcagtttggaggagaggcaaagagctgagaagagaaaccgagaggccaagggccataagttcactcctagatggtttgatttaacagatgaagtaactcctaccccttggggtgacttggaagtttaccaatacaacggtaaatatacccaacattgtgctgccgttgatagttctgagtgcattgaagtgcctgacatcagaccagaattcaacccttggcaatatgataatttggatgctgaatagtgagcatccttgtggaattctttctattttttttaaatatcattttgttattaagtttgtaatgtaatcttgattggaatgcttgaaatttggttttgtttttgggttgttttatcactgtagtatttgattaattaatagtagctatgttagttcatcagttc

SEQ ID NO: 13216 - DNA, 581 bp, Glycine max
  Clone ID: jC-gmle01810067e11a1
cttaaattttccaagtttactcttggtactgtagctccacagtttacaggcgtgtctataattgaggatggaggggatggtgttacaatggagttagaaatgcaatgggatgggaacccaagtattatacttgatattaaaactcttcttggtgttgcactaccggtgcaggtaaaaaatattggatttacgggtgtttttaggttgatcttcaagccgttagttgatgaatttcctggttttggagctgttagctattcattaaggcaaaagaaaaagttggattttactctaaaagtcattggtggcgacatatcagcaattcctggattatatgatgcaatagagggggcaattcgggatgctgttgaagattctattacatggcccgtgagaaaagttgtacccattttgcctggagattacagtgatttggagttgaagcccgaggggatattagaagtaaagcttgtgcaagcaaaggaattaacaaacaaggatatcattggaaaatcagatccatatgccgttgtatacatacgggctttacgcgaaagaatgaagaaagcaaacaattaaca

SEQ ID NO: 13217 - DNA, 584 bp, Glycine max
  Clone ID: jC-gmle01810067e12a1
ctcgtaatgttcgtttcgattttttccaaaagcgcctgcgtttcttcccgagcgaaatcttcttttcttccacgaaccttggattcatttcagtagcatctttcagggtttatattccattgaattttacaactttttattttggtaattccattattgagaagccgaggcattggggtaaaggggagaactggttttcaactgtgaactgattgaattaccttgtacggcagtttcaagaatggtctgtccgggttcaacgaaattgtctcatgacgttaggttctacagtaatactggattctgtagtttccatcataaccggatgggggtcggtcgattacatttggtcaccttaaatctttcaccatgtagtttgaagcaagactcttcagcactccatcttttaagtagaccacatgccccaataaggcatgtgccttccagatgtaatgttttcatttgtcagtctgtcctaataccaggtggaggaagtggaactccactgatgaaatctgctagtgttattttaacaaggtcatatgatgctctacaaggaaaccctacttttcttcaattgatcc

SEQ ID NO: 13218 - DNA, 441 bp, Glycine max
  Clone ID: jC-gmle01810067f01d1
gttgggaagccaaaacttttattgaaacccttttaggaggccatattctttatataactccccctttacattttacaaggtgggtgaaccaacaaagacttttgccaaaaatgctggaaggggccaaaaatccaccgcagcgccaatttttaaaatatgccaaaaatttgggatcaaaacatttggagttttttgaaaactaacaatattttgtccacccccttggccatagggaataattttttcgggggagggggaagcaactacatcctttggaagctcccgaccagctttgtccacacccttgaatatacccaaataactaatttttttttcaacaaaaatttttacagttttttcattgggtgcactaaaaactcctgtgagggggcctccaccgcgccccgcagtattttaaagagccaccgttggaaacttttt

SEQ ID NO: 13219 - DNA, 415 bp, Glycine max
  Clone ID: jC-gmle01810067f02d1
gctgaaataattgtttatttgactcaatatataccacattttaaacaaattagtgtactattgggcatgcacagcttttaacatcatgtgggtacattaaaatctccagctatggacactgaaattgagaattcgattgatgtggaatctgcaaaccaaggtgtccaaactccatgggattgccagcccaaatatatttttttgtttaaagggatagctgttcttggcatgccaagaaccattggtgcatgtccttccccggtggtgcagccggatattaagagagggaattatttcttggcggaattcttatagaagcaaagctttgagtgcaaaatgttgaacatcaatcagaccaccctccattagtcctgcaggtacaggtgattcctggaaactcgacactgaacttttt

SEQ ID NO: 13220 - DNA, 496 bp, Glycine max
  Clone ID: jC-gmle01810067f03a1
ggcaatccgaaattttcttgaatgatattaaagaaaagagtattctaaaaaaattcatagaatttgaagaactgtttttcttagatgacatgttaaaggaatgtccggaaacacatctacaaaacctgcgtactggaatctataaagaaacaatccaattaatcaaaacgcacaacgaagatcgtatgaatacgattttgcacttctcgacaaatataatttgtttctttattctaagcggttattctattcttggtaatcaagaacttgttcttattaactctttggttcgagaatttatatataatttaagtgacacaataaaagctttttctattcttctattaactgatttatgtataggattccattcaacccatggttgggaactagtgattggtttcgtctataaagattttggatttgctcaaaatgatcaaattatatctggtcttgtttccacttttccagtcattttagatacaattttaaaata

SEQ ID NO: 13221 - DNA, 588 bp, Glycine max
  unsure at all n locations
  Clone ID: jC-gmle01810067f03d1
accatacccgctgctgtagcattatacacattattattactcttgctcccgtcaagataaatctgaccccttcccctgttcccacctacgtatataggatattttaagaaatgaacatctctcttagtagtgggatccggggaaagaataggaaaggttatttctttatatttttgaccaggaacagggcctaccacaagaatatttttttttgtaggacgatagttttgaaaagacagattgcctatcttctctttaatctcaggcgaaatacgatcggggggtgccaattcaaaaccttccggtaaaataagaacagcccccacattcaaagctccctttttaccattagcaagaacttgtttcacttgcatatcataaggaattcgaacaactgcttcaaatacagtatcaggaagtaccgcttgtggaacctcaatatccacgggcttattagctaaatggcaattggcacagacaatacgaccggttgcttctcggngattttcataaccctgctgtgcaaaaattggatatgcgtttgaaatgggtgctcgaattatatatatatcatgatcgatatggaaa

SEQ ID NO: 13222 - DNA, 536 bp, Glycine max
  Clone ID: jC-gmle01810067f04a1
acggaatgttcaaccatcgcaaaacttaaaaattggaaggcgagtgaagacacagagagagacagagagagacagagaaacaaagaaaagaagagagagagagagagagagagagagagagtaaggcatggctgggttactggcatgggcggtaggaggtggcggaggaaaagaagcggaggacgacggcatcatcccaatcctgttttctgcagatcagcaaaagtacgtcaacgaactcgatcagaaggcgagctctctccggcgttggattcatgatctacggcaaagattgtctacccaggacatatatcagagccttccacaccttcacgctcactgcctggcctacaacgccggcctcgccctacaattaaactcccactccaccacgcgccaacaggcccaacttagagaggtgacgttgaaggaagagaatgctgcgttcgaaaatgcaatatcagattgtgagaataaaataaaggagaaattgcaggaggctgatttactgagggaaaagttgaaggagatggatg

SEQ ID NO: 13223 - DNA, 292 bp, Glycine max
  Clone ID: jC-gmle01810067f04d1
ggcaaaaactggattttctgggacttatctttttttcaactgtaactgtacgcatagatgctacattttgatcaaacttcaaagcatgaatgaaaaaaacaaaaaaatttttttacagacttctgtaaatatttgcaatggatatttaaggagtccaaataaagattcaaacatgcgccggaaaaattaacatgttattttcatgtgtcaatgcttgttaaaaagataacctgataaataccagtttttgtaaagctaaaatataaagcacgaacgccgacccgagttgcat

SEQ ID NO: 13224 - DNA, 557 bp, Glycine max
  Clone ID: jC-gmle01810067f05a1
ctcgagccgaatcggctcgagtagagagaaagatgggtagtagtgaatatcagactctgcacattttcttctttcccttcttggctcatggccacatgataccaaccgtggacatggccaaattatttgccgaaaagggtgtgaaggccactataatcaccacacccctcaacgaacctttcatctacaacgccattggaaaatccaaaactaatggcaacaaaatccacatccaaaccatagagtttccttctgcagaggctggtttacttgatggctgtgaaaataccgagtcagtcccttccccagaattgttgaatccgttttttatggccacccatttcctccaagagccacttgagcagctactgcaaaagcaacttccagattgcattgttgctgatatgttcttcccatgggcaactgattccgccgccaaatttggaattcctaggctcgtcttccatgggactagtttcttctccttgtgtgttaccacgtgtatgccattctatgagcctcatgacaaatatgcttcttctgattctgattcgttc

SEQ ID NO: 13225 - DNA, 467 bp, Glycine max
  unsure at all n locations
  Clone ID: jC-gmle01810067f05d1
aaacttaagttgattgagttattataaatagtatttgattttcactagataaaaaaaaattaggtcgacaggattttaaactattttagcttaaatcattaaaatttagataacaaataatcttgagagtaaatgcatgcatagtgttgatggtggtatattagtggctcaacgaacttaatccctcaattaaagctttaaaatcagagttggatgatccaccttcttccatggcccgcctagcttgatgtgaaagcacctttgctttgttcctcatttcaatggcttcttcccctgtcattatcctcttcactgccttctccactgcatcacatgaaatactatctccctgcattccaagccatgttttagcaccaacaggtaccccaattntaaggacctcaatcaccaacttctcattgaaaaattggtcggcgaaaataggccaagtgaccatgggaacccct

SEQ ID NO: 13226 - DNA, 583 bp, Glycine max
  Clone ID: jC-gmle01810067f06a1
ctcgagccgaatcggctcgagtagagagaaagatgggtagtagtgaatatcagactctgcacattttcttctttcccttcttggctcatggccacatgataccaaccgtggacatggccaaattatttgccgaaaagggtgtgaaggccactataatcaccacacccctcaacgaacctttcatctacaacgccattggaaaatccaaaactaatggcaacaaaatccacatccaaaccatagagtttccttctgcagaggctggtttacttgatggctgtgaaaataccgagtcagtcccttccccagaattgttgaatccgttttttatggccacccatttcctccaagagccacttgagcagctactgcaaaagcaacttccagattgcattgttgctgatatgttcttcccatgggcaactgattccgccgccaaatttggaattcctaggctcgtcttccatgggactagtttcttctccttgtgtggtaccacgtgtatgccattctatgagcctcatgacaaatatgcttcttctgattctgattcgtttctcattcctaacttcccgggcgagaa

SEQ ID NO: 13227 - DNA, 376 bp, Glycine max
  Clone ID: jC-gmle01810067f06d1
attaaaacttaacttgattggggtattataaatagtatttgattttcactagataaaaaaaaattaggtcgacaggattttaaactattttagcttaaatccttaaaattcacataacaaataatcttgcgagtaaatgcctgcatagtgacgatggtggtatattagtggctcaaccaacttaatccctcaattaacgctttgaaatcacagggggatgatccaccttttttcatggcccgcctagcttgatgtgaaagcacctttgctttgatcctcatttcaatggcttcttcccctggcattatcctgattactgccttctgcactggatcacatgaaatactatctccctgcattccaagccatgttttag

SEQ ID NO: 13228 - DNA, 514 bp, Glycine max
  unsure at all n locations
  Clone ID: jC-gmle01810067f07a1
gtcccatacttcttcctttaccacatgccttggcattgcgcatgattttacaattgggtgttaaaccttcttggtttaacacttgcagtacaaccatagaaaagagacctcacttaattccaggaactccttcatctaaaggggatcttcgcacctacatgatcgacataccacctcttggcgactcagtggtgcctgagatgctcttaaaagtattggaaccatatagaaaagaaggttgcatgcttgatgatgagagagcaaagctgtatgctagtattgtggataaaggatgtgccgcacggtttgcatttgcagctataatatgtggtgaatcctcagaagctctgatttggcttcagctgcctcaggcacttaaacatttgttgaacaaggtattgagagagccttcaccaaaagaattcacagcagcacctatctctgatgttgatgatgagacatctctactatctncgatatcatcaaagggaaaaccgacggaagaacaagaaga

SEQ ID NO: 13229 - DNA, 537 bp, Glycine max
  Clone ID: jC-gmle01810067f07d1
atagttaccacaattgatttaacatagtattctcacgttgcatgcaaatatagatgcaactgttttcgtgtcatataaatcaaataacatacaaatactatttaataatttgttgcctacaaaattttatgtaagagctaaacggggtcaattaccccatgtaattgcaactttaagaagttcatgtaaaccattctatctgtgcaatcaataggaatgtgtttaataagggtctcaggtatctgcctacctccaagactccatgccgatctatgtcatacccttcccaatgttttccatcatacactttttacaacaacattagcaataaaagcatccaatactctgacactagagaatgcaggcgccaggtagtactggaacggcaatcagcctacaacttttcatggcaagaattaatcaacccaacagctcttccatgaatatagatgagaaaattgaatccatttcatcaagccctacacttattcagagaaaggctgtgaatccatgcatagatgcaccaacttctttgat

SEQ ID NO: 13230 - DNA, 511 bp, Glycine max
  Clone ID: jC-gmle01810067f08a1
gaaggtgatgagagtcgcgagcagcagcagcagcaacgggttgagcgtggtagccaaaatgagaagaagcagcagcgtttctttgttctccgttcgagcctgccatgatctccctcatggaccttcctgcatctacgttggccccctccacaccgcaacccaagagaccctcgaagctctttactctcaggtcagctcaatcaatttaacttaattacccttctacgatacatttgtttccctagctgctcttaatttttcttaattaagcaggcacgggatgcatattacagcggagagcctttgattcttgatgacatgtttgatagactagaggtatctatctatgtctatctatccatatctttcttcatttcaccactcatctattcactcatcttatggaaaaacacgtgaagcttaagtggtatggctctaagtcagttgtcaagtatcccagatgcaggatcagaaggcattcaacatatgctgatgctgactgaatttttct

SEQ ID NO: 13231 - DNA, 383 bp, Glycine max
  Clone ID: jC-gmle01810067f09a1
aggccatatttatactactgagtagatcgtgagcaaggcaatgggctcccaagataatccgtaaggccataggccatatgaaggctaaagaaaggcgaggtgaaacaaatggagtagctccttctcggtgtggagactggggagtaaaccaacacgcctgtatgtgtacccaacaaactgccgtcgatccttgcctcgagagggttgatgagcctgacaacaaaccaaagaatacccgatggcaccctgatgagttggatgctgataaatgagcatgcaagtgggggactcaaggtgttgggggaacaaaaggtagagatctagtgtgggatgataggaggattggaaagatgactattggtttccgattaggtgttgttgca

SEQ ID NO: 13232 - DNA, 492 bp, Glycine max
  Clone ID: jC-gmle01810067f10a1
cctatgggtgctcactccttgctcttaaccctttttctctacaccaacagtggtctcactggctggtctctccacagaactgtatagagagagatggcagctgcaacatctggtgctgtgttaaatgggttgggatcttgcttcttgagtggaggaaacaggagccaaacccttctggccactgctattggaggcaaaggtggtgctgctgctgttactgttagtcctagaagactcattgcggcagctgctgctgcaccaaagaaggcatggctccctggtgtcagaggtggtggcaacctcgtcgacccagaatggcttgatggatcgctaccaggtgactatggctttgacccactaggccttgggaaggacccagcattcctcaaatggtgcagagaagctgagctgattcatgggagatgggcaatggctgcagctctaggaaactttgaggggccaggcttggagtggagttccatggtttgaagc

SEQ ID NO: 13233 - DNA, 113 bp, Glycine max
  unsure at all n locations
  Clone ID: jC-gmle01810067g01a1
cgcccacccccccccccccccccctcccaaaagaatatgaggtngtttggangagtangtaagntgggaattnggtttgagttggaatggaanaagntgggaagnaaggaatt

SEQ ID NO: 13234 - DNA, 560 bp, Glycine max
  Clone ID: jC-gmle01810067g01d1
cctacacaaggaagcattaacttttcttattttagagttaacaaattcgggctccctaatttactttcaagccatttacgtgtcatggcacaactaaaataactgattagttaaccaaattttatcaagtacactgcaacaacaatggaacagagctaacaaacaaaaaagacaaaattcatttgcaacacaaactttctactatccatttttcaatggctttcaaagttccaagccagcaaactattcatatcagtcactttcggcttcctcgcttatctttcaaatccgcgtccctctggatgtggtcaagaatcaaaagcctaggtccaggaggaatcctcacatctctgagagcactgtctgtgagtaaaggcagagtgttgtctgttaacaagcctttcttgaaattcttttcagaactctgaaggccaagattggtcaacatgtgtctcgttttagcatagtgagtatcttcagcaggtggttgagaaaacttttgtcctatctggaaaagtccaccttgaacaagtgcaaagaaaagtccagaagtgagtgca
